(19) United States
(12) Patent Application Publication
(10) Pub. No.: US 2008/0233582 A1
(43) Pub. Date: Sep. 25, 2008

(54) SINGLE NUCLEOTIDE POLYMORPHISMS ASSOCIATED WITH SUSCEPTIBILITY TO CARDIOVASCULAR DISEASE

(75) Inventors: Monika Stoll, Muenster (DE); Gerd Assmann, Munster (DE); Helmut Schulte, Munster (DE); Werner Kroll, Wayland, MA (US); Stephan Schwers, Koln (DE); Christoph Petry, Monchengladbach (DE)

Correspondence Address: SIEMENS CORPORATION;INTELLECTUAL PROPERTY DEPARTMENT, 170 WOOD AVENUE SOUTH, ISELIN, NJ, 08830, US

(73) Assignee: Siemens Healthcare Diagnostics Inc., Tarrytown, NY (US)

(21) Appl. No.: 12/019,651

(22) Filed: Jan. 25, 2008

Related U.S. Application Data
(63) Continuation-in-part of application No. PCT/US2006/029449, filed on Jul. 26, 2006.
(60) Provisional application No. 60/702,760, filed on Jul. 26, 2005.
(60) Provisional application No. 60/703,219, filed on Jul. 27, 2005.
(60) Provisional application No. 60/708,719, filed on Aug. 15, 2005.
(60) Provisional application No. 60/742,407, filed on Dec. 5, 2005.

(30) Foreign Application Priority Data
Jun. 21, 2006 (EP) 06012722.2
Apr. 18, 2007 (EP) 07251633

(51) Int. Cl. C12Q 1/68; C07H 21/00

(52) U.S. Cl. 435/6; 536/24.31

(57) ABSTRACT

The present invention provides SNPs, polymorphic variants, and haplotypes associated with cardiovascular disease. The invention also provides methods for detecting the SNPs, polymorphic variants, and haplotypes. The invention also provides methods for determining an individual's genotype with respect to one or more polymorphisms and/or haplotypes associated with cardiovascular disease. The invention further provides methods of determining whether an individual has or is susceptible to development or occurrence of a cardiovascular disease or event. The methods are useful for providing diagnostic and/or prognostic information, selecting therapeutic regimens, etc. The invention further provides reagents and kits for practicing the methods.

### CROSS REFERENCE TO RELATED APPLICATIONS

[0001] The present application is a continuation-in-part application of International Application No. PCT/US2006/029449, filed Jul. 6, 2006. The present application is co-pending with, shares at least one common inventor with, and hereby claims priority to U.S. Provisional Patent Application Ser. No. 60/702,760, filed Jul. 26, 2005. The present application is also co-pending with, shares at least one common inventor with, and hereby claims priority to U.S. Provisional Patent Application Ser. No. 60/703,219, filed Jul. 27, 2005. The present application is co-pending with, shares at least one common inventor with, and hereby claims priority to U.S. Provisional Patent Application Ser. No. 60/708,719, filed Aug. 15, 2005. The present application is co-pending with, shares at least one common inventor with, and hereby claims priority to U.S. Provisional Patent Application Ser. No. 60/742,407, filed Dec. 5, 2005. The present application is co-pending with, shares at least one common inventor with, and hereby claims priority to European Patent Application Serial Number 06012722.2, filed Jun. 21, 2006 and European Patent Application Serial Number 07251633, filed Apr. 18, 2007. Each of these applications is incorporated herein by reference in its entirety.

### BACKGROUND OF THE INVENTION

[0002] Cardiovascular diseases and conditions are a major cause of morbidity and mortality throughout the world. These diseases and conditions include, but are not limited to, the various disorders of the heart and the vascular system typically referred to as myocardial infarction (heart attack), atherosclerosis, ischemic heart disease, coronary artery disease, congestive heart failure, atrial and ventricular arrhythmias, hypertensive vascular diseases, and peripheral vascular diseases.

[0003] Atherosclerosis is a principal causative agent of heart attack and stroke. Atherosclerosis is a complex disease involving many cell types and molecular factors (for a detailed review, see Ross, Nature 362: 801-809, 1993; and Lusis, A. J., Nature 407, 233-241, 2000). The process involves the formation of fibrofatty and fibrous lesions or plaques in the vessel wall, preceded and accompanied by inflammation. Such plaques can partially or fully occlude the blood vessel concerned and thus restrict the flow of blood, resulting in ischemia. Ischemia is a general term that refers to a condition characterized by inadequate blood flow to an area of the body such as an organ or tissue, resulting in an insufficient oxygen supply. Ischemia is most frequently caused by a narrowing or complete obstruction of the arteries and may occur in any organ or tissue. The most common cause of ischemia in the heart is atherosclerotic disease of the coronary arteries, also referred to as coronary heart disease or coronary artery disease. By reducing the lumen of these vessels, atherosclerosis causes an absolute decrease in myocardial perfusion in the basal state and/or limits appropriate increases in perfusion when the demand for flow is augmented. Coronary blood flow can also be limited by arterial thrombi, spasm, and, rarely, coronary emboli, as well as by ostial narrowing due to luetic aortitis. Myocardial ischemia can also occur if myocardial oxygen demands are abnormally increased, as in severe ventricular hypertrophy due to hypertension or aortic stenosis. Severe and prolonged myocardial ischemia can lead to myocardial infarction. The triggering event for a myocardial infarction is often the rupture of an atherosclerotic plaque, leading to a blood clot that causes a sudden decrease in vessel lumen.

[0004] Approximately half of all first myocardial infarctions are fatal. Furthermore, in many instances coronary heart disease develops silently, and there may be no warning symptoms, such as chest pain, prior to onset of the heart attack. The development of effective strategies to prevent coronary artery disease and to inhibit its progression is therefore of considerable importance.

[0005] A number of approaches are currently employed for the treatment and/or prevention of cardiovascular diseases, e.g., atherosclerosis and coronary artery disease. Pharmaceutically based therapies include lipid lowering agents (e.g., statins), aspirin and other anti-platelet agents, and anti-hypertensive medications. Lifestyle modification also plays an important role since it is known that factors such as smoking, obesity, and a high fat diet increase the risk of myocardial infarction.

[0006] It is thought that genetic factors contribute to the development of atherosclerosis and coronary artery disease (Scheuner, M T, Genet Med. July August;5(4):269-85, 2003). An individual's genetic makeup is therefore a significant determinant of the likelihood that he or she will suffer a myocardial infarction, particularly at a young age. However, while a “family history” of heart disease is a significant risk factor, many heart attack victims lack such a family history and, conversely, not all individuals with such a family history do indeed develop the disease. Thus the nature of the genetic contribution to cardiovascular disease is unclear.

[0007] There is a need in the art for methods and accompanying reagents that can be used to better assess an individual's susceptibility of developing cardiovascular disease. The need for such methods and reagents is especially acute in view of the fact that, atherosclerosis frequently remains clinically silent in its early stages and yet is often evident at post-mortem examination even among individuals in their teens and twenties (McGill, H. C. Jr & McMahan, C. A., Am. J. Cardiol., 82, 30T-36T, 1998).

### SUMMARY OF THE INVENTION

[0008] The present invention is based at least in part on the identification of single nucleotide polymorphisms (SNPs) that are informative with respect to cardiovascular disease. In particular, the invention is based in part on the discovery that particular polymorphic variants of the polymorphic sites at which these SNPs are located are associated with an increased risk of cardiovascular disease, e.g., acute coronary events such as myocardial infarction. In certain aspects, the invention provides methods for genotyping an individual comprising steps of: providing a sample obtained from an individual in need of testing for presence of or susceptibility to a cardiovascular disease and detecting a polymorphic variant of a polymorphism listed in the column entitled “dbSNP_RS_ID” in Table 1 and/or Table 2.

[0009] Table 1 is included in International Application No. PCT/US2006/029449, U.S. Provisional Patent Application Ser. Nos. 60/702,760, 60/703,219, 60/708,719, 60/742,407, and European Patent Application Serial Number 06012722.2 and its contents are part of this specification and is incorporated herein by reference in its entirety. Table 2 is included in European Application No. 07251633 and its contents are part of this specification and is incorporated herein by reference in its entirety. The contents of Tables 1 and 2 are described in detail below.

[0010] In a certain embodiments, the invention provides methods for testing the presence of a polymorphism in the sequences of a gene listed in Table 1 and/or Table 2. In certain embodiments, the invention provides methods for demonstrating a link between particular allelic variants of the polymorphisms listed in Tables 1 and 2 and a susceptibility to cardiovascular disease by showing that allele frequencies at the polymorphic sites differ significantly among individuals who suffered a myocardial infarction at an early age (<50 years of age) as compared to individuals who did not suffer a myocardial infarction but had a similar pattern of classical risk factors. An individual having a particular allelic variant or combination of allelic variants, e.g., having a particular genotype with respect to one or more allelic variants is considered to have “susceptibility to cardiovascular disease” if (i) the individual is more likely to develop a cardiovascular disease or manifest a symptom or sign of cardiovascular disease than a comparable individual having a different genotype with respect to those allelic variant(s), wherein the comparable individual is otherwise similar with respect to one or more (e.g., all) of the classical CVD risk factors, and/or (ii) the individual is more likely to develop a cardiovascular disease or manifest a symptom or sign of cardiovascular disease than an individual of a similar age (e.g., up to 5 years older or younger) and the same sex but having a different genotype with respect to those allelic variant(s). It will be appreciated that various cardiovascular diseases are interrelated, and the existence of a particular cardiovascular disease or condition may contribute to the development of other(s). For example, an individual who has suffered a myocardial infarction (“MI”) may have an increased risk of having a cardiac arrhythmia and may have an increased risk of heart failure.

[0011] In certain aspects, the invention provides methods of diagnosing cardiovascular disease or susceptibility to development of cardiovascular disease in an individual, said method comprising determining one, more than one, or all genotypes in said individual of the polymorphisms listed in Table 1 and/or Table 2.

[0012] In certain aspects, the invention provides a variety of reagents and kits for use in detecting a polymorphic variant of a polymorphism listed in Table 1 and/or Table 2.

[0013] The invention encompasses the recognition that the ability to classify individuals who are at increased risk of myocardial infarction on the basis of their genotype allows the establishment of a correlation between genotype and response to particular therapeutic regimens.

[0014] The invention also encompasses the recognition that an integrated assessment of an individual's risk, and/or an integrated assessment of the appropriate therapeutic regimen for a particular individual, can include an assessment of both genetic and of non-genetic factors, which can be combined in a variety of different ways. The availability of methods and reagents for evaluating the genetic factors associated with cardiovascular disease allows a more accurate assessment of whether an individual would benefit from various therapeutic interventions such as administration of particular pharmaceutical agents and/or encouragement of particular lifestyle modifications.

[0015] This application refers to various patents, patent applications, journal articles, and other publications, all of which are incorporated herein by reference. In addition, the following standard reference works are incorporated herein by reference: Ausubel, F., (ed.), Current Protocols in Molecular Biology, Current Protocols in Immunology, Current Protocols in Protein Science, and Current Protocols in Cell Biology, John Wiley & Sons, N.Y., edition as of July 2002; Sambrook, Russell, and Sambrook, Molecular Cloning: A Laboratory Manual, 3^{rd} ed., Cold Spring Harbor Laboratory Press, Cold Spring Harbor, 2001; Harlow, E., et al., Antibodies: A Laboratory Manual, (Cold Spring Harbor Laboratory Press, 2nd ed. 1988); Hardman, J., Limbird. E., Gilman, A. (Eds.), Braunwald, E., Zipes, D. P., and Libby, P. (eds.) Heart Disease: A Textbook of Cardiovascular Medicine. W B Saunders; 6th edition (Feb. 15, 2001); Chien, K. R., Molecular Basis of Cardiovascular Disease: A Companion to Braunwald's Heart Disease, W B Saunders; Revised edition (2003); and Goodman and Gilman's The Pharmacological Basis of Therapeutics, 10^{th} Ed. McGraw Hill, 2001 (referred to herein as Goodman and Gilman). In the event of a conflict or inconsistency between any of the incorporated references and the instant specification or the understanding of one or ordinary skill in the art, the specification shall control, it being understood that the determination of whether a conflict or inconsistency exists is within the discretion of the inventors and can be made at any time.

### BRIEF DESCRIPTION OF THE DRAWING

[0016] FIG. 1 presents characteristic group statistics of individuals (study subjects) that were studied to identify SNPs and polymorphic variants associated with cardiovascular disease classified according to the number of subjects in different PROCAM risk categories. The column labeled “PROCAM” refers to controls, and the column entitled “MI-Patients” refers to cases. Mean and standard deviation values of PROCAM and MI-patients are shown in the right two columns.

[0017] FIG. 2 presents characteristics of individuals (study subjects) that were studied to identify SNPs and polymorphic variants associated with cardiovascular disease. The column labeled “PROCAM” refers to controls, and the column entitled “MI-Patients” refers to cases. The average values for various PROCAM risk factors and the overall average PROCAM score are provided. The percentage of each group exhibiting the particular risk factor is shown.

[0018] FIG. 3 presents risk profiles of individuals (study subjects) that were studied to identify SNPs and polymorphic variants associated with cardiovascular disease. The column labeled “PROCAM” refers to controls, and the column entitled “MI-Patients” refers to cases.

### DEFINITIONS

[0019] For purposes of convenience, definitions of a variety of terms used herein are presented below.

[0020] The term “allele” which is used interchangeably herein with the term “allelic variant” refers to alternative forms of a gene or a portion thereof. Alleles occupy the same locus or position on homologous chromosomes. When an individual has two identical alleles of a gene, the individual is said to be homozygous for the gene or allele. When an individual has two different alleles of a gene, the individual is said to be heterozygous for the gene. Alleles of a specific gene can differ from each other in a single nucleotide or in a plurality nucleotides, and can include substitutions, deletions, and/or insertions of nucleotides with respect to each other. An allele of a gene can also be a form of a gene containing a mutation.

[0021] While the terms “allele” and “allelic variant” have traditionally been applied in the context of genes, which can include a plurality of polymorphic sites, the term is also used herein to apply to any form of a genomic DNA sequence, which can be as small as a single nucleotide and may or may not fall within a gene. Thus each polymorphic variant of a polymorphic site is considered an allele, and when referring to single nucleotide polymorphisms, the terms “polymorphic variant” and “allele” are used interchangeably herein. An “allele frequency” refers to the frequency at which a particular polymorphic variant, or allele, occurs in a population being tested, e.g., in cases or controls in an association study.

[0022] The term “allelic variant of a polymorphic region of a gene” refers to a region of a gene having one of several nucleotide sequences found in that region of the gene in different individuals in a population.

[0023] “Antibody”, as used herein, refers to an immunoglobulin that binds to an antigen. An antibody may be natural or wholly or partially synthetically produced. An antibody may be derived from natural sources, e.g., purified from an animal such as a rodent, rabbit, or chicken, that has been immunized with an antigen or a construct that encodes the antigen. An antibody may be a member of any immunoglobulin class, including any of the human classes: IgG, IgM, IgA, IgD, and IgE. The antibody may be an antibody fragment such as an Fab′, F(ab′)₂, scFv (single-chain variable) or other fragment that retains an antigen binding site, or a recombinantly produced scFv fragment, including recombinantly produced fragments that comprise an immunoglobulin antigen binding domain. See, e.g., Allen, T., Nature Reviews Cancer, Vol. 2, 750-765, 2002, and references therein. Antibody fragments which contain the antigen binding site of the antibody molecule can be generated by known techniques. For example, F(ab′)₂ fragments can be produced by pepsin digestion of the antibody molecule, Fab′ fragment by reducing the disulfide bridges of the F(ab′)₂ fragment, or by treating the antibody molecule with papain and a reducing agent.

[0024] Antibodies, antibody fragments, and/or protein domains comprising an antigen binding site may be generated and/or selected in vitro, e.g., using techniques such as phage display (Winter, G. et al., Annu. Rev. Immunol. 12:433-455, 1994,1994), ribosome display (Hanes, J., and Pluckthun, A. Proc. Natl. Acad. Sci. USA. 94:4937-4942, 1997), etc. An antibody may be polyclonal (e.g., an affinity-purified polyclonal antibody) or monoclonal.

[0025] An antibody may be a “chimeric” antibody in which for example, a variable domain of rodent origin is fused to a constant domain of human origin, thus retaining the specificity of the rodent antibody. The domain of human origin need not originate directly from a human in the sense that it is first synthesized in a human being. Instead, “human” domains may be generated in rodents whose genome incorporates human immunoglobulin genes. Such an antibody is considered at least partially “humanized”. The degree to which an antibody is “humanized” can vary. Thus part or most of the variable domain of a rodent antibody may be replaced by human sequences. For example, according to one approach murine complementarity-determining regions (CDRs) are grafted onto the variable light (VL) and variable heavy (VH) frameworks of human immunoglobulin molecules, while retaining only those murine framework residues deemed essential for the integrity of the antigen-binding site. See Gonzales N R, Tumour Biol. January-February;26(1):31-43, 2005 for a review of various methods of minimizing antigenicity of a monoclonal antibody. Such human or humanized chimeric antibodies are often advantageous for use in therapy of human diseases or disorders, since the human or humanized antibodies are much less likely than to induce an immune response.

[0026] The terms “approximately” or “about” in reference to a number are generally include numbers that fall within a range of 5% in either direction (greater than or less than) of the number unless otherwise stated or otherwise evident from the context (except where such number would exceed 100% of a possible value).

[0027] “Classical CVD risk factors” as used herein, refer to 5 continuous variables (age, LDL cholesterol, HDL cholesterol, triglyceride (TG) level, and systolic blood pressure) and 3 discrete variables (smoking status, diabetes, and MI in family history), as described in Assmann, G., et al., Circulation, 105:310, 2002. In general, higher values for age, LDL, TG, systolic blood pressure), correlate with an increased risk of developing CVD and/or experiencing a major coronary event, while lower value for HDL correlates with a decreased risk. Smoking, diabetes, and MI in family history each correlates with an increased risk of developing CVD and/or experiencing a major coronary event. These risk factors were used to develop the PROCAM scoring system, which predicts the likelihood that an individual will experience a major coronary event within a defined period of time, e.g., within 10 years. One of ordinary skill in the art will recognize that alternative risk factors and scoring systems could be developed. One of ordinary skill in the art will also recognize that approximations and substitutions may be made to the aforesaid classical risk factors. For example, in some embodiments total cholesterol level could be used. The risk factors may also be augmented, e.g., to include measurements of diastolic blood pressure, measurements of blood level of C reactive protein, the effect of any particular therapeutic regimen the individual is following, and various cardiovascular status markers.

[0028] The term “complementary” is used herein in accordance with its art-accepted meaning to refer to the capacity for precise pairing between particular bases, nucleosides, nucleotides or nucleic acids. For example, adenine (A) and uracil (U) are complementary; adenine (A) and thymine (T) are complementary; and guanine (G) and cytosine (C), are complementary and are referred to in the art as Watson-Crick base pairings. If a nucleotide at a certain position of a first nucleic acid sequence is complementary to a nucleotide located opposite in a second nucleic acid sequence, the nucleotides form a complementary base pair, and the nucleic acids are complementary at that position. A percent complementarity of two nucleic acids within a window of evaluation may be evaluated by determining the total number of nucleotides in both strands that form complementary base pairs within the window, dividing by the total number of nucleotides within the window, and multiplying by 100. The two nucleic acids are aligned in anti-parallel orientation for maximum complementarity over the window, allowing introduction of gaps. When computing the number of complementary nucleotides needed to achieve a particular % complementarity, fractions are rounded to the nearest whole number. A position occupied by non-complementary nucleotides constitutes a mismatch. A nucleic acid that is 100% complementary to another nucleic acid is said to be its “complement”. Thus a nucleic acid that is 100% complementary to its complement will base pair without a single mismatch. It is to be understood that where the invention provides a nucleic acid, the complement of the nucleic acid is also provided.

[0029] As used herein, “diagnostic information” is any information that is useful in determining whether a patient has or is susceptible to developing a disease or condition and/or in classifying the disease or condition into a phenotypic category or any category having significance with regards to the prognosis or severity of the disease or condition, or likely response to treatment (either treatment in general or any particular treatment) of the disease or condition. Diagnostic information can include, e.g., an assessment of the likelihood that an individual will develop a cardiovascular disease and/or will suffer a major coronary event within a defined time period, e.g., 10 years. “Diagnosis” refers to providing any type of diagnostic information, including, but not limited to, whether a subject has or is likely to have a condition (such as a cardiovascular disease), information related to the nature or classification of a disease, information related to prognosis and/or information useful in selecting an appropriate therapeutic regimen.

[0030] The term “gene”, as used herein, has its meaning as understood in the art. In most cases, a gene as used herein comprises a nucleic acid sequence that encodes a polypeptide and can also include regulatory sequences (e.g., promoters, enhancers, etc.) and/or intron sequences. It will be appreciated that a “gene” can also refer to a nucleic acid that does not encode a protein but rather encodes a functional RNA molecule such as an rRNA, tRNA, etc.

[0031] A “gene product” or “expression product” is an RNA transcribed from the gene (e.g., either pre- or post-processing) or a polypeptide encoded by an RNA transcribed from the gene (e.g., either pre- or post-modification). RNA transcribed from a gene or polynucleotide is said to be encoded by the gene or polynucleotide.

[0032] “Genotype” refers to the identity of one or more allelic variants at one or more particular polymorphic positions in an individual. It will be appreciated that an individual's genome will contain two allelic variants for each polymorphic position (located on homologous chromosomes). The allelic variants can be the same or different. A genotype can include the identity of either or both of the allelic variants. A genotype can include the identities of allelic variants at multiple different polymorphic positions, which may or may not be located within a single gene. A genotype can also refer to the identity of an allele of a gene at a particular gene locus in an individual and can include the identity of either or both alleles. The identity of the allele of a gene may include the identity of the polymorphic variants that exist at multiple polymorphic sites within the gene. The identity of an allelic variant or an allele of a gene refers to the sequence of the allelic variant or allele of a gene, e.g., the identity of the nucleotide present at a polymorphic position or the identities of nucleotides present at each of the polymorphic positions in a gene. It will be appreciated that the identity need not be provided in terms of the sequence itself For example, it is typical to assign identifiers such as +, −, A, a, B, b, etc., to different allelic variants or alleles for descriptive purposes. Any suitable identifier can be used. “Genotyping” an individual refers to providing the genotype of the individual with respect to one or more allelic variants or alleles.

[0033] “Haplotype” refers to the particular combinations of polymorphic variants (alleles) observed in a population at polymorphic sites on a single chromosome or within a region of a single chromosome. The polymorphic variants that constitute a haplotype are in linkage disequilibrium and thus tend to be inherited together.

[0034] A “haplotype block” is a region of the genome over which there is little evidence for historical recombination and within which only a few common haplotypes are observed. Haplotype blocks can vary in size and are separated by sites at which recombination can be inferred. Haplotype blocks are described e.g., in Gabriel, S. B., et al., Science, 296:2225-2229, 2002; Daly, M. J., et al., Nature Genetics, 29: 229-232, 2001; Reich, D. E., et al., Nature, 411: 199-204.

[0035] “Identity” refers to the extent to which the sequence of two or more nucleic acids is the same. The percent identity between first and second nucleic acids over a window of evaluation may be computed by aligning the nucleic acids, determining the number of nucleotides within the window of evaluation that are opposite an identical nucleotide allowing the introduction of gaps to maximize identity, dividing by the total number of nucleotides in the window, and multiplying by 100. When computing the number of identical nucleotides needed to achieve a particular % identity, fractions are to be rounded to the nearest whole number. When two or more sequences are compared, any of them may be considered the reference sequence.

[0036] Percent identity can be calculated using a variety of computer programs known in the art. For example, computer programs such as BLASTN, BLASTP, Gapped BLAST, etc., generate alignments and provide % identity between a sequence of interest and sequences in any of a variety of public databases. The algorithm of Karlin and Altschul (Karlin and Altschul, Proc. Natl. Acad. Sci. USA 87:22264-2268, 1990) modified as in Karlin and Altschul, Proc. Natl. Acad. Sci. USA 90:5873-5877,1993 is incorporated into the NBLAST and XBLAST programs of Altschul et al. (Altschul, et al., J. Mol. Biol. 215:403-410, 1990). To obtain gapped alignments for comparison purposes, Gapped BLAST is utilized as described in Altschul et al. (Altschul, et al. Nucleic Acids Res. 25: 3389-3402, 1997). When utilizing BLAST and Gapped BLAST programs, default parameters of the respective programs may be used. Alternatively, the practitioner may use non-default parameters depending on his or her experimental and/or other requirements. See the Web site having URL www.ncbi.nlm.nih.gov. A PAM250 or BLOSUM62 matrix may be used.

[0037] “Individual” means any human being.

[0038] The term “isolated” means 1) separated from at least some of the components with which it is usually associated in nature; 2) prepared or purified by a process that involves the hand of man; and/or 3) not occurring in nature. An isolated nucleic acid, such as DNA or RNA, is typically separated from other DNAs or RNAs, respectively, that are present in the natural or original source of the macromolecule. An isolated polypeptide is typically separated from other polypeptides, respectively, that are present in the natural or original source of the macromolecule, and the term is intended to encompass purified, recombinant, and synthetically produced polypeptides. The term isolated as used herein also refers to a nucleic acid or polypeptide that is substantially free of cellular material, viral material, or culture medium when produced by recombinant DNA techniques, or substantially free of chemical precursors or other chemicals when chemically synthesized. A DNA that is removed from its chromosomal location or amplified from its chromosomal location is considered “isolated”. A cDNA is also considered an isolated nucleic acid in certain embodiments. In some embodiments a nucleic acid or polypeptide is considered isolated when it is expressed in a host cell system using recombinant DNA techniques. Moreover, an “isolated nucleic acid” is meant to include nucleic acid fragments which are not naturally occurring as fragments and would not be found in the natural state. Any of the nucleic acids and polypeptides disclosed herein may be provided in isolated form.

[0039] As used herein, “linkage” or “linked” generally refers to genetic linkage. Two loci (e.g., two SNPs, a DNA marker locus and a disease locus such as a mutation causing disease, etc.) are said to be genetically linked when the probability of a recombination event occurring between these two loci is below 50% (which equals the probability of recombination between two unlinked loci). Two loci are closely linked genetically if the recombination frequency in the region between the loci is low, but may be essentially genetically unlinked or only weakly linked if the recombination frequency between the two loci is high even if they are in close physical proximity to one another along a chromosome.

[0040] “Linkage disequilibrium” or “LD” refers to a situation in which two or more allelic variants are linked, i.e., there is a non-random correlation between allelic variants at two or more polymorphic sites in individuals in a population. Two or more allelic variants that are linked are said to be in linkage disequilibrium. In general, allelic variants that are part of a haplotype or haplotype block are in linkage disequilibrium. A variety of metrics are known in the art to evaluate the extent to which any two polymorphic variants (alleles) are in LD. Suitable metrics include D′, r², and others (see, e.g., Hedrick, P. W., Genetics, 117(2):331-41, 1987). As used herein, polymorphic variants are in “strong LD” if D′>0.8.

[0041] The term “locus” refers to a position in a chromosome. For example, a locus of a gene refers to the chromosomal position of the gene.

[0042] The term “microparticle” is used herein to refer to particles having a smallest cross-sectional dimension of 50 microns or less. In certain embodiments, the smallest cross-sectional dimension of the microparticle is 10 microns or less. In certain embodiments the smallest cross-sectional dimension is approximately 3 microns or less, approximately 1 micron or less, or approximately 0.5 microns or less, e.g., approximately 0.1, 0.2, 0.3, or 0.4 microns. Microparticles may be made of a variety of inorganic or organic materials including, but not limited to, glass (e.g., controlled pore glass), silica, zirconia, cross-linked polystyrene, polyacrylate, polymethylmethacrylate, titanium dioxide, latex, polystyrene, etc. See, e.g., U.S. Pat. No. 6,406,848, for various suitable materials and other considerations. Dyna beads, available from Dynal, Oslo, Norway, are an example of commercially available microparticles of use in the present invention. Magnetically responsive microparticles can be used. In certain embodiments, one or more populations of fluorescent microparticles are employed. The populations may have different fluorescence characteristics so that they can be distinguished from one another, e.g., using flow cytometry. In some embodiments the microparticles are modified, e.g., an oligonucleotide is attached to a microparticle to serve as a “zip code” that allows specific hybridization to a second oligonucleotide that comprises a portion that is complementary to the zip code.

[0043] The term “modulation”, “modulate”, and like terms, as used herein refers to both up-regulation, (e.g., activation or stimulation), for example by agonizing, and down-regulation (e.g., inhibition or suppression), for example by antagonizing of a bioactivity (e.g. expression of a gene). Thus a “modulator” may be an agent that enhances or increases the expression and/or activity of a gene, nucleic acid, or polypeptide, or an agent that reduces or inhibits the expression and/or activity of a gene, nucleic acid, or polypeptide.

[0044] The terms “nucleic acid”, “polynucleotide”, and “oligonucleotide” are used interchangeably herein to refer to a polymer of at least three nucleotides such as deoxyribonucleic acid (DNA) and ribonucleic acid (RNA). An oligonucleotide is typically less than 100 nucleotides in length, although oligonucleotides of the present invention are not limited to such a length. A nucleotide comprises a nitrogenous base, a sugar molecule, and a phosphate group. A nucleoside comprises a nitrogenous base linked to a sugar molecule. In a polynucleotide phosphate groups covalently link adjacent nucleosides to form a polymer. The polymer may include natural nucleosides (e.g., adenosine, thymidine, guanosine, cytidine, uridine, deoxyadenosine, deoxythymidine, deoxyguanosine, and deoxycytidine), nucleoside analogs, chemically modified bases, biologically modified bases (e.g., methylated bases), intercalated bases, modified sugars (e.g., modified purines or pyrimidines). The phosphate groups in nucleic acid are typically considered to form the internucleoside backbone of the polymer. In naturally occurring nucleic acids (DNA or RNA), the backbone linkage is via a phosphodiester bond. However, polynucleotides containing modified backbones or non-naturally occurring internucleoside linkages can also be used in the present invention. See Kornberg and Baker, DNA Replication, 2nd Ed. (Freeman, San Francisco, 1992), Scheit, Nucleotide Analogs (John Wiley, New York, 1980), and U.S. Patent Publication No. 20040092470 and references therein for further discussion of various nucleotides, nucleosides, and backbone structures that can be used in the polynucleotides described herein, and methods for producing them. Nucleic acids can be single or double-stranded. Certain polynucleotides of the invention may be modified by chemical or biological means. In certain embodiments, these modifications lead to increased stability of the polynucleotide. Modifications include methylation, phosphorylation, end-capping, etc. The term “nucleic acid sequence” as used herein refers to the nucleic acid material itself and is not restricted to the sequence information (i.e. the succession of letters chosen among the five base letters A, G, C, T, or U) that biochemically characterizes a specific nucleic acid, e.g., a DNA or RNA molecule. A nucleic acid sequence is presented in the 5′ to 3′ direction unless otherwise indicated.

[0045] “Operably linked” or “operably associated” refers to a functional relationship between two nucleic acids, wherein the expression, activity, localization, etc., of one of the sequences is controlled by, directed by, regulated by, modulated by, etc., the other nucleic acid. The two nucleic acids are said to be operably linked or operably associated. “Operably linked” or “operably associated” also refers to a relationship between two polypeptides wherein the expression of one of the polypeptides is controlled by, directed by, regulated by, modulated by, etc., the other polypeptide. The two nucleic acids are said to be operably linked or operably associated. For example, transcription of a nucleic acid is directed by an operably linked promoter; post-transcriptional processing of a nucleic acid is directed by an operably linked processing sequence; translation of a nucleic acid is directed by an operably linked translational regulatory sequence such as a translation initiation sequence; transport, stability, or localization of a nucleic acid or polypeptide is directed by an operably linked transport or localization sequence such as a secretion signal sequence; and post-translational processing of a polypeptide is directed by an operably linked processing sequence. In certain embodiments, a first nucleic acid sequence that is operably linked to a second nucleic acid sequence, or a first polypeptide that is operatively linked to a second polypeptide, is covalently linked, either directly or indirectly, to such a sequence, although any effective three-dimensional association is acceptable. One of ordinary skill in the art will appreciate that multiple nucleic acids, or multiple polypeptides, may be operably linked or associated.

[0046] “Plurality” means more than one.

[0047] The term “polymorphism” refers to the occurrence of two or more alternative genomic DNA sequences or alleles in a population. Either of the sequences themselves, or the site at which they occur, may also be referred to as a polymorphism. A “single nucleotide polymorphism” or “SNP” is a polymorphism that exists at a single nucleotide position.

[0048] A “polymorphic site” or “polymorphic position” is a location at which differences in genomic DNA sequence exist among members of a population. While in general the polymorphic sites described herein are single nucleotides, the term is not limited to sites that are only one nucleotide in length. An “ambiguity code” such as that described in U.S. Ser. No. 10/505,936 may be used to describe a polymorphic site. A “polymorphic region” is a region of genomic DNA that includes one or more polymorphic sites.

[0049] A “polymorphic variant” is any of the alternate sequences that may exist at a polymorphic site among members of a population. For purposes of the present invention, the term “population” may refer to the population of the world, or to a subset thereof Typically, for the various methods described herein (e.g., diagnostic methods, methods for identifying causative mutations, etc.), it will be of interest to determine which polymorphic variant(s) is/are present in a individual, among multiple polymorphic variants that exist within a population.

[0050] “Polypeptide”, as used herein, refers to a polymer of amino acids. A protein is a molecule composed of one or more polypeptides. A peptide is a relatively short polypeptide, typically between about 2 and 60 amino acids in length. The terms “protein”, “polypeptide”, and “peptide” are used interchangeably herein. Polypeptides as used herein may contain only amino acids that are naturally found in proteins, although non-natural amino acids (e.g., compounds that do not occur in nature but that can be incorporated into a polypeptide chain) and/or amino acid analogs as are known in the art may alternatively be employed. Non-naturally occurring amino acids, amino acids which only occur naturally in an unrelated biological system, modified amino acids whether naturally occurring or non-natural can be used. One or more of the amino acids in a polypeptide may be modified, for example, by the addition of one or more chemical entities such as a carbohydrate group, a phosphate group, a lipid group, etc. Non-limiting examples include a farnesyl group, an isofarnesyl group, a fatty acid group, a glycosyl group, an acetyl group, etc. Polypeptides may contain a linker for conjugation, functionalization, or other modification, etc. In some embodiments, the modifications lead to a more stable polypeptide (e.g., greater half-life in vivo). Exemplary modifications may include cyclization of the peptide, the incorporation of D-amino acids, etc. In certain embodiments the modifications do not substantially interfere with a desired biological activity of the polypeptide.

[0051] Polypeptides may, for example, be purified from natural sources, produced in vitro or in vivo in suitable expression systems using recombinant DNA technology in suitable expression systems (e.g., by recombinant host cells or in transgenic animals or plants), synthesized through chemical means such as conventional solid phase peptide synthesis and/or methods involving chemical ligation of synthesized peptides (see, e.g., Kent, S., J Pept Sci., 9(9):574-93, 2003), or any combination of the foregoing. A polypeptide may comprise one or more chemical ligation sites as described, for example, in U.S. Pub. No. 20040115774. In certain embodiments, one or more polypeptides are modified with a polymer using one or more of the methods described or referenced therein. The term “amino acid sequence” or “polypeptide sequence” as used herein refers to the polypeptide material itself and is not restricted to the sequence information (i.e. the succession of letters or three letter codes chosen among the letters and codes used as abbreviations for amino acid names) that biochemically characterizes a polypeptide.

[0052] “Probes” or “primers”, as used herein, typically refer to oligonucleotides that hybridize in a sequence-specific manner to a complementary nucleic acid molecule. The term “primer” in particular generally refers to a single-stranded oligonucleotide that can act as a point of initiation of template-directed DNA synthesis using methods including but not limited to PCR (polymerase chain reaction) or LCR (ligase chain reaction) under appropriate conditions (e.g., in the presence of four different nucleoside triphosphates and a polymerization agent, such as DNA polymerase, RNA polymerase or reverse transcriptase, DNA ligase, etc.) in an appropriate buffer solution containing any necessary cofactors and at a suitable temperature. A primer pair may be designed to amplify a region of DNA using PCR. Such a pair will include a “forward” and a “reverse” primer that hybridize to complementary strands of a DNA molecule at locations that delimit a region to be amplified.

[0053] Typically, a probe or primer will comprise a region of nucleotide sequence that hybridizes to at least about 8, more often at least about 10 to 15, typically about 20-25, and frequently about 40, 50 or 75, consecutive nucleotides of a target nucleic acid. In certain embodiments, a probe or primer comprises 100 or fewer nucleotides, from 6 to 50 nucleotides, or from 12 to 30 nucleotides. In certain embodiments, the probe or primer is at least 70%, 80%, 90%, 95% or more identical to the contiguous nucleotide sequence or to the complement of the contiguous nucleotide sequence. In certain embodiments, a probe or primer is capable of selectively hybridizing to a target contiguous nucleotide sequence or to the complement of the contiguous nucleotide sequence. In certain embodiments, a probe or primer further comprises a label. For example, a label may be a radioisotope, fluorescent compound, enzyme, or enzyme co-factor.

[0054] Oligonucleotides that exhibit differential or selective binding to polymorphic sites may readily be designed by one of ordinary skill in the art. For example, an oligonucleotide that is perfectly complementary to a sequence that encompasses a polymorphic site (e.g., a sequence that includes the polymorphic site within it or at one or the other end) will generally hybridize preferentially to a nucleic acid comprising that sequence as opposed to a nucleic acid comprising an alternate polymorphic variant.

[0055] The term “primer” refers to a single-stranded oligonucleotide which acts as a point of initiation of template-directed DNA synthesis under appropriate conditions (e.g., in the presence of four different nucleoside triphosphates and a polymerization agent, such as DNA polymerase, RNA polymerase or reverse transcriptase) in an appropriate buffer solution containing any necessary cofactors and at a suitable temperature. The length of a primer depends on the intended use of the primer, but typically ranges from approximately 10 to approximately 30 nucleotides. Short primer molecules generally require lower temperatures to form sufficiently stable hybrid complexes with the template. A primer need not be perfectly complementary to the template but should be sufficiently complementary to hybridize with it. One of ordinary skill in the art will be aware of other constraints that should be considered when designing primers.

[0056] The term “regulatory element” or “regulatory sequence” in reference to a nucleic acid is generally used herein to describe a portion of nucleic acid that directs or controls one or more steps in the expression (particularly transcription, but in some cases other events such as splicing or other processing) of nucleic acid sequence(s) with which it is operatively linked. The term includes promoters and can also refer to enhancers, silencers, and other transcriptional control elements. Promoters are regions of nucleic acid that include a site to which RNA polymerase binds before initiating transcription and that are typically necessary for even basal levels of transcription to occur. Generally such elements comprise a TATA box. Enhancers are regions of nucleic acid that encompass binding sites for protein(s) that elevate transcriptional activity of a nearby or distantly located promoter, typically above some basal level of expression that would exist in the absence of the enhancer. In some embodiments, regulatory sequences may direct constitutive expression of a nucleotide sequence, e.g., expression may occur in most or all cell types and/or under most or all conditions. In some embodiments, regulatory sequences may direct cell or tissue-specific and/or inducible expression. For example, expression may be induced by the presence or addition of an inducing agent such as a hormone or other small molecule, by an increase in temperature, etc. Regulatory elements may also inhibit or decrease expression of an operatively linked nucleic acid. Regulatory elements that behave in this manner will be referred to herein as “negative regulatory elements.

[0057] In general, the level of expression may be determined using standard techniques for measuring mRNA or protein. Such methods include Northern blotting, in situ hybridization, RT-PCR, sequencing, immunological methods such as immunoblotting, immunodetection, or fluorescence detection following staining with fluorescently labeled antibodies, oligonucleotide or cDNA microarray or membrane array, protein array analysis, mass spectrometry, etc. A convenient way to determine expression level is to place a nucleic acid that encodes a readily detectable marker (e.g., a fluorescent or luminescent protein such as green fluorescent protein or luciferase, an enzyme such as alkaline phosphatase, etc.) in operable association with the regulatory element in an expression vector, introduce the vector into a cell type of interest or into an organism, maintain the cell or organism for a period of time, and then measure expression of the readily detectable marker, taking advantage of whatever property renders it readily detectable (e.g., fluorescence, luminescence, alteration of optical property of a substrate, etc.). Comparing expression in the absence and presence of the regulatory element indicates the degree to which the regulatory element affects expression of an operatively linked sequence.

[0058] As used herein, a “sample” obtained from a individual may include, but is not limited to, any or all of the following: a cell or cells, a portion of tissue, blood, serum, ascites, urine, saliva, amniotic fluid, cerebrospinal fluid, and other body fluids, secretions, or excretions. The sample may be a tissue sample obtained, for example, from skin, muscle, buccal or conjunctival mucosa, placenta, gastrointestinal tract or other organs. A sample of DNA from fetal or embryonic cells or tissue can be obtained by appropriate methods, such as by amniocentesis or chorionic villus sampling. The term “sample” also includes any material derived by isolating, purifying, and/or processing a sample as previously defined. Derived samples may include nucleic acids or proteins extracted from the sample or obtained by individualing the sample to techniques such as amplification or reverse transcription of mRNA, etc.

[0059] “Specific binding” generally refers to a physical association between a target molecule and a binding molecule such as, for example, physical association between a polypeptide and an antibody or ligand. The association is typically dependent upon the presence of a particular structural feature of the target such as an antigenic determinant or epitope recognized by the binding molecule. For example, if an antibody is specific for epitope A, the presence of a polypeptide containing epitope A or the presence of free unlabeled A in a reaction containing both free labeled A and the binding molecule that binds thereto, will reduce the amount of labeled A that binds to the binding molecule. It is to be understood that specificity need not be absolute but generally refers to the context in which the binding occurs. For example, it is well known in the art that numerous antibodies cross-react with other epitopes in addition to those present in the target molecule. Such cross-reactivity may be acceptable depending upon the application for which the antibody is to be used. One of ordinary skill in the art will be able to select antibodies or ligands having a sufficient degree of specificity to perform appropriately in any given application (e.g., for detection of a target molecule, for therapeutic purposes, etc). It is also to be understood that specificity may be evaluated in the context of additional factors such as the affinity of the binding molecule for the target versus the affinity of the binding molecule for other targets, e.g., competitors. If a binding molecule exhibits a high affinity for a target molecule that it is desired to be detected and low affinity for nontarget molecules, the antibody will likely be an acceptable reagent. Once the specificity of a binding molecule is established in one or more contexts, it may be employed in other contexts without necessarily re-evaluating its specificity. Binding of two or more molecules may be considered specific if the affinity (equilibrium dissociation constant, Kd) is at least 10⁻³ M, 10⁻⁴ M, 10⁻⁵ M, e.g., 10⁻⁶ M, 10⁻⁷ M, 10⁻⁸ M, or 10⁻⁹ M or lower under the conditions tested, e.g., under physiological conditions.

[0060] The term “statin” is intended to embrace all inhibitors of the enzyme 3-hydroxy-3-methylglutaryl coenzyme A (HMG-CoA) reductase. Statins specifically inhibit the enzyme HMG-CoA reductase which catalyzes the rate limiting step in cholesterol biosynthesis. Known statins include Atorvastatin, Cerivastatin, Fluvastatin, Lovastatin, Pravastatin and Simvastatin.

[0061] “Therapeutic regimen” as used herein refers to treatments aimed at the elimination or amelioration of symptoms and events associated cardiovascular disease. Such treatments include without limitation one or more of alteration in diet, lifestyle, and exercise regimen; invasive and noninvasive surgical techniques such as atherectomy, angioplasty, and coronary bypass surgery; and pharmaceutical interventions, such as administration of ACE inhibitors, angiotensin II receptor antagonists, diuretics, alpha-adrenoreceptor antagonists, cardiac glycosides, phosphodiesterase inhibitors, beta-adrenoreceptor antagonists, calcium channel blockers, HMG-CoA reductase inhibitors, imidazoline receptor blockers, endothelin receptor blockers, organic nitrites, and modulators of protein function of genes listed in Tables 1 and 2. Interventions with pharmaceutical agents not yet known that are useful therapeutically in individuals with particular genotypes associated with cardiovascular disease, e.g., individuals who possess one or more of the CVDA polymorphic variants or haplotypes described herein, are also encompassed. It is contemplated, for example, that patients who are candidates for a particular therapeutic regimen will be screened for genotypes that correlate with responsivity to that particular regimen.

[0062] “Treating”, as used herein, can generally include reversing, alleviating, reducing, inhibiting the progression of, or reducing the likelihood of the disease, disorder, or condition to which such term applies, or one or more symptoms or manifestations of such disease, disorder or condition. “Preventing” refers to causing a disease, disorder, condition, or symptom or manifestation of such, or worsening of the severity of such, not to occur.

### DETAILED DESCRIPTION OF CERTAIN EMBODIMENTS

[0063] Cardiovascular Disease Associated Polymorphisms and Polymorphic Variants

[0064] The present invention is based in part on results of an association study that was performed to identify genetic variations that are associated with an increased risk of cardiovascular disease, particularly acute coronary events such as MI. The association study compared the frequencies of polymorphic variants at a large number of different polymorphic sites between a group of individuals with a history of MI (“cases”) and a group of individuals without a history of MI but having an otherwise similar profile of classical risk factors for cardiovascular disease (“controls”, also referred to as “healthy” individuals).

[0065] The study described herein identified SNPs for which the frequencies of the polymorphic variants differed between these two groups of individuals. In general, those polymorphic variants that occur at higher frequency in individuals who are affected by a disease are said to be associated with the disease or condition, and an association is said to exist between the polymorphic variant and the disease or condition. In certain embodiments, the invention provides SNPs for which the frequencies of the polymorphic variants differ between those individuals who have or are susceptible to development or occurrence of a cardiovascular disease or major coronary event such as a myocardial infarction or sudden cardiac death and those individuals who do not have or are not susceptible (or exhibit decreased susceptibility) to development or occurrence of a cardiovascular disease or major coronary event.

[0066] Polymorphic variants that were found to be significantly associated with an acute coronary event, including MI, are referred to as “cardiovascular disease associated (CVDA) polymorphic variants”, and a SNP at which such a polymorphic variant exists is referred to as a “CVDA SNP” or “CVDA polymorphism”. Such SNPs are also said to be associated with cardiovascular disease although one of ordinary skill in the art will appreciate that typically only one of the polymorphic variants that can exist at the polymorphic position of the SNP is found at higher frequency among individuals who have or are susceptible to development of cardiovascular disease or major coronary event. In certain embodiments, the invention provides both polymorphic variants that are associated with cardiovascular disease and polymorphic variants that are not associated with cardiovascular disease.

[0067] Certain of the CVDA polymorphisms are located within genes. A gene that harbors one or more CVDA SNPs will be referred to herein as a “CVD associated gene” or “CVDA gene”, regardless of the actual function of the gene. The CVDA genes identified in the present invention include a large number of genes that had not been previously linked to CVD. A CVDA gene will typically encode a polypeptide, although it will be understood that CVDA genes are not limited to polypeptide-encoding genes. A polypeptide encoded by a CVDA gene is referred to herein as a CVDA polypeptide. If a CVDA polymorphism occurs within a coding portion of the gene, the polymorphism may result in an alteration in the amino acid sequence of the encoded protein. A SNP at such a location that alters the coding sequence of a protein is referred to as a coding SNP (cSNP). The present invention provides cSNPs wherein the allele that is associated with cardiovascular disease alters the coding sequence of a protein encoded by a CVDA gene. Without wishing to be bound by any theory, genes that include cSNPs are particularly attractive candidates as playing a significant role in cardiovascular disease, e.g., particular alleles of these genes play a causative role in cardiovascular disease or play a protective role. Functionally relevant SNPs can also reside outside protein coding regions, e.g., in the 5′ or 3′ region of a gene (e.g. the promoter or the 3′ untranslated region) and may influence gene expression without affecting the structure of the encoded protein. Without wishing to be bound by any theory, genes that include such functionally relevant SNPs are also attractive candidates as playing a role in CVD.

[0068] Each allelic variant of a gene may encode a different polymorphic form of the protein. Since allelic variants of a gene can vary from one another at multiple polymorphic sites, there can be multiple different polymorphic forms of a protein, each reflecting a different combination of polymorphic variants present in the allele that encodes it. Certain aspects of the invention thus provide polymorphic forms of the proteins encoded by the genes identified herein, e.g., genes that include a SNP disclosed herein. The sequence of such proteins will differ from one another at one or more polymorphic positions in the protein, which correspond to the polymorphic positions in the gene.

[0069] It will be appreciated that SNPs may be linked to other SNPs located on the same chromosome (linkage disequilibrium) and that such SNPs may be present in haplotypes. For example, it has been shown that SNPs can be linked over significant distances, e.g., 100 kb, or in some cases over more than 150 kb (Reich D. E. et al. Nature 411, 199-204, 2001). In certain aspects, the invention therefore provides haplotypes comprising at least one CVDA polymorphic variant disclosed herein. In certain embodiments, a set of polymorphic variants that constitute a haplotype of the invention is found within a haplotype block. A haplotype block is identified as described in Gabriel, supra. Briefly, 95% confidence bounds on D′ are generated and each comparison is called “strong LD”, “inconclusive” or “strong recombination”. A block is created if 95% of informative (i.e. non-inconclusive) comparisons are “strong LD”.

[0070] SNPs that comprise polymorphic variants that are linked to the CVDA polymorphic variants provided herein (referred to herein as “linked SNPs”) can also be used as marker SNPs for cardiovascular disease regardless of whether they are among the SNPs disclosed herein. As in the case of the CVDA SNPs, the frequencies of the polymorphic variants of a linked SNP differ between those individuals who have or are susceptible to development or occurrence of a cardiovascular disease or major coronary event and those and those individuals who do not have or are not susceptible (or exhibit decreased susceptibility) to development or occurrence of a cardiovascular disease or major coronary event. Therefore, one or more polymorphic variants of a linked SNP may be associated with cardiovascular disease and can be used in accordance with certain methods of the present invention.

[0071] A large number of SNPs and their chromosomal locations are known in the art and are publicly available in databases such as dbSNP, provided by the National Center for Biotechnology Information (NCBI) (available at the website having the URL www.ncbi.nlm.nih.gov/projects/SNP/), the International HapMap Project (available at the website having the URL www.hapmap.org/), etc. These databases provide a wide variety of information including, e.g., the identity of the nucleotide at each polymorphic position and whether it is a major or minor allele, the sequence surrounding each polymorphic position, chromosome and chromosomal location, gene names and identifiers for SNPs that lie within genes, biological annotation if available, etc. Thus one of ordinary skill in the art, provided with a SNP identifier can readily determine the exact sequence of the polymorphic variants at the polymorphic position and the surrounding sequence. Furthermore, comprehensive information about the particular SNPs that are present on the gene chips that were used to identify the SNPs of the present invention is available at the Affymetrix NetAffx™ Analysis Center (available at the web site having the URL www.affymetrix.com/analysis/index.affx).

[0072] Tables 1 and 2 provides identifying information for CVDA SNPs of the present invention. Each row of Tables 1 and 2 identifies a SNP that is encompassed within the present invention. Each row describing a SNP contains 19 columns containing data. In addition to information identifying the SNP, certain additional information related to the SNP, including the allele frequencies determined as described herein, is provided in Tables 1 and 2s. General information about the SNP, such as the chromosome, chromosomal location, gene name, major and minor alleles, etc., as well as additional information, can readily be found in dbSNP, HapMap, or the Affymetrix NetAffx™ Analysis Center by searching using the SNP ID. Specifically, a search box is provided at the secure website having the URL www.affymetrix.com/analysis/netaffx/quickquery.affx?mapping=true, into which the user can enter a SNP ID and perform a search to retrieve information related to the SNP. For purposes of convenience some of this information is included in Table 1.

[0073] The contents of Tables 1 and 2 are now described by column, beginning on the left and moving to the right. The data set was divided based on chromosome due to the large amount of data. Thus Tables 1 and 2 group SNPs by chromosome. The first column of Tables 1 and 2 (column heading “Name”) is the Affymetrix ID for the SNP. The second column of Tables 1 and 2 (column heading “Major_Allele_{—}1”) gives the base (nucleotide) that is present in the major allele in the cases (i.e., the more frequent allele in the cases). The third column of Tables 1 and 2 (column heading “Major_Allele_{—}2”) gives the base (nucleotide) that is present in the major allele in the controls (i.e., the more frequent allele in the controls).

[0074] For example, the first row of data in Tables 1 and 2 (identified by Affymetrix ID SNP_A-2081399) contains “C” under both the headings “Major_Allele_{—}1” and “Major_Allele_{—}2”. This indicates that the major allele in both the cases and the controls contained a C at the polymorphic position. As another example, the row identified by Affymetrix ID SNP_A-1856955 contains “G” under the heading “Major_Allele_{—}1” and “A” under the heading “Major_Allele_{—}2”. This indicates that the major allele in the cases contained a G at the polymorphic position, and the major allele in the controls contained an A at the polymorphic position.

[0075] The fourth and fifth columns of Tables 1 and 2 (column headings “Case_Major” and “Case_Minor”) present the actual counts for alleles A and B in cases. The sixth and seventh columns of Tables 1 and 2 (column headings “Control_Major” and “Control_Minor”) present the actual counts for alleles A and B in controls. For example, in the first row of data in Table 1 (SNP A-2081399), allele A was detected 192 times in cases, while allele B was detected 182 times in cases. Similarly, allele A was detected 234 times in controls, while allele B was detected 166 times in controls. It is noted that the numbers do not always add up to the same value because it was not possible to accurately identify the allele in some instances. The allele frequencies are readily computed from the data in this column. Consider the following example from the first row of data in Table 1 (SNP_A-2081399):

| Case ratio | Control ratio |
|---|---|
| 192:182 | 234:166 |

[0076] In the cases, allele A has a frequency of 192/374 (˜51.3%) and allele B has a frequency of 182/374 (˜48.7%), while in the controls allele A has a frequency of 234/400 (˜58.5%) and allele B has a frequency of 166/400 (˜41.5%). Thus it is evident that the allele frequencies differ between the cases and controls. The difference between the allele frequencies is statistically significant (as shown by the Chi square value of 4.008 and the P value of 0.0453), with allele B occurring more frequently in cases than in controls (i.e., allele B has a frequency of ˜48.7% in cases and ˜41.5% in controls) and allele A occurring more frequently in controls than in cases (i.e., allele A has a frequency of ˜58.5% in controls and ˜51.3% in cases). Therefore, allele B is the variant that is associated with cardiovascular disease and is a CVDA polymorphic variant of this particular CVDA polymorphism, in accordance with the terminology described above. It should be noted that both alleles of each SNP are informative with respect to CVD; thus detection of either allele, or both, of each of the SNPs identified herein, is one non-limiting aspect of this invention.

[0077] The eighth column of Tables 1 and 2 (column heading “Chi Square”) presents the Pearson's Chi-square for allele frequencies.

[0078] The ninth column of Tables 1 and 2 (column heading “p_value”) presents the probability value (significance) for each Chi square/observation.

[0079] The tenth column of Tables 1 and 2 (column heading “dbSNP_RS_ID”) is the SNP annotation (i.e., the SNP name) as annotated in public databases (dbSNP at NCBI or HapMap), where available. Each SNP identifier begins with the letters “rs“and is followed by a string of numbers.

[0080] The eleventh column of Tables 1 and 2 (column heading “Chromosome”) presents the chromosome on which the SNP is located.

[0081] The twelfth column of Tables 1 and 2 (column heading “Physical_Position”) presents the physical position of the SNP in the human genome.

[0082] The thirteenth column of Tables 1 and 2 (column heading “Cytoband”) lists the chromosomal arm and band at which the SNP is located.

[0083] The fourteenth column of Tables 1 and 2 (column heading “Flank”) presents a portion of the genomic sequence that surrounds and includes the SNP. The polymorphic site, and the alternative nucleotides that are present in different polymorphic variants, are indicated near the center of the sequence in brackets and upper case letters.

[0084] The fifteenth and sixteenth columns of Tables 1 and 2 (column headings “Allele_A” and “Allele_B” present the alternative nucleotides that are present in different polymorphic variants, with “Allele_A” representing the major allele as assigned by Affymetrix.

[0085] The seventeenth column of Tables 1 and 2 (column heading “Associated_Gene”) provides information about the gene or location where the SNP resides, including relevant accession numbers for databases such as GenBank in some cases.

[0086] The eighteenth column of Tables 1 and 2 (column heading “Gene_Symbol”) is GENE SYMBOL (the SYMBOL that was assigned to the gene by the Human Genome Project and how it can be located in all relevant GENOME Databases).

[0087] The nineteenth column of Tables 1 and 2 (column heading “Label”) provides further explanation of where the SNP resides and repeats part of the information in other columns such as GENE SYMBOL, the rs-number (“dbSNP_RS_ID”); the gene name (or other identifying information, if applicable) followed by cytogenetic chromosomal location (arm and band).

[0088] In addition to the SNPs provided in Tables 1 and 2, the present invention provides additional SNPs, e.g., SNPs located at a distance of less than about 100-150 kB of any of the CVDA SNPs of the present invention. These SNPs may readily be obtained from dbSNP, HapMap, or the Affymetrix NetAffx™ Analysis Center resources by one of ordinary skill in the art and are therefore not explicitly identified by SNP identifier herein. The SNP may be tested in a variety of ways to determine whether a polymorphic variant of the SNP is associated with cardiovascular disease. For example, the SNP may be tested as described in Example 1. In some instances, a polymorphic variant of the additional SNP may already be known to be in LD with a CVDA polymorphic variant described herein. Therefore, in certain embodiments, the invention provides a linked SNP for which the frequencies of the polymorphic variants found at the location of the linked SNP differ between individuals who have or are susceptible to development or occurrence of a cardiovascular disease or event. In certain embodiments, a polymorphic variant of the linked SNP is in strong linkage disequilibrium with a CVDA polymorphic variant. In certain embodiments, such linked SNP is located within 1 kB of the CVDA SNP with which it is linked. In certain embodiments, a linked SNP is located up to 10 kB, up to 20 kB, up to 30 kB, up to 40 kB, up to 50 kB, up to 60 kB, up to 70 kB, up to 80 kB, up to 90 kB, or up to 100 kB away from the CVDA SNP with which it is linked. In certain embodiments, a linked SNP is located within the same gene as the CVDA SNP with which it is linked.

[0089] In general, a linked SNP comprises a polymorphic variant that is part of a haplotype that includes at least one CVDA polymorphic variant. In certain embodiments, the invention therefore provides a haplotype comprising at least one CVDA polymorphic variant and a polymorphic variant of at least one linked SNP, wherein the polymorphic variant of the linked SNP is associated with cardiovascular disease. The SNP may be any linked SNP known in the art.

[0090] An alternative approach that can be used to identify polymorphic variants that are in LD with CVDA polymorphic variants is to sequence the genomic DNA of a plurality of cases and controls in a region located in the vicinity of a CVDA SNP. For example, a region of any length located within up to approximately 150 kB of the SNP, e.g., a region approximately 1, 5, 10, 20, 50, 100, 150 kB, etc., in length can be sequenced from a plurality of individuals. In certain embodiments, such a region encompasses the CVDA SNP. Nucleotide differences among individuals, e.g., SNPs, are identified. In certain embodiments, such individuals include both cases and controls, although this is not necessary for purposes of simply identifying the SNP. A plurality of cases and controls may be genotyped with respect to the SNPs, and the allele frequencies may be determined. Alleles that are associated with cardiovascular disease, e.g., variants that occur more frequently in a statistically significant sense in individuals with cardiovascular disease may be identified. Each of such polymorphic variants is an additional CVDA polymorphic variant, and a SNP having such a variant is an additional CVDA SNP.

[0091] In certain embodiments, the invention therefore provides methods of identifying a polymorphism comprising: sequencing a region of DNA from a plurality of individuals, wherein the region of DNA lies within 150 kB of a CVDA SNP and identifying nucleotide differences in the sequence of the DNA region among individuals. Such differences occur at polymorphic positions, and the various nucleotide sequences present at those positions are polymorphic variants. The polymorphism may be a SNP. Certain methods comprise an additional step of determining whether a polymorphic variant is in LD with a CVDA polymorphic variant. The method can comprise an additional step of determining whether a polymorphic variant is associated with cardiovascular disease.

[0092] As mentioned above, and without wishing to be bound by any theory, certain of the CVDA polymorphisms may play a causative role in cardiovascular disease. For example, a particular polymorphic variant associated with cardiovascular disease may have an altered expression level, altered expression pattern, and/or altered functional activity relative to alleles that are not associated with cardiovascular disease, and such alteration may contribute to the development of cardiovascular disease. While not wishing to be bound by any theory, this is particularly likely to be the case for those polymorphisms that lie within genes, and most particularly for those that lie within coding sequences and in which the polymorphic variants result in proteins with differences in amino acid sequence. However, alterations that lie outside genes can, for example, also affect expression and can play a causative role. In certain embodiments, CVDA polymorphic variants do not play a causative role, but are in LD with polymorphic variants that do play such a role. Such non-causative CVDA polymorphic variants may not be direct targets for treatment, but they may nevertheless be of use for diagnostic purposes such as those described herein.

[0093] In certain embodiments, polymorphic variants are identified that are associated with CVD in only a subset of individuals, wherein the subset is classified based on a risk assessment based on classical risk factors and/or other markers of cardiovascular status. For example, certain variants may be associated with increased risk in individuals having a risk of <10% but not in individuals having a risk of >20%. Similarly, certain variants may be associated with increased risk in individuals having a risk of >20% but not in individuals having a risk of <10%.

[0094] Diagnostic and Prognostic Methods and Reagents

[0095] The invention encompasses a variety of methods for determining whether an individual has or is susceptible to development or occurrence of a cardiovascular disease or event, wherein the individual is in need of such determination. By “event” is meant a major coronary event such as a myocardial infarction or sudden cardiac death. In certain embodiments, methods of the present invention comprise steps of: (a) detecting a polymorphic variant of a CVDA polymorphism in the individual; (b) or detecting a polymorphic variant in strong LD with a CVDA polymorphism; or (c) detecting a haplotype comprising a polymorphic variant of the CVDA polymorphism in the individual; or (d) detecting an allele of a gene comprising the polymorphic variant of the CVDA polymorphism in the individual.

[0096] Methods described herein are typically practiced on a sample obtained from the individual and the phrase “in the individual” is to be understood in that light. The sample typically contains genetic material, e.g., DNA. Such DNA may be obtained from any cell source, including any cell source. Non-limiting examples of cell sources available in clinical practice include blood cells, buccal cells, cervicovaginal cells, epithelial cells from urine, fetal cells, or any cells present in tissue obtained by biopsy. Cells may also be obtained from body fluids, including without limitation blood, saliva, sweat, urine, cerebrospinal fluid, feces, and tissue exudates at the site of infection or inflammation. DNA is extracted from the cell source or body fluid using any of the numerous methods that are standard in the art. It will be understood that the particular method used to extract DNA will depend on the nature of the source. In some embodiments, inventive methods are practiced on cellular material other than DNA. For example, polymorphisms that lie in genes may be detected in RNA. Polymorphisms that affect expression level may be detected by measuring mRNA or protein level. Furthermore, polymorphisms that alter the coding sequence of a protein may be detected by examining the protein as described elsewhere herein.

[0097] “Detecting a polymorphic variant” is used in a broad sense and refers, e.g., to determining the identity of the polymorphic variant by any suitable means, wherein determining the identity means providing sufficient information to determine whether the variant is a variant that has been identified herein as being associated with cardiovascular disease. It will be appreciated that detecting a polymorphic variant can encompass detecting the absence of a different polymorphic variant, and thus determining that a particular variant is absent is one means of determining that a different variant is present. Thus, in certain embodiments, methods of the present invention comprise detecting, in a sample of cells from the subject, the presence or absence of a specific allelic variant, e.g., an allelic variant of one or more polymorphic regions of a gene or an allelic variant in an intergenic region. The allelic differences can be: (i) a difference in the identity of at least one nucleotide or (ii) a difference in the number of nucleotides, which difference can be a single nucleotide or several nucleotides. It will typically be of interest to detect and identify both of the individual's alleles, but this need not be the case.

[0098] In certain embodiments, suitable detection methods comprise allele specific hybridization using probes overlapping the polymorphic site and typically having about 5, 10, 20, 25, or 30 nucleotides around the polymorphic region. Examples of probes for detecting specific allelic variants of a CVDA polymorphism are probes comprising at least 10 nucleotides of a nucleotide sequence set forth in Tables 1 and 2, wherein the at least 10 nucleotides include the polymorphic position. In certain embodiments, several probes capable of hybridizing specifically to allelic variants are attached to a solid support, e.g., a “chip”. Oligonucleotides can be bound to a solid support by a variety of processes such as lithography. Probes can be synthesized directly on a chip. For example a chip can hold up to 250,000 oligonucleotides or more (GeneChip, Affymetrix). Hybridization, followed by scanning to determine the position(s) on the array to which a nucleic acid hybridizes, is performed according to standard methods.

[0099] Detection of polymorphic variants using chips comprising oligonucleotides, also termed “DNA probe arrays”, “oligonucleotide arrays”, etc., has been known in the art for some time and is described e.g., in Cronin et al., Human Mutation 7:244, 1996 and in Kozal et al., Nature Medicine 2:753, 1996. See also Matsuzaki, H., et al., Genome Research, 14:414-425, 2004, describing use of a high density oligonucleotide array for parallel genotyping of over 10,000 SNPs. The present invention utilized such arrays for the identification of the CVDA SNPs as described in more detail in Example 1.

[0100] In certain embodiments, a chip comprises all the allelic variants of at least one genomic region that comprises a polymorphic position. The solid support is then contacted with a test nucleic acid or preparation of nucleic acids (e.g., DNA or RNA extracted from a cell, a specific nucleic acid that has been amplified, etc.) and hybridization to the specific probes is detected. Accordingly, the identity of numerous allelic variants of one or more genes can be identified in a simple hybridization experiment. For example, the identity of the allelic variant of the nucleotide polymorphism of one or more identified SNPs identified in Tables 1 and 2 and that of the allelic variants of a plurality of other polymorphic regions can be determined in a single hybridization experiment.

[0101] Arrays can include multiple detection blocks (e.g., multiple groups of probes designed for detection of particular polymorphisms). Such arrays can be used to analyze multiple different polymorphisms. Detection blocks may be grouped within a single array or in multiple, separate arrays so that varying conditions (e.g., conditions optimized for particular polymorphisms) may be used during the hybridization. For example, it may be desirable to provide for the detection of those polymorphisms that fall within G-C rich stretches of a genomic sequence, separately from those falling in A-T rich segments.

[0102] Additional description of use of oligonucleotide arrays for detection of polymorphisms can be found, for example, in U.S. Pat. Nos. 5,858,659 and 5,837,832. In addition, to oligonucleotide arrays, cDNA arrays may be used similarly in certain embodiments.

[0103] In some detection methods, at least a portion of the nucleic acid is amplified prior to identifying the allelic variant. Amplification can be performed, e.g., by using the polymerase chain reaction (PCR) and/or ligase chain reaction (LCR), according to methods known in the art. In certain embodiments, genomic DNA of a cell is exposed to two PCR primers and amplification for a number of cycles sufficient to produce the required amount of amplified DNA. In certain embodiments, the primers are located between 40 and 350 base pairs apart. Primers for amplifying regions of DNA comprising the CVDA polymorphic sites may readily be designed based on the human genome sequence. Such primers will typically be complementary to portions of DNA that flank the polymorphic site. See e.g., PCR Primer: A Laboratory Manual, Dieffenbach, C. W. and Dveksler, G. S. (Eds.); PCR Basics: From Background to Bench, Springer Verlag, 2000; M. J. McPherson, et al; Mattila et al., Nucleic Acids Res., 19:4967 (1991); Eckert et al., PCR Methods and Applications, 1:17 (1991); PCR (eds. McPherson et al., IRL Press, Oxford); and U.S. Pat. No. 4,683,202. Guidelines for selecting primers for PCR amplification are well known in the art. See, e.g., McPherson, M., et al., PCR Basics: From Background to Bench, Springer-Verlag, 2000. A variety of computer programs for designing primers are available, e.g., ‘Oligo’ (National Biosciences, Inc, Plymouth Minn.), MacVector (Kodak/IBI), and the GCG suite of sequence analysis programs (Genetics Computer Group, Madison, Wis. 53711).

[0104] Alternative amplification methods include: self sustained sequence replication (Guatelli, J. C. et al., 1990, Proc. Natl. Acad. Sci. U.S.A. 87:1874-1878), transcriptional amplification system (Kwoh, D. Y. et al., 1989, Proc. Natl. Acad. Sci. U.S.A. 86:1173-1177), Q-Beta Replicase (Lizardi, P. M. et al., 1988, Bio/Technology 6:1197), or any other nucleic acid amplification method. For example, other amplification methods that may be employed include the ligase chain reaction (LCR) (Wu and Wallace, Genomics, 4:560 (1989), Landegren et al., Science, 241:1077 (1988), transcription amplification (Kwoh et al., Proc. Natl. Acad. Sci. USA, 86:1173 (1989)), self-sustained sequence replication (Guatelli et al., Proc. Nat. Acad. Sci. USA, 87:1874 (1990)), and nucleic acid based sequence amplification (NASBA).

[0105] Amplification is typically followed by or occurs simultaneously with the detection of the amplified molecules using techniques well known to those of skill in the art. Detection schemes involving amplification can be especially useful for the detection of nucleic acid molecules if such molecules are present in relatively or absolutely low numbers.

[0106] The invention encompasses the use of real-time PCR, e.g., the 5′ nuclease allelic discrimination or TaqMan® assay (Livak, K. J., et al., Nature Genet. 9: 341-342, 1995; Ranade, K., et al., Genome Research, Vol. 11, Issue 7, 1262-1268, 2001) for high-throughput genotyping. According to this method, the region flanking the polymorphism, typically 100 base pairs, is amplified in the presence of two probes each specific for one or the other allele. Probes have a fluor, also called a “reporter,” at the 5′ end but do not fluoresce when free in solution because they have a “quencher” at the 3′ end that absorbs fluorescence from the reporter. During PCR, the Taq polymerase encounters a probe specifically base-paired with its target and unwinds it. The polymerase cleaves the partially unwound probe and liberates the reporter fluor from the quencher, thereby increasing net fluorescence. The presence of two probes, each labeled with a different fluor, allows one to detect both alleles in a single tube. Moreover, because probes are included in the PCR, genotypes are determined without any post-PCR processing, a feature that is unavailable with most other genotyping methods (see Landegren, U., et al., Genome Res. 8: 769-776, 1998, for a review). Other methods for performing real-time PCR, e.g., using molecular beacons or scorpions could also be used. In certain embodiments, an Invader® cleavage assay is used for detecting one or more polymorphic variants. See, e.g., Lyamichev, V., et al., Nature Biotechnol. 17: 292-296, 1999. Minisequencing on oligonucleotide arrays offers another approach (Pastinen, T., et al., Genome Res. 7: 606-614, 1997).

[0107] The invention thus provides a variety of probes and primers of use for detecting a polymorphic variant of a polymorphism listed in Tables 1 and 2. In certain embodiments the probe or primer comprises a nucleotide sequence that hybridizes to at least about 8, more often at least about 10 to 15, typically about 20-25, and frequently about 40, 50 or 75, consecutive nucleotides of a target nucleic acid molecule, e.g., a nucleic acid molecule that comprises a CVDA polymorphism. In certain embodiments, a probe or primer comprises 100 or fewer nucleotides, from 6 to 50 nucleotides, or from 12 to 30 nucleotides. In certain embodiments, a probe or primer is at least 70%, 80%, 90%, 95% or more identical to the contiguous nucleotide sequence or to the complement of the contiguous nucleotide sequence. In certain embodiments, a preferred probe or primer is capable of selectively hybridizing to a target contiguous nucleotide sequence or to the complement of the contiguous nucleotide sequence. According to certain embodiments, a probe or primer further comprises a label, for example by incorporating a radioisotope, fluorescent compound, enzyme, enzyme co-factor, mass tag (for detection using mass spectrometry), etc.

[0108] According to certain embodiments, allele specific primers and/or probes correspond exactly with the allele to be detected (e.g., they are identical in sequence or perfectly complementary to a portion of DNA that encompasses the polymorphic site, wherein the site contains any of the possible variants), but derivatives thereof are also provided wherein, for example, about 6-8 of the nucleotides at the 3′, terminus correspond to (e.g., are identical in sequence or perfectly complementary to) the allele to be detected and wherein up to 10, such as up to 8, 6, 4, 2 or 1 of the remaining nucleotides may be varied without significantly affecting the properties of the primer or probe.

[0109] The invention further provides a set of oligonucleotide primers, wherein the primers terminate adjacent to a polymorphic site of a CVDA polymorphism, or wherein the primers terminate adjacent to a polymorphic site of a CVDA polymorphism. Such primers are useful, for example, in performing fluorescence polarization template-directed dye-terminator incorporation, as described below. In certain embodiments, the invention provides oligonucleotide primers that terminate immediately adjacent to the polymorphic sites present in the CVDA SNPs identified in Tables 1 and 2.

[0110] In certain embodiments, the invention provides, for each of these polymorphisms, a primer that terminates at the nucleotide position immediately adjacent to a polymorphic site on the 3′ side and extends at least 8 and less than 100 nucleotides in the 5′ direction from this site. It is noted that the foregoing includes two classes of primers, having sequences representing both DNA strands. According to certain embodiments, the primer extends at least 10, at least 12, at least 15, or at least 20 nucleotides in the 5′ direction. According to certain embodiments, the primer extends less than 80, less than 60, less than 50, less than 40, less than 30, or less than 20 nucleotides in the 5′ direction. The invention further provides primers that terminate and extend similarly for any polymorphic site of a CVDA SNP, or a polymorphic site linked to such a SNP.

[0111] In general, primers and probes of the present invention may be made using any convenient method of synthesis. Examples of such methods may be found in standard textbooks, for example “Protocols for Oligonucleotides and Analogues; Synthesis and Properties,” Methods in Molecular Biology Series; Volume 20; Ed. Sudhir Agrawal, Humana ISBN: 0-89603-247-7; 1993. According to certain embodiments, the primer(s) and/or probes are labeled to facilitate detection.

[0112] Primers and probes of the present invention may be conveniently provided in sets, e.g., sets capable of determining which polymorphic variant(s) is/are present among some or all of the possible polymorphic variants that may exist at a particular polymorphic site. The sets may include allele-specific primers or probes and/or primers that terminate immediately adjacent to a polymorphic site. Multiple sets of primers and/or probes, capable of detecting polymorphic variants at a plurality of polymorphic sites may be provided.

[0113] Oligonucleotides that exhibit differential or selective binding to polymorphic sites may readily be designed by one of ordinary skill in the art. For example, an oligonucleotide that is perfectly complementary to a sequence that encompasses a polymorphic site (e.g., a sequence that includes the polymorphic site within it or at one or the other end) will generally hybridize preferentially to a nucleic acid comprising that sequence as opposed to a nucleic acid comprising an alternate polymorphic variant

[0114] In some embodiments, any of a variety of sequencing reactions known in the art can be used to directly sequence at least a portion of genomic DNA and detect allelic variants. The sequence can be compared with the sequences of known allelic variants to determine which one(s) are present in the sample. Exemplary sequencing reactions include those based on techniques developed by Maxam and Gilbert, Proc. Natl. Acad Sci USA, 74:560, 1977 or Sanger, Proc. Nat. Acad. Sci 74:5463, 1977. It is also contemplated that any of a variety of automated sequencing procedures may be utilized when performing the subject assays (Biotechniques 19:448, 1995; Venter, et al., Science, 291:1304-1351, 2001; Lander, et al., Nature, 409:860-921, 2001), including sequencing by mass spectrometry (see, for example, U.S. Pat. No. 5,547,835 and international patent application Publication Number WO 94/16101, entitled DNA Sequencing by Mass Spectrometry by H. Koster; U.S. Pat. No. 5,547,835 and international patent application Publication Number WO 94/21822 entitled “DNA Sequencing by Mass Spectrometry Via Exonuclease Degradation” by H. Koster), and U.S. Pat. No. 5,605,798 and International Patent Application No. PCT/US96/03651 entitled DNA Diagnostics Based on Mass Spectrometry by H. Koster; Cohen et al. (1996) Adv Chromatogr 36:127-162; and Griffin et al. (1993) Appl Biochem Biotechnol 38:147-159). It will be evident to one skilled in the art that, for certain embodiments, the occurrence of only one, two or three of the nucleic acid bases need be determined in the sequencing reaction. Yet other sequencing methods are disclosed, e.g., in U.S. Pat. No. 5,580,732 entitled “Method of DNA sequencing employing a mixed DNA-polymer chain probe” and U.S. Pat. No. 5,571,676 entitled “Method for mismatch-directed in vitro DNA sequencing”, and in Melamede, U.S. Pat. No. 4,863,849; Cheeseman, U.S. Pat. No. 5,302,509, Tsien et al, International application WO 91/06678; Rosenthal et al, International application WO 93/21340; Canard et al, Gene, 148: 1-6 (1994); Metzker et al, Nucleic Acids Research, 22: 4259-4267 (1994) and U.S. Pat. Nos. 5,740,341 and 6,306,597.

[0115] In some cases, the presence of a specific allele can be shown by restriction enzyme analysis. For example, a specific nucleotide polymorphism can result in a nucleotide sequence comprising a restriction site which is absent from the nucleotide sequence of another allelic variant. Additionally or alternately, a specific nucleotide polymorphism can result in the elimination of a nucleotide sequence comprising a restriction site which is present in the nucleotide sequence of another allelic variant.

[0116] In certain embodiments, alterations in electrophoretic mobility are used to identify the allelic variant. For example, single strand conformation polymorphism (SSCP) may be used to detect differences in electrophoretic mobility between two similar nucleic acids (Orita et al., Proc Natl. Acad. Sci USA 86:2766, 1989, see also Cotton, Mutat Res 285:125-144, 1993; and Hayashi, Genet Anal Tech Appl 9:73-79, 1992). Single-stranded DNA fragments of sample and control nucleic acids are denatured and allowed to renature. The secondary structure of single-stranded nucleic acids varies according to sequence, the resulting alteration in electrophoretic mobility enables the detection of even a single base change. The DNA fragments may be labeled or detected with labeled probes. The sensitivity of the assay may be enhanced by using RNA (rather than DNA), in which the secondary structure is more sensitive to a change in sequence. In certain embodiments, the subject method utilizes heteroduplex analysis to separate double stranded heteroduplex molecules on the basis of changes in electrophoretic mobility (Keen et al., Trends Genet 7:5, 1991).

[0117] In certain embodiments, the identity of an allelic variant of a polymorphic region is assayed using denaturing gradient gel electrophoresis (“DGGE”). DGGE comprises analyzing the movement of a nucleic acid comprising the polymorphic region in polyacrylamide gels containing a gradient of denaturant (DGGE) (Myers et al., Nature 313:495, 1985). When DGGE is used as the method of analysis, DNA may be modified to insure that it does not completely denature, for example by adding a GC clamp of approximately 40 bp of high-melting GC-rich DNA by PCR. In certain embodiments, a temperature gradient is used in place of a denaturing agent gradient to identify differences in the mobility of control and sample DNA (Rosenbaum and Reissner, Biophys Chem 265:1275, 1987).

[0118] Examples of techniques for detecting differences of at least one nucleotide between two nucleic acids include, but are not limited to, selective oligonucleotide hybridization, selective amplification, or selective primer extension. For example, oligonucleotide probes may be prepared in which the known polymorphic nucleotide is placed centrally (allele-specific probes) and then hybridized to target DNA under conditions which permit hybridization only if a perfect match is found (Saiki et al., Nature 324:163, 1986); Saiki et al., Proc. Natl Acad. Sci USA 86:6230, 1989; and Wallace et al., Nucl. Acids Res. 6:3543, 1979). Such allele specific oligonucleotide hybridization techniques may be used for the simultaneous detection of several nucleotide changes in different polymorphic regions of DNA. For example, oligonucleotides having nucleotide sequences of specific allelic variants are attached to a hybridizing membrane and this membrane is then hybridized with labeled sample nucleic acid. Analysis of the hybridization signal will then reveal the identity of the nucleotides of the sample nucleic acid.

[0119] In certain embodiments, allele specific amplification technology which depends on selective PCR amplification may be used. Oligonucleotides used as primers for specific amplification may carry the allelic variant of interest in the center of the molecule (so that amplification depends on differential hybridization) (Gibbs et al., Nucleic Acids Res. 17:2437-2448, 1989) or at the extreme 3′ end of one primer where, under appropriate conditions, mismatch can prevent, or reduce polymerase extension (Prossner, Tibtech 11:238, 1993; Newton et al., Nucl. Acids Res. 17:2503, 1989). This technique is also termed “PROBE” for Probe Oligo Base Extension. In addition, it may be desirable to introduce a novel restriction site in the region of the mutation to create cleavage-based detection (Gasparini et al., Mol. Cell Probes 6:1, 1992).

[0120] In certain embodiments, identification of the allelic variant is carried out using an oligonucleotide ligation assay (OLA), as described, e.g., in U.S. Pat. No. 4,998,617 and in Landegren, U. et al., Science 241:1077-1080, 1988. The OLA protocol uses two oligonucleotides which are designed to be capable of hybridizing to abutting sequences of a single strand of a target. One of the oligonucleotides is linked to a separation marker, e.g., biotinylated, and the other is detectably labeled. If the precise complementary sequence is found in a target molecule, the oligonucleotides will hybridize such that their termini abut, and create a ligation substrate. Ligation then permits the labeled oligonucleotide to be recovered using avidin, or another biotin ligand. Nickerson, D. A. et al. have described a nucleic acid detection assay that combines attributes of PCR and OLA (Nickerson, D. A. et al., Proc. Natl. Acad. Sci. (U.S.A.) 87:8923-8927, 1990. In this method, PCR is used to achieve the exponential amplification of target DNA, which is then detected using OLA.

[0121] Several techniques based on this OLA method have been developed and can be used to detect specific allelic variants of a polymorphic region. For example, U.S. Pat. No. 5,593,826 discloses an OLA using an oligonucleotide having 3′-amino group and a 5′-phosphorylated oligonucleotide to form a conjugate having a phosphoramidate linkage. In another variation of OLA described in Tobe et al. (Nucleic Acids Res 24: 3728, 1996), OLA combined with PCR permits typing of two alleles in a single microtiter well. By marling each of the allele-specific primers with a unique hapten, e.g. digoxigenin or fluorescein, each LA reaction can be detected by using hapten specific antibodies that are labeled with different enzyme reporters, alkaline phosphatase or horseradish peroxidase. This system permits the detection of the two alleles using a high throughput format that leads to the production of two different colors.

[0122] Additionally or alternatively, the invention provides further methods of use for detecting single nucleotide polymorphisms. Because single nucleotide polymorphisms constitute sites of variation flanked by regions of invariant sequence, their analysis requires no more than the determination of the identity of the single nucleotide present at the site of variation. Several methods have been developed to facilitate the analysis of such single nucleotide polymorphisms.

[0123] In certain embodiments, a single nucleotide polymorphism can be detected by using a specialized exonuclease-resistant nucleotide, as disclosed, e.g., in Mundy, C. R. (U.S. Pat. No. 4,656,127). According to such embodiments, a primer complementary to the allelic sequence immediately 3′ to the polymorphic site is permitted to hybridize to a target molecule obtained from a particular animal or human. If the polymorphic site on the target molecule contains a nucleotide that is complementary to the particular exonuclease-resistant nucleotide derivative present, then that derivative will be incorporated onto the end of the hybridized primer. Such incorporation renders the primer resistant to exonuclease, and thereby permits its detection. Since the identity of the exonuclease-resistant derivative of the sample is known, a finding that the primer has become resistant to exonucleases reveals that the nucleotide present in the polymorphic site of the target molecule was complementary to that of the nucleotide derivative used in the reaction.

[0124] In certain embodiments, a solution-based method is used for determining the identity of the nucleotide of a polymorphic site. Cohen, D. et al. (French Patent 2,650,840; PCT App. No. WO91/02087). As in the Mundy method of U.S. Pat. No. 4,656,127, a primer may be employed that is complementary to allelic sequences immediately 3′ to a polymorphic site. Such a method determines the identity of the nucleotide of that site using labeled dideoxynucleotide derivatives, which, if complementary to the nucleotide of the polymorphic site will become incorporated onto the terminus of the primer.

[0125] An alternative method is described by Goelet, P. et al. (PCT App. No. 92/15712). The method of Goelet, P. et al. uses mixtures of labeled terminators and a primer that is complementary to the sequence 3′ to a polymorphic site. The labeled terminator that is incorporated is thus determined by, and complementary to, the nucleotide present in the polymorphic site of the target molecule being evaluated. In contrast to the method of Cohen et al. (French Patent 2,650,840; PCT App. No. WO91/02087) the method of Goelet, P. et al. is preferably a heterogeneous phase assay, in which the primer or the target molecule is immobilized to a solid phase.

[0126] A variety of primer-guided nucleotide incorporation procedures for assaying polymorphic sites in DNA have been described (Komher, J. S. et al., Nucl. Acids. Res. 17:7779-0.7784, 1989; Sokolov, B. P., Nucl. Acids Res. 18:3671, 1990; Syvanen, A.-C., et al., Genomics 8:684-692, 1990, Kuppuswamy, M. N. et al., Proc. Natl. Acad. Sci. (U.S.A.) 88:1143-1147, 1991; Prezant, T. R. et al., Hum. Mutat. 1:159-164, 1992; Ugozzoli, L. et al., GATA 9:107-112, 1992; Nyren, P. et al., Anal. Biochem. 208:171-175, 1993). These methods rely on the incorporation of labeled deoxynucleotides to discriminate between bases at a polymorphic site. In such a format, since the signal is proportional to the number of deoxynucleotides incorporated, polymorphisms that occur in runs of the same nucleotide can result in signals that are proportional to the length of the run (Syvanen, A.-C., et al., Amer. J. Hum. Genet. 52:46-59 (1993)).

[0127] In certain embodiments, fluorescence polarization template-directed dye-terminator incorporation (FP-TDI) is used to determine which of multiple polymorphic variants of a polymorphism is present in a subject. This method is based on template-directed primer extension and detection by fluorescence polarization. According to this method, amplified genomic DNA containing a polymorphic site is incubated with oligonucleotide primers (designed to hybridize to the DNA template adjacent to the polymorphic site) in the presence of allele-specific dye-labeled dideoxyribonucleoside triphosphates and a commercially available modified Taq DNA polymerase. The primer is extended by the dye-terminator specific for the allele present on the template, increasing ˜10-fold the molecular weight of the fluorophore. At the end of the reaction, the fluorescence polarization of the two dye-terminators in the reaction mixture is analyzed directly without separation or purification. Such a homogeneous DNA diagnostic method has been shown to be highly sensitive and specific and is suitable for automated genotyping of large number of samples. (Chen, X., et al., Genome Research, Vol. 9, Issue 5, 492-498, 1999). Note that rather than involving use of allele-specific probes or primers, this method employs primers that terminate adjacent to a polymorphic site, so that extension of the primer by a single nucleotide results in incorporation of a nucleotide complementary to the polymorphic variant at the polymorphic site.

[0128] Real-time pyrophosphate DNA sequencing is yet another approach to detection of polymorphisms and polymorphic variants (Alderborn, A., et al., Genome Research, Vol. 10, Issue 8, 1249-1258, 2000). Additional methods include, for example, PCR amplification in combination with denaturing high performance liquid chromatography (dHPLC) (Underhill, P. A., et al., Genome Research, Vol. 7, No. 10, pp. 996-1005, 1997).

[0129] In general, it will be often of interest to determine the genotype of a subject with respect to both alleles of the polymorphic site present in the genome. For example, the complete genotype may be characterized as −/−, as −/+, or as +/+, where a minus sign indicates the presence of a particular sequence at the polymorphic site (e.g., the major allele, by which is meant the allele that occurs most frequently in a population), and the plus sign indicates the presence of a different polymorphic variant other than the reference sequence. Other methods simply use the identity of the base present at a polymorphic position. If multiple polymorphic variants exist at a site, this can be appropriately indicated by specifying which ones are present. Any of the detection means above may be used to determine the genotype of a subject with respect to one or both copies of the polymorphism present in the subject's genome.

[0130] According to certain embodiments, it is advantageous to employ methods that can detect the presence of multiple polymorphic variants (e.g., polymorphic variants at a plurality of polymorphic sites) in parallel or substantially simultaneously. Oligonucleotide arrays represent one suitable means for doing so. Other methods, including methods in which reactions (e.g., amplification, hybridization) are performed in individual vessels, e.g., within individual wells of a multi-well plate or other vessel may also be performed so as to detect the presence of multiple polymorphic variants (e.g., polymorphic variants at a plurality of polymorphic sites) in parallel or substantially simultaneously according to certain embodiments of the invention.

[0131] For determining the identity of the allelic variant of a polymorphic region located in the coding region of a gene, methods in addition to those described above can be used. For example, identification of an allelic variant which encodes a variant protein can be performed by using an antibody specifically recognizing the variant protein in, e.g., immunohistochemistry or immunoprecipitation. Antibodies to specific variants proteins can be prepared according to methods known in the art and as described herein. Additionally or alternatively, one can also measure a biological or biochemical activity of a protein, such as binding to a particular molecular target or cell. Suitable binding assays are known in the art.

[0132] If a polymorphic region is located in an exon, either in a coding or non-coding region of the gene, the identity of the allelic variant can be determined by determining the molecular structure of the mRNA, pre-mRNA, or cDNA. The molecular structure can be determined using any of the above described methods for determining the molecular structure of the genomic DNA, e.g., sequencing and SSCP.

[0133] Methods described herein may be performed, for example, by utilizing prepackaged diagnostic kits, such as those described herein comprising at least a reagent such as a probe or primer nucleic acid described herein, which may be conveniently used, e.g., to determine whether a subject has or is susceptible to development or occurrence of a cardiovascular disease or coronary event associated with a specific gene allelic variant.

[0134] As mentioned above, nucleic acids or proteins for use in the above-described diagnostic and prognostic methods can be obtained from any cell type or tissue of a subject. For example, a subject's bodily fluid (e.g. blood) can be obtained by known techniques (e.g. venipuncture) or from human tissues like heart (biopsies, transplanted organs). Alternatively, nucleic acid tests can be performed on dry samples (e.g. hair or skin). Fetal nucleic acid samples for prenatal diagnostics can be obtained from maternal blood as described in International Patent Application No. WO91/07660 to Bianchi. Additionally or alternatively, amniocytes or chorionic villi may be obtained for performing prenatal testing.

[0135] Diagnostic procedures may also be performed in situ directly upon tissue sections (fixed and/or frozen) of patient tissue obtained from biopsies or resections, such that no nucleic acid purification is necessary. Nucleic acid reagents may be used as probes and/or primers for such in situ procedures (see, for example, Nuovo, G. J., PCR in situ hybridization: protocols and applications, Raven Press, New York, 1992).

[0136] In certain embodiments, as mentioned above, the presence of absence of a plurality of polymorphic variants at different polymorphic sites is detected. Thus a genetic profile of an individual may be generated, wherein the genetic profile indicates which allelic variant is present at a plurality of different polymorphisms that are associated with cardiovascular disease.

[0137] In some embodiments, the genotype of a large number of individuals exhibiting particular risk factors, markers of cardiovascular status, or response to therapy for cardiovascular disease is determined with respect to one or more polymorphisms by any of the methods described above, and compared with the distribution of genotypes of individuals that have been matched for any of a plurality of characteristics such as age, ethnic origin, and/or any other statistically or medically relevant parameters, who exhibit quantitatively or qualitatively risk factors, markers of cardiovascular status, or response to therapy. “Cardiovascular status” as used herein refers to the physiological status of an individual's cardiovascular system as reflected in one or more markers or indicators. Status markers include without limitation clinical measurements such as, e.g., blood pressure, electrocardiographic profile, and differentiated blood flow analysis as well as measurements of LDL- and HDL-cholesterol levels, other lipids (e.g., TGs) and other well established clinical parameters that are standard in the art. It will be appreciated that status markers and risk factors overlap. Status markers according to the invention also include diagnoses of one or more cardiovascular symptoms or syndromes, such as, e.g., hypertension, acute myocardial infarction, silent myocardial infarction, stroke, and atherosclerosis. It will be understood that a diagnosis of a cardiovascular syndrome made by a medical practitioner encompasses clinical measurements and medical judgment. Status markers further include results of imaging analyses, e.g., magnetic resonance imaging, ultrasound imaging such as Doppler imaging, angiograms, and other means to evaluate the structure of the blood vessel wall, blood flow, and the like. Status markers according to the invention may be assessed using conventional methods well known in the art.

[0138] Also included in the evaluation of cardiovascular status are quantitative or qualitative changes in status markers with time, such as would be used, e.g., in the determination of an individual's response to a particular therapeutic regimen. Correlations are achieved using any method known in the art, including nominal logistic regression, chi square tests or standard least squares regression analysis. In this manner, it is possible to establish statistically significant correlations between particular genotypes and particular risk factors, markers of cardiovascular status, or response to therapy for cardiovascular disease (e.g., given in terms of p values). It is further possible to establish statistically significant correlations between particular genotypes and changes in markers of cardiovascular status such as, would result, e.g., from particular treatment regimens. In this manner, it is possible to correlate genotypes with responsivity to particular treatments. One of ordinary skill in the art will recognize that a variety of different statistical tests can be used to establish a correlation.

[0139] In certain embodiments, two or more polymorphic variants form a haplotype. Such polymorphic variants may be variants disclosed herein, variants known in the art, or variants yet to be described. The invention encompasses determining whether an individual has a particular haplotype comprising one or more of the polymorphic variants disclosed herein. In some embodiments, a haplotype is associated with an increased risk of development or occurrence of a cardiovascular disease or event. Without wishing to be bound by any theory, such haplotypes may provide better predictive/diagnostic information than a single SNP.

[0140] In certain embodiments, a panel of SNPs and/or haplotypes is defined that provides diagnostic and/or prognostic information when an individual is genotyped with respect to the SNPs and/or haplotypes. In certain embodiments, a panel includes at least 2 SNPs, wherein the SNPs are substantially unlinked. For example, the recombination frequency between each pair of SNPs may be approximately 0.5. In certain embodiments, a panel includes at least 2, 3, 4, 5, 6, 7, 8, 9, 10, or more substantially unlinked SNPs. Of course a panel may also include one or more SNPs that are linked, e.g., in strong LD, with at least one other SNP. In some embodiments, at least 2 SNPs or haplotypes include a polymorphic variant that contributes a relative risk of at least 1.1 to an individual's overall risk of developing CVD and/or suffering a major coronary event within a defined period of time. In certain embodiments, at least 3, 4, 5, 6, 7, 8, 9, or 10 of the SNPs or haplotypes includes such a polymorphic variant. In certain embodiments, a panel includes at least 2 SNPs or haplotypes that are each present in at least 5% of a target population, each of which includes a polymorphic variant that contributes a relative risk of at least 1.1 to an individual's overall risk of developing CVD and/or suffering a major coronary event within a defined period of time. In certain embodiments of the invention at least 3, 4, 5, 6, 7, 8, 9, or 10 of the SNPs or haplotypes include such a polymorphic variant.

[0141] In certain embodiments, results obtained from the panel predict the risk for developing CVD and/or the risk of experiencing a major coronary event. In certain embodiments, subsequent identification and evaluation of an individual's haplotype can then help to guide specific and individualized therapy. The risk can be, e.g., absolute risk, which can be expressed in terms of the likelihood (e.g.,. % likelihood) that an individual will manifest a symptom or sign of CVD and/or will experience a major coronary event within a defined time period. Additionally or alternatively, the risk can be expressed in terms of relative risk, e.g., a factor that expressed the degree to which the individual is at increased risk relative to the risk the individual would face if his or her genotype with respect to one of more of the polymorphisms or haplotypes was different. Individuals can be stratified based on their risk. Such stratification can be used, for example, to select individuals who would be likely to benefit from particular therapeutic regimens and/or can be used to identify individuals for a clinical trial. It should be emphasized that the information provided by the methods of the present invention can be qualitative or quantitative and can be expressed using any convenient means. It can be based on the evaluation of one or both alleles of a single polymorphism in an individual, or can be based on the evaluation of multiple polymorphisms and/or haplotypes.

[0142] A predictive panel can be used for genotyping of one or more individuals on a platform that can genotype multiple SNPs at the same time (multiplexing). In certain embodiments, platforms are, e.g., gene chips (Affymetrix) or the Luminex LabMAP reader. See, e.g., (Armstrong, B., et al., Cytometry 40: 102-108, 2000; Cai, H., et al., Genomics 66: 135-143, 2000; and Chen, J., et al., Genome Research 10: 549-557, 2000) for description of Luminex assays and their application for purposes of SNP genotyping. Such assays typically involve populations of fluorescent beads, which are evaluated using flow cytometery. Of course these multiplexed assays are of use for genotyping individual SNPs in either a single individual or multiple individuals.

[0143] In certain embodiments, information obtained from detecting one or more polymorphic variants is used together with information obtained by evaluating the existence of classical risk factors in a patient to provide an assessment of risk that includes the contribution of genetic factors that may or may not play a role in classical risk factors such as lipid levels. In certain embodiments, an individual's classical risk factors are evaluated according to the PROCAM method (Assmann, supra) and an individual is genotyped with respect to one or more of the CVDA SNPs and/or haplotypes described herein. The genotyping results in a relative risk ratio that is used to modify the PROCAM score. For example, the PROCAM score may be multiplied by a relative risk determined based on the genotype of the individual, or a value is added to or subtracted from the PROCAM score to provide a modified PROCAM score. In certain embodiments, the invention therefore provides methods for determining whether an individual has or is susceptible to development or occurrence of a cardiovascular disease or event, wherein the individual is in need of such determination, the method comprising the step of: combining information derived from an assessment of one or more classical risk factors and/or cardiovascular status markers together with genetic information obtained by (a) detecting a polymorphic variant of a CVDA polymorphism in the individual; or (b) detecting a polymorphic variant in strong LD with a CVDA polymorphism; or (c) detecting a haplotype comprising a polymorphic variant of the CVDA polymorphism in the individual; or (d) detecting an allele of a gene comprising the polymorphic variant of the CVDA polymorphism in the individual. It will be appreciated that the combining can be performed in any of a wide variety of ways.

[0144] In certain embodiments, the invention provides a database or other suitably organized and optionally searchable compendium of information comprising a list or other suitable form of presentation of CVDA polymorphisms and/or polymorphic sequences, haplotypes, and/or linked polymorphisms, stored on a computer-readable medium, wherein the contents of the database may be largely or entirely limited to polymorphisms that have been identified as useful in performing genotyping for assessing an individual's susceptibility to CVD, etc., as described herein. The database is distinguished from general compendia of information regarding polymorphisms, such as those described above, in that it specifically groups, selects, and/or identifies the polymorphisms as being related to CVD. In some embodiments the database includes information such as a relative risk, allele frequencies, or the like. It will be appreciated that the information can be stored in any of a wide variety of formats. The database may include results of genotyping one or more individuals with respect to one or more of the CVDA polymorphisms and/or haplotypes described herein. The results can be results of one or more of the tests described herein. The invention also encompasses a method comprising the step of electronically sending or receiving information such as that present in a database of the invention and/or electronically sending or receiving results of a genotyping test as described herein.

[0145] Isolated Polymorphic Nucleic Acids, Probes, and Vectors

[0146] The present invention provides isolated nucleic acids comprising the polymorphic positions and specific polymorphic variants described herein for human genes; vectors comprising the nucleic acids, and transformed host cells comprising the vectors. The invention also provides probes, primers, and other reagents that are useful for detecting the polymorphic variants of such polymorphisms.

[0147] In practicing the present invention, many conventional techniques in molecular biology, microbiology, and recombinant DNA technology may be used. Such techniques are well known and are explained fully in, for example, Sambrook et al., supra, Ausubel, F. (ed.), supra, DNA Cloning: A Practical Approach, Volumes I and II, 1985 (D. N. Glover ed.); Oligonucleotide Synthesis, 1984, (M. L. Gait ed.); Nucleic Acid Hybridization, 1985, (Hames and Higgins); Ausubel et al., Current Protocols in Molecular Biology, 1997, (John Wiley and Sons); and Methods in Enzymology Vol. 154 and Vol. 155 (Wu and Grossman, and Wu, eds., respectively).

[0148] Since the human genome has been sequenced and is publicly available, e.g., at the NCBI website, knowing the identity of the SNPs listed in Tables 1 and 2 provides the artisan with the genomic DNA sequence located adjacent to, e.g., upstream and/or downstream of the SNP. A portion of the surrounding sequence for each SNP is provided in Tables 1 and 2. A sequence of any particular length can be selected. In certain embodiments, the portion surrounding the SNP can be used as a probe to identify a longer genomic sequence of a cDNA. Thus, in certain embodiments, the invention provides a cDNA comprising any of the polymorphic sites identified herein.

[0149] In certain embodiments, the invention provides an isolated nucleic acid comprising or immediately adjacent to the position of a SNP identified in Tables 1 and 2. The isolated nucleic acid can be of any desired length. Insertion of nucleic acids (typically DNAs) comprising sequences encompassed by the present invention into a nucleic acid vector is easily accomplished when the termini of both the nucleic acids and the vector comprise compatible ends, such as those generated by cleavage with a restriction enzyme. If this is not possible, the termini of the DNAs and/or vector can be modified by digesting back single-stranded DNA overhangs generated by restriction endonuclease cleavage to produce blunt ends, or to achieve the same result by filling in the single-stranded termini with an appropriate DNA polymerase. In certain embodiments, a specific sequence at the ends of the nucleic acids to be inserted, the vectors, or both may be produced, e.g., by ligating nucleotide sequences (linkers) onto the termini. Such linkers may comprise specific oligonucleotide sequences that define desired restriction sites. Restriction sites can also be generated by the use of the polymerase chain reaction (PCR). See, e.g., Saiki et al., Science 239:48, 1988. The cleaved vector and the DNA fragments may also be modified if required by homopolymeric tailing. One of ordinary skill in the art will appreciate that cloning and manipulation of nucleic acids is wholly routine in the art, and kits are commercially available for performing virtually any desired manipulation.

[0150] The nucleic acids may be isolated directly from cells or may be chemically synthesized using known methods. Alternatively, the polymerase chain reaction (PCR) method can be used to produce inventive nucleic acids, using either chemically synthesized strands or genomic material as templates. Primers used for PCR can be synthesized using the sequence information provided herein and can further be designed to introduce appropriate new restriction sites, if desirable, to facilitate incorporation into a given vector for recombinant expression.

[0151] Reagents and Methods for Modulating Expression and/or Activity of CVDA Polynucleotides and Polypeptides

[0152] The CVDA genes and their encoded mRNA and polypeptides are potential therapeutic targets for cardiovascular disease. Therefore, it is desirable to be able to modulate their expression and/or activity, both for therapeutic and other purposes. In certain embodiments, the invention therefore provides a variety of methods for altering expression and/or functional activity of a CVDA gene, which are further described below. The invention encompasses methods for screening compounds for preventing or treating a cardiovascular disease by assaying the ability of the compounds to modulate the expression of one or more of the CVDA genes disclosed herein or activity of the protein products of these genes. Appropriate screening methods include, but are not limited to, assays for identifying compounds and other substances that interact with (e.g., bind to) the target gene or protein.

[0153] In certain embodiments, the invention provides an antisense nucleic acid that inhibits expression of a CVDA gene. In certain embodiments, such an antisense nucleic acid selectively inhibits a CVDA polymorphic variant of a CVDA gene. As is known in the art, antisense nucleic acids are generally single-stranded nucleic acids (DNA, RNA, modified DNA, modified RNA, or peptide nucleic acids) complementary to a portion of a target nucleic acid (e.g., an mRNA transcript) and therefore able to bind to the target to form a duplex. Typically they are oligonucleotides that range from 15 to 35 nucleotides in length but may range from 10 up to approximately 50 nucleotides in length. Binding typically reduces or inhibits the function of the target nucleic acid. For example, antisense oligonucleotides may block transcription when bound to genomic DNA, inhibit translation when bound to mRNA, and/or lead to degradation of the nucleic acid. Reduction in expression of a CVDA polypeptide may be achieved by the administration of an antisense nucleic acid or peptide nucleic acid (PNA) comprising sequences complementary to those of the mRNA that encodes the polypeptide. Antisense technology and its applications are well known in the art and are described in Phillips, M. I. (ed.) Antisense Technology, Methods Enzymol., Volumes 313 and 314, Academic Press, San Diego, 2000, and references mentioned therein. See also Crooke, S. (ed.) “Antisense Drug Technology: Principles, Strategies, and Applications” (1^{st} ed), Marcel Dekker; ISBN: 0824705661; 1st edition (2001) and references therein.

[0154] Peptide nucleic acids (PNA) are analogs of DNA in which the backbone is a pseudopeptide rather than a sugar. PNAs mimic the behavior of DNA and bind to complementary nucleic acid strands. The neutral backbone of a PNA can result in stronger binding and greater specificity than normally achieved using DNA or RNA. Binding typically reduces or inhibits the function of the target nucleic acid. Peptide nucleic acids and their use are described in Nielsen, P. E. and Egholm, M., (eds.) “Peptide Nucleic Acids: Protocols and Applications” (First Edition), Horizon Scientific Press, 1999.

[0155] According to certain embodiments, the antisense oligonucleotides have any of a variety of lengths. For example, such antisense oligonucleotides may comprise between 8 and 60 contiguous nucleotides complementary to an mRNA encoded by a CVDA gene, between 10 and 60 contiguous nucleotides complementary to an mRNA encoded by a CVDA gene, or between 12 and 60 contiguous nucleotides complementary to an mRNA encoded by a CVDA gene. According to certain embodiments, the antisense oligonucleotide need not be perfectly complementary to the mRNA to which it hybridizes but may have, for example, up to 1 or 2 mismatches per 10 nucleotides.

[0156] The invention further encompasses a method of inhibiting expression of a CVDA gene in a cell or individual comprising delivering an antisense oligonucleotide to the cell or individual or expressing such an antisense oligonucleotide within a cell or cells of the individual. Additionally or alternatively, inventive methods include treating or preventing a cardiovascular disease or condition comprising steps of (i) providing a individual in need of treatment for or prevention of a cardiovascular disease or condition; and (ii) administering a pharmaceutical composition comprising an effective amount of a an antisense oligonucleotide to the individual, wherein the antisense oligonucleotide inhibits expression of a CVDA gene.

[0157] In certain embodiments, the invention provides a ribozyme designed to cleave an mRNA encoded by a CVDA gene. Ribozymes (catalytic RNA molecules that are capable of cleaving other RNA molecules) represent another approach to reducing gene expression. Ribozymes can be designed to cleave specific mRNAs corresponding to a gene of interest. Their use is described in U.S. Pat. No. 5,972,621, and references therein. Extensive discussion of ribozyme technology and its uses is found in Rossi, J. J., and Duarte, L. C., Intracellular Ribozyme Applications: Principles and Protocols, Horizon Scientific Press, 1999.

[0158] The invention further encompasses methods of inhibiting expression of a CVDA polypeptide in a cell or individual comprising delivering a ribozyme designed to cleave an mRNA encoded by a CVDA gene to the cell or individual or expressing such a ribozyme within a cell or cells of the individual. Additionally or alternatively, the invention provides methods of treating or preventing a cardiovascular disease or condition comprising steps of (i) providing a individual in need of treatment for a cardiovascular disease or condition; and (ii) administering a pharmaceutical composition comprising an effective amount of a ribozyme designed to cleave an mRNA encoded by a CVDA gene to the individual, thereby alleviating the condition.

[0159] RNA interference (RNAi) is a mechanism of post-transcriptional gene silencing mediated by double-stranded RNA (dsRNA), which is distinct from the antisense and ribozyme-based approaches described above. dsRNA molecules are believed to direct sequence-specific degradation of mRNA that contain regions complementary to one strand (the antisense strand) of the dsRNA in cells of various types after first undergoing processing by an RNase III-like enzyme called DICER (Bernstein et al., Nature 409:363, 2001) into smaller dsRNA molecules. Such molecules comprise two 21 nt strands, each of which has a 5′ phosphate group and a 3′ hydroxyl, and includes a 19 nt region precisely complementary with the other strand, so that there is a 19 nt duplex region flanked by 2 nt-3′ overhangs and are known as short interfering RNA (siRNA). An siRNA typically comprises a double-stranded region approximately 19 nucleotides in length with 1-2 nucleotide 3′ overhangs on each strand, resulting in a total length of between approximately 21 and 23 nucleotides. In mammalian cells, dsRNA longer than approximately 30 nucleotides typically induces nonspecific mRNA degradation via the interferon response. However, the presence of siRNA in mammalian cells, rather than inducing the interferon response, results in sequence-specific gene silencing.

[0160] RNAi can also be achieved using molecules referred to as short hairpin RNAs (shRNA), which are single RNA molecules comprising at least two complementary portions capable of self-hybridizing to form a duplex structure sufficiently long to mediate RNAi (typically at least 19 base pairs in length), and a loop, typically between approximately 1 and 10 nucleotides in length and more commonly between 4 and 8 nucleotides in length that connects the two nucleotides that form the last nucleotide pair at one end of the duplex structure. shRNAs are thought to be processed into siRNAs by the conserved cellular RNAi machinery. Thus shRNAs are precursors of siRNAs and are similarly capable of inhibiting expression of a target transcript.

[0161] siRNAs and shRNAs have been shown to downregulate gene expression when transferred into mammalian cells by such methods as transfection, electroporation, or microinjection, or when expressed in cells via any of a variety of plasmid-based approaches. RNA interference using siRNA and/or shRNA is reviewed in, e.g., Tuschl, T., Nat. Biotechnol., 20: 446-448, May 2002. See also Yu, J., et al., Proc. Natl. Acad. Sci., 99(9), 6047-6052, 2002; Sui, G., et al., Proc. Natl. Acad. Sci., 99(8), 5515-5520, 2002; Paddison, P., et al., Genes and Dev., 16, 948-958, 2002; Brummelkamp, T., et al., Science, 296, 550-553, 2002; Miyagashi, M. and Taira, K., Nat. Biotech., 20, 497-500, 2002; Paul, C., et al., Nat. Biotech., 20, 505-508, 2002. A number of variations in structure, length, number of mismatches, size of loop, identity of nucleotides in overhangs, etc., are consistent with effective RNAi-mediated gene silencing. For example, one or more mismatches between the target mRNA and the complementary portion of the siRNA or shRNA may still be compatible with effective silencing.

[0162] It is thought that intracellular processing (e.g., by DICER) of a variety of different precursors results in production of RNAs of various kinds that are capable of effectively mediating gene silencing. For example, in addition to the siRNA and shRNA structures described above, DICER can process ˜70 nucleotide hairpin precursors with imperfect duplex structures, i.e., duplexes that are interrupted by one or more mismatches, bulges, or inner loops within the stem of the hairpin into single-stranded RNAs called microRNAs (miRNA) that are believed to hybridize within the 3′ UTR of a target mRNA and repress translation. See, e.g., Lagos-Quintana, M. et al., Science, 294, 853-858, 2001; Pasquinelli, A., Trends in Genetics, 18(4), 171-173, 2002, and references in the foregoing two articles for discussion of miRNAs and their mechanisms of silencing.

[0163] Accordingly, In certain embodiments, the invention provides siRNAs and shRNAs that inhibit expression of an mRNA encoded by any of the CVDA genes disclosed herein. An RNAi agent is considered to inhibit expression of a target transcript and thus to be targeted to the transcript if the stability or translation of the target transcript is reduced in the presence of the siRNA as compared with its absence. Typically the antisense portion of an RNAi agent shows at least about 80%, at least about 90%, at least about 91%, 92%, 93%, 94%, 95%, 96%, 97%, 98%, 99%, or 100% precise sequence complementarity with the target transcript for a stretch of at least about 17, 18 or 19 to about 21-23 or more nucleotides.

[0164] The invention encompasses methods of inhibiting expression of a CVDA gene in a cell or individual comprising delivering an siRNA or shRNA targeted to an mRNA encoded by a CVDA gene to the cell or individual. Additionally or alternatively, the invention provides methods of treating or preventing a cardiovascular disease or condition comprising steps of (i) providing a individual in need of treatment for atherosclerosis or a disease or condition associated with atherosclerosis; and (ii) administering a pharmaceutical composition comprising an effective amount of an siRNA or shRNA targeted to an mRNA encoded by a CVDA gene to the individual, thereby alleviating the condition.

[0165] As mentioned above, siRNAs and shRNAs have been shown to effectively reduce gene expression when expressed intracellularly, e.g., by delivering vectors such as plasmids, viral vectors such as adenoviral, retroviral or lentiviral vectors, or viruses to cells. Such vectors, referred to herein as RNAi-inducing vectors, are vectors whose presence within a cell results in transcription of one or more RNAs that self-hybridize or hybridize to each other to form an shRNA or siRNA. In general, the vector comprises a nucleic acid operably linked to expression signal(s) so that one or more RNA molecules that hybridize or self-hybridize to form an siRNA or shRNA are transcribed when the vector is present within a cell. Thus the vector provides a template for intracellular synthesis of the RNA or RNAs or precursors thereof. The vector will thus contain a sequence or sequences whose transcription results in synthesis of two complementary RNA strands having the properties of siRNA strands described above, or a sequence whose transcription results in synthesis of a single RNA molecule containing two complementary portions separated by an intervening portion that forms a loop when the two complementary portions hybridize to one another.

[0166] Selection of appropriate siRNA and shRNA sequences can be performed according to guidelines well known in the art, e.g., taking factors such as desirable GC content into consideration. See, e.g., (Dykxhoorn, D. M., et al., Nature Reviews Molecular Cell Biology 4: 457-467, 2003; Elbashir, S. M., et al., Nature. 411:494-498, 2001; Elbashir, S. M., et al., Genes and Development, 15: 188-200, 2001; and WO 01/75164 and U.S. Pub. Nos. 20020086356 and 20030108923 for further information.

[0167] As is known in the art, by selecting about 5 siRNAs it will almost always be possible to identify an effective sequence. If necessary additional siRNAs can be designed and tested. It may be desirable to perform a systematic screen to identify highly effective siRNAs. A number of computer programs that aid in the selection of effective siRNA/shRNA sequences are known in the art, which yield even higher percentages of effective siRNAs. See, e.g., Cui, W., et al., “OptiRNai, a Web-based Program to Select siRNA Sequences”, Proceedings of the IEEE Computer Society Conference on Bioinformatics, p. 433, 2003. Algorithms for selecting effective siRNA are also described in Reynolds, A., et al., Nat Biotechnol., 22(3):326-30, 2004. Pre-designed siRNAs targeting over 95% of the mouse or human genome are commercially available, e.g., from Ambion and/or Cenix Biosciences. As is known in the art, siRNAs and shRNAs can be delivered using a variety of delivery agents that increase their cellular uptake or potency or protect them from degradation.

[0168] Antisense nucleic acids, ribozymes, siRNAs, or shRNAs can be delivered to cells by standard techniques such as microinjection, electroporation, or transfection. Antisense nucleic acids, ribozymes, siRNAs, or shRNAs can be formulated as pharmaceutical compositions and delivered to an individual using a variety of approaches. According to certain embodiments, the delivery of antisense, ribozyme, siRNA, or shRNA molecules is accomplished via a gene therapy approach in which vectors (e.g., viral vectors such as retroviral, lentiviral, or adenoviral vectors, etc.) are delivered to a cell or individual, or cells directing expression of the molecules (e.g., cells into which a vector directing expression of the molecule has been introduced) are administered to the individual.

[0169] It may be advantageous to employ various nucleotide modifications and nucleotide analogs to confer desirable properties on the antisense nucleic acid, ribozyme, siRNA, or shRNA. Numerous nucleotide analogs, nucleotide modifications, and modifications elsewhere in a nucleic acid chain are known in the art, and their effect on properties such as hybridization and nuclease resistance has been explored. For example, various modifications to the base, sugar and internucleoside linkage have been introduced into oligonucleotides at selected positions, and the resultant effect relative to the unmodified oligonucleotide compared. A number of modifications have been shown to alter one or more aspects of the oligonucleotide such as its ability to hybridize to a complementary nucleic acid, its stability, etc. For example, useful 2′-modifications include halo, alkoxy and allyloxy groups. U.S. Pat. Nos. 6,403,779, 6,399,754, 6,225,460, 6,127,533, 6,031,086, 6,005,087, 5,977,089, and references therein disclose a wide variety of nucleotide analogs and modifications that may be of use in the practice of the present invention. See also Crooke, S. (ed.), referenced above, and references therein. As will be appreciated by one of ordinary skill in the art, analogs and modifications may be tested using, e.g., the assays described herein or other appropriate assays, in order to select those that effectively reduce expression of the target nucleic acid. The analog or modification advantageously results in a nucleic acid with increased absorbability (e.g., increased absorbability across a mucus layer, increased oral absorption, etc.), increased stability in the blood stream or within cells, increased ability to cross cell membranes, etc.

[0170] Antisense RNAs, ribozymes, siRNAs or shRNAs may be prepared by any method known in the art for the synthesis of nucleic acid molecules. These include, but are not limited to, techniques for chemical synthesis such as solid phase phosphoramidite chemical synthesis. In the case of siRNAs, the structure may be stabilized, for example by including nucleotide analogs at one or more free strand ends in order to reduce digestion, e.g., by exonucleases. This may also be accomplished by the use of deoxy residues at the ends, e.g., by employing dTdT overhangs at each 3′ end. Alternatively, antisense, ribozyme, siRNA or shRNA molecules may be generated by in vitro transcription of DNA sequences encoding the relevant molecule. Such DNA sequences may be incorporated into a wide variety of vectors with suitable RNA polymerase promoters such as T7, T3, or SP6.

[0171] Antisense, ribozyme, siRNA or shRNA molecules may be generated by intracellular synthesis of small RNA molecules, as described above, which may be followed by intracellular processing events. For example, intracellular transcription may be achieved by cloning templates into RNA polymerase III transcription units, e.g., under control of a U6 or H1 promoter. In one approach for intracellular synthesis of siRNA, sense and antisense strands are transcribed from individual promoters, which may be on the same construct. The promoters may be in opposite orientation so that they drive transcription from a single template, or they may direct synthesis from different templates. However, it may be advantageous to express a single RNA molecule that self-hybridizes to form a hairpin RNA that is then cleaved by DICER within the cell.

[0172] In some embodiments, an antisense oligonucleotide, RNAi agent, or ribozyme specifically inhibits expression of an allele of the CVDA gene that is associated with cardiovascular disease, e.g., the allele comprises one or more of the CVDA polymorphic variants disclosed herein. For example, an antisense oligonucleotide or antisense strand of an siRNA may be complementary to the disease-associated polymorphic variant at the polymorphic position. In some embodiments, an antisense oligonucleotide, ribozyme, or RNAi agent does not appreciably inhibit the polymorphic variant that is not associated with cardiovascular disease. By “does not appreciably inhibit” is meant that the expression level in the presence of the inhibitory agent is at least 90% of the expression level in the absence of the agent. In certain embodiments the expression level of the polymorphic variant that is not associated with cardiovascular disease is inhibited by less than 50% by the antisense oligonucleotide, ribozyme, or RNAi agent.

[0173] Antisense, ribozyme, siRNA, or shRNA molecules for use in accordance with the present invention may be introduced into cells by any of a variety of methods. For instance, antisense, ribozyme, siRNA, or shRNA molecules or vectors encoding them can be introduced into cells via conventional transformation or transfection techniques. As used herein, the terms “transformation” and “transfection” are intended to refer to a variety of art-recognized techniques for introducing foreign nucleic acid (e.g., DNA or RNA) into a host cell, including calcium phosphate or calcium chloride co-precipitation, DEAE-dextran-mediated transfection, lipofection, injection, or electroporation.

[0174] Vectors that direct in vivo synthesis of antisense, ribozyme, siRNA, or shRNA molecules constitutively or inducibly can be introduced into cell lines, cells, or tissues. In certain embodiments, inventive vectors are gene therapy vectors (e.g., adenoviral vectors, adeno-associated viral vectors, retroviral or lentiviral vectors, or various nonviral gene therapy vectors) appropriate for the delivery of a construct directing transcription of an siRNA to mammalian cells, including, but not limited to, human cells.

[0175] In certain embodiments, siRNA, shRNA, antisense, or ribozyme compositions reduce the level of a target transcript and/or its encoded protein by at least 2-fold. In certain embodiments, siRNA, shRNA, antisense, or ribozyme compositions reduce the level of a target transcript and/or its encoded protein by at least 4-fold. In certain embodiments, siRNA, shRNA, antisense, or ribozyme compositions reduce the level of a target transcript and/or its encoded protein by at least 10-fold or more. The ability of a candidate siRNA to reduce expression of the target transcript and/or its encoded protein may readily be tested using methods well known in the art including, but not limited to, Northern blots, RT-PCR, microarray analysis in the case of the transcript, and various immunological methods such as Western blot, ELISA, immunofluorescence, etc., in the case of the encoded protein. In addition, the potential of any siRNA, shRNA, antisense, or ribozyme composition for treatment of a particular condition or disease associated with atherosclerosis may also be tested in appropriate animal models or in human individuals, as is the case for all methods of treatment described herein. Appropriate animal models include, but are not limited to, mice, rats, rabbits, sheep, dogs, etc., with experimentally induced atherosclerosis.

[0176] Nucleic acids described herein may be delivered to an individual using any of a variety of approaches, including those applicable to non-nucleic acid agents such as IV, intranasal, oral, etc. According to certain embodiments, such nucleic acids are delivered via a gene therapy approach, in which a construct capable of directing expression of one or more of the inventive nucleic acids is delivered to cells or to the individual (ultimately to enter cells, where transcription may occur).

[0177] Additional methods for identifying compounds capable of modulating gene expression are described, for example, in U.S. Pat. No. 5,976,793. These methods may be used either to identify compounds that increase gene expression or to identify compounds that decrease gene expression. Additional methods for identifying agents that increase expression of genes are found in Ho, S., et al., Nature, 382, pp. 822-826, 1996, which describes homodimeric and heterodimeric synthetic ligands that allow ligand-dependent association and disassociation of a transcriptional activation domain with a target promoter to increase expression of an operatively linked gene.

[0178] Expression can also be increased by introducing additional copies of a coding sequence into a cell of interest, e.g., by introducing a nucleic acid comprising the coding sequence into the cell. In certain embodiments, a coding sequence is operably linked to regulatory elements such as promoters, enhancers, etc., that direct expression of the coding sequence in the cell. A nucleic acid may comprise a complete CVDA gene, or a portion thereof that contains the coding region of the gene. A nucleic acid may be introduced into cells grown in culture or cells in an individual using any suitable method, e.g., any of those described above.

[0179] Polymorphic Polypeptides and Polymorphism-Specific Binding Agents

[0180] In certain embodiments, the present invention provides isolated peptides and polypeptides encoded by genes listed in Tables 1 and 2, wherein the genes comprise one or more polymorphic positions disclosed herein. In certain embodiments, such peptides and polypeptides are useful in screening targets to identify drugs for the treatment and/or prevention of cardiovascular disease. In certain embodiments, such peptides and polypeptides are capable of eliciting antibodies in a suitable host animal that react specifically with a polypeptide comprising the polymorphic position and distinguish it from other polypeptides having a different sequence at that position. In certain embodiments, a peptide or polypeptide is used to identify a specific binding reagent that binds to the peptide or polypeptide. In certain aspects, the invention thus provides antibodies and other reagents that specifically bind to a polypeptide having a specific amino acid at a polymorphic position. Certain inventive antibodies possess high affinity, e.g., a K_{d} of <200 nM, <100 nM, or lower for their target.

[0181] Certain inventive polypeptides are at least five or more residues in length. In certain embodiments, polypeptides of the present invention are at least fifteen residues. Certain methods for obtaining these polypeptides are described below. A variety of conventional techniques in protein biochemistry and immunology are known and my be used in accordance with the present invention. For example, certain conventional techniques are explained in Immunochemical Methods in Cell and Molecular Biology, 1987 (Mayer and Waler, eds; Academic Press, London); Scopes, 1987, Protein Purification: Principles and Practice, Second Edition (Springer-Verlag, N.Y.), Handbook of Experimental Immunology, 1986, Volumes I-IV (Weir and Blackwell eds.), Harlow, supra, and other references listed above.

[0182] Nucleic acids comprising protein-coding sequences can be used to direct recombinant expression of polypeptides encoded by genes disclosed herein in intact cells or in cell-free translation systems. The nucleic acids can be isolated from cells, nucleic acid libraries (e.g., cDNA libraries), synthesized chemically, etc. The genetic code can be used to design polynucleotides encoding the desired amino acid sequences. If desired, the sequence of the polynucleotides can be modified to optimize expression in a host cell or organism of choice. The polypeptides may be isolated from human cells, or from heterologous organisms or cells (including, but not limited to, bacteria, fungi, insect, plant, and mammalian cells) into which an appropriate protein-coding sequence has been introduced and expressed. Furthermore, the polypeptides may be part of recombinant fusion proteins.

[0183] Peptides and polypeptides may be chemically synthesized by commercially available automated procedures, including, without limitation, exclusive solid phase synthesis, partial solid phase methods, fragment condensation or classical solution synthesis. In certain embodiments, polypeptides are advantageously prepared by solid phase peptide synthesis as described by Merrifield, J. Am. Chem. Soc. 85:2149, 1963.

[0184] Methods for polypeptide purification are well-known in the art, including, without limitation, preparative disc-gel electrophoresis, isoelectric focusing, HPLC, reversed-phase HPLC, gel filtration, ion exchange and partition chromatography, and countercurrent distribution. For some purposes, it may be advantageous to produce the polypeptide in a recombinant system in which the protein contains an additional sequence tag that facilitates purification, such as, for example, a polyhistidine sequence. The polypeptide can then be purified from a crude lysate of the host cell by chromatography on an appropriate solid-phase matrix. Additionally or alternatively, antibodies produced against peptides encoded by genes disclosed herein, can be used as purification reagents. Other purification methods that may be used will be known to those of ordinary skill in the art.

[0185] The present invention also encompasses derivatives and homologues of the polypeptides. For some purposes, nucleic acid sequences encoding the peptides may be altered by substitutions, additions, or deletions that provide for functionally equivalent molecules, e.g., function-conservative variants. For example, one or more amino acid residues within the sequence can be substituted by another amino acid of similar properties, such as, for example, positively charged amino acids (arginine, lysine, and histidine); negatively charged amino acids (aspartate and glutamate); polar neutral amino acids; and non-polar amino acids. In certain embodiments, a derivative or homologue of a polypeptide is at least 80% identical, at least 90% identical, at least 95%, or at least 99% identical to the polypeptide. In certain embodiments a derivative or homologue of a polypeptide has 5, 10, 20, 30, 40, or 50 or more amino acid deletions, additions, or substitutions relative to the polypeptide.

[0186] Polypeptides may be modified by, for example, phosphorylation, sulfation, acylation, or other protein modifications. They may also be modified with a label capable of providing a detectable signal, either directly or indirectly, including, but not limited to, radioisotopes and fluorescent compounds. The polypeptides may include a tag, e.g., an epitope tag such as an HA tag, 6× His tag, GST tag, etc., which may be useful for detection and/or purification of the polypeptide.

[0187] The present invention also encompasses antibodies that specifically recognize polypeptides differing at one or more polymorphic positions and that distinguish a peptide or polypeptide containing a particular polymorphic variant from one that contains a different sequence at that position. Such polymorphic position-specific antibodies include, for example, polyclonal and monoclonal antibodies. Such antibodies may be generated in an animal host by immunization with polypeptides encoded by genes disclosed herein or may be identified using methods such as phage display. The immunogenic components used to generate antibodies may be isolated from human cells or produced in recombinant systems. Such antibodies may also be produced in recombinant systems programmed with appropriate antibody-encoding DNA. Additionally or alternatively, antibodies may be constructed by biochemical reconstitution of purified heavy and light chains. Such antibodies include hybrid antibodies (e.g., containing two sets of heavy chain/light chain combinations, each of which recognizes a different antigen), chimeric antibodies (i.e., in which either the heavy chains, light chains, or both, are fusion proteins), and univalent antibodies (e.g., comprised of a heavy chain/light chain complex bound to the constant region of a second heavy chain). Also encompassed are Fab fragments, including Fab′ and F(ab)₂ fragments of antibodies. Methods for the production of all of the above types of antibodies and derivatives are well-known in the art and are discussed in more detail below. For example, techniques for producing and processing polyclonal antisera are disclosed in Mayer and Walker, Immunochemical Methods in Cell and Molecular Biology, 1987 (Academic Press, London). The general methodology for making monoclonal antibodies by hybridomas is well known. See, e.g., Schreier et al., Hybridoma Techniques, 1980; U.S. Pat. Nos. 4,341,761; 4,399,121; 4,427,783; 4,444,887; 4,466,917; 4,472,500; 4,491,632; and 4,493,890. Panels of monoclonal antibodies produced against peptides encoded by genes disclosed herein can be screened for various properties, including, for example, isotype, epitope affinity, etc.

[0188] Antibodies of the present invention can be purified by standard methods, including but not limited to preparative disc-gel electrophoresis, isoelectric focusing, HPLC, reversed-phase HPLC, gel filtration, ion exchange and partition chromatography, and countercurrent distribution. Purification methods for antibodies are disclosed, e.g., in The Art of Antibody Purification, Amicon Division, W. R. Grace & Co, 1989. General protein purification methods are described in Protein Purification: Principles and Practice, R. K. Scopes, Ed., 1987, Springer-Verlag, New York, N.Y.

[0189] Methods for determining the immunogenic capability of the disclosed sequences and the characteristics of the resulting sequence-specific antibodies and immune cells are well-known in the art. For example, antibodies elicited in response to a peptide comprising a particular polymorphic sequence can be tested for their ability to specifically recognize that polymorphic sequence, e.g., to bind differentially to a peptide or polypeptide comprising the polymorphic sequence and thus distinguish it from a similar peptide or polypeptide containing a different sequence at the same position.

[0190] A variety of engineered ligand-binding proteins with antibody-like specific binding properties are known in the art. For example, anticalins offer an alternative type of ligand-binding protein, which is constructed on the basis of lipocalins as a scaffold (Skerra, J., J. Biotechnol., 74(4):257-75, 2001). Affibodies, which are binding proteins generated by phage display from combinatorial libraries constructed using the protein A-derived Z domain as a scaffold, can also be used. See, e.g., Nord K, Eur J Biochem., 268(15):4269-77, 2001. Thus the invention provides, for example, an affibody or anticalin that specifically binds to a CVDA polypeptide.

[0191] In certain embodiments, the invention also provides a variety of different additional specific binding agents which may be, for example, peptides, non-immunoglobulin polypeptides, nucleic acids, protein nucleic acids (PNAs), aptamers, small molecules, etc. Such agents will be collectively referred to herein as “ligands”. Ligands that specifically bind to any of the polymorphic forms of the CVDA polypeptides described herein may be identified using any of a variety of approaches. For example, ligands may be identified by screening libraries, e.g., small molecule libraries. Naturally occurring or artificial (non-naturally occurring) ligands, particularly peptides or polypeptides, may be identified using a variety of approaches including, but not limited to, those known generically as two- or three-hybrid screens, the first version of which was described in Fields S. and Song O., Nature, 340(6230):245-6, 1989. Nucleic acid or modified nucleic acid ligands may be identified using, e.g., systematic evolution of ligands by exponential enrichment (SELEX) (Tuerk, C. and Gold., L, Science 249(4968): 505-10, 1990), or any of a variety of directed evolution techniques that are known in the art. For example, an aptamer is an oligonucleotide (e.g., DNA, RNA, which can include various modified nucleotides, e.g., 2′-O-methyl modified nucleotides) that binds to a particular protein. See, e.g., Brody E N, Gold L. J Biotechnol., 74(1):5-13, 2000. In certain embodiments, the ligand is an aptamer that binds to a CVDA polypeptide or polymorphic form thereof. Screens using nucleic acids, peptides, or polypeptides as candidate ligands may utilize nucleic acids, peptides, or polypeptides that incorporate any of a variety of nucleotide analogs, amino acid analogs, etc. Various nucleotide analogs are known in the art, and other modifications of a nucleic acid chain, e.g., in the backbone, can also be used. Peptide or polypeptide ligands may comprise amino acids that do not occur naturally (e.g., that are not used by organisms in naturally-occurring polypeptide sequences).

[0192] Antibody-Based Diagnostic Methods

[0193] In certain embodiments, the invention provides methods for detecting CVDA polymorphic variants, haplotypes, and/or alleles in a biological sample that employ a specific binding reagent such as an antibody. In certain embodiments, inventive methods comprises steps of: (i) contacting a sample with one or more antibodies, wherein each of the antibodies is specific for a particular polymorphic form of a protein encoded by a gene disclosed herein, under conditions in which a stable antigen-antibody complex can form between the antibody and antigenic components in the sample; and (ii) detecting any antigen-antibody complex formed in step (i) using any suitable means known in the art, wherein the detection of a complex indicates the presence of the particular polymorphic form in the sample.

[0194] Typically, immunoassays use either a labeled antibody or a labeled antigenic component (e.g., that competes with the antigen in the sample for binding to the antibody). Suitable labels include without limitation enzyme-based, fluorescent, chemiluminescent, radioactive, colorimetric, or dye molecules. Assays that amplify the signals from the probe are also known, such as, for example, those that utilize biotin and avidin, and enzyme-labeled immunoassays, such as ELISA assays.

[0195] It will be appreciated that methods described herein can be practiced using other reagents that exhibit specific binding to a polymorphic form of a polymorphic polypeptide.

[0196] Kits

[0197] In certain embodiments, inventive methods include methods for detecting the polymorphic variants, haplotypes, and alleles described herein. In certain embodiments, the invention provides methods for determining the identity of the polymorphic variants of polymorphic regions present in the genes disclosed herein, wherein specific polymorphic variants are associated with cardiovascular disease. In certain embodiments, the invention provides a variety of different kits that can be used for carrying out certain of the inventive methods. In certain embodiments, kits can be used to determine whether an individual has or is at risk of developing a cardiovascular disease. Such information can be used, optionally together with information regarding classical cardiovascular risk factors, to provide an absolute or relative risk that the individual will suffer a major coronary event. In certain embodiments, such information is used to guide the selection of a therapeutic regimen for such individuals, e.g., to optimize their treatment.

[0198] In certain embodiments, a kit comprises a probe or primer which is capable of hybridizing to a nucleic acid and that can be used to determine whether the nucleic acid contains a polymorphic variant of a polymorphic region that is associated with a risk for cardiovascular disease. Such a kit may further comprise instructions for performing the assay and/or instructions for using the results for diagnosis of an individual as having, or being susceptible to, developing a cardiovascular disease, or for prognosis. For example, a kit may comprise an informational sheet or the like that describes how to interpret the results of the test and/or how to utilize the results of the test together with information regarding the existence or value of one or more classical risk factors in the individual, or together with a comprehensive classical risk factor profile of the individual.

[0199] Probes or primers of inventive kits can be any of the probes or primers described herein, e.g., a labeled primer or labeled probe, or collection of labeled primers or labeled probes. In certain embodiments, a kit comprises probes and/or primers suitable for detection of a plurality of CVDA polymorphic variants and/or CVDA haplotypes, or CVDA alleles of a gene containing one or more such variants. In certain embodiments, a kit comprises 1, 2, 3, 4, 5, 6, 7, 8, 9, 10, 15, 20, 25, 30, 35, 40, 45, 50, 60, 70, 80, 90, 100, 200, 300, 400, 500 or more probes or primers.

[0200] In certain embodiments, probes are covalently or noncovalently attached to a support such as a microparticle. In certain embodiments, probes are covalently or noncovalently attached to a substantially planar, rigid substrate or support. In certain embodiments, such a substrate is transparent to radiation of the excitation and emission wavelengths used for excitation and detection of typical labels (e.g., fluorescent labels, quantum dots, plasmon resonant particles, nanoclusters), e.g., between approximately 400-900 nm. Materials such as glass, plastic, quartz, etc., are suitable. For example, a glass slide or the like can be used.

[0201] Kits of the present invention may further include components for detecting polymorphic forms of proteins encoded by genes that comprise the polymorphic variants described herein, wherein the polymorphic variant is in a coding region of a gene and results in a change in the amino acid sequence of the encoded polypeptide. Such kits may include one or more polymorphism-specific antibodies or other reagents exhibiting specific binding such as affibodies, aptamers, etc. Such antibodies may be pre-labeled, e.g., with an enzyme or a detectable moiety. In some embodiments, an antibody may be unlabelled and ingredients for labeling may be included in the kit in separate containers, or a secondary, labeled antibody is provided. An antibody may be covalently or noncovalently attached to a microparticle or to a support or substrate, e.g., a substantially planar, rigid support or substrate. Kits may also contain other suitably packaged reagents and materials needed for the particular immunoassay protocol, including solid-phase matrices, if applicable, and standards, e.g., molecular weight standards.

[0202] In certain embodiments, inventive kits are adaptable to high-throughput and/or automated operation. For example, kits may be suitable for performing assays in multiwell plates and may utilize automated fluid handling and/or robotic systems, plate readers, etc. In some embodiments, flow cytometry is used.

[0203] One of ordinary skill in the art will appreciate that a number of other polymorphic variants, haplotypes, and/or alleles associated with cardiovascular disease are known in the art in addition to those described herein. In certain embodiments, one or more of such known polymorphic variants, haplotypes, and/or alleles is detected in addition to detecting one or more of the CVDA polymorphic variants, haplotypes, or alleles described herein, and the information is used in conjunction with information obtained from detecting one or more CVDA polymorphic variants, haplotypes, and/or alleles.

[0204] In certain embodiments, at least 50%, at least 60%, at least 70%, at least 80%, at least 90%, or more (e.g., 100%) of the probes or primers in a kit are designed for the detection of a polymorphic variant, haplotype, or allele that is associated with cardiovascular disease. Thus, inventive kits are distinct from microarrays, also referred to as “chips” that contain probes capable of hybridizing to and detecting a wide variety of nucleic acids, e.g., a wide variety of SNPs. In particular, certain kits of the invention are distinct from the chips that were used to identify the SNPs disclosed herein, although such chips could be used to practice the inventive methods. Inventive kits of the invention that contain chips comprising one or more probes that detect a polymorphic variant of a SNP disclosed herein differ from such chips at least in the fact that they contain a high proportion of probes that are selected to detect SNPs and/or polymorphic variants that are associated with cardiovascular disease and/or are otherwise optimized for the detection of polymorphic variants of CVDA SNPs. In certain embodiments, at least 50%, at least 60%, at least 70%, at least 80%, at least 90%, or more (e.g., 100%) of the probes or primers in the kit are designed for the detection of a CVDA polymorphic variant, CVDA haplotype, or CVDA allele.

[0205] In certain embodiments, at least some of the probe(s), primer(s), and/or antibodies contained in a kit detect a polymorphic variant or allele that is associated with CVD, wherein the polymorphic variant or allele is described in U.S. Ser. No. 10/505,936.

[0206] Kits of the present invention can further comprise one or more additional reagents in addition to probe(s), primer(s), and/or antibodies. For example, a kit may comprise a buffer-containing solution, an enzyme such as a polymerase or ligase, nucleotides, a solution optimized for performing an enzymatic reaction using the enzyme (which may contain any necessary cofactors such as metal ions), one or more “control” nucleic acids or polypeptides, and/or a substrate (e.g., for an antibody-linked enzyme), etc. A control nucleic acid is typically a nucleic acid that has the sequence of a portion of genomic DNA or cDNA that encompasses a polymorphic region and whose sequence at the polymorphic position is known. A control polypeptide is typically a polypeptide that has the sequence of a portion of polypeptide encoded by genomic DNA or encoded by a cDNA that encompasses a polymorphic region and whose sequence at the polymorphic position is known. For example, when a kit comprises probe(s) and/or primer(s) for the detection of polymorphic variants, alleles, etc., the sequence of a positive control nucleic acid at the polymorphic position may be the same as that of a polymorphic variant that is associated with cardiovascular disease, while the sequence of a negative control nucleic acid will be the same as that of a polymorphic variant that is not associated with cardiovascular disease. In the case of a kit that contains antibodies for the detection of polymorphic proteins, a positive control polypeptide may be a polymorphic protein whose sequence at the polymorphic site is the same as that of a polymorphic variant that is associated with cardiovascular disease, while the sequence of a negative control polypeptide will be the same as that of a polymorphic variant that is not associated with cardiovascular disease.

[0207] An identifier, e.g., a bar code, radio frequency ID tag, etc., may be present in or on the kit. The identifier can be used, e.g., to uniquely identify the kit for purposes of quality control, inventory control, tracking, movement between workstations, etc.

[0208] Kits will generally include one or more vessels or containers so that certain of the individual reagents may be separately housed. The kits may also include a means for enclosing the individual containers in relatively close confinement for commercial sale, e.g., a plastic box, in which instructions, packaging materials such as styrofoam, etc., may be enclosed.

[0209] According to certain embodiments, kits are manufactured in accordance with good manufacturing practices as required for FDA-approved diagnostic kits.

[0210] Drug Targets and Screening Methods

[0211] According to certain embodiments, nucleotide sequences derived from genes disclosed herein and polypeptide sequences encoded by genes disclosed herein are useful targets to identify cardiovascular drugs, e.g., compounds that are effective in treating or preventing one or more symptoms or signs of cardiovascular disease. A “symptom” refers to a manifestation of a disease or condition that is perceived by the individual who has the condition, while a “sign” refers to a manifestation of a disease or condition that is detected by clinical diagnosis, a laboratory test, an imaging procedure, or the like. It will be appreciated that the compounds identified according to the inventive methods have a number of uses in addition to their utility for the treatment and/or prevention of cardiovascular disease. For example, such compounds can serve as lead compounds for the development of useful therapeutic agents (which term is intended to encompass agents administered for purposes of treating an existing disease or condition and agents administered prophylactically, i.e., prior to the development of a particular disease, condition, symptom, or sign). Additionally or alternatively, such compounds can also be used to gain an improved understanding of the biological functions and activities of the CVDA genes and their encoded polypeptides.

[0212] Drug targets include without limitation (i) isolated nucleic acids derived from the genes that contain the polymorphisms disclosed herein; and (ii) isolated peptides and polypeptides encoded by genes that contain the polymorphisms disclosed herein.

[0213] In certain embodiments, an isolated nucleic acid comprising one or more polymorphic positions is tested in vitro or in vivo (e.g., within intact cells) for its ability to bind test compounds in a sequence-specific manner. In certain embodiments, inventive methods comprise: (i) providing a first nucleic acid containing a particular sequence at a polymorphic position, e.g., a position of a CVDA polymorphism; (ii) contacting the nucleic acid with a test compound under conditions appropriate for binding; and (iii) identifying a compound that binds selectively to the first nucleic acid. In some embodiments, inventive methods comprise further providing a second nucleic acid whose sequence is identical to that of the first nucleic acid except that it has a different sequence at the same polymorphic position; and identifying a compound that binds selectively to one of the nucleic acids. For example, the first nucleic acid may contain a CVDA polymorphic variant and the second nucleic acid may contain a different polymorphic variant at the same position that is not associated with cardiovascular disease, and the method may identify a compound that binds selectively or preferentially to the nucleic acid that comprises the CVDA polymorphic variant. Any suitable method can be used to assay binding including direct methods such as isolating a complex containing the nucleic acid and the compound, detecting a label associated with a compound that has bound to the nucleic acid, etc. Functional assays can also be used. For example, an siRNA or shRNA that specifically binds to a nucleic acid can be identified by contacting a cell with the siRNA or expressing the shRNA in a cell and determining whether expression of an mRNA transcribed from a gene that includes a CVDA polymorphism and/or expression of a polypeptide encoded by the gene is inhibited.

[0214] Selective binding as used herein refers to any measurable difference in any parameter of binding, such as, e.g., binding affinity, binding capacity, etc. In some embodiments, an agent exhibits selective binding in that its binding affinity (as determined by Ka) towards a first nucleic acid or polypeptide under the particular conditions tested is, for example, at least 5-fold greater than its binding affinity towards at least 90% of the other nucleic acids or polypeptides that would be present in a typical cell or cell lysate. In other embodiments the Ka is at least 10, 20, 50, or 100-fold greater.

[0215] In certain embodiments, an isolated peptide or polypeptide comprising one or more polymorphic positions is tested in vitro or in vivo for its ability to bind a test compound in a sequence-specific manner. Certain of the screening methods involve (i) providing a first polypeptide containing a particular sequence at a polymorphic position, e.g., a position of a CVDA polymorphism; (ii) contacting the polypeptide with a test compound under conditions appropriate for binding; and (iii) identifying a compound that binds selectively to the first polypeptide. In some embodiments, inventive methods comprise also providing a second polypeptide whose sequence is identical to that of the first polypeptide except that it has a different sequence at the same polymorphic position; and identifying a compound that binds selectively to one of the polypeptide. For example, the first polypeptide may contain a CVDA polymorphic variant and the second nucleic acid may contain a polymorphic variant at the same position that is not associated with cardiovascular disease, and the method may identify a compound that binds selectively or preferentially to the polypeptide that comprises the CVDA polymorphic variant. Any suitable method can be used to assay binding including direct methods such as isolating a complex containing the polypeptide and the compound, detecting a label associated with a compound that has bound to the polypeptide, etc. A variety of immunological methods known in the art can be used for detecting specific binding agents. Functional assays can also be used in the case of polypeptides that have a known biological function or biochemical activity.

[0216] Agents such as antisense molecules, siRNAs, shRNAs, ribozymes, other nucleic acids, peptides or polypeptides, small molecules, etc., can be tested to determine whether they modulate the expression of a CVDA gene. In certain embodiments, the invention provides methods for identifying an agent that modulates expression of a CVDA polynucleotide or polypeptide comprising steps of: (i) providing a sample comprising cells that express a CVDA polynucleotide or polypeptide; (ii) contacting the cells with a test compound; (iii) determining whether the level of expression of the polynucleotide or polypeptide in the presence of the compound is increased or decreased relative to the level of expression or activity of the polynucleotide or polypeptide in the absence of the compound; and (iv) identifying the compound as a modulator of the CVDA polynucleotide or polypeptide if the level of expression or activity of the CVDA polynucleotide or polypeptide is higher or lower in the presence of the compound relative to its level of expression or activity in the absence of the compound.

[0217] Expression of a CVDA polynucleotide or polypeptide can be measured using a variety of methods well known in the art in order to determine whether any candidate agent increases or decreases expression (or for other purposes). In general, any measurement technique capable of determining RNA or protein presence or abundance may be used for these purposes. For RNA such techniques include, but are not limited to, microarray analysis. For information relating to microarrays and also RNA amplification and labeling techniques, which may also be used in conjunction with other methods for RNA detection, see, e.g., Lipshutz, R., et al., Nat Genet., 21(1 Suppl):20-4, 1999; Kricka L., Ann. Clin. Biochem., 39(2), pp. 114-129; Schweitzer, B. and Kingsmore, S., Curr Opin Biotechnol February 2001; 12(1):21-7; Vineet, G., et al., Nucleic Acids Research, 2003, Vol. 31, No. 4.; Cheung, V., et al., Nature Genetics Supplement, 21:15-19, 1999; Methods Enzymol, 303:179-205, 1999; Methods Enzymol, 306: 3-18, 1999; M. Schena (ed.), DNA Microarrays: A Practical Approach, Oxford University Press, Oxford, UK, 1999. See also U.S. Pat Nos. 5,242,974; 5,384,261; 5,405,783; 5,412,087; 5,424,186; 5,429,807; 5,436,327; 5,445,934; 5,472,672; 5,527,681; 5,529,756; 5,545,531; 5,554,501; 5,556,752; 5,561,071; 5,599,695; 5,624,711; 5,639,603; 5,658,734; 6,235,483; WO 93/17126; WO 95/11995; WO 95/35505; EP 742 287; EP 799 897; U.S. Pat. Nos. 5,514,545; 5,545,522; 5,716,785; 5,932,451; 6,132,997; 6,235,483; US Patent Application Publication 20020110827.

[0218] Other methods for detecting expression of CVDA polynucleotides include Northern blots, RNAse protection assays, reverse transcription (RT)-PCR assays, real time RT-PCR (e.g., Taqman™ assay, Applied Biosystems), SAGE (Velculescu et al. Science, vol. 270, pp. 484-487, October 1995), Invader® technology (Third Wave Technologies), etc. See, e.g., Eis, P. S. et al., Nat. Biotechnol. 19:673, 2001; Berggren, W. T. et al., Anal. Chem. 74:1745, 2002, etc. Methods for detecting DEA polypeptides include, but are not limited to, immunoblots (Western blots), immunofluorescence, flow cytometry (e.g., using appropriate antibodies), mass spectrometry, and protein microarrays (Elia, G., Trends Biotechnol, 20(12 Suppl): S19-22, 2002, and reference therein).

[0219] The invention also provides methods for identifying an agent that modulates expression or activity of a CVDA polynucleotide or polypeptide comprising steps of: (i) providing a sample comprising a CVDA polynucleotide or polypeptide; (ii) contacting the sample with a test compound; (iii) determining whether the level of expression or activity of the polynucleotide or polypeptide in the presence of the test compound is increased or decreased relative to the level of expression or activity of the polynucleotide or polypeptide in the absence of the compound; and (iv) identifying the test compound as a modulator of the expression or activity of the CVDA polynucleotide or polypeptide if the level of expression or activity of the CVDA polynucleotide or polypeptide is higher or lower in the presence of the compound relative to its level of expression or activity in the absence of the compound. In certain embodiments, a sample comprises cells that express the CVDA polypeptide. Agents to be screened may include any of those discussed above. Agents identified according to the above methods may be further tested in subjects, e.g., humans or other animals.

[0220] In certain embodiments, a multiplicity of compounds are tested either individually or in combination for their ability to bind to a nucleic acid or polypeptide comprising a CVDA polymorphism. High-throughput screening methods can advantageously be used.

[0221] Compounds suitable for screening according to the above methods include small molecules, natural products, peptides, nucleic acids, etc. In some embodiments test compounds are screened from large libraries of synthetic or natural compounds. Numerous means are currently used for random and directed synthesis of small molecules, saccharides, peptide, and nucleic acid based compounds. Synthetic compound libraries are commercially available from, e.g., Maybridge Chemical Co. (Trevillet, Cornwall, UK), Comgenex (Princeton, N.J.), Brandon Associates (Merrimack, N.H.), and Microsource (New Milford, Conn.). A rare chemical library is available from Aldrich (Milwaukee, Wis.). Additionally or alternatively, libraries of natural compounds in the form of bacterial, fungal, plant and animal extracts are available from e.g. Pan Laboratories (Bothell, Wash.) or MycoSearch (N.C.), or are readily producible. Additionally or alternatively, natural and synthetically produced libraries and compounds are readily modified through conventional chemical, physical, and biochemical means.

[0222] Another representative example of a library is known as DIVERSet™, available from ChemBridge Corporation, 16981 Via Tazon, Suite G, San Diego, Calif. 92127. DIVERSet™ contains between 10,000 and 50,000 drug-like, hand-synthesized small molecules. The compounds are pre-selected to form a “universal” library that covers the maximum pharmacophore diversity with the minimum number of compounds and is suitable for either high throughput or lower throughput screening. For descriptions of additional libraries, see, for example, Tan, et al., “Stereoselective Synthesis of Over Two Million Compounds Having Structural Features Both Reminiscent of Natural Products and Compatible with Miniaturized Cell-Based Assays”, Am. Chem Soc. 120, 8565-8566, 1998; Floyd C D, Leblanc C, Whittaker M, Prog Med Chem 36:91-168, 1999. Numerous libraries are commercially available, e.g., from AnalytiCon USA Inc., P.O. Box 5926, Kingwood, Tex. 77325; 3-Dimensional Pharmaceuticals, Inc., 665 Stockton Drive, Suite 104, Exton, Pa. 19341-1151; Tripos, Inc., 1699 Hanley Rd., St. Louis, Mo., 63144-2913, etc. In certain embodiments, the methods are performed in a high-throughput format using techniques that are well known in the art, e.g., in multiwell plates, using robotics for sample preparation and dispensing, etc. Representative examples of various screening methods may be found, for example, in U.S. Pat. No. 5,985,829, U.S. Pat. No. 5,726,025, U.S. Pat. No. 5,972,621, and U.S. Pat. No. 6,015,692. The skilled practitioner will readily be able to modify and adapt these methods as appropriate.

[0223] Molecular modeling can be used to identify a pharmacophore for a particular target, e.g., the minimum functionality that a molecule must have to possess activity at that target. Such modeling can be based, for example, on a predicted structure for the target (e.g., a two-dimensional or three-dimensional structure). Software programs for identifying such potential lead compounds are known in the art, and once a compound exhibiting activity is identified, standard methods may be employed to refine the structure and thereby identify more effective compounds. For example computer-based screening can be used to identify small organic compounds that bind to concave surfaces (pockets) of proteins, can identify small molecule ligands for numerous proteins of interest (Huang, Z., Pharm. & Ther. 86: 201-215, 2000). In silico discovery of small molecules that bind to a protein of interest will typically involve, for example pharmacophore-aided database searches, virtual protein-ligand docking, and/or structure-activity modeling. For example, the computer program DOCK and variants thereof is widely used (Lorber, D. and Shoichet, B., Protein Science, 7:938-950, 1998). Other non-limiting examples of suitable programs include Autodock and Flexx. It is noted that such programs and the hardware used to run them have undergone significant improvement since their introduction. Databases providing compound structures suitable for virtual screening are available in the art. For example, ZINC is a database that provides a library of 727,842 molecules, each with 3D structure, which was prepared using catalogs of compounds that are commercially available (Irwin J J and Shoichet B K. J Chem Inf Model., 45(1):177-82, 2005). Each molecule in the library contains vendor and purchasing information and is ready for docking using a number of popular docking programs. In some embodiments, the structure of a CVDA polypeptide is screened against a database using a computer-based method to identify small molecules that bind to the polypeptide. Assays to identify and/or to confirm molecules that bind to a polypeptide could include functional assays, e.g., assessing the ability of a compound to prevent blood coagulation. Radioligand binding assays, competition assays, immunologically based assays, etc., may also be used.

[0224] Intact cells or whole animals, e.g., transgenic non-human animals expressing polymorphic variants of genes disclosed herein can be used in screening methods to identify candidate cardiovascular drugs.

[0225] In certain embodiments, a cell line is established from an individual exhibiting a particular genotype with respect to one or more CVDA polymorphisms. In certain embodiments, cells (including without limitation mammalian, insect, yeast, or bacterial cells) are programmed to express a gene comprising one or more polymorphic sequences by introduction of appropriate DNA. Identification of candidate compounds can be achieved using any suitable assay, including without limitation (i) assays that measure selective binding of test compounds to particular polymorphic variants of proteins encoded by genes disclosed herein; (ii) assays that measure the ability of a test compound to modify (e.g., inhibit or enhance) a measurable activity or function of proteins encoded by genes disclosed herein; and (iii) assays that measure the ability of a compound to modify (e.g., inhibit or enhance) the transcriptional activity of sequences derived from the promoter or other regulatory regions of genes disclosed herein.

[0226] In general, a screen for a ligand that specifically binds to any particular polypeptide may comprise steps of contacting the polypeptide with a candidate ligand under conditions in which binding can take place; and determining whether binding has occurred. Any appropriate method for detecting binding, many of which are known in the art, may be used. One of ordinary skill in the art will be able to select an appropriate method taking into consideration, for example, whether the candidate ligand is a small molecule, peptide, nucleic acid, etc. For example, the candidate ligand may be tagged, e.g., with a radioactive molecule, fluorescent molecule, etc. The polypeptide can then be isolated, e.g., immunoprecipitated from the container in which the contacting has taken place (for methods performed entirely in vitro) or from a cell lysate, and assayed to determine whether radiolabel has been bound. This approach may be particularly appropriate for small molecules. Binding can be confirmed by any of a number of methods, e.g., radiolabel assays, plasmon resonance assays, etc. Phage display represents another method for the identification of ligands that specifically bind to polypeptides. In addition, determination of the partial or complete three-dimensional structure of a polypeptide (e.g., using nuclear magnetic resonance, X-ray crystallography, etc.) may facilitate the design of appropriate ligands.

[0227] Functional assays may also be used to identify ligands, particularly ligands that behave as agonists or antagonists, activators, or inhibitors of particular polypeptides. For example, a polypeptide of interest may possess a measurable or detectable functional activity and that functional activity may be increased or decreased upon binding of the ligand. Non-limiting examples of functional activities of a polypeptide include the ability to catalyze a chemical reaction either in vitro or in a cell, and/or the ability to induce a change of any sort in a biological system, e.g., a change in cellular phenotype, a change in gene transcription, a change in membrane current, a change in intracellular or extracellular pH, a change in the intracellular or extracellular concentration of an ion, etc. when present within a cell or when applied to a cell.

[0228] Thus, in certain embodiments, the invention provides methods for screening for a ligand for a CVDA polypeptide comprising steps of: (i) providing a sample comprising a CVDA polypeptide; (ii) contacting the sample with a candidate compound; (iii) determining whether the level of activity of the polypeptide in the presence of the compound is increased or decreased relative to the level of activity of the CVDA polypeptide in the absence of the compound; and (iv) identifying the compound as a ligand of the CVDA polypeptide if the level of activity of the CVDA polypeptide is higher or lower in the presence of the compound relative to its level of activity in the absence of the compound. In certain embodiments of the method the sample comprises cells that express the CVDA polypeptide. In some embodiments the CVDA polypeptide is encoded by a gene that comprises a polymorphic variant associated with cardiovascular disease.

[0229] In certain embodiments, transgenic non-human animals (e.g., rodents such as mice or rats) are created in which (i) one or more human genes disclosed herein, having different sequences at particular polymorphic positions are stably inserted into the genome of the transgenic animal; and/or (ii) the endogenous animal counterparts of genes disclosed herein are inactivated and replaced with human genes disclosed herein, having different sequences at particular polymorphic positions. Such transgenic non-human animals are encompassed within the scope of the invention. See, e.g., Coffman, Semin. Nephrol. 17:404, 1997; Esther et al., Lab. Invest. 74:953, 1996; Murakami et al., Blood Press. Suppl. 2:36, 1996. Such animals can be treated with candidate compounds and monitored for one or more indicators of cardiovascular disease. Any indicator can be assessed, and a wide variety of methods can be employed. For example, imaging, measurement of lipid levels, histopathologic examination, mortality rate, etc., can be used as an indicator.

[0230] In certain embodiments a candidate compound, e.g., a compound identified according to any of the methods described above, is administered to an animal model of cardiovascular disease, and the effect of the compound on the development of cardiovascular disease in the animal, is monitored. For example, any of the screening methods can include a step of administering the compound to an animal suffering from or at risk of developing a cardiovascular disease and evaluating the response. Response can be evaluated in any of a variety of ways, e.g., by assessing clinical features, laboratory data, blood vessel images, etc. A comparison may be performed with similar animals who did not receive the compound or who received a lower or higher amount of the compound. A number of animal models (e.g., mouse, rat, rabbit, pig, etc.) for cardiovascular diseases are known in the art. Such models may involve genetic alterations, administration of drugs, etc., to induce the development of a cardiovascular disease.

[0231] Certain embodiments provide transgenic non-human animals (e.g.,. mammals such as mice or rats) in which the endogenous counterpart of a human gene disclosed herein is “knocked out” or mutated. Such animals may, without limitation, serve as useful animal models for cardiovascular disease and may be used for testing candidate compounds.

[0232] Methods of Treatment and Pharmaceutical Compositions

[0233] As mentioned above, certain of the CVDA polymorphisms may play a causative role in cardiovascular disease. Certain embodiments provide methods of treating or preventing a cardiovascular disease comprising administering an agent that modulates the expression or activity of a CVDA gene or expression product thereof to an individual in need of treatment or prevention of cardiovascular disease. The agent can be any of the CVDA nucleic acids, polypeptides, antibodies, or ligands described above. In an exemplary embodiment, if a CVDA polymorphic variant is expressed at lower levels than a polymorphic variant that is not associated with cardiovascular disease, an agent that increases its expression or functional activity, or substitutes for its functional activity, can be administered. For example, the normal form of the polypeptide can be administered. In another exemplary embodiment, if activity of the CVDA polymorphic variant contributes to cardiovascular disease, an inhibitor such as an siRNA, inhibitory ligand, antibody, etc., can be administered.

[0234] Any of the agents described herein can be formulated and administered according to methods known in the art. In certain embodiments, the invention provides compositions comprising the inventive agents, e.g., compositions comprising a pharmaceutically acceptable carrier, diluent, excipient, etc. Suitable preparations, e.g., substantially pure preparations of the compounds may be combined with pharmaceutically acceptable carriers, diluents, solvents, etc., to produce an appropriate pharmaceutical composition. In certain embodiments, the invention therefore provides a variety of pharmaceutically acceptable compositions for administration to a subject comprising (i) an agent that modulates the expression or activity of a CVDA; and (ii) a pharmaceutically acceptable carrier, adjuvant, or vehicle. Inventive pharmaceutical compositions, when administered to a subject, may be advantageously administered for a time and in an amount sufficient to treat or prevent the disease or condition for whose treatment or prevention they are administered, e.g., a cardiovascular disease or condition, or a symptom of such.

[0235] In various embodiments, an effective amount of the pharmaceutical composition is administered to a subject by any suitable route of administration including, but not limited to, intravenous, intramuscular, by inhalation, by catheter, intraocularly, orally, rectally, intradermally, by application to the skin, etc.

[0236] Inventive compositions may be formulated for delivery by any available route including, but not limited to parenteral, oral, by inhalation to the lungs, nasal, bronchial, opthalmic, transdermal (topical), transmucosal, rectal, and vaginal routes. The term “parenteral” as used herein includes subcutaneous, intravenous, intramuscular, intra-articular, intra-synovial, intrasternal, intrathecal, intrahepatic, intralesional and intracranial injection or infusion techniques. In certain embodiments, such compositions are administered either orally or intravenously.

[0237] The term “pharmaceutically acceptable carrier, adjuvant, or vehicle” refers to a non-toxic carrier, adjuvant, or vehicle that does not destroy the pharmacological activity of the compound with which it is formulated. Pharmaceutically acceptable carriers, adjuvants or vehicles that may be used in the compositions of this invention include, but are not limited to, ion exchangers, alumina, aluminum stearate, lecithin, serum proteins, such as human serum albumin, buffer substances such as phosphates, glycine, sorbic acid, potassium sorbate, partial glyceride mixtures of saturated vegetable fatty acids, water, salts or electrolytes, such as protamine sulfate, disodium hydrogen phosphate, potassium hydrogen phosphate, sodium chloride, zinc salts, colloidal silica, magnesium trisilicate, polyvinyl pyrrolidone, cellulose-based substances, polyethylene glycol, sodium carboxymethylcellulose, polyacrylates, waxes, polyethylene-polyoxypropylene-block polymers, polyethylene glycol and wool fat. Solvents, dispersion media, coatings, antibacterial and antifungal agents, isotonic and absorption delaying agents, and the like, compatible with pharmaceutical administration may be included. Supplementary active compounds, e.g., compounds independently active against the disease or clinical condition to be treated, or compounds that enhance activity of a compound, can also be incorporated into the compositions.

[0238] Pharmaceutically acceptable salts of the compounds of this invention include those derived from pharmaceutically acceptable inorganic and organic acids and bases. Examples of suitable acid salts include acetate, adipate, alginate, aspartate, benzoate, benzenesulfonate, bisulfate, butyrate, citrate, camphorate, camphorsulfonate, cyclopentanepropionate, digluconate, dodecylsulfate, ethanesulfonate, formate, fumarate, glucoheptanoate, glycerophosphate, glycolate, hemisulfate, heptanoate, hexanoate, hydrochloride, hydrobromide, hydroiodide, 2-hydroxyethanesulfonate, lactate, maleate, malonate, methanesulfonate, 2-naphthalenesulfonate, nicotinate, nitrate, oxalate, palmoate, pectinate, persulfate, 3-phenylpropionate, phosphate, picrate, pivalate, propionate, salicylate, succinate, sulfate, tartrate, thiocyanate, tosylate and undecanoate. Other acids, such as oxalic, while not in themselves pharmaceutically acceptable, may be employed in the preparation of salts useful as intermediates in obtaining certain inventive compounds and their pharmaceutically acceptable acid addition salts.

[0239] Salts derived from appropriate bases include alkali metal (e.g., sodium and potassium), alkaline earth metal (e.g., magnesium), ammonium and N+(C1-4 alkyl)4 salts. This invention also envisions the quaternization of any basic nitrogen-containing groups of the compounds disclosed herein. Water or oil-soluble or dispersible products may be obtained by such quaternization.

[0240] A pharmaceutical composition is formulated to be compatible with its intended route of administration. Solutions or suspensions used for parenteral (e.g., intravenous), intramuscular, intradermal, or subcutaneous application can include the following components: a sterile diluent such as water for injection, saline solution, fixed oils, polyethylene glycols, glycerine, propylene glycol or other synthetic solvents; antibacterial agents such as benzyl alcohol or methyl parabens; antioxidants such as ascorbic acid or sodium bisulfite; chelating agents such as ethylenediaminetetraacetic acid; buffers such as acetates, citrates or phosphates and agents for the adjustment of tonicity such as sodium chloride or dextrose. pH can be adjusted with acids or bases, such as hydrochloric acid or sodium hydroxide. The parenteral preparation can be enclosed in ampoules, disposable syringes or multiple dose vials made of glass or plastic.

[0241] Pharmaceutical compositions suitable for injectable use typically include sterile aqueous solutions (where water soluble) or dispersions and sterile powders for the extemporaneous preparation of sterile injectable solutions or dispersion. For intravenous administration, suitable carriers include, but are not limited to, physiological saline, bacteriostatic water, Cremophor EL™ (BASF, Parsippany, N.J.), phosphate buffered saline (PBS), or Ringer's solution.

[0242] Sterile, fixed oils are conventionally employed as a solvent or suspending medium. For this purpose, any bland fixed oil may be employed including synthetic mono- or di-glycerides. Fatty acids, such as oleic acid and its glyceride derivatives are useful in the preparation of injectables, as are natural pharmaceutically-acceptable oils, such as olive oil or castor oil, especially in their polyoxyethylated versions. Such oil solutions or suspensions may also contain a long-chain alcohol diluent or dispersant, such as carboxymethyl cellulose or similar dispersing agents that are commonly used in the formulation of pharmaceutically acceptable dosage forms including emulsions and suspensions. Other commonly used surfactants, such as Tweens, Spans and other emulsifying agents or bioavailability enhancers which are commonly used in the manufacture of pharmaceutically acceptable solid, liquid, or other dosage forms may also be used for the purposes of formulation.

[0243] In all cases, the composition should be sterile, if possible, and should be fluid to the extent that easy syringability exists.

[0244] Certain pharmaceutical formulations are stable under the conditions of manufacture and storage and must be preserved against the contaminating action of microorganisms such as bacteria and fungi. In general, the relevant carrier can be a solvent or dispersion medium containing, for example, water, ethanol, polyol (for example, glycerol, propylene glycol, and liquid polyetheylene glycol, and the like), and suitable mixtures thereof The proper fluidity can be maintained, for example, by the use of a coating such as lecithin, by the maintenance of the required particle size in the case of dispersion and by the use of surfactants. Prevention of the action of microorganisms can be achieved by various antibacterial and antifungal agents, for example, parabens, chlorobutanol, phenol, ascorbic acid, thimerosal, and the like. In many cases, it will be advantageous to include isotonic agents, for example, sugars, polyalcohols such as manitol, sorbitol, and/or sodium chloride in the composition. Prolonged absorption of injectable compositions can be brought about by including in the composition an agent which delays absorption, for example, aluminum monostearate and gelatin. Prolonged absorption of oral compositions can be achieved by various means including, but not limited to, encapsulation.

[0245] Sterile injectable solutions can be prepared by incorporating the active compound in the required amount in an appropriate solvent with one or a combination of ingredients enumerated above, as required, followed by filtered sterilization. In certain embodiments, solutions for injection are free of endotoxin. Generally, dispersions are prepared by incorporating the active compound into a sterile vehicle which contains a basic dispersion medium and the required other ingredients from those enumerated above. In the case of sterile powders for the preparation of sterile injectable solutions, certain methods of preparation are vacuum drying and freeze-drying which yields a powder of the active ingredient plus any additional desired ingredient from a previously sterile-filtered solution thereof

[0246] Oral compositions generally include an inert diluent or an edible carrier. For the purpose of oral therapeutic administration, the active compound can be incorporated with excipients and used in the form of tablets, troches, or capsules, e.g. gelatin capsules. Oral compositions can also be prepared using a fluid carrier for use as a mouthwash. Pharmaceutically compatible binding agents, and/or adjuvant materials can be included as part of the composition. The tablets, pills, capsules, troches and the like can contain any of the following ingredients, or compounds of a similar nature: a binder such as microcrystalline cellulose, gum tragacanth or gelatin; an excipient such as starch or lactose, a disintegrating agent such as alginic acid, Primogel, or corn starch; a lubricant such as magnesium stearate or Sterotes; a glidant such as colloidal silicon dioxide; a sweetening agent such as sucrose or saccharin; or a flavoring agent such as peppermint, methyl salicylate, or orange flavoring. Formulations for oral delivery may advantageously incorporate agents to improve stability within the gastrointestinal tract and/or to enhance absorption.

[0247] For administration by inhalation, the inventive compositions are advantageously delivered in the form of an aerosol spray from a pressured container or dispenser which contains a suitable propellant, e.g., a gas such as carbon dioxide, or a nebulizer. Liquid or dry aerosol (e.g., dry powders, large porous particles, etc.) can be used. The present invention also contemplates delivery of compositions using a nasal spray.

[0248] For topical applications, the pharmaceutically acceptable compositions may be formulated in a suitable ointment containing the active component suspended or dissolved in one or more carriers. Carriers for topical administration of the compounds of this invention include, but are not limited to, mineral oil, liquid petrolatum, white petrolatum, propylene glycol, polyoxyethylene, polyoxypropylene compound, emulsifying wax and water. Alternatively, the pharmaceutically acceptable compositions can be formulated in a suitable lotion or cream containing the active components suspended or dissolved in one or more pharmaceutically acceptable carriers. Suitable carriers include, but are not limited to, mineral oil, sorbitan monostearate, polysorbate 60, cetyl esters wax, cetearyl alcohol, 2_octyldodecanol, benzyl alcohol and water.

[0249] For local delivery to the eye, the pharmaceutically acceptable compositions may be formulated as micronized suspensions in isotonic, pH adjusted sterile saline, or, in certain embodiments, as solutions in isotonic, pH adjusted sterile saline, either with or without a preservative such as benzylalkonium chloride. Alternatively, for ophthalmic uses, the pharmaceutically acceptable compositions may be formulated in an ointment such as petrolatum.

[0250] Pharmaceutically acceptable compositions of the present invention may also be administered by nasal aerosol or inhalation. Such compositions are prepared according to techniques well-known in the art of pharmaceutical formulation and may be prepared as solutions in saline, employing benzyl alcohol or other suitable preservatives, absorption promoters to enhance bioavailability, fluorocarbons, and/or other conventional solubilizing or dispersing agents.

[0251] Systemic administration can also be by transmucosal or transdermal means. For transmucosal or transdermal administration, penetrants appropriate to the barrier to be permeated may be in the formulation. Such penetrants are generally known in the art, and include, for example, for transmucosal administration, detergents, bile salts, and fusidic acid derivatives. Transmucosal administration can be accomplished through the use of nasal sprays or suppositories. For transdermal administration, the active compounds are formulated into ointments, salves, gels, or creams as generally known in the art.

[0252] Compounds can also be prepared in the form of suppositories (e.g., with conventional suppository bases such as cocoa butter and other glycerides) or retention enemas for rectal delivery.

[0253] In certain embodiments, the active compounds are prepared with carriers that will protect the compound against rapid elimination from the body, such as a controlled release formulation, including implants and microencapsulated delivery systems. Biodegradable, biocompatible polymers can be used, such as ethylene vinyl acetate, polyanhydrides, polyglycolic acid, collagen, polyorthoesters, polyethers, and polylactic acid. Methods for preparation of such formulations will be apparent to those skilled in the art. Certain of the materials can also be obtained commercially from Alza Corporation and Nova Pharmaceuticals, Inc. Liposomal suspensions can also be used as pharmaceutically acceptable carriers. These can be prepared according to methods known to those skilled in the art, for example, as described in U.S. Pat. No. 4,522,811 and other references listed herein. Liposomes, including targeted liposomes (e.g., antibody targeted liposomes) and pegylated liposomes have been described (Hansen C B, et al., Biochim Biophys Acta. 1239(2):133-44,1995; Torchilin V P, et al., Biochim Biophys Acta, 1511(2):397-411, 2001; Ishida T, et al., FEBS Lett. 460(1):129-33, 1999). One of ordinary skill in the art will appreciate that the materials and methods selected for preparation of a controlled release formulation, implant, etc., should be such as to retain activity of the compound. For example, it may be desirable to avoid excessive heating of polypeptides, which could lead to denaturation and loss of activity.

[0254] It is typically advantageous to formulate oral or parenteral compositions in unit dosage form for ease of administration and uniformity of dosage. Unit dosage form as used herein refers to physically discrete units suited as unitary dosages for the subject to be treated; each unit containing a predetermined quantity of active compound calculated to produce the desired therapeutic effect in association with the required pharmaceutical carrier.

[0255] Toxicity and therapeutic efficacy of such compounds can be determined by standard pharmaceutical procedures in cell cultures or experimental animals, e.g. for determining the LD₅₀ (the dose lethal to 50% of the population) and the ED₅₀ (the dose therapeutically effective in 50% of the population). The dose ratio between toxic and therapeutic effects is the therapeutic index and it can be expressed as the ratio LD₅₀/ED₅₀. Compounds that exhibit high therapeutic indices are advantageous. While compounds that exhibit toxic side effects can be used, care should be taken to design a delivery system that targets such compounds to the site of affected tissue in order to minimize potential damage to uninfected cells and, thereby, reduce side effects.

[0256] The data obtained from cell culture assays and animal studies can be used in formulating a range of dosage for use in humans. The dosage of such compounds lies advantageously within a range of circulating concentrations that include the ED₅₀ with little or no toxicity. The dosage can vary within this range depending upon the dosage form employed and the route of administration utilized. For any compound used in accordance with inventive methods disclosed herein, a therapeutically effective dose may be estimated initially from cell culture assays. A dose can be formulated in animal models to achieve a circulating plasma concentration range that includes the ED₅₀ as determined in cell culture. Such information can be used to more accurately determine useful doses in humans. Levels in plasma can be measured, for example, by high performance liquid chromatography.

[0257] A therapeutically effective amount of a pharmaceutical composition typically ranges from about 0.001 to 100 mg/kg body weight, about 0.01 to 25 mg/kg body weight, about 0.1 to 20 mg/kg body weight, or about 1 to 10 mg/kg, 2 to 9 mg/kg, 3 to 8 mg/kg, 4 to 7 mg/kg, or 5 to 6 mg/kg body weight, although it will be recognized that therapeutically effective amounts depend on the particular pharmaceutical composition. As such, these ranges are merely exemplary in nature. The pharmaceutical composition can be administered at various intervals and over different periods of time as required, e.g., multiple times per day, daily, every other day, once a week for between about 1 to 10 weeks, between 2 to 8 weeks, between about 3 to 7 weeks, about 4, 5, or 6 weeks, etc. The skilled artisan will appreciate that certain factors can influence the dosage and timing required to effectively treat a subject, including but not limited to the severity of the disease or disorder, previous treatments, the general health and/or age of the subject, and other diseases present. Generally, treatment of a subject with an inventive composition can include a single treatment or, in many cases, can include a series of treatments. It will be appreciated that a range of different dosage combinations can be used.

[0258] Exemplary doses include milligram or microgram amounts of the inventive compounds per kilogram of subject or sample weight (e.g., about 1 microgram per kilogram to about 500 milligrams per kilogram, about 100 micrograms per kilogram to about 5 milligrams per kilogram, or about 1 microgram per kilogram to about 50 micrograms per kilogram.) For local administration (e.g., intranasal), doses much smaller than these may be used. It will furthermore be understood that appropriate doses depend upon the potency of the agent, and may optionally be tailored to the particular recipient, for example, through administration of increasing doses until a preselected desired response is achieved. It is understood that the specific dose level for any particular subject may depend upon a variety of factors including the activity of the specific compound employed, the age, body weight, general health, gender, and diet of the subject, the time of administration, the route of administration, the rate of excretion, any drug combination, and the degree of expression or activity to be modulated.

[0259] The invention further provides pharmaceutical compositions comprising an agent and, optionally, one or more additional agents. The invention further provides pharmaceutical compositions comprising a plurality of agents and, optionally, one or more additional active agent(s). Such additional active agent(s) may include an agent that has a different mechanism of action to that of the first agent. In some embodiments, such an additional active agent is a statin. In some embodiments, such an additional active agent is an anti-inflammatory agent or an anti-platelet agent.

### EXAMPLES

### Example 1

### Identification of SNPs and Haplotypes Associated with Cardiovascular Disease

[0260] Materials and Methods

[0261] A group of patients with a previous history of MI were recruited through the primary hospitals and care centers from the state of North Rhine Westphalia (NRW), Germany. The study sample of MI patients was compared with age- and sex-matched control individuals recruited in the Prospective Cardiovascular Münster (PROCAM) study for the identification and validation of genetic risk factors associated with coronary artery disease and to estimate additional genetic risk. The PROCAM study is a large, ongoing prospective epidemiological study in which a cohort of more than 43,000 men and women were initially examined and then followed for the occurrence of major coronary events (defined as the occurrence of sudden cardiac death or a definite fatal or nonfatal myocardial infarction) (Assmann, G., et al., Eur. Heart. J., 19:A2-A11; Cullen, P., et al., Circulation, 96:2128, 1997; Assmann, G., et al., Circulation, 105:310, 2002). This MI incidence cohort was used to establish a set of genetic markers where significant differences in allele frequency exist between individuals having previously suffered an MI (cases) and age- and sex-matched controls having a similar risk profile based on classical risk factors.

[0262] The MI study sample was selected to be ‘enriched’ for individuals having a genetic component to their development of CVD by including only males aged<55 years, which is a clear indication of a genetic contribution to the disease phenotype based on epidemiological studies. By selecting the study sample in this manner, we increased our statistical power to detect a statistically significant association even at a smaller sample size.

[0263] In addition, all classical risk factors were recorded and used to calculate the global risk for each study sample. Global risk was calculated by the PROCAM algorithm, taking into account 8 classical risk factors,: 5 continuous variables (age, LDL cholesterol, HDL cholesterol, triglyceride level, and systolic blood pressure) and 3 discrete variables (smoking status, diabetes, and MI in family history) (described in Assmann, G., et al., Circulation, 105:310, 2002). The global risk, as well as the distribution of the classical risk factors, was used to select our healthy control sample. The controls were selected from our PROCAM study sample, which provides us with a unique control study sample, from which we can select ‘real’ control individuals that are monitored for conventional risk factors and from which we can match the control population to the cases based on global risk as well as based on age and gender. Global risk for each MI patient first and then identified a pool of PROCAM individuals that matched the global risk score. From these individuals (as we had more controls than needed) we selected those who matched, based on including the individual parameters of the PROCAM risk factors, e.g. hypertension or diabetes. The cases were scored ‘retrospectively’ based on the information our clinicians received at the time of MI. The blood samples for the lab parameters were collected within the first 24 hours after the first ‘symptoms’ so that they were reflecting the state before the MI incidence.

[0264] Without wishing to be bound by any theory, our approach to selecting cases and controls should reduce the risk of confounding factors that may bias the analysis, as cases and controls are matched according to their classical risk factors, thus allowing identification of MI-susceptibility genes and variants that are predictive of CAD and/or MI. This method of selecting cases and controls for an association study to identify polymorphisms associated with CVD is an aspect of the invention.

[0265] FIGS. 1-3 summarize certain characteristics of the individuals who were studied. It should be mentioned that the results described herein are based on an analysis that does not include all the individuals who participated in the study. However, it is believed that the overall characteristics of the subsets of individuals studied to date are representative of the complete groups. In FIG. 3, the Risk categories of <10%, 10-20%, and >20% refer to risk of having an acute coronary event within 10 years, as described in Assmann, supra. Individuals were classified as having a risk of <10%, 10-20%, or >20%. It will be appreciated that other methods of classifying could have been employed.

[0266] Genomic DNA was extracted from blood samples obtained from cases and controls after obtaining informed consent. The Affymetrix 500K Mendel array (Early Access) comprising two chips each allowing identification of 250,000 SNPs, was used according to the manufacturer's directions to identify a set of SNPs associated with MI (see information available at the web site having the URL www.affymetrix.com/products/arrays/specific/100k.affx, which provides information about the 50K chips that comprise the 100,000 SNP set). Briefly, the procedure was performed as follows, with minor modifications for the 500K array versus the 50K array:

[0267] a) Preparation of genomic DNA. The assay requires 250 ng of genomic DNA extracted from any biological sample. DNA is diluted into working stocks of 50 ng/uL using reduced EDTA TE buffer.

[0268] b) Restriction Enzyme Digestion. The strategy is to reduce the complexity of the genomic DNA up to 10 fold by performing a digestion with a single restriction enzyme. In order to achieve the complete coverage, two different enzymes (XbaI and HindIII) are utilized.

[0269] c) Adaptor Ligation. After digestion, the fragments are then ligated with a common set of adaptors (Adaptor NspI and StyI). These ligation adaptors recognize the cohesive four base pair overhangs. Regardless of size, all of the digested fragments are substrates for ligation.

[0270] d) PCR Amplification and Quantification. Following ligation, the sample is diluted and the complexity of the genome is further reduced via single primer PCR amplification. This generic primer recognizes the adaptor ligated fragments and is optimized to select for product sizes ranging between 250-2000 base pairs. Each sample is set up in quadruplicate and once amplification is complete, the products are combined into a single well and purified on the QIAGEN MinElute™ 96 UF PCR Purification plate. Samples are resuspended in elution buffer. The yield of the purified product is determined spectrophotometrically.

[0271] e) Fragmentation. All samples are adjusted to the same concentration for the fragmentation step. A total of 40 μg of PCR product is needed for fragmentation. PCR targets are fragmented with DNaseI, which promotes a random distribution of fragments, and are cut into millions of short pieces of <200 base pairs.

[0272] f) End-Labelling. Each fragment is then labelled with biotin. The reaction is also catalyzed with Terminal Deoxynucleotidyl Tranferase (TDT) as a combination of both achieves the most efficient labelling process.

[0273] g) Hybridization. A cocktail mix is prepared with the end-labelled products. This mix contains an oligonucleotide control reagent, two blocking agents (Human Cot-1 and Herring Sperm DNA), Tetramethyl Ammonium Chloride (TMAC) for increasing the melting temperatures of T-A bonds and DMSO which decreased the melting temperatures of G-C bonds. The samples are transferred onto the array and washed over it for 16 to 18 hours.

[0274] h) Washing, Staining and Scanning. The next day the Affymetrix Fluidics Station 450 is used to rinse the array disposing of any non-bound DNA products which is followed by staining. This is a three step process consisting of a Streptavidin Phycoerythin (SAPE) stain, followed by an antibody amplification step and a final stain with SAPE. Once completed, each array is scanned using the Scanner 3000.

[0275] Data Analysis

[0276] Classical association analyses for individual polymorphisms and common haplotypes was performed after genotyping all individuals. For example, analysis described herein may be based on up to 210 cases and 210 controls. To compare allele frequencies between groups we applied the Chi-Square test (2-tailed) and to compare genotype frequencies the Armitage-Trend-Test or Fisher's-Exact-Test.

[0277] Hardy-Weinberg equilibrium and linkage disequilibrium was examined for each polymorphism. Populations that are randomly mating with respect to a polymorphism with alleles 1 and 2, whose frequencies are given by p and q, respectively (where p+q=1), are expected to have genotypic proportions given by Hardy-Weinberg expectations p², 2pq, and q², for 1/1 homozygotes, 1/2 heterozygotes, and 2/2 homozygotes, respectively. Departures from Hardy-Weinberg equilibrium (HWE) can be tested by contrasting the observed genotypic distribution with that expected under HWE. Observed departures might reflect unrecognized population admixture, non-random mating for the polymorphism being examined (or variation in linkage disequilibrium with that polymorphism), genotyping error, or simply chance. We note that since the data collected for these studies was effectively a random sample of individuals who met our criteria for “cases” and “controls”, there is no expectation for departure for HWE.

[0278] We tested each polymorphism for departures from HWE and assessed the linkage disequilibrium patterns among polymorphisms. Specifically, we calculated disequilibrium coefficients (D′ and r²) for all pairs of polymorphisms and used established approaches for determining the local haplotype block structures (Gabriel et al., Science 2002, 296:2225-2229) as implemented in Haploview 3.0 (Barrett J C, et al., Bioinformatics, 21(2): 263-265, 2005). Linkage disequilibrium estimates and haplotype definitions for haplotype tagging was performed on the basis of the data obtained in the 420 individuals genotyped and cross-checked with the genotyping data and haplotype patterns available through the HapMap Consortium (available at the website having the URL www.hapmap.org). Although multilocus haplotypes can be estimated accurately in unrelated individuals of the sample sizes we have been able to ascertain (for haplotypes with frequencies greater than 0.05), it may not always be possible to assign multilocus haplotypes to individuals because of the number of possible haplotype combinations consistent with an observed genotypic configuration. Thus, we conducted our analyses considering polymorphisms individually, as well as in combination, with the combinations to be considered defined by the haplotype block structures.

[0279] Tables 1 and 2 present the results of our analysis. The contents of Tables 1 and 2 are further described above.

### Equivalents and Scope of the Invention

[0280] Those skilled in the art will recognize, or be able to ascertain using no more than routine experimentation, many equivalents to the specific embodiments of the invention described herein. The scope of the present invention is not intended to be limited to the above Description, but rather is as set forth in the appended claims. In the claims articles such as “a,”, “an” and “the” may mean one or more than one unless indicated to the contrary or otherwise evident from the context. Claims or descriptions that include “or” between one or more members of a group are considered satisfied if one, more than one, or all of the group members are present in, employed in, or otherwise relevant to a given product or process unless indicated to the contrary or otherwise evident from the context. Furthermore, it is to be understood that the invention encompasses all variations, combinations, and permutations in which one or more limitations, elements, clauses, descriptive terms, etc., from one or more of the listed claims is introduced into another claim. In particular, any claim that is dependent on another claim can be modified to include one or more limitations found in any other claim that is dependent on the same base claim. In addition, it is to be understood that any particular embodiment of the present invention that falls within the prior art may be explicitly excluded from the claims. Since such embodiments are deemed to be known to one of ordinary skill in the art, they may be excluded even if not set forth explicitly herein. For example, any specific polymorphism, polymorphic variant, haplotype, gene, polynucleotide, or polypeptide can be excluded from the claims.

The application's sequence listing, which the Patent Office published only in electronic form, follows.

SEQUENCE LISTING (46606 sequences)

SEQ ID NO: 1 - DNA, 33 bp, Homo sapiens
acctggtattctatcatatttctgcttaacaag

SEQ ID NO: 2 - DNA, 33 bp, Homo sapiens
ttaacgtccacaaatcgcagtcgctaggattta

SEQ ID NO: 3 - DNA, 33 bp, Homo sapiens
gagctcactcacccattagacgctggcaactgg

SEQ ID NO: 4 - DNA, 33 bp, Homo sapiens
cggaggcttgtcaggtcaattaggagatgatta

SEQ ID NO: 5 - DNA, 33 bp, Homo sapiens
tcaccaggtcttatcagtcgtcaacctggtcca

SEQ ID NO: 6 - DNA, 51 bp, Homo sapiens
atgcaaaggctgataaaatatttcccagacatgctctaaatagcaggcaca

SEQ ID NO: 7 - DNA, 33 bp, Homo sapiens
tccccagtacttgtcatgggcttcaacgttatg

SEQ ID NO: 8 - DNA, 33 bp, Homo sapiens
tcagcaaagcaacagatgacgaggttctcagag

SEQ ID NO: 9 - DNA, 33 bp, Homo sapiens
agagaggaggaatcaataatgtggacctgccta

SEQ ID NO: 10 - DNA, 33 bp, Homo sapiens
aagcttattcaggttatcattgctatgtcttac

SEQ ID NO: 11 - DNA, 33 bp, Homo sapiens
tttgacttattcaaaagagcatccccgtccagg

SEQ ID NO: 12 - DNA, 33 bp, Homo sapiens
aactatctaaagcagccctttactgacatgaaa

SEQ ID NO: 13 - DNA, 33 bp, Homo sapiens
gatttaattacagtcctgattttcagcaccatc

SEQ ID NO: 14 - DNA, 33 bp, Homo sapiens
cacccttgaagcaggctctgaggcatctctgtc

SEQ ID NO: 15 - DNA, 33 bp, Homo sapiens
ccaccaggtagaacaggatgatccactgtctcc

SEQ ID NO: 16 - DNA, 33 bp, Homo sapiens
cttgatctcaagtcactggacagaggatactca

SEQ ID NO: 17 - DNA, 33 bp, Homo sapiens
cccgcccacatctaactggaccagaggcagtcg

SEQ ID NO: 18 - DNA, 33 bp, Homo sapiens
ggccccagttacaaactaacttttctctaggag

SEQ ID NO: 19 - DNA, 33 bp, Homo sapiens
ttagtggtaatgtcaatggtaacggtggtgatg

SEQ ID NO: 20 - DNA, 33 bp, Homo sapiens
aaatgccttttaccaatgtccagctctagaagc

SEQ ID NO: 21 - DNA, 33 bp, Homo sapiens
gccgtaggctccagacgctactttgttccaatc

SEQ ID NO: 22 - DNA, 33 bp, Homo sapiens
cattgcatttcatggatacgtctcctttgtcta

SEQ ID NO: 23 - DNA, 33 bp, Homo sapiens
gctcagagcatcccagcctgaagagcctcactc

SEQ ID NO: 24 - DNA, 33 bp, Homo sapiens
acagccttcccagaaataggaccattcacatct

SEQ ID NO: 25 - DNA, 33 bp, Homo sapiens
atgtcaccttgaaccatcttggcacagccggtt

SEQ ID NO: 26 - DNA, 33 bp, Homo sapiens
agcagagttgtccacccagtgttggccacagtg

SEQ ID NO: 27 - DNA, 33 bp, Homo sapiens
atggtcaccgtcttctgaagggctgtaggatcg

SEQ ID NO: 28 - DNA, 33 bp, Homo sapiens
gccagagctgtgtcacgatcaactctaggtata

SEQ ID NO: 29 - DNA, 33 bp, Homo sapiens
agtccacaaacattgctctccgggtgaatcctg

SEQ ID NO: 30 - DNA, 33 bp, Homo sapiens
tctcagtgctgtaacttactgtcaatgagagtg

SEQ ID NO: 31 - DNA, 33 bp, Homo sapiens
gttttgattatcaagagctaatgtatgaacata

SEQ ID NO: 32 - DNA, 33 bp, Homo sapiens
tgtcatagaactctcacccctgacttaacccaa

SEQ ID NO: 33 - DNA, 33 bp, Homo sapiens
gtgaggggattgcagagcagcgaagggcatccc

SEQ ID NO: 34 - DNA, 33 bp, Homo sapiens
tcgtttttcggagacagcggcagactgaaaacc

SEQ ID NO: 35 - DNA, 51 bp, Homo sapiens
gacgtgcacctggaaactgagatcccagtcatctggctgtaggtttcccta

SEQ ID NO: 36 - DNA, 33 bp, Homo sapiens
gagtgagggttccatatcatgttctgccatatt

SEQ ID NO: 37 - DNA, 33 bp, Homo sapiens
gagtttgtagattgaatgttccagaagatggca

SEQ ID NO: 38 - DNA, 33 bp, Homo sapiens
acccaagccaaaagccggagctcacagcaggca

SEQ ID NO: 39 - DNA, 33 bp, Homo sapiens
taactccaccccaacataatcagtaccataaag

SEQ ID NO: 40 - DNA, 33 bp, Homo sapiens
aaggcgatggctctgcgaagatctgagaagacc

SEQ ID NO: 41 - DNA, 33 bp, Homo sapiens
gacattgggctcagatgaaatgaattcagcctc

SEQ ID NO: 42 - DNA, 33 bp, Homo sapiens
actggctgagcggagatggtgtatcccttaata

SEQ ID NO: 43 - DNA, 51 bp, Homo sapiens
ctgtaaatagcttgtcacataggacgggatccgaaaaggagagttttgtgt

SEQ ID NO: 44 - DNA, 51 bp, Homo sapiens
cttttccagctttctaaaagcactactactgtaaaacttaggttatttttt

SEQ ID NO: 45 - DNA, 33 bp, Homo sapiens
tactccagtctacacagtgcttgatgttgttgt

SEQ ID NO: 46 - DNA, 33 bp, Homo sapiens
agaccctatctcaaaagaagcatgagcaaaact

SEQ ID NO: 47 - DNA, 33 bp, Homo sapiens
tggaagagatactgcatggtctgctgaacgaat

SEQ ID NO: 48 - DNA, 33 bp, Homo sapiens
ctattccagcctttccgaaaatatatttcctgt

SEQ ID NO: 49 - DNA, 33 bp, Homo sapiens
ccaacctaatacctagtagcacaaatctgatct

SEQ ID NO: 50 - DNA, 33 bp, Homo sapiens
tgaaggaatgaatgaattgcaagtttaaatgtt

SEQ ID NO: 51 - DNA, 33 bp, Homo sapiens
atgctgcacagcaaccgctgcttggcgctgaga

SEQ ID NO: 52 - DNA, 33 bp, Homo sapiens
ttagacctaattgtcatcataatgccatattaa

SEQ ID NO: 53 - DNA, 33 bp, Homo sapiens
tgttcaaggcagcaaatccctggaccttgatgg

SEQ ID NO: 54 - DNA, 33 bp, Homo sapiens
gcccagaaaaggtgcatataatttgcttccaat

SEQ ID NO: 55 - DNA, 33 bp, Homo sapiens
gtcgttggacggtaaggacagtgcttgggtcgt

SEQ ID NO: 56 - DNA, 33 bp, Homo sapiens
ggtccgagtcctaaaactgccattccttgctgc

SEQ ID NO: 57 - DNA, 51 bp, Homo sapiens
ctctgcctggttcctggagctgtcctgataaggttgccaagtggagcaaat

SEQ ID NO: 58 - DNA, 33 bp, Homo sapiens
caatctttcccaggaccaatttcagtgtgtcac

SEQ ID NO: 59 - DNA, 33 bp, Homo sapiens
ggatagctaaggtcaagaattcaaaactaacag

SEQ ID NO: 60 - DNA, 33 bp, Homo sapiens
tgcacagatgaactgatgaatcaataaataagt

SEQ ID NO: 61 - DNA, 33 bp, Homo sapiens
tgtgcactcaagttacgggttcttcaggctctg

SEQ ID NO: 62 - DNA, 33 bp, Homo sapiens
gatgctggccccagaatagcaggaggaacaagg

SEQ ID NO: 63 - DNA, 51 bp, Homo sapiens
gggattgtttttggcgctgggagaatagcctcctttctgctgaagttgcca

SEQ ID NO: 64 - DNA, 33 bp, Homo sapiens
gacagcaaattttctagaggctaggagtgttta

SEQ ID NO: 65 - DNA, 33 bp, Homo sapiens
tttaggatgattgacagtggcagtacctggact

SEQ ID NO: 66 - DNA, 51 bp, Homo sapiens
cctcctctagaacggctggcccaacgcttttccagggctcagccatttctc

SEQ ID NO: 67 - DNA, 33 bp, Homo sapiens
ctagtgtagtgatgtctatgctgttaaatatgt

SEQ ID NO: 68 - DNA, 33 bp, Homo sapiens
aaaaacttgaagaaaatgaggaagcaaaccatg

SEQ ID NO: 69 - DNA, 33 bp, Homo sapiens
gagtgacagaaaatccgggaagtcccagaagga

SEQ ID NO: 70 - DNA, 33 bp, Homo sapiens
cacctaaaatagcaaacaacaaggggcatagtg

SEQ ID NO: 71 - DNA, 33 bp, Homo sapiens
gcacactacttcaaaatgctgaaattaggtatt

SEQ ID NO: 72 - DNA, 33 bp, Homo sapiens
gaaagtagggataacctactagtcgggaggtag

SEQ ID NO: 73 - DNA, 33 bp, Homo sapiens
tgtgaaggcaggcacataaatagttaagccaca

SEQ ID NO: 74 - DNA, 33 bp, Homo sapiens
ggaaaaatgagatgtggatgaaagaaagaaacg

SEQ ID NO: 75 - DNA, 33 bp, Homo sapiens
ggatgtgacagaagccgctgagcaatctcctcc

SEQ ID NO: 76 - DNA, 33 bp, Homo sapiens
tattgtaaaaccaagcggaggacacagaatggc

SEQ ID NO: 77 - DNA, 33 bp, Homo sapiens
taactcacctgagatagtaaacaggcaagcgct

SEQ ID NO: 78 - DNA, 33 bp, Homo sapiens
attagcatcttaagccggcatcgttcatttgtc

SEQ ID NO: 79 - DNA, 33 bp, Homo sapiens
gacacaggattacaaatgaaagcccacactgtg

SEQ ID NO: 80 - DNA, 51 bp, Homo sapiens
cctcggtacaacctgaaaaagagaccaaaattggccatttctggtattttt

SEQ ID NO: 81 - DNA, 33 bp, Homo sapiens
atctttaattgttggatggaaaagaaaggaacc

SEQ ID NO: 82 - DNA, 33 bp, Homo sapiens
gaaaatcatcccaacagtgggtagttcctctct

SEQ ID NO: 83 - DNA, 33 bp, Homo sapiens
gggacccctccccatatagaagtttctagaatg

SEQ ID NO: 84 - DNA, 51 bp, Homo sapiens
caggtacattggaaagaacatgaaatttgaaataaaactcagttctgtgac

SEQ ID NO: 85 - DNA, 33 bp, Homo sapiens
gatggttgtttggaagtcatattcatttcctag

SEQ ID NO: 86 - DNA, 33 bp, Homo sapiens
gtatatgttttattcatgttctcggtggcgtat

SEQ ID NO: 87 - DNA, 33 bp, Homo sapiens
gcacccccccttctaattgtgacaatccaaagt

SEQ ID NO: 88 - DNA, 33 bp, Homo sapiens
ttggcctctggaattttaaacctttcattggta

SEQ ID NO: 89 - DNA, 33 bp, Homo sapiens
acagtgtttgaaggtggagtacaatagaaggtg

SEQ ID NO: 90 - DNA, 51 bp, Homo sapiens
ctttctccagcaaggaagaaagttatgcaaaagcacataatgaaaaacata

SEQ ID NO: 91 - DNA, 33 bp, Homo sapiens
ctgagcttatgagtcctgataaaagtctacgga

SEQ ID NO: 92 - DNA, 33 bp, Homo sapiens
aaggcaggaacaaagagaacaaccttgcttcta

SEQ ID NO: 93 - DNA, 33 bp, Homo sapiens
aactaactccaggagatagtttagaggctgtca

SEQ ID NO: 94 - DNA, 33 bp, Homo sapiens
caaatacattgtagactgagcagctgaaattgg

SEQ ID NO: 95 - DNA, 33 bp, Homo sapiens
gggtctggcaatgcaatggattgaaaataaaaa

SEQ ID NO: 96 - DNA, 33 bp, Homo sapiens
agcagggagaacagtggatcagagctctgaaga

SEQ ID NO: 97 - DNA, 33 bp, Homo sapiens
ttttctgagcttccaactgatttgaggaatagg

SEQ ID NO: 98 - DNA, 33 bp, Homo sapiens
aatctcatcccaaaacggcgtccaatctgccaa

SEQ ID NO: 99 - DNA, 33 bp, Homo sapiens
gtttaaaatgcctcattaaaagtgcatgagcat

SEQ ID NO: 100 - DNA, 33 bp, Homo sapiens
catatcttgtaagaacgggtataaacgtctaca

SEQ ID NO: 101 - DNA, 33 bp, Homo sapiens
gtgaagcctcatgaactactttgtggaagcctt

SEQ ID NO: 102 - DNA, 33 bp, Homo sapiens
cttcctttctattgtgcaaataccacccaatga

SEQ ID NO: 103 - DNA, 33 bp, Homo sapiens
gatgggggacactgactggtgttgagtagagga

SEQ ID NO: 104 - DNA, 51 bp, Homo sapiens
ccctatgctggcaggatcaagccaaggctaagctctttaactttcaacact

SEQ ID NO: 105 - DNA, 51 bp, Homo sapiens
gggtaaggcagcagtaataggtctggaaagattaacagaggctgactctaa

SEQ ID NO: 106 - DNA, 33 bp, Homo sapiens
tcatggccacctgctatggctcagggaaagcct

SEQ ID NO: 107 - DNA, 33 bp, Homo sapiens
gcactcaatgaatgaagtaacaaacattagtgg

SEQ ID NO: 108 - DNA, 33 bp, Homo sapiens
acatccccccaactcatgctgtagttctgcagg

SEQ ID NO: 109 - DNA, 33 bp, Homo sapiens
caggtgagaagctaacgcatggaagagtcttta

SEQ ID NO: 110 - DNA, 33 bp, Homo sapiens
tcaataaaccatcttagatactgtgtgcaatac

SEQ ID NO: 111 - DNA, 33 bp, Homo sapiens
tgctagttttccatcagtagacatcgttttaat

SEQ ID NO: 112 - DNA, 33 bp, Homo sapiens
gtcctgaccaagtagatgtctgtgaaatgtaga

SEQ ID NO: 113 - DNA, 33 bp, Homo sapiens
caatacctagaatagcgcagggcacataggaag

SEQ ID NO: 114 - DNA, 33 bp, Homo sapiens
tccctgatgaatattctaatactcttttcttag

SEQ ID NO: 115 - DNA, 33 bp, Homo sapiens
aatctgaaaattctcacctgaagacaaagtaaa

SEQ ID NO: 116 - DNA, 33 bp, Homo sapiens
gtgtctgtcaccttgatgttagttgtcacctta

SEQ ID NO: 117 - DNA, 33 bp, Homo sapiens
agccctttcttgatcattctgtcaaaagaaccc

SEQ ID NO: 118 - DNA, 33 bp, Homo sapiens
ttctgttttcttttccggacatcttgtgatagg

SEQ ID NO: 119 - DNA, 33 bp, Homo sapiens
gaatttaggccagagatgccagattttcaagtt

SEQ ID NO: 120 - DNA, 33 bp, Homo sapiens
ttgactttacaaatactctagaaaatctcagaa

SEQ ID NO: 121 - DNA, 33 bp, Homo sapiens
tcactccaattgccccggatgaatattggtgct

SEQ ID NO: 122 - DNA, 33 bp, Homo sapiens
tcacaaagctggacacgatacctcgtaagcctt

SEQ ID NO: 123 - DNA, 33 bp, Homo sapiens
attgtatcattttctatgtatgccatgacagga

SEQ ID NO: 124 - DNA, 33 bp, Homo sapiens
ttttagatggcatttctctttgcccaaggaggt

SEQ ID NO: 125 - DNA, 33 bp, Homo sapiens
atcccagtatccaagatgtactctgtgttgtac

SEQ ID NO: 126 - DNA, 33 bp, Homo sapiens
tctacataggccaacctgccgtgtacatgtttc

SEQ ID NO: 127 - DNA, 33 bp, Homo sapiens
gttcaatctggttacagctagcctatatgcatt

SEQ ID NO: 128 - DNA, 33 bp, Homo sapiens
ctcttcttttgccaccgatccagttaaaaattg

SEQ ID NO: 129 - DNA, 33 bp, Homo sapiens
gagagaactaaggacagatgtaaggttgcttct

SEQ ID NO: 130 - DNA, 33 bp, Homo sapiens
ctgtccaacggaagcagtagagcttttctcatg

SEQ ID NO: 131 - DNA, 33 bp, Homo sapiens
agaagaggggctaagagggtacatgatgttatg

SEQ ID NO: 132 - DNA, 33 bp, Homo sapiens
aggctaaaggcaatgagtagctctgccagaaaa

SEQ ID NO: 133 - DNA, 33 bp, Homo sapiens
agtttatttgccaagctgataaatgtctaaatt

SEQ ID NO: 134 - DNA, 33 bp, Homo sapiens
cacagaacacgatgtaggtcttcattggtgggg

SEQ ID NO: 135 - DNA, 33 bp, Homo sapiens
cacaataaaccccaaatttgcaaggttctgggg

SEQ ID NO: 136 - DNA, 33 bp, Homo sapiens
aaagcataggctggaaggagtcgaggtgcacag

SEQ ID NO: 137 - DNA, 33 bp, Homo sapiens
acggccgacaacatcagggtctggacggccgca

SEQ ID NO: 138 - DNA, 33 bp, Homo sapiens
gcattgttataaaatcgaaacactgcaaaccac

SEQ ID NO: 139 - DNA, 33 bp, Homo sapiens
aaaactcttgccttcaccccagaaaggcgaagc

SEQ ID NO: 140 - DNA, 33 bp, Homo sapiens
gtgtgtggttgagatcgctgactctgatatcag

SEQ ID NO: 141 - DNA, 33 bp, Homo sapiens
gacagaccgtggacaagttaagtagcttggggc

SEQ ID NO: 142 - DNA, 33 bp, Homo sapiens
catttggcaatggcagtagacactttggttgcc

SEQ ID NO: 143 - DNA, 33 bp, Homo sapiens
ttgctgtacctgacattaggctagaggtactga

SEQ ID NO: 144 - DNA, 33 bp, Homo sapiens
caagggagggaaccagcaaaagcattatcatga

SEQ ID NO: 145 - DNA, 33 bp, Homo sapiens
aaacattgggctggaaggaagtgaacccccagt

SEQ ID NO: 146 - DNA, 33 bp, Homo sapiens
gctaaattccgactgccaagcctttattagtgg

SEQ ID NO: 147 - DNA, 33 bp, Homo sapiens
gactatgcaatgactatggtgtttgataaaata

SEQ ID NO: 148 - DNA, 33 bp, Homo sapiens
agggtgtttagtagcatccctggcctctaccca

SEQ ID NO: 149 - DNA, 33 bp, Homo sapiens
cagtggtatgaacacaggccctggacatcctac

SEQ ID NO: 150 - DNA, 33 bp, Homo sapiens
acagtccaaagtcaaatagaaccaatgttgtaa

SEQ ID NO: 151 - DNA, 33 bp, Homo sapiens
cttgcttaaggccaacggataatggattggaat

SEQ ID NO: 152 - DNA, 33 bp, Homo sapiens
aggggaggccagagaatgcttccttcgtctgtt

SEQ ID NO: 153 - DNA, 33 bp, Homo sapiens
acatatacacccgcgaggagctggcgcagagga

SEQ ID NO: 154 - DNA, 33 bp, Homo sapiens
tttccatccagggaaatgaacaagctgagtcac

SEQ ID NO: 155 - DNA, 33 bp, Homo sapiens
acatggagctggaatctacatctaggtatttgg

SEQ ID NO: 156 - DNA, 33 bp, Homo sapiens
tttccctctctgtaaatgggcagctcatacgag

SEQ ID NO: 157 - DNA, 33 bp, Homo sapiens
tttctgcctgtggtcattactcctaagagcctg

SEQ ID NO: 158 - DNA, 33 bp, Homo sapiens
aaggaaggctcgcggagtagggcacagtcttgt

SEQ ID NO: 159 - DNA, 33 bp, Homo sapiens
ggctggtctttaatcctgaactgaatcattgga

SEQ ID NO: 160 - DNA, 33 bp, Homo sapiens
cccactgtggaaacaatgatggtcatataggga

SEQ ID NO: 161 - DNA, 33 bp, Homo sapiens
cttggaaagataaacctaggctattttagagag

SEQ ID NO: 162 - DNA, 33 bp, Homo sapiens
caaaccatgtaattcccaaagaaaggtctgaga

SEQ ID NO: 163 - DNA, 33 bp, Homo sapiens
ttgggacattcgtgagtaaccaaatgccaggct

SEQ ID NO: 164 - DNA, 33 bp, Homo sapiens
agttaacataggacccggaaattctactcctag

SEQ ID NO: 165 - DNA, 33 bp, Homo sapiens
acccctgctgcactcatgccttgcgtccagcca

SEQ ID NO: 166 - DNA, 33 bp, Homo sapiens
ctttgtcttttcttgctgactgactgggcgagt

SEQ ID NO: 167 - DNA, 33 bp, Homo sapiens
taggtgctgagcaacctgaagagaagatgacag

SEQ ID NO: 168 - DNA, 33 bp, Homo sapiens
atcaggcagaaacccagctgctcctgctcagtc

SEQ ID NO: 169 - DNA, 33 bp, Homo sapiens
ctctcgggaatgtaaatgagtgaaggtcttgat

SEQ ID NO: 170 - DNA, 33 bp, Homo sapiens
tgctcctgtcttccaagtaacagttaaaagaaa

SEQ ID NO: 171 - DNA, 33 bp, Homo sapiens
catcagttgggattcattcttacatgttgtaaa

SEQ ID NO: 172 - DNA, 33 bp, Homo sapiens
gataacttccaagagatgtgttgcttcctgtcc

SEQ ID NO: 173 - DNA, 33 bp, Homo sapiens
attcaaataggggatacacgtaacaataagcag

SEQ ID NO: 174 - DNA, 33 bp, Homo sapiens
tcaccattgccatgagtatccctttagcaagcg

SEQ ID NO: 175 - DNA, 33 bp, Homo sapiens
cagccgcttcttacaactcccaagaggccaaag

SEQ ID NO: 176 - DNA, 33 bp, Homo sapiens
gggagtaagaggtggaggaaggtgagattctag

SEQ ID NO: 177 - DNA, 33 bp, Homo sapiens
tgcaaaacccagaaatgaccagcctggcattgt

SEQ ID NO: 178 - DNA, 33 bp, Homo sapiens
ttacataccacagactgaacatcattcaatctc

SEQ ID NO: 179 - DNA, 33 bp, Homo sapiens
gaatgggagtgagcaggacccagtctgatttta

SEQ ID NO: 180 - DNA, 33 bp, Homo sapiens
agggaaagaaccccaattgctcaatgagtgtct

SEQ ID NO: 181 - DNA, 33 bp, Homo sapiens
gttcaaaacagcctaagagaccatactgaacac

SEQ ID NO: 182 - DNA, 33 bp, Homo sapiens
aattaataaggagaacgagaacagccaacatta

SEQ ID NO: 183 - DNA, 33 bp, Homo sapiens
taggtagtagtaggtatagtcagacaagaacag

SEQ ID NO: 184 - DNA, 33 bp, Homo sapiens
aagctgttgagaggaaccctgcttatctctgat

SEQ ID NO: 185 - DNA, 33 bp, Homo sapiens
agattgtcctgacaacggtatttcccttggttg

SEQ ID NO: 186 - DNA, 33 bp, Homo sapiens
ggctgccatccagctgtaaatgcactagcactg

SEQ ID NO: 187 - DNA, 33 bp, Homo sapiens
gccagtcagccaggaggaatacggacgccccca

SEQ ID NO: 188 - DNA, 33 bp, Homo sapiens
ggtgacagtcccaaccggcctagaaagatgaat

SEQ ID NO: 189 - DNA, 33 bp, Homo sapiens
atgcttcaagacataagctggatcatgttctcc

SEQ ID NO: 190 - DNA, 33 bp, Homo sapiens
atgttctacaggttgatgattgggaggtatagc

SEQ ID NO: 191 - DNA, 33 bp, Homo sapiens
gatctctacaatgggacctgtgacctcattcaa

SEQ ID NO: 192 - DNA, 33 bp, Homo sapiens
gttgagtaagctctagtagttgccagcagtttt

SEQ ID NO: 193 - DNA, 33 bp, Homo sapiens
acaccgtacatttaacgcagggctttcgtatcc

SEQ ID NO: 194 - DNA, 33 bp, Homo sapiens
gccaaatgactcagaagggtcaactgcctgcct

SEQ ID NO: 195 - DNA, 33 bp, Homo sapiens
cacattatccagatgatggctttggaaggcaga

SEQ ID NO: 196 - DNA, 33 bp, Homo sapiens
cttaaagcctttcaaatgcctcaatggctgctc

SEQ ID NO: 197 - DNA, 33 bp, Homo sapiens
gggtgttggccacagagggatatataggccatg

SEQ ID NO: 198 - DNA, 33 bp, Homo sapiens
accacaagaaccatccgctccttgcatttggca

SEQ ID NO: 199 - DNA, 33 bp, Homo sapiens
gtgctggcaacacagagagagagtgagctatgt

SEQ ID NO: 200 - DNA, 33 bp, Homo sapiens
gcttggttagcgtgcaggttaaatggaatgcgc

SEQ ID NO: 201 - DNA, 33 bp, Homo sapiens
tcaaacatgggactcatcaaatataagcatgcc

SEQ ID NO: 202 - DNA, 33 bp, Homo sapiens
gctggcaagtaatacattctccatgagcaccag

SEQ ID NO: 203 - DNA, 33 bp, Homo sapiens
tgtgggtgtgagagtctacagggaactttagtt

SEQ ID NO: 204 - DNA, 33 bp, Homo sapiens
caaaaaacacctggagtatttgtagcacagtgc

SEQ ID NO: 205 - DNA, 33 bp, Homo sapiens
tattacaaatcctaaatgcgaggcactgtgttg

SEQ ID NO: 206 - DNA, 33 bp, Homo sapiens
ggctgttgtttgtttaggttgctgtattccatc

SEQ ID NO: 207 - DNA, 33 bp, Homo sapiens
tgctgttatactcttatccgttcatttgtggct

SEQ ID NO: 208 - DNA, 33 bp, Homo sapiens
ccataggatcttcaacgaccctccattcttcca

SEQ ID NO: 209 - DNA, 33 bp, Homo sapiens
caaatggtgtatcaactgttctgcacgtgtgac

SEQ ID NO: 210 - DNA, 33 bp, Homo sapiens
gatcttttgtaacagatctctcttctcttgcct

SEQ ID NO: 211 - DNA, 33 bp, Homo sapiens
caataagaagaatcagtctcatggcggctgaag

SEQ ID NO: 212 - DNA, 33 bp, Homo sapiens
tggtgaattattaccacatattgattgaagcag

SEQ ID NO: 213 - DNA, 33 bp, Homo sapiens
aggatgctggaatcccggaattgccttcccagt

SEQ ID NO: 214 - DNA, 33 bp, Homo sapiens
atgtctgtttgccttcgctaccacataagagct

SEQ ID NO: 215 - DNA, 33 bp, Homo sapiens
ctagaccagggatgtttaaatgaaagaggttca

SEQ ID NO: 216 - DNA, 33 bp, Homo sapiens
gctctgcattggctaatagatatgtatggggtc

SEQ ID NO: 217 - DNA, 33 bp, Homo sapiens
atcacacacccagagatgacagagctggcccaa

SEQ ID NO: 218 - DNA, 33 bp, Homo sapiens
attccattctgctttcgatattcagagtctaca

SEQ ID NO: 219 - DNA, 33 bp, Homo sapiens
ctcatcgggtgagtcagaatcagttcccagctc

SEQ ID NO: 220 - DNA, 33 bp, Homo sapiens
ccaactgaaatcactatggatagctgtccttaa

SEQ ID NO: 221 - DNA, 33 bp, Homo sapiens
ctggtgttggttccacgagaggctcagggacac

SEQ ID NO: 222 - DNA, 33 bp, Homo sapiens
atagcagcttttttcatgctgccaaaagaagaa

SEQ ID NO: 223 - DNA, 33 bp, Homo sapiens
cagcgaccacagaacatgaaaccaagcatgagg

SEQ ID NO: 224 - DNA, 33 bp, Homo sapiens
caagatttgaactcaggcatcccaacacgcaga

SEQ ID NO: 225 - DNA, 33 bp, Homo sapiens
cagttttatgtaccactcagaaagacaccgcca

SEQ ID NO: 226 - DNA, 33 bp, Homo sapiens
cttgggcctcaactcactcacatgtgtgaagtc

SEQ ID NO: 227 - DNA, 33 bp, Homo sapiens
caagggctcttccgcatgggtatggtcacaggg

SEQ ID NO: 228 - DNA, 33 bp, Homo sapiens
agggctcaatcgcatagtaagttctccatccat

SEQ ID NO: 229 - DNA, 33 bp, Homo sapiens
ccttatcacaatctaccctgaaataatacatca

SEQ ID NO: 230 - DNA, 33 bp, Homo sapiens
tttgtgagctctggaattcgaagtcgacttgcc

SEQ ID NO: 231 - DNA, 33 bp, Homo sapiens
tcaacatagcacatcagtacaacaatggctcat

SEQ ID NO: 232 - DNA, 33 bp, Homo sapiens
ctaagcttgtggccatgataagggcaggaacct

SEQ ID NO: 233 - DNA, 33 bp, Homo sapiens
tagaggaaggtctaccgaaatgaggcagaaatc

SEQ ID NO: 234 - DNA, 33 bp, Homo sapiens
ccctgggctatgacaaggagttgtgactccctc

SEQ ID NO: 235 - DNA, 33 bp, Homo sapiens
ggcttccctgaggagatggcacttcaattgaag

SEQ ID NO: 236 - DNA, 33 bp, Homo sapiens
aaggatgtattaacaaggtgttcactgctgtgg

SEQ ID NO: 237 - DNA, 33 bp, Homo sapiens
cttgagaagaaaaacagaacaaggcgagtcaca

SEQ ID NO: 238 - DNA, 33 bp, Homo sapiens
aatgcccagcagtacatacagtctctgttcagt

SEQ ID NO: 239 - DNA, 33 bp, Homo sapiens
agaagctaagaaaagggcataaattagcaagtg

SEQ ID NO: 240 - DNA, 33 bp, Homo sapiens
acctcttagtaacagcgccacaaggtcacattt

SEQ ID NO: 241 - DNA, 33 bp, Homo sapiens
ggatgttgcttgttgagaaatgttgttacaaac

SEQ ID NO: 242 - DNA, 33 bp, Homo sapiens
taggtcaggttctgtcgagtgaccagcagaagc

SEQ ID NO: 243 - DNA, 33 bp, Homo sapiens
gtattagcaacatcacggacattttcttattta

SEQ ID NO: 244 - DNA, 33 bp, Homo sapiens
tgggctctgaaaggaatgcaggaatggtgaaga

SEQ ID NO: 245 - DNA, 33 bp, Homo sapiens
aacaaacaaaaactgatctctctttagattcag

SEQ ID NO: 246 - DNA, 33 bp, Homo sapiens
tcggttctgttctaaatgctagggatgcaaaag

SEQ ID NO: 247 - DNA, 33 bp, Homo sapiens
ttccagtctgacatctgagagcaagcattgtga

SEQ ID NO: 248 - DNA, 33 bp, Homo sapiens
cctgcccattttcaagtctctggccaagtctag

SEQ ID NO: 249 - DNA, 33 bp, Homo sapiens
ggcttgcctgctaaccgaaacttaccacttccg

SEQ ID NO: 250 - DNA, 33 bp, Homo sapiens
aacctcctcattctacgcactatctccatgagt

SEQ ID NO: 251 - DNA, 33 bp, Homo sapiens
caaagtttaaattctggagcatttaggattttg

SEQ ID NO: 252 - DNA, 33 bp, Homo sapiens
ctcacagttagcaacattggtataagaccccag

SEQ ID NO: 253 - DNA, 33 bp, Homo sapiens
ttcataacataacaccgattcagaaagacctac

SEQ ID NO: 254 - DNA, 33 bp, Homo sapiens
agtctgtagagtcaaacttcatgagttattatt

SEQ ID NO: 255 - DNA, 33 bp, Homo sapiens
ggaatgcaatacacaagttaagtcacactgcag

SEQ ID NO: 256 - DNA, 33 bp, Homo sapiens
ccagactcctggatgatgagcaaggtcttctcc

SEQ ID NO: 257 - DNA, 33 bp, Homo sapiens
actcttggttttctacgctacctttgacaacca

SEQ ID NO: 258 - DNA, 33 bp, Homo sapiens
aactgtctcaggctaatggaaagaaaaatcagg

SEQ ID NO: 259 - DNA, 33 bp, Homo sapiens
atgaccataaaaccaatacatttaggagatttg

SEQ ID NO: 260 - DNA, 33 bp, Homo sapiens
agtggttgaaggggacgcattagaagctacttc

SEQ ID NO: 261 - DNA, 33 bp, Homo sapiens
caggccccaggaacacgaaacctgacaaacagg

SEQ ID NO: 262 - DNA, 33 bp, Homo sapiens
tccagtgcccaccaaatgcggacacgtgagaga

SEQ ID NO: 263 - DNA, 33 bp, Homo sapiens
tgagaattcagtgaaaccagagatgtggactgt

SEQ ID NO: 264 - DNA, 33 bp, Homo sapiens
gaggagcagtgggaacgaagaagaggtttccag

SEQ ID NO: 265 - DNA, 33 bp, Homo sapiens
ggtacagaacaagtgatgtcatttaatcctgct

SEQ ID NO: 266 - DNA, 33 bp, Homo sapiens
gactgcaatgtgatgggattgtgtatgtattta

SEQ ID NO: 267 - DNA, 33 bp, Homo sapiens
ccatgacctcaagtcagacaaggccacaaggct

SEQ ID NO: 268 - DNA, 33 bp, Homo sapiens
gaaatgcgactataactagaactcagctggctt

SEQ ID NO: 269 - DNA, 33 bp, Homo sapiens
aattgaatggtgtaaggctccttctaactcaaa

SEQ ID NO: 270 - DNA, 33 bp, Homo sapiens
aagatgtcacattacttagcctttaaaacctga

SEQ ID NO: 271 - DNA, 33 bp, Homo sapiens
caatgagtgaccttgctcgaaggagaaagaccc

SEQ ID NO: 272 - DNA, 33 bp, Homo sapiens
tattcctctcaacaactgtctcaggaagaggca

SEQ ID NO: 273 - DNA, 33 bp, Homo sapiens
aaggcaggctgctagctgaattccctcttcttc

SEQ ID NO: 274 - DNA, 33 bp, Homo sapiens
agtgctctgttgacaacgagtgtgaggctgctg

SEQ ID NO: 275 - DNA, 33 bp, Homo sapiens
aaacacggatcaatcctcaatacagaaggtcca

SEQ ID NO: 276 - DNA, 33 bp, Homo sapiens
actagtcacttccaaatgtgggtttcctctttg

SEQ ID NO: 277 - DNA, 33 bp, Homo sapiens
caatacaccaagtacctgcgtacctaccgccta

SEQ ID NO: 278 - DNA, 33 bp, Homo sapiens
cttttaaaaatcatgagagtccagggatctaga

SEQ ID NO: 279 - DNA, 33 bp, Homo sapiens
actagaagaacatccggcaaaattttggatgca

SEQ ID NO: 280 - DNA, 51 bp, Homo sapiens
catgcagcacgggaccatcagttccgcttcagccatctttgatatgatgag

SEQ ID NO: 281 - DNA, 51 bp, Homo sapiens
atgagtgaagttagagacatgagaatttattatgtacttgaaactgcaagt

SEQ ID NO: 282 - DNA, 33 bp, Homo sapiens
ttgacttgaataataggcccaaggcaagaggag

SEQ ID NO: 283 - DNA, 33 bp, Homo sapiens
cagcttaaaagacaaatgtgcaaagaagcctct

SEQ ID NO: 284 - DNA, 33 bp, Homo sapiens
gaggaggcaggtcctagagttcacacagtgtta

SEQ ID NO: 285 - DNA, 33 bp, Homo sapiens
tcccatcccatatacacaagcagaaatgggatg

SEQ ID NO: 286 - DNA, 33 bp, Homo sapiens
tttattagatttccacgactgactcatctttct

SEQ ID NO: 287 - DNA, 33 bp, Homo sapiens
atgccatggtgagtcatgagttaactgtttctt

SEQ ID NO: 288 - DNA, 33 bp, Homo sapiens
cctcactctctgggaatcgtcatccttagacag

SEQ ID NO: 289 - DNA, 33 bp, Homo sapiens
tcacatagctaggccaggatttttttccattct

SEQ ID NO: 290 - DNA, 33 bp, Homo sapiens
ggactcagggtaaagataagctgccctgaaata

SEQ ID NO: 291 - DNA, 33 bp, Homo sapiens
ttttcacaccatccacgaggaatgttgtgcaaa

SEQ ID NO: 292 - DNA, 33 bp, Homo sapiens
cagggcacaggatgcctcagggctgaactccag

SEQ ID NO: 293 - DNA, 33 bp, Homo sapiens
aagaactgtctggtggtacagcctgggagctct

SEQ ID NO: 294 - DNA, 33 bp, Homo sapiens
ggttcaggagccttcatctataaagtgtcagaa

SEQ ID NO: 295 - DNA, 33 bp, Homo sapiens
gaggcaagactgaggctactgcagaagtgggca

SEQ ID NO: 296 - DNA, 33 bp, Homo sapiens
ccacctttccttcagagcacttggcgccagttg

SEQ ID NO: 297 - DNA, 33 bp, Homo sapiens
ctcatctgggttaacagtagcctgcaaacatac

SEQ ID NO: 298 - DNA, 33 bp, Homo sapiens
ctaattcacacaataattcagagtgaatgcacc

SEQ ID NO: 299 - DNA, 33 bp, Homo sapiens
caaagcagataaacacggccaaagacaaaatag

SEQ ID NO: 300 - DNA, 33 bp, Homo sapiens
gaattattgtaaccaggctactcaatttatata

SEQ ID NO: 301 - DNA, 33 bp, Homo sapiens
ttttattcagtgtagatgaaaagagactaaaat

SEQ ID NO: 302 - DNA, 33 bp, Homo sapiens
tatcttgttgcacaagtatttattggctacctt

SEQ ID NO: 303 - DNA, 33 bp, Homo sapiens
aattaaacaatcagcattcattaactatacttt

SEQ ID NO: 304 - DNA, 33 bp, Homo sapiens
gccagtgaaaagtgaagcctctgaaggcagact

SEQ ID NO: 305 - DNA, 33 bp, Homo sapiens
ggaaggctgagaataagcagtagcatgtgggta

SEQ ID NO: 306 - DNA, 33 bp, Homo sapiens
agtagatgcttttgactgccactcaaggtcaaa

SEQ ID NO: 307 - DNA, 33 bp, Homo sapiens
catcttggctgcggacgcttcattggaaatgga

SEQ ID NO: 308 - DNA, 33 bp, Homo sapiens
taggaagatgaaatgagtcagggcagcatctca

SEQ ID NO: 309 - DNA, 33 bp, Homo sapiens
gtgtacaaattgaaaaggactggaaatgggcac

SEQ ID NO: 310 - DNA, 33 bp, Homo sapiens
ggaaaagtaggacttatagggtggcagtgctcc

SEQ ID NO: 311 - DNA, 33 bp, Homo sapiens
ctccactcaacagatataggaaagaagcccaga

SEQ ID NO: 312 - DNA, 33 bp, Homo sapiens
tggaagacaggacaaagctggaaaagctggatg

SEQ ID NO: 313 - DNA, 33 bp, Homo sapiens
gctctgtgtaatcaaagtggggctgagaagagg

SEQ ID NO: 314 - DNA, 33 bp, Homo sapiens
ccagaccaacctgggatgtgcctacctggcttt

SEQ ID NO: 315 - DNA, 33 bp, Homo sapiens
agcagttgaagatcacgagcagctgccttgaga

SEQ ID NO: 316 - DNA, 33 bp, Homo sapiens
tgatcctcacgctcctgaaattcaaacagattc

SEQ ID NO: 317 - DNA, 33 bp, Homo sapiens
taaataagaaagcaccgcaaatgagcaactgaa

SEQ ID NO: 318 - DNA, 33 bp, Homo sapiens
tcaggagaggcgcccttaattccatgccgggtc

SEQ ID NO: 319 - DNA, 33 bp, Homo sapiens
gaagaagtgattaaccggagagaaatgtgtagg

SEQ ID NO: 320 - DNA, 33 bp, Homo sapiens
aaggagatcctatgaagcttgggatttgtgaaa

SEQ ID NO: 321 - DNA, 33 bp, Homo sapiens
ggaataatgtcttcaagtccttcccattcaaag

SEQ ID NO: 322 - DNA, 33 bp, Homo sapiens
atccgtccagatgcactccttgtagtattagtt

SEQ ID NO: 323 - DNA, 33 bp, Homo sapiens
aaggaaatagaaaatcgctattccagcctggac

SEQ ID NO: 324 - DNA, 33 bp, Homo sapiens
ttcaggggctgaacaatagccttgctccttttg

SEQ ID NO: 325 - DNA, 33 bp, Homo sapiens
ccaatgattccatttatgaccgtgggcaaaacc

SEQ ID NO: 326 - DNA, 33 bp, Homo sapiens
tgttgggcacttaaaccaccctcctagcaccct

SEQ ID NO: 327 - DNA, 33 bp, Homo sapiens
cccccatttttcactctgactaggtgttcttgc

SEQ ID NO: 328 - DNA, 33 bp, Homo sapiens
tcgctgaatagtaagacaggtctgagcatggtg

SEQ ID NO: 329 - DNA, 33 bp, Homo sapiens
ttcatcagggaaaaaagaggtcaagtacacaaa

SEQ ID NO: 330 - DNA, 33 bp, Homo sapiens
aacaagggtcccattggcaatcagtccaacaca

SEQ ID NO: 331 - DNA, 33 bp, Homo sapiens
tcacctttctggaaccggaagaagaaggggatg

SEQ ID NO: 332 - DNA, 33 bp, Homo sapiens
atctctcagagtgtagtatttaattcactgccc

SEQ ID NO: 333 - DNA, 33 bp, Homo sapiens
cattcttttttgagccgcattcctttaagcttt

SEQ ID NO: 334 - DNA, 33 bp, Homo sapiens
caaacaccagcctttatgtatggtagtctcaga

SEQ ID NO: 335 - DNA, 33 bp, Homo sapiens
catcctcacatcaccagtgagcttcagggaaag

SEQ ID NO: 336 - DNA, 33 bp, Homo sapiens
ccccaactccactctcgattcaggcagggcttc

SEQ ID NO: 337 - DNA, 33 bp, Homo sapiens
tacctaatctacccaacgtcatcgaactaataa

SEQ ID NO: 338 - DNA, 33 bp, Homo sapiens
aattggagccaaataagctttcagttagcttgg

SEQ ID NO: 339 - DNA, 33 bp, Homo sapiens
cctccaggcacagtaagagagagaacctccagg

SEQ ID NO: 340 - DNA, 33 bp, Homo sapiens
agcttaggctcttaactacttctacccatagcc

SEQ ID NO: 341 - DNA, 33 bp, Homo sapiens
tcaacagttatgaaacggcagaaccaagatgac

SEQ ID NO: 342 - DNA, 33 bp, Homo sapiens
gaaggcactagtatatgaacttcctattgccac

SEQ ID NO: 343 - DNA, 33 bp, Homo sapiens
ctgtcaagccaactaatgttcctattgacttaa

SEQ ID NO: 344 - DNA, 33 bp, Homo sapiens
gtagggctgccaagaggagcaaaagatggccct

SEQ ID NO: 345 - DNA, 33 bp, Homo sapiens
atgtttgtatctgttagccaatctctctttagc

SEQ ID NO: 346 - DNA, 33 bp, Homo sapiens
caataggcctcttaacgagacaaatgaatgggg

SEQ ID NO: 347 - DNA, 33 bp, Homo sapiens
ttattgctttattacattgactagaccttccag

SEQ ID NO: 348 - DNA, 51 bp, Homo sapiens
tcagtaaatgaaccaagccatgttatgtgaatttattgttaatatctgaat

SEQ ID NO: 349 - DNA, 33 bp, Homo sapiens
ggccctcttctgtgccgatttcacacacattaa

SEQ ID NO: 350 - DNA, 33 bp, Homo sapiens
atacacccctccacaatacagtcataccgacac

SEQ ID NO: 351 - DNA, 33 bp, Homo sapiens
gaggcagtaactacgacgggatccatttttctc

SEQ ID NO: 352 - DNA, 51 bp, Homo sapiens
tacaactgtacactcaagaaatatatatccatcatctatgacactgaattc

SEQ ID NO: 353 - DNA, 33 bp, Homo sapiens
cagctagaaagtttacggagctagaattcagac

SEQ ID NO: 354 - DNA, 51 bp, Homo sapiens
gatgtcttccaaaacgcacttgtactgatagattaagatctacatcagaaa

SEQ ID NO: 355 - DNA, 33 bp, Homo sapiens
taaatgaaagcaaaacgatgcaaatatgatcat

SEQ ID NO: 356 - DNA, 33 bp, Homo sapiens
gcaagaatgactgacatgtgaatccaacttcca

SEQ ID NO: 357 - DNA, 33 bp, Homo sapiens
gccctaccagaaacagcaggatgaattgggggg

SEQ ID NO: 358 - DNA, 33 bp, Homo sapiens
aataccttcagtgccatgaggtaaatccaaaga

SEQ ID NO: 359 - DNA, 33 bp, Homo sapiens
ataaaatagaaaagcagctcataggaaaacttc

SEQ ID NO: 360 - DNA, 33 bp, Homo sapiens
ttctaagtaccctgaatgtaagtacctgagaga

SEQ ID NO: 361 - DNA, 33 bp, Homo sapiens
agcatctattatgatggcacttaaatgggtgct

SEQ ID NO: 362 - DNA, 33 bp, Homo sapiens
aaatggcctgagctaagtggactgtgggagctc

SEQ ID NO: 363 - DNA, 33 bp, Homo sapiens
tttttacgtttatccatgtgaccattttttcat

SEQ ID NO: 364 - DNA, 33 bp, Homo sapiens
tccaccaaaatcataagctcacttccaatgaag

SEQ ID NO: 365 - DNA, 33 bp, Homo sapiens
atagaatacaacaaagcaagactgggccttgca

SEQ ID NO: 366 - DNA, 33 bp, Homo sapiens
tgaagagagagaggaagatttgaaccaccactg

SEQ ID NO: 367 - DNA, 33 bp, Homo sapiens
tttgtgttctatttcagcctaacatgaagggag

SEQ ID NO: 368 - DNA, 33 bp, Homo sapiens
ccatccccatccagaattggcacgtgctccagc

SEQ ID NO: 369 - DNA, 33 bp, Homo sapiens
tggatgggatggctgatggctcttagaaatgcc

SEQ ID NO: 370 - DNA, 33 bp, Homo sapiens
ggagcgtttctgggactgagtagaggagacact

SEQ ID NO: 371 - DNA, 33 bp, Homo sapiens
tttaattgtgctagaaggtcactgggatttgac

SEQ ID NO: 372 - DNA, 51 bp, Homo sapiens
agcatagattcaatgtagtctcaatcaaaaactcagtgggttctggcaagc

SEQ ID NO: 373 - DNA, 33 bp, Homo sapiens
tgggatcctgggaaaccccattatcagacagtg

SEQ ID NO: 374 - DNA, 33 bp, Homo sapiens
gcctgcatcaaaatccgattcccaggatagaaa

SEQ ID NO: 375 - DNA, 33 bp, Homo sapiens
tttcctgaacaggtcatcgcccatttgtccata

SEQ ID NO: 376 - DNA, 33 bp, Homo sapiens
tgggtgtcgggcaaaggaagctgctatttgtga

SEQ ID NO: 377 - DNA, 33 bp, Homo sapiens
agagcacgaggtcattgaaagagattaggcctg

SEQ ID NO: 378 - DNA, 33 bp, Homo sapiens
atgtgaagctaaacacgagttcagttagagaat

SEQ ID NO: 379 - DNA, 33 bp, Homo sapiens
ggaagttctcatggacgatactgtgaaatatgt

SEQ ID NO: 380 - DNA, 33 bp, Homo sapiens
atgcttgagtgctgtagagagaaaagagaagta

SEQ ID NO: 381 - DNA, 33 bp, Homo sapiens
cccatctgctaaaagagaagaacaatttctgac

SEQ ID NO: 382 - DNA, 51 bp, Homo sapiens
aagtgatctcccttatgtatatgactgcacatgtcactccattgttaataa

SEQ ID NO: 383 - DNA, 33 bp, Homo sapiens
ccccctctatcaagatcaagataagtcaagatc

SEQ ID NO: 384 - DNA, 33 bp, Homo sapiens
tccagtgatcctaacagtcaagatcacagcctg

SEQ ID NO: 385 - DNA, 33 bp, Homo sapiens
taatgaggataaattggagaaatgaggataatg

SEQ ID NO: 386 - DNA, 33 bp, Homo sapiens
aggaggggaccaatactccagcctttaaaaagt

SEQ ID NO: 387 - DNA, 33 bp, Homo sapiens
gctgggtgggctgatatgcagacagaaatagtc

SEQ ID NO: 388 - DNA, 33 bp, Homo sapiens
gaatctctcctcaggaccctcataccctgcata

SEQ ID NO: 389 - DNA, 33 bp, Homo sapiens
aactcataaccttaacgctttgattccttctca

SEQ ID NO: 390 - DNA, 33 bp, Homo sapiens
acctgaaggacgtaacgataacaataaacatag

SEQ ID NO: 391 - DNA, 33 bp, Homo sapiens
gcccagcatctgaacatacttcttctacgggga

SEQ ID NO: 392 - DNA, 51 bp, Homo sapiens
ctcaggggtccccagccagttctaatgtatctgaaagcctgtgacccaggt

SEQ ID NO: 393 - DNA, 33 bp, Homo sapiens
gaagaagtcaggaggcgccgcttcgcgctaacg

SEQ ID NO: 394 - DNA, 33 bp, Homo sapiens
atagacagtctcaaacccgggaatggattgtgc

SEQ ID NO: 395 - DNA, 33 bp, Homo sapiens
actagggaatcttcaggcaagtcgtctctctat

SEQ ID NO: 396 - DNA, 33 bp, Homo sapiens
tcttatagagtgttaccgggattaaatgccatg

SEQ ID NO: 397 - DNA, 33 bp, Homo sapiens
gcctttgagccaaagagactagagaatagcaat

SEQ ID NO: 398 - DNA, 33 bp, Homo sapiens
cctgttggaccctatgtcacgggagccaggacc

SEQ ID NO: 399 - DNA, 33 bp, Homo sapiens
atatggttgtacttgttaagagccttagaaatg

SEQ ID NO: 400 - DNA, 33 bp, Homo sapiens
gcagagccagagttcagaccggtatctgttgga

SEQ ID NO: 401 - DNA, 33 bp, Homo sapiens
gggatcaggaaggtggtactctgtttttatgag

SEQ ID NO: 402 - DNA, 33 bp, Homo sapiens
catttactgagtgccagcaacgtgcaaggaagt

SEQ ID NO: 403 - DNA, 33 bp, Homo sapiens
accggttcctggaaaaccgtcactttcttcaac

SEQ ID NO: 404 - DNA, 33 bp, Homo sapiens
cctgacttactcaccattgcatccctagcacct

SEQ ID NO: 405 - DNA, 33 bp, Homo sapiens
actgcaggtaatttacgaatggaatttctctat

SEQ ID NO: 406 - DNA, 51 bp, Homo sapiens
atgagctatactgggggaacatgccgactcaggctgatcctacagtactaa

SEQ ID NO: 407 - DNA, 33 bp, Homo sapiens
atatggtagacaacacgatcatctttttacaga

SEQ ID NO: 408 - DNA, 33 bp, Homo sapiens
aattttgaaccagagggaagtgaaagttagcta

SEQ ID NO: 409 - DNA, 33 bp, Homo sapiens
ccatatcagtgtgtcaggttttttgtttttttt

SEQ ID NO: 410 - DNA, 33 bp, Homo sapiens
aaatgtcttcctatacttaccactacttgaggc

SEQ ID NO: 411 - DNA, 33 bp, Homo sapiens
aacaaacatttgctgagtacctatcatataata

SEQ ID NO: 412 - DNA, 33 bp, Homo sapiens
taagctgaaactacctgaatgttctgagtctga

SEQ ID NO: 413 - DNA, 33 bp, Homo sapiens
ccaaaaggacatagaagcaatgaaaccccagta

SEQ ID NO: 414 - DNA, 33 bp, Homo sapiens
ttgttcttgctctaaagctttttaataaacatt

SEQ ID NO: 415 - DNA, 33 bp, Homo sapiens
ttgtgtgatgtgagtggatagtttgaatgggct

SEQ ID NO: 416 - DNA, 33 bp, Homo sapiens
caaggctgaggccacatacttgcattccaggca

SEQ ID NO: 417 - DNA, 33 bp, Homo sapiens
cttcatgagtcgatacgaagggtgagaatggaa

SEQ ID NO: 418 - DNA, 33 bp, Homo sapiens
atagccagtaaagaactgcactgaggagccagc

SEQ ID NO: 419 - DNA, 33 bp, Homo sapiens
gtgtcagccactgttctaggtagtagaggatat

SEQ ID NO: 420 - DNA, 33 bp, Homo sapiens
agaaaagattatgaaagccttctgtaccagata

SEQ ID NO: 421 - DNA, 33 bp, Homo sapiens
ttgttcattatacctatgctttttatatgcctg

SEQ ID NO: 422 - DNA, 33 bp, Homo sapiens
aagcttctaaagtaaatgttgcatagtaaatat

SEQ ID NO: 423 - DNA, 33 bp, Homo sapiens
ggggctagaatgatgatagctggtagaaggtgg

SEQ ID NO: 424 - DNA, 33 bp, Homo sapiens
ggggctttaagcagaagagtggcatatctagta

SEQ ID NO: 425 - DNA, 33 bp, Homo sapiens
gggaaacagattcagagagagggaggaacaggc

SEQ ID NO: 426 - DNA, 33 bp, Homo sapiens
tcattcccaggcgcacgacccttgtatagtgtg

SEQ ID NO: 427 - DNA, 33 bp, Homo sapiens
acatatcttgaaaacttactgtatgccaagtgt

SEQ ID NO: 428 - DNA, 33 bp, Homo sapiens
taccttacgtaagatcgcctagctgagaattgg

SEQ ID NO: 429 - DNA, 51 bp, Homo sapiens
aaattttgagttttagagagagttaggagttaatgaagtcaaacagaggga

SEQ ID NO: 430 - DNA, 33 bp, Homo sapiens
taataatcgtgaataatgtggaattgctgtgat

SEQ ID NO: 431 - DNA, 33 bp, Homo sapiens
ctacttgacttcaaaagatactataaattatag

SEQ ID NO: 432 - DNA, 51 bp, Homo sapiens
gtgttctgattaaatcataaagggagtaaaaatggcataatgggaacatcg

SEQ ID NO: 433 - DNA, 51 bp, Homo sapiens
cactattttagcttctgttttctgctagtgagtaaattaaggaatgaactc

SEQ ID NO: 434 - DNA, 51 bp, Homo sapiens
acatgtcttttgctctgggaccaggcgttgtgcagcccatccttttctcaa

SEQ ID NO: 435 - DNA, 33 bp, Homo sapiens
agataaagctgtaatggagaaaatggtttggcc

SEQ ID NO: 436 - DNA, 51 bp, Homo sapiens
cttatgcacttaagtagatccatcagtgaactagcctgaaggactttccta

SEQ ID NO: 437 - DNA, 33 bp, Homo sapiens
ttgtcacagggccatgcacgcgtctgctttctc

SEQ ID NO: 438 - DNA, 33 bp, Homo sapiens
atttggtatagcgcaagccacgggtatagtggt

SEQ ID NO: 439 - DNA, 33 bp, Homo sapiens
cctaacgcttgctagcgccttctcaaatcttgc

SEQ ID NO: 440 - DNA, 51 bp, Homo sapiens
gggtgagtttgtggttctcactggagtagcatctatacagacaaactttgc

SEQ ID NO: 441 - DNA, 33 bp, Homo sapiens
tgttctgcaaactacatgggctgatgattgcct

SEQ ID NO: 442 - DNA, 33 bp, Homo sapiens
ttaagaggatgaaaccgatatcctgactaaggg

SEQ ID NO: 443 - DNA, 51 bp, Homo sapiens
ttgctttggacccagctgcataatcgaagatcctctcctttaattccattt

SEQ ID NO: 444 - DNA, 33 bp, Homo sapiens
gctgtaaatcaaggcacctgtgacatcatggtg

SEQ ID NO: 445 - DNA, 33 bp, Homo sapiens
gtgtcatcccagcatattaaagaaactctgaat

SEQ ID NO: 446 - DNA, 33 bp, Homo sapiens
aaatgtgaactacccatcaccatgaactgaact

SEQ ID NO: 447 - DNA, 33 bp, Homo sapiens
cttaatttccaaataagtctatctgtaacacct

SEQ ID NO: 448 - DNA, 33 bp, Homo sapiens
taccctttcctcttgtgaaccatgagtaacaaa

SEQ ID NO: 449 - DNA, 33 bp, Homo sapiens
aaatctgaaataaatatggcaaattactaacat

SEQ ID NO: 450 - DNA, 33 bp, Homo sapiens
gatattttaggtagtatgggggagaaagtatta

SEQ ID NO: 451 - DNA, 33 bp, Homo sapiens
gagctacagccactaatgctggtccctcagtca

SEQ ID NO: 452 - DNA, 51 bp, Homo sapiens
tagaaattaaataatagagacagaatcaagtttaagaatcttgtattaaat

SEQ ID NO: 453 - DNA, 51 bp, Homo sapiens
ctgttgaactcttttcttctctgtggttccaagtgttttgattatatacat

SEQ ID NO: 454 - DNA, 51 bp, Homo sapiens
tattataatttcctttaatcagcaataatgactaaaacatgtgatctaaaa

SEQ ID NO: 455 - DNA, 33 bp, Homo sapiens
aagttagtaaaagctcgagaaaatgttaccttt

SEQ ID NO: 456 - DNA, 33 bp, Homo sapiens
actagtttggaaaaaattacgaatctttatatt

SEQ ID NO: 457 - DNA, 33 bp, Homo sapiens
tctgtatctccagcaatctgaatgtaacaggtc

SEQ ID NO: 458 - DNA, 33 bp, Homo sapiens
tttagaattgctactgtatggtgataataagaa

SEQ ID NO: 459 - DNA, 33 bp, Homo sapiens
ggagctggatctggaagaatgaatgagatttaa

SEQ ID NO: 460 - DNA, 33 bp, Homo sapiens
acagttttgattgccatggagaagggggatgct

SEQ ID NO: 461 - DNA, 33 bp, Homo sapiens
atgttttgtttctccagctactttctctgaagg

SEQ ID NO: 462 - DNA, 33 bp, Homo sapiens
gaaaattacagaggcagtagaagaaaacggaat

SEQ ID NO: 463 - DNA, 33 bp, Homo sapiens
gatctgttttactttatcctgcccagacttagc

SEQ ID NO: 464 - DNA, 33 bp, Homo sapiens
tttgagagaagactgagctactaactgagaagt

SEQ ID NO: 465 - DNA, 33 bp, Homo sapiens
cttgaccatcacagaatctaagtaaatggatag

SEQ ID NO: 466 - DNA, 33 bp, Homo sapiens
gggggctaaaccgacaggtgtgaggattgtaaa

SEQ ID NO: 467 - DNA, 33 bp, Homo sapiens
ataggctcattgggcattcatgtagtatccctc

SEQ ID NO: 468 - DNA, 33 bp, Homo sapiens
ccctactgcacttcccgctggtcttattcttct

SEQ ID NO: 469 - DNA, 33 bp, Homo sapiens
tctctcacttacacaccggtctgtttctacctg

SEQ ID NO: 470 - DNA, 33 bp, Homo sapiens
cctttttggaagtggatgagaatggtgatttca

SEQ ID NO: 471 - DNA, 33 bp, Homo sapiens
aaccagggagccttccgcattctcgagtcaagt

SEQ ID NO: 472 - DNA, 33 bp, Homo sapiens
gatactcagcatcttcttcgtctcctatcactc

SEQ ID NO: 473 - DNA, 33 bp, Homo sapiens
aacctgcagttccaaataacaataaattccaag

SEQ ID NO: 474 - DNA, 51 bp, Homo sapiens
ttctaggggtacagttaaggtctcatggatgttcaactaactaaatgagaa

SEQ ID NO: 475 - DNA, 33 bp, Homo sapiens
acaaaatggagtaagatcgtgagtattcttaga

SEQ ID NO: 476 - DNA, 33 bp, Homo sapiens
aatggatccctctcactgtaaggagatacaaac

SEQ ID NO: 477 - DNA, 33 bp, Homo sapiens
caagcccacaagggaagtgaagtaccagctgcc

SEQ ID NO: 478 - DNA, 33 bp, Homo sapiens
cacaggctcagatagagagaagtattagaatat

SEQ ID NO: 479 - DNA, 33 bp, Homo sapiens
ttacacttccttatgggcagtttctattaatta

SEQ ID NO: 480 - DNA, 33 bp, Homo sapiens
gaatgccctctcctgggaagctaggaatgttga

SEQ ID NO: 481 - DNA, 33 bp, Homo sapiens
tgaccatcttgcagacgaagaatctgtggtctc

SEQ ID NO: 482 - DNA, 33 bp, Homo sapiens
gaagtatgaaggaagactcaagatacagttaga

SEQ ID NO: 483 - DNA, 33 bp, Homo sapiens
gatgatctaaaaccaggacagcaaatacacatg

SEQ ID NO: 484 - DNA, 33 bp, Homo sapiens
gtgggtttggtggaaagcgagcaaagcaccttg

SEQ ID NO: 485 - DNA, 33 bp, Homo sapiens
ctattgggaggattaagtcagataacgtatgta

SEQ ID NO: 486 - DNA, 33 bp, Homo sapiens
aaaattggtaagccactatcccagaaagagctc

SEQ ID NO: 487 - DNA, 33 bp, Homo sapiens
aagctgactgataaaatcgggcctaagactaat

SEQ ID NO: 488 - DNA, 33 bp, Homo sapiens
gatgatgttatgaacagtaatgcttaccattta

SEQ ID NO: 489 - DNA, 33 bp, Homo sapiens
ctgttagtggaggaaacttaaccagatgaccta

SEQ ID NO: 490 - DNA, 33 bp, Homo sapiens
cgcatatttccctgaagcagatacatagataac

SEQ ID NO: 491 - DNA, 33 bp, Homo sapiens
actaggaatatttctctctctagttcaaaaaac

SEQ ID NO: 492 - DNA, 33 bp, Homo sapiens
atttcttagtaatacccactattgctaagtgac

SEQ ID NO: 493 - DNA, 33 bp, Homo sapiens
gttaaataaatgccagtcaaaagtaactcacct

SEQ ID NO: 494 - DNA, 33 bp, Homo sapiens
ccctggggagtggacaggtatttctagttaaaa

SEQ ID NO: 495 - DNA, 33 bp, Homo sapiens
ttctgaagttactgaagtagttgagccccagta

SEQ ID NO: 496 - DNA, 51 bp, Homo sapiens
tgacaagttaatgtttaattttttatgatagagcaaaggtactttaaattc

SEQ ID NO: 497 - DNA, 33 bp, Homo sapiens
ttacatatagattggagctgaaatcaagatgga

SEQ ID NO: 498 - DNA, 33 bp, Homo sapiens
caaatcactcataagcggatgaggtttccgtga

SEQ ID NO: 499 - DNA, 33 bp, Homo sapiens
ttcttgttatagagaagactgttcaagctaccc

SEQ ID NO: 500 - DNA, 33 bp, Homo sapiens
gtatgttggacaagaatgacttgtgatcatctt

SEQ ID NO: 501 - DNA, 33 bp, Homo sapiens
tctaacttcttaaggtgaatgcatggctcatgt

SEQ ID NO: 502 - DNA, 33 bp, Homo sapiens
ttccttctttaagaaattgttgtgcccctagtt

SEQ ID NO: 503 - DNA, 33 bp, Homo sapiens
tctcagtatcagaatagaagccaagtctggcct

SEQ ID NO: 504 - DNA, 33 bp, Homo sapiens
gtcacctacagcttcatagaaaaattttttaca

SEQ ID NO: 505 - DNA, 33 bp, Homo sapiens
cagagaactgtttccttaaacgatccacttgcc

SEQ ID NO: 506 - DNA, 33 bp, Homo sapiens
attatgatgtcagccatatttggtagtgtaatt

SEQ ID NO: 507 - DNA, 33 bp, Homo sapiens
aagaattattgcatcaggagttaagcacctttt

SEQ ID NO: 508 - DNA, 33 bp, Homo sapiens
tttaacagatcattccgaactgggtaggttttt

SEQ ID NO: 509 - DNA, 33 bp, Homo sapiens
tgtttaagccacccaagccgactaagcattcct

SEQ ID NO: 510 - DNA, 33 bp, Homo sapiens
ttataaacagctaatcggaacctctatttgtca

SEQ ID NO: 511 - DNA, 33 bp, Homo sapiens
actgcacctggcctacgataattttgaagacaa

SEQ ID NO: 512 - DNA, 33 bp, Homo sapiens
gttcctgttgataaaatgcttagatcagtgctc

SEQ ID NO: 513 - DNA, 33 bp, Homo sapiens
tttaaggtcatttagcggataatgccctcctat

SEQ ID NO: 514 - DNA, 33 bp, Homo sapiens
ggttactgtgtcgaaatggaagcggtgacgttc

SEQ ID NO: 515 - DNA, 33 bp, Homo sapiens
atgtcaaattggtggagagatagacacatagat

SEQ ID NO: 516 - DNA, 33 bp, Homo sapiens
tggagatgaactcagacctcaaggctcagctca

SEQ ID NO: 517 - DNA, 33 bp, Homo sapiens
ttagcttgatgcacaaggtcctccatgcttggc

SEQ ID NO: 518 - DNA, 33 bp, Homo sapiens
aaatagaactactaccgctattacttctaccac

SEQ ID NO: 519 - DNA, 33 bp, Homo sapiens
tgtatattgtgacaatgaattatattttgaaat

SEQ ID NO: 520 - DNA, 33 bp, Homo sapiens
actgtatggttatcactgcctgaagaaatatta

SEQ ID NO: 521 - DNA, 33 bp, Homo sapiens
tgccacttgcaactgagtattgcagagaatttt

SEQ ID NO: 522 - DNA, 33 bp, Homo sapiens
gcagtgtaaaataagcgcaaggcccaggacttt

SEQ ID NO: 523 - DNA, 33 bp, Homo sapiens
agggcattgaataccatgataaaggctttatac

SEQ ID NO: 524 - DNA, 33 bp, Homo sapiens
tgattgccttttatgatcttgattcctagaagc

SEQ ID NO: 525 - DNA, 33 bp, Homo sapiens
gatctcaaattacttggcaaagatggactttta

SEQ ID NO: 526 - DNA, 33 bp, Homo sapiens
tcacagacaattctccgcttcacgtctgccctt

SEQ ID NO: 527 - DNA, 33 bp, Homo sapiens
tgtttctatttctgtagaattggtgataatatc

SEQ ID NO: 528 - DNA, 33 bp, Homo sapiens
ataatatgtacaatgagctccatgaaacgagtt

SEQ ID NO: 529 - DNA, 33 bp, Homo sapiens
agatgatgaatgcaactgataaaatgtgtgggt

SEQ ID NO: 530 - DNA, 51 bp, Homo sapiens
taatagaatgtgatgcaagtaaaaacatgtattttcaacatttcaaatatt

SEQ ID NO: 531 - DNA, 51 bp, Homo sapiens
tctctctatacagtctgctgcccgacgttagaatttagagacagcatctag

SEQ ID NO: 532 - DNA, 51 bp, Homo sapiens
gtcattcacacattctaacagcagaggttactaaaacactttaaccagagg

SEQ ID NO: 533 - DNA, 33 bp, Homo sapiens
atcttagagcttaaaattgaaattccaaaataa

SEQ ID NO: 534 - DNA, 33 bp, Homo sapiens
aacagcaagatacctatacaaaaaagcttacac

SEQ ID NO: 535 - DNA, 33 bp, Homo sapiens
ttgccacaatgtgaactgtccctttcccaggtg

SEQ ID NO: 536 - DNA, 33 bp, Homo sapiens
tttcaaaagtcctaaagcagagaagaaggttga

SEQ ID NO: 537 - DNA, 33 bp, Homo sapiens
gttctacagtatggcatggagatgggtaaaaaa

SEQ ID NO: 538 - DNA, 33 bp, Homo sapiens
gcccatgctcttcaagtcttagatacttattct

SEQ ID NO: 539 - DNA, 33 bp, Homo sapiens
gatcatcatggtaaaattatcttatcagtcaat

SEQ ID NO: 540 - DNA, 33 bp, Homo sapiens
actgtactgttcactaccatattcctaagtcct

SEQ ID NO: 541 - DNA, 33 bp, Homo sapiens
gtgatcgatatggtactattcctcagggttatc

SEQ ID NO: 542 - DNA, 33 bp, Homo sapiens
gaaatggcagagactagcagaagtgatttacca

SEQ ID NO: 543 - DNA, 33 bp, Homo sapiens
cagcaaccacagggactgaaccctgcgaagcta

SEQ ID NO: 544 - DNA, 33 bp, Homo sapiens
tttggtatttgtaacatcaggtctaaaacaagt

SEQ ID NO: 545 - DNA, 33 bp, Homo sapiens
caactgcaaaagctagccacaagattttaagat

SEQ ID NO: 546 - DNA, 51 bp, Homo sapiens
acgtataattttgagtatattcttccctaacatttaacaaaatatatttta

SEQ ID NO: 547 - DNA, 33 bp, Homo sapiens
gggtgcaagtctcaaggcttacatgtggtgttg

SEQ ID NO: 548 - DNA, 33 bp, Homo sapiens
tcctcagactcctgtatggtgcaattgaccact

SEQ ID NO: 549 - DNA, 33 bp, Homo sapiens
ttgaggtcctctgatatagtgtaccatcccctg

SEQ ID NO: 550 - DNA, 33 bp, Homo sapiens
gaactaatgtcatagatgaattttctgtagtcc

SEQ ID NO: 551 - DNA, 33 bp, Homo sapiens
aataagagaagaagaagtcttggaatgacaggg

SEQ ID NO: 552 - DNA, 33 bp, Homo sapiens
tatcaactcaaccatagtaggatggggactggg

SEQ ID NO: 553 - DNA, 33 bp, Homo sapiens
gtcctcctatcatctctccatcctctactattc

SEQ ID NO: 554 - DNA, 33 bp, Homo sapiens
atcagctttctctaaattgacctcttacaaact

SEQ ID NO: 555 - DNA, 33 bp, Homo sapiens
ctactaaagttcttactggtgggagagagtagt

SEQ ID NO: 556 - DNA, 51 bp, Homo sapiens
ctactcatgtttttgatacgaataagccagcgacatgctttctaaaatctt

SEQ ID NO: 557 - DNA, 33 bp, Homo sapiens
ctcttcaaataaggacgctgagaggttggccgt

SEQ ID NO: 558 - DNA, 33 bp, Homo sapiens
tccatacaaactactttaaggtagaaatattat

SEQ ID NO: 559 - DNA, 51 bp, Homo sapiens
tctgactccaaagtttgtacttttagctattgtgctataattattaatgaa

SEQ ID NO: 560 - DNA, 33 bp, Homo sapiens
accctgccaggtcactgagggatttcataacag

SEQ ID NO: 561 - DNA, 33 bp, Homo sapiens
atttccctcatgcgaacggaggtggataattag

SEQ ID NO: 562 - DNA, 51 bp, Homo sapiens
ctttaggcccctgttatacacagaggagacaagatatttgttgtttactca

SEQ ID NO: 563 - DNA, 51 bp, Homo sapiens
tagaagaaattaattgagtaaaaaataatctgctgttcatttgcctaaaat

SEQ ID NO: 564 - DNA, 51 bp, Homo sapiens
ttttctaaaagattaatgtggctgaggtatttgtttcatgttaaggaaaag

SEQ ID NO: 565 - DNA, 51 bp, Homo sapiens
tactggcaggtcttagaatactaaatgtgattttcgaaaaagttactttta

SEQ ID NO: 566 - DNA, 33 bp, Homo sapiens
agattatgcagcaaaataagaagaagactaagt

SEQ ID NO: 567 - DNA, 33 bp, Homo sapiens
aaataccacatttagagaaactgcgccatgcaa

SEQ ID NO: 568 - DNA, 51 bp, Homo sapiens
atctataacacaacaatacatttctgactcttttcttggatatatgagtga

SEQ ID NO: 569 - DNA, 51 bp, Homo sapiens
caggtatgggatggaagaaggagcatgagtaaggtcaagcactaaaacatg

SEQ ID NO: 570 - DNA, 33 bp, Homo sapiens
tgttatatgttgaagagaacaaaaataataata

SEQ ID NO: 571 - DNA, 33 bp, Homo sapiens
ctctttggagcaatgacagttttggaaatacat

SEQ ID NO: 572 - DNA, 51 bp, Homo sapiens
aaatgcaagcagtttagaatagaagtctaatcagaagatagagaagctttt

SEQ ID NO: 573 - DNA, 51 bp, Homo sapiens
cgacctgtaatccaatgctatcttgtatggacaataaaaaacacgccagca

SEQ ID NO: 574 - DNA, 33 bp, Homo sapiens
cttaggtgagtcataaggatgaaataggcccag

SEQ ID NO: 575 - DNA, 33 bp, Homo sapiens
ggagaccaacatagaaggagggtgattcctgga

SEQ ID NO: 576 - DNA, 33 bp, Homo sapiens
ttggaagaagtaacaatgtaagtaccaactacc

SEQ ID NO: 577 - DNA, 33 bp, Homo sapiens
agagaaacagtaactcgattcctttaagtgcaa

SEQ ID NO: 578 - DNA, 33 bp, Homo sapiens
agctgcaagttttacatagagtatttccttcag

SEQ ID NO: 579 - DNA, 33 bp, Homo sapiens
ggcttttacctgctcataagagaactctgcatt

SEQ ID NO: 580 - DNA, 33 bp, Homo sapiens
caagtgggagctaaaccaagggaatatgtagac

SEQ ID NO: 581 - DNA, 33 bp, Homo sapiens
gagtgtctatggtagagagaaaggaagttgtac

SEQ ID NO: 582 - DNA, 51 bp, Homo sapiens
tgatagagagaacactggactgaaattcttaagtatacttctgctaattca

SEQ ID NO: 583 - DNA, 51 bp, Homo sapiens
ctttaagatttttaatgggatcagaggaaaattcggtacttaatcacttcc

SEQ ID NO: 584 - DNA, 33 bp, Homo sapiens
gctgaaatccaatatcgaaaccttaaactctct

SEQ ID NO: 585 - DNA, 33 bp, Homo sapiens
tgccacacagtaacaagtaacttacatatcttt

SEQ ID NO: 586 - DNA, 33 bp, Homo sapiens
acacacaggtctgtgagagcttgtttctgctta

SEQ ID NO: 587 - DNA, 33 bp, Homo sapiens
catattcgtggcaggtgaaaagattgctgtatc

SEQ ID NO: 588 - DNA, 33 bp, Homo sapiens
tagacacaaatcttgatgaacacttcagccctg

SEQ ID NO: 589 - DNA, 33 bp, Homo sapiens
tgaccatgtatactcatattactgtttcagtct

SEQ ID NO: 590 - DNA, 33 bp, Homo sapiens
ataatttttagatcacgagctatatcaaatgtg

SEQ ID NO: 591 - DNA, 33 bp, Homo sapiens
agcaagctggactttagcatttcaaagaaggca

SEQ ID NO: 592 - DNA, 33 bp, Homo sapiens
ttctttgctcatttacgcctaaaatcatgaatc

SEQ ID NO: 593 - DNA, 33 bp, Homo sapiens
ctctttgacccaggaattatgtgaatttcagga

SEQ ID NO: 594 - DNA, 33 bp, Homo sapiens
cctttgcactttgttctatgtaacatattttcc

SEQ ID NO: 595 - DNA, 33 bp, Homo sapiens
cttttgtatccattaagctgtcatgaatataaa

SEQ ID NO: 596 - DNA, 51 bp, Homo sapiens
atccctagaagattccattcaaatagcagggtccattcaaacaatcaacat

SEQ ID NO: 597 - DNA, 33 bp, Homo sapiens
tagtatccacagtaccggccactcttgaattaa

SEQ ID NO: 598 - DNA, 51 bp, Homo sapiens
ttagtacctgcaacattataggatataggtcatactagcaggtgatgaata

SEQ ID NO: 599 - DNA, 51 bp, Homo sapiens
gttagatgcccatctctggactcatgaattgtggccaaaacaacggggccc

SEQ ID NO: 600 - DNA, 33 bp, Homo sapiens
gtgggtgtgcacttgcgagtttgctccaggtcc

SEQ ID NO: 601 - DNA, 33 bp, Homo sapiens
aactgtgagtcaattggacttatttcctttata

SEQ ID NO: 602 - DNA, 33 bp, Homo sapiens
aactattgggtaaaaagtttgcctatattaggc

SEQ ID NO: 603 - DNA, 33 bp, Homo sapiens
gactatgggacaagcatatggtcgcaggacttt

SEQ ID NO: 604 - DNA, 33 bp, Homo sapiens
gtgcttaaccctactctaccctgtctgctacca

SEQ ID NO: 605 - DNA, 33 bp, Homo sapiens
cctctcctgaccttaacagcactgatcagtagt

SEQ ID NO: 606 - DNA, 33 bp, Homo sapiens
cattcatgttgctttagaggaattgcaagtagc

SEQ ID NO: 607 - DNA, 33 bp, Homo sapiens
cacactaacagatacctggagttaagacttcac

SEQ ID NO: 608 - DNA, 33 bp, Homo sapiens
atttcagctttgtctttaaagaaggagtaggat

SEQ ID NO: 609 - DNA, 33 bp, Homo sapiens
ctcaacttagatgggacaaaagcctctttatgg

SEQ ID NO: 610 - DNA, 33 bp, Homo sapiens
ccaggtgtgcatttaatgttgcaactcaaagag

SEQ ID NO: 611 - DNA, 33 bp, Homo sapiens
cccaccctttagaataggtatgagccacagtca

SEQ ID NO: 612 - DNA, 33 bp, Homo sapiens
tataggttatccagaagctacgatttgaaagat

SEQ ID NO: 613 - DNA, 33 bp, Homo sapiens
tcttagctttcacgtatgtcatttctgtccaat

SEQ ID NO: 614 - DNA, 33 bp, Homo sapiens
cccatcgtcacgaccatgctgttcttcactcca

SEQ ID NO: 615 - DNA, 33 bp, Homo sapiens
aatctgctttgtggcttaaatttttgcttcaag

SEQ ID NO: 616 - DNA, 33 bp, Homo sapiens
tcatcttctcccacaagtctgtctttagcggaa

SEQ ID NO: 617 - DNA, 33 bp, Homo sapiens
tcaagggctcatcaaaggctcagatgtgtccct

SEQ ID NO: 618 - DNA, 33 bp, Homo sapiens
aggttccttgtaaaaatttgccatcggccaggt

SEQ ID NO: 619 - DNA, 33 bp, Homo sapiens
gcatccccgtgatgaagaaatcatgcgcattct

SEQ ID NO: 620 - DNA, 33 bp, Homo sapiens
cagacccagtgctagatgtagatcccaatcaca

SEQ ID NO: 621 - DNA, 33 bp, Homo sapiens
atttcatcatctggcagattagttgctggcaag

SEQ ID NO: 622 - DNA, 33 bp, Homo sapiens
actcaaaatttagtacgatgcttctacttggaa

SEQ ID NO: 623 - DNA, 33 bp, Homo sapiens
aaaaggaattggcgaagatttagcataaaagat

SEQ ID NO: 624 - DNA, 33 bp, Homo sapiens
gtcaattgttactaaatggaaaaaaatgcagag

SEQ ID NO: 625 - DNA, 33 bp, Homo sapiens
taactgcatgaacccagataaaaaaaactgtag

SEQ ID NO: 626 - DNA, 33 bp, Homo sapiens
gcagaggccaataacctgagtaaagagacgaag

SEQ ID NO: 627 - DNA, 33 bp, Homo sapiens
atggtgaatttctaactggaatactatgcgatc

SEQ ID NO: 628 - DNA, 33 bp, Homo sapiens
tggtactactgacatatgacagaagtgatattg

SEQ ID NO: 629 - DNA, 33 bp, Homo sapiens
ggagaaaaagcttctggcaatattcaacaccct

SEQ ID NO: 630 - DNA, 33 bp, Homo sapiens
acattatgaagacagcgaagagttaaaggtggt

SEQ ID NO: 631 - DNA, 33 bp, Homo sapiens
catgggttcaccaggctagacttactcctcagt

SEQ ID NO: 632 - DNA, 51 bp, Homo sapiens
agacatttcacattgaaatacttgacccaaattagcacgagggaactggtg

SEQ ID NO: 633 - DNA, 33 bp, Homo sapiens
gaccgtgtctctttaagtattaggaatcacctt

SEQ ID NO: 634 - DNA, 33 bp, Homo sapiens
cacctaattattttcaggcaggagtaacacatt

SEQ ID NO: 635 - DNA, 33 bp, Homo sapiens
tggctttatggtagccgctgttacgccataaac

SEQ ID NO: 636 - DNA, 33 bp, Homo sapiens
gaagatttttatgagattatggggaacactttc

SEQ ID NO: 637 - DNA, 33 bp, Homo sapiens
gtcagaaaaggatccagggagatataattgcag

SEQ ID NO: 638 - DNA, 33 bp, Homo sapiens
tagttcccatcactcagaggacaattatttgct

SEQ ID NO: 639 - DNA, 33 bp, Homo sapiens
gaagctgataatagaaggatgtctcggaaggag

SEQ ID NO: 640 - DNA, 33 bp, Homo sapiens
aacaaatatctgctaggaatgaagaagataaaa

SEQ ID NO: 641 - DNA, 33 bp, Homo sapiens
ttgcttttttagacaatttatctggacctgttt

SEQ ID NO: 642 - DNA, 33 bp, Homo sapiens
ctaggttgcatttccttaaatcagagtatacac

SEQ ID NO: 643 - DNA, 51 bp, Homo sapiens
ttattgctaatagaatatcgctattgttcaatgtggcaaaaaatctatttt

SEQ ID NO: 644 - DNA, 33 bp, Homo sapiens
ctttcatcttcctacctaattcatcaaggcaga

SEQ ID NO: 645 - DNA, 33 bp, Homo sapiens
acactctggtctaatcccatcactaagttttgt

SEQ ID NO: 646 - DNA, 33 bp, Homo sapiens
tgtgacaggtctcatatgttgtattttgattac

SEQ ID NO: 647 - DNA, 33 bp, Homo sapiens
cagacactctcaatcagtgatgtggtccacaaa

SEQ ID NO: 648 - DNA, 33 bp, Homo sapiens
tttatgtattacagaagaagctgtgcacagatt

SEQ ID NO: 649 - DNA, 33 bp, Homo sapiens
atctttacatgactacgaataaagcaatttatt

SEQ ID NO: 650 - DNA, 33 bp, Homo sapiens
aagtaagaaccagggatgttgagcttttgcaat

SEQ ID NO: 651 - DNA, 33 bp, Homo sapiens
cttcttgcaataatcctgcactaatagattcat

SEQ ID NO: 652 - DNA, 33 bp, Homo sapiens
ggctaaaactgacatatcaatttatggttacca

SEQ ID NO: 653 - DNA, 33 bp, Homo sapiens
ctcaggtcagctgctagatggagttttcttccc

SEQ ID NO: 654 - DNA, 33 bp, Homo sapiens
taatttgacagaatcagtagggagaggagtcac

SEQ ID NO: 655 - DNA, 33 bp, Homo sapiens
tgggctttgggtacaattaggcagctgtgctca

SEQ ID NO: 656 - DNA, 33 bp, Homo sapiens
tgttaagatcctaacatgaaaggcaatggtatt

SEQ ID NO: 657 - DNA, 33 bp, Homo sapiens
atctcccacatctaaggctgcactcaccagcaa

SEQ ID NO: 658 - DNA, 33 bp, Homo sapiens
gaggctgtaggaaacatgaaacacaacacagca

SEQ ID NO: 659 - DNA, 33 bp, Homo sapiens
aatttttcttcactggtagatgggcatcaggct

SEQ ID NO: 660 - DNA, 33 bp, Homo sapiens
aatgaattttccaacagcataaatgagcttgga

SEQ ID NO: 661 - DNA, 33 bp, Homo sapiens
catttattgagtagggcagcagccgaaaatgga

SEQ ID NO: 662 - DNA, 33 bp, Homo sapiens
gtagccatgtctgaaatgacatcttatgtttga

SEQ ID NO: 663 - DNA, 33 bp, Homo sapiens
aaagcaggctaatggattacataaaagacttgg

SEQ ID NO: 664 - DNA, 33 bp, Homo sapiens
attcctgtttagattagaaaaagcctcctaaag

SEQ ID NO: 665 - DNA, 33 bp, Homo sapiens
aattagctattcaatatggctgatagaaatctg

SEQ ID NO: 666 - DNA, 33 bp, Homo sapiens
gaagatagctaacccatgattgaaaccagaatt

SEQ ID NO: 667 - DNA, 33 bp, Homo sapiens
tgcttgtgagcattgcgcttgggcaggctgaaa

SEQ ID NO: 668 - DNA, 33 bp, Homo sapiens
tctgtgtacaaaataggacccacaaaaatattg

SEQ ID NO: 669 - DNA, 33 bp, Homo sapiens
ttgggccacacacaacggatttgccataaatag

SEQ ID NO: 670 - DNA, 33 bp, Homo sapiens
tgtgtgctaattgatatgtagggaagcagtttc

SEQ ID NO: 671 - DNA, 33 bp, Homo sapiens
attcgtgcgtataaactaggtgctattcatcag

SEQ ID NO: 672 - DNA, 33 bp, Homo sapiens
gaacttcaaaattccagggtgcaaatatattgt

SEQ ID NO: 673 - DNA, 33 bp, Homo sapiens
caaacttctaatggtccaagcatcaattttgtc

SEQ ID NO: 674 - DNA, 33 bp, Homo sapiens
actctatctctctgacgcagaagttacgaatgc

SEQ ID NO: 675 - DNA, 33 bp, Homo sapiens
agagatctcagctagattattgcaacatcttcc

SEQ ID NO: 676 - DNA, 51 bp, Homo sapiens
ccagttggatatcttttaacattactaccaccaacatgaacaattaagcct

SEQ ID NO: 677 - DNA, 33 bp, Homo sapiens
tgaaccttcttgttggcatatgattttatttct

SEQ ID NO: 678 - DNA, 33 bp, Homo sapiens
ggctcccaccatccactatcaacttatttactt

SEQ ID NO: 679 - DNA, 51 bp, Homo sapiens
caatctcatcagatctttataaacagctctgtaggatgaatattttatttc

SEQ ID NO: 680 - DNA, 33 bp, Homo sapiens
gtctaccctctgataatctccacattgaccacc

SEQ ID NO: 681 - DNA, 33 bp, Homo sapiens
tcttaaatacaaccaaccctctttaagttggca

SEQ ID NO: 682 - DNA, 51 bp, Homo sapiens
ttactcggtattcctttgagagagagtagagatgagaaagtctaataaaac

SEQ ID NO: 683 - DNA, 33 bp, Homo sapiens
tgctttgaaattaatagaagaggcaggatctca

SEQ ID NO: 684 - DNA, 33 bp, Homo sapiens
gtttttctttagcttctacagttctagcagaat

SEQ ID NO: 685 - DNA, 33 bp, Homo sapiens
cagaattaaagcacacgctcaataggatagcaa

SEQ ID NO: 686 - DNA, 33 bp, Homo sapiens
tcaagactttcacggcgatgaaatgaaaaaata

SEQ ID NO: 687 - DNA, 33 bp, Homo sapiens
gtgggagatacagaacggtaaacaggcaattat

SEQ ID NO: 688 - DNA, 33 bp, Homo sapiens
acaagaaatggcatcagaactaaagtcctgcaa

SEQ ID NO: 689 - DNA, 33 bp, Homo sapiens
ttactaaacttctggagtatggggactagtatt

SEQ ID NO: 690 - DNA, 33 bp, Homo sapiens
aagatgtgagcaaaaatcttccctctcaaaagt

SEQ ID NO: 691 - DNA, 33 bp, Homo sapiens
gaatgagtgaaagtcagtatgaaaacctctcag

SEQ ID NO: 692 - DNA, 33 bp, Homo sapiens
aactaggttttgaatagatttctgtgcagatgt

SEQ ID NO: 693 - DNA, 33 bp, Homo sapiens
aaactgcttgggaaaagggatgaaagaaaacaa

SEQ ID NO: 694 - DNA, 33 bp, Homo sapiens
tagaaaaaatggcatctgaacaaaagttgcttc

SEQ ID NO: 695 - DNA, 33 bp, Homo sapiens
tcccatcatagcaaaattgttaaattgtcatca

SEQ ID NO: 696 - DNA, 33 bp, Homo sapiens
ttttaaatagcaatcagctacttaaagatacac

SEQ ID NO: 697 - DNA, 33 bp, Homo sapiens
tctgaatatcagggaaggtgactcttactggtg

SEQ ID NO: 698 - DNA, 33 bp, Homo sapiens
tgcttgagtagccctaggagtagaatatttcac

SEQ ID NO: 699 - DNA, 33 bp, Homo sapiens
gtccagcgtccaactacaatgtatgaagtatgt

SEQ ID NO: 700 - DNA, 33 bp, Homo sapiens
acttgagcctccccacgctatacatctcgtgtt

SEQ ID NO: 701 - DNA, 33 bp, Homo sapiens
cctcatgtcctaaatctattcaatgtcaaatcc

SEQ ID NO: 702 - DNA, 33 bp, Homo sapiens
aactgttagatcacagtaagaacagtaagctct

SEQ ID NO: 703 - DNA, 51 bp, Homo sapiens
ttactgtaaagattatatgaagggatgttatataaaatttagcacagactc

SEQ ID NO: 704 - DNA, 51 bp, Homo sapiens
aaaatggaagcaactgtgtgttcaatagagaatttgttaactaagttatga

SEQ ID NO: 705 - DNA, 51 bp, Homo sapiens
attttacttatgaggaattagaagatgatccagagaagaacatttgagctg

SEQ ID NO: 706 - DNA, 33 bp, Homo sapiens
tcatcagaatggcccatgagtgctcttattgag

SEQ ID NO: 707 - DNA, 33 bp, Homo sapiens
agggatctgcacgtgagctaagcctggacaatc

SEQ ID NO: 708 - DNA, 33 bp, Homo sapiens
tggatggcaggactaagtaatgcaaagctggct

SEQ ID NO: 709 - DNA, 33 bp, Homo sapiens
acacacagatacttgagtaaaaataaatattta

SEQ ID NO: 710 - DNA, 33 bp, Homo sapiens
gggttccacaacagaaggacaagtagaaaaggc

SEQ ID NO: 711 - DNA, 33 bp, Homo sapiens
aactggtgttgaaagtgacatagactaaaaatg

SEQ ID NO: 712 - DNA, 33 bp, Homo sapiens
agaaagcaaagtgaccgaaatgcagtgggttca

SEQ ID NO: 713 - DNA, 33 bp, Homo sapiens
ggtttctcttgtgatagtaaggcagatgctgac

SEQ ID NO: 714 - DNA, 33 bp, Homo sapiens
ttcttttctatgcatatgtcacctaaaacaaaa

SEQ ID NO: 715 - DNA, 33 bp, Homo sapiens
aatcttacttactctttaaagcttagttcaaat

SEQ ID NO: 716 - DNA, 33 bp, Homo sapiens
catggtcttgacaccaggttacatgaaatatga

SEQ ID NO: 717 - DNA, 51 bp, Homo sapiens
ttcaacacacctattcagtgcttcattcaaatggaataattctacagtacc

SEQ ID NO: 718 - DNA, 51 bp, Homo sapiens
cagaaccatctattttgtccttcaaggtactctaatttctttttcctttaa

SEQ ID NO: 719 - DNA, 51 bp, Homo sapiens
ttctattattaagaacatggaagaagtctattattaagtacaatcaagaag

SEQ ID NO: 720 - DNA, 33 bp, Homo sapiens
ctgccttgctataggagtcaccttggagcctca

SEQ ID NO: 721 - DNA, 51 bp, Homo sapiens
aagtgtaggtcactctgacagtatatgttaggacctgaactactgggggtt

SEQ ID NO: 722 - DNA, 33 bp, Homo sapiens
gtccaagaggcccagatgtctgaatatccactg

SEQ ID NO: 723 - DNA, 33 bp, Homo sapiens
actcgtggagaggttagagaagcatctttatga

SEQ ID NO: 724 - DNA, 33 bp, Homo sapiens
gaagcaatgtcttgagtagtcactagatggtgg

SEQ ID NO: 725 - DNA, 33 bp, Homo sapiens
catagcctgtttaacctaatcccggattttcat

SEQ ID NO: 726 - DNA, 33 bp, Homo sapiens
acctcctggccttgaacatgtcttgctttcatg

SEQ ID NO: 727 - DNA, 33 bp, Homo sapiens
atgtatcgtttcatccgcaatgatttcagtact

SEQ ID NO: 728 - DNA, 33 bp, Homo sapiens
acacagataaatatgtgaaggttaacaaatgct

SEQ ID NO: 729 - DNA, 33 bp, Homo sapiens
ttttatccagtaattccattttttcacctttga

SEQ ID NO: 730 - DNA, 33 bp, Homo sapiens
ctctggtttaataaagtcaagaaaggttgtctt

SEQ ID NO: 731 - DNA, 33 bp, Homo sapiens
actgatttctcttaaatgactgatccagagctt

SEQ ID NO: 732 - DNA, 33 bp, Homo sapiens
gaaaatactcagccacgggcttccaaaatagga

SEQ ID NO: 733 - DNA, 33 bp, Homo sapiens
ttatcatgcttactaattgccagacattaaaca

SEQ ID NO: 734 - DNA, 33 bp, Homo sapiens
taggttacattttccatgtccaatctctacttt

SEQ ID NO: 735 - DNA, 33 bp, Homo sapiens
ttaacctgcatttgcctacaagcacaccagtgt

SEQ ID NO: 736 - DNA, 33 bp, Homo sapiens
attttaccactctctctgaatacattttttatt

SEQ ID NO: 737 - DNA, 33 bp, Homo sapiens
taagagtacttcaatggagagacagggaaggca

SEQ ID NO: 738 - DNA, 33 bp, Homo sapiens
tgagagtgtaggaaacgaagtaggctctgagag

SEQ ID NO: 739 - DNA, 33 bp, Homo sapiens
tctgaatcccacatcatcctagcaaagtttttc

SEQ ID NO: 740 - DNA, 33 bp, Homo sapiens
ggtatttctccatttctaggatatgagcacatt

SEQ ID NO: 741 - DNA, 33 bp, Homo sapiens
tcaaatacagctttcagagtgccttaagattaa

SEQ ID NO: 742 - DNA, 33 bp, Homo sapiens
ttatgtttcttgaggccaattttagttttcctc

SEQ ID NO: 743 - DNA, 33 bp, Homo sapiens
actgatggcaccaatatcctcaacttgtaggct

SEQ ID NO: 744 - DNA, 33 bp, Homo sapiens
ttattagtagacttcagactacttaggcaccag

SEQ ID NO: 745 - DNA, 33 bp, Homo sapiens
actatgtgaacagccatgtgctaggtattaggg

SEQ ID NO: 746 - DNA, 33 bp, Homo sapiens
acttgtggcattatccgcaaccgtcatgtttct

SEQ ID NO: 747 - DNA, 33 bp, Homo sapiens
gatcccacttaaaccttaactgagattcttgag

SEQ ID NO: 748 - DNA, 33 bp, Homo sapiens
agaaaacaaaaccagctctgattagagactcaa

SEQ ID NO: 749 - DNA, 33 bp, Homo sapiens
gccattctctacgaaatattgctattacatatg

SEQ ID NO: 750 - DNA, 33 bp, Homo sapiens
tctggtctctgacaggtacaaatgctaggcagg

SEQ ID NO: 751 - DNA, 33 bp, Homo sapiens
gctctaaaacatcacacaatttagaaaactaaa

SEQ ID NO: 752 - DNA, 33 bp, Homo sapiens
taagggtaaacatcgcgagagagaaaaccagac

SEQ ID NO: 753 - DNA, 51 bp, Homo sapiens
ccaggcttaagtgacaccacgctgatgagatattaataatgatcttaaaat

SEQ ID NO: 754 - DNA, 51 bp, Homo sapiens
tccagaagaaacaaacatttattgagaacttttggtgtgtgacctgtttaa

SEQ ID NO: 755 - DNA, 33 bp, Homo sapiens
gtctcatcacccaaattactgtttagatttctg

SEQ ID NO: 756 - DNA, 33 bp, Homo sapiens
ggatgggctcctcaccgaccattcagatctctg

SEQ ID NO: 757 - DNA, 33 bp, Homo sapiens
attattccattgtatgcatgaactatgtaagcc

SEQ ID NO: 758 - DNA, 33 bp, Homo sapiens
attaataggctgtacctcaccaataacaagctc

SEQ ID NO: 759 - DNA, 33 bp, Homo sapiens
ctgatttacttatgcgtagcctccctggagaca

SEQ ID NO: 760 - DNA, 33 bp, Homo sapiens
aatctcagtaaaccactgtgacggcatctaccc

SEQ ID NO: 761 - DNA, 33 bp, Homo sapiens
tgcagactagctcgtgtaaaggaggagagcgtt

SEQ ID NO: 762 - DNA, 33 bp, Homo sapiens
ctctccctttgcagaggatatacgtcctctcct

SEQ ID NO: 763 - DNA, 33 bp, Homo sapiens
tcggacccaagtcagggcatctctgttttgaag

SEQ ID NO: 764 - DNA, 33 bp, Homo sapiens
cttagcgaggacctaatcatccaatgctgccaa

SEQ ID NO: 765 - DNA, 51 bp, Homo sapiens
agacaggaatcttttagtaaaatagcagtgttttttgttgtttttgcattg

SEQ ID NO: 766 - DNA, 33 bp, Homo sapiens
ttacattatttaagtatgagccaaagcagatac

SEQ ID NO: 767 - DNA, 33 bp, Homo sapiens
ctgtcaagtacaaaacgaaactgcagaataaaa

SEQ ID NO: 768 - DNA, 33 bp, Homo sapiens
acctgtgaatcacagatattacgtagaacaagc

SEQ ID NO: 769 - DNA, 33 bp, Homo sapiens
cctaacagcattttcatgtagcatttcaaattt

SEQ ID NO: 770 - DNA, 51 bp, Homo sapiens
atctccttttgtgattacagtaatatcatcaggatagagttgaaaaaacta

SEQ ID NO: 771 - DNA, 33 bp, Homo sapiens
actgtgaccttcagtatgaggaaatagctatca

SEQ ID NO: 772 - DNA, 51 bp, Homo sapiens
ttttatgagatttaatgtaactatgtattacttcagacaagatacacatat

SEQ ID NO: 773 - DNA, 33 bp, Homo sapiens
ttatttaagctgaatataacttttgagatgata

SEQ ID NO: 774 - DNA, 33 bp, Homo sapiens
ggacagattttggcaactaagtagagggaatat

SEQ ID NO: 775 - DNA, 33 bp, Homo sapiens
cagactcaaagcaacagacacattgccaggccc

SEQ ID NO: 776 - DNA, 33 bp, Homo sapiens
cacatttagcaaacagtaatggaggaaccacta

SEQ ID NO: 777 - DNA, 33 bp, Homo sapiens
agtgcctatcccataataggtgacaataaatat

SEQ ID NO: 778 - DNA, 51 bp, Homo sapiens
taccataatcaacaacttcaacatagagatcactctaccattgacctttat

SEQ ID NO: 779 - DNA, 51 bp, Homo sapiens
tgtcttcatattaactgtaaaattagagtaataatggtagtttaaatttaa

SEQ ID NO: 780 - DNA, 51 bp, Homo sapiens
tctccttgctttctcagatctcttatgcctctaaaaaatatggtgttgtgg

SEQ ID NO: 781 - DNA, 33 bp, Homo sapiens
catttaatctgcatgagaaccatatgtattcct

SEQ ID NO: 782 - DNA, 33 bp, Homo sapiens
tattgacttgctgctatggtttctgaacatttt

SEQ ID NO: 783 - DNA, 33 bp, Homo sapiens
aagagtgactaaacggtaatgaatcacacatcc

SEQ ID NO: 784 - DNA, 33 bp, Homo sapiens
actgagatgtggaagatcaaaggagaataagtt

SEQ ID NO: 785 - DNA, 33 bp, Homo sapiens
tgaatccttgaccaacgagagacaggaactgat

SEQ ID NO: 786 - DNA, 33 bp, Homo sapiens
atttagtcacacttcattacctccaaatatgaa

SEQ ID NO: 787 - DNA, 33 bp, Homo sapiens
atatataggctgtttcgctttaaaggagtaaaa

SEQ ID NO: 788 - DNA, 33 bp, Homo sapiens
ggtaacatgataaagagtaccaggaggggaagt

SEQ ID NO: 789 - DNA, 33 bp, Homo sapiens
tctgtctaccagcagagtccttttttccctcct

SEQ ID NO: 790 - DNA, 51 bp, Homo sapiens
ttattccaggaatgtgaggatcattcactgtccagaaatctattaaagtaa

SEQ ID NO: 791 - DNA, 33 bp, Homo sapiens
atgagtctatatgatgcagaaaaccatgttgtc

SEQ ID NO: 792 - DNA, 33 bp, Homo sapiens
accttttcctttgtgagagtgagattaagaact

SEQ ID NO: 793 - DNA, 33 bp, Homo sapiens
ttgtatgaggagttgagatagctcctgaaagag

SEQ ID NO: 794 - DNA, 33 bp, Homo sapiens
gtgctgaataatgaagtagtgtctaaaggcttg

SEQ ID NO: 795 - DNA, 33 bp, Homo sapiens
aaagggcataataacataacgtacgaacattta

SEQ ID NO: 796 - DNA, 33 bp, Homo sapiens
agagtttccatcattagcaatactgagtatata

SEQ ID NO: 797 - DNA, 33 bp, Homo sapiens
cattttacatgactgctattttatgtgaacaca

SEQ ID NO: 798 - DNA, 51 bp, Homo sapiens
cacatctgttgatataggaaatcaatcttgtaatcgtcaacctcaaagact

SEQ ID NO: 799 - DNA, 33 bp, Homo sapiens
atacccaatatatggatgggaaaagtgtagttt

SEQ ID NO: 800 - DNA, 33 bp, Homo sapiens
tgacttcgtaattgtatatattcatgggataca

SEQ ID NO: 801 - DNA, 33 bp, Homo sapiens
tagttccagcttataagtgagaatatgcagtat

SEQ ID NO: 802 - DNA, 33 bp, Homo sapiens
attagttatgcaatgttaaatgtgtactctttc

SEQ ID NO: 803 - DNA, 33 bp, Homo sapiens
gataaactcagtgtaattaaactgacttcccaa

SEQ ID NO: 804 - DNA, 33 bp, Homo sapiens
tagaaggattaagcaggcacaggttagaaggca

SEQ ID NO: 805 - DNA, 33 bp, Homo sapiens
gcttcaaaataagccatagagagactgaatcgc

SEQ ID NO: 806 - DNA, 33 bp, Homo sapiens
ggagttggccaaaagagtagtggagagagagac

SEQ ID NO: 807 - DNA, 33 bp, Homo sapiens
gttttagagtcaatatgaggagtgagaaagagg

SEQ ID NO: 808 - DNA, 33 bp, Homo sapiens
gaggttgaatatttactgaggccactcctgctt

SEQ ID NO: 809 - DNA, 33 bp, Homo sapiens
tgccgttgagcacagatgaagtaatcggaacac

SEQ ID NO: 810 - DNA, 33 bp, Homo sapiens
cttcattaattttctatatcaacctcatgttcc

SEQ ID NO: 811 - DNA, 33 bp, Homo sapiens
agataggaagcagagataaccatttagtaggtg

SEQ ID NO: 812 - DNA, 33 bp, Homo sapiens
agatgggagagaattcgccaaaaggacatatct

SEQ ID NO: 813 - DNA, 33 bp, Homo sapiens
gaactattttcaagcattctgtgtccaggtatg

SEQ ID NO: 814 - DNA, 33 bp, Homo sapiens
cacactcaagtttgtccataagcctcttacaga

SEQ ID NO: 815 - DNA, 51 bp, Homo sapiens
agaaaagatgtatttatctgagaaagatgttgctttctgtttgtttttctg

SEQ ID NO: 816 - DNA, 51 bp, Homo sapiens
gccagtttaaatggtgatgtacatatagaatagagggggaaattgctggat

SEQ ID NO: 817 - DNA, 33 bp, Homo sapiens
cttcataaatatttcaccttttcctcactccct

SEQ ID NO: 818 - DNA, 33 bp, Homo sapiens
actgtatttctatagcgaaggtcaagacccttt

SEQ ID NO: 819 - DNA, 33 bp, Homo sapiens
tagtcttagcaccaacgctttctaataaatgtg

SEQ ID NO: 820 - DNA, 33 bp, Homo sapiens
atgtctgctgtattcatccggtcatgctaaaaa

SEQ ID NO: 821 - DNA, 33 bp, Homo sapiens
catagtgattgacaaatgagttgtacagacaat

SEQ ID NO: 822 - DNA, 33 bp, Homo sapiens
ataaattacataagccgctagcctaactatgaa

SEQ ID NO: 823 - DNA, 33 bp, Homo sapiens
cacctagaacttctgatccatttgatgaatgtg

SEQ ID NO: 824 - DNA, 33 bp, Homo sapiens
ggcaagtcagtagatagagcaaactttatttct

SEQ ID NO: 825 - DNA, 33 bp, Homo sapiens
gaattcagagctcccatgtccgctccccatgga

SEQ ID NO: 826 - DNA, 33 bp, Homo sapiens
taacttttctgctttataatcgtttctcacacc

SEQ ID NO: 827 - DNA, 33 bp, Homo sapiens
attgatagttcctacctaggttgacagcttgat

SEQ ID NO: 828 - DNA, 33 bp, Homo sapiens
ctcataatgccattaatcaataacttctagtat

SEQ ID NO: 829 - DNA, 33 bp, Homo sapiens
agtaaagacaaatccagagtaagcagtcaatcc

SEQ ID NO: 830 - DNA, 33 bp, Homo sapiens
gatttgtctttacttcgagtcaagtgattttgc

SEQ ID NO: 831 - DNA, 33 bp, Homo sapiens
attgcctcagagatgagagaaaaattataatca

SEQ ID NO: 832 - DNA, 33 bp, Homo sapiens
ccaaaccttgtatccactggaagtatactttag

SEQ ID NO: 833 - DNA, 33 bp, Homo sapiens
tgctatttactgtggatctgatgtctcaaactt

SEQ ID NO: 834 - DNA, 33 bp, Homo sapiens
tctactctaacaacagtcaaataatatacaaag

SEQ ID NO: 835 - DNA, 33 bp, Homo sapiens
tatattcttcaacgaggctacataactttgtaa

SEQ ID NO: 836 - DNA, 33 bp, Homo sapiens
ctccatgattggcctatacctacctctctaaac

SEQ ID NO: 837 - DNA, 33 bp, Homo sapiens
aatggatgcagcattatagaaggcaggatggtg

SEQ ID NO: 838 - DNA, 51 bp, Homo sapiens
gaaagaacacaatgaaagtgctgtagagaatagatttaatcaagttaaatc

SEQ ID NO: 839 - DNA, 33 bp, Homo sapiens
tgtgcatccaaatcacgcgatgaacttgatcat

SEQ ID NO: 840 - DNA, 33 bp, Homo sapiens
ttgagcactgactacatccaaggagatgctaag

SEQ ID NO: 841 - DNA, 51 bp, Homo sapiens
aaactcttgataaaattagaaaatgtcactaaataataagctatgaaatgc

SEQ ID NO: 842 - DNA, 33 bp, Homo sapiens
ccattttctcaaagacgacttctatattctcat

SEQ ID NO: 843 - DNA, 33 bp, Homo sapiens
taaattgaaggtgaattagatgatccgtgggaa

SEQ ID NO: 844 - DNA, 33 bp, Homo sapiens
accttcatgagtagaggaaggacttctgaaagt

SEQ ID NO: 845 - DNA, 33 bp, Homo sapiens
atattgcctcttagcagcaaagggatccaaatt

SEQ ID NO: 846 - DNA, 33 bp, Homo sapiens
agagccagactgatcacctatttttaaggtttc

SEQ ID NO: 847 - DNA, 33 bp, Homo sapiens
gctaagcactaaatcagtcatcgagaattattc

SEQ ID NO: 848 - DNA, 33 bp, Homo sapiens
ggcattttagaatcaggagaatatcagagttga

SEQ ID NO: 849 - DNA, 33 bp, Homo sapiens
tgttccttctgtcagcgctcttgtccagagaag

SEQ ID NO: 850 - DNA, 33 bp, Homo sapiens
catgtttttatgggctgaattgtgtcttgcccc

SEQ ID NO: 851 - DNA, 33 bp, Homo sapiens
aattgaatcaaactcagattggtagttgaatcc

SEQ ID NO: 852 - DNA, 33 bp, Homo sapiens
aatgccttgaatacccgcctgtcaaatgaagaa

SEQ ID NO: 853 - DNA, 33 bp, Homo sapiens
gatttttatgtttctgtagagaagtacttttct

SEQ ID NO: 854 - DNA, 33 bp, Homo sapiens
gtcttggtgtgagtgagagggaaccaataatct

SEQ ID NO: 855 - DNA, 33 bp, Homo sapiens
tcctctgccccaagtaggatagaaggataccca

SEQ ID NO: 856 - DNA, 51 bp, Homo sapiens
ataaattttagaattgttgtcttactcatacacaatattgtgcttttgatt

SEQ ID NO: 857 - DNA, 51 bp, Homo sapiens
agacataatgaggctagggtaatcatgacaacacaatattggcacaaggat

SEQ ID NO: 858 - DNA, 51 bp, Homo sapiens
aagaccagtctttgtttgaaaggcgcaattctaaaaactgttagaagaaat

SEQ ID NO: 859 - DNA, 33 bp, Homo sapiens
cttctgttgggtcttatatggggctttgagcag

SEQ ID NO: 860 - DNA, 33 bp, Homo sapiens
acataaatgacctcatgatctcttgggtgcaag

SEQ ID NO: 861 - DNA, 33 bp, Homo sapiens
accctcccattcataatctacatacgtgcctat

SEQ ID NO: 862 - DNA, 33 bp, Homo sapiens
tagctagtcagtttaagtccttaatacatatgg

SEQ ID NO: 863 - DNA, 51 bp, Homo sapiens
aagctttctagtactcttaaaataagtaaatggagtattatatatcaattc

SEQ ID NO: 864 - DNA, 33 bp, Homo sapiens
aacagtgtagaaagcattacaagagatatgctt

SEQ ID NO: 865 - DNA, 33 bp, Homo sapiens
catgcttcatcattcagattaattatgctgatg

SEQ ID NO: 866 - DNA, 51 bp, Homo sapiens
tatcttttttctctttagcctgtcatactggagatccaaccacatgctgca

SEQ ID NO: 867 - DNA, 33 bp, Homo sapiens
tgttgggatgactatatacttggtaattctggg

SEQ ID NO: 868 - DNA, 33 bp, Homo sapiens
tgcttagaggacaatcgctgttatgcccacggg

SEQ ID NO: 869 - DNA, 33 bp, Homo sapiens
acaatcaagggagccatgtaaattaaagttaaa

SEQ ID NO: 870 - DNA, 33 bp, Homo sapiens
ggaaatgttgcaggaccagcaggttcacatgct

SEQ ID NO: 871 - DNA, 33 bp, Homo sapiens
gatatgtaagtaaaaggctttgtgacactttag

SEQ ID NO: 872 - DNA, 33 bp, Homo sapiens
taccatccagatggaatgagcaatgagaagggg

SEQ ID NO: 873 - DNA, 33 bp, Homo sapiens
ggaacaatcttgcaaaggctgtaaagtaggaat

SEQ ID NO: 874 - DNA, 33 bp, Homo sapiens
gctcttacaaaatccagattcattagcacagtt

SEQ ID NO: 875 - DNA, 33 bp, Homo sapiens
tatttatttttccttcgccatctggttcacatg

SEQ ID NO: 876 - DNA, 33 bp, Homo sapiens
cttatcctgcccaagatgtgaactagccaacac

SEQ ID NO: 877 - DNA, 33 bp, Homo sapiens
gactgactgatagacaggtgacagatacataga

SEQ ID NO: 878 - DNA, 33 bp, Homo sapiens
gttgttcatcacactagagcatcaattttattc

SEQ ID NO: 879 - DNA, 33 bp, Homo sapiens
tggcatcttcattcttgaacccctaaatgccac

SEQ ID NO: 880 - DNA, 33 bp, Homo sapiens
gtttcaaccagcagtcgaatagatagattggga

SEQ ID NO: 881 - DNA, 33 bp, Homo sapiens
ctctttttctctctactattctcaacctgtatt

SEQ ID NO: 882 - DNA, 33 bp, Homo sapiens
taggccatttttattcgatgccagattacatag

SEQ ID NO: 883 - DNA, 33 bp, Homo sapiens
ggctcagtgaggttaagacagattcagagctgt

SEQ ID NO: 884 - DNA, 51 bp, Homo sapiens
attcttttaacctacattcagccacgccgggaatgatgcttcttgacctga

SEQ ID NO: 885 - DNA, 33 bp, Homo sapiens
aaccctaagttagatgtatatgtctggtttgtc

SEQ ID NO: 886 - DNA, 33 bp, Homo sapiens
aaggatagagactgaatggaaggtactggaagg

SEQ ID NO: 887 - DNA, 33 bp, Homo sapiens
cacattgcccagagacgactacagccatcagtt

SEQ ID NO: 888 - DNA, 33 bp, Homo sapiens
atataatgatctgtgctgcaatatactataatt

SEQ ID NO: 889 - DNA, 33 bp, Homo sapiens
ggctcagtatccctagtattctgccttaaattc

SEQ ID NO: 890 - DNA, 33 bp, Homo sapiens
caattcaggccaagactaccctttccatcagaa

SEQ ID NO: 891 - DNA, 33 bp, Homo sapiens
acatatacagcaacccgcctcaaaggtttccct

SEQ ID NO: 892 - DNA, 33 bp, Homo sapiens
caaagagagcccgtcatgtcaaagaaaccaact

SEQ ID NO: 893 - DNA, 33 bp, Homo sapiens
gcaagttcaacctacatagtgcagctccagttc

SEQ ID NO: 894 - DNA, 33 bp, Homo sapiens
atttacaataccatcagaaagattaggatagaa

SEQ ID NO: 895 - DNA, 33 bp, Homo sapiens
aatacaaaagcatgcagagacaggaaagtacaa

SEQ ID NO: 896 - DNA, 51 bp, Homo sapiens
tccacaaaccacagagataagtgaatcattgatgagaaccaaaatggtgtc

SEQ ID NO: 897 - DNA, 33 bp, Homo sapiens
ttatctcctcaaaacagcaagaattctgcacct

SEQ ID NO: 898 - DNA, 33 bp, Homo sapiens
gtgcatttctccaaattatctctattaagtctc

SEQ ID NO: 899 - DNA, 33 bp, Homo sapiens
aaggagccagggatcatcctctgtatctgaaga

SEQ ID NO: 900 - DNA, 33 bp, Homo sapiens
gccggatcttctcctatgtacctgcttcatttt

SEQ ID NO: 901 - DNA, 33 bp, Homo sapiens
aaactcagtacaaacatgcaagcggccctttag

SEQ ID NO: 902 - DNA, 33 bp, Homo sapiens
tttaatgacaacttaatgagaggagttaataag

SEQ ID NO: 903 - DNA, 33 bp, Homo sapiens
tgttacaacacataagtctataatgcgattcag

SEQ ID NO: 904 - DNA, 33 bp, Homo sapiens
gagctggagccaagaaggtgaaaaggaagtgag

SEQ ID NO: 905 - DNA, 33 bp, Homo sapiens
tttgtctgacctgtaatctgggaagctgaaatt

SEQ ID NO: 906 - DNA, 33 bp, Homo sapiens
ttgggagagcaaattcgaaaggtcgtaggaaca

SEQ ID NO: 907 - DNA, 33 bp, Homo sapiens
tcaaagatccttgacaggcttggtatggacagt

SEQ ID NO: 908 - DNA, 33 bp, Homo sapiens
tctaacagcagttaaatgtgcttctttagaagg

SEQ ID NO: 909 - DNA, 33 bp, Homo sapiens
aggatgaggttgttaattgggcctgtgcaggct

SEQ ID NO: 910 - DNA, 33 bp, Homo sapiens
ctccacatccttgtactgagcactacttacatt

SEQ ID NO: 911 - DNA, 33 bp, Homo sapiens
gggttataaaggcttatgaagtccaacttttgg

SEQ ID NO: 912 - DNA, 33 bp, Homo sapiens
acacctgatggcttaatgacacctaggtggcct

SEQ ID NO: 913 - DNA, 33 bp, Homo sapiens
attctccaaaacataattactatagcctactgt

SEQ ID NO: 914 - DNA, 33 bp, Homo sapiens
gatatacctgaaacactgtcaaatcatttattc

SEQ ID NO: 915 - DNA, 33 bp, Homo sapiens
agaattctttagagtatgctggcaagtgcaatt

SEQ ID NO: 916 - DNA, 51 bp, Homo sapiens
aagtagaaattcctctataaaaagatacaagagttagtcaaggaaatctat

SEQ ID NO: 917 - DNA, 33 bp, Homo sapiens
cttcaagggcagaaaccatgaaaaagaaagagg

SEQ ID NO: 918 - DNA, 33 bp, Homo sapiens
gctggaactgagttcatagtaactgtgagttat

SEQ ID NO: 919 - DNA, 33 bp, Homo sapiens
ctcccaagcagactgatccattcacatttcaac

SEQ ID NO: 920 - DNA, 33 bp, Homo sapiens
atgggcaccctctttcgcattttttttcttggc

SEQ ID NO: 921 - DNA, 51 bp, Homo sapiens
ttcaatctgtttaataaagacgtgcgaatagagtgccaaaaagcatttaaa

SEQ ID NO: 922 - DNA, 33 bp, Homo sapiens
aattatactcttctactgaaaaatgcaaaacca

SEQ ID NO: 923 - DNA, 33 bp, Homo sapiens
aggaatgggctgatcctgatccagaaaactaag

SEQ ID NO: 924 - DNA, 33 bp, Homo sapiens
agagatggacttggagtcgtggttgtcattcac

SEQ ID NO: 925 - DNA, 33 bp, Homo sapiens
ctcagcagggcttaggcatcagaaacatcagat

SEQ ID NO: 926 - DNA, 33 bp, Homo sapiens
ggcttgtaactgcagatctacttatgtattgag

SEQ ID NO: 927 - DNA, 33 bp, Homo sapiens
cccattgactttctgctctcctggatgagattt

SEQ ID NO: 928 - DNA, 33 bp, Homo sapiens
cttgaacttggcccactccaaatcagttcctat

SEQ ID NO: 929 - DNA, 33 bp, Homo sapiens
aacagataagtgtctaggggaaaattcttattc

SEQ ID NO: 930 - DNA, 33 bp, Homo sapiens
aacacattccccaatatccctactcttgatggc

SEQ ID NO: 931 - DNA, 33 bp, Homo sapiens
tttgctttaagctggaggggggattttgtatgt

SEQ ID NO: 932 - DNA, 33 bp, Homo sapiens
tgtgcttgctggcacattctttatcgccactat

SEQ ID NO: 933 - DNA, 33 bp, Homo sapiens
ccagaagactttgtcagggtttgtgtcaggatc

SEQ ID NO: 934 - DNA, 33 bp, Homo sapiens
gggcccacacctacactgagttgaccaatgtct

SEQ ID NO: 935 - DNA, 33 bp, Homo sapiens
cactgacatcaccacaggttgttgctctcagtt

SEQ ID NO: 936 - DNA, 33 bp, Homo sapiens
acttgcaactgtcatatcacacgtgcaaaattt

SEQ ID NO: 937 - DNA, 33 bp, Homo sapiens
taaaatgccatgtttagcaggtactactagaac

SEQ ID NO: 938 - DNA, 33 bp, Homo sapiens
tttactgtccaacaaacgtatcagatcacattc

SEQ ID NO: 939 - DNA, 33 bp, Homo sapiens
tttgggaaggtttatatagcactgttgaaggag

SEQ ID NO: 940 - DNA, 33 bp, Homo sapiens
tgggaactatttgaaagtgcagcatgaaggaag

SEQ ID NO: 941 - DNA, 33 bp, Homo sapiens
gatgagagaacagcaatggacaaagagaccaaa

SEQ ID NO: 942 - DNA, 33 bp, Homo sapiens
atggtgaaatacttcagaagccttaggaagaat

SEQ ID NO: 943 - DNA, 33 bp, Homo sapiens
tttctgttgtcatacattctgatattacttcaa

SEQ ID NO: 944 - DNA, 33 bp, Homo sapiens
gtatcatctggtcacattggtctgctagtagtt

SEQ ID NO: 945 - DNA, 33 bp, Homo sapiens
cgtcaatatttgcacatccttaacgaggccgtg

SEQ ID NO: 946 - DNA, 33 bp, Homo sapiens
ggagctttaagcaaagtattggcatgatcgggt

SEQ ID NO: 947 - DNA, 33 bp, Homo sapiens
tattattttgatgaactatttgagagtaagatg

SEQ ID NO: 948 - DNA, 33 bp, Homo sapiens
ttacatcaaccttcatgagtagtattggtttgt

SEQ ID NO: 949 - DNA, 33 bp, Homo sapiens
gccacagaattaggactatgggagtagcttgaa

SEQ ID NO: 950 - DNA, 33 bp, Homo sapiens
caattcttagaccttcgagaggacttcccagtg

SEQ ID NO: 951 - DNA, 33 bp, Homo sapiens
ctctccgcattcccccgagtttctcccctccct

SEQ ID NO: 952 - DNA, 33 bp, Homo sapiens
caaaacacatgatttcgcagaccatacagcttt

SEQ ID NO: 953 - DNA, 51 bp, Homo sapiens
tacgtctattttataaaggcctggcgaatgaaagaactcaatgggttttga

SEQ ID NO: 954 - DNA, 33 bp, Homo sapiens
ggatggaaaattggaccgtcaaagagtaacagt

SEQ ID NO: 955 - DNA, 33 bp, Homo sapiens
gccccaatctttccaaggaagcaggtgtttctg

SEQ ID NO: 956 - DNA, 33 bp, Homo sapiens
ctttagcaacattttcgactcagtgggcactgc

SEQ ID NO: 957 - DNA, 33 bp, Homo sapiens
ttcacttgtcaaatgctcataactgagagtatt

SEQ ID NO: 958 - DNA, 51 bp, Homo sapiens
ctccaaatgaatgattcatgttcaggactttcacaggtgagggctggaaac

SEQ ID NO: 959 - DNA, 33 bp, Homo sapiens
taggaagaagggggatgaattttgaggagactg

SEQ ID NO: 960 - DNA, 33 bp, Homo sapiens
aagaatttgtgattaagtaaacatggataaagc

SEQ ID NO: 961 - DNA, 33 bp, Homo sapiens
cattaccattgtgtgatgatcacctacagtatt

SEQ ID NO: 962 - DNA, 33 bp, Homo sapiens
gtaaatctagaagcaataggtagatggttccag

SEQ ID NO: 963 - DNA, 33 bp, Homo sapiens
gccaaaagaaaatgtcgatctaaaatcatgctc

SEQ ID NO: 964 - DNA, 33 bp, Homo sapiens
gctcaggcagaaataccgtaagttcaactgaat

SEQ ID NO: 965 - DNA, 33 bp, Homo sapiens
gcccacagcaggcaaaggcggacctcagcagcc

SEQ ID NO: 966 - DNA, 33 bp, Homo sapiens
gctaaatcaggccgtacactgccatcagctggg

SEQ ID NO: 967 - DNA, 33 bp, Homo sapiens
aagaaggattagcccctgaaagtccctgaagta

SEQ ID NO: 968 - DNA, 33 bp, Homo sapiens
tccctcccctcttcagtccatttcaatttagac

SEQ ID NO: 969 - DNA, 33 bp, Homo sapiens
ctttgctttcaaaaaggcttcaggaaataaaga

SEQ ID NO: 970 - DNA, 33 bp, Homo sapiens
ggcttagctctgaacatattacttcctgctcaa

SEQ ID NO: 971 - DNA, 33 bp, Homo sapiens
ctcattttgatcctcaggcacatgcttgttgtc

SEQ ID NO: 972 - DNA, 33 bp, Homo sapiens
ctgctcagtgtcaaattaacaggaaagtcagct

SEQ ID NO: 973 - DNA, 33 bp, Homo sapiens
atgcttctttaacttatagtctatctccatcaa

SEQ ID NO: 974 - DNA, 33 bp, Homo sapiens
cttccttttggaaacctacaatgccaggcaccc

SEQ ID NO: 975 - DNA, 33 bp, Homo sapiens
tggcctactctggttatggggacactgacgccc

SEQ ID NO: 976 - DNA, 33 bp, Homo sapiens
agaggtagcagtgaacgggaattgtggcactgc

SEQ ID NO: 977 - DNA, 33 bp, Homo sapiens
caggatgccctcttcctctcagacagggacagt

SEQ ID NO: 978 - DNA, 33 bp, Homo sapiens
aagacatggacttctagtaattaggactgctgg

SEQ ID NO: 979 - DNA, 33 bp, Homo sapiens
aataatcaacaagctatcacggaaagatctata

SEQ ID NO: 980 - DNA, 33 bp, Homo sapiens
aaaaaacagaaagggagaggcatcacttaaaac

SEQ ID NO: 981 - DNA, 33 bp, Homo sapiens
ggaaatatgtgtgggcgaaactaatgcctaccc

SEQ ID NO: 982 - DNA, 51 bp, Homo sapiens
tttcaggtactggaaaggctgacaataggatgactgcttgagcccaggagt

SEQ ID NO: 983 - DNA, 51 bp, Homo sapiens
gactggtgaagctctaagggtcatattatactccttccacccacctctccc

SEQ ID NO: 984 - DNA, 33 bp, Homo sapiens
ggatcagggaataagagcttctcttctgcaagc

SEQ ID NO: 985 - DNA, 33 bp, Homo sapiens
tcactagcagacttgcgatataacaaatgcaaa

SEQ ID NO: 986 - DNA, 33 bp, Homo sapiens
ggccttcaacagactggatggtccccacccaca

SEQ ID NO: 987 - DNA, 33 bp, Homo sapiens
gcacaaggttgcaaactagaaaaatgtatctgt

SEQ ID NO: 988 - DNA, 33 bp, Homo sapiens
cttccctaagaaacaatggaagagaaggagctt

SEQ ID NO: 989 - DNA, 33 bp, Homo sapiens
tgtaggatacaaaacttagagatggaggctgtg

SEQ ID NO: 990 - DNA, 33 bp, Homo sapiens
gatactagaaggtacatgctgacttctgaaggg

SEQ ID NO: 991 - DNA, 33 bp, Homo sapiens
gatgaagaagccattatgtatatatttgagaca

SEQ ID NO: 992 - DNA, 33 bp, Homo sapiens
tgccacttaagtgttatgtctagggaaatacta

SEQ ID NO: 993 - DNA, 33 bp, Homo sapiens
atagctgaactaaacgcaaatgaaaatataatg

SEQ ID NO: 994 - DNA, 33 bp, Homo sapiens
tcagctctctactagatgtctccactggcacct

SEQ ID NO: 995 - DNA, 33 bp, Homo sapiens
aaacatgaagaaattagagaaaggcaagtttta

SEQ ID NO: 996 - DNA, 33 bp, Homo sapiens
cttatgccttgttaaacccagtcatatatacat

SEQ ID NO: 997 - DNA, 51 bp, Homo sapiens
ggccccaggcaggtaaatcctactatggaatggagagctcagactctagaa

SEQ ID NO: 998 - DNA, 51 bp, Homo sapiens
agacttgagtcttaataaattctcagacaattacatacttaactcaggagt

SEQ ID NO: 999 - DNA, 51 bp, Homo sapiens
tccctcaggaaacattacatataaccaaagtgtcacttggagagtagtgag

SEQ ID NO: 1000 - DNA, 51 bp, Homo sapiens
tacatccctgcagcactcaggaaaaggatgaaatggacaacagggactctt

SEQ ID NO: 1001 - DNA, 51 bp, Homo sapiens
cccataaagcactgacaagaccacagactccctgtcacatagttaaaaatg

SEQ ID NO: 1002 - DNA, 33 bp, Homo sapiens
ataccagtctcaaatatagcaaagagacagact

SEQ ID NO: 1003 - DNA, 33 bp, Homo sapiens
accaaaaacatctacccatgtgtctaggaggaa

SEQ ID NO: 1004 - DNA, 33 bp, Homo sapiens
taaaagaaaaatcttatgtcaattgtgaggtaa

SEQ ID NO: 1005 - DNA, 33 bp, Homo sapiens
ggagttcctgacactatggaaaactaatgagaa

SEQ ID NO: 1006 - DNA, 33 bp, Homo sapiens
ttgaagtaatgagaaggaagagagaacacccat

SEQ ID NO: 1007 - DNA, 33 bp, Homo sapiens
tctcatcctgaaattctcctcatacattttcta

SEQ ID NO: 1008 - DNA, 33 bp, Homo sapiens
cattatagaccacttatagaccaattatatcta

SEQ ID NO: 1009 - DNA, 33 bp, Homo sapiens
gttaggtcaatggggagaagatattggaaaaga

SEQ ID NO: 1010 - DNA, 33 bp, Homo sapiens
tacagggtctaaataattaggttacgtgccaat

SEQ ID NO: 1011 - DNA, 33 bp, Homo sapiens
taaataaaataaagaggaatgttcaggacacct

SEQ ID NO: 1012 - DNA, 33 bp, Homo sapiens
agagtcaaagctagcatgtcctctttagccatc

SEQ ID NO: 1013 - DNA, 33 bp, Homo sapiens
ataatgcactcacaggtactttgcaaactctag

SEQ ID NO: 1014 - DNA, 33 bp, Homo sapiens
ctacatgaggactctataatagttaaagtcata

SEQ ID NO: 1015 - DNA, 33 bp, Homo sapiens
atctacagaacttcactgcgtgtcttcatgctt

SEQ ID NO: 1016 - DNA, 33 bp, Homo sapiens
tgttctccaggaacacggcccctccaaagcact

SEQ ID NO: 1017 - DNA, 33 bp, Homo sapiens
gtcagtccagaattaatggtgtgctcggggatg

SEQ ID NO: 1018 - DNA, 33 bp, Homo sapiens
gcttcacggaggaagaggtcatagctgcaggaa

SEQ ID NO: 1019 - DNA, 33 bp, Homo sapiens
gcagtcaggagtaacatggactgtgccagagag

SEQ ID NO: 1020 - DNA, 33 bp, Homo sapiens
gaaggactagaccccacgatacctgaattccct

SEQ ID NO: 1021 - DNA, 33 bp, Homo sapiens
tatttgttgagcatccgactttatcataattac

SEQ ID NO: 1022 - DNA, 33 bp, Homo sapiens
ttgaataatcagagaagattcaacacaggagat

SEQ ID NO: 1023 - DNA, 33 bp, Homo sapiens
aagcgagccatgtaacgatctgggtaagaggtt

SEQ ID NO: 1024 - DNA, 33 bp, Homo sapiens
tgcatactgggggctcgacaggaaagccactag

SEQ ID NO: 1025 - DNA, 51 bp, Homo sapiens
tcgcaaagcgggaaaaatgaaacaggctccgacagctctttcctctttcct

SEQ ID NO: 1026 - DNA, 33 bp, Homo sapiens
gtgggtaatcttgggatggagtctgcaaatcaa

SEQ ID NO: 1027 - DNA, 33 bp, Homo sapiens
ggccataattgctccaggtgaaatccccaatac

SEQ ID NO: 1028 - DNA, 33 bp, Homo sapiens
gaggtgtatcgggccttaaagtatttttacctg

SEQ ID NO: 1029 - DNA, 33 bp, Homo sapiens
aaccactgtgacatccggagtgcaggaaggagt

SEQ ID NO: 1030 - DNA, 33 bp, Homo sapiens
taaattccagaatatctatgaggagtcttggaa

SEQ ID NO: 1031 - DNA, 33 bp, Homo sapiens
ctggcacagagtatccgagctagaaaagttaaa

SEQ ID NO: 1032 - DNA, 33 bp, Homo sapiens
gtagaatatgtggtcatggctatagatgtgact

SEQ ID NO: 1033 - DNA, 33 bp, Homo sapiens
gctttgttaacttagcttcttcctctatggaga

SEQ ID NO: 1034 - DNA, 33 bp, Homo sapiens
gcctgagctctgaaactctaaataaaccacatc

SEQ ID NO: 1035 - DNA, 33 bp, Homo sapiens
gtgaggctgcattttagcacagtatcaatctcc

SEQ ID NO: 1036 - DNA, 33 bp, Homo sapiens
ttccttggtgtcctacgaacttggcatattcag

SEQ ID NO: 1037 - DNA, 51 bp, Homo sapiens
ttattttccagcaggacaagatcacgctgtttagctggtgtatcagtcagg

SEQ ID NO: 1038 - DNA, 33 bp, Homo sapiens
atcagccagtgaaatatggaatttgaccccaaa

SEQ ID NO: 1039 - DNA, 51 bp, Homo sapiens
gtttaggtaccttgtcaagtaccttgtcaataacacatgccagggtccaga

SEQ ID NO: 1040 - DNA, 51 bp, Homo sapiens
atgggagggaagaattggggctaagtccataactggcatatttgctatctg

SEQ ID NO: 1041 - DNA, 33 bp, Homo sapiens
ggagagccagtggtgatcagaaggtttgggtca

SEQ ID NO: 1042 - DNA, 33 bp, Homo sapiens
aaagtcactctcaagaggtcactactcactaat

SEQ ID NO: 1043 - DNA, 33 bp, Homo sapiens
gatagacatctgacacgcggtctcaatccagaa

SEQ ID NO: 1044 - DNA, 33 bp, Homo sapiens
tttattccattgaaaatagtgctggttactgtg

SEQ ID NO: 1045 - DNA, 33 bp, Homo sapiens
ccaagtttgtaatatataaggtgtgtttagaaa

SEQ ID NO: 1046 - DNA, 51 bp, Homo sapiens
atgttactaattcactgggtaagtcgacggatatcccaagatgtaatgccc

SEQ ID NO: 1047 - DNA, 33 bp, Homo sapiens
ggagtattgcctgatatgtagcgaaaacactgc

SEQ ID NO: 1048 - DNA, 51 bp, Homo sapiens
tttgactttttttcttcagggacacgagtagtataaataaatatttactgt

SEQ ID NO: 1049 - DNA, 33 bp, Homo sapiens
ctagatttgagtgccatctcccaacctggaata

SEQ ID NO: 1050 - DNA, 33 bp, Homo sapiens
aaagtgatacctggcttaatagaataacgaatt

SEQ ID NO: 1051 - DNA, 33 bp, Homo sapiens
atttcacatatgcacagcttgaggacaagaatt

SEQ ID NO: 1052 - DNA, 33 bp, Homo sapiens
taaaagctgagctgaatgttgccctggaagtca

SEQ ID NO: 1053 - DNA, 33 bp, Homo sapiens
tgtgcatggaacattggaagcgtttggaacgga

SEQ ID NO: 1054 - DNA, 33 bp, Homo sapiens
tatggagaagcatccagctatgtctcaatggtt

SEQ ID NO: 1055 - DNA, 51 bp, Homo sapiens
agtcggcaaacattccttttgttagtaatgcaccctcacttccaaatcaga

SEQ ID NO: 1056 - DNA, 51 bp, Homo sapiens
aaaaaacacaaaagcatgctcaggagataaatttattacacaaagtccttt

SEQ ID NO: 1057 - DNA, 33 bp, Homo sapiens
tgcaacaccgtttaccgactctgacaagccact

SEQ ID NO: 1058 - DNA, 33 bp, Homo sapiens
atccaaaggtcgttaagatggaaataagtgtcc

SEQ ID NO: 1059 - DNA, 33 bp, Homo sapiens
accagtatgcaacaactctttgccatgattctt

SEQ ID NO: 1060 - DNA, 33 bp, Homo sapiens
tttagaatacatagatgatctaaaaagcacaga

SEQ ID NO: 1061 - DNA, 33 bp, Homo sapiens
ccacacccactggagagataaggccttcaaggg

SEQ ID NO: 1062 - DNA, 33 bp, Homo sapiens
tacaccacttttgtgatatgaaaattcctgaag

SEQ ID NO: 1063 - DNA, 33 bp, Homo sapiens
tttggaggaatcaatggagacggaattctttta

SEQ ID NO: 1064 - DNA, 33 bp, Homo sapiens
atgaattaaggtgagaggttgggaatgaagagg

SEQ ID NO: 1065 - DNA, 33 bp, Homo sapiens
gcaattgctccatttatggtaacctagtgttct

SEQ ID NO: 1066 - DNA, 33 bp, Homo sapiens
cccactataatcagcagggccattgatacccta

SEQ ID NO: 1067 - DNA, 33 bp, Homo sapiens
catgatgtgagaatcacggccttagagaatggt

SEQ ID NO: 1068 - DNA, 33 bp, Homo sapiens
aaggctttcagatacaccccttctttcaatcct

SEQ ID NO: 1069 - DNA, 33 bp, Homo sapiens
ctcagcctcagcatggcagagtatatggagtta

SEQ ID NO: 1070 - DNA, 33 bp, Homo sapiens
gctactgtttatcactgagcactaaacagaata

SEQ ID NO: 1071 - DNA, 33 bp, Homo sapiens
cttgagggtacacttatggtgactagagttaag

SEQ ID NO: 1072 - DNA, 33 bp, Homo sapiens
aaatcccaaatgcttatgtttggtcatccactg

SEQ ID NO: 1073 - DNA, 33 bp, Homo sapiens
tcatatgcaaaatgaaggggactgggccaggtg

SEQ ID NO: 1074 - DNA, 33 bp, Homo sapiens
ccattctcttctggtatctttacatgatctacc

SEQ ID NO: 1075 - DNA, 33 bp, Homo sapiens
catttgtacgtaggcagtcagatctttgtttct

SEQ ID NO: 1076 - DNA, 51 bp, Homo sapiens
tttactttttttttgaggtcattaataaaaaggagaagaagaatatataac

SEQ ID NO: 1077 - DNA, 33 bp, Homo sapiens
attgagcacattaagctctctaagacccaagat

SEQ ID NO: 1078 - DNA, 33 bp, Homo sapiens
tgattgtgtacaaccttaactataagctccttg

SEQ ID NO: 1079 - DNA, 51 bp, Homo sapiens
aaggacaaagcaaaaatattctagcgcaagagagcagacagaagcatggac

SEQ ID NO: 1080 - DNA, 33 bp, Homo sapiens
actgccaggaaatgtcgatgtccaagcgggcct

SEQ ID NO: 1081 - DNA, 51 bp, Homo sapiens
ctcagggatatctgtaaatacatgagggctcttttttctggttgttagtgg

SEQ ID NO: 1082 - DNA, 33 bp, Homo sapiens
aaaactttttaatccagtgcttaatgtgtgcta

SEQ ID NO: 1083 - DNA, 51 bp, Homo sapiens
tcctggtccctgctttgctgatggctttgaagcagcctcccaagcagatga

SEQ ID NO: 1084 - DNA, 33 bp, Homo sapiens
tactactggattggtcgactataaggatgtcat

SEQ ID NO: 1085 - DNA, 51 bp, Homo sapiens
agaggcttcttcctctcccttcctctgtaatcattacaaacagtggatatg

SEQ ID NO: 1086 - DNA, 51 bp, Homo sapiens
ggtgaaaaactcctgggcttttcaggatagaattccaccatcacatgtgag

SEQ ID NO: 1087 - DNA, 33 bp, Homo sapiens
aactaaaataattacagaaaagtgcaattatct

SEQ ID NO: 1088 - DNA, 33 bp, Homo sapiens
tgtgtgggctacttcagtaagcaagtctaaact

SEQ ID NO: 1089 - DNA, 33 bp, Homo sapiens
ccaaaataacattcaggctatctttaaaatatt

SEQ ID NO: 1090 - DNA, 33 bp, Homo sapiens
ttgaaccttcttcaaagcagtgtttcatcatat

SEQ ID NO: 1091 - DNA, 33 bp, Homo sapiens
ttaaggttttaagcacgggaatgatgtgaccag

SEQ ID NO: 1092 - DNA, 33 bp, Homo sapiens
cgaattagattgacaatggacagaagacttgaa

SEQ ID NO: 1093 - DNA, 33 bp, Homo sapiens
gagactagacttggaagtaataatgtacaatgt

SEQ ID NO: 1094 - DNA, 33 bp, Homo sapiens
aaggaactcaacaacagaaacaattccaagtaa

SEQ ID NO: 1095 - DNA, 33 bp, Homo sapiens
tggcactctgcgtgtcgcccatatgcagggaca

SEQ ID NO: 1096 - DNA, 33 bp, Homo sapiens
gttaataaggggatcagcaagatggtaaaactg

SEQ ID NO: 1097 - DNA, 33 bp, Homo sapiens
aggagctgaatcagccgaaactctccctcccca

SEQ ID NO: 1098 - DNA, 33 bp, Homo sapiens
ggaattggacagtaactggagaagcagctggat

SEQ ID NO: 1099 - DNA, 33 bp, Homo sapiens
cttcccactgtagcaatgtgagcttttttttct

SEQ ID NO: 1100 - DNA, 33 bp, Homo sapiens
gcgtacccacaatagcgaggaactcttttgttt

SEQ ID NO: 1101 - DNA, 51 bp, Homo sapiens
ccctccactaagccggtttagcaaagagccctttcctcccagggtcttcca

SEQ ID NO: 1102 - DNA, 33 bp, Homo sapiens
aaatcatatttggtaggcaggatttatatgatc

SEQ ID NO: 1103 - DNA, 33 bp, Homo sapiens
ggttcaggttcagggataaagatgtgtgctgac

SEQ ID NO: 1104 - DNA, 33 bp, Homo sapiens
aacagatagtaaagtatgatattatgcaggaat

SEQ ID NO: 1105 - DNA, 33 bp, Homo sapiens
aaaattcatgcctccagattcggcaaactcttg

SEQ ID NO: 1106 - DNA, 33 bp, Homo sapiens
taaaaactattccagagactgtggaagtaaaga

SEQ ID NO: 1107 - DNA, 33 bp, Homo sapiens
agtgctagaaaatgaagcataaagcatgaaggg

SEQ ID NO: 1108 - DNA, 33 bp, Homo sapiens
tccaaatcagtgcaaatatctgatgcggtgggg

SEQ ID NO: 1109 - DNA, 33 bp, Homo sapiens
aaaactgcatacagtataacttgcacattgagt

SEQ ID NO: 1110 - DNA, 33 bp, Homo sapiens
ttccgaagccagaggagaaatggtgctaatgtc

SEQ ID NO: 1111 - DNA, 33 bp, Homo sapiens
cccacatcatattccagctgcttcctgtttctc

SEQ ID NO: 1112 - DNA, 33 bp, Homo sapiens
aatacaaatacagtgaggttctgttgcaaaata

SEQ ID NO: 1113 - DNA, 33 bp, Homo sapiens
ggggagaaatcatcaggctctccttgattgcac

SEQ ID NO: 1114 - DNA, 33 bp, Homo sapiens
ctctgattgatatacatggacaaatgtgcgtct

SEQ ID NO: 1115 - DNA, 33 bp, Homo sapiens
agagtctaatttgagacaggacatgatttcctt

SEQ ID NO: 1116 - DNA, 33 bp, Homo sapiens
ctgacccttggttccataacaccctgaaaaatt

SEQ ID NO: 1117 - DNA, 33 bp, Homo sapiens
tcttttgttaaggcctgaaaaatatttaaggtg

SEQ ID NO: 1118 - DNA, 33 bp, Homo sapiens
ttcactaactccaagagcttgtctccctacttc

SEQ ID NO: 1119 - DNA, 51 bp, Homo sapiens
ttaacatttaagtatctacaatactgaaaatactgatatttagatatatta

SEQ ID NO: 1120 - DNA, 33 bp, Homo sapiens
ggaatgttgcttataacctctgtgtatttggtc

SEQ ID NO: 1121 - DNA, 33 bp, Homo sapiens
tgtgcactggatacaatgacggtttctcatttt

SEQ ID NO: 1122 - DNA, 33 bp, Homo sapiens
gccattcattgctaaagtgttcacctctggtga

SEQ ID NO: 1123 - DNA, 33 bp, Homo sapiens
aggcaaaatcttgactgaagtgttgaggagaat

SEQ ID NO: 1124 - DNA, 33 bp, Homo sapiens
aagaggagtaaagatatggagtggagccaggcg

SEQ ID NO: 1125 - DNA, 33 bp, Homo sapiens
taatgactgaaagtaacgaaaggtgactaagtt

SEQ ID NO: 1126 - DNA, 33 bp, Homo sapiens
ttaatgaatctggatagaggatttaaaagcatt

SEQ ID NO: 1127 - DNA, 33 bp, Homo sapiens
ctccaaattttgggaagagctaattgtctgtga

SEQ ID NO: 1128 - DNA, 33 bp, Homo sapiens
aagtaccaaaagattatcaggtcagaccagggc

SEQ ID NO: 1129 - DNA, 33 bp, Homo sapiens
taatgttcagggtctggaaggcctattagtttg

SEQ ID NO: 1130 - DNA, 33 bp, Homo sapiens
caggcacatattgaaagtctacaagtgccagga

SEQ ID NO: 1131 - DNA, 33 bp, Homo sapiens
ttcataccattctccctgactttactgcatcat

SEQ ID NO: 1132 - DNA, 33 bp, Homo sapiens
cgagtgaatttctttatgcagaaaagacaaaag

SEQ ID NO: 1133 - DNA, 33 bp, Homo sapiens
tgttttgtcaaagcaaggagtctgaaggttaac

SEQ ID NO: 1134 - DNA, 33 bp, Homo sapiens
ttctctttactcataagctccatatgtggcttg

SEQ ID NO: 1135 - DNA, 33 bp, Homo sapiens
gctttatatggctttatatgggatgatgcataa

SEQ ID NO: 1136 - DNA, 33 bp, Homo sapiens
agttcctgttgtgctatctccataccagccttt

SEQ ID NO: 1137 - DNA, 33 bp, Homo sapiens
gccttatggaatgagagctgtcaggaccaaagt

SEQ ID NO: 1138 - DNA, 33 bp, Homo sapiens
tagatcatatctgacattacgtctcagctgtca

SEQ ID NO: 1139 - DNA, 33 bp, Homo sapiens
tagtgtcaggtacacatagaagagcttgagaac

SEQ ID NO: 1140 - DNA, 51 bp, Homo sapiens
tgattgctatagcacagcacttttcgatcatgaggaaactgagtcttagaa

SEQ ID NO: 1141 - DNA, 33 bp, Homo sapiens
tttaaggtctgaactggagaagagaagagagga

SEQ ID NO: 1142 - DNA, 33 bp, Homo sapiens
ctccgagaccttttaggccaccctgaagaacac

SEQ ID NO: 1143 - DNA, 33 bp, Homo sapiens
gattcaagaaactgacgaagaggcccagaggct

SEQ ID NO: 1144 - DNA, 51 bp, Homo sapiens
atctataaaatggtagtaataatgataccttaatcccatggtgttggtgag

SEQ ID NO: 1145 - DNA, 51 bp, Homo sapiens
taaactatattaggaataattcagatgatcttaataggtgtgatctctaga

SEQ ID NO: 1146 - DNA, 33 bp, Homo sapiens
ggtaattcctccagaggcaaatgcatgtctgat

SEQ ID NO: 1147 - DNA, 33 bp, Homo sapiens
tgctgggattctgagggagatatctaggcactg

SEQ ID NO: 1148 - DNA, 33 bp, Homo sapiens
agtctttttaagtcactgccaaatccattttgc

SEQ ID NO: 1149 - DNA, 33 bp, Homo sapiens
gtaaatcacatgcactgaaatccatgactcaga

SEQ ID NO: 1150 - DNA, 33 bp, Homo sapiens
ctggaaaagcctgaagtctggctacaacttgcc

SEQ ID NO: 1151 - DNA, 33 bp, Homo sapiens
atgagaaaatccttcaggagtaggcttccacta

SEQ ID NO: 1152 - DNA, 33 bp, Homo sapiens
gagtctgttaaagtaggagacagggtgagaagg

SEQ ID NO: 1153 - DNA, 33 bp, Homo sapiens
gggtgggccacgaaacgaagagggggctagcta

SEQ ID NO: 1154 - DNA, 33 bp, Homo sapiens
tatagaaaggttatgagatttgttcctagatcc

SEQ ID NO: 1155 - DNA, 33 bp, Homo sapiens
gctatgtggcacatgcgacagggtgggaaagga

SEQ ID NO: 1156 - DNA, 51 bp, Homo sapiens
ctctgacaaggaaagaaatgatgaggatgagatagttctatttattaaatg

SEQ ID NO: 1157 - DNA, 33 bp, Homo sapiens
cctatttcccatacattaaccactcttcttgtt

SEQ ID NO: 1158 - DNA, 33 bp, Homo sapiens
attgaaggacaggactgacatatacaatgcagc

SEQ ID NO: 1159 - DNA, 33 bp, Homo sapiens
taagggagttctgagagagaaagatcaatataa

SEQ ID NO: 1160 - DNA, 33 bp, Homo sapiens
catcgctcacaaagaatgctctctaccctcttg

SEQ ID NO: 1161 - DNA, 33 bp, Homo sapiens
attaggagcaattagtgaacagaatcaaaggtg

SEQ ID NO: 1162 - DNA, 33 bp, Homo sapiens
gccactttacgccttatcagtttggcaaaattc

SEQ ID NO: 1163 - DNA, 33 bp, Homo sapiens
agcaccgactgagttatatgaaacagaacaagg

SEQ ID NO: 1164 - DNA, 33 bp, Homo sapiens
cacagtgcagagatgagcaaacatatagactgc

SEQ ID NO: 1165 - DNA, 33 bp, Homo sapiens
agctttgacttgtaaagcagcagctaaattgtc

SEQ ID NO: 1166 - DNA, 51 bp, Homo sapiens
tctagctatccttgttagggttccaggattcctagaaatgtggacctcatg

SEQ ID NO: 1167 - DNA, 33 bp, Homo sapiens
tgaaggtaagtggaacgaaagagaaagaaggtt

SEQ ID NO: 1168 - DNA, 33 bp, Homo sapiens
atgccaaatgtaaaaatgaacatgaggaacatg

SEQ ID NO: 1169 - DNA, 33 bp, Homo sapiens
cctgccgtaattcccagtcgacagagatatgtc

SEQ ID NO: 1170 - DNA, 33 bp, Homo sapiens
aggcagagagtcagaatagaagggtttaaggga

SEQ ID NO: 1171 - DNA, 33 bp, Homo sapiens
cgggcgaggtgcctcctgctagaactcagggga

SEQ ID NO: 1172 - DNA, 33 bp, Homo sapiens
ggcagtctggcttcaggatcctaactcttaact

SEQ ID NO: 1173 - DNA, 33 bp, Homo sapiens
acctctgttggagagataaattctttcaagtgg

SEQ ID NO: 1174 - DNA, 33 bp, Homo sapiens
gaaaacaagtttaccacgagacagagaaactcc

SEQ ID NO: 1175 - DNA, 33 bp, Homo sapiens
attttgaataatttgctataccaaccatacttg

SEQ ID NO: 1176 - DNA, 33 bp, Homo sapiens
tttaggatacttaacatgctcccagtgtctcac

SEQ ID NO: 1177 - DNA, 33 bp, Homo sapiens
gtataaaataaagataccggcacctacctccca

SEQ ID NO: 1178 - DNA, 33 bp, Homo sapiens
aggccattgcctaaccggagagaacaggttata

SEQ ID NO: 1179 - DNA, 33 bp, Homo sapiens
tctgctaagaggattccaaccagtatctgtcca

SEQ ID NO: 1180 - DNA, 33 bp, Homo sapiens
aatcattcttttggaagtgaatatagtatgagg

SEQ ID NO: 1181 - DNA, 33 bp, Homo sapiens
agaaatgcttggggtctctttgcttgcagaggt

SEQ ID NO: 1182 - DNA, 33 bp, Homo sapiens
atgtggaggtaggcccgggacacagtagagcac

SEQ ID NO: 1183 - DNA, 33 bp, Homo sapiens
tcacacagttaataagtaaacccaggaatgtct

SEQ ID NO: 1184 - DNA, 33 bp, Homo sapiens
actaagttctcatcaatggagtgtaagtagatg

SEQ ID NO: 1185 - DNA, 33 bp, Homo sapiens
ttcaggtcaacttaaacccctaatgaaataata

SEQ ID NO: 1186 - DNA, 33 bp, Homo sapiens
aattttggagttttcattaagcatagatcctag

SEQ ID NO: 1187 - DNA, 33 bp, Homo sapiens
atgggcctaatgagaattgattgattcgctcga

SEQ ID NO: 1188 - DNA, 33 bp, Homo sapiens
gtctggcatgtttgtcgagcagttatcaacctg

SEQ ID NO: 1189 - DNA, 33 bp, Homo sapiens
ggtcttagataattcagcttagcaattcaacca

SEQ ID NO: 1190 - DNA, 33 bp, Homo sapiens
cttcattccttttatcgcttcaagcattagcta

SEQ ID NO: 1191 - DNA, 33 bp, Homo sapiens
gatatgttgagttttccaagaaatgagggtggt

SEQ ID NO: 1192 - DNA, 33 bp, Homo sapiens
ctaccatttttagggcgctccatgatccaacgc

SEQ ID NO: 1193 - DNA, 33 bp, Homo sapiens
caggtttagacttatcgaacatcttgccagacc

SEQ ID NO: 1194 - DNA, 51 bp, Homo sapiens
ggtcttggaaaatcattacagtaaagtgcagattctaataagccttgtttc

SEQ ID NO: 1195 - DNA, 33 bp, Homo sapiens
gccttcttatagcagatggagctgaaaggaacc

SEQ ID NO: 1196 - DNA, 33 bp, Homo sapiens
tattatgaaaaaagccgctctgaacattcatgt

SEQ ID NO: 1197 - DNA, 33 bp, Homo sapiens
gaatgaaccttcacaatgcaggacaaagcagga

SEQ ID NO: 1198 - DNA, 33 bp, Homo sapiens
gacaccagaaactggaggcaatatgggttccca

SEQ ID NO: 1199 - DNA, 33 bp, Homo sapiens
ccgataggcatctaccgctgatggggactcaga

SEQ ID NO: 1200 - DNA, 33 bp, Homo sapiens
ggataaaaatgtgctaggcaaaatatgttggcc

SEQ ID NO: 1201 - DNA, 51 bp, Homo sapiens
gccaaatcaatctgtaaattgtctatgggtgagttgaaattgtaatctgag

SEQ ID NO: 1202 - DNA, 51 bp, Homo sapiens
tatacttttacattttcattagtacgactcaattcccttgctctctggccc

SEQ ID NO: 1203 - DNA, 33 bp, Homo sapiens
agatggctctggattgcaagtaactatatataa

SEQ ID NO: 1204 - DNA, 33 bp, Homo sapiens
agttctaatgacattagctacacagaaccatgc

SEQ ID NO: 1205 - DNA, 33 bp, Homo sapiens
ttaatcttcaccattatccctatgtaacatttt

SEQ ID NO: 1206 - DNA, 33 bp, Homo sapiens
ttaagtcttccaagaatggttttagttggaaaa

SEQ ID NO: 1207 - DNA, 33 bp, Homo sapiens
gctcacaaatgaagtcgacaggaagagatgctt

SEQ ID NO: 1208 - DNA, 33 bp, Homo sapiens
caattttaccactcaacccaggagctactactg

SEQ ID NO: 1209 - DNA, 33 bp, Homo sapiens
aataccgctccaaagatatcccactatttcttt

SEQ ID NO: 1210 - DNA, 33 bp, Homo sapiens
aaattacaaatacaaaggagaccatacttatta

SEQ ID NO: 1211 - DNA, 33 bp, Homo sapiens
acacctgaagtcataatacactcaatgaaggaa

SEQ ID NO: 1212 - DNA, 33 bp, Homo sapiens
cagaacgtgtcctcccgcaacatgatggctaaa

SEQ ID NO: 1213 - DNA, 33 bp, Homo sapiens
attggcaagacaaacatcattaggtttcgaaca

SEQ ID NO: 1214 - DNA, 33 bp, Homo sapiens
gtaatggggctggttctcgtaagaattatcatt

SEQ ID NO: 1215 - DNA, 33 bp, Homo sapiens
ctggtaagtgtttggcgaaagaaggcataatga

SEQ ID NO: 1216 - DNA, 33 bp, Homo sapiens
agacacacattatcacccccaagtaatttgtgc

SEQ ID NO: 1217 - DNA, 51 bp, Homo sapiens
attaggtgttagctaaagaatcttcgcttggcataaatgtgtcccatgaat

SEQ ID NO: 1218 - DNA, 51 bp, Homo sapiens
tttggcagaactttgagatagaaccgctgaagtcaccctgactatctgtgt

SEQ ID NO: 1219 - DNA, 33 bp, Homo sapiens
tcagcctcactagtaagtgcaaatgaaggcacc

SEQ ID NO: 1220 - DNA, 51 bp, Homo sapiens
aaaatctctcatcaaacagagccggtcatattaaaacaagaaagacagaga

SEQ ID NO: 1221 - DNA, 51 bp, Homo sapiens
ataaaattttagtttgaagtactgatgaatatacaatttagtgacacattt

SEQ ID NO: 1222 - DNA, 33 bp, Homo sapiens
tttccgggctagtttatagggaagatatgtatc

SEQ ID NO: 1223 - DNA, 51 bp, Homo sapiens
aagtgggaaaatgtattaggcactctatagatcctcacgtgatataatctt

SEQ ID NO: 1224 - DNA, 33 bp, Homo sapiens
tttctggctaaaattatgttacttcctttggtc

SEQ ID NO: 1225 - DNA, 51 bp, Homo sapiens
gccttctatgtttctggccaactcatcgatacaaaaacattcaccagatca

SEQ ID NO: 1226 - DNA, 33 bp, Homo sapiens
ttgaacagtgatgaaaggatactctatctagct

SEQ ID NO: 1227 - DNA, 33 bp, Homo sapiens
ctgacttctagacacttaaaaaatctctttcat

SEQ ID NO: 1228 - DNA, 33 bp, Homo sapiens
ctggtattacaagcaccgtctgatagtgaatcc

SEQ ID NO: 1229 - DNA, 33 bp, Homo sapiens
ataagaaaagtttcacggagtggctggaatttc

SEQ ID NO: 1230 - DNA, 33 bp, Homo sapiens
tgagaacaccaaatactagtgaagatgtagagt

SEQ ID NO: 1231 - DNA, 33 bp, Homo sapiens
aatttagtacagtctaggatctggtttttaggt

SEQ ID NO: 1232 - DNA, 33 bp, Homo sapiens
ggggaggtagttaaacgagtacataatacatac

SEQ ID NO: 1233 - DNA, 33 bp, Homo sapiens
cagacccaatgttctctgactttgaccactgca

SEQ ID NO: 1234 - DNA, 33 bp, Homo sapiens
cctacctgtcaacgtggaatagagaaaagtcag

SEQ ID NO: 1235 - DNA, 33 bp, Homo sapiens
tggcttccctaggaacggcagagataggctagc

SEQ ID NO: 1236 - DNA, 33 bp, Homo sapiens
atctaagatgtccagagagtggtgatttggggg

SEQ ID NO: 1237 - DNA, 33 bp, Homo sapiens
tgtacaatttcatatatgccctgatactaagcc

SEQ ID NO: 1238 - DNA, 33 bp, Homo sapiens
ttcctgttgggaaagattcagtggaagaaataa

SEQ ID NO: 1239 - DNA, 33 bp, Homo sapiens
tcttcttttcagaaaggccttatttaatgatca

SEQ ID NO: 1240 - DNA, 33 bp, Homo sapiens
ggaaacgcttagctacgagagtgactaggaatg

SEQ ID NO: 1241 - DNA, 33 bp, Homo sapiens
ttgcattttgtgaatagataagaagcagctagg

SEQ ID NO: 1242 - DNA, 33 bp, Homo sapiens
tgcatggctttctaaattttaagatgtgattca

SEQ ID NO: 1243 - DNA, 33 bp, Homo sapiens
acattgttggcttaccggggtttacagtttctt

SEQ ID NO: 1244 - DNA, 33 bp, Homo sapiens
taccagcaatcctgactgtattatacctgatct

SEQ ID NO: 1245 - DNA, 33 bp, Homo sapiens
cacattcagtgagtcatagaagccctttacctg

SEQ ID NO: 1246 - DNA, 51 bp, Homo sapiens
cacacaggatagcaaaagttagctcgttacagatttcacatccatgagtct

SEQ ID NO: 1247 - DNA, 51 bp, Homo sapiens
ctttgcagaggtgattaaggatcatgagattgggagattaccctgggtgat

SEQ ID NO: 1248 - DNA, 51 bp, Homo sapiens
atccctgcaccccacatggtctccattgacaaagcacagtagtggaagtcc

SEQ ID NO: 1249 - DNA, 33 bp, Homo sapiens
tacagaaaagtacctaggatgaactactgaaaa

SEQ ID NO: 1250 - DNA, 51 bp, Homo sapiens
tttcaagttcatttttcataatgactagtacttttaatacctgaactggtg

SEQ ID NO: 1251 - DNA, 33 bp, Homo sapiens
tgggcctgaaatacaatgagaaaatgctcttga

SEQ ID NO: 1252 - DNA, 33 bp, Homo sapiens
acatttttagttatcagacactagagcacatga

SEQ ID NO: 1253 - DNA, 33 bp, Homo sapiens
gttaatatatcaaaaatggaactaataagctcc

SEQ ID NO: 1254 - DNA, 51 bp, Homo sapiens
acctctatcttgaggaatcttaggagctacatacagtgctagaaacaggct

SEQ ID NO: 1255 - DNA, 33 bp, Homo sapiens
ggcagcattgcagcccggatatagacaggagtg

SEQ ID NO: 1256 - DNA, 33 bp, Homo sapiens
tcttggttcctcttattacaactggtgtctggt

SEQ ID NO: 1257 - DNA, 33 bp, Homo sapiens
ctgaaaacgcattaactctttctctagaagtgg

SEQ ID NO: 1258 - DNA, 33 bp, Homo sapiens
gattttttccagtatatgaaagccatttattgt

SEQ ID NO: 1259 - DNA, 33 bp, Homo sapiens
gtttaccccaatctaatagagtttagaggagac

SEQ ID NO: 1260 - DNA, 33 bp, Homo sapiens
ttctttgtcctttgatgacttctatagaatgcc

SEQ ID NO: 1261 - DNA, 51 bp, Homo sapiens
gagtccaaatcatgctttgtgaccattctttttccgtaaactgtctcattc

SEQ ID NO: 1262 - DNA, 33 bp, Homo sapiens
ctttctcagcattgaatatttcttctctttgtt

SEQ ID NO: 1263 - DNA, 33 bp, Homo sapiens
tcatgtgtaaacctcatagtgtaaagtaatggc

SEQ ID NO: 1264 - DNA, 33 bp, Homo sapiens
ctttaaattgcataaagccaatattgtatatta

SEQ ID NO: 1265 - DNA, 33 bp, Homo sapiens
agaaatgggtgagtaccaggctataaagaaaaa

SEQ ID NO: 1266 - DNA, 33 bp, Homo sapiens
atgtttaaagtagaaagaacaatggtcaaacaa

SEQ ID NO: 1267 - DNA, 33 bp, Homo sapiens
cataagttcacacaagcatctccatgtgatgat

SEQ ID NO: 1268 - DNA, 33 bp, Homo sapiens
atgttcacaagtaaagtcatctaggcctcacag

SEQ ID NO: 1269 - DNA, 33 bp, Homo sapiens
gaaatacaaagggtcattctcactgtaatatgt

SEQ ID NO: 1270 - DNA, 33 bp, Homo sapiens
aaataggcaaaagaaagtaggaacagtccccaa

SEQ ID NO: 1271 - DNA, 51 bp, Homo sapiens
tccattgataacacttattccaaaatctattacaattaggtgggccagtat

SEQ ID NO: 1272 - DNA, 33 bp, Homo sapiens
gatgtttttcttctaaggtacaaagcaataaac

SEQ ID NO: 1273 - DNA, 33 bp, Homo sapiens
agtatacactggagactgaaaccatgatgaagt

SEQ ID NO: 1274 - DNA, 33 bp, Homo sapiens
tgccacttactcattcgcctttgttgcccccct

SEQ ID NO: 1275 - DNA, 33 bp, Homo sapiens
atttaatattctgcaactctgtgcttaagatat

SEQ ID NO: 1276 - DNA, 33 bp, Homo sapiens
caatattctgtctaaagtctgtaatctgaataa

SEQ ID NO: 1277 - DNA, 33 bp, Homo sapiens
accactgcttagcatagtaattggcatttgtta

SEQ ID NO: 1278 - DNA, 33 bp, Homo sapiens
gtaggatttgttaagcgaaatgatagctttcag

SEQ ID NO: 1279 - DNA, 33 bp, Homo sapiens
acaaagtcctctctagtaagcctgtcctctgag

SEQ ID NO: 1280 - DNA, 33 bp, Homo sapiens
tatcagccctaccgtattacagataacttcatt

SEQ ID NO: 1281 - DNA, 33 bp, Homo sapiens
aacataggacactgtcgagaatcggttgtttat

SEQ ID NO: 1282 - DNA, 33 bp, Homo sapiens
cagttagccacaaaaattgcttaattctacatt

SEQ ID NO: 1283 - DNA, 33 bp, Homo sapiens
cactttcaggtacagcgatcaaaagcagatttg

SEQ ID NO: 1284 - DNA, 33 bp, Homo sapiens
ttacttagagcaacactgggtattttctcttta

SEQ ID NO: 1285 - DNA, 33 bp, Homo sapiens
gagaactaaactagaagaatatgaagcagacta

SEQ ID NO: 1286 - DNA, 33 bp, Homo sapiens
tgtcaaaaattgatccccactagtggaaataag

SEQ ID NO: 1287 - DNA, 51 bp, Homo sapiens
gtattggtgttattaaaaatggctagagaaagtggatggtagaatagatga

SEQ ID NO: 1288 - DNA, 51 bp, Homo sapiens
agaccatgatgtaaaatgatatgaatgaaggagaaagaacaaattttgata

SEQ ID NO: 1289 - DNA, 33 bp, Homo sapiens
tctgttaaaagtaagagagttaacgcttatggc

SEQ ID NO: 1290 - DNA, 33 bp, Homo sapiens
acacttgttacaactagcgaacctacattgatg

SEQ ID NO: 1291 - DNA, 33 bp, Homo sapiens
tactactttgaagaaattttagaggttgtgtct

SEQ ID NO: 1292 - DNA, 33 bp, Homo sapiens
tgtaggtgataattaagaaggtacttggtgaaa

SEQ ID NO: 1293 - DNA, 33 bp, Homo sapiens
tattccacgtcatgcaggttattcataatcatc

SEQ ID NO: 1294 - DNA, 33 bp, Homo sapiens
ccaaaatatttgagccgaaggaagaagaagcaa

SEQ ID NO: 1295 - DNA, 33 bp, Homo sapiens
tttaacagcatcttgataggattaattcccata

SEQ ID NO: 1296 - DNA, 33 bp, Homo sapiens
gaccatcaacttacaagagcctgtgagtggtga

SEQ ID NO: 1297 - DNA, 51 bp, Homo sapiens
acatagaatcaacctaggtgcttatcaatggtagattaatttaaaaaatgg

SEQ ID NO: 1298 - DNA, 51 bp, Homo sapiens
ttccctttctacattctaggaaccagtaatcagcacactcggcacaattat

SEQ ID NO: 1299 - DNA, 51 bp, Homo sapiens
ccatgaaatgagttctattttgatatagtttgttagaacctggggaaaatt

SEQ ID NO: 1300 - DNA, 51 bp, Homo sapiens
tctgcctttttacgtatgttgtaggcaacctgcaatattcagataatatga

SEQ ID NO: 1301 - DNA, 33 bp, Homo sapiens
taagtcatttctttgatgctgctttgagcatag

SEQ ID NO: 1302 - DNA, 51 bp, Homo sapiens
gatattctcagataaataatctcaatagaagtagatcataacattacctga

SEQ ID NO: 1303 - DNA, 33 bp, Homo sapiens
aaattaacccagtctgtattccaggccctaact

SEQ ID NO: 1304 - DNA, 33 bp, Homo sapiens
taatgcttatataccagcagtagaatatttagc

SEQ ID NO: 1305 - DNA, 33 bp, Homo sapiens
tcttgagacaatctagtcaactttggaattctc

SEQ ID NO: 1306 - DNA, 33 bp, Homo sapiens
aatgtccagaataggcgcatttatagagacagc

SEQ ID NO: 1307 - DNA, 33 bp, Homo sapiens
aatcacagctaaccagtagtagaatctcacatc

SEQ ID NO: 1308 - DNA, 33 bp, Homo sapiens
aaactatctttccaaattcaggccaaaccaaag

SEQ ID NO: 1309 - DNA, 33 bp, Homo sapiens
tcaagcgttccttaactattaagacacctgaac

SEQ ID NO: 1310 - DNA, 33 bp, Homo sapiens
aatgttcaaaacttaattcatgccatccctctt

SEQ ID NO: 1311 - DNA, 33 bp, Homo sapiens
ggtcagttcaataacatgagacaaagattttgg

SEQ ID NO: 1312 - DNA, 33 bp, Homo sapiens
gagtggagcaagcaaatagttgtgtaatgggaa

SEQ ID NO: 1313 - DNA, 33 bp, Homo sapiens
tccagtgagaggcaaaggatattggaaatggaa

SEQ ID NO: 1314 - DNA, 33 bp, Homo sapiens
cacctctaaactttcatccagttcaatatctaa

SEQ ID NO: 1315 - DNA, 33 bp, Homo sapiens
aatctgtgaaaccacctatgcgtactcagggac

SEQ ID NO: 1316 - DNA, 33 bp, Homo sapiens
attcgttgaatgaatatgaatgttttggtgact

SEQ ID NO: 1317 - DNA, 33 bp, Homo sapiens
atattctgtggtatcatggctaaattcaagata

SEQ ID NO: 1318 - DNA, 33 bp, Homo sapiens
tgaagacattgagggttaaggggttaagcgact

SEQ ID NO: 1319 - DNA, 33 bp, Homo sapiens
gttctgacgggggtgaggcctgttgtgtttgag

SEQ ID NO: 1320 - DNA, 51 bp, Homo sapiens
aaatctcattcttgatttaattttctacttgtgcaaatcatattttccaac

SEQ ID NO: 1321 - DNA, 33 bp, Homo sapiens
aaagcctgggaaagtggaatgtccctgaggaaa

SEQ ID NO: 1322 - DNA, 33 bp, Homo sapiens
acatggaaaatgcaactgaacacattagaaggt

SEQ ID NO: 1323 - DNA, 33 bp, Homo sapiens
taagtcagaatcagacgcattttattccgctta

SEQ ID NO: 1324 - DNA, 33 bp, Homo sapiens
gattcgccaggaacaatgtaataaagaatcacc

SEQ ID NO: 1325 - DNA, 51 bp, Homo sapiens
agaatagaactcgatttattgataatggaatcaaggaatttttaactttct

SEQ ID NO: 1326 - DNA, 33 bp, Homo sapiens
ctgtctttctccacctcacattagcatcacttg

SEQ ID NO: 1327 - DNA, 33 bp, Homo sapiens
agagtaactgtttccatgcaaatgccctttcca

SEQ ID NO: 1328 - DNA, 33 bp, Homo sapiens
gtacaagaaaaactgatgataaaaatgcacagg

SEQ ID NO: 1329 - DNA, 51 bp, Homo sapiens
tcaaaacagaagttctcctttagcatctgaattgttttaccagaagtttta

SEQ ID NO: 1330 - DNA, 33 bp, Homo sapiens
tcttgcaaattttccattaataattactttcta

SEQ ID NO: 1331 - DNA, 33 bp, Homo sapiens
atggctacagagtcaaccaactttttactggga

SEQ ID NO: 1332 - DNA, 33 bp, Homo sapiens
aaacgactactagatccaaccaaaagtgtctta

SEQ ID NO: 1333 - DNA, 33 bp, Homo sapiens
attattaagcattttgtaagtgtgaacaaactg

SEQ ID NO: 1334 - DNA, 33 bp, Homo sapiens
agatagtcactgagaagttattatgtagtgtga

SEQ ID NO: 1335 - DNA, 33 bp, Homo sapiens
cagctctagaacaccagtaaatcacagcttctc

SEQ ID NO: 1336 - DNA, 33 bp, Homo sapiens
acattgctattatgaagaacgttttgtaaaaat

SEQ ID NO: 1337 - DNA, 51 bp, Homo sapiens
ctggtagtttttgtgagtatttctatattcagatcaaaagatttgcgtaca

SEQ ID NO: 1338 - DNA, 33 bp, Homo sapiens
tgcatgtgatgataaatacatcgtctaaactta

SEQ ID NO: 1339 - DNA, 33 bp, Homo sapiens
cccaaaaggtctttgtgaaatatgcatagtatc

SEQ ID NO: 1340 - DNA, 33 bp, Homo sapiens
tactacaagtccaaactaaaacaggatagtact

SEQ ID NO: 1341 - DNA, 33 bp, Homo sapiens
ttgaatagctgttatgtagcctaacttccagaa

SEQ ID NO: 1342 - DNA, 33 bp, Homo sapiens
tagaatcttatttgcctactgtttaaaaccgaa

SEQ ID NO: 1343 - DNA, 33 bp, Homo sapiens
tcattgttggaagccagtcattggtatatatgt

SEQ ID NO: 1344 - DNA, 33 bp, Homo sapiens
aacttgatagcagccagtcggcctgggctcagg

SEQ ID NO: 1345 - DNA, 33 bp, Homo sapiens
gtatggcaaaccttcacgagtgagacacagcga

SEQ ID NO: 1346 - DNA, 33 bp, Homo sapiens
attctgccatcaagtcgcttaaagtcaagcctg

SEQ ID NO: 1347 - DNA, 33 bp, Homo sapiens
agatatatatggcaaggaagtaaaaattatctg

SEQ ID NO: 1348 - DNA, 51 bp, Homo sapiens
cttggaatgtctgcagtactgcacagaagacatccttacattttttaatag

SEQ ID NO: 1349 - DNA, 33 bp, Homo sapiens
gatgtagtttggttgatgaagtaaaacatggtt

SEQ ID NO: 1350 - DNA, 51 bp, Homo sapiens
ctacactggatctccaagtttaaacgattatctggttccgattcattcagt

SEQ ID NO: 1351 - DNA, 33 bp, Homo sapiens
gcttgaaaaaaacatagcattctggatataaag

SEQ ID NO: 1352 - DNA, 33 bp, Homo sapiens
gtccatttgctttatcgacatcacggcttcaga

SEQ ID NO: 1353 - DNA, 33 bp, Homo sapiens
tcagttagctttcctgtatagccaggcaccaca

SEQ ID NO: 1354 - DNA, 33 bp, Homo sapiens
ataaaatgttctccaagttactctagaagctga

SEQ ID NO: 1355 - DNA, 33 bp, Homo sapiens
ctttgtctatcctagctaaaatagtcttctgcc

SEQ ID NO: 1356 - DNA, 33 bp, Homo sapiens
atcttccaagctgggctctacatccctatacta

SEQ ID NO: 1357 - DNA, 33 bp, Homo sapiens
tttcttatactgagatgaaactgaagctcaaaa

SEQ ID NO: 1358 - DNA, 33 bp, Homo sapiens
ctattgaaagtgactatgtctattggtaggtct

SEQ ID NO: 1359 - DNA, 51 bp, Homo sapiens
tgttttgatcaaagtcacagattacgcttcaatatagctgccagtaaactg

SEQ ID NO: 1360 - DNA, 33 bp, Homo sapiens
tactatagacacatgataaaacagcaaactgca

SEQ ID NO: 1361 - DNA, 51 bp, Homo sapiens
atgctaaacagaagactggtatctatgagtttgtaaggtgtcagattttcc

SEQ ID NO: 1362 - DNA, 33 bp, Homo sapiens
cctgtataacaagcctgaacatttatccctgaa

SEQ ID NO: 1363 - DNA, 33 bp, Homo sapiens
tagaaggttgtatcaagtctgctttctctgtac

SEQ ID NO: 1364 - DNA, 51 bp, Homo sapiens
gaattgtgggttttccttccactgcgcatgaaacataagcaatcatttatt

SEQ ID NO: 1365 - DNA, 33 bp, Homo sapiens
tattcttgaaacaacattcagatctccaacttc

SEQ ID NO: 1366 - DNA, 33 bp, Homo sapiens
aataggcaagggaaaatggtatgctggaatttc

SEQ ID NO: 1367 - DNA, 33 bp, Homo sapiens
aaaggcatttcattccgcctaactcctgatgac

SEQ ID NO: 1368 - DNA, 33 bp, Homo sapiens
ctttatgaaaataaacgcaaacattctgaggat

SEQ ID NO: 1369 - DNA, 33 bp, Homo sapiens
acctcttttactgtgagactctacatctgattc

SEQ ID NO: 1370 - DNA, 51 bp, Homo sapiens
cagatattgtctatttgaaaatttccctattttgtcatcatgtttgaatga

SEQ ID NO: 1371 - DNA, 33 bp, Homo sapiens
ttcctggtaagagaccggagacccaatttcagg

SEQ ID NO: 1372 - DNA, 33 bp, Homo sapiens
gcctcacaaggacaaatgtaaactcttgaacac

SEQ ID NO: 1373 - DNA, 33 bp, Homo sapiens
tgtaatctggtcttgacgctccaggaatctgtc

SEQ ID NO: 1374 - DNA, 33 bp, Homo sapiens
ctcaatcgtaaaagtctgacacggctggtcaca

SEQ ID NO: 1375 - DNA, 33 bp, Homo sapiens
taggaaccaggccacatgacaggagtgagtgca

SEQ ID NO: 1376 - DNA, 33 bp, Homo sapiens
ggctcctccgaactgatatttggagatgttttt

SEQ ID NO: 1377 - DNA, 33 bp, Homo sapiens
gagattccagttgaactgtcaggctctgagaag

SEQ ID NO: 1378 - DNA, 33 bp, Homo sapiens
ctttgaatctttcttagacacaggactttgagg

SEQ ID NO: 1379 - DNA, 33 bp, Homo sapiens
gactatacaggtataagaagctagctctgttta

SEQ ID NO: 1380 - DNA, 51 bp, Homo sapiens
tttattcactcagggactaattaccgactttttatatgaagcagcattacg

SEQ ID NO: 1381 - DNA, 33 bp, Homo sapiens
tgggctgctcaggccataggatttccaagtttt

SEQ ID NO: 1382 - DNA, 33 bp, Homo sapiens
tcaaggtgattaggcatgatttctggccctgag

SEQ ID NO: 1383 - DNA, 51 bp, Homo sapiens
atggaaagagaatacggacaaggaggccctttaggaagttgatgagaagcg

SEQ ID NO: 1384 - DNA, 33 bp, Homo sapiens
aaagtaggtgactttcgatcccacaagtacatg

SEQ ID NO: 1385 - DNA, 33 bp, Homo sapiens
gaagaagtgtctcctctagtcacattcagccag

SEQ ID NO: 1386 - DNA, 51 bp, Homo sapiens
ggagaaagaatgctaagctaattgatgacaataagaggttcacttggttga

SEQ ID NO: 1387 - DNA, 51 bp, Homo sapiens
accaatgatatattttagaaactaagtccggctacagtagatttaggttgt

SEQ ID NO: 1388 - DNA, 33 bp, Homo sapiens
tattctggatagctgggcatagctcccctctga

SEQ ID NO: 1389 - DNA, 33 bp, Homo sapiens
gacgctggtgtcagaacgtgtgcaaggcttccg

SEQ ID NO: 1390 - DNA, 33 bp, Homo sapiens
gtgattaagcaacatctgagagcaaagagaggg

SEQ ID NO: 1391 - DNA, 33 bp, Homo sapiens
gaaaatctgctcaggatgtctcttagccaggct

SEQ ID NO: 1392 - DNA, 33 bp, Homo sapiens
tcttcctacccatttgtaatcaatctcaccctc

SEQ ID NO: 1393 - DNA, 33 bp, Homo sapiens
ggcctaaatagaacgagaaaggctgactctccc

SEQ ID NO: 1394 - DNA, 33 bp, Homo sapiens
actttccactcgaggcgcaggaatatcattgtc

SEQ ID NO: 1395 - DNA, 33 bp, Homo sapiens
catagagatgggaagtcaaatggcggttgccgg

SEQ ID NO: 1396 - DNA, 33 bp, Homo sapiens
agctctgtctgggatctgagaaggaattagaaa

SEQ ID NO: 1397 - DNA, 33 bp, Homo sapiens
ggaactggccagtcaggtaagaaatacagtcta

SEQ ID NO: 1398 - DNA, 33 bp, Homo sapiens
gcaagaaacctctgactctgaaagattaaaact

SEQ ID NO: 1399 - DNA, 33 bp, Homo sapiens
ataagctacgtttagattcattatgcatagatc

SEQ ID NO: 1400 - DNA, 33 bp, Homo sapiens
aagtctaagcaaagggtcacaacactcttggca

SEQ ID NO: 1401 - DNA, 33 bp, Homo sapiens
actgtaaaacgtgccatatgatagtttgaaaac

SEQ ID NO: 1402 - DNA, 33 bp, Homo sapiens
cattcagtccatagcattgcatttgtcaattat

SEQ ID NO: 1403 - DNA, 33 bp, Homo sapiens
tcattcaggcttctaatggcaaatgagatcaga

SEQ ID NO: 1404 - DNA, 33 bp, Homo sapiens
gatcattggaatgaagtaaaaagtgcttaatac

SEQ ID NO: 1405 - DNA, 33 bp, Homo sapiens
gcttctgaagccatcctaatccactggccagtt

SEQ ID NO: 1406 - DNA, 33 bp, Homo sapiens
gaaataagtatagatatagcaagtgccattata

SEQ ID NO: 1407 - DNA, 33 bp, Homo sapiens
ccattttcgtagtgaattgggaagcaaggtcac

SEQ ID NO: 1408 - DNA, 33 bp, Homo sapiens
catcagggctgggctagatctgacacttggtga

SEQ ID NO: 1409 - DNA, 33 bp, Homo sapiens
cggagtgactgggaaatgatggtatcgctgaca

SEQ ID NO: 1410 - DNA, 33 bp, Homo sapiens
gcttttctcatctgcatagtctgtcctcctgtc

SEQ ID NO: 1411 - DNA, 33 bp, Homo sapiens
ggggcattcatgcctggacttaaacaatactat

SEQ ID NO: 1412 - DNA, 33 bp, Homo sapiens
cctggatcctgataaggagttctgggtggagga

SEQ ID NO: 1413 - DNA, 33 bp, Homo sapiens
gaggattgccaacaaagtttcagtataacttct

SEQ ID NO: 1414 - DNA, 33 bp, Homo sapiens
cgaagagccatcaccctgagggaacctgttttg

SEQ ID NO: 1415 - DNA, 33 bp, Homo sapiens
gaatttctctttcttctcatatctcctgttata

SEQ ID NO: 1416 - DNA, 33 bp, Homo sapiens
gggcctgatagatacataaattttgctccagcc

SEQ ID NO: 1417 - DNA, 51 bp, Homo sapiens
caggccatccactacctctttatcctgacctgaggaacgtgcacttagcgc

SEQ ID NO: 1418 - DNA, 33 bp, Homo sapiens
gaatgatcactaaaaatcttagcaagaggaagg

SEQ ID NO: 1419 - DNA, 33 bp, Homo sapiens
gcagacccagcttagatgattgctgcagcttgg

SEQ ID NO: 1420 - DNA, 51 bp, Homo sapiens
gggcagggacagggagagtctatactagatgtgcatgcacatttcatatag

SEQ ID NO: 1421 - DNA, 33 bp, Homo sapiens
cacagttatttccaaagtgtcaagaagatggta

SEQ ID NO: 1422 - DNA, 33 bp, Homo sapiens
ctcatggtcatctcaagccagttcaatggaatc

SEQ ID NO: 1423 - DNA, 33 bp, Homo sapiens
agcactcttggagctcgatctctagggtatgtg

SEQ ID NO: 1424 - DNA, 33 bp, Homo sapiens
tgattatggctggtgcggagtagaccacaggag

SEQ ID NO: 1425 - DNA, 33 bp, Homo sapiens
ctcctagctatgatgaggtgcagtaaaagtcca

SEQ ID NO: 1426 - DNA, 33 bp, Homo sapiens
acatatgtggatggaatatttcagaacaacttg

SEQ ID NO: 1427 - DNA, 33 bp, Homo sapiens
accatcctgaagtaccgattctccttatcagaa

SEQ ID NO: 1428 - DNA, 33 bp, Homo sapiens
cctcaaccttactccagagatttctcccttgac

SEQ ID NO: 1429 - DNA, 33 bp, Homo sapiens
aaaatgccagagcatcgaaagacaaagtggctc

SEQ ID NO: 1430 - DNA, 33 bp, Homo sapiens
aacatggctgtgtatatgaaatggtttggattt

SEQ ID NO: 1431 - DNA, 33 bp, Homo sapiens
agtgcatgctttatcatggccttatcatctggc

SEQ ID NO: 1432 - DNA, 51 bp, Homo sapiens
gggctggtagctgaagcagaaatcagttatgcctgtgttgtttgtctccca

SEQ ID NO: 1433 - DNA, 33 bp, Homo sapiens
caggaatggaatttcatctacgtacagtggaag

SEQ ID NO: 1434 - DNA, 33 bp, Homo sapiens
aggtactgaaccaaactgttctttacaaatgtt

SEQ ID NO: 1435 - DNA, 51 bp, Homo sapiens
ccttcttgctggacttttccacctatgtttcacccacgtctcaaactcggt

SEQ ID NO: 1436 - DNA, 33 bp, Homo sapiens
accttcagattcaacagacataagaacatcata

SEQ ID NO: 1437 - DNA, 33 bp, Homo sapiens
gccacacaactggtaataaagtggcgggattta

SEQ ID NO: 1438 - DNA, 33 bp, Homo sapiens
tcatccagatgattaggattctcaaaaggaagt

SEQ ID NO: 1439 - DNA, 33 bp, Homo sapiens
tttgggccacaatctgtatttggtgggagtggt

SEQ ID NO: 1440 - DNA, 33 bp, Homo sapiens
tctatatcatgctaaattcctgcactgaggttc

SEQ ID NO: 1441 - DNA, 33 bp, Homo sapiens
gaggtaggtgttatcatgaccattttacagatg

SEQ ID NO: 1442 - DNA, 33 bp, Homo sapiens
tcctcagatgtccatctctatccctgttgctct

SEQ ID NO: 1443 - DNA, 33 bp, Homo sapiens
tctgtgtaaacatcagtatcgtataaggaagaa

SEQ ID NO: 1444 - DNA, 33 bp, Homo sapiens
gtgagatgacccggaagcatcttagagttagac

SEQ ID NO: 1445 - DNA, 51 bp, Homo sapiens
tttgctgccacctgacttgaagctctgaccaccccagtgctacttctgctc

SEQ ID NO: 1446 - DNA, 33 bp, Homo sapiens
gtatctgttcaggcccggaatcgtcacggctca

SEQ ID NO: 1447 - DNA, 33 bp, Homo sapiens
ctgaatttactgagtatagctgggaagccttga

SEQ ID NO: 1448 - DNA, 33 bp, Homo sapiens
gaactcacgaagaacattgtggctgataacaga

SEQ ID NO: 1449 - DNA, 33 bp, Homo sapiens
tgccctctgccgtccagaactgatattgcactg

SEQ ID NO: 1450 - DNA, 33 bp, Homo sapiens
ttgaatcctttcatgaggtaggcattattattc

SEQ ID NO: 1451 - DNA, 33 bp, Homo sapiens
aagccatggattggaagtaaatcaagagcaaaa

SEQ ID NO: 1452 - DNA, 33 bp, Homo sapiens
tctgccaacttaaagcgagattgtctggtctag

SEQ ID NO: 1453 - DNA, 33 bp, Homo sapiens
tgcctcagagattgcctacctgtggattaagaa

SEQ ID NO: 1454 - DNA, 33 bp, Homo sapiens
tatatacaacagaaaacctcaagcagttttata

SEQ ID NO: 1455 - DNA, 33 bp, Homo sapiens
cttgagataattggaagacatggtatttctatt

SEQ ID NO: 1456 - DNA, 33 bp, Homo sapiens
gtaacaacatagtcaagttcagttgttaccaaa

SEQ ID NO: 1457 - DNA, 33 bp, Homo sapiens
tggggaaacaggttgagtaacacagtagggagt

SEQ ID NO: 1458 - DNA, 33 bp, Homo sapiens
aataatgcttagcacatagaaggagctccataa

SEQ ID NO: 1459 - DNA, 33 bp, Homo sapiens
gcgtcatgtgtatctatgtccaaattatattta

SEQ ID NO: 1460 - DNA, 33 bp, Homo sapiens
tgccttgaggaagatatgattggaaaatcaaga

SEQ ID NO: 1461 - DNA, 33 bp, Homo sapiens
acacatatatctctggtcaccttcagagcaacc

SEQ ID NO: 1462 - DNA, 33 bp, Homo sapiens
aaacagagatggaagatgagacaaaaatgccat

SEQ ID NO: 1463 - DNA, 51 bp, Homo sapiens
caactagctaaatacataaagcaaagtcattaggaatttgataagcctaat

SEQ ID NO: 1464 - DNA, 33 bp, Homo sapiens
gtagaatagattagaataagaatatgctggagg

SEQ ID NO: 1465 - DNA, 33 bp, Homo sapiens
aagattgacgctatcaggcaagatcaagagtgt

SEQ ID NO: 1466 - DNA, 51 bp, Homo sapiens
ctaacctattcactcctaccataaatgattcaagaaaactggtgtgagttt

SEQ ID NO: 1467 - DNA, 33 bp, Homo sapiens
gcacctctgaccttacgaagctatccatgaatc

SEQ ID NO: 1468 - DNA, 33 bp, Homo sapiens
aggtcttcgtcagttatacagtagttactgggt

SEQ ID NO: 1469 - DNA, 33 bp, Homo sapiens
gaagacttctaaaaacgattcaagtactgacag

SEQ ID NO: 1470 - DNA, 33 bp, Homo sapiens
gattaggaggtagacagtcaggctcctatgtgt

SEQ ID NO: 1471 - DNA, 33 bp, Homo sapiens
ttgtgagcattccaggcacctctgaaaacaagc

SEQ ID NO: 1472 - DNA, 33 bp, Homo sapiens
gagatttaacacacattaaagagaaagccaggt

SEQ ID NO: 1473 - DNA, 33 bp, Homo sapiens
agatcccaatgttatatggactctttctcttcc

SEQ ID NO: 1474 - DNA, 33 bp, Homo sapiens
aactcctccaaaagaatggatgtctagatgaag

SEQ ID NO: 1475 - DNA, 33 bp, Homo sapiens
ctaaatggaattcctggacaaagtagggcaggt

SEQ ID NO: 1476 - DNA, 33 bp, Homo sapiens
ctgcactgtgaagagcgagtggtttgggaagca

SEQ ID NO: 1477 - DNA, 33 bp, Homo sapiens
aaaaaatctcttcccattcattaagtaactgca

SEQ ID NO: 1478 - DNA, 33 bp, Homo sapiens
catacctaatgactaatacagtgactggtgcaa

SEQ ID NO: 1479 - DNA, 33 bp, Homo sapiens
gtgggtctctgagtcatggcttaagtattttgg

SEQ ID NO: 1480 - DNA, 33 bp, Homo sapiens
ctgcggaggcaagcgcggaagaagtcattagtc

SEQ ID NO: 1481 - DNA, 33 bp, Homo sapiens
ctggattttcatcagagtctaactgacctcaag

SEQ ID NO: 1482 - DNA, 33 bp, Homo sapiens
taatctcacagaaatatgaaagacccgcagaga

SEQ ID NO: 1483 - DNA, 33 bp, Homo sapiens
gatgaagtctcggagagggtagtgattctctgc

SEQ ID NO: 1484 - DNA, 33 bp, Homo sapiens
agtgagtggcaagctctaatttaaactctagca

SEQ ID NO: 1485 - DNA, 33 bp, Homo sapiens
gaggaaccagaaggggtaatacagtcagatacc

SEQ ID NO: 1486 - DNA, 33 bp, Homo sapiens
cttatggttccatatatcttgctgtattttcat

SEQ ID NO: 1487 - DNA, 51 bp, Homo sapiens
aggtgggctttataggcaaaaaaagtctgaagaaaggaaaaacacggaacc

SEQ ID NO: 1488 - DNA, 51 bp, Homo sapiens
cccaagtgagcgattcacactaaacgctatgttgacatattctatgggatg

SEQ ID NO: 1489 - DNA, 33 bp, Homo sapiens
ctctgggagctcctaatctaatgggggtgactc

SEQ ID NO: 1490 - DNA, 33 bp, Homo sapiens
gtgatgtggtatgagattcaggctgtacggcct

SEQ ID NO: 1491 - DNA, 33 bp, Homo sapiens
acactgcccttaggacgaggcaagacaggtgcc

SEQ ID NO: 1492 - DNA, 51 bp, Homo sapiens
ttaaaagaaatgcctggtcaaatactgtagggaattactgaggaagaactt

SEQ ID NO: 1493 - DNA, 33 bp, Homo sapiens
aaatgaacagctgcaatcttatatgtgagatgg

SEQ ID NO: 1494 - DNA, 51 bp, Homo sapiens
aggaggcaggacacagaatttccaatgctcaggatccagctcatccaaatc

SEQ ID NO: 1495 - DNA, 33 bp, Homo sapiens
aagagagctacaaatacagaggtgagatccacc

SEQ ID NO: 1496 - DNA, 33 bp, Homo sapiens
gcagtgagcaaaaagatatgcaattcctaccgt

SEQ ID NO: 1497 - DNA, 33 bp, Homo sapiens
acctggcagcctttaattgaaaacattgcttga

SEQ ID NO: 1498 - DNA, 33 bp, Homo sapiens
gtgtcttcttgtcttatgggcttttgtcttgac

SEQ ID NO: 1499 - DNA, 33 bp, Homo sapiens
ccctttgtcttcagcatagattccttccacatt

SEQ ID NO: 1500 - DNA, 51 bp, Homo sapiens
tgacataagtcagtagataaatatccctgcctatgtgtttcattgaaatgc

SEQ ID NO: 1501 - DNA, 33 bp, Homo sapiens
gtactgaggctatgtcgaagcacagagacagct

SEQ ID NO: 1502 - DNA, 33 bp, Homo sapiens
ccgctctacgacctaagtcagctttgtggccag

SEQ ID NO: 1503 - DNA, 33 bp, Homo sapiens
gtggtagagagtgatacgtgcctcgttgcatgg

SEQ ID NO: 1504 - DNA, 33 bp, Homo sapiens
gagaccagtccctgcctgcaaagaaattgagtc

SEQ ID NO: 1505 - DNA, 33 bp, Homo sapiens
aggggccactgggagatcagcagaagacgccct

SEQ ID NO: 1506 - DNA, 33 bp, Homo sapiens
tgaaattcaaatttaatctggtgtactgctttt

SEQ ID NO: 1507 - DNA, 33 bp, Homo sapiens
attatgttgagctctagaacaaaacactcagaa

SEQ ID NO: 1508 - DNA, 33 bp, Homo sapiens
cagtagtgtttccttatctgcagtttttgcttt

SEQ ID NO: 1509 - DNA, 33 bp, Homo sapiens
gcaccaacattggacattgaaggtctttttaat

SEQ ID NO: 1510 - DNA, 33 bp, Homo sapiens
caactaacttgagaaacctgctgatatgaaata

SEQ ID NO: 1511 - DNA, 33 bp, Homo sapiens
gtatatgtttccttcagcggttatttgagatgc

SEQ ID NO: 1512 - DNA, 33 bp, Homo sapiens
ctggaagttttattcatgtgctcttagctacta

SEQ ID NO: 1513 - DNA, 33 bp, Homo sapiens
aggcacttcattgtccgcctgatttgccctctc

SEQ ID NO: 1514 - DNA, 33 bp, Homo sapiens
ttttatataagggttgtaactcttgcccatcca

SEQ ID NO: 1515 - DNA, 33 bp, Homo sapiens
tctctgagacaaaagcgaaatcttaatgttcag

SEQ ID NO: 1516 - DNA, 33 bp, Homo sapiens
tgccctggagtaattatgaagcataggcattct

SEQ ID NO: 1517 - DNA, 33 bp, Homo sapiens
acatgcacacttgggatcactgtgtctagtctc

SEQ ID NO: 1518 - DNA, 33 bp, Homo sapiens
gagacagctctgggtatggatttgagccctgcc

SEQ ID NO: 1519 - DNA, 33 bp, Homo sapiens
ttggctccttcttctatgagtggtgaggaaatc

SEQ ID NO: 1520 - DNA, 33 bp, Homo sapiens
tttacaaagggagatatgtacagcagtaactat

SEQ ID NO: 1521 - DNA, 33 bp, Homo sapiens
cagctgtgtttagctatggctttggcttgaagc

SEQ ID NO: 1522 - DNA, 33 bp, Homo sapiens
tgcacagggggatctagcctctatttctactgc

SEQ ID NO: 1523 - DNA, 51 bp, Homo sapiens
tactacttgcatcagaatcacctatgacgctttttaaaaagcaggttctca

SEQ ID NO: 1524 - DNA, 33 bp, Homo sapiens
ttttgtactatatacagctagtttgaacttaaa

SEQ ID NO: 1525 - DNA, 51 bp, Homo sapiens
ttcctcttacctcatttttggacaatggtcatctcagaactgaacttgaag

SEQ ID NO: 1526 - DNA, 33 bp, Homo sapiens
cacacagcaatttaactggtctgaagcatgagg

SEQ ID NO: 1527 - DNA, 33 bp, Homo sapiens
aacacctctgtcctcatgcagtttatattcatt

SEQ ID NO: 1528 - DNA, 33 bp, Homo sapiens
tttttctctaagcaaactgtgggctaaggtaaa

SEQ ID NO: 1529 - DNA, 33 bp, Homo sapiens
accttttcatccccccgatggataaacttatta

SEQ ID NO: 1530 - DNA, 33 bp, Homo sapiens
aatcagtcaataattatccatagctccattaac

SEQ ID NO: 1531 - DNA, 33 bp, Homo sapiens
tgcatttctttctcaatacatttgtgtgcctgt

SEQ ID NO: 1532 - DNA, 33 bp, Homo sapiens
tattttataagcatccgatgttttggctgcagg

SEQ ID NO: 1533 - DNA, 33 bp, Homo sapiens
agtgaaccttttagccgaagatgaggaagaaat

SEQ ID NO: 1534 - DNA, 33 bp, Homo sapiens
aggtatacggcctgactgaactggttagccata

SEQ ID NO: 1535 - DNA, 33 bp, Homo sapiens
cccacacgacctggaattgagagcagaaagcta

SEQ ID NO: 1536 - DNA, 33 bp, Homo sapiens
caatgatggataagattacagccgtgctaagaa

SEQ ID NO: 1537 - DNA, 51 bp, Homo sapiens
taggtgaggtcactgagcagaccccgcatactcacagttcatgcaacccaa

SEQ ID NO: 1538 - DNA, 33 bp, Homo sapiens
catttttttcattgaaggtgtgccttcttttga

SEQ ID NO: 1539 - DNA, 51 bp, Homo sapiens
ttcagtgaactgggtgtaaacaatatagattttcaaattaacaaggaaaaa

SEQ ID NO: 1540 - DNA, 33 bp, Homo sapiens
ctatacaattcccccagattatgctaaggagca

SEQ ID NO: 1541 - DNA, 33 bp, Homo sapiens
tggaaatataaaatgctcttgattctgctgtgt

SEQ ID NO: 1542 - DNA, 33 bp, Homo sapiens
gttatttgtgtactgccctggcaagcaaatgcg

SEQ ID NO: 1543 - DNA, 33 bp, Homo sapiens
attgcttcaacatagcgaagactgagtctgtgt

SEQ ID NO: 1544 - DNA, 33 bp, Homo sapiens
ttaatcagaccattaccaaattgaataaatggc

SEQ ID NO: 1545 - DNA, 33 bp, Homo sapiens
taaggctccaatctgcgatgttctagacataca

SEQ ID NO: 1546 - DNA, 33 bp, Homo sapiens
acaatttgagcaggtatatttgagactatatag

SEQ ID NO: 1547 - DNA, 33 bp, Homo sapiens
tggaaggggaaaatcagggtcagaaatgaaaag

SEQ ID NO: 1548 - DNA, 33 bp, Homo sapiens
taataagcaaccagtcgaaaagaaaatgcatct

SEQ ID NO: 1549 - DNA, 33 bp, Homo sapiens
ggatttctctccctaagtcgtggtctagaaata

SEQ ID NO: 1550 - DNA, 33 bp, Homo sapiens
atcttcctcatgctgatgtctttgctacatgaa

SEQ ID NO: 1551 - DNA, 33 bp, Homo sapiens
ctagctttcaacctgtcaactttctacatgcct

SEQ ID NO: 1552 - DNA, 33 bp, Homo sapiens
acatgaactgagtttggaataagattgtactgc

SEQ ID NO: 1553 - DNA, 33 bp, Homo sapiens
agtttgattacctgtgtataggaaggctttaag

SEQ ID NO: 1554 - DNA, 33 bp, Homo sapiens
gacagctaaaataaaagaggtggcagaatatat

SEQ ID NO: 1555 - DNA, 33 bp, Homo sapiens
cctttccttctatccctattgcaccatgctgtc

SEQ ID NO: 1556 - DNA, 33 bp, Homo sapiens
tctagctgaacaaagataggtttatgcaataat

SEQ ID NO: 1557 - DNA, 51 bp, Homo sapiens
gctggaatagagacttgaactgacagataagcataacaataggtgaaactt

SEQ ID NO: 1558 - DNA, 51 bp, Homo sapiens
aataggtgaaacttggaaggccagagaagccagcataatttggcacaaggg

SEQ ID NO: 1559 - DNA, 33 bp, Homo sapiens
tgttgttctccataaaccctaaaattcctcaga

SEQ ID NO: 1560 - DNA, 33 bp, Homo sapiens
gatgggctggtgaagatgttgctttccgttgag

SEQ ID NO: 1561 - DNA, 33 bp, Homo sapiens
gaagcagcagggccaagtcaccactttcctgca

SEQ ID NO: 1562 - DNA, 33 bp, Homo sapiens
ccacagatggacttaattgacttccaaacattg

SEQ ID NO: 1563 - DNA, 33 bp, Homo sapiens
ctgtaaagtggtgaaatagtaaaacctgccttt

SEQ ID NO: 1564 - DNA, 33 bp, Homo sapiens
ctcaacttttggtcacgctgagcaatcctctag

SEQ ID NO: 1565 - DNA, 33 bp, Homo sapiens
actctagccctgagaatgtaaacgctttctcag

SEQ ID NO: 1566 - DNA, 33 bp, Homo sapiens
cctctgtaaagacaacgaacttaataaagagat

SEQ ID NO: 1567 - DNA, 33 bp, Homo sapiens
gggaacataaaaggaagtcccaagtgaaatgag

SEQ ID NO: 1568 - DNA, 33 bp, Homo sapiens
tcttcaaaactcttgctatttgcagggtcttct

SEQ ID NO: 1569 - DNA, 51 bp, Homo sapiens
tcctccttcctccttttctttggaagataatctgtgtcctaacttaagtat

SEQ ID NO: 1570 - DNA, 51 bp, Homo sapiens
taaactcttttttcggtcagtttccgattttcatttattataatgctctag

SEQ ID NO: 1571 - DNA, 33 bp, Homo sapiens
tatatggaaaatgaactgggactgcagaagtga

SEQ ID NO: 1572 - DNA, 33 bp, Homo sapiens
agtattcatttagctcgcttccacaattgaaac

SEQ ID NO: 1573 - DNA, 33 bp, Homo sapiens
accacatatgtagttcgatcatcagaggtaaag

SEQ ID NO: 1574 - DNA, 33 bp, Homo sapiens
ggtatgcatagtattatgtcagaacgaccttcc

SEQ ID NO: 1575 - DNA, 33 bp, Homo sapiens
actttcacaggtaacttaggagagagctcttcc

SEQ ID NO: 1576 - DNA, 33 bp, Homo sapiens
cacaatttaactcagctaagattaggtaattaa

SEQ ID NO: 1577 - DNA, 33 bp, Homo sapiens
ggagaatgattcattatcaaatttcaacacgtg

SEQ ID NO: 1578 - DNA, 33 bp, Homo sapiens
gtaagattcagtatacgagtacatacttagcca

SEQ ID NO: 1579 - DNA, 33 bp, Homo sapiens
cctacaatctattaggtccaagttacttacaaa

SEQ ID NO: 1580 - DNA, 33 bp, Homo sapiens
aggcacactttacctatgctagttagtttaatc

SEQ ID NO: 1581 - DNA, 33 bp, Homo sapiens
cctaaagcccctgctcgcaatggcagcttgaga

SEQ ID NO: 1582 - DNA, 33 bp, Homo sapiens
aggatgaatttacagatactacaggtgaagtct

SEQ ID NO: 1583 - DNA, 33 bp, Homo sapiens
atggggtagctgaatatgctagaaatggaagaa

SEQ ID NO: 1584 - DNA, 33 bp, Homo sapiens
caggacagtatttggatgttaggcttatcagac

SEQ ID NO: 1585 - DNA, 33 bp, Homo sapiens
cttggtattgtttgtcccttgattatggccttc

SEQ ID NO: 1586 - DNA, 33 bp, Homo sapiens
tgtgattggggtatacgagggatgtgagatagg

SEQ ID NO: 1587 - DNA, 33 bp, Homo sapiens
gattcataattttccctacgtagagtgtgattt

SEQ ID NO: 1588 - DNA, 33 bp, Homo sapiens
tttacttaggaagacagaagacaggctaagatt

SEQ ID NO: 1589 - DNA, 33 bp, Homo sapiens
ttaccttgttctggccgcagctcatttatttca

SEQ ID NO: 1590 - DNA, 33 bp, Homo sapiens
tttgatggatcttttatgctcgctataattctc

SEQ ID NO: 1591 - DNA, 51 bp, Homo sapiens
gtcatcaaactgaaactaagttgttgtctaacattccaaggaatcagaaga

SEQ ID NO: 1592 - DNA, 33 bp, Homo sapiens
gagagggtaaggcatcgaagtgagaaagcaaaa

SEQ ID NO: 1593 - DNA, 33 bp, Homo sapiens
atttgggtatggtcacgagttatgttaggggtc

SEQ ID NO: 1594 - DNA, 33 bp, Homo sapiens
ggcagacaggtgtgaatgacatcataggtatct

SEQ ID NO: 1595 - DNA, 33 bp, Homo sapiens
atctctgagggaattagaggctagtctacacaa

SEQ ID NO: 1596 - DNA, 33 bp, Homo sapiens
cagttcctggctcatagggagagagattaaata

SEQ ID NO: 1597 - DNA, 33 bp, Homo sapiens
ctaataatacagtcacgcttcaatgattcctgt

SEQ ID NO: 1598 - DNA, 33 bp, Homo sapiens
tcctctggataccaaataggttgcggcatggga

SEQ ID NO: 1599 - DNA, 33 bp, Homo sapiens
tagagatggatagagtgaagaattttaaaaggt

SEQ ID NO: 1600 - DNA, 33 bp, Homo sapiens
tagaatccagatgcttgaaccattcaaagatta

SEQ ID NO: 1601 - DNA, 33 bp, Homo sapiens
tttgtcagttgtcccaggactttatttgtaggc

SEQ ID NO: 1602 - DNA, 33 bp, Homo sapiens
ctcatttgtgtccctggaagagataaggagaga

SEQ ID NO: 1603 - DNA, 33 bp, Homo sapiens
ctcatcctctcttcacgccttacttctagcagc

SEQ ID NO: 1604 - DNA, 33 bp, Homo sapiens
attcaactctgtgttatggttatgtgtctgtgc

SEQ ID NO: 1605 - DNA, 33 bp, Homo sapiens
aatctttgaagtcggacgataaaaatcaccatt

SEQ ID NO: 1606 - DNA, 33 bp, Homo sapiens
gctgactttacagagagatttattggaggtagg

SEQ ID NO: 1607 - DNA, 51 bp, Homo sapiens
ttgaatcttaatgtaaagcacatgatggaaatagatttcacttattttact

SEQ ID NO: 1608 - DNA, 51 bp, Homo sapiens
tcatgattaaggaaattgccatatatgttgatggaatgataattaaacatt

SEQ ID NO: 1609 - DNA, 33 bp, Homo sapiens
tggcaggaaacacatatacaatttcatgacagc

SEQ ID NO: 1610 - DNA, 33 bp, Homo sapiens
gctggcaaagttaacattggtgtacttttcatt

SEQ ID NO: 1611 - DNA, 33 bp, Homo sapiens
atttattgcttcctactatgttatacattggcc

SEQ ID NO: 1612 - DNA, 33 bp, Homo sapiens
gtaaatggcgctataagtaaatgtgacagcctc

SEQ ID NO: 1613 - DNA, 33 bp, Homo sapiens
ataaacagccagaactgagcaatattctaatat

SEQ ID NO: 1614 - DNA, 33 bp, Homo sapiens
tgtttgtcaagtcacagtatgagcaaatctatc

SEQ ID NO: 1615 - DNA, 33 bp, Homo sapiens
tcacagcctctgaaaagacttccttaaccaccc

SEQ ID NO: 1616 - DNA, 33 bp, Homo sapiens
tgcacagaatgtgaaatcacttagtacagagac

SEQ ID NO: 1617 - DNA, 33 bp, Homo sapiens
aattagaggcagcttagcccaacaggtactgtg

SEQ ID NO: 1618 - DNA, 33 bp, Homo sapiens
cttcgctttgtctcaatctatctgtagtttcaa

SEQ ID NO: 1619 - DNA, 33 bp, Homo sapiens
caattagatctgcagagtatctgatcctgggaa

SEQ ID NO: 1620 - DNA, 33 bp, Homo sapiens
acactgaaggtagaaataggaattctgtgtagg

SEQ ID NO: 1621 - DNA, 51 bp, Homo sapiens
tcacgatcttgcttccagcatgctcggactatcataataacttcttaacca

SEQ ID NO: 1622 - DNA, 33 bp, Homo sapiens
tgttttctcttactgagcaaagcacactgttga

SEQ ID NO: 1623 - DNA, 33 bp, Homo sapiens
agacctagaccacctatgagtataaaaagcaac

SEQ ID NO: 1624 - DNA, 33 bp, Homo sapiens
agctgtctaccatagcggagaaggtgctatttg

SEQ ID NO: 1625 - DNA, 33 bp, Homo sapiens
gttgggtaacaagtgcgcagatatttggtcaaa

SEQ ID NO: 1626 - DNA, 33 bp, Homo sapiens
atgctagggacaaagatgaggaatgagtggccc

SEQ ID NO: 1627 - DNA, 51 bp, Homo sapiens
gaggcaggaattactccaacttcccgaaaccttcagaaaacagccctggtc

SEQ ID NO: 1628 - DNA, 33 bp, Homo sapiens
ttcacagactaagttatgccgttactccaggat

SEQ ID NO: 1629 - DNA, 33 bp, Homo sapiens
ataatctctggctaacgatgcctgtttctaatc

SEQ ID NO: 1630 - DNA, 51 bp, Homo sapiens
aaggctttgaacagtttaaatccaggcattccttcttggtgtttaagctcc

SEQ ID NO: 1631 - DNA, 33 bp, Homo sapiens
gtcacatgctaaatgcgaattaagaaaagagag

SEQ ID NO: 1632 - DNA, 33 bp, Homo sapiens
ctcttcacttacagtcgctcctatgatgttatt

SEQ ID NO: 1633 - DNA, 33 bp, Homo sapiens
ctgtgagtgaggtctcgaagaactatgatgtgg

SEQ ID NO: 1634 - DNA, 33 bp, Homo sapiens
cttttgctgagaaggctaaggaaattctcgccc

SEQ ID NO: 1635 - DNA, 51 bp, Homo sapiens
acccgaatgaaagtagttctcagaaggccagaagtagttctcagagactcg

SEQ ID NO: 1636 - DNA, 51 bp, Homo sapiens
gaaaggctacagattttcttcagcattcattattacatataataaacattt

SEQ ID NO: 1637 - DNA, 33 bp, Homo sapiens
cctctgtcttctgtccgaaactcctatactcag

SEQ ID NO: 1638 - DNA, 33 bp, Homo sapiens
tgagtggagcagtctaggcagcaaggcgtggtg

SEQ ID NO: 1639 - DNA, 33 bp, Homo sapiens
actgctttcctagcactccataagattcagaaa

SEQ ID NO: 1640 - DNA, 33 bp, Homo sapiens
aggaggcccctgtaactacttgccttcttcctg

SEQ ID NO: 1641 - DNA, 33 bp, Homo sapiens
ataatgagtagttcaatgaggccagcggacagc

SEQ ID NO: 1642 - DNA, 33 bp, Homo sapiens
tcctatgaccggaaaagcagactagtagaggcc

SEQ ID NO: 1643 - DNA, 33 bp, Homo sapiens
gcctaagtgacatcaattggatcaagacaaaac

SEQ ID NO: 1644 - DNA, 33 bp, Homo sapiens
agatccaagtggagaccaacttttcctttctct

SEQ ID NO: 1645 - DNA, 33 bp, Homo sapiens
gcgaagggtaggtggcgaagaagagaaaagacc

SEQ ID NO: 1646 - DNA, 33 bp, Homo sapiens
agtttaagcagggttcgatgaagagcccaccca

SEQ ID NO: 1647 - DNA, 33 bp, Homo sapiens
ggaggagtccagaggagagtaacagtggatgga

SEQ ID NO: 1648 - DNA, 33 bp, Homo sapiens
gtctggagaatagaccgaaggcaataagggtag

SEQ ID NO: 1649 - DNA, 33 bp, Homo sapiens
actgaagttcctgaaatcttccttggaaaaatc

SEQ ID NO: 1650 - DNA, 33 bp, Homo sapiens
taccctttgccaacattatcctcattaaattca

SEQ ID NO: 1651 - DNA, 33 bp, Homo sapiens
gacatcagtatttgcatagccaagttattaaag

SEQ ID NO: 1652 - DNA, 33 bp, Homo sapiens
cgtagatgacttcaacggaccgagagaaagaag

SEQ ID NO: 1653 - DNA, 33 bp, Homo sapiens
ttttgtctcagccaacgggattactgggctccc

SEQ ID NO: 1654 - DNA, 33 bp, Homo sapiens
aataaagctggtgttaggggtatactatattta

SEQ ID NO: 1655 - DNA, 33 bp, Homo sapiens
tgcagtagcccttcaatgaccttctttccccaa

SEQ ID NO: 1656 - DNA, 33 bp, Homo sapiens
ttcactaaggggcagatgccaagcgcacggctc

SEQ ID NO: 1657 - DNA, 33 bp, Homo sapiens
tgatggttagggtgaagtgttaagactgagaaa

SEQ ID NO: 1658 - DNA, 33 bp, Homo sapiens
gactggggccacatacgaacaggacttcagaac

SEQ ID NO: 1659 - DNA, 33 bp, Homo sapiens
gtgtttaacacccccagaaagcttgtctaagta

SEQ ID NO: 1660 - DNA, 33 bp, Homo sapiens
tatttttaagatcatcgaacaggtattctggag

SEQ ID NO: 1661 - DNA, 33 bp, Homo sapiens
tccattaattatatcatctggagaacctactga

SEQ ID NO: 1662 - DNA, 33 bp, Homo sapiens
gtcatcatgtatcttagacatattgtggtatac

SEQ ID NO: 1663 - DNA, 33 bp, Homo sapiens
tttagttaaaatggaagtgagaagcaaagcaga

SEQ ID NO: 1664 - DNA, 33 bp, Homo sapiens
tgcttcgtgattatggtagagtgtccttgactt

SEQ ID NO: 1665 - DNA, 33 bp, Homo sapiens
tgtttaatacagagaagtcaactgagccagatg

SEQ ID NO: 1666 - DNA, 33 bp, Homo sapiens
tttctcagtctccttcgctggatgatccttatc

SEQ ID NO: 1667 - DNA, 33 bp, Homo sapiens
catgaaaactttctgatgagaccagagagcaga

SEQ ID NO: 1668 - DNA, 33 bp, Homo sapiens
agaggtggaagtcgtacctttggggtcaggccc

SEQ ID NO: 1669 - DNA, 51 bp, Homo sapiens
gcctgcaaaggatggcctgtcagcttagcagtctgtgtgctttctagagta

SEQ ID NO: 1670 - DNA, 51 bp, Homo sapiens
agcatcttgtatgcagtgagtgttatgaattttctttttgttaaaatgaat

SEQ ID NO: 1671 - DNA, 51 bp, Homo sapiens
aagaagcaacagacgaagcatctaatcttgtgaataaaatgattgatttag

SEQ ID NO: 1672 - DNA, 33 bp, Homo sapiens
agcatatacaagtatcgatagcccaatcaatca

SEQ ID NO: 1673 - DNA, 33 bp, Homo sapiens
gaaggtcctgttttcctaaggcatttttaataa

SEQ ID NO: 1674 - DNA, 33 bp, Homo sapiens
atgaagaagggtcctcgacaaaggagcacagct

SEQ ID NO: 1675 - DNA, 33 bp, Homo sapiens
cccagctttgggacgagcaccaccttgccaccc

SEQ ID NO: 1676 - DNA, 33 bp, Homo sapiens
agcttccatgtccatacaaaggaggggagaagg

SEQ ID NO: 1677 - DNA, 33 bp, Homo sapiens
gtaggagggcctagacgagaaagtaggagaaac

SEQ ID NO: 1678 - DNA, 33 bp, Homo sapiens
gtagatactctggtcatattggattgggccctt

SEQ ID NO: 1679 - DNA, 33 bp, Homo sapiens
aatatttgtatgtttatatcttgtaactttgct

SEQ ID NO: 1680 - DNA, 33 bp, Homo sapiens
taaaatctaaggcccatgtaaccagtcgtttca

SEQ ID NO: 1681 - DNA, 33 bp, Homo sapiens
tgctgaagatgaccactgcaggagggaaaggaa

SEQ ID NO: 1682 - DNA, 33 bp, Homo sapiens
atgtaataattctggataagccagggtacataa

SEQ ID NO: 1683 - DNA, 33 bp, Homo sapiens
gcaaggaggtcggcgatatcacgcatccacagt

SEQ ID NO: 1684 - DNA, 33 bp, Homo sapiens
ctcctgattgtcctctcaatgtgctagctagct

SEQ ID NO: 1685 - DNA, 33 bp, Homo sapiens
gggctgggtgacgcacgaatcttgagtcaacag

SEQ ID NO: 1686 - DNA, 33 bp, Homo sapiens
tttctgctgcagagaataacaacacacagtgca

SEQ ID NO: 1687 - DNA, 33 bp, Homo sapiens
gagatttcagtgtacccgggatttcagggccca

SEQ ID NO: 1688 - DNA, 33 bp, Homo sapiens
aaggtttctgtattccgagcatatttaagtgac

SEQ ID NO: 1689 - DNA, 33 bp, Homo sapiens
taagacatctaaaatcgagttgacattattctt

SEQ ID NO: 1690 - DNA, 33 bp, Homo sapiens
gaaatagctcttgtccggagagtgtttgcttat

SEQ ID NO: 1691 - DNA, 33 bp, Homo sapiens
tcaggtcttgtgtaaattgatagagcaagaatt

SEQ ID NO: 1692 - DNA, 33 bp, Homo sapiens
aagatttgtaagtttatagcacattaaaggatg

SEQ ID NO: 1693 - DNA, 33 bp, Homo sapiens
aataccattgaatacctcacaaggacatctagg

SEQ ID NO: 1694 - DNA, 33 bp, Homo sapiens
tgataacggttagaacggtactttcacgaatga

SEQ ID NO: 1695 - DNA, 33 bp, Homo sapiens
gattggataaacaataggcagtacatatacaac

SEQ ID NO: 1696 - DNA, 33 bp, Homo sapiens
agaggctaaaatgataggctatagcacagtact

SEQ ID NO: 1697 - DNA, 33 bp, Homo sapiens
tgtaggcatacataaagctgacatgtaaactcc

SEQ ID NO: 1698 - DNA, 33 bp, Homo sapiens
tgactctcaaaggcacgccctagtgtaatctct

SEQ ID NO: 1699 - DNA, 33 bp, Homo sapiens
ggtaatcagctgctaatgaaaacaaccagtctg

SEQ ID NO: 1700 - DNA, 33 bp, Homo sapiens
ttgaggacttcaacacgggcattatggccgttg

SEQ ID NO: 1701 - DNA, 33 bp, Homo sapiens
gtaggcttccgttcccgcacacggatctctcca

SEQ ID NO: 1702 - DNA, 33 bp, Homo sapiens
agtgtcagcaagaagtgaacgtttgtggttgga

SEQ ID NO: 1703 - DNA, 33 bp, Homo sapiens
tcatccacagtacccatgcttgcaatgtccaca

SEQ ID NO: 1704 - DNA, 33 bp, Homo sapiens
ccagctgactttatgcgcttgaccatttaagcc

SEQ ID NO: 1705 - DNA, 33 bp, Homo sapiens
acacatcaactcactatacaaaatgttttcaca

SEQ ID NO: 1706 - DNA, 33 bp, Homo sapiens
attgtagccactgatataaccaagctcctgttt

SEQ ID NO: 1707 - DNA, 33 bp, Homo sapiens
gcattctggggatccagtcaagtgaaagaggat

SEQ ID NO: 1708 - DNA, 33 bp, Homo sapiens
ggccctattcatttcactccaagaaggaccact

SEQ ID NO: 1709 - DNA, 33 bp, Homo sapiens
agatgggtgttaatgctccctttcttccctgtc

SEQ ID NO: 1710 - DNA, 33 bp, Homo sapiens
ctcaaagaactcacaggcaagtattgaagtcag

SEQ ID NO: 1711 - DNA, 33 bp, Homo sapiens
tgcttcgggccttaaatccagactgctgacctc

SEQ ID NO: 1712 - DNA, 51 bp, Homo sapiens
tctagatgtgcagttgtaccataaaggactgagagtctttatcactaataa

SEQ ID NO: 1713 - DNA, 33 bp, Homo sapiens
gacagggctggttttgtaaatctgaagatcaca

SEQ ID NO: 1714 - DNA, 51 bp, Homo sapiens
aaatagcccaggtcagcatggcttgcactatttttaactccaggtactagg

SEQ ID NO: 1715 - DNA, 51 bp, Homo sapiens
gtgagagttttaatcctgttgtggtcaactcgcctttctttgcttgctata

SEQ ID NO: 1716 - DNA, 51 bp, Homo sapiens
tcatatcttgctaacactcagtgaattgccctcagctgatcctctgccctg

SEQ ID NO: 1717 - DNA, 51 bp, Homo sapiens
ttgaaggaggaaatgaatttagaaaggactgtgttgactcttgaggaaagc

SEQ ID NO: 1718 - DNA, 33 bp, Homo sapiens
gcaaggcttgtgtctggaaaatactctcaaata

SEQ ID NO: 1719 - DNA, 33 bp, Homo sapiens
tatgggcttcacatgagaggcatattgaacaat

SEQ ID NO: 1720 - DNA, 33 bp, Homo sapiens
agggacatagaatttagacttgacacagtggag

SEQ ID NO: 1721 - DNA, 33 bp, Homo sapiens
tgagttgaatatactgtatgagatggtggatat

SEQ ID NO: 1722 - DNA, 33 bp, Homo sapiens
ttggaccttcagctaatggcatatacaaaaatt

SEQ ID NO: 1723 - DNA, 33 bp, Homo sapiens
aagcagagggtatggatgagaaacacagtggac

SEQ ID NO: 1724 - DNA, 33 bp, Homo sapiens
ggagtctggagagttatattttttgatgtattg

SEQ ID NO: 1725 - DNA, 33 bp, Homo sapiens
ggctcagatggagtgctacctaagtccctggcc

SEQ ID NO: 1726 - DNA, 33 bp, Homo sapiens
aatcagcagcattagatagcagttataatctat

SEQ ID NO: 1727 - DNA, 33 bp, Homo sapiens
aggcataaatgagaacgaaaacattaacattgt

SEQ ID NO: 1728 - DNA, 33 bp, Homo sapiens
attaaatcattgaccattggcaaccaacttaac

SEQ ID NO: 1729 - DNA, 33 bp, Homo sapiens
ctatggctcacatgatcaaatgtaagtaaaaaa

SEQ ID NO: 1730 - DNA, 33 bp, Homo sapiens
atactccagacctagagatgaagaagccagcaa

SEQ ID NO: 1731 - DNA, 33 bp, Homo sapiens
tcttggcttctcttaattggaacacagtggcca

SEQ ID NO: 1732 - DNA, 33 bp, Homo sapiens
agccttgataaaataagcagtctctccaaatgc

SEQ ID NO: 1733 - DNA, 33 bp, Homo sapiens
gaataataggccccccgaagagatccatgtctt

SEQ ID NO: 1734 - DNA, 33 bp, Homo sapiens
ccagggaaggcatcccggaaatggtacacctat

SEQ ID NO: 1735 - DNA, 33 bp, Homo sapiens
gctatcggaatatgaacgtaagggatgctgggc

SEQ ID NO: 1736 - DNA, 33 bp, Homo sapiens
ttttcagtgtgttgccgatgaaggggatgaatg

SEQ ID NO: 1737 - DNA, 33 bp, Homo sapiens
tctcacaacttgagactgaaaattaagctggga

SEQ ID NO: 1738 - DNA, 33 bp, Homo sapiens
gatgctgatatgacagcaggccctgaaagcaat

SEQ ID NO: 1739 - DNA, 33 bp, Homo sapiens
ggcttcacaactaatcgagttcctgggctggaa

SEQ ID NO: 1740 - DNA, 51 bp, Homo sapiens
gttctgtacaattccgtgtactacttaaatgcaaattattatcagtattag

SEQ ID NO: 1741 - DNA, 33 bp, Homo sapiens
tggcaggttctacgtatggctgtgtgcattttg

SEQ ID NO: 1742 - DNA, 33 bp, Homo sapiens
tattttttcagctttatggatgtgtaattgaca

SEQ ID NO: 1743 - DNA, 51 bp, Homo sapiens
tatatgcaagagaattcaaacttacggaaaattaatgttattcaaggtcac

SEQ ID NO: 1744 - DNA, 33 bp, Homo sapiens
aatgggagaataagatgaatctaccctaaggca

SEQ ID NO: 1745 - DNA, 33 bp, Homo sapiens
agatcggtaagaacaatgtgagatccagcagat

SEQ ID NO: 1746 - DNA, 33 bp, Homo sapiens
gaccacgaggatgaggcatggctttgtagacag

SEQ ID NO: 1747 - DNA, 33 bp, Homo sapiens
ttttcattatgaatcatcacggtcatttagtca

SEQ ID NO: 1748 - DNA, 33 bp, Homo sapiens
gtgggaaaacagcagggattgcaatttcaaaag

SEQ ID NO: 1749 - DNA, 33 bp, Homo sapiens
ttttcttagtttaaaatcagtgtatattgtcgt

SEQ ID NO: 1750 - DNA, 33 bp, Homo sapiens
atgaggtgactgcttatacaaggagatgttaca

SEQ ID NO: 1751 - DNA, 33 bp, Homo sapiens
gaggtccagaagagaatgagtgagccaggagtg

SEQ ID NO: 1752 - DNA, 33 bp, Homo sapiens
ccatgaccggttctaaggctcctgtcagtggat

SEQ ID NO: 1753 - DNA, 33 bp, Homo sapiens
cactttgttgtgtgtcgactgtatgtcaataca

SEQ ID NO: 1754 - DNA, 33 bp, Homo sapiens
gaaacattaccatattgaagacagtgaacaagt

SEQ ID NO: 1755 - DNA, 33 bp, Homo sapiens
ggcctctgagatccacgataccaaattagcaca

SEQ ID NO: 1756 - DNA, 33 bp, Homo sapiens
acccggctagactcaggcatgatattacgcagt

SEQ ID NO: 1757 - DNA, 33 bp, Homo sapiens
cagggaagatcacacagaggagatgtcagaagt

SEQ ID NO: 1758 - DNA, 33 bp, Homo sapiens
ctttaacaaatcaccatagtctggattgcttaa

SEQ ID NO: 1759 - DNA, 33 bp, Homo sapiens
ggtttttcaaatgcacgaaggtcattttagaaa

SEQ ID NO: 1760 - DNA, 33 bp, Homo sapiens
tctagtccaaagtctacatcagccaactgaaat

SEQ ID NO: 1761 - DNA, 33 bp, Homo sapiens
tgtaacagagacagcagaaaacattttagaaca

SEQ ID NO: 1762 - DNA, 33 bp, Homo sapiens
ccacttatatgaggtatgtagtcaaattcacag

SEQ ID NO: 1763 - DNA, 51 bp, Homo sapiens
tatgcatgtaaaagcccttaatacagtgccagccaatgcttgccattatga

SEQ ID NO: 1764 - DNA, 33 bp, Homo sapiens
gctcagcaagcaaatagatgagacagttttggg

SEQ ID NO: 1765 - DNA, 33 bp, Homo sapiens
cttcacaattgacctcgcagggttgtggtagag

SEQ ID NO: 1766 - DNA, 33 bp, Homo sapiens
tagcatttaaccagtatctagtaactctgtgcg

SEQ ID NO: 1767 - DNA, 33 bp, Homo sapiens
atgagtgttcattgaattgatatctcaaagaag

SEQ ID NO: 1768 - DNA, 33 bp, Homo sapiens
actatgtgatagttaagaacaagctttggtaga

SEQ ID NO: 1769 - DNA, 33 bp, Homo sapiens
aaacactctttacaccgagttctattagcttgg

SEQ ID NO: 1770 - DNA, 33 bp, Homo sapiens
tcacatttaatgtgcctggagataaaacacagg

SEQ ID NO: 1771 - DNA, 33 bp, Homo sapiens
gtaaaactacagattcgagatgctctagtgaaa

SEQ ID NO: 1772 - DNA, 51 bp, Homo sapiens
ctcaactgaggagacagttggataagcatacctttttgaatgtccgtgacc

SEQ ID NO: 1773 - DNA, 33 bp, Homo sapiens
ctaatgcctaaaccaatgatattttgatgttaa

SEQ ID NO: 1774 - DNA, 33 bp, Homo sapiens
gtttgccacaactgagtatctataaaaaacagc

SEQ ID NO: 1775 - DNA, 33 bp, Homo sapiens
ccttaccattcatttagcaaagcaatagggatg

SEQ ID NO: 1776 - DNA, 33 bp, Homo sapiens
ggatgacccaaatcgctgatactggagccctca

SEQ ID NO: 1777 - DNA, 33 bp, Homo sapiens
gatctgggggcatctatctccacagtcaatcca

SEQ ID NO: 1778 - DNA, 33 bp, Homo sapiens
aagactagatgaggaagcgaatttgatgaagaa

SEQ ID NO: 1779 - DNA, 51 bp, Homo sapiens
acatacttccttaatttacatcttatatctcacaaatttttccagatttcc

SEQ ID NO: 1780 - DNA, 33 bp, Homo sapiens
ctcaccaccaagtttctcagatgctgcatttga

SEQ ID NO: 1781 - DNA, 33 bp, Homo sapiens
tctagtcacttcaaaatgttagcatctatcttc

SEQ ID NO: 1782 - DNA, 33 bp, Homo sapiens
caaaaaaaagtgacaggaaagtgacctcatccc

SEQ ID NO: 1783 - DNA, 51 bp, Homo sapiens
atcctgagaatgaaatgacccaatatggaaagacttttgatacatacagtt

SEQ ID NO: 1784 - DNA, 33 bp, Homo sapiens
gcactacagtctaagcgatctgaaacttagctt

SEQ ID NO: 1785 - DNA, 33 bp, Homo sapiens
taaaaggaaaaaagcagggttatgcggttggaa

SEQ ID NO: 1786 - DNA, 33 bp, Homo sapiens
agacatctgtccggtgtaactgatcaatgtgag

SEQ ID NO: 1787 - DNA, 33 bp, Homo sapiens
tacctgttcatatcatgagtaattctaaagctc

SEQ ID NO: 1788 - DNA, 33 bp, Homo sapiens
ctctgacagaaggacaggattcattataccatg

SEQ ID NO: 1789 - DNA, 51 bp, Homo sapiens
tatgtagtttcacaataatttaatcgagttgtctttcaagcaaaaaaaaaa

SEQ ID NO: 1790 - DNA, 33 bp, Homo sapiens
ttggtcaccaaagtcatggaagttgtagaagaa

SEQ ID NO: 1791 - DNA, 33 bp, Homo sapiens
aatgtaagtagattgagtacaacatcagagaac

SEQ ID NO: 1792 - DNA, 33 bp, Homo sapiens
gaggatctggtagaaatatggtagctgacttcc

SEQ ID NO: 1793 - DNA, 33 bp, Homo sapiens
acttgagctcgggtgatgaaggctacagtgagc

SEQ ID NO: 1794 - DNA, 33 bp, Homo sapiens
ggcttgcagattttgggaagaagagtgagtgca

SEQ ID NO: 1795 - DNA, 33 bp, Homo sapiens
acaccttctccaatgagatctgcaccccagtct

SEQ ID NO: 1796 - DNA, 33 bp, Homo sapiens
tatacttacagaaatatcattgtgtttaatcaa

SEQ ID NO: 1797 - DNA, 33 bp, Homo sapiens
tgctctctctagaaccgcacagataaatccaat

SEQ ID NO: 1798 - DNA, 33 bp, Homo sapiens
gatgtaggaaaggaaagagagaagagactgact

SEQ ID NO: 1799 - DNA, 33 bp, Homo sapiens
ctgagtgacagtcgaataggaagagcatatttc

SEQ ID NO: 1800 - DNA, 33 bp, Homo sapiens
tgacagtctgaagtaatcacaggacttttagta

SEQ ID NO: 1801 - DNA, 33 bp, Homo sapiens
ggaggcgctacagagatggctcaattatggcgg

SEQ ID NO: 1802 - DNA, 33 bp, Homo sapiens
ctttcacggttattcatggccattcacagagtg

SEQ ID NO: 1803 - DNA, 33 bp, Homo sapiens
actgaaaatcactgacgaaaggcagattaacaa

SEQ ID NO: 1804 - DNA, 33 bp, Homo sapiens
atcttgagttaggcaatgagtttttagatgtaa

SEQ ID NO: 1805 - DNA, 33 bp, Homo sapiens
tactcatcttcctttatggtattcatgcattca

SEQ ID NO: 1806 - DNA, 33 bp, Homo sapiens
tgccacattagatagagcagtttgcagcagact

SEQ ID NO: 1807 - DNA, 33 bp, Homo sapiens
gacctattgtaagggagaaaaagctgagcaaat

SEQ ID NO: 1808 - DNA, 33 bp, Homo sapiens
tctgtttgaaacctaatcctcaacgtgatggtg

SEQ ID NO: 1809 - DNA, 33 bp, Homo sapiens
ggttgtaagagagaagcccgtattccttagctt

SEQ ID NO: 1810 - DNA, 33 bp, Homo sapiens
tttcctgtgagccaactgactctgatgttatta

SEQ ID NO: 1811 - DNA, 33 bp, Homo sapiens
gcagccaaattgattatcaagtgttaaataaca

SEQ ID NO: 1812 - DNA, 33 bp, Homo sapiens
gctgtggaagttcagaccaggaaggtgagatct

SEQ ID NO: 1813 - DNA, 51 bp, Homo sapiens
cctaaatatgctctgcaaggaattttcccaacaaaggcacttctctagtta

SEQ ID NO: 1814 - DNA, 33 bp, Homo sapiens
gaatgtcatgcgaaaagtcacaggagcagagtg

SEQ ID NO: 1815 - DNA, 33 bp, Homo sapiens
ctgctttattggttcatgaattgggcagttcca

SEQ ID NO: 1816 - DNA, 33 bp, Homo sapiens
gatattaatgagcaatgaaaatgtgaaagtggc

SEQ ID NO: 1817 - DNA, 51 bp, Homo sapiens
ctagtcctctcgaaagttaaacatattataaagcaatagtagccaaaatgt

SEQ ID NO: 1818 - DNA, 33 bp, Homo sapiens
cgtcttggccttgtaccgcgttcagaaggcgac

SEQ ID NO: 1819 - DNA, 33 bp, Homo sapiens
gtctatcttttcccattaggtctgttcgaaaac

SEQ ID NO: 1820 - DNA, 33 bp, Homo sapiens
gcacacattgcaccaagtgaagctaacttatgc

SEQ ID NO: 1821 - DNA, 33 bp, Homo sapiens
tagaactgggtgtcagcaactaagtgaggagag

SEQ ID NO: 1822 - DNA, 33 bp, Homo sapiens
cagcgaaaaatacaaaggtgattgaatacctat

SEQ ID NO: 1823 - DNA, 51 bp, Homo sapiens
atatctgaagtcccattttgattgctagctccacaaacatatattagggca

SEQ ID NO: 1824 - DNA, 33 bp, Homo sapiens
tgaatatcaaagtaatcatgctaaatgaacaag

SEQ ID NO: 1825 - DNA, 33 bp, Homo sapiens
caggtagataagagtcgcagcaaacaaactttg

SEQ ID NO: 1826 - DNA, 33 bp, Homo sapiens
tccctgcagctaccaaggaatgactgtgtaggt

SEQ ID NO: 1827 - DNA, 33 bp, Homo sapiens
ggatgtggtaaggccaggattttggatgctgga

SEQ ID NO: 1828 - DNA, 33 bp, Homo sapiens
gcatgaccaaaccatagctcttgatttccctac

SEQ ID NO: 1829 - DNA, 33 bp, Homo sapiens
tcttatcacgagtcctgcgggaaaccagctgcc

SEQ ID NO: 1830 - DNA, 33 bp, Homo sapiens
atattgtttgatttagtccaattctcaaaactc

SEQ ID NO: 1831 - DNA, 33 bp, Homo sapiens
ttgccataaccttagcgcattgtaagtactagg

SEQ ID NO: 1832 - DNA, 33 bp, Homo sapiens
gtacataaagtaatcagactcagacaggaagta

SEQ ID NO: 1833 - DNA, 33 bp, Homo sapiens
gttttcacacagtggagggggcgaggaagctct

SEQ ID NO: 1834 - DNA, 33 bp, Homo sapiens
cccagaagaagaaatagctatctgaacttcatc

SEQ ID NO: 1835 - DNA, 51 bp, Homo sapiens
ggggaaatctgcgtcacatgggcgatagaaggtccctcgaatccctcaatc

SEQ ID NO: 1836 - DNA, 33 bp, Homo sapiens
tattaagtgttaggaagtgtactaagtgcttta

SEQ ID NO: 1837 - DNA, 33 bp, Homo sapiens
gcctaatcagaatccctccaaaaatatagtact

SEQ ID NO: 1838 - DNA, 33 bp, Homo sapiens
ccagaagaaacgcttatacaagatgtgggaaaa

SEQ ID NO: 1839 - DNA, 33 bp, Homo sapiens
gggttgtcattttttgtagaagtcatatgatag

SEQ ID NO: 1840 - DNA, 33 bp, Homo sapiens
gcctatggcattcacaggaaacatggcaattcc

SEQ ID NO: 1841 - DNA, 33 bp, Homo sapiens
tctgactcctcagagcgcccgagtaagcaagtc

SEQ ID NO: 1842 - DNA, 33 bp, Homo sapiens
tgaagccaggaatagcgcaggtgattgcctcct

SEQ ID NO: 1843 - DNA, 33 bp, Homo sapiens
tgaatgataaaatgagtattgcaatttctgaag

SEQ ID NO: 1844 - DNA, 33 bp, Homo sapiens
gttgttgcaaaagtgatgcttccctgttgttaa

SEQ ID NO: 1845 - DNA, 33 bp, Homo sapiens
ttactctccaaggaaagaagatgtgttctcaaa

SEQ ID NO: 1846 - DNA, 33 bp, Homo sapiens
taagcagagcataatcgaaacagtgtgagttct

SEQ ID NO: 1847 - DNA, 33 bp, Homo sapiens
ggtcacccctctaacatgctgtcttcacttaga

SEQ ID NO: 1848 - DNA, 33 bp, Homo sapiens
ccctgtcattaagccatgctgaacagctgacct

SEQ ID NO: 1849 - DNA, 33 bp, Homo sapiens
agactgcccatcagtgtaaagcaacagagttga

SEQ ID NO: 1850 - DNA, 33 bp, Homo sapiens
tgtattacctgtcccagtggatttgattagcta

SEQ ID NO: 1851 - DNA, 33 bp, Homo sapiens
acacaaaaacagttacggaagaatgcagtgacc

SEQ ID NO: 1852 - DNA, 33 bp, Homo sapiens
gaaacacccccactcatactgccaaaatcaaac

SEQ ID NO: 1853 - DNA, 33 bp, Homo sapiens
gctcgtccgctccgccgcgaatccgtttcccca

SEQ ID NO: 1854 - DNA, 33 bp, Homo sapiens
catccttacctcggcagctacagactcagcttg

SEQ ID NO: 1855 - DNA, 33 bp, Homo sapiens
aggacgatgtagacacggtgaaggaaacacact

SEQ ID NO: 1856 - DNA, 33 bp, Homo sapiens
tacgcagatgtgcttcgataatctcgggccttc

SEQ ID NO: 1857 - DNA, 33 bp, Homo sapiens
ccacctatctcctccatgtgacaattttcaata

SEQ ID NO: 1858 - DNA, 33 bp, Homo sapiens
tgctcctgtctcctcagaagtattccactttgg

SEQ ID NO: 1859 - DNA, 33 bp, Homo sapiens
aggctcactccttgtctacctttttcgcctttg

SEQ ID NO: 1860 - DNA, 33 bp, Homo sapiens
tcattgcttacggacttacttacccgagcatcc

SEQ ID NO: 1861 - DNA, 33 bp, Homo sapiens
ccactgtaaatgcatggaactcttgagacttca

SEQ ID NO: 1862 - DNA, 33 bp, Homo sapiens
actaatttccattcccgacaacagtgtataagt

SEQ ID NO: 1863 - DNA, 33 bp, Homo sapiens
ctcgcattgtacttgatgggtaactgatcaagg

SEQ ID NO: 1864 - DNA, 33 bp, Homo sapiens
taccccaaggcttctatgttccggcgcaggcgg

SEQ ID NO: 1865 - DNA, 33 bp, Homo sapiens
acattcagagatgtgcgaagtatttcaccacaa

SEQ ID NO: 1866 - DNA, 33 bp, Homo sapiens
tctttggagagggcaatgtagcacaaccctttt

SEQ ID NO: 1867 - DNA, 33 bp, Homo sapiens
tgataaatcccataatgaaaacgtgcagagggc

SEQ ID NO: 1868 - DNA, 33 bp, Homo sapiens
gaatcacatacagccaggtttgaaatgatcaca

SEQ ID NO: 1869 - DNA, 51 bp, Homo sapiens
actttgggtcctggattaagtcacattttccattgtcttttctgcattgta

SEQ ID NO: 1870 - DNA, 33 bp, Homo sapiens
gtatatgcattatcaagtaagagactaagtgag

SEQ ID NO: 1871 - DNA, 33 bp, Homo sapiens
catgaggccaacgtcagattagcttattaaatt

SEQ ID NO: 1872 - DNA, 33 bp, Homo sapiens
ctgcttcaaaaaacaaccaggtctgccaggtgg

SEQ ID NO: 1873 - DNA, 33 bp, Homo sapiens
atggcggacacccttctccccatcaagcttgag

SEQ ID NO: 1874 - DNA, 33 bp, Homo sapiens
gcaggtggtggtgcacggtgattttctaagcca

SEQ ID NO: 1875 - DNA, 33 bp, Homo sapiens
cgtatcagttgtaaacgccctgacgaggtagcg

SEQ ID NO: 1876 - DNA, 33 bp, Homo sapiens
acactgcactgaaactgaaaaacacgatggttg

SEQ ID NO: 1877 - DNA, 33 bp, Homo sapiens
gatctccctctgaacatggagctgcaaggagcc

SEQ ID NO: 1878 - DNA, 33 bp, Homo sapiens
cttcaaaccataacaagagtgatgtccaaacag

SEQ ID NO: 1879 - DNA, 33 bp, Homo sapiens
taacaagcaaggctcatgggaagagacaactag

SEQ ID NO: 1880 - DNA, 33 bp, Homo sapiens
caatcatgcacaaagatactgaatcaataatca

SEQ ID NO: 1881 - DNA, 33 bp, Homo sapiens
agcataactcttatagcaaagccagataaataa

SEQ ID NO: 1882 - DNA, 33 bp, Homo sapiens
ctcctcccggtggtgatattgtttacagagaag

SEQ ID NO: 1883 - DNA, 33 bp, Homo sapiens
tgaggatactgattagtagttcagacattcagg

SEQ ID NO: 1884 - DNA, 33 bp, Homo sapiens
aggcggtgattacggatgaactcggatgatctc

SEQ ID NO: 1885 - DNA, 33 bp, Homo sapiens
atgcacattgtcaggagcacctaagcctccaat

SEQ ID NO: 1886 - DNA, 33 bp, Homo sapiens
ctgccaattcaatgtataaaacagtgacaccct

SEQ ID NO: 1887 - DNA, 33 bp, Homo sapiens
aggagattaatcctcatagtgctagacgtgccc

SEQ ID NO: 1888 - DNA, 33 bp, Homo sapiens
cttcttgtggctgaacgaagacgtgttggaacc

SEQ ID NO: 1889 - DNA, 33 bp, Homo sapiens
tttgtgttgcagtggcgaggggatatagacctg

SEQ ID NO: 1890 - DNA, 33 bp, Homo sapiens
ttcactttcaacagacgaatatcttctatgcca

SEQ ID NO: 1891 - DNA, 33 bp, Homo sapiens
aatgttcagaattgtcgacctcaggcaacttgc

SEQ ID NO: 1892 - DNA, 33 bp, Homo sapiens
taaataggtatttctctcgagctctctatgtca

SEQ ID NO: 1893 - DNA, 33 bp, Homo sapiens
tcattaatcaaacacacggtattgcattagcgt

SEQ ID NO: 1894 - DNA, 33 bp, Homo sapiens
ggtgaaaactgacctgcatccgctgatctttgt

SEQ ID NO: 1895 - DNA, 33 bp, Homo sapiens
ttacattcactatgaaggcaaattcactgaacc

SEQ ID NO: 1896 - DNA, 33 bp, Homo sapiens
cattctgcaaactgcgtatcatggcctcagtct

SEQ ID NO: 1897 - DNA, 51 bp, Homo sapiens
ccaaaatctttaaagactttcaatagcttacaacctgtgttcatatattct

SEQ ID NO: 1898 - DNA, 33 bp, Homo sapiens
tatatgggagtggaaagttcaaaaattcaacag

SEQ ID NO: 1899 - DNA, 51 bp, Homo sapiens
tccatattgacttgaaagtagctaattacagccaggcagagggactatcta

SEQ ID NO: 1900 - DNA, 33 bp, Homo sapiens
tcgaacagatacagaagtaaaaagagcaatcac

SEQ ID NO: 1901 - DNA, 33 bp, Homo sapiens
ggaagagatttctgaggatggcacctaagacag

SEQ ID NO: 1902 - DNA, 33 bp, Homo sapiens
tgagtttgggcccaggtatgacattccattctc

SEQ ID NO: 1903 - DNA, 33 bp, Homo sapiens
aagtgaatgacatttaggtaggattttcctgct

SEQ ID NO: 1904 - DNA, 33 bp, Homo sapiens
agcagacttttaggacgctgttgcatggtctcc

SEQ ID NO: 1905 - DNA, 33 bp, Homo sapiens
tgtcagagtttattctgacgtgtgcagcatcct

SEQ ID NO: 1906 - DNA, 33 bp, Homo sapiens
aaccctcctcttactgtaactcaagctgatttc

SEQ ID NO: 1907 - DNA, 33 bp, Homo sapiens
ggcttgataaaccgacgaaaataatgaaaggca

SEQ ID NO: 1908 - DNA, 51 bp, Homo sapiens
catgattcctcaaagtagtgtaccttaaacctaggaagtaaacatcaagat

SEQ ID NO: 1909 - DNA, 51 bp, Homo sapiens
ttgattgcatattgatcaataggttcaatgtgattacaatgaaaatcattg

SEQ ID NO: 1910 - DNA, 33 bp, Homo sapiens
acatcagttctgtcaatgtccatttgttcacat

SEQ ID NO: 1911 - DNA, 33 bp, Homo sapiens
tttaaactttgttggcgcttttactgtagatgc

SEQ ID NO: 1912 - DNA, 33 bp, Homo sapiens
gtagctagactagcaattaggaggaacttacag

SEQ ID NO: 1913 - DNA, 33 bp, Homo sapiens
ttactaatatcaggaatgaaaagagtgacatct

SEQ ID NO: 1914 - DNA, 33 bp, Homo sapiens
tgagtgttcgtgttcctccgtgttggtgccttg

SEQ ID NO: 1915 - DNA, 33 bp, Homo sapiens
ggcgtggctgggaacagattatgagttgagagt

SEQ ID NO: 1916 - DNA, 33 bp, Homo sapiens
ctggacatattacgactgaatccagtgcctttc

SEQ ID NO: 1917 - DNA, 33 bp, Homo sapiens
aactctgctaacaatatatgaagcatggtgaag

SEQ ID NO: 1918 - DNA, 33 bp, Homo sapiens
agtggcctcattttgctcgtgttgtgtctgtgg

SEQ ID NO: 1919 - DNA, 33 bp, Homo sapiens
gctcgtttctctgctcgcctaggatttcatgca

SEQ ID NO: 1920 - DNA, 33 bp, Homo sapiens
aggccctggtgttcccggcgcttttgcctcctg

SEQ ID NO: 1921 - DNA, 33 bp, Homo sapiens
agagtctggccaggaacccgggtgccggtggtg

SEQ ID NO: 1922 - DNA, 33 bp, Homo sapiens
tggctcccttcttaacgcaatcttttccaaggc

SEQ ID NO: 1923 - DNA, 33 bp, Homo sapiens
tttctttcctactccagattgccaactttccct

SEQ ID NO: 1924 - DNA, 33 bp, Homo sapiens
agaacggccgctacgccagcaatggtgaccttt

SEQ ID NO: 1925 - DNA, 33 bp, Homo sapiens
tagaggctggtggttatgaactgagggatgtaa

SEQ ID NO: 1926 - DNA, 33 bp, Homo sapiens
aaataaagagttagtgcatctttcaaattgttg

SEQ ID NO: 1927 - DNA, 33 bp, Homo sapiens
ataaacaggaaattactctattgattgcattgc

SEQ ID NO: 1928 - DNA, 51 bp, Homo sapiens
aggctgtgtggactgaatgcttagatgaatcattatttatttttagacctg

SEQ ID NO: 1929 - DNA, 33 bp, Homo sapiens
ttcatgctatttggtagatgaaatgccccactc

SEQ ID NO: 1930 - DNA, 33 bp, Homo sapiens
catttattaagcaccagctatgttcttagaaaa

SEQ ID NO: 1931 - DNA, 33 bp, Homo sapiens
tactcaagtttcttccgctgtttggatcccttc

SEQ ID NO: 1932 - DNA, 33 bp, Homo sapiens
ataggtgcccttgttagatgtttcatgattcta

SEQ ID NO: 1933 - DNA, 33 bp, Homo sapiens
cctcactgcttatatacccccacattctcacct

SEQ ID NO: 1934 - DNA, 33 bp, Homo sapiens
agcttagagggattaagtgatttggccaagaac

SEQ ID NO: 1935 - DNA, 33 bp, Homo sapiens
catgtggcaactgtaagtattccaattagataa

SEQ ID NO: 1936 - DNA, 33 bp, Homo sapiens
acacagaaagatctgatgatactgaggcgcatc

SEQ ID NO: 1937 - DNA, 33 bp, Homo sapiens
acctgtgcacagtggaggaacacacaggagcaa

SEQ ID NO: 1938 - DNA, 33 bp, Homo sapiens
tctgggaaggactaaatcgtgagaactccacat

SEQ ID NO: 1939 - DNA, 33 bp, Homo sapiens
gcatctttgaaaattatcctagtggctgttctc

SEQ ID NO: 1940 - DNA, 33 bp, Homo sapiens
gtgagttgtttgaagagaaaggaagataaacgg

SEQ ID NO: 1941 - DNA, 33 bp, Homo sapiens
cttgagaatagcagaggatggaattccacccag

SEQ ID NO: 1942 - DNA, 33 bp, Homo sapiens
agacaactttgggtaaggattcttgcagcagag

SEQ ID NO: 1943 - DNA, 33 bp, Homo sapiens
cccttcattaatggggtcatacatttacggctg

SEQ ID NO: 1944 - DNA, 33 bp, Homo sapiens
agcaatgctctgctaagtaataaatatcggaaa

SEQ ID NO: 1945 - DNA, 33 bp, Homo sapiens
accactcaagtgcctatgggattgtattttata

SEQ ID NO: 1946 - DNA, 33 bp, Homo sapiens
attttactcaatccccgctgacacccacgtaga

SEQ ID NO: 1947 - DNA, 33 bp, Homo sapiens
tctgtgtgtgccgagaggtactggagatttcat

SEQ ID NO: 1948 - DNA, 33 bp, Homo sapiens
acaatggcgaacacactagtataaggactaatc

SEQ ID NO: 1949 - DNA, 33 bp, Homo sapiens
actgtctaatgcaagatgaaggggtccagaaag

SEQ ID NO: 1950 - DNA, 33 bp, Homo sapiens
aggctgcagaaagacagtatctgtgcaagcggg

SEQ ID NO: 1951 - DNA, 33 bp, Homo sapiens
aggttccaggcaagcatggccccaggtattgca

SEQ ID NO: 1952 - DNA, 33 bp, Homo sapiens
gtaaaggagcagtaacgagggaatatctaccaa

SEQ ID NO: 1953 - DNA, 33 bp, Homo sapiens
aaatgtcaagagcctagcttcaaacagagtcaa

SEQ ID NO: 1954 - DNA, 33 bp, Homo sapiens
acttaacacattttgcggatctttccatttgaa

SEQ ID NO: 1955 - DNA, 33 bp, Homo sapiens
atctctctacagtggagtattttctcttccagc

SEQ ID NO: 1956 - DNA, 33 bp, Homo sapiens
ctgcagcataccaggtgaatgatcttgcaaata

SEQ ID NO: 1957 - DNA, 33 bp, Homo sapiens
atgccgaattctcgatgagtggccaccccaggg

SEQ ID NO: 1958 - DNA, 33 bp, Homo sapiens
tatctccagctcctacggcagtacccagcacac

SEQ ID NO: 1959 - DNA, 51 bp, Homo sapiens
tgatgtatacacgtatacaaaaaatgaatatcaaaacttcacattgttcac

SEQ ID NO: 1960 - DNA, 33 bp, Homo sapiens
caggccttgctttctttaaacctatcagctgct

SEQ ID NO: 1961 - DNA, 33 bp, Homo sapiens
ctccagctatttctacgctattgtaacatatat

SEQ ID NO: 1962 - DNA, 51 bp, Homo sapiens
ccttgatttgcttgcttaatatgaattacttaaaatttaattttcttctct

SEQ ID NO: 1963 - DNA, 51 bp, Homo sapiens
gcattcccttactctcttctcacctgcaagaatttataacctcttctgaga

SEQ ID NO: 1964 - DNA, 51 bp, Homo sapiens
tttttgccaaaggaaatctcaagactggtacagagttaaaaatgaagtaca

SEQ ID NO: 1965 - DNA, 51 bp, Homo sapiens
tacctcttaatactcattttgtagatagaaataagcttttttttttctttt

SEQ ID NO: 1966 - DNA, 33 bp, Homo sapiens
ctactttttagccacatcaaatacaaaaactca

SEQ ID NO: 1967 - DNA, 33 bp, Homo sapiens
aaatagccaaaccatggcataagggaagagcta

SEQ ID NO: 1968 - DNA, 33 bp, Homo sapiens
tgatttataaactagatgccaatccatggctga

SEQ ID NO: 1969 - DNA, 33 bp, Homo sapiens
gctacctcccatcaccgaaatttcagatgtcag

SEQ ID NO: 1970 - DNA, 33 bp, Homo sapiens
gcacgtgcaaagctgcggagaaaaatttgggtg

SEQ ID NO: 1971 - DNA, 33 bp, Homo sapiens
cccagtttggacaacagtcgtgtactcatgtga

SEQ ID NO: 1972 - DNA, 33 bp, Homo sapiens
ccatcttcataccaaatcaacttttacaaaggc

SEQ ID NO: 1973 - DNA, 33 bp, Homo sapiens
atgtcccatgtagttatagtattgcacacaaca

SEQ ID NO: 1974 - DNA, 33 bp, Homo sapiens
ttaaattagctctttatctcacaacaaataaat

SEQ ID NO: 1975 - DNA, 33 bp, Homo sapiens
aagattcgctggtctaggacagaggcagagtta

SEQ ID NO: 1976 - DNA, 33 bp, Homo sapiens
gcaaactccatgaacggcattgactttagagtt

SEQ ID NO: 1977 - DNA, 33 bp, Homo sapiens
catggaagggaaggtacaatatcatgaggattt

SEQ ID NO: 1978 - DNA, 33 bp, Homo sapiens
aaggttgttgagcaaagttctgattatcatttg

SEQ ID NO: 1979 - DNA, 33 bp, Homo sapiens
ttggctaaaaacttactgagctagagttagcct

SEQ ID NO: 1980 - DNA, 33 bp, Homo sapiens
cattttattgatcaccgagggaatggtctcaat

SEQ ID NO: 1981 - DNA, 33 bp, Homo sapiens
tgcaaagggacacatctctttatcaacaccatt

SEQ ID NO: 1982 - DNA, 33 bp, Homo sapiens
tgagttgggacaagaattcagtggcctgctggg

SEQ ID NO: 1983 - DNA, 33 bp, Homo sapiens
ggacagcggggatccagtcagcacagttcacag

SEQ ID NO: 1984 - DNA, 33 bp, Homo sapiens
cctcctcttctatcactattgtgttgcctcctc

SEQ ID NO: 1985 - DNA, 33 bp, Homo sapiens
tgaatttataactcacgctgtccctttaaataa

SEQ ID NO: 1986 - DNA, 33 bp, Homo sapiens
atcttcatgaaaagactggaaagatatacatcc

SEQ ID NO: 1987 - DNA, 33 bp, Homo sapiens
gatcaattgtttataatattcacctagattata

SEQ ID NO: 1988 - DNA, 51 bp, Homo sapiens
ccaaaattcataaattcttcagtactaatattcaatgtttgaaacaaacag

SEQ ID NO: 1989 - DNA, 33 bp, Homo sapiens
tgcgagtgtagatgaactaaaaatagcaaaatg

SEQ ID NO: 1990 - DNA, 33 bp, Homo sapiens
ttcaggtccgtgtgtctcatttcactgcactgt

SEQ ID NO: 1991 - DNA, 33 bp, Homo sapiens
cttgactgcaaagccagtgatgtatctatctcg

SEQ ID NO: 1992 - DNA, 33 bp, Homo sapiens
aaagaactaaataaacggaaagacgtcctatgt

SEQ ID NO: 1993 - DNA, 51 bp, Homo sapiens
gcattttttttttcagtgtaaatccgccctttattgcctccaaaaagatat

SEQ ID NO: 1994 - DNA, 33 bp, Homo sapiens
ctgttgtttgttcttatcactagtttcctgttt

SEQ ID NO: 1995 - DNA, 33 bp, Homo sapiens
cttttctactgcaaggtatcataagctaccaat

SEQ ID NO: 1996 - DNA, 33 bp, Homo sapiens
taaggttctcactccgtcctccgtgtccttgat

SEQ ID NO: 1997 - DNA, 33 bp, Homo sapiens
gttggcaggatctgcaggtttgccacctgaggc

SEQ ID NO: 1998 - DNA, 33 bp, Homo sapiens
gaagtgagaacctctcgaaatcgatcacctatg

SEQ ID NO: 1999 - DNA, 33 bp, Homo sapiens
tccagaggctctggtcgcttgaaaagatgagct

SEQ ID NO: 2000 - DNA, 33 bp, Homo sapiens
tgctactgacaggcactgagaggctgaatggag

SEQ ID NO: 2001 - DNA, 33 bp, Homo sapiens
gagcatgctccttcccgaagctgattcgtggcc

SEQ ID NO: 2002 - DNA, 33 bp, Homo sapiens
atcagatgtgccgtctgagaacccgggcacggt

SEQ ID NO: 2003 - DNA, 33 bp, Homo sapiens
gtggaggagtttgggatgcacttcagaagaata

SEQ ID NO: 2004 - DNA, 51 bp, Homo sapiens
ttcgtgatcttgaccacacaataaaggctggtatctctcaaactgacatct

SEQ ID NO: 2005 - DNA, 51 bp, Homo sapiens
tcagttgcagtccctgggtattgaagagcatgaacagaaatgaagacaaaa

SEQ ID NO: 2006 - DNA, 33 bp, Homo sapiens
ctgttctgcgaaaaagccctcatatcttctcag

SEQ ID NO: 2007 - DNA, 33 bp, Homo sapiens
gagggcaggtatcacattgtacactttccacaa

SEQ ID NO: 2008 - DNA, 33 bp, Homo sapiens
gctggtgggaatgtaacgcgtgcggctgctggg

SEQ ID NO: 2009 - DNA, 33 bp, Homo sapiens
caccagataccacctatgttctgtaacttctca

SEQ ID NO: 2010 - DNA, 33 bp, Homo sapiens
ttgactaatacagacagataagtgctattgttt

SEQ ID NO: 2011 - DNA, 33 bp, Homo sapiens
gaagtggcctgagaaagcaataaagagagggcg

SEQ ID NO: 2012 - DNA, 33 bp, Homo sapiens
tgagcctcaggcttacggctaaaatgttaagtg

SEQ ID NO: 2013 - DNA, 33 bp, Homo sapiens
tagaagggcggacttgtatctgagagagaataa

SEQ ID NO: 2014 - DNA, 33 bp, Homo sapiens
acctattaagacatgagcttacactctgacaac

SEQ ID NO: 2015 - DNA, 33 bp, Homo sapiens
gtgtgcatgctgttgatgtaagtagtaagagtt

SEQ ID NO: 2016 - DNA, 33 bp, Homo sapiens
gaagttgtcatcaaaatcagaagaaagtcatgg

SEQ ID NO: 2017 - DNA, 33 bp, Homo sapiens
ccctgtgaccagtgccgcgggagtcctgagggt

SEQ ID NO: 2018 - DNA, 33 bp, Homo sapiens
ggtgagtgagagtaaagctagggaggaagagtt

SEQ ID NO: 2019 - DNA, 33 bp, Homo sapiens
attgattttctgagacgactgtgctcatctcat

SEQ ID NO: 2020 - DNA, 33 bp, Homo sapiens
caaatacctatttacatctcatgctctattaag

SEQ ID NO: 2021 - DNA, 33 bp, Homo sapiens
ccaatgtaaggttgaagtcaacaccctccatat

SEQ ID NO: 2022 - DNA, 33 bp, Homo sapiens
atttgcaggcaaataggaagacaaggagattat

SEQ ID NO: 2023 - DNA, 33 bp, Homo sapiens
aaagtgtaaactgcaatatatgctggaagttgt

SEQ ID NO: 2024 - DNA, 33 bp, Homo sapiens
tgaatgacctgctctataaatggcctgcaagag

SEQ ID NO: 2025 - DNA, 33 bp, Homo sapiens
actcagttcgaccacctgctttatcctttggat

SEQ ID NO: 2026 - DNA, 51 bp, Homo sapiens
agcagccttctaaaagctgtaaaagtcaagaaaatgaattctccccagagc

SEQ ID NO: 2027 - DNA, 33 bp, Homo sapiens
acaattgtcaaggaaatttgttaactctgtggc

SEQ ID NO: 2028 - DNA, 33 bp, Homo sapiens
acttctgctttttccatacaacatgcacagata

SEQ ID NO: 2029 - DNA, 33 bp, Homo sapiens
tgaccatctactcaaggctaaccacttttcata

SEQ ID NO: 2030 - DNA, 33 bp, Homo sapiens
aaacatgactaagagacaagagagcaagtgagg

SEQ ID NO: 2031 - DNA, 51 bp, Homo sapiens
agaaattgatgatgccctgactctgcagctactatgggaaaagtatttgaa

SEQ ID NO: 2032 - DNA, 33 bp, Homo sapiens
cttgacaacatgcaatgacacatgataacatta

SEQ ID NO: 2033 - DNA, 33 bp, Homo sapiens
gccagcttgtagtgaatgctgcctggtctgggc

SEQ ID NO: 2034 - DNA, 33 bp, Homo sapiens
aaatggatgagaacaatatataataactgtatt

SEQ ID NO: 2035 - DNA, 33 bp, Homo sapiens
ctgtagtgatgtgttcgataaaaagtggccagc

SEQ ID NO: 2036 - DNA, 33 bp, Homo sapiens
cctggggcaatgtggagccatagagggctatgg

SEQ ID NO: 2037 - DNA, 33 bp, Homo sapiens
attgaaggtcattcccgaggtcattgaacctgg

SEQ ID NO: 2038 - DNA, 33 bp, Homo sapiens
gcccctctcctttagcgccctatctgcaggcac

SEQ ID NO: 2039 - DNA, 33 bp, Homo sapiens
tctttaaccaagaggcggaatattcatgatcat

SEQ ID NO: 2040 - DNA, 33 bp, Homo sapiens
tgagccttcatcagactacagatctactggcac

SEQ ID NO: 2041 - DNA, 33 bp, Homo sapiens
atcctaacgagaataaggcaaggcttagcctgt

SEQ ID NO: 2042 - DNA, 33 bp, Homo sapiens
aagaatctctgctttagcggaagacctgtttcg

SEQ ID NO: 2043 - DNA, 33 bp, Homo sapiens
catacacggtagaagataatattttcaaaacat

SEQ ID NO: 2044 - DNA, 33 bp, Homo sapiens
aggaaaagggctcaaatctcctgtttacctgtt

SEQ ID NO: 2045 - DNA, 33 bp, Homo sapiens
gttatctactttcttcgatatggattagccact

SEQ ID NO: 2046 - DNA, 33 bp, Homo sapiens
ggacttattctggcacgcaatagttaaacacag

SEQ ID NO: 2047 - DNA, 33 bp, Homo sapiens
tgccttctaatgtgcttacatctcatactctgt

SEQ ID NO: 2048 - DNA, 33 bp, Homo sapiens
tgatcaccctgatgaatggtgatatatcaaggg

SEQ ID NO: 2049 - DNA, 33 bp, Homo sapiens
cactgggtggagaatatggttgtctagacgttt

SEQ ID NO: 2050 - DNA, 33 bp, Homo sapiens
tggaggtccagagagagtacagtttacttccta

SEQ ID NO: 2051 - DNA, 33 bp, Homo sapiens
ctactttgtaactaaggacactcttaatggtag

SEQ ID NO: 2052 - DNA, 51 bp, Homo sapiens
agaggatagtctcaacatccttcaaggtgacatttctttaaagatattaac

SEQ ID NO: 2053 - DNA, 33 bp, Homo sapiens
gtttagaatagatgggtactttggctctatgtt

SEQ ID NO: 2054 - DNA, 51 bp, Homo sapiens
cttcatgatccaaaggcttgtgaaatagagagagaattatctcctctcttc

SEQ ID NO: 2055 - DNA, 33 bp, Homo sapiens
tcttgggaatagaggtgaaatgacggattgtaa

SEQ ID NO: 2056 - DNA, 33 bp, Homo sapiens
aagaaaaaaaaatgcagtacggcttggaacatg

SEQ ID NO: 2057 - DNA, 33 bp, Homo sapiens
ctttgccaggctctcattcttctctctccggct

SEQ ID NO: 2058 - DNA, 51 bp, Homo sapiens
ccaccctcacactgccccctactagtgttactgtgtccacatttttaccaa

SEQ ID NO: 2059 - DNA, 33 bp, Homo sapiens
ggctgattaatgttactggagaagctgtaacta

SEQ ID NO: 2060 - DNA, 51 bp, Homo sapiens
gacttaggaaagccaatccagtgcatagcagaataaaagtaaaaaatatat

SEQ ID NO: 2061 - DNA, 51 bp, Homo sapiens
ctgtgccaaaacattactgaaaacattactggacccttgtttgcattcatt

SEQ ID NO: 2062 - DNA, 33 bp, Homo sapiens
ccgaaaatgtcagaaagtgaggagagaagaaaa

SEQ ID NO: 2063 - DNA, 33 bp, Homo sapiens
gaaatggagcagcatatgtggcataatcaatct

SEQ ID NO: 2064 - DNA, 51 bp, Homo sapiens
ggcaaaacatattatacttaaggcattgcccctattttcctgataattgcg

SEQ ID NO: 2065 - DNA, 33 bp, Homo sapiens
gagaaggtcagtaacattcaacggtcaagacca

SEQ ID NO: 2066 - DNA, 33 bp, Homo sapiens
aagttactctgtaggctccctaatcaacttggc

SEQ ID NO: 2067 - DNA, 33 bp, Homo sapiens
atctcagagaagctcatagtacaaatcatgtac

SEQ ID NO: 2068 - DNA, 33 bp, Homo sapiens
tcttatagccacaatggattatttgtttttatt

SEQ ID NO: 2069 - DNA, 33 bp, Homo sapiens
ctacacgctgtcaacatgacttacctctcacga

SEQ ID NO: 2070 - DNA, 33 bp, Homo sapiens
ctctcagggtactaaatggcagccttagctccc

SEQ ID NO: 2071 - DNA, 33 bp, Homo sapiens
agctctgagcacagagtactattaggttgatgc

SEQ ID NO: 2072 - DNA, 51 bp, Homo sapiens
cggggctcaggatccagtggctctcttacctccttttccttcacgtgggtt

SEQ ID NO: 2073 - DNA, 33 bp, Homo sapiens
tttcattatcttttcccgaatgtcctttcacta

SEQ ID NO: 2074 - DNA, 33 bp, Homo sapiens
agaaggaaaagattgctactcaccacttgttac

SEQ ID NO: 2075 - DNA, 51 bp, Homo sapiens
taaaaattttcaataatcaataatagctgctggagaggggacaacaggtag

SEQ ID NO: 2076 - DNA, 33 bp, Homo sapiens
ggctgcactcattgcagggctgactagctccag

SEQ ID NO: 2077 - DNA, 33 bp, Homo sapiens
tttgataagctctgccgaatggaaatagccacc

SEQ ID NO: 2078 - DNA, 33 bp, Homo sapiens
accatagttctgaatatgcttagatctttattt

SEQ ID NO: 2079 - DNA, 33 bp, Homo sapiens
gataaatttagacaaagtcagagctatgaggac

SEQ ID NO: 2080 - DNA, 33 bp, Homo sapiens
taacaaggaggtttaagtggtgaagtatgaagt

SEQ ID NO: 2081 - DNA, 33 bp, Homo sapiens
cccaactataattatggatgtctctgtttttcc

SEQ ID NO: 2082 - DNA, 33 bp, Homo sapiens
ccacctcagtactgaccattcctggctttccct

SEQ ID NO: 2083 - DNA, 33 bp, Homo sapiens
tcttcatactctatgcgccattcattaatgggt

SEQ ID NO: 2084 - DNA, 33 bp, Homo sapiens
gatattagggatactaggcaattgtcacctact

SEQ ID NO: 2085 - DNA, 33 bp, Homo sapiens
attgttgaataagtgacatgtttgttgaacaaa

SEQ ID NO: 2086 - DNA, 51 bp, Homo sapiens
ctcttctattttctgaacctagtaggacatgatggagctgaagagattccc

SEQ ID NO: 2087 - DNA, 33 bp, Homo sapiens
aataaaagacactgaataaagataggcctttta

SEQ ID NO: 2088 - DNA, 33 bp, Homo sapiens
tttaatacacggcttctctataagatattatgt

SEQ ID NO: 2089 - DNA, 33 bp, Homo sapiens
tattcttgacataagctctcctgaggcaggaag

SEQ ID NO: 2090 - DNA, 51 bp, Homo sapiens
gggagttgcccctctcctttaatgatatgtaactgaattttgaacatcagg

SEQ ID NO: 2091 - DNA, 33 bp, Homo sapiens
cccaaagggaaactccgaaaatgtagaaaagaa

SEQ ID NO: 2092 - DNA, 51 bp, Homo sapiens
tctctaagtcctcacttaagttacattggtgttgtgccactcttttctgaa

SEQ ID NO: 2093 - DNA, 51 bp, Homo sapiens
tgcacattagaaaaagagtttatacggccctcacatgagcacgcctggctt

SEQ ID NO: 2094 - DNA, 51 bp, Homo sapiens
agttttagagaggacacgttgaaacgatagcagcagacctccattttccca

SEQ ID NO: 2095 - DNA, 33 bp, Homo sapiens
accagaaaaagaccacgacttagaaataaagct

SEQ ID NO: 2096 - DNA, 33 bp, Homo sapiens
atgcaatgagatgagagcctgtgaagctgcgac

SEQ ID NO: 2097 - DNA, 33 bp, Homo sapiens
cgaaccaactcaagtaggagccagaggttgtgt

SEQ ID NO: 2098 - DNA, 51 bp, Homo sapiens
tatagtctaagttactagaaccagatagccaggtgttaagttgaagaattt

SEQ ID NO: 2099 - DNA, 33 bp, Homo sapiens
gcaacagtgaatttgatgttcttttattatagg

SEQ ID NO: 2100 - DNA, 33 bp, Homo sapiens
ctctggacccatcttatatttcgtatccttata

SEQ ID NO: 2101 - DNA, 33 bp, Homo sapiens
tcccagagcctgaaactgtgacaaagaggacat

SEQ ID NO: 2102 - DNA, 33 bp, Homo sapiens
acagaaaaaaatcagcgaaactcaaagaggcag

SEQ ID NO: 2103 - DNA, 33 bp, Homo sapiens
gatgaaggtgctattaggagatgggaatgggtg

SEQ ID NO: 2104 - DNA, 33 bp, Homo sapiens
ttgactcctggcttcagaaactctcacaacggc

SEQ ID NO: 2105 - DNA, 33 bp, Homo sapiens
agcacatggtgaaacagaagagtgttgcaacgc

SEQ ID NO: 2106 - DNA, 33 bp, Homo sapiens
gcttcaatggcctacagaatagcttatctttag

SEQ ID NO: 2107 - DNA, 33 bp, Homo sapiens
gtgcaaggcccgggaatgttctggaatcaatca

SEQ ID NO: 2108 - DNA, 33 bp, Homo sapiens
aatgggtagaggtccctctcagttcaggctctg

SEQ ID NO: 2109 - DNA, 33 bp, Homo sapiens
tagattcctaggccagtagttttcgttgcactt

SEQ ID NO: 2110 - DNA, 33 bp, Homo sapiens
tagctgacaaaagatatgatttttccactccag

SEQ ID NO: 2111 - DNA, 33 bp, Homo sapiens
taactgctttattcaccaatctctatttatcca

SEQ ID NO: 2112 - DNA, 33 bp, Homo sapiens
aagggaaggactgtgcgagcaactccctagccc

SEQ ID NO: 2113 - DNA, 33 bp, Homo sapiens
cccaaagctacttttctcttgtatcctcggact

SEQ ID NO: 2114 - DNA, 33 bp, Homo sapiens
ttctgggtatgcaagagtaagttcctgaacata

SEQ ID NO: 2115 - DNA, 33 bp, Homo sapiens
gagtggaacggagtaagtaaagtattctggctg

SEQ ID NO: 2116 - DNA, 33 bp, Homo sapiens
tggcctccggatatcatgctctcctagtttttc

SEQ ID NO: 2117 - DNA, 33 bp, Homo sapiens
acagctggcctgcactcaaaaaaatgtctagtc

SEQ ID NO: 2118 - DNA, 51 bp, Homo sapiens
cattatatgaagtagattgggatcagacttaccaatattagctgtggccgg

SEQ ID NO: 2119 - DNA, 33 bp, Homo sapiens
ctcagtacacaaaaaacaatattgccacccagg

SEQ ID NO: 2120 - DNA, 33 bp, Homo sapiens
gaaatgctgctgcctatattactgttttgtgag

SEQ ID NO: 2121 - DNA, 33 bp, Homo sapiens
tgaccctagtttccagtctctttccactaattt

SEQ ID NO: 2122 - DNA, 51 bp, Homo sapiens
gtagttcaggacaggaaagggaatatgtttgtgcctgttgagggtcatcag

SEQ ID NO: 2123 - DNA, 33 bp, Homo sapiens
gttactggggctttcaggaaagagcaatggaca

SEQ ID NO: 2124 - DNA, 33 bp, Homo sapiens
cttaagtcccttccaatgctactggttactcgg

SEQ ID NO: 2125 - DNA, 33 bp, Homo sapiens
cctctaggctcattcatgttacctcagatgaca

SEQ ID NO: 2126 - DNA, 33 bp, Homo sapiens
cttgagaatggaatgagctttgtactggtaaca

SEQ ID NO: 2127 - DNA, 33 bp, Homo sapiens
gccaccagcaactgaatggtttccgcacagcac

SEQ ID NO: 2128 - DNA, 33 bp, Homo sapiens
ctagttaaaaccgactgaggcatgtccttcagg

SEQ ID NO: 2129 - DNA, 33 bp, Homo sapiens
tggagtgtaatggcaaggtgtaagctcactgca

SEQ ID NO: 2130 - DNA, 33 bp, Homo sapiens
gtaagcagaagtaatatgagcatttttagagac

SEQ ID NO: 2131 - DNA, 33 bp, Homo sapiens
gtctgcggataggagagatttaatctagtgcat

SEQ ID NO: 2132 - DNA, 33 bp, Homo sapiens
cgtctgctcatctgtcggaagtgttacaattcc

SEQ ID NO: 2133 - DNA, 33 bp, Homo sapiens
gaaaacaccaagagaaggaagtcatacccatcc

SEQ ID NO: 2134 - DNA, 33 bp, Homo sapiens
ctattgaatgattccattgatagaaaatgtcta

SEQ ID NO: 2135 - DNA, 33 bp, Homo sapiens
cagaaatgtgaattaagcagaatttttttaggg

SEQ ID NO: 2136 - DNA, 33 bp, Homo sapiens
ggatacttgaacttcattgaaagcctcttggtg

SEQ ID NO: 2137 - DNA, 33 bp, Homo sapiens
caactgttcagagctaggaacaaataggagaat

SEQ ID NO: 2138 - DNA, 33 bp, Homo sapiens
gaggacgcttgaacacgcaggcctgaaactcat

SEQ ID NO: 2139 - DNA, 33 bp, Homo sapiens
ttcaatgtgcatttcagattaataacgaacaat

SEQ ID NO: 2140 - DNA, 33 bp, Homo sapiens
gatatacttatatgaacaaatgacttgcttttt

SEQ ID NO: 2141 - DNA, 51 bp, Homo sapiens
cacacacacacagtgtaccaggatggagcatgtttttagactcggccgttt

SEQ ID NO: 2142 - DNA, 33 bp, Homo sapiens
catgatcttcttgccatgtcaggtgacctgctc

SEQ ID NO: 2143 - DNA, 33 bp, Homo sapiens
tagatgatcgttattcgctgtcaagttataata

SEQ ID NO: 2144 - DNA, 33 bp, Homo sapiens
gttgattaggaaacaagtacttctacagtaata

SEQ ID NO: 2145 - DNA, 33 bp, Homo sapiens
tggattcaatgccaaatatccgacaatgagcaa

SEQ ID NO: 2146 - DNA, 33 bp, Homo sapiens
aaagccctgtgagggaggaaattgccctgtatc

SEQ ID NO: 2147 - DNA, 33 bp, Homo sapiens
ccaagcacttctgttcgcgtcatctcctttgac

SEQ ID NO: 2148 - DNA, 33 bp, Homo sapiens
acattattagacctcaggtgttgtgggaaatac

SEQ ID NO: 2149 - DNA, 33 bp, Homo sapiens
tctcagccctgattaggcacaaagtaggatgcc

SEQ ID NO: 2150 - DNA, 51 bp, Homo sapiens
gacagcctcagctccttctgttcaagcagaagttctgactcccagtgtcct

SEQ ID NO: 2151 - DNA, 33 bp, Homo sapiens
tcgctgctatcccagatgttgcttgagaacaag

SEQ ID NO: 2152 - DNA, 33 bp, Homo sapiens
tcgagaagggccagtatattttccagttaccta

SEQ ID NO: 2153 - DNA, 33 bp, Homo sapiens
tcgatggctccaagaagctggtgacttaggctt

SEQ ID NO: 2154 - DNA, 33 bp, Homo sapiens
catctcggagccaagagagactcaaacaagagc

SEQ ID NO: 2155 - DNA, 33 bp, Homo sapiens
ggattcatggcaataatgaagataaatatcaag

SEQ ID NO: 2156 - DNA, 33 bp, Homo sapiens
ttcaattatccaaacagctgtcatgaagaaagg

SEQ ID NO: 2157 - DNA, 33 bp, Homo sapiens
cagtggaactccagtagcaatgagtgcatggtg

SEQ ID NO: 2158 - DNA, 33 bp, Homo sapiens
tcttaactccttcgtctgaaagcagtggaactc

SEQ ID NO: 2159 - DNA, 33 bp, Homo sapiens
acacagaattagaagagactactatgtgcaact

SEQ ID NO: 2160 - DNA, 33 bp, Homo sapiens
ctaaagagtatgaaacgggatccaattgtaatt

SEQ ID NO: 2161 - DNA, 51 bp, Homo sapiens
cttggtgaaaggaatgtagtgaatcgataatcattaacgagctgtctggtc

SEQ ID NO: 2162 - DNA, 51 bp, Homo sapiens
ggtccttcctttctttgtgagaacatgtcttgggtagcctctggatgaagg

SEQ ID NO: 2163 - DNA, 51 bp, Homo sapiens
ctgcatattttcccttgtattagtcgcctttatccacaataattctgcaca

SEQ ID NO: 2164 - DNA, 51 bp, Homo sapiens
agaggatgttattgactaaaatcagttggtggaagtgagacagtagcattg

SEQ ID NO: 2165 - DNA, 33 bp, Homo sapiens
cacacattgaagcccggcatgatgccaatcagc

SEQ ID NO: 2166 - DNA, 33 bp, Homo sapiens
gtggcctgtgagaaaggaaacctggactgaagt

SEQ ID NO: 2167 - DNA, 33 bp, Homo sapiens
cagctggctgatctgaggaactaagaggctgta

SEQ ID NO: 2168 - DNA, 33 bp, Homo sapiens
tcctgttagactcatatccatgaccagagtcag

SEQ ID NO: 2169 - DNA, 33 bp, Homo sapiens
tgattgttcattaatgtcaacaagtatttattg

SEQ ID NO: 2170 - DNA, 33 bp, Homo sapiens
gaggaaaagacctttacggtgaccaactgtcct

SEQ ID NO: 2171 - DNA, 33 bp, Homo sapiens
ggtgataaaatgggaagcttcaactgtacttgt

SEQ ID NO: 2172 - DNA, 51 bp, Homo sapiens
atttctctgtctcagatctaggaagtaaaccctgcctctgctgtctctgtc

SEQ ID NO: 2173 - DNA, 51 bp, Homo sapiens
gatctttagttcctgccaacctgtcgcaactcaaggattaaactaaacatt

SEQ ID NO: 2174 - DNA, 33 bp, Homo sapiens
aatcatttgaccactggatagctccagctttga

SEQ ID NO: 2175 - DNA, 33 bp, Homo sapiens
atttatgtcctgttgattagttttgttgactga

SEQ ID NO: 2176 - DNA, 51 bp, Homo sapiens
ccagagatggcaccaactatgaagagtatctttgaggaccacatgaagagc

SEQ ID NO: 2177 - DNA, 33 bp, Homo sapiens
agctgggatatctgaatgcgcccactgagttgc

SEQ ID NO: 2178 - DNA, 33 bp, Homo sapiens
ttgtttaaccaacaccgcttaatggctacaggt

SEQ ID NO: 2179 - DNA, 33 bp, Homo sapiens
cagactccataagaaatgaccctacgagacaaa

SEQ ID NO: 2180 - DNA, 51 bp, Homo sapiens
gaacataaaatcctaagctgaggaggactgtaagagattgcctggtctggc

SEQ ID NO: 2181 - DNA, 51 bp, Homo sapiens
ttcttccctgctcagtagatgggaattaccctcattgtatagaatttctgt

SEQ ID NO: 2182 - DNA, 51 bp, Homo sapiens
ttcactccttaagacctctttaagagcaagaactatgtggagagatcctct

SEQ ID NO: 2183 - DNA, 33 bp, Homo sapiens
ctcaggccagaccccatatttgatgtgatatgc

SEQ ID NO: 2184 - DNA, 51 bp, Homo sapiens
aagtgccctctactgagggatgcaatgattcctatttctgtcactcctctc

SEQ ID NO: 2185 - DNA, 51 bp, Homo sapiens
tcacctgaaggtttgttaaagcacagattgctgggcctcattcacagtttc

SEQ ID NO: 2186 - DNA, 33 bp, Homo sapiens
agtttccagcagaatatagagaatggaggggag

SEQ ID NO: 2187 - DNA, 33 bp, Homo sapiens
caatgttgcagcagtatgaggaccaagagaatt

SEQ ID NO: 2188 - DNA, 33 bp, Homo sapiens
gagtgtctaggccaaatgttcatcttctttatt

SEQ ID NO: 2189 - DNA, 33 bp, Homo sapiens
cattaaatgtgaaccatgagactaacagcacaa

SEQ ID NO: 2190 - DNA, 33 bp, Homo sapiens
gaaaaaactttatagcgcagcaatggtctaatc

SEQ ID NO: 2191 - DNA, 51 bp, Homo sapiens
aggttgatttatatttggtagtttagcttttcattataaactcaatattct

SEQ ID NO: 2192 - DNA, 51 bp, Homo sapiens
gtgctgtcataagaaagtgtgtagatctgaacaggagcatgtctgatgtct

SEQ ID NO: 2193 - DNA, 33 bp, Homo sapiens
taaaaagtaccaagcataaattctggaactgaa

SEQ ID NO: 2194 - DNA, 33 bp, Homo sapiens
agattagttacatgaagaagcttgttgaaatag

SEQ ID NO: 2195 - DNA, 51 bp, Homo sapiens
ctggtacatcatgtgatatgagaactatggtaggcaatcaataatgcagag

SEQ ID NO: 2196 - DNA, 33 bp, Homo sapiens
cgatccttcccttctacgcagtaacctcatcgg

SEQ ID NO: 2197 - DNA, 33 bp, Homo sapiens
ggaaaactcccttgtatacttgtgaaataataa

SEQ ID NO: 2198 - DNA, 33 bp, Homo sapiens
tagtttttcgaccttatgtaaatcacttaaatt

SEQ ID NO: 2199 - DNA, 33 bp, Homo sapiens
tgataaaagctctagattccaacagagaactaa

SEQ ID NO: 2200 - DNA, 33 bp, Homo sapiens
tgcttgtatcaaaacatatcaggtatccgataa

SEQ ID NO: 2201 - DNA, 33 bp, Homo sapiens
aactaataatcttcacgggaagcccaagctctt

SEQ ID NO: 2202 - DNA, 33 bp, Homo sapiens
gcatattacttcagaattgtgcttaacctttct

SEQ ID NO: 2203 - DNA, 33 bp, Homo sapiens
acccacccagaataagcaaagagctgcaaatat

SEQ ID NO: 2204 - DNA, 33 bp, Homo sapiens
aaaggttcttgggatcgaggtgtgtaatatgtg

SEQ ID NO: 2205 - DNA, 33 bp, Homo sapiens
tttgtttgttgagacagtcattttctctcactg

SEQ ID NO: 2206 - DNA, 33 bp, Homo sapiens
tcctagctctctcaggtacgcattgcaaagcaa

SEQ ID NO: 2207 - DNA, 33 bp, Homo sapiens
catttagtaaataaaggaagtcatagcctagtt

SEQ ID NO: 2208 - DNA, 33 bp, Homo sapiens
caggagtataaatcactctaacaacaatgtggc

SEQ ID NO: 2209 - DNA, 33 bp, Homo sapiens
ctttcaccctgtcacctatgttagctctaaacc

SEQ ID NO: 2210 - DNA, 33 bp, Homo sapiens
attttccaacatcctctcgaatcccatctgcaa

SEQ ID NO: 2211 - DNA, 33 bp, Homo sapiens
aaggttccctgtagaattgtccctcagcagttg

SEQ ID NO: 2212 - DNA, 33 bp, Homo sapiens
atttgcgcgctatgcatgtgaaaaaggtctaat

SEQ ID NO: 2213 - DNA, 33 bp, Homo sapiens
tgcttaaatttggtcatctgtgaaatgaaggtt

SEQ ID NO: 2214 - DNA, 51 bp, Homo sapiens
tgagggaactctattagaagagaaatgtctgcctttgacaatgcttattaa

SEQ ID NO: 2215 - DNA, 33 bp, Homo sapiens
aaggcaaagctatggagacacaaaaagatcagt

SEQ ID NO: 2216 - DNA, 33 bp, Homo sapiens
tttctggtctttcatatgactttagacctcaaa

SEQ ID NO: 2217 - DNA, 33 bp, Homo sapiens
atattcagcagtaagaggctgggacattttctt

SEQ ID NO: 2218 - DNA, 51 bp, Homo sapiens
tcttcatttctgacacacagctagatgacacttaccagctttcttgcagtg

SEQ ID NO: 2219 - DNA, 33 bp, Homo sapiens
gcttcatgtctgtctaggtacaggtcttattat

SEQ ID NO: 2220 - DNA, 33 bp, Homo sapiens
gcaaggagactttggacatttgtcaagagctag

SEQ ID NO: 2221 - DNA, 33 bp, Homo sapiens
ttataaagggaaggcagatatgtataagtcatt

SEQ ID NO: 2222 - DNA, 33 bp, Homo sapiens
tcttatttttctcatctcgtcttctcacaatgg

SEQ ID NO: 2223 - DNA, 33 bp, Homo sapiens
tgtttgacttctgggagagctggatccgttttc

SEQ ID NO: 2224 - DNA, 51 bp, Homo sapiens
tactttttcatttcattgtaaccctgaaatattatctttctcctccttggt

SEQ ID NO: 2225 - DNA, 33 bp, Homo sapiens
ctgtagcacctctatacactaacaatgaactat

SEQ ID NO: 2226 - DNA, 33 bp, Homo sapiens
gaatccctctctacaagtgaatccccacgaagc

SEQ ID NO: 2227 - DNA, 33 bp, Homo sapiens
gaggctgacacaactctactagtattttgcttc

SEQ ID NO: 2228 - DNA, 33 bp, Homo sapiens
gagaactaaggtaaaaggacaagacacaatgag

SEQ ID NO: 2229 - DNA, 33 bp, Homo sapiens
tctatacgccattacctctaaagtttacatatt

SEQ ID NO: 2230 - DNA, 33 bp, Homo sapiens
gatatcattccttccatctctctgaacatcagc

SEQ ID NO: 2231 - DNA, 33 bp, Homo sapiens
tccatccttcctcccgtattccttctcccaaag

SEQ ID NO: 2232 - DNA, 33 bp, Homo sapiens
aacaaggagtatacagtcggatgctgatgtgtt

SEQ ID NO: 2233 - DNA, 33 bp, Homo sapiens
ggtattggcagtactatattttaagacattttc

SEQ ID NO: 2234 - DNA, 33 bp, Homo sapiens
gagtggctctcctacagtcgtgtggcttggggt

SEQ ID NO: 2235 - DNA, 33 bp, Homo sapiens
agcttgtgccttcttatggataacccactcagg

SEQ ID NO: 2236 - DNA, 33 bp, Homo sapiens
aactaatcacatgggatgcccacttcagttagc

SEQ ID NO: 2237 - DNA, 51 bp, Homo sapiens
taaagagaaatgaagaaccacagtatggagtacttttctgcattgggtagg

SEQ ID NO: 2238 - DNA, 33 bp, Homo sapiens
gaagccttttagaacattgacaagtaaataatc

SEQ ID NO: 2239 - DNA, 33 bp, Homo sapiens
ttaatgggattctgcagcacaaatctagtccct

SEQ ID NO: 2240 - DNA, 51 bp, Homo sapiens
agcgaacttgtggacgggtttgctatagcggtgttacacttagatgaggaa

SEQ ID NO: 2241 - DNA, 33 bp, Homo sapiens
tggaagatttgcatccgcttccacaagctgcta

SEQ ID NO: 2242 - DNA, 33 bp, Homo sapiens
gcgaaaagaaccctgcgaagctatcacagagat

SEQ ID NO: 2243 - DNA, 33 bp, Homo sapiens
aatgtaaccactatcctgagaccagcaccatag

SEQ ID NO: 2244 - DNA, 33 bp, Homo sapiens
attagttggcataaaatagctttcaggctttta

SEQ ID NO: 2245 - DNA, 33 bp, Homo sapiens
gaacatttctggggacgaggacttcttatacaa

SEQ ID NO: 2246 - DNA, 33 bp, Homo sapiens
cagcactaattgacaataaataagtgataaata

SEQ ID NO: 2247 - DNA, 33 bp, Homo sapiens
gattgtaaacaactgccaacacaggcactagac

SEQ ID NO: 2248 - DNA, 33 bp, Homo sapiens
cttttctcgactgtaacatttctaggttgatga

SEQ ID NO: 2249 - DNA, 33 bp, Homo sapiens
tgctttaaaacagcactgtcggccgggcatggt

SEQ ID NO: 2250 - DNA, 33 bp, Homo sapiens
ccgtcaggttctaccttaaatctatgtggagcg

SEQ ID NO: 2251 - DNA, 33 bp, Homo sapiens
aggtaagtcatgtaaatttctttgcacagtccc

SEQ ID NO: 2252 - DNA, 33 bp, Homo sapiens
tcatgaaattctccagtaactttttctgctctg

SEQ ID NO: 2253 - DNA, 33 bp, Homo sapiens
attcatttccagagatgactaaaaatcagagat

SEQ ID NO: 2254 - DNA, 33 bp, Homo sapiens
gcaaagcagagcatcagcctttccagcaaatcc

SEQ ID NO: 2255 - DNA, 33 bp, Homo sapiens
tgattcactgaactagtcagagtggctcagatc

SEQ ID NO: 2256 - DNA, 33 bp, Homo sapiens
atattctgaggtaggctcattccagcatgatga

SEQ ID NO: 2257 - DNA, 33 bp, Homo sapiens
atatatactgagcaaagtaaatatctagggtac

SEQ ID NO: 2258 - DNA, 33 bp, Homo sapiens
tgtcaagtaaaagtcagtagcctagagatgtgt

SEQ ID NO: 2259 - DNA, 33 bp, Homo sapiens
gatatgctaactatcctgatctaatcactaccc

SEQ ID NO: 2260 - DNA, 33 bp, Homo sapiens
tagaactcaaaactgatgaaacacaaagcaaag

SEQ ID NO: 2261 - DNA, 33 bp, Homo sapiens
atacagctatctgataccagaacttgaactgga

SEQ ID NO: 2262 - DNA, 33 bp, Homo sapiens
tggaagtccgtacttggcattttctcttaagtt

SEQ ID NO: 2263 - DNA, 33 bp, Homo sapiens
acaataattactctacgacaagcgttattattt

SEQ ID NO: 2264 - DNA, 33 bp, Homo sapiens
cactctgaaatcactatgtcatactcccttgca

SEQ ID NO: 2265 - DNA, 33 bp, Homo sapiens
gtccagcacttgagacgctacagagggctgcag

SEQ ID NO: 2266 - DNA, 33 bp, Homo sapiens
catccagaatggagcagggcatttgtcctgtcc

SEQ ID NO: 2267 - DNA, 33 bp, Homo sapiens
gagagagagagagtatgaggtattggttcaagc

SEQ ID NO: 2268 - DNA, 33 bp, Homo sapiens
acagaccaccttttcctagagcctggctataaa

SEQ ID NO: 2269 - DNA, 51 bp, Homo sapiens
cgaaaatgtccctgatagtcggagatctcatgccagttgcctctcaagcca

SEQ ID NO: 2270 - DNA, 51 bp, Homo sapiens
gtattcgaatgtctgaggccttcaatatggagagtgttaataaaagtaagt

SEQ ID NO: 2271 - DNA, 33 bp, Homo sapiens
tcctaaaactgtatactattggttaatttttct

SEQ ID NO: 2272 - DNA, 33 bp, Homo sapiens
aactgaagatccagaagaggaagttagagaatc

SEQ ID NO: 2273 - DNA, 33 bp, Homo sapiens
agtaaatgatggctattatacaatgtcatggtt

SEQ ID NO: 2274 - DNA, 33 bp, Homo sapiens
gctacctagggaagagtataggatgacatcttt

SEQ ID NO: 2275 - DNA, 33 bp, Homo sapiens
ggcaaaaatcaggtggtcaaaaatgtctttatc

SEQ ID NO: 2276 - DNA, 33 bp, Homo sapiens
ttcagacacctgccgggcatcggggcagggtga

SEQ ID NO: 2277 - DNA, 33 bp, Homo sapiens
gggagtgaaagaggaatgagcaaagtggtcatg

SEQ ID NO: 2278 - DNA, 33 bp, Homo sapiens
attcaaccaaacaaccgaggaggagactaatga

SEQ ID NO: 2279 - DNA, 33 bp, Homo sapiens
atggcattatggaaaaggtggctcttgaaatat

SEQ ID NO: 2280 - DNA, 33 bp, Homo sapiens
tagatgccctcagtaagtgtattcagaataaat

SEQ ID NO: 2281 - DNA, 51 bp, Homo sapiens
actcaaattacacttacaattttcacatatagtatctggcattcaatcaag

SEQ ID NO: 2282 - DNA, 33 bp, Homo sapiens
aaatggccagcaaatggacaaagagatcttcaa

SEQ ID NO: 2283 - DNA, 33 bp, Homo sapiens
cgaagcagagttcttataggtcagattgaagac

SEQ ID NO: 2284 - DNA, 33 bp, Homo sapiens
taagaagcatttgtgatcaggctacattttctt

SEQ ID NO: 2285 - DNA, 51 bp, Homo sapiens
attcatgccattaactattcattactgagccttttttgtttgtcttgtttt

SEQ ID NO: 2286 - DNA, 33 bp, Homo sapiens
tcagtttccgaagatatgcagctttggcgaaac

SEQ ID NO: 2287 - DNA, 33 bp, Homo sapiens
ttattttcaacagccaccttcaattacaaatgt

SEQ ID NO: 2288 - DNA, 33 bp, Homo sapiens
ctctagattagctctcgcaatatggtaaactcc

SEQ ID NO: 2289 - DNA, 33 bp, Homo sapiens
ctggagaaaatgtacagaatgcacaaatactat

SEQ ID NO: 2290 - DNA, 33 bp, Homo sapiens
aactgacaatgtagaactgatgacagagataga

SEQ ID NO: 2291 - DNA, 33 bp, Homo sapiens
atctttcaagggtcaatcaaaatgctattcctt

SEQ ID NO: 2292 - DNA, 33 bp, Homo sapiens
caggtctctggtataatggcgtgagtaagataa

SEQ ID NO: 2293 - DNA, 51 bp, Homo sapiens
agtagattgtttcagtgaactgaccgaaaatttcctgttacataggtcaat

SEQ ID NO: 2294 - DNA, 33 bp, Homo sapiens
tttaattggtcacgcagaagaaaggcttacatt

SEQ ID NO: 2295 - DNA, 33 bp, Homo sapiens
gtctgcttttgtgtcatgccagctgcctggtgc

SEQ ID NO: 2296 - DNA, 33 bp, Homo sapiens
gcactccatatacttgtagagctatctgaattt

SEQ ID NO: 2297 - DNA, 33 bp, Homo sapiens
ctcgcatgaggccatgtcatgatgatcacaggg

SEQ ID NO: 2298 - DNA, 33 bp, Homo sapiens
tccagatatgatttcatttgggccagttagatg

SEQ ID NO: 2299 - DNA, 33 bp, Homo sapiens
atccagctttttggaatgtctgttaaatagtct

SEQ ID NO: 2300 - DNA, 33 bp, Homo sapiens
ccttcattcatgtcaggaaatccctaactgtgt

SEQ ID NO: 2301 - DNA, 33 bp, Homo sapiens
agaatctgtgaaaagacgtggcaactgtgctgg

SEQ ID NO: 2302 - DNA, 33 bp, Homo sapiens
tataccaccccactcaggtgcaataatatttaa

SEQ ID NO: 2303 - DNA, 33 bp, Homo sapiens
cagcttgttaattagcggcccctctacaaatag

SEQ ID NO: 2304 - DNA, 33 bp, Homo sapiens
gcttagtgagtcagattacaccttaatgctctt

SEQ ID NO: 2305 - DNA, 33 bp, Homo sapiens
accagctattgtgaaagttgattataaattcac

SEQ ID NO: 2306 - DNA, 33 bp, Homo sapiens
cagccatgtgtggaaatgtcaccctggagttct

SEQ ID NO: 2307 - DNA, 33 bp, Homo sapiens
gatcctgggagcataccggactcctccaaacct

SEQ ID NO: 2308 - DNA, 33 bp, Homo sapiens
ggccttcatagaaaagtaattacctaaaaagaa

SEQ ID NO: 2309 - DNA, 33 bp, Homo sapiens
ctgaatgacagactgatacacttgctcaaaggg

SEQ ID NO: 2310 - DNA, 33 bp, Homo sapiens
gttggagtaaagtgaatgaaataatcagaatgt

SEQ ID NO: 2311 - DNA, 33 bp, Homo sapiens
tcatcctagattaaagcctgtattaccatgaaa

SEQ ID NO: 2312 - DNA, 33 bp, Homo sapiens
agcagagggtgcctaattgaggtcattctcagc

SEQ ID NO: 2313 - DNA, 33 bp, Homo sapiens
tctttgtatccaataagtcagtaacaactctac

SEQ ID NO: 2314 - DNA, 33 bp, Homo sapiens
ctgtgtcagaaaccatgaagaatgcacagctga

SEQ ID NO: 2315 - DNA, 33 bp, Homo sapiens
ggaactatttgatgcattgagtaaacaagagta

SEQ ID NO: 2316 - DNA, 33 bp, Homo sapiens
aaggacacagtgttcatcccctttcgcccttcc

SEQ ID NO: 2317 - DNA, 33 bp, Homo sapiens
tgtagtgtcagtatcatgttacacagagcaaaa

SEQ ID NO: 2318 - DNA, 51 bp, Homo sapiens
tcaaagatttattctctcaattacccatcaaaataactaataaaaggagaa

SEQ ID NO: 2319 - DNA, 33 bp, Homo sapiens
agagaacattactccattcacataataaagcta

SEQ ID NO: 2320 - DNA, 33 bp, Homo sapiens
gccaattatctgactataggttggatgatatta

SEQ ID NO: 2321 - DNA, 33 bp, Homo sapiens
tagcatacaatctagataacacagttcttgggt

SEQ ID NO: 2322 - DNA, 33 bp, Homo sapiens
tctcctaacaggcaagcaaaataaaagcagaat

SEQ ID NO: 2323 - DNA, 33 bp, Homo sapiens
accaaatagattcaggtattcaaagtcctgatg

SEQ ID NO: 2324 - DNA, 33 bp, Homo sapiens
gttcaaacctattccataagcctagtactctgc

SEQ ID NO: 2325 - DNA, 33 bp, Homo sapiens
tagatctatacaattagcacactttgccagagc

SEQ ID NO: 2326 - DNA, 33 bp, Homo sapiens
aattcaaagacacatataggtacacaggtgggg

SEQ ID NO: 2327 - DNA, 33 bp, Homo sapiens
tgagtgtatggagggaccacttctcgtatacct

SEQ ID NO: 2328 - DNA, 33 bp, Homo sapiens
ttttatatcacctgtatggtcattacactttag

SEQ ID NO: 2329 - DNA, 51 bp, Homo sapiens
tctaactctcagcacatattcatagtaaaccaaagttgcaatactgtaaaa

SEQ ID NO: 2330 - DNA, 51 bp, Homo sapiens
aattagttttgttttaaagagaagatgaggtacccttgacaacatgatcct

SEQ ID NO: 2331 - DNA, 51 bp, Homo sapiens
tggtgctggggaggctgtaagccaaggaatctgggcaggtataacaggaac

SEQ ID NO: 2332 - DNA, 33 bp, Homo sapiens
gatgtttggcttaagagagctagattctcacaa

SEQ ID NO: 2333 - DNA, 33 bp, Homo sapiens
atgttcagaagagtcagtaaatattcttttcta

SEQ ID NO: 2334 - DNA, 33 bp, Homo sapiens
ggtaaattaagaaatagcatagctgcagatgtt

SEQ ID NO: 2335 - DNA, 33 bp, Homo sapiens
taataaaacataagcgcaacagtgaaaaacttg

SEQ ID NO: 2336 - DNA, 33 bp, Homo sapiens
acatgagtcaggaacatcttaagagttttggaa

SEQ ID NO: 2337 - DNA, 51 bp, Homo sapiens
tcttattttctttcttttgctaatacatcactgcattcagcctttaagtta

SEQ ID NO: 2338 - DNA, 33 bp, Homo sapiens
cagagagtaggagttatgatgaggaaaaatggc

SEQ ID NO: 2339 - DNA, 33 bp, Homo sapiens
tagaggtatgctgtactgacaaaataatggtta

SEQ ID NO: 2340 - DNA, 33 bp, Homo sapiens
cacttgaagtattaaagtccaaactgtcatatt

SEQ ID NO: 2341 - DNA, 33 bp, Homo sapiens
ggtgtgtgcatactcaggaagaaagggaatgga

SEQ ID NO: 2342 - DNA, 51 bp, Homo sapiens
tgattgttatcttcaaggtaaccaatgaactgagagtgggagtgggaacag

SEQ ID NO: 2343 - DNA, 33 bp, Homo sapiens
ttagtgaaagagtcaatagtttaatagttagag

SEQ ID NO: 2344 - DNA, 33 bp, Homo sapiens
tgaagttagtggcctatgaatgatatatcttga

SEQ ID NO: 2345 - DNA, 33 bp, Homo sapiens
agatcaaatgaagttggaaccctttaacaactc

SEQ ID NO: 2346 - DNA, 33 bp, Homo sapiens
caactacatagttatctctgagcctgcagtgct

SEQ ID NO: 2347 - DNA, 33 bp, Homo sapiens
caaataattaaaccaagccctgttgataactgc

SEQ ID NO: 2348 - DNA, 33 bp, Homo sapiens
tttctctgtctgatcatgtgagtgctgtttggg

SEQ ID NO: 2349 - DNA, 33 bp, Homo sapiens
gatcctgctgtcttgataagctattatggcaga

SEQ ID NO: 2350 - DNA, 33 bp, Homo sapiens
tcttcataaaagttcaggtgcattcccaattct

SEQ ID NO: 2351 - DNA, 33 bp, Homo sapiens
caaggaagtctccagaggcacgcttctacatgg

SEQ ID NO: 2352 - DNA, 33 bp, Homo sapiens
atgagaagtctatacagcaaaatctactaaata

SEQ ID NO: 2353 - DNA, 33 bp, Homo sapiens
aagaggaaagcagaaccatgtgtaaaatagact

SEQ ID NO: 2354 - DNA, 33 bp, Homo sapiens
taattatggaggaatttaagcacgaagttaatg

SEQ ID NO: 2355 - DNA, 33 bp, Homo sapiens
tattagtatttggagacaattagagatgcatag

SEQ ID NO: 2356 - DNA, 51 bp, Homo sapiens
accagtctcattttcagcagaaatctaagtgaggaattcttattttcttta

SEQ ID NO: 2357 - DNA, 51 bp, Homo sapiens
aactcttctcccttcagtatcccaatctggctaactaggatcttactactt

SEQ ID NO: 2358 - DNA, 33 bp, Homo sapiens
tcaaattacacagaaataggcacattaaaatat

SEQ ID NO: 2359 - DNA, 33 bp, Homo sapiens
aaattacatgcacccagaggtccaatttggcag

SEQ ID NO: 2360 - DNA, 33 bp, Homo sapiens
tatattctataaaacatccaatttgaccattta

SEQ ID NO: 2361 - DNA, 33 bp, Homo sapiens
tgcccagtgccacttggaaaaaaatggtttagt

SEQ ID NO: 2362 - DNA, 33 bp, Homo sapiens
gagagataaaaccagggagtaggccaacagttc

SEQ ID NO: 2363 - DNA, 33 bp, Homo sapiens
gatcaaacaagatttcgccaaaataactggtta

SEQ ID NO: 2364 - DNA, 33 bp, Homo sapiens
ttgaacaatttttagagtaagcaaggaaaggga

SEQ ID NO: 2365 - DNA, 33 bp, Homo sapiens
gaatgtctcagaggcacattacaagatttataa

SEQ ID NO: 2366 - DNA, 33 bp, Homo sapiens
tgaggccagaggattcgcttcttccaagatggc

SEQ ID NO: 2367 - DNA, 33 bp, Homo sapiens
tcaacttccaaaaaaattgaagtcagctgatca

SEQ ID NO: 2368 - DNA, 33 bp, Homo sapiens
gaactgtaagtgtcgctaatagagatttaagat

SEQ ID NO: 2369 - DNA, 33 bp, Homo sapiens
aggaagtagttgtcatgaagctcagtcaagaga

SEQ ID NO: 2370 - DNA, 33 bp, Homo sapiens
tactggccttctaagatgagtttaaaagtgttc

SEQ ID NO: 2371 - DNA, 33 bp, Homo sapiens
tgtggtggtaataagatctcacaggtatcacca

SEQ ID NO: 2372 - DNA, 51 bp, Homo sapiens
tttcatcaggttccaaaaatatcagtatcttgacattcttgtaaaatcttt

SEQ ID NO: 2373 - DNA, 33 bp, Homo sapiens
atagcaatttttaggcggcactgttagggcttc

SEQ ID NO: 2374 - DNA, 33 bp, Homo sapiens
ggagaggagagctttatgtgtaaccctgatcag

SEQ ID NO: 2375 - DNA, 33 bp, Homo sapiens
gaatgtggaacttgaattagacttctggaaaag

SEQ ID NO: 2376 - DNA, 33 bp, Homo sapiens
aggtgggactggacactgaagaaagtgaccaca

SEQ ID NO: 2377 - DNA, 51 bp, Homo sapiens
ggaaaactgtatttgggttcttctcgctataaaagggtatttttagcttca

SEQ ID NO: 2378 - DNA, 33 bp, Homo sapiens
tagcatcgattttaccgatacctcatagagtaa

SEQ ID NO: 2379 - DNA, 33 bp, Homo sapiens
gatattacagatcatggacaaaactatttcaaa

SEQ ID NO: 2380 - DNA, 33 bp, Homo sapiens
aagacttgcaaggtgagctacatatttccctac

SEQ ID NO: 2381 - DNA, 33 bp, Homo sapiens
tgattggaatgcttgaggttgaaacagttaagg

SEQ ID NO: 2382 - DNA, 33 bp, Homo sapiens
tatttttcagtgtaaatcttgataggctgagaa

SEQ ID NO: 2383 - DNA, 33 bp, Homo sapiens
ttgattttctttgtaggatttttttgctagttg

SEQ ID NO: 2384 - DNA, 51 bp, Homo sapiens
tttaatagtgaaaagttaccatagagaagtgacaggagtatgtagttcttc

SEQ ID NO: 2385 - DNA, 51 bp, Homo sapiens
aacattaagaaaagatcataaatgggaacatcatatgctgatgtggaagat

SEQ ID NO: 2386 - DNA, 33 bp, Homo sapiens
tattgaatagttggaaggcaaaggaaagatggg

SEQ ID NO: 2387 - DNA, 33 bp, Homo sapiens
gcatgattctttgcaagtgaacttttaaattgt

SEQ ID NO: 2388 - DNA, 33 bp, Homo sapiens
cagtaaattcccagaatatctgatgcactccta

SEQ ID NO: 2389 - DNA, 33 bp, Homo sapiens
caagaccagcccaatatacagctagagtgcaaa

SEQ ID NO: 2390 - DNA, 33 bp, Homo sapiens
cttataatggattaaagagccaaggttcaaaaa

SEQ ID NO: 2391 - DNA, 33 bp, Homo sapiens
cagtggtcactaaatatgttgtgtttgtctgtg

SEQ ID NO: 2392 - DNA, 33 bp, Homo sapiens
tcatgactttaaattggacagagtgaacatttc

SEQ ID NO: 2393 - DNA, 33 bp, Homo sapiens
ttcaggatgcttggtcgccagccactggacttt

SEQ ID NO: 2394 - DNA, 33 bp, Homo sapiens
agaaaacagaatataattggaaacagacttctt

SEQ ID NO: 2395 - DNA, 33 bp, Homo sapiens
ctctgcttcttagtcagtaagtttgtgatcttc

SEQ ID NO: 2396 - DNA, 33 bp, Homo sapiens
tacctattgggtactatgtatgctatctgggtg

SEQ ID NO: 2397 - DNA, 33 bp, Homo sapiens
gactttagtttgcaagtctggatttagagagca

SEQ ID NO: 2398 - DNA, 33 bp, Homo sapiens
tactatgttccaaacactattctaagtatttta

SEQ ID NO: 2399 - DNA, 33 bp, Homo sapiens
ttgatataaacagtcttacaattcagctgatta

SEQ ID NO: 2400 - DNA, 33 bp, Homo sapiens
aagtaactaaaagtgaggacattccgatgttgt

SEQ ID NO: 2401 - DNA, 33 bp, Homo sapiens
tcagggagaataataattagatgcaacaactca

SEQ ID NO: 2402 - DNA, 33 bp, Homo sapiens
attacagccactgagatatacataggaaactca

SEQ ID NO: 2403 - DNA, 33 bp, Homo sapiens
gactgttaaaaatcaataaaatcagcatggcat

SEQ ID NO: 2404 - DNA, 33 bp, Homo sapiens
ctctccagaactcacatgctaatggagaagatg

SEQ ID NO: 2405 - DNA, 33 bp, Homo sapiens
gtgatgccaagagagatgaggctgttcatggat

SEQ ID NO: 2406 - DNA, 33 bp, Homo sapiens
gatggccttgagatccgggacaattgttggaaa

SEQ ID NO: 2407 - DNA, 33 bp, Homo sapiens
atacatggccaggcaggaagtttccttcttcat

SEQ ID NO: 2408 - DNA, 33 bp, Homo sapiens
agacccatgtataatggaccagagaattgtccc

SEQ ID NO: 2409 - DNA, 33 bp, Homo sapiens
ttttatccactagcgcgcgtatgttacattttg

SEQ ID NO: 2410 - DNA, 33 bp, Homo sapiens
tgtcgtcctggtataatacttgataatgattcc

SEQ ID NO: 2411 - DNA, 33 bp, Homo sapiens
attttgccctgtcttccaataaagaggttgatt

SEQ ID NO: 2412 - DNA, 33 bp, Homo sapiens
gatattacatagataattgaaagtatgaactct

SEQ ID NO: 2413 - DNA, 33 bp, Homo sapiens
ccaacttccaaccttagccattatcccctacta

SEQ ID NO: 2414 - DNA, 51 bp, Homo sapiens
tttttgtatttttcagtagttttatgagtagcagtcttttgtaatttttga

SEQ ID NO: 2415 - DNA, 33 bp, Homo sapiens
tcccaaccaaatctactaacctatctgcttctc

SEQ ID NO: 2416 - DNA, 33 bp, Homo sapiens
actcagtacagttagctacttgtgagacttttg

SEQ ID NO: 2417 - DNA, 33 bp, Homo sapiens
gataccatgtacaatagcatcaaaaatgaagaa

SEQ ID NO: 2418 - DNA, 33 bp, Homo sapiens
aatatcatagacataatgtggagccaaagaaac

SEQ ID NO: 2419 - DNA, 33 bp, Homo sapiens
cacaagaactccttaatccccagcacacatcct

SEQ ID NO: 2420 - DNA, 33 bp, Homo sapiens
tggctacagctacgtatcttcagacttttcaat

SEQ ID NO: 2421 - DNA, 33 bp, Homo sapiens
aacaactttttagcgacatgaatctgtgctctt

SEQ ID NO: 2422 - DNA, 33 bp, Homo sapiens
atataaacgtcacacagaggatggctaggctga

SEQ ID NO: 2423 - DNA, 33 bp, Homo sapiens
ttcattcatctttaaatccattaagtaagtgtt

SEQ ID NO: 2424 - DNA, 33 bp, Homo sapiens
tgctcatgattttataggccagaaattcagaca

SEQ ID NO: 2425 - DNA, 33 bp, Homo sapiens
tagcttataaattagtgaatcaggtgtcatcac

SEQ ID NO: 2426 - DNA, 33 bp, Homo sapiens
tggtatctacagtagatcccttcttttgccctt

SEQ ID NO: 2427 - DNA, 33 bp, Homo sapiens
gtgtgttctggaaaaatgcctattgatactaga

SEQ ID NO: 2428 - DNA, 33 bp, Homo sapiens
gcaaaatgccagggacggtaatggttccacatc

SEQ ID NO: 2429 - DNA, 33 bp, Homo sapiens
actttctccacagcaatgtcctctaagagatac

SEQ ID NO: 2430 - DNA, 33 bp, Homo sapiens
gctttagttgacctccgagtttgtctcactgtt

SEQ ID NO: 2431 - DNA, 33 bp, Homo sapiens
tcaggtatcaaagggccgcattgtgctcaggga

SEQ ID NO: 2432 - DNA, 33 bp, Homo sapiens
acccacttctcttccatgtcttgatccatatac

SEQ ID NO: 2433 - DNA, 33 bp, Homo sapiens
attaactgggagacactggcaagggcaataggg

SEQ ID NO: 2434 - DNA, 33 bp, Homo sapiens
agagtatgctgcacaagggtttgcatttcagat

SEQ ID NO: 2435 - DNA, 33 bp, Homo sapiens
gcattttgcaaagctagattttccctctggacc

SEQ ID NO: 2436 - DNA, 33 bp, Homo sapiens
aaactatagcaaaacagcctagagatcttcgtc

SEQ ID NO: 2437 - DNA, 33 bp, Homo sapiens
cagatggcagaggccaggaagtctccgaacaaa

SEQ ID NO: 2438 - DNA, 51 bp, Homo sapiens
gtttactacattcaaggataaaagatgcatttgtgataattaatattgaaa

SEQ ID NO: 2439 - DNA, 33 bp, Homo sapiens
acaattctgttcatccggaccacatctttcctg

SEQ ID NO: 2440 - DNA, 33 bp, Homo sapiens
catcagccttaataacgatgtggtagaagcagg

SEQ ID NO: 2441 - DNA, 33 bp, Homo sapiens
ataatgtctgtatgtaggtataatcacacatag

SEQ ID NO: 2442 - DNA, 33 bp, Homo sapiens
tatttgatgattcagataggacaagtgactttt

SEQ ID NO: 2443 - DNA, 51 bp, Homo sapiens
gagcagcaatttcaaagaacatagccaaggctttcagcaatatgtaacggt

SEQ ID NO: 2444 - DNA, 33 bp, Homo sapiens
ctaccttgcttgctcatatttcttcaaagcctt

SEQ ID NO: 2445 - DNA, 33 bp, Homo sapiens
atatcccatggcatcattattcctcttcttcag

SEQ ID NO: 2446 - DNA, 33 bp, Homo sapiens
agtgagccttgccaccgagcattgaatatcttt

SEQ ID NO: 2447 - DNA, 51 bp, Homo sapiens
tcctattaagctgtgtggttgcagagagtttgttctcaatatatatgtatg

SEQ ID NO: 2448 - DNA, 33 bp, Homo sapiens
taggtatgcaatgttagaaggataaatgactta

SEQ ID NO: 2449 - DNA, 33 bp, Homo sapiens
gtgttctcttttcacatgcccacttctcttcca

SEQ ID NO: 2450 - DNA, 33 bp, Homo sapiens
atctccacatttgccattgaggattgaggactt

SEQ ID NO: 2451 - DNA, 33 bp, Homo sapiens
acctcacctcattctatgctagtctaattaatt

SEQ ID NO: 2452 - DNA, 51 bp, Homo sapiens
tcagacagaaaaataaactattatggaggcacatcttttaacatttacttc

SEQ ID NO: 2453 - DNA, 51 bp, Homo sapiens
aggtagataaaggtattcagtgacttaaggaaattaattatagaggaaaaa

SEQ ID NO: 2454 - DNA, 51 bp, Homo sapiens
tttggtgaatagcctcaaatgataataaggcttaacagagagcagaacact

SEQ ID NO: 2455 - DNA, 33 bp, Homo sapiens
atttggataaattgaggaaaactaatagccttt

SEQ ID NO: 2456 - DNA, 33 bp, Homo sapiens
tatttttttccttgcagtacccccaagagcagt

SEQ ID NO: 2457 - DNA, 33 bp, Homo sapiens
tctttaatgttttcccgctgtgcttgggatgaa

SEQ ID NO: 2458 - DNA, 33 bp, Homo sapiens
tatcatttccgaggtctactataattctgtttc

SEQ ID NO: 2459 - DNA, 33 bp, Homo sapiens
tgttcattcaaagcaaccaaaaattcagtaata

SEQ ID NO: 2460 - DNA, 33 bp, Homo sapiens
gattatggcccaaaagtaggtaagctgaagttg

SEQ ID NO: 2461 - DNA, 33 bp, Homo sapiens
aacaaccaagccagagtaacgggtgatttgacc

SEQ ID NO: 2462 - DNA, 33 bp, Homo sapiens
taccctttttagagtcgcattctggctccctta

SEQ ID NO: 2463 - DNA, 33 bp, Homo sapiens
gtagatgtattgtagataggttgttttgtacca

SEQ ID NO: 2464 - DNA, 33 bp, Homo sapiens
aatgctgggaaaactctatcacttcacaatggc

SEQ ID NO: 2465 - DNA, 33 bp, Homo sapiens
gcgagtgttagaatcatggggcagatttttttt

SEQ ID NO: 2466 - DNA, 33 bp, Homo sapiens
tttaataagatgggcctgaactctacccagttt

SEQ ID NO: 2467 - DNA, 33 bp, Homo sapiens
agttttcctctctggatacttgggtgggatgag

SEQ ID NO: 2468 - DNA, 33 bp, Homo sapiens
gttaatatctttcttcgcctgttaacactgttc

SEQ ID NO: 2469 - DNA, 51 bp, Homo sapiens
ttcaatcatgtcctatcaatttggtgaaaagatctgtccagctccttttac

SEQ ID NO: 2470 - DNA, 33 bp, Homo sapiens
tgaaacagggactcactgagatcatgaactaag

SEQ ID NO: 2471 - DNA, 33 bp, Homo sapiens
actttgtctctgttgagtatggtcatttcattc

SEQ ID NO: 2472 - DNA, 33 bp, Homo sapiens
tcccaagaaacaaacgcaagtccaagaccttac

SEQ ID NO: 2473 - DNA, 33 bp, Homo sapiens
atctccctcttatctctgaccgttcctttccac

SEQ ID NO: 2474 - DNA, 33 bp, Homo sapiens
cctctaccaccacagccatgacagtcaggtaac

SEQ ID NO: 2475 - DNA, 33 bp, Homo sapiens
ctagcatactcctggagagcaaggtgacccggc

SEQ ID NO: 2476 - DNA, 33 bp, Homo sapiens
cctgcctcgacttggcggatgatgtaaggaaag

SEQ ID NO: 2477 - DNA, 33 bp, Homo sapiens
ggatgaatccagagaagtatgctcagtgaaaaa

SEQ ID NO: 2478 - DNA, 33 bp, Homo sapiens
tgagatgtcagcaggccagagaaggaaaggcag

SEQ ID NO: 2479 - DNA, 33 bp, Homo sapiens
aattgttcttttgttccacgtgcattgtgcaac

SEQ ID NO: 2480 - DNA, 33 bp, Homo sapiens
tccaggggcttacctcgcactttggaccttgtt

SEQ ID NO: 2481 - DNA, 33 bp, Homo sapiens
cagctgagggaactgctgagcatgaaaggctca

SEQ ID NO: 2482 - DNA, 33 bp, Homo sapiens
ggacagtgaaggctaagaccaaccgagactttt

SEQ ID NO: 2483 - DNA, 33 bp, Homo sapiens
tcatgtggaactaaaatagacctctcggtactt

SEQ ID NO: 2484 - DNA, 33 bp, Homo sapiens
tcttgattgctctacacattctgctgcaagatc

SEQ ID NO: 2485 - DNA, 33 bp, Homo sapiens
agttcaatgtatcacttagatgtcaatttgtcc

SEQ ID NO: 2486 - DNA, 33 bp, Homo sapiens
gatatacacatagttcgatttcccttcatatag

SEQ ID NO: 2487 - DNA, 33 bp, Homo sapiens
gtcaaataatttccaatgagatagatgcttaga

SEQ ID NO: 2488 - DNA, 33 bp, Homo sapiens
caaactctccagggaagaaccctcaaagaggtc

SEQ ID NO: 2489 - DNA, 51 bp, Homo sapiens
gactagtaattaggaactattatcatgttttttcccagaattttggagatt

SEQ ID NO: 2490 - DNA, 51 bp, Homo sapiens
ttttcaatatgtctacagtacacaataattgattttgaaaattaataatgt

SEQ ID NO: 2491 - DNA, 33 bp, Homo sapiens
cccaagaatacgatactcaactctacataaatt

SEQ ID NO: 2492 - DNA, 33 bp, Homo sapiens
tctaaatatattgctatggggaaaactgtatag

SEQ ID NO: 2493 - DNA, 51 bp, Homo sapiens
gttttgctgttataaacagagcaaattgtaagtcagaagatattttttacc

SEQ ID NO: 2494 - DNA, 33 bp, Homo sapiens
aatgagattgggagtatgcttgattggtgggaa

SEQ ID NO: 2495 - DNA, 33 bp, Homo sapiens
caatttgtgtttcaaggcctataaatactgctg

SEQ ID NO: 2496 - DNA, 33 bp, Homo sapiens
gatgagtaccaaccaataagtgatatcagcaat

SEQ ID NO: 2497 - DNA, 33 bp, Homo sapiens
tctcaagacagaaatcggatttagacttaacct

SEQ ID NO: 2498 - DNA, 33 bp, Homo sapiens
agtttccacgtctagagaggtaaattataaaca

SEQ ID NO: 2499 - DNA, 33 bp, Homo sapiens
gatgtctttaatttcttacctggttgccctggc

SEQ ID NO: 2500 - DNA, 51 bp, Homo sapiens
ccgttccccaagggctacttcccaatgtcgtttattaactagtcaatacca

SEQ ID NO: 2501 - DNA, 33 bp, Homo sapiens
tttaaatatataaaaaccatgcttagctagctg

SEQ ID NO: 2502 - DNA, 33 bp, Homo sapiens
aaaaacaaccattacgtcattgctatgcaaggt

SEQ ID NO: 2503 - DNA, 33 bp, Homo sapiens
gttctgtggctaggaagtccagagatagatggt

SEQ ID NO: 2504 - DNA, 33 bp, Homo sapiens
aactttctgatcctgcgaagctaaagaaccagg

SEQ ID NO: 2505 - DNA, 33 bp, Homo sapiens
ttcatgcatattttcatgtctgtacttcatcgg

SEQ ID NO: 2506 - DNA, 33 bp, Homo sapiens
gcaaaagataaaaaactgtaccaggcaggagaa

SEQ ID NO: 2507 - DNA, 33 bp, Homo sapiens
tcaagctcaggctttggactcagtaggaaccaa

SEQ ID NO: 2508 - DNA, 33 bp, Homo sapiens
gctgttgtctggaacatggattggaaaagagca

SEQ ID NO: 2509 - DNA, 33 bp, Homo sapiens
aagaaggaatcgaagatgagttagggtggatgg

SEQ ID NO: 2510 - DNA, 33 bp, Homo sapiens
tatccctgaggaaagagacagttaagcaggagg

SEQ ID NO: 2511 - DNA, 33 bp, Homo sapiens
gcctctccttaaaacataatagtggttctggag

SEQ ID NO: 2512 - DNA, 33 bp, Homo sapiens
taagacctgggacttgtaactaatcccatctca

SEQ ID NO: 2513 - DNA, 33 bp, Homo sapiens
gtgccactctttcgcattgagtaaaagtatgtg

SEQ ID NO: 2514 - DNA, 33 bp, Homo sapiens
ctcttatacaccttaacctcatccaccttggga

SEQ ID NO: 2515 - DNA, 33 bp, Homo sapiens
gataagcacagtttaatggtgtaagttgcctca

SEQ ID NO: 2516 - DNA, 33 bp, Homo sapiens
gagaatgtgaaatgcagggatgtgagactggcc

SEQ ID NO: 2517 - DNA, 33 bp, Homo sapiens
aatcctcaatgaaagacactcaacaagaataca

SEQ ID NO: 2518 - DNA, 33 bp, Homo sapiens
tggaaggaatgaagaacggtttcaagagccagc

SEQ ID NO: 2519 - DNA, 33 bp, Homo sapiens
tttttgataggaaagctataggttgtcagtggc

SEQ ID NO: 2520 - DNA, 33 bp, Homo sapiens
tgcagtcgttttagaaggtaatcttggaagtga

SEQ ID NO: 2521 - DNA, 33 bp, Homo sapiens
tatgcaagtttaggaattgtttttctgcctgtt

SEQ ID NO: 2522 - DNA, 33 bp, Homo sapiens
ggtttccattcttccctaagtttggtaaagtcg

SEQ ID NO: 2523 - DNA, 33 bp, Homo sapiens
tatcttaaattcagtcggagcggaaaaaacaga

SEQ ID NO: 2524 - DNA, 33 bp, Homo sapiens
attttggttgtgtcactaagttggttagggcat

SEQ ID NO: 2525 - DNA, 33 bp, Homo sapiens
ggcatatattttccaattgagctccaggtccaa

SEQ ID NO: 2526 - DNA, 33 bp, Homo sapiens
tgtctaatgaatcacagagtttaaatacttctt

SEQ ID NO: 2527 - DNA, 33 bp, Homo sapiens
tatcttcattctctaccatttctatccatcctt

SEQ ID NO: 2528 - DNA, 33 bp, Homo sapiens
tcagtttagataatagcccccatgcagagagct

SEQ ID NO: 2529 - DNA, 33 bp, Homo sapiens
ggcatagtgtgagaacgatgtcttaccaaatag

SEQ ID NO: 2530 - DNA, 33 bp, Homo sapiens
ttcgtaggtaaggaaataatttagcagctaaga

SEQ ID NO: 2531 - DNA, 51 bp, Homo sapiens
ttcatttacaatgtagtactttatatgctaggatacattgctgctttataa

SEQ ID NO: 2532 - DNA, 33 bp, Homo sapiens
cctttgcaattgcctatgattgaatgtgaaaaa

SEQ ID NO: 2533 - DNA, 51 bp, Homo sapiens
taggcagacaaaaactcaagccacagtattcacattatttgtcatatggag

SEQ ID NO: 2534 - DNA, 33 bp, Homo sapiens
aattaactcatcctcatgaaaagtcactcttta

SEQ ID NO: 2535 - DNA, 33 bp, Homo sapiens
acacaacattgcagaagtcagtagttgttacaa

SEQ ID NO: 2536 - DNA, 33 bp, Homo sapiens
agcattgcaaaaccactgtagtcgatctgggaa

SEQ ID NO: 2537 - DNA, 33 bp, Homo sapiens
aaaatctgttaaatccggagttatttcatccat

SEQ ID NO: 2538 - DNA, 33 bp, Homo sapiens
atggatagcaacttaattgaggagtgtcaggct

SEQ ID NO: 2539 - DNA, 33 bp, Homo sapiens
ggcctaggagttaagatggcctctagaaaaaca

SEQ ID NO: 2540 - DNA, 33 bp, Homo sapiens
ttccggccaagtagcacatctagttttccaccc

SEQ ID NO: 2541 - DNA, 33 bp, Homo sapiens
tcgtttcaagaataacggcaggtctactcttaa

SEQ ID NO: 2542 - DNA, 51 bp, Homo sapiens
gcatcagaaaataaagttttaaatcgattgtattcatctattaaaatatat

SEQ ID NO: 2543 - DNA, 33 bp, Homo sapiens
gttcacagaactgagaggagaaccaggcatgga

SEQ ID NO: 2544 - DNA, 33 bp, Homo sapiens
cttattttttgcaatctcctgcatgttaggaaa

SEQ ID NO: 2545 - DNA, 33 bp, Homo sapiens
aggtttccatctctgcgagggtcaggtcatcac

SEQ ID NO: 2546 - DNA, 33 bp, Homo sapiens
acccagttgtagcccatccttgtttctgacact

SEQ ID NO: 2547 - DNA, 33 bp, Homo sapiens
tccttttgtgtgcttcgatctattaaatgaaga

SEQ ID NO: 2548 - DNA, 33 bp, Homo sapiens
aagggcaacctcacatgatacaggagaacgcat

SEQ ID NO: 2549 - DNA, 33 bp, Homo sapiens
aatttgtggtatatgatgaaagcagtgtttaga

SEQ ID NO: 2550 - DNA, 33 bp, Homo sapiens
atgtttcattgaagccgagaataatgataatag

SEQ ID NO: 2551 - DNA, 33 bp, Homo sapiens
ctgtgtcccactctgagaaaatgcacttgaggt

SEQ ID NO: 2552 - DNA, 33 bp, Homo sapiens
aaggcacaggatgtaacaaatgagctgccacct

SEQ ID NO: 2553 - DNA, 33 bp, Homo sapiens
taattgttttggagactgcataggggagtttgg

SEQ ID NO: 2554 - DNA, 33 bp, Homo sapiens
tctaattaactagaaagctctctaagactctga

SEQ ID NO: 2555 - DNA, 33 bp, Homo sapiens
ggattttgcatctgttcaaatttcatctgcatg

SEQ ID NO: 2556 - DNA, 33 bp, Homo sapiens
tgcactgctttctaaattgaaaagaggctttga

SEQ ID NO: 2557 - DNA, 33 bp, Homo sapiens
aaggattggtaacatagctgtactctggcaata

SEQ ID NO: 2558 - DNA, 33 bp, Homo sapiens
ttctaggtagatttcagtctaactcccagagaa

SEQ ID NO: 2559 - DNA, 33 bp, Homo sapiens
gtcatatttaaaagccgcctctctacttcaagt

SEQ ID NO: 2560 - DNA, 33 bp, Homo sapiens
ttatttgctatagttctcccagtgtatttgtac

SEQ ID NO: 2561 - DNA, 33 bp, Homo sapiens
taataatttttgctgcgaagtggtataccagca

SEQ ID NO: 2562 - DNA, 33 bp, Homo sapiens
aagtcaaaatctacccgacattatttagttcag

SEQ ID NO: 2563 - DNA, 33 bp, Homo sapiens
cttttgctgtttataataagtccctttcatcct

SEQ ID NO: 2564 - DNA, 51 bp, Homo sapiens
catggaagcagaatgtcctgacttcgcctatgacttgactctgagagtcgt

SEQ ID NO: 2565 - DNA, 51 bp, Homo sapiens
atagctgctggctgattgtgttgtatatgaaatctttaagttagttaatag

SEQ ID NO: 2566 - DNA, 33 bp, Homo sapiens
ttaatggaaccaattagctctatcaggccctgt

SEQ ID NO: 2567 - DNA, 33 bp, Homo sapiens
gcaagtgtgcaatatgtcagggcactatggaga

SEQ ID NO: 2568 - DNA, 33 bp, Homo sapiens
aagagatctaagaaggtcccagaattagatcta

SEQ ID NO: 2569 - DNA, 51 bp, Homo sapiens
cttcccctgctgcattttaatgttaggatatttgcaaaaaagttggcggtt

SEQ ID NO: 2570 - DNA, 33 bp, Homo sapiens
attcataaagactcagcaatctagctatggcaa

SEQ ID NO: 2571 - DNA, 33 bp, Homo sapiens
gtaatcatattagtaatagcagtggaattgaac

SEQ ID NO: 2572 - DNA, 33 bp, Homo sapiens
catttttctttgccaagtaaggtaacaaattca

SEQ ID NO: 2573 - DNA, 51 bp, Homo sapiens
aggctcaggtctatttcactggaaaccctctactcatgtctttaaacacac

SEQ ID NO: 2574 - DNA, 33 bp, Homo sapiens
aaaaataaccattttcgctcttgctttatttga

SEQ ID NO: 2575 - DNA, 51 bp, Homo sapiens
aggcccttgctcagccacttggctctgctgtatttcctcacaaatgcaccc

SEQ ID NO: 2576 - DNA, 33 bp, Homo sapiens
aaaggatctgctaaaagtccgcagccaggcatg

SEQ ID NO: 2577 - DNA, 33 bp, Homo sapiens
gtctagtctgctttcagtaagctcagaacattt

SEQ ID NO: 2578 - DNA, 33 bp, Homo sapiens
aggatatacacagaaatgtacaccaaaagtatg

SEQ ID NO: 2579 - DNA, 33 bp, Homo sapiens
ataaaatttcagatgaggactaatatcctgtgg

SEQ ID NO: 2580 - DNA, 33 bp, Homo sapiens
agagggactttaccaagtggggcctctaacccc

SEQ ID NO: 2581 - DNA, 33 bp, Homo sapiens
accatgacagttacaatcatatgttgatatgaa

SEQ ID NO: 2582 - DNA, 33 bp, Homo sapiens
gtgtcttgtgacttggtatgatatgcagggaat

SEQ ID NO: 2583 - DNA, 33 bp, Homo sapiens
agagtgaaagctgcaatgttgaaaaaaacatcc

SEQ ID NO: 2584 - DNA, 33 bp, Homo sapiens
tgtgtcaatattaacctaagtgatcaataactt

SEQ ID NO: 2585 - DNA, 33 bp, Homo sapiens
cttcatattgataatgtattgctttcttcagga

SEQ ID NO: 2586 - DNA, 33 bp, Homo sapiens
gactgtttcttatctctgactaatccctttttt

SEQ ID NO: 2587 - DNA, 33 bp, Homo sapiens
ccccaactgtctcatatggcactggcagcttca

SEQ ID NO: 2588 - DNA, 33 bp, Homo sapiens
caccatccaactttcatgatgggaacattttca

SEQ ID NO: 2589 - DNA, 33 bp, Homo sapiens
tgaaatgacgcatcattaaatacacaggaaatt

SEQ ID NO: 2590 - DNA, 33 bp, Homo sapiens
ctcatgtgtaaatgactgggttgtcgcagtggt

SEQ ID NO: 2591 - DNA, 33 bp, Homo sapiens
gtctacagtttctccaggtttctttggttggca

SEQ ID NO: 2592 - DNA, 33 bp, Homo sapiens
gatgactccaaagcaattccttgcaaaacaaat

SEQ ID NO: 2593 - DNA, 33 bp, Homo sapiens
catttcttgaatgcaaggttccatatgtgacct

SEQ ID NO: 2594 - DNA, 33 bp, Homo sapiens
gaagcaaacagagtcattaaatataagatcaat

SEQ ID NO: 2595 - DNA, 33 bp, Homo sapiens
gtgcttaggtctctgatcaatttctagtgagtc

SEQ ID NO: 2596 - DNA, 51 bp, Homo sapiens
actgatacatttcaagagataagggtcacaaggagattttcactcaagttg

SEQ ID NO: 2597 - DNA, 33 bp, Homo sapiens
ttcacactaacatccatcccaagtctgaattaa

SEQ ID NO: 2598 - DNA, 33 bp, Homo sapiens
actagaaaactatccatgttgctatctataatg

SEQ ID NO: 2599 - DNA, 33 bp, Homo sapiens
cctcagtggaaagatgcatgtgaaaaaatgttg

SEQ ID NO: 2600 - DNA, 33 bp, Homo sapiens
gacattcagaagggaaggaacattcttgaccca

SEQ ID NO: 2601 - DNA, 33 bp, Homo sapiens
ggggccgaggaaagtatagaggaagagaagctc

SEQ ID NO: 2602 - DNA, 33 bp, Homo sapiens
ttcagaagagggaaaagggccgtggaggtatat

SEQ ID NO: 2603 - DNA, 33 bp, Homo sapiens
tagctcttgttcagcagaggggaatatgagaag

SEQ ID NO: 2604 - DNA, 33 bp, Homo sapiens
gcaggtgactgagttcgattaaagcccctctaa

SEQ ID NO: 2605 - DNA, 33 bp, Homo sapiens
actgttccattactacgcaaacacatattagag

SEQ ID NO: 2606 - DNA, 33 bp, Homo sapiens
tttgctcctcaggcagcaacaagaaagatgtgt

SEQ ID NO: 2607 - DNA, 33 bp, Homo sapiens
gtggatactgacacgctgagctgaaaagtgatt

SEQ ID NO: 2608 - DNA, 33 bp, Homo sapiens
attccccccgagtaagtatagccaatagcttga

SEQ ID NO: 2609 - DNA, 51 bp, Homo sapiens
gacccttgctgtcagccaatcatcccagcctgtgcaaattcctggcccttt

SEQ ID NO: 2610 - DNA, 51 bp, Homo sapiens
catacagctctttgatggccatgtcgagtttgccttctttgtcttccctgt

SEQ ID NO: 2611 - DNA, 33 bp, Homo sapiens
gtttgccatttataaagcacaccattgaatcta

SEQ ID NO: 2612 - DNA, 33 bp, Homo sapiens
gaaaaggctgccgcatgatctcagcgaggagtg

SEQ ID NO: 2613 - DNA, 33 bp, Homo sapiens
agcaatggttaacaaacggaggaagttggtgtt

SEQ ID NO: 2614 - DNA, 33 bp, Homo sapiens
ttaagcccccgtaacatcatttgcccactaaat

SEQ ID NO: 2615 - DNA, 33 bp, Homo sapiens
taagcctgctgtgctcggaaactgaatagtagc

SEQ ID NO: 2616 - DNA, 33 bp, Homo sapiens
cacactcaacaaatactggttgagccccggccc

SEQ ID NO: 2617 - DNA, 33 bp, Homo sapiens
tggtttctttcatccagcctgaggcctttgcga

SEQ ID NO: 2618 - DNA, 33 bp, Homo sapiens
gttctaacactggccaccctttaccagccttca

SEQ ID NO: 2619 - DNA, 33 bp, Homo sapiens
atcacacttttgtgaagaatgctagagagccac

SEQ ID NO: 2620 - DNA, 33 bp, Homo sapiens
cagttttgaaaaagaaggacacaatggaggact

SEQ ID NO: 2621 - DNA, 33 bp, Homo sapiens
catgcacctgaataactaatgggtctataaata

SEQ ID NO: 2622 - DNA, 51 bp, Homo sapiens
tactttttttttttttcaatcagccgcaagctttcatatcactttctgttg

SEQ ID NO: 2623 - DNA, 33 bp, Homo sapiens
ccacgtgcctcaattatgaatctccacgtgcct

SEQ ID NO: 2624 - DNA, 33 bp, Homo sapiens
caagaggaaattactcgctgatagttttcaggc

SEQ ID NO: 2625 - DNA, 33 bp, Homo sapiens
gacacaagtgataacatgttggagtgtaaagtg

SEQ ID NO: 2626 - DNA, 33 bp, Homo sapiens
agttgcctaccccctcgctatcaaatcttgact

SEQ ID NO: 2627 - DNA, 33 bp, Homo sapiens
tggcaagttctttcattacaacacaagttacat

SEQ ID NO: 2628 - DNA, 33 bp, Homo sapiens
tgctgctagtccagaagggaatatctaatcctt

SEQ ID NO: 2629 - DNA, 33 bp, Homo sapiens
gttcagctagaaatacgagaggctgcaaaaaat

SEQ ID NO: 2630 - DNA, 33 bp, Homo sapiens
aaactactgtcagggatactccacgttagcacc

SEQ ID NO: 2631 - DNA, 33 bp, Homo sapiens
tttaaaatttttcttatagacagcatttcacta

SEQ ID NO: 2632 - DNA, 33 bp, Homo sapiens
tttcctgcctggcaaatttcattcttccttcga

SEQ ID NO: 2633 - DNA, 33 bp, Homo sapiens
atagagaaaacgttagccagttatgaagagcaa

SEQ ID NO: 2634 - DNA, 33 bp, Homo sapiens
ttttgtctttgccgatgatacattttcaaacag

SEQ ID NO: 2635 - DNA, 33 bp, Homo sapiens
tggagagggatccaccgggaaaaggagaagcaa

SEQ ID NO: 2636 - DNA, 33 bp, Homo sapiens
aatggttagctttatatgtcaacctagctaggt

SEQ ID NO: 2637 - DNA, 33 bp, Homo sapiens
aagttgaaatctcagagaacaatctcaaatcct

SEQ ID NO: 2638 - DNA, 33 bp, Homo sapiens
atgagtaagtgcagtataatggtaaatgtcttt

SEQ ID NO: 2639 - DNA, 51 bp, Homo sapiens
gcagatcaccattcgtctgctattatgcgatatgttgtttcttctcctgca

SEQ ID NO: 2640 - DNA, 51 bp, Homo sapiens
agattctgaaagcagcatttcctaattaagaaggcccaagaaggtgacaga

SEQ ID NO: 2641 - DNA, 33 bp, Homo sapiens
tgtcacccatgtttcctcctcaatctctctacc

SEQ ID NO: 2642 - DNA, 33 bp, Homo sapiens
attacatatcagtttagaaataggtgacagcca

SEQ ID NO: 2643 - DNA, 33 bp, Homo sapiens
aatcacaaatactaaatctgaggctctgttctc

SEQ ID NO: 2644 - DNA, 33 bp, Homo sapiens
acagcaggtcagagaatggattaagagtctggg

SEQ ID NO: 2645 - DNA, 33 bp, Homo sapiens
atgacagccgccaaaaggtttaaatgttgcttt

SEQ ID NO: 2646 - DNA, 33 bp, Homo sapiens
gccctagcgatgtccatgggctacctctcctga

SEQ ID NO: 2647 - DNA, 33 bp, Homo sapiens
agaacacaggctaaccgaaactacgcttaggct

SEQ ID NO: 2648 - DNA, 33 bp, Homo sapiens
aaatgtgcaggatgccgataagagctgggaggg

SEQ ID NO: 2649 - DNA, 33 bp, Homo sapiens
aagctagaaaaaaacataatgttgggaagattg

SEQ ID NO: 2650 - DNA, 33 bp, Homo sapiens
acctgcaggctaagccgaatgaatattcagtga

SEQ ID NO: 2651 - DNA, 33 bp, Homo sapiens
gaaattgctaatagaagaaatctcggagcatca

SEQ ID NO: 2652 - DNA, 33 bp, Homo sapiens
ggcattaccccccgactgaggcctcgtatgata

SEQ ID NO: 2653 - DNA, 33 bp, Homo sapiens
gtgatcgtgatgttaattgtggtggcccgtgtt

SEQ ID NO: 2654 - DNA, 33 bp, Homo sapiens
aagtggccgggaacccgaaacctgtaaatagtt

SEQ ID NO: 2655 - DNA, 51 bp, Homo sapiens
agtggtgttgtgcattctgtaggaagtacttgtctttactgacagatttca

SEQ ID NO: 2656 - DNA, 51 bp, Homo sapiens
gaggatacccaaagcacaaggtcccgaactattagatgataattagaatga

SEQ ID NO: 2657 - DNA, 33 bp, Homo sapiens
gggacacttaccactatcttgacatcatatttg

SEQ ID NO: 2658 - DNA, 33 bp, Homo sapiens
ttttccagaatgcactgaggcatacatattact

SEQ ID NO: 2659 - DNA, 33 bp, Homo sapiens
gcttgggccacctccatgagtcgtttgtgacga

SEQ ID NO: 2660 - DNA, 33 bp, Homo sapiens
tgtgttgctctggtaatattccatttgagatct

SEQ ID NO: 2661 - DNA, 33 bp, Homo sapiens
gaccctgaaataacaggcactttcaattgctgg

SEQ ID NO: 2662 - DNA, 33 bp, Homo sapiens
agtaatgctaagagaagattaacacactaagtg

SEQ ID NO: 2663 - DNA, 33 bp, Homo sapiens
tcctctcttgtcattctatgttcttgaagggat

SEQ ID NO: 2664 - DNA, 33 bp, Homo sapiens
tacctacaactaagaatccagaccaatatagtc

SEQ ID NO: 2665 - DNA, 33 bp, Homo sapiens
tgtgtgcaggacttaaggccatgaggctgtgcc

SEQ ID NO: 2666 - DNA, 33 bp, Homo sapiens
gtgtgcttcatagaaattaatactggataacag

SEQ ID NO: 2667 - DNA, 33 bp, Homo sapiens
attagaaggttctgtcgatcaacattttagaaa

SEQ ID NO: 2668 - DNA, 33 bp, Homo sapiens
gtttttcatttgtttcgagaagtgccgagaaag

SEQ ID NO: 2669 - DNA, 33 bp, Homo sapiens
agcagtaccgcatagatgcccggcagtttgcac

SEQ ID NO: 2670 - DNA, 33 bp, Homo sapiens
ttttcctgtagattaattgaggcatgaggtgga

SEQ ID NO: 2671 - DNA, 33 bp, Homo sapiens
tcagctgtaaaaacgacggactttctgacaccc

SEQ ID NO: 2672 - DNA, 33 bp, Homo sapiens
gttctgtcaaagaaaagaggttagtgtgccatt

SEQ ID NO: 2673 - DNA, 51 bp, Homo sapiens
aagctgtgatttggtctcatgtgccgattaaggaagggtggtgcacaataa

SEQ ID NO: 2674 - DNA, 33 bp, Homo sapiens
taaaagtgcagagtgagatgtatagcaaaattt

SEQ ID NO: 2675 - DNA, 33 bp, Homo sapiens
aaggacctcctaagacgatagatacaaaagagg

SEQ ID NO: 2676 - DNA, 33 bp, Homo sapiens
acaagaatttagccaatggccaagttagcagac

SEQ ID NO: 2677 - DNA, 33 bp, Homo sapiens
agctgcccttaatagcgatatttcaaatagtca

SEQ ID NO: 2678 - DNA, 33 bp, Homo sapiens
ttttctctctctcaacgaagcctagcacatttt

SEQ ID NO: 2679 - DNA, 33 bp, Homo sapiens
gcatcaattgcaatgatcatatggtttttagcc

SEQ ID NO: 2680 - DNA, 33 bp, Homo sapiens
ataatcactgcagctagtaatgtgctcagtctc

SEQ ID NO: 2681 - DNA, 33 bp, Homo sapiens
ccatttgacttccttatgtttgttaaagacacc

SEQ ID NO: 2682 - DNA, 33 bp, Homo sapiens
accttggggtttgaactgctcattgaaggtaat

SEQ ID NO: 2683 - DNA, 51 bp, Homo sapiens
actgaataacattacaaaactaagagaagagtgccattttttgaatgttgc

SEQ ID NO: 2684 - DNA, 51 bp, Homo sapiens
gtcctgcgaaatcacagtacttgcctcttagcatctatctacaccaggaaa

SEQ ID NO: 2685 - DNA, 33 bp, Homo sapiens
caacactgaatttaacggatctcagaattagca

SEQ ID NO: 2686 - DNA, 33 bp, Homo sapiens
cacctgctacatcatctaagtatagtgcatccc

SEQ ID NO: 2687 - DNA, 33 bp, Homo sapiens
atcaagtaaccaatcacaaatcacgtctctatt

SEQ ID NO: 2688 - DNA, 33 bp, Homo sapiens
gctccttcattctgtatgatgtagagcaagtta

SEQ ID NO: 2689 - DNA, 33 bp, Homo sapiens
tttcttataagaaacatacacgcaattacaaca

SEQ ID NO: 2690 - DNA, 33 bp, Homo sapiens
tctccaggcagataaggaaaaaacatacacaat

SEQ ID NO: 2691 - DNA, 33 bp, Homo sapiens
acctgaaaaatctctcgaggctggaacaatttg

SEQ ID NO: 2692 - DNA, 33 bp, Homo sapiens
aaaagaacccagaaaagatggaatctagggcag

SEQ ID NO: 2693 - DNA, 51 bp, Homo sapiens
cctcttccccacactttactaacaagcatattaatagggatgaagtataag

SEQ ID NO: 2694 - DNA, 51 bp, Homo sapiens
atgccctaaaatagttggtaagaaatgactttccctgttactgggaaagct

SEQ ID NO: 2695 - DNA, 33 bp, Homo sapiens
cagcccaagataccaacactccgaaggcagccc

SEQ ID NO: 2696 - DNA, 33 bp, Homo sapiens
gtagaactgggtgagagggcgacataacaggcc

SEQ ID NO: 2697 - DNA, 33 bp, Homo sapiens
tggtcggtcctctttataggatttttgtgagct

SEQ ID NO: 2698 - DNA, 33 bp, Homo sapiens
tccatttagtgcatcatatctaagcaattgccc

SEQ ID NO: 2699 - DNA, 33 bp, Homo sapiens
tccttcaactctagcctaaaatgctggctggaa

SEQ ID NO: 2700 - DNA, 33 bp, Homo sapiens
tctgtcactaaaaccatcactgtattctatccc

SEQ ID NO: 2701 - DNA, 33 bp, Homo sapiens
acaatcttggagcccagctaccacaccaacttt

SEQ ID NO: 2702 - DNA, 33 bp, Homo sapiens
ctgcagatgttcaggagatgtaaggttgagaca

SEQ ID NO: 2703 - DNA, 33 bp, Homo sapiens
ggcatgtgtgtaaagcggaggggaggggagctg

SEQ ID NO: 2704 - DNA, 33 bp, Homo sapiens
ttgttcttttactacagccggagtggtaaatac

SEQ ID NO: 2705 - DNA, 33 bp, Homo sapiens
cattctagatgatacagctcttatttcagttca

SEQ ID NO: 2706 - DNA, 51 bp, Homo sapiens
cttatgggtcagatctggaaagttataaaaaggtgcaaaccatcagggttt

SEQ ID NO: 2707 - DNA, 33 bp, Homo sapiens
actctgtttgtcttcccgaaggatgcggcgcgt

SEQ ID NO: 2708 - DNA, 51 bp, Homo sapiens
aatttctgaaaacagaatctctcaattaggaccttccccatgtgtgtgcca

SEQ ID NO: 2709 - DNA, 33 bp, Homo sapiens
tagttgctattgtaaatggaaaaatcaggaaat

SEQ ID NO: 2710 - DNA, 33 bp, Homo sapiens
tgcatactgctttatatgagaactagttacaat

SEQ ID NO: 2711 - DNA, 33 bp, Homo sapiens
gaagattggaatatcatgtacaaagaagtctag

SEQ ID NO: 2712 - DNA, 33 bp, Homo sapiens
ggaagctgcaaatggatatcaagtacactacag

SEQ ID NO: 2713 - DNA, 33 bp, Homo sapiens
ttcaagcgtgtctcccgggagcaatgtgaggag

SEQ ID NO: 2714 - DNA, 33 bp, Homo sapiens
atatggagcttgtcagtcaacaaggaaatagac

SEQ ID NO: 2715 - DNA, 33 bp, Homo sapiens
aagcagtcacttctcctcttgagaccttggcca

SEQ ID NO: 2716 - DNA, 33 bp, Homo sapiens
gtgcttagataaatgcgagaaagtactactttg

SEQ ID NO: 2717 - DNA, 33 bp, Homo sapiens
actaagatgttgccacggaaagtcagaatacag

SEQ ID NO: 2718 - DNA, 33 bp, Homo sapiens
gaagtagggtctatgggacgccctgaccagatc

SEQ ID NO: 2719 - DNA, 33 bp, Homo sapiens
tgaccgaggaaaggaagcatctcacaagctgtt

SEQ ID NO: 2720 - DNA, 33 bp, Homo sapiens
ttaagagaacattttagctggttagaactccaa

SEQ ID NO: 2721 - DNA, 33 bp, Homo sapiens
gggctttgagaaaagcggaaaactggtctggga

SEQ ID NO: 2722 - DNA, 33 bp, Homo sapiens
cagacagcaagggacagtaaaggttagtcattc

SEQ ID NO: 2723 - DNA, 33 bp, Homo sapiens
aaacttgagctatgaagggccagcatcagaatc

SEQ ID NO: 2724 - DNA, 33 bp, Homo sapiens
aagtgtatttttcagatagctgatgtttttaca

SEQ ID NO: 2725 - DNA, 33 bp, Homo sapiens
agaggagaaacataaagtgtcctaggagtgggg

SEQ ID NO: 2726 - DNA, 33 bp, Homo sapiens
acaccgcattgtcaaatgggctgactccctggt

SEQ ID NO: 2727 - DNA, 33 bp, Homo sapiens
tgtgcataatgcagaaggaactggaacccaaag

SEQ ID NO: 2728 - DNA, 33 bp, Homo sapiens
tatgcaggtcctgagatgtggagccaactaaca

SEQ ID NO: 2729 - DNA, 33 bp, Homo sapiens
taagagctacccacaatcctaaccaactgactg

SEQ ID NO: 2730 - DNA, 33 bp, Homo sapiens
gaccaggtttcccagagtattgtcatgagcaaa

SEQ ID NO: 2731 - DNA, 33 bp, Homo sapiens
tcgtgggactcagagaggctttttcgtgtcttt

SEQ ID NO: 2732 - DNA, 33 bp, Homo sapiens
caggacagcacgtaaaggaacaaggcttgttcc

SEQ ID NO: 2733 - DNA, 33 bp, Homo sapiens
attataacaatggctagaggttctttttttcca

SEQ ID NO: 2734 - DNA, 33 bp, Homo sapiens
atcagtttacttaatcgcagataacagagtctt

SEQ ID NO: 2735 - DNA, 33 bp, Homo sapiens
acagagattagtaacagggttggtgccagtcct

SEQ ID NO: 2736 - DNA, 33 bp, Homo sapiens
aattttaaaacctatggcaaagttgaaagtatt

SEQ ID NO: 2737 - DNA, 33 bp, Homo sapiens
gagatgagctctttgagtaggtagccaagttac

SEQ ID NO: 2738 - DNA, 33 bp, Homo sapiens
tgcaaatagttgcccagtggacaccagtgcttg

SEQ ID NO: 2739 - DNA, 51 bp, Homo sapiens
tgccctctcaatatcctgcaacctatgctctcagtttcagtgttagtacta

SEQ ID NO: 2740 - DNA, 33 bp, Homo sapiens
ctactggcatctagcatggagggtccagggatg

SEQ ID NO: 2741 - DNA, 33 bp, Homo sapiens
cagtagggttgtttacgcgagtatcaccacaat

SEQ ID NO: 2742 - DNA, 33 bp, Homo sapiens
gacatcagtccggctatacttaacctccaagtc

SEQ ID NO: 2743 - DNA, 33 bp, Homo sapiens
accttttctccacccatcacatagtagtaatac

SEQ ID NO: 2744 - DNA, 33 bp, Homo sapiens
tagatttttaacagtatgtgctcatgtgaactc

SEQ ID NO: 2745 - DNA, 33 bp, Homo sapiens
atgtctaatctgtgaggaagtaaacaggttacc

SEQ ID NO: 2746 - DNA, 33 bp, Homo sapiens
atttccagagtcgttatagtggagatatggaag

SEQ ID NO: 2747 - DNA, 33 bp, Homo sapiens
ttactcacagcattcagaagggaaaaaagaata

SEQ ID NO: 2748 - DNA, 33 bp, Homo sapiens
ttccatgagatattactctgttctgtttattga

SEQ ID NO: 2749 - DNA, 33 bp, Homo sapiens
tctgccagccgtgaatgagcgttcctgttgctc

SEQ ID NO: 2750 - DNA, 33 bp, Homo sapiens
tgtattttcatggcaagaagtcaggaaacttac

SEQ ID NO: 2751 - DNA, 33 bp, Homo sapiens
gaagcaaactcatctacaccagcgtttcttagt

SEQ ID NO: 2752 - DNA, 33 bp, Homo sapiens
gtgctgccttaaacaatttgctcattctcaagg

SEQ ID NO: 2753 - DNA, 33 bp, Homo sapiens
taaccattagatagaactgcactggtgggggtt

SEQ ID NO: 2754 - DNA, 33 bp, Homo sapiens
gtgatcttcatcaaaatacagtgtccattgatc

SEQ ID NO: 2755 - DNA, 33 bp, Homo sapiens
tttaatgttgcctaaggaaaaggatttggtcca

SEQ ID NO: 2756 - DNA, 51 bp, Homo sapiens
tccatatacggacagaggatttttctttgcactttatcttatgataagact

SEQ ID NO: 2757 - DNA, 33 bp, Homo sapiens
tttggatacctctcaggatttcccatcaggacc

SEQ ID NO: 2758 - DNA, 33 bp, Homo sapiens
gccctccagagttcaataatctctagaaaggat

SEQ ID NO: 2759 - DNA, 33 bp, Homo sapiens
ctccacgtcactttcagctgatgactttgtttc

SEQ ID NO: 2760 - DNA, 33 bp, Homo sapiens
aaacatagctgtaggcgccttattacaatttct

SEQ ID NO: 2761 - DNA, 33 bp, Homo sapiens
atgattaaacacttcctattaggctctgtctct

SEQ ID NO: 2762 - DNA, 33 bp, Homo sapiens
tcccactgcttctctacatatatgccaaaccag

SEQ ID NO: 2763 - DNA, 33 bp, Homo sapiens
ggatcacttgaggacagtataggaaaaccctgt

SEQ ID NO: 2764 - DNA, 33 bp, Homo sapiens
aggttgccgggagctataatcatactactgcac

SEQ ID NO: 2765 - DNA, 33 bp, Homo sapiens
attaatcttctgatgatagcacaattgtcatgg

SEQ ID NO: 2766 - DNA, 33 bp, Homo sapiens
gtagagatcatcagggtcaatgaattacatact

SEQ ID NO: 2767 - DNA, 33 bp, Homo sapiens
aacgggacaagtggcattgaactggcagccatc

SEQ ID NO: 2768 - DNA, 33 bp, Homo sapiens
tttacaccatattgaatactgaagtggtgtcat

SEQ ID NO: 2769 - DNA, 33 bp, Homo sapiens
gatgaggtgtacccgatgtgcatttttaaagat

SEQ ID NO: 2770 - DNA, 33 bp, Homo sapiens
attgccatggtaagaattggtaacttctgtgag

SEQ ID NO: 2771 - DNA, 51 bp, Homo sapiens
atcaactaaaggacacacatgcatacactcaatgtgcaatgatggagtaac

SEQ ID NO: 2772 - DNA, 33 bp, Homo sapiens
gcaaagttgacaagacgaacagtggagaggtgg

SEQ ID NO: 2773 - DNA, 33 bp, Homo sapiens
tgcaggaactgggagatggctaagagagtggga

SEQ ID NO: 2774 - DNA, 33 bp, Homo sapiens
aaaacatcagacgatggaacttgatcgaaatct

SEQ ID NO: 2775 - DNA, 33 bp, Homo sapiens
aactcatgatagatgatgcttagaagaactgaa

SEQ ID NO: 2776 - DNA, 33 bp, Homo sapiens
ataacaaaacagggtagggaggatagaaaatac

SEQ ID NO: 2777 - DNA, 51 bp, Homo sapiens
tgtatatggattcctacagtaatgttaaaaagtaatgtaattcctaaaaat

SEQ ID NO: 2778 - DNA, 51 bp, Homo sapiens
tatgtggttataaaatcaaatgggagaaaacgactgcaatggtggaaaagg

SEQ ID NO: 2779 - DNA, 33 bp, Homo sapiens
gtcatcaggggcatgactaatatcttaccatag

SEQ ID NO: 2780 - DNA, 51 bp, Homo sapiens
aggagagtggctactttactggtcacccacaatcagcaaatcattggcctc

SEQ ID NO: 2781 - DNA, 33 bp, Homo sapiens
taaaaaggaggaaagattctaaaattgatgaga

SEQ ID NO: 2782 - DNA, 33 bp, Homo sapiens
catatgtgagccaaagtcctagaatacgtcatt

SEQ ID NO: 2783 - DNA, 33 bp, Homo sapiens
acaaaaatcaactccagatggattagcaactta

SEQ ID NO: 2784 - DNA, 33 bp, Homo sapiens
aacagtatatcatgactagtgtagatttatgtg

SEQ ID NO: 2785 - DNA, 51 bp, Homo sapiens
taggatagcggttgcctctgtcagcgagaagatttgtcagaattttgatgt

SEQ ID NO: 2786 - DNA, 33 bp, Homo sapiens
aatattacattcaatcgacactgacatattaaa

SEQ ID NO: 2787 - DNA, 33 bp, Homo sapiens
gttttcctggctgacattgatgctagtagatgt

SEQ ID NO: 2788 - DNA, 33 bp, Homo sapiens
attctcactactctgcgatgaatgcctcagaat

SEQ ID NO: 2789 - DNA, 33 bp, Homo sapiens
taacttagtttcacaaggacagagaccttgtct

SEQ ID NO: 2790 - DNA, 33 bp, Homo sapiens
tctctttgttgttaagtagagcatggtctcctc

SEQ ID NO: 2791 - DNA, 33 bp, Homo sapiens
tccaccctatccctaagttacatgctctaagat

SEQ ID NO: 2792 - DNA, 33 bp, Homo sapiens
ctgtaggagtttcttatctcattgttgctcaag

SEQ ID NO: 2793 - DNA, 33 bp, Homo sapiens
tgaagtctgggtcaacgatctaccagagtttct

SEQ ID NO: 2794 - DNA, 33 bp, Homo sapiens
acgggcttggtaactgtatgttgttgtttgctt

SEQ ID NO: 2795 - DNA, 33 bp, Homo sapiens
ggaggacatctgagtgcaaagtctggatcataa

SEQ ID NO: 2796 - DNA, 33 bp, Homo sapiens
aagtggggcaagactctgaaagtaggctactat

SEQ ID NO: 2797 - DNA, 33 bp, Homo sapiens
gagggaattctctgtcgctcaagaatcaatgct

SEQ ID NO: 2798 - DNA, 33 bp, Homo sapiens
ataaataaagaaacaatgagcattcatgtgcag

SEQ ID NO: 2799 - DNA, 33 bp, Homo sapiens
tgatacagcagctgtggagaatagtttggtggt

SEQ ID NO: 2800 - DNA, 33 bp, Homo sapiens
atgcaagagtgaagaatgcttgggagcctctgc

SEQ ID NO: 2801 - DNA, 33 bp, Homo sapiens
gtcagaaatgtacaaaggcataatgtctcatta

SEQ ID NO: 2802 - DNA, 33 bp, Homo sapiens
gtgaaaaatatgaatgccatacgtgaacaaatg

SEQ ID NO: 2803 - DNA, 33 bp, Homo sapiens
ggtgtctgttccatgcgatgctggggttaccat

SEQ ID NO: 2804 - DNA, 33 bp, Homo sapiens
tataaaggaccacccccctaaacacacacatac

SEQ ID NO: 2805 - DNA, 33 bp, Homo sapiens
tgttaaaaaaaaatgccagttgccatctcccac

SEQ ID NO: 2806 - DNA, 33 bp, Homo sapiens
agggttggagagttcacgaaacagtctgaagtc

SEQ ID NO: 2807 - DNA, 33 bp, Homo sapiens
caatacctattttccaggcagtgaagaaaagca

SEQ ID NO: 2808 - DNA, 33 bp, Homo sapiens
cacctgctctgtaaccgcccttcctgccgaact

SEQ ID NO: 2809 - DNA, 33 bp, Homo sapiens
aggttatgaagaagacgaaaaaggatgagagct

SEQ ID NO: 2810 - DNA, 33 bp, Homo sapiens
gcaagaagccagggaccaatggattgcaatgtt

SEQ ID NO: 2811 - DNA, 33 bp, Homo sapiens
tgaccctggatttgacgaaagctcgctcccact

SEQ ID NO: 2812 - DNA, 33 bp, Homo sapiens
caggtagtacaccacatagaaccagactctcag

SEQ ID NO: 2813 - DNA, 33 bp, Homo sapiens
attgttctgctggactcagaggactaaacttat

SEQ ID NO: 2814 - DNA, 33 bp, Homo sapiens
ggaaaaataacccaaataaagagatggtggaag

SEQ ID NO: 2815 - DNA, 33 bp, Homo sapiens
tgaaccaacaactgcctcctgggaagaaccctt

SEQ ID NO: 2816 - DNA, 33 bp, Homo sapiens
caggtggaattctggatcctcaaaagtataaca

SEQ ID NO: 2817 - DNA, 33 bp, Homo sapiens
tgctgggttagaagtagctttttcaggctcact

SEQ ID NO: 2818 - DNA, 33 bp, Homo sapiens
gattgaataattcaaagagatgacgcccttgta

SEQ ID NO: 2819 - DNA, 33 bp, Homo sapiens
agccttacacaaagtacatcatctaacatgttt

SEQ ID NO: 2820 - DNA, 33 bp, Homo sapiens
caacttgcatgacaaagagtcccaaagcctaag

SEQ ID NO: 2821 - DNA, 33 bp, Homo sapiens
gaatccataaaactgatagccaactcgtgggga

SEQ ID NO: 2822 - DNA, 33 bp, Homo sapiens
cagtggcgactcttgcgctgactgagtcgccaa

SEQ ID NO: 2823 - DNA, 33 bp, Homo sapiens
cagccttccaaatcaggcactcatgttgccaat

SEQ ID NO: 2824 - DNA, 33 bp, Homo sapiens
gaggtttatttgggcaggaataataaaaagcac

SEQ ID NO: 2825 - DNA, 33 bp, Homo sapiens
aaagactgcaccgttcgccatgagattaatgaa

SEQ ID NO: 2826 - DNA, 33 bp, Homo sapiens
tgttacaaaggtgcacgaaaagagcatagaggg

SEQ ID NO: 2827 - DNA, 33 bp, Homo sapiens
tgagtggacaataaccggacagtccaacgaccc

SEQ ID NO: 2828 - DNA, 33 bp, Homo sapiens
ttgtgtttggcttccatagtagaatgttttcga

SEQ ID NO: 2829 - DNA, 33 bp, Homo sapiens
tatagttccactcaaagtggcatgactaatttc

SEQ ID NO: 2830 - DNA, 33 bp, Homo sapiens
tccccagggagtagacgctaatggatacctaat

SEQ ID NO: 2831 - DNA, 33 bp, Homo sapiens
atcaagccactccctatacaaagcatcagatct

SEQ ID NO: 2832 - DNA, 33 bp, Homo sapiens
acctaatccttgagacgcgagctgttcagctta

SEQ ID NO: 2833 - DNA, 33 bp, Homo sapiens
tatatgtgattttcaatttcctaggcaccactt

SEQ ID NO: 2834 - DNA, 33 bp, Homo sapiens
ttgcatttccaggttatgccaggcaacagactc

SEQ ID NO: 2835 - DNA, 33 bp, Homo sapiens
tcaggtaccaactccaggtttaaccagctctgg

SEQ ID NO: 2836 - DNA, 33 bp, Homo sapiens
aaaaagactggttgactaactgatgacctgaaa

SEQ ID NO: 2837 - DNA, 33 bp, Homo sapiens
cctcctgatctgtcaaggtgtctgtacacatgc

SEQ ID NO: 2838 - DNA, 33 bp, Homo sapiens
ccagtcatgcattccataccctggttataatat

SEQ ID NO: 2839 - DNA, 33 bp, Homo sapiens
cccggactgggaaatatcaggaaaaggataggg

SEQ ID NO: 2840 - DNA, 33 bp, Homo sapiens
aaatatggagcaaagatacactacagtgaagca

SEQ ID NO: 2841 - DNA, 33 bp, Homo sapiens
gactctggggcttataggataacatcaattttg

SEQ ID NO: 2842 - DNA, 33 bp, Homo sapiens
ggtaaaagtgaagaaatcatgggactggggtgg

SEQ ID NO: 2843 - DNA, 33 bp, Homo sapiens
cagtcctgattactgatggacgttgtttgcaac

SEQ ID NO: 2844 - DNA, 33 bp, Homo sapiens
cactgttgaaagagaggcctagaagcagaagac

SEQ ID NO: 2845 - DNA, 33 bp, Homo sapiens
gtaacaattagtgctatagtagaaaagacaggt

SEQ ID NO: 2846 - DNA, 33 bp, Homo sapiens
cagatcacgtagaggatgaaccttctatttttt

SEQ ID NO: 2847 - DNA, 33 bp, Homo sapiens
atcatcaacatagaaagttaacaagatattcag

SEQ ID NO: 2848 - DNA, 33 bp, Homo sapiens
catttgttttcacccaggttatgctttataaac

SEQ ID NO: 2849 - DNA, 33 bp, Homo sapiens
aatttaggctctgtccgcacagattaggagtcc

SEQ ID NO: 2850 - DNA, 33 bp, Homo sapiens
gaaccatctaaccctatgtagcttgtatatttc

SEQ ID NO: 2851 - DNA, 33 bp, Homo sapiens
atgaagacaaattttatggcacatgagagttca

SEQ ID NO: 2852 - DNA, 33 bp, Homo sapiens
tatataaatgtaaccatcatcctgtagaagaac

SEQ ID NO: 2853 - DNA, 33 bp, Homo sapiens
cagagagaagttgacatccagtctccctaaggg

SEQ ID NO: 2854 - DNA, 33 bp, Homo sapiens
tccacagaaagggaagccatcaaaattgcatgg

SEQ ID NO: 2855 - DNA, 33 bp, Homo sapiens
taattgtcccagaagagcaaaaactggatgtgt

SEQ ID NO: 2856 - DNA, 33 bp, Homo sapiens
acaagacatttcacaggagtttgattactttgt

SEQ ID NO: 2857 - DNA, 33 bp, Homo sapiens
aagaatgatttaatgatgcttaattgaaaatgt

SEQ ID NO: 2858 - DNA, 33 bp, Homo sapiens
ttctaatgttaaagtatatttcaccatgattct

SEQ ID NO: 2859 - DNA, 33 bp, Homo sapiens
caaggatccatctttagggtgttcagtagggat

SEQ ID NO: 2860 - DNA, 33 bp, Homo sapiens
gagatttttcaacatctgataacctgcatacag

SEQ ID NO: 2861 - DNA, 33 bp, Homo sapiens
tgttttatttttgtcagaactcagtcacataac

SEQ ID NO: 2862 - DNA, 33 bp, Homo sapiens
gaagatggcaaaataatgagagaaagataaact

SEQ ID NO: 2863 - DNA, 51 bp, Homo sapiens
gctgtcttaaatatactcaagtgttgaaagaatattgttttagaggtttca

SEQ ID NO: 2864 - DNA, 33 bp, Homo sapiens
gccatctgtaaactcatgcttcggaaggatcac

SEQ ID NO: 2865 - DNA, 33 bp, Homo sapiens
gaaattttatagacaatgagaaggtgttagcta

SEQ ID NO: 2866 - DNA, 33 bp, Homo sapiens
gttctgatcagaaatatagtttttccaaggctg

SEQ ID NO: 2867 - DNA, 51 bp, Homo sapiens
tatttcatgccaatagagacttaaatagagcaacagtagctataattacat

SEQ ID NO: 2868 - DNA, 33 bp, Homo sapiens
tattgaaatgtcaagctgaatacatttgaagtt

SEQ ID NO: 2869 - DNA, 33 bp, Homo sapiens
ctcctctcctaacagagtagcacacactgatat

SEQ ID NO: 2870 - DNA, 33 bp, Homo sapiens
gaactggccttgcgcatggctctggaagcagga

SEQ ID NO: 2871 - DNA, 33 bp, Homo sapiens
gccgtactctgagaaccatgctgtaaagcttct

SEQ ID NO: 2872 - DNA, 33 bp, Homo sapiens
tcagaggattgtttaatgtacacgtgtgtactc

SEQ ID NO: 2873 - DNA, 33 bp, Homo sapiens
atatgatggtaaatgagataatccgggcataga

SEQ ID NO: 2874 - DNA, 33 bp, Homo sapiens
aataagcagtagagtatctcataaacagattaa

SEQ ID NO: 2875 - DNA, 51 bp, Homo sapiens
atttgcttccagaattctgctgttccaataagtgtcatgttgtcctttaaa

SEQ ID NO: 2876 - DNA, 51 bp, Homo sapiens
tccttgaagagattatgtccctgaagagttttaacagtattttatttagtt

SEQ ID NO: 2877 - DNA, 33 bp, Homo sapiens
ttaaagcacacaaagtgaagggctgaatctgga

SEQ ID NO: 2878 - DNA, 33 bp, Homo sapiens
aatagcgaagtgggtataagcatgtttcattta

SEQ ID NO: 2879 - DNA, 33 bp, Homo sapiens
ccttgagtcctatacatgtggctccacaattac

SEQ ID NO: 2880 - DNA, 33 bp, Homo sapiens
tctgggtgcttgttccgcttccttgtgcattcc

SEQ ID NO: 2881 - DNA, 33 bp, Homo sapiens
aaatatactaactggatgaatcagcctattgat

SEQ ID NO: 2882 - DNA, 33 bp, Homo sapiens
tgagacatctaaaaagtactccatccagcgttc

SEQ ID NO: 2883 - DNA, 33 bp, Homo sapiens
ctcatttcatggatcagtacaagataatccaga

SEQ ID NO: 2884 - DNA, 33 bp, Homo sapiens
cacccttcaaagtcacgcaaccaattctgaatt

SEQ ID NO: 2885 - DNA, 33 bp, Homo sapiens
ctgccatcaggagcacgctgtgtaaccgacaag

SEQ ID NO: 2886 - DNA, 33 bp, Homo sapiens
ccttagaaattttccaggtaaagaccagcattt

SEQ ID NO: 2887 - DNA, 33 bp, Homo sapiens
ggattgtgactcagtatgatggagagatgagat

SEQ ID NO: 2888 - DNA, 33 bp, Homo sapiens
ggcttgcctggcaccattggagcaggtcttggc

SEQ ID NO: 2889 - DNA, 33 bp, Homo sapiens
tgcacacacaaaagaatgccctgacaagtgcac

SEQ ID NO: 2890 - DNA, 33 bp, Homo sapiens
atcctgtctcactcactgctaaccctgggcctg

SEQ ID NO: 2891 - DNA, 33 bp, Homo sapiens
tactcacttcgagggaggtgcataaggaaagcc

SEQ ID NO: 2892 - DNA, 33 bp, Homo sapiens
acagaatcaggaataatcaaaatacatgattcc

SEQ ID NO: 2893 - DNA, 33 bp, Homo sapiens
agttaggtgctaattcgctccggccagggcttc

SEQ ID NO: 2894 - DNA, 33 bp, Homo sapiens
aaagaccagaaggaacgctaggtccaattgttt

SEQ ID NO: 2895 - DNA, 33 bp, Homo sapiens
agacagacagctcaacgagggctactataagca

SEQ ID NO: 2896 - DNA, 33 bp, Homo sapiens
cttcctaggactaagagtcgggtggagatgggt

SEQ ID NO: 2897 - DNA, 33 bp, Homo sapiens
ggcagaagggtcaacaggtaacaacagtcaaaa

SEQ ID NO: 2898 - DNA, 51 bp, Homo sapiens
ggttgatcaggcttatgacgttcacggacccggggcagtgagtgtatgtgc

SEQ ID NO: 2899 - DNA, 33 bp, Homo sapiens
gcagctgcaaggtgactatatgagtgcgggagg

SEQ ID NO: 2900 - DNA, 33 bp, Homo sapiens
tgttgcaggttagggagtcaaggctgagtgtct

SEQ ID NO: 2901 - DNA, 33 bp, Homo sapiens
caattctgaggaagaagaaaatgctagcatgga

SEQ ID NO: 2902 - DNA, 33 bp, Homo sapiens
gctccaggaattcacagctttctcctgcatcat

SEQ ID NO: 2903 - DNA, 33 bp, Homo sapiens
tgaggtacaaatccaatagagctttaatcccaa

SEQ ID NO: 2904 - DNA, 33 bp, Homo sapiens
ggtgtcaccattgctctatgattaatccagcaa

SEQ ID NO: 2905 - DNA, 33 bp, Homo sapiens
ataccgcatccagagaggtcgcagagccacagc

SEQ ID NO: 2906 - DNA, 33 bp, Homo sapiens
cttcgtttctgtggcatgcgacagtttccacct

SEQ ID NO: 2907 - DNA, 33 bp, Homo sapiens
cgaggtaagcctcaatgagcaggagacatttca

SEQ ID NO: 2908 - DNA, 33 bp, Homo sapiens
catagcccttgtcaccgcctcataaatcatttg

SEQ ID NO: 2909 - DNA, 33 bp, Homo sapiens
attcagattctatctcgagaggaacacggtctg

SEQ ID NO: 2910 - DNA, 33 bp, Homo sapiens
tgctttttaatatttcgcatcaggagacatact

SEQ ID NO: 2911 - DNA, 33 bp, Homo sapiens
tctccaaaagacataaggtaaagccctattcag

SEQ ID NO: 2912 - DNA, 33 bp, Homo sapiens
gctaagcattctcagaggacaaataaaaaccat

SEQ ID NO: 2913 - DNA, 33 bp, Homo sapiens
actggaagttagatgttaagagttgattgtaca

SEQ ID NO: 2914 - DNA, 33 bp, Homo sapiens
cagcctggggaagtacgaggctcaatttagatc

SEQ ID NO: 2915 - DNA, 33 bp, Homo sapiens
gcaggctgtcgcgggatgagttgatgttacagc

SEQ ID NO: 2916 - DNA, 33 bp, Homo sapiens
gccaggatggttctgcgactttatgaaggaaga

SEQ ID NO: 2917 - DNA, 33 bp, Homo sapiens
tgctttagcaacactacctcctagacttctcag

SEQ ID NO: 2918 - DNA, 33 bp, Homo sapiens
tattcacaaatcatcacgtattgtcccaaattt

SEQ ID NO: 2919 - DNA, 33 bp, Homo sapiens
gaacaataaatcacaagtaaaattggacaatac

SEQ ID NO: 2920 - DNA, 51 bp, Homo sapiens
tgtttcgagcttctgtgctttcaagtctacagtaatttatcttgtgcacag

SEQ ID NO: 2921 - DNA, 51 bp, Homo sapiens
tattttattttcctaattggcatactttttattttgttttcttgtataatt

SEQ ID NO: 2922 - DNA, 33 bp, Homo sapiens
aggggagatgagaacagcggggcagaaagaagg

SEQ ID NO: 2923 - DNA, 33 bp, Homo sapiens
tttcgaacctctgggactacatctctatggctt

SEQ ID NO: 2924 - DNA, 33 bp, Homo sapiens
aaatcagagataaagatgcaagaaagagaattc

SEQ ID NO: 2925 - DNA, 33 bp, Homo sapiens
gagagtgcccacctccgaggtaagagggttatt

SEQ ID NO: 2926 - DNA, 33 bp, Homo sapiens
ttgtgtagggaagagacgagaaccacattgcat

SEQ ID NO: 2927 - DNA, 33 bp, Homo sapiens
gtgaacagctctataattgctcatctttattga

SEQ ID NO: 2928 - DNA, 33 bp, Homo sapiens
ccctttggccgtcagatatacagcaagtgctca

SEQ ID NO: 2929 - DNA, 33 bp, Homo sapiens
agcataccactacttaggctgtccatatactgt

SEQ ID NO: 2930 - DNA, 33 bp, Homo sapiens
tcaaggctttgctgtatgtttgaaccactgaac

SEQ ID NO: 2931 - DNA, 33 bp, Homo sapiens
ttcatccctactcaaggccagttaaatcagaac

SEQ ID NO: 2932 - DNA, 33 bp, Homo sapiens
cttctctctcccgcattatcgatttcgccctct

SEQ ID NO: 2933 - DNA, 33 bp, Homo sapiens
tgttgcctagttttaattcttcttgcaacatca

SEQ ID NO: 2934 - DNA, 33 bp, Homo sapiens
tcacaaattcaccttcgcttaaattggtcaaag

SEQ ID NO: 2935 - DNA, 33 bp, Homo sapiens
aaacatgaaactttacgattggaaaaatacaca

SEQ ID NO: 2936 - DNA, 33 bp, Homo sapiens
tagactaaggggacgctgagtattaaacaggtt

SEQ ID NO: 2937 - DNA, 33 bp, Homo sapiens
ggcaaactgtgaaatatgaagcagcagtcatct

SEQ ID NO: 2938 - DNA, 51 bp, Homo sapiens
ggggtcttatgacctatagcaaacatgacaggtcagataatttccttatgg

SEQ ID NO: 2939 - DNA, 33 bp, Homo sapiens
gcttttaagcatttaggcaccatcatataaatc

SEQ ID NO: 2940 - DNA, 33 bp, Homo sapiens
catggaggagaaaacatggaatagatcacacag

SEQ ID NO: 2941 - DNA, 33 bp, Homo sapiens
catgagccagctaaaggacataggatcaagtgt

SEQ ID NO: 2942 - DNA, 33 bp, Homo sapiens
tccttctactccaagctgagacactagaatgta

SEQ ID NO: 2943 - DNA, 33 bp, Homo sapiens
aattggagactacttataggcaataatctcacc

SEQ ID NO: 2944 - DNA, 33 bp, Homo sapiens
atctgcaacatctgtatcaaaggccctaatatc

SEQ ID NO: 2945 - DNA, 33 bp, Homo sapiens
ttctaattttcatttagagtcacaagttgctta

SEQ ID NO: 2946 - DNA, 33 bp, Homo sapiens
tcaggggaaatccagctgaaattttggtccatt

SEQ ID NO: 2947 - DNA, 33 bp, Homo sapiens
ccaaaacagtgacttcgcccgtaagaacatttt

SEQ ID NO: 2948 - DNA, 33 bp, Homo sapiens
aggaatagaataatcatggctgaaaatgtaatc

SEQ ID NO: 2949 - DNA, 33 bp, Homo sapiens
ttctggagtattgtgtgaagatgagtaagagtg

SEQ ID NO: 2950 - DNA, 33 bp, Homo sapiens
tggagaagtgacccaaggaacaagggcgaggga

SEQ ID NO: 2951 - DNA, 33 bp, Homo sapiens
tggagacctctctgaagctgctctgtaagatga

SEQ ID NO: 2952 - DNA, 33 bp, Homo sapiens
ttgaggctcatcctaatggtagtacttgatttt

SEQ ID NO: 2953 - DNA, 33 bp, Homo sapiens
ttgtgttagaatgacagtaggcttcaaatgatc

SEQ ID NO: 2954 - DNA, 51 bp, Homo sapiens
ctcaccagtacattcccattcataattcctcttaccttttccaccatgacc

SEQ ID NO: 2955 - DNA, 51 bp, Homo sapiens
gctttgttcattctataattcctaattctaatatcatcgtctccaggattc

SEQ ID NO: 2956 - DNA, 33 bp, Homo sapiens
cctgaccatcacagactcaggtgccaagaacaa

SEQ ID NO: 2957 - DNA, 33 bp, Homo sapiens
tcatattttgcaactagctgatcatctaacagt

SEQ ID NO: 2958 - DNA, 33 bp, Homo sapiens
ccctttcctccttaaatgttggtgaactgagag

SEQ ID NO: 2959 - DNA, 33 bp, Homo sapiens
gtgactgaattaaacacatcccaaagcctgccc

SEQ ID NO: 2960 - DNA, 33 bp, Homo sapiens
catggtgaaactaaaatactcttctctactaaa

SEQ ID NO: 2961 - DNA, 33 bp, Homo sapiens
acagcattgtcctatcggaactattgtttacag

SEQ ID NO: 2962 - DNA, 33 bp, Homo sapiens
ctagcactgtaagatagtaagagtgtgttgttc

SEQ ID NO: 2963 - DNA, 33 bp, Homo sapiens
ctttaagaatgtttaatggacaaccacttggaa

SEQ ID NO: 2964 - DNA, 33 bp, Homo sapiens
ttttaccatttagggatagtagtagtcaggaga

SEQ ID NO: 2965 - DNA, 33 bp, Homo sapiens
tgatatcacaatctactcatggattgcaaccca

SEQ ID NO: 2966 - DNA, 33 bp, Homo sapiens
cggaagtatgtatgaagaggtgatatttccact

SEQ ID NO: 2967 - DNA, 33 bp, Homo sapiens
attttttgtgagatgcgcacttttactaccctc

SEQ ID NO: 2968 - DNA, 33 bp, Homo sapiens
atattttctttccaaccggcacctattatcaga

SEQ ID NO: 2969 - DNA, 33 bp, Homo sapiens
tttttgttgttgttaaggaatcttgctctgtcg

SEQ ID NO: 2970 - DNA, 33 bp, Homo sapiens
attgacaggacatcacgacattatgaaaatcca

SEQ ID NO: 2971 - DNA, 33 bp, Homo sapiens
tgcaattccatagcttgaaatgtctccttacag

SEQ ID NO: 2972 - DNA, 33 bp, Homo sapiens
taagcttttaagtacagtacactcttctaaaat

SEQ ID NO: 2973 - DNA, 33 bp, Homo sapiens
catcttgtgactgctatagctgaaatgactgtt

SEQ ID NO: 2974 - DNA, 33 bp, Homo sapiens
tggtgacaaagaaagaccctgcttcagaaagaa

SEQ ID NO: 2975 - DNA, 33 bp, Homo sapiens
ggcaatacctagtgctgacaaagatatcaaatg

SEQ ID NO: 2976 - DNA, 33 bp, Homo sapiens
aagcgttcggcaatagtagacgtgaaaataaaa

SEQ ID NO: 2977 - DNA, 33 bp, Homo sapiens
tctaaactaactgaaatgaaaagcagcagaagt

SEQ ID NO: 2978 - DNA, 33 bp, Homo sapiens
gttaacagagaatgcctaaaactggaaaaacaa

SEQ ID NO: 2979 - DNA, 33 bp, Homo sapiens
gagcgtaggaggcagctattttaacaatgaaaa

SEQ ID NO: 2980 - DNA, 33 bp, Homo sapiens
catgatcactgaagactgcaacaataaagagaa

SEQ ID NO: 2981 - DNA, 33 bp, Homo sapiens
gcatctacattgatgagtatctcttactaatct

SEQ ID NO: 2982 - DNA, 33 bp, Homo sapiens
acaaagggctcattcagcgtgatccaaaacttc

SEQ ID NO: 2983 - DNA, 33 bp, Homo sapiens
aagacaatattcaaggtcaatctaatacagaga

SEQ ID NO: 2984 - DNA, 51 bp, Homo sapiens
tttcttcttcaggttaatctgcatggaaatccaaactattaattagaaggc

SEQ ID NO: 2985 - DNA, 51 bp, Homo sapiens
aatctctgatacattaatccagtgcgaaaccagtgattttcttaaactcac

SEQ ID NO: 2986 - DNA, 33 bp, Homo sapiens
tactacagagattcactgaggtagacactgctg

SEQ ID NO: 2987 - DNA, 33 bp, Homo sapiens
agagtctgaataaaacgatgatagaaataagga

SEQ ID NO: 2988 - DNA, 33 bp, Homo sapiens
tctctgaagcacaaagtaagattacaagttcca

SEQ ID NO: 2989 - DNA, 51 bp, Homo sapiens
ttttcatctgccttttatctgaggcgatgccaatggttttacagtacgcag

SEQ ID NO: 2990 - DNA, 33 bp, Homo sapiens
ggttaggatttgggcacagagaatacaacagga

SEQ ID NO: 2991 - DNA, 33 bp, Homo sapiens
gcagaagctcttctgcgaataaaccatgaagtt

SEQ ID NO: 2992 - DNA, 33 bp, Homo sapiens
acttcaagtataggtatgttgttaatgcagaaa

SEQ ID NO: 2993 - DNA, 33 bp, Homo sapiens
tcgtttgcttactctctgacacttgttccaaac

SEQ ID NO: 2994 - DNA, 33 bp, Homo sapiens
ttggttggttatttaatgtgaaagagatgtgta

SEQ ID NO: 2995 - DNA, 33 bp, Homo sapiens
caaaggctttttagtatgtggagaagaatcaaa

SEQ ID NO: 2996 - DNA, 33 bp, Homo sapiens
attatcatatattctcgaactgtacttgtattt

SEQ ID NO: 2997 - DNA, 33 bp, Homo sapiens
aaaggtaggccttctatgctattctggagtaag

SEQ ID NO: 2998 - DNA, 33 bp, Homo sapiens
gaaatcataggtgtaggagaaagtcagcaaagg

SEQ ID NO: 2999 - DNA, 33 bp, Homo sapiens
ttcatctcattactgccagtttgtacgctttga

SEQ ID NO: 3000 - DNA, 51 bp, Homo sapiens
taaatacatagatgtgtaacacgactgtatactcctgtacagagctgaata

SEQ ID NO: 3001 - DNA, 51 bp, Homo sapiens
gcttggttcaaatctgctccatccataggttcctgtcctcaggattcttca

SEQ ID NO: 3002 - DNA, 33 bp, Homo sapiens
tgttaagtatttcaccgacaggtacaggttata

SEQ ID NO: 3003 - DNA, 33 bp, Homo sapiens
tctttatatctgcacattgtatatctgcttatg

SEQ ID NO: 3004 - DNA, 51 bp, Homo sapiens
tctctcttcctgattccatcatagacaaaactgaaagaagccacagaacac

SEQ ID NO: 3005 - DNA, 33 bp, Homo sapiens
ggaacagaatgcaccataggaacagtaagttca

SEQ ID NO: 3006 - DNA, 33 bp, Homo sapiens
agggaagacaggaaaatcatcatatgagcccag

SEQ ID NO: 3007 - DNA, 33 bp, Homo sapiens
gttaattgaagctcgatatgctaactaagaaac

SEQ ID NO: 3008 - DNA, 33 bp, Homo sapiens
ctagacatggaaagaacctaatactccacagtc

SEQ ID NO: 3009 - DNA, 33 bp, Homo sapiens
aggtacatcatctgcttaatgcaccacaggtac

SEQ ID NO: 3010 - DNA, 33 bp, Homo sapiens
ttatggttctttttgatgggagcctccaattgc

SEQ ID NO: 3011 - DNA, 33 bp, Homo sapiens
taatattggtgatatatagttaatgggatttca

SEQ ID NO: 3012 - DNA, 33 bp, Homo sapiens
atttggggtattttaattgctgtatagagatag

SEQ ID NO: 3013 - DNA, 33 bp, Homo sapiens
atgctgagcagaaactgacctattaagactttc

SEQ ID NO: 3014 - DNA, 33 bp, Homo sapiens
aaaagtgaaggaatgcgacttctgaggaggtga

SEQ ID NO: 3015 - DNA, 33 bp, Homo sapiens
aagtgcttacatgctagaattaggaccaggttc

SEQ ID NO: 3016 - DNA, 33 bp, Homo sapiens
aatagataactctcaagaatttgtgattgaggt

SEQ ID NO: 3017 - DNA, 33 bp, Homo sapiens
actttggtaagctctatattatgaacaaaacac

SEQ ID NO: 3018 - DNA, 33 bp, Homo sapiens
tgaaaaacttgtgagaggaatgttaaactgcac

SEQ ID NO: 3019 - DNA, 33 bp, Homo sapiens
attatctgcctactcagtattgatgcaaaaaaa

SEQ ID NO: 3020 - DNA, 51 bp, Homo sapiens
acctttagttcacaggattcttacataggactctttttagctccctataga

SEQ ID NO: 3021 - DNA, 33 bp, Homo sapiens
gtgtacaaatccggaggaaaagccatcaaattc

SEQ ID NO: 3022 - DNA, 33 bp, Homo sapiens
aatgggacaacttaaggcaggtgcaagttaaac

SEQ ID NO: 3023 - DNA, 33 bp, Homo sapiens
ctgcagatgaaactaccaatccattgtcttttg

SEQ ID NO: 3024 - DNA, 33 bp, Homo sapiens
catctcaataattacctagtcacaggtgtttaa

SEQ ID NO: 3025 - DNA, 33 bp, Homo sapiens
tcctgtgggtgctttatgcattaatccacagaa

SEQ ID NO: 3026 - DNA, 51 bp, Homo sapiens
cttttctcttctcctgtatcttatgcaatccaagaagggtacactccctca

SEQ ID NO: 3027 - DNA, 33 bp, Homo sapiens
ttatcacagttacctccagaagctcaggatttc

SEQ ID NO: 3028 - DNA, 33 bp, Homo sapiens
gtttcaaagcgaggtctcaaataaagtctgcat

SEQ ID NO: 3029 - DNA, 33 bp, Homo sapiens
acaagataaggaaaaacatgaagtggtctatga

SEQ ID NO: 3030 - DNA, 33 bp, Homo sapiens
tataagcaggttttcatctttgagaatatcttg

SEQ ID NO: 3031 - DNA, 33 bp, Homo sapiens
atttctgattgggccctgaagttagaaaactat

SEQ ID NO: 3032 - DNA, 33 bp, Homo sapiens
aaatacatccaatttatgatcatttatcactaa

SEQ ID NO: 3033 - DNA, 51 bp, Homo sapiens
catttccattcaaagaaccccctcaggctctcttctagtactgatctggtg

SEQ ID NO: 3034 - DNA, 33 bp, Homo sapiens
aaataattttgagcatgaactctacaccctatt

SEQ ID NO: 3035 - DNA, 33 bp, Homo sapiens
aacagtcaatctcaaggaatcgccaaaatactt

SEQ ID NO: 3036 - DNA, 33 bp, Homo sapiens
gttttacttctttacatctgcacaaccttaagc

SEQ ID NO: 3037 - DNA, 33 bp, Homo sapiens
tctttaatcttaaaaatagccttagtagccagt

SEQ ID NO: 3038 - DNA, 51 bp, Homo sapiens
gaaagaagattaaaaatgtcaaaaacggtgctagactgtgaagatgatatc

SEQ ID NO: 3039 - DNA, 51 bp, Homo sapiens
atttgccaattgagaaagaattttagaacattgtactcagtaacaatatga

SEQ ID NO: 3040 - DNA, 33 bp, Homo sapiens
gtttcaaacttgaacagtcttgatccagtgtct

SEQ ID NO: 3041 - DNA, 33 bp, Homo sapiens
aaaaatagatcatctggaactgaccctttatga

SEQ ID NO: 3042 - DNA, 51 bp, Homo sapiens
tcatctcgcttatctttcatctggctgaatgattgactgagagtcccatcc

SEQ ID NO: 3043 - DNA, 33 bp, Homo sapiens
tctcttattccatcattaggtccactgcaggca

SEQ ID NO: 3044 - DNA, 33 bp, Homo sapiens
ctacaagattttctccgctttatcattcagccc

SEQ ID NO: 3045 - DNA, 33 bp, Homo sapiens
tttatcagtgcgtccagagaacaatgccagaaa

SEQ ID NO: 3046 - DNA, 33 bp, Homo sapiens
cacttgttagtaaagaggtgcaataactttggg

SEQ ID NO: 3047 - DNA, 33 bp, Homo sapiens
tactatttattgatacccctgctctgtgccaga

SEQ ID NO: 3048 - DNA, 33 bp, Homo sapiens
tcaaatcatttgaagagtagttgtttagtgagt

SEQ ID NO: 3049 - DNA, 51 bp, Homo sapiens
agatttctagaagtcaaaagtataattccacacaaaaagatgttaattagt

SEQ ID NO: 3050 - DNA, 51 bp, Homo sapiens
acttgtggtcatgtgacaaggtccacctaatagaatgtgagaagagatgta

SEQ ID NO: 3051 - DNA, 33 bp, Homo sapiens
gtcaaagattgggaaagtacattctgcttacca

SEQ ID NO: 3052 - DNA, 33 bp, Homo sapiens
tgcattatggctttaagaggaagtaaaagaatc

SEQ ID NO: 3053 - DNA, 33 bp, Homo sapiens
tttgtgttcagtctcactcaaggattataactt

SEQ ID NO: 3054 - DNA, 33 bp, Homo sapiens
aggaagatatcaaattcaagttaggagaagaaa

SEQ ID NO: 3055 - DNA, 51 bp, Homo sapiens
ccagacccaaatatgtatcattaaataagtaaacctaattcaaacctgatt

SEQ ID NO: 3056 - DNA, 51 bp, Homo sapiens
atatgtcttcagatcatcaatttccgctactcagtcattatcaagatcaag

SEQ ID NO: 3057 - DNA, 51 bp, Homo sapiens
tgtcttttttctttttcactcacaatattttaaccacagttaagcatgacc

SEQ ID NO: 3058 - DNA, 51 bp, Homo sapiens
aataataaagaaactgatgtcaagcgatttatctgattcagattacagtct

SEQ ID NO: 3059 - DNA, 51 bp, Homo sapiens
catactcactttgttcttccattcatcttgataatttgacaccatactaac

SEQ ID NO: 3060 - DNA, 33 bp, Homo sapiens
gtatatggctcccgtggatgtaatatcagatct

SEQ ID NO: 3061 - DNA, 33 bp, Homo sapiens
aattcctttccatgcatctggacccagttcttt

SEQ ID NO: 3062 - DNA, 33 bp, Homo sapiens
tatcttttctttccacgcaagattttaggcaac

SEQ ID NO: 3063 - DNA, 33 bp, Homo sapiens
ttttagaaccaggaaagagtttaggctcagtga

SEQ ID NO: 3064 - DNA, 33 bp, Homo sapiens
gcaaaatcggatagacggtcaagttatcaaaca

SEQ ID NO: 3065 - DNA, 33 bp, Homo sapiens
atttttctgattataccaagcaatatgggttca

SEQ ID NO: 3066 - DNA, 33 bp, Homo sapiens
gggtggtgaaagtatgcatgttcactataatgt

SEQ ID NO: 3067 - DNA, 33 bp, Homo sapiens
tccatgaaatctttaagctggcggatcccttat

SEQ ID NO: 3068 - DNA, 33 bp, Homo sapiens
ccttctgtcaacctgatatcctttacatctttt

SEQ ID NO: 3069 - DNA, 33 bp, Homo sapiens
gcaatttatggagcaagtgacacgctgtaactt

SEQ ID NO: 3070 - DNA, 33 bp, Homo sapiens
gtctttatacttgagagaaagatataggtggac

SEQ ID NO: 3071 - DNA, 33 bp, Homo sapiens
aattagcaaaattccatacacgtaactcattta

SEQ ID NO: 3072 - DNA, 33 bp, Homo sapiens
atgatgtaaaactagagacagtgaacaagaaac

SEQ ID NO: 3073 - DNA, 33 bp, Homo sapiens
ctccaaatcaccacagtaatgaccaaaggggtg

SEQ ID NO: 3074 - DNA, 33 bp, Homo sapiens
tggtgtaaagtcatgcgaaattttacttagctt

SEQ ID NO: 3075 - DNA, 51 bp, Homo sapiens
attctaaattactggggatcattcagtaaggaaatggtaagctctgatggc

SEQ ID NO: 3076 - DNA, 51 bp, Homo sapiens
accgcaggttatttgctctacagaacgaacacatgaaagcagacaaaacac

SEQ ID NO: 3077 - DNA, 33 bp, Homo sapiens
aggagaccagcaaagactattgaaagaaagaaa

SEQ ID NO: 3078 - DNA, 33 bp, Homo sapiens
cctccaactcttccccgcaagcaaaaatcttag

SEQ ID NO: 3079 - DNA, 33 bp, Homo sapiens
ttccctttttgtgggctgacccatattttctag

SEQ ID NO: 3080 - DNA, 33 bp, Homo sapiens
tttgctccagtctataggagagtaatcagaatg

SEQ ID NO: 3081 - DNA, 51 bp, Homo sapiens
ttacaaactgtgacaagtaaactgagagtaaaagaaactgacagaaatata

SEQ ID NO: 3082 - DNA, 51 bp, Homo sapiens
tctcaaaatccatgcaatgttcagaggtatttctattttttggaaaataaa

SEQ ID NO: 3083 - DNA, 51 bp, Homo sapiens
atatgaagaaaaaggtaaagaagcataaattaaaaggataacttgaagaag

SEQ ID NO: 3084 - DNA, 33 bp, Homo sapiens
agatttgcaacaaaaatgggatggtccagctct

SEQ ID NO: 3085 - DNA, 33 bp, Homo sapiens
acctaatgctttcaagtaaataatcctatgatg

SEQ ID NO: 3086 - DNA, 51 bp, Homo sapiens
tatcccctatgctacctggctcaaatgctgtaaaaacccaaaatgattagc

SEQ ID NO: 3087 - DNA, 33 bp, Homo sapiens
tatggaatgaactagagtatcaataagctgaaa

SEQ ID NO: 3088 - DNA, 51 bp, Homo sapiens
aaaattaagactcttattaggaaagtccatcatctaaattgtgaacaattt

SEQ ID NO: 3089 - DNA, 33 bp, Homo sapiens
tgtgaggattttaaggtagccctaatgtgggtt

SEQ ID NO: 3090 - DNA, 33 bp, Homo sapiens
gttcttaatgaaataatgctggctagagccctt

SEQ ID NO: 3091 - DNA, 33 bp, Homo sapiens
attaaaagatacagaagactgggagctagaagt

SEQ ID NO: 3092 - DNA, 33 bp, Homo sapiens
tgcctgtcttgcttaaggaatcataagactatg

SEQ ID NO: 3093 - DNA, 33 bp, Homo sapiens
caacatttgtagaccatgtaatatgtgcagagc

SEQ ID NO: 3094 - DNA, 33 bp, Homo sapiens
ggattgcttgggtctagggggtcaagactgcgg

SEQ ID NO: 3095 - DNA, 51 bp, Homo sapiens
agtcaaaacagaatgttaggagcacggcttttgagtcgagaaatttgattt

SEQ ID NO: 3096 - DNA, 51 bp, Homo sapiens
aggttaggtgacatacaagaacatgtggttccacagcagtcctgtcattct

SEQ ID NO: 3097 - DNA, 33 bp, Homo sapiens
cagataaatacacctagaactggtaatcggcag

SEQ ID NO: 3098 - DNA, 33 bp, Homo sapiens
ccttttaatttatgtgtatcggtagtcttgact

SEQ ID NO: 3099 - DNA, 33 bp, Homo sapiens
aagatactttgtccaaccctattatgagcccag

SEQ ID NO: 3100 - DNA, 33 bp, Homo sapiens
gtcctctcttcctggatgggtaatcacgtttct

SEQ ID NO: 3101 - DNA, 33 bp, Homo sapiens
tttagtatgaagaatagattgtagggaaggctg

SEQ ID NO: 3102 - DNA, 33 bp, Homo sapiens
gcttgaaggaagaaaaggtatactctgggcaca

SEQ ID NO: 3103 - DNA, 33 bp, Homo sapiens
actgaagttgagaaaacttaggtgctaaagcag

SEQ ID NO: 3104 - DNA, 33 bp, Homo sapiens
ggatgcatagtttgcagatacgttcttcctttc

SEQ ID NO: 3105 - DNA, 51 bp, Homo sapiens
gtagtggtgtcatttgattcctttctcttcctcctttgtgtgacttcttta

SEQ ID NO: 3106 - DNA, 33 bp, Homo sapiens
gtctgttttgttaccggccagcttgctgagctg

SEQ ID NO: 3107 - DNA, 33 bp, Homo sapiens
aacttgagagagaaactcaagagaactgagaaa

SEQ ID NO: 3108 - DNA, 33 bp, Homo sapiens
aggttttcctttcaaattgctatggagtgtgat

SEQ ID NO: 3109 - DNA, 33 bp, Homo sapiens
gctataaacatacaacgaaatagtctgcctttt

SEQ ID NO: 3110 - DNA, 33 bp, Homo sapiens
gataaaaatggaaacagctctagactaatcagg

SEQ ID NO: 3111 - DNA, 33 bp, Homo sapiens
aatgcttagaagtcaatcagtggctttgtgaaa

SEQ ID NO: 3112 - DNA, 33 bp, Homo sapiens
ctctaaattactcaagtccatacaaatgttatt

SEQ ID NO: 3113 - DNA, 33 bp, Homo sapiens
agccaccgaaaccggatgatgcctccttcttaa

SEQ ID NO: 3114 - DNA, 33 bp, Homo sapiens
atgaaccaaatagcaggagagaaagtcctcatg

SEQ ID NO: 3115 - DNA, 33 bp, Homo sapiens
tggccacttttctgtatagcaaccgaggtgata

SEQ ID NO: 3116 - DNA, 33 bp, Homo sapiens
acctgaggagtagagattatatgatttccagaa

SEQ ID NO: 3117 - DNA, 33 bp, Homo sapiens
ggagctcatttccccatcctgaaatttgaggaa

SEQ ID NO: 3118 - DNA, 33 bp, Homo sapiens
tatctaatggacagccggaaaacccagagagac

SEQ ID NO: 3119 - DNA, 33 bp, Homo sapiens
ttcttcatcagttcaatgtgggtggtaatcata

SEQ ID NO: 3120 - DNA, 33 bp, Homo sapiens
acatctccaatacacataatcattttcgttttc

SEQ ID NO: 3121 - DNA, 33 bp, Homo sapiens
agtcactctggacatagtacaccttcactgtta

SEQ ID NO: 3122 - DNA, 33 bp, Homo sapiens
atgtaaattaaaatcctcattatgtataagcat

SEQ ID NO: 3123 - DNA, 33 bp, Homo sapiens
tctgagtggaaaaaaaccaagtagactacatat

SEQ ID NO: 3124 - DNA, 33 bp, Homo sapiens
aagaaaaagagtagaatacaaatatgcaaagtc

SEQ ID NO: 3125 - DNA, 33 bp, Homo sapiens
acacttaagacttccatgtggctttcatttttc

SEQ ID NO: 3126 - DNA, 33 bp, Homo sapiens
attcttatttgtatcctgagctatgcttcaaac

SEQ ID NO: 3127 - DNA, 33 bp, Homo sapiens
tctaagcttgctcctatggtgctcatcttgatg

SEQ ID NO: 3128 - DNA, 33 bp, Homo sapiens
cttggctgtttagatcgatctccatggttaacg

SEQ ID NO: 3129 - DNA, 33 bp, Homo sapiens
ataatttaaagcttcagagtctggcatctgcat

SEQ ID NO: 3130 - DNA, 51 bp, Homo sapiens
acgtataaaaccgtggatactgttatcatgtgtgtaaaagaaaaattgtaa

SEQ ID NO: 3131 - DNA, 33 bp, Homo sapiens
ggcaagtcatgtaggaggataagtggtaagtct

SEQ ID NO: 3132 - DNA, 33 bp, Homo sapiens
gaggatattttggtaagggaacgaggtggcgga

SEQ ID NO: 3133 - DNA, 33 bp, Homo sapiens
cccaacatcctacatatcaggtgagacttttct

SEQ ID NO: 3134 - DNA, 33 bp, Homo sapiens
tggccaattcagttcagaagtgctaaacctgtt

SEQ ID NO: 3135 - DNA, 33 bp, Homo sapiens
ggtctcagatggatcctcgctttcctggagaag

SEQ ID NO: 3136 - DNA, 33 bp, Homo sapiens
acatcatttttgaccttaaaaaatagcaaatgt

SEQ ID NO: 3137 - DNA, 51 bp, Homo sapiens
ggaataaacatgatacagtattagatgaagtttataaatcaaataatttag

SEQ ID NO: 3138 - DNA, 51 bp, Homo sapiens
tattggtgggttagttgtctgtaattatttagttttaattttttagtgtat

SEQ ID NO: 3139 - DNA, 33 bp, Homo sapiens
aggaatttccagaggatgagcaatgggggaaga

SEQ ID NO: 3140 - DNA, 33 bp, Homo sapiens
ctgttagccatgtgaggatacggtagttcttcc

SEQ ID NO: 3141 - DNA, 33 bp, Homo sapiens
catgtgcaaaccaggagaagatgaataatccaa

SEQ ID NO: 3142 - DNA, 33 bp, Homo sapiens
ctctcactgatgtcacgggttacctatgcaatc

SEQ ID NO: 3143 - DNA, 33 bp, Homo sapiens
actcagatctttcccattacaggtcccgtcagg

SEQ ID NO: 3144 - DNA, 51 bp, Homo sapiens
ccaatgtgtgtttcccttatgcttctgaaattgctgagttagagcctacag

SEQ ID NO: 3145 - DNA, 33 bp, Homo sapiens
aagagagatcttgagggatacaggcaattcctg

SEQ ID NO: 3146 - DNA, 33 bp, Homo sapiens
ctaatagctgggattagaaggcataaaccacca

SEQ ID NO: 3147 - DNA, 33 bp, Homo sapiens
tttggaagctttcaactctaacttttcaaactt

SEQ ID NO: 3148 - DNA, 51 bp, Homo sapiens
gaatttcataaataccaacatgatatacaatagttccttagcatttgtcat

SEQ ID NO: 3149 - DNA, 33 bp, Homo sapiens
aaattaaatacaactatgtctactgccactaaa

SEQ ID NO: 3150 - DNA, 33 bp, Homo sapiens
agaatcagaacacttacgccggaaaggacctca

SEQ ID NO: 3151 - DNA, 33 bp, Homo sapiens
gaatggcaaagtgatagcaagtgcaggcaacaa

SEQ ID NO: 3152 - DNA, 33 bp, Homo sapiens
atacttctatacttgtcaatcattggctaatgc

SEQ ID NO: 3153 - DNA, 33 bp, Homo sapiens
atttctagagtctttggatcttagttgaactgg

SEQ ID NO: 3154 - DNA, 33 bp, Homo sapiens
gtccagtggtaaaagaggaaacacgctatccct

SEQ ID NO: 3155 - DNA, 33 bp, Homo sapiens
gaagtacaaattcttatacaggctgagtatcgc

SEQ ID NO: 3156 - DNA, 33 bp, Homo sapiens
taattctggaaggcagtaaagaaaccgtctgga

SEQ ID NO: 3157 - DNA, 33 bp, Homo sapiens
ggcttcagagctagactatctgagttcaaatcc

SEQ ID NO: 3158 - DNA, 33 bp, Homo sapiens
gaggaacaaatgaagctagggcaatgttagaac

SEQ ID NO: 3159 - DNA, 51 bp, Homo sapiens
atttaggtattcttgctcaaatctataaaaggagaatcaaattggcaagtg

SEQ ID NO: 3160 - DNA, 51 bp, Homo sapiens
gggagattttatttcactagctttatgactaagtataccttttagtagatc

SEQ ID NO: 3161 - DNA, 33 bp, Homo sapiens
gtgtatatctttccaccaacatatctacagttt

SEQ ID NO: 3162 - DNA, 33 bp, Homo sapiens
tttaatttgtatagtaggtatgaatttgctcag

SEQ ID NO: 3163 - DNA, 33 bp, Homo sapiens
acaggtactttaaatatgtctcattcaagtggt

SEQ ID NO: 3164 - DNA, 33 bp, Homo sapiens
tgcacttttctatctctattcccacgagacaat

SEQ ID NO: 3165 - DNA, 33 bp, Homo sapiens
acaaaatgaatgatgaggttaaacacccaagct

SEQ ID NO: 3166 - DNA, 33 bp, Homo sapiens
aaatgtcatcaatcagcattttcagtaaataat

SEQ ID NO: 3167 - DNA, 33 bp, Homo sapiens
actcatctaataattcggaacaccatgtgttgg

SEQ ID NO: 3168 - DNA, 33 bp, Homo sapiens
atggatctaagaagaatggtcgatttttcagct

SEQ ID NO: 3169 - DNA, 33 bp, Homo sapiens
catgctttcactctaggaactttgatccagtgt

SEQ ID NO: 3170 - DNA, 33 bp, Homo sapiens
gctctagactactctatcattccttgtggattt

SEQ ID NO: 3171 - DNA, 33 bp, Homo sapiens
ggaatgtagcagtaatgagataactaagaatga

SEQ ID NO: 3172 - DNA, 51 bp, Homo sapiens
gttgattgacaggaagagagtatgataacacattttgtggtaataaaaatg

SEQ ID NO: 3173 - DNA, 51 bp, Homo sapiens
atcattgtctgggttttacagataggaaaatttaggtacatagaattatct

SEQ ID NO: 3174 - DNA, 51 bp, Homo sapiens
tagccacagctaaactactgtgccattgtattaaccagtatctaattacat

SEQ ID NO: 3175 - DNA, 33 bp, Homo sapiens
tatgactgcacagatcgaaagtgtcgaactcac

SEQ ID NO: 3176 - DNA, 33 bp, Homo sapiens
atctagacagagaatatgctcattttcagagtc

SEQ ID NO: 3177 - DNA, 33 bp, Homo sapiens
aagatgagcatcttaagaagagcaagaacttct

SEQ ID NO: 3178 - DNA, 33 bp, Homo sapiens
tcagttcatggactaaggtttttatggatgata

SEQ ID NO: 3179 - DNA, 33 bp, Homo sapiens
gccctgacataagtaagtagagattgttaggta

SEQ ID NO: 3180 - DNA, 33 bp, Homo sapiens
tatggccaccatactggaaaattctggtttcgt

SEQ ID NO: 3181 - DNA, 51 bp, Homo sapiens
ttgaaatccttttgcatctctctgatctattgcacaaaaatttaaatcttg

SEQ ID NO: 3182 - DNA, 51 bp, Homo sapiens
aagcatgagtgtaaatacagacccagaagagtatagctcgatttcttcaag

SEQ ID NO: 3183 - DNA, 33 bp, Homo sapiens
ttggattgagttgcattaaacaaaattgaagtg

SEQ ID NO: 3184 - DNA, 33 bp, Homo sapiens
tatggtcaatgacaaacctcacgagaagacaaa

SEQ ID NO: 3185 - DNA, 33 bp, Homo sapiens
cactctgtaatacaaatgtcctggaagcagaga

SEQ ID NO: 3186 - DNA, 33 bp, Homo sapiens
tcttcaccttgattcacaaaaacacagctgttt

SEQ ID NO: 3187 - DNA, 33 bp, Homo sapiens
actgatacagaatcatcaaaggcctcaggcaca

SEQ ID NO: 3188 - DNA, 33 bp, Homo sapiens
aacttctggaatgccaggaattgaaaagagcag

SEQ ID NO: 3189 - DNA, 33 bp, Homo sapiens
aatattatgctggctagcttctgtttcttctct

SEQ ID NO: 3190 - DNA, 33 bp, Homo sapiens
aatattagaatgttaggccaacagcaataaaat

SEQ ID NO: 3191 - DNA, 33 bp, Homo sapiens
aagctgaataaagacatgaaaagaaacagtgat

SEQ ID NO: 3192 - DNA, 33 bp, Homo sapiens
ttatgcattccctgagtaacatcaatagatcgc

SEQ ID NO: 3193 - DNA, 33 bp, Homo sapiens
acaaactgtagaaatctatgacatgaaatggac

SEQ ID NO: 3194 - DNA, 33 bp, Homo sapiens
ggtgagattactaccatctttgaagttagatgt

SEQ ID NO: 3195 - DNA, 33 bp, Homo sapiens
agatacaggagcaacagtcttctatacatggtt

SEQ ID NO: 3196 - DNA, 33 bp, Homo sapiens
agatcattgttgagtatgctgtcttgtatctca

SEQ ID NO: 3197 - DNA, 33 bp, Homo sapiens
ttgtatacctataaaagtgtacattggcacaaa

SEQ ID NO: 3198 - DNA, 51 bp, Homo sapiens
aaccatgatctagtatatagcttatttaggaatactgtttacattatcata

SEQ ID NO: 3199 - DNA, 33 bp, Homo sapiens
cctgggatctaaactctaaaacatatcctgaac

SEQ ID NO: 3200 - DNA, 33 bp, Homo sapiens
aaattatacacgtaacgcacagtaagcattaaa

SEQ ID NO: 3201 - DNA, 33 bp, Homo sapiens
aaacaggcctaggaacgcagaccaaagggcaaa

SEQ ID NO: 3202 - DNA, 33 bp, Homo sapiens
atcttgaatttttttctactagttggtgaaaaa

SEQ ID NO: 3203 - DNA, 33 bp, Homo sapiens
tcaacaaaggtcaatatgaaggacgtcccaaat

SEQ ID NO: 3204 - DNA, 33 bp, Homo sapiens
cattctccctgttggagggtggcaatagttgct

SEQ ID NO: 3205 - DNA, 33 bp, Homo sapiens
gcagtcaaatgagtcaccctcatactaactgct

SEQ ID NO: 3206 - DNA, 33 bp, Homo sapiens
gtgttgaagtaaaacttacattttgtgactctg

SEQ ID NO: 3207 - DNA, 33 bp, Homo sapiens
ataagtgtttatcatctgagaactgattaaata

SEQ ID NO: 3208 - DNA, 33 bp, Homo sapiens
ataacactgccatgtagaaaggtaaactgctga

SEQ ID NO: 3209 - DNA, 33 bp, Homo sapiens
ggacacttggtaataccccttggaacttcagtg

SEQ ID NO: 3210 - DNA, 51 bp, Homo sapiens
aaaggacaatcgaagcaactcttgagacattctaaggttaaaaatattcag

SEQ ID NO: 3211 - DNA, 33 bp, Homo sapiens
gggctaaatggcctacgcaaagccacaccgctg

SEQ ID NO: 3212 - DNA, 33 bp, Homo sapiens
tagtttccaacttccagtgcagcagttatttaa

SEQ ID NO: 3213 - DNA, 33 bp, Homo sapiens
cagccttccctcctcccggaagattctaggtct

SEQ ID NO: 3214 - DNA, 33 bp, Homo sapiens
agctattgactttagctgaatatgaattatgcc

SEQ ID NO: 3215 - DNA, 33 bp, Homo sapiens
agtgtctaggtaaagcgccattttttggagtgg

SEQ ID NO: 3216 - DNA, 33 bp, Homo sapiens
ctagctcaggccagaatcttatcactatcatca

SEQ ID NO: 3217 - DNA, 33 bp, Homo sapiens
ctgactatggaaagccgaagggcattaaagctt

SEQ ID NO: 3218 - DNA, 33 bp, Homo sapiens
aggtactatgttctacggattttacatgtatta

SEQ ID NO: 3219 - DNA, 33 bp, Homo sapiens
tgattggtggaagtgatgtcatgtatggtaaac

SEQ ID NO: 3220 - DNA, 33 bp, Homo sapiens
cttctaaaatctccacggacttaactagggccc

SEQ ID NO: 3221 - DNA, 51 bp, Homo sapiens
caattatctctaagggaaagaatccgatcataagaaagtattaatagcacc

SEQ ID NO: 3222 - DNA, 33 bp, Homo sapiens
gcctccacttcttcactctgaccttgcttttat

SEQ ID NO: 3223 - DNA, 51 bp, Homo sapiens
gcccagttcttacctgttagcccaatctataagcacatggaaattactatt

SEQ ID NO: 3224 - DNA, 33 bp, Homo sapiens
aggttcttcagaggacgctatcgccatttgggg

SEQ ID NO: 3225 - DNA, 33 bp, Homo sapiens
ttttgaggactccatacgtaacaaataggttgg

SEQ ID NO: 3226 - DNA, 33 bp, Homo sapiens
aaaattgatactttacggcttgacacatggttt

SEQ ID NO: 3227 - DNA, 33 bp, Homo sapiens
ttaatgtggaaaggcatccgtattaattttcta

SEQ ID NO: 3228 - DNA, 33 bp, Homo sapiens
gccacatcagatgtcctaaaaaggccctgggct

SEQ ID NO: 3229 - DNA, 33 bp, Homo sapiens
tggtgggttgtcttcctcagctttaggtttatt

SEQ ID NO: 3230 - DNA, 33 bp, Homo sapiens
actaggaaaaataagactagcaccagagggaac

SEQ ID NO: 3231 - DNA, 33 bp, Homo sapiens
ctgatgtgtgttcacagaagtacaagagcctat

SEQ ID NO: 3232 - DNA, 33 bp, Homo sapiens
atctgagaggattagagggaacagtgcccagtg

SEQ ID NO: 3233 - DNA, 33 bp, Homo sapiens
ggctaagtatactggagtcatttgtaagttgct

SEQ ID NO: 3234 - DNA, 33 bp, Homo sapiens
aatctgatagctgtagtattttcctaaactgtt

SEQ ID NO: 3235 - DNA, 33 bp, Homo sapiens
tatcggtttatttgtccatatctctaccagtat

SEQ ID NO: 3236 - DNA, 33 bp, Homo sapiens
aaaacctaattggaacgggctcgagaaagaaca

SEQ ID NO: 3237 - DNA, 33 bp, Homo sapiens
tagcaaggtaaaggtatgttgtatgttaagtta

SEQ ID NO: 3238 - DNA, 33 bp, Homo sapiens
acatcccttaaagatagagcaataaggaagcca

SEQ ID NO: 3239 - DNA, 33 bp, Homo sapiens
acattcttgggacttaccccagacctactgaat

SEQ ID NO: 3240 - DNA, 33 bp, Homo sapiens
gacaatcatgactctccattttccttccttccc

SEQ ID NO: 3241 - DNA, 33 bp, Homo sapiens
cactgatctcttggaattaagttaaaaggctaa

SEQ ID NO: 3242 - DNA, 33 bp, Homo sapiens
ttgttttatgcaattataaggtttgcttcatga

SEQ ID NO: 3243 - DNA, 33 bp, Homo sapiens
atcaggaatcacaggagaaataaggctttgatt

SEQ ID NO: 3244 - DNA, 33 bp, Homo sapiens
ttactaaatattcctacaactctagatggtatt

SEQ ID NO: 3245 - DNA, 33 bp, Homo sapiens
tttggggttttgacacgacaattgaccagcatt

SEQ ID NO: 3246 - DNA, 51 bp, Homo sapiens
ataaatgacaaataagctaatatagtcaggcattttattagttgcaatttt

SEQ ID NO: 3247 - DNA, 51 bp, Homo sapiens
ctaacagctgtcctctgtattaaggtcatctttagcttgtcttgcaaatac

SEQ ID NO: 3248 - DNA, 51 bp, Homo sapiens
ttattgagtagctagactcagagtcgaggccatttggaaacagttgcttgt

SEQ ID NO: 3249 - DNA, 33 bp, Homo sapiens
acagaagatgagtgacgatttgccatattatct

SEQ ID NO: 3250 - DNA, 33 bp, Homo sapiens
ttgctctaccttttccgacataatgaatctgtg

SEQ ID NO: 3251 - DNA, 33 bp, Homo sapiens
acattcaggatctagctcaggcaggtcgggaag

SEQ ID NO: 3252 - DNA, 33 bp, Homo sapiens
tgacagatgatgcccatgtgggactcttctcta

SEQ ID NO: 3253 - DNA, 51 bp, Homo sapiens
ctttcctacctcgggtctctcctaagtctaggttcacaccatatcccatca

SEQ ID NO: 3254 - DNA, 51 bp, Homo sapiens
caaacattatggtaaaagagagtcagtaatattttccatgccaaatgtctt

SEQ ID NO: 3255 - DNA, 51 bp, Homo sapiens
acctaatagaagatgaagatccttataggaaacggttctcacaatacataa

SEQ ID NO: 3256 - DNA, 33 bp, Homo sapiens
ttgacaggctaagaaggcagttatggtataggc

SEQ ID NO: 3257 - DNA, 33 bp, Homo sapiens
aacagaacagggtaccggcgaagtccaaggaag

SEQ ID NO: 3258 - DNA, 33 bp, Homo sapiens
ggcccctgatgagggagcccttttggcagactc

SEQ ID NO: 3259 - DNA, 51 bp, Homo sapiens
tttatttcagtatttatcacttgaagtaggaaaaaatagcaataattggaa

SEQ ID NO: 3260 - DNA, 33 bp, Homo sapiens
tcatggtctgcagtaattgttttaaactgtttc

SEQ ID NO: 3261 - DNA, 33 bp, Homo sapiens
taaaactggcttgacagataaactcctttgcat

SEQ ID NO: 3262 - DNA, 33 bp, Homo sapiens
gccattagccagcattgaatcaaaagaccatgt

SEQ ID NO: 3263 - DNA, 51 bp, Homo sapiens
cttggttagaattgagtacttgagagactatatgaataattgcttgttgaa

SEQ ID NO: 3264 - DNA, 33 bp, Homo sapiens
ccagggaagagggaattatagggatacagaaga

SEQ ID NO: 3265 - DNA, 33 bp, Homo sapiens
tctggaaagtatcccagtgcattaagaaaatct

SEQ ID NO: 3266 - DNA, 33 bp, Homo sapiens
tgaaggtgccagttgatcacaggatgaccaccg

SEQ ID NO: 3267 - DNA, 33 bp, Homo sapiens
tttattatagttgccatgtattcttgctgcatg

SEQ ID NO: 3268 - DNA, 33 bp, Homo sapiens
gggccaacgaggaaaccaaatgggcagcccaga

SEQ ID NO: 3269 - DNA, 33 bp, Homo sapiens
ctctgtttcatcaccattaataagagtaataat

SEQ ID NO: 3270 - DNA, 33 bp, Homo sapiens
aaaacaggagaaggacgcaatttgaagaaatca

SEQ ID NO: 3271 - DNA, 33 bp, Homo sapiens
cgataatgttagtcagcaccttatgaactctct

SEQ ID NO: 3272 - DNA, 33 bp, Homo sapiens
aaagagcttatttatatggaatgctaatttctt

SEQ ID NO: 3273 - DNA, 33 bp, Homo sapiens
atttttctcaggaaactgatgaggtctttggat

SEQ ID NO: 3274 - DNA, 33 bp, Homo sapiens
acagaaagccaacacggagacaataattatcac

SEQ ID NO: 3275 - DNA, 33 bp, Homo sapiens
atggacatcctcaaaacgctcattgtcttatgg

SEQ ID NO: 3276 - DNA, 33 bp, Homo sapiens
actctgatttaaaaccgacacagcatatcagca

SEQ ID NO: 3277 - DNA, 33 bp, Homo sapiens
tgagttcatcttgaccggggggtctgacctttt

SEQ ID NO: 3278 - DNA, 51 bp, Homo sapiens
acatggcatcaaattctgagtaacagcctaagagacaagtgggcaggcagg

SEQ ID NO: 3279 - DNA, 51 bp, Homo sapiens
tattgaaacagtatagatcttctcgtcactgcagtaccctaataccattta

SEQ ID NO: 3280 - DNA, 33 bp, Homo sapiens
tgggttcagacaacaaggctatagaatgtgctt

SEQ ID NO: 3281 - DNA, 33 bp, Homo sapiens
cagctaccgttgaaactctttcagaggcagtgc

SEQ ID NO: 3282 - DNA, 33 bp, Homo sapiens
accagcattagggctatacaatgtcctaaatag

SEQ ID NO: 3283 - DNA, 33 bp, Homo sapiens
tttgtagatgggacctgaaaagtctgtattttc

SEQ ID NO: 3284 - DNA, 33 bp, Homo sapiens
tttaccttcacgggtcgagggcaaatggaaggt

SEQ ID NO: 3285 - DNA, 51 bp, Homo sapiens
ttatagaagggaaacttgctagatataaaagttgcttgtttataattattc

SEQ ID NO: 3286 - DNA, 33 bp, Homo sapiens
cccagtggacatttactccatcttcaggtgttt

SEQ ID NO: 3287 - DNA, 33 bp, Homo sapiens
gaccatgactgttatatgcctttaatcctccca

SEQ ID NO: 3288 - DNA, 33 bp, Homo sapiens
tctatcccacttcacattgctttataagcaaaa

SEQ ID NO: 3289 - DNA, 33 bp, Homo sapiens
ggataaatttctcccattgaatgcagaatagta

SEQ ID NO: 3290 - DNA, 33 bp, Homo sapiens
ctctgttgctgagatatacagtattaaccatta

SEQ ID NO: 3291 - DNA, 33 bp, Homo sapiens
tttattgagctactacgaagttaaacaatatgc

SEQ ID NO: 3292 - DNA, 33 bp, Homo sapiens
catgtggatacatagaggtttaaatttatataa

SEQ ID NO: 3293 - DNA, 33 bp, Homo sapiens
atgtgcattaggttgctgaaaagattaaatgag

SEQ ID NO: 3294 - DNA, 33 bp, Homo sapiens
tacattccccatattcgagtagattgttttatc

SEQ ID NO: 3295 - DNA, 33 bp, Homo sapiens
cggtagggccactttgtaggacagcttggcagt

SEQ ID NO: 3296 - DNA, 33 bp, Homo sapiens
cacatgactgtaaacatataaggaagtggaatc

SEQ ID NO: 3297 - DNA, 33 bp, Homo sapiens
gggtgcctgggaaagattaaaagtgctgaggaa

SEQ ID NO: 3298 - DNA, 51 bp, Homo sapiens
tcataaacatgcctgtttatttgtctatataactgctttttatatcattat

SEQ ID NO: 3299 - DNA, 51 bp, Homo sapiens
gtcatatagctcttttgcctgactagaataataaattggtatagttagcag

SEQ ID NO: 3300 - DNA, 51 bp, Homo sapiens
gttttctgaaaactctaaaaatcaggctacattctttatatgccattgtga

SEQ ID NO: 3301 - DNA, 33 bp, Homo sapiens
cattttccatattaaggacctaagacctacaga

SEQ ID NO: 3302 - DNA, 51 bp, Homo sapiens
tctagaaaaggcaagcttattgatacagagagcaaatcagtagttgcctag

SEQ ID NO: 3303 - DNA, 33 bp, Homo sapiens
acacctcttgactccacagggaagccacaagtt

SEQ ID NO: 3304 - DNA, 33 bp, Homo sapiens
tcttcccgtttgtacatacccagcctttaaatt

SEQ ID NO: 3305 - DNA, 33 bp, Homo sapiens
gaatatgctgagtttcgctgggagccaggaagt

SEQ ID NO: 3306 - DNA, 51 bp, Homo sapiens
caagaaaagctgctatattttctcctaggtacaatgcctatgtcatatgat

SEQ ID NO: 3307 - DNA, 33 bp, Homo sapiens
aaacttgtacactgaattctataaaactttggt

SEQ ID NO: 3308 - DNA, 33 bp, Homo sapiens
acgtaatttgcacatctcagggctgataaggag

SEQ ID NO: 3309 - DNA, 33 bp, Homo sapiens
tgacagaatatttccatctttcactccacagtt

SEQ ID NO: 3310 - DNA, 33 bp, Homo sapiens
gatccccccacttcaatcttgcaaagaactgga

SEQ ID NO: 3311 - DNA, 33 bp, Homo sapiens
aaaagaatatgaatgctgactggtcttagctac

SEQ ID NO: 3312 - DNA, 33 bp, Homo sapiens
gcaaataatgaaaagaggtcaagttaagtgatt

SEQ ID NO: 3313 - DNA, 33 bp, Homo sapiens
ggattcctgaaattcactcatgggtatctgagt

SEQ ID NO: 3314 - DNA, 33 bp, Homo sapiens
gtttaatagaccttaagaacaacagcgaaacat

SEQ ID NO: 3315 - DNA, 33 bp, Homo sapiens
tgattagtgattttcagcattttttcatatgct

SEQ ID NO: 3316 - DNA, 51 bp, Homo sapiens
tgtcatccagttgccggaattcatattaggcattttcgcaagtataatctt

SEQ ID NO: 3317 - DNA, 33 bp, Homo sapiens
aactccacacacatgataatgacaatgtggtaa

SEQ ID NO: 3318 - DNA, 33 bp, Homo sapiens
gatttttgctttacaagagttcatacacatttt

SEQ ID NO: 3319 - DNA, 33 bp, Homo sapiens
aactgagagttctggataaaattaatgacctgt

SEQ ID NO: 3320 - DNA, 33 bp, Homo sapiens
attcctcaaattctggtcaaaatagaatttttc

SEQ ID NO: 3321 - DNA, 33 bp, Homo sapiens
tctcttagctactacattgattgtcctatgact

SEQ ID NO: 3322 - DNA, 33 bp, Homo sapiens
tctggaacttcaactatacatatgtcagacctt

SEQ ID NO: 3323 - DNA, 33 bp, Homo sapiens
acttatagttggaatattatactcagcaaaagc

SEQ ID NO: 3324 - DNA, 33 bp, Homo sapiens
aaaagttcagagcaaggctagaaataagagtta

SEQ ID NO: 3325 - DNA, 33 bp, Homo sapiens
cagcacatctgctttacactgactgactgacct

SEQ ID NO: 3326 - DNA, 33 bp, Homo sapiens
aactagtccaaagaaagttctggtgactgttaa

SEQ ID NO: 3327 - DNA, 33 bp, Homo sapiens
aaaccattcattccactgccttttcactgtcca

SEQ ID NO: 3328 - DNA, 33 bp, Homo sapiens
ttagacctgtttaaaattctaaagcacatgtta

SEQ ID NO: 3329 - DNA, 33 bp, Homo sapiens
atgagaagaatttcactggccacctatcctatt

SEQ ID NO: 3330 - DNA, 51 bp, Homo sapiens
cattcatattctttttccattttaacacccagcttaatactttggaatgta

SEQ ID NO: 3331 - DNA, 51 bp, Homo sapiens
caggactgactgggcttggatccaggacatgtatggtacgtgtatgttttt

SEQ ID NO: 3332 - DNA, 33 bp, Homo sapiens
aaaccttttggaaacagggctcaatgtctcaga

SEQ ID NO: 3333 - DNA, 33 bp, Homo sapiens
actcagtaaatagtccggaacggaagagaaaat

SEQ ID NO: 3334 - DNA, 33 bp, Homo sapiens
ttaaactgccatagtatgcactgttatgactga

SEQ ID NO: 3335 - DNA, 33 bp, Homo sapiens
agtcagtctggaaagggaaaccaacccattttg

SEQ ID NO: 3336 - DNA, 33 bp, Homo sapiens
tgtcctctttgcctatgaagtgcctacttactc

SEQ ID NO: 3337 - DNA, 33 bp, Homo sapiens
aaaaccaacccgaacagtacaatgatttcatcc

SEQ ID NO: 3338 - DNA, 33 bp, Homo sapiens
tcttgcaatccaagcggagagagaagactggct

SEQ ID NO: 3339 - DNA, 33 bp, Homo sapiens
aaattccttcccccaatacagcctgcaattttt

SEQ ID NO: 3340 - DNA, 33 bp, Homo sapiens
ggatcgggtgctcatggacaagtgactggctta

SEQ ID NO: 3341 - DNA, 33 bp, Homo sapiens
tcaaattagagcctgagaagtctaagcaagaac

SEQ ID NO: 3342 - DNA, 33 bp, Homo sapiens
ctgcaatgaagaagcgtagattttgacaatagt

SEQ ID NO: 3343 - DNA, 33 bp, Homo sapiens
aatatgcattggtttagggacaattgtatagtt

SEQ ID NO: 3344 - DNA, 33 bp, Homo sapiens
ttttagaaactatgactaggtaagaggtcggat

SEQ ID NO: 3345 - DNA, 33 bp, Homo sapiens
actagtgtaacactaagatgctatgattaacca

SEQ ID NO: 3346 - DNA, 33 bp, Homo sapiens
atgcctcaggttcccatgctaaatcaaaattct

SEQ ID NO: 3347 - DNA, 33 bp, Homo sapiens
taacaacaggatctgcgctaattctaataggtc

SEQ ID NO: 3348 - DNA, 33 bp, Homo sapiens
cagagaacaagcaaaattccacctaagcttaaa

SEQ ID NO: 3349 - DNA, 33 bp, Homo sapiens
tgggcttcaggtgaaatgatgccatccacacat

SEQ ID NO: 3350 - DNA, 33 bp, Homo sapiens
taattgctgtatactatgactgcttttctccat

SEQ ID NO: 3351 - DNA, 33 bp, Homo sapiens
ggacagagaagcgctaggtctttacgtatcttc

SEQ ID NO: 3352 - DNA, 33 bp, Homo sapiens
gttcaaggcagaaaaatcagttcttctaaggac

SEQ ID NO: 3353 - DNA, 33 bp, Homo sapiens
agccttagttccatcatctgtaatatgagggta

SEQ ID NO: 3354 - DNA, 33 bp, Homo sapiens
aagaaaggacatcttacaaatgaattcctgaat

SEQ ID NO: 3355 - DNA, 33 bp, Homo sapiens
tcagacactgtagaatgagacagcaggcagagt

SEQ ID NO: 3356 - DNA, 33 bp, Homo sapiens
tgtgtagatttgtagataaaagatgatgtctga

SEQ ID NO: 3357 - DNA, 33 bp, Homo sapiens
tctggaaaacactagataagctcaagtgtgaca

SEQ ID NO: 3358 - DNA, 33 bp, Homo sapiens
aaatctgtacccccactcaaattagcatttgtt

SEQ ID NO: 3359 - DNA, 33 bp, Homo sapiens
acttttgaggtatccagtcaggtattttgcaga

SEQ ID NO: 3360 - DNA, 33 bp, Homo sapiens
attgacagcatcaaaatggagggaacctggatc

SEQ ID NO: 3361 - DNA, 33 bp, Homo sapiens
tggtagatttcaactagcaatgtcctggtaaac

SEQ ID NO: 3362 - DNA, 51 bp, Homo sapiens
tgctaagagagtatagagggtgtgccataaactaaatctgcaggtattaag

SEQ ID NO: 3363 - DNA, 51 bp, Homo sapiens
tgagatgatttggagatatatagacgatcaataatttttacagactctaga

SEQ ID NO: 3364 - DNA, 51 bp, Homo sapiens
aactacaaatataataacatgttaatacaatcttcaggatagttactgggt

SEQ ID NO: 3365 - DNA, 51 bp, Homo sapiens
attctttagccttttcttaaagtaagctgctaagtatttacaggttaattt

SEQ ID NO: 3366 - DNA, 51 bp, Homo sapiens
ttccttgaccctaataatgtatcactctgaattgctatttttatttatgct

SEQ ID NO: 3367 - DNA, 33 bp, Homo sapiens
tacaaaagcttagatatgaggagacttcaaaaa

SEQ ID NO: 3368 - DNA, 33 bp, Homo sapiens
attttctttcctcagatgttccttatacttatg

SEQ ID NO: 3369 - DNA, 33 bp, Homo sapiens
actagctccaatctgcgcattgtgagaaatttt

SEQ ID NO: 3370 - DNA, 33 bp, Homo sapiens
tgttcttatagttttatgcaatttttcaacaag

SEQ ID NO: 3371 - DNA, 33 bp, Homo sapiens
gctttgtatgggacacggatgatgctgagcgct

SEQ ID NO: 3372 - DNA, 51 bp, Homo sapiens
cagcagttctgtgatacataattcattctctatgtcccatcaattcctata

SEQ ID NO: 3373 - DNA, 33 bp, Homo sapiens
tttcagttcagactacgcagtatttaataaata

SEQ ID NO: 3374 - DNA, 33 bp, Homo sapiens
tctgtcagtactgtaacattgtcaggaaaaata

SEQ ID NO: 3375 - DNA, 33 bp, Homo sapiens
aatctgtagggtaccagcaagcataaaaacaca

SEQ ID NO: 3376 - DNA, 33 bp, Homo sapiens
tgtgcaaatgtaagccgagtttttcataaccag

SEQ ID NO: 3377 - DNA, 33 bp, Homo sapiens
aacaattgtggctcactaccggatgctggctaa

SEQ ID NO: 3378 - DNA, 33 bp, Homo sapiens
caaacttctgactccagaactagtgatacagac

SEQ ID NO: 3379 - DNA, 33 bp, Homo sapiens
cagctctccagggacataatcttaagtactgac

SEQ ID NO: 3380 - DNA, 33 bp, Homo sapiens
ctttagccaataggtagatctcttgtaggcagt

SEQ ID NO: 3381 - DNA, 33 bp, Homo sapiens
atgttctagacaagtggagccaggttaaatcac

SEQ ID NO: 3382 - DNA, 33 bp, Homo sapiens
gtatctcagctatccagaaccttaaacccacag

SEQ ID NO: 3383 - DNA, 33 bp, Homo sapiens
taaacaagcctggatggacttcagccttacctt

SEQ ID NO: 3384 - DNA, 51 bp, Homo sapiens
gaacagtaacattttgaaagcagtctttcctttctgagaagttggtctcaa

SEQ ID NO: 3385 - DNA, 33 bp, Homo sapiens
tgttgaatacctcctatgtttcagacaaatatt

SEQ ID NO: 3386 - DNA, 51 bp, Homo sapiens
ccacactgatgagtagggaatgcaagcatgctgaaggcaggatggttcaaa

SEQ ID NO: 3387 - DNA, 33 bp, Homo sapiens
tactttttcatagtaatctaacaattagtcaaa

SEQ ID NO: 3388 - DNA, 33 bp, Homo sapiens
atgaacaaggtccatctataaaatgtctcaaat

SEQ ID NO: 3389 - DNA, 33 bp, Homo sapiens
aattacattgcacacatgggagaaaaatggata

SEQ ID NO: 3390 - DNA, 33 bp, Homo sapiens
agtggcagcagtgaaacgctaattcaaacaggt

SEQ ID NO: 3391 - DNA, 33 bp, Homo sapiens
gttcagggactcccaggaataaccaggaccatt

SEQ ID NO: 3392 - DNA, 33 bp, Homo sapiens
ggtccaaatatattcctccaatttctcggttcc

SEQ ID NO: 3393 - DNA, 33 bp, Homo sapiens
cctgttttggataaaggattaagttcagagaag

SEQ ID NO: 3394 - DNA, 51 bp, Homo sapiens
aaaatgaagtatctcctatcttctctgaattctctcaagcagcactcaaag

SEQ ID NO: 3395 - DNA, 51 bp, Homo sapiens
cactttagtctttgtttagtacagatgaaatccaagtgataataggtgggt

SEQ ID NO: 3396 - DNA, 33 bp, Homo sapiens
taggtttgtcttacttgaaaatgcacactctta

SEQ ID NO: 3397 - DNA, 33 bp, Homo sapiens
ggctacaagaattatatatgatgtcgcagatgt

SEQ ID NO: 3398 - DNA, 33 bp, Homo sapiens
tttcagtggctagatatgccttgactgtgagct

SEQ ID NO: 3399 - DNA, 33 bp, Homo sapiens
gactggattgtatttggaaagcctacctctagg

SEQ ID NO: 3400 - DNA, 33 bp, Homo sapiens
gtgttcttgtatcaggtaaagcctcctccccac

SEQ ID NO: 3401 - DNA, 33 bp, Homo sapiens
aatgagttatatacacgcaatcttggctagtct

SEQ ID NO: 3402 - DNA, 33 bp, Homo sapiens
agaaattctaaatgtggacctaaatctctgctt

SEQ ID NO: 3403 - DNA, 51 bp, Homo sapiens
ttcctctacagcaatctcattcctacatatgacttctggtttcaacaacag

SEQ ID NO: 3404 - DNA, 51 bp, Homo sapiens
acttatgcatattgcttagtgccaatgggactcttagaaatgtatttgaga

SEQ ID NO: 3405 - DNA, 51 bp, Homo sapiens
aaactttaaactatattttgacaaattatttacctggcagaattgagttta

SEQ ID NO: 3406 - DNA, 33 bp, Homo sapiens
tgtagcgtgatggtgcgaagataaaatagtagc

SEQ ID NO: 3407 - DNA, 33 bp, Homo sapiens
ctcctcagcaccaggtgaagattaggaattgca

SEQ ID NO: 3408 - DNA, 33 bp, Homo sapiens
gtcttccaagtagtaagcccctgcctcttgatc

SEQ ID NO: 3409 - DNA, 33 bp, Homo sapiens
cgaaattattaaaagagtactgactagatcaat

SEQ ID NO: 3410 - DNA, 33 bp, Homo sapiens
cccaacagcagtgcaagctcccatgtatggagt

SEQ ID NO: 3411 - DNA, 33 bp, Homo sapiens
gtcctaatttttgcaaggacagggatattttga

SEQ ID NO: 3412 - DNA, 33 bp, Homo sapiens
aggtcacagagcttaggatgtagtgtggtaatc

SEQ ID NO: 3413 - DNA, 33 bp, Homo sapiens
tcatggttcttgtatcgaagtacaattgaacat

SEQ ID NO: 3414 - DNA, 51 bp, Homo sapiens
cataactgctggtcatggaagattacgtttgtttatcccagttctcccatt

SEQ ID NO: 3415 - DNA, 33 bp, Homo sapiens
ctgcacagtttcacctgacccatgcttgaacac

SEQ ID NO: 3416 - DNA, 33 bp, Homo sapiens
aggcatctttatatccgccgccatagtccaccc

SEQ ID NO: 3417 - DNA, 33 bp, Homo sapiens
acttaaatatgttggattcacctatgagcaatc

SEQ ID NO: 3418 - DNA, 33 bp, Homo sapiens
ttatgttcagaaacaatgtcctctgctatatca

SEQ ID NO: 3419 - DNA, 33 bp, Homo sapiens
cttctggcctgtactatgtgttaggaaatgtta

SEQ ID NO: 3420 - DNA, 33 bp, Homo sapiens
aaatgattaactgcacgctaagagaatacattt

SEQ ID NO: 3421 - DNA, 33 bp, Homo sapiens
tttggaagctctagaggaggatctgtttccttg

SEQ ID NO: 3422 - DNA, 33 bp, Homo sapiens
tacttgtttggtgaaataggtccatctctcaca

SEQ ID NO: 3423 - DNA, 33 bp, Homo sapiens
ctagcatgtagcagaagcaagattagaacatag

SEQ ID NO: 3424 - DNA, 33 bp, Homo sapiens
tcctgcagaacctctaggtagaatttgaagagg

SEQ ID NO: 3425 - DNA, 33 bp, Homo sapiens
agccactatgcccaaccaagacagtataatatt

SEQ ID NO: 3426 - DNA, 33 bp, Homo sapiens
aggaatgttctttacaggcgactttttgcacaa

SEQ ID NO: 3427 - DNA, 33 bp, Homo sapiens
gatgctgtttctgaaattactgatatgatcata

SEQ ID NO: 3428 - DNA, 33 bp, Homo sapiens
tttagaccatcaacgagagatgtgtagtcgggt

SEQ ID NO: 3429 - DNA, 33 bp, Homo sapiens
gtccaatcaaaaacactgcctatcatgttagct

SEQ ID NO: 3430 - DNA, 33 bp, Homo sapiens
accctgccttaaccaatcagtgaaggttaacat

SEQ ID NO: 3431 - DNA, 33 bp, Homo sapiens
tcacattcaaaccacagtggaactcaacctagt

SEQ ID NO: 3432 - DNA, 33 bp, Homo sapiens
agaaaaagaggccatattaaaaaatctagactt

SEQ ID NO: 3433 - DNA, 33 bp, Homo sapiens
aagctcatagcagtaaggaaagcaaaaagaagt

SEQ ID NO: 3434 - DNA, 33 bp, Homo sapiens
tataaagtctgttacaggtttatcaaaaaatga

SEQ ID NO: 3435 - DNA, 33 bp, Homo sapiens
gggaagactttcaagataacagtcaacagaaaa

SEQ ID NO: 3436 - DNA, 33 bp, Homo sapiens
ttaatgctgtgagttacgtatacaagatgagta

SEQ ID NO: 3437 - DNA, 33 bp, Homo sapiens
atcatacaagatacactaagcatgtcaggcaga

SEQ ID NO: 3438 - DNA, 33 bp, Homo sapiens
agatgggttctgtatggaaaacggtcctggatg

SEQ ID NO: 3439 - DNA, 51 bp, Homo sapiens
atatagagttcagatgagataagagtcagcattttatagccctgtgaatgt

SEQ ID NO: 3440 - DNA, 33 bp, Homo sapiens
ggatttgtttgccaaaggtgatatcctaaatac

SEQ ID NO: 3441 - DNA, 33 bp, Homo sapiens
tacactacttcacgaacaaattgcctcattcag

SEQ ID NO: 3442 - DNA, 33 bp, Homo sapiens
gtgtggaagattgatcgcagagtagtccacacg

SEQ ID NO: 3443 - DNA, 33 bp, Homo sapiens
tgctttggataaccgataagaagttaaaagaaa

SEQ ID NO: 3444 - DNA, 33 bp, Homo sapiens
tcaggtcttactattatcatcttcaagaaaagt

SEQ ID NO: 3445 - DNA, 33 bp, Homo sapiens
ccagtaaaagtttcagtagtaggccacaaagct

SEQ ID NO: 3446 - DNA, 33 bp, Homo sapiens
catgccatcagtgggaggtggtaaattctgtcc

SEQ ID NO: 3447 - DNA, 33 bp, Homo sapiens
tgtgttgctactaatcgcttcatagctccttac

SEQ ID NO: 3448 - DNA, 33 bp, Homo sapiens
ctttgtcagcatttccgagacttttatcattaa

SEQ ID NO: 3449 - DNA, 51 bp, Homo sapiens
tttagatatgactttacccataggatcatttctttccaaggaaacgttaag

SEQ ID NO: 3450 - DNA, 33 bp, Homo sapiens
aaagtgccaactcagagatggagtgactgtttg

SEQ ID NO: 3451 - DNA, 33 bp, Homo sapiens
caatggaggctttcacgcattagaaaaagaagt

SEQ ID NO: 3452 - DNA, 33 bp, Homo sapiens
tagcttccagccatgggaaagacttgtgcagaa

SEQ ID NO: 3453 - DNA, 33 bp, Homo sapiens
acaaggatctcagaaagctaaaataagatgaga

SEQ ID NO: 3454 - DNA, 33 bp, Homo sapiens
gcctctaggacatatacaatgcaatatttgact

SEQ ID NO: 3455 - DNA, 33 bp, Homo sapiens
accagttggatcatgagaaaaaagatacaacat

SEQ ID NO: 3456 - DNA, 33 bp, Homo sapiens
agtgactgaatgaacattactctatcaattaaa

SEQ ID NO: 3457 - DNA, 33 bp, Homo sapiens
tgggtcacctttctcagccagttactaaggaag

SEQ ID NO: 3458 - DNA, 33 bp, Homo sapiens
tggaacacttgtgaaattggcagtccagagaaa

SEQ ID NO: 3459 - DNA, 33 bp, Homo sapiens
gaatacttgcaatgtatctttgaagagtacttg

SEQ ID NO: 3460 - DNA, 33 bp, Homo sapiens
ggaagaaactaccaaatgtatcacgcccaaagc

SEQ ID NO: 3461 - DNA, 33 bp, Homo sapiens
gagccatttttagtctgaagcaagaatgtcagt

SEQ ID NO: 3462 - DNA, 33 bp, Homo sapiens
tccttgggttcaaagcgcagcaagatactctgg

SEQ ID NO: 3463 - DNA, 33 bp, Homo sapiens
cagtactaatttcagacgtgctgccttgctatt

SEQ ID NO: 3464 - DNA, 33 bp, Homo sapiens
gagtgtctgtgaaatggaagagacgattcattc

SEQ ID NO: 3465 - DNA, 33 bp, Homo sapiens
cacaccaagcaagtgatgaagtttattgcaatg

SEQ ID NO: 3466 - DNA, 33 bp, Homo sapiens
cttccattggttcctgcagccatgtcctccaca

SEQ ID NO: 3467 - DNA, 33 bp, Homo sapiens
cttgctcctgctgaattacagggtatttatcta

SEQ ID NO: 3468 - DNA, 51 bp, Homo sapiens
aggaacagcagggaatggtaagtgagtaggaagttcaggctaagtatcaga

SEQ ID NO: 3469 - DNA, 33 bp, Homo sapiens
ggggtgaagaaatgcttactcgccaaaaaaggc

SEQ ID NO: 3470 - DNA, 51 bp, Homo sapiens
cattcacagtcacatctgacataatgaaggaatatttctactcatcttccc

SEQ ID NO: 3471 - DNA, 33 bp, Homo sapiens
gcgctctcagcaggacggaaatgacgaataact

SEQ ID NO: 3472 - DNA, 33 bp, Homo sapiens
ctaataagtgttggtatggatgtagagaaattg

SEQ ID NO: 3473 - DNA, 33 bp, Homo sapiens
ctattggctggtaatcgatatgtacctcatgca

SEQ ID NO: 3474 - DNA, 33 bp, Homo sapiens
gtagtttatgctaacagtgtcatctgtgaatgc

SEQ ID NO: 3475 - DNA, 33 bp, Homo sapiens
acctggccattttttcgcagcatgggactcctc

SEQ ID NO: 3476 - DNA, 33 bp, Homo sapiens
aactgttaaagggacactgacgatgataatgtt

SEQ ID NO: 3477 - DNA, 33 bp, Homo sapiens
ctaagaatagtcaagaggtatatgaagtatgtg

SEQ ID NO: 3478 - DNA, 33 bp, Homo sapiens
aaagccatatttggaggagagtgaagttcctag

SEQ ID NO: 3479 - DNA, 33 bp, Homo sapiens
tcaggtttttcatttgtaaagatctcagggctt

SEQ ID NO: 3480 - DNA, 33 bp, Homo sapiens
ttagcagaggaggtgcgactcataatagttttt

SEQ ID NO: 3481 - DNA, 33 bp, Homo sapiens
gtgtgaaagtgccttagggacaccctagtggtc

SEQ ID NO: 3482 - DNA, 33 bp, Homo sapiens
tttaattcatatagaagcttgagtcacacaact

SEQ ID NO: 3483 - DNA, 33 bp, Homo sapiens
atttcggaatctgaaagaaggcttttctacact

SEQ ID NO: 3484 - DNA, 33 bp, Homo sapiens
gtgcaggtggttcatatagtctatactgaagag

SEQ ID NO: 3485 - DNA, 51 bp, Homo sapiens
atttcaaatggcccttggataagtacaggacgaaacgagagagttaaagca

SEQ ID NO: 3486 - DNA, 51 bp, Homo sapiens
aagggtaaaacattttcagtacacattaagaactacatatttttaagttta

SEQ ID NO: 3487 - DNA, 51 bp, Homo sapiens
tgattaagcttttgcatggtgtagagaaatggggcacaggtacctggcttg

SEQ ID NO: 3488 - DNA, 33 bp, Homo sapiens
gtaataatggctggacgggaaaaacacagattc

SEQ ID NO: 3489 - DNA, 33 bp, Homo sapiens
tcctgggagcaaaccatcttcaaccacacttct

SEQ ID NO: 3490 - DNA, 33 bp, Homo sapiens
ctcagtttgagccgtaccaaacacggaccagaa

SEQ ID NO: 3491 - DNA, 33 bp, Homo sapiens
gctagtaagagctctaggaaaggcttccccaga

SEQ ID NO: 3492 - DNA, 33 bp, Homo sapiens
gaaaggcaaaggaggagtattagtaatggaggg

SEQ ID NO: 3493 - DNA, 33 bp, Homo sapiens
aatgaatatatagagcgagcaaagaaaggcctt

SEQ ID NO: 3494 - DNA, 51 bp, Homo sapiens
tatttttcctgatcctcttttctacgaagtgtttaaatagagtaaaaaatg

SEQ ID NO: 3495 - DNA, 33 bp, Homo sapiens
cattcagagtcagttagtaaaagtagggccagg

SEQ ID NO: 3496 - DNA, 33 bp, Homo sapiens
cactgtaatggagagagctgaagtgagtttact

SEQ ID NO: 3497 - DNA, 51 bp, Homo sapiens
acaatgcaatggtatcaagcatcaatgtgaagggtcaagaggaacctaagt

SEQ ID NO: 3498 - DNA, 51 bp, Homo sapiens
ataaaggaaaccaaataggagtaaagtaattagccgaagatcacaaaagta

SEQ ID NO: 3499 - DNA, 33 bp, Homo sapiens
gatttatgctcctgaatcatttctcttgatgaa

SEQ ID NO: 3500 - DNA, 33 bp, Homo sapiens
tattcacctcccagaattgtcattaaaagaaat

SEQ ID NO: 3501 - DNA, 33 bp, Homo sapiens
aaatagtgtgaagaaatgcaggttgaaaaataa

SEQ ID NO: 3502 - DNA, 33 bp, Homo sapiens
ctatactcttcaaaacggcatttggagtaagaa

SEQ ID NO: 3503 - DNA, 33 bp, Homo sapiens
aatctgagtccattaaggatattcaattgtaaa

SEQ ID NO: 3504 - DNA, 33 bp, Homo sapiens
catgttcacatctctggagttctctcttgtgca

SEQ ID NO: 3505 - DNA, 33 bp, Homo sapiens
aggaataaaagagacaccttaatgattatttaa

SEQ ID NO: 3506 - DNA, 33 bp, Homo sapiens
tgagggctcaaaggcagcttgacattaagaaac

SEQ ID NO: 3507 - DNA, 33 bp, Homo sapiens
gacctaaattcctaagtatggcttcaaaggaac

SEQ ID NO: 3508 - DNA, 33 bp, Homo sapiens
aaggctaacttatttgtattattggctaagggg

SEQ ID NO: 3509 - DNA, 33 bp, Homo sapiens
aggtagcaataaattatgaacaacgtgagtgca

SEQ ID NO: 3510 - DNA, 33 bp, Homo sapiens
tgttaattggttggcattaagtgtggtttgagg

SEQ ID NO: 3511 - DNA, 33 bp, Homo sapiens
cagaatagtgcttgtctcattatgttctgtatt

SEQ ID NO: 3512 - DNA, 33 bp, Homo sapiens
agagatcttgaagtgagtatcaatacatttctg

SEQ ID NO: 3513 - DNA, 33 bp, Homo sapiens
gaggcaataagttggatgactggaccatgctaa

SEQ ID NO: 3514 - DNA, 33 bp, Homo sapiens
agaggaaagtacataaccttgaaaattgagtga

SEQ ID NO: 3515 - DNA, 33 bp, Homo sapiens
acaatgttttaccttccagcaaaagtgtcgaaa

SEQ ID NO: 3516 - DNA, 33 bp, Homo sapiens
cattgtgtggattgtcggaaaactagaaagatg

SEQ ID NO: 3517 - DNA, 33 bp, Homo sapiens
aatacatttacttgcctatgtggtgcggtaaga

SEQ ID NO: 3518 - DNA, 33 bp, Homo sapiens
ttgggctttcatccagtagatagcatttattag

SEQ ID NO: 3519 - DNA, 33 bp, Homo sapiens
aaggagatggtaagatgataggacttccacatc

SEQ ID NO: 3520 - DNA, 33 bp, Homo sapiens
tttgaaaacatttaaatctagcatggtgaaact

SEQ ID NO: 3521 - DNA, 33 bp, Homo sapiens
ggtcttactgtgagaagtgagaaaccattggag

SEQ ID NO: 3522 - DNA, 33 bp, Homo sapiens
gactacaagcctttaatcccagagcagaccagc

SEQ ID NO: 3523 - DNA, 33 bp, Homo sapiens
aaaatcctaacacttatcaaagagagcagaact

SEQ ID NO: 3524 - DNA, 33 bp, Homo sapiens
attgaaagctctaaaatgtggcaatcattgttt

SEQ ID NO: 3525 - DNA, 33 bp, Homo sapiens
gccaccaagcaaggaacaagaactggaagagct

SEQ ID NO: 3526 - DNA, 33 bp, Homo sapiens
ggttaagactacagaatcttctaaacaaagtct

SEQ ID NO: 3527 - DNA, 33 bp, Homo sapiens
tttcaaaggaatggcctcccagtgagcagcaag

SEQ ID NO: 3528 - DNA, 33 bp, Homo sapiens
agagttgggcgttggagcagaccctccaggtga

SEQ ID NO: 3529 - DNA, 33 bp, Homo sapiens
tcatcaaaacttttcatggtgcccacattgcta

SEQ ID NO: 3530 - DNA, 33 bp, Homo sapiens
cacatatatattgaacgattttgggatgagacg

SEQ ID NO: 3531 - DNA, 33 bp, Homo sapiens
cagtatgtagatgagattccacagattgctaga

SEQ ID NO: 3532 - DNA, 33 bp, Homo sapiens
gtaaagcataaacattgaacaattggggagtaa

SEQ ID NO: 3533 - DNA, 33 bp, Homo sapiens
gtgtttatcctctatacatgtaggtgtagctta

SEQ ID NO: 3534 - DNA, 33 bp, Homo sapiens
gaggcataattaatgagatagtgccaagattat

SEQ ID NO: 3535 - DNA, 51 bp, Homo sapiens
cattcacagctccctcagggcgccagaaactttattgccagtagtagttct

SEQ ID NO: 3536 - DNA, 33 bp, Homo sapiens
tggccttcatcacttatgtctgtgtcaacttgt

SEQ ID NO: 3537 - DNA, 33 bp, Homo sapiens
tttttgtctcacaggcgatgtacagaagcaacc

SEQ ID NO: 3538 - DNA, 33 bp, Homo sapiens
tcttcttgaccatccagtgacgtgttttaagac

SEQ ID NO: 3539 - DNA, 51 bp, Homo sapiens
tttgaatttgatcatgaaagttgtacatttgaagaaggtgaaatttgcatt

SEQ ID NO: 3540 - DNA, 51 bp, Homo sapiens
ttattgcatattttggcactatgcagtagagtatgttgtcaagtaatgatt

SEQ ID NO: 3541 - DNA, 33 bp, Homo sapiens
ctgtgtactagtttgatgtttatggaagaaaaa

SEQ ID NO: 3542 - DNA, 33 bp, Homo sapiens
ctgcagacttcctacattggaaacatcgcattt

SEQ ID NO: 3543 - DNA, 33 bp, Homo sapiens
tgctacaaatggttcatggactctaacgaatgt

SEQ ID NO: 3544 - DNA, 33 bp, Homo sapiens
gggtttcaattaaatatgccattctttggttcc

SEQ ID NO: 3545 - DNA, 33 bp, Homo sapiens
cactttcagagaaaccgaaagtcacagcactac

SEQ ID NO: 3546 - DNA, 51 bp, Homo sapiens
ttggatgatgggaacagcctcctgataagtacctgaaagtgacatcctcac

SEQ ID NO: 3547 - DNA, 33 bp, Homo sapiens
ttctattctttgctcatccccgttctccttttt

SEQ ID NO: 3548 - DNA, 33 bp, Homo sapiens
aaagggaatcaccaccgactctagaagtataat

SEQ ID NO: 3549 - DNA, 33 bp, Homo sapiens
gcatgctcttgccatataaaaatctacctgagg

SEQ ID NO: 3550 - DNA, 51 bp, Homo sapiens
atgcccagcctatagttattctttatactgaacatatttgtgtatgttttt

SEQ ID NO: 3551 - DNA, 33 bp, Homo sapiens
atgtgtacagatagcataagtgcaagaagagga

SEQ ID NO: 3552 - DNA, 33 bp, Homo sapiens
aattaactatgctaaggactacaatttccatta

SEQ ID NO: 3553 - DNA, 33 bp, Homo sapiens
gctttttctgatttccgcagtagaatgttttat

SEQ ID NO: 3554 - DNA, 33 bp, Homo sapiens
cagttccattccattgtaccctatgcctctcca

SEQ ID NO: 3555 - DNA, 33 bp, Homo sapiens
tgaatgcttgagaaccgcaagacctctgtgtgg

SEQ ID NO: 3556 - DNA, 33 bp, Homo sapiens
tgcaagcatgaaccaagttacaaaccttgttaa

SEQ ID NO: 3557 - DNA, 33 bp, Homo sapiens
gttttgagctgactgagggaaatgcagattccc

SEQ ID NO: 3558 - DNA, 33 bp, Homo sapiens
gaaaaattatcagggcgagaataatataatctg

SEQ ID NO: 3559 - DNA, 33 bp, Homo sapiens
agtaccaaatagacaagtcaggctgtttaccag

SEQ ID NO: 3560 - DNA, 33 bp, Homo sapiens
tcagttactagctgtggaggttcttcgttgctt

SEQ ID NO: 3561 - DNA, 33 bp, Homo sapiens
ctgaatattttttccattctgatgatttgattt

SEQ ID NO: 3562 - DNA, 51 bp, Homo sapiens
cctagtttggagaattctgcagacagtcatattcctttcactatccacacc

SEQ ID NO: 3563 - DNA, 33 bp, Homo sapiens
tctcagtaacggagaatggcttctctgggaacc

SEQ ID NO: 3564 - DNA, 33 bp, Homo sapiens
gaagcacctggtcagcgagatgacatgggaggg

SEQ ID NO: 3565 - DNA, 33 bp, Homo sapiens
gggatcttctcactcaggtaggtctctctggga

SEQ ID NO: 3566 - DNA, 33 bp, Homo sapiens
aagacagaagtcaggagtccaaatgcttttatt

SEQ ID NO: 3567 - DNA, 33 bp, Homo sapiens
agggcttaggtctacagatattgccaataggga

SEQ ID NO: 3568 - DNA, 33 bp, Homo sapiens
cagcccggtacctggcgaggaagtacaaccgca

SEQ ID NO: 3569 - DNA, 33 bp, Homo sapiens
aaaattccaggacttatacattcaaaggagtgg

SEQ ID NO: 3570 - DNA, 33 bp, Homo sapiens
cagactggcattttcccgaacagtctgtaagtc

SEQ ID NO: 3571 - DNA, 33 bp, Homo sapiens
aaaaatcttcccctgataattcataacacaaac

SEQ ID NO: 3572 - DNA, 33 bp, Homo sapiens
tagttgaaaccgtcacgaaggcattgtatagaa

SEQ ID NO: 3573 - DNA, 33 bp, Homo sapiens
cttttcttgtatagaccaagcgatattcttgct

SEQ ID NO: 3574 - DNA, 33 bp, Homo sapiens
agtgactgggaacccgtagtagattagccacaa

SEQ ID NO: 3575 - DNA, 33 bp, Homo sapiens
gcagtgaacaaaaacttaaatctctgtattatg

SEQ ID NO: 3576 - DNA, 33 bp, Homo sapiens
atcccattcaaacatatctacttcaaactgtat

SEQ ID NO: 3577 - DNA, 33 bp, Homo sapiens
taatgtgatagaccatcaagaattcaggatcag

SEQ ID NO: 3578 - DNA, 33 bp, Homo sapiens
acacactttctcctaaccgctcagatttatatc

SEQ ID NO: 3579 - DNA, 33 bp, Homo sapiens
aaagcactcaagaaactaataaggggccaggcg

SEQ ID NO: 3580 - DNA, 33 bp, Homo sapiens
tggagtctttgtaggatgaagacatgaggattc

SEQ ID NO: 3581 - DNA, 33 bp, Homo sapiens
atttattttttgctgattaggagtgagactggg

SEQ ID NO: 3582 - DNA, 33 bp, Homo sapiens
tgctgcagaggtaaccgcagaaatgttctgaag

SEQ ID NO: 3583 - DNA, 33 bp, Homo sapiens
aattttgaacaagtcatgtattgctgatggata

SEQ ID NO: 3584 - DNA, 33 bp, Homo sapiens
cttactgccctgctaagggtgccaatgtatgca

SEQ ID NO: 3585 - DNA, 51 bp, Homo sapiens
tgaatagtggctgggttttgagcccgagttaagacctggaagagaaaagat

SEQ ID NO: 3586 - DNA, 33 bp, Homo sapiens
taccttttatagacaaggaaactgaagaacaca

SEQ ID NO: 3587 - DNA, 33 bp, Homo sapiens
cctcatataggcctagcacaaaattggcatttg

SEQ ID NO: 3588 - DNA, 33 bp, Homo sapiens
tccccaccttagagaattgagcctgtcgagtta

SEQ ID NO: 3589 - DNA, 33 bp, Homo sapiens
gtcatcaaaccttttgtactgcaatgctgattt

SEQ ID NO: 3590 - DNA, 33 bp, Homo sapiens
tttgctttttccattagcttcataaagtaacga

SEQ ID NO: 3591 - DNA, 33 bp, Homo sapiens
actgtggtatatgccgtagtgaaggtacgatga

SEQ ID NO: 3592 - DNA, 33 bp, Homo sapiens
taattctgaaattgaagaagaaaatcatttact

SEQ ID NO: 3593 - DNA, 33 bp, Homo sapiens
gaagctctaaaggaagtctatggttcactccac

SEQ ID NO: 3594 - DNA, 33 bp, Homo sapiens
gcaactctccaaggcacccaaattacagccaag

SEQ ID NO: 3595 - DNA, 33 bp, Homo sapiens
tttttccgattgtttcgagttccatactggaga

SEQ ID NO: 3596 - DNA, 33 bp, Homo sapiens
caaaaatggaaggcacgaatttaagcagccttt

SEQ ID NO: 3597 - DNA, 33 bp, Homo sapiens
aaatatagaacccccatgtgatccagcaattcc

SEQ ID NO: 3598 - DNA, 33 bp, Homo sapiens
aggagagaaggaggaggaaaccacaggatatga

SEQ ID NO: 3599 - DNA, 33 bp, Homo sapiens
gtgagtacataccagagagctgctgaaaatcca

SEQ ID NO: 3600 - DNA, 33 bp, Homo sapiens
ggaggacaaaatactaggcaaattaattcagga

SEQ ID NO: 3601 - DNA, 33 bp, Homo sapiens
ctaggactttcaaagatgacaaaagcactaata

SEQ ID NO: 3602 - DNA, 33 bp, Homo sapiens
gacacctcggtgaagatggtgacagtatttgtg

SEQ ID NO: 3603 - DNA, 33 bp, Homo sapiens
cttcacagctctgttataagcagatccttacaa

SEQ ID NO: 3604 - DNA, 33 bp, Homo sapiens
gtaggtaccatctctggaaaaaagctgggtctc

SEQ ID NO: 3605 - DNA, 33 bp, Homo sapiens
tactctgctttacggcgcattagtcctagctag

SEQ ID NO: 3606 - DNA, 33 bp, Homo sapiens
cccattttggccaatgtataaaactgctgatac

SEQ ID NO: 3607 - DNA, 33 bp, Homo sapiens
gataatgctgagagaatgtaccagttgcccctt

SEQ ID NO: 3608 - DNA, 33 bp, Homo sapiens
aaacatatgagtgtcataggaatacatcttatt

SEQ ID NO: 3609 - DNA, 33 bp, Homo sapiens
gcaatgtgacactgccgatcttccaatcaggag

SEQ ID NO: 3610 - DNA, 33 bp, Homo sapiens
tagcttgtttgccccagatggagaggtccgaga

SEQ ID NO: 3611 - DNA, 33 bp, Homo sapiens
tcaggactttaggtaagaggcaaatattcagta

SEQ ID NO: 3612 - DNA, 33 bp, Homo sapiens
caaggtcaatgtatcaccaggtctggtttctcc

SEQ ID NO: 3613 - DNA, 33 bp, Homo sapiens
aacagttacttctctgtaccatggatgacctgc

SEQ ID NO: 3614 - DNA, 33 bp, Homo sapiens
aacattgcttcaaagggacctagaaatgctagc

SEQ ID NO: 3615 - DNA, 33 bp, Homo sapiens
gtttgcttttctggaactaaataagttgattgt

SEQ ID NO: 3616 - DNA, 33 bp, Homo sapiens
acatccattaagcaacggttaattctgacttaa

SEQ ID NO: 3617 - DNA, 33 bp, Homo sapiens
agcatcataggtttaatagccatactctagaag

SEQ ID NO: 3618 - DNA, 33 bp, Homo sapiens
gctgctgagtttactcgatagctttcaaacctt

SEQ ID NO: 3619 - DNA, 33 bp, Homo sapiens
aatgttacacactgattaaaagtattccagaaa

SEQ ID NO: 3620 - DNA, 33 bp, Homo sapiens
catttcacaccccccaggatgaccataacaaaa

SEQ ID NO: 3621 - DNA, 33 bp, Homo sapiens
taaacggatcaaccaagtgcagtatagaatgct

SEQ ID NO: 3622 - DNA, 33 bp, Homo sapiens
agcaggatggtcaaaattaagtgagagaaaggc

SEQ ID NO: 3623 - DNA, 33 bp, Homo sapiens
catttccctaatgtcagtagttgcagacacttt

SEQ ID NO: 3624 - DNA, 33 bp, Homo sapiens
agcaagtttcttgcacgattttcactgatcttt

SEQ ID NO: 3625 - DNA, 33 bp, Homo sapiens
tcaaggcagcggctaagaggacaaaatgacatg

SEQ ID NO: 3626 - DNA, 33 bp, Homo sapiens
tgtgcgtcctcttcaggccttttacacggggga

SEQ ID NO: 3627 - DNA, 33 bp, Homo sapiens
aagagagggccatgcatgttgtaaagccctaca

SEQ ID NO: 3628 - DNA, 33 bp, Homo sapiens
tttaattctgccttcacaatgcctagttaaccc

SEQ ID NO: 3629 - DNA, 33 bp, Homo sapiens
cttagaagaatggttagacaactcacaaattga

SEQ ID NO: 3630 - DNA, 33 bp, Homo sapiens
ctcacatctctttgtatcacctctccgtacatt

SEQ ID NO: 3631 - DNA, 33 bp, Homo sapiens
aaaagactggcaaaccgaataaaacctgaagtc

SEQ ID NO: 3632 - DNA, 33 bp, Homo sapiens
atacagggtgtcctcagagtctgggaaagaaag

SEQ ID NO: 3633 - DNA, 33 bp, Homo sapiens
atcctctgatggaaaagtggttagtgcattttt

SEQ ID NO: 3634 - DNA, 33 bp, Homo sapiens
taaactatggagtcaccgcatcattggtattca

SEQ ID NO: 3635 - DNA, 51 bp, Homo sapiens
aagcttaacattcaacattgtgcttgaacaaaacttaccactactcaattt

SEQ ID NO: 3636 - DNA, 51 bp, Homo sapiens
ctaaacaataaggaaacaagaagcattaaattactttttccccccaaataa

SEQ ID NO: 3637 - DNA, 33 bp, Homo sapiens
gaaaaacaaaattcaccattctgtacatcaatc

SEQ ID NO: 3638 - DNA, 33 bp, Homo sapiens
gtaataaagttaaatagctcatctagaagcagg

SEQ ID NO: 3639 - DNA, 33 bp, Homo sapiens
taagaaggaagtcaatcatggagtcagttttaa

SEQ ID NO: 3640 - DNA, 33 bp, Homo sapiens
gaaagttcattgtttgtataatgatatggtttg

SEQ ID NO: 3641 - DNA, 33 bp, Homo sapiens
aaaccttccttccactgactgggttccctgctg

SEQ ID NO: 3642 - DNA, 33 bp, Homo sapiens
gttaagggattggcgggaaaagagtgggatgta

SEQ ID NO: 3643 - DNA, 33 bp, Homo sapiens
tagattcaaaaaagcatgtgttagagaagtcaa

SEQ ID NO: 3644 - DNA, 33 bp, Homo sapiens
tgcaagacatgctaaaggaagtgcttcaggagg

SEQ ID NO: 3645 - DNA, 33 bp, Homo sapiens
ccaagtctacagcaaatgaggtgcaactgtaat

SEQ ID NO: 3646 - DNA, 33 bp, Homo sapiens
gataagtttcagttaatccagtcttatagagtc

SEQ ID NO: 3647 - DNA, 33 bp, Homo sapiens
gtgcattggatgaaattacttgaatactgtcaa

SEQ ID NO: 3648 - DNA, 51 bp, Homo sapiens
tatcaagcatattgaagataatgaatggacctatcggatcatatcttagtt

SEQ ID NO: 3649 - DNA, 33 bp, Homo sapiens
tcatagtctaaaatgctgaagagacataccaaa

SEQ ID NO: 3650 - DNA, 33 bp, Homo sapiens
actggatcataggggcgaatttatccctcgctg

SEQ ID NO: 3651 - DNA, 33 bp, Homo sapiens
gaaccacggagaactgtaatgagagtgatggat

SEQ ID NO: 3652 - DNA, 33 bp, Homo sapiens
agtgtattattcaccattgcatctcaggcaatg

SEQ ID NO: 3653 - DNA, 33 bp, Homo sapiens
tattgttttcctaatatgtggcttggaagggag

SEQ ID NO: 3654 - DNA, 33 bp, Homo sapiens
aagaagctacttatcaggaaaaaaggcaaggat

SEQ ID NO: 3655 - DNA, 33 bp, Homo sapiens
tgtactgtctattggacaattcacttaaccaga

SEQ ID NO: 3656 - DNA, 33 bp, Homo sapiens
ttttcaccactgagtatgcagatcttccccttg

SEQ ID NO: 3657 - DNA, 33 bp, Homo sapiens
taacaaatagcctaattatgtaagtgaatgatt

SEQ ID NO: 3658 - DNA, 33 bp, Homo sapiens
aaaaagtagaatatcagtcaccattttgcaacc

SEQ ID NO: 3659 - DNA, 33 bp, Homo sapiens
tccagagttaaaggcctgcccggctaatctcta

SEQ ID NO: 3660 - DNA, 33 bp, Homo sapiens
gaagaaaaccacagcattgcggagagaaagctc

SEQ ID NO: 3661 - DNA, 33 bp, Homo sapiens
tttattatctcagtgatgaccatctgtgttggt

SEQ ID NO: 3662 - DNA, 33 bp, Homo sapiens
ggcctcaactaaagtcgccaactatcttatccc

SEQ ID NO: 3663 - DNA, 33 bp, Homo sapiens
ttgtggtacagttaaagttaggaccacactggc

SEQ ID NO: 3664 - DNA, 33 bp, Homo sapiens
aagggaaaaatgcctctagggaacacgtgcata

SEQ ID NO: 3665 - DNA, 33 bp, Homo sapiens
attccagtcacttaaatctgagcgcttttcctt

SEQ ID NO: 3666 - DNA, 33 bp, Homo sapiens
tctaaataaaattgacggatggactaggtccat

SEQ ID NO: 3667 - DNA, 33 bp, Homo sapiens
agcagagggagaggtatcagacctgtcaggaaa

SEQ ID NO: 3668 - DNA, 33 bp, Homo sapiens
tgctgttctctttcaggatgccatgctgtgcag

SEQ ID NO: 3669 - DNA, 33 bp, Homo sapiens
atggtctgtcctaaagtagtgaatttcctaagg

SEQ ID NO: 3670 - DNA, 33 bp, Homo sapiens
atgttctaccatacaggcaactcaaatgtcaga

SEQ ID NO: 3671 - DNA, 33 bp, Homo sapiens
agtgttctggtctggatgaaatgagagaactcc

SEQ ID NO: 3672 - DNA, 51 bp, Homo sapiens
ctgcacttcttaaatagaacagaagtatccctgaaaaaaatatagatctgg

SEQ ID NO: 3673 - DNA, 33 bp, Homo sapiens
tacttgtgctgttcacggaggtggtcatctcac

SEQ ID NO: 3674 - DNA, 33 bp, Homo sapiens
ctgggttgatggaggatgagaaggatcagggag

SEQ ID NO: 3675 - DNA, 33 bp, Homo sapiens
aactctgggacggttatggaagattgaggttgt

SEQ ID NO: 3676 - DNA, 33 bp, Homo sapiens
gttgctgcattttggatgtcttaaatattcctt

SEQ ID NO: 3677 - DNA, 33 bp, Homo sapiens
tccccgataagatggagaaccagacagctccaa

SEQ ID NO: 3678 - DNA, 33 bp, Homo sapiens
ttgtaacaaccatctcccaatactgctgagagg

SEQ ID NO: 3679 - DNA, 33 bp, Homo sapiens
ttagctagaaaaattatgtttctccttgccgct

SEQ ID NO: 3680 - DNA, 33 bp, Homo sapiens
acagtgaatgtgattttaaaaggttttgtcata

SEQ ID NO: 3681 - DNA, 33 bp, Homo sapiens
aagctggttattgccaggcctattaacacttaa

SEQ ID NO: 3682 - DNA, 33 bp, Homo sapiens
gtgaatcgtttggtcagctgttgaggacaggct

SEQ ID NO: 3683 - DNA, 33 bp, Homo sapiens
agtcctagacgtgggagtagaaattagatgaca

SEQ ID NO: 3684 - DNA, 33 bp, Homo sapiens
cctgcctccaccactcgccggttatgtaaccat

SEQ ID NO: 3685 - DNA, 33 bp, Homo sapiens
ctaccccaaattattggaagtctctctagcagc

SEQ ID NO: 3686 - DNA, 33 bp, Homo sapiens
gaccggtagaactaaggaaacgtgtcgtaatct

SEQ ID NO: 3687 - DNA, 33 bp, Homo sapiens
gaatgttttatggacatgtcgagttaggaaaaa

SEQ ID NO: 3688 - DNA, 33 bp, Homo sapiens
gcatttgctgcacttatgttctagttcattaaa

SEQ ID NO: 3689 - DNA, 33 bp, Homo sapiens
agcaaggtagacagtatgggatcagaacctgat

SEQ ID NO: 3690 - DNA, 33 bp, Homo sapiens
tcttgttccctctttcgattccaccttcatctg

SEQ ID NO: 3691 - DNA, 33 bp, Homo sapiens
tcatacctagaatatatgtcgatttcagtcaag

SEQ ID NO: 3692 - DNA, 33 bp, Homo sapiens
aattaagaccatcaaactaagctccagaaagag

SEQ ID NO: 3693 - DNA, 33 bp, Homo sapiens
gtagagaggagaaaaagtggacattttacagaa

SEQ ID NO: 3694 - DNA, 51 bp, Homo sapiens
actgccttagaaggtgcctgcttcatggttggttgcctttcattggcacag

SEQ ID NO: 3695 - DNA, 33 bp, Homo sapiens
gctgaaaaccactgaccctatttttgtcaagac

SEQ ID NO: 3696 - DNA, 33 bp, Homo sapiens
taggagctgtgtgttaggaaacagtgaggaaga

SEQ ID NO: 3697 - DNA, 33 bp, Homo sapiens
atggtatgtctcctgctgagcacgttcccttca

SEQ ID NO: 3698 - DNA, 33 bp, Homo sapiens
atcttgcaaaacagctgacaattttatgccgcc

SEQ ID NO: 3699 - DNA, 33 bp, Homo sapiens
tgcatacatgtttcacggggttgcaagcataac

SEQ ID NO: 3700 - DNA, 33 bp, Homo sapiens
ccgttcactatgacaagattacctagcggtctt

SEQ ID NO: 3701 - DNA, 33 bp, Homo sapiens
caaatctattgaacccgggaaattggttcagta

SEQ ID NO: 3702 - DNA, 33 bp, Homo sapiens
aaagagactgcaaatagatatgactttggaggg

SEQ ID NO: 3703 - DNA, 33 bp, Homo sapiens
ttacactctactgttatggggttcaggtcagaa

SEQ ID NO: 3704 - DNA, 33 bp, Homo sapiens
tgcttcctccacgtccgctcggagtgttcttct

SEQ ID NO: 3705 - DNA, 33 bp, Homo sapiens
ttgggtcttctaagcctccatccatgtcacctg

SEQ ID NO: 3706 - DNA, 33 bp, Homo sapiens
ggtaaactaacacttatgcattgtatggaactg

SEQ ID NO: 3707 - DNA, 33 bp, Homo sapiens
tgcagcgtggaatttggaattgtggtaacagct

SEQ ID NO: 3708 - DNA, 33 bp, Homo sapiens
acagagctctctgcttgaactcaacgtcacggc

SEQ ID NO: 3709 - DNA, 33 bp, Homo sapiens
gcagaacacactcaatcacagttaatcaagtca

SEQ ID NO: 3710 - DNA, 33 bp, Homo sapiens
tggctgctgagggcacgagcccccacaaaggaa

SEQ ID NO: 3711 - DNA, 33 bp, Homo sapiens
ctatgacctgaattgagccagaaaatgcagagt

SEQ ID NO: 3712 - DNA, 33 bp, Homo sapiens
gtaattctttgaaatcgaacagcccatttagtc

SEQ ID NO: 3713 - DNA, 33 bp, Homo sapiens
gaccaaaacattaatacggggaagcaataaatg

SEQ ID NO: 3714 - DNA, 33 bp, Homo sapiens
ttgggctctggccacatggtgatttcctatcaa

SEQ ID NO: 3715 - DNA, 51 bp, Homo sapiens
acttagtctgaagtcttattttaaagcaattaatcagtcttatacctaagc

SEQ ID NO: 3716 - DNA, 33 bp, Homo sapiens
gcgtcactcaaacctgccagccttccaaatcac

SEQ ID NO: 3717 - DNA, 33 bp, Homo sapiens
gggcgtgacacacacagaggcatgatctgcact

SEQ ID NO: 3718 - DNA, 51 bp, Homo sapiens
gtcttcaagcattgcctcagggacatgccaagggaacggaaaccagtccca

SEQ ID NO: 3719 - DNA, 33 bp, Homo sapiens
atagtaactggaagagcaatttggtacccagag

SEQ ID NO: 3720 - DNA, 33 bp, Homo sapiens
ggcttctatgattgaattgaggtgagccagagt

SEQ ID NO: 3721 - DNA, 33 bp, Homo sapiens
ttcatgctgggctctggaacgaagctggcaaac

SEQ ID NO: 3722 - DNA, 33 bp, Homo sapiens
catgctaaaagccgaatgtacaggcctggcctg

SEQ ID NO: 3723 - DNA, 33 bp, Homo sapiens
ggatttaagatggctctacattctctgacactc

SEQ ID NO: 3724 - DNA, 33 bp, Homo sapiens
gtcagaaggctacttctcagagggtccattgta

SEQ ID NO: 3725 - DNA, 33 bp, Homo sapiens
aagatggggccaactatggtgaaagtgaatagg

SEQ ID NO: 3726 - DNA, 33 bp, Homo sapiens
gcagggcctgattagaggtggctgagtgaacca

SEQ ID NO: 3727 - DNA, 33 bp, Homo sapiens
gacagagcaggaacacgaggtgatgccaatgct

SEQ ID NO: 3728 - DNA, 33 bp, Homo sapiens
cagacgtttcttctcttacagttctgaaggtga

SEQ ID NO: 3729 - DNA, 33 bp, Homo sapiens
cctggaattcttcccctagatcctcacaggctg

SEQ ID NO: 3730 - DNA, 33 bp, Homo sapiens
actgaggacacagagatctagcctcaagtggtt

SEQ ID NO: 3731 - DNA, 33 bp, Homo sapiens
taattgccggactttggaattcgttatgcattt

SEQ ID NO: 3732 - DNA, 33 bp, Homo sapiens
gacacgcttgtgtagcggacacacctgagccca

SEQ ID NO: 3733 - DNA, 51 bp, Homo sapiens
gctgtacaaatgctttctcgaggattactcgcagggggtaccctgccagga

SEQ ID NO: 3734 - DNA, 33 bp, Homo sapiens
taagtatatgttgaacgcgggaatggccaaatg

SEQ ID NO: 3735 - DNA, 33 bp, Homo sapiens
cacagtaagggattgatattggtattactgtgg

SEQ ID NO: 3736 - DNA, 33 bp, Homo sapiens
cccacccactagggacgcctttaactgatcacc

SEQ ID NO: 3737 - DNA, 33 bp, Homo sapiens
cctggtccatgtcagatcttttcaggccgggga

SEQ ID NO: 3738 - DNA, 33 bp, Homo sapiens
atgggggctctgcctcgaatgcctggtcagtct

SEQ ID NO: 3739 - DNA, 33 bp, Homo sapiens
cccttctggtaatggatcttcctaggcagggac

SEQ ID NO: 3740 - DNA, 33 bp, Homo sapiens
ctccttgttgctgaccgacagcaaagcttgtct

SEQ ID NO: 3741 - DNA, 33 bp, Homo sapiens
gtttggtgcaccgatatgaccagtcttgtgaat

SEQ ID NO: 3742 - DNA, 33 bp, Homo sapiens
ctggacactggaggaccaacaaatggtaccatt

SEQ ID NO: 3743 - DNA, 33 bp, Homo sapiens
gctcctaccgccgcacggactttgtggacagga

SEQ ID NO: 3744 - DNA, 33 bp, Homo sapiens
tatgttgagctattcacatcaaggggactcaat

SEQ ID NO: 3745 - DNA, 33 bp, Homo sapiens
gcccacaatttaggtatgtctctggtagaagga

SEQ ID NO: 3746 - DNA, 33 bp, Homo sapiens
ggggttccctaagtgctaaagtcccggccccac

SEQ ID NO: 3747 - DNA, 33 bp, Homo sapiens
gctcctgtactgaaaatgctcagggctacgcgg

SEQ ID NO: 3748 - DNA, 33 bp, Homo sapiens
gctgatctggaactcattgaagagtaaaaacat

SEQ ID NO: 3749 - DNA, 33 bp, Homo sapiens
gcggcaaatatgtagcgactttcagctaatcaa

SEQ ID NO: 3750 - DNA, 33 bp, Homo sapiens
ttgtcttttgctgttatcatctttacagtacat

SEQ ID NO: 3751 - DNA, 33 bp, Homo sapiens
tcttccaagggctcaacgtgtaagcaggctgga

SEQ ID NO: 3752 - DNA, 33 bp, Homo sapiens
tgtttaaacatggcgagcacggataactaaatg

SEQ ID NO: 3753 - DNA, 33 bp, Homo sapiens
aaacacaattaaccgatgttgcagatatttcat

SEQ ID NO: 3754 - DNA, 33 bp, Homo sapiens
tcaagtgtggcacccaggtattgtgattctaat

SEQ ID NO: 3755 - DNA, 33 bp, Homo sapiens
ctgccctttctgcctatacctgggatctgtcaa

SEQ ID NO: 3756 - DNA, 33 bp, Homo sapiens
taaatggggaaataactgcttttcaaggttatt

SEQ ID NO: 3757 - DNA, 33 bp, Homo sapiens
attataaatgaatccatgtactcatagcacagc

SEQ ID NO: 3758 - DNA, 33 bp, Homo sapiens
tccagcttcataatacgcattaataataatgaa

SEQ ID NO: 3759 - DNA, 33 bp, Homo sapiens
agagctctcagggaactggtgaccactttggtc

SEQ ID NO: 3760 - DNA, 33 bp, Homo sapiens
tggatatgatgtaaaaggtgataagtgtggtaa

SEQ ID NO: 3761 - DNA, 33 bp, Homo sapiens
tatttatccaagaatatggaacactcagattct

SEQ ID NO: 3762 - DNA, 33 bp, Homo sapiens
catgctgttctctacatcatggtaagaggacgg

SEQ ID NO: 3763 - DNA, 33 bp, Homo sapiens
gtgactagtctcgtattactgtcagcgtcctct

SEQ ID NO: 3764 - DNA, 33 bp, Homo sapiens
cactaactctctaaggtaatatcttttgtcatc

SEQ ID NO: 3765 - DNA, 33 bp, Homo sapiens
gtgctttgcttaattcgcaggacagatatggat

SEQ ID NO: 3766 - DNA, 33 bp, Homo sapiens
tggtagcaaggaacaatgtactggaaattgaaa

SEQ ID NO: 3767 - DNA, 33 bp, Homo sapiens
taactgcaattcagtagccttcgtattatctga

SEQ ID NO: 3768 - DNA, 33 bp, Homo sapiens
ttttttttctctgcactgtaaaatatgtgaagt

SEQ ID NO: 3769 - DNA, 51 bp, Homo sapiens
tccaagacagggagataaaagttgagaacaatcggtgcaacagagtaaaac

SEQ ID NO: 3770 - DNA, 33 bp, Homo sapiens
acgcccacatagagtaggagataaagggctaag

SEQ ID NO: 3771 - DNA, 33 bp, Homo sapiens
cccaactaccagggtataaatgaagcatgttaa

SEQ ID NO: 3772 - DNA, 33 bp, Homo sapiens
cttggtatgaaaatgaggtctccatactaaaca

SEQ ID NO: 3773 - DNA, 33 bp, Homo sapiens
tttcagtatttgtgaagaccaaaagcatgttca

SEQ ID NO: 3774 - DNA, 51 bp, Homo sapiens
tttacgtggataaccctgaccaacattggagtcttacttttcttatttgta

SEQ ID NO: 3775 - DNA, 33 bp, Homo sapiens
ttaattcatgtcgccagcgtcctaaatgaaagt

SEQ ID NO: 3776 - DNA, 33 bp, Homo sapiens
gtattctaaaaggaactggtgatatggattcca

SEQ ID NO: 3777 - DNA, 33 bp, Homo sapiens
ggaaaacacggattcatgcacactgagttcttc

SEQ ID NO: 3778 - DNA, 33 bp, Homo sapiens
ctccctgggaagtttccacagaatgtacaccaa

SEQ ID NO: 3779 - DNA, 33 bp, Homo sapiens
cagcagtggagagacagtcttaccacatatata

SEQ ID NO: 3780 - DNA, 33 bp, Homo sapiens
gtgcagagtattcctcggacagatacttactta

SEQ ID NO: 3781 - DNA, 33 bp, Homo sapiens
ttccagcacaaattgagcacattaggctattat

SEQ ID NO: 3782 - DNA, 33 bp, Homo sapiens
tcttagaagattgatatgctcatctatgtaaag

SEQ ID NO: 3783 - DNA, 33 bp, Homo sapiens
ttgtgaaatcaacttagtaagcattagttgaat

SEQ ID NO: 3784 - DNA, 33 bp, Homo sapiens
tgaaatgttgaagagatgtatctgcactctcat

SEQ ID NO: 3785 - DNA, 33 bp, Homo sapiens
gatatcttctcacaccgctaagaatgactacta

SEQ ID NO: 3786 - DNA, 51 bp, Homo sapiens
catccattcaataaattgttacagagcacctaatatgggccagacgtgtca

SEQ ID NO: 3787 - DNA, 33 bp, Homo sapiens
gaggtccaacctgttataagaattagaattttc

SEQ ID NO: 3788 - DNA, 33 bp, Homo sapiens
tgcaatgttcacttgggcaccctggcggtcaat

SEQ ID NO: 3789 - DNA, 33 bp, Homo sapiens
aaggctggtgggtacacgtttgatgaccatcag

SEQ ID NO: 3790 - DNA, 33 bp, Homo sapiens
gttacattcatacaatcatgcacaggcaatgaa

SEQ ID NO: 3791 - DNA, 33 bp, Homo sapiens
cctgcattaagtgacttagaatctagagttcct

SEQ ID NO: 3792 - DNA, 33 bp, Homo sapiens
caaggtagaatgctaagtaaatgatcagtctgt

SEQ ID NO: 3793 - DNA, 33 bp, Homo sapiens
tggctttcttcgaggctgagtctctaggctagt

SEQ ID NO: 3794 - DNA, 33 bp, Homo sapiens
attgattgaagtataagattgagttcctgctga

SEQ ID NO: 3795 - DNA, 33 bp, Homo sapiens
atggcatttatccttatcaatttcccaatgcct

SEQ ID NO: 3796 - DNA, 51 bp, Homo sapiens
atgtttgacataggggatagaaagatctggtttgtctagtggtaaagagga

SEQ ID NO: 3797 - DNA, 33 bp, Homo sapiens
aaggacagcatttagggaatctgcagttatata

SEQ ID NO: 3798 - DNA, 33 bp, Homo sapiens
ctgtagatacttgtaatgcagtggtgtttgtgt

SEQ ID NO: 3799 - DNA, 51 bp, Homo sapiens
tttatgctgagaggaagagctgtcaggttaattaatctatctcttatctat

SEQ ID NO: 3800 - DNA, 33 bp, Homo sapiens
gcaaaggtatcttccccagtgtttcaaccaagg

SEQ ID NO: 3801 - DNA, 33 bp, Homo sapiens
aaccaccttgacaccagaacaattcattcattc

SEQ ID NO: 3802 - DNA, 33 bp, Homo sapiens
tgtcaatagccaaatagagcaagcggaagaaag

SEQ ID NO: 3803 - DNA, 33 bp, Homo sapiens
aaagacccaaacactgtaccttgctcataagaa

SEQ ID NO: 3804 - DNA, 33 bp, Homo sapiens
aaagactcaagttcaattggacaagaggaatca

SEQ ID NO: 3805 - DNA, 33 bp, Homo sapiens
atgaagaattgagacagtaatgttaaataaaat

SEQ ID NO: 3806 - DNA, 33 bp, Homo sapiens
ttgccctgtctttcactcgcatttccataaacc

SEQ ID NO: 3807 - DNA, 33 bp, Homo sapiens
gggtctgctcttgcacggcaggagaagacttct

SEQ ID NO: 3808 - DNA, 33 bp, Homo sapiens
agtgatgatggtggaagtgaaatatttggatta

SEQ ID NO: 3809 - DNA, 51 bp, Homo sapiens
ccatggtcaatggtagtccatcacattagataatatagtgtcagtgccaaa

SEQ ID NO: 3810 - DNA, 33 bp, Homo sapiens
atccaattacactccataggcaattgaaatctt

SEQ ID NO: 3811 - DNA, 33 bp, Homo sapiens
gtacaaggactacctagattaaatgcatattgg

SEQ ID NO: 3812 - DNA, 33 bp, Homo sapiens
tggaccactctataccgagtcaccttttgctaa

SEQ ID NO: 3813 - DNA, 33 bp, Homo sapiens
ttgtgcctcttatcactaacctggagggactca

SEQ ID NO: 3814 - DNA, 33 bp, Homo sapiens
tggttttactgttgaatattgctggaaacagtg

SEQ ID NO: 3815 - DNA, 33 bp, Homo sapiens
aatgtctctgaaactcgaatcttctcatctgca

SEQ ID NO: 3816 - DNA, 33 bp, Homo sapiens
tcttgtcaataatggctctgattatttgactat

SEQ ID NO: 3817 - DNA, 33 bp, Homo sapiens
aatctgcagaaaaaaagtagcaaattcaagagc

SEQ ID NO: 3818 - DNA, 51 bp, Homo sapiens
gtgtttcttgttactatgattgttatgacagaaaatgcttttagagatggg

SEQ ID NO: 3819 - DNA, 33 bp, Homo sapiens
actgatggatacccaagatttacaatttcttac

SEQ ID NO: 3820 - DNA, 33 bp, Homo sapiens
caaagtcccagtctcagatcgaagtaagcccct

SEQ ID NO: 3821 - DNA, 33 bp, Homo sapiens
tgaagatagactctgagatggggagttgcatga

SEQ ID NO: 3822 - DNA, 33 bp, Homo sapiens
caggatggattagagagggggaaatgaaggcat

SEQ ID NO: 3823 - DNA, 33 bp, Homo sapiens
actagcaccactacaggcctcatgacctcagag

SEQ ID NO: 3824 - DNA, 33 bp, Homo sapiens
agcacttgccagatgatgaaagatgtctgatat

SEQ ID NO: 3825 - DNA, 33 bp, Homo sapiens
tcacctagctcctgtttaacacgtttgtgtacc

SEQ ID NO: 3826 - DNA, 33 bp, Homo sapiens
ccacctaattcacccttaaggactatgaaattc

SEQ ID NO: 3827 - DNA, 51 bp, Homo sapiens
aacatcctctctttctccaactcaggacagacgtaatggctgcttattggt

SEQ ID NO: 3828 - DNA, 33 bp, Homo sapiens
tgcaatgtgtcagttatagttttaggcactatt

SEQ ID NO: 3829 - DNA, 33 bp, Homo sapiens
aagaatagagcgataacattggacactggtatg

SEQ ID NO: 3830 - DNA, 33 bp, Homo sapiens
tggattaacacaattcgctttgaagaggctcat

SEQ ID NO: 3831 - DNA, 33 bp, Homo sapiens
gtccttagaatccttaggttatgtatggctaag

SEQ ID NO: 3832 - DNA, 33 bp, Homo sapiens
tgaaaagtggtaacattaagataaccttgaagt

SEQ ID NO: 3833 - DNA, 33 bp, Homo sapiens
cagttcatgcctataccagttctaactactgta

SEQ ID NO: 3834 - DNA, 33 bp, Homo sapiens
tctattaataatgatacctgactgtgtataaaa

SEQ ID NO: 3835 - DNA, 33 bp, Homo sapiens
tctcttcaaacgctgatataaccaagtccagtc

SEQ ID NO: 3836 - DNA, 33 bp, Homo sapiens
tgctgtacctgcttgtgacaacttgagttctaa

SEQ ID NO: 3837 - DNA, 33 bp, Homo sapiens
gctccactgtaatcaatgtgtcaatggaccacc

SEQ ID NO: 3838 - DNA, 33 bp, Homo sapiens
tgtggtaccaaaccaggaagctctgtactagct

SEQ ID NO: 3839 - DNA, 33 bp, Homo sapiens
tgatctgcagccataagtctctaaaagttaggg

SEQ ID NO: 3840 - DNA, 33 bp, Homo sapiens
atgatgattgccagtcggaatgaaggacaaaac

SEQ ID NO: 3841 - DNA, 51 bp, Homo sapiens
tgggaaaaacaattatggctaagaacaattaagtccactggtagaaagata

SEQ ID NO: 3842 - DNA, 33 bp, Homo sapiens
gcttagaaacttagaagcaaacatacccataga

SEQ ID NO: 3843 - DNA, 51 bp, Homo sapiens
gaggaggaagatgcagaataggcacgaaaggagtagaaaaaactagaagag

SEQ ID NO: 3844 - DNA, 33 bp, Homo sapiens
aatttatgttggcccatgtatcaagtagacatt

SEQ ID NO: 3845 - DNA, 33 bp, Homo sapiens
gttgccctgttctacctggcaaggacccaggca

SEQ ID NO: 3846 - DNA, 33 bp, Homo sapiens
atccccaacattgccaggaagacaggaatcaca

SEQ ID NO: 3847 - DNA, 33 bp, Homo sapiens
ccaaagaaggcttagctagggttcagtaaggga

SEQ ID NO: 3848 - DNA, 33 bp, Homo sapiens
tcgcttgaggaagcaggaatgggaataatttaa

SEQ ID NO: 3849 - DNA, 33 bp, Homo sapiens
tttctcagctataaggtcaatctgtaacttgaa

SEQ ID NO: 3850 - DNA, 51 bp, Homo sapiens
ccctcccagaacctcactttgacaatgtggctcactaattgctactgggta

SEQ ID NO: 3851 - DNA, 33 bp, Homo sapiens
aaaagtgcctgtgatccgaggattctctaaagc

SEQ ID NO: 3852 - DNA, 33 bp, Homo sapiens
atgaccatctttcaaatgcttcagggcaatgca

SEQ ID NO: 3853 - DNA, 33 bp, Homo sapiens
agatatctcctccatagtaactaggacacagaa

SEQ ID NO: 3854 - DNA, 33 bp, Homo sapiens
aactcatttcatcaccgattcaaaagtccaatg

SEQ ID NO: 3855 - DNA, 33 bp, Homo sapiens
aagaaagggggtataatgagtcgtgtctaatct

SEQ ID NO: 3856 - DNA, 51 bp, Homo sapiens
atattgtccttccctgtgagttagagattatctccattttacaaatagaaa

SEQ ID NO: 3857 - DNA, 33 bp, Homo sapiens
agggagggaattaccccaggacgtgactaccag

SEQ ID NO: 3858 - DNA, 51 bp, Homo sapiens
ccacaataaaataaccaactcaacagtggaagttacagttttgaagaatga

SEQ ID NO: 3859 - DNA, 51 bp, Homo sapiens
aagagacaaagatgcatagtataaatgagaaataaatcacacacattctgg

SEQ ID NO: 3860 - DNA, 51 bp, Homo sapiens
cattaagttgaaataaaatccagaagtaagtaagctattgtttagaaacta

SEQ ID NO: 3861 - DNA, 51 bp, Homo sapiens
tatgttagagacccctttcaggagatggaagcaggtataggaaaacaaaat

SEQ ID NO: 3862 - DNA, 33 bp, Homo sapiens
cccagtaacctgctccggaacaacctgatacaa

SEQ ID NO: 3863 - DNA, 33 bp, Homo sapiens
gttgttttctgtgcaagtgtggaatgtagacct

SEQ ID NO: 3864 - DNA, 33 bp, Homo sapiens
aaaacagaaagagccatgttctatcatattctc

SEQ ID NO: 3865 - DNA, 33 bp, Homo sapiens
gggtaccttgttgacatggctcttctacctggc

SEQ ID NO: 3866 - DNA, 33 bp, Homo sapiens
ggaactcacattttcagaccaagtcagatattt

SEQ ID NO: 3867 - DNA, 33 bp, Homo sapiens
tagaagcacaggggaaggtgttaataaattcat

SEQ ID NO: 3868 - DNA, 33 bp, Homo sapiens
caggccctggctcataggaaatgccttagcctg

SEQ ID NO: 3869 - DNA, 33 bp, Homo sapiens
gacttaggaatatcgagagaggtgcccctggga

SEQ ID NO: 3870 - DNA, 33 bp, Homo sapiens
agtgagaacagattaatacagtatgtgccgggc

SEQ ID NO: 3871 - DNA, 33 bp, Homo sapiens
gaaatttaaagaggcagagtgattttcccaaga

SEQ ID NO: 3872 - DNA, 33 bp, Homo sapiens
ccagatttttcccaatcagacatccacaagtca

SEQ ID NO: 3873 - DNA, 33 bp, Homo sapiens
tctctagatagtaggattatgtttccagaaagc

SEQ ID NO: 3874 - DNA, 33 bp, Homo sapiens
aggaatcaaccacttcgaaggaagcagagagaa

SEQ ID NO: 3875 - DNA, 33 bp, Homo sapiens
gagtttccaatttacggacgtgctatatctctc

SEQ ID NO: 3876 - DNA, 33 bp, Homo sapiens
tgtctagagtttaccaggagcactttttagtac

SEQ ID NO: 3877 - DNA, 33 bp, Homo sapiens
tgtttgagtaataaaagctagtacttactgggc

SEQ ID NO: 3878 - DNA, 33 bp, Homo sapiens
ggcagatgggagaaaatgctaacgataagaagt

SEQ ID NO: 3879 - DNA, 33 bp, Homo sapiens
ggccaaaggcgctgaagaacactgaggcagatt

SEQ ID NO: 3880 - DNA, 33 bp, Homo sapiens
tttcttagctagaatagtagagatgctttgtaa

SEQ ID NO: 3881 - DNA, 33 bp, Homo sapiens
gagatataattcatactcacctgaagtgtacat

SEQ ID NO: 3882 - DNA, 51 bp, Homo sapiens
tcccctcttgacccttacactggcattaaggaatacaaaagctgaggaagg

SEQ ID NO: 3883 - DNA, 33 bp, Homo sapiens
ttccccctttgagccttagctacctcacctatc

SEQ ID NO: 3884 - DNA, 33 bp, Homo sapiens
taaatgctcataaaaatatctggcaggccctct

SEQ ID NO: 3885 - DNA, 33 bp, Homo sapiens
cccagggacacaaaactagtaggtaacagattc

SEQ ID NO: 3886 - DNA, 33 bp, Homo sapiens
tgcttgtgagtatagagctaatttgtgagtact

SEQ ID NO: 3887 - DNA, 33 bp, Homo sapiens
ataacccaagaggactgacaaggatggtgttta

SEQ ID NO: 3888 - DNA, 33 bp, Homo sapiens
ccagtctcctctttccgcaggatcagctttcac

SEQ ID NO: 3889 - DNA, 33 bp, Homo sapiens
gtctgtaaaactgccattagagatgtaaggaat

SEQ ID NO: 3890 - DNA, 33 bp, Homo sapiens
tcttaggacaccaaaattgagttattagaccag

SEQ ID NO: 3891 - DNA, 33 bp, Homo sapiens
gttggcaacaaatacatgctggagttggcaagt

SEQ ID NO: 3892 - DNA, 33 bp, Homo sapiens
aagagacgagcaaagagaaataaactgattcca

SEQ ID NO: 3893 - DNA, 33 bp, Homo sapiens
ttctccaagtgtttaagagaacttggcactggt

SEQ ID NO: 3894 - DNA, 33 bp, Homo sapiens
cctacctctctgaccagtctttcctggcccttt

SEQ ID NO: 3895 - DNA, 33 bp, Homo sapiens
gtgtgaggagtcagacggaaagaatgatctact

SEQ ID NO: 3896 - DNA, 33 bp, Homo sapiens
aggcgctgttgatggcgatggcattgatcagca

SEQ ID NO: 3897 - DNA, 33 bp, Homo sapiens
ctctgacctctgcttataattacacagaaagaa

SEQ ID NO: 3898 - DNA, 33 bp, Homo sapiens
tgtcttatttcctccagagtccttaagacagtg

SEQ ID NO: 3899 - DNA, 33 bp, Homo sapiens
catatgccttgtacgcgcatacaccctacacac

SEQ ID NO: 3900 - DNA, 33 bp, Homo sapiens
gggactctgctggtcatgtaatacacacaaaag

SEQ ID NO: 3901 - DNA, 33 bp, Homo sapiens
tgaataaaagtataacgatgaccgcacatagag

SEQ ID NO: 3902 - DNA, 33 bp, Homo sapiens
aatatttctttatacagaactttgcattgccaa

SEQ ID NO: 3903 - DNA, 33 bp, Homo sapiens
agattccacaagtgcacgagaagagaagttctg

SEQ ID NO: 3904 - DNA, 33 bp, Homo sapiens
cttcctctgaaacgtgtaaatccaaccaaacac

SEQ ID NO: 3905 - DNA, 51 bp, Homo sapiens
gccaatggcacattgggagctgatatctcacccttgctctgcttttgaagc

SEQ ID NO: 3906 - DNA, 33 bp, Homo sapiens
gaaacagaatgagtcatatcaaggttttaatcc

SEQ ID NO: 3907 - DNA, 33 bp, Homo sapiens
gtgctgcctctctacagagcgagaatgtggact

SEQ ID NO: 3908 - DNA, 33 bp, Homo sapiens
tttggcaacttgagtcgaagtctcctctctaaa

SEQ ID NO: 3909 - DNA, 33 bp, Homo sapiens
caaaggggaacagaggtaaagatatgcattgga

SEQ ID NO: 3910 - DNA, 51 bp, Homo sapiens
tagataaaaatatacttcacttccatattacactcagagacaaccaaaggc

SEQ ID NO: 3911 - DNA, 51 bp, Homo sapiens
gttgctctttatgagacgaaataaagttggatgtcacttataaatggattt

SEQ ID NO: 3912 - DNA, 51 bp, Homo sapiens
ttaggagttattcaacaagccattatgcttacaaaaatttatgagtcaaag

SEQ ID NO: 3913 - DNA, 33 bp, Homo sapiens
atattatttcctgctagagttaacaaaatggga

SEQ ID NO: 3914 - DNA, 33 bp, Homo sapiens
tttaaattacagaacggacgggttttagtgttt

SEQ ID NO: 3915 - DNA, 51 bp, Homo sapiens
tacataagtttgcaatattaacatacccaagaatctgtaactatttcacct

SEQ ID NO: 3916 - DNA, 33 bp, Homo sapiens
gtcactggcttagacatcgtggcagggccgggg

SEQ ID NO: 3917 - DNA, 33 bp, Homo sapiens
atagatcagatagtaatagcacctacctcatgg

SEQ ID NO: 3918 - DNA, 33 bp, Homo sapiens
caactattctgctgagtacaagtttctcaaggc

SEQ ID NO: 3919 - DNA, 33 bp, Homo sapiens
gtgttcggtgcatcgatgtgaattggggaggag

SEQ ID NO: 3920 - DNA, 33 bp, Homo sapiens
ctctcacaggggcaacgaatgcatctgaaagga

SEQ ID NO: 3921 - DNA, 33 bp, Homo sapiens
ccctgaagacacagaatgtgaggtgtgctgcca

SEQ ID NO: 3922 - DNA, 33 bp, Homo sapiens
cccacaccaagaatccgcacagatatttatggg

SEQ ID NO: 3923 - DNA, 33 bp, Homo sapiens
aggatgttctgcttcagtaaagtggctcacctg

SEQ ID NO: 3924 - DNA, 33 bp, Homo sapiens
caagttctccaatcaaccccctcactactggga

SEQ ID NO: 3925 - DNA, 33 bp, Homo sapiens
aactacgaaatccaaatgcagggagagtggcct

SEQ ID NO: 3926 - DNA, 33 bp, Homo sapiens
caagggcagggcagaagtggacccgagtgcctg

SEQ ID NO: 3927 - DNA, 33 bp, Homo sapiens
gccagactgtctaacagtaggcgacggaaactc

SEQ ID NO: 3928 - DNA, 33 bp, Homo sapiens
gcagaaatgtgagctggatcagtctcctgtatg

SEQ ID NO: 3929 - DNA, 51 bp, Homo sapiens
caaagctaaagtaagagaaatgcaagagccactgttagaaatagagatgaa

SEQ ID NO: 3930 - DNA, 33 bp, Homo sapiens
aacgctagaaatactggataacataaattaaat

SEQ ID NO: 3931 - DNA, 33 bp, Homo sapiens
ggttcaagttatccacggactatacctcctttt

SEQ ID NO: 3932 - DNA, 33 bp, Homo sapiens
gccagcctgtgtcgacgaaactcgtagcagaaa

SEQ ID NO: 3933 - DNA, 33 bp, Homo sapiens
ttttgccattttttgagcgctaatgatgtatta

SEQ ID NO: 3934 - DNA, 33 bp, Homo sapiens
atgccagacacttaacgaacatcaccatattta

SEQ ID NO: 3935 - DNA, 33 bp, Homo sapiens
ggtattttgagtcaagtcggtttttgagccaaa

SEQ ID NO: 3936 - DNA, 33 bp, Homo sapiens
ttacaaaacatgaccactctcattccttcatgt

SEQ ID NO: 3937 - DNA, 33 bp, Homo sapiens
taggtaaacagacccatgagtgttttgttaaag

SEQ ID NO: 3938 - DNA, 33 bp, Homo sapiens
acaaattctgtcaatatgtcctaccggtgacac

SEQ ID NO: 3939 - DNA, 33 bp, Homo sapiens
attttagtgctagtagtagacagtttgatggtt

SEQ ID NO: 3940 - DNA, 33 bp, Homo sapiens
tcaatccatcctgcactgtcgggcaacgtgccc

SEQ ID NO: 3941 - DNA, 33 bp, Homo sapiens
cacagaactgggtgaattaacaatgtccatgct

SEQ ID NO: 3942 - DNA, 33 bp, Homo sapiens
cccagcttgaagcagttacccacacaagctgat

SEQ ID NO: 3943 - DNA, 33 bp, Homo sapiens
accacctcaggtcttctctttatccattgttct

SEQ ID NO: 3944 - DNA, 33 bp, Homo sapiens
tgatcttgaaaatgtggacttcattagagggtg

SEQ ID NO: 3945 - DNA, 33 bp, Homo sapiens
gtcagccataaaaaaagagacccagtcatttgc

SEQ ID NO: 3946 - DNA, 33 bp, Homo sapiens
ctttctttgggttatatcaagcagatggattac

SEQ ID NO: 3947 - DNA, 33 bp, Homo sapiens
ccactgtgctccatcatggaaggacacttgagt

SEQ ID NO: 3948 - DNA, 33 bp, Homo sapiens
actctggcggtccttagaaatagaataacttct

SEQ ID NO: 3949 - DNA, 33 bp, Homo sapiens
aagacgctttgcaacatgcccagatactagagc

SEQ ID NO: 3950 - DNA, 33 bp, Homo sapiens
agctcaataaagatccgctattgaaaagctact

SEQ ID NO: 3951 - DNA, 33 bp, Homo sapiens
tgcaggacagcaaaaagtctgacaccatctgaa

SEQ ID NO: 3952 - DNA, 33 bp, Homo sapiens
tatgccaactagaaaacaacaatgcagggggga

SEQ ID NO: 3953 - DNA, 33 bp, Homo sapiens
gggtatcacgagtcacgaaatcactcagccaat

SEQ ID NO: 3954 - DNA, 33 bp, Homo sapiens
ggattcctaatttgtatctctgaacagctgaat

SEQ ID NO: 3955 - DNA, 33 bp, Homo sapiens
tttgttttaagcccccgaagaaactcactgaca

SEQ ID NO: 3956 - DNA, 33 bp, Homo sapiens
aatagtaagtgccatcggagtaggtatatcagt

SEQ ID NO: 3957 - DNA, 51 bp, Homo sapiens
catttgatttgactatatgactagatatttacattttttttttttttttga

SEQ ID NO: 3958 - DNA, 33 bp, Homo sapiens
ccaaaatcactgatgggagttaagcctggaaat

SEQ ID NO: 3959 - DNA, 33 bp, Homo sapiens
agctctcagaaatttaggccatcccagctgagg

SEQ ID NO: 3960 - DNA, 33 bp, Homo sapiens
ccatcctctcccagccgcttttcagcttttcta

SEQ ID NO: 3961 - DNA, 33 bp, Homo sapiens
gcctagaggtgatcgaggtagagaaaagggagt

SEQ ID NO: 3962 - DNA, 33 bp, Homo sapiens
ccttaccacggttcacgctggcacactaagtct

SEQ ID NO: 3963 - DNA, 33 bp, Homo sapiens
ttctgagtccaaataaggtgtggagagaacgta

SEQ ID NO: 3964 - DNA, 33 bp, Homo sapiens
ctcctcaatattctactcagggtgtggcacaca

SEQ ID NO: 3965 - DNA, 33 bp, Homo sapiens
tagaaataaattaccatgtcatgtcctgtggca

SEQ ID NO: 3966 - DNA, 33 bp, Homo sapiens
tggatattttcccatcgatatagctggagcaca

SEQ ID NO: 3967 - DNA, 33 bp, Homo sapiens
cctggtatttttcacattggggctgaggacaag

SEQ ID NO: 3968 - DNA, 33 bp, Homo sapiens
aaaggctccctctgtatggcaagtaacgtggca

SEQ ID NO: 3969 - DNA, 51 bp, Homo sapiens
catagaaatcactacatagtctaaatacaactcttttcatatctaattgct

SEQ ID NO: 3970 - DNA, 33 bp, Homo sapiens
tctgacctctgcttgaccccaccactctttgct

SEQ ID NO: 3971 - DNA, 51 bp, Homo sapiens
gctcagttgtgctacatgttagaaacgggcagtgatactcttacttttcag

SEQ ID NO: 3972 - DNA, 33 bp, Homo sapiens
gaattggagctattcagataatccactacagtc

SEQ ID NO: 3973 - DNA, 33 bp, Homo sapiens
catgacactcttgagatgatagcagggttggaa

SEQ ID NO: 3974 - DNA, 33 bp, Homo sapiens
gccctctgacaaagacgcaggtgctaaccatca

SEQ ID NO: 3975 - DNA, 33 bp, Homo sapiens
cttaataaatcccttgtatgcagatcctcatct

SEQ ID NO: 3976 - DNA, 33 bp, Homo sapiens
tactttcaaaagtcaatgctcgtagtgaccaca

SEQ ID NO: 3977 - DNA, 33 bp, Homo sapiens
tttattaattttaccataagcctacagacatat

SEQ ID NO: 3978 - DNA, 33 bp, Homo sapiens
ccaggtgcttgtacagtcacatggtgaaaagct

SEQ ID NO: 3979 - DNA, 33 bp, Homo sapiens
tctcaggaaagctgccgaacttatctgagagct

SEQ ID NO: 3980 - DNA, 33 bp, Homo sapiens
agagcattttggcaagtccatgattatttctaa

SEQ ID NO: 3981 - DNA, 33 bp, Homo sapiens
aaaatatctgcagccattcaaaatactctcgtg

SEQ ID NO: 3982 - DNA, 33 bp, Homo sapiens
ccacttaggtggaaaagactgacaaccaagtgg

SEQ ID NO: 3983 - DNA, 33 bp, Homo sapiens
tctttgggaaaaagaattgagtgggctagatag

SEQ ID NO: 3984 - DNA, 33 bp, Homo sapiens
ccaaaataaatgcatctatctccttcacatctg

SEQ ID NO: 3985 - DNA, 33 bp, Homo sapiens
tgtagccaagagtgaatatgatgtagccttctt

SEQ ID NO: 3986 - DNA, 33 bp, Homo sapiens
tccatttttaggccgaggagtcttgtaaatgta

SEQ ID NO: 3987 - DNA, 33 bp, Homo sapiens
agtctcacgctacaattaactcgttatactttc

SEQ ID NO: 3988 - DNA, 51 bp, Homo sapiens
agagtatatatctgctgtgtgaagtgaaagaaccctgatagtgttatagta

SEQ ID NO: 3989 - DNA, 33 bp, Homo sapiens
ttcaggaataaactgatctgccctagttcacag

SEQ ID NO: 3990 - DNA, 33 bp, Homo sapiens
gattatggatgaagggtacaaatttatagtttc

SEQ ID NO: 3991 - DNA, 33 bp, Homo sapiens
acaacaatctctcttgtatcgacatccgtgtta

SEQ ID NO: 3992 - DNA, 33 bp, Homo sapiens
aattgaaaaaactctatgaaggccagaggaaga

SEQ ID NO: 3993 - DNA, 51 bp, Homo sapiens
aactactttagaaatcttctacaaattcaattaccttatcttaccttttgc

SEQ ID NO: 3994 - DNA, 33 bp, Homo sapiens
tgtgattcatttatgacaggaaatgtgcatcat

SEQ ID NO: 3995 - DNA, 33 bp, Homo sapiens
aaatgcctgacatttacaggtagaatgaggaag

SEQ ID NO: 3996 - DNA, 33 bp, Homo sapiens
tctcttgaactggaattaatatgaagtagcctg

SEQ ID NO: 3997 - DNA, 33 bp, Homo sapiens
tggttccataactcaatgtacttgttccaattc

SEQ ID NO: 3998 - DNA, 33 bp, Homo sapiens
taagtatttccacttgtatgtccttgaccagaa

SEQ ID NO: 3999 - DNA, 33 bp, Homo sapiens
agaaaataagattagaggcaagaagatcaacta

SEQ ID NO: 4000 - DNA, 33 bp, Homo sapiens
cacttctgaaaagaaggcatacgcgtggtcaac

SEQ ID NO: 4001 - DNA, 33 bp, Homo sapiens
gttggcacagccttattaggaagataatccaat

SEQ ID NO: 4002 - DNA, 33 bp, Homo sapiens
ttttttccactccaaattgagcgatctgtgctc

SEQ ID NO: 4003 - DNA, 33 bp, Homo sapiens
acttttggtagacctggactcaactatttgtag

SEQ ID NO: 4004 - DNA, 51 bp, Homo sapiens
taaagtcgtagctttgtgcaccacatctaactgtttcaaaaatttcctaat

SEQ ID NO: 4005 - DNA, 33 bp, Homo sapiens
tagctactctgagctctaagactgtgagatgtc

SEQ ID NO: 4006 - DNA, 33 bp, Homo sapiens
atacaaatgtgaagtataatcattccctgacat

SEQ ID NO: 4007 - DNA, 33 bp, Homo sapiens
ataaacctggatgtcagtcttacagctataaca

SEQ ID NO: 4008 - DNA, 33 bp, Homo sapiens
agactgtaactcaaagtagcttgtggacagagt

SEQ ID NO: 4009 - DNA, 33 bp, Homo sapiens
gctgacccacaagaacgcagggaatgaaaggca

SEQ ID NO: 4010 - DNA, 51 bp, Homo sapiens
agaaaatccctctggcaaccaatactgaccattacaatgaacagataatta

SEQ ID NO: 4011 - DNA, 33 bp, Homo sapiens
tattgaagcttacacctcattttgtgatccagt

SEQ ID NO: 4012 - DNA, 33 bp, Homo sapiens
gttattccaaagtgaatgtcttaaaacaacaga

SEQ ID NO: 4013 - DNA, 33 bp, Homo sapiens
agcctgacagtatcaaggttactctctaaatgc

SEQ ID NO: 4014 - DNA, 33 bp, Homo sapiens
aatttcaaaatgaagagagcctttgcacttacc

SEQ ID NO: 4015 - DNA, 33 bp, Homo sapiens
aatattagatatgctaggtgttttgcctttgct

SEQ ID NO: 4016 - DNA, 33 bp, Homo sapiens
ctcagctaaatgaccctgaaactgtagaatttt

SEQ ID NO: 4017 - DNA, 33 bp, Homo sapiens
tatgtcagctcagttagctctctaatgcagcct

SEQ ID NO: 4018 - DNA, 33 bp, Homo sapiens
tcttttgtgcaaaaattatgtcctaatgtattg

SEQ ID NO: 4019 - DNA, 33 bp, Homo sapiens
atatttttccttctgacctccagatactatttc

SEQ ID NO: 4020 - DNA, 33 bp, Homo sapiens
ttcctctcagcttaaagaaaagtgtctgctact

SEQ ID NO: 4021 - DNA, 33 bp, Homo sapiens
tatggtatagccttactaacactgttgtcactt

SEQ ID NO: 4022 - DNA, 51 bp, Homo sapiens
tgctctggctgactcatttcatggaccttcctgttaaatttttgcctagtc

SEQ ID NO: 4023 - DNA, 51 bp, Homo sapiens
ataaagaggctcaaaagtaatagaacaggatcttaagtcagcccctgttta

SEQ ID NO: 4024 - DNA, 51 bp, Homo sapiens
ccagttgccaaactctggggataaggatggacaaaatacagtctctgcccc

SEQ ID NO: 4025 - DNA, 33 bp, Homo sapiens
gtcagagagtggagaatgattttttctactggt

SEQ ID NO: 4026 - DNA, 33 bp, Homo sapiens
atacgatggctgtctcgaaggaaagcatttgta

SEQ ID NO: 4027 - DNA, 33 bp, Homo sapiens
atgataatatttagacgctgtgactcttcagaa

SEQ ID NO: 4028 - DNA, 33 bp, Homo sapiens
gagcaaacaatcatgggatctagtcactgtgca

SEQ ID NO: 4029 - DNA, 33 bp, Homo sapiens
ctactttttgctttggtaacactatctaagcat

SEQ ID NO: 4030 - DNA, 33 bp, Homo sapiens
ctatagaagtgactatgagttccatcaaatagg

SEQ ID NO: 4031 - DNA, 33 bp, Homo sapiens
agctgcatcacatctagaacttttctccaagta

SEQ ID NO: 4032 - DNA, 33 bp, Homo sapiens
aacaagtagaggtagatggcaattccaatgaaa

SEQ ID NO: 4033 - DNA, 33 bp, Homo sapiens
cagaatttgaatccacgaaatttacttgggaac

SEQ ID NO: 4034 - DNA, 33 bp, Homo sapiens
gaagttggtctttccaggatcattacctgctga

SEQ ID NO: 4035 - DNA, 33 bp, Homo sapiens
atcttggatgtcggaaccttcaattatctgcag

SEQ ID NO: 4036 - DNA, 33 bp, Homo sapiens
cctattaagacaatgatcagatttgcaagaatg

SEQ ID NO: 4037 - DNA, 33 bp, Homo sapiens
tgaggcaagactatttgaaagatatcagcgata

SEQ ID NO: 4038 - DNA, 33 bp, Homo sapiens
ttggagtctaatgctagccatgtttcctcatac

SEQ ID NO: 4039 - DNA, 33 bp, Homo sapiens
cactctagttcctgaatcaattggtctgcagtg

SEQ ID NO: 4040 - DNA, 51 bp, Homo sapiens
caccaatctagggcagctgttccacgcagagatgcacattcgaatcagctg

SEQ ID NO: 4041 - DNA, 51 bp, Homo sapiens
taagaacaaacacccaagatttttcgacagctgtaatgctttgtgttaaca

SEQ ID NO: 4042 - DNA, 33 bp, Homo sapiens
aaaggagacgacaatataatcagatgtattgtg

SEQ ID NO: 4043 - DNA, 33 bp, Homo sapiens
tttgccaggaaggaaagaaaaacagcgaagggc

SEQ ID NO: 4044 - DNA, 33 bp, Homo sapiens
gccacccctttctaactcaacaactccttgacc

SEQ ID NO: 4045 - DNA, 33 bp, Homo sapiens
ggagagaattgcaccagataaatgcaaaaatat

SEQ ID NO: 4046 - DNA, 51 bp, Homo sapiens
aaggataaagaaaactactgtatacgaattagggccacgatgtgagctgta

SEQ ID NO: 4047 - DNA, 33 bp, Homo sapiens
gacagtgttttggcaataaaaaaatttagtttc

SEQ ID NO: 4048 - DNA, 33 bp, Homo sapiens
catagcgccttgtacataggatgtcgataaatg

SEQ ID NO: 4049 - DNA, 33 bp, Homo sapiens
ttctggaacatcaaaagagcaatggcctaatta

SEQ ID NO: 4050 - DNA, 33 bp, Homo sapiens
cctactgggcaaccagcctgaatccactgtttc

SEQ ID NO: 4051 - DNA, 33 bp, Homo sapiens
tttatatttcatttactaccagttctagttcat

SEQ ID NO: 4052 - DNA, 33 bp, Homo sapiens
gattccctggccaaaggcagtaccaggttccaa

SEQ ID NO: 4053 - DNA, 33 bp, Homo sapiens
actggactgtttgcccggcatttatgccctctc

SEQ ID NO: 4054 - DNA, 33 bp, Homo sapiens
ttccagggccctagaatccatttgtcactgaga

SEQ ID NO: 4055 - DNA, 33 bp, Homo sapiens
gcctcgctcttcagatgaacctttcttcttttc

SEQ ID NO: 4056 - DNA, 33 bp, Homo sapiens
acttggcattcagttggaatcacctctattttt

SEQ ID NO: 4057 - DNA, 33 bp, Homo sapiens
tgtacataaaagttcatggaagcattgttcaca

SEQ ID NO: 4058 - DNA, 33 bp, Homo sapiens
ggagacgtgtctagattactgccaacaatgaca

SEQ ID NO: 4059 - DNA, 33 bp, Homo sapiens
tctttggccatgaaaataatatgacaacatagc

SEQ ID NO: 4060 - DNA, 33 bp, Homo sapiens
tggaacatcaaggaaagatcacactgtcaatta

SEQ ID NO: 4061 - DNA, 33 bp, Homo sapiens
tgccttcagaggccaagcagataaccttagtga

SEQ ID NO: 4062 - DNA, 33 bp, Homo sapiens
gcctgatggctaagcatagaggatgtttttacc

SEQ ID NO: 4063 - DNA, 33 bp, Homo sapiens
gttttgcctggacagcggaaaacagttatgaaa

SEQ ID NO: 4064 - DNA, 33 bp, Homo sapiens
atgggcacaaatagaggagaagcccactatgat

SEQ ID NO: 4065 - DNA, 33 bp, Homo sapiens
cttggaagagtataaattgaactatgtcacact

SEQ ID NO: 4066 - DNA, 33 bp, Homo sapiens
gtgttgaagacactacggagtttattcttctct

SEQ ID NO: 4067 - DNA, 33 bp, Homo sapiens
ggtacacttggaaacataacaccatagaatgtt

SEQ ID NO: 4068 - DNA, 51 bp, Homo sapiens
ccatattttcttccatttttttaattagagaggagtatttgtctgtagtcc

SEQ ID NO: 4069 - DNA, 33 bp, Homo sapiens
agtgctgtaagagtcagatgtaacctctggagg

SEQ ID NO: 4070 - DNA, 51 bp, Homo sapiens
gtcctgagctatggtatatcccatcgaaaggtagtcattgccactcaccta

SEQ ID NO: 4071 - DNA, 33 bp, Homo sapiens
ttgagtcttgaacaaaggtcaaccaaatgggga

SEQ ID NO: 4072 - DNA, 33 bp, Homo sapiens
ccaagactacagtgaagtcggccacctctcctc

SEQ ID NO: 4073 - DNA, 33 bp, Homo sapiens
atcaatctaacttcactgagcaaagcttcatgc

SEQ ID NO: 4074 - DNA, 33 bp, Homo sapiens
gactggcaatgttccccatgttaacaatgtaaa

SEQ ID NO: 4075 - DNA, 51 bp, Homo sapiens
gaaatagggacctgcatttcaaaggccatccttacccaaacagggagcccc

SEQ ID NO: 4076 - DNA, 51 bp, Homo sapiens
gaaattgtgagtttgttttggtagatgtaaagtgtaagaggtaaaaatgtg

SEQ ID NO: 4077 - DNA, 51 bp, Homo sapiens
ggtatgtatttaaaacatatgtttataatcctgacttgaagcaacctaact

SEQ ID NO: 4078 - DNA, 51 bp, Homo sapiens
caggtggaattagataatagacccacgttaggttgcttcaagtcaggattc

SEQ ID NO: 4079 - DNA, 33 bp, Homo sapiens
aactaagtaacaaaaatcggcaattcaatttgt

SEQ ID NO: 4080 - DNA, 33 bp, Homo sapiens
atagtaagactgtgttcaaaaaggatgaggatg

SEQ ID NO: 4081 - DNA, 33 bp, Homo sapiens
agggatttgagtgggaggaagggaaggttaagc

SEQ ID NO: 4082 - DNA, 33 bp, Homo sapiens
aggacagtacacagaaggactggcactgagatc

SEQ ID NO: 4083 - DNA, 33 bp, Homo sapiens
ggacactgaaaatcaatatgccttcattggtaa

SEQ ID NO: 4084 - DNA, 33 bp, Homo sapiens
ccacagtcttgctttcgatgaacttataatgtt

SEQ ID NO: 4085 - DNA, 33 bp, Homo sapiens
atttgtcaaggctgcagtaaaaacattttggtc

SEQ ID NO: 4086 - DNA, 33 bp, Homo sapiens
ctgaattcgaaatatagggtacttggttcgggt

SEQ ID NO: 4087 - DNA, 33 bp, Homo sapiens
caagcatcaaagcacatctccagtctccagttc

SEQ ID NO: 4088 - DNA, 33 bp, Homo sapiens
ctgttgaatctgatagtataaaatggagcttgt

SEQ ID NO: 4089 - DNA, 33 bp, Homo sapiens
tcttatatggttacattaaacattgggagtctg

SEQ ID NO: 4090 - DNA, 33 bp, Homo sapiens
agatagctgagatagagtaacaatggacaacag

SEQ ID NO: 4091 - DNA, 33 bp, Homo sapiens
tcagctctaggcccaatgaaactcgattctaat

SEQ ID NO: 4092 - DNA, 33 bp, Homo sapiens
actcatctttgaggaatgttacaaaagataatg

SEQ ID NO: 4093 - DNA, 33 bp, Homo sapiens
agtacactgaatcagatactaaaaatgacactg

SEQ ID NO: 4094 - DNA, 51 bp, Homo sapiens
ttattgtccccaaagcttgtctgagtaaatcgacatcaggaaattatgttg

SEQ ID NO: 4095 - DNA, 33 bp, Homo sapiens
agtatatttgaatagagagtttcagtacagcgt

SEQ ID NO: 4096 - DNA, 33 bp, Homo sapiens
attaatagcaagattataagtattaggttctat

SEQ ID NO: 4097 - DNA, 33 bp, Homo sapiens
tcattttgtacatataggcaggagaagaattgc

SEQ ID NO: 4098 - DNA, 33 bp, Homo sapiens
gccagaggagatccaatttctcagaagggtgag

SEQ ID NO: 4099 - DNA, 33 bp, Homo sapiens
ttcagtggctcacctcgaaacttctaaatgaga

SEQ ID NO: 4100 - DNA, 33 bp, Homo sapiens
catgtctaactccaaagccattaatgtattaga

SEQ ID NO: 4101 - DNA, 51 bp, Homo sapiens
gatgaaaatctgccttctgtctttatagagttcttgagtcagaaaaattaa

SEQ ID NO: 4102 - DNA, 33 bp, Homo sapiens
cataacacttgtgagattcacctattttgttat

SEQ ID NO: 4103 - DNA, 33 bp, Homo sapiens
tggaagaatgatgatgtcacttgctgagatggg

SEQ ID NO: 4104 - DNA, 33 bp, Homo sapiens
gcactgtgtaaatgtctgaagggccagaaagat

SEQ ID NO: 4105 - DNA, 33 bp, Homo sapiens
actcaacccaagcaaatttgtcctagtgtgccc

SEQ ID NO: 4106 - DNA, 33 bp, Homo sapiens
tgctatgcctaggagatgtaaagcctaaaggaa

SEQ ID NO: 4107 - DNA, 33 bp, Homo sapiens
catgtgcagcacaacagatcaagccaggcagat

SEQ ID NO: 4108 - DNA, 33 bp, Homo sapiens
ttcaattattgtctcatgtgtacctgtaggacc

SEQ ID NO: 4109 - DNA, 33 bp, Homo sapiens
ttcttcagagaaggaggcatccatgagccatta

SEQ ID NO: 4110 - DNA, 51 bp, Homo sapiens
atggtttcccaaaaacatgactgaccatgggagcctcagaagtctctacgt

SEQ ID NO: 4111 - DNA, 33 bp, Homo sapiens
gactatcgaggtggagtctaaatgtaatctaaa

SEQ ID NO: 4112 - DNA, 33 bp, Homo sapiens
caggcaggaagtgctaggggagaacacaccctg

SEQ ID NO: 4113 - DNA, 33 bp, Homo sapiens
atgtagttggcagtcagcccatagaagtgatgt

SEQ ID NO: 4114 - DNA, 33 bp, Homo sapiens
cgatcgggtacttatggaaattctcaggatatc

SEQ ID NO: 4115 - DNA, 33 bp, Homo sapiens
ttgcatttcactgaagtaagttgccagaactct

SEQ ID NO: 4116 - DNA, 33 bp, Homo sapiens
gccttgactaaactcctggaaatgagacacagc

SEQ ID NO: 4117 - DNA, 51 bp, Homo sapiens
ctcacagggcaaataagatgtactagtagagagccaggcaagataaaaata

SEQ ID NO: 4118 - DNA, 33 bp, Homo sapiens
agagatgatcaaatcatggaagtaagtgagaaa

SEQ ID NO: 4119 - DNA, 33 bp, Homo sapiens
aaccctgcaaaaggtcgcagctatttttccaca

SEQ ID NO: 4120 - DNA, 33 bp, Homo sapiens
tttcgattctgggtaccactaacttaggcaaca

SEQ ID NO: 4121 - DNA, 33 bp, Homo sapiens
gtgggtgagggaacactaataaacagcattata

SEQ ID NO: 4122 - DNA, 33 bp, Homo sapiens
gactatgaatactagataggaaacaggagtttc

SEQ ID NO: 4123 - DNA, 33 bp, Homo sapiens
agccagtgtccccttcgccaggttagacgaggt

SEQ ID NO: 4124 - DNA, 33 bp, Homo sapiens
cactggggctaaaagagctggagaagcagagga

SEQ ID NO: 4125 - DNA, 33 bp, Homo sapiens
ctgtaaaaagccaatagagccggatgcagtggc

SEQ ID NO: 4126 - DNA, 33 bp, Homo sapiens
ccttttgatgattcaccctcttacactatatag

SEQ ID NO: 4127 - DNA, 33 bp, Homo sapiens
tcaagttcaagaaggacagctcgacattgaaca

SEQ ID NO: 4128 - DNA, 33 bp, Homo sapiens
aaaagtacaaactgtatgacaccattgctatga

SEQ ID NO: 4129 - DNA, 33 bp, Homo sapiens
agatactgtagcaacctccctgagatttaactg

SEQ ID NO: 4130 - DNA, 33 bp, Homo sapiens
gaaaaggaagcttccatgagtaggcacttgacc

SEQ ID NO: 4131 - DNA, 33 bp, Homo sapiens
caactctacccaatcatatcaggtctcctagat

SEQ ID NO: 4132 - DNA, 51 bp, Homo sapiens
gtatttcttaacagagcataaaaaattggtgttctccatgtgccatatttt

SEQ ID NO: 4133 - DNA, 33 bp, Homo sapiens
ctttttttctcttacatatttagtgtctggtat

SEQ ID NO: 4134 - DNA, 33 bp, Homo sapiens
gatataagtaggctcacaggtgtaggccatgac

SEQ ID NO: 4135 - DNA, 33 bp, Homo sapiens
aaagggatagggttaagtcgtatgtttcaacat

SEQ ID NO: 4136 - DNA, 33 bp, Homo sapiens
ctatagcttaaaaacatgaggatagggttatac

SEQ ID NO: 4137 - DNA, 33 bp, Homo sapiens
agtattactagagctacagagagagaccgtaat

SEQ ID NO: 4138 - DNA, 33 bp, Homo sapiens
gatcatttgtgtcttatattaactttgtcagaa

SEQ ID NO: 4139 - DNA, 33 bp, Homo sapiens
caacactgctaagagcgaggagctggaaaaagg

SEQ ID NO: 4140 - DNA, 33 bp, Homo sapiens
taagtcaccaaagaactctaacctcatctgaaa

SEQ ID NO: 4141 - DNA, 33 bp, Homo sapiens
ggcagagtatataccattgagatacaatagatg

SEQ ID NO: 4142 - DNA, 33 bp, Homo sapiens
tcaagacacatagagatgaaaaatatgcaactg

SEQ ID NO: 4143 - DNA, 33 bp, Homo sapiens
tgtttcaattttggtatgcctagtgatttggga

SEQ ID NO: 4144 - DNA, 33 bp, Homo sapiens
ttcactagttggttcattagttatagtatgatt

SEQ ID NO: 4145 - DNA, 33 bp, Homo sapiens
ctactgcacgttggtatcatactctcccaaaga

SEQ ID NO: 4146 - DNA, 33 bp, Homo sapiens
tgggactgaggcaagtgaccaagaatgcactat

SEQ ID NO: 4147 - DNA, 33 bp, Homo sapiens
gagggtgatgcaacaagcatgaaggtgagggtg

SEQ ID NO: 4148 - DNA, 33 bp, Homo sapiens
ctctatatttattgaatgggcaggaaaacaatt

SEQ ID NO: 4149 - DNA, 33 bp, Homo sapiens
tacatgggatggtaagtccagcaggtgcactat

SEQ ID NO: 4150 - DNA, 33 bp, Homo sapiens
attggtgtgctctccagagaatttgtagctatt

SEQ ID NO: 4151 - DNA, 51 bp, Homo sapiens
aaagaactgtatttttcaatccaaagtgttcgaaatattgaaacatataat

SEQ ID NO: 4152 - DNA, 51 bp, Homo sapiens
aatacactagctttttcaaagtctatgcaaatgtgaatcagaaaagaaaca

SEQ ID NO: 4153 - DNA, 33 bp, Homo sapiens
ctcacgttggtatccacgtttgaaggaacacta

SEQ ID NO: 4154 - DNA, 33 bp, Homo sapiens
attggagaaggtgtgatctgagagagctgaaaa

SEQ ID NO: 4155 - DNA, 33 bp, Homo sapiens
tatattagtcctagcctatgctgagaaagtttg

SEQ ID NO: 4156 - DNA, 33 bp, Homo sapiens
tcatgggaatgtacaggaaaaacctaatatgtg

SEQ ID NO: 4157 - DNA, 33 bp, Homo sapiens
actttggattccctaagtacctcaagaatgata

SEQ ID NO: 4158 - DNA, 33 bp, Homo sapiens
tgagaatgctttactgcagaatttcccaaagta

SEQ ID NO: 4159 - DNA, 33 bp, Homo sapiens
ataaccttcttttctatcacctttcagtaatac

SEQ ID NO: 4160 - DNA, 33 bp, Homo sapiens
aggagactgaaaaccatgagtgtccaaagcctc

SEQ ID NO: 4161 - DNA, 33 bp, Homo sapiens
ttgaggatgggactaagggctaaacttcatatt

SEQ ID NO: 4162 - DNA, 33 bp, Homo sapiens
agtagcatgaaattaggcatgttcatattaagg

SEQ ID NO: 4163 - DNA, 33 bp, Homo sapiens
ttcattctatccttcagtcaccttctatgttca

SEQ ID NO: 4164 - DNA, 33 bp, Homo sapiens
aacagaatcctgaagagctatttgtactccatg

SEQ ID NO: 4165 - DNA, 33 bp, Homo sapiens
cagcagagagacaagtgaaaaagcaactgtagt

SEQ ID NO: 4166 - DNA, 33 bp, Homo sapiens
tctggctacactgaaaggcatcaaataacaagg

SEQ ID NO: 4167 - DNA, 33 bp, Homo sapiens
tatgaatgacaggttgtatttttgttttgaaaa

SEQ ID NO: 4168 - DNA, 33 bp, Homo sapiens
gcttctgacacacacacagcatgaaaaaaaatt

SEQ ID NO: 4169 - DNA, 33 bp, Homo sapiens
cctaccttttttcgtaccctatagttctctacc

SEQ ID NO: 4170 - DNA, 33 bp, Homo sapiens
agtgcaccgttgctcatagcacaatccctcagg

SEQ ID NO: 4171 - DNA, 51 bp, Homo sapiens
tcacaagactctaaaaagataggaattaagaaaactacaggacaatgaaga

SEQ ID NO: 4172 - DNA, 33 bp, Homo sapiens
agacaaaaaaataaacgggcatataacgagtgt

SEQ ID NO: 4173 - DNA, 33 bp, Homo sapiens
gtgtcagtgcaggttcgacaatggtaactaatg

SEQ ID NO: 4174 - DNA, 51 bp, Homo sapiens
aaaaagaaatagagcatcttctttatggtgaatttctatgttaagaaaagg

SEQ ID NO: 4175 - DNA, 33 bp, Homo sapiens
aaagattcagctccaccaatgcactgtggatta

SEQ ID NO: 4176 - DNA, 33 bp, Homo sapiens
gagattccaaaactcattctctaaccactttat

SEQ ID NO: 4177 - DNA, 33 bp, Homo sapiens
tctaaaagttggagcagaactcctaaattaaac

SEQ ID NO: 4178 - DNA, 51 bp, Homo sapiens
atcagactcaccaaagcttgatctatgctatcagacttttcaaggaaccac

SEQ ID NO: 4179 - DNA, 51 bp, Homo sapiens
accatcacaacgtctatcataataccatgaatgaaccgcgtactatttaaa

SEQ ID NO: 4180 - DNA, 33 bp, Homo sapiens
gattcagcactgctacgactggtgagtttttcc

SEQ ID NO: 4181 - DNA, 33 bp, Homo sapiens
cccacgcagcataggccaaaacagtcattcagt

SEQ ID NO: 4182 - DNA, 33 bp, Homo sapiens
gttgggttgtcattaacgcgtacaattttaatt

SEQ ID NO: 4183 - DNA, 33 bp, Homo sapiens
caggaatgaaaactaagaaaagaagcatacaaa

SEQ ID NO: 4184 - DNA, 33 bp, Homo sapiens
tgaagagttgcataaattgacttaaacacacat

SEQ ID NO: 4185 - DNA, 33 bp, Homo sapiens
ctcctggccaaaaggagtattaacagacatttt

SEQ ID NO: 4186 - DNA, 33 bp, Homo sapiens
cctcccagggaaaatatgtaggaagcccactgc

SEQ ID NO: 4187 - DNA, 33 bp, Homo sapiens
ctctgtaagagtgaaattaagagtggttctcac

SEQ ID NO: 4188 - DNA, 33 bp, Homo sapiens
ttcctccattaggcacgaggttgatttgtctag

SEQ ID NO: 4189 - DNA, 33 bp, Homo sapiens
attttccaaaccagaagcgtcttgggaatcaca

SEQ ID NO: 4190 - DNA, 33 bp, Homo sapiens
tctgagtgaacaccactaagctaccctcagctc

SEQ ID NO: 4191 - DNA, 33 bp, Homo sapiens
gggcttctatcagggacaaacccagggacaata

SEQ ID NO: 4192 - DNA, 51 bp, Homo sapiens
atctttcaaattctttcttctcatccaatggactgggttttgtctggcctt

SEQ ID NO: 4193 - DNA, 33 bp, Homo sapiens
gctgggtagaaggaaggccaatcacctatgaca

SEQ ID NO: 4194 - DNA, 33 bp, Homo sapiens
tcagggtcacaaaccagtaaatggcagcatggg

SEQ ID NO: 4195 - DNA, 33 bp, Homo sapiens
ttagaaaacattagacgaagcctgctggattca

SEQ ID NO: 4196 - DNA, 33 bp, Homo sapiens
atcacctacccagaaagctatctaaataccatc

SEQ ID NO: 4197 - DNA, 33 bp, Homo sapiens
ccttaaaaagtggccagatgacatgaacagaca

SEQ ID NO: 4198 - DNA, 33 bp, Homo sapiens
tgaggccccaccaccaggtcagtttccagtggc

SEQ ID NO: 4199 - DNA, 33 bp, Homo sapiens
tctggatcagaagacagaaccaaattagaaatt

SEQ ID NO: 4200 - DNA, 33 bp, Homo sapiens
cgcttctttgggtcaataatcaaacaatactgc

SEQ ID NO: 4201 - DNA, 33 bp, Homo sapiens
ctgagtctccttcaaaggcttgtctcctaccac

SEQ ID NO: 4202 - DNA, 33 bp, Homo sapiens
aatcttattggagttatcttatgcacatgagtt

SEQ ID NO: 4203 - DNA, 33 bp, Homo sapiens
cttacaccgagcaatataaacagtaggttacac

SEQ ID NO: 4204 - DNA, 51 bp, Homo sapiens
tgtacatctgaacgagttttcacatgtgcatatacccctgtaaccaccacc

SEQ ID NO: 4205 - DNA, 33 bp, Homo sapiens
tgtgaacctaccatccgacttcaaaacagtacc

SEQ ID NO: 4206 - DNA, 33 bp, Homo sapiens
tgacctaccatttttgtaaatcttctcaaattc

SEQ ID NO: 4207 - DNA, 51 bp, Homo sapiens
aaaagatagatgccaattatagaaccaaatttaagaaaactgttctaaatg

SEQ ID NO: 4208 - DNA, 33 bp, Homo sapiens
tgtactcctggtaaaatccctctgatctaattc

SEQ ID NO: 4209 - DNA, 33 bp, Homo sapiens
tccgtttccagcagcatggttctatccagcctg

SEQ ID NO: 4210 - DNA, 33 bp, Homo sapiens
tagggagaggaagtgatgtgtttaaaagcatga

SEQ ID NO: 4211 - DNA, 33 bp, Homo sapiens
aggtcttactctgtggtaatttagaaaatcaga

SEQ ID NO: 4212 - DNA, 51 bp, Homo sapiens
gcactgaaaattgaaacatgaattagctgatgataatattgcaatcatttg

SEQ ID NO: 4213 - DNA, 33 bp, Homo sapiens
cagacagtgtgccccaggattaggcaacaggga

SEQ ID NO: 4214 - DNA, 33 bp, Homo sapiens
cagaatgttccctagcgcttcttcccagtcagt

SEQ ID NO: 4215 - DNA, 33 bp, Homo sapiens
tagagatctggacagatgtaaccttcatgttca

SEQ ID NO: 4216 - DNA, 33 bp, Homo sapiens
taccttgagaaatgcccatcggcctgtatattc

SEQ ID NO: 4217 - DNA, 33 bp, Homo sapiens
gtaccacatcctactatgatgacgtgggcctgc

SEQ ID NO: 4218 - DNA, 33 bp, Homo sapiens
gatatgggcttgaatatgaaaatacctaatgat

SEQ ID NO: 4219 - DNA, 33 bp, Homo sapiens
ccttatttttgaatggtactgaatccctatata

SEQ ID NO: 4220 - DNA, 33 bp, Homo sapiens
taggctgaagattatacatgtcagctcgcaatg

SEQ ID NO: 4221 - DNA, 33 bp, Homo sapiens
tccacttggttataggtagccttgataacatct

SEQ ID NO: 4222 - DNA, 51 bp, Homo sapiens
gtgctgggtggggaaatcatgagactctttttctgggacaggagtgtcaca

SEQ ID NO: 4223 - DNA, 33 bp, Homo sapiens
cagacacttataaatactataggcactgttaga

SEQ ID NO: 4224 - DNA, 33 bp, Homo sapiens
agagcagagagtggaagtgttccaggtataaag

SEQ ID NO: 4225 - DNA, 33 bp, Homo sapiens
gagggagaggtttttctcagcataaccctcagc

SEQ ID NO: 4226 - DNA, 33 bp, Homo sapiens
ggtcctgtattcatgcgaaagtcacaggggagc

SEQ ID NO: 4227 - DNA, 33 bp, Homo sapiens
gatggacaacatatcaggccataattcaaagta

SEQ ID NO: 4228 - DNA, 33 bp, Homo sapiens
tggagctaaaattcaccatgtgagcctccgcat

SEQ ID NO: 4229 - DNA, 33 bp, Homo sapiens
caggcatacacgtcccgctctctcaagaatgcc

SEQ ID NO: 4230 - DNA, 33 bp, Homo sapiens
ggggcttgacctgtgaggagaagttgaggctca

SEQ ID NO: 4231 - DNA, 33 bp, Homo sapiens
ctgggcccaggaaagcggaagacacctttacct

SEQ ID NO: 4232 - DNA, 33 bp, Homo sapiens
acaacaaggacaggccgatgtgcagaagggcag

SEQ ID NO: 4233 - DNA, 33 bp, Homo sapiens
tgctagggacttggaatcataggaccctgtggg

SEQ ID NO: 4234 - DNA, 33 bp, Homo sapiens
cggaatggaaacgagcggaagaataagggaatg

SEQ ID NO: 4235 - DNA, 33 bp, Homo sapiens
ttggtcagagcacttagcattaggtctgcttcc

SEQ ID NO: 4236 - DNA, 33 bp, Homo sapiens
acagactcacagtttcgagccctgagcttatct

SEQ ID NO: 4237 - DNA, 51 bp, Homo sapiens
ggtctctcctgctttgattttagtacaagtggactctgccattctctgcct

SEQ ID NO: 4238 - DNA, 33 bp, Homo sapiens
ggatgtgagtccttgcgcagtggtgaaatgtag

SEQ ID NO: 4239 - DNA, 33 bp, Homo sapiens
cttaagccaatcatgaggctcaccaggcaaggt

SEQ ID NO: 4240 - DNA, 33 bp, Homo sapiens
ctctcccatcaacgaggcagtaataaattaaga

SEQ ID NO: 4241 - DNA, 33 bp, Homo sapiens
tgtcctaagtcatttatactcaagtctctcatc

SEQ ID NO: 4242 - DNA, 51 bp, Homo sapiens
ccacacctagacagacagagaaagataaaatgtgacagtctaagaacttaa

SEQ ID NO: 4243 - DNA, 33 bp, Homo sapiens
ttttatagtaccatcagtagtaggcggaaatga

SEQ ID NO: 4244 - DNA, 33 bp, Homo sapiens
ggaaacatggtgcgccggacgttactgcaggca

SEQ ID NO: 4245 - DNA, 33 bp, Homo sapiens
aagaccaccatccagctcaccaatcacaacttg

SEQ ID NO: 4246 - DNA, 33 bp, Homo sapiens
aaaaggacatacatgaggaattgccaaaacgga

SEQ ID NO: 4247 - DNA, 33 bp, Homo sapiens
cacaaaactccgtcaatcttattatttgctact

SEQ ID NO: 4248 - DNA, 33 bp, Homo sapiens
acagcaaattggaaaaggctgaaatgcttctct

SEQ ID NO: 4249 - DNA, 33 bp, Homo sapiens
gacaaaagcaaagcaaggctagtgaattcaata

SEQ ID NO: 4250 - DNA, 33 bp, Homo sapiens
aaaatgaagcaagatagaggcagctgaatactg

SEQ ID NO: 4251 - DNA, 33 bp, Homo sapiens
atttcaggcctgtcacgaatcctgatttaccat

SEQ ID NO: 4252 - DNA, 33 bp, Homo sapiens
aaaaccagactctaaggcccttcgacagcccag

SEQ ID NO: 4253 - DNA, 33 bp, Homo sapiens
tggtttcgattaatacgacactggtggcttcag

SEQ ID NO: 4254 - DNA, 33 bp, Homo sapiens
gctcccctccacataatcttcatatgccaagcc

SEQ ID NO: 4255 - DNA, 33 bp, Homo sapiens
tgggataatgataccccagtactctcttgcttt

SEQ ID NO: 4256 - DNA, 33 bp, Homo sapiens
gccatttgaaaattacgagagaagaaagaaaga

SEQ ID NO: 4257 - DNA, 33 bp, Homo sapiens
tactggtcaacaaatatctccacagtgactagt

SEQ ID NO: 4258 - DNA, 33 bp, Homo sapiens
aacagataaagcagtacggacttggcctggact

SEQ ID NO: 4259 - DNA, 33 bp, Homo sapiens
agtatcttctctgctatgtattgccaaatccaa

SEQ ID NO: 4260 - DNA, 33 bp, Homo sapiens
tgtttataataggtaagtgttgattgagcagag

SEQ ID NO: 4261 - DNA, 33 bp, Homo sapiens
ggtttgtgtgtacttatctaatttttaaagaag

SEQ ID NO: 4262 - DNA, 51 bp, Homo sapiens
gctagacatgaaattcttcataaacgtgacctggacggtgtgaggaggagc

SEQ ID NO: 4263 - DNA, 33 bp, Homo sapiens
cccttcacctctaccagagatggagtgcccact

SEQ ID NO: 4264 - DNA, 33 bp, Homo sapiens
cacaccctgcaactactgaatgctttcctgaac

SEQ ID NO: 4265 - DNA, 33 bp, Homo sapiens
tcatgctaagttgtaattggttggtttcctgaa

SEQ ID NO: 4266 - DNA, 33 bp, Homo sapiens
ctggttttacctgatgtaggctgtcggggtgct

SEQ ID NO: 4267 - DNA, 33 bp, Homo sapiens
aaatgttctccttgtcgccagctttcaggaagt

SEQ ID NO: 4268 - DNA, 33 bp, Homo sapiens
gatttgttcactcacctatttaaacatgtttct

SEQ ID NO: 4269 - DNA, 33 bp, Homo sapiens
aatatccttctttatggacgtagtgactacttt

SEQ ID NO: 4270 - DNA, 33 bp, Homo sapiens
agaagattccatgtccggataataggactcagg

SEQ ID NO: 4271 - DNA, 33 bp, Homo sapiens
gtatcaactctataaattcgggagcaaagtcct

SEQ ID NO: 4272 - DNA, 33 bp, Homo sapiens
ggggtccaggagagctcagagaatgggtttcaa

SEQ ID NO: 4273 - DNA, 33 bp, Homo sapiens
atttagaggaattccagtactcacatcaatggg

SEQ ID NO: 4274 - DNA, 33 bp, Homo sapiens
atccgttcagggaggctgattcacaggagtcca

SEQ ID NO: 4275 - DNA, 33 bp, Homo sapiens
gaaggcttttgctttcgctgtgaacgaggaggg

SEQ ID NO: 4276 - DNA, 51 bp, Homo sapiens
tctatgagaaagaaatattaagtaatactgcatgtctgacattgacatgag

SEQ ID NO: 4277 - DNA, 51 bp, Homo sapiens
aaacttggtttaaaaacctgaagctgagcaacctctccaaataaacatgaa

SEQ ID NO: 4278 - DNA, 33 bp, Homo sapiens
tcagcatacagtgttccatataagcaagttcaa

SEQ ID NO: 4279 - DNA, 51 bp, Homo sapiens
caagcagattccctaagatgataaatagagcactttatgagaggtatgaac

SEQ ID NO: 4280 - DNA, 33 bp, Homo sapiens
ctatttcagaaagatcgatgaaccgagaaagag

SEQ ID NO: 4281 - DNA, 33 bp, Homo sapiens
gccttatagctggtcatgttccatggcaggtgt

SEQ ID NO: 4282 - DNA, 33 bp, Homo sapiens
ccagggagatgatacatgaaataagattatatt

SEQ ID NO: 4283 - DNA, 33 bp, Homo sapiens
tatatcattcatatccgagagtgtgtcctgaaa

SEQ ID NO: 4284 - DNA, 33 bp, Homo sapiens
cagggtttcatgattagcaagtggcagagcctg

SEQ ID NO: 4285 - DNA, 33 bp, Homo sapiens
atcatgaatgtcatcagtaactactaactgcca

SEQ ID NO: 4286 - DNA, 33 bp, Homo sapiens
accgcacccagcaaaagtaacgatggttagatg

SEQ ID NO: 4287 - DNA, 33 bp, Homo sapiens
agggatctgaaacaaattgattggaagagagga

SEQ ID NO: 4288 - DNA, 33 bp, Homo sapiens
agaaagtcttgctaaagtgggaaggaaccttgc

SEQ ID NO: 4289 - DNA, 33 bp, Homo sapiens
tggtcaccatcacttaggataacgtacatataa

SEQ ID NO: 4290 - DNA, 33 bp, Homo sapiens
gctcccttgtcaaaggcaaaaaggtgcatttat

SEQ ID NO: 4291 - DNA, 33 bp, Homo sapiens
tatatttcaaagataattggaggaaggattcaa

SEQ ID NO: 4292 - DNA, 51 bp, Homo sapiens
gttgtagcactcatcagcaactgaagtgatatgacttcggtgtttattgtc

SEQ ID NO: 4293 - DNA, 33 bp, Homo sapiens
tcggtgtttattgtccgtctcctctgccattcc

SEQ ID NO: 4294 - DNA, 33 bp, Homo sapiens
aaggactcaagggcagtcagtatatttgggagg

SEQ ID NO: 4295 - DNA, 33 bp, Homo sapiens
ggactacttgctcacagtgcttctgtttctggg

SEQ ID NO: 4296 - DNA, 33 bp, Homo sapiens
ctctaactctaaataagtgacataactgaacat

SEQ ID NO: 4297 - DNA, 33 bp, Homo sapiens
atcaagaactacgtggtgacaaaagtgctataa

SEQ ID NO: 4298 - DNA, 33 bp, Homo sapiens
taatctgccttctctatgttctgcacattaaag

SEQ ID NO: 4299 - DNA, 33 bp, Homo sapiens
atgcaatgggcaatgagtatctacgtacctgtt

SEQ ID NO: 4300 - DNA, 33 bp, Homo sapiens
agtcatgcaagcaagatggtcaacgtcagatac

SEQ ID NO: 4301 - DNA, 33 bp, Homo sapiens
acacatcaatgaaatagtaaactcctggatgag

SEQ ID NO: 4302 - DNA, 33 bp, Homo sapiens
aggaacactggcctcagtaagtctcttgcgagg

SEQ ID NO: 4303 - DNA, 33 bp, Homo sapiens
gatcctagaatattcatagccttcagtaacctt

SEQ ID NO: 4304 - DNA, 33 bp, Homo sapiens
tcagcttctggttgaatgagggcatgataagtt

SEQ ID NO: 4305 - DNA, 33 bp, Homo sapiens
gaggtgggtgtgctaacatggagatacaagcca

SEQ ID NO: 4306 - DNA, 33 bp, Homo sapiens
gactgccacaacgaacgcatttgtaggctttcc

SEQ ID NO: 4307 - DNA, 33 bp, Homo sapiens
caacaatgacacaatagatgtcttagcctctag

SEQ ID NO: 4308 - DNA, 33 bp, Homo sapiens
taatttgaggaactaatggtactagcatttaac

SEQ ID NO: 4309 - DNA, 33 bp, Homo sapiens
ttgctcttgtttgatagagccaagaggaggaaa

SEQ ID NO: 4310 - DNA, 33 bp, Homo sapiens
aaaacaagagcctctacgtactgaagtgatagg

SEQ ID NO: 4311 - DNA, 33 bp, Homo sapiens
aagagaaagaatatgaggttcagcatatctcct

SEQ ID NO: 4312 - DNA, 33 bp, Homo sapiens
ttgcttgaagcactaatattcttataaatgttt

SEQ ID NO: 4313 - DNA, 33 bp, Homo sapiens
ttccttgacatgtgcagaccgcaaaggaagtga

SEQ ID NO: 4314 - DNA, 51 bp, Homo sapiens
gtcaccaacagaatcattattagaagtagactgtctgaattatgaacatgg

SEQ ID NO: 4315 - DNA, 33 bp, Homo sapiens
gtctgcactgagcctccagcaatttgtcaaaat

SEQ ID NO: 4316 - DNA, 33 bp, Homo sapiens
acactatgccaggaatgagcatctacagtgtat

SEQ ID NO: 4317 - DNA, 33 bp, Homo sapiens
tcttggctcttatgcagcctctagtaaaataac

SEQ ID NO: 4318 - DNA, 33 bp, Homo sapiens
ttcagagaatagatcatgagacttctcggcctc

SEQ ID NO: 4319 - DNA, 33 bp, Homo sapiens
taatggaatactttcatggcaatatatagcttt

SEQ ID NO: 4320 - DNA, 33 bp, Homo sapiens
cttcctcatttttgcagtgaaaccagggtgcaa

SEQ ID NO: 4321 - DNA, 51 bp, Homo sapiens
tacagcctgtgctaagtttcaaagaggaggcagataactttgaagatttta

SEQ ID NO: 4322 - DNA, 33 bp, Homo sapiens
atcagtaagttgtaaatgttagaccactatttt

SEQ ID NO: 4323 - DNA, 33 bp, Homo sapiens
gagtgaacaataattacctcgacattttaaaac

SEQ ID NO: 4324 - DNA, 33 bp, Homo sapiens
ttttcatggtaaaagccagagagaacactgtag

SEQ ID NO: 4325 - DNA, 33 bp, Homo sapiens
ctgcccttcctcatacggcattctacatagcac

SEQ ID NO: 4326 - DNA, 33 bp, Homo sapiens
aatgtggttatcaccatgtaatgaagacctgcc

SEQ ID NO: 4327 - DNA, 51 bp, Homo sapiens
tttgggagaattaaaagtgtgtgtatgtattaaaagcagcataatgatatt

SEQ ID NO: 4328 - DNA, 33 bp, Homo sapiens
aaggaaccagcatctagaataagaggtagaaca

SEQ ID NO: 4329 - DNA, 51 bp, Homo sapiens
ggaggcccagaggaaattaagtgtcggaagagatttcctagaggggatgat

SEQ ID NO: 4330 - DNA, 33 bp, Homo sapiens
gaaataatactgaaaaggtttacgccctttgat

SEQ ID NO: 4331 - DNA, 33 bp, Homo sapiens
aagtgcatggaagaactgcatttttggtttgtt

SEQ ID NO: 4332 - DNA, 33 bp, Homo sapiens
aaaatttcattcagtagcaatgcctaaactgga

SEQ ID NO: 4333 - DNA, 33 bp, Homo sapiens
tcgagtgaaccctacatacgtctaaaacctgtc

SEQ ID NO: 4334 - DNA, 33 bp, Homo sapiens
cattgaatacctgccagataagacatgtaacca

SEQ ID NO: 4335 - DNA, 33 bp, Homo sapiens
ctactagactcagaaatttgacggggccctttg

SEQ ID NO: 4336 - DNA, 33 bp, Homo sapiens
tcagcccctccaaaccgagcgcggagcgcgctg

SEQ ID NO: 4337 - DNA, 33 bp, Homo sapiens
ccttacagggaaaagataacgatggctccaatg

SEQ ID NO: 4338 - DNA, 33 bp, Homo sapiens
ctatactatattagaatgtgtgtcaaatgcaag

SEQ ID NO: 4339 - DNA, 33 bp, Homo sapiens
ctgatgctcggttccatagagaacataaactct

SEQ ID NO: 4340 - DNA, 33 bp, Homo sapiens
ctgataagtttatcaatcttgtgctgctgatga

SEQ ID NO: 4341 - DNA, 51 bp, Homo sapiens
tcaggaacttgctgagatattaacctgaaaatcatttgggtttcacttcat

SEQ ID NO: 4342 - DNA, 51 bp, Homo sapiens
ctaggaataccacctggctatgctatagaagacaagaagcttagattttgc

SEQ ID NO: 4343 - DNA, 51 bp, Homo sapiens
ttcctagttgagtaactattgctcatttattctcattcatgtgtagacatg

SEQ ID NO: 4344 - DNA, 51 bp, Homo sapiens
caggtaaagtatggacctgtgactatagaacatttttcgtgaggggaagga

SEQ ID NO: 4345 - DNA, 33 bp, Homo sapiens
agaattggaactggcagcttaagccttggtctt

SEQ ID NO: 4346 - DNA, 33 bp, Homo sapiens
tattgcaaaatatatagcagagtttagacttta

SEQ ID NO: 4347 - DNA, 51 bp, Homo sapiens
gggccatcagaattggaaggccaaagtaattcctctatgcactgtatttaa

SEQ ID NO: 4348 - DNA, 51 bp, Homo sapiens
ctttcacaaacattgtctcattttgtacttcctcatagtcttgtgaagtag

SEQ ID NO: 4349 - DNA, 33 bp, Homo sapiens
caaaccggttcctttctcatcttcgaaaataac

SEQ ID NO: 4350 - DNA, 33 bp, Homo sapiens
ttgggaagcactggacgggggtaggaatgtgac

SEQ ID NO: 4351 - DNA, 33 bp, Homo sapiens
aatattctgcaggccattccttcaaagggtacc

SEQ ID NO: 4352 - DNA, 51 bp, Homo sapiens
aaaatgccaaggatctggtactcaattgaagaaagggtcatctggaaagct

SEQ ID NO: 4353 - DNA, 33 bp, Homo sapiens
gccatgtgaactcttagcatcttatcctattgt

SEQ ID NO: 4354 - DNA, 33 bp, Homo sapiens
tagcctttttcaaagatgaccagcaaggctctc

SEQ ID NO: 4355 - DNA, 51 bp, Homo sapiens
tggggaaagggaagtgaggaagaaataggtggaaaagcaaatacaaagtga

SEQ ID NO: 4356 - DNA, 33 bp, Homo sapiens
gtctatcaacaacacagtcacttgtcaaatctt

SEQ ID NO: 4357 - DNA, 33 bp, Homo sapiens
gagtgagcttaaaaaacttattattgctcatgg

SEQ ID NO: 4358 - DNA, 33 bp, Homo sapiens
tgtgaaattgtgataattgtggtgtgatttttt

SEQ ID NO: 4359 - DNA, 33 bp, Homo sapiens
caatgtaagaaaaaaatgcttgtatacttggat

SEQ ID NO: 4360 - DNA, 33 bp, Homo sapiens
atgaatgcacatgactgaactcactacattctg

SEQ ID NO: 4361 - DNA, 33 bp, Homo sapiens
tagattctataattgatatctctcccagaggag

SEQ ID NO: 4362 - DNA, 33 bp, Homo sapiens
atgacttctaatctaattgtctgaggtcaaggt

SEQ ID NO: 4363 - DNA, 33 bp, Homo sapiens
ttttcaggtaccaccatgatattgcaattatag

SEQ ID NO: 4364 - DNA, 33 bp, Homo sapiens
ccagttgagatgtactgagaagggcacactatc

SEQ ID NO: 4365 - DNA, 33 bp, Homo sapiens
gacaacatgcgtaaaagtgctttaaaagtgaca

SEQ ID NO: 4366 - DNA, 33 bp, Homo sapiens
agacaagcctgctgaagacgcacttggatggca

SEQ ID NO: 4367 - DNA, 33 bp, Homo sapiens
gaacatacttgaactataagacagcaagtagta

SEQ ID NO: 4368 - DNA, 33 bp, Homo sapiens
cctcttcccaccgtcatgcgtcctgggtcctgg

SEQ ID NO: 4369 - DNA, 33 bp, Homo sapiens
ctgcaagggcttcttcttcaaatatgttatgat

SEQ ID NO: 4370 - DNA, 33 bp, Homo sapiens
ctctttcccgaaagcattcctcagtaatccaat

SEQ ID NO: 4371 - DNA, 33 bp, Homo sapiens
ttttgagaagcatggatgaaagcgtagaatgtg

SEQ ID NO: 4372 - DNA, 33 bp, Homo sapiens
agacaagatcaatgaacctccagtggattctaa

SEQ ID NO: 4373 - DNA, 33 bp, Homo sapiens
gagcagatggaaattctatctagagctcagggt

SEQ ID NO: 4374 - DNA, 33 bp, Homo sapiens
gaagcccggaagcttgcacgctggcacctacac

SEQ ID NO: 4375 - DNA, 33 bp, Homo sapiens
cagcacaccaaacccatattcgtctgcaccata

SEQ ID NO: 4376 - DNA, 33 bp, Homo sapiens
gctcaggagctattaggattttttttgtatcga

SEQ ID NO: 4377 - DNA, 33 bp, Homo sapiens
actacagtgatcaaaatagtctactggcataag

SEQ ID NO: 4378 - DNA, 33 bp, Homo sapiens
agaaaagtcaagttgagaaacctgctgggcctg

SEQ ID NO: 4379 - DNA, 33 bp, Homo sapiens
tgctttctgagtaggatacaatggagtggattg

SEQ ID NO: 4380 - DNA, 33 bp, Homo sapiens
gttctagaccctgggagtaaaaggtagacatgc

SEQ ID NO: 4381 - DNA, 33 bp, Homo sapiens
ggggaagaagcttttataggatgaacatggaag

SEQ ID NO: 4382 - DNA, 33 bp, Homo sapiens
agactgtgggttagactaagcataaagcattcc

SEQ ID NO: 4383 - DNA, 33 bp, Homo sapiens
ggaatacccacttcacgatattccttgaactgt

SEQ ID NO: 4384 - DNA, 33 bp, Homo sapiens
aatccatcattctgtatgttcagcctatctcct

SEQ ID NO: 4385 - DNA, 51 bp, Homo sapiens
attgcccagtagactagatttggaagcactagaaatttagtcctgtaagac

SEQ ID NO: 4386 - DNA, 51 bp, Homo sapiens
ctgacaccctattttgccttctttatagcttcatatttatacctaaaacct

SEQ ID NO: 4387 - DNA, 33 bp, Homo sapiens
atgccccaaagtggcagtcttcacagctcctct

SEQ ID NO: 4388 - DNA, 33 bp, Homo sapiens
acattggataactctctacattcaggctaggca

SEQ ID NO: 4389 - DNA, 51 bp, Homo sapiens
tatctatgactaataagcaattatatggagactttcccactgacaaccata

SEQ ID NO: 4390 - DNA, 33 bp, Homo sapiens
acagcccagactctgctatcaaagacaactgtg

SEQ ID NO: 4391 - DNA, 33 bp, Homo sapiens
tcccctcaaaggactatgaaaatctagtaccta

SEQ ID NO: 4392 - DNA, 33 bp, Homo sapiens
agacgccttgatgaggtacatttagagtgagat

SEQ ID NO: 4393 - DNA, 33 bp, Homo sapiens
aggctgtggtcactaatctgtaatgcatcttta

SEQ ID NO: 4394 - DNA, 33 bp, Homo sapiens
tttaaaaagaaaccaagtactaacagatgctac

SEQ ID NO: 4395 - DNA, 33 bp, Homo sapiens
tacagaagatctaggatagagtgtctctggaaa

SEQ ID NO: 4396 - DNA, 33 bp, Homo sapiens
atgtgaaaaagcagtatgataccatcccctgaa

SEQ ID NO: 4397 - DNA, 33 bp, Homo sapiens
gcaaagagatgccaaaggaagcatttgacaaag

SEQ ID NO: 4398 - DNA, 33 bp, Homo sapiens
gaataattttctttgctgagccactgagattca

SEQ ID NO: 4399 - DNA, 33 bp, Homo sapiens
ctctgcaaagtttagctacggatccctgttaaa

SEQ ID NO: 4400 - DNA, 33 bp, Homo sapiens
gctgtttgtttctaaagtatcaacacctggcac

SEQ ID NO: 4401 - DNA, 33 bp, Homo sapiens
aatatgatatatcacccattaaaattctccaat

SEQ ID NO: 4402 - DNA, 33 bp, Homo sapiens
atagcagatgaggtaatttaaagaacaaagtcc

SEQ ID NO: 4403 - DNA, 33 bp, Homo sapiens
aaagttaattcgtatggaaacagaagcatgctc

SEQ ID NO: 4404 - DNA, 33 bp, Homo sapiens
gattatgacggcaaatgataatgataaataata

SEQ ID NO: 4405 - DNA, 33 bp, Homo sapiens
ccgtattaagaaatcagtattgcatggactttt

SEQ ID NO: 4406 - DNA, 33 bp, Homo sapiens
ggagagaaggaggaaatcaaagaaagtggcata

SEQ ID NO: 4407 - DNA, 33 bp, Homo sapiens
ttctgaaaatggaccatctcccgtctctgagcc

SEQ ID NO: 4408 - DNA, 51 bp, Homo sapiens
gattaaagcctcttgtatgtgatgagctattctttttatataatgttgaat

SEQ ID NO: 4409 - DNA, 51 bp, Homo sapiens
tcagaggaatagaatagaatccagagatagatccatacatggtcaactgat

SEQ ID NO: 4410 - DNA, 33 bp, Homo sapiens
ggtaatttggagaatatatgagagcattgcacc

SEQ ID NO: 4411 - DNA, 33 bp, Homo sapiens
catctcagtaaacgactgctctaccttttctga

SEQ ID NO: 4412 - DNA, 33 bp, Homo sapiens
ttccgagcagggcgtagataagtggacattcca

SEQ ID NO: 4413 - DNA, 33 bp, Homo sapiens
taaaatggctgaaattgaaaagactcactatac

SEQ ID NO: 4414 - DNA, 33 bp, Homo sapiens
ttaactatagatacaagtgacagcacagttgag

SEQ ID NO: 4415 - DNA, 33 bp, Homo sapiens
cagttagtcaatggtcgagtccagatttgagca

SEQ ID NO: 4416 - DNA, 33 bp, Homo sapiens
cagacactggaactcatacaaatacacaaattc

SEQ ID NO: 4417 - DNA, 33 bp, Homo sapiens
caaagagaattccaaagtaaactgcataataaa

SEQ ID NO: 4418 - DNA, 33 bp, Homo sapiens
cacaattaagcattgatgaagaggttgtttatc

SEQ ID NO: 4419 - DNA, 33 bp, Homo sapiens
gaatcgagttatttgggattctatcctagttct

SEQ ID NO: 4420 - DNA, 33 bp, Homo sapiens
attatgtcctgagtgagagcagaaaaacgactc

SEQ ID NO: 4421 - DNA, 33 bp, Homo sapiens
caacagaatcaggaaatcatccaataagacagt

SEQ ID NO: 4422 - DNA, 33 bp, Homo sapiens
ccctgtgtctctgctcgctccactcaagacaga

SEQ ID NO: 4423 - DNA, 33 bp, Homo sapiens
actgcagacttaactagattgacatttgaatca

SEQ ID NO: 4424 - DNA, 33 bp, Homo sapiens
tctgacttggaaacaaggaaaaaacatgaaacg

SEQ ID NO: 4425 - DNA, 33 bp, Homo sapiens
ccctctgcaagaataacatcaaataactgttag

SEQ ID NO: 4426 - DNA, 33 bp, Homo sapiens
gcacacagcccgattccaattatattacaaagc

SEQ ID NO: 4427 - DNA, 33 bp, Homo sapiens
tcttcatctgtcaaacgaaaattttattagaaa

SEQ ID NO: 4428 - DNA, 33 bp, Homo sapiens
taaagatttagtccattacagtaaacaactatt

SEQ ID NO: 4429 - DNA, 33 bp, Homo sapiens
acttcatagttaacaattgctttcaaggaatgc

SEQ ID NO: 4430 - DNA, 33 bp, Homo sapiens
tgcgatggtatgtaaatgaatgttgcatgacca

SEQ ID NO: 4431 - DNA, 33 bp, Homo sapiens
agaaaaagtttgtcaatccctgctgctcaagtg

SEQ ID NO: 4432 - DNA, 33 bp, Homo sapiens
atggatactacgaagatagatactgagggccat

SEQ ID NO: 4433 - DNA, 33 bp, Homo sapiens
agcttttaacatctgctgagtcttaactataca

SEQ ID NO: 4434 - DNA, 33 bp, Homo sapiens
ctggccactgctccaggaagaatcagagcctct

SEQ ID NO: 4435 - DNA, 33 bp, Homo sapiens
actgcgtatgtttggatgtgccagagagacaga

SEQ ID NO: 4436 - DNA, 33 bp, Homo sapiens
tggggaggtgctgcaatggtaacgtaagaggtt

SEQ ID NO: 4437 - DNA, 33 bp, Homo sapiens
tgctgtcttgacttgagtaacagctactagata

SEQ ID NO: 4438 - DNA, 33 bp, Homo sapiens
acttttgctcatactatctattcaatcactggt

SEQ ID NO: 4439 - DNA, 33 bp, Homo sapiens
ctttaagaagtagcaacatatcttgaagtatat

SEQ ID NO: 4440 - DNA, 33 bp, Homo sapiens
atactctgcaccttgacgacacaacacactgta

SEQ ID NO: 4441 - DNA, 33 bp, Homo sapiens
gtgctgtgaaacatcctatcatgcataggacag

SEQ ID NO: 4442 - DNA, 33 bp, Homo sapiens
gatggatgaggatgcagacctttgtaaggcagg

SEQ ID NO: 4443 - DNA, 33 bp, Homo sapiens
ctatagacttaaaccttaggattctctttagtg

SEQ ID NO: 4444 - DNA, 33 bp, Homo sapiens
aaatgtaggatttgaggaaacaagctgtttgcc

SEQ ID NO: 4445 - DNA, 51 bp, Homo sapiens
tgttaataatataaataggttaatatgtgtcaattatgttaatattaaata

SEQ ID NO: 4446 - DNA, 33 bp, Homo sapiens
tttttaagtgtgtggctcaatcagttttcagta

SEQ ID NO: 4447 - DNA, 33 bp, Homo sapiens
aatccttcctgattccgaaactactgctttttt

SEQ ID NO: 4448 - DNA, 51 bp, Homo sapiens
aaaacaaaaagaaagaaagaaaaaaggctttatcgcaattataaaagagct

SEQ ID NO: 4449 - DNA, 33 bp, Homo sapiens
ttgcctccagggagtatgatgctttgtgcactt

SEQ ID NO: 4450 - DNA, 33 bp, Homo sapiens
tgtgtgtttactcagcgcctactgagtgtcata

SEQ ID NO: 4451 - DNA, 33 bp, Homo sapiens
aactttttggtgtatatctcacttttctgtagg

SEQ ID NO: 4452 - DNA, 33 bp, Homo sapiens
gatactcctttcctagtaccgttccttggctcc

SEQ ID NO: 4453 - DNA, 33 bp, Homo sapiens
tcctcacaaaccactggagtaagattaatccca

SEQ ID NO: 4454 - DNA, 51 bp, Homo sapiens
ttggtaaaggtgtaaataggtgtgcgatgaaagttgattacctaataattg

SEQ ID NO: 4455 - DNA, 33 bp, Homo sapiens
ctgtattttcctggaagggcacttgctaggggc

SEQ ID NO: 4456 - DNA, 51 bp, Homo sapiens
atagctttaatttatctgtctcctacatgtaactgagaaatacaaatattg

SEQ ID NO: 4457 - DNA, 33 bp, Homo sapiens
ctgggccaaagaccaatgtttaaagttacactc

SEQ ID NO: 4458 - DNA, 33 bp, Homo sapiens
agaaggctatgcataagtgaggataggataaat

SEQ ID NO: 4459 - DNA, 33 bp, Homo sapiens
tgactttagattaggatgtggtttcttggatat

SEQ ID NO: 4460 - DNA, 33 bp, Homo sapiens
ttctgcaggaagagaggagaggggtttggccct

SEQ ID NO: 4461 - DNA, 33 bp, Homo sapiens
gcaaatacctctatggtcactaagtggctgcgc

SEQ ID NO: 4462 - DNA, 33 bp, Homo sapiens
tgacaatccaagataatagccaataatgagtat

SEQ ID NO: 4463 - DNA, 33 bp, Homo sapiens
catgatctttctaaaatgcaaatttgaaacaat

SEQ ID NO: 4464 - DNA, 33 bp, Homo sapiens
ttaagtagtagtgatagcatttcatccgattcc

SEQ ID NO: 4465 - DNA, 33 bp, Homo sapiens
accctcatgagaacaggattaagtatgattaag

SEQ ID NO: 4466 - DNA, 33 bp, Homo sapiens
agtaatggacttgctcgctacaataattaaaac

SEQ ID NO: 4467 - DNA, 33 bp, Homo sapiens
cgcttaaaagtctcaagcgtgcgacttaattaa

SEQ ID NO: 4468 - DNA, 33 bp, Homo sapiens
aaaagcatcaagctgagactttattgttgttgg

SEQ ID NO: 4469 - DNA, 33 bp, Homo sapiens
acgcaagaccatttccgcttacataatacaagt

SEQ ID NO: 4470 - DNA, 33 bp, Homo sapiens
ataactggtataactctatgctttgggaatatt

SEQ ID NO: 4471 - DNA, 33 bp, Homo sapiens
aaaatgatagtctttatgcttttagtacagagc

SEQ ID NO: 4472 - DNA, 33 bp, Homo sapiens
gggcaagtggtgcctaggtccagcttacatttc

SEQ ID NO: 4473 - DNA, 33 bp, Homo sapiens
tgccgctgtcttgagggcattttctttgggctg

SEQ ID NO: 4474 - DNA, 33 bp, Homo sapiens
gcctttgatacattggtcacattcacatgggca

SEQ ID NO: 4475 - DNA, 51 bp, Homo sapiens
ggttctaaacgacaaggtagagagatgtgaatggaacccaaaaaagagaaa

SEQ ID NO: 4476 - DNA, 33 bp, Homo sapiens
ctaggtgaacgttttatagtttgggtagagaga

SEQ ID NO: 4477 - DNA, 33 bp, Homo sapiens
cccatagagatacacaggcataaattctgtact

SEQ ID NO: 4478 - DNA, 33 bp, Homo sapiens
tttaatttgggggggagcattttggaagagata

SEQ ID NO: 4479 - DNA, 33 bp, Homo sapiens
ttgacttccttcaatatgttccttctaaaatgg

SEQ ID NO: 4480 - DNA, 33 bp, Homo sapiens
tgtacatttcattcgacccttctgataaaaacc

SEQ ID NO: 4481 - DNA, 33 bp, Homo sapiens
gatgctttggcttacagatccatttactgttaa

SEQ ID NO: 4482 - DNA, 33 bp, Homo sapiens
aaaatacaggggaaaatttaatcatatcctctc

SEQ ID NO: 4483 - DNA, 33 bp, Homo sapiens
ttccatatgagcttgataaaaatgtgtaacctg

SEQ ID NO: 4484 - DNA, 33 bp, Homo sapiens
gttttaaataaaagccgaatctcaaaaggaagg

SEQ ID NO: 4485 - DNA, 33 bp, Homo sapiens
gctactaggggaataagtcattctggcagaccc

SEQ ID NO: 4486 - DNA, 51 bp, Homo sapiens
atgtgttcatactctatgtgatttagagatggtgaattctgtgatgatcaa

SEQ ID NO: 4487 - DNA, 33 bp, Homo sapiens
ctaattacagcaataggaagtgcgtgcataaac

SEQ ID NO: 4488 - DNA, 33 bp, Homo sapiens
atattgcttcacttgatggtgtctcaattcttt

SEQ ID NO: 4489 - DNA, 33 bp, Homo sapiens
gaagataggttggttggaattttcaggtctgag

SEQ ID NO: 4490 - DNA, 33 bp, Homo sapiens
ttgaatctatcactaagtccttctctaggcgta

SEQ ID NO: 4491 - DNA, 33 bp, Homo sapiens
ttgaatttatgataaccagtgatactgacctaa

SEQ ID NO: 4492 - DNA, 33 bp, Homo sapiens
agactcggtgtggtccggcggctgccacctctc

SEQ ID NO: 4493 - DNA, 33 bp, Homo sapiens
tttaactaaaaggctatctattcaggatgaact

SEQ ID NO: 4494 - DNA, 33 bp, Homo sapiens
tgtgaatactgggatggaaccactcagatggaa

SEQ ID NO: 4495 - DNA, 33 bp, Homo sapiens
catcatgtctgacacccgaagtagtacataaaa

SEQ ID NO: 4496 - DNA, 33 bp, Homo sapiens
gtgtagtgctataaacgagctccataagtgcag

SEQ ID NO: 4497 - DNA, 33 bp, Homo sapiens
aaaatgagatatcaaggcaaactatgcattttt

SEQ ID NO: 4498 - DNA, 33 bp, Homo sapiens
ccaaatattttccttaggctttgaacatgagct

SEQ ID NO: 4499 - DNA, 33 bp, Homo sapiens
ttgacctgtttgatctgagagcctaatttcata

SEQ ID NO: 4500 - DNA, 33 bp, Homo sapiens
gttacatgattaatactgtacaatctttgaggc

SEQ ID NO: 4501 - DNA, 33 bp, Homo sapiens
tttgtaatttgaaaaactatgtggcattttaat

SEQ ID NO: 4502 - DNA, 33 bp, Homo sapiens
aagccttggactcagatacaatagagtttaaag

SEQ ID NO: 4503 - DNA, 33 bp, Homo sapiens
tgagccatcggataaagtgcatgaatttcagga

SEQ ID NO: 4504 - DNA, 33 bp, Homo sapiens
ttgtttttgcttagcattctttaaccactaatg

SEQ ID NO: 4505 - DNA, 33 bp, Homo sapiens
gttcagctgtttttattacaggttgaaagtcag

SEQ ID NO: 4506 - DNA, 33 bp, Homo sapiens
tgtatgttgcagataatcacatgtaagctttaa

SEQ ID NO: 4507 - DNA, 33 bp, Homo sapiens
tcctgtcttggccctacaaaattacaaatcaaa

SEQ ID NO: 4508 - DNA, 33 bp, Homo sapiens
cctaagtctccttttatgctatcttctaccaaa

SEQ ID NO: 4509 - DNA, 33 bp, Homo sapiens
tctaggtttattttcctccttgcctcaaagctt

SEQ ID NO: 4510 - DNA, 33 bp, Homo sapiens
aaggaacaaatcaatagggtggtagtggaagaa

SEQ ID NO: 4511 - DNA, 33 bp, Homo sapiens
aaaagcatggcttatacctcactagacgaggca

SEQ ID NO: 4512 - DNA, 33 bp, Homo sapiens
atgacccatcataacattgacttttttccttta

SEQ ID NO: 4513 - DNA, 33 bp, Homo sapiens
atttttcttagtacgatgctctttacattgcaa

SEQ ID NO: 4514 - DNA, 33 bp, Homo sapiens
gaaccaggaaagttactgattcctgagaattca

SEQ ID NO: 4515 - DNA, 33 bp, Homo sapiens
agcaaactaacagacatatcagcctcaagatac

SEQ ID NO: 4516 - DNA, 33 bp, Homo sapiens
ctgcataacgtcacacgcttggactgctgctgg

SEQ ID NO: 4517 - DNA, 51 bp, Homo sapiens
tcctttctgaaataattttaggatatgaaaatctgtaaatgaaaaactaca

SEQ ID NO: 4518 - DNA, 33 bp, Homo sapiens
cagacagctgcaagtgtagaggatttaacgaag

SEQ ID NO: 4519 - DNA, 33 bp, Homo sapiens
tatatacctcttgaaacaggcaaaggttgaagt

SEQ ID NO: 4520 - DNA, 51 bp, Homo sapiens
gctcatcctaaatttccataccacagtctcttcactatttatatcttatct

SEQ ID NO: 4521 - DNA, 51 bp, Homo sapiens
tcaccagtctatgaccctcagtacattaatctgtagtctcagttctagggt

SEQ ID NO: 4522 - DNA, 33 bp, Homo sapiens
accaggtatttctctcgcttcctgagctgcaat

SEQ ID NO: 4523 - DNA, 51 bp, Homo sapiens
aaattgactgttgattttatatatggcttcaagcttgatccactcatgatt

SEQ ID NO: 4524 - DNA, 33 bp, Homo sapiens
actgaaacaagtaaatcatatgcatacagttgt

SEQ ID NO: 4525 - DNA, 33 bp, Homo sapiens
ataaaaggactaaaaactctattcatctttatc

SEQ ID NO: 4526 - DNA, 33 bp, Homo sapiens
ttctgatgctaagctccatgcaatttacctagg

SEQ ID NO: 4527 - DNA, 33 bp, Homo sapiens
gaaaggacctttaggatgtgatgaaaattaaat

SEQ ID NO: 4528 - DNA, 33 bp, Homo sapiens
cgtcatctgaaactacgcaggacaaatgaagct

SEQ ID NO: 4529 - DNA, 33 bp, Homo sapiens
gtttttacagctaagatgtttactaatttgggg

SEQ ID NO: 4530 - DNA, 33 bp, Homo sapiens
tgtatgagattctagaggtaacgtctatggatt

SEQ ID NO: 4531 - DNA, 33 bp, Homo sapiens
gatactaagaagatgatgagtgttctcagggca

SEQ ID NO: 4532 - DNA, 33 bp, Homo sapiens
aagaaaggaaatgcaatcaattaaaggaatact

SEQ ID NO: 4533 - DNA, 33 bp, Homo sapiens
gcgtttgcttgaaaatgaattctttgtctaagt

SEQ ID NO: 4534 - DNA, 33 bp, Homo sapiens
ccaaagttacatggacgccatatttagacaaaa

SEQ ID NO: 4535 - DNA, 33 bp, Homo sapiens
tccagatattaaaacagtcatcctgcagaagaa

SEQ ID NO: 4536 - DNA, 33 bp, Homo sapiens
ttctcttcgctcatagcataatgaattactctt

SEQ ID NO: 4537 - DNA, 33 bp, Homo sapiens
aagtgcattacagctatgaaactctaatcacat

SEQ ID NO: 4538 - DNA, 33 bp, Homo sapiens
aaggtcaaatgtgtaagaagctgttaagattat

SEQ ID NO: 4539 - DNA, 33 bp, Homo sapiens
gtgcatctgagattgcggataagaattcaaatc

SEQ ID NO: 4540 - DNA, 33 bp, Homo sapiens
gacatgagtacctggacaagaaaagacagacag

SEQ ID NO: 4541 - DNA, 33 bp, Homo sapiens
atactggagtagggtatgcacttaatccaatat

SEQ ID NO: 4542 - DNA, 33 bp, Homo sapiens
gctgccttttgggtgaggtagaatgaaaattat

SEQ ID NO: 4543 - DNA, 33 bp, Homo sapiens
tgtatcccagacgatatagttgaaatggctaga

SEQ ID NO: 4544 - DNA, 33 bp, Homo sapiens
tagacacacctagtaattgcttggggaaaaggg

SEQ ID NO: 4545 - DNA, 33 bp, Homo sapiens
aaaaaccttcaaacaaggcatatcaaaaaagac

SEQ ID NO: 4546 - DNA, 33 bp, Homo sapiens
atacccattttaataatcataagccaaacactg

SEQ ID NO: 4547 - DNA, 33 bp, Homo sapiens
cctacaatgaaaaaccgaatatcccttagcaga

SEQ ID NO: 4548 - DNA, 33 bp, Homo sapiens
gagaagggtagtgagggaaagcttttaagggtc

SEQ ID NO: 4549 - DNA, 33 bp, Homo sapiens
ggattgtgcttttgaataattttgtgtttgcct

SEQ ID NO: 4550 - DNA, 51 bp, Homo sapiens
atctactgaggctaaaataagctcagtataaagatgggaataaactataga

SEQ ID NO: 4551 - DNA, 33 bp, Homo sapiens
caagcaaacagatcacgatggtagaaatcagaa

SEQ ID NO: 4552 - DNA, 33 bp, Homo sapiens
tgtagggaaactctgcgcttaacctatctctgt

SEQ ID NO: 4553 - DNA, 51 bp, Homo sapiens
ttttttaaagctatctccaccaatcgtgttatacctgggcatatacttagg

SEQ ID NO: 4554 - DNA, 51 bp, Homo sapiens
cccagaccaaagaataagctaaatatgctgagactcagaggtcagaacagg

SEQ ID NO: 4555 - DNA, 51 bp, Homo sapiens
gttttctctaaacataatgtattcatcatcccactagtcaaaaaaagcatt

SEQ ID NO: 4556 - DNA, 33 bp, Homo sapiens
attttgaagacccttatgtgtatgtatgtgtat

SEQ ID NO: 4557 - DNA, 33 bp, Homo sapiens
ccaaagaagatatagataaagcaataaacatac

SEQ ID NO: 4558 - DNA, 33 bp, Homo sapiens
gataaaaacaccaagcgcagataatcttttgtg

SEQ ID NO: 4559 - DNA, 51 bp, Homo sapiens
tgcttgaaatattcattttctgcgagcgtatgggccattgaggattacagt

SEQ ID NO: 4560 - DNA, 33 bp, Homo sapiens
aggtgttcttaaaatccagtgataaatcaatta

SEQ ID NO: 4561 - DNA, 33 bp, Homo sapiens
gtattttgcattggtagaatagcagtgcacact

SEQ ID NO: 4562 - DNA, 33 bp, Homo sapiens
gttaggttatccaggagggatcatggtgaagag

SEQ ID NO: 4563 - DNA, 33 bp, Homo sapiens
ttgcaactttatgtaagcctaaaattatttgta

SEQ ID NO: 4564 - DNA, 33 bp, Homo sapiens
gtctgacgataagcaggagaaagtcatttttat

SEQ ID NO: 4565 - DNA, 33 bp, Homo sapiens
ttgacactgctattaagaattgcctaagagtat

SEQ ID NO: 4566 - DNA, 33 bp, Homo sapiens
gacagatcctgtaacatccctgtctatttaggt

SEQ ID NO: 4567 - DNA, 33 bp, Homo sapiens
accttaatccactttagaagaccaagcacatgg

SEQ ID NO: 4568 - DNA, 33 bp, Homo sapiens
atgttgtaagtctaaaggcaaatggctgtcaaa

SEQ ID NO: 4569 - DNA, 33 bp, Homo sapiens
ctaaggaactagatcattgagttaaaaagtcgt

SEQ ID NO: 4570 - DNA, 33 bp, Homo sapiens
tttccttataaattgcgcatccttagatattcc

SEQ ID NO: 4571 - DNA, 33 bp, Homo sapiens
ttcagtgataacaaaagcaatttacgtttgaat

SEQ ID NO: 4572 - DNA, 51 bp, Homo sapiens
ttccaataacaactgacataaatcaggtattaccattgacttatattgtta

SEQ ID NO: 4573 - DNA, 33 bp, Homo sapiens
cagtacaacataaaacggtagctcttcttatta

SEQ ID NO: 4574 - DNA, 33 bp, Homo sapiens
tgttctctctgcattatgaagggatacattcca

SEQ ID NO: 4575 - DNA, 33 bp, Homo sapiens
gtcaagcaaacagttatcaaactcctgtataaa

SEQ ID NO: 4576 - DNA, 33 bp, Homo sapiens
ctttctgctgaccaacgattttataaatgtata

SEQ ID NO: 4577 - DNA, 33 bp, Homo sapiens
aagaaaaatatcttgatctattacctacatatg

SEQ ID NO: 4578 - DNA, 33 bp, Homo sapiens
aaactctgaatatttagggttatacagaaaatt

SEQ ID NO: 4579 - DNA, 33 bp, Homo sapiens
agctgattttgattgcgaattagggattaaaat

SEQ ID NO: 4580 - DNA, 33 bp, Homo sapiens
tttagagtttatacactatccacctcctaaaaa

SEQ ID NO: 4581 - DNA, 33 bp, Homo sapiens
ttgaacaattcatttaggtctaccattcaggat

SEQ ID NO: 4582 - DNA, 33 bp, Homo sapiens
aaatcttgccctttccgcaaagtcacataagac

SEQ ID NO: 4583 - DNA, 33 bp, Homo sapiens
tttctgcctctagtgacagctgtttgaaaatca

SEQ ID NO: 4584 - DNA, 33 bp, Homo sapiens
ggtgcctggcgtacacgagtttttataaccagc

SEQ ID NO: 4585 - DNA, 51 bp, Homo sapiens
ggttctagaaactaaatatagaatcgcaatagaatgtagcatataacactt

SEQ ID NO: 4586 - DNA, 33 bp, Homo sapiens
tatgaagcagctttaacagactgacacattctg

SEQ ID NO: 4587 - DNA, 33 bp, Homo sapiens
agagaacaaaagtacagaggtagtttatcttga

SEQ ID NO: 4588 - DNA, 33 bp, Homo sapiens
cagaagctgaggtcaatgacaagtatatccagg

SEQ ID NO: 4589 - DNA, 33 bp, Homo sapiens
acatgaatggcttcaggcaaagagagagagctt

SEQ ID NO: 4590 - DNA, 33 bp, Homo sapiens
tccttcctctgccatatgaccttgaagtgcact

SEQ ID NO: 4591 - DNA, 33 bp, Homo sapiens
aacctgctgccttgaagagaagaatatagtcct

SEQ ID NO: 4592 - DNA, 33 bp, Homo sapiens
gatgtatccactacaattacagctctacataat

SEQ ID NO: 4593 - DNA, 33 bp, Homo sapiens
ttgttgttaatcgaagtataaatgatctgtaac

SEQ ID NO: 4594 - DNA, 33 bp, Homo sapiens
aatattgagcatactgcataagcttacaattat

SEQ ID NO: 4595 - DNA, 33 bp, Homo sapiens
gccgcctatcattgaggcaaagatttccttgga

SEQ ID NO: 4596 - DNA, 33 bp, Homo sapiens
gtacctaattttttcaggggcttatatggagag

SEQ ID NO: 4597 - DNA, 33 bp, Homo sapiens
aatggtgaattcagaatcctatcacagaagctc

SEQ ID NO: 4598 - DNA, 51 bp, Homo sapiens
actggatcttgtccaaaacaataaaggtagtaacctctatgagtctgcaag

SEQ ID NO: 4599 - DNA, 33 bp, Homo sapiens
tctattgtgatgtaactgcaaaagtaggaccac

SEQ ID NO: 4600 - DNA, 33 bp, Homo sapiens
tcaggatatttacaatgaatccaaagaggtaac

SEQ ID NO: 4601 - DNA, 33 bp, Homo sapiens
aatgtaaaggtatgtgtacaagtagagggtgtg

SEQ ID NO: 4602 - DNA, 33 bp, Homo sapiens
cttgttttccaatccattgataatctgaacatg

SEQ ID NO: 4603 - DNA, 33 bp, Homo sapiens
tgaacaatctaggctatactcacagcaggacat

SEQ ID NO: 4604 - DNA, 33 bp, Homo sapiens
gatatcactaccttccgcacaacaggtgactgg

SEQ ID NO: 4605 - DNA, 33 bp, Homo sapiens
aatgcttctttgggtacaatcattctcactact

SEQ ID NO: 4606 - DNA, 33 bp, Homo sapiens
tctgcagcacaaagaataagtatagaagaatat

SEQ ID NO: 4607 - DNA, 33 bp, Homo sapiens
ttgaaaagatgagaaataccattacgcagacaa

SEQ ID NO: 4608 - DNA, 33 bp, Homo sapiens
tttaaaactcagagtagaagtcaagatccacac

SEQ ID NO: 4609 - DNA, 33 bp, Homo sapiens
ttctatatgatttttatggaacactgtatatac

SEQ ID NO: 4610 - DNA, 51 bp, Homo sapiens
aatagtaccttatctattctgagtaggtccatacacttgagaagattttac

SEQ ID NO: 4611 - DNA, 33 bp, Homo sapiens
cttagtgacaaaaccagtctttcataatatgac

SEQ ID NO: 4612 - DNA, 33 bp, Homo sapiens
ggtgtctgaagaattaggcagtgatagattcga

SEQ ID NO: 4613 - DNA, 33 bp, Homo sapiens
tataagagacttgaaatgataatcctacaggaa

SEQ ID NO: 4614 - DNA, 33 bp, Homo sapiens
cgtttcattaatagtagcatactctgcacatac

SEQ ID NO: 4615 - DNA, 33 bp, Homo sapiens
gctaagttgaacctgttaaattgagttctcctc

SEQ ID NO: 4616 - DNA, 33 bp, Homo sapiens
aattactagacctgaacattttacaatacacct

SEQ ID NO: 4617 - DNA, 33 bp, Homo sapiens
tacatgatttttatcctattactcatcttgtga

SEQ ID NO: 4618 - DNA, 33 bp, Homo sapiens
tgagcttaaacatttaggggagattatgaacct

SEQ ID NO: 4619 - DNA, 33 bp, Homo sapiens
tacacagtgtaagtgagataaaaacagaaacac

SEQ ID NO: 4620 - DNA, 33 bp, Homo sapiens
ttataggttgttgatctaaaaggacaacggagg

SEQ ID NO: 4621 - DNA, 33 bp, Homo sapiens
gaggctagaggttcaagatcgaggtgtcagtat

SEQ ID NO: 4622 - DNA, 33 bp, Homo sapiens
catgtctaaccgtgatgagttaaaatagaacta

SEQ ID NO: 4623 - DNA, 33 bp, Homo sapiens
atagtgaatatcattatgctccacctagatttc

SEQ ID NO: 4624 - DNA, 33 bp, Homo sapiens
tcacttctcaaaaacagacattcacatggccaa

SEQ ID NO: 4625 - DNA, 33 bp, Homo sapiens
aagcatacatgagtatgaatagccaaatcgatc

SEQ ID NO: 4626 - DNA, 33 bp, Homo sapiens
ctttcatgcaattttctatgataccttctcagt

SEQ ID NO: 4627 - DNA, 33 bp, Homo sapiens
cttttgatgggaagcctacttttgatttgtcag

SEQ ID NO: 4628 - DNA, 33 bp, Homo sapiens
aaaaacagtatttcgagcaattaatgctgtagt

SEQ ID NO: 4629 - DNA, 33 bp, Homo sapiens
agtctggaacttagtctatatgtagaaatcttg

SEQ ID NO: 4630 - DNA, 51 bp, Homo sapiens
ataattctaagaatcattgtaatctgaacttttaaaccaggttttaattgc

SEQ ID NO: 4631 - DNA, 33 bp, Homo sapiens
aacatttgcaatggaattgtgagttgaaattgg

SEQ ID NO: 4632 - DNA, 33 bp, Homo sapiens
ctaagattcaaaattaggcatcctgattccaga

SEQ ID NO: 4633 - DNA, 33 bp, Homo sapiens
tgtcagcaacaaagaaggaagtgttaatgatag

SEQ ID NO: 4634 - DNA, 33 bp, Homo sapiens
tgacaatcctggttgattacttcttttcaagct

SEQ ID NO: 4635 - DNA, 33 bp, Homo sapiens
agatggtggtttcttagggaaaagatatatggt

SEQ ID NO: 4636 - DNA, 33 bp, Homo sapiens
aggaatgaggaacacagtcaaaatatcaagaaa

SEQ ID NO: 4637 - DNA, 33 bp, Homo sapiens
tcaaatagaggggtccgaaagactgcgggctcc

SEQ ID NO: 4638 - DNA, 33 bp, Homo sapiens
tttttctgtataaacattgatgaatcccaggta

SEQ ID NO: 4639 - DNA, 33 bp, Homo sapiens
tgtgtgaaacataccagtgacaaaaatggttga

SEQ ID NO: 4640 - DNA, 33 bp, Homo sapiens
aaatgctcctttactcgcaacagtgtaaaccat

SEQ ID NO: 4641 - DNA, 33 bp, Homo sapiens
tcatgtctgcaatgccgatatccccctactcca

SEQ ID NO: 4642 - DNA, 33 bp, Homo sapiens
caaaaagataatgcacgatgagattgcctacca

SEQ ID NO: 4643 - DNA, 33 bp, Homo sapiens
acaattctgcttgttatgggattgagctaggtt

SEQ ID NO: 4644 - DNA, 33 bp, Homo sapiens
ttagaacactctgctatgctattggaatgtttt

SEQ ID NO: 4645 - DNA, 33 bp, Homo sapiens
ggggaggaacatcagactaacagtggacttctc

SEQ ID NO: 4646 - DNA, 33 bp, Homo sapiens
aggaagaagttgcatatgttataggcccaacta

SEQ ID NO: 4647 - DNA, 33 bp, Homo sapiens
actgtgactacgataatcttccgataaccaacg

SEQ ID NO: 4648 - DNA, 33 bp, Homo sapiens
gcagaagtaataccacggaggcgctatatgctg

SEQ ID NO: 4649 - DNA, 33 bp, Homo sapiens
gcagtttttcccaaccgagcgtctacctttgat

SEQ ID NO: 4650 - DNA, 33 bp, Homo sapiens
atcagtactaacacaattatttttacataaacc

SEQ ID NO: 4651 - DNA, 33 bp, Homo sapiens
aagcccactacaaggatctgagcaacatggtca

SEQ ID NO: 4652 - DNA, 33 bp, Homo sapiens
attattgcctggcatcgaaaatatgggggaagg

SEQ ID NO: 4653 - DNA, 51 bp, Homo sapiens
actatttttgagcatctctttgctatgtaaaattgtatttgctttacagat

SEQ ID NO: 4654 - DNA, 33 bp, Homo sapiens
tcagtcccctcatcccgaagatagagtatccag

SEQ ID NO: 4655 - DNA, 33 bp, Homo sapiens
gataagtcatctagcacgtaaggctatcaatta

SEQ ID NO: 4656 - DNA, 33 bp, Homo sapiens
atacattcaaaccatagccagctttaaactcaa

SEQ ID NO: 4657 - DNA, 33 bp, Homo sapiens
gttggctactgtactcgctgttcataaactgtt

SEQ ID NO: 4658 - DNA, 33 bp, Homo sapiens
cttacaaaccttatgatagtctaaaacgagaat

SEQ ID NO: 4659 - DNA, 33 bp, Homo sapiens
gctgcttccacttggctatcttggtctcctctc

SEQ ID NO: 4660 - DNA, 33 bp, Homo sapiens
aggctggagtacaagctatatgcatcctggcag

SEQ ID NO: 4661 - DNA, 33 bp, Homo sapiens
ttgttgacagctgttataatacacaaagtacca

SEQ ID NO: 4662 - DNA, 33 bp, Homo sapiens
tttgaacatggctgtggattaaatgataatatt

SEQ ID NO: 4663 - DNA, 33 bp, Homo sapiens
atcctctaacattacatggcaatatttcacttt

SEQ ID NO: 4664 - DNA, 33 bp, Homo sapiens
aatattcattaaagtaggagagctacagggtcc

SEQ ID NO: 4665 - DNA, 51 bp, Homo sapiens
tacttagaagcaatgtaatgatgccggacagttaataactagaaaatatca

SEQ ID NO: 4666 - DNA, 33 bp, Homo sapiens
ttgttcatagttatcattcattgtcaacataat

SEQ ID NO: 4667 - DNA, 33 bp, Homo sapiens
ttccaaaatgtaaagatggaacaaccataaaca

SEQ ID NO: 4668 - DNA, 33 bp, Homo sapiens
gacttatagaattggctatcatggaattttgcc

SEQ ID NO: 4669 - DNA, 33 bp, Homo sapiens
atgtgggtttatctgagcatcttcctgttgggc

SEQ ID NO: 4670 - DNA, 33 bp, Homo sapiens
atcagtcaagtcaaaggattcttagtgatagcc

SEQ ID NO: 4671 - DNA, 33 bp, Homo sapiens
aaaacggaaaattgtgtatgtgtaatgtaccac

SEQ ID NO: 4672 - DNA, 33 bp, Homo sapiens
gctaagttttatccattaaaagagacctgttag

SEQ ID NO: 4673 - DNA, 33 bp, Homo sapiens
ttcataatcttataaagttccaggaagctgaat

SEQ ID NO: 4674 - DNA, 33 bp, Homo sapiens
tccttttagttacatggagtcatttttgtccac

SEQ ID NO: 4675 - DNA, 51 bp, Homo sapiens
aaataatgataaaaagtatagtatagtaagtacataaaccagtaacattca

SEQ ID NO: 4676 - DNA, 33 bp, Homo sapiens
atagacctatgataaggacatttccacggtatt

SEQ ID NO: 4677 - DNA, 33 bp, Homo sapiens
acccttgtttcaaggcgactcagaagagggaat

SEQ ID NO: 4678 - DNA, 33 bp, Homo sapiens
atgataagtagaaaaagagaagccagcgaaaaa

SEQ ID NO: 4679 - DNA, 33 bp, Homo sapiens
accagtgctttggtactgctaaggctgtgattg

SEQ ID NO: 4680 - DNA, 33 bp, Homo sapiens
tatattttattccctcgactgccaggttcatta

SEQ ID NO: 4681 - DNA, 51 bp, Homo sapiens
catgaactctcttttatttaggaagtattgcagaacaaaaatgaaactcag

SEQ ID NO: 4682 - DNA, 33 bp, Homo sapiens
gaaattgccattgaaatgagttaaggcctaccc

SEQ ID NO: 4683 - DNA, 33 bp, Homo sapiens
agttttgagaacagattatcaacagtgtcaaat

SEQ ID NO: 4684 - DNA, 51 bp, Homo sapiens
cttttcttcatctcatggaggatgattattttaaggagagtgaacattaca

SEQ ID NO: 4685 - DNA, 33 bp, Homo sapiens
attttcaatttaaaacgggttcattggaacata

SEQ ID NO: 4686 - DNA, 33 bp, Homo sapiens
tgtagaggtaagataagttagaatatgggctct

SEQ ID NO: 4687 - DNA, 33 bp, Homo sapiens
taaacaaagggtaatacattggaagagcagtag

SEQ ID NO: 4688 - DNA, 33 bp, Homo sapiens
tgctttgctttcagtagcattagctgaagtaat

SEQ ID NO: 4689 - DNA, 33 bp, Homo sapiens
cattaatttagtagcggaactcttcatatccat

SEQ ID NO: 4690 - DNA, 51 bp, Homo sapiens
ctgaagaaacagttgtgaattaaaatgagcaaatatagtaaatattattta

SEQ ID NO: 4691 - DNA, 33 bp, Homo sapiens
cagcctggattgagtagccatttcatgctggag

SEQ ID NO: 4692 - DNA, 33 bp, Homo sapiens
tgatcattccatgtaatgtgactactcaacagg

SEQ ID NO: 4693 - DNA, 51 bp, Homo sapiens
ctaaacttatctttgactgattacaggtgtctttttcaaacttgagctgtg

SEQ ID NO: 4694 - DNA, 33 bp, Homo sapiens
gaatggttctagacaataacttttcatggaggg

SEQ ID NO: 4695 - DNA, 33 bp, Homo sapiens
ttgccagggttaacacggcagacagcaggcatt

SEQ ID NO: 4696 - DNA, 33 bp, Homo sapiens
ggatgaagcacttgaataggaatccacattaca

SEQ ID NO: 4697 - DNA, 33 bp, Homo sapiens
cagtcactgtggcaactaaaatgatcccacaga

SEQ ID NO: 4698 - DNA, 33 bp, Homo sapiens
acaatcatccttgtcatacaatagaaggtagaa

SEQ ID NO: 4699 - DNA, 33 bp, Homo sapiens
gctgtacagaaagcacggctgggaagttctcag

SEQ ID NO: 4700 - DNA, 33 bp, Homo sapiens
gctgcagggagctggctaataggtagaacttgg

SEQ ID NO: 4701 - DNA, 33 bp, Homo sapiens
aaatggcatcacacatgacgatcagagactgaa

SEQ ID NO: 4702 - DNA, 33 bp, Homo sapiens
ggacccacttgaaacatgagagttgatacgaag

SEQ ID NO: 4703 - DNA, 33 bp, Homo sapiens
tatcatacaaatgtaagacaataagagggaaaa

SEQ ID NO: 4704 - DNA, 33 bp, Homo sapiens
gttgctagactttaaagacgcacaattatctgt

SEQ ID NO: 4705 - DNA, 33 bp, Homo sapiens
gcaaggaacatttccaggatcaacttgtgcagg

SEQ ID NO: 4706 - DNA, 33 bp, Homo sapiens
atagccaaatacaaacggtagaactcatttaga

SEQ ID NO: 4707 - DNA, 33 bp, Homo sapiens
agtgtgctatagagtctaaagtgctaaccaaaa

SEQ ID NO: 4708 - DNA, 33 bp, Homo sapiens
gttttacctttcacaggcattacttcccaataa

SEQ ID NO: 4709 - DNA, 33 bp, Homo sapiens
tatgccaagatgacaagtgagaagtgcaagtgt

SEQ ID NO: 4710 - DNA, 33 bp, Homo sapiens
gggagtgtctgttttatgtggttaaggactgaa

SEQ ID NO: 4711 - DNA, 33 bp, Homo sapiens
ggtgatggtataagtacgacaatgatacttgtg

SEQ ID NO: 4712 - DNA, 51 bp, Homo sapiens
tagagaatgcaacatgtcagagatagattttcaaacaagtttaaccaccta

SEQ ID NO: 4713 - DNA, 33 bp, Homo sapiens
ggctactttctatgccgcagttagaactttctc

SEQ ID NO: 4714 - DNA, 33 bp, Homo sapiens
acaataaacatacaaagcaggtaacacacatag

SEQ ID NO: 4715 - DNA, 33 bp, Homo sapiens
cctctagtcctaagccgcagggaatctactttc

SEQ ID NO: 4716 - DNA, 51 bp, Homo sapiens
gcagaaaacgtatatgaatccaccatgattagttctctttaaactcagatc

SEQ ID NO: 4717 - DNA, 51 bp, Homo sapiens
ttggcaagctacttacctctgcatcgctctgatagagaaatgagtatcttt

SEQ ID NO: 4718 - DNA, 51 bp, Homo sapiens
gcaccctccaaaatgtcaaagaccattaagaactattttgtttgccaacaa

SEQ ID NO: 4719 - DNA, 51 bp, Homo sapiens
tggtgttttcaataagagttttacatgagctaattgatggaaacaattaat

SEQ ID NO: 4720 - DNA, 33 bp, Homo sapiens
ctatttgaagagtgaggaaaatgggatttcttg

SEQ ID NO: 4721 - DNA, 33 bp, Homo sapiens
caagcccttataccaattgcttactattcaagg

SEQ ID NO: 4722 - DNA, 33 bp, Homo sapiens
aactccttcactcgaatctccaagtcagtgtct

SEQ ID NO: 4723 - DNA, 33 bp, Homo sapiens
aggtgttcaaatgcgggattctgttgatactac

SEQ ID NO: 4724 - DNA, 33 bp, Homo sapiens
gtatgtaaactcagtatgtaaaaaactcagtaa

SEQ ID NO: 4725 - DNA, 33 bp, Homo sapiens
acctactcctaagaaatggactgaatccagggg

SEQ ID NO: 4726 - DNA, 33 bp, Homo sapiens
caaaacacacaaacaacgcgaggaaagcaaggg

SEQ ID NO: 4727 - DNA, 33 bp, Homo sapiens
ttctagactcaagatgtaataacacaggggcag

SEQ ID NO: 4728 - DNA, 33 bp, Homo sapiens
tatagcactcgactcattaataagccaataaat

SEQ ID NO: 4729 - DNA, 33 bp, Homo sapiens
atgaaaaatggcaacagctccaagaatataaca

SEQ ID NO: 4730 - DNA, 33 bp, Homo sapiens
ctgcagagccctaaaagggtgtcacagccctgg

SEQ ID NO: 4731 - DNA, 33 bp, Homo sapiens
aggagaattggaaaactggtagagtaaaaggtt

SEQ ID NO: 4732 - DNA, 33 bp, Homo sapiens
agaggaagggacttacggaattgggacccagac

SEQ ID NO: 4733 - DNA, 51 bp, Homo sapiens
agaatgttttccaagagttctttcctgatggtttgtattttctccctttgc

SEQ ID NO: 4734 - DNA, 33 bp, Homo sapiens
gcagatgtaataataagacagcattggaaattc

SEQ ID NO: 4735 - DNA, 51 bp, Homo sapiens
tgaatcctgtgtaaaactgactcaatgttcccaactggattatggactgat

SEQ ID NO: 4736 - DNA, 33 bp, Homo sapiens
atgttctccactgaaataatctcttccaaacag

SEQ ID NO: 4737 - DNA, 33 bp, Homo sapiens
gatggtcctaataaccgctcttatttcttttat

SEQ ID NO: 4738 - DNA, 33 bp, Homo sapiens
aggcctcacaagaacatccgccactgtcagagc

SEQ ID NO: 4739 - DNA, 33 bp, Homo sapiens
aagagagaatgatgtatacaagagccacagtct

SEQ ID NO: 4740 - DNA, 33 bp, Homo sapiens
ggtgggaggataagactgcctttcctacgcaaa

SEQ ID NO: 4741 - DNA, 33 bp, Homo sapiens
gaaataactccgatgaggaaacagaagatttca

SEQ ID NO: 4742 - DNA, 51 bp, Homo sapiens
taacaagcttaatttttgaattggcgatatagtcacatattatgaaattca

SEQ ID NO: 4743 - DNA, 33 bp, Homo sapiens
gatgctgtttgatcgattatccacatggttaat

SEQ ID NO: 4744 - DNA, 51 bp, Homo sapiens
catatgttatgggccaaaaagttaatatttgagtgtccacagttgtatttt

SEQ ID NO: 4745 - DNA, 33 bp, Homo sapiens
agacaaagtcaaactagagggaattctgtaaaa

SEQ ID NO: 4746 - DNA, 33 bp, Homo sapiens
actagagtctctccaatgtgaatcaaattgaag

SEQ ID NO: 4747 - DNA, 33 bp, Homo sapiens
taggccatactgttccgacaatttaccaccagg

SEQ ID NO: 4748 - DNA, 33 bp, Homo sapiens
acgctctctttcaggcgctggtttgtcactatc

SEQ ID NO: 4749 - DNA, 33 bp, Homo sapiens
aaatagagatgtatgatcccagacctacgatct

SEQ ID NO: 4750 - DNA, 33 bp, Homo sapiens
aaccagtcatgtccaagcttctgctctaaagat

SEQ ID NO: 4751 - DNA, 33 bp, Homo sapiens
agctccaaagttaaacgatgtaggaagagctgg

SEQ ID NO: 4752 - DNA, 33 bp, Homo sapiens
tggctctgaatcagaatgtaaagaacaaaattt

SEQ ID NO: 4753 - DNA, 33 bp, Homo sapiens
taaattgcatgatcaatagacacgactgtgaaa

SEQ ID NO: 4754 - DNA, 33 bp, Homo sapiens
actcacacctcacagccattttagagtctccct

SEQ ID NO: 4755 - DNA, 33 bp, Homo sapiens
aagttagtaatcttaagctttgtgctaacctcc

SEQ ID NO: 4756 - DNA, 33 bp, Homo sapiens
ttgctgagtttatctatagtgtctctaggaccc

SEQ ID NO: 4757 - DNA, 33 bp, Homo sapiens
aaatttctgcaagttcgaagtcaaatttctgca

SEQ ID NO: 4758 - DNA, 33 bp, Homo sapiens
agctgtaaactgcaaagtgctgtataaaagtaa

SEQ ID NO: 4759 - DNA, 33 bp, Homo sapiens
aaaatcctccagagaatagaccagtaaattcaa

SEQ ID NO: 4760 - DNA, 33 bp, Homo sapiens
caccttactccattacgactgcatcttaattag

SEQ ID NO: 4761 - DNA, 33 bp, Homo sapiens
tgttttctaggagagcgattagctaagtttagg

SEQ ID NO: 4762 - DNA, 33 bp, Homo sapiens
gaacctatctagtcaatggtttaattttacaaa

SEQ ID NO: 4763 - DNA, 33 bp, Homo sapiens
agagaaacacaagtcattactagtcagtccgct

SEQ ID NO: 4764 - DNA, 33 bp, Homo sapiens
tgatccagacaagaaagatattatcagattatt

SEQ ID NO: 4765 - DNA, 33 bp, Homo sapiens
aggcaagcaaattttatgactcttgaattaatt

SEQ ID NO: 4766 - DNA, 33 bp, Homo sapiens
atgacacgtagcaataggcacagtaaccaagct

SEQ ID NO: 4767 - DNA, 33 bp, Homo sapiens
ggcatgagagtgattatgtagggcctattataa

SEQ ID NO: 4768 - DNA, 33 bp, Homo sapiens
gagcgaaagaagccacgataatacagcaatgat

SEQ ID NO: 4769 - DNA, 33 bp, Homo sapiens
gctcacccttccagtcgccattagtgctatttt

SEQ ID NO: 4770 - DNA, 33 bp, Homo sapiens
tgcatggccctacctatctcaatttaaatgtca

SEQ ID NO: 4771 - DNA, 51 bp, Homo sapiens
taataatgccaccatttttatttcttacactcctcaacccccacctctgat

SEQ ID NO: 4772 - DNA, 33 bp, Homo sapiens
cctcttataccaaatagccaagttgtaaataca

SEQ ID NO: 4773 - DNA, 51 bp, Homo sapiens
acccaaagctgagaaaaaaggctatgagtatcccaacgctgaatccagtca

SEQ ID NO: 4774 - DNA, 33 bp, Homo sapiens
agaaggtgaaaataaactggtctcttcatgatt

SEQ ID NO: 4775 - DNA, 51 bp, Homo sapiens
ccatgcatatattgctggtttgaaggactttttagacaaaataaaacattc

SEQ ID NO: 4776 - DNA, 33 bp, Homo sapiens
gcacaagctggtataataaattacatatagttg

SEQ ID NO: 4777 - DNA, 51 bp, Homo sapiens
gggattggtttaagtaatgaagtccgcaatcaattttacaagttaaggaca

SEQ ID NO: 4778 - DNA, 33 bp, Homo sapiens
tttctgaagatattgcgacaattaatttttagg

SEQ ID NO: 4779 - DNA, 33 bp, Homo sapiens
taatagatgtaagtcatgaactatggaattgtc

SEQ ID NO: 4780 - DNA, 33 bp, Homo sapiens
tgaagtcaagctgcgtgaatctcaggagaagta

SEQ ID NO: 4781 - DNA, 33 bp, Homo sapiens
atgaggctctgaattaggaaccagatgtggcaa

SEQ ID NO: 4782 - DNA, 33 bp, Homo sapiens
gtaaatcagttttaacgttgctagcctaatgtt

SEQ ID NO: 4783 - DNA, 33 bp, Homo sapiens
aattatgttttctctcgaactttctcaggcacc

SEQ ID NO: 4784 - DNA, 33 bp, Homo sapiens
ttttctctgaaactaagtgacaatgaggcaaat

SEQ ID NO: 4785 - DNA, 33 bp, Homo sapiens
attatcccttgcaaatgaatcagccatgtgact

SEQ ID NO: 4786 - DNA, 33 bp, Homo sapiens
aaagatgggtatttaatcttctgcacgcagata

SEQ ID NO: 4787 - DNA, 33 bp, Homo sapiens
tgtcagaagagattaattcaaacaggaggcagc

SEQ ID NO: 4788 - DNA, 33 bp, Homo sapiens
tcccacctctcaatacgatcacttcactaagtt

SEQ ID NO: 4789 - DNA, 33 bp, Homo sapiens
tttttcatatcacgtagaagttaagaaaaattc

SEQ ID NO: 4790 - DNA, 33 bp, Homo sapiens
ttagtgtgaacttttctacagtattttgcatga

SEQ ID NO: 4791 - DNA, 33 bp, Homo sapiens
aaatgtttgcaatggagaataagaaaggaaaga

SEQ ID NO: 4792 - DNA, 33 bp, Homo sapiens
tagaacaactaactaatgcacaagtcctcattc

SEQ ID NO: 4793 - DNA, 33 bp, Homo sapiens
gaggaacacctgcaaacaataacagcttagtcc

SEQ ID NO: 4794 - DNA, 33 bp, Homo sapiens
caaccagcactttgaatcaacataccatatggc

SEQ ID NO: 4795 - DNA, 33 bp, Homo sapiens
accaattccgaacacagtaatgctaagatctga

SEQ ID NO: 4796 - DNA, 33 bp, Homo sapiens
tcaaatttgagaaatggaagaacaacgaactct

SEQ ID NO: 4797 - DNA, 33 bp, Homo sapiens
agtcataatatttccattgaaactttcctgaat

SEQ ID NO: 4798 - DNA, 33 bp, Homo sapiens
cagttctggatgtcagtagtcggaaatggtttt

SEQ ID NO: 4799 - DNA, 33 bp, Homo sapiens
tttctgttaaagttcatcgtggcaatgtaaatt

SEQ ID NO: 4800 - DNA, 33 bp, Homo sapiens
tattgatcccatttcacagacaaggagagaggt

SEQ ID NO: 4801 - DNA, 33 bp, Homo sapiens
agaagtggttaacagcgagacacaattaatgcc

SEQ ID NO: 4802 - DNA, 33 bp, Homo sapiens
aaccaaagaaatcagcggaagaccataaaaaca

SEQ ID NO: 4803 - DNA, 33 bp, Homo sapiens
ttggcacttagtcatttaagcctacccttgtca

SEQ ID NO: 4804 - DNA, 33 bp, Homo sapiens
gtggcccaaagactgataaggagcaagagatgt

SEQ ID NO: 4805 - DNA, 33 bp, Homo sapiens
atgtgggccaagtccagaggaaaccaccaagca

SEQ ID NO: 4806 - DNA, 51 bp, Homo sapiens
taacattatcctcaatagagcctaaggtatagaatacactcattttctcac

SEQ ID NO: 4807 - DNA, 33 bp, Homo sapiens
ttaaaatctagcaccattaaggaagagaagaaa

SEQ ID NO: 4808 - DNA, 33 bp, Homo sapiens
atgctgatagaattcacgagaaaagaaatttga

SEQ ID NO: 4809 - DNA, 33 bp, Homo sapiens
tgctccaatatagagagtatcttggataatgga

SEQ ID NO: 4810 - DNA, 33 bp, Homo sapiens
aaattggatttgaaaagcttggtaatgcctcat

SEQ ID NO: 4811 - DNA, 33 bp, Homo sapiens
ttacactggacaagcataaactggcacataaga

SEQ ID NO: 4812 - DNA, 33 bp, Homo sapiens
tccactatgttcttgggataatattaaagaaaa

SEQ ID NO: 4813 - DNA, 33 bp, Homo sapiens
acttatcttcctggtaggtctgtccaccaaaag

SEQ ID NO: 4814 - DNA, 33 bp, Homo sapiens
tgcatgctgttttatcgccagatagggaccatg

SEQ ID NO: 4815 - DNA, 33 bp, Homo sapiens
ggatccaaatataaggtagtagtagtgactcag

SEQ ID NO: 4816 - DNA, 33 bp, Homo sapiens
ttcatactttcatagactagaacaggacagaat

SEQ ID NO: 4817 - DNA, 33 bp, Homo sapiens
tgggtgtcttttcacctggctttctggaattcc

SEQ ID NO: 4818 - DNA, 33 bp, Homo sapiens
ggagggtggaaaaaagtcaagacagggtgggcc

SEQ ID NO: 4819 - DNA, 33 bp, Homo sapiens
taggcagcaaggccaatagtgcatgcgttagtc

SEQ ID NO: 4820 - DNA, 33 bp, Homo sapiens
cctgccaacttgattctccacactcactttcac

SEQ ID NO: 4821 - DNA, 33 bp, Homo sapiens
aagaaggtactagctaggtctaagggagagagg

SEQ ID NO: 4822 - DNA, 33 bp, Homo sapiens
tcaattaataagagaagttagagaggccaagag

SEQ ID NO: 4823 - DNA, 33 bp, Homo sapiens
cttggggcctaatgaagtggaacccagtctgtc

SEQ ID NO: 4824 - DNA, 33 bp, Homo sapiens
gtctcctgtctaaaatcagcaaacctgttgaag

SEQ ID NO: 4825 - DNA, 33 bp, Homo sapiens
gtccctgccaaagcactgaatccaaaatcataa

SEQ ID NO: 4826 - DNA, 33 bp, Homo sapiens
gagggaagggggctgatctaatcctttcatcag

SEQ ID NO: 4827 - DNA, 51 bp, Homo sapiens
gacccatgtaccagttttaaaggcatcatctatactttatctacatgaagg

SEQ ID NO: 4828 - DNA, 33 bp, Homo sapiens
tgatagatagacagactgaaaggaatagaaaat

SEQ ID NO: 4829 - DNA, 51 bp, Homo sapiens
aggtaattgttcaatatatatccattaggtcaaatttgctgattatattaa

SEQ ID NO: 4830 - DNA, 33 bp, Homo sapiens
actttctgggctaacatggtcctcacacagggc

SEQ ID NO: 4831 - DNA, 33 bp, Homo sapiens
tgtattttggctcctccatttctgtgactttgg

SEQ ID NO: 4832 - DNA, 33 bp, Homo sapiens
aagatgagactatgcacaggattacatggatca

SEQ ID NO: 4833 - DNA, 33 bp, Homo sapiens
ttattctgcataacactatgtgcatttcttatt

SEQ ID NO: 4834 - DNA, 33 bp, Homo sapiens
ttaacacctttttttcgccaacaatattctcta

SEQ ID NO: 4835 - DNA, 33 bp, Homo sapiens
tatcacaaggcaaccagtgatatatctaatttg

SEQ ID NO: 4836 - DNA, 51 bp, Homo sapiens
ccatatacctgaaagatctgatgaagcccagcgtgtttttaaaagttcgaa

SEQ ID NO: 4837 - DNA, 33 bp, Homo sapiens
ttcacctctaagccaccggtatcatctcttcca

SEQ ID NO: 4838 - DNA, 33 bp, Homo sapiens
aagagagaatcagtaagggatttataggcaaag

SEQ ID NO: 4839 - DNA, 33 bp, Homo sapiens
aggcatttttgcacagtctgaccataagtatac

SEQ ID NO: 4840 - DNA, 33 bp, Homo sapiens
atcttgaagctgattctacctcaaagctgtatg

SEQ ID NO: 4841 - DNA, 51 bp, Homo sapiens
acgctgtggatgcaagagtcaatcagatgagtgtggtctctatccttgtgg

SEQ ID NO: 4842 - DNA, 33 bp, Homo sapiens
ggggtttacctattcttaccattggatggtgct

SEQ ID NO: 4843 - DNA, 33 bp, Homo sapiens
aactgtgtaggaatcagtaaatggagagtgaaa

SEQ ID NO: 4844 - DNA, 33 bp, Homo sapiens
caacagggcgtgttgagattatataaataaatt

SEQ ID NO: 4845 - DNA, 33 bp, Homo sapiens
tagttgcttctttagtgaatgtcaagtggcatg

SEQ ID NO: 4846 - DNA, 33 bp, Homo sapiens
ggtgtagacaacccaacttcctagctggctact

SEQ ID NO: 4847 - DNA, 33 bp, Homo sapiens
cgtactctccggacaatgaaccacaaccaacgc

SEQ ID NO: 4848 - DNA, 33 bp, Homo sapiens
cttcatttttctgtgatgctagatactacctat

SEQ ID NO: 4849 - DNA, 33 bp, Homo sapiens
tcacctgttcatccccgcatatcacatcatctg

SEQ ID NO: 4850 - DNA, 33 bp, Homo sapiens
caaagtgacttacgaatgagattgttcattgtg

SEQ ID NO: 4851 - DNA, 33 bp, Homo sapiens
atatttgcttatattagcattgatatacactag

SEQ ID NO: 4852 - DNA, 33 bp, Homo sapiens
ctctcaaccgtaaaactacacagggcagttgtg

SEQ ID NO: 4853 - DNA, 33 bp, Homo sapiens
ctggaagatctcaaacgagtccgctactcccag

SEQ ID NO: 4854 - DNA, 33 bp, Homo sapiens
tttgcaccactgatactgtaagctctttggggg

SEQ ID NO: 4855 - DNA, 33 bp, Homo sapiens
acctcccactgagctatggaatcggctttcctg

SEQ ID NO: 4856 - DNA, 51 bp, Homo sapiens
cattgtcatcattgatccatccgtctatctccaaaaagttactcagggcct

SEQ ID NO: 4857 - DNA, 33 bp, Homo sapiens
tcatctggacgctgaatggaaagaccatcaaga

SEQ ID NO: 4858 - DNA, 33 bp, Homo sapiens
ttcttctcttcccaaatgtaaccaatctaaact

SEQ ID NO: 4859 - DNA, 33 bp, Homo sapiens
tgaggtaagtgatcacgagtggggcaggggtaa

SEQ ID NO: 4860 - DNA, 33 bp, Homo sapiens
ttttctttgtagaggatcatcctgtggaactga

SEQ ID NO: 4861 - DNA, 33 bp, Homo sapiens
ataaaatgcacagagataagacgaaggttttga

SEQ ID NO: 4862 - DNA, 33 bp, Homo sapiens
gaagatacagaatggattcaaggtgcaaatgga

SEQ ID NO: 4863 - DNA, 33 bp, Homo sapiens
attcagagaaggaaactactatacactgagtaa

SEQ ID NO: 4864 - DNA, 33 bp, Homo sapiens
ggtagtaaataaaacattggacacaacatatgc

SEQ ID NO: 4865 - DNA, 33 bp, Homo sapiens
ttcatcttttctccacggagctctcatttaacc

SEQ ID NO: 4866 - DNA, 33 bp, Homo sapiens
catgaccttgactttgtataatgcctttatgta

SEQ ID NO: 4867 - DNA, 33 bp, Homo sapiens
gagaagtcatgtgacaggttttctgatttttgt

SEQ ID NO: 4868 - DNA, 33 bp, Homo sapiens
agggtggtttattacatggcaatatctagctaa

SEQ ID NO: 4869 - DNA, 33 bp, Homo sapiens
agaaagcttatgttccgatccatcatttaccct

SEQ ID NO: 4870 - DNA, 33 bp, Homo sapiens
gtctacaaaagatgtacgttaggaccaagacag

SEQ ID NO: 4871 - DNA, 33 bp, Homo sapiens
gggcatcattctgtaattccctctcatttgcac

SEQ ID NO: 4872 - DNA, 33 bp, Homo sapiens
gcctgggggagttatggattggagaacttgcca

SEQ ID NO: 4873 - DNA, 33 bp, Homo sapiens
gtgacctaacctgaccgagtatttaatagcctt

SEQ ID NO: 4874 - DNA, 33 bp, Homo sapiens
agtggattgacatgacgagattatgtgatcctg

SEQ ID NO: 4875 - DNA, 33 bp, Homo sapiens
acaccaattcatataatggagtgctagacagct

SEQ ID NO: 4876 - DNA, 33 bp, Homo sapiens
catgaaacagggaatctatgtcagcaatatatg

SEQ ID NO: 4877 - DNA, 33 bp, Homo sapiens
tgcaaccgagagccaatcatgtgcccggtactt

SEQ ID NO: 4878 - DNA, 33 bp, Homo sapiens
gccaaaaggatttctggatgccctggtgtttgc

SEQ ID NO: 4879 - DNA, 33 bp, Homo sapiens
atatcagcaacacaaatgatttactttatgagg

SEQ ID NO: 4880 - DNA, 33 bp, Homo sapiens
gctgcccctcaaccactcctgagagaagacaac

SEQ ID NO: 4881 - DNA, 33 bp, Homo sapiens
aagctttcttactacagtgtaaatgactggcct

SEQ ID NO: 4882 - DNA, 33 bp, Homo sapiens
gactgatgtctccttctctctacaggcatctga

SEQ ID NO: 4883 - DNA, 51 bp, Homo sapiens
ctgccttgcaggactattctattgttaattcagttaggctgctgaattcac

SEQ ID NO: 4884 - DNA, 33 bp, Homo sapiens
acaaccagtcatcttctctccttttgtccacca

SEQ ID NO: 4885 - DNA, 33 bp, Homo sapiens
gtgctattgaacctccgctcatgtacacttact

SEQ ID NO: 4886 - DNA, 33 bp, Homo sapiens
gaaccatcacttctgcgaggtacagcaggattg

SEQ ID NO: 4887 - DNA, 51 bp, Homo sapiens
cactatcaagcagggtttattccaagaatgaaaaagtggcttaatatcagg

SEQ ID NO: 4888 - DNA, 51 bp, Homo sapiens
aaaaatcttctgggtggaataagaacatttaagatggatgaatgtgatatt

SEQ ID NO: 4889 - DNA, 33 bp, Homo sapiens
gagacaccgtgtcagatggaagacagctctgcc

SEQ ID NO: 4890 - DNA, 33 bp, Homo sapiens
gcattaaaccacccccgacactgagtggcttgg

SEQ ID NO: 4891 - DNA, 33 bp, Homo sapiens
accagaacaatgtatatgcgttaaatttaatct

SEQ ID NO: 4892 - DNA, 33 bp, Homo sapiens
ctctcgacctcattaataagcatttcattagaa

SEQ ID NO: 4893 - DNA, 33 bp, Homo sapiens
catgcagtcctggtgtgacaatcaattgaggca

SEQ ID NO: 4894 - DNA, 33 bp, Homo sapiens
ggctactccatggtgctactgggatacacagcc

SEQ ID NO: 4895 - DNA, 33 bp, Homo sapiens
tcctcattggttcaggtcagattttattaccca

SEQ ID NO: 4896 - DNA, 33 bp, Homo sapiens
gcatttaggaattgcaggtgaagtgctgtaaac

SEQ ID NO: 4897 - DNA, 33 bp, Homo sapiens
aattgtttcttttggatgtctgagaatgaaaac

SEQ ID NO: 4898 - DNA, 33 bp, Homo sapiens
gaggagcacaattcaatgattacaccctctgtg

SEQ ID NO: 4899 - DNA, 33 bp, Homo sapiens
acatgtaccttttctggaccaatcagctgctga

SEQ ID NO: 4900 - DNA, 51 bp, Homo sapiens
acctccatgagaggacacttgaagcgtcacactaggaactctcatgggccc

SEQ ID NO: 4901 - DNA, 33 bp, Homo sapiens
tgctgcaggaaagaaatacaagctgctctctca

SEQ ID NO: 4902 - DNA, 33 bp, Homo sapiens
ggagagttcgacctgcgaagagatggcagggtc

SEQ ID NO: 4903 - DNA, 33 bp, Homo sapiens
tgacttgagaatcagatgcagtttgactcatgg

SEQ ID NO: 4904 - DNA, 33 bp, Homo sapiens
gggagaggcgaaccacgaggaaggaccagggct

SEQ ID NO: 4905 - DNA, 33 bp, Homo sapiens
tccagtccttgtctgatggtgtccaacagccca

SEQ ID NO: 4906 - DNA, 33 bp, Homo sapiens
gaagaaggtggttgtaggacatcgctagcaaca

SEQ ID NO: 4907 - DNA, 33 bp, Homo sapiens
tgctagaggagaaaacgagggaggactgtgatc

SEQ ID NO: 4908 - DNA, 33 bp, Homo sapiens
gcagtttattttagaatacttccagcaagcgac

SEQ ID NO: 4909 - DNA, 33 bp, Homo sapiens
gtagttaaacattagccgagctggtaattgaac

SEQ ID NO: 4910 - DNA, 33 bp, Homo sapiens
ctgtcctaaagtaaaggaagtggagagcagttg

SEQ ID NO: 4911 - DNA, 33 bp, Homo sapiens
agatgcagagttgtacggggtggtgataaagac

SEQ ID NO: 4912 - DNA, 33 bp, Homo sapiens
gttaccacagggccgatatggaagatggagaaa

SEQ ID NO: 4913 - DNA, 33 bp, Homo sapiens
actccctccaatggcctccacagggcatccatg

SEQ ID NO: 4914 - DNA, 33 bp, Homo sapiens
cccccaacatgaaagcgacgccagcaattggag

SEQ ID NO: 4915 - DNA, 33 bp, Homo sapiens
ccggtataattccagattagagcctgccaatac

SEQ ID NO: 4916 - DNA, 33 bp, Homo sapiens
tgcagctgtaacacaatgtatttgctcattctc

SEQ ID NO: 4917 - DNA, 33 bp, Homo sapiens
ctgtcccagcaaccaacggatgtaagcccgtag

SEQ ID NO: 4918 - DNA, 51 bp, Homo sapiens
aactaaaaataaaacacataacacatgactaggttacagttacacctacag

SEQ ID NO: 4919 - DNA, 33 bp, Homo sapiens
ttggcagtttcatactgaactaaacataccctt

SEQ ID NO: 4920 - DNA, 33 bp, Homo sapiens
acctagaaatttaatatagtgctctggagtctg

SEQ ID NO: 4921 - DNA, 33 bp, Homo sapiens
aaagagccatggataagtgatgggccacccagg

SEQ ID NO: 4922 - DNA, 33 bp, Homo sapiens
taatgccaatttgcaagctgagagggggatctt

SEQ ID NO: 4923 - DNA, 33 bp, Homo sapiens
tagccagcttctgtgatctcatcatggttaatt

SEQ ID NO: 4924 - DNA, 33 bp, Homo sapiens
ttggagaatcttagtatgagaaacatgttcctt

SEQ ID NO: 4925 - DNA, 33 bp, Homo sapiens
tttgttgaagtaagcataaaatatcacatgagg

SEQ ID NO: 4926 - DNA, 33 bp, Homo sapiens
ggctctgtgggcgctatgacacaggaatggcac

SEQ ID NO: 4927 - DNA, 33 bp, Homo sapiens
gctgggaatcatatcagtgagcattttacaagg

SEQ ID NO: 4928 - DNA, 33 bp, Homo sapiens
ggaggagagaatattcgaaatgatggtttccag

SEQ ID NO: 4929 - DNA, 51 bp, Homo sapiens
ctattatttatgtttcttattgctctctctcctgtggattcaaagaagcac

SEQ ID NO: 4930 - DNA, 33 bp, Homo sapiens
tctgatttgcagtacaggattagtgcccctttt

SEQ ID NO: 4931 - DNA, 33 bp, Homo sapiens
gaccagtaagaagctatgacaaggtgatgatgg

SEQ ID NO: 4932 - DNA, 33 bp, Homo sapiens
aaacgtagattcatggtatttatatctgactga

SEQ ID NO: 4933 - DNA, 33 bp, Homo sapiens
tgtaggacatctaaaagtaacactgatattgac

SEQ ID NO: 4934 - DNA, 33 bp, Homo sapiens
tgtacctcatcagcctgaatactgctttaccct

SEQ ID NO: 4935 - DNA, 51 bp, Homo sapiens
aataacctgtatttttctctcataattctggagtccaaaaacctcatgtca

SEQ ID NO: 4936 - DNA, 33 bp, Homo sapiens
tttgtggcaaaaatacgcatggcaataccatat

SEQ ID NO: 4937 - DNA, 33 bp, Homo sapiens
ctgtcatttatcagcattccatctttgtaagcc

SEQ ID NO: 4938 - DNA, 33 bp, Homo sapiens
atgatgagtgatctagcaaagctggcaattaag

SEQ ID NO: 4939 - DNA, 33 bp, Homo sapiens
ttcctgcacaagcgtatgtcaagcctctgttca

SEQ ID NO: 4940 - DNA, 33 bp, Homo sapiens
ttcagtacttaatctatgttgaattgatattga

SEQ ID NO: 4941 - DNA, 33 bp, Homo sapiens
tggtgttttgaaaatatgcctgtaaattatttg

SEQ ID NO: 4942 - DNA, 33 bp, Homo sapiens
ggtgccccctatgacatacttttgctcctcttg

SEQ ID NO: 4943 - DNA, 33 bp, Homo sapiens
ttcagtcaccttctccgctatgtctgggacaat

SEQ ID NO: 4944 - DNA, 33 bp, Homo sapiens
atgtaggttctgtatcgatgtattcttatatgg

SEQ ID NO: 4945 - DNA, 33 bp, Homo sapiens
tacagaaactctcccagaagtataactaaaaca

SEQ ID NO: 4946 - DNA, 33 bp, Homo sapiens
aatctgatcacatatcgagggaattttggctaa

SEQ ID NO: 4947 - DNA, 33 bp, Homo sapiens
ctcttaaatgagccaagcatacatcactaagta

SEQ ID NO: 4948 - DNA, 33 bp, Homo sapiens
gatggtttctctgacagtgctgaatgcaatccc

SEQ ID NO: 4949 - DNA, 33 bp, Homo sapiens
tgttctacctccccatgatcactgtggtgtacg

SEQ ID NO: 4950 - DNA, 33 bp, Homo sapiens
tgtctcaaatgaaaagtcctaaccagaactgga

SEQ ID NO: 4951 - DNA, 51 bp, Homo sapiens
ctgtttctgaacaaggctggcttacgcaaagaaagagcagtagtgtgggca

SEQ ID NO: 4952 - DNA, 33 bp, Homo sapiens
cctacgaccactaaaacaatctcatgcgcaatt

SEQ ID NO: 4953 - DNA, 33 bp, Homo sapiens
ccccaacctgaagagacacctagatgctgaaac

SEQ ID NO: 4954 - DNA, 33 bp, Homo sapiens
accttaccctaagaaatgctggtgccaagagtc

SEQ ID NO: 4955 - DNA, 33 bp, Homo sapiens
gggaaacacaatttcataagccaaaatcagtag

SEQ ID NO: 4956 - DNA, 33 bp, Homo sapiens
agaatctcctggaggtgaaatacagattgctgg

SEQ ID NO: 4957 - DNA, 51 bp, Homo sapiens
cctgctggatgcctcctgataaatacccgggatgcaccaccttgccctttg

SEQ ID NO: 4958 - DNA, 51 bp, Homo sapiens
gtctttataggcatggttcccttaattgagctctctagggcaggggtcaaa

SEQ ID NO: 4959 - DNA, 51 bp, Homo sapiens
cccaaatgacttttgcatttgggcctcaaagtaacaacaacaacaaaaaaa

SEQ ID NO: 4960 - DNA, 33 bp, Homo sapiens
agtcccaaagtttatatctctctgtgttagaat

SEQ ID NO: 4961 - DNA, 33 bp, Homo sapiens
ctcacttccaacctcatagagaagatatgcagc

SEQ ID NO: 4962 - DNA, 33 bp, Homo sapiens
tccattccaaagccgagcaaaatcaattacgat

SEQ ID NO: 4963 - DNA, 33 bp, Homo sapiens
gttgtgagtttggggatgttagtctttggcatt

SEQ ID NO: 4964 - DNA, 33 bp, Homo sapiens
agcaggtactgtggaagtgaggaagaaagtccc

SEQ ID NO: 4965 - DNA, 33 bp, Homo sapiens
gtgagccttcaacaactaactctctcccaacac

SEQ ID NO: 4966 - DNA, 33 bp, Homo sapiens
acaagtgaaaacagcagagaggaataagccact

SEQ ID NO: 4967 - DNA, 33 bp, Homo sapiens
tacatcttagtccaaatggaatgctgatgccaa

SEQ ID NO: 4968 - DNA, 33 bp, Homo sapiens
aagacagacaagagaatggaataaatggaggaa

SEQ ID NO: 4969 - DNA, 33 bp, Homo sapiens
aaggaaggcatcctacgaagacagtttaaaatt

SEQ ID NO: 4970 - DNA, 33 bp, Homo sapiens
gcacaccaattctaactctaactgcagaattcc

SEQ ID NO: 4971 - DNA, 33 bp, Homo sapiens
tccagagggcctcagagctcaatcccctttaca

SEQ ID NO: 4972 - DNA, 33 bp, Homo sapiens
accatagatagcaaaatgataggcgctcagtaa

SEQ ID NO: 4973 - DNA, 33 bp, Homo sapiens
acttttttttttcagcgactgctatctcttgtg

SEQ ID NO: 4974 - DNA, 33 bp, Homo sapiens
tattgcctgaagggaataaggaaaataaacatg

SEQ ID NO: 4975 - DNA, 33 bp, Homo sapiens
agtagggaacaagaaatgagactactgcagtta

SEQ ID NO: 4976 - DNA, 33 bp, Homo sapiens
ctaaatcagaaaatgccaatagcaacttagcta

SEQ ID NO: 4977 - DNA, 33 bp, Homo sapiens
ttccctgcccttaacctcagttgtacccagggc

SEQ ID NO: 4978 - DNA, 33 bp, Homo sapiens
tgagatccctacatgacaagtggaccagcaagg

SEQ ID NO: 4979 - DNA, 33 bp, Homo sapiens
aagctcccagttaagatctatgctgctagtcct

SEQ ID NO: 4980 - DNA, 33 bp, Homo sapiens
ggaattgaggtacacagcagctaagaaacttgt

SEQ ID NO: 4981 - DNA, 51 bp, Homo sapiens
atcttggctgaaatcaccttcccaactggcctgtctcctccagccttcctc

SEQ ID NO: 4982 - DNA, 33 bp, Homo sapiens
tgtgccatatattccagtaggtgatgcatgaaa

SEQ ID NO: 4983 - DNA, 33 bp, Homo sapiens
ctaaagcaatcactgggatagtatcaattagga

SEQ ID NO: 4984 - DNA, 33 bp, Homo sapiens
ccacgtactgatcacttaacttcaacattatca

SEQ ID NO: 4985 - DNA, 51 bp, Homo sapiens
gctgcctgctggtggaaatctgtacttgcattatactggagaagcccttcc

SEQ ID NO: 4986 - DNA, 51 bp, Homo sapiens
gacacggatagtgccaggaaaatcagtctggaactctaggaagggcttctc

SEQ ID NO: 4987 - DNA, 33 bp, Homo sapiens
ggagaccatagtttgggactctgaacgtgaact

SEQ ID NO: 4988 - DNA, 33 bp, Homo sapiens
agataacatgggccaagttgaaacagtttcctt

SEQ ID NO: 4989 - DNA, 51 bp, Homo sapiens
ataattaaggaacactatgttaggcgatgataacacaccgcctctgggtcc

SEQ ID NO: 4990 - DNA, 51 bp, Homo sapiens
tgccagatggtagggatacagtaaatagggccattgatagttacaatggac

SEQ ID NO: 4991 - DNA, 51 bp, Homo sapiens
attaagcctcaatgggctacttttataatcccatggaaggattaatttaat

SEQ ID NO: 4992 - DNA, 33 bp, Homo sapiens
ggtaagttcatttggcggactgtaatataaaat

SEQ ID NO: 4993 - DNA, 33 bp, Homo sapiens
ttgtggactgatgccattaagttttaccttcag

SEQ ID NO: 4994 - DNA, 33 bp, Homo sapiens
ctgctgagagatccagtcatataagaatgaaga

SEQ ID NO: 4995 - DNA, 33 bp, Homo sapiens
aatacttacctccccagtactcaagtcctacca

SEQ ID NO: 4996 - DNA, 33 bp, Homo sapiens
aggattagggctgaaagtaccaaacctttttta

SEQ ID NO: 4997 - DNA, 33 bp, Homo sapiens
ttgacattttcagcaattggagtatttgttagc

SEQ ID NO: 4998 - DNA, 33 bp, Homo sapiens
taataggtcaaagaaagtattgccatgttgtgt

SEQ ID NO: 4999 - DNA, 33 bp, Homo sapiens
gcttatcactccttcatagagactcagtagtat

SEQ ID NO: 5000 - DNA, 33 bp, Homo sapiens
tcaaattaagtagctatgggcagggtgcaatga

SEQ ID NO: 5001 - DNA, 33 bp, Homo sapiens
tcctggcatcagatcaggatcccactgctgtga

SEQ ID NO: 5002 - DNA, 51 bp, Homo sapiens
gtagatcaataccactctagtattatggcaagagatgcaatcttggtatta

SEQ ID NO: 5003 - DNA, 33 bp, Homo sapiens
cactaccctctccttatcatctattcaacacca

SEQ ID NO: 5004 - DNA, 33 bp, Homo sapiens
aattgcctcacttctatggcaagacgccagcag

SEQ ID NO: 5005 - DNA, 33 bp, Homo sapiens
actagtctcatccacagtagcctttagttttaa

SEQ ID NO: 5006 - DNA, 33 bp, Homo sapiens
cttggactgacaaaattacagtgataggccatg

SEQ ID NO: 5007 - DNA, 33 bp, Homo sapiens
gtaactttgcacttgtgaatccaccagtcttcc

SEQ ID NO: 5008 - DNA, 33 bp, Homo sapiens
gctccaagtacggctctattggcttattggact

SEQ ID NO: 5009 - DNA, 33 bp, Homo sapiens
aggtgttttagaggtagaatcagtgcagcttga

SEQ ID NO: 5010 - DNA, 33 bp, Homo sapiens
aaagattctgcaatgcgcaggagagtcttccag

SEQ ID NO: 5011 - DNA, 33 bp, Homo sapiens
taaagtatttaagatatgtgctttagatatcat

SEQ ID NO: 5012 - DNA, 33 bp, Homo sapiens
aagctcagggggttgcccacatttatttatttt

SEQ ID NO: 5013 - DNA, 33 bp, Homo sapiens
ctgagttgaagagctagagatgggagttagggt

SEQ ID NO: 5014 - DNA, 33 bp, Homo sapiens
tgacagccagaaaggacacataaatggaactca

SEQ ID NO: 5015 - DNA, 51 bp, Homo sapiens
gttttattaaaattactaaagataagtctgcttctagtgaacatttcttca

SEQ ID NO: 5016 - DNA, 33 bp, Homo sapiens
gactgtctgtcttggctacttatttctcttcaa

SEQ ID NO: 5017 - DNA, 33 bp, Homo sapiens
tatccttaaagagtgatgttgccttattctaca

SEQ ID NO: 5018 - DNA, 33 bp, Homo sapiens
ctctgggagacatgaggaacatagaccaaacag

SEQ ID NO: 5019 - DNA, 33 bp, Homo sapiens
ccagcatcgggaactcgcacagcttggtaaatt

SEQ ID NO: 5020 - DNA, 33 bp, Homo sapiens
agtcactcccatgtaagcacaactctcaaaacc

SEQ ID NO: 5021 - DNA, 33 bp, Homo sapiens
ttttgatgtgcaaccctattattaatgactata

SEQ ID NO: 5022 - DNA, 51 bp, Homo sapiens
aatcagcgcaaacgtaaatatcccacattaaacctacttgtcattgtgatc

SEQ ID NO: 5023 - DNA, 33 bp, Homo sapiens
gtttcccttattgcaatgcttaatggtagtgtt

SEQ ID NO: 5024 - DNA, 33 bp, Homo sapiens
ctttaattgctctcactatctgcagcatagaga

SEQ ID NO: 5025 - DNA, 33 bp, Homo sapiens
tattgctcaacgtttatactactattttgatac

SEQ ID NO: 5026 - DNA, 51 bp, Homo sapiens
aaccatgtataccttatgtgaaactgagtgtgtcatctgggtgcagaagaa

SEQ ID NO: 5027 - DNA, 33 bp, Homo sapiens
actcttttgtgtaaagtcaaggaaaaatatatt

SEQ ID NO: 5028 - DNA, 33 bp, Homo sapiens
tttgttgaatctgtacgcttgagaataatcttt

SEQ ID NO: 5029 - DNA, 33 bp, Homo sapiens
cttagaatactcatgggatcataatggctactg

SEQ ID NO: 5030 - DNA, 33 bp, Homo sapiens
accaaaaaggagcaaatgtacaagactaacaac

SEQ ID NO: 5031 - DNA, 33 bp, Homo sapiens
aaggggaagaacccagccgaaccatttccagct

SEQ ID NO: 5032 - DNA, 33 bp, Homo sapiens
tctgtacttccattaatatatctgatcctcaat

SEQ ID NO: 5033 - DNA, 33 bp, Homo sapiens
accaagccatttataaggaaatcacctccatga

SEQ ID NO: 5034 - DNA, 33 bp, Homo sapiens
tattacttaataaatatggtgctcaattccaag

SEQ ID NO: 5035 - DNA, 33 bp, Homo sapiens
aatggaacatatcacatgaaatgaaacagacaa

SEQ ID NO: 5036 - DNA, 33 bp, Homo sapiens
agattgtttgtggttatctgccggctcctgttc

SEQ ID NO: 5037 - DNA, 33 bp, Homo sapiens
tctctagcacttggaggcggtgaagaaatttgc

SEQ ID NO: 5038 - DNA, 33 bp, Homo sapiens
cctattgctttggtgacaaccatgcatactcct

SEQ ID NO: 5039 - DNA, 33 bp, Homo sapiens
acacaggaagtcacaaggggtgtctagacagat

SEQ ID NO: 5040 - DNA, 33 bp, Homo sapiens
tgcggaacttctgatataatgctgagggcgact

SEQ ID NO: 5041 - DNA, 51 bp, Homo sapiens
tttgcccatacaactacttaaagaatagtggagtcacatcatacatgtatg

SEQ ID NO: 5042 - DNA, 33 bp, Homo sapiens
agtttcaaactaaatatcaggtgtgtttataca

SEQ ID NO: 5043 - DNA, 51 bp, Homo sapiens
ttaattatttctggggatcattactgaaacttaaagttccaactcacattc

SEQ ID NO: 5044 - DNA, 33 bp, Homo sapiens
tattgtacataaaacagaaaatgtaattccagt

SEQ ID NO: 5045 - DNA, 33 bp, Homo sapiens
aatgagcagactcaaagaacaaatgaaagaaga

SEQ ID NO: 5046 - DNA, 33 bp, Homo sapiens
taaagaaatgccagtggacagtaaggattctcc

SEQ ID NO: 5047 - DNA, 33 bp, Homo sapiens
cctgactgaagaatgggccaactgtaggcaaat

SEQ ID NO: 5048 - DNA, 51 bp, Homo sapiens
tttatatgtaggtagaaccttattgtaggtaatggtgaaagccagtgagcc

SEQ ID NO: 5049 - DNA, 33 bp, Homo sapiens
atggttcattcaaatcgcacaggtacatttcta

SEQ ID NO: 5050 - DNA, 33 bp, Homo sapiens
gagaaactgccacaggtcagaggagactaagga

SEQ ID NO: 5051 - DNA, 33 bp, Homo sapiens
tacagctctctcttaatgatgaagaagaggggt

SEQ ID NO: 5052 - DNA, 33 bp, Homo sapiens
acttaattccatcggatcaaagtgaactaacca

SEQ ID NO: 5053 - DNA, 33 bp, Homo sapiens
ttaggttataaataaatggcaggtgttttctga

SEQ ID NO: 5054 - DNA, 33 bp, Homo sapiens
ataggtgattgaggtataggtggtctaggatca

SEQ ID NO: 5055 - DNA, 33 bp, Homo sapiens
acactgaactgttctatctcggattaaaacata

SEQ ID NO: 5056 - DNA, 33 bp, Homo sapiens
gcagagcaagagttaattgtatggactgaacta

SEQ ID NO: 5057 - DNA, 33 bp, Homo sapiens
ttgtgagctctggatatactaagtcccatgcca

SEQ ID NO: 5058 - DNA, 33 bp, Homo sapiens
ctcccagaaattataatggaaggaagaaggtat

SEQ ID NO: 5059 - DNA, 33 bp, Homo sapiens
actgttagaccttaaggaatgggtagaactgaa

SEQ ID NO: 5060 - DNA, 33 bp, Homo sapiens
ggagatgccagagacttactttaccaacattcc

SEQ ID NO: 5061 - DNA, 33 bp, Homo sapiens
ttagctttatttccgaggtaatttctgccggaa

SEQ ID NO: 5062 - DNA, 51 bp, Homo sapiens
taaatgagtctcaagagcaattcaaggattataaatggttacataactatg

SEQ ID NO: 5063 - DNA, 51 bp, Homo sapiens
aatatagctctctaggaagaaaggttaatcttatcatgtgaaaaaccatta

SEQ ID NO: 5064 - DNA, 33 bp, Homo sapiens
agttcatactgatataggcaagtctatcttttc

SEQ ID NO: 5065 - DNA, 33 bp, Homo sapiens
gttcttcgaaatttcagatatgaatcctccaat

SEQ ID NO: 5066 - DNA, 33 bp, Homo sapiens
cagaaggactattctctaaaagccctccttgga

SEQ ID NO: 5067 - DNA, 33 bp, Homo sapiens
aggacctgtagagaccgcacaaattctacacta

SEQ ID NO: 5068 - DNA, 33 bp, Homo sapiens
catagaactgaaacacggtgcagaacagaagtt

SEQ ID NO: 5069 - DNA, 51 bp, Homo sapiens
gttgcttgagatgacaagacacctagaggagtgaagattatatgaattagg

SEQ ID NO: 5070 - DNA, 51 bp, Homo sapiens
agccttgtatcaattaaattctgtcgaaagagagaaccctgaggttatctg

SEQ ID NO: 5071 - DNA, 33 bp, Homo sapiens
gctctaggttggcttggaactaacagaaaccca

SEQ ID NO: 5072 - DNA, 33 bp, Homo sapiens
gatcattccagctccatgacttgaacagtgcga

SEQ ID NO: 5073 - DNA, 33 bp, Homo sapiens
agtccatgctaatatgtaaggcctgtgttcact

SEQ ID NO: 5074 - DNA, 33 bp, Homo sapiens
atatatcagtcttagatgaatgcttagattcag

SEQ ID NO: 5075 - DNA, 33 bp, Homo sapiens
tctgtcttgtttcctcgcagaattagatctctt

SEQ ID NO: 5076 - DNA, 51 bp, Homo sapiens
aatatctttgaacaaagaatttacagcaaagaatgatttagagtttaatgt

SEQ ID NO: 5077 - DNA, 33 bp, Homo sapiens
tttttccatctaattatgacctccttcgccact

SEQ ID NO: 5078 - DNA, 33 bp, Homo sapiens
aagcacaacggctatagagagagggctgaactg

SEQ ID NO: 5079 - DNA, 33 bp, Homo sapiens
atttataaactgataatgtccaaacatagtctt

SEQ ID NO: 5080 - DNA, 33 bp, Homo sapiens
ctaactgaacacacgcgatttttcctgcagctt

SEQ ID NO: 5081 - DNA, 33 bp, Homo sapiens
gtcaagaactattcaaggacgtatgatatggtt

SEQ ID NO: 5082 - DNA, 33 bp, Homo sapiens
gcttaaagagaccccaggtaacctcattctgtc

SEQ ID NO: 5083 - DNA, 33 bp, Homo sapiens
aaaagaatggaatgaataaactgtgtgctatgt

SEQ ID NO: 5084 - DNA, 33 bp, Homo sapiens
tcctagtatttgcttatccaacaaagtgactgt

SEQ ID NO: 5085 - DNA, 33 bp, Homo sapiens
gctgtgcacaaggagagagaattctcatcttca

SEQ ID NO: 5086 - DNA, 33 bp, Homo sapiens
atattgagacattcaatccaggaagaaaatagg

SEQ ID NO: 5087 - DNA, 33 bp, Homo sapiens
agatggataattaacctggtaccaaaagtgtgt

SEQ ID NO: 5088 - DNA, 33 bp, Homo sapiens
cagctctaggaggaaagatattcatggcacctc

SEQ ID NO: 5089 - DNA, 33 bp, Homo sapiens
tacacaaacaattggagatgatgtgcctaaatt

SEQ ID NO: 5090 - DNA, 33 bp, Homo sapiens
ttctttcagttcatacgacaaaataactctaca

SEQ ID NO: 5091 - DNA, 33 bp, Homo sapiens
gggaagtgttggtggagagagaatgccctaggc

SEQ ID NO: 5092 - DNA, 33 bp, Homo sapiens
cttctacctttgtttatcatcaacagctatatc

SEQ ID NO: 5093 - DNA, 33 bp, Homo sapiens
agtgcatgacagattatgaaagtgcagaatcaa

SEQ ID NO: 5094 - DNA, 33 bp, Homo sapiens
taaaataaaaataaaatgactcaagtgtacatg

SEQ ID NO: 5095 - DNA, 33 bp, Homo sapiens
gagtaatacaaattaatacagtgccaatagaag

SEQ ID NO: 5096 - DNA, 33 bp, Homo sapiens
tgcctgcaaatcagtcgatatagatgaggtaag

SEQ ID NO: 5097 - DNA, 33 bp, Homo sapiens
tagcatttggacttaatagacacaagtacatat

SEQ ID NO: 5098 - DNA, 33 bp, Homo sapiens
catgctcaaggacagcgaaaatgagggataaga

SEQ ID NO: 5099 - DNA, 51 bp, Homo sapiens
aagtaagaaactcagaaatgacttatgtttgagaaagacaggaaaaagtgc

SEQ ID NO: 5100 - DNA, 33 bp, Homo sapiens
ctcaagcaataccacactgaattaacaaatgaa

SEQ ID NO: 5101 - DNA, 33 bp, Homo sapiens
tatttccttagggtgattatgttgaagaggcag

SEQ ID NO: 5102 - DNA, 33 bp, Homo sapiens
gttctattttaaagactaaacacctgtgttggt

SEQ ID NO: 5103 - DNA, 33 bp, Homo sapiens
aaactcatttgtaccattgaaggaattgttaac

SEQ ID NO: 5104 - DNA, 33 bp, Homo sapiens
tctataggccaagcaatagttccaaagaacact

SEQ ID NO: 5105 - DNA, 33 bp, Homo sapiens
cagtttacaagagaaagtgggaccacctccacc

SEQ ID NO: 5106 - DNA, 33 bp, Homo sapiens
gattctctctttaacccagaaatgctctgtttg

SEQ ID NO: 5107 - DNA, 33 bp, Homo sapiens
ggattaagtgaaagagcctcagttagaaaaata

SEQ ID NO: 5108 - DNA, 33 bp, Homo sapiens
ctctgaaagtttgctgcaaaatcacagacaaga

SEQ ID NO: 5109 - DNA, 33 bp, Homo sapiens
aagctgagatctaaacgcaattttgtctgactc

SEQ ID NO: 5110 - DNA, 33 bp, Homo sapiens
caaaaatcatagtgcatattatcacagtttgtc

SEQ ID NO: 5111 - DNA, 33 bp, Homo sapiens
actgcaacttactctcgagcagagcagaaaaga

SEQ ID NO: 5112 - DNA, 33 bp, Homo sapiens
caatcctttctttgaagagtaggtaaaatgatc

SEQ ID NO: 5113 - DNA, 51 bp, Homo sapiens
atctaagcataacctatgtaagctgtagagtataacgggcactagagtcaa

SEQ ID NO: 5114 - DNA, 51 bp, Homo sapiens
aaggcaacaggaatcgaagaacaactcaaggaaataaattgcctctgtcag

SEQ ID NO: 5115 - DNA, 33 bp, Homo sapiens
gactctcaaaaacaacccagttaaggcaggtgt

SEQ ID NO: 5116 - DNA, 33 bp, Homo sapiens
caaagagctaagatagtatttgcacatcaatag

SEQ ID NO: 5117 - DNA, 33 bp, Homo sapiens
gaaggatttgttccaagggatctatactctggt

SEQ ID NO: 5118 - DNA, 33 bp, Homo sapiens
ggcataaaatgcattctaggaactgtaactcat

SEQ ID NO: 5119 - DNA, 33 bp, Homo sapiens
cacacagtgcacataaggcaatcctatgttttg

SEQ ID NO: 5120 - DNA, 33 bp, Homo sapiens
ccacaactgctttgaaggacataggattaattt

SEQ ID NO: 5121 - DNA, 33 bp, Homo sapiens
gagggatttaatacgatgaagaaagaaataggc

SEQ ID NO: 5122 - DNA, 33 bp, Homo sapiens
tgataatgaggtacccgggccctgatcagacat

SEQ ID NO: 5123 - DNA, 33 bp, Homo sapiens
agtcatgcacacttaatactatttcaaaatata

SEQ ID NO: 5124 - DNA, 33 bp, Homo sapiens
agggttcttataaagataaactcagcacaaatc

SEQ ID NO: 5125 - DNA, 33 bp, Homo sapiens
gaacaatttgcacaaatgccttgaaacaaaaaa

SEQ ID NO: 5126 - DNA, 33 bp, Homo sapiens
cctctctgtggctcaattgggaacactaataag

SEQ ID NO: 5127 - DNA, 33 bp, Homo sapiens
agaataattgcttaacggatgtgggggttccat

SEQ ID NO: 5128 - DNA, 33 bp, Homo sapiens
tatattggtattcagaggacttagacaagaata

SEQ ID NO: 5129 - DNA, 33 bp, Homo sapiens
cccatcatgattaaaaggtgaagcatcttggaa

SEQ ID NO: 5130 - DNA, 33 bp, Homo sapiens
ggcagtgttctgatgttaactcattagagcagt

SEQ ID NO: 5131 - DNA, 33 bp, Homo sapiens
attttaaatctttttcgcacaatttgagaaaga

SEQ ID NO: 5132 - DNA, 33 bp, Homo sapiens
aactattctaatgccacgtaaatctctcctgct

SEQ ID NO: 5133 - DNA, 33 bp, Homo sapiens
gctaattccagctcaactcctgctgctctttta

SEQ ID NO: 5134 - DNA, 33 bp, Homo sapiens
acacccgatccgactaggcgctgcaggagtcca

SEQ ID NO: 5135 - DNA, 33 bp, Homo sapiens
accttgattgtctttatgctacattgacaacat

SEQ ID NO: 5136 - DNA, 33 bp, Homo sapiens
agtcaatttttatggagatcaggcaaacagtat

SEQ ID NO: 5137 - DNA, 33 bp, Homo sapiens
ataactgaggaagaaatctaaaatgtggtgcct

SEQ ID NO: 5138 - DNA, 33 bp, Homo sapiens
acatgggtttaaaatcccagttcatataaggtt

SEQ ID NO: 5139 - DNA, 33 bp, Homo sapiens
tgagttagtgctatcataatccacaatatattg

SEQ ID NO: 5140 - DNA, 33 bp, Homo sapiens
gagcttttaagcaaaatggacccttcgacctaa

SEQ ID NO: 5141 - DNA, 33 bp, Homo sapiens
atctccttcaataaactgggggaattgatatag

SEQ ID NO: 5142 - DNA, 33 bp, Homo sapiens
ctattatgcaactatccaaaagattgaggcaga

SEQ ID NO: 5143 - DNA, 33 bp, Homo sapiens
tgccactgtgctgcaatctggaggacaaaaccc

SEQ ID NO: 5144 - DNA, 33 bp, Homo sapiens
taagttggcaaaaccatgaagttaaggccaggt

SEQ ID NO: 5145 - DNA, 51 bp, Homo sapiens
gcatgactcaagaaaagttaagaacgactgatctaaagaataagactatat

SEQ ID NO: 5146 - DNA, 33 bp, Homo sapiens
tttatgttcgtattcaggaaaggctgactctgg

SEQ ID NO: 5147 - DNA, 33 bp, Homo sapiens
tttattgcttttgccaggataaaagtgaaattt

SEQ ID NO: 5148 - DNA, 33 bp, Homo sapiens
gaaatttttcaacatcgaactaaggctatcttg

SEQ ID NO: 5149 - DNA, 33 bp, Homo sapiens
cttgggttttcctccattgaagatacatatcta

SEQ ID NO: 5150 - DNA, 33 bp, Homo sapiens
cacaatgattcaaatacgccaatttacagaata

SEQ ID NO: 5151 - DNA, 51 bp, Homo sapiens
cagtgggtctttttcttaggccacattcgttaggaatacagttaaggccca

SEQ ID NO: 5152 - DNA, 51 bp, Homo sapiens
ttatccttggctacaaagatcaatagtaaggatgacgccaatttgaggttg

SEQ ID NO: 5153 - DNA, 33 bp, Homo sapiens
gcctggtatttgagtaggctgttatctgagaac

SEQ ID NO: 5154 - DNA, 51 bp, Homo sapiens
cagatgtgagagagtgacagaaaaatgccaggacccaagagactgtagaat

SEQ ID NO: 5155 - DNA, 33 bp, Homo sapiens
tagaaactggagataagtagttaatcaaccttg

SEQ ID NO: 5156 - DNA, 33 bp, Homo sapiens
ctcctacaagcagctaggaaacaggggtaacta

SEQ ID NO: 5157 - DNA, 33 bp, Homo sapiens
agatggaaacagtcctgaatacccaatatgatt

SEQ ID NO: 5158 - DNA, 33 bp, Homo sapiens
taacgtgagtgaaaaatttctgttagcagatat

SEQ ID NO: 5159 - DNA, 33 bp, Homo sapiens
tgaaggcacaagaaccggagtgatggagagagg

SEQ ID NO: 5160 - DNA, 51 bp, Homo sapiens
ataaaagcaatgggagttgatgtaagagaagctagtacataaggcaatgta

SEQ ID NO: 5161 - DNA, 33 bp, Homo sapiens
gtgtaacatatgattgtagtgaagagtgagtct

SEQ ID NO: 5162 - DNA, 51 bp, Homo sapiens
ctagctacctagcagacctttctaatcagtagtatagagatcagtatgcat

SEQ ID NO: 5163 - DNA, 33 bp, Homo sapiens
tgagaacacaaaggtgtaaaagtaaatcatagc

SEQ ID NO: 5164 - DNA, 33 bp, Homo sapiens
atgtaatctgcaagtagaaacaatgtgacctcc

SEQ ID NO: 5165 - DNA, 33 bp, Homo sapiens
cagaaataagactgactgcccacagctatctga

SEQ ID NO: 5166 - DNA, 33 bp, Homo sapiens
acattagcagacacaagatcaacttataaatgt

SEQ ID NO: 5167 - DNA, 33 bp, Homo sapiens
ggaaataaggcaatacgagccagggacaatatt

SEQ ID NO: 5168 - DNA, 33 bp, Homo sapiens
ctaggactttacaagatgcactacttggaaatc

SEQ ID NO: 5169 - DNA, 33 bp, Homo sapiens
cattattcgtttatccgactcaaaagtttcaat

SEQ ID NO: 5170 - DNA, 33 bp, Homo sapiens
cagcctgatggcaatatgaaagaaaaccccatt

SEQ ID NO: 5171 - DNA, 33 bp, Homo sapiens
ttgcctagatggtgtcggaaagagccatgtagg

SEQ ID NO: 5172 - DNA, 33 bp, Homo sapiens
tcatcgagttgctacagattacacattcttctc

SEQ ID NO: 5173 - DNA, 33 bp, Homo sapiens
cagtcactgataaatatggaaatgctcctacaa

SEQ ID NO: 5174 - DNA, 33 bp, Homo sapiens
cagaactactagcttatgagggtaattttagat

SEQ ID NO: 5175 - DNA, 33 bp, Homo sapiens
ttgctgtttccgggaagtatacagcaaatatcg

SEQ ID NO: 5176 - DNA, 33 bp, Homo sapiens
cattcaacataaacgcgcatgcaagtatatgtt

SEQ ID NO: 5177 - DNA, 33 bp, Homo sapiens
catgcattaaaatttgtatcctacaaggcagaa

SEQ ID NO: 5178 - DNA, 33 bp, Homo sapiens
aacttaagaaaacagatctatgaggcaggcact

SEQ ID NO: 5179 - DNA, 33 bp, Homo sapiens
ttttgttcagggtagggaagatcgtgaggatgg

SEQ ID NO: 5180 - DNA, 33 bp, Homo sapiens
gaagagcctagaaaactgaaagaaagccattat

SEQ ID NO: 5181 - DNA, 33 bp, Homo sapiens
aaaaatctccagtgaagtcattccttctcatta

SEQ ID NO: 5182 - DNA, 33 bp, Homo sapiens
gtaatcagaaaggtccgagtgaaagtcacatta

SEQ ID NO: 5183 - DNA, 33 bp, Homo sapiens
aggctaaagggtgaaaccacttcagattgagtg

SEQ ID NO: 5184 - DNA, 33 bp, Homo sapiens
tgccatgtgtagtgaagtgttatatcgatttag

SEQ ID NO: 5185 - DNA, 33 bp, Homo sapiens
ttgattctagccattgtagtgtgtgtaaagtga

SEQ ID NO: 5186 - DNA, 33 bp, Homo sapiens
taatctctggaggtagcaaccattgcttcttcg

SEQ ID NO: 5187 - DNA, 33 bp, Homo sapiens
agagccccacataaaatggataaacctcaggaa

SEQ ID NO: 5188 - DNA, 33 bp, Homo sapiens
caataatattctggaagcagcactgaagagcaa

SEQ ID NO: 5189 - DNA, 33 bp, Homo sapiens
tataaactgctccaagcaataaagtaataatgt

SEQ ID NO: 5190 - DNA, 33 bp, Homo sapiens
atacactacggaatactatgcggccataaagaa

SEQ ID NO: 5191 - DNA, 33 bp, Homo sapiens
tagaactttggaataacgacttgaaataggatt

SEQ ID NO: 5192 - DNA, 33 bp, Homo sapiens
ttcactctaccagaaatgcttcacatatacatc

SEQ ID NO: 5193 - DNA, 33 bp, Homo sapiens
atagaggaagaccttatgatgtggctgtctatg

SEQ ID NO: 5194 - DNA, 33 bp, Homo sapiens
cctcaaaatactgcaatggttttctaatatatc

SEQ ID NO: 5195 - DNA, 33 bp, Homo sapiens
tagatgctagggatacggaaaaaacaggatgaa

SEQ ID NO: 5196 - DNA, 33 bp, Homo sapiens
aaacagcatgatagccgacttgggacttacatc

SEQ ID NO: 5197 - DNA, 33 bp, Homo sapiens
cctccgttgctaatgggatgacagctaatggga

SEQ ID NO: 5198 - DNA, 33 bp, Homo sapiens
aggggaactggaagtcgcagtttaggcctgaaa

SEQ ID NO: 5199 - DNA, 33 bp, Homo sapiens
caggctggagtgcaatgacacagtctcggctca

SEQ ID NO: 5200 - DNA, 33 bp, Homo sapiens
aatcatttggcaagatgaaacatttctctgaga

SEQ ID NO: 5201 - DNA, 33 bp, Homo sapiens
agattaaactcacaaatcaataattacatatta

SEQ ID NO: 5202 - DNA, 33 bp, Homo sapiens
cttatatgcttgcaatcaaaaaagtgcagaatt

SEQ ID NO: 5203 - DNA, 33 bp, Homo sapiens
tacgagttgtcaaaaagactcagaatggaagta

SEQ ID NO: 5204 - DNA, 33 bp, Homo sapiens
gaggccacgtttttaatccagctctgaaagact

SEQ ID NO: 5205 - DNA, 33 bp, Homo sapiens
tcttccccaagatgacgcgtgagatgacacgtg

SEQ ID NO: 5206 - DNA, 33 bp, Homo sapiens
agtcacttcaccagtatgtaaacatgagttata

SEQ ID NO: 5207 - DNA, 33 bp, Homo sapiens
caatccaggtctacaatgtgccagttacaatga

SEQ ID NO: 5208 - DNA, 33 bp, Homo sapiens
gaatgcatattccagagacttatttttgccaaa

SEQ ID NO: 5209 - DNA, 33 bp, Homo sapiens
gcaaatgctaaaattaggatggtaatgagtggc

SEQ ID NO: 5210 - DNA, 33 bp, Homo sapiens
cagtagaattctattagagagatgtaggtacta

SEQ ID NO: 5211 - DNA, 33 bp, Homo sapiens
agagtttgtcacaaaggaaatgttcaatgttgg

SEQ ID NO: 5212 - DNA, 33 bp, Homo sapiens
ctctccagcttcccccgacaaagttccagacct

SEQ ID NO: 5213 - DNA, 33 bp, Homo sapiens
gctttacctctgccacgagtctgggagccataa

SEQ ID NO: 5214 - DNA, 33 bp, Homo sapiens
aaattccccaaacctcgcaggataggctcaata

SEQ ID NO: 5215 - DNA, 33 bp, Homo sapiens
tatcaagctgcaaaactatctacgctcctatgt

SEQ ID NO: 5216 - DNA, 33 bp, Homo sapiens
tcctctcactcttagattcaggaaattattgtc

SEQ ID NO: 5217 - DNA, 33 bp, Homo sapiens
taaaaattgttgacaatgttaaaggtcagcttg

SEQ ID NO: 5218 - DNA, 33 bp, Homo sapiens
ttcagttatcttctactgcctgtattttctact

SEQ ID NO: 5219 - DNA, 33 bp, Homo sapiens
gagctatgaaaaatgtgacacagtacttggtga

SEQ ID NO: 5220 - DNA, 33 bp, Homo sapiens
agaaaaagaatttagagaactgctacaagaaaa

SEQ ID NO: 5221 - DNA, 33 bp, Homo sapiens
acattcaacacacagagagtaagagatcgcaga

SEQ ID NO: 5222 - DNA, 33 bp, Homo sapiens
ggactatgggagaaactagtactgcaatatgtt

SEQ ID NO: 5223 - DNA, 33 bp, Homo sapiens
agagaaatgcaaactaggtttagagaatgctat

SEQ ID NO: 5224 - DNA, 33 bp, Homo sapiens
tattagccaatgatactctagtggcgtctgcta

SEQ ID NO: 5225 - DNA, 33 bp, Homo sapiens
tgttcaaatagagtgaggttgagtaagttaata

SEQ ID NO: 5226 - DNA, 33 bp, Homo sapiens
tgccattaatatcctatgctataacaccactca

SEQ ID NO: 5227 - DNA, 33 bp, Homo sapiens
tatccttttctttctcgactatgcacaaaagaa

SEQ ID NO: 5228 - DNA, 51 bp, Homo sapiens
gttgacaaagtaatgaatataaagatcagacatatgaaaaagtaacaaatt

SEQ ID NO: 5229 - DNA, 33 bp, Homo sapiens
aaatcctgatgttttcgagcaagaacaagtagc

SEQ ID NO: 5230 - DNA, 51 bp, Homo sapiens
gtaaataaaaatcaaatggcataaatgaagaagtgtgattacatcaaatac

SEQ ID NO: 5231 - DNA, 33 bp, Homo sapiens
tgtttagttgctataaggtttgcaaagctacat

SEQ ID NO: 5232 - DNA, 33 bp, Homo sapiens
aatgagaggataaagatactgtggataaaaaac

SEQ ID NO: 5233 - DNA, 33 bp, Homo sapiens
tcatatttgccaagaggacagtaaaatgataaa

SEQ ID NO: 5234 - DNA, 33 bp, Homo sapiens
tactctgtccaattcagtatgtatgtgttcaac

SEQ ID NO: 5235 - DNA, 33 bp, Homo sapiens
accactgcactcaaacgcaggttaacacagtga

SEQ ID NO: 5236 - DNA, 33 bp, Homo sapiens
ttttacagtcctctgagtaactatttatagtca

SEQ ID NO: 5237 - DNA, 33 bp, Homo sapiens
ctgggctcatgattcacaactactctggatttt

SEQ ID NO: 5238 - DNA, 33 bp, Homo sapiens
aagtctcattaaatccgaatctctgggggtgag

SEQ ID NO: 5239 - DNA, 33 bp, Homo sapiens
attgtaagatagaagagaacactgaacacctga

SEQ ID NO: 5240 - DNA, 33 bp, Homo sapiens
agcccacattcgatacgatgatgtgtgtgaatg

SEQ ID NO: 5241 - DNA, 33 bp, Homo sapiens
caagctacacgtgtgagaagcagaattgctcct

SEQ ID NO: 5242 - DNA, 33 bp, Homo sapiens
attaaggtctcaagaatgaaataggctggtaca

SEQ ID NO: 5243 - DNA, 33 bp, Homo sapiens
agctgtgtctaaactctgaaagggagagagcat

SEQ ID NO: 5244 - DNA, 33 bp, Homo sapiens
agggatatcgctcatgtaaattatcctgcttct

SEQ ID NO: 5245 - DNA, 33 bp, Homo sapiens
acacaaaggaagcgtatgtaggttatttctgca

SEQ ID NO: 5246 - DNA, 33 bp, Homo sapiens
caaaataaacatttccgaacattctagatcaat

SEQ ID NO: 5247 - DNA, 33 bp, Homo sapiens
gtaggtaaggaggaaataactgagaaactgagc

SEQ ID NO: 5248 - DNA, 33 bp, Homo sapiens
tagcgatggtaggctatgagcagaaagggagca

SEQ ID NO: 5249 - DNA, 33 bp, Homo sapiens
actgtaaagcctgaaccaaaaaaatgtcagatt

SEQ ID NO: 5250 - DNA, 33 bp, Homo sapiens
agcacccacattttacgctgtcaggaaagctca

SEQ ID NO: 5251 - DNA, 33 bp, Homo sapiens
gccatacagaatgacagtgaggaatattaaaaa

SEQ ID NO: 5252 - DNA, 33 bp, Homo sapiens
gtgcttacatcacgactccagaagctatgggta

SEQ ID NO: 5253 - DNA, 33 bp, Homo sapiens
ctcctctatgaagacagcatttaaaaatcaaac

SEQ ID NO: 5254 - DNA, 33 bp, Homo sapiens
tggagagctgcttgaagtatgtgtaaagacccg

SEQ ID NO: 5255 - DNA, 33 bp, Homo sapiens
cttagttcagcctttggaagaatatgtctcacg

SEQ ID NO: 5256 - DNA, 33 bp, Homo sapiens
agcctgaggactctgagaaatctaaactttatt

SEQ ID NO: 5257 - DNA, 33 bp, Homo sapiens
caccatacaattcctctcatcgtcatcacataa

SEQ ID NO: 5258 - DNA, 33 bp, Homo sapiens
aggtcaagaaaagcaatgactaaggaattatta

SEQ ID NO: 5259 - DNA, 33 bp, Homo sapiens
agagtaaagaaggttagatgtgaaagtgagaga

SEQ ID NO: 5260 - DNA, 51 bp, Homo sapiens
tgtccatggaggcctagaacacaactgatgggaacctcttcacgcttcctg

SEQ ID NO: 5261 - DNA, 33 bp, Homo sapiens
tcattctttgctaccatgagaaggtcccaggta

SEQ ID NO: 5262 - DNA, 33 bp, Homo sapiens
caaactgtaactatagtaggtccatcacccaat

SEQ ID NO: 5263 - DNA, 33 bp, Homo sapiens
caggatgactaaaggcgacttcccaccatgctt

SEQ ID NO: 5264 - DNA, 33 bp, Homo sapiens
aaaagaccatgagttcgctgaataccaagagct

SEQ ID NO: 5265 - DNA, 33 bp, Homo sapiens
cttactggaaaaatcagtatcagaatcttgcca

SEQ ID NO: 5266 - DNA, 33 bp, Homo sapiens
ggctgctttggaaaactgagagaacctcagctg

SEQ ID NO: 5267 - DNA, 33 bp, Homo sapiens
tcattcttttctttgatagtcgattgcttcttc

SEQ ID NO: 5268 - DNA, 33 bp, Homo sapiens
ggtgtgcttgactaagtccctgccaatggcgtg

SEQ ID NO: 5269 - DNA, 33 bp, Homo sapiens
gtgctatgagatcagatggaaaacagatgaaca

SEQ ID NO: 5270 - DNA, 33 bp, Homo sapiens
atttaatttcaaccacgcattttactaatgaaa

SEQ ID NO: 5271 - DNA, 33 bp, Homo sapiens
catccttctggcaaattagttgagactattaaa

SEQ ID NO: 5272 - DNA, 33 bp, Homo sapiens
ttagagttaagcagaatgtgattttgaatctag

SEQ ID NO: 5273 - DNA, 33 bp, Homo sapiens
aatgcatcttccctgagcaaaagagagaggagc

SEQ ID NO: 5274 - DNA, 33 bp, Homo sapiens
gatttatagaattaacgacattgagagacacaa

SEQ ID NO: 5275 - DNA, 33 bp, Homo sapiens
tagatcctgtctgaacgaatgcaatgtttcttt

SEQ ID NO: 5276 - DNA, 33 bp, Homo sapiens
ttcccatacatatgcagacacagaagatttcaa

SEQ ID NO: 5277 - DNA, 33 bp, Homo sapiens
agctggatggtatttataattcacgtttcttaa

SEQ ID NO: 5278 - DNA, 33 bp, Homo sapiens
aatggcacttaagctacctcaattttcaagttt

SEQ ID NO: 5279 - DNA, 33 bp, Homo sapiens
agcacaccgcatatcactctttgcagttatttg

SEQ ID NO: 5280 - DNA, 33 bp, Homo sapiens
agcagtattaggcttatgtcaagattgagagga

SEQ ID NO: 5281 - DNA, 33 bp, Homo sapiens
tgcccttcatctccactgaactactttctggat

SEQ ID NO: 5282 - DNA, 33 bp, Homo sapiens
gatatgcatacggtgatacccactactgcagtg

SEQ ID NO: 5283 - DNA, 33 bp, Homo sapiens
cttcactttgaacttatgaaaggcacctttcta

SEQ ID NO: 5284 - DNA, 33 bp, Homo sapiens
gagagttaaaaggcaagatacagagcaggagtc

SEQ ID NO: 5285 - DNA, 33 bp, Homo sapiens
cccagcaacctaaacagaaatctgaaggaatgg

SEQ ID NO: 5286 - DNA, 33 bp, Homo sapiens
aagtatgtgcattggagaccaagaatgtacaaa

SEQ ID NO: 5287 - DNA, 33 bp, Homo sapiens
aaagaaacttcagacagatctcaggaagctgag

SEQ ID NO: 5288 - DNA, 33 bp, Homo sapiens
ctgtgtggggtctcaatactaacccagaaatac

SEQ ID NO: 5289 - DNA, 33 bp, Homo sapiens
ttgatctaagataagcgaaaaagggttgtgact

SEQ ID NO: 5290 - DNA, 33 bp, Homo sapiens
aaagttgttttcgctcgcattcctttcattact

SEQ ID NO: 5291 - DNA, 33 bp, Homo sapiens
tgactagcccagaaaacagttagaaaatgagta

SEQ ID NO: 5292 - DNA, 33 bp, Homo sapiens
tgaatcctgaacccggtataccattgtgaaaag

SEQ ID NO: 5293 - DNA, 33 bp, Homo sapiens
tatagaggttaattcagcagacaacttatcgtg

SEQ ID NO: 5294 - DNA, 33 bp, Homo sapiens
ccattatggggcagcattgaggattttgagatt

SEQ ID NO: 5295 - DNA, 33 bp, Homo sapiens
aggattttgagattaattcagacgtgtgcttct

SEQ ID NO: 5296 - DNA, 33 bp, Homo sapiens
cttcagtattgctgatgaagtcacagaaacaat

SEQ ID NO: 5297 - DNA, 33 bp, Homo sapiens
tacagagaatcaacaatgtggagacctacgacc

SEQ ID NO: 5298 - DNA, 33 bp, Homo sapiens
gtacttgatttgattctcctctgtggtttcctt

SEQ ID NO: 5299 - DNA, 33 bp, Homo sapiens
aaaaggagggggttgagctggaaatctgtaatt

SEQ ID NO: 5300 - DNA, 33 bp, Homo sapiens
acctggctctgtcagttactagctagggaagct

SEQ ID NO: 5301 - DNA, 33 bp, Homo sapiens
ttccttctcttgagaattggaggattcgaggac

SEQ ID NO: 5302 - DNA, 33 bp, Homo sapiens
tctggcctatgaaaaagaatacatggcctgagg

SEQ ID NO: 5303 - DNA, 33 bp, Homo sapiens
tgaaaagaaagtgttctatgccttcctgttaga

SEQ ID NO: 5304 - DNA, 33 bp, Homo sapiens
tataatacctaagtaatacctagattgttcaaa

SEQ ID NO: 5305 - DNA, 33 bp, Homo sapiens
ggtagtcataggagaatagatgatatagatgat

SEQ ID NO: 5306 - DNA, 33 bp, Homo sapiens
ggaggagtgagaaccatgggcccgactcgaaag

SEQ ID NO: 5307 - DNA, 33 bp, Homo sapiens
caggccccaggaacaatggtctccaggctggct

SEQ ID NO: 5308 - DNA, 33 bp, Homo sapiens
tgttgctggtgagggatggttgccaagtaagac

SEQ ID NO: 5309 - DNA, 33 bp, Homo sapiens
cttgctaccatagctcgcagaagttatggagaa

SEQ ID NO: 5310 - DNA, 33 bp, Homo sapiens
gagggtcagcaggaaaggtcattgaggaccctg

SEQ ID NO: 5311 - DNA, 33 bp, Homo sapiens
gggccaccaggtcaaaggatgcaaaccccgcac

SEQ ID NO: 5312 - DNA, 51 bp, Homo sapiens
gagtctcacagacacaaccgagtagtggagccaagatttgacccaagtctg

SEQ ID NO: 5313 - DNA, 33 bp, Homo sapiens
attaatattccatctcgacttttcctgtgtaac

SEQ ID NO: 5314 - DNA, 33 bp, Homo sapiens
gagttattctgcaaaattaccctcaagatacgt

SEQ ID NO: 5315 - DNA, 33 bp, Homo sapiens
gctaaagagagactcaccatgcggttcacggaa

SEQ ID NO: 5316 - DNA, 33 bp, Homo sapiens
ttacggaaatgacctagaaaagtctggtgacca

SEQ ID NO: 5317 - DNA, 33 bp, Homo sapiens
ttgtggttaggtctccgaatgaacctccttacc

SEQ ID NO: 5318 - DNA, 33 bp, Homo sapiens
ggtgctttaaatgatatgacaaggatgctttct

SEQ ID NO: 5319 - DNA, 33 bp, Homo sapiens
tctgcctttctccctagcctcatccttctgcac

SEQ ID NO: 5320 - DNA, 33 bp, Homo sapiens
ttctcatggtgcttactgactgtccagtgggac

SEQ ID NO: 5321 - DNA, 33 bp, Homo sapiens
acagtaagccatcagctgctgagtagtaataca

SEQ ID NO: 5322 - DNA, 33 bp, Homo sapiens
gctgcaagtcctttgatctagtaattctgcttc

SEQ ID NO: 5323 - DNA, 33 bp, Homo sapiens
aaacacatggacacaagaacatcactaaaagct

SEQ ID NO: 5324 - DNA, 33 bp, Homo sapiens
cccacagcctggggtagggtaagccctgaaacc

SEQ ID NO: 5325 - DNA, 33 bp, Homo sapiens
ttccgcaaactctggccaacagtctaaaatgac

SEQ ID NO: 5326 - DNA, 33 bp, Homo sapiens
tacatctggtaagtgatggattaaggtctcaaa

SEQ ID NO: 5327 - DNA, 33 bp, Homo sapiens
gcataagcaggatggcgactgaagggcagaatt

SEQ ID NO: 5328 - DNA, 33 bp, Homo sapiens
cttagcctgatttactgagatggatgttggaga

SEQ ID NO: 5329 - DNA, 33 bp, Homo sapiens
tgggtgctttgtgagagtacagtctctgcagat

SEQ ID NO: 5330 - DNA, 33 bp, Homo sapiens
gtaaagttagaatgaatcatgtgtgacaaaagg

SEQ ID NO: 5331 - DNA, 33 bp, Homo sapiens
acatcattaaggaaaactaaaatgcagtttatc

SEQ ID NO: 5332 - DNA, 51 bp, Homo sapiens
tccatgttgttctccccactgacatttttcctcactttcttctgtctggaa

SEQ ID NO: 5333 - DNA, 33 bp, Homo sapiens
cagactttctccataaggtagcaatacggctgt

SEQ ID NO: 5334 - DNA, 33 bp, Homo sapiens
ggttgacatctagaagccccctccatctaaaac

SEQ ID NO: 5335 - DNA, 33 bp, Homo sapiens
aatctcatcttcactctatggtcctccaggaat

SEQ ID NO: 5336 - DNA, 33 bp, Homo sapiens
aatctagtaccctaaatacttcattctgcctca

SEQ ID NO: 5337 - DNA, 33 bp, Homo sapiens
cagtggagtgtgtaaatgctcttcagactgtgg

SEQ ID NO: 5338 - DNA, 33 bp, Homo sapiens
tcagatgtttagacccgacctcagcaacagtga

SEQ ID NO: 5339 - DNA, 33 bp, Homo sapiens
gcaggaagttcagaaatcatcaataggtttagg

SEQ ID NO: 5340 - DNA, 33 bp, Homo sapiens
ccactgagtaggaaacgaggatttttccaaagc

SEQ ID NO: 5341 - DNA, 33 bp, Homo sapiens
ttggagtgactacctggcaatataaggagtaga

SEQ ID NO: 5342 - DNA, 33 bp, Homo sapiens
gacctgcaagagcaaagaactaggcaatctgga

SEQ ID NO: 5343 - DNA, 33 bp, Homo sapiens
gccatttctcatttccgatatgccagagctggg

SEQ ID NO: 5344 - DNA, 33 bp, Homo sapiens
atgccctctagtcggctacttgctggctgtctg

SEQ ID NO: 5345 - DNA, 33 bp, Homo sapiens
agacgttaatcattgataccaccagcagcaaat

SEQ ID NO: 5346 - DNA, 33 bp, Homo sapiens
cttgaaaaacaataaatgaagcctttggtgctg

SEQ ID NO: 5347 - DNA, 33 bp, Homo sapiens
aaggcagagaaaataaggtgagcaaagacagtg

SEQ ID NO: 5348 - DNA, 33 bp, Homo sapiens
gagcataaggacgaccgctggattgaattcgga

SEQ ID NO: 5349 - DNA, 33 bp, Homo sapiens
tccatgtaaatgatgctcctctaccctcaagaa

SEQ ID NO: 5350 - DNA, 33 bp, Homo sapiens
ctgacatttatgaccatatttttgcttttgact

SEQ ID NO: 5351 - DNA, 33 bp, Homo sapiens
agctaaacaaacaaacgagagatccacaggttc

SEQ ID NO: 5352 - DNA, 33 bp, Homo sapiens
caggaaaacaaacctatagtaaatgtgttagca

SEQ ID NO: 5353 - DNA, 33 bp, Homo sapiens
atatattttcaaagtagataaaggagaggactt

SEQ ID NO: 5354 - DNA, 33 bp, Homo sapiens
taagatgtttggagtcgccaagaaacaaagaaa

SEQ ID NO: 5355 - DNA, 33 bp, Homo sapiens
agtaaaaattcaacattaaagttttggtaacat

SEQ ID NO: 5356 - DNA, 33 bp, Homo sapiens
gtaacttaacaattgataacataacctgtatgt

SEQ ID NO: 5357 - DNA, 33 bp, Homo sapiens
acttttagccaaggcatattctctgggctctca

SEQ ID NO: 5358 - DNA, 33 bp, Homo sapiens
aggatgattgaattgatgtgaatctggagaaag

SEQ ID NO: 5359 - DNA, 33 bp, Homo sapiens
tacttaaccagttagatgaggtagtgtgaatat

SEQ ID NO: 5360 - DNA, 33 bp, Homo sapiens
atcagagctttgaacatatgatccattggtccc

SEQ ID NO: 5361 - DNA, 33 bp, Homo sapiens
taaatgatgctccttatattgtaaaaagattac

SEQ ID NO: 5362 - DNA, 51 bp, Homo sapiens
ttattcacatattcattcagttgactaacagttactgaatgcttacgatgt

SEQ ID NO: 5363 - DNA, 33 bp, Homo sapiens
cttctaaatgcctttgtactatcttttgagttg

SEQ ID NO: 5364 - DNA, 33 bp, Homo sapiens
caggaaattccatatagtaaataacttgcattt

SEQ ID NO: 5365 - DNA, 33 bp, Homo sapiens
ctacaatgccaccttagagaaagattccattat

SEQ ID NO: 5366 - DNA, 33 bp, Homo sapiens
tttgagaatctttcagtacagaggtatagcaaa

SEQ ID NO: 5367 - DNA, 33 bp, Homo sapiens
agttgaccatgttgaactatccaggagccaaat

SEQ ID NO: 5368 - DNA, 33 bp, Homo sapiens
gtaaattcagttatcatgtggcaacttaaaata

SEQ ID NO: 5369 - DNA, 33 bp, Homo sapiens
agtggtttattacttatcgataggcagcaaagg

SEQ ID NO: 5370 - DNA, 33 bp, Homo sapiens
ccttttctgatatttatcacggctttcttttgg

SEQ ID NO: 5371 - DNA, 33 bp, Homo sapiens
attttgatttctcaccgaatacaacctcttgtc

SEQ ID NO: 5372 - DNA, 33 bp, Homo sapiens
ccttgccaaaaagccatattaatcttagacctt

SEQ ID NO: 5373 - DNA, 33 bp, Homo sapiens
atctctgtatagatgatgtagttttctgaatgc

SEQ ID NO: 5374 - DNA, 33 bp, Homo sapiens
tgtatgtggcatgaaatagaggtccaactttat

SEQ ID NO: 5375 - DNA, 33 bp, Homo sapiens
aggcccatgaagccacgctaaaaatagtaacaa

SEQ ID NO: 5376 - DNA, 33 bp, Homo sapiens
tgatctttattgcaaatggcactcactctatca

SEQ ID NO: 5377 - DNA, 33 bp, Homo sapiens
tgtttctcatctcttgcaattctgggtctttca

SEQ ID NO: 5378 - DNA, 33 bp, Homo sapiens
gcttggtgtaccctcagacagctcctgagcatc

SEQ ID NO: 5379 - DNA, 33 bp, Homo sapiens
ctgcgtatctttttaggatggaacagaattctt

SEQ ID NO: 5380 - DNA, 33 bp, Homo sapiens
ttttctatgaagctaatattttccagtttatat

SEQ ID NO: 5381 - DNA, 51 bp, Homo sapiens
atgccaagtcaattctttctaggtcgggtccaaacaatactatggagtgcc

SEQ ID NO: 5382 - DNA, 51 bp, Homo sapiens
atgtgtttacatacatttagttgaagtctagcaacatatctaagaactagt

SEQ ID NO: 5383 - DNA, 51 bp, Homo sapiens
gagcatatatcagcaaataaacaaatagtatgtcaggtgataataagtgct

SEQ ID NO: 5384 - DNA, 33 bp, Homo sapiens
gaaaactagattaaaagtgccatgaggatttag

SEQ ID NO: 5385 - DNA, 33 bp, Homo sapiens
aatacattactcacaagttacagaaagcatcta

SEQ ID NO: 5386 - DNA, 33 bp, Homo sapiens
cgtgaacgattcaatagaattttgaggatgtag

SEQ ID NO: 5387 - DNA, 33 bp, Homo sapiens
ttcccagttctatgcagactataattatgtata

SEQ ID NO: 5388 - DNA, 33 bp, Homo sapiens
tcccgtgtgatatagtcaacgttgaataacacc

SEQ ID NO: 5389 - DNA, 33 bp, Homo sapiens
tccagctgaggatacctgagaatcttcacgaac

SEQ ID NO: 5390 - DNA, 33 bp, Homo sapiens
tgcatcaaagaagctcgacactgaagagtatac

SEQ ID NO: 5391 - DNA, 33 bp, Homo sapiens
caatgtatccaaaatatgggtctatctgtgctt

SEQ ID NO: 5392 - DNA, 33 bp, Homo sapiens
atgataagaataaggatgaaacacacatacctt

SEQ ID NO: 5393 - DNA, 33 bp, Homo sapiens
caggagaaatgttggccattcaaggctcttctg

SEQ ID NO: 5394 - DNA, 33 bp, Homo sapiens
gccagaataaagtcagtttgtgaggtaaaaaga

SEQ ID NO: 5395 - DNA, 33 bp, Homo sapiens
tatttccacagttagctctgctctgatttggga

SEQ ID NO: 5396 - DNA, 33 bp, Homo sapiens
tgcttttctcctaaattagcattcaccatgatg

SEQ ID NO: 5397 - DNA, 33 bp, Homo sapiens
ttccacatttttaacattaagcccattttatgc

SEQ ID NO: 5398 - DNA, 33 bp, Homo sapiens
attactgacaaatcgagacgtgctgctataaga

SEQ ID NO: 5399 - DNA, 33 bp, Homo sapiens
gcattgtcttagaaacgggaaatcgctggtgca

SEQ ID NO: 5400 - DNA, 33 bp, Homo sapiens
tcctgatggcaggtcaggttcttactcctccag

SEQ ID NO: 5401 - DNA, 33 bp, Homo sapiens
ccaggggtgaccaccatggattccttcctcaga

SEQ ID NO: 5402 - DNA, 33 bp, Homo sapiens
ttctcccaagagactaggttctgtagaggcaga

SEQ ID NO: 5403 - DNA, 33 bp, Homo sapiens
ttgctctgcataaagatagtagctatatacagt

SEQ ID NO: 5404 - DNA, 51 bp, Homo sapiens
cacaacgtaacaggatgtgaattactctctaagtaccattctatatggcat

SEQ ID NO: 5405 - DNA, 33 bp, Homo sapiens
tgtgtgtaattttacatgagtggattgctatca

SEQ ID NO: 5406 - DNA, 33 bp, Homo sapiens
tccccatgtacggagatgaaagatagtaagaaa

SEQ ID NO: 5407 - DNA, 33 bp, Homo sapiens
ctatgatgcgtctgctgagaagtgaacatgtgc

SEQ ID NO: 5408 - DNA, 33 bp, Homo sapiens
ggtcaaatgaggattcgaatttgtcaactttta

SEQ ID NO: 5409 - DNA, 33 bp, Homo sapiens
tcaaggagaacgttgatgggatgagtagaggaa

SEQ ID NO: 5410 - DNA, 33 bp, Homo sapiens
tttttctacctgctcacgtagtacaatccctgc

SEQ ID NO: 5411 - DNA, 33 bp, Homo sapiens
tcccatcctcatccctgaatagaagtggtagcc

SEQ ID NO: 5412 - DNA, 33 bp, Homo sapiens
ttactgtgcaccagaatgtactccttctgtcta

SEQ ID NO: 5413 - DNA, 33 bp, Homo sapiens
tcctatttactcaatggaaatttttcaagataa

SEQ ID NO: 5414 - DNA, 33 bp, Homo sapiens
ctgctcttcaggatgatgcctggtgtgacttga

SEQ ID NO: 5415 - DNA, 33 bp, Homo sapiens
gagtccatgtgtgtgaggtagtcaagatcgtag

SEQ ID NO: 5416 - DNA, 33 bp, Homo sapiens
atcatagcccactgtatggagacacacattgtg

SEQ ID NO: 5417 - DNA, 33 bp, Homo sapiens
ggagcagcaaatggaatgtagttcgaagggacg

SEQ ID NO: 5418 - DNA, 33 bp, Homo sapiens
gacaccagcacttgaatgctctgcggagatttt

SEQ ID NO: 5419 - DNA, 33 bp, Homo sapiens
tctcgccctgtcttcatgacatcttctcagacc

SEQ ID NO: 5420 - DNA, 33 bp, Homo sapiens
gtcacagcagccatacggaatgaagatgcccct

SEQ ID NO: 5421 - DNA, 33 bp, Homo sapiens
tctcacggccccttccgaaagctaggtggcagc

SEQ ID NO: 5422 - DNA, 33 bp, Homo sapiens
gtttctcatccaagagtaggcgagcatgcaagg

SEQ ID NO: 5423 - DNA, 33 bp, Homo sapiens
aattgcaccgtaacaattaaaatatccttaatc

SEQ ID NO: 5424 - DNA, 33 bp, Homo sapiens
atgtgctggtgggcaggaaggactgaacccagt

SEQ ID NO: 5425 - DNA, 33 bp, Homo sapiens
agccctcattgtgggctctcacgtcactccagg

SEQ ID NO: 5426 - DNA, 33 bp, Homo sapiens
tggtggaaatggtcaagttctgtcatcagaaaa

SEQ ID NO: 5427 - DNA, 33 bp, Homo sapiens
gaaaaatgcagacaaatcctattaaccgctcct

SEQ ID NO: 5428 - DNA, 33 bp, Homo sapiens
tgttctatggactgattaccaatgagagttgtt

SEQ ID NO: 5429 - DNA, 33 bp, Homo sapiens
ttctgcagtgagggaccagcattagcaaaggcc

SEQ ID NO: 5430 - DNA, 33 bp, Homo sapiens
tgcccctgataccagaccatgtgagaaatattg

SEQ ID NO: 5431 - DNA, 33 bp, Homo sapiens
taggctgacaccttcatcacggactggtgccag

SEQ ID NO: 5432 - DNA, 33 bp, Homo sapiens
cataaaaatgggcctagtaatgtctatcttgca

SEQ ID NO: 5433 - DNA, 33 bp, Homo sapiens
cttggtagcacaagggtcaatctgctccaacac

SEQ ID NO: 5434 - DNA, 33 bp, Homo sapiens
tgcgattgtttttgattaaggcagcaaggacat

SEQ ID NO: 5435 - DNA, 33 bp, Homo sapiens
atggcctctgacttgataccttctctttgttca

SEQ ID NO: 5436 - DNA, 33 bp, Homo sapiens
ctgctcgtgtgcaggctctattgtcccatcaga

SEQ ID NO: 5437 - DNA, 33 bp, Homo sapiens
ttaatagaggtcttacgaggatacagtaaatga

SEQ ID NO: 5438 - DNA, 33 bp, Homo sapiens
gcaattgtaaatacgatggtaaagccagccctc

SEQ ID NO: 5439 - DNA, 33 bp, Homo sapiens
tggttcagaatgtggagtaagacatggagtgcc

SEQ ID NO: 5440 - DNA, 33 bp, Homo sapiens
ggtcaaaggcgctacaggaaatattaaaataat

SEQ ID NO: 5441 - DNA, 33 bp, Homo sapiens
acttggtttgcagaaaggaatcatgattttgcc

SEQ ID NO: 5442 - DNA, 33 bp, Homo sapiens
ctggttccaccattgcgctcaacagaaggaaac

SEQ ID NO: 5443 - DNA, 33 bp, Homo sapiens
tgtaacaagatgaagagaagttcatgctcttgg

SEQ ID NO: 5444 - DNA, 33 bp, Homo sapiens
attttatataagtggattcatctggtgcatatt

SEQ ID NO: 5445 - DNA, 33 bp, Homo sapiens
gaaatgtgaaaggaacgaaaaggtggccatgtg

SEQ ID NO: 5446 - DNA, 33 bp, Homo sapiens
cctctaatgcatccccgctctgaaggggagact

SEQ ID NO: 5447 - DNA, 33 bp, Homo sapiens
gcttgacacactgtattataaatccccgttttt

SEQ ID NO: 5448 - DNA, 33 bp, Homo sapiens
aatcctgtttctactgtaaggcttgacacactg

SEQ ID NO: 5449 - DNA, 33 bp, Homo sapiens
ttcttcctgatgcaatcaaagttgtttgaaatt

SEQ ID NO: 5450 - DNA, 33 bp, Homo sapiens
tggcactggccctggagtatcttcagaggtacc

SEQ ID NO: 5451 - DNA, 33 bp, Homo sapiens
tcactttcaatttccatgaggagggtgcattag

SEQ ID NO: 5452 - DNA, 33 bp, Homo sapiens
ggtctgtgccatctgcgaagtgctttgacattt

SEQ ID NO: 5453 - DNA, 33 bp, Homo sapiens
ggatacgtctcacagattatatattgcatgtca

SEQ ID NO: 5454 - DNA, 33 bp, Homo sapiens
gcctgactgctgaggatggccgagattttcagg

SEQ ID NO: 5455 - DNA, 33 bp, Homo sapiens
aaccgtcagtgaaatatctaagtcgaaggaact

SEQ ID NO: 5456 - DNA, 33 bp, Homo sapiens
gaactccctgcggtccgatgatgcacccagaca

SEQ ID NO: 5457 - DNA, 33 bp, Homo sapiens
cagaaaaggtttgccccaaagaggtgtggccca

SEQ ID NO: 5458 - DNA, 33 bp, Homo sapiens
ttactgttgaggccaaggaattttaactcctaa

SEQ ID NO: 5459 - DNA, 33 bp, Homo sapiens
acgagagtccagttagcaggtatgtgttaccca

SEQ ID NO: 5460 - DNA, 33 bp, Homo sapiens
ctgggatttcgagtgcgagttggtttcaggtcc

SEQ ID NO: 5461 - DNA, 33 bp, Homo sapiens
tgggaggttgttttgctatgagcatggctgtca

SEQ ID NO: 5462 - DNA, 33 bp, Homo sapiens
tgggtggctaagcctatcaacagacttcctcca

SEQ ID NO: 5463 - DNA, 33 bp, Homo sapiens
tgggttttaagagttatagagacattttgctaa

SEQ ID NO: 5464 - DNA, 33 bp, Homo sapiens
cagggggctcaaccacgccatccaaaagcacat

SEQ ID NO: 5465 - DNA, 33 bp, Homo sapiens
gggaaaggcccagacattgaggctcagctgagc

SEQ ID NO: 5466 - DNA, 33 bp, Homo sapiens
gtgatttataaagtaagccttctgctgcctctg

SEQ ID NO: 5467 - DNA, 33 bp, Homo sapiens
cactcagcacactcaatcctgggcaatctctct

SEQ ID NO: 5468 - DNA, 33 bp, Homo sapiens
tggatgactgaatggcggacagcaacttctacc

SEQ ID NO: 5469 - DNA, 33 bp, Homo sapiens
tggtttccctggcaactagctctcatcctactc

SEQ ID NO: 5470 - DNA, 33 bp, Homo sapiens
cgcattctgtctgtgataccgttactcccatgg

SEQ ID NO: 5471 - DNA, 33 bp, Homo sapiens
caatcccttgaacagtgacgaagcacctaccat

SEQ ID NO: 5472 - DNA, 33 bp, Homo sapiens
acattctcagaaatacgacttacctaaacagac

SEQ ID NO: 5473 - DNA, 33 bp, Homo sapiens
taccacccactgctccgcaaccttccaaaaccc

SEQ ID NO: 5474 - DNA, 33 bp, Homo sapiens
ctggtgggaatgacaggaaatcaggaggccagg

SEQ ID NO: 5475 - DNA, 33 bp, Homo sapiens
aggtcacactggatgatgtaaactaaaaattaa

SEQ ID NO: 5476 - DNA, 33 bp, Homo sapiens
agccccccaagtcctctagttgcctgtgaagga

SEQ ID NO: 5477 - DNA, 33 bp, Homo sapiens
tcggctaaaccaacctgagcaagcgtgggaagg

SEQ ID NO: 5478 - DNA, 33 bp, Homo sapiens
tcaggagattctaggctccaaaagtggatgtgt

SEQ ID NO: 5479 - DNA, 33 bp, Homo sapiens
aggccctctccaatcatctcacttgaccttgtg

SEQ ID NO: 5480 - DNA, 33 bp, Homo sapiens
cagaccagacccccacggcaccacaggatgccc

SEQ ID NO: 5481 - DNA, 33 bp, Homo sapiens
aaaccaccaagtatgggagagatcagttatgac

SEQ ID NO: 5482 - DNA, 33 bp, Homo sapiens
aggcagcatgttcttagcaacagtccttgccct

SEQ ID NO: 5483 - DNA, 33 bp, Homo sapiens
tttgctgtgtggaagctctttagtttagatccc

SEQ ID NO: 5484 - DNA, 33 bp, Homo sapiens
actagaaagcatttgatatcatccgtcttccac

SEQ ID NO: 5485 - DNA, 33 bp, Homo sapiens
atagacagtccagatcgccctaatcggtggggt

SEQ ID NO: 5486 - DNA, 33 bp, Homo sapiens
cttctgtagtttgctcgcaggtaacatcttgag

SEQ ID NO: 5487 - DNA, 33 bp, Homo sapiens
catcacaccctgatgatgctctatgctggatca

SEQ ID NO: 5488 - DNA, 33 bp, Homo sapiens
tgttcagatggcttgatgaaaatttcaggagca

SEQ ID NO: 5489 - DNA, 33 bp, Homo sapiens
aggtgctaacacaatatatgactaatgatgagg

SEQ ID NO: 5490 - DNA, 33 bp, Homo sapiens
ggaacttatccaaactcacctgatcagaattac

SEQ ID NO: 5491 - DNA, 33 bp, Homo sapiens
tttcactgactatgtatatgccaggcctagtct

SEQ ID NO: 5492 - DNA, 33 bp, Homo sapiens
tacctggactattgcattagccttctaataata

SEQ ID NO: 5493 - DNA, 33 bp, Homo sapiens
tctagcagaagagtgatggaaaggagtctaata

SEQ ID NO: 5494 - DNA, 33 bp, Homo sapiens
ttagttcaccaggagggaataatagtttgaaaa

SEQ ID NO: 5495 - DNA, 33 bp, Homo sapiens
gttggtctctgttgaagatggcttctcaccaag

SEQ ID NO: 5496 - DNA, 33 bp, Homo sapiens
caaaacattttaataagaggagggatgtcacgg

SEQ ID NO: 5497 - DNA, 33 bp, Homo sapiens
ataataataatgctaagaatgatgataatagcc

SEQ ID NO: 5498 - DNA, 33 bp, Homo sapiens
taaacagaggttctgaggagttaaataacttgt

SEQ ID NO: 5499 - DNA, 33 bp, Homo sapiens
gattatcacactcatgcatctgtttgttggcaa

SEQ ID NO: 5500 - DNA, 33 bp, Homo sapiens
caacaaaagaggctcagtctcaggccagctgca

SEQ ID NO: 5501 - DNA, 33 bp, Homo sapiens
taaatagagtaactgatgctttttccaacattt

SEQ ID NO: 5502 - DNA, 51 bp, Homo sapiens
accagtgtttggagaacctgatccatgatgatagtttataacagaatagta

SEQ ID NO: 5503 - DNA, 33 bp, Homo sapiens
ctgtcagtgatccttagcaggtaagacaaattc

SEQ ID NO: 5504 - DNA, 33 bp, Homo sapiens
tttatctgggaacaaagggtggtcctgaggtca

SEQ ID NO: 5505 - DNA, 33 bp, Homo sapiens
gttttagctgatttatgagaccccattccctca

SEQ ID NO: 5506 - DNA, 33 bp, Homo sapiens
aaatggtagaattatcgaaatgtggtgcctact

SEQ ID NO: 5507 - DNA, 33 bp, Homo sapiens
tatatcagttggattggacttgcattcagtgat

SEQ ID NO: 5508 - DNA, 33 bp, Homo sapiens
tataaattgggagaaattaagagtgacatctat

SEQ ID NO: 5509 - DNA, 33 bp, Homo sapiens
gaacaagatatctgcaggttttctgttcctgag

SEQ ID NO: 5510 - DNA, 33 bp, Homo sapiens
cttagagatcttcaaggaacatttagagggaaa

SEQ ID NO: 5511 - DNA, 33 bp, Homo sapiens
tggatgtgaacagtctgaagtcagttagggccg

SEQ ID NO: 5512 - DNA, 33 bp, Homo sapiens
cattcatccataaaaatctcatacacaaatatt

SEQ ID NO: 5513 - DNA, 33 bp, Homo sapiens
tgtcagccactatcacgggaacttgaagcataa

SEQ ID NO: 5514 - DNA, 33 bp, Homo sapiens
tgaacaagaagtcactgaagagtagtcaggaaa

SEQ ID NO: 5515 - DNA, 33 bp, Homo sapiens
ttccttaacaatcatctctttaccaaaggctat

SEQ ID NO: 5516 - DNA, 33 bp, Homo sapiens
cattgaagctggaggtgaaaatagctttttgtt

SEQ ID NO: 5517 - DNA, 33 bp, Homo sapiens
gcatgttcctctgtcctctgggtttcctgccaa

SEQ ID NO: 5518 - DNA, 33 bp, Homo sapiens
aaggaactaatttcagtaactaccagtctctga

SEQ ID NO: 5519 - DNA, 33 bp, Homo sapiens
taccgctcttccaaaggaaatctctgtccacaa

SEQ ID NO: 5520 - DNA, 33 bp, Homo sapiens
cgtagggttcgcattataaatgtctatggatct

SEQ ID NO: 5521 - DNA, 33 bp, Homo sapiens
ttttgctaattacagatggtggttaataacaac

SEQ ID NO: 5522 - DNA, 33 bp, Homo sapiens
catttaatttcaaaactggtgattcattaagat

SEQ ID NO: 5523 - DNA, 51 bp, Homo sapiens
tatgcaatgcagaattcctggaactgaaagaaatggtagctaggaataatc

SEQ ID NO: 5524 - DNA, 33 bp, Homo sapiens
tttgtagcagagatgtgaagatttagagatatt

SEQ ID NO: 5525 - DNA, 33 bp, Homo sapiens
aatagtctaagatcaatggtttgagccagactg

SEQ ID NO: 5526 - DNA, 33 bp, Homo sapiens
aattcaaatgtggatatacctaaacctaaacct

SEQ ID NO: 5527 - DNA, 33 bp, Homo sapiens
ctagtacgtgttgaaattggaattcaaatgtgg

SEQ ID NO: 5528 - DNA, 33 bp, Homo sapiens
gaattaacagagacaatgggtgactaacatgtc

SEQ ID NO: 5529 - DNA, 33 bp, Homo sapiens
ctaccagacttccatcgaaacaccttagaattt

SEQ ID NO: 5530 - DNA, 33 bp, Homo sapiens
ttacattacataaaactgtctgctagcagaccc

SEQ ID NO: 5531 - DNA, 33 bp, Homo sapiens
ttttcaaagagtaaggcaacatggttaggccta

SEQ ID NO: 5532 - DNA, 33 bp, Homo sapiens
gacaaacaatatggcaggatttctccgactcaa

SEQ ID NO: 5533 - DNA, 33 bp, Homo sapiens
ccttttgtcatcttgatctggcttagctctcca

SEQ ID NO: 5534 - DNA, 33 bp, Homo sapiens
ggaggcctcaatgaaatccactgccctatggga

SEQ ID NO: 5535 - DNA, 33 bp, Homo sapiens
agactgcattatttcttacctgatcttcagcct

SEQ ID NO: 5536 - DNA, 33 bp, Homo sapiens
agattataggctttcatcactaggaattgtcgg

SEQ ID NO: 5537 - DNA, 51 bp, Homo sapiens
gatgggatggaacatatttaatgaaccagaatagttgttgtctttattggt

SEQ ID NO: 5538 - DNA, 33 bp, Homo sapiens
tttatttgctataaaattgacaagaattatgat

SEQ ID NO: 5539 - DNA, 51 bp, Homo sapiens
agggatgggagtagaggtggcaatatagaagtagcccaagggagatctctg

SEQ ID NO: 5540 - DNA, 33 bp, Homo sapiens
tggatataaaaagctcgaggaataaatgctcgg

SEQ ID NO: 5541 - DNA, 33 bp, Homo sapiens
acattcttttaaacactgccttagaggttgccc

SEQ ID NO: 5542 - DNA, 33 bp, Homo sapiens
cttagaagaagagcaatgccctctaatttaaat

SEQ ID NO: 5543 - DNA, 33 bp, Homo sapiens
ttggctagactcaacatggaaacatttttaaaa

SEQ ID NO: 5544 - DNA, 51 bp, Homo sapiens
aaacaccatcatgtcaggggttaacgcttcaacacagaaatgtcaggggac

SEQ ID NO: 5545 - DNA, 33 bp, Homo sapiens
gtgcatcttatccctggatctgtttcaacatca

SEQ ID NO: 5546 - DNA, 33 bp, Homo sapiens
tttagagcttcagccagtatcttgctcctgagt

SEQ ID NO: 5547 - DNA, 33 bp, Homo sapiens
aagtaaggaaaccgtacggctggaggctgccat

SEQ ID NO: 5548 - DNA, 33 bp, Homo sapiens
ccacagaagtatctcatccattactgttaatgc

SEQ ID NO: 5549 - DNA, 33 bp, Homo sapiens
ttatcatagggttagagctgatgatcacagggg

SEQ ID NO: 5550 - DNA, 33 bp, Homo sapiens
tccaaaatggctaggatacagtagtgataggtt

SEQ ID NO: 5551 - DNA, 33 bp, Homo sapiens
tcctctgtggacccaggaaggaaagaaaaacca

SEQ ID NO: 5552 - DNA, 33 bp, Homo sapiens
ctaggccagaggacacggggcaaccacacagga

SEQ ID NO: 5553 - DNA, 33 bp, Homo sapiens
catctaaggaggacaggcactctgcaagctact

SEQ ID NO: 5554 - DNA, 33 bp, Homo sapiens
caaatgactcaatagatgctgtgaaacaagcta

SEQ ID NO: 5555 - DNA, 33 bp, Homo sapiens
aatagaaaatgctaacgcaaataatccttcagc

SEQ ID NO: 5556 - DNA, 33 bp, Homo sapiens
gaatacttggagaaattacaagggaaaagaaaa

SEQ ID NO: 5557 - DNA, 33 bp, Homo sapiens
actgtaaactggtgactagaaggatagatcaca

SEQ ID NO: 5558 - DNA, 33 bp, Homo sapiens
tgtgtgtacaaaaaaatttcggttcgcagatta

SEQ ID NO: 5559 - DNA, 33 bp, Homo sapiens
gccagaactcgggggatcgtgcaaatatggggt

SEQ ID NO: 5560 - DNA, 33 bp, Homo sapiens
tgttagtttttcttgagtagcaccatctttaat

SEQ ID NO: 5561 - DNA, 33 bp, Homo sapiens
aatcaggtgtgtaaaatagcacaacgtgtttag

SEQ ID NO: 5562 - DNA, 33 bp, Homo sapiens
cagacacatttcaagagaagacacacatgtggc

SEQ ID NO: 5563 - DNA, 33 bp, Homo sapiens
tcttaattaaacactctatttgaagtgcagaga

SEQ ID NO: 5564 - DNA, 33 bp, Homo sapiens
actgatgatttatgccggagaaagactgtgaat

SEQ ID NO: 5565 - DNA, 33 bp, Homo sapiens
cactgacggcaaaatggaagttaatttaagagt

SEQ ID NO: 5566 - DNA, 33 bp, Homo sapiens
tagatacatggagagatcggtacccagaaaaga

SEQ ID NO: 5567 - DNA, 33 bp, Homo sapiens
taaagcattcacttacgagtacagtcatgcacc

SEQ ID NO: 5568 - DNA, 33 bp, Homo sapiens
aggataaacatggggagaaaatagttccacatt

SEQ ID NO: 5569 - DNA, 33 bp, Homo sapiens
ccaccagaagctgaacggatacctgaaccatgc

SEQ ID NO: 5570 - DNA, 33 bp, Homo sapiens
attattctaggttgtatgacctacttcaggaag

SEQ ID NO: 5571 - DNA, 33 bp, Homo sapiens
ttactgagataaatcatctttgaccttcattaa

SEQ ID NO: 5572 - DNA, 33 bp, Homo sapiens
tctagtctctgagacagggcaaaaagtagaggc

SEQ ID NO: 5573 - DNA, 33 bp, Homo sapiens
ccgtgtcattcatcccgcttcatctcaggacat

SEQ ID NO: 5574 - DNA, 33 bp, Homo sapiens
aagttcgtttgagaaagcatccaagtcatagaa

SEQ ID NO: 5575 - DNA, 33 bp, Homo sapiens
tgagcaccagtttgcatatgttccaagtgtgag

SEQ ID NO: 5576 - DNA, 33 bp, Homo sapiens
acgcatagactttagcgaaggagagctgaagga

SEQ ID NO: 5577 - DNA, 33 bp, Homo sapiens
gtttgcagtttaataagacagtacaatttaata

SEQ ID NO: 5578 - DNA, 33 bp, Homo sapiens
agagatattgatattatgattgtcactgagatc

SEQ ID NO: 5579 - DNA, 51 bp, Homo sapiens
accaggcatggtagcctttagacagtacatcttattttcactctcttgaac

SEQ ID NO: 5580 - DNA, 33 bp, Homo sapiens
atataatgcagaggaagaggactgagtcaatgt

SEQ ID NO: 5581 - DNA, 33 bp, Homo sapiens
agaactgaagagttacgatgaacctaggaaagt

SEQ ID NO: 5582 - DNA, 33 bp, Homo sapiens
cagataagtaccagaaggtagcataatacacta

SEQ ID NO: 5583 - DNA, 33 bp, Homo sapiens
caaactcaagtctgaccctagatttctttctct

SEQ ID NO: 5584 - DNA, 33 bp, Homo sapiens
ggacagtggatgttattagaatgaagtgagatg

SEQ ID NO: 5585 - DNA, 33 bp, Homo sapiens
ggagcttatccagctagacagttgtcagttttg

SEQ ID NO: 5586 - DNA, 33 bp, Homo sapiens
acatctttaaaatgtggagtagtgatcaagagt

SEQ ID NO: 5587 - DNA, 33 bp, Homo sapiens
gaaaaaaatcgttaatgatacatctggatacac

SEQ ID NO: 5588 - DNA, 33 bp, Homo sapiens
gtgcttgggttcactagagcctaaatgtgaagt

SEQ ID NO: 5589 - DNA, 33 bp, Homo sapiens
cacctgagtttcaagatattaatggaaaaaccc

SEQ ID NO: 5590 - DNA, 51 bp, Homo sapiens
ctttcccttgtatatagtactactactaacaagtcctaactaatcagaagt

SEQ ID NO: 5591 - DNA, 33 bp, Homo sapiens
aaatgtatgttgcttatggtacatcaattctac

SEQ ID NO: 5592 - DNA, 33 bp, Homo sapiens
gttgtgcctatattaatggatgccttttctttt

SEQ ID NO: 5593 - DNA, 33 bp, Homo sapiens
attagggggtgatggtgacaatgaaaggaagga

SEQ ID NO: 5594 - DNA, 33 bp, Homo sapiens
ttggctctgccctcaaggatcaactgtgaaata

SEQ ID NO: 5595 - DNA, 33 bp, Homo sapiens
ttatattaaactgccagcttaggtaggacacca

SEQ ID NO: 5596 - DNA, 33 bp, Homo sapiens
gagtccaggctggtcacatagcttcccagctgg

SEQ ID NO: 5597 - DNA, 33 bp, Homo sapiens
gacagttctaggaagataaaccatgcctcaggg

SEQ ID NO: 5598 - DNA, 33 bp, Homo sapiens
agggttgtttgttaactgtatcagaacctaatc

SEQ ID NO: 5599 - DNA, 33 bp, Homo sapiens
catgactggcagagccgaacgagggaggacgac

SEQ ID NO: 5600 - DNA, 33 bp, Homo sapiens
ctaataccaccttctatgactgagctgtagtga

SEQ ID NO: 5601 - DNA, 33 bp, Homo sapiens
ctaggaagattaaggctgatgaataaaagaaag

SEQ ID NO: 5602 - DNA, 33 bp, Homo sapiens
tttgttatctggagaattatttgagacggttta

SEQ ID NO: 5603 - DNA, 51 bp, Homo sapiens
accccatttcctgatctaccaagcattctagtggatgagacaaagatggtt

SEQ ID NO: 5604 - DNA, 33 bp, Homo sapiens
ttgctgcaaggcataattgaggtaacatatgga

SEQ ID NO: 5605 - DNA, 33 bp, Homo sapiens
tcagctgtttatggcatcttgagtcacagacac

SEQ ID NO: 5606 - DNA, 33 bp, Homo sapiens
gtcagaattttttccctgagcatctgaacatcc

SEQ ID NO: 5607 - DNA, 33 bp, Homo sapiens
ttaaggttcatcctgacaaagagacttataaat

SEQ ID NO: 5608 - DNA, 33 bp, Homo sapiens
catttttaaattaccctagttgatctgtgtctg

SEQ ID NO: 5609 - DNA, 33 bp, Homo sapiens
ttttaactttaaacactgagcaatgtaaattca

SEQ ID NO: 5610 - DNA, 33 bp, Homo sapiens
gtatacagaaggagcatgagttccacttagggc

SEQ ID NO: 5611 - DNA, 33 bp, Homo sapiens
gcttcaggacgttggagaagcatgaaaaagaat

SEQ ID NO: 5612 - DNA, 33 bp, Homo sapiens
gcttcaaacctgcatctgagggcagtatccgag

SEQ ID NO: 5613 - DNA, 33 bp, Homo sapiens
tcccctgagatctgactggcctatggcttgttt

SEQ ID NO: 5614 - DNA, 33 bp, Homo sapiens
taggacaagttgatcatcttattcccaggactc

SEQ ID NO: 5615 - DNA, 33 bp, Homo sapiens
gctgtttggacttccagtaaattggggcaattt

SEQ ID NO: 5616 - DNA, 33 bp, Homo sapiens
ttttccagcaaactaattgaacccaaaaggagg

SEQ ID NO: 5617 - DNA, 33 bp, Homo sapiens
ccaataataccaactctgagattagaagttaaa

SEQ ID NO: 5618 - DNA, 33 bp, Homo sapiens
gcctcacattgaaagagctacctgaacaaaact

SEQ ID NO: 5619 - DNA, 33 bp, Homo sapiens
gatcaaaaagctgttataattacttcagcctag

SEQ ID NO: 5620 - DNA, 33 bp, Homo sapiens
cctgggctgagtcacatgtctagtggttggctc

SEQ ID NO: 5621 - DNA, 33 bp, Homo sapiens
tcagcctgttaggacagtatgtttttcaagatt

SEQ ID NO: 5622 - DNA, 33 bp, Homo sapiens
aattaggttatgcaaagtcaagcaatcaaccac

SEQ ID NO: 5623 - DNA, 51 bp, Homo sapiens
aaactgtgaaatatctatcatcctataagaactggcatcacattctgacat

SEQ ID NO: 5624 - DNA, 33 bp, Homo sapiens
cacgtctttgagacacgccctaacacttactct

SEQ ID NO: 5625 - DNA, 33 bp, Homo sapiens
catttgttactgctattactgcaatgaagtcgg

SEQ ID NO: 5626 - DNA, 33 bp, Homo sapiens
cagcaatgctgaataagctaagccggttgcaag

SEQ ID NO: 5627 - DNA, 33 bp, Homo sapiens
actgcttatcatcttacatagcagaggagctga

SEQ ID NO: 5628 - DNA, 33 bp, Homo sapiens
attttgagggaggatatgtggtcctagtgtgtg

SEQ ID NO: 5629 - DNA, 33 bp, Homo sapiens
atgttagtgactggaatagatgagcatctcctt

SEQ ID NO: 5630 - DNA, 33 bp, Homo sapiens
ggaaaggcagtggtgagagattttcagatttgt

SEQ ID NO: 5631 - DNA, 33 bp, Homo sapiens
tactatgtgtaacctcgagttcggaaggtctga

SEQ ID NO: 5632 - DNA, 51 bp, Homo sapiens
tagatttcaaactcagttctattcattactaaagtccatactttcacattc

SEQ ID NO: 5633 - DNA, 33 bp, Homo sapiens
tttgagccatttaaccgctctgtgactcaggtt

SEQ ID NO: 5634 - DNA, 33 bp, Homo sapiens
tccatttcacttctaagtctctttggtttccaa

SEQ ID NO: 5635 - DNA, 51 bp, Homo sapiens
tagcccaggaaggatgaaagctatatgtggaggatctattctgaagccaga

SEQ ID NO: 5636 - DNA, 33 bp, Homo sapiens
cttgcattctgtcttcgaccctttttatttaca

SEQ ID NO: 5637 - DNA, 33 bp, Homo sapiens
ggtggtacatttcttctatttgcctctcccaat

SEQ ID NO: 5638 - DNA, 51 bp, Homo sapiens
ttctagaatgaccatactgaaatgggaaattcagagatttgagattatact

SEQ ID NO: 5639 - DNA, 33 bp, Homo sapiens
ctttcttttgttcagatttgccttcccaggaaa

SEQ ID NO: 5640 - DNA, 33 bp, Homo sapiens
aactaaatgtctatcacagttagctaggcccaa

SEQ ID NO: 5641 - DNA, 33 bp, Homo sapiens
ttcccactctcttgaatgcaatatggttttaga

SEQ ID NO: 5642 - DNA, 33 bp, Homo sapiens
ctgaaattcatttatctgactgagaagcttctt

SEQ ID NO: 5643 - DNA, 51 bp, Homo sapiens
cccctttctccatttacatcatttttttcctagtaactagaaaactcctga

SEQ ID NO: 5644 - DNA, 33 bp, Homo sapiens
agattctgaaataccaggtgacaaatagtagag

SEQ ID NO: 5645 - DNA, 33 bp, Homo sapiens
ttaccaatgaatactatcttctaccaattaaaa

SEQ ID NO: 5646 - DNA, 33 bp, Homo sapiens
tagttacagagactaacgtaagcatgtacacat

SEQ ID NO: 5647 - DNA, 33 bp, Homo sapiens
atggctaaataaaagcggcagacatgtgaatga

SEQ ID NO: 5648 - DNA, 33 bp, Homo sapiens
agcttagttgcttttgtattaatgtaaccagtg

SEQ ID NO: 5649 - DNA, 33 bp, Homo sapiens
aatcaataggccatacgcattcttgcatatatg

SEQ ID NO: 5650 - DNA, 33 bp, Homo sapiens
tcagcttaggtctctttaaacgtgtgcaatcat

SEQ ID NO: 5651 - DNA, 33 bp, Homo sapiens
ggatgttccatactaattcctgggagaaacaat

SEQ ID NO: 5652 - DNA, 33 bp, Homo sapiens
gaagcacctttggaaggagatgatgagaaagaa

SEQ ID NO: 5653 - DNA, 33 bp, Homo sapiens
ctagatactgtagaaataaagcaaaatcattga

SEQ ID NO: 5654 - DNA, 33 bp, Homo sapiens
cattttcactaaacaatttgctgcttgtgaatt

SEQ ID NO: 5655 - DNA, 33 bp, Homo sapiens
atctagtacacaaaaagcctcactttatactag

SEQ ID NO: 5656 - DNA, 33 bp, Homo sapiens
gagttaaatacatccatcctgatcatcaggtgc

SEQ ID NO: 5657 - DNA, 33 bp, Homo sapiens
ttattggccaacttgatggctgcagtattatac

SEQ ID NO: 5658 - DNA, 33 bp, Homo sapiens
tgttcaataagacatatggacaaaggggaggca

SEQ ID NO: 5659 - DNA, 33 bp, Homo sapiens
taacatttatcaccaattctgtataattacact

SEQ ID NO: 5660 - DNA, 33 bp, Homo sapiens
ctagaacagatgttactaaaaatggaaacgtgg

SEQ ID NO: 5661 - DNA, 33 bp, Homo sapiens
ggaaggagagaggtaggatgaacagcctgtaaa

SEQ ID NO: 5662 - DNA, 33 bp, Homo sapiens
acttaaaacctaatgatggttgatatatgcagc

SEQ ID NO: 5663 - DNA, 33 bp, Homo sapiens
taatcttcaggatgactggtagaaagcagcgag

SEQ ID NO: 5664 - DNA, 33 bp, Homo sapiens
atgatgaattggaaaatatggaaagatgcagat

SEQ ID NO: 5665 - DNA, 33 bp, Homo sapiens
caaatgaccaataggaggatgggttagtgacat

SEQ ID NO: 5666 - DNA, 33 bp, Homo sapiens
ggggagaggttgctaacatattataggatttct

SEQ ID NO: 5667 - DNA, 33 bp, Homo sapiens
tttcagcttctagacattggctgtattccttgg

SEQ ID NO: 5668 - DNA, 33 bp, Homo sapiens
gcagacttcagtgccatacattaagtgctaaga

SEQ ID NO: 5669 - DNA, 33 bp, Homo sapiens
tgagaccttttatgtaggaaaacattgcttaac

SEQ ID NO: 5670 - DNA, 33 bp, Homo sapiens
ttcagcttacaaacaatctgctttcagctctag

SEQ ID NO: 5671 - DNA, 33 bp, Homo sapiens
atggggaagaatgtaaggagacaggcgtagtaa

SEQ ID NO: 5672 - DNA, 33 bp, Homo sapiens
tgtcttgctcgggagatgtcattattttgctct

SEQ ID NO: 5673 - DNA, 33 bp, Homo sapiens
atgaagatcccagcacgatcaaactgggcaatt

SEQ ID NO: 5674 - DNA, 33 bp, Homo sapiens
ctgtattctattctcctgatgtgaatttagttc

SEQ ID NO: 5675 - DNA, 33 bp, Homo sapiens
taaattcatctgcctatgaggagctgaccattg

SEQ ID NO: 5676 - DNA, 33 bp, Homo sapiens
gggccagctagtacccgagatctgtttccattc

SEQ ID NO: 5677 - DNA, 33 bp, Homo sapiens
ctgttgattctactaagagtgtctcccactatt

SEQ ID NO: 5678 - DNA, 33 bp, Homo sapiens
gtaaccaaccaagtgggatgaacatagacaatt

SEQ ID NO: 5679 - DNA, 33 bp, Homo sapiens
agtgtatggccaaatgtatgtatattcaagagc

SEQ ID NO: 5680 - DNA, 33 bp, Homo sapiens
aatagccatgttgttatggagctaaagacaggg

SEQ ID NO: 5681 - DNA, 51 bp, Homo sapiens
gatgcttctctatgaggatttaaaaggtgaaatcttgatcataagatttgc

SEQ ID NO: 5682 - DNA, 33 bp, Homo sapiens
aacagagccttcaacagtagtagttggaaactt

SEQ ID NO: 5683 - DNA, 33 bp, Homo sapiens
ctagccaagcatactgtaaaatgaatataatgc

SEQ ID NO: 5684 - DNA, 33 bp, Homo sapiens
aattacctcaacttcacctattcaaaggaaaac

SEQ ID NO: 5685 - DNA, 33 bp, Homo sapiens
ttatgccatagttccagcatctttaaaattggc

SEQ ID NO: 5686 - DNA, 33 bp, Homo sapiens
tatcaagtctcaatcatataattgacatggaaa

SEQ ID NO: 5687 - DNA, 33 bp, Homo sapiens
ttaatcttataagaaatttgtgttcaaaagtgt

SEQ ID NO: 5688 - DNA, 33 bp, Homo sapiens
atgttaagcagaattatggttgacgctcaaata

SEQ ID NO: 5689 - DNA, 33 bp, Homo sapiens
tctggtagatgtccaagtggaagctggatattc

SEQ ID NO: 5690 - DNA, 33 bp, Homo sapiens
acacatcttgccacgataaccagttgctatttc

SEQ ID NO: 5691 - DNA, 33 bp, Homo sapiens
ggtcaaaattcccagagcaaggcactgacatat

SEQ ID NO: 5692 - DNA, 33 bp, Homo sapiens
gtgttcttcaagggaatgttctaaacacaccat

SEQ ID NO: 5693 - DNA, 51 bp, Homo sapiens
gttaaccgtggaagagtgaagaagaggagaagatgcccaagccaggtgagc

SEQ ID NO: 5694 - DNA, 33 bp, Homo sapiens
acaccttaaaaacttagtaactcctgcttgaga

SEQ ID NO: 5695 - DNA, 33 bp, Homo sapiens
tgtgcttcttgaaagatggagctctagacgtgt

SEQ ID NO: 5696 - DNA, 33 bp, Homo sapiens
tgtaccactaacaaactccacttccctctcaat

SEQ ID NO: 5697 - DNA, 33 bp, Homo sapiens
attgtaagtcatctaatcattttatggtagaaa

SEQ ID NO: 5698 - DNA, 51 bp, Homo sapiens
attactttcttgctacaacttcaactaataaaagaacaccctgtgtcacta

SEQ ID NO: 5699 - DNA, 51 bp, Homo sapiens
aatcagattgattaattacaagaaatgacttattgacagagttttttaaag

SEQ ID NO: 5700 - DNA, 51 bp, Homo sapiens
tcacccaacgctaagtatcttctgatgcaattatatgagtgttagaaaatt

SEQ ID NO: 5701 - DNA, 33 bp, Homo sapiens
tcaaatgatagcggaatgatcttcccatactta

SEQ ID NO: 5702 - DNA, 51 bp, Homo sapiens
ggtgagcctccaaccactgaaattatcatcttgctgtagttatgataaata

SEQ ID NO: 5703 - DNA, 33 bp, Homo sapiens
taattgcagcaggaaagtgtaatggcccacaag

SEQ ID NO: 5704 - DNA, 51 bp, Homo sapiens
acctccctgcacactcattcattacgtgccattcaatagtccttggccctg

SEQ ID NO: 5705 - DNA, 33 bp, Homo sapiens
gaaaactgtactaggcgaggcccatagaataaa

SEQ ID NO: 5706 - DNA, 33 bp, Homo sapiens
ttcaatgcataactcctgataatccatccagtt

SEQ ID NO: 5707 - DNA, 51 bp, Homo sapiens
ttctgatcctgttaatcttttagactgtaatgcatagtttgcttaagttca

SEQ ID NO: 5708 - DNA, 33 bp, Homo sapiens
tggcaggttcagagacgcccttcatgagccagg

SEQ ID NO: 5709 - DNA, 51 bp, Homo sapiens
gacagagaatgagtttcaaatattttaaaaaatctcagcaaaagaaccaaa

SEQ ID NO: 5710 - DNA, 51 bp, Homo sapiens
taagggaaaacaaaacaattaaatagtaagcacaagggacagagaatgagt

SEQ ID NO: 5711 - DNA, 33 bp, Homo sapiens
tagtatagtaaggagcgatgtaaggcatgaacc

SEQ ID NO: 5712 - DNA, 51 bp, Homo sapiens
ggggattacttgtacctggttcacctgcccacattagagtaattcaccaat

SEQ ID NO: 5713 - DNA, 33 bp, Homo sapiens
ctagagaactgcaccctattccttgctgattac

SEQ ID NO: 5714 - DNA, 33 bp, Homo sapiens
gcccacataaaatgacgaacttaatctgtaaat

SEQ ID NO: 5715 - DNA, 33 bp, Homo sapiens
aaacgacaactctgacgctgtttaatattcgag

SEQ ID NO: 5716 - DNA, 33 bp, Homo sapiens
catacagtaactgatcgaaaaatggtaactatc

SEQ ID NO: 5717 - DNA, 33 bp, Homo sapiens
cacctcgatggaattagacatacatgtggactt

SEQ ID NO: 5718 - DNA, 33 bp, Homo sapiens
accaaattactggctctgaatgcaaaatgtctg

SEQ ID NO: 5719 - DNA, 33 bp, Homo sapiens
aatgttctgattaaaatggggctgaggaaacag

SEQ ID NO: 5720 - DNA, 33 bp, Homo sapiens
cttcagtacaggccaatgatggcgatccacagt

SEQ ID NO: 5721 - DNA, 33 bp, Homo sapiens
gaatccttcatttgagtcgagccttaaggatga

SEQ ID NO: 5722 - DNA, 33 bp, Homo sapiens
gagaaagtacagacacggacggcttgagtcact

SEQ ID NO: 5723 - DNA, 33 bp, Homo sapiens
ggaacccacagaggccggctgagatttcaattt

SEQ ID NO: 5724 - DNA, 33 bp, Homo sapiens
aacgagctatatgccctgccgtgagttaagtgc

SEQ ID NO: 5725 - DNA, 33 bp, Homo sapiens
tggtgatcctgaaagcgcccgttcattcaaagt

SEQ ID NO: 5726 - DNA, 33 bp, Homo sapiens
ccagcctggagcagtgtaagaggaaatggactg

SEQ ID NO: 5727 - DNA, 33 bp, Homo sapiens
agattcctgcctgaaagagggtgacatctgtcc

SEQ ID NO: 5728 - DNA, 33 bp, Homo sapiens
gcaaaaacgccagggctatgaaaataaattaac

SEQ ID NO: 5729 - DNA, 33 bp, Homo sapiens
tagtgaattcactaaactgggtagcgacaaacc

SEQ ID NO: 5730 - DNA, 33 bp, Homo sapiens
caccaaaaagaatgaggaagccgccataaacaa

SEQ ID NO: 5731 - DNA, 33 bp, Homo sapiens
catcaggaataggagagggccagtttaagagca

SEQ ID NO: 5732 - DNA, 51 bp, Homo sapiens
aatggaagaaaatatttgtaaactatggatcttactaagggctaatataca

SEQ ID NO: 5733 - DNA, 33 bp, Homo sapiens
agtcatgttcagagtctaaaaatttgaaagaat

SEQ ID NO: 5734 - DNA, 33 bp, Homo sapiens
ggcactgaccttatattagctgtcagcagactc

SEQ ID NO: 5735 - DNA, 33 bp, Homo sapiens
gtggtacagaaatggagaatgggtttgagagaa

SEQ ID NO: 5736 - DNA, 33 bp, Homo sapiens
tacccacaggaatgactatatttggttataggc

SEQ ID NO: 5737 - DNA, 33 bp, Homo sapiens
aggcgggtgacttagaggtgagtacaagccacc

SEQ ID NO: 5738 - DNA, 33 bp, Homo sapiens
agagtccaaagctccatgttagaggctggaagt

SEQ ID NO: 5739 - DNA, 33 bp, Homo sapiens
cagaaagcctgactattaggccatcactcttac

SEQ ID NO: 5740 - DNA, 33 bp, Homo sapiens
gcaggggagtgtaacatggtcagagtccaaaac

SEQ ID NO: 5741 - DNA, 33 bp, Homo sapiens
gacattggagatggaatgaggaagggatcctgg

SEQ ID NO: 5742 - DNA, 33 bp, Homo sapiens
gtttctggtaactgtgtagaatggagtttcaag

SEQ ID NO: 5743 - DNA, 33 bp, Homo sapiens
atgttccatgttctccgctaatttcacttcaga

SEQ ID NO: 5744 - DNA, 33 bp, Homo sapiens
ggttttctatcacgtctcttactcaggtttcac

SEQ ID NO: 5745 - DNA, 33 bp, Homo sapiens
ataagcattctttatgtattcgccattatactg

SEQ ID NO: 5746 - DNA, 33 bp, Homo sapiens
gggctactaatatggatgtgagatgaggacctg

SEQ ID NO: 5747 - DNA, 33 bp, Homo sapiens
tgaaataaggagtacagtcatctctgcctgaaa

SEQ ID NO: 5748 - DNA, 33 bp, Homo sapiens
tgatacactagttatagccacaacaaccaaatg

SEQ ID NO: 5749 - DNA, 33 bp, Homo sapiens
aacttggcaaagagaagtatgcagaagtcaatt

SEQ ID NO: 5750 - DNA, 33 bp, Homo sapiens
ttactgaagtcaccaagttatttttctcaacag

SEQ ID NO: 5751 - DNA, 33 bp, Homo sapiens
atcaaatttaatcccatcaattacatttaaaaa

SEQ ID NO: 5752 - DNA, 33 bp, Homo sapiens
gtctattttcctctcccagtggaacactgcaaa

SEQ ID NO: 5753 - DNA, 33 bp, Homo sapiens
ctagctgctttgccaatgttctgagcatcagga

SEQ ID NO: 5754 - DNA, 33 bp, Homo sapiens
aaggtctgattccttagcatccaggccaaaaaa

SEQ ID NO: 5755 - DNA, 33 bp, Homo sapiens
accattaattgatagatgtaggtatggcctgta

SEQ ID NO: 5756 - DNA, 33 bp, Homo sapiens
gctgttagactgatacgaacaggtttcattcca

SEQ ID NO: 5757 - DNA, 33 bp, Homo sapiens
gtataatcacctctactgctctgtcttccacct

SEQ ID NO: 5758 - DNA, 33 bp, Homo sapiens
acacagaaaagtgctagacagtaattactctct

SEQ ID NO: 5759 - DNA, 33 bp, Homo sapiens
tccttagaacaatgaagataaacaccaccacat

SEQ ID NO: 5760 - DNA, 33 bp, Homo sapiens
ctctgttacttttggctcaacaaccctaaatgc

SEQ ID NO: 5761 - DNA, 33 bp, Homo sapiens
gagttttgcatttaaagcaatgagctgtcaaag

SEQ ID NO: 5762 - DNA, 33 bp, Homo sapiens
agttttataattcgaccaaccaaataatttttt

SEQ ID NO: 5763 - DNA, 33 bp, Homo sapiens
caaactcaggttagaagtatgtattcctgctac

SEQ ID NO: 5764 - DNA, 33 bp, Homo sapiens
tgtggggaaagaatcctgaatgatgtctagtac

SEQ ID NO: 5765 - DNA, 33 bp, Homo sapiens
tattatccttcttcaatcaaattgtgaatcaaa

SEQ ID NO: 5766 - DNA, 33 bp, Homo sapiens
acaggatagaaaataagtgattcaggtcataag

SEQ ID NO: 5767 - DNA, 33 bp, Homo sapiens
ttggtaataaattgcctgccacaaattgcacaa

SEQ ID NO: 5768 - DNA, 33 bp, Homo sapiens
atatagttagatgcaatgaatcagatctaattt

SEQ ID NO: 5769 - DNA, 33 bp, Homo sapiens
gtctgatgactagagacgactggatggaaggtg

SEQ ID NO: 5770 - DNA, 33 bp, Homo sapiens
tttctgtcatgagcaactgtctgagtcagcttg

SEQ ID NO: 5771 - DNA, 33 bp, Homo sapiens
atatatagtaaaactggagcctacttttaatca

SEQ ID NO: 5772 - DNA, 51 bp, Homo sapiens
gtcacctctgtgttcttgattgaccgatgtcagataaaaagattgttaaaa

SEQ ID NO: 5773 - DNA, 33 bp, Homo sapiens
ctctggcactcttatcgctagaaattgtcaggc

SEQ ID NO: 5774 - DNA, 33 bp, Homo sapiens
actcataaaaggtcattaagcttcaccttgaac

SEQ ID NO: 5775 - DNA, 33 bp, Homo sapiens
gtcaatattccttacattggcactaaaagccca

SEQ ID NO: 5776 - DNA, 33 bp, Homo sapiens
gatgctggtcaatcaataaaaacagaggcagac

SEQ ID NO: 5777 - DNA, 33 bp, Homo sapiens
catttaataaacttcagtaaatatgttggctac

SEQ ID NO: 5778 - DNA, 33 bp, Homo sapiens
tcaatcaattttgtgcgctgaaaccacagtagt

SEQ ID NO: 5779 - DNA, 33 bp, Homo sapiens
aagatgatcaaaatacgcttagtcatggaaagg

SEQ ID NO: 5780 - DNA, 33 bp, Homo sapiens
ctgacgcttagcaacttacatgaataaaatgtt

SEQ ID NO: 5781 - DNA, 33 bp, Homo sapiens
ctccacttacccactgtatgatattgttggtgt

SEQ ID NO: 5782 - DNA, 33 bp, Homo sapiens
ctgtgccttacgatgacgataagtatttgagat

SEQ ID NO: 5783 - DNA, 33 bp, Homo sapiens
aaaatgttgacaatgggaacaaagaaaaggaca

SEQ ID NO: 5784 - DNA, 33 bp, Homo sapiens
tgcagtgtgcttgaaccctagaaggttgggacc

SEQ ID NO: 5785 - DNA, 33 bp, Homo sapiens
ggcgtatttggaatccgcacacatggctattct

SEQ ID NO: 5786 - DNA, 33 bp, Homo sapiens
agacagagatagctcctaagtggtagatcattc

SEQ ID NO: 5787 - DNA, 51 bp, Homo sapiens
tggatctcttgaatgtaggatgtaataataaatgtcagcaggttttaaaaa

SEQ ID NO: 5788 - DNA, 33 bp, Homo sapiens
taaacacctaagtatagacagaatgcatatctt

SEQ ID NO: 5789 - DNA, 33 bp, Homo sapiens
tttgttcctaaatccagaacaagcatggccatt

SEQ ID NO: 5790 - DNA, 33 bp, Homo sapiens
cagtctcctttatcaataccctcacaaacacac

SEQ ID NO: 5791 - DNA, 33 bp, Homo sapiens
tgcatcaggttaaaagtctcaccttcctactta

SEQ ID NO: 5792 - DNA, 33 bp, Homo sapiens
gaaaggtcatgtagtaggaaatatgaaaagcaa

SEQ ID NO: 5793 - DNA, 33 bp, Homo sapiens
ttaagtaggtcaatggtcacagaaaacttgcca

SEQ ID NO: 5794 - DNA, 33 bp, Homo sapiens
tgtcaagatggacaagcacaccatgttagccat

SEQ ID NO: 5795 - DNA, 33 bp, Homo sapiens
tttatctgaggcgatagaatccaaacgtgcaac

SEQ ID NO: 5796 - DNA, 33 bp, Homo sapiens
gaatcaggcaatgcactaattcaaggatataca

SEQ ID NO: 5797 - DNA, 33 bp, Homo sapiens
aaatctgagtcacccagtgcacattatcacagc

SEQ ID NO: 5798 - DNA, 33 bp, Homo sapiens
aaacacagaatactccggaaggtttgtcaaagt

SEQ ID NO: 5799 - DNA, 33 bp, Homo sapiens
ttagtttccattatgatgaaaagttgcaaggtt

SEQ ID NO: 5800 - DNA, 33 bp, Homo sapiens
actggccccattcttggaagattcagattatta

SEQ ID NO: 5801 - DNA, 33 bp, Homo sapiens
taaagctctgttatggtagggccttatttattc

SEQ ID NO: 5802 - DNA, 33 bp, Homo sapiens
caggtaacagagcaaagataaaaaaggtaggca

SEQ ID NO: 5803 - DNA, 33 bp, Homo sapiens
gtgttcataacatttcgaagagctaatactagc

SEQ ID NO: 5804 - DNA, 33 bp, Homo sapiens
agtgttgcctaggagataatttggtgaagaata

SEQ ID NO: 5805 - DNA, 33 bp, Homo sapiens
ccagctcactagaacagcgtgtacaaggattgg

SEQ ID NO: 5806 - DNA, 33 bp, Homo sapiens
ggagacacatagactcgactattttggatcaac

SEQ ID NO: 5807 - DNA, 33 bp, Homo sapiens
tgaaattatgactcaatggagaatatgactgat

SEQ ID NO: 5808 - DNA, 33 bp, Homo sapiens
ttttcctataccttaagcaacatttgaaattac

SEQ ID NO: 5809 - DNA, 33 bp, Homo sapiens
ggatccaggaagctacggagagaagcagccagc

SEQ ID NO: 5810 - DNA, 51 bp, Homo sapiens
atgaaagcacaaattagaataagaagctacattgtcagaattattatttcc

SEQ ID NO: 5811 - DNA, 33 bp, Homo sapiens
gcaagtaatccaaatatgcaatggccaaatctg

SEQ ID NO: 5812 - DNA, 51 bp, Homo sapiens
cacaagtaattgagactagaaaaaattaatagcccaactaacttaaattct

SEQ ID NO: 5813 - DNA, 33 bp, Homo sapiens
acctcccctgcccaggtaagtggtactgaaaaa

SEQ ID NO: 5814 - DNA, 33 bp, Homo sapiens
cccccaggcacaactggaaacctcttttctcaa

SEQ ID NO: 5815 - DNA, 33 bp, Homo sapiens
cttcaacaaagcataccaaaacgtaaagtgggg

SEQ ID NO: 5816 - DNA, 33 bp, Homo sapiens
ccttgtctcagatttatccaagttacctctacc

SEQ ID NO: 5817 - DNA, 33 bp, Homo sapiens
taacactcagttactagggattatattcataaa

SEQ ID NO: 5818 - DNA, 33 bp, Homo sapiens
gaggatgtagcaggagcaaagtaaagaaagcct

SEQ ID NO: 5819 - DNA, 33 bp, Homo sapiens
tggaacatctggtttgtaaggaagccttatagg

SEQ ID NO: 5820 - DNA, 51 bp, Homo sapiens
aaaggcaccctgctagccaaatgccgatatcatgaatttgcttagagtgag

SEQ ID NO: 5821 - DNA, 33 bp, Homo sapiens
tgataaagagcatctatggaaaactcagctaac

SEQ ID NO: 5822 - DNA, 51 bp, Homo sapiens
tttgaggcggaagtgaaagctgtaagggttagagcacaaagggctgagagg

SEQ ID NO: 5823 - DNA, 33 bp, Homo sapiens
aatgaatcaagtcagaggcatttttttctactc

SEQ ID NO: 5824 - DNA, 33 bp, Homo sapiens
ccattctaccagatacgcagacatcaccacagt

SEQ ID NO: 5825 - DNA, 33 bp, Homo sapiens
aggaaaaaagcaatgaggaattggtctggttga

SEQ ID NO: 5826 - DNA, 33 bp, Homo sapiens
actgtatttaaggcaatgtgaggaatagaaaac

SEQ ID NO: 5827 - DNA, 33 bp, Homo sapiens
ttaccagtctctgtgatgtacggtcaaaaatta

SEQ ID NO: 5828 - DNA, 33 bp, Homo sapiens
atacttgcaagaagccgggcgataccatagaca

SEQ ID NO: 5829 - DNA, 33 bp, Homo sapiens
taagtatttgttgtcattaattcataccaactc

SEQ ID NO: 5830 - DNA, 33 bp, Homo sapiens
agtcttcttcaccttcgctgtcctatttttgaa

SEQ ID NO: 5831 - DNA, 51 bp, Homo sapiens
ctagacactatgtaatttgaccctggaatacttaaacaaaaattatagttt

SEQ ID NO: 5832 - DNA, 33 bp, Homo sapiens
atcgacatttgttgaagtgaattcaatgcccag

SEQ ID NO: 5833 - DNA, 33 bp, Homo sapiens
taagactttagctttgtatgacagaaaggttag

SEQ ID NO: 5834 - DNA, 33 bp, Homo sapiens
aagccctctcacaaccgaagtacaactgttgat

SEQ ID NO: 5835 - DNA, 33 bp, Homo sapiens
gggaaacttgagctgatacaaaatgcaaaaagg

SEQ ID NO: 5836 - DNA, 33 bp, Homo sapiens
ttgtaaagcaaagtgagaaacaacagctgctcg

SEQ ID NO: 5837 - DNA, 33 bp, Homo sapiens
atgcatatgtcatggaggatgaatgtttcccaa

SEQ ID NO: 5838 - DNA, 33 bp, Homo sapiens
ccaagatagcacaagataaatgacttttaaaaa

SEQ ID NO: 5839 - DNA, 33 bp, Homo sapiens
tgatacacaaaaggcagtgaactggaatgaaaa

SEQ ID NO: 5840 - DNA, 33 bp, Homo sapiens
tctgtagcaaggaacacctctagctcttagatt

SEQ ID NO: 5841 - DNA, 33 bp, Homo sapiens
aatgctaagaaaggcagagctagatatttaata

SEQ ID NO: 5842 - DNA, 33 bp, Homo sapiens
tgcccattaattgaggtatttcttcacagcgtc

SEQ ID NO: 5843 - DNA, 33 bp, Homo sapiens
ggggtggtgacctctataaactcttgctaccaa

SEQ ID NO: 5844 - DNA, 33 bp, Homo sapiens
aagtgggtgatggaaggccttagctgctatgtt

SEQ ID NO: 5845 - DNA, 33 bp, Homo sapiens
tgagataagtctttaagctactatgaaatgcat

SEQ ID NO: 5846 - DNA, 33 bp, Homo sapiens
cccatagtaatagatggaaaaggatggacttta

SEQ ID NO: 5847 - DNA, 33 bp, Homo sapiens
caatgtgatttttaaagttaagagtcagttgaa

SEQ ID NO: 5848 - DNA, 33 bp, Homo sapiens
aaacctaatctgtcatgaagacctgctacttat

SEQ ID NO: 5849 - DNA, 33 bp, Homo sapiens
ttggtggccttaaaaaggtggttagatttagca

SEQ ID NO: 5850 - DNA, 33 bp, Homo sapiens
agatagattcatgacattgagtttgacaataat

SEQ ID NO: 5851 - DNA, 51 bp, Homo sapiens
aaaacttcaaaactctgataaacaataactaaataacatgttcatggatag

SEQ ID NO: 5852 - DNA, 33 bp, Homo sapiens
ttgttcaaaaacatcatctattgtgattctggt

SEQ ID NO: 5853 - DNA, 33 bp, Homo sapiens
tttaaaaaaaactgaaggataacattcaatcca

SEQ ID NO: 5854 - DNA, 33 bp, Homo sapiens
acctttcatcagccccgcttctatctctgaaaa

SEQ ID NO: 5855 - DNA, 51 bp, Homo sapiens
gtataagttttaaatgagtactatatgtgcttggaaatgaaaatctgctgt

SEQ ID NO: 5856 - DNA, 51 bp, Homo sapiens
aaactaagtttgtatctctgcttaagtaaccaagatgtgttgcatttgaaa

SEQ ID NO: 5857 - DNA, 33 bp, Homo sapiens
tctaatcgcttcttaagctaaccaatccaatcc

SEQ ID NO: 5858 - DNA, 33 bp, Homo sapiens
tcattgcttggcacacggtataagcattcaata

SEQ ID NO: 5859 - DNA, 51 bp, Homo sapiens
cagactgcttccactcccttctcccgaggactgagctctgtcatcaactct

SEQ ID NO: 5860 - DNA, 33 bp, Homo sapiens
aagaagccagttcacatgaggccctaaggcttt

SEQ ID NO: 5861 - DNA, 51 bp, Homo sapiens
caaccacaaatattaaatacgtacctcctagagttgaatgaataagggcag

SEQ ID NO: 5862 - DNA, 33 bp, Homo sapiens
ttgctgagtgcataccgcagtgttcctgaatta

SEQ ID NO: 5863 - DNA, 33 bp, Homo sapiens
agtcatcctttgtgcgtcatcatttacaaagtt

SEQ ID NO: 5864 - DNA, 33 bp, Homo sapiens
ttcgaagtctgaaaaattagattgcattaggat

SEQ ID NO: 5865 - DNA, 33 bp, Homo sapiens
ctgggtttgccaagaatgtaaggtcctaactgc

SEQ ID NO: 5866 - DNA, 33 bp, Homo sapiens
attagaagtttaagatgacttgaccccaaacct

SEQ ID NO: 5867 - DNA, 33 bp, Homo sapiens
atattaaacagcaatcgcattattttattcaat

SEQ ID NO: 5868 - DNA, 33 bp, Homo sapiens
tgggtgccaatatctctacttcttaaagggatc

SEQ ID NO: 5869 - DNA, 33 bp, Homo sapiens
cattaatatgcttcaaccttaatttcaatacat

SEQ ID NO: 5870 - DNA, 33 bp, Homo sapiens
ccatgtccccatgaagtccgagatctcttgtcc

SEQ ID NO: 5871 - DNA, 33 bp, Homo sapiens
tccccaactccttccatagatgagtgatgcctg

SEQ ID NO: 5872 - DNA, 33 bp, Homo sapiens
ttctgttctctctttctcttgggaaaatagaga

SEQ ID NO: 5873 - DNA, 33 bp, Homo sapiens
tttgaataacagtcatgaaatggtcatgggtca

SEQ ID NO: 5874 - DNA, 33 bp, Homo sapiens
tacacttctttgtgcatggctcacaattcttct

SEQ ID NO: 5875 - DNA, 33 bp, Homo sapiens
gcactaaatgtcactggaggccctgaaaaaaaa

SEQ ID NO: 5876 - DNA, 33 bp, Homo sapiens
cacggcacataaagaggacagagtagacctggg

SEQ ID NO: 5877 - DNA, 33 bp, Homo sapiens
gagcaggactttcatacgaagctttatctcttc

SEQ ID NO: 5878 - DNA, 33 bp, Homo sapiens
tatgcaggcaaataaatgaacaaaatactcttc

SEQ ID NO: 5879 - DNA, 33 bp, Homo sapiens
atagtatgtgcaatgaggggtacagagaagcta

SEQ ID NO: 5880 - DNA, 33 bp, Homo sapiens
taggcttgaaaacattgaaacagatggtgatac

SEQ ID NO: 5881 - DNA, 33 bp, Homo sapiens
taatttctttacaaaacctgatagttactgata

SEQ ID NO: 5882 - DNA, 33 bp, Homo sapiens
ttccttatcctaaacagcatcttcttttctatt

SEQ ID NO: 5883 - DNA, 33 bp, Homo sapiens
tgaagaagccccttgatgctttgccctactgaa

SEQ ID NO: 5884 - DNA, 51 bp, Homo sapiens
cactttagaaaatagcaccatttaataatttcacaaaaggcagcaggtgct

SEQ ID NO: 5885 - DNA, 51 bp, Homo sapiens
agtagattgaaaataaatctttctatggatgaatctaaagcgtttctagat

SEQ ID NO: 5886 - DNA, 51 bp, Homo sapiens
gacactagtcttggcccactctatagaagtaagatcttgctaggcttgtat

SEQ ID NO: 5887 - DNA, 33 bp, Homo sapiens
tttacatccaaaaatatcatgtagcttgctcaa

SEQ ID NO: 5888 - DNA, 51 bp, Homo sapiens
ctaaagtgttgttatatatacagaatactgaaatgaacaagagttcagtga

SEQ ID NO: 5889 - DNA, 51 bp, Homo sapiens
ctccacagtaagtgagtttattttctacggtggctgagtttggtgctattg

SEQ ID NO: 5890 - DNA, 33 bp, Homo sapiens
ccctaaacatttctattaacacaaatcacataa

SEQ ID NO: 5891 - DNA, 33 bp, Homo sapiens
aaatcgtcatggatatgaaattgaattgcatta

SEQ ID NO: 5892 - DNA, 33 bp, Homo sapiens
atctacatggttataactgatctgctcctactt

SEQ ID NO: 5893 - DNA, 33 bp, Homo sapiens
tcataatatattcaacgctctatccagattaac

SEQ ID NO: 5894 - DNA, 33 bp, Homo sapiens
atggattaacataaaagctgacactgaaggcct

SEQ ID NO: 5895 - DNA, 33 bp, Homo sapiens
ttgcacttctgttttaggtatggttgtatattt

SEQ ID NO: 5896 - DNA, 33 bp, Homo sapiens
cagctcagaggagagttaatgacaaagtatttt

SEQ ID NO: 5897 - DNA, 51 bp, Homo sapiens
atattcgtgatatttcccagaaagccgcatagtgggtaaaatcttccattt

SEQ ID NO: 5898 - DNA, 33 bp, Homo sapiens
tcccaattttctcacttaactttcaaatacagc

SEQ ID NO: 5899 - DNA, 33 bp, Homo sapiens
ttccttcttattctgataaccattttgaataca

SEQ ID NO: 5900 - DNA, 33 bp, Homo sapiens
ggctaatcctccctcacataaaatggaatttct

SEQ ID NO: 5901 - DNA, 33 bp, Homo sapiens
atatctggacaagagaggccaggcagatggaac

SEQ ID NO: 5902 - DNA, 33 bp, Homo sapiens
gtaatttgcattttaagggttcaggcaatggag

SEQ ID NO: 5903 - DNA, 33 bp, Homo sapiens
cttctacagtcagagatacagtgtaaagaaaac

SEQ ID NO: 5904 - DNA, 33 bp, Homo sapiens
ttgtggaagtattggagtatagatgtatatatt

SEQ ID NO: 5905 - DNA, 33 bp, Homo sapiens
atttcagactggtgtatgaaagtaatgataagg

SEQ ID NO: 5906 - DNA, 33 bp, Homo sapiens
gttttagttaaaagaagatggtcactgtgtttg

SEQ ID NO: 5907 - DNA, 33 bp, Homo sapiens
agaacatatgcaattagcaaacttaaacattag

SEQ ID NO: 5908 - DNA, 33 bp, Homo sapiens
tacacagatgatggaaggaaccacaccaactta

SEQ ID NO: 5909 - DNA, 33 bp, Homo sapiens
aatttaaggcagacctgaaagttttgttgtctt

SEQ ID NO: 5910 - DNA, 33 bp, Homo sapiens
aagtaggagagaaaacggtaggtaagaaagcaa

SEQ ID NO: 5911 - DNA, 33 bp, Homo sapiens
cttgtttacaggcatatgttgagtgttgaacat

SEQ ID NO: 5912 - DNA, 33 bp, Homo sapiens
aacccagagagtctgctaaccggctcctagaac

SEQ ID NO: 5913 - DNA, 33 bp, Homo sapiens
cttgtcatgcacaacattcttgtcatgcacaac

SEQ ID NO: 5914 - DNA, 33 bp, Homo sapiens
tgcatctttttagagcgcatgacagagcagagc

SEQ ID NO: 5915 - DNA, 33 bp, Homo sapiens
cttctttggttctgcataatatctgtgggattt

SEQ ID NO: 5916 - DNA, 33 bp, Homo sapiens
tctctgtttgtaaaatcagtaagtgctcattgt

SEQ ID NO: 5917 - DNA, 33 bp, Homo sapiens
aagttgaagacacagatggaataaaatagtggt

SEQ ID NO: 5918 - DNA, 33 bp, Homo sapiens
cagtatcctacagctggaacatagtctcaggag

SEQ ID NO: 5919 - DNA, 51 bp, Homo sapiens
atacgctttaaataacatgctgactttaaccaattgaatgtgactacctgg

SEQ ID NO: 5920 - DNA, 33 bp, Homo sapiens
tcttcctaaatcacaagtacgattatctctctc

SEQ ID NO: 5921 - DNA, 33 bp, Homo sapiens
tgccttctagacttaaggttagctccttctgcc

SEQ ID NO: 5922 - DNA, 33 bp, Homo sapiens
atttttctccttcacagtattttactctaagat

SEQ ID NO: 5923 - DNA, 33 bp, Homo sapiens
atgagaaaaatgttcatgagtacagattttgtt

SEQ ID NO: 5924 - DNA, 33 bp, Homo sapiens
ggaatttccaggataatatcagttacatgaaag

SEQ ID NO: 5925 - DNA, 51 bp, Homo sapiens
aaggtatattactagtaagtgaacagtggagttaaaattatgtcctcaatt

SEQ ID NO: 5926 - DNA, 33 bp, Homo sapiens
attgacatcatattacgagcccacctttgaagg

SEQ ID NO: 5927 - DNA, 33 bp, Homo sapiens
ccctgcctacactaactgtgagctatttcaaat

SEQ ID NO: 5928 - DNA, 51 bp, Homo sapiens
caaaaaattgatggaaatataggaagacaactaaggtctacttggtgtatg

SEQ ID NO: 5929 - DNA, 51 bp, Homo sapiens
gaaagtaaatgtttcaaagagaaagtaatagtattaagtgttgcagagaga

SEQ ID NO: 5930 - DNA, 51 bp, Homo sapiens
cccattcatttatttggtatgcatatagttagtttaccttccaggatttgc

SEQ ID NO: 5931 - DNA, 51 bp, Homo sapiens
taccctctccacaattggaaccccagatcggcaaacatagcaaaggaccat

SEQ ID NO: 5932 - DNA, 33 bp, Homo sapiens
actagagagatgtaacgaggcagattgtgatgg

SEQ ID NO: 5933 - DNA, 33 bp, Homo sapiens
gaatgacttagagagaggtaaatccaatcatat

SEQ ID NO: 5934 - DNA, 33 bp, Homo sapiens
taactgcagcaacagggagtacttttagcagct

SEQ ID NO: 5935 - DNA, 33 bp, Homo sapiens
tgtattactctggctctgagattctacattcta

SEQ ID NO: 5936 - DNA, 33 bp, Homo sapiens
gagcagagtcaccaacggcagcaaagaaggata

SEQ ID NO: 5937 - DNA, 33 bp, Homo sapiens
gtaagaaactactaaattgttccaaagtggctg

SEQ ID NO: 5938 - DNA, 33 bp, Homo sapiens
tttagaaacatagagcgacatcattaaatcttt

SEQ ID NO: 5939 - DNA, 33 bp, Homo sapiens
gttaagataatccaaatatttgctgtttttcct

SEQ ID NO: 5940 - DNA, 33 bp, Homo sapiens
tagtcacacttaaaacgaaaacaactattgaat

SEQ ID NO: 5941 - DNA, 33 bp, Homo sapiens
tgctaaccaagtaaaaggtcctgaaagaagcag

SEQ ID NO: 5942 - DNA, 33 bp, Homo sapiens
aaaaggtcgtctataatgcatttcatatggact

SEQ ID NO: 5943 - DNA, 33 bp, Homo sapiens
atgacccaaaatagcagacgcaacattcagaga

SEQ ID NO: 5944 - DNA, 33 bp, Homo sapiens
ggcagtactctcagcatgaacacgttagagggt

SEQ ID NO: 5945 - DNA, 33 bp, Homo sapiens
aaaattaattgcaagagaaacaaaaatttacaa

SEQ ID NO: 5946 - DNA, 33 bp, Homo sapiens
atatatatccacttggtcatatcattgaggaat

SEQ ID NO: 5947 - DNA, 33 bp, Homo sapiens
cacctgatcaaaccaatctgtgggctctacata

SEQ ID NO: 5948 - DNA, 33 bp, Homo sapiens
tgttctcaatggttcatagttctcaatgacttg

SEQ ID NO: 5949 - DNA, 33 bp, Homo sapiens
tgaacaagttggtcatcaagttttgtcaaacac

SEQ ID NO: 5950 - DNA, 33 bp, Homo sapiens
attgaaagaaaactgagagtactgctctcacct

SEQ ID NO: 5951 - DNA, 33 bp, Homo sapiens
aattttggagttagaaggaactgagttgacaac

SEQ ID NO: 5952 - DNA, 33 bp, Homo sapiens
gaatggtagaggaaaggccatcattatcataaa

SEQ ID NO: 5953 - DNA, 33 bp, Homo sapiens
tagtgttggtgaaaaatcctgcttttcagcatg

SEQ ID NO: 5954 - DNA, 33 bp, Homo sapiens
taagttttttcatcctgagacttctaaggttag

SEQ ID NO: 5955 - DNA, 33 bp, Homo sapiens
aaagctggttcgcaacgacaagccaacacagcc

SEQ ID NO: 5956 - DNA, 33 bp, Homo sapiens
ggaagcagagggtagaccagttattctgatgag

SEQ ID NO: 5957 - DNA, 33 bp, Homo sapiens
cagtgaaacagtctactataatctacttgaccc

SEQ ID NO: 5958 - DNA, 33 bp, Homo sapiens
ttttccagaggattcagggaacagagtaactca

SEQ ID NO: 5959 - DNA, 33 bp, Homo sapiens
gaattgaatattgagggagaaacaacttatata

SEQ ID NO: 5960 - DNA, 33 bp, Homo sapiens
gttgtgcaatcactgctagtagttccaaaacat

SEQ ID NO: 5961 - DNA, 51 bp, Homo sapiens
tccttgtcccttatcaccgggtatggaatacttaataattgacactttgca

SEQ ID NO: 5962 - DNA, 33 bp, Homo sapiens
gaaatgaagacatagagaaaaaccacatcatta

SEQ ID NO: 5963 - DNA, 33 bp, Homo sapiens
ctgactcaagtgccaacgactaattttatgggg

SEQ ID NO: 5964 - DNA, 33 bp, Homo sapiens
aagcactaaacagataggctcaaaggtatttta

SEQ ID NO: 5965 - DNA, 33 bp, Homo sapiens
ggattgattgttactatcctcactgtattatac

SEQ ID NO: 5966 - DNA, 33 bp, Homo sapiens
taaaatgtctgataaatccaattgcagaaatta

SEQ ID NO: 5967 - DNA, 33 bp, Homo sapiens
atgtgtatctccctgaggatttagcataggaag

SEQ ID NO: 5968 - DNA, 33 bp, Homo sapiens
catggctcttcaggacgggctaattgatcagga

SEQ ID NO: 5969 - DNA, 33 bp, Homo sapiens
attaatgctcatgctgtagaaaagatgcaaagg

SEQ ID NO: 5970 - DNA, 33 bp, Homo sapiens
ttataaaacatcaacattctgtttaccattgca

SEQ ID NO: 5971 - DNA, 33 bp, Homo sapiens
agttttggacaatttctaatacactgcataatt

SEQ ID NO: 5972 - DNA, 33 bp, Homo sapiens
acatccagtcaccaaacactgtatatttgacta

SEQ ID NO: 5973 - DNA, 33 bp, Homo sapiens
aagacttgaataaagtgaagggcaatttagagg

SEQ ID NO: 5974 - DNA, 51 bp, Homo sapiens
catgattatgctagaaaacctgatatagttgttaaatggttgtactgagaa

SEQ ID NO: 5975 - DNA, 33 bp, Homo sapiens
ttgcaatcaccaactacatccaaattgggcagt

SEQ ID NO: 5976 - DNA, 33 bp, Homo sapiens
catgaattcatttccagtataccaaagttgtct

SEQ ID NO: 5977 - DNA, 33 bp, Homo sapiens
aaaaatctaaagatcccaccaggtccatgaggt

SEQ ID NO: 5978 - DNA, 33 bp, Homo sapiens
tatcctccagctggtgtatattgtcaaaacagg

SEQ ID NO: 5979 - DNA, 33 bp, Homo sapiens
atggaattcaagctagtcattaagcatacactg

SEQ ID NO: 5980 - DNA, 33 bp, Homo sapiens
gataaagtagtggagtcaaagtgatacagaaca

SEQ ID NO: 5981 - DNA, 33 bp, Homo sapiens
atagttaaggtaaaaatgtcacataatgcttta

SEQ ID NO: 5982 - DNA, 33 bp, Homo sapiens
gtgtgcagttgtcccatggcttttggtcaagta

SEQ ID NO: 5983 - DNA, 33 bp, Homo sapiens
tgtcattatgacaggagatatacgtatgaaata

SEQ ID NO: 5984 - DNA, 33 bp, Homo sapiens
tttatggatgacttaagtgtcctcagaaataca

SEQ ID NO: 5985 - DNA, 33 bp, Homo sapiens
ttgacattttaatcaggctgactgcaagcgaac

SEQ ID NO: 5986 - DNA, 33 bp, Homo sapiens
ggtattataaatattggaacagtgacttatatg

SEQ ID NO: 5987 - DNA, 33 bp, Homo sapiens
aatgaattagtcttaagtcagaagcttttattt

SEQ ID NO: 5988 - DNA, 33 bp, Homo sapiens
ccacattgttgcgcacgcagtttcctctgctgc

SEQ ID NO: 5989 - DNA, 33 bp, Homo sapiens
agggcagaattagagattacctggtctaacatc

SEQ ID NO: 5990 - DNA, 33 bp, Homo sapiens
cacccacaaaccataagaaatgatggctatgtt

SEQ ID NO: 5991 - DNA, 33 bp, Homo sapiens
aagaaggctggaaaaatatgacccctcaaaaaa

SEQ ID NO: 5992 - DNA, 33 bp, Homo sapiens
actgtgcctgactcaatttcagcctcataatac

SEQ ID NO: 5993 - DNA, 33 bp, Homo sapiens
catatgtatatactgatgacaaagaggaagaga

SEQ ID NO: 5994 - DNA, 51 bp, Homo sapiens
agcatacacggtcttttaagcaagcgcccgttttcacttctttgccttcta

SEQ ID NO: 5995 - DNA, 33 bp, Homo sapiens
gtttagtttagtggcacgtgattaataaggcca

SEQ ID NO: 5996 - DNA, 33 bp, Homo sapiens
atggaacacacggagatgatggaactgcagggc

SEQ ID NO: 5997 - DNA, 33 bp, Homo sapiens
actataaatgaatagggccaacataaaacgata

SEQ ID NO: 5998 - DNA, 33 bp, Homo sapiens
tggagaaatatgaacctgaaactagtataatac

SEQ ID NO: 5999 - DNA, 33 bp, Homo sapiens
aacatgggtttcaaacgcacaggtccatttata

SEQ ID NO: 6000 - DNA, 33 bp, Homo sapiens
tattttcatcagtctataccgtgaggagtggtg

SEQ ID NO: 6001 - DNA, 51 bp, Homo sapiens
aaaactttttctgtaaagggtcagagagtaaacaatttcagctttataggc

SEQ ID NO: 6002 - DNA, 51 bp, Homo sapiens
ctaatcacttagagtccataaatactgcataggatattaaggtttgcttct

SEQ ID NO: 6003 - DNA, 33 bp, Homo sapiens
aaaaactggggatggaggtaccagcagatttat

SEQ ID NO: 6004 - DNA, 33 bp, Homo sapiens
ccaataggctatagaatgatgccaacacataat

SEQ ID NO: 6005 - DNA, 33 bp, Homo sapiens
tcacattgctgtacaacaagtctctataatttt

SEQ ID NO: 6006 - DNA, 33 bp, Homo sapiens
gactaatgtctctctacattgcataaaactaag

SEQ ID NO: 6007 - DNA, 33 bp, Homo sapiens
ctaccaatccagaagcggctaggtcacatttct

SEQ ID NO: 6008 - DNA, 33 bp, Homo sapiens
cccactgaatggcaagtctaaaagaagtgctgt

SEQ ID NO: 6009 - DNA, 33 bp, Homo sapiens
ttgatactaaatctccgccatcttgccatacaa

SEQ ID NO: 6010 - DNA, 51 bp, Homo sapiens
aaatctctattgaagtacttttcaatatagacattaaaattgctgcagtaa

SEQ ID NO: 6011 - DNA, 51 bp, Homo sapiens
gttttccatattaatatgatgattatactagtttgcattcatttttaaaag

SEQ ID NO: 6012 - DNA, 33 bp, Homo sapiens
aaatgatgaactaggagtagtgcacaggtgata

SEQ ID NO: 6013 - DNA, 33 bp, Homo sapiens
gaggataaagccaccatgaaatataaaaacata

SEQ ID NO: 6014 - DNA, 33 bp, Homo sapiens
aaaagtaacctcagacgacataacaacaaacca

SEQ ID NO: 6015 - DNA, 51 bp, Homo sapiens
atttaatttggataagtatttaggagtattatcctgagttgatgtatttta

SEQ ID NO: 6016 - DNA, 33 bp, Homo sapiens
gcagtttatcaattcagaacaagtcaggatatt

SEQ ID NO: 6017 - DNA, 51 bp, Homo sapiens
ccctagcaatttgtctcaaatttcatgcataggatcaaaagaaaatgtttt

SEQ ID NO: 6018 - DNA, 51 bp, Homo sapiens
aacatatgattctcttcaaaaacaagtagcagtcaataaagtaggaatttc

SEQ ID NO: 6019 - DNA, 33 bp, Homo sapiens
taaacattacacttcagtctttgttcatgtgca

SEQ ID NO: 6020 - DNA, 33 bp, Homo sapiens
attcatcatcttattcgcacagttattatgtat

SEQ ID NO: 6021 - DNA, 33 bp, Homo sapiens
agaaaaggctgatttcgatgacaggaactctat

SEQ ID NO: 6022 - DNA, 33 bp, Homo sapiens
ccagggtatcttcaaagtatttcccgcttataa

SEQ ID NO: 6023 - DNA, 51 bp, Homo sapiens
gatcaagtggcaataaattagtaaatgtcatgcaaacaaaagcaaatgatt

SEQ ID NO: 6024 - DNA, 33 bp, Homo sapiens
gacctcagcgagattatagactggtggagaaat

SEQ ID NO: 6025 - DNA, 33 bp, Homo sapiens
ataattatatccaaaagtgtctgccgtgtggta

SEQ ID NO: 6026 - DNA, 33 bp, Homo sapiens
gtcttttcctgggtatcaggtgtactcctgggt

SEQ ID NO: 6027 - DNA, 51 bp, Homo sapiens
aaaatatctagagacattggaggaccactatctataaaattaaggcataga

SEQ ID NO: 6028 - DNA, 33 bp, Homo sapiens
tataaaatgcaagacagagttcagatgttttta

SEQ ID NO: 6029 - DNA, 33 bp, Homo sapiens
agctacagaacacggtgaccatacacacttggc

SEQ ID NO: 6030 - DNA, 51 bp, Homo sapiens
tgaatgctgcagtgagtaatttctatgcatattgttctgaaccatagtttg

SEQ ID NO: 6031 - DNA, 51 bp, Homo sapiens
tgtttctcaaaacaaaatcaaaattgaactatcatatgatcaagcaatacc

SEQ ID NO: 6032 - DNA, 33 bp, Homo sapiens
gaggaaactcatgctacatgaaaaaccaacaag

SEQ ID NO: 6033 - DNA, 33 bp, Homo sapiens
gatagatcaaaaactcggaagagacaaagctcg

SEQ ID NO: 6034 - DNA, 33 bp, Homo sapiens
gcataaaattctgtcagtctgttaaacttgtaa

SEQ ID NO: 6035 - DNA, 33 bp, Homo sapiens
tgcagttccttccatcgagagacggagtcaatt

SEQ ID NO: 6036 - DNA, 33 bp, Homo sapiens
cctgaagtcaaccacagtgaatggtgagtctgg

SEQ ID NO: 6037 - DNA, 33 bp, Homo sapiens
agaagacatgaagaggcaattcatgaagtagaa

SEQ ID NO: 6038 - DNA, 33 bp, Homo sapiens
aaccaagatattgacattgatattgtcaggtta

SEQ ID NO: 6039 - DNA, 33 bp, Homo sapiens
taattctccatcttaatatttctcatgccacat

SEQ ID NO: 6040 - DNA, 33 bp, Homo sapiens
ggatgctggccaggccgaaataatagatgccca

SEQ ID NO: 6041 - DNA, 33 bp, Homo sapiens
gtgttctctgctttgaggtttggccaaaatcct

SEQ ID NO: 6042 - DNA, 33 bp, Homo sapiens
ccaatcagccatagccggaaggtgcgtaggact

SEQ ID NO: 6043 - DNA, 33 bp, Homo sapiens
ctctgcaatatggttcgctgtaagaatgggaaa

SEQ ID NO: 6044 - DNA, 33 bp, Homo sapiens
gaggggattataggaaggaacagcattgatacc

SEQ ID NO: 6045 - DNA, 33 bp, Homo sapiens
ctcccagaaagaggcctgccttagtatccctgc

SEQ ID NO: 6046 - DNA, 33 bp, Homo sapiens
atgccttgctgtaggatctgtggattagcagta

SEQ ID NO: 6047 - DNA, 33 bp, Homo sapiens
caagaatagctgaggcgatcttcaagaacaaag

SEQ ID NO: 6048 - DNA, 33 bp, Homo sapiens
tctagtcctctcaggccacgggcactttttcct

SEQ ID NO: 6049 - DNA, 33 bp, Homo sapiens
ttggcagctgtggaaaccctggtaagaactgta

SEQ ID NO: 6050 - DNA, 33 bp, Homo sapiens
cgtattccttgcttaattgtgaactccagaaag

SEQ ID NO: 6051 - DNA, 33 bp, Homo sapiens
acctttctacaagcacgcatttaagcttataca

SEQ ID NO: 6052 - DNA, 33 bp, Homo sapiens
ggggcacgctcaagaatagcacctccattaatt

SEQ ID NO: 6053 - DNA, 33 bp, Homo sapiens
acatataccagtggaatggaacagataacctag

SEQ ID NO: 6054 - DNA, 33 bp, Homo sapiens
gtagcagcaaagcgaatgtagaaaagcagggac

SEQ ID NO: 6055 - DNA, 33 bp, Homo sapiens
tttgttctgtggataagaaagtggtagagcctg

SEQ ID NO: 6056 - DNA, 33 bp, Homo sapiens
ctacaccatgcccaaagttgtgacctatgaaac

SEQ ID NO: 6057 - DNA, 33 bp, Homo sapiens
attaaatattgctttcgaatggaaacgtaattt

SEQ ID NO: 6058 - DNA, 33 bp, Homo sapiens
cagtgtctaatttctgcaattgcaaaccataac

SEQ ID NO: 6059 - DNA, 33 bp, Homo sapiens
atgctgccctgttagatgtgtaaagcagcccta

SEQ ID NO: 6060 - DNA, 33 bp, Homo sapiens
ttgatagtagagtcaaggtaaattagtaataca

SEQ ID NO: 6061 - DNA, 33 bp, Homo sapiens
tattaccagttgtaaatagagcagggagaagtt

SEQ ID NO: 6062 - DNA, 33 bp, Homo sapiens
gaccctgagaatgaaatgaggggaagggaataa

SEQ ID NO: 6063 - DNA, 33 bp, Homo sapiens
acaaaggtacaatgcccaatggctttcatctgt

SEQ ID NO: 6064 - DNA, 33 bp, Homo sapiens
ttcctctgtccaaagcgacatacaagtaacagg

SEQ ID NO: 6065 - DNA, 51 bp, Homo sapiens
tacttgaacccaacttatgcttaaatattgaaacatttaccaaatatcttc

SEQ ID NO: 6066 - DNA, 51 bp, Homo sapiens
ggtcattttattgttttgttttgaagtcaagtggcagacatagacactggc

SEQ ID NO: 6067 - DNA, 33 bp, Homo sapiens
agaatacacttactgagaataaaacatgaagag

SEQ ID NO: 6068 - DNA, 51 bp, Homo sapiens
ggtactttttctccctcaaataaatgagctaaataatgaagctcattcata

SEQ ID NO: 6069 - DNA, 33 bp, Homo sapiens
caaatgttgctcaattgaagaatgaataattac

SEQ ID NO: 6070 - DNA, 33 bp, Homo sapiens
gagaagcatgatggcagatgaaatcttatattg

SEQ ID NO: 6071 - DNA, 33 bp, Homo sapiens
gacattacccgtgctaggagaatataggatcag

SEQ ID NO: 6072 - DNA, 33 bp, Homo sapiens
tgtcaacaggataagcgcatttggaccatgata

SEQ ID NO: 6073 - DNA, 33 bp, Homo sapiens
gaatgaaacctcagaattggcctgtatttattt

SEQ ID NO: 6074 - DNA, 33 bp, Homo sapiens
gtaataagctccttaagtgattcctgatcccag

SEQ ID NO: 6075 - DNA, 33 bp, Homo sapiens
tatgatttccatgttatgttggctttggcacag

SEQ ID NO: 6076 - DNA, 33 bp, Homo sapiens
ctctctgattcagtaatgctaatccttggactc

SEQ ID NO: 6077 - DNA, 33 bp, Homo sapiens
agagactagaaagcaagtccaattcaaatcact

SEQ ID NO: 6078 - DNA, 33 bp, Homo sapiens
actacatctttcccaggccacacagctggatga

SEQ ID NO: 6079 - DNA, 33 bp, Homo sapiens
cacaactcaagcatcagaagctccatgtccaca

SEQ ID NO: 6080 - DNA, 33 bp, Homo sapiens
agatggtaacttccactcagaaggctatgttgg

SEQ ID NO: 6081 - DNA, 33 bp, Homo sapiens
gtcacgatgcttaatgtcacttgcattgttagc

SEQ ID NO: 6082 - DNA, 51 bp, Homo sapiens
ctgctgtacagcaagattcatgcaagagtctacattttctgctttcaagta

SEQ ID NO: 6083 - DNA, 33 bp, Homo sapiens
gttgaggtaaaatcactggaatctagtgtcata

SEQ ID NO: 6084 - DNA, 33 bp, Homo sapiens
aagtaacacattctgctctgtgctggcaattct

SEQ ID NO: 6085 - DNA, 51 bp, Homo sapiens
ggggtgagggtaataagctccttaagtgattcctgatcccagctgcactga

SEQ ID NO: 6086 - DNA, 33 bp, Homo sapiens
gactggctgacaattatatccatgcagtgttag

SEQ ID NO: 6087 - DNA, 33 bp, Homo sapiens
agggccaagacaccaaggcaggtatatgcctaa

SEQ ID NO: 6088 - DNA, 33 bp, Homo sapiens
tgtactaaaaagctaagcagcacttctgtggac

SEQ ID NO: 6089 - DNA, 33 bp, Homo sapiens
acctgagatagcaaaggaagtctatagtacatt

SEQ ID NO: 6090 - DNA, 33 bp, Homo sapiens
tataaagtagccaaaggcaaagtagaatttacc

SEQ ID NO: 6091 - DNA, 33 bp, Homo sapiens
cttccaagcactgacagaaatgttgtactctta

SEQ ID NO: 6092 - DNA, 33 bp, Homo sapiens
tttgtgagctcacttatgatgtattatgcttag

SEQ ID NO: 6093 - DNA, 33 bp, Homo sapiens
ggggttacagtagggcgagaaaagtatgaggag

SEQ ID NO: 6094 - DNA, 33 bp, Homo sapiens
ggggtaagtgaccgattagtaagagattgtgct

SEQ ID NO: 6095 - DNA, 33 bp, Homo sapiens
tgaccagttgacctcatgaacaggggcccactc

SEQ ID NO: 6096 - DNA, 33 bp, Homo sapiens
ccacatctgtgaatgatgtagtgcaaatatctc

SEQ ID NO: 6097 - DNA, 51 bp, Homo sapiens
acaagattacctgagaatgtcattaccaattttatcgtttcaattcagaaa

SEQ ID NO: 6098 - DNA, 33 bp, Homo sapiens
tccactcggaaacagcgaggtagtacacaaaga

SEQ ID NO: 6099 - DNA, 33 bp, Homo sapiens
gatataggctgcttcattcatctccaaccgttt

SEQ ID NO: 6100 - DNA, 51 bp, Homo sapiens
accaactcttacctaccctctgtcagtaacttactaattagaatccctgtc

SEQ ID NO: 6101 - DNA, 51 bp, Homo sapiens
gtggttgggatacaaatcttgaatagccatctattgtggccaccatagtct

SEQ ID NO: 6102 - DNA, 33 bp, Homo sapiens
aattagagtggaaaggtcatgggtcagagtgtt

SEQ ID NO: 6103 - DNA, 33 bp, Homo sapiens
tcagacctacaaagacgctatacttatagaacc

SEQ ID NO: 6104 - DNA, 33 bp, Homo sapiens
cgatggaacactagaatttagcctcttacagac

SEQ ID NO: 6105 - DNA, 33 bp, Homo sapiens
ttgtgccactgtactggataagctgtagaagac

SEQ ID NO: 6106 - DNA, 33 bp, Homo sapiens
aggttaagtatttgtcgagcactgttatctacg

SEQ ID NO: 6107 - DNA, 33 bp, Homo sapiens
tccttgccaattagccgagtatctgtctttcct

SEQ ID NO: 6108 - DNA, 33 bp, Homo sapiens
tttatcctaactcttagagcaactagctttgag

SEQ ID NO: 6109 - DNA, 33 bp, Homo sapiens
tggttctgggaactcacattatgaccttattgc

SEQ ID NO: 6110 - DNA, 33 bp, Homo sapiens
ttcattcaatttatgcgacacctttcatcttca

SEQ ID NO: 6111 - DNA, 33 bp, Homo sapiens
ctccatgagaattggaggtggtaaaaaagaact

SEQ ID NO: 6112 - DNA, 33 bp, Homo sapiens
tctgaacttgtttctagacacaggtaaaaaata

SEQ ID NO: 6113 - DNA, 33 bp, Homo sapiens
ttacagagtgggctaattggtactggattgtcc

SEQ ID NO: 6114 - DNA, 33 bp, Homo sapiens
acccagactgtatggctcatctagcctcatcgt

SEQ ID NO: 6115 - DNA, 51 bp, Homo sapiens
agttacctggaaacacaaacgaaaatgaatgagaggaagatgaagaatagg

SEQ ID NO: 6116 - DNA, 33 bp, Homo sapiens
cctagatccagtagaatgcacttttgcgcacac

SEQ ID NO: 6117 - DNA, 33 bp, Homo sapiens
tctgttctatagcatatctggatttcagtaaag

SEQ ID NO: 6118 - DNA, 33 bp, Homo sapiens
catgtctcaagaaatatgctgcaaatatatact

SEQ ID NO: 6119 - DNA, 33 bp, Homo sapiens
tgtgagcattaagggcgaaaggcaaatgaagtg

SEQ ID NO: 6120 - DNA, 33 bp, Homo sapiens
ttagagccagacaaaggatatgcactcaacctt

SEQ ID NO: 6121 - DNA, 33 bp, Homo sapiens
aggtattgaatcaacctatgttcccatcaactg

SEQ ID NO: 6122 - DNA, 33 bp, Homo sapiens
gcttatactagtccaagtaagcattaggtcata

SEQ ID NO: 6123 - DNA, 33 bp, Homo sapiens
ttaccttttcctgcactctattcccccacatga

SEQ ID NO: 6124 - DNA, 33 bp, Homo sapiens
ttttgccctccctaccgctcactctacttcata

SEQ ID NO: 6125 - DNA, 33 bp, Homo sapiens
gatttctggatcatacgatagttaatttcagtt

SEQ ID NO: 6126 - DNA, 33 bp, Homo sapiens
tgaaaccaattaggaagatgtaggtgaagaagc

SEQ ID NO: 6127 - DNA, 33 bp, Homo sapiens
tgttcttcttactgtatatgaaatggctttgca

SEQ ID NO: 6128 - DNA, 51 bp, Homo sapiens
aaaatgaaaccagtctcatccatattattgtcactgatacaagtgcatttt

SEQ ID NO: 6129 - DNA, 51 bp, Homo sapiens
ttagacacattcatcctgcaaacactgagtattctgttcattattctagtg

SEQ ID NO: 6130 - DNA, 51 bp, Homo sapiens
ttccaataatcttggcgaattgttatactgtaaactcagaaaattaacatt

SEQ ID NO: 6131 - DNA, 51 bp, Homo sapiens
cttcaaaattgtgtttctagcaacttactttaacttatgaacccttcattg

SEQ ID NO: 6132 - DNA, 51 bp, Homo sapiens
cttgcaactaatgtaaactacctcagaataagagtcaactaagagtaccca

SEQ ID NO: 6133 - DNA, 33 bp, Homo sapiens
ctgaattatacactgttaaagggtgaattttat

SEQ ID NO: 6134 - DNA, 33 bp, Homo sapiens
tatccaattaaactcctcaaggttcatattaga

SEQ ID NO: 6135 - DNA, 33 bp, Homo sapiens
gtcagcaagaagaaccgaaaaataattccttcc

SEQ ID NO: 6136 - DNA, 33 bp, Homo sapiens
gctgcaaaaacctcaattggattacgttcaact

SEQ ID NO: 6137 - DNA, 33 bp, Homo sapiens
ccctcactatggtctgcaagtttatatttcccc

SEQ ID NO: 6138 - DNA, 33 bp, Homo sapiens
atgtagttcaatctaacacatatgtcttcttca

SEQ ID NO: 6139 - DNA, 33 bp, Homo sapiens
gtcaccctggtaatggtaacagaaacattcagg

SEQ ID NO: 6140 - DNA, 33 bp, Homo sapiens
ttatctttcatcttccgcttctttcattttctc

SEQ ID NO: 6141 - DNA, 33 bp, Homo sapiens
aggcctgttatttccatctctcaattacttctc

SEQ ID NO: 6142 - DNA, 33 bp, Homo sapiens
ggaggggaatgacacatagtgagcctgtcaaag

SEQ ID NO: 6143 - DNA, 33 bp, Homo sapiens
tccttccatagctttatacagttaacagattaa

SEQ ID NO: 6144 - DNA, 33 bp, Homo sapiens
tatttactcaactaactactgctaaaatcaatg

SEQ ID NO: 6145 - DNA, 51 bp, Homo sapiens
ttctttcatcattgcttatgcatcattcatctaaaagggctgatctgatct

SEQ ID NO: 6146 - DNA, 33 bp, Homo sapiens
aagtcggctccacaggtcattaattccactata

SEQ ID NO: 6147 - DNA, 33 bp, Homo sapiens
catacaaccagttgactaaacttttggacatgg

SEQ ID NO: 6148 - DNA, 33 bp, Homo sapiens
tcttgcctggaaagaatgtatgaggccttctca

SEQ ID NO: 6149 - DNA, 33 bp, Homo sapiens
atgctccaaaagctaattctttcattgataagt

SEQ ID NO: 6150 - DNA, 33 bp, Homo sapiens
ctgaggggttacaggatggagtgaccaaagtgg

SEQ ID NO: 6151 - DNA, 33 bp, Homo sapiens
cccagtatgtggcatccagtaagttctcaataa

SEQ ID NO: 6152 - DNA, 33 bp, Homo sapiens
ctgaagtgagcaataatggctgatccctgtccc

SEQ ID NO: 6153 - DNA, 33 bp, Homo sapiens
ttaaataacctgctcagtatcacaaagccgagt

SEQ ID NO: 6154 - DNA, 33 bp, Homo sapiens
atcaacaggaaatctatacaaactctgtaatgc

SEQ ID NO: 6155 - DNA, 33 bp, Homo sapiens
ggatcatctagaaatatcttatgggctacatct

SEQ ID NO: 6156 - DNA, 33 bp, Homo sapiens
caaagttatctatgcattccaatcaacagtgag

SEQ ID NO: 6157 - DNA, 51 bp, Homo sapiens
ataaaaaatcaaaagtcaatagtcacctgatactcagtcttgatttagctc

SEQ ID NO: 6158 - DNA, 33 bp, Homo sapiens
agggtatcaagttatatgttgcagcacaccact

SEQ ID NO: 6159 - DNA, 33 bp, Homo sapiens
ttttcaacaaatattccacaagaactcagtcag

SEQ ID NO: 6160 - DNA, 33 bp, Homo sapiens
agataaggcagcataaggctagacgttaatttt

SEQ ID NO: 6161 - DNA, 33 bp, Homo sapiens
gggaagctaagcctgagattaaaaggactcggt

SEQ ID NO: 6162 - DNA, 33 bp, Homo sapiens
ataatcactgaaccatgacggcaggttcacatc

SEQ ID NO: 6163 - DNA, 33 bp, Homo sapiens
ttctccgtattttacctcacttcttgtcccagc

SEQ ID NO: 6164 - DNA, 33 bp, Homo sapiens
gtagccttcctggagatgatctcaccaacactt

SEQ ID NO: 6165 - DNA, 33 bp, Homo sapiens
tatttgaaattcgcaccctattctagtctaacc

SEQ ID NO: 6166 - DNA, 33 bp, Homo sapiens
gcagattttttaaaacgaagaacattctatcct

SEQ ID NO: 6167 - DNA, 33 bp, Homo sapiens
acacgagctggcttaatgggcagcctaacctgc

SEQ ID NO: 6168 - DNA, 33 bp, Homo sapiens
tgagtgttcatagataggcagagaggaagtcac

SEQ ID NO: 6169 - DNA, 33 bp, Homo sapiens
actcatatataatgactcagacaagaccgagac

SEQ ID NO: 6170 - DNA, 33 bp, Homo sapiens
caaaagcacagtgtcatgaaatagcctgaagtg

SEQ ID NO: 6171 - DNA, 33 bp, Homo sapiens
aagcctcggacacaaaggagtttgtattcacac

SEQ ID NO: 6172 - DNA, 33 bp, Homo sapiens
aaggaccttgtttttatgtgtctggactagcat

SEQ ID NO: 6173 - DNA, 33 bp, Homo sapiens
attccccttctggttggagatttagtgatcagt

SEQ ID NO: 6174 - DNA, 33 bp, Homo sapiens
acttctgagctggccagggaggaaaaagatgtg

SEQ ID NO: 6175 - DNA, 33 bp, Homo sapiens
gctgctgcgtggggtatggcattttctttctgc

SEQ ID NO: 6176 - DNA, 33 bp, Homo sapiens
gacagacaaccatgcaggtgatccctaaattat

SEQ ID NO: 6177 - DNA, 33 bp, Homo sapiens
cccagtagttggggaatgagtacctggacctac

SEQ ID NO: 6178 - DNA, 51 bp, Homo sapiens
ggagattctagatttatttggtctagctgggaaataccctccttttgtaaa

SEQ ID NO: 6179 - DNA, 51 bp, Homo sapiens
cactgggagtgcttatagatgataattgggaatctactcctatatgtcacc

SEQ ID NO: 6180 - DNA, 51 bp, Homo sapiens
gtgcctcatgatgattgtatgactcgcattgggatttgggctctgggctaa

SEQ ID NO: 6181 - DNA, 51 bp, Homo sapiens
acacacaaatttttttaatccagaagctacataatgatcactttatatttt

SEQ ID NO: 6182 - DNA, 33 bp, Homo sapiens
cacaccttttctttcctacctcctcagaagatg

SEQ ID NO: 6183 - DNA, 33 bp, Homo sapiens
tacaatggaaaatgtctaggttgaagcaagttc

SEQ ID NO: 6184 - DNA, 33 bp, Homo sapiens
acacacttcactgcacgaagtaggaatctcaga

SEQ ID NO: 6185 - DNA, 33 bp, Homo sapiens
tggtaagaactgaaactctctatacttacgcag

SEQ ID NO: 6186 - DNA, 33 bp, Homo sapiens
cacctttcccagcatggcaaacttacttgaaca

SEQ ID NO: 6187 - DNA, 33 bp, Homo sapiens
gaattcttgtaaaggcgaattatcttctccaag

SEQ ID NO: 6188 - DNA, 33 bp, Homo sapiens
cagtcatactggctgagaaaacgagaacattgt

SEQ ID NO: 6189 - DNA, 33 bp, Homo sapiens
tccctgggctccaaaatctgtgccagctggaaa

SEQ ID NO: 6190 - DNA, 51 bp, Homo sapiens
tcaaaagatgggaaattgtaaccaagtgttgaaatatgataattaactcct

SEQ ID NO: 6191 - DNA, 33 bp, Homo sapiens
gaaatgtgtggaatcatagaatcattttcccag

SEQ ID NO: 6192 - DNA, 51 bp, Homo sapiens
tctagccctcaggaagctgatttgttaaaataccaagggttggcctgacag

SEQ ID NO: 6193 - DNA, 33 bp, Homo sapiens
cacatccttcaaatgccagaactacaccataat

SEQ ID NO: 6194 - DNA, 33 bp, Homo sapiens
gggaaggagatcaaaatctaaagttgttacatt

SEQ ID NO: 6195 - DNA, 33 bp, Homo sapiens
aattgacaaacaaaaagttggatatcgctacag

SEQ ID NO: 6196 - DNA, 51 bp, Homo sapiens
cacaagaggtatgcctaaaagtgcatgatttccatcagagaaatggacaga

SEQ ID NO: 6197 - DNA, 33 bp, Homo sapiens
agtgccataagttatagggaggacagcagcttc

SEQ ID NO: 6198 - DNA, 33 bp, Homo sapiens
actttctcaaggtcaagttaattccaaagacat

SEQ ID NO: 6199 - DNA, 33 bp, Homo sapiens
atctgtggcaagaaactgtgttcaattactaaa

SEQ ID NO: 6200 - DNA, 33 bp, Homo sapiens
tggtctttgaactacataatcagaccacataga

SEQ ID NO: 6201 - DNA, 33 bp, Homo sapiens
cttaaaggtagtccaatcattagagggaattag

SEQ ID NO: 6202 - DNA, 33 bp, Homo sapiens
ttcagaactatgtgtggaccagattgagtgtga

SEQ ID NO: 6203 - DNA, 33 bp, Homo sapiens
ttaatggcacgacccacgaactatcaatgagtt

SEQ ID NO: 6204 - DNA, 33 bp, Homo sapiens
gaaattcaactcttcagtaaaagggaaaaacta

SEQ ID NO: 6205 - DNA, 33 bp, Homo sapiens
gcatggagggatttaagagcaagaagatacaat

SEQ ID NO: 6206 - DNA, 33 bp, Homo sapiens
tttctgggcactactatgtgaatatctgcccag

SEQ ID NO: 6207 - DNA, 33 bp, Homo sapiens
ttttcatctttctcacgctgtatacctgagttt

SEQ ID NO: 6208 - DNA, 33 bp, Homo sapiens
agccaccacgccccaatagagcttcagttttac

SEQ ID NO: 6209 - DNA, 51 bp, Homo sapiens
tgctgtcttcttccacaggtatggcgacaatttctttcacaagctactcaa

SEQ ID NO: 6210 - DNA, 51 bp, Homo sapiens
ttacatatgaagccagtactcaaaataaaaaatcaaagtccataatctttc

SEQ ID NO: 6211 - DNA, 33 bp, Homo sapiens
atttgaaggagagggttaaatcacttgaaagtg

SEQ ID NO: 6212 - DNA, 51 bp, Homo sapiens
aaccttcatagttttttgctgtttgttttatatgaaagtggttttcctgta

SEQ ID NO: 6213 - DNA, 33 bp, Homo sapiens
atactttcatagaatacggaaacatgaaatggg

SEQ ID NO: 6214 - DNA, 33 bp, Homo sapiens
ccactctcccaaggatgagcacccagatagcct

SEQ ID NO: 6215 - DNA, 33 bp, Homo sapiens
ttggtttggtcccaatgaagaacattaaaaaaa

SEQ ID NO: 6216 - DNA, 33 bp, Homo sapiens
ttttgaaagcatatacggattgagcatcccaaa

SEQ ID NO: 6217 - DNA, 33 bp, Homo sapiens
aagtagacatatatggcaaagtcctactgcctt

SEQ ID NO: 6218 - DNA, 33 bp, Homo sapiens
gaaagagggaccctacgcgagaaagaaatagaa

SEQ ID NO: 6219 - DNA, 33 bp, Homo sapiens
ctggcatttcttttcatgtagcattatattaaa

SEQ ID NO: 6220 - DNA, 33 bp, Homo sapiens
tggatcttgttgttactatggatgacatttgtc

SEQ ID NO: 6221 - DNA, 33 bp, Homo sapiens
aatctccactaaatactaatgactgcttatagt

SEQ ID NO: 6222 - DNA, 33 bp, Homo sapiens
ctttgtaggacaattatattaatcccaaagtta

SEQ ID NO: 6223 - DNA, 33 bp, Homo sapiens
cttcctacttatgtcaggtaactttgggattaa

SEQ ID NO: 6224 - DNA, 33 bp, Homo sapiens
gtctccattagatcattaggtgacagtaatagt

SEQ ID NO: 6225 - DNA, 33 bp, Homo sapiens
ttcagcctggagtgaagtgacagattgagaccc

SEQ ID NO: 6226 - DNA, 33 bp, Homo sapiens
aatacagagaacagtcgactatcatcatcattt

SEQ ID NO: 6227 - DNA, 33 bp, Homo sapiens
gtagcaatcagaggtggagactgagagcaagcg

SEQ ID NO: 6228 - DNA, 33 bp, Homo sapiens
agtttcaagagtggacgaaaatataaaatttgc

SEQ ID NO: 6229 - DNA, 33 bp, Homo sapiens
tcaaaaaatgttaatatgtgctatgagaaaaca

SEQ ID NO: 6230 - DNA, 33 bp, Homo sapiens
ctccaggacctcaaatgagagaatccctacatg

SEQ ID NO: 6231 - DNA, 33 bp, Homo sapiens
tttataacactctgaagtctcataagctattct

SEQ ID NO: 6232 - DNA, 33 bp, Homo sapiens
cataatagcactgaaagttaagaatgtgtccat

SEQ ID NO: 6233 - DNA, 33 bp, Homo sapiens
aagaaactgtggaaaacattagatttatctgca

SEQ ID NO: 6234 - DNA, 33 bp, Homo sapiens
tgtgctataaggagaatttaagaaactgtggaa

SEQ ID NO: 6235 - DNA, 33 bp, Homo sapiens
catggaaaatacctcagtccaactgaccaaccg

SEQ ID NO: 6236 - DNA, 33 bp, Homo sapiens
ctcaagaatgtactgggaaaagtcattggtaat

SEQ ID NO: 6237 - DNA, 33 bp, Homo sapiens
ccttgtctccggagaagtaaggaagaaggtttg

SEQ ID NO: 6238 - DNA, 33 bp, Homo sapiens
tgaactgaagataaaatcccaagtcttcaggat

SEQ ID NO: 6239 - DNA, 33 bp, Homo sapiens
gctgataggtagtacaggcaggaaacccacaga

SEQ ID NO: 6240 - DNA, 51 bp, Homo sapiens
attaaatgtttttgtttgatatcgtgaactgatttatcctttttctttaga

SEQ ID NO: 6241 - DNA, 33 bp, Homo sapiens
gaggaagagacacgaacgtagttccagaagtgg

SEQ ID NO: 6242 - DNA, 33 bp, Homo sapiens
aaatgactagaaatgctcttgagttggactaaa

SEQ ID NO: 6243 - DNA, 51 bp, Homo sapiens
ctgtgctgctttctccacctgctacggacacttattcctcaaatctcacgt

SEQ ID NO: 6244 - DNA, 51 bp, Homo sapiens
aaagtgatattgaagagatacacaatgattttaatatatgtaggaagtata

SEQ ID NO: 6245 - DNA, 51 bp, Homo sapiens
tttaaataggaataattggaaatgcgaagagttaagtgatctggttaaagt

SEQ ID NO: 6246 - DNA, 51 bp, Homo sapiens
tgtatctgctaactttactacagtattaccattttcgatattacttataaa

SEQ ID NO: 6247 - DNA, 51 bp, Homo sapiens
gagtgaataaattttctaaatgctgcatagctccccttgaagttctgctgc

SEQ ID NO: 6248 - DNA, 33 bp, Homo sapiens
ttttctttgaagtgtattaagttctgtgagttt

SEQ ID NO: 6249 - DNA, 33 bp, Homo sapiens
gtagctccttttcctatatacctgtgagcaaca

SEQ ID NO: 6250 - DNA, 33 bp, Homo sapiens
ccaccttgttgagatatgtgactgttgtggagg

SEQ ID NO: 6251 - DNA, 33 bp, Homo sapiens
tgatcagcttgaaaaatgtagagggcaactcaa

SEQ ID NO: 6252 - DNA, 33 bp, Homo sapiens
atggtgtcaaaggggatcctcatgttcagcatt

SEQ ID NO: 6253 - DNA, 33 bp, Homo sapiens
ttaattaattaagtgtgaagtaactgctcaggt

SEQ ID NO: 6254 - DNA, 33 bp, Homo sapiens
gctgtcacaatttgtatgtttgttgggcaaaat

SEQ ID NO: 6255 - DNA, 33 bp, Homo sapiens
atattctcttacatcagaaagtaagtatcaaaa

SEQ ID NO: 6256 - DNA, 33 bp, Homo sapiens
ccatttcagttatcgatgatccagcccagtggc

SEQ ID NO: 6257 - DNA, 33 bp, Homo sapiens
agattgacatcttcacggaaactgcagacgtgg

SEQ ID NO: 6258 - DNA, 51 bp, Homo sapiens
acagctacaattttccaaatatacatcacttgtttcacatgtatctagaac

SEQ ID NO: 6259 - DNA, 51 bp, Homo sapiens
ggcattaaaagtagtcacttggttccaacaagcattaaaaacacatgtttc

SEQ ID NO: 6260 - DNA, 33 bp, Homo sapiens
cacaaaagcctgtaccgaaaacagagatgactt

SEQ ID NO: 6261 - DNA, 33 bp, Homo sapiens
tgtaagagctggaaaattagtcctaagaggctg

SEQ ID NO: 6262 - DNA, 33 bp, Homo sapiens
ataaatggccaaggtagcacttatgacaaatct

SEQ ID NO: 6263 - DNA, 33 bp, Homo sapiens
gaaagacactataggagccgttttgattctcta

SEQ ID NO: 6264 - DNA, 33 bp, Homo sapiens
aatactggataattactggccaaccaattggat

SEQ ID NO: 6265 - DNA, 33 bp, Homo sapiens
tacctccttttgtagcgctgtaataaatcctta

SEQ ID NO: 6266 - DNA, 51 bp, Homo sapiens
tcaaataactttccaagactccacattatccaacttagtgaaccttcatca

SEQ ID NO: 6267 - DNA, 33 bp, Homo sapiens
agaattgcttgtgatatattttgtctcattcaa

SEQ ID NO: 6268 - DNA, 33 bp, Homo sapiens
tttccttagtcttcaagtggcatcttttctgtc

SEQ ID NO: 6269 - DNA, 33 bp, Homo sapiens
ctgtgcattgtcaaacgccttaccaggacgtcc

SEQ ID NO: 6270 - DNA, 51 bp, Homo sapiens
ttgtttaatttaaaatataatatcatctactttgcacattatgctctaaaa

SEQ ID NO: 6271 - DNA, 33 bp, Homo sapiens
aggagaatagggcagataagtatgtgaaactac

SEQ ID NO: 6272 - DNA, 51 bp, Homo sapiens
gtaaagattaaacaatcttcttaatcaactttgcattaggaacaattaaat

SEQ ID NO: 6273 - DNA, 33 bp, Homo sapiens
tagattgatgttgctatcatataatttccaatt

SEQ ID NO: 6274 - DNA, 51 bp, Homo sapiens
ctcaatgacattcaggtttgccatagtggagcaagtagtgttaggccatca

SEQ ID NO: 6275 - DNA, 33 bp, Homo sapiens
ccatcaagacagacaactcaacaatactaagga

SEQ ID NO: 6276 - DNA, 33 bp, Homo sapiens
tttcaaagaagagatatcagagaatacagcttt

SEQ ID NO: 6277 - DNA, 33 bp, Homo sapiens
tcatttctaaccattgtcaatacaaacacaata

SEQ ID NO: 6278 - DNA, 33 bp, Homo sapiens
ccacaatatgaaatggtcaaacaataaacaaca

SEQ ID NO: 6279 - DNA, 33 bp, Homo sapiens
tattttttaatcaatatggaaattcagcctgga

SEQ ID NO: 6280 - DNA, 33 bp, Homo sapiens
agaactgtatatgagcgattttcctgaatataa

SEQ ID NO: 6281 - DNA, 33 bp, Homo sapiens
tgctttcagcaacaaataaccaccaagcaataa

SEQ ID NO: 6282 - DNA, 33 bp, Homo sapiens
gtgtgcttgcaactgaggtgagaccacaaagta

SEQ ID NO: 6283 - DNA, 33 bp, Homo sapiens
taaataaataagacacggtaaaggatcatgttt

SEQ ID NO: 6284 - DNA, 33 bp, Homo sapiens
agcaggtgctcactctgaaaaatacaatttaaa

SEQ ID NO: 6285 - DNA, 33 bp, Homo sapiens
ttggaatacctccttctatcagcacagagcttt

SEQ ID NO: 6286 - DNA, 33 bp, Homo sapiens
catccagaacttcccagatacaggcacaaacaa

SEQ ID NO: 6287 - DNA, 33 bp, Homo sapiens
ataaaacttggttctatgaaacaatcacatcct

SEQ ID NO: 6288 - DNA, 33 bp, Homo sapiens
ctatctaccatatcaccgagtctctctacttta

SEQ ID NO: 6289 - DNA, 33 bp, Homo sapiens
aataaaaaagaaatggcacagaaaaagctggta

SEQ ID NO: 6290 - DNA, 33 bp, Homo sapiens
gagagaagagggcttatagaagcagcaggcact

SEQ ID NO: 6291 - DNA, 33 bp, Homo sapiens
gaaacgtaataagtacgagagtgtagaggcaat

SEQ ID NO: 6292 - DNA, 33 bp, Homo sapiens
tacagtacaggttcacgggcttattcttcacaa

SEQ ID NO: 6293 - DNA, 33 bp, Homo sapiens
aatgctcaaatgtgtcgaagtgccaattgatct

SEQ ID NO: 6294 - DNA, 33 bp, Homo sapiens
ttgtgcttttcccagagagatgaaaagtgacaa

SEQ ID NO: 6295 - DNA, 33 bp, Homo sapiens
ttcatagtggacgctggagcctttagagtggag

SEQ ID NO: 6296 - DNA, 33 bp, Homo sapiens
tgcagatagttgtcaatatttggtgtttttgca

SEQ ID NO: 6297 - DNA, 33 bp, Homo sapiens
tgagcgctgtctctacgccatagccattgcatt

SEQ ID NO: 6298 - DNA, 33 bp, Homo sapiens
atgtactttttagatgtcaatttctgttgtgtt

SEQ ID NO: 6299 - DNA, 33 bp, Homo sapiens
actcacttattgaaccgacaaatatttatcatg

SEQ ID NO: 6300 - DNA, 33 bp, Homo sapiens
taaatgtggaggaaattagaagaagtgagtgct

SEQ ID NO: 6301 - DNA, 33 bp, Homo sapiens
gggtcaggctgaaaaagtatttgataaagtcat

SEQ ID NO: 6302 - DNA, 33 bp, Homo sapiens
attggagtagtataaccccacctcttaaagctg

SEQ ID NO: 6303 - DNA, 33 bp, Homo sapiens
tggatatttgaaaaaattctgtctattctggac

SEQ ID NO: 6304 - DNA, 33 bp, Homo sapiens
acattaaaatcaggcattaaactgtcttcttga

SEQ ID NO: 6305 - DNA, 33 bp, Homo sapiens
cgcaggtttgcttacagtcttgggagatagaga

SEQ ID NO: 6306 - DNA, 33 bp, Homo sapiens
atctgcctagtggacatctcatataaatggaca

SEQ ID NO: 6307 - DNA, 33 bp, Homo sapiens
cattttctatcacaaagttctgtaaaatctacc

SEQ ID NO: 6308 - DNA, 33 bp, Homo sapiens
cctctcttatttcctcgaatggtagtttgtagt

SEQ ID NO: 6309 - DNA, 51 bp, Homo sapiens
catgcccttcacttacttattttactgctggttccaacagtcagccctatt

SEQ ID NO: 6310 - DNA, 33 bp, Homo sapiens
cacaaaccaaccctcagtcttgaatcttcttta

SEQ ID NO: 6311 - DNA, 33 bp, Homo sapiens
agatatactgagaaaattccctgacagaactga

SEQ ID NO: 6312 - DNA, 33 bp, Homo sapiens
gtatctacatataagacctaccctatgccaggc

SEQ ID NO: 6313 - DNA, 33 bp, Homo sapiens
tcttgaaaatggtctagggatatacagcaaatg

SEQ ID NO: 6314 - DNA, 33 bp, Homo sapiens
ctctctaatctgtgaatgttattttgattacta

SEQ ID NO: 6315 - DNA, 33 bp, Homo sapiens
ttctcttctctgaagctgaacacatcacaaata

SEQ ID NO: 6316 - DNA, 33 bp, Homo sapiens
cactttcctccttcctgaattccttctgatata

SEQ ID NO: 6317 - DNA, 51 bp, Homo sapiens
agtagaatgttgaatcatgaaagaattaacaacaaattgcatgcacttcac

SEQ ID NO: 6318 - DNA, 51 bp, Homo sapiens
agggcagacccataccagagtttaatgtggcaacaaagtgtggttagacag

SEQ ID NO: 6319 - DNA, 51 bp, Homo sapiens
tcagatttctgacacaatggtaacatctatcccttctgcctgtgactgcca

SEQ ID NO: 6320 - DNA, 33 bp, Homo sapiens
gggctgagaggagatagattcaagggccacttt

SEQ ID NO: 6321 - DNA, 51 bp, Homo sapiens
ttttcactgaattgctataaccaaatctatagttcctgttgtcctgctgtc

SEQ ID NO: 6322 - DNA, 33 bp, Homo sapiens
ccgtatgtgggtttacggccccaacagggagta

SEQ ID NO: 6323 - DNA, 33 bp, Homo sapiens
caaagttacactctatgaaacacgacctgtttg

SEQ ID NO: 6324 - DNA, 33 bp, Homo sapiens
tgatctctgcttccaatctaggaccagagaaat

SEQ ID NO: 6325 - DNA, 33 bp, Homo sapiens
atctgtgtgagctggcgagtctatcttggtctc

SEQ ID NO: 6326 - DNA, 33 bp, Homo sapiens
ttatagcaatgagaactaacacagaactagcat

SEQ ID NO: 6327 - DNA, 33 bp, Homo sapiens
tgacctgagatggtcacaaccaggcgacacatg

SEQ ID NO: 6328 - DNA, 33 bp, Homo sapiens
agacacatttatgaaagcaaactaatatcacat

SEQ ID NO: 6329 - DNA, 51 bp, Homo sapiens
tagctcccaactggtatgatctgaagaatcagcggttactagggtaggaga

SEQ ID NO: 6330 - DNA, 33 bp, Homo sapiens
gaaagagaaaatagaagtggaagctgcaggcta

SEQ ID NO: 6331 - DNA, 33 bp, Homo sapiens
ctcttcagagtattgatacaacacaaggcacca

SEQ ID NO: 6332 - DNA, 33 bp, Homo sapiens
ctttaagatacatgcatcatatgacattttagt

SEQ ID NO: 6333 - DNA, 33 bp, Homo sapiens
aaaggaattactagtgtcaaacgctttttgcta

SEQ ID NO: 6334 - DNA, 33 bp, Homo sapiens
aataaaatcagccacagtgaaaagtaaaaatat

SEQ ID NO: 6335 - DNA, 33 bp, Homo sapiens
tacttcaacacatttcgagttaaaagatatttc

SEQ ID NO: 6336 - DNA, 33 bp, Homo sapiens
tatagagactccttcaggtagcaaaactttttt

SEQ ID NO: 6337 - DNA, 33 bp, Homo sapiens
catttctgaaggcaaagagtaaaacaagatctc

SEQ ID NO: 6338 - DNA, 33 bp, Homo sapiens
tattattttgtttaacgctctcattaatgctgt

SEQ ID NO: 6339 - DNA, 33 bp, Homo sapiens
acctcccctaccaaattaatcagttaagtcaat

SEQ ID NO: 6340 - DNA, 33 bp, Homo sapiens
gatgatgtttaagttgtaaccacatacctgtac

SEQ ID NO: 6341 - DNA, 51 bp, Homo sapiens
tccggtttcacagttgtcaaaagtatctgaaattgacaaacattgtaaact

SEQ ID NO: 6342 - DNA, 33 bp, Homo sapiens
catgagacagttgaaatgtctgaggagtccttg

SEQ ID NO: 6343 - DNA, 33 bp, Homo sapiens
atacctgtctgcagtagctaggctccatgatgg

SEQ ID NO: 6344 - DNA, 33 bp, Homo sapiens
agcaggcttcagagtcgcttgaaggatatgtta

SEQ ID NO: 6345 - DNA, 33 bp, Homo sapiens
tttagagaattcttccgaatctgatccaatacc

SEQ ID NO: 6346 - DNA, 33 bp, Homo sapiens
gctgcacagtgttccatggtaccacattgtctt

SEQ ID NO: 6347 - DNA, 33 bp, Homo sapiens
ttgggaaccttcctccgaagcctcagtaaattt

SEQ ID NO: 6348 - DNA, 33 bp, Homo sapiens
agaatataatatgttcgagaaggaatacgaaga

SEQ ID NO: 6349 - DNA, 33 bp, Homo sapiens
attgattaagttggaacagcagaagaaaacgtt

SEQ ID NO: 6350 - DNA, 51 bp, Homo sapiens
atttattattgtctggcatagaatcgagtttaggtaagagggtagccttca

SEQ ID NO: 6351 - DNA, 33 bp, Homo sapiens
tgcccactgtgaaaccccaaataaaagtgagag

SEQ ID NO: 6352 - DNA, 51 bp, Homo sapiens
atgaatcaaggttatatttctcttggaagacgaaaacattacctataccaa

SEQ ID NO: 6353 - DNA, 33 bp, Homo sapiens
cacacaaaaggcatcagagttcagaaatgttcg

SEQ ID NO: 6354 - DNA, 33 bp, Homo sapiens
ctttcctagttggggatgcctaaacttcatcga

SEQ ID NO: 6355 - DNA, 33 bp, Homo sapiens
acttgagagtaccatgcaggttacaattaacat

SEQ ID NO: 6356 - DNA, 33 bp, Homo sapiens
tttctcactgaaatcatattttaaatggagaaa

SEQ ID NO: 6357 - DNA, 33 bp, Homo sapiens
tctgatgataccaatagacaaagagacacacac

SEQ ID NO: 6358 - DNA, 33 bp, Homo sapiens
tccaattgttacaaaatgttcggagtctaaaca

SEQ ID NO: 6359 - DNA, 33 bp, Homo sapiens
gatctccttcactccacaatgtctcatggattt

SEQ ID NO: 6360 - DNA, 33 bp, Homo sapiens
caaagtgtatactcaatgactaattaggatgct

SEQ ID NO: 6361 - DNA, 33 bp, Homo sapiens
atagattagatagagcgatattatagagatgat

SEQ ID NO: 6362 - DNA, 33 bp, Homo sapiens
ttacataaggttagaatttcaaatacaatcaac

SEQ ID NO: 6363 - DNA, 33 bp, Homo sapiens
aatgtataatgatgcagaccagatcagagagag

SEQ ID NO: 6364 - DNA, 33 bp, Homo sapiens
tattttatcttttaggtatctgctaatcacttt

SEQ ID NO: 6365 - DNA, 33 bp, Homo sapiens
ttacttctcaaactattactacgacctgccagg

SEQ ID NO: 6366 - DNA, 33 bp, Homo sapiens
tcctggctcctgtagctcggtggagtgtgcagc

SEQ ID NO: 6367 - DNA, 33 bp, Homo sapiens
actggctctcaaacaacggttactctagacctg

SEQ ID NO: 6368 - DNA, 33 bp, Homo sapiens
tactgggattcacaacggttaaataatttttgc

SEQ ID NO: 6369 - DNA, 33 bp, Homo sapiens
atgactaccatctaaagaatagttctcggttag

SEQ ID NO: 6370 - DNA, 33 bp, Homo sapiens
agtaacaattttaggcgaagtatactacactca

SEQ ID NO: 6371 - DNA, 51 bp, Homo sapiens
gaagttttttcacgaaattatagaagaaagtttacacacaatggatctcta

SEQ ID NO: 6372 - DNA, 51 bp, Homo sapiens
aactgaaaattttataatggaaataggaagtataactctccaaatataagc

SEQ ID NO: 6373 - DNA, 33 bp, Homo sapiens
gatgtctgtgcttccagtgagcttcctggagga

SEQ ID NO: 6374 - DNA, 33 bp, Homo sapiens
ccaaaagaagattggcgaaggagaggagaaaga

SEQ ID NO: 6375 - DNA, 33 bp, Homo sapiens
ctggcaccttgaggaggagccaatctgacagga

SEQ ID NO: 6376 - DNA, 33 bp, Homo sapiens
gctggatatagaggtagaacctagctttgaggt

SEQ ID NO: 6377 - DNA, 33 bp, Homo sapiens
tataataatcacagccgctgaaattttgtcgct

SEQ ID NO: 6378 - DNA, 33 bp, Homo sapiens
gcctcacagtcttttctaaagctctaaacagct

SEQ ID NO: 6379 - DNA, 33 bp, Homo sapiens
acacagctaattcccagcatcacctaagaattc

SEQ ID NO: 6380 - DNA, 33 bp, Homo sapiens
accttgatgggcaaaatccaaattatggtttat

SEQ ID NO: 6381 - DNA, 33 bp, Homo sapiens
catttggatgtctcaatgactgactctttatgc

SEQ ID NO: 6382 - DNA, 33 bp, Homo sapiens
tacacaactttatacatggaatcaagttgcata

SEQ ID NO: 6383 - DNA, 33 bp, Homo sapiens
tcggatctccccattagcaagacatttataaga

SEQ ID NO: 6384 - DNA, 33 bp, Homo sapiens
cataccaaatcaaccctcagtttcacaggaata

SEQ ID NO: 6385 - DNA, 33 bp, Homo sapiens
gctatgataattcaaagtgaatgtgagttcact

SEQ ID NO: 6386 - DNA, 51 bp, Homo sapiens
aaaggaactaattcataaggtgtgataaattcaaagaaatgtcacttgtgt

SEQ ID NO: 6387 - DNA, 51 bp, Homo sapiens
catccatcttgatcccataaggtaattcatttcttacagaatttagggcta

SEQ ID NO: 6388 - DNA, 33 bp, Homo sapiens
gtaatacacacatttctaaacacatggcataat

SEQ ID NO: 6389 - DNA, 33 bp, Homo sapiens
cctggcctctgctcattaataaaggcactgctg

SEQ ID NO: 6390 - DNA, 33 bp, Homo sapiens
taataagacaatgaaggctgtaagacagttgta

SEQ ID NO: 6391 - DNA, 33 bp, Homo sapiens
ttagcacaagtctcacgcatcttcagttttata

SEQ ID NO: 6392 - DNA, 33 bp, Homo sapiens
tttgctccaggttagggagaagcccatgcaaga

SEQ ID NO: 6393 - DNA, 51 bp, Homo sapiens
gctaaagaaatatatgcgatgagtcgataaatacatatttattttcaagag

SEQ ID NO: 6394 - DNA, 33 bp, Homo sapiens
acagcttaatgataaatgactaatgtatgctgc

SEQ ID NO: 6395 - DNA, 33 bp, Homo sapiens
cactccctagacttacgctatcttaaggcattt

SEQ ID NO: 6396 - DNA, 33 bp, Homo sapiens
gtttccactgaacttatgctctgttgtgtctct

SEQ ID NO: 6397 - DNA, 33 bp, Homo sapiens
taattctatcaaaatataggttatggccaatct

SEQ ID NO: 6398 - DNA, 33 bp, Homo sapiens
tagatgctatgatcacggtcaacaaacatttag

SEQ ID NO: 6399 - DNA, 33 bp, Homo sapiens
tttcttggtctcaagagagaaaattgaaattat

SEQ ID NO: 6400 - DNA, 33 bp, Homo sapiens
ttcaggagtaaacctctatttgactgatggtag

SEQ ID NO: 6401 - DNA, 33 bp, Homo sapiens
gtattttgtttctggatcatacacattctgtga

SEQ ID NO: 6402 - DNA, 33 bp, Homo sapiens
tgggaagttggaaaggtcagaattggagctaac

SEQ ID NO: 6403 - DNA, 51 bp, Homo sapiens
ctaacaaatgtctttgtgataacaatgaagttaaatgaactgaatttgcta

SEQ ID NO: 6404 - DNA, 33 bp, Homo sapiens
agttgctttttgtatatagtctaaggaaaaggg

SEQ ID NO: 6405 - DNA, 33 bp, Homo sapiens
gtattttgatcgcttatagaagctaagacggta

SEQ ID NO: 6406 - DNA, 33 bp, Homo sapiens
aattcactttgaggagtatttcaaagctgatcc

SEQ ID NO: 6407 - DNA, 33 bp, Homo sapiens
ttagggtcctttccaattctgagactctcatct

SEQ ID NO: 6408 - DNA, 33 bp, Homo sapiens
tcctgaaaggcagagagataaaatgtcactcac

SEQ ID NO: 6409 - DNA, 33 bp, Homo sapiens
aacagctttacgtgcatcagtcctttaattgtt

SEQ ID NO: 6410 - DNA, 33 bp, Homo sapiens
tcctcacagcagaaacgcagggcagagaaattt

SEQ ID NO: 6411 - DNA, 33 bp, Homo sapiens
gggtgacaaaaagggagaatactctggacatag

SEQ ID NO: 6412 - DNA, 51 bp, Homo sapiens
taccttcagttgtaagtagatttaatggtgtcttacattgtttctcagctg

SEQ ID NO: 6413 - DNA, 33 bp, Homo sapiens
ttcgtgagttagggacgaagattggtctcttaa

SEQ ID NO: 6414 - DNA, 33 bp, Homo sapiens
gattactgccctcaaatgcttctttggacagcc

SEQ ID NO: 6415 - DNA, 33 bp, Homo sapiens
ttaagcaaaagaggccggactctatgattttat

SEQ ID NO: 6416 - DNA, 33 bp, Homo sapiens
gcctccactagcacaatcttaattcaaagcttt

SEQ ID NO: 6417 - DNA, 33 bp, Homo sapiens
ccatggaagaattgtaggaagagacaggtcgct

SEQ ID NO: 6418 - DNA, 33 bp, Homo sapiens
aggacaggggtttacataactgtatacttgcaa

SEQ ID NO: 6419 - DNA, 33 bp, Homo sapiens
ctgccatggagagtaagtgtagttcaaaagcaa

SEQ ID NO: 6420 - DNA, 33 bp, Homo sapiens
gcgctaatggctggtacatttctgaggtattgt

SEQ ID NO: 6421 - DNA, 51 bp, Homo sapiens
ctttgttacctaagaatgccttccacattgtatcaggatttcagagaaagt

SEQ ID NO: 6422 - DNA, 51 bp, Homo sapiens
tctaagtcaatagacaagtgacatttaacatatagaacatctttgagaata

SEQ ID NO: 6423 - DNA, 33 bp, Homo sapiens
aagacaaaatataaacgatgtgagtatgcctca

SEQ ID NO: 6424 - DNA, 33 bp, Homo sapiens
ctttctcaagaggcaggatgtaaactgaagtca

SEQ ID NO: 6425 - DNA, 33 bp, Homo sapiens
tattactcacaatccagtaaagatgggaacatg

SEQ ID NO: 6426 - DNA, 33 bp, Homo sapiens
tgaaaacagatgtaaagaactatatttcaacta

SEQ ID NO: 6427 - DNA, 33 bp, Homo sapiens
acaccagaagagaaattaactctaacaggccaa

SEQ ID NO: 6428 - DNA, 51 bp, Homo sapiens
ggagatccttctcttctccttaaactgaaatcatgattcctgtgctgtggg

SEQ ID NO: 6429 - DNA, 33 bp, Homo sapiens
aacctctcataaaccatattgttagttcagatg

SEQ ID NO: 6430 - DNA, 33 bp, Homo sapiens
ccacttctccttttaatgtgccacagatgcatg

SEQ ID NO: 6431 - DNA, 33 bp, Homo sapiens
tttttgaatctagcaagtaattgtctcagaaat

SEQ ID NO: 6432 - DNA, 51 bp, Homo sapiens
aacatgggctcctccacctcaaccttactataactgaattatttgcatctc

SEQ ID NO: 6433 - DNA, 33 bp, Homo sapiens
tgtcatcagactttcagaagagcaaattcatta

SEQ ID NO: 6434 - DNA, 33 bp, Homo sapiens
attatgggtgagccaagaaagggaaacatcaga

SEQ ID NO: 6435 - DNA, 33 bp, Homo sapiens
catataatcctgcaacgactctgatagggagac

SEQ ID NO: 6436 - DNA, 33 bp, Homo sapiens
atttaggtaccgtatgtatctctgaattaaaat

SEQ ID NO: 6437 - DNA, 33 bp, Homo sapiens
gacttactataacatagctacagtagtccagac

SEQ ID NO: 6438 - DNA, 33 bp, Homo sapiens
ttttacttaaggcatcgaattcagatagtcaca

SEQ ID NO: 6439 - DNA, 33 bp, Homo sapiens
ctctctcgcatatagcggacaaggattctccac

SEQ ID NO: 6440 - DNA, 33 bp, Homo sapiens
atatcccctgttaaaatagcgagaatatcaaag

SEQ ID NO: 6441 - DNA, 33 bp, Homo sapiens
tagagattttcgctgcgaacacatatatagcga

SEQ ID NO: 6442 - DNA, 51 bp, Homo sapiens
acacatgtcaaactggtcactagacgaggaattaaggattcaacgatgaac

SEQ ID NO: 6443 - DNA, 33 bp, Homo sapiens
atatattttgagttcagattcatcaattcagca

SEQ ID NO: 6444 - DNA, 51 bp, Homo sapiens
tccctcaagcttcctgttcacttaagagattattccttgaaaaataaattg

SEQ ID NO: 6445 - DNA, 51 bp, Homo sapiens
taacacccagcatcaacttgtcaacgaactgagtgagccatcttggacggg

SEQ ID NO: 6446 - DNA, 33 bp, Homo sapiens
agttatctaagttatatacgttttgcatcacca

SEQ ID NO: 6447 - DNA, 33 bp, Homo sapiens
gtacttgtctggctcagtaaggcagagatataa

SEQ ID NO: 6448 - DNA, 33 bp, Homo sapiens
tggtatcttactgccatgaagagtttgttctgt

SEQ ID NO: 6449 - DNA, 33 bp, Homo sapiens
tgcatatgattccagcggattagtagatccttt

SEQ ID NO: 6450 - DNA, 33 bp, Homo sapiens
ggtccatgccttttgatctatcagtagaaatat

SEQ ID NO: 6451 - DNA, 33 bp, Homo sapiens
aatatagagcgcccaaggactttgatttccaaa

SEQ ID NO: 6452 - DNA, 33 bp, Homo sapiens
ttaggaatgaagaggttaagtcccatagcccat

SEQ ID NO: 6453 - DNA, 33 bp, Homo sapiens
attaggtactccgagcgagtttaagggaaccat

SEQ ID NO: 6454 - DNA, 33 bp, Homo sapiens
tacatttatttccagaggagaattaagttttgt

SEQ ID NO: 6455 - DNA, 33 bp, Homo sapiens
actaactatagttggcgaagacctaataaaaat

SEQ ID NO: 6456 - DNA, 33 bp, Homo sapiens
gtcaatcatctatcacgctcccttaagctagaa

SEQ ID NO: 6457 - DNA, 33 bp, Homo sapiens
tgctttctagaccaattaactttctcatactga

SEQ ID NO: 6458 - DNA, 33 bp, Homo sapiens
agtaagcaactcattcgagatacttcagccatc

SEQ ID NO: 6459 - DNA, 33 bp, Homo sapiens
aatgcttctaaaccaagaaattacagaaaacat

SEQ ID NO: 6460 - DNA, 33 bp, Homo sapiens
gtagatgtgtttgtaatatatgttgaatgtgta

SEQ ID NO: 6461 - DNA, 33 bp, Homo sapiens
tttttcataaatgtaagtaacctgccttttaaa

SEQ ID NO: 6462 - DNA, 33 bp, Homo sapiens
ggtgaaggtgaattactgctatcatctactatc

SEQ ID NO: 6463 - DNA, 33 bp, Homo sapiens
tgaatgagagggaaaagagaagtgagccagttc

SEQ ID NO: 6464 - DNA, 33 bp, Homo sapiens
ttagatcattggtggggagtttgtgaaacgaaa

SEQ ID NO: 6465 - DNA, 33 bp, Homo sapiens
cccccttagtatagtatgcaaagtcagcctgtc

SEQ ID NO: 6466 - DNA, 33 bp, Homo sapiens
taaccattgccttttgtattttctaggtccaga

SEQ ID NO: 6467 - DNA, 33 bp, Homo sapiens
tacatcacctcgtcaagatcactttagaactaa

SEQ ID NO: 6468 - DNA, 33 bp, Homo sapiens
agtcaacattaaacaattaataagtcaacaatt

SEQ ID NO: 6469 - DNA, 33 bp, Homo sapiens
gaaagaagctaattgccgaacagtttacagagt

SEQ ID NO: 6470 - DNA, 33 bp, Homo sapiens
tggtataaaaatgaaatgaaaatgaacaaaata

SEQ ID NO: 6471 - DNA, 33 bp, Homo sapiens
ctcataatgttctaaatttggcctttaaaagct

SEQ ID NO: 6472 - DNA, 33 bp, Homo sapiens
ttcttcttgcttgatggaattgatgtttgtctt

SEQ ID NO: 6473 - DNA, 33 bp, Homo sapiens
gggccatgacacaatagtaagatgcgtaaacat

SEQ ID NO: 6474 - DNA, 33 bp, Homo sapiens
ttattgagctgtctcacctgtggctatgtttgc

SEQ ID NO: 6475 - DNA, 33 bp, Homo sapiens
gctctaagcctggctatgtgcaagttgaggttc

SEQ ID NO: 6476 - DNA, 51 bp, Homo sapiens
taattatttaaaatatcaaaacatcgaatcttttatatcatctgagtacat

SEQ ID NO: 6477 - DNA, 51 bp, Homo sapiens
tgaattcttatctttagagtgcttatgaagttttataaattctaacctctt

SEQ ID NO: 6478 - DNA, 33 bp, Homo sapiens
caaaatcatagggacagaaacgcaaaaatagac

SEQ ID NO: 6479 - DNA, 33 bp, Homo sapiens
tctactatttggtgaaccttgaattccagtttt

SEQ ID NO: 6480 - DNA, 33 bp, Homo sapiens
gcccaaaaatttcacattctgataaacaacttc

SEQ ID NO: 6481 - DNA, 33 bp, Homo sapiens
ggatgcagaaaaaccagtaattaaaggcaaatg

SEQ ID NO: 6482 - DNA, 33 bp, Homo sapiens
gctcagccgcaatacagtagaccaccagataga

SEQ ID NO: 6483 - DNA, 33 bp, Homo sapiens
tagagtttcatttttctaggatggagatctcca

SEQ ID NO: 6484 - DNA, 33 bp, Homo sapiens
tactcattgcatttcatggaaaacattacaact

SEQ ID NO: 6485 - DNA, 33 bp, Homo sapiens
ggtctgactccttccagcattggtaagggtgtg

SEQ ID NO: 6486 - DNA, 33 bp, Homo sapiens
atcatgtgcagacagagaaactattgtactgtg

SEQ ID NO: 6487 - DNA, 33 bp, Homo sapiens
aaacaaattagctttacgggccacaataatgaa

SEQ ID NO: 6488 - DNA, 33 bp, Homo sapiens
atgccaatcacctgaggagtgcactgcttttgt

SEQ ID NO: 6489 - DNA, 33 bp, Homo sapiens
tgactttaagattatcgatgtgatttgctttgc

SEQ ID NO: 6490 - DNA, 33 bp, Homo sapiens
acatggaaatgccttatcatattagcagattag

SEQ ID NO: 6491 - DNA, 33 bp, Homo sapiens
gttttggctcttccacgctaagtcccagaccag

SEQ ID NO: 6492 - DNA, 33 bp, Homo sapiens
cgctgtgaaagagagatgaatagctcgtaaaat

SEQ ID NO: 6493 - DNA, 33 bp, Homo sapiens
atgtttttgtatcaattaaagcctaacagatca

SEQ ID NO: 6494 - DNA, 33 bp, Homo sapiens
ccagttccatgacttatcacctgcagtctaaga

SEQ ID NO: 6495 - DNA, 33 bp, Homo sapiens
gttactacagtctgcagcagcgtgtttcttaaa

SEQ ID NO: 6496 - DNA, 33 bp, Homo sapiens
caatgggataactgccgaacaatcacttgacat

SEQ ID NO: 6497 - DNA, 33 bp, Homo sapiens
taatagagttgcacctgaacaactggacggtta

SEQ ID NO: 6498 - DNA, 33 bp, Homo sapiens
cattacttttgaaccagtgatagaagataatgt

SEQ ID NO: 6499 - DNA, 33 bp, Homo sapiens
tataaatatttgtgtataattggcacagagctt

SEQ ID NO: 6500 - DNA, 51 bp, Homo sapiens
gatttctctttctctctctcattcttacaaatgtgcacatacccacatacc

SEQ ID NO: 6501 - DNA, 33 bp, Homo sapiens
atcaaggatagaatgagaatgtctgataggtgt

SEQ ID NO: 6502 - DNA, 33 bp, Homo sapiens
tccactgtaaaggcacggatacacaaatgtcct

SEQ ID NO: 6503 - DNA, 51 bp, Homo sapiens
gtgttagtttctgttctttataggatgatacattatttccttgaagcaaac

SEQ ID NO: 6504 - DNA, 33 bp, Homo sapiens
ttcttcgttgattgaatagaattatcttttaca

SEQ ID NO: 6505 - DNA, 33 bp, Homo sapiens
accactgagaacttgatgattacaactgccaat

SEQ ID NO: 6506 - DNA, 33 bp, Homo sapiens
catattgtatgtgaaatttttgaaacagtaggt

SEQ ID NO: 6507 - DNA, 33 bp, Homo sapiens
ccatcctatcttactatactggaaagcacttaa

SEQ ID NO: 6508 - DNA, 33 bp, Homo sapiens
taagtgctctacccattactttgtggaaaatca

SEQ ID NO: 6509 - DNA, 33 bp, Homo sapiens
gttatattcaaagagagatttttggtcatcctc

SEQ ID NO: 6510 - DNA, 33 bp, Homo sapiens
acttttaacatggtaattgaggaaaaaatgagt

SEQ ID NO: 6511 - DNA, 33 bp, Homo sapiens
ggcttgcttacaataagggcagatatctcagag

SEQ ID NO: 6512 - DNA, 33 bp, Homo sapiens
tataatataaacagcagaaggatcacatacatg

SEQ ID NO: 6513 - DNA, 33 bp, Homo sapiens
atccaagacaacagcatgagccttaggtgactg

SEQ ID NO: 6514 - DNA, 33 bp, Homo sapiens
ttgaaactgaagagacgcattccacagaactgt

SEQ ID NO: 6515 - DNA, 33 bp, Homo sapiens
attctcatggaattcttaaagagcaagcacaat

SEQ ID NO: 6516 - DNA, 33 bp, Homo sapiens
ttagcagactggacacgccgaggaaagaatctc

SEQ ID NO: 6517 - DNA, 51 bp, Homo sapiens
aggcaatcacatattgtatgtgaaatttttgaaacagtaggttttgtccag

SEQ ID NO: 6518 - DNA, 51 bp, Homo sapiens
aggtttggacccacccacaatgatagagaatacatatcaacaaacactata

SEQ ID NO: 6519 - DNA, 33 bp, Homo sapiens
tctcttagaggatgacggtcagaaacggaggaa

SEQ ID NO: 6520 - DNA, 33 bp, Homo sapiens
ggagatcaatatagtggattttacatgaaggga

SEQ ID NO: 6521 - DNA, 33 bp, Homo sapiens
tttggtgggatttggagcttttccttcctaaca

SEQ ID NO: 6522 - DNA, 33 bp, Homo sapiens
cttctattaaactgccgattatctattcaattt

SEQ ID NO: 6523 - DNA, 51 bp, Homo sapiens
atcattgggacaagtggaaaatccattggaatacacatatatatagtaaac

SEQ ID NO: 6524 - DNA, 33 bp, Homo sapiens
tcctgatggtgatacagcagcattgcgaagtct

SEQ ID NO: 6525 - DNA, 33 bp, Homo sapiens
gcattatcccatgacctccaaacagaacacaca

SEQ ID NO: 6526 - DNA, 33 bp, Homo sapiens
tttgtcattaaattgatgttattgtcgatggag

SEQ ID NO: 6527 - DNA, 33 bp, Homo sapiens
gactgtgaacctactcgctacttgaaacaatgg

SEQ ID NO: 6528 - DNA, 33 bp, Homo sapiens
aggcgattaagtcaaagtgaagcctttagagta

SEQ ID NO: 6529 - DNA, 33 bp, Homo sapiens
aaatgaaatattgtgagtaaaatgctgagcaag

SEQ ID NO: 6530 - DNA, 33 bp, Homo sapiens
aaagactgctgcagaggaacaccggcaagattt

SEQ ID NO: 6531 - DNA, 33 bp, Homo sapiens
gtcaatgtaactgctggagatcctaacacagga

SEQ ID NO: 6532 - DNA, 33 bp, Homo sapiens
aggtacagtatacatatagaaaagtgcatagat

SEQ ID NO: 6533 - DNA, 33 bp, Homo sapiens
aacaaacttgatccaattgtaagatttgtacag

SEQ ID NO: 6534 - DNA, 33 bp, Homo sapiens
tccctggtggcaaaacgattggggaccactgac

SEQ ID NO: 6535 - DNA, 33 bp, Homo sapiens
agctctcctcttgagcccctgttttcttgtaga

SEQ ID NO: 6536 - DNA, 33 bp, Homo sapiens
agaagaagacgatgaagcagctgtttccataat

SEQ ID NO: 6537 - DNA, 33 bp, Homo sapiens
ttctttgtagagctcaggtcaaatgctacttct

SEQ ID NO: 6538 - DNA, 51 bp, Homo sapiens
tatttttttatgaagggacttgaaattttattccagagcagtatttaggcc

SEQ ID NO: 6539 - DNA, 51 bp, Homo sapiens
ttatgtttgaatacttaagcataaatgttaactggatattttcccttttgc

SEQ ID NO: 6540 - DNA, 33 bp, Homo sapiens
cctttgttgcatcccccattttcaaaattatgc

SEQ ID NO: 6541 - DNA, 33 bp, Homo sapiens
ttcttctggcttagtatcttatcaaatagacat

SEQ ID NO: 6542 - DNA, 51 bp, Homo sapiens
taagcagatatgcttgcaaaaacaacatcattctttacagtacatggaaaa

SEQ ID NO: 6543 - DNA, 33 bp, Homo sapiens
cagcaataagaaactccgaaaggctcagggccc

SEQ ID NO: 6544 - DNA, 33 bp, Homo sapiens
tgagtgatagggtcaggagaacacttactttca

SEQ ID NO: 6545 - DNA, 33 bp, Homo sapiens
cctggccaaatcttgatgttaatatatctgttt

SEQ ID NO: 6546 - DNA, 51 bp, Homo sapiens
taagtagaagagctaggatcaaataggtctgttcaatcacaaatcccatgt

SEQ ID NO: 6547 - DNA, 33 bp, Homo sapiens
attctgaatttgtgaatgattacacccaggtta

SEQ ID NO: 6548 - DNA, 51 bp, Homo sapiens
cagctaaaacctgaacaacgacaaagtgaaaggactctgaccctccggcaa

SEQ ID NO: 6549 - DNA, 33 bp, Homo sapiens
ctttttttgtatacacggatgttgagtctgcaa

SEQ ID NO: 6550 - DNA, 33 bp, Homo sapiens
tcctttccaatctggatggcttttacttatttt

SEQ ID NO: 6551 - DNA, 33 bp, Homo sapiens
ggcaatgtagagatgtgacaaactggaagtcca

SEQ ID NO: 6552 - DNA, 51 bp, Homo sapiens
ggcacagtaagataagtgagggtgatgtaatggaaggaactggagtctgac

SEQ ID NO: 6553 - DNA, 33 bp, Homo sapiens
ccaagacaaggacccagaggctaaaaagatttt

SEQ ID NO: 6554 - DNA, 33 bp, Homo sapiens
atcagagcacataggggaagcttattgcttagt

SEQ ID NO: 6555 - DNA, 33 bp, Homo sapiens
gcacgtggtgagattctcttgactgtcattcaa

SEQ ID NO: 6556 - DNA, 33 bp, Homo sapiens
cagggacatattgaatcaagactggataagaaa

SEQ ID NO: 6557 - DNA, 33 bp, Homo sapiens
taaaagtcttgagacgcattctgattgaatagg

SEQ ID NO: 6558 - DNA, 33 bp, Homo sapiens
ctggcttggagagagaggcaaggactcttttta

SEQ ID NO: 6559 - DNA, 33 bp, Homo sapiens
tgtttataagactcactgtaaaatctccagact

SEQ ID NO: 6560 - DNA, 33 bp, Homo sapiens
atcctcagttgcaaaagtcttgtgtttcaggca

SEQ ID NO: 6561 - DNA, 33 bp, Homo sapiens
acagtcatttccccaaccattaggctttctgag

SEQ ID NO: 6562 - DNA, 51 bp, Homo sapiens
tttgtgagacaattagcaaaatttggaagagatctgtagatgaaagttagt

SEQ ID NO: 6563 - DNA, 51 bp, Homo sapiens
gcacttggatggtcgaatttttagctctatgtcacaactgactagacatta

SEQ ID NO: 6564 - DNA, 33 bp, Homo sapiens
tggggcaaataaggaagtacattaaacctaagt

SEQ ID NO: 6565 - DNA, 33 bp, Homo sapiens
aacttgaatatcatccgaacttgcttttctcct

SEQ ID NO: 6566 - DNA, 33 bp, Homo sapiens
taaactgtgtactaccgccattttaattaataa

SEQ ID NO: 6567 - DNA, 33 bp, Homo sapiens
caatgatagtgttttcgaagtcatgtgggccac

SEQ ID NO: 6568 - DNA, 33 bp, Homo sapiens
tggtgtaaaattgaaatctgtaatacgtgttat

SEQ ID NO: 6569 - DNA, 33 bp, Homo sapiens
cctctttcctactgccgaggtgatctttctcct

SEQ ID NO: 6570 - DNA, 33 bp, Homo sapiens
ttactttcatctcctcgcaacatattttcccac

SEQ ID NO: 6571 - DNA, 33 bp, Homo sapiens
gactgagcccattcaggccaaacagagtcagca

SEQ ID NO: 6572 - DNA, 51 bp, Homo sapiens
ctgaaaatgtacagtggttgcattatagccagaggtgtgctgaaggtagct

SEQ ID NO: 6573 - DNA, 51 bp, Homo sapiens
ggatggggctgtcatcagtagattgttgaaaaatattccacaaccagttct

SEQ ID NO: 6574 - DNA, 51 bp, Homo sapiens
atgacatttatcaatgtgttttcacgaggtggtatatcgaataaggcagtt

SEQ ID NO: 6575 - DNA, 33 bp, Homo sapiens
caataattgtaacaaagtatggagttatagtac

SEQ ID NO: 6576 - DNA, 51 bp, Homo sapiens
atatgctgtaatgccgtattaccacgattaagtatactgctgtacaactaa

SEQ ID NO: 6577 - DNA, 33 bp, Homo sapiens
ggaagaatgatcaaaatacagactgcctcttca

SEQ ID NO: 6578 - DNA, 33 bp, Homo sapiens
gaagaggaggtccagggaagtgtgatatttgag

SEQ ID NO: 6579 - DNA, 51 bp, Homo sapiens
gctttttgaaccagtcttagtatttctctggttccctcattatgagttgat

SEQ ID NO: 6580 - DNA, 33 bp, Homo sapiens
tgatttaggcaggaaattggcaaaagataaatc

SEQ ID NO: 6581 - DNA, 51 bp, Homo sapiens
cttgaagaacccgcatggatcatactctgatgatttaaaccaaacaaaaga

SEQ ID NO: 6582 - DNA, 33 bp, Homo sapiens
gttatgatggaagaaatgcactgcgggttgctg

SEQ ID NO: 6583 - DNA, 33 bp, Homo sapiens
ttggattcaagtacagtattgcattttatgata

SEQ ID NO: 6584 - DNA, 33 bp, Homo sapiens
tcatatacttcatatacaatttcacttgtgcta

SEQ ID NO: 6585 - DNA, 33 bp, Homo sapiens
aagaagtgttttggcagtgattggagaggcaca

SEQ ID NO: 6586 - DNA, 33 bp, Homo sapiens
tgtgtgtagtaagatcgctcggtctccttctta

SEQ ID NO: 6587 - DNA, 33 bp, Homo sapiens
aaatagtaacaaagaatgagtagtttcttaagt

SEQ ID NO: 6588 - DNA, 33 bp, Homo sapiens
ccaagtctgagacaaactcggaaaattatctta

SEQ ID NO: 6589 - DNA, 51 bp, Homo sapiens
tcttgggtgaagagggataagactccgacacattctacagtttctcggaga

SEQ ID NO: 6590 - DNA, 51 bp, Homo sapiens
tccacagcagtcaacttaatggtcatataattaaagtttatgtatgtgcaa

SEQ ID NO: 6591 - DNA, 33 bp, Homo sapiens
aaacttctaggaattatggtagcagtgatattt

SEQ ID NO: 6592 - DNA, 33 bp, Homo sapiens
ctcttagcccctcttcgaaaatagtcttatcat

SEQ ID NO: 6593 - DNA, 33 bp, Homo sapiens
aaagacaactacagactggtattcttcatagac

SEQ ID NO: 6594 - DNA, 33 bp, Homo sapiens
gactagccatttgccagtaatcataaactctgg

SEQ ID NO: 6595 - DNA, 33 bp, Homo sapiens
gatacagagctttccatctttatgttattatga

SEQ ID NO: 6596 - DNA, 51 bp, Homo sapiens
tagtatctgcagtttcaggcatagactaagaggcttgaattcccctgcaga

SEQ ID NO: 6597 - DNA, 51 bp, Homo sapiens
acaaattatgtccacaaatgtttgatacttctgcaattgagaggcaggttt

SEQ ID NO: 6598 - DNA, 33 bp, Homo sapiens
acataggctgggatcatactcatgcatctgaga

SEQ ID NO: 6599 - DNA, 51 bp, Homo sapiens
gcagagaaatatttaaatatacctggatccaaattacattttccttctact

SEQ ID NO: 6600 - DNA, 33 bp, Homo sapiens
gataccatgcctgaaagagaatctgaaacatta

SEQ ID NO: 6601 - DNA, 33 bp, Homo sapiens
aaggtttgggtctaacgcctgtgaaagaaacgg

SEQ ID NO: 6602 - DNA, 33 bp, Homo sapiens
tgttgatacacttttatgtagtaccaggttttg

SEQ ID NO: 6603 - DNA, 33 bp, Homo sapiens
ctactcaagacagtactcataagtgccaattaa

SEQ ID NO: 6604 - DNA, 33 bp, Homo sapiens
aggcctgataagggaatctggaaacagcatcaa

SEQ ID NO: 6605 - DNA, 33 bp, Homo sapiens
ttaacagtaatggaaccaatgtgaagcttctgc

SEQ ID NO: 6606 - DNA, 33 bp, Homo sapiens
tctgatgatataccaaggattaagtgagtgaag

SEQ ID NO: 6607 - DNA, 33 bp, Homo sapiens
aatgatgcatgtaatggattagagttgaagata

SEQ ID NO: 6608 - DNA, 33 bp, Homo sapiens
tatgtggaatgtggaatttatgtttttacatgt

SEQ ID NO: 6609 - DNA, 33 bp, Homo sapiens
gatttgaaatgacaaacaagatatccagcaaag

SEQ ID NO: 6610 - DNA, 33 bp, Homo sapiens
aggaagagagcaaagatagtaaaagcatggcct

SEQ ID NO: 6611 - DNA, 33 bp, Homo sapiens
tttcccttctcctttaggcaatcatacaaataa

SEQ ID NO: 6612 - DNA, 33 bp, Homo sapiens
cctatttgtctgtgaagtaagttggtgtaaata

SEQ ID NO: 6613 - DNA, 33 bp, Homo sapiens
agttagtctgcctagatggggaagaacatttgg

SEQ ID NO: 6614 - DNA, 33 bp, Homo sapiens
caaagatcttacaaaggcttactgctgttcttc

SEQ ID NO: 6615 - DNA, 33 bp, Homo sapiens
gcctacatgaaaaagaccactaggatttcagtc

SEQ ID NO: 6616 - DNA, 33 bp, Homo sapiens
tctgtttttacacctatgccgggtcaataggat

SEQ ID NO: 6617 - DNA, 33 bp, Homo sapiens
gccttagatgatcaaggatagaagtatgagagg

SEQ ID NO: 6618 - DNA, 33 bp, Homo sapiens
agttgagttaatttcatccaaattgcataactg

SEQ ID NO: 6619 - DNA, 51 bp, Homo sapiens
ggggctgataaaaacttaactttcatctagtatccagtatgtgcaacatag

SEQ ID NO: 6620 - DNA, 33 bp, Homo sapiens
gtgagacagaaactagtccctcaaacagtcttc

SEQ ID NO: 6621 - DNA, 51 bp, Homo sapiens
cataacggctgtctcattttatactgctactaacagtgcacaaagcttcca

SEQ ID NO: 6622 - DNA, 51 bp, Homo sapiens
agtaaaacttcttatagtgttataattaaagtaagcatgaatatatacaat

SEQ ID NO: 6623 - DNA, 33 bp, Homo sapiens
gtctttgtgagagataccacctctacctgtgct

SEQ ID NO: 6624 - DNA, 33 bp, Homo sapiens
tttatggatagagaacgaaaacctgcaacttac

SEQ ID NO: 6625 - DNA, 33 bp, Homo sapiens
atggtgtttacaagaccgcaaaaatgttacacg

SEQ ID NO: 6626 - DNA, 51 bp, Homo sapiens
atattaattcctatggctaattcaattattcaacaagcatcccacatcatt

SEQ ID NO: 6627 - DNA, 33 bp, Homo sapiens
gtggcagtagggcttatgcttgaattacttctt

SEQ ID NO: 6628 - DNA, 33 bp, Homo sapiens
atgggactgactgaaatgtaggatgaatttact

SEQ ID NO: 6629 - DNA, 33 bp, Homo sapiens
gaaatgcatctagacagaaaccttaacactttt

SEQ ID NO: 6630 - DNA, 33 bp, Homo sapiens
gtccccgggcttgtgacatgtcttttatctaca

SEQ ID NO: 6631 - DNA, 51 bp, Homo sapiens
ataaccaaacttaactctagccctatcatagacaaaataagccagtttcaa

SEQ ID NO: 6632 - DNA, 33 bp, Homo sapiens
taagtctaacagtcaagcaatattttgtatcag

SEQ ID NO: 6633 - DNA, 33 bp, Homo sapiens
agtctatatttggacatcttttttgtgtgtgtg

SEQ ID NO: 6634 - DNA, 33 bp, Homo sapiens
aaagtagtcactttcatctatggacatttgtag

SEQ ID NO: 6635 - DNA, 33 bp, Homo sapiens
tcagttaatctttgcatatggtgataagtagga

SEQ ID NO: 6636 - DNA, 33 bp, Homo sapiens
ttctcttctgccaaatgataaatataatcatag

SEQ ID NO: 6637 - DNA, 33 bp, Homo sapiens
gaagaagcaaaataacggtatgtgaacaagagt

SEQ ID NO: 6638 - DNA, 33 bp, Homo sapiens
acataagaatgttcactaacaagcctaaaaaat

SEQ ID NO: 6639 - DNA, 33 bp, Homo sapiens
actttgacaggaaaaccaaatttaactagcaaa

SEQ ID NO: 6640 - DNA, 51 bp, Homo sapiens
aactgtttgaatattaaaatcttactcaaagctaaggataaaatgtccatt

SEQ ID NO: 6641 - DNA, 33 bp, Homo sapiens
atctccagcttttgcagcagtaatcttgacctc

SEQ ID NO: 6642 - DNA, 33 bp, Homo sapiens
tgctcactggagtcaccattattggaaattcat

SEQ ID NO: 6643 - DNA, 33 bp, Homo sapiens
taaattgcttaatatatgccctgtgcaacaaaa

SEQ ID NO: 6644 - DNA, 33 bp, Homo sapiens
tttgaaggtgcatttagactatcaacagacttt

SEQ ID NO: 6645 - DNA, 33 bp, Homo sapiens
caacaacagcaagaactaaactgaaaaataagt

SEQ ID NO: 6646 - DNA, 33 bp, Homo sapiens
tcataacacatagtaggcaggatctatttaact

SEQ ID NO: 6647 - DNA, 33 bp, Homo sapiens
ttctcatctgtggcacgagaacaaaataatcat

SEQ ID NO: 6648 - DNA, 33 bp, Homo sapiens
tttctgacactgacctgaatcttcttttccttt

SEQ ID NO: 6649 - DNA, 33 bp, Homo sapiens
gtgtgtgaaactaccatgagagaagttcagttt

SEQ ID NO: 6650 - DNA, 33 bp, Homo sapiens
ataaaagagtagataatagtgccactttccctt

SEQ ID NO: 6651 - DNA, 33 bp, Homo sapiens
actggtggcaccaaaatgatgatttttctgaaa

SEQ ID NO: 6652 - DNA, 51 bp, Homo sapiens
ttctgtatccacatggtgttgctagcagtattatatcttttggtaagagag

SEQ ID NO: 6653 - DNA, 51 bp, Homo sapiens
atgtctttactctctatatggaaaatgaattagaaagttcacacaggtcca

SEQ ID NO: 6654 - DNA, 51 bp, Homo sapiens
atataatttttgctctgtcttattatactcaaacatttcaatccagtgtaa

SEQ ID NO: 6655 - DNA, 51 bp, Homo sapiens
ggatttttttaagtgatagtcttaaggttgatcaaactactataaaaatta

SEQ ID NO: 6656 - DNA, 51 bp, Homo sapiens
taagactatcacttaaaaaaatccagaatccttttattcagtttttgttgt

SEQ ID NO: 6657 - DNA, 33 bp, Homo sapiens
caccaaatgatgataagaaaactgttcatgata

SEQ ID NO: 6658 - DNA, 33 bp, Homo sapiens
gtgtatttctgccacctgatggaccatttgtca

SEQ ID NO: 6659 - DNA, 33 bp, Homo sapiens
tggggagccaaagagcgatggacctatggacct

SEQ ID NO: 6660 - DNA, 33 bp, Homo sapiens
ttaaattcacagcacagtgccaattacattgta

SEQ ID NO: 6661 - DNA, 33 bp, Homo sapiens
cctagcttccgataaattatgttactaaatgaa

SEQ ID NO: 6662 - DNA, 33 bp, Homo sapiens
ttaaatcatgtatgaccggaaaagcagacattt

SEQ ID NO: 6663 - DNA, 33 bp, Homo sapiens
gtcaaataaaggaacctctttcgctgccacatc

SEQ ID NO: 6664 - DNA, 33 bp, Homo sapiens
aatgagtgagtattatgaggtaaaggtctagca

SEQ ID NO: 6665 - DNA, 51 bp, Homo sapiens
gtgtcaggattaagttgaattataggacagtcaggtgatatgtgctagagg

SEQ ID NO: 6666 - DNA, 33 bp, Homo sapiens
tgagaaagagtgtggcgaggtctggaatttagt

SEQ ID NO: 6667 - DNA, 33 bp, Homo sapiens
agaagaaagctgaaaaggacacattctaagaag

SEQ ID NO: 6668 - DNA, 33 bp, Homo sapiens
agttggggaatagtaatgcaagttgaataaaac

SEQ ID NO: 6669 - DNA, 33 bp, Homo sapiens
ggttgaaagtcagttttaaaagttaggcaatag

SEQ ID NO: 6670 - DNA, 33 bp, Homo sapiens
atctcaactggagttataatgatggtgttgttt

SEQ ID NO: 6671 - DNA, 33 bp, Homo sapiens
gctacaatgtttataatgatggtgaagaaagta

SEQ ID NO: 6672 - DNA, 33 bp, Homo sapiens
gccaaatatcagaacattggattatacttagag

SEQ ID NO: 6673 - DNA, 33 bp, Homo sapiens
taacgaggtcccgtaaggagagtgttccattca

SEQ ID NO: 6674 - DNA, 33 bp, Homo sapiens
gttcctgggcccctcaggcagtcagtaagtaga

SEQ ID NO: 6675 - DNA, 33 bp, Homo sapiens
tgggattctgtgcttgtaaaaatttggggactt

SEQ ID NO: 6676 - DNA, 33 bp, Homo sapiens
ggactgtgtgaaccaagcaggggccagttttcc

SEQ ID NO: 6677 - DNA, 33 bp, Homo sapiens
tttgtaaattgctacatgagtaacagtggctaa

SEQ ID NO: 6678 - DNA, 33 bp, Homo sapiens
cagtagatattcaacagaaggcaactattattg

SEQ ID NO: 6679 - DNA, 33 bp, Homo sapiens
acactttgctagatactaattcctgcttttgag

SEQ ID NO: 6680 - DNA, 33 bp, Homo sapiens
atacaatgatatgcaccgaatgggaccagcaca

SEQ ID NO: 6681 - DNA, 33 bp, Homo sapiens
catgacataaatcagatcctccgggagcaaggg

SEQ ID NO: 6682 - DNA, 33 bp, Homo sapiens
ttatgctttcaagttatgtgaactagtaagatc

SEQ ID NO: 6683 - DNA, 33 bp, Homo sapiens
aggtgatttttaccaagttctgagctttgcaat

SEQ ID NO: 6684 - DNA, 33 bp, Homo sapiens
actaaggtcattgatagcgtctctgaacaatca

SEQ ID NO: 6685 - DNA, 33 bp, Homo sapiens
tatagataattttatatggttgcagaaatggat

SEQ ID NO: 6686 - DNA, 33 bp, Homo sapiens
cagttataactgatgagcctagcaatgatgtac

SEQ ID NO: 6687 - DNA, 33 bp, Homo sapiens
cctatctcaaggtctccagttggcccctggtga

SEQ ID NO: 6688 - DNA, 33 bp, Homo sapiens
attatacaccattcaaggatgttgtgagtgtta

SEQ ID NO: 6689 - DNA, 33 bp, Homo sapiens
tccatggctgcataacgctatttttgtatcatt

SEQ ID NO: 6690 - DNA, 51 bp, Homo sapiens
gaaaaaacttatagtcctgtcagtatagtagcaccactgttatgttgagtg

SEQ ID NO: 6691 - DNA, 33 bp, Homo sapiens
accagcctgtttttcatatttgtgtaactccct

SEQ ID NO: 6692 - DNA, 33 bp, Homo sapiens
tgtaggttggactgcacagataagtataaaacc

SEQ ID NO: 6693 - DNA, 33 bp, Homo sapiens
attgcaaatagagctatgttgattggcctggcc

SEQ ID NO: 6694 - DNA, 33 bp, Homo sapiens
tattttatatgagaaaggatgttctatggtaaa

SEQ ID NO: 6695 - DNA, 33 bp, Homo sapiens
gccttacactacatagcatttgattatttgaaa

SEQ ID NO: 6696 - DNA, 33 bp, Homo sapiens
agggcaagagctaagaggcaaggccacatcaga

SEQ ID NO: 6697 - DNA, 33 bp, Homo sapiens
gcctgagatcaagcaatgctaggacaaccacaa

SEQ ID NO: 6698 - DNA, 33 bp, Homo sapiens
gcaacaagaattttaagactctcaaccctctga

SEQ ID NO: 6699 - DNA, 33 bp, Homo sapiens
ttaaaaatcaaaagaagtggttgagagcttatt

SEQ ID NO: 6700 - DNA, 51 bp, Homo sapiens
taaggccagcaaacatgtatcaagcgcatattatgattcagccactattat

SEQ ID NO: 6701 - DNA, 33 bp, Homo sapiens
caaattcattttgtcagtattgggtgacatatt

SEQ ID NO: 6702 - DNA, 33 bp, Homo sapiens
ctgtctgctttaataagtactcgaatctatttg

SEQ ID NO: 6703 - DNA, 33 bp, Homo sapiens
ataaaaattttaaacaggctgccgtgatgtaag

SEQ ID NO: 6704 - DNA, 33 bp, Homo sapiens
cagtgagaagggtttagcaattagagacagata

SEQ ID NO: 6705 - DNA, 33 bp, Homo sapiens
agaagtacagaagaggtatgcaaagcccagcca

SEQ ID NO: 6706 - DNA, 33 bp, Homo sapiens
cagtaccccaaatacagtggcattcacattaag

SEQ ID NO: 6707 - DNA, 33 bp, Homo sapiens
ctcattcctaaactaggcattgacaaggggaaa

SEQ ID NO: 6708 - DNA, 33 bp, Homo sapiens
cttggtcatttgagaagcatcaaggaaagtaaa

SEQ ID NO: 6709 - DNA, 33 bp, Homo sapiens
tctaccctaattacaggccaatttcatcttaac

SEQ ID NO: 6710 - DNA, 33 bp, Homo sapiens
accgtgccctcccttgtagctctctgttggcta

SEQ ID NO: 6711 - DNA, 33 bp, Homo sapiens
cctttggtccttcccactcttttcaacattaga

SEQ ID NO: 6712 - DNA, 33 bp, Homo sapiens
aaattattaccactaatatttgctgtctttttc

SEQ ID NO: 6713 - DNA, 33 bp, Homo sapiens
atatcactttgccaactataatttttacaattc

SEQ ID NO: 6714 - DNA, 33 bp, Homo sapiens
ttgatgctcagtcctatgaatgacactaaatat

SEQ ID NO: 6715 - DNA, 33 bp, Homo sapiens
tggagaagtaaaagcaggatggaatggaagaga

SEQ ID NO: 6716 - DNA, 33 bp, Homo sapiens
aagttaaaagccgaaattgttttcataacttct

SEQ ID NO: 6717 - DNA, 33 bp, Homo sapiens
cgatggtaagcacaccgatgggaagataaaaag

SEQ ID NO: 6718 - DNA, 51 bp, Homo sapiens
caccggatggcataaaagtcactaacaacagattctcctttttatttctgg

SEQ ID NO: 6719 - DNA, 33 bp, Homo sapiens
tttataaggagtaaaagatgaggagatgaattg

SEQ ID NO: 6720 - DNA, 33 bp, Homo sapiens
actatcatagtctaaagtgccttcttctactgc

SEQ ID NO: 6721 - DNA, 33 bp, Homo sapiens
aatacaagataatccattcaattccaaatattc

SEQ ID NO: 6722 - DNA, 33 bp, Homo sapiens
atgtcctggaaaatcagtcttgacttctttgtt

SEQ ID NO: 6723 - DNA, 33 bp, Homo sapiens
ttcagccttttcacacgccttgctataaattgc

SEQ ID NO: 6724 - DNA, 33 bp, Homo sapiens
ccgggcaaccagggtggatatgcggcagggcag

SEQ ID NO: 6725 - DNA, 33 bp, Homo sapiens
tattttacttaaattatgattgcgtttgtttac

SEQ ID NO: 6726 - DNA, 33 bp, Homo sapiens
gcactgagacttaaaagttagtatggatacaat

SEQ ID NO: 6727 - DNA, 33 bp, Homo sapiens
taatggttgtaatgggtatactgactatgtgtc

SEQ ID NO: 6728 - DNA, 33 bp, Homo sapiens
tatacccaataggccagaaaagtactggtcatc

SEQ ID NO: 6729 - DNA, 33 bp, Homo sapiens
ttgtgatattcttggcggagcctgcttcacacc

SEQ ID NO: 6730 - DNA, 33 bp, Homo sapiens
cccactctggtgtttatggccttgtgttgcatg

SEQ ID NO: 6731 - DNA, 33 bp, Homo sapiens
atgatataactgctgcgaccggcgctgccacaa

SEQ ID NO: 6732 - DNA, 33 bp, Homo sapiens
tctccagaaatcctcatgcttaactccctcatg

SEQ ID NO: 6733 - DNA, 33 bp, Homo sapiens
cagcagaagaattcatgagaagacaaagtcctc

SEQ ID NO: 6734 - DNA, 33 bp, Homo sapiens
gaaacaaatgtccaaacataagagaatcattta

SEQ ID NO: 6735 - DNA, 33 bp, Homo sapiens
caccctcctggctgaatactcctaatagtagtg

SEQ ID NO: 6736 - DNA, 33 bp, Homo sapiens
tcttgttgttgccccatcttagaggacactcag

SEQ ID NO: 6737 - DNA, 33 bp, Homo sapiens
tattacttcattgaattactctttgccattttt

SEQ ID NO: 6738 - DNA, 33 bp, Homo sapiens
ggaaatgggagagtactggaggaaaatgagaaa

SEQ ID NO: 6739 - DNA, 33 bp, Homo sapiens
tgtctgaaacatcacagtatttaggacatttta

SEQ ID NO: 6740 - DNA, 33 bp, Homo sapiens
aggcctgtagcataaatggagcatatcaccact

SEQ ID NO: 6741 - DNA, 33 bp, Homo sapiens
ttcctaccgcgctgaatatggcaggaatgaaaa

SEQ ID NO: 6742 - DNA, 33 bp, Homo sapiens
agacatctccctatacgacaattgtcctggatg

SEQ ID NO: 6743 - DNA, 33 bp, Homo sapiens
ggctaagcattttaactagagcatccccagact

SEQ ID NO: 6744 - DNA, 33 bp, Homo sapiens
gatgaaatgtctttcagtaacaaggcttcaggc

SEQ ID NO: 6745 - DNA, 33 bp, Homo sapiens
gaacaacttgaaggaagtggagcatagcctggc

SEQ ID NO: 6746 - DNA, 33 bp, Homo sapiens
gcactgagtctggtcagaatggtaacacgtggg

SEQ ID NO: 6747 - DNA, 33 bp, Homo sapiens
gctgaagcactgatgagagggatggagacagtg

SEQ ID NO: 6748 - DNA, 33 bp, Homo sapiens
atgtgttgagactatatctggggtctgcatctt

SEQ ID NO: 6749 - DNA, 33 bp, Homo sapiens
cttacccagtggacaaggatgatggagagactt

SEQ ID NO: 6750 - DNA, 33 bp, Homo sapiens
ctgacccaagtaattataaagttagcacttgga

SEQ ID NO: 6751 - DNA, 33 bp, Homo sapiens
attaatggggattggagacaggagcaacataga

SEQ ID NO: 6752 - DNA, 33 bp, Homo sapiens
ctgaagctggatgcaagagcaaggctgaaatta

SEQ ID NO: 6753 - DNA, 33 bp, Homo sapiens
aatcttctgaaacttatacatgattcaaagaca

SEQ ID NO: 6754 - DNA, 33 bp, Homo sapiens
gaggatatacaattcccaggcagttcttcttac

SEQ ID NO: 6755 - DNA, 33 bp, Homo sapiens
ctatttgtgccatacatagaaaagtgcctgtat

SEQ ID NO: 6756 - DNA, 33 bp, Homo sapiens
aatcaaggtgttacaataggaaatggcaaaggt

SEQ ID NO: 6757 - DNA, 33 bp, Homo sapiens
tacaacaggttgaaagtagaatttaaagtacca

SEQ ID NO: 6758 - DNA, 33 bp, Homo sapiens
acttactatctgacacgcttttctttcggaaag

SEQ ID NO: 6759 - DNA, 33 bp, Homo sapiens
tctcctttagcagttaccactcttgctcttgta

SEQ ID NO: 6760 - DNA, 33 bp, Homo sapiens
gaggttaaacaaaatattatcaaggccaaagac

SEQ ID NO: 6761 - DNA, 33 bp, Homo sapiens
tggataaggtccaaactcttgagtctgacaatc

SEQ ID NO: 6762 - DNA, 33 bp, Homo sapiens
attagaatccttaaagtagaatagccttgtgag

SEQ ID NO: 6763 - DNA, 51 bp, Homo sapiens
ggatgaacaactctgcccaaagaaagaaccatgccgtcatcttgaatcttt

SEQ ID NO: 6764 - DNA, 51 bp, Homo sapiens
aactatctctcaaatactctactggtttgctttacatatagttaatcacca

SEQ ID NO: 6765 - DNA, 51 bp, Homo sapiens
gagcccctgaatgggaatagaagtcgcaacatatccagttcgatctgggcc

SEQ ID NO: 6766 - DNA, 33 bp, Homo sapiens
attctcagctagcacatcttccattctcgggtg

SEQ ID NO: 6767 - DNA, 51 bp, Homo sapiens
atctttcttatctttgcacaatcaagacttataaaagcctcagggaactga

SEQ ID NO: 6768 - DNA, 33 bp, Homo sapiens
taaacagaagccataattaactcctatgcttac

SEQ ID NO: 6769 - DNA, 33 bp, Homo sapiens
agaatcctaaggcatctaaacaatagaacactt

SEQ ID NO: 6770 - DNA, 33 bp, Homo sapiens
ttatgtgcatgaaatatcttacatttttaaggc

SEQ ID NO: 6771 - DNA, 33 bp, Homo sapiens
aaaatttccttctatcgacattaactcgccttt

SEQ ID NO: 6772 - DNA, 33 bp, Homo sapiens
gactccttcttagtgatgccttctttaactacc

SEQ ID NO: 6773 - DNA, 33 bp, Homo sapiens
caagcacactgcctacggattagctagccctgt

SEQ ID NO: 6774 - DNA, 33 bp, Homo sapiens
cagaaacatccatatgtatgcaggactatgtct

SEQ ID NO: 6775 - DNA, 33 bp, Homo sapiens
agtccactttgcagatgaaccagtacaggctta

SEQ ID NO: 6776 - DNA, 33 bp, Homo sapiens
aaactggcacagggtatatccgaagcttgctgg

SEQ ID NO: 6777 - DNA, 33 bp, Homo sapiens
ccttctgtcaaccaaatgctcatagaatgctca

SEQ ID NO: 6778 - DNA, 51 bp, Homo sapiens
gtgtaaagagatctgaaacggacaaggaactggaagaaatgtaaaacctaa

SEQ ID NO: 6779 - DNA, 33 bp, Homo sapiens
cagtaaatttcctgcaggcgaactcttcctttg

SEQ ID NO: 6780 - DNA, 51 bp, Homo sapiens
gaatcttacagaaattgtggagctgggtaataccctcattacttttcatct

SEQ ID NO: 6781 - DNA, 33 bp, Homo sapiens
cactctcactctgcccggacagtttaagaaagt

SEQ ID NO: 6782 - DNA, 51 bp, Homo sapiens
agatggagaaactaaagctaagggagattaaaagatccagctaaggtcatg

SEQ ID NO: 6783 - DNA, 33 bp, Homo sapiens
atattagctctaagaagtgatacattgcattgt

SEQ ID NO: 6784 - DNA, 33 bp, Homo sapiens
ctacttgctgcagatatggaaagtaactgcaca

SEQ ID NO: 6785 - DNA, 33 bp, Homo sapiens
aaattcagtagtgtattaggccgtagttttttt

SEQ ID NO: 6786 - DNA, 33 bp, Homo sapiens
tctctagcaggtaaatcaaaaatgctatgactt

SEQ ID NO: 6787 - DNA, 33 bp, Homo sapiens
ttcatttcatagagaaggaaagcaagacaaaga

SEQ ID NO: 6788 - DNA, 33 bp, Homo sapiens
ttttttcctggatgtatgctgaggaatagaagt

SEQ ID NO: 6789 - DNA, 33 bp, Homo sapiens
gaattccacaagtcactgtccttagtatctcaa

SEQ ID NO: 6790 - DNA, 33 bp, Homo sapiens
ggtctcctatagcattgaagttcacaaggtgct

SEQ ID NO: 6791 - DNA, 33 bp, Homo sapiens
aatatttgctgaggtgtatggaaatctatcctg

SEQ ID NO: 6792 - DNA, 33 bp, Homo sapiens
tggccaagacaagaaatgttatcaagctgtatc

SEQ ID NO: 6793 - DNA, 33 bp, Homo sapiens
agaagtgccagatttctcccagagcgtcttgtt

SEQ ID NO: 6794 - DNA, 33 bp, Homo sapiens
tgatgtgtatggaaggtagtttgtgttctatgt

SEQ ID NO: 6795 - DNA, 33 bp, Homo sapiens
tcatacacaatcctcttacacagaacacatggt

SEQ ID NO: 6796 - DNA, 33 bp, Homo sapiens
tatgttgtcttctccatcccaaaataagacagg

SEQ ID NO: 6797 - DNA, 33 bp, Homo sapiens
gaaatgcaagaatacagcgggagttctgcttct

SEQ ID NO: 6798 - DNA, 33 bp, Homo sapiens
ccaagaggacaatctggatcaagtcttcaccaa

SEQ ID NO: 6799 - DNA, 33 bp, Homo sapiens
cccatactcacctaccgctttgccatcacattt

SEQ ID NO: 6800 - DNA, 33 bp, Homo sapiens
ttattaatttccttgctcctcatagtgtatata

SEQ ID NO: 6801 - DNA, 33 bp, Homo sapiens
agtctattcaggctacgataacaaactaccaca

SEQ ID NO: 6802 - DNA, 33 bp, Homo sapiens
atgaagatataacatatgagctgtgaatggaaa

SEQ ID NO: 6803 - DNA, 33 bp, Homo sapiens
ctcccaatacatagtagtaaacattcaggtaat

SEQ ID NO: 6804 - DNA, 33 bp, Homo sapiens
ctaaagtccagatttcgaacacacactcaacta

SEQ ID NO: 6805 - DNA, 33 bp, Homo sapiens
ccacttctactagactgaaatttccatgaagcc

SEQ ID NO: 6806 - DNA, 33 bp, Homo sapiens
tctcagtaatccaactgaactgtacttcactgt

SEQ ID NO: 6807 - DNA, 33 bp, Homo sapiens
tcaaaatgaaacacaatgccaagcccaatgtgg

SEQ ID NO: 6808 - DNA, 33 bp, Homo sapiens
tggcataaaagttgccggacactattataggaa

SEQ ID NO: 6809 - DNA, 33 bp, Homo sapiens
ctgttgttgaactgcagctgggcactctacatt

SEQ ID NO: 6810 - DNA, 33 bp, Homo sapiens
caaaaagttacttagctagttaaatgaatctta

SEQ ID NO: 6811 - DNA, 33 bp, Homo sapiens
ttgtttacaggacttggaacgtttacatttaat

SEQ ID NO: 6812 - DNA, 33 bp, Homo sapiens
agattaaggacactgatagttgtataattaaaa

SEQ ID NO: 6813 - DNA, 33 bp, Homo sapiens
gatggcacattcaaaacagatgttaaatcaagg

SEQ ID NO: 6814 - DNA, 33 bp, Homo sapiens
attgtttgattttgaatggtctataaacactgg

SEQ ID NO: 6815 - DNA, 51 bp, Homo sapiens
tttatcttatgactgcacattatcatggaatacaacaaagtcattaatttt

SEQ ID NO: 6816 - DNA, 51 bp, Homo sapiens
tttggaattcgagaaaggtcttcatgaatggaaaattgtcaacagtgctaa

SEQ ID NO: 6817 - DNA, 33 bp, Homo sapiens
ctcctcattgtccacacctcctgctagtatcga

SEQ ID NO: 6818 - DNA, 33 bp, Homo sapiens
aaagctggtaattaaatgcttctgatgactgaa

SEQ ID NO: 6819 - DNA, 33 bp, Homo sapiens
gtacagactcagaaaatgctgtgcatgcagccc

SEQ ID NO: 6820 - DNA, 33 bp, Homo sapiens
ctctttctggaagtggtatttaagcaacacatc

SEQ ID NO: 6821 - DNA, 33 bp, Homo sapiens
ggcagaacttggagtatgagccaatgtggacac

SEQ ID NO: 6822 - DNA, 33 bp, Homo sapiens
gaagcactcaaggttataagaacacaacaccct

SEQ ID NO: 6823 - DNA, 33 bp, Homo sapiens
ccaagaagccatctacgaaccactttatctatg

SEQ ID NO: 6824 - DNA, 33 bp, Homo sapiens
ccatagatcacctgaatgaagttaaaatatgta

SEQ ID NO: 6825 - DNA, 33 bp, Homo sapiens
atatttaatgcatcctgaacagcatgggtggag

SEQ ID NO: 6826 - DNA, 33 bp, Homo sapiens
ggaatgtgcaagaaaattggactccatgctctg

SEQ ID NO: 6827 - DNA, 51 bp, Homo sapiens
tattctactgtggctgaactgatatccagtttgtaagaaaaaggtctcttt

SEQ ID NO: 6828 - DNA, 33 bp, Homo sapiens
ttgaatctcagaagccgaaattcctggactagt

SEQ ID NO: 6829 - DNA, 33 bp, Homo sapiens
ccatgatgtaaaaatatacagtgtttattgatt

SEQ ID NO: 6830 - DNA, 33 bp, Homo sapiens
ttcatcttctgccaacgcttgaaaaaagggctg

SEQ ID NO: 6831 - DNA, 33 bp, Homo sapiens
actgaacaactccatatatttcattactgtctt

SEQ ID NO: 6832 - DNA, 33 bp, Homo sapiens
gcatttaacaagagctgaacagttctcacacat

SEQ ID NO: 6833 - DNA, 33 bp, Homo sapiens
taaaataagagaaaagtcataaaggcagatcat

SEQ ID NO: 6834 - DNA, 33 bp, Homo sapiens
gacagatagtgcagggcaatagtgtaaacaagg

SEQ ID NO: 6835 - DNA, 33 bp, Homo sapiens
cctgcactatctgtcatggagtaacaaggagaa

SEQ ID NO: 6836 - DNA, 33 bp, Homo sapiens
tttctctgctgacaaaggacaaacctcttattt

SEQ ID NO: 6837 - DNA, 33 bp, Homo sapiens
ggaaccatcaaggtgatatgaatggcgaatggt

SEQ ID NO: 6838 - DNA, 33 bp, Homo sapiens
tgcaagtcggaaaatagatcaaccctgtgacct

SEQ ID NO: 6839 - DNA, 33 bp, Homo sapiens
ctgaagattacagaaataagaagtgaaatacat

SEQ ID NO: 6840 - DNA, 51 bp, Homo sapiens
ttttgaatgttttgttcagtgttttgtccccagatcctaaaaagttcctat

SEQ ID NO: 6841 - DNA, 33 bp, Homo sapiens
tgaggaagagatggaagctgtatttcattggac

SEQ ID NO: 6842 - DNA, 33 bp, Homo sapiens
agaaggcaacttaaaatactcagtccccagaac

SEQ ID NO: 6843 - DNA, 33 bp, Homo sapiens
tgtaaattaggcttaattgatgttggctgtgtt

SEQ ID NO: 6844 - DNA, 33 bp, Homo sapiens
catgaatgccagatgatagtaaactctagagag

SEQ ID NO: 6845 - DNA, 33 bp, Homo sapiens
ttgaaaattagaccactggtagaatgagtatag

SEQ ID NO: 6846 - DNA, 33 bp, Homo sapiens
acaaatactcatttgcgcttgatttgcacatcc

SEQ ID NO: 6847 - DNA, 33 bp, Homo sapiens
ctacatggaaaattgacgtagcaaggtaggtca

SEQ ID NO: 6848 - DNA, 33 bp, Homo sapiens
aatgtttgtcaatatcgaccaagaacaaaagtt

SEQ ID NO: 6849 - DNA, 33 bp, Homo sapiens
caatcaactctgaagcgcatcttttctcatccc

SEQ ID NO: 6850 - DNA, 33 bp, Homo sapiens
gaaatgagctatcaccgaaagatgtggaggaac

SEQ ID NO: 6851 - DNA, 33 bp, Homo sapiens
tcaaaacccatagaaccctatgacaccaagagt

SEQ ID NO: 6852 - DNA, 33 bp, Homo sapiens
aacttagtgggagaatgaattggcatggcattt

SEQ ID NO: 6853 - DNA, 33 bp, Homo sapiens
ccctaggagatcctgagaataggttcctaagat

SEQ ID NO: 6854 - DNA, 33 bp, Homo sapiens
atgttcatatctttccgccagctagtatcagca

SEQ ID NO: 6855 - DNA, 33 bp, Homo sapiens
gaattaactgtccaaattgatacacttttttta

SEQ ID NO: 6856 - DNA, 51 bp, Homo sapiens
gtattgctattgcacttctcttacagcaactaaagtgatctcatttttaat

SEQ ID NO: 6857 - DNA, 33 bp, Homo sapiens
aatcttaacaggactatcagctgaagagacaag

SEQ ID NO: 6858 - DNA, 33 bp, Homo sapiens
ggagcgtttttaacccgctgcatatacacacaa

SEQ ID NO: 6859 - DNA, 33 bp, Homo sapiens
gaaagagagaagtggcgcattatgaactaagca

SEQ ID NO: 6860 - DNA, 33 bp, Homo sapiens
gaagagagttgcagtccaatacttagccctgct

SEQ ID NO: 6861 - DNA, 33 bp, Homo sapiens
ccaattattctcactctaaggttacatcatatt

SEQ ID NO: 6862 - DNA, 51 bp, Homo sapiens
gaaattaatctagaaatgtgttaaatcgcttatagggctagagtgtgtctt

SEQ ID NO: 6863 - DNA, 51 bp, Homo sapiens
ataagctgcatagagctctccatcacaataacaaaaaaggtttcagtgctg

SEQ ID NO: 6864 - DNA, 51 bp, Homo sapiens
aaaatatatatgaatgacagtctaatcaatatgaggttaaaaggagaaagc

SEQ ID NO: 6865 - DNA, 33 bp, Homo sapiens
ccagatgggtctgttatgatttcagccaccttg

SEQ ID NO: 6866 - DNA, 33 bp, Homo sapiens
gcagctcattgcagtaggacagatttaaacaac

SEQ ID NO: 6867 - DNA, 33 bp, Homo sapiens
taacatagacataaacgcagggcaagaacgtgt

SEQ ID NO: 6868 - DNA, 33 bp, Homo sapiens
ttaatccttactatccgcataagaacttggaaa

SEQ ID NO: 6869 - DNA, 33 bp, Homo sapiens
ttttttcttgtcataagtcctaaatgcagccag

SEQ ID NO: 6870 - DNA, 33 bp, Homo sapiens
acttgctatgtcttgataggaataggagaagcc

SEQ ID NO: 6871 - DNA, 33 bp, Homo sapiens
cccaaacaaggaaatatgtaacacaagtgtggc

SEQ ID NO: 6872 - DNA, 33 bp, Homo sapiens
gtattattctttcgaagttaagattttgataat

SEQ ID NO: 6873 - DNA, 33 bp, Homo sapiens
acttcttaaaaccaaatagtgcaaaattatgtg

SEQ ID NO: 6874 - DNA, 33 bp, Homo sapiens
tatcatgtttataggatccaaaatcatgtgagt

SEQ ID NO: 6875 - DNA, 51 bp, Homo sapiens
ttggaaggaagtaggactcaagagtgaagtattaaggtggggtttcaagga

SEQ ID NO: 6876 - DNA, 33 bp, Homo sapiens
cttagtacattgaagagcaagaaggcttctgta

SEQ ID NO: 6877 - DNA, 33 bp, Homo sapiens
ccgctgtcagaaacactcaatttatacacacac

SEQ ID NO: 6878 - DNA, 33 bp, Homo sapiens
gtatcaatataaaagtcaaatggcaacacacta

SEQ ID NO: 6879 - DNA, 33 bp, Homo sapiens
cctatctttgtataactgtccatctttttttaa

SEQ ID NO: 6880 - DNA, 33 bp, Homo sapiens
tttctgctccatgaatcataataagtcttccac

SEQ ID NO: 6881 - DNA, 33 bp, Homo sapiens
tctacctgggaaccaatggcacaccctatcaag

SEQ ID NO: 6882 - DNA, 33 bp, Homo sapiens
ttatcaagagagatcagattccatcctattcac

SEQ ID NO: 6883 - DNA, 33 bp, Homo sapiens
aaatcagttattagtctcagttcaagatacaga

SEQ ID NO: 6884 - DNA, 33 bp, Homo sapiens
atctgtgtgatttgaatgctacacacctttggc

SEQ ID NO: 6885 - DNA, 33 bp, Homo sapiens
tattctgtagggaaaagagagctaacacacatg

SEQ ID NO: 6886 - DNA, 51 bp, Homo sapiens
aagaagttttggagactgcatatcataccctattttaaaggttcacattta

SEQ ID NO: 6887 - DNA, 33 bp, Homo sapiens
atcaccaagacgatgggactaagccattcatga

SEQ ID NO: 6888 - DNA, 33 bp, Homo sapiens
atggccgcactccgccgcagctgctccatgcac

SEQ ID NO: 6889 - DNA, 33 bp, Homo sapiens
taggaatgcgagttaggatagtagtacttctca

SEQ ID NO: 6890 - DNA, 33 bp, Homo sapiens
aacatttcactttttctcctaaatgtgtacttt

SEQ ID NO: 6891 - DNA, 33 bp, Homo sapiens
tacttatccacagttacacaagaggaggggata

SEQ ID NO: 6892 - DNA, 33 bp, Homo sapiens
taagcatccaggaaaatttgtcattctgtgtcc

SEQ ID NO: 6893 - DNA, 33 bp, Homo sapiens
ccttgattttaaaaactgttcctggctgagggc

SEQ ID NO: 6894 - DNA, 33 bp, Homo sapiens
gcaaaataagatgccatgaggctgtcagtctgc

SEQ ID NO: 6895 - DNA, 33 bp, Homo sapiens
tctggtctgaatccaatgtcacctaagatttag

SEQ ID NO: 6896 - DNA, 33 bp, Homo sapiens
ccattctcccgccagataaatatatgtgtatgt

SEQ ID NO: 6897 - DNA, 33 bp, Homo sapiens
gcacaaacctcaaggggccacacatttggtaga

SEQ ID NO: 6898 - DNA, 33 bp, Homo sapiens
tataatatttatagaacctagaattctgccttg

SEQ ID NO: 6899 - DNA, 33 bp, Homo sapiens
gaagaccctattagaggagctcagaaagggcct

SEQ ID NO: 6900 - DNA, 33 bp, Homo sapiens
atgattaagctgaatttaaatcacaagataata

SEQ ID NO: 6901 - DNA, 33 bp, Homo sapiens
gataactgagcagcaatcgcagcttctcctgga

SEQ ID NO: 6902 - DNA, 33 bp, Homo sapiens
ttgatgctggtaaaactacatgatctctaaaca

SEQ ID NO: 6903 - DNA, 33 bp, Homo sapiens
atagttttgagcatcagggaatacattttcaga

SEQ ID NO: 6904 - DNA, 33 bp, Homo sapiens
gggaattggcagccacgaacatattggtggtag

SEQ ID NO: 6905 - DNA, 33 bp, Homo sapiens
acagctatttggaaaatttaatgcaaattcatg

SEQ ID NO: 6906 - DNA, 33 bp, Homo sapiens
tgattcatttctctcagaacaaggatacccatt

SEQ ID NO: 6907 - DNA, 51 bp, Homo sapiens
ggataaagcttgttccaaccagtaagtcaagattcttcaccaagaaccttc

SEQ ID NO: 6908 - DNA, 51 bp, Homo sapiens
acaagaaacaaaacagatttccaagtatttttgattacagcccaaaaggtt

SEQ ID NO: 6909 - DNA, 51 bp, Homo sapiens
ttatgaaaaacaatatgcactaccagtggtaataagtataatagtcacaag

SEQ ID NO: 6910 - DNA, 51 bp, Homo sapiens
atagagcaaaaagtctttgtacctctattgtattattggctaaaagcagaa

SEQ ID NO: 6911 - DNA, 33 bp, Homo sapiens
cattacttttctacaagtcttaattacctttga

SEQ ID NO: 6912 - DNA, 33 bp, Homo sapiens
ttttatccatcatttatgtagaaaaatcagaac

SEQ ID NO: 6913 - DNA, 51 bp, Homo sapiens
ggcatttaggaaagagttttgcatatattaagtgtgaaataaatactggat

SEQ ID NO: 6914 - DNA, 33 bp, Homo sapiens
ctggctttaggataccgacaatttatactttgc

SEQ ID NO: 6915 - DNA, 33 bp, Homo sapiens
taggaacatagttagagtcagtcaataagtcaa

SEQ ID NO: 6916 - DNA, 33 bp, Homo sapiens
atctagaggtctattagaaaaacagtcaggaaa

SEQ ID NO: 6917 - DNA, 33 bp, Homo sapiens
gaacaaaatcatgccagtattaatgacctgtgt

SEQ ID NO: 6918 - DNA, 33 bp, Homo sapiens
tcaatttatactctcaccaggaatatattatct

SEQ ID NO: 6919 - DNA, 33 bp, Homo sapiens
agttgttgctaagttctctcatagctttaatat

SEQ ID NO: 6920 - DNA, 33 bp, Homo sapiens
atgtgagacaaatccatagtcgattgcttcctt

SEQ ID NO: 6921 - DNA, 33 bp, Homo sapiens
ccaaagcacacaattagatatcgatgattatgg

SEQ ID NO: 6922 - DNA, 33 bp, Homo sapiens
ctgaggtgttgggggcccaatctctgctccatt

SEQ ID NO: 6923 - DNA, 33 bp, Homo sapiens
ctcactgtgtgcaagatgtaagtgatttgcttg

SEQ ID NO: 6924 - DNA, 33 bp, Homo sapiens
agctgaagttgcagcctacaggtggaatttgtt

SEQ ID NO: 6925 - DNA, 33 bp, Homo sapiens
aaaaaggtatggaaaatttgaggatcttgatag

SEQ ID NO: 6926 - DNA, 33 bp, Homo sapiens
aacagcaaggtagaaattaaaaagccagtcttc

SEQ ID NO: 6927 - DNA, 33 bp, Homo sapiens
gtgtaatttacaagaagacttaaagaactctca

SEQ ID NO: 6928 - DNA, 33 bp, Homo sapiens
gttgtttgaaattggaggtaaaaatagttgtct

SEQ ID NO: 6929 - DNA, 33 bp, Homo sapiens
agtcgttcaacaaatatctatttagtcccaaag

SEQ ID NO: 6930 - DNA, 33 bp, Homo sapiens
tgttgagcagtgggactggactttgcttataag

SEQ ID NO: 6931 - DNA, 33 bp, Homo sapiens
acccagaaatgctttaggatggaggacattaca

SEQ ID NO: 6932 - DNA, 33 bp, Homo sapiens
tgaccattaatgttgatggtcccctgtggcaga

SEQ ID NO: 6933 - DNA, 33 bp, Homo sapiens
atcacagcaaacgctttaagagttctcaacaat

SEQ ID NO: 6934 - DNA, 33 bp, Homo sapiens
ggaccaatttagctgatctcttccttgactgag

SEQ ID NO: 6935 - DNA, 51 bp, Homo sapiens
gtgtagcacatacgtagtataagaattctgttgatataatgccgcagtcat

SEQ ID NO: 6936 - DNA, 33 bp, Homo sapiens
cacgtataatgagatgtcactgcaagagatcat

SEQ ID NO: 6937 - DNA, 33 bp, Homo sapiens
gtcctggcgctgttgagctttatgagatgacta

SEQ ID NO: 6938 - DNA, 33 bp, Homo sapiens
aagatcatgtctgcaagcaagaactatttgact

SEQ ID NO: 6939 - DNA, 33 bp, Homo sapiens
ataagtctgtgcaaccggaaccatttttccata

SEQ ID NO: 6940 - DNA, 33 bp, Homo sapiens
tgagaaaggaaggttatagacttacacatatgc

SEQ ID NO: 6941 - DNA, 33 bp, Homo sapiens
gttgcttgatggagtgtaccaagtaaaaaagat

SEQ ID NO: 6942 - DNA, 51 bp, Homo sapiens
cagagctgagagtggtagatggaactattcttccaaagcatcatttcccca

SEQ ID NO: 6943 - DNA, 51 bp, Homo sapiens
tggagatcgtggtggatattttccggaagctgggactgaggcagtgccttg

SEQ ID NO: 6944 - DNA, 33 bp, Homo sapiens
ctggtggcatgcataagcccaaaggtaggggtc

SEQ ID NO: 6945 - DNA, 33 bp, Homo sapiens
aaggttaaggttggagtagacgaaaatcaagag

SEQ ID NO: 6946 - DNA, 33 bp, Homo sapiens
attattcagcactggataaagatagccttcttt

SEQ ID NO: 6947 - DNA, 33 bp, Homo sapiens
aatgtaagcagagagatggatattcttgtttta

SEQ ID NO: 6948 - DNA, 33 bp, Homo sapiens
cattaatacccaggaagtgactcaaaccacagt

SEQ ID NO: 6949 - DNA, 33 bp, Homo sapiens
tactttctagatacaatggtagatggtagtaca

SEQ ID NO: 6950 - DNA, 33 bp, Homo sapiens
agatgactaaggcacagtatcatttccaatttt

SEQ ID NO: 6951 - DNA, 33 bp, Homo sapiens
tgcttgttaatgacatgaagattggtgaggatt

SEQ ID NO: 6952 - DNA, 33 bp, Homo sapiens
tgaccacttgctgttatacctgctttgtggcaa

SEQ ID NO: 6953 - DNA, 33 bp, Homo sapiens
aatcagctttgaactgtatctaagtcatccttc

SEQ ID NO: 6954 - DNA, 51 bp, Homo sapiens
gtaagttgttgtgaataatatcttggagaaacctacctgggttgtagagtt

SEQ ID NO: 6955 - DNA, 51 bp, Homo sapiens
acagacaaaggcatatgccacaagagaggaacagagtttcactgggtttac

SEQ ID NO: 6956 - DNA, 51 bp, Homo sapiens
aaaatttttggttgagatcttaaaatatttctaaataataatccctagtaa

SEQ ID NO: 6957 - DNA, 33 bp, Homo sapiens
gactagctgtaaaggagatatattttgccctgt

SEQ ID NO: 6958 - DNA, 33 bp, Homo sapiens
atagttctggccacgagaataggatgctgatac

SEQ ID NO: 6959 - DNA, 33 bp, Homo sapiens
gagctcacatggtaaatgatgtctgccaccttc

SEQ ID NO: 6960 - DNA, 33 bp, Homo sapiens
ttcagtatgttctgaatacacaatggctaatat

SEQ ID NO: 6961 - DNA, 33 bp, Homo sapiens
actggagttcccactcgaatgccactaaccctc

SEQ ID NO: 6962 - DNA, 33 bp, Homo sapiens
ggcattatatcagcaatgtgtgtttctgctaca

SEQ ID NO: 6963 - DNA, 33 bp, Homo sapiens
gcgttaatctattaatgaggcatccatccccat

SEQ ID NO: 6964 - DNA, 33 bp, Homo sapiens
tgcaatcaactacgtctactggcttcggaattg

SEQ ID NO: 6965 - DNA, 33 bp, Homo sapiens
atttgaagaatgccaagtcaaatttctgagctc

SEQ ID NO: 6966 - DNA, 33 bp, Homo sapiens
ataatcaagatttgcagaagtaggcaaatggat

SEQ ID NO: 6967 - DNA, 33 bp, Homo sapiens
aggcaactgctatcgatattccttgtcacagtt

SEQ ID NO: 6968 - DNA, 33 bp, Homo sapiens
agcccttttatttccatcaggtgtatctttcta

SEQ ID NO: 6969 - DNA, 33 bp, Homo sapiens
gcctatggtatttccacctcttcctaatctttg

SEQ ID NO: 6970 - DNA, 33 bp, Homo sapiens
gaccacaagcagacaatagttttgccacatcag

SEQ ID NO: 6971 - DNA, 33 bp, Homo sapiens
gaaagtataaaccatcgcatacaagagaatccg

SEQ ID NO: 6972 - DNA, 33 bp, Homo sapiens
gcagttagctaagaccgcttttaatgatagggc

SEQ ID NO: 6973 - DNA, 33 bp, Homo sapiens
atacacctatagcacttaataaaaatactgctg

SEQ ID NO: 6974 - DNA, 51 bp, Homo sapiens
caattctaaaattttagaacaataattgggtctttaaatatagatttggga

SEQ ID NO: 6975 - DNA, 33 bp, Homo sapiens
atgtttcaaattatcctagttaacgtgactggc

SEQ ID NO: 6976 - DNA, 33 bp, Homo sapiens
tattattctctaaaactctaatatggtctggct

SEQ ID NO: 6977 - DNA, 51 bp, Homo sapiens
ctatcaggacacaatgaaatatttagattctgggataacaatgtactaatg

SEQ ID NO: 6978 - DNA, 33 bp, Homo sapiens
actcttactcatcaccgcaaatcacttattaat

SEQ ID NO: 6979 - DNA, 33 bp, Homo sapiens
tttattctgttgtctagcttctcaatgtttaat

SEQ ID NO: 6980 - DNA, 33 bp, Homo sapiens
acagcctaatgatgcataaaaatagtgatatgt

SEQ ID NO: 6981 - DNA, 33 bp, Homo sapiens
tattgattgccttaagcactgcaattaactaag

SEQ ID NO: 6982 - DNA, 33 bp, Homo sapiens
atattagtgcaggctatgcgtgacattacccca

SEQ ID NO: 6983 - DNA, 33 bp, Homo sapiens
tggagtctgtccagtacctaatctccttgcaga

SEQ ID NO: 6984 - DNA, 33 bp, Homo sapiens
tcaaaatgtgcataaactacaggcataagttgt

SEQ ID NO: 6985 - DNA, 33 bp, Homo sapiens
gaaatgttactttcaagaacttacaggaccttg

SEQ ID NO: 6986 - DNA, 33 bp, Homo sapiens
actagttggctccaaattgagaaaactgtgcac

SEQ ID NO: 6987 - DNA, 33 bp, Homo sapiens
aaacctgcttcttacatactcaactgaaatcat

SEQ ID NO: 6988 - DNA, 33 bp, Homo sapiens
atgcagaaaactaagagacccatgaaggagaag

SEQ ID NO: 6989 - DNA, 33 bp, Homo sapiens
ggtatccctaaatgaaggaactggatgcaaatt

SEQ ID NO: 6990 - DNA, 33 bp, Homo sapiens
gactcaaaccccatcagtctcatgacaaagccc

SEQ ID NO: 6991 - DNA, 33 bp, Homo sapiens
aggatgtttcaggtgatgttctggagataatct

SEQ ID NO: 6992 - DNA, 33 bp, Homo sapiens
tgttaaccaaacctaccatatcatcactctaat

SEQ ID NO: 6993 - DNA, 33 bp, Homo sapiens
gatcattaggtcatcagcaaaaataaatcaatt

SEQ ID NO: 6994 - DNA, 33 bp, Homo sapiens
ttggctacatctactctaactttgaggaaacac

SEQ ID NO: 6995 - DNA, 33 bp, Homo sapiens
aatccaagcctttagatcagaagtaagaataag

SEQ ID NO: 6996 - DNA, 33 bp, Homo sapiens
ttgtgcagaggaaactcagcaatggagttcatg

SEQ ID NO: 6997 - DNA, 33 bp, Homo sapiens
tttctttgcagtagcctctatggttttgaagca

SEQ ID NO: 6998 - DNA, 33 bp, Homo sapiens
attcacaactaaagccgccattgaatcccatcc

SEQ ID NO: 6999 - DNA, 33 bp, Homo sapiens
cacacattagttctcctcagtgccatcactttg

SEQ ID NO: 7000 - DNA, 33 bp, Homo sapiens
cccacgtgtccaaatgtatattctgtctgacac

SEQ ID NO: 7001 - DNA, 33 bp, Homo sapiens
tcttgtctgattatacccctatgtgagaattca

SEQ ID NO: 7002 - DNA, 33 bp, Homo sapiens
tggatccttttttccaggtgtatgcagcaagat

SEQ ID NO: 7003 - DNA, 51 bp, Homo sapiens
ctgccactcagttctctgtggagattatagcaattcatgggactcagagtg

SEQ ID NO: 7004 - DNA, 51 bp, Homo sapiens
ctcccatagcagtgagacattacgagaaaacggtttctatggtgttcgtct

SEQ ID NO: 7005 - DNA, 33 bp, Homo sapiens
aagaatagagagtcaggaaattgaaaataaata

SEQ ID NO: 7006 - DNA, 33 bp, Homo sapiens
ttgagttataagggaacaatgatgatctcagtg

SEQ ID NO: 7007 - DNA, 33 bp, Homo sapiens
aactcctactgaccacgcttttccagctgagtc

SEQ ID NO: 7008 - DNA, 33 bp, Homo sapiens
tgaaatttagattgggtaattttgtctggtgaa

SEQ ID NO: 7009 - DNA, 33 bp, Homo sapiens
aaattgcttgattatatgacatttatggttcaa

SEQ ID NO: 7010 - DNA, 33 bp, Homo sapiens
gtctccataggcactggaaacttaccatgtttc

SEQ ID NO: 7011 - DNA, 33 bp, Homo sapiens
ttgcttatcaggaagagacatttagaaagacaa

SEQ ID NO: 7012 - DNA, 33 bp, Homo sapiens
taagaaaccagttcaatagctgatgcctttgac

SEQ ID NO: 7013 - DNA, 33 bp, Homo sapiens
gtttttgcagtaaatatggaagtggatatcaag

SEQ ID NO: 7014 - DNA, 33 bp, Homo sapiens
tattctgtgctcctaatcttttatttgattggg

SEQ ID NO: 7015 - DNA, 33 bp, Homo sapiens
atgctaattccccccatgaaagatggctttaca

SEQ ID NO: 7016 - DNA, 33 bp, Homo sapiens
ttgaatctttgagttatctggatgcatttctta

SEQ ID NO: 7017 - DNA, 33 bp, Homo sapiens
gcctctggcagagccatacttagctgaatttga

SEQ ID NO: 7018 - DNA, 33 bp, Homo sapiens
agagcatattcactaggacattatcaggtctac

SEQ ID NO: 7019 - DNA, 33 bp, Homo sapiens
tatattatacatatacggaacatctacatattt

SEQ ID NO: 7020 - DNA, 33 bp, Homo sapiens
gcgtacactctcatccgataggagaatgcatat

SEQ ID NO: 7021 - DNA, 33 bp, Homo sapiens
catgttttttggtcccgcatgttccccttcttt

SEQ ID NO: 7022 - DNA, 33 bp, Homo sapiens
catacatttcagtcccgactcacttgcttcatc

SEQ ID NO: 7023 - DNA, 51 bp, Homo sapiens
tcatgaaagcttattaagctgattatgcaataggcttaacatgcactatcc

SEQ ID NO: 7024 - DNA, 33 bp, Homo sapiens
gcagtgatgcattgcagctttcattataacaaa

SEQ ID NO: 7025 - DNA, 33 bp, Homo sapiens
gtgacgatttcacacaggcattggaaaagaaaa

SEQ ID NO: 7026 - DNA, 33 bp, Homo sapiens
gttcatagtatctccagtctgcatgcttcggat

SEQ ID NO: 7027 - DNA, 33 bp, Homo sapiens
tggaggagattggaaggcttcagcaatggcctc

SEQ ID NO: 7028 - DNA, 33 bp, Homo sapiens
gatagctacactgtccgcaaaatatcacacgca

SEQ ID NO: 7029 - DNA, 33 bp, Homo sapiens
ccaactttctgtcaccgaaaccagaagccaccc

SEQ ID NO: 7030 - DNA, 33 bp, Homo sapiens
tgttcataaggtaagcggcacatggttctttcg

SEQ ID NO: 7031 - DNA, 33 bp, Homo sapiens
tcggtatttagggtgatctttactgttgctgtg

SEQ ID NO: 7032 - DNA, 33 bp, Homo sapiens
gaacttcctgaatcaaggtgtggactgtccaca

SEQ ID NO: 7033 - DNA, 33 bp, Homo sapiens
tttcagacaagctctcgataaccctggagtaga

SEQ ID NO: 7034 - DNA, 33 bp, Homo sapiens
gccgtcccaaaactcatatttctggagtccctt

SEQ ID NO: 7035 - DNA, 33 bp, Homo sapiens
tgtccagccgcatacatcaattctattcacatt

SEQ ID NO: 7036 - DNA, 33 bp, Homo sapiens
tgctttgatgggctaggagagaaatggtttgct

SEQ ID NO: 7037 - DNA, 33 bp, Homo sapiens
ttagggttagtcaatagcgccgagcctcggagg

SEQ ID NO: 7038 - DNA, 33 bp, Homo sapiens
tacatgtaaaattctatagtacaggtagaggca

SEQ ID NO: 7039 - DNA, 33 bp, Homo sapiens
cagtgcatttttccacggattacagacaaaaag

SEQ ID NO: 7040 - DNA, 33 bp, Homo sapiens
tttacctacacactcagcctttctattactctt

SEQ ID NO: 7041 - DNA, 33 bp, Homo sapiens
aatagagtgtgtcaaagacgtgcaattgatgaa

SEQ ID NO: 7042 - DNA, 33 bp, Homo sapiens
atttgaccctgtgatgtatttatcaaaatatgg

SEQ ID NO: 7043 - DNA, 33 bp, Homo sapiens
accgctgtggtctgcatctctgacaagccccta

SEQ ID NO: 7044 - DNA, 33 bp, Homo sapiens
aatatatgcaaataaatgaaactgcggtgaaat

SEQ ID NO: 7045 - DNA, 33 bp, Homo sapiens
gaccactttaaattcatgctgtctgatgggagg

SEQ ID NO: 7046 - DNA, 33 bp, Homo sapiens
ggcatttagagaaatatggccaatgtgcaaaac

SEQ ID NO: 7047 - DNA, 33 bp, Homo sapiens
gagtcttttttcggtcgctcctgcccttgttac

SEQ ID NO: 7048 - DNA, 33 bp, Homo sapiens
cagttttccctggacagtatggtgccaatcaca

SEQ ID NO: 7049 - DNA, 33 bp, Homo sapiens
tacagcatcctacacatgacaatataagtaaca

SEQ ID NO: 7050 - DNA, 33 bp, Homo sapiens
tgggctatgcctagaagctgtagttgatgataa

SEQ ID NO: 7051 - DNA, 33 bp, Homo sapiens
ttctctactgccatgagggatctaacagcactc

SEQ ID NO: 7052 - DNA, 33 bp, Homo sapiens
cgaatgaatgaatgaaggctcgggtacaacagg

SEQ ID NO: 7053 - DNA, 33 bp, Homo sapiens
agcggagagcttattctctttcttgtcgcctat

SEQ ID NO: 7054 - DNA, 33 bp, Homo sapiens
atattcatctactccatctgtattttcacaaga

SEQ ID NO: 7055 - DNA, 51 bp, Homo sapiens
agctatctagaaccattctataaattagccttttatttgccagccatacat

SEQ ID NO: 7056 - DNA, 33 bp, Homo sapiens
tttgaaacgtaacttggaagggctttgaaatgc

SEQ ID NO: 7057 - DNA, 33 bp, Homo sapiens
gtcttaagaaattactgaaagatacgactcaat

SEQ ID NO: 7058 - DNA, 33 bp, Homo sapiens
aaataatatgttggaagtgataccagtgcaagg

SEQ ID NO: 7059 - DNA, 33 bp, Homo sapiens
tcctaggaagcaaacttaccgtgttgggctctc

SEQ ID NO: 7060 - DNA, 33 bp, Homo sapiens
ttaatttcccaggacatggaataactcttaaaa

SEQ ID NO: 7061 - DNA, 33 bp, Homo sapiens
tctaacaagatcctaagtgatgacgttaatgtt

SEQ ID NO: 7062 - DNA, 33 bp, Homo sapiens
tagaaaatgctttcccgaatggtttttcagaga

SEQ ID NO: 7063 - DNA, 33 bp, Homo sapiens
tcatgaaaagaagagatgcagggctcagagctc

SEQ ID NO: 7064 - DNA, 33 bp, Homo sapiens
tagactctccataccagaaaaggccacaagaaa

SEQ ID NO: 7065 - DNA, 33 bp, Homo sapiens
aatgttacgcttttgagctgtcattggcaatgc

SEQ ID NO: 7066 - DNA, 33 bp, Homo sapiens
gtcttcctcatccggatctaggaaaggttaact

SEQ ID NO: 7067 - DNA, 33 bp, Homo sapiens
ggatcaatagagtagaggtttggatggtaggga

SEQ ID NO: 7068 - DNA, 33 bp, Homo sapiens
caattgagattgcaaatgttagatatgtgcaaa

SEQ ID NO: 7069 - DNA, 33 bp, Homo sapiens
cttgttggttgaagtcgaaccatggaatagagg

SEQ ID NO: 7070 - DNA, 33 bp, Homo sapiens
agaaagataacaaggatatgtaagtaaatggtc

SEQ ID NO: 7071 - DNA, 33 bp, Homo sapiens
tgcgaagagaagtaaatataaagccttcacaag

SEQ ID NO: 7072 - DNA, 33 bp, Homo sapiens
catacaggaatacaacggctatacaagaaagaa

SEQ ID NO: 7073 - DNA, 33 bp, Homo sapiens
tttatttgtcatcagatgctatccaggatatag

SEQ ID NO: 7074 - DNA, 33 bp, Homo sapiens
gggaagagagagccaatgcaaggacacattact

SEQ ID NO: 7075 - DNA, 33 bp, Homo sapiens
gcaaaaacagtggcaagagtacgattgacgtga

SEQ ID NO: 7076 - DNA, 33 bp, Homo sapiens
atcttgactacattcagaattctctttttccct

SEQ ID NO: 7077 - DNA, 51 bp, Homo sapiens
gagaagaaaagctgatgacgcatgagagaggagagaattacgggggttcaa

SEQ ID NO: 7078 - DNA, 33 bp, Homo sapiens
tgccttatgtgagacatcgttctctccccattt

SEQ ID NO: 7079 - DNA, 33 bp, Homo sapiens
ttcttgaaagtcagaacaatctaaagcaaaata

SEQ ID NO: 7080 - DNA, 33 bp, Homo sapiens
attcaactctcttggcgaaaaaacgacgccttt

SEQ ID NO: 7081 - DNA, 33 bp, Homo sapiens
tggaagccacaaaaaagagttgggcaaggcttg

SEQ ID NO: 7082 - DNA, 33 bp, Homo sapiens
ataaacaatggaaaaaggcccaactgttgtttt

SEQ ID NO: 7083 - DNA, 33 bp, Homo sapiens
agcatctggaatcacactggcaatcttcccaaa

SEQ ID NO: 7084 - DNA, 33 bp, Homo sapiens
ggcagtatcatgacacgaaacaaagaacaatgg

SEQ ID NO: 7085 - DNA, 33 bp, Homo sapiens
acacacagtgcagagccatgagtatagtagtat

SEQ ID NO: 7086 - DNA, 33 bp, Homo sapiens
cattcaaatcctctacgcagtaagtgctcactt

SEQ ID NO: 7087 - DNA, 33 bp, Homo sapiens
cttactgtggtaaaactaggccaaagtgtacag

SEQ ID NO: 7088 - DNA, 33 bp, Homo sapiens
tgacactttcatttaagggcttctatttcaagt

SEQ ID NO: 7089 - DNA, 33 bp, Homo sapiens
ggatacattaattcaaggtatagtagcacttga

SEQ ID NO: 7090 - DNA, 33 bp, Homo sapiens
ggttgttgaatagtaatgaagaaatgcttctgc

SEQ ID NO: 7091 - DNA, 33 bp, Homo sapiens
taacacaattaggatggaagttatctttatgga

SEQ ID NO: 7092 - DNA, 33 bp, Homo sapiens
acataggtaacaaaaatgtatgcataatggtgc

SEQ ID NO: 7093 - DNA, 33 bp, Homo sapiens
catcctactcttcacatcttctgaaaatgtttt

SEQ ID NO: 7094 - DNA, 33 bp, Homo sapiens
atccatacgtgtcatagcttccctgcaagacaa

SEQ ID NO: 7095 - DNA, 33 bp, Homo sapiens
tgacttgcttctaatcgatagaatttggtgaat

SEQ ID NO: 7096 - DNA, 51 bp, Homo sapiens
tgaaatcagttttgctttagagacagcataagtaggtcacctgttttacca

SEQ ID NO: 7097 - DNA, 51 bp, Homo sapiens
tctgagggtgaagaaagtaaagacattgattaactttaggacttacgtttt

SEQ ID NO: 7098 - DNA, 33 bp, Homo sapiens
tgtattggatggtagatgagagagaaagaacag

SEQ ID NO: 7099 - DNA, 33 bp, Homo sapiens
aggtgtgaaattcacaccagatttccaagactt

SEQ ID NO: 7100 - DNA, 33 bp, Homo sapiens
atttgaacacagggcattcattagaaaaaattt

SEQ ID NO: 7101 - DNA, 33 bp, Homo sapiens
ctcctaccttgaagcattcttatttcagctcag

SEQ ID NO: 7102 - DNA, 33 bp, Homo sapiens
actctcaccagcaacatggtagagttttagcgc

SEQ ID NO: 7103 - DNA, 33 bp, Homo sapiens
tctatccatttcagcatcaattggttcctagat

SEQ ID NO: 7104 - DNA, 51 bp, Homo sapiens
atccgtcaacctctggggagaaaacgggcatttaaatctcgatagtaaatg

SEQ ID NO: 7105 - DNA, 33 bp, Homo sapiens
ctctgacggattacacgctacatcttgagaaaa

SEQ ID NO: 7106 - DNA, 33 bp, Homo sapiens
agagctgcaagctttgtaaataagaggttgctt

SEQ ID NO: 7107 - DNA, 33 bp, Homo sapiens
gtgtccgtggtcacaatgaaacagagaccactg

SEQ ID NO: 7108 - DNA, 33 bp, Homo sapiens
tgatgtggtcctaacaggaaatgggagaacttt

SEQ ID NO: 7109 - DNA, 33 bp, Homo sapiens
atcttgaatgtgcagggcaactgccagagacac

SEQ ID NO: 7110 - DNA, 33 bp, Homo sapiens
ccatgaggctgcactatggcttttctagaatcc

SEQ ID NO: 7111 - DNA, 33 bp, Homo sapiens
tgaaagcctgttccacgaagtctgagaccaaaa

SEQ ID NO: 7112 - DNA, 33 bp, Homo sapiens
gaacacactcagctccgcctctcctcagaaggc

SEQ ID NO: 7113 - DNA, 33 bp, Homo sapiens
gttctgagtctttcaaggacactcccattacac

SEQ ID NO: 7114 - DNA, 33 bp, Homo sapiens
actgagtgattatatggagaggcaaatgccact

SEQ ID NO: 7115 - DNA, 33 bp, Homo sapiens
ggcccagagggaacactggcatggagaatagca

SEQ ID NO: 7116 - DNA, 33 bp, Homo sapiens
ttagggcaagaatgtggagaatgaaagcaccgt

SEQ ID NO: 7117 - DNA, 33 bp, Homo sapiens
gaaaataagtgaaagggcactaccaattcctcc

SEQ ID NO: 7118 - DNA, 33 bp, Homo sapiens
ataaaaggataacagatgaggcaacaaattgcc

SEQ ID NO: 7119 - DNA, 33 bp, Homo sapiens
aagtcacctgtgcacctggagaagggctaattt

SEQ ID NO: 7120 - DNA, 33 bp, Homo sapiens
tatggagtcacgcctgtaggatggtgatcccat

SEQ ID NO: 7121 - DNA, 33 bp, Homo sapiens
cttatctccatgagtagaacaaagtaatggggc

SEQ ID NO: 7122 - DNA, 33 bp, Homo sapiens
ttaagcacctattatggaggcagagcttcagac

SEQ ID NO: 7123 - DNA, 33 bp, Homo sapiens
aagtttaatatgggcctacagtagacttgtaaa

SEQ ID NO: 7124 - DNA, 33 bp, Homo sapiens
acaaaccagtgagtgataaccatcctggatgcc

SEQ ID NO: 7125 - DNA, 33 bp, Homo sapiens
atggagactcatgaaggactagctacattaact

SEQ ID NO: 7126 - DNA, 33 bp, Homo sapiens
gagacaggatctttaggaatgtagttaagttaa

SEQ ID NO: 7127 - DNA, 33 bp, Homo sapiens
atattcaacactgacagagtaaaatagctgaga

SEQ ID NO: 7128 - DNA, 33 bp, Homo sapiens
cagtgctggaagcgtcgccagctcagtgatcat

SEQ ID NO: 7129 - DNA, 33 bp, Homo sapiens
taacccttggaagctatggatctatctaatagg

SEQ ID NO: 7130 - DNA, 33 bp, Homo sapiens
gctccctgctgtatcatctggtagctacacaac

SEQ ID NO: 7131 - DNA, 33 bp, Homo sapiens
gttcagtaagtacagcgcagagattagtatgac

SEQ ID NO: 7132 - DNA, 33 bp, Homo sapiens
taaagccatcttcagcgagggctgaactgaacc

SEQ ID NO: 7133 - DNA, 33 bp, Homo sapiens
tgctgaagcacctcactcaggatttccggcctc

SEQ ID NO: 7134 - DNA, 33 bp, Homo sapiens
cagcatctgtaactgatagcgggggattgtgac

SEQ ID NO: 7135 - DNA, 33 bp, Homo sapiens
ttctgctccaagaaactcaccttgctcggtcca

SEQ ID NO: 7136 - DNA, 33 bp, Homo sapiens
tagtacctatttcttcgacttatcttcaagcta

SEQ ID NO: 7137 - DNA, 33 bp, Homo sapiens
tgaaaattcctcaaaatgttaagtgtagagttt

SEQ ID NO: 7138 - DNA, 33 bp, Homo sapiens
acaggtacaggatctcggaatcttaagttttgg

SEQ ID NO: 7139 - DNA, 33 bp, Homo sapiens
atctcagcaggagagatagcagggccgtcttaa

SEQ ID NO: 7140 - DNA, 33 bp, Homo sapiens
ctcttaagcagacgccgcagtggaccttgaaaa

SEQ ID NO: 7141 - DNA, 33 bp, Homo sapiens
gcccttaagcgagaaaggaaaggtgcagtgccc

SEQ ID NO: 7142 - DNA, 33 bp, Homo sapiens
aagaaaaatcacagaatctatttgaatgccaga

SEQ ID NO: 7143 - DNA, 33 bp, Homo sapiens
tgcagagtaatgtaaatagtatttgtgtgcctg

SEQ ID NO: 7144 - DNA, 33 bp, Homo sapiens
ggaaacacttatttgcgcttgtagggaaggaca

SEQ ID NO: 7145 - DNA, 33 bp, Homo sapiens
ccgcccttcaatacacggggaaatgtacatcct

SEQ ID NO: 7146 - DNA, 51 bp, Homo sapiens
gacttctccaaaattaacttaaatcgacattcagctagtcagtatacaata

SEQ ID NO: 7147 - DNA, 33 bp, Homo sapiens
caggttggatacttgaggacctgaaagaaataa

SEQ ID NO: 7148 - DNA, 33 bp, Homo sapiens
gcctcaagtcctgggatgcacttactattatta

SEQ ID NO: 7149 - DNA, 33 bp, Homo sapiens
tgttgattctgaatattacccttgtagacgctt

SEQ ID NO: 7150 - DNA, 33 bp, Homo sapiens
agagagaaatgacatcgcttttaatttccatca

SEQ ID NO: 7151 - DNA, 33 bp, Homo sapiens
tggctcggcagaggtctcttctcaccttctgga

SEQ ID NO: 7152 - DNA, 33 bp, Homo sapiens
gaaccattggtgatgggccatataacttcctag

SEQ ID NO: 7153 - DNA, 33 bp, Homo sapiens
gagttgggttaggagaccaggcaaaatctatgg

SEQ ID NO: 7154 - DNA, 33 bp, Homo sapiens
taggcccaattgccaagaaattgtttcaacatc

SEQ ID NO: 7155 - DNA, 51 bp, Homo sapiens
gaaaaataaaatcctcattggacaataattagtatcagcaagttttgagtt

SEQ ID NO: 7156 - DNA, 33 bp, Homo sapiens
aatgttcatcccaaacgccatttaccagccctg

SEQ ID NO: 7157 - DNA, 33 bp, Homo sapiens
ctcctgctggggtgaagaaagggtcatagttct

SEQ ID NO: 7158 - DNA, 51 bp, Homo sapiens
tgaatgcttgttattatcccagagagctgagaaaatgtttactggtcttta

SEQ ID NO: 7159 - DNA, 33 bp, Homo sapiens
tccattacacccatgaggtacaaccaccaccta

SEQ ID NO: 7160 - DNA, 33 bp, Homo sapiens
ctgcctgtacatgtccgcacggttgcaatcaag

SEQ ID NO: 7161 - DNA, 33 bp, Homo sapiens
aaaacgcttccataacgcgggctggatggaatg

SEQ ID NO: 7162 - DNA, 51 bp, Homo sapiens
tttaatttgaagttgtgaggattggcatagaatatgggcatctgtgccaat

SEQ ID NO: 7163 - DNA, 33 bp, Homo sapiens
cctcccttctggtgtcgctggcaattcttggca

SEQ ID NO: 7164 - DNA, 33 bp, Homo sapiens
acgtgtttctttccaagtgtggctgaagctata

SEQ ID NO: 7165 - DNA, 33 bp, Homo sapiens
aaaggagcaaaattaaccacctagagtacttaa

SEQ ID NO: 7166 - DNA, 33 bp, Homo sapiens
gcatgtaaaggccttagcagaaagctgcccttg

SEQ ID NO: 7167 - DNA, 33 bp, Homo sapiens
tatgtgaggggattcagatgaaaatgcctgccc

SEQ ID NO: 7168 - DNA, 51 bp, Homo sapiens
attttcataagaaaagcactgtttctaattttaatctacaaacaactcatt

SEQ ID NO: 7169 - DNA, 51 bp, Homo sapiens
aatgattcttatatgaagtttctggtaagctgctatgtgatactatgtact

SEQ ID NO: 7170 - DNA, 33 bp, Homo sapiens
tgtgtctgtgtgcttatatacctacagttgcat

SEQ ID NO: 7171 - DNA, 33 bp, Homo sapiens
ggtgtgtcttgaggcatagttaggtggaagaaa

SEQ ID NO: 7172 - DNA, 33 bp, Homo sapiens
tgtaatctcaagggtcgaagtggatgagaaaat

SEQ ID NO: 7173 - DNA, 33 bp, Homo sapiens
ttgttttctgaatgattaagatgcagagatgca

SEQ ID NO: 7174 - DNA, 33 bp, Homo sapiens
ctccatatttcagaaacgtcaaagtctagatgg

SEQ ID NO: 7175 - DNA, 33 bp, Homo sapiens
acacagagattccaaagtaaatttcatttgctc

SEQ ID NO: 7176 - DNA, 33 bp, Homo sapiens
tgaaacaaacagaggaggaatgtggaatccctt

SEQ ID NO: 7177 - DNA, 33 bp, Homo sapiens
tggaaattttgcttaagctgtggttagagatta

SEQ ID NO: 7178 - DNA, 33 bp, Homo sapiens
ggaaactgtgccggaccatttgctctacccgtt

SEQ ID NO: 7179 - DNA, 33 bp, Homo sapiens
aatgtttgaattggaacctacaaattaatactg

SEQ ID NO: 7180 - DNA, 33 bp, Homo sapiens
ttcctaaatgcccctagatgacagctgagctcc

SEQ ID NO: 7181 - DNA, 33 bp, Homo sapiens
ttacaaatactgcagatacacaaggattagttg

SEQ ID NO: 7182 - DNA, 33 bp, Homo sapiens
ccatctccacattcaagtaattcctcatgttct

SEQ ID NO: 7183 - DNA, 33 bp, Homo sapiens
ttgtgttaacgaatgagtatgaaatctatagat

SEQ ID NO: 7184 - DNA, 33 bp, Homo sapiens
accagtggactgatacgactgatatgtttattg

SEQ ID NO: 7185 - DNA, 33 bp, Homo sapiens
cacagatacactgcgagtagtgagaagccagag

SEQ ID NO: 7186 - DNA, 33 bp, Homo sapiens
acatgaacttgaaggatgaggaagttgactatg

SEQ ID NO: 7187 - DNA, 33 bp, Homo sapiens
atgcactgaccctgaagtgtttcagaaaggctg

SEQ ID NO: 7188 - DNA, 33 bp, Homo sapiens
actctcgttgtctcccgctaggacgattgcaat

SEQ ID NO: 7189 - DNA, 33 bp, Homo sapiens
agccacacctcatgacgagatcatttcttatat

SEQ ID NO: 7190 - DNA, 51 bp, Homo sapiens
aaaaggaatagtcatttctaaagtatggtgccattagtgttaatttgatcg

SEQ ID NO: 7191 - DNA, 33 bp, Homo sapiens
tcctttttgccaaagagatgcaggatgttccaa

SEQ ID NO: 7192 - DNA, 33 bp, Homo sapiens
aacctttacatcttcagaaaaatgaggcagtaa

SEQ ID NO: 7193 - DNA, 33 bp, Homo sapiens
agtatgtcctctcgtatagtcattttaaaatac

SEQ ID NO: 7194 - DNA, 33 bp, Homo sapiens
gcactacaatcaatgatggaagatgcatttgga

SEQ ID NO: 7195 - DNA, 33 bp, Homo sapiens
taaattgctcaatgtcgaaagcttgggaaaccc

SEQ ID NO: 7196 - DNA, 33 bp, Homo sapiens
tagatgttctgcaaccgctgagtgctctgtaaa

SEQ ID NO: 7197 - DNA, 33 bp, Homo sapiens
gagagtggtctctaaataacaactatgtaagga

SEQ ID NO: 7198 - DNA, 33 bp, Homo sapiens
gtgtatgattctttacgcagagcaaaagcatag

SEQ ID NO: 7199 - DNA, 33 bp, Homo sapiens
tccacattcaaggcagtcctcacacttgctgta

SEQ ID NO: 7200 - DNA, 33 bp, Homo sapiens
aaattccatggtgttcggaaaatattagggtac

SEQ ID NO: 7201 - DNA, 33 bp, Homo sapiens
tcctctgtctacattagctccttctttcctcct

SEQ ID NO: 7202 - DNA, 33 bp, Homo sapiens
cttgatctaatgtctatgcagaaaggttctagt

SEQ ID NO: 7203 - DNA, 33 bp, Homo sapiens
ttcaatttgaactaacgatccctccccagacat

SEQ ID NO: 7204 - DNA, 51 bp, Homo sapiens
tcccatcatgtcagaagtcacccaatgtacggaatctatacttttagagat

SEQ ID NO: 7205 - DNA, 51 bp, Homo sapiens
ccgtacattgggtgacttctgacatgatgggaatttgcaacactaaacaaa

SEQ ID NO: 7206 - DNA, 51 bp, Homo sapiens
ttgctcagttgacatcagttttatgtacaaggagagtctggtttacttagc

SEQ ID NO: 7207 - DNA, 33 bp, Homo sapiens
tctggctttctctgcaggtaaaatgggggctct

SEQ ID NO: 7208 - DNA, 33 bp, Homo sapiens
cattcttgagacttgcggaggagagaagcgccc

SEQ ID NO: 7209 - DNA, 51 bp, Homo sapiens
atatggctgatataggaagcctgaggagtaaacagatttaccagcagtaga

SEQ ID NO: 7210 - DNA, 51 bp, Homo sapiens
ttagctatgactgtattgttaccatgaaacattatgaacagggaaacagca

SEQ ID NO: 7211 - DNA, 33 bp, Homo sapiens
gcaagtttcaggagcattgctatggaaaagtac

SEQ ID NO: 7212 - DNA, 51 bp, Homo sapiens
acccagcaatcccactcctatgtctgtatctaagagaaagaaaatatctgt

SEQ ID NO: 7213 - DNA, 51 bp, Homo sapiens
gatgagctcaggaataaaacagatagctaaggataagtcattttcatccag

SEQ ID NO: 7214 - DNA, 33 bp, Homo sapiens
tgtaggggaggaacaagtaaagtgagagaaagt

SEQ ID NO: 7215 - DNA, 33 bp, Homo sapiens
aggaagctgacgctccgacactccagatggaac

SEQ ID NO: 7216 - DNA, 33 bp, Homo sapiens
cgtggactggtaatgatgaccagtgatattgag

SEQ ID NO: 7217 - DNA, 33 bp, Homo sapiens
ggagaagtaatgtggctcggaggaacttgagtc

SEQ ID NO: 7218 - DNA, 33 bp, Homo sapiens
catgcgggaatgacacggtcacactgcagaaga

SEQ ID NO: 7219 - DNA, 33 bp, Homo sapiens
tcctgccctctccccatggtgctctgctgtagt

SEQ ID NO: 7220 - DNA, 33 bp, Homo sapiens
ttgtccacaacttgaatgctgacttagcacaat

SEQ ID NO: 7221 - DNA, 33 bp, Homo sapiens
gtgatcattacaacaagtaacgcagaggagagg

SEQ ID NO: 7222 - DNA, 33 bp, Homo sapiens
gataaatcaagcccacgaggatcgcagagagag

SEQ ID NO: 7223 - DNA, 33 bp, Homo sapiens
gaataaaaggaatagaggatgcaggcaaaagag

SEQ ID NO: 7224 - DNA, 33 bp, Homo sapiens
gaccttcttttccacatcactctgtaatgccgc

SEQ ID NO: 7225 - DNA, 33 bp, Homo sapiens
agggccattgtattaatctggtgatcaagcaaa

SEQ ID NO: 7226 - DNA, 33 bp, Homo sapiens
aaactttggaaagtgagaccaagcaatcagaca

SEQ ID NO: 7227 - DNA, 33 bp, Homo sapiens
ggttgttaaggtgtcatctcttgaattagaatg

SEQ ID NO: 7228 - DNA, 33 bp, Homo sapiens
ctttaattcataacgatcacagacatccagttc

SEQ ID NO: 7229 - DNA, 33 bp, Homo sapiens
attttctcatattccatgttgggtaattcatct

SEQ ID NO: 7230 - DNA, 33 bp, Homo sapiens
gaagtacttgccttcatgaaagatccactatgt

SEQ ID NO: 7231 - DNA, 33 bp, Homo sapiens
tcccttagaccttctctcatggattgtggttcc

SEQ ID NO: 7232 - DNA, 33 bp, Homo sapiens
tgacttctcagtcaagtctctacatttgtttta

SEQ ID NO: 7233 - DNA, 33 bp, Homo sapiens
gggccttccagaaagagagacaaggctcaagag

SEQ ID NO: 7234 - DNA, 33 bp, Homo sapiens
gaagtgaacagaccaagtagacatagttcaaaa

SEQ ID NO: 7235 - DNA, 33 bp, Homo sapiens
tattttgctgaggggggaaaaagatgtattttg

SEQ ID NO: 7236 - DNA, 33 bp, Homo sapiens
gctgaaggtttggatctgaggatttcattttat

SEQ ID NO: 7237 - DNA, 33 bp, Homo sapiens
ccattaattcaacaacccttttccaagctgttt

SEQ ID NO: 7238 - DNA, 33 bp, Homo sapiens
cactgcaaactaggaatactgaataggagactc

SEQ ID NO: 7239 - DNA, 51 bp, Homo sapiens
ttcacatgttagtataacactgtgatgtattggcattttaattgagaggtt

SEQ ID NO: 7240 - DNA, 33 bp, Homo sapiens
tcttttactcatcaaatctttctcctttgctac

SEQ ID NO: 7241 - DNA, 33 bp, Homo sapiens
gtctggagaagttgaatgaaatgaatctccagc

SEQ ID NO: 7242 - DNA, 33 bp, Homo sapiens
tttcacttagcaactcgctcttccatcatgacg

SEQ ID NO: 7243 - DNA, 33 bp, Homo sapiens
aatgctttcaggttcacgaacaacggaaaagta

SEQ ID NO: 7244 - DNA, 33 bp, Homo sapiens
catgttgacaagctgagcttcatggtttctgaa

SEQ ID NO: 7245 - DNA, 33 bp, Homo sapiens
ttctcatttgtaagcctgataatcattatacca

SEQ ID NO: 7246 - DNA, 33 bp, Homo sapiens
aaggtggatgaatgcatatttcgctactaagca

SEQ ID NO: 7247 - DNA, 51 bp, Homo sapiens
tataaatcactttatttaattctcacacaatgctatggggtagcagctact

SEQ ID NO: 7248 - DNA, 51 bp, Homo sapiens
cttttgaagaaacacattctactcagtaccttcccccatggattggcacaa

SEQ ID NO: 7249 - DNA, 33 bp, Homo sapiens
aagtgcccagagaagatgtactcaacagggaga

SEQ ID NO: 7250 - DNA, 33 bp, Homo sapiens
gtgacatcaactcgtatatatagtttcactgtc

SEQ ID NO: 7251 - DNA, 33 bp, Homo sapiens
gaggtgagtgggaaggtagcctaaagaggtgac

SEQ ID NO: 7252 - DNA, 33 bp, Homo sapiens
cgtgaaactttcctgctaaggtgtgtctgattt

SEQ ID NO: 7253 - DNA, 33 bp, Homo sapiens
atgaatgttcttcagtgaaatagaataggagtt

SEQ ID NO: 7254 - DNA, 33 bp, Homo sapiens
gcttgaaatgaactgaggcagataaaattcatg

SEQ ID NO: 7255 - DNA, 33 bp, Homo sapiens
tgcttttcttaattcatcaatgagcagtccgaa

SEQ ID NO: 7256 - DNA, 51 bp, Homo sapiens
cacccagaataaaatctggcatttctcccattattcccattccaccactct

SEQ ID NO: 7257 - DNA, 33 bp, Homo sapiens
acttggcaagcacttctcacttaagctaatgca

SEQ ID NO: 7258 - DNA, 33 bp, Homo sapiens
caaataggctatgatatgtcatgctttaattgt

SEQ ID NO: 7259 - DNA, 33 bp, Homo sapiens
tgttaccttcaatctcgctcaagatctgacttt

SEQ ID NO: 7260 - DNA, 33 bp, Homo sapiens
ttaaatcagaggtggaggagtttgtataaaaaa

SEQ ID NO: 7261 - DNA, 51 bp, Homo sapiens
ttctaaatgtttatggttgaattcctggaaatatgtagaaattacaagtat

SEQ ID NO: 7262 - DNA, 51 bp, Homo sapiens
atgctgcattctcttttatcattcatctaaagacccactcattttattaaa

SEQ ID NO: 7263 - DNA, 33 bp, Homo sapiens
tttctatcttgccatctaatctttgtccacatg

SEQ ID NO: 7264 - DNA, 33 bp, Homo sapiens
taggtagaacaaatcacctaagtatgtttaaag

SEQ ID NO: 7265 - DNA, 51 bp, Homo sapiens
ggagtggggagaatgagagggtcaaggatcttggaatgttatatgaaagga

SEQ ID NO: 7266 - DNA, 33 bp, Homo sapiens
tcatcaacttctaacacaacctggcttaaaagg

SEQ ID NO: 7267 - DNA, 33 bp, Homo sapiens
tataagacatcgaagggaagtgctgacagggta

SEQ ID NO: 7268 - DNA, 51 bp, Homo sapiens
ccacacaaagaaacttgagtttgtcgttattgtggtgactggtcacttagg

SEQ ID NO: 7269 - DNA, 51 bp, Homo sapiens
gatttaaataaaagacagtgactgattaactaaaataaatggaaccaggtt

SEQ ID NO: 7270 - DNA, 33 bp, Homo sapiens
ggagttacaaatgctggaactcttctttaccct

SEQ ID NO: 7271 - DNA, 33 bp, Homo sapiens
tatgttctcatttttctagtaactttttatgct

SEQ ID NO: 7272 - DNA, 33 bp, Homo sapiens
tgatctcatacgtgaagtcttaaaaaaccagtc

SEQ ID NO: 7273 - DNA, 33 bp, Homo sapiens
aacaattactgcttgatacgacaaagtaatgtg

SEQ ID NO: 7274 - DNA, 33 bp, Homo sapiens
aattgcatgccattccgagtagtgtaatgaaat

SEQ ID NO: 7275 - DNA, 33 bp, Homo sapiens
gatctaacgtcaattcgaagttctctattgaag

SEQ ID NO: 7276 - DNA, 33 bp, Homo sapiens
tgaaagagactggtaatatgaaattgcagaaga

SEQ ID NO: 7277 - DNA, 33 bp, Homo sapiens
tgaggtactatgctcagtatactaagatcagtc

SEQ ID NO: 7278 - DNA, 33 bp, Homo sapiens
attgtctttaattttatcatgctcctcaaaagc

SEQ ID NO: 7279 - DNA, 33 bp, Homo sapiens
aaacttccacactgtcgactttcagctttcatt

SEQ ID NO: 7280 - DNA, 33 bp, Homo sapiens
gaatttccaatatgtctctgttgtttcactttt

SEQ ID NO: 7281 - DNA, 33 bp, Homo sapiens
tggcctggtcttcaaatcagctaagttctcatc

SEQ ID NO: 7282 - DNA, 51 bp, Homo sapiens
tggcaaatgaataatcagctatccatattggctcaaggacgatcaagggga

SEQ ID NO: 7283 - DNA, 33 bp, Homo sapiens
ttttcatgacactgaattgttgatgtgtctggg

SEQ ID NO: 7284 - DNA, 33 bp, Homo sapiens
tcttctccttgaggtctgaaactatctcaaaca

SEQ ID NO: 7285 - DNA, 33 bp, Homo sapiens
tctctcacctttataagtcgtctcattttccac

SEQ ID NO: 7286 - DNA, 33 bp, Homo sapiens
ttccaagtctgtactcgatcgccctgccctcat

SEQ ID NO: 7287 - DNA, 33 bp, Homo sapiens
atgtcttcctggcataccttctgaatttaactt

SEQ ID NO: 7288 - DNA, 33 bp, Homo sapiens
ggggctcagttacttatgagttgcatagatcca

SEQ ID NO: 7289 - DNA, 33 bp, Homo sapiens
ttcaggattctttccatgtcctttggtgtagat

SEQ ID NO: 7290 - DNA, 33 bp, Homo sapiens
agaaggatctgcaaacgagacaggacagcggtg

SEQ ID NO: 7291 - DNA, 33 bp, Homo sapiens
atgggtccaaaaccaagtcacaccatcagagtg

SEQ ID NO: 7292 - DNA, 33 bp, Homo sapiens
ttcatgattgagccaatgggtgtcaagtaggag

SEQ ID NO: 7293 - DNA, 33 bp, Homo sapiens
ttaaggtgaatgggcattgattttatgaacagc

SEQ ID NO: 7294 - DNA, 51 bp, Homo sapiens
ctaggaaggaacatttaagacgacacaaaatctgacgtaaaggttactcca

SEQ ID NO: 7295 - DNA, 33 bp, Homo sapiens
gcacatagtaggtgagtaataacaaaggcttgg

SEQ ID NO: 7296 - DNA, 33 bp, Homo sapiens
ctaagactcaaacgaccaactttctagtgaatt

SEQ ID NO: 7297 - DNA, 33 bp, Homo sapiens
tgcttgctcttttgacgccagtggaagtttaaa

SEQ ID NO: 7298 - DNA, 33 bp, Homo sapiens
gtttactggtctgtaatagatcctgcattagct

SEQ ID NO: 7299 - DNA, 33 bp, Homo sapiens
actcctacctgtggcagtcatgaatctgttttc

SEQ ID NO: 7300 - DNA, 33 bp, Homo sapiens
gtagctgaaagagacccgggtaaccatcagggc

SEQ ID NO: 7301 - DNA, 33 bp, Homo sapiens
tgccttttgccagaaagcttcagactcgcagac

SEQ ID NO: 7302 - DNA, 33 bp, Homo sapiens
tttgatatctccttgatgtagctgaatgtcaaa

SEQ ID NO: 7303 - DNA, 33 bp, Homo sapiens
ttgactcattgactaatgcaagctttttttttt

SEQ ID NO: 7304 - DNA, 33 bp, Homo sapiens
gttcccctgctactactgctgtccaagtcacat

SEQ ID NO: 7305 - DNA, 33 bp, Homo sapiens
ttttcaggaactttgggaaaactacaggctaca

SEQ ID NO: 7306 - DNA, 33 bp, Homo sapiens
aaccaatgtaatgatatggtatgggatgatatc

SEQ ID NO: 7307 - DNA, 33 bp, Homo sapiens
atgaatttaacctggagcaatgcagaatcaatt

SEQ ID NO: 7308 - DNA, 51 bp, Homo sapiens
agatctgccaaagttttcacatctatgtcatgactgttctagaacaagtag

SEQ ID NO: 7309 - DNA, 33 bp, Homo sapiens
ctcttaagtttggacatgtatttgagtataagc

SEQ ID NO: 7310 - DNA, 33 bp, Homo sapiens
gaaaatgacatcagtagcttgctagcattcttg

SEQ ID NO: 7311 - DNA, 33 bp, Homo sapiens
tccaaagacgaactgagggtgtgtgtgaacaca

SEQ ID NO: 7312 - DNA, 33 bp, Homo sapiens
aggtttttcatgaacgtaaaaaaggcatgtatt

SEQ ID NO: 7313 - DNA, 33 bp, Homo sapiens
tggtatgcacgtggacgcacaatagtatcataa

SEQ ID NO: 7314 - DNA, 51 bp, Homo sapiens
gtctattaatcaaccttaaatgtcaccaatttaaattcctcaattaaaaga

SEQ ID NO: 7315 - DNA, 33 bp, Homo sapiens
aataaatgcgcaagtatgaggttaaatgcttga

SEQ ID NO: 7316 - DNA, 33 bp, Homo sapiens
agatgccttgatataagagtaatctgaggctga

SEQ ID NO: 7317 - DNA, 33 bp, Homo sapiens
ttttccatttttttcagagaacacatcaatttc

SEQ ID NO: 7318 - DNA, 33 bp, Homo sapiens
aacttgtatcttccaattgtatgtttgtaccct

SEQ ID NO: 7319 - DNA, 33 bp, Homo sapiens
agttctgaataccaggtaggacaccattaagat

SEQ ID NO: 7320 - DNA, 33 bp, Homo sapiens
ggcccatcaataacaccaatagcaccatgtgag

SEQ ID NO: 7321 - DNA, 33 bp, Homo sapiens
gatttttgcatactcagtgaaacatacatattt

SEQ ID NO: 7322 - DNA, 33 bp, Homo sapiens
atgctgtgactactcatacttatttactgttta

SEQ ID NO: 7323 - DNA, 33 bp, Homo sapiens
agtctaaatgcgcagaggcatcaagtgtagaca

SEQ ID NO: 7324 - DNA, 33 bp, Homo sapiens
gctggagtcacttagagagaaaaggaaagcaat

SEQ ID NO: 7325 - DNA, 33 bp, Homo sapiens
tattaattttttcaggtcattgtttcattgatc

SEQ ID NO: 7326 - DNA, 33 bp, Homo sapiens
aacatggtcgccaaaattcagagccttatgttt

SEQ ID NO: 7327 - DNA, 33 bp, Homo sapiens
aaataaaagtggaaaagatcatgtcggagtgta

SEQ ID NO: 7328 - DNA, 33 bp, Homo sapiens
aagagtcaaagtaatctcatttccattggccag

SEQ ID NO: 7329 - DNA, 33 bp, Homo sapiens
taattcaatcatcttctaccatgtctgtcccac

SEQ ID NO: 7330 - DNA, 33 bp, Homo sapiens
ttctggcctgtagagactatgatcaatacagtt

SEQ ID NO: 7331 - DNA, 33 bp, Homo sapiens
ggggaacccggttaccgcagaaagcagttgaga

SEQ ID NO: 7332 - DNA, 33 bp, Homo sapiens
tggaagcagcttgggatccacgtaacaggcaga

SEQ ID NO: 7333 - DNA, 33 bp, Homo sapiens
gtgtgggatctttaatgactgcgacacctctgt

SEQ ID NO: 7334 - DNA, 33 bp, Homo sapiens
tgaagtgttatatcaccgattgagaccagtaaa

SEQ ID NO: 7335 - DNA, 33 bp, Homo sapiens
cctgggaaagtattgatggctttcatgaggaag

SEQ ID NO: 7336 - DNA, 33 bp, Homo sapiens
atccagtacatgatccgccgtgacaatgagtag

SEQ ID NO: 7337 - DNA, 33 bp, Homo sapiens
tagggttcgtagaatatgagtgttttagagtga

SEQ ID NO: 7338 - DNA, 33 bp, Homo sapiens
cacacataaattccacggtagtattccatgatg

SEQ ID NO: 7339 - DNA, 33 bp, Homo sapiens
gactgcctgtatcccctgaagtgattaaactat

SEQ ID NO: 7340 - DNA, 33 bp, Homo sapiens
tatgacttctttttcatctatctgttaggtatt

SEQ ID NO: 7341 - DNA, 33 bp, Homo sapiens
atctattcattcatcagtctaacctccctactt

SEQ ID NO: 7342 - DNA, 33 bp, Homo sapiens
caaagaaatcacataagagcacattatctcata

SEQ ID NO: 7343 - DNA, 33 bp, Homo sapiens
ctcccactcagggcaatcctagcagacttgagg

SEQ ID NO: 7344 - DNA, 33 bp, Homo sapiens
aatctgatgagcttcaggcaaatataaagcagg

SEQ ID NO: 7345 - DNA, 33 bp, Homo sapiens
agaaggtagagtaagagtaaatatacatagcac

SEQ ID NO: 7346 - DNA, 33 bp, Homo sapiens
caccttacctttaccatacaaaggagattaaca

SEQ ID NO: 7347 - DNA, 33 bp, Homo sapiens
cactgccgcaagagcattaagcaaagttcacat

SEQ ID NO: 7348 - DNA, 33 bp, Homo sapiens
tgtgattagaagataattgagaacatggataaa

SEQ ID NO: 7349 - DNA, 33 bp, Homo sapiens
gctgcattctttgctatggtacataggtgccta

SEQ ID NO: 7350 - DNA, 33 bp, Homo sapiens
gtactttcactcgtcatctcctttggctgggtg

SEQ ID NO: 7351 - DNA, 33 bp, Homo sapiens
ctgtttctataggtgggacccgatttatctctc

SEQ ID NO: 7352 - DNA, 33 bp, Homo sapiens
aatacacagaaatacattgagtacaacattacc

SEQ ID NO: 7353 - DNA, 33 bp, Homo sapiens
caggtggtaaacaagcgaaatgtactacagtgt

SEQ ID NO: 7354 - DNA, 33 bp, Homo sapiens
gcttatgtttcctgtatgcttttggtaaataac

SEQ ID NO: 7355 - DNA, 33 bp, Homo sapiens
agtataagtaggtgccgaaaggtaggtaattgg

SEQ ID NO: 7356 - DNA, 33 bp, Homo sapiens
tctattaatgccaggagaatcacacttcaaaat

SEQ ID NO: 7357 - DNA, 33 bp, Homo sapiens
ttatcatctccataaatattatcttccagacca

SEQ ID NO: 7358 - DNA, 33 bp, Homo sapiens
tgcttgccttttccccgcaacgaggagtttctc

SEQ ID NO: 7359 - DNA, 33 bp, Homo sapiens
atgagtaagtctacaggaataatgtcataatga

SEQ ID NO: 7360 - DNA, 33 bp, Homo sapiens
ccactcaagaatgctggacaatcgttaacacta

SEQ ID NO: 7361 - DNA, 33 bp, Homo sapiens
gtgtgtcacaagacactcttttctttcctttgt

SEQ ID NO: 7362 - DNA, 33 bp, Homo sapiens
agggagtttagttttatacactgttttgttccc

SEQ ID NO: 7363 - DNA, 33 bp, Homo sapiens
tttagtttgacaaagacgtggaatcaaaaataa

SEQ ID NO: 7364 - DNA, 33 bp, Homo sapiens
cattaaacactaacttgaagaggattatacatt

SEQ ID NO: 7365 - DNA, 33 bp, Homo sapiens
atggaaaatccgatactctgttgatccgacaag

SEQ ID NO: 7366 - DNA, 33 bp, Homo sapiens
actgtctctgtagaacgaactgggaagaactgg

SEQ ID NO: 7367 - DNA, 33 bp, Homo sapiens
tgagtgcattgctctatctaaagtactttccca

SEQ ID NO: 7368 - DNA, 33 bp, Homo sapiens
tactatgcccattcactgaaacagctggaaaaa

SEQ ID NO: 7369 - DNA, 33 bp, Homo sapiens
atgcccacaggaaaaccacatgacattctgaag

SEQ ID NO: 7370 - DNA, 51 bp, Homo sapiens
tttcttcatctgtaatataggaataggactaaatgtgtgaattcttgtgaa

SEQ ID NO: 7371 - DNA, 33 bp, Homo sapiens
tatttttaaatcactgtacaactcataatttta

SEQ ID NO: 7372 - DNA, 33 bp, Homo sapiens
agaattacatggcaaatcaattgtaaaactgtt

SEQ ID NO: 7373 - DNA, 33 bp, Homo sapiens
atttatatgccatgccgactacttctggacaac

SEQ ID NO: 7374 - DNA, 33 bp, Homo sapiens
atggtgacaaaaatcagcccgctaaagggctag

SEQ ID NO: 7375 - DNA, 33 bp, Homo sapiens
aacttgtcaacacctctatcttgaacttttggc

SEQ ID NO: 7376 - DNA, 33 bp, Homo sapiens
atagactgcttgggaagagatacacataatggg

SEQ ID NO: 7377 - DNA, 33 bp, Homo sapiens
gatagcccttacaagctgatactggagaatgaa

SEQ ID NO: 7378 - DNA, 33 bp, Homo sapiens
gaggtccaagaacaaagtataattgaccctttg

SEQ ID NO: 7379 - DNA, 33 bp, Homo sapiens
accctggactacattctcctataaggctcacca

SEQ ID NO: 7380 - DNA, 33 bp, Homo sapiens
gtctccatctgtgctaccgggtcattctgttcc

SEQ ID NO: 7381 - DNA, 51 bp, Homo sapiens
accaaaaaaaaaaatagaacaacaagtaatttatgaacaaacaacatactc

SEQ ID NO: 7382 - DNA, 33 bp, Homo sapiens
tgcccactgatgacacggtcttgccagtcacca

SEQ ID NO: 7383 - DNA, 33 bp, Homo sapiens
atagaattggattcaagcttaattcacatgatc

SEQ ID NO: 7384 - DNA, 33 bp, Homo sapiens
gcagctccactcctatgagtctgcaggatacag

SEQ ID NO: 7385 - DNA, 33 bp, Homo sapiens
tggacctactacagaagagattgctgagtaagg

SEQ ID NO: 7386 - DNA, 33 bp, Homo sapiens
tgatttttctgagtgtgaatttttttaagtaat

SEQ ID NO: 7387 - DNA, 33 bp, Homo sapiens
ccttctgccatttgaagatatagcaagaaagta

SEQ ID NO: 7388 - DNA, 51 bp, Homo sapiens
tcctggaatattggttcattgtagatgggcttacctagagggaagtatata

SEQ ID NO: 7389 - DNA, 33 bp, Homo sapiens
ggctattcatgaggacgattgttgtggaagata

SEQ ID NO: 7390 - DNA, 33 bp, Homo sapiens
gtgtcaaaagccatcatgtactttgaatatctt

SEQ ID NO: 7391 - DNA, 33 bp, Homo sapiens
acccctattggcttcagcttggaacttttcttc

SEQ ID NO: 7392 - DNA, 33 bp, Homo sapiens
ttcatgcaaaacataaggcaatgcagcatcttc

SEQ ID NO: 7393 - DNA, 51 bp, Homo sapiens
agctcccagtccataactctaaatatcacatgggcacctattactccatat

SEQ ID NO: 7394 - DNA, 33 bp, Homo sapiens
agactcattccaagactgtcctgaaaatactga

SEQ ID NO: 7395 - DNA, 33 bp, Homo sapiens
aatctggcctggaccaggaaatctcacaaccct

SEQ ID NO: 7396 - DNA, 33 bp, Homo sapiens
caagataaataccaaagtatactgcaacatcca

SEQ ID NO: 7397 - DNA, 33 bp, Homo sapiens
cttggctccagggtaatgtgttggccttccaac

SEQ ID NO: 7398 - DNA, 33 bp, Homo sapiens
gcctggaaagtacacatggtccttctgtaacac

SEQ ID NO: 7399 - DNA, 51 bp, Homo sapiens
aatcatggacattccaaattgagactcacaagggtttatgactacattgtc

SEQ ID NO: 7400 - DNA, 33 bp, Homo sapiens
cttgctctggcaatccgacataaggcattgagt

SEQ ID NO: 7401 - DNA, 33 bp, Homo sapiens
gcaatcctgagtatccgctgtctttctcagcca

SEQ ID NO: 7402 - DNA, 33 bp, Homo sapiens
cccaccagaatccaaattttcaataaaggtctc

SEQ ID NO: 7403 - DNA, 33 bp, Homo sapiens
tgcatcgcccagggtcgccaagtgcaaggccag

SEQ ID NO: 7404 - DNA, 33 bp, Homo sapiens
gtcatttttccatggatgtctcaatgaaaaaaa

SEQ ID NO: 7405 - DNA, 33 bp, Homo sapiens
aattatgtaaaattcttaaaaacagctataaat

SEQ ID NO: 7406 - DNA, 33 bp, Homo sapiens
tagtacattgtaccaatcaggttattttaagga

SEQ ID NO: 7407 - DNA, 33 bp, Homo sapiens
aaaaaaataaaaatcagaagtcaagtggtactt

SEQ ID NO: 7408 - DNA, 33 bp, Homo sapiens
aatgttaaaagtactatgatctgataattgcct

SEQ ID NO: 7409 - DNA, 33 bp, Homo sapiens
atggtttcaaatatgatgcttccaactcaacag

SEQ ID NO: 7410 - DNA, 33 bp, Homo sapiens
ttttgtagggttttcatggaaagtctgaggcat

SEQ ID NO: 7411 - DNA, 33 bp, Homo sapiens
ttcatcagaacccttatgctaacctgaccacac

SEQ ID NO: 7412 - DNA, 33 bp, Homo sapiens
atatgagttcaaaggcgaaagggattatttgcg

SEQ ID NO: 7413 - DNA, 33 bp, Homo sapiens
tgggcttggatttggcggaaatctgagagtttc

SEQ ID NO: 7414 - DNA, 33 bp, Homo sapiens
ggaaagttcaacgatatgtatacaaccaacagg

SEQ ID NO: 7415 - DNA, 33 bp, Homo sapiens
tgccactcctatgaaattgtagatcacttctac

SEQ ID NO: 7416 - DNA, 33 bp, Homo sapiens
tttccctgtgattatctaaggaagtgaattctc

SEQ ID NO: 7417 - DNA, 51 bp, Homo sapiens
cattctcttccctcctttgatgtagcaattatggagtttttaaaattggca

SEQ ID NO: 7418 - DNA, 33 bp, Homo sapiens
caggaatcctctattctacgcatttgaaagcta

SEQ ID NO: 7419 - DNA, 33 bp, Homo sapiens
ataataccaaaaatgcggaaaagcaagaaagat

SEQ ID NO: 7420 - DNA, 33 bp, Homo sapiens
ataaatgacaccaaacgattgggggcaaggagc

SEQ ID NO: 7421 - DNA, 33 bp, Homo sapiens
cataggaggctcttaatagatattcaatgggtg

SEQ ID NO: 7422 - DNA, 33 bp, Homo sapiens
tggatgccgaagctggcagggaagaaccaagca

SEQ ID NO: 7423 - DNA, 33 bp, Homo sapiens
gtctactttgaataaattggtcactgagacctc

SEQ ID NO: 7424 - DNA, 33 bp, Homo sapiens
gtaggaagtgcgaggatatatagcagaagagtg

SEQ ID NO: 7425 - DNA, 33 bp, Homo sapiens
cactgttgtcactttatggagatggaagtatag

SEQ ID NO: 7426 - DNA, 33 bp, Homo sapiens
cctagcacccgacaaagactcaaaatgtgatag

SEQ ID NO: 7427 - DNA, 33 bp, Homo sapiens
tattttaaaacatatatagtagtcctctcttat

SEQ ID NO: 7428 - DNA, 33 bp, Homo sapiens
tgagttatttgcaacattagtactacgcaagtg

SEQ ID NO: 7429 - DNA, 33 bp, Homo sapiens
ataatgctttaagaacggtcctgctcgtgcatg

SEQ ID NO: 7430 - DNA, 33 bp, Homo sapiens
gctgtttgtgtgcatagctttcaaaaacaatgt

SEQ ID NO: 7431 - DNA, 33 bp, Homo sapiens
gtcaaaatataattcatggcaaagcaataaaat

SEQ ID NO: 7432 - DNA, 33 bp, Homo sapiens
tattaggaggcattacgaaaataagaaagtggt

SEQ ID NO: 7433 - DNA, 33 bp, Homo sapiens
ccctccttgtatcagtgaaaatcctatccactc

SEQ ID NO: 7434 - DNA, 51 bp, Homo sapiens
acaattgtttgatgcttaatcttgatattaaaacctaaaacactactttca

SEQ ID NO: 7435 - DNA, 33 bp, Homo sapiens
caatactgttccatgattatttcagcagaactg

SEQ ID NO: 7436 - DNA, 33 bp, Homo sapiens
atcatagaagatgttagcgcaccattctcatat

SEQ ID NO: 7437 - DNA, 33 bp, Homo sapiens
cttcttaagcagaaaaggctcttaggagagaaa

SEQ ID NO: 7438 - DNA, 33 bp, Homo sapiens
taacttggcaaaagaagatgttagggtccttca

SEQ ID NO: 7439 - DNA, 33 bp, Homo sapiens
ttggggcaatgctccatagagtcaagggcatgt

SEQ ID NO: 7440 - DNA, 33 bp, Homo sapiens
tcaagctagcacatcagtactaaaaagaaaagc

SEQ ID NO: 7441 - DNA, 33 bp, Homo sapiens
tatgtattgccggcaagtaaagtatgtccagac

SEQ ID NO: 7442 - DNA, 33 bp, Homo sapiens
ataacctaatacttcctgatcaataacacgtcc

SEQ ID NO: 7443 - DNA, 51 bp, Homo sapiens
cttgccaaaacctgcagtgctcaaatgagtatccccttaacatttcataac

SEQ ID NO: 7444 - DNA, 33 bp, Homo sapiens
gaataggcaggacaaagagaatttccttcttca

SEQ ID NO: 7445 - DNA, 33 bp, Homo sapiens
catgctgccttacagacccactccactattcag

SEQ ID NO: 7446 - DNA, 33 bp, Homo sapiens
tactgaattcctactatgtgaagtgcactgtcc

SEQ ID NO: 7447 - DNA, 33 bp, Homo sapiens
gaagtcttataacacaggtgcagcttcataaag

SEQ ID NO: 7448 - DNA, 33 bp, Homo sapiens
catgtgatccttccaatagtgtaacaaggaagg

SEQ ID NO: 7449 - DNA, 33 bp, Homo sapiens
gattcacaggtatctcgctaaattgaaacagga

SEQ ID NO: 7450 - DNA, 33 bp, Homo sapiens
gtatattgtggtcagagtatagaagtaccacat

SEQ ID NO: 7451 - DNA, 33 bp, Homo sapiens
gaagttttgagcgggggatgctgtgatttgatc

SEQ ID NO: 7452 - DNA, 33 bp, Homo sapiens
aagtgtttgctgagttgaaaataaaagcgcttt

SEQ ID NO: 7453 - DNA, 33 bp, Homo sapiens
gctgaatgttctctcccacacgattacccccag

SEQ ID NO: 7454 - DNA, 33 bp, Homo sapiens
cttgcccgtaagtgagtcaatcctgcagatttg

SEQ ID NO: 7455 - DNA, 33 bp, Homo sapiens
actcagtattccagatgaaggtagccatagtgg

SEQ ID NO: 7456 - DNA, 33 bp, Homo sapiens
agcgtggctcttctcatgcattttagtcttcac

SEQ ID NO: 7457 - DNA, 51 bp, Homo sapiens
taagccacagcaggggctctgtgaatcgagaaggaaaatatattgcatctg

SEQ ID NO: 7458 - DNA, 51 bp, Homo sapiens
gggaaaacatttagtcccattgtaaggattggaaagaaaaggaaaagagat

SEQ ID NO: 7459 - DNA, 33 bp, Homo sapiens
agatgtttaactacatgaggtttcaaggaaata

SEQ ID NO: 7460 - DNA, 33 bp, Homo sapiens
aggcaataaaggctcccatacttctcccttccc

SEQ ID NO: 7461 - DNA, 33 bp, Homo sapiens
atatatcttcttgcacgggtacacataactctt

SEQ ID NO: 7462 - DNA, 33 bp, Homo sapiens
ctccacaaatgttggctgcatgaagtgtaagag

SEQ ID NO: 7463 - DNA, 51 bp, Homo sapiens
gttttgctccctgttagatagtaaaccatataagggaacaaatctttattt

SEQ ID NO: 7464 - DNA, 51 bp, Homo sapiens
aagttaaatttacctaatgtttattgtataccagatgtgatgctaagacat

SEQ ID NO: 7465 - DNA, 51 bp, Homo sapiens
atttgcctttttattctacttggaagctctgctgataaagctgtttaaggg

SEQ ID NO: 7466 - DNA, 33 bp, Homo sapiens
gtggaaagctaacacatactgatgatactgttt

SEQ ID NO: 7467 - DNA, 33 bp, Homo sapiens
cattgggactgactaggcagttggtgcaaccca

SEQ ID NO: 7468 - DNA, 33 bp, Homo sapiens
tctttgaggacactcaggattaatcacattcct

SEQ ID NO: 7469 - DNA, 33 bp, Homo sapiens
gtacacccaggggaggtatgctctaagttccaa

SEQ ID NO: 7470 - DNA, 51 bp, Homo sapiens
acttggcccaggtttgaataaagcctccttgaccagtaaaaattattgcta

SEQ ID NO: 7471 - DNA, 33 bp, Homo sapiens
tcttttgccatcttacgatagtactaataactt

SEQ ID NO: 7472 - DNA, 33 bp, Homo sapiens
gaattttggaaatcaggacacaaaatagaggat

SEQ ID NO: 7473 - DNA, 33 bp, Homo sapiens
tgacaaatgggaaatctagaaattggaagttag

SEQ ID NO: 7474 - DNA, 51 bp, Homo sapiens
cacttacatactattacaataatgatgctgaagtattttttaggaaaacaa

SEQ ID NO: 7475 - DNA, 33 bp, Homo sapiens
atcatagtcatttcactctccagcacacactta

SEQ ID NO: 7476 - DNA, 33 bp, Homo sapiens
tatttataacttcccctgctactcctatagata

SEQ ID NO: 7477 - DNA, 33 bp, Homo sapiens
taaataataatctcaatgtgaatgatacctgga

SEQ ID NO: 7478 - DNA, 33 bp, Homo sapiens
tgatgtggcccattccgagaaagcttattatat

SEQ ID NO: 7479 - DNA, 33 bp, Homo sapiens
tggattctttcagtctgacctacccttgttaat

SEQ ID NO: 7480 - DNA, 33 bp, Homo sapiens
ttgcatatacaaattatgtgtaagaggagaaat

SEQ ID NO: 7481 - DNA, 33 bp, Homo sapiens
gctcagggtgatgtgagagcacagcaggaaggt

SEQ ID NO: 7482 - DNA, 33 bp, Homo sapiens
ggttttcgtatggtactaatgatcaaaatacct

SEQ ID NO: 7483 - DNA, 33 bp, Homo sapiens
aatgctcacattctggtcatgtcatatggaaaa

SEQ ID NO: 7484 - DNA, 51 bp, Homo sapiens
cttattataaaatgttcactggagagaatacagaaagttatgaagaaataa

SEQ ID NO: 7485 - DNA, 33 bp, Homo sapiens
ttcctctgaaatcccagattcaaccatcctata

SEQ ID NO: 7486 - DNA, 33 bp, Homo sapiens
gtaggagatttaatgtgaaaacagcaaacgcat

SEQ ID NO: 7487 - DNA, 33 bp, Homo sapiens
tgaggggatggcagtctcattatgctcttgtaa

SEQ ID NO: 7488 - DNA, 33 bp, Homo sapiens
attactgatcatttcagatagtgggaaactttg

SEQ ID NO: 7489 - DNA, 33 bp, Homo sapiens
agttgttagactaaagtatagcagattgcttgg

SEQ ID NO: 7490 - DNA, 33 bp, Homo sapiens
gtacttttaaagtcaataggagattattcgaat

SEQ ID NO: 7491 - DNA, 33 bp, Homo sapiens
aaagtactactcaaggcaagtttgagcattttt

SEQ ID NO: 7492 - DNA, 33 bp, Homo sapiens
atatcacaaaattcaatgagtgaatgtagaaag

SEQ ID NO: 7493 - DNA, 33 bp, Homo sapiens
taatagaaaaagaacagcattcaaagcttttca

SEQ ID NO: 7494 - DNA, 33 bp, Homo sapiens
acacattaatcattgagtatcaaacttaaatgt

SEQ ID NO: 7495 - DNA, 51 bp, Homo sapiens
gccacatctgtaactctcaaattctgaaaactaacatgtctcttttaacca

SEQ ID NO: 7496 - DNA, 51 bp, Homo sapiens
agagaagggggaaaatattaatttagattcgaaaaaaataaagatgaacta

SEQ ID NO: 7497 - DNA, 33 bp, Homo sapiens
agacttgtaattacccgatgtgcttacatgaaa

SEQ ID NO: 7498 - DNA, 51 bp, Homo sapiens
cttgaaagattagataagttctacatgaaatgcaagggtccagcacttagt

SEQ ID NO: 7499 - DNA, 33 bp, Homo sapiens
gaatgctgtgattattgaaagaggcaatacctg

SEQ ID NO: 7500 - DNA, 33 bp, Homo sapiens
ccggaagcactatttatatacactatgccacca

SEQ ID NO: 7501 - DNA, 33 bp, Homo sapiens
tcgagggcatcaggcctattttgtccttttatt

SEQ ID NO: 7502 - DNA, 51 bp, Homo sapiens
aattctaaggctcaaaataactggtgaaactgaggttaaaattttcaaaac

SEQ ID NO: 7503 - DNA, 33 bp, Homo sapiens
tcatttagctttagaggaaatgaactttaaggc

SEQ ID NO: 7504 - DNA, 33 bp, Homo sapiens
atcaaagaaagtctcatgacaaagtggtatttc

SEQ ID NO: 7505 - DNA, 33 bp, Homo sapiens
aaatctgtgtgtccaagctgaattcatttaacc

SEQ ID NO: 7506 - DNA, 33 bp, Homo sapiens
tctccttcaggaaaaattgtttgcctaaaagta

SEQ ID NO: 7507 - DNA, 33 bp, Homo sapiens
tactaggtgatatacagatattccaaagactga

SEQ ID NO: 7508 - DNA, 33 bp, Homo sapiens
gccatgtgggtaagaagagaaattgagaaaata

SEQ ID NO: 7509 - DNA, 33 bp, Homo sapiens
ttctatgtgtccttgattaatagactttctcat

SEQ ID NO: 7510 - DNA, 33 bp, Homo sapiens
tagctatgtatttatgtagagaaaagcatggtg

SEQ ID NO: 7511 - DNA, 33 bp, Homo sapiens
cacttataccatgctatgaccaggaagttttaa

SEQ ID NO: 7512 - DNA, 33 bp, Homo sapiens
tctttaaattgtaatatgcaggctgggcataat

SEQ ID NO: 7513 - DNA, 33 bp, Homo sapiens
agaggaccaccagtaagtaattttggttctggt

SEQ ID NO: 7514 - DNA, 33 bp, Homo sapiens
tcaccactcgttccacggagaatttaaggaaaa

SEQ ID NO: 7515 - DNA, 33 bp, Homo sapiens
tttcaccatgaaaaaacttagtgacatattcag

SEQ ID NO: 7516 - DNA, 33 bp, Homo sapiens
tgatgctaacagcgtacgtttcttagaaaaccc

SEQ ID NO: 7517 - DNA, 33 bp, Homo sapiens
gagagaaagccctgaatgtatggtacaataagc

SEQ ID NO: 7518 - DNA, 33 bp, Homo sapiens
aaaaagctaaccaagatggtgttctgcttgatg

SEQ ID NO: 7519 - DNA, 33 bp, Homo sapiens
acatcttgtattctcagtcgaacttctgctaaa

SEQ ID NO: 7520 - DNA, 33 bp, Homo sapiens
ccaaaaccacttcgaagttagacacacttaaaa

SEQ ID NO: 7521 - DNA, 33 bp, Homo sapiens
tttatgccatctgccacagagtattacacacca

SEQ ID NO: 7522 - DNA, 33 bp, Homo sapiens
ctaagggacacagctggatgacataatgtggac

SEQ ID NO: 7523 - DNA, 33 bp, Homo sapiens
gtagaattgacaggaagtgactaagggacacag

SEQ ID NO: 7524 - DNA, 51 bp, Homo sapiens
gcctgtagcagccctaaattaggtagagacccagcttttgtttgcttttta

SEQ ID NO: 7525 - DNA, 33 bp, Homo sapiens
ttcaggtttattgatattaagttgcacagagtg

SEQ ID NO: 7526 - DNA, 51 bp, Homo sapiens
agctatcattataaccacatacagagtctacactagaaaccatttccttcc

SEQ ID NO: 7527 - DNA, 33 bp, Homo sapiens
cccaccatctggagaatctatgcaattcccctt

SEQ ID NO: 7528 - DNA, 33 bp, Homo sapiens
agccatagtgaccagacagttgaactctctatg

SEQ ID NO: 7529 - DNA, 33 bp, Homo sapiens
attgtaggaacaaatatctatgtgagttgaaga

SEQ ID NO: 7530 - DNA, 33 bp, Homo sapiens
accttcctgatccccagtagacatcaaaatcat

SEQ ID NO: 7531 - DNA, 33 bp, Homo sapiens
gcatactgtaaacaccgataagaattgcatttt

SEQ ID NO: 7532 - DNA, 51 bp, Homo sapiens
ttctttctttctttatggacagaacggtataaacataggcaggcttatttt

SEQ ID NO: 7533 - DNA, 33 bp, Homo sapiens
cctgtctttgagctagtctagaaaacagacgga

SEQ ID NO: 7534 - DNA, 33 bp, Homo sapiens
caaggtacatgggaacgctaaagtgccgcgtgg

SEQ ID NO: 7535 - DNA, 33 bp, Homo sapiens
tactcagaaaggattcgacccacgcggcacttt

SEQ ID NO: 7536 - DNA, 51 bp, Homo sapiens
gagggaaagccatttgtaaacagtatgttgcttttcaaatataaaatgtta

SEQ ID NO: 7537 - DNA, 33 bp, Homo sapiens
cccgtgtgtttggggagtacaagtgactactgc

SEQ ID NO: 7538 - DNA, 33 bp, Homo sapiens
ctcaggcctctctcccgggctttggatttattc

SEQ ID NO: 7539 - DNA, 33 bp, Homo sapiens
gggagagaggcctgagtccttgcaaagccagta

SEQ ID NO: 7540 - DNA, 33 bp, Homo sapiens
ttcttcaactggacaaggatgtattgagtacct

SEQ ID NO: 7541 - DNA, 33 bp, Homo sapiens
tcctttggagtagaaagttactaaatgaaactg

SEQ ID NO: 7542 - DNA, 33 bp, Homo sapiens
tgattcattcctttgcgctcatcatactgttat

SEQ ID NO: 7543 - DNA, 33 bp, Homo sapiens
gttttgtagtagtttcgactttaaaaagtacac

SEQ ID NO: 7544 - DNA, 33 bp, Homo sapiens
atctgacaaaatagactgaaaaccaatacaact

SEQ ID NO: 7545 - DNA, 33 bp, Homo sapiens
ggcatggagtcctgggcagagactggcagcgat

SEQ ID NO: 7546 - DNA, 33 bp, Homo sapiens
cttttgtgccactaaagataatctcatagaaag

SEQ ID NO: 7547 - DNA, 33 bp, Homo sapiens
tatacagtcaaattggtagaatagcctctcttc

SEQ ID NO: 7548 - DNA, 33 bp, Homo sapiens
ccatgagttgcccccagaccaattcttctgaag

SEQ ID NO: 7549 - DNA, 33 bp, Homo sapiens
tattcattcattgatagatttggttacttcaga

SEQ ID NO: 7550 - DNA, 33 bp, Homo sapiens
ataattcattttccaatagcaccagaactacag

SEQ ID NO: 7551 - DNA, 33 bp, Homo sapiens
ccactgatggaaacactagatgatgtgactact

SEQ ID NO: 7552 - DNA, 33 bp, Homo sapiens
aattatatgtgtgagatgatctgccatgaacta

SEQ ID NO: 7553 - DNA, 51 bp, Homo sapiens
aggtccttcccagtatggtccttcaggaattatttctttttttgttttttc

SEQ ID NO: 7554 - DNA, 33 bp, Homo sapiens
tagcatgatggtaacacaggtcataaccaccct

SEQ ID NO: 7555 - DNA, 33 bp, Homo sapiens
gtgtggctaaagatcagcaggcccaagtggtag

SEQ ID NO: 7556 - DNA, 33 bp, Homo sapiens
tggatggattttggtgtcaatcttgaattagaa

SEQ ID NO: 7557 - DNA, 33 bp, Homo sapiens
actgatgtaaagaaaggcatgacttctagattg

SEQ ID NO: 7558 - DNA, 33 bp, Homo sapiens
tgaaaacagcaatatcgcagctaacactttagg

SEQ ID NO: 7559 - DNA, 51 bp, Homo sapiens
aaagccaggactcgcagggctgctctacccacaataatgaaccactatcta

SEQ ID NO: 7560 - DNA, 33 bp, Homo sapiens
ttgaatatacacattatctattcaagttaaaag

SEQ ID NO: 7561 - DNA, 33 bp, Homo sapiens
attggcaaatactacagccaaaatagccctcct

SEQ ID NO: 7562 - DNA, 33 bp, Homo sapiens
ctcagctatcaacatcgctgaaccacaagttgg

SEQ ID NO: 7563 - DNA, 33 bp, Homo sapiens
ggtttccagaatacaatggctacagactggagg

SEQ ID NO: 7564 - DNA, 33 bp, Homo sapiens
atgtggtaagaatttcgaggcgttaaaattgat

SEQ ID NO: 7565 - DNA, 51 bp, Homo sapiens
aaaagaattcctcatgatattgtcattctaatttttctaggtcactagagc

SEQ ID NO: 7566 - DNA, 33 bp, Homo sapiens
gaaagtgcagcagtacggatagccattaatgtt

SEQ ID NO: 7567 - DNA, 33 bp, Homo sapiens
ggggtgcaaggacagatcatagagaaggaactc

SEQ ID NO: 7568 - DNA, 33 bp, Homo sapiens
aagtggaagctctcaagcacaggaaagaatgtg

SEQ ID NO: 7569 - DNA, 33 bp, Homo sapiens
tttgcggacactcttagcaatgtttctagatca

SEQ ID NO: 7570 - DNA, 33 bp, Homo sapiens
agtgataatagaagtctctgaaaagtcaaatgg

SEQ ID NO: 7571 - DNA, 33 bp, Homo sapiens
ttactgattactgtaataaattcatgacagccc

SEQ ID NO: 7572 - DNA, 33 bp, Homo sapiens
taaaatatgcaaatggcacagaaatagattccc

SEQ ID NO: 7573 - DNA, 33 bp, Homo sapiens
tatagatcgcaaaacttaatcttagaaaagtca

SEQ ID NO: 7574 - DNA, 33 bp, Homo sapiens
caaaaatggataaaaatcaatgagctaaaaatt

SEQ ID NO: 7575 - DNA, 33 bp, Homo sapiens
tatcttatcatctcaggcacttcagatcatctc

SEQ ID NO: 7576 - DNA, 33 bp, Homo sapiens
acagtcaagcctactttaagagattgtcataaa

SEQ ID NO: 7577 - DNA, 33 bp, Homo sapiens
ctaggaatgaaacttatgtaggtccatgttcgg

SEQ ID NO: 7578 - DNA, 33 bp, Homo sapiens
cccacctttattcatagcagacaacactatcca

SEQ ID NO: 7579 - DNA, 33 bp, Homo sapiens
ctctagataaatgagatacttccaataaaacag

SEQ ID NO: 7580 - DNA, 33 bp, Homo sapiens
agtttgaactgaagatgaagagtgaacacattt

SEQ ID NO: 7581 - DNA, 51 bp, Homo sapiens
actataagaattgtatctctctggctctattcaaatttctcttctaaatta

SEQ ID NO: 7582 - DNA, 51 bp, Homo sapiens
tcattaaatttggtgaagccaagtctgactataagaattgtatctctctgg

SEQ ID NO: 7583 - DNA, 33 bp, Homo sapiens
ggctatgctacaagaagtccatgttaacttcac

SEQ ID NO: 7584 - DNA, 33 bp, Homo sapiens
atattcaataacttgctccataggtgacaggat

SEQ ID NO: 7585 - DNA, 33 bp, Homo sapiens
atggtgatagtaaccatgattctttaattcaag

SEQ ID NO: 7586 - DNA, 33 bp, Homo sapiens
gcgcaaacagaggaaatggcaaggaataagact

SEQ ID NO: 7587 - DNA, 33 bp, Homo sapiens
atttagtcaattggcacgtagaaaattaaaaag

SEQ ID NO: 7588 - DNA, 33 bp, Homo sapiens
ttcaccagagattccattgactttgtagttcct

SEQ ID NO: 7589 - DNA, 33 bp, Homo sapiens
aaccttcccttctccaggtgagacactgttagt

SEQ ID NO: 7590 - DNA, 33 bp, Homo sapiens
tagtggtcttttaacatgtgttctctgaagtaa

SEQ ID NO: 7591 - DNA, 33 bp, Homo sapiens
ggtttacttcctgatagtaattttgataagctt

SEQ ID NO: 7592 - DNA, 33 bp, Homo sapiens
tgacttcatattgacagactgacttgggatatc

SEQ ID NO: 7593 - DNA, 33 bp, Homo sapiens
ctagtacaacacgttagctacaaccaaattcat

SEQ ID NO: 7594 - DNA, 33 bp, Homo sapiens
acccaggtgtcatgtagccgccaataatttgga

SEQ ID NO: 7595 - DNA, 33 bp, Homo sapiens
cctcccctaatcactatgttcacatcatgctcc

SEQ ID NO: 7596 - DNA, 33 bp, Homo sapiens
attttcccttattccatcagtgccactgggaga

SEQ ID NO: 7597 - DNA, 33 bp, Homo sapiens
aaaaggagtgattgtaggaagtcatataaatgg

SEQ ID NO: 7598 - DNA, 33 bp, Homo sapiens
gaagaaacaaaactatcactcttcatagctgct

SEQ ID NO: 7599 - DNA, 33 bp, Homo sapiens
ggctagggcctgttgaggactattgacatgaag

SEQ ID NO: 7600 - DNA, 33 bp, Homo sapiens
atttcaaatgagctacgattttattgaatatct

SEQ ID NO: 7601 - DNA, 33 bp, Homo sapiens
actagttttcctaagactccagctcaacttacc

SEQ ID NO: 7602 - DNA, 33 bp, Homo sapiens
gtgaacccaaaatagcggccaatgaaagcaaac

SEQ ID NO: 7603 - DNA, 33 bp, Homo sapiens
gctgagctcctgagagcaagaaatgaatgggag

SEQ ID NO: 7604 - DNA, 51 bp, Homo sapiens
gcatctatagaatttaaaataccaatgttagtatgtcatctgtagagacag

SEQ ID NO: 7605 - DNA, 33 bp, Homo sapiens
ccataactccaagataggtggacatcactacag

SEQ ID NO: 7606 - DNA, 33 bp, Homo sapiens
ttcagtaattacgtcattcttgaactgtattgt

SEQ ID NO: 7607 - DNA, 33 bp, Homo sapiens
ccttttgtttgctggatgtcaatgcccagaaca

SEQ ID NO: 7608 - DNA, 33 bp, Homo sapiens
taaagagaggatcaaatagtttatcttcacatg

SEQ ID NO: 7609 - DNA, 33 bp, Homo sapiens
tctgtgtataaggcaatgtcacctgggaggcca

SEQ ID NO: 7610 - DNA, 51 bp, Homo sapiens
aagacttgtgactttgccgacagaccattttaaatagctgttttgaggaaa

SEQ ID NO: 7611 - DNA, 33 bp, Homo sapiens
atgagaagaaatctacgatgtgctaggaacttt

SEQ ID NO: 7612 - DNA, 33 bp, Homo sapiens
aaagttaaagcctctatgtttgtctagtagact

SEQ ID NO: 7613 - DNA, 33 bp, Homo sapiens
gatgagtaggttcgtgtagaaggataataatag

SEQ ID NO: 7614 - DNA, 51 bp, Homo sapiens
aattgaattgcgcttactttacttatggcatccattttgaggaacgcctta

SEQ ID NO: 7615 - DNA, 33 bp, Homo sapiens
gaaaggatgcagaggagaggacgagacttgtaa

SEQ ID NO: 7616 - DNA, 33 bp, Homo sapiens
ttagtaatcagtgtcagtatcatttcatcaatt

SEQ ID NO: 7617 - DNA, 51 bp, Homo sapiens
tagcgtagttcttctctatactcaacatacttgtagctgagttcatggtgt

SEQ ID NO: 7618 - DNA, 33 bp, Homo sapiens
agatacatttttcacataggagagacctaaata

SEQ ID NO: 7619 - DNA, 51 bp, Homo sapiens
aatttgttcttctaatttctgaatcgaagaatttaaaaacatacattggaa

SEQ ID NO: 7620 - DNA, 33 bp, Homo sapiens
cattccattgttcccattatttcttacattaat

SEQ ID NO: 7621 - DNA, 33 bp, Homo sapiens
aactaattttgaggaagtgctacaccaggaatg

SEQ ID NO: 7622 - DNA, 33 bp, Homo sapiens
agggggacaaagtctatatcaggtggcaaaacg

SEQ ID NO: 7623 - DNA, 33 bp, Homo sapiens
tccttgatccaatcaaccttcagtgagctcatg

SEQ ID NO: 7624 - DNA, 33 bp, Homo sapiens
gaggtaacaaggatgcccaagtagattacctga

SEQ ID NO: 7625 - DNA, 33 bp, Homo sapiens
gaaaaagagaataaaaggccatgtggttcattg

SEQ ID NO: 7626 - DNA, 33 bp, Homo sapiens
cttccaagatgagttatatattaggcaaagtga

SEQ ID NO: 7627 - DNA, 33 bp, Homo sapiens
atgcagcatttacactgagatctgaaactgagt

SEQ ID NO: 7628 - DNA, 33 bp, Homo sapiens
ggctcagtgcaatttctaatacgttataatatg

SEQ ID NO: 7629 - DNA, 33 bp, Homo sapiens
cttgtcagactaggactgagccattctagcagc

SEQ ID NO: 7630 - DNA, 33 bp, Homo sapiens
tgtaagtggaatgctatgtgtattatcatgtct

SEQ ID NO: 7631 - DNA, 33 bp, Homo sapiens
cagtagtgagtttgcatagctcccaaatttcca

SEQ ID NO: 7632 - DNA, 33 bp, Homo sapiens
aaatgaaacagtgtactggaagcctgctaataa

SEQ ID NO: 7633 - DNA, 33 bp, Homo sapiens
tggtgtatatgtgacagggccctaatttcttaa

SEQ ID NO: 7634 - DNA, 33 bp, Homo sapiens
catgtctccataggtcgccctccagcttggcca

SEQ ID NO: 7635 - DNA, 33 bp, Homo sapiens
acagctcagcaattacgctctacataatctttt

SEQ ID NO: 7636 - DNA, 33 bp, Homo sapiens
cctaaagacctccttagcttagtgggcaagcct

SEQ ID NO: 7637 - DNA, 33 bp, Homo sapiens
tgaaattgaggaagtagggaggtggcctcacct

SEQ ID NO: 7638 - DNA, 33 bp, Homo sapiens
gatctgttgatgaatctgaaattggaagctctg

SEQ ID NO: 7639 - DNA, 33 bp, Homo sapiens
agtggaaaagtaagactctatcgtacagggagg

SEQ ID NO: 7640 - DNA, 33 bp, Homo sapiens
gccattaagctttgtatgactgcacatgacatt

SEQ ID NO: 7641 - DNA, 51 bp, Homo sapiens
ccatcttggacttctgcctctcagatgttaaggtgataaacttgtatggtt

SEQ ID NO: 7642 - DNA, 33 bp, Homo sapiens
gatagagtgtcaagaagaaacctggaaggtacc

SEQ ID NO: 7643 - DNA, 33 bp, Homo sapiens
ggttgcccttcagcaggcaattaagaaagacat

SEQ ID NO: 7644 - DNA, 33 bp, Homo sapiens
cccgtctgtataaatatgtgttcagagacttca

SEQ ID NO: 7645 - DNA, 33 bp, Homo sapiens
attactgaagaccaaacggcatcatagcatgat

SEQ ID NO: 7646 - DNA, 33 bp, Homo sapiens
tttagcataaccccacggtagaatcaataacgg

SEQ ID NO: 7647 - DNA, 33 bp, Homo sapiens
cctttaagaagagagcgcttaaaagagtaaggt

SEQ ID NO: 7648 - DNA, 33 bp, Homo sapiens
atgcttgctcactgaggaactgagagaccagct

SEQ ID NO: 7649 - DNA, 33 bp, Homo sapiens
cagacactgtctaacttactttggagcctgagg

SEQ ID NO: 7650 - DNA, 33 bp, Homo sapiens
agctcctgtcactccatgtggctttgtctctgg

SEQ ID NO: 7651 - DNA, 33 bp, Homo sapiens
ctgcggaaataagcacgaatgggctctgttgga

SEQ ID NO: 7652 - DNA, 33 bp, Homo sapiens
tctgtagtctagtgtagtaactggctcatagta

SEQ ID NO: 7653 - DNA, 33 bp, Homo sapiens
tcattttaccacttcagtcactaaagccagtaa

SEQ ID NO: 7654 - DNA, 33 bp, Homo sapiens
tcttcaaaatctttacgcgattgatcttccatg

SEQ ID NO: 7655 - DNA, 33 bp, Homo sapiens
ttttagagatttttaagtgttgttggacttaag

SEQ ID NO: 7656 - DNA, 51 bp, Homo sapiens
ttaatccaggtataagaggttttaggcgtttcttactatggacttgcatag

SEQ ID NO: 7657 - DNA, 33 bp, Homo sapiens
cttcaaagaacctatctaacctgttcaactatt

SEQ ID NO: 7658 - DNA, 51 bp, Homo sapiens
aatcacaagtgtagtgatttaaacagggtatcagtggctttacgcatccat

SEQ ID NO: 7659 - DNA, 33 bp, Homo sapiens
atccgcagcgtcagaggaagctgtattgtctga

SEQ ID NO: 7660 - DNA, 33 bp, Homo sapiens
tatcaaaaggaaagaagagatgaggaatagcat

SEQ ID NO: 7661 - DNA, 33 bp, Homo sapiens
tcctgccatgagaaattaaagtcagacaaagac

SEQ ID NO: 7662 - DNA, 33 bp, Homo sapiens
tcagtccagtggacaagaaatgggagctgaatt

SEQ ID NO: 7663 - DNA, 33 bp, Homo sapiens
gaactttactgagtaagagaacagcttgcggga

SEQ ID NO: 7664 - DNA, 33 bp, Homo sapiens
aagagatatagtcgctgaacactaggtcatata

SEQ ID NO: 7665 - DNA, 33 bp, Homo sapiens
tttctttcaattctgagctctcccttcagttac

SEQ ID NO: 7666 - DNA, 33 bp, Homo sapiens
aaaccagccctaaataccacattgagaagacca

SEQ ID NO: 7667 - DNA, 33 bp, Homo sapiens
gggaatgagactgctatatcatgttaagtgttt

SEQ ID NO: 7668 - DNA, 33 bp, Homo sapiens
tccatccctgccattatggtcaccttgttcatg

SEQ ID NO: 7669 - DNA, 33 bp, Homo sapiens
aaattgccgagtaacatgatttcagtaacatgt

SEQ ID NO: 7670 - DNA, 33 bp, Homo sapiens
agtgcctacttcacaggaataacaagggaacat

SEQ ID NO: 7671 - DNA, 33 bp, Homo sapiens
aaataataaaatgaacgaagtgcctcctaaact

SEQ ID NO: 7672 - DNA, 33 bp, Homo sapiens
cttcttcttacaaagctacaagtcccactctca

SEQ ID NO: 7673 - DNA, 33 bp, Homo sapiens
ggggtcctctaggctcgcccattctttcactcc

SEQ ID NO: 7674 - DNA, 33 bp, Homo sapiens
caagtatttggatgaaccctgttagatggtggg

SEQ ID NO: 7675 - DNA, 33 bp, Homo sapiens
tgagcctcaatcccacgaggaccctctaagaaa

SEQ ID NO: 7676 - DNA, 33 bp, Homo sapiens
gtgctctatgaacatatcaggttactgtcatta

SEQ ID NO: 7677 - DNA, 33 bp, Homo sapiens
gccagaagttctaaaatctccaaggtatgtagc

SEQ ID NO: 7678 - DNA, 33 bp, Homo sapiens
tattccaagctaatgatggaagcaagattcata

SEQ ID NO: 7679 - DNA, 33 bp, Homo sapiens
gaattttcaaagcccagattttcaatgacaagc

SEQ ID NO: 7680 - DNA, 33 bp, Homo sapiens
gtgaactgccatatccgagaaagtgaaacttat

SEQ ID NO: 7681 - DNA, 33 bp, Homo sapiens
atagactggggtggaagtctttggacaaatcca

SEQ ID NO: 7682 - DNA, 33 bp, Homo sapiens
tcctgatctgacagcatactaaaaagcattagg

SEQ ID NO: 7683 - DNA, 33 bp, Homo sapiens
actgacctggagcctctagagcaagggtcagga

SEQ ID NO: 7684 - DNA, 33 bp, Homo sapiens
tattgaactcctactatgtttgaggcactggag

SEQ ID NO: 7685 - DNA, 33 bp, Homo sapiens
tatgctcctagttatcgcaggaaaaggatacag

SEQ ID NO: 7686 - DNA, 33 bp, Homo sapiens
gaaatgtgtggtggggccatattagtggtgaca

SEQ ID NO: 7687 - DNA, 33 bp, Homo sapiens
actggtaatagttcccggagaatggctggctcc

SEQ ID NO: 7688 - DNA, 33 bp, Homo sapiens
tagcaaaagtcattgcgagttctgaaggaaaca

SEQ ID NO: 7689 - DNA, 33 bp, Homo sapiens
aaagggattgcagtagtagtaggtggcatggtc

SEQ ID NO: 7690 - DNA, 33 bp, Homo sapiens
aaaacagataaggaaacgctcatccacagagct

SEQ ID NO: 7691 - DNA, 33 bp, Homo sapiens
tttccatttcacccgggagctaactgctagaga

SEQ ID NO: 7692 - DNA, 33 bp, Homo sapiens
ttgtaggtcatctacaggatactattcatcttt

SEQ ID NO: 7693 - DNA, 33 bp, Homo sapiens
gattaaaacccaacaagctcgagtgctggggtc

SEQ ID NO: 7694 - DNA, 51 bp, Homo sapiens
ggcaccatcgtgggtgggagggtattttgcatttgtcttggtattgccctc

SEQ ID NO: 7695 - DNA, 33 bp, Homo sapiens
ttcccaggcaggtcaatgggaaaaggttgcagg

SEQ ID NO: 7696 - DNA, 33 bp, Homo sapiens
tacatgaaaacaaatggcaacagcttgtgggtg

SEQ ID NO: 7697 - DNA, 33 bp, Homo sapiens
agggtaagacagaagagtataatgcacttagtc

SEQ ID NO: 7698 - DNA, 51 bp, Homo sapiens
caagatagccagaaattatatttcctgatggagtatacaatctgcctttgg

SEQ ID NO: 7699 - DNA, 33 bp, Homo sapiens
agaagacctaaggccgcaagtcgctgtgcagca

SEQ ID NO: 7700 - DNA, 33 bp, Homo sapiens
caagaatagcaagtgccaaaaagcagtagctct

SEQ ID NO: 7701 - DNA, 33 bp, Homo sapiens
gttttagcatttccaatgggcatcaacaaatct

SEQ ID NO: 7702 - DNA, 33 bp, Homo sapiens
acgaggcattttctcatagtccctgacagcaca

SEQ ID NO: 7703 - DNA, 33 bp, Homo sapiens
tgttgcaaaggtagaattagaatcttacttctg

SEQ ID NO: 7704 - DNA, 33 bp, Homo sapiens
tcaatgcactgaaaatcatctaactgggaagtt

SEQ ID NO: 7705 - DNA, 33 bp, Homo sapiens
taacttacactcatgacatcagctcaggattca

SEQ ID NO: 7706 - DNA, 33 bp, Homo sapiens
cagtggtgagagaaaagagaattacattttatg

SEQ ID NO: 7707 - DNA, 33 bp, Homo sapiens
ctaaccaagtgaaaaatccaatatacacaaata

SEQ ID NO: 7708 - DNA, 33 bp, Homo sapiens
gtggacaacaagaaagtccatctactaggccaa

SEQ ID NO: 7709 - DNA, 33 bp, Homo sapiens
gcacttggacaggaactacgatcatacctattg

SEQ ID NO: 7710 - DNA, 33 bp, Homo sapiens
atatttgacaccttgggaacttgcattaatact

SEQ ID NO: 7711 - DNA, 33 bp, Homo sapiens
gagaccttcacaacaatccctatcatcacagcc

SEQ ID NO: 7712 - DNA, 33 bp, Homo sapiens
caaattcattcatcaacaacgggttctctgcta

SEQ ID NO: 7713 - DNA, 33 bp, Homo sapiens
atcatggagacattccgatttacattatacaca

SEQ ID NO: 7714 - DNA, 33 bp, Homo sapiens
aaaagaaatgtgacgctctctcaccaagatgct

SEQ ID NO: 7715 - DNA, 33 bp, Homo sapiens
agtatccatcactcaagtaacatacattgtacc

SEQ ID NO: 7716 - DNA, 33 bp, Homo sapiens
atatgtttctctttcagggtggttagtctagca

SEQ ID NO: 7717 - DNA, 33 bp, Homo sapiens
aattttttaaatgggcgaaaggcttgaaatgtc

SEQ ID NO: 7718 - DNA, 33 bp, Homo sapiens
tagaatgtttaatttcgcttctctcacttgaat

SEQ ID NO: 7719 - DNA, 33 bp, Homo sapiens
taggttgtccatattgcagctggattatgggat

SEQ ID NO: 7720 - DNA, 51 bp, Homo sapiens
tctatgtattttcctgcaaataaaatcattagtaaaaagattttaagttgt

SEQ ID NO: 7721 - DNA, 33 bp, Homo sapiens
tagcccttactctagagcaactttagtcacatt

SEQ ID NO: 7722 - DNA, 51 bp, Homo sapiens
cttaaagagtgttctcagtggtccatgtgctacaactgagaggcaatgagg

SEQ ID NO: 7723 - DNA, 33 bp, Homo sapiens
aattagaaagacaaaagctatctgaacatagga

SEQ ID NO: 7724 - DNA, 33 bp, Homo sapiens
agcattcctagagtccgattcttccattttccc

SEQ ID NO: 7725 - DNA, 33 bp, Homo sapiens
taaaaaaagcagcaccgcaattcctaaatgact

SEQ ID NO: 7726 - DNA, 51 bp, Homo sapiens
tgctatacagacttatgtttccaactgtagccacacaacacagtgttacag

SEQ ID NO: 7727 - DNA, 33 bp, Homo sapiens
acagcagactcatcgtgacagctgcccagaaga

SEQ ID NO: 7728 - DNA, 51 bp, Homo sapiens
tctaacctcaaatggctgagctgaagtcctgtgatgtcaacctagttttct

SEQ ID NO: 7729 - DNA, 33 bp, Homo sapiens
aagaacgtctgagacatgggaagtttgtccctg

SEQ ID NO: 7730 - DNA, 33 bp, Homo sapiens
agatagaaatgcactagatctgaagttcgcacc

SEQ ID NO: 7731 - DNA, 33 bp, Homo sapiens
tgtttattcccagtgattagtaaattgcatttt

SEQ ID NO: 7732 - DNA, 51 bp, Homo sapiens
gttgttgctgctattgttattatgatgtacttggccctcttccagacccac

SEQ ID NO: 7733 - DNA, 33 bp, Homo sapiens
tgtcctctgaggcaccgaagtttttattttgat

SEQ ID NO: 7734 - DNA, 33 bp, Homo sapiens
gtgtggcttgaggatctcttggtgaaatagaaa

SEQ ID NO: 7735 - DNA, 33 bp, Homo sapiens
tctccaagctttgatacctgtggcttaatattc

SEQ ID NO: 7736 - DNA, 33 bp, Homo sapiens
gacagttaataaatgcggcaggatcccactcat

SEQ ID NO: 7737 - DNA, 33 bp, Homo sapiens
gctatgcaagccaacattgtccttaatatttaa

SEQ ID NO: 7738 - DNA, 33 bp, Homo sapiens
tctcctgcttaaaatatctaaaattggagaaag

SEQ ID NO: 7739 - DNA, 51 bp, Homo sapiens
ttcaagtgaatactggatgccaaaagaacacacacaccttagagtgagttt

SEQ ID NO: 7740 - DNA, 51 bp, Homo sapiens
caataaatggcaccatataaaacaggaactgttggagagcattttatctgt

SEQ ID NO: 7741 - DNA, 51 bp, Homo sapiens
tatttgtacaaaagtttctaagtacgcaagaggaacttgcaggtcattttt

SEQ ID NO: 7742 - DNA, 33 bp, Homo sapiens
actctgagccattaacgatggactgtaactcaa

SEQ ID NO: 7743 - DNA, 33 bp, Homo sapiens
aagtatttttaaattatgcaacaggatgtgttt

SEQ ID NO: 7744 - DNA, 33 bp, Homo sapiens
aattacttacattttcgagactaattagtgccc

SEQ ID NO: 7745 - DNA, 33 bp, Homo sapiens
ttaaactcaaccttagcatgtcagaataggtat

SEQ ID NO: 7746 - DNA, 33 bp, Homo sapiens
actacagacactaagattaagatatgctaacag

SEQ ID NO: 7747 - DNA, 33 bp, Homo sapiens
tttaaggatgcagctaggtgaataattacattt

SEQ ID NO: 7748 - DNA, 33 bp, Homo sapiens
agactgttttccaatatggctttactactttat

SEQ ID NO: 7749 - DNA, 33 bp, Homo sapiens
taaaatgaaaaaataaggtgtcatgatatacat

SEQ ID NO: 7750 - DNA, 33 bp, Homo sapiens
gatgttaccaaagcaatcatacatgaagataca

SEQ ID NO: 7751 - DNA, 33 bp, Homo sapiens
aagaagaccactggtgtaatttcataagcaata

SEQ ID NO: 7752 - DNA, 33 bp, Homo sapiens
aatgaaaaaaagacaagaaatgaactgagcaca

SEQ ID NO: 7753 - DNA, 33 bp, Homo sapiens
acagactccttaaagccaaatgatcatatctgt

SEQ ID NO: 7754 - DNA, 33 bp, Homo sapiens
cttcacttagatttgaggtaacaaagagatatt

SEQ ID NO: 7755 - DNA, 33 bp, Homo sapiens
tctagaaaatgtttgataatatgcctgttttct

SEQ ID NO: 7756 - DNA, 33 bp, Homo sapiens
ttaatatgaaaagttagagtgaattctcctaat

SEQ ID NO: 7757 - DNA, 51 bp, Homo sapiens
aggatggtttatttccaaaatactagagtgtgttcaaatatggaaacccgc

SEQ ID NO: 7758 - DNA, 33 bp, Homo sapiens
gaaggtatagtggtgtgaaaagatatcccatac

SEQ ID NO: 7759 - DNA, 33 bp, Homo sapiens
tcaggttcaaacttcatgttctactctgactga

SEQ ID NO: 7760 - DNA, 33 bp, Homo sapiens
ctgctgatatctctgggataaatacttctacaa

SEQ ID NO: 7761 - DNA, 33 bp, Homo sapiens
aaatagatccataagcgactcaagcctctttgt

SEQ ID NO: 7762 - DNA, 33 bp, Homo sapiens
ggggggtggtaatgtatggactaggtgaagtcc

SEQ ID NO: 7763 - DNA, 33 bp, Homo sapiens
agagacagcagaaaaggaataggtactcctgtt

SEQ ID NO: 7764 - DNA, 33 bp, Homo sapiens
cctcaggaagcttccagtcatagtagaagacaa

SEQ ID NO: 7765 - DNA, 33 bp, Homo sapiens
tgtacctcatattgaattattcactcccagaaa

SEQ ID NO: 7766 - DNA, 33 bp, Homo sapiens
cactagtgttggactagacagcaggaaaaatat

SEQ ID NO: 7767 - DNA, 33 bp, Homo sapiens
aagtgatttctttggattatgcctgtacattaa

SEQ ID NO: 7768 - DNA, 33 bp, Homo sapiens
tttagtagataacatagacctctgaagtcacta

SEQ ID NO: 7769 - DNA, 33 bp, Homo sapiens
aggaaccacagctcactattaaacaattgctga

SEQ ID NO: 7770 - DNA, 51 bp, Homo sapiens
tttcatcactccatggtattaaaaagtatctcctagtttgtgatgtgtaca

SEQ ID NO: 7771 - DNA, 33 bp, Homo sapiens
acagcagtccaatttatcattttgctaccttgg

SEQ ID NO: 7772 - DNA, 33 bp, Homo sapiens
tttatttctacgttcagcctaaaagctcactgc

SEQ ID NO: 7773 - DNA, 33 bp, Homo sapiens
atagtattcactacaagttgacttaagaaccct

SEQ ID NO: 7774 - DNA, 33 bp, Homo sapiens
acagcaaacagctaaaggaagatttcagccatt

SEQ ID NO: 7775 - DNA, 33 bp, Homo sapiens
tgaaatttagccgaaagagtatatcaaaagcaa

SEQ ID NO: 7776 - DNA, 33 bp, Homo sapiens
ccttaatcaaaaacaatgaggtttgagctagta

SEQ ID NO: 7777 - DNA, 51 bp, Homo sapiens
tagaattgatgggcaataaacggtagatgttttggactccctgataaaata

SEQ ID NO: 7778 - DNA, 33 bp, Homo sapiens
ttagagaaaaaaaaaatatgcctacagaatgta

SEQ ID NO: 7779 - DNA, 33 bp, Homo sapiens
caactatttaactgtatctttgtcgtacaaaaa

SEQ ID NO: 7780 - DNA, 33 bp, Homo sapiens
aattgtagctctcacattaaagctgggtgaaaa

SEQ ID NO: 7781 - DNA, 51 bp, Homo sapiens
taggtattaaaaaaaatctctttactctcatcatgctaggccagagtaggg

SEQ ID NO: 7782 - DNA, 33 bp, Homo sapiens
aggtacggaatcaatctatatgctgtatatttt

SEQ ID NO: 7783 - DNA, 33 bp, Homo sapiens
ggaactgaggaacaaagtattgaaacctggact

SEQ ID NO: 7784 - DNA, 33 bp, Homo sapiens
caatcaagccaagaacgaaatcaagaacacaat

SEQ ID NO: 7785 - DNA, 33 bp, Homo sapiens
gatggcacgttaaagagagaaagatggcttggt

SEQ ID NO: 7786 - DNA, 33 bp, Homo sapiens
atataacagtagtctatcttctgccactagctg

SEQ ID NO: 7787 - DNA, 33 bp, Homo sapiens
aggaggacagagaagctatcataacataacatt

SEQ ID NO: 7788 - DNA, 33 bp, Homo sapiens
gagtaagtcattaaaatgctctaaccctgtatt

SEQ ID NO: 7789 - DNA, 33 bp, Homo sapiens
actcccccatcaaaaggcgcatagtggctgaat

SEQ ID NO: 7790 - DNA, 33 bp, Homo sapiens
tcaagaagagagaacggattctaggtgagcaat

SEQ ID NO: 7791 - DNA, 33 bp, Homo sapiens
gctacaatgggtataggcaacctcttgaataaa

SEQ ID NO: 7792 - DNA, 33 bp, Homo sapiens
ttcatattccaaaaaagttcactgtgtctctga

SEQ ID NO: 7793 - DNA, 51 bp, Homo sapiens
aaatgtgtgtgctatctttacctcagattaattcaaaagggaaattaatga

SEQ ID NO: 7794 - DNA, 51 bp, Homo sapiens
atacatccaacttgaggtataggtaggttgcccaagaagaaatgtctagta

SEQ ID NO: 7795 - DNA, 51 bp, Homo sapiens
ctgtaaggtagaaattggaggtcaataaaaatttaaacagaggaacagagg

SEQ ID NO: 7796 - DNA, 33 bp, Homo sapiens
cattggcacttagaaagactttaattcaagttc

SEQ ID NO: 7797 - DNA, 33 bp, Homo sapiens
aattaactcagaagcacctacctacaagcaagt

SEQ ID NO: 7798 - DNA, 33 bp, Homo sapiens
attgtcatgtgcaacatacgattttgtcaacaa

SEQ ID NO: 7799 - DNA, 51 bp, Homo sapiens
ctttgagcacttcaaatgacacttctatatttgtaccttacacaaaggata

SEQ ID NO: 7800 - DNA, 33 bp, Homo sapiens
cacagagtttctacaaggatgctgcctagtgaa

SEQ ID NO: 7801 - DNA, 33 bp, Homo sapiens
aatatgtgaactaataggcataagcagaatggg

SEQ ID NO: 7802 - DNA, 33 bp, Homo sapiens
acttagaaggtagtgatccaatctctcagtgat

SEQ ID NO: 7803 - DNA, 33 bp, Homo sapiens
attccacactaggaaattcataggtgctcaaac

SEQ ID NO: 7804 - DNA, 51 bp, Homo sapiens
ggcttagaaattagagtagatataatagagttgattaacaatggaaaaagg

SEQ ID NO: 7805 - DNA, 51 bp, Homo sapiens
ctttgatacttattctttgtgaaatgatacctctaatcttagaatatttaa

SEQ ID NO: 7806 - DNA, 33 bp, Homo sapiens
atatgcatatttcatagagctagacaaagatga

SEQ ID NO: 7807 - DNA, 51 bp, Homo sapiens
ggaaattgtctccttatagattctagtaaacattttcagtaaaaataaagc

SEQ ID NO: 7808 - DNA, 33 bp, Homo sapiens
cacaaattagcttgaatggtagaaagatttata

SEQ ID NO: 7809 - DNA, 33 bp, Homo sapiens
tgactgccaggtttaggacagatattaagaacc

SEQ ID NO: 7810 - DNA, 33 bp, Homo sapiens
aaactaggcactctcattctgaagcgacattag

SEQ ID NO: 7811 - DNA, 33 bp, Homo sapiens
aaatttgtgtggctacggaggcagtattattct

SEQ ID NO: 7812 - DNA, 33 bp, Homo sapiens
tctttcagctcttctctgactgactttcctgaa

SEQ ID NO: 7813 - DNA, 33 bp, Homo sapiens
gactatagcattaagataggaaccaggaagagg

SEQ ID NO: 7814 - DNA, 51 bp, Homo sapiens
tagatagatagataatagatagagattaaagcctttcaatactgactttca

SEQ ID NO: 7815 - DNA, 33 bp, Homo sapiens
aagaaagaaaaggagagtagacaggattagaag

SEQ ID NO: 7816 - DNA, 33 bp, Homo sapiens
tgcactctacaaaaagtatcattctcataatag

SEQ ID NO: 7817 - DNA, 51 bp, Homo sapiens
catcatttttcatttcctctactgatggacagttaatttgcatgtatcaac

SEQ ID NO: 7818 - DNA, 51 bp, Homo sapiens
cttttaccattattttacagagtaggcttgtgtttactttgagtaacttgt

SEQ ID NO: 7819 - DNA, 51 bp, Homo sapiens
taagatcataaaagctagagaaagagacgcttattaaggaaacaaataatt

SEQ ID NO: 7820 - DNA, 33 bp, Homo sapiens
ctgtcagattcattgagcaagcttaaattcagg

SEQ ID NO: 7821 - DNA, 51 bp, Homo sapiens
tgcagagggacaggtcagattgtgtgaaggttctatgcaaactgcccaaga

SEQ ID NO: 7822 - DNA, 33 bp, Homo sapiens
aattgttagttttttcgagatgttttcttcaag

SEQ ID NO: 7823 - DNA, 33 bp, Homo sapiens
cagtatgttgagatgattaagatttgctttagc

SEQ ID NO: 7824 - DNA, 33 bp, Homo sapiens
aaagccatcctggaaattgtcaggtaataggag

SEQ ID NO: 7825 - DNA, 33 bp, Homo sapiens
ctggaggttaggcggctatgttcaaggttctag

SEQ ID NO: 7826 - DNA, 33 bp, Homo sapiens
ttacttgaattctgaagtggctgaatatttgaa

SEQ ID NO: 7827 - DNA, 33 bp, Homo sapiens
gtgtacttattatcaatctgggaatgtcgtcac

SEQ ID NO: 7828 - DNA, 33 bp, Homo sapiens
gttcagcaatccactctattattttaggcctct

SEQ ID NO: 7829 - DNA, 33 bp, Homo sapiens
cacacacattggtagattccttttaaggaattc

SEQ ID NO: 7830 - DNA, 33 bp, Homo sapiens
tctttaacaattgccatagacttccccaacttc

SEQ ID NO: 7831 - DNA, 33 bp, Homo sapiens
ttcaacatataaaccagagactcattaattcct

SEQ ID NO: 7832 - DNA, 33 bp, Homo sapiens
agagataaaggaaatcgagagagaatgtgaatt

SEQ ID NO: 7833 - DNA, 33 bp, Homo sapiens
tctgaagccatccctagtaaatttggcatattt

SEQ ID NO: 7834 - DNA, 51 bp, Homo sapiens
taaaacaacactaaaataagcaaaagaagttcagtgggggaaaaagtcaag

SEQ ID NO: 7835 - DNA, 33 bp, Homo sapiens
tgtgaaacagcctccattgaggttattgacaag

SEQ ID NO: 7836 - DNA, 33 bp, Homo sapiens
gaaaataacataggaagtacacagaacaacaaa

SEQ ID NO: 7837 - DNA, 33 bp, Homo sapiens
ggaagcgacacttcaatcaaaagctgcaaagaa

SEQ ID NO: 7838 - DNA, 51 bp, Homo sapiens
ctaccaacaaagattctgacatacatggattttctggtccaaagaatcctt

SEQ ID NO: 7839 - DNA, 33 bp, Homo sapiens
aaatgtaaacagtccagattaagatatgctgta

SEQ ID NO: 7840 - DNA, 33 bp, Homo sapiens
ttaattagtgactgaatagtgttgaataaatat

SEQ ID NO: 7841 - DNA, 33 bp, Homo sapiens
atacctgtctctattatctaaaaactatccatc

SEQ ID NO: 7842 - DNA, 33 bp, Homo sapiens
tttaatctgaagcccagtactcggccttgcatg

SEQ ID NO: 7843 - DNA, 51 bp, Homo sapiens
aaggaaaagatattaactacattattagctgctcagaaatgaattagcttg

SEQ ID NO: 7844 - DNA, 33 bp, Homo sapiens
caggatacaaaattaatggacatatatcactaa

SEQ ID NO: 7845 - DNA, 33 bp, Homo sapiens
ttcaaataaaacaaaccccgttgctgaatcact

SEQ ID NO: 7846 - DNA, 51 bp, Homo sapiens
cactttaaaaaagattttagatttagcattgcttttggaatcatttctgtt

SEQ ID NO: 7847 - DNA, 33 bp, Homo sapiens
ggaagtgggaaaagaatgtgtataggagtttag

SEQ ID NO: 7848 - DNA, 33 bp, Homo sapiens
ggtacagttcagtaaccggtgctttaacaagct

SEQ ID NO: 7849 - DNA, 33 bp, Homo sapiens
acattctcatataatcgactactagaacataag

SEQ ID NO: 7850 - DNA, 33 bp, Homo sapiens
gttttcctgaaataaagagctgattatatctct

SEQ ID NO: 7851 - DNA, 51 bp, Homo sapiens
aatccagtgctaggaagtttatttatgttgtcccacagagatcattttctc

SEQ ID NO: 7852 - DNA, 33 bp, Homo sapiens
cacgtaacaatatgagtcagattctaatatcat

SEQ ID NO: 7853 - DNA, 33 bp, Homo sapiens
aagactcccaggattacagttggacttgagtag

SEQ ID NO: 7854 - DNA, 51 bp, Homo sapiens
ctagagtgattctatgattttcaaggcttaagtaaattcagtagccttttt

SEQ ID NO: 7855 - DNA, 33 bp, Homo sapiens
gaatcctcctattttctcactgttcccagaatt

SEQ ID NO: 7856 - DNA, 33 bp, Homo sapiens
gtgtcattccaacccagagtccacattgtgtct

SEQ ID NO: 7857 - DNA, 51 bp, Homo sapiens
agaattatatagcagaaagttatactgatcttttgataaaacaatgtaata

SEQ ID NO: 7858 - DNA, 33 bp, Homo sapiens
ggaatcctttgacctatggaactatctgctttg

SEQ ID NO: 7859 - DNA, 33 bp, Homo sapiens
agctaatggataccaagtgtttctaatttcacc

SEQ ID NO: 7860 - DNA, 33 bp, Homo sapiens
cagggtcatcattaccgaacattgagtaattaa

SEQ ID NO: 7861 - DNA, 33 bp, Homo sapiens
aaaaaaattgcacaatgaattcagttagatttc

SEQ ID NO: 7862 - DNA, 33 bp, Homo sapiens
aaatagacaaatcaagtaactagtgtctgaccc

SEQ ID NO: 7863 - DNA, 33 bp, Homo sapiens
gatccacatttagatatgattttggaagtgtct

SEQ ID NO: 7864 - DNA, 33 bp, Homo sapiens
tgcctagcctgtcgtagctaccatcaacaaaat

SEQ ID NO: 7865 - DNA, 33 bp, Homo sapiens
gccgccgctgccgtcaggtgcgtaatgacgtat

SEQ ID NO: 7866 - DNA, 51 bp, Homo sapiens
tggaaacccagcatgtctatttagatagaaactgtgacatacattacttgc

SEQ ID NO: 7867 - DNA, 33 bp, Homo sapiens
agagacgagataagcatataaataagaccccaa

SEQ ID NO: 7868 - DNA, 33 bp, Homo sapiens
tgaagaagtaagatcatagaggaaaattatgca

SEQ ID NO: 7869 - DNA, 33 bp, Homo sapiens
gcatagccaaattttctacatacgtttattgag

SEQ ID NO: 7870 - DNA, 51 bp, Homo sapiens
ggtactgtgccactcatacacatcagatcttcctcacgtccttcccaatat

SEQ ID NO: 7871 - DNA, 33 bp, Homo sapiens
aaatcagatacatgcataaaacagtgtctactc

SEQ ID NO: 7872 - DNA, 51 bp, Homo sapiens
aagaactaatgaactaaaaactggatgaaaatactatccagaatgtggcaa

SEQ ID NO: 7873 - DNA, 33 bp, Homo sapiens
tgcactgactggctaattctctctcactcttag

SEQ ID NO: 7874 - DNA, 33 bp, Homo sapiens
ttcccacagttctttatcaatatgtcagtgtcg

SEQ ID NO: 7875 - DNA, 33 bp, Homo sapiens
cctatttgattgttaggatttatctgtaaaagg

SEQ ID NO: 7876 - DNA, 33 bp, Homo sapiens
gcccagactttaccactatgcaatacatccatg

SEQ ID NO: 7877 - DNA, 33 bp, Homo sapiens
caagggaaatcagcaagattgtatagtctctca

SEQ ID NO: 7878 - DNA, 33 bp, Homo sapiens
tctagatgtccagaaatgaccttgaaatatgaa

SEQ ID NO: 7879 - DNA, 33 bp, Homo sapiens
acttatttactcatcagcttaaatgttcatctc

SEQ ID NO: 7880 - DNA, 33 bp, Homo sapiens
atcttttgtaccgtcagctcctaccattgtaca

SEQ ID NO: 7881 - DNA, 33 bp, Homo sapiens
ttagttgatagggaaagagtcaccaatgttgtg

SEQ ID NO: 7882 - DNA, 33 bp, Homo sapiens
gaaggtggaacagtcattcctgacacttttctg

SEQ ID NO: 7883 - DNA, 33 bp, Homo sapiens
tacatatcaagaatccgaccaattaccaccacc

SEQ ID NO: 7884 - DNA, 33 bp, Homo sapiens
tggagccttctgattctctccagtaggaagtgg

SEQ ID NO: 7885 - DNA, 33 bp, Homo sapiens
tcacaggagaatatccgcaactatgttccttcc

SEQ ID NO: 7886 - DNA, 51 bp, Homo sapiens
gtctatttggagacttgtcaaaggatagaccctaattataaaatggaaagg

SEQ ID NO: 7887 - DNA, 33 bp, Homo sapiens
gtaagagctttttgtcgactgtgactccagaaa

SEQ ID NO: 7888 - DNA, 33 bp, Homo sapiens
tttctgactcatatgcgagacttacccgagatg

SEQ ID NO: 7889 - DNA, 33 bp, Homo sapiens
ccgcgcttggaagaagtctgagtagttttttac

SEQ ID NO: 7890 - DNA, 33 bp, Homo sapiens
ttcattttgtagagaaggaatcagaagcaagct

SEQ ID NO: 7891 - DNA, 33 bp, Homo sapiens
ccttctctttgaactatatggctttgaagaatt

SEQ ID NO: 7892 - DNA, 51 bp, Homo sapiens
caacaattcatgttggattacctatgcaggctgacattttcaatctcaact

SEQ ID NO: 7893 - DNA, 33 bp, Homo sapiens
tcttgcttaatgcacctgaccagtgacttattt

SEQ ID NO: 7894 - DNA, 33 bp, Homo sapiens
agacatctctggagcctgaacaatccatttact

SEQ ID NO: 7895 - DNA, 51 bp, Homo sapiens
ccaaaacaagcttacatctggtgtaggaaagttttaatattaaattataat

SEQ ID NO: 7896 - DNA, 51 bp, Homo sapiens
aacccaagaaatgtaatgcaaacaatttgggcctgtgtcacttagtcttct

SEQ ID NO: 7897 - DNA, 51 bp, Homo sapiens
tctgttttaatattgttccatttcctttctctttgccctgaaggcaggctt

SEQ ID NO: 7898 - DNA, 51 bp, Homo sapiens
ttacaatctataaacctataaagcactgaaagaaaaataaacttctttatt

SEQ ID NO: 7899 - DNA, 33 bp, Homo sapiens
ggagcaaagcacaacataggcttgtaatagcta

SEQ ID NO: 7900 - DNA, 33 bp, Homo sapiens
gaaaattggagaaagaccaaattagagtatatt

SEQ ID NO: 7901 - DNA, 33 bp, Homo sapiens
cattgttcttctcttatctccttgagttcaatt

SEQ ID NO: 7902 - DNA, 33 bp, Homo sapiens
gtaacttttgagggaagaggaattggcattttc

SEQ ID NO: 7903 - DNA, 33 bp, Homo sapiens
ataaaatatcttacactgaaattgaggaaataa

SEQ ID NO: 7904 - DNA, 33 bp, Homo sapiens
cacccacaaggtaaccgaatcacggagccaggt

SEQ ID NO: 7905 - DNA, 33 bp, Homo sapiens
catttaaattgagcaagtgctagcctttcacat

SEQ ID NO: 7906 - DNA, 33 bp, Homo sapiens
ttccctttaatgcttagaaagggtaacgtggta

SEQ ID NO: 7907 - DNA, 33 bp, Homo sapiens
catcatataccactggcaaaattgtcaaatagt

SEQ ID NO: 7908 - DNA, 33 bp, Homo sapiens
tgagtccatgaagtaatactcatccactatcgg

SEQ ID NO: 7909 - DNA, 33 bp, Homo sapiens
tctagatgtctgtaaatgccatcaatacagtca

SEQ ID NO: 7910 - DNA, 51 bp, Homo sapiens
gccataaaatgagagagtgagaaaataatatttgttacatttgatattgca

SEQ ID NO: 7911 - DNA, 33 bp, Homo sapiens
ggtttagaagatgatagagcacagactagagtc

SEQ ID NO: 7912 - DNA, 33 bp, Homo sapiens
catataccaatggtgatgtgatgtaatgcgaga

SEQ ID NO: 7913 - DNA, 33 bp, Homo sapiens
ccttgtgtcactgttcgccttagaatttcaagc

SEQ ID NO: 7914 - DNA, 33 bp, Homo sapiens
aaacatctctctacgttaaggtaatattctgca

SEQ ID NO: 7915 - DNA, 33 bp, Homo sapiens
ctcatatatcagaatctccatggtttttaattg

SEQ ID NO: 7916 - DNA, 33 bp, Homo sapiens
aggctaaaatcctgactatgacaaaaataaatt

SEQ ID NO: 7917 - DNA, 51 bp, Homo sapiens
caagaaaataaatctaacccagatagataatgcttttaactatatctgatt

SEQ ID NO: 7918 - DNA, 33 bp, Homo sapiens
accacatccaaaccaatagccagttatcatacc

SEQ ID NO: 7919 - DNA, 33 bp, Homo sapiens
tgatccgcccttaagctcacaccaccttaatat

SEQ ID NO: 7920 - DNA, 33 bp, Homo sapiens
ttctttctttccaatagagctgcagcagcaccg

SEQ ID NO: 7921 - DNA, 33 bp, Homo sapiens
atttatgtaactcttaggcccaagaatgctatt

SEQ ID NO: 7922 - DNA, 33 bp, Homo sapiens
ccgatggtgacagctataacctaacatgaaaat

SEQ ID NO: 7923 - DNA, 33 bp, Homo sapiens
ttttgaagttgcgatacactgtattatgatatg

SEQ ID NO: 7924 - DNA, 33 bp, Homo sapiens
atatttccttccttgagcctaattgcatatgcc

SEQ ID NO: 7925 - DNA, 33 bp, Homo sapiens
atgcttccgagtattggactaggtgtgcctggc

SEQ ID NO: 7926 - DNA, 33 bp, Homo sapiens
gtgcaactcaaaggaatattcagaaacatattg

SEQ ID NO: 7927 - DNA, 51 bp, Homo sapiens
aatataggaaattgactaatagcacgaacatcaaatcagagtctcaaattg

SEQ ID NO: 7928 - DNA, 33 bp, Homo sapiens
aattactgtatatggacattttgcaagtttttc

SEQ ID NO: 7929 - DNA, 33 bp, Homo sapiens
tgatagagaatggaactgtgactaaagtaagat

SEQ ID NO: 7930 - DNA, 51 bp, Homo sapiens
atgatcttggattatgttcccttgaggtaaatcccactacaaagctgaatc

SEQ ID NO: 7931 - DNA, 33 bp, Homo sapiens
gattgcgttttagacatgtggcttgtggggatg

SEQ ID NO: 7932 - DNA, 51 bp, Homo sapiens
actatttttgcaatttactctcctctattgttatttaggcttacagaatgc

SEQ ID NO: 7933 - DNA, 33 bp, Homo sapiens
gttttccagactctaggacagtaatgcttaaat

SEQ ID NO: 7934 - DNA, 33 bp, Homo sapiens
taaacctactgaaaaatttgtcaaactctaggt

SEQ ID NO: 7935 - DNA, 33 bp, Homo sapiens
gtagcattggcataagtagctgaaaatgcattg

SEQ ID NO: 7936 - DNA, 33 bp, Homo sapiens
caggattcctttacccggcacactctaaactct

SEQ ID NO: 7937 - DNA, 33 bp, Homo sapiens
gcacagaaagaagaaagagcagtcataaaggaa

SEQ ID NO: 7938 - DNA, 33 bp, Homo sapiens
ctgcattatacgcatctaatggctcgagggata

SEQ ID NO: 7939 - DNA, 33 bp, Homo sapiens
catagtagaaaaaggatgttttaggacaggaga

SEQ ID NO: 7940 - DNA, 33 bp, Homo sapiens
cacgtttgtatggtccggaaaactgagagcagc

SEQ ID NO: 7941 - DNA, 33 bp, Homo sapiens
tccttgacatctttaactagtaagccagcaggt

SEQ ID NO: 7942 - DNA, 33 bp, Homo sapiens
agagagataacaccatgacttaaattcacacca

SEQ ID NO: 7943 - DNA, 33 bp, Homo sapiens
tccttgagtcacttgatgaagctctacttttaa

SEQ ID NO: 7944 - DNA, 33 bp, Homo sapiens
gttccaagaattatgtgaagtactgaaataaaa

SEQ ID NO: 7945 - DNA, 33 bp, Homo sapiens
gtcaatagagtggccatagtaattcttccaaaa

SEQ ID NO: 7946 - DNA, 33 bp, Homo sapiens
cactaatgttatggtacctttgtaggctcctga

SEQ ID NO: 7947 - DNA, 33 bp, Homo sapiens
tggtatcaaagttttatcttccattgaaatcca

SEQ ID NO: 7948 - DNA, 51 bp, Homo sapiens
atctgctaggttgtggcttatttcatcactgtactgaatctcactacttta

SEQ ID NO: 7949 - DNA, 51 bp, Homo sapiens
tcagagtttaggagcaggagatatatgatgtgctatttttagggtcataga

SEQ ID NO: 7950 - DNA, 33 bp, Homo sapiens
gtgatcattaatgccagaaacaaacatactgtc

SEQ ID NO: 7951 - DNA, 33 bp, Homo sapiens
cttcttcatgtaatccggaagttagagaaagag

SEQ ID NO: 7952 - DNA, 33 bp, Homo sapiens
ttttgagattggctgcgctaggttaatcttggg

SEQ ID NO: 7953 - DNA, 33 bp, Homo sapiens
aggaagctgggaaacattaggcagaaaaatgaa

SEQ ID NO: 7954 - DNA, 51 bp, Homo sapiens
taaagccagaaaatagagataagactgaggaaatataagaattatgtaacc

SEQ ID NO: 7955 - DNA, 33 bp, Homo sapiens
gaagctgtttgtatcacgacggcaaatccctca

SEQ ID NO: 7956 - DNA, 33 bp, Homo sapiens
gcatgaaaggtactgagaaaagtgctgatattg

SEQ ID NO: 7957 - DNA, 33 bp, Homo sapiens
tttgaacatgaacatatagtaatggaagctgcc

SEQ ID NO: 7958 - DNA, 33 bp, Homo sapiens
cagcagatttctaaaatgcactcgtcttgcctt

SEQ ID NO: 7959 - DNA, 33 bp, Homo sapiens
aagaaaccacagactatgatttgcagaaaaaat

SEQ ID NO: 7960 - DNA, 33 bp, Homo sapiens
tagaattaacaggtaaggttaaaataatctgat

SEQ ID NO: 7961 - DNA, 33 bp, Homo sapiens
ctttttcatctgaatctcgtcaacatcaactcc

SEQ ID NO: 7962 - DNA, 33 bp, Homo sapiens
taatggggggattatatggaattttagaagtta

SEQ ID NO: 7963 - DNA, 33 bp, Homo sapiens
gagccaggaacaagtatgaaggatgaaaaagtt

SEQ ID NO: 7964 - DNA, 33 bp, Homo sapiens
cccatgctgtgtaaggtatcctctgttaaagct

SEQ ID NO: 7965 - DNA, 33 bp, Homo sapiens
aactaagtgtcaaacagctgaggctccatagat

SEQ ID NO: 7966 - DNA, 33 bp, Homo sapiens
atgtagatatagaaaagaggctaagaacataga

SEQ ID NO: 7967 - DNA, 33 bp, Homo sapiens
caattatatgctgacagtggcaaaatggatgcc

SEQ ID NO: 7968 - DNA, 51 bp, Homo sapiens
taccagactggcacaggagaagaaatgtagtgaatactaatttgaataccg

SEQ ID NO: 7969 - DNA, 51 bp, Homo sapiens
gtacacagacatggtggagcagtcagaatacatacatttaagttctccctc

SEQ ID NO: 7970 - DNA, 33 bp, Homo sapiens
cttctcaaataatgtacgagatgtcagaattat

SEQ ID NO: 7971 - DNA, 51 bp, Homo sapiens
gagaagaaaaatgagtatgaagtcagtaggtgagaaagaaggctgcagcac

SEQ ID NO: 7972 - DNA, 33 bp, Homo sapiens
attttgtttaacctaatgttctccaggctcatt

SEQ ID NO: 7973 - DNA, 33 bp, Homo sapiens
aactaccactcactgcgataaatagatttccaa

SEQ ID NO: 7974 - DNA, 33 bp, Homo sapiens
cacatatgcagtaaaatttaggctgtgtggtga

SEQ ID NO: 7975 - DNA, 33 bp, Homo sapiens
ccaatgaaacaggatagaaaggccagaaataag

SEQ ID NO: 7976 - DNA, 33 bp, Homo sapiens
aggcccacatgaacaacaatgttatagcaatat

SEQ ID NO: 7977 - DNA, 33 bp, Homo sapiens
cagagctgaacattgaggttgattaccaataca

SEQ ID NO: 7978 - DNA, 33 bp, Homo sapiens
gtgagccaacattcaacaaggtcatgctagttc

SEQ ID NO: 7979 - DNA, 51 bp, Homo sapiens
tgatgatttcactcttctaaccctgtaaaggacttgcgcatactatcccaa

SEQ ID NO: 7980 - DNA, 33 bp, Homo sapiens
agtttagaagttgccactctgttctaaaaaata

SEQ ID NO: 7981 - DNA, 33 bp, Homo sapiens
cttgcttctccaaggctgcattgacattgcaag

SEQ ID NO: 7982 - DNA, 33 bp, Homo sapiens
gatgtgcagaactttataatgtattgaaatcct

SEQ ID NO: 7983 - DNA, 51 bp, Homo sapiens
aactgaggcagaagaaaattacatcggatggaaacttggatctagacagat

SEQ ID NO: 7984 - DNA, 51 bp, Homo sapiens
tctctgcctgtcctctttgtctgcattgatttcttgggtctcagtgacaac

SEQ ID NO: 7985 - DNA, 33 bp, Homo sapiens
tcagggaccaaggcaggatctctttttgtcttt

SEQ ID NO: 7986 - DNA, 33 bp, Homo sapiens
aagactacattcctccgctcctcttgcaaaggg

SEQ ID NO: 7987 - DNA, 33 bp, Homo sapiens
aaggagaaaagtggcagcacatatctcttcata

SEQ ID NO: 7988 - DNA, 33 bp, Homo sapiens
gccaaatgatgagtaatataggtcaggagacaa

SEQ ID NO: 7989 - DNA, 33 bp, Homo sapiens
atcttaaaatgaacaagtcacctggataaacat

SEQ ID NO: 7990 - DNA, 51 bp, Homo sapiens
ttcccaactactcttcacaggcaccgaagattctaaatcaagccaatctcc

SEQ ID NO: 7991 - DNA, 51 bp, Homo sapiens
atggaatactatttagtcataaaaacctatgaaatcatatcatttgtagca

SEQ ID NO: 7992 - DNA, 33 bp, Homo sapiens
ctgctgtctatttctatgtaatcctctgcttag

SEQ ID NO: 7993 - DNA, 33 bp, Homo sapiens
ttaaccatcagctctgtaattatagagtaagga

SEQ ID NO: 7994 - DNA, 51 bp, Homo sapiens
ctacttaatacctgatcacttcaaagtagcgagttgtagaaaactgtttgt

SEQ ID NO: 7995 - DNA, 33 bp, Homo sapiens
atgtactccataaatatatacctacagtgtacc

SEQ ID NO: 7996 - DNA, 33 bp, Homo sapiens
aggtatctccgaaacattgtggatctagagatg

SEQ ID NO: 7997 - DNA, 33 bp, Homo sapiens
caaattttctgggttatatggttagtgtatgtt

SEQ ID NO: 7998 - DNA, 33 bp, Homo sapiens
tgtagccaggccaagatgaagctcagtaagtca

SEQ ID NO: 7999 - DNA, 33 bp, Homo sapiens
tccttatgagccttgcggacaaagaggtatcct

SEQ ID NO: 8000 - DNA, 51 bp, Homo sapiens
ttttaaaatgtcatctttatataacgagggaaatttgacaccactaagttt

SEQ ID NO: 8001 - DNA, 33 bp, Homo sapiens
agttctaaaaatcatacggcagaaattgaaaaa

SEQ ID NO: 8002 - DNA, 33 bp, Homo sapiens
gatagtttggacttggcaaaggtacactaaaga

SEQ ID NO: 8003 - DNA, 33 bp, Homo sapiens
tgataaaaggcagtgctaaagataaaaagggaa

SEQ ID NO: 8004 - DNA, 33 bp, Homo sapiens
tatttcacactaactataattgctaacattaaa

SEQ ID NO: 8005 - DNA, 33 bp, Homo sapiens
tctcaattgttattaggcctgcccttgccccag

SEQ ID NO: 8006 - DNA, 33 bp, Homo sapiens
agacctattctgcatggacccttatgatcttaa

SEQ ID NO: 8007 - DNA, 33 bp, Homo sapiens
acttacagccttccatcaattctataaaccctg

SEQ ID NO: 8008 - DNA, 33 bp, Homo sapiens
tgtggttataccactgtaaacatcttgtagttt

SEQ ID NO: 8009 - DNA, 51 bp, Homo sapiens
ttcttctaaaacacagcaccagtaccgaactgtttcttcaagtttaggact

SEQ ID NO: 8010 - DNA, 33 bp, Homo sapiens
agaaaagggcctaggatgaagatacaaggcttt

SEQ ID NO: 8011 - DNA, 33 bp, Homo sapiens
tttttcttatcctacatgtctaatccatcacca

SEQ ID NO: 8012 - DNA, 33 bp, Homo sapiens
tatatgccatatatcatattcctttcgcaactt

SEQ ID NO: 8013 - DNA, 33 bp, Homo sapiens
tccccataaggtctcattaaagctgaacctcct

SEQ ID NO: 8014 - DNA, 51 bp, Homo sapiens
aaaggcactaagaagaaaggacggagtatattacacctctgtcagacttga

SEQ ID NO: 8015 - DNA, 33 bp, Homo sapiens
tctgctgaagtgtgaattgtgaaggcactgccc

SEQ ID NO: 8016 - DNA, 33 bp, Homo sapiens
attgattcaagaaatatgtagaaggtaaaatag

SEQ ID NO: 8017 - DNA, 51 bp, Homo sapiens
tattgggatctatacagtgtctacatatttgatgataatgcctttttctct

SEQ ID NO: 8018 - DNA, 33 bp, Homo sapiens
attggatctgccgggtgaaatggcccaagtggc

SEQ ID NO: 8019 - DNA, 51 bp, Homo sapiens
tataaatacccagtttctcaaatacgcttggaatcagctttctatattact

SEQ ID NO: 8020 - DNA, 33 bp, Homo sapiens
caaaatataagtggacgcttctcctgaggcttt

SEQ ID NO: 8021 - DNA, 33 bp, Homo sapiens
aggtctcttttggggatgtgtgttttgaggcaa

SEQ ID NO: 8022 - DNA, 33 bp, Homo sapiens
agaaacttcttcacaagtagtcatcaaaacctg

SEQ ID NO: 8023 - DNA, 33 bp, Homo sapiens
ggtacacaggataacatagatttccaaaaagct

SEQ ID NO: 8024 - DNA, 33 bp, Homo sapiens
ggggagagtaagctgatgggatacctctcattt

SEQ ID NO: 8025 - DNA, 33 bp, Homo sapiens
gaagcatgcatgtacagtactaaaaactttttc

SEQ ID NO: 8026 - DNA, 51 bp, Homo sapiens
tgtattgatacataatcaatgtccagtaaattacacatatttaaactacag

SEQ ID NO: 8027 - DNA, 51 bp, Homo sapiens
tgttataactcataaaccagccctgtattaaataatgttataatcctactg

SEQ ID NO: 8028 - DNA, 33 bp, Homo sapiens
taactggcttcagaaagagcatagtgttgggca

SEQ ID NO: 8029 - DNA, 33 bp, Homo sapiens
tggcatctgcaggtaattggagcttttggtact

SEQ ID NO: 8030 - DNA, 33 bp, Homo sapiens
gtggcagtaagctggatgggagaaccacaacca

SEQ ID NO: 8031 - DNA, 33 bp, Homo sapiens
tagatagcatgctccagtaggacagggcccagg

SEQ ID NO: 8032 - DNA, 33 bp, Homo sapiens
ttttggcttcggtgaagaaaaatcgcatatatc

SEQ ID NO: 8033 - DNA, 51 bp, Homo sapiens
gacacaaaatcctctgtgcctaagcgactatgaaatagttgcacataattt

SEQ ID NO: 8034 - DNA, 33 bp, Homo sapiens
aactagcattcagcccggcaatcacattactgg

SEQ ID NO: 8035 - DNA, 33 bp, Homo sapiens
gctgaaaacagcacactcctatcttcccaaatt

SEQ ID NO: 8036 - DNA, 33 bp, Homo sapiens
agtagatgccaatatcgcatataccacataaat

SEQ ID NO: 8037 - DNA, 33 bp, Homo sapiens
gtatttcgtaccacaatggctgttattcaccat

SEQ ID NO: 8038 - DNA, 33 bp, Homo sapiens
acacacacactaaggacgcctagataaaatatg

SEQ ID NO: 8039 - DNA, 33 bp, Homo sapiens
agtctactctggtctcgatgagagtgaagtccc

SEQ ID NO: 8040 - DNA, 33 bp, Homo sapiens
tgtttattaaatgctatctatgtcacaggccat

SEQ ID NO: 8041 - DNA, 33 bp, Homo sapiens
tacttctgttcaacctgagccagaatatatagc

SEQ ID NO: 8042 - DNA, 33 bp, Homo sapiens
ccttctatgttacacatgaatgagaatataaag

SEQ ID NO: 8043 - DNA, 51 bp, Homo sapiens
gtataatattctgtcttattctactgactctctcagattataatcaaaata

SEQ ID NO: 8044 - DNA, 33 bp, Homo sapiens
ttacagaatcaatgcagtccttctcagaatacc

SEQ ID NO: 8045 - DNA, 33 bp, Homo sapiens
atcacatgtacatggataggaaaactttttgtt

SEQ ID NO: 8046 - DNA, 33 bp, Homo sapiens
atttggtcagggaggagtactgttcaggaatac

SEQ ID NO: 8047 - DNA, 33 bp, Homo sapiens
catgccaactaaattgtagtgtatgggagtgag

SEQ ID NO: 8048 - DNA, 33 bp, Homo sapiens
gtaagcataggcagaagccatagatttaggcat

SEQ ID NO: 8049 - DNA, 33 bp, Homo sapiens
gtttgggaaacagacataagaaacacataaacc

SEQ ID NO: 8050 - DNA, 33 bp, Homo sapiens
tgatctctgatttccattgatctgttaggtgaa

SEQ ID NO: 8051 - DNA, 33 bp, Homo sapiens
gacaacagcatctcacggcatctctaaaagaga

SEQ ID NO: 8052 - DNA, 33 bp, Homo sapiens
ttggacagtcatataacctgattcaaactagag

SEQ ID NO: 8053 - DNA, 33 bp, Homo sapiens
ggcaaaacagaaataacctgatagctgcctttt

SEQ ID NO: 8054 - DNA, 33 bp, Homo sapiens
tctacagaattctccatgcaataaccacaaaat

SEQ ID NO: 8055 - DNA, 33 bp, Homo sapiens
agtcccagatttagtggagatgacagccctctt

SEQ ID NO: 8056 - DNA, 51 bp, Homo sapiens
tttgtatacatttgtatctccagcatccaacagaatattcgcatatagcag

SEQ ID NO: 8057 - DNA, 51 bp, Homo sapiens
tttttttttttttttttggtcaacataatctgtcttgtgtcttaacatttc

SEQ ID NO: 8058 - DNA, 33 bp, Homo sapiens
agtggaaccccagcaatatggagatttgaggtc

SEQ ID NO: 8059 - DNA, 33 bp, Homo sapiens
tgtgggagctataaagtctaaaattcatagcct

SEQ ID NO: 8060 - DNA, 33 bp, Homo sapiens
ccatgtctttacaaaatccttctcaccttgaaa

SEQ ID NO: 8061 - DNA, 33 bp, Homo sapiens
ccccatggagaagtagtattaggcattttcaaa

SEQ ID NO: 8062 - DNA, 51 bp, Homo sapiens
cttcaggcctagctaactagactactatgttcaatactggagaaggaagat

SEQ ID NO: 8063 - DNA, 33 bp, Homo sapiens
tggatatcatgtaagtgacaggaatagtcatat

SEQ ID NO: 8064 - DNA, 33 bp, Homo sapiens
atgcaacttttgtggagtatctgtagaaatttc

SEQ ID NO: 8065 - DNA, 33 bp, Homo sapiens
aaattgtgaaagaaaagtccttgaaactctgac

SEQ ID NO: 8066 - DNA, 33 bp, Homo sapiens
gctgcaagtctatggacgtatttcaaagagaat

SEQ ID NO: 8067 - DNA, 33 bp, Homo sapiens
tgtggaacaatatcacgcatattggatgacttc

SEQ ID NO: 8068 - DNA, 33 bp, Homo sapiens
aaaaggcaacagcatatacagaatcaaaatatc

SEQ ID NO: 8069 - DNA, 33 bp, Homo sapiens
tcagccttatgagttataaagccattggataat

SEQ ID NO: 8070 - DNA, 33 bp, Homo sapiens
ttttaaaaactacagatgtcagcatgtttaaac

SEQ ID NO: 8071 - DNA, 33 bp, Homo sapiens
agactcaaactattgatgcatacttggatggat

SEQ ID NO: 8072 - DNA, 33 bp, Homo sapiens
atcatgttttctgatagctatgtattgaattaa

SEQ ID NO: 8073 - DNA, 33 bp, Homo sapiens
agcagtgaaggatgcataggattaaaataggta

SEQ ID NO: 8074 - DNA, 33 bp, Homo sapiens
tgcacacagagaaagagaggctgttttcctctt

SEQ ID NO: 8075 - DNA, 33 bp, Homo sapiens
gtcaaagttttacttatgttcatcacttcttca

SEQ ID NO: 8076 - DNA, 33 bp, Homo sapiens
ttggggatataaagaggacgctcatggttttgt

SEQ ID NO: 8077 - DNA, 33 bp, Homo sapiens
atgtcagctagtcacctcctatgggaccttgtg

SEQ ID NO: 8078 - DNA, 33 bp, Homo sapiens
cataattctttctccatatctgagggtaaacaa

SEQ ID NO: 8079 - DNA, 33 bp, Homo sapiens
agtcagaaagccaaagtacactatggagaaata

SEQ ID NO: 8080 - DNA, 33 bp, Homo sapiens
catgaaccccatatgtgaatgcggcagcaagca

SEQ ID NO: 8081 - DNA, 33 bp, Homo sapiens
gtttaatctttatgtggaaggatagggactgtc

SEQ ID NO: 8082 - DNA, 33 bp, Homo sapiens
attgatccatctggaatctttaaacaatgcatc

SEQ ID NO: 8083 - DNA, 33 bp, Homo sapiens
acatgcatgattctaggaactggtgacagaatg

SEQ ID NO: 8084 - DNA, 33 bp, Homo sapiens
tggttaaaatagatacgaacagattgatagaaa

SEQ ID NO: 8085 - DNA, 33 bp, Homo sapiens
tcacacaaatccaatgtcacacaaaagtagttt

SEQ ID NO: 8086 - DNA, 33 bp, Homo sapiens
aaatcacgcttcaccataggtattttttgtttg

SEQ ID NO: 8087 - DNA, 33 bp, Homo sapiens
gtatgccaccgaattatattcagtaacaaagcc

SEQ ID NO: 8088 - DNA, 33 bp, Homo sapiens
agctttaccctcaaggccataaattgctatcac

SEQ ID NO: 8089 - DNA, 33 bp, Homo sapiens
tgggagggttaactactacctgaaatgctaaga

SEQ ID NO: 8090 - DNA, 33 bp, Homo sapiens
gtatcaaggtttatacgatcacaactaacttag

SEQ ID NO: 8091 - DNA, 33 bp, Homo sapiens
acatacgctagtttgcgattcaaatgcttttca

SEQ ID NO: 8092 - DNA, 33 bp, Homo sapiens
caattctaacgcctactgaagctgtgacttgca

SEQ ID NO: 8093 - DNA, 33 bp, Homo sapiens
tctcatttctggctactggttgagagagaaatg

SEQ ID NO: 8094 - DNA, 33 bp, Homo sapiens
atctgattacagctccgctcattgtgattatta

SEQ ID NO: 8095 - DNA, 51 bp, Homo sapiens
ggcaatatcatcatgcttaaccgacgagatgaaagtgttctcgatccccat

SEQ ID NO: 8096 - DNA, 51 bp, Homo sapiens
agaagcttctgtttctgctatggccgctgcaagtagggaaaatcactgaca

SEQ ID NO: 8097 - DNA, 33 bp, Homo sapiens
gaagcttaggggcaccgataaaaactatagctg

SEQ ID NO: 8098 - DNA, 33 bp, Homo sapiens
catttcttgcccatcagaaccttttgcagggca

SEQ ID NO: 8099 - DNA, 33 bp, Homo sapiens
tttcctcatccggaatgaatagtgacaatatag

SEQ ID NO: 8100 - DNA, 33 bp, Homo sapiens
tcttgtggagggagtcgagggagcgaaagagtg

SEQ ID NO: 8101 - DNA, 33 bp, Homo sapiens
tcctccctggaataaagtgaacacttggttatt

SEQ ID NO: 8102 - DNA, 51 bp, Homo sapiens
aacttccagtaagtagagcctagcatagaagttacagattagagctgcatt

SEQ ID NO: 8103 - DNA, 51 bp, Homo sapiens
gatgcactgtgtccaaagacatgccgagcttcagaggcaaacacctgtcca

SEQ ID NO: 8104 - DNA, 33 bp, Homo sapiens
ccttccctcctttttctctgagcatttaattca

SEQ ID NO: 8105 - DNA, 33 bp, Homo sapiens
ctctgtcctggaataatcctgcaattaggaagt

SEQ ID NO: 8106 - DNA, 33 bp, Homo sapiens
acaccacataactaaatgaattgttgtctacct

SEQ ID NO: 8107 - DNA, 33 bp, Homo sapiens
agtagaccgtttaatagctcaggtggactatta

SEQ ID NO: 8108 - DNA, 33 bp, Homo sapiens
agtttattctgccttagatacttgtcctcaaga

SEQ ID NO: 8109 - DNA, 51 bp, Homo sapiens
ttctagatgcagtgaataatcagaagaatcccctttctcacatagctcaca

SEQ ID NO: 8110 - DNA, 33 bp, Homo sapiens
atagaatgaagcaaaattggtggggtgcagatt

SEQ ID NO: 8111 - DNA, 33 bp, Homo sapiens
aacgggatcacatcaagttaaaaagaaacaatc

SEQ ID NO: 8112 - DNA, 33 bp, Homo sapiens
attcccaaatgaagtatgaatgttggcagggga

SEQ ID NO: 8113 - DNA, 33 bp, Homo sapiens
tgttttatagatgccagaaatcagggaaccata

SEQ ID NO: 8114 - DNA, 33 bp, Homo sapiens
aatccagagaatagaatgaaatatcaggtgtca

SEQ ID NO: 8115 - DNA, 33 bp, Homo sapiens
gaaaactaacacagagccctttccaaatcgcac

SEQ ID NO: 8116 - DNA, 33 bp, Homo sapiens
cttccactgttcataataatcacccagggacct

SEQ ID NO: 8117 - DNA, 33 bp, Homo sapiens
tacagataatttcttagaacaacgtatggcatt

SEQ ID NO: 8118 - DNA, 33 bp, Homo sapiens
gcctgcatagtataagtaggaaaattgaaatga

SEQ ID NO: 8119 - DNA, 33 bp, Homo sapiens
cttgactaatagccaaggattggtcaataactc

SEQ ID NO: 8120 - DNA, 33 bp, Homo sapiens
accttagaatgcctcatacaagaacaacagcca

SEQ ID NO: 8121 - DNA, 33 bp, Homo sapiens
tctgctctcttgaacacctgcttatctgtcttg

SEQ ID NO: 8122 - DNA, 33 bp, Homo sapiens
cacagaggatttctcactaggttcttacagtat

SEQ ID NO: 8123 - DNA, 33 bp, Homo sapiens
aggtgaaatcgtgagatggttgagatagcccag

SEQ ID NO: 8124 - DNA, 33 bp, Homo sapiens
gtgaatgaggccattcggaaaagaccacaaagt

SEQ ID NO: 8125 - DNA, 33 bp, Homo sapiens
ctaggcacaaaaaaaattttcagatgtgaaggt

SEQ ID NO: 8126 - DNA, 33 bp, Homo sapiens
aagtactcatttagaatgctatccatctgcctt

SEQ ID NO: 8127 - DNA, 33 bp, Homo sapiens
caaaatgctaagacgagtccctggtatattaac

SEQ ID NO: 8128 - DNA, 33 bp, Homo sapiens
ttataaagagacctgagaaattcagagccacag

SEQ ID NO: 8129 - DNA, 33 bp, Homo sapiens
acatgaagaaaaactctacgtgttgtaaatcta

SEQ ID NO: 8130 - DNA, 33 bp, Homo sapiens
ccgcactgcatttcccgaaaacacccctcaaca

SEQ ID NO: 8131 - DNA, 33 bp, Homo sapiens
tacatatacaccatgggagactatacagccata

SEQ ID NO: 8132 - DNA, 51 bp, Homo sapiens
tcacttacctactatcaagatttaagaaatgtcaaaatgttgccatatttg

SEQ ID NO: 8133 - DNA, 51 bp, Homo sapiens
tccgttataatataatgatcagatagctaagtataatattatatggctaag

SEQ ID NO: 8134 - DNA, 33 bp, Homo sapiens
cctttacaacattgaattagaagtgagtccctg

SEQ ID NO: 8135 - DNA, 33 bp, Homo sapiens
tgctaagctagttaccgctccactatttgcttc

SEQ ID NO: 8136 - DNA, 33 bp, Homo sapiens
aacaattggcattgtctcatcttttccatttct

SEQ ID NO: 8137 - DNA, 51 bp, Homo sapiens
taaagatgagaactctttactggaataaattagcacataaactagaagatg

SEQ ID NO: 8138 - DNA, 51 bp, Homo sapiens
ttatgtcacaattcagtttgcaaaagcttcaatcatctaactgtctcatgg

SEQ ID NO: 8139 - DNA, 33 bp, Homo sapiens
ttagaaatgacctaaatgtcgaatcataagggg

SEQ ID NO: 8140 - DNA, 33 bp, Homo sapiens
caactgaactctttgacctctcagtggtaaaat

SEQ ID NO: 8141 - DNA, 33 bp, Homo sapiens
ttcttcatcagtaaaatagaagtgttgatacca

SEQ ID NO: 8142 - DNA, 33 bp, Homo sapiens
ctaggagactatttggtatcagactttacctgg

SEQ ID NO: 8143 - DNA, 33 bp, Homo sapiens
gtggtggggtagtgaacctctggagtcaatatc

SEQ ID NO: 8144 - DNA, 33 bp, Homo sapiens
gtcttctgtcattgcatacccgagtggcttcat

SEQ ID NO: 8145 - DNA, 33 bp, Homo sapiens
tgcaatttgaaagctatgtgtatcaattgactt

SEQ ID NO: 8146 - DNA, 51 bp, Homo sapiens
gaaagttactgaatacttattctgatcttgtacatatcatatgctctagca

SEQ ID NO: 8147 - DNA, 51 bp, Homo sapiens
taaacccgaggactactttgcacactgaaatttgcaggaaaatgagaccct

SEQ ID NO: 8148 - DNA, 33 bp, Homo sapiens
tgtagagtcctcttactgagtgaacactgagtg

SEQ ID NO: 8149 - DNA, 33 bp, Homo sapiens
acaaatgtactgaacatgctaaggtgaaatgat

SEQ ID NO: 8150 - DNA, 33 bp, Homo sapiens
cagaactagattttccgctgtcattcattatgg

SEQ ID NO: 8151 - DNA, 33 bp, Homo sapiens
gatatttcaaactcccgaagtccaaagcaggct

SEQ ID NO: 8152 - DNA, 33 bp, Homo sapiens
ttgacctcttacccaagtcctagaacaaagtca

SEQ ID NO: 8153 - DNA, 33 bp, Homo sapiens
gttgctctttttgtgatcttctacacaacacag

SEQ ID NO: 8154 - DNA, 33 bp, Homo sapiens
ctcataattgtagccatgttaaaaactaaaata

SEQ ID NO: 8155 - DNA, 33 bp, Homo sapiens
gaagaaagaagtcaagtagtctgtgagttaaac

SEQ ID NO: 8156 - DNA, 51 bp, Homo sapiens
cacatttctgcttaactttctgcagtagagacaagagatttgatgtctgga

SEQ ID NO: 8157 - DNA, 33 bp, Homo sapiens
atactagaggtacaaatggtgttatgatgtctt

SEQ ID NO: 8158 - DNA, 33 bp, Homo sapiens
aatggaatatgacttatcaatgtaaagaaataa

SEQ ID NO: 8159 - DNA, 51 bp, Homo sapiens
caatattgaacagtcagagaaaagacgagtaaccagcaaaggaggtctatc

SEQ ID NO: 8160 - DNA, 51 bp, Homo sapiens
gaaagaaagaaaagaagacagagaagttaagatgttagagaaagaagcagc

SEQ ID NO: 8161 - DNA, 33 bp, Homo sapiens
ccaacttcatctagccgcatgaacactgcatca

SEQ ID NO: 8162 - DNA, 33 bp, Homo sapiens
tgtttttattgctgaatgaagctagaaaagaga

SEQ ID NO: 8163 - DNA, 33 bp, Homo sapiens
atcactcattaacctcgctagagcaacacaacc

SEQ ID NO: 8164 - DNA, 33 bp, Homo sapiens
ctgatatattgctttaggggagttgcttaaaat

SEQ ID NO: 8165 - DNA, 33 bp, Homo sapiens
atagaggcatagataatctgagtcaggaataaa

SEQ ID NO: 8166 - DNA, 33 bp, Homo sapiens
gcaagtaaataaaaccggagatgatggtgcaat

SEQ ID NO: 8167 - DNA, 33 bp, Homo sapiens
ttgtacttctcttcaataggcctggatttcctg

SEQ ID NO: 8168 - DNA, 33 bp, Homo sapiens
ttgatgaagaaggacagtgaggtgagaagtgac

SEQ ID NO: 8169 - DNA, 33 bp, Homo sapiens
caggcactgcaggaacgaggcaaacttgtgcaa

SEQ ID NO: 8170 - DNA, 51 bp, Homo sapiens
tgttcctctagctggaattctctaattataccacttgaagcatggttggtt

SEQ ID NO: 8171 - DNA, 33 bp, Homo sapiens
aacttctaaatttcaagcaacttcattttagtg

SEQ ID NO: 8172 - DNA, 33 bp, Homo sapiens
ttaggggaaagccagataaggggcattcctgat

SEQ ID NO: 8173 - DNA, 33 bp, Homo sapiens
ccaaactctaaatcaaggaagtggcagtctttg

SEQ ID NO: 8174 - DNA, 33 bp, Homo sapiens
gctcatgtaccataacgatttctccctcttcct

SEQ ID NO: 8175 - DNA, 33 bp, Homo sapiens
gtaagcactattgttggatcaatcattaggaga

SEQ ID NO: 8176 - DNA, 33 bp, Homo sapiens
acttcttacaagaaactgcctcaagaaaacagt

SEQ ID NO: 8177 - DNA, 33 bp, Homo sapiens
gatcttacatcttgcagccttattaaatcactt

SEQ ID NO: 8178 - DNA, 33 bp, Homo sapiens
gagaagagagaaaagagtaaagaggacattgtc

SEQ ID NO: 8179 - DNA, 33 bp, Homo sapiens
ccaaatagcacaaaacgaataggtcatggtgaa

SEQ ID NO: 8180 - DNA, 33 bp, Homo sapiens
tcacagcctatgtttcgagccctatacattctg

SEQ ID NO: 8181 - DNA, 33 bp, Homo sapiens
tattcatagtgagaaagtaagacttcccaaaga

SEQ ID NO: 8182 - DNA, 33 bp, Homo sapiens
gccaagagcactttaagcccaacatgctcacac

SEQ ID NO: 8183 - DNA, 33 bp, Homo sapiens
tccaacttggcactactgtaaataatattgcaa

SEQ ID NO: 8184 - DNA, 33 bp, Homo sapiens
gcttggttgtagatgataggagccttgaatggc

SEQ ID NO: 8185 - DNA, 33 bp, Homo sapiens
ctcccacccggggccagtcatcttgaagaagtc

SEQ ID NO: 8186 - DNA, 33 bp, Homo sapiens
agacggtaagactggatgactgtggcctgagga

SEQ ID NO: 8187 - DNA, 33 bp, Homo sapiens
cctgagatgacggttataccctgagaagacggt

SEQ ID NO: 8188 - DNA, 33 bp, Homo sapiens
agaggccttatccttcgccacataacctggctc

SEQ ID NO: 8189 - DNA, 33 bp, Homo sapiens
gggagttatggtgccgcaagtgtctttttggaa

SEQ ID NO: 8190 - DNA, 33 bp, Homo sapiens
gctatgtaatgcgagcggagtaggagcatcacc

SEQ ID NO: 8191 - DNA, 33 bp, Homo sapiens
ctttcagacctgagaatccaacacaacgagtct

SEQ ID NO: 8192 - DNA, 33 bp, Homo sapiens
tttgctgctatggtaagtaataagtgacctgga

SEQ ID NO: 8193 - DNA, 33 bp, Homo sapiens
atctaccagttctgactatcattgtgtgtgtgt

SEQ ID NO: 8194 - DNA, 33 bp, Homo sapiens
taggcaaagaactctatcaaaggaacatctgtc

SEQ ID NO: 8195 - DNA, 33 bp, Homo sapiens
tcccaggtcctagaacggtgtctcgtccataac

SEQ ID NO: 8196 - DNA, 51 bp, Homo sapiens
ccattatgctgtagctccatttgagtagggaccttgtctgttcactactgt

SEQ ID NO: 8197 - DNA, 33 bp, Homo sapiens
tttatcttcagagaaagagtgatctggagaaaa

SEQ ID NO: 8198 - DNA, 33 bp, Homo sapiens
ttgcaaatacaaacaatgcagtaacaaacattg

SEQ ID NO: 8199 - DNA, 33 bp, Homo sapiens
gactgggacaagcgaatgctcgtaactagtttg

SEQ ID NO: 8200 - DNA, 33 bp, Homo sapiens
tattatgacacaaaacgacgacactcattagta

SEQ ID NO: 8201 - DNA, 33 bp, Homo sapiens
tgacaaaaattgaatatggactgtggattaggt

SEQ ID NO: 8202 - DNA, 33 bp, Homo sapiens
atgcaggtgaccttgagctctgattgttacgac

SEQ ID NO: 8203 - DNA, 33 bp, Homo sapiens
aattgtttcttgcccatgagaattctggaagtg

SEQ ID NO: 8204 - DNA, 33 bp, Homo sapiens
cctctcagttgggtccgcaacatagagagagca

SEQ ID NO: 8205 - DNA, 33 bp, Homo sapiens
ctcattcctttctcacgacaatcttataggtag

SEQ ID NO: 8206 - DNA, 33 bp, Homo sapiens
agcaggcgacaccgaggacactgtggtgggtgc

SEQ ID NO: 8207 - DNA, 51 bp, Homo sapiens
gaaagtaattactctgcaatatacgtggaatgtcttaaatgcttaaagcaa

SEQ ID NO: 8208 - DNA, 33 bp, Homo sapiens
gaggttgataacacgatgtgagtaatggctcta

SEQ ID NO: 8209 - DNA, 51 bp, Homo sapiens
aaaagtaagatattgtctagcaatggacacctgggttggttcccagctctg

SEQ ID NO: 8210 - DNA, 33 bp, Homo sapiens
tgcttaggcagagatatgattagatgagggcgt

SEQ ID NO: 8211 - DNA, 33 bp, Homo sapiens
tatgtatacgaaaaaacgtccagccctcgtgga

SEQ ID NO: 8212 - DNA, 33 bp, Homo sapiens
cacaaaaacaacataataaggagcagagaaaaa

SEQ ID NO: 8213 - DNA, 33 bp, Homo sapiens
tgcgtattcttcagcagtgactttttaaaatca

SEQ ID NO: 8214 - DNA, 33 bp, Homo sapiens
aattaagagaagtaactgtacccatcgtggtaa

SEQ ID NO: 8215 - DNA, 33 bp, Homo sapiens
atgaacagacagacactaaccagtatggaaaca

SEQ ID NO: 8216 - DNA, 33 bp, Homo sapiens
acatcattcaactctagcagaaaggcatgtcat

SEQ ID NO: 8217 - DNA, 33 bp, Homo sapiens
aatcatttcagtgagcgaagcactttttttctt

SEQ ID NO: 8218 - DNA, 33 bp, Homo sapiens
taaatcccatcattgaggcatccaattatgcta

SEQ ID NO: 8219 - DNA, 33 bp, Homo sapiens
tctaaatcattgaaaatagaagaagttcacagg

SEQ ID NO: 8220 - DNA, 33 bp, Homo sapiens
cttagtatttctatcatgcagatcctaccatac

SEQ ID NO: 8221 - DNA, 51 bp, Homo sapiens
atcaagtccagcaaagctgctagacgctttctggaaggaaatatggccagg

SEQ ID NO: 8222 - DNA, 51 bp, Homo sapiens
agcagagaaaaggggtaaagaaacattgggcacgatttagggtgggcactt

SEQ ID NO: 8223 - DNA, 33 bp, Homo sapiens
gtcagtaaagatgttatgattttgtgaaagata

SEQ ID NO: 8224 - DNA, 33 bp, Homo sapiens
aagcaggatggggaactgcttgaccttcatcca

SEQ ID NO: 8225 - DNA, 33 bp, Homo sapiens
tgcgacatatagttgagaagattgtaaatggtt

SEQ ID NO: 8226 - DNA, 33 bp, Homo sapiens
gtaggtctgctgtaactatccccctgtgtctga

SEQ ID NO: 8227 - DNA, 33 bp, Homo sapiens
agacagcagcgctccctacactctgttctctgc

SEQ ID NO: 8228 - DNA, 33 bp, Homo sapiens
acactcgtcaatagccgctaagaagcagccaga

SEQ ID NO: 8229 - DNA, 33 bp, Homo sapiens
tggctttaaggaaggacgggtggaagcgagtct

SEQ ID NO: 8230 - DNA, 33 bp, Homo sapiens
aggcagacagctaaaggccaaacaccaatgaca

SEQ ID NO: 8231 - DNA, 33 bp, Homo sapiens
ctagtttcttctttgcggacagggacccactga

SEQ ID NO: 8232 - DNA, 33 bp, Homo sapiens
ccatatggtaaatgtatgtttaatgtcaaaaga

SEQ ID NO: 8233 - DNA, 33 bp, Homo sapiens
tttgatatgaggataatgctgggctcataaaat

SEQ ID NO: 8234 - DNA, 33 bp, Homo sapiens
tcgcctagtggttatgcacttggcctcttgaat

SEQ ID NO: 8235 - DNA, 51 bp, Homo sapiens
ccgagctcacttctgtcagaggaattaggtttcacaagcccttttttatgt

SEQ ID NO: 8236 - DNA, 33 bp, Homo sapiens
aggagaaggttaagtatgttgcccaaaataact

SEQ ID NO: 8237 - DNA, 33 bp, Homo sapiens
gcttaaaatctgggccgcactcttggctctggg

SEQ ID NO: 8238 - DNA, 33 bp, Homo sapiens
agccacagcatataaagcgttcatgttgcctgg

SEQ ID NO: 8239 - DNA, 51 bp, Homo sapiens
ggggtaagggttttggtgagagctctatggacctatgacacaaattgctct

SEQ ID NO: 8240 - DNA, 33 bp, Homo sapiens
gatatatctgctcaaacactttcttatttttta

SEQ ID NO: 8241 - DNA, 33 bp, Homo sapiens
aagtccgggaacctcaggtgctcagtgttaacc

SEQ ID NO: 8242 - DNA, 33 bp, Homo sapiens
agatgcaatccacaggtatgctgatccgagccc

SEQ ID NO: 8243 - DNA, 33 bp, Homo sapiens
attcacacgaaagcacgaagatggtagatggca

SEQ ID NO: 8244 - DNA, 33 bp, Homo sapiens
aagatggaaatgacaatagtccctacctgatag

SEQ ID NO: 8245 - DNA, 33 bp, Homo sapiens
cttacaggtgataagatggctgccaagatttac

SEQ ID NO: 8246 - DNA, 33 bp, Homo sapiens
tctgagaaaagaaggatgttccatctgttactg

SEQ ID NO: 8247 - DNA, 33 bp, Homo sapiens
gttcttcccttactactgctctgaggaggagag

SEQ ID NO: 8248 - DNA, 51 bp, Homo sapiens
agaacagagaggatggcaaaaaggagccatgtattcaggcggaaaggccta

SEQ ID NO: 8249 - DNA, 33 bp, Homo sapiens
ctttggttgattaaaactttgatgcatgatata

SEQ ID NO: 8250 - DNA, 33 bp, Homo sapiens
attaacttcttcctcagctatgaccaccagaac

SEQ ID NO: 8251 - DNA, 33 bp, Homo sapiens
tgagagcaataggagcggcctgttccattagag

SEQ ID NO: 8252 - DNA, 33 bp, Homo sapiens
ctcaggagcacagtgaggattaaataatgtcta

SEQ ID NO: 8253 - DNA, 33 bp, Homo sapiens
tgcccagagtctatactacattccttcctgccc

SEQ ID NO: 8254 - DNA, 33 bp, Homo sapiens
ccacattcattcaacaggaaagtcgaatgttga

SEQ ID NO: 8255 - DNA, 33 bp, Homo sapiens
cagcagtcagtgtagagaccaggaataaaaatc

SEQ ID NO: 8256 - DNA, 33 bp, Homo sapiens
tcctcctcctatcttggagaaacctggtgttag

SEQ ID NO: 8257 - DNA, 33 bp, Homo sapiens
aaaatactacactcacgcattttaagttggata

SEQ ID NO: 8258 - DNA, 33 bp, Homo sapiens
gccctctgtaccacaagggttgaaagtgtataa

SEQ ID NO: 8259 - DNA, 33 bp, Homo sapiens
tgtggataccatcgtctctcattcttgcttgat

SEQ ID NO: 8260 - DNA, 33 bp, Homo sapiens
gttgaatgttattcaggcaccatttttttcctt

SEQ ID NO: 8261 - DNA, 33 bp, Homo sapiens
tgcaattctctagagatgtacgatgttgagcat

SEQ ID NO: 8262 - DNA, 33 bp, Homo sapiens
ggcccctgagcaaatgtagaaggttcagaagtt

SEQ ID NO: 8263 - DNA, 33 bp, Homo sapiens
gtctatcacagatacagtcgggcagtaacagca

SEQ ID NO: 8264 - DNA, 33 bp, Homo sapiens
tgcatttggttaaaagtctgctttggcattttt

SEQ ID NO: 8265 - DNA, 33 bp, Homo sapiens
aaggacataaggatagttgtcagtggtcctgaa

SEQ ID NO: 8266 - DNA, 33 bp, Homo sapiens
gaattggaagaatcacgggactctgattttaaa

SEQ ID NO: 8267 - DNA, 33 bp, Homo sapiens
ggtgctatgtatgcaatgtctgaagtgtgttta

SEQ ID NO: 8268 - DNA, 51 bp, Homo sapiens
cttttaggtaactctcccaactcaagatcgatagttctctgaagaattgaa

SEQ ID NO: 8269 - DNA, 33 bp, Homo sapiens
agtgaagaggtaagaaggtaacttaaatcagct

SEQ ID NO: 8270 - DNA, 33 bp, Homo sapiens
gcaccagagtggcaaggctaggccctcatgaga

SEQ ID NO: 8271 - DNA, 33 bp, Homo sapiens
tctctacaaacaaaagtctgctcttcaattccc

SEQ ID NO: 8272 - DNA, 33 bp, Homo sapiens
gggaccacaggaggaattccatatctaacctga

SEQ ID NO: 8273 - DNA, 33 bp, Homo sapiens
aggggacgatgttgaattgacaggcagcggagg

SEQ ID NO: 8274 - DNA, 33 bp, Homo sapiens
tctttttttcccacactgagagtcctgattctg

SEQ ID NO: 8275 - DNA, 33 bp, Homo sapiens
gcaaaggagatgctcagagtcgagaatgcttag

SEQ ID NO: 8276 - DNA, 33 bp, Homo sapiens
ccagcttaattgtgaagagcctcacgtgccata

SEQ ID NO: 8277 - DNA, 33 bp, Homo sapiens
gggcttgttgacaagcggccatttgcgagacag

SEQ ID NO: 8278 - DNA, 33 bp, Homo sapiens
tggggggactgcacccggaagctttctaaggag

SEQ ID NO: 8279 - DNA, 33 bp, Homo sapiens
aatcctttctccaaaagggctagtaacattcac

SEQ ID NO: 8280 - DNA, 33 bp, Homo sapiens
atctcagcttactacagaaaaggaacctggtca

SEQ ID NO: 8281 - DNA, 33 bp, Homo sapiens
agcagcacctttctacgcttatgccaacaggaa

SEQ ID NO: 8282 - DNA, 33 bp, Homo sapiens
gaccatgtagggctaagtcggccacaattccaa

SEQ ID NO: 8283 - DNA, 51 bp, Homo sapiens
atatggcattttgttataatatccttaacagactaagacagatatcgttta

SEQ ID NO: 8284 - DNA, 33 bp, Homo sapiens
ccccagattgttttcatagggcccaaacactct

SEQ ID NO: 8285 - DNA, 33 bp, Homo sapiens
acctttactctaaatcggaatcataactcaatg

SEQ ID NO: 8286 - DNA, 33 bp, Homo sapiens
catcactgtatttccagtgaaattaggttccag

SEQ ID NO: 8287 - DNA, 33 bp, Homo sapiens
ttttatctttcttcaatgataaggttcttgcct

SEQ ID NO: 8288 - DNA, 33 bp, Homo sapiens
gtttgggataaatggcggaaaacaacgcgtcat

SEQ ID NO: 8289 - DNA, 33 bp, Homo sapiens
cctgttgctgtcccagccaaactgcctcattta

SEQ ID NO: 8290 - DNA, 33 bp, Homo sapiens
tcaagcatgcaaatcctaccatcacacatggcc

SEQ ID NO: 8291 - DNA, 33 bp, Homo sapiens
aacccttttctcaaacgcttccgtagtctcctg

SEQ ID NO: 8292 - DNA, 33 bp, Homo sapiens
caggtcctgttgggtagaacatttggctttcag

SEQ ID NO: 8293 - DNA, 33 bp, Homo sapiens
agaagtcaatgagcaagcaatgcaacatcctta

SEQ ID NO: 8294 - DNA, 33 bp, Homo sapiens
tgttacttatcgaacacatttcaagtgtcatgt

SEQ ID NO: 8295 - DNA, 33 bp, Homo sapiens
aggctgtagtaaagtatgattgtatcactgtac

SEQ ID NO: 8296 - DNA, 33 bp, Homo sapiens
cagtgattaaagagtatgtttgtattagagata

SEQ ID NO: 8297 - DNA, 33 bp, Homo sapiens
tgctgtgcaaagtcactatctaatcttccaact

SEQ ID NO: 8298 - DNA, 33 bp, Homo sapiens
atggatgttcagtacctggagaaaagaagccat

SEQ ID NO: 8299 - DNA, 33 bp, Homo sapiens
agcaccccattagttggaaaactgtactctcca

SEQ ID NO: 8300 - DNA, 33 bp, Homo sapiens
ctagttatcccaggaatgcctaatgtcaaatag

SEQ ID NO: 8301 - DNA, 33 bp, Homo sapiens
caggatgttcacaacaccattacttgcaatggt

SEQ ID NO: 8302 - DNA, 33 bp, Homo sapiens
gaggaccgaagtggaatgcttgtagaggactag

SEQ ID NO: 8303 - DNA, 33 bp, Homo sapiens
tcacaaatggtactccgcaagaaaaagagactg

SEQ ID NO: 8304 - DNA, 33 bp, Homo sapiens
ctactctcagaaaggatggcccaaattcctctc

SEQ ID NO: 8305 - DNA, 33 bp, Homo sapiens
gtttagaacattgtactgaaaagtcttgagcca

SEQ ID NO: 8306 - DNA, 33 bp, Homo sapiens
tgaccacttctctttcgctgctcttctgtctct

SEQ ID NO: 8307 - DNA, 33 bp, Homo sapiens
gcatttctggatcacctgaaattatctcttgca

SEQ ID NO: 8308 - DNA, 33 bp, Homo sapiens
tcctctgcatgacaaagtgggtccaccatcact

SEQ ID NO: 8309 - DNA, 33 bp, Homo sapiens
ctcatgtggctattgaggaagggcatagcggct

SEQ ID NO: 8310 - DNA, 33 bp, Homo sapiens
gaacaactctaaggtataatcaaatgattttct

SEQ ID NO: 8311 - DNA, 51 bp, Homo sapiens
aaaacacaacttgaaaatcataaaccagaaagcaaaaaagagatgatttga

SEQ ID NO: 8312 - DNA, 51 bp, Homo sapiens
atgtggccagtttatgtgcagaatatgaagggttaggtaatatttattttg

SEQ ID NO: 8313 - DNA, 51 bp, Homo sapiens
acagcttctgatcattcttcaactatatcatccaggtcctggtgtcatatt

SEQ ID NO: 8314 - DNA, 33 bp, Homo sapiens
ttctagttgagtggaggaaaggaacttgagttt

SEQ ID NO: 8315 - DNA, 33 bp, Homo sapiens
agttgagtgtttcagaggcataggtacttgatg

SEQ ID NO: 8316 - DNA, 33 bp, Homo sapiens
aaaggaagaactgtctgacaggtattgttaaca

SEQ ID NO: 8317 - DNA, 33 bp, Homo sapiens
attccagaatcaaaggtcctgtggatatggtaa

SEQ ID NO: 8318 - DNA, 33 bp, Homo sapiens
tctcctgcatcatggatagaaccagtaaataga

SEQ ID NO: 8319 - DNA, 33 bp, Homo sapiens
gtatgtgtaccagagatatttgctattcactaa

SEQ ID NO: 8320 - DNA, 33 bp, Homo sapiens
ttgctggatgaattaaccctctgtcaataatct

SEQ ID NO: 8321 - DNA, 33 bp, Homo sapiens
atatatcgtcaacatacaagttcccaatattga

SEQ ID NO: 8322 - DNA, 33 bp, Homo sapiens
tttcaatagttgacaatcacagcagaaccacca

SEQ ID NO: 8323 - DNA, 33 bp, Homo sapiens
ctcttttagttgcatataagtgaatcataatcc

SEQ ID NO: 8324 - DNA, 33 bp, Homo sapiens
gtcttctaatttggaatatgcattctatggtta

SEQ ID NO: 8325 - DNA, 33 bp, Homo sapiens
tccacagtactacccatagagtggtcaataact

SEQ ID NO: 8326 - DNA, 33 bp, Homo sapiens
ttcaaaacggactgtaggcattactaacattta

SEQ ID NO: 8327 - DNA, 51 bp, Homo sapiens
gttcaggattgagagacaatatatccgagatttgatttactcataaaaggg

SEQ ID NO: 8328 - DNA, 33 bp, Homo sapiens
aagttacaaattaaaaggagacattgcaagtga

SEQ ID NO: 8329 - DNA, 33 bp, Homo sapiens
ccgtcaatatcagcacgatacgaaggccccaag

SEQ ID NO: 8330 - DNA, 33 bp, Homo sapiens
ctaacaatacccagaagtcacaattcttcccct

SEQ ID NO: 8331 - DNA, 33 bp, Homo sapiens
aagacaatataattacgcaagttagaaataggt

SEQ ID NO: 8332 - DNA, 33 bp, Homo sapiens
actatgccatcaacaagtcacagcaacaatttc

SEQ ID NO: 8333 - DNA, 33 bp, Homo sapiens
aattggcttaggtccattacagtctaatccttg

SEQ ID NO: 8334 - DNA, 33 bp, Homo sapiens
agctggattctctcagcaggacaaaatcaactg

SEQ ID NO: 8335 - DNA, 33 bp, Homo sapiens
tcttgcatggaatgaagtaggttgggtcaattt

SEQ ID NO: 8336 - DNA, 33 bp, Homo sapiens
gtaatgaacagaaactgacgctcaaagaggttg

SEQ ID NO: 8337 - DNA, 51 bp, Homo sapiens
ctacaaagactgtgctgacaactaagtggtgtgacctaaaagcaaaacatg

SEQ ID NO: 8338 - DNA, 51 bp, Homo sapiens
tgacaaagccaggcagttttagttacagttcttatccactatccccatcat

SEQ ID NO: 8339 - DNA, 33 bp, Homo sapiens
cttactgccaggagaagtgttgggcagacttat

SEQ ID NO: 8340 - DNA, 33 bp, Homo sapiens
taggcactcaattctagatggtgcagttctgta

SEQ ID NO: 8341 - DNA, 33 bp, Homo sapiens
gacagggtagagaaagtacagagatccctgaag

SEQ ID NO: 8342 - DNA, 33 bp, Homo sapiens
ttctttcatttggaaggatacgctgtcaaggtt

SEQ ID NO: 8343 - DNA, 33 bp, Homo sapiens
gagttctgtaatctgagactggttcatcctttt

SEQ ID NO: 8344 - DNA, 51 bp, Homo sapiens
acctcaaatctaatatgttccatactactattttgatctttcaccacaata

SEQ ID NO: 8345 - DNA, 33 bp, Homo sapiens
tgtgtgagaacatggcccactttgatgctaaaa

SEQ ID NO: 8346 - DNA, 33 bp, Homo sapiens
aagagcaataactaaggccaatgcttgggaatt

SEQ ID NO: 8347 - DNA, 33 bp, Homo sapiens
aaggcaatgttgagggtagaggttggtggggtc

SEQ ID NO: 8348 - DNA, 51 bp, Homo sapiens
gcctatacacattctgcatggtacagtcatatttcaatttggaagtgtggt

SEQ ID NO: 8349 - DNA, 51 bp, Homo sapiens
ttgtgacactggcccaaatgtctaatgtgatcccatgatctgcattcaata

SEQ ID NO: 8350 - DNA, 33 bp, Homo sapiens
agataatctgtactcatagatcagtaataccat

SEQ ID NO: 8351 - DNA, 33 bp, Homo sapiens
ttaattagactgtaacgaaggtgaataaaaata

SEQ ID NO: 8352 - DNA, 33 bp, Homo sapiens
attcattgccagtaacgcccacagaactttgaa

SEQ ID NO: 8353 - DNA, 33 bp, Homo sapiens
ataacatgttcagtgcggaaacatacaattctt

SEQ ID NO: 8354 - DNA, 33 bp, Homo sapiens
gcaattgtttttgacattggacatgatataata

SEQ ID NO: 8355 - DNA, 33 bp, Homo sapiens
tatgtgaatgctttagtaatgggaaacgttatc

SEQ ID NO: 8356 - DNA, 33 bp, Homo sapiens
aaaatgtgtgcattaaggcccttgagagtacaa

SEQ ID NO: 8357 - DNA, 51 bp, Homo sapiens
catagatagaatacactctgaaacttaatacaaacctgttatatttatttt

SEQ ID NO: 8358 - DNA, 33 bp, Homo sapiens
atgttctttcatggtatctcccccagaacgcaa

SEQ ID NO: 8359 - DNA, 51 bp, Homo sapiens
tgaagaattggtaaactggaagatggcactatagggaatttcctaattctg

SEQ ID NO: 8360 - DNA, 33 bp, Homo sapiens
ccatagcaatgtcagagggactgagttcaataa

SEQ ID NO: 8361 - DNA, 33 bp, Homo sapiens
tctttcctagcttttatagaccatgctatgcaa

SEQ ID NO: 8362 - DNA, 33 bp, Homo sapiens
agcttgcatagctgtcgccacatgacattgact

SEQ ID NO: 8363 - DNA, 33 bp, Homo sapiens
ctgtctgtttaaaaaaggcctgaagtttctttg

SEQ ID NO: 8364 - DNA, 33 bp, Homo sapiens
gggactcctagattaagaggcctgtttgaccta

SEQ ID NO: 8365 - DNA, 33 bp, Homo sapiens
gattgttcactatgggtatacaaaatgctactg

SEQ ID NO: 8366 - DNA, 33 bp, Homo sapiens
ctgctgtttaacttcagaaaaattttcattaaa

SEQ ID NO: 8367 - DNA, 33 bp, Homo sapiens
tgtatcgataccagtccacctatctagaaccta

SEQ ID NO: 8368 - DNA, 33 bp, Homo sapiens
gtcagtgaccaacaagtcctgaggatgcagcac

SEQ ID NO: 8369 - DNA, 33 bp, Homo sapiens
agtgcctggcacatcatagttaattggtggtgg

SEQ ID NO: 8370 - DNA, 33 bp, Homo sapiens
gctccactgagtaccagctaacaattttctacc

SEQ ID NO: 8371 - DNA, 33 bp, Homo sapiens
acattctatatgtaaatcgcttgctaaaactct

SEQ ID NO: 8372 - DNA, 33 bp, Homo sapiens
tgcgcaagttacaaaatggtgtcccctctctag

SEQ ID NO: 8373 - DNA, 33 bp, Homo sapiens
ataaacttttcaccaatgacaatattcaaacag

SEQ ID NO: 8374 - DNA, 33 bp, Homo sapiens
agttaaataagttgtcgaggcaagtaaaagaac

SEQ ID NO: 8375 - DNA, 33 bp, Homo sapiens
gaagtccaacagactggacgaatgcttggttgt

SEQ ID NO: 8376 - DNA, 33 bp, Homo sapiens
cttcaaaggaagagacgcttttataaagactca

SEQ ID NO: 8377 - DNA, 33 bp, Homo sapiens
gccagctccataagatgagtggagaaactgagg

SEQ ID NO: 8378 - DNA, 33 bp, Homo sapiens
attgtaatagtgaaacgggaaacaaacagttgt

SEQ ID NO: 8379 - DNA, 33 bp, Homo sapiens
taaacaaagacgcacagggttacacttcagaag

SEQ ID NO: 8380 - DNA, 33 bp, Homo sapiens
aggtggatggccattctaagctaagtaaacagc

SEQ ID NO: 8381 - DNA, 33 bp, Homo sapiens
atcagcaacacaacagtctaccccgtcattata

SEQ ID NO: 8382 - DNA, 33 bp, Homo sapiens
tttgaatcctaacatctccatgtactgtgtctc

SEQ ID NO: 8383 - DNA, 33 bp, Homo sapiens
aggggtcagctgctgagggggagtaccatgcta

SEQ ID NO: 8384 - DNA, 33 bp, Homo sapiens
gggcagaggtcaggaagctagtggcccacacaa

SEQ ID NO: 8385 - DNA, 33 bp, Homo sapiens
tcctgcactcctggacgaacctccggctgcaga

SEQ ID NO: 8386 - DNA, 33 bp, Homo sapiens
ggagggcattctcaacgcacttgcaccaggttc

SEQ ID NO: 8387 - DNA, 33 bp, Homo sapiens
atggatgcatggatgagtatttggatgtatgga

SEQ ID NO: 8388 - DNA, 33 bp, Homo sapiens
tgttcaccaagcaatagcctggcactaatttag

SEQ ID NO: 8389 - DNA, 33 bp, Homo sapiens
tacaaaaaggtatgcattcagaaataaaaatag

SEQ ID NO: 8390 - DNA, 33 bp, Homo sapiens
gaggcgggatagcccggcgaataaaagcatgga

SEQ ID NO: 8391 - DNA, 33 bp, Homo sapiens
tgaaattgctctgacatatccagtccaagcata

SEQ ID NO: 8392 - DNA, 33 bp, Homo sapiens
caagttgtatttcccctctatggtgaacatctg

SEQ ID NO: 8393 - DNA, 33 bp, Homo sapiens
tgcgtcccatgggtaaggactatcatcattatt

SEQ ID NO: 8394 - DNA, 33 bp, Homo sapiens
gctggaagaggttcctgaggaaaggctcaggtg

SEQ ID NO: 8395 - DNA, 33 bp, Homo sapiens
agaggaagactcagaattgctctcaagaaatca

SEQ ID NO: 8396 - DNA, 33 bp, Homo sapiens
tggcatccgtaacctcgatgtagacttcagtta

SEQ ID NO: 8397 - DNA, 33 bp, Homo sapiens
gttctgaagcccaatagagtggaggatagtctt

SEQ ID NO: 8398 - DNA, 33 bp, Homo sapiens
tgaaagcacagggagggaagatgcagagtaaca

SEQ ID NO: 8399 - DNA, 33 bp, Homo sapiens
ctttcttcataaccacgaactgtatttccagca

SEQ ID NO: 8400 - DNA, 33 bp, Homo sapiens
attcaaaagtgattgggatttgcaagacagaga

SEQ ID NO: 8401 - DNA, 33 bp, Homo sapiens
actgctctgaactaccgggggatttctgtgggt

SEQ ID NO: 8402 - DNA, 51 bp, Homo sapiens
gttagtgacctagagggaatgaaattagaagagaagcagatcaggtggaaa

SEQ ID NO: 8403 - DNA, 33 bp, Homo sapiens
ttgatcccacactcccgagagaattagtcacta

SEQ ID NO: 8404 - DNA, 33 bp, Homo sapiens
ctggaaggaaagatgcgagcagcatagttttgc

SEQ ID NO: 8405 - DNA, 33 bp, Homo sapiens
tgtttcctgcaaggtcgatttcccaggtgaaag

SEQ ID NO: 8406 - DNA, 33 bp, Homo sapiens
gagcccaaacttactgtatgaacaactcccaaa

SEQ ID NO: 8407 - DNA, 33 bp, Homo sapiens
gagatggtttcttcactcctctaagccttagct

SEQ ID NO: 8408 - DNA, 33 bp, Homo sapiens
atggaatacagtctgagctagcctttcatgaat

SEQ ID NO: 8409 - DNA, 33 bp, Homo sapiens
aatttggaatcagcccgaggactcctcctatcc

SEQ ID NO: 8410 - DNA, 33 bp, Homo sapiens
atgctcttacttgatatccataaaggcagcttt

SEQ ID NO: 8411 - DNA, 33 bp, Homo sapiens
taatgcttaagtgagaccaacaatttcactttt

SEQ ID NO: 8412 - DNA, 33 bp, Homo sapiens
ggtcaatttgactagagataggattgattggat

SEQ ID NO: 8413 - DNA, 33 bp, Homo sapiens
gcctttttaaacactgtattgatgatttgtcta

SEQ ID NO: 8414 - DNA, 51 bp, Homo sapiens
acagtagctgcccttgaggatagtagcaagctcagctgtaggttctagcag

SEQ ID NO: 8415 - DNA, 33 bp, Homo sapiens
ggagcacatctgattcgacatccctcctagcac

SEQ ID NO: 8416 - DNA, 33 bp, Homo sapiens
tctgtgacttgagacagaggtattcaaaataat

SEQ ID NO: 8417 - DNA, 33 bp, Homo sapiens
gctctggagggaatacggattgtctggtaaggt

SEQ ID NO: 8418 - DNA, 33 bp, Homo sapiens
taaaccctggagatactgcagaaaacaaaacca

SEQ ID NO: 8419 - DNA, 33 bp, Homo sapiens
ttggttcctgctcccggaacttctgtcgccatc

SEQ ID NO: 8420 - DNA, 33 bp, Homo sapiens
gtaagacttggcttcctcaactagatactaaga

SEQ ID NO: 8421 - DNA, 33 bp, Homo sapiens
agataagagaatgcaaggtgttaaagaaatctc

SEQ ID NO: 8422 - DNA, 33 bp, Homo sapiens
gggcagtgaactcagatgtactttatgtgtgtt

SEQ ID NO: 8423 - DNA, 33 bp, Homo sapiens
tctgagaatccattcattcatttgcaaaattaa

SEQ ID NO: 8424 - DNA, 33 bp, Homo sapiens
attgcttgctatgtgggaaagaatgctcctagg

SEQ ID NO: 8425 - DNA, 33 bp, Homo sapiens
gattgcctcggtccaagtctcatttattaatta

SEQ ID NO: 8426 - DNA, 51 bp, Homo sapiens
aatttacatttgatagttacatcattataaaacactcagaataccatgcaa

SEQ ID NO: 8427 - DNA, 33 bp, Homo sapiens
gtcagaagcaaactaaggctgctggagagaaga

SEQ ID NO: 8428 - DNA, 33 bp, Homo sapiens
tgaaccgttgttcaagtacaattaaggcaaaaa

SEQ ID NO: 8429 - DNA, 33 bp, Homo sapiens
gagccaaacaagacaggatggcctaaaaatgac

SEQ ID NO: 8430 - DNA, 33 bp, Homo sapiens
acaaaagaagctgacagagttaactgaaaaaag

SEQ ID NO: 8431 - DNA, 51 bp, Homo sapiens
gctatctctggctgagagaaccacagacttcaagatgtatgagggctacct

SEQ ID NO: 8432 - DNA, 51 bp, Homo sapiens
atgaaaagagagccaaacaagacaggatggcctaaaaatgacatgccctga

SEQ ID NO: 8433 - DNA, 33 bp, Homo sapiens
tgcctttttcattacctagacaatagtgcaaca

SEQ ID NO: 8434 - DNA, 33 bp, Homo sapiens
ctcatattgcctcttatggtctcgttctttcaa

SEQ ID NO: 8435 - DNA, 33 bp, Homo sapiens
aaaacaccgtctagtctataggctggcaaagta

SEQ ID NO: 8436 - DNA, 33 bp, Homo sapiens
tggtggtggtgttatctacagccttatccccac

SEQ ID NO: 8437 - DNA, 33 bp, Homo sapiens
tattattattgactccgcaatgaaaacaatctt

SEQ ID NO: 8438 - DNA, 33 bp, Homo sapiens
gcattgatgctacaaagagctaaatcccacagg

SEQ ID NO: 8439 - DNA, 33 bp, Homo sapiens
gcttgcattctgtgcatctgcaagcttaccacc

SEQ ID NO: 8440 - DNA, 33 bp, Homo sapiens
ctggtcaatttcactataaaaactactctaaaa

SEQ ID NO: 8441 - DNA, 33 bp, Homo sapiens
gaatggcttcgtgaaattgactgttacagctat

SEQ ID NO: 8442 - DNA, 33 bp, Homo sapiens
ggattagttgttcacatgttcctgactggtaga

SEQ ID NO: 8443 - DNA, 33 bp, Homo sapiens
aacctgaacatgggcttaacatttttcttgaca

SEQ ID NO: 8444 - DNA, 33 bp, Homo sapiens
gtcaataatgtcacaagaaggtaaggcctggtg

SEQ ID NO: 8445 - DNA, 33 bp, Homo sapiens
tctaatagcttattgagtaggaatggacttgac

SEQ ID NO: 8446 - DNA, 33 bp, Homo sapiens
agaaaaaacaactgaccaatagacccacacatt

SEQ ID NO: 8447 - DNA, 33 bp, Homo sapiens
ataataatttagacaatgtagtactggcatata

SEQ ID NO: 8448 - DNA, 51 bp, Homo sapiens
ttttacataaagctggcttcacagatagtatctcatttgcttctcagaaca

SEQ ID NO: 8449 - DNA, 51 bp, Homo sapiens
ttacttcaccttatcaaaatgaaagtctattaagcatgccctgccctacct

SEQ ID NO: 8450 - DNA, 33 bp, Homo sapiens
cccagtttcttccccagtgatataacacagagg

SEQ ID NO: 8451 - DNA, 33 bp, Homo sapiens
gtgggttgacttcagatcctgccctgctttagg

SEQ ID NO: 8452 - DNA, 33 bp, Homo sapiens
tgaagtgaggattccagattagagcagtggtta

SEQ ID NO: 8453 - DNA, 33 bp, Homo sapiens
aagaaaggccattgaaccttaaactatattaag

SEQ ID NO: 8454 - DNA, 33 bp, Homo sapiens
ctaagctaaggaaatacactgaaatcaaacata

SEQ ID NO: 8455 - DNA, 33 bp, Homo sapiens
ctctccttttatgcccggctttcagagttcatt

SEQ ID NO: 8456 - DNA, 33 bp, Homo sapiens
acattatcaagagctatataaaagttggtgtca

SEQ ID NO: 8457 - DNA, 33 bp, Homo sapiens
acaataaagtgtgtaagagctcaggttcaagca

SEQ ID NO: 8458 - DNA, 33 bp, Homo sapiens
aacctgggcttctgacggagacagattttatga

SEQ ID NO: 8459 - DNA, 33 bp, Homo sapiens
caaaatccgcttcacagagaacacaacttacaa

SEQ ID NO: 8460 - DNA, 33 bp, Homo sapiens
agtttcaaaaacatcatagtgtcaacttagatg

SEQ ID NO: 8461 - DNA, 33 bp, Homo sapiens
ttacataatggtaaacggttcaatttaataaga

SEQ ID NO: 8462 - DNA, 33 bp, Homo sapiens
taaaaagctgtctacatagttatggagaaggga

SEQ ID NO: 8463 - DNA, 33 bp, Homo sapiens
actgtggctgaaatccggcttcaggaccaaccg

SEQ ID NO: 8464 - DNA, 33 bp, Homo sapiens
tcaatcaatacgaaccgccaaaccagatcactg

SEQ ID NO: 8465 - DNA, 33 bp, Homo sapiens
ctcaaagttttccccattcaaaagcatttgaaa

SEQ ID NO: 8466 - DNA, 33 bp, Homo sapiens
gttcatttttcatgcactattagccaatgtcac

SEQ ID NO: 8467 - DNA, 33 bp, Homo sapiens
gatggccactagaaactgaaaaggacaagaaaa

SEQ ID NO: 8468 - DNA, 33 bp, Homo sapiens
actatgaagtctcttgcagccattttaatgcaa

SEQ ID NO: 8469 - DNA, 33 bp, Homo sapiens
atattctcttcttaccgcgaaaggaaaaagact

SEQ ID NO: 8470 - DNA, 33 bp, Homo sapiens
ggtgactcctttagtggaagaacacattctttc

SEQ ID NO: 8471 - DNA, 33 bp, Homo sapiens
ttttctttgtagaaaatctaatggtcactggaa

SEQ ID NO: 8472 - DNA, 33 bp, Homo sapiens
cggtcacactataatcgccacgagacagcagga

SEQ ID NO: 8473 - DNA, 33 bp, Homo sapiens
aaatctaaggtgttatgaagctataagatataa

SEQ ID NO: 8474 - DNA, 33 bp, Homo sapiens
ccttcttttatatcaattgaccaggatgatacc

SEQ ID NO: 8475 - DNA, 33 bp, Homo sapiens
aatgaatggtagccacgatatttgtcctttatt

SEQ ID NO: 8476 - DNA, 33 bp, Homo sapiens
gcaaggaaggcaaatgtacaattagtatcaggg

SEQ ID NO: 8477 - DNA, 33 bp, Homo sapiens
gtctgcagtctagctatggagaatgatgactaa

SEQ ID NO: 8478 - DNA, 33 bp, Homo sapiens
aggctcatgcctggtgtcaataaaggcgaatag

SEQ ID NO: 8479 - DNA, 33 bp, Homo sapiens
ctgattccctgaaatgcagttgttggtgatggg

SEQ ID NO: 8480 - DNA, 33 bp, Homo sapiens
ctgagtggctgccacagggctatgttcagcgct

SEQ ID NO: 8481 - DNA, 33 bp, Homo sapiens
gataggaaagtaatggtcaacaactcagtaatt

SEQ ID NO: 8482 - DNA, 33 bp, Homo sapiens
gataaatgattcaccctgacaaaaagtacactc

SEQ ID NO: 8483 - DNA, 33 bp, Homo sapiens
atccagcttcttcacaggtagtaaaaaggaggt

SEQ ID NO: 8484 - DNA, 33 bp, Homo sapiens
gaaaactttgagagacgatgaatactaactatg

SEQ ID NO: 8485 - DNA, 51 bp, Homo sapiens
cctgttaaaatctgatttctatacagtatttgatgttaatatctggctcat

SEQ ID NO: 8486 - DNA, 33 bp, Homo sapiens
ggctgactgagactgatgtttggtgtctgaagt

SEQ ID NO: 8487 - DNA, 33 bp, Homo sapiens
agataataagcagtcagtaaatgacagaaatta

SEQ ID NO: 8488 - DNA, 33 bp, Homo sapiens
gtttattatagaaagataggctgtgtcatggca

SEQ ID NO: 8489 - DNA, 33 bp, Homo sapiens
cagagaggagaccgtggagtaggtagctgtttt

SEQ ID NO: 8490 - DNA, 33 bp, Homo sapiens
tcaggtccaattgcaactccaagttagctaaat

SEQ ID NO: 8491 - DNA, 33 bp, Homo sapiens
acagtcgggtagaacagcaagcatgctcttaga

SEQ ID NO: 8492 - DNA, 33 bp, Homo sapiens
cacaattcaaaacacagtgatgctcttccaaca

SEQ ID NO: 8493 - DNA, 51 bp, Homo sapiens
tagcccctatagtccgctgggagcattgaactcctgacctcaggtgatcca

SEQ ID NO: 8494 - DNA, 33 bp, Homo sapiens
actaaacagtgatacctgagaaatagaaacaaa

SEQ ID NO: 8495 - DNA, 33 bp, Homo sapiens
ccagatcagtactcgcgctcccactgtgtcact

SEQ ID NO: 8496 - DNA, 33 bp, Homo sapiens
ctctgtttctgaaacattagcctcaaggatgcc

SEQ ID NO: 8497 - DNA, 33 bp, Homo sapiens
aaaaatgagtactttacattcctctagctgttt

SEQ ID NO: 8498 - DNA, 33 bp, Homo sapiens
tctgtggaagagtagatgtgtcatgcccagtgc

SEQ ID NO: 8499 - DNA, 33 bp, Homo sapiens
ggataatgcctttggggatgtggggtatcagtt

SEQ ID NO: 8500 - DNA, 33 bp, Homo sapiens
tctagtctgactcccagatttcacaaaagtgga

SEQ ID NO: 8501 - DNA, 33 bp, Homo sapiens
tcacctgtggccggaatctcaaaggagagtgat

SEQ ID NO: 8502 - DNA, 51 bp, Homo sapiens
cctgttagcggagtccctttaaggaggttagaccagtgacctttgctgtgc

SEQ ID NO: 8503 - DNA, 33 bp, Homo sapiens
gtggttatgggtcctgtatttaatgaggtctag

SEQ ID NO: 8504 - DNA, 33 bp, Homo sapiens
tcattagatgtgaagatgtagtgtgctatgcca

SEQ ID NO: 8505 - DNA, 33 bp, Homo sapiens
ccctgatttctttaactgtcaaatgtggttaaa

SEQ ID NO: 8506 - DNA, 33 bp, Homo sapiens
gggagatacaacctaagagacaaaataacattt

SEQ ID NO: 8507 - DNA, 33 bp, Homo sapiens
atgtaagccacaaaaaggaaaccatttaattca

SEQ ID NO: 8508 - DNA, 33 bp, Homo sapiens
gatatcaagttttatagcacaagcaagactgaa

SEQ ID NO: 8509 - DNA, 33 bp, Homo sapiens
tcaagtgtgactgttatggctgtgctagatgtc

SEQ ID NO: 8510 - DNA, 33 bp, Homo sapiens
cagtgtggaggacatatgaaaaggcatgagact

SEQ ID NO: 8511 - DNA, 33 bp, Homo sapiens
gtctttgttttactgacgttcttaggggtctca

SEQ ID NO: 8512 - DNA, 33 bp, Homo sapiens
caggcaaagacaatatgagaaaatgttgtgtgt

SEQ ID NO: 8513 - DNA, 33 bp, Homo sapiens
ctactttgtcagcctggattatggaacaaagac

SEQ ID NO: 8514 - DNA, 51 bp, Homo sapiens
tcttaaggttatcatgacctaggaagttaggaacagggaatgaacaatgtt

SEQ ID NO: 8515 - DNA, 33 bp, Homo sapiens
ctggccactcctcagatgtagaaaggggtacaa

SEQ ID NO: 8516 - DNA, 33 bp, Homo sapiens
aaggaaacgttattcatctcctgcaatatctta

SEQ ID NO: 8517 - DNA, 33 bp, Homo sapiens
aacttggtgattagcatgagtgtaggctacggt

SEQ ID NO: 8518 - DNA, 33 bp, Homo sapiens
tatgttctccaacacagagtatcattagaagat

SEQ ID NO: 8519 - DNA, 33 bp, Homo sapiens
gtgtaatttgaagcaacctttcaaattgcattg

SEQ ID NO: 8520 - DNA, 33 bp, Homo sapiens
taagcatcagctcttatggtattaaaaatggaa

SEQ ID NO: 8521 - DNA, 51 bp, Homo sapiens
tcctcttttatctaccacatgaaaatactatctgattataatttgatgcct

SEQ ID NO: 8522 - DNA, 33 bp, Homo sapiens
gtcaatagaggtcaatgaaggtcgtaatcgttt

SEQ ID NO: 8523 - DNA, 33 bp, Homo sapiens
aaagaataaatctaactggtcttccacgaaaga

SEQ ID NO: 8524 - DNA, 33 bp, Homo sapiens
tacttccatgtgtttatacaagcaacaacagcc

SEQ ID NO: 8525 - DNA, 33 bp, Homo sapiens
ctaagagaaaatgacagacttttacatgacagt

SEQ ID NO: 8526 - DNA, 51 bp, Homo sapiens
tctgaactagaaagatggccaggcagaagccaatactgaattaatttccct

SEQ ID NO: 8527 - DNA, 51 bp, Homo sapiens
aatgaatgtgtgaatagaaatagaacatcgaaaagcaattctatatactca

SEQ ID NO: 8528 - DNA, 33 bp, Homo sapiens
ttctatgggctaaaagtacttcctagaatgaca

SEQ ID NO: 8529 - DNA, 33 bp, Homo sapiens
ccattgatctttagcatctttgtctaaaattaa

SEQ ID NO: 8530 - DNA, 33 bp, Homo sapiens
gatcagtcaagacttaggtgtatgcttactgat

SEQ ID NO: 8531 - DNA, 33 bp, Homo sapiens
atattgagctctaaaattgtgggagcaaagcta

SEQ ID NO: 8532 - DNA, 33 bp, Homo sapiens
aaataacagtataagcgattcccaggcttaatc

SEQ ID NO: 8533 - DNA, 33 bp, Homo sapiens
gtgttccccatgactgtaaccctgctttccaaa

SEQ ID NO: 8534 - DNA, 33 bp, Homo sapiens
ataaaataaatgtcaatcaaagtggtgtaaggg

SEQ ID NO: 8535 - DNA, 33 bp, Homo sapiens
agacctcaatttaggagaacatccggcgtgctt

SEQ ID NO: 8536 - DNA, 33 bp, Homo sapiens
aatttggaaaaactaccatctactcacttttcc

SEQ ID NO: 8537 - DNA, 33 bp, Homo sapiens
gtggaagttgacacccgggatattctcctttct

SEQ ID NO: 8538 - DNA, 33 bp, Homo sapiens
ttgttgtttccacagattaaaaatagaaaccga

SEQ ID NO: 8539 - DNA, 51 bp, Homo sapiens
tatgtggcagatagattttgtcccgtccaacattctctcctctccttatct

SEQ ID NO: 8540 - DNA, 33 bp, Homo sapiens
agaggttcagggtggactaataaatgtggaaga

SEQ ID NO: 8541 - DNA, 51 bp, Homo sapiens
taacaacgtcacctgggtatctctatgcacagcgaagtttcggaggcactc

SEQ ID NO: 8542 - DNA, 33 bp, Homo sapiens
tgttttgtctagaaggtcacagaatgctgagat

SEQ ID NO: 8543 - DNA, 33 bp, Homo sapiens
ttgggaagagccaggatggaataacatagttgg

SEQ ID NO: 8544 - DNA, 33 bp, Homo sapiens
ctattttatggtcgcagaatataccaggacaca

SEQ ID NO: 8545 - DNA, 33 bp, Homo sapiens
gtgttccacattcataggtggtgttcagaaaac

SEQ ID NO: 8546 - DNA, 33 bp, Homo sapiens
cactcctatgcaaaagtcactgtgaaaacactg

SEQ ID NO: 8547 - DNA, 33 bp, Homo sapiens
catgtaggaacaggaatcctttctagagtatgg

SEQ ID NO: 8548 - DNA, 33 bp, Homo sapiens
atttttcttaaatgtccataagttggtgttaat

SEQ ID NO: 8549 - DNA, 33 bp, Homo sapiens
aagatggctttcatactgcccaaagttttaatg

SEQ ID NO: 8550 - DNA, 51 bp, Homo sapiens
tcagaaaagattaaagccttgggaattgacttgcatgtggacataaaaggg

SEQ ID NO: 8551 - DNA, 33 bp, Homo sapiens
gaattgttagaagaacggaatggcaaaataatt

SEQ ID NO: 8552 - DNA, 33 bp, Homo sapiens
aaaacgaccagagctacaaagtgacagcagaat

SEQ ID NO: 8553 - DNA, 33 bp, Homo sapiens
atatcacacagctttagcacttaattatatcct

SEQ ID NO: 8554 - DNA, 33 bp, Homo sapiens
gaacataaactcggaggaaaaaatgggaggaaa

SEQ ID NO: 8555 - DNA, 51 bp, Homo sapiens
aattgcagggatgtgctgaacagccgcagaaataactaaagtaaaagtggc

SEQ ID NO: 8556 - DNA, 33 bp, Homo sapiens
tagctggttataaatagtacttctgcctctgta

SEQ ID NO: 8557 - DNA, 33 bp, Homo sapiens
agatgagctttaatcggaggaccaaatctgtgt

SEQ ID NO: 8558 - DNA, 33 bp, Homo sapiens
aacaggtcaaaagtcatcaagcgaatgaacaaa

SEQ ID NO: 8559 - DNA, 33 bp, Homo sapiens
ccagggtaaatggatatattgtcatagatgacc

SEQ ID NO: 8560 - DNA, 51 bp, Homo sapiens
gttatatatagtgaggacactgttagaataaggtgagtgcattgttacagt

SEQ ID NO: 8561 - DNA, 33 bp, Homo sapiens
tgaaattagagagttaggggcttgagttaaggg

SEQ ID NO: 8562 - DNA, 33 bp, Homo sapiens
tgactggaaatggtagtagtgtcaagatgacta

SEQ ID NO: 8563 - DNA, 33 bp, Homo sapiens
gtaagtcacttgtgtctacattaaattgtcacc

SEQ ID NO: 8564 - DNA, 33 bp, Homo sapiens
acttatctcatggatagaacagaggatagacta

SEQ ID NO: 8565 - DNA, 33 bp, Homo sapiens
agtgtgtctttggacctcttccaggctgtttcc

SEQ ID NO: 8566 - DNA, 33 bp, Homo sapiens
gggattaaatcaatcatactggatattgctaat

SEQ ID NO: 8567 - DNA, 33 bp, Homo sapiens
attttcttggagtctcgaagatgtagattatgt

SEQ ID NO: 8568 - DNA, 33 bp, Homo sapiens
cttattagctacgcaatcttgggcaagttttca

SEQ ID NO: 8569 - DNA, 33 bp, Homo sapiens
atgtgattcttcacaatgcgcagaactctctga

SEQ ID NO: 8570 - DNA, 33 bp, Homo sapiens
ctaggaatctttgtaatggattgggatacttgg

SEQ ID NO: 8571 - DNA, 33 bp, Homo sapiens
agagcagcccaggtcatgagtttgtgagggcac

SEQ ID NO: 8572 - DNA, 33 bp, Homo sapiens
gggctacaattcatcaggatgcactggaacgtg

SEQ ID NO: 8573 - DNA, 33 bp, Homo sapiens
caagtaataataaggtgacaacattctctacca

SEQ ID NO: 8574 - DNA, 33 bp, Homo sapiens
tgaaggagcccccaacgaaagactggcagtttc

SEQ ID NO: 8575 - DNA, 33 bp, Homo sapiens
cagaaattcaggaaggtcctctataagatatga

SEQ ID NO: 8576 - DNA, 33 bp, Homo sapiens
gcaagctcagaggacataggcttacaccagcac

SEQ ID NO: 8577 - DNA, 51 bp, Homo sapiens
tatgaacatcttccctttctttatagcatctacctcagtttctttattaaa

SEQ ID NO: 8578 - DNA, 33 bp, Homo sapiens
ctgggacaaatgatgctgaggaaagagaaaacc

SEQ ID NO: 8579 - DNA, 33 bp, Homo sapiens
ctgcagatcaaaaaactggctctgcagatctgc

SEQ ID NO: 8580 - DNA, 33 bp, Homo sapiens
aaaatccaagagtcactgatgtccatgatttct

SEQ ID NO: 8581 - DNA, 33 bp, Homo sapiens
gggagctgaattctccggcgacagttgttgggg

SEQ ID NO: 8582 - DNA, 33 bp, Homo sapiens
ccttcctctcaaataatgtggagaggctctctc

SEQ ID NO: 8583 - DNA, 33 bp, Homo sapiens
actcccaatcccgaaatagacttcataactgca

SEQ ID NO: 8584 - DNA, 33 bp, Homo sapiens
cagctgaagtacgtggcaatcccagggctcgac

SEQ ID NO: 8585 - DNA, 33 bp, Homo sapiens
caccacgaatgaaagattactttaaccgcattt

SEQ ID NO: 8586 - DNA, 33 bp, Homo sapiens
gagaagggtgtagaaagtaaataattcaccttt

SEQ ID NO: 8587 - DNA, 33 bp, Homo sapiens
ggagtccacgtgggcaggaagctaagcagcagt

SEQ ID NO: 8588 - DNA, 51 bp, Homo sapiens
ttcttgctctgcaacttagaagatatgtatgttggtcaagtaactaaacct

SEQ ID NO: 8589 - DNA, 33 bp, Homo sapiens
gcacaaaattcaatgatgggcacaagcagaaag

SEQ ID NO: 8590 - DNA, 33 bp, Homo sapiens
gtctctaactcctaacgcagtgctgggtacatc

SEQ ID NO: 8591 - DNA, 33 bp, Homo sapiens
ttgtcagcctcaggccgagatcaaaataagagt

SEQ ID NO: 8592 - DNA, 33 bp, Homo sapiens
tgatttccttctttgtgaagtggagacaccaat

SEQ ID NO: 8593 - DNA, 33 bp, Homo sapiens
aataatccaagccgcaggagtttctattaaaag

SEQ ID NO: 8594 - DNA, 33 bp, Homo sapiens
caaagaaaagaggaaaccatatccgagagtgga

SEQ ID NO: 8595 - DNA, 33 bp, Homo sapiens
gagtgctaagcagacattaaaacaaggaagtca

SEQ ID NO: 8596 - DNA, 33 bp, Homo sapiens
tttctattctgtaccgtcctgagatcagctttt

SEQ ID NO: 8597 - DNA, 33 bp, Homo sapiens
caaggtcatttctcaaggtctagagcatacctc

SEQ ID NO: 8598 - DNA, 33 bp, Homo sapiens
attgtttaagtcagaatctcagaaccgagttat

SEQ ID NO: 8599 - DNA, 33 bp, Homo sapiens
cagttaatagagaaggtaaaagggcagaaggaa

SEQ ID NO: 8600 - DNA, 33 bp, Homo sapiens
tgagctcttcctatggtccagagagcacaagct

SEQ ID NO: 8601 - DNA, 33 bp, Homo sapiens
gcaccctgtgtgtgtagagcaatccaggcgcca

SEQ ID NO: 8602 - DNA, 33 bp, Homo sapiens
gattcctgcaggtctggcaatctcactccttcc

SEQ ID NO: 8603 - DNA, 33 bp, Homo sapiens
gcatggataattacacgattcagagcctgctgg

SEQ ID NO: 8604 - DNA, 33 bp, Homo sapiens
aaatccttaagttgattacatctgcaaaatctc

SEQ ID NO: 8605 - DNA, 33 bp, Homo sapiens
ataagtgaaagaaccctgcacatactaggtact

SEQ ID NO: 8606 - DNA, 33 bp, Homo sapiens
caagtcctctgctgggtcaagaatgcagctgct

SEQ ID NO: 8607 - DNA, 33 bp, Homo sapiens
agcttaagcagagggaccttccatagggcagca

SEQ ID NO: 8608 - DNA, 33 bp, Homo sapiens
gtctatgctgaagtgataaggataggaaaactg

SEQ ID NO: 8609 - DNA, 33 bp, Homo sapiens
aaaaacataatcctcccaaatgaagtcattcct

SEQ ID NO: 8610 - DNA, 33 bp, Homo sapiens
aggaaaagatttggacccagcatacctaatcaa

SEQ ID NO: 8611 - DNA, 33 bp, Homo sapiens
tcccacgccaagcagggcaagactgatgctggg

SEQ ID NO: 8612 - DNA, 33 bp, Homo sapiens
aaataattattagcaaggtagttgaacagggac

SEQ ID NO: 8613 - DNA, 33 bp, Homo sapiens
gctctcagaaggaaaggcaagcaaagagaaggc

SEQ ID NO: 8614 - DNA, 33 bp, Homo sapiens
ggtgagcagatgtccataggaagggaaggagca

SEQ ID NO: 8615 - DNA, 33 bp, Homo sapiens
gacagggcctacacgatgcccttttcatcatgg

SEQ ID NO: 8616 - DNA, 33 bp, Homo sapiens
cagttcctgtatattatgtccacctttcccaaa

SEQ ID NO: 8617 - DNA, 33 bp, Homo sapiens
aagtcaatcaagggcatcagtgacaatattaac

SEQ ID NO: 8618 - DNA, 33 bp, Homo sapiens
cctgtttgtatgctcatatcattggtaagggga

SEQ ID NO: 8619 - DNA, 33 bp, Homo sapiens
cgagtgagacacttaatctgtaacaagagctct

SEQ ID NO: 8620 - DNA, 33 bp, Homo sapiens
gtgagttgcaagacgctgaagaatctcatgtgg

SEQ ID NO: 8621 - DNA, 33 bp, Homo sapiens
atgagagcttattacatcttgtgctacagatga

SEQ ID NO: 8622 - DNA, 33 bp, Homo sapiens
gttgcctttttccacatagttagcaattcttta

SEQ ID NO: 8623 - DNA, 33 bp, Homo sapiens
gccccagaactccatcgatacgctgtccccagg

SEQ ID NO: 8624 - DNA, 33 bp, Homo sapiens
atgcatggggtgatgatagtttgcggttgctgg

SEQ ID NO: 8625 - DNA, 33 bp, Homo sapiens
tcatttgttaattatcgcagtaaacattaattc

SEQ ID NO: 8626 - DNA, 33 bp, Homo sapiens
attatccccattctacggatgaggaacctgagg

SEQ ID NO: 8627 - DNA, 33 bp, Homo sapiens
ttttgtttattgctgagatgaacgaatccttca

SEQ ID NO: 8628 - DNA, 33 bp, Homo sapiens
ggggcaattagatgacgatcaccagatagttga

SEQ ID NO: 8629 - DNA, 33 bp, Homo sapiens
attatttctagtttacgggggactcgatgggag

SEQ ID NO: 8630 - DNA, 33 bp, Homo sapiens
aaaaaatattgtctcatgatgccccccagtaag

SEQ ID NO: 8631 - DNA, 33 bp, Homo sapiens
tctgttcccgggggcatgggcaaactgtatagt

SEQ ID NO: 8632 - DNA, 33 bp, Homo sapiens
cagaactgggtatggatggtctcagaatgctga

SEQ ID NO: 8633 - DNA, 33 bp, Homo sapiens
tttatgagatatgagcgaatgtaaccaaggctt

SEQ ID NO: 8634 - DNA, 33 bp, Homo sapiens
gaagtcatagccagaagagagctacaaattagt

SEQ ID NO: 8635 - DNA, 33 bp, Homo sapiens
attcagggtcatgatgtagtcacggaaggacgg

SEQ ID NO: 8636 - DNA, 33 bp, Homo sapiens
tgaggaagcacagttaggttaaccaatgcggac

SEQ ID NO: 8637 - DNA, 33 bp, Homo sapiens
actgcaggtctgatacggattgacaggtgccac

SEQ ID NO: 8638 - DNA, 33 bp, Homo sapiens
ccccaattaccaggaagcaatatcatctttttg

SEQ ID NO: 8639 - DNA, 33 bp, Homo sapiens
acacaactgctgggaatgggaaagtttcaacct

SEQ ID NO: 8640 - DNA, 33 bp, Homo sapiens
gacttcccaattcttctcacttagccagctgcc

SEQ ID NO: 8641 - DNA, 33 bp, Homo sapiens
ctttctaatttttgctgacctgatgagtgtaca

SEQ ID NO: 8642 - DNA, 33 bp, Homo sapiens
ctccatgcagggagtgtcaaggaatttgggacc

SEQ ID NO: 8643 - DNA, 33 bp, Homo sapiens
agggttctctcacaaatgaaaatgcctcaaata

SEQ ID NO: 8644 - DNA, 51 bp, Homo sapiens
tacttgtctttcttagctattaactttcaattactagacatttagggagtc

SEQ ID NO: 8645 - DNA, 33 bp, Homo sapiens
tctgataccttcagaatgtcaatcagtaccaaa

SEQ ID NO: 8646 - DNA, 33 bp, Homo sapiens
ttatttatatcttgcatcaggaagcccgagagg

SEQ ID NO: 8647 - DNA, 33 bp, Homo sapiens
ttctctgagtgctccaggctacctttatcaggc

SEQ ID NO: 8648 - DNA, 51 bp, Homo sapiens
tgacacactttggacccattgttggcgatgaggtcaggaaacttatttctg

SEQ ID NO: 8649 - DNA, 33 bp, Homo sapiens
tggttccttgatatggtaaaccttgctcctatg

SEQ ID NO: 8650 - DNA, 33 bp, Homo sapiens
gattagcaagactgaggacaaatcttattatag

SEQ ID NO: 8651 - DNA, 33 bp, Homo sapiens
tattaagtgaaatacagcatggaaacagtggag

SEQ ID NO: 8652 - DNA, 33 bp, Homo sapiens
ttggaggtggaaatacgaggcatctaaatatga

SEQ ID NO: 8653 - DNA, 33 bp, Homo sapiens
ttgtggttgaaccttgcagaaatgtgttagaaa

SEQ ID NO: 8654 - DNA, 33 bp, Homo sapiens
aatccagagtgtcccaggaacccaaatgcccag

SEQ ID NO: 8655 - DNA, 33 bp, Homo sapiens
tgtcacaggtatgaacggaatatggatgggaag

SEQ ID NO: 8656 - DNA, 51 bp, Homo sapiens
ctattgtagcttttttcagaaataaggactcatttttagaaaagaaaaaaa

SEQ ID NO: 8657 - DNA, 33 bp, Homo sapiens
agaaatggagttggcatgggcactaggaactgc

SEQ ID NO: 8658 - DNA, 33 bp, Homo sapiens
aaccacataaatcacataaacatcagggtgtac

SEQ ID NO: 8659 - DNA, 33 bp, Homo sapiens
gcctgaaaaccacatggaaccttctcggtaaat

SEQ ID NO: 8660 - DNA, 33 bp, Homo sapiens
tacggaaagatgctcagtagtgtttgaatacag

SEQ ID NO: 8661 - DNA, 33 bp, Homo sapiens
ggtgagtggtgctgaccaaatcacttcactggg

SEQ ID NO: 8662 - DNA, 33 bp, Homo sapiens
tgggaatgaagcaaacgagaaggcaaacaaata

SEQ ID NO: 8663 - DNA, 33 bp, Homo sapiens
tgctgggaggagaaacgagataaagcatgggga

SEQ ID NO: 8664 - DNA, 33 bp, Homo sapiens
tcaccgtaggctctgcgagattttgacgatctc

SEQ ID NO: 8665 - DNA, 51 bp, Homo sapiens
atagaaagcatgacccaattcaagatgtgtccttctactagatctcaacct

SEQ ID NO: 8666 - DNA, 51 bp, Homo sapiens
gcagtggtgtctttgatcacaggaggacctaggatttggaagggcttgaga

SEQ ID NO: 8667 - DNA, 33 bp, Homo sapiens
ctattcagatcacccagtacgtattatacaatc

SEQ ID NO: 8668 - DNA, 33 bp, Homo sapiens
ttccaacaaagctcagtcacttcttccacttat

SEQ ID NO: 8669 - DNA, 33 bp, Homo sapiens
ttaagatcactgataatcctaccaccacttgaa

SEQ ID NO: 8670 - DNA, 33 bp, Homo sapiens
aacttgaatttccccagctataaatgaagataa

SEQ ID NO: 8671 - DNA, 33 bp, Homo sapiens
catctggatttttgcagaacccaggcggggctg

SEQ ID NO: 8672 - DNA, 33 bp, Homo sapiens
cacaagggctgaccccgagttgttttcattctg

SEQ ID NO: 8673 - DNA, 33 bp, Homo sapiens
ggaggcttgctcctcaccccgtcgtgggtcact

SEQ ID NO: 8674 - DNA, 33 bp, Homo sapiens
gggctctggggctcactgcaaatggggttccca

SEQ ID NO: 8675 - DNA, 51 bp, Homo sapiens
agtgccaccgtgagtggttatggaaggagttgcgatgagaagggagctgcc

SEQ ID NO: 8676 - DNA, 33 bp, Homo sapiens
ccattgtctgaaggaagagaaattactgatgaa

SEQ ID NO: 8677 - DNA, 51 bp, Homo sapiens
aggggagggtattaatgtaagagaatggtaggctaaaatcacataaataga

SEQ ID NO: 8678 - DNA, 33 bp, Homo sapiens
aggcaccttgatcttagatttaccagacttcag

SEQ ID NO: 8679 - DNA, 33 bp, Homo sapiens
cttcagcatgcgttgcgaagtgcttgtgccctg

SEQ ID NO: 8680 - DNA, 33 bp, Homo sapiens
agtcctggtaaacacaggcacatgtcagtcagg

SEQ ID NO: 8681 - DNA, 33 bp, Homo sapiens
gctgttcctttgtctataattctttcatctctc

SEQ ID NO: 8682 - DNA, 33 bp, Homo sapiens
cgcacctataacctcagcactttgcactttgac

SEQ ID NO: 8683 - DNA, 33 bp, Homo sapiens
tctcaaggacaaatgcgatgccccgcagcctgt

SEQ ID NO: 8684 - DNA, 33 bp, Homo sapiens
gtgacgttgccttcaagaaataattagggggtg

SEQ ID NO: 8685 - DNA, 33 bp, Homo sapiens
gaacaaatgcttttacgcaaacaccttgattga

SEQ ID NO: 8686 - DNA, 51 bp, Homo sapiens
cctgctgtgagcccagatccagggagccattccatccgcaacacactcagt

SEQ ID NO: 8687 - DNA, 33 bp, Homo sapiens
agagtgacatggtatctgagtgtttttcggatt

SEQ ID NO: 8688 - DNA, 33 bp, Homo sapiens
gacttactctggtagatctgggatgttttgcat

SEQ ID NO: 8689 - DNA, 33 bp, Homo sapiens
tgattgatgcggtgtatgccattgcccacgccc

SEQ ID NO: 8690 - DNA, 33 bp, Homo sapiens
agtgggagtaggggaagacaggcaaagttcctg

SEQ ID NO: 8691 - DNA, 33 bp, Homo sapiens
tcacatcgtggccaaataatgacactgtgggaa

SEQ ID NO: 8692 - DNA, 33 bp, Homo sapiens
attttaacatcaggaaggttcacataaaaagtc

SEQ ID NO: 8693 - DNA, 33 bp, Homo sapiens
agtggaatgtttgagatgcacaaataccttaaa

SEQ ID NO: 8694 - DNA, 33 bp, Homo sapiens
taacaaggaagttcatgaaaagtctagatgcaa

SEQ ID NO: 8695 - DNA, 33 bp, Homo sapiens
cagctggtaacagagctacaaagtgccaaatgg

SEQ ID NO: 8696 - DNA, 33 bp, Homo sapiens
aagttgtttctacggctaagctgggaccctaac

SEQ ID NO: 8697 - DNA, 33 bp, Homo sapiens
ttaaatgcgaacaaacgcacttggaggaattcc

SEQ ID NO: 8698 - DNA, 33 bp, Homo sapiens
tggctgaagaaaacgcgaccttgagacttccaa

SEQ ID NO: 8699 - DNA, 33 bp, Homo sapiens
catttaatggggacttgaaaacagaagctatgt

SEQ ID NO: 8700 - DNA, 33 bp, Homo sapiens
gacctggaaagggaacggaattatctacagaat

SEQ ID NO: 8701 - DNA, 33 bp, Homo sapiens
gtacagacagattatatgagacaggttgttgga

SEQ ID NO: 8702 - DNA, 33 bp, Homo sapiens
gattctaagtaactgcgaccctgccgtagacgc

SEQ ID NO: 8703 - DNA, 33 bp, Homo sapiens
gaagcttgtccagttcgagggaagcagggtact

SEQ ID NO: 8704 - DNA, 33 bp, Homo sapiens
acctaggaatgagacctggctaaagactgtgct

SEQ ID NO: 8705 - DNA, 33 bp, Homo sapiens
gttttattcactttcagcaaggagggagagttt

SEQ ID NO: 8706 - DNA, 33 bp, Homo sapiens
aaggccattgcatcatgagggcgtgttccatga

SEQ ID NO: 8707 - DNA, 33 bp, Homo sapiens
tgtgtccctgcattaatacctgtggatctggtg

SEQ ID NO: 8708 - DNA, 33 bp, Homo sapiens
aaatcatgtgaaaattgaaacctctggctgtct

SEQ ID NO: 8709 - DNA, 33 bp, Homo sapiens
atttcaaaggccagggtgatccaagctgatatt

SEQ ID NO: 8710 - DNA, 33 bp, Homo sapiens
tgctcattctcgtgtagggctgcaggtttccag

SEQ ID NO: 8711 - DNA, 33 bp, Homo sapiens
tcatctagcctgaggagcccttgatacatgatg

SEQ ID NO: 8712 - DNA, 33 bp, Homo sapiens
gagactgccggtgctagaactgtgttcccacgt

SEQ ID NO: 8713 - DNA, 33 bp, Homo sapiens
tcctggcacatacaaagatgtttgttccgttgt

SEQ ID NO: 8714 - DNA, 33 bp, Homo sapiens
ctcatcaaatattctctctgccccgttctctct

SEQ ID NO: 8715 - DNA, 33 bp, Homo sapiens
tgagtttattctaaccgaaaagaagttcattga

SEQ ID NO: 8716 - DNA, 33 bp, Homo sapiens
agaaaggagggctgaataggattacgggagatt

SEQ ID NO: 8717 - DNA, 33 bp, Homo sapiens
tttgttctttatcaccgaaaccattttctagta

SEQ ID NO: 8718 - DNA, 51 bp, Homo sapiens
aagttttataatgacttatttggagtagtgattgatgaaaaattattgtaa

SEQ ID NO: 8719 - DNA, 33 bp, Homo sapiens
cagctgaatcgaacacggccaaccctttgaact

SEQ ID NO: 8720 - DNA, 33 bp, Homo sapiens
tgccttgctgtacctgtattgtagtgacccact

SEQ ID NO: 8721 - DNA, 51 bp, Homo sapiens
caagataaggcgccactacataaaatgattcagaaagtccaagggctctag

SEQ ID NO: 8722 - DNA, 33 bp, Homo sapiens
taaaactgtactgtgtgacaaaactcctgttct

SEQ ID NO: 8723 - DNA, 33 bp, Homo sapiens
gggacaatcttggagacacgtcaactgaagtgc

SEQ ID NO: 8724 - DNA, 33 bp, Homo sapiens
gtctcaactggtttaatctggacaggacctgcc

SEQ ID NO: 8725 - DNA, 51 bp, Homo sapiens
aactatcatagaagcttcaaatgacgatagtttaccttctccttttaaatt

SEQ ID NO: 8726 - DNA, 33 bp, Homo sapiens
cacccttaacaaaccctcaagtgcaaaccataa

SEQ ID NO: 8727 - DNA, 33 bp, Homo sapiens
tctttctaaggcagaagagtagacacaggttct

SEQ ID NO: 8728 - DNA, 33 bp, Homo sapiens
gtcgggtttctgcatatctctttgcccaaccaa

SEQ ID NO: 8729 - DNA, 33 bp, Homo sapiens
tgtgatttgagacaaataattccaaatgtatat

SEQ ID NO: 8730 - DNA, 33 bp, Homo sapiens
ttcttactgttggtcagcaaagagctttttcta

SEQ ID NO: 8731 - DNA, 33 bp, Homo sapiens
aaaggtgagaagtccatgcttcactctgtagcc

SEQ ID NO: 8732 - DNA, 33 bp, Homo sapiens
ttctccttcctgagcatgacttgagcaagcata

SEQ ID NO: 8733 - DNA, 33 bp, Homo sapiens
gacagagagggaatgggaagaccagtcttgcac

SEQ ID NO: 8734 - DNA, 51 bp, Homo sapiens
tttaaaattttgaatatctacaccatggtggtttgtaagttagcttcccta

SEQ ID NO: 8735 - DNA, 33 bp, Homo sapiens
ctgcaacaaagctgaattaaagatgaagtgcaa

SEQ ID NO: 8736 - DNA, 33 bp, Homo sapiens
gtgttatattggccacgacccagagatacccag

SEQ ID NO: 8737 - DNA, 33 bp, Homo sapiens
atatcgtgatgtgttatgtcctgttgactttta

SEQ ID NO: 8738 - DNA, 33 bp, Homo sapiens
aagactagattcaagatgagattgcttcatgtg

SEQ ID NO: 8739 - DNA, 33 bp, Homo sapiens
gtgagttcttgctgcttactgttgtttgtttgt

SEQ ID NO: 8740 - DNA, 33 bp, Homo sapiens
atgaagatttttgtcacgggctgccattacatg

SEQ ID NO: 8741 - DNA, 33 bp, Homo sapiens
gggaacaacaattcaagtggctgcagatttctc

SEQ ID NO: 8742 - DNA, 33 bp, Homo sapiens
ttcctctgttctcacagcacaaaagccaacaca

SEQ ID NO: 8743 - DNA, 33 bp, Homo sapiens
tgttccatgatctttctcttgcaaataagcctc

SEQ ID NO: 8744 - DNA, 33 bp, Homo sapiens
tatcttacacatccattagctacaactgttaac

SEQ ID NO: 8745 - DNA, 33 bp, Homo sapiens
acatgcaatccttaaattccatccaggtagagg

SEQ ID NO: 8746 - DNA, 33 bp, Homo sapiens
agcctttgatatttccggagtcaatacctgctt

SEQ ID NO: 8747 - DNA, 33 bp, Homo sapiens
agggcagccaacaacaggattaaagggctggaa

SEQ ID NO: 8748 - DNA, 33 bp, Homo sapiens
tacctatttaatgactgaacccaaaactaccat

SEQ ID NO: 8749 - DNA, 33 bp, Homo sapiens
aggcaagcgaccagtatgaaagacgtttgccaa

SEQ ID NO: 8750 - DNA, 33 bp, Homo sapiens
cttgttgtgagagaaagcgtgacctgttctcag

SEQ ID NO: 8751 - DNA, 33 bp, Homo sapiens
gtagtctatccctttcgctacaaaaatatccaa

SEQ ID NO: 8752 - DNA, 33 bp, Homo sapiens
agctagatgacaaagatccacattcagacttga

SEQ ID NO: 8753 - DNA, 33 bp, Homo sapiens
tatttttatacaacaagttcccactcctaacat

SEQ ID NO: 8754 - DNA, 33 bp, Homo sapiens
acacacacacatttcagtctccaggagaaactt

SEQ ID NO: 8755 - DNA, 33 bp, Homo sapiens
gactaaattaatatcatactgaggtgagccagt

SEQ ID NO: 8756 - DNA, 33 bp, Homo sapiens
aaaccatcatcctagagtatcagaccaaaagtg

SEQ ID NO: 8757 - DNA, 33 bp, Homo sapiens
tggatgacaaatctcagaaggactctaagggat

SEQ ID NO: 8758 - DNA, 33 bp, Homo sapiens
caggcacaatcatagcgcctaccaattcttcag

SEQ ID NO: 8759 - DNA, 33 bp, Homo sapiens
gatgactgcttgtgtatgcttttggatgttgct

SEQ ID NO: 8760 - DNA, 33 bp, Homo sapiens
atgcagacaagattacggagaaaagaatgcaaa

SEQ ID NO: 8761 - DNA, 33 bp, Homo sapiens
agctaaagctatgcccgaaatgctgtcaggcta

SEQ ID NO: 8762 - DNA, 33 bp, Homo sapiens
tggaatatggcattcctcaaaaaaattaaacgt

SEQ ID NO: 8763 - DNA, 33 bp, Homo sapiens
agagcaaaggtaaacatggtgaaaggtcctgca

SEQ ID NO: 8764 - DNA, 33 bp, Homo sapiens
gggcatagaaataagatcaagtggccaaaggtg

SEQ ID NO: 8765 - DNA, 33 bp, Homo sapiens
gcctgcaacagggatagagaatgaacagccaga

SEQ ID NO: 8766 - DNA, 33 bp, Homo sapiens
atgtgtacattccagagatccaggaaagatggc

SEQ ID NO: 8767 - DNA, 33 bp, Homo sapiens
ctctgttggtattcaccaccatttcttgcatga

SEQ ID NO: 8768 - DNA, 33 bp, Homo sapiens
ggatgggagcctcagatgacactggggtctggg

SEQ ID NO: 8769 - DNA, 33 bp, Homo sapiens
atatggtagctagaaatagagggctctttcctc

SEQ ID NO: 8770 - DNA, 33 bp, Homo sapiens
tgacttcttcagcaaataaattataaggaaaaa

SEQ ID NO: 8771 - DNA, 33 bp, Homo sapiens
aatgaaaatcaagaaatctagcaatggctggtg

SEQ ID NO: 8772 - DNA, 33 bp, Homo sapiens
ggccggggaagtcagatgtgtattataacaaga

SEQ ID NO: 8773 - DNA, 33 bp, Homo sapiens
tttgactcttcagggatctagcactcttcccac

SEQ ID NO: 8774 - DNA, 33 bp, Homo sapiens
gttgatgcaatactgaggtttagatttcagtca

SEQ ID NO: 8775 - DNA, 33 bp, Homo sapiens
gttgaagcaataaatccaaaacccactgataat

SEQ ID NO: 8776 - DNA, 33 bp, Homo sapiens
cactggcactgtgagctccttcaaaaattccta

SEQ ID NO: 8777 - DNA, 33 bp, Homo sapiens
caaagcataatttgtatgacggatctgtgtgtt

SEQ ID NO: 8778 - DNA, 33 bp, Homo sapiens
ccctgtgaaaaagccagattagacactgtgggt

SEQ ID NO: 8779 - DNA, 33 bp, Homo sapiens
tcctctgtcatcagcgtatggaagtcttgtttg

SEQ ID NO: 8780 - DNA, 33 bp, Homo sapiens
cttgcaaatttttccatgctagtcaatcattat

SEQ ID NO: 8781 - DNA, 33 bp, Homo sapiens
ctggcattgtaatcactggctctgttatggatt

SEQ ID NO: 8782 - DNA, 33 bp, Homo sapiens
atagcttggactgcattaagtgcctctggggtt

SEQ ID NO: 8783 - DNA, 33 bp, Homo sapiens
cctcactttgtgctccgaacaacagtactccag

SEQ ID NO: 8784 - DNA, 33 bp, Homo sapiens
aagcatgggttctggataccgggagtaaaagca

SEQ ID NO: 8785 - DNA, 33 bp, Homo sapiens
ccctttctattgagaatcagtttcttgctttgt

SEQ ID NO: 8786 - DNA, 33 bp, Homo sapiens
tccctagttggcattcggaacatttttccccat

SEQ ID NO: 8787 - DNA, 33 bp, Homo sapiens
gtgagctacacagacagaagtttctccagtatg

SEQ ID NO: 8788 - DNA, 51 bp, Homo sapiens
gattatttgaggctgagataataaattgtctaagaagcaaccatttttctc

SEQ ID NO: 8789 - DNA, 33 bp, Homo sapiens
aaattgcaaatgtaaatgctttagaagacaaca

SEQ ID NO: 8790 - DNA, 51 bp, Homo sapiens
aggagaagtctctacaaactaaagatctctgtaaacatctactcaggtccc

SEQ ID NO: 8791 - DNA, 33 bp, Homo sapiens
tgatagctgtttttcagagtaaatataaactgt

SEQ ID NO: 8792 - DNA, 33 bp, Homo sapiens
cagggctataggagccgagttcagtgggagctc

SEQ ID NO: 8793 - DNA, 51 bp, Homo sapiens
atgtcaaagcatgtgaaattataacgctgggcccttgccaaaaaatacaat

SEQ ID NO: 8794 - DNA, 33 bp, Homo sapiens
cctggtgacagcccccgcatacctgtgctcagt

SEQ ID NO: 8795 - DNA, 51 bp, Homo sapiens
tggccatcttaattagcttcctaaaggattattacatcaaagtatgtcact

SEQ ID NO: 8796 - DNA, 33 bp, Homo sapiens
gtttagctttccagtcgcattactctttcccag

SEQ ID NO: 8797 - DNA, 33 bp, Homo sapiens
ataaactcacaaacgagctcaggatggactgtt

SEQ ID NO: 8798 - DNA, 33 bp, Homo sapiens
tccaggaaagacgatctcctcaccaacacaagc

SEQ ID NO: 8799 - DNA, 33 bp, Homo sapiens
tggtaacattgtctgctaggtgttcaattgttg

SEQ ID NO: 8800 - DNA, 33 bp, Homo sapiens
gtcataggtgctattatgtcaaagggtatagtg

SEQ ID NO: 8801 - DNA, 51 bp, Homo sapiens
tgtagaattttatgtcttttatagagctcattggtggtgtagtgggcactg

SEQ ID NO: 8802 - DNA, 33 bp, Homo sapiens
actacttgtctacatattaagaggagagctgca

SEQ ID NO: 8803 - DNA, 51 bp, Homo sapiens
tgctcagaatgcaagaaagctttgcgccagaaccgttaaacattcatgaac

SEQ ID NO: 8804 - DNA, 33 bp, Homo sapiens
aagatggtgacgtgaagcaaatgcagaaagaca

SEQ ID NO: 8805 - DNA, 33 bp, Homo sapiens
ctctagtcaaacagccggaacactctctccctg

SEQ ID NO: 8806 - DNA, 33 bp, Homo sapiens
atgtagatgttactacgccacaagcagagggag

SEQ ID NO: 8807 - DNA, 33 bp, Homo sapiens
ctttcgtggtttgccaccttgagagtatgtcac

SEQ ID NO: 8808 - DNA, 33 bp, Homo sapiens
tcactctggggccccatgaatttgcgttgttct

SEQ ID NO: 8809 - DNA, 33 bp, Homo sapiens
actaaccttgcctttatgaggtaggaggtggga

SEQ ID NO: 8810 - DNA, 33 bp, Homo sapiens
tctgtcctgaggaaattaagagtccagttcctg

SEQ ID NO: 8811 - DNA, 33 bp, Homo sapiens
cccttgacaccatcaatgtactttcttcatcct

SEQ ID NO: 8812 - DNA, 33 bp, Homo sapiens
tgacattagctgaccattctgtagtccttgaaa

SEQ ID NO: 8813 - DNA, 51 bp, Homo sapiens
aaagaatctagggtcagtaaagaaatctaattgttataaatccatctttat

SEQ ID NO: 8814 - DNA, 33 bp, Homo sapiens
cttctctgactttgacgcctacactctattttt

SEQ ID NO: 8815 - DNA, 33 bp, Homo sapiens
atatacaaagcattcagtaaatacagaaattat

SEQ ID NO: 8816 - DNA, 33 bp, Homo sapiens
atcactgcaacaggaatgtaattttcaccccac

SEQ ID NO: 8817 - DNA, 33 bp, Homo sapiens
tatggtgcaaaaccaataatcatagcagcctca

SEQ ID NO: 8818 - DNA, 33 bp, Homo sapiens
aatccaaaggtacaaagtaagagtgtggctaag

SEQ ID NO: 8819 - DNA, 33 bp, Homo sapiens
caaattttaagttttagagtcactatattgtct

SEQ ID NO: 8820 - DNA, 33 bp, Homo sapiens
agtgctttctctgacagattgcatggtggatag

SEQ ID NO: 8821 - DNA, 51 bp, Homo sapiens
cttttggaaggaaaaaaaggccatagtaaatatccatttccaggattgtat

SEQ ID NO: 8822 - DNA, 33 bp, Homo sapiens
tctcaaggcccttccagtctatttctggcctat

SEQ ID NO: 8823 - DNA, 33 bp, Homo sapiens
cattgtaatccttatcgacctacccttgacttt

SEQ ID NO: 8824 - DNA, 33 bp, Homo sapiens
tggcagagaaagggaggccatctttcgtgtctt

SEQ ID NO: 8825 - DNA, 33 bp, Homo sapiens
agtcaggatgtgaaacgccattaagtataacag

SEQ ID NO: 8826 - DNA, 51 bp, Homo sapiens
tccaacatcactcctttgtgcgaccggcccatgggaagctaagatgagtcc

SEQ ID NO: 8827 - DNA, 33 bp, Homo sapiens
atcccaaatccaacacggcatctatttgagaga

SEQ ID NO: 8828 - DNA, 33 bp, Homo sapiens
aacttctgaggtcagctaccatatcttcctcta

SEQ ID NO: 8829 - DNA, 33 bp, Homo sapiens
aatatcttaattaaacgcacatctgagaacctt

SEQ ID NO: 8830 - DNA, 33 bp, Homo sapiens
agtgacaggttctgaagtaaacaggccttcggt

SEQ ID NO: 8831 - DNA, 33 bp, Homo sapiens
caccaaaagccaagccgattctggcaccatgct

SEQ ID NO: 8832 - DNA, 33 bp, Homo sapiens
ttctggcattgcacaagtaataaaaaagtaatc

SEQ ID NO: 8833 - DNA, 33 bp, Homo sapiens
aagtacttccatccaagaggtgattgactgtac

SEQ ID NO: 8834 - DNA, 51 bp, Homo sapiens
agttctgaaacccaaaatgtcggcagtataagcgcacatcagttaacatac

SEQ ID NO: 8835 - DNA, 33 bp, Homo sapiens
aaaagaaatgtcagcataattttcagatagtat

SEQ ID NO: 8836 - DNA, 33 bp, Homo sapiens
tgctagatgatagcaattgattttggagcaaca

SEQ ID NO: 8837 - DNA, 33 bp, Homo sapiens
aaagagctacagttatgagatagaagaggttag

SEQ ID NO: 8838 - DNA, 33 bp, Homo sapiens
tttacaatagtgttaatcaattcataagggtgg

SEQ ID NO: 8839 - DNA, 33 bp, Homo sapiens
gtgtgttggtatgatggcagtgttttcctaaag

SEQ ID NO: 8840 - DNA, 33 bp, Homo sapiens
attcctgttgagtcaagccaccatagaatatcc

SEQ ID NO: 8841 - DNA, 51 bp, Homo sapiens
gcacaaagtaagaaaacaaggaagattcggagctgatctcatacctcgctg

SEQ ID NO: 8842 - DNA, 33 bp, Homo sapiens
agagctgttaatgttctctgaagactttcctgc

SEQ ID NO: 8843 - DNA, 33 bp, Homo sapiens
attacccttaaaagtatacctcccagtgaatcc

SEQ ID NO: 8844 - DNA, 33 bp, Homo sapiens
acgaacgaaaaagcagtagaagctgaattgcag

SEQ ID NO: 8845 - DNA, 33 bp, Homo sapiens
actctggaaaggaacataagtggatataaaaag

SEQ ID NO: 8846 - DNA, 33 bp, Homo sapiens
tttggggtcataaaacgcaatctttggaaatat

SEQ ID NO: 8847 - DNA, 33 bp, Homo sapiens
acctgtaacaatagcctagaagtaagtaaaaac

SEQ ID NO: 8848 - DNA, 33 bp, Homo sapiens
ctaaatgtttcaggaaggaccttgcaaggacac

SEQ ID NO: 8849 - DNA, 33 bp, Homo sapiens
tcaagcaggagaaagaggaatgagccaaaagca

SEQ ID NO: 8850 - DNA, 33 bp, Homo sapiens
gtagaaagttcctctggagttgatcacaaatta

SEQ ID NO: 8851 - DNA, 33 bp, Homo sapiens
caactagagtattgtatattggaggaaagctgt

SEQ ID NO: 8852 - DNA, 33 bp, Homo sapiens
aggcagatggcggatattaggaataaggtctag

SEQ ID NO: 8853 - DNA, 51 bp, Homo sapiens
cccgactaattaaagggctaaaatatatgtatagatagttataattctaga

SEQ ID NO: 8854 - DNA, 33 bp, Homo sapiens
tgcacaaatatatatcgcatcccacatgctctt

SEQ ID NO: 8855 - DNA, 51 bp, Homo sapiens
acagatgagtacagtttcaatcacatggtggtcgactgcggctgctgtgcc

SEQ ID NO: 8856 - DNA, 51 bp, Homo sapiens
gactccattcattacttgattcttataaggccccacttcaacaaggggtcc

SEQ ID NO: 8857 - DNA, 33 bp, Homo sapiens
attgcctttgaataaatgggactactactacta

SEQ ID NO: 8858 - DNA, 33 bp, Homo sapiens
acccaacctctctattgaaagtcattagcaagt

SEQ ID NO: 8859 - DNA, 33 bp, Homo sapiens
gctatatgccctcacagattcttctactaaact

SEQ ID NO: 8860 - DNA, 33 bp, Homo sapiens
agtacacaaggtcagcggacgaaaaattcctag

SEQ ID NO: 8861 - DNA, 33 bp, Homo sapiens
ggcagtcaagttcaaagccaaacgttgaatgct

SEQ ID NO: 8862 - DNA, 51 bp, Homo sapiens
gtaaaaaggcagcaatgtttccataggatctgcttcatactgctggttttc

SEQ ID NO: 8863 - DNA, 33 bp, Homo sapiens
cctcaaatgacggtgaggattccacattgatat

SEQ ID NO: 8864 - DNA, 33 bp, Homo sapiens
tctcttgtttgctgaagataagacacaaaagtt

SEQ ID NO: 8865 - DNA, 33 bp, Homo sapiens
agcacttgaaaagcaaccacaggtaatagtttt

SEQ ID NO: 8866 - DNA, 33 bp, Homo sapiens
tatatagaggaggaacgcaatacctgctttgtg

SEQ ID NO: 8867 - DNA, 33 bp, Homo sapiens
gagttcaggtttattctaagtgaagcgggaagc

SEQ ID NO: 8868 - DNA, 33 bp, Homo sapiens
tttttttctgaaatgatgttgatgtatcctaag

SEQ ID NO: 8869 - DNA, 33 bp, Homo sapiens
ttaagtctctggaaaagaggtaacgaacgtcaa

SEQ ID NO: 8870 - DNA, 33 bp, Homo sapiens
acacataagcaaatagtagggaacgtgaaaggg

SEQ ID NO: 8871 - DNA, 33 bp, Homo sapiens
ctataaaaagcaacccgaggagaactttcatgt

SEQ ID NO: 8872 - DNA, 33 bp, Homo sapiens
agctatggttgttgaagtgtggtccctggagca

SEQ ID NO: 8873 - DNA, 33 bp, Homo sapiens
ccagacagtttcaagagtcccttccgagtatga

SEQ ID NO: 8874 - DNA, 33 bp, Homo sapiens
ggaaagcttgcaagaacttagtagaacacttga

SEQ ID NO: 8875 - DNA, 33 bp, Homo sapiens
agatatatgataggtatgtaggtagataggtag

SEQ ID NO: 8876 - DNA, 33 bp, Homo sapiens
aagcaattttttaataggtgaatctgagaagag

SEQ ID NO: 8877 - DNA, 33 bp, Homo sapiens
actattagtgatacacggaacaagagcatggat

SEQ ID NO: 8878 - DNA, 33 bp, Homo sapiens
tatgatgtcccatgccggcagagagtgagaaag

SEQ ID NO: 8879 - DNA, 33 bp, Homo sapiens
tattgtttggtcattagtaaaatagtgataata

SEQ ID NO: 8880 - DNA, 33 bp, Homo sapiens
ggcagcgaataaaagcgaatcatttaaaatcat

SEQ ID NO: 8881 - DNA, 33 bp, Homo sapiens
agttatgtaaacaggaggtgcagcatagtgtct

SEQ ID NO: 8882 - DNA, 33 bp, Homo sapiens
ctgcctgatgtgctgatctctgtacaactttgc

SEQ ID NO: 8883 - DNA, 33 bp, Homo sapiens
agaatcaaagtcaagatgcctcctgaatatact

SEQ ID NO: 8884 - DNA, 33 bp, Homo sapiens
tctacttctctcacccgcttcaaagccaggctt

SEQ ID NO: 8885 - DNA, 33 bp, Homo sapiens
acccatttctaaaacaggtcttgataggaatga

SEQ ID NO: 8886 - DNA, 33 bp, Homo sapiens
cctgcgagctctgttatgaaggaaatcgaaagc

SEQ ID NO: 8887 - DNA, 51 bp, Homo sapiens
atgtcagattagagaaaccaaacaatgtgacggtacatgtgatgaaaagct

SEQ ID NO: 8888 - DNA, 33 bp, Homo sapiens
tttatcgggtggtttataggctctttatcatgg

SEQ ID NO: 8889 - DNA, 33 bp, Homo sapiens
acgaaaactagctagatatggtagtgcgtgctt

SEQ ID NO: 8890 - DNA, 51 bp, Homo sapiens
gcctaagagatttattagctaaatatatgagtagtccttgtttggattcta

SEQ ID NO: 8891 - DNA, 33 bp, Homo sapiens
atgcaaggatagggtagtaattcatctctagtc

SEQ ID NO: 8892 - DNA, 33 bp, Homo sapiens
atggctactaggcccatgtctaacaattcctca

SEQ ID NO: 8893 - DNA, 33 bp, Homo sapiens
cagttggctgaaattagaagaaagaatttggac

SEQ ID NO: 8894 - DNA, 33 bp, Homo sapiens
tgtttcaacgtgtctatgactacctgtctttta

SEQ ID NO: 8895 - DNA, 33 bp, Homo sapiens
ctttgccctgttttcatctttcttgttacacaa

SEQ ID NO: 8896 - DNA, 33 bp, Homo sapiens
ctatacgaagctaacttacctgtctcaggaata

SEQ ID NO: 8897 - DNA, 33 bp, Homo sapiens
cttaattgtcctacaatgtctcggataccagtt

SEQ ID NO: 8898 - DNA, 33 bp, Homo sapiens
gtttaataactttagataggtttgaagaggtgg

SEQ ID NO: 8899 - DNA, 51 bp, Homo sapiens
aggtgttgggaattcccgagaaagcggatcggcattattgtttattgcttg

SEQ ID NO: 8900 - DNA, 33 bp, Homo sapiens
tctacattcagatatggagccatagaatcagag

SEQ ID NO: 8901 - DNA, 33 bp, Homo sapiens
tggttattttatgttggactctttaggaactgc

SEQ ID NO: 8902 - DNA, 33 bp, Homo sapiens
tctctgcgggcacagatctaaagggggatgcag

SEQ ID NO: 8903 - DNA, 33 bp, Homo sapiens
aggccagcagaaggaacacaatcttccctaaaa

SEQ ID NO: 8904 - DNA, 33 bp, Homo sapiens
ctctgtggtgaggatatggttattcattgtact

SEQ ID NO: 8905 - DNA, 33 bp, Homo sapiens
tgtctgttgctccagatcgaatacaagttctta

SEQ ID NO: 8906 - DNA, 33 bp, Homo sapiens
gaggtggtattcttacgatgaatgcagttgatt

SEQ ID NO: 8907 - DNA, 33 bp, Homo sapiens
ggggctggtctcataagggaaagggataattat

SEQ ID NO: 8908 - DNA, 33 bp, Homo sapiens
tgcaaagatcaattgaggccaccaggagttcgc

SEQ ID NO: 8909 - DNA, 33 bp, Homo sapiens
aaatctttgagaagaattcatgacggaaccaca

SEQ ID NO: 8910 - DNA, 33 bp, Homo sapiens
cttcagatcaccatcagagaattgctaaaatga

SEQ ID NO: 8911 - DNA, 33 bp, Homo sapiens
ctttgtacagagttgagacaggatgacatgaca

SEQ ID NO: 8912 - DNA, 33 bp, Homo sapiens
catgctatccaataaagatgatgtctttcaaac

SEQ ID NO: 8913 - DNA, 33 bp, Homo sapiens
tctccttaatgtatcctgaggtaagtttcctac

SEQ ID NO: 8914 - DNA, 33 bp, Homo sapiens
gactggcagaagaaaggcttgtccatacgcagg

SEQ ID NO: 8915 - DNA, 33 bp, Homo sapiens
acatagcaatggttgcgaggagttaatgaggta

SEQ ID NO: 8916 - DNA, 33 bp, Homo sapiens
gccagagggttagaaggagaattatgtgtcttc

SEQ ID NO: 8917 - DNA, 33 bp, Homo sapiens
tctaaacaagtgaaaaccaatagctgaaaaatt

SEQ ID NO: 8918 - DNA, 33 bp, Homo sapiens
ctttgttattttgaaattgaaagtctgagcaga

SEQ ID NO: 8919 - DNA, 51 bp, Homo sapiens
tcaactttccacctctgttaactacgctgcagaaacttttgacactgaact

SEQ ID NO: 8920 - DNA, 51 bp, Homo sapiens
gcgattctttcactggaagggatgattcagagaggaagagttggcattaat

SEQ ID NO: 8921 - DNA, 33 bp, Homo sapiens
actgtgagcagtgaaatctgtatctgtgcaacg

SEQ ID NO: 8922 - DNA, 33 bp, Homo sapiens
tgccagccacttcttatagacagcctactcacc

SEQ ID NO: 8923 - DNA, 33 bp, Homo sapiens
cagtgctttgcccgtagagacaattcaacaaat

SEQ ID NO: 8924 - DNA, 33 bp, Homo sapiens
tttattaatttaatcatcagtttgcgtcattgc

SEQ ID NO: 8925 - DNA, 33 bp, Homo sapiens
ctcaaggctttcatcacaatgttcagttcttgc

SEQ ID NO: 8926 - DNA, 33 bp, Homo sapiens
tttccaaaatcgtgcagggtttctattctgtag

SEQ ID NO: 8927 - DNA, 51 bp, Homo sapiens
tctcagtttggggaaacatcagaattatcataaatggagataatttatgtg

SEQ ID NO: 8928 - DNA, 51 bp, Homo sapiens
ttatgttgtccactggaatggaacagaattaagaaggcctatgaatttatg

SEQ ID NO: 8929 - DNA, 51 bp, Homo sapiens
tcagccaaagtgtgtgccactgtctgacataaaacgaagatgtttcctgaa

SEQ ID NO: 8930 - DNA, 33 bp, Homo sapiens
gaagcaaagccccacagctatgtgatcttgaga

SEQ ID NO: 8931 - DNA, 33 bp, Homo sapiens
cgttggtctacagaaagaggaatgactgcattg

SEQ ID NO: 8932 - DNA, 33 bp, Homo sapiens
gtgcaatactttgagaggatgatcttcaatcct

SEQ ID NO: 8933 - DNA, 51 bp, Homo sapiens
  45: IBRDC2 , rs490618,  IBR domain containing 2 ,p22.3
aatatcttgattacagggggtaaggttgtctcatatcagtatcangctaga

SEQ ID NO: 8934 - DNA, 33 bp, Homo sapiens
ctgtgtaaatctttgattaagagggcagcagca

SEQ ID NO: 8935 - DNA, 33 bp, Homo sapiens
gggagggcagaggtactagtagatagaggaagg

SEQ ID NO: 8936 - DNA, 33 bp, Homo sapiens
caactcagtactctggtcacttcatgtgttcat

SEQ ID NO: 8937 - DNA, 51 bp, Homo sapiens
catctaggctaaataaattacgtaacgaattatgtgattacttattgtgtt

SEQ ID NO: 8938 - DNA, 33 bp, Homo sapiens
acatttttacatatacgaaagctgaaaaagtgc

SEQ ID NO: 8939 - DNA, 33 bp, Homo sapiens
gaagcacccgtctgctgacaccattagagcctt

SEQ ID NO: 8940 - DNA, 33 bp, Homo sapiens
aggagaccaggttagataatgacccgggaagga

SEQ ID NO: 8941 - DNA, 33 bp, Homo sapiens
gaggtgtctttaaacataagcacacataaaaca

SEQ ID NO: 8942 - DNA, 33 bp, Homo sapiens
caccttcataatctccgcattgccacttccagc

SEQ ID NO: 8943 - DNA, 33 bp, Homo sapiens
ccttagctgctatttataagtccatttcatcag

SEQ ID NO: 8944 - DNA, 33 bp, Homo sapiens
aaagaaaacccagtgcggaaatggacaataaga

SEQ ID NO: 8945 - DNA, 33 bp, Homo sapiens
atagtagccataaaactgttctgtgttcttatc

SEQ ID NO: 8946 - DNA, 51 bp, Homo sapiens
tcttacctgctcaggttgtggaatcgagttctaggattgagattctggcat

SEQ ID NO: 8947 - DNA, 51 bp, Homo sapiens
tcaaattgaggccatacaaattaatgaagtgtttctactgaagctacccaa

SEQ ID NO: 8948 - DNA, 33 bp, Homo sapiens
acctgagccttctgcatggtgacactgattttt

SEQ ID NO: 8949 - DNA, 51 bp, Homo sapiens
aattaagaagccaaacagtttaccagaaagcttggccaataacttttctca

SEQ ID NO: 8950 - DNA, 33 bp, Homo sapiens
ttgctaaccagtcgccggaattatcccctatag

SEQ ID NO: 8951 - DNA, 33 bp, Homo sapiens
ccatgtggcaccttccggcagtactttcaaggg

SEQ ID NO: 8952 - DNA, 33 bp, Homo sapiens
tcaggaccttttacacgatactttatccactca

SEQ ID NO: 8953 - DNA, 33 bp, Homo sapiens
aacctttgcatattcctctttaatgaactctga

SEQ ID NO: 8954 - DNA, 33 bp, Homo sapiens
caatcaaattttagcagcatccacgaacttaat

SEQ ID NO: 8955 - DNA, 33 bp, Homo sapiens
aaatcagcttgtctgatggggctacacagagaa

SEQ ID NO: 8956 - DNA, 33 bp, Homo sapiens
catctatttatcctaaccgaagaccttttaaaa

SEQ ID NO: 8957 - DNA, 33 bp, Homo sapiens
ttgctagattgggagagcatttctactgataag

SEQ ID NO: 8958 - DNA, 51 bp, Homo sapiens
cgccttctcccttctaatctcagtcgctagttgttaccattaattaaccct

SEQ ID NO: 8959 - DNA, 33 bp, Homo sapiens
ggatgaagcatttaatgagtcagggaatagtaa

SEQ ID NO: 8960 - DNA, 33 bp, Homo sapiens
attgaaaagctaagtcgaggcactggtgtagaa

SEQ ID NO: 8961 - DNA, 33 bp, Homo sapiens
tttattttattttttagcatggcagctttcaga

SEQ ID NO: 8962 - DNA, 33 bp, Homo sapiens
tgaacattgcacaaaggaaaagccaatgcatca

SEQ ID NO: 8963 - DNA, 33 bp, Homo sapiens
ttcagtttttcctccatgctttactcatgactg

SEQ ID NO: 8964 - DNA, 33 bp, Homo sapiens
taccttatatacaggagggatgttacacaattt

SEQ ID NO: 8965 - DNA, 33 bp, Homo sapiens
actttattagagaacatgggtgtccaaaatata

SEQ ID NO: 8966 - DNA, 33 bp, Homo sapiens
ctatattctttatcaggcaccattatcctctgt

SEQ ID NO: 8967 - DNA, 33 bp, Homo sapiens
attattagtaaaagattaatgtgttccaacggc

SEQ ID NO: 8968 - DNA, 33 bp, Homo sapiens
ttctgtgaaccactgatgatttctcactgccta

SEQ ID NO: 8969 - DNA, 51 bp, Homo sapiens
acatgatcttgcagcaaatcttgaacaactctatggaattaacagaacatc

SEQ ID NO: 8970 - DNA, 33 bp, Homo sapiens
aggggtcagagagagcgccttgaatcactgcca

SEQ ID NO: 8971 - DNA, 51 bp, Homo sapiens
caaaagcttcacgaagttatagtcatgagcagggacagaaatgaggaggaa

SEQ ID NO: 8972 - DNA, 33 bp, Homo sapiens
cggaaaataacacaaagtcacgatctatgaaag

SEQ ID NO: 8973 - DNA, 33 bp, Homo sapiens
gtttttcttggctttggatacacctgtgcagat

SEQ ID NO: 8974 - DNA, 33 bp, Homo sapiens
cagtatatttgtggaatgcccagctttccttct

SEQ ID NO: 8975 - DNA, 33 bp, Homo sapiens
taacaactacttgagattatgtgtgtcagaaag

SEQ ID NO: 8976 - DNA, 33 bp, Homo sapiens
tcttactccagctttatgataactctaagggac

SEQ ID NO: 8977 - DNA, 33 bp, Homo sapiens
gaatagtagaaaacaggaagagggtctcgatag

SEQ ID NO: 8978 - DNA, 33 bp, Homo sapiens
tgttatcctagctccatgtttttttcttttttg

SEQ ID NO: 8979 - DNA, 33 bp, Homo sapiens
tagtcaagaaactcaagtccaacacgggtatct

SEQ ID NO: 8980 - DNA, 33 bp, Homo sapiens
cagtaagttagatggctcagagataggattgaa

SEQ ID NO: 8981 - DNA, 33 bp, Homo sapiens
tacgatgttgccctaatcctcagggagtgtaca

SEQ ID NO: 8982 - DNA, 33 bp, Homo sapiens
ccagagccagtactcttaaccattaagcggaag

SEQ ID NO: 8983 - DNA, 33 bp, Homo sapiens
aaataatactctggaaggaagtctctgatcacc

SEQ ID NO: 8984 - DNA, 33 bp, Homo sapiens
atgttccagctgtaaggagaaagcatatccttc

SEQ ID NO: 8985 - DNA, 33 bp, Homo sapiens
tcgattaccagttgcatgtagaattacttttgt

SEQ ID NO: 8986 - DNA, 33 bp, Homo sapiens
cttatcactgagcaaccatttgaggagagtcgg

SEQ ID NO: 8987 - DNA, 33 bp, Homo sapiens
cttagtggcactgaaccaacatatttcagtgtc

SEQ ID NO: 8988 - DNA, 51 bp, Homo sapiens
ttagttgtattacggtaatcgggcatatgtcttctaaccttgatgatctca

SEQ ID NO: 8989 - DNA, 33 bp, Homo sapiens
gtgaggacttactgtatactctcatgacttcac

SEQ ID NO: 8990 - DNA, 33 bp, Homo sapiens
tgggagagtgtgataagagcgggtgaggaaagt

SEQ ID NO: 8991 - DNA, 33 bp, Homo sapiens
actggaagattccacagacgttggaaggctagg

SEQ ID NO: 8992 - DNA, 51 bp, Homo sapiens
aatgtgagagactgaatagagagtggtctgaacaactaagccagggaatgt

SEQ ID NO: 8993 - DNA, 33 bp, Homo sapiens
agcttcacaaacacaattacctgttactaaaat

SEQ ID NO: 8994 - DNA, 33 bp, Homo sapiens
taatcatagcaagctagaggcctgaatgatagt

SEQ ID NO: 8995 - DNA, 33 bp, Homo sapiens
aatcaaacacatgtaacaaattcattggttggg

SEQ ID NO: 8996 - DNA, 33 bp, Homo sapiens
tgcccaggctggaaaagtgtactgttttaaacc

SEQ ID NO: 8997 - DNA, 33 bp, Homo sapiens
agaaaccactgaggaaggttgaaatgaaaactg

SEQ ID NO: 8998 - DNA, 33 bp, Homo sapiens
cctatgcccaggtacagattcaaaacagatgag

SEQ ID NO: 8999 - DNA, 33 bp, Homo sapiens
agccacaggaaggttagagcagaaaaaggactg

SEQ ID NO: 9000 - DNA, 33 bp, Homo sapiens
acaagtttttggttcacagttctataggtcaga

SEQ ID NO: 9001 - DNA, 33 bp, Homo sapiens
ggggcaaccttcaaccgatttaagcaaaagagg

SEQ ID NO: 9002 - DNA, 33 bp, Homo sapiens
cttctgagaatataatgaatgcctttcaaggtc

SEQ ID NO: 9003 - DNA, 33 bp, Homo sapiens
aagagaaagaacttcagataaacagtaaaagag

SEQ ID NO: 9004 - DNA, 51 bp, Homo sapiens
agacaagtgtgtctaataaagaggagtagctacagtggctcagttggtaca

SEQ ID NO: 9005 - DNA, 33 bp, Homo sapiens
agctatattaccttcacagactgtagtttattg

SEQ ID NO: 9006 - DNA, 33 bp, Homo sapiens
gagtatggaatctctatctccagccttgaggtc

SEQ ID NO: 9007 - DNA, 33 bp, Homo sapiens
ttgacgaaaagtttcatccctacctctcaaagt

SEQ ID NO: 9008 - DNA, 33 bp, Homo sapiens
tggttgataaaactgaggtctggaaaatttaag

SEQ ID NO: 9009 - DNA, 33 bp, Homo sapiens
cctgatattgagaatatacactttgagattaga

SEQ ID NO: 9010 - DNA, 33 bp, Homo sapiens
gtgtgtatctgtctcctacatttgtaaggtctc

SEQ ID NO: 9011 - DNA, 33 bp, Homo sapiens
gaatcaccttttcggctacggacttagggaagc

SEQ ID NO: 9012 - DNA, 33 bp, Homo sapiens
tagtattgggcagataggataaaacaacttgga

SEQ ID NO: 9013 - DNA, 51 bp, Homo sapiens
tgtaatgaatcaataataaatagcattgaattaagatgtgaccattttatt

SEQ ID NO: 9014 - DNA, 33 bp, Homo sapiens
ggattgggattgttgcgaaatttgagaaactag

SEQ ID NO: 9015 - DNA, 33 bp, Homo sapiens
aaaaaaatttgtaatatgtcctcagtctgctgt

SEQ ID NO: 9016 - DNA, 33 bp, Homo sapiens
ccaggaggaagggaactgtaaatcgcacccttt

SEQ ID NO: 9017 - DNA, 33 bp, Homo sapiens
tcttgttgcatgtttatcgtttgtctgggatcc

SEQ ID NO: 9018 - DNA, 33 bp, Homo sapiens
gttcactaacacaacctagaaattggcacctga

SEQ ID NO: 9019 - DNA, 33 bp, Homo sapiens
ttgcttcgtaaaagccgctcactaatacaacat

SEQ ID NO: 9020 - DNA, 33 bp, Homo sapiens
cagtggtcttcagaaatcgcttagcagagtggc

SEQ ID NO: 9021 - DNA, 33 bp, Homo sapiens
ggaaacatcaagaaatgagttgagtttgacctt

SEQ ID NO: 9022 - DNA, 33 bp, Homo sapiens
aatatatcacacacattaaaatttcaggtgcag

SEQ ID NO: 9023 - DNA, 33 bp, Homo sapiens
tggcagagatctgagagagggtgaggaaaaagt

SEQ ID NO: 9024 - DNA, 33 bp, Homo sapiens
agattaggcctaagaggagggtataacaccact

SEQ ID NO: 9025 - DNA, 33 bp, Homo sapiens
gaaccacactatctgactcaagtgtgagcagtt

SEQ ID NO: 9026 - DNA, 33 bp, Homo sapiens
gggaacaagtagcacagtgagtgtccacaggct

SEQ ID NO: 9027 - DNA, 33 bp, Homo sapiens
atatctatgtgggtcatggaatgaattgcagtg

SEQ ID NO: 9028 - DNA, 33 bp, Homo sapiens
gagaattaagtggtgacctaaaggataaagtgt

SEQ ID NO: 9029 - DNA, 33 bp, Homo sapiens
ttgctgtgaacctgaacgtgctctataaaaaga

SEQ ID NO: 9030 - DNA, 33 bp, Homo sapiens
ccaataggttctaatatgcaaagaatgccaaga

SEQ ID NO: 9031 - DNA, 33 bp, Homo sapiens
ccattcctccttgacattggatatgcattcttt

SEQ ID NO: 9032 - DNA, 33 bp, Homo sapiens
tacatgtagtagttcccctttatcatggttttg

SEQ ID NO: 9033 - DNA, 33 bp, Homo sapiens
tttctatgcccctttatctctaatgtccctatt

SEQ ID NO: 9034 - DNA, 51 bp, Homo sapiens
attaatttttaggcagtcccacatacggtgttaaaggccaaatgcaaggaa

SEQ ID NO: 9035 - DNA, 33 bp, Homo sapiens
ccaggtgtcctgtccattctcaggttggtcaca

SEQ ID NO: 9036 - DNA, 33 bp, Homo sapiens
agccaccatgccggccgaaaaagcatgtaaact

SEQ ID NO: 9037 - DNA, 33 bp, Homo sapiens
gttgcaggtttccccagatagagaacatcaata

SEQ ID NO: 9038 - DNA, 33 bp, Homo sapiens
gtctcatagttttctgtatctaaggtaagcgca

SEQ ID NO: 9039 - DNA, 33 bp, Homo sapiens
ggacatatgatgaaaatagggaccacagctgcc

SEQ ID NO: 9040 - DNA, 33 bp, Homo sapiens
ggtgtccttagatcactggagttaatagtagca

SEQ ID NO: 9041 - DNA, 33 bp, Homo sapiens
agaaatgaaatggaaggatgatctctttggtaa

SEQ ID NO: 9042 - DNA, 33 bp, Homo sapiens
gttggataaagagaaggattttacaggttggaa

SEQ ID NO: 9043 - DNA, 33 bp, Homo sapiens
cgagggactcagaagagctggaatcagaccccc

SEQ ID NO: 9044 - DNA, 33 bp, Homo sapiens
agtggaccatgttctcgaagtgttgtggttgtc

SEQ ID NO: 9045 - DNA, 33 bp, Homo sapiens
aaaatgaactaactcctaataatttacagtagg

SEQ ID NO: 9046 - DNA, 33 bp, Homo sapiens
gctaaaggctcttatggcaacttcttaaaataa

SEQ ID NO: 9047 - DNA, 33 bp, Homo sapiens
caaggcaggcctgttagaggaaagtcaggaccc

SEQ ID NO: 9048 - DNA, 33 bp, Homo sapiens
gcaggcctggtctctagaagctccatgtcccga

SEQ ID NO: 9049 - DNA, 33 bp, Homo sapiens
gaccctgcctcttggcgaatttcagaatctggt

SEQ ID NO: 9050 - DNA, 33 bp, Homo sapiens
gggctgatccatgatgtagactggctaacttca

SEQ ID NO: 9051 - DNA, 33 bp, Homo sapiens
acgagagatgtaagaattgaaggtaccattcct

SEQ ID NO: 9052 - DNA, 33 bp, Homo sapiens
gctgggctctggcttgtatctccagaatatctc

SEQ ID NO: 9053 - DNA, 33 bp, Homo sapiens
ttcaggggtggagtaacaggagtctctcagttc

SEQ ID NO: 9054 - DNA, 33 bp, Homo sapiens
ctgtgatgtaatatcagtgaaccactcatttcc

SEQ ID NO: 9055 - DNA, 33 bp, Homo sapiens
caggctggatgaataagaatcctttggcttgga

SEQ ID NO: 9056 - DNA, 33 bp, Homo sapiens
gtcatgatcccatccttaatgcctagacctcag

SEQ ID NO: 9057 - DNA, 33 bp, Homo sapiens
ggatccattaaccatagtagtaaagaaagtcca

SEQ ID NO: 9058 - DNA, 33 bp, Homo sapiens
atggtcttcagatcacgcttttagtagcaagaa

SEQ ID NO: 9059 - DNA, 33 bp, Homo sapiens
ccaattttgtgctcaatctctcagtaccagggt

SEQ ID NO: 9060 - DNA, 33 bp, Homo sapiens
tgtacctccctattaccagttccttgacctgcc

SEQ ID NO: 9061 - DNA, 33 bp, Homo sapiens
tgggccgccgctcatccaaatgtgagtaattgt

SEQ ID NO: 9062 - DNA, 33 bp, Homo sapiens
tatggtggttgactaagatcagaatgaccgggg

SEQ ID NO: 9063 - DNA, 33 bp, Homo sapiens
atgggaaggtttgtgataaggagctttaaggat

SEQ ID NO: 9064 - DNA, 33 bp, Homo sapiens
agtttttttcaattcagtctacgaagccagcta

SEQ ID NO: 9065 - DNA, 33 bp, Homo sapiens
agccctccccagatcatagccgtctttactatt

SEQ ID NO: 9066 - DNA, 33 bp, Homo sapiens
ccaggaggaaccgtcaccaggacacacactcat

SEQ ID NO: 9067 - DNA, 33 bp, Homo sapiens
gctgtgaatctgtcaatcactgggaactggcag

SEQ ID NO: 9068 - DNA, 33 bp, Homo sapiens
atttcatctttaacaaccttatacacacaaaat

SEQ ID NO: 9069 - DNA, 33 bp, Homo sapiens
cttcctggcaaacaactacatagaagcctttta

SEQ ID NO: 9070 - DNA, 33 bp, Homo sapiens
aggtgatcaacttcaatatcaacagtggtacat

SEQ ID NO: 9071 - DNA, 33 bp, Homo sapiens
gacagttaattaattctagggcatatcactgct

SEQ ID NO: 9072 - DNA, 33 bp, Homo sapiens
tacatatactctctgatgacagctcaggtcaat

SEQ ID NO: 9073 - DNA, 33 bp, Homo sapiens
gaaaagtttcatgcaatgtgcagcaaagatgct

SEQ ID NO: 9074 - DNA, 33 bp, Homo sapiens
gaataatgtttccagatgaaagagcaagagcag

SEQ ID NO: 9075 - DNA, 33 bp, Homo sapiens
acttggcagggtttaataaccacatccaaacca

SEQ ID NO: 9076 - DNA, 33 bp, Homo sapiens
gtgcaactattatccatccagcacaaagcccat

SEQ ID NO: 9077 - DNA, 33 bp, Homo sapiens
gtgccatagtgtatcatgtttcctggcccagtc

SEQ ID NO: 9078 - DNA, 33 bp, Homo sapiens
atagagtttctatatgtcagataatatcttcaa

SEQ ID NO: 9079 - DNA, 33 bp, Homo sapiens
agctggtcacatctcagactttcttgccaaaac

SEQ ID NO: 9080 - DNA, 33 bp, Homo sapiens
gggggcacagatgccatgtgaagatcattgtgc

SEQ ID NO: 9081 - DNA, 33 bp, Homo sapiens
ccgtatggcctctctatgtgtcttttatcttaa

SEQ ID NO: 9082 - DNA, 33 bp, Homo sapiens
tgagaagaaaatgcccggctacgtcccccttct

SEQ ID NO: 9083 - DNA, 33 bp, Homo sapiens
agagagacccctagaatgtttccctcaaggacc

SEQ ID NO: 9084 - DNA, 33 bp, Homo sapiens
ccaaccattagtgttacaatttcctgactgatc

SEQ ID NO: 9085 - DNA, 33 bp, Homo sapiens
aggggaaagtgaggcatgaacacacggcacaca

SEQ ID NO: 9086 - DNA, 33 bp, Homo sapiens
atctgatatataatcatcatctgtatttaagtt

SEQ ID NO: 9087 - DNA, 33 bp, Homo sapiens
ctgcagtgctttcttatggaaatgacagggcaa

SEQ ID NO: 9088 - DNA, 33 bp, Homo sapiens
ctccagaacctatgaggaagctcttatcactca

SEQ ID NO: 9089 - DNA, 33 bp, Homo sapiens
tcactcatcttagtccgcacaagcaaagcaggt

SEQ ID NO: 9090 - DNA, 33 bp, Homo sapiens
ttgtggcaatttcttatatagcaatggatagct

SEQ ID NO: 9091 - DNA, 33 bp, Homo sapiens
ctgttacgcactagaactccccgacccttgctc

SEQ ID NO: 9092 - DNA, 33 bp, Homo sapiens
cagtcagcgctacaccgagttgaggcagccatt

SEQ ID NO: 9093 - DNA, 33 bp, Homo sapiens
ctaaattaactacctatggccaagtcctgtctc

SEQ ID NO: 9094 - DNA, 33 bp, Homo sapiens
tccttgaatttgcccagatttggcatctcttgc

SEQ ID NO: 9095 - DNA, 33 bp, Homo sapiens
cagagtggaagtgggaggaaggtcttcagattt

SEQ ID NO: 9096 - DNA, 33 bp, Homo sapiens
tcagagagagatcaaggtaaaacgaaaaactca

SEQ ID NO: 9097 - DNA, 51 bp, Homo sapiens
cttaggtctgatcaatctgctccacgcaatttctcagtgatcctctgcatc

SEQ ID NO: 9098 - DNA, 51 bp, Homo sapiens
ctttgacttctctgtgggatactgctagattaactcaacactcccagtaca

SEQ ID NO: 9099 - DNA, 33 bp, Homo sapiens
gaaaggaataatcaagtatttggtcagtttctt

SEQ ID NO: 9100 - DNA, 33 bp, Homo sapiens
gtgttttccacaaaaatgtcatcctggactcta

SEQ ID NO: 9101 - DNA, 51 bp, Homo sapiens
ttctgaacacaataaactattttgatgatcttgggtggaatttttggtgtt

SEQ ID NO: 9102 - DNA, 33 bp, Homo sapiens
gcttctctctcttaaaggtcccagcagaattct

SEQ ID NO: 9103 - DNA, 33 bp, Homo sapiens
taacagttctcaacacgatcttgatcaatattc

SEQ ID NO: 9104 - DNA, 33 bp, Homo sapiens
tcataggaactgaatcttgagttctaactaact

SEQ ID NO: 9105 - DNA, 33 bp, Homo sapiens
tcagttgaatgcctgattagcataagagggaac

SEQ ID NO: 9106 - DNA, 33 bp, Homo sapiens
acatggaatttcacatcatctggcagttttggg

SEQ ID NO: 9107 - DNA, 33 bp, Homo sapiens
tgaggattctaagctagggtggacacaacttcc

SEQ ID NO: 9108 - DNA, 33 bp, Homo sapiens
ctctggagatgagagagaataatatcagattcc

SEQ ID NO: 9109 - DNA, 33 bp, Homo sapiens
ccttctgtgggggtcatgctgggtgaagaatac

SEQ ID NO: 9110 - DNA, 33 bp, Homo sapiens
acagtcaaacattaaagtctctcatcttggctg

SEQ ID NO: 9111 - DNA, 33 bp, Homo sapiens
aggcagcatactctcccagtgtagctttctctt

SEQ ID NO: 9112 - DNA, 33 bp, Homo sapiens
gaaataaactgcataacgcaaaaaagtaaaaat

SEQ ID NO: 9113 - DNA, 33 bp, Homo sapiens
ttgtgaaagtctctactcaaaatctggggactt

SEQ ID NO: 9114 - DNA, 33 bp, Homo sapiens
acagataagaatgttggaaaataaaaatatgtg

SEQ ID NO: 9115 - DNA, 51 bp, Homo sapiens
tagtgaacttccatgcaggccatgataggctcatttcaaaagaagcagaaa

SEQ ID NO: 9116 - DNA, 33 bp, Homo sapiens
ttctcaagagatttccggatcttctcatggtaa

SEQ ID NO: 9117 - DNA, 33 bp, Homo sapiens
ttctgaggtactcccataattactgcttctctt

SEQ ID NO: 9118 - DNA, 33 bp, Homo sapiens
aatctgtacaacatatgactgcacctaacactg

SEQ ID NO: 9119 - DNA, 33 bp, Homo sapiens
ctagttaatggggatatgcaatttgactgtaga

SEQ ID NO: 9120 - DNA, 33 bp, Homo sapiens
aaggacacagtgcaaataccaccaaagcattta

SEQ ID NO: 9121 - DNA, 51 bp, Homo sapiens
aaattgtttagatacacaatttgaataaactctgtggtctaactcaaatta

SEQ ID NO: 9122 - DNA, 33 bp, Homo sapiens
cccagctgtgtggacctaagatttctcgctctc

SEQ ID NO: 9123 - DNA, 33 bp, Homo sapiens
tatgtttgaatttgatgaggaggagcagttcta

SEQ ID NO: 9124 - DNA, 33 bp, Homo sapiens
ccagttcttgcactacgactgattactaagtta

SEQ ID NO: 9125 - DNA, 33 bp, Homo sapiens
attcaaatacggtctctaactggtggtggacag

SEQ ID NO: 9126 - DNA, 33 bp, Homo sapiens
atgtgattaggtcagcggataaggggagtattg

SEQ ID NO: 9127 - DNA, 33 bp, Homo sapiens
tggggaggcgtttctctctgtatgaattattag

SEQ ID NO: 9128 - DNA, 33 bp, Homo sapiens
gcagagggtatcatccgggagaaagagtatagg

SEQ ID NO: 9129 - DNA, 51 bp, Homo sapiens
acagaaaataagtgattaaagccaatatagtggtctaaggtcaagccaaaa

SEQ ID NO: 9130 - DNA, 33 bp, Homo sapiens
taaggaggaagcaaaggattgggaataacagtc

SEQ ID NO: 9131 - DNA, 33 bp, Homo sapiens
gactaaacaagatgattacccaacatgagccag

SEQ ID NO: 9132 - DNA, 33 bp, Homo sapiens
aacatattacattcccgatgccgaactaagcaa

SEQ ID NO: 9133 - DNA, 33 bp, Homo sapiens
ggccactccagatgtatagactcagagaaagcc

SEQ ID NO: 9134 - DNA, 33 bp, Homo sapiens
aacaccagtctgcctcgctcttttctggaacac

SEQ ID NO: 9135 - DNA, 33 bp, Homo sapiens
tccttgtacctcaagcggcatgaaaaccatttg

SEQ ID NO: 9136 - DNA, 33 bp, Homo sapiens
atatgaatcgggtcaattgttaaccaactggac

SEQ ID NO: 9137 - DNA, 33 bp, Homo sapiens
aggtccggaaatctcaggcaggatagtagggtg

SEQ ID NO: 9138 - DNA, 33 bp, Homo sapiens
cttcaggctccaggaggaactgcggacacatca

SEQ ID NO: 9139 - DNA, 33 bp, Homo sapiens
aggaatccttgcatgatggccttctacaaggaa

SEQ ID NO: 9140 - DNA, 33 bp, Homo sapiens
atcagtgtgtcttaaagcatctgcagagttaga

SEQ ID NO: 9141 - DNA, 33 bp, Homo sapiens
tggtaaaaagacatacggggtacaacaaatata

SEQ ID NO: 9142 - DNA, 33 bp, Homo sapiens
aaggtgcgaagacagcgagtgggctacagtgga

SEQ ID NO: 9143 - DNA, 33 bp, Homo sapiens
tagtgtgctgttagtggagattggtctcagatg

SEQ ID NO: 9144 - DNA, 33 bp, Homo sapiens
tctattcttgcatagattccagggatgctgtaa

SEQ ID NO: 9145 - DNA, 33 bp, Homo sapiens
ctaaaagctttccttacaaatctcctgaatgct

SEQ ID NO: 9146 - DNA, 33 bp, Homo sapiens
tgcaagaaactcttaatggtggttatgcctaag

SEQ ID NO: 9147 - DNA, 33 bp, Homo sapiens
gaggtgtcatgggaaatacaatttatagccagt

SEQ ID NO: 9148 - DNA, 33 bp, Homo sapiens
agtggtagagatgggagtcaacatgacatctca

SEQ ID NO: 9149 - DNA, 33 bp, Homo sapiens
gagtcaggatacgaacccaagcagttatttggg

SEQ ID NO: 9150 - DNA, 33 bp, Homo sapiens
ggccaagacttgtacatggcagaactcccactg

SEQ ID NO: 9151 - DNA, 33 bp, Homo sapiens
aagaaacagaatctagtcacctggctccttgcc

SEQ ID NO: 9152 - DNA, 33 bp, Homo sapiens
gtatgatgacatgaatgaggaagaccagagtga

SEQ ID NO: 9153 - DNA, 33 bp, Homo sapiens
cctctgggcgcctccagtctacacacaaagccg

SEQ ID NO: 9154 - DNA, 33 bp, Homo sapiens
cactcatggcaggcaatgtttcctgtaggcttc

SEQ ID NO: 9155 - DNA, 33 bp, Homo sapiens
tttatctccagatctccaaatacagaaccgtaa

SEQ ID NO: 9156 - DNA, 33 bp, Homo sapiens
agttgtacaaaacagatcagacataaagagcat

SEQ ID NO: 9157 - DNA, 33 bp, Homo sapiens
agcactggatgggaaattgtgggcctccctagg

SEQ ID NO: 9158 - DNA, 51 bp, Homo sapiens
agggtcactgaacaaatattagactgaatcaaagttgtgcatttgactaca

SEQ ID NO: 9159 - DNA, 51 bp, Homo sapiens
gatttatccccttggaagtataggagcagcttttcccagagtcatctctgt

SEQ ID NO: 9160 - DNA, 51 bp, Homo sapiens
acccaagaaacagtaaatgtatcaagttatatgcatgccaattacagtgga

SEQ ID NO: 9161 - DNA, 33 bp, Homo sapiens
cctatcttagagaacagtggaaatatgtgtaag

SEQ ID NO: 9162 - DNA, 33 bp, Homo sapiens
caattacacaaccagagctcattaattggttca

SEQ ID NO: 9163 - DNA, 33 bp, Homo sapiens
atccccagtgcctacagtagtgcctagcacata

SEQ ID NO: 9164 - DNA, 33 bp, Homo sapiens
cgacccaactggtctctagtttcctatctcttc

SEQ ID NO: 9165 - DNA, 33 bp, Homo sapiens
tatgcttgtcaaccattacttcacctatccatc

SEQ ID NO: 9166 - DNA, 51 bp, Homo sapiens
cacgttgtttttggaagtgaaacaggagagggtgaaaacaatgactatgaa

SEQ ID NO: 9167 - DNA, 51 bp, Homo sapiens
cataatcagatttttatgttagaccgttctggcagcaatgtgagagatgaa

SEQ ID NO: 9168 - DNA, 33 bp, Homo sapiens
agaaaagcaaagaagatgagttaatgcagcttg

SEQ ID NO: 9169 - DNA, 51 bp, Homo sapiens
caggcattcagtcttgccatcctaagtaactacttttgacgaaatttattt

SEQ ID NO: 9170 - DNA, 33 bp, Homo sapiens
tcaaactctcaagaaaggactctgattggtcca

SEQ ID NO: 9171 - DNA, 33 bp, Homo sapiens
atagtattgaaccatatgaaactgttgatatcc

SEQ ID NO: 9172 - DNA, 33 bp, Homo sapiens
agcgctcctgaattccgaactcacgtatccaac

SEQ ID NO: 9173 - DNA, 51 bp, Homo sapiens
gtattagacctgatagctccaagaattgatgatccaacaacccacatagat

SEQ ID NO: 9174 - DNA, 51 bp, Homo sapiens
gctctctttagctgtcatagctaaggcaacaatgatctttggaaactatag

SEQ ID NO: 9175 - DNA, 33 bp, Homo sapiens
agaaaccttatgtacagagctggaatgggggac

SEQ ID NO: 9176 - DNA, 33 bp, Homo sapiens
agcaaagcagtatgatgacactaaaggatataa

SEQ ID NO: 9177 - DNA, 33 bp, Homo sapiens
tccttcagtgttaaaggcaaatctatgttgttc

SEQ ID NO: 9178 - DNA, 33 bp, Homo sapiens
gaatttgacaatattcgctaaatcttgatctag

SEQ ID NO: 9179 - DNA, 33 bp, Homo sapiens
agagcaagaatttgaatacaaagtgatctgact

SEQ ID NO: 9180 - DNA, 33 bp, Homo sapiens
ccctaacgcagtccgatgtagcaaccttcagct

SEQ ID NO: 9181 - DNA, 33 bp, Homo sapiens
ggcatgagagttttcagagtcagcattctagct

SEQ ID NO: 9182 - DNA, 33 bp, Homo sapiens
cactttcttgcacaaattttatgttccagagaa

SEQ ID NO: 9183 - DNA, 33 bp, Homo sapiens
gtatctaagcacagactgtaggccagcaagagt

SEQ ID NO: 9184 - DNA, 33 bp, Homo sapiens
aggcatcactgaattagctatgttcttggcagc

SEQ ID NO: 9185 - DNA, 33 bp, Homo sapiens
gttggaaccatcgtatgaggcttgccacttatc

SEQ ID NO: 9186 - DNA, 33 bp, Homo sapiens
ttcatttactagttcctcatgcagtattgggct

SEQ ID NO: 9187 - DNA, 33 bp, Homo sapiens
gtgagttatcacattatcacatctttattggtg

SEQ ID NO: 9188 - DNA, 33 bp, Homo sapiens
gtacaaatgaaatccacggctgttctatgatag

SEQ ID NO: 9189 - DNA, 33 bp, Homo sapiens
catagaacctagcagagcagaaaggagaaggaa

SEQ ID NO: 9190 - DNA, 33 bp, Homo sapiens
atccccttgcagtagatggttgacattttaaag

SEQ ID NO: 9191 - DNA, 33 bp, Homo sapiens
tccttggtcagagcccggatcaaaatgaacctg

SEQ ID NO: 9192 - DNA, 33 bp, Homo sapiens
cccctttaggtacagatgtgctcttatccctgg

SEQ ID NO: 9193 - DNA, 33 bp, Homo sapiens
gttacccacagaggcaccccttcacacagggca

SEQ ID NO: 9194 - DNA, 33 bp, Homo sapiens
gcttacccttgtggccggcaatgagccccatct

SEQ ID NO: 9195 - DNA, 33 bp, Homo sapiens
atcccactgtccagtacctgtgattatcagtgc

SEQ ID NO: 9196 - DNA, 33 bp, Homo sapiens
aagccctggacacctcgcgtttatatcaacaga

SEQ ID NO: 9197 - DNA, 33 bp, Homo sapiens
gagatggcataatctggataagacagaggtacc

SEQ ID NO: 9198 - DNA, 33 bp, Homo sapiens
atttttaagcaaggtaggtgaagtctctgtgcc

SEQ ID NO: 9199 - DNA, 33 bp, Homo sapiens
ctgtcaagctgtctacgcaagctatgggctact

SEQ ID NO: 9200 - DNA, 33 bp, Homo sapiens
cctgagacagaaatgttaagcaaagggtgccag

SEQ ID NO: 9201 - DNA, 33 bp, Homo sapiens
ggtgtctgggttgtcagatgtcaaagggggagg

SEQ ID NO: 9202 - DNA, 33 bp, Homo sapiens
aaaatacggacttgaatggcccagttcaattca

SEQ ID NO: 9203 - DNA, 33 bp, Homo sapiens
gagcactttacatctcgctaatatctattacat

SEQ ID NO: 9204 - DNA, 33 bp, Homo sapiens
gacacaccggtgagcagaaaagaaagtataccc

SEQ ID NO: 9205 - DNA, 33 bp, Homo sapiens
gggcaccttgcaaacccagctggtcatccagtt

SEQ ID NO: 9206 - DNA, 51 bp, Homo sapiens
attgctttacaaacttacaggaatagtacatagtgtttgtaaaacatttag

SEQ ID NO: 9207 - DNA, 51 bp, Homo sapiens
tgccagaagatactgtatttataaagcacatgatctatataatgcatatgc

SEQ ID NO: 9208 - DNA, 33 bp, Homo sapiens
aaagaccaagtggaaagagatgcttcagctgtt

SEQ ID NO: 9209 - DNA, 33 bp, Homo sapiens
ctggccaaatatcaatgagcatcattcttatca

SEQ ID NO: 9210 - DNA, 33 bp, Homo sapiens
acagctgaatcacaccgaagtacaggcactggg

SEQ ID NO: 9211 - DNA, 33 bp, Homo sapiens
aggattttcattctgcggaggatctgttcatgg

SEQ ID NO: 9212 - DNA, 33 bp, Homo sapiens
gcccagtgctactaaggctctgctaggatatct

SEQ ID NO: 9213 - DNA, 33 bp, Homo sapiens
ctgtgactttgttggcgccccattgtgtgatgg

SEQ ID NO: 9214 - DNA, 33 bp, Homo sapiens
tagtcctaatgataaagcatgtgtgaaaaacag

SEQ ID NO: 9215 - DNA, 33 bp, Homo sapiens
cttacaactcactaaattggggcagggatggct

SEQ ID NO: 9216 - DNA, 33 bp, Homo sapiens
taaaattggctgtattgaaatatgacgtagggt

SEQ ID NO: 9217 - DNA, 51 bp, Homo sapiens
taaatacctcagaactcacatgcaattattgacatagaggacatctttggc

SEQ ID NO: 9218 - DNA, 33 bp, Homo sapiens
ttaagagtaaggctccgacttctgtttccaaga

SEQ ID NO: 9219 - DNA, 33 bp, Homo sapiens
gcccaagcccacaggaccaacttactcgtcatc

SEQ ID NO: 9220 - DNA, 33 bp, Homo sapiens
ttccaggttctcatcatgttgggtcagccagta

SEQ ID NO: 9221 - DNA, 33 bp, Homo sapiens
gttttgtgaggagtaagtggatgaatacatgta

SEQ ID NO: 9222 - DNA, 33 bp, Homo sapiens
aattgcctgttgtctttaaatttctgcagtgct

SEQ ID NO: 9223 - DNA, 33 bp, Homo sapiens
gggtaaaatgagaaaagtgaatgaacaggctac

SEQ ID NO: 9224 - DNA, 33 bp, Homo sapiens
ctgattttggaatggccaatgaaatctgcctct

SEQ ID NO: 9225 - DNA, 33 bp, Homo sapiens
acaaacatggatataagctagtgagatctgtgt

SEQ ID NO: 9226 - DNA, 33 bp, Homo sapiens
taactggtttttatcactctagggtaacttgcc

SEQ ID NO: 9227 - DNA, 33 bp, Homo sapiens
gccctgctctgaatcatagcccactgacgcagg

SEQ ID NO: 9228 - DNA, 33 bp, Homo sapiens
ttgatctagtgaacactcgacaaggaagtgttg

SEQ ID NO: 9229 - DNA, 33 bp, Homo sapiens
tcttttatgcttttaaggattgttgaggatccc

SEQ ID NO: 9230 - DNA, 33 bp, Homo sapiens
aaatgaagtcccattctccagctaccttccaat

SEQ ID NO: 9231 - DNA, 33 bp, Homo sapiens
cagacttgttgagctggaatattctgatcattt

SEQ ID NO: 9232 - DNA, 33 bp, Homo sapiens
ggaagtgaggctatgcgaagtaaaagtagctat

SEQ ID NO: 9233 - DNA, 33 bp, Homo sapiens
gaacgtgcagataacatgataataatcaaagga

SEQ ID NO: 9234 - DNA, 51 bp, Homo sapiens
agacaattctagttcagttccatgattatttctgcaacagatctagcattt

SEQ ID NO: 9235 - DNA, 33 bp, Homo sapiens
tgttcttcatgagtaattggtggctaacatggc

SEQ ID NO: 9236 - DNA, 33 bp, Homo sapiens
ctctatttttccagaagcctactctgtcacaat

SEQ ID NO: 9237 - DNA, 51 bp, Homo sapiens
gcattttcattgctatatgatactctaaatggaatcctatgcagacatcat

SEQ ID NO: 9238 - DNA, 33 bp, Homo sapiens
gatggtattgggaaccgactataggctaggagg

SEQ ID NO: 9239 - DNA, 51 bp, Homo sapiens
ctagataagccacctgtcttctgtatgtaagccactatgtaaacctaccac

SEQ ID NO: 9240 - DNA, 51 bp, Homo sapiens
ctattcctcattaagtctttaccaattcagtcaatgtcatcactgaccatg

SEQ ID NO: 9241 - DNA, 33 bp, Homo sapiens
ctcaatttcataccactgcaaaactatggtaaa

SEQ ID NO: 9242 - DNA, 33 bp, Homo sapiens
gtctaacctacacttagaacattgcagattaat

SEQ ID NO: 9243 - DNA, 33 bp, Homo sapiens
acattgaaagccaaaggataaaatgttggtagc

SEQ ID NO: 9244 - DNA, 33 bp, Homo sapiens
tccatgctcatgcctagaaaaagtcaatattgc

SEQ ID NO: 9245 - DNA, 33 bp, Homo sapiens
tgcttattcataaagatgtaggtaagtaggtag

SEQ ID NO: 9246 - DNA, 51 bp, Homo sapiens
ggcactaagaacacattatacaaatgaagtaaagttaccatgtaataatat

SEQ ID NO: 9247 - DNA, 33 bp, Homo sapiens
aagatctatttaggaagaacctgacaatatata

SEQ ID NO: 9248 - DNA, 33 bp, Homo sapiens
tgaatcttcctcagtatccccatcgtctttgtc

SEQ ID NO: 9249 - DNA, 33 bp, Homo sapiens
ttcactgacagaagtatgaaagaaagagacatc

SEQ ID NO: 9250 - DNA, 33 bp, Homo sapiens
tacacaacaactcagaggtttgcatttgcgatg

SEQ ID NO: 9251 - DNA, 33 bp, Homo sapiens
taagccttgagagtaatgtgactatgtggcctg

SEQ ID NO: 9252 - DNA, 33 bp, Homo sapiens
aaatggggtaagtctatgcaaactaacttagaa

SEQ ID NO: 9253 - DNA, 33 bp, Homo sapiens
cctcagcctactaaactgcttccagtccgaagg

SEQ ID NO: 9254 - DNA, 33 bp, Homo sapiens
atgcctttgaattggacagttttgcctacttaa

SEQ ID NO: 9255 - DNA, 51 bp, Homo sapiens
gaatatcttcttaaaatatccatagtatttattgtggataactctaaacat

SEQ ID NO: 9256 - DNA, 33 bp, Homo sapiens
taaaatactcagataggcgagtgcccacaattc

SEQ ID NO: 9257 - DNA, 51 bp, Homo sapiens
agagacatgtttactcttgagaaacgctagagagagttgactggtagtagg

SEQ ID NO: 9258 - DNA, 33 bp, Homo sapiens
aattctgcacaatttatgaacatagtataacaa

SEQ ID NO: 9259 - DNA, 33 bp, Homo sapiens
actctgaattacccatgatgctttaactgttta

SEQ ID NO: 9260 - DNA, 33 bp, Homo sapiens
tattcattgcctttcataaagtttttcttctgt

SEQ ID NO: 9261 - DNA, 33 bp, Homo sapiens
gagttttcagttgaaattgcatcctatctataa

SEQ ID NO: 9262 - DNA, 51 bp, Homo sapiens
aaaccaatatgagagtttagaagattaatatttttcatttttttcttattc

SEQ ID NO: 9263 - DNA, 33 bp, Homo sapiens
atttctttatcttgtgtaggaagattccatagt

SEQ ID NO: 9264 - DNA, 33 bp, Homo sapiens
cccagctgatgatggaggtgaagtgaaatgaat

SEQ ID NO: 9265 - DNA, 33 bp, Homo sapiens
gattagttcatggagagagaggccttgtgaatg

SEQ ID NO: 9266 - DNA, 51 bp, Homo sapiens
gtagggaagatagcttggcttgaaccaactttctagtactccaccaagacc

SEQ ID NO: 9267 - DNA, 33 bp, Homo sapiens
gagaaattgagaaaggtatcctaacagtattac

SEQ ID NO: 9268 - DNA, 33 bp, Homo sapiens
ttagagatctgttgaaggtcatagctgatctgt

SEQ ID NO: 9269 - DNA, 33 bp, Homo sapiens
cacactcaccatcttcgcttcctccattattgc

SEQ ID NO: 9270 - DNA, 33 bp, Homo sapiens
agattgccattttcactgtcccatcctatttaa

SEQ ID NO: 9271 - DNA, 33 bp, Homo sapiens
caataatcaagctgtgtatatcttttaaagtac

SEQ ID NO: 9272 - DNA, 33 bp, Homo sapiens
aagcctgaaattcaccgagtgcagttttaatta

SEQ ID NO: 9273 - DNA, 51 bp, Homo sapiens
acaaaggactattaaatttgtctacggcgtactacttggaacactgacccc

SEQ ID NO: 9274 - DNA, 33 bp, Homo sapiens
aacagagtaaaaagactatctaaagaatgggaa

SEQ ID NO: 9275 - DNA, 33 bp, Homo sapiens
atgtatgtgtgactcatggcaaatctttgagct

SEQ ID NO: 9276 - DNA, 33 bp, Homo sapiens
tctaaatgagcaaaaagccttgatcacctaggt

SEQ ID NO: 9277 - DNA, 33 bp, Homo sapiens
ctcccaacttggtggatattaactgatcctgta

SEQ ID NO: 9278 - DNA, 33 bp, Homo sapiens
cagaaagtcaaggaaagaggccacttctttagg

SEQ ID NO: 9279 - DNA, 51 bp, Homo sapiens
atatgtagagggcaaaaaagggcaccaagaaaagagtagtcaatgcttcct

SEQ ID NO: 9280 - DNA, 33 bp, Homo sapiens
tgtatgatattggacaggtctccattatctcag

SEQ ID NO: 9281 - DNA, 51 bp, Homo sapiens
tattgaacagcatcaagtgattctatattgagaagtaaatgcatgataatg

SEQ ID NO: 9282 - DNA, 51 bp, Homo sapiens
ttggaaaataaaatattggcccatagagtgcaaaggcaaaaaagttactta

SEQ ID NO: 9283 - DNA, 51 bp, Homo sapiens
agtgcagggttagtggaatatacagtaaattagaagcaataaaaagcacag

SEQ ID NO: 9284 - DNA, 51 bp, Homo sapiens
tacaggaaattagaagcaataaaaagcacagtatatatgtgatgctagaaa

SEQ ID NO: 9285 - DNA, 33 bp, Homo sapiens
acatatgaaagtgtctgcctaagataggctttt

SEQ ID NO: 9286 - DNA, 51 bp, Homo sapiens
agcaccttacgtattattcttgaccgattttcctcaactgcagtcattttc

SEQ ID NO: 9287 - DNA, 33 bp, Homo sapiens
ataaaagtctgtgagcgctagaaaaaggaactt

SEQ ID NO: 9288 - DNA, 51 bp, Homo sapiens
ttgtgacttatcagtgcctagtacagtaaaaagtatatctgtaatttatat

SEQ ID NO: 9289 - DNA, 33 bp, Homo sapiens
ttatgtcctgcatcctcacactataaagcaaga

SEQ ID NO: 9290 - DNA, 51 bp, Homo sapiens
aaaatagtaacataaaagaaactctgactcaagaccatttactaggattgt

SEQ ID NO: 9291 - DNA, 51 bp, Homo sapiens
ttctctaacaaaaaccaacagttaagtaatagcagaaataaaaatttttaa

SEQ ID NO: 9292 - DNA, 33 bp, Homo sapiens
attgagttttctgttatgagagcatttgctttt

SEQ ID NO: 9293 - DNA, 33 bp, Homo sapiens
actccatcattactattaaacctcaggcaaatt

SEQ ID NO: 9294 - DNA, 33 bp, Homo sapiens
aagggagatcatatcacgggagatttgtttatt

SEQ ID NO: 9295 - DNA, 33 bp, Homo sapiens
ggtcataacaaatctcgaaaaactcagaattta

SEQ ID NO: 9296 - DNA, 33 bp, Homo sapiens
gccccaaggaagaagatggcctggtgaaataca

SEQ ID NO: 9297 - DNA, 33 bp, Homo sapiens
ttttgtatatgttccagtaagtcaacaaaaata

SEQ ID NO: 9298 - DNA, 51 bp, Homo sapiens
gttaaagagtctgggatttcaagaattgtatttaagtgtattgccacacca

SEQ ID NO: 9299 - DNA, 33 bp, Homo sapiens
agtatcatgtggaagatgttaaaaatgcaaatt

SEQ ID NO: 9300 - DNA, 51 bp, Homo sapiens
gaaatttaaagaaaaggatttctaagtactctaaaagcaactgagacagct

SEQ ID NO: 9301 - DNA, 33 bp, Homo sapiens
tgtaatgaataagatagctacatcataaagggg

SEQ ID NO: 9302 - DNA, 33 bp, Homo sapiens
acagtatgaatgcaatgaccgaagagcaaagaa

SEQ ID NO: 9303 - DNA, 33 bp, Homo sapiens
tctagtttgggtacaacatttacttcactcact

SEQ ID NO: 9304 - DNA, 33 bp, Homo sapiens
tgtgtcttctaaaaagtcttctaagatttgtgt

SEQ ID NO: 9305 - DNA, 33 bp, Homo sapiens
atcctctgcctttaagtctgctcttctctgcac

SEQ ID NO: 9306 - DNA, 51 bp, Homo sapiens
gctttatcttaacatgtgtggggcacgattaaaggactcctaagcagatat

SEQ ID NO: 9307 - DNA, 33 bp, Homo sapiens
tcagagccaaagtggatggacaaaggcataaag

SEQ ID NO: 9308 - DNA, 51 bp, Homo sapiens
catatgtggaaatagcactagcttatgagtttatagaagtttatattttta

SEQ ID NO: 9309 - DNA, 33 bp, Homo sapiens
atttaaacatactttaggatcacttgcactagc

SEQ ID NO: 9310 - DNA, 33 bp, Homo sapiens
tgaaatccagtagtcagtatttttcaattattt

SEQ ID NO: 9311 - DNA, 33 bp, Homo sapiens
cagttttcatagctccgactttggatttcctat

SEQ ID NO: 9312 - DNA, 51 bp, Homo sapiens
tgcctagctgctaggtacctcaagattaagatctctccttagtagttatag

SEQ ID NO: 9313 - DNA, 33 bp, Homo sapiens
gacaaaatgacagagagctagtgatgatttcat

SEQ ID NO: 9314 - DNA, 33 bp, Homo sapiens
tataaatttgagatacgcttttcagaaaaacat

SEQ ID NO: 9315 - DNA, 33 bp, Homo sapiens
ttcaaggattggaaaagaacagagctgcagtga

SEQ ID NO: 9316 - DNA, 33 bp, Homo sapiens
gccagagtccttcttatcacttttatcaccctc

SEQ ID NO: 9317 - DNA, 33 bp, Homo sapiens
atctggggagtaataataaggctcagccactct

SEQ ID NO: 9318 - DNA, 33 bp, Homo sapiens
aagaagaaatccaagatgtagtagtgttggatt

SEQ ID NO: 9319 - DNA, 33 bp, Homo sapiens
tagaatgctttgtagatctttgggtatataccc

SEQ ID NO: 9320 - DNA, 33 bp, Homo sapiens
ctaagaagtcaatattgaaaaggcaacccaatt

SEQ ID NO: 9321 - DNA, 33 bp, Homo sapiens
atttataggatacagagcaatatttcaatacat

SEQ ID NO: 9322 - DNA, 33 bp, Homo sapiens
aatgactttaggagaactatactggccaggagt

SEQ ID NO: 9323 - DNA, 51 bp, Homo sapiens
ttatacaattttatagatgagaacagggaagtacagaaaatcaaatagctt

SEQ ID NO: 9324 - DNA, 33 bp, Homo sapiens
cttccctaaacaacatgaagtcgatgagaaact

SEQ ID NO: 9325 - DNA, 33 bp, Homo sapiens
atgtcaccattgtagatcacagaaaaaagacac

SEQ ID NO: 9326 - DNA, 51 bp, Homo sapiens
tattctgacatactggctcttaaaccactcagctagtggcttaagttctct

SEQ ID NO: 9327 - DNA, 33 bp, Homo sapiens
acaggacacagctccagtgatgcttcctagggt

SEQ ID NO: 9328 - DNA, 33 bp, Homo sapiens
tttcggatgcctgctagatgttagaggtttaaa

SEQ ID NO: 9329 - DNA, 33 bp, Homo sapiens
tgcaatcaagctaaaagttcaaaatttgtagac

SEQ ID NO: 9330 - DNA, 33 bp, Homo sapiens
cacccactcttcagtggagcaaagttgtggatg

SEQ ID NO: 9331 - DNA, 51 bp, Homo sapiens
agttacataaaacatcaacaattaggatatttgaaactttataataacagt

SEQ ID NO: 9332 - DNA, 51 bp, Homo sapiens
acataaatcatctgaggagtaatgacacaactgcagcccagcagaaacttg

SEQ ID NO: 9333 - DNA, 33 bp, Homo sapiens
attcttcatggcagaattgttaaccaagacatg

SEQ ID NO: 9334 - DNA, 33 bp, Homo sapiens
gtctttttcaatgcacggaagtcctcaattttt

SEQ ID NO: 9335 - DNA, 33 bp, Homo sapiens
acagtttatttgcttgcacttttaacgtcacta

SEQ ID NO: 9336 - DNA, 33 bp, Homo sapiens
tactttttggttccaacacttccaggagtttgt

SEQ ID NO: 9337 - DNA, 33 bp, Homo sapiens
atcatcagaggtatccgctgctttgtaaactta

SEQ ID NO: 9338 - DNA, 33 bp, Homo sapiens
ccatttgccataatactatccctgtatgttgaa

SEQ ID NO: 9339 - DNA, 33 bp, Homo sapiens
aaggcttatgtagaatgagttgttgtcagtcca

SEQ ID NO: 9340 - DNA, 33 bp, Homo sapiens
ctcaaagctgcagaagcctaaattgttctccat

SEQ ID NO: 9341 - DNA, 33 bp, Homo sapiens
aaacaggtcattactcgacattggaaagctact

SEQ ID NO: 9342 - DNA, 33 bp, Homo sapiens
aaattgcaagtatctataccatacgtttccaag

SEQ ID NO: 9343 - DNA, 33 bp, Homo sapiens
gtgtctaatcactcatgactgctttctaatgtg

SEQ ID NO: 9344 - DNA, 51 bp, Homo sapiens
ggaccaggatgtgattgccaattctttcccctgaaaccctcttctcatggt

SEQ ID NO: 9345 - DNA, 33 bp, Homo sapiens
cttgaaatatgctttctaaattgtctgctttct

SEQ ID NO: 9346 - DNA, 51 bp, Homo sapiens
ctgacaattcagtattagtagatgcgaggcctgctacccttattcttgctg

SEQ ID NO: 9347 - DNA, 33 bp, Homo sapiens
ctaacaacactgaaaacattgtcaggtaaaaca

SEQ ID NO: 9348 - DNA, 51 bp, Homo sapiens
atttccaactggaaacaaattcttaggctactaggtctctagagattatct

SEQ ID NO: 9349 - DNA, 33 bp, Homo sapiens
ataatattataaacgatgatacctgagaactag

SEQ ID NO: 9350 - DNA, 33 bp, Homo sapiens
gcatgggctctgacaaccattttaacagtatca

SEQ ID NO: 9351 - DNA, 33 bp, Homo sapiens
ttccaggggcttcaaatctcaatcagtataaac

SEQ ID NO: 9352 - DNA, 33 bp, Homo sapiens
tggctcctgataaccctgcttctgtattcacga

SEQ ID NO: 9353 - DNA, 33 bp, Homo sapiens
ccactgtcttgattcatgctaatgcaccagtag

SEQ ID NO: 9354 - DNA, 33 bp, Homo sapiens
aagcctgagggaaaaagtaggatggtccttcct

SEQ ID NO: 9355 - DNA, 33 bp, Homo sapiens
ttccatgtcatctaactaaataaaccatcacaa

SEQ ID NO: 9356 - DNA, 51 bp, Homo sapiens
caataattggaaaaatttagttgtatctgtctcttaagcttgaggttgata

SEQ ID NO: 9357 - DNA, 33 bp, Homo sapiens
accatctttagctgcattaaggaaaagtcctgc

SEQ ID NO: 9358 - DNA, 51 bp, Homo sapiens
catgccacttagatcttctttgagataccctgctgcagcgagcatagttaa

SEQ ID NO: 9359 - DNA, 33 bp, Homo sapiens
gtagtgaaggagaaacgaaaggaacataaatca

SEQ ID NO: 9360 - DNA, 33 bp, Homo sapiens
aggcaatgacacagacgagtgagaatctgatta

SEQ ID NO: 9361 - DNA, 33 bp, Homo sapiens
aatgaaaggtgaggaatcaatgttagaaccagc

SEQ ID NO: 9362 - DNA, 33 bp, Homo sapiens
ttgtatcccagcctaagaaagggcctgacatat

SEQ ID NO: 9363 - DNA, 33 bp, Homo sapiens
gttttggggatgggtacagactaattccttata

SEQ ID NO: 9364 - DNA, 33 bp, Homo sapiens
gactgagcatctcctgcaagttaactagtttgc

SEQ ID NO: 9365 - DNA, 33 bp, Homo sapiens
tggccacaactttaaagaacagcccacttatag

SEQ ID NO: 9366 - DNA, 33 bp, Homo sapiens
ctggaagatgcctacatgtaaggagtgtgaaga

SEQ ID NO: 9367 - DNA, 33 bp, Homo sapiens
gtcccacagacattaaggagcatggtgtgttta

SEQ ID NO: 9368 - DNA, 33 bp, Homo sapiens
aagttactctcaaatatgaatccctgaagccaa

SEQ ID NO: 9369 - DNA, 33 bp, Homo sapiens
ttttttggaggaaaaatttctctgactacacag

SEQ ID NO: 9370 - DNA, 33 bp, Homo sapiens
aaaagcaggtctaaaacggctacatattatatg

SEQ ID NO: 9371 - DNA, 33 bp, Homo sapiens
gtctgacacttctccatgtttccaagagtaatc

SEQ ID NO: 9372 - DNA, 33 bp, Homo sapiens
acatcctgtgtcctaataccagactggacgtat

SEQ ID NO: 9373 - DNA, 33 bp, Homo sapiens
atggcctctatatgacgaaaaccaaagcacact

SEQ ID NO: 9374 - DNA, 33 bp, Homo sapiens
ttcctcctcaagcctatagaagtacagcatttc

SEQ ID NO: 9375 - DNA, 33 bp, Homo sapiens
tacataaactatccaagtgttccttttaagtta

SEQ ID NO: 9376 - DNA, 33 bp, Homo sapiens
tcccaagtatagccacgcaagaggttcggactt

SEQ ID NO: 9377 - DNA, 33 bp, Homo sapiens
ggaaccagagggcatagagatgattagaacata

SEQ ID NO: 9378 - DNA, 51 bp, Homo sapiens
tttgtgttcatatgaagtcttcacacggttaacttagacttcacaaagtta

SEQ ID NO: 9379 - DNA, 51 bp, Homo sapiens
taacgcagcactcccattgttttgatgccactgtataataggtacgttatt

SEQ ID NO: 9380 - DNA, 51 bp, Homo sapiens
ttttattaattgtataattgtgaaatagtcatcatgctaagtaagctgata

SEQ ID NO: 9381 - DNA, 33 bp, Homo sapiens
attttttaaatcaggtgaaatcaagtatgaata

SEQ ID NO: 9382 - DNA, 33 bp, Homo sapiens
ggcatacctaagaacagtgggcatatatctgtc

SEQ ID NO: 9383 - DNA, 33 bp, Homo sapiens
attgttatagctatcatccattagagtttattt

SEQ ID NO: 9384 - DNA, 33 bp, Homo sapiens
gtgcagggagaaggatgagctgaatgaggaata

SEQ ID NO: 9385 - DNA, 33 bp, Homo sapiens
attcccttagtgttactggccctaagaaatctt

SEQ ID NO: 9386 - DNA, 33 bp, Homo sapiens
aactgccctgtgaagggcagatattagcattgt

SEQ ID NO: 9387 - DNA, 33 bp, Homo sapiens
cagggacccgaggcaccgagcaagtaagtggat

SEQ ID NO: 9388 - DNA, 33 bp, Homo sapiens
ttcatgtgttataatggatgttaccgatggatt

SEQ ID NO: 9389 - DNA, 33 bp, Homo sapiens
actcttgcctgaagcctattatttctggataca

SEQ ID NO: 9390 - DNA, 33 bp, Homo sapiens
taccttttcactgtaatagaaggaacctgatac

SEQ ID NO: 9391 - DNA, 33 bp, Homo sapiens
gacaatgtgttctagcgagtttagattgcaaag

SEQ ID NO: 9392 - DNA, 33 bp, Homo sapiens
gcttcctggatgccaagtcactttttaaaaaca

SEQ ID NO: 9393 - DNA, 33 bp, Homo sapiens
caggcacacacaatgagcacaggcagttaattt

SEQ ID NO: 9394 - DNA, 51 bp, Homo sapiens
aaaaaattaagtaatttgtagttgctatactgggacaggtggtttacctgg

SEQ ID NO: 9395 - DNA, 33 bp, Homo sapiens
tagagtcttgagtaaatacaatgccagaatagg

SEQ ID NO: 9396 - DNA, 33 bp, Homo sapiens
tgcttgacattgagaagttcccttccttctctt

SEQ ID NO: 9397 - DNA, 33 bp, Homo sapiens
ttccaagcaatagccagtactatcagaaaatcc

SEQ ID NO: 9398 - DNA, 33 bp, Homo sapiens
aggaggatagggcacaggtaagagacttgaggt

SEQ ID NO: 9399 - DNA, 33 bp, Homo sapiens
tttttggttagacttctctacattgaaggggat

SEQ ID NO: 9400 - DNA, 33 bp, Homo sapiens
cacacatatcaagtagtattccaagtttacatg

SEQ ID NO: 9401 - DNA, 33 bp, Homo sapiens
aaacaatattttcaaatgtcctcaataaaatag

SEQ ID NO: 9402 - DNA, 33 bp, Homo sapiens
gtgctcaggaagaaactgtagaaaccaataata

SEQ ID NO: 9403 - DNA, 51 bp, Homo sapiens
tgagcctacttttagatattttatcgcaagagagtaaacaacttgattatt

SEQ ID NO: 9404 - DNA, 33 bp, Homo sapiens
tattcttgggtcatagcaaataatgtagaccga

SEQ ID NO: 9405 - DNA, 33 bp, Homo sapiens
aaattttatctttaccgatacatctcaaatacc

SEQ ID NO: 9406 - DNA, 33 bp, Homo sapiens
aaataattaggaaagataacaggtgcaacagac

SEQ ID NO: 9407 - DNA, 33 bp, Homo sapiens
agttgacaacatgaactggagacaagaaataaa

SEQ ID NO: 9408 - DNA, 33 bp, Homo sapiens
ctctgtctcaaaaaagtagaagagaaaagatac

SEQ ID NO: 9409 - DNA, 33 bp, Homo sapiens
tactatctcttttaaatttgaggagaataaagt

SEQ ID NO: 9410 - DNA, 51 bp, Homo sapiens
aaatgaaaatggaagcacaatgtaataaaatctctgcaatgcagcaaaggc

SEQ ID NO: 9411 - DNA, 33 bp, Homo sapiens
ctttgtattttccacagcccttaacacacagtg

SEQ ID NO: 9412 - DNA, 33 bp, Homo sapiens
acaccattttatataagagatgagcatccatgg

SEQ ID NO: 9413 - DNA, 51 bp, Homo sapiens
ttcccatgtgcctcttttccttctcgcagatttatcttttgcttcactcag

SEQ ID NO: 9414 - DNA, 33 bp, Homo sapiens
ggaagagctatggtgatgtttcaaattgaacag

SEQ ID NO: 9415 - DNA, 33 bp, Homo sapiens
tctagaattcttttcatcttgcaatactaaaac

SEQ ID NO: 9416 - DNA, 51 bp, Homo sapiens
tcactgacttgcctcatccaataaagtgttttgtttctgagacaattgggt

SEQ ID NO: 9417 - DNA, 33 bp, Homo sapiens
aaagctttgagaatcatgcacaaaaaattcagg

SEQ ID NO: 9418 - DNA, 33 bp, Homo sapiens
ccgtggatatcctgaattgtctggggttttttt

SEQ ID NO: 9419 - DNA, 33 bp, Homo sapiens
cttatctaaagtttcagaacaagtagagtccaa

SEQ ID NO: 9420 - DNA, 33 bp, Homo sapiens
agtggctgacaacaaaggtatgaggttgaggga

SEQ ID NO: 9421 - DNA, 33 bp, Homo sapiens
tctagatgagactgacgaaggagaaagcattga

SEQ ID NO: 9422 - DNA, 33 bp, Homo sapiens
ggcaggtctcacttccgcattagctattgactt

SEQ ID NO: 9423 - DNA, 33 bp, Homo sapiens
agaatagccaagtagatagaaaagagtgagaac

SEQ ID NO: 9424 - DNA, 33 bp, Homo sapiens
ttaagatttttgtgaatgttaggaagcgttccc

SEQ ID NO: 9425 - DNA, 33 bp, Homo sapiens
attcaggggagggagagcatcaaccagaatagc

SEQ ID NO: 9426 - DNA, 33 bp, Homo sapiens
gacataagattgtagcgataagtaggggtcaga

SEQ ID NO: 9427 - DNA, 33 bp, Homo sapiens
ttcagtatttaaacattacaagacatgtaacat

SEQ ID NO: 9428 - DNA, 33 bp, Homo sapiens
catgtgaattatgaaggaaagttatgcaaatgt

SEQ ID NO: 9429 - DNA, 51 bp, Homo sapiens
ttttacatggagttgaagggattcttaaaaaaataagtccagctatagaaa

SEQ ID NO: 9430 - DNA, 33 bp, Homo sapiens
ggctaaagatacgaatgacttccaaaaggaaat

SEQ ID NO: 9431 - DNA, 33 bp, Homo sapiens
acaattatcctaattagtaacaggccgttctgt

SEQ ID NO: 9432 - DNA, 33 bp, Homo sapiens
tttttgtactaaatgcgcagtgtgaagtcttta

SEQ ID NO: 9433 - DNA, 33 bp, Homo sapiens
tagagaaaattaggtatgattcaagttcttggt

SEQ ID NO: 9434 - DNA, 33 bp, Homo sapiens
taattagcagaaaaaatagcaaaggttaagaat

SEQ ID NO: 9435 - DNA, 33 bp, Homo sapiens
cttataactgttaaaattgttgctctgccttat

SEQ ID NO: 9436 - DNA, 33 bp, Homo sapiens
tcaggacataggagcagggaaagattttatgat

SEQ ID NO: 9437 - DNA, 33 bp, Homo sapiens
ttgattgggaaagtgataaatgtacatgaaatc

SEQ ID NO: 9438 - DNA, 33 bp, Homo sapiens
attgagttaagaaaaggataattggtgaagaat

SEQ ID NO: 9439 - DNA, 51 bp, Homo sapiens
ggggataccacagaaataagataaattgtggtatgagataggtggggaata

SEQ ID NO: 9440 - DNA, 33 bp, Homo sapiens
agagaaatgaagaaaggctggtttaggatacca

SEQ ID NO: 9441 - DNA, 33 bp, Homo sapiens
taactcaaaattgaacgaaaacctaaatgtaag

SEQ ID NO: 9442 - DNA, 33 bp, Homo sapiens
cttctatgagttgttataaatttggcccttaca

SEQ ID NO: 9443 - DNA, 33 bp, Homo sapiens
tgctattgtgttaggagtacctttagcactatg

SEQ ID NO: 9444 - DNA, 33 bp, Homo sapiens
acctagattttctatataatgggcaggagttgt

SEQ ID NO: 9445 - DNA, 33 bp, Homo sapiens
ttattcaattcacctacatctgcagagggtcca

SEQ ID NO: 9446 - DNA, 33 bp, Homo sapiens
tgaagaaatgagctcgcactatttggtacagtg

SEQ ID NO: 9447 - DNA, 33 bp, Homo sapiens
cacaaaacactactgagaataattgaataacag

SEQ ID NO: 9448 - DNA, 33 bp, Homo sapiens
tgttgtttggtacaccgcagtgttaagtgggct

SEQ ID NO: 9449 - DNA, 33 bp, Homo sapiens
ttttgtatgttttagatatcacataggtatata

SEQ ID NO: 9450 - DNA, 33 bp, Homo sapiens
gaaaaggagggtccaagtgatgaaataggtctt

SEQ ID NO: 9451 - DNA, 33 bp, Homo sapiens
tagttaccgggaatcatctaaccatgaccaaaa

SEQ ID NO: 9452 - DNA, 33 bp, Homo sapiens
acattaaataaaaatagcatggcacaaaataca

SEQ ID NO: 9453 - DNA, 33 bp, Homo sapiens
ttttaggtgtcattgatgttagagttctgtttt

SEQ ID NO: 9454 - DNA, 33 bp, Homo sapiens
ttccaggtcattcagagtagcagtcagatatac

SEQ ID NO: 9455 - DNA, 33 bp, Homo sapiens
ggtaactttctacaacgggcatttagaaaccat

SEQ ID NO: 9456 - DNA, 33 bp, Homo sapiens
acttcaaactagatgtgaagacgaataggacat

SEQ ID NO: 9457 - DNA, 51 bp, Homo sapiens
tggtttaaactgctgtttggctcaagatagacatgtatcctggagttgtta

SEQ ID NO: 9458 - DNA, 33 bp, Homo sapiens
caatagtgagatcctatgtcttgaagaaggaaa

SEQ ID NO: 9459 - DNA, 33 bp, Homo sapiens
ctattggaggccagaatacatagtaaatatata

SEQ ID NO: 9460 - DNA, 33 bp, Homo sapiens
tttggcaaaatggggcgactccttgcagcagtg

SEQ ID NO: 9461 - DNA, 33 bp, Homo sapiens
gcttctttggattttatggtggctttctgattt

SEQ ID NO: 9462 - DNA, 33 bp, Homo sapiens
ctaataaactgtctccgaagctgaattgatatg

SEQ ID NO: 9463 - DNA, 33 bp, Homo sapiens
cactgaagaagtttcagaaggctaaattcttct

SEQ ID NO: 9464 - DNA, 33 bp, Homo sapiens
ttctgagattgtagtgcaaggtaaatctgaaat

SEQ ID NO: 9465 - DNA, 33 bp, Homo sapiens
ccacataacttcaatatctggaatttcacaaat

SEQ ID NO: 9466 - DNA, 51 bp, Homo sapiens
gggacccgttgctaaaggggtgtgagatttctctgtgcggtaataaaatgt

SEQ ID NO: 9467 - DNA, 33 bp, Homo sapiens
ccagtccaaaagaaaattatggggcacttctct

SEQ ID NO: 9468 - DNA, 33 bp, Homo sapiens
ttggtaaactcatgccgaatattcccctgcgtc

SEQ ID NO: 9469 - DNA, 33 bp, Homo sapiens
atcttggaggtcaacagaattcaagggttggat

SEQ ID NO: 9470 - DNA, 33 bp, Homo sapiens
tttagttgatgttttagattgactgaattgaag

SEQ ID NO: 9471 - DNA, 33 bp, Homo sapiens
ctattagttatggataggaactttaaacaaaca

SEQ ID NO: 9472 - DNA, 33 bp, Homo sapiens
agcctttaagcctgaagtgtctacacctctcca

SEQ ID NO: 9473 - DNA, 33 bp, Homo sapiens
tctaactatactgaaatttgctgacactgcaag

SEQ ID NO: 9474 - DNA, 33 bp, Homo sapiens
agggtcaaaatggccataatgcaactgtgatgt

SEQ ID NO: 9475 - DNA, 33 bp, Homo sapiens
ctgatccataacagccgagaaaattctatcatc

SEQ ID NO: 9476 - DNA, 33 bp, Homo sapiens
aattgttttcagaatcggagatgagaaagtgac

SEQ ID NO: 9477 - DNA, 33 bp, Homo sapiens
agcaccattctcccgattattcagtacttaact

SEQ ID NO: 9478 - DNA, 33 bp, Homo sapiens
ctgggggaaaagtgactaccagaaagtgaagac

SEQ ID NO: 9479 - DNA, 33 bp, Homo sapiens
gatgaaatttctagacgcactctggatgaaaag

SEQ ID NO: 9480 - DNA, 51 bp, Homo sapiens
gagtttaattgactggttacctctatgcagtgctagataagcatggttcat

SEQ ID NO: 9481 - DNA, 51 bp, Homo sapiens
atggatttctatggatacagaaatatgaatttttagacacaccattggaat

SEQ ID NO: 9482 - DNA, 33 bp, Homo sapiens
ccccagattagagagatggaaagtggttgttag

SEQ ID NO: 9483 - DNA, 33 bp, Homo sapiens
ggtgaggcatggtaaataaatgtctgaccataa

SEQ ID NO: 9484 - DNA, 33 bp, Homo sapiens
ggttagctgcattgtaccctgtgaagcttgaaa

SEQ ID NO: 9485 - DNA, 33 bp, Homo sapiens
aaagaagcatcctgaatactgactcaaatagta

SEQ ID NO: 9486 - DNA, 33 bp, Homo sapiens
aataaggaggttgtcattgaaaagagtgaattc

SEQ ID NO: 9487 - DNA, 33 bp, Homo sapiens
ctgcctcatactctacggacaaagaacttgagc

SEQ ID NO: 9488 - DNA, 33 bp, Homo sapiens
ttagaatgctgcctaattatgggttcttccttt

SEQ ID NO: 9489 - DNA, 33 bp, Homo sapiens
tttaacaagcgttgcattgaaaacaactttatg

SEQ ID NO: 9490 - DNA, 33 bp, Homo sapiens
tgctgcaaaacaaatagcctcaaaatcagaagc

SEQ ID NO: 9491 - DNA, 33 bp, Homo sapiens
tgtcccttgacgaagctacttggctacttgtgt

SEQ ID NO: 9492 - DNA, 33 bp, Homo sapiens
aatcaacctagattcctatcaactggataaaga

SEQ ID NO: 9493 - DNA, 33 bp, Homo sapiens
cagagatgtgctttgcgaatggtgctattttat

SEQ ID NO: 9494 - DNA, 33 bp, Homo sapiens
aaatgctcaaattacagaagctcaatccaagga

SEQ ID NO: 9495 - DNA, 33 bp, Homo sapiens
ctggcagatgattttctaaagtgtcttttccat

SEQ ID NO: 9496 - DNA, 33 bp, Homo sapiens
aaacctaagtgcagtggaataacccaaatgata

SEQ ID NO: 9497 - DNA, 33 bp, Homo sapiens
gtgaattgagtaggccggatgagttggcagacc

SEQ ID NO: 9498 - DNA, 33 bp, Homo sapiens
aaattgaaaatatgactcttaaaacaagctcaa

SEQ ID NO: 9499 - DNA, 33 bp, Homo sapiens
cttacaatggcatggataactcagataactggt

SEQ ID NO: 9500 - DNA, 33 bp, Homo sapiens
caaggagggttttaaatgtccagctgtcattat

SEQ ID NO: 9501 - DNA, 33 bp, Homo sapiens
atttggtatatcttaatgcttggtactaatgat

SEQ ID NO: 9502 - DNA, 33 bp, Homo sapiens
ttgtagccagctagtctgaagtgggggtggtcc

SEQ ID NO: 9503 - DNA, 33 bp, Homo sapiens
tgccatgaaatttgacgagggattcatgtatac

SEQ ID NO: 9504 - DNA, 33 bp, Homo sapiens
tacctgcttattcacagcctgcttgaggcttat

SEQ ID NO: 9505 - DNA, 33 bp, Homo sapiens
gagcaagttaaagaatgagaggaaaacctggag

SEQ ID NO: 9506 - DNA, 33 bp, Homo sapiens
agtcaggagtcatacatagcacagaacattgtt

SEQ ID NO: 9507 - DNA, 33 bp, Homo sapiens
tttaattctttttatagcacttagcacattaat

SEQ ID NO: 9508 - DNA, 33 bp, Homo sapiens
acccactcaccattattacctggcatgaaaaca

SEQ ID NO: 9509 - DNA, 33 bp, Homo sapiens
acctcttctgaccactgaactaaaccacgtaca

SEQ ID NO: 9510 - DNA, 33 bp, Homo sapiens
agaattctatattatgtatagcaaatgagccaa

SEQ ID NO: 9511 - DNA, 33 bp, Homo sapiens
cagagcatctcattaccctgtgaatatacacgt

SEQ ID NO: 9512 - DNA, 33 bp, Homo sapiens
atgagcaaactgaatcgctggtagtctaaataa

SEQ ID NO: 9513 - DNA, 33 bp, Homo sapiens
gggacaaaaatccagatgtgaagtggaggagag

SEQ ID NO: 9514 - DNA, 33 bp, Homo sapiens
ccttgtattgttaatttaaggcgaaatttgggc

SEQ ID NO: 9515 - DNA, 33 bp, Homo sapiens
atgagcttctactaccgagatgctttggaaaac

SEQ ID NO: 9516 - DNA, 33 bp, Homo sapiens
tgagaagtaggagcattaggatatctggtacct

SEQ ID NO: 9517 - DNA, 33 bp, Homo sapiens
gttgtataccaatgcagtaagtatgtacaaagc

SEQ ID NO: 9518 - DNA, 51 bp, Homo sapiens
caaaggcatagaggaaccttaaatgcaaattgctaagtaaaagaggtcagt

SEQ ID NO: 9519 - DNA, 33 bp, Homo sapiens
aggactaaacaaatgatagaggactttgcagca

SEQ ID NO: 9520 - DNA, 33 bp, Homo sapiens
attgatgctagtattatagttaccagtggcgta

SEQ ID NO: 9521 - DNA, 33 bp, Homo sapiens
gtggatataacggaaatggagtaggatttaagg

SEQ ID NO: 9522 - DNA, 33 bp, Homo sapiens
gattgcagcttgtctatctctgaatggaaaaca

SEQ ID NO: 9523 - DNA, 33 bp, Homo sapiens
atgtgttgtacagatagatatcagggtgaggtc

SEQ ID NO: 9524 - DNA, 51 bp, Homo sapiens
ctgaaatcatcttgatggtgactaaggtgccctgttgagtatgttgcaggc

SEQ ID NO: 9525 - DNA, 33 bp, Homo sapiens
caattccagtcatcatgaaacagaaatatccta

SEQ ID NO: 9526 - DNA, 33 bp, Homo sapiens
tgaaattgaattgacagaaaccaccagtggctc

SEQ ID NO: 9527 - DNA, 33 bp, Homo sapiens
tggcttaaaggaccccgaatatagcttaggcca

SEQ ID NO: 9528 - DNA, 33 bp, Homo sapiens
agtaactcaatagttatcagtcgctttggggaa

SEQ ID NO: 9529 - DNA, 33 bp, Homo sapiens
tcctttccaactagaagctccttcagagtcaag

SEQ ID NO: 9530 - DNA, 33 bp, Homo sapiens
tagttaaattgcagcatatacttcaaatcacac

SEQ ID NO: 9531 - DNA, 33 bp, Homo sapiens
accattcattttttccgattctcagacatagat

SEQ ID NO: 9532 - DNA, 33 bp, Homo sapiens
gcaatggagtcctaaatgtgaaccataaaggaa

SEQ ID NO: 9533 - DNA, 33 bp, Homo sapiens
acagtatgaatcaacctgcttctggatttcccc

SEQ ID NO: 9534 - DNA, 33 bp, Homo sapiens
acaatgttgatagacttaaagtataagggaatc

SEQ ID NO: 9535 - DNA, 33 bp, Homo sapiens
aacctattgtttaggggataacaacagtaagag

SEQ ID NO: 9536 - DNA, 33 bp, Homo sapiens
cgtatgtgaatggacatctgacccaagcttgca

SEQ ID NO: 9537 - DNA, 51 bp, Homo sapiens
taataggaatgagtcagagtggagctgataatcggaatgagtcagggtgga

SEQ ID NO: 9538 - DNA, 51 bp, Homo sapiens
gagtgtgcaaaatgattttgataaacgtatgttgatctggggacctgtaag

SEQ ID NO: 9539 - DNA, 51 bp, Homo sapiens
tataaatgacatgataaaaatcctatgaacaactccatactaatacatttg

SEQ ID NO: 9540 - DNA, 33 bp, Homo sapiens
aaggcatagtccctgatatgtaggcgcccataa

SEQ ID NO: 9541 - DNA, 51 bp, Homo sapiens
gaagtcaagctgaaaatggagagcagctatactaaagcccaatccgaggtg

SEQ ID NO: 9542 - DNA, 33 bp, Homo sapiens
gggacaagaaccataatccaggcaagatatcac

SEQ ID NO: 9543 - DNA, 51 bp, Homo sapiens
gaaaagtgttagcttccaagcgtgatgaacccttcagatagactcatcagt

SEQ ID NO: 9544 - DNA, 33 bp, Homo sapiens
ttgctaccagaccacagatggcactaacagaaa

SEQ ID NO: 9545 - DNA, 33 bp, Homo sapiens
taatgtggaacttttagacctatgtccaaatac

SEQ ID NO: 9546 - DNA, 33 bp, Homo sapiens
tcattcattaccaaacgacactcctctgtttaa

SEQ ID NO: 9547 - DNA, 33 bp, Homo sapiens
agaaaaactagaacactaaataatggcagccag

SEQ ID NO: 9548 - DNA, 33 bp, Homo sapiens
tagctagaaggatcaatgacaagggtgacaccg

SEQ ID NO: 9549 - DNA, 33 bp, Homo sapiens
tttagggcccaggtgagatgagttaggcatcca

SEQ ID NO: 9550 - DNA, 33 bp, Homo sapiens
tcaaaaatgtgaacaatgttggggtagtggtgt

SEQ ID NO: 9551 - DNA, 33 bp, Homo sapiens
ttaacatcacgtaagagtaatacctggtggtct

SEQ ID NO: 9552 - DNA, 33 bp, Homo sapiens
aaataaactacggaaagtccatagtagcaattg

SEQ ID NO: 9553 - DNA, 33 bp, Homo sapiens
aatacctggtttgagacatcatagtttgtgcag

SEQ ID NO: 9554 - DNA, 33 bp, Homo sapiens
tgagtgtcaacttctataaccttggatgacata

SEQ ID NO: 9555 - DNA, 51 bp, Homo sapiens
cctggcacagaggctggaaatgagtgggtactgctaaaacaatgtggaatg

SEQ ID NO: 9556 - DNA, 33 bp, Homo sapiens
actctgtgtccagtccgagcttcagagaaggaa

SEQ ID NO: 9557 - DNA, 33 bp, Homo sapiens
aaaattttatctatcagaggctcgtaagattca

SEQ ID NO: 9558 - DNA, 33 bp, Homo sapiens
ctggaactacaccaccggcttatctagatctcc

SEQ ID NO: 9559 - DNA, 51 bp, Homo sapiens
caatatagataaagctagttcaaaagcataattaattctactaagatttgg

SEQ ID NO: 9560 - DNA, 33 bp, Homo sapiens
ataggaagcacaggtgtaaatggaaaactgcaa

SEQ ID NO: 9561 - DNA, 33 bp, Homo sapiens
tttggactagcctgaggccagtagcagagactt

SEQ ID NO: 9562 - DNA, 33 bp, Homo sapiens
tgagaataacccaagatgtgtttcgtgctggga

SEQ ID NO: 9563 - DNA, 33 bp, Homo sapiens
gttgtttggtaataggcactcagaaccaaagtc

SEQ ID NO: 9564 - DNA, 33 bp, Homo sapiens
agacataaaaatgccacacttaaaattgaggta

SEQ ID NO: 9565 - DNA, 33 bp, Homo sapiens
gagtgtttgcacagtatagtaacatttggttgt

SEQ ID NO: 9566 - DNA, 33 bp, Homo sapiens
acagctgaatgaactatgatttacgagaacgag

SEQ ID NO: 9567 - DNA, 33 bp, Homo sapiens
gatagtgagcacaagcgagcacaaacctgaaat

SEQ ID NO: 9568 - DNA, 33 bp, Homo sapiens
gtggaaacaggagaagtagaattcagtttggca

SEQ ID NO: 9569 - DNA, 33 bp, Homo sapiens
caagcaacaacatacagtatataagcgatgaat

SEQ ID NO: 9570 - DNA, 33 bp, Homo sapiens
ggtctgactctcataaggcttacattagaatgt

SEQ ID NO: 9571 - DNA, 33 bp, Homo sapiens
ttgagaatctactatatgctttggcaatgttga

SEQ ID NO: 9572 - DNA, 33 bp, Homo sapiens
attctgctaaggcatcgctttcttccagatgtt

SEQ ID NO: 9573 - DNA, 33 bp, Homo sapiens
taaacctgagggacactgagaaaaacagctgct

SEQ ID NO: 9574 - DNA, 33 bp, Homo sapiens
gttaccatgcatagaagtaagggcaaggtgcag

SEQ ID NO: 9575 - DNA, 33 bp, Homo sapiens
tgagcaagtaacagattagtttcaggaagaggc

SEQ ID NO: 9576 - DNA, 33 bp, Homo sapiens
catatgatgccacttcgctgcattctatcagtc

SEQ ID NO: 9577 - DNA, 33 bp, Homo sapiens
agtattagaggaagaatagagttagaagaattc

SEQ ID NO: 9578 - DNA, 33 bp, Homo sapiens
catcaaatgaatcaccgcatatcttgaaaaatt

SEQ ID NO: 9579 - DNA, 33 bp, Homo sapiens
ctttgttctctgatgcgaaaaatcttcagaaac

SEQ ID NO: 9580 - DNA, 33 bp, Homo sapiens
tgctaagagttaggatgaagaatggcatcctac

SEQ ID NO: 9581 - DNA, 33 bp, Homo sapiens
tctgtgttgcagactagaagcaaaatgcagtaa

SEQ ID NO: 9582 - DNA, 33 bp, Homo sapiens
agtggatcttctaacatcttaactgaccacagt

SEQ ID NO: 9583 - DNA, 33 bp, Homo sapiens
aaaactctttgtgaactaaaaggagacaggtgt

SEQ ID NO: 9584 - DNA, 33 bp, Homo sapiens
ttccacattctgaagcggcagcccaaactgtat

SEQ ID NO: 9585 - DNA, 33 bp, Homo sapiens
agaagcctgaactatcgaagatttgaaagatga

SEQ ID NO: 9586 - DNA, 33 bp, Homo sapiens
aagtcctgggaaaaattatttcaactcagcttt

SEQ ID NO: 9587 - DNA, 33 bp, Homo sapiens
tttctaaaatccctgagaaattcctagcaacta

SEQ ID NO: 9588 - DNA, 33 bp, Homo sapiens
agagcagggattacccggaaaccagcaccggga

SEQ ID NO: 9589 - DNA, 33 bp, Homo sapiens
aaattatgaggttaaagaattgcctgttgtttg

SEQ ID NO: 9590 - DNA, 33 bp, Homo sapiens
tgtatgtattcgaacttagaactcaaaatttta

SEQ ID NO: 9591 - DNA, 33 bp, Homo sapiens
tgactgagctccagtaggtggcaactgactttt

SEQ ID NO: 9592 - DNA, 33 bp, Homo sapiens
tagatacaagggacgatgagtctttgaactaag

SEQ ID NO: 9593 - DNA, 33 bp, Homo sapiens
ctaatagtatattcaccgaattgtaaaccttac

SEQ ID NO: 9594 - DNA, 33 bp, Homo sapiens
cgggctgtaatttctatgatttgtatgagtata

SEQ ID NO: 9595 - DNA, 33 bp, Homo sapiens
gtgttgtgcacctgcattatctaatccttcaat

SEQ ID NO: 9596 - DNA, 33 bp, Homo sapiens
gctttagcattatagtgaccttctttcacctaa

SEQ ID NO: 9597 - DNA, 33 bp, Homo sapiens
taacagcgatttttaagacagcgataaagtctg

SEQ ID NO: 9598 - DNA, 33 bp, Homo sapiens
aagaagttcatgagccgaagaatgtggtagcct

SEQ ID NO: 9599 - DNA, 33 bp, Homo sapiens
ccaaattgtgttaggacggcctgctatctacag

SEQ ID NO: 9600 - DNA, 33 bp, Homo sapiens
gttggtttaaatgggctacttccagaatttctg

SEQ ID NO: 9601 - DNA, 33 bp, Homo sapiens
agaaaatacagttccagaagcgctgacttcact

SEQ ID NO: 9602 - DNA, 33 bp, Homo sapiens
tacttttcatttcacatgataggcttcaggcta

SEQ ID NO: 9603 - DNA, 51 bp, Homo sapiens
aaaacataaagaagtgggaatcatgcaaatgaataaacatgatttccacag

SEQ ID NO: 9604 - DNA, 51 bp, Homo sapiens
ttatgcagaaaaagagaatatataatgaaggtataacaagcatgaaacttc

SEQ ID NO: 9605 - DNA, 51 bp, Homo sapiens
acaattgctaccaaagttcacaggagagttagtgtaaggaaatccagaact

SEQ ID NO: 9606 - DNA, 33 bp, Homo sapiens
tttagatatgttgagtttctgctgctacttgaa

SEQ ID NO: 9607 - DNA, 33 bp, Homo sapiens
cacacactgatctacattgaaaaaaatacaaac

SEQ ID NO: 9608 - DNA, 33 bp, Homo sapiens
cttcaagggttgaaaagtttctgctaaagaata

SEQ ID NO: 9609 - DNA, 33 bp, Homo sapiens
gaaaacttaagcttcaggatacttataactgta

SEQ ID NO: 9610 - DNA, 51 bp, Homo sapiens
aggaatataaatttttgatagtctatgctcagtagttaggtactctgaaaa

SEQ ID NO: 9611 - DNA, 33 bp, Homo sapiens
aaattgacagctgcgatgagtgctatgaagaaa

SEQ ID NO: 9612 - DNA, 33 bp, Homo sapiens
cacatcatcttatgtcgaaagtcatgttaacaa

SEQ ID NO: 9613 - DNA, 33 bp, Homo sapiens
gtaacaagtattgttacggatgtagagggacag

SEQ ID NO: 9614 - DNA, 33 bp, Homo sapiens
gagagtgctacatcaatctaaaatggcttcctt

SEQ ID NO: 9615 - DNA, 33 bp, Homo sapiens
ctttgactgcctttgctgaagagtaacccacaa

SEQ ID NO: 9616 - DNA, 33 bp, Homo sapiens
tctaaatgctgtatagtcattcatttagcagac

SEQ ID NO: 9617 - DNA, 33 bp, Homo sapiens
actctcaggacattaattccttctcaacctgtg

SEQ ID NO: 9618 - DNA, 33 bp, Homo sapiens
ggtgtttaaaaatgtatagaaaccacttgcata

SEQ ID NO: 9619 - DNA, 33 bp, Homo sapiens
agggaaggagtaccaacagactgaaccatttac

SEQ ID NO: 9620 - DNA, 33 bp, Homo sapiens
catagtacttgacaaataagagtttcataaatg

SEQ ID NO: 9621 - DNA, 33 bp, Homo sapiens
atatttttttgcccccggatgttctaaagtgtt

SEQ ID NO: 9622 - DNA, 33 bp, Homo sapiens
ttatttcttggataaccaactggagaacagaat

SEQ ID NO: 9623 - DNA, 33 bp, Homo sapiens
tgctctattgtaacaatcttgtaactggctttc

SEQ ID NO: 9624 - DNA, 33 bp, Homo sapiens
ggctatttttcactcattctatcaaggaacgtg

SEQ ID NO: 9625 - DNA, 33 bp, Homo sapiens
tcatcaagcgattcattaaatctgtgatagaac

SEQ ID NO: 9626 - DNA, 33 bp, Homo sapiens
ctgttgtaagtaagcatccactttgctaaagtg

SEQ ID NO: 9627 - DNA, 33 bp, Homo sapiens
aaggaaatctgtattctattcggagtgtgtgat

SEQ ID NO: 9628 - DNA, 33 bp, Homo sapiens
ctcttcacgaaggaaatgagggctgttgtcttg

SEQ ID NO: 9629 - DNA, 33 bp, Homo sapiens
atacactatatataaatggggagccaaatggca

SEQ ID NO: 9630 - DNA, 33 bp, Homo sapiens
tacttattgaataaacgaatagcagtcttacag

SEQ ID NO: 9631 - DNA, 33 bp, Homo sapiens
tgtatcaggatgtatctcttgtagtgtaacagg

SEQ ID NO: 9632 - DNA, 33 bp, Homo sapiens
ggaagcagtatagtcattaagagaaagagatcc

SEQ ID NO: 9633 - DNA, 33 bp, Homo sapiens
aatcaatattggaggctacttgcagatactatt

SEQ ID NO: 9634 - DNA, 51 bp, Homo sapiens
gcacctgatacaggtctgtcttccctgagcaatgcttcagttctccacatt

SEQ ID NO: 9635 - DNA, 33 bp, Homo sapiens
tattctcatgagcaaagtctgaaagtacttcca

SEQ ID NO: 9636 - DNA, 33 bp, Homo sapiens
tttaaatggaatgttcgagaagtcaggtattaa

SEQ ID NO: 9637 - DNA, 33 bp, Homo sapiens
caaaagattttaggtacgaacaggcagtcattg

SEQ ID NO: 9638 - DNA, 33 bp, Homo sapiens
aataagagaacaggcatcaactattctttgaat

SEQ ID NO: 9639 - DNA, 33 bp, Homo sapiens
aggcacctgataactagagacagctcctatatc

SEQ ID NO: 9640 - DNA, 33 bp, Homo sapiens
taacctgaggttgggagaaaatggattaaacat

SEQ ID NO: 9641 - DNA, 33 bp, Homo sapiens
gatcaggccagtgcatgagtcaccttgagggtc

SEQ ID NO: 9642 - DNA, 33 bp, Homo sapiens
tgtgtatcaagccatatctggggagaagagtgg

SEQ ID NO: 9643 - DNA, 33 bp, Homo sapiens
tctcaccagcagtggattaatgataagcagatt

SEQ ID NO: 9644 - DNA, 33 bp, Homo sapiens
gtctgtggaactctggtcatcagctttattaac

SEQ ID NO: 9645 - DNA, 33 bp, Homo sapiens
caattccatgctaagagataaactatggatatg

SEQ ID NO: 9646 - DNA, 33 bp, Homo sapiens
aagtgtctgtaatagttaaggagtctcctcatg

SEQ ID NO: 9647 - DNA, 33 bp, Homo sapiens
tgtcccaagagaaattgaaagactgccatggca

SEQ ID NO: 9648 - DNA, 33 bp, Homo sapiens
ttctgcacctgtcaaagaaccaatatccctaac

SEQ ID NO: 9649 - DNA, 33 bp, Homo sapiens
cctctttctctgtagatgcttagggttcagcct

SEQ ID NO: 9650 - DNA, 51 bp, Homo sapiens
agtaaataacagctgtcacatattttcattttgtactggagacgacagtga

SEQ ID NO: 9651 - DNA, 33 bp, Homo sapiens
taatactaataatggacaggcacgatgagcaaa

SEQ ID NO: 9652 - DNA, 33 bp, Homo sapiens
aaaaagactgtcaactgaaagagtgctataaag

SEQ ID NO: 9653 - DNA, 51 bp, Homo sapiens
ttaaaattttttaaaagaaaatttatgttcacacaaaatctcacaaatatt

SEQ ID NO: 9654 - DNA, 33 bp, Homo sapiens
ttaaagagcaggactaggcacttcaattataac

SEQ ID NO: 9655 - DNA, 33 bp, Homo sapiens
tataataaagctaaaggacaaagagtgtcacct

SEQ ID NO: 9656 - DNA, 33 bp, Homo sapiens
ttttcttcctttaaacgacaaactagggccagg

SEQ ID NO: 9657 - DNA, 33 bp, Homo sapiens
ttccattttcacttactacttgcaaaagattga

SEQ ID NO: 9658 - DNA, 51 bp, Homo sapiens
attcaaacacacatatatatatatgtaaactatgatagaaccccagctagt

SEQ ID NO: 9659 - DNA, 33 bp, Homo sapiens
accgtagactgaaggacgaaggccgattttcct

SEQ ID NO: 9660 - DNA, 33 bp, Homo sapiens
gtatatattgaatgtatagttatgcaacttaag

SEQ ID NO: 9661 - DNA, 33 bp, Homo sapiens
taaaccttgcataaatgaaacattttcttgtct

SEQ ID NO: 9662 - DNA, 33 bp, Homo sapiens
ttaaagcaggaatagatcaaatacatgaggctg

SEQ ID NO: 9663 - DNA, 33 bp, Homo sapiens
aaaatcaaatattacctctaagtcatgtatata

SEQ ID NO: 9664 - DNA, 33 bp, Homo sapiens
cttttttccctaaagaggacagccctttcagaa

SEQ ID NO: 9665 - DNA, 33 bp, Homo sapiens
caaattttttctaagccaatatgcaaaacagca

SEQ ID NO: 9666 - DNA, 51 bp, Homo sapiens
aaattcctatgaaatacaaatgaaagctaaatctcataatttgaatggatt

SEQ ID NO: 9667 - DNA, 51 bp, Homo sapiens
tagagccctgaatgacttttctgaggatttaatctagttgcatagctattt

SEQ ID NO: 9668 - DNA, 33 bp, Homo sapiens
ccatagctgaaaatactatagctgaaagcatgg

SEQ ID NO: 9669 - DNA, 51 bp, Homo sapiens
aggatagataatttgtttcaaagtatatgtaacatttatcaatttagactg

SEQ ID NO: 9670 - DNA, 33 bp, Homo sapiens
gagaattctactaaaatctgggcatcaatgtat

SEQ ID NO: 9671 - DNA, 51 bp, Homo sapiens
aaaatcacacattttagcaattttatctgtttagcaataatttccaacatc

SEQ ID NO: 9672 - DNA, 51 bp, Homo sapiens
gcattggaataaattatagtggaccgtcaacttatgatacctattgattga

SEQ ID NO: 9673 - DNA, 51 bp, Homo sapiens
ttagttgtgtctcttgtcaaatccagttatctgcttacaagagaaacacct

SEQ ID NO: 9674 - DNA, 33 bp, Homo sapiens
attgtagggatgtaccggagttattcatgtatt

SEQ ID NO: 9675 - DNA, 33 bp, Homo sapiens
agtaatttttgtccaggccaatgttctagagag

SEQ ID NO: 9676 - DNA, 33 bp, Homo sapiens
caacccttattcttaaggcttgcaagaggttta

SEQ ID NO: 9677 - DNA, 33 bp, Homo sapiens
ttttaagcaatccttagcatccaacatccagta

SEQ ID NO: 9678 - DNA, 33 bp, Homo sapiens
ctcttaagctaagtaatcagggctacaattagt

SEQ ID NO: 9679 - DNA, 33 bp, Homo sapiens
gtttggagagttctcagataaatgaaaacagat

SEQ ID NO: 9680 - DNA, 33 bp, Homo sapiens
catgtatagcagctgattaacaatgtttaatat

SEQ ID NO: 9681 - DNA, 33 bp, Homo sapiens
agtaaggtgtcttcaatatatgcagttttgaca

SEQ ID NO: 9682 - DNA, 33 bp, Homo sapiens
ttttgatgtgcaaagagattggctaaatacttt

SEQ ID NO: 9683 - DNA, 33 bp, Homo sapiens
aaaaaactattattcacaatacgcaaacaactg

SEQ ID NO: 9684 - DNA, 33 bp, Homo sapiens
tctgctttgactgcctgacaatatctttctgac

SEQ ID NO: 9685 - DNA, 33 bp, Homo sapiens
tagtaacattctaaacggtattatcaggttata

SEQ ID NO: 9686 - DNA, 33 bp, Homo sapiens
gaaaaactgccttaaatatgtcaactaataata

SEQ ID NO: 9687 - DNA, 33 bp, Homo sapiens
aactgctgtgatccaataagtctaagtaatata

SEQ ID NO: 9688 - DNA, 33 bp, Homo sapiens
attagtgggtatgtggtagaattgagttatctg

SEQ ID NO: 9689 - DNA, 33 bp, Homo sapiens
aggacatcggcacaggcaaatgtttcatggcga

SEQ ID NO: 9690 - DNA, 33 bp, Homo sapiens
tccttgagaaacaacatggaaaatgagcaataa

SEQ ID NO: 9691 - DNA, 33 bp, Homo sapiens
tgaaggagctgtagaatagaacagatgggagtc

SEQ ID NO: 9692 - DNA, 33 bp, Homo sapiens
ccttagtggtcttgcataaaatctggaacagtt

SEQ ID NO: 9693 - DNA, 33 bp, Homo sapiens
ttatcacttccaaatagcctctagaaaggacat

SEQ ID NO: 9694 - DNA, 33 bp, Homo sapiens
gttattcagccagtcctgaaaagggtaatatcc

SEQ ID NO: 9695 - DNA, 33 bp, Homo sapiens
ccttaccaaaagctaattgcattgtcagtagta

SEQ ID NO: 9696 - DNA, 33 bp, Homo sapiens
taaatgtttaccataagtaaggccacaaataaa

SEQ ID NO: 9697 - DNA, 33 bp, Homo sapiens
tctgccatgtagcaaatgatcagcttacagggc

SEQ ID NO: 9698 - DNA, 33 bp, Homo sapiens
ccctctagaaccaaactatcaatgcaccaaggc

SEQ ID NO: 9699 - DNA, 51 bp, Homo sapiens
ttttaggacacaaaggtaaagtaggtaaagatctttcaagaacttgtaatt

SEQ ID NO: 9700 - DNA, 33 bp, Homo sapiens
taatacatttttgatatatggcagctgctaaat

SEQ ID NO: 9701 - DNA, 33 bp, Homo sapiens
aaacagtgtgtaggcctctataagtatcatggg

SEQ ID NO: 9702 - DNA, 33 bp, Homo sapiens
ttggcacccactttgggcacctttatagtattt

SEQ ID NO: 9703 - DNA, 33 bp, Homo sapiens
gaataggtgaccattatagtttatctctaacta

SEQ ID NO: 9704 - DNA, 33 bp, Homo sapiens
agcggacacctgaagatgaaaaggctgcaggag

SEQ ID NO: 9705 - DNA, 33 bp, Homo sapiens
aaaatcatctgagcaggcaaatataactctttt

SEQ ID NO: 9706 - DNA, 33 bp, Homo sapiens
tcttcacaaaaaccaccgccaaaaatgtgcctt

SEQ ID NO: 9707 - DNA, 51 bp, Homo sapiens
agttggggagctcttcaaaatataatgctgatcatgaaaaatataatgctc

SEQ ID NO: 9708 - DNA, 33 bp, Homo sapiens
gagaattgtgaaaaagtctgccctggctgttgt

SEQ ID NO: 9709 - DNA, 33 bp, Homo sapiens
tcagaggcccatgttaggaaattgtatagaaac

SEQ ID NO: 9710 - DNA, 33 bp, Homo sapiens
acttaaatagctaaaatgacacacaagaaacct

SEQ ID NO: 9711 - DNA, 33 bp, Homo sapiens
aaaggggaatttgcccgacaggagataagtacc

SEQ ID NO: 9712 - DNA, 33 bp, Homo sapiens
aagctgcatactctccgaaatgatttagtatta

SEQ ID NO: 9713 - DNA, 33 bp, Homo sapiens
ttcatcattacccaaagtttctgtctgcccttg

SEQ ID NO: 9714 - DNA, 51 bp, Homo sapiens
aatgctaacagtgaaagtcttaggctataaaggtcaaagaagtaaaggtga

SEQ ID NO: 9715 - DNA, 33 bp, Homo sapiens
ttcttaccataatagggagcttattgtcccaca

SEQ ID NO: 9716 - DNA, 33 bp, Homo sapiens
ctcaaaagcagcttaagtacgatgtaatggaag

SEQ ID NO: 9717 - DNA, 33 bp, Homo sapiens
catacctggtaaggggtaaagctctctatggaa

SEQ ID NO: 9718 - DNA, 33 bp, Homo sapiens
ctgggcatctcaattatgataaaagcttccctt

SEQ ID NO: 9719 - DNA, 33 bp, Homo sapiens
ttacttaagtgagtgcgcaagaaggggctccgt

SEQ ID NO: 9720 - DNA, 33 bp, Homo sapiens
atctgttaccagtatataaggaagcccatgaac

SEQ ID NO: 9721 - DNA, 33 bp, Homo sapiens
ctgttcagagtctcgcgcttagttgatttagct

SEQ ID NO: 9722 - DNA, 33 bp, Homo sapiens
tggttatcaaccccccgcagaacacaaagcccc

SEQ ID NO: 9723 - DNA, 33 bp, Homo sapiens
aaaggaatatttgccctatctcttctctcatgt

SEQ ID NO: 9724 - DNA, 33 bp, Homo sapiens
ccttgaggtagaatgaggactcagtgtgttggt

SEQ ID NO: 9725 - DNA, 33 bp, Homo sapiens
tcccattgcttttagatgaagcccagacttgtt

SEQ ID NO: 9726 - DNA, 33 bp, Homo sapiens
cactcgctgattctgaggcttagtacttaggcc

SEQ ID NO: 9727 - DNA, 33 bp, Homo sapiens
aagtttcttgttcatgcagtgatggcaggagga

SEQ ID NO: 9728 - DNA, 33 bp, Homo sapiens
gtgaggaaaaagggtcgatttgcagagatttct

SEQ ID NO: 9729 - DNA, 51 bp, Homo sapiens
tgtcacaaagccagcaccagcaagagcgacaccgagctcccacgctttgtt

SEQ ID NO: 9730 - DNA, 33 bp, Homo sapiens
cagacctcacagaggatgtgtcattttagaagt

SEQ ID NO: 9731 - DNA, 33 bp, Homo sapiens
tgcctattgatgctaagtcctgaagttgatgag

SEQ ID NO: 9732 - DNA, 33 bp, Homo sapiens
ccccacaattacaaaataaggtctgagtgccac

SEQ ID NO: 9733 - DNA, 33 bp, Homo sapiens
agttcaagatgcggaattgcaaaaattggacaa

SEQ ID NO: 9734 - DNA, 33 bp, Homo sapiens
gtatttttggcgcaactcggaactcctgagtgt

SEQ ID NO: 9735 - DNA, 33 bp, Homo sapiens
actgaagatggaaagagcctggtacccaaatca

SEQ ID NO: 9736 - DNA, 33 bp, Homo sapiens
aatctcacaacagaaataattcatgagcagcct

SEQ ID NO: 9737 - DNA, 33 bp, Homo sapiens
cttaacttgctaattataaagacggagattaaa

SEQ ID NO: 9738 - DNA, 33 bp, Homo sapiens
ccttatatgtccaatagtaaatggcacaatgtg

SEQ ID NO: 9739 - DNA, 33 bp, Homo sapiens
tggggactttctttgcgcttgttgagagaaaac

SEQ ID NO: 9740 - DNA, 33 bp, Homo sapiens
attctacagcttcttatatctgcaatagctgtc

SEQ ID NO: 9741 - DNA, 33 bp, Homo sapiens
agtttccgtaaatgtagcgagagggcgtctggc

SEQ ID NO: 9742 - DNA, 33 bp, Homo sapiens
tgtccaatatttatcatgtcttggtgtttcact

SEQ ID NO: 9743 - DNA, 33 bp, Homo sapiens
caaaacaaaactatctgaaacagggtctacttc

SEQ ID NO: 9744 - DNA, 33 bp, Homo sapiens
tgcccaagagtccttatctggaacctctggtct

SEQ ID NO: 9745 - DNA, 33 bp, Homo sapiens
tcctggcctctgtatatggcctttgttagcact

SEQ ID NO: 9746 - DNA, 33 bp, Homo sapiens
catctttcactccacaggtatttgttgaacgtc

SEQ ID NO: 9747 - DNA, 33 bp, Homo sapiens
gaatctggaccagagatatatagaagatgggcc

SEQ ID NO: 9748 - DNA, 33 bp, Homo sapiens
cttgatagctgcagtctagtagcaatagaaaca

SEQ ID NO: 9749 - DNA, 33 bp, Homo sapiens
gctacactgttgagaatatgcaaattatccact

SEQ ID NO: 9750 - DNA, 33 bp, Homo sapiens
atacctcagtcattaagctagagaactgtttaa

SEQ ID NO: 9751 - DNA, 33 bp, Homo sapiens
ctctgcagaaccctgatgaattcactgagcaaa

SEQ ID NO: 9752 - DNA, 51 bp, Homo sapiens
aactcttcacaaaagggaacatgtatagagtggaactttgccttctattct

SEQ ID NO: 9753 - DNA, 51 bp, Homo sapiens
tgggtaggtacataatactttcaggtccaacaatactggcagtccatttgg

SEQ ID NO: 9754 - DNA, 33 bp, Homo sapiens
tgtctttatcctattctctttcatcttttttag

SEQ ID NO: 9755 - DNA, 33 bp, Homo sapiens
gttttacttgtagttcgcttttggctccatcta

SEQ ID NO: 9756 - DNA, 33 bp, Homo sapiens
agtgctgaaaccaggatggatatggaaaaacta

SEQ ID NO: 9757 - DNA, 33 bp, Homo sapiens
catccaggacacagaatacacggttgaatatct

SEQ ID NO: 9758 - DNA, 51 bp, Homo sapiens
aaagatgtctgatagaaattgtgtgtatctctggcttatctgtccatggag

SEQ ID NO: 9759 - DNA, 51 bp, Homo sapiens
cattatgcttttgcttttatggtgctgactcttaagcatgtgcatgaaaaa

SEQ ID NO: 9760 - DNA, 51 bp, Homo sapiens
atttgatatgacacccctgatgaactgtctcaaaatctatgtgactcttcc

SEQ ID NO: 9761 - DNA, 33 bp, Homo sapiens
caaaagaagattatagtactgttctttcctttt

SEQ ID NO: 9762 - DNA, 51 bp, Homo sapiens
ctatgtacatgaaatagtgtatgtgtaacctaaaaatctgaataagctgta

SEQ ID NO: 9763 - DNA, 51 bp, Homo sapiens
gctgatatctcaacaggtactttcatatttaggctaactgaaatgtgaggt

SEQ ID NO: 9764 - DNA, 33 bp, Homo sapiens
ttcctgtatgcagaaagagggcaatgtttaaaa

SEQ ID NO: 9765 - DNA, 33 bp, Homo sapiens
ctgggctgtctacccagcaactcttacagatta

SEQ ID NO: 9766 - DNA, 33 bp, Homo sapiens
ccacagtgattcagaatacccacaatcaccaag

SEQ ID NO: 9767 - DNA, 33 bp, Homo sapiens
catgaactcattatgaccttcatggcttaaaat

SEQ ID NO: 9768 - DNA, 33 bp, Homo sapiens
aatatctacagttacctgaaaaggctattgaat

SEQ ID NO: 9769 - DNA, 51 bp, Homo sapiens
tacatgacattaggtgttgtttttaggcttgtaaatgatgcaaacatttac

SEQ ID NO: 9770 - DNA, 33 bp, Homo sapiens
gcaaggtttgaaagaatggcttcaagaggaaag

SEQ ID NO: 9771 - DNA, 33 bp, Homo sapiens
tatcattttttcatcctaacaatgtagtggaaa

SEQ ID NO: 9772 - DNA, 33 bp, Homo sapiens
ttgatttggttgcaaagagccatagtaaataca

SEQ ID NO: 9773 - DNA, 33 bp, Homo sapiens
gttttgaagagcaaaagtgtctttgaatttggc

SEQ ID NO: 9774 - DNA, 33 bp, Homo sapiens
accaaactacatggaagcaagttgcaggttacc

SEQ ID NO: 9775 - DNA, 33 bp, Homo sapiens
gtaagcatgaacaaaatccttaaagaagatctg

SEQ ID NO: 9776 - DNA, 33 bp, Homo sapiens
tcttacctctacaagatgaatgttcctaaaaca

SEQ ID NO: 9777 - DNA, 33 bp, Homo sapiens
attcaactttccaaaatgttctaaatgtcatga

SEQ ID NO: 9778 - DNA, 33 bp, Homo sapiens
gaaagggtgtttgtaagtatggaggatgtatgg

SEQ ID NO: 9779 - DNA, 33 bp, Homo sapiens
aatgcaattactatcaggccagtctagttttca

SEQ ID NO: 9780 - DNA, 33 bp, Homo sapiens
gtacatcattgtcagagtacctagaaaatattc

SEQ ID NO: 9781 - DNA, 33 bp, Homo sapiens
acccatccattttatagataagcagcctgaagt

SEQ ID NO: 9782 - DNA, 33 bp, Homo sapiens
tctgatgtctggtctatgctacagaatgtttgt

SEQ ID NO: 9783 - DNA, 33 bp, Homo sapiens
gagagttgagtcaaccgggcatcatagaagagg

SEQ ID NO: 9784 - DNA, 33 bp, Homo sapiens
gaaagctgttgagaaatgatacacagggatgtt

SEQ ID NO: 9785 - DNA, 33 bp, Homo sapiens
tggccagaatgagtgagggagagaatagttttg

SEQ ID NO: 9786 - DNA, 33 bp, Homo sapiens
aattcaatagaaactcgaagatccagactcata

SEQ ID NO: 9787 - DNA, 33 bp, Homo sapiens
ccaagagaagaggagcgaaactaaatacttgat

SEQ ID NO: 9788 - DNA, 33 bp, Homo sapiens
ttacctattggattgatgttgtatctgtaattt

SEQ ID NO: 9789 - DNA, 33 bp, Homo sapiens
ctgtcatcattattcctccagacctagaagctg

SEQ ID NO: 9790 - DNA, 33 bp, Homo sapiens
agaatggataggacgctgatgagtttgaggcag

SEQ ID NO: 9791 - DNA, 51 bp, Homo sapiens
ttgttctattcccttactttctccagaatatacagtctctgtctctcttct

SEQ ID NO: 9792 - DNA, 51 bp, Homo sapiens
taatagtttctactctcagaacatcgaactgtattaatataatgtgtacct

SEQ ID NO: 9793 - DNA, 51 bp, Homo sapiens
cattttggattcattattcagttgagatggcaattaattgaaactctctta

SEQ ID NO: 9794 - DNA, 51 bp, Homo sapiens
aaagcgaattattgttcttctcttatcttccgctgctttatcatggttacc

SEQ ID NO: 9795 - DNA, 33 bp, Homo sapiens
gatgttgtggatacaagaaaacataaggtctca

SEQ ID NO: 9796 - DNA, 33 bp, Homo sapiens
gaatagcatgatgaactataccttgaattatag

SEQ ID NO: 9797 - DNA, 33 bp, Homo sapiens
gaaagaaattaaggtagagtagaaatcagagat

SEQ ID NO: 9798 - DNA, 33 bp, Homo sapiens
gatgtagtacacactggactggacattttaaaa

SEQ ID NO: 9799 - DNA, 33 bp, Homo sapiens
attttgtgagagatgatgactgaagggaagaca

SEQ ID NO: 9800 - DNA, 33 bp, Homo sapiens
gtgtgcttgatatgaataataaagaagataaaa

SEQ ID NO: 9801 - DNA, 33 bp, Homo sapiens
aggagaaaagggatgatgtaaaaattgttgctg

SEQ ID NO: 9802 - DNA, 33 bp, Homo sapiens
tcaggaaaagtgaaaagcactaagtctaaaaga

SEQ ID NO: 9803 - DNA, 33 bp, Homo sapiens
catgtaactaactcaacttcacattaataaaca

SEQ ID NO: 9804 - DNA, 33 bp, Homo sapiens
ccatgaaatcctataatgtggctttggaaataa

SEQ ID NO: 9805 - DNA, 33 bp, Homo sapiens
tattaaagtgccatcatgtagaagagttgttct

SEQ ID NO: 9806 - DNA, 33 bp, Homo sapiens
attgaaaacaaaacactgtgcagcccatgctgc

SEQ ID NO: 9807 - DNA, 33 bp, Homo sapiens
gtaatctagagccatagaagctgataatgtgaa

SEQ ID NO: 9808 - DNA, 51 bp, Homo sapiens
acaacacaaagtatagaaacttaacggaggctggacttgccatggcataat

SEQ ID NO: 9809 - DNA, 51 bp, Homo sapiens
agcatttcctggcatacaacgaatagctaaataaaaagcttcttagaaata

SEQ ID NO: 9810 - DNA, 33 bp, Homo sapiens
caatatgctaaagttatagttaacagagtctgc

SEQ ID NO: 9811 - DNA, 51 bp, Homo sapiens
attatgcaggatttatcccagacattcaaggagattcaacatacaaaaatc

SEQ ID NO: 9812 - DNA, 33 bp, Homo sapiens
tcactacaataactccggcatattccccatggt

SEQ ID NO: 9813 - DNA, 33 bp, Homo sapiens
tagtcatgatccgttatgtcatgtcattttggg

SEQ ID NO: 9814 - DNA, 33 bp, Homo sapiens
ttaaacacatagaaaaggtactgacaaattccc

SEQ ID NO: 9815 - DNA, 33 bp, Homo sapiens
atacaagaactcaacaccatcaatgaacagcat

SEQ ID NO: 9816 - DNA, 33 bp, Homo sapiens
ttaagagtagaagtcagtactcaatggtgacca

SEQ ID NO: 9817 - DNA, 33 bp, Homo sapiens
ataacttacagtggaatgttctggataaacaac

SEQ ID NO: 9818 - DNA, 33 bp, Homo sapiens
acattatcttgaaatgtagcaatgaatttttct

SEQ ID NO: 9819 - DNA, 33 bp, Homo sapiens
agaatagacccacaactgatgctttagggacaa

SEQ ID NO: 9820 - DNA, 33 bp, Homo sapiens
agagagagagagggaagggagactctgtttgtt

SEQ ID NO: 9821 - DNA, 33 bp, Homo sapiens
atatcactctactacatgatgctgacagtcagg

SEQ ID NO: 9822 - DNA, 51 bp, Homo sapiens
agaaagttatttcttcaatattctctctttgtaaattatccctattcctat

SEQ ID NO: 9823 - DNA, 33 bp, Homo sapiens
aacagggacagaagagtcaatgaatcatattgt

SEQ ID NO: 9824 - DNA, 51 bp, Homo sapiens
tttctcagtagctaagtctcttttatgaggtccaaaataaaatacatttat

SEQ ID NO: 9825 - DNA, 33 bp, Homo sapiens
ctggggttggccataagagctgacgtcagagca

SEQ ID NO: 9826 - DNA, 33 bp, Homo sapiens
taaagacttgaaattcgcacattcaggcattat

SEQ ID NO: 9827 - DNA, 33 bp, Homo sapiens
tgtccagtcaatggaagagttgtccagtcaact

SEQ ID NO: 9828 - DNA, 33 bp, Homo sapiens
atccctaaagacaaaagtgtgtaaatgctaatc

SEQ ID NO: 9829 - DNA, 33 bp, Homo sapiens
ctagggttaaaaagtaggtggcttccacaccta

SEQ ID NO: 9830 - DNA, 33 bp, Homo sapiens
tataagagccttaccatgaagagctggaagaag

SEQ ID NO: 9831 - DNA, 51 bp, Homo sapiens
ccggcatcatgtaatttttcatcccgccattgaaagccattgtttccgtat

SEQ ID NO: 9832 - DNA, 33 bp, Homo sapiens
cttccagactccacaacacaatgaagcatatgg

SEQ ID NO: 9833 - DNA, 51 bp, Homo sapiens
cctcaggagtttttagtttgataagtattggagggcaagtgacacaggtga

SEQ ID NO: 9834 - DNA, 33 bp, Homo sapiens
gaaaggctgaaccctagagagtgcatggcatgg

SEQ ID NO: 9835 - DNA, 51 bp, Homo sapiens
gcagtttttaaccttgttgtattgctcttctctattgtcaaattgtcctgt

SEQ ID NO: 9836 - DNA, 51 bp, Homo sapiens
ttccatgtggtttcatgcaccattatagtaatttctgctatttccttctta

SEQ ID NO: 9837 - DNA, 33 bp, Homo sapiens
gaaaccttatcatatctcacagctttctccttc

SEQ ID NO: 9838 - DNA, 33 bp, Homo sapiens
gtcttaaactcaaacatgcagagagagccctga

SEQ ID NO: 9839 - DNA, 33 bp, Homo sapiens
tagtacctaactgaaatggtcttgagatcattc

SEQ ID NO: 9840 - DNA, 33 bp, Homo sapiens
aattatagcatttttatgtttttatgcatcatt

SEQ ID NO: 9841 - DNA, 33 bp, Homo sapiens
cattctgacttgtagattcaaatattcaactac

SEQ ID NO: 9842 - DNA, 33 bp, Homo sapiens
aacataatcagggaacgatgtttttattaactc

SEQ ID NO: 9843 - DNA, 51 bp, Homo sapiens
tacatggagaaagatcaaagtagctgaaagtcttagaatgtgtgatttaat

SEQ ID NO: 9844 - DNA, 33 bp, Homo sapiens
agctgaggtatgctgggaaaaggcttcaaggca

SEQ ID NO: 9845 - DNA, 33 bp, Homo sapiens
atttaaaagcagtctgtaattaaccattgaata

SEQ ID NO: 9846 - DNA, 33 bp, Homo sapiens
tatattgtgatttagatagaaggatgattttgg

SEQ ID NO: 9847 - DNA, 33 bp, Homo sapiens
aaattgtggtaagaaggatccagtagcatgaac

SEQ ID NO: 9848 - DNA, 33 bp, Homo sapiens
tcaatattcctatctggcaactggaagcagtta

SEQ ID NO: 9849 - DNA, 33 bp, Homo sapiens
tcctgaataggcaccagataaaatcagaagaca

SEQ ID NO: 9850 - DNA, 33 bp, Homo sapiens
aaaaccagcagttacagggtaagagttgttcta

SEQ ID NO: 9851 - DNA, 33 bp, Homo sapiens
aaagaaaaacacagtcgaaaattggtatactat

SEQ ID NO: 9852 - DNA, 33 bp, Homo sapiens
ccagcagatgctatgatgaaagctgagagcaga

SEQ ID NO: 9853 - DNA, 33 bp, Homo sapiens
tagttcaagagagtcagtaagtaccaaacctct

SEQ ID NO: 9854 - DNA, 33 bp, Homo sapiens
actctgctgttgaccagaccttcagcagacgtg

SEQ ID NO: 9855 - DNA, 51 bp, Homo sapiens
cataaagttcaagagttatacttcatcaattctttttgtcttcagcagaga

SEQ ID NO: 9856 - DNA, 33 bp, Homo sapiens
ttgtattttcagaatcgagggtcaaattttgtg

SEQ ID NO: 9857 - DNA, 33 bp, Homo sapiens
tcctagcagtaccatataaaattctgctcttaa

SEQ ID NO: 9858 - DNA, 51 bp, Homo sapiens
acatataaataatgaacgccgattatgtgctagcaacaccaacttcatagg

SEQ ID NO: 9859 - DNA, 33 bp, Homo sapiens
acttacatcatcatcagccggatgatcgcaaag

SEQ ID NO: 9860 - DNA, 51 bp, Homo sapiens
gttgttaaataattcatcacatgtagagtaacataaccatgaccaacaata

SEQ ID NO: 9861 - DNA, 33 bp, Homo sapiens
tgtaaaatgctttgaagatgcagactgatgcat

SEQ ID NO: 9862 - DNA, 33 bp, Homo sapiens
atttttcttacaaaactgtaggccaagaacaca

SEQ ID NO: 9863 - DNA, 33 bp, Homo sapiens
gggcatatcttatggggaggtgcttttgcttct

SEQ ID NO: 9864 - DNA, 33 bp, Homo sapiens
ggattgtaaagataaggagagaaatggaaatga

SEQ ID NO: 9865 - DNA, 33 bp, Homo sapiens
ataattccataagtaaggggtgaagtcctatga

SEQ ID NO: 9866 - DNA, 51 bp, Homo sapiens
gtatttgaaatttatgaaataagcatgtggcattcttggatagaaatattt

SEQ ID NO: 9867 - DNA, 33 bp, Homo sapiens
gcacataattgtgttccaaatgttcaattgtgc

SEQ ID NO: 9868 - DNA, 33 bp, Homo sapiens
gattgctgctacttactatttccagttctgtta

SEQ ID NO: 9869 - DNA, 33 bp, Homo sapiens
gtagaaaaaatacacagaaggatataggcttac

SEQ ID NO: 9870 - DNA, 33 bp, Homo sapiens
cttctacgacattgcatctaatatctgaggaca

SEQ ID NO: 9871 - DNA, 33 bp, Homo sapiens
caagacttttaacctagcatcaaagaattagct

SEQ ID NO: 9872 - DNA, 33 bp, Homo sapiens
gtgagagttgagaatagatgtaaagaagcctgg

SEQ ID NO: 9873 - DNA, 33 bp, Homo sapiens
ggaactttcctcccaactggactgtgctgtcct

SEQ ID NO: 9874 - DNA, 33 bp, Homo sapiens
catggaccctaccaaagtttcaaatctactgct

SEQ ID NO: 9875 - DNA, 51 bp, Homo sapiens
tatactgttgctccagtatttaaaatcatagtcattttttgttgttttatt

SEQ ID NO: 9876 - DNA, 33 bp, Homo sapiens
taagccagaggtagaatggtttcttcttgtagc

SEQ ID NO: 9877 - DNA, 51 bp, Homo sapiens
cctatccaccaaatgatactaacaagaatttgtcacttagccattgcaaat

SEQ ID NO: 9878 - DNA, 33 bp, Homo sapiens
agggggttggagtagagtaggagggaatgatat

SEQ ID NO: 9879 - DNA, 33 bp, Homo sapiens
gggtttaaagccaatacaggcaaaggcaagagt

SEQ ID NO: 9880 - DNA, 33 bp, Homo sapiens
gggacacatacattgagattgacataagtagta

SEQ ID NO: 9881 - DNA, 33 bp, Homo sapiens
attgcttcttgctagatgaggcaacagtttctg

SEQ ID NO: 9882 - DNA, 51 bp, Homo sapiens
taggtatgtataatatatttgcaaggatcacctatactacttaactggtgc

SEQ ID NO: 9883 - DNA, 33 bp, Homo sapiens
tacccaatatttgttctatgctataccctgata

SEQ ID NO: 9884 - DNA, 33 bp, Homo sapiens
tcctttctagataggagaaatcttagagcttcc

SEQ ID NO: 9885 - DNA, 33 bp, Homo sapiens
aaacaaatgcttgtgcgaaagtccagaatgtta

SEQ ID NO: 9886 - DNA, 33 bp, Homo sapiens
gagcagctggtgtatggactagagaataaaagg

SEQ ID NO: 9887 - DNA, 33 bp, Homo sapiens
actagtccatgctaagtataagatgcctgggaa

SEQ ID NO: 9888 - DNA, 51 bp, Homo sapiens
cttttgtgtgttcatgtacattagatcaaacatacaaatagattatgttga

SEQ ID NO: 9889 - DNA, 51 bp, Homo sapiens
ctctggatggaatgaatcatgtcactgagtttgccctgatctgttgccctg

SEQ ID NO: 9890 - DNA, 33 bp, Homo sapiens
ctcacatcattgttatcaagattgggtgcacgt

SEQ ID NO: 9891 - DNA, 33 bp, Homo sapiens
gtaccatggattgcctgaccttatattttgaag

SEQ ID NO: 9892 - DNA, 33 bp, Homo sapiens
tctaatttaatgtttatcaagtgctgtgaaata

SEQ ID NO: 9893 - DNA, 33 bp, Homo sapiens
caatgataacagactatgtaaccttgagctggc

SEQ ID NO: 9894 - DNA, 33 bp, Homo sapiens
ctccctgacttccaaagggaaacttgtagccct

SEQ ID NO: 9895 - DNA, 33 bp, Homo sapiens
gtgcagaatctaatactgacttgctcccagtta

SEQ ID NO: 9896 - DNA, 33 bp, Homo sapiens
attcataacctcaacctatctcaacatatcatg

SEQ ID NO: 9897 - DNA, 33 bp, Homo sapiens
cagaaacagagaaccattcacgactttccaata

SEQ ID NO: 9898 - DNA, 33 bp, Homo sapiens
atctgctcagtacatataggttaagtgctttgt

SEQ ID NO: 9899 - DNA, 33 bp, Homo sapiens
tcctttcgtgctgtgacgggaagaatggaggtg

SEQ ID NO: 9900 - DNA, 51 bp, Homo sapiens
taaaactgaaattcatcagttaaaatgaaaatactccggcttcaaagaacc

SEQ ID NO: 9901 - DNA, 33 bp, Homo sapiens
taaacacctgcaaccatagaactgagcagacct

SEQ ID NO: 9902 - DNA, 33 bp, Homo sapiens
gtaactttggtattaatgaggaccaagttgagg

SEQ ID NO: 9903 - DNA, 33 bp, Homo sapiens
gaacatgatagaacaacacctgcaaatgtgtct

SEQ ID NO: 9904 - DNA, 33 bp, Homo sapiens
gagttcaaggttacagtaaactgtgattatgcc

SEQ ID NO: 9905 - DNA, 33 bp, Homo sapiens
ctgtagtttggagacatgattatctatcggtga

SEQ ID NO: 9906 - DNA, 33 bp, Homo sapiens
ggaggtgcaggatttctaattatctgaattctg

SEQ ID NO: 9907 - DNA, 33 bp, Homo sapiens
tcaggtgggtttttcagtaggagaccaggaagc

SEQ ID NO: 9908 - DNA, 51 bp, Homo sapiens
ggcctacctaatctcactaaaattcgagaatattcaaaatttattttaatt

SEQ ID NO: 9909 - DNA, 33 bp, Homo sapiens
tttaaaatgcaacaaatgtgatttaatcaaact

SEQ ID NO: 9910 - DNA, 51 bp, Homo sapiens
aaggtttgttttctgtcttgttatataccctttcatcagaatacagaagtt

SEQ ID NO: 9911 - DNA, 33 bp, Homo sapiens
aacttcatgtgttatatctgcaggatgtacata

SEQ ID NO: 9912 - DNA, 33 bp, Homo sapiens
tggacaaagtgtatgagaaagtttacggctata

SEQ ID NO: 9913 - DNA, 33 bp, Homo sapiens
tctccctgcttaaagccctttactgatttgccc

SEQ ID NO: 9914 - DNA, 33 bp, Homo sapiens
acaaaaacataaaccccgatagactacagatct

SEQ ID NO: 9915 - DNA, 33 bp, Homo sapiens
tctatacctttcagaagagactacaacaaattg

SEQ ID NO: 9916 - DNA, 33 bp, Homo sapiens
tcctgagatgtggcaagtgtcaaagctctgtct

SEQ ID NO: 9917 - DNA, 51 bp, Homo sapiens
tacatataaatattgaataataaatgatagctgctgtttgatcaaaatgat

SEQ ID NO: 9918 - DNA, 51 bp, Homo sapiens
ttaaggaataaaaagaattggcaaatcttggtgatacatgggtacttttat

SEQ ID NO: 9919 - DNA, 51 bp, Homo sapiens
ttctttttattccttaaagaatatctgacaatttgctggtttgtataagtt

SEQ ID NO: 9920 - DNA, 33 bp, Homo sapiens
ataagctctagaaaagtagtgtttatcggtatg

SEQ ID NO: 9921 - DNA, 33 bp, Homo sapiens
aacgaaaacaaatttaggatgaaagaatctgtg

SEQ ID NO: 9922 - DNA, 33 bp, Homo sapiens
cattactcacaagtacgattttagaatctatag

SEQ ID NO: 9923 - DNA, 33 bp, Homo sapiens
ttctcacagttaccgatgaacagctctttttca

SEQ ID NO: 9924 - DNA, 33 bp, Homo sapiens
atgtcagtcaaaattgtcaaaattatacaagct

SEQ ID NO: 9925 - DNA, 33 bp, Homo sapiens
ctgtctagctctctcctaattcaactgcagttt

SEQ ID NO: 9926 - DNA, 33 bp, Homo sapiens
ggttgcctcttttggctcaaatatactctcagg

SEQ ID NO: 9927 - DNA, 33 bp, Homo sapiens
acggcacctggcggaggcagattatactatcaa

SEQ ID NO: 9928 - DNA, 33 bp, Homo sapiens
tggttcaatttaacaatgtttcaaatttacaac

SEQ ID NO: 9929 - DNA, 33 bp, Homo sapiens
ctttttttctgaatacgcaggctaattggaaag

SEQ ID NO: 9930 - DNA, 33 bp, Homo sapiens
taaacaaagcaacccatagaggaaacaatctca

SEQ ID NO: 9931 - DNA, 33 bp, Homo sapiens
ggagtcaagtcctagatcttcctgtaactgatt

SEQ ID NO: 9932 - DNA, 33 bp, Homo sapiens
tctggcctcattcctcgagacattttccctttc

SEQ ID NO: 9933 - DNA, 33 bp, Homo sapiens
tttcagaagagtcagacgattggattttgaata

SEQ ID NO: 9934 - DNA, 33 bp, Homo sapiens
gcactggctttgacccgcagactggagtttgct

SEQ ID NO: 9935 - DNA, 33 bp, Homo sapiens
taagacttcaagcatcgcctttagaagcactct

SEQ ID NO: 9936 - DNA, 33 bp, Homo sapiens
ttacagagtaacctgctagcaatcctatcagca

SEQ ID NO: 9937 - DNA, 51 bp, Homo sapiens
acagtagagacatgtaggaataaattaactaaaggatatgcaagacttcta

SEQ ID NO: 9938 - DNA, 33 bp, Homo sapiens
cttttttgctaaccaatgaagttactctaaata

SEQ ID NO: 9939 - DNA, 51 bp, Homo sapiens
ttccctgtagcttgtacttttccaaggacatacttttcaatgaaaaactct

SEQ ID NO: 9940 - DNA, 51 bp, Homo sapiens
atagaatatttcagtatagtgactctgaatatctaatacataaagacttga

SEQ ID NO: 9941 - DNA, 33 bp, Homo sapiens
tgttttcattgaaaagtcatcctctaagtgctg

SEQ ID NO: 9942 - DNA, 33 bp, Homo sapiens
tgtttcttgatcccctcaatggcagttacatga

SEQ ID NO: 9943 - DNA, 33 bp, Homo sapiens
gttgagtttgtctcaagacgtgggatagaggct

SEQ ID NO: 9944 - DNA, 33 bp, Homo sapiens
gttgttaatggaatgcgatttgtcataactaca

SEQ ID NO: 9945 - DNA, 33 bp, Homo sapiens
attaaagtccaataacgctattctaggctttac

SEQ ID NO: 9946 - DNA, 33 bp, Homo sapiens
agaaattatttgctccgaagttgtaaaagtaca

SEQ ID NO: 9947 - DNA, 33 bp, Homo sapiens
aactcccaaatcctaatggcttaacacaataaa

SEQ ID NO: 9948 - DNA, 33 bp, Homo sapiens
attgtttacatagacatagaagaagtagatgat

SEQ ID NO: 9949 - DNA, 51 bp, Homo sapiens
tgctaagttgggggagtcattttagttgtcttgcttaattaggacttagga

SEQ ID NO: 9950 - DNA, 33 bp, Homo sapiens
gcttgataggaattgagattgaggtctgcagct

SEQ ID NO: 9951 - DNA, 33 bp, Homo sapiens
ctgtttataatctcccgccagactcatagaagt

SEQ ID NO: 9952 - DNA, 33 bp, Homo sapiens
gttatatattcaaacaggactttatcattcatg

SEQ ID NO: 9953 - DNA, 33 bp, Homo sapiens
gaaggtgaagtataaagtgcaagctacaacaaa

SEQ ID NO: 9954 - DNA, 33 bp, Homo sapiens
aactatttttaacttatgcaggtccaattaaga

SEQ ID NO: 9955 - DNA, 33 bp, Homo sapiens
tgaaccaaaccaacccgaagttcaacaacttta

SEQ ID NO: 9956 - DNA, 51 bp, Homo sapiens
gattcccgtaggttttgtgtagtgatggcatttatgcttaaaatgtaagtg

SEQ ID NO: 9957 - DNA, 33 bp, Homo sapiens
ggacaaagataataaacaggagtgactgtcagt

SEQ ID NO: 9958 - DNA, 33 bp, Homo sapiens
gcattttctgagaacttacttaattatgggtca

SEQ ID NO: 9959 - DNA, 33 bp, Homo sapiens
tttttatggttggaaagactgcggcttgtttca

SEQ ID NO: 9960 - DNA, 33 bp, Homo sapiens
gcttaggaaaaaactagaagtcatacaagatat

SEQ ID NO: 9961 - DNA, 33 bp, Homo sapiens
gggatgggttgaataagggttgttgtgaaaggg

SEQ ID NO: 9962 - DNA, 33 bp, Homo sapiens
tttggtgcattccagatctgtctttcattcatg

SEQ ID NO: 9963 - DNA, 33 bp, Homo sapiens
tacaaacatcctttgaggcatggtttataatta

SEQ ID NO: 9964 - DNA, 33 bp, Homo sapiens
gttatgccacctactcggaattccacaacactg

SEQ ID NO: 9965 - DNA, 33 bp, Homo sapiens
ctctcttcctgtgtcccactcctccagcaaagg

SEQ ID NO: 9966 - DNA, 33 bp, Homo sapiens
aaaagtagttgtagtctatctctcagggtattg

SEQ ID NO: 9967 - DNA, 33 bp, Homo sapiens
taaaaagagaatgaaatgcagtcatttgcaatg

SEQ ID NO: 9968 - DNA, 33 bp, Homo sapiens
aaccaaattatgcatcgcccaattcaggaagct

SEQ ID NO: 9969 - DNA, 33 bp, Homo sapiens
atatactaaccccaaatcaccaaccaaattatt

SEQ ID NO: 9970 - DNA, 33 bp, Homo sapiens
aaagccattgagaaactcttcacagcataggca

SEQ ID NO: 9971 - DNA, 33 bp, Homo sapiens
gaagcagtcagtcctagagagagtgagctgagg

SEQ ID NO: 9972 - DNA, 33 bp, Homo sapiens
ttaacagcaggtaaccgccaatgctcctgcctt

SEQ ID NO: 9973 - DNA, 33 bp, Homo sapiens
tgtaatccaacagaaatctctttagtgtgaccc

SEQ ID NO: 9974 - DNA, 33 bp, Homo sapiens
agacataatggaggtatggcattaggtaaatac

SEQ ID NO: 9975 - DNA, 51 bp, Homo sapiens
gtactcttgtaaatacttaacactcgatgcagaaagaattgttacaaagga

SEQ ID NO: 9976 - DNA, 33 bp, Homo sapiens
ttatttgaaccagttggaaacaagggatctaga

SEQ ID NO: 9977 - DNA, 33 bp, Homo sapiens
cagcatcttgtttaggtcagcaggttgtacttt

SEQ ID NO: 9978 - DNA, 33 bp, Homo sapiens
ttgctttggctactgagaagtgcaagtatgggt

SEQ ID NO: 9979 - DNA, 33 bp, Homo sapiens
tgcagaataacaaaaatgtacgcaaataaatat

SEQ ID NO: 9980 - DNA, 51 bp, Homo sapiens
acatggtcagattgccttaaccacacagcctcatatgtagcttattcgatc

SEQ ID NO: 9981 - DNA, 33 bp, Homo sapiens
gaaactttaacctttccaaaaagcaatgatgaa

SEQ ID NO: 9982 - DNA, 33 bp, Homo sapiens
acctcccaggcagaacgcaggtcatccacacat

SEQ ID NO: 9983 - DNA, 33 bp, Homo sapiens
tctgtgtattgacaactattttgagtaactatg

SEQ ID NO: 9984 - DNA, 33 bp, Homo sapiens
ctctccacttttcaaataattagagtgatcatt

SEQ ID NO: 9985 - DNA, 33 bp, Homo sapiens
cagaaaaatcataatagcaatcaattctgggcc

SEQ ID NO: 9986 - DNA, 51 bp, Homo sapiens
ggcccagagttaccaaggttatagaggtagtctgaaggttatactagtgtt

SEQ ID NO: 9987 - DNA, 33 bp, Homo sapiens
taaaatgtattaaagacacagcccttttaacat

SEQ ID NO: 9988 - DNA, 33 bp, Homo sapiens
attattcaggatgtagtatatgcattagactgg

SEQ ID NO: 9989 - DNA, 33 bp, Homo sapiens
agggtccactcaccccgaaacctagttgcaaaa

SEQ ID NO: 9990 - DNA, 33 bp, Homo sapiens
tttgtcgatgctatgattaaaagtaagactatg

SEQ ID NO: 9991 - DNA, 33 bp, Homo sapiens
ttattaagcacttgccgcacagtagaagtcgtt

SEQ ID NO: 9992 - DNA, 33 bp, Homo sapiens
acaaaaccacatggatgaaaacagatagtttcc

SEQ ID NO: 9993 - DNA, 33 bp, Homo sapiens
tggaataatggaaaaaggtacaggactcatgaa

SEQ ID NO: 9994 - DNA, 33 bp, Homo sapiens
taatcagctatagaaatgtaacaggtgctctca

SEQ ID NO: 9995 - DNA, 33 bp, Homo sapiens
agaattggatgaaacacgctgaccaaacacgta

SEQ ID NO: 9996 - DNA, 33 bp, Homo sapiens
tatttcaattcccagatgattttccagctaaaa

SEQ ID NO: 9997 - DNA, 33 bp, Homo sapiens
atgtcaaagggaaagtgaaatctgtagaggagt

SEQ ID NO: 9998 - DNA, 33 bp, Homo sapiens
tggaagcttgggagggtcaatttagttaaacaa

SEQ ID NO: 9999 - DNA, 33 bp, Homo sapiens
atagtaagcttgacacggtatcagtatctaaga

SEQ ID NO: 10000 - DNA, 33 bp, Homo sapiens
atcactcgaaataagagagttcacattatttgt

SEQ ID NO: 10001 - DNA, 33 bp, Homo sapiens
ttttgacttctacttatctcaacacaattctac

SEQ ID NO: 10002 - DNA, 33 bp, Homo sapiens
gtatagtgaaaagaacgccgaatttgaaaccag

SEQ ID NO: 10003 - DNA, 33 bp, Homo sapiens
aacaggtggataaatataggtcagtgagaaaaa

SEQ ID NO: 10004 - DNA, 33 bp, Homo sapiens
caaagtgtcctttcgctctgtcagaccctagag

SEQ ID NO: 10005 - DNA, 33 bp, Homo sapiens
gaaccttaatggccaatgtaatgatagtaagag

SEQ ID NO: 10006 - DNA, 33 bp, Homo sapiens
gcaagtatttgctgaatgagtaaatggataatt

SEQ ID NO: 10007 - DNA, 33 bp, Homo sapiens
ggcagcccgaacttgatgtgaataatgaaggaa

SEQ ID NO: 10008 - DNA, 33 bp, Homo sapiens
ttttaaatttcccccctacatacataccagcca

SEQ ID NO: 10009 - DNA, 33 bp, Homo sapiens
catctccagaactgaaggtaatgaaagaatcca

SEQ ID NO: 10010 - DNA, 33 bp, Homo sapiens
taaatatctattctccgctataactaagctact

SEQ ID NO: 10011 - DNA, 51 bp, Homo sapiens
ttattgctccctgcgagctccctacgaactccccggtgcttgtccagtttc

SEQ ID NO: 10012 - DNA, 51 bp, Homo sapiens
atgttttttcagatgatcaaacaccgacctagatgcagcaaaccaaatcat

SEQ ID NO: 10013 - DNA, 33 bp, Homo sapiens
acaatcctgagttcaatggtttcctgagatgtt

SEQ ID NO: 10014 - DNA, 33 bp, Homo sapiens
gctaaattgtacagatgaggataatacttgaaa

SEQ ID NO: 10015 - DNA, 33 bp, Homo sapiens
aatgaaatgattcacatggagctggtagcatag

SEQ ID NO: 10016 - DNA, 33 bp, Homo sapiens
tagaattccctaaaactggaacgataattttgg

SEQ ID NO: 10017 - DNA, 33 bp, Homo sapiens
cacctacatagaatacgaggttaaagaaatctg

SEQ ID NO: 10018 - DNA, 33 bp, Homo sapiens
ttatcaactgcactaatgatatttcaagttctc

SEQ ID NO: 10019 - DNA, 33 bp, Homo sapiens
gctttccctttctaattatctatgcagtataat

SEQ ID NO: 10020 - DNA, 33 bp, Homo sapiens
taaggtatctatggactgaaagagagaaatgca

SEQ ID NO: 10021 - DNA, 33 bp, Homo sapiens
gtattttgctctgctctatattcaaacctgaat

SEQ ID NO: 10022 - DNA, 33 bp, Homo sapiens
tttctaaaaggctcaatcttaaacacaaaacag

SEQ ID NO: 10023 - DNA, 51 bp, Homo sapiens
tgactttgaagattaacaaagctaagtacgtaaatgatatcaacatgagaa

SEQ ID NO: 10024 - DNA, 51 bp, Homo sapiens
aagtgtgatgatttgtcttttgtaagcctatgaactagaatgactcacata

SEQ ID NO: 10025 - DNA, 51 bp, Homo sapiens
taaacaaatatatataagaagccaatgaaaaacctgtcttaatacttcaaa

SEQ ID NO: 10026 - DNA, 33 bp, Homo sapiens
gtccgataaagctaaatcctttggccaggaaag

SEQ ID NO: 10027 - DNA, 33 bp, Homo sapiens
agagactgcttccagatacctaacctgtgaagc

SEQ ID NO: 10028 - DNA, 51 bp, Homo sapiens
aatacaagcagttattttaatgtcatgatccactgattctcttttattaga

SEQ ID NO: 10029 - DNA, 33 bp, Homo sapiens
gtgtctctcgctgatatatagtcaaacaaatga

SEQ ID NO: 10030 - DNA, 33 bp, Homo sapiens
tcacaattatatggtgtagtctctgtaagaaag

SEQ ID NO: 10031 - DNA, 33 bp, Homo sapiens
aggaaaatgttccaggtagaagaagtagttcat

SEQ ID NO: 10032 - DNA, 51 bp, Homo sapiens
gacatgtgtactgcagggcttccaatttaatattcaggtttctcagcagtc

SEQ ID NO: 10033 - DNA, 33 bp, Homo sapiens
actgactcaccttcatgaggttctgctcctgtg

SEQ ID NO: 10034 - DNA, 33 bp, Homo sapiens
catcccagttctccaagatttgggcattctgta

SEQ ID NO: 10035 - DNA, 51 bp, Homo sapiens
cttcttggagtttctgagacatatagagaaaggtaggtgggagagaaagtg

SEQ ID NO: 10036 - DNA, 33 bp, Homo sapiens
acgtggaagctgggagtccaatcaggcgccatt

SEQ ID NO: 10037 - DNA, 51 bp, Homo sapiens
ttatcattttagactaggaaagatataacacagaagactctaatactcaga

SEQ ID NO: 10038 - DNA, 33 bp, Homo sapiens
tgacataaaatcactatgtttctggcaaaaaag

SEQ ID NO: 10039 - DNA, 33 bp, Homo sapiens
tgttttcctcctcagactaatccatgcagtacc

SEQ ID NO: 10040 - DNA, 33 bp, Homo sapiens
aggaggcacttccatggattcaaacaagagctg

SEQ ID NO: 10041 - DNA, 51 bp, Homo sapiens
taattagcattgcttactgtgcattgaaaaacaaggctcagaagaaatgat

SEQ ID NO: 10042 - DNA, 51 bp, Homo sapiens
attgaaaaacaaggctcagaagaaatgatatacctctcataacctttgtgt

SEQ ID NO: 10043 - DNA, 33 bp, Homo sapiens
caaaaatacaggttgagtatctgttggccaaaa

SEQ ID NO: 10044 - DNA, 33 bp, Homo sapiens
cttagttcatattcaggcctcaaaacatacttg

SEQ ID NO: 10045 - DNA, 51 bp, Homo sapiens
cattaactgtgacttaactctgagtttgaacgaaaagtacaagtatttgac

SEQ ID NO: 10046 - DNA, 33 bp, Homo sapiens
taatgaaaattttggggacagatgatcataatt

SEQ ID NO: 10047 - DNA, 33 bp, Homo sapiens
ttaaaattctttgaactgtactcaaaattatga

SEQ ID NO: 10048 - DNA, 33 bp, Homo sapiens
ttactccgtgagtgtggaagtaagatttgatct

SEQ ID NO: 10049 - DNA, 33 bp, Homo sapiens
ttaggttgtacagaagtcaagatgtcaggcggg

SEQ ID NO: 10050 - DNA, 33 bp, Homo sapiens
tacgtttaaaaatgcctaataagagtgtttcca

SEQ ID NO: 10051 - DNA, 33 bp, Homo sapiens
acaaccgccctatttgtaaacagcttcaaaaga

SEQ ID NO: 10052 - DNA, 51 bp, Homo sapiens
atcgtggattgtttccatattccactaggatacttacattggttctcaaca

SEQ ID NO: 10053 - DNA, 33 bp, Homo sapiens
atctaaactaatccacgctttgaaggatctaga

SEQ ID NO: 10054 - DNA, 33 bp, Homo sapiens
cagtgcttgtctactccatgatttgatttcgga

SEQ ID NO: 10055 - DNA, 33 bp, Homo sapiens
taaaggatggtcaggagctcaaccaaaaccaaa

SEQ ID NO: 10056 - DNA, 51 bp, Homo sapiens
tgtgagaatcaaatgagttagttaatataaagcatttaccaccaaatctgg

SEQ ID NO: 10057 - DNA, 51 bp, Homo sapiens
cactaaatgggcattttcatgccaactaaaaatgtaatataatcacacaat

SEQ ID NO: 10058 - DNA, 51 bp, Homo sapiens
agctggagagctgacttagctgccaggatgtcaatgaagccgaaaactcct

SEQ ID NO: 10059 - DNA, 51 bp, Homo sapiens
taatatttgtgtgtactcaaagacatagttcttactcaacatcccaagtaa

SEQ ID NO: 10060 - DNA, 33 bp, Homo sapiens
atttagaagtgactgcgaagtgtcatttcaacc

SEQ ID NO: 10061 - DNA, 33 bp, Homo sapiens
ttgtgtaaagctctaatctacagtggcacaact

SEQ ID NO: 10062 - DNA, 51 bp, Homo sapiens
caagctaaacctctactaattacaatgcctccaaacttatttcatttggca

SEQ ID NO: 10063 - DNA, 33 bp, Homo sapiens
atacccactctcaacatcccagttggtctcttc

SEQ ID NO: 10064 - DNA, 33 bp, Homo sapiens
ttactctccagtgatcgagattagcaatgtgga

SEQ ID NO: 10065 - DNA, 33 bp, Homo sapiens
ttacagaccagggtcatgggtcaaagattttgc

SEQ ID NO: 10066 - DNA, 33 bp, Homo sapiens
aaggaatgtcctagagcaaatcatacacacatg

SEQ ID NO: 10067 - DNA, 51 bp, Homo sapiens
ccttctagaacattcctatctaccagacgtaatgtagccccagtttaattc

SEQ ID NO: 10068 - DNA, 33 bp, Homo sapiens
gagctgagacccaaaataggagtcaggcttagt

SEQ ID NO: 10069 - DNA, 33 bp, Homo sapiens
cctctctccattaatatctggcttgactacaaa

SEQ ID NO: 10070 - DNA, 33 bp, Homo sapiens
gaggcaattattgtaatgtttctccaaaactat

SEQ ID NO: 10071 - DNA, 33 bp, Homo sapiens
gataacaaaaataatggaagtacacaagggata

SEQ ID NO: 10072 - DNA, 33 bp, Homo sapiens
catctttcagctgaagtatttacgtgctcctaa

SEQ ID NO: 10073 - DNA, 33 bp, Homo sapiens
ggtgaagcctagaagagtcactgaattgctact

SEQ ID NO: 10074 - DNA, 33 bp, Homo sapiens
gacttaactccttcacgcttcaaccttcttatc

SEQ ID NO: 10075 - DNA, 33 bp, Homo sapiens
caagctctccaagtaattgtgatgtgcagatat

SEQ ID NO: 10076 - DNA, 33 bp, Homo sapiens
ggaaactctaggttgcgatattttcttttccag

SEQ ID NO: 10077 - DNA, 33 bp, Homo sapiens
tttctattgtaaactaggggagagtcggagcta

SEQ ID NO: 10078 - DNA, 33 bp, Homo sapiens
tgagatttcatttgtagagccggatggctaagt

SEQ ID NO: 10079 - DNA, 33 bp, Homo sapiens
ggtcctgaggcataaatgggattagtgctctta

SEQ ID NO: 10080 - DNA, 33 bp, Homo sapiens
gtacagatggagaaactgaaataaaatcaatgc

SEQ ID NO: 10081 - DNA, 33 bp, Homo sapiens
gaggagaaaatacagctgaataagactccaggt

SEQ ID NO: 10082 - DNA, 33 bp, Homo sapiens
tcagacacatagccatgaactcagaagtagtgt

SEQ ID NO: 10083 - DNA, 33 bp, Homo sapiens
agtttgtatcaggtgctccattgttatccctgt

SEQ ID NO: 10084 - DNA, 33 bp, Homo sapiens
tgctgtaagatcagaatggaaaaagacgagccc

SEQ ID NO: 10085 - DNA, 33 bp, Homo sapiens
aagagaatgataattataggtgtcacagggctc

SEQ ID NO: 10086 - DNA, 33 bp, Homo sapiens
gtcgtcaggtcttggatagattatttaagttct

SEQ ID NO: 10087 - DNA, 33 bp, Homo sapiens
agagttgttaaacaaatgattgcttcctacata

SEQ ID NO: 10088 - DNA, 33 bp, Homo sapiens
tctctgcgaagacagactatccctcggctgtgt

SEQ ID NO: 10089 - DNA, 33 bp, Homo sapiens
agggaagttgttgagggaagacaaagaaacgtg

SEQ ID NO: 10090 - DNA, 33 bp, Homo sapiens
tcctatttgacgtggtgaaagaagttacgctag

SEQ ID NO: 10091 - DNA, 33 bp, Homo sapiens
aaagtgcctgctttaattggatcagctctgttt

SEQ ID NO: 10092 - DNA, 33 bp, Homo sapiens
agttgtgaaaggttcaggtgggtgctgaccctt

SEQ ID NO: 10093 - DNA, 51 bp, Homo sapiens
tgtatttgaagtagcagagagtggtgtgtgaatcatttttgattactcagt

SEQ ID NO: 10094 - DNA, 33 bp, Homo sapiens
ttccagctgaccgtgatggacactgccgggcag

SEQ ID NO: 10095 - DNA, 33 bp, Homo sapiens
ccaccagcctggttccgagctaggattaaagag

SEQ ID NO: 10096 - DNA, 33 bp, Homo sapiens
acccaaagaatacaaattgttctactataaaga

SEQ ID NO: 10097 - DNA, 33 bp, Homo sapiens
cattgtcctcttcagattctcctcaggtacttg

SEQ ID NO: 10098 - DNA, 33 bp, Homo sapiens
tacccatcaaaatggctatccttaaaatttcaa

SEQ ID NO: 10099 - DNA, 33 bp, Homo sapiens
gttttagcattcagaagaaaatagccagtaagt

SEQ ID NO: 10100 - DNA, 33 bp, Homo sapiens
acacaagatcacatcagctcactgttctaagta

SEQ ID NO: 10101 - DNA, 33 bp, Homo sapiens
aagcctgagctctttacagtgaaatatccatca

SEQ ID NO: 10102 - DNA, 33 bp, Homo sapiens
attagctgagaggacatggggaagccactgctg

SEQ ID NO: 10103 - DNA, 33 bp, Homo sapiens
ttctgtacaaagccctgagatcatgtccacctt

SEQ ID NO: 10104 - DNA, 33 bp, Homo sapiens
tcttgtatcttagaaataatcagtcaacaatgg

SEQ ID NO: 10105 - DNA, 33 bp, Homo sapiens
actgaaatgtaatatacccaaaatgaaacacaa

SEQ ID NO: 10106 - DNA, 33 bp, Homo sapiens
ggtccagttgctcccatatcttagagcctgtca

SEQ ID NO: 10107 - DNA, 33 bp, Homo sapiens
taaacgttagcgaactgacagtaagaaaagaga

SEQ ID NO: 10108 - DNA, 51 bp, Homo sapiens
attagctaattcccatagtcacatatgaaagtaggaacacggggatataca

SEQ ID NO: 10109 - DNA, 33 bp, Homo sapiens
aagttacactgtagaattgttcgccagtcttct

SEQ ID NO: 10110 - DNA, 33 bp, Homo sapiens
agcatggaacggagcatggactctgacccatat

SEQ ID NO: 10111 - DNA, 33 bp, Homo sapiens
tggaggtacagaaagggatgctggaagagtgtt

SEQ ID NO: 10112 - DNA, 51 bp, Homo sapiens
gacaaaaatttgtagggaagcaaatcccttcaaggttgagtctttctggtc

SEQ ID NO: 10113 - DNA, 33 bp, Homo sapiens
gggaacgttaatgttatgacaaatctcatggga

SEQ ID NO: 10114 - DNA, 33 bp, Homo sapiens
acctgtggaaaaatgatcacgcactgaacccca

SEQ ID NO: 10115 - DNA, 33 bp, Homo sapiens
gattataatctctctctcctttgtggacttccc

SEQ ID NO: 10116 - DNA, 33 bp, Homo sapiens
atctctgccagcccaatatgtggccagaggatc

SEQ ID NO: 10117 - DNA, 33 bp, Homo sapiens
agataataagtaaacatgatttcaagtgaacag

SEQ ID NO: 10118 - DNA, 33 bp, Homo sapiens
acttggaaaaatacaaggtagagagaccaggtg

SEQ ID NO: 10119 - DNA, 33 bp, Homo sapiens
aattaagttattcacagacacatgggtgctcag

SEQ ID NO: 10120 - DNA, 33 bp, Homo sapiens
tttttctcatccaagaggatatgtggagtaagc

SEQ ID NO: 10121 - DNA, 33 bp, Homo sapiens
ttccttttgcctccactagcttcaacactaaga

SEQ ID NO: 10122 - DNA, 33 bp, Homo sapiens
ctttaagaatagtgaggagaactgaattggcaa

SEQ ID NO: 10123 - DNA, 33 bp, Homo sapiens
ggagctgaaaaagcaggccatgaatacggaatc

SEQ ID NO: 10124 - DNA, 33 bp, Homo sapiens
gagggaggtggaagaagagagccatttgttgag

SEQ ID NO: 10125 - DNA, 33 bp, Homo sapiens
acatcaagaccctgactgataaaatgcccctta

SEQ ID NO: 10126 - DNA, 33 bp, Homo sapiens
gaagactcagccaaaagactatcagaactgatt

SEQ ID NO: 10127 - DNA, 51 bp, Homo sapiens
ctttttcagaattcttgaaggaaaatgatacgcaacataattaaattttga

SEQ ID NO: 10128 - DNA, 33 bp, Homo sapiens
actttaagatgatatggaaatgatacacattca

SEQ ID NO: 10129 - DNA, 33 bp, Homo sapiens
tggtattttcaatgtatgatggatttatctaaa

SEQ ID NO: 10130 - DNA, 51 bp, Homo sapiens
atccctttttacagtcaacttcacatgaatagacaaattcaaaagtatgat

SEQ ID NO: 10131 - DNA, 51 bp, Homo sapiens
atgttaggatggccagatataaccatgtgagaacatagcctggtaagtggt

SEQ ID NO: 10132 - DNA, 33 bp, Homo sapiens
ttgcgtttggtgattagaacagagaattccttg

SEQ ID NO: 10133 - DNA, 33 bp, Homo sapiens
ttcctcatggtcttaatatgtcatttcatctgt

SEQ ID NO: 10134 - DNA, 33 bp, Homo sapiens
tgttcataataggtccgcagtaagtaatatttg

SEQ ID NO: 10135 - DNA, 51 bp, Homo sapiens
ttgtggaaaaagatagatcaggtcctacttgaagacaaagttgctctcaac

SEQ ID NO: 10136 - DNA, 33 bp, Homo sapiens
ttcctaatctgtgaaatgagatactagtattac

SEQ ID NO: 10137 - DNA, 33 bp, Homo sapiens
aactcctttagtaccattgaaacttaaggcaaa

SEQ ID NO: 10138 - DNA, 33 bp, Homo sapiens
taaaatgccttctctatcttgtctgctgttgga

SEQ ID NO: 10139 - DNA, 33 bp, Homo sapiens
ctctggtcactaagcatatccaggtgaatgaaa

SEQ ID NO: 10140 - DNA, 33 bp, Homo sapiens
cttaacttcacaagccgaacagtatagagtaat

SEQ ID NO: 10141 - DNA, 33 bp, Homo sapiens
tacaaattgcataaccgcctgaaatatcctaag

SEQ ID NO: 10142 - DNA, 33 bp, Homo sapiens
actgaattgctaaggacaatagcaggcgtcacc

SEQ ID NO: 10143 - DNA, 33 bp, Homo sapiens
aagtctacagtcagaatgtttccatggtgagac

SEQ ID NO: 10144 - DNA, 33 bp, Homo sapiens
acatgggttttccttagagaagcagcaggtgga

SEQ ID NO: 10145 - DNA, 33 bp, Homo sapiens
aaacaatatgtcaaagtagaggaaataggtatt

SEQ ID NO: 10146 - DNA, 33 bp, Homo sapiens
gagaatagaaagaatcgctactacatttgtgct

SEQ ID NO: 10147 - DNA, 33 bp, Homo sapiens
catttgcttgataaactaacaaatgtttgcatg

SEQ ID NO: 10148 - DNA, 51 bp, Homo sapiens
tttgaactagtccaatctctataacgctttcttcatatcatttgacttcat

SEQ ID NO: 10149 - DNA, 51 bp, Homo sapiens
ttcatatcatttgacttcatgatcagattagagaggtgactgggagaacga

SEQ ID NO: 10150 - DNA, 33 bp, Homo sapiens
atgaactgataataaatggcaagaatactaaat

SEQ ID NO: 10151 - DNA, 33 bp, Homo sapiens
tgctagccagaaggaatagctgtcacaaaaacc

SEQ ID NO: 10152 - DNA, 33 bp, Homo sapiens
cttcccagactaattaggtgagaatctggggga

SEQ ID NO: 10153 - DNA, 33 bp, Homo sapiens
aggagagagaggttgcgatcagtgaaccaagat

SEQ ID NO: 10154 - DNA, 33 bp, Homo sapiens
ctcctggcccgctgcgtattcggagtaaagcat

SEQ ID NO: 10155 - DNA, 33 bp, Homo sapiens
acagtacgaggtaggggccaggcattcacatga

SEQ ID NO: 10156 - DNA, 33 bp, Homo sapiens
attagcaatgtacaaagtcaaggcactgatctt

SEQ ID NO: 10157 - DNA, 33 bp, Homo sapiens
agtttttcatgacttatcacagggtgacattcc

SEQ ID NO: 10158 - DNA, 51 bp, Homo sapiens
agaactcacttgtgaatcttagtaagtaaaggtcaatttaagttagagaaa

SEQ ID NO: 10159 - DNA, 33 bp, Homo sapiens
gaagtgtatctgagcatggaaaccggttgaaac

SEQ ID NO: 10160 - DNA, 33 bp, Homo sapiens
tgcctactacctgtcatcagctcactttatact

SEQ ID NO: 10161 - DNA, 51 bp, Homo sapiens
aagtgtgtacactaaaaagtggatcgtaactggatgtcgtgagtatgtcat

SEQ ID NO: 10162 - DNA, 33 bp, Homo sapiens
gctgctggagatcgaatgaaatgtttggcaaga

SEQ ID NO: 10163 - DNA, 33 bp, Homo sapiens
tttgcattccacaagcgcatatcggtaaggtct

SEQ ID NO: 10164 - DNA, 33 bp, Homo sapiens
tgatggctttaccaactggagcagaataagaag

SEQ ID NO: 10165 - DNA, 33 bp, Homo sapiens
aacaaatggtgtcttagcaactggatgtttgca

SEQ ID NO: 10166 - DNA, 33 bp, Homo sapiens
gtgaatccgctgctccgagtcaccttttcaacc

SEQ ID NO: 10167 - DNA, 33 bp, Homo sapiens
cacacacacaaaagcatggtaaacagtaaataa

SEQ ID NO: 10168 - DNA, 51 bp, Homo sapiens
cttgaaaatgtggaatatcttgaaatcaggagaagtagaggagtatacaag

SEQ ID NO: 10169 - DNA, 51 bp, Homo sapiens
aatattttaagttaaaacgttcggaggctatgtcagagtcagccaaaatta

SEQ ID NO: 10170 - DNA, 33 bp, Homo sapiens
aataaagaaagctaaagatgaaaaatgctgtgc

SEQ ID NO: 10171 - DNA, 33 bp, Homo sapiens
tgcctagctgtaaccatctcgttttggggaatg

SEQ ID NO: 10172 - DNA, 33 bp, Homo sapiens
tcgttctctgtgccccgacagtgctatatgtag

SEQ ID NO: 10173 - DNA, 33 bp, Homo sapiens
ccccagtatctttgcctaagacttgagtaataa

SEQ ID NO: 10174 - DNA, 33 bp, Homo sapiens
tgctagtactttatgagatagcctgtgtccctg

SEQ ID NO: 10175 - DNA, 33 bp, Homo sapiens
ccactgctcagctggagaggacaaactctaggc

SEQ ID NO: 10176 - DNA, 33 bp, Homo sapiens
tgtgggtcccagggtcgcaaataaatcctctgc

SEQ ID NO: 10177 - DNA, 33 bp, Homo sapiens
ccttattcatgtccacgcttttctgccaatagt

SEQ ID NO: 10178 - DNA, 33 bp, Homo sapiens
cacgtccacagccagagaaatcagcaaagatcc

SEQ ID NO: 10179 - DNA, 33 bp, Homo sapiens
ttgagccaaaaaaccagagacttcagaaacctc

SEQ ID NO: 10180 - DNA, 33 bp, Homo sapiens
acattttcctgagcccgatagacaagcagattt

SEQ ID NO: 10181 - DNA, 51 bp, Homo sapiens
caatcagcccagagcctggctcccagtaacacccacaatacctgttgcatt

SEQ ID NO: 10182 - DNA, 51 bp, Homo sapiens
cagtcagagaaagggggaccaaagctactccgtgtactctcacattcgtca

SEQ ID NO: 10183 - DNA, 33 bp, Homo sapiens
actgcgctgaccaccagcttcacaaagatggtc

SEQ ID NO: 10184 - DNA, 33 bp, Homo sapiens
agggggttccgaagccgatgttcccaaacctga

SEQ ID NO: 10185 - DNA, 33 bp, Homo sapiens
gtttgctccccacctcgaggcttctccatccta

SEQ ID NO: 10186 - DNA, 33 bp, Homo sapiens
gtcttaccggttattatcacaatgttaccacct

SEQ ID NO: 10187 - DNA, 33 bp, Homo sapiens
aacaacttagcaaacaccatgcatttatgagag

SEQ ID NO: 10188 - DNA, 33 bp, Homo sapiens
acactctgcttggatcgaaagtcttagcatttt

SEQ ID NO: 10189 - DNA, 33 bp, Homo sapiens
gcagtcactggaatgagcatgcccacagctcag

SEQ ID NO: 10190 - DNA, 33 bp, Homo sapiens
aacaagtgatttgcactatcagtcaaggtgtgg

SEQ ID NO: 10191 - DNA, 33 bp, Homo sapiens
gatgcgggaacttcaggaaaaaagacactcggc

SEQ ID NO: 10192 - DNA, 33 bp, Homo sapiens
aggaacagagaggcagtaaacaatggtctctaa

SEQ ID NO: 10193 - DNA, 33 bp, Homo sapiens
agactttgcagagatatgcggatgggtcagata

SEQ ID NO: 10194 - DNA, 33 bp, Homo sapiens
ccaaagtgtaactagggaatcaaatgggaatct

SEQ ID NO: 10195 - DNA, 33 bp, Homo sapiens
gttactactttgaagcgagaggatgtcaagtcc

SEQ ID NO: 10196 - DNA, 33 bp, Homo sapiens
agtgaattctaataactgtctggtcgcctttgg

SEQ ID NO: 10197 - DNA, 33 bp, Homo sapiens
caatgttctgtgctacgggttcaaaggaagaaa

SEQ ID NO: 10198 - DNA, 33 bp, Homo sapiens
accttattgtaaccccgggatgctagtaaccct

SEQ ID NO: 10199 - DNA, 33 bp, Homo sapiens
caggtctctcttctatgaagccaggacaatgat

SEQ ID NO: 10200 - DNA, 33 bp, Homo sapiens
ccctgccaagcttcacgctgttttgagaaagac

SEQ ID NO: 10201 - DNA, 33 bp, Homo sapiens
ctgtcatcacattatctctgcaattttccctgc

SEQ ID NO: 10202 - DNA, 33 bp, Homo sapiens
ggataatgttcccctctgagagtctccagggtg

SEQ ID NO: 10203 - DNA, 33 bp, Homo sapiens
tctgccttccagccgatgcaggagctgttagtg

SEQ ID NO: 10204 - DNA, 33 bp, Homo sapiens
gtcaacaatcgggtacgctgtgtctaatttaag

SEQ ID NO: 10205 - DNA, 33 bp, Homo sapiens
tttttttatttgtaagtagatggacatgagaaa

SEQ ID NO: 10206 - DNA, 33 bp, Homo sapiens
gactaactttaagtgatgtaagcaaaggtatca

SEQ ID NO: 10207 - DNA, 33 bp, Homo sapiens
ttgtgcatcactaagatcgtttttgactttaaa

SEQ ID NO: 10208 - DNA, 33 bp, Homo sapiens
aaaatgttggaagaaccgattcgttgcctattt

SEQ ID NO: 10209 - DNA, 33 bp, Homo sapiens
attacaaatctgcaacgagtgtatgaaaatgtg

SEQ ID NO: 10210 - DNA, 33 bp, Homo sapiens
tagattaaattgcaagtatctggacattgttta

SEQ ID NO: 10211 - DNA, 33 bp, Homo sapiens
tgccgccttgcagttctatcagacttctgtgct

SEQ ID NO: 10212 - DNA, 33 bp, Homo sapiens
atgtagcaattactgatgctttgagattttatt

SEQ ID NO: 10213 - DNA, 33 bp, Homo sapiens
atcatcagtctcccaattcctctactgaatcat

SEQ ID NO: 10214 - DNA, 33 bp, Homo sapiens
tgacaaaacgttaatggaacaggcctgcccatg

SEQ ID NO: 10215 - DNA, 51 bp, Homo sapiens
  1: PARK2 , rs951196,  Parkinson disease (autosomal recessive,; juvenile) 2, parkin ,q26
ngagagatggaggcagggcagttctgtagtcttcaccacagtgattctttc

SEQ ID NO: 10216 - DNA, 33 bp, Homo sapiens
ataagaagccatcaaattacattcaaggactta

SEQ ID NO: 10217 - DNA, 33 bp, Homo sapiens
ttacagatgcaacatatctttacagaggccttt

SEQ ID NO: 10218 - DNA, 33 bp, Homo sapiens
gacttcacaatggtactgctgacctaagcttca

SEQ ID NO: 10219 - DNA, 33 bp, Homo sapiens
atagctcctacacagagaatcaaattttagggc

SEQ ID NO: 10220 - DNA, 33 bp, Homo sapiens
aaaaccaaaggcaaagtacggcctcctgagacc

SEQ ID NO: 10221 - DNA, 33 bp, Homo sapiens
ctgtgcatggtgaacattcattgcggaaaccca

SEQ ID NO: 10222 - DNA, 33 bp, Homo sapiens
atttcccctacggtaatggttggcttattgtgg

SEQ ID NO: 10223 - DNA, 33 bp, Homo sapiens
tgcaaagtgctatcaatgtattatggttaacat

SEQ ID NO: 10224 - DNA, 33 bp, Homo sapiens
gcaggatctctaccacgccagctgagggagggt

SEQ ID NO: 10225 - DNA, 33 bp, Homo sapiens
attgattgcctgtaatgagggcttctgaaatat

SEQ ID NO: 10226 - DNA, 33 bp, Homo sapiens
aacactcaggttctaattcaggatctgtatcct

SEQ ID NO: 10227 - DNA, 51 bp, Homo sapiens
tggctaactggagggtgagcatctatggcctctcattagaccaggaaaaga

SEQ ID NO: 10228 - DNA, 33 bp, Homo sapiens
tttattcattttataagactttgtagctttcac

SEQ ID NO: 10229 - DNA, 33 bp, Homo sapiens
ttgcactgactcagactgatttacttccagatg

SEQ ID NO: 10230 - DNA, 33 bp, Homo sapiens
cctgcatgttcaaaaatgagggaatagtgccag

SEQ ID NO: 10231 - DNA, 33 bp, Homo sapiens
tattttctgagcactatctatgaggatcagaag

SEQ ID NO: 10232 - DNA, 33 bp, Homo sapiens
acaagccaggccagctgactatagcacagaatg

SEQ ID NO: 10233 - DNA, 51 bp, Homo sapiens
agaatcactcttttccttaaaatactgcacaaaattctagtctttattatc

SEQ ID NO: 10234 - DNA, 33 bp, Homo sapiens
cacacaaaagcataacgataacaacaacaataa

SEQ ID NO: 10235 - DNA, 33 bp, Homo sapiens
ccactatttgaaatgatgattatttcaagtcct

SEQ ID NO: 10236 - DNA, 33 bp, Homo sapiens
gctctagcggcaccaagtgggctctgcgttgta

SEQ ID NO: 10237 - DNA, 33 bp, Homo sapiens
ggcagcctcatcacaattgagcgttctgtctac

SEQ ID NO: 10238 - DNA, 33 bp, Homo sapiens
gggatttgctggctcatgtaatggttaagttca

SEQ ID NO: 10239 - DNA, 33 bp, Homo sapiens
tcaaccatccttcctacctaatatccactgtcc

SEQ ID NO: 10240 - DNA, 33 bp, Homo sapiens
agggacaaaattcaacgctcaacaagaggacag

SEQ ID NO: 10241 - DNA, 33 bp, Homo sapiens
tctatgtatgtatgaatgtggaaacacacatgg

SEQ ID NO: 10242 - DNA, 33 bp, Homo sapiens
gaagtgtttggtggcagcagatgctcaagacag

SEQ ID NO: 10243 - DNA, 33 bp, Homo sapiens
tccctttccataaaccgggagatttcaccacaa

SEQ ID NO: 10244 - DNA, 51 bp, Homo sapiens
aaggaattaagcttaatgtctttaagatgagtatataaaggagcaaaaaga

SEQ ID NO: 10245 - DNA, 33 bp, Homo sapiens
tcatgaaattcttaaagattcctgtcaccccaa

SEQ ID NO: 10246 - DNA, 51 bp, Homo sapiens
ggtggcactgcggatatttttacacgggataatgtgacctgcccagcctgc

SEQ ID NO: 10247 - DNA, 33 bp, Homo sapiens
ggcactggcttccatacatacatgctacaagat

SEQ ID NO: 10248 - DNA, 33 bp, Homo sapiens
catcttacaccttctataccactttaagccagc

SEQ ID NO: 10249 - DNA, 33 bp, Homo sapiens
cagaaatgacagagaatgatctcgctacaccca

SEQ ID NO: 10250 - DNA, 33 bp, Homo sapiens
attgatcgttttaacatgaatgatgaggtggcg

SEQ ID NO: 10251 - DNA, 33 bp, Homo sapiens
gcctatctggggtcccggcaggttttgaagatg

SEQ ID NO: 10252 - DNA, 33 bp, Homo sapiens
atccaaagataaagactgatgtatgtggatgtt

SEQ ID NO: 10253 - DNA, 33 bp, Homo sapiens
ggtacattcaggctaatggaaaaatcctacata

SEQ ID NO: 10254 - DNA, 33 bp, Homo sapiens
tatgaagtgagcacaagctgtttgaaaacggga

SEQ ID NO: 10255 - DNA, 33 bp, Homo sapiens
aggattttagtcatgatacggtaaacataccaa

SEQ ID NO: 10256 - DNA, 33 bp, Homo sapiens
agcatccaggcactgacaggatgactaagtttc

SEQ ID NO: 10257 - DNA, 33 bp, Homo sapiens
ctagatactatgacaagcaaggtaaatctcttt

SEQ ID NO: 10258 - DNA, 33 bp, Homo sapiens
cactgtgtgtagacatcaacttgcacagtcttt

SEQ ID NO: 10259 - DNA, 33 bp, Homo sapiens
tccacacatttttcatgagaaaccaagactaag

SEQ ID NO: 10260 - DNA, 33 bp, Homo sapiens
aggttttattggtaacggccaacagctggaaat

SEQ ID NO: 10261 - DNA, 33 bp, Homo sapiens
actggcaaacctggaatgtcaggagacaacata

SEQ ID NO: 10262 - DNA, 33 bp, Homo sapiens
ttctcacaggagctcacatcctcttgtgaactg

SEQ ID NO: 10263 - DNA, 33 bp, Homo sapiens
ccccattcacgggccatgttccaatcggcttac

SEQ ID NO: 10264 - DNA, 33 bp, Homo sapiens
tgacttccatcgtctatgaagcccattccatgc

SEQ ID NO: 10265 - DNA, 33 bp, Homo sapiens
ctgttattcagcctactaagtccactagaatta

SEQ ID NO: 10266 - DNA, 33 bp, Homo sapiens
aatcagaatgggtttatgtaagtgattttctag

SEQ ID NO: 10267 - DNA, 33 bp, Homo sapiens
cgagctctgtcttaaatctttgctcagctttac

SEQ ID NO: 10268 - DNA, 33 bp, Homo sapiens
gtgggagcaaagagaatggaaacatggacctgg

SEQ ID NO: 10269 - DNA, 33 bp, Homo sapiens
caaggagcacctgccacagaacgagccactgag

SEQ ID NO: 10270 - DNA, 33 bp, Homo sapiens
tgacacctgaaatcgctccaacagccctaggag

SEQ ID NO: 10271 - DNA, 33 bp, Homo sapiens
aatctctcctcactaagtcacaactttgataaa

SEQ ID NO: 10272 - DNA, 33 bp, Homo sapiens
aaacccattcactagcgaaaactgactcaggct

SEQ ID NO: 10273 - DNA, 33 bp, Homo sapiens
acgcgtaagaaccacataggccgggcctgccag

SEQ ID NO: 10274 - DNA, 33 bp, Homo sapiens
acaaagtgtcaatcaatgttttcttcaataatg

SEQ ID NO: 10275 - DNA, 33 bp, Homo sapiens
gaaaccctttgtaacatcagtctcaggtccgca

SEQ ID NO: 10276 - DNA, 33 bp, Homo sapiens
tcaactgctgcagggacatgagttacaagggtc

SEQ ID NO: 10277 - DNA, 33 bp, Homo sapiens
ggggggtatctcagtcgaagattatgggctgga

SEQ ID NO: 10278 - DNA, 33 bp, Homo sapiens
tgtatgtgagggtttatgtctgtactctcttct

SEQ ID NO: 10279 - DNA, 33 bp, Homo sapiens
ttctgttgccgtgttcgagagtttggctgtcag

SEQ ID NO: 10280 - DNA, 33 bp, Homo sapiens
atgtgcagggacgtaacggagcttcaaagtgca

SEQ ID NO: 10281 - DNA, 33 bp, Homo sapiens
agaggcttaaacaagataggctgaaggccgctt

SEQ ID NO: 10282 - DNA, 33 bp, Homo sapiens
cctagttagatgtgcatgggcaaacgctaccat

SEQ ID NO: 10283 - DNA, 33 bp, Homo sapiens
gggatttggcaaatatgagcaaatgttttttga

SEQ ID NO: 10284 - DNA, 33 bp, Homo sapiens
ctttggagccagacaatgtgacctaagcgttga

SEQ ID NO: 10285 - DNA, 33 bp, Homo sapiens
ggcgagaagactgattgaagaatgtttagaaag

SEQ ID NO: 10286 - DNA, 33 bp, Homo sapiens
tgtagggataaggccggactgacaataacagag

SEQ ID NO: 10287 - DNA, 33 bp, Homo sapiens
acacctgttcaaactatcggcaagacactaatc

SEQ ID NO: 10288 - DNA, 33 bp, Homo sapiens
gagaaatctgaaactggagcatctatgttgttc

SEQ ID NO: 10289 - DNA, 33 bp, Homo sapiens
ctgggtgctgaactacggggcacaagaatagga

SEQ ID NO: 10290 - DNA, 33 bp, Homo sapiens
gacttctgaggctaaatatgtataagcagtctt

SEQ ID NO: 10291 - DNA, 33 bp, Homo sapiens
ttatggagctctacaagtcactgcagcgtggaa

SEQ ID NO: 10292 - DNA, 33 bp, Homo sapiens
cctactttattctgacgaagtatgtacaagcta

SEQ ID NO: 10293 - DNA, 33 bp, Homo sapiens
agaccagttgtttggcggaatgtccttcagtct

SEQ ID NO: 10294 - DNA, 33 bp, Homo sapiens
ggcttgaagcaccagacaagtgagtcgtccacc

SEQ ID NO: 10295 - DNA, 33 bp, Homo sapiens
cattgggaactctaaggagactgaacaggaaga

SEQ ID NO: 10296 - DNA, 33 bp, Homo sapiens
aactgcaggctcagaacgggcacaggtgcttct

SEQ ID NO: 10297 - DNA, 33 bp, Homo sapiens
aaaacaaaactatgcatgtggttcctgtaaact

SEQ ID NO: 10298 - DNA, 33 bp, Homo sapiens
cactccccaaagtggatgcacaaactcccgctc

SEQ ID NO: 10299 - DNA, 33 bp, Homo sapiens
acattcaaaatggaaatgcaaagtcccaagtgc

SEQ ID NO: 10300 - DNA, 33 bp, Homo sapiens
tgctaggagtgggcactggtcagtattatatgc

SEQ ID NO: 10301 - DNA, 33 bp, Homo sapiens
catttcatactctgacggctttgaaaatttggt

SEQ ID NO: 10302 - DNA, 33 bp, Homo sapiens
gagtgtattaccctgatggcaatgctgtgcaag

SEQ ID NO: 10303 - DNA, 33 bp, Homo sapiens
cagcctgatgggcttatgcgtgcagggggacac

SEQ ID NO: 10304 - DNA, 33 bp, Homo sapiens
aaaggtgctgatgaacgcaggtaaacgcactga

SEQ ID NO: 10305 - DNA, 33 bp, Homo sapiens
ctggggactcgagggatgatctggctgtcacca

SEQ ID NO: 10306 - DNA, 33 bp, Homo sapiens
tccggcagctaaccaaggcaatgctgttttgtt

SEQ ID NO: 10307 - DNA, 33 bp, Homo sapiens
tgtgtgctggctccatgaaaagtgcagctcatg

SEQ ID NO: 10308 - DNA, 33 bp, Homo sapiens
ttcttgctgtatgcactacctgggccgactcct

SEQ ID NO: 10309 - DNA, 33 bp, Homo sapiens
ttcaggtatgtatgatgaaggctccagctgcat

SEQ ID NO: 10310 - DNA, 33 bp, Homo sapiens
cctcatctgcagcgtggcaatcagttcatagtg

SEQ ID NO: 10311 - DNA, 33 bp, Homo sapiens
ttgcagtgagctgatattacactactgcactcc

SEQ ID NO: 10312 - DNA, 33 bp, Homo sapiens
gacaactagaagacacggatggcctggaagccc

SEQ ID NO: 10313 - DNA, 33 bp, Homo sapiens
ctatgtttcattgttggaatgtttggtttgagc

SEQ ID NO: 10314 - DNA, 33 bp, Homo sapiens
ctaaaattaacacctggacaaattagaattaat

SEQ ID NO: 10315 - DNA, 33 bp, Homo sapiens
agccatcttctttccataccatatttacgaaca

SEQ ID NO: 10316 - DNA, 33 bp, Homo sapiens
aggaaaataaccaagagaattaaaagctaaaat

SEQ ID NO: 10317 - DNA, 33 bp, Homo sapiens
tgctttggccccatcactaacttctgtgtttct

SEQ ID NO: 10318 - DNA, 33 bp, Homo sapiens
tgtggtgaaactatacgggctattggacagtag

SEQ ID NO: 10319 - DNA, 33 bp, Homo sapiens
attgacagaccttaaggaagcaagatgaaccca

SEQ ID NO: 10320 - DNA, 33 bp, Homo sapiens
tgagtagtattcgaccgcaaagatatgacacaa

SEQ ID NO: 10321 - DNA, 33 bp, Homo sapiens
tcactttttataaacatctactgaccaggtgcg

SEQ ID NO: 10322 - DNA, 33 bp, Homo sapiens
gtgttcagccctcgactccaagcgcctggtaga

SEQ ID NO: 10323 - DNA, 33 bp, Homo sapiens
cccttaaactacgtcatggatgttaaggagaaa

SEQ ID NO: 10324 - DNA, 33 bp, Homo sapiens
ttacaacagttcttaagctatggagagatattt

SEQ ID NO: 10325 - DNA, 33 bp, Homo sapiens
acttcttttaaaaaaatgtatcctgtcatcaca

SEQ ID NO: 10326 - DNA, 33 bp, Homo sapiens
tttcaatcacaccaagtccaaaatcagcactct

SEQ ID NO: 10327 - DNA, 33 bp, Homo sapiens
gttgtccattttctgacctcgcgattgttttga

SEQ ID NO: 10328 - DNA, 33 bp, Homo sapiens
aagtgtactcgcttcagaggcacatataataat

SEQ ID NO: 10329 - DNA, 33 bp, Homo sapiens
ctagtgcatcattgaaggaaaggaatttcacac

SEQ ID NO: 10330 - DNA, 33 bp, Homo sapiens
ttattattttctgctatgtctaataccaatatt

SEQ ID NO: 10331 - DNA, 33 bp, Homo sapiens
agtaaaaggcattaggtacctggagagcactgc

SEQ ID NO: 10332 - DNA, 33 bp, Homo sapiens
cacgtctgagtaaactgagaaatctgaaggtag

SEQ ID NO: 10333 - DNA, 33 bp, Homo sapiens
tactgaatgtaatttagcacttatggcaggaag

SEQ ID NO: 10334 - DNA, 33 bp, Homo sapiens
catgttcaaacattactgggaaaaatcaataat

SEQ ID NO: 10335 - DNA, 33 bp, Homo sapiens
ccatttattagtttaattgaagatacaagagat

SEQ ID NO: 10336 - DNA, 33 bp, Homo sapiens
gactatgaaaaataaagatagctatcgtccatg

SEQ ID NO: 10337 - DNA, 33 bp, Homo sapiens
acgtctactagtcccatagaaattaaaagttaa

SEQ ID NO: 10338 - DNA, 33 bp, Homo sapiens
gttgttctatttttcatgtgagaggatggactc

SEQ ID NO: 10339 - DNA, 33 bp, Homo sapiens
tggatgtctcagaagagcacagaaaaatgtggg

SEQ ID NO: 10340 - DNA, 33 bp, Homo sapiens
aatttaccctgcctcacaaagatagtcgagagg

SEQ ID NO: 10341 - DNA, 33 bp, Homo sapiens
ttgttcttaagcatcataattggttttaagaac

SEQ ID NO: 10342 - DNA, 33 bp, Homo sapiens
cctgacctctgaggaattgaatgccagggtaag

SEQ ID NO: 10343 - DNA, 33 bp, Homo sapiens
ctttgctgcttcttgaccgtttttggatcttca

SEQ ID NO: 10344 - DNA, 33 bp, Homo sapiens
atacattatttccctataccaatgaccagaaga

SEQ ID NO: 10345 - DNA, 33 bp, Homo sapiens
gctgcacctatacaaaccctatgactcaatatt

SEQ ID NO: 10346 - DNA, 33 bp, Homo sapiens
atgccttcatatgacagtagttcaattccccac

SEQ ID NO: 10347 - DNA, 33 bp, Homo sapiens
tgaattagccaaagaggaagatatttttcttta

SEQ ID NO: 10348 - DNA, 33 bp, Homo sapiens
ggcaacgtaattgcaagatgacagcaggcaaaa

SEQ ID NO: 10349 - DNA, 33 bp, Homo sapiens
tctggctaaacgtacagcactgaatcatctaat

SEQ ID NO: 10350 - DNA, 33 bp, Homo sapiens
tgaagaaattgccttagatgatagtacatgaac

SEQ ID NO: 10351 - DNA, 33 bp, Homo sapiens
gcatggggtagctaaggataaaagatatagcca

SEQ ID NO: 10352 - DNA, 33 bp, Homo sapiens
taatttcagtggtttcgaaattgttgagacttt

SEQ ID NO: 10353 - DNA, 33 bp, Homo sapiens
tactccttggttgaaatagttacctcaattctg

SEQ ID NO: 10354 - DNA, 33 bp, Homo sapiens
atttatacatgaaggagaatcagtctaccataa

SEQ ID NO: 10355 - DNA, 51 bp, Homo sapiens
taggaggagagaaaataaaagacaagtagcgtaagagaaacagctttgttg

SEQ ID NO: 10356 - DNA, 33 bp, Homo sapiens
caagattgatgtggaagaactcagcatggtttt

SEQ ID NO: 10357 - DNA, 51 bp, Homo sapiens
ctagtcagacgttaatttgaaccacgcacagtctaagtctagaacttgtgt

SEQ ID NO: 10358 - DNA, 33 bp, Homo sapiens
tgttgagttgggtcgatagattacattagtgtc

SEQ ID NO: 10359 - DNA, 33 bp, Homo sapiens
tgatagacaagcctcaggtgctacacattcatt

SEQ ID NO: 10360 - DNA, 33 bp, Homo sapiens
gtgattgatggtagaattgttgctgtagggcat

SEQ ID NO: 10361 - DNA, 33 bp, Homo sapiens
tttgtaaatgcaaggatgtttataagtcaggca

SEQ ID NO: 10362 - DNA, 33 bp, Homo sapiens
tgtttgtggttgaggataatccaaatgtataat

SEQ ID NO: 10363 - DNA, 33 bp, Homo sapiens
gagaaattcttcagatgaaataacagaatcatg

SEQ ID NO: 10364 - DNA, 33 bp, Homo sapiens
ctacaatagcaggaaacgttagaagcaccttaa

SEQ ID NO: 10365 - DNA, 51 bp, Homo sapiens
gaacagtcttctccacagtctctcatgcttcctagtcccaatcaaaagctt

SEQ ID NO: 10366 - DNA, 33 bp, Homo sapiens
caatatttggagagaattgaagctaagtgcttg

SEQ ID NO: 10367 - DNA, 33 bp, Homo sapiens
gttggtccttggtagataatattccacggagat

SEQ ID NO: 10368 - DNA, 33 bp, Homo sapiens
tggttttcccctgatcgatttcagttgtcttca

SEQ ID NO: 10369 - DNA, 33 bp, Homo sapiens
gaatgaacaaagcttataggatctatggaacaa

SEQ ID NO: 10370 - DNA, 33 bp, Homo sapiens
gggagaggttggtcaagaagtatgaactttcag

SEQ ID NO: 10371 - DNA, 51 bp, Homo sapiens
attcaacagttgacagttaaaattatgaagccaatgttccaaaatattaaa

SEQ ID NO: 10372 - DNA, 33 bp, Homo sapiens
aacagactttggcaccggctaggtaaacctatc

SEQ ID NO: 10373 - DNA, 33 bp, Homo sapiens
cagaaatggtagagaaggtcaatacagaaaaga

SEQ ID NO: 10374 - DNA, 33 bp, Homo sapiens
tcttaattctcataaggatttgtattctcaacc

SEQ ID NO: 10375 - DNA, 33 bp, Homo sapiens
gattgaaatttagaaggatcttggaagtctttg

SEQ ID NO: 10376 - DNA, 33 bp, Homo sapiens
cagatgtgagctaaaagtcgtgacctaatgaca

SEQ ID NO: 10377 - DNA, 33 bp, Homo sapiens
tttcaggtgatagttagaaccagcctctcgaaa

SEQ ID NO: 10378 - DNA, 51 bp, Homo sapiens
ccccatgacactgtacacacgaatgcacttgttagttaaatgaattataaa

SEQ ID NO: 10379 - DNA, 51 bp, Homo sapiens
tgttgtcattcaaagggcataagcacatgtcaaataattgaatcattgaga

SEQ ID NO: 10380 - DNA, 33 bp, Homo sapiens
cccagcagagattcttgaaacttactctctcat

SEQ ID NO: 10381 - DNA, 33 bp, Homo sapiens
tgaatggcagtgctaacacagctataacacaag

SEQ ID NO: 10382 - DNA, 33 bp, Homo sapiens
gtactagagctggtaagcaacagaggagtacag

SEQ ID NO: 10383 - DNA, 33 bp, Homo sapiens
tttctgccaaaatgtagaatagagccttgcaat

SEQ ID NO: 10384 - DNA, 51 bp, Homo sapiens
tgccctgtagaaagccaagcccaaatgctataactccttccaaataattgc

SEQ ID NO: 10385 - DNA, 33 bp, Homo sapiens
atatcataccattgacgcataaaagcaggtgtt

SEQ ID NO: 10386 - DNA, 33 bp, Homo sapiens
acgttggccatctttcgagacattataaaacat

SEQ ID NO: 10387 - DNA, 33 bp, Homo sapiens
gctttcagacatcttcgagaagcgtgtgcatct

SEQ ID NO: 10388 - DNA, 33 bp, Homo sapiens
ttaattatgtctctgggatagaagctatattca

SEQ ID NO: 10389 - DNA, 33 bp, Homo sapiens
cacacacttgattttaggcagttcagcagcaag

SEQ ID NO: 10390 - DNA, 33 bp, Homo sapiens
ggatgttggacactgagaatgcaaaggcagggt

SEQ ID NO: 10391 - DNA, 33 bp, Homo sapiens
tggtgactagctcaaatgaaaaggcagagagag

SEQ ID NO: 10392 - DNA, 51 bp, Homo sapiens
ggaaataattcttggataataacaagttggacctctgaaatgaataagagg

SEQ ID NO: 10393 - DNA, 33 bp, Homo sapiens
ctttcaggaaactagaccttgctcttctactcc

SEQ ID NO: 10394 - DNA, 51 bp, Homo sapiens
atcatattccagaataagatacatggattcctttcaacagggtacacattt

SEQ ID NO: 10395 - DNA, 33 bp, Homo sapiens
tgacaggctcaaaatcgaatagacatatctttt

SEQ ID NO: 10396 - DNA, 33 bp, Homo sapiens
aaaaacttcctgtccacagagaacttactttct

SEQ ID NO: 10397 - DNA, 33 bp, Homo sapiens
gtggcttaaacaccaaccatcagattaattcat

SEQ ID NO: 10398 - DNA, 33 bp, Homo sapiens
ataataaatagtgaaagaataagctgatgtcag

SEQ ID NO: 10399 - DNA, 33 bp, Homo sapiens
tgcagtatttcaaaaattgacaggtttaaagta

SEQ ID NO: 10400 - DNA, 33 bp, Homo sapiens
ttagaagacacctggagtataaaaataaagatt

SEQ ID NO: 10401 - DNA, 51 bp, Homo sapiens
aaatctccaatcaagaatacttcactatttaatgtgttttataacactgga

SEQ ID NO: 10402 - DNA, 33 bp, Homo sapiens
attaaaaggcagacaacattgccgcatgataca

SEQ ID NO: 10403 - DNA, 33 bp, Homo sapiens
cttggagaataatgaagaaagcagctttatatc

SEQ ID NO: 10404 - DNA, 33 bp, Homo sapiens
aacaacagcacataggcacttttattatattat

SEQ ID NO: 10405 - DNA, 33 bp, Homo sapiens
caatgctacaaacatctgaatagcacatttttt

SEQ ID NO: 10406 - DNA, 33 bp, Homo sapiens
ttagtacactgtaaaaggctttctgtctgagta

SEQ ID NO: 10407 - DNA, 33 bp, Homo sapiens
agtgatgaataaaggagcacaggtgtaaaacag

SEQ ID NO: 10408 - DNA, 33 bp, Homo sapiens
aacgcaatgattatgatcggaggcagcagttga

SEQ ID NO: 10409 - DNA, 33 bp, Homo sapiens
agtcatctttctgctctacgtggcatgacaaga

SEQ ID NO: 10410 - DNA, 33 bp, Homo sapiens
ggcagcggtgagatacgacgatctgcctcacta

SEQ ID NO: 10411 - DNA, 33 bp, Homo sapiens
agctaagaaagcagccgattcataaaaatgcat

SEQ ID NO: 10412 - DNA, 33 bp, Homo sapiens
aaatggcctggaattagatggtattactgcata

SEQ ID NO: 10413 - DNA, 33 bp, Homo sapiens
gagtgtatctctttgatgttgtgctggatataa

SEQ ID NO: 10414 - DNA, 33 bp, Homo sapiens
aagtgcatataaaacagtgaaatctgaataagg

SEQ ID NO: 10415 - DNA, 33 bp, Homo sapiens
ggcagaagacttcacggcggttccaaaggccac

SEQ ID NO: 10416 - DNA, 51 bp, Homo sapiens
tcatgtgggtaagccctgaataacctacatttctttaagctatcagcacca

SEQ ID NO: 10417 - DNA, 33 bp, Homo sapiens
atatatgcttgatctctcaacttcaccattccc

SEQ ID NO: 10418 - DNA, 33 bp, Homo sapiens
tcctgttatgttttcagtagtaaagactgataa

SEQ ID NO: 10419 - DNA, 33 bp, Homo sapiens
atgtcaacttggtatttaaactgtaagcatcaa

SEQ ID NO: 10420 - DNA, 33 bp, Homo sapiens
taacaatagaaaagcggatagcactctggcacc

SEQ ID NO: 10421 - DNA, 33 bp, Homo sapiens
aaagcatggatcataatagtttctatttcatag

SEQ ID NO: 10422 - DNA, 33 bp, Homo sapiens
aatgcagatatccatcggagacccttcagaaac

SEQ ID NO: 10423 - DNA, 33 bp, Homo sapiens
tgatgaaggactaggatcaattcatggaaattc

SEQ ID NO: 10424 - DNA, 33 bp, Homo sapiens
aaagcaagtcaggcaagcaaatcaaggagaagg

SEQ ID NO: 10425 - DNA, 33 bp, Homo sapiens
aactcttctgaatctgtagggagccttgaaaac

SEQ ID NO: 10426 - DNA, 33 bp, Homo sapiens
atatgtttttagttgatctgactcagtttccca

SEQ ID NO: 10427 - DNA, 33 bp, Homo sapiens
caaaaagacacagaagtaggtaatagaaactca

SEQ ID NO: 10428 - DNA, 33 bp, Homo sapiens
tttaatataaattaacgctaggctgtaatctgt

SEQ ID NO: 10429 - DNA, 51 bp, Homo sapiens
tgttcgttttaattttttctcagcggccgtcatttggtttacttcatttca

SEQ ID NO: 10430 - DNA, 51 bp, Homo sapiens
ggtacactgaggaaaataatacttatggctgattgtctgaagaacaaggtg

SEQ ID NO: 10431 - DNA, 51 bp, Homo sapiens
gagtgcagaaacatgagtgtttgcggcagccagctagctagattctatgtc

SEQ ID NO: 10432 - DNA, 33 bp, Homo sapiens
ttgttgcttatccttgtagtccaattcgtatac

SEQ ID NO: 10433 - DNA, 51 bp, Homo sapiens
gaaaaaagtcatcattatgttaaaatcacatcatcattattaaacatgtca

SEQ ID NO: 10434 - DNA, 33 bp, Homo sapiens
agttaacatctgttgataaagcagtcgctagat

SEQ ID NO: 10435 - DNA, 33 bp, Homo sapiens
ggaactggcttccacatgagtaagcataaaagt

SEQ ID NO: 10436 - DNA, 33 bp, Homo sapiens
gaatggggcacctcagtagtcatctttggatca

SEQ ID NO: 10437 - DNA, 33 bp, Homo sapiens
tttagacccaaaggccgtagttataaaagattc

SEQ ID NO: 10438 - DNA, 51 bp, Homo sapiens
gtgcccaataattgggaattgggtatacagttcttaggagtcagtccagac

SEQ ID NO: 10439 - DNA, 33 bp, Homo sapiens
tcaaaagattaaatgagacaactgtttgctaga

SEQ ID NO: 10440 - DNA, 33 bp, Homo sapiens
catctcaccttttgcagtgaaaaaacacaacgg

SEQ ID NO: 10441 - DNA, 33 bp, Homo sapiens
atggacgtgtgattcattcctggctagtgtaat

SEQ ID NO: 10442 - DNA, 33 bp, Homo sapiens
aattgaagtcactccacagcaagatgtttccaa

SEQ ID NO: 10443 - DNA, 51 bp, Homo sapiens
ggaatctgagctctatcatagttcagatgtatgacttctgctttaccacac

SEQ ID NO: 10444 - DNA, 51 bp, Homo sapiens
cctattagtcatagtatacacagtagtaatagccaaaatttattgcgtgtt

SEQ ID NO: 10445 - DNA, 51 bp, Homo sapiens
aaagtatccagtccagcctctaacatgcaataaattttggctattattact

SEQ ID NO: 10446 - DNA, 33 bp, Homo sapiens
tctttattcttgtgcagggtgggctcatagaga

SEQ ID NO: 10447 - DNA, 33 bp, Homo sapiens
tttgttgaggacctaatacatgctggatactgt

SEQ ID NO: 10448 - DNA, 33 bp, Homo sapiens
cgctcagagagaataggagttcacttgtgaata

SEQ ID NO: 10449 - DNA, 33 bp, Homo sapiens
tagcaaagaagaaagacgtgagagactgaaagc

SEQ ID NO: 10450 - DNA, 33 bp, Homo sapiens
ctcactaatagtgtgagcctggataaagctacc

SEQ ID NO: 10451 - DNA, 33 bp, Homo sapiens
gattgagaaactttaatcccagggaaggactat

SEQ ID NO: 10452 - DNA, 51 bp, Homo sapiens
gtcactaaaagaaaatgattattacggagttcaagaaaaattattcaaaag

SEQ ID NO: 10453 - DNA, 33 bp, Homo sapiens
tctggcaacagaattatgtgagatgctgtattt

SEQ ID NO: 10454 - DNA, 33 bp, Homo sapiens
ggttgtcatttgttcggaagtacggcagagcct

SEQ ID NO: 10455 - DNA, 33 bp, Homo sapiens
tgttctgttctataccgcgaggcacaatattgt

SEQ ID NO: 10456 - DNA, 33 bp, Homo sapiens
tagtatcttccacatctatcactgaggctaccg

SEQ ID NO: 10457 - DNA, 33 bp, Homo sapiens
actggtgtaggcatcagacatgtaaatgaatct

SEQ ID NO: 10458 - DNA, 33 bp, Homo sapiens
aaatacctcgaagaaagcacagattattggaag

SEQ ID NO: 10459 - DNA, 33 bp, Homo sapiens
aacagaaaccattataggtacccaaagcagaat

SEQ ID NO: 10460 - DNA, 33 bp, Homo sapiens
ctcagaaagaattgactcaaatgacagcctcac

SEQ ID NO: 10461 - DNA, 33 bp, Homo sapiens
tgtcatcactcaaatgtattaagtgcttgttgg

SEQ ID NO: 10462 - DNA, 33 bp, Homo sapiens
gagtaaacgtcatgggtcagactcgaattacta

SEQ ID NO: 10463 - DNA, 33 bp, Homo sapiens
ggaaaggcaagaaaaagctgagaaattgttata

SEQ ID NO: 10464 - DNA, 33 bp, Homo sapiens
catgaatggctggacagagagtaagaggattga

SEQ ID NO: 10465 - DNA, 33 bp, Homo sapiens
taactgaagtaagtaggaggttgtagtagccca

SEQ ID NO: 10466 - DNA, 51 bp, Homo sapiens
aatggggatagtaactccctcttaagtgagacagtgatcttaaagagcaga

SEQ ID NO: 10467 - DNA, 51 bp, Homo sapiens
gctaggtactattgactatctaagacgattacacccacgtccatatctgta

SEQ ID NO: 10468 - DNA, 33 bp, Homo sapiens
gcaatgtactaaggtaggcaagttgattctgca

SEQ ID NO: 10469 - DNA, 33 bp, Homo sapiens
cccactgcagtgcatacggttatttatctgaca

SEQ ID NO: 10470 - DNA, 33 bp, Homo sapiens
tatgacactgaattaatagccattagaggtgaa

SEQ ID NO: 10471 - DNA, 33 bp, Homo sapiens
tgacttgttgtgtatctctggtcttcctgttac

SEQ ID NO: 10472 - DNA, 33 bp, Homo sapiens
gaaggacttgaatcactgggacgtcacccaggt

SEQ ID NO: 10473 - DNA, 51 bp, Homo sapiens
tccacaccagtctttaaaattgaaatgatacatcctcatatcaagcctgaa

SEQ ID NO: 10474 - DNA, 33 bp, Homo sapiens
tgcatttgaatgttgatagttcttaccaaattt

SEQ ID NO: 10475 - DNA, 33 bp, Homo sapiens
tcttgtgtagcttttgtagatgttgctcagcct

SEQ ID NO: 10476 - DNA, 33 bp, Homo sapiens
gcactccacaatcacatacttatacagctccgc

SEQ ID NO: 10477 - DNA, 33 bp, Homo sapiens
tctaaacactgagctggaattgagacattggac

SEQ ID NO: 10478 - DNA, 51 bp, Homo sapiens
ttctctgaaaagtctgacagagcgagctttacctctttctattcctccatt

SEQ ID NO: 10479 - DNA, 33 bp, Homo sapiens
aaagcacaaacactgatagctgtaaggtaaagt

SEQ ID NO: 10480 - DNA, 33 bp, Homo sapiens
tggacaatttggagcctgcatatacgcccatct

SEQ ID NO: 10481 - DNA, 33 bp, Homo sapiens
agcacaccatcgtatcgcaatatccctgaattt

SEQ ID NO: 10482 - DNA, 33 bp, Homo sapiens
gtaactggcaacttcatccttccagctgcttag

SEQ ID NO: 10483 - DNA, 33 bp, Homo sapiens
gaagttgccagttactgagacagggagaatgtg

SEQ ID NO: 10484 - DNA, 33 bp, Homo sapiens
ggagtctggaccccaacgagtccaaggcagctg

SEQ ID NO: 10485 - DNA, 33 bp, Homo sapiens
catttgtcacaactccgaaagatgtgagaaagt

SEQ ID NO: 10486 - DNA, 33 bp, Homo sapiens
actctacaggaacagatgcatttggtacaaata

SEQ ID NO: 10487 - DNA, 33 bp, Homo sapiens
tttaaaaggccagctgtatgtttgcacatcagt

SEQ ID NO: 10488 - DNA, 33 bp, Homo sapiens
agctaaacacactagatgcttttgttacactaa

SEQ ID NO: 10489 - DNA, 51 bp, Homo sapiens
gagttgaactaagcagaataaaacatctttaccacaataataattgcaaca

SEQ ID NO: 10490 - DNA, 33 bp, Homo sapiens
ggagtgctttctcagggaaccaaaatgtagctg

SEQ ID NO: 10491 - DNA, 33 bp, Homo sapiens
aaagtgtctagaacaagggtctcaaactgatag

SEQ ID NO: 10492 - DNA, 33 bp, Homo sapiens
agtaagaaagatcaaggccagacactgtgactc

SEQ ID NO: 10493 - DNA, 33 bp, Homo sapiens
ggtgcactgatttccctggaggagccctgagag

SEQ ID NO: 10494 - DNA, 33 bp, Homo sapiens
tatggagaggtagatgtcataatatatttgcaa

SEQ ID NO: 10495 - DNA, 33 bp, Homo sapiens
ggtgctggaatcagactgaaccgttggtttgaa

SEQ ID NO: 10496 - DNA, 33 bp, Homo sapiens
tctaaagtcttggaaggctcctgtattgccagc

SEQ ID NO: 10497 - DNA, 33 bp, Homo sapiens
catcaggttctcttccgcactcgagaaaatcaa

SEQ ID NO: 10498 - DNA, 33 bp, Homo sapiens
aagagttacctgtttggagtttggaatgtactt

SEQ ID NO: 10499 - DNA, 33 bp, Homo sapiens
aatttatggaagtcaggaaagagatggaatcat

SEQ ID NO: 10500 - DNA, 33 bp, Homo sapiens
ggtgacactcttcactgaatgaggaacagtgac

SEQ ID NO: 10501 - DNA, 33 bp, Homo sapiens
tctcatttttaaaggctctctttttagattgag

SEQ ID NO: 10502 - DNA, 33 bp, Homo sapiens
gccaagttacaggtactacaaccattactgtgt

SEQ ID NO: 10503 - DNA, 33 bp, Homo sapiens
cagagcagaaaactgataaaaactctggttaag

SEQ ID NO: 10504 - DNA, 51 bp, Homo sapiens
ctgggcagattggtcacaccaagaatgaaagggacgatatttttcttcccc

SEQ ID NO: 10505 - DNA, 51 bp, Homo sapiens
atagtagtttccattgtaataaatgtggacagactaggtattttggggact

SEQ ID NO: 10506 - DNA, 33 bp, Homo sapiens
aggctagtcggtcacagagtgtcctctcatgac

SEQ ID NO: 10507 - DNA, 33 bp, Homo sapiens
ggaagcctttcctgactgggtcaaacttctctc

SEQ ID NO: 10508 - DNA, 33 bp, Homo sapiens
aggctgtatacttcacgagcatatcttgcagcc

SEQ ID NO: 10509 - DNA, 33 bp, Homo sapiens
tgaagagtcaggtgacgcattgggagagcagag

SEQ ID NO: 10510 - DNA, 33 bp, Homo sapiens
tttagattcaaaagtcgatgtaagatttgggtc

SEQ ID NO: 10511 - DNA, 33 bp, Homo sapiens
cattatcagctcatggtcattaaatgtttaaca

SEQ ID NO: 10512 - DNA, 33 bp, Homo sapiens
tttgtccctagctatctaccttgtgtgtacctt

SEQ ID NO: 10513 - DNA, 33 bp, Homo sapiens
ggtgttttaaatggaagctacttcagaaaataa

SEQ ID NO: 10514 - DNA, 33 bp, Homo sapiens
cagaacagcttcctcctctatataatcacgtgt

SEQ ID NO: 10515 - DNA, 33 bp, Homo sapiens
gctcccacagcattcagtacatttccagagttt

SEQ ID NO: 10516 - DNA, 33 bp, Homo sapiens
agtccacaaaggaagatcatttgcttgtgtgac

SEQ ID NO: 10517 - DNA, 33 bp, Homo sapiens
tagtcttcaaaccatatcatgcatcagaatcac

SEQ ID NO: 10518 - DNA, 51 bp, Homo sapiens
atttactctgctacataaaattctacagatggaattgtgtactatgctctt

SEQ ID NO: 10519 - DNA, 33 bp, Homo sapiens
acaaacactggccttagctccaatatctgcgtt

SEQ ID NO: 10520 - DNA, 51 bp, Homo sapiens
agtagttagctacccagagaaatcagtactaggtacaactgcatgattgac

SEQ ID NO: 10521 - DNA, 33 bp, Homo sapiens
cttaatggtaccagacgcatttcaaggaatttg

SEQ ID NO: 10522 - DNA, 33 bp, Homo sapiens
attgctcctagtattgtacctcattttaagtga

SEQ ID NO: 10523 - DNA, 33 bp, Homo sapiens
acaggtaccctgatgatgctgaccagccgactt

SEQ ID NO: 10524 - DNA, 33 bp, Homo sapiens
ttatctcctagaatccgactttcaccccttctc

SEQ ID NO: 10525 - DNA, 33 bp, Homo sapiens
gttacagtggcctaaaggctatagtggtgtatg

SEQ ID NO: 10526 - DNA, 51 bp, Homo sapiens
tggatcaatgcacatgaacttttcccggcttttgatccatctccaactttt

SEQ ID NO: 10527 - DNA, 33 bp, Homo sapiens
catttcatcctctcattaccttcaataataaca

SEQ ID NO: 10528 - DNA, 51 bp, Homo sapiens
gtcacaaggcagaagtggtcaaaagtagaatttaaaagaaccaaaacaaat

SEQ ID NO: 10529 - DNA, 33 bp, Homo sapiens
ttaaggaaactttctggaagcatcactcaacac

SEQ ID NO: 10530 - DNA, 33 bp, Homo sapiens
ttttgctaaacctgcatgttctaaaagctgaat

SEQ ID NO: 10531 - DNA, 51 bp, Homo sapiens
ttttggttttgtagggggaaatggcgcatttagacagtggtctcgggaact

SEQ ID NO: 10532 - DNA, 33 bp, Homo sapiens
aatggcagctaccaaataacctatagcaaaaat

SEQ ID NO: 10533 - DNA, 33 bp, Homo sapiens
tatgtgtatccaaccatcgttcagaagtaagaa

SEQ ID NO: 10534 - DNA, 33 bp, Homo sapiens
aagccctggattccaatgtctttaacacaaatc

SEQ ID NO: 10535 - DNA, 33 bp, Homo sapiens
attttctctgggccaattcggagaaggctggct

SEQ ID NO: 10536 - DNA, 33 bp, Homo sapiens
gctgaaaatcactgacgaggtagaagaatagga

SEQ ID NO: 10537 - DNA, 33 bp, Homo sapiens
tcattgtagatatcactgctgaggctgtctgtg

SEQ ID NO: 10538 - DNA, 33 bp, Homo sapiens
cccacagacagtgtagcaattggcagctttttt

SEQ ID NO: 10539 - DNA, 51 bp, Homo sapiens
tctcgtaacttcaaagagtctcaaacgtgtcaagatcctaagacaggaaac

SEQ ID NO: 10540 - DNA, 33 bp, Homo sapiens
taggagagtctggggatgcctctcaaggaatga

SEQ ID NO: 10541 - DNA, 33 bp, Homo sapiens
tcttaatctgccaaaatctggcactaatctggt

SEQ ID NO: 10542 - DNA, 33 bp, Homo sapiens
ataggtcttattgtccgcgggattggttttgtc

SEQ ID NO: 10543 - DNA, 33 bp, Homo sapiens
acaagatgagcccctatacgtatctaagaatgt

SEQ ID NO: 10544 - DNA, 33 bp, Homo sapiens
agcaccatatgctgactaggcctgacccttctt

SEQ ID NO: 10545 - DNA, 33 bp, Homo sapiens
aaagggaggcgaggaatgcaagagctcagtgtc

SEQ ID NO: 10546 - DNA, 33 bp, Homo sapiens
gggcataaaagcagtatgtatctcagagggagt

SEQ ID NO: 10547 - DNA, 33 bp, Homo sapiens
gggtgactcaccatcatgggccctttgcattgt

SEQ ID NO: 10548 - DNA, 33 bp, Homo sapiens
gccctattgtctgaacgctgttttgatgtagac

SEQ ID NO: 10549 - DNA, 33 bp, Homo sapiens
cactgtttgccggcactagatttcacaggagtt

SEQ ID NO: 10550 - DNA, 33 bp, Homo sapiens
tgaaacttaggcagaagttatgaggcttgggct

SEQ ID NO: 10551 - DNA, 33 bp, Homo sapiens
cagcactcctcgttccggctcattggacagaac

SEQ ID NO: 10552 - DNA, 33 bp, Homo sapiens
tggtctgggatgtggatggagagcaaagaaatt

SEQ ID NO: 10553 - DNA, 33 bp, Homo sapiens
agaagggattggccacgaaaaggaaagcacagg

SEQ ID NO: 10554 - DNA, 33 bp, Homo sapiens
agttgcaaatagctcatggaagatgaagaatga

SEQ ID NO: 10555 - DNA, 33 bp, Homo sapiens
caccagacataattaatctgtgtaactggtact

SEQ ID NO: 10556 - DNA, 33 bp, Homo sapiens
cattaatgcatacccagtaagtgcctgtcacct

SEQ ID NO: 10557 - DNA, 33 bp, Homo sapiens
cacagcacaggcctcatggaaccttcagtaata

SEQ ID NO: 10558 - DNA, 51 bp, Homo sapiens
aaacaataattatgagaataattatgacaaaaatgccttgacattgacaag

SEQ ID NO: 10559 - DNA, 51 bp, Homo sapiens
tattgtgaaatcacagaagtgttaagagccagttccttttttgatcatatg

SEQ ID NO: 10560 - DNA, 33 bp, Homo sapiens
taaatccctgaacccagtagtagggaccaaggt

SEQ ID NO: 10561 - DNA, 51 bp, Homo sapiens
tttattctttttattgagaagagtttggaaataaagttacttagacctttt

SEQ ID NO: 10562 - DNA, 33 bp, Homo sapiens
tacatgttgaacggacccaactttgtgattgac

SEQ ID NO: 10563 - DNA, 33 bp, Homo sapiens
gtagaagcagttgtcagtccagacctcccagga

SEQ ID NO: 10564 - DNA, 33 bp, Homo sapiens
aaatacactaaagaaatacaggaaggtgagcaa

SEQ ID NO: 10565 - DNA, 33 bp, Homo sapiens
actccaaagcttggactctttccagtgtcagaa

SEQ ID NO: 10566 - DNA, 33 bp, Homo sapiens
caagggcaagcagagatggatgtcccagtagag

SEQ ID NO: 10567 - DNA, 33 bp, Homo sapiens
tggcctgctcacagaagaaaggaggagcactct

SEQ ID NO: 10568 - DNA, 33 bp, Homo sapiens
tattggatcacaccacgagggcaggtaaagggt

SEQ ID NO: 10569 - DNA, 33 bp, Homo sapiens
cagtgttattccaaaagaggagatgaaatgaag

SEQ ID NO: 10570 - DNA, 33 bp, Homo sapiens
taagctgtgatgaagatgtccctgctacgctat

SEQ ID NO: 10571 - DNA, 33 bp, Homo sapiens
gaaaagggggatttcaggagctaacgaagtggt

SEQ ID NO: 10572 - DNA, 51 bp, Homo sapiens
agataaaccaggcttcctaactggagatagaaaattggagcctgagattat

SEQ ID NO: 10573 - DNA, 33 bp, Homo sapiens
cttcttactcactttaggaatgggacacaatga

SEQ ID NO: 10574 - DNA, 51 bp, Homo sapiens
gatctgcaagttggcatcaggaaaataaattctgtagtactctgtattaac

SEQ ID NO: 10575 - DNA, 33 bp, Homo sapiens
ctaaataccagatcaagcaagtggcttattaga

SEQ ID NO: 10576 - DNA, 51 bp, Homo sapiens
atagggtagaatattatatagtcatgaaaaaatacctgtatcaaaaaatat

SEQ ID NO: 10577 - DNA, 33 bp, Homo sapiens
ccttcacacctctttccacctcctctcttttgc

SEQ ID NO: 10578 - DNA, 33 bp, Homo sapiens
atttgggaatatctcatccgttcaaatgccctg

SEQ ID NO: 10579 - DNA, 33 bp, Homo sapiens
gggaatccatctctattgcatggcagccttacc

SEQ ID NO: 10580 - DNA, 33 bp, Homo sapiens
ttgttccctcatatcagagtagcaaacaggtca

SEQ ID NO: 10581 - DNA, 33 bp, Homo sapiens
atccagagtccactgagtcactttcctgtacag

SEQ ID NO: 10582 - DNA, 33 bp, Homo sapiens
aatacaaaaattcgaggatgcttaagtccctta

SEQ ID NO: 10583 - DNA, 33 bp, Homo sapiens
cagcaccatggggtccgccagatcatatgcctc

SEQ ID NO: 10584 - DNA, 33 bp, Homo sapiens
taacatcaagggactcgagtttccaaatgcagg

SEQ ID NO: 10585 - DNA, 33 bp, Homo sapiens
accgccttaatcatgagacatctagaagacctt

SEQ ID NO: 10586 - DNA, 33 bp, Homo sapiens
cgtgtgcctaattaactcctagtcatccttcac

SEQ ID NO: 10587 - DNA, 33 bp, Homo sapiens
cttcttctagaacagagatctgaccaagttagt

SEQ ID NO: 10588 - DNA, 33 bp, Homo sapiens
gcgtgggacttttagataagtggctagaagtgc

SEQ ID NO: 10589 - DNA, 33 bp, Homo sapiens
agttccacggctaaaatgaattctgaaaatcac

SEQ ID NO: 10590 - DNA, 33 bp, Homo sapiens
atttcagaggcctggccataaagcactggagaa

SEQ ID NO: 10591 - DNA, 33 bp, Homo sapiens
ttagaaagtgatggaatggaacccatggtcatg

SEQ ID NO: 10592 - DNA, 33 bp, Homo sapiens
gtcagtggaatctgcatggtcttggcgaggtct

SEQ ID NO: 10593 - DNA, 33 bp, Homo sapiens
ctagttttgagttacatgaatcagaaaaagtag

SEQ ID NO: 10594 - DNA, 33 bp, Homo sapiens
acatctcttttttcgaccccaacatgaaaccac

SEQ ID NO: 10595 - DNA, 33 bp, Homo sapiens
gctcctcaacgcttggtcagaaagaatatcaca

SEQ ID NO: 10596 - DNA, 33 bp, Homo sapiens
acccttcacattcatatgtcctagaagatgaat

SEQ ID NO: 10597 - DNA, 33 bp, Homo sapiens
gtcaacacacacatcagtcattacagatagtgg

SEQ ID NO: 10598 - DNA, 33 bp, Homo sapiens
aaagtctcatttaccatgttgagtttgaagttc

SEQ ID NO: 10599 - DNA, 33 bp, Homo sapiens
gcctttgcttacctggtattctgtaaattctga

SEQ ID NO: 10600 - DNA, 33 bp, Homo sapiens
ttgttatatttagcaggccaaacatggttaata

SEQ ID NO: 10601 - DNA, 33 bp, Homo sapiens
ctcccgggaccctgtaggtcaaaagcctctgac

SEQ ID NO: 10602 - DNA, 33 bp, Homo sapiens
actgttacatcttcattaaaatatggtcctaca

SEQ ID NO: 10603 - DNA, 33 bp, Homo sapiens
tataacctcttccttatgtaaacaaacaatgtg

SEQ ID NO: 10604 - DNA, 33 bp, Homo sapiens
cttctatttcacttaatacctcatctactgttt

SEQ ID NO: 10605 - DNA, 51 bp, Homo sapiens
ttttcacaagaaaacagcacttaaggcttctatatataatcactgttactt

SEQ ID NO: 10606 - DNA, 33 bp, Homo sapiens
ccccaggagcttcttagacatggactttgctgt

SEQ ID NO: 10607 - DNA, 33 bp, Homo sapiens
ggctctaatgtgcaaatagattgtgtgaatttt

SEQ ID NO: 10608 - DNA, 33 bp, Homo sapiens
gtggcttcagaaatgagggaacacggtgtgttc

SEQ ID NO: 10609 - DNA, 33 bp, Homo sapiens
aataaattcctcattatgctaaatcagcttgag

SEQ ID NO: 10610 - DNA, 51 bp, Homo sapiens
ggctagagatggaccactattagaacagaaaacaaagaagaggtaataaga

SEQ ID NO: 10611 - DNA, 51 bp, Homo sapiens
gaatgctctgcattgagtagagtaagtgctcaggatgactcaggctgtttc

SEQ ID NO: 10612 - DNA, 33 bp, Homo sapiens
atcagcttcatgccaagtatggagatgcgtgag

SEQ ID NO: 10613 - DNA, 33 bp, Homo sapiens
tttatcatatctgaagtcaggtgatgtaccttc

SEQ ID NO: 10614 - DNA, 33 bp, Homo sapiens
aactggaggagatatcgacatgaaatgaactca

SEQ ID NO: 10615 - DNA, 33 bp, Homo sapiens
cagatatgttacaatatagtccagtggatcttc

SEQ ID NO: 10616 - DNA, 33 bp, Homo sapiens
taaggaaagtacaaacgccaatgaaaattattt

SEQ ID NO: 10617 - DNA, 33 bp, Homo sapiens
gttcaatctaactgtatgtttgcatccactaac

SEQ ID NO: 10618 - DNA, 33 bp, Homo sapiens
atagggcaaaggagaagacttgcacctgtattt

SEQ ID NO: 10619 - DNA, 33 bp, Homo sapiens
aaaacaaaaagctttacgccgcttgaggagggg

SEQ ID NO: 10620 - DNA, 33 bp, Homo sapiens
gtttattgcatggcaatttattttcaaaattat

SEQ ID NO: 10621 - DNA, 33 bp, Homo sapiens
aactttcatgatgacagattcctgttaaatgga

SEQ ID NO: 10622 - DNA, 33 bp, Homo sapiens
ttataaaacattatcagtctcctcggaatcatt

SEQ ID NO: 10623 - DNA, 33 bp, Homo sapiens
gaaaactgagatccaataatgaaagtaactaag

SEQ ID NO: 10624 - DNA, 33 bp, Homo sapiens
tgtctttgaagtgtcagtgaaaactacagtatc

SEQ ID NO: 10625 - DNA, 33 bp, Homo sapiens
agatttagggtctccagataagaaaacaattcc

SEQ ID NO: 10626 - DNA, 33 bp, Homo sapiens
gccagtccctgtgatatatcttcatcctgacct

SEQ ID NO: 10627 - DNA, 33 bp, Homo sapiens
actaccattttttacatgctgcctatggctgtt

SEQ ID NO: 10628 - DNA, 33 bp, Homo sapiens
aatgcttagacgtgcagacaaaattacatttca

SEQ ID NO: 10629 - DNA, 33 bp, Homo sapiens
agatcctttttggctctcaaatcatcccataaa

SEQ ID NO: 10630 - DNA, 33 bp, Homo sapiens
tggtaactttgaccaatgaatgacagctaccat

SEQ ID NO: 10631 - DNA, 33 bp, Homo sapiens
tactttacacagggaatgactgactgtttacag

SEQ ID NO: 10632 - DNA, 33 bp, Homo sapiens
tggaacgagtgaaacagggaaagactctgaagg

SEQ ID NO: 10633 - DNA, 33 bp, Homo sapiens
tcaagatcaggagacagggtgttcgctatatgg

SEQ ID NO: 10634 - DNA, 33 bp, Homo sapiens
cagcttttatcattgcgcagcctgcatcccaac

SEQ ID NO: 10635 - DNA, 33 bp, Homo sapiens
gtgctaagcagaatactaaagatgtgtgagaca

SEQ ID NO: 10636 - DNA, 33 bp, Homo sapiens
cttgaggaacacaagagggataaaacactaaca

SEQ ID NO: 10637 - DNA, 33 bp, Homo sapiens
tgggctgtgttttcaagaggttaaggcattctt

SEQ ID NO: 10638 - DNA, 33 bp, Homo sapiens
ctaaagtccgctacccgaaactttcctggagag

SEQ ID NO: 10639 - DNA, 33 bp, Homo sapiens
tggagccctgtgcccagtatctagtagggtctc

SEQ ID NO: 10640 - DNA, 33 bp, Homo sapiens
ttttagtaacctgggataagtgacttcgactct

SEQ ID NO: 10641 - DNA, 33 bp, Homo sapiens
tgggaatgaaaatgtataatttgcagctcttta

SEQ ID NO: 10642 - DNA, 33 bp, Homo sapiens
aaagttagctctagaattgtagattggagttca

SEQ ID NO: 10643 - DNA, 33 bp, Homo sapiens
attttggtctgccctgtaaaaactgtcatatta

SEQ ID NO: 10644 - DNA, 33 bp, Homo sapiens
aattatacattggtcagaggaagaaagttgaat

SEQ ID NO: 10645 - DNA, 33 bp, Homo sapiens
ggtgtcctaggcaatagccaatcatagatgaat

SEQ ID NO: 10646 - DNA, 33 bp, Homo sapiens
cctgttttctagctaagatcagtaaggagaggt

SEQ ID NO: 10647 - DNA, 33 bp, Homo sapiens
atgcacaccaaatacctggtagaggaaagataa

SEQ ID NO: 10648 - DNA, 33 bp, Homo sapiens
tctgactttgtaatcagccctattcataagaac

SEQ ID NO: 10649 - DNA, 51 bp, Homo sapiens
tgtttctagcctagatgtctctctcgatgtccatagaaactcaagtttagt

SEQ ID NO: 10650 - DNA, 51 bp, Homo sapiens
ggatttccatttgctctgtaggtgatgataggatattgaagactttaaaga

SEQ ID NO: 10651 - DNA, 33 bp, Homo sapiens
gcaaattgaaggctcagggtaggaatttaatgc

SEQ ID NO: 10652 - DNA, 33 bp, Homo sapiens
gttccaaatttagtaagagtctgccctgcagaa

SEQ ID NO: 10653 - DNA, 33 bp, Homo sapiens
ggaagtttctgtaatagaagcaggagaaaataa

SEQ ID NO: 10654 - DNA, 33 bp, Homo sapiens
gagtcggtaagaatgagtcattaggctgttgta

SEQ ID NO: 10655 - DNA, 33 bp, Homo sapiens
cctgcctggaccttcgttatccttctctaacta

SEQ ID NO: 10656 - DNA, 33 bp, Homo sapiens
tagcatctaacataagcctagattcagcatata

SEQ ID NO: 10657 - DNA, 33 bp, Homo sapiens
gtttttattgagacgagcacttagcccaagaca

SEQ ID NO: 10658 - DNA, 33 bp, Homo sapiens
tatgtaactggtggtagctttgaactggtagga

SEQ ID NO: 10659 - DNA, 33 bp, Homo sapiens
ataaaacagtttaccagagaatacaagtataat

SEQ ID NO: 10660 - DNA, 33 bp, Homo sapiens
gttgaaataaattgacgaaaattgaaaacagta

SEQ ID NO: 10661 - DNA, 33 bp, Homo sapiens
ctctgcaatagtataatttagccattaggactg

SEQ ID NO: 10662 - DNA, 33 bp, Homo sapiens
aatcccatagtttggagaaaagccaatttggaa

SEQ ID NO: 10663 - DNA, 33 bp, Homo sapiens
aacctgtactaagagaggccaggagagtatcta

SEQ ID NO: 10664 - DNA, 33 bp, Homo sapiens
aaaatgaaaaacgagcgcttcttcagcttggaa

SEQ ID NO: 10665 - DNA, 33 bp, Homo sapiens
cattttgcaaggtttaggcagctatagcatttt

SEQ ID NO: 10666 - DNA, 33 bp, Homo sapiens
atcaaaacactaataggatccataaacacagac

SEQ ID NO: 10667 - DNA, 33 bp, Homo sapiens
tagacaaaaagttctatggaagtcgaaatgtca

SEQ ID NO: 10668 - DNA, 33 bp, Homo sapiens
caaaaggttgatagtggaagacagtgtagggat

SEQ ID NO: 10669 - DNA, 33 bp, Homo sapiens
gattttcacatttacatccttgttctactttat

SEQ ID NO: 10670 - DNA, 33 bp, Homo sapiens
tcaaagccactctacatacaaaatgaatctctt

SEQ ID NO: 10671 - DNA, 33 bp, Homo sapiens
gaaaagtacttcataattgctaagttctattac

SEQ ID NO: 10672 - DNA, 33 bp, Homo sapiens
ttggccattgtcaatttaaactaaagagtagct

SEQ ID NO: 10673 - DNA, 33 bp, Homo sapiens
ctacaaggaaacatgggatgtatgagtggtggg

SEQ ID NO: 10674 - DNA, 33 bp, Homo sapiens
caaaggtttgcaggaacgcttttgacatatggg

SEQ ID NO: 10675 - DNA, 33 bp, Homo sapiens
aagacagcatgagctataatacggaaaatgctt

SEQ ID NO: 10676 - DNA, 33 bp, Homo sapiens
tttttacttattagaggaaacatgaacatctat

SEQ ID NO: 10677 - DNA, 33 bp, Homo sapiens
atctgccggacaagggtagtatattagtcaggg

SEQ ID NO: 10678 - DNA, 51 bp, Homo sapiens
aattattttttatgaaatagacatggaaatttatgtaaaacctactaatgc

SEQ ID NO: 10679 - DNA, 51 bp, Homo sapiens
attggttttcatcttattattattctataaatggcattagtaggttttaca

SEQ ID NO: 10680 - DNA, 51 bp, Homo sapiens
aatatttcttctcttaagacatcatgagaatacaaattacaatccattttt

SEQ ID NO: 10681 - DNA, 33 bp, Homo sapiens
ccaatcatctgttgactctgagctggaaatgtc

SEQ ID NO: 10682 - DNA, 33 bp, Homo sapiens
aatacttggagtaaaatagtttctggccacagt

SEQ ID NO: 10683 - DNA, 51 bp, Homo sapiens
tcaaaattgaacagactgggaacactgtgaaggcttcatcagggtattttg

SEQ ID NO: 10684 - DNA, 33 bp, Homo sapiens
taaaaatcatcacagttaaaatatgcttctgtg

SEQ ID NO: 10685 - DNA, 33 bp, Homo sapiens
tggtccaaattttctatcctgacatcatgttca

SEQ ID NO: 10686 - DNA, 51 bp, Homo sapiens
tagtaaataaaagttggaataaatacgtttgtcatttattatatacaggta

SEQ ID NO: 10687 - DNA, 33 bp, Homo sapiens
tgtgtgtgtctgtgtataagggtgggagcaatt

SEQ ID NO: 10688 - DNA, 33 bp, Homo sapiens
tagcttgattctctcatgcttatttcaccccca

SEQ ID NO: 10689 - DNA, 33 bp, Homo sapiens
aatgcttgttgttgtatgctgctagggtaattc

SEQ ID NO: 10690 - DNA, 51 bp, Homo sapiens
ctgatacagaagttcaattttttaaggacatgttcaatttattctttttca

SEQ ID NO: 10691 - DNA, 33 bp, Homo sapiens
aaaaattcaggtaaaatccttgaatctgaaatc

SEQ ID NO: 10692 - DNA, 33 bp, Homo sapiens
caatgctaaaggtttcgcataagagggtcgtga

SEQ ID NO: 10693 - DNA, 33 bp, Homo sapiens
accctaacatccatgaggcaactgggccacagg

SEQ ID NO: 10694 - DNA, 33 bp, Homo sapiens
ctctccatttaacttatgttcaactgcaataac

SEQ ID NO: 10695 - DNA, 33 bp, Homo sapiens
aatctcagtctacaaattgctacacctgcaaaa

SEQ ID NO: 10696 - DNA, 33 bp, Homo sapiens
acaaagttcactgcaactataagctgtagtgaa

SEQ ID NO: 10697 - DNA, 33 bp, Homo sapiens
ggagccagagaggtacgatgtgccggagtgaca

SEQ ID NO: 10698 - DNA, 33 bp, Homo sapiens
aaaaagtacaacctgaggtttgcagaaaggcat

SEQ ID NO: 10699 - DNA, 33 bp, Homo sapiens
actggtaagattattagagcctgaagtctgaac

SEQ ID NO: 10700 - DNA, 33 bp, Homo sapiens
aaattgtccataaccagtattctgcagacttaa

SEQ ID NO: 10701 - DNA, 33 bp, Homo sapiens
tttgtaggaccatttcgaactatgtcaaagaag

SEQ ID NO: 10702 - DNA, 33 bp, Homo sapiens
acagttcaggttcttcgacagagagtttgtaaa

SEQ ID NO: 10703 - DNA, 33 bp, Homo sapiens
tttccagttttgtccattccatcccagatgcac

SEQ ID NO: 10704 - DNA, 33 bp, Homo sapiens
catttaggatccattagaagttggaggttgtga

SEQ ID NO: 10705 - DNA, 33 bp, Homo sapiens
aagtagtaaatcattggcaaatacttggtagtt

SEQ ID NO: 10706 - DNA, 33 bp, Homo sapiens
tccaatctaacctaactggtgttctcataagaa

SEQ ID NO: 10707 - DNA, 33 bp, Homo sapiens
gacataaattctataagaagtgtccatcgtttt

SEQ ID NO: 10708 - DNA, 33 bp, Homo sapiens
ttgggtcattgtatgcgcatcgttgtaactgac

SEQ ID NO: 10709 - DNA, 33 bp, Homo sapiens
aatagagatctgagtatgactgaaaaaattaca

SEQ ID NO: 10710 - DNA, 33 bp, Homo sapiens
agggggcattttattatagattgtatactacta

SEQ ID NO: 10711 - DNA, 33 bp, Homo sapiens
atgataaatttgagtatctggaaatgaaaacat

SEQ ID NO: 10712 - DNA, 33 bp, Homo sapiens
cctcctgctgtttatagattgcaacatccctgg

SEQ ID NO: 10713 - DNA, 33 bp, Homo sapiens
cataaatagttcacactgaaggactctgtgcag

SEQ ID NO: 10714 - DNA, 33 bp, Homo sapiens
ctgccgcgacccagcatgtctgtggttgtaagg

SEQ ID NO: 10715 - DNA, 51 bp, Homo sapiens
aattaaatgtgtagtaaccaccaacggatgctaaaaaacaggaaaattaag

SEQ ID NO: 10716 - DNA, 33 bp, Homo sapiens
ttggtgaagactaccagtgacacatttttttct

SEQ ID NO: 10717 - DNA, 51 bp, Homo sapiens
caataactaggtaatcatcttctaatgcaatcatctacatcaatcatgcac

SEQ ID NO: 10718 - DNA, 33 bp, Homo sapiens
gttccagtcttgagcagtcgtaattatattata

SEQ ID NO: 10719 - DNA, 33 bp, Homo sapiens
cctagaagccatgaaggaaaaactaacttctgt

SEQ ID NO: 10720 - DNA, 51 bp, Homo sapiens
accctccttcctgggaccctgttcataagtctatgcatctgtagcaatgta

SEQ ID NO: 10721 - DNA, 33 bp, Homo sapiens
tatcaatcagaaagactgcagccgtggcgtgga

SEQ ID NO: 10722 - DNA, 33 bp, Homo sapiens
cagacacaaaccagacgcagcttatgtaccgct

SEQ ID NO: 10723 - DNA, 33 bp, Homo sapiens
acaccttttctcattatgtaagcataggtgctg

SEQ ID NO: 10724 - DNA, 33 bp, Homo sapiens
ataacagtggcaaaatgatttatatacatgata

SEQ ID NO: 10725 - DNA, 33 bp, Homo sapiens
cctacctaaaaggctgtcaaccatgcagaggag

SEQ ID NO: 10726 - DNA, 33 bp, Homo sapiens
tactctattagcaatatgggatgtgagcaccag

SEQ ID NO: 10727 - DNA, 33 bp, Homo sapiens
gacacaacagaaaaacggaactcgaatctgact

SEQ ID NO: 10728 - DNA, 33 bp, Homo sapiens
tagtgccacaagctaacccttttcatcgcacct

SEQ ID NO: 10729 - DNA, 33 bp, Homo sapiens
acccatcttccactaatatttccttagccaaat

SEQ ID NO: 10730 - DNA, 33 bp, Homo sapiens
taaaccttcacatgtaccttttgaatgtaaaat

SEQ ID NO: 10731 - DNA, 33 bp, Homo sapiens
cctctgatcccgaagctctcactctactaacag

SEQ ID NO: 10732 - DNA, 33 bp, Homo sapiens
ttaagctggaagttctgacagaaagatagtggg

SEQ ID NO: 10733 - DNA, 33 bp, Homo sapiens
agcaaaaacaatggtcgattctaaacttgtagg

SEQ ID NO: 10734 - DNA, 33 bp, Homo sapiens
tctgccacttacccactgaacagtacaagtgtg

SEQ ID NO: 10735 - DNA, 33 bp, Homo sapiens
attactggcagtagaatgcagaagagaaactca

SEQ ID NO: 10736 - DNA, 33 bp, Homo sapiens
attcattcctaagtaagtagactcaacagtgag

SEQ ID NO: 10737 - DNA, 33 bp, Homo sapiens
gtggctgcctttgagaggagatgttctttccct

SEQ ID NO: 10738 - DNA, 33 bp, Homo sapiens
tatttgtgagaagttataattctgcctttgttt

SEQ ID NO: 10739 - DNA, 33 bp, Homo sapiens
gaattcagttcttccagataaaatccattttca

SEQ ID NO: 10740 - DNA, 33 bp, Homo sapiens
attctggatgcacttcgcttgaaaaacagaacc

SEQ ID NO: 10741 - DNA, 33 bp, Homo sapiens
ttcaaaacagattatcgcacttcttcatagcta

SEQ ID NO: 10742 - DNA, 33 bp, Homo sapiens
aagcccaattgtttacgctcaaagtatagaata

SEQ ID NO: 10743 - DNA, 33 bp, Homo sapiens
agcctggatttttggatggaaattgttctccat

SEQ ID NO: 10744 - DNA, 33 bp, Homo sapiens
tctctccagatgcagatgtggccatgcctcttg

SEQ ID NO: 10745 - DNA, 33 bp, Homo sapiens
cccatgctggaagctatagtctgcttaaaacct

SEQ ID NO: 10746 - DNA, 33 bp, Homo sapiens
tataatcttaagtgaattgagaaacaggaaatc

SEQ ID NO: 10747 - DNA, 33 bp, Homo sapiens
acagacctgagactccggaaataagtcttcatt

SEQ ID NO: 10748 - DNA, 51 bp, Homo sapiens
ggcaagttgtagtcttctctgttcattctatcagttaaatttccctccatt

SEQ ID NO: 10749 - DNA, 33 bp, Homo sapiens
cagctgatggtttaatcaatccttctacataat

SEQ ID NO: 10750 - DNA, 33 bp, Homo sapiens
tgaaatcaagcgatgatggagtattgaaagatg

SEQ ID NO: 10751 - DNA, 33 bp, Homo sapiens
atgctaatggaaaacagtatgtatttgcaggca

SEQ ID NO: 10752 - DNA, 33 bp, Homo sapiens
atgactttgtttagcatgagcaagtgtcaggga

SEQ ID NO: 10753 - DNA, 33 bp, Homo sapiens
tatggagttttaataatgcaatgttgccaacaa

SEQ ID NO: 10754 - DNA, 33 bp, Homo sapiens
attgctttgaacaagataatttggtgaagtgag

SEQ ID NO: 10755 - DNA, 33 bp, Homo sapiens
cttaagttatgccttggaagcaaataatctgaa

SEQ ID NO: 10756 - DNA, 33 bp, Homo sapiens
tttcccaagactgctcgattcttacttcaggga

SEQ ID NO: 10757 - DNA, 33 bp, Homo sapiens
gcttatattttactcaggagaggcagaagagca

SEQ ID NO: 10758 - DNA, 33 bp, Homo sapiens
tccagacaacagaatattatccactggtttaaa

SEQ ID NO: 10759 - DNA, 33 bp, Homo sapiens
ttcagttttccttcaataagaaggctacgttct

SEQ ID NO: 10760 - DNA, 33 bp, Homo sapiens
ctccctgctgtgaattgaaacttgccgaagcag

SEQ ID NO: 10761 - DNA, 33 bp, Homo sapiens
cttaaataaaaaaggatcactgagattcgttta

SEQ ID NO: 10762 - DNA, 33 bp, Homo sapiens
atcatctttatcacactgcacagaaaacaagcc

SEQ ID NO: 10763 - DNA, 51 bp, Homo sapiens
tttagaagctgaaaaagtctgtcaggaccatgtacaacatccaatatccga

SEQ ID NO: 10764 - DNA, 51 bp, Homo sapiens
tgtttagtaaagccaagtcatactataggagaacacattcagatgcaagtg

SEQ ID NO: 10765 - DNA, 33 bp, Homo sapiens
taggctgaataaagtatcttgccctgcccactg

SEQ ID NO: 10766 - DNA, 33 bp, Homo sapiens
ctcctcttacccagtatatcatttccacattgc

SEQ ID NO: 10767 - DNA, 33 bp, Homo sapiens
cttctatgctcacggaggaccaaatttgccttg

SEQ ID NO: 10768 - DNA, 33 bp, Homo sapiens
agatggaaggaaaagatgctaggaaaaaatcaa

SEQ ID NO: 10769 - DNA, 33 bp, Homo sapiens
atatttatctaaacacgatgaagcaactgcttg

SEQ ID NO: 10770 - DNA, 33 bp, Homo sapiens
caaatctcagttgttatgggcatttatagctat

SEQ ID NO: 10771 - DNA, 33 bp, Homo sapiens
gagtcaagaagtaacatcctgggaatgattggc

SEQ ID NO: 10772 - DNA, 33 bp, Homo sapiens
attaaggagatctttatgtttttctagacacag

SEQ ID NO: 10773 - DNA, 33 bp, Homo sapiens
atagtgacaaataaatgaaagtgaaaggacttc

SEQ ID NO: 10774 - DNA, 33 bp, Homo sapiens
ttcagtttgtagtttataggagttattttgcag

SEQ ID NO: 10775 - DNA, 33 bp, Homo sapiens
ctgagaatctggtggataagaagccacagctca

SEQ ID NO: 10776 - DNA, 33 bp, Homo sapiens
ctgctgaacgtgttccgcttggcaccaacacca

SEQ ID NO: 10777 - DNA, 33 bp, Homo sapiens
ccctacaactgaccaatgaactggtgagtgaac

SEQ ID NO: 10778 - DNA, 33 bp, Homo sapiens
aattcccagtggaagctcttgctgtagaaagat

SEQ ID NO: 10779 - DNA, 33 bp, Homo sapiens
ttctcctcacaggccatgtactgttttcctgat

SEQ ID NO: 10780 - DNA, 33 bp, Homo sapiens
aattacgatattcctatacacggagcttcccct

SEQ ID NO: 10781 - DNA, 33 bp, Homo sapiens
atccttatatttagcatctggcaggtaatataa

SEQ ID NO: 10782 - DNA, 33 bp, Homo sapiens
ccatcagagcacttacgcggactagaggctttt

SEQ ID NO: 10783 - DNA, 33 bp, Homo sapiens
acatcaacttaccgcaggtctgagactatctcc

SEQ ID NO: 10784 - DNA, 33 bp, Homo sapiens
gagtcggtcgtcatcagggaaagaacactgtct

SEQ ID NO: 10785 - DNA, 33 bp, Homo sapiens
cttacgatattagacctctttacttaccatcct

SEQ ID NO: 10786 - DNA, 33 bp, Homo sapiens
ccacatacagtccttgcaaagaagaggagaaaa

SEQ ID NO: 10787 - DNA, 33 bp, Homo sapiens
agtcattgctaaattccaagtcacctgcatttc

SEQ ID NO: 10788 - DNA, 51 bp, Homo sapiens
attctgtctaagccagaacatagacgaggaagactaaaaccctattttgtt

SEQ ID NO: 10789 - DNA, 33 bp, Homo sapiens
ttcttggtgcaaaaatcaccatgttacctgtgt

SEQ ID NO: 10790 - DNA, 33 bp, Homo sapiens
gtatgcaaactcagatgaaagtgaggattatca

SEQ ID NO: 10791 - DNA, 33 bp, Homo sapiens
acacacagcttggttatctagtgatgttggtac

SEQ ID NO: 10792 - DNA, 33 bp, Homo sapiens
ctggtcaaagacttacgacattctttacatttc

SEQ ID NO: 10793 - DNA, 33 bp, Homo sapiens
gtcacaattaaacttgcaggaaggcccaggaat

SEQ ID NO: 10794 - DNA, 33 bp, Homo sapiens
ggttaatgaagaagaagacaccttatccttctg

SEQ ID NO: 10795 - DNA, 33 bp, Homo sapiens
ggacagatgggagggatacagaaagaaagcatg

SEQ ID NO: 10796 - DNA, 51 bp, Homo sapiens
cttatgtgagaaatagtggagggaatgagagatggtcagctttaaactgcc

SEQ ID NO: 10797 - DNA, 33 bp, Homo sapiens
agcgatttgagacctaggtgaaaaagaatatat

SEQ ID NO: 10798 - DNA, 51 bp, Homo sapiens
ttctttcgattcaacagttaggtaatactgttcttgtccattctgcaaatg

SEQ ID NO: 10799 - DNA, 33 bp, Homo sapiens
agccatgtctttcttctaccacaggctgcatgg

SEQ ID NO: 10800 - DNA, 51 bp, Homo sapiens
tttcctcatctggcagatgaacaaatgatgagcctgttgagcagcctcaca

SEQ ID NO: 10801 - DNA, 33 bp, Homo sapiens
tgtgccttctaaaatatacgggactcactggtc

SEQ ID NO: 10802 - DNA, 33 bp, Homo sapiens
ggtttgcttgaaagtagcattaacaggccaggt

SEQ ID NO: 10803 - DNA, 33 bp, Homo sapiens
ttttaaaatgagaaccgcaatcagagttaaatg

SEQ ID NO: 10804 - DNA, 33 bp, Homo sapiens
aagatgccctagtttccaggtgtgcacgtctcc

SEQ ID NO: 10805 - DNA, 33 bp, Homo sapiens
ctggtggccgccgtgatgcatgagcttggcctc

SEQ ID NO: 10806 - DNA, 33 bp, Homo sapiens
atattcactggagacattcaaccctcggctcac

SEQ ID NO: 10807 - DNA, 33 bp, Homo sapiens
cttgtacaaagtacaccgaagactatgacacta

SEQ ID NO: 10808 - DNA, 33 bp, Homo sapiens
acaaaggcatttcaaatcaataaccttaggcaa

SEQ ID NO: 10809 - DNA, 33 bp, Homo sapiens
taacaagttggctaacgagttcacatcttttaa

SEQ ID NO: 10810 - DNA, 33 bp, Homo sapiens
gggtcttccggttctatgaacacagccactgac

SEQ ID NO: 10811 - DNA, 33 bp, Homo sapiens
tcaagtaagttgactggcaatttttctaagcag

SEQ ID NO: 10812 - DNA, 33 bp, Homo sapiens
aattgtgtgttataaagagaaggtgtctgtctt

SEQ ID NO: 10813 - DNA, 33 bp, Homo sapiens
agccaaaacaacttgcggaaaataagtctacag

SEQ ID NO: 10814 - DNA, 33 bp, Homo sapiens
gacgaggctttacaacggtgatgtttgggtgag

SEQ ID NO: 10815 - DNA, 33 bp, Homo sapiens
ttgtattctccagtaatgtaagaacccacttaa

SEQ ID NO: 10816 - DNA, 51 bp, Homo sapiens
taaaagcacaagtctgtcctaactatagtagtattaaaatgtgactatttt

SEQ ID NO: 10817 - DNA, 33 bp, Homo sapiens
agctggtaaatggaaggatgaagacttgaatac

SEQ ID NO: 10818 - DNA, 33 bp, Homo sapiens
tgaggaccaatttctggcaaaatttgtgaacac

SEQ ID NO: 10819 - DNA, 33 bp, Homo sapiens
tgagcgggtcacaagaggagtgtcaggatcaag

SEQ ID NO: 10820 - DNA, 33 bp, Homo sapiens
attatactgaggaacatgtggaatgtaaactgt

SEQ ID NO: 10821 - DNA, 33 bp, Homo sapiens
gatgactctacctaacgattggagatccgtaac

SEQ ID NO: 10822 - DNA, 33 bp, Homo sapiens
agggtctgggttacacgatagagtcatacatat

SEQ ID NO: 10823 - DNA, 33 bp, Homo sapiens
tgtgcagtctctatacgccggctgaaagcagct

SEQ ID NO: 10824 - DNA, 33 bp, Homo sapiens
gaagaaaagaaaattataggactggacaggtgc

SEQ ID NO: 10825 - DNA, 33 bp, Homo sapiens
tgaacgttggcatacaggttgtttgagtccctg

SEQ ID NO: 10826 - DNA, 51 bp, Homo sapiens
taaacagggattcaagagaataaaagctaaagatactagaacttttaatga

SEQ ID NO: 10827 - DNA, 33 bp, Homo sapiens
ctgggaggacctgacatagcaaccatttatcag

SEQ ID NO: 10828 - DNA, 33 bp, Homo sapiens
ggggctttggtttatatgagtaatttgcataga

SEQ ID NO: 10829 - DNA, 33 bp, Homo sapiens
gtgtttttggttgatcgcctgcttatttgtaac

SEQ ID NO: 10830 - DNA, 33 bp, Homo sapiens
gccacgctcttttcaataatcgcctctcgtgag

SEQ ID NO: 10831 - DNA, 33 bp, Homo sapiens
cattgtggctgagtgcgcaccttgatgaagtgc

SEQ ID NO: 10832 - DNA, 33 bp, Homo sapiens
gaaaaatgagagccacgcaaaagggtttttttc

SEQ ID NO: 10833 - DNA, 33 bp, Homo sapiens
agcgatagcagagcattaaccaagtgcctgacc

SEQ ID NO: 10834 - DNA, 33 bp, Homo sapiens
catgtacctcatcaaatatcagtaactcacaac

SEQ ID NO: 10835 - DNA, 33 bp, Homo sapiens
ctctgcccttaacttatgcctcataaaatcagt

SEQ ID NO: 10836 - DNA, 33 bp, Homo sapiens
ttcctgttggcaattcgaagtgttggtgtcaaa

SEQ ID NO: 10837 - DNA, 33 bp, Homo sapiens
gtggtcaagtggatgattcaatgacttgccagg

SEQ ID NO: 10838 - DNA, 33 bp, Homo sapiens
cgcgagcaaacagacctggcttgacctcatgtc

SEQ ID NO: 10839 - DNA, 33 bp, Homo sapiens
ggccctcaaagcaagtgaagctcttcctgaaaa

SEQ ID NO: 10840 - DNA, 33 bp, Homo sapiens
ccatcattttgagttcgccatttttttctatgt

SEQ ID NO: 10841 - DNA, 51 bp, Homo sapiens
aatttccaaagagtagcctgattgctataaagccctctctgccttcacaat

SEQ ID NO: 10842 - DNA, 51 bp, Homo sapiens
aagtaactctggcctttaacgtttatgagcttagcaggtctctggccgagg

SEQ ID NO: 10843 - DNA, 33 bp, Homo sapiens
gaaataggtctttcatgaatctgtgagctcacc

SEQ ID NO: 10844 - DNA, 33 bp, Homo sapiens
atgtggcctcaataggtcagatctttaatggat

SEQ ID NO: 10845 - DNA, 33 bp, Homo sapiens
aagagcagtgggcacctaagtcaaaatgcagat

SEQ ID NO: 10846 - DNA, 33 bp, Homo sapiens
gcttggctgtgttatcgaaattcttgaggctcg

SEQ ID NO: 10847 - DNA, 33 bp, Homo sapiens
ctgtttgaagagggaacctaattgtatttaaca

SEQ ID NO: 10848 - DNA, 33 bp, Homo sapiens
gagtgccctctcatccgctctcagacttactcc

SEQ ID NO: 10849 - DNA, 33 bp, Homo sapiens
ctgcagagccctatcacagagctcctaacacgt

SEQ ID NO: 10850 - DNA, 33 bp, Homo sapiens
tcctagtttttggacagctttgagccgaatagg

SEQ ID NO: 10851 - DNA, 33 bp, Homo sapiens
atcagattttcagccatggttttcaaataaact

SEQ ID NO: 10852 - DNA, 33 bp, Homo sapiens
gtgtctgttgttctcatctgttaagtccatagg

SEQ ID NO: 10853 - DNA, 33 bp, Homo sapiens
tgctggtcatgctagaggaagccatgtaggcca

SEQ ID NO: 10854 - DNA, 33 bp, Homo sapiens
tgtccatccatacttcggaaattacttaacagt

SEQ ID NO: 10855 - DNA, 33 bp, Homo sapiens
gaatgaaaactgaaaattgagactgtaaatctg

SEQ ID NO: 10856 - DNA, 33 bp, Homo sapiens
tgagctagtggcaaaatgactggaggtggcccg

SEQ ID NO: 10857 - DNA, 33 bp, Homo sapiens
taccttgaaattcagctgccttgttttactctc

SEQ ID NO: 10858 - DNA, 33 bp, Homo sapiens
agaatattaatacatcgaacaacttcatcctta

SEQ ID NO: 10859 - DNA, 33 bp, Homo sapiens
caagctgagaaaaaaacggtgcaggaaacaagg

SEQ ID NO: 10860 - DNA, 33 bp, Homo sapiens
aaagggttagaactactgacctactaccatgtc

SEQ ID NO: 10861 - DNA, 33 bp, Homo sapiens
ataaaattggaattcatagttctgaaatcaaac

SEQ ID NO: 10862 - DNA, 33 bp, Homo sapiens
aatatatgatccttacgcattcagactcatcat

SEQ ID NO: 10863 - DNA, 33 bp, Homo sapiens
ccacctctgttgaacattaaagacaaaggagag

SEQ ID NO: 10864 - DNA, 33 bp, Homo sapiens
gctctcatttcaaaattagggactggccttaaa

SEQ ID NO: 10865 - DNA, 33 bp, Homo sapiens
catgtttgagtctttctatgaatatatgctttt

SEQ ID NO: 10866 - DNA, 33 bp, Homo sapiens
aattttaacaatttaagagtgtggtacagcttt

SEQ ID NO: 10867 - DNA, 33 bp, Homo sapiens
tcctcggttttcaggagaagttaggctagaaac

SEQ ID NO: 10868 - DNA, 33 bp, Homo sapiens
tgatccagcactgtattaggggttatggcaaca

SEQ ID NO: 10869 - DNA, 33 bp, Homo sapiens
acctgaccaactgtcattctccaaagacactta

SEQ ID NO: 10870 - DNA, 33 bp, Homo sapiens
gccctcatggttcttatagtttggtggcagaga

SEQ ID NO: 10871 - DNA, 33 bp, Homo sapiens
cttatgtcctgactgagcatgagctgagagccg

SEQ ID NO: 10872 - DNA, 33 bp, Homo sapiens
gtcaacactgcatgaaggtaactgagggggccg

SEQ ID NO: 10873 - DNA, 33 bp, Homo sapiens
tagaagcgaggaaacagtatgaggagatcaact

SEQ ID NO: 10874 - DNA, 33 bp, Homo sapiens
tccaaatagcttcataggtagtaactgtgaact

SEQ ID NO: 10875 - DNA, 33 bp, Homo sapiens
cccattccttcgaaaatataaatgggtcattag

SEQ ID NO: 10876 - DNA, 51 bp, Homo sapiens
aggctggaggtgggtttttagaagcggactcccagagagacagtgtctaga

SEQ ID NO: 10877 - DNA, 33 bp, Homo sapiens
acaggtcaacaattcatcctcttctcactgtct

SEQ ID NO: 10878 - DNA, 33 bp, Homo sapiens
gaacaatcactattgggcaggtacagcaatatg

SEQ ID NO: 10879 - DNA, 33 bp, Homo sapiens
gtacacaaacaaactatgctttctaatgttttc

SEQ ID NO: 10880 - DNA, 33 bp, Homo sapiens
gaaaagattagatggagaccaaaactgtgattg

SEQ ID NO: 10881 - DNA, 33 bp, Homo sapiens
acaaagtcagtcagatgaaagttcaagaccagt

SEQ ID NO: 10882 - DNA, 33 bp, Homo sapiens
cttgctgcagcctctacatcagaatttggtgct

SEQ ID NO: 10883 - DNA, 33 bp, Homo sapiens
agcatattaccatactgaacaattgtaacacaa

SEQ ID NO: 10884 - DNA, 33 bp, Homo sapiens
cttttctgtagtataatgtttgtgagattcatc

SEQ ID NO: 10885 - DNA, 33 bp, Homo sapiens
cagcagtaccactacatacaagatggatgaatc

SEQ ID NO: 10886 - DNA, 33 bp, Homo sapiens
ttcttacatttggctgtacttaccacaggtgct

SEQ ID NO: 10887 - DNA, 33 bp, Homo sapiens
tttcaattctagcccttaaattcatctgtggtg

SEQ ID NO: 10888 - DNA, 33 bp, Homo sapiens
actacctgggctatcagtaacattcactcaagg

SEQ ID NO: 10889 - DNA, 33 bp, Homo sapiens
ccttgtctctcacttatgcttttgatacactga

SEQ ID NO: 10890 - DNA, 33 bp, Homo sapiens
ctgggctagccattcagaaaaaaaactatcaat

SEQ ID NO: 10891 - DNA, 33 bp, Homo sapiens
aggataaaaccatcaccggaagaataagttcaa

SEQ ID NO: 10892 - DNA, 51 bp, Homo sapiens
caaatgtgacagagaaccagcatatgacagtgaataagcatgcagtctctg

SEQ ID NO: 10893 - DNA, 33 bp, Homo sapiens
tgacatcctcaaacacggtgaactgaaagcaaa

SEQ ID NO: 10894 - DNA, 33 bp, Homo sapiens
gctgcatctactagaacggctatatgttgtcca

SEQ ID NO: 10895 - DNA, 51 bp, Homo sapiens
aataaaattggatacctttttgtaagtatctccataagtttcaaaaatgtg

SEQ ID NO: 10896 - DNA, 33 bp, Homo sapiens
ctaacttttgtttttagcaaccatccttcatca

SEQ ID NO: 10897 - DNA, 33 bp, Homo sapiens
acagctcaagacccgagactatgtgcctctttt

SEQ ID NO: 10898 - DNA, 33 bp, Homo sapiens
ttagcctgaagagagattaaatttgttgaattc

SEQ ID NO: 10899 - DNA, 33 bp, Homo sapiens
caatgtctgacttgcataaataaggcagcttcc

SEQ ID NO: 10900 - DNA, 51 bp, Homo sapiens
cacagattacccctgagagcacatcgatatatattaccaaggatacttatc

SEQ ID NO: 10901 - DNA, 33 bp, Homo sapiens
gttctcagagcacatggatatatgaactggaat

SEQ ID NO: 10902 - DNA, 33 bp, Homo sapiens
tatgatccagacatcattctttttttactgaag

SEQ ID NO: 10903 - DNA, 33 bp, Homo sapiens
gccctagataactctggagataagttgccagtg

SEQ ID NO: 10904 - DNA, 33 bp, Homo sapiens
ttaagatggctgttaatgaaaagataagagata

SEQ ID NO: 10905 - DNA, 51 bp, Homo sapiens
gataaaagctcacagagcaaaggcagatagttcatactaagtagcataaag

SEQ ID NO: 10906 - DNA, 33 bp, Homo sapiens
aattatcactgacattgaagatcacttgaatct

SEQ ID NO: 10907 - DNA, 33 bp, Homo sapiens
gccgagtgtctttgcagtattggttaatcatct

SEQ ID NO: 10908 - DNA, 33 bp, Homo sapiens
tcattgaattggattacattgtctcctccattg

SEQ ID NO: 10909 - DNA, 51 bp, Homo sapiens
tctttcttaaatttcattatctaaccaattgtaaatgtatacaaaatgatt

SEQ ID NO: 10910 - DNA, 33 bp, Homo sapiens
attttaacagtaattgtaaacatcagatttagt

SEQ ID NO: 10911 - DNA, 33 bp, Homo sapiens
ttatcctcaagcagcaggggattttttttgcag

SEQ ID NO: 10912 - DNA, 33 bp, Homo sapiens
agaattttttcacacattaaggcgttcttcctc

SEQ ID NO: 10913 - DNA, 51 bp, Homo sapiens
cacatctctcatcatagccagctacgacttgggcagccttttcttatagtg

SEQ ID NO: 10914 - DNA, 33 bp, Homo sapiens
ttattattgtatcaaattcaccaaataagctct

SEQ ID NO: 10915 - DNA, 33 bp, Homo sapiens
tatccttgaagaaaactgtgatgtctctattaa

SEQ ID NO: 10916 - DNA, 33 bp, Homo sapiens
tgtgtaggattgtggagcggttgaccaagtcag

SEQ ID NO: 10917 - DNA, 33 bp, Homo sapiens
tatccaatgctatcaatgtactatattttaaac

SEQ ID NO: 10918 - DNA, 51 bp, Homo sapiens
tgggactcttaaattgagatctcccgctaggcaatattatagagtcactga

SEQ ID NO: 10919 - DNA, 33 bp, Homo sapiens
tttttcatatatacgaggtcagatccttgccac

SEQ ID NO: 10920 - DNA, 33 bp, Homo sapiens
tttttctttgtgaacacgtaaattgaaatgaaa

SEQ ID NO: 10921 - DNA, 33 bp, Homo sapiens
ccttagttggcacctggactacatttcaaggca

SEQ ID NO: 10922 - DNA, 33 bp, Homo sapiens
aaccattcactggaaagatattcttcaggttat

SEQ ID NO: 10923 - DNA, 33 bp, Homo sapiens
atgttaacaggcagtagaaaaattacctctttc

SEQ ID NO: 10924 - DNA, 51 bp, Homo sapiens
tcttagcagtgaacacctttgctattaagattatttcctctgctatgagtt

SEQ ID NO: 10925 - DNA, 51 bp, Homo sapiens
gaaatttgatctaaagagcacttaagatggaaggagtgaggaagacagaga

SEQ ID NO: 10926 - DNA, 33 bp, Homo sapiens
aaaaatactgtattcatgtcaaaaaggatagtg

SEQ ID NO: 10927 - DNA, 33 bp, Homo sapiens
gacatgttaaatgacatgaagaagatgtaataa

SEQ ID NO: 10928 - DNA, 33 bp, Homo sapiens
cccatgctatggactggaagaatgaatattgtt

SEQ ID NO: 10929 - DNA, 33 bp, Homo sapiens
ttcttgactctccttatagttggttactttttg

SEQ ID NO: 10930 - DNA, 51 bp, Homo sapiens
taggacaacatctcacaaaatcatatgttacaggaaatgcatgaacagcca

SEQ ID NO: 10931 - DNA, 51 bp, Homo sapiens
ctggtcttaccctagtcctatattctacccaaaagaaataaatcaaattgc

SEQ ID NO: 10932 - DNA, 51 bp, Homo sapiens
tagctcccatcacttattccaaatctataaaaactctaagacagattttaa

SEQ ID NO: 10933 - DNA, 33 bp, Homo sapiens
tgggattgatagcctactaatagaagcaaaatg

SEQ ID NO: 10934 - DNA, 51 bp, Homo sapiens
ggagaaaatgtgcagaaggttgacaggttactaagaacaaactaacagtac

SEQ ID NO: 10935 - DNA, 33 bp, Homo sapiens
ttagaaataacctaaattgattggacaaaagtt

SEQ ID NO: 10936 - DNA, 33 bp, Homo sapiens
ttttcagtgtttagtatcctattaagcaaaaga

SEQ ID NO: 10937 - DNA, 33 bp, Homo sapiens
atagtagtgtataaactgcacatatcgttttat

SEQ ID NO: 10938 - DNA, 33 bp, Homo sapiens
cctaaaatcacagttcgaagaatgtaacccttg

SEQ ID NO: 10939 - DNA, 33 bp, Homo sapiens
tgcacaaatgtcatcatgtcctcattgtgcaaa

SEQ ID NO: 10940 - DNA, 33 bp, Homo sapiens
ctagacaggacagtaagcgagggagaaatttgg

SEQ ID NO: 10941 - DNA, 33 bp, Homo sapiens
tgcttgctgttctcactgtagagccagccttcc

SEQ ID NO: 10942 - DNA, 33 bp, Homo sapiens
tcataaatcatagtgatgtaaaagcaggtttta

SEQ ID NO: 10943 - DNA, 33 bp, Homo sapiens
aaaactatttattttatgtcaacctatctagcc

SEQ ID NO: 10944 - DNA, 33 bp, Homo sapiens
tacctcattttattccgatttcatcaggtgtga

SEQ ID NO: 10945 - DNA, 33 bp, Homo sapiens
gtttcccattttcccctataaagatttacaaat

SEQ ID NO: 10946 - DNA, 33 bp, Homo sapiens
agtgaagctacagaaaggataattttggggttt

SEQ ID NO: 10947 - DNA, 33 bp, Homo sapiens
ttaggatgatgttgaatacattgaaatggagta

SEQ ID NO: 10948 - DNA, 33 bp, Homo sapiens
tttaaacctagtgagagcaaatcatcagctatg

SEQ ID NO: 10949 - DNA, 33 bp, Homo sapiens
ttgtatgagggaaaggcaatatgatctagctgc

SEQ ID NO: 10950 - DNA, 33 bp, Homo sapiens
taacaagttggactgagcacattgtatctcagg

SEQ ID NO: 10951 - DNA, 33 bp, Homo sapiens
ataatggaataaaagagtagagatggagaagat

SEQ ID NO: 10952 - DNA, 33 bp, Homo sapiens
aataagtagtcaaaattagtagagtagatttgg

SEQ ID NO: 10953 - DNA, 33 bp, Homo sapiens
gaaggctatgaaaacaggtaaagaagagcctac

SEQ ID NO: 10954 - DNA, 33 bp, Homo sapiens
atgcttatagaagagcgatgacaagcaaaattt

SEQ ID NO: 10955 - DNA, 33 bp, Homo sapiens
agaatagcaactggtagtaataggcaaaattca

SEQ ID NO: 10956 - DNA, 51 bp, Homo sapiens
gctttaaaaatacatttttaaataatgacaaatgtgatataaatcaatttt

SEQ ID NO: 10957 - DNA, 33 bp, Homo sapiens
ggaagtcttcatggaatgttatccaagttgctt

SEQ ID NO: 10958 - DNA, 51 bp, Homo sapiens
agcgaagaatcacagagaaacaatcttaaactgctgaaatttcctctccca

SEQ ID NO: 10959 - DNA, 33 bp, Homo sapiens
ctgaaagaattacacagcaatatgtaaaggtag

SEQ ID NO: 10960 - DNA, 33 bp, Homo sapiens
cctctgcttatgtttcgctcgcaccagctgggc

SEQ ID NO: 10961 - DNA, 33 bp, Homo sapiens
tgttcctttggccacattgtgatttacagttta

SEQ ID NO: 10962 - DNA, 33 bp, Homo sapiens
catttataaatccacccagcaaacatatgaggc

SEQ ID NO: 10963 - DNA, 33 bp, Homo sapiens
ttacagcctcactggggaatttgaccttactag

SEQ ID NO: 10964 - DNA, 51 bp, Homo sapiens
tcctattaccattacctgaactaaggcctatattaatccttcaactattac

SEQ ID NO: 10965 - DNA, 33 bp, Homo sapiens
tatatgaacagttgaacatttgtggattgttct

SEQ ID NO: 10966 - DNA, 33 bp, Homo sapiens
tatggttcctgggcaaccctgagatggagattt

SEQ ID NO: 10967 - DNA, 33 bp, Homo sapiens
aaactgaactatgatggaactacaacagatgct

SEQ ID NO: 10968 - DNA, 33 bp, Homo sapiens
agtcataaaaagggtatactgctgagactgcgt

SEQ ID NO: 10969 - DNA, 33 bp, Homo sapiens
ctttctcacactttacgctccagcaattctgaa

SEQ ID NO: 10970 - DNA, 33 bp, Homo sapiens
tatctttttctttatcgaactgtcatgttgccc

SEQ ID NO: 10971 - DNA, 33 bp, Homo sapiens
gtgggaatgctaatcatatctgtgtatcaacac

SEQ ID NO: 10972 - DNA, 33 bp, Homo sapiens
tgtacaatagagttcttaaacttactcctgcta

SEQ ID NO: 10973 - DNA, 33 bp, Homo sapiens
gagtataataaactaacatctcagtggtgatca

SEQ ID NO: 10974 - DNA, 33 bp, Homo sapiens
aagcagcaggaagcaccagatcattatccattt

SEQ ID NO: 10975 - DNA, 33 bp, Homo sapiens
gtgagttgatacccaattgaagagaagaaagga

SEQ ID NO: 10976 - DNA, 33 bp, Homo sapiens
cctagaaaaagtcttatgtactatctgaaagct

SEQ ID NO: 10977 - DNA, 33 bp, Homo sapiens
cacactaaatctccattaccacatgtgcataca

SEQ ID NO: 10978 - DNA, 33 bp, Homo sapiens
ccctgcgagtccctagtaagctgcctagtcttt

SEQ ID NO: 10979 - DNA, 33 bp, Homo sapiens
catggtacctcaaccagtagttaaccttccata

SEQ ID NO: 10980 - DNA, 33 bp, Homo sapiens
taacattgatgtttcacaaatttctattttacc

SEQ ID NO: 10981 - DNA, 33 bp, Homo sapiens
tattgaaattaatgaatagcactgaggcccaat

SEQ ID NO: 10982 - DNA, 33 bp, Homo sapiens
tccttggtgctgctcaggaatgcgttttattat

SEQ ID NO: 10983 - DNA, 51 bp, Homo sapiens
ttatcatcacaaacataaccatcaccgaaattagattttgctgtttcaggt

SEQ ID NO: 10984 - DNA, 51 bp, Homo sapiens
cttccttagatgttcatggccggcagcttaagaatcctaagacctcaactc

SEQ ID NO: 10985 - DNA, 33 bp, Homo sapiens
tcatgatgaaatataccctttctttgctgcccg

SEQ ID NO: 10986 - DNA, 33 bp, Homo sapiens
ctgtgtgttcacaaaataagcttggatggaaaa

SEQ ID NO: 10987 - DNA, 51 bp, Homo sapiens
agtagaaatgaatgtgcactaatgagctttattttctacacagttgcacta

SEQ ID NO: 10988 - DNA, 51 bp, Homo sapiens
ctctcttagaaggctcctaggaagatgtatgactacccaggtaactcagtc

SEQ ID NO: 10989 - DNA, 33 bp, Homo sapiens
taaaacaatctttctctaatcaacgaaaaggaa

SEQ ID NO: 10990 - DNA, 33 bp, Homo sapiens
atttattgtcctagaaggatgtgttcttaaaga

SEQ ID NO: 10991 - DNA, 51 bp, Homo sapiens
atcaggaataccaaagaattaatcttaactaatgtgattttgtttggggat

SEQ ID NO: 10992 - DNA, 33 bp, Homo sapiens
gagaaagaaataaaaggcatcaagctatctttc

SEQ ID NO: 10993 - DNA, 33 bp, Homo sapiens
gatattaaccccatgaggtatatgtttcacaaa

SEQ ID NO: 10994 - DNA, 33 bp, Homo sapiens
ttgtagactccaataattgtacttgctttttga

SEQ ID NO: 10995 - DNA, 51 bp, Homo sapiens
tttcttataacatggtctatactcaggccaacaactttcatgcacaatcac

SEQ ID NO: 10996 - DNA, 51 bp, Homo sapiens
gctgaactccagtcatgaaccgtcagctagctaatatctatcttctgtgag

SEQ ID NO: 10997 - DNA, 33 bp, Homo sapiens
tggggaatgctttaaatactgagacaggcagtt

SEQ ID NO: 10998 - DNA, 51 bp, Homo sapiens
cattctttcatttattcaaattgattaatgcgattatatggaaattaaaaa

SEQ ID NO: 10999 - DNA, 33 bp, Homo sapiens
agccttgagaaggaaagagacatggagcaaatc

SEQ ID NO: 11000 - DNA, 33 bp, Homo sapiens
gtataaaaatgcacactccttgaaagtaccact

SEQ ID NO: 11001 - DNA, 33 bp, Homo sapiens
catatagaaatagagatggaatgaggagatgga

SEQ ID NO: 11002 - DNA, 33 bp, Homo sapiens
acccaagggcacaagcgctagaaatcagtggtg

SEQ ID NO: 11003 - DNA, 33 bp, Homo sapiens
ctagaaacaccagtagtcaccgacagaaaatag

SEQ ID NO: 11004 - DNA, 33 bp, Homo sapiens
tgctcctgtggaccaagaagtaagaaaagtctc

SEQ ID NO: 11005 - DNA, 51 bp, Homo sapiens
gtactaaacgggaggaccaacacaggtaagtgcttcccaacccttccagac

SEQ ID NO: 11006 - DNA, 33 bp, Homo sapiens
tttcttgtattctaaatgaggttatgcattgtt

SEQ ID NO: 11007 - DNA, 33 bp, Homo sapiens
atttaaagacatactatcatgaaccacataatg

SEQ ID NO: 11008 - DNA, 33 bp, Homo sapiens
aacatactaacagggatggtttaaaagatgaga

SEQ ID NO: 11009 - DNA, 51 bp, Homo sapiens
tactctggtcattttcttctttatcgctgttccaagaccaccaggcaatta

SEQ ID NO: 11010 - DNA, 33 bp, Homo sapiens
tttctcatttcacaaacaacataaaggccaaag

SEQ ID NO: 11011 - DNA, 33 bp, Homo sapiens
taaaaggaatgctagagaacatgtactaatatt

SEQ ID NO: 11012 - DNA, 33 bp, Homo sapiens
tcttcagtggctaaaggatccatgactttctga

SEQ ID NO: 11013 - DNA, 33 bp, Homo sapiens
gaaatgattcgctgcctcttagaggtttagagc

SEQ ID NO: 11014 - DNA, 33 bp, Homo sapiens
acctagcgtataattccattcacgcaaagtgaa

SEQ ID NO: 11015 - DNA, 33 bp, Homo sapiens
tttttctgaatctaacgaagggtcttactttct

SEQ ID NO: 11016 - DNA, 33 bp, Homo sapiens
gcagatggcgagaaaggaagggtaggacacagg

SEQ ID NO: 11017 - DNA, 33 bp, Homo sapiens
ttgatcaaaatttgcagcactcatgtgggtcct

SEQ ID NO: 11018 - DNA, 33 bp, Homo sapiens
ttgggaaagagagcaagtcaggaaattcaacat

SEQ ID NO: 11019 - DNA, 33 bp, Homo sapiens
actctgccaaccgaaagcagcagagtttcagca

SEQ ID NO: 11020 - DNA, 33 bp, Homo sapiens
tcatattctatgacacggaacttaaaggtctca

SEQ ID NO: 11021 - DNA, 33 bp, Homo sapiens
tccacatttgggttagtattatagaaggcccac

SEQ ID NO: 11022 - DNA, 33 bp, Homo sapiens
tgtttaaaagccaagaggttgttatagttttaa

SEQ ID NO: 11023 - DNA, 33 bp, Homo sapiens
tccttcctatgaggaacgtcacatatttgtggg

SEQ ID NO: 11024 - DNA, 33 bp, Homo sapiens
acatctgaaggttaactatgtggcaatttgtac

SEQ ID NO: 11025 - DNA, 33 bp, Homo sapiens
tgcaacctagagtaaagtgagcccatagtctat

SEQ ID NO: 11026 - DNA, 33 bp, Homo sapiens
agaacaaattacatggtcattcaactctcattg

SEQ ID NO: 11027 - DNA, 33 bp, Homo sapiens
cagctgcccctttggataataggcttttattac

SEQ ID NO: 11028 - DNA, 33 bp, Homo sapiens
tgtgattcatgagtcaggtagcatctcatctaa

SEQ ID NO: 11029 - DNA, 33 bp, Homo sapiens
catcactgtcgggatgtacccctgcacgccctc

SEQ ID NO: 11030 - DNA, 33 bp, Homo sapiens
atacaaagtcatttgatggatgtgacactgggc

SEQ ID NO: 11031 - DNA, 33 bp, Homo sapiens
tatttaacttctacacggtatccctttatgatg

SEQ ID NO: 11032 - DNA, 33 bp, Homo sapiens
ggggctttctaaacaatgtaacccagtgcataa

SEQ ID NO: 11033 - DNA, 33 bp, Homo sapiens
gacagttaatacagatgagtccctcagcctccc

SEQ ID NO: 11034 - DNA, 33 bp, Homo sapiens
ccccgtgccccacgggtagaatcccagagagga

SEQ ID NO: 11035 - DNA, 33 bp, Homo sapiens
aaaacagtcgaagccagtgaaatcagacttgct

SEQ ID NO: 11036 - DNA, 33 bp, Homo sapiens
gggctatgacttagtggaagaggcaactcagga

SEQ ID NO: 11037 - DNA, 33 bp, Homo sapiens
acagtaaaacacagaccagtttcaaaagaaaac

SEQ ID NO: 11038 - DNA, 33 bp, Homo sapiens
ccaatgcatgaattaagtattcagcggagagtc

SEQ ID NO: 11039 - DNA, 33 bp, Homo sapiens
aaatatatttgcagaatactatgctgtttctca

SEQ ID NO: 11040 - DNA, 33 bp, Homo sapiens
gctacttgtcagaggatactgaattgaagagag

SEQ ID NO: 11041 - DNA, 33 bp, Homo sapiens
tatcagaatccattcagctagcatttttggaac

SEQ ID NO: 11042 - DNA, 33 bp, Homo sapiens
ttttgttattaaaaaaggttttgtgtatggctt

SEQ ID NO: 11043 - DNA, 33 bp, Homo sapiens
aaaacactggcaataatgaggcctacctgttat

SEQ ID NO: 11044 - DNA, 33 bp, Homo sapiens
tatctaccaccatgcagctgttaagcagggagg

SEQ ID NO: 11045 - DNA, 51 bp, Homo sapiens
tatataaacaactctcttcttaggattattcatttttcatcagtttaacta

SEQ ID NO: 11046 - DNA, 33 bp, Homo sapiens
atctcagcaggaccactgtgctttttctggact

SEQ ID NO: 11047 - DNA, 33 bp, Homo sapiens
gactgtcctattaatatggcaaatgtagtctct

SEQ ID NO: 11048 - DNA, 33 bp, Homo sapiens
aatttgcactttagaagaatctggagaattgaa

SEQ ID NO: 11049 - DNA, 33 bp, Homo sapiens
ttagcaaccttaatcatattgctactgttccct

SEQ ID NO: 11050 - DNA, 33 bp, Homo sapiens
gctatgtcaaatatactagcatgggagttagga

SEQ ID NO: 11051 - DNA, 33 bp, Homo sapiens
aagatttcttacataatgttgcaggatcatctt

SEQ ID NO: 11052 - DNA, 51 bp, Homo sapiens
caaaagaactgcagatgtagtctcctaactgtatagcacattgctttctat

SEQ ID NO: 11053 - DNA, 33 bp, Homo sapiens
ctcttcattctcattatcttttggcatatacag

SEQ ID NO: 11054 - DNA, 33 bp, Homo sapiens
tcccactggactataagctccacgagggaagaa

SEQ ID NO: 11055 - DNA, 51 bp, Homo sapiens
atgaaaattccttcttggtggctagcaagtttgaaaatttctgaatttatt

SEQ ID NO: 11056 - DNA, 33 bp, Homo sapiens
tggatgaatacttttctcagtcagaaatcacta

SEQ ID NO: 11057 - DNA, 51 bp, Homo sapiens
aagctaaatagtaggtaaccactcagtaatctggacccaggctccctgttt

SEQ ID NO: 11058 - DNA, 33 bp, Homo sapiens
tgtatatacatccacatattgtgcggtatcagc

SEQ ID NO: 11059 - DNA, 33 bp, Homo sapiens
aggattctggtcttctgacaactggttggatat

SEQ ID NO: 11060 - DNA, 33 bp, Homo sapiens
tggttcacccatctgtgaaaggagagtaacagc

SEQ ID NO: 11061 - DNA, 33 bp, Homo sapiens
gtccaggaatccttccggcagctccgcttcgca

SEQ ID NO: 11062 - DNA, 33 bp, Homo sapiens
ttccagaacaaaagctgaactctttcgtgtggc

SEQ ID NO: 11063 - DNA, 33 bp, Homo sapiens
attgtaaggtgccacatccattaaatagcacct

SEQ ID NO: 11064 - DNA, 51 bp, Homo sapiens
ttccagataattctcaaaccacatggcaggtgttactgaatgctggcaggg

SEQ ID NO: 11065 - DNA, 33 bp, Homo sapiens
attaactgtcaaataagaaaatctatggatgaa

SEQ ID NO: 11066 - DNA, 33 bp, Homo sapiens
aaaactggggtaaatatgttcaggaattagacc

SEQ ID NO: 11067 - DNA, 33 bp, Homo sapiens
atttattgaatgaataggaaggataaacacacg

SEQ ID NO: 11068 - DNA, 33 bp, Homo sapiens
tctgaacattcttccctgattttgaacagttgt

SEQ ID NO: 11069 - DNA, 33 bp, Homo sapiens
gtgaagaggcacttacgctacagttgcagcaat

SEQ ID NO: 11070 - DNA, 33 bp, Homo sapiens
agaaactattctgatatggcttattttccagtg

SEQ ID NO: 11071 - DNA, 51 bp, Homo sapiens
aagactcgaagaagatttccttttggagtggctgatcaaacatcttccact

SEQ ID NO: 11072 - DNA, 33 bp, Homo sapiens
gagggaaaagttgaaagacacactgaactaaag

SEQ ID NO: 11073 - DNA, 51 bp, Homo sapiens
acatgatcaaaagcaatataatggagctagaaatcttttgaacaaatagtg

SEQ ID NO: 11074 - DNA, 51 bp, Homo sapiens
taagacataaatgtaaccagatctatagttaaatgatccctctaacaacag

SEQ ID NO: 11075 - DNA, 33 bp, Homo sapiens
ggatgtctagtctttagcaggcactgtctttga

SEQ ID NO: 11076 - DNA, 51 bp, Homo sapiens
tagaatcaccaggtcttggaactgatgggaagttgagaaagatggcaacaa

SEQ ID NO: 11077 - DNA, 33 bp, Homo sapiens
tatcatttttcagatatgtgactcaagttacca

SEQ ID NO: 11078 - DNA, 33 bp, Homo sapiens
tgagcctgaacctcaagataattaaaaccacag

SEQ ID NO: 11079 - DNA, 33 bp, Homo sapiens
ctgtatgtaaactgatgagcctcatgcagacgc

SEQ ID NO: 11080 - DNA, 33 bp, Homo sapiens
aggaggaattcgcccttaacttgcttgccgcct

SEQ ID NO: 11081 - DNA, 51 bp, Homo sapiens
tctagaagttcaatgaacctcagcatagaataaacacaatgaaatccatac

SEQ ID NO: 11082 - DNA, 33 bp, Homo sapiens
ctctcttttctctccatatataacttccctatg

SEQ ID NO: 11083 - DNA, 33 bp, Homo sapiens
gaatgaatgataaatggatgtgtaactgagcca

SEQ ID NO: 11084 - DNA, 33 bp, Homo sapiens
gaaataaaagttgagcggaacaagtaaacactc

SEQ ID NO: 11085 - DNA, 33 bp, Homo sapiens
taattgatcactcaccgattttaatatagtggc

SEQ ID NO: 11086 - DNA, 33 bp, Homo sapiens
agcaggttcctaacacgctatgatatttaacag

SEQ ID NO: 11087 - DNA, 33 bp, Homo sapiens
caagctgaacaaaggccaattattacacgatat

SEQ ID NO: 11088 - DNA, 33 bp, Homo sapiens
ttcttgtccaggtgcctcagctaagttaggtac

SEQ ID NO: 11089 - DNA, 33 bp, Homo sapiens
ctgcttgggagtttgaccatggcaactcaagag

SEQ ID NO: 11090 - DNA, 33 bp, Homo sapiens
gaagatgttgactaatgaaatacactgtcattt

SEQ ID NO: 11091 - DNA, 33 bp, Homo sapiens
cccaggttttatgcagtatctttatttgaaggt

SEQ ID NO: 11092 - DNA, 33 bp, Homo sapiens
acattgtacaactccagaggctccttacacaga

SEQ ID NO: 11093 - DNA, 33 bp, Homo sapiens
taggggaagaaaggtctagtagaaggtggtaac

SEQ ID NO: 11094 - DNA, 33 bp, Homo sapiens
taaggatagattcctggaacagatccttctttc

SEQ ID NO: 11095 - DNA, 51 bp, Homo sapiens
acaaatacttttttaattcaagtaatgtacactgcaactggatacgttctt

SEQ ID NO: 11096 - DNA, 33 bp, Homo sapiens
agataaaaacattccatactcaaaaccacagca

SEQ ID NO: 11097 - DNA, 51 bp, Homo sapiens
gtaagatcatgtaactactttgcttgaaatcctctcccagtttcccatctc

SEQ ID NO: 11098 - DNA, 33 bp, Homo sapiens
ccctacccacactgtatgaccagctccgcagta

SEQ ID NO: 11099 - DNA, 33 bp, Homo sapiens
gttcttacaatgatcctagggccctacataatc

SEQ ID NO: 11100 - DNA, 33 bp, Homo sapiens
gagttgttgaagaaaagagactggatttcaggt

SEQ ID NO: 11101 - DNA, 33 bp, Homo sapiens
ttaattccttgcaagaggattgtctcaaatgat

SEQ ID NO: 11102 - DNA, 33 bp, Homo sapiens
ggcttgaaggaaaggatgtttagcaggaaccag

SEQ ID NO: 11103 - DNA, 33 bp, Homo sapiens
aatgaacctgagagtcgccacttaagatactgt

SEQ ID NO: 11104 - DNA, 33 bp, Homo sapiens
actttgttctggcctatagtaaagcgcctttca

SEQ ID NO: 11105 - DNA, 51 bp, Homo sapiens
tagaataaatagaattatacctctatgtgttataagcctcttaacagccac

SEQ ID NO: 11106 - DNA, 33 bp, Homo sapiens
acgactctgggacttatgttgtgcagatttagt

SEQ ID NO: 11107 - DNA, 33 bp, Homo sapiens
gtgttacatctagaaaggctttgcctaacccaa

SEQ ID NO: 11108 - DNA, 33 bp, Homo sapiens
atacaatggtctgagatgaagtttgttgggttt

SEQ ID NO: 11109 - DNA, 33 bp, Homo sapiens
aagagctttaaaggcagggttgagctatacaag

SEQ ID NO: 11110 - DNA, 33 bp, Homo sapiens
ggcaaaagtcacctcagagtttatgtagcccag

SEQ ID NO: 11111 - DNA, 51 bp, Homo sapiens
atcctacccatatgacttagctagatataaattttaaattaaagtatcatt

SEQ ID NO: 11112 - DNA, 33 bp, Homo sapiens
caaaacaaaagatggcgacgtactttgagtagc

SEQ ID NO: 11113 - DNA, 33 bp, Homo sapiens
atcgtgagaacagcactaaaggggcaaattcac

SEQ ID NO: 11114 - DNA, 33 bp, Homo sapiens
aagatccagtactgactgaagattttctacaac

SEQ ID NO: 11115 - DNA, 33 bp, Homo sapiens
aatagattactgcttgtaaagtgcttaatatat

SEQ ID NO: 11116 - DNA, 33 bp, Homo sapiens
tctccgtcagaattcctctgcagttgtttgtgg

SEQ ID NO: 11117 - DNA, 33 bp, Homo sapiens
gggcaaaaatcacgtatgtaagtttgggcttat

SEQ ID NO: 11118 - DNA, 33 bp, Homo sapiens
tagtgctctagtcccatgtaacaaatcttaaaa

SEQ ID NO: 11119 - DNA, 33 bp, Homo sapiens
ggctagttatcccagcgaatagcgagtcctgtc

SEQ ID NO: 11120 - DNA, 33 bp, Homo sapiens
tagttgttaccctcaagaagctactgttacctc

SEQ ID NO: 11121 - DNA, 51 bp, Homo sapiens
ttcctttgacaacatgttttgtaccgagctttttagtgcccttcttttaaa

SEQ ID NO: 11122 - DNA, 33 bp, Homo sapiens
ggtcataacaacaaacgctaactcatcacacac

SEQ ID NO: 11123 - DNA, 33 bp, Homo sapiens
aaggccagatcagatatgtgcaccgatccacaa

SEQ ID NO: 11124 - DNA, 33 bp, Homo sapiens
ttattgtcacaaattatcagtatttttgcagtg

SEQ ID NO: 11125 - DNA, 33 bp, Homo sapiens
gcctccatctactttatagtgaacaggcttgta

SEQ ID NO: 11126 - DNA, 33 bp, Homo sapiens
cttgctctataatctaccatactgtatgtccta

SEQ ID NO: 11127 - DNA, 33 bp, Homo sapiens
gatttgttttactcaagtgcactgaaaattctg

SEQ ID NO: 11128 - DNA, 33 bp, Homo sapiens
acttctcaaacaaaactgattgtcactttcaac

SEQ ID NO: 11129 - DNA, 33 bp, Homo sapiens
catggctggtggcgcaggaaactttcaatcatg

SEQ ID NO: 11130 - DNA, 33 bp, Homo sapiens
ggcggtcggtattcaacgaatctgctctgatta

SEQ ID NO: 11131 - DNA, 33 bp, Homo sapiens
tgccagatatatgagcggccctatcacagttcc

SEQ ID NO: 11132 - DNA, 33 bp, Homo sapiens
catctctacaaatatggaaacaaaaatagcagg

SEQ ID NO: 11133 - DNA, 33 bp, Homo sapiens
gggggacaggacagaagactgtgcgactgtgac

SEQ ID NO: 11134 - DNA, 33 bp, Homo sapiens
tgtagcttcatatttacctctcactgtatgccc

SEQ ID NO: 11135 - DNA, 33 bp, Homo sapiens
cctaccccatcactcatggcagaaactaaggcc

SEQ ID NO: 11136 - DNA, 33 bp, Homo sapiens
gtgtcaccataacttagacatgaagaacactcc

SEQ ID NO: 11137 - DNA, 33 bp, Homo sapiens
ccaaggtgcagaaccatccacattacttgtaga

SEQ ID NO: 11138 - DNA, 33 bp, Homo sapiens
cacagcaacatgtacaggttaccaagtcattgt

SEQ ID NO: 11139 - DNA, 33 bp, Homo sapiens
gcaaaacctgaaactctatgtaggaagctatgt

SEQ ID NO: 11140 - DNA, 33 bp, Homo sapiens
caacacttttaaaggcgatgtcttgttgggtcc

SEQ ID NO: 11141 - DNA, 51 bp, Homo sapiens
tacacctaggtgtttgctatgtcgagtaattcattgtatggcaaattcatc

SEQ ID NO: 11142 - DNA, 33 bp, Homo sapiens
tactagtgagtttccatgaaaaatctcttttat

SEQ ID NO: 11143 - DNA, 33 bp, Homo sapiens
acacatgattttgtggcataactggcctatgtt

SEQ ID NO: 11144 - DNA, 33 bp, Homo sapiens
tttgacatcttctaccgagcttgcagaatatct

SEQ ID NO: 11145 - DNA, 33 bp, Homo sapiens
tgcctacacatagacagtaaacaaatgtgtggt

SEQ ID NO: 11146 - DNA, 33 bp, Homo sapiens
tcaaacactcaccattgaaaacctcattaaatt

SEQ ID NO: 11147 - DNA, 33 bp, Homo sapiens
gagttgaaaaagcggagtacgcaagaataactt

SEQ ID NO: 11148 - DNA, 33 bp, Homo sapiens
ctcctggttgttcaagtctgttgttttgttgac

SEQ ID NO: 11149 - DNA, 51 bp, Homo sapiens
cagaggaagctctccatgtaacacacagtgcagtgaggagtgagaaccaca

SEQ ID NO: 11150 - DNA, 33 bp, Homo sapiens
ttttgcccagatattcgaatgttatcttaataa

SEQ ID NO: 11151 - DNA, 33 bp, Homo sapiens
gaaaacagtgaactcagggatactaattcccgg

SEQ ID NO: 11152 - DNA, 33 bp, Homo sapiens
aatttactttcttatccacagtgtgacatggct

SEQ ID NO: 11153 - DNA, 33 bp, Homo sapiens
aatgcagaagcttaatgatcaaaaccagggaat

SEQ ID NO: 11154 - DNA, 33 bp, Homo sapiens
gaaaagcttgtatttcgcactgatccttaagat

SEQ ID NO: 11155 - DNA, 33 bp, Homo sapiens
tcttgcaaattcagcatagtgagttctctacaa

SEQ ID NO: 11156 - DNA, 33 bp, Homo sapiens
ctgtaatcagaaataatgcaaaaatgtctgcac

SEQ ID NO: 11157 - DNA, 33 bp, Homo sapiens
cctccattccttcgacgccaccattttaaaggg

SEQ ID NO: 11158 - DNA, 33 bp, Homo sapiens
ttcttttgctggcactgacttaatcacctcaat

SEQ ID NO: 11159 - DNA, 33 bp, Homo sapiens
atcctaattgtaattatcacctgtctgtatcag

SEQ ID NO: 11160 - DNA, 33 bp, Homo sapiens
tgcaagtgccttattatgcatcagtaaaacagg

SEQ ID NO: 11161 - DNA, 33 bp, Homo sapiens
gcaggtaaggagcacatggttgaatctcagaga

SEQ ID NO: 11162 - DNA, 33 bp, Homo sapiens
agccacatgtgactactgagtattggaaacagc

SEQ ID NO: 11163 - DNA, 33 bp, Homo sapiens
atcctttccctaaaccgaacagtctttctcagt

SEQ ID NO: 11164 - DNA, 33 bp, Homo sapiens
gaataattgctgagccgctaaagaagaaaatac

SEQ ID NO: 11165 - DNA, 33 bp, Homo sapiens
gattggatgcatcctacaactgatactgaccta

SEQ ID NO: 11166 - DNA, 33 bp, Homo sapiens
gtgaatcatttaaccattcaaaacatagctggt

SEQ ID NO: 11167 - DNA, 33 bp, Homo sapiens
tagataaaatcctgcgtataaatggttatattg

SEQ ID NO: 11168 - DNA, 33 bp, Homo sapiens
aatttgcttctggcaataaatgtgcctaggtcc

SEQ ID NO: 11169 - DNA, 33 bp, Homo sapiens
atttcacaaagccttatctcagaaaagttcatc

SEQ ID NO: 11170 - DNA, 33 bp, Homo sapiens
ggtacctgaattcaactgttcattcaactacaa

SEQ ID NO: 11171 - DNA, 33 bp, Homo sapiens
caagatgaggacactgtagataggaagtaatgc

SEQ ID NO: 11172 - DNA, 33 bp, Homo sapiens
acagtttgccagtgaatgagttaccatgaggga

SEQ ID NO: 11173 - DNA, 33 bp, Homo sapiens
tgtgaaaacatggagacgtgttcagggatggag

SEQ ID NO: 11174 - DNA, 33 bp, Homo sapiens
ttaatacagaaacatacaatcaagtactgcata

SEQ ID NO: 11175 - DNA, 33 bp, Homo sapiens
ttctactgacttcctacgtttttagacaaagtt

SEQ ID NO: 11176 - DNA, 33 bp, Homo sapiens
aatgggaaagggaaaagtcatcaagcttctctc

SEQ ID NO: 11177 - DNA, 33 bp, Homo sapiens
ttactaaatacagcaaggttctggcagcttcag

SEQ ID NO: 11178 - DNA, 33 bp, Homo sapiens
gcagttgttcttccaattggaggccagagtgtg

SEQ ID NO: 11179 - DNA, 33 bp, Homo sapiens
tttaggcaaatagaggtaaagcagagaactttc

SEQ ID NO: 11180 - DNA, 33 bp, Homo sapiens
ctaccttacccacaaatataggccctccttatc

SEQ ID NO: 11181 - DNA, 33 bp, Homo sapiens
gacgtaccatctcctaccacactggtgtcaggg

SEQ ID NO: 11182 - DNA, 33 bp, Homo sapiens
tgatagtttgggaaatgagaatcaagctgtaac

SEQ ID NO: 11183 - DNA, 33 bp, Homo sapiens
atgcagtaatttaccagcacgaaaatgtgacca

SEQ ID NO: 11184 - DNA, 33 bp, Homo sapiens
tggtggagcagacgcagagaccaaatgacttaa

SEQ ID NO: 11185 - DNA, 33 bp, Homo sapiens
atgggtcagaaatacagcataaatttgttggat

SEQ ID NO: 11186 - DNA, 33 bp, Homo sapiens
taaatgtgctttcaactagcaaatcatttccaa

SEQ ID NO: 11187 - DNA, 33 bp, Homo sapiens
atgttgcaagaagctttaaagtggttatgaatt

SEQ ID NO: 11188 - DNA, 33 bp, Homo sapiens
acattgaatatgggactcaaatgttctatttaa

SEQ ID NO: 11189 - DNA, 33 bp, Homo sapiens
gaggaaagcgagattatactaaggttttgttaa

SEQ ID NO: 11190 - DNA, 33 bp, Homo sapiens
ttattcattatatagattccctcagcctctttc

SEQ ID NO: 11191 - DNA, 33 bp, Homo sapiens
tgtatttgtggactcattcgggctataaagtga

SEQ ID NO: 11192 - DNA, 33 bp, Homo sapiens
tgcaaatatgtaaacagggacacctttacctga

SEQ ID NO: 11193 - DNA, 33 bp, Homo sapiens
tgtgaatgcaaaaccattgatgaaatgtggtac

SEQ ID NO: 11194 - DNA, 51 bp, Homo sapiens
gttcaatgaaaataatcaccaagtaggataatgaagtaaaacactgcttac

SEQ ID NO: 11195 - DNA, 51 bp, Homo sapiens
atgatgtctgatacatagtttggtgtcaatttttgtgatacttatatcctt

SEQ ID NO: 11196 - DNA, 33 bp, Homo sapiens
cctcctccaacacacatggatggcatgagattt

SEQ ID NO: 11197 - DNA, 33 bp, Homo sapiens
atcatattagagactatctttacaggacttgat

SEQ ID NO: 11198 - DNA, 33 bp, Homo sapiens
tgtcatttttgaagaatgcaacctttaaccctt

SEQ ID NO: 11199 - DNA, 33 bp, Homo sapiens
aaccagtttctccagcgaggtaggaatggaaat

SEQ ID NO: 11200 - DNA, 33 bp, Homo sapiens
tttactgtcgctagtaggcagttaatcaacaat

SEQ ID NO: 11201 - DNA, 33 bp, Homo sapiens
gcataagcaattaatgcatattttgtaggctac

SEQ ID NO: 11202 - DNA, 33 bp, Homo sapiens
agtatggtgttcatacggcagggcaatctgatc

SEQ ID NO: 11203 - DNA, 51 bp, Homo sapiens
ttgcttggtaaatgaagttgaataatataacacatagaagacatttaacaa

SEQ ID NO: 11204 - DNA, 33 bp, Homo sapiens
gtccctgttggagacagatacatggttcccaga

SEQ ID NO: 11205 - DNA, 33 bp, Homo sapiens
aggctaaacactgttagaaggacatgatcatga

SEQ ID NO: 11206 - DNA, 33 bp, Homo sapiens
gaaagatgtaccactggagtataatagagagtg

SEQ ID NO: 11207 - DNA, 33 bp, Homo sapiens
ttcttaacattatgcagcatataggccaaatgg

SEQ ID NO: 11208 - DNA, 33 bp, Homo sapiens
tgttttctctgtcagatcaatttgtttttctta

SEQ ID NO: 11209 - DNA, 33 bp, Homo sapiens
tggaagttctcattgctctctccatatcccgga

SEQ ID NO: 11210 - DNA, 33 bp, Homo sapiens
tgtagcttcaaagttagagcccctctctgggtg

SEQ ID NO: 11211 - DNA, 33 bp, Homo sapiens
ctgctgcttagttgcattccgatatgcctccct

SEQ ID NO: 11212 - DNA, 33 bp, Homo sapiens
aagataaaacagatacggattctgcctacctgc

SEQ ID NO: 11213 - DNA, 33 bp, Homo sapiens
caggtgaattcagggatcaaagctgttttgtgt

SEQ ID NO: 11214 - DNA, 33 bp, Homo sapiens
gcgacaacgacaaggataaggcctggacaaagc

SEQ ID NO: 11215 - DNA, 33 bp, Homo sapiens
tcctatgccatctaaagttgctggaaagaggtc

SEQ ID NO: 11216 - DNA, 33 bp, Homo sapiens
tgacctcctaagggaagtaagtcctgcagaagt

SEQ ID NO: 11217 - DNA, 33 bp, Homo sapiens
tacatttgaaatgtgatggctttgccaaatgag

SEQ ID NO: 11218 - DNA, 33 bp, Homo sapiens
ggcatgggccaatcaagagaattttggcttacc

SEQ ID NO: 11219 - DNA, 33 bp, Homo sapiens
taaagtggacaatcaattgacgttagctgtagt

SEQ ID NO: 11220 - DNA, 33 bp, Homo sapiens
ttccttgcaaaattaagagacaggcttaaagag

SEQ ID NO: 11221 - DNA, 33 bp, Homo sapiens
atcatttccttttcaggagtctacaggtaaaaa

SEQ ID NO: 11222 - DNA, 33 bp, Homo sapiens
ctgtctcaagaaaaaagaagtgactcaccaagt

SEQ ID NO: 11223 - DNA, 33 bp, Homo sapiens
cctcaataaccaggtatagagtgagcacaacaa

SEQ ID NO: 11224 - DNA, 33 bp, Homo sapiens
ctgaaaatagcaagtatgggtaacaacgtggag

SEQ ID NO: 11225 - DNA, 33 bp, Homo sapiens
cagtctgcaagactcgtccagtgcagactttgc

SEQ ID NO: 11226 - DNA, 33 bp, Homo sapiens
tttctatgtggacatctgatatatttgtcccta

SEQ ID NO: 11227 - DNA, 33 bp, Homo sapiens
attccgtgatcctgaatactgccacccatcagt

SEQ ID NO: 11228 - DNA, 33 bp, Homo sapiens
ggcaaatctctagttatgtagtcatatcagcag

SEQ ID NO: 11229 - DNA, 33 bp, Homo sapiens
cctgaaacttgctgaatgttgaagtgaaggtca

SEQ ID NO: 11230 - DNA, 33 bp, Homo sapiens
tgaagcatcctccaagcagagatcaattaaaag

SEQ ID NO: 11231 - DNA, 33 bp, Homo sapiens
gcagcttgtttgagacgctgaaatatgaatttt

SEQ ID NO: 11232 - DNA, 33 bp, Homo sapiens
ggtcccaattctgtactgagctagctgacatta

SEQ ID NO: 11233 - DNA, 33 bp, Homo sapiens
gtacagcttgattcagtatatatccaacacctg

SEQ ID NO: 11234 - DNA, 33 bp, Homo sapiens
ctctctttgataactctgagccctaaaccagtg

SEQ ID NO: 11235 - DNA, 33 bp, Homo sapiens
agcagtcaccgagggagccaacggaacaagaca

SEQ ID NO: 11236 - DNA, 33 bp, Homo sapiens
actctgggcccatttagagcctacagcaggtgc

SEQ ID NO: 11237 - DNA, 33 bp, Homo sapiens
tcttgtctgaaacatacataactcacagacaga

SEQ ID NO: 11238 - DNA, 33 bp, Homo sapiens
tgaccaaaaactagaatgtggtgcgtggctccc

SEQ ID NO: 11239 - DNA, 33 bp, Homo sapiens
actcaatatattattacgagagtggctcagttt

SEQ ID NO: 11240 - DNA, 33 bp, Homo sapiens
gttcctactacattcagaactggttaggtcttt

SEQ ID NO: 11241 - DNA, 33 bp, Homo sapiens
caggatcaaatgtccagtgaaattcaacccaat

SEQ ID NO: 11242 - DNA, 51 bp, Homo sapiens
tgaaagcacctctattccagccattgtcattatccattatcattaatgatc

SEQ ID NO: 11243 - DNA, 33 bp, Homo sapiens
tcaggtattttatagcgaacttctatgtagaat

SEQ ID NO: 11244 - DNA, 33 bp, Homo sapiens
agatgcagtgaaggaagacgtttgaaatgctcc

SEQ ID NO: 11245 - DNA, 33 bp, Homo sapiens
aaagagattagaatccgaggaaattgtggtaca

SEQ ID NO: 11246 - DNA, 33 bp, Homo sapiens
atcactaagaaaaatctgtagactgtgagaata

SEQ ID NO: 11247 - DNA, 33 bp, Homo sapiens
gtagctacagtcacaagttaacaattatcaggg

SEQ ID NO: 11248 - DNA, 51 bp, Homo sapiens
caccaatacagataatataaacgcatatgaaacaatcaggtcatctgtttc

SEQ ID NO: 11249 - DNA, 33 bp, Homo sapiens
accagtgtaactccaattgattaccccatcata

SEQ ID NO: 11250 - DNA, 51 bp, Homo sapiens
tagttattcaacatccatcaaataagataatatcagaaatatgcataccac

SEQ ID NO: 11251 - DNA, 33 bp, Homo sapiens
attctcactgaaatgagtatggaacagagggaa

SEQ ID NO: 11252 - DNA, 33 bp, Homo sapiens
gaaagatacaaagtactgattgtgcgtgtgtct

SEQ ID NO: 11253 - DNA, 33 bp, Homo sapiens
agttggtacacagcaagtgcttaatcagtgaat

SEQ ID NO: 11254 - DNA, 33 bp, Homo sapiens
ttcagagcctaaaatagagtggttgagtcaggg

SEQ ID NO: 11255 - DNA, 33 bp, Homo sapiens
ggtaaggagccaaatcgagctgtctctggtgga

SEQ ID NO: 11256 - DNA, 33 bp, Homo sapiens
ctgtgagttggaatggccacttctaaaaacaaa

SEQ ID NO: 11257 - DNA, 33 bp, Homo sapiens
gcacaggaagcctgtatatggatttctctagac

SEQ ID NO: 11258 - DNA, 33 bp, Homo sapiens
tttacaatcactataatgcaggaaaataccaaa

SEQ ID NO: 11259 - DNA, 33 bp, Homo sapiens
cgtgtctgcagaggcatgtgtaaagtgatgcta

SEQ ID NO: 11260 - DNA, 51 bp, Homo sapiens
attacaaacctatttggaaccagtgtaactcataggacccagaagaggcaa

SEQ ID NO: 11261 - DNA, 51 bp, Homo sapiens
tgttctggaagctctacttcaatgggacttatcctctgtaggaatcttgca

SEQ ID NO: 11262 - DNA, 33 bp, Homo sapiens
acaagactggtccaaattaaagtgccgtcgtcc

SEQ ID NO: 11263 - DNA, 51 bp, Homo sapiens
tcctttctcttcattatttttgctatataaactctagtatctttttttttg

SEQ ID NO: 11264 - DNA, 51 bp, Homo sapiens
agatgtactcccaaaagctgtgtaaggcaaaaagaaagggaaggcaggatt

SEQ ID NO: 11265 - DNA, 33 bp, Homo sapiens
agatatgtcattgaaagtaaatggaaaaggccg

SEQ ID NO: 11266 - DNA, 33 bp, Homo sapiens
atccccaccaggaacagtgacaatgccagttct

SEQ ID NO: 11267 - DNA, 51 bp, Homo sapiens
ggtggcaacaaagagtcatgatttataatctcagatgcttggggttaatag

SEQ ID NO: 11268 - DNA, 33 bp, Homo sapiens
gatatataaaagaaacgagagtccaacaatccc

SEQ ID NO: 11269 - DNA, 33 bp, Homo sapiens
tataagaatgagaaaatggtttgctttgtttcc

SEQ ID NO: 11270 - DNA, 33 bp, Homo sapiens
agccccctgtgaataacccattcccaagatctt

SEQ ID NO: 11271 - DNA, 33 bp, Homo sapiens
ttgagaaaaggatgaagagcaaaagccttagat

SEQ ID NO: 11272 - DNA, 33 bp, Homo sapiens
taaaccttttgaatgcggagactatcttgtatg

SEQ ID NO: 11273 - DNA, 33 bp, Homo sapiens
gaaccaagaacacagctgaatcacagtacagga

SEQ ID NO: 11274 - DNA, 33 bp, Homo sapiens
gtgttggtgtattttatggatgctttctgtaga

SEQ ID NO: 11275 - DNA, 51 bp, Homo sapiens
cttaaaagtacacaccgacatgcgatatgttgctctgtcacttgctatgtg

SEQ ID NO: 11276 - DNA, 51 bp, Homo sapiens
aaatgccatttatttgccgttgaccgctgggagacttacctgacgcagtgc

SEQ ID NO: 11277 - DNA, 33 bp, Homo sapiens
ttgctctcattttttagagttcttgtttgacga

SEQ ID NO: 11278 - DNA, 33 bp, Homo sapiens
cttgtccgactgccaggcaagcaacgaggtctc

SEQ ID NO: 11279 - DNA, 33 bp, Homo sapiens
ggggctgggtcagtcattcaaggaagttgtcaa

SEQ ID NO: 11280 - DNA, 33 bp, Homo sapiens
aaatgattagcaaagagaggcatgtttccacac

SEQ ID NO: 11281 - DNA, 33 bp, Homo sapiens
tagcagagatgcattagaacagcaagagaaggg

SEQ ID NO: 11282 - DNA, 33 bp, Homo sapiens
agcctcaggagataaagggtccatgatatgaag

SEQ ID NO: 11283 - DNA, 51 bp, Homo sapiens
gaaatctaccatcattaccaagctcgatgaataaatgatatagatatggca

SEQ ID NO: 11284 - DNA, 33 bp, Homo sapiens
ccccaaattatgggaatagcagatacaaggagt

SEQ ID NO: 11285 - DNA, 33 bp, Homo sapiens
ttgaagtgataacctcgaagtagatcacaaatc

SEQ ID NO: 11286 - DNA, 33 bp, Homo sapiens
tgcccaaaagccgtcatagccttacacaaaaaa

SEQ ID NO: 11287 - DNA, 33 bp, Homo sapiens
tgttgataagtaagaaggttgtcagaatcaaaa

SEQ ID NO: 11288 - DNA, 33 bp, Homo sapiens
tccattgctgcaaccagcacctatattactttc

SEQ ID NO: 11289 - DNA, 33 bp, Homo sapiens
atgacaaaaattaaaatgatgctgatactagcc

SEQ ID NO: 11290 - DNA, 33 bp, Homo sapiens
tttaatagagagaccctgcaaatcattttcaat

SEQ ID NO: 11291 - DNA, 33 bp, Homo sapiens
ttcttagctgttgagatctatgcaagttgtttt

SEQ ID NO: 11292 - DNA, 33 bp, Homo sapiens
caaagcatgaaaagactggaattcaaaatgaag

SEQ ID NO: 11293 - DNA, 33 bp, Homo sapiens
cagcactgcggggatccatctgtttcacctagg

SEQ ID NO: 11294 - DNA, 51 bp, Homo sapiens
tggagcaagtccatgccatcagcagcagataatttaatgtcttttgaaaaa

SEQ ID NO: 11295 - DNA, 33 bp, Homo sapiens
aatgtgttggaaaggatgtggagaaattggagt

SEQ ID NO: 11296 - DNA, 33 bp, Homo sapiens
aggtgagaaatcgctcggaaattctcaaagccc

SEQ ID NO: 11297 - DNA, 33 bp, Homo sapiens
ttaaagtagacactaacgatggtgggttatcaa

SEQ ID NO: 11298 - DNA, 33 bp, Homo sapiens
cactcttgagttctgaggatgaacaaatgtaaa

SEQ ID NO: 11299 - DNA, 33 bp, Homo sapiens
ggaacattgtgtcttatattcatgggcttgtac

SEQ ID NO: 11300 - DNA, 33 bp, Homo sapiens
tattttcaagaacggcgattttcagttaattta

SEQ ID NO: 11301 - DNA, 51 bp, Homo sapiens
gtacaaggcagctagttggtagtagcctggaattccttttagaaagagctg

SEQ ID NO: 11302 - DNA, 51 bp, Homo sapiens
atcatcagatttaccctgcttgccatatagcatctagtcttcactcaggtt

SEQ ID NO: 11303 - DNA, 33 bp, Homo sapiens
aagtttactagagcaatattcttcaccaaacat

SEQ ID NO: 11304 - DNA, 33 bp, Homo sapiens
gttcttttctgttctctgaaagtgcctttttaa

SEQ ID NO: 11305 - DNA, 33 bp, Homo sapiens
atgcaattctaaaacctgaaggagacaggaccc

SEQ ID NO: 11306 - DNA, 33 bp, Homo sapiens
ctcagaagagagattccgaaatgggaggcagca

SEQ ID NO: 11307 - DNA, 33 bp, Homo sapiens
aaagtaagtgcaagaagttcactaataattcaa

SEQ ID NO: 11308 - DNA, 33 bp, Homo sapiens
gggcctgagcaaggatgacttcatgagaagggt

SEQ ID NO: 11309 - DNA, 33 bp, Homo sapiens
acaagctgtttctttctcttaggcaggccagcc

SEQ ID NO: 11310 - DNA, 33 bp, Homo sapiens
taaagtcccaccttgataactggtcagtctccc

SEQ ID NO: 11311 - DNA, 33 bp, Homo sapiens
tcaagtttttagcttatgaaaatttgcacaagt

SEQ ID NO: 11312 - DNA, 51 bp, Homo sapiens
cacagccaaaccgtatcagtaataagagaatgaaagtgggagggaatgatg

SEQ ID NO: 11313 - DNA, 33 bp, Homo sapiens
tatgggaaactctaaggacaaaggcccaggttt

SEQ ID NO: 11314 - DNA, 51 bp, Homo sapiens
agatgcttagaatctttgttatctatgtatgagggtcaattatatcttggg

SEQ ID NO: 11315 - DNA, 33 bp, Homo sapiens
atcaaatctgaatgtagaagaaggtcaataaca

SEQ ID NO: 11316 - DNA, 33 bp, Homo sapiens
acacacgctactgtcatgtaattttctccttag

SEQ ID NO: 11317 - DNA, 33 bp, Homo sapiens
gaacaaaggtcctaaatagaaacaaatggaaag

SEQ ID NO: 11318 - DNA, 33 bp, Homo sapiens
ggatgtttctcactcatagaaaatgtgtagtgg

SEQ ID NO: 11319 - DNA, 33 bp, Homo sapiens
gtagatgataacatcagtaacttgggacgtaag

SEQ ID NO: 11320 - DNA, 33 bp, Homo sapiens
ctctaagctttgggattaatggccctatcactc

SEQ ID NO: 11321 - DNA, 33 bp, Homo sapiens
ccctgtgtttacacgggaactggctcttctcag

SEQ ID NO: 11322 - DNA, 51 bp, Homo sapiens
agattaaaagaaataggcaatgggatagtaaactggaaaatatatttgaag

SEQ ID NO: 11323 - DNA, 33 bp, Homo sapiens
cctcctaacgcggcaagaatgaatcactgacaa

SEQ ID NO: 11324 - DNA, 33 bp, Homo sapiens
gcacactgaggaataatagttttgtatccattg

SEQ ID NO: 11325 - DNA, 33 bp, Homo sapiens
gagaacttagcaaaactgaagtgtgaattttca

SEQ ID NO: 11326 - DNA, 33 bp, Homo sapiens
ttctatctatcgatcacgtcactcatgcctagt

SEQ ID NO: 11327 - DNA, 33 bp, Homo sapiens
gaacatcctgagaactgaaaatacctctacaag

SEQ ID NO: 11328 - DNA, 33 bp, Homo sapiens
gcaacctcaaagtcagtcagaagcgtgaatctc

SEQ ID NO: 11329 - DNA, 33 bp, Homo sapiens
gtattatccataatgcgcagtagccagtaaaaa

SEQ ID NO: 11330 - DNA, 33 bp, Homo sapiens
ctggaaggaacaagcactattctctgccctgta

SEQ ID NO: 11331 - DNA, 33 bp, Homo sapiens
cctcaggtcttagccacatggagctcaccagag

SEQ ID NO: 11332 - DNA, 51 bp, Homo sapiens
tttgatttcctattttgtagcatcacttgtttcatttcctcttttatggac

SEQ ID NO: 11333 - DNA, 33 bp, Homo sapiens
ctggagcttggactgagactttctcaagggtgt

SEQ ID NO: 11334 - DNA, 33 bp, Homo sapiens
aaacgtttcatgtatataaggggttgagattat

SEQ ID NO: 11335 - DNA, 33 bp, Homo sapiens
taatttttccaactatgaaaccttgtaggtata

SEQ ID NO: 11336 - DNA, 33 bp, Homo sapiens
acaaaacacgctgttcgaagagcatcaagtgag

SEQ ID NO: 11337 - DNA, 33 bp, Homo sapiens
gaagtgagggggaaaggattgagtggtttgttt

SEQ ID NO: 11338 - DNA, 33 bp, Homo sapiens
acaaatattcctgagagctgggtactgaggtac

SEQ ID NO: 11339 - DNA, 33 bp, Homo sapiens
atgtccccagaaagacggtctcaaaaacaaggg

SEQ ID NO: 11340 - DNA, 51 bp, Homo sapiens
aggataataccaagagtttggagtatgcgccttacccagtgttcccatgaa

SEQ ID NO: 11341 - DNA, 33 bp, Homo sapiens
gtgttctaaactctgatgactaatatttctgga

SEQ ID NO: 11342 - DNA, 33 bp, Homo sapiens
atatgagaagataacagccctcattggtaatca

SEQ ID NO: 11343 - DNA, 33 bp, Homo sapiens
tccaggactgtaaaatgatagcttgtcttgctc

SEQ ID NO: 11344 - DNA, 33 bp, Homo sapiens
gcaaacttttgatcacgcacctaacaaaaactc

SEQ ID NO: 11345 - DNA, 33 bp, Homo sapiens
agcaacagttacctcggataagatggccattcc

SEQ ID NO: 11346 - DNA, 33 bp, Homo sapiens
gctttgatactgaccctccctgaccttatcact

SEQ ID NO: 11347 - DNA, 33 bp, Homo sapiens
ttttcgtggtgttaaactgaggctgcaacccct

SEQ ID NO: 11348 - DNA, 33 bp, Homo sapiens
ctccccctctctgatctaagttcattgtccctg

SEQ ID NO: 11349 - DNA, 33 bp, Homo sapiens
gaaaggaccaagtccgcattataaagcaacaag

SEQ ID NO: 11350 - DNA, 33 bp, Homo sapiens
agtagaaaaacaacattagtctagtgcaaaaag

SEQ ID NO: 11351 - DNA, 33 bp, Homo sapiens
aatgaatagctaatgatcaccagacagtaaagg

SEQ ID NO: 11352 - DNA, 33 bp, Homo sapiens
gtggaaccaccgagcagaagtttgggaacctag

SEQ ID NO: 11353 - DNA, 33 bp, Homo sapiens
gttttcccctagtttctaaccctgcttaaggac

SEQ ID NO: 11354 - DNA, 33 bp, Homo sapiens
catgttcaacaactaatcaaagtatttgcatcc

SEQ ID NO: 11355 - DNA, 33 bp, Homo sapiens
tgaggagctaagtcacgctaccaattggctttt

SEQ ID NO: 11356 - DNA, 51 bp, Homo sapiens
caatatttttattagttcagtagtctatcagtttgcacagagaagtggatt

SEQ ID NO: 11357 - DNA, 33 bp, Homo sapiens
acatatgctgcttttctaatctcagagacaagt

SEQ ID NO: 11358 - DNA, 33 bp, Homo sapiens
ccaaacacaggaggccgctatattggtgacaga

SEQ ID NO: 11359 - DNA, 33 bp, Homo sapiens
gagagaaacccacctggagactcggttaggctt

SEQ ID NO: 11360 - DNA, 33 bp, Homo sapiens
aagagcaggttcgccggcagacacagagttaaa

SEQ ID NO: 11361 - DNA, 33 bp, Homo sapiens
atctcctcatattcaatttctagctaagaagaa

SEQ ID NO: 11362 - DNA, 33 bp, Homo sapiens
cttccatacccttagattcaagttttctgttta

SEQ ID NO: 11363 - DNA, 33 bp, Homo sapiens
ccttttctgttaaaaatatccacgtcctgaaca

SEQ ID NO: 11364 - DNA, 33 bp, Homo sapiens
cttgtctctctacctatgttacaaccccctaga

SEQ ID NO: 11365 - DNA, 33 bp, Homo sapiens
gtgttagtgtccctactgaagatgctatgaaat

SEQ ID NO: 11366 - DNA, 33 bp, Homo sapiens
ttctagttttggcacctctatcttctctccttg

SEQ ID NO: 11367 - DNA, 33 bp, Homo sapiens
cagtcatggaaatggaggtgagagaaccacaga

SEQ ID NO: 11368 - DNA, 33 bp, Homo sapiens
ctgaagctcctgcagatgagtggggtgttacaa

SEQ ID NO: 11369 - DNA, 33 bp, Homo sapiens
tctgtttcttgctccagctagtatttctccagg

SEQ ID NO: 11370 - DNA, 33 bp, Homo sapiens
tctagatttcatgagttaaaagcactcagaagt

SEQ ID NO: 11371 - DNA, 33 bp, Homo sapiens
ttgcaagaagtgggaagagacatggtgcaagac

SEQ ID NO: 11372 - DNA, 33 bp, Homo sapiens
aggctggggactagtggatcatcgcttaggatt

SEQ ID NO: 11373 - DNA, 33 bp, Homo sapiens
aatgtggagcaactacggacatgcaaaatgata

SEQ ID NO: 11374 - DNA, 33 bp, Homo sapiens
agataagaaagtccaataaatgtggagcaacta

SEQ ID NO: 11375 - DNA, 33 bp, Homo sapiens
ggaagccacatcttgataaatgcagaggcaatt

SEQ ID NO: 11376 - DNA, 33 bp, Homo sapiens
attatgttctctctaatgaattggtaactgaca

SEQ ID NO: 11377 - DNA, 33 bp, Homo sapiens
tccatccttatctagacggcaagaagggttgtt

SEQ ID NO: 11378 - DNA, 33 bp, Homo sapiens
aatttcttatgatgcagaatcggtgaccttata

SEQ ID NO: 11379 - DNA, 33 bp, Homo sapiens
ttcctgctatagtggaggtaagaccttattatt

SEQ ID NO: 11380 - DNA, 33 bp, Homo sapiens
catttattcattcaaatattaaccactagctgt

SEQ ID NO: 11381 - DNA, 33 bp, Homo sapiens
agatagattgccctaagatctggcttagagtac

SEQ ID NO: 11382 - DNA, 33 bp, Homo sapiens
gatatgggtgataagaggaagtcctgctcctga

SEQ ID NO: 11383 - DNA, 33 bp, Homo sapiens
agaagtgctctatgattaagaggtagtgtccaa

SEQ ID NO: 11384 - DNA, 51 bp, Homo sapiens
aatcttgatattttaaaggtacatatgatgccaatgttgccgtatagctca

SEQ ID NO: 11385 - DNA, 51 bp, Homo sapiens
agattttgaaaagtcctgtagaaacgaaatactgtatatttttcaacattt

SEQ ID NO: 11386 - DNA, 51 bp, Homo sapiens
acgatggacatccagaactggagtagaaagaagcgttggaataccctttca

SEQ ID NO: 11387 - DNA, 33 bp, Homo sapiens
aaatgttcaatgaatgtatgaaaattaatctgc

SEQ ID NO: 11388 - DNA, 33 bp, Homo sapiens
ctcttcacacaaaaaaccaatatttgaggccga

SEQ ID NO: 11389 - DNA, 33 bp, Homo sapiens
gaaaaagaagtgatgtgaaagagatcatctttt

SEQ ID NO: 11390 - DNA, 33 bp, Homo sapiens
agatgatttctaaggcgcttgtagatctgaaac

SEQ ID NO: 11391 - DNA, 33 bp, Homo sapiens
ccctggtcagtgccaatactcataatgacttgt

SEQ ID NO: 11392 - DNA, 33 bp, Homo sapiens
gtttccaaactttaactctaagctcagtctcag

SEQ ID NO: 11393 - DNA, 33 bp, Homo sapiens
tggggtcccttgtcagcaacctaatgcccctaa

SEQ ID NO: 11394 - DNA, 33 bp, Homo sapiens
acagtttgtattttgcgaaggagaaaaatatga

SEQ ID NO: 11395 - DNA, 33 bp, Homo sapiens
atggaagttaaaatactggctagagcaaagaga

SEQ ID NO: 11396 - DNA, 33 bp, Homo sapiens
aatcaccatgctgtaagagtagtcaaccatctc

SEQ ID NO: 11397 - DNA, 33 bp, Homo sapiens
gacatttgggtagcggtaaattttgaatcatct

SEQ ID NO: 11398 - DNA, 33 bp, Homo sapiens
tgtggagggggaaacaccgattggaataaatgc

SEQ ID NO: 11399 - DNA, 33 bp, Homo sapiens
cacctaatggggtgcattatcataaaatgtaga

SEQ ID NO: 11400 - DNA, 33 bp, Homo sapiens
acagtacaggtatgtatagtttaacacaaagca

SEQ ID NO: 11401 - DNA, 33 bp, Homo sapiens
agggtatcgccatggatgacttaataacttggg

SEQ ID NO: 11402 - DNA, 33 bp, Homo sapiens
ttttatttacctgaacgcttctaataggacact

SEQ ID NO: 11403 - DNA, 33 bp, Homo sapiens
cactctgtctcatgattaattccaggatcttgt

SEQ ID NO: 11404 - DNA, 33 bp, Homo sapiens
aaatagggtagccgaagtgaaaccaaagattaa

SEQ ID NO: 11405 - DNA, 33 bp, Homo sapiens
gtactgtaacctcttatggaatcccttcttttc

SEQ ID NO: 11406 - DNA, 33 bp, Homo sapiens
tacgcaataataggaatttacgtactttgttat

SEQ ID NO: 11407 - DNA, 33 bp, Homo sapiens
gccacttgtaagcatatggatgagattttgtct

SEQ ID NO: 11408 - DNA, 33 bp, Homo sapiens
acatttgtgaatatcagctctgttcttggcatc

SEQ ID NO: 11409 - DNA, 51 bp, Homo sapiens
aataaaaataggcaaacactatatatgctgtaaacctttggagtactcctt

SEQ ID NO: 11410 - DNA, 33 bp, Homo sapiens
gctacctgtaatagactagaatctgttggttaa

SEQ ID NO: 11411 - DNA, 33 bp, Homo sapiens
ccgaattatgacattatattttccctcatgaaa

SEQ ID NO: 11412 - DNA, 33 bp, Homo sapiens
tgatctaactacagggtcatggaaagcttttct

SEQ ID NO: 11413 - DNA, 33 bp, Homo sapiens
tgtagtcaattctcaatagatgacagccatggt

SEQ ID NO: 11414 - DNA, 33 bp, Homo sapiens
aagaagaagaaaaaaagacatccaaatccaaaa

SEQ ID NO: 11415 - DNA, 33 bp, Homo sapiens
tgtgtgctttggaggagtaatagggcaggaatg

SEQ ID NO: 11416 - DNA, 33 bp, Homo sapiens
atttacaaaagcaggcgaatcttaaataaacac

SEQ ID NO: 11417 - DNA, 33 bp, Homo sapiens
ctgttttgatcattcatgtttgctttcttatat

SEQ ID NO: 11418 - DNA, 33 bp, Homo sapiens
tgtaattcctaaggatgagtctaaagttgcttg

SEQ ID NO: 11419 - DNA, 33 bp, Homo sapiens
taaccaatcaaatgactgtaacatctgtgctgg

SEQ ID NO: 11420 - DNA, 33 bp, Homo sapiens
ttggcgagaaatagtcgctgaagtcaagcagaa

SEQ ID NO: 11421 - DNA, 33 bp, Homo sapiens
ggttagctgaaaatgagtaaatgacaagagggg

SEQ ID NO: 11422 - DNA, 33 bp, Homo sapiens
ttctcaggtgcaaaattagactagctattccct

SEQ ID NO: 11423 - DNA, 33 bp, Homo sapiens
acactgcagaaatacagtggttatcaagaatgt

SEQ ID NO: 11424 - DNA, 33 bp, Homo sapiens
attcaaatattgttatgaaagtggtgccaaaaa

SEQ ID NO: 11425 - DNA, 33 bp, Homo sapiens
catgtcataaatacatcaatttccaagcagtca

SEQ ID NO: 11426 - DNA, 33 bp, Homo sapiens
atgtccaacttcatggtcaaatgtaaactttgg

SEQ ID NO: 11427 - DNA, 33 bp, Homo sapiens
tgaatagactcattcatggggaagtcatgcctt

SEQ ID NO: 11428 - DNA, 33 bp, Homo sapiens
atgataagcgcgcaaatggttgtggagtgaaga

SEQ ID NO: 11429 - DNA, 33 bp, Homo sapiens
caagtttagtgaaatatgggaacatgtacagag

SEQ ID NO: 11430 - DNA, 33 bp, Homo sapiens
ctctgcaatggaatgatggtcagaaaagaacag

SEQ ID NO: 11431 - DNA, 33 bp, Homo sapiens
aaaagggagtgttttatggacaacgaggcagca

SEQ ID NO: 11432 - DNA, 33 bp, Homo sapiens
tgaaccatttttgggcgcactagttcctgaggg

SEQ ID NO: 11433 - DNA, 33 bp, Homo sapiens
aggcattttagatgacggcattgcgggatctcg

SEQ ID NO: 11434 - DNA, 33 bp, Homo sapiens
gaatatcctaacaatcgaactctgtgccaggaa

SEQ ID NO: 11435 - DNA, 33 bp, Homo sapiens
acaaattgcaaacagctaatatggaaatgcgtg

SEQ ID NO: 11436 - DNA, 33 bp, Homo sapiens
cgtttctaagtaaagcccactgttccaagctta

SEQ ID NO: 11437 - DNA, 33 bp, Homo sapiens
tacgttccaactagatgaaaggacagcattata

SEQ ID NO: 11438 - DNA, 33 bp, Homo sapiens
gttacttgcaagcagatggatgggaagattgga

SEQ ID NO: 11439 - DNA, 33 bp, Homo sapiens
catgagaatcaactatgatacagctgactggaa

SEQ ID NO: 11440 - DNA, 33 bp, Homo sapiens
ttccactctcttaatcgctgacctgttttcagc

SEQ ID NO: 11441 - DNA, 33 bp, Homo sapiens
atctttgaatcaagagtagcctcatctgattta

SEQ ID NO: 11442 - DNA, 33 bp, Homo sapiens
ccaaggcaacttggaagcacttcccggacagct

SEQ ID NO: 11443 - DNA, 33 bp, Homo sapiens
ggaattcagtggaaaccggtaatcagatgaaga

SEQ ID NO: 11444 - DNA, 33 bp, Homo sapiens
ccacaattttaacatggagcttaatgctaattg

SEQ ID NO: 11445 - DNA, 33 bp, Homo sapiens
agatctcctgtcctagtatggagactctggaga

SEQ ID NO: 11446 - DNA, 33 bp, Homo sapiens
tccaccagtgggtggaggaaggaagccaaaagg

SEQ ID NO: 11447 - DNA, 33 bp, Homo sapiens
cactattggacaggaagaactatgagtcgcccc

SEQ ID NO: 11448 - DNA, 33 bp, Homo sapiens
tactttaagccaatgggcaaaatatggtgctgt

SEQ ID NO: 11449 - DNA, 33 bp, Homo sapiens
gtgggcaattacgcaacctttacctctagggaa

SEQ ID NO: 11450 - DNA, 33 bp, Homo sapiens
catatacaatggtttcggaaaaacaatttgcta

SEQ ID NO: 11451 - DNA, 33 bp, Homo sapiens
aaattatagcggacagcaaaaaaagtcagtgtt

SEQ ID NO: 11452 - DNA, 33 bp, Homo sapiens
gttctggcactttcccgaaaccgtagccatcag

SEQ ID NO: 11453 - DNA, 33 bp, Homo sapiens
aagaatacatttgaagtctgttttttccccttt

SEQ ID NO: 11454 - DNA, 51 bp, Homo sapiens
acactataagcattagaatcttgaactagaatcttgacattatctgacttc

SEQ ID NO: 11455 - DNA, 33 bp, Homo sapiens
ttgtcttggataaaaatgaagacgaggacaagg

SEQ ID NO: 11456 - DNA, 33 bp, Homo sapiens
caaaaaacaaaatagagatgtggatttcagagt

SEQ ID NO: 11457 - DNA, 33 bp, Homo sapiens
gtccagccacagaatacatttttaaaggtcttg

SEQ ID NO: 11458 - DNA, 33 bp, Homo sapiens
agcaggaaggagtgaatggaaaagtagctgaga

SEQ ID NO: 11459 - DNA, 33 bp, Homo sapiens
agtgtatgagggaaaagatggtgcatttagata

SEQ ID NO: 11460 - DNA, 33 bp, Homo sapiens
tgcacatagacaaatatatagaagaatgaaggg

SEQ ID NO: 11461 - DNA, 33 bp, Homo sapiens
aacatttttctgaacatgaaattcaaacctatc

SEQ ID NO: 11462 - DNA, 33 bp, Homo sapiens
caggcctgagagcacctgaggagtttagattta

SEQ ID NO: 11463 - DNA, 33 bp, Homo sapiens
acactcaggcaataaagaaaagtataaagaata

SEQ ID NO: 11464 - DNA, 33 bp, Homo sapiens
aagaataaattttctctaatcctcaaaaatagt

SEQ ID NO: 11465 - DNA, 33 bp, Homo sapiens
catccaaactagtagaggggaaaatggaactaa

SEQ ID NO: 11466 - DNA, 33 bp, Homo sapiens
ctctcatctgtggctcgcaagtgctccaggaga

SEQ ID NO: 11467 - DNA, 33 bp, Homo sapiens
caaattctcgcctggaggtcagttaagaaaagg

SEQ ID NO: 11468 - DNA, 33 bp, Homo sapiens
tactctattctagacattgaaattatgcagaga

SEQ ID NO: 11469 - DNA, 33 bp, Homo sapiens
ggctggtgatcagggatgatgagcttttctcat

SEQ ID NO: 11470 - DNA, 33 bp, Homo sapiens
tacatggtaaaagcaagcaacatagatgagagt

SEQ ID NO: 11471 - DNA, 33 bp, Homo sapiens
atcaatcaatcgtacagtcttcctttacctaaa

SEQ ID NO: 11472 - DNA, 33 bp, Homo sapiens
ctaacttgacagccacgcaagggggacagttag

SEQ ID NO: 11473 - DNA, 33 bp, Homo sapiens
ccctacatttacaggatggtcagctgtccccat

SEQ ID NO: 11474 - DNA, 33 bp, Homo sapiens
tcctgatgcagacccatgaggatcctctgccag

SEQ ID NO: 11475 - DNA, 33 bp, Homo sapiens
tgacctcttcaggagatggtgaccccgagatgt

SEQ ID NO: 11476 - DNA, 33 bp, Homo sapiens
atttgggatcagggtagatgaatgaaatttgat

SEQ ID NO: 11477 - DNA, 33 bp, Homo sapiens
ttcaaggatgaaacccgctcatggctgaagagt

SEQ ID NO: 11478 - DNA, 33 bp, Homo sapiens
atccatcaatcgcttatgactttcatgacatca

SEQ ID NO: 11479 - DNA, 33 bp, Homo sapiens
caccctacatgtttgaggctaataagacagttt

SEQ ID NO: 11480 - DNA, 33 bp, Homo sapiens
gggttccaacattcattatccagtttcagagac

SEQ ID NO: 11481 - DNA, 33 bp, Homo sapiens
ggcaatgatgtgtcactgtagattaatcagttg

SEQ ID NO: 11482 - DNA, 33 bp, Homo sapiens
tgagggtgaggaacaatttagaatttctgctga

SEQ ID NO: 11483 - DNA, 33 bp, Homo sapiens
agtcctctggtgaggatgcatggtaaagagtgt

SEQ ID NO: 11484 - DNA, 33 bp, Homo sapiens
ttagaaattactggtatggtcttatgtttgata

SEQ ID NO: 11485 - DNA, 33 bp, Homo sapiens
gatccatcacagctgctacctcggtctacttag

SEQ ID NO: 11486 - DNA, 33 bp, Homo sapiens
ctcccacttttaccccgcgctttctcactctcc

SEQ ID NO: 11487 - DNA, 33 bp, Homo sapiens
agaagccctccatgtcgaagtctccagctcaga

SEQ ID NO: 11488 - DNA, 33 bp, Homo sapiens
cgctggatatgaagccgctgtgtaacacacaaa

SEQ ID NO: 11489 - DNA, 33 bp, Homo sapiens
agaatttcagggaaactacaatagtgaaaacat

SEQ ID NO: 11490 - DNA, 33 bp, Homo sapiens
ggattgaacctttatctgaagggaggtttctgc

SEQ ID NO: 11491 - DNA, 33 bp, Homo sapiens
gatgtaattccctccatgctaagcttatgaccc

SEQ ID NO: 11492 - DNA, 51 bp, Homo sapiens
tgatttatttattgtaactttatcatgtcttaatttccatagggtttgccc

SEQ ID NO: 11493 - DNA, 33 bp, Homo sapiens
gcttgatggtgcaggacacagtaaatgcatcag

SEQ ID NO: 11494 - DNA, 33 bp, Homo sapiens
acctgaggaccctctcgctcaagcatggggaca

SEQ ID NO: 11495 - DNA, 33 bp, Homo sapiens
ataccaacagacaccattagataccaacaggtg

SEQ ID NO: 11496 - DNA, 33 bp, Homo sapiens
catggaacatggaccagcgcaaaatcctgccat

SEQ ID NO: 11497 - DNA, 33 bp, Homo sapiens
tctgtgcactgttcccgcagaagctggatttgt

SEQ ID NO: 11498 - DNA, 33 bp, Homo sapiens
tactatgcggtctcactgaaacatctggagcac

SEQ ID NO: 11499 - DNA, 33 bp, Homo sapiens
cacacttagtttgagatgacaaattctccaagt

SEQ ID NO: 11500 - DNA, 51 bp, Homo sapiens
cacacaagctttcacgtttacttgagatttgatctagtgacagcttatcag

SEQ ID NO: 11501 - DNA, 33 bp, Homo sapiens
agttttgggctgatacgaatgaagcgttatgaa

SEQ ID NO: 11502 - DNA, 51 bp, Homo sapiens
ctgagtgctccagcaccaatcagattatgtatgtgttactcagaagagatg

SEQ ID NO: 11503 - DNA, 51 bp, Homo sapiens
gaaggctgatgtgctgatacctgacgaaagagattctaaagcaaaggcatc

SEQ ID NO: 11504 - DNA, 33 bp, Homo sapiens
aaggagacattggtaatggaagaagaggtcgga

SEQ ID NO: 11505 - DNA, 33 bp, Homo sapiens
gcacttgcaggtttactgaatgtgaaatcagag

SEQ ID NO: 11506 - DNA, 33 bp, Homo sapiens
accaaagagcctctctgactttaaccacaaggg

SEQ ID NO: 11507 - DNA, 33 bp, Homo sapiens
tatttagagtcttaccgagtggggctctccaaa

SEQ ID NO: 11508 - DNA, 33 bp, Homo sapiens
aaataaatagtatctggaagtgccacaaatggg

SEQ ID NO: 11509 - DNA, 33 bp, Homo sapiens
acgtagagactgaacattaactgaagtgtgtgg

SEQ ID NO: 11510 - DNA, 33 bp, Homo sapiens
gttgcaaacatccacattaatatcgattttgtc

SEQ ID NO: 11511 - DNA, 51 bp, Homo sapiens
taaaatacttccatttctttcaggatcagccacctgccatgttgataccct

SEQ ID NO: 11512 - DNA, 51 bp, Homo sapiens
tcaaatctcacactaaagccatctacatttgggagaggatctgggtgtgat

SEQ ID NO: 11513 - DNA, 33 bp, Homo sapiens
tttggcagcccttcaatgtgtgggaagtaggag

SEQ ID NO: 11514 - DNA, 33 bp, Homo sapiens
atacaagaaaatggaatggaaaagcattggcct

SEQ ID NO: 11515 - DNA, 33 bp, Homo sapiens
tcaacattacgattacgaaggatgaaagtggtg

SEQ ID NO: 11516 - DNA, 33 bp, Homo sapiens
ggacatgaggtttacatacttcattagggctcc

SEQ ID NO: 11517 - DNA, 33 bp, Homo sapiens
cgagcctgcaattgactgcggaagccagtgccc

SEQ ID NO: 11518 - DNA, 33 bp, Homo sapiens
cttgaaggcttcagaagaggtgtaacagggatg

SEQ ID NO: 11519 - DNA, 33 bp, Homo sapiens
ttgcagatctgaacacgaacatcattgaccaat

SEQ ID NO: 11520 - DNA, 33 bp, Homo sapiens
tcttattcacctgttatgtacatgggcttctaa

SEQ ID NO: 11521 - DNA, 33 bp, Homo sapiens
cgtattattggaaatcgcaccaatttgggggtt

SEQ ID NO: 11522 - DNA, 33 bp, Homo sapiens
acgtaggaagaataaagtctcatccaaacacaa

SEQ ID NO: 11523 - DNA, 33 bp, Homo sapiens
ctagatgccaaaaatatgtgtctcctaagctca

SEQ ID NO: 11524 - DNA, 51 bp, Homo sapiens
aaaggtttatacacatcaggacatggagagtaaatctgtttatgacatgaa

SEQ ID NO: 11525 - DNA, 33 bp, Homo sapiens
cagggaaggaggttaagaaggaaatgcacagat

SEQ ID NO: 11526 - DNA, 33 bp, Homo sapiens
ccaatcgcatcctccattcaagaaagcttgact

SEQ ID NO: 11527 - DNA, 33 bp, Homo sapiens
agagatgctctcaaactggtcgtcgattattct

SEQ ID NO: 11528 - DNA, 33 bp, Homo sapiens
tctagaggctaacccatctggactctggaggaa

SEQ ID NO: 11529 - DNA, 33 bp, Homo sapiens
accacagccattcccaggtcttctccgaatggc

SEQ ID NO: 11530 - DNA, 33 bp, Homo sapiens
tgtgtccctatgccactgtgccggaaacaagtc

SEQ ID NO: 11531 - DNA, 33 bp, Homo sapiens
cgttgtgctcaaaatatcgcttacgtccgtctt

SEQ ID NO: 11532 - DNA, 33 bp, Homo sapiens
aaaactgaggagacccgaaaaagatcagtgact

SEQ ID NO: 11533 - DNA, 33 bp, Homo sapiens
ccgccttcagcccaaatgtggtggcgcatccag

SEQ ID NO: 11534 - DNA, 33 bp, Homo sapiens
tttactcaagacggtggaattaatttggcactg

SEQ ID NO: 11535 - DNA, 33 bp, Homo sapiens
ttctatgtgtattgcattcctaatttgtgtttt

SEQ ID NO: 11536 - DNA, 33 bp, Homo sapiens
gggaaacaaggagctaggtaaggacacagcagc

SEQ ID NO: 11537 - DNA, 33 bp, Homo sapiens
agtgtgttgactttcatgtcgatgacaggcagc

SEQ ID NO: 11538 - DNA, 33 bp, Homo sapiens
tctttatgcatccacagtcattcactgtaacaa

SEQ ID NO: 11539 - DNA, 33 bp, Homo sapiens
atctacagtaaaaccatagggttgatctttggt

SEQ ID NO: 11540 - DNA, 33 bp, Homo sapiens
ttgttaaatagtggaggcatttggtgtaatctt

SEQ ID NO: 11541 - DNA, 33 bp, Homo sapiens
tcagagatattcatccgatcctcctgctacaag

SEQ ID NO: 11542 - DNA, 33 bp, Homo sapiens
acaaatgtacaggaattaaaaaaaacatcaaaa

SEQ ID NO: 11543 - DNA, 33 bp, Homo sapiens
cagatgtgtgctttcattcaataaacatggctt

SEQ ID NO: 11544 - DNA, 33 bp, Homo sapiens
cacatcctgccaaatatatcagtccatgctctg

SEQ ID NO: 11545 - DNA, 33 bp, Homo sapiens
ggatagcacttaaacattgaagaggatagagct

SEQ ID NO: 11546 - DNA, 33 bp, Homo sapiens
acaacaggattgaaaagcattagccacaaagga

SEQ ID NO: 11547 - DNA, 33 bp, Homo sapiens
gatggaaattgattaccacaaatgaatcctctg

SEQ ID NO: 11548 - DNA, 51 bp, Homo sapiens
gaacagttctagatttcaatccaatgaagtgatttgttctctactctgcac

SEQ ID NO: 11549 - DNA, 51 bp, Homo sapiens
tttctctttgtgtgaaaccgtcatatcccagaaaattagaccagttacaat

SEQ ID NO: 11550 - DNA, 51 bp, Homo sapiens
tatgaggaaaaaagaggtaattggaggaaaacaaatataacaactctttca

SEQ ID NO: 11551 - DNA, 33 bp, Homo sapiens
gcgatgccatcctcaacgtctcttaccagtgtg

SEQ ID NO: 11552 - DNA, 33 bp, Homo sapiens
ccctccatttatattctccagcgtctccttaca

SEQ ID NO: 11553 - DNA, 51 bp, Homo sapiens
attcttttctgaaatagtgcagaattaacatcatagaattttatgttgtca

SEQ ID NO: 11554 - DNA, 33 bp, Homo sapiens
gggtgaaatattgatacatagaagggcaacaaa

SEQ ID NO: 11555 - DNA, 33 bp, Homo sapiens
atccaccctgagttaattgtcttgcctcatctg

SEQ ID NO: 11556 - DNA, 33 bp, Homo sapiens
ctagcgaccttgatgagtatgagctgttacatg

SEQ ID NO: 11557 - DNA, 33 bp, Homo sapiens
cagccgcacaaagtactctgcctgcacttccca

SEQ ID NO: 11558 - DNA, 33 bp, Homo sapiens
aacatgggcttgaagagaaaagtagtagagtat

SEQ ID NO: 11559 - DNA, 51 bp, Homo sapiens
tagtggagataagatctatatgagtgaataatcagaattaattacaaatga

SEQ ID NO: 11560 - DNA, 51 bp, Homo sapiens
gataattttgatttacagcatcctatgagacatttctacatgcataacagt

SEQ ID NO: 11561 - DNA, 51 bp, Homo sapiens
aaaacagctactgctagagactgtagaaatattctgtaaaaacagcaaaaa

SEQ ID NO: 11562 - DNA, 33 bp, Homo sapiens
tctgtaggagtagcgatgatgaactgtttaaca

SEQ ID NO: 11563 - DNA, 33 bp, Homo sapiens
aattaaacctgtgtcaggtgaaatgtaagaaca

SEQ ID NO: 11564 - DNA, 33 bp, Homo sapiens
tttcattaagtacttaggattagccagtacccc

SEQ ID NO: 11565 - DNA, 33 bp, Homo sapiens
gagccctgctttggtcgcctctagtcatgtctt

SEQ ID NO: 11566 - DNA, 33 bp, Homo sapiens
aagccatgtgtagaaatgtttcaaaatcatggg

SEQ ID NO: 11567 - DNA, 33 bp, Homo sapiens
aagaaaattagaaggatggaagaagtgatgttt

SEQ ID NO: 11568 - DNA, 51 bp, Homo sapiens
tagtgagtttggggtttttgcaacattgaggtcgataatgggacctggaga

SEQ ID NO: 11569 - DNA, 33 bp, Homo sapiens
acacctgctcttgaaatgctccttcttcttccg

SEQ ID NO: 11570 - DNA, 33 bp, Homo sapiens
tggcctgaataatgaaggcaatttgaagctatc

SEQ ID NO: 11571 - DNA, 33 bp, Homo sapiens
aaggggattgcttttgtacttagcattacccca

SEQ ID NO: 11572 - DNA, 51 bp, Homo sapiens
agcagtgtgcaattattttcaaacatgaggattctccccatatcataaaga

SEQ ID NO: 11573 - DNA, 51 bp, Homo sapiens
tcttgcaaacgacccctctacatagcactaacacggaattgaggcttgcct

SEQ ID NO: 11574 - DNA, 51 bp, Homo sapiens
cctttcattgaaagttcttgttcacgatttttatcgataaatatttgttta

SEQ ID NO: 11575 - DNA, 51 bp, Homo sapiens
gatatttaatatcatagaggagttatggacataggtacacacagaggagtc

SEQ ID NO: 11576 - DNA, 51 bp, Homo sapiens
ctcccagtaagtcgaacatgaagcagatgccttactacatggtctatagat

SEQ ID NO: 11577 - DNA, 33 bp, Homo sapiens
actggtcctcgttggctaattcaggatgtgatg

SEQ ID NO: 11578 - DNA, 33 bp, Homo sapiens
atgtgagctcagaagaggacacagtagtctaag

SEQ ID NO: 11579 - DNA, 33 bp, Homo sapiens
ctgtcttccaacttgataccttgtcccactgga

SEQ ID NO: 11580 - DNA, 33 bp, Homo sapiens
tcagccttcacttgccgaatgattggtcgttgg

SEQ ID NO: 11581 - DNA, 33 bp, Homo sapiens
attctgaagtaacttatggatatcaggagctga

SEQ ID NO: 11582 - DNA, 33 bp, Homo sapiens
caaggtttagggtgatgagcatccaattttaag

SEQ ID NO: 11583 - DNA, 33 bp, Homo sapiens
taaaggaaattttccctgattacacttggaaca

SEQ ID NO: 11584 - DNA, 33 bp, Homo sapiens
tcattgtggctatgtctacaatatagctaggca

SEQ ID NO: 11585 - DNA, 33 bp, Homo sapiens
tgttggaattagcggagaaggattttaatgcag

SEQ ID NO: 11586 - DNA, 33 bp, Homo sapiens
aaatgctgtacattattaggagagatagtagtt

SEQ ID NO: 11587 - DNA, 33 bp, Homo sapiens
tgatgaagttactgactagagaaggccagtggc

SEQ ID NO: 11588 - DNA, 33 bp, Homo sapiens
aaatgatccatcagtatacaaaataggaagatg

SEQ ID NO: 11589 - DNA, 33 bp, Homo sapiens
gaattggcatcttctgcaatactgtaaattaga

SEQ ID NO: 11590 - DNA, 33 bp, Homo sapiens
catctagataaatggcgactgcgttttccactt

SEQ ID NO: 11591 - DNA, 51 bp, Homo sapiens
aatcagcatccttcatttgaatatcccggtttaataccaccaaagcagcac

SEQ ID NO: 11592 - DNA, 33 bp, Homo sapiens
ataatcaaataagatatgtcacattattagcga

SEQ ID NO: 11593 - DNA, 33 bp, Homo sapiens
acaaaaatgcaaaaatgagtacaggctgggaac

SEQ ID NO: 11594 - DNA, 33 bp, Homo sapiens
aaatcctgagaagaaacagttggatttgaatgt

SEQ ID NO: 11595 - DNA, 33 bp, Homo sapiens
gattgcgacttttaacgggttaatccactgcta

SEQ ID NO: 11596 - DNA, 33 bp, Homo sapiens
atttccttcttcttcatagatgtggtataagct

SEQ ID NO: 11597 - DNA, 33 bp, Homo sapiens
gatggcctcacctgcagaatagatactctgttg

SEQ ID NO: 11598 - DNA, 51 bp, Homo sapiens
ccactgatcacaaaaatcagacctagagaggaaaataattttatggttgtc

SEQ ID NO: 11599 - DNA, 33 bp, Homo sapiens
gagatattggcaaaggtaaaacaggctgcaggt

SEQ ID NO: 11600 - DNA, 33 bp, Homo sapiens
cttctgctgtaatccagtcttataatgcaggag

SEQ ID NO: 11601 - DNA, 33 bp, Homo sapiens
agtaaaagtatattgcgagagctaatttagttc

SEQ ID NO: 11602 - DNA, 51 bp, Homo sapiens
ttgtgggaaatcattcacacctgaacaatgaacccctctaatgtttttcta

SEQ ID NO: 11603 - DNA, 51 bp, Homo sapiens
cacaattaccgagttaaaagaatgcggcagatgtcgatattgtgggaaatc

SEQ ID NO: 11604 - DNA, 33 bp, Homo sapiens
aatgctatcttccatatcaaagttaaagaagga

SEQ ID NO: 11605 - DNA, 33 bp, Homo sapiens
taagttgacttcctcttaagcttggcatttggt

SEQ ID NO: 11606 - DNA, 33 bp, Homo sapiens
ctttaatatgtgcatatgtgttacgcaactctt

SEQ ID NO: 11607 - DNA, 33 bp, Homo sapiens
aaagacgattggataattgaaaacaatgacttt

SEQ ID NO: 11608 - DNA, 33 bp, Homo sapiens
ttgtatgacaagtgaagtatgaccataaaccac

SEQ ID NO: 11609 - DNA, 33 bp, Homo sapiens
atttgcagatttctaatgccctatcagataaat

SEQ ID NO: 11610 - DNA, 33 bp, Homo sapiens
tcagaagacaggaaaggataatagacacaacaa

SEQ ID NO: 11611 - DNA, 33 bp, Homo sapiens
tcgcagaatgaatcaatagagaacagtagcttg

SEQ ID NO: 11612 - DNA, 33 bp, Homo sapiens
atttctgatattaaaagagaccttgccaaaatt

SEQ ID NO: 11613 - DNA, 33 bp, Homo sapiens
aataaaagaatgttatgaagcttcagatgtcat

SEQ ID NO: 11614 - DNA, 33 bp, Homo sapiens
aagaagaaagaagagccaatgtaaggcgtgcag

SEQ ID NO: 11615 - DNA, 33 bp, Homo sapiens
acctggtgacttttaagaaatctccattcactt

SEQ ID NO: 11616 - DNA, 33 bp, Homo sapiens
gtaaatttgatggaaattgctgaagaaggagag

SEQ ID NO: 11617 - DNA, 33 bp, Homo sapiens
acaacttccacgtgcatctttctccctctgtga

SEQ ID NO: 11618 - DNA, 33 bp, Homo sapiens
aaattcactctgaaatgaaatgtattcctcctc

SEQ ID NO: 11619 - DNA, 51 bp, Homo sapiens
gtctgtacatatcagcctggtcccacagaacctttgacatttagcctgtgt

SEQ ID NO: 11620 - DNA, 33 bp, Homo sapiens
ttgttttagtttcacagtgcctctttggaggag

SEQ ID NO: 11621 - DNA, 33 bp, Homo sapiens
cacattcagcatttaagaataacagaataaaag

SEQ ID NO: 11622 - DNA, 33 bp, Homo sapiens
acactgaatggccccctaatgatgaatttttaa

SEQ ID NO: 11623 - DNA, 33 bp, Homo sapiens
atgaacatccctaccagtattttacaagggttc

SEQ ID NO: 11624 - DNA, 33 bp, Homo sapiens
tgaaggaatcgtgtcctcacacttacctccaac

SEQ ID NO: 11625 - DNA, 33 bp, Homo sapiens
actttaactattaaactagcgagcgtttgatgt

SEQ ID NO: 11626 - DNA, 51 bp, Homo sapiens
tgccaaaatgataggaatagattggtcaggaataaatattgaacattttct

SEQ ID NO: 11627 - DNA, 51 bp, Homo sapiens
aggatattgtctgaaatatgataaatggccagcaggtgttagtacataaat

SEQ ID NO: 11628 - DNA, 51 bp, Homo sapiens
tctaagatgtgttaaggttttagtaggcatctgatggacttgtaagggaga

SEQ ID NO: 11629 - DNA, 33 bp, Homo sapiens
gctttctaaactgtaatatctgcgtcctgcttt

SEQ ID NO: 11630 - DNA, 33 bp, Homo sapiens
gttcaaaagctgaaaagccttgagtctgatgtc

SEQ ID NO: 11631 - DNA, 33 bp, Homo sapiens
aactctccggtatgtatgtagttcactcacatt

SEQ ID NO: 11632 - DNA, 33 bp, Homo sapiens
tggaccaaacgaaatctagccttctaggttttt

SEQ ID NO: 11633 - DNA, 33 bp, Homo sapiens
acctcctctaacataattcattcttgtcctgca

SEQ ID NO: 11634 - DNA, 33 bp, Homo sapiens
aatacataaatcagaagtggtatgctgatgaaa

SEQ ID NO: 11635 - DNA, 33 bp, Homo sapiens
gtaactggaacagatatgttttaagcagcgtta

SEQ ID NO: 11636 - DNA, 33 bp, Homo sapiens
tctagaactttccctagatcttacaacagtagt

SEQ ID NO: 11637 - DNA, 33 bp, Homo sapiens
gaaaatggtgatcaaagtttatttctaatcaag

SEQ ID NO: 11638 - DNA, 33 bp, Homo sapiens
cctttgcaagaaagagcaatacctgaggcaccg

SEQ ID NO: 11639 - DNA, 33 bp, Homo sapiens
cattctacatatacactctagtaacaacaagca

SEQ ID NO: 11640 - DNA, 33 bp, Homo sapiens
ccagcagcttagcaaagttgagggcaaacacac

SEQ ID NO: 11641 - DNA, 33 bp, Homo sapiens
ttagttgattcttgaagcactagccaagttaca

SEQ ID NO: 11642 - DNA, 33 bp, Homo sapiens
cccttcaagttaccgttaagacagaagaaaagg

SEQ ID NO: 11643 - DNA, 33 bp, Homo sapiens
gtgtgtctgtcttttatgttaatggttatgaat

SEQ ID NO: 11644 - DNA, 33 bp, Homo sapiens
ggctccagctcaagaggactgaaggccgctaag

SEQ ID NO: 11645 - DNA, 33 bp, Homo sapiens
tgacttccgcttcacagtattttgcgtcccgta

SEQ ID NO: 11646 - DNA, 33 bp, Homo sapiens
attcataagacagagatacaaagagatacaaag

SEQ ID NO: 11647 - DNA, 33 bp, Homo sapiens
acagtgccaagagggatggtgatacctattcat

SEQ ID NO: 11648 - DNA, 33 bp, Homo sapiens
cactttgaatatcaactacggaattacaaggag

SEQ ID NO: 11649 - DNA, 33 bp, Homo sapiens
gaaaccagaaaagccacaaggaggctcctacca

SEQ ID NO: 11650 - DNA, 33 bp, Homo sapiens
gcaattgtgctccagaggtgaaagaggcagctg

SEQ ID NO: 11651 - DNA, 33 bp, Homo sapiens
gctttccaggccattataccagttttccattta

SEQ ID NO: 11652 - DNA, 33 bp, Homo sapiens
ttctgttccacaagctcagaggaagcagaattt

SEQ ID NO: 11653 - DNA, 51 bp, Homo sapiens
cttgctgctgctctgatgtggccactgtgattaacgcaatcagcccagcag

SEQ ID NO: 11654 - DNA, 51 bp, Homo sapiens
aagacctactaggcattttaaagaatccactcatgtgatcgaacgataaag

SEQ ID NO: 11655 - DNA, 51 bp, Homo sapiens
cccatgtgcctagtccatgtgacagtattgctttaaaaatcaataaaaatc

SEQ ID NO: 11656 - DNA, 33 bp, Homo sapiens
catggggttagtagtctcttgtaggagccagtg

SEQ ID NO: 11657 - DNA, 33 bp, Homo sapiens
gaggtagatgtgataatgtttctggaaatgaga

SEQ ID NO: 11658 - DNA, 33 bp, Homo sapiens
cagccacaaagcagtctatatatcaagtttctg

SEQ ID NO: 11659 - DNA, 33 bp, Homo sapiens
agtagaggagcttttgtaataacagatgtgtga

SEQ ID NO: 11660 - DNA, 33 bp, Homo sapiens
atgggtcactgatagcgacaccgttggtccggc

SEQ ID NO: 11661 - DNA, 33 bp, Homo sapiens
ctgctggaacgatcaatgtaattagctggacta

SEQ ID NO: 11662 - DNA, 33 bp, Homo sapiens
aacacttatcaagtattaaataaccacaactat

SEQ ID NO: 11663 - DNA, 33 bp, Homo sapiens
aatgatgcttctgaagtctgttctaataatata

SEQ ID NO: 11664 - DNA, 33 bp, Homo sapiens
gtatccctcatccaacggcttaagaacttgaac

SEQ ID NO: 11665 - DNA, 33 bp, Homo sapiens
tcaaaaccacttcctggaattgtcaaagcactg

SEQ ID NO: 11666 - DNA, 33 bp, Homo sapiens
gtgtaagaatgggctactacacaattcgaccaa

SEQ ID NO: 11667 - DNA, 33 bp, Homo sapiens
tgtgtttttccctttagagttacgaacagaaat

SEQ ID NO: 11668 - DNA, 33 bp, Homo sapiens
cacaagagaaagttccgagcacagagaactgca

SEQ ID NO: 11669 - DNA, 33 bp, Homo sapiens
tatcagggtctgaatccaacagtcttcagccag

SEQ ID NO: 11670 - DNA, 33 bp, Homo sapiens
cagagtctcattctaagtgcaagcaagacagag

SEQ ID NO: 11671 - DNA, 33 bp, Homo sapiens
atcctccatgtgcagagtatctctttggaaaaa

SEQ ID NO: 11672 - DNA, 33 bp, Homo sapiens
taggaaaacttccaagtactgcgtcaaaacata

SEQ ID NO: 11673 - DNA, 33 bp, Homo sapiens
gatcactacacaggcagtcaactacaatcttct

SEQ ID NO: 11674 - DNA, 33 bp, Homo sapiens
tgaattaacaggtaaagaagggagttagtatac

SEQ ID NO: 11675 - DNA, 33 bp, Homo sapiens
catttacttatttgcttaatcctacaacataca

SEQ ID NO: 11676 - DNA, 33 bp, Homo sapiens
cataaaggtctttgaatccacacatttcaggcc

SEQ ID NO: 11677 - DNA, 33 bp, Homo sapiens
tttttttgagatctgataaaaagacttaaaagg

SEQ ID NO: 11678 - DNA, 33 bp, Homo sapiens
tcttccacagctttacgaaaatcacatttaaag

SEQ ID NO: 11679 - DNA, 33 bp, Homo sapiens
caggggctcacaataagtcctgagcctgaagat

SEQ ID NO: 11680 - DNA, 33 bp, Homo sapiens
tgcagccagatgaaaatgtatgtgataggagtg

SEQ ID NO: 11681 - DNA, 33 bp, Homo sapiens
ttctgtttccaaatacgagatgctgtaagcctg

SEQ ID NO: 11682 - DNA, 33 bp, Homo sapiens
ttgttagttctggaaatttagtcaatttgcatc

SEQ ID NO: 11683 - DNA, 33 bp, Homo sapiens
accacagcaaccatgtgaacggggctgcgccaa

SEQ ID NO: 11684 - DNA, 33 bp, Homo sapiens
atgactggatagccaatagcgctgtaatgctta

SEQ ID NO: 11685 - DNA, 33 bp, Homo sapiens
gctatcaaaaagaccctgaaatgtatttgcttg

SEQ ID NO: 11686 - DNA, 33 bp, Homo sapiens
tagggtgccagtgtcagaaaccagacacggatg

SEQ ID NO: 11687 - DNA, 51 bp, Homo sapiens
ggaggtaaaagagttaagagatagatgcaaatgctgatgtacttcatcgat

SEQ ID NO: 11688 - DNA, 33 bp, Homo sapiens
cagggtcttaagcccatataaaagtcagagaat

SEQ ID NO: 11689 - DNA, 33 bp, Homo sapiens
gtttggctgctatgcctaatgcagccacgaata

SEQ ID NO: 11690 - DNA, 33 bp, Homo sapiens
caggtactgggtaatgtagtgtggaaaatcaag

SEQ ID NO: 11691 - DNA, 33 bp, Homo sapiens
actctgaggcccaaagtacaccagacacagact

SEQ ID NO: 11692 - DNA, 33 bp, Homo sapiens
gatgtaccagtcaacagaggccatgggagagca

SEQ ID NO: 11693 - DNA, 33 bp, Homo sapiens
tctgaagaatctagaagtactaagtgtgtgacc

SEQ ID NO: 11694 - DNA, 33 bp, Homo sapiens
tccaccctgatagatggagcttgtggtaaagtc

SEQ ID NO: 11695 - DNA, 33 bp, Homo sapiens
ttaaggccgagtgttatgtgctgccttgacatc

SEQ ID NO: 11696 - DNA, 33 bp, Homo sapiens
ttccccattggcagacggctatttccactcaaa

SEQ ID NO: 11697 - DNA, 33 bp, Homo sapiens
ctattactaagtaaaatcaaccaatctgtaaag

SEQ ID NO: 11698 - DNA, 33 bp, Homo sapiens
ttagaaccataagatggatttaattgtaggtct

SEQ ID NO: 11699 - DNA, 33 bp, Homo sapiens
ccaaatgaaataaaaatgtgtgaatgaatccac

SEQ ID NO: 11700 - DNA, 33 bp, Homo sapiens
gccagagcactgaccatatcaaagactcccatt

SEQ ID NO: 11701 - DNA, 33 bp, Homo sapiens
attttgcaacaatacaggatgttattaactatg

SEQ ID NO: 11702 - DNA, 33 bp, Homo sapiens
gctgatctttgcattatctagacagagaaacaa

SEQ ID NO: 11703 - DNA, 51 bp, Homo sapiens
attctaaaagggctgccgctgcgtgtcaaggattctccctcctcattctct

SEQ ID NO: 11704 - DNA, 51 bp, Homo sapiens
gccttacataattcccacaaaagattataagtgcccaaaccgagagagtgc

SEQ ID NO: 11705 - DNA, 33 bp, Homo sapiens
aagataaagtcgaccattcgtaatatttttttc

SEQ ID NO: 11706 - DNA, 33 bp, Homo sapiens
aggaggacttataccacgaagtttaaagagagg

SEQ ID NO: 11707 - DNA, 33 bp, Homo sapiens
ttgtgatgagatcccagagctgctatgcgggga

SEQ ID NO: 11708 - DNA, 33 bp, Homo sapiens
gccaggtatcacttcttaaatgtttgacttgag

SEQ ID NO: 11709 - DNA, 33 bp, Homo sapiens
aaaacaagcaaacttaggttcctgataattacg

SEQ ID NO: 11710 - DNA, 33 bp, Homo sapiens
gaacagaggtacatatgaaccagtcaccctcaa

SEQ ID NO: 11711 - DNA, 33 bp, Homo sapiens
attacaaggaactaggcaaaagaaattgacatt

SEQ ID NO: 11712 - DNA, 33 bp, Homo sapiens
gattatcatggcactcgatgactaccaaaaagt

SEQ ID NO: 11713 - DNA, 51 bp, Homo sapiens
agaaaacagaatagaaagatggagataattgtgaggtaaaaacattttaca

SEQ ID NO: 11714 - DNA, 33 bp, Homo sapiens
aaatttgtttgcaaaagtcagcacagaagagtt

SEQ ID NO: 11715 - DNA, 33 bp, Homo sapiens
ggtcttaacgcaaagagtaatactgaagtacaa

SEQ ID NO: 11716 - DNA, 33 bp, Homo sapiens
agaagctcaacttttagaacttttcaggatctg

SEQ ID NO: 11717 - DNA, 33 bp, Homo sapiens
cactacaagtggcggagcaaaattagtaatcag

SEQ ID NO: 11718 - DNA, 33 bp, Homo sapiens
acactgtcacctaatatccatggcttgacggga

SEQ ID NO: 11719 - DNA, 33 bp, Homo sapiens
ccatgatttaaggtaatgcaattatactcatat

SEQ ID NO: 11720 - DNA, 33 bp, Homo sapiens
tgggtgtaatgcctactacacaaagcaaaaaca

SEQ ID NO: 11721 - DNA, 33 bp, Homo sapiens
tgctcatcatcgttaatcaggttgaaaacatat

SEQ ID NO: 11722 - DNA, 33 bp, Homo sapiens
gcccagccataggttcccgtaactattctgagc

SEQ ID NO: 11723 - DNA, 33 bp, Homo sapiens
cacgtggccactccaatggtatctggtatgagg

SEQ ID NO: 11724 - DNA, 51 bp, Homo sapiens
ctctcctcacagaatctaagacctatgcaaccatgccatttacataaaatt

SEQ ID NO: 11725 - DNA, 51 bp, Homo sapiens
gataatatagctacctatcttgaaattatactgcagaaagtataggcttgg

SEQ ID NO: 11726 - DNA, 33 bp, Homo sapiens
gctccctgagaacttatgctctattcttcaata

SEQ ID NO: 11727 - DNA, 33 bp, Homo sapiens
gctccatccttgtatcgcttgagtcaccacaat

SEQ ID NO: 11728 - DNA, 33 bp, Homo sapiens
cagacactgtatcacagctagacctctctcttt

SEQ ID NO: 11729 - DNA, 51 bp, Homo sapiens
tagagtgtatttatcacaaattatatgtattacacacattttctgaaatgg

SEQ ID NO: 11730 - DNA, 33 bp, Homo sapiens
actggacagtaacttatagccgtatgaagagat

SEQ ID NO: 11731 - DNA, 33 bp, Homo sapiens
ctttgaaaaaatgtaagtgaaaatgtgttgtga

SEQ ID NO: 11732 - DNA, 33 bp, Homo sapiens
tacagcagtttttcaatgtttaatcattcatga

SEQ ID NO: 11733 - DNA, 33 bp, Homo sapiens
gtgtcttacacacttcgaccttaacctctggta

SEQ ID NO: 11734 - DNA, 33 bp, Homo sapiens
tgggaaatttagatcatgagacagtacagcaca

SEQ ID NO: 11735 - DNA, 33 bp, Homo sapiens
aaatcgagaaacagcatgaatattgaaggagtt

SEQ ID NO: 11736 - DNA, 33 bp, Homo sapiens
aagccattttcaaagtgaagttcagggtacctc

SEQ ID NO: 11737 - DNA, 33 bp, Homo sapiens
gacccaaacatagtgccaaggagattaaaaaaa

SEQ ID NO: 11738 - DNA, 33 bp, Homo sapiens
tatcagaaggaaatgatgaggagaatcaaggaa

SEQ ID NO: 11739 - DNA, 33 bp, Homo sapiens
tcactgatgtgcttacgaactatattcctgatt

SEQ ID NO: 11740 - DNA, 33 bp, Homo sapiens
ctttatcaagttagtagagtataaagtgctgaa

SEQ ID NO: 11741 - DNA, 33 bp, Homo sapiens
actgctaccttgataatgacatagtagtttgaa

SEQ ID NO: 11742 - DNA, 33 bp, Homo sapiens
cagtttaaggcacttaggaatcatttacattaa

SEQ ID NO: 11743 - DNA, 51 bp, Homo sapiens
ctttggtaaaatgagtttttgaccctcctcttacagactcacaatatgtac

SEQ ID NO: 11744 - DNA, 33 bp, Homo sapiens
taactgcgttgttgtacaggacttgaccccggt

SEQ ID NO: 11745 - DNA, 33 bp, Homo sapiens
aataatagcattaaactgagaaagcatgaatct

SEQ ID NO: 11746 - DNA, 33 bp, Homo sapiens
gttggctctttggtgctaattttcattactatg

SEQ ID NO: 11747 - DNA, 33 bp, Homo sapiens
gataagtgatgccatagatataatagcagtaag

SEQ ID NO: 11748 - DNA, 33 bp, Homo sapiens
taacaacatctcgaacgctgatttcattcccca

SEQ ID NO: 11749 - DNA, 33 bp, Homo sapiens
cgtcaaatcgtcataactcaattaaccttgagg

SEQ ID NO: 11750 - DNA, 33 bp, Homo sapiens
tctgtaggtttcattggactatttcataccgta

SEQ ID NO: 11751 - DNA, 33 bp, Homo sapiens
cctaatataccacaaattggacaggatggagat

SEQ ID NO: 11752 - DNA, 51 bp, Homo sapiens
tcatttgggtaaataccaaggagcataactgttgaatcacatggtaagaat

SEQ ID NO: 11753 - DNA, 33 bp, Homo sapiens
aaatagacggttaaaggaggatgccttgagcca

SEQ ID NO: 11754 - DNA, 33 bp, Homo sapiens
ttttgcacaacagagacgtttgcaaaatcacaa

SEQ ID NO: 11755 - DNA, 33 bp, Homo sapiens
gtcttttgaaaatgaactaaaagaggtctatgg

SEQ ID NO: 11756 - DNA, 51 bp, Homo sapiens
tgatggggaataggtgatgggagaacaaaagtatcatatattaaatagcag

SEQ ID NO: 11757 - DNA, 33 bp, Homo sapiens
ttctgcagagaccaaatagaagtaaggtattaa

SEQ ID NO: 11758 - DNA, 33 bp, Homo sapiens
tggtggccttcattactgggtagtgtgttcctt

SEQ ID NO: 11759 - DNA, 51 bp, Homo sapiens
cacatggaatgttcgagttctgtattaacatgggattgttgttttctaagc

SEQ ID NO: 11760 - DNA, 33 bp, Homo sapiens
ggactgcgcaccctggtaattttacgcaacaga

SEQ ID NO: 11761 - DNA, 33 bp, Homo sapiens
agacgtttctttaacttaccgatttcaatcttt

SEQ ID NO: 11762 - DNA, 33 bp, Homo sapiens
cctggatttggcatcagcacttagttaagtagg

SEQ ID NO: 11763 - DNA, 33 bp, Homo sapiens
aaacatctttttttaggaaccattatacagaca

SEQ ID NO: 11764 - DNA, 33 bp, Homo sapiens
gcgttggctgctggcataatgtttgtaatttct

SEQ ID NO: 11765 - DNA, 33 bp, Homo sapiens
actctaaccattaccacaatcatattctcatgg

SEQ ID NO: 11766 - DNA, 33 bp, Homo sapiens
actttcatcctctttatgtaagtgaccctgaag

SEQ ID NO: 11767 - DNA, 33 bp, Homo sapiens
tatgtctacacttgcatgaacttctctggagaa

SEQ ID NO: 11768 - DNA, 33 bp, Homo sapiens
aggactgatgttcttatgaggagacacacacac

SEQ ID NO: 11769 - DNA, 33 bp, Homo sapiens
gtggctgggtttaaaatcttaggatcagccggg

SEQ ID NO: 11770 - DNA, 33 bp, Homo sapiens
agaatacagttgatgacgctcttcttgaaaaac

SEQ ID NO: 11771 - DNA, 33 bp, Homo sapiens
gaggcctttatcctggtattgaaggatctaatt

SEQ ID NO: 11772 - DNA, 33 bp, Homo sapiens
aaaaagcagtttctgagaattagatccttcaat

SEQ ID NO: 11773 - DNA, 33 bp, Homo sapiens
attttgaaatgttaaagtgaaggctgaactggc

SEQ ID NO: 11774 - DNA, 33 bp, Homo sapiens
tcatcattacttttcatggtaagaacagctatt

SEQ ID NO: 11775 - DNA, 33 bp, Homo sapiens
aaatgtcattccaccagagaggcatagaagaaa

SEQ ID NO: 11776 - DNA, 33 bp, Homo sapiens
actccttatattcacactgataacatgagcatt

SEQ ID NO: 11777 - DNA, 33 bp, Homo sapiens
attttagctgatacaggagacattgcctccaca

SEQ ID NO: 11778 - DNA, 33 bp, Homo sapiens
gaaattgtttttctgatagttggtaggttctat

SEQ ID NO: 11779 - DNA, 51 bp, Homo sapiens
acatgtattatcttcccacgatcagtttcaagaaccttcatgattctgtca

SEQ ID NO: 11780 - DNA, 33 bp, Homo sapiens
atgtttcctacgtgtataagaattcacatgagc

SEQ ID NO: 11781 - DNA, 33 bp, Homo sapiens
ttgcataagctaaatatcagatgtcttatccat

SEQ ID NO: 11782 - DNA, 33 bp, Homo sapiens
ccttttagcttccccagtcttcctgttaacacc

SEQ ID NO: 11783 - DNA, 33 bp, Homo sapiens
caagtatccaaacagcgccttttaaatctagac

SEQ ID NO: 11784 - DNA, 33 bp, Homo sapiens
ttctaacataaaatgatgtgaaatgctaaaata

SEQ ID NO: 11785 - DNA, 33 bp, Homo sapiens
gccagataaacataactgtcacactaaaggcca

SEQ ID NO: 11786 - DNA, 33 bp, Homo sapiens
tagatgttctcaaaagtctctctggtgtggctg

SEQ ID NO: 11787 - DNA, 33 bp, Homo sapiens
gagcagacataattcagtatataacaagctgta

SEQ ID NO: 11788 - DNA, 33 bp, Homo sapiens
ttaaagagagaattaaggtaaaatgtgtgggtg

SEQ ID NO: 11789 - DNA, 51 bp, Homo sapiens
ctaaaccttgtagacaagtgagtcatctgatatgtatagaagctgtgatat

SEQ ID NO: 11790 - DNA, 33 bp, Homo sapiens
tgtatgggtgtcatccgggaagaactggcaata

SEQ ID NO: 11791 - DNA, 33 bp, Homo sapiens
cagtgccaggctcagacaatatttgtaataata

SEQ ID NO: 11792 - DNA, 33 bp, Homo sapiens
cattttaggacaataactagctgcatggtctct

SEQ ID NO: 11793 - DNA, 33 bp, Homo sapiens
cctctgcatctaagaggaataaaaaggttacac

SEQ ID NO: 11794 - DNA, 33 bp, Homo sapiens
aaaatagcaggattcattgaaaggtataaacgt

SEQ ID NO: 11795 - DNA, 33 bp, Homo sapiens
agaagacaggaaagcagcgccgtgctaggggaa

SEQ ID NO: 11796 - DNA, 33 bp, Homo sapiens
gcaagagtcacccacagtgagtctggtttaggt

SEQ ID NO: 11797 - DNA, 33 bp, Homo sapiens
agccggaagtctgagatggtctgttttcaagaa

SEQ ID NO: 11798 - DNA, 33 bp, Homo sapiens
cctgacaatgaaaaaatggtttgttcagggatt

SEQ ID NO: 11799 - DNA, 33 bp, Homo sapiens
ggtttcagttccgccagactctccctcagtcct

SEQ ID NO: 11800 - DNA, 33 bp, Homo sapiens
gggaacgctaggaccatgaggggccatcagtga

SEQ ID NO: 11801 - DNA, 33 bp, Homo sapiens
ccctctgcctggaatgtacggtccatgtttcac

SEQ ID NO: 11802 - DNA, 33 bp, Homo sapiens
cacaatcatgccctaattcgaagacaactcagt

SEQ ID NO: 11803 - DNA, 33 bp, Homo sapiens
tggaataaacaaagtcgatcatgccaggcagct

SEQ ID NO: 11804 - DNA, 33 bp, Homo sapiens
aagacccatctatgtggaacatcagcattcctg

SEQ ID NO: 11805 - DNA, 33 bp, Homo sapiens
agtgtatcctgatgtgtataagactgaatactc

SEQ ID NO: 11806 - DNA, 33 bp, Homo sapiens
aaggtgtcccggaaagtagatttaatcctgtct

SEQ ID NO: 11807 - DNA, 33 bp, Homo sapiens
actcttaacctgaagcgcaagtgacagaaaacc

SEQ ID NO: 11808 - DNA, 33 bp, Homo sapiens
tgacattgtagtgatacgaaaatgagatgcggg

SEQ ID NO: 11809 - DNA, 33 bp, Homo sapiens
gattaatgctaattccgctaatgagcactaatg

SEQ ID NO: 11810 - DNA, 33 bp, Homo sapiens
catttcccaaatgccttagcggttgtcttaaca

SEQ ID NO: 11811 - DNA, 33 bp, Homo sapiens
tcagttacagtcactatgacctcattttaaaag

SEQ ID NO: 11812 - DNA, 33 bp, Homo sapiens
aaaaccatgaaaaaaagtcaagacaacttcctg

SEQ ID NO: 11813 - DNA, 33 bp, Homo sapiens
ctttgatttctcgatttaaaacacaagcaaaca

SEQ ID NO: 11814 - DNA, 33 bp, Homo sapiens
gggaagatgatactgatccaggcaagacgcatg

SEQ ID NO: 11815 - DNA, 33 bp, Homo sapiens
cccaggcctctttgcagcttggtggtctcaggt

SEQ ID NO: 11816 - DNA, 33 bp, Homo sapiens
ggggtaacaggtcccatgaaagtccaaagccca

SEQ ID NO: 11817 - DNA, 33 bp, Homo sapiens
gtggccacgaacccattagagttacagatcctc

SEQ ID NO: 11818 - DNA, 33 bp, Homo sapiens
taaacaggttttttcaggaactgcgagactgtt

SEQ ID NO: 11819 - DNA, 33 bp, Homo sapiens
aaagctagagttagaatacgccattgagaccat

SEQ ID NO: 11820 - DNA, 33 bp, Homo sapiens
gaatgaagtgtttggagaccatagctgcttttt

SEQ ID NO: 11821 - DNA, 33 bp, Homo sapiens
atgagcgattaagtgcgattttgatgtagggaa

SEQ ID NO: 11822 - DNA, 33 bp, Homo sapiens
ggataggggaaagctctatgaatgtaagatctg

SEQ ID NO: 11823 - DNA, 33 bp, Homo sapiens
ggggctagcgttgccatctctccctattaaact

SEQ ID NO: 11824 - DNA, 33 bp, Homo sapiens
ctcctactagagctacgatacttttcggccctt

SEQ ID NO: 11825 - DNA, 33 bp, Homo sapiens
caaagaaaggcaaagaggtcaagtccttgcaca

SEQ ID NO: 11826 - DNA, 33 bp, Homo sapiens
ttctgaggcattaatcgatctaccactcctctt

SEQ ID NO: 11827 - DNA, 33 bp, Homo sapiens
acaatttcaacagtccgctaactggtttccttg

SEQ ID NO: 11828 - DNA, 33 bp, Homo sapiens
ttcaaggaactcagtagatgtttgtcaagcgaa

SEQ ID NO: 11829 - DNA, 33 bp, Homo sapiens
aaccagcagcaatgaattaaatgagtgaatatg

SEQ ID NO: 11830 - DNA, 33 bp, Homo sapiens
cctccctcttgctgcagaatttcccaggggtgt

SEQ ID NO: 11831 - DNA, 33 bp, Homo sapiens
tcctctgtgcctggacgctttgttgcttcctca

SEQ ID NO: 11832 - DNA, 33 bp, Homo sapiens
tcttggatctggttgagctctttggtccgagta

SEQ ID NO: 11833 - DNA, 51 bp, Homo sapiens
cctggtgactcccactcctggtgtataagaggctccatcaatccaattatt

SEQ ID NO: 11834 - DNA, 33 bp, Homo sapiens
tgtggaacatattaccgactttaggctagagta

SEQ ID NO: 11835 - DNA, 33 bp, Homo sapiens
gccgaggatggcgatttaagtaagagtagcttt

SEQ ID NO: 11836 - DNA, 51 bp, Homo sapiens
tatgctaagtgaaagaagtcagtcattacagaccacatattatatgatgcc

SEQ ID NO: 11837 - DNA, 33 bp, Homo sapiens
cattaagctcttagcatagtttagtcggatacc

SEQ ID NO: 11838 - DNA, 33 bp, Homo sapiens
aagaaaaatttgaaacggttgcaatgaccagca

SEQ ID NO: 11839 - DNA, 33 bp, Homo sapiens
catttctcctggcatctctagctcttttagatg

SEQ ID NO: 11840 - DNA, 33 bp, Homo sapiens
agaggaagggatgtgagaatacagatcatgaca

SEQ ID NO: 11841 - DNA, 33 bp, Homo sapiens
atcacaactcagttaccataaaatacttgacac

SEQ ID NO: 11842 - DNA, 33 bp, Homo sapiens
ggtagtggcatatagagagagacctgcaggtcc

SEQ ID NO: 11843 - DNA, 51 bp, Homo sapiens
ggctgtcaagatctaacatcaccaaggctagcccaccactcccagtctaaa

SEQ ID NO: 11844 - DNA, 33 bp, Homo sapiens
gaaaaggtccaaattagaggtgatggcaagcac

SEQ ID NO: 11845 - DNA, 33 bp, Homo sapiens
ttcctaccacagactgtcaaaaacatcttctgg

SEQ ID NO: 11846 - DNA, 33 bp, Homo sapiens
ggcccagactctcacataggttttagagggagt

SEQ ID NO: 11847 - DNA, 51 bp, Homo sapiens
tgctacaactgcagacttagaaaaatgtggtcactcttgaggtggctaaag

SEQ ID NO: 11848 - DNA, 33 bp, Homo sapiens
aaagttcccaggcctaggaatgtgtatgtgtat

SEQ ID NO: 11849 - DNA, 33 bp, Homo sapiens
gactagggctgatttcgaagcacttgagcctgg

SEQ ID NO: 11850 - DNA, 33 bp, Homo sapiens
ataatgacaacatcacgcagcataactgagtat

SEQ ID NO: 11851 - DNA, 33 bp, Homo sapiens
atacagtcacttgctcgccttcattaattgcaa

SEQ ID NO: 11852 - DNA, 51 bp, Homo sapiens
gacatttgtacagtgtgatagagaagtacattggaaaaccaaagttcagaa

SEQ ID NO: 11853 - DNA, 33 bp, Homo sapiens
ccttgtgttatagtgatctcaatttctggatga

SEQ ID NO: 11854 - DNA, 33 bp, Homo sapiens
cctcaaaaatataaaatgactgtccagtgccca

SEQ ID NO: 11855 - DNA, 33 bp, Homo sapiens
tgtgaaaataggcaccggagttcaaattttatg

SEQ ID NO: 11856 - DNA, 33 bp, Homo sapiens
aggcaagtaccaggttgaaattgtgggtgtgat

SEQ ID NO: 11857 - DNA, 33 bp, Homo sapiens
cttcttctgtagctaccctaattccaagtcatt

SEQ ID NO: 11858 - DNA, 33 bp, Homo sapiens
acgatcttattaatgcggattctgggttccatt

SEQ ID NO: 11859 - DNA, 33 bp, Homo sapiens
ctttaatagacaaaactgcaaacatatgtaact

SEQ ID NO: 11860 - DNA, 33 bp, Homo sapiens
ttagatcttggttcaagttccagttttaaactt

SEQ ID NO: 11861 - DNA, 33 bp, Homo sapiens
aaatgcttatcctctatctttgcaaacattaaa

SEQ ID NO: 11862 - DNA, 33 bp, Homo sapiens
catagtaaaagctcaacacacggcagccataat

SEQ ID NO: 11863 - DNA, 33 bp, Homo sapiens
cttcccttctccaaaatccaggagcaacttgag

SEQ ID NO: 11864 - DNA, 33 bp, Homo sapiens
taagtaaaaagagtcagtccacatgattccaac

SEQ ID NO: 11865 - DNA, 33 bp, Homo sapiens
ctattatggcatcagagaacatgactttgtgct

SEQ ID NO: 11866 - DNA, 33 bp, Homo sapiens
gactcatgctacacactgcgtggatgaaccttg

SEQ ID NO: 11867 - DNA, 33 bp, Homo sapiens
aagagcttcaagcatctaaaaacctggtcacct

SEQ ID NO: 11868 - DNA, 33 bp, Homo sapiens
tgcatatgcaaatagacccttggcaggtgcttg

SEQ ID NO: 11869 - DNA, 33 bp, Homo sapiens
aaaatctgaggtctccgagaaaagaaattctat

SEQ ID NO: 11870 - DNA, 51 bp, Homo sapiens
caaagactcagttgggataagagacgaggtatccagctcccagaacaaaat

SEQ ID NO: 11871 - DNA, 51 bp, Homo sapiens
tgttcttttcaaactctcttctctatctggcaggttctctgacgatccagt

SEQ ID NO: 11872 - DNA, 33 bp, Homo sapiens
gtaacaggggtgtaaatgccagccaatctcttt

SEQ ID NO: 11873 - DNA, 33 bp, Homo sapiens
gatgttgatgattggcggaaggattttatatgt

SEQ ID NO: 11874 - DNA, 33 bp, Homo sapiens
tcatcttaatgagccataaatgtgtaattagca

SEQ ID NO: 11875 - DNA, 33 bp, Homo sapiens
cacagggagttattagtcacatcaagtttccaa

SEQ ID NO: 11876 - DNA, 33 bp, Homo sapiens
ctaactgcgaaatgactgagatctcatagatgt

SEQ ID NO: 11877 - DNA, 33 bp, Homo sapiens
gcaaaacacaccaaattaatagtcaagatcaag

SEQ ID NO: 11878 - DNA, 33 bp, Homo sapiens
aaatcatagaggtatatggcagtttcgtggact

SEQ ID NO: 11879 - DNA, 33 bp, Homo sapiens
tgtattactcatggcatgtacttatactaaaaa

SEQ ID NO: 11880 - DNA, 33 bp, Homo sapiens
ctgcgtgaagaagaaattagatgattcatgcaa

SEQ ID NO: 11881 - DNA, 51 bp, Homo sapiens
attctggaaatcataggactgtgaacaagaaaagacctgagagatctcata

SEQ ID NO: 11882 - DNA, 33 bp, Homo sapiens
acagaagccacttgcagcaaaaccacttacagt

SEQ ID NO: 11883 - DNA, 33 bp, Homo sapiens
aagcaattactaaagccacagtgacttgaggtt

SEQ ID NO: 11884 - DNA, 33 bp, Homo sapiens
tgtgcgtcattcaacctattgagggtctgcata

SEQ ID NO: 11885 - DNA, 33 bp, Homo sapiens
aacagttagattgctatgattatctgttaagat

SEQ ID NO: 11886 - DNA, 51 bp, Homo sapiens
gaaaaagacaataactgaaataaaactctcaatgaatgggctcaatagcag

SEQ ID NO: 11887 - DNA, 51 bp, Homo sapiens
attgattggctgagtctaatctaagtagtgaagtaactgggctggctgttc

SEQ ID NO: 11888 - DNA, 33 bp, Homo sapiens
aataattggcactctagaaaagggagatcttcc

SEQ ID NO: 11889 - DNA, 33 bp, Homo sapiens
aagatccgcaccgtcacaacccatctcattaaa

SEQ ID NO: 11890 - DNA, 33 bp, Homo sapiens
tcatgccattactgtagataaggcagtgtagga

SEQ ID NO: 11891 - DNA, 33 bp, Homo sapiens
gattttctgcaaaaccggatgatgagaagagac

SEQ ID NO: 11892 - DNA, 33 bp, Homo sapiens
ctgatcttgctgcccctactgtttgcttgagaa

SEQ ID NO: 11893 - DNA, 33 bp, Homo sapiens
gtaaatgcaaggtaaagttccagcaatgggttg

SEQ ID NO: 11894 - DNA, 33 bp, Homo sapiens
gtttctcctcaacctccctacacttattgctgt

SEQ ID NO: 11895 - DNA, 33 bp, Homo sapiens
agacgacattggcaaagtgactcagacccacag

SEQ ID NO: 11896 - DNA, 33 bp, Homo sapiens
atgtattgcaaataaacaaacatggaaaaatct

SEQ ID NO: 11897 - DNA, 33 bp, Homo sapiens
gtctgcagtcaaatgagagacgcttaaatgctg

SEQ ID NO: 11898 - DNA, 33 bp, Homo sapiens
tttgagatatgttctgtaaccaggttattttac

SEQ ID NO: 11899 - DNA, 33 bp, Homo sapiens
tttgtgtgttgtcatacgttttcaactctttcg

SEQ ID NO: 11900 - DNA, 33 bp, Homo sapiens
aatggctgataccaagtctgcagtgaaaaatgc

SEQ ID NO: 11901 - DNA, 33 bp, Homo sapiens
gaaacttggttgagcctagaattttgaaaccag

SEQ ID NO: 11902 - DNA, 33 bp, Homo sapiens
gaagaagagaacatcaggcctcttggctggact

SEQ ID NO: 11903 - DNA, 33 bp, Homo sapiens
ggtgattctgaaacacgctgaaggtgaagaaca

SEQ ID NO: 11904 - DNA, 33 bp, Homo sapiens
gctgctacatggaacattggctaaaagtaggca

SEQ ID NO: 11905 - DNA, 33 bp, Homo sapiens
aaatctctgttcacatgaaagcctgtccatgaa

SEQ ID NO: 11906 - DNA, 51 bp, Homo sapiens
ctcagacacgcttcctaaaatcatcggaggtgcttgcacaaattcagctac

SEQ ID NO: 11907 - DNA, 33 bp, Homo sapiens
actcgttttagaaagatccctaacagtttgaga

SEQ ID NO: 11908 - DNA, 33 bp, Homo sapiens
gctccaaagcattgacggtagttattctaaaga

SEQ ID NO: 11909 - DNA, 33 bp, Homo sapiens
ccatctcctctattactaaagcccctgtaagac

SEQ ID NO: 11910 - DNA, 33 bp, Homo sapiens
tttgtcaaactggaaacacaaaacaaagcaaaa

SEQ ID NO: 11911 - DNA, 33 bp, Homo sapiens
tgatatacagcgaagagaaaggatgaattacag

SEQ ID NO: 11912 - DNA, 33 bp, Homo sapiens
ttaagcagattggcaagtggtacgtgaggcctg

SEQ ID NO: 11913 - DNA, 33 bp, Homo sapiens
aaacttgacatatgcagtcaacgttaacatcac

SEQ ID NO: 11914 - DNA, 33 bp, Homo sapiens
gttttgagtcatttaatgctaaccatcagagtt

SEQ ID NO: 11915 - DNA, 33 bp, Homo sapiens
actgcccccagaatgatgtgagaagtccttcaa

SEQ ID NO: 11916 - DNA, 33 bp, Homo sapiens
ggatgatattaatcccgacatcgcagggaatgt

SEQ ID NO: 11917 - DNA, 33 bp, Homo sapiens
ttttagctttgtaggacatttttttcttctcct

SEQ ID NO: 11918 - DNA, 33 bp, Homo sapiens
ccctttcagcttctgatacctttgtgcaagcct

SEQ ID NO: 11919 - DNA, 51 bp, Homo sapiens
gcttctcttgggttctctcaatgcacatctctgttatggcaattatctgag

SEQ ID NO: 11920 - DNA, 33 bp, Homo sapiens
cattgaagcagggaaataattggagcacaaagg

SEQ ID NO: 11921 - DNA, 33 bp, Homo sapiens
aaatactgccggtgacggaagctgcttaatcta

SEQ ID NO: 11922 - DNA, 33 bp, Homo sapiens
gatacaaatcagagaggaccctaaagaagccct

SEQ ID NO: 11923 - DNA, 33 bp, Homo sapiens
accaatgtttattggatgtaaatgtctactggg

SEQ ID NO: 11924 - DNA, 33 bp, Homo sapiens
gagaatgacttagaacggcacagcaaaggaatt

SEQ ID NO: 11925 - DNA, 33 bp, Homo sapiens
gctttcattctttctcgaatttgtctgctctgt

SEQ ID NO: 11926 - DNA, 33 bp, Homo sapiens
gtaaacctctctaaaattacccagaaatgcaac

SEQ ID NO: 11927 - DNA, 33 bp, Homo sapiens
aatgaaagaaaaagcctggagtaagctccaaca

SEQ ID NO: 11928 - DNA, 33 bp, Homo sapiens
tcaccattacttagattatcacaggtagggatg

SEQ ID NO: 11929 - DNA, 33 bp, Homo sapiens
attaagtgcataacccgaatattcagaatagaa

SEQ ID NO: 11930 - DNA, 51 bp, Homo sapiens
gagtgtgtttcatgacagcacagaatttatctactttgtttattgcaatgt

SEQ ID NO: 11931 - DNA, 33 bp, Homo sapiens
tgttgcagatatcttggaacatcatttgtgctt

SEQ ID NO: 11932 - DNA, 33 bp, Homo sapiens
tcacaataaaagttaattcatcttctcattctc

SEQ ID NO: 11933 - DNA, 33 bp, Homo sapiens
tgcacattctaactacgggacacttccttttct

SEQ ID NO: 11934 - DNA, 33 bp, Homo sapiens
catatttctagtgttatggcaatgttaactttg

SEQ ID NO: 11935 - DNA, 33 bp, Homo sapiens
cttgtaccctccgaaggcaaaacctgagctgta

SEQ ID NO: 11936 - DNA, 33 bp, Homo sapiens
aagttatttagctgactggtaaagagtctcttt

SEQ ID NO: 11937 - DNA, 33 bp, Homo sapiens
ctgaacctctagagaatacagtcaggtagatga

SEQ ID NO: 11938 - DNA, 33 bp, Homo sapiens
taaagatcaacgctaatattgcctccaaccaag

SEQ ID NO: 11939 - DNA, 51 bp, Homo sapiens
cacacacagcctcaatgacctaataggcagatttgcagagccataaccttg

SEQ ID NO: 11940 - DNA, 33 bp, Homo sapiens
ggaaatcatcatttgggaattgtatttcctctt

SEQ ID NO: 11941 - DNA, 33 bp, Homo sapiens
tatctagaaaacatactggaaaaacatccagcc

SEQ ID NO: 11942 - DNA, 33 bp, Homo sapiens
atttccacttccctcattcaaacacatatagct

SEQ ID NO: 11943 - DNA, 33 bp, Homo sapiens
gctcagacaataaatagaaacagagtgctcagc

SEQ ID NO: 11944 - DNA, 33 bp, Homo sapiens
ttctctctggcacttatcatttatctattttat

SEQ ID NO: 11945 - DNA, 33 bp, Homo sapiens
cccactgctggtccaagatctgctatcaccatt

SEQ ID NO: 11946 - DNA, 33 bp, Homo sapiens
gagagcagtttttaatttgtgaacgtgtaagtc

SEQ ID NO: 11947 - DNA, 33 bp, Homo sapiens
ttggattgcttgagactgcatctgtatgcctat

SEQ ID NO: 11948 - DNA, 33 bp, Homo sapiens
tcttagtttctacacaggatgttcagacatatt

SEQ ID NO: 11949 - DNA, 33 bp, Homo sapiens
atcattgcctgcagaagaagatggtgttaagta

SEQ ID NO: 11950 - DNA, 33 bp, Homo sapiens
ttaagaaatgtagatctaggagctgtctaacaa

SEQ ID NO: 11951 - DNA, 33 bp, Homo sapiens
agtgcccatgttcaggtaacactaatatttgca

SEQ ID NO: 11952 - DNA, 33 bp, Homo sapiens
tactgcagtactctcggacccaaggtctttcca

SEQ ID NO: 11953 - DNA, 33 bp, Homo sapiens
tgggctggtgccatctgaaggtgacaatggctg

SEQ ID NO: 11954 - DNA, 33 bp, Homo sapiens
acatcatgatagcagattcgccggagtaatgag

SEQ ID NO: 11955 - DNA, 33 bp, Homo sapiens
ctctaagggacattcatccaaatctgactctgg

SEQ ID NO: 11956 - DNA, 33 bp, Homo sapiens
gagtaggaaggaacaggctcattaacattcata

SEQ ID NO: 11957 - DNA, 33 bp, Homo sapiens
ctatgatgctcaagtatctaaccaggaggaaaa

SEQ ID NO: 11958 - DNA, 33 bp, Homo sapiens
tctttcacaatctagggcaaagagtatgggata

SEQ ID NO: 11959 - DNA, 33 bp, Homo sapiens
tgactgggtttccacatcctctagctttcagtt

SEQ ID NO: 11960 - DNA, 33 bp, Homo sapiens
gtagctggaaccatagtagtatgcaatcacatc

SEQ ID NO: 11961 - DNA, 33 bp, Homo sapiens
tcatctcgccttgtcatggaatgtaagaaatcc

SEQ ID NO: 11962 - DNA, 33 bp, Homo sapiens
tttgatagagttaaccgctttcttcttcttgat

SEQ ID NO: 11963 - DNA, 51 bp, Homo sapiens
aaattaccaggacttaaggcaggagtcatacgctaaccgtgctgttttgtg

SEQ ID NO: 11964 - DNA, 33 bp, Homo sapiens
acatcaagggaacctagagtggaattaaatatc

SEQ ID NO: 11965 - DNA, 33 bp, Homo sapiens
gatgtttgttacacacgcaattcatttcctaat

SEQ ID NO: 11966 - DNA, 33 bp, Homo sapiens
gatacttggaatgtcccgactacaggaacaaag

SEQ ID NO: 11967 - DNA, 33 bp, Homo sapiens
ctgtttcaatattagatgtgaagaggactgatt

SEQ ID NO: 11968 - DNA, 33 bp, Homo sapiens
tgccaaccaatccacatgaccaccctatttgaa

SEQ ID NO: 11969 - DNA, 33 bp, Homo sapiens
tatcttattgacatgctcattgacagctcttac

SEQ ID NO: 11970 - DNA, 33 bp, Homo sapiens
catgcttcttgctccagcttaatttgtccctta

SEQ ID NO: 11971 - DNA, 33 bp, Homo sapiens
cacagccaaactaagcgagtagtattatagaat

SEQ ID NO: 11972 - DNA, 33 bp, Homo sapiens
aaatgtatacaataaatgtgaacccagctgagt

SEQ ID NO: 11973 - DNA, 51 bp, Homo sapiens
catcaatttaaatcagcctcagaattggaatagcataatttccattgactc

SEQ ID NO: 11974 - DNA, 33 bp, Homo sapiens
ttatcattcctgttaccgctagcataaaaacca

SEQ ID NO: 11975 - DNA, 33 bp, Homo sapiens
gctcttaacactttactccatggtttatccaac

SEQ ID NO: 11976 - DNA, 33 bp, Homo sapiens
ttcttttctcggtgtatattcttggtgcctttg

SEQ ID NO: 11977 - DNA, 33 bp, Homo sapiens
taatgttagccactgatacaatacatacattcc

SEQ ID NO: 11978 - DNA, 51 bp, Homo sapiens
cacagggtaacaagaagataattcctaaagagttggtgcttttgttttgta

SEQ ID NO: 11979 - DNA, 51 bp, Homo sapiens
ctttgccttctctaaagatccatgggcatttttatttggtcacagaggcct

SEQ ID NO: 11980 - DNA, 33 bp, Homo sapiens
cctcttgttgaaagtggagagcaacattacagt

SEQ ID NO: 11981 - DNA, 33 bp, Homo sapiens
cattccatatcctcgatgtcctgctggaacaat

SEQ ID NO: 11982 - DNA, 33 bp, Homo sapiens
tgttctaccaattaaatacagggctaggtagaa

SEQ ID NO: 11983 - DNA, 33 bp, Homo sapiens
gctttggaattactacgactcttggccatgaag

SEQ ID NO: 11984 - DNA, 33 bp, Homo sapiens
tcaactctcaccacaatcctactgctcccattt

SEQ ID NO: 11985 - DNA, 33 bp, Homo sapiens
tcatccagctcctaacgactgtgggatctgcct

SEQ ID NO: 11986 - DNA, 33 bp, Homo sapiens
aagccttgcgctttaagtaacaggggagcttcc

SEQ ID NO: 11987 - DNA, 33 bp, Homo sapiens
ctaatctagctctttgtaggaaatgctaagtta

SEQ ID NO: 11988 - DNA, 33 bp, Homo sapiens
gcaggaaaggaagtggcaagtcctctgatatca

SEQ ID NO: 11989 - DNA, 33 bp, Homo sapiens
ctggctctggggtttcgagcaagtcacattctg

SEQ ID NO: 11990 - DNA, 33 bp, Homo sapiens
gctgcagacctgcaaatgtaatatattctgttg

SEQ ID NO: 11991 - DNA, 33 bp, Homo sapiens
gctccttcacacctaagtattaaaagccctagc

SEQ ID NO: 11992 - DNA, 33 bp, Homo sapiens
gaaactgaggttacacggtcggatacctgtcag

SEQ ID NO: 11993 - DNA, 33 bp, Homo sapiens
ctttactgactatttcgctttttgccctggaaa

SEQ ID NO: 11994 - DNA, 33 bp, Homo sapiens
tctaagtaggtgtattgaacaagttttggaagg

SEQ ID NO: 11995 - DNA, 51 bp, Homo sapiens
ttcataagttctaacaaacctctgatagaagctgtttccagccctttcatc

SEQ ID NO: 11996 - DNA, 33 bp, Homo sapiens
ctgtacattgatctgaccttcattaaccttgct

SEQ ID NO: 11997 - DNA, 33 bp, Homo sapiens
ttaaaaggcactttgcgaaaaattacaaaaata

SEQ ID NO: 11998 - DNA, 33 bp, Homo sapiens
atcaagtaataaataatgtgcaaccagctgccc

SEQ ID NO: 11999 - DNA, 33 bp, Homo sapiens
cattcatttcttcaacgagtatttagctcctac

SEQ ID NO: 12000 - DNA, 33 bp, Homo sapiens
ccaggtgtccagccactcactttgtctcaggtg

SEQ ID NO: 12001 - DNA, 33 bp, Homo sapiens
gtacgggaaaagtagatgtcaatcaggtggaaa

SEQ ID NO: 12002 - DNA, 33 bp, Homo sapiens
ctctgaggttggttcttaatgctcacaaagcta

SEQ ID NO: 12003 - DNA, 51 bp, Homo sapiens
gggtcctctatcaaatggcaactgagtaataggaccttcctccaactgttg

SEQ ID NO: 12004 - DNA, 33 bp, Homo sapiens
acgtggtgtgcccaaccaggaaccacatggggc

SEQ ID NO: 12005 - DNA, 33 bp, Homo sapiens
atgcctcctatttttatgcgctggctgcaccca

SEQ ID NO: 12006 - DNA, 33 bp, Homo sapiens
tgtttatttctcagccgctaatggattgtttga

SEQ ID NO: 12007 - DNA, 33 bp, Homo sapiens
gtatcataagcacaaacttatgacttcacaaga

SEQ ID NO: 12008 - DNA, 33 bp, Homo sapiens
ttcccaaccctgctcatatgctatggaacttag

SEQ ID NO: 12009 - DNA, 33 bp, Homo sapiens
gtgccatggattctgagaaagcctccatctccc

SEQ ID NO: 12010 - DNA, 33 bp, Homo sapiens
cgatgttttagatagataggaacttagaaaatt

SEQ ID NO: 12011 - DNA, 33 bp, Homo sapiens
gcatggcacggactgataggttacatgggaaac

SEQ ID NO: 12012 - DNA, 33 bp, Homo sapiens
gccctgtctcactagcggattgaccatgagtac

SEQ ID NO: 12013 - DNA, 33 bp, Homo sapiens
aattttgcagaaagaatcattgcaggaagtttt

SEQ ID NO: 12014 - DNA, 33 bp, Homo sapiens
catgggaatgctgcaaggttaatggaagagagg

SEQ ID NO: 12015 - DNA, 33 bp, Homo sapiens
agacaatgaggtgcacggagttaagtaggagca

SEQ ID NO: 12016 - DNA, 33 bp, Homo sapiens
gacaggagcagcccacgagtcatatggccttag

SEQ ID NO: 12017 - DNA, 33 bp, Homo sapiens
caaatgcaataaacacgcattcttatccacact

SEQ ID NO: 12018 - DNA, 33 bp, Homo sapiens
ggggtgagtcattaactgcggtcctggtgctgg

SEQ ID NO: 12019 - DNA, 33 bp, Homo sapiens
tccccacgataaaagcgcacacaaacagcaggt

SEQ ID NO: 12020 - DNA, 33 bp, Homo sapiens
tcattagtttagaagttaccttagctgaagttt

SEQ ID NO: 12021 - DNA, 33 bp, Homo sapiens
agggaactggccattatgaccagtggatagagt

SEQ ID NO: 12022 - DNA, 33 bp, Homo sapiens
tgccactccctattgacgtccgagttgatttta

SEQ ID NO: 12023 - DNA, 33 bp, Homo sapiens
acattagatctctagacgtattcatcccacata

SEQ ID NO: 12024 - DNA, 33 bp, Homo sapiens
atgaatacaggagatacgtacatgaaggtgctc

SEQ ID NO: 12025 - DNA, 33 bp, Homo sapiens
gattgtactttgattatgtgcaggaatttagct

SEQ ID NO: 12026 - DNA, 33 bp, Homo sapiens
tgaccaagggaagacagaaatggctatttaaat

SEQ ID NO: 12027 - DNA, 33 bp, Homo sapiens
tatgtacaaagcaggaggaccataattatctct

SEQ ID NO: 12028 - DNA, 33 bp, Homo sapiens
acatcatcattaaacaggaagagatgtggaatc

SEQ ID NO: 12029 - DNA, 33 bp, Homo sapiens
aagtgaacaaaaacatgagccaaagacaatgac

SEQ ID NO: 12030 - DNA, 33 bp, Homo sapiens
gtcacatgaccatgtattacaatgtatgcatgc

SEQ ID NO: 12031 - DNA, 33 bp, Homo sapiens
gtgaccttgaaaaatggaaggaggacatcttcc

SEQ ID NO: 12032 - DNA, 33 bp, Homo sapiens
ttattaaacatgatacccaaagtacagtgaaaa

SEQ ID NO: 12033 - DNA, 33 bp, Homo sapiens
aataatcagttgaaaatgaaaatgtaagatatc

SEQ ID NO: 12034 - DNA, 33 bp, Homo sapiens
aggttgacttcacttcgccatatattgatatcc

SEQ ID NO: 12035 - DNA, 33 bp, Homo sapiens
aagcttacttctttgcgaactactcattcccag

SEQ ID NO: 12036 - DNA, 33 bp, Homo sapiens
tagcctcaatcaaataccagcctcttaagtgag

SEQ ID NO: 12037 - DNA, 33 bp, Homo sapiens
tcaatgtgataaagagtatctacgaaaacatac

SEQ ID NO: 12038 - DNA, 33 bp, Homo sapiens
aatatgtaccttggagtcaactatttaagcatc

SEQ ID NO: 12039 - DNA, 33 bp, Homo sapiens
gctcatttgtaaactcgcaaccaactatgtgcc

SEQ ID NO: 12040 - DNA, 51 bp, Homo sapiens
caatgcagttgaaagcagtgataaatgcaatgggacaataatgtaggctag

SEQ ID NO: 12041 - DNA, 33 bp, Homo sapiens
ctgtcattgataattcgctttcactctcaggtg

SEQ ID NO: 12042 - DNA, 33 bp, Homo sapiens
atttcagattatagaagagcgtgcgggtttcga

SEQ ID NO: 12043 - DNA, 33 bp, Homo sapiens
tctgtagagagccttgcacagtgtctgagattt

SEQ ID NO: 12044 - DNA, 33 bp, Homo sapiens
aaaagaacacaacagatatttctcagataacaa

SEQ ID NO: 12045 - DNA, 33 bp, Homo sapiens
aatgcagcgagaaagatatcatgaacctcaggc

SEQ ID NO: 12046 - DNA, 33 bp, Homo sapiens
tgatctgaatgtcaaatgatttcttctaattga

SEQ ID NO: 12047 - DNA, 33 bp, Homo sapiens
gcccctaaattttaacgaggcaaatggtctccc

SEQ ID NO: 12048 - DNA, 33 bp, Homo sapiens
gaaacaaactctcatatggatttccactaagga

SEQ ID NO: 12049 - DNA, 33 bp, Homo sapiens
ttatgagacgactccaggaatctttgcttttgg

SEQ ID NO: 12050 - DNA, 33 bp, Homo sapiens
tgaatatgggaaacaatatgtagtagctttatt

SEQ ID NO: 12051 - DNA, 33 bp, Homo sapiens
gagcatttgaacactgcaagaattgctttgaac

SEQ ID NO: 12052 - DNA, 33 bp, Homo sapiens
gtggaaatgctgtagagggtaagtactgccaca

SEQ ID NO: 12053 - DNA, 33 bp, Homo sapiens
gtcagagcacaacacaggctatttggtttcctt

SEQ ID NO: 12054 - DNA, 33 bp, Homo sapiens
tcatagactaaaacaagagaatcctgtaaaaag

SEQ ID NO: 12055 - DNA, 33 bp, Homo sapiens
ggtctttctcactcaacaattctatgcttctgt

SEQ ID NO: 12056 - DNA, 33 bp, Homo sapiens
ggtagaactcactaccgaggatcgttgaaacct

SEQ ID NO: 12057 - DNA, 33 bp, Homo sapiens
ataggaacagataagagcaccttaaagtccttt

SEQ ID NO: 12058 - DNA, 33 bp, Homo sapiens
tatttgtattctcccagatgaatgtaaaaaggt

SEQ ID NO: 12059 - DNA, 33 bp, Homo sapiens
aaggaataccattagcgctctttgtgaagttta

SEQ ID NO: 12060 - DNA, 33 bp, Homo sapiens
acacacacattaacaagactcatgtcaacacat

SEQ ID NO: 12061 - DNA, 33 bp, Homo sapiens
acactcatgggcttaatgtcacacggaagtcaa

SEQ ID NO: 12062 - DNA, 33 bp, Homo sapiens
aaaaaaaataaagctatagatgtgtctttcggc

SEQ ID NO: 12063 - DNA, 33 bp, Homo sapiens
acggtgtcaaggcaatgaggggagaaccacaac

SEQ ID NO: 12064 - DNA, 33 bp, Homo sapiens
atgggagagtgtgttgtagttaacggctgcagg

SEQ ID NO: 12065 - DNA, 33 bp, Homo sapiens
taaggccaggaggactgaaataagcacattaga

SEQ ID NO: 12066 - DNA, 33 bp, Homo sapiens
tcagacaacgagaaactgctacattaaagtaca

SEQ ID NO: 12067 - DNA, 33 bp, Homo sapiens
aggagtgacactgtgagaagaagtcctgagaga

SEQ ID NO: 12068 - DNA, 33 bp, Homo sapiens
gcatatacttgtttcataggcatctcaaaatcc

SEQ ID NO: 12069 - DNA, 33 bp, Homo sapiens
ttctttttgaggtgatgaacatttttggaaaac

SEQ ID NO: 12070 - DNA, 33 bp, Homo sapiens
catgaactaggtaaaataggccagacacaaaag

SEQ ID NO: 12071 - DNA, 33 bp, Homo sapiens
tctccctgtgcaagacggcaaatttctacctct

SEQ ID NO: 12072 - DNA, 33 bp, Homo sapiens
tgtatgtgtctatgtatgggttctctcacacac

SEQ ID NO: 12073 - DNA, 33 bp, Homo sapiens
gacagaaaataattgctgaatttgacagtaagg

SEQ ID NO: 12074 - DNA, 33 bp, Homo sapiens
tggcatgcttgaagtatcagattttgaatgaaa

SEQ ID NO: 12075 - DNA, 33 bp, Homo sapiens
caggatagaccacatattaggcccacagaacaa

SEQ ID NO: 12076 - DNA, 33 bp, Homo sapiens
agtcatgtggatatccggctcctaacaaccact

SEQ ID NO: 12077 - DNA, 33 bp, Homo sapiens
aggtaaaataattgcatgtgtgattcaaaagca

SEQ ID NO: 12078 - DNA, 33 bp, Homo sapiens
tgagtttaaacagtcatccaagacagactcagc

SEQ ID NO: 12079 - DNA, 33 bp, Homo sapiens
ttacgattttgcagaatcattaatttttggtta

SEQ ID NO: 12080 - DNA, 51 bp, Homo sapiens
gtaatcttatagaaactataggcaccaaagttaaacattaaatgtgaaaat

SEQ ID NO: 12081 - DNA, 51 bp, Homo sapiens
aaatgattttcaaacagtgggataactagtattgagagaaaagttgcattg

SEQ ID NO: 12082 - DNA, 33 bp, Homo sapiens
tctgacactaagaggagacatccaggcatcgca

SEQ ID NO: 12083 - DNA, 33 bp, Homo sapiens
gtttattattaacgcctcagactttggggatag

SEQ ID NO: 12084 - DNA, 33 bp, Homo sapiens
tatcaaaaacataagatagatagtgtgtacaac

SEQ ID NO: 12085 - DNA, 33 bp, Homo sapiens
aaaagttgtaactatttaaaccagaaaacctca

SEQ ID NO: 12086 - DNA, 33 bp, Homo sapiens
tgtgggagctaaaggagcaaaaattgggaaagt

SEQ ID NO: 12087 - DNA, 33 bp, Homo sapiens
gtgacctattgtgagatggcccctgggactgat

SEQ ID NO: 12088 - DNA, 33 bp, Homo sapiens
tattaaagaagccaagtctaagttctcaataaa

SEQ ID NO: 12089 - DNA, 33 bp, Homo sapiens
tgttgcagctgtccaatctctctggcattctag

SEQ ID NO: 12090 - DNA, 51 bp, Homo sapiens
caagccctagtctgcttattaaatcggaattccaggggcagcggcttgcct

SEQ ID NO: 12091 - DNA, 33 bp, Homo sapiens
cttttagcttcacgaccactgtcatctgcagag

SEQ ID NO: 12092 - DNA, 33 bp, Homo sapiens
gggcatgacatttggggagcccactgtccagct

SEQ ID NO: 12093 - DNA, 33 bp, Homo sapiens
gtccttcccagaagccgcttattcattgctgca

SEQ ID NO: 12094 - DNA, 33 bp, Homo sapiens
gttcgattgaaattgatcattgtgaatacagtg

SEQ ID NO: 12095 - DNA, 33 bp, Homo sapiens
gtagtgataatagcccgataagtcttattcttg

SEQ ID NO: 12096 - DNA, 33 bp, Homo sapiens
ggacttttagaaatgcgagaatatgaggaatat

SEQ ID NO: 12097 - DNA, 33 bp, Homo sapiens
ctatcaaaaaaccctatctcaactggacagatt

SEQ ID NO: 12098 - DNA, 33 bp, Homo sapiens
tagatatcccaaggtctgaattctaattgtaat

SEQ ID NO: 12099 - DNA, 33 bp, Homo sapiens
agccagagatgtagcagggaagcaaaagtgcag

SEQ ID NO: 12100 - DNA, 33 bp, Homo sapiens
ctgtgtggcgttcatgtatctcagagggtgtag

SEQ ID NO: 12101 - DNA, 33 bp, Homo sapiens
tgaatcctaagttctagccaggacaattttcta

SEQ ID NO: 12102 - DNA, 33 bp, Homo sapiens
ggaagtgtgttgctaagaatgctaaaaatttaa

SEQ ID NO: 12103 - DNA, 33 bp, Homo sapiens
cccctgcctcgggacaccagaggaccagtcctc

SEQ ID NO: 12104 - DNA, 51 bp, Homo sapiens
acacatcatgatcacctagaatccatagtttacaacgcctttggtgctgta

SEQ ID NO: 12105 - DNA, 33 bp, Homo sapiens
aattggatatccatacggaagaaagctagcatc

SEQ ID NO: 12106 - DNA, 33 bp, Homo sapiens
ctatgcttggccctaagtatatcacccatcggc

SEQ ID NO: 12107 - DNA, 33 bp, Homo sapiens
atgttaacaatggttatcgctggagaatggact

SEQ ID NO: 12108 - DNA, 51 bp, Homo sapiens
tggacactgtggtgccatttggacaggattcaattatttattaaatttcac

SEQ ID NO: 12109 - DNA, 51 bp, Homo sapiens
ttccatcttcccttcaaatgtagcctcaatttctccagaaagtgtgtaggt

SEQ ID NO: 12110 - DNA, 51 bp, Homo sapiens
aggactcccgccagagctgtgggaatcttgcttcacaataggaaatctggt

SEQ ID NO: 12111 - DNA, 33 bp, Homo sapiens
caggctgagaacatccgaggaatagcaaggagc

SEQ ID NO: 12112 - DNA, 33 bp, Homo sapiens
tcaaaggaaaccaatcgaaatgcaaatcagcta

SEQ ID NO: 12113 - DNA, 33 bp, Homo sapiens
ctcatccagaatctaagcacattttgctctgtt

SEQ ID NO: 12114 - DNA, 33 bp, Homo sapiens
tcttcaagcaatcttagcagaattttcagtcat

SEQ ID NO: 12115 - DNA, 33 bp, Homo sapiens
gcccagtctccatcaagtgttgaatctcccaat

SEQ ID NO: 12116 - DNA, 33 bp, Homo sapiens
aggactatgagaaagatagatgctgcggaggcc

SEQ ID NO: 12117 - DNA, 33 bp, Homo sapiens
gacttactaagcaggattcccttgccttctaga

SEQ ID NO: 12118 - DNA, 33 bp, Homo sapiens
tttgttgtctgacagatcttgcaattttaaata

SEQ ID NO: 12119 - DNA, 33 bp, Homo sapiens
aattctaaactaagacgcatacatttgagaggg

SEQ ID NO: 12120 - DNA, 33 bp, Homo sapiens
atgtagctcttttatctctgtacctatcttatt

SEQ ID NO: 12121 - DNA, 33 bp, Homo sapiens
tttgcagctacatacatagggtcagagaatgtt

SEQ ID NO: 12122 - DNA, 33 bp, Homo sapiens
gcagagctggacaagtgaaaaagcagtgcagca

SEQ ID NO: 12123 - DNA, 33 bp, Homo sapiens
tctgtccagcaactcatccatcaggtttgaaac

SEQ ID NO: 12124 - DNA, 33 bp, Homo sapiens
agtggctggatataagtctctccccactgagag

SEQ ID NO: 12125 - DNA, 33 bp, Homo sapiens
cttcagctcaacacaatggttttacaatctagg

SEQ ID NO: 12126 - DNA, 33 bp, Homo sapiens
aacaaaaagttctagcgatagctgacagaatca

SEQ ID NO: 12127 - DNA, 33 bp, Homo sapiens
atcttgtcgctccccagcatattccaaagcagc

SEQ ID NO: 12128 - DNA, 33 bp, Homo sapiens
ctaaattaacattaaatgtgcttggggaaagag

SEQ ID NO: 12129 - DNA, 33 bp, Homo sapiens
agatcactcagtaagagctatgggctttggcca

SEQ ID NO: 12130 - DNA, 33 bp, Homo sapiens
gctgactttaaacatagagcaggcagcattttt

SEQ ID NO: 12131 - DNA, 51 bp, Homo sapiens
gaagtcacctctttattggcacttagcgttacgcataaataggaccactgt

SEQ ID NO: 12132 - DNA, 51 bp, Homo sapiens
gaaatgtatatgcctattcaaaaagtaaattgctacagctgctgctctaac

SEQ ID NO: 12133 - DNA, 33 bp, Homo sapiens
ccttgctcatctccacgaaaacatttgccccag

SEQ ID NO: 12134 - DNA, 33 bp, Homo sapiens
cgttgtttacacatcagcgtctaagaatattcc

SEQ ID NO: 12135 - DNA, 33 bp, Homo sapiens
gtgctgaatgaatatatgtctagaaagcctaat

SEQ ID NO: 12136 - DNA, 33 bp, Homo sapiens
gaataattacaagatcgaaatccttgaggaggt

SEQ ID NO: 12137 - DNA, 33 bp, Homo sapiens
cttagataacctgacaggcagtcacatctcttc

SEQ ID NO: 12138 - DNA, 33 bp, Homo sapiens
gcaacaatatgtggacgagtagagggtaacttt

SEQ ID NO: 12139 - DNA, 33 bp, Homo sapiens
agtgacacttgacctatgcctcaaggctaacta

SEQ ID NO: 12140 - DNA, 33 bp, Homo sapiens
cttcaaatataaggaacgttgtcataaactgct

SEQ ID NO: 12141 - DNA, 33 bp, Homo sapiens
aaatctaactgcattatcctccatccatggtcc

SEQ ID NO: 12142 - DNA, 33 bp, Homo sapiens
aagatatcaccttaactctaagtcataggctaa

SEQ ID NO: 12143 - DNA, 33 bp, Homo sapiens
acaggtgaggcattagtatggacccctgggatc

SEQ ID NO: 12144 - DNA, 33 bp, Homo sapiens
aacgccactcttctctgaaaacaattggtatca

SEQ ID NO: 12145 - DNA, 33 bp, Homo sapiens
cattcccagatagtccgatgcagttagtctata

SEQ ID NO: 12146 - DNA, 33 bp, Homo sapiens
gaagcaaccaaacttataaaagagctatgaaga

SEQ ID NO: 12147 - DNA, 33 bp, Homo sapiens
aactttaggatttcactgaccacaaagtatttc

SEQ ID NO: 12148 - DNA, 51 bp, Homo sapiens
ggttagatgtcatgtattcctgatcggagcactgattacatagctgtcttc

SEQ ID NO: 12149 - DNA, 33 bp, Homo sapiens
gagttctgtaaagttcgatcagatccatttggc

SEQ ID NO: 12150 - DNA, 33 bp, Homo sapiens
ttctctgtaagttctctctttagcaaaaaatgc

SEQ ID NO: 12151 - DNA, 51 bp, Homo sapiens
gagaataaaggaagaaaataatcgatccagagagtgtgatttggaggttaa

SEQ ID NO: 12152 - DNA, 33 bp, Homo sapiens
caataaaggactaaaatataagctctgtaaaaa

SEQ ID NO: 12153 - DNA, 33 bp, Homo sapiens
tcagtcttccccagtatgaaaattgctcaaaga

SEQ ID NO: 12154 - DNA, 33 bp, Homo sapiens
ccaatgaccagaaataggtagcactgtacagct

SEQ ID NO: 12155 - DNA, 33 bp, Homo sapiens
aattggggatgatgctgagaactcctagttaaa

SEQ ID NO: 12156 - DNA, 33 bp, Homo sapiens
ttaagaagctactcacgggatttcatttatgct

SEQ ID NO: 12157 - DNA, 33 bp, Homo sapiens
aatgtgacatatttgataatgacaacacaaagg

SEQ ID NO: 12158 - DNA, 33 bp, Homo sapiens
ttctaatgtgtctgaagtgcataattgttagaa

SEQ ID NO: 12159 - DNA, 33 bp, Homo sapiens
agagatcctatgaacacctctgtctgagcatta

SEQ ID NO: 12160 - DNA, 33 bp, Homo sapiens
ggcggagttcattcctgacttagggcctcatct

SEQ ID NO: 12161 - DNA, 33 bp, Homo sapiens
ccattttgtcaaacaatttctatgtgaaacacg

SEQ ID NO: 12162 - DNA, 33 bp, Homo sapiens
aacaatgatatcaaaagcatcttaacacaacta

SEQ ID NO: 12163 - DNA, 33 bp, Homo sapiens
tcatactggcacagcaggttagtgacatgagtg

SEQ ID NO: 12164 - DNA, 33 bp, Homo sapiens
cagtttgagaactaaatgagctaatacatggaa

SEQ ID NO: 12165 - DNA, 33 bp, Homo sapiens
cctcttcttgaacatagctaacttgaggaacct

SEQ ID NO: 12166 - DNA, 33 bp, Homo sapiens
gtaatgcacttcatactatttcttcactaactc

SEQ ID NO: 12167 - DNA, 33 bp, Homo sapiens
ccaaaaacatgagaaagccagatctccatagct

SEQ ID NO: 12168 - DNA, 33 bp, Homo sapiens
aatgagcctttgaaaatataatgcaatcatatc

SEQ ID NO: 12169 - DNA, 33 bp, Homo sapiens
agggcctggaattcaattatgagtaacataggg

SEQ ID NO: 12170 - DNA, 51 bp, Homo sapiens
atgagaaagaacagcagggaaagtattaacatttggttcctaacatcatag

SEQ ID NO: 12171 - DNA, 33 bp, Homo sapiens
aattttagtgcacaacgaattttctgcttgtaa

SEQ ID NO: 12172 - DNA, 33 bp, Homo sapiens
tccccccatcctagtatgcaggcaaatcctgaa

SEQ ID NO: 12173 - DNA, 33 bp, Homo sapiens
cctgcgtaaggaaaaatatctagaaaggaaagg

SEQ ID NO: 12174 - DNA, 33 bp, Homo sapiens
gaatggatgaacaaactatggtgcatgtacaga

SEQ ID NO: 12175 - DNA, 33 bp, Homo sapiens
actccctttctgagtcgaaacataccaagattc

SEQ ID NO: 12176 - DNA, 51 bp, Homo sapiens
tgcagtacagtgaaattgagttccatgtactttgattattagatcctggaa

SEQ ID NO: 12177 - DNA, 33 bp, Homo sapiens
gctcggcttctatacagtcttttgagcaccctc

SEQ ID NO: 12178 - DNA, 33 bp, Homo sapiens
tagagtaccatgctaatacaatactttgaaaag

SEQ ID NO: 12179 - DNA, 33 bp, Homo sapiens
ttgaggttgatattaggataagaggtgtctgtg

SEQ ID NO: 12180 - DNA, 33 bp, Homo sapiens
acaaattactgagagctatggaaattagatact

SEQ ID NO: 12181 - DNA, 33 bp, Homo sapiens
gtttaacctcttcctatagtccacaatatcctg

SEQ ID NO: 12182 - DNA, 33 bp, Homo sapiens
agtttcatctttacacgctatatgcctatagac

SEQ ID NO: 12183 - DNA, 33 bp, Homo sapiens
ataccaagttgcttgatgtaaaattaataagac

SEQ ID NO: 12184 - DNA, 33 bp, Homo sapiens
ataaagttccaatcaatttagaaaattctttta

SEQ ID NO: 12185 - DNA, 33 bp, Homo sapiens
tgcattcacttaacactctcatttgaaaatttt

SEQ ID NO: 12186 - DNA, 33 bp, Homo sapiens
tttttagcctattaactcttaaatcacctactg

SEQ ID NO: 12187 - DNA, 33 bp, Homo sapiens
tatattttctccaggatcacagcattctagtta

SEQ ID NO: 12188 - DNA, 33 bp, Homo sapiens
taatatccttcatgactcaagagtgatgccact

SEQ ID NO: 12189 - DNA, 33 bp, Homo sapiens
atctgcacataagacctatgactttaacacatg

SEQ ID NO: 12190 - DNA, 33 bp, Homo sapiens
gaaagaaactctaacattctaggctttgtattc

SEQ ID NO: 12191 - DNA, 33 bp, Homo sapiens
gccagctgggcttggagacctcgctagcagctt

SEQ ID NO: 12192 - DNA, 51 bp, Homo sapiens
cctcttccctcctcctcccttggcagagttccactgttgttcttcctcccg

SEQ ID NO: 12193 - DNA, 33 bp, Homo sapiens
tagaaataccttaacactcatcattctaaacaa

SEQ ID NO: 12194 - DNA, 33 bp, Homo sapiens
ttgaatttcatggaattagctggatagagatca

SEQ ID NO: 12195 - DNA, 33 bp, Homo sapiens
caatcagttaggtcaatacgaatctaacactat

SEQ ID NO: 12196 - DNA, 33 bp, Homo sapiens
tacattcagtctctcagaaaagtcacctggagt

SEQ ID NO: 12197 - DNA, 33 bp, Homo sapiens
atttaacctctcttactctccttcaacaagcta

SEQ ID NO: 12198 - DNA, 33 bp, Homo sapiens
ttatatgaatgtgaaccgtccacaaaatatgtt

SEQ ID NO: 12199 - DNA, 33 bp, Homo sapiens
ctgtgatgctcacacagtggaactgcctaagga

SEQ ID NO: 12200 - DNA, 33 bp, Homo sapiens
gtggaggagtcatatggatcattcctcatgtga

SEQ ID NO: 12201 - DNA, 51 bp, Homo sapiens
agtcaatgcttgagcaggattgcaatgagagatacatattagggaaaacta

SEQ ID NO: 12202 - DNA, 33 bp, Homo sapiens
tcttcattcttattcctcctctttgtaactaca

SEQ ID NO: 12203 - DNA, 33 bp, Homo sapiens
taactagggtccaggagcaaattgaaatgacaa

SEQ ID NO: 12204 - DNA, 33 bp, Homo sapiens
gtggtatctctaggcagctggaaaaaagctccc

SEQ ID NO: 12205 - DNA, 33 bp, Homo sapiens
gtggagccacttggcattccttaagtacatcct

SEQ ID NO: 12206 - DNA, 33 bp, Homo sapiens
ggactgacaaaaattatagctttcccttgaaca

SEQ ID NO: 12207 - DNA, 33 bp, Homo sapiens
aacttttacagacaacgcaagaacacgctaaaa

SEQ ID NO: 12208 - DNA, 33 bp, Homo sapiens
ttatgatttccaaatggatgctattatctggaa

SEQ ID NO: 12209 - DNA, 33 bp, Homo sapiens
cctatccttcgaatcctagatcaaagcccactt

SEQ ID NO: 12210 - DNA, 33 bp, Homo sapiens
cttgaagacaatgatatagctgctgatttattc

SEQ ID NO: 12211 - DNA, 33 bp, Homo sapiens
aggtgagccaaagacagggaagcaatatctaca

SEQ ID NO: 12212 - DNA, 33 bp, Homo sapiens
tactagcacatttggctcatacctcttcattct

SEQ ID NO: 12213 - DNA, 33 bp, Homo sapiens
caacaaaaaagtggaattagcttaaagaagtat

SEQ ID NO: 12214 - DNA, 33 bp, Homo sapiens
ttaatatttttgattcgccaattagaccataaa

SEQ ID NO: 12215 - DNA, 33 bp, Homo sapiens
atatgccatgctcatctatgtaactgaatcttg

SEQ ID NO: 12216 - DNA, 33 bp, Homo sapiens
ctaacacatttaggattaagcttacaaatgact

SEQ ID NO: 12217 - DNA, 33 bp, Homo sapiens
agttaatagacatcaggattggttccagattag

SEQ ID NO: 12218 - DNA, 33 bp, Homo sapiens
cttttgcttgctactctaccattttttgtatct

SEQ ID NO: 12219 - DNA, 33 bp, Homo sapiens
cacctgtgtgtatccagcagcaagaagactgaa

SEQ ID NO: 12220 - DNA, 51 bp, Homo sapiens
catgactcttcccacagtgcactaataagtagtaaaagctgaaaggaagac

SEQ ID NO: 12221 - DNA, 33 bp, Homo sapiens
ttctggacctgagtgcgagaaggaggcccactg

SEQ ID NO: 12222 - DNA, 33 bp, Homo sapiens
caagagtaaaagaaaatgtactaaatggatgta

SEQ ID NO: 12223 - DNA, 33 bp, Homo sapiens
tatttttctgactgcagaaatccaactaattta

SEQ ID NO: 12224 - DNA, 33 bp, Homo sapiens
tgcctccctcaaatcacaggccaatctgtcatt

SEQ ID NO: 12225 - DNA, 51 bp, Homo sapiens
agtttagcttcttcatcaaccaccatggaagaaaatcctccaccaaaagag

SEQ ID NO: 12226 - DNA, 33 bp, Homo sapiens
ttctttattacaagcagtacatacaggaatagg

SEQ ID NO: 12227 - DNA, 33 bp, Homo sapiens
ccaccactcttcagaccaggaaaggaagaaaac

SEQ ID NO: 12228 - DNA, 33 bp, Homo sapiens
ctgatgagttagccttgaagaagaggatgtaca

SEQ ID NO: 12229 - DNA, 33 bp, Homo sapiens
tgtaaaatggacttaaggacaaaatacatgaat

SEQ ID NO: 12230 - DNA, 33 bp, Homo sapiens
cagtttttaggacatatagtgtcgtctatttat

SEQ ID NO: 12231 - DNA, 33 bp, Homo sapiens
tcacttccaggtcaagcatgttctaaaacaaac

SEQ ID NO: 12232 - DNA, 33 bp, Homo sapiens
cctggactacacagaataaagaacaaagaattt

SEQ ID NO: 12233 - DNA, 33 bp, Homo sapiens
acaagacatagtaaaatctccgagtattgtaac

SEQ ID NO: 12234 - DNA, 33 bp, Homo sapiens
tatacctggtccattcgaagaattcatccacaa

SEQ ID NO: 12235 - DNA, 33 bp, Homo sapiens
ctgttcagtgacttccggagagtttttccacac

SEQ ID NO: 12236 - DNA, 33 bp, Homo sapiens
ttgcttaagaactaaagaaaatcagagttcagt

SEQ ID NO: 12237 - DNA, 33 bp, Homo sapiens
atagaacattttattcgaagaaaagtcattgca

SEQ ID NO: 12238 - DNA, 33 bp, Homo sapiens
tgcttctcgaatgaatgaaagaatgactcaaat

SEQ ID NO: 12239 - DNA, 33 bp, Homo sapiens
ttctagactttaaatttaagggtgagagataaa

SEQ ID NO: 12240 - DNA, 33 bp, Homo sapiens
ggattttgaatccagatggggagaaataaagat

SEQ ID NO: 12241 - DNA, 33 bp, Homo sapiens
taaagccttgctaaaatgtgctaagatgctgtg

SEQ ID NO: 12242 - DNA, 51 bp, Homo sapiens
cttttgttctcatctataatctggatgagattgtaacaattttttttctgt

SEQ ID NO: 12243 - DNA, 33 bp, Homo sapiens
ccagtgtcaggaacacggagggaataaagtctg

SEQ ID NO: 12244 - DNA, 33 bp, Homo sapiens
agaacactctgaggacgaacactgtcttttcac

SEQ ID NO: 12245 - DNA, 33 bp, Homo sapiens
atgcgagagagcaaaataagagatcgcagatta

SEQ ID NO: 12246 - DNA, 33 bp, Homo sapiens
aaaaaatgcactctggcaaaagcaatgtgtcag

SEQ ID NO: 12247 - DNA, 33 bp, Homo sapiens
cttaatttagacatgaggatgagcagtaaattc

SEQ ID NO: 12248 - DNA, 33 bp, Homo sapiens
tgtgattataaccagcgagtatatttggcacag

SEQ ID NO: 12249 - DNA, 51 bp, Homo sapiens
gttgttgttttctgggggcatggaagtaattgtgatttgaagtttctgttt

SEQ ID NO: 12250 - DNA, 33 bp, Homo sapiens
ataggaagttctcaatgaattgaatcgtagcag

SEQ ID NO: 12251 - DNA, 33 bp, Homo sapiens
gcgctgttagcaaaaatgttactactatcagtc

SEQ ID NO: 12252 - DNA, 33 bp, Homo sapiens
gcagctacacttgttccatctttgtcttcaagc

SEQ ID NO: 12253 - DNA, 33 bp, Homo sapiens
taggcctttggtgtaaccttaactgtgtctgcc

SEQ ID NO: 12254 - DNA, 33 bp, Homo sapiens
ttaggctgtaaagaaattgaaactctcaagccc

SEQ ID NO: 12255 - DNA, 33 bp, Homo sapiens
cacaggaagttccacatagaacaacaagtcaac

SEQ ID NO: 12256 - DNA, 33 bp, Homo sapiens
tctaaaattcattcgtgacatcattcactcaaa

SEQ ID NO: 12257 - DNA, 33 bp, Homo sapiens
ataatttgcttgtgtctcactgtaaaatatctt

SEQ ID NO: 12258 - DNA, 33 bp, Homo sapiens
gatgtatgccagcttaggatgtatctctgaaat

SEQ ID NO: 12259 - DNA, 33 bp, Homo sapiens
gctgacatagtgaccagctgaagtccttagagg

SEQ ID NO: 12260 - DNA, 33 bp, Homo sapiens
ctatccttggaaaaaattggcagctgaacaaca

SEQ ID NO: 12261 - DNA, 33 bp, Homo sapiens
aatggcatatgctctatcaacgaactgaaagac

SEQ ID NO: 12262 - DNA, 33 bp, Homo sapiens
gagaagcgtcaaggtcgcctttctcaactgagc

SEQ ID NO: 12263 - DNA, 33 bp, Homo sapiens
aaaggaccattcaaaggaccatgtcaaatctga

SEQ ID NO: 12264 - DNA, 51 bp, Homo sapiens
tgctattctagaatgtttattttctgaaaacaggaattttttctcattcag

SEQ ID NO: 12265 - DNA, 33 bp, Homo sapiens
gtgatactgcacccaattacttacataaagtgg

SEQ ID NO: 12266 - DNA, 33 bp, Homo sapiens
gggcaggggagtcagcggagagatgaacagtct

SEQ ID NO: 12267 - DNA, 33 bp, Homo sapiens
tcttgtcctggtcgtgcaaaaatgtaatttggc

SEQ ID NO: 12268 - DNA, 33 bp, Homo sapiens
cccatcttgctagtgagggtatgaagacaagga

SEQ ID NO: 12269 - DNA, 33 bp, Homo sapiens
ccagactactcagggcgatacttggaataacga

SEQ ID NO: 12270 - DNA, 33 bp, Homo sapiens
cagagttacaggaaaggctatggagttatttac

SEQ ID NO: 12271 - DNA, 33 bp, Homo sapiens
ccagcaactgatcaattaggtggcagtaattac

SEQ ID NO: 12272 - DNA, 33 bp, Homo sapiens
tctatatttccatttcgcataacttagtatgaa

SEQ ID NO: 12273 - DNA, 33 bp, Homo sapiens
ggttgagagtgtctactgattattgagaaccac

SEQ ID NO: 12274 - DNA, 51 bp, Homo sapiens
aaagtgtttcctttgttctaataaagagaagtctctcctcactgcacttcc

SEQ ID NO: 12275 - DNA, 33 bp, Homo sapiens
atctacatactatccatcctatcattaattaat

SEQ ID NO: 12276 - DNA, 51 bp, Homo sapiens
ctggcacaggaaaattcttcaaagatgacgtgttgaattgtagctttatac

SEQ ID NO: 12277 - DNA, 33 bp, Homo sapiens
ctgttgagaccttcaatgtactggaaattctga

SEQ ID NO: 12278 - DNA, 33 bp, Homo sapiens
gagtgccaagatgcaatgtacagccaaccctca

SEQ ID NO: 12279 - DNA, 33 bp, Homo sapiens
tttataaggagaatgatgaaacactaatgaaag

SEQ ID NO: 12280 - DNA, 33 bp, Homo sapiens
ggacacagcctcaagatgtcccgagatcatatg

SEQ ID NO: 12281 - DNA, 33 bp, Homo sapiens
tagccatgagtgacaatgatgggaaatgcttct

SEQ ID NO: 12282 - DNA, 33 bp, Homo sapiens
ggtcacggagacaacctacgaaaatgatttgtt

SEQ ID NO: 12283 - DNA, 33 bp, Homo sapiens
gagactaggtcaaagatgaacttattatttctt

SEQ ID NO: 12284 - DNA, 51 bp, Homo sapiens
tgtaaacaaattggaaaataaaaagtaccacttgagtgaaaacagatttta

SEQ ID NO: 12285 - DNA, 33 bp, Homo sapiens
gaaggattccctctctgaaagactgcaatatgg

SEQ ID NO: 12286 - DNA, 33 bp, Homo sapiens
aagttccatggttattgaagggaaatggacata

SEQ ID NO: 12287 - DNA, 33 bp, Homo sapiens
agtgagagtccaatctgagagcattacttcttt

SEQ ID NO: 12288 - DNA, 33 bp, Homo sapiens
tagagcgtgtcacatggatgtaaataccaaagg

SEQ ID NO: 12289 - DNA, 33 bp, Homo sapiens
ttcaacaatgttggaatggaatgaagggtagag

SEQ ID NO: 12290 - DNA, 33 bp, Homo sapiens
tcccaggacatagacctctgtagtattgtcacg

SEQ ID NO: 12291 - DNA, 33 bp, Homo sapiens
gacctagtatataatcgatcaggccaagccact

SEQ ID NO: 12292 - DNA, 33 bp, Homo sapiens
ctctaagaccctgcactaacaatctgttttccc

SEQ ID NO: 12293 - DNA, 33 bp, Homo sapiens
ttataattcatctcaccctccttgatcatcaaa

SEQ ID NO: 12294 - DNA, 33 bp, Homo sapiens
tttctggtttggccaattgattggatggatgat

SEQ ID NO: 12295 - DNA, 33 bp, Homo sapiens
gggataagcacacttcgaaagatgttttctagc

SEQ ID NO: 12296 - DNA, 33 bp, Homo sapiens
attccttccatgtccatagcagatgtcaaaacc

SEQ ID NO: 12297 - DNA, 33 bp, Homo sapiens
gtgattttgtgaaaaggctgttggaaaccccga

SEQ ID NO: 12298 - DNA, 33 bp, Homo sapiens
ttgtataacctcccaatgtgcctctcacaatgc

SEQ ID NO: 12299 - DNA, 51 bp, Homo sapiens
gcatgaatctatcccaatagtaacatgtacagagaggatgcaagatgctta

SEQ ID NO: 12300 - DNA, 33 bp, Homo sapiens
gaactgctttttagcagaaaacttatccataga

SEQ ID NO: 12301 - DNA, 33 bp, Homo sapiens
ttgcaaatttgcgttatgtcctggaacttcaat

SEQ ID NO: 12302 - DNA, 33 bp, Homo sapiens
aagtattttgaggtaacgggccataatgtatgc

SEQ ID NO: 12303 - DNA, 51 bp, Homo sapiens
cagtccaaagaggccgttctgcttctaaatgcctactgaaagtgaaatgca

SEQ ID NO: 12304 - DNA, 51 bp, Homo sapiens
gacatatttattcaatgcaagtgtctattctggtgaccagtcacaatttca

SEQ ID NO: 12305 - DNA, 33 bp, Homo sapiens
ggttaataaatctgaatgacagctatcgtactc

SEQ ID NO: 12306 - DNA, 33 bp, Homo sapiens
aattgtcagggacatatgtagtggctataggtt

SEQ ID NO: 12307 - DNA, 33 bp, Homo sapiens
atacatatttggaaccgaacgggtacccattga

SEQ ID NO: 12308 - DNA, 33 bp, Homo sapiens
ggcatcgggaacgttataaatagaaagtcccaa

SEQ ID NO: 12309 - DNA, 33 bp, Homo sapiens
catgactcagtttatcgcacataccatgctatt

SEQ ID NO: 12310 - DNA, 33 bp, Homo sapiens
tcccataaaagcacaagctcatcaattgaatac

SEQ ID NO: 12311 - DNA, 33 bp, Homo sapiens
tttagtgagtcaggtagcaactgcctgatctgt

SEQ ID NO: 12312 - DNA, 51 bp, Homo sapiens
aaatgatagagaaaagtaatatgaagactaaatgtagaaactgccttaaat

SEQ ID NO: 12313 - DNA, 33 bp, Homo sapiens
agaaaagcaggagaaagtcacagaatcacttac

SEQ ID NO: 12314 - DNA, 33 bp, Homo sapiens
gcttatttcttggctctattcgagatcttactc

SEQ ID NO: 12315 - DNA, 33 bp, Homo sapiens
agtatttcaaaatctggcaaaccgataggaata

SEQ ID NO: 12316 - DNA, 33 bp, Homo sapiens
gcttgtcttcttgcaggaggaaaggagatgaaa

SEQ ID NO: 12317 - DNA, 51 bp, Homo sapiens
ctatttgctcattggcttaaagagaggtttattaaatacactctgaaattt

SEQ ID NO: 12318 - DNA, 33 bp, Homo sapiens
gagctgatgaccagccgaggctaacatattaca

SEQ ID NO: 12319 - DNA, 33 bp, Homo sapiens
gcatttaaatactaacggtgaatggccaattct

SEQ ID NO: 12320 - DNA, 33 bp, Homo sapiens
tcatatgaaccaagaacgtgcccaaataaatag

SEQ ID NO: 12321 - DNA, 33 bp, Homo sapiens
aactgtgcgggtgctatattccttacctctata

SEQ ID NO: 12322 - DNA, 51 bp, Homo sapiens
acaaaaagtgtactgtatgctctgttaattcaaagttgctttttctgtaat

SEQ ID NO: 12323 - DNA, 51 bp, Homo sapiens
tgatacttctgaaaacatgactttaggaaataaacaagaacaaaatctaag

SEQ ID NO: 12324 - DNA, 33 bp, Homo sapiens
accactgagggaagatgagactcccatggggga

SEQ ID NO: 12325 - DNA, 33 bp, Homo sapiens
ttctcagctgtattgaggaataattgacaaatt

SEQ ID NO: 12326 - DNA, 33 bp, Homo sapiens
gcatgcaaagttataattgtaagaattacagca

SEQ ID NO: 12327 - DNA, 33 bp, Homo sapiens
gttgtcactgacaaactgtatcaattagctaat

SEQ ID NO: 12328 - DNA, 33 bp, Homo sapiens
cattgactgcattccagaacctagtaaatcatg

SEQ ID NO: 12329 - DNA, 33 bp, Homo sapiens
ttctacattactgctagcatggccgtcattaat

SEQ ID NO: 12330 - DNA, 33 bp, Homo sapiens
cagacacataatttggcaaaaagctctgattct

SEQ ID NO: 12331 - DNA, 33 bp, Homo sapiens
aatttctgatgttttaggagagaattatctttt

SEQ ID NO: 12332 - DNA, 33 bp, Homo sapiens
ctttgtctcagtttcatcattttaaagtgaggg

SEQ ID NO: 12333 - DNA, 33 bp, Homo sapiens
cacatttaacggaatatgttttatgaccacaat

SEQ ID NO: 12334 - DNA, 33 bp, Homo sapiens
tgttaaactctaaataggccagattgcataaca

SEQ ID NO: 12335 - DNA, 33 bp, Homo sapiens
atcaaaaggaatgggggactctatgcccagaca

SEQ ID NO: 12336 - DNA, 33 bp, Homo sapiens
agagaccatgccatcaggtacaccagcagactc

SEQ ID NO: 12337 - DNA, 33 bp, Homo sapiens
actctcttagctctagtcactttttaggaagtt

SEQ ID NO: 12338 - DNA, 33 bp, Homo sapiens
tctgtcttatgcagtcgagagaaggactgaaat

SEQ ID NO: 12339 - DNA, 33 bp, Homo sapiens
gatgcatctagaataagacttcccatcgccttc

SEQ ID NO: 12340 - DNA, 33 bp, Homo sapiens
ccactcacttatgttatagcctatggtaagtta

SEQ ID NO: 12341 - DNA, 33 bp, Homo sapiens
aaaaattagcacaaactgtcagtgattttagac

SEQ ID NO: 12342 - DNA, 33 bp, Homo sapiens
agaaccccgagtatgatctgtcaatagggggct

SEQ ID NO: 12343 - DNA, 33 bp, Homo sapiens
atgattgtatgtgtgatgtatttcactaatatt

SEQ ID NO: 12344 - DNA, 33 bp, Homo sapiens
agggcccctggtttaatagaggtcatttacaat

SEQ ID NO: 12345 - DNA, 33 bp, Homo sapiens
tgagcgatcgctcacataggtttgacatatacc

SEQ ID NO: 12346 - DNA, 33 bp, Homo sapiens
ctaaggataacatagggaaggttgtctaagcaa

SEQ ID NO: 12347 - DNA, 33 bp, Homo sapiens
ctactgaggaattatccagagagcacaaatttt

SEQ ID NO: 12348 - DNA, 33 bp, Homo sapiens
cagtccaaatgacctatggtggtaatgatacaa

SEQ ID NO: 12349 - DNA, 33 bp, Homo sapiens
taagctttggtaattatgtctatctacacaaaa

SEQ ID NO: 12350 - DNA, 33 bp, Homo sapiens
ccttgtcactctaagctgatctattcttgtacc

SEQ ID NO: 12351 - DNA, 33 bp, Homo sapiens
aagcatgagctccagagcaaaattatttagttc

SEQ ID NO: 12352 - DNA, 33 bp, Homo sapiens
atggtttttatcggaagtgcaaagggcatggca

SEQ ID NO: 12353 - DNA, 33 bp, Homo sapiens
cacaacacctgaagaatagtgtgccttgaagtc

SEQ ID NO: 12354 - DNA, 33 bp, Homo sapiens
ataatagtgaatgccagataagtgcaatggtcc

SEQ ID NO: 12355 - DNA, 51 bp, Homo sapiens
gaagaacagggagaaaattctgggcgatgagaggagtcaagtttcaaaaca

SEQ ID NO: 12356 - DNA, 33 bp, Homo sapiens
tggtggatgaattctacatgagctactgtttca

SEQ ID NO: 12357 - DNA, 33 bp, Homo sapiens
tccattgccccaacagtcaaattgtgaccttct

SEQ ID NO: 12358 - DNA, 33 bp, Homo sapiens
ggaacgtgcactttgctgaacatggatcacagt

SEQ ID NO: 12359 - DNA, 33 bp, Homo sapiens
gcccttgattaccatatgcttatcaggccatag

SEQ ID NO: 12360 - DNA, 33 bp, Homo sapiens
agaatcaagttcattatgttatggtaccagaat

SEQ ID NO: 12361 - DNA, 33 bp, Homo sapiens
ggaaaaatactgtccatgaagtgagcaccatgt

SEQ ID NO: 12362 - DNA, 33 bp, Homo sapiens
ggagggatggattcaggagacatgggttccaag

SEQ ID NO: 12363 - DNA, 33 bp, Homo sapiens
tgagaaatgatatcccgaagtctaatccaatca

SEQ ID NO: 12364 - DNA, 33 bp, Homo sapiens
tgtctcctttagtgtgtatggcttaaggtatct

SEQ ID NO: 12365 - DNA, 33 bp, Homo sapiens
gactcttgttgagcaagtagaataaagtatgat

SEQ ID NO: 12366 - DNA, 33 bp, Homo sapiens
gagaaaaacagattcagaactctaaatagaaaa

SEQ ID NO: 12367 - DNA, 33 bp, Homo sapiens
ttgctcaatggtcaactgtatttgctaagtgaa

SEQ ID NO: 12368 - DNA, 33 bp, Homo sapiens
aatggaagtcaaagtcgagatctgtaaatggca

SEQ ID NO: 12369 - DNA, 33 bp, Homo sapiens
acatctctatagccactggttcaagttttaatt

SEQ ID NO: 12370 - DNA, 33 bp, Homo sapiens
atccatgcactgcagagtagatgttggatagca

SEQ ID NO: 12371 - DNA, 33 bp, Homo sapiens
ataacattcaaggaaatggggaagtatgaaaaa

SEQ ID NO: 12372 - DNA, 33 bp, Homo sapiens
caattacatcggcaacgaaaactcattttacaa

SEQ ID NO: 12373 - DNA, 33 bp, Homo sapiens
aatgaagccagaattctaaaaaacataagctaa

SEQ ID NO: 12374 - DNA, 33 bp, Homo sapiens
gcacatggccacagagtagacaaatgttttccg

SEQ ID NO: 12375 - DNA, 33 bp, Homo sapiens
tacatctttacctaaagtgattaacaagtagcc

SEQ ID NO: 12376 - DNA, 33 bp, Homo sapiens
atttcatttagtggaagatatgtatcaagttgt

SEQ ID NO: 12377 - DNA, 33 bp, Homo sapiens
aatgttgaaagttggctagatgaagaaatgaag

SEQ ID NO: 12378 - DNA, 33 bp, Homo sapiens
ccatcattaagctagataaatcccagaggtcaa

SEQ ID NO: 12379 - DNA, 33 bp, Homo sapiens
gagtatgggatggaccgctagtactaaagccag

SEQ ID NO: 12380 - DNA, 33 bp, Homo sapiens
ctcagcctttactagcgccagtgtcttgtacaa

SEQ ID NO: 12381 - DNA, 33 bp, Homo sapiens
gtgactggataggagacagccacaaaacgacaa

SEQ ID NO: 12382 - DNA, 33 bp, Homo sapiens
gctcatacaaatgtgaggccattaagaaaacat

SEQ ID NO: 12383 - DNA, 33 bp, Homo sapiens
cccttgatgatctttctcccattctgtaccccc

SEQ ID NO: 12384 - DNA, 51 bp, Homo sapiens
aagatctattttagtcttcaacttatgggtctctttgggcctcagtgactt

SEQ ID NO: 12385 - DNA, 33 bp, Homo sapiens
tttcaacaaatatgcattgcactgtgagagatc

SEQ ID NO: 12386 - DNA, 33 bp, Homo sapiens
ttgcaactgttatgaattgcgctacaatggaag

SEQ ID NO: 12387 - DNA, 33 bp, Homo sapiens
aatataggatcgtatactagtttttttctcttc

SEQ ID NO: 12388 - DNA, 33 bp, Homo sapiens
taaagagatttataaggcagatgcaccgtggag

SEQ ID NO: 12389 - DNA, 33 bp, Homo sapiens
tgctgatgtgcaagtagataatcacagaaacca

SEQ ID NO: 12390 - DNA, 51 bp, Homo sapiens
gctgtcaccgtgaatcaggctagactcaacttgaagaaacatcctgggatc

SEQ ID NO: 12391 - DNA, 51 bp, Homo sapiens
gcctatcctctgccatgctgtgaaacgataacctgctttgggtgctctgat

SEQ ID NO: 12392 - DNA, 51 bp, Homo sapiens
gtgtgttcctgttcaaaaaacttcaggttaacatccattgtcctagagtaa

SEQ ID NO: 12393 - DNA, 33 bp, Homo sapiens
gtcatctataaagccagacttcattcattggaa

SEQ ID NO: 12394 - DNA, 33 bp, Homo sapiens
atttggtgcactgtcagtagcttaaagacggag

SEQ ID NO: 12395 - DNA, 33 bp, Homo sapiens
ccatatctttctatcatgaattactcttgaaaa

SEQ ID NO: 12396 - DNA, 33 bp, Homo sapiens
gttcaactgcctggtagaattaaggaaaaaaag

SEQ ID NO: 12397 - DNA, 33 bp, Homo sapiens
gggaaaagtgtgacgatggtccaacaaagagtt

SEQ ID NO: 12398 - DNA, 33 bp, Homo sapiens
gatatgtggagagggatattgcaaggctagaga

SEQ ID NO: 12399 - DNA, 33 bp, Homo sapiens
aaggattcagaaaacatgggtgagccagataat

SEQ ID NO: 12400 - DNA, 33 bp, Homo sapiens
agtcttttccttcacatataactcagagataaa

SEQ ID NO: 12401 - DNA, 33 bp, Homo sapiens
agtggaagcagtacgagtccatggggatgcttt

SEQ ID NO: 12402 - DNA, 33 bp, Homo sapiens
caaatgctctgttacttaggtacttagcctttc

SEQ ID NO: 12403 - DNA, 33 bp, Homo sapiens
gaagggcagaaaacaatgaacaagaagtgggca

SEQ ID NO: 12404 - DNA, 33 bp, Homo sapiens
tgctctgctgggtccattaatcaatacatggaa

SEQ ID NO: 12405 - DNA, 33 bp, Homo sapiens
taactctactcttagctaaaaaagaagtgtata

SEQ ID NO: 12406 - DNA, 33 bp, Homo sapiens
tcattaggtcataacattgggggaggtttactg

SEQ ID NO: 12407 - DNA, 33 bp, Homo sapiens
taaggcctgttttccctacatgacagatgaaga

SEQ ID NO: 12408 - DNA, 33 bp, Homo sapiens
tgttgggttgttttcatggctagcaagatgaaa

SEQ ID NO: 12409 - DNA, 33 bp, Homo sapiens
acacctgtacactttatggaaggacacaggcct

SEQ ID NO: 12410 - DNA, 33 bp, Homo sapiens
taactggaaagccacagagagttattttttgca

SEQ ID NO: 12411 - DNA, 33 bp, Homo sapiens
tccctgctgtttccaggcctttgttgcacccac

SEQ ID NO: 12412 - DNA, 33 bp, Homo sapiens
aatagctccttaaactcaactgtgcagctaact

SEQ ID NO: 12413 - DNA, 33 bp, Homo sapiens
gtaagagaggacattcgagagaaaaggtagagt

SEQ ID NO: 12414 - DNA, 33 bp, Homo sapiens
ctcaggcttctaataatggactccagattttta

SEQ ID NO: 12415 - DNA, 33 bp, Homo sapiens
gaccctaacactctcccagtcaaatccctttat

SEQ ID NO: 12416 - DNA, 33 bp, Homo sapiens
aaactctccgatttaggacaacagcaacaaata

SEQ ID NO: 12417 - DNA, 33 bp, Homo sapiens
ctctcgatgcagaaactgatttttccatttttg

SEQ ID NO: 12418 - DNA, 33 bp, Homo sapiens
aagtcaaggttctaaatgtctaaaagtcactga

SEQ ID NO: 12419 - DNA, 33 bp, Homo sapiens
gaatgcccttgaagtaggtgggcaggctctatg

SEQ ID NO: 12420 - DNA, 33 bp, Homo sapiens
aggtaggtatttgagagccacatatgaatatta

SEQ ID NO: 12421 - DNA, 33 bp, Homo sapiens
actctggtccatttagtattggcttatgctctt

SEQ ID NO: 12422 - DNA, 33 bp, Homo sapiens
tgtgtggtttctttaggagagtctgggtagttg

SEQ ID NO: 12423 - DNA, 33 bp, Homo sapiens
caccttattccacctgcaagtatgttatgtttg

SEQ ID NO: 12424 - DNA, 33 bp, Homo sapiens
agcttaaccctttggtgaatcagcgttattcca

SEQ ID NO: 12425 - DNA, 33 bp, Homo sapiens
ccaatggctaccaacagctagactaccaatagc

SEQ ID NO: 12426 - DNA, 33 bp, Homo sapiens
tgtctaacctctttcaggctatcacacaagtaa

SEQ ID NO: 12427 - DNA, 33 bp, Homo sapiens
atctcctttgctgtaatgcagcgtggtgtcata

SEQ ID NO: 12428 - DNA, 33 bp, Homo sapiens
tccagcaacacttaactgcttctgggtgacagg

SEQ ID NO: 12429 - DNA, 33 bp, Homo sapiens
gacaagttctttaacctctcctggtctctgtta

SEQ ID NO: 12430 - DNA, 33 bp, Homo sapiens
cacaacagtctggtgatataggaattattatta

SEQ ID NO: 12431 - DNA, 33 bp, Homo sapiens
aggacaaagactgtaggatttcactaatatgag

SEQ ID NO: 12432 - DNA, 33 bp, Homo sapiens
cagaaactacaggaaccaatttctgtctgtaag

SEQ ID NO: 12433 - DNA, 33 bp, Homo sapiens
tcaaaagtgattctcagtaagtacagcacccta

SEQ ID NO: 12434 - DNA, 33 bp, Homo sapiens
ttctagacacctgatatggaaactatgttactt

SEQ ID NO: 12435 - DNA, 33 bp, Homo sapiens
gtagaagtgatgtgagtagaggctttaaatgtg

SEQ ID NO: 12436 - DNA, 33 bp, Homo sapiens
tactttttagaatcctgaaccttctcagtatag

SEQ ID NO: 12437 - DNA, 33 bp, Homo sapiens
tccacttagtgcagaatcctagaactttcctgg

SEQ ID NO: 12438 - DNA, 33 bp, Homo sapiens
gtaatgactgcaggtaggaggggcctaaaggac

SEQ ID NO: 12439 - DNA, 33 bp, Homo sapiens
acaaacaaaaatcctatcttgattgccccactc

SEQ ID NO: 12440 - DNA, 33 bp, Homo sapiens
tgagcaaccactgcctgaaccattggactttgg

SEQ ID NO: 12441 - DNA, 51 bp, Homo sapiens
caaccataatgacataaacagtgaatattgttttaacccataattgtgata

SEQ ID NO: 12442 - DNA, 33 bp, Homo sapiens
agtgccttagttcagatcagagaagagtagcga

SEQ ID NO: 12443 - DNA, 33 bp, Homo sapiens
gtatttcaacagccacgaggatcctgtctacgt

SEQ ID NO: 12444 - DNA, 33 bp, Homo sapiens
ctggctccttcttagctgaaatatccccttttt

SEQ ID NO: 12445 - DNA, 33 bp, Homo sapiens
aggtctgactctatcatagttaaagcgacttga

SEQ ID NO: 12446 - DNA, 33 bp, Homo sapiens
tgagctggacatgaaacataggcagattgggac

SEQ ID NO: 12447 - DNA, 33 bp, Homo sapiens
tataactatagacatcgatagcttactataata

SEQ ID NO: 12448 - DNA, 33 bp, Homo sapiens
aacaggtagaatcaaagtcctgtatgtatgttc

SEQ ID NO: 12449 - DNA, 33 bp, Homo sapiens
caatatgccagagtccgggaagtctccaggcag

SEQ ID NO: 12450 - DNA, 33 bp, Homo sapiens
cctgattttagtggcagctacatgaatgtgtac

SEQ ID NO: 12451 - DNA, 33 bp, Homo sapiens
gggtaagtgtgtaagagagtttcagtaagagtt

SEQ ID NO: 12452 - DNA, 33 bp, Homo sapiens
catgtctctaaatggggaagtctcatgagggga

SEQ ID NO: 12453 - DNA, 51 bp, Homo sapiens
agctctcattttattagttggtatatgcagtgcttaaaggccttatgcggc

SEQ ID NO: 12454 - DNA, 33 bp, Homo sapiens
tgacctcactttcctctctgattcatacaaatt

SEQ ID NO: 12455 - DNA, 33 bp, Homo sapiens
atcattattatgatactagtggttgtttcgaga

SEQ ID NO: 12456 - DNA, 33 bp, Homo sapiens
gacagcaacataacagtcatttataacaaagtc

SEQ ID NO: 12457 - DNA, 33 bp, Homo sapiens
ccacttcctcatagcatatttttactgtgtcct

SEQ ID NO: 12458 - DNA, 33 bp, Homo sapiens
ggaaaaaaccttggaagtgtaaatgcctctaag

SEQ ID NO: 12459 - DNA, 51 bp, Homo sapiens
gagagagaatatgaatgagacacaatgtgaatgagagagatgtcaaccatt

SEQ ID NO: 12460 - DNA, 51 bp, Homo sapiens
gaaatctcacgccatttcttaaaggcatctgatggagagtagtcttaattt

SEQ ID NO: 12461 - DNA, 51 bp, Homo sapiens
gacagaaatagatgaattcagaagatatttttagagataggacttataata

SEQ ID NO: 12462 - DNA, 33 bp, Homo sapiens
aatccatataacagcagaaatgaatacagtgct

SEQ ID NO: 12463 - DNA, 33 bp, Homo sapiens
gtgtgtgtaggcatgaggggagagacgaataga

SEQ ID NO: 12464 - DNA, 33 bp, Homo sapiens
ctggacatttaattcatgttgctcttaaatcca

SEQ ID NO: 12465 - DNA, 33 bp, Homo sapiens
tttacaaatatacttcgaagtgaaaaggttgca

SEQ ID NO: 12466 - DNA, 33 bp, Homo sapiens
aggaggacaggagtcatctctaatatgaaaggc

SEQ ID NO: 12467 - DNA, 33 bp, Homo sapiens
ggaaagaacgagcaaacgcaaaggcccagagga

SEQ ID NO: 12468 - DNA, 33 bp, Homo sapiens
atgtcctcagagtgccgacttattacagaatat

SEQ ID NO: 12469 - DNA, 33 bp, Homo sapiens
actatatgccagatactatactaggatttgcac

SEQ ID NO: 12470 - DNA, 33 bp, Homo sapiens
aaagtgttccagagaagtactgaaactatgggg

SEQ ID NO: 12471 - DNA, 33 bp, Homo sapiens
gaaataagccttcagatagcaataacactaaag

SEQ ID NO: 12472 - DNA, 33 bp, Homo sapiens
taatattgccaaaatatgagtcaatagccagtt

SEQ ID NO: 12473 - DNA, 51 bp, Homo sapiens
aatgtctaagaagatctttacaagagctgagccatagaatattacagtatt

SEQ ID NO: 12474 - DNA, 33 bp, Homo sapiens
actaaagctaggtaaatgtttggtgcagttcac

SEQ ID NO: 12475 - DNA, 33 bp, Homo sapiens
acagttgttgtgaagagaactgtgtagaacctg

SEQ ID NO: 12476 - DNA, 33 bp, Homo sapiens
atagaaaagatgtgtctaggattgctgtatcaa

SEQ ID NO: 12477 - DNA, 33 bp, Homo sapiens
tccatggaactaagaaggctactctacagcaca

SEQ ID NO: 12478 - DNA, 33 bp, Homo sapiens
aggtggccactcccaatggacctggataacgaa

SEQ ID NO: 12479 - DNA, 33 bp, Homo sapiens
ctccacaggttttggatgaccatgtccacctct

SEQ ID NO: 12480 - DNA, 33 bp, Homo sapiens
gttgttgcagaggccaggatctgattttttttt

SEQ ID NO: 12481 - DNA, 33 bp, Homo sapiens
aatcagactttcttactgcagcttgtctgttga

SEQ ID NO: 12482 - DNA, 51 bp, Homo sapiens
tgatggatgtatcactttggaatgatccttaatgtcacatcatagttggta

SEQ ID NO: 12483 - DNA, 33 bp, Homo sapiens
attttacattgtaggctatctgttcacacatca

SEQ ID NO: 12484 - DNA, 33 bp, Homo sapiens
tctttcttgacatgaagataatgccgtgtaaac

SEQ ID NO: 12485 - DNA, 33 bp, Homo sapiens
actgggcatcatatcaccctctcccaacctgga

SEQ ID NO: 12486 - DNA, 33 bp, Homo sapiens
aatattatcctctcaaccgctggaaattatgaa

SEQ ID NO: 12487 - DNA, 33 bp, Homo sapiens
ttttggggtgaggatatgacagtataggctgaa

SEQ ID NO: 12488 - DNA, 33 bp, Homo sapiens
tgacgacaacgaaaaacggatgtccgcttatga

SEQ ID NO: 12489 - DNA, 33 bp, Homo sapiens
cagatatccctttacacatcccaagtttctggc

SEQ ID NO: 12490 - DNA, 33 bp, Homo sapiens
aaagtatctttttgtacgtttgtgagttagaca

SEQ ID NO: 12491 - DNA, 33 bp, Homo sapiens
taaatatatttcaagatagcatttctcagtgtc

SEQ ID NO: 12492 - DNA, 51 bp, Homo sapiens
ctgagacaagaatagactgagatgatagaaaaattgaattatatacaatta

SEQ ID NO: 12493 - DNA, 51 bp, Homo sapiens
gcactcacacactgtaaaggagataggcacttaataaatattcacaaaata

SEQ ID NO: 12494 - DNA, 33 bp, Homo sapiens
ttgttcaaaacgtaaagaagtcatttatgtgta

SEQ ID NO: 12495 - DNA, 33 bp, Homo sapiens
tgatctgttgtattaatctcctggaaattctac

SEQ ID NO: 12496 - DNA, 33 bp, Homo sapiens
tcatgtccaagaaacatggcaaaaatggggcat

SEQ ID NO: 12497 - DNA, 33 bp, Homo sapiens
gccttgcctgtcattctcttacccaaaacatgg

SEQ ID NO: 12498 - DNA, 33 bp, Homo sapiens
tcttagaatgtctgaatgtccatttccacaact

SEQ ID NO: 12499 - DNA, 33 bp, Homo sapiens
tgagcacaacaggacattaaggcagatccatgc

SEQ ID NO: 12500 - DNA, 33 bp, Homo sapiens
ctttcctgtaatgagatctgggattctgcacac

SEQ ID NO: 12501 - DNA, 33 bp, Homo sapiens
atatactaatggaacagggacatgataaccata

SEQ ID NO: 12502 - DNA, 33 bp, Homo sapiens
gtaggaaggagaatacgaaatctaggtttcttc

SEQ ID NO: 12503 - DNA, 33 bp, Homo sapiens
ccattacgttgtggtccctttctgtatatagta

SEQ ID NO: 12504 - DNA, 51 bp, Homo sapiens
ctatgttaacgctgaggttttagatgactgccttaaaaaataataacatct

SEQ ID NO: 12505 - DNA, 33 bp, Homo sapiens
gcacttgactgtcacttagtagatgctaaatga

SEQ ID NO: 12506 - DNA, 51 bp, Homo sapiens
ggaaggagaaaaagggaagaatttatactcataggggtcttataagggatt

SEQ ID NO: 12507 - DNA, 33 bp, Homo sapiens
ccttgcatttgtaagagaggcaaggacataggg

SEQ ID NO: 12508 - DNA, 51 bp, Homo sapiens
tggtgatacctggttagttgaaagacgcaatggttcaatggcacctaaatg

SEQ ID NO: 12509 - DNA, 33 bp, Homo sapiens
aaggagtcacaaagtataaaacaacaatccaaa

SEQ ID NO: 12510 - DNA, 33 bp, Homo sapiens
ataaaacatctacagcccctgtgttaatacaaa

SEQ ID NO: 12511 - DNA, 33 bp, Homo sapiens
ttgtcacaggtgtcagtagtagagaatataagt

SEQ ID NO: 12512 - DNA, 33 bp, Homo sapiens
ttttaaaattcgtacttagcgcaatacttacaa

SEQ ID NO: 12513 - DNA, 33 bp, Homo sapiens
ttataaaaatgctagattatacttgtacttgcc

SEQ ID NO: 12514 - DNA, 51 bp, Homo sapiens
cacctagtctaggatgattgttacatgcttctagcaacaagtgcacataaa

SEQ ID NO: 12515 - DNA, 33 bp, Homo sapiens
tgttcctgtccccaaagcttctgctagtccttc

SEQ ID NO: 12516 - DNA, 33 bp, Homo sapiens
tttgtggattttcaaggagtgcctacttttact

SEQ ID NO: 12517 - DNA, 33 bp, Homo sapiens
tgggcaacttaatccatgaatgttgtctgtatt

SEQ ID NO: 12518 - DNA, 33 bp, Homo sapiens
tgccagagaatggcagtcacacctacctatgag

SEQ ID NO: 12519 - DNA, 33 bp, Homo sapiens
taaagaacttctagaagctgaaatgacaaaaaa

SEQ ID NO: 12520 - DNA, 33 bp, Homo sapiens
actcccacagcaagacgacacgaaaccagcatt

SEQ ID NO: 12521 - DNA, 51 bp, Homo sapiens
agagaaaaagtgaacattacttacattcaatacataggttggctctgcaca

SEQ ID NO: 12522 - DNA, 33 bp, Homo sapiens
ttttaccctcgacccctcattcttgttcaccat

SEQ ID NO: 12523 - DNA, 33 bp, Homo sapiens
acatcacttctgttgataattcactggacaaag

SEQ ID NO: 12524 - DNA, 33 bp, Homo sapiens
ttccaataaaaagaaggcacaacattttcctaa

SEQ ID NO: 12525 - DNA, 51 bp, Homo sapiens
ctaggcagtgactggtatagtttgagctttgtcttttttatttcagacttt

SEQ ID NO: 12526 - DNA, 51 bp, Homo sapiens
agcaaaatgataacacatcaatgtatcctgaacaatagaagaaggtaattc

SEQ ID NO: 12527 - DNA, 33 bp, Homo sapiens
taaatctggtctggcatagagtgcaatggaagt

SEQ ID NO: 12528 - DNA, 33 bp, Homo sapiens
ggaagatcataacaaatttcagcatcctatggg

SEQ ID NO: 12529 - DNA, 51 bp, Homo sapiens
cagatgtagacactcaatttatgacggaagggctgctgcagagtaatgggg

SEQ ID NO: 12530 - DNA, 33 bp, Homo sapiens
tctgtaggatcccaaatcattcactcactcagg

SEQ ID NO: 12531 - DNA, 33 bp, Homo sapiens
actgtgaataccttcatgttcttggattataag

SEQ ID NO: 12532 - DNA, 33 bp, Homo sapiens
aggtcctttgatataccccagaacaatttttat

SEQ ID NO: 12533 - DNA, 33 bp, Homo sapiens
atagatgctgaagctatggctcagagggaaata

SEQ ID NO: 12534 - DNA, 51 bp, Homo sapiens
gtttctcaggtcttttcaatagctattttttactcactttaagattttctt

SEQ ID NO: 12535 - DNA, 33 bp, Homo sapiens
aggtagtccagatttatggattttctcctaaat

SEQ ID NO: 12536 - DNA, 33 bp, Homo sapiens
aagtctagctaaaccacgataattcattgattt

SEQ ID NO: 12537 - DNA, 33 bp, Homo sapiens
cagcagccttaaggatgaagctattgtaacaag

SEQ ID NO: 12538 - DNA, 33 bp, Homo sapiens
tgatgttaaccttgccggaatttgtaatcagga

SEQ ID NO: 12539 - DNA, 33 bp, Homo sapiens
aaagagcctctaggccgatcttatctggagctt

SEQ ID NO: 12540 - DNA, 33 bp, Homo sapiens
actgtccctaaattcagactcacatacctaaaa

SEQ ID NO: 12541 - DNA, 33 bp, Homo sapiens
ttttaatacagtaacagtccaaatcctaataag

SEQ ID NO: 12542 - DNA, 33 bp, Homo sapiens
catttgcaaggatgaactgagataaggagctag

SEQ ID NO: 12543 - DNA, 33 bp, Homo sapiens
tagctgtaagggatgatgagaaagtgagtatat

SEQ ID NO: 12544 - DNA, 33 bp, Homo sapiens
tgttatttcctaagacggattccttccagtgtc

SEQ ID NO: 12545 - DNA, 33 bp, Homo sapiens
tgtagtttaagatacatgtagaaagtcattgct

SEQ ID NO: 12546 - DNA, 33 bp, Homo sapiens
tacttctgtctggcactcagtttgtgatctcca

SEQ ID NO: 12547 - DNA, 33 bp, Homo sapiens
cttagaaacttgaatatcgtggaaatctaacaa

SEQ ID NO: 12548 - DNA, 33 bp, Homo sapiens
agagaaactggcactccacaactatttcatttg

SEQ ID NO: 12549 - DNA, 33 bp, Homo sapiens
ttagtgactccaactctatgtaaatctcttcaa

SEQ ID NO: 12550 - DNA, 33 bp, Homo sapiens
tcatgtcacattgttatgttcagttggatgtca

SEQ ID NO: 12551 - DNA, 33 bp, Homo sapiens
tatattcctcacttctcaaacagctgactccta

SEQ ID NO: 12552 - DNA, 33 bp, Homo sapiens
tcgaatgagatacgaccaggaaatttctcacaa

SEQ ID NO: 12553 - DNA, 33 bp, Homo sapiens
atcttaagattgtttctagctctatatgccctg

SEQ ID NO: 12554 - DNA, 51 bp, Homo sapiens
ttacctggatcatcagctttgtgaggacagggttcacctttgtcttactca

SEQ ID NO: 12555 - DNA, 33 bp, Homo sapiens
cccttctccttccacatactcacagtaatttgg

SEQ ID NO: 12556 - DNA, 33 bp, Homo sapiens
taagacaaaattctgttaagcaaggaatcattg

SEQ ID NO: 12557 - DNA, 33 bp, Homo sapiens
cctctgcctcttgggatcaccaatttactgaga

SEQ ID NO: 12558 - DNA, 33 bp, Homo sapiens
gtgtgcagtcattagcgctatccatctctagaa

SEQ ID NO: 12559 - DNA, 33 bp, Homo sapiens
taggaagaaaagcagatgtagccagaaagctag

SEQ ID NO: 12560 - DNA, 33 bp, Homo sapiens
agctgaatggagacagtaaatagcagcaaacat

SEQ ID NO: 12561 - DNA, 33 bp, Homo sapiens
atttgaagaaatccaatgtaggcattaggaacc

SEQ ID NO: 12562 - DNA, 33 bp, Homo sapiens
aatgccactaaagttagaagatgaaggaggaga

SEQ ID NO: 12563 - DNA, 33 bp, Homo sapiens
gtctttttattttttcgagatagtgtcttgctc

SEQ ID NO: 12564 - DNA, 33 bp, Homo sapiens
agatcttcagaaaatatccgtcatttagtagac

SEQ ID NO: 12565 - DNA, 33 bp, Homo sapiens
cgtttatatcttcaccggcaatatgcattttag

SEQ ID NO: 12566 - DNA, 33 bp, Homo sapiens
gcccagggcctaaaacggtcagcacaaagcctc

SEQ ID NO: 12567 - DNA, 33 bp, Homo sapiens
tcctctttgtcttctctatcccaagaatcttcc

SEQ ID NO: 12568 - DNA, 51 bp, Homo sapiens
tctaccaccactttggcatttgatggtctagtcactctgtaattgggagat

SEQ ID NO: 12569 - DNA, 33 bp, Homo sapiens
gggacatagaatcatatatggttgctgacttgg

SEQ ID NO: 12570 - DNA, 33 bp, Homo sapiens
atctctctaatcaataggcaactccactgacca

SEQ ID NO: 12571 - DNA, 51 bp, Homo sapiens
aaaagtaatctaaaggtgaaggtaatagtaatagcagcatacagtataaat

SEQ ID NO: 12572 - DNA, 33 bp, Homo sapiens
aacattcggtgttacagatgatgacattcctgt

SEQ ID NO: 12573 - DNA, 33 bp, Homo sapiens
tgaggattgaactttatgcttggtggtcagtaa

SEQ ID NO: 12574 - DNA, 33 bp, Homo sapiens
attttgaaagaactatgacaaacaaagtttaag

SEQ ID NO: 12575 - DNA, 33 bp, Homo sapiens
agaactgtggtttatatggactatcaatctaga

SEQ ID NO: 12576 - DNA, 33 bp, Homo sapiens
attacattcacagcttgaaacgggctatggtgg

SEQ ID NO: 12577 - DNA, 33 bp, Homo sapiens
cggttttcatggttcccacccgacctcatataa

SEQ ID NO: 12578 - DNA, 33 bp, Homo sapiens
cttgtagctgtgtcccgaaccagcaagatttat

SEQ ID NO: 12579 - DNA, 51 bp, Homo sapiens
aaacagctgttgccttcttctccacgatggaatcaaaggatcttatcacct

SEQ ID NO: 12580 - DNA, 51 bp, Homo sapiens
tggcttccttgtccttgcatagggaggaacacaggcagacgtggtaggaga

SEQ ID NO: 12581 - DNA, 33 bp, Homo sapiens
aggatgggctgcgtcatctttgtgggggccaac

SEQ ID NO: 12582 - DNA, 33 bp, Homo sapiens
ccagtgattggtttaattggcttgtggcagggc

SEQ ID NO: 12583 - DNA, 33 bp, Homo sapiens
cctctcaaagatttcatgaggtcaacaggggag

SEQ ID NO: 12584 - DNA, 33 bp, Homo sapiens
gctacatagagttccacaataactttcctctgc

SEQ ID NO: 12585 - DNA, 33 bp, Homo sapiens
atttttttgtgcaaaagtaatacataacaaagg

SEQ ID NO: 12586 - DNA, 33 bp, Homo sapiens
ggagggagacctagtagagccattgataaatgt

SEQ ID NO: 12587 - DNA, 33 bp, Homo sapiens
ctctgtgtacactctatctgcaaagctcactgg

SEQ ID NO: 12588 - DNA, 33 bp, Homo sapiens
ttcggaacatcctgcagtatagaatctcatccc

SEQ ID NO: 12589 - DNA, 33 bp, Homo sapiens
tgcataaatacctgacgctggtaggaccaccat

SEQ ID NO: 12590 - DNA, 33 bp, Homo sapiens
aatataaattgagaaagaagtctgctaaaatct

SEQ ID NO: 12591 - DNA, 33 bp, Homo sapiens
agctctgttattatcctccatttttgatcatgg

SEQ ID NO: 12592 - DNA, 33 bp, Homo sapiens
tcttcgaagcttccactggtcatgctgcatatg

SEQ ID NO: 12593 - DNA, 33 bp, Homo sapiens
ctctttttgctgactatactctcctgggcaatc

SEQ ID NO: 12594 - DNA, 33 bp, Homo sapiens
tcttgaagtgagaagattatcctgatgggctcg

SEQ ID NO: 12595 - DNA, 33 bp, Homo sapiens
caggagacacaaagggcaagatcctagttctct

SEQ ID NO: 12596 - DNA, 33 bp, Homo sapiens
aaggaatgagtcagaaggaggcaacacaggggt

SEQ ID NO: 12597 - DNA, 33 bp, Homo sapiens
aaacaagtctcagcacgggatttaaattccaca

SEQ ID NO: 12598 - DNA, 33 bp, Homo sapiens
ctgtgctattggcctctatatcctccttggacc

SEQ ID NO: 12599 - DNA, 33 bp, Homo sapiens
agccccatcggatgaagattgccattgcccaaa

SEQ ID NO: 12600 - DNA, 33 bp, Homo sapiens
ccatctgccttataaagaggttgacaggtgggc

SEQ ID NO: 12601 - DNA, 33 bp, Homo sapiens
gacaggtgggaaggcagcttttcagagagagga

SEQ ID NO: 12602 - DNA, 33 bp, Homo sapiens
ctacactgactcttaggacttctttcagcagct

SEQ ID NO: 12603 - DNA, 33 bp, Homo sapiens
tacaggtaagcacacagtcgtaacgaacttccc

SEQ ID NO: 12604 - DNA, 33 bp, Homo sapiens
gactgagatttaaagctgaacttagactgaaac

SEQ ID NO: 12605 - DNA, 51 bp, Homo sapiens
ttttagttggttcattaaccaaaagggttgttgtttgccagtctttggatg

SEQ ID NO: 12606 - DNA, 33 bp, Homo sapiens
gagaggaggcaaaatggataggagacagtggga

SEQ ID NO: 12607 - DNA, 33 bp, Homo sapiens
tatcacctcagaatgagccggaacccgtaaaga

SEQ ID NO: 12608 - DNA, 51 bp, Homo sapiens
acttgtagcacataatatattgttagggggtgagtaaatgatcattaattg

SEQ ID NO: 12609 - DNA, 33 bp, Homo sapiens
cttttctatttgttgggcatatgaactatagcc

SEQ ID NO: 12610 - DNA, 33 bp, Homo sapiens
acacagacacaaacaaggttaggaagcattgca

SEQ ID NO: 12611 - DNA, 33 bp, Homo sapiens
gagtacttgcctcatatggcagattcttcattc

SEQ ID NO: 12612 - DNA, 33 bp, Homo sapiens
agaatggctgaatttgtactgtgagggaactca

SEQ ID NO: 12613 - DNA, 51 bp, Homo sapiens
ggatacagaagctgtagaaccataggccaatagagtttaaaacttgaaaga

SEQ ID NO: 12614 - DNA, 33 bp, Homo sapiens
ttttaactgtaaagtagtacattgctaagtgga

SEQ ID NO: 12615 - DNA, 33 bp, Homo sapiens
tcactggatgatcttggattaactatgctcagc

SEQ ID NO: 12616 - DNA, 33 bp, Homo sapiens
aaggagaacccaggacgctcctcagcctgatgg

SEQ ID NO: 12617 - DNA, 33 bp, Homo sapiens
aagggtgccatccttatgacgaggaaggacgag

SEQ ID NO: 12618 - DNA, 33 bp, Homo sapiens
acacaggcactactcatatacactcagacacat

SEQ ID NO: 12619 - DNA, 33 bp, Homo sapiens
tcctcctctttaatcatccagactgctacagtt

SEQ ID NO: 12620 - DNA, 33 bp, Homo sapiens
aaaaaggcattgtttctagagctaggctaccta

SEQ ID NO: 12621 - DNA, 33 bp, Homo sapiens
actggatgcccattaagtaattcctgtactagt

SEQ ID NO: 12622 - DNA, 33 bp, Homo sapiens
gaggaatctgttatgtgaacttccaagcagacg

SEQ ID NO: 12623 - DNA, 51 bp, Homo sapiens
gatcttggattagactcacctggaatatatgtctattataggtcatctgta

SEQ ID NO: 12624 - DNA, 33 bp, Homo sapiens
ctagctcacacttaaatcttatattgcatttta

SEQ ID NO: 12625 - DNA, 33 bp, Homo sapiens
gtatagcaatagcatatctctatgtagacgcta

SEQ ID NO: 12626 - DNA, 33 bp, Homo sapiens
ctcttgaagcaatggagcaagaaacttgtggat

SEQ ID NO: 12627 - DNA, 33 bp, Homo sapiens
ttaaaatgtatgaaaagttattgttgcctgtgg

SEQ ID NO: 12628 - DNA, 33 bp, Homo sapiens
gtgctcaagatttgctgaagataatgatagatt

SEQ ID NO: 12629 - DNA, 33 bp, Homo sapiens
tgattatattaatatccaactttcaggaccatc

SEQ ID NO: 12630 - DNA, 33 bp, Homo sapiens
actgagaaatgagtgatgtgaagaggtgactag

SEQ ID NO: 12631 - DNA, 33 bp, Homo sapiens
gaatccaaaatgaccatgtgggtacaataaacc

SEQ ID NO: 12632 - DNA, 51 bp, Homo sapiens
taagctttctgtccttgaattgtttgaaaacactggacagaggtcttccta

SEQ ID NO: 12633 - DNA, 33 bp, Homo sapiens
gattaaatcattataataactcgataaggcagt

SEQ ID NO: 12634 - DNA, 33 bp, Homo sapiens
gggaagttgtgtgtcatgcctggagtcaccagt

SEQ ID NO: 12635 - DNA, 33 bp, Homo sapiens
atttctgtatatgatatgtttcccacacttttc

SEQ ID NO: 12636 - DNA, 33 bp, Homo sapiens
acttactcttctggaatctgatccaggtgggtg

SEQ ID NO: 12637 - DNA, 33 bp, Homo sapiens
ttgagaaagcctcaactaaaccttattgaattt

SEQ ID NO: 12638 - DNA, 33 bp, Homo sapiens
cctctctatccagccatctgaggagaaaaaagg

SEQ ID NO: 12639 - DNA, 33 bp, Homo sapiens
ttctgatcaagttgcatatctgatcaagttaca

SEQ ID NO: 12640 - DNA, 33 bp, Homo sapiens
gtgtggtaagccaggctataagttgaaggaaaa

SEQ ID NO: 12641 - DNA, 33 bp, Homo sapiens
atgctaagagtagtgagaagcactgaaagggtg

SEQ ID NO: 12642 - DNA, 33 bp, Homo sapiens
ggggagacaggaccacgcatagtttgcagggtc

SEQ ID NO: 12643 - DNA, 33 bp, Homo sapiens
gtagagggttttgagatccaggctgaagagttt

SEQ ID NO: 12644 - DNA, 33 bp, Homo sapiens
tgcaggagaacggatcgagtggaaaattttatc

SEQ ID NO: 12645 - DNA, 33 bp, Homo sapiens
acttaattctcataacgataaaactgatttaaa

SEQ ID NO: 12646 - DNA, 33 bp, Homo sapiens
agttaagatgtttgcatatatattctctgtcac

SEQ ID NO: 12647 - DNA, 51 bp, Homo sapiens
caaaggcaatagtggactcttaacccgcacattagtcattgttttaataga

SEQ ID NO: 12648 - DNA, 33 bp, Homo sapiens
tcaaatgaatagggaattaatcctttctcttca

SEQ ID NO: 12649 - DNA, 33 bp, Homo sapiens
catcagagccatcagagtcagggtacatattga

SEQ ID NO: 12650 - DNA, 33 bp, Homo sapiens
tgtttggcatagtccagtgaaaaggaagaaaga

SEQ ID NO: 12651 - DNA, 33 bp, Homo sapiens
tgacctcaagaaggtagaggtggatagatttga

SEQ ID NO: 12652 - DNA, 33 bp, Homo sapiens
agatccctagagaggtcaaataatgaaatatgg

SEQ ID NO: 12653 - DNA, 33 bp, Homo sapiens
ttcttgtcaaagaggagagtggttcttcagctc

SEQ ID NO: 12654 - DNA, 33 bp, Homo sapiens
accatcttgttaggactgtcaagctgtcccact

SEQ ID NO: 12655 - DNA, 33 bp, Homo sapiens
ataggcaagaaacagagctaggattgaagcctt

SEQ ID NO: 12656 - DNA, 33 bp, Homo sapiens
ggatcacagatgaaccgcctagctgagcctttc

SEQ ID NO: 12657 - DNA, 33 bp, Homo sapiens
gtcaacaggaggctaatgtcagatcttctagaa

SEQ ID NO: 12658 - DNA, 33 bp, Homo sapiens
tgttgcctatgggtgagcatcatatgggccctg

SEQ ID NO: 12659 - DNA, 33 bp, Homo sapiens
actactcaaaggaacatctgcttgggaagaggc

SEQ ID NO: 12660 - DNA, 33 bp, Homo sapiens
tggtgttggtcatttaggggagaaggagagaga

SEQ ID NO: 12661 - DNA, 33 bp, Homo sapiens
aacaatggagtttaacgcagatatgaagtaatt

SEQ ID NO: 12662 - DNA, 51 bp, Homo sapiens
tcatgcaaaatgtgacatagtatgatcgagggcggacagccttgggaacca

SEQ ID NO: 12663 - DNA, 33 bp, Homo sapiens
actttgggcttgaccaggtaagaatgacagagg

SEQ ID NO: 12664 - DNA, 33 bp, Homo sapiens
agatgacatagttgatcaggaaaagtgtccttc

SEQ ID NO: 12665 - DNA, 33 bp, Homo sapiens
aattgtatcaccattctctggcattagatacaa

SEQ ID NO: 12666 - DNA, 33 bp, Homo sapiens
ggactgtaggtaataatagtgtcatgtagtcag

SEQ ID NO: 12667 - DNA, 33 bp, Homo sapiens
ggcaggtgaacgagcagtagtcgcaggcgaact

SEQ ID NO: 12668 - DNA, 33 bp, Homo sapiens
tgactcctataaagccggagaatgaggaaaaca

SEQ ID NO: 12669 - DNA, 33 bp, Homo sapiens
aagttgcctaagcccatctagagagtacctgtt

SEQ ID NO: 12670 - DNA, 33 bp, Homo sapiens
catgattaaggataagtctgtctacaacaagcg

SEQ ID NO: 12671 - DNA, 33 bp, Homo sapiens
cagctgtgctctactttaagaaatttgacattt

SEQ ID NO: 12672 - DNA, 33 bp, Homo sapiens
aagaggctgtgaataatggaatggtgtgtaaat

SEQ ID NO: 12673 - DNA, 33 bp, Homo sapiens
caagttaggccttgaagcaaaatgaagacacca

SEQ ID NO: 12674 - DNA, 33 bp, Homo sapiens
gtagtagtgaccatactaagaggagaaactcag

SEQ ID NO: 12675 - DNA, 33 bp, Homo sapiens
ctgggccctctgcctctatgctggaagacgtgg

SEQ ID NO: 12676 - DNA, 33 bp, Homo sapiens
tagtccataaagttccggctcatagcaggagag

SEQ ID NO: 12677 - DNA, 33 bp, Homo sapiens
tggacaaaaccagaaattagtgtgatttggaca

SEQ ID NO: 12678 - DNA, 33 bp, Homo sapiens
gcctggctttgtcagcggctacttagagaggtt

SEQ ID NO: 12679 - DNA, 33 bp, Homo sapiens
actatctactgaggcctgagactgcatggaggg

SEQ ID NO: 12680 - DNA, 33 bp, Homo sapiens
aactgttccatgatgatgtggcataaaagagag

SEQ ID NO: 12681 - DNA, 51 bp, Homo sapiens
ggctcctttgaatgctttcaaggactgagtaaagtttgtaagaggcatttc

SEQ ID NO: 12682 - DNA, 33 bp, Homo sapiens
ttttccagtagtgacattgatgttgggaattag

SEQ ID NO: 12683 - DNA, 33 bp, Homo sapiens
catattctgatgggacgaattggtccttgtaaa

SEQ ID NO: 12684 - DNA, 33 bp, Homo sapiens
attatgttccacagaagagcctggaagacgtat

SEQ ID NO: 12685 - DNA, 33 bp, Homo sapiens
aagaatataatacacattggaaatcccagaggc

SEQ ID NO: 12686 - DNA, 33 bp, Homo sapiens
cacgttgattttagcctgaggaaacctatttca

SEQ ID NO: 12687 - DNA, 33 bp, Homo sapiens
cagatattcctttgaattcctcttttggcatct

SEQ ID NO: 12688 - DNA, 33 bp, Homo sapiens
agagctgaagaactgacattcagagagcttgtg

SEQ ID NO: 12689 - DNA, 33 bp, Homo sapiens
tgtgactaaatgcacagtatgaggcgttggggt

SEQ ID NO: 12690 - DNA, 33 bp, Homo sapiens
cagctctggagaacacgcttttactttagtcag

SEQ ID NO: 12691 - DNA, 33 bp, Homo sapiens
ataccaacagcctggactcactggctgagatga

SEQ ID NO: 12692 - DNA, 33 bp, Homo sapiens
ggcatgaaagctcctatagcattgataaatttc

SEQ ID NO: 12693 - DNA, 33 bp, Homo sapiens
tattgctcctgagctgtaaatctgtacatcatg

SEQ ID NO: 12694 - DNA, 33 bp, Homo sapiens
ttaatgggtcaccaaatccccaaactctaccaa

SEQ ID NO: 12695 - DNA, 33 bp, Homo sapiens
gtaatgcctggacgtagtaaagaataaagaggg

SEQ ID NO: 12696 - DNA, 33 bp, Homo sapiens
atgtttggaactactatgggagccacatcatta

SEQ ID NO: 12697 - DNA, 33 bp, Homo sapiens
ataaagctcaatgagatgtaatgttctgaaaca

SEQ ID NO: 12698 - DNA, 33 bp, Homo sapiens
aaccaggtaataagcagagtattcagtaggtat

SEQ ID NO: 12699 - DNA, 33 bp, Homo sapiens
aatttctgattggttgtattaggatcctgttcc

SEQ ID NO: 12700 - DNA, 33 bp, Homo sapiens
caccttgaggatagcagagaaacaaaaacaaag

SEQ ID NO: 12701 - DNA, 33 bp, Homo sapiens
ttgaagatggctaaaacctcttgtagtgaaacc

SEQ ID NO: 12702 - DNA, 33 bp, Homo sapiens
tcttaactgtctgtgatgaatctgataaaattt

SEQ ID NO: 12703 - DNA, 33 bp, Homo sapiens
ttccctgcatatgccatgttgattaattttatt

SEQ ID NO: 12704 - DNA, 33 bp, Homo sapiens
caaagcacaatgcttagatagtctgactagttt

SEQ ID NO: 12705 - DNA, 33 bp, Homo sapiens
aaaagtgagactcctctagatggactgaaacta

SEQ ID NO: 12706 - DNA, 33 bp, Homo sapiens
gtgtgaagccacactagcacaaaagtgagactc

SEQ ID NO: 12707 - DNA, 33 bp, Homo sapiens
gtattctgcacagttatgaaaacaaaaataaat

SEQ ID NO: 12708 - DNA, 33 bp, Homo sapiens
ttccccattaaatacccggcacctcatttctcc

SEQ ID NO: 12709 - DNA, 33 bp, Homo sapiens
caggctgccagtggaagcaatatgcacgttgtg

SEQ ID NO: 12710 - DNA, 33 bp, Homo sapiens
tgtcaatgcaaataagtcctacatttaggcccc

SEQ ID NO: 12711 - DNA, 33 bp, Homo sapiens
cctttcttcagcaaaatttagacacaccattct

SEQ ID NO: 12712 - DNA, 33 bp, Homo sapiens
catcagcacaaagagaggactcaccaggggaga

SEQ ID NO: 12713 - DNA, 33 bp, Homo sapiens
ggttggacctcacaatgaacagcagaacagaaa

SEQ ID NO: 12714 - DNA, 33 bp, Homo sapiens
acttctaaataccacatgaagagaactaggagt

SEQ ID NO: 12715 - DNA, 33 bp, Homo sapiens
cccccacactaacccatctcctagcacaggaag

SEQ ID NO: 12716 - DNA, 33 bp, Homo sapiens
atattcagtgacaacagcttttaggagcttgaa

SEQ ID NO: 12717 - DNA, 51 bp, Homo sapiens
gagcagttttggaggataaagacaggagttggttagatcagatccttcatt

SEQ ID NO: 12718 - DNA, 51 bp, Homo sapiens
atctcgagaaaagtctggtcaggatgagggagaaagatcttattgggtata

SEQ ID NO: 12719 - DNA, 51 bp, Homo sapiens
aactcaggtcttctaaaatatttacgaagcaggtgagctagagagaacttc

SEQ ID NO: 12720 - DNA, 51 bp, Homo sapiens
gatttattggaaggagttggcttacgtgattgtgaggtctaggcaagtatg

SEQ ID NO: 12721 - DNA, 33 bp, Homo sapiens
aatcgcagtcacataagcttcaaaaacatggct

SEQ ID NO: 12722 - DNA, 33 bp, Homo sapiens
attcttatcttcagcacctgttatactttaatt

SEQ ID NO: 12723 - DNA, 33 bp, Homo sapiens
agtgagtggctctaggtcattttctcctggctc

SEQ ID NO: 12724 - DNA, 33 bp, Homo sapiens
ggagagatggtaaagctcatgcaggaagaaggg

SEQ ID NO: 12725 - DNA, 33 bp, Homo sapiens
aggtagccgttttctatggaaacttcacactaa

SEQ ID NO: 12726 - DNA, 33 bp, Homo sapiens
catctactgctacccagaagttgccatcagctc

SEQ ID NO: 12727 - DNA, 33 bp, Homo sapiens
agtgtgtcttacagtggaatgacagttcagaca

SEQ ID NO: 12728 - DNA, 33 bp, Homo sapiens
cagaaggtaaaggacatggaactgaagcactag

SEQ ID NO: 12729 - DNA, 33 bp, Homo sapiens
gcatgattctggaaacgaacagatagaaatagg

SEQ ID NO: 12730 - DNA, 33 bp, Homo sapiens
atgaggaagctggtgatgtaaggaaaggtgaga

SEQ ID NO: 12731 - DNA, 33 bp, Homo sapiens
atctctccacatgtgcggagcatcagtttttgc

SEQ ID NO: 12732 - DNA, 33 bp, Homo sapiens
ggtttcctgagtaaaagcagagtctaacagccc

SEQ ID NO: 12733 - DNA, 33 bp, Homo sapiens
ctacttgactagccaattcattccacctcttga

SEQ ID NO: 12734 - DNA, 33 bp, Homo sapiens
tgttttctctctatgatggtagagtattggcct

SEQ ID NO: 12735 - DNA, 33 bp, Homo sapiens
gatcttcctatcaaagcaagaccagccctctac

SEQ ID NO: 12736 - DNA, 33 bp, Homo sapiens
gcataagaggacaaaagggaactccactgcaga

SEQ ID NO: 12737 - DNA, 33 bp, Homo sapiens
gcttcctttttttccagaggtattgatcccaaa

SEQ ID NO: 12738 - DNA, 33 bp, Homo sapiens
ttctgtatttccttcataaagcaagctccacta

SEQ ID NO: 12739 - DNA, 33 bp, Homo sapiens
gagacctatttaaccataagctctggtttctcc

SEQ ID NO: 12740 - DNA, 33 bp, Homo sapiens
cacaaagtgaatttaattatgcaagaggtggat

SEQ ID NO: 12741 - DNA, 33 bp, Homo sapiens
gccatttcaggcacaatgtaggcagtgggtgtg

SEQ ID NO: 12742 - DNA, 33 bp, Homo sapiens
gcaaaggattcagacagtagccttcctcggccc

SEQ ID NO: 12743 - DNA, 33 bp, Homo sapiens
gatatctttctgtctatgctcccatcttttgcc

SEQ ID NO: 12744 - DNA, 33 bp, Homo sapiens
actactaaacacttgatacgtctattgtgtctc

SEQ ID NO: 12745 - DNA, 33 bp, Homo sapiens
ctcctcatgctcacaagtctcttaagccctttc

SEQ ID NO: 12746 - DNA, 33 bp, Homo sapiens
agtcaaccgaggacaatgccctgccaaacagag

SEQ ID NO: 12747 - DNA, 33 bp, Homo sapiens
aagaggaaagctaccagtcttcctgatggatac

SEQ ID NO: 12748 - DNA, 33 bp, Homo sapiens
gttgaattattgaccatcgcccatgcaatttcc

SEQ ID NO: 12749 - DNA, 33 bp, Homo sapiens
ctggtgaccataattcgaggcctgatttggttt

SEQ ID NO: 12750 - DNA, 33 bp, Homo sapiens
gtgggaaccactgtgcgattttgaatgtgcggc

SEQ ID NO: 12751 - DNA, 33 bp, Homo sapiens
gtacttagggagacaatgctctttcaagaaaac

SEQ ID NO: 12752 - DNA, 33 bp, Homo sapiens
cctgctctatccaacactccttgtacacagaga

SEQ ID NO: 12753 - DNA, 33 bp, Homo sapiens
acttttcatttgtatacggtagctgtttaggag

SEQ ID NO: 12754 - DNA, 33 bp, Homo sapiens
acgagactgaataaaagtgttcaaactgtgctc

SEQ ID NO: 12755 - DNA, 33 bp, Homo sapiens
tggctttctaccccaattacgaggactgccaga

SEQ ID NO: 12756 - DNA, 33 bp, Homo sapiens
acaccacaccaaagtaggcggtttcccaggaag

SEQ ID NO: 12757 - DNA, 33 bp, Homo sapiens
atgagagtagcagttctcaggatgttccgctac

SEQ ID NO: 12758 - DNA, 33 bp, Homo sapiens
agctggtcagttgtgatgttttggatggcatct

SEQ ID NO: 12759 - DNA, 33 bp, Homo sapiens
gaggaacggaatgcgagcgttgtctctgttact

SEQ ID NO: 12760 - DNA, 33 bp, Homo sapiens
gctgtggcgttttccagtcaatcatctgtgggt

SEQ ID NO: 12761 - DNA, 33 bp, Homo sapiens
gcggctgtaacgaaacgacaccgaaagtgccgt

SEQ ID NO: 12762 - DNA, 33 bp, Homo sapiens
tctgcctcctggtccctgcagatcgcccagacc

SEQ ID NO: 12763 - DNA, 33 bp, Homo sapiens
agcactgtgatgctgctacagttgacctgataa

SEQ ID NO: 12764 - DNA, 33 bp, Homo sapiens
atttgactgctttagatctgtgaaaatgactgt

SEQ ID NO: 12765 - DNA, 33 bp, Homo sapiens
aaaggctggcaaaatatgtatcattgttgaagc

SEQ ID NO: 12766 - DNA, 33 bp, Homo sapiens
gcctggcagtgtcaagtctgaaacaaagcaata

SEQ ID NO: 12767 - DNA, 33 bp, Homo sapiens
gatgtcctatcacctcgctattgggaagggggc

SEQ ID NO: 12768 - DNA, 33 bp, Homo sapiens
gagatttctaaaagcatatttcgatcaggcaca

SEQ ID NO: 12769 - DNA, 33 bp, Homo sapiens
aattggcatattcccctgagactcctttttgac

SEQ ID NO: 12770 - DNA, 33 bp, Homo sapiens
aatattggtatctatatgaagggctaaagtaac

SEQ ID NO: 12771 - DNA, 33 bp, Homo sapiens
tgtaggagtgtacaaagtaaaaccagaaatttt

SEQ ID NO: 12772 - DNA, 33 bp, Homo sapiens
ttgatgccttagacttgaaagctgtctttttgc

SEQ ID NO: 12773 - DNA, 33 bp, Homo sapiens
tttgcccttatgggactctaatgacaacaaaat

SEQ ID NO: 12774 - DNA, 33 bp, Homo sapiens
attcagctttgtccaatcacgtgaaatgaagat

SEQ ID NO: 12775 - DNA, 33 bp, Homo sapiens
gtgtgtctctggtcacgatattttcatcagcca

SEQ ID NO: 12776 - DNA, 33 bp, Homo sapiens
tttcagctctcatattgaaaacaagtgtccttt

SEQ ID NO: 12777 - DNA, 33 bp, Homo sapiens
ctgatgtcctctgatcgacaagtaaagtgaaaa

SEQ ID NO: 12778 - DNA, 51 bp, Homo sapiens
aggtgtaatttccaattccattaactgaacgagacatgaatgtttccttaa

SEQ ID NO: 12779 - DNA, 33 bp, Homo sapiens
ctttcttctttgaaagtagtcaataacagtgca

SEQ ID NO: 12780 - DNA, 33 bp, Homo sapiens
aacaaatctgtgtttataataagcgtaccaaat

SEQ ID NO: 12781 - DNA, 33 bp, Homo sapiens
caaaataaaaggtgtatagcaatttcagcggat

SEQ ID NO: 12782 - DNA, 51 bp, Homo sapiens
ccagtgatatagatggttgaaaaactgatgattccactgttttaaaattgt

SEQ ID NO: 12783 - DNA, 33 bp, Homo sapiens
cttttgtgtttcttaataagctgctctattagg

SEQ ID NO: 12784 - DNA, 33 bp, Homo sapiens
aaaaattgaacagagctgctaaaaggtattgaa

SEQ ID NO: 12785 - DNA, 33 bp, Homo sapiens
ctaacatgcagcccggcagatccagtgtcaggt

SEQ ID NO: 12786 - DNA, 33 bp, Homo sapiens
tgttggattttaagtgtaccctacatgcattct

SEQ ID NO: 12787 - DNA, 33 bp, Homo sapiens
gcttatctttgtcagtgaaaagaaagtttgctg

SEQ ID NO: 12788 - DNA, 33 bp, Homo sapiens
tttaagtagaagctgatgaaaatatctttctca

SEQ ID NO: 12789 - DNA, 51 bp, Homo sapiens
gatagtgctgagaaagaaatcttaatcatagctgaaataaattgtttatat

SEQ ID NO: 12790 - DNA, 33 bp, Homo sapiens
agtaatgtgaataagtgaagtgagctttcatga

SEQ ID NO: 12791 - DNA, 51 bp, Homo sapiens
aacacagggcttctgtggaaacgcagggaagaagcatttacactcaatcat

SEQ ID NO: 12792 - DNA, 33 bp, Homo sapiens
ggttactcaaggtcacgatgactgagcaaactc

SEQ ID NO: 12793 - DNA, 33 bp, Homo sapiens
ttacttttgtaagtaattgcaaactgtcttcca

SEQ ID NO: 12794 - DNA, 33 bp, Homo sapiens
gacttaataaagagccgcatgagtcgcctcagc

SEQ ID NO: 12795 - DNA, 33 bp, Homo sapiens
gacaaatgactgtttagactctgcaaaccattc

SEQ ID NO: 12796 - DNA, 33 bp, Homo sapiens
ttagtagaatttttaacctggctttccatggat

SEQ ID NO: 12797 - DNA, 33 bp, Homo sapiens
gtttccattgctcaacgcatttttgaaattcca

SEQ ID NO: 12798 - DNA, 33 bp, Homo sapiens
tgaggtcccaagtgaagagagaggcctttggac

SEQ ID NO: 12799 - DNA, 33 bp, Homo sapiens
gcgtaagtcagggaaagatatacattaacaaat

SEQ ID NO: 12800 - DNA, 33 bp, Homo sapiens
ccaaaaaggcctgtcagtcagctataaatgggt

SEQ ID NO: 12801 - DNA, 33 bp, Homo sapiens
gattgtaacacaattcgcaatcaagatttgtct

SEQ ID NO: 12802 - DNA, 33 bp, Homo sapiens
gggtaactgaaaccaaggaaatgactccagtat

SEQ ID NO: 12803 - DNA, 33 bp, Homo sapiens
atgtttttttggtgaatttactcctttatcatt

SEQ ID NO: 12804 - DNA, 51 bp, Homo sapiens
cagtctctgttaaatttatccgatagcatactgaaatccttgtctgtgatc

SEQ ID NO: 12805 - DNA, 33 bp, Homo sapiens
tcacaggccttgaacttacttgccttgaccaat

SEQ ID NO: 12806 - DNA, 33 bp, Homo sapiens
gtacctgaggacccgcgacctactcctgtaccc

SEQ ID NO: 12807 - DNA, 33 bp, Homo sapiens
agaggataaagaaaaagtgacagtaaatcaaag

SEQ ID NO: 12808 - DNA, 33 bp, Homo sapiens
gatgtcaaggctagcatatcaaaaaagcggaga

SEQ ID NO: 12809 - DNA, 33 bp, Homo sapiens
tggcggggattctcattaacaccatgtggctaa

SEQ ID NO: 12810 - DNA, 33 bp, Homo sapiens
agactcaacttttcaagagacctgttttatctt

SEQ ID NO: 12811 - DNA, 33 bp, Homo sapiens
aaacttgacttgtaaatctaaggaaggatcaag

SEQ ID NO: 12812 - DNA, 51 bp, Homo sapiens
ggagtaggagaaacaggctagtgctcaaagcaaagtgaaaggctgacagag

SEQ ID NO: 12813 - DNA, 33 bp, Homo sapiens
gggagcggtttaacaatgactgaataaggagag

SEQ ID NO: 12814 - DNA, 33 bp, Homo sapiens
ttagcacaatgccagctgagggtgtgtatatgg

SEQ ID NO: 12815 - DNA, 33 bp, Homo sapiens
actcatagttattcaatcactgtcatgcctgca

SEQ ID NO: 12816 - DNA, 33 bp, Homo sapiens
aatgtctgccatacacgactaccaagcccttag

SEQ ID NO: 12817 - DNA, 33 bp, Homo sapiens
ctccactctttacttggatattctggaaacaca

SEQ ID NO: 12818 - DNA, 33 bp, Homo sapiens
tggaacagcatccaaggaatactacttgatggc

SEQ ID NO: 12819 - DNA, 33 bp, Homo sapiens
tgtgtaaaatgtacctgaataaatttgttgttt

SEQ ID NO: 12820 - DNA, 33 bp, Homo sapiens
tgactcttggattttatagaaccacaagtcctg

SEQ ID NO: 12821 - DNA, 33 bp, Homo sapiens
ttttataggactcaacgggctgcataaaagggc

SEQ ID NO: 12822 - DNA, 33 bp, Homo sapiens
gcaacaatatgtgtctgaaattaaccaggcatg

SEQ ID NO: 12823 - DNA, 33 bp, Homo sapiens
ttgtggttgtttactggaactttgaagcattgg

SEQ ID NO: 12824 - DNA, 33 bp, Homo sapiens
taaccggtaccagtcatggaaagctgggctcta

SEQ ID NO: 12825 - DNA, 33 bp, Homo sapiens
cttcacaattaaactatgtgcccactctttcac

SEQ ID NO: 12826 - DNA, 33 bp, Homo sapiens
tctgacattcctgtagtcctagacagttattat

SEQ ID NO: 12827 - DNA, 33 bp, Homo sapiens
tataaatagatgtccattgagatacacaaaaaa

SEQ ID NO: 12828 - DNA, 51 bp, Homo sapiens
tatttttttttaaataagctgggaacaggatcagctaactcaaggaattaa

SEQ ID NO: 12829 - DNA, 33 bp, Homo sapiens
atcagggctgccttacgagatttcctgaaggaa

SEQ ID NO: 12830 - DNA, 33 bp, Homo sapiens
gctaacactccatcactgaatccttgacacttg

SEQ ID NO: 12831 - DNA, 33 bp, Homo sapiens
gggcacagaaggtaactgcggattgagagcagg

SEQ ID NO: 12832 - DNA, 33 bp, Homo sapiens
tacagacatagacaaggatgaaattatagatat

SEQ ID NO: 12833 - DNA, 33 bp, Homo sapiens
ttctgccaagtaggcacccctgaaggagacttg

SEQ ID NO: 12834 - DNA, 33 bp, Homo sapiens
tcagtgaatcatttgcgaagcagagaagatgag

SEQ ID NO: 12835 - DNA, 33 bp, Homo sapiens
tgagtactgatggcaagagctttgaagatgatt

SEQ ID NO: 12836 - DNA, 51 bp, Homo sapiens
gcccagctaatctttacattgaccataagtgctttgcctacatagcactgc

SEQ ID NO: 12837 - DNA, 33 bp, Homo sapiens
atcattattatggcacgcggcagtattaagaag

SEQ ID NO: 12838 - DNA, 33 bp, Homo sapiens
gggttctgggactatacaaatgaataaaatacc

SEQ ID NO: 12839 - DNA, 33 bp, Homo sapiens
tacctgcattttcctattaacgacagggctttc

SEQ ID NO: 12840 - DNA, 33 bp, Homo sapiens
ctggatgagacagtcatgtgtattagaggtatg

SEQ ID NO: 12841 - DNA, 33 bp, Homo sapiens
ctaccttgttcttctctaaaagagtctttgtta

SEQ ID NO: 12842 - DNA, 33 bp, Homo sapiens
gagaaataatgctcactgctgtctttaccattt

SEQ ID NO: 12843 - DNA, 51 bp, Homo sapiens
gcctagactgaatagaagagtgttatgatgatgagaaagcaaaatctttat

SEQ ID NO: 12844 - DNA, 33 bp, Homo sapiens
actgcagacaagttcatgggaaaggaaagttac

SEQ ID NO: 12845 - DNA, 33 bp, Homo sapiens
gaaaggaaagatgacccagagttgatgggggaa

SEQ ID NO: 12846 - DNA, 33 bp, Homo sapiens
agtatggtcttttatctcttaacaactttctgt

SEQ ID NO: 12847 - DNA, 33 bp, Homo sapiens
tcctgagatggtctaggatagaaggcctcttgg

SEQ ID NO: 12848 - DNA, 51 bp, Homo sapiens
caagcattactgctatcagtcttcatatttcagtggttaagttgatcttca

SEQ ID NO: 12849 - DNA, 51 bp, Homo sapiens
gacaacatgcagaggaactgagtcacaaaggaatgtataagaatggcatat

SEQ ID NO: 12850 - DNA, 33 bp, Homo sapiens
ctgtcattttgctgcatgttttttatatgccat

SEQ ID NO: 12851 - DNA, 33 bp, Homo sapiens
ggctggtaaatagttatgctgggtcttaagctt

SEQ ID NO: 12852 - DNA, 51 bp, Homo sapiens
gattatgttcaatgagatatatatacgatagcatcaataaacattagttct

SEQ ID NO: 12853 - DNA, 33 bp, Homo sapiens
aagagttgttatcagatgatctcttagtgaagt

SEQ ID NO: 12854 - DNA, 33 bp, Homo sapiens
aaacctttgcctcctataaaagtagacagctgt

SEQ ID NO: 12855 - DNA, 33 bp, Homo sapiens
cgcaaaaaccatatacgataccggctatattga

SEQ ID NO: 12856 - DNA, 33 bp, Homo sapiens
ctccattaatcgttaggacatctacccagttat

SEQ ID NO: 12857 - DNA, 33 bp, Homo sapiens
ttcactttcgcaacctgaccatcaactttgtag

SEQ ID NO: 12858 - DNA, 33 bp, Homo sapiens
agttgtgaactgtagtgaattcatgagtgattg

SEQ ID NO: 12859 - DNA, 33 bp, Homo sapiens
cgtatgactgtagatatgtggggtaatttctgg

SEQ ID NO: 12860 - DNA, 33 bp, Homo sapiens
atgcatggtttatatgtagatactaagctgttt

SEQ ID NO: 12861 - DNA, 33 bp, Homo sapiens
ctaggaagagtgaatatcttcttgtgatggtgg

SEQ ID NO: 12862 - DNA, 33 bp, Homo sapiens
acaaatgcatccgtcctcacagtggtgtagcac

SEQ ID NO: 12863 - DNA, 33 bp, Homo sapiens
gtgactttgaacaaactaccctttacctcactt

SEQ ID NO: 12864 - DNA, 33 bp, Homo sapiens
gaagcctagaaccatctgaggcagccgtcttgt

SEQ ID NO: 12865 - DNA, 33 bp, Homo sapiens
cagagtggtgtctacacagcaatgaaatgtggt

SEQ ID NO: 12866 - DNA, 51 bp, Homo sapiens
aggttcaataggcaaacagtataaattggccaaccagtaaacctgtgtata

SEQ ID NO: 12867 - DNA, 33 bp, Homo sapiens
gtttaagaaaggcctctgacttattcaagtctg

SEQ ID NO: 12868 - DNA, 33 bp, Homo sapiens
ttatttggccagtgccgagaggaattgcaatca

SEQ ID NO: 12869 - DNA, 33 bp, Homo sapiens
gcaacaaccaaatcaagacaaatggaaaatata

SEQ ID NO: 12870 - DNA, 33 bp, Homo sapiens
ttagtaaaaggtagaagtctgtttacatttgtt

SEQ ID NO: 12871 - DNA, 33 bp, Homo sapiens
tatgacatgctaaggatgcattgcttttctcca

SEQ ID NO: 12872 - DNA, 33 bp, Homo sapiens
aactggaaaatacagacgtgtttttgcatcccc

SEQ ID NO: 12873 - DNA, 51 bp, Homo sapiens
ttaaaacttttatctctggctctcttaattttgaattaaaccagtcccatc

SEQ ID NO: 12874 - DNA, 33 bp, Homo sapiens
agccatatattgccgctcactttgatgtccttc

SEQ ID NO: 12875 - DNA, 33 bp, Homo sapiens
gttctttcagctcatatgatttggttgatatga

SEQ ID NO: 12876 - DNA, 33 bp, Homo sapiens
cacagaagaaagtagattccatcagcaaaattg

SEQ ID NO: 12877 - DNA, 33 bp, Homo sapiens
actttgtgactcttaatattacggagtgccagg

SEQ ID NO: 12878 - DNA, 33 bp, Homo sapiens
gttataattggtatcgtatctctaaccaagcgt

SEQ ID NO: 12879 - DNA, 33 bp, Homo sapiens
aaatcaacatagtctagtaatagatgatttaac

SEQ ID NO: 12880 - DNA, 51 bp, Homo sapiens
aaaaatccgcctatctaggcttatgcatgttatataataccacagatatga

SEQ ID NO: 12881 - DNA, 33 bp, Homo sapiens
aagctgctaactctatgaaacaagtgctacatg

SEQ ID NO: 12882 - DNA, 33 bp, Homo sapiens
tactaatataacaacatggaccctgcggcgtct

SEQ ID NO: 12883 - DNA, 33 bp, Homo sapiens
tctcatgaaaatttaatgaagaaagtgcattca

SEQ ID NO: 12884 - DNA, 33 bp, Homo sapiens
gcactctcttaacatataggtagagcattttgt

SEQ ID NO: 12885 - DNA, 33 bp, Homo sapiens
gctgtcagtgagttaaggtggctgaaacagatc

SEQ ID NO: 12886 - DNA, 33 bp, Homo sapiens
cgagggttttgttggagtactggctcttctttg

SEQ ID NO: 12887 - DNA, 33 bp, Homo sapiens
atcaatgttttagagatgtttaatagactagta

SEQ ID NO: 12888 - DNA, 33 bp, Homo sapiens
tttgtcagattcattggaagtatgttctcccat

SEQ ID NO: 12889 - DNA, 33 bp, Homo sapiens
gattaataaacgtaagtagtatacatggtcaat

SEQ ID NO: 12890 - DNA, 33 bp, Homo sapiens
aagcttaacacaaaattataaagcatcatactg

SEQ ID NO: 12891 - DNA, 33 bp, Homo sapiens
agaggttaacttgccagctgactgaatctattt

SEQ ID NO: 12892 - DNA, 51 bp, Homo sapiens
ctgtagccatctttggtagttagtcgagagaattccaacggctcaggaaga

SEQ ID NO: 12893 - DNA, 33 bp, Homo sapiens
tacctttctccacaatcaacagaaatttgagag

SEQ ID NO: 12894 - DNA, 33 bp, Homo sapiens
agaaatcacagtaccattgaagtcaaataagat

SEQ ID NO: 12895 - DNA, 51 bp, Homo sapiens
aatcagagttgcaggtgaatggtcatgctttaaatggaaaactgagccagg

SEQ ID NO: 12896 - DNA, 51 bp, Homo sapiens
tttatttagatttgtatagttactatcattgcattttaagctgtttaatta

SEQ ID NO: 12897 - DNA, 33 bp, Homo sapiens
agctgtagaaatgtacgaggtaatcatcaatat

SEQ ID NO: 12898 - DNA, 33 bp, Homo sapiens
aggttcttctgatgcagatggactaagatcaca

SEQ ID NO: 12899 - DNA, 33 bp, Homo sapiens
tctttagcccaacttatatttgtaaactacagt

SEQ ID NO: 12900 - DNA, 51 bp, Homo sapiens
tttataaaatgtttatcctcctcatgatctaatttgtttcctgccgctgaa

SEQ ID NO: 12901 - DNA, 33 bp, Homo sapiens
gttggaaaaatagacattatagttggaagcttt

SEQ ID NO: 12902 - DNA, 51 bp, Homo sapiens
cagaagaaaccaacttcaccatttggatcatgatattgaccaagcgttggc

SEQ ID NO: 12903 - DNA, 33 bp, Homo sapiens
aaaataggcactcatataaatgctaggtctaag

SEQ ID NO: 12904 - DNA, 33 bp, Homo sapiens
gaaatgccagaggccaggagaaaaatgtataca

SEQ ID NO: 12905 - DNA, 33 bp, Homo sapiens
tatttataacaactcatgtggtcctcacaacag

SEQ ID NO: 12906 - DNA, 33 bp, Homo sapiens
gaatttggccagagtacaatctgaattccagat

SEQ ID NO: 12907 - DNA, 33 bp, Homo sapiens
aacagatctatttgtgtatgttttaaaggagga

SEQ ID NO: 12908 - DNA, 33 bp, Homo sapiens
ttctggagactagtgcgctcttttgacgttctt

SEQ ID NO: 12909 - DNA, 33 bp, Homo sapiens
cattgtcacagggtaattctgtagatattttcg

SEQ ID NO: 12910 - DNA, 33 bp, Homo sapiens
ttgatgaagccacatataatttcaggcagatta

SEQ ID NO: 12911 - DNA, 33 bp, Homo sapiens
gagttgctgattttaggaataacaccaagctaa

SEQ ID NO: 12912 - DNA, 33 bp, Homo sapiens
aagatggtgaacataagtatcattgaatcaagg

SEQ ID NO: 12913 - DNA, 51 bp, Homo sapiens
ttttacaggtaatacattatttgaattgatattgaataaaagtatgatgtg

SEQ ID NO: 12914 - DNA, 33 bp, Homo sapiens
ctagatttacaaaacagtgacaacaaatataac

SEQ ID NO: 12915 - DNA, 33 bp, Homo sapiens
acaagcacctctatggtcaccactactatgact

SEQ ID NO: 12916 - DNA, 33 bp, Homo sapiens
tgacaaacagacctacgaaaatgtgctcgacat

SEQ ID NO: 12917 - DNA, 33 bp, Homo sapiens
ctgaagagatatttgcgctcttgtatttgttgc

SEQ ID NO: 12918 - DNA, 33 bp, Homo sapiens
ggaaccaccaagtgcaggtacccaagaaaggct

SEQ ID NO: 12919 - DNA, 33 bp, Homo sapiens
cttcaagactgtaaaggagtcaaccatttgtcc

SEQ ID NO: 12920 - DNA, 51 bp, Homo sapiens
tccttgagttgaacagcatctctccgattacaccttgcaatatctacttgt

SEQ ID NO: 12921 - DNA, 33 bp, Homo sapiens
taggctggatatgaaatatggaagctccagatt

SEQ ID NO: 12922 - DNA, 33 bp, Homo sapiens
agttgagagtcttgaatgactgacccataagtg

SEQ ID NO: 12923 - DNA, 33 bp, Homo sapiens
tgtgttctttcgataattatctattcagatctc

SEQ ID NO: 12924 - DNA, 33 bp, Homo sapiens
accaaacaagacaaacgaccgacttcactggag

SEQ ID NO: 12925 - DNA, 33 bp, Homo sapiens
acccaatgttaatgaattatgaaggttctactt

SEQ ID NO: 12926 - DNA, 33 bp, Homo sapiens
ttcactttaggctatcgaattcattacacaaaa

SEQ ID NO: 12927 - DNA, 33 bp, Homo sapiens
agtgctataataagcacaagaatgcaggtgtct

SEQ ID NO: 12928 - DNA, 33 bp, Homo sapiens
atgtctgcatctttgctcacaaaaaatatacat

SEQ ID NO: 12929 - DNA, 33 bp, Homo sapiens
tttatgtttctaaagctccaagttgaaggacaa

SEQ ID NO: 12930 - DNA, 33 bp, Homo sapiens
gtcctacagactgctatgctttatatttttatt

SEQ ID NO: 12931 - DNA, 33 bp, Homo sapiens
atatgggcagctctaagaaggaagggaaaattg

SEQ ID NO: 12932 - DNA, 33 bp, Homo sapiens
cttgttgccattggcatcaaggaaccagtttta

SEQ ID NO: 12933 - DNA, 33 bp, Homo sapiens
gtttcatcatgaggaacggaaaagggagctgac

SEQ ID NO: 12934 - DNA, 33 bp, Homo sapiens
gtatactcaatgcttgtaacttgttttaaactc

SEQ ID NO: 12935 - DNA, 33 bp, Homo sapiens
ggtaagcctggtagccgagacaaccatgctgac

SEQ ID NO: 12936 - DNA, 33 bp, Homo sapiens
gctcagtgatgctctataatttagcttcctgca

SEQ ID NO: 12937 - DNA, 33 bp, Homo sapiens
actaaacacagccatacaataaatagcactttt

SEQ ID NO: 12938 - DNA, 33 bp, Homo sapiens
tcctgtgacatttcaagaagtatttgctatggc

SEQ ID NO: 12939 - DNA, 33 bp, Homo sapiens
agtcaacaagattttacgtactgcaaaaacaaa

SEQ ID NO: 12940 - DNA, 33 bp, Homo sapiens
gatctgaagaggtgaacaggtgtaggtaggagt

SEQ ID NO: 12941 - DNA, 51 bp, Homo sapiens
caaaaatgggacagtttgaccagcattataacctatttctccaccagaaaa

SEQ ID NO: 12942 - DNA, 33 bp, Homo sapiens
cagggattgtctgagatgccttggaatgctagc

SEQ ID NO: 12943 - DNA, 33 bp, Homo sapiens
tatatgtctgagttgtgacaaaggaggagggtt

SEQ ID NO: 12944 - DNA, 33 bp, Homo sapiens
ttggtttattgtgaaagagtctcctaagattgc

SEQ ID NO: 12945 - DNA, 33 bp, Homo sapiens
ctctttaacacaacacgcttaaatagaagtgag

SEQ ID NO: 12946 - DNA, 33 bp, Homo sapiens
ggaaacatctgagggtgaaagacaggtagcaac

SEQ ID NO: 12947 - DNA, 33 bp, Homo sapiens
aacaaaggagaacacttaactcgtctgcataaa

SEQ ID NO: 12948 - DNA, 33 bp, Homo sapiens
ggtcaccaaaggaaacgcagattgtgggtagct

SEQ ID NO: 12949 - DNA, 33 bp, Homo sapiens
agtctctgtccactcagtgagaaaattcaagcc

SEQ ID NO: 12950 - DNA, 33 bp, Homo sapiens
taagtaatttctgaacgcagtgatacatcctgg

SEQ ID NO: 12951 - DNA, 33 bp, Homo sapiens
gaagcagtttcaactatcattcatatctcactc

SEQ ID NO: 12952 - DNA, 51 bp, Homo sapiens
gcactgtcacctaactcccatttgacgtattcatgttcatccaaacaggtc

SEQ ID NO: 12953 - DNA, 33 bp, Homo sapiens
caattgtgtttctaactcctacagcaaacaaaa

SEQ ID NO: 12954 - DNA, 33 bp, Homo sapiens
cgtatattttgctttatacctgaggaatgcgca

SEQ ID NO: 12955 - DNA, 33 bp, Homo sapiens
gctgccatgttttcacgaaataataacctttca

SEQ ID NO: 12956 - DNA, 33 bp, Homo sapiens
cagcagtaaaagtaacgcatccaaagaagcact

SEQ ID NO: 12957 - DNA, 33 bp, Homo sapiens
cttaggagtagaacaactggagtttgaacctct

SEQ ID NO: 12958 - DNA, 33 bp, Homo sapiens
tcattgtctatcaacattggtttctgaattgtg

SEQ ID NO: 12959 - DNA, 33 bp, Homo sapiens
ccagtatcattctctgtagctgaatctaaggtg

SEQ ID NO: 12960 - DNA, 51 bp, Homo sapiens
cagatgttaggcctctggttattggtcacttttacttgtagaacactgatc

SEQ ID NO: 12961 - DNA, 33 bp, Homo sapiens
aagttttacagcaaagtaatctaaaatcaattt

SEQ ID NO: 12962 - DNA, 33 bp, Homo sapiens
ccatgtaccaactgaaccacaggagaaataata

SEQ ID NO: 12963 - DNA, 33 bp, Homo sapiens
gtccaacacaagtaagtcctcaagaaacgcttg

SEQ ID NO: 12964 - DNA, 33 bp, Homo sapiens
attatagtgaaacttcgcagacgtagatcaagt

SEQ ID NO: 12965 - DNA, 33 bp, Homo sapiens
acagggctcctagacttagtacaggattagact

SEQ ID NO: 12966 - DNA, 33 bp, Homo sapiens
taggttgaaggagaaatcatatccgagagaagg

SEQ ID NO: 12967 - DNA, 33 bp, Homo sapiens
agtgtatttgtcacagtaggattggtgccttgt

SEQ ID NO: 12968 - DNA, 33 bp, Homo sapiens
ccactgcttttcctaccggaccagtgaatactc

SEQ ID NO: 12969 - DNA, 33 bp, Homo sapiens
tgggaacgtacataaatgaagcaaagcagtcat

SEQ ID NO: 12970 - DNA, 33 bp, Homo sapiens
cctttatagtaaggtaggtagttggtgttttac

SEQ ID NO: 12971 - DNA, 33 bp, Homo sapiens
tgtttataaccattaagcacactctcttcgtcc

SEQ ID NO: 12972 - DNA, 51 bp, Homo sapiens
taattcaaaacacatagctttaatgtcaccgtctcagagaccacttaatct

SEQ ID NO: 12973 - DNA, 33 bp, Homo sapiens
ttctctctgatgagcagcacttagaccttcaaa

SEQ ID NO: 12974 - DNA, 33 bp, Homo sapiens
ttggaatattcaatcatctatggttgcttatga

SEQ ID NO: 12975 - DNA, 33 bp, Homo sapiens
atgcattcttatcatagacttgtgccaaagcat

SEQ ID NO: 12976 - DNA, 33 bp, Homo sapiens
tgctgtggttaattattagagtggagccaggtg

SEQ ID NO: 12977 - DNA, 33 bp, Homo sapiens
atacatgcgtgactactgagggccaggtgggag

SEQ ID NO: 12978 - DNA, 33 bp, Homo sapiens
tagcttgtaatagaaatcagtctcttggtaaga

SEQ ID NO: 12979 - DNA, 33 bp, Homo sapiens
tggcactagtaatagccgcaaagaagtggaaag

SEQ ID NO: 12980 - DNA, 33 bp, Homo sapiens
gctatttccttccatagaggtgtaacattttgg

SEQ ID NO: 12981 - DNA, 33 bp, Homo sapiens
ttcaagtgaggatgtaggactttcaaattgggt

SEQ ID NO: 12982 - DNA, 51 bp, Homo sapiens
gaaatagatgattctgatgattcagcctatttttatgttagttctgtttag

SEQ ID NO: 12983 - DNA, 33 bp, Homo sapiens
cataaaaatatgtaaagtatcctcaaagtccaa

SEQ ID NO: 12984 - DNA, 33 bp, Homo sapiens
atgttattgagctttaggagtgtttgtatattt

SEQ ID NO: 12985 - DNA, 33 bp, Homo sapiens
tattcgttcatttaaatccctgcaaaattggca

SEQ ID NO: 12986 - DNA, 33 bp, Homo sapiens
taggtttttttcttcatgatcggaatgttttta

SEQ ID NO: 12987 - DNA, 33 bp, Homo sapiens
catccctttactaagattagggacagttccagg

SEQ ID NO: 12988 - DNA, 51 bp, Homo sapiens
agctggctactctactttcaggcattaggattgtgtttttgcaagaaggaa

SEQ ID NO: 12989 - DNA, 51 bp, Homo sapiens
gtgaatgatccctgaagacattatgtagtgaaagaggatggtgacaaaaga

SEQ ID NO: 12990 - DNA, 33 bp, Homo sapiens
ttatggaattataaaagctccttgtgtatcatg

SEQ ID NO: 12991 - DNA, 33 bp, Homo sapiens
tgcacattggtgacaagaaaaagcaagagaagg

SEQ ID NO: 12992 - DNA, 33 bp, Homo sapiens
tcacctggtcaatgccgatcccctgcagtgaga

SEQ ID NO: 12993 - DNA, 33 bp, Homo sapiens
gatgggaaaggtgagaggcatgttagttgaaat

SEQ ID NO: 12994 - DNA, 33 bp, Homo sapiens
gaagctttacaaactatggtggtgatgtccagt

SEQ ID NO: 12995 - DNA, 33 bp, Homo sapiens
accaataagaaaggcatataacagtaagaaata

SEQ ID NO: 12996 - DNA, 33 bp, Homo sapiens
cccggctaacctcatatgttttaatcccaaatt

SEQ ID NO: 12997 - DNA, 33 bp, Homo sapiens
tttccgcggcaatcaagagtgaagatgtattta

SEQ ID NO: 12998 - DNA, 33 bp, Homo sapiens
ctgcttttttcacatacgtttttcaatcaccct

SEQ ID NO: 12999 - DNA, 33 bp, Homo sapiens
aaagagaaaaatgtgcgaacgcatacaaagttg

SEQ ID NO: 13000 - DNA, 33 bp, Homo sapiens
cacccctccaattgtcgaacacattctcctaga

SEQ ID NO: 13001 - DNA, 33 bp, Homo sapiens
catagagcacttgggaggatgagatccctttca

SEQ ID NO: 13002 - DNA, 33 bp, Homo sapiens
agatgtgatactgctatggaaggcagcataatt

SEQ ID NO: 13003 - DNA, 33 bp, Homo sapiens
ccagtgaatctcattatgacttcaccatctttc

SEQ ID NO: 13004 - DNA, 51 bp, Homo sapiens
gcttctgcctgctccacgctaaagagaatgatgtacagaactatacttaca

SEQ ID NO: 13005 - DNA, 33 bp, Homo sapiens
taataactcatatgcacatctttcctcaaagag

SEQ ID NO: 13006 - DNA, 33 bp, Homo sapiens
atgtgtattacagggagattagataccacaggg

SEQ ID NO: 13007 - DNA, 33 bp, Homo sapiens
ccctccaaaggaagagtcaatggccagatctac

SEQ ID NO: 13008 - DNA, 33 bp, Homo sapiens
agttaccatatagagggaaaagtcagcagtcaa

SEQ ID NO: 13009 - DNA, 33 bp, Homo sapiens
acctgaacacggacaatctgacaccctaattcc

SEQ ID NO: 13010 - DNA, 33 bp, Homo sapiens
tgtagaggcaggggacgcatgggaagtctgtgt

SEQ ID NO: 13011 - DNA, 33 bp, Homo sapiens
ttggtggtaacctagtgaatcagaatctgcacg

SEQ ID NO: 13012 - DNA, 33 bp, Homo sapiens
ttaaccctgaacataggatttggctagtcagcc

SEQ ID NO: 13013 - DNA, 33 bp, Homo sapiens
ttgaagccttggaaactgctccgttgatgaaac

SEQ ID NO: 13014 - DNA, 33 bp, Homo sapiens
caagttctgtgctagggcctagaaatgcattca

SEQ ID NO: 13015 - DNA, 33 bp, Homo sapiens
tcattttcatcaaggagctacaggcaagattat

SEQ ID NO: 13016 - DNA, 33 bp, Homo sapiens
ttttgaggggacacaagcgttcattatatagct

SEQ ID NO: 13017 - DNA, 33 bp, Homo sapiens
atgtagaccttgatgtgaatattactgctatag

SEQ ID NO: 13018 - DNA, 33 bp, Homo sapiens
aatattttaaaatgggtcagaacagtaatagaa

SEQ ID NO: 13019 - DNA, 33 bp, Homo sapiens
ataaggtggttaatcagtccgtgcctcagtttt

SEQ ID NO: 13020 - DNA, 33 bp, Homo sapiens
tatgatatgcgtgccagctacaatagttctctt

SEQ ID NO: 13021 - DNA, 51 bp, Homo sapiens
agtgttaggcactgaaactacctaagtcatgagctggtcatttagtaaatg

SEQ ID NO: 13022 - DNA, 33 bp, Homo sapiens
taggtgttgcctgaagtctcttttaaaaggacc

SEQ ID NO: 13023 - DNA, 33 bp, Homo sapiens
cctattataagccgaccagcgtatacaggattt

SEQ ID NO: 13024 - DNA, 51 bp, Homo sapiens
aatacctttttatgaaaattgacaagagtgctcctgaaactttactgtaca

SEQ ID NO: 13025 - DNA, 33 bp, Homo sapiens
tttctctcttgacttggaaaataaatactctat

SEQ ID NO: 13026 - DNA, 33 bp, Homo sapiens
tgttataaatgtgacaggaaaaactacaatcac

SEQ ID NO: 13027 - DNA, 33 bp, Homo sapiens
tttttcatgtcatttcgcctcttctcaggttgt

SEQ ID NO: 13028 - DNA, 51 bp, Homo sapiens
tatttttctgctttgttttgtttaggaagcagtatctctgtaataatccct

SEQ ID NO: 13029 - DNA, 33 bp, Homo sapiens
tcatgactgctgagaatagagagtgctggccat

SEQ ID NO: 13030 - DNA, 33 bp, Homo sapiens
taagtgagaaccatccgctgctgcagtctataa

SEQ ID NO: 13031 - DNA, 33 bp, Homo sapiens
cacctatatgtattcgtaatagcaccataacag

SEQ ID NO: 13032 - DNA, 33 bp, Homo sapiens
tgtatttattttttaattgcaaactcaggtctt

SEQ ID NO: 13033 - DNA, 33 bp, Homo sapiens
acatactgacaaaatggaattgattcgtttacc

SEQ ID NO: 13034 - DNA, 33 bp, Homo sapiens
ctggcagatgtatatagaaagataatgactcat

SEQ ID NO: 13035 - DNA, 33 bp, Homo sapiens
actgagtttgaagttggaagggactgtggacac

SEQ ID NO: 13036 - DNA, 33 bp, Homo sapiens
agaacagaatcactaggcctgaagtgaaaatgt

SEQ ID NO: 13037 - DNA, 33 bp, Homo sapiens
tgttcatcttgaattggaaacacttttaggaaa

SEQ ID NO: 13038 - DNA, 33 bp, Homo sapiens
caggcacgtcgtaaccgcagacaggacactgac

SEQ ID NO: 13039 - DNA, 33 bp, Homo sapiens
gaaagaaagctattgggatgaagactattgatc

SEQ ID NO: 13040 - DNA, 33 bp, Homo sapiens
tatgcttatgacatcagcacttttatggcaatt

SEQ ID NO: 13041 - DNA, 51 bp, Homo sapiens
ccctgtgcagaggcattttgggctcgatagatccagagtgctccagtcaag

SEQ ID NO: 13042 - DNA, 33 bp, Homo sapiens
catcagaatcacatgggcacttattagaaatgc

SEQ ID NO: 13043 - DNA, 33 bp, Homo sapiens
tccactgccaacaccagtgcaactactgagtga

SEQ ID NO: 13044 - DNA, 33 bp, Homo sapiens
attttattgctgactatccttccaggttaacct

SEQ ID NO: 13045 - DNA, 33 bp, Homo sapiens
ggcaaggtaactctaggaatttgagcagaagga

SEQ ID NO: 13046 - DNA, 33 bp, Homo sapiens
gatttaaaactagatatgttcttcctaatatac

SEQ ID NO: 13047 - DNA, 33 bp, Homo sapiens
aatacatacctctccagaacaccattactcatt

SEQ ID NO: 13048 - DNA, 33 bp, Homo sapiens
ttaatcattagggaaatgcaagtgaaaactgca

SEQ ID NO: 13049 - DNA, 33 bp, Homo sapiens
tcttgaacgcttcaaatgtctcttaacactttg

SEQ ID NO: 13050 - DNA, 33 bp, Homo sapiens
ctcatatcaagaacaatgtgactttgatgctat

SEQ ID NO: 13051 - DNA, 33 bp, Homo sapiens
tcatttcagtgaactcgacagtgttactgtagt

SEQ ID NO: 13052 - DNA, 33 bp, Homo sapiens
ttcagcctgcaaagtatagattactccaggcag

SEQ ID NO: 13053 - DNA, 33 bp, Homo sapiens
tcagtcatctatatccgaaatgtatctgagtta

SEQ ID NO: 13054 - DNA, 33 bp, Homo sapiens
gtgagaaaaatcagaactatgattgctcagaag

SEQ ID NO: 13055 - DNA, 33 bp, Homo sapiens
agatccagttgctccatgttgttttgttcactg

SEQ ID NO: 13056 - DNA, 33 bp, Homo sapiens
tggtacaagctagagctgaaacttgagtaaagc

SEQ ID NO: 13057 - DNA, 33 bp, Homo sapiens
agctggattctgtaagtcatttaggacattctg

SEQ ID NO: 13058 - DNA, 51 bp, Homo sapiens
gggagggttaaaagtctgactcaaaggcgcactgtcacaatagcctgggga

SEQ ID NO: 13059 - DNA, 51 bp, Homo sapiens
gtcaaatgaatgtacacattcatctgttcttatgggaattacatccaggaa

SEQ ID NO: 13060 - DNA, 33 bp, Homo sapiens
cttatatttaagataattagcctgccacaatta

SEQ ID NO: 13061 - DNA, 33 bp, Homo sapiens
actctattagatcttgcaacagcactctcttct

SEQ ID NO: 13062 - DNA, 33 bp, Homo sapiens
tttggcatatgtgcaatgagtaaattttctgta

SEQ ID NO: 13063 - DNA, 33 bp, Homo sapiens
tcgtgtgctatattagtatttgctttatacctt

SEQ ID NO: 13064 - DNA, 33 bp, Homo sapiens
ggtttacctgacataggatttaactttgctttt

SEQ ID NO: 13065 - DNA, 33 bp, Homo sapiens
agaatgtagaggcagaggaaatacagtgaggga

SEQ ID NO: 13066 - DNA, 33 bp, Homo sapiens
aaaaggatttaagtccgatagtaaaaggagcga

SEQ ID NO: 13067 - DNA, 33 bp, Homo sapiens
caagttaaagtcatccgcagtaaaactgagaac

SEQ ID NO: 13068 - DNA, 33 bp, Homo sapiens
accttcctgagtcatagaaagtcacttgacctc

SEQ ID NO: 13069 - DNA, 33 bp, Homo sapiens
tgtcatccaacggaagtactgctaagccagaca

SEQ ID NO: 13070 - DNA, 33 bp, Homo sapiens
tgtttcctctaatgaaggggcataatactgctc

SEQ ID NO: 13071 - DNA, 33 bp, Homo sapiens
taattaaatacaaactgagcccattactttcac

SEQ ID NO: 13072 - DNA, 33 bp, Homo sapiens
aacagcctaaagatgatgtgtaagagcataata

SEQ ID NO: 13073 - DNA, 33 bp, Homo sapiens
attctatatgtgtttatggggtgtaatctctgt

SEQ ID NO: 13074 - DNA, 33 bp, Homo sapiens
atgttctaaaaattccgaagttcaactcttaga

SEQ ID NO: 13075 - DNA, 33 bp, Homo sapiens
gccacctggagtgagagtaattcaagcaatctt

SEQ ID NO: 13076 - DNA, 33 bp, Homo sapiens
atttttctattggctggatgcaagtcccaggtt

SEQ ID NO: 13077 - DNA, 33 bp, Homo sapiens
agactagaaagaaaaccggtattgccatcagat

SEQ ID NO: 13078 - DNA, 33 bp, Homo sapiens
tttcagaagcctggaagtagaactcaacacacc

SEQ ID NO: 13079 - DNA, 33 bp, Homo sapiens
tagtacattgtaggcatgtagatgtgttgagaa

SEQ ID NO: 13080 - DNA, 33 bp, Homo sapiens
gaaaaagtgattcaatcataaggagaaaaatga

SEQ ID NO: 13081 - DNA, 33 bp, Homo sapiens
aaacattgcaacattcgcttcttacgacctttc

SEQ ID NO: 13082 - DNA, 33 bp, Homo sapiens
aaatgcattctatagcgcaggatgttccagtca

SEQ ID NO: 13083 - DNA, 33 bp, Homo sapiens
atgtcctgtttggaacgccaactctgtatcagt

SEQ ID NO: 13084 - DNA, 51 bp, Homo sapiens
tacaatcaatggcatgttataatttcattggcagcattatttgtctcttaa

SEQ ID NO: 13085 - DNA, 51 bp, Homo sapiens
tgcacttaaaatgggtgaaattatagcgtggaagttatacctcaataaagt

SEQ ID NO: 13086 - DNA, 51 bp, Homo sapiens
ctcaaaacaaaggaagtgcaatttatagaaggtagtagaataggcagataa

SEQ ID NO: 13087 - DNA, 33 bp, Homo sapiens
agtgttggaaggtcactaataatcccaaataac

SEQ ID NO: 13088 - DNA, 33 bp, Homo sapiens
gaagttgcaaaaagtagctggcatttaggaaat

SEQ ID NO: 13089 - DNA, 33 bp, Homo sapiens
attattctattaggcttaaaagaaatcaattat

SEQ ID NO: 13090 - DNA, 51 bp, Homo sapiens
tggtgactcccattcaaattcaggatcatggatttccatttaatctcccca

SEQ ID NO: 13091 - DNA, 33 bp, Homo sapiens
gtatgctatcagagtacattttcaagctcaaac

SEQ ID NO: 13092 - DNA, 33 bp, Homo sapiens
atactttctccaaaaataatacagtctgtctgt

SEQ ID NO: 13093 - DNA, 33 bp, Homo sapiens
atttcctgacttattctcttctgtatcaccagc

SEQ ID NO: 13094 - DNA, 33 bp, Homo sapiens
ctgcattaaaggttgatttttccttagtgctca

SEQ ID NO: 13095 - DNA, 33 bp, Homo sapiens
ttctgcatgcatgggacaagttagctccagtcc

SEQ ID NO: 13096 - DNA, 33 bp, Homo sapiens
ggtaagaagttcagcagaattttaggatgcaaa

SEQ ID NO: 13097 - DNA, 33 bp, Homo sapiens
gagtgatcacaaagtggatcttagccagtgttg

SEQ ID NO: 13098 - DNA, 33 bp, Homo sapiens
aatacagtataagtcagtcacctctccattctg

SEQ ID NO: 13099 - DNA, 51 bp, Homo sapiens
gaaattacatggttatcctttatagcacttgtcttatttacaattttacat

SEQ ID NO: 13100 - DNA, 33 bp, Homo sapiens
ggatcaggaaagccaatgctgaaaaatttaagc

SEQ ID NO: 13101 - DNA, 33 bp, Homo sapiens
aaacatatttataaacgaaaatgtagcatcacc

SEQ ID NO: 13102 - DNA, 51 bp, Homo sapiens
aatgcagcagctttggtgtcctgttttaactttagtgaaaatactaattct

SEQ ID NO: 13103 - DNA, 51 bp, Homo sapiens
ctagtatagaatagatgtgaatctctcagtagacagtgtacagagtagggt

SEQ ID NO: 13104 - DNA, 51 bp, Homo sapiens
gagaacagtctgcaaatggacagaagaagtcaaaagagaccagcaataaga

SEQ ID NO: 13105 - DNA, 33 bp, Homo sapiens
caaatagactgtaaaagccaggataacgtcctt

SEQ ID NO: 13106 - DNA, 33 bp, Homo sapiens
gcctgatgaggcttgagaattaagtagaggtca

SEQ ID NO: 13107 - DNA, 33 bp, Homo sapiens
atacttaatatctctccacctcagtttgttcat

SEQ ID NO: 13108 - DNA, 33 bp, Homo sapiens
acgtaaagcctggtgtgaatgtttctgctattt

SEQ ID NO: 13109 - DNA, 33 bp, Homo sapiens
agatagctagataatagatatacacacagctaa

SEQ ID NO: 13110 - DNA, 33 bp, Homo sapiens
tcatccaacaatacaagaaatgtagcagggtca

SEQ ID NO: 13111 - DNA, 33 bp, Homo sapiens
agaggctgtcagtaaatgtggaactgtccacgg

SEQ ID NO: 13112 - DNA, 33 bp, Homo sapiens
ccactcacctggattatggcagccggtgagaat

SEQ ID NO: 13113 - DNA, 33 bp, Homo sapiens
aggcaagaaatgaatagagcacaagaatacaca

SEQ ID NO: 13114 - DNA, 33 bp, Homo sapiens
gagaccatgatattgattaaaacaccaaggtct

SEQ ID NO: 13115 - DNA, 33 bp, Homo sapiens
ctttcaagttctctgattactactttgtttcca

SEQ ID NO: 13116 - DNA, 33 bp, Homo sapiens
gaaaaaccctaacagaggtgtcacaattatgac

SEQ ID NO: 13117 - DNA, 33 bp, Homo sapiens
actatatagaagagtctacaaaatcgagagcaa

SEQ ID NO: 13118 - DNA, 33 bp, Homo sapiens
aattcgaatttgagaatgtctctgctatagcat

SEQ ID NO: 13119 - DNA, 33 bp, Homo sapiens
tgatagctattactaagtcctagagtggatatt

SEQ ID NO: 13120 - DNA, 33 bp, Homo sapiens
cagctaaggaggaacatggccttcttgtctcag

SEQ ID NO: 13121 - DNA, 33 bp, Homo sapiens
cttcacataagtttgatgctttccttctgatgt

SEQ ID NO: 13122 - DNA, 33 bp, Homo sapiens
aggtaaaatgtatgactggtgccaacctacagg

SEQ ID NO: 13123 - DNA, 33 bp, Homo sapiens
aaaaatgaatgcataagatgaagtaagagatgt

SEQ ID NO: 13124 - DNA, 33 bp, Homo sapiens
accgtgcttcgtcatattaccagaattattttt

SEQ ID NO: 13125 - DNA, 33 bp, Homo sapiens
aggcctcatctctacagtcaatcaacttgattc

SEQ ID NO: 13126 - DNA, 33 bp, Homo sapiens
tgtcaatgggcctttatggctgtcccaaacttc

SEQ ID NO: 13127 - DNA, 33 bp, Homo sapiens
attctgtttattccaatgggagaatcgctttga

SEQ ID NO: 13128 - DNA, 33 bp, Homo sapiens
cactcaataaaggcaagctttcaaaatgaaatt

SEQ ID NO: 13129 - DNA, 33 bp, Homo sapiens
tcattagcagcatagagccagcttagacaatct

SEQ ID NO: 13130 - DNA, 51 bp, Homo sapiens
gcctcattttgtagcacctgttgcattaattaccagaaagctccgttcagc

SEQ ID NO: 13131 - DNA, 51 bp, Homo sapiens
taatgtcatacaatatttcaactcacatactgattttgccacaaatgagag

SEQ ID NO: 13132 - DNA, 51 bp, Homo sapiens
ccatttcttcaattgcttgaaagaattaaagagtcagacatgacaaactgc

SEQ ID NO: 13133 - DNA, 51 bp, Homo sapiens
ctctagaaatcatagaagaaacaaaggaaagctgttttcatagactggaat

SEQ ID NO: 13134 - DNA, 51 bp, Homo sapiens
caacttgaggtgagatcacatgttatcttgtatatcttccagtcttccaga

SEQ ID NO: 13135 - DNA, 33 bp, Homo sapiens
gaaggcttgacttgtatgagaaaaatacttcaa

SEQ ID NO: 13136 - DNA, 33 bp, Homo sapiens
tggctattagacttaatcaccatctaccggatc

SEQ ID NO: 13137 - DNA, 33 bp, Homo sapiens
gacatagaatttaccatctgtacatttttaaga

SEQ ID NO: 13138 - DNA, 33 bp, Homo sapiens
aacctggttggtggtggagctcaaaataaatct

SEQ ID NO: 13139 - DNA, 33 bp, Homo sapiens
actctatcagcagtaatctctcttatgttttcc

SEQ ID NO: 13140 - DNA, 33 bp, Homo sapiens
tttttccagtactccctacttgacagcctctca

SEQ ID NO: 13141 - DNA, 33 bp, Homo sapiens
gctagtcagtgtaacagtaatgatttagtggac

SEQ ID NO: 13142 - DNA, 33 bp, Homo sapiens
ctttctaattctctgagaaaacttctaatctac

SEQ ID NO: 13143 - DNA, 33 bp, Homo sapiens
ggaaagtacatcagggtatactctaagaaattt

SEQ ID NO: 13144 - DNA, 33 bp, Homo sapiens
taaagtaatgaaatactattccacaagcatcaa

SEQ ID NO: 13145 - DNA, 33 bp, Homo sapiens
gatgtccactctcaccgctccttttcagcatag

SEQ ID NO: 13146 - DNA, 33 bp, Homo sapiens
gtgggctgaaaccagatcataagagacctaaga

SEQ ID NO: 13147 - DNA, 33 bp, Homo sapiens
ccacctctccaacttatggggctcactgttacc

SEQ ID NO: 13148 - DNA, 33 bp, Homo sapiens
agtgcaccactgaagggacatcccaagattctt

SEQ ID NO: 13149 - DNA, 33 bp, Homo sapiens
atgacagatatacaattaaacaagctgtgatca

SEQ ID NO: 13150 - DNA, 33 bp, Homo sapiens
agaaataatcacctcaggaaaagaatggagttg

SEQ ID NO: 13151 - DNA, 33 bp, Homo sapiens
ttctcaatgactctccgcaaagtctttcattat

SEQ ID NO: 13152 - DNA, 33 bp, Homo sapiens
gaattatttaaaggcatctcaagtgggatttga

SEQ ID NO: 13153 - DNA, 51 bp, Homo sapiens
cattcattgctagaatgtaactttaggaaccagaatatttcttagacttca

SEQ ID NO: 13154 - DNA, 33 bp, Homo sapiens
agaaacccagagagaacgagcacagccctttag

SEQ ID NO: 13155 - DNA, 33 bp, Homo sapiens
caatcttgtggatttcgctctaactgctcatgg

SEQ ID NO: 13156 - DNA, 33 bp, Homo sapiens
aactttgagggacatatgtaaggtgttgcaaat

SEQ ID NO: 13157 - DNA, 51 bp, Homo sapiens
tatgtcttaacaattttaatcagaattcatatgacgtgaacagcatttttt

SEQ ID NO: 13158 - DNA, 51 bp, Homo sapiens
catcacccacttcgtgacaaagactcactgccctagctgcctgaagtgctg

SEQ ID NO: 13159 - DNA, 51 bp, Homo sapiens
cattatatctttctacctatcaaaaggaagagttgaaacaaattttcagaa

SEQ ID NO: 13160 - DNA, 33 bp, Homo sapiens
cacttagcatatagagtcattttagaaaaccta

SEQ ID NO: 13161 - DNA, 33 bp, Homo sapiens
tagctagagatatttatgtgactaaaccacgag

SEQ ID NO: 13162 - DNA, 33 bp, Homo sapiens
ctctgccttttgcggagagttgttattttattc

SEQ ID NO: 13163 - DNA, 33 bp, Homo sapiens
agggccaccgattacttaggcaagaattaacat

SEQ ID NO: 13164 - DNA, 33 bp, Homo sapiens
aaatgtcttaaaaatcgcaaatcactgtgcaga

SEQ ID NO: 13165 - DNA, 33 bp, Homo sapiens
aagtaaataagtattatgaagactaggaactgg

SEQ ID NO: 13166 - DNA, 33 bp, Homo sapiens
tttattgaatttttaatacaactccatggctta

SEQ ID NO: 13167 - DNA, 33 bp, Homo sapiens
ttttatgagaagttgagattactgcctatctag

SEQ ID NO: 13168 - DNA, 33 bp, Homo sapiens
gatagtcctgaagtcatatttacaagtactttg

SEQ ID NO: 13169 - DNA, 33 bp, Homo sapiens
ggcttaatgattgtcagaacacccctcccctca

SEQ ID NO: 13170 - DNA, 33 bp, Homo sapiens
gtggggtagatagttatatatgtttgccacctt

SEQ ID NO: 13171 - DNA, 33 bp, Homo sapiens
ttgggaccaataagtcgatctcctactgaaggt

SEQ ID NO: 13172 - DNA, 51 bp, Homo sapiens
tgacacatcctctactagtcatgattaaagtgtgtgttttcataaagcctg

SEQ ID NO: 13173 - DNA, 51 bp, Homo sapiens
tacacaaataacattaaaggatgctgaatgatattagtaactgggcaaatg

SEQ ID NO: 13174 - DNA, 33 bp, Homo sapiens
attccagctctatggatggaaatttttctggtg

SEQ ID NO: 13175 - DNA, 51 bp, Homo sapiens
ctcatagacacacatatttttgttctatggactgggcaatgtaatcttatg

SEQ ID NO: 13176 - DNA, 51 bp, Homo sapiens
aaatccttctttacttggcgaaatagcttgcttcaatactaatttaaacaa

SEQ ID NO: 13177 - DNA, 33 bp, Homo sapiens
ttttatttttactggactagttatgcttcaaac

SEQ ID NO: 13178 - DNA, 33 bp, Homo sapiens
gatcactgtgtagtaggaacattttaaccatat

SEQ ID NO: 13179 - DNA, 51 bp, Homo sapiens
tacaccccagacacagaaagtaggtttgagcagtgaaaaagcatacatttt

SEQ ID NO: 13180 - DNA, 33 bp, Homo sapiens
tttttcaggcttgagatattgctgcaaggttgc

SEQ ID NO: 13181 - DNA, 33 bp, Homo sapiens
gtctcagagtcagagggatgatttcttgtcttt

SEQ ID NO: 13182 - DNA, 33 bp, Homo sapiens
gaaagagaacagtcaagtatgcattcatctcac

SEQ ID NO: 13183 - DNA, 33 bp, Homo sapiens
cacatgttaataattgccaactatgacaaattt

SEQ ID NO: 13184 - DNA, 33 bp, Homo sapiens
ctatttcacattccaaggtacattcaagaacaa

SEQ ID NO: 13185 - DNA, 51 bp, Homo sapiens
taaacaagcagaaaacattaccatagagtggagcgcttaaatttcaccaaa

SEQ ID NO: 13186 - DNA, 33 bp, Homo sapiens
attacagagacttggggatttatatcattctat

SEQ ID NO: 13187 - DNA, 51 bp, Homo sapiens
atagatatctaaaggttatttgaaggccaatctggcatatagaatattctt

SEQ ID NO: 13188 - DNA, 33 bp, Homo sapiens
ggagtcttaagcaggctcttataggtgaatcac

SEQ ID NO: 13189 - DNA, 33 bp, Homo sapiens
aaatttctcctggatagctgaccattttcacta

SEQ ID NO: 13190 - DNA, 33 bp, Homo sapiens
ctgttgttcctcaaattacaacttatctgtttt

SEQ ID NO: 13191 - DNA, 33 bp, Homo sapiens
aaaaaatcagctaaacgaaaaatctctcctaga

SEQ ID NO: 13192 - DNA, 33 bp, Homo sapiens
ttaggataataatctctatctggaatcaccaaa

SEQ ID NO: 13193 - DNA, 33 bp, Homo sapiens
cccagcactacctatataactgtactgacatat

SEQ ID NO: 13194 - DNA, 33 bp, Homo sapiens
tggtaaacatacactataccactgatattacca

SEQ ID NO: 13195 - DNA, 51 bp, Homo sapiens
tgcatctcgtgctcacgttccagactcatcaacaggaagaaaacaagaggc

SEQ ID NO: 13196 - DNA, 51 bp, Homo sapiens
gtaaggttcatcttcatgaagttaatctatgtctcacacttctgtccagta

SEQ ID NO: 13197 - DNA, 51 bp, Homo sapiens
ctcttgatgcgtcagtgatagcaacggtcaaacacaatctggaggaactgg

SEQ ID NO: 13198 - DNA, 33 bp, Homo sapiens
gtacagatggagggacggatgagacagctgccc

SEQ ID NO: 13199 - DNA, 33 bp, Homo sapiens
agagaatgtggaaaaacaacagacatattttgc

SEQ ID NO: 13200 - DNA, 33 bp, Homo sapiens
tggtaacgtggatgaattgtatagtgaagtctg

SEQ ID NO: 13201 - DNA, 33 bp, Homo sapiens
ttagaggtatgacatagatgttctctttcactc

SEQ ID NO: 13202 - DNA, 33 bp, Homo sapiens
tgagaccatctggcacgaaggcttcatctgtga

SEQ ID NO: 13203 - DNA, 33 bp, Homo sapiens
acaacccataaaacaggatggaaagctccttta

SEQ ID NO: 13204 - DNA, 33 bp, Homo sapiens
acatggtcactaggaagctcttgggcctcactt

SEQ ID NO: 13205 - DNA, 33 bp, Homo sapiens
ctcttctgctgtgagagactctaatcatgtaag

SEQ ID NO: 13206 - DNA, 51 bp, Homo sapiens
ctccatttggggaagcacacttttggagaagcactctcttaggtggtgccc

SEQ ID NO: 13207 - DNA, 33 bp, Homo sapiens
ggctatattatttgcatccagtcctgcagcgcc

SEQ ID NO: 13208 - DNA, 33 bp, Homo sapiens
ctatggggccaaactatagcctcagctggcagg

SEQ ID NO: 13209 - DNA, 33 bp, Homo sapiens
gctcaactcttatcaatcctgaaggctttctgt

SEQ ID NO: 13210 - DNA, 33 bp, Homo sapiens
ccctgctcgcttctcattgaaccgtgggagccc

SEQ ID NO: 13211 - DNA, 33 bp, Homo sapiens
ccatctgcctgtgctggatggcccctgagcaaa

SEQ ID NO: 13212 - DNA, 33 bp, Homo sapiens
ccaaaatgaaaaagtagcgatgctggcagtttg

SEQ ID NO: 13213 - DNA, 33 bp, Homo sapiens
taagctgaactttttccagacacctagaatgaa

SEQ ID NO: 13214 - DNA, 33 bp, Homo sapiens
gagccttgtttttaaatgggtctcagtgattaa

SEQ ID NO: 13215 - DNA, 33 bp, Homo sapiens
cagaccgaggagtttggaccgaggtgagaaagg

SEQ ID NO: 13216 - DNA, 33 bp, Homo sapiens
ggaaccaggtaaatgaggactggaacagagctc

SEQ ID NO: 13217 - DNA, 33 bp, Homo sapiens
ccaaagatttatgaacgagtgcaggccaggctc

SEQ ID NO: 13218 - DNA, 51 bp, Homo sapiens
acaggcacctccatatcacatgcattctcacatgcacaatcctagaggcac

SEQ ID NO: 13219 - DNA, 33 bp, Homo sapiens
agggaagaacaaaccaggtagacacacttagtc

SEQ ID NO: 13220 - DNA, 33 bp, Homo sapiens
taaacaggttacagaatttcggctagcactaag

SEQ ID NO: 13221 - DNA, 33 bp, Homo sapiens
gtacaggcatggataaggaatctctacatatct

SEQ ID NO: 13222 - DNA, 33 bp, Homo sapiens
tgcccggtcttaaatagagtccagcaaacagcc

SEQ ID NO: 13223 - DNA, 33 bp, Homo sapiens
gctgagcctggacatagcctggtaagactagaa

SEQ ID NO: 13224 - DNA, 33 bp, Homo sapiens
ctagttactttggatatgattatagacttggtc

SEQ ID NO: 13225 - DNA, 33 bp, Homo sapiens
gagtggacgagtaacatctggagagaggtgtgg

SEQ ID NO: 13226 - DNA, 33 bp, Homo sapiens
taaagtagttcacttaggggtggaccatgcaac

SEQ ID NO: 13227 - DNA, 33 bp, Homo sapiens
aggaaatcgaacccgatattgtagaagtgactt

SEQ ID NO: 13228 - DNA, 33 bp, Homo sapiens
tgtaggaactaccaacgaactcagctccctgca

SEQ ID NO: 13229 - DNA, 33 bp, Homo sapiens
tgcacatttccacagatgtatgtttcccaagtt

SEQ ID NO: 13230 - DNA, 33 bp, Homo sapiens
gcttgacagaaatagatcaaacctaagtccgga

SEQ ID NO: 13231 - DNA, 33 bp, Homo sapiens
ctttgtcacgcattcaccctgtctctcatcaac

SEQ ID NO: 13232 - DNA, 33 bp, Homo sapiens
gccagctccggggtccgaataaaacatgtggtc

SEQ ID NO: 13233 - DNA, 33 bp, Homo sapiens
gactcaccaggggaaacactttactggtgttga

SEQ ID NO: 13234 - DNA, 33 bp, Homo sapiens
gaactcaagagtaagatgttcttgggaatttcc

SEQ ID NO: 13235 - DNA, 33 bp, Homo sapiens
gggacaaaggaagagagatgctgtcaaaatcat

SEQ ID NO: 13236 - DNA, 33 bp, Homo sapiens
gtcagggtttaatgaattgggataaaccacaca

SEQ ID NO: 13237 - DNA, 33 bp, Homo sapiens
tctgcctactgttgacgctgaatcctgggcagt

SEQ ID NO: 13238 - DNA, 33 bp, Homo sapiens
tacttacagtatttggtaccgttacatgctgta

SEQ ID NO: 13239 - DNA, 33 bp, Homo sapiens
tgacgatctgagcttataatattccgtatacta

SEQ ID NO: 13240 - DNA, 33 bp, Homo sapiens
cttcagaggaacataatggaatccatagcctct

SEQ ID NO: 13241 - DNA, 33 bp, Homo sapiens
gtgaggaatatcataattagatcagtgttgggt

SEQ ID NO: 13242 - DNA, 33 bp, Homo sapiens
aatacaaagggataaatcattgatgtagacaag

SEQ ID NO: 13243 - DNA, 33 bp, Homo sapiens
tccgctctgtgtcttacacctttacataagggg

SEQ ID NO: 13244 - DNA, 51 bp, Homo sapiens
cccacccaatctttgcagggctttatgactctgctccttggacacttgcca

SEQ ID NO: 13245 - DNA, 33 bp, Homo sapiens
ggaaccagaagcccagtctactctcttattgtt

SEQ ID NO: 13246 - DNA, 33 bp, Homo sapiens
cacaaatagaaaactcgctgagtcctgcttgca

SEQ ID NO: 13247 - DNA, 33 bp, Homo sapiens
acctccagctttcccaggaaacttggttggacc

SEQ ID NO: 13248 - DNA, 33 bp, Homo sapiens
ctactctttcattctctaacacagataaaatca

SEQ ID NO: 13249 - DNA, 33 bp, Homo sapiens
tattagttgccttcaggacaaagaaaaggcgag

SEQ ID NO: 13250 - DNA, 33 bp, Homo sapiens
acatacggagtcctgagcttcaaacacatgcct

SEQ ID NO: 13251 - DNA, 51 bp, Homo sapiens
aagccatgcaggcttatagtatgcagccttatatccatcagccaaagctat

SEQ ID NO: 13252 - DNA, 33 bp, Homo sapiens
acttttccatagtaacggtgattgtgttattgg

SEQ ID NO: 13253 - DNA, 33 bp, Homo sapiens
ctggatgacatggctttaacaggtgaactgcac

SEQ ID NO: 13254 - DNA, 33 bp, Homo sapiens
ttctttaaaaattacagagttttgccaaatcca

SEQ ID NO: 13255 - DNA, 33 bp, Homo sapiens
ggtttatccagctttatctcttttctcacacca

SEQ ID NO: 13256 - DNA, 33 bp, Homo sapiens
aaagacaacagataaatcttcattaaatctaca

SEQ ID NO: 13257 - DNA, 33 bp, Homo sapiens
cacagatgagtaacacgaaccactgatccagac

SEQ ID NO: 13258 - DNA, 33 bp, Homo sapiens
ttaacagggcatagaattctgggtcgacggtta

SEQ ID NO: 13259 - DNA, 33 bp, Homo sapiens
aacatggtaagtgccatatacaaacatgaacag

SEQ ID NO: 13260 - DNA, 33 bp, Homo sapiens
ccccacggcgattgattaccaaagcctatgatt

SEQ ID NO: 13261 - DNA, 33 bp, Homo sapiens
gggcattgtcagtggggaatattcttcctgaag

SEQ ID NO: 13262 - DNA, 33 bp, Homo sapiens
gtgtgtgtaaggttacgatggcccttgtgcaag

SEQ ID NO: 13263 - DNA, 33 bp, Homo sapiens
gcaagtttgctcattctatatccaggcagctgt

SEQ ID NO: 13264 - DNA, 33 bp, Homo sapiens
cttgttttagggtcactggattgcctgccacag

SEQ ID NO: 13265 - DNA, 33 bp, Homo sapiens
gtgctgccgtgttccttagagcaagaaggttgt

SEQ ID NO: 13266 - DNA, 33 bp, Homo sapiens
ctgagacattagcatctataaaacctttggtac

SEQ ID NO: 13267 - DNA, 33 bp, Homo sapiens
taatcgatcagagatggaagcagttcaaattgt

SEQ ID NO: 13268 - DNA, 33 bp, Homo sapiens
tcacttgtctgaattatattagctttcaaatcc

SEQ ID NO: 13269 - DNA, 33 bp, Homo sapiens
ccctcttaaaatttgaggaagctataaaccctc

SEQ ID NO: 13270 - DNA, 33 bp, Homo sapiens
ccttctaccatgaacatgaagcagaagaatgaa

SEQ ID NO: 13271 - DNA, 33 bp, Homo sapiens
ggctgtcaggaagttgcgttttgaatatgttca

SEQ ID NO: 13272 - DNA, 33 bp, Homo sapiens
cacactactctgtactgaaaaaacatttcaaat

SEQ ID NO: 13273 - DNA, 33 bp, Homo sapiens
tgtgtcaggctgcatcgatacatattcaataaa

SEQ ID NO: 13274 - DNA, 33 bp, Homo sapiens
acattgtggcctcaagtcaagtcagtatttaat

SEQ ID NO: 13275 - DNA, 33 bp, Homo sapiens
attaaaaagtgtaaaatgccatgaagatgaaca

SEQ ID NO: 13276 - DNA, 33 bp, Homo sapiens
tgagaaaggtactgtacattctaaacttatgcc

SEQ ID NO: 13277 - DNA, 33 bp, Homo sapiens
tgttcccaatgggatatattatgctgaaagatc

SEQ ID NO: 13278 - DNA, 33 bp, Homo sapiens
tagagtataattcttatgagtgtgagctctaaa

SEQ ID NO: 13279 - DNA, 33 bp, Homo sapiens
tttagtctgaattacacggtttttacctaaaag

SEQ ID NO: 13280 - DNA, 33 bp, Homo sapiens
ccatattctcatcagatcatttgttttcagaag

SEQ ID NO: 13281 - DNA, 33 bp, Homo sapiens
aatctacgcttgaaaatgcctttaaactcaatg

SEQ ID NO: 13282 - DNA, 51 bp, Homo sapiens
aaacacttgagtgtattggaatggataagattatagataagtatttggaaa

SEQ ID NO: 13283 - DNA, 33 bp, Homo sapiens
tcaaattgtcctattctcaactctaaatatgtc

SEQ ID NO: 13284 - DNA, 33 bp, Homo sapiens
acaagtcataagaacagacaatctgccaagaac

SEQ ID NO: 13285 - DNA, 33 bp, Homo sapiens
attattctcacagatatgttttgacctcctagc

SEQ ID NO: 13286 - DNA, 33 bp, Homo sapiens
gaatggcagacaccaagctatgatcttcaacag

SEQ ID NO: 13287 - DNA, 33 bp, Homo sapiens
tgagatgcaaagataattaagtcacagactctg

SEQ ID NO: 13288 - DNA, 33 bp, Homo sapiens
agatgaatatctggtagcacctcacagaggaga

SEQ ID NO: 13289 - DNA, 33 bp, Homo sapiens
gttagcgtctgcatactcatccacaaaatggga

SEQ ID NO: 13290 - DNA, 33 bp, Homo sapiens
tggagctgattcgatctgacaagtgttgaagct

SEQ ID NO: 13291 - DNA, 33 bp, Homo sapiens
agagatgtttcctgagcatatgttctaacctct

SEQ ID NO: 13292 - DNA, 33 bp, Homo sapiens
aagtatttaacgaaaagggatagacatacctca

SEQ ID NO: 13293 - DNA, 33 bp, Homo sapiens
tggtgagattaccacatatgttagccactggca

SEQ ID NO: 13294 - DNA, 33 bp, Homo sapiens
tggtatgtgggacaaatgaagcattctacccta

SEQ ID NO: 13295 - DNA, 33 bp, Homo sapiens
ttagtggcaggaactatcttagtcattttgata

SEQ ID NO: 13296 - DNA, 33 bp, Homo sapiens
taaaaagtggcagaaattgaatagaaaaccaag

SEQ ID NO: 13297 - DNA, 33 bp, Homo sapiens
ggtatctcagtaggtggcacactccaacagtca

SEQ ID NO: 13298 - DNA, 33 bp, Homo sapiens
tgctgtcacctctcactgtgacaggtatgattt

SEQ ID NO: 13299 - DNA, 33 bp, Homo sapiens
gcttaagcaaattatgtcagcctacgtgaagtg

SEQ ID NO: 13300 - DNA, 33 bp, Homo sapiens
catatgcaaattaccagtctagagcagtgtttt

SEQ ID NO: 13301 - DNA, 33 bp, Homo sapiens
gcttcttttccagaaatatatgctatgtgattc

SEQ ID NO: 13302 - DNA, 33 bp, Homo sapiens
agcactgctttacctggatctcataatttttga

SEQ ID NO: 13303 - DNA, 33 bp, Homo sapiens
gctggacttcaaactagaccattctggattcca

SEQ ID NO: 13304 - DNA, 33 bp, Homo sapiens
catgtcctaggaagtatcttttttctcatattt

SEQ ID NO: 13305 - DNA, 33 bp, Homo sapiens
ataatgctgctggcaattgaattttttcagtgt

SEQ ID NO: 13306 - DNA, 33 bp, Homo sapiens
ggctagtaatggtcaggaacatgtctcaaaacc

SEQ ID NO: 13307 - DNA, 33 bp, Homo sapiens
ctggctctgcaatctacctgaagctgaaaaggg

SEQ ID NO: 13308 - DNA, 33 bp, Homo sapiens
atacttcagaagctcctgactaaaagcctctaa

SEQ ID NO: 13309 - DNA, 33 bp, Homo sapiens
ttcactcctttaggaatgaaatcttacctctat

SEQ ID NO: 13310 - DNA, 33 bp, Homo sapiens
gataccgcaggaaaaatgaaatgtgacacccat

SEQ ID NO: 13311 - DNA, 33 bp, Homo sapiens
cggggctggctgacaataagtaacgaaccataa

SEQ ID NO: 13312 - DNA, 33 bp, Homo sapiens
accataagcctgctcagtaccatctttttctcc

SEQ ID NO: 13313 - DNA, 33 bp, Homo sapiens
atatgctgagctaaagtcttcatatgggttatt

SEQ ID NO: 13314 - DNA, 33 bp, Homo sapiens
cataagatatagatgattagaccagagaaggtg

SEQ ID NO: 13315 - DNA, 33 bp, Homo sapiens
cagagaaggtgactgggccaaaaggttgagatt

SEQ ID NO: 13316 - DNA, 51 bp, Homo sapiens
ggagagatctggaatttcctataaacgcaagaaagactatgaactaacgca

SEQ ID NO: 13317 - DNA, 51 bp, Homo sapiens
tctagaacatgaatactatgctcacgagtaaacctgctccaagggatactt

SEQ ID NO: 13318 - DNA, 33 bp, Homo sapiens
attcatgatttatgcattgagtattgcagtcct

SEQ ID NO: 13319 - DNA, 33 bp, Homo sapiens
cttctggccctttaaccaaaacttgatgacttg

SEQ ID NO: 13320 - DNA, 33 bp, Homo sapiens
ggataagactggaggtgaacaggactggtatca

SEQ ID NO: 13321 - DNA, 33 bp, Homo sapiens
gaggtaaatgtttttatgtcaactgaacaaaac

SEQ ID NO: 13322 - DNA, 33 bp, Homo sapiens
gaaagacaatattaaagtaaggatgggcacagt

SEQ ID NO: 13323 - DNA, 33 bp, Homo sapiens
ttacctggtcaatgtctatctatcctacttgac

SEQ ID NO: 13324 - DNA, 51 bp, Homo sapiens
aaaatagagacatgacacaatattagatttaaagccagggacttagaagca

SEQ ID NO: 13325 - DNA, 33 bp, Homo sapiens
agcaaatgcagtaatcgctaagggtgcagatta

SEQ ID NO: 13326 - DNA, 33 bp, Homo sapiens
ctttctcaccattaacggagactgaaatgcaga

SEQ ID NO: 13327 - DNA, 33 bp, Homo sapiens
tgcccatacaacctcagtagctccacattactt

SEQ ID NO: 13328 - DNA, 33 bp, Homo sapiens
cactgaacatgaccagtaatattaattttgaac

SEQ ID NO: 13329 - DNA, 33 bp, Homo sapiens
gtaggttccagtcttatcttctccctcattagc

SEQ ID NO: 13330 - DNA, 33 bp, Homo sapiens
acaagaaagtgttagataggtgttaactattgt

SEQ ID NO: 13331 - DNA, 33 bp, Homo sapiens
gcagaaagaacgcatattataatgaaggagctc

SEQ ID NO: 13332 - DNA, 33 bp, Homo sapiens
tcaaatctttatcctatagggagtgctgacatt

SEQ ID NO: 13333 - DNA, 33 bp, Homo sapiens
ctggcttttagggatggcatcaatggacttctt

SEQ ID NO: 13334 - DNA, 33 bp, Homo sapiens
gtgccccctgaagttatgcagtgtgatggacct

SEQ ID NO: 13335 - DNA, 33 bp, Homo sapiens
ctcagtctaattttacgcagcaggattgctcta

SEQ ID NO: 13336 - DNA, 33 bp, Homo sapiens
agagcccatgaccacaggtttttcattccgttc

SEQ ID NO: 13337 - DNA, 33 bp, Homo sapiens
ctctgttctctggagatattctgaagttccatc

SEQ ID NO: 13338 - DNA, 33 bp, Homo sapiens
aagaccctccataatctgacttttattgaactt

SEQ ID NO: 13339 - DNA, 33 bp, Homo sapiens
caagcagagttgaacctcttaaatgatgcctct

SEQ ID NO: 13340 - DNA, 33 bp, Homo sapiens
gacttggatgaaaaaagagtccaaagaataaga

SEQ ID NO: 13341 - DNA, 33 bp, Homo sapiens
atcctcaatgtacagggaaggaagagattggca

SEQ ID NO: 13342 - DNA, 33 bp, Homo sapiens
tcactttgagttagtatgcctctccgaggtttc

SEQ ID NO: 13343 - DNA, 33 bp, Homo sapiens
ctgctatatgatctcagagaagtaacctaatct

SEQ ID NO: 13344 - DNA, 33 bp, Homo sapiens
aattgtatttttctgatcatttgaatttagcat

SEQ ID NO: 13345 - DNA, 33 bp, Homo sapiens
cacctccactgttttctatctcagtggagcaga

SEQ ID NO: 13346 - DNA, 51 bp, Homo sapiens
ttgagccatgttaatggaatatcctgaataagaaccccattctttttcatt

SEQ ID NO: 13347 - DNA, 33 bp, Homo sapiens
gcagtgaggttaaaaccaacgtagcatttctca

SEQ ID NO: 13348 - DNA, 33 bp, Homo sapiens
tgggcttctgatgtaccgagttgtgaggaaata

SEQ ID NO: 13349 - DNA, 33 bp, Homo sapiens
gcttctgttttagcaatgggcagtctagctttc

SEQ ID NO: 13350 - DNA, 33 bp, Homo sapiens
tacaggtccagagttggaagaagaactaggact

SEQ ID NO: 13351 - DNA, 33 bp, Homo sapiens
aggatatggcatgtattaagtgtgagatttagg

SEQ ID NO: 13352 - DNA, 33 bp, Homo sapiens
atcattttattttgcattatgagagactaataa

SEQ ID NO: 13353 - DNA, 33 bp, Homo sapiens
tttggttcatatcagctatagagacagcaatcc

SEQ ID NO: 13354 - DNA, 33 bp, Homo sapiens
ttgagcattcgttcaatcatgtttccaagttat

SEQ ID NO: 13355 - DNA, 33 bp, Homo sapiens
tcatggcacaaagttagcagcagaatgttcaga

SEQ ID NO: 13356 - DNA, 33 bp, Homo sapiens
atcccctgtatttcactcccctcatctgaaaac

SEQ ID NO: 13357 - DNA, 33 bp, Homo sapiens
cacataaacaatggtctacttacttcaaactat

SEQ ID NO: 13358 - DNA, 33 bp, Homo sapiens
tttcaagtgactggaagaatgttgataccattg

SEQ ID NO: 13359 - DNA, 33 bp, Homo sapiens
tgccctttctcgctgatcttgtttaggagcctt

SEQ ID NO: 13360 - DNA, 33 bp, Homo sapiens
gacttgtaaattagtaggtgctgagattatatc

SEQ ID NO: 13361 - DNA, 33 bp, Homo sapiens
gagggaactgttgtaaggcagataatctgttta

SEQ ID NO: 13362 - DNA, 33 bp, Homo sapiens
agtattgtagctgaaattggaagttcaaccatt

SEQ ID NO: 13363 - DNA, 51 bp, Homo sapiens
ggattcttaggcttccttcaatgacgaggatctctatgtctgacattccag

SEQ ID NO: 13364 - DNA, 33 bp, Homo sapiens
ttactaaagctgattatgctgtcatcccttcct

SEQ ID NO: 13365 - DNA, 33 bp, Homo sapiens
aataagcgagctgtggcatctagacaaaaacag

SEQ ID NO: 13366 - DNA, 51 bp, Homo sapiens
agacagacccaaatacacttattccggaagcatcgattaggtctgcccttg

SEQ ID NO: 13367 - DNA, 51 bp, Homo sapiens
acaatatggaactctgaagatttttgtggcaattccaagagattctcaggc

SEQ ID NO: 13368 - DNA, 33 bp, Homo sapiens
ggtccttgacttcccataacaccctaagtgttg

SEQ ID NO: 13369 - DNA, 33 bp, Homo sapiens
taaatctttacccaacgcttggaaccacaaaat

SEQ ID NO: 13370 - DNA, 33 bp, Homo sapiens
cactctggtctgagaactatgcctagaacaaaa

SEQ ID NO: 13371 - DNA, 33 bp, Homo sapiens
ttgcgagtcaagggaatccaggagttgctctct

SEQ ID NO: 13372 - DNA, 33 bp, Homo sapiens
tctgtccacagagtaagggtcaattaggtagtg

SEQ ID NO: 13373 - DNA, 33 bp, Homo sapiens
tttctatttgtcagcacgttttgtcagtactta

SEQ ID NO: 13374 - DNA, 33 bp, Homo sapiens
agagcaggacccggacggtaggaatccacaggc

SEQ ID NO: 13375 - DNA, 33 bp, Homo sapiens
atgttatagatgagtacgctgatgatctgagaa

SEQ ID NO: 13376 - DNA, 51 bp, Homo sapiens
atggaacacaagacaactctctaaattgtcaccttaacgctcttctcacat

SEQ ID NO: 13377 - DNA, 33 bp, Homo sapiens
acaggacacctacatcggaacaagactgctttt

SEQ ID NO: 13378 - DNA, 33 bp, Homo sapiens
tagtcctaaaatatccgacacaatttttttgaa

SEQ ID NO: 13379 - DNA, 33 bp, Homo sapiens
cctctatgtcactttctacattttttacattgt

SEQ ID NO: 13380 - DNA, 33 bp, Homo sapiens
agagtctaggttctaatgcttcgtgtcaaaccg

SEQ ID NO: 13381 - DNA, 33 bp, Homo sapiens
cctgtttacctcttacgctaactacagcccagg

SEQ ID NO: 13382 - DNA, 33 bp, Homo sapiens
gtaatgccatcttgaagcctccagtcccaattg

SEQ ID NO: 13383 - DNA, 33 bp, Homo sapiens
agagaccataattccatagcgttgtagccccac

SEQ ID NO: 13384 - DNA, 33 bp, Homo sapiens
tctccctcaagactaatgtgggatctaccagga

SEQ ID NO: 13385 - DNA, 33 bp, Homo sapiens
tcatttgaaatgtatccaaatgtcctcacaaac

SEQ ID NO: 13386 - DNA, 33 bp, Homo sapiens
atgtctatgagccatatagcactatgagtagaa

SEQ ID NO: 13387 - DNA, 33 bp, Homo sapiens
ttaaggatcatctgtggaccttttgaatctttt

SEQ ID NO: 13388 - DNA, 33 bp, Homo sapiens
gagttctgattcaactcaagtagagcggaacat

SEQ ID NO: 13389 - DNA, 33 bp, Homo sapiens
agcctcttgtaagaacgaaatatcacacagaaa

SEQ ID NO: 13390 - DNA, 33 bp, Homo sapiens
atagctattgtgaaaatttactgagagaattac

SEQ ID NO: 13391 - DNA, 33 bp, Homo sapiens
caactaagccctctcctatcttcattccaaaag

SEQ ID NO: 13392 - DNA, 33 bp, Homo sapiens
ggaaaaaatggcacaaggattacttgagtcctg

SEQ ID NO: 13393 - DNA, 33 bp, Homo sapiens
ctgactgcagatccacggagcataaatgattgc

SEQ ID NO: 13394 - DNA, 33 bp, Homo sapiens
atcctccctctcgaccgcagggactatttggtt

SEQ ID NO: 13395 - DNA, 33 bp, Homo sapiens
tacatctgagttatcataagagtctgagatgat

SEQ ID NO: 13396 - DNA, 33 bp, Homo sapiens
gggctgagaactttgagagtaatctgcaaatcc

SEQ ID NO: 13397 - DNA, 33 bp, Homo sapiens
aagagtaaacattactgaaggatttttacctcc

SEQ ID NO: 13398 - DNA, 33 bp, Homo sapiens
tgggtattctctgcactctaccaccacttctgt

SEQ ID NO: 13399 - DNA, 33 bp, Homo sapiens
tttgtacaccagaagagtctaattatgttggaa

SEQ ID NO: 13400 - DNA, 33 bp, Homo sapiens
aacaataaattgcacatagagtctgtcatagga

SEQ ID NO: 13401 - DNA, 33 bp, Homo sapiens
ccatgaactttccctctaattatgctagtcaat

SEQ ID NO: 13402 - DNA, 51 bp, Homo sapiens
agaaaaataaggacatatgctcctacaaaaacttgtaccaaaagtttactg

SEQ ID NO: 13403 - DNA, 33 bp, Homo sapiens
cccttctgaaggaaggtcaattcttagagatag

SEQ ID NO: 13404 - DNA, 33 bp, Homo sapiens
tttcatctcaaaagaatctaaagcttgtagtcc

SEQ ID NO: 13405 - DNA, 33 bp, Homo sapiens
aggggaagagtgtaaaggtaatattcttctgcg

SEQ ID NO: 13406 - DNA, 33 bp, Homo sapiens
acataggaacatgacctacttagcaataaggga

SEQ ID NO: 13407 - DNA, 33 bp, Homo sapiens
ttcagtttttaaaaaggcttccagatgaacagt

SEQ ID NO: 13408 - DNA, 51 bp, Homo sapiens
caacagtccaattcaaattagaccttacaaagcaaactactctgattaggg

SEQ ID NO: 13409 - DNA, 51 bp, Homo sapiens
gacaagcattatgccattacgattatgctaaaaatgaagtccaagcacaat

SEQ ID NO: 13410 - DNA, 33 bp, Homo sapiens
agtagtgttaaaactctgagtaaggtacttcag

SEQ ID NO: 13411 - DNA, 33 bp, Homo sapiens
gactcccagtgatagaggtgagtagcttcatac

SEQ ID NO: 13412 - DNA, 33 bp, Homo sapiens
tccttagggtcttttatggctgcctaccccttg

SEQ ID NO: 13413 - DNA, 33 bp, Homo sapiens
aaaatgcacagtgtaatatctggaaagacgtat

SEQ ID NO: 13414 - DNA, 33 bp, Homo sapiens
aagtttgtctcaatcagatgaagagaaactgca

SEQ ID NO: 13415 - DNA, 33 bp, Homo sapiens
tatctagctgggagaatggtgaaccggcaaaca

SEQ ID NO: 13416 - DNA, 33 bp, Homo sapiens
gagatcccttatgaagtcacttttcctttcaac

SEQ ID NO: 13417 - DNA, 33 bp, Homo sapiens
tgactttccatattctgaagatgattcacccat

SEQ ID NO: 13418 - DNA, 33 bp, Homo sapiens
gtgctttgtaacactatatatttcaagaggaaa

SEQ ID NO: 13419 - DNA, 33 bp, Homo sapiens
aggcattggccaaaaattgcaaaaaatgaggtg

SEQ ID NO: 13420 - DNA, 33 bp, Homo sapiens
gctggattaggcaagattccgggctgtgctgca

SEQ ID NO: 13421 - DNA, 33 bp, Homo sapiens
acaggaaaaagtagtcgagataccatcatgtag

SEQ ID NO: 13422 - DNA, 51 bp, Homo sapiens
atggaatctacaaagaaagctaatagaactaacaggtgaggttagcaagtt

SEQ ID NO: 13423 - DNA, 51 bp, Homo sapiens
taacattgaacccccaaagtgaccatggactgatggcctcagatcatccag

SEQ ID NO: 13424 - DNA, 33 bp, Homo sapiens
attattaaaagcaatcgatgcattatgaaaatg

SEQ ID NO: 13425 - DNA, 33 bp, Homo sapiens
ttgccttagaaatagcgcataaacaagaatgta

SEQ ID NO: 13426 - DNA, 33 bp, Homo sapiens
cagtaaagattctcattaggtgccaaattctag

SEQ ID NO: 13427 - DNA, 33 bp, Homo sapiens
ctcctctccgcgggaataggaatggcttcttca

SEQ ID NO: 13428 - DNA, 51 bp, Homo sapiens
tgggattcagtcagatgtcagatacgagggttagtgaggagcctgccaggg

SEQ ID NO: 13429 - DNA, 51 bp, Homo sapiens
gggctacagagactccaggctggtcgatcagtgacagaaatttgagttccc

SEQ ID NO: 13430 - DNA, 33 bp, Homo sapiens
agaatacgaaggcatatatgtgtttgttctcag

SEQ ID NO: 13431 - DNA, 33 bp, Homo sapiens
gggcactgcaggggagcacagcgctcaggctgg

SEQ ID NO: 13432 - DNA, 33 bp, Homo sapiens
cacaaaggtgacttccgcgcccaggagaatgtg

SEQ ID NO: 13433 - DNA, 33 bp, Homo sapiens
acaggtaataacgaactaccaaggttaattgga

SEQ ID NO: 13434 - DNA, 33 bp, Homo sapiens
gctgaggttgcatggatattgcagtgagtccat

SEQ ID NO: 13435 - DNA, 33 bp, Homo sapiens
aatgctctgctggggttaattctcatcataggc

SEQ ID NO: 13436 - DNA, 33 bp, Homo sapiens
tctgtgagcaggaaactggctaaccaatcggct

SEQ ID NO: 13437 - DNA, 33 bp, Homo sapiens
gccatgccctattccaggtgtcaatgtacagtg

SEQ ID NO: 13438 - DNA, 33 bp, Homo sapiens
aaaatttcctgttgtatatttcccatacagctt

SEQ ID NO: 13439 - DNA, 33 bp, Homo sapiens
gagttatttttgttccgatggggtctcagagat

SEQ ID NO: 13440 - DNA, 33 bp, Homo sapiens
tttagctgcaatgttataggccagaaagttcac

SEQ ID NO: 13441 - DNA, 33 bp, Homo sapiens
gtatgagagcccacaagtattttagtttatgaa

SEQ ID NO: 13442 - DNA, 33 bp, Homo sapiens
ccaggcaatgaatcccggagaatttgcctttca

SEQ ID NO: 13443 - DNA, 33 bp, Homo sapiens
tagtttctcctggtcctgaaatcattataagta

SEQ ID NO: 13444 - DNA, 33 bp, Homo sapiens
ctagtccttccagaaatgttgccaagtacagag

SEQ ID NO: 13445 - DNA, 33 bp, Homo sapiens
ttacattctcagaggatgctcacagcctagatc

SEQ ID NO: 13446 - DNA, 33 bp, Homo sapiens
tgctgtggactcctggtaaagcctgctgtccca

SEQ ID NO: 13447 - DNA, 33 bp, Homo sapiens
ttggacacttttcaatgatgactcttgaagcag

SEQ ID NO: 13448 - DNA, 33 bp, Homo sapiens
gcatcaacaaacttcacctggacaaggcacccc

SEQ ID NO: 13449 - DNA, 33 bp, Homo sapiens
gatggaagtgatttcagaggcccaaagtgagtg

SEQ ID NO: 13450 - DNA, 33 bp, Homo sapiens
ctgcagcgaggcttcatggacactattctggca

SEQ ID NO: 13451 - DNA, 33 bp, Homo sapiens
actggttggtcagagatggcttttagggctgaa

SEQ ID NO: 13452 - DNA, 33 bp, Homo sapiens
aaacttgccttcatggtcacaaaaggctcccag

SEQ ID NO: 13453 - DNA, 33 bp, Homo sapiens
gcattactctgactaatgatgaacaatgtgagc

SEQ ID NO: 13454 - DNA, 33 bp, Homo sapiens
catacaatttggagcccgagtgctgctttatct

SEQ ID NO: 13455 - DNA, 33 bp, Homo sapiens
ccagtggtgaccggaatgaagcaaccttcctaa

SEQ ID NO: 13456 - DNA, 33 bp, Homo sapiens
gagtgaaaggagctagtcaaaagagtatgcaga

SEQ ID NO: 13457 - DNA, 33 bp, Homo sapiens
ccaatttatttcgaattatctgtggctgctttt

SEQ ID NO: 13458 - DNA, 33 bp, Homo sapiens
gatgtatgttgccatatgcacttttcattctct

SEQ ID NO: 13459 - DNA, 33 bp, Homo sapiens
tctgtcaggatgtgactgctggttttaagcgat

SEQ ID NO: 13460 - DNA, 51 bp, Homo sapiens
caatacccttagttgaccagttcaatctttccctgcacttgaatgctacta

SEQ ID NO: 13461 - DNA, 33 bp, Homo sapiens
tttttttttctgccaatatttatagctgccctg

SEQ ID NO: 13462 - DNA, 33 bp, Homo sapiens
ggtccatgcagccacattctgcaccctgatgtc

SEQ ID NO: 13463 - DNA, 33 bp, Homo sapiens
ccactggtatctgctatgaaggaaaggagaaat

SEQ ID NO: 13464 - DNA, 33 bp, Homo sapiens
gcacgctttcaaataagactcccagggcttgac

SEQ ID NO: 13465 - DNA, 33 bp, Homo sapiens
ccagataaaaggtcacgattcctggtgcctggt

SEQ ID NO: 13466 - DNA, 33 bp, Homo sapiens
caccaactgcatgcactattggaatcgcgtttc

SEQ ID NO: 13467 - DNA, 33 bp, Homo sapiens
gaaacgtctagctccctctcgtgtcaattgtct

SEQ ID NO: 13468 - DNA, 33 bp, Homo sapiens
gataggaacaaaaaaatctcattagagtcacaa

SEQ ID NO: 13469 - DNA, 33 bp, Homo sapiens
gtaacttactggcctcgaggataggcctctggt

SEQ ID NO: 13470 - DNA, 33 bp, Homo sapiens
ctaatctgaaatcttacaaggacaccaacaatc

SEQ ID NO: 13471 - DNA, 33 bp, Homo sapiens
gtgtcctgaatcccaatgtctgtagcgggacat

SEQ ID NO: 13472 - DNA, 33 bp, Homo sapiens
tgaaggaacgtattatgagtcctggagaaaaca

SEQ ID NO: 13473 - DNA, 33 bp, Homo sapiens
acccagccctgttgtatctctttctgggtatgt

SEQ ID NO: 13474 - DNA, 33 bp, Homo sapiens
taagagccgggacaaattgataaatgagctgaa

SEQ ID NO: 13475 - DNA, 33 bp, Homo sapiens
ccccaagggcgtagaacatcccagacagtgaga

SEQ ID NO: 13476 - DNA, 33 bp, Homo sapiens
acagatgtggcaaaaacatccacttgatccaac

SEQ ID NO: 13477 - DNA, 33 bp, Homo sapiens
gtttgatatcataaaactccaagtcagcagaac

SEQ ID NO: 13478 - DNA, 33 bp, Homo sapiens
gaatggataagcgaactgtgaacccctatacaa

SEQ ID NO: 13479 - DNA, 33 bp, Homo sapiens
tacttcttaacaaaaagatgtagccagaagatt

SEQ ID NO: 13480 - DNA, 33 bp, Homo sapiens
tttggagggagccacatattgacccaatgggag

SEQ ID NO: 13481 - DNA, 33 bp, Homo sapiens
agacatggactacagcggcacaatatgaaagtg

SEQ ID NO: 13482 - DNA, 33 bp, Homo sapiens
tgcataggtcttacccgagctacagggctgagg

SEQ ID NO: 13483 - DNA, 33 bp, Homo sapiens
atgttctgaccaaatagacattaaggctaactt

SEQ ID NO: 13484 - DNA, 33 bp, Homo sapiens
tattgaggaaatagcctacagaaaattcaaaga

SEQ ID NO: 13485 - DNA, 33 bp, Homo sapiens
ttggcctcgcaaagctgagctcttaattatact

SEQ ID NO: 13486 - DNA, 33 bp, Homo sapiens
catgatatttgtgaaagatcctaacagtcacct

SEQ ID NO: 13487 - DNA, 33 bp, Homo sapiens
aaaagtaagagtggacgggggttgattttccat

SEQ ID NO: 13488 - DNA, 33 bp, Homo sapiens
ggaaaagacaaaaaaccagtggacatgataatt

SEQ ID NO: 13489 - DNA, 33 bp, Homo sapiens
aaaaatcgggttgacattgaactctcatctgca

SEQ ID NO: 13490 - DNA, 33 bp, Homo sapiens
aagagagttaacagaggatggaaatccgatggg

SEQ ID NO: 13491 - DNA, 33 bp, Homo sapiens
agggccggattctaaatgctgtaggtcaccctg

SEQ ID NO: 13492 - DNA, 51 bp, Homo sapiens
tattctatggttcggtatgttgggctctttaagaaatggattctagagcct

SEQ ID NO: 13493 - DNA, 33 bp, Homo sapiens
actaaacatgctacgatgcacaagatagcctcc

SEQ ID NO: 13494 - DNA, 33 bp, Homo sapiens
gaaatgtcctgttttatgtgactgaaaaatctt

SEQ ID NO: 13495 - DNA, 33 bp, Homo sapiens
gtggacataggctatcgaagggtttttgggata

SEQ ID NO: 13496 - DNA, 33 bp, Homo sapiens
tccaagaatcaatcacggtgatgcttcccaatt

SEQ ID NO: 13497 - DNA, 33 bp, Homo sapiens
ttggccactagcctcagagctacgcacaaagga

SEQ ID NO: 13498 - DNA, 33 bp, Homo sapiens
atgatactggtctccagaatgaacaattccttc

SEQ ID NO: 13499 - DNA, 33 bp, Homo sapiens
tctgaagtccacactctgaatgaatgccaggga

SEQ ID NO: 13500 - DNA, 33 bp, Homo sapiens
cttagtgttataaaactgcttagacctctgtca

SEQ ID NO: 13501 - DNA, 51 bp, Homo sapiens
actgtttcctgagtaaacattaaaagtactccatctaaaaagctagaagtt

SEQ ID NO: 13502 - DNA, 51 bp, Homo sapiens
tacttagtttcaaggtgtgggtggattatcaactcagggaagtggcttgtg

SEQ ID NO: 13503 - DNA, 51 bp, Homo sapiens
aagaagcgcctaagcacctctatgatggactctaagaaccgagaaatgaat

SEQ ID NO: 13504 - DNA, 33 bp, Homo sapiens
caatacagccaaagaatgatcaggcctccatta

SEQ ID NO: 13505 - DNA, 33 bp, Homo sapiens
taccttagctgaataccctggttcaaaaacatt

SEQ ID NO: 13506 - DNA, 33 bp, Homo sapiens
cccattcaaagctctctgactcctaaccccctt

SEQ ID NO: 13507 - DNA, 33 bp, Homo sapiens
accagatgcatgcaagtctggcagtttacagat

SEQ ID NO: 13508 - DNA, 33 bp, Homo sapiens
ctccttccacagcagagtacatgtgaacttgtg

SEQ ID NO: 13509 - DNA, 33 bp, Homo sapiens
cacagtgtgaaattatcataagagttgtagttg

SEQ ID NO: 13510 - DNA, 33 bp, Homo sapiens
cagcaccttgagtggggacggagatacactgaa

SEQ ID NO: 13511 - DNA, 33 bp, Homo sapiens
ccccagtactcctagactccagaatatgtaaca

SEQ ID NO: 13512 - DNA, 33 bp, Homo sapiens
tatcatggtcatgaaataaggaagtacgccatc

SEQ ID NO: 13513 - DNA, 33 bp, Homo sapiens
attgcagataaacaacgaatattttagcataag

SEQ ID NO: 13514 - DNA, 33 bp, Homo sapiens
acccacagtgagcttcgacacgaggaaagtaac

SEQ ID NO: 13515 - DNA, 33 bp, Homo sapiens
aaggagcagaggggagtcgatgtgagagacagc

SEQ ID NO: 13516 - DNA, 33 bp, Homo sapiens
atgcatgagaagttgtgaagaacaaggaatggc

SEQ ID NO: 13517 - DNA, 33 bp, Homo sapiens
gcaaattaaaggaagatcacagagagaactgga

SEQ ID NO: 13518 - DNA, 33 bp, Homo sapiens
ggtaacatattggaaaccagaatcattagaacc

SEQ ID NO: 13519 - DNA, 33 bp, Homo sapiens
ctgggtaagacctgtatagaaaatcttctctgg

SEQ ID NO: 13520 - DNA, 33 bp, Homo sapiens
aactaacacatgtgaattgaagccaagataagc

SEQ ID NO: 13521 - DNA, 33 bp, Homo sapiens
aacacaaaagagacaatgctttttactgatgag

SEQ ID NO: 13522 - DNA, 33 bp, Homo sapiens
ctacgaggcctctttagggagccgggacattta

SEQ ID NO: 13523 - DNA, 33 bp, Homo sapiens
tggacatcctgctttagaatgatgtccctgcct

SEQ ID NO: 13524 - DNA, 33 bp, Homo sapiens
agtctcattaggaaaatctgaccaacagtgtaa

SEQ ID NO: 13525 - DNA, 33 bp, Homo sapiens
atgcttaggcaagccctgcagcgtccaatggtt

SEQ ID NO: 13526 - DNA, 33 bp, Homo sapiens
tcatttctagctttaatatttcagtgtgaaaaa

SEQ ID NO: 13527 - DNA, 33 bp, Homo sapiens
tctgcctcttttcacatctactccctctaaggc

SEQ ID NO: 13528 - DNA, 33 bp, Homo sapiens
tagagccctcatgtaaggtgccgcacattccct

SEQ ID NO: 13529 - DNA, 33 bp, Homo sapiens
aaagaattctaatgaatgccagtagttgtcaca

SEQ ID NO: 13530 - DNA, 33 bp, Homo sapiens
ttaatggactctagactagcgtgattgtatgcc

SEQ ID NO: 13531 - DNA, 33 bp, Homo sapiens
gtaaggcagattactcggaagaactggggtaga

SEQ ID NO: 13532 - DNA, 33 bp, Homo sapiens
agcttaccccacggaacgtttacagtgcccagt

SEQ ID NO: 13533 - DNA, 33 bp, Homo sapiens
tcattaggcactttgcggagaccagatgctttg

SEQ ID NO: 13534 - DNA, 33 bp, Homo sapiens
cttggacggagccccttagacagcaagatcacc

SEQ ID NO: 13535 - DNA, 33 bp, Homo sapiens
agccacccacccattacatcagtggctcacagc

SEQ ID NO: 13536 - DNA, 51 bp, Homo sapiens
aaaggcaccatcatccattaccctatagtctcaaagcagcaatcatcctgt

SEQ ID NO: 13537 - DNA, 33 bp, Homo sapiens
cccttgcatgggtcaagatagataacagaccag

SEQ ID NO: 13538 - DNA, 33 bp, Homo sapiens
cagaatacatttctctgacacttgagaccctgg

SEQ ID NO: 13539 - DNA, 51 bp, Homo sapiens
aggaaaatatgaagattactttgcataatattggatatgtgctgtggcaga

SEQ ID NO: 13540 - DNA, 51 bp, Homo sapiens
tgattactctggtacatagtaacaatgtggctatgtagctcctgtcaccac

SEQ ID NO: 13541 - DNA, 33 bp, Homo sapiens
tggattaacatacgaatagcgcctgtcaactga

SEQ ID NO: 13542 - DNA, 33 bp, Homo sapiens
aattttattataagcatcaaagtcaactgctag

SEQ ID NO: 13543 - DNA, 33 bp, Homo sapiens
atcaacctgttatgcctgacactcctttctgta

SEQ ID NO: 13544 - DNA, 33 bp, Homo sapiens
ttcattctctacctgatagaacttcaccttaag

SEQ ID NO: 13545 - DNA, 33 bp, Homo sapiens
catctctccaggttgctaggtattataattcac

SEQ ID NO: 13546 - DNA, 33 bp, Homo sapiens
tgagggaatggggaaagtgagacaagaaatgga

SEQ ID NO: 13547 - DNA, 51 bp, Homo sapiens
tgttattttttttctcctactggcagaacgttagacaatatttcaacttag

SEQ ID NO: 13548 - DNA, 33 bp, Homo sapiens
atggttataaattccaggggaacactctaaacc

SEQ ID NO: 13549 - DNA, 33 bp, Homo sapiens
tgtcatatgtatgtgattaattcaatgccttcc

SEQ ID NO: 13550 - DNA, 33 bp, Homo sapiens
gttagaattgcagatgtacactatagtttaggg

SEQ ID NO: 13551 - DNA, 33 bp, Homo sapiens
ccatggatgaggatagtatatgtaactgctcac

SEQ ID NO: 13552 - DNA, 33 bp, Homo sapiens
acccagaaaatgggaagtaaaggtgagccaaat

SEQ ID NO: 13553 - DNA, 51 bp, Homo sapiens
tatagtttcacgttaatctccagattctgttaagccactaaataccagttt

SEQ ID NO: 13554 - DNA, 33 bp, Homo sapiens
aaccagactaagcccatctttatcagttagcag

SEQ ID NO: 13555 - DNA, 33 bp, Homo sapiens
tacaaaacaattaaaagttagctaagcatggtg

SEQ ID NO: 13556 - DNA, 33 bp, Homo sapiens
aagcaattggttccacccctgagtttctgattg

SEQ ID NO: 13557 - DNA, 33 bp, Homo sapiens
cttcagtatctcttacgcatgcaaataatacgc

SEQ ID NO: 13558 - DNA, 33 bp, Homo sapiens
agatttaagaagtagctgagaatttcaaatata

SEQ ID NO: 13559 - DNA, 33 bp, Homo sapiens
gcagcatccggataaatgacacctagtggttag

SEQ ID NO: 13560 - DNA, 33 bp, Homo sapiens
cagttaacaccgactattaaagctcctgtttct

SEQ ID NO: 13561 - DNA, 33 bp, Homo sapiens
gaagggttaggaattacaaagattggtggataa

SEQ ID NO: 13562 - DNA, 33 bp, Homo sapiens
agacttacctgacatatgagacttacctccttg

SEQ ID NO: 13563 - DNA, 33 bp, Homo sapiens
tcacaaatactacaaagtttcagaattactatt

SEQ ID NO: 13564 - DNA, 33 bp, Homo sapiens
ccttgttttacaccaatttgatgcagtaatagg

SEQ ID NO: 13565 - DNA, 51 bp, Homo sapiens
cagctagtttccttccttatctaaattgtggtcaatagcaacagattattt

SEQ ID NO: 13566 - DNA, 33 bp, Homo sapiens
tcctgggctgtgcagagtaaaagatgccttgat

SEQ ID NO: 13567 - DNA, 33 bp, Homo sapiens
atgctactgttgccatgaagtatttttagtctg

SEQ ID NO: 13568 - DNA, 33 bp, Homo sapiens
aaagaagctaaactgagagagaaacttaaatgc

SEQ ID NO: 13569 - DNA, 33 bp, Homo sapiens
tttctttacttgaaaactcaccattaagtcaag

SEQ ID NO: 13570 - DNA, 33 bp, Homo sapiens
gaattgaaagcttcatgagttaaaagagctaca

SEQ ID NO: 13571 - DNA, 33 bp, Homo sapiens
tgctacacttgatagcgcagtacgtagtcaaca

SEQ ID NO: 13572 - DNA, 33 bp, Homo sapiens
aaatggaatgatttgatggtattctagaaaact

SEQ ID NO: 13573 - DNA, 33 bp, Homo sapiens
gtgtattggttctgctgaagactttcatttgtt

SEQ ID NO: 13574 - DNA, 33 bp, Homo sapiens
tgtgtctactcctagcgcccaggaaagattctg

SEQ ID NO: 13575 - DNA, 33 bp, Homo sapiens
ttctttaacttgtcaagtactgaataaactcat

SEQ ID NO: 13576 - DNA, 33 bp, Homo sapiens
tatatgtgggggatgataaaatatctgtgtgtg

SEQ ID NO: 13577 - DNA, 33 bp, Homo sapiens
tctctggagctatagagtattgaggccaatgtg

SEQ ID NO: 13578 - DNA, 33 bp, Homo sapiens
atctaaaataacaagagaagtcacagtaaaaat

SEQ ID NO: 13579 - DNA, 33 bp, Homo sapiens
gctatacatttgcacatatacttctttttgttc

SEQ ID NO: 13580 - DNA, 33 bp, Homo sapiens
gtgtacaagctcaaaatagactcatcactatat

SEQ ID NO: 13581 - DNA, 33 bp, Homo sapiens
ttttactccctctttagcttgtaagacagagca

SEQ ID NO: 13582 - DNA, 33 bp, Homo sapiens
gttaaagacaagcatatacacctggctattctt

SEQ ID NO: 13583 - DNA, 33 bp, Homo sapiens
tcaggttgggtttgaagtgatcctgaggagact

SEQ ID NO: 13584 - DNA, 33 bp, Homo sapiens
gacataaagtaattcataagggctgggcaaatt

SEQ ID NO: 13585 - DNA, 33 bp, Homo sapiens
agatactttactaaaggatggaaaaacatcatc

SEQ ID NO: 13586 - DNA, 33 bp, Homo sapiens
tgtttttaggctgttcgacaaaattttctgtga

SEQ ID NO: 13587 - DNA, 33 bp, Homo sapiens
acaggactggacaccagaaataatgtcaaggta

SEQ ID NO: 13588 - DNA, 33 bp, Homo sapiens
acagagattactctgatacatttgtcaacatgt

SEQ ID NO: 13589 - DNA, 33 bp, Homo sapiens
attaaggcagcattaagacaaaaacaatcttaa

SEQ ID NO: 13590 - DNA, 33 bp, Homo sapiens
caagggagaagggctggattttgccttgtaaag

SEQ ID NO: 13591 - DNA, 33 bp, Homo sapiens
taagaggcttctcggagtatagatgttcaaacc

SEQ ID NO: 13592 - DNA, 33 bp, Homo sapiens
tctcagcaccctcaaattcacctgataaatatt

SEQ ID NO: 13593 - DNA, 33 bp, Homo sapiens
gtctcttcaattaggcgcagacataacacatac

SEQ ID NO: 13594 - DNA, 33 bp, Homo sapiens
ccttaactgattaaccgactttgcagcattcca

SEQ ID NO: 13595 - DNA, 33 bp, Homo sapiens
cgattactgaatagtatggtaaaagtgtgttaa

SEQ ID NO: 13596 - DNA, 33 bp, Homo sapiens
agtataagttatgcacgactggctttgtcccta

SEQ ID NO: 13597 - DNA, 33 bp, Homo sapiens
aagataaaatttgaaggctctcttatcaaagaa

SEQ ID NO: 13598 - DNA, 33 bp, Homo sapiens
tgttaatctgtttctatgaaagttcatcaacca

SEQ ID NO: 13599 - DNA, 33 bp, Homo sapiens
catatgatactggagaccttccccctttcttgc

SEQ ID NO: 13600 - DNA, 33 bp, Homo sapiens
ttacttcagaactggatcatttagttgccactg

SEQ ID NO: 13601 - DNA, 33 bp, Homo sapiens
aagccaccgcatcgagtccaatatcacatttac

SEQ ID NO: 13602 - DNA, 33 bp, Homo sapiens
cgacaaaatgagtgaatgtaaatttagtccaaa

SEQ ID NO: 13603 - DNA, 33 bp, Homo sapiens
ataatctgctcactaagtatgtcatgcttggct

SEQ ID NO: 13604 - DNA, 33 bp, Homo sapiens
catgtggcaagttatatggtattaggctagtta

SEQ ID NO: 13605 - DNA, 51 bp, Homo sapiens
cagtggagagctacttaagtggcaagagactgagtttcctcttgtgattgt

SEQ ID NO: 13606 - DNA, 33 bp, Homo sapiens
gaactatgttggttcctagaacttaagtgtcag

SEQ ID NO: 13607 - DNA, 33 bp, Homo sapiens
tccatagagactcatcgacacatttctttcagt

SEQ ID NO: 13608 - DNA, 33 bp, Homo sapiens
ttatctaagcaatgactggagcgacttcaaatt

SEQ ID NO: 13609 - DNA, 33 bp, Homo sapiens
cagcccctgacatgccgactcttgtgtgacata

SEQ ID NO: 13610 - DNA, 33 bp, Homo sapiens
tcctctgtcaaatagggacaacaggttttttgt

SEQ ID NO: 13611 - DNA, 33 bp, Homo sapiens
caggaagctttccatattaaaacctttgtagag

SEQ ID NO: 13612 - DNA, 33 bp, Homo sapiens
atacagcttatttatctgagtttttgtagttca

SEQ ID NO: 13613 - DNA, 33 bp, Homo sapiens
gcagttgcacaaataagcataacctaggatctg

SEQ ID NO: 13614 - DNA, 33 bp, Homo sapiens
atgataaagtaacttccacctgacacagtaaaa

SEQ ID NO: 13615 - DNA, 33 bp, Homo sapiens
ctggaatgagaatgccgcgtccaggctgtgtta

SEQ ID NO: 13616 - DNA, 33 bp, Homo sapiens
cactttcttacttaaattcttccaatgactttc

SEQ ID NO: 13617 - DNA, 33 bp, Homo sapiens
cttctcctggcttttatgaaatctcacttgttg

SEQ ID NO: 13618 - DNA, 33 bp, Homo sapiens
gttttagtgacattccgcaaagcctacctgtgt

SEQ ID NO: 13619 - DNA, 33 bp, Homo sapiens
gggtctgggatgtctcgcaagtcctggaaactc

SEQ ID NO: 13620 - DNA, 33 bp, Homo sapiens
ttggtattcgcacagctctttaaagtttttaag

SEQ ID NO: 13621 - DNA, 33 bp, Homo sapiens
ctatgatattagctggtattctcaatgctcatt

SEQ ID NO: 13622 - DNA, 33 bp, Homo sapiens
agtttataaactaggatgacatactaagagctt

SEQ ID NO: 13623 - DNA, 33 bp, Homo sapiens
cacctgttatgttccaggtgtctgaggagctag

SEQ ID NO: 13624 - DNA, 33 bp, Homo sapiens
tggcctggaaagaacatctacagtatggccaca

SEQ ID NO: 13625 - DNA, 33 bp, Homo sapiens
ggtggcaggcataagcgaggcagttcctgcatt

SEQ ID NO: 13626 - DNA, 33 bp, Homo sapiens
cttctgataacccctctaatctatgtatgtgtt

SEQ ID NO: 13627 - DNA, 33 bp, Homo sapiens
aacttgcagccagtcaggaaagtcaagagaaga

SEQ ID NO: 13628 - DNA, 33 bp, Homo sapiens
ccaaaaagcccaaactgaatgaatctactgctc

SEQ ID NO: 13629 - DNA, 33 bp, Homo sapiens
ctgaggcagaggggatgaatgggtagaaagtga

SEQ ID NO: 13630 - DNA, 33 bp, Homo sapiens
cagcacacttgctgcatagaggtagatttacag

SEQ ID NO: 13631 - DNA, 33 bp, Homo sapiens
tacaaaacaagactgggcattggacatattttg

SEQ ID NO: 13632 - DNA, 33 bp, Homo sapiens
tattgtgaaaaatcaattgagatgatgtaaaat

SEQ ID NO: 13633 - DNA, 33 bp, Homo sapiens
ccctaaagaactacacgagtagaaagggtatca

SEQ ID NO: 13634 - DNA, 33 bp, Homo sapiens
ggactttgtataatgctcttcactcctcccctt

SEQ ID NO: 13635 - DNA, 33 bp, Homo sapiens
ctgtaagagttcacatgatagctgagtggcgag

SEQ ID NO: 13636 - DNA, 33 bp, Homo sapiens
tcacataaattaccatgaagatgaaatgtcaga

SEQ ID NO: 13637 - DNA, 33 bp, Homo sapiens
gaaaaagaccagtaaatggactctccctagagc

SEQ ID NO: 13638 - DNA, 33 bp, Homo sapiens
ttagacccttgggtgcgacagcatttatagggt

SEQ ID NO: 13639 - DNA, 33 bp, Homo sapiens
tgatgacaggtagatgtcagaacggagcaaagt

SEQ ID NO: 13640 - DNA, 33 bp, Homo sapiens
gtctagagcttaggaagtatgtcacctgctctg

SEQ ID NO: 13641 - DNA, 33 bp, Homo sapiens
tgctctcctgaaatgatcacattaaaacaaaca

SEQ ID NO: 13642 - DNA, 33 bp, Homo sapiens
tgtgtatataaacacatggagaaccacctaact

SEQ ID NO: 13643 - DNA, 33 bp, Homo sapiens
tatgcgactttggataggggaagttcattgcat

SEQ ID NO: 13644 - DNA, 33 bp, Homo sapiens
gtatatgtagcccacagagtagactcacaggta

SEQ ID NO: 13645 - DNA, 33 bp, Homo sapiens
atcacttgcaaaaactgaaaaggtcaataatgc

SEQ ID NO: 13646 - DNA, 33 bp, Homo sapiens
tgttctcttcttgccatagttattgttgtaagg

SEQ ID NO: 13647 - DNA, 33 bp, Homo sapiens
atgcagagctactcaaggcatggaattctaaag

SEQ ID NO: 13648 - DNA, 33 bp, Homo sapiens
ttactcctacgaaagtgaaatggcaaaagtgta

SEQ ID NO: 13649 - DNA, 33 bp, Homo sapiens
aaagtgtacctttgaatcggagaagtcgggccg

SEQ ID NO: 13650 - DNA, 33 bp, Homo sapiens
ccaagtgcccgactagcagcaggtctgaaacag

SEQ ID NO: 13651 - DNA, 33 bp, Homo sapiens
tggctgctcagagtcatgtgtcagccttctccc

SEQ ID NO: 13652 - DNA, 51 bp, Homo sapiens
attagagcataaaaaaatgaaattatggtactgaaaagtatgatttctaaa

SEQ ID NO: 13653 - DNA, 51 bp, Homo sapiens
ccagaaagaacaagttattgacaaaggaaagggagttagaccatcgctgga

SEQ ID NO: 13654 - DNA, 33 bp, Homo sapiens
acaacaatagtaaaaatttatcactagcagatg

SEQ ID NO: 13655 - DNA, 33 bp, Homo sapiens
gattgttttattttacgcacctgctcatccata

SEQ ID NO: 13656 - DNA, 33 bp, Homo sapiens
tcattttaataagtcagtcatagtccacttgta

SEQ ID NO: 13657 - DNA, 33 bp, Homo sapiens
tattgttctctgtaattatgtcaccaggcctgc

SEQ ID NO: 13658 - DNA, 33 bp, Homo sapiens
tgggattctcttttcatctggttgcaacacttc

SEQ ID NO: 13659 - DNA, 33 bp, Homo sapiens
cccctctaatgtaagctgctccccattctacca

SEQ ID NO: 13660 - DNA, 33 bp, Homo sapiens
agccagggagttctgtgaaattatcttgtgttg

SEQ ID NO: 13661 - DNA, 33 bp, Homo sapiens
attcttccaaattctatgtccttgactacctat

SEQ ID NO: 13662 - DNA, 33 bp, Homo sapiens
tttcctacattgaacatctgttatacttgtaat

SEQ ID NO: 13663 - DNA, 33 bp, Homo sapiens
gaagccataaagaaaggattgatgtgtatctaa

SEQ ID NO: 13664 - DNA, 51 bp, Homo sapiens
atgccatgagttttcctttctgtactaagactctagcacagttctgagagg

SEQ ID NO: 13665 - DNA, 33 bp, Homo sapiens
aatttattttaaatgctaaagtagtggcctcta

SEQ ID NO: 13666 - DNA, 33 bp, Homo sapiens
ttagggtttgtatccagtgctgcgggagggacc

SEQ ID NO: 13667 - DNA, 33 bp, Homo sapiens
ctcaggtctttgtctatgttagcaagagccttc

SEQ ID NO: 13668 - DNA, 33 bp, Homo sapiens
ttacgtagccaaattatcattctctttcttata

SEQ ID NO: 13669 - DNA, 33 bp, Homo sapiens
aaattggaagtttaaggccgagcactgtggctc

SEQ ID NO: 13670 - DNA, 33 bp, Homo sapiens
tgcctagtaaaggtcatgattgctcatctttca

SEQ ID NO: 13671 - DNA, 33 bp, Homo sapiens
atctctaagcaaagcgtaatagacctgtaatca

SEQ ID NO: 13672 - DNA, 33 bp, Homo sapiens
tctttcagtatcttgctgcaaattctgttccaa

SEQ ID NO: 13673 - DNA, 33 bp, Homo sapiens
cccctggctgatcatatgttaagttgttatagc

SEQ ID NO: 13674 - DNA, 33 bp, Homo sapiens
cagctgtaagaagaaatgaagtactgatagata

SEQ ID NO: 13675 - DNA, 33 bp, Homo sapiens
gacgtgtcctcataaatggaggggaaatctgtg

SEQ ID NO: 13676 - DNA, 33 bp, Homo sapiens
tctactcattgataaattctgaagccataggga

SEQ ID NO: 13677 - DNA, 33 bp, Homo sapiens
tgaacctcgttgatacggacctcagtcatgaat

SEQ ID NO: 13678 - DNA, 33 bp, Homo sapiens
gatgggaaaagagcccggagaaggaaagcaaca

SEQ ID NO: 13679 - DNA, 33 bp, Homo sapiens
gaaatgttagctgtgatcttatacctagtgcct

SEQ ID NO: 13680 - DNA, 33 bp, Homo sapiens
cctgctaaggaaaatagaaactgagccgggagg

SEQ ID NO: 13681 - DNA, 33 bp, Homo sapiens
ctcaggggccagagaaggttgctgtcttgccca

SEQ ID NO: 13682 - DNA, 51 bp, Homo sapiens
catctagatctaaaaacaacactcattgaggtaggaaataaaaagtaacaa

SEQ ID NO: 13683 - DNA, 51 bp, Homo sapiens
tccttaaacttctcaatgtctccatttttctttttgttacaaggagttaac

SEQ ID NO: 13684 - DNA, 33 bp, Homo sapiens
ggcagtcctccttctctaggttacatgaggcag

SEQ ID NO: 13685 - DNA, 51 bp, Homo sapiens
gaaatgtgttggtaggtatggtctatgtgttatggtgtccagaagaggagc

SEQ ID NO: 13686 - DNA, 33 bp, Homo sapiens
ctcactggaatcccaaggactttataaaaatgc

SEQ ID NO: 13687 - DNA, 33 bp, Homo sapiens
attaactgtggcttatgaattgctgcttcagcc

SEQ ID NO: 13688 - DNA, 33 bp, Homo sapiens
atgtcctaagaacttagtaagcctttgttcaag

SEQ ID NO: 13689 - DNA, 51 bp, Homo sapiens
taacacgcaatattaccattttcaatctgtgttttcagaacagaattgttt

SEQ ID NO: 13690 - DNA, 33 bp, Homo sapiens
gaatatagcaagtcctcaaaagatgacagttat

SEQ ID NO: 13691 - DNA, 33 bp, Homo sapiens
tagtaaaaactacagctgataggaacccaggat

SEQ ID NO: 13692 - DNA, 33 bp, Homo sapiens
gaacgctggagctcatcaaactggagttcgtgt

SEQ ID NO: 13693 - DNA, 33 bp, Homo sapiens
tcccagatgtgtgggtgaaatcgtcactgacac

SEQ ID NO: 13694 - DNA, 33 bp, Homo sapiens
agagcttagattgtgagaggttgagaagcttcc

SEQ ID NO: 13695 - DNA, 33 bp, Homo sapiens
agtgatacctaaacccgaaggatgagtagaaat

SEQ ID NO: 13696 - DNA, 33 bp, Homo sapiens
aagaggtgagggagggtcaccacatactaattt

SEQ ID NO: 13697 - DNA, 33 bp, Homo sapiens
ggaaggagccaatagatggttggaggcagaaac

SEQ ID NO: 13698 - DNA, 33 bp, Homo sapiens
aatagggaaagagaaagggttgtgaaagatgga

SEQ ID NO: 13699 - DNA, 33 bp, Homo sapiens
aacatctcgctttcaatggcaaattataggcga

SEQ ID NO: 13700 - DNA, 33 bp, Homo sapiens
attctgattatgtttatgatcctcaaaaggctt

SEQ ID NO: 13701 - DNA, 33 bp, Homo sapiens
gaaacctagtaaaatttaatggaagcatgaaga

SEQ ID NO: 13702 - DNA, 33 bp, Homo sapiens
aaagtatcatcagtcatcagtgttaactggact

SEQ ID NO: 13703 - DNA, 33 bp, Homo sapiens
attcatttaatttgtagagcaacaccatgaatt

SEQ ID NO: 13704 - DNA, 33 bp, Homo sapiens
aggccgtcactggagcgagttcacagagcagta

SEQ ID NO: 13705 - DNA, 33 bp, Homo sapiens
cttgcaaattcacttaggttaggaaatcagttg

SEQ ID NO: 13706 - DNA, 33 bp, Homo sapiens
cacacaatgaaaggtatatttttgagccttctc

SEQ ID NO: 13707 - DNA, 33 bp, Homo sapiens
ctttgcattttgcatatggaaaaactgatctta

SEQ ID NO: 13708 - DNA, 33 bp, Homo sapiens
ttgacttgatattcacgcattctccctagctgt

SEQ ID NO: 13709 - DNA, 33 bp, Homo sapiens
gtaatagcattttgaggaagttagaatatcgca

SEQ ID NO: 13710 - DNA, 33 bp, Homo sapiens
aaagcctcaccacaggtcagaatggaaaccgtc

SEQ ID NO: 13711 - DNA, 33 bp, Homo sapiens
tcagcattggctcaaattgggctaagacattta

SEQ ID NO: 13712 - DNA, 51 bp, Homo sapiens
gtgagtgaaacaataacatggaatcggaaacctttggcccagatttcgttt

SEQ ID NO: 13713 - DNA, 51 bp, Homo sapiens
acccattgttgatcttcaggtttaggccatgttctactgttaactgctgcg

SEQ ID NO: 13714 - DNA, 51 bp, Homo sapiens
gatgtgcatgaatactgggagataatattgttggtagtaaaactaagggct

SEQ ID NO: 13715 - DNA, 33 bp, Homo sapiens
gcagtacttatcacactgtggcatgtgtttagc

SEQ ID NO: 13716 - DNA, 51 bp, Homo sapiens
tgcacactctgaaagaattgtagactcagttcagaagggactttattcttg

SEQ ID NO: 13717 - DNA, 33 bp, Homo sapiens
gagatacaatgatagagggaagttgaaccaatt

SEQ ID NO: 13718 - DNA, 33 bp, Homo sapiens
gggcatagcaaaaaaggcataaacagaggaagc

SEQ ID NO: 13719 - DNA, 33 bp, Homo sapiens
atggataaggtaatcagtgagttgtcaatgtac

SEQ ID NO: 13720 - DNA, 33 bp, Homo sapiens
tatttgattattcttagcaattcacacttctca

SEQ ID NO: 13721 - DNA, 33 bp, Homo sapiens
catgaatgctgtcagagcctttgtttttcctca

SEQ ID NO: 13722 - DNA, 33 bp, Homo sapiens
gaggcaaaagtgaaaggcagattatggtgagct

SEQ ID NO: 13723 - DNA, 51 bp, Homo sapiens
aggtactatctcatctaatccttactcaaagcacaagggggaatagctgac

SEQ ID NO: 13724 - DNA, 33 bp, Homo sapiens
ttaccagagatcaagagctcactttcaatttca

SEQ ID NO: 13725 - DNA, 33 bp, Homo sapiens
atttacaaagagaaaattagttcacctgaatga

SEQ ID NO: 13726 - DNA, 33 bp, Homo sapiens
attgatcgcagaaagctcaatagattgtgaaga

SEQ ID NO: 13727 - DNA, 33 bp, Homo sapiens
attacacaactggtaaggtagcaataaagaaat

SEQ ID NO: 13728 - DNA, 33 bp, Homo sapiens
gaggcaataggcagaatcacagaaggcagtcag

SEQ ID NO: 13729 - DNA, 51 bp, Homo sapiens
tgtctgctttcttgttcattcaatattgcctgtttttgaccactccatcac

SEQ ID NO: 13730 - DNA, 33 bp, Homo sapiens
tctttagacactccaatcttgtcatgggaaatt

SEQ ID NO: 13731 - DNA, 33 bp, Homo sapiens
tacacacagatgggaatgaaggtatagaggact

SEQ ID NO: 13732 - DNA, 33 bp, Homo sapiens
aaatactgcaaagttaggaatctgagcaatacg

SEQ ID NO: 13733 - DNA, 33 bp, Homo sapiens
gtgtgtctgtgagagacagtttgtatatgtgtc

SEQ ID NO: 13734 - DNA, 33 bp, Homo sapiens
tagaggtaggtagaggtcaggtggagagagata

SEQ ID NO: 13735 - DNA, 33 bp, Homo sapiens
ctaccctcaaccttgatgagcaaaccctgcctt

SEQ ID NO: 13736 - DNA, 33 bp, Homo sapiens
gtctggcgttccaccattagcaggtcactcaat

SEQ ID NO: 13737 - DNA, 33 bp, Homo sapiens
ttccttgtccacgttcgcccagctagatcaaat

SEQ ID NO: 13738 - DNA, 33 bp, Homo sapiens
aaaggaaaacaaaacagagcatagaatggaatc

SEQ ID NO: 13739 - DNA, 33 bp, Homo sapiens
tgcaatgactaacctatcccaagacaatagaga

SEQ ID NO: 13740 - DNA, 33 bp, Homo sapiens
atgccttcagctggtgtataaaggaatggcaat

SEQ ID NO: 13741 - DNA, 33 bp, Homo sapiens
attttcctgaacactatggaaggagggccgatt

SEQ ID NO: 13742 - DNA, 33 bp, Homo sapiens
aggacttgttcaaaaatgtattcctggcctgct

SEQ ID NO: 13743 - DNA, 33 bp, Homo sapiens
gaaatgatgtccaagatgggatatgaagggtta

SEQ ID NO: 13744 - DNA, 33 bp, Homo sapiens
gaaaacaacatgaaaatacagttaggattaaga

SEQ ID NO: 13745 - DNA, 33 bp, Homo sapiens
caagtcaaagtcctacgaaatgaccagcacatt

SEQ ID NO: 13746 - DNA, 33 bp, Homo sapiens
agtcctgcctgagcgagagataatgcaaagagc

SEQ ID NO: 13747 - DNA, 33 bp, Homo sapiens
aacaagaaagctgtgacagtttttgactcaaag

SEQ ID NO: 13748 - DNA, 33 bp, Homo sapiens
cagttaattccagatgtatgttgttaccagtgt

SEQ ID NO: 13749 - DNA, 33 bp, Homo sapiens
gcctaacgtatcctgcggacccaagttagaagc

SEQ ID NO: 13750 - DNA, 33 bp, Homo sapiens
accttctcaaggtcaccaagtgcatccggtata

SEQ ID NO: 13751 - DNA, 33 bp, Homo sapiens
cattccaggaactgtcgaaagggcaatgtgatt

SEQ ID NO: 13752 - DNA, 33 bp, Homo sapiens
attaaatttgaagaccgcaatgaagagagaaat

SEQ ID NO: 13753 - DNA, 33 bp, Homo sapiens
tgctcaaaagaaggcagtcaaatcttctggtaa

SEQ ID NO: 13754 - DNA, 33 bp, Homo sapiens
gcttttcacatattgccccctggaaaatggtcc

SEQ ID NO: 13755 - DNA, 33 bp, Homo sapiens
gagtatgaaaagtgagcataattgtgggaggca

SEQ ID NO: 13756 - DNA, 33 bp, Homo sapiens
tccttaaaagtgaagacggaggcggaagagaag

SEQ ID NO: 13757 - DNA, 33 bp, Homo sapiens
atccctattcataatctcaacctgcccctgtgt

SEQ ID NO: 13758 - DNA, 33 bp, Homo sapiens
tcaaagtgctttcaaagacatagtttggtcagt

SEQ ID NO: 13759 - DNA, 33 bp, Homo sapiens
tggtcagaccacacaagcctgagcagtttggga

SEQ ID NO: 13760 - DNA, 33 bp, Homo sapiens
ttgtcaaaacaatccagatctatttcaacagct

SEQ ID NO: 13761 - DNA, 33 bp, Homo sapiens
caccactggcctatgataaccttacagttcatc

SEQ ID NO: 13762 - DNA, 33 bp, Homo sapiens
cttttcgggtgcaggggcacgttttgactttct

SEQ ID NO: 13763 - DNA, 33 bp, Homo sapiens
aataatgtatgctacagcacaaagcatttatat

SEQ ID NO: 13764 - DNA, 33 bp, Homo sapiens
ccacctcctgagcttagagaccattggaactcg

SEQ ID NO: 13765 - DNA, 33 bp, Homo sapiens
gcttttggaggatggacggagattgtaaattga

SEQ ID NO: 13766 - DNA, 33 bp, Homo sapiens
cagtgtcatataaggaccccgttcaaaaccacc

SEQ ID NO: 13767 - DNA, 33 bp, Homo sapiens
aaagtgctattaacccgatgataaagattatga

SEQ ID NO: 13768 - DNA, 33 bp, Homo sapiens
catggtcagaagaggggcatttcctctacttca

SEQ ID NO: 13769 - DNA, 33 bp, Homo sapiens
tctgaaaggtgttgaatgtaattaacttgtccc

SEQ ID NO: 13770 - DNA, 33 bp, Homo sapiens
atatcagataagggacgatgacgctgaggtggc

SEQ ID NO: 13771 - DNA, 33 bp, Homo sapiens
cattcttatagactagcaggagcataggacaag

SEQ ID NO: 13772 - DNA, 33 bp, Homo sapiens
ctttgtaaattccacatgaaaaagttcaaaagc

SEQ ID NO: 13773 - DNA, 33 bp, Homo sapiens
tcacccctccctggtatcacagtcaccattgtc

SEQ ID NO: 13774 - DNA, 33 bp, Homo sapiens
gcttgttttagttttcgctactagctgtgtgac

SEQ ID NO: 13775 - DNA, 33 bp, Homo sapiens
tgactcctgtcttacagcgtcaacctctccggc

SEQ ID NO: 13776 - DNA, 33 bp, Homo sapiens
actgatgattttctccgagaagctctccttttc

SEQ ID NO: 13777 - DNA, 33 bp, Homo sapiens
acccagactcctgaccggcaaaaaccgcgagat

SEQ ID NO: 13778 - DNA, 51 bp, Homo sapiens
ataaaaatcacttgagcagtttgtttaaaacccgtgttctgatttggcata

SEQ ID NO: 13779 - DNA, 33 bp, Homo sapiens
ttcaaaagctattcaggaccgtggcaaccgcta

SEQ ID NO: 13780 - DNA, 33 bp, Homo sapiens
gagacccacaggcccagtcatgagaggctagtg

SEQ ID NO: 13781 - DNA, 33 bp, Homo sapiens
cgatgccacattcccagtggaagaagatgctaa

SEQ ID NO: 13782 - DNA, 33 bp, Homo sapiens
aagactgtgaaaggtatgattccagaaaagaag

SEQ ID NO: 13783 - DNA, 33 bp, Homo sapiens
aatgtcgtctgcccaggaatgcagagtgtagat

SEQ ID NO: 13784 - DNA, 33 bp, Homo sapiens
tttgaaacgaagtctctctctactgccgaggct

SEQ ID NO: 13785 - DNA, 33 bp, Homo sapiens
gtgagagtctgtttcagataaagaagtgccagg

SEQ ID NO: 13786 - DNA, 33 bp, Homo sapiens
ccaatgtcaaactacatgatagccgcctccaga

SEQ ID NO: 13787 - DNA, 33 bp, Homo sapiens
ttccttgtgggcttcatgtcctactttacagag

SEQ ID NO: 13788 - DNA, 33 bp, Homo sapiens
gggagatgccagtgaatgggtctgccagggatc

SEQ ID NO: 13789 - DNA, 33 bp, Homo sapiens
atttaaagaaatgcaagatgaattcacacacac

SEQ ID NO: 13790 - DNA, 33 bp, Homo sapiens
atgtttaattctgttatggcacctgctccttag

SEQ ID NO: 13791 - DNA, 33 bp, Homo sapiens
tttgttaaggaaactatgaattccctgacaaaa

SEQ ID NO: 13792 - DNA, 33 bp, Homo sapiens
acatacgaagtaggaagtaagcagaaagatttc

SEQ ID NO: 13793 - DNA, 33 bp, Homo sapiens
agatgtcagttttcccgcatgactgatgtcact

SEQ ID NO: 13794 - DNA, 33 bp, Homo sapiens
ctgagacgtacgctcagacatcatgcatgagaa

SEQ ID NO: 13795 - DNA, 33 bp, Homo sapiens
atgaaatgaacagtccgactggcctacttgctc

SEQ ID NO: 13796 - DNA, 33 bp, Homo sapiens
atgtaagcagaaactatgtcttcatccccactc

SEQ ID NO: 13797 - DNA, 33 bp, Homo sapiens
tgagtctggcaaccattaaggtactgggccctc

SEQ ID NO: 13798 - DNA, 33 bp, Homo sapiens
ctgcctggtctcactagggccatccgaggtggg

SEQ ID NO: 13799 - DNA, 33 bp, Homo sapiens
gactgctttgagagaggaggattaggatgctgg

SEQ ID NO: 13800 - DNA, 33 bp, Homo sapiens
cccacgaatctccacatcagcaatggcaagact

SEQ ID NO: 13801 - DNA, 33 bp, Homo sapiens
gtttcaacctctgtcatcagggaattactcaaa

SEQ ID NO: 13802 - DNA, 33 bp, Homo sapiens
aaacacgtgagaggaagcacaggccgggtgtga

SEQ ID NO: 13803 - DNA, 33 bp, Homo sapiens
tccaggctccaagctcgctattggcaggcactg

SEQ ID NO: 13804 - DNA, 51 bp, Homo sapiens
taaaaataaaagaccaagaacacatgagctggaatgattaatatgttaaac

SEQ ID NO: 13805 - DNA, 33 bp, Homo sapiens
agggtgtgggtagtaagctgcaggaaactgaca

SEQ ID NO: 13806 - DNA, 33 bp, Homo sapiens
catagtaggtgctcaatgaactcagattgaact

SEQ ID NO: 13807 - DNA, 33 bp, Homo sapiens
ggacctcatgctaagatgcgcaacaaaattagg

SEQ ID NO: 13808 - DNA, 33 bp, Homo sapiens
ttctatccaggatccagaagtttctcctgatgg

SEQ ID NO: 13809 - DNA, 33 bp, Homo sapiens
catcctcctcacgtaagtctctacggaaaagcc

SEQ ID NO: 13810 - DNA, 33 bp, Homo sapiens
aaggtgttcagacccagggtactgcatctcttc

SEQ ID NO: 13811 - DNA, 33 bp, Homo sapiens
gcgtcttcgtacatcagtctctgtgcacagcgg

SEQ ID NO: 13812 - DNA, 33 bp, Homo sapiens
ttgaggccacctgtgggaatggaagactgtgga

SEQ ID NO: 13813 - DNA, 33 bp, Homo sapiens
gatccaacagacaccctccaagatttaatattt

SEQ ID NO: 13814 - DNA, 33 bp, Homo sapiens
ttgacttctatagttaggttggcatttttataa

SEQ ID NO: 13815 - DNA, 33 bp, Homo sapiens
tgaaaggtatctattatagtcctactggtgttt

SEQ ID NO: 13816 - DNA, 33 bp, Homo sapiens
ggtgagtggaggaaaatctaggtcgtggaaatg

SEQ ID NO: 13817 - DNA, 33 bp, Homo sapiens
cttaagttgtgaggcattcggtacatagattga

SEQ ID NO: 13818 - DNA, 33 bp, Homo sapiens
gtatctccattgcttgtatctggtattgttatc

SEQ ID NO: 13819 - DNA, 33 bp, Homo sapiens
agtggagaagccaataggcaaacccaagtccac

SEQ ID NO: 13820 - DNA, 33 bp, Homo sapiens
agctacgacagattgattagagctggcatccaa

SEQ ID NO: 13821 - DNA, 33 bp, Homo sapiens
aaataaaaattaaaaggattcagcctgcccagt

SEQ ID NO: 13822 - DNA, 33 bp, Homo sapiens
gttgtggtatcttttccaatcaaccctaagcaa

SEQ ID NO: 13823 - DNA, 33 bp, Homo sapiens
tgttccccttgtacaccgagatacggacaatag

SEQ ID NO: 13824 - DNA, 51 bp, Homo sapiens
acctgccagaggaaaaaggctctaggtattattaacagcagttgtactatg

SEQ ID NO: 13825 - DNA, 33 bp, Homo sapiens
ggagtgagcagcatccgaccgccgcctctgaca

SEQ ID NO: 13826 - DNA, 51 bp, Homo sapiens
cctcagttatagactacatgcatcattattgagtactgattattaagctat

SEQ ID NO: 13827 - DNA, 33 bp, Homo sapiens
tgtgtgtgtgccttcagaggtcctcaggtcagg

SEQ ID NO: 13828 - DNA, 33 bp, Homo sapiens
gaatgagccagagttcgaatgcaagatgaaacg

SEQ ID NO: 13829 - DNA, 33 bp, Homo sapiens
ggtggtattttgtgcctctcaccagctttccct

SEQ ID NO: 13830 - DNA, 33 bp, Homo sapiens
tccagtcaaccactacggagaggaaaaacattc

SEQ ID NO: 13831 - DNA, 33 bp, Homo sapiens
catgtcagactgtccaggtgcaaattctggatt

SEQ ID NO: 13832 - DNA, 33 bp, Homo sapiens
cctaaatttccctacatgtcagacttcccagtt

SEQ ID NO: 13833 - DNA, 33 bp, Homo sapiens
catgtaccatcatacatagctatttttttgtat

SEQ ID NO: 13834 - DNA, 33 bp, Homo sapiens
gctgcctcctacttcatgagctggcatttagca

SEQ ID NO: 13835 - DNA, 33 bp, Homo sapiens
gggaaaagcgcttccagaaaagttgagcctgtc

SEQ ID NO: 13836 - DNA, 33 bp, Homo sapiens
cttattttaagatctcgcaatgccagcaacggc

SEQ ID NO: 13837 - DNA, 33 bp, Homo sapiens
gtgtggacttttagaagtgatactgctctgggt

SEQ ID NO: 13838 - DNA, 33 bp, Homo sapiens
cgtgggtataaccggatgaaacctgtgtgtgca

SEQ ID NO: 13839 - DNA, 33 bp, Homo sapiens
actctctccagttctacgactcctctctacatc

SEQ ID NO: 13840 - DNA, 33 bp, Homo sapiens
aggtagctgccctggcgtatttaacaacatcag

SEQ ID NO: 13841 - DNA, 33 bp, Homo sapiens
gggtaagactgagcgagggagataaaggaaatt

SEQ ID NO: 13842 - DNA, 33 bp, Homo sapiens
aaatccaacactgtcatgataagagcactcaat

SEQ ID NO: 13843 - DNA, 33 bp, Homo sapiens
gaccctgtaacggccagcgttgcagtctgaggt

SEQ ID NO: 13844 - DNA, 33 bp, Homo sapiens
aaggtgtggataagggcactactgtacgtgact

SEQ ID NO: 13845 - DNA, 33 bp, Homo sapiens
ccaagtttgggaaaccggcaaggtgagtattgg

SEQ ID NO: 13846 - DNA, 33 bp, Homo sapiens
gcctcttcttataatagggacaccagtcacatt

SEQ ID NO: 13847 - DNA, 33 bp, Homo sapiens
gttgtatctgtgaaaatttaaagtattcacact

SEQ ID NO: 13848 - DNA, 33 bp, Homo sapiens
ttatgttttaacgagagaagatcagcttgtgta

SEQ ID NO: 13849 - DNA, 33 bp, Homo sapiens
cactcccctcctgtaatgtgctgagctctgacc

SEQ ID NO: 13850 - DNA, 33 bp, Homo sapiens
agatttccagttcccctctgagttctggcccat

SEQ ID NO: 13851 - DNA, 33 bp, Homo sapiens
taaacctcctttaccatacaaactcgagtgtct

SEQ ID NO: 13852 - DNA, 33 bp, Homo sapiens
agagctggggttcgaagctagcatttcaggcac

SEQ ID NO: 13853 - DNA, 33 bp, Homo sapiens
cctttggacaaacctttaaaatctgtctctgga

SEQ ID NO: 13854 - DNA, 33 bp, Homo sapiens
gcagccatgtggtggacggggatggaactcagt

SEQ ID NO: 13855 - DNA, 33 bp, Homo sapiens
ccctgttgtaaggacctgattaattacactgga

SEQ ID NO: 13856 - DNA, 33 bp, Homo sapiens
ttgttgatatgtgaaatgtggtctgtgatgtcc

SEQ ID NO: 13857 - DNA, 33 bp, Homo sapiens
gtgactcccagaggtattaaggaaaggagaaag

SEQ ID NO: 13858 - DNA, 33 bp, Homo sapiens
ggcacctgcccaattcgcctggcagattcaggc

SEQ ID NO: 13859 - DNA, 33 bp, Homo sapiens
cggccatgtgctacacgctacgcaaggctcctc

SEQ ID NO: 13860 - DNA, 33 bp, Homo sapiens
gagattgtaggctttctatcacgttgttattga

SEQ ID NO: 13861 - DNA, 33 bp, Homo sapiens
gacacgtaacatggccggaagttatcggcagaa

SEQ ID NO: 13862 - DNA, 33 bp, Homo sapiens
cacaggctacttcatctagaccagaaaggactc

SEQ ID NO: 13863 - DNA, 33 bp, Homo sapiens
atgcactgtggcctcatgcttcagccattcact

SEQ ID NO: 13864 - DNA, 33 bp, Homo sapiens
aagtcgtgccagtagctgagcaaagctggtatt

SEQ ID NO: 13865 - DNA, 33 bp, Homo sapiens
gcctttccaagactcatagaacgtgcggtagag

SEQ ID NO: 13866 - DNA, 33 bp, Homo sapiens
tgccccgttagatcaatcagatgcactccagag

SEQ ID NO: 13867 - DNA, 33 bp, Homo sapiens
catttttatcctcagagatgaccatactcatta

SEQ ID NO: 13868 - DNA, 33 bp, Homo sapiens
tcaaaaggccagaaaagtccaggagtcaggaag

SEQ ID NO: 13869 - DNA, 33 bp, Homo sapiens
gctgaaaccgcagctgtaaaagaaatcatgttt

SEQ ID NO: 13870 - DNA, 33 bp, Homo sapiens
agaggtggcgacaacatgaagcccattggtgga

SEQ ID NO: 13871 - DNA, 33 bp, Homo sapiens
cttactgaggtcatcagtcagctattttcaaat

SEQ ID NO: 13872 - DNA, 33 bp, Homo sapiens
acccctgcacaactcatctgatggaaccaagtg

SEQ ID NO: 13873 - DNA, 33 bp, Homo sapiens
tggccatccaagttcggaggcgacgtggtaggg

SEQ ID NO: 13874 - DNA, 33 bp, Homo sapiens
tgcaggggaacgataatgccccagacatgggtt

SEQ ID NO: 13875 - DNA, 33 bp, Homo sapiens
caggccttgggtaatcgcatcactattttggat

SEQ ID NO: 13876 - DNA, 33 bp, Homo sapiens
gtgatgcagttaacccgatcttctactagtgtc

SEQ ID NO: 13877 - DNA, 33 bp, Homo sapiens
aagttaagcataaaattactgtacgacccagca

SEQ ID NO: 13878 - DNA, 51 bp, Homo sapiens
acatataaatatctgatgaataggatacaaaatgtgaaatcatctgagtaa

SEQ ID NO: 13879 - DNA, 33 bp, Homo sapiens
ctctgaatcagaaacctggaaagaaaaagaatg

SEQ ID NO: 13880 - DNA, 51 bp, Homo sapiens
ctgctgtgaatctattacctgtaactggtccttgtctcctctaagcctgtt

SEQ ID NO: 13881 - DNA, 33 bp, Homo sapiens
tggcagcaaaatgccagtctttccatcaagatg

SEQ ID NO: 13882 - DNA, 33 bp, Homo sapiens
agcagatcaagcagcagatcagcttgcacgaag

SEQ ID NO: 13883 - DNA, 33 bp, Homo sapiens
ttcacattatctttaaccatatgtctgtggctt

SEQ ID NO: 13884 - DNA, 33 bp, Homo sapiens
tcatttcataaattcctgaagacagtgaaaggc

SEQ ID NO: 13885 - DNA, 33 bp, Homo sapiens
aagctatgtggctttagagatcataaaaccagt

SEQ ID NO: 13886 - DNA, 33 bp, Homo sapiens
gaattttgtgtatgcatgtatcttaattaacac

SEQ ID NO: 13887 - DNA, 33 bp, Homo sapiens
ccaaagaagcttcacctaatttagcacatatat

SEQ ID NO: 13888 - DNA, 33 bp, Homo sapiens
gtgtcttgactgaaaactgaaacgaatgattta

SEQ ID NO: 13889 - DNA, 33 bp, Homo sapiens
atccatttcacacagcgacatagagagagttct

SEQ ID NO: 13890 - DNA, 33 bp, Homo sapiens
cttacctgtgagcttagggaacaggagttaatt

SEQ ID NO: 13891 - DNA, 33 bp, Homo sapiens
gagtgaagcaaattaccaaagcacacagcatgc

SEQ ID NO: 13892 - DNA, 33 bp, Homo sapiens
ccaatggagcaagtacgaacatttactgccgat

SEQ ID NO: 13893 - DNA, 33 bp, Homo sapiens
gcaacgagatctctgatagtaatgggtaaccct

SEQ ID NO: 13894 - DNA, 33 bp, Homo sapiens
gagttactggtttgcattgaacagcctggtgga

SEQ ID NO: 13895 - DNA, 33 bp, Homo sapiens
tgtttgatatgaaagaggagatttttaaccaga

SEQ ID NO: 13896 - DNA, 33 bp, Homo sapiens
tgcacagaaggaaagcgaagggtgcatgcggct

SEQ ID NO: 13897 - DNA, 51 bp, Homo sapiens
cgtagatggtgattctaaggagaacgcttgtctctttttatattaatctcc

SEQ ID NO: 13898 - DNA, 33 bp, Homo sapiens
agccactaggaaccgatgtagaaattatagaaa

SEQ ID NO: 13899 - DNA, 33 bp, Homo sapiens
gattcttgaaatacaggagactgattattaagg

SEQ ID NO: 13900 - DNA, 33 bp, Homo sapiens
tgtttctatctttcacgaagcttacataattct

SEQ ID NO: 13901 - DNA, 33 bp, Homo sapiens
tttaattgtattgataggaaatctgaggagaaa

SEQ ID NO: 13902 - DNA, 33 bp, Homo sapiens
actgctgaaaaaactagctgcaaatttattgaa

SEQ ID NO: 13903 - DNA, 33 bp, Homo sapiens
aggaactgtggcatccgagaagttttcaaagca

SEQ ID NO: 13904 - DNA, 33 bp, Homo sapiens
ctcataaaagtcgccagataaatgaaaattcga

SEQ ID NO: 13905 - DNA, 33 bp, Homo sapiens
aagtgtctttgaccaggatagtaacttgcaaat

SEQ ID NO: 13906 - DNA, 33 bp, Homo sapiens
gtgactgtggaaaacagaccagatattcaagtt

SEQ ID NO: 13907 - DNA, 33 bp, Homo sapiens
tgatgctcttcactcattaagtaaatttgagtt

SEQ ID NO: 13908 - DNA, 33 bp, Homo sapiens
agtgattcaaccaaatgatgccaaaatcccaga

SEQ ID NO: 13909 - DNA, 33 bp, Homo sapiens
tgcctaggtttttcaattcctctccagggacag

SEQ ID NO: 13910 - DNA, 33 bp, Homo sapiens
tttatagattccagcaggagagcgacattctca

SEQ ID NO: 13911 - DNA, 33 bp, Homo sapiens
taatcttgggggtctatagcgtgctggtcattc

SEQ ID NO: 13912 - DNA, 33 bp, Homo sapiens
aactgcctatccttaattattgcaatccaaagg

SEQ ID NO: 13913 - DNA, 33 bp, Homo sapiens
atgaggactaaacgcagcagtgggtatgaaggg

SEQ ID NO: 13914 - DNA, 33 bp, Homo sapiens
tagagattcataaagcgagtgaaataatgttat

SEQ ID NO: 13915 - DNA, 33 bp, Homo sapiens
gtgtgacacccggtaatgtgtccagttgagaaa

SEQ ID NO: 13916 - DNA, 33 bp, Homo sapiens
ccttcttctgctcttatctaaatgcgttccgag

SEQ ID NO: 13917 - DNA, 33 bp, Homo sapiens
agtctcttcctctgtcgcatgagagttaatctt

SEQ ID NO: 13918 - DNA, 33 bp, Homo sapiens
acttctcacccaaaagcatctgctattttctct

SEQ ID NO: 13919 - DNA, 33 bp, Homo sapiens
gggcttgcagactggagcagccatgctaaagaa

SEQ ID NO: 13920 - DNA, 51 bp, Homo sapiens
gtccaaattatttgtccaacagcacgtagttaatatgaagtagagctagat

SEQ ID NO: 13921 - DNA, 33 bp, Homo sapiens
catccattgagttgcagataatccagtaaccat

SEQ ID NO: 13922 - DNA, 33 bp, Homo sapiens
cccattagactcaaaatggtcccgcttatatat

SEQ ID NO: 13923 - DNA, 33 bp, Homo sapiens
attttttgaaaattggtacgtgcataatatatg

SEQ ID NO: 13924 - DNA, 33 bp, Homo sapiens
aactttcattttttgatgatgtgagggccaaga

SEQ ID NO: 13925 - DNA, 33 bp, Homo sapiens
tccatagacttgcatcgagagaagaaggagagg

SEQ ID NO: 13926 - DNA, 33 bp, Homo sapiens
agagcaacagctaccaccacaaaatgaaagctc

SEQ ID NO: 13927 - DNA, 33 bp, Homo sapiens
tcaagtttctgcttccgaaaccagaaagaagta

SEQ ID NO: 13928 - DNA, 33 bp, Homo sapiens
atgcatatgaacaagggccaataatttaaacgt

SEQ ID NO: 13929 - DNA, 33 bp, Homo sapiens
gcccacaatctttccttaaactatgtattcctt

SEQ ID NO: 13930 - DNA, 33 bp, Homo sapiens
gagaactactgttacatcatcttatttaagtgt

SEQ ID NO: 13931 - DNA, 33 bp, Homo sapiens
catcctgtgtaaatacgcactttaaggaactga

SEQ ID NO: 13932 - DNA, 33 bp, Homo sapiens
attctgatgatctgaattgtgtttgagagaaat

SEQ ID NO: 13933 - DNA, 33 bp, Homo sapiens
ctctcaacgatattcagaagtaaactctgtttc

SEQ ID NO: 13934 - DNA, 33 bp, Homo sapiens
taatctgctgtagaaatttgtcagcttctttct

SEQ ID NO: 13935 - DNA, 33 bp, Homo sapiens
aggtcagaaaggtggagagaaagagacaaagga

SEQ ID NO: 13936 - DNA, 33 bp, Homo sapiens
gtagataaaagacagaggattccattcaccaaa

SEQ ID NO: 13937 - DNA, 33 bp, Homo sapiens
agaatcttcacgagagtcaaccctgcagttatg

SEQ ID NO: 13938 - DNA, 33 bp, Homo sapiens
caatggaccttaaatctcagtcttgttaatgct

SEQ ID NO: 13939 - DNA, 33 bp, Homo sapiens
ggagtgggaccttctagcacgttcccaatggtg

SEQ ID NO: 13940 - DNA, 33 bp, Homo sapiens
tcccccaccagatgcgtcattcaagttgtaaag

SEQ ID NO: 13941 - DNA, 33 bp, Homo sapiens
gcaaacagcagactccgagaccactggaggcct

SEQ ID NO: 13942 - DNA, 33 bp, Homo sapiens
atcgagtgtaggaaaatgaaagacaggtgcagg

SEQ ID NO: 13943 - DNA, 33 bp, Homo sapiens
acaccaaggaagttcaggcatctgggttgattt

SEQ ID NO: 13944 - DNA, 33 bp, Homo sapiens
ccctcctagatatgaatgaagacacatgtggcc

SEQ ID NO: 13945 - DNA, 33 bp, Homo sapiens
cagacattgactgcacggaaaagccttcttggg

SEQ ID NO: 13946 - DNA, 51 bp, Homo sapiens
atcaaaacaagaggttccctgatgaggaatgacaggagataaggctggaaa

SEQ ID NO: 13947 - DNA, 51 bp, Homo sapiens
actgcagcctgttttattatcatgatgttttgcttctagttatgtgctttt

SEQ ID NO: 13948 - DNA, 33 bp, Homo sapiens
ctgcataccagtcgggtagaaaaacaatcaaca

SEQ ID NO: 13949 - DNA, 33 bp, Homo sapiens
ctttatccataaatgcggatggcacggtgcctg

SEQ ID NO: 13950 - DNA, 51 bp, Homo sapiens
cctactctttctcctctctttgctatctcaatgaatggcaccccatccttc

SEQ ID NO: 13951 - DNA, 33 bp, Homo sapiens
tacatatggttgataaggtgaagaattacaaaa

SEQ ID NO: 13952 - DNA, 33 bp, Homo sapiens
ttaatctcccctgaaagcacctgtcgtgatgcc

SEQ ID NO: 13953 - DNA, 33 bp, Homo sapiens
tccaagaccactcagatccttggataagtcacc

SEQ ID NO: 13954 - DNA, 33 bp, Homo sapiens
taacgtgttggaagtctccataaggcacatgag

SEQ ID NO: 13955 - DNA, 33 bp, Homo sapiens
ctctgggacgtttgcatgaggaacattccgaac

SEQ ID NO: 13956 - DNA, 33 bp, Homo sapiens
catacatgcagacaaaggcttataaagaaagtt

SEQ ID NO: 13957 - DNA, 33 bp, Homo sapiens
agccaaacactttactgagaaaaacatatccaa

SEQ ID NO: 13958 - DNA, 33 bp, Homo sapiens
aggtgaaaaatattcagtctcaggcccttcaca

SEQ ID NO: 13959 - DNA, 33 bp, Homo sapiens
tggtgcagttcaaatctaggttcatcaagggtc

SEQ ID NO: 13960 - DNA, 33 bp, Homo sapiens
cgtccaatgagaatcatgtgaaagcattgaaag

SEQ ID NO: 13961 - DNA, 33 bp, Homo sapiens
attccgaggtcctggggagtagtttaggaacag

SEQ ID NO: 13962 - DNA, 33 bp, Homo sapiens
caatgacggtcacaactgggccagcctcttact

SEQ ID NO: 13963 - DNA, 51 bp, Homo sapiens
acaaatcttgatttatttttggtcatattatcttaatcattgagttggctt

SEQ ID NO: 13964 - DNA, 33 bp, Homo sapiens
actctttggtgtagacgggaggagtccttaata

SEQ ID NO: 13965 - DNA, 33 bp, Homo sapiens
tgaatcttcaggggactccattctttgcagggc

SEQ ID NO: 13966 - DNA, 33 bp, Homo sapiens
ggggccgtcgcacagactaaatagaaaatgata

SEQ ID NO: 13967 - DNA, 33 bp, Homo sapiens
ggatgtaaacctgaaatgtctgggacaggtctc

SEQ ID NO: 13968 - DNA, 33 bp, Homo sapiens
tgtgctgaagttttcagcgcagtgcctaagcct

SEQ ID NO: 13969 - DNA, 33 bp, Homo sapiens
gcccactacagaaggggcaaagaacacatttta

SEQ ID NO: 13970 - DNA, 51 bp, Homo sapiens
tacattctaaacagtttgaaaagacgagtctcaaagagggacctctacgtg

SEQ ID NO: 13971 - DNA, 33 bp, Homo sapiens
aacttttaacctaccattgcatttagaataact

SEQ ID NO: 13972 - DNA, 33 bp, Homo sapiens
caggttttatcagtgagtaagttgccatgaagg

SEQ ID NO: 13973 - DNA, 33 bp, Homo sapiens
cttccactggacaagatggcagatgttgtcact

SEQ ID NO: 13974 - DNA, 33 bp, Homo sapiens
tgcttctgtacaactttaagcgttgtctgggat

SEQ ID NO: 13975 - DNA, 33 bp, Homo sapiens
gcagttaagtacgctagcaagtctaactctgac

SEQ ID NO: 13976 - DNA, 33 bp, Homo sapiens
caatctgacattgtcatgttcggacaaaaaagt

SEQ ID NO: 13977 - DNA, 33 bp, Homo sapiens
ggatgcagctctgaaaccattcctggtccttgt

SEQ ID NO: 13978 - DNA, 33 bp, Homo sapiens
ctgtatgtctcaaggtgaatcaggtagaaaggt

SEQ ID NO: 13979 - DNA, 33 bp, Homo sapiens
gctacgggaatttagcggagaacgaagtcacct

SEQ ID NO: 13980 - DNA, 33 bp, Homo sapiens
gaaacgcttccaaaaagtgcaggaatgatttct

SEQ ID NO: 13981 - DNA, 33 bp, Homo sapiens
agagtaagggctaaacccctggcttatggagtc

SEQ ID NO: 13982 - DNA, 33 bp, Homo sapiens
gcccatgcctgaaacctggcaagcactcagttt

SEQ ID NO: 13983 - DNA, 33 bp, Homo sapiens
taagttttgcaacagagaaaagtcaatataatg

SEQ ID NO: 13984 - DNA, 33 bp, Homo sapiens
gtaggtgacacgctggtcagggatgaagatttc

SEQ ID NO: 13985 - DNA, 51 bp, Homo sapiens
caccccgtcttgggccaatccttcagcaacgcccgtgatctccatgctggc

SEQ ID NO: 13986 - DNA, 33 bp, Homo sapiens
ccctttctcagtcagatcagtaacatcaaaagt

SEQ ID NO: 13987 - DNA, 33 bp, Homo sapiens
agatctttataagtcattgaaccagtattttcc

SEQ ID NO: 13988 - DNA, 33 bp, Homo sapiens
ctcatttcatttaatccctgtaaaacaacctct

SEQ ID NO: 13989 - DNA, 33 bp, Homo sapiens
tattcaagcttaccaagaacttttcacatttgt

SEQ ID NO: 13990 - DNA, 51 bp, Homo sapiens
actgttaaacttttggactagtcactcttgtggtccttagtaagctggtaa

SEQ ID NO: 13991 - DNA, 33 bp, Homo sapiens
catatttgtaaggtacgaggcgtataaaggttt

SEQ ID NO: 13992 - DNA, 33 bp, Homo sapiens
ctttgtgtgggcagaaggttttattattattat

SEQ ID NO: 13993 - DNA, 33 bp, Homo sapiens
atctgtttagggactgcaattacaagactattt

SEQ ID NO: 13994 - DNA, 33 bp, Homo sapiens
aagcatgagcttaggattatctgtgatcacctt

SEQ ID NO: 13995 - DNA, 33 bp, Homo sapiens
tccttgggcatcatgatcattgtaatctttctt

SEQ ID NO: 13996 - DNA, 33 bp, Homo sapiens
agtcactaaggaaaaagtcagagatactaggag

SEQ ID NO: 13997 - DNA, 51 bp, Homo sapiens
ggtctagcttggaatgggaaaagcattgaagctcgaaagtggtaaagaaaa

SEQ ID NO: 13998 - DNA, 33 bp, Homo sapiens
ccagcgcagtagccaatcaaagaatacgtatat

SEQ ID NO: 13999 - DNA, 33 bp, Homo sapiens
ggctctgtcctttaagcaaatctagtgtgtgtc

SEQ ID NO: 14000 - DNA, 51 bp, Homo sapiens
attcctatttaaatcgtgttacacacaaaaaattgaattttaaaaaccatg

SEQ ID NO: 14001 - DNA, 33 bp, Homo sapiens
ctatagtttgattccatgagagagtgggtgagg

SEQ ID NO: 14002 - DNA, 33 bp, Homo sapiens
ccaagatcacaagttagatgttagctcccctat

SEQ ID NO: 14003 - DNA, 33 bp, Homo sapiens
gtagagacggttccaatgtgtcttcagtaacca

SEQ ID NO: 14004 - DNA, 33 bp, Homo sapiens
tccctgtcccttagaacaacaggagcagaagat

SEQ ID NO: 14005 - DNA, 33 bp, Homo sapiens
gattgaagaaggttaagaaatcccagatattag

SEQ ID NO: 14006 - DNA, 33 bp, Homo sapiens
acttccaatctggagaggatcaaatgaggctgc

SEQ ID NO: 14007 - DNA, 33 bp, Homo sapiens
gcaattggtgttcctcgaaaaaggtgtctgtgg

SEQ ID NO: 14008 - DNA, 33 bp, Homo sapiens
tcaacactgggacttatgttaccaaagtaaggg

SEQ ID NO: 14009 - DNA, 33 bp, Homo sapiens
attagaagcaacaaaggccagagaaggttgtca

SEQ ID NO: 14010 - DNA, 33 bp, Homo sapiens
tggtaggtactttgaatcattttgtgccaatta

SEQ ID NO: 14011 - DNA, 33 bp, Homo sapiens
ctgtaagattcaatgatgtctctggtgcagcag

SEQ ID NO: 14012 - DNA, 33 bp, Homo sapiens
agccttggaggaactctgaggaatggttaaaag

SEQ ID NO: 14013 - DNA, 33 bp, Homo sapiens
aaaagccattgatagcgaagtaaagtgagattg

SEQ ID NO: 14014 - DNA, 33 bp, Homo sapiens
aggaaagtaacaatatgataactggatgtgttc

SEQ ID NO: 14015 - DNA, 33 bp, Homo sapiens
ctattcctaaaactgagggatgagatattatcc

SEQ ID NO: 14016 - DNA, 33 bp, Homo sapiens
taggtagaattgtccctatttaccatcatatcc

SEQ ID NO: 14017 - DNA, 33 bp, Homo sapiens
tcgtgttaacactccttaactttcttggtcata

SEQ ID NO: 14018 - DNA, 33 bp, Homo sapiens
gtgtagccttcagaacgctaatttacaggatgt

SEQ ID NO: 14019 - DNA, 33 bp, Homo sapiens
gttatctttaggccaatctgatcctgctatgag

SEQ ID NO: 14020 - DNA, 33 bp, Homo sapiens
taatttagcatgcaaggcagagtgcagcactgg

SEQ ID NO: 14021 - DNA, 33 bp, Homo sapiens
aggagatcaatgggaaggctgttacagtgactc

SEQ ID NO: 14022 - DNA, 51 bp, Homo sapiens
tcactttgctgtaagaataaatcacgagaaaatgtgcaacttggaggttct

SEQ ID NO: 14023 - DNA, 33 bp, Homo sapiens
tgcccagggaccagtctagaagattacaagagg

SEQ ID NO: 14024 - DNA, 33 bp, Homo sapiens
tgttcaaccgatatacggagtgttttataaacc

SEQ ID NO: 14025 - DNA, 33 bp, Homo sapiens
cttccactctccaacatgacaaggtcaatcaaa

SEQ ID NO: 14026 - DNA, 33 bp, Homo sapiens
actgaaggaataggaatgcttctatttatcaaa

SEQ ID NO: 14027 - DNA, 33 bp, Homo sapiens
cacctggaatgagagagccaatttctcctttta

SEQ ID NO: 14028 - DNA, 33 bp, Homo sapiens
tgataataatgatgtctcacaaaattttaggct

SEQ ID NO: 14029 - DNA, 33 bp, Homo sapiens
ttataccttgactgcactgactttcaattccgt

SEQ ID NO: 14030 - DNA, 33 bp, Homo sapiens
gatttataactataaagtgtcttgaacaaaatg

SEQ ID NO: 14031 - DNA, 33 bp, Homo sapiens
gccactcctgtagtcagcagttgttcatcagtt

SEQ ID NO: 14032 - DNA, 33 bp, Homo sapiens
gagacctggagtgttatcttcttctctttccta

SEQ ID NO: 14033 - DNA, 33 bp, Homo sapiens
atggctgcaatgaatcgaaaatctgcaagagat

SEQ ID NO: 14034 - DNA, 33 bp, Homo sapiens
tctattttggtatctctatttgggtctgtcaaa

SEQ ID NO: 14035 - DNA, 33 bp, Homo sapiens
gaacaactccatatcctcaaaagcatttttaat

SEQ ID NO: 14036 - DNA, 33 bp, Homo sapiens
ggttaggggattataacaaatgatgattaaccc

SEQ ID NO: 14037 - DNA, 33 bp, Homo sapiens
cgatgttgacagctaccgactgattaccaattt

SEQ ID NO: 14038 - DNA, 51 bp, Homo sapiens
ctgtaaatgtgtaaggcaaaataccgcctggtccctgctgccccctgagct

SEQ ID NO: 14039 - DNA, 33 bp, Homo sapiens
actagcctacacaatatggcgagactctgtctc

SEQ ID NO: 14040 - DNA, 33 bp, Homo sapiens
tctgttgcctcatccatgcagttactgtttacc

SEQ ID NO: 14041 - DNA, 33 bp, Homo sapiens
gtgctgggatgctgtatgtaaacctggactttg

SEQ ID NO: 14042 - DNA, 33 bp, Homo sapiens
atattatttcatccccgaggtactaagccttgt

SEQ ID NO: 14043 - DNA, 33 bp, Homo sapiens
cctgccaccaaagcctcaatcttcctgccatac

SEQ ID NO: 14044 - DNA, 33 bp, Homo sapiens
caagtggcaaaataacggtatcaacgagtcaca

SEQ ID NO: 14045 - DNA, 33 bp, Homo sapiens
tttcatttccagttaacgttgaatgtttatcct

SEQ ID NO: 14046 - DNA, 33 bp, Homo sapiens
tttccttgaaacagagtaacagaaaactgccag

SEQ ID NO: 14047 - DNA, 33 bp, Homo sapiens
gaggctgtgcatttccgatgactccggagcttc

SEQ ID NO: 14048 - DNA, 33 bp, Homo sapiens
gtcaaaagggaaaaggtagctgatgaggttaca

SEQ ID NO: 14049 - DNA, 33 bp, Homo sapiens
tccaagcacactcaccggatattaggaaagtta

SEQ ID NO: 14050 - DNA, 33 bp, Homo sapiens
gcctgaagccacacagtcagtaaggagctccca

SEQ ID NO: 14051 - DNA, 33 bp, Homo sapiens
cgtgcgtgaagagtacgacacaaaactgtaaac

SEQ ID NO: 14052 - DNA, 33 bp, Homo sapiens
tatgtggcttcacccatcactgagggcagatcc

SEQ ID NO: 14053 - DNA, 33 bp, Homo sapiens
cagtaaaggcagtaacgatctttgatggtagtc

SEQ ID NO: 14054 - DNA, 33 bp, Homo sapiens
gatctggctcaaatcctctgtttatattgatcc

SEQ ID NO: 14055 - DNA, 33 bp, Homo sapiens
tttatgggaggatgaattcagtataaagatagc

SEQ ID NO: 14056 - DNA, 33 bp, Homo sapiens
tactaataataatgactgtaaagagttatggca

SEQ ID NO: 14057 - DNA, 33 bp, Homo sapiens
cagtcccatctgataattccacactgttggtga

SEQ ID NO: 14058 - DNA, 33 bp, Homo sapiens
ggctactgccttgcacgctgcaggtataggcaa

SEQ ID NO: 14059 - DNA, 33 bp, Homo sapiens
tgcagaaggcaacacagaagttagcatccatgt

SEQ ID NO: 14060 - DNA, 33 bp, Homo sapiens
gtactagctctccttaggcttagggtggtagat

SEQ ID NO: 14061 - DNA, 33 bp, Homo sapiens
gaagagggaatgattggataatgagtttggcag

SEQ ID NO: 14062 - DNA, 33 bp, Homo sapiens
gttgaaagagattgattaacttgtttagagtaa

SEQ ID NO: 14063 - DNA, 33 bp, Homo sapiens
atttctatagaaacacggaagaggaagagcaca

SEQ ID NO: 14064 - DNA, 33 bp, Homo sapiens
ctggacaatcagctaatgcttttagaaaaacag

SEQ ID NO: 14065 - DNA, 33 bp, Homo sapiens
cttgatggttgccttctagcccctgaatagctt

SEQ ID NO: 14066 - DNA, 33 bp, Homo sapiens
tacgtaccagagaatatggcagcttaggaaaaa

SEQ ID NO: 14067 - DNA, 33 bp, Homo sapiens
gctccttctgcctggatccctatttttcccaga

SEQ ID NO: 14068 - DNA, 33 bp, Homo sapiens
ctattatggccatgtggcaagaacccagctctt

SEQ ID NO: 14069 - DNA, 33 bp, Homo sapiens
tgtatgtaatgtcagatagtgttaagtgccatg

SEQ ID NO: 14070 - DNA, 33 bp, Homo sapiens
gacacagtattggcaccaggagggcccagtgaa

SEQ ID NO: 14071 - DNA, 33 bp, Homo sapiens
taaatgtcctatgccagcctacagctttaaaaa

SEQ ID NO: 14072 - DNA, 33 bp, Homo sapiens
tcgttctttagccacagatttggccactggacg

SEQ ID NO: 14073 - DNA, 33 bp, Homo sapiens
aacaacattcgttgcatggtggaaatttcagaa

SEQ ID NO: 14074 - DNA, 33 bp, Homo sapiens
aggaaagcaatcattgtaaactgggaaatgcta

SEQ ID NO: 14075 - DNA, 33 bp, Homo sapiens
tgcttaagagccagtataagaacagcttaagac

SEQ ID NO: 14076 - DNA, 33 bp, Homo sapiens
actgttgcatggaaaggctatgtccacatagaa

SEQ ID NO: 14077 - DNA, 33 bp, Homo sapiens
ttctacttcagctggatgctattttgtcaattg

SEQ ID NO: 14078 - DNA, 33 bp, Homo sapiens
ctttaggggcatcccagtcttaaggcagggtat

SEQ ID NO: 14079 - DNA, 33 bp, Homo sapiens
tagaagtcaacaagcataggagcaacttagctg

SEQ ID NO: 14080 - DNA, 33 bp, Homo sapiens
aatacaatggtaatgggatcccacagtaatttg

SEQ ID NO: 14081 - DNA, 33 bp, Homo sapiens
tgaaaaagagtttaacgatagtcatctgattta

SEQ ID NO: 14082 - DNA, 33 bp, Homo sapiens
tctggggatctgtgtatagttagcagttgcatg

SEQ ID NO: 14083 - DNA, 33 bp, Homo sapiens
actttggcatctcaaatgaagccatcaaggtgg

SEQ ID NO: 14084 - DNA, 33 bp, Homo sapiens
agatcaaaactcaaaattcaaagtatgattatt

SEQ ID NO: 14085 - DNA, 33 bp, Homo sapiens
gtaactgtgaagtctgcaatctcatgtgaccac

SEQ ID NO: 14086 - DNA, 33 bp, Homo sapiens
caacaacatcctttcatggccaaaaagcatcca

SEQ ID NO: 14087 - DNA, 51 bp, Homo sapiens
ctggcaagaactataatcctattaacccctcaataatgtgtaaacatacat

SEQ ID NO: 14088 - DNA, 33 bp, Homo sapiens
gctggaatttaaatgggacatatagatgctaat

SEQ ID NO: 14089 - DNA, 33 bp, Homo sapiens
tagcttatccattgaatacttaacagcactcag

SEQ ID NO: 14090 - DNA, 51 bp, Homo sapiens
tctctatgggggaaggccatgaatagcctcttgcctgtatgttgagaagag

SEQ ID NO: 14091 - DNA, 33 bp, Homo sapiens
gggtaggactttccaggactctattttacctgt

SEQ ID NO: 14092 - DNA, 33 bp, Homo sapiens
tctttcccctgcttcatgatgggcctatgtgtc

SEQ ID NO: 14093 - DNA, 33 bp, Homo sapiens
taaccctcaatatctcggaatgtgactatttgg

SEQ ID NO: 14094 - DNA, 33 bp, Homo sapiens
aattttacttcactcatatcactggcgtcaact

SEQ ID NO: 14095 - DNA, 33 bp, Homo sapiens
tagtggtctgattcaatgtgacctgctccctct

SEQ ID NO: 14096 - DNA, 33 bp, Homo sapiens
tcccaaggcaaagctagcaaatgatattactat

SEQ ID NO: 14097 - DNA, 33 bp, Homo sapiens
actgctcaacactccagtaaatcctgagaccat

SEQ ID NO: 14098 - DNA, 33 bp, Homo sapiens
tctggtttgttacagagagcctcagaattcagg

SEQ ID NO: 14099 - DNA, 33 bp, Homo sapiens
taggtagaagggttgagtaattgtagatgaagt

SEQ ID NO: 14100 - DNA, 33 bp, Homo sapiens
ccatcccagaaacacattgtgcatccccactgt

SEQ ID NO: 14101 - DNA, 33 bp, Homo sapiens
atgaaggacctccaagccaggatatatatgaag

SEQ ID NO: 14102 - DNA, 33 bp, Homo sapiens
cagctgtggtctctaatgcaaaaataagatact

SEQ ID NO: 14103 - DNA, 33 bp, Homo sapiens
aaagctgaactcataataacagagagttagaat

SEQ ID NO: 14104 - DNA, 51 bp, Homo sapiens
ggacttgaagttttgaaatctttaataggcatacaaatggctgcaccactt

SEQ ID NO: 14105 - DNA, 33 bp, Homo sapiens
tgggtccctgagtaaattcaatagaaaagccgc

SEQ ID NO: 14106 - DNA, 33 bp, Homo sapiens
ggagacattaaactgagacagcaatcacaccct

SEQ ID NO: 14107 - DNA, 51 bp, Homo sapiens
aaaattggagtttgcctagtcctgcgaagttctgttccaaaagggaaataa

SEQ ID NO: 14108 - DNA, 33 bp, Homo sapiens
aagaccagtccaagaagcaaaatatcaaaacct

SEQ ID NO: 14109 - DNA, 33 bp, Homo sapiens
actattttcaaagtgattaactgcagctagtcg

SEQ ID NO: 14110 - DNA, 51 bp, Homo sapiens
gcaaaacagtccagtgttattatgaggatttttgttagtccttagcacttg

SEQ ID NO: 14111 - DNA, 33 bp, Homo sapiens
gaggaataggaatagatgagtaaagtgaccagt

SEQ ID NO: 14112 - DNA, 33 bp, Homo sapiens
gaaactgccaacagggccagcgagggtgaccat

SEQ ID NO: 14113 - DNA, 33 bp, Homo sapiens
gacatctctgagagggtataatttgagttaaga

SEQ ID NO: 14114 - DNA, 33 bp, Homo sapiens
tttccggtgacagatatactctatccaaatctt

SEQ ID NO: 14115 - DNA, 33 bp, Homo sapiens
ggtctgtatccttaaaggtaaagatgagttagc

SEQ ID NO: 14116 - DNA, 33 bp, Homo sapiens
ttcttggaagttgtagtccaaagatactattca

SEQ ID NO: 14117 - DNA, 51 bp, Homo sapiens
cctgacccaggctaggagcagttgatgccttcatagaataaccacatgttc

SEQ ID NO: 14118 - DNA, 33 bp, Homo sapiens
gaaagcagagaggaaattagctaagtaggtaaa

SEQ ID NO: 14119 - DNA, 33 bp, Homo sapiens
tctacccctggaccccgcaaggtcatgcccttc

SEQ ID NO: 14120 - DNA, 33 bp, Homo sapiens
gcagagataacattgatctgaactttgtatcta

SEQ ID NO: 14121 - DNA, 33 bp, Homo sapiens
atatcactttgctttcgcccttattccatccat

SEQ ID NO: 14122 - DNA, 33 bp, Homo sapiens
agaaaaagctacctgatgccaagaaagaaacac

SEQ ID NO: 14123 - DNA, 33 bp, Homo sapiens
ggacaagtaggaactgtacttttgcacaaatca

SEQ ID NO: 14124 - DNA, 33 bp, Homo sapiens
tggcactggctactcagggtatttccaattaaa

SEQ ID NO: 14125 - DNA, 33 bp, Homo sapiens
cataaggccacatagatgcagctagggggagat

SEQ ID NO: 14126 - DNA, 33 bp, Homo sapiens
gaaccttccggaagacggtcatcaaaacaaaaa

SEQ ID NO: 14127 - DNA, 33 bp, Homo sapiens
ctcccttgacttatgaccctccaataagctaaa

SEQ ID NO: 14128 - DNA, 33 bp, Homo sapiens
atttaatatatcttaatgtttggttctgatgtc

SEQ ID NO: 14129 - DNA, 33 bp, Homo sapiens
ataaaaacatgacatctacatattaccctccca

SEQ ID NO: 14130 - DNA, 33 bp, Homo sapiens
aagagcctaattcctaccttgaaggttgttttg

SEQ ID NO: 14131 - DNA, 33 bp, Homo sapiens
agaaatgttttaaaaagtgagagccattgcact

SEQ ID NO: 14132 - DNA, 33 bp, Homo sapiens
cattaaactacagaaccatccttccattacctt

SEQ ID NO: 14133 - DNA, 33 bp, Homo sapiens
caatgcttggctcaaagttaaagagaagcatgg

SEQ ID NO: 14134 - DNA, 33 bp, Homo sapiens
atttaacatattaaactgagtgctagagccaag

SEQ ID NO: 14135 - DNA, 33 bp, Homo sapiens
tttaaaaaagctcaagcaaaatgcatctaattg

SEQ ID NO: 14136 - DNA, 33 bp, Homo sapiens
tcaataattttattcaggatgaggatatgagcc

SEQ ID NO: 14137 - DNA, 33 bp, Homo sapiens
caacatccttttgctatagagttgtttttttta

SEQ ID NO: 14138 - DNA, 33 bp, Homo sapiens
tttctacttattgctgtaggtaatcacattcca

SEQ ID NO: 14139 - DNA, 33 bp, Homo sapiens
cacatctcacatcaacgagtgattggaaaacga

SEQ ID NO: 14140 - DNA, 33 bp, Homo sapiens
aaaaacagcaagctgggaactttaagcagaaac

SEQ ID NO: 14141 - DNA, 33 bp, Homo sapiens
ggtaattaacaaacactgatcatttgaaggagt

SEQ ID NO: 14142 - DNA, 33 bp, Homo sapiens
gaagatgaaagagagtcaatgcaggaacaggtg

SEQ ID NO: 14143 - DNA, 33 bp, Homo sapiens
tggttaatccatttcagtgaaaacaaccttgat

SEQ ID NO: 14144 - DNA, 33 bp, Homo sapiens
tggttctgaggccttcgaatttagactgaacca

SEQ ID NO: 14145 - DNA, 33 bp, Homo sapiens
ccattgccctgggagctatcgcaatgaggccag

SEQ ID NO: 14146 - DNA, 33 bp, Homo sapiens
gataggaaaaccaatagcaatgtcaaacctagc

SEQ ID NO: 14147 - DNA, 33 bp, Homo sapiens
tctctaccagtgtttctcaatgagtagtgatca

SEQ ID NO: 14148 - DNA, 33 bp, Homo sapiens
ctgtctatcgtgatcctcattttgttttaaaaa

SEQ ID NO: 14149 - DNA, 33 bp, Homo sapiens
tgacctttatcacttatgagaatatgcttgcta

SEQ ID NO: 14150 - DNA, 33 bp, Homo sapiens
gatgccttggttattgtcaacactcctgcagat

SEQ ID NO: 14151 - DNA, 51 bp, Homo sapiens
agaaacaaattaggatacatccatacaatagaacactacttagcggtaaca

SEQ ID NO: 14152 - DNA, 33 bp, Homo sapiens
cgcggcctgcatcttcgcagtctgcatgctggt

SEQ ID NO: 14153 - DNA, 33 bp, Homo sapiens
ttttatgtcaaagaggcattttaggatgatatg

SEQ ID NO: 14154 - DNA, 33 bp, Homo sapiens
atacttgcagagctaggagtgaatcaggggaat

SEQ ID NO: 14155 - DNA, 33 bp, Homo sapiens
tggcattttggttctatattttggtagcctttc

SEQ ID NO: 14156 - DNA, 33 bp, Homo sapiens
aactaacttgacgtacgagcacctctgtaaata

SEQ ID NO: 14157 - DNA, 33 bp, Homo sapiens
aaattatggcctataatcatcctttccaaaaat

SEQ ID NO: 14158 - DNA, 33 bp, Homo sapiens
ttggtgtattgaagtcggaatacctgtgcctgc

SEQ ID NO: 14159 - DNA, 33 bp, Homo sapiens
atccttcaggcactcctccctaaatattgcttc

SEQ ID NO: 14160 - DNA, 51 bp, Homo sapiens
aggtaaaaaaaaacacttttaccaggcaggacattgcaaggccacagagat

SEQ ID NO: 14161 - DNA, 33 bp, Homo sapiens
tctaagtatctgggactctagttggtacaaaac

SEQ ID NO: 14162 - DNA, 33 bp, Homo sapiens
acagcaaggctgaaactatcagaatgtgggaga

SEQ ID NO: 14163 - DNA, 33 bp, Homo sapiens
agtgaatcaagttaatgatctacagccttcctt

SEQ ID NO: 14164 - DNA, 33 bp, Homo sapiens
aagtacctaagtaaaattccacttagccagaat

SEQ ID NO: 14165 - DNA, 33 bp, Homo sapiens
agtggttcttgctccattgaattgtttttgcac

SEQ ID NO: 14166 - DNA, 33 bp, Homo sapiens
aagtgcatacctcccataaggaatctacaacag

SEQ ID NO: 14167 - DNA, 33 bp, Homo sapiens
caagggcctacctaaattcaaagggagggaaca

SEQ ID NO: 14168 - DNA, 33 bp, Homo sapiens
cattcaaggacatttatggtttacccaaatagg

SEQ ID NO: 14169 - DNA, 33 bp, Homo sapiens
aagctgaaagagcgactggcagttcagaatttc

SEQ ID NO: 14170 - DNA, 33 bp, Homo sapiens
gatcttcaggcagaacgaagaggagttgcatgt

SEQ ID NO: 14171 - DNA, 33 bp, Homo sapiens
aaattcaaacacaaaagaggcaccaactatatc

SEQ ID NO: 14172 - DNA, 33 bp, Homo sapiens
agacagagtctggctatggagtcccgttatggg

SEQ ID NO: 14173 - DNA, 33 bp, Homo sapiens
ccagaaatacatatgagcacagcattgaggata

SEQ ID NO: 14174 - DNA, 33 bp, Homo sapiens
accagatatggcttcataggagggaacagtgca

SEQ ID NO: 14175 - DNA, 33 bp, Homo sapiens
tgggtcagcaactctattaagacttataaatag

SEQ ID NO: 14176 - DNA, 33 bp, Homo sapiens
aatgccgcagggaggatcttgcagcatttcttg

SEQ ID NO: 14177 - DNA, 33 bp, Homo sapiens
gacgttttaaccgagcgctgatggtggtgtatt

SEQ ID NO: 14178 - DNA, 51 bp, Homo sapiens
catccatgttttagcatatgtcagccctacaatcctttttaaacctgaata

SEQ ID NO: 14179 - DNA, 33 bp, Homo sapiens
ccacaaagggacaactgagaaaataagaaatgg

SEQ ID NO: 14180 - DNA, 33 bp, Homo sapiens
ctgtcacatgtgtgaggcaagttagaagcaatg

SEQ ID NO: 14181 - DNA, 33 bp, Homo sapiens
gacagaacgcctatgagaacatgtgccagtctg

SEQ ID NO: 14182 - DNA, 33 bp, Homo sapiens
aagagattctaacagccaaaagctcactactct

SEQ ID NO: 14183 - DNA, 33 bp, Homo sapiens
tagggagggactgagatgtgaccagcagctgga

SEQ ID NO: 14184 - DNA, 33 bp, Homo sapiens
atataaacttcccttatgcagcttttcagcaac

SEQ ID NO: 14185 - DNA, 33 bp, Homo sapiens
ttataactgagaaaattatgacggtgaaagaga

SEQ ID NO: 14186 - DNA, 51 bp, Homo sapiens
ttacctagaaattgaaattaacatttaactctcaggtctccaagtccaaag

SEQ ID NO: 14187 - DNA, 33 bp, Homo sapiens
accccaaaagatgtgacaggacttgttacgtaa

SEQ ID NO: 14188 - DNA, 33 bp, Homo sapiens
agatagcatttgtacctcaaggtcagtggccca

SEQ ID NO: 14189 - DNA, 33 bp, Homo sapiens
tttaatgctgagtttagaactggaattcagcaa

SEQ ID NO: 14190 - DNA, 33 bp, Homo sapiens
gtgaggggaggtcacattgaaacagaagttagg

SEQ ID NO: 14191 - DNA, 51 bp, Homo sapiens
cagacaagaggttctgattctgagatgtgtagactcccttgggactttagg

SEQ ID NO: 14192 - DNA, 33 bp, Homo sapiens
aaacacagatctctaagcaactcaactaaatca

SEQ ID NO: 14193 - DNA, 33 bp, Homo sapiens
gcaagtccaaaattcataggaccggctggcagg

SEQ ID NO: 14194 - DNA, 33 bp, Homo sapiens
ctgaggaaagttaggagaggaaagctggccaaa

SEQ ID NO: 14195 - DNA, 33 bp, Homo sapiens
aaattgcctggcaaaatgttaactctcaaatct

SEQ ID NO: 14196 - DNA, 51 bp, Homo sapiens
atattatgctgtaatacactgttcacatattatgagattctaatggttaaa

SEQ ID NO: 14197 - DNA, 33 bp, Homo sapiens
ttcattatgtgcaaaggctcctgactgaaaatc

SEQ ID NO: 14198 - DNA, 33 bp, Homo sapiens
gtgagtcctattgaacgctgcagacaaacccct

SEQ ID NO: 14199 - DNA, 33 bp, Homo sapiens
agagggtgtaatgttatggaggccaagagaaga

SEQ ID NO: 14200 - DNA, 33 bp, Homo sapiens
gcatttgatgactgcattaatctttgtaattcc

SEQ ID NO: 14201 - DNA, 51 bp, Homo sapiens
ttaagccaacaagattttgcttacatccctagtaggaaagtaaccttgaaa

SEQ ID NO: 14202 - DNA, 33 bp, Homo sapiens
gatggatttgaacagggacccaagactatactg

SEQ ID NO: 14203 - DNA, 33 bp, Homo sapiens
tgtgtctcagtgtaaatttcttaagattcaacc

SEQ ID NO: 14204 - DNA, 51 bp, Homo sapiens
gtggtagcagcaggaggttggtttagagtagcttaattgtattgtctgccc

SEQ ID NO: 14205 - DNA, 33 bp, Homo sapiens
atagagcaaactgtcaggcagtacttaactcac

SEQ ID NO: 14206 - DNA, 51 bp, Homo sapiens
catgaccacaggttccatgatgctatgtctctatgtaggcgtattttcagt

SEQ ID NO: 14207 - DNA, 51 bp, Homo sapiens
tttagttcatctgttctttcgttcagcccttagagaggtcatgtagtagca

SEQ ID NO: 14208 - DNA, 33 bp, Homo sapiens
ctttgctgaaactcgctcagtgttggaaaactc

SEQ ID NO: 14209 - DNA, 33 bp, Homo sapiens
tcctagggccatctaggaggagcggtgcaagag

SEQ ID NO: 14210 - DNA, 33 bp, Homo sapiens
tgagctctccattgatgagaatcttcccatctc

SEQ ID NO: 14211 - DNA, 51 bp, Homo sapiens
aatgacaaaatgtccaacacttcaattattttcctttagaaactgtacatc

SEQ ID NO: 14212 - DNA, 33 bp, Homo sapiens
attacccacaaacagagcacttggagtccagat

SEQ ID NO: 14213 - DNA, 33 bp, Homo sapiens
attggagggaggccaggatacattagcgttctg

SEQ ID NO: 14214 - DNA, 33 bp, Homo sapiens
aggcagccaaattttatgttggagctgtgtgta

SEQ ID NO: 14215 - DNA, 33 bp, Homo sapiens
tttgctaattctggcataggttttgctgtcagg

SEQ ID NO: 14216 - DNA, 33 bp, Homo sapiens
gaacaagtaccaaagatcaagtgcttattgagt

SEQ ID NO: 14217 - DNA, 33 bp, Homo sapiens
aataagaggcaggaagcaaactaaagaatgagg

SEQ ID NO: 14218 - DNA, 33 bp, Homo sapiens
ccaagagaggtcagaataattcaatctgatgtg

SEQ ID NO: 14219 - DNA, 33 bp, Homo sapiens
tagtaacctccctttctccctttgcactggttt

SEQ ID NO: 14220 - DNA, 33 bp, Homo sapiens
cttaaatcaccacgccgatcttgccagtgcgaa

SEQ ID NO: 14221 - DNA, 33 bp, Homo sapiens
gaaagtgtatgacaaaggaaagctggaataaat

SEQ ID NO: 14222 - DNA, 33 bp, Homo sapiens
tgtatggaagagaggttaactatccgagagaca

SEQ ID NO: 14223 - DNA, 33 bp, Homo sapiens
gctgtatcctcccatccaatggaaattagttgg

SEQ ID NO: 14224 - DNA, 33 bp, Homo sapiens
gcagaggtggaaacaggacgggaactacttgaa

SEQ ID NO: 14225 - DNA, 33 bp, Homo sapiens
acactttagatgtgggcatgaaataaataggac

SEQ ID NO: 14226 - DNA, 33 bp, Homo sapiens
acttcatgtctatcacgaatgcatcatcaccca

SEQ ID NO: 14227 - DNA, 33 bp, Homo sapiens
aggtaacattgacaacggacagaaaccatgcac

SEQ ID NO: 14228 - DNA, 33 bp, Homo sapiens
gtcctaatccccatactcatgtaagtgacctta

SEQ ID NO: 14229 - DNA, 33 bp, Homo sapiens
aggggaattttggttcgatttgtgctcttgtgt

SEQ ID NO: 14230 - DNA, 33 bp, Homo sapiens
ctcacctgtcctttgggaaagatggtctccact

SEQ ID NO: 14231 - DNA, 33 bp, Homo sapiens
ttctctgtacatatgcgactcctaataaaaggc

SEQ ID NO: 14232 - DNA, 33 bp, Homo sapiens
ggtagggatgaaacactccctagtctcctgcag

SEQ ID NO: 14233 - DNA, 33 bp, Homo sapiens
caagattgttgacccttaaatgttgccagagct

SEQ ID NO: 14234 - DNA, 33 bp, Homo sapiens
gttttattgctctgcatgtgtgtcacattttaa

SEQ ID NO: 14235 - DNA, 33 bp, Homo sapiens
atcctcatcctatcattagggactgtcaagagc

SEQ ID NO: 14236 - DNA, 51 bp, Homo sapiens
gtccttaagcgcaaggtccaaataatgttgacctttgtattcccagcatcc

SEQ ID NO: 14237 - DNA, 51 bp, Homo sapiens
ctgagtgaactcactgccaagatccgcgtaagaatatttaaagtcacagat

SEQ ID NO: 14238 - DNA, 33 bp, Homo sapiens
aaacagcatcatctcatcagtttttgttttgag

SEQ ID NO: 14239 - DNA, 33 bp, Homo sapiens
attttagagacttgcattatttgacaaatggta

SEQ ID NO: 14240 - DNA, 33 bp, Homo sapiens
tgatttccttttatcggatctttccaaagcgtc

SEQ ID NO: 14241 - DNA, 33 bp, Homo sapiens
tagacagtgtccagctgaatatttgttgaagga

SEQ ID NO: 14242 - DNA, 33 bp, Homo sapiens
tgttgaattaccaagatgtttcctcacctgtaa

SEQ ID NO: 14243 - DNA, 33 bp, Homo sapiens
atgctctactatgaaccaggacattctcaggac

SEQ ID NO: 14244 - DNA, 33 bp, Homo sapiens
tttgttttgcttgagagacacaattgctgctat

SEQ ID NO: 14245 - DNA, 33 bp, Homo sapiens
ggagggcttattctaatgattgtccaggctcct

SEQ ID NO: 14246 - DNA, 33 bp, Homo sapiens
gaatttgaatatggcataatgatttgtcattta

SEQ ID NO: 14247 - DNA, 33 bp, Homo sapiens
tttctctctttctcactgcagggaacagcattg

SEQ ID NO: 14248 - DNA, 33 bp, Homo sapiens
tgggcatcactaaaggtataaggtattttcagt

SEQ ID NO: 14249 - DNA, 33 bp, Homo sapiens
gtcgtgcaggttgcacgggaaatctgcgattcc

SEQ ID NO: 14250 - DNA, 33 bp, Homo sapiens
tgaccagttgaacagattagggatgtcaaaaac

SEQ ID NO: 14251 - DNA, 33 bp, Homo sapiens
cagtaagcacaggttatagttctagcaatcact

SEQ ID NO: 14252 - DNA, 33 bp, Homo sapiens
aggttcttgagatcccgataaatataacaaatc

SEQ ID NO: 14253 - DNA, 33 bp, Homo sapiens
aatctgcagagctgccgaaagtaccttgatgtt

SEQ ID NO: 14254 - DNA, 51 bp, Homo sapiens
tttccagtgcactagatgaaaaatagcaatgaagagtagaataaagacaaa

SEQ ID NO: 14255 - DNA, 33 bp, Homo sapiens
ggaaactcgaatcttctagtatcggcaaaggga

SEQ ID NO: 14256 - DNA, 33 bp, Homo sapiens
ttcctggatgcgggacgagaactcaggacttgc

SEQ ID NO: 14257 - DNA, 33 bp, Homo sapiens
gagaaagaccatatcttaaagagagagagagag

SEQ ID NO: 14258 - DNA, 33 bp, Homo sapiens
cctgcatacagtgctcgcctgcatggggtgctc

SEQ ID NO: 14259 - DNA, 33 bp, Homo sapiens
ctgtcacaacaactcatccctgctgttacagcg

SEQ ID NO: 14260 - DNA, 33 bp, Homo sapiens
tctggtgttggtgctataggagaatgcataagt

SEQ ID NO: 14261 - DNA, 33 bp, Homo sapiens
ggatgtagtgctggaagtaagtgaaatgcaatc

SEQ ID NO: 14262 - DNA, 33 bp, Homo sapiens
tctctttaaacttacagtgatcataacctttga

SEQ ID NO: 14263 - DNA, 33 bp, Homo sapiens
tctgtgaccacaataagataacagaagtcaacg

SEQ ID NO: 14264 - DNA, 33 bp, Homo sapiens
aggcccctagagaagctgcaagagggtttccag

SEQ ID NO: 14265 - DNA, 51 bp, Homo sapiens
gagccatgtcatggttaccaagctacagtttttgttcattatgtatcttca

SEQ ID NO: 14266 - DNA, 33 bp, Homo sapiens
tttgtgaactgacctttccattcctgagttcct

SEQ ID NO: 14267 - DNA, 33 bp, Homo sapiens
ccactaacaaggtcccgagaataccgagagtga

SEQ ID NO: 14268 - DNA, 51 bp, Homo sapiens
aaattggcctacttatatatggacagctgatttgcaaccaacgtgcacaga

SEQ ID NO: 14269 - DNA, 51 bp, Homo sapiens
atgaaaaggtaattaaaaattcacacggaaatgtaaaggacataaactagc

SEQ ID NO: 14270 - DNA, 33 bp, Homo sapiens
atcccaaggaacctgcgagaccctcctagaaac

SEQ ID NO: 14271 - DNA, 33 bp, Homo sapiens
cggtcgagctgtttccgatctttaggaactggc

SEQ ID NO: 14272 - DNA, 33 bp, Homo sapiens
gagacagtgattttaatcagggtagtcggggta

SEQ ID NO: 14273 - DNA, 33 bp, Homo sapiens
agagaatttgttggaccaggaagttgagctaag

SEQ ID NO: 14274 - DNA, 33 bp, Homo sapiens
cacccggccggctggtgaatttcttagctcaac

SEQ ID NO: 14275 - DNA, 33 bp, Homo sapiens
cagatctaacaaaagcgaaaggaagcaactcat

SEQ ID NO: 14276 - DNA, 33 bp, Homo sapiens
tctaacatagctcgtctcttgaattgtcactga

SEQ ID NO: 14277 - DNA, 33 bp, Homo sapiens
atataggatgaaatactccaagatttgtccaaa

SEQ ID NO: 14278 - DNA, 33 bp, Homo sapiens
ttcttcacctagaggagcatttagccaaggaaa

SEQ ID NO: 14279 - DNA, 33 bp, Homo sapiens
caccctagcatgcaaagtgtttgatgggacgca

SEQ ID NO: 14280 - DNA, 33 bp, Homo sapiens
cattgcatcataaaaagaaacaaccagtgtata

SEQ ID NO: 14281 - DNA, 33 bp, Homo sapiens
tctcttttacaggctggactaggaaatcctcag

SEQ ID NO: 14282 - DNA, 33 bp, Homo sapiens
tggatatgtcatctaatataaatggaatcataa

SEQ ID NO: 14283 - DNA, 33 bp, Homo sapiens
cacagaatagctccgatggtttaaccaatagca

SEQ ID NO: 14284 - DNA, 33 bp, Homo sapiens
agagtggcctattcaagtaagcccagattaatg

SEQ ID NO: 14285 - DNA, 33 bp, Homo sapiens
ttatttgagcaatgcagtaggcactgactgggg

SEQ ID NO: 14286 - DNA, 33 bp, Homo sapiens
gatggtcattaccggggatggaaggagggttga

SEQ ID NO: 14287 - DNA, 33 bp, Homo sapiens
aaatgctgataaatacgaactgaactcacttct

SEQ ID NO: 14288 - DNA, 33 bp, Homo sapiens
ttctcccaatacaggagcttttggaggtcactt

SEQ ID NO: 14289 - DNA, 33 bp, Homo sapiens
ctcttgtggcccctccgaaggtcctgtgcctcc

SEQ ID NO: 14290 - DNA, 33 bp, Homo sapiens
agtgcccaatccttcatgtcatgttgggctgct

SEQ ID NO: 14291 - DNA, 33 bp, Homo sapiens
tgtatttcacctctaatggaagaaattcttaag

SEQ ID NO: 14292 - DNA, 33 bp, Homo sapiens
agttgtatctccttgaggctttcattggcattt

SEQ ID NO: 14293 - DNA, 51 bp, Homo sapiens
aagtagtttattttttttaatttcaggtgatgtaatttaaaacctaagttg

SEQ ID NO: 14294 - DNA, 33 bp, Homo sapiens
gctactctgtgtatacgatgatgtataactcca

SEQ ID NO: 14295 - DNA, 33 bp, Homo sapiens
tcgcttcctggttgaatgatgaaaaatgattgt

SEQ ID NO: 14296 - DNA, 33 bp, Homo sapiens
gccttcctgacctggagagaggtgttggtcttc

SEQ ID NO: 14297 - DNA, 51 bp, Homo sapiens
cctagtaatgggttactatggtgatgaggattaggataatggagatggcgc

SEQ ID NO: 14298 - DNA, 33 bp, Homo sapiens
ttcctgttgcactgaaggctctaagtaagatga

SEQ ID NO: 14299 - DNA, 33 bp, Homo sapiens
acacagtgtgctattcgatgccgtctgctctgg

SEQ ID NO: 14300 - DNA, 33 bp, Homo sapiens
tctattacattctgactgactaataaaaccctg

SEQ ID NO: 14301 - DNA, 33 bp, Homo sapiens
aatcccagaaatagaatgttgactggaaaaagc

SEQ ID NO: 14302 - DNA, 51 bp, Homo sapiens
ttttcaccaaggtctactggcacatgaaaataagtaagtcaggctccaacc

SEQ ID NO: 14303 - DNA, 33 bp, Homo sapiens
gtgtttatgaagtaaggccattcaaaatcaaat

SEQ ID NO: 14304 - DNA, 33 bp, Homo sapiens
aagaacagaagaactcgaatgaagccagtgagg

SEQ ID NO: 14305 - DNA, 33 bp, Homo sapiens
cctgcattgagctacaggacaagactggggcct

SEQ ID NO: 14306 - DNA, 33 bp, Homo sapiens
actcactccatccagtgaccagagtctactcca

SEQ ID NO: 14307 - DNA, 33 bp, Homo sapiens
ggcgtggggcctgccagatgtcttgagcctgct

SEQ ID NO: 14308 - DNA, 33 bp, Homo sapiens
tatttaggatagaaagcaacaagctctccctaa

SEQ ID NO: 14309 - DNA, 33 bp, Homo sapiens
taagtgttttattggcggaataatttgcaaaca

SEQ ID NO: 14310 - DNA, 33 bp, Homo sapiens
atacatcaattttcccgcaggacgggtctccaa

SEQ ID NO: 14311 - DNA, 33 bp, Homo sapiens
gtaaacttaattggcacatctgagcagatgaaa

SEQ ID NO: 14312 - DNA, 33 bp, Homo sapiens
tttgttctgtttcgaattggtcttacaaaatgc

SEQ ID NO: 14313 - DNA, 33 bp, Homo sapiens
agtctctctcattgcatcaaggtaacaaacctg

SEQ ID NO: 14314 - DNA, 33 bp, Homo sapiens
ggaagccttcattaacgaggacggatggcaggg

SEQ ID NO: 14315 - DNA, 33 bp, Homo sapiens
gtggccggaatgcagagatgaagcactgagcac

SEQ ID NO: 14316 - DNA, 33 bp, Homo sapiens
aactacctctactaactaccatctaagcatgga

SEQ ID NO: 14317 - DNA, 33 bp, Homo sapiens
gcacttgtgcttgatagaggcagagtaagttga

SEQ ID NO: 14318 - DNA, 33 bp, Homo sapiens
cctacatggctatccatagaaaactggctaaat

SEQ ID NO: 14319 - DNA, 33 bp, Homo sapiens
cagcctatactctatgtagcctcacagtgaact

SEQ ID NO: 14320 - DNA, 33 bp, Homo sapiens
aataagtccctcgatcgattcatcatgcctgtg

SEQ ID NO: 14321 - DNA, 33 bp, Homo sapiens
gtaatgaattgattgatggatatttgttttcaa

SEQ ID NO: 14322 - DNA, 33 bp, Homo sapiens
gactaaccagttacaatagaatgggtgcctata

SEQ ID NO: 14323 - DNA, 33 bp, Homo sapiens
ggtgcacatggatatacagatgcgaacaacaga

SEQ ID NO: 14324 - DNA, 33 bp, Homo sapiens
aagacttggagtacattagagcatctcataagt

SEQ ID NO: 14325 - DNA, 33 bp, Homo sapiens
agtatgaatctataaaccaccagcaagtggagc

SEQ ID NO: 14326 - DNA, 33 bp, Homo sapiens
ataaacagtggtagcatatcacaaaattatacc

SEQ ID NO: 14327 - DNA, 33 bp, Homo sapiens
tttcagtccccaggtctctaacatcaaatgtat

SEQ ID NO: 14328 - DNA, 33 bp, Homo sapiens
caatagcatgataaggtaggcactaatctcatc

SEQ ID NO: 14329 - DNA, 33 bp, Homo sapiens
agcaaccattcctgcagggtttttttggttatt

SEQ ID NO: 14330 - DNA, 33 bp, Homo sapiens
aaagtagaatgtgatcgaaaaaactctcagttg

SEQ ID NO: 14331 - DNA, 33 bp, Homo sapiens
cttggattagccactggatatgaagcttcccca

SEQ ID NO: 14332 - DNA, 33 bp, Homo sapiens
attaaatgaaggtttataattggctacctttgt

SEQ ID NO: 14333 - DNA, 33 bp, Homo sapiens
gcgggcatgaaggcactcctaatggaatattca

SEQ ID NO: 14334 - DNA, 33 bp, Homo sapiens
tcatgtacaggttaactaaaaatgtcacatttc

SEQ ID NO: 14335 - DNA, 33 bp, Homo sapiens
gttatcttgctcctcatgtggtagcacttgtca

SEQ ID NO: 14336 - DNA, 33 bp, Homo sapiens
atatccaaattctgaggatccgaaagtggacat

SEQ ID NO: 14337 - DNA, 33 bp, Homo sapiens
tcagtgagatatgacataaaaagttctcatctc

SEQ ID NO: 14338 - DNA, 33 bp, Homo sapiens
ccctgagcaccttacataacatagcaattcctt

SEQ ID NO: 14339 - DNA, 33 bp, Homo sapiens
ttaaatttccatctactgacactctgctgaagc

SEQ ID NO: 14340 - DNA, 33 bp, Homo sapiens
cttaattgttcttatctgaaagttactgtgcat

SEQ ID NO: 14341 - DNA, 33 bp, Homo sapiens
gattctcacaggaacatgaactctactgtcaac

SEQ ID NO: 14342 - DNA, 33 bp, Homo sapiens
ttctcttgtactagactaggaatcagcaagtat

SEQ ID NO: 14343 - DNA, 33 bp, Homo sapiens
ccactaattcttatgctatgcctatatccacaa

SEQ ID NO: 14344 - DNA, 33 bp, Homo sapiens
tcctttatgtaggtaatgtgttcaaacataagt

SEQ ID NO: 14345 - DNA, 33 bp, Homo sapiens
cacgcagttggtcacataaagtagcaacacggc

SEQ ID NO: 14346 - DNA, 33 bp, Homo sapiens
acagatattgtaagttcaaatcagatagtgtat

SEQ ID NO: 14347 - DNA, 33 bp, Homo sapiens
agcatagttttaaacattctgagaggttagtcc

SEQ ID NO: 14348 - DNA, 51 bp, Homo sapiens
ggcccaggtaaaatatgtgttgaacgagttgttttgtcttactctacaatt

SEQ ID NO: 14349 - DNA, 33 bp, Homo sapiens
aatcaattaatgaaaacgttgtgaacaaatggt

SEQ ID NO: 14350 - DNA, 33 bp, Homo sapiens
ctattcactacaaatcgccaaagttatctctta

SEQ ID NO: 14351 - DNA, 33 bp, Homo sapiens
tacatttttacaggacgatttgggaatatctcc

SEQ ID NO: 14352 - DNA, 33 bp, Homo sapiens
ctgaatgcaggagatatcagtttggttgtgtga

SEQ ID NO: 14353 - DNA, 33 bp, Homo sapiens
cccttttttcttatgagtagctctccactgact

SEQ ID NO: 14354 - DNA, 33 bp, Homo sapiens
tatctcatgcaactcagtacttatgttcttata

SEQ ID NO: 14355 - DNA, 33 bp, Homo sapiens
agaaaaatcatgttaatggttgttgtctctagt

SEQ ID NO: 14356 - DNA, 33 bp, Homo sapiens
gtttgtccagcaaaaagcaagatatgtatctaa

SEQ ID NO: 14357 - DNA, 33 bp, Homo sapiens
tatgagcttttctttctaattgcacagcttctg

SEQ ID NO: 14358 - DNA, 33 bp, Homo sapiens
atgctaaaaccataagtcaacacagaagaaaga

SEQ ID NO: 14359 - DNA, 33 bp, Homo sapiens
attaatttacttgtgatatctggcttagaagta

SEQ ID NO: 14360 - DNA, 33 bp, Homo sapiens
gtggtagttagctttctattcctgtgtaattca

SEQ ID NO: 14361 - DNA, 33 bp, Homo sapiens
attaagttaggatttcgaatgattacaagagat

SEQ ID NO: 14362 - DNA, 33 bp, Homo sapiens
ttttatccaacacttatagagatcctggatgtt

SEQ ID NO: 14363 - DNA, 33 bp, Homo sapiens
aatattgaacttttccgctgacatagtttgaat

SEQ ID NO: 14364 - DNA, 33 bp, Homo sapiens
agttcacgttgtatcatatagaacattgacacg

SEQ ID NO: 14365 - DNA, 33 bp, Homo sapiens
ataaattagaatcacattagtagttatgattgt

SEQ ID NO: 14366 - DNA, 33 bp, Homo sapiens
cactgggtgcatagaatatttctgactgtcaaa

SEQ ID NO: 14367 - DNA, 33 bp, Homo sapiens
aactgtagccctagaatggcattggctgtacgt

SEQ ID NO: 14368 - DNA, 33 bp, Homo sapiens
caagcaggggcttacagtatatcaaaccataag

SEQ ID NO: 14369 - DNA, 33 bp, Homo sapiens
agagtttgaacctcaattcaggtaactcctgtg

SEQ ID NO: 14370 - DNA, 33 bp, Homo sapiens
gagcttaaaaaagaaatgtgaacacaggagtta

SEQ ID NO: 14371 - DNA, 33 bp, Homo sapiens
atgaattaatgttcactgataaatctgaaatta

SEQ ID NO: 14372 - DNA, 33 bp, Homo sapiens
ggaaaactgaggtacagaaggttatgtcatgta

SEQ ID NO: 14373 - DNA, 33 bp, Homo sapiens
ttttgtcgataaggaagataatcagagtgggat

SEQ ID NO: 14374 - DNA, 33 bp, Homo sapiens
tatatcgtggaatacagaatactgaaatacaaa

SEQ ID NO: 14375 - DNA, 33 bp, Homo sapiens
ggtcataccttaataggactggtggttagaaaa

SEQ ID NO: 14376 - DNA, 33 bp, Homo sapiens
cttacctctggtgaaaggagaatgccatttgtt

SEQ ID NO: 14377 - DNA, 33 bp, Homo sapiens
cattgtaagagtacaagagcaagaccaaacatt

SEQ ID NO: 14378 - DNA, 33 bp, Homo sapiens
gttgttaatttcatactaccaacctactgtcta

SEQ ID NO: 14379 - DNA, 51 bp, Homo sapiens
cccctcacaatttattactcataaggcatttatatcatttgcttccctgta

SEQ ID NO: 14380 - DNA, 33 bp, Homo sapiens
aggttgccaaaaactatgaaacaattcttgaca

SEQ ID NO: 14381 - DNA, 33 bp, Homo sapiens
tgtgaggacactaaaacagccttacgaagattt

SEQ ID NO: 14382 - DNA, 33 bp, Homo sapiens
tggtgtccgtaacaaatgtcattttgaagtcat

SEQ ID NO: 14383 - DNA, 33 bp, Homo sapiens
atgtattttcaatataggttacccaatccaaaa

SEQ ID NO: 14384 - DNA, 51 bp, Homo sapiens
ataatgcatgcatatgaatcacctatgaagatttgtgtcagacatttcata

SEQ ID NO: 14385 - DNA, 51 bp, Homo sapiens
tgtgatgatggaatttcagttataatgctgaatgaattgggaaaaataatt

SEQ ID NO: 14386 - DNA, 51 bp, Homo sapiens
gattttaggaggtacctgaaaactatgttaaatgaaaaactaaaatcagcg

SEQ ID NO: 14387 - DNA, 51 bp, Homo sapiens
ttttaaaaatagtggcaagggagattaattacttttaaatggctttctatg

SEQ ID NO: 14388 - DNA, 33 bp, Homo sapiens
gacaaaaatatctgctgacacttatgaacacat

SEQ ID NO: 14389 - DNA, 33 bp, Homo sapiens
ctgccttatatccctcgaatggcagagactatg

SEQ ID NO: 14390 - DNA, 33 bp, Homo sapiens
ttcgacagagtcaagagccaagacagatacacg

SEQ ID NO: 14391 - DNA, 33 bp, Homo sapiens
ttagctcacctcaataggccacaaactatggtc

SEQ ID NO: 14392 - DNA, 33 bp, Homo sapiens
caaatctagcatatcatctgtttttataaagct

SEQ ID NO: 14393 - DNA, 33 bp, Homo sapiens
tgtctgatttatgtaggctaacagattggttca

SEQ ID NO: 14394 - DNA, 33 bp, Homo sapiens
agctggattccaactacagcggtctctcaggta

SEQ ID NO: 14395 - DNA, 33 bp, Homo sapiens
ccttttgaatgaaagatcacactcaatggtcag

SEQ ID NO: 14396 - DNA, 51 bp, Homo sapiens
tggatctagcatttcaacccaggtcgatctactttataatgatagaacaca

SEQ ID NO: 14397 - DNA, 33 bp, Homo sapiens
taagattctgaggaaattgtaagcaaaactcat

SEQ ID NO: 14398 - DNA, 33 bp, Homo sapiens
gagcctacttgcccaatttctgagatattatcg

SEQ ID NO: 14399 - DNA, 33 bp, Homo sapiens
ggttacaacaaatgaatatctgaactgatctct

SEQ ID NO: 14400 - DNA, 33 bp, Homo sapiens
tcaactcaatgagttggaaaaaagtaataagac

SEQ ID NO: 14401 - DNA, 33 bp, Homo sapiens
gagagagtgctggcaatagaaaaggaaatgggc

SEQ ID NO: 14402 - DNA, 33 bp, Homo sapiens
taagagatgctctgtagaagtcacatttgaaca

SEQ ID NO: 14403 - DNA, 33 bp, Homo sapiens
tataaccttctctacattatacctcactatgat

SEQ ID NO: 14404 - DNA, 33 bp, Homo sapiens
aagggtccacaaaagatgtcaccatttggaaga

SEQ ID NO: 14405 - DNA, 33 bp, Homo sapiens
tttgctctgttgtatcgactctgttcctttgtc

SEQ ID NO: 14406 - DNA, 33 bp, Homo sapiens
cacatttccctttagatgcttattgatgccatt

SEQ ID NO: 14407 - DNA, 33 bp, Homo sapiens
tttttggcaccataatgataatcttctccatct

SEQ ID NO: 14408 - DNA, 33 bp, Homo sapiens
tgttatttcaactaaagtgattatctccgttag

SEQ ID NO: 14409 - DNA, 33 bp, Homo sapiens
taccctatgcttatacgacttgacccagcccct

SEQ ID NO: 14410 - DNA, 33 bp, Homo sapiens
tctagaaagagtagcatcttaattataatcatt

SEQ ID NO: 14411 - DNA, 33 bp, Homo sapiens
acaccatgtcttggcagcattcttattatttct

SEQ ID NO: 14412 - DNA, 33 bp, Homo sapiens
cctgagagataccagagtatggctggtgatatg

SEQ ID NO: 14413 - DNA, 33 bp, Homo sapiens
gattaaaatttatgaatcaattgtcatccaaaa

SEQ ID NO: 14414 - DNA, 33 bp, Homo sapiens
caaactttgtcattcagacctgattcttttttg

SEQ ID NO: 14415 - DNA, 33 bp, Homo sapiens
ttcacaaatggtttcttaaacatggctatgtgt

SEQ ID NO: 14416 - DNA, 51 bp, Homo sapiens
tcttcctctctggctctaggcaccagaactataagacaataaattcctgtt

SEQ ID NO: 14417 - DNA, 33 bp, Homo sapiens
gtttctaatggccttgtatggaacttcttcacc

SEQ ID NO: 14418 - DNA, 33 bp, Homo sapiens
ccaagatactggcttatgtttactctcaaattt

SEQ ID NO: 14419 - DNA, 33 bp, Homo sapiens
tactcatcagtaaaacggagctggtgatacttc

SEQ ID NO: 14420 - DNA, 33 bp, Homo sapiens
actcatggcaaacttgcaaaatctgtctttggt

SEQ ID NO: 14421 - DNA, 33 bp, Homo sapiens
gggcctgctatcagccgctgtgatttagagcat

SEQ ID NO: 14422 - DNA, 33 bp, Homo sapiens
ctacagttagttgttatgatcagatgtctgtaa

SEQ ID NO: 14423 - DNA, 33 bp, Homo sapiens
ctaccagtttgtacgatagatgactcctcctgg

SEQ ID NO: 14424 - DNA, 33 bp, Homo sapiens
gttggcaaacaaagaatagtcaacaactttctt

SEQ ID NO: 14425 - DNA, 33 bp, Homo sapiens
aataaaagaccccagattcaagtaacacttttt

SEQ ID NO: 14426 - DNA, 33 bp, Homo sapiens
atttactttagcagcacaaccttatgttaaatg

SEQ ID NO: 14427 - DNA, 33 bp, Homo sapiens
tacatagtacttaacagaagagtgagaaggtgt

SEQ ID NO: 14428 - DNA, 33 bp, Homo sapiens
ctcctatggataggaatgttagctagttagccc

SEQ ID NO: 14429 - DNA, 33 bp, Homo sapiens
tgcttgccatgacaacgaaatttaatagaaata

SEQ ID NO: 14430 - DNA, 33 bp, Homo sapiens
gtagctgaaccaaacatggcattagcaaattga

SEQ ID NO: 14431 - DNA, 51 bp, Homo sapiens
gccaatatataagaaagtgtttaaggaagataaaacgcaaagtacatttta

SEQ ID NO: 14432 - DNA, 51 bp, Homo sapiens
ataatcttcctttccccataaagacgagcataatcaccaggagtgatattc

SEQ ID NO: 14433 - DNA, 33 bp, Homo sapiens
ttgcctgttccaatcagtaaagctactaaaatg

SEQ ID NO: 14434 - DNA, 33 bp, Homo sapiens
atcttaatcctttcaactaatgcttctctcaat

SEQ ID NO: 14435 - DNA, 33 bp, Homo sapiens
tatatattacagcctagaggggataggatataa

SEQ ID NO: 14436 - DNA, 33 bp, Homo sapiens
gactgtgtgacataaatcctgacttgagtccag

SEQ ID NO: 14437 - DNA, 33 bp, Homo sapiens
tgtatcatcctctaaacgtgaaatatttcatca

SEQ ID NO: 14438 - DNA, 33 bp, Homo sapiens
gcaagaggcaatgagagcctggattaagtaagt

SEQ ID NO: 14439 - DNA, 33 bp, Homo sapiens
atcctttctatttttccaacgtatatctcaccc

SEQ ID NO: 14440 - DNA, 33 bp, Homo sapiens
taaatccaagttataatgccggctacatacaga

SEQ ID NO: 14441 - DNA, 33 bp, Homo sapiens
ttagtgcagaacatcttaacacttttgggactt

SEQ ID NO: 14442 - DNA, 33 bp, Homo sapiens
tctgctatcagatagtgaaagacaaaacagcca

SEQ ID NO: 14443 - DNA, 33 bp, Homo sapiens
tccccatgtttttgtcgctttagctgtttcttc

SEQ ID NO: 14444 - DNA, 33 bp, Homo sapiens
tagtcacattgctgtatcttagggctccagaac

SEQ ID NO: 14445 - DNA, 33 bp, Homo sapiens
ataacacataagaatctgacttgctttgtccat

SEQ ID NO: 14446 - DNA, 33 bp, Homo sapiens
agctcagaagattgcatagttaagtagaaatga

SEQ ID NO: 14447 - DNA, 33 bp, Homo sapiens
ccatgaacaattttgagcagccaatgtgacatc

SEQ ID NO: 14448 - DNA, 33 bp, Homo sapiens
ttgtatgtgagaacatgaggacctgcaagcaca

SEQ ID NO: 14449 - DNA, 33 bp, Homo sapiens
tcagaatgatagtagggagagaggcatttccaa

SEQ ID NO: 14450 - DNA, 33 bp, Homo sapiens
agtgatggctattcacgggggacagtggtcact

SEQ ID NO: 14451 - DNA, 33 bp, Homo sapiens
ccatcctttctgagtatgaatgtgtggagataa

SEQ ID NO: 14452 - DNA, 33 bp, Homo sapiens
tatatacgtttgtccatgatctgtcctggctga

SEQ ID NO: 14453 - DNA, 33 bp, Homo sapiens
tgaaagaattgtaagccaacaaaggacaagatt

SEQ ID NO: 14454 - DNA, 33 bp, Homo sapiens
ccctgcttggacgctataccaaagtacacacag

SEQ ID NO: 14455 - DNA, 33 bp, Homo sapiens
tgacctcctgatattcgcatgactttctcactt

SEQ ID NO: 14456 - DNA, 33 bp, Homo sapiens
cacttggctatacctagctgccagggaaactga

SEQ ID NO: 14457 - DNA, 51 bp, Homo sapiens
aactccacataagatactgtggacatatatttaaaacaaagttttttgttt

SEQ ID NO: 14458 - DNA, 33 bp, Homo sapiens
ttcttgaaaaaccatgcaaagtgcggccctagg

SEQ ID NO: 14459 - DNA, 33 bp, Homo sapiens
ggtggacaagtatgatcaaaatttctgggtata

SEQ ID NO: 14460 - DNA, 33 bp, Homo sapiens
tgtaaaatttgaagcatagtcaaagtcatatga

SEQ ID NO: 14461 - DNA, 33 bp, Homo sapiens
cagaaggccaggaatcgcctctgctctaagccc

SEQ ID NO: 14462 - DNA, 33 bp, Homo sapiens
caaattttagagaagaggttaagggcaagatga

SEQ ID NO: 14463 - DNA, 33 bp, Homo sapiens
tgtgtagctttaaagatggtatttttggactag

SEQ ID NO: 14464 - DNA, 33 bp, Homo sapiens
tctctttaaaggcctggagttcagatgcttgca

SEQ ID NO: 14465 - DNA, 51 bp, Homo sapiens
cctacctgtacccttttcggcttcacaaactcctcagaaatgcactcacct

SEQ ID NO: 14466 - DNA, 51 bp, Homo sapiens
tactgtggcttttataactacaccatgactgaattattttagttgttatag

SEQ ID NO: 14467 - DNA, 33 bp, Homo sapiens
aaaataagattatgactccctaaggtgttgtgg

SEQ ID NO: 14468 - DNA, 51 bp, Homo sapiens
cttaatttgctgtatgaagtacaactgaggatgcctcacttcatgctgtat

SEQ ID NO: 14469 - DNA, 33 bp, Homo sapiens
ggttctgaactctaaagatgctgtgctttaagt

SEQ ID NO: 14470 - DNA, 33 bp, Homo sapiens
tcaagtttaagcaaaatatgctgtctctatcaa

SEQ ID NO: 14471 - DNA, 33 bp, Homo sapiens
ttatatcttccaacagtattcagggctaggcaa

SEQ ID NO: 14472 - DNA, 33 bp, Homo sapiens
ttatgtgttgttaaactgttaaatgttcaatct

SEQ ID NO: 14473 - DNA, 51 bp, Homo sapiens
agctcaattatctttactaccttcggaaatacagtatctctccacgtggga

SEQ ID NO: 14474 - DNA, 33 bp, Homo sapiens
gggcctgtactcagaaggaatcccatcaagaca

SEQ ID NO: 14475 - DNA, 33 bp, Homo sapiens
atgtctataaatgagcgcaaaaggaaattaaaa

SEQ ID NO: 14476 - DNA, 33 bp, Homo sapiens
aacattatgagaatcattaacctgtacccttat

SEQ ID NO: 14477 - DNA, 33 bp, Homo sapiens
gcaaacaatcccattggaaagtggacatgaaca

SEQ ID NO: 14478 - DNA, 33 bp, Homo sapiens
ggtgttgtacctaaaatgtctttgccaaagctg

SEQ ID NO: 14479 - DNA, 51 bp, Homo sapiens
agcaaatagacaaaaatatgcttaatgttgttcataataattaaaattact

SEQ ID NO: 14480 - DNA, 33 bp, Homo sapiens
cctctatctccacgaattcaattgatttaattt

SEQ ID NO: 14481 - DNA, 33 bp, Homo sapiens
aattatgaagtcaaatgagtatcatgcatgagg

SEQ ID NO: 14482 - DNA, 33 bp, Homo sapiens
ctttcttaaatcactataacctacaatcaacac

SEQ ID NO: 14483 - DNA, 33 bp, Homo sapiens
gaaatggcaaagctacgggaacaataaaattcc

SEQ ID NO: 14484 - DNA, 33 bp, Homo sapiens
aattattacaaagctatcgtatgggaaggcagt

SEQ ID NO: 14485 - DNA, 51 bp, Homo sapiens
aacttgacatttgctcggtctacatgtgatcctaagggttccagataagat

SEQ ID NO: 14486 - DNA, 33 bp, Homo sapiens
gaatactcatttgcaattgttatgtgagaaaaa

SEQ ID NO: 14487 - DNA, 51 bp, Homo sapiens
acattaggtaggaatattgatggtacgatatcctgtatatggcctcatcag

SEQ ID NO: 14488 - DNA, 33 bp, Homo sapiens
cagattagattgtaaatgccacaagtgtggaaa

SEQ ID NO: 14489 - DNA, 33 bp, Homo sapiens
tgcagcacgaatatcatagcttccatatttgag

SEQ ID NO: 14490 - DNA, 33 bp, Homo sapiens
gtcctttgagaatttctatacattgtacaagtt

SEQ ID NO: 14491 - DNA, 33 bp, Homo sapiens
atgtaaaactaggaaatccaaatgcaacaagtg

SEQ ID NO: 14492 - DNA, 33 bp, Homo sapiens
acagaaataatgcacattccataatctcaaaca

SEQ ID NO: 14493 - DNA, 33 bp, Homo sapiens
actcaaatactgatgatcgctataaagacacat

SEQ ID NO: 14494 - DNA, 33 bp, Homo sapiens
aagaacagagtaattctcactcatttcttagat

SEQ ID NO: 14495 - DNA, 33 bp, Homo sapiens
catttattgcctatacgagagcctgaaacgatg

SEQ ID NO: 14496 - DNA, 33 bp, Homo sapiens
acaaagaaatataagagacagtttctgttttca

SEQ ID NO: 14497 - DNA, 51 bp, Homo sapiens
catagcccagagccaatctgtgcaataggatatgtccttcagtgtatagcc

SEQ ID NO: 14498 - DNA, 33 bp, Homo sapiens
gaacggatgaatgtaacgatttccacaggaatt

SEQ ID NO: 14499 - DNA, 51 bp, Homo sapiens
aagatataaagcaataataaaaccatagtacacatttcttttggcaccttc

SEQ ID NO: 14500 - DNA, 33 bp, Homo sapiens
gatgcactaggatcgatgccaggttcagagaat

SEQ ID NO: 14501 - DNA, 33 bp, Homo sapiens
agggaaatggagatactcaattatcaaacagtc

SEQ ID NO: 14502 - DNA, 33 bp, Homo sapiens
taatagcaaagaataattaaaatcccaaactta

SEQ ID NO: 14503 - DNA, 33 bp, Homo sapiens
ataatatttagagaaagaccatagctacagaag

SEQ ID NO: 14504 - DNA, 33 bp, Homo sapiens
gatttttctttgctcatcatggagagagctaaa

SEQ ID NO: 14505 - DNA, 33 bp, Homo sapiens
gctcaatattgctacagcgttgatgagaaaaat

SEQ ID NO: 14506 - DNA, 33 bp, Homo sapiens
catctcatggtaattagaaactctgattggctg

SEQ ID NO: 14507 - DNA, 51 bp, Homo sapiens
ttgaataaataccaaggagtgtgcttgctagattgtatgttaagtgtatgt

SEQ ID NO: 14508 - DNA, 33 bp, Homo sapiens
tgtcagctctgacatcgattattccagggttct

SEQ ID NO: 14509 - DNA, 33 bp, Homo sapiens
ggctaaatgggggtacggatgagaaagtgaaag

SEQ ID NO: 14510 - DNA, 33 bp, Homo sapiens
tttttcacataagagcgctgagacctccccagg

SEQ ID NO: 14511 - DNA, 33 bp, Homo sapiens
ttagtggctggccaggcagacgagttttggttg

SEQ ID NO: 14512 - DNA, 51 bp, Homo sapiens
tgccctaatccagctagctatagaatataaggtcttacaattatagggtca

SEQ ID NO: 14513 - DNA, 33 bp, Homo sapiens
tcttggctcactgcaaccttagctcactgcaac

SEQ ID NO: 14514 - DNA, 33 bp, Homo sapiens
tttctctcaattaccatgtcccaattctagaga

SEQ ID NO: 14515 - DNA, 33 bp, Homo sapiens
cttaattatgtcgaggtccaacaacacatggta

SEQ ID NO: 14516 - DNA, 33 bp, Homo sapiens
ataccagtgtttctccggaagcaaatggagcac

SEQ ID NO: 14517 - DNA, 33 bp, Homo sapiens
gcccatcctactgtcagggtgacctcatctgtc

SEQ ID NO: 14518 - DNA, 33 bp, Homo sapiens
ttacaaatcttactactatgctatctgtccaac

SEQ ID NO: 14519 - DNA, 33 bp, Homo sapiens
tggcttcaccgggttcgaggatgaaaatttcac

SEQ ID NO: 14520 - DNA, 33 bp, Homo sapiens
ccattcaagttaataagcgcagggctgggcatg

SEQ ID NO: 14521 - DNA, 33 bp, Homo sapiens
gggccagaaattgtcaggctcccaagcttgcac

SEQ ID NO: 14522 - DNA, 33 bp, Homo sapiens
tggtgaagctgggatcggaacctgtttagactt

SEQ ID NO: 14523 - DNA, 33 bp, Homo sapiens
tctggtgcacatagtaggagttgcgcttggcac

SEQ ID NO: 14524 - DNA, 33 bp, Homo sapiens
cttgccagccatgctatgatgcacacagatgtg

SEQ ID NO: 14525 - DNA, 33 bp, Homo sapiens
catatctcctgtctccgaaggccctccagtgtg

SEQ ID NO: 14526 - DNA, 33 bp, Homo sapiens
ttagtaattaggactcgctttcagggccagtcc

SEQ ID NO: 14527 - DNA, 33 bp, Homo sapiens
aaagatatcacactgatccattacactgatgac

SEQ ID NO: 14528 - DNA, 33 bp, Homo sapiens
gagtctggattctgtctctttctgggcatatct

SEQ ID NO: 14529 - DNA, 51 bp, Homo sapiens
ggtggctacagagggaatagctaaccgagtttcaggtgacagaaggaggag

SEQ ID NO: 14530 - DNA, 33 bp, Homo sapiens
catccaacaagtggccgccacactgctgggaca

SEQ ID NO: 14531 - DNA, 33 bp, Homo sapiens
ctagtaggtgctcaaagaagccattcactcttt

SEQ ID NO: 14532 - DNA, 33 bp, Homo sapiens
gtcgtgtgtacaggccgagccccagtggcgtag

SEQ ID NO: 14533 - DNA, 33 bp, Homo sapiens
aggtcaaatgccagaactgtgtcaccatcaaat

SEQ ID NO: 14534 - DNA, 33 bp, Homo sapiens
ctgctaatgtggacagtagactttatccctcct

SEQ ID NO: 14535 - DNA, 33 bp, Homo sapiens
ggatgccacagtgttaggtagagcagtgatacg

SEQ ID NO: 14536 - DNA, 33 bp, Homo sapiens
atctgaatgtgtgtcatggtattttttgtggaa

SEQ ID NO: 14537 - DNA, 33 bp, Homo sapiens
ggcaatgagtcagtaatgtggtgcagtggtcca

SEQ ID NO: 14538 - DNA, 33 bp, Homo sapiens
gcaactgtagtcccacgcttgcttcttgtgctt

SEQ ID NO: 14539 - DNA, 33 bp, Homo sapiens
ggtgttctcacgttcatgttgtccttatgtaac

SEQ ID NO: 14540 - DNA, 33 bp, Homo sapiens
tttaaggtcagcatactcatacggctgcaatat

SEQ ID NO: 14541 - DNA, 33 bp, Homo sapiens
gcaacgaacttgataagtggggtttagaagtag

SEQ ID NO: 14542 - DNA, 33 bp, Homo sapiens
agacttctaagctagcgattaagtgtattttct

SEQ ID NO: 14543 - DNA, 33 bp, Homo sapiens
caagcagtctgacttatgcacttaaccacagtt

SEQ ID NO: 14544 - DNA, 33 bp, Homo sapiens
aagaaattcactgtgaccaaacacacacacaca

SEQ ID NO: 14545 - DNA, 33 bp, Homo sapiens
gcagaccctgcaaacagtctatctcggagacag

SEQ ID NO: 14546 - DNA, 33 bp, Homo sapiens
aaaagttcttagggaatgtaatgtccatgagat

SEQ ID NO: 14547 - DNA, 33 bp, Homo sapiens
aacacgagtcacaatcggaacttatatatttac

SEQ ID NO: 14548 - DNA, 33 bp, Homo sapiens
cctatgagagggtacatgctaggaatttgagaa

SEQ ID NO: 14549 - DNA, 33 bp, Homo sapiens
tacttgcttgaatgtatagggatgatttatcga

SEQ ID NO: 14550 - DNA, 33 bp, Homo sapiens
ggtccctatgggctacgacaggacaagaagaac

SEQ ID NO: 14551 - DNA, 33 bp, Homo sapiens
atcaccatgatgtacagtaatagatgtcttgaa

SEQ ID NO: 14552 - DNA, 33 bp, Homo sapiens
ccatttgttgaaaagaccattcttcctgcattt

SEQ ID NO: 14553 - DNA, 33 bp, Homo sapiens
tactcgctgcaagaaagagagaagcaaaatagt

SEQ ID NO: 14554 - DNA, 33 bp, Homo sapiens
agggcagtgagcctcatgtggattctgtttcta

SEQ ID NO: 14555 - DNA, 33 bp, Homo sapiens
tcttaatgaggctacttaaaagcaggagaaaca

SEQ ID NO: 14556 - DNA, 33 bp, Homo sapiens
agtttatagataaggatatcaggaccgtcaatt

SEQ ID NO: 14557 - DNA, 33 bp, Homo sapiens
aatgtaatccaaatgctcagttatgggaaacta

SEQ ID NO: 14558 - DNA, 33 bp, Homo sapiens
tgaatgttaagctcactgatcttggcctcaggt

SEQ ID NO: 14559 - DNA, 33 bp, Homo sapiens
gtactaactacactaatgcaaaatgccaaaatt

SEQ ID NO: 14560 - DNA, 33 bp, Homo sapiens
ccattctcctgtataataaccccaatgccatca

SEQ ID NO: 14561 - DNA, 33 bp, Homo sapiens
ttgtgttatttggacgtccatttggaagaccat

SEQ ID NO: 14562 - DNA, 33 bp, Homo sapiens
agctgcttatatcaccggaagaaaagttttaca

SEQ ID NO: 14563 - DNA, 33 bp, Homo sapiens
agccttgctagaaagcgcgaggttggcacatct

SEQ ID NO: 14564 - DNA, 33 bp, Homo sapiens
atggcggtgctgtgtcgaaacaaagctcccagg

SEQ ID NO: 14565 - DNA, 33 bp, Homo sapiens
tgtggaatggtggtactgcaatggctacatgga

SEQ ID NO: 14566 - DNA, 33 bp, Homo sapiens
ttagggactgtgcatcgcaccttattcagtact

SEQ ID NO: 14567 - DNA, 33 bp, Homo sapiens
caagagcactcaagtgcagaacacaaggcaagt

SEQ ID NO: 14568 - DNA, 33 bp, Homo sapiens
ggttctgatgatttgctatctgcagttatctgg

SEQ ID NO: 14569 - DNA, 33 bp, Homo sapiens
tcgccacatcctgagagtagccaacgtgtgggg

SEQ ID NO: 14570 - DNA, 33 bp, Homo sapiens
gctatgccagctatgaggtgccatgcagtcatc

SEQ ID NO: 14571 - DNA, 33 bp, Homo sapiens
gatctagcttcaacaataatttataaggcacac

SEQ ID NO: 14572 - DNA, 33 bp, Homo sapiens
cagttccctgattgaattgtcacattgtcttaa

SEQ ID NO: 14573 - DNA, 33 bp, Homo sapiens
gatctaaggacatttcgccgaaaccaggcaaaa

SEQ ID NO: 14574 - DNA, 33 bp, Homo sapiens
ggcaaaaagactctacgcctgtaatagatgaaa

SEQ ID NO: 14575 - DNA, 33 bp, Homo sapiens
cctggctgactcaccatactaactgccctactc

SEQ ID NO: 14576 - DNA, 33 bp, Homo sapiens
cctgagcctgctgaaatgatagaaaatgcaatc

SEQ ID NO: 14577 - DNA, 33 bp, Homo sapiens
gtcacactactgacaagtgccaggatttgaatc

SEQ ID NO: 14578 - DNA, 33 bp, Homo sapiens
tcatcttcagtttccctggacttagcagaggga

SEQ ID NO: 14579 - DNA, 33 bp, Homo sapiens
ttatagaagataccagtcctggtcgcacacacc

SEQ ID NO: 14580 - DNA, 33 bp, Homo sapiens
gagaccaggtgacagcggcacttgaccattaca

SEQ ID NO: 14581 - DNA, 33 bp, Homo sapiens
cagaactatctgaagagagtctgatgtaattct

SEQ ID NO: 14582 - DNA, 33 bp, Homo sapiens
attcttgcctctgaaatatagtgatgagcccag

SEQ ID NO: 14583 - DNA, 33 bp, Homo sapiens
aggaagaatgacatccgaagggtgtggagcagc

SEQ ID NO: 14584 - DNA, 51 bp, Homo sapiens
aatgaaaatcagcagtctctaaatagcttcaccagaacccaatccaaccag

SEQ ID NO: 14585 - DNA, 51 bp, Homo sapiens
agggacagccgcattaactttagaatctgctaagtgtacatattaaatcgt

SEQ ID NO: 14586 - DNA, 33 bp, Homo sapiens
tgctgaaacaggaagagtatcagattcaacaga

SEQ ID NO: 14587 - DNA, 33 bp, Homo sapiens
ggcatgtcttgaagcatgtactactgtgacttg

SEQ ID NO: 14588 - DNA, 33 bp, Homo sapiens
actggcatgtttctgatgttgctaggtgtgttt

SEQ ID NO: 14589 - DNA, 33 bp, Homo sapiens
gttagctgttcctttgtttggctacgtccatgt

SEQ ID NO: 14590 - DNA, 33 bp, Homo sapiens
ccctcttcctccaaaatgaaagtacacctaagg

SEQ ID NO: 14591 - DNA, 33 bp, Homo sapiens
tcttgtcgcagcttcagagccctccaggtgtgc

SEQ ID NO: 14592 - DNA, 33 bp, Homo sapiens
tctgcagaaaggcaaatcataagttgtgatgac

SEQ ID NO: 14593 - DNA, 33 bp, Homo sapiens
aggcaaaaatctgctctataggttggactatcc

SEQ ID NO: 14594 - DNA, 33 bp, Homo sapiens
atatcaggctagaggataataattttgagggtc

SEQ ID NO: 14595 - DNA, 33 bp, Homo sapiens
agcatagtggcataagtaacaaaccatttgcag

SEQ ID NO: 14596 - DNA, 33 bp, Homo sapiens
ttgcacatagctaagagaatgactgcccttatt

SEQ ID NO: 14597 - DNA, 51 bp, Homo sapiens
tcatctagaagcatcttattaaaaatgatcagaatttaatacagcaggatt

SEQ ID NO: 14598 - DNA, 33 bp, Homo sapiens
acagccttgcatattatggcctacagatcaaca

SEQ ID NO: 14599 - DNA, 33 bp, Homo sapiens
ttaccccaggacttccgaattgggagatcttgc

SEQ ID NO: 14600 - DNA, 33 bp, Homo sapiens
gagaaccaaagcactcgctattacaaaggggcc

SEQ ID NO: 14601 - DNA, 51 bp, Homo sapiens
tgtaaacatctagacacacaatgtatgctaaatgtactactttaatttctt

SEQ ID NO: 14602 - DNA, 33 bp, Homo sapiens
atactaactgttaaaggatgatcctctacttat

SEQ ID NO: 14603 - DNA, 33 bp, Homo sapiens
gggaagcttggatcaatgaactgggcagcctta

SEQ ID NO: 14604 - DNA, 33 bp, Homo sapiens
aagatgcaaagaaacagagtgcgaatcgaagtc

SEQ ID NO: 14605 - DNA, 33 bp, Homo sapiens
tcatttaactcttacaggataaagtagctatta

SEQ ID NO: 14606 - DNA, 33 bp, Homo sapiens
ttaagcccttatcatgtattgtagccaaaacct

SEQ ID NO: 14607 - DNA, 33 bp, Homo sapiens
ctgcaggacataaggagagaatagcaactgata

SEQ ID NO: 14608 - DNA, 33 bp, Homo sapiens
gcacctactttatatctgacattgtgttggatg

SEQ ID NO: 14609 - DNA, 51 bp, Homo sapiens
ccccatgatcttctctcattaaacatttatttctggcaattaaacttattt

SEQ ID NO: 14610 - DNA, 51 bp, Homo sapiens
ctacactgatctgggagaaaattaatgaagtagcatcagtaatgtatataa

SEQ ID NO: 14611 - DNA, 51 bp, Homo sapiens
atatgtgcatgcgctcacacatacatgcataaatattttgggctctgtttc

SEQ ID NO: 14612 - DNA, 51 bp, Homo sapiens
aagtaatgggtcctggcaataactatggattttattttctttgttggtctt

SEQ ID NO: 14613 - DNA, 33 bp, Homo sapiens
gtaatgtcaggctgtagcatctgtgactgctgc

SEQ ID NO: 14614 - DNA, 33 bp, Homo sapiens
aaaggtgcaaatcatacaagagaaattgataaa

SEQ ID NO: 14615 - DNA, 33 bp, Homo sapiens
cttgggttggaccacatactgcttaagtcatct

SEQ ID NO: 14616 - DNA, 33 bp, Homo sapiens
aggctgttagtaagaggccttatattaatctgt

SEQ ID NO: 14617 - DNA, 33 bp, Homo sapiens
tttcccgtactgtagacaactcatcagctcaga

SEQ ID NO: 14618 - DNA, 33 bp, Homo sapiens
tgatatcaggtaaacatacttgcttgtatttta

SEQ ID NO: 14619 - DNA, 33 bp, Homo sapiens
gtaaagatggatttaagccactgtcatctcctg

SEQ ID NO: 14620 - DNA, 51 bp, Homo sapiens
cactggccattactgtttgtgggtatcttccccaaggcttctgaagagaag

SEQ ID NO: 14621 - DNA, 33 bp, Homo sapiens
taaatactgataataagcatgaatggcaagagt

SEQ ID NO: 14622 - DNA, 33 bp, Homo sapiens
accacttggtgcagcaggaaaatgttctagttc

SEQ ID NO: 14623 - DNA, 33 bp, Homo sapiens
gctctctctttgatactcttattgcctttcttt

SEQ ID NO: 14624 - DNA, 33 bp, Homo sapiens
tacctaactggtttgagaactcacaaaaaacta

SEQ ID NO: 14625 - DNA, 33 bp, Homo sapiens
gcaattgcagactttataccagtttcagcagcg

SEQ ID NO: 14626 - DNA, 33 bp, Homo sapiens
accaaacatttgtcgactattgaattaacactt

SEQ ID NO: 14627 - DNA, 33 bp, Homo sapiens
cttcacattgacattggaggatgtgatgactat

SEQ ID NO: 14628 - DNA, 33 bp, Homo sapiens
ttgcagcactattcgcgatggcagagacagaat

SEQ ID NO: 14629 - DNA, 33 bp, Homo sapiens
gtcctgtgtgatacactgtcttccttagtcttt

SEQ ID NO: 14630 - DNA, 33 bp, Homo sapiens
agggctccacagaaaagctgaggaagccaaagg

SEQ ID NO: 14631 - DNA, 33 bp, Homo sapiens
ctatccacgcctgggagaatgacctccaacttg

SEQ ID NO: 14632 - DNA, 33 bp, Homo sapiens
catgtcagcttggctaggtggaagcagatttcc

SEQ ID NO: 14633 - DNA, 33 bp, Homo sapiens
ccactgtgaaccttaggccatcatgcccatgtt

SEQ ID NO: 14634 - DNA, 51 bp, Homo sapiens
ggctatttcacaggaacctcagatacaatactttcccctaaagcctgctct

SEQ ID NO: 14635 - DNA, 51 bp, Homo sapiens
cttctagatctgtagaaacacatcagagctttttaaatcctctatagccat

SEQ ID NO: 14636 - DNA, 33 bp, Homo sapiens
cagagtaggatgcttacacaaagaaacagcttg

SEQ ID NO: 14637 - DNA, 33 bp, Homo sapiens
gttagtctacaccaaataaattctgacccccaa

SEQ ID NO: 14638 - DNA, 51 bp, Homo sapiens
ttctctcctggccaccagcagaaactgagtagagaataaactctcaggcta

SEQ ID NO: 14639 - DNA, 51 bp, Homo sapiens
ggtttaaatttcagtaagattttcagggcagaatgagacttccggcaacta

SEQ ID NO: 14640 - DNA, 51 bp, Homo sapiens
atgtttctctcctgagctaaaggtatccactgaggaaaggaattttgtggt

SEQ ID NO: 14641 - DNA, 33 bp, Homo sapiens
ggtccactttgaacacgatgaaaacaggacaag

SEQ ID NO: 14642 - DNA, 33 bp, Homo sapiens
gactggcaggataatccagaactagttagaatc

SEQ ID NO: 14643 - DNA, 33 bp, Homo sapiens
gttattttatctggtctacaaaacaaaccaaca

SEQ ID NO: 14644 - DNA, 51 bp, Homo sapiens
cttcccagagagacgaattcagggatgttgctccacggtggctccgaccca

SEQ ID NO: 14645 - DNA, 33 bp, Homo sapiens
ctgagattcttaccaggaaacccagagaagccc

SEQ ID NO: 14646 - DNA, 33 bp, Homo sapiens
ctgctggtccaggagcgcacttggagaaccact

SEQ ID NO: 14647 - DNA, 33 bp, Homo sapiens
agagctggcacaaccagagcacctctctaccca

SEQ ID NO: 14648 - DNA, 33 bp, Homo sapiens
ggcttgtgaggaaggctaaccataccatgaaag

SEQ ID NO: 14649 - DNA, 33 bp, Homo sapiens
ttgtgtagagtaggtatcattgcatccattttc

SEQ ID NO: 14650 - DNA, 33 bp, Homo sapiens
attattttttgaagtatgtcaatggagtatttt

SEQ ID NO: 14651 - DNA, 33 bp, Homo sapiens
gcccattccagtggaacagaagtgctactttgg

SEQ ID NO: 14652 - DNA, 33 bp, Homo sapiens
tagtcctagagtagaatcatgctgtaaaataga

SEQ ID NO: 14653 - DNA, 33 bp, Homo sapiens
aaggaattttagcttatgaaagcaatcagagaa

SEQ ID NO: 14654 - DNA, 33 bp, Homo sapiens
ccaacaatgctgtggatctaacaagagaagaag

SEQ ID NO: 14655 - DNA, 33 bp, Homo sapiens
aactgccctctagccatgagagttactacaatt

SEQ ID NO: 14656 - DNA, 51 bp, Homo sapiens
actgaatatgttatagggatagaaactaatgacagagaaaaaacaaaatta

SEQ ID NO: 14657 - DNA, 33 bp, Homo sapiens
tcttcttgttctgaaatgccataaagagccagc

SEQ ID NO: 14658 - DNA, 33 bp, Homo sapiens
ctgatcataatttcccgaatctctcgctccatt

SEQ ID NO: 14659 - DNA, 33 bp, Homo sapiens
aacactagggccataattagtattcataaatgt

SEQ ID NO: 14660 - DNA, 33 bp, Homo sapiens
ccagtgaagagtgacatcaaaaatcatagctga

SEQ ID NO: 14661 - DNA, 33 bp, Homo sapiens
gctcctagaactcttggaacactttcatgcctt

SEQ ID NO: 14662 - DNA, 51 bp, Homo sapiens
ttaagattaaataaaggactttctagtaatcaagagtgattggtttttctt

SEQ ID NO: 14663 - DNA, 51 bp, Homo sapiens
ccaaacagcacatgattattcgtcagacagtttcgtattccagatactgga

SEQ ID NO: 14664 - DNA, 33 bp, Homo sapiens
atggacgttatcaaggtcagctgccggcactct

SEQ ID NO: 14665 - DNA, 33 bp, Homo sapiens
agctacaaattttccagagaatgtctacatgta

SEQ ID NO: 14666 - DNA, 33 bp, Homo sapiens
tagtttccacttatgcgaggcactgtacctaaa

SEQ ID NO: 14667 - DNA, 33 bp, Homo sapiens
ttcctgtaagcaagaattggcaagtaacaattc

SEQ ID NO: 14668 - DNA, 33 bp, Homo sapiens
gtactttagcgatatcgatgagacatctaggtg

SEQ ID NO: 14669 - DNA, 33 bp, Homo sapiens
ctctagattggggacatagggttatcatttttc

SEQ ID NO: 14670 - DNA, 51 bp, Homo sapiens
attccagtagagtaaattcataacagtgtaagcagccttatccagaaacag

SEQ ID NO: 14671 - DNA, 33 bp, Homo sapiens
tctgtagaaagctatagaagaagtcaaggtaag

SEQ ID NO: 14672 - DNA, 33 bp, Homo sapiens
aatgatatgactcatggaaagtgattagttcac

SEQ ID NO: 14673 - DNA, 33 bp, Homo sapiens
acaaattagtagacaaggctaatgcaccaaaaa

SEQ ID NO: 14674 - DNA, 33 bp, Homo sapiens
tcttaagtgtctgctatgatcttaatatgtctc

SEQ ID NO: 14675 - DNA, 33 bp, Homo sapiens
attaggaatgagactcgagccatataaagtcaa

SEQ ID NO: 14676 - DNA, 33 bp, Homo sapiens
gaaagccagcctacaaggtcagcatgaaatcac

SEQ ID NO: 14677 - DNA, 33 bp, Homo sapiens
agactattttgtcatatagttggtaaggcttat

SEQ ID NO: 14678 - DNA, 33 bp, Homo sapiens
gattccaaagtgacctgaaggaaattcgaattt

SEQ ID NO: 14679 - DNA, 33 bp, Homo sapiens
caataacaacaacacagtcccaatggcattttc

SEQ ID NO: 14680 - DNA, 33 bp, Homo sapiens
tctttcaaaagttgaggacacaagaatgcagca

SEQ ID NO: 14681 - DNA, 33 bp, Homo sapiens
tcagtctaactcctactcattctttaaggattc

SEQ ID NO: 14682 - DNA, 51 bp, Homo sapiens
taatggttccgtatgtaccaacttggaaaaagcggaaaatctattcatgga

SEQ ID NO: 14683 - DNA, 51 bp, Homo sapiens
aacctaaagcatatgtagttaaatatattagaagtcaagccctgattaatt

SEQ ID NO: 14684 - DNA, 51 bp, Homo sapiens
cataaaaatacaggttaattaaacagaaatggtcagtgagggagtgaatgg

SEQ ID NO: 14685 - DNA, 51 bp, Homo sapiens
gacactgcatgataacttacgaattgtatattgcaagttatggatgataac

SEQ ID NO: 14686 - DNA, 51 bp, Homo sapiens
catatcccatctcattccaaaaatcggcttactggtaacttctttcaatac

SEQ ID NO: 14687 - DNA, 33 bp, Homo sapiens
gactccagaagaagggtagcagctgttggagat

SEQ ID NO: 14688 - DNA, 33 bp, Homo sapiens
ttgcctattgctaatatagtaaaagccacaata

SEQ ID NO: 14689 - DNA, 33 bp, Homo sapiens
tgctcaatctcagggatctgtcaaatggttctg

SEQ ID NO: 14690 - DNA, 33 bp, Homo sapiens
ttttaacacaggtggagtatcagaaaaatgtag

SEQ ID NO: 14691 - DNA, 51 bp, Homo sapiens
tatgagccccactgtggatctgtacgtttccttagggcattggagcttcag

SEQ ID NO: 14692 - DNA, 33 bp, Homo sapiens
ctgtcttaattactcagtgactgttcaaagaaa

SEQ ID NO: 14693 - DNA, 33 bp, Homo sapiens
agatgatgcatttctcggaatgtgtccccacat

SEQ ID NO: 14694 - DNA, 33 bp, Homo sapiens
tacttttagcagtcacggaccccaagcccaaac

SEQ ID NO: 14695 - DNA, 51 bp, Homo sapiens
agatcgcataatttagtttagaatacagagatcttgtcacctttcctctaa

SEQ ID NO: 14696 - DNA, 33 bp, Homo sapiens
aaagatatgtacatcagcattggataactgggc

SEQ ID NO: 14697 - DNA, 33 bp, Homo sapiens
ttattatttgacagtatagtatggagactacag

SEQ ID NO: 14698 - DNA, 33 bp, Homo sapiens
ccactctggtttataagatacctgaaatacctg

SEQ ID NO: 14699 - DNA, 33 bp, Homo sapiens
gagtactattacaaaggaagtgaccagatttga

SEQ ID NO: 14700 - DNA, 51 bp, Homo sapiens
ctctacatgtagatataggtattaatataagcatatgtgtaacatatatgt

SEQ ID NO: 14701 - DNA, 33 bp, Homo sapiens
gacaatacggcatttatctaccacaggcaatga

SEQ ID NO: 14702 - DNA, 33 bp, Homo sapiens
gtaaccacaagcctaacctgcatatgaagagca

SEQ ID NO: 14703 - DNA, 33 bp, Homo sapiens
attgtattatattaagtcaaaggtgtatattgt

SEQ ID NO: 14704 - DNA, 33 bp, Homo sapiens
cagtctttctctgtaactctctatacggagtgc

SEQ ID NO: 14705 - DNA, 33 bp, Homo sapiens
aagggcagacattttatgtgtttgctaaaatcc

SEQ ID NO: 14706 - DNA, 33 bp, Homo sapiens
cacccttacaggaagatcttaatgacagaacat

SEQ ID NO: 14707 - DNA, 33 bp, Homo sapiens
gagtaattgaaatcacgggaatggatgagactc

SEQ ID NO: 14708 - DNA, 33 bp, Homo sapiens
ctaaaagctcgtagccggcaatttccctgccaa

SEQ ID NO: 14709 - DNA, 33 bp, Homo sapiens
ggatgaatagtctacatagcaaactccttccat

SEQ ID NO: 14710 - DNA, 33 bp, Homo sapiens
catagaaccaattgaagtcagtctgctttttat

SEQ ID NO: 14711 - DNA, 33 bp, Homo sapiens
aaaggactagagataatgcaagtaaatctgaca

SEQ ID NO: 14712 - DNA, 33 bp, Homo sapiens
gcagctctatcttgaggctaggactggtgagat

SEQ ID NO: 14713 - DNA, 51 bp, Homo sapiens
ttattctccattctccacttcgtacgccacatatacataagagttttcaaa

SEQ ID NO: 14714 - DNA, 51 bp, Homo sapiens
ctccttcaatgtctgtgagaagaaggctgaagggtgagctaagtccatcca

SEQ ID NO: 14715 - DNA, 51 bp, Homo sapiens
ggtttctgactttggcaagttgctcgatctctccaagactgtttttggaat

SEQ ID NO: 14716 - DNA, 33 bp, Homo sapiens
acgtggtgattgtccaggacatggcaaagtggt

SEQ ID NO: 14717 - DNA, 33 bp, Homo sapiens
gggacctgcaagagaattgatctgtgctggcac

SEQ ID NO: 14718 - DNA, 33 bp, Homo sapiens
aggaattcagcccagagaagagtcagtcagaaa

SEQ ID NO: 14719 - DNA, 33 bp, Homo sapiens
ttggtgaagtattatctgaagtcaaaaagcagg

SEQ ID NO: 14720 - DNA, 33 bp, Homo sapiens
ctagagtgtgtctgcattaagatcactggagcc

SEQ ID NO: 14721 - DNA, 33 bp, Homo sapiens
gtggctaaaaatcacagtgtctttgatgtactt

SEQ ID NO: 14722 - DNA, 33 bp, Homo sapiens
aatctagttcacaatgtatgagcctttctctgc

SEQ ID NO: 14723 - DNA, 33 bp, Homo sapiens
ttttttgctacccaaatgactgtggattaagag

SEQ ID NO: 14724 - DNA, 33 bp, Homo sapiens
aagatgcttggcatcatccaaagtgaccaatga

SEQ ID NO: 14725 - DNA, 33 bp, Homo sapiens
gctgtgcagccttggagaagttgcataacctct

SEQ ID NO: 14726 - DNA, 33 bp, Homo sapiens
aaagtttattttgccagtctcttaactacctat

SEQ ID NO: 14727 - DNA, 51 bp, Homo sapiens
ggtccctggacggagaatccagtattggtggcccactggctcctgctggcc

SEQ ID NO: 14728 - DNA, 33 bp, Homo sapiens
ttggaatggtcaaaaagtagaagcccaggtggt

SEQ ID NO: 14729 - DNA, 33 bp, Homo sapiens
ccagtaatcttccttcgaattcatgaaacactg

SEQ ID NO: 14730 - DNA, 33 bp, Homo sapiens
aaagaaaatctgtctagagtgctgaagcagcta

SEQ ID NO: 14731 - DNA, 33 bp, Homo sapiens
tgatattcctgcccaggaacttaagaactgccc

SEQ ID NO: 14732 - DNA, 33 bp, Homo sapiens
acattcttaaaagccagtgctacagtgggaatg

SEQ ID NO: 14733 - DNA, 33 bp, Homo sapiens
acacactgggactaccgctgctctgtgagacaa

SEQ ID NO: 14734 - DNA, 33 bp, Homo sapiens
tcccagacctccacactattagtccacgtgaat

SEQ ID NO: 14735 - DNA, 51 bp, Homo sapiens
agatggcactcctctagtcatctcatatcccaagtcttctcagaccccacc

SEQ ID NO: 14736 - DNA, 33 bp, Homo sapiens
gtatgaccagagctgagaacagattatgtgaaa

SEQ ID NO: 14737 - DNA, 33 bp, Homo sapiens
tgctcttgatcatggataaatagcaattctacc

SEQ ID NO: 14738 - DNA, 33 bp, Homo sapiens
ccctcaaggtcataaattcccaactggtcatta

SEQ ID NO: 14739 - DNA, 33 bp, Homo sapiens
taccccagcctttaccgctatgcaatataggca

SEQ ID NO: 14740 - DNA, 33 bp, Homo sapiens
caaaagcacgggtaacgaatgcaaaaattgata

SEQ ID NO: 14741 - DNA, 33 bp, Homo sapiens
tgactggaatcaattatctagcaaacaatttgg

SEQ ID NO: 14742 - DNA, 33 bp, Homo sapiens
tcaaaattcacttaccgatattgatcagactct

SEQ ID NO: 14743 - DNA, 33 bp, Homo sapiens
ctgaaatccaggcttctagacttttccttgcct

SEQ ID NO: 14744 - DNA, 33 bp, Homo sapiens
ggttgtggagaaaaaagaacgcttatacacaat

SEQ ID NO: 14745 - DNA, 33 bp, Homo sapiens
gagaatttgcaaagaatgggagacacccttatt

SEQ ID NO: 14746 - DNA, 33 bp, Homo sapiens
atagtccagaagggaagatagattattgtatta

SEQ ID NO: 14747 - DNA, 33 bp, Homo sapiens
aacaaacaaacaaaaatctgatcttgcaatttg

SEQ ID NO: 14748 - DNA, 33 bp, Homo sapiens
agctagttgaagaatatgattgccttacaaatg

SEQ ID NO: 14749 - DNA, 33 bp, Homo sapiens
ctccttttcattaaaattggcccagcagggact

SEQ ID NO: 14750 - DNA, 33 bp, Homo sapiens
agtgctgaagtgctgagtagcggtgttcctaat

SEQ ID NO: 14751 - DNA, 33 bp, Homo sapiens
ctcagaaggcaagccatactcattaggtcatag

SEQ ID NO: 14752 - DNA, 33 bp, Homo sapiens
actttacttaagctcttactaaaggaagcatct

SEQ ID NO: 14753 - DNA, 33 bp, Homo sapiens
aggaatctgacaaggatgagagaattctggctt

SEQ ID NO: 14754 - DNA, 33 bp, Homo sapiens
attcttgagagacgactccaggaaaaggtcaat

SEQ ID NO: 14755 - DNA, 33 bp, Homo sapiens
ttctgcccaaccattcgcttatctgtccgcaca

SEQ ID NO: 14756 - DNA, 51 bp, Homo sapiens
gatccaattaagacttgggtccccttagataatgagtggaagagtgtggtg

SEQ ID NO: 14757 - DNA, 33 bp, Homo sapiens
ggtggcttttctaacccgggggaatagcttcag

SEQ ID NO: 14758 - DNA, 33 bp, Homo sapiens
ggagtttctaaaagtccaaattgcacaaagaga

SEQ ID NO: 14759 - DNA, 33 bp, Homo sapiens
cagaaagacaaccatatccggaatctggtccgg

SEQ ID NO: 14760 - DNA, 33 bp, Homo sapiens
gtcgctgcagatgtggtatttctctcccaaaga

SEQ ID NO: 14761 - DNA, 33 bp, Homo sapiens
ctctgagctatcagtcgcaatgcaagagggagc

SEQ ID NO: 14762 - DNA, 33 bp, Homo sapiens
gaaaggtctttgagaataggaattggtccatga

SEQ ID NO: 14763 - DNA, 33 bp, Homo sapiens
ccggttctgtcccaccgaaactattagatgtca

SEQ ID NO: 14764 - DNA, 33 bp, Homo sapiens
ttgttctcttggcccggagtatgtacctccctg

SEQ ID NO: 14765 - DNA, 33 bp, Homo sapiens
agatacaggaaacccagtgaacccaaagcacag

SEQ ID NO: 14766 - DNA, 33 bp, Homo sapiens
aagtattttgggaagagatggcaaatccatatc

SEQ ID NO: 14767 - DNA, 33 bp, Homo sapiens
aagaggaaaattgatatactgtcatctgtttta

SEQ ID NO: 14768 - DNA, 33 bp, Homo sapiens
cttcttcacagtttcatagatagatttattctt

SEQ ID NO: 14769 - DNA, 33 bp, Homo sapiens
ctctgtttctctgggcgagcagaaagcaaaagg

SEQ ID NO: 14770 - DNA, 33 bp, Homo sapiens
gtgagtatagcattgatgttctaaacagcccta

SEQ ID NO: 14771 - DNA, 33 bp, Homo sapiens
agtttttatccattcacaccccctcaatctggc

SEQ ID NO: 14772 - DNA, 33 bp, Homo sapiens
gaacatctcctctgcttaagtacttgagggtag

SEQ ID NO: 14773 - DNA, 33 bp, Homo sapiens
ttctgtatctgctaaattggaaggactgccctt

SEQ ID NO: 14774 - DNA, 33 bp, Homo sapiens
cctggggtaccgggtggaagagattgtgctcag

SEQ ID NO: 14775 - DNA, 33 bp, Homo sapiens
tatgagtcatgcctactggcccgaggctgcctc

SEQ ID NO: 14776 - DNA, 33 bp, Homo sapiens
gagtgctcaattgcgcgccatatttatatattg

SEQ ID NO: 14777 - DNA, 33 bp, Homo sapiens
gtgagacagcaatgaagagaacaggcaaggtcc

SEQ ID NO: 14778 - DNA, 33 bp, Homo sapiens
cagagcctcagagtgggaggtgttggtatttgc

SEQ ID NO: 14779 - DNA, 51 bp, Homo sapiens
ttgttatctctgggtagcaggattatagagcattttctttttaagaatatt

SEQ ID NO: 14780 - DNA, 33 bp, Homo sapiens
gatttagtgcccatgatgatgatgaattattag

SEQ ID NO: 14781 - DNA, 33 bp, Homo sapiens
ctctctccagctaaaatatcaggaaaagggcag

SEQ ID NO: 14782 - DNA, 33 bp, Homo sapiens
ctcgttctttttcacgtccatgtagattccata

SEQ ID NO: 14783 - DNA, 33 bp, Homo sapiens
aaaaaatcaaacctgagtataatgacatctgta

SEQ ID NO: 14784 - DNA, 33 bp, Homo sapiens
agttatattgagaatagagaacactgttcatac

SEQ ID NO: 14785 - DNA, 33 bp, Homo sapiens
caccaaaatgcctcatgacgtttactaaatagt

SEQ ID NO: 14786 - DNA, 33 bp, Homo sapiens
gaatgagcagaataaagcacctgaagtataaaa

SEQ ID NO: 14787 - DNA, 33 bp, Homo sapiens
aaccccacaatattaactcaatgtaattcacca

SEQ ID NO: 14788 - DNA, 33 bp, Homo sapiens
acataaaatatgctaacaataatgacagttgat

SEQ ID NO: 14789 - DNA, 33 bp, Homo sapiens
gtgcaaaacagtatcgtatgttgcatgcaaatc

SEQ ID NO: 14790 - DNA, 33 bp, Homo sapiens
ggaaagagttggaccacgtatctaatactccaa

SEQ ID NO: 14791 - DNA, 33 bp, Homo sapiens
ttgatatcactgagtctctgtggcacaactcat

SEQ ID NO: 14792 - DNA, 33 bp, Homo sapiens
tacttgatcctggttatgaatagtcagcttgtt

SEQ ID NO: 14793 - DNA, 33 bp, Homo sapiens
acattatgaggaagaatatgaaactcaaaggta

SEQ ID NO: 14794 - DNA, 33 bp, Homo sapiens
gggataggctagatcagagatgccagggagaga

SEQ ID NO: 14795 - DNA, 33 bp, Homo sapiens
gaaatagtctataaaatgaagcggcagtaggag

SEQ ID NO: 14796 - DNA, 51 bp, Homo sapiens
agaaagagggaattatctcctggagtagttcgtaaagcatactgttttatg

SEQ ID NO: 14797 - DNA, 33 bp, Homo sapiens
attattgtccaaagaatataccagcatgatgca

SEQ ID NO: 14798 - DNA, 33 bp, Homo sapiens
gttttcagtgacatccggaggctgttttaccag

SEQ ID NO: 14799 - DNA, 33 bp, Homo sapiens
gtaggaggatcaagcagtgaacttggtagtgaa

SEQ ID NO: 14800 - DNA, 33 bp, Homo sapiens
attgagaaactaggcctatctattgtgagcagc

SEQ ID NO: 14801 - DNA, 33 bp, Homo sapiens
gttggcctctagtaaatacctcatccatcaagc

SEQ ID NO: 14802 - DNA, 33 bp, Homo sapiens
gattcaggccagtaattagaatgaagtttgggg

SEQ ID NO: 14803 - DNA, 33 bp, Homo sapiens
gttgtaggtgtcattatgtgtgactgtcatagt

SEQ ID NO: 14804 - DNA, 33 bp, Homo sapiens
ctgcctgaaacccagcgctaggtagtgtagcca

SEQ ID NO: 14805 - DNA, 33 bp, Homo sapiens
cccacctgcaatgcccgaatgagcagcggctcc

SEQ ID NO: 14806 - DNA, 33 bp, Homo sapiens
atcatcggaagtacacgcagtctcagacacaaa

SEQ ID NO: 14807 - DNA, 33 bp, Homo sapiens
atcctgaggttctccctatcctacaccatgtcc

SEQ ID NO: 14808 - DNA, 33 bp, Homo sapiens
tggtttctagtcctcttaacccatcaaggtgga

SEQ ID NO: 14809 - DNA, 33 bp, Homo sapiens
aggtcaggaaccctgcgacatactctcttctcc

SEQ ID NO: 14810 - DNA, 33 bp, Homo sapiens
aaaagttgacactgatgacaataaagcttttct

SEQ ID NO: 14811 - DNA, 33 bp, Homo sapiens
tcacaggaccaagcacgatgccttgcacaaagc

SEQ ID NO: 14812 - DNA, 33 bp, Homo sapiens
ctttatttttttatccgcagtgtacatcatata

SEQ ID NO: 14813 - DNA, 51 bp, Homo sapiens
tcagttgttctttttctgtcttccctattatcagcagctgttataagccct

SEQ ID NO: 14814 - DNA, 33 bp, Homo sapiens
caccacattctcagtgtaccgtgacttccttcc

SEQ ID NO: 14815 - DNA, 33 bp, Homo sapiens
ggagatggctacacaagtgtgaaaggatggttg

SEQ ID NO: 14816 - DNA, 33 bp, Homo sapiens
ctccaccagaaaccacgaaggctaatgttctag

SEQ ID NO: 14817 - DNA, 33 bp, Homo sapiens
ttttgaagactgtttctctcacatggttgccac

SEQ ID NO: 14818 - DNA, 33 bp, Homo sapiens
accgagtgagccttcctgcaattgactaatgtg

SEQ ID NO: 14819 - DNA, 33 bp, Homo sapiens
atacagattataaggacagcaataagtaatgtg

SEQ ID NO: 14820 - DNA, 33 bp, Homo sapiens
tagttacaggtccaacggagttcactctaagac

SEQ ID NO: 14821 - DNA, 33 bp, Homo sapiens
tttctttctcggtgaccgtaggagtggaaatga

SEQ ID NO: 14822 - DNA, 33 bp, Homo sapiens
tgttcacctctttaactgcaactgaatggatca

SEQ ID NO: 14823 - DNA, 33 bp, Homo sapiens
agaaactgtttacaaccaattagagactgggta

SEQ ID NO: 14824 - DNA, 33 bp, Homo sapiens
ccactgctgtaaataatagtgaagtgaataccc

SEQ ID NO: 14825 - DNA, 33 bp, Homo sapiens
cgcactgacagcctccgcgatgggaagatcaca

SEQ ID NO: 14826 - DNA, 51 bp, Homo sapiens
aggtactaggagggtcagagagaaatgcctgcttacctctaggaattggtc

SEQ ID NO: 14827 - DNA, 33 bp, Homo sapiens
ttctctgaaccccagattcatttatccagctca

SEQ ID NO: 14828 - DNA, 33 bp, Homo sapiens
ggaagggaaatcatacggctctaggctctaact

SEQ ID NO: 14829 - DNA, 33 bp, Homo sapiens
tagggcagtggtcttacaagggaatttgccaga

SEQ ID NO: 14830 - DNA, 33 bp, Homo sapiens
cgcatcctgatattcctacagagtcctgacttc

SEQ ID NO: 14831 - DNA, 33 bp, Homo sapiens
actttgtttctctgtatatttcccaaccatatg

SEQ ID NO: 14832 - DNA, 33 bp, Homo sapiens
caatatgtaagtaaatgagtacagttgcgtgcc

SEQ ID NO: 14833 - DNA, 33 bp, Homo sapiens
cactttagaaaaccggtagtgtctcctaaagct

SEQ ID NO: 14834 - DNA, 33 bp, Homo sapiens
agttcctactctctaggcatggcttccttctcc

SEQ ID NO: 14835 - DNA, 33 bp, Homo sapiens
gtgacatattgatgtctacctgaatattcagaa

SEQ ID NO: 14836 - DNA, 51 bp, Homo sapiens
acaggttttagggtagagaagaaggtaaaatgcaagcagatttatgtctat

SEQ ID NO: 14837 - DNA, 33 bp, Homo sapiens
tggatttctatagaactgcataatgccatgctt

SEQ ID NO: 14838 - DNA, 33 bp, Homo sapiens
tttgttatttttttgatgctacttcctaatttt

SEQ ID NO: 14839 - DNA, 33 bp, Homo sapiens
ataaaaagcagtgatacccaggttgtgtactgt

SEQ ID NO: 14840 - DNA, 33 bp, Homo sapiens
ttatgcatctggtatcgaataaaaattggaaag

SEQ ID NO: 14841 - DNA, 33 bp, Homo sapiens
ttagctggctttgaacgagttctctcttggaat

SEQ ID NO: 14842 - DNA, 33 bp, Homo sapiens
aacagacaccaggaccgccataccacacactgc

SEQ ID NO: 14843 - DNA, 33 bp, Homo sapiens
aaacacatagatggtacataaaggagataaggt

SEQ ID NO: 14844 - DNA, 33 bp, Homo sapiens
tttcttggtctagcaagaaatcattggtgagaa

SEQ ID NO: 14845 - DNA, 51 bp, Homo sapiens
ttgtagcacatggagagccctcgtggagagcaaaaaactttttgtaaattt

SEQ ID NO: 14846 - DNA, 33 bp, Homo sapiens
ggtggatcctctgtaatgcagagcaacatgatt

SEQ ID NO: 14847 - DNA, 33 bp, Homo sapiens
gctaacaacctaagatgaacccaagacccaaga

SEQ ID NO: 14848 - DNA, 33 bp, Homo sapiens
catatctagtggatagtagagtcggcaattaac

SEQ ID NO: 14849 - DNA, 33 bp, Homo sapiens
gttgaaataaggagcatagggcctttatccaca

SEQ ID NO: 14850 - DNA, 33 bp, Homo sapiens
tagattagatgattcctcaatgtccctttcaac

SEQ ID NO: 14851 - DNA, 33 bp, Homo sapiens
gaattttccagtgaaggacaggtctatctaaga

SEQ ID NO: 14852 - DNA, 33 bp, Homo sapiens
cagaggatgactttgagaccttgaggctcagct

SEQ ID NO: 14853 - DNA, 33 bp, Homo sapiens
acattgccctggttgctctccggtttgaaacaa

SEQ ID NO: 14854 - DNA, 33 bp, Homo sapiens
tacagcatttgatacataatatggatttctcct

SEQ ID NO: 14855 - DNA, 51 bp, Homo sapiens
tgctgttcatctcatgcccataaattaataaaccggtgatcagcaaatcag

SEQ ID NO: 14856 - DNA, 33 bp, Homo sapiens
gggctgtagaagggtagaggtccaacttctgta

SEQ ID NO: 14857 - DNA, 33 bp, Homo sapiens
tatatttatgtcctgctgattgagtatattcat

SEQ ID NO: 14858 - DNA, 51 bp, Homo sapiens
agaacaaatgaaggcactccaggtagcgagttcagtgtagtcagaggcaaa

SEQ ID NO: 14859 - DNA, 33 bp, Homo sapiens
cagcactctttgaggatagttagatagtatttg

SEQ ID NO: 14860 - DNA, 33 bp, Homo sapiens
attgtagtccccaaaatttctgatcaaccaaat

SEQ ID NO: 14861 - DNA, 33 bp, Homo sapiens
ccatttagacaagcgcgattctgaaaatgatgc

SEQ ID NO: 14862 - DNA, 33 bp, Homo sapiens
ccaaggctatattgaagtctctttggtccagtt

SEQ ID NO: 14863 - DNA, 33 bp, Homo sapiens
tagaatgaacgaatgatccctcgctaaaaccag

SEQ ID NO: 14864 - DNA, 33 bp, Homo sapiens
ggtggaaggcagatagtagtggactaaagaggt

SEQ ID NO: 14865 - DNA, 33 bp, Homo sapiens
tacaggtacatataaattgatttacaggtatct

SEQ ID NO: 14866 - DNA, 33 bp, Homo sapiens
gagcaggcttcctgtatgtcatcaaactcaaag

SEQ ID NO: 14867 - DNA, 33 bp, Homo sapiens
agcaatgctcctattcgcacttttttaagttag

SEQ ID NO: 14868 - DNA, 33 bp, Homo sapiens
ctgtagatagtttgaggattatgaaatgtgact

SEQ ID NO: 14869 - DNA, 33 bp, Homo sapiens
gagataaaatacagaatccttaacatgataaac

SEQ ID NO: 14870 - DNA, 33 bp, Homo sapiens
ttggctatattgtatatgactgagttccacatt

SEQ ID NO: 14871 - DNA, 33 bp, Homo sapiens
gacaagtttgtataaatcaatctgttctccttt

SEQ ID NO: 14872 - DNA, 33 bp, Homo sapiens
aagcttcctaataacagtaggctaggattaacc

SEQ ID NO: 14873 - DNA, 33 bp, Homo sapiens
agtagaatggacaccataaaatataaagagcca

SEQ ID NO: 14874 - DNA, 33 bp, Homo sapiens
ttgatactttttgtccgccttgtgctcattttc

SEQ ID NO: 14875 - DNA, 33 bp, Homo sapiens
gtccttttatcatttctctgaggctagctgaaa

SEQ ID NO: 14876 - DNA, 33 bp, Homo sapiens
aataaccgagagcaaattgttcaatccagcccc

SEQ ID NO: 14877 - DNA, 33 bp, Homo sapiens
cattaagtggccaagatagaatgcaaacctttt

SEQ ID NO: 14878 - DNA, 51 bp, Homo sapiens
acaatttttcttaagagctaaatgaccctcgttaggtggattttcctctct

SEQ ID NO: 14879 - DNA, 33 bp, Homo sapiens
ttctccaacaaccaattaacagatgtcttgaat

SEQ ID NO: 14880 - DNA, 33 bp, Homo sapiens
aagaactggtgtaatgcaactcaattctggtgc

SEQ ID NO: 14881 - DNA, 33 bp, Homo sapiens
ttctgattttataagacactgtgttaataccta

SEQ ID NO: 14882 - DNA, 33 bp, Homo sapiens
agcccagatcctacacgctcaggggccaaattt

SEQ ID NO: 14883 - DNA, 33 bp, Homo sapiens
tgtctattctctaaccggactgaggatatcaat

SEQ ID NO: 14884 - DNA, 33 bp, Homo sapiens
gaatagggctggcttatgaatccaggagttaat

SEQ ID NO: 14885 - DNA, 51 bp, Homo sapiens
tattcccacccagagcccagtgtaattgctttattgtatcaaattattgtc

SEQ ID NO: 14886 - DNA, 33 bp, Homo sapiens
gtcaaatgaaatcccaggccgtccaaatccgag

SEQ ID NO: 14887 - DNA, 33 bp, Homo sapiens
tttgtacttcctgttatgtcagtattgtgtgta

SEQ ID NO: 14888 - DNA, 33 bp, Homo sapiens
agtaaaagtttcaacatcatccgctagggcttg

SEQ ID NO: 14889 - DNA, 33 bp, Homo sapiens
tcccttccaacaacaatgtgaagcacagagctc

SEQ ID NO: 14890 - DNA, 33 bp, Homo sapiens
tgataaacctcacagttaatgatccagctgccg

SEQ ID NO: 14891 - DNA, 33 bp, Homo sapiens
tatcaacgtgtgcatcgaggcaactcatttcct

SEQ ID NO: 14892 - DNA, 51 bp, Homo sapiens
atacctcgaatcttactacaacagtgaacttaacacaaaaaaggacatttt

SEQ ID NO: 14893 - DNA, 51 bp, Homo sapiens
ttcactgctctgtctccagcagttagggttcattcttaggttctgaaatca

SEQ ID NO: 14894 - DNA, 33 bp, Homo sapiens
gacctgcttgttggaagggtgcaaatggaaact

SEQ ID NO: 14895 - DNA, 33 bp, Homo sapiens
ttatatgaagattgaggaagtatagaggaaaaa

SEQ ID NO: 14896 - DNA, 33 bp, Homo sapiens
atccctgtagccttgcgattatgtggctgttat

SEQ ID NO: 14897 - DNA, 33 bp, Homo sapiens
caaactttccacacatgacttaagagaagaaga

SEQ ID NO: 14898 - DNA, 33 bp, Homo sapiens
ttcatctctgcagagtgacaatggagttgctga

SEQ ID NO: 14899 - DNA, 33 bp, Homo sapiens
ttttatgagtcccagaggtttgctccaagtggt

SEQ ID NO: 14900 - DNA, 33 bp, Homo sapiens
ctttaggcttgctatatctttcactgaaaagca

SEQ ID NO: 14901 - DNA, 33 bp, Homo sapiens
cagtacatatagcttcgcataaagatcagccat

SEQ ID NO: 14902 - DNA, 33 bp, Homo sapiens
actgaaactactcaaattgggaagtcgtgcagg

SEQ ID NO: 14903 - DNA, 33 bp, Homo sapiens
tcttttttggtgtttgtacagctaaggatgcag

SEQ ID NO: 14904 - DNA, 33 bp, Homo sapiens
tccttccctgctttaattgattgatctcatcat

SEQ ID NO: 14905 - DNA, 33 bp, Homo sapiens
tctttgggtatagtgtgaatagagttgatttgc

SEQ ID NO: 14906 - DNA, 33 bp, Homo sapiens
acatgcagcaaagatagccttctcaaaataaaa

SEQ ID NO: 14907 - DNA, 33 bp, Homo sapiens
gatggactcctaaaccgatctttatctaactgt

SEQ ID NO: 14908 - DNA, 33 bp, Homo sapiens
gagaaagctattgcaagggatgatgttgaatac

SEQ ID NO: 14909 - DNA, 33 bp, Homo sapiens
atgcttgcagatgatcgatgtgcctgggatttg

SEQ ID NO: 14910 - DNA, 33 bp, Homo sapiens
gctcaactcctgaaattatgaagggaaatcttt

SEQ ID NO: 14911 - DNA, 33 bp, Homo sapiens
cccaccatgcgtagaaggggatatgtttccaag

SEQ ID NO: 14912 - DNA, 33 bp, Homo sapiens
accatttcaaagcttatcttctttcaaatacca

SEQ ID NO: 14913 - DNA, 33 bp, Homo sapiens
ttctgatactaccttctcaatttattaaattct

SEQ ID NO: 14914 - DNA, 33 bp, Homo sapiens
tctcagcaaggatcaccatgacagcgtccactg

SEQ ID NO: 14915 - DNA, 33 bp, Homo sapiens
aatcttaaaaacagaagctaaacatcagtgtct

SEQ ID NO: 14916 - DNA, 33 bp, Homo sapiens
agatgacttgtctcaattgtgcaaaatggctgc

SEQ ID NO: 14917 - DNA, 33 bp, Homo sapiens
tccttctcctggtgcattgatccatcttaactc

SEQ ID NO: 14918 - DNA, 33 bp, Homo sapiens
acatatgagtagtttgtataacccataacaatt

SEQ ID NO: 14919 - DNA, 33 bp, Homo sapiens
cagtgaataggtctccgaaggacagagtctgca

SEQ ID NO: 14920 - DNA, 33 bp, Homo sapiens
acttgtgaaccctctggacattcagtcgccaca

SEQ ID NO: 14921 - DNA, 33 bp, Homo sapiens
catgtattcaattgccgcagggtcttttccaaa

SEQ ID NO: 14922 - DNA, 33 bp, Homo sapiens
caccccttaatttacatgatcttagtgcttttc

SEQ ID NO: 14923 - DNA, 51 bp, Homo sapiens
gacagagtgagactctgtctaaaaagtaaataaatgagactttgtcagctc

SEQ ID NO: 14924 - DNA, 33 bp, Homo sapiens
tacagggtctgtgaccgaatacattgagaaact

SEQ ID NO: 14925 - DNA, 33 bp, Homo sapiens
tctctaaccagatcgaggctacagtttgtgaga

SEQ ID NO: 14926 - DNA, 33 bp, Homo sapiens
cctttcatcaagggccgcagatcccagctacag

SEQ ID NO: 14927 - DNA, 33 bp, Homo sapiens
gttgagattaggaagagaacttacaaaacagca

SEQ ID NO: 14928 - DNA, 33 bp, Homo sapiens
catttactgaaatctaggcccttttgtgtgatc

SEQ ID NO: 14929 - DNA, 33 bp, Homo sapiens
ccagggtagcagatacgacacccatgtgccaca

SEQ ID NO: 14930 - DNA, 51 bp, Homo sapiens
tgacaggtgtgaggtccaggtacactcggtcagattctctctcatttgggt

SEQ ID NO: 14931 - DNA, 33 bp, Homo sapiens
tttctttctcaaaaccgcaatcactccgagcat

SEQ ID NO: 14932 - DNA, 33 bp, Homo sapiens
tctaactcaacactgcgatgatgccctgagtaa

SEQ ID NO: 14933 - DNA, 51 bp, Homo sapiens
cctccagcagcctttcaacacatgcgctgcacacatgcccccatgtgtctc

SEQ ID NO: 14934 - DNA, 51 bp, Homo sapiens
aagatgaggaaggtaaatgaaaatctcatgtttataaagatctaggatgcc

SEQ ID NO: 14935 - DNA, 33 bp, Homo sapiens
aaaaaatccaaccaaagaaagcagcagaacaaa

SEQ ID NO: 14936 - DNA, 33 bp, Homo sapiens
tatgagataaagacaagagggaaatggtaggag

SEQ ID NO: 14937 - DNA, 33 bp, Homo sapiens
agatccttgctgtataggaacaggaatacagct

SEQ ID NO: 14938 - DNA, 33 bp, Homo sapiens
tccctaaaaaatttcgtaaatcatcctagtctt

SEQ ID NO: 14939 - DNA, 33 bp, Homo sapiens
tgtgatcatcaattaagtggctcttaattcctt

SEQ ID NO: 14940 - DNA, 33 bp, Homo sapiens
ggatgaatggaaaggacatattcaaggggggag

SEQ ID NO: 14941 - DNA, 33 bp, Homo sapiens
gcccagtcctaaagaacatgaaaacaacctctc

SEQ ID NO: 14942 - DNA, 33 bp, Homo sapiens
tatataacccttgcactacacattttgaaaact

SEQ ID NO: 14943 - DNA, 33 bp, Homo sapiens
atatgaaattgtgtcattaatcagtctttattt

SEQ ID NO: 14944 - DNA, 33 bp, Homo sapiens
ctttcattaggctcaatctccaacgatgggtat

SEQ ID NO: 14945 - DNA, 51 bp, Homo sapiens
cactcacatgccacatccaattctatgcaagccagtgtgggttcctcaact

SEQ ID NO: 14946 - DNA, 33 bp, Homo sapiens
catgttttaagagaacgactctggcttgctaag

SEQ ID NO: 14947 - DNA, 33 bp, Homo sapiens
cagcccttcgttaatagccactctcttttcaga

SEQ ID NO: 14948 - DNA, 33 bp, Homo sapiens
ggacgtatgtgtacaccaaaacttgatcacaag

SEQ ID NO: 14949 - DNA, 33 bp, Homo sapiens
caatgggcattcatcagactccaaaagcacggt

SEQ ID NO: 14950 - DNA, 51 bp, Homo sapiens
atactgtatgttttttgaataatgataaaagcatgtaacataacacaaaca

SEQ ID NO: 14951 - DNA, 51 bp, Homo sapiens
aagatgaatgtgtataatggtcttacagggatggagagtcaatatggggaa

SEQ ID NO: 14952 - DNA, 33 bp, Homo sapiens
acagcctactatttgacgaaagatcgtaaaaga

SEQ ID NO: 14953 - DNA, 33 bp, Homo sapiens
tcctgttaacagaagaggggagataaaacatca

SEQ ID NO: 14954 - DNA, 33 bp, Homo sapiens
ccactaaggagtttactatatgccagagtaaat

SEQ ID NO: 14955 - DNA, 33 bp, Homo sapiens
attgcaaaggcagtaagtagcacaccaagaaat

SEQ ID NO: 14956 - DNA, 33 bp, Homo sapiens
tcagttgaaatgagtcgaatctgaaaacccttg

SEQ ID NO: 14957 - DNA, 33 bp, Homo sapiens
tcaactcttattttacggactagcacaacatgc

SEQ ID NO: 14958 - DNA, 33 bp, Homo sapiens
cagcactgctttactatatgacattaatgcatt

SEQ ID NO: 14959 - DNA, 33 bp, Homo sapiens
ttgcaattgacagatcgctagataaaagagttt

SEQ ID NO: 14960 - DNA, 33 bp, Homo sapiens
ctttctgccagtgtaatatggacaaaattagta

SEQ ID NO: 14961 - DNA, 33 bp, Homo sapiens
acaatccaaattccaagcatctaagctgatttt

SEQ ID NO: 14962 - DNA, 33 bp, Homo sapiens
gctacatggtcattaggacatcccttcctctac

SEQ ID NO: 14963 - DNA, 33 bp, Homo sapiens
tgagtctcagatgagacctttgactttgagctt

SEQ ID NO: 14964 - DNA, 33 bp, Homo sapiens
agcagctactagagacgcaacttcagttaaaaa

SEQ ID NO: 14965 - DNA, 51 bp, Homo sapiens
gaaatattttaaaggaggactccgatcaccgagctttggtgttgatactga

SEQ ID NO: 14966 - DNA, 51 bp, Homo sapiens
tcttgggtcagagccctcaccaggatcgtggcccatcactcagcccctgcc

SEQ ID NO: 14967 - DNA, 33 bp, Homo sapiens
gtctccatcagcaggaggaagcgtttgggggaa

SEQ ID NO: 14968 - DNA, 33 bp, Homo sapiens
cttctagaaaggactcgctgtgcagctttgatg

SEQ ID NO: 14969 - DNA, 33 bp, Homo sapiens
gaattgatgcttgcccgctccagaagatctagc

SEQ ID NO: 14970 - DNA, 33 bp, Homo sapiens
tgggagaagatgtaaacaagtcagtatgtgaac

SEQ ID NO: 14971 - DNA, 33 bp, Homo sapiens
agtgatttttgcaagattcaagcaagatctagt

SEQ ID NO: 14972 - DNA, 33 bp, Homo sapiens
ctccgtggtagttagatgagcacagaggatggc

SEQ ID NO: 14973 - DNA, 33 bp, Homo sapiens
taataaatctctgaaaggataagtgagaaacca

SEQ ID NO: 14974 - DNA, 33 bp, Homo sapiens
tatttcttaccttttatcctcaaaacaaaggct

SEQ ID NO: 14975 - DNA, 33 bp, Homo sapiens
gctacagcaaccccaatccccacggtcacgtgc

SEQ ID NO: 14976 - DNA, 33 bp, Homo sapiens
cacttgccttgttcacgcaatatgtcatgcata

SEQ ID NO: 14977 - DNA, 33 bp, Homo sapiens
aagtcagtggaaaacggactcttcatcctatga

SEQ ID NO: 14978 - DNA, 33 bp, Homo sapiens
tattttctatgttccctaagcacccccttctgg

SEQ ID NO: 14979 - DNA, 33 bp, Homo sapiens
ttgcaaagcactaaatgaatggagagatgcgcc

SEQ ID NO: 14980 - DNA, 33 bp, Homo sapiens
ctgcttttctaagagaccccaaatacagagtag

SEQ ID NO: 14981 - DNA, 33 bp, Homo sapiens
gacatggcggcttacatgttaataggtagattc

SEQ ID NO: 14982 - DNA, 33 bp, Homo sapiens
aggatgttaacagctattaatttaagtggtgac

SEQ ID NO: 14983 - DNA, 33 bp, Homo sapiens
tttagcctgttaataggaagcgaacatctaccc

SEQ ID NO: 14984 - DNA, 33 bp, Homo sapiens
gagctggatgctgtcatatcatctttccggggt

SEQ ID NO: 14985 - DNA, 33 bp, Homo sapiens
gttccagctttctcaatggaaaatgaggctgtt

SEQ ID NO: 14986 - DNA, 33 bp, Homo sapiens
aaacaacagaaaccaatgccagttaactaaagt

SEQ ID NO: 14987 - DNA, 33 bp, Homo sapiens
attgatcattgttaaagcttgatgatggaaaca

SEQ ID NO: 14988 - DNA, 33 bp, Homo sapiens
accttctagcatctacgcacctaaagcagggtt

SEQ ID NO: 14989 - DNA, 33 bp, Homo sapiens
gtgaggaagcaggtgatggcctgaccactgtac

SEQ ID NO: 14990 - DNA, 51 bp, Homo sapiens
tagcacttaccacgttgtaatgtaatttaactcttcacagggttcttgact

SEQ ID NO: 14991 - DNA, 33 bp, Homo sapiens
agggcacctgctggaggacatcgctggcagctg

SEQ ID NO: 14992 - DNA, 33 bp, Homo sapiens
atatcaaagagttacccccattacagtatttac

SEQ ID NO: 14993 - DNA, 33 bp, Homo sapiens
tgttcatgcactcaacgctatgtggtttcctgg

SEQ ID NO: 14994 - DNA, 33 bp, Homo sapiens
tagtcatcgcattggagctattcctctaccttc

SEQ ID NO: 14995 - DNA, 33 bp, Homo sapiens
tcctgttccttctggctcatgcattgctttgtg

SEQ ID NO: 14996 - DNA, 33 bp, Homo sapiens
attttttttcaccagatgttcactgacttcgtg

SEQ ID NO: 14997 - DNA, 33 bp, Homo sapiens
gcacttttaaaagacctattgaattgtttgtga

SEQ ID NO: 14998 - DNA, 33 bp, Homo sapiens
aagcaaagaaagtcacggaaagaaaccagagtg

SEQ ID NO: 14999 - DNA, 33 bp, Homo sapiens
ctgaaggagagcccaataccaagttctaataat

SEQ ID NO: 15000 - DNA, 33 bp, Homo sapiens
tggtctgaggcagtttcaaaattgagagacagt

SEQ ID NO: 15001 - DNA, 33 bp, Homo sapiens
aaatgaaagttgatcagtacttggggaataaat

SEQ ID NO: 15002 - DNA, 33 bp, Homo sapiens
gaccagcttgcttaactgatgttgggaagttgt

SEQ ID NO: 15003 - DNA, 33 bp, Homo sapiens
gttagaaaattgccaacaaagtaataactgatt

SEQ ID NO: 15004 - DNA, 33 bp, Homo sapiens
cagaaactgaatgcaagtctgaaagctacactt

SEQ ID NO: 15005 - DNA, 51 bp, Homo sapiens
actaacacatgactactaaaatcaggcttttttcatttctgctgtaactca

SEQ ID NO: 15006 - DNA, 51 bp, Homo sapiens
actcaaatattctataaatcctagatataaaggaagcagtgtgtgtgtaat

SEQ ID NO: 15007 - DNA, 51 bp, Homo sapiens
gccccaggttggcctctctggtctaggacatgggaaagagatctctagagg

SEQ ID NO: 15008 - DNA, 33 bp, Homo sapiens
agttctcccaaagcacgcatagtttttctcatt

SEQ ID NO: 15009 - DNA, 33 bp, Homo sapiens
agaggcgagcaatggaggaaaggagggaaaatc

SEQ ID NO: 15010 - DNA, 33 bp, Homo sapiens
ctctggtcatttgcaggatcaaatccaaactcc

SEQ ID NO: 15011 - DNA, 33 bp, Homo sapiens
cattatgttaactaccgctgttttaaatcattt

SEQ ID NO: 15012 - DNA, 33 bp, Homo sapiens
caaaaagtataccaaagagcaacaactaatacc

SEQ ID NO: 15013 - DNA, 33 bp, Homo sapiens
agttatccgaagcagagagaatgggagggacac

SEQ ID NO: 15014 - DNA, 33 bp, Homo sapiens
ttgctagggaagtctatgccagaagaagagaag

SEQ ID NO: 15015 - DNA, 33 bp, Homo sapiens
attttattcagtacaatgtgaaacttcttgacc

SEQ ID NO: 15016 - DNA, 33 bp, Homo sapiens
ctcaatgccaatacaccagcaactttaagagac

SEQ ID NO: 15017 - DNA, 51 bp, Homo sapiens
attttaccaaactgtgtatagggacggcgagtgtgaccaatctgtctgcag

SEQ ID NO: 15018 - DNA, 33 bp, Homo sapiens
acaacctacagaatgagataaaagttttgcaat

SEQ ID NO: 15019 - DNA, 33 bp, Homo sapiens
ctccctggtttggaaatagccctgctcacagaa

SEQ ID NO: 15020 - DNA, 33 bp, Homo sapiens
tggaaggtctcaataatggtattcaaatgactg

SEQ ID NO: 15021 - DNA, 33 bp, Homo sapiens
caacaagcatggctgactaacttctggggctca

SEQ ID NO: 15022 - DNA, 33 bp, Homo sapiens
aggttgtgtatgctgcgaatggcggtgaagctt

SEQ ID NO: 15023 - DNA, 33 bp, Homo sapiens
tgtattaaattatgccgcatagtctcgcatgtg

SEQ ID NO: 15024 - DNA, 51 bp, Homo sapiens
tagataccctagaaactagttctcctactggtgtaaaaaggatgctaagaa

SEQ ID NO: 15025 - DNA, 33 bp, Homo sapiens
gtaaatgggtatatgcgctgcaaattatgattg

SEQ ID NO: 15026 - DNA, 33 bp, Homo sapiens
taactgttgaagagaacgggagtggcttcccca

SEQ ID NO: 15027 - DNA, 33 bp, Homo sapiens
ctcctgcaaagggtgatgtttgcatcagacacc

SEQ ID NO: 15028 - DNA, 33 bp, Homo sapiens
gaagaatactttgctatgtaggtgaatttaaaa

SEQ ID NO: 15029 - DNA, 33 bp, Homo sapiens
accacctgcaacatgctaagctactttggttgt

SEQ ID NO: 15030 - DNA, 33 bp, Homo sapiens
cccatacaggtcttgcccaattattagttgaaa

SEQ ID NO: 15031 - DNA, 33 bp, Homo sapiens
ctccatctccagagaagtgcagttcccccgtcc

SEQ ID NO: 15032 - DNA, 33 bp, Homo sapiens
atgaaatgagaaaaaatgctgggaagacgcacc

SEQ ID NO: 15033 - DNA, 33 bp, Homo sapiens
ttgtgtccaggcaaactaaggcggttccaacac

SEQ ID NO: 15034 - DNA, 33 bp, Homo sapiens
ccccttagctttaaaatgtttgactgaaatcta

SEQ ID NO: 15035 - DNA, 33 bp, Homo sapiens
aggtctgatcggcccatgctttgatgaagagag

SEQ ID NO: 15036 - DNA, 33 bp, Homo sapiens
caaataatcatagcccgcagtctacagccacaa

SEQ ID NO: 15037 - DNA, 51 bp, Homo sapiens
taagagaattaaggcagagaagagatgggagccacttagcagagggccatc

SEQ ID NO: 15038 - DNA, 51 bp, Homo sapiens
aatgaaaccaactaggtcaagcaatgttatcctcttttatgtcactgaatt

SEQ ID NO: 15039 - DNA, 33 bp, Homo sapiens
cagaccctggtaacactattagactttctattt

SEQ ID NO: 15040 - DNA, 33 bp, Homo sapiens
tgattccagttgtgatgagcatatttgcccatg

SEQ ID NO: 15041 - DNA, 33 bp, Homo sapiens
caagtggaaagagcactgcagattgaggagtcc

SEQ ID NO: 15042 - DNA, 33 bp, Homo sapiens
aggctagcctaagatggcaaagttggatagaaa

SEQ ID NO: 15043 - DNA, 33 bp, Homo sapiens
ttcctttattgaaaactccaggtggccgggatg

SEQ ID NO: 15044 - DNA, 33 bp, Homo sapiens
cagcgaacctctaccctagttatcaatactaga

SEQ ID NO: 15045 - DNA, 33 bp, Homo sapiens
agaagctaaccttgacggaaatagctccgtgtt

SEQ ID NO: 15046 - DNA, 33 bp, Homo sapiens
caatcattttctctaatcttcatagtagttgca

SEQ ID NO: 15047 - DNA, 33 bp, Homo sapiens
aacaactcatgttaaagagtacagtaggaccgc

SEQ ID NO: 15048 - DNA, 33 bp, Homo sapiens
ctaaggaactcggcaatggaaaagtgttggcca

SEQ ID NO: 15049 - DNA, 33 bp, Homo sapiens
acttccttgcgagtactctaatctttttgtgcc

SEQ ID NO: 15050 - DNA, 33 bp, Homo sapiens
cagcatccccgcaccaggcattgcaatgggacc

SEQ ID NO: 15051 - DNA, 33 bp, Homo sapiens
ccatgaactcaactactctcacaaacatcagtg

SEQ ID NO: 15052 - DNA, 33 bp, Homo sapiens
ctttggaaaatatggcgcaaggtccatgaactc

SEQ ID NO: 15053 - DNA, 33 bp, Homo sapiens
caatgtcctcgttccatgaagcttttcctcatt

SEQ ID NO: 15054 - DNA, 33 bp, Homo sapiens
atctgttttgagaccagggtcactctagcagtc

SEQ ID NO: 15055 - DNA, 33 bp, Homo sapiens
cagaagtcagaagagaggcacttaaaacctgaa

SEQ ID NO: 15056 - DNA, 33 bp, Homo sapiens
atgaaggatctattcattgaacacataccgtgt

SEQ ID NO: 15057 - DNA, 33 bp, Homo sapiens
tcttgagatgtctgtagacttcagggtgtcaga

SEQ ID NO: 15058 - DNA, 33 bp, Homo sapiens
ataaataacgcaagtagagaactccttgtagat

SEQ ID NO: 15059 - DNA, 51 bp, Homo sapiens
aaatgccatgatgtaaatttgtatgcaagttgtgtgaacattaaggaattt

SEQ ID NO: 15060 - DNA, 33 bp, Homo sapiens
cacacacacaactttgtatttggatttaaatgt

SEQ ID NO: 15061 - DNA, 33 bp, Homo sapiens
gtgctttactagtgccggcgcagtagtgcttag

SEQ ID NO: 15062 - DNA, 33 bp, Homo sapiens
gcttggactggaagatgagccacttaggaaaat

SEQ ID NO: 15063 - DNA, 33 bp, Homo sapiens
gtgtgaaaggagaagctaattctggcagatgaa

SEQ ID NO: 15064 - DNA, 33 bp, Homo sapiens
aagaataaattcagcaggagagtctgcggtgag

SEQ ID NO: 15065 - DNA, 33 bp, Homo sapiens
gctgcatgcctcgtccgctggtttggagaacag

SEQ ID NO: 15066 - DNA, 33 bp, Homo sapiens
tctttgtctctccaatgatcacaaagttaagct

SEQ ID NO: 15067 - DNA, 33 bp, Homo sapiens
agatgggtttggtgaggatgaaaacaacactta

SEQ ID NO: 15068 - DNA, 33 bp, Homo sapiens
tttactagctcaaacctctgaagctcagaatga

SEQ ID NO: 15069 - DNA, 33 bp, Homo sapiens
aaatcagactaatacgtcctgagaggaaattta

SEQ ID NO: 15070 - DNA, 33 bp, Homo sapiens
ttaatagtaaccaaactctctgctctaacaacc

SEQ ID NO: 15071 - DNA, 33 bp, Homo sapiens
tctgtcttcactctgattcaatcaccaggggat

SEQ ID NO: 15072 - DNA, 33 bp, Homo sapiens
tctgtcaatgggctaagtggacctaacttacta

SEQ ID NO: 15073 - DNA, 33 bp, Homo sapiens
caccccagcagactaggaccaaactggaaccca

SEQ ID NO: 15074 - DNA, 33 bp, Homo sapiens
tccagcagcatatgcccacaaggactgcaaaca

SEQ ID NO: 15075 - DNA, 33 bp, Homo sapiens
atagttgaagaggcaaggaatcaaatattaata

SEQ ID NO: 15076 - DNA, 33 bp, Homo sapiens
tttttcataaacccactcattaacagccatgag

SEQ ID NO: 15077 - DNA, 33 bp, Homo sapiens
tttaggaatgttaaacgctaattcttaattcaa

SEQ ID NO: 15078 - DNA, 33 bp, Homo sapiens
ctctagaaaattaccatgtaggaagtgttaata

SEQ ID NO: 15079 - DNA, 33 bp, Homo sapiens
gctgcacgtaggtccattcttggatggtgcctt

SEQ ID NO: 15080 - DNA, 33 bp, Homo sapiens
aacatcctctacagggcaaagaagtatgctgat

SEQ ID NO: 15081 - DNA, 33 bp, Homo sapiens
gaattcagaagatcaagcaacgtctattttatc

SEQ ID NO: 15082 - DNA, 33 bp, Homo sapiens
ataatgtatagcaacattatgaatcccattttt

SEQ ID NO: 15083 - DNA, 33 bp, Homo sapiens
taaagccaggattctggacagattgctgcccct

SEQ ID NO: 15084 - DNA, 33 bp, Homo sapiens
acagttgctaagctaatgagaaaacactaatca

SEQ ID NO: 15085 - DNA, 33 bp, Homo sapiens
gttaatcttggtgcaatctggacattttatatc

SEQ ID NO: 15086 - DNA, 33 bp, Homo sapiens
catacacaaatacaaataggctatgctcccaga

SEQ ID NO: 15087 - DNA, 51 bp, Homo sapiens
attttaaagttcatgtaggtgttgataatgatttccctttcaagccagaac

SEQ ID NO: 15088 - DNA, 51 bp, Homo sapiens
acatttttttaaataattgattggattcaagaagcaccacaaggccagaaa

SEQ ID NO: 15089 - DNA, 33 bp, Homo sapiens
ataattgaagctgggtgacagatacaagaggat

SEQ ID NO: 15090 - DNA, 33 bp, Homo sapiens
atgatgtgggaggacatgtgacaactggtgagt

SEQ ID NO: 15091 - DNA, 33 bp, Homo sapiens
gggtgacaggcatacatctactgcactaaagaa

SEQ ID NO: 15092 - DNA, 33 bp, Homo sapiens
aaacaacagtgaaaaataagtcattctgcatct

SEQ ID NO: 15093 - DNA, 33 bp, Homo sapiens
tgtgagtttgcaagtctacgtggcacagagaca

SEQ ID NO: 15094 - DNA, 33 bp, Homo sapiens
aatattttgataaggggaaatccatgaatgaat

SEQ ID NO: 15095 - DNA, 51 bp, Homo sapiens
catggggtgttttataaacagtgaatatgcaacaacaaggaaaggctttcc

SEQ ID NO: 15096 - DNA, 33 bp, Homo sapiens
tcttgttattaggaaatgggcatgagtgtgtgc

SEQ ID NO: 15097 - DNA, 33 bp, Homo sapiens
gatggttttgggatgattcaaatgcattacact

SEQ ID NO: 15098 - DNA, 51 bp, Homo sapiens
ttaactagcttttcaacactttaaatatagaaatgattcaccgtgactttg

SEQ ID NO: 15099 - DNA, 33 bp, Homo sapiens
cttaatacgcaagtgcgctgtaaccttttcaga

SEQ ID NO: 15100 - DNA, 33 bp, Homo sapiens
agactctgtgaattcagtatgttacatggcaaa

SEQ ID NO: 15101 - DNA, 33 bp, Homo sapiens
ccagcaactgtgcttctaaacataggatcttct

SEQ ID NO: 15102 - DNA, 33 bp, Homo sapiens
taaatccaagctttactgagattataaatttgt

SEQ ID NO: 15103 - DNA, 33 bp, Homo sapiens
gaggccatatgagaacgatcatgcaagagacca

SEQ ID NO: 15104 - DNA, 33 bp, Homo sapiens
cccagtggtctggggagcttctgtaaatcttac

SEQ ID NO: 15105 - DNA, 33 bp, Homo sapiens
aatcgacaccagaaaccactgaactgacgagag

SEQ ID NO: 15106 - DNA, 33 bp, Homo sapiens
caagcaaaattcaaaccaactttgaactcgttt

SEQ ID NO: 15107 - DNA, 33 bp, Homo sapiens
gagtttgtttcttatctcagttataacactcat

SEQ ID NO: 15108 - DNA, 33 bp, Homo sapiens
catcatgccagcatgatctgtgggcaaaacatg

SEQ ID NO: 15109 - DNA, 33 bp, Homo sapiens
acaaatacttctttccggctgactttgctcaga

SEQ ID NO: 15110 - DNA, 33 bp, Homo sapiens
acttccagccttgatggaaatgttctgttacct

SEQ ID NO: 15111 - DNA, 33 bp, Homo sapiens
gtgttctctctctggatctttcatagtggtgtg

SEQ ID NO: 15112 - DNA, 33 bp, Homo sapiens
acttcgatgatgacgttaagttgtctgcaaatc

SEQ ID NO: 15113 - DNA, 33 bp, Homo sapiens
acgtccctgttccttctgaaagactcaaaattg

SEQ ID NO: 15114 - DNA, 33 bp, Homo sapiens
aattagaacccccagatattgctggtaagaatt

SEQ ID NO: 15115 - DNA, 33 bp, Homo sapiens
actgttgaggggagtagatatacaacctgcttt

SEQ ID NO: 15116 - DNA, 33 bp, Homo sapiens
tctgctctaagaaggcggagatcggagtttgtg

SEQ ID NO: 15117 - DNA, 33 bp, Homo sapiens
atttagttctcatctggacctatccactccagt

SEQ ID NO: 15118 - DNA, 33 bp, Homo sapiens
cctgcagtctgcctcttactaaatgtctgggtt

SEQ ID NO: 15119 - DNA, 33 bp, Homo sapiens
catggaataaaccaaaggatggggacaaactag

SEQ ID NO: 15120 - DNA, 33 bp, Homo sapiens
gccccatgcactgtgatggaggttatttctctg

SEQ ID NO: 15121 - DNA, 33 bp, Homo sapiens
ggctgttggcaccatctaacaaaaggcaatgtg

SEQ ID NO: 15122 - DNA, 33 bp, Homo sapiens
taccagaaatagaaaggaacattgcagaatgat

SEQ ID NO: 15123 - DNA, 33 bp, Homo sapiens
gggacttttcaggtactagcacttaaaggcaga

SEQ ID NO: 15124 - DNA, 33 bp, Homo sapiens
aggactacacctttcatgaatgttctgctaacc

SEQ ID NO: 15125 - DNA, 33 bp, Homo sapiens
tttcttactagattctcacagcttactggcatt

SEQ ID NO: 15126 - DNA, 33 bp, Homo sapiens
gaaaagagcccgtttcgcaggtgcaggtgtttg

SEQ ID NO: 15127 - DNA, 33 bp, Homo sapiens
ctcatttcccttaggttacaggatatcagcggg

SEQ ID NO: 15128 - DNA, 33 bp, Homo sapiens
tggacctatctattaattctcccatactccact

SEQ ID NO: 15129 - DNA, 33 bp, Homo sapiens
gcctgctttcagtgaatgctcagctaccgggcc

SEQ ID NO: 15130 - DNA, 33 bp, Homo sapiens
tctttcttctgcccactacagcaaattcaggtc

SEQ ID NO: 15131 - DNA, 33 bp, Homo sapiens
tgaatccagtgtggtaggaatcctctgaatccc

SEQ ID NO: 15132 - DNA, 33 bp, Homo sapiens
ttctggaaatcagtctgacatatcaagagacta

SEQ ID NO: 15133 - DNA, 33 bp, Homo sapiens
gttcttaccacgtaaagttaggcaaaaatgata

SEQ ID NO: 15134 - DNA, 33 bp, Homo sapiens
cacttgttcaacaccatgaagttacagaaggtg

SEQ ID NO: 15135 - DNA, 33 bp, Homo sapiens
ggaacgttctgcatcctgactttatcaacatgg

SEQ ID NO: 15136 - DNA, 33 bp, Homo sapiens
tccaaaaggcttttaatcaccacagtagtgctg

SEQ ID NO: 15137 - DNA, 33 bp, Homo sapiens
ccggcactgggccaagcctcacaacagcctggg

SEQ ID NO: 15138 - DNA, 33 bp, Homo sapiens
ccggcaaggatggaggcagcactgtttgttgga

SEQ ID NO: 15139 - DNA, 33 bp, Homo sapiens
tggccagcatgtgaggtcccgggctccgggttt

SEQ ID NO: 15140 - DNA, 33 bp, Homo sapiens
agggaggccaagcctataacctgtgactagcag

SEQ ID NO: 15141 - DNA, 33 bp, Homo sapiens
gaaggctttggtccagtaagtcctgcttctctt

SEQ ID NO: 15142 - DNA, 51 bp, Homo sapiens
gcatggcagagggtacaggacctaatatggtttttctgtgtccccacccaa

SEQ ID NO: 15143 - DNA, 33 bp, Homo sapiens
tttctattgtgaataagtgtgaaagtcagaacc

SEQ ID NO: 15144 - DNA, 33 bp, Homo sapiens
ccacgactctgggacctcaatacttagtgtgtc

SEQ ID NO: 15145 - DNA, 33 bp, Homo sapiens
tccaaacccattttcagagatgcattgtccttg

SEQ ID NO: 15146 - DNA, 33 bp, Homo sapiens
gctgtgcacattcagcgagtgccttacgctttc

SEQ ID NO: 15147 - DNA, 33 bp, Homo sapiens
tgagaatcggacaccgtagtgcggcagcgctgt

SEQ ID NO: 15148 - DNA, 33 bp, Homo sapiens
gggttcaattttggtatgctgtattttcctgga

SEQ ID NO: 15149 - DNA, 33 bp, Homo sapiens
taactggttatagctgtagcacctctttctatt

SEQ ID NO: 15150 - DNA, 33 bp, Homo sapiens
gatatattttggtgaatcgaatatcaattttca

SEQ ID NO: 15151 - DNA, 33 bp, Homo sapiens
gaatctccatgaagaatcctttgcagtaacaac

SEQ ID NO: 15152 - DNA, 33 bp, Homo sapiens
tgaacagaagccatgcgctattaaaacagtggc

SEQ ID NO: 15153 - DNA, 33 bp, Homo sapiens
caggtcaaaggtagatgagagaggaatggttgc

SEQ ID NO: 15154 - DNA, 33 bp, Homo sapiens
ttactgtaaatggataggtaaatgactggtaaa

SEQ ID NO: 15155 - DNA, 33 bp, Homo sapiens
cagacaggtggagggatactggccagagctggc

SEQ ID NO: 15156 - DNA, 33 bp, Homo sapiens
tgttgtgtttctagaactcgtcagctgggaggt

SEQ ID NO: 15157 - DNA, 33 bp, Homo sapiens
ttcccggtcacggcactgccttttcactgatgc

SEQ ID NO: 15158 - DNA, 33 bp, Homo sapiens
taacatttatgaaaccggctaaaactcaaaacc

SEQ ID NO: 15159 - DNA, 33 bp, Homo sapiens
taatacaaaggcaagcgagggtctgtctcggag

SEQ ID NO: 15160 - DNA, 33 bp, Homo sapiens
ggcctccttctaatgataaaagggctgtttgct

SEQ ID NO: 15161 - DNA, 33 bp, Homo sapiens
gaagaatgtttgctaatagaggaattcctcatc

SEQ ID NO: 15162 - DNA, 33 bp, Homo sapiens
gcccgtagggagtatcgcttgacggagagtgag

SEQ ID NO: 15163 - DNA, 33 bp, Homo sapiens
gccccctccgagagactggaaatatgttggtac

SEQ ID NO: 15164 - DNA, 33 bp, Homo sapiens
aaattacctcaaaatggaccataggtttaaatg

SEQ ID NO: 15165 - DNA, 51 bp, Homo sapiens
atgctgcaaaccagagagcaaggaccacatggaagatgcagaggaagggct

SEQ ID NO: 15166 - DNA, 33 bp, Homo sapiens
ttcagaaaaggaaacatcaaaggcgctggagct

SEQ ID NO: 15167 - DNA, 33 bp, Homo sapiens
gaaaacctgctataaactggtaatgatgacaaa

SEQ ID NO: 15168 - DNA, 33 bp, Homo sapiens
gaatttgataaaagtcgacacttatgataaaaa

SEQ ID NO: 15169 - DNA, 33 bp, Homo sapiens
cagtcccttctggttggaatatttgcatcatgt

SEQ ID NO: 15170 - DNA, 33 bp, Homo sapiens
ctttgtgtgctccagagaaagggggcagcacca

SEQ ID NO: 15171 - DNA, 33 bp, Homo sapiens
ttattcttgtattcactatctgctgtatcagct

SEQ ID NO: 15172 - DNA, 33 bp, Homo sapiens
tgagcacctcttagaatagcagccggagccagg

SEQ ID NO: 15173 - DNA, 33 bp, Homo sapiens
ggctggtcctgggaagtaggtagtcggagaagg

SEQ ID NO: 15174 - DNA, 33 bp, Homo sapiens
agagtttccaacagactgagttggccgccacag

SEQ ID NO: 15175 - DNA, 33 bp, Homo sapiens
ggtttctacatgctaaggagcaacacggagcgg

SEQ ID NO: 15176 - DNA, 33 bp, Homo sapiens
acacagtggacacgctgaaggttggcaggctgc

SEQ ID NO: 15177 - DNA, 33 bp, Homo sapiens
gaagccaaagttcatggatgacattttgttgtt

SEQ ID NO: 15178 - DNA, 33 bp, Homo sapiens
ttcacccaaattattctactcaccaaatcagcc

SEQ ID NO: 15179 - DNA, 33 bp, Homo sapiens
cccaggctgaccaccctcgagtgctgcccgcac

SEQ ID NO: 15180 - DNA, 33 bp, Homo sapiens
tcaacacaggaaagattagagcacgtgggcaga

SEQ ID NO: 15181 - DNA, 33 bp, Homo sapiens
cactcttcctaatcactgactcgaactgtaatg

SEQ ID NO: 15182 - DNA, 33 bp, Homo sapiens
gctccagcatacacgggaagagtcaccgagtgc

SEQ ID NO: 15183 - DNA, 33 bp, Homo sapiens
catgctagatagaccctctggagtcatttccac

SEQ ID NO: 15184 - DNA, 33 bp, Homo sapiens
tatcccaggatagaaatctgaacgcatccctga

SEQ ID NO: 15185 - DNA, 33 bp, Homo sapiens
ttccacccactggtcatgttgcagccgggtgag

SEQ ID NO: 15186 - DNA, 33 bp, Homo sapiens
agagtggaatatggacgatggtaggtgtatgaa

SEQ ID NO: 15187 - DNA, 33 bp, Homo sapiens
agtgcggaggggacaggatcatttaggagcaca

SEQ ID NO: 15188 - DNA, 33 bp, Homo sapiens
gataaggagattagtatgggtagaaggaggtca

SEQ ID NO: 15189 - DNA, 33 bp, Homo sapiens
gaggcataaatgtttataatggttatctgtaac

SEQ ID NO: 15190 - DNA, 33 bp, Homo sapiens
agacccatctctagtatcagctacgtgggaggt

SEQ ID NO: 15191 - DNA, 33 bp, Homo sapiens
tcagggcatcttggaagaactgaatttgctaac

SEQ ID NO: 15192 - DNA, 33 bp, Homo sapiens
cgacatccttggagaacacaacaacaaaggctg

SEQ ID NO: 15193 - DNA, 33 bp, Homo sapiens
ttggcactgccttgccgaaaacctcctagagac

SEQ ID NO: 15194 - DNA, 33 bp, Homo sapiens
caggtaagccctgtgctgagccttcctgccctc

SEQ ID NO: 15195 - DNA, 51 bp, Homo sapiens
tagccacctttcacacaacttcctctggaaacacttgtgaattcctaagcc

SEQ ID NO: 15196 - DNA, 33 bp, Homo sapiens
caccacagtcagatacgatgctgacagggacgg

SEQ ID NO: 15197 - DNA, 33 bp, Homo sapiens
ccagagctcaaggactgaagtttccaaagagcc

SEQ ID NO: 15198 - DNA, 33 bp, Homo sapiens
gatgcaagctaccaccgggcggtcagctttgcc

SEQ ID NO: 15199 - DNA, 33 bp, Homo sapiens
ttccttccaaaactcctcagctcttgggtaaca

SEQ ID NO: 15200 - DNA, 33 bp, Homo sapiens
gctcctcagagtataaggaaaagccagagcaga

SEQ ID NO: 15201 - DNA, 33 bp, Homo sapiens
cctaaatggtattaaagaactatgagcaacatg

SEQ ID NO: 15202 - DNA, 33 bp, Homo sapiens
taaaatgtgtctcttatgaacagcatataattg

SEQ ID NO: 15203 - DNA, 33 bp, Homo sapiens
ttaattatttttagtatagttgacaagcaaaaa

SEQ ID NO: 15204 - DNA, 33 bp, Homo sapiens
gccatgaacccttttatgcctatactctagtgt

SEQ ID NO: 15205 - DNA, 33 bp, Homo sapiens
aacccgatcacttttctcccaaacaattacatt

SEQ ID NO: 15206 - DNA, 33 bp, Homo sapiens
ggatgttgcattctgagatatgggtggcacaag

SEQ ID NO: 15207 - DNA, 51 bp, Homo sapiens
cattctggctgatgtagaaaaagctgaaggcaattatagttttacataact

SEQ ID NO: 15208 - DNA, 51 bp, Homo sapiens
ctacaatgtgagtcttggggtgaagtcaaaagttgagttgtgtagcaagga

SEQ ID NO: 15209 - DNA, 33 bp, Homo sapiens
atgagtgatcatcttataataaactttgtggcc

SEQ ID NO: 15210 - DNA, 33 bp, Homo sapiens
tgagagatcttgatggtagatgctgcttattgt

SEQ ID NO: 15211 - DNA, 33 bp, Homo sapiens
atatcgttgtagcgtttaaaatagttattccaa

SEQ ID NO: 15212 - DNA, 33 bp, Homo sapiens
ggcacactcttagttatagaaatgtgccatctt

SEQ ID NO: 15213 - DNA, 33 bp, Homo sapiens
ctatttaaagaacaaattttccacattgttgat

SEQ ID NO: 15214 - DNA, 33 bp, Homo sapiens
atatatcaaaagtaagtcctcagatgtcatact

SEQ ID NO: 15215 - DNA, 33 bp, Homo sapiens
ggaattcaaagtattgtaacaggcttgaatctg

SEQ ID NO: 15216 - DNA, 51 bp, Homo sapiens
gttaatctaaatgaataaattaacattgataaacgtacctttctgctctga

SEQ ID NO: 15217 - DNA, 33 bp, Homo sapiens
tcccacattggcatcatcctggttttctacatc

SEQ ID NO: 15218 - DNA, 33 bp, Homo sapiens
atgacagacgtgatcctcattgctgtctcctac

SEQ ID NO: 15219 - DNA, 33 bp, Homo sapiens
ccaaaacacatcctcagtattaaaatcaccaaa

SEQ ID NO: 15220 - DNA, 33 bp, Homo sapiens
agaaacaccagtggaatgaccatgtacaagctc

SEQ ID NO: 15221 - DNA, 33 bp, Homo sapiens
tttcattctctctcattacttctcttgcagatc

SEQ ID NO: 15222 - DNA, 33 bp, Homo sapiens
taaatacgctcaaaaatacctcgacacagaaat

SEQ ID NO: 15223 - DNA, 33 bp, Homo sapiens
ctgagctaaggagttatatctagcatggtgttt

SEQ ID NO: 15224 - DNA, 33 bp, Homo sapiens
attacagaggtaagaatgcttgtgcaggagaag

SEQ ID NO: 15225 - DNA, 33 bp, Homo sapiens
cttggctataatgcaggcccaaagaactgcttt

SEQ ID NO: 15226 - DNA, 33 bp, Homo sapiens
tccctttattccttactgaagcaaatacatcag

SEQ ID NO: 15227 - DNA, 33 bp, Homo sapiens
caaggaagaagaagcatgatgacgaaccaggaa

SEQ ID NO: 15228 - DNA, 33 bp, Homo sapiens
ttcaaacattgaaaactgatttttctagagcac

SEQ ID NO: 15229 - DNA, 51 bp, Homo sapiens
acaatgtctctgagtttgctatttctacttcataatatttttaacaagata

SEQ ID NO: 15230 - DNA, 33 bp, Homo sapiens
agcataggagagctacggtaatactatttttaa

SEQ ID NO: 15231 - DNA, 33 bp, Homo sapiens
atccttgcattcctatcataaactgtctgatca

SEQ ID NO: 15232 - DNA, 33 bp, Homo sapiens
ctggagttcccacagagacaattctccatagta

SEQ ID NO: 15233 - DNA, 33 bp, Homo sapiens
tatcaatgtttcccaaggtaaggttcacttgcc

SEQ ID NO: 15234 - DNA, 33 bp, Homo sapiens
gtctccttctattccaggtttgctggagcttct

SEQ ID NO: 15235 - DNA, 33 bp, Homo sapiens
taaagggtaggtttcctcagatccaatgggcca

SEQ ID NO: 15236 - DNA, 33 bp, Homo sapiens
atgcatagatatgccagaacagacattcgggct

SEQ ID NO: 15237 - DNA, 33 bp, Homo sapiens
gctttaaagagtcaaagtatcagagaacgttta

SEQ ID NO: 15238 - DNA, 33 bp, Homo sapiens
ccctcacatgcagaaaggcactcaagaatccag

SEQ ID NO: 15239 - DNA, 33 bp, Homo sapiens
gcactcagcctaaaactgtatgttctctctaga

SEQ ID NO: 15240 - DNA, 33 bp, Homo sapiens
agggcctacactacccgacctcttctcacaagc

SEQ ID NO: 15241 - DNA, 33 bp, Homo sapiens
gggaacaggtttgagatgggtgcatcacggttt

SEQ ID NO: 15242 - DNA, 33 bp, Homo sapiens
ctttagcagtcactgagagtccaccacaaggac

SEQ ID NO: 15243 - DNA, 33 bp, Homo sapiens
acaatactataacaactaggttttcagtcaagg

SEQ ID NO: 15244 - DNA, 33 bp, Homo sapiens
aagcatatttgaagcataaagacatggaaatat

SEQ ID NO: 15245 - DNA, 51 bp, Homo sapiens
ggatgcattgtttgccaggacagacggaacttcagtaagagttatctggca

SEQ ID NO: 15246 - DNA, 33 bp, Homo sapiens
gggagttatcagggtccacatctttagttcata

SEQ ID NO: 15247 - DNA, 33 bp, Homo sapiens
gccaacttgcagccacgcaaaagggcagcaccc

SEQ ID NO: 15248 - DNA, 33 bp, Homo sapiens
ggtcataaggagctactgaactttttgatcaag

SEQ ID NO: 15249 - DNA, 33 bp, Homo sapiens
tgctctgctccctcccgactcggacttgccagg

SEQ ID NO: 15250 - DNA, 33 bp, Homo sapiens
gtatttttaacctgcagacaatgcttgggtata

SEQ ID NO: 15251 - DNA, 33 bp, Homo sapiens
tactgccagcaaaaaatgaaagcagaggctaaa

SEQ ID NO: 15252 - DNA, 33 bp, Homo sapiens
tcgggagcagaggtccggaagactggttccatc

SEQ ID NO: 15253 - DNA, 33 bp, Homo sapiens
ctcccgagccaatcctgaaaggtttctgacagc

SEQ ID NO: 15254 - DNA, 33 bp, Homo sapiens
ttgaatacgaggctgagaagaaccccaagagta

SEQ ID NO: 15255 - DNA, 33 bp, Homo sapiens
cctccctatgtaaaacggcaactcatctctact

SEQ ID NO: 15256 - DNA, 33 bp, Homo sapiens
aacagatacttcaccagagaggatacccaaaca

SEQ ID NO: 15257 - DNA, 33 bp, Homo sapiens
ggtattttcgtgcagatcttcacccagaaagcc

SEQ ID NO: 15258 - DNA, 33 bp, Homo sapiens
gcatctgtttaaagacgagcacatacctggaaa

SEQ ID NO: 15259 - DNA, 33 bp, Homo sapiens
agccaataaaataggcgagtttcctcccactcc

SEQ ID NO: 15260 - DNA, 33 bp, Homo sapiens
ctagggttcagtctcctcttccagaaagtagaa

SEQ ID NO: 15261 - DNA, 33 bp, Homo sapiens
ttgtgatgacatatcagattgctgtttctttga

SEQ ID NO: 15262 - DNA, 33 bp, Homo sapiens
gtacaatggagaaggaggaaggattatcttgtt

SEQ ID NO: 15263 - DNA, 33 bp, Homo sapiens
gttattagggtggcaagagcatagtgtgtttca

SEQ ID NO: 15264 - DNA, 33 bp, Homo sapiens
ggctccgaagaggacagcattgcaatggtgaca

SEQ ID NO: 15265 - DNA, 33 bp, Homo sapiens
agggcagcatcatcccgagagtgtaggagaggc

SEQ ID NO: 15266 - DNA, 33 bp, Homo sapiens
cgtggaccacggatgagtatggaggggaagatc

SEQ ID NO: 15267 - DNA, 33 bp, Homo sapiens
cttgccagtgttcgtataattgaaaatatttaa

SEQ ID NO: 15268 - DNA, 33 bp, Homo sapiens
atcttcaagagacccaggatccaggttgtctta

SEQ ID NO: 15269 - DNA, 33 bp, Homo sapiens
ctgattcgtataataagtcacagcaaaataacc

SEQ ID NO: 15270 - DNA, 33 bp, Homo sapiens
actcttacaagtcatatgcacacacaagacagc

SEQ ID NO: 15271 - DNA, 51 bp, Homo sapiens
actaaggaaagaagagacatactatgaaactgtaattcagtagtactgtga

SEQ ID NO: 15272 - DNA, 33 bp, Homo sapiens
cacaatggctctcctagacaagaggttcatgag

SEQ ID NO: 15273 - DNA, 51 bp, Homo sapiens
ttgtcaacaatcatagacagtatacgcggaaagaaaaagccagtaattttg

SEQ ID NO: 15274 - DNA, 33 bp, Homo sapiens
ataaacatataacatcgagaaaaagaatgtgag

SEQ ID NO: 15275 - DNA, 33 bp, Homo sapiens
gaaaaaataccctgcagactaattataagttta

SEQ ID NO: 15276 - DNA, 33 bp, Homo sapiens
ccaaaaggagcaattcgcacttgaggaaatgag

SEQ ID NO: 15277 - DNA, 33 bp, Homo sapiens
ttctttaggaccttgaggtttagtactgtagtt

SEQ ID NO: 15278 - DNA, 51 bp, Homo sapiens
ggtatgcagggctagtattctcgaagccaattttacatatgactagcagct

SEQ ID NO: 15279 - DNA, 51 bp, Homo sapiens
gaatctatcattgctaaatattcaagaaggctataaattttaaagtaatat

SEQ ID NO: 15280 - DNA, 51 bp, Homo sapiens
actgtcacttttctctttggttttctaaatcttaactttatacaaattttc

SEQ ID NO: 15281 - DNA, 33 bp, Homo sapiens
ctacacaaccaagagatactgaggtgtccagct

SEQ ID NO: 15282 - DNA, 33 bp, Homo sapiens
atgaatgttatgaccatgtttctaggtaacatc

SEQ ID NO: 15283 - DNA, 33 bp, Homo sapiens
tcttcatatttgacaatcagctggctactgaca

SEQ ID NO: 15284 - DNA, 33 bp, Homo sapiens
gttgaaattggcacatcataacatttccagcag

SEQ ID NO: 15285 - DNA, 51 bp, Homo sapiens
tgcaaattcgtaacattctacctactaacctctttctcagctctccctgcc

SEQ ID NO: 15286 - DNA, 33 bp, Homo sapiens
caagcaagaatccagagaccacagattaagaca

SEQ ID NO: 15287 - DNA, 33 bp, Homo sapiens
actattgttctttttccaaatgttcttggctag

SEQ ID NO: 15288 - DNA, 33 bp, Homo sapiens
cctggaaggttcttcatacttgccttctaatgt

SEQ ID NO: 15289 - DNA, 33 bp, Homo sapiens
cctgcctcatctctgtgaagctggttacttcct

SEQ ID NO: 15290 - DNA, 33 bp, Homo sapiens
cgcgcttgaagagcaagggattttgtcattgcg

SEQ ID NO: 15291 - DNA, 33 bp, Homo sapiens
ccccatctcctccacctctacctctgagttcta

SEQ ID NO: 15292 - DNA, 33 bp, Homo sapiens
ctctttcagtgatgcaggctactcacccctaca

SEQ ID NO: 15293 - DNA, 33 bp, Homo sapiens
ttttataagaatacccgacatattggattgggt

SEQ ID NO: 15294 - DNA, 33 bp, Homo sapiens
tcttcagaaagtccgctcttaaatctgggggag

SEQ ID NO: 15295 - DNA, 33 bp, Homo sapiens
gaggagtaagctatgcgcattcaagccaagagc

SEQ ID NO: 15296 - DNA, 33 bp, Homo sapiens
gtgtctggtagaggaaggttgcctttatgcacc

SEQ ID NO: 15297 - DNA, 33 bp, Homo sapiens
tagaatcattgctagttaaagttgagagaagga

SEQ ID NO: 15298 - DNA, 33 bp, Homo sapiens
cagggcatagcacttacgagtaggtgacccctt

SEQ ID NO: 15299 - DNA, 33 bp, Homo sapiens
gctagaaattaacacctccagaaagcaactctc

SEQ ID NO: 15300 - DNA, 33 bp, Homo sapiens
atgagagaaatcctgataatcatattgacacaa

SEQ ID NO: 15301 - DNA, 33 bp, Homo sapiens
aaatgagggctggaacgcctgtctacttgcctg

SEQ ID NO: 15302 - DNA, 33 bp, Homo sapiens
ggacagccgccacatgcactaaaatggcaggtc

SEQ ID NO: 15303 - DNA, 33 bp, Homo sapiens
ctggaaatttggatactgaggctctgggaacgc

SEQ ID NO: 15304 - DNA, 33 bp, Homo sapiens
agaggaaatgatgtgcgaatgagaaaattttaa

SEQ ID NO: 15305 - DNA, 33 bp, Homo sapiens
cattgtcacccttacattgggaaaagagctgct

SEQ ID NO: 15306 - DNA, 33 bp, Homo sapiens
accaatgagtctgcaataggtgtctcagcaggc

SEQ ID NO: 15307 - DNA, 51 bp, Homo sapiens
gtaaagggaagtatttgagtaaatatagcctgaacaccaatcagagatagg

SEQ ID NO: 15308 - DNA, 33 bp, Homo sapiens
tgttcgcagtcgcatattacaaccatgtttcac

SEQ ID NO: 15309 - DNA, 33 bp, Homo sapiens
cagtgacacctatgtggagtgctaattggggaa

SEQ ID NO: 15310 - DNA, 33 bp, Homo sapiens
tgctgtattgcacaaactcacccgggaaccttt

SEQ ID NO: 15311 - DNA, 33 bp, Homo sapiens
aactgggggcactttccagccaaaactcccagc

SEQ ID NO: 15312 - DNA, 51 bp, Homo sapiens
ctccatttcccctccaattgccagatggttttaggcaacttacaagaaaaa

SEQ ID NO: 15313 - DNA, 33 bp, Homo sapiens
tataggtgctggggtcgctttgttatacccggt

SEQ ID NO: 15314 - DNA, 33 bp, Homo sapiens
ttctgctgttaagtaagaggcaccaactaaagc

SEQ ID NO: 15315 - DNA, 33 bp, Homo sapiens
ggtgcaaaaaggcctctaatcacaaaacacttc

SEQ ID NO: 15316 - DNA, 33 bp, Homo sapiens
ttgttcaggaacctgcgatgagtccccatcctt

SEQ ID NO: 15317 - DNA, 33 bp, Homo sapiens
acaattcccaggataggcattttgagggcaagg

SEQ ID NO: 15318 - DNA, 33 bp, Homo sapiens
atggaatctccaggatgaagctcaggatttctg

SEQ ID NO: 15319 - DNA, 33 bp, Homo sapiens
gagaagatggttggaaggatacaaggggtgact

SEQ ID NO: 15320 - DNA, 33 bp, Homo sapiens
ttagggctgatggagcggagaattaatcaggga

SEQ ID NO: 15321 - DNA, 33 bp, Homo sapiens
ctcaagagactcacttgaaagcttttctgggcc

SEQ ID NO: 15322 - DNA, 33 bp, Homo sapiens
agagctgcggataaaacaagcaaaagctgagcc

SEQ ID NO: 15323 - DNA, 33 bp, Homo sapiens
cctcattgttaagcaagtcatcactgtatatca

SEQ ID NO: 15324 - DNA, 33 bp, Homo sapiens
agcctggggacttccagtagccagtttgtgctg

SEQ ID NO: 15325 - DNA, 33 bp, Homo sapiens
aacacttgtgtgtctagattttacagatgcttg

SEQ ID NO: 15326 - DNA, 33 bp, Homo sapiens
caatattttttttcaatctggagtagatacaga

SEQ ID NO: 15327 - DNA, 33 bp, Homo sapiens
tggaatttggaggaaatgtaaaatgtcagccag

SEQ ID NO: 15328 - DNA, 51 bp, Homo sapiens
acacagatatcagctattaactagctgatttgcaaaaacgtcagataaaac

SEQ ID NO: 15329 - DNA, 33 bp, Homo sapiens
ttatacagtagccaaattccacgtagcttttag

SEQ ID NO: 15330 - DNA, 33 bp, Homo sapiens
tgtcaacccttttcacgagctacatttcccttt

SEQ ID NO: 15331 - DNA, 33 bp, Homo sapiens
agctccaggatttcagtctacagaggaaaacag

SEQ ID NO: 15332 - DNA, 33 bp, Homo sapiens
agaacaggagtcagtatactttttctataaagg

SEQ ID NO: 15333 - DNA, 33 bp, Homo sapiens
acttctccttcaaagattacccctgtacaagtc

SEQ ID NO: 15334 - DNA, 33 bp, Homo sapiens
gcttgagtctgggtaccaaatggtgcaataagg

SEQ ID NO: 15335 - DNA, 33 bp, Homo sapiens
ttcatcaggacttatagcatattggatctaagg

SEQ ID NO: 15336 - DNA, 33 bp, Homo sapiens
ttttaaaaatattcccgaagtcatgctgcttat

SEQ ID NO: 15337 - DNA, 33 bp, Homo sapiens
ttgcccagagtctccagatagatacacacagga

SEQ ID NO: 15338 - DNA, 51 bp, Homo sapiens
gctaggaaggcaataaaggataagatgtgtttgagaaatagcaagaatttt

SEQ ID NO: 15339 - DNA, 33 bp, Homo sapiens
taggataattcacagatgtaatgtgcccattac

SEQ ID NO: 15340 - DNA, 33 bp, Homo sapiens
tcaaagatgaagggcctatgatctcaagttcat

SEQ ID NO: 15341 - DNA, 33 bp, Homo sapiens
ttatctgttgcaacaattctaccactctgttat

SEQ ID NO: 15342 - DNA, 33 bp, Homo sapiens
tttttaggactatgtatattgggcacataagac

SEQ ID NO: 15343 - DNA, 33 bp, Homo sapiens
tgtgaatcaaaatggcgcaatggctaaaatttc

SEQ ID NO: 15344 - DNA, 33 bp, Homo sapiens
aggcatagcaaaaagatcattgaacacaataaa

SEQ ID NO: 15345 - DNA, 51 bp, Homo sapiens
ttagtccataaagaaagatagagcagaaaatacctacaagtaggcaagtaa

SEQ ID NO: 15346 - DNA, 33 bp, Homo sapiens
agtatgacattttagaggattccactaccttct

SEQ ID NO: 15347 - DNA, 33 bp, Homo sapiens
aatactttaaatgtcagctagtaattggatggg

SEQ ID NO: 15348 - DNA, 33 bp, Homo sapiens
aagcctgtataatgagtaaatttgatgtatgaa

SEQ ID NO: 15349 - DNA, 33 bp, Homo sapiens
agtgctaggtccttgataaaatctccacaaatt

SEQ ID NO: 15350 - DNA, 33 bp, Homo sapiens
gatttccaacaacttcgacaatgtacccatttt

SEQ ID NO: 15351 - DNA, 33 bp, Homo sapiens
ttagtaataaatttcagtaagtcagctaaacca

SEQ ID NO: 15352 - DNA, 33 bp, Homo sapiens
ccagtcagtaagggtcgcccgaacttaggctct

SEQ ID NO: 15353 - DNA, 33 bp, Homo sapiens
ggagcacatggagaacgaccacattgtgtccca

SEQ ID NO: 15354 - DNA, 33 bp, Homo sapiens
tgttcaatgtcagacatcttgtaactgatagta

SEQ ID NO: 15355 - DNA, 33 bp, Homo sapiens
cagtctggaccaaaaggaatattgtaactgaca

SEQ ID NO: 15356 - DNA, 33 bp, Homo sapiens
tagataaaggcattaagctctgtcaggaaaaat

SEQ ID NO: 15357 - DNA, 33 bp, Homo sapiens
agtgcagccagcattatggattgtaagcaaacc

SEQ ID NO: 15358 - DNA, 33 bp, Homo sapiens
taaaattgagcagagcgcagagagttcctatat

SEQ ID NO: 15359 - DNA, 33 bp, Homo sapiens
gagggcagttagatgatgacactcacactgtgg

SEQ ID NO: 15360 - DNA, 33 bp, Homo sapiens
gttactataaccagaagattgagaaggaaagaa

SEQ ID NO: 15361 - DNA, 33 bp, Homo sapiens
agcattcagtgtatcagcaagcctcgtacaata

SEQ ID NO: 15362 - DNA, 33 bp, Homo sapiens
taaatacaatgctaaacatgctgggcataaagt

SEQ ID NO: 15363 - DNA, 33 bp, Homo sapiens
cttaatttattcatctgacaaagaaaatggatc

SEQ ID NO: 15364 - DNA, 33 bp, Homo sapiens
gctaagatatggagtggacctaaatatttatca

SEQ ID NO: 15365 - DNA, 33 bp, Homo sapiens
attcacagaacactattaatacttacgtgtttc

SEQ ID NO: 15366 - DNA, 33 bp, Homo sapiens
gggacagtccagagtatagtttcgcaaaatgtg

SEQ ID NO: 15367 - DNA, 33 bp, Homo sapiens
cagttatgttttaacattggcattatgtgtgtc

SEQ ID NO: 15368 - DNA, 33 bp, Homo sapiens
catgcccagccaataagtatattccttcgttta

SEQ ID NO: 15369 - DNA, 33 bp, Homo sapiens
ctctcttgttttccaagtatttgttcacctgga

SEQ ID NO: 15370 - DNA, 33 bp, Homo sapiens
tcaggatcatgctttcgcctggagcaacgtgaa

SEQ ID NO: 15371 - DNA, 33 bp, Homo sapiens
actagaagtccccatatatgccactggcagcca

SEQ ID NO: 15372 - DNA, 33 bp, Homo sapiens
acctacaatgagagaagagtacatcaaaaggaa

SEQ ID NO: 15373 - DNA, 33 bp, Homo sapiens
gcttatcactagacacggaaaataaaaactatg

SEQ ID NO: 15374 - DNA, 33 bp, Homo sapiens
agtgtgaaccaccatatccggcaaaagatgcta

SEQ ID NO: 15375 - DNA, 33 bp, Homo sapiens
cctgccccaagctctatgcaaatgctgttcccc

SEQ ID NO: 15376 - DNA, 33 bp, Homo sapiens
gctcagatttcaggaatggggaacaggaagatg

SEQ ID NO: 15377 - DNA, 33 bp, Homo sapiens
tgacattggggaattacagtgacaattcttaag

SEQ ID NO: 15378 - DNA, 33 bp, Homo sapiens
gagggcactgttccacgatgtgataggtatttc

SEQ ID NO: 15379 - DNA, 33 bp, Homo sapiens
ttgacctttttgcagggacactccattcccatg

SEQ ID NO: 15380 - DNA, 33 bp, Homo sapiens
tggcaagggaatcatagcaacagcacatggctc

SEQ ID NO: 15381 - DNA, 33 bp, Homo sapiens
tctctcaagtgggtcagaaagataaggggcctc

SEQ ID NO: 15382 - DNA, 51 bp, Homo sapiens
gaaggatcctggtgaggtccaataatgcagccaagctgtgacacatctcta

SEQ ID NO: 15383 - DNA, 51 bp, Homo sapiens
catcaaaaccgagtgattgaaggagcatgagaacgagatggactttggtcc

SEQ ID NO: 15384 - DNA, 33 bp, Homo sapiens
taaaatttgatatgtctcatcactccattctct

SEQ ID NO: 15385 - DNA, 33 bp, Homo sapiens
gtcacagctcacataatactctcacaggtacct

SEQ ID NO: 15386 - DNA, 33 bp, Homo sapiens
ttttgaaatggaaatcgatacaaatgatatcac

SEQ ID NO: 15387 - DNA, 33 bp, Homo sapiens
ggaaccagctgttaaagtagaactccgcaaaac

SEQ ID NO: 15388 - DNA, 33 bp, Homo sapiens
aaaaccagcaagtgaacaacgcatgcttggcag

SEQ ID NO: 15389 - DNA, 33 bp, Homo sapiens
ctgctactgagcttgatgtagtgtacacttgct

SEQ ID NO: 15390 - DNA, 33 bp, Homo sapiens
atctgctagcagtgactgagtacgtagaaggaa

SEQ ID NO: 15391 - DNA, 33 bp, Homo sapiens
acatatgagtgaatgatgataataagtcacaaa

SEQ ID NO: 15392 - DNA, 33 bp, Homo sapiens
cacagacaccagaagagaagaccacgtgaagac

SEQ ID NO: 15393 - DNA, 33 bp, Homo sapiens
gagccatcagaagtgggaagagggaagggagca

SEQ ID NO: 15394 - DNA, 33 bp, Homo sapiens
catactatacctatgcgcagaatcatggatata

SEQ ID NO: 15395 - DNA, 33 bp, Homo sapiens
tgaacgagatatttaatcccttgtgagatgctt

SEQ ID NO: 15396 - DNA, 33 bp, Homo sapiens
ctatgtatcttttcgaggagtgtttgttcacgt

SEQ ID NO: 15397 - DNA, 33 bp, Homo sapiens
ttatcaggatggttgattacccactcaatttcc

SEQ ID NO: 15398 - DNA, 33 bp, Homo sapiens
ggccacttgcagatacgaaaatctgaaaatctt

SEQ ID NO: 15399 - DNA, 33 bp, Homo sapiens
ttttgccagacaaatagggagaaaaaaggatgc

SEQ ID NO: 15400 - DNA, 33 bp, Homo sapiens
attctcaatcatatcatcattttacaggtccct

SEQ ID NO: 15401 - DNA, 33 bp, Homo sapiens
aatgattgccacaaactgcctaacacaaagctt

SEQ ID NO: 15402 - DNA, 33 bp, Homo sapiens
caaaaagtcagagagtgacgtgaaaggtaactg

SEQ ID NO: 15403 - DNA, 33 bp, Homo sapiens
cactgaaaattgcttacggtgctattaataact

SEQ ID NO: 15404 - DNA, 33 bp, Homo sapiens
ttagttgaagttcccagatacatgatagcctgc

SEQ ID NO: 15405 - DNA, 33 bp, Homo sapiens
gtagcagttgaagaagtaccaacatatgaagtc

SEQ ID NO: 15406 - DNA, 33 bp, Homo sapiens
aataatggtcttcaaggatgattgatgttagta

SEQ ID NO: 15407 - DNA, 33 bp, Homo sapiens
tctattagatgttgcagaatgttcttaacctct

SEQ ID NO: 15408 - DNA, 33 bp, Homo sapiens
ttatgccagactataaggcaatatttaggaatt

SEQ ID NO: 15409 - DNA, 33 bp, Homo sapiens
ctactgaagtctttgagtaattacgtatcagga

SEQ ID NO: 15410 - DNA, 33 bp, Homo sapiens
cgcattaaagtacatccccttaactcacttctg

SEQ ID NO: 15411 - DNA, 33 bp, Homo sapiens
gacttgatctaacatagcatttatcacggtgaa

SEQ ID NO: 15412 - DNA, 33 bp, Homo sapiens
attcctattttacttctcttgcaaaaatataac

SEQ ID NO: 15413 - DNA, 33 bp, Homo sapiens
ttcccaagtgataagcgataatgacaaggttaa

SEQ ID NO: 15414 - DNA, 33 bp, Homo sapiens
ttatatacgacttttagattcttcacacttttc

SEQ ID NO: 15415 - DNA, 33 bp, Homo sapiens
attgagatgcattttggaaacacagaaatccag

SEQ ID NO: 15416 - DNA, 33 bp, Homo sapiens
cagtctgtatcctctctgaagcaatgattttcc

SEQ ID NO: 15417 - DNA, 33 bp, Homo sapiens
ttttcctcacccccacgatgaatccagtagcaa

SEQ ID NO: 15418 - DNA, 33 bp, Homo sapiens
aatataggtggaatcctggaatataaagaaggc

SEQ ID NO: 15419 - DNA, 51 bp, Homo sapiens
caagaatacttaaagttccagagtatatatgcagttaacaatatagtctca

SEQ ID NO: 15420 - DNA, 33 bp, Homo sapiens
actttacagagctacagaatactcacagagtga

SEQ ID NO: 15421 - DNA, 33 bp, Homo sapiens
taaatttttgtaaacaggcaaatgatctgaata

SEQ ID NO: 15422 - DNA, 33 bp, Homo sapiens
cctccaatatacacacgatttcatagtgccact

SEQ ID NO: 15423 - DNA, 33 bp, Homo sapiens
gtctttttagacataatgctattgtacacttaa

SEQ ID NO: 15424 - DNA, 51 bp, Homo sapiens
gggttgtttcttaaaaaaaattcacgcaactgacaggaggaattgtcttta

SEQ ID NO: 15425 - DNA, 33 bp, Homo sapiens
actgtggcctgtgtacgatgtcaaaagagtagg

SEQ ID NO: 15426 - DNA, 33 bp, Homo sapiens
agaattttccactgaatagctgtgatatatgga

SEQ ID NO: 15427 - DNA, 33 bp, Homo sapiens
catgaatcatcctctagtaccttttaacttttc

SEQ ID NO: 15428 - DNA, 33 bp, Homo sapiens
catcttccttcatgacgaacattttcatgtctg

SEQ ID NO: 15429 - DNA, 33 bp, Homo sapiens
gaggactggagggtgagtattgtggttttcctg

SEQ ID NO: 15430 - DNA, 33 bp, Homo sapiens
cgaggaagtcattctgtcaaccatcgtcttcat

SEQ ID NO: 15431 - DNA, 33 bp, Homo sapiens
gttctccatgcctgtggagcaacctggaaggaa

SEQ ID NO: 15432 - DNA, 33 bp, Homo sapiens
gagaaggcagaaaagacgacgaagaaagaagca

SEQ ID NO: 15433 - DNA, 33 bp, Homo sapiens
atggaaaaattcctcagcatccaggtacagtcc

SEQ ID NO: 15434 - DNA, 33 bp, Homo sapiens
tgggtagctagtcagatacgaacagggcaggag

SEQ ID NO: 15435 - DNA, 33 bp, Homo sapiens
gacgttttgataagaagattagtatgaatagaa

SEQ ID NO: 15436 - DNA, 33 bp, Homo sapiens
ctactaaaattaaacattggggagactctccag

SEQ ID NO: 15437 - DNA, 33 bp, Homo sapiens
gtcaaactcaggaaatgagaggatagaatggta

SEQ ID NO: 15438 - DNA, 33 bp, Homo sapiens
tctccattccttactctataatcaaagcataca

SEQ ID NO: 15439 - DNA, 33 bp, Homo sapiens
aagaaagactatgcaagaccactgtaatagaga

SEQ ID NO: 15440 - DNA, 33 bp, Homo sapiens
tggtaagagaaaatgaggaatgaaagagtagtc

SEQ ID NO: 15441 - DNA, 33 bp, Homo sapiens
caaggcaaactggatcgcactgaagctcaagaa

SEQ ID NO: 15442 - DNA, 33 bp, Homo sapiens
aaactgaactcctttccctatggtggattttta

SEQ ID NO: 15443 - DNA, 33 bp, Homo sapiens
gctggcccaagtttacgcaaacaccaggagaga

SEQ ID NO: 15444 - DNA, 51 bp, Homo sapiens
gaaatcacatataagcaatgtatgagacaaaattataaagcatcacacaaa

SEQ ID NO: 15445 - DNA, 33 bp, Homo sapiens
aggcataggaaagacagatagcacgtattctta

SEQ ID NO: 15446 - DNA, 33 bp, Homo sapiens
tcatttagctgaaaaatcataatgatagcattg

SEQ ID NO: 15447 - DNA, 33 bp, Homo sapiens
ttctaaatgactacttgaaaaggcgagagtgat

SEQ ID NO: 15448 - DNA, 51 bp, Homo sapiens
tgaataaagcgctaaaatattatgagcaagtaaacacatttttaaggcctc

SEQ ID NO: 15449 - DNA, 51 bp, Homo sapiens
atttctagatagtagcaaggaatgactacattaaaatttttaaatatgttg

SEQ ID NO: 15450 - DNA, 33 bp, Homo sapiens
taaagtactcacgataggtaattctctcaaaag

SEQ ID NO: 15451 - DNA, 33 bp, Homo sapiens
taatggtcagagagaattcaattttgtgtgttt

SEQ ID NO: 15452 - DNA, 33 bp, Homo sapiens
gtaattattgagttgatcatttaagcatatcag

SEQ ID NO: 15453 - DNA, 33 bp, Homo sapiens
aaggcagtacttattagagagaaagacagtttt

SEQ ID NO: 15454 - DNA, 33 bp, Homo sapiens
tgcctaaacttcttgccaaggaaataagctgaa

SEQ ID NO: 15455 - DNA, 51 bp, Homo sapiens
aaatcagaacctgggtcatatcaaggactagcaataatgagcactgaaata

SEQ ID NO: 15456 - DNA, 33 bp, Homo sapiens
catacctcttttgcccgcagactctgcttaaca

SEQ ID NO: 15457 - DNA, 33 bp, Homo sapiens
gctgaggtttcactgcgagtaaatatggccagg

SEQ ID NO: 15458 - DNA, 33 bp, Homo sapiens
atgtactgagtccaaatatattcattcaaataa

SEQ ID NO: 15459 - DNA, 33 bp, Homo sapiens
aatcacactgggtggcgatctactctggaactt

SEQ ID NO: 15460 - DNA, 33 bp, Homo sapiens
ttgaaaatctgggatagagaacatgcaggtttg

SEQ ID NO: 15461 - DNA, 33 bp, Homo sapiens
taaccattcaagcaaaggttagtagttaaaatt

SEQ ID NO: 15462 - DNA, 33 bp, Homo sapiens
aagacccttgtgggtcgaggatcaaagggattt

SEQ ID NO: 15463 - DNA, 33 bp, Homo sapiens
gtgtctactttgacagccaggattaaaagtagg

SEQ ID NO: 15464 - DNA, 33 bp, Homo sapiens
acgaacttgctacaattaaatggatgagttagg

SEQ ID NO: 15465 - DNA, 51 bp, Homo sapiens
tacataataatatatgggaaatatagatcagtgcaaacttattagtagata

SEQ ID NO: 15466 - DNA, 33 bp, Homo sapiens
attagtaaaatttgaatgaggcctgtagatgtg

SEQ ID NO: 15467 - DNA, 33 bp, Homo sapiens
cttgagtggatggttctaagagaggctttcctg

SEQ ID NO: 15468 - DNA, 33 bp, Homo sapiens
tcaccttcaaatggaatgccatcaagctaacag

SEQ ID NO: 15469 - DNA, 33 bp, Homo sapiens
tgtggggtgccatatatgtagtattctggaggt

SEQ ID NO: 15470 - DNA, 33 bp, Homo sapiens
ggattaagagaaagccgccttttagatagctct

SEQ ID NO: 15471 - DNA, 33 bp, Homo sapiens
ttacttttacaactcagagttctgtgtactatc

SEQ ID NO: 15472 - DNA, 51 bp, Homo sapiens
acacattttcctggcctatagttactgggcacaataaaaggtgtgaaaaca

SEQ ID NO: 15473 - DNA, 33 bp, Homo sapiens
tattaacatggatgactgaacaaatcaatgaaa

SEQ ID NO: 15474 - DNA, 33 bp, Homo sapiens
atgaaatagtgttcagcagtagatacacatata

SEQ ID NO: 15475 - DNA, 33 bp, Homo sapiens
attatattcatggtcctagccaattccataaat

SEQ ID NO: 15476 - DNA, 33 bp, Homo sapiens
agagcaggaactatcataaaatcttggcacaaa

SEQ ID NO: 15477 - DNA, 33 bp, Homo sapiens
gttcagggctatgctagaaattagtaggccaaa

SEQ ID NO: 15478 - DNA, 33 bp, Homo sapiens
cctttgtgatatctgcgcaatggtcttagtttt

SEQ ID NO: 15479 - DNA, 33 bp, Homo sapiens
tttctgctatcttcaatctgaatttaagaaaat

SEQ ID NO: 15480 - DNA, 51 bp, Homo sapiens
taaagtttcaatttagatcttgcctgaaaactttcaatagcaagaagacac

SEQ ID NO: 15481 - DNA, 33 bp, Homo sapiens
aaagcattccaaataaggaactctcccagtagt

SEQ ID NO: 15482 - DNA, 33 bp, Homo sapiens
aatttatatcaattacgatgttactggcaggtc

SEQ ID NO: 15483 - DNA, 33 bp, Homo sapiens
ttccttcttttttggctgaatattattcatata

SEQ ID NO: 15484 - DNA, 33 bp, Homo sapiens
acagaataatacagaatgttgggtgacaaattt

SEQ ID NO: 15485 - DNA, 33 bp, Homo sapiens
ttaaatgccaatgctcggaatatttaacctgca

SEQ ID NO: 15486 - DNA, 33 bp, Homo sapiens
taaaaagatgttatcagtgaagtaaactgttct

SEQ ID NO: 15487 - DNA, 33 bp, Homo sapiens
ttttcactcagcttaattccttgaagtttcatc

SEQ ID NO: 15488 - DNA, 33 bp, Homo sapiens
tatttcaaagtaacacggtagctccatgtttag

SEQ ID NO: 15489 - DNA, 33 bp, Homo sapiens
acatccaaacactatatgcctaggacatctaaa

SEQ ID NO: 15490 - DNA, 51 bp, Homo sapiens
tacatttagctgacagatgtttgcagtaatcataattaatgttccaatcat

SEQ ID NO: 15491 - DNA, 51 bp, Homo sapiens
tgttgtcttgtcatcaatgacaacattcactcaatgggtccagagtcacta

SEQ ID NO: 15492 - DNA, 33 bp, Homo sapiens
gcctgctgaagaagccgaattgttttgccacag

SEQ ID NO: 15493 - DNA, 33 bp, Homo sapiens
agaggttaagttactgcaggcaagtgccatgga

SEQ ID NO: 15494 - DNA, 33 bp, Homo sapiens
aaagaaacagaaactccagatactatagacaga

SEQ ID NO: 15495 - DNA, 33 bp, Homo sapiens
aggatttacaattacatacagtgctttattgag

SEQ ID NO: 15496 - DNA, 33 bp, Homo sapiens
ttagagcacaaaaagcgatgtgtaaaaatttgt

SEQ ID NO: 15497 - DNA, 33 bp, Homo sapiens
caatctacaggtttaatgtaattcccatcaaag

SEQ ID NO: 15498 - DNA, 33 bp, Homo sapiens
aagcagaaataagcatgagagccaattaattgt

SEQ ID NO: 15499 - DNA, 33 bp, Homo sapiens
cgaacactatcaaaaatctccagcccagccatg

SEQ ID NO: 15500 - DNA, 33 bp, Homo sapiens
gccagagccagcaatcgatgtgaggaaggtgct

SEQ ID NO: 15501 - DNA, 33 bp, Homo sapiens
ccaatgaaatttataatgccttgtcaaattttt

SEQ ID NO: 15502 - DNA, 33 bp, Homo sapiens
gcctgtgctctatagatgaaataacaaagccta

SEQ ID NO: 15503 - DNA, 33 bp, Homo sapiens
gcactctggattcacataatttacattctatct

SEQ ID NO: 15504 - DNA, 51 bp, Homo sapiens
agattatagtcaaaagtggctttcatacctgattcagctataattttttaa

SEQ ID NO: 15505 - DNA, 33 bp, Homo sapiens
tttagaagtaacattggaaacattaaacttctt

SEQ ID NO: 15506 - DNA, 33 bp, Homo sapiens
tattaagaaaatagcccaagtattgaaagtatc

SEQ ID NO: 15507 - DNA, 33 bp, Homo sapiens
tccctatgttgtgatatgacctgttaacttggc

SEQ ID NO: 15508 - DNA, 33 bp, Homo sapiens
ggctccctcatgctccgcttctggttgggtttg

SEQ ID NO: 15509 - DNA, 33 bp, Homo sapiens
tgagaatgaaaactggtacagccattatggaca

SEQ ID NO: 15510 - DNA, 33 bp, Homo sapiens
tttactattctatgcagtcaaagtagaaaattt

SEQ ID NO: 15511 - DNA, 51 bp, Homo sapiens
catatactctaatagtaatttttgagagaaagtgaaaacaagactaatttt

SEQ ID NO: 15512 - DNA, 33 bp, Homo sapiens
aactatgaagttcagttaataataatgtatata

SEQ ID NO: 15513 - DNA, 33 bp, Homo sapiens
aagaactttgtcaattgaatcagatgaaatata

SEQ ID NO: 15514 - DNA, 51 bp, Homo sapiens
ggcagtgcaaccatttaggatttaccgcctggaatatcacgttttagcaat

SEQ ID NO: 15515 - DNA, 33 bp, Homo sapiens
catgtacaggataaaatgcaatgaaagcccact

SEQ ID NO: 15516 - DNA, 33 bp, Homo sapiens
aaccagagcccttacattggtctacaagttcca

SEQ ID NO: 15517 - DNA, 33 bp, Homo sapiens
tcaaggaactggtatatgaaacagtgagagtgc

SEQ ID NO: 15518 - DNA, 33 bp, Homo sapiens
agaaaatactggaagaggatgtttgaggtaagc

SEQ ID NO: 15519 - DNA, 33 bp, Homo sapiens
cttttaaaaaatgacatgacacaaaatatgaca

SEQ ID NO: 15520 - DNA, 33 bp, Homo sapiens
ccttccacttaagccagattctaacttgacact

SEQ ID NO: 15521 - DNA, 33 bp, Homo sapiens
aaaatgggtgatatgataaatgaaataggagtc

SEQ ID NO: 15522 - DNA, 33 bp, Homo sapiens
caaattttggagttaatggcctccacaattatg

SEQ ID NO: 15523 - DNA, 33 bp, Homo sapiens
ttgttagacgctaaccgggggaaagagtgcaga

SEQ ID NO: 15524 - DNA, 33 bp, Homo sapiens
attttcacattgtcgattcacttttttggtcac

SEQ ID NO: 15525 - DNA, 33 bp, Homo sapiens
tatggaacagtaaagatgttaatgtggttgggt

SEQ ID NO: 15526 - DNA, 33 bp, Homo sapiens
atgaagagaggaatggcaaaaagtgaatcggag

SEQ ID NO: 15527 - DNA, 33 bp, Homo sapiens
cagatgtgcaaatgaacagagccaatcagacag

SEQ ID NO: 15528 - DNA, 33 bp, Homo sapiens
ttctcagagctcagtctacaacagcctgctgag

SEQ ID NO: 15529 - DNA, 33 bp, Homo sapiens
gcctttttgatttacatgtgtttatttatgagt

SEQ ID NO: 15530 - DNA, 33 bp, Homo sapiens
tgggttgcccacattcgcctcaatatatctaac

SEQ ID NO: 15531 - DNA, 33 bp, Homo sapiens
tagattcatgctgatgccatatctcaagtgttg

SEQ ID NO: 15532 - DNA, 33 bp, Homo sapiens
acattaaagagcataatctccatgcagtccacc

SEQ ID NO: 15533 - DNA, 33 bp, Homo sapiens
ctgagatactcccatgtaggtggctttaattcc

SEQ ID NO: 15534 - DNA, 33 bp, Homo sapiens
gtataaagattaaggctccagaggcaggtagga

SEQ ID NO: 15535 - DNA, 33 bp, Homo sapiens
accgaaataatatctggcaattacctggttttt

SEQ ID NO: 15536 - DNA, 33 bp, Homo sapiens
acaggacttgttttaagcaacatacaggcctgt

SEQ ID NO: 15537 - DNA, 33 bp, Homo sapiens
atcaacacattcattatggactgagagcacaca

SEQ ID NO: 15538 - DNA, 51 bp, Homo sapiens
attgcaaagctatgtacccgtgacagtgtaaatgaaaggtttgattgtgct

SEQ ID NO: 15539 - DNA, 33 bp, Homo sapiens
ctctgcattttgccaatagttggagaagttggg

SEQ ID NO: 15540 - DNA, 33 bp, Homo sapiens
ttgatttcttctcatacgagtgggtgagattaa

SEQ ID NO: 15541 - DNA, 33 bp, Homo sapiens
ctggctaagtagccaaggtcttttgtggagagc

SEQ ID NO: 15542 - DNA, 33 bp, Homo sapiens
atgttatcaagctgcatgtgcgatcattcacac

SEQ ID NO: 15543 - DNA, 51 bp, Homo sapiens
ttagaagaccattttgcagagtgcattacacagaatgttttcaggacaccc

SEQ ID NO: 15544 - DNA, 33 bp, Homo sapiens
ccctggatcttattgacgccttctgttttagct

SEQ ID NO: 15545 - DNA, 33 bp, Homo sapiens
ggaagagaaaacaccagtacacaccatatatca

SEQ ID NO: 15546 - DNA, 33 bp, Homo sapiens
catgtcagctgaaacctaatattagctatatct

SEQ ID NO: 15547 - DNA, 51 bp, Homo sapiens
caagatgctggtgacaccactgagatgtgagagagaagcacatggggcagg

SEQ ID NO: 15548 - DNA, 51 bp, Homo sapiens
taaaagtcttttaatcatccaatgggaatttaatggacaccttctgtatgc

SEQ ID NO: 15549 - DNA, 33 bp, Homo sapiens
ggactctggacaaccatgaggaaactttggaaa

SEQ ID NO: 15550 - DNA, 33 bp, Homo sapiens
aggagctgtgatctgatgaaggacattcagtga

SEQ ID NO: 15551 - DNA, 33 bp, Homo sapiens
ttgcttgcagctgttatctctaatccctataac

SEQ ID NO: 15552 - DNA, 33 bp, Homo sapiens
gttcaaatagactcaacactgctgaacacaaat

SEQ ID NO: 15553 - DNA, 33 bp, Homo sapiens
ccatacctgtaagagagaaacaacaggatattg

SEQ ID NO: 15554 - DNA, 51 bp, Homo sapiens
tcagatatggactccagtcatagtataacgcttcagcctactgcaaatcca

SEQ ID NO: 15555 - DNA, 33 bp, Homo sapiens
gaaaataaaaagtaaatctctcactgaactcta

SEQ ID NO: 15556 - DNA, 51 bp, Homo sapiens
ctagtaagagtgtcaaaatgagtaggagaaaatggtttatgtcatacaggt

SEQ ID NO: 15557 - DNA, 33 bp, Homo sapiens
ttctcaaatctaaggatacttctggaattgctg

SEQ ID NO: 15558 - DNA, 33 bp, Homo sapiens
gatataggaaacatcagtcagggaatggagaaa

SEQ ID NO: 15559 - DNA, 33 bp, Homo sapiens
taggagcagattttacgacacggcttcaaactc

SEQ ID NO: 15560 - DNA, 51 bp, Homo sapiens
gaacctagaaaaaaggcctgaaatagaaacatacatttgggagttatcagg

SEQ ID NO: 15561 - DNA, 33 bp, Homo sapiens
cagaagtatgcttaacgctcctatagtctgaag

SEQ ID NO: 15562 - DNA, 33 bp, Homo sapiens
gtgtggtcaagaattatatttgttacttggtct

SEQ ID NO: 15563 - DNA, 33 bp, Homo sapiens
ggcactggattcaaaatgggatggtgcttggga

SEQ ID NO: 15564 - DNA, 33 bp, Homo sapiens
aatctttcctcttgtcgacttggcaagcctggg

SEQ ID NO: 15565 - DNA, 33 bp, Homo sapiens
aacttcaatgaaaagatggactggtttataaaa

SEQ ID NO: 15566 - DNA, 51 bp, Homo sapiens
gcagtcattctgcaattacgttcactcttcttcaagctggctccaagtata

SEQ ID NO: 15567 - DNA, 33 bp, Homo sapiens
tgaaaaattctacagaggttccaagtgtggtgt

SEQ ID NO: 15568 - DNA, 33 bp, Homo sapiens
ctaaaaagcaacctcaggaattccaaaagctaa

SEQ ID NO: 15569 - DNA, 33 bp, Homo sapiens
gttcttcccccgtccatgacaaagattctctcc

SEQ ID NO: 15570 - DNA, 33 bp, Homo sapiens
atttcaggctagaatcgccaagatttgatgaca

SEQ ID NO: 15571 - DNA, 33 bp, Homo sapiens
attggaacctcagtcagtaaaaaggcatctcct

SEQ ID NO: 15572 - DNA, 33 bp, Homo sapiens
atcactatctgtggagtagaaaatattctggtg

SEQ ID NO: 15573 - DNA, 51 bp, Homo sapiens
ttgttaaggggaaaaaattaacttatggtgtagtgattagagggaaacgtc

SEQ ID NO: 15574 - DNA, 33 bp, Homo sapiens
cggggtttttggtcaattaagttcaggaaacac

SEQ ID NO: 15575 - DNA, 33 bp, Homo sapiens
tttatagttaagtctcgaaatgaggtagtgtgt

SEQ ID NO: 15576 - DNA, 33 bp, Homo sapiens
ataaatccagaggtcctgatgagattgtgttga

SEQ ID NO: 15577 - DNA, 33 bp, Homo sapiens
tacacaatagaaaggatggacagttttcttgcc

SEQ ID NO: 15578 - DNA, 33 bp, Homo sapiens
gctgcaatttgctacagtggcccctctccaatg

SEQ ID NO: 15579 - DNA, 33 bp, Homo sapiens
aagtagaaaagtaaactccaaggtaagattgtc

SEQ ID NO: 15580 - DNA, 33 bp, Homo sapiens
cagccctgtgaagggaggtatgccacactccaa

SEQ ID NO: 15581 - DNA, 33 bp, Homo sapiens
tagtttggtcaggtactgggcaaagtaattttc

SEQ ID NO: 15582 - DNA, 33 bp, Homo sapiens
aacaggtggaaacaaatgtggattcctaagaca

SEQ ID NO: 15583 - DNA, 51 bp, Homo sapiens
tttcagccaagagaccaattaataatgcaagaaaaaaggtttattaaggac

SEQ ID NO: 15584 - DNA, 33 bp, Homo sapiens
tgtcacataagttatcgctcaacattaagtagc

SEQ ID NO: 15585 - DNA, 33 bp, Homo sapiens
acaacaagtgccatgatgaggattctcatgaga

SEQ ID NO: 15586 - DNA, 33 bp, Homo sapiens
acttactgtatggaaagtgctgtggtcaaatta

SEQ ID NO: 15587 - DNA, 33 bp, Homo sapiens
tgtagcaactggaaaatgagacaaggaaacatg

SEQ ID NO: 15588 - DNA, 33 bp, Homo sapiens
agtgtgtgtattttccgacaattttccaaggta

SEQ ID NO: 15589 - DNA, 33 bp, Homo sapiens
aattagtttctctttaggtctgttgaaaccgcg

SEQ ID NO: 15590 - DNA, 33 bp, Homo sapiens
gtactatgagtttgcatatgttaggaatacaac

SEQ ID NO: 15591 - DNA, 33 bp, Homo sapiens
aagactgcaaagcaactagctaaaaacaccaag

SEQ ID NO: 15592 - DNA, 33 bp, Homo sapiens
ctcatttgaccctatcgccaaaggcagtcatat

SEQ ID NO: 15593 - DNA, 33 bp, Homo sapiens
agattccacctcaaaagaccactttctttgctc

SEQ ID NO: 15594 - DNA, 33 bp, Homo sapiens
ttatttccttgtataatacacatgtttgatcca

SEQ ID NO: 15595 - DNA, 33 bp, Homo sapiens
gaaccaattggtgatatattgaaaaaacagttt

SEQ ID NO: 15596 - DNA, 33 bp, Homo sapiens
gaaagactagttagaggcaatctaggagagaaa

SEQ ID NO: 15597 - DNA, 33 bp, Homo sapiens
gtgactatagctggtgtaatcattagcaaacag

SEQ ID NO: 15598 - DNA, 51 bp, Homo sapiens
tcctaatcacataatacatttttcatgctctagcgaagtaaatacaattag

SEQ ID NO: 15599 - DNA, 51 bp, Homo sapiens
attctcttcgagataggcacccttataaaaagtgaagtcttccatgatgta

SEQ ID NO: 15600 - DNA, 33 bp, Homo sapiens
gcaacaactggtcatatctctcccttttctggg

SEQ ID NO: 15601 - DNA, 33 bp, Homo sapiens
atgttattttaaaacatctgtgccagttcttaa

SEQ ID NO: 15602 - DNA, 33 bp, Homo sapiens
aaatttcagatcttaggacagccaggaaacaat

SEQ ID NO: 15603 - DNA, 33 bp, Homo sapiens
tcctgtaagcctttcagaatcttttcattctcc

SEQ ID NO: 15604 - DNA, 33 bp, Homo sapiens
gcccacatgtaacatgtaattgcttccctgttt

SEQ ID NO: 15605 - DNA, 33 bp, Homo sapiens
tgcttataaatttgtatgaagtttctgccttgc

SEQ ID NO: 15606 - DNA, 33 bp, Homo sapiens
tgcaacggacgtgtcagatagctctaccctggg

SEQ ID NO: 15607 - DNA, 33 bp, Homo sapiens
tcatataaataatgtacgtttcctctctgattg

SEQ ID NO: 15608 - DNA, 33 bp, Homo sapiens
aggctgctacaggtcacctgaatcaccaacccc

SEQ ID NO: 15609 - DNA, 33 bp, Homo sapiens
tcaccttccacacctcgaaagaaaagctgagtt

SEQ ID NO: 15610 - DNA, 33 bp, Homo sapiens
tgattaaataaatcaatgaattccagcatcaaa

SEQ ID NO: 15611 - DNA, 33 bp, Homo sapiens
catacattattaactcggacaagtcatttaaca

SEQ ID NO: 15612 - DNA, 33 bp, Homo sapiens
aatttcagttttccaggagctaggtatcccctg

SEQ ID NO: 15613 - DNA, 33 bp, Homo sapiens
acaaggcagctcatggtaaactaatcactcaga

SEQ ID NO: 15614 - DNA, 33 bp, Homo sapiens
cctctctaatctataatcttgtgtctctagaag

SEQ ID NO: 15615 - DNA, 33 bp, Homo sapiens
aacactgaaagttcactaagtatcgggcattgc

SEQ ID NO: 15616 - DNA, 51 bp, Homo sapiens
ataatctgttcagtgaggagtataagcttgagtattacagtctggttcagg

SEQ ID NO: 15617 - DNA, 33 bp, Homo sapiens
attttgtcagccaatagaacaccacttgggtgt

SEQ ID NO: 15618 - DNA, 33 bp, Homo sapiens
ttcattttttctttcatgtctgtgtagtattcc

SEQ ID NO: 15619 - DNA, 51 bp, Homo sapiens
accccattcaaacatcacaataacatccccatttttccaacagggaaatta

SEQ ID NO: 15620 - DNA, 33 bp, Homo sapiens
gatgtatagcacttgaggtttcagaagaaggag

SEQ ID NO: 15621 - DNA, 33 bp, Homo sapiens
caaatgaggactccaattcctaagggatctcaa

SEQ ID NO: 15622 - DNA, 33 bp, Homo sapiens
gtgccatattgcttcctactatgtcatgtgagt

SEQ ID NO: 15623 - DNA, 33 bp, Homo sapiens
acttactcaggggcaatcttgggaaattccctc

SEQ ID NO: 15624 - DNA, 33 bp, Homo sapiens
ttagaaaagttgaatagcctactagccatgtga

SEQ ID NO: 15625 - DNA, 33 bp, Homo sapiens
gtttgggtttgtagaggcagcaatccttaaccc

SEQ ID NO: 15626 - DNA, 33 bp, Homo sapiens
aaatgatgattctctttaaatcctacacaacca

SEQ ID NO: 15627 - DNA, 33 bp, Homo sapiens
tagggctcaacccagaggtctgacgcacatgaa

SEQ ID NO: 15628 - DNA, 33 bp, Homo sapiens
caggtacttgcagctatgaggacagctccagga

SEQ ID NO: 15629 - DNA, 33 bp, Homo sapiens
gaggggtcttggggacgccagttgcccttcttt

SEQ ID NO: 15630 - DNA, 33 bp, Homo sapiens
cagctcagtacaaaccgggctcagtacaaacag

SEQ ID NO: 15631 - DNA, 33 bp, Homo sapiens
tatataaacagtcatctcttagaatccacggag

SEQ ID NO: 15632 - DNA, 33 bp, Homo sapiens
acgatctgacagttccgctcccaattattttct

SEQ ID NO: 15633 - DNA, 33 bp, Homo sapiens
acccatgataaacaaatagcaaaattttaagta

SEQ ID NO: 15634 - DNA, 51 bp, Homo sapiens
gccagaaggtaaggaaggcacaaacgaacatccaattcacagtaataggag

SEQ ID NO: 15635 - DNA, 33 bp, Homo sapiens
cagtgcacagagttcttagaaagcattggggct

SEQ ID NO: 15636 - DNA, 33 bp, Homo sapiens
gggcgtgcctttcctctgaaataatattgttca

SEQ ID NO: 15637 - DNA, 33 bp, Homo sapiens
ctccattcccacaagataatttatggcagttat

SEQ ID NO: 15638 - DNA, 33 bp, Homo sapiens
gtctctgccttttggatgggagataggccaccc

SEQ ID NO: 15639 - DNA, 33 bp, Homo sapiens
caacaggcaacttgaatggacaaggccctagaa

SEQ ID NO: 15640 - DNA, 33 bp, Homo sapiens
agatgttgcaatgtgactaagttttgctcaacg

SEQ ID NO: 15641 - DNA, 33 bp, Homo sapiens
gatgcaacaagagtaaggagcccagaatgatgc

SEQ ID NO: 15642 - DNA, 33 bp, Homo sapiens
actatcactctgctaagtgtggaatctcatcta

SEQ ID NO: 15643 - DNA, 33 bp, Homo sapiens
aagccagaggaatatatccaacatatctactca

SEQ ID NO: 15644 - DNA, 33 bp, Homo sapiens
gtgaacccccattcaccatcacctcaaagagaa

SEQ ID NO: 15645 - DNA, 33 bp, Homo sapiens
atctaaaactgcagaattatgattacctgcttt

SEQ ID NO: 15646 - DNA, 33 bp, Homo sapiens
cttttctggaccaagatgtgagtatttgaaacc

SEQ ID NO: 15647 - DNA, 33 bp, Homo sapiens
gaaaatgtgagagaaatgtgagaagagcatgag

SEQ ID NO: 15648 - DNA, 33 bp, Homo sapiens
caacttcctgacggtctcttttacatctttgtt

SEQ ID NO: 15649 - DNA, 33 bp, Homo sapiens
tggccatctgtaaccctctgctgtacatggtga

SEQ ID NO: 15650 - DNA, 33 bp, Homo sapiens
catccctggagactattagcatcggttacagtg

SEQ ID NO: 15651 - DNA, 33 bp, Homo sapiens
tttttcattaaaatcagaatgtgaagaacaata

SEQ ID NO: 15652 - DNA, 33 bp, Homo sapiens
tagcatcgactgtccagagaaatcacttcttag

SEQ ID NO: 15653 - DNA, 33 bp, Homo sapiens
tttatcaatttctaccgcataatgttgcttcag

SEQ ID NO: 15654 - DNA, 33 bp, Homo sapiens
tgtatgttacactgaggccctctagaagtgaaa

SEQ ID NO: 15655 - DNA, 33 bp, Homo sapiens
actgctgtgggtgaaatgtggcatgccctggaa

SEQ ID NO: 15656 - DNA, 33 bp, Homo sapiens
aggacatttttaccaatggtggtgcatcacaga

SEQ ID NO: 15657 - DNA, 33 bp, Homo sapiens
ccatgaaacattgtaagaaattattggttgatc

SEQ ID NO: 15658 - DNA, 33 bp, Homo sapiens
gttccaccattaaaatgactgtgtgatattggg

SEQ ID NO: 15659 - DNA, 33 bp, Homo sapiens
gagaccacagaagtaagtgattgctttgagttt

SEQ ID NO: 15660 - DNA, 33 bp, Homo sapiens
atgtgagccttcaaccgccttaaaaataactga

SEQ ID NO: 15661 - DNA, 33 bp, Homo sapiens
gcacctcacaaatcaatgaatagccgcaaaata

SEQ ID NO: 15662 - DNA, 33 bp, Homo sapiens
gccaaagcacaatttccattcactgatctatgt

SEQ ID NO: 15663 - DNA, 33 bp, Homo sapiens
ctaagtattatgctaagcacttcctagtcactt

SEQ ID NO: 15664 - DNA, 33 bp, Homo sapiens
gttgtatgcatgctaatttaaggcattctccct

SEQ ID NO: 15665 - DNA, 33 bp, Homo sapiens
aaatctcagagttcgctactaaaaaactcattc

SEQ ID NO: 15666 - DNA, 33 bp, Homo sapiens
caaattcaaaaggatatgcactggctttttctg

SEQ ID NO: 15667 - DNA, 33 bp, Homo sapiens
aaacaatatactaagaggtttgaatgtacctgg

SEQ ID NO: 15668 - DNA, 33 bp, Homo sapiens
gaatgtttgaatactcgaggaaattttagtaaa

SEQ ID NO: 15669 - DNA, 33 bp, Homo sapiens
gtatactatggaatcagactagatgaatgtatt

SEQ ID NO: 15670 - DNA, 33 bp, Homo sapiens
tttaagaatttggagataatttgcatttgcttt

SEQ ID NO: 15671 - DNA, 33 bp, Homo sapiens
cgcaaaagaagatgtatgatcagccaaaaaaca

SEQ ID NO: 15672 - DNA, 33 bp, Homo sapiens
gggatatttaactccaggttctgtcctgggttt

SEQ ID NO: 15673 - DNA, 51 bp, Homo sapiens
cattcatttacagaaagaattactgtaactcaaacagctaaaataaattgt

SEQ ID NO: 15674 - DNA, 33 bp, Homo sapiens
ttttcttttcaagatctcattgaaaaccagctt

SEQ ID NO: 15675 - DNA, 33 bp, Homo sapiens
gggagaaagaggttacgggctccagacaagaaa

SEQ ID NO: 15676 - DNA, 33 bp, Homo sapiens
agatcctgtgttgcctgttgatttcaagtctgg

SEQ ID NO: 15677 - DNA, 33 bp, Homo sapiens
ctattactatgaagtaggataatcaactatcct

SEQ ID NO: 15678 - DNA, 33 bp, Homo sapiens
catttatcatttatcacctatgaaccagtgcat

SEQ ID NO: 15679 - DNA, 33 bp, Homo sapiens
acttgatcaaattggctaggtaattctcgtgcc

SEQ ID NO: 15680 - DNA, 33 bp, Homo sapiens
actccttgggaaaaacggcgaaggcaccactca

SEQ ID NO: 15681 - DNA, 51 bp, Homo sapiens
gctcagccacatgggcttccactcaccaaggctgacttggctacagtcact

SEQ ID NO: 15682 - DNA, 33 bp, Homo sapiens
ccctgctgcagtcttatgctccatgcagtccct

SEQ ID NO: 15683 - DNA, 33 bp, Homo sapiens
cgatacaacttcactcgagagctcgccgcttcc

SEQ ID NO: 15684 - DNA, 33 bp, Homo sapiens
attgatgacttcaggttacacgatacaggaatg

SEQ ID NO: 15685 - DNA, 33 bp, Homo sapiens
tactttatatcttgactaaatcgatcccacagg

SEQ ID NO: 15686 - DNA, 33 bp, Homo sapiens
tcacaagaatctgatctatactaagcagctgcc

SEQ ID NO: 15687 - DNA, 33 bp, Homo sapiens
ggggaaactaaggtacgaagagttaagagactt

SEQ ID NO: 15688 - DNA, 33 bp, Homo sapiens
ctccagctctgtaacatatggtggaacttcttt

SEQ ID NO: 15689 - DNA, 33 bp, Homo sapiens
tcagcatcatcctggattatgttcttccaagaa

SEQ ID NO: 15690 - DNA, 33 bp, Homo sapiens
agagaaactgaggcactggaagacctgcttctc

SEQ ID NO: 15691 - DNA, 33 bp, Homo sapiens
ccaggagtgttgctcatgttactcccttaggcc

SEQ ID NO: 15692 - DNA, 33 bp, Homo sapiens
tggatgctctcaataacaataacaaggcccagt

SEQ ID NO: 15693 - DNA, 33 bp, Homo sapiens
ctgtggttaccaagaaggtagccaatgtcaggg

SEQ ID NO: 15694 - DNA, 33 bp, Homo sapiens
ttttcacattgctaccgaatatatcctaaaatg

SEQ ID NO: 15695 - DNA, 33 bp, Homo sapiens
gttctagtcccagcaatgcctccaacagggtgt

SEQ ID NO: 15696 - DNA, 33 bp, Homo sapiens
aaagctttttgagtactaatgtgaccctcaaag

SEQ ID NO: 15697 - DNA, 33 bp, Homo sapiens
aggtccctgagaacaatggaaataactcgtggc

SEQ ID NO: 15698 - DNA, 33 bp, Homo sapiens
ggtggaccataacagccattgtatagaactctt

SEQ ID NO: 15699 - DNA, 33 bp, Homo sapiens
tccctgggacatcccatagtgaccgtgtccact

SEQ ID NO: 15700 - DNA, 33 bp, Homo sapiens
ctgtctttgtagaacatgcaggttagcccacca

SEQ ID NO: 15701 - DNA, 33 bp, Homo sapiens
tgtgggcaggaggtaggaagcacaagggataga

SEQ ID NO: 15702 - DNA, 33 bp, Homo sapiens
ctagagcttttcttgctgaggaaaagaatcatc

SEQ ID NO: 15703 - DNA, 33 bp, Homo sapiens
cagcttgtaactgccatgatgtcaaagccatgg

SEQ ID NO: 15704 - DNA, 33 bp, Homo sapiens
ggccagattctatactgaactctgaggctataa

SEQ ID NO: 15705 - DNA, 33 bp, Homo sapiens
ggaaagctctttctgatgagaggacgtttaggt

SEQ ID NO: 15706 - DNA, 33 bp, Homo sapiens
cagtgggagctataaaggtcagtgttgccttag

SEQ ID NO: 15707 - DNA, 51 bp, Homo sapiens
tcctaattactttccagtgtactactaccaacaattcatcaacgagcattt

SEQ ID NO: 15708 - DNA, 33 bp, Homo sapiens
atattagaagtcggacgctacatgaaagttaaa

SEQ ID NO: 15709 - DNA, 33 bp, Homo sapiens
tcagagaagtatgggatgatagttgaagggaga

SEQ ID NO: 15710 - DNA, 33 bp, Homo sapiens
ttgacataataagccattggaaaacggaaagat

SEQ ID NO: 15711 - DNA, 33 bp, Homo sapiens
ggaatgtcgttccttctccatctttgcagacgc

SEQ ID NO: 15712 - DNA, 33 bp, Homo sapiens
atcttcaattgactactgcaaagaccctaaccc

SEQ ID NO: 15713 - DNA, 51 bp, Homo sapiens
gaggaatggcttattttctgatgactacatgtgggactatttcaaccgcca

SEQ ID NO: 15714 - DNA, 33 bp, Homo sapiens
gacacagcaatgaaaataactgcttctccactc

SEQ ID NO: 15715 - DNA, 33 bp, Homo sapiens
ggtcaagtgactccgagatcaattttacttaga

SEQ ID NO: 15716 - DNA, 33 bp, Homo sapiens
ggtctctgttcttcaatacattagcgcaatgtg

SEQ ID NO: 15717 - DNA, 33 bp, Homo sapiens
cttaagaatgttcttaggaaagcagtaaaacgt

SEQ ID NO: 15718 - DNA, 33 bp, Homo sapiens
ggtttccagagggtgatgctcaacctttgccag

SEQ ID NO: 15719 - DNA, 33 bp, Homo sapiens
tgagatttgaacccaggcggttggctccagtcg

SEQ ID NO: 15720 - DNA, 33 bp, Homo sapiens
agacatactgccaacatgcatggggatgctcga

SEQ ID NO: 15721 - DNA, 33 bp, Homo sapiens
tcccatctcagcctgggagtaatcccaaagtgc

SEQ ID NO: 15722 - DNA, 33 bp, Homo sapiens
aactagaagatctccatctagctattaaaaatt

SEQ ID NO: 15723 - DNA, 33 bp, Homo sapiens
gtgccaagtctataaatgtgtctggaattggtg

SEQ ID NO: 15724 - DNA, 33 bp, Homo sapiens
agcataaacgtgcaagcagagccaatacgtctt

SEQ ID NO: 15725 - DNA, 33 bp, Homo sapiens
tttcatgccaaaagcaggagaactgagtggtta

SEQ ID NO: 15726 - DNA, 33 bp, Homo sapiens
gtgtttaaagaggcaacaatgaggagacattgc

SEQ ID NO: 15727 - DNA, 33 bp, Homo sapiens
gtacctaatttgcttctagctttgtttttgggt

SEQ ID NO: 15728 - DNA, 33 bp, Homo sapiens
tgtctttctctcctaatgcgtgagtctgtactt

SEQ ID NO: 15729 - DNA, 33 bp, Homo sapiens
gaggttatggcatgcagaattagaacatccatg

SEQ ID NO: 15730 - DNA, 33 bp, Homo sapiens
ccctgcctgctggccatgtacctagacagccac

SEQ ID NO: 15731 - DNA, 33 bp, Homo sapiens
tggaaggaataaggagcagcactagatgagggc

SEQ ID NO: 15732 - DNA, 33 bp, Homo sapiens
ccaccatccagactatgacacagaaccatccta

SEQ ID NO: 15733 - DNA, 33 bp, Homo sapiens
gctgcactctctcaggtcccgtgtgattgagca

SEQ ID NO: 15734 - DNA, 33 bp, Homo sapiens
caatgggagtatgacatgattagagttttgaat

SEQ ID NO: 15735 - DNA, 51 bp, Homo sapiens
actgcgacccactcgtgcaccgtactggagtttgtggatgactctagcaga

SEQ ID NO: 15736 - DNA, 33 bp, Homo sapiens
agtgatgggcaagtaccagttgtgaacagaacc

SEQ ID NO: 15737 - DNA, 33 bp, Homo sapiens
tgggtgggtagatgaatggatgatggatggata

SEQ ID NO: 15738 - DNA, 33 bp, Homo sapiens
aatggatggatggacagctggatagatgaatgg

SEQ ID NO: 15739 - DNA, 33 bp, Homo sapiens
cacctccaacagtggggacgacatttcgatatg

SEQ ID NO: 15740 - DNA, 33 bp, Homo sapiens
tctgagaacataacaggattctaatgtgttggc

SEQ ID NO: 15741 - DNA, 33 bp, Homo sapiens
tttgactttctggatatgctgaacttatgcgca

SEQ ID NO: 15742 - DNA, 33 bp, Homo sapiens
agggccacggagggtatgagtagtcagttgagg

SEQ ID NO: 15743 - DNA, 33 bp, Homo sapiens
agcccatgtcaaattttaaaaaatcatcgccaa

SEQ ID NO: 15744 - DNA, 33 bp, Homo sapiens
agaagacctgagtgaatgtttggagatggcgag

SEQ ID NO: 15745 - DNA, 33 bp, Homo sapiens
gactgctcttgctatatctttttcctggatgtt

SEQ ID NO: 15746 - DNA, 33 bp, Homo sapiens
tcctagtctcctctaagccagtgtcttcctcat

SEQ ID NO: 15747 - DNA, 33 bp, Homo sapiens
cctgattccgtttatacgaaatgctcagaatag

SEQ ID NO: 15748 - DNA, 33 bp, Homo sapiens
tgcatacacgcttctgtactgtaccattgtata

SEQ ID NO: 15749 - DNA, 33 bp, Homo sapiens
tttcgtggctggaaccgacaccaaccctagcac

SEQ ID NO: 15750 - DNA, 33 bp, Homo sapiens
cgcagaccccggggacgatcaagatgccagctc

SEQ ID NO: 15751 - DNA, 33 bp, Homo sapiens
ttgcccaagaggaagatgacaggaaaggtgggg

SEQ ID NO: 15752 - DNA, 33 bp, Homo sapiens
ctataaatgattgttatgaaaagttcaagtaat

SEQ ID NO: 15753 - DNA, 33 bp, Homo sapiens
tagttttcagttttgaggcaactggtttctatt

SEQ ID NO: 15754 - DNA, 33 bp, Homo sapiens
aaccttaattggccagtagaggtttgcatgaag

SEQ ID NO: 15755 - DNA, 33 bp, Homo sapiens
tatatgcattaaaaatgaaatcccttcgctgct

SEQ ID NO: 15756 - DNA, 33 bp, Homo sapiens
tgcccggagaatgggagcagcactgtcagcaga

SEQ ID NO: 15757 - DNA, 33 bp, Homo sapiens
gaacccgcaagccagagcgtattcccatgacct

SEQ ID NO: 15758 - DNA, 33 bp, Homo sapiens
gaatggctaagaagaagtaaatcaaagtttagc

SEQ ID NO: 15759 - DNA, 33 bp, Homo sapiens
ggtcctggggctctaacggtagtaggggctcta

SEQ ID NO: 15760 - DNA, 33 bp, Homo sapiens
ggccatcatttcctgagggatgtaaactctctt

SEQ ID NO: 15761 - DNA, 33 bp, Homo sapiens
gttcttgcctcttgaatctggaggcatttggct

SEQ ID NO: 15762 - DNA, 33 bp, Homo sapiens
cacgaatcctaccatatattgttgagccatgtt

SEQ ID NO: 15763 - DNA, 33 bp, Homo sapiens
caaagcaattgtaaaatgtgggggaggaaatta

SEQ ID NO: 15764 - DNA, 33 bp, Homo sapiens
tgcaagcttgaagtgggccaactctttttagga

SEQ ID NO: 15765 - DNA, 33 bp, Homo sapiens
gctccccagaaaacccggagttcttcaaatccc

SEQ ID NO: 15766 - DNA, 33 bp, Homo sapiens
tgggcggatcctgaaggcactaactgtggccat

SEQ ID NO: 15767 - DNA, 33 bp, Homo sapiens
gcgcagggagatgcaatgaggaagcgcttcctt

SEQ ID NO: 15768 - DNA, 33 bp, Homo sapiens
gtaaaattgtgaaatatatgtaagtgtttatgt

SEQ ID NO: 15769 - DNA, 33 bp, Homo sapiens
ttattattagggaaaatttggaaacagtgtgag

SEQ ID NO: 15770 - DNA, 33 bp, Homo sapiens
taggagctggaaatcatagaatctctcaccctt

SEQ ID NO: 15771 - DNA, 33 bp, Homo sapiens
agcctggcattggctatacccacttctggttag

SEQ ID NO: 15772 - DNA, 33 bp, Homo sapiens
gggagggccttggatagcagagagagggatttg

SEQ ID NO: 15773 - DNA, 33 bp, Homo sapiens
agttattcactgtttatctgaaattcacatttg

SEQ ID NO: 15774 - DNA, 33 bp, Homo sapiens
ttcttgcattgctgtagagaactacctgagact

SEQ ID NO: 15775 - DNA, 33 bp, Homo sapiens
tccccagccagggtaagagcttgatcagatgtg

SEQ ID NO: 15776 - DNA, 33 bp, Homo sapiens
acatcatgctggttcattatattgatgtcattt

SEQ ID NO: 15777 - DNA, 33 bp, Homo sapiens
cacaactaccttcccattggcctctggactcca

SEQ ID NO: 15778 - DNA, 33 bp, Homo sapiens
gaaacatgggcatacagctttattccttcctgc

SEQ ID NO: 15779 - DNA, 33 bp, Homo sapiens
aaaaacctttgaattatgtagatttatgccgct

SEQ ID NO: 15780 - DNA, 33 bp, Homo sapiens
ctaagccaattaatgcggaatggaaagtcaaac

SEQ ID NO: 15781 - DNA, 33 bp, Homo sapiens
ccaaatgaaataaagacataaagcgacacatta

SEQ ID NO: 15782 - DNA, 33 bp, Homo sapiens
tcatttatttaagagctctttccgattgcctcc

SEQ ID NO: 15783 - DNA, 33 bp, Homo sapiens
agaactctgaagatgatgagctagctaaagaat

SEQ ID NO: 15784 - DNA, 33 bp, Homo sapiens
ccaggccctgggcagagtaattgacttggggac

SEQ ID NO: 15785 - DNA, 33 bp, Homo sapiens
tctagatgttctgacctaaagatgtagtctaca

SEQ ID NO: 15786 - DNA, 33 bp, Homo sapiens
ttatagctgatgaaacgaacttgaaaaaattaa

SEQ ID NO: 15787 - DNA, 33 bp, Homo sapiens
tagattctagtcaccatgctaatgtctcacaca

SEQ ID NO: 15788 - DNA, 33 bp, Homo sapiens
caaaggtgtgatccatgaataaaagcatcatta

SEQ ID NO: 15789 - DNA, 33 bp, Homo sapiens
agggcttcagtgtctctaagtgtaatgcaaaga

SEQ ID NO: 15790 - DNA, 33 bp, Homo sapiens
agcggacacccagtaatgtatgcaattttgctt

SEQ ID NO: 15791 - DNA, 33 bp, Homo sapiens
aagacttgggaaactttaacaagtctgcagtgg

SEQ ID NO: 15792 - DNA, 33 bp, Homo sapiens
ctgtttgaaggccaggcagaatggtatttggag

SEQ ID NO: 15793 - DNA, 33 bp, Homo sapiens
actactgccaaaagtatgatttcttgtgaattt

SEQ ID NO: 15794 - DNA, 33 bp, Homo sapiens
acaggtgttgaactaatgtgtaacgatttgata

SEQ ID NO: 15795 - DNA, 51 bp, Homo sapiens
ttcttgtttccaatattatgggacatgaaatctttgagattctagaaagtt

SEQ ID NO: 15796 - DNA, 33 bp, Homo sapiens
aaataaatgaggaagagaagttagaataagacc

SEQ ID NO: 15797 - DNA, 33 bp, Homo sapiens
acattctcttagacagtcacccacctgattatg

SEQ ID NO: 15798 - DNA, 33 bp, Homo sapiens
actttcctaagcaaacgcaaactgagcgagttt

SEQ ID NO: 15799 - DNA, 33 bp, Homo sapiens
cacatttcaaaataaattgtgccttcgcagtag

SEQ ID NO: 15800 - DNA, 33 bp, Homo sapiens
aaagtggggaatcagcgacttaggttaaataat

SEQ ID NO: 15801 - DNA, 33 bp, Homo sapiens
ctcttgagtcaacccttagagacaaactctcag

SEQ ID NO: 15802 - DNA, 51 bp, Homo sapiens
gaagttttcaacacatggtcaaatactaagaaaacaatcagattgtttagg

SEQ ID NO: 15803 - DNA, 51 bp, Homo sapiens
ttagtagtgattctaatttgttccatagataaaactaggggaatttcaaga

SEQ ID NO: 15804 - DNA, 33 bp, Homo sapiens
gagaccccaagaggaaggaattgagctatactt

SEQ ID NO: 15805 - DNA, 33 bp, Homo sapiens
ctgatagtggcctctatgataaatttaaaacca

SEQ ID NO: 15806 - DNA, 33 bp, Homo sapiens
agaggacattttgccatgatgtaagttgtttaa

SEQ ID NO: 15807 - DNA, 51 bp, Homo sapiens
gtctaggcttccaggcctgtgatgataagggctgccatgaagatctctgac

SEQ ID NO: 15808 - DNA, 33 bp, Homo sapiens
agacaagccttagaaggagctgtacagaaccat

SEQ ID NO: 15809 - DNA, 33 bp, Homo sapiens
attctgcataaactaagaagctgtggatatttt

SEQ ID NO: 15810 - DNA, 33 bp, Homo sapiens
tgaaaaagtatgagatgagtctggttcatttta

SEQ ID NO: 15811 - DNA, 33 bp, Homo sapiens
aggaggaaatagctcatgccaaatcattgggat

SEQ ID NO: 15812 - DNA, 51 bp, Homo sapiens
ccacattggctctatgttcagagagtgtctaccctcaagttttcaagattg

SEQ ID NO: 15813 - DNA, 33 bp, Homo sapiens
cactttactgaacaatgaagaaggtgagagaga

SEQ ID NO: 15814 - DNA, 33 bp, Homo sapiens
agaggtaggggcacaatggtgaaaaataaatat

SEQ ID NO: 15815 - DNA, 33 bp, Homo sapiens
cactcttcctcctgaattcttatggccttttcc

SEQ ID NO: 15816 - DNA, 33 bp, Homo sapiens
ttgcactagcttcctcgacattacttagagaag

SEQ ID NO: 15817 - DNA, 33 bp, Homo sapiens
gtaaataggagttagaggcagaatggaacacat

SEQ ID NO: 15818 - DNA, 33 bp, Homo sapiens
tacacttttttttccatgctaatcgagaaaagc

SEQ ID NO: 15819 - DNA, 33 bp, Homo sapiens
agcataggattataaagtgtgggttagccatca

SEQ ID NO: 15820 - DNA, 33 bp, Homo sapiens
caagcacaaaagaatatcagcccttgaatgaga

SEQ ID NO: 15821 - DNA, 33 bp, Homo sapiens
agtccaatagtaacaatgtgatttacagtaggt

SEQ ID NO: 15822 - DNA, 33 bp, Homo sapiens
acatcttgagagcaaattaaatcacatttggac

SEQ ID NO: 15823 - DNA, 33 bp, Homo sapiens
gcaggtggactatttctacatttgctctttata

SEQ ID NO: 15824 - DNA, 33 bp, Homo sapiens
tgacctttgtctgaaatgctggacaaaatttca

SEQ ID NO: 15825 - DNA, 33 bp, Homo sapiens
cccatctggcattccataggagaaggtctactg

SEQ ID NO: 15826 - DNA, 33 bp, Homo sapiens
gtacttacgggaatatgaagctaatgagatgtg

SEQ ID NO: 15827 - DNA, 33 bp, Homo sapiens
tgtgattgtccctttacacagcttatcagtgac

SEQ ID NO: 15828 - DNA, 33 bp, Homo sapiens
gttattctagactcaaggaacctctagacattt

SEQ ID NO: 15829 - DNA, 33 bp, Homo sapiens
gatatttactcaagcatgtcaagaggtaagagg

SEQ ID NO: 15830 - DNA, 33 bp, Homo sapiens
actaaagaaatcctcagtgaagctgctttgaca

SEQ ID NO: 15831 - DNA, 33 bp, Homo sapiens
aattttgcatatttgatgtatgttgctgtatac

SEQ ID NO: 15832 - DNA, 33 bp, Homo sapiens
actttcaccagaattatattttcaagggattaa

SEQ ID NO: 15833 - DNA, 51 bp, Homo sapiens
gaaaaaataaatacatcttcctaactatcttaactgatgcctcacaactct

SEQ ID NO: 15834 - DNA, 33 bp, Homo sapiens
aaacacccttaccctatggcttctgaccttagg

SEQ ID NO: 15835 - DNA, 33 bp, Homo sapiens
aaagaatggactatcagtacaatcaacaaatta

SEQ ID NO: 15836 - DNA, 33 bp, Homo sapiens
ggctacttcagagcaatcagaagtcttaatgtt

SEQ ID NO: 15837 - DNA, 33 bp, Homo sapiens
gcatgctattatgctatcaaaagcttaaaatat

SEQ ID NO: 15838 - DNA, 33 bp, Homo sapiens
aaggtacatttttgtagcttcgccactcatacc

SEQ ID NO: 15839 - DNA, 51 bp, Homo sapiens
gttagatgctttctgtaatggaaaagtgattggctttaaaaataagaaaaa

SEQ ID NO: 15840 - DNA, 33 bp, Homo sapiens
acatggcatcactcttgaaatttgagacaggtt

SEQ ID NO: 15841 - DNA, 33 bp, Homo sapiens
ttacccattagggaaagtgcattctaaccaagc

SEQ ID NO: 15842 - DNA, 33 bp, Homo sapiens
aggggcttatagagatgaggtaattcatggagc

SEQ ID NO: 15843 - DNA, 33 bp, Homo sapiens
gaaatttgcagggtaagatactagatatgagag

SEQ ID NO: 15844 - DNA, 33 bp, Homo sapiens
agtgaaggtaagacccggctaataacaaaactt

SEQ ID NO: 15845 - DNA, 33 bp, Homo sapiens
tgtcttattatgcagatagagttccctagataa

SEQ ID NO: 15846 - DNA, 33 bp, Homo sapiens
agttttcctttgtaactggtgccaaagataggt

SEQ ID NO: 15847 - DNA, 33 bp, Homo sapiens
acttattgtagaaaactgggggcaagacaagta

SEQ ID NO: 15848 - DNA, 33 bp, Homo sapiens
atatggaagaaaccaggaatagtgaaatttggg

SEQ ID NO: 15849 - DNA, 33 bp, Homo sapiens
gttttgttgattgtcatggataaaggtacaact

SEQ ID NO: 15850 - DNA, 33 bp, Homo sapiens
taagttgcttactttaggccaaaaattagctag

SEQ ID NO: 15851 - DNA, 51 bp, Homo sapiens
ttgctgttagatttacaaataagtatgttgttattactgacatgcaaaatc

SEQ ID NO: 15852 - DNA, 33 bp, Homo sapiens
taaggcctatttctcataagtcacattttgttg

SEQ ID NO: 15853 - DNA, 33 bp, Homo sapiens
taagcaactggattcaccgtaccactaatggcc

SEQ ID NO: 15854 - DNA, 33 bp, Homo sapiens
tttcctgtgacaatgattattacagtacaaaaa

SEQ ID NO: 15855 - DNA, 33 bp, Homo sapiens
tgtgttatagtgggaagaagactggattcagag

SEQ ID NO: 15856 - DNA, 33 bp, Homo sapiens
cttccctttatctctatcttatcactaatctat

SEQ ID NO: 15857 - DNA, 33 bp, Homo sapiens
ttctgaaacaggtatatgttactttcacacagg

SEQ ID NO: 15858 - DNA, 33 bp, Homo sapiens
ttgtggatttgtaagtgaaacaaaggctcattt

SEQ ID NO: 15859 - DNA, 33 bp, Homo sapiens
tctctatcctcatacatctcataaccatacacc

SEQ ID NO: 15860 - DNA, 33 bp, Homo sapiens
gacaatacgcaaactaggcacccataagatatt

SEQ ID NO: 15861 - DNA, 33 bp, Homo sapiens
caaaagaattaacacagtgtcaggacaaactgt

SEQ ID NO: 15862 - DNA, 33 bp, Homo sapiens
gattatagagttcacagggtatttcaaagccat

SEQ ID NO: 15863 - DNA, 33 bp, Homo sapiens
ctgcactggctactaatgtgcaccataaattcc

SEQ ID NO: 15864 - DNA, 51 bp, Homo sapiens
ctatcaaataaatgtgagccagaaggtttttaatgggagaaattaacttta

SEQ ID NO: 15865 - DNA, 51 bp, Homo sapiens
aatggtatttgtgtagctaaacatatatctaaacatagaacagatacagta

SEQ ID NO: 15866 - DNA, 33 bp, Homo sapiens
gttatactgtggaatgtatcttgaagatcacct

SEQ ID NO: 15867 - DNA, 33 bp, Homo sapiens
tgcaggttttgattccgcagatctgggtgggac

SEQ ID NO: 15868 - DNA, 33 bp, Homo sapiens
aaggaagtacctcctatgatatgcaagacaaaa

SEQ ID NO: 15869 - DNA, 33 bp, Homo sapiens
acaagtattaactgtgtattgctttgagcttag

SEQ ID NO: 15870 - DNA, 51 bp, Homo sapiens
aagtaacaaatgattatagcaattatagtgggtgagtgcaatgagagggga

SEQ ID NO: 15871 - DNA, 51 bp, Homo sapiens
aggtatcttactagataagcgcacagaagagttctttactagacatgatga

SEQ ID NO: 15872 - DNA, 33 bp, Homo sapiens
ctgctcttcgtactgatcctgcttttctgcagg

SEQ ID NO: 15873 - DNA, 33 bp, Homo sapiens
tggggtacacaaaaaattaaatctgaaacagac

SEQ ID NO: 15874 - DNA, 33 bp, Homo sapiens
tacagtcacattgggggagattaagacatgaga

SEQ ID NO: 15875 - DNA, 51 bp, Homo sapiens
aagctcagttgccctgatagtagcatgtttctgtttctgatgtaccttttt

SEQ ID NO: 15876 - DNA, 33 bp, Homo sapiens
tctgcaaccagaacctcaggtgacttatagttg

SEQ ID NO: 15877 - DNA, 33 bp, Homo sapiens
agatatttctcaaccattgctaccagaactaca

SEQ ID NO: 15878 - DNA, 33 bp, Homo sapiens
agggatgctgagtctaggcaaggcagataaagc

SEQ ID NO: 15879 - DNA, 33 bp, Homo sapiens
ttcctggtatataacagattctcaattaataca

SEQ ID NO: 15880 - DNA, 33 bp, Homo sapiens
atttgcttattctaccgatttctcagttctaac

SEQ ID NO: 15881 - DNA, 33 bp, Homo sapiens
ttgggagggcatgtaagcttcaaaacccttcca

SEQ ID NO: 15882 - DNA, 33 bp, Homo sapiens
gtgttccctcctatacccaagcacagaaaatgc

SEQ ID NO: 15883 - DNA, 33 bp, Homo sapiens
taaaatagtcactacgtcaatgtaccatatttg

SEQ ID NO: 15884 - DNA, 33 bp, Homo sapiens
ctaatggtgttttgaataagcatttagaaaatt

SEQ ID NO: 15885 - DNA, 33 bp, Homo sapiens
ccaaactcctctgctatcttgttatctacttag

SEQ ID NO: 15886 - DNA, 33 bp, Homo sapiens
tctttctcttacatcatactttccttatacatg

SEQ ID NO: 15887 - DNA, 33 bp, Homo sapiens
atggcgaaaaaccatatataaaccagtgcattc

SEQ ID NO: 15888 - DNA, 33 bp, Homo sapiens
acatgtgttggggtcatagaaccatcagtagac

SEQ ID NO: 15889 - DNA, 33 bp, Homo sapiens
gtagatctaagagtgcgacctcagaaatcccac

SEQ ID NO: 15890 - DNA, 33 bp, Homo sapiens
atgctgggatatgcactgagatttgtctaacta

SEQ ID NO: 15891 - DNA, 33 bp, Homo sapiens
gaagttgacaaaacctgaaggctagtgtgatgt

SEQ ID NO: 15892 - DNA, 33 bp, Homo sapiens
ctgattaccagttgaatgggtgtgaaagtgctc

SEQ ID NO: 15893 - DNA, 51 bp, Homo sapiens
gagacttgatgcagtttaacacaactatggaataaatggaaggagtagaga

SEQ ID NO: 15894 - DNA, 51 bp, Homo sapiens
aaagttaatataatggctgcgggaagtatttagataatctcacagcagaag

SEQ ID NO: 15895 - DNA, 51 bp, Homo sapiens
ctactaaaactatttcaaaaaatcaggaagcgtctcctccctaactcattc

SEQ ID NO: 15896 - DNA, 33 bp, Homo sapiens
ccaggagaaaaagaaatgtgagagatcgtataa

SEQ ID NO: 15897 - DNA, 33 bp, Homo sapiens
gcaatagctgttggcattcaaaaatatgagaga

SEQ ID NO: 15898 - DNA, 33 bp, Homo sapiens
aggcattcaggtttaattaccatgttttggtag

SEQ ID NO: 15899 - DNA, 33 bp, Homo sapiens
ccttttgtcagatttatccacaaacatttcata

SEQ ID NO: 15900 - DNA, 33 bp, Homo sapiens
aaattatagcaaggaagatgaattctcagacat

SEQ ID NO: 15901 - DNA, 33 bp, Homo sapiens
gagatttccttatataccctgagtgaataagct

SEQ ID NO: 15902 - DNA, 51 bp, Homo sapiens
tgctctcagcaatttgcaagatggagtactatatttttaaaaatcaggtaa

SEQ ID NO: 15903 - DNA, 51 bp, Homo sapiens
taccaaataaatgctcagtttcaccggctctcttacactaatgtgaacact

SEQ ID NO: 15904 - DNA, 33 bp, Homo sapiens
aggtcattttttgctatgatgataaataaagga

SEQ ID NO: 15905 - DNA, 33 bp, Homo sapiens
tggatcataatctggctgaatttctgtgctgtg

SEQ ID NO: 15906 - DNA, 33 bp, Homo sapiens
agcaataagatatccagctctaatctgactcca

SEQ ID NO: 15907 - DNA, 33 bp, Homo sapiens
agaatccaaaataaaatggtgctgtttatgaga

SEQ ID NO: 15908 - DNA, 33 bp, Homo sapiens
actataatttgaaggcgcctaatttgccttgag

SEQ ID NO: 15909 - DNA, 33 bp, Homo sapiens
aagtagtcaaaaccaattcatggctagagtata

SEQ ID NO: 15910 - DNA, 33 bp, Homo sapiens
gtagttatcggtagtctatctagttgcagagac

SEQ ID NO: 15911 - DNA, 51 bp, Homo sapiens
acaccatgaagtttattctctagcataattgatgattgtacttctaacaga

SEQ ID NO: 15912 - DNA, 33 bp, Homo sapiens
aactatttaactagagtacccttatcatgcttt

SEQ ID NO: 15913 - DNA, 33 bp, Homo sapiens
ggaaaggaattaacaaggagcatgaaggtatct

SEQ ID NO: 15914 - DNA, 51 bp, Homo sapiens
ttcccttcaaattcagaaattttacgaaggcatttataggcttgaagcttc

SEQ ID NO: 15915 - DNA, 33 bp, Homo sapiens
tgaaaatacactctaagccatatcttaaccaat

SEQ ID NO: 15916 - DNA, 33 bp, Homo sapiens
agagcaaaatttggcagtgaatcattgttcaaa

SEQ ID NO: 15917 - DNA, 33 bp, Homo sapiens
gatatacaagcaagaaggtaaagtcataataac

SEQ ID NO: 15918 - DNA, 33 bp, Homo sapiens
taaaaattttcaccactgaatcccataaattaa

SEQ ID NO: 15919 - DNA, 33 bp, Homo sapiens
tagagtatcatctgacgcataggaataattaac

SEQ ID NO: 15920 - DNA, 33 bp, Homo sapiens
ttttcccatcaaaagagaggaggatttagatga

SEQ ID NO: 15921 - DNA, 33 bp, Homo sapiens
aggtagtaacagggatgagaatagcctcctgcc

SEQ ID NO: 15922 - DNA, 33 bp, Homo sapiens
atatgtggtttttaaagtgttgttgaatcggcc

SEQ ID NO: 15923 - DNA, 33 bp, Homo sapiens
tacattctgcattgtagctttcttgaccttatg

SEQ ID NO: 15924 - DNA, 51 bp, Homo sapiens
cagatcttcttcctcctacacagaattattttttgctaagtctttgcaaaa

SEQ ID NO: 15925 - DNA, 33 bp, Homo sapiens
atattcaccatatactgaggccacagagttaaa

SEQ ID NO: 15926 - DNA, 33 bp, Homo sapiens
gaaaattaataaggacgcattttttacagccat

SEQ ID NO: 15927 - DNA, 33 bp, Homo sapiens
ccataatctatttggctagaaaggttgattcat

SEQ ID NO: 15928 - DNA, 33 bp, Homo sapiens
ctcctccaacaaagaagctagtcagttggataa

SEQ ID NO: 15929 - DNA, 33 bp, Homo sapiens
ggattttgagaataacggcagaaacaaacctac

SEQ ID NO: 15930 - DNA, 33 bp, Homo sapiens
taattaacattcagcctctaaaccaggaccaaa

SEQ ID NO: 15931 - DNA, 33 bp, Homo sapiens
gttgctagcgaacatatatttaggctgtgggcc

SEQ ID NO: 15932 - DNA, 33 bp, Homo sapiens
tatatttagaccaaaagtttatcaaggatggca

SEQ ID NO: 15933 - DNA, 33 bp, Homo sapiens
catcatcatgactggagataatgcctgaaattg

SEQ ID NO: 15934 - DNA, 51 bp, Homo sapiens
tcactgatgattcatatataagccatgtggactcaaataaattctcatcct

SEQ ID NO: 15935 - DNA, 33 bp, Homo sapiens
tccaagctaaaaaaaaccgcatatattattgaa

SEQ ID NO: 15936 - DNA, 33 bp, Homo sapiens
aaggtaacatattaaagcaccaacacaatgcct

SEQ ID NO: 15937 - DNA, 33 bp, Homo sapiens
tccactgagaaattacggcttccatttatcaca

SEQ ID NO: 15938 - DNA, 33 bp, Homo sapiens
catttttctgtggtagccaatatgctagatgtc

SEQ ID NO: 15939 - DNA, 33 bp, Homo sapiens
tcctcccctgtgtctccgaaaccacacaaaatt

SEQ ID NO: 15940 - DNA, 33 bp, Homo sapiens
gtggtagtgtccttcatatgctcacaggaaggt

SEQ ID NO: 15941 - DNA, 33 bp, Homo sapiens
gtattttagaaatagctaaacataacaaagtga

SEQ ID NO: 15942 - DNA, 33 bp, Homo sapiens
ttctggtctgaaatacgctaaaagtgaggagca

SEQ ID NO: 15943 - DNA, 33 bp, Homo sapiens
ctcaggaatggtgggattcagcaatgtgttgtg

SEQ ID NO: 15944 - DNA, 33 bp, Homo sapiens
atataaataaactccagatatttacacaacaca

SEQ ID NO: 15945 - DNA, 33 bp, Homo sapiens
agaaaaagtgtccgtcgaagcccttgctcacct

SEQ ID NO: 15946 - DNA, 33 bp, Homo sapiens
gtaatggaatcataaatccaaaatcatagagcc

SEQ ID NO: 15947 - DNA, 33 bp, Homo sapiens
tcttgctttgttcatatgtagcacagttgaaat

SEQ ID NO: 15948 - DNA, 33 bp, Homo sapiens
gcagctggcatgctaaggtgtcatacctagaac

SEQ ID NO: 15949 - DNA, 51 bp, Homo sapiens
ttccttgagtctacttagaattagctctttcactggtaaaaagtttattcc

SEQ ID NO: 15950 - DNA, 33 bp, Homo sapiens
aatagagttacccacacgaaactggaaatcgag

SEQ ID NO: 15951 - DNA, 33 bp, Homo sapiens
agaagatttagggatctataagcaaggacttta

SEQ ID NO: 15952 - DNA, 33 bp, Homo sapiens
gggttctcagaggcaagttcagaccgtgttgtt

SEQ ID NO: 15953 - DNA, 33 bp, Homo sapiens
gaagaggaagaaagcacaatcattcctatctga

SEQ ID NO: 15954 - DNA, 33 bp, Homo sapiens
gtatttgttgcaaaaggatgctatcccaagtca

SEQ ID NO: 15955 - DNA, 33 bp, Homo sapiens
tgtgaacctcataatttaagtattttcagcaaa

SEQ ID NO: 15956 - DNA, 33 bp, Homo sapiens
aggtaaggatgctcaataaagggaatttgacta

SEQ ID NO: 15957 - DNA, 33 bp, Homo sapiens
ctgagtcatgcaattggagggaatcccattttc

SEQ ID NO: 15958 - DNA, 33 bp, Homo sapiens
gggctgagtttgtgacgagagggaaaacacaaa

SEQ ID NO: 15959 - DNA, 33 bp, Homo sapiens
atgacatgattctagctctagagaagttgagaa

SEQ ID NO: 15960 - DNA, 33 bp, Homo sapiens
ccagtagcatcccaagtatctgaatgaggaggg

SEQ ID NO: 15961 - DNA, 51 bp, Homo sapiens
cttgctgttatcttagtgtttataagtaagggatccaagtcaactttgttg

SEQ ID NO: 15962 - DNA, 33 bp, Homo sapiens
atatatgtttaaagtctgaactggaatgtctgg

SEQ ID NO: 15963 - DNA, 51 bp, Homo sapiens
tgatcaaggtaggatctaaacatcagtcttcataaatccagaatctcaatt

SEQ ID NO: 15964 - DNA, 33 bp, Homo sapiens
agttgtactgaggttaggggatggactcaaggc

SEQ ID NO: 15965 - DNA, 51 bp, Homo sapiens
tacactcactaagatggaagaaggcgctgggatcctggaacaagggaagga

SEQ ID NO: 15966 - DNA, 33 bp, Homo sapiens
tggaaccacagaggctgaaagattggtctgtta

SEQ ID NO: 15967 - DNA, 33 bp, Homo sapiens
aacattctagctaagagcccatcaataacacaa

SEQ ID NO: 15968 - DNA, 33 bp, Homo sapiens
tctacagaaccataaatgctcttgaactcatca

SEQ ID NO: 15969 - DNA, 33 bp, Homo sapiens
tcctagcataatcaccgcatcgaagcaatttcc

SEQ ID NO: 15970 - DNA, 33 bp, Homo sapiens
aattttccagtctctatcatgaagcaaggactc

SEQ ID NO: 15971 - DNA, 33 bp, Homo sapiens
taacatatccctgaggtaaaaccctgcaacttc

SEQ ID NO: 15972 - DNA, 33 bp, Homo sapiens
ctgcctatggcttatggatatctgttttgcatt

SEQ ID NO: 15973 - DNA, 51 bp, Homo sapiens
attcagtaaaagatgcagtcactactattctaaaaaccttaattaagtaat

SEQ ID NO: 15974 - DNA, 33 bp, Homo sapiens
agttgagcaacaagaatgtgaaaggaaatttag

SEQ ID NO: 15975 - DNA, 33 bp, Homo sapiens
tctgaggtgggcctaagaatccggatttctaac

SEQ ID NO: 15976 - DNA, 33 bp, Homo sapiens
ttcccaacagcataacgagtgtaattttatggg

SEQ ID NO: 15977 - DNA, 51 bp, Homo sapiens
attattcttttgaactgaaagtcagtagaccttgattttagactcactcca

SEQ ID NO: 15978 - DNA, 33 bp, Homo sapiens
tgccttagaagagtcccatgcattcacatagca

SEQ ID NO: 15979 - DNA, 51 bp, Homo sapiens
tagctagaatttattgaaaacccactatatgcaagattctaggcccttctt

SEQ ID NO: 15980 - DNA, 51 bp, Homo sapiens
cctattgtagttaaatttgtaatccggataattatataaaagcacagttat

SEQ ID NO: 15981 - DNA, 51 bp, Homo sapiens
gagatacagttactctttcaatccagtagagaccacttgatttaccactct

SEQ ID NO: 15982 - DNA, 33 bp, Homo sapiens
ttcaaagagctatttctcctattcccgtgcctc

SEQ ID NO: 15983 - DNA, 33 bp, Homo sapiens
atctaccatgtgatcaggtttaacatcatcgtg

SEQ ID NO: 15984 - DNA, 33 bp, Homo sapiens
ggacaatgtgcaataagggttttcatgtcctct

SEQ ID NO: 15985 - DNA, 33 bp, Homo sapiens
gccagctcattactacgaggttagctctcaggt

SEQ ID NO: 15986 - DNA, 33 bp, Homo sapiens
ggagttgagtttaggatacctggctatatgatc

SEQ ID NO: 15987 - DNA, 33 bp, Homo sapiens
gtacttggtgtagttataggaagagcactgaaa

SEQ ID NO: 15988 - DNA, 33 bp, Homo sapiens
ttctccttgaaacagatgtaaaaatttgaaatt

SEQ ID NO: 15989 - DNA, 51 bp, Homo sapiens
agtcagtttaatacgaagcaaaaacgttctctcatttgtgcagccggatgg

SEQ ID NO: 15990 - DNA, 33 bp, Homo sapiens
gatggtcatgatcagttaactttgccagtatct

SEQ ID NO: 15991 - DNA, 51 bp, Homo sapiens
tctttcctaaaagttagcttatgtctttggaaatggaaatggaagtggtgg

SEQ ID NO: 15992 - DNA, 51 bp, Homo sapiens
ccagcctacttctgcttatatcccattggccagaaatgtgttatatcgtta

SEQ ID NO: 15993 - DNA, 51 bp, Homo sapiens
atggttttttaaagaaaagataccatgctgcaaagtctcttgaaaatggga

SEQ ID NO: 15994 - DNA, 51 bp, Homo sapiens
tcactaccatgaaaaaaatgcacctgaaaattaagataaaatttcatcatg

SEQ ID NO: 15995 - DNA, 51 bp, Homo sapiens
taaaaagggcaaagtgctttactactcaaatatcttactgcactttgaaca

SEQ ID NO: 15996 - DNA, 33 bp, Homo sapiens
agaattctgcattttatgtgaaaaacagcttgt

SEQ ID NO: 15997 - DNA, 33 bp, Homo sapiens
gtgtgaattcagaaatgaagttggatttacatt

SEQ ID NO: 15998 - DNA, 51 bp, Homo sapiens
tttttctctgtaactctaatcagaagtaatctgtcaagcagtcaatttatc

SEQ ID NO: 15999 - DNA, 51 bp, Homo sapiens
acaaagcttgttactctaatgaagatattttatcactttgtctattaatat

SEQ ID NO: 16000 - DNA, 51 bp, Homo sapiens
caaattaaaatagctattataaaaaggacgagatatatgtaggcaaaggtg

SEQ ID NO: 16001 - DNA, 33 bp, Homo sapiens
ttgtattcccggtgtatcagaaattgtgctttg

SEQ ID NO: 16002 - DNA, 33 bp, Homo sapiens
cctttatatggaataatgagaggtctgagaaaa

SEQ ID NO: 16003 - DNA, 33 bp, Homo sapiens
aaacttagctattgaaggttagagttaggccat

SEQ ID NO: 16004 - DNA, 33 bp, Homo sapiens
ttgcaaactgtacatatggcaaaggtctaatat

SEQ ID NO: 16005 - DNA, 33 bp, Homo sapiens
ttaaggtgtgcaaatatcttatccaaacaaaca

SEQ ID NO: 16006 - DNA, 33 bp, Homo sapiens
tgttaactatttgaactggttgagaagtctcct

SEQ ID NO: 16007 - DNA, 33 bp, Homo sapiens
gcatgattgtcaaacattgtgatagagggtagt

SEQ ID NO: 16008 - DNA, 33 bp, Homo sapiens
caggttctggaggtcaggattgattatcagctg

SEQ ID NO: 16009 - DNA, 33 bp, Homo sapiens
aatggaaagccagtaaggaggctaggggcttgg

SEQ ID NO: 16010 - DNA, 33 bp, Homo sapiens
ttgtgttcagcatttatggtatattggagagta

SEQ ID NO: 16011 - DNA, 33 bp, Homo sapiens
ctctctacaagggcaacacagagaggaaatatg

SEQ ID NO: 16012 - DNA, 33 bp, Homo sapiens
aaattagagatgaagtcaagtatcaaatagaca

SEQ ID NO: 16013 - DNA, 33 bp, Homo sapiens
taatctctggccttaattagtgactcaaagtag

SEQ ID NO: 16014 - DNA, 33 bp, Homo sapiens
atagaggcacacgatagaggatcaacatataaa

SEQ ID NO: 16015 - DNA, 33 bp, Homo sapiens
tttaataaaaaatcacgaaacctgcaaagaaac

SEQ ID NO: 16016 - DNA, 33 bp, Homo sapiens
tgcattgcttggattctacacttgaagtccata

SEQ ID NO: 16017 - DNA, 33 bp, Homo sapiens
gatttggccccactccgactttcattcgtatta

SEQ ID NO: 16018 - DNA, 33 bp, Homo sapiens
tagcattctgacagaggacttaagcagagatgt

SEQ ID NO: 16019 - DNA, 33 bp, Homo sapiens
ttggttataaattctgcactttcgtgaattatt

SEQ ID NO: 16020 - DNA, 33 bp, Homo sapiens
gagttgtcagtcgacattaaatgaaaagaagga

SEQ ID NO: 16021 - DNA, 33 bp, Homo sapiens
agatcagcaaacctaacctcacaggccaaagaa

SEQ ID NO: 16022 - DNA, 51 bp, Homo sapiens
tccacacttataaatgcagtagttataggctttggtaatgagatcatgaat

SEQ ID NO: 16023 - DNA, 51 bp, Homo sapiens
ccctgccacctgttttttcttctcctgaatgcatttactgtgttacttctg

SEQ ID NO: 16024 - DNA, 51 bp, Homo sapiens
gtgtcctctcttctaagctccaaaataactgtagtctcaagatgaagttac

SEQ ID NO: 16025 - DNA, 33 bp, Homo sapiens
tacttcaacaatgtgagctctagctgccgccaa

SEQ ID NO: 16026 - DNA, 33 bp, Homo sapiens
cttcttttagtaggcaggttatcctgaaaatta

SEQ ID NO: 16027 - DNA, 33 bp, Homo sapiens
aataaatcttttcctagagttttggcacaatca

SEQ ID NO: 16028 - DNA, 33 bp, Homo sapiens
ttgcagctgaaaaagcgcaaagtagaggaactc

SEQ ID NO: 16029 - DNA, 33 bp, Homo sapiens
tttgtgtactacacactctctgttgcaactact

SEQ ID NO: 16030 - DNA, 33 bp, Homo sapiens
ttgtccttttttgttcgactgatgtcctattca

SEQ ID NO: 16031 - DNA, 33 bp, Homo sapiens
tttaaacaactctcacgcaaaatttaataataa

SEQ ID NO: 16032 - DNA, 33 bp, Homo sapiens
tcacacaatgctggaactcctctaatattttat

SEQ ID NO: 16033 - DNA, 33 bp, Homo sapiens
tgagcctcactaccaggatttctgggtcaccag

SEQ ID NO: 16034 - DNA, 51 bp, Homo sapiens
acatatattgaacaccatggcatcagagtgatatctccaatttcagtctaa

SEQ ID NO: 16035 - DNA, 33 bp, Homo sapiens
acaggatctgctatgaggaaaatggaaaggagt

SEQ ID NO: 16036 - DNA, 51 bp, Homo sapiens
aacctgtcctttgacgctttgaagctaaacattgacttctcttctctagct

SEQ ID NO: 16037 - DNA, 33 bp, Homo sapiens
gctatttttctgaaacgcacaccattttataat

SEQ ID NO: 16038 - DNA, 33 bp, Homo sapiens
atgtcacaccagctggtaaaggagaaatgtttt

SEQ ID NO: 16039 - DNA, 51 bp, Homo sapiens
aggtctaaaatgtgtacatttataagtcatatactaatgagtcacatctca

SEQ ID NO: 16040 - DNA, 33 bp, Homo sapiens
aaagaacaaaacctcagagaagatttaacaacc

SEQ ID NO: 16041 - DNA, 33 bp, Homo sapiens
tagggaaagaggaatatacaaacgtttggaaga

SEQ ID NO: 16042 - DNA, 33 bp, Homo sapiens
aatagaggaaatttaagagagtgaatatttgca

SEQ ID NO: 16043 - DNA, 33 bp, Homo sapiens
ttacagtaggtattaattgttcagcatcttaag

SEQ ID NO: 16044 - DNA, 33 bp, Homo sapiens
ctatgacaatatctgagagaatgaatggatacc

SEQ ID NO: 16045 - DNA, 33 bp, Homo sapiens
tgcgtcttggtttctactacaggaagtgacatt

SEQ ID NO: 16046 - DNA, 51 bp, Homo sapiens
ccctgtaaatgtaattgcctaacaattattagttgccattagtaaatgagc

SEQ ID NO: 16047 - DNA, 33 bp, Homo sapiens
gtccctgacttccagatggtatctctggaccag

SEQ ID NO: 16048 - DNA, 33 bp, Homo sapiens
actgcctgcagatgcattcattacttcctacct

SEQ ID NO: 16049 - DNA, 33 bp, Homo sapiens
ttaaataagggaagaatagctcaagatgagatg

SEQ ID NO: 16050 - DNA, 33 bp, Homo sapiens
gcttgttcctgttagataattacatatatcagg

SEQ ID NO: 16051 - DNA, 33 bp, Homo sapiens
gagtccatgttcaacagcctcattttggtcaga

SEQ ID NO: 16052 - DNA, 51 bp, Homo sapiens
agaatttaaaaggaacacatgacaattatattgaggcatcaaatgtagata

SEQ ID NO: 16053 - DNA, 33 bp, Homo sapiens
acagctggcttctccaccatcctgggttcctta

SEQ ID NO: 16054 - DNA, 33 bp, Homo sapiens
ggacagctttttccgggcaaagaaagcagaaaa

SEQ ID NO: 16055 - DNA, 33 bp, Homo sapiens
gagatatcttggtatatgccctttcaacctctc

SEQ ID NO: 16056 - DNA, 33 bp, Homo sapiens
gaataatatagatgtggatttaggtaaagaagt

SEQ ID NO: 16057 - DNA, 33 bp, Homo sapiens
tgaatccacgaccacacagaaaacagcagaact

SEQ ID NO: 16058 - DNA, 33 bp, Homo sapiens
attcagatactgagaacctttagagaaattccc

SEQ ID NO: 16059 - DNA, 33 bp, Homo sapiens
tgaggcattgtactgagagagtggtgtagcaag

SEQ ID NO: 16060 - DNA, 33 bp, Homo sapiens
catttgaaatttttgctacctcatgatactaag

SEQ ID NO: 16061 - DNA, 33 bp, Homo sapiens
ctcatttctaagcaaattcatcgcccaaacaaa

SEQ ID NO: 16062 - DNA, 33 bp, Homo sapiens
tccactgattttcagcgaagtatatattgggaa

SEQ ID NO: 16063 - DNA, 51 bp, Homo sapiens
ctagcatgtaggaaaacttccaccctaattttgaattgtcccatgtaacag

SEQ ID NO: 16064 - DNA, 33 bp, Homo sapiens
tcattaagcccatccataactttataactcagt

SEQ ID NO: 16065 - DNA, 33 bp, Homo sapiens
tgctcgcaggttataggagagacataagtaggc

SEQ ID NO: 16066 - DNA, 33 bp, Homo sapiens
ggttgtaggatgtggggaataggtgagtctaca

SEQ ID NO: 16067 - DNA, 33 bp, Homo sapiens
agttagcatattatcattccacagtgcaggaaa

SEQ ID NO: 16068 - DNA, 51 bp, Homo sapiens
gacctgaaaccataaaagacatagacgataacatcagaaaaaacctcctag

SEQ ID NO: 16069 - DNA, 33 bp, Homo sapiens
aattatacataacacctctgtagccctgtggct

SEQ ID NO: 16070 - DNA, 33 bp, Homo sapiens
agtgggtgtggctatggaaaggaaaaatgagtc

SEQ ID NO: 16071 - DNA, 33 bp, Homo sapiens
tcagtattctcatgtagaaagcagtagtcatat

SEQ ID NO: 16072 - DNA, 33 bp, Homo sapiens
gtatgtgttctaaaaagaatgaatgtatccatg

SEQ ID NO: 16073 - DNA, 33 bp, Homo sapiens
actggcctgaaattcggaagactcagtagtttg

SEQ ID NO: 16074 - DNA, 33 bp, Homo sapiens
aaattacacagcaacatcgaggacaacaggcaa

SEQ ID NO: 16075 - DNA, 33 bp, Homo sapiens
cgtgcactcagaaatcgatgtataacttttgac

SEQ ID NO: 16076 - DNA, 33 bp, Homo sapiens
ggtattattgtctatgtataccaatgtggctga

SEQ ID NO: 16077 - DNA, 51 bp, Homo sapiens
aaacgattcaagggcagtttttcacggcaccttgatgaaggtggaacaaag

SEQ ID NO: 16078 - DNA, 51 bp, Homo sapiens
aataatgctacagatcccttagaacggactagaaaatgtattcagcatttt

SEQ ID NO: 16079 - DNA, 51 bp, Homo sapiens
tatattagtggcatgtcagttcccatgattgtacacatagtttcaaacatc

SEQ ID NO: 16080 - DNA, 51 bp, Homo sapiens
gcgagtttgcagttacattgctgaggactgcatatttttctgttttgttta

SEQ ID NO: 16081 - DNA, 33 bp, Homo sapiens
tacatcctagacctaatgtacaagctgaaacta

SEQ ID NO: 16082 - DNA, 33 bp, Homo sapiens
tccaccctatatttcctgctttctctctgacca

SEQ ID NO: 16083 - DNA, 33 bp, Homo sapiens
ctgagcaactggctaacctctatctgcacccgg

SEQ ID NO: 16084 - DNA, 33 bp, Homo sapiens
aaattgttcaaacctctctatacaaaataaact

SEQ ID NO: 16085 - DNA, 33 bp, Homo sapiens
tgtgtgagaaaactccggaaatttctaaatgca

SEQ ID NO: 16086 - DNA, 33 bp, Homo sapiens
ctccctgtcatcttacgctttgattggagacag

SEQ ID NO: 16087 - DNA, 33 bp, Homo sapiens
atcacactacactgtcgctgtcataactagctg

SEQ ID NO: 16088 - DNA, 33 bp, Homo sapiens
cttttgtccagccacatggttctttagcacatt

SEQ ID NO: 16089 - DNA, 51 bp, Homo sapiens
cactgcctgaagagctgcaagagaccaggaatatcatgaacagtggtatcc

SEQ ID NO: 16090 - DNA, 51 bp, Homo sapiens
tctattttatatttattctagtttatgtattcaatattcttgtcctcccat

SEQ ID NO: 16091 - DNA, 51 bp, Homo sapiens
aaactagaataaatataaaatagaatgatgaatgctaaaatcatggtgtgc

SEQ ID NO: 16092 - DNA, 33 bp, Homo sapiens
tttctggagaagtgcacatggatcgctcttcat

SEQ ID NO: 16093 - DNA, 33 bp, Homo sapiens
tagatgacaaataaaagtgtgctgtatctgaat

SEQ ID NO: 16094 - DNA, 33 bp, Homo sapiens
ataaattgtctctttacatgtcagaactaggaa

SEQ ID NO: 16095 - DNA, 33 bp, Homo sapiens
acttggaacagtcaaatgaaattatacttagct

SEQ ID NO: 16096 - DNA, 33 bp, Homo sapiens
tactatttgcctttaatattggagcaatcgaca

SEQ ID NO: 16097 - DNA, 33 bp, Homo sapiens
caaaacactatacatagaaatagtaaacgcata

SEQ ID NO: 16098 - DNA, 33 bp, Homo sapiens
aaagaccaagacaaactcatcttcacagagaaa

SEQ ID NO: 16099 - DNA, 33 bp, Homo sapiens
ctgcaaatttaggctatctgatacagcctagtc

SEQ ID NO: 16100 - DNA, 33 bp, Homo sapiens
ggagcttgtgattctctaataagcttctgagat

SEQ ID NO: 16101 - DNA, 33 bp, Homo sapiens
aaagaaactcgttccagcattttcaccagcttt

SEQ ID NO: 16102 - DNA, 33 bp, Homo sapiens
gccttatagatgaaagtaccaggtatcagtagg

SEQ ID NO: 16103 - DNA, 51 bp, Homo sapiens
cagtcctatccatgatattaacacagcaatgcttattctggcaaaaaaaaa

SEQ ID NO: 16104 - DNA, 51 bp, Homo sapiens
ctgaatgcccctgttattattaacacccttattctacacttgaaggagctg

SEQ ID NO: 16105 - DNA, 33 bp, Homo sapiens
gacaaaaggatcaaactgtttccaagtcactta

SEQ ID NO: 16106 - DNA, 33 bp, Homo sapiens
caaatagaatttaggaggtcttctgtacaaata

SEQ ID NO: 16107 - DNA, 51 bp, Homo sapiens
aaaattgtagatggacctctaattatattttatctttccaggggagagcaa

SEQ ID NO: 16108 - DNA, 33 bp, Homo sapiens
caccctccgaaggttcgaggctatttgtgttcg

SEQ ID NO: 16109 - DNA, 33 bp, Homo sapiens
aagccacttttcatgatgtagcatagacttcct

SEQ ID NO: 16110 - DNA, 51 bp, Homo sapiens
tagtttataaattgtaatcctaatctataatgtgatgaaaatggtcaatga

SEQ ID NO: 16111 - DNA, 33 bp, Homo sapiens
ctcagtagtcaaaatatctgtagtaggaagcca

SEQ ID NO: 16112 - DNA, 33 bp, Homo sapiens
aaaaacaggacaacaataagtcaccatagcctt

SEQ ID NO: 16113 - DNA, 33 bp, Homo sapiens
tgatgcgtatccaacatacacttgcaaatgtac

SEQ ID NO: 16114 - DNA, 33 bp, Homo sapiens
gtggtggaaagagcactacactgagattacaaa

SEQ ID NO: 16115 - DNA, 33 bp, Homo sapiens
gaaaagaccattatcatcaagaagctggggaag

SEQ ID NO: 16116 - DNA, 33 bp, Homo sapiens
gttcttggcttcatcatggaaagaattcaaagg

SEQ ID NO: 16117 - DNA, 33 bp, Homo sapiens
cctgccaggagtaaccgaggaagccaaccctga

SEQ ID NO: 16118 - DNA, 33 bp, Homo sapiens
ctgtaatggtctctgattaggcatttctgctag

SEQ ID NO: 16119 - DNA, 33 bp, Homo sapiens
gttcttcattacagaccctggcaacaagcctaa

SEQ ID NO: 16120 - DNA, 33 bp, Homo sapiens
aaattaacagaggttacactgaggaagagaaat

SEQ ID NO: 16121 - DNA, 33 bp, Homo sapiens
agaacaatgtgaaacaggaagtgtctagagatg

SEQ ID NO: 16122 - DNA, 33 bp, Homo sapiens
caatcatcaccaatctgacaaatttgacctgaa

SEQ ID NO: 16123 - DNA, 33 bp, Homo sapiens
actaaggaaacttatatagagtgctgcagcaat

SEQ ID NO: 16124 - DNA, 33 bp, Homo sapiens
ttttcgaaatggtagatgaacactgaactcaaa

SEQ ID NO: 16125 - DNA, 33 bp, Homo sapiens
tgctataacaaaactcgaagcatctaacaattc

SEQ ID NO: 16126 - DNA, 33 bp, Homo sapiens
aagttcatacagcttcccaaagattagatataa

SEQ ID NO: 16127 - DNA, 51 bp, Homo sapiens
gaaggaattggaaagcaataaaaactgaactagtccaagaaggctttatgg

SEQ ID NO: 16128 - DNA, 51 bp, Homo sapiens
taaaatccatccaaatgacttaaaagaggaagtagaaatggaataaactta

SEQ ID NO: 16129 - DNA, 33 bp, Homo sapiens
agcggtcctgcaggatgaaagtagactaaagca

SEQ ID NO: 16130 - DNA, 33 bp, Homo sapiens
aagaacactccatttatcaaagcaataaccaat

SEQ ID NO: 16131 - DNA, 33 bp, Homo sapiens
gggtaagctactgctatctatttctgaggttat

SEQ ID NO: 16132 - DNA, 33 bp, Homo sapiens
cacagggtgaccatgcgctctgtggcttccctg

SEQ ID NO: 16133 - DNA, 51 bp, Homo sapiens
aggggtcaatcatgatgtttctggtgtagggaagagtttggaatgcatcct

SEQ ID NO: 16134 - DNA, 33 bp, Homo sapiens
tggacagagaatcccctcggttaattcaattca

SEQ ID NO: 16135 - DNA, 33 bp, Homo sapiens
taaatattcttctgccgctaatccaccctttat

SEQ ID NO: 16136 - DNA, 33 bp, Homo sapiens
catgacaatgcaccatcagcgtttactattatg

SEQ ID NO: 16137 - DNA, 51 bp, Homo sapiens
gatgaagatatcatctttcaaacagggaatcagaatcaccacctgaggaag

SEQ ID NO: 16138 - DNA, 33 bp, Homo sapiens
cagtaaggtccccaactatatacagtgttctaa

SEQ ID NO: 16139 - DNA, 33 bp, Homo sapiens
tcacagtttaacatacgaagactttcactatct

SEQ ID NO: 16140 - DNA, 51 bp, Homo sapiens
aaaaacagtattgttgtctcagtactattagattaaaagagtacaggacta

SEQ ID NO: 16141 - DNA, 33 bp, Homo sapiens
ttatgttattgtttcagggtaacttttcttctt

SEQ ID NO: 16142 - DNA, 33 bp, Homo sapiens
ataagctcccatatgatcggaaactgaagacat

SEQ ID NO: 16143 - DNA, 33 bp, Homo sapiens
cagtcaagagataccttaacagtctggccttgg

SEQ ID NO: 16144 - DNA, 33 bp, Homo sapiens
tattacagatttaccatgtgcgagcttctattc

SEQ ID NO: 16145 - DNA, 33 bp, Homo sapiens
tggcttttttctctgcgcaagtgtggagagaaa

SEQ ID NO: 16146 - DNA, 33 bp, Homo sapiens
gaataacaatgttgcatattaacacatcttccc

SEQ ID NO: 16147 - DNA, 33 bp, Homo sapiens
ttactaatggattagatgtgtggaacaaggcac

SEQ ID NO: 16148 - DNA, 51 bp, Homo sapiens
gaaaattatgtccgtaactaaccaaggggtgaattgtccatcacagcagtg

SEQ ID NO: 16149 - DNA, 33 bp, Homo sapiens
gcttggggaatgtgtatgagtctgctggtgctg

SEQ ID NO: 16150 - DNA, 33 bp, Homo sapiens
ctcttaaggcctttacgaggttggcagaagagt

SEQ ID NO: 16151 - DNA, 33 bp, Homo sapiens
gatcttctgtttaagctgaagcctggggaaaga

SEQ ID NO: 16152 - DNA, 33 bp, Homo sapiens
gaagtgcttccttaaagagttcaatatgaattg

SEQ ID NO: 16153 - DNA, 33 bp, Homo sapiens
tcacctccaattcctagaccaactacatagaat

SEQ ID NO: 16154 - DNA, 33 bp, Homo sapiens
tagaatttttcacaaagctgaatggtattcatc

SEQ ID NO: 16155 - DNA, 33 bp, Homo sapiens
atctactgtgaatatctctagaacacaaaatag

SEQ ID NO: 16156 - DNA, 33 bp, Homo sapiens
ctgtgcaatattaagagaatagctttcacaaac

SEQ ID NO: 16157 - DNA, 33 bp, Homo sapiens
gaatgaataaaggctatctacaaggggctcaga

SEQ ID NO: 16158 - DNA, 51 bp, Homo sapiens
gtgtgtgtgtttgaattagtggtatgagaggctctattgactttaattttg

SEQ ID NO: 16159 - DNA, 33 bp, Homo sapiens
aaagcatgggcttgaatggtttggagtcaaaat

SEQ ID NO: 16160 - DNA, 33 bp, Homo sapiens
taggatcctggttccctgatcacatggtgaaac

SEQ ID NO: 16161 - DNA, 33 bp, Homo sapiens
accttgtggctcaacatggctgctacactccag

SEQ ID NO: 16162 - DNA, 33 bp, Homo sapiens
atatttgcataaacagtatagtatctagcagtt

SEQ ID NO: 16163 - DNA, 33 bp, Homo sapiens
cagttaagattttcactggctactttgcttccc

SEQ ID NO: 16164 - DNA, 33 bp, Homo sapiens
gtgtggatttgactcatactaaaccaaatctat

SEQ ID NO: 16165 - DNA, 33 bp, Homo sapiens
gtggactctggaaaactcaagaaatatccattt

SEQ ID NO: 16166 - DNA, 33 bp, Homo sapiens
ttctcacattagaagcgctggcaagagatgttt

SEQ ID NO: 16167 - DNA, 33 bp, Homo sapiens
acttgatgcgaaccaatggtagacccgctcatc

SEQ ID NO: 16168 - DNA, 33 bp, Homo sapiens
aaccttcttaatttcatgatctcagtatcaaat

SEQ ID NO: 16169 - DNA, 33 bp, Homo sapiens
ccagaggctgcagagagagtaacatggagaatt

SEQ ID NO: 16170 - DNA, 33 bp, Homo sapiens
ggagtatataagagaagaacattgctttgtgtg

SEQ ID NO: 16171 - DNA, 33 bp, Homo sapiens
cacaggaaatgcataataccagtgactcgaggc

SEQ ID NO: 16172 - DNA, 33 bp, Homo sapiens
tcctaagaaccagggggatgaggagagcttcgg

SEQ ID NO: 16173 - DNA, 33 bp, Homo sapiens
gcttaaaattggatgcggacccagaagattgta

SEQ ID NO: 16174 - DNA, 33 bp, Homo sapiens
tggtgtacagactgaagaccagatccagaaagt

SEQ ID NO: 16175 - DNA, 33 bp, Homo sapiens
gttttttctggttcaattgggggaaatttggtt

SEQ ID NO: 16176 - DNA, 33 bp, Homo sapiens
caggccatccaagtcatataaggtggagtaatg

SEQ ID NO: 16177 - DNA, 51 bp, Homo sapiens
ggatggatatgaagagatactagaaggtggaatagtgagccagcaatagtg

SEQ ID NO: 16178 - DNA, 33 bp, Homo sapiens
gtgtttttagggtgtatataagtggaatgatta

SEQ ID NO: 16179 - DNA, 33 bp, Homo sapiens
ctccagaaacttgccagtctacccataaaggct

SEQ ID NO: 16180 - DNA, 33 bp, Homo sapiens
tttaaggatgtatctatgccactctgaccttca

SEQ ID NO: 16181 - DNA, 33 bp, Homo sapiens
aatccccaaggctgtatcaagtatctctgctac

SEQ ID NO: 16182 - DNA, 33 bp, Homo sapiens
agtttcctgtctggacgctagaaataacaacaa

SEQ ID NO: 16183 - DNA, 33 bp, Homo sapiens
cacagcactatgctcattctccagtctttgccc

SEQ ID NO: 16184 - DNA, 33 bp, Homo sapiens
ctgctccctgccaccattctgagactactctcg

SEQ ID NO: 16185 - DNA, 33 bp, Homo sapiens
actcacagtgcgttaaggatccaactgtgaaca

SEQ ID NO: 16186 - DNA, 33 bp, Homo sapiens
gccagaattaaccagaggtctgaaaggccaatg

SEQ ID NO: 16187 - DNA, 33 bp, Homo sapiens
tggaccatgttaatcagatcagtttgttccaac

SEQ ID NO: 16188 - DNA, 33 bp, Homo sapiens
tgtaaggataggttaagctgccattcctaagca

SEQ ID NO: 16189 - DNA, 33 bp, Homo sapiens
tcatttatccaggcaatgttactagggctatag

SEQ ID NO: 16190 - DNA, 33 bp, Homo sapiens
acttctgtgtgttttcgaaagttcaggcgtgca

SEQ ID NO: 16191 - DNA, 33 bp, Homo sapiens
atgaattcaatacaaggagttaaacttacacaa

SEQ ID NO: 16192 - DNA, 33 bp, Homo sapiens
tgagatactgggtgtggaagtgttctttaagaa

SEQ ID NO: 16193 - DNA, 33 bp, Homo sapiens
acttttattttagatatgcgtgtacatatgcag

SEQ ID NO: 16194 - DNA, 33 bp, Homo sapiens
attgaagcacataaccgaagtcatcagcacagg

SEQ ID NO: 16195 - DNA, 33 bp, Homo sapiens
gtatccacattgtctatactacctgcctgttag

SEQ ID NO: 16196 - DNA, 33 bp, Homo sapiens
tcaggctctcaaacaagagtttcagaaaaaagt

SEQ ID NO: 16197 - DNA, 33 bp, Homo sapiens
gcctgctagagtggtatagtcctgcagtgtcca

SEQ ID NO: 16198 - DNA, 33 bp, Homo sapiens
gaactgtgggaaataatcattgtttaagtcatc

SEQ ID NO: 16199 - DNA, 33 bp, Homo sapiens
gatacaaccccataggtatagacagcatgtact

SEQ ID NO: 16200 - DNA, 33 bp, Homo sapiens
gaatggcacctgttgcgcctaagggtcatgtgg

SEQ ID NO: 16201 - DNA, 33 bp, Homo sapiens
ctgtttcaggactcacgcagttatcccagggtt

SEQ ID NO: 16202 - DNA, 33 bp, Homo sapiens
ttacagacctgtaatatgctttccaacttccca

SEQ ID NO: 16203 - DNA, 51 bp, Homo sapiens
ataaaggatatctacaaaaaacctatacagctacaacacatttaataaatg

SEQ ID NO: 16204 - DNA, 33 bp, Homo sapiens
ggctgccaacacattgtaatttgagaagcatcc

SEQ ID NO: 16205 - DNA, 33 bp, Homo sapiens
aatgggttacaagcaataatggatcacctccaa

SEQ ID NO: 16206 - DNA, 51 bp, Homo sapiens
aatgatttcagaagtcattttcaaggaatacgtcctttaactggtagatta

SEQ ID NO: 16207 - DNA, 33 bp, Homo sapiens
aaataaattaggggacggattctcatgttggtt

SEQ ID NO: 16208 - DNA, 33 bp, Homo sapiens
caaggcgcactttttctaggaagctttcctgga

SEQ ID NO: 16209 - DNA, 33 bp, Homo sapiens
ttgagtcttcagaacagggaatcaggaagtctt

SEQ ID NO: 16210 - DNA, 33 bp, Homo sapiens
tcctcccacctcaacatcggaaagttctgggtt

SEQ ID NO: 16211 - DNA, 33 bp, Homo sapiens
tcacagatgcagagaatcccacagagtgcatca

SEQ ID NO: 16212 - DNA, 51 bp, Homo sapiens
cccacacatggcagctgagggtagatgctaagctttatagattactcttgg

SEQ ID NO: 16213 - DNA, 33 bp, Homo sapiens
ctcaatgaattcaagctgctggtggtagtgata

SEQ ID NO: 16214 - DNA, 33 bp, Homo sapiens
tcatcaggcttgtagatggtatggcagatgagc

SEQ ID NO: 16215 - DNA, 33 bp, Homo sapiens
tccattcagcaggtacggagaatctgctttgag

SEQ ID NO: 16216 - DNA, 33 bp, Homo sapiens
accaccactcagctccggattattgcagagctg

SEQ ID NO: 16217 - DNA, 33 bp, Homo sapiens
caaatgcctggccagcggagatcagaggcaaat

SEQ ID NO: 16218 - DNA, 33 bp, Homo sapiens
tggcttccaaatgtccgaacagggtttctctcc

SEQ ID NO: 16219 - DNA, 33 bp, Homo sapiens
agtattaaagaacagcgctacactggatgtgac

SEQ ID NO: 16220 - DNA, 33 bp, Homo sapiens
gctacttggtagcacatagacttgggcctgagc

SEQ ID NO: 16221 - DNA, 33 bp, Homo sapiens
tctataagtgattacataaattttggaacgact

SEQ ID NO: 16222 - DNA, 33 bp, Homo sapiens
ttgagagttcttcctatggtcaaagaaaaggga

SEQ ID NO: 16223 - DNA, 33 bp, Homo sapiens
ctaagaagcctatacagtcatacttcagagata

SEQ ID NO: 16224 - DNA, 33 bp, Homo sapiens
taagagaggagaagagcaaacggtcaggaggca

SEQ ID NO: 16225 - DNA, 33 bp, Homo sapiens
tctaccaggatgacaagcagtttgtggacatgc

SEQ ID NO: 16226 - DNA, 33 bp, Homo sapiens
tgtctaccattgggactggagacacatcttgta

SEQ ID NO: 16227 - DNA, 33 bp, Homo sapiens
ggaagtagaaaataaaggggtacaggtcagtgt

SEQ ID NO: 16228 - DNA, 33 bp, Homo sapiens
ttgtgcccttatcacctgcaagctctgagatgc

SEQ ID NO: 16229 - DNA, 33 bp, Homo sapiens
ggtccatctgatcacagactagtgtcgttagcc

SEQ ID NO: 16230 - DNA, 33 bp, Homo sapiens
ccagcagcatgacctcgcttgacttctctgagc

SEQ ID NO: 16231 - DNA, 33 bp, Homo sapiens
actattctagtaggaacctgactcttaaaaact

SEQ ID NO: 16232 - DNA, 33 bp, Homo sapiens
aatatgtacttctcactgtattaccatgtaggc

SEQ ID NO: 16233 - DNA, 33 bp, Homo sapiens
atcaggtggaatggtctctcctcttctgacctc

SEQ ID NO: 16234 - DNA, 33 bp, Homo sapiens
cctgcctgccatagactgagtgtgtgtcttccc

SEQ ID NO: 16235 - DNA, 33 bp, Homo sapiens
cagtacaaagagtaaccccaggcctacctggac

SEQ ID NO: 16236 - DNA, 33 bp, Homo sapiens
agggtgaactgaggaggccacacttatatcagc

SEQ ID NO: 16237 - DNA, 33 bp, Homo sapiens
gggacgttcgcatctcgctttccctagagatgg

SEQ ID NO: 16238 - DNA, 33 bp, Homo sapiens
tgaattgaaaacagtagatgccgagataaaatg

SEQ ID NO: 16239 - DNA, 33 bp, Homo sapiens
attggaaatagactgacggacaggacagagaac

SEQ ID NO: 16240 - DNA, 33 bp, Homo sapiens
gtggctgctcagtggatgatggaccttccaggg

SEQ ID NO: 16241 - DNA, 33 bp, Homo sapiens
taccaaaataactgcagcgtggtgtgtaagtgg

SEQ ID NO: 16242 - DNA, 33 bp, Homo sapiens
aaaaggagagaatggatgttgaactaaactgag

SEQ ID NO: 16243 - DNA, 33 bp, Homo sapiens
catctcttctattcctgaaatatcatacaagtg

SEQ ID NO: 16244 - DNA, 33 bp, Homo sapiens
tatgtgggggcagcaggcacatggatactctct

SEQ ID NO: 16245 - DNA, 33 bp, Homo sapiens
tattcctttgaaaaactaggtaaatagcaagat

SEQ ID NO: 16246 - DNA, 33 bp, Homo sapiens
agtggaagagtagagacaggagcctgactgcag

SEQ ID NO: 16247 - DNA, 33 bp, Homo sapiens
agctgtgcctggaaccgagagataaatgcataa

SEQ ID NO: 16248 - DNA, 51 bp, Homo sapiens
taaggcccaattctttcatccttctgaattataaagaatgacacagggatg

SEQ ID NO: 16249 - DNA, 33 bp, Homo sapiens
atgtttgataacataggcacctctttctgactt

SEQ ID NO: 16250 - DNA, 33 bp, Homo sapiens
tgttaggcaatctcacggacctggggctttgct

SEQ ID NO: 16251 - DNA, 51 bp, Homo sapiens
tgtcatttctattcacgaggcaaaatctgtatctcagtttggtgaatagtt

SEQ ID NO: 16252 - DNA, 51 bp, Homo sapiens
aacttgctttcaacccagtgataccgatttccaacttctggactctagacc

SEQ ID NO: 16253 - DNA, 33 bp, Homo sapiens
tccaaagcctgtggtatgtaaagacttgtgagg

SEQ ID NO: 16254 - DNA, 33 bp, Homo sapiens
tcctgtacttactacctctatgacacttgtgtt

SEQ ID NO: 16255 - DNA, 33 bp, Homo sapiens
attaataatcagaagatggccaattaaaaccac

SEQ ID NO: 16256 - DNA, 33 bp, Homo sapiens
ggctgcctcgccgcccggacttcccagcgccgg

SEQ ID NO: 16257 - DNA, 33 bp, Homo sapiens
ctggatggatatgacagtaacaatgacatcact

SEQ ID NO: 16258 - DNA, 33 bp, Homo sapiens
tcttagttcaaaagcataattgtaaaatcccaa

SEQ ID NO: 16259 - DNA, 33 bp, Homo sapiens
aagcatgattggggttgaacatctgccaccatc

SEQ ID NO: 16260 - DNA, 33 bp, Homo sapiens
tattaatgccagcaaagagtctttataggatga

SEQ ID NO: 16261 - DNA, 33 bp, Homo sapiens
tggggctgaaagatgacgtaaatgtaacccaaa

SEQ ID NO: 16262 - DNA, 33 bp, Homo sapiens
cagctaaacagattaggaaaggcttcatgaaga

SEQ ID NO: 16263 - DNA, 33 bp, Homo sapiens
ggattagaagaacctatgtatcagccgggcgca

SEQ ID NO: 16264 - DNA, 33 bp, Homo sapiens
attgatactaacaggagagattgcctcagttgc

SEQ ID NO: 16265 - DNA, 51 bp, Homo sapiens
acctatctatctatctatctgataagctctttaattgcctggcagtacttg

SEQ ID NO: 16266 - DNA, 51 bp, Homo sapiens
atgcagagggaggtggggatgtctcgagttagcaggtaaaagcaatgttca

SEQ ID NO: 16267 - DNA, 51 bp, Homo sapiens
cccgcagctgttagagggctattcctaagagtttctagggttgaagtttct

SEQ ID NO: 16268 - DNA, 51 bp, Homo sapiens
gcagtatagcaagaccccatctctatcaatattttgaaaaaactagccagg

SEQ ID NO: 16269 - DNA, 33 bp, Homo sapiens
ggagaccataaaggaagatggaatgattactaa

SEQ ID NO: 16270 - DNA, 33 bp, Homo sapiens
cagaactataagctcctctattctcagagttgg

SEQ ID NO: 16271 - DNA, 33 bp, Homo sapiens
tatctaatgtcttttctcatttacctccctgga

SEQ ID NO: 16272 - DNA, 33 bp, Homo sapiens
gggtagctgcctaatatagcatcaggagattga

SEQ ID NO: 16273 - DNA, 33 bp, Homo sapiens
atgtgataacgtacgctgagggagcctaatcag

SEQ ID NO: 16274 - DNA, 33 bp, Homo sapiens
atttccttaacaaaaattcagattgctattaac

SEQ ID NO: 16275 - DNA, 33 bp, Homo sapiens
atatgtatatcctgaatcacataaaagttgttt

SEQ ID NO: 16276 - DNA, 33 bp, Homo sapiens
tttttaaaagtgttactctacctctgccgattc

SEQ ID NO: 16277 - DNA, 33 bp, Homo sapiens
gattgtgttcagttcatactttcatgcacccat

SEQ ID NO: 16278 - DNA, 33 bp, Homo sapiens
ttttaagggatgtaaagatgttgggtggaggtg

SEQ ID NO: 16279 - DNA, 33 bp, Homo sapiens
cctatctgaaatttactcagtgtcagggtgata

SEQ ID NO: 16280 - DNA, 33 bp, Homo sapiens
tttagaatagcaattatcagttccaatatcccc

SEQ ID NO: 16281 - DNA, 33 bp, Homo sapiens
gagatgagctagccgatggtgacaaagccagtt

SEQ ID NO: 16282 - DNA, 33 bp, Homo sapiens
ttttgtattaccatcatacgagataggtgtgtt

SEQ ID NO: 16283 - DNA, 33 bp, Homo sapiens
ggcaatttggaaaacctgaaaggcaggagacct

SEQ ID NO: 16284 - DNA, 33 bp, Homo sapiens
ttgtaatgcttacaggtatgatgcttagtactt

SEQ ID NO: 16285 - DNA, 33 bp, Homo sapiens
atgttctcagggttgaggtgagggcagctgagc

SEQ ID NO: 16286 - DNA, 33 bp, Homo sapiens
ttagtagtaagtgttcgatgtaattttacttta

SEQ ID NO: 16287 - DNA, 33 bp, Homo sapiens
tcgcatctaccccataggagcttaggacagtca

SEQ ID NO: 16288 - DNA, 51 bp, Homo sapiens
agaaatacaggcagctgtctatatctgataggctacagttctggaagtgtg

SEQ ID NO: 16289 - DNA, 33 bp, Homo sapiens
aatactgtcagcagaatgttatctccaagataa

SEQ ID NO: 16290 - DNA, 33 bp, Homo sapiens
ctgacaatataagaaaggagtgggcaactgatg

SEQ ID NO: 16291 - DNA, 33 bp, Homo sapiens
cttcagtctatcaaaagcacatcaagtacacag

SEQ ID NO: 16292 - DNA, 33 bp, Homo sapiens
tgctcagtcttaaacataatttgggaccgaggg

SEQ ID NO: 16293 - DNA, 33 bp, Homo sapiens
cagaataagatgacttcaacacagtaggaaagg

SEQ ID NO: 16294 - DNA, 33 bp, Homo sapiens
actatactgtactgtaggagaatgcaaggataa

SEQ ID NO: 16295 - DNA, 33 bp, Homo sapiens
gagggcaaaagaacactactgtttctcagggat

SEQ ID NO: 16296 - DNA, 33 bp, Homo sapiens
gtttctccatgttggctagtttgtttatgacca

SEQ ID NO: 16297 - DNA, 33 bp, Homo sapiens
ttcattagtattattatgagcattatgtcaggt

SEQ ID NO: 16298 - DNA, 33 bp, Homo sapiens
gaatcatcccagttcaggtgtgttttctgtatt

SEQ ID NO: 16299 - DNA, 33 bp, Homo sapiens
agggccgggctggcccgacagcacacatggaga

SEQ ID NO: 16300 - DNA, 33 bp, Homo sapiens
ctgagccaggctctaagtgctttccatggctta

SEQ ID NO: 16301 - DNA, 33 bp, Homo sapiens
aacacacctgtcttcatccagagatggtatctc

SEQ ID NO: 16302 - DNA, 33 bp, Homo sapiens
cccttgcattcgtccagaagaaggcaggacccc

SEQ ID NO: 16303 - DNA, 33 bp, Homo sapiens
tgacccactgactgactgataaaaatggatttt

SEQ ID NO: 16304 - DNA, 33 bp, Homo sapiens
acacttggccactaagtaggaagtcctggcagg

SEQ ID NO: 16305 - DNA, 33 bp, Homo sapiens
gttccttgttgcaaacgggcaagtacaataatg

SEQ ID NO: 16306 - DNA, 33 bp, Homo sapiens
cttactccttgaaaaataagtgagtgagcctaa

SEQ ID NO: 16307 - DNA, 33 bp, Homo sapiens
aaccaagattcagttaggacacaataaaataat

SEQ ID NO: 16308 - DNA, 33 bp, Homo sapiens
gatgaacacctcttctgaagaaaggaaggacca

SEQ ID NO: 16309 - DNA, 33 bp, Homo sapiens
tccttttaagtctaaagcaatagaaagcccatt

SEQ ID NO: 16310 - DNA, 33 bp, Homo sapiens
acagataattactaaggacagactgtgccattg

SEQ ID NO: 16311 - DNA, 33 bp, Homo sapiens
tgagaagtaatcatcaggtagcagtgaatcagg

SEQ ID NO: 16312 - DNA, 33 bp, Homo sapiens
ttgttcagagtcaaaatgtaggacctagatctg

SEQ ID NO: 16313 - DNA, 33 bp, Homo sapiens
cacaacaataaaacgatgctgtataaaagtgct

SEQ ID NO: 16314 - DNA, 33 bp, Homo sapiens
tggtgacatcttcatatagttgtaagtggtcaa

SEQ ID NO: 16315 - DNA, 33 bp, Homo sapiens
acttcttaactttccctgctccagtctagtctt

SEQ ID NO: 16316 - DNA, 33 bp, Homo sapiens
cagcaattgcttaatagatgtataacccaaata

SEQ ID NO: 16317 - DNA, 33 bp, Homo sapiens
aagtagctgccaataatgagtacccagccttga

SEQ ID NO: 16318 - DNA, 33 bp, Homo sapiens
acaggcaaataaggaagttatggtgtgggctac

SEQ ID NO: 16319 - DNA, 33 bp, Homo sapiens
tggtttgctggttagctgcagaaatttgcactt

SEQ ID NO: 16320 - DNA, 33 bp, Homo sapiens
gtaataattaacaagctgaataggcaacctaca

SEQ ID NO: 16321 - DNA, 33 bp, Homo sapiens
taaacactactcctcctcaagttattaagaatc

SEQ ID NO: 16322 - DNA, 33 bp, Homo sapiens
gacctcagaatgacaagacatcagtatggttgt

SEQ ID NO: 16323 - DNA, 33 bp, Homo sapiens
agaacacactgaaggattatagatgaactcatc

SEQ ID NO: 16324 - DNA, 33 bp, Homo sapiens
gcccatgagccaagcagtctcaaattttatacc

SEQ ID NO: 16325 - DNA, 33 bp, Homo sapiens
tcacctatgtgaggactgtagcattgattggga

SEQ ID NO: 16326 - DNA, 33 bp, Homo sapiens
catacagtcaacattcgctaactgagtaggtgt

SEQ ID NO: 16327 - DNA, 33 bp, Homo sapiens
aataaaattgggtatatggtacagccccagtag

SEQ ID NO: 16328 - DNA, 33 bp, Homo sapiens
ccggtggtcctaactagccctgtctccttgcca

SEQ ID NO: 16329 - DNA, 33 bp, Homo sapiens
ggaagtgtcatgtagactatggctcagctgcag

SEQ ID NO: 16330 - DNA, 33 bp, Homo sapiens
tttccataactgaaaagtgaggcaagattatta

SEQ ID NO: 16331 - DNA, 33 bp, Homo sapiens
tgtcgatcttaaacccgaagcatagagaaatgg

SEQ ID NO: 16332 - DNA, 33 bp, Homo sapiens
accagaagcaattttaggtgttatttgcacttt

SEQ ID NO: 16333 - DNA, 33 bp, Homo sapiens
atatggctaagtattatgatgtgaagaaacttg

SEQ ID NO: 16334 - DNA, 33 bp, Homo sapiens
ggtgtagcaatgagtgtagcaatgtgtgtaggt

SEQ ID NO: 16335 - DNA, 33 bp, Homo sapiens
ctttgctaaaagaatggaactttctgagcaggt

SEQ ID NO: 16336 - DNA, 33 bp, Homo sapiens
gagtttatccatctccgctagattttctagttt

SEQ ID NO: 16337 - DNA, 33 bp, Homo sapiens
ctcccctattattgcatgaatagtgtaccagca

SEQ ID NO: 16338 - DNA, 33 bp, Homo sapiens
aataaggagctaaatcgaaaatatacaagaaac

SEQ ID NO: 16339 - DNA, 33 bp, Homo sapiens
cagtatgtgttattgaggccaattatcacatct

SEQ ID NO: 16340 - DNA, 33 bp, Homo sapiens
gcatgaacagaatgccgcacaggtgaagactgg

SEQ ID NO: 16341 - DNA, 33 bp, Homo sapiens
ttttccatatcaaggctctgctttggcatcgaa

SEQ ID NO: 16342 - DNA, 33 bp, Homo sapiens
ctccaaggtacaattagacatctcccataccac

SEQ ID NO: 16343 - DNA, 33 bp, Homo sapiens
ggcaaaaaatgcagtagtaaagcaaatgtgact

SEQ ID NO: 16344 - DNA, 33 bp, Homo sapiens
attccttaggatctacgcaaccttggatctgga

SEQ ID NO: 16345 - DNA, 33 bp, Homo sapiens
atccggctgagcaatatgctttcactcccactt

SEQ ID NO: 16346 - DNA, 33 bp, Homo sapiens
ccccagatgtagcaccgccactgttctcctcag

SEQ ID NO: 16347 - DNA, 33 bp, Homo sapiens
taaatccgaggcaatagaggttctcaactccca

SEQ ID NO: 16348 - DNA, 33 bp, Homo sapiens
caccggcctagtgtcatgctccaagagaccaca

SEQ ID NO: 16349 - DNA, 33 bp, Homo sapiens
tgaaatggtcctgaaagttaggtatcatgtttt

SEQ ID NO: 16350 - DNA, 33 bp, Homo sapiens
tatttctattttgtggtccaagacagtggctcc

SEQ ID NO: 16351 - DNA, 33 bp, Homo sapiens
attccaagctaccctcgaaggactaaggcttgc

SEQ ID NO: 16352 - DNA, 33 bp, Homo sapiens
aaatatcctgaaaaccgaaagattataccaata

SEQ ID NO: 16353 - DNA, 33 bp, Homo sapiens
tcctattacctagtcagattctgaggaaatggg

SEQ ID NO: 16354 - DNA, 33 bp, Homo sapiens
taacggacagaagcccgaaaatggatgaggctc

SEQ ID NO: 16355 - DNA, 33 bp, Homo sapiens
taggcaggaggttagatgagaaacttccaaaaa

SEQ ID NO: 16356 - DNA, 33 bp, Homo sapiens
agtgtgtccgccatcatccaaatctgaatacat

SEQ ID NO: 16357 - DNA, 33 bp, Homo sapiens
cttttaagcatctgaatggtggaagaggctgaa

SEQ ID NO: 16358 - DNA, 33 bp, Homo sapiens
gaccctgatttctaacgacaaaatctcagagga

SEQ ID NO: 16359 - DNA, 33 bp, Homo sapiens
aaagttaattctctattagtcaggtctccagag

SEQ ID NO: 16360 - DNA, 33 bp, Homo sapiens
ttcgaggagattactccagttagcagcagaact

SEQ ID NO: 16361 - DNA, 33 bp, Homo sapiens
tcaagtggaccagaaacaaagtcaaggaggtgc

SEQ ID NO: 16362 - DNA, 33 bp, Homo sapiens
cctgatacagttctcccaatctgctgcaaatac

SEQ ID NO: 16363 - DNA, 33 bp, Homo sapiens
aaggaagagcacacacgatggtaatggttaaac

SEQ ID NO: 16364 - DNA, 33 bp, Homo sapiens
gggtagctgatggcaagtgggaatgaaggtaat

SEQ ID NO: 16365 - DNA, 33 bp, Homo sapiens
ggctttttcagatgtagaatatgctcggtttgg

SEQ ID NO: 16366 - DNA, 33 bp, Homo sapiens
tcttcaccacctgcatgaaatagagcttccaac

SEQ ID NO: 16367 - DNA, 33 bp, Homo sapiens
ataaaagagagagaaagacaacttgcagctttg

SEQ ID NO: 16368 - DNA, 33 bp, Homo sapiens
agtgattgagtattcatctgtaagatagtgaca

SEQ ID NO: 16369 - DNA, 33 bp, Homo sapiens
gtagtagtagttcacagacagtgagtgacacgt

SEQ ID NO: 16370 - DNA, 33 bp, Homo sapiens
tatcctttagttttacgcttctcagcctagaat

SEQ ID NO: 16371 - DNA, 33 bp, Homo sapiens
aaaagtgattggacacgaattgaaaaatatctt

SEQ ID NO: 16372 - DNA, 33 bp, Homo sapiens
ctagttttccttgtatgagaaccagactcatgg

SEQ ID NO: 16373 - DNA, 33 bp, Homo sapiens
taagtcaccgtacacctcgaaattcacagcgga

SEQ ID NO: 16374 - DNA, 33 bp, Homo sapiens
catacacagttcatcattgatccaaacgtcgtt

SEQ ID NO: 16375 - DNA, 33 bp, Homo sapiens
cctgtcaatgtctagagatgatccgaacacata

SEQ ID NO: 16376 - DNA, 33 bp, Homo sapiens
catgtgctaactattccaaatgtctatgcctgc

SEQ ID NO: 16377 - DNA, 33 bp, Homo sapiens
gagcttaaatgtcccctgatgccaacgattgag

SEQ ID NO: 16378 - DNA, 33 bp, Homo sapiens
ggaagtaatctcaataggtaagagttataagaa

SEQ ID NO: 16379 - DNA, 33 bp, Homo sapiens
gagagcactgccttgaggttggccgcgtgtgcc

SEQ ID NO: 16380 - DNA, 33 bp, Homo sapiens
tgtgtatgttgaagcattgaactgtgaatctta

SEQ ID NO: 16381 - DNA, 33 bp, Homo sapiens
gtgtttcaaacagagataatttagtgaggagaa

SEQ ID NO: 16382 - DNA, 33 bp, Homo sapiens
aagaccctagaacttatgctaacaaatggtaaa

SEQ ID NO: 16383 - DNA, 33 bp, Homo sapiens
aagctgagttacagaggacttcacataccaggc

SEQ ID NO: 16384 - DNA, 33 bp, Homo sapiens
cagagggaatttctcatctttcagacagaagaa

SEQ ID NO: 16385 - DNA, 51 bp, Homo sapiens
gggccacttgaagttagggtgcacagtaccaatgcaagctgctatcacaat

SEQ ID NO: 16386 - DNA, 51 bp, Homo sapiens
caaacccttttgcgaactgcgcacatgagggatctaagttgcacgctcctt

SEQ ID NO: 16387 - DNA, 33 bp, Homo sapiens
ggcctggagtgggctctaagtaatacccagcaa

SEQ ID NO: 16388 - DNA, 33 bp, Homo sapiens
cggttacatgatcacaggtctcctgttcatgcc

SEQ ID NO: 16389 - DNA, 33 bp, Homo sapiens
cagaaggtgagagagcggagaaaatatctaata

SEQ ID NO: 16390 - DNA, 33 bp, Homo sapiens
aattcacacataacaggaggggtggcataaact

SEQ ID NO: 16391 - DNA, 33 bp, Homo sapiens
aattcacatagaaaaatgagcaagtaagaattg

SEQ ID NO: 16392 - DNA, 33 bp, Homo sapiens
cactgtgtggtccctcgatgcagtaagaggaaa

SEQ ID NO: 16393 - DNA, 33 bp, Homo sapiens
taatgcgttagcggacgataaagaataacccta

SEQ ID NO: 16394 - DNA, 33 bp, Homo sapiens
actctgcttgtcaagaggatggctctggcctcc

SEQ ID NO: 16395 - DNA, 33 bp, Homo sapiens
cactgcatcctcttcatcccagatccagttgtc

SEQ ID NO: 16396 - DNA, 33 bp, Homo sapiens
ctttccatttgcttaattctctgaggacctccc

SEQ ID NO: 16397 - DNA, 33 bp, Homo sapiens
tgaaagcaagtttcaataggaggttcatgggag

SEQ ID NO: 16398 - DNA, 33 bp, Homo sapiens
ttgttattagattctcgctgtataaatgagtta

SEQ ID NO: 16399 - DNA, 33 bp, Homo sapiens
cagactattacacacaggcgagaaataaacttc

SEQ ID NO: 16400 - DNA, 33 bp, Homo sapiens
gacacagcgttctttatattctaattctagctc

SEQ ID NO: 16401 - DNA, 33 bp, Homo sapiens
aattgctatttcagctgaccttccccaaaactt

SEQ ID NO: 16402 - DNA, 33 bp, Homo sapiens
aggccttaattcctcagcgaaaactgcaaccat

SEQ ID NO: 16403 - DNA, 33 bp, Homo sapiens
agtaccctgtctctcagattcccatatcaactc

SEQ ID NO: 16404 - DNA, 33 bp, Homo sapiens
gaaacaaaagcttccatcacgactgtaacaggt

SEQ ID NO: 16405 - DNA, 33 bp, Homo sapiens
ggtatgtgccaaaaactgtataaatgaaactat

SEQ ID NO: 16406 - DNA, 33 bp, Homo sapiens
atactcaaactttcctgagaaatttcaactgga

SEQ ID NO: 16407 - DNA, 33 bp, Homo sapiens
ctcactgcctcaggcatgggcacgaagaagaga

SEQ ID NO: 16408 - DNA, 33 bp, Homo sapiens
gcctgccctgtcgtccgcatgacaacctgggag

SEQ ID NO: 16409 - DNA, 33 bp, Homo sapiens
cctctttacaaaatgatgaggtttttaccccac

SEQ ID NO: 16410 - DNA, 33 bp, Homo sapiens
cagggaccaggtgtccggagcttcccagcagtc

SEQ ID NO: 16411 - DNA, 33 bp, Homo sapiens
agatcagggaacaacctagtgactgggcaaagt

SEQ ID NO: 16412 - DNA, 33 bp, Homo sapiens
cttgtgcatggtgagaggacaaggggcaatcaa

SEQ ID NO: 16413 - DNA, 51 bp, Homo sapiens
gaggcaccatcactggggtatcagctatctcatctcaggatcccaccttaa

SEQ ID NO: 16414 - DNA, 33 bp, Homo sapiens
aagctacagagaaccaggtgactctttcatcca

SEQ ID NO: 16415 - DNA, 33 bp, Homo sapiens
gtaggaccctgtctcatgatcttgtgtgtggta

SEQ ID NO: 16416 - DNA, 33 bp, Homo sapiens
ttcctcagaatataaatgctgtacaaggtgtta

SEQ ID NO: 16417 - DNA, 33 bp, Homo sapiens
tgtccagtaccttccatgtatttgttacgcact

SEQ ID NO: 16418 - DNA, 33 bp, Homo sapiens
tcagctcctttatgtctctgtcctagctatctg

SEQ ID NO: 16419 - DNA, 33 bp, Homo sapiens
caaaagttgatacctatccttcatgagactgcc

SEQ ID NO: 16420 - DNA, 33 bp, Homo sapiens
gctctgtggttctgacgcttttcacatccactc

SEQ ID NO: 16421 - DNA, 33 bp, Homo sapiens
agcctcaatcacctaactgaattgtgcagttca

SEQ ID NO: 16422 - DNA, 33 bp, Homo sapiens
tctttcaggttctgaggacactgtggtgagtga

SEQ ID NO: 16423 - DNA, 33 bp, Homo sapiens
agtggctacaggatgagctgggactcaaacaca

SEQ ID NO: 16424 - DNA, 33 bp, Homo sapiens
tggaaaggctgccatggcaaaaataagctggaa

SEQ ID NO: 16425 - DNA, 33 bp, Homo sapiens
tcatttgtctataggatgattggactgtagatg

SEQ ID NO: 16426 - DNA, 33 bp, Homo sapiens
acggcatgcactacaatcagtgggtctcccaca

SEQ ID NO: 16427 - DNA, 33 bp, Homo sapiens
agctggccagcacttagaactcccattacacca

SEQ ID NO: 16428 - DNA, 33 bp, Homo sapiens
taagcaaaaaggaaccggaacctgaagatttgg

SEQ ID NO: 16429 - DNA, 33 bp, Homo sapiens
ttaaggttctagttaaccactgagaaactggcc

SEQ ID NO: 16430 - DNA, 33 bp, Homo sapiens
gttgtttgaatgacaggagagaagcagttcagt

SEQ ID NO: 16431 - DNA, 51 bp, Homo sapiens
tatttccagtgtggaggtcagagagtcaaacctttgaggtggaggctcccc

SEQ ID NO: 16432 - DNA, 33 bp, Homo sapiens
cgtatcagggacccaacggaataactaggacac

SEQ ID NO: 16433 - DNA, 33 bp, Homo sapiens
tggagacctaagctaagcgtccttttctcctcc

SEQ ID NO: 16434 - DNA, 33 bp, Homo sapiens
aagcataatccagccatgattacaataggagag

SEQ ID NO: 16435 - DNA, 33 bp, Homo sapiens
gtggaggaaagagagcgaagtgaccgccagttt

SEQ ID NO: 16436 - DNA, 33 bp, Homo sapiens
tgatctcctagttagctcctcaggtccaggtac

SEQ ID NO: 16437 - DNA, 33 bp, Homo sapiens
gcggactgttcctaattatacagccagcaggag

SEQ ID NO: 16438 - DNA, 33 bp, Homo sapiens
ccctctgaacgatagcgcaagactgtatctttt

SEQ ID NO: 16439 - DNA, 33 bp, Homo sapiens
aatccagaaagatgacgaggaatgggtcacagg

SEQ ID NO: 16440 - DNA, 51 bp, Homo sapiens
ctggattcgagttaaaatcatctcctctgtagttctcctgattaccatcat

SEQ ID NO: 16441 - DNA, 33 bp, Homo sapiens
agctcacaacacctaacccaggcagtcatgggt

SEQ ID NO: 16442 - DNA, 33 bp, Homo sapiens
ctctggacaataacaatggtggccaatgttcat

SEQ ID NO: 16443 - DNA, 33 bp, Homo sapiens
gccctacagtgtacaatgacttccatattccca

SEQ ID NO: 16444 - DNA, 33 bp, Homo sapiens
tgactcaatgataaggcaacaccctagaatagt

SEQ ID NO: 16445 - DNA, 33 bp, Homo sapiens
gcagcagaatgatgtatcggccagactccacca

SEQ ID NO: 16446 - DNA, 33 bp, Homo sapiens
aaaatgactaaatccattgaggaatcaccaggc

SEQ ID NO: 16447 - DNA, 33 bp, Homo sapiens
tgaaatgagcgcctaataggatagccacagcct

SEQ ID NO: 16448 - DNA, 33 bp, Homo sapiens
aaacgtgccagaactatgacctggagtgcatga

SEQ ID NO: 16449 - DNA, 33 bp, Homo sapiens
ccagaggtttatttcacatagtgagtgtcgcta

SEQ ID NO: 16450 - DNA, 33 bp, Homo sapiens
ccgctctgtcaaagatgaactaggaaagacgcc

SEQ ID NO: 16451 - DNA, 33 bp, Homo sapiens
acccaaacaagacaaggccagacatttcatttc

SEQ ID NO: 16452 - DNA, 33 bp, Homo sapiens
atcctcaagcagatgaggactcagtcaagaggt

SEQ ID NO: 16453 - DNA, 33 bp, Homo sapiens
tgaggatggggatcatcaccagaacaggccaca

SEQ ID NO: 16454 - DNA, 33 bp, Homo sapiens
gtaggaaagctgttgagagtcatggccgtatac

SEQ ID NO: 16455 - DNA, 33 bp, Homo sapiens
atgcttcccctgccacgaggagtctgagcaaat

SEQ ID NO: 16456 - DNA, 51 bp, Homo sapiens
cggcccttaatgtatacctattaacggccaggtacgatgactcacgcctga

SEQ ID NO: 16457 - DNA, 33 bp, Homo sapiens
atgatactgttaccagtagaagagattccagtt

SEQ ID NO: 16458 - DNA, 33 bp, Homo sapiens
gcaagtcccttcccaacaagcgcaagggacagt

SEQ ID NO: 16459 - DNA, 33 bp, Homo sapiens
gcaataaaacagacactgagaagtaagatgaaa

SEQ ID NO: 16460 - DNA, 33 bp, Homo sapiens
ttagaagaagcaaggtgaacaaggaatattgct

SEQ ID NO: 16461 - DNA, 33 bp, Homo sapiens
gggtgaatcagcaattgaagtgtgtcttttcta

SEQ ID NO: 16462 - DNA, 33 bp, Homo sapiens
aaggtaaagtccaaacgcaggcctggagctcag

SEQ ID NO: 16463 - DNA, 33 bp, Homo sapiens
cctctttttgttgtcctcaaacactgatttcca

SEQ ID NO: 16464 - DNA, 33 bp, Homo sapiens
aagtttactctattggtcactattctaggcacg

SEQ ID NO: 16465 - DNA, 51 bp, Homo sapiens
aaacatttatgggctctgctcttaattgtctctttgcctacttggaccctg

SEQ ID NO: 16466 - DNA, 51 bp, Homo sapiens
attgcacaagggactacagaacccatggtgttgtggagaagaatgccactt

SEQ ID NO: 16467 - DNA, 33 bp, Homo sapiens
gcttgttgtggaattatactatgcctgttactc

SEQ ID NO: 16468 - DNA, 33 bp, Homo sapiens
ctcccccattctccattagctccttttccagct

SEQ ID NO: 16469 - DNA, 33 bp, Homo sapiens
tgtacctcagtctgaatgattaggtttcccttg

SEQ ID NO: 16470 - DNA, 33 bp, Homo sapiens
gctgctatggctgctataacaacttttcaaaaa

SEQ ID NO: 16471 - DNA, 33 bp, Homo sapiens
agatgttggaactatctgacaaacagtttaaag

SEQ ID NO: 16472 - DNA, 33 bp, Homo sapiens
gttttttgatataagagaagtctactggcaaca

SEQ ID NO: 16473 - DNA, 33 bp, Homo sapiens
actatgagccaaatcatggatggaattaggaat

SEQ ID NO: 16474 - DNA, 33 bp, Homo sapiens
ctggacttctgagctatagaaaccgcaagataa

SEQ ID NO: 16475 - DNA, 33 bp, Homo sapiens
gaggatatacataggagtaggtttgttgggcca

SEQ ID NO: 16476 - DNA, 33 bp, Homo sapiens
ttttgcatttcaatcatcaaagaatgaaagtcc

SEQ ID NO: 16477 - DNA, 33 bp, Homo sapiens
ctttatcatttgcagaggtagtataaagattaa

SEQ ID NO: 16478 - DNA, 51 bp, Homo sapiens
tggttattagcattttcagtaaggaggtatgtttagtaaacagccctcatc

SEQ ID NO: 16479 - DNA, 33 bp, Homo sapiens
taaataaactaagttcgatgcagctaatagagc

SEQ ID NO: 16480 - DNA, 51 bp, Homo sapiens
gctgaattatggctttttcttttcccataggatttacatgtacactcatct

SEQ ID NO: 16481 - DNA, 51 bp, Homo sapiens
tcattgctaggaattatctgcaacagtaatgaatatctccttgttctttta

SEQ ID NO: 16482 - DNA, 33 bp, Homo sapiens
aaatgactgagaagtggaagcgttctgcctatg

SEQ ID NO: 16483 - DNA, 33 bp, Homo sapiens
tgggacccttcatggagcttcttaatgtgcaag

SEQ ID NO: 16484 - DNA, 33 bp, Homo sapiens
gccatgggaagtttcatgcaaagccagtttctc

SEQ ID NO: 16485 - DNA, 33 bp, Homo sapiens
acttgtcagagttcaggaaccactggtagaaat

SEQ ID NO: 16486 - DNA, 33 bp, Homo sapiens
ttctcagctgtaaacctgggtcactccagccat

SEQ ID NO: 16487 - DNA, 33 bp, Homo sapiens
tggaagagtgtgcaaacctttcgagactcctca

SEQ ID NO: 16488 - DNA, 33 bp, Homo sapiens
agtttaagtaattagcggatgtggtttggctct

SEQ ID NO: 16489 - DNA, 51 bp, Homo sapiens
cgttggctgatctttcaacttccaacttctttacaacttccaacattttat

SEQ ID NO: 16490 - DNA, 33 bp, Homo sapiens
catggccccctatgcatgaagtgtctcttaaga

SEQ ID NO: 16491 - DNA, 33 bp, Homo sapiens
aagaaaaagggaagtagggggctatgaagggat

SEQ ID NO: 16492 - DNA, 33 bp, Homo sapiens
ctcctatgtttttctggcacctaattctccttg

SEQ ID NO: 16493 - DNA, 33 bp, Homo sapiens
atacttgatttcttcatagtcccaatacttcct

SEQ ID NO: 16494 - DNA, 33 bp, Homo sapiens
tcacttttcacttagaggaacagagcttttgga

SEQ ID NO: 16495 - DNA, 51 bp, Homo sapiens
tgacacaataatgaagcaacctttctaatacattcaagaagctggaaactg

SEQ ID NO: 16496 - DNA, 51 bp, Homo sapiens
aactgaaaaggctaccttttataaattctcaaaactggctaggtaggaatc

SEQ ID NO: 16497 - DNA, 51 bp, Homo sapiens
aaagaattaaatttatatattgaaggaacctacggtgtaccttgaaaattt

SEQ ID NO: 16498 - DNA, 33 bp, Homo sapiens
cactctagcctggtaccaacacctgagaaaggc

SEQ ID NO: 16499 - DNA, 33 bp, Homo sapiens
gctagagtgttgtcaccagaatgtctgtcttgc

SEQ ID NO: 16500 - DNA, 33 bp, Homo sapiens
tgagccgaagctcgaggataggagcacaccaaa

SEQ ID NO: 16501 - DNA, 33 bp, Homo sapiens
actaaagcattccatgcattaagaagctagtcc

SEQ ID NO: 16502 - DNA, 51 bp, Homo sapiens
tgggagaattctcagtgtttattaattgctggtgatcctctcttctaggat

SEQ ID NO: 16503 - DNA, 33 bp, Homo sapiens
tacatcccagcattatcaaaagtctcaacccat

SEQ ID NO: 16504 - DNA, 33 bp, Homo sapiens
ggctgaatttagcacagaggctgaagttggcca

SEQ ID NO: 16505 - DNA, 33 bp, Homo sapiens
atccaagccattatgagaatccaaaaggaattg

SEQ ID NO: 16506 - DNA, 33 bp, Homo sapiens
ggtttggctagagtaactgaaaggatggaggtg

SEQ ID NO: 16507 - DNA, 33 bp, Homo sapiens
gccagaaagatttgggtatatgttagtagctag

SEQ ID NO: 16508 - DNA, 51 bp, Homo sapiens
ttaaggacctttctgatgttccttcgcttactgattgagagaaaaacaaag

SEQ ID NO: 16509 - DNA, 33 bp, Homo sapiens
gaaactgatgtagtaagtgttatttgatatgtt

SEQ ID NO: 16510 - DNA, 33 bp, Homo sapiens
attaagatattagcaggattatgtgttcaaacc

SEQ ID NO: 16511 - DNA, 33 bp, Homo sapiens
atgggagttgagtcaatctagtcagtagttgag

SEQ ID NO: 16512 - DNA, 33 bp, Homo sapiens
caacctaggctaccaactcgtaaagacgttctt

SEQ ID NO: 16513 - DNA, 33 bp, Homo sapiens
tgcagggatataaacagctagccctcttcccct

SEQ ID NO: 16514 - DNA, 33 bp, Homo sapiens
tctaggaataatcagatgggtagcaatgtctgg

SEQ ID NO: 16515 - DNA, 33 bp, Homo sapiens
gtattgtattatactattactatggtctggata

SEQ ID NO: 16516 - DNA, 33 bp, Homo sapiens
agtcgctgtgtttttctagaactctcaactcca

SEQ ID NO: 16517 - DNA, 33 bp, Homo sapiens
tgttgtaggttgtgggtaatttaatgacattca

SEQ ID NO: 16518 - DNA, 33 bp, Homo sapiens
ccaggcatcctgaacatcaaaggattatgagga

SEQ ID NO: 16519 - DNA, 33 bp, Homo sapiens
agatagcttaggatgaggaaaccacagtgtcct

SEQ ID NO: 16520 - DNA, 33 bp, Homo sapiens
tctttgcttcttccgatggctagctctgttact

SEQ ID NO: 16521 - DNA, 51 bp, Homo sapiens
caactatgctacacagaagtttagatatgaaggagataattgttccatgag

SEQ ID NO: 16522 - DNA, 33 bp, Homo sapiens
aggtgtggccttgggagaacttaagagacaaag

SEQ ID NO: 16523 - DNA, 33 bp, Homo sapiens
atatttccaaataagaccaccttctgacatgag

SEQ ID NO: 16524 - DNA, 51 bp, Homo sapiens
accctaggagcctattttctttgtagactatgttataatttatttgaagac

SEQ ID NO: 16525 - DNA, 33 bp, Homo sapiens
acatacagaaagaaaagagttcattgtggcctt

SEQ ID NO: 16526 - DNA, 33 bp, Homo sapiens
cagggccaagagaaaaggtagtcagagtgaggg

SEQ ID NO: 16527 - DNA, 33 bp, Homo sapiens
tgccaccagattcccttactcttcagcttgcag

SEQ ID NO: 16528 - DNA, 33 bp, Homo sapiens
tgcttccttcactaccgacaagttttatgagaa

SEQ ID NO: 16529 - DNA, 33 bp, Homo sapiens
ggtagaatagcaagaattgggtctttttctctt

SEQ ID NO: 16530 - DNA, 33 bp, Homo sapiens
attggttccaagacactgcctacctacatcaca

SEQ ID NO: 16531 - DNA, 33 bp, Homo sapiens
gtttacaaagatgttaggtaagattctggagag

SEQ ID NO: 16532 - DNA, 33 bp, Homo sapiens
tcttaaaggcttactgcattttgttagaacaaa

SEQ ID NO: 16533 - DNA, 33 bp, Homo sapiens
aaaaaaaacagtgagagaacagtggtaggtgtg

SEQ ID NO: 16534 - DNA, 33 bp, Homo sapiens
atcagtgactttgatgtaagtagcttcaataaa

SEQ ID NO: 16535 - DNA, 33 bp, Homo sapiens
cttaattgggctgaaacaaatacagggctggaa

SEQ ID NO: 16536 - DNA, 33 bp, Homo sapiens
ctagtatatttgagcattgaaattatttcctgg

SEQ ID NO: 16537 - DNA, 33 bp, Homo sapiens
gtaacttaatttattggaaaagatcctgatgta

SEQ ID NO: 16538 - DNA, 33 bp, Homo sapiens
cacagatcaaaacttcgctgcaaacatgaaaac

SEQ ID NO: 16539 - DNA, 33 bp, Homo sapiens
tcagggaaagctattcgaaagcaggccaagtca

SEQ ID NO: 16540 - DNA, 33 bp, Homo sapiens
gagttgaagagttaagtccctactcaccatcat

SEQ ID NO: 16541 - DNA, 33 bp, Homo sapiens
agtctagggtgagaaagcagttagtgatcatgc

SEQ ID NO: 16542 - DNA, 33 bp, Homo sapiens
acttccttcactgatatgccttttcaattgtct

SEQ ID NO: 16543 - DNA, 33 bp, Homo sapiens
gtgttcaccagaaaaattgtctacattctagat

SEQ ID NO: 16544 - DNA, 33 bp, Homo sapiens
cggaacctagttgtgatatagaagtgttagcct

SEQ ID NO: 16545 - DNA, 33 bp, Homo sapiens
tacaaaggagaaaacatggagctgggaacaata

SEQ ID NO: 16546 - DNA, 33 bp, Homo sapiens
tctagtgagctagcaatgcgagttaaacagaca

SEQ ID NO: 16547 - DNA, 33 bp, Homo sapiens
gtgtgcatacagagaagtatgattattagggac

SEQ ID NO: 16548 - DNA, 33 bp, Homo sapiens
tgttagcattcctttctaagtccaaacaaaata

SEQ ID NO: 16549 - DNA, 33 bp, Homo sapiens
tttgctttttcctttcgattttaacacatagag

SEQ ID NO: 16550 - DNA, 33 bp, Homo sapiens
catcaactcaccaggatagtgagcactaagaac

SEQ ID NO: 16551 - DNA, 33 bp, Homo sapiens
ggggccctcgcttaccgacagttcctctccatg

SEQ ID NO: 16552 - DNA, 33 bp, Homo sapiens
ttggtattgcagagtacattgaagccagtataa

SEQ ID NO: 16553 - DNA, 33 bp, Homo sapiens
aacataggccaattccgaatcttgggggagatg

SEQ ID NO: 16554 - DNA, 51 bp, Homo sapiens
tctatttttaatctgaggaaccttcctaatgctttctgtagtagctgcacc

SEQ ID NO: 16555 - DNA, 33 bp, Homo sapiens
cagtgaatgagggagataggttcctgatgtgaa

SEQ ID NO: 16556 - DNA, 33 bp, Homo sapiens
acattttctttaggtctccatttattgatggac

SEQ ID NO: 16557 - DNA, 33 bp, Homo sapiens
tccttttttaatatccggcatctgacttattag

SEQ ID NO: 16558 - DNA, 33 bp, Homo sapiens
aaaaaaaaaggcataggcattttgcaaagcatt

SEQ ID NO: 16559 - DNA, 33 bp, Homo sapiens
ttaacaagcttagaaatctcctaagtgcagggc

SEQ ID NO: 16560 - DNA, 33 bp, Homo sapiens
gcatagcaatattatcgcctatccttccaattc

SEQ ID NO: 16561 - DNA, 33 bp, Homo sapiens
tgttatgagatgggaaggatacacagcctctcc

SEQ ID NO: 16562 - DNA, 33 bp, Homo sapiens
gtaaagtttggagttatacaacactttggtaac

SEQ ID NO: 16563 - DNA, 33 bp, Homo sapiens
cactgaatacacataatcaacagagagcaatgt

SEQ ID NO: 16564 - DNA, 33 bp, Homo sapiens
tcatatggtttgccccggaaggaaaaacttgtg

SEQ ID NO: 16565 - DNA, 51 bp, Homo sapiens
atggaaaaatgtcttcctaatctgagaaatctttttatcatcattcaggca

SEQ ID NO: 16566 - DNA, 33 bp, Homo sapiens
tattttaatacaggtctcatttgaattagataa

SEQ ID NO: 16567 - DNA, 33 bp, Homo sapiens
ctctctccttaatccatcataccagaaacctat

SEQ ID NO: 16568 - DNA, 33 bp, Homo sapiens
tcatcccagcaaagaatcagtttgttaactcct

SEQ ID NO: 16569 - DNA, 33 bp, Homo sapiens
gtgtccttgagtttcatgtaaccaaacaccttt

SEQ ID NO: 16570 - DNA, 51 bp, Homo sapiens
caataataagtaaacagaaacaatatgtgcaactccaagtctcttaagact

SEQ ID NO: 16571 - DNA, 33 bp, Homo sapiens
gccaatgttaacctcagctgatgaagccatgtg

SEQ ID NO: 16572 - DNA, 33 bp, Homo sapiens
gtatctgttccaatcagctaataggaaggtgct

SEQ ID NO: 16573 - DNA, 33 bp, Homo sapiens
gtcttacattgattgacagatctgttatacata

SEQ ID NO: 16574 - DNA, 33 bp, Homo sapiens
ctgcaaagattgctaccatttactcataaagtc

SEQ ID NO: 16575 - DNA, 33 bp, Homo sapiens
aacttatggtctcacacaaaatctgatcaaggt

SEQ ID NO: 16576 - DNA, 33 bp, Homo sapiens
ctcttcctgtgtcttctcctatttctgttaggg

SEQ ID NO: 16577 - DNA, 33 bp, Homo sapiens
tattctgtcaggatactgtaagctccataaaga

SEQ ID NO: 16578 - DNA, 33 bp, Homo sapiens
acttgagcacctggatcagcaacctgattcatc

SEQ ID NO: 16579 - DNA, 33 bp, Homo sapiens
ttcccttaagattgaagcctggattagttctcc

SEQ ID NO: 16580 - DNA, 33 bp, Homo sapiens
aataagggctttagaatcagacaagtcggaatg

SEQ ID NO: 16581 - DNA, 33 bp, Homo sapiens
tctcctaattgtttcatgccaagaaagaaccat

SEQ ID NO: 16582 - DNA, 33 bp, Homo sapiens
gcaaaggatcactccattgaatttgtattactt

SEQ ID NO: 16583 - DNA, 33 bp, Homo sapiens
aatatttgctcctttagatgaacatataattta

SEQ ID NO: 16584 - DNA, 33 bp, Homo sapiens
aaacatgggctagaatgaaagtctttaaaacac

SEQ ID NO: 16585 - DNA, 33 bp, Homo sapiens
gcctggaatgatagtagctttattgctgatttg

SEQ ID NO: 16586 - DNA, 33 bp, Homo sapiens
gacacagaaattaacagcatttttcctgcctga

SEQ ID NO: 16587 - DNA, 33 bp, Homo sapiens
tctaagaatttgtggacatcaaaagaggatttg

SEQ ID NO: 16588 - DNA, 33 bp, Homo sapiens
gacaggcagagtactggaaaggagttaagccaa

SEQ ID NO: 16589 - DNA, 33 bp, Homo sapiens
tcagccaagttaactatctgccaaagcaaagca

SEQ ID NO: 16590 - DNA, 33 bp, Homo sapiens
aaagcacacttaagccgaaagctctggtttgtt

SEQ ID NO: 16591 - DNA, 33 bp, Homo sapiens
aagggcccagtcctagcagaattcaacacctgc

SEQ ID NO: 16592 - DNA, 33 bp, Homo sapiens
aacataagaattacagcagattctcagtgtaaa

SEQ ID NO: 16593 - DNA, 33 bp, Homo sapiens
taccaaaagaggatacgattgtcacaaaacaat

SEQ ID NO: 16594 - DNA, 33 bp, Homo sapiens
cgggcacatttcttacccgttcgctgagaagcc

SEQ ID NO: 16595 - DNA, 33 bp, Homo sapiens
attaattcactgttaacgctactgctctattca

SEQ ID NO: 16596 - DNA, 33 bp, Homo sapiens
tgaagagtaacaaaagccttagaaaatgattcc

SEQ ID NO: 16597 - DNA, 33 bp, Homo sapiens
cgtattttagtattcagtctattcatgcagcta

SEQ ID NO: 16598 - DNA, 33 bp, Homo sapiens
gccaggcttatctctcgacctcaaatgatccgc

SEQ ID NO: 16599 - DNA, 33 bp, Homo sapiens
gaatgtgaatgccaaagtacggaagcaacctaa

SEQ ID NO: 16600 - DNA, 33 bp, Homo sapiens
ctccaaatttagcccatgcacagagtcagggga

SEQ ID NO: 16601 - DNA, 33 bp, Homo sapiens
gattggagagagaggagaagcattcttaggttg

SEQ ID NO: 16602 - DNA, 51 bp, Homo sapiens
aatcactacagttctcagatttacagcttttttttgtcattggcttgatgt

SEQ ID NO: 16603 - DNA, 33 bp, Homo sapiens
aaaaacaactgagtaggatgccacttaaaagcg

SEQ ID NO: 16604 - DNA, 33 bp, Homo sapiens
ttgattagtgacccaggaaaccaattctgaaat

SEQ ID NO: 16605 - DNA, 33 bp, Homo sapiens
caagaagctcacaatgtagtgtatataaaagga

SEQ ID NO: 16606 - DNA, 33 bp, Homo sapiens
gcctccaggtcttaaattgatgctagctggagt

SEQ ID NO: 16607 - DNA, 33 bp, Homo sapiens
gaaaggcttgacaccctccttgtgatcacggtc

SEQ ID NO: 16608 - DNA, 33 bp, Homo sapiens
acttatcaattgttccggcaagtggtgattact

SEQ ID NO: 16609 - DNA, 51 bp, Homo sapiens
cagatttataaaaggtattcaaagggcacataatgtttggttgagttaggt

SEQ ID NO: 16610 - DNA, 33 bp, Homo sapiens
tacatcactggcctaatctacaaaaccctgaat

SEQ ID NO: 16611 - DNA, 33 bp, Homo sapiens
tctctttaatatgacctgaaaaataacttccag

SEQ ID NO: 16612 - DNA, 33 bp, Homo sapiens
gctgggaagtgctaagtccagaaatcgagtttt

SEQ ID NO: 16613 - DNA, 33 bp, Homo sapiens
ctgattggtactatgatgtttaaagatttcctt

SEQ ID NO: 16614 - DNA, 33 bp, Homo sapiens
taactaaagcctagaatgatttcaggagctgcc

SEQ ID NO: 16615 - DNA, 33 bp, Homo sapiens
taaaacactctttgtatgcagcaaggaaagaat

SEQ ID NO: 16616 - DNA, 33 bp, Homo sapiens
tatactccattcatgagacatgatacaaatgca

SEQ ID NO: 16617 - DNA, 33 bp, Homo sapiens
agaaatgaaaggcaacggtgaacagtgtttgct

SEQ ID NO: 16618 - DNA, 33 bp, Homo sapiens
gtactgtaaatgtccatctgattttatttatga

SEQ ID NO: 16619 - DNA, 33 bp, Homo sapiens
ttcacagtatcagaacgactcatcacccaaccc

SEQ ID NO: 16620 - DNA, 51 bp, Homo sapiens
tgtggctagtagctactgtatcaaatagtgtagagaacattttcatcaaca

SEQ ID NO: 16621 - DNA, 33 bp, Homo sapiens
atcaagaagaaacacctgaattgcaacctgttg

SEQ ID NO: 16622 - DNA, 33 bp, Homo sapiens
ctgtattctcaccttctctgggcttatccatat

SEQ ID NO: 16623 - DNA, 33 bp, Homo sapiens
gagtgacattaggagataaagtgacttgcttgt

SEQ ID NO: 16624 - DNA, 33 bp, Homo sapiens
taggaacaatggattatgtttcattctgattct

SEQ ID NO: 16625 - DNA, 33 bp, Homo sapiens
attatataatgctcaataggtcaattcagtgaa

SEQ ID NO: 16626 - DNA, 33 bp, Homo sapiens
tttttctttgagtggcgtaggaattatgatatt

SEQ ID NO: 16627 - DNA, 33 bp, Homo sapiens
tctagaagttaaaaaccaattagcgatctttac

SEQ ID NO: 16628 - DNA, 33 bp, Homo sapiens
gaatcaaattataaaccaagcacagaaaatgat

SEQ ID NO: 16629 - DNA, 51 bp, Homo sapiens
attaaaaaagaaaataattaacggatgatagtgtttatcaacctactgtga

SEQ ID NO: 16630 - DNA, 33 bp, Homo sapiens
attattgccccagacctggcctggaatgaatac

SEQ ID NO: 16631 - DNA, 33 bp, Homo sapiens
tgtgtattcttctccagacttggtacaaaattg

SEQ ID NO: 16632 - DNA, 33 bp, Homo sapiens
gtcatttgcatgattagagaaagaaaaagtcac

SEQ ID NO: 16633 - DNA, 33 bp, Homo sapiens
actccttctttctgaataagtgtgtgtcctatg

SEQ ID NO: 16634 - DNA, 33 bp, Homo sapiens
agactcatttcttgactaaacctattctttgtc

SEQ ID NO: 16635 - DNA, 51 bp, Homo sapiens
tagaatatacattattttcatctacgaatggaacaatctgtaagattgacc

SEQ ID NO: 16636 - DNA, 33 bp, Homo sapiens
gtggtagaatgcatgattaccagatatactgag

SEQ ID NO: 16637 - DNA, 33 bp, Homo sapiens
aaaaagtcaaactattgaaacagcaatattcaa

SEQ ID NO: 16638 - DNA, 33 bp, Homo sapiens
tccatattctgattccgatcatactacataact

SEQ ID NO: 16639 - DNA, 33 bp, Homo sapiens
gtatttggggcaaaaggctagatatctaaaaac

SEQ ID NO: 16640 - DNA, 33 bp, Homo sapiens
tatcctatttgatggctcaatctcatgttactg

SEQ ID NO: 16641 - DNA, 33 bp, Homo sapiens
ctttggacctcatgtatgctataggcttccctg

SEQ ID NO: 16642 - DNA, 33 bp, Homo sapiens
gcaaatatattgttcctgaaaacttcattagtt

SEQ ID NO: 16643 - DNA, 33 bp, Homo sapiens
tctccctcacgttccagtatcaaattccttgta

SEQ ID NO: 16644 - DNA, 33 bp, Homo sapiens
ttccattactttgacatgatcaggcattccccg

SEQ ID NO: 16645 - DNA, 33 bp, Homo sapiens
cttgtctgggtctacatatgttggtaaaagctg

SEQ ID NO: 16646 - DNA, 33 bp, Homo sapiens
caccataagttaggagtcacgtgcaaagaggat

SEQ ID NO: 16647 - DNA, 33 bp, Homo sapiens
agagataggacccctcgagatcattatccctcc

SEQ ID NO: 16648 - DNA, 33 bp, Homo sapiens
gtggatccacattttacaagttgggaagaagat

SEQ ID NO: 16649 - DNA, 33 bp, Homo sapiens
cacctccacctgaactcacaatgtctgctctat

SEQ ID NO: 16650 - DNA, 51 bp, Homo sapiens
tttctactgagaaattaaatgtaaacttaaaggattatccctttccaaaaa

SEQ ID NO: 16651 - DNA, 33 bp, Homo sapiens
gcagctttcttggaaatagttcaggcccagtct

SEQ ID NO: 16652 - DNA, 33 bp, Homo sapiens
tgatcacaagaccttacaaactatgtgagaaaa

SEQ ID NO: 16653 - DNA, 51 bp, Homo sapiens
agtgcagtggtgggattataattcatggtagctttaaattcctgggctcaa

SEQ ID NO: 16654 - DNA, 33 bp, Homo sapiens
tctggagcggactgaaggaaaagatagattggg

SEQ ID NO: 16655 - DNA, 33 bp, Homo sapiens
tgtaatttggtcatcatcagaagactgtgacat

SEQ ID NO: 16656 - DNA, 33 bp, Homo sapiens
agctctttcacacagattatgtaatttggtcat

SEQ ID NO: 16657 - DNA, 33 bp, Homo sapiens
aggaatacaaacatcataatgcgagggagaaaa

SEQ ID NO: 16658 - DNA, 33 bp, Homo sapiens
ataaactctgtttcactgaagataggaaaaaag

SEQ ID NO: 16659 - DNA, 33 bp, Homo sapiens
tctaacattgctataataaaacgaggaggactg

SEQ ID NO: 16660 - DNA, 33 bp, Homo sapiens
cactactgaagcaaaatcttcctaagtactttg

SEQ ID NO: 16661 - DNA, 33 bp, Homo sapiens
gtgcctaaacatcataggagtaagacctgaaaa

SEQ ID NO: 16662 - DNA, 33 bp, Homo sapiens
gctttgttccatgcaattgagttacttgaaaca

SEQ ID NO: 16663 - DNA, 33 bp, Homo sapiens
agcgacatataagatctcattttgaaacaccta

SEQ ID NO: 16664 - DNA, 33 bp, Homo sapiens
acttaattttggaatatgccggctttcgacaaa

SEQ ID NO: 16665 - DNA, 33 bp, Homo sapiens
ctccaagaaatagcacgagagggtgatgatggc

SEQ ID NO: 16666 - DNA, 33 bp, Homo sapiens
gaagccatggacagtggcaactttcccagcaat

SEQ ID NO: 16667 - DNA, 33 bp, Homo sapiens
ggtagagtaacatctataccacatctactttct

SEQ ID NO: 16668 - DNA, 33 bp, Homo sapiens
caattcagtccatgtatctgttaaaaacagctt

SEQ ID NO: 16669 - DNA, 33 bp, Homo sapiens
tcaacaaggaaagtgctgagatagaaggccaga

SEQ ID NO: 16670 - DNA, 33 bp, Homo sapiens
tccctcaggcataatggaatgatgtggctaggt

SEQ ID NO: 16671 - DNA, 33 bp, Homo sapiens
attatggcttttaagttaaccaaagatattttc

SEQ ID NO: 16672 - DNA, 33 bp, Homo sapiens
tgtgttttctaggaaggcatttactcattataa

SEQ ID NO: 16673 - DNA, 33 bp, Homo sapiens
acataaggtaaaaaaatgtcaatcttgaagtca

SEQ ID NO: 16674 - DNA, 33 bp, Homo sapiens
ttcaattcttagtaaaggctccattgtagtcag

SEQ ID NO: 16675 - DNA, 33 bp, Homo sapiens
cattttgttcaacagagataaaagaagatggca

SEQ ID NO: 16676 - DNA, 33 bp, Homo sapiens
tgagtttcttgccaaagtgaaattggatgctaa

SEQ ID NO: 16677 - DNA, 33 bp, Homo sapiens
gaggatgagatgccagtatgtctatgcatggtg

SEQ ID NO: 16678 - DNA, 33 bp, Homo sapiens
aagttaaacttggaaattgaatcacatacaaaa

SEQ ID NO: 16679 - DNA, 33 bp, Homo sapiens
gagaaagaagtttaagtataaggctgcctcaag

SEQ ID NO: 16680 - DNA, 33 bp, Homo sapiens
ctgaattccagtaaaagagataatgccaaccat

SEQ ID NO: 16681 - DNA, 33 bp, Homo sapiens
tcttgacaatattgggtcatcttatgcatggac

SEQ ID NO: 16682 - DNA, 33 bp, Homo sapiens
gccctgtaaaaataacgaattcctccaactgtg

SEQ ID NO: 16683 - DNA, 33 bp, Homo sapiens
ccgttctatagcggtaggttccttccttgttct

SEQ ID NO: 16684 - DNA, 33 bp, Homo sapiens
tatccttatgtgggcatagtgcaaggcgttact

SEQ ID NO: 16685 - DNA, 33 bp, Homo sapiens
gatttgccccatataagatgccaaaaaatgaga

SEQ ID NO: 16686 - DNA, 33 bp, Homo sapiens
agataccatcttacaatcatcgaaatggctatt

SEQ ID NO: 16687 - DNA, 33 bp, Homo sapiens
caattttggatctctatggcatactgaaggctt

SEQ ID NO: 16688 - DNA, 33 bp, Homo sapiens
agcagccagtgacatagaacgatgtggtagatt

SEQ ID NO: 16689 - DNA, 33 bp, Homo sapiens
gggagtggtaagaagaggtcaaattcaagatct

SEQ ID NO: 16690 - DNA, 33 bp, Homo sapiens
aacatttcacacacaagagttcagaatcctggg

SEQ ID NO: 16691 - DNA, 33 bp, Homo sapiens
gtaatgcacattaatatctctttccctttaata

SEQ ID NO: 16692 - DNA, 33 bp, Homo sapiens
gaacacaactttcaacgctattccaatgggcaa

SEQ ID NO: 16693 - DNA, 33 bp, Homo sapiens
aagtacagttctgttatagcgtactagttgggc

SEQ ID NO: 16694 - DNA, 33 bp, Homo sapiens
ctcaagctgtttctcagagtagcctgataattt

SEQ ID NO: 16695 - DNA, 33 bp, Homo sapiens
tgcagtactggaataagaacagataagtacata

SEQ ID NO: 16696 - DNA, 33 bp, Homo sapiens
aggacatccaaaaattgaagtgattatgcttct

SEQ ID NO: 16697 - DNA, 33 bp, Homo sapiens
acttacccatacaaatgacgatgcaaaccagca

SEQ ID NO: 16698 - DNA, 33 bp, Homo sapiens
aggcaaactacgttcatgttcttcataaagctg

SEQ ID NO: 16699 - DNA, 33 bp, Homo sapiens
agtgatttgtctaatagatccgggcaaagtaaa

SEQ ID NO: 16700 - DNA, 33 bp, Homo sapiens
tgtagggctttgtagatacactaaggacatttt

SEQ ID NO: 16701 - DNA, 33 bp, Homo sapiens
tcaatggaagtgtatatagagagaagtggacag

SEQ ID NO: 16702 - DNA, 33 bp, Homo sapiens
caggcagtatctagtatcaagcacattgctttc

SEQ ID NO: 16703 - DNA, 33 bp, Homo sapiens
ccttgagcttaacctctgagaatctgccaaaaa

SEQ ID NO: 16704 - DNA, 33 bp, Homo sapiens
ataacattgtagggcagtacattactcatgtgt

SEQ ID NO: 16705 - DNA, 33 bp, Homo sapiens
cagagaggaagctggcgatctctgtcaattctg

SEQ ID NO: 16706 - DNA, 33 bp, Homo sapiens
gagtgatactttgaggtcatgtgactaaccccg

SEQ ID NO: 16707 - DNA, 33 bp, Homo sapiens
agccactctttcttcaccccatggagacatctt

SEQ ID NO: 16708 - DNA, 33 bp, Homo sapiens
tctagatggtgcttagtcctggagtgggaaggg

SEQ ID NO: 16709 - DNA, 33 bp, Homo sapiens
gaacgactggtttagatgcttggtcactatacc

SEQ ID NO: 16710 - DNA, 33 bp, Homo sapiens
cccaagtttgaagttatggtcaatgcaccacaa

SEQ ID NO: 16711 - DNA, 33 bp, Homo sapiens
cacattttcttcattcgatctatcattgatgga

SEQ ID NO: 16712 - DNA, 33 bp, Homo sapiens
caggctgttagggaatgacagtaataagagtaa

SEQ ID NO: 16713 - DNA, 33 bp, Homo sapiens
tctgcctgaatcaaactacaaaaatagccagat

SEQ ID NO: 16714 - DNA, 51 bp, Homo sapiens
tgcccagaggtcaagtcttctgcacgcgcttcagcctcacctcttgcagct

SEQ ID NO: 16715 - DNA, 33 bp, Homo sapiens
agacattaaatcctaatggacactaagccctcc

SEQ ID NO: 16716 - DNA, 33 bp, Homo sapiens
tgagaggctcctgatagtaacttttaatgattt

SEQ ID NO: 16717 - DNA, 33 bp, Homo sapiens
gacgtggatttgagaatcatcagcacgcaagga

SEQ ID NO: 16718 - DNA, 33 bp, Homo sapiens
agtggcccttccttcctgattcctacactcctc

SEQ ID NO: 16719 - DNA, 33 bp, Homo sapiens
cactctagcggccctacacaaagttcttacctg

SEQ ID NO: 16720 - DNA, 33 bp, Homo sapiens
ctcaccccacacctaatgaatccgaatctgccc

SEQ ID NO: 16721 - DNA, 33 bp, Homo sapiens
atgatgctcattattcgagtattcagacataac

SEQ ID NO: 16722 - DNA, 33 bp, Homo sapiens
tttaccctaatgctcatggcagtggccagtttt

SEQ ID NO: 16723 - DNA, 51 bp, Homo sapiens
gaagaacttgggaagttgtgggtgatgaatacttgggttctatagaagaaa

SEQ ID NO: 16724 - DNA, 33 bp, Homo sapiens
taatttaattccatgccactaaagataatgtta

SEQ ID NO: 16725 - DNA, 33 bp, Homo sapiens
aaacttcatcgtaatgtatccagtctctttttc

SEQ ID NO: 16726 - DNA, 33 bp, Homo sapiens
taaaatgactgtaagattactagaaatgtgaga

SEQ ID NO: 16727 - DNA, 33 bp, Homo sapiens
acatatttgccttaactagacctcctcctgcag

SEQ ID NO: 16728 - DNA, 33 bp, Homo sapiens
tctctttttaggcttatggaatgactttaaagt

SEQ ID NO: 16729 - DNA, 33 bp, Homo sapiens
tgtatggtataagtgatccatcattcattttat

SEQ ID NO: 16730 - DNA, 33 bp, Homo sapiens
caactgtcccctggacgatttccccagagacca

SEQ ID NO: 16731 - DNA, 33 bp, Homo sapiens
gtgataacatgagctagggtagtgttataataa

SEQ ID NO: 16732 - DNA, 33 bp, Homo sapiens
aaaagaagtctgtttcgaaaactcaggcaggcc

SEQ ID NO: 16733 - DNA, 33 bp, Homo sapiens
ttcttcaggaaattgatcagagtcatcaaaata

SEQ ID NO: 16734 - DNA, 33 bp, Homo sapiens
gacagtactttcaaattatcatgagttttgttt

SEQ ID NO: 16735 - DNA, 33 bp, Homo sapiens
tttatccttcatttgcgctcatgctctttgttt

SEQ ID NO: 16736 - DNA, 33 bp, Homo sapiens
agtctgggacccccgcggaagacagtgccttcc

SEQ ID NO: 16737 - DNA, 33 bp, Homo sapiens
aagactacatttgggacaaagggagccaaagca

SEQ ID NO: 16738 - DNA, 33 bp, Homo sapiens
cattcagatgagaacatattttgcaaggaaaaa

SEQ ID NO: 16739 - DNA, 33 bp, Homo sapiens
accctttgcccttttataatttggcttttatgt

SEQ ID NO: 16740 - DNA, 33 bp, Homo sapiens
aaaatggggatctatcgaaaaatggtaattatg

SEQ ID NO: 16741 - DNA, 33 bp, Homo sapiens
atcagtgtgcaaaaaccacagtcattcctatac

SEQ ID NO: 16742 - DNA, 33 bp, Homo sapiens
gcatgacaaatttgcccatgtctaaattacagt

SEQ ID NO: 16743 - DNA, 33 bp, Homo sapiens
tgaatgaattctggtataaaaagaacattagtg

SEQ ID NO: 16744 - DNA, 33 bp, Homo sapiens
ctctagactttccctatcagttctccatatttc

SEQ ID NO: 16745 - DNA, 33 bp, Homo sapiens
ggctttctcaatttgatatgaattctgtgagaa

SEQ ID NO: 16746 - DNA, 33 bp, Homo sapiens
ccagaatgtccaaatatacagttttgataggcc

SEQ ID NO: 16747 - DNA, 33 bp, Homo sapiens
agtaatgaaaagaaaatggataactcattgagt

SEQ ID NO: 16748 - DNA, 33 bp, Homo sapiens
caaggcaccaatcacgtatgcattggcaatcag

SEQ ID NO: 16749 - DNA, 51 bp, Homo sapiens
tgctcaatactaaactcttccaaaccgttggatctatcactggaattctga

SEQ ID NO: 16750 - DNA, 33 bp, Homo sapiens
ccaagtgttcaccatatagtcagtaattgattc

SEQ ID NO: 16751 - DNA, 33 bp, Homo sapiens
cagttgttcagtgttttaaaagttttgaaccgt

SEQ ID NO: 16752 - DNA, 33 bp, Homo sapiens
tactgcctcaaaagcatatcatgacaagatacc

SEQ ID NO: 16753 - DNA, 33 bp, Homo sapiens
tggtcactctagtcaagaattttgcatctgacg

SEQ ID NO: 16754 - DNA, 33 bp, Homo sapiens
gatgctcttgtagtacgaatggtgtatcctagt

SEQ ID NO: 16755 - DNA, 33 bp, Homo sapiens
tcagaaaatagagcaagaaaaagtagcataatg

SEQ ID NO: 16756 - DNA, 33 bp, Homo sapiens
gatgaagtaggcagtgtagtttttgccctacca

SEQ ID NO: 16757 - DNA, 33 bp, Homo sapiens
ttacatttacatttactactaattccctgagct

SEQ ID NO: 16758 - DNA, 33 bp, Homo sapiens
cccatggatcaggtcctagattctcttatctgt

SEQ ID NO: 16759 - DNA, 33 bp, Homo sapiens
agaaatctcaacaggatgcctctaaataatctt

SEQ ID NO: 16760 - DNA, 51 bp, Homo sapiens
gatgttttgtttttctctataggcacctcataagttacaatgccaaagtct

SEQ ID NO: 16761 - DNA, 51 bp, Homo sapiens
gttactttttgattcagataaaacatgcttgggaaaaagtacctggaggca

SEQ ID NO: 16762 - DNA, 33 bp, Homo sapiens
ccttgatctgcttaaagttacagtaatatcact

SEQ ID NO: 16763 - DNA, 33 bp, Homo sapiens
gtttgctggaccaaactgaacagactgcagtac

SEQ ID NO: 16764 - DNA, 33 bp, Homo sapiens
gagtctgagatgtcccgccctaacaccaaatga

SEQ ID NO: 16765 - DNA, 33 bp, Homo sapiens
actttcatctgtttaatatattgccaaaatatc

SEQ ID NO: 16766 - DNA, 33 bp, Homo sapiens
ctgaccatacaaccaagcaatccctggctagac

SEQ ID NO: 16767 - DNA, 33 bp, Homo sapiens
gaattagaaaaaactatgctgaatttcatatgc

SEQ ID NO: 16768 - DNA, 33 bp, Homo sapiens
ggtttacttttgtttcgatgtgagcatatgcgt

SEQ ID NO: 16769 - DNA, 33 bp, Homo sapiens
atgatttgcaatgtggtactacaagcggccctc

SEQ ID NO: 16770 - DNA, 33 bp, Homo sapiens
gagtgcttttttctgtgaagcgtaattagtgca

SEQ ID NO: 16771 - DNA, 33 bp, Homo sapiens
aaaagacattgttttgcaacctgagtacatgga

SEQ ID NO: 16772 - DNA, 33 bp, Homo sapiens
gcctctgatttcaccatgctgcactgtatccat

SEQ ID NO: 16773 - DNA, 33 bp, Homo sapiens
agtgtaaaaatatgacggtacatacgtatgaaa

SEQ ID NO: 16774 - DNA, 33 bp, Homo sapiens
gaaggttataaaggaagagtggctgaaattgtt

SEQ ID NO: 16775 - DNA, 33 bp, Homo sapiens
ccccaactgtctttcatcttagtctttcctttc

SEQ ID NO: 16776 - DNA, 33 bp, Homo sapiens
gtcaggttactgccactaaataaaaactatgga

SEQ ID NO: 16777 - DNA, 33 bp, Homo sapiens
catgccatagaaacatgagaggactactgcagt

SEQ ID NO: 16778 - DNA, 33 bp, Homo sapiens
atgtaaagtatagtaccgcagttccctcttacc

SEQ ID NO: 16779 - DNA, 33 bp, Homo sapiens
gaaataagtgttttactaccaaatatcttttct

SEQ ID NO: 16780 - DNA, 33 bp, Homo sapiens
aagtattgcgaattcagcatttagcagagacac

SEQ ID NO: 16781 - DNA, 33 bp, Homo sapiens
aaagacagtttttaacggatgcccattaaaatg

SEQ ID NO: 16782 - DNA, 33 bp, Homo sapiens
tccacaatgattttcacctctcctgggtattca

SEQ ID NO: 16783 - DNA, 33 bp, Homo sapiens
ttagctcttcaagggatctctatgctgtttccc

SEQ ID NO: 16784 - DNA, 33 bp, Homo sapiens
cacatgacccgctaacgattcttctatctttta

SEQ ID NO: 16785 - DNA, 33 bp, Homo sapiens
agagagtttgtagctgcaaaagaatagggatag

SEQ ID NO: 16786 - DNA, 33 bp, Homo sapiens
ttcaagcctactctcttaatcctatactacact

SEQ ID NO: 16787 - DNA, 33 bp, Homo sapiens
aagtgattttgtggcagtgaaatccctttttca

SEQ ID NO: 16788 - DNA, 33 bp, Homo sapiens
aagtctcttaaggcccggacctagaagtcacag

SEQ ID NO: 16789 - DNA, 33 bp, Homo sapiens
ctacactcagctggtcgatgttactttcctacc

SEQ ID NO: 16790 - DNA, 33 bp, Homo sapiens
tgtagaagcaagtcctgacttttgaactttggc

SEQ ID NO: 16791 - DNA, 33 bp, Homo sapiens
attattcaaagcagagtaaattgctgcctgaag

SEQ ID NO: 16792 - DNA, 33 bp, Homo sapiens
aattcaggcaactccagagacatggatatggaa

SEQ ID NO: 16793 - DNA, 33 bp, Homo sapiens
tcaggagagttggttatgtgaaaagaatgtgca

SEQ ID NO: 16794 - DNA, 33 bp, Homo sapiens
aacaggttctataaaataatgagagagtgtaat

SEQ ID NO: 16795 - DNA, 33 bp, Homo sapiens
caggtaacaataacacggaacaaaataatagaa

SEQ ID NO: 16796 - DNA, 33 bp, Homo sapiens
aggtgaagacaactatgaaagatgacactgggc

SEQ ID NO: 16797 - DNA, 33 bp, Homo sapiens
ggtcctttcctcctcagagagttctcagtgagc

SEQ ID NO: 16798 - DNA, 33 bp, Homo sapiens
acattgacaaagtacagggttagaaatacaaac

SEQ ID NO: 16799 - DNA, 33 bp, Homo sapiens
aggctgccatcttatgtagacttacagaaaaag

SEQ ID NO: 16800 - DNA, 33 bp, Homo sapiens
gaaccaagaagttaagtcacaacacagagtttc

SEQ ID NO: 16801 - DNA, 33 bp, Homo sapiens
tggggttgttgtattagatgaactaatgtatgc

SEQ ID NO: 16802 - DNA, 33 bp, Homo sapiens
ccgaaggctggtctgatggatagtgaatagtaa

SEQ ID NO: 16803 - DNA, 33 bp, Homo sapiens
tccagaaactggcacatccaatcagtccttgcc

SEQ ID NO: 16804 - DNA, 33 bp, Homo sapiens
gccctgccttttcctcgccattgttcagacaag

SEQ ID NO: 16805 - DNA, 33 bp, Homo sapiens
atcatcgccatctctgtagtccttgtaatgtga

SEQ ID NO: 16806 - DNA, 51 bp, Homo sapiens
tctgttattaagcctctctcgctccgctccttggtagcaattttcctaata

SEQ ID NO: 16807 - DNA, 33 bp, Homo sapiens
agtaggatttgaatcatgttacgttattttcta

SEQ ID NO: 16808 - DNA, 51 bp, Homo sapiens
ttaagtgaaggggacagccgagggatatattttaccatgacagccttgtag

SEQ ID NO: 16809 - DNA, 33 bp, Homo sapiens
tgaaatgcagcagaaaggaaaaggaataaacat

SEQ ID NO: 16810 - DNA, 33 bp, Homo sapiens
aatttaataggctagagcaacagtaaagtaact

SEQ ID NO: 16811 - DNA, 33 bp, Homo sapiens
agcacagtactgataatcttcaatcatatatgg

SEQ ID NO: 16812 - DNA, 33 bp, Homo sapiens
atggagagaactaggagagtgaggagaacccca

SEQ ID NO: 16813 - DNA, 33 bp, Homo sapiens
gaaattcttgggtttgtaggatggtagataaga

SEQ ID NO: 16814 - DNA, 33 bp, Homo sapiens
tacgtctcactccacccaatttacccaaagctg

SEQ ID NO: 16815 - DNA, 33 bp, Homo sapiens
aaaagtggattttgaagagtggattaaattgct

SEQ ID NO: 16816 - DNA, 33 bp, Homo sapiens
catttctcagaacgtatccccatcgttaagtga

SEQ ID NO: 16817 - DNA, 33 bp, Homo sapiens
agaaagctggagctctgagacttaaagaatggg

SEQ ID NO: 16818 - DNA, 33 bp, Homo sapiens
tcaccaaagtggattatcaactttataacaaaa

SEQ ID NO: 16819 - DNA, 51 bp, Homo sapiens
attatgttgtcttgtcacacattctgaaacactggtgagagaggcagtgaa

SEQ ID NO: 16820 - DNA, 33 bp, Homo sapiens
ctccctttataggcactgtctaatgactgactc

SEQ ID NO: 16821 - DNA, 33 bp, Homo sapiens
ggtggtattttcgccatgtacatccttaccttc

SEQ ID NO: 16822 - DNA, 51 bp, Homo sapiens
tctttccttttcatctctgttgctcgactgcactctctgacctacctgctt

SEQ ID NO: 16823 - DNA, 33 bp, Homo sapiens
ttttaagaactcaaaggattgtagccggtatgg

SEQ ID NO: 16824 - DNA, 33 bp, Homo sapiens
gaatagatgagactgaggaagttagctgtgata

SEQ ID NO: 16825 - DNA, 33 bp, Homo sapiens
tctccaggtacgagaagtgtaatttcgaccctg

SEQ ID NO: 16826 - DNA, 51 bp, Homo sapiens
tctatctagacatctttcttcaaactgtcagaagactgaatagagaaacag

SEQ ID NO: 16827 - DNA, 33 bp, Homo sapiens
cataatcatctaaaaaggttcttagaggaaaat

SEQ ID NO: 16828 - DNA, 33 bp, Homo sapiens
cttctccagagcaagatcccaaaaggaaacgaa

SEQ ID NO: 16829 - DNA, 33 bp, Homo sapiens
ttcttggcgcactaccggacactgggggacaca

SEQ ID NO: 16830 - DNA, 33 bp, Homo sapiens
ccccataacagtcacactctaccctgacgtggg

SEQ ID NO: 16831 - DNA, 33 bp, Homo sapiens
tagtgtgtgtatagaatttccagttacaaagtg

SEQ ID NO: 16832 - DNA, 33 bp, Homo sapiens
gctaattcctgcaaagcatctgggacatatctg

SEQ ID NO: 16833 - DNA, 33 bp, Homo sapiens
actacagtttgaggaatgtttgttgaactaaac

SEQ ID NO: 16834 - DNA, 33 bp, Homo sapiens
ggttctgggcaggcaagctttttcttagagctt

SEQ ID NO: 16835 - DNA, 33 bp, Homo sapiens
ttctctgcttctgccatgactgaactgctgcca

SEQ ID NO: 16836 - DNA, 33 bp, Homo sapiens
tcaaggattgttaacaccttcttcgctttctga

SEQ ID NO: 16837 - DNA, 33 bp, Homo sapiens
tacagtgtaaagactctactcctctgtccctct

SEQ ID NO: 16838 - DNA, 33 bp, Homo sapiens
ccatgatagatacagatgttagagcttcctcat

SEQ ID NO: 16839 - DNA, 33 bp, Homo sapiens
gactccaattttcatctcactttccccacataa

SEQ ID NO: 16840 - DNA, 33 bp, Homo sapiens
ttgtcagtcaatcctatgtaaaaattctcctct

SEQ ID NO: 16841 - DNA, 33 bp, Homo sapiens
caactaaggactctccgaggttttaaagctggg

SEQ ID NO: 16842 - DNA, 33 bp, Homo sapiens
cctacacatgttggttgaacaagacagctgtct

SEQ ID NO: 16843 - DNA, 33 bp, Homo sapiens
attgcttgagatcaactatggtaggtatattta

SEQ ID NO: 16844 - DNA, 33 bp, Homo sapiens
tttaatcatcctgttctatatttggtgacctta

SEQ ID NO: 16845 - DNA, 33 bp, Homo sapiens
tgctcacatatggggctgatcctgactccaaaa

SEQ ID NO: 16846 - DNA, 33 bp, Homo sapiens
agggagataaccattagatctgactgcccgaga

SEQ ID NO: 16847 - DNA, 33 bp, Homo sapiens
ctttagcatttgataaccacttgctaagacttt

SEQ ID NO: 16848 - DNA, 33 bp, Homo sapiens
actatgtgcaatgtattaggaaagttctttggc

SEQ ID NO: 16849 - DNA, 33 bp, Homo sapiens
tgtccaggtccagggagcgattattgtccatgg

SEQ ID NO: 16850 - DNA, 51 bp, Homo sapiens
ctcccagccctcttagtggaataacgagatgactgttcagaccctaccatc

SEQ ID NO: 16851 - DNA, 33 bp, Homo sapiens
aactaatctcaaacaatgtttcccaaactgcct

SEQ ID NO: 16852 - DNA, 33 bp, Homo sapiens
ttcctgaaaagatgaatgagattgagaaacctt

SEQ ID NO: 16853 - DNA, 33 bp, Homo sapiens
agaacccacaagcccagacaatcaccttagccc

SEQ ID NO: 16854 - DNA, 33 bp, Homo sapiens
actagtgattccaaagcaaccagcctctctctt

SEQ ID NO: 16855 - DNA, 51 bp, Homo sapiens
ccatcagcacccaaggcagatataggaaggcagtcagccattcctcctaga

SEQ ID NO: 16856 - DNA, 33 bp, Homo sapiens
aaataagtgcaaataatacaatgttgaggaact

SEQ ID NO: 16857 - DNA, 33 bp, Homo sapiens
ctcttcttatcactggtagcatcttatcacaat

SEQ ID NO: 16858 - DNA, 33 bp, Homo sapiens
ggaacactcaccaaccggatttgtgcatgtgtg

SEQ ID NO: 16859 - DNA, 33 bp, Homo sapiens
gcacatgaaatacagcggatggcagggctgaca

SEQ ID NO: 16860 - DNA, 33 bp, Homo sapiens
catgtagtcgttgtcatgcatcagatcatttaa

SEQ ID NO: 16861 - DNA, 33 bp, Homo sapiens
tgggaaacaggagttagagtggaagcaacatta

SEQ ID NO: 16862 - DNA, 33 bp, Homo sapiens
gtgtacttccgggcgatagtgatgccaaaataa

SEQ ID NO: 16863 - DNA, 33 bp, Homo sapiens
gagaagttcttctgaattgcagtataaaagata

SEQ ID NO: 16864 - DNA, 33 bp, Homo sapiens
agaactggtcagactccaggtggctcctctgca

SEQ ID NO: 16865 - DNA, 33 bp, Homo sapiens
aatctggctaatgatatgctggcaaaaaatttg

SEQ ID NO: 16866 - DNA, 33 bp, Homo sapiens
gtttccaatatttagcgatcattcacagcactg

SEQ ID NO: 16867 - DNA, 33 bp, Homo sapiens
ttcctcttcaaaataatgagaggttcagattag

SEQ ID NO: 16868 - DNA, 33 bp, Homo sapiens
aaacaacatatttgtagggcaccttttatgtac

SEQ ID NO: 16869 - DNA, 33 bp, Homo sapiens
ttaaagagaagaaagacatgctcatgtgaccag

SEQ ID NO: 16870 - DNA, 33 bp, Homo sapiens
gtgattatgatgatcatcctggtttaggaccca

SEQ ID NO: 16871 - DNA, 33 bp, Homo sapiens
ttcctctcccatttactagcgataggagtggag

SEQ ID NO: 16872 - DNA, 33 bp, Homo sapiens
atgtttggttaaggaatgaacaggagacctagc

SEQ ID NO: 16873 - DNA, 33 bp, Homo sapiens
aattctaccccgacaatctcagcttctgcctat

SEQ ID NO: 16874 - DNA, 33 bp, Homo sapiens
ttcattttccagcaattatgcctactttgcagt

SEQ ID NO: 16875 - DNA, 33 bp, Homo sapiens
caaggaaatggaagtataagtattgttccagtc

SEQ ID NO: 16876 - DNA, 33 bp, Homo sapiens
cccatctcaaagataagctcagctaaacatatc

SEQ ID NO: 16877 - DNA, 33 bp, Homo sapiens
gcttcctgttgaataatgtatatctgtcaatag

SEQ ID NO: 16878 - DNA, 51 bp, Homo sapiens
gggaatgagaatttaacccaggagaggggaatgctttaagaaaatctcata

SEQ ID NO: 16879 - DNA, 33 bp, Homo sapiens
gaatcttgccatcccagtcatgaaaagaaactg

SEQ ID NO: 16880 - DNA, 33 bp, Homo sapiens
tgtgggttcaggataagtatcggtaatacaaga

SEQ ID NO: 16881 - DNA, 33 bp, Homo sapiens
ctacctaatatctttatatccttacctcaaaac

SEQ ID NO: 16882 - DNA, 33 bp, Homo sapiens
gcagatggatgtttaacacttttcaaagtagtt

SEQ ID NO: 16883 - DNA, 33 bp, Homo sapiens
caaattctagctcttcgacatttgacaatactg

SEQ ID NO: 16884 - DNA, 33 bp, Homo sapiens
gagaagtgaagaaaaggagatttcactcagtct

SEQ ID NO: 16885 - DNA, 33 bp, Homo sapiens
aagaaagatttgatgatgttaacttttctagga

SEQ ID NO: 16886 - DNA, 33 bp, Homo sapiens
actaaaaagtttttcattcctgagaatccttca

SEQ ID NO: 16887 - DNA, 33 bp, Homo sapiens
tttcagaattcacaaagcctttaataactgcag

SEQ ID NO: 16888 - DNA, 33 bp, Homo sapiens
tcagtgacaaaaagaatattggtgcttttacac

SEQ ID NO: 16889 - DNA, 51 bp, Homo sapiens
tccttcattattatttcaagttttagatacatagctaagggaatatgctgt

SEQ ID NO: 16890 - DNA, 33 bp, Homo sapiens
cctgagacacccttcatagtcgtgctacaggaa

SEQ ID NO: 16891 - DNA, 33 bp, Homo sapiens
gtttagattcagttagtatgtgtataggtgtat

SEQ ID NO: 16892 - DNA, 33 bp, Homo sapiens
taccgatgtgttgtgataaaacaatctcagaag

SEQ ID NO: 16893 - DNA, 33 bp, Homo sapiens
gaccacataaaaagaagggtttacacagctaaa

SEQ ID NO: 16894 - DNA, 33 bp, Homo sapiens
ttccttggcaaaacactcaagttgaaaacctca

SEQ ID NO: 16895 - DNA, 33 bp, Homo sapiens
gggggatctctttttagtgaggtatactgtggg

SEQ ID NO: 16896 - DNA, 33 bp, Homo sapiens
ttggtgtgtgatgctatgtaaactctgttaacc

SEQ ID NO: 16897 - DNA, 33 bp, Homo sapiens
attagataacttcaaatagtgacaaccttgcag

SEQ ID NO: 16898 - DNA, 33 bp, Homo sapiens
atacggattccaggtaggctcaaaaaaacacaa

SEQ ID NO: 16899 - DNA, 33 bp, Homo sapiens
ttcatagctccctgtatgtttacttcacagcac

SEQ ID NO: 16900 - DNA, 33 bp, Homo sapiens
gataaaatactagaacggaatcaacagattaca

SEQ ID NO: 16901 - DNA, 33 bp, Homo sapiens
ttgctttggccacagagatcatgatgagtataa

SEQ ID NO: 16902 - DNA, 33 bp, Homo sapiens
aaggtaaaggctgccagtagttggtgggaaata

SEQ ID NO: 16903 - DNA, 33 bp, Homo sapiens
gacagatttgcttcaggatggtggtttggctct

SEQ ID NO: 16904 - DNA, 33 bp, Homo sapiens
ccattccatgcagagatcctcagagtatccctg

SEQ ID NO: 16905 - DNA, 33 bp, Homo sapiens
gttagaaaaaatatcacaacataataggccaag

SEQ ID NO: 16906 - DNA, 33 bp, Homo sapiens
ttagccacatagtcatgataagtgattacattt

SEQ ID NO: 16907 - DNA, 51 bp, Homo sapiens
caagtataatataataagctaatagtatacgaatatagaggaagatatctg

SEQ ID NO: 16908 - DNA, 33 bp, Homo sapiens
gggttgtctcattacacacttatccctcctccc

SEQ ID NO: 16909 - DNA, 33 bp, Homo sapiens
acatattattggtcaataaaagcatgaaaactg

SEQ ID NO: 16910 - DNA, 33 bp, Homo sapiens
agagccaaactatctccatatcaaaacaggtag

SEQ ID NO: 16911 - DNA, 33 bp, Homo sapiens
attatgggagaattaagcatcttctatgctcta

SEQ ID NO: 16912 - DNA, 33 bp, Homo sapiens
gaggctctcactagacgcattctcaatactgtc

SEQ ID NO: 16913 - DNA, 33 bp, Homo sapiens
tgaatcaacaactgactgtataaaactatgctt

SEQ ID NO: 16914 - DNA, 33 bp, Homo sapiens
acataggatttaatcattccttgcccataaact

SEQ ID NO: 16915 - DNA, 33 bp, Homo sapiens
gattaatatatgttgtgaaggccaagcaactcc

SEQ ID NO: 16916 - DNA, 33 bp, Homo sapiens
tacacttactaaaagataattccacacgctaga

SEQ ID NO: 16917 - DNA, 33 bp, Homo sapiens
ctgtaagtataatgcacattcccaaatctgaga

SEQ ID NO: 16918 - DNA, 33 bp, Homo sapiens
ttgggagacagaaggtgaaccatatgtggagaa

SEQ ID NO: 16919 - DNA, 33 bp, Homo sapiens
tgcatcagttgacgactatttgagtcattttta

SEQ ID NO: 16920 - DNA, 33 bp, Homo sapiens
gaatctcacacttaacgacaaggcttaaacatc

SEQ ID NO: 16921 - DNA, 33 bp, Homo sapiens
tgaaagccgattacacgaagtcatttgggtttg

SEQ ID NO: 16922 - DNA, 33 bp, Homo sapiens
ggcagtactaccaatcgcataaagaagtattca

SEQ ID NO: 16923 - DNA, 33 bp, Homo sapiens
tcatctatcagccctatggtgtccccacagccc

SEQ ID NO: 16924 - DNA, 33 bp, Homo sapiens
gacttagacattaagatgatccctagctggaaa

SEQ ID NO: 16925 - DNA, 33 bp, Homo sapiens
taccccacattctaaagtaagaggacaatgaga

SEQ ID NO: 16926 - DNA, 33 bp, Homo sapiens
ccgtccaatcaacaactgagtgtcttcaacctc

SEQ ID NO: 16927 - DNA, 33 bp, Homo sapiens
ggtagatttccagatagacagtcatgcatctca

SEQ ID NO: 16928 - DNA, 33 bp, Homo sapiens
gcagtcacataatctagagaaaggacaagttaa

SEQ ID NO: 16929 - DNA, 33 bp, Homo sapiens
atatgtgtcttgaaaagtagggaatttacaata

SEQ ID NO: 16930 - DNA, 33 bp, Homo sapiens
ccacttccactcaatggacaagtgaatatattt

SEQ ID NO: 16931 - DNA, 33 bp, Homo sapiens
acaaggctacaaacacggataatacaattgctg

SEQ ID NO: 16932 - DNA, 33 bp, Homo sapiens
aatcagtcccttccacggccattgaacttttgg

SEQ ID NO: 16933 - DNA, 33 bp, Homo sapiens
tcacaccctcatttggtcaaaggagctgttggc

SEQ ID NO: 16934 - DNA, 33 bp, Homo sapiens
tcttcatttgcaaaacggtaaaaatcatttcta

SEQ ID NO: 16935 - DNA, 33 bp, Homo sapiens
gaggtgagctctaaccggaggatatagggggga

SEQ ID NO: 16936 - DNA, 33 bp, Homo sapiens
ttgacaggcgaaagaattgggattatggcactt

SEQ ID NO: 16937 - DNA, 33 bp, Homo sapiens
ctagcctcattcttggtatttacatccccagga

SEQ ID NO: 16938 - DNA, 33 bp, Homo sapiens
ctgcaccatacataagcaggacttggaaggaaa

SEQ ID NO: 16939 - DNA, 33 bp, Homo sapiens
taactggatgactctgtagtagctctcttccaa

SEQ ID NO: 16940 - DNA, 33 bp, Homo sapiens
caccagacaggagaaagacaatgagaatggagg

SEQ ID NO: 16941 - DNA, 33 bp, Homo sapiens
catcaaatggcccaacgaactgcaagtaatgat

SEQ ID NO: 16942 - DNA, 33 bp, Homo sapiens
ggagacaaagcctaactatatcattccacttat

SEQ ID NO: 16943 - DNA, 51 bp, Homo sapiens
atatccattatttgcatagcaacaattaggaaatagcctacatgtccaaat

SEQ ID NO: 16944 - DNA, 51 bp, Homo sapiens
cactatacttgcctaggtaactaacgcatggattatacattttaatgtgtg

SEQ ID NO: 16945 - DNA, 33 bp, Homo sapiens
tgtcctggtgcctaccgcatagggtttcttcct

SEQ ID NO: 16946 - DNA, 33 bp, Homo sapiens
caaaaggaaaaaaagtgacaggctaagagaggt

SEQ ID NO: 16947 - DNA, 33 bp, Homo sapiens
agaaaaagtctagtgatgctagagggagattaa

SEQ ID NO: 16948 - DNA, 33 bp, Homo sapiens
tgtaatttccgcacaagaacttttacacacatg

SEQ ID NO: 16949 - DNA, 33 bp, Homo sapiens
acaagaaccacggccagagccacacttcacatt

SEQ ID NO: 16950 - DNA, 51 bp, Homo sapiens
ttgttaaaaagatgcaacatttctatctccaagaagtttgaaatatataaa

SEQ ID NO: 16951 - DNA, 33 bp, Homo sapiens
ttacagatgaggaaagtacagttcagaaagctt

SEQ ID NO: 16952 - DNA, 33 bp, Homo sapiens
aatacctgaactacccgaaagttaaatgcacca

SEQ ID NO: 16953 - DNA, 33 bp, Homo sapiens
gctgaatgatgttagcgccaagtgagacttact

SEQ ID NO: 16954 - DNA, 33 bp, Homo sapiens
atcttagcaaaggaaatgaatgttcagtccaat

SEQ ID NO: 16955 - DNA, 33 bp, Homo sapiens
ttcagctacttattagtcagcctagaaaaataa

SEQ ID NO: 16956 - DNA, 33 bp, Homo sapiens
attaggctgccatggagtaactgtatgttggcc

SEQ ID NO: 16957 - DNA, 33 bp, Homo sapiens
ataattcctgagatcataacaagaggtctactt

SEQ ID NO: 16958 - DNA, 33 bp, Homo sapiens
caggaaattatctgtcgaatccttctttttaag

SEQ ID NO: 16959 - DNA, 33 bp, Homo sapiens
catagtagaaaacaaagagggaagatacggtta

SEQ ID NO: 16960 - DNA, 51 bp, Homo sapiens
ctccttcaaattcaccctattccaggatgcacttggcctcagggcatcacc

SEQ ID NO: 16961 - DNA, 33 bp, Homo sapiens
acgactagctcttaaagtacatatttggatatg

SEQ ID NO: 16962 - DNA, 33 bp, Homo sapiens
gaagccattttttaggtattcactcagaagata

SEQ ID NO: 16963 - DNA, 33 bp, Homo sapiens
gttgtttttcccctcctcatatagccgaacatt

SEQ ID NO: 16964 - DNA, 33 bp, Homo sapiens
agaggagcattaaaaatttggggcatttcatct

SEQ ID NO: 16965 - DNA, 33 bp, Homo sapiens
gaaagtaatgttctaaggtctttggaagtcagt

SEQ ID NO: 16966 - DNA, 33 bp, Homo sapiens
ataccttgccaggtactcaagagcttaaaattt

SEQ ID NO: 16967 - DNA, 33 bp, Homo sapiens
taatgctttaaatacatataccacaaatactac

SEQ ID NO: 16968 - DNA, 33 bp, Homo sapiens
cagagaaacactttcatgcaaaccttgaagact

SEQ ID NO: 16969 - DNA, 33 bp, Homo sapiens
gtgtgatcgatctatctcttagctgaacaaatt

SEQ ID NO: 16970 - DNA, 33 bp, Homo sapiens
tcagaggatccaggaatctcactgtatgcaaag

SEQ ID NO: 16971 - DNA, 33 bp, Homo sapiens
agagtgactcatcttcgcaaaaagatacattaa

SEQ ID NO: 16972 - DNA, 33 bp, Homo sapiens
tacagcctggagctaattcctaaaggtgcccat

SEQ ID NO: 16973 - DNA, 33 bp, Homo sapiens
acatgactgttaaatatatttctgaacaatttg

SEQ ID NO: 16974 - DNA, 33 bp, Homo sapiens
atagagagagcacaaatttaagaaacacaagaa

SEQ ID NO: 16975 - DNA, 33 bp, Homo sapiens
gccatattgactttaagaaatcccatgcaggcc

SEQ ID NO: 16976 - DNA, 33 bp, Homo sapiens
catttagggcagaagagatagctcataaaaagg

SEQ ID NO: 16977 - DNA, 51 bp, Homo sapiens
tgaataactttgtaaaacccaagcatataatttctacaatatccctattag

SEQ ID NO: 16978 - DNA, 51 bp, Homo sapiens
ttctagcagttatgttttaattaaggatgtagctattgtttgaatgtgtca

SEQ ID NO: 16979 - DNA, 33 bp, Homo sapiens
gacaagataattaagggatcaaggaaaagtgaa

SEQ ID NO: 16980 - DNA, 33 bp, Homo sapiens
ttttgtgtgtgccttcgatttttaaatatagta

SEQ ID NO: 16981 - DNA, 33 bp, Homo sapiens
ggtaactagttagaaactgcctaatatggacaa

SEQ ID NO: 16982 - DNA, 33 bp, Homo sapiens
gttttcctggatcgtctcaatgcttgtggattt

SEQ ID NO: 16983 - DNA, 33 bp, Homo sapiens
atcagaagactggttatgagagtgctgcaatca

SEQ ID NO: 16984 - DNA, 33 bp, Homo sapiens
agtcttctgatacccaggctctcaactctcatc

SEQ ID NO: 16985 - DNA, 33 bp, Homo sapiens
agatctgtattacctcgcttactaatcaacacc

SEQ ID NO: 16986 - DNA, 51 bp, Homo sapiens
agtttcagacaggtacactaccttatgcaataatacacagccagtatcctg

SEQ ID NO: 16987 - DNA, 33 bp, Homo sapiens
gtctttgaaattctcatgaaaaattatttgaca

SEQ ID NO: 16988 - DNA, 33 bp, Homo sapiens
gttttaaatgcggatctacataagtcccaaatc

SEQ ID NO: 16989 - DNA, 33 bp, Homo sapiens
tcccaaaacagtatcacaactctgccctctctt

SEQ ID NO: 16990 - DNA, 51 bp, Homo sapiens
aatgtgtcccctacctgcaggaagagtgacctcccattcctagcagaaatg

SEQ ID NO: 16991 - DNA, 51 bp, Homo sapiens
gtagcaattggctacctttaagtacgaactttcagtaattcttgccacttt

SEQ ID NO: 16992 - DNA, 33 bp, Homo sapiens
gctatactctaaagaatggggaggcttaagttt

SEQ ID NO: 16993 - DNA, 51 bp, Homo sapiens
cagctaccactcagattaacctgatgagcacttgtgtattatttgcacttt

SEQ ID NO: 16994 - DNA, 33 bp, Homo sapiens
aggcttttattaggtatgaagatgagtgtcaca

SEQ ID NO: 16995 - DNA, 33 bp, Homo sapiens
tgtacaattctctccctgcattgcctgagtgta

SEQ ID NO: 16996 - DNA, 33 bp, Homo sapiens
caagggtccaaaaaaatagactggtacttataa

SEQ ID NO: 16997 - DNA, 33 bp, Homo sapiens
atagggaagatcgttatgtgctaaaatacagct

SEQ ID NO: 16998 - DNA, 33 bp, Homo sapiens
taaacgttagcaggtagggacattaaaacagtt

SEQ ID NO: 16999 - DNA, 33 bp, Homo sapiens
ctcatcagagccgtatgataatcaagagctgac

SEQ ID NO: 17000 - DNA, 33 bp, Homo sapiens
cattgttccattttgctagacattgtattatct

SEQ ID NO: 17001 - DNA, 33 bp, Homo sapiens
atcaacatttttctcatcttataatgccatctc

SEQ ID NO: 17002 - DNA, 51 bp, Homo sapiens
aaccctgaactcgtgggtatttgtatattcaggtagtagttgcgtccctat

SEQ ID NO: 17003 - DNA, 51 bp, Homo sapiens
ggtggatgggtgcagcaaacaattatgacacttgtctacctatgtaacaaa

SEQ ID NO: 17004 - DNA, 33 bp, Homo sapiens
gacctacctgtggataggttctactggactcct

SEQ ID NO: 17005 - DNA, 33 bp, Homo sapiens
acttattagaaaagtaggcagaaaacctgaatg

SEQ ID NO: 17006 - DNA, 33 bp, Homo sapiens
taaaaataaggttatagaaagagtctgagcgaa

SEQ ID NO: 17007 - DNA, 33 bp, Homo sapiens
gaaatatcaactggaagaatgaaaaagtgatca

SEQ ID NO: 17008 - DNA, 33 bp, Homo sapiens
taactttctgagttacgcctagagtacatggaa

SEQ ID NO: 17009 - DNA, 33 bp, Homo sapiens
atgtcataggtttctgtaaaagacagacacaga

SEQ ID NO: 17010 - DNA, 33 bp, Homo sapiens
agcaagtgcctttatagagttccatgaagcata

SEQ ID NO: 17011 - DNA, 33 bp, Homo sapiens
actcttcttgggctaatatgagtcaaaataata

SEQ ID NO: 17012 - DNA, 33 bp, Homo sapiens
cctcaaagcacattccgcaaactgacacagaag

SEQ ID NO: 17013 - DNA, 51 bp, Homo sapiens
gtttaaagagcaatctttgtaataactaagctcatgatgtttgggatcaga

SEQ ID NO: 17014 - DNA, 33 bp, Homo sapiens
tgtccaagatctctcccagtcaactttctaaaa

SEQ ID NO: 17015 - DNA, 33 bp, Homo sapiens
attaccaaatgatataggatttttctacatggc

SEQ ID NO: 17016 - DNA, 33 bp, Homo sapiens
tgctaagcaatggtgggaaatatcttttttcaa

SEQ ID NO: 17017 - DNA, 33 bp, Homo sapiens
gataggaagggtagatgacaactgccttgttca

SEQ ID NO: 17018 - DNA, 33 bp, Homo sapiens
ttaaattcaaactgacgcctccaaaatcaacac

SEQ ID NO: 17019 - DNA, 33 bp, Homo sapiens
ctaagtgagaactgctgacactgtctatagcaa

SEQ ID NO: 17020 - DNA, 33 bp, Homo sapiens
taactttagttcagaacagaaaggtgttaaaat

SEQ ID NO: 17021 - DNA, 51 bp, Homo sapiens
aaatctgaaatttgagcaacacagagctttgggggtttgccacctttttag

SEQ ID NO: 17022 - DNA, 33 bp, Homo sapiens
agggaggcaaattacctaagctgcaatttcctg

SEQ ID NO: 17023 - DNA, 33 bp, Homo sapiens
gtctgacatgtgaggatatggtgaaaagaccat

SEQ ID NO: 17024 - DNA, 33 bp, Homo sapiens
tttcctttctcatctagcattgtttaattgtcc

SEQ ID NO: 17025 - DNA, 33 bp, Homo sapiens
ctgtctccactttccagcacattcctttctttg

SEQ ID NO: 17026 - DNA, 33 bp, Homo sapiens
ttggggaagacaagcttacaagtagtttcatta

SEQ ID NO: 17027 - DNA, 33 bp, Homo sapiens
aggtgcgcaacaagaaggtacagcctttggagg

SEQ ID NO: 17028 - DNA, 33 bp, Homo sapiens
catctgtggatcatgccctacgctaatatctaa

SEQ ID NO: 17029 - DNA, 33 bp, Homo sapiens
tagctttgcactcaacgaaactccaaatcctaa

SEQ ID NO: 17030 - DNA, 33 bp, Homo sapiens
tgtgtggaaaagaaggtacagtcgttgggaata

SEQ ID NO: 17031 - DNA, 33 bp, Homo sapiens
ctccctgccatcaaaccatatacactttggtga

SEQ ID NO: 17032 - DNA, 33 bp, Homo sapiens
ttgaattagaaagtggtatattcaaggagcaat

SEQ ID NO: 17033 - DNA, 33 bp, Homo sapiens
accttattagactgaaggtagaaaatgtctatt

SEQ ID NO: 17034 - DNA, 33 bp, Homo sapiens
tctgcactgcacttgatgtgtatgtactgacta

SEQ ID NO: 17035 - DNA, 33 bp, Homo sapiens
ggaacaacaaagtggatgtttctggttattttc

SEQ ID NO: 17036 - DNA, 33 bp, Homo sapiens
ttctccactctcaaaatgaagactggtttgcaa

SEQ ID NO: 17037 - DNA, 33 bp, Homo sapiens
cactatttgggtgacaggtaccctaaaagtcca

SEQ ID NO: 17038 - DNA, 33 bp, Homo sapiens
ccagatggtttgtccataaatcagctttcttgt

SEQ ID NO: 17039 - DNA, 33 bp, Homo sapiens
tgaagacaagtaaacttacagattgtcataaat

SEQ ID NO: 17040 - DNA, 33 bp, Homo sapiens
aaatcatcactaaaacgacattgatacacatat

SEQ ID NO: 17041 - DNA, 33 bp, Homo sapiens
tgtcactttgtgataggaatttttcagttgcat

SEQ ID NO: 17042 - DNA, 33 bp, Homo sapiens
tatagaggatgaagcaggtttaaaaattggaca

SEQ ID NO: 17043 - DNA, 33 bp, Homo sapiens
tcatgaagttcaaggacgggcttgattagaacg

SEQ ID NO: 17044 - DNA, 51 bp, Homo sapiens
aaaacattgtggtcactcctaaaaggaacctagcacccattagcagtctct

SEQ ID NO: 17045 - DNA, 33 bp, Homo sapiens
cctaaccttgtgttcatgcgtaggtgtttagtt

SEQ ID NO: 17046 - DNA, 33 bp, Homo sapiens
tatagcaggaaacttctacatttttgttactga

SEQ ID NO: 17047 - DNA, 33 bp, Homo sapiens
tgacaatatgtggatgtacaatcttgcttcttt

SEQ ID NO: 17048 - DNA, 33 bp, Homo sapiens
tgtaagtatgagcaaacacttgtaaaattaaaa

SEQ ID NO: 17049 - DNA, 33 bp, Homo sapiens
atgatctgtaccaggcgatgcttccattccaat

SEQ ID NO: 17050 - DNA, 51 bp, Homo sapiens
aatatatcaggaaccaccgatattcgtgagatatgccatatatttttattt

SEQ ID NO: 17051 - DNA, 33 bp, Homo sapiens
gtccagtccggcgatatgcttgtcgcttgtatt

SEQ ID NO: 17052 - DNA, 33 bp, Homo sapiens
ctgagattcacttatatatactcgaactattca

SEQ ID NO: 17053 - DNA, 33 bp, Homo sapiens
aatcaaacaccacttatgtcatataaatctttt

SEQ ID NO: 17054 - DNA, 33 bp, Homo sapiens
acatagttggtcattatgcacttacaaaaaaag

SEQ ID NO: 17055 - DNA, 51 bp, Homo sapiens
tttttcctatttttaaatgtgattatggtgattacctaagaccattagtgg

SEQ ID NO: 17056 - DNA, 33 bp, Homo sapiens
ccaagagtcactcttatgttgacttctaacatc

SEQ ID NO: 17057 - DNA, 33 bp, Homo sapiens
gcagcaggaaggttaaggactgaaagggctctc

SEQ ID NO: 17058 - DNA, 33 bp, Homo sapiens
aaaatcacctgtgtccgccaatgaatgagtgga

SEQ ID NO: 17059 - DNA, 51 bp, Homo sapiens
atcaatacatgaaaattgaggactgtgtatcaacaaatttagctcaagtgc

SEQ ID NO: 17060 - DNA, 51 bp, Homo sapiens
aaataatatattaatctaagacttcggaaagaaacaaacccacaaataata

SEQ ID NO: 17061 - DNA, 33 bp, Homo sapiens
ccatacaacaaaatggcaagaagtgtgatggtg

SEQ ID NO: 17062 - DNA, 33 bp, Homo sapiens
aaattgttaccaggaaggaaggcaggaagaaga

SEQ ID NO: 17063 - DNA, 33 bp, Homo sapiens
aggaatagtgagagtagagttgggagtgtgaga

SEQ ID NO: 17064 - DNA, 33 bp, Homo sapiens
cttaatcttgtctctccaacattacttgacatc

SEQ ID NO: 17065 - DNA, 33 bp, Homo sapiens
tttgaacttcctgctatataacataactaccca

SEQ ID NO: 17066 - DNA, 33 bp, Homo sapiens
tcatagttttctttggtcattcctagagaattg

SEQ ID NO: 17067 - DNA, 33 bp, Homo sapiens
ccttaagcagtcacagtaatgatgtcatattga

SEQ ID NO: 17068 - DNA, 33 bp, Homo sapiens
ctgctcgtaatatcaggattagagcaagtagga

SEQ ID NO: 17069 - DNA, 33 bp, Homo sapiens
ccctcacttgagtgaatctgcaaattatcacta

SEQ ID NO: 17070 - DNA, 51 bp, Homo sapiens
gttgcctcatactctctcctcacaggaaaaggcagattgaggctgctgggt

SEQ ID NO: 17071 - DNA, 33 bp, Homo sapiens
agctctgcagacctgatagatgtggcaaataca

SEQ ID NO: 17072 - DNA, 33 bp, Homo sapiens
tatcatcagctacaccgaacactcaagtgtagc

SEQ ID NO: 17073 - DNA, 33 bp, Homo sapiens
gatattgaatggtttctaatcttccatattacc

SEQ ID NO: 17074 - DNA, 33 bp, Homo sapiens
ttggccagcaatgaacgaatgattttgcctcac

SEQ ID NO: 17075 - DNA, 33 bp, Homo sapiens
tacaaataggacatcatgaaaactgcatcaaat

SEQ ID NO: 17076 - DNA, 33 bp, Homo sapiens
ttttgacattgcaaacggaaaaattcacttcta

SEQ ID NO: 17077 - DNA, 33 bp, Homo sapiens
actccttctggaaacagctgcttcttatccttc

SEQ ID NO: 17078 - DNA, 33 bp, Homo sapiens
taagacttttacttgatgttgaaattacagtca

SEQ ID NO: 17079 - DNA, 33 bp, Homo sapiens
tggatcactacagtgacgtattacagttgtaca

SEQ ID NO: 17080 - DNA, 33 bp, Homo sapiens
ttatttgtgagccatataatgaagtagtaaaat

SEQ ID NO: 17081 - DNA, 33 bp, Homo sapiens
ttgagtccacactatatgtcaggctgtactagc

SEQ ID NO: 17082 - DNA, 33 bp, Homo sapiens
aaatgagatatagaaatttgttccagactgcac

SEQ ID NO: 17083 - DNA, 33 bp, Homo sapiens
tttaattcatgtgctatctatggagtcttttaa

SEQ ID NO: 17084 - DNA, 33 bp, Homo sapiens
actatagccacgggagtaagatattagaattgg

SEQ ID NO: 17085 - DNA, 33 bp, Homo sapiens
caagcagcataggacatgtagttgaagcaagag

SEQ ID NO: 17086 - DNA, 33 bp, Homo sapiens
catggaaaacaggttatagtggcaaggatagaa

SEQ ID NO: 17087 - DNA, 51 bp, Homo sapiens
ggtttatagagttatactcagttactgacagatctaaaatgaacttcttcc

SEQ ID NO: 17088 - DNA, 33 bp, Homo sapiens
tagatatgagtaggagtatccaggttagacata

SEQ ID NO: 17089 - DNA, 33 bp, Homo sapiens
taaaatcactgaagaattattccactatttatg

SEQ ID NO: 17090 - DNA, 33 bp, Homo sapiens
gccgggcagtaacctataagtatttaccagttc

SEQ ID NO: 17091 - DNA, 33 bp, Homo sapiens
tttactaagttttacacatcaggcaaacctcat

SEQ ID NO: 17092 - DNA, 33 bp, Homo sapiens
tgtactagcagaattattaaagaagttacagat

SEQ ID NO: 17093 - DNA, 33 bp, Homo sapiens
ttgatcttgccagtaagcgagatatttgatgat

SEQ ID NO: 17094 - DNA, 33 bp, Homo sapiens
acaattggatttggaacattgacctaatgtcag

SEQ ID NO: 17095 - DNA, 33 bp, Homo sapiens
catgctatatggcacaccaaaacttaaatgaaa

SEQ ID NO: 17096 - DNA, 33 bp, Homo sapiens
caagcacacctaatgcgcaagtcttgatttcta

SEQ ID NO: 17097 - DNA, 33 bp, Homo sapiens
tgttttcatgaatcaagttacacctttgttcac

SEQ ID NO: 17098 - DNA, 33 bp, Homo sapiens
gattccattatcataagtgcagaggctgagagg

SEQ ID NO: 17099 - DNA, 33 bp, Homo sapiens
ctttgggatttcaggatattaaccgatttataa

SEQ ID NO: 17100 - DNA, 51 bp, Homo sapiens
ccctctggatctcttaattagcctatgtttcttaaataaaaatttattttt

SEQ ID NO: 17101 - DNA, 51 bp, Homo sapiens
gcttttaagatttgagtttaaaatattactgattgaaaaaataaattttta

SEQ ID NO: 17102 - DNA, 33 bp, Homo sapiens
tgtctctgactaaatatgagtaatgtgcacact

SEQ ID NO: 17103 - DNA, 33 bp, Homo sapiens
taacaggagtttatcatggttgttcttatgttc

SEQ ID NO: 17104 - DNA, 33 bp, Homo sapiens
gtagtatctttataacgaagacagtaagattta

SEQ ID NO: 17105 - DNA, 51 bp, Homo sapiens
tgacccattatattaacaaacaccatgtccttgtgctgaagttatggaagt

SEQ ID NO: 17106 - DNA, 33 bp, Homo sapiens
taattactgatttgtgtagtaggaagggctcaa

SEQ ID NO: 17107 - DNA, 33 bp, Homo sapiens
ttttctgactctaatcgccaattcaataagcac

SEQ ID NO: 17108 - DNA, 33 bp, Homo sapiens
agaagtatagtgaggtgaataagaaaacaggct

SEQ ID NO: 17109 - DNA, 33 bp, Homo sapiens
tagggtggaagcctatgaatacgaaggaaaaat

SEQ ID NO: 17110 - DNA, 33 bp, Homo sapiens
aacagtaggctgagtatccaacactgatcataa

SEQ ID NO: 17111 - DNA, 33 bp, Homo sapiens
tatgggatatcaagaagaaaagtaaacatcacc

SEQ ID NO: 17112 - DNA, 33 bp, Homo sapiens
tcctcatttccacccagtcatacacttaaacat

SEQ ID NO: 17113 - DNA, 33 bp, Homo sapiens
atttggcccatttttctcatgctcatggccact

SEQ ID NO: 17114 - DNA, 51 bp, Homo sapiens
gagagtgattactatgtttaattgcgaagtcttacaaaaatttcaaaccag

SEQ ID NO: 17115 - DNA, 33 bp, Homo sapiens
agtcacttatgtagaagagttaaactatcaaaa

SEQ ID NO: 17116 - DNA, 33 bp, Homo sapiens
ataatcactattccaagtcacaaatcagagaag

SEQ ID NO: 17117 - DNA, 33 bp, Homo sapiens
gaatgtttgaataaccggaaggcaggaatctca

SEQ ID NO: 17118 - DNA, 33 bp, Homo sapiens
tttaacagtacctagacgaatgtttgaataacc

SEQ ID NO: 17119 - DNA, 33 bp, Homo sapiens
ttcattttcttcaacaggtgaaactttcagtgg

SEQ ID NO: 17120 - DNA, 33 bp, Homo sapiens
cacaggaagatagacatagaaacaaatttagag

SEQ ID NO: 17121 - DNA, 33 bp, Homo sapiens
gtaatgttgtcaagtctaataaatcactattca

SEQ ID NO: 17122 - DNA, 33 bp, Homo sapiens
tgcaatgcagcatcaattgccagaaagataggt

SEQ ID NO: 17123 - DNA, 33 bp, Homo sapiens
atgtgaacccaagcacgatggggttagccttca

SEQ ID NO: 17124 - DNA, 33 bp, Homo sapiens
catgtttaaaaggcactatttggtaagattccc

SEQ ID NO: 17125 - DNA, 33 bp, Homo sapiens
tcctccttctacgtaaggtatcccatgcttcta

SEQ ID NO: 17126 - DNA, 33 bp, Homo sapiens
gtagcagatgaaaatgtagacttcaagggccat

SEQ ID NO: 17127 - DNA, 51 bp, Homo sapiens
tttctttctctttttttgtggtctttagtaagttgtatgttgtaagtactt

SEQ ID NO: 17128 - DNA, 51 bp, Homo sapiens
tatatatggcagaataaatggttactaagtttgagaatatgtgaattttaa

SEQ ID NO: 17129 - DNA, 33 bp, Homo sapiens
tatgcatcattgattagaagagaaattagcaag

SEQ ID NO: 17130 - DNA, 33 bp, Homo sapiens
agcttatggagtattatgtgtgtagtatagacc

SEQ ID NO: 17131 - DNA, 33 bp, Homo sapiens
tgtgataagtggtccatgaaactatcagactcc

SEQ ID NO: 17132 - DNA, 51 bp, Homo sapiens
gtgagttttcaatttatgaagccaataggttaaggccattttcagcagttg

SEQ ID NO: 17133 - DNA, 33 bp, Homo sapiens
gttgttaagcattggctgatgaaataaaacaag

SEQ ID NO: 17134 - DNA, 33 bp, Homo sapiens
tactttcttcatgccacaatcgaagatgccatg

SEQ ID NO: 17135 - DNA, 33 bp, Homo sapiens
catttgaggtctgttataaataccacaacacat

SEQ ID NO: 17136 - DNA, 33 bp, Homo sapiens
aagtgtaggcttatcagaccttaaagcatctga

SEQ ID NO: 17137 - DNA, 33 bp, Homo sapiens
aagatgactaatgaaggaattagaagcactgag

SEQ ID NO: 17138 - DNA, 33 bp, Homo sapiens
gtcctaagagatcagatagctttctgcaattaa

SEQ ID NO: 17139 - DNA, 33 bp, Homo sapiens
aagaacctaagaattcgcccctgatattgcaaa

SEQ ID NO: 17140 - DNA, 33 bp, Homo sapiens
aatctggaagacttcagtaagttgtaaagattt

SEQ ID NO: 17141 - DNA, 33 bp, Homo sapiens
ctgaagcccagaaagatgtgcaattacccaaga

SEQ ID NO: 17142 - DNA, 33 bp, Homo sapiens
aggagagagaagaatggaatcaaacttacagac

SEQ ID NO: 17143 - DNA, 33 bp, Homo sapiens
gactgcaagaaatttatggtatagcgtcactag

SEQ ID NO: 17144 - DNA, 33 bp, Homo sapiens
attgtatcacttaacagtagagcctaaacagta

SEQ ID NO: 17145 - DNA, 33 bp, Homo sapiens
gtaattacttaagggactagaaatgtttttgag

SEQ ID NO: 17146 - DNA, 33 bp, Homo sapiens
tatgctctttgccgtcgaactgctaaatattgt

SEQ ID NO: 17147 - DNA, 33 bp, Homo sapiens
ttccaatttggtaacatgaagggaacagtggtt

SEQ ID NO: 17148 - DNA, 33 bp, Homo sapiens
agcattaaatgagatattacactatgacagagt

SEQ ID NO: 17149 - DNA, 33 bp, Homo sapiens
cagtacagccttgctaggaagcccacaaaagca

SEQ ID NO: 17150 - DNA, 33 bp, Homo sapiens
gaggcatgaaaatacattggaaagcaggctcat

SEQ ID NO: 17151 - DNA, 51 bp, Homo sapiens
atcaaacactatgtataatttcaaattgtagcattaataggagatacttca

SEQ ID NO: 17152 - DNA, 33 bp, Homo sapiens
gtgatggcagtccatggataatttgcacttgtt

SEQ ID NO: 17153 - DNA, 33 bp, Homo sapiens
gaaagcaatcacagacgatatataggtgaatat

SEQ ID NO: 17154 - DNA, 33 bp, Homo sapiens
acaagtgactaagttacagagagttatgaataa

SEQ ID NO: 17155 - DNA, 33 bp, Homo sapiens
ggagagcactcaggtagcaacacaatagatctg

SEQ ID NO: 17156 - DNA, 33 bp, Homo sapiens
ctaattatccagcttgtaagagtccctgacatc

SEQ ID NO: 17157 - DNA, 33 bp, Homo sapiens
cttgatctaaacaggaggttcagtcaatcacta

SEQ ID NO: 17158 - DNA, 33 bp, Homo sapiens
cttgagaatttccaagtctaggtaagagcaaca

SEQ ID NO: 17159 - DNA, 33 bp, Homo sapiens
tcaacatgaggacaatgaagttgaagaccttta

SEQ ID NO: 17160 - DNA, 33 bp, Homo sapiens
gcatattggtaggcaatgggtatttctacaatg

SEQ ID NO: 17161 - DNA, 33 bp, Homo sapiens
gatctgtaacctggacgactaaaacatggtttc

SEQ ID NO: 17162 - DNA, 33 bp, Homo sapiens
acaaaagacagcaaacgagtggaacaacttgct

SEQ ID NO: 17163 - DNA, 33 bp, Homo sapiens
ggatagaagacattacggggtagactcacattt

SEQ ID NO: 17164 - DNA, 33 bp, Homo sapiens
cctcattatcttgacttaaacctgtctctgtcc

SEQ ID NO: 17165 - DNA, 33 bp, Homo sapiens
aagaacaagttcctcctcgctcacatatgtagt

SEQ ID NO: 17166 - DNA, 33 bp, Homo sapiens
tgttacctctcatcaagttcgacttaatgttat

SEQ ID NO: 17167 - DNA, 33 bp, Homo sapiens
aacaaacaaaaccacttaccaaattgatgcata

SEQ ID NO: 17168 - DNA, 33 bp, Homo sapiens
agggaggacaccgaggcatatatgatgcagatt

SEQ ID NO: 17169 - DNA, 33 bp, Homo sapiens
ccattcataaatgtaatgccagggagtgccaca

SEQ ID NO: 17170 - DNA, 33 bp, Homo sapiens
gagtgccacagctatgcataaaagtcaagcagg

SEQ ID NO: 17171 - DNA, 33 bp, Homo sapiens
cttcctattctgaccatccagttatgctgtgat

SEQ ID NO: 17172 - DNA, 33 bp, Homo sapiens
ctgttggtcattcagtgaatatttatggagcac

SEQ ID NO: 17173 - DNA, 33 bp, Homo sapiens
cttttacactagaaaatctcacaaagtagtcaa

SEQ ID NO: 17174 - DNA, 33 bp, Homo sapiens
tttgatcacttcttactaattctactgctgatt

SEQ ID NO: 17175 - DNA, 33 bp, Homo sapiens
acttccaggttctaaagtgtaatggttaaaaga

SEQ ID NO: 17176 - DNA, 33 bp, Homo sapiens
cagaaaaatgaatgactaatgtgaaaggtaaag

SEQ ID NO: 17177 - DNA, 33 bp, Homo sapiens
ctacataaacttggaggaaggacaagactatca

SEQ ID NO: 17178 - DNA, 33 bp, Homo sapiens
aaagtaggcaagaaaaggagttgtagataatat

SEQ ID NO: 17179 - DNA, 33 bp, Homo sapiens
tcacctcctcattttagagttaaaaatactgag

SEQ ID NO: 17180 - DNA, 33 bp, Homo sapiens
aatcctgccaaaaaaaccaattgtgagcatgtc

SEQ ID NO: 17181 - DNA, 33 bp, Homo sapiens
gtttgaccaaacaaccgagcaccataatctagc

SEQ ID NO: 17182 - DNA, 33 bp, Homo sapiens
tattttgcgatacaaatttaatcacttaggtgt

SEQ ID NO: 17183 - DNA, 33 bp, Homo sapiens
tgtcattttaatagtcgccaaggaagaaaaaat

SEQ ID NO: 17184 - DNA, 33 bp, Homo sapiens
catatttcaataggttgaaacagtcgaccagat

SEQ ID NO: 17185 - DNA, 33 bp, Homo sapiens
aaggacttgagcccaactgtccctgcaaatcct

SEQ ID NO: 17186 - DNA, 33 bp, Homo sapiens
atcttgctccacattcgcagttgtaagtgcctt

SEQ ID NO: 17187 - DNA, 33 bp, Homo sapiens
cattaaaatatctcacgaaaaggttcttaattc

SEQ ID NO: 17188 - DNA, 33 bp, Homo sapiens
catatccacatatacttacacaaatggatgttt

SEQ ID NO: 17189 - DNA, 33 bp, Homo sapiens
ataaagtcgatcaacatacaccattttatttcc

SEQ ID NO: 17190 - DNA, 33 bp, Homo sapiens
tgcctaggtttaagcagagttctatcttgaaca

SEQ ID NO: 17191 - DNA, 33 bp, Homo sapiens
actcaggagctaggaagggtattctgatactgc

SEQ ID NO: 17192 - DNA, 33 bp, Homo sapiens
ccctaagctgactttagagattcttcatttgtt

SEQ ID NO: 17193 - DNA, 33 bp, Homo sapiens
tggatgttcttaatcatctacaaggaatccatg

SEQ ID NO: 17194 - DNA, 33 bp, Homo sapiens
gttataacctctgggggcactcaccgttagcca

SEQ ID NO: 17195 - DNA, 51 bp, Homo sapiens
taatctcctctcatgtggtaagttatgatagaattatttaaaaaattgctg

SEQ ID NO: 17196 - DNA, 33 bp, Homo sapiens
ccctagcataacacaccgcagcgcaaccctaat

SEQ ID NO: 17197 - DNA, 33 bp, Homo sapiens
ggtacccacgttgtaggactgttgttaagatta

SEQ ID NO: 17198 - DNA, 33 bp, Homo sapiens
tcagtcctcactggacgccccgcatctatacct

SEQ ID NO: 17199 - DNA, 33 bp, Homo sapiens
gcagccttgaggaaaggagtcacaactcaaaga

SEQ ID NO: 17200 - DNA, 33 bp, Homo sapiens
tcctttgatgcaaccatcagtgccaagctttga

SEQ ID NO: 17201 - DNA, 51 bp, Homo sapiens
gctggcaacgtcttccatcttttcataagcagaacacaggcatcgcagatg

SEQ ID NO: 17202 - DNA, 51 bp, Homo sapiens
atggcctttataaataatcccactatgtatcttctttttcagtctgtgaga

SEQ ID NO: 17203 - DNA, 51 bp, Homo sapiens
tatagtcattttagttcaaagtctgcaattaaaactgcaaagtaatttcct

SEQ ID NO: 17204 - DNA, 33 bp, Homo sapiens
cacatgaaccaagtccgcagagagtcatcagtg

SEQ ID NO: 17205 - DNA, 33 bp, Homo sapiens
gaggatttgattttcatcagtctttatgagacc

SEQ ID NO: 17206 - DNA, 33 bp, Homo sapiens
aaacatgataatacactgctttatacagacata

SEQ ID NO: 17207 - DNA, 33 bp, Homo sapiens
aaaacaagttactgaacgcgagatctacttaaa

SEQ ID NO: 17208 - DNA, 33 bp, Homo sapiens
tctgcgaattaagaactgctacattagaggagc

SEQ ID NO: 17209 - DNA, 33 bp, Homo sapiens
tgatgattagagcaaatttgtcagttaaaaaat

SEQ ID NO: 17210 - DNA, 33 bp, Homo sapiens
gtgtgaaatcaactgctaatcagttatgtgttt

SEQ ID NO: 17211 - DNA, 33 bp, Homo sapiens
ttttgcaccttcctcattaaattgggtccttaa

SEQ ID NO: 17212 - DNA, 33 bp, Homo sapiens
gtttgtgagagtaatccacattgacacttatag

SEQ ID NO: 17213 - DNA, 51 bp, Homo sapiens
catagctcgtttatatcaataatgcggattaaaatatttgctaatgaactc

SEQ ID NO: 17214 - DNA, 51 bp, Homo sapiens
attggggatagaaggagatagactcgacaggcttaccacctggatgtgagg

SEQ ID NO: 17215 - DNA, 33 bp, Homo sapiens
tgttagaatgggggtattaaactaagaagtaat

SEQ ID NO: 17216 - DNA, 33 bp, Homo sapiens
tacagtatagggtcaacttctgtagccagctgg

SEQ ID NO: 17217 - DNA, 51 bp, Homo sapiens
tgtgtttcctgatagaagcatttctgcattaaacatgaggacttccaaggt

SEQ ID NO: 17218 - DNA, 33 bp, Homo sapiens
ctccagtgattccacaggttcactcaatcacta

SEQ ID NO: 17219 - DNA, 51 bp, Homo sapiens
gccatcttactaaggtaatcagaatgagaaaaaactgaaaattgatgtcat

SEQ ID NO: 17220 - DNA, 33 bp, Homo sapiens
acctcctgctatcatggaagacaaattatattt

SEQ ID NO: 17221 - DNA, 33 bp, Homo sapiens
caactgaacgttacactgcaatcctgggcttgg

SEQ ID NO: 17222 - DNA, 33 bp, Homo sapiens
cccctggtccttagtagagcagacgagtcccct

SEQ ID NO: 17223 - DNA, 51 bp, Homo sapiens
attgaaaataaagaagttgtatgaatgaatgccatcatattttttcctcct

SEQ ID NO: 17224 - DNA, 51 bp, Homo sapiens
tgatgggacctaaaagtttactctggaaatgtacgttaaagcccataaata

SEQ ID NO: 17225 - DNA, 33 bp, Homo sapiens
gtagagaacatggcaagtgtcacatagacttta

SEQ ID NO: 17226 - DNA, 51 bp, Homo sapiens
aactgtttttccctatcttcaacaatgtcgttctctgcttcccatgtgtga

SEQ ID NO: 17227 - DNA, 33 bp, Homo sapiens
acctccaaagagtccattgattactgatttgtt

SEQ ID NO: 17228 - DNA, 33 bp, Homo sapiens
atatcaagtgtttatatggaaaggatagcaata

SEQ ID NO: 17229 - DNA, 33 bp, Homo sapiens
tatactttaagactcatgttctcaaacttcaga

SEQ ID NO: 17230 - DNA, 33 bp, Homo sapiens
atagtaagctcctacacctttatgatgtttagt

SEQ ID NO: 17231 - DNA, 33 bp, Homo sapiens
accagagctttgttaattacaacctagactatg

SEQ ID NO: 17232 - DNA, 33 bp, Homo sapiens
acagagataaaaaatatgtggttcctgtctcca

SEQ ID NO: 17233 - DNA, 33 bp, Homo sapiens
tgattttggtttcatatgagctactgttgcaat

SEQ ID NO: 17234 - DNA, 33 bp, Homo sapiens
tttataaaatcagtaacaggaaagctccaaaac

SEQ ID NO: 17235 - DNA, 33 bp, Homo sapiens
gttgataatactttgctgaacttattccctggg

SEQ ID NO: 17236 - DNA, 33 bp, Homo sapiens
accttcaaagactgcatccttttcgatcttgga

SEQ ID NO: 17237 - DNA, 33 bp, Homo sapiens
atgtgtcttctctgtatcttccactgtttacat

SEQ ID NO: 17238 - DNA, 33 bp, Homo sapiens
agtcctagctggtgaagatgactccctttggaa

SEQ ID NO: 17239 - DNA, 33 bp, Homo sapiens
tgcattaagaagcaaatgttcaaagccttgaaa

SEQ ID NO: 17240 - DNA, 51 bp, Homo sapiens
ttattccacttgattttcaaaacaagttaatgatgtaggtattgttattct

SEQ ID NO: 17241 - DNA, 33 bp, Homo sapiens
gaataaaattcagaatgacggatttggtggtgc

SEQ ID NO: 17242 - DNA, 33 bp, Homo sapiens
aaggaggctaataaaagcacacatagtattgag

SEQ ID NO: 17243 - DNA, 33 bp, Homo sapiens
tgtcttgtagtatgacgccaaattgtagctaat

SEQ ID NO: 17244 - DNA, 33 bp, Homo sapiens
tcccagagttttgggagaagataatgtttcttt

SEQ ID NO: 17245 - DNA, 33 bp, Homo sapiens
ctatgctgactgatacggagccctaacagggga

SEQ ID NO: 17246 - DNA, 51 bp, Homo sapiens
tgtttcaggatagccaaattggataggtagtaaggacaagtgtttttttag

SEQ ID NO: 17247 - DNA, 33 bp, Homo sapiens
gagaatattcttgctcgagaggaatgttgcata

SEQ ID NO: 17248 - DNA, 33 bp, Homo sapiens
ggtaacagaattcagaggaaagacatcaaatgc

SEQ ID NO: 17249 - DNA, 51 bp, Homo sapiens
caatgatgatgagcttttcttcatatgattgttggccgcatagatgtcttc

SEQ ID NO: 17250 - DNA, 33 bp, Homo sapiens
ccatacttaacctaaagagccaacagaggtcaa

SEQ ID NO: 17251 - DNA, 33 bp, Homo sapiens
cagatatatgtctagagatggactgcctaaact

SEQ ID NO: 17252 - DNA, 33 bp, Homo sapiens
tcactctagtttgtcagtatccctttgaaagtg

SEQ ID NO: 17253 - DNA, 33 bp, Homo sapiens
gtctttaagtactttataccttgtaatgcatat

SEQ ID NO: 17254 - DNA, 33 bp, Homo sapiens
agctcatggtccaagatggctgctccagttcta

SEQ ID NO: 17255 - DNA, 33 bp, Homo sapiens
cacctcctacctcatatgcagaccgtcgaaatc

SEQ ID NO: 17256 - DNA, 33 bp, Homo sapiens
aaaacaacagcaccaagtaagatgagttgacag

SEQ ID NO: 17257 - DNA, 33 bp, Homo sapiens
agaccagacgaattcctagtgtgtggcttggta

SEQ ID NO: 17258 - DNA, 33 bp, Homo sapiens
gaactactctaaacagcagattgacaaggtttt

SEQ ID NO: 17259 - DNA, 33 bp, Homo sapiens
agggcttaaagtacaacctctctctgacagatg

SEQ ID NO: 17260 - DNA, 33 bp, Homo sapiens
tggaggcaggacaggggcagactggagctggat

SEQ ID NO: 17261 - DNA, 33 bp, Homo sapiens
agaacatgtattcaccgatttggaccaggttta

SEQ ID NO: 17262 - DNA, 33 bp, Homo sapiens
ttagaatcgattttaagtggtattagccagtgg

SEQ ID NO: 17263 - DNA, 33 bp, Homo sapiens
aacactatgcaatttataacacctttccacata

SEQ ID NO: 17264 - DNA, 33 bp, Homo sapiens
tcacaaccactttggagcccatcggagagcctc

SEQ ID NO: 17265 - DNA, 33 bp, Homo sapiens
aggtaattcagcaagatctaaaggcaccttcct

SEQ ID NO: 17266 - DNA, 33 bp, Homo sapiens
gctggagtgatgataagcttatggagaagtggt

SEQ ID NO: 17267 - DNA, 51 bp, Homo sapiens
atagaccccaacacgacgagcattctctattcgatttttccatcttctgtg

SEQ ID NO: 17268 - DNA, 33 bp, Homo sapiens
actgattaacgtgaaatgggcatccaaatggta

SEQ ID NO: 17269 - DNA, 33 bp, Homo sapiens
atttgttattgaaagataatttgaagtgtggtt

SEQ ID NO: 17270 - DNA, 33 bp, Homo sapiens
cttgtcaaacatattcgcataaacgcttctcat

SEQ ID NO: 17271 - DNA, 33 bp, Homo sapiens
tctgagagtgaaaagatggagctgaaacttaag

SEQ ID NO: 17272 - DNA, 33 bp, Homo sapiens
atcagtatcatttttggattatcttctataaat

SEQ ID NO: 17273 - DNA, 33 bp, Homo sapiens
tatgtggagcactatggaaagagaaaggagata

SEQ ID NO: 17274 - DNA, 33 bp, Homo sapiens
cattttgagacagttatggttggaaaattttct

SEQ ID NO: 17275 - DNA, 33 bp, Homo sapiens
agttacaattgtgcaatagaggaccgagagaca

SEQ ID NO: 17276 - DNA, 33 bp, Homo sapiens
ggcctactagagcaaggcaggctttctcagtcc

SEQ ID NO: 17277 - DNA, 33 bp, Homo sapiens
attaacattatgttcagccaatcacttttgaga

SEQ ID NO: 17278 - DNA, 33 bp, Homo sapiens
gcaggcaagtttgctatggctgtttcatttctg

SEQ ID NO: 17279 - DNA, 33 bp, Homo sapiens
cctttcttcgcttatcgatctcctagcatgcag

SEQ ID NO: 17280 - DNA, 33 bp, Homo sapiens
ttgcatatattatccaggtttagagatgggaaa

SEQ ID NO: 17281 - DNA, 33 bp, Homo sapiens
ctctggtgagttccaatagtcctacagggtttc

SEQ ID NO: 17282 - DNA, 33 bp, Homo sapiens
ctcttgataatctacattcgattgctacatttt

SEQ ID NO: 17283 - DNA, 33 bp, Homo sapiens
agacttggcattagtaggtttctgttcaagttc

SEQ ID NO: 17284 - DNA, 51 bp, Homo sapiens
tagatgcttttactggtccctttcattcctaaaattatatgattctaaaca

SEQ ID NO: 17285 - DNA, 33 bp, Homo sapiens
tactcccagaggttgatcgataggtgaatggtc

SEQ ID NO: 17286 - DNA, 33 bp, Homo sapiens
tgtttgatattcaagatggtatttgtcatttgg

SEQ ID NO: 17287 - DNA, 33 bp, Homo sapiens
gttttgcttttacttcgctggttgctaccactt

SEQ ID NO: 17288 - DNA, 33 bp, Homo sapiens
acaggaggcacacaaattcctattggattgtgg

SEQ ID NO: 17289 - DNA, 51 bp, Homo sapiens
ttctcttgagtgaagattcccataagtgttgctttgtaaatgtgtccaggg

SEQ ID NO: 17290 - DNA, 33 bp, Homo sapiens
ggaaactgagaggcaggaaagaattgtccgtgc

SEQ ID NO: 17291 - DNA, 33 bp, Homo sapiens
tatttaagcacttaaggaatctcaggcatttta

SEQ ID NO: 17292 - DNA, 33 bp, Homo sapiens
ctctgtgtaaatacaagcgtaactggcttctaa

SEQ ID NO: 17293 - DNA, 33 bp, Homo sapiens
cgttcctagaagagacggagagcgctgactgaa

SEQ ID NO: 17294 - DNA, 33 bp, Homo sapiens
cctttgttccgcacactgagccagtaatatatt

SEQ ID NO: 17295 - DNA, 33 bp, Homo sapiens
agtcatccaattcctatgctgggtttgacctac

SEQ ID NO: 17296 - DNA, 33 bp, Homo sapiens
ctctttgctgagctactgtaaacatacaccatg

SEQ ID NO: 17297 - DNA, 33 bp, Homo sapiens
ctccctctgtctttgggactaagaatggatctt

SEQ ID NO: 17298 - DNA, 33 bp, Homo sapiens
tggaggtagtttgttatgctgcatatgcacaat

SEQ ID NO: 17299 - DNA, 33 bp, Homo sapiens
agttccttccatcaacggtctatttgcccatcc

SEQ ID NO: 17300 - DNA, 33 bp, Homo sapiens
tgcccttctggaactcgcagtataaccatatgt

SEQ ID NO: 17301 - DNA, 33 bp, Homo sapiens
gttgctcaatatgtgaggcaacattttaaaaca

SEQ ID NO: 17302 - DNA, 33 bp, Homo sapiens
attccagcctctgcaagttcgtcccgcagtttt

SEQ ID NO: 17303 - DNA, 33 bp, Homo sapiens
acaggtctaaagtgctgagaattatcctgcaca

SEQ ID NO: 17304 - DNA, 33 bp, Homo sapiens
gttctgtcattggacatgaaatttagtcaaaag

SEQ ID NO: 17305 - DNA, 33 bp, Homo sapiens
ttggccacttaagcaatggtcagaagtccaggc

SEQ ID NO: 17306 - DNA, 33 bp, Homo sapiens
ccagcatattctatccgcaacatttctcagtag

SEQ ID NO: 17307 - DNA, 33 bp, Homo sapiens
cagtgacagatttaacggattaaaatttcctgt

SEQ ID NO: 17308 - DNA, 33 bp, Homo sapiens
ccccccagaggtatgatcacagctacaactaag

SEQ ID NO: 17309 - DNA, 33 bp, Homo sapiens
cacagggttgctaaatcaaaaagacaggattct

SEQ ID NO: 17310 - DNA, 33 bp, Homo sapiens
ttccaatcttgtacacgggggaaagatgaagaa

SEQ ID NO: 17311 - DNA, 33 bp, Homo sapiens
cctaactaatacaacatctaaatcatcttatgt

SEQ ID NO: 17312 - DNA, 33 bp, Homo sapiens
cagaccccaaaagccatcatattataggattcc

SEQ ID NO: 17313 - DNA, 51 bp, Homo sapiens
ggctcacctgtgccttgaacattcagtgaagaagctgaaccaacacaggtt

SEQ ID NO: 17314 - DNA, 33 bp, Homo sapiens
gtgatatctgcttgctgaaaaggatctggtgat

SEQ ID NO: 17315 - DNA, 33 bp, Homo sapiens
tgtgaagttttctgggtagagcacccaaggcca

SEQ ID NO: 17316 - DNA, 33 bp, Homo sapiens
ctatttatttaaccaacccctattgtgagatgt

SEQ ID NO: 17317 - DNA, 33 bp, Homo sapiens
atggggaagtcttgggcagataactcaatgccc

SEQ ID NO: 17318 - DNA, 33 bp, Homo sapiens
agaaagtagtcagatatgctaagttctcagcca

SEQ ID NO: 17319 - DNA, 33 bp, Homo sapiens
atttgtcagttgatgagaatctgagtggtttct

SEQ ID NO: 17320 - DNA, 33 bp, Homo sapiens
ctgtgttcatatgaaatgtccatgataggccaa

SEQ ID NO: 17321 - DNA, 33 bp, Homo sapiens
ttagccagtttgtcctgaacattgagctccgtg

SEQ ID NO: 17322 - DNA, 33 bp, Homo sapiens
ggtggacacatacgtagaaattcactgggctat

SEQ ID NO: 17323 - DNA, 33 bp, Homo sapiens
ctatgcatatttatacgacagctcatcaggatt

SEQ ID NO: 17324 - DNA, 33 bp, Homo sapiens
gagggaaccagagggggcacctaacgtccgtgt

SEQ ID NO: 17325 - DNA, 33 bp, Homo sapiens
ctactgggacctagacgatgtgagatcatctgt

SEQ ID NO: 17326 - DNA, 33 bp, Homo sapiens
cacaggggaaatcaccgcactataattctgtgt

SEQ ID NO: 17327 - DNA, 33 bp, Homo sapiens
tttctgctgccacgtcgagggtttatttttgag

SEQ ID NO: 17328 - DNA, 33 bp, Homo sapiens
cataggtacctgataagcatcatcacatttagt

SEQ ID NO: 17329 - DNA, 33 bp, Homo sapiens
gctccatgagcgtagagatcttgcccgtcctgt

SEQ ID NO: 17330 - DNA, 51 bp, Homo sapiens
agaaaaaacattgataaggtccatagctgaatggaaggaacaaaatacaaa

SEQ ID NO: 17331 - DNA, 33 bp, Homo sapiens
ccgaagggccttttaagtctaaggagctttgtc

SEQ ID NO: 17332 - DNA, 33 bp, Homo sapiens
tcatggctgtgataactgtcattattttgttcc

SEQ ID NO: 17333 - DNA, 33 bp, Homo sapiens
gatttcagacttaacagcttctagaattgtgag

SEQ ID NO: 17334 - DNA, 33 bp, Homo sapiens
aggaaaaactagcccatagccagagatggtacc

SEQ ID NO: 17335 - DNA, 33 bp, Homo sapiens
atgaaagtcctagagaggtgtgtaccttacagt

SEQ ID NO: 17336 - DNA, 33 bp, Homo sapiens
aatacagccgtggcacggatctcagaggcataa

SEQ ID NO: 17337 - DNA, 33 bp, Homo sapiens
ctcgtgtgccatccattaagtgcaagatggctg

SEQ ID NO: 17338 - DNA, 33 bp, Homo sapiens
gggaaagtggacctcagcttacccaacattggt

SEQ ID NO: 17339 - DNA, 33 bp, Homo sapiens
acagctgttccatctcgattacaaagctctgaa

SEQ ID NO: 17340 - DNA, 33 bp, Homo sapiens
cgcccagcctgagctatgttttagatgtgcatt

SEQ ID NO: 17341 - DNA, 33 bp, Homo sapiens
actcctcccataaaacgcttctccaaatttctg

SEQ ID NO: 17342 - DNA, 33 bp, Homo sapiens
ggccaactctgaggacggcactccaaagggtgg

SEQ ID NO: 17343 - DNA, 33 bp, Homo sapiens
gtgccccgtgcagtgagagccgctttcctgcag

SEQ ID NO: 17344 - DNA, 33 bp, Homo sapiens
aaatgtgcttgacagatatttcaagtacaaaaa

SEQ ID NO: 17345 - DNA, 33 bp, Homo sapiens
gctttcttttcatttatctaatttcatcaattg

SEQ ID NO: 17346 - DNA, 33 bp, Homo sapiens
caggcagagaagaaaagttggaggttgggggcg

SEQ ID NO: 17347 - DNA, 33 bp, Homo sapiens
tacaaggcacaggacggccctgcaatgagaaat

SEQ ID NO: 17348 - DNA, 33 bp, Homo sapiens
gacctcttgattaagttacaccattattatgaa

SEQ ID NO: 17349 - DNA, 33 bp, Homo sapiens
tgcagggttgttgagaggaaccaatgagttaat

SEQ ID NO: 17350 - DNA, 33 bp, Homo sapiens
acttggcacccattcagtcatacatgtctcaga

SEQ ID NO: 17351 - DNA, 33 bp, Homo sapiens
tttcatgcaaaccacatgacctggtctaagcct

SEQ ID NO: 17352 - DNA, 33 bp, Homo sapiens
aatcagtgcttctttcgaacttaaatgattctc

SEQ ID NO: 17353 - DNA, 33 bp, Homo sapiens
ggcatccaggcttgtatcttgacagtctgactc

SEQ ID NO: 17354 - DNA, 33 bp, Homo sapiens
tcacagccaggtcaccggaaacttcccacagat

SEQ ID NO: 17355 - DNA, 33 bp, Homo sapiens
gtggggaagggattcatggtctcaccttcgcat

SEQ ID NO: 17356 - DNA, 33 bp, Homo sapiens
cttacctaactgcccagtctaagattccctgta

SEQ ID NO: 17357 - DNA, 33 bp, Homo sapiens
tatatgcttaaacttctagtccaccttgaatat

SEQ ID NO: 17358 - DNA, 33 bp, Homo sapiens
cctgctttttcacgtctagggagtgctttgctc

SEQ ID NO: 17359 - DNA, 33 bp, Homo sapiens
gaaggccatgttgtaacctactgaatagaacat

SEQ ID NO: 17360 - DNA, 33 bp, Homo sapiens
aggacttgacccttcccacagtatctctctacc

SEQ ID NO: 17361 - DNA, 33 bp, Homo sapiens
cagatcaagaaccaacggcccatgtgttacttt

SEQ ID NO: 17362 - DNA, 33 bp, Homo sapiens
cggtgtctcacacaaatcctcagtggtggttat

SEQ ID NO: 17363 - DNA, 33 bp, Homo sapiens
tcaccttatagtatcataatcagaagttttgct

SEQ ID NO: 17364 - DNA, 33 bp, Homo sapiens
ctctacattgcttgatgactctgagcttcattt

SEQ ID NO: 17365 - DNA, 33 bp, Homo sapiens
tccatccaggaaagacggtagcacctgaaaatc

SEQ ID NO: 17366 - DNA, 33 bp, Homo sapiens
gttgcaaagattaaacgagtgattcttaacccc

SEQ ID NO: 17367 - DNA, 33 bp, Homo sapiens
ctatctgtttcatttatgtattgttgcataacc

SEQ ID NO: 17368 - DNA, 33 bp, Homo sapiens
gtgatggagcccccaatagttgcctgagtcttg

SEQ ID NO: 17369 - DNA, 33 bp, Homo sapiens
ggttaagagaaagtatgagttaacacgggtgag

SEQ ID NO: 17370 - DNA, 33 bp, Homo sapiens
aagatggcaacagagagagtctacttgcaagac

SEQ ID NO: 17371 - DNA, 33 bp, Homo sapiens
caggacctctataccagctaagaaacattctta

SEQ ID NO: 17372 - DNA, 33 bp, Homo sapiens
cattatatctggcacctgccttcatctgtagcc

SEQ ID NO: 17373 - DNA, 33 bp, Homo sapiens
atcaggcatttactatgagctagattttgtgct

SEQ ID NO: 17374 - DNA, 33 bp, Homo sapiens
gatgcttgcacccagtgaaccatcagtacccag

SEQ ID NO: 17375 - DNA, 33 bp, Homo sapiens
tcccagtttagaggaatttactctgctacaccc

SEQ ID NO: 17376 - DNA, 33 bp, Homo sapiens
ggtgctctatccaggattcagcacaatattaca

SEQ ID NO: 17377 - DNA, 33 bp, Homo sapiens
tggagtaaagtctaagtatcttaccccagaatt

SEQ ID NO: 17378 - DNA, 33 bp, Homo sapiens
ttcttgatcgtccttcgcctgacatcatggtaa

SEQ ID NO: 17379 - DNA, 33 bp, Homo sapiens
ctgctcctgcaaccactactaaaaccctggctt

SEQ ID NO: 17380 - DNA, 33 bp, Homo sapiens
agcggttgcccttgacgctcaactctcactagg

SEQ ID NO: 17381 - DNA, 33 bp, Homo sapiens
caaataaggccgatgataggaggtaagaggtca

SEQ ID NO: 17382 - DNA, 33 bp, Homo sapiens
acattatcagttgaaacaatccgctctaggata

SEQ ID NO: 17383 - DNA, 33 bp, Homo sapiens
catctgttggttttcagtatccgttcacccttc

SEQ ID NO: 17384 - DNA, 33 bp, Homo sapiens
accacggaaaccgatcgaaaagtatcagccatg

SEQ ID NO: 17385 - DNA, 33 bp, Homo sapiens
gtatcagccatgatgatgaatgtagaacactcg

SEQ ID NO: 17386 - DNA, 33 bp, Homo sapiens
aacccagtgagcatttgaaaaccctgtaagtct

SEQ ID NO: 17387 - DNA, 33 bp, Homo sapiens
gtcttggtcaaacttatctcctctgccctgtat

SEQ ID NO: 17388 - DNA, 33 bp, Homo sapiens
tccctcttattcactgtacctgatggtagtttt

SEQ ID NO: 17389 - DNA, 33 bp, Homo sapiens
atttgaataacgagaaggaggcagagaccagca

SEQ ID NO: 17390 - DNA, 33 bp, Homo sapiens
ctaagtgtggttcatggacaggtaatatcagcg

SEQ ID NO: 17391 - DNA, 33 bp, Homo sapiens
tggcatttctgaacatgaggtgctgaagtgaag

SEQ ID NO: 17392 - DNA, 33 bp, Homo sapiens
gcatccgtaggcgtcatgctctttctccaaggc

SEQ ID NO: 17393 - DNA, 33 bp, Homo sapiens
atcaacttgattgacagctcagtgtaaagtggt

SEQ ID NO: 17394 - DNA, 33 bp, Homo sapiens
gatcattgcaaggaaacgtagaagtactagata

SEQ ID NO: 17395 - DNA, 33 bp, Homo sapiens
gtggtagcttccaggagtcaagagtcaagatga

SEQ ID NO: 17396 - DNA, 33 bp, Homo sapiens
gaaactggacatgtacggaaggggctgcccgat

SEQ ID NO: 17397 - DNA, 33 bp, Homo sapiens
atacaagccacaatactgatgaatctcaaaaac

SEQ ID NO: 17398 - DNA, 33 bp, Homo sapiens
tgcatcactatcagtatagttaagcctgtgtcg

SEQ ID NO: 17399 - DNA, 33 bp, Homo sapiens
ttaattttagtaactatcatgtcctgaaggtta

SEQ ID NO: 17400 - DNA, 33 bp, Homo sapiens
aatcttcagtgggataggatgggctataaagaa

SEQ ID NO: 17401 - DNA, 33 bp, Homo sapiens
agattacaacaaaacagggataaatgcacttcc

SEQ ID NO: 17402 - DNA, 33 bp, Homo sapiens
tgattgatggtagagatggggtcttgatgtgtg

SEQ ID NO: 17403 - DNA, 33 bp, Homo sapiens
taaaatgccagtctcagaaggttgttgtttaag

SEQ ID NO: 17404 - DNA, 33 bp, Homo sapiens
tagtggttgccttggagattacaagtaacatct

SEQ ID NO: 17405 - DNA, 33 bp, Homo sapiens
gaaacaccggcattagtagattgcagagttcta

SEQ ID NO: 17406 - DNA, 33 bp, Homo sapiens
gggctctctggaacaagtggtgtccctcctgac

SEQ ID NO: 17407 - DNA, 33 bp, Homo sapiens
agcccagtccctttacgccgcagacattcagct

SEQ ID NO: 17408 - DNA, 33 bp, Homo sapiens
aaaaggaaatccatcagtagtgtctactaacat

SEQ ID NO: 17409 - DNA, 33 bp, Homo sapiens
ggccatgagaaaagaagacagacagggacaaca

SEQ ID NO: 17410 - DNA, 51 bp, Homo sapiens
aaaactgtcttaaaagaaaatctattccatgctctatctttcagagaccta

SEQ ID NO: 17411 - DNA, 33 bp, Homo sapiens
ggtacaaggatgaacatgtcattgaacaattac

SEQ ID NO: 17412 - DNA, 33 bp, Homo sapiens
agagtcagggttcaaatataggcgtgtctgacc

SEQ ID NO: 17413 - DNA, 33 bp, Homo sapiens
accagataatctgacagtaatcagtgtgttagt

SEQ ID NO: 17414 - DNA, 33 bp, Homo sapiens
ttcattctctcttttaggcaaatgtcatggtta

SEQ ID NO: 17415 - DNA, 33 bp, Homo sapiens
ctcctcagccgcaccatccttccttgtcactca

SEQ ID NO: 17416 - DNA, 33 bp, Homo sapiens
gaggaaaatagaggaagacttgctaagcatgag

SEQ ID NO: 17417 - DNA, 33 bp, Homo sapiens
gctgagacttgaatgataagaaagcatcagaca

SEQ ID NO: 17418 - DNA, 33 bp, Homo sapiens
tgcttgtcccaccggctagagctcttctgtcag

SEQ ID NO: 17419 - DNA, 33 bp, Homo sapiens
gatgttaccctcttaagagatcaaagccaactt

SEQ ID NO: 17420 - DNA, 33 bp, Homo sapiens
tactatctctaaatacgaacacagatgtttaca

SEQ ID NO: 17421 - DNA, 33 bp, Homo sapiens
gtccggagtcctaacaggaaggcatagcaataa

SEQ ID NO: 17422 - DNA, 33 bp, Homo sapiens
cttccaccaggctacccgatttttaaatgatct

SEQ ID NO: 17423 - DNA, 33 bp, Homo sapiens
tgcacaccccccactatacacacaagttctgtt

SEQ ID NO: 17424 - DNA, 51 bp, Homo sapiens
acacctctttctcttcatcacaaacgccctagttcaatccaccatcattgc

SEQ ID NO: 17425 - DNA, 33 bp, Homo sapiens
aggtgaagctgtcctcgcagggataacaagaat

SEQ ID NO: 17426 - DNA, 33 bp, Homo sapiens
ttgcatcaggtgaggagtaaaagagagagagag

SEQ ID NO: 17427 - DNA, 33 bp, Homo sapiens
gtgatgggaaactggactattgagaggctcttg

SEQ ID NO: 17428 - DNA, 33 bp, Homo sapiens
agcgttttctctatgatggtttgcttaagagaa

SEQ ID NO: 17429 - DNA, 33 bp, Homo sapiens
aacatcaggaaattagtccaaagcatctcaaaa

SEQ ID NO: 17430 - DNA, 33 bp, Homo sapiens
aaacaacttgacgagagagggtggatggaggga

SEQ ID NO: 17431 - DNA, 33 bp, Homo sapiens
ctacaaaatgcattaatggtgatgcaagcacta

SEQ ID NO: 17432 - DNA, 33 bp, Homo sapiens
tgagtaatattttaccgaggtcaatccagcttt

SEQ ID NO: 17433 - DNA, 33 bp, Homo sapiens
ctgggatagagagagagcgttggtgggcatgga

SEQ ID NO: 17434 - DNA, 33 bp, Homo sapiens
ccagtcaaggatttagtcattaattctggatgg

SEQ ID NO: 17435 - DNA, 33 bp, Homo sapiens
tttgctctatctgtcctgatggtttgatttttc

SEQ ID NO: 17436 - DNA, 33 bp, Homo sapiens
ccacaagagtgggaaagccagaatgagcagaag

SEQ ID NO: 17437 - DNA, 33 bp, Homo sapiens
gaatcaagagtgggaatgtctaaggaccgaagt

SEQ ID NO: 17438 - DNA, 33 bp, Homo sapiens
catgtcacttttgaaatgaaaatgccacactga

SEQ ID NO: 17439 - DNA, 33 bp, Homo sapiens
gaaatgatagatttgctaggaggtgaaagatgg

SEQ ID NO: 17440 - DNA, 33 bp, Homo sapiens
ctccaaattaaacacatacaggtaaccagaacc

SEQ ID NO: 17441 - DNA, 33 bp, Homo sapiens
ttccttgtcttagcaactcctactccattgcct

SEQ ID NO: 17442 - DNA, 33 bp, Homo sapiens
atggtctgaatctgtctcctcttcctcccaaat

SEQ ID NO: 17443 - DNA, 33 bp, Homo sapiens
gcctccagaggaagatgacaggtgagccagata

SEQ ID NO: 17444 - DNA, 33 bp, Homo sapiens
agtgatgcatgcccaattgatggcgaaataggt

SEQ ID NO: 17445 - DNA, 33 bp, Homo sapiens
agacacgtttcaaataggaattgcattatcatt

SEQ ID NO: 17446 - DNA, 33 bp, Homo sapiens
ttgtccacattctgccgagtgaacgtgaacaat

SEQ ID NO: 17447 - DNA, 33 bp, Homo sapiens
gtctaggctctaaacattaaaactttgggctta

SEQ ID NO: 17448 - DNA, 33 bp, Homo sapiens
aacacactggcacacattgtctttcagcttaca

SEQ ID NO: 17449 - DNA, 33 bp, Homo sapiens
tcaccgaggatgctaataagcagcacaggtgag

SEQ ID NO: 17450 - DNA, 33 bp, Homo sapiens
aagcaaaaatccgtaaggcaaatcattgagtca

SEQ ID NO: 17451 - DNA, 33 bp, Homo sapiens
gacaagagttgaacacggtctcacatctgtcag

SEQ ID NO: 17452 - DNA, 33 bp, Homo sapiens
aagagacagggactatgagcagtaagaggtggg

SEQ ID NO: 17453 - DNA, 33 bp, Homo sapiens
ctctcttttgtttgtggagctacaatattttcc

SEQ ID NO: 17454 - DNA, 33 bp, Homo sapiens
tgtgtttgtgtagctatcatgagatttgtggtc

SEQ ID NO: 17455 - DNA, 33 bp, Homo sapiens
gaatttgcctgctcactgaaatgcatctataac

SEQ ID NO: 17456 - DNA, 33 bp, Homo sapiens
acaatatttcatccactgatcaatgcataacct

SEQ ID NO: 17457 - DNA, 33 bp, Homo sapiens
cccggaggcctgaagatggtgcagatgcgctgt

SEQ ID NO: 17458 - DNA, 33 bp, Homo sapiens
gagcagggtctggaaatgaaggtgtgctccgct

SEQ ID NO: 17459 - DNA, 33 bp, Homo sapiens
ggaacacacacagggagaaatgacaggcaaata

SEQ ID NO: 17460 - DNA, 33 bp, Homo sapiens
cattggtaatccatcctatcactcttgtccact

SEQ ID NO: 17461 - DNA, 33 bp, Homo sapiens
cacagacgttggagccggatgacctgggttcac

SEQ ID NO: 17462 - DNA, 33 bp, Homo sapiens
gttttacagatgaggacgcgactctcagttaag

SEQ ID NO: 17463 - DNA, 33 bp, Homo sapiens
tgtttttatggcctactcatgctgagacatatt

SEQ ID NO: 17464 - DNA, 33 bp, Homo sapiens
ggacccacagctgagagggaacaagcctcccca

SEQ ID NO: 17465 - DNA, 33 bp, Homo sapiens
ggatggaaggcacagcgaatggcaggaggatgg

SEQ ID NO: 17466 - DNA, 33 bp, Homo sapiens
ataaacaacatatgcccattaacagacaaaggc

SEQ ID NO: 17467 - DNA, 33 bp, Homo sapiens
ggacatctgaactagcggcgtttgtggaattgg

SEQ ID NO: 17468 - DNA, 51 bp, Homo sapiens
aattgtgaaccatcagaatagaaacgatgcaatacttaaacattatgagat

SEQ ID NO: 17469 - DNA, 33 bp, Homo sapiens
ttttggtacaataacataattacttcatcttca

SEQ ID NO: 17470 - DNA, 33 bp, Homo sapiens
taaccttccagtcatcggaattgtgggccaaat

SEQ ID NO: 17471 - DNA, 33 bp, Homo sapiens
aaatgaagcccttggatggtcagtgacgaccct

SEQ ID NO: 17472 - DNA, 33 bp, Homo sapiens
ccagtcacttcctgatgaatatcctgcataaac

SEQ ID NO: 17473 - DNA, 33 bp, Homo sapiens
tgccagacatttcagaggtaaacatggcttatt

SEQ ID NO: 17474 - DNA, 33 bp, Homo sapiens
ctttatgtgtcagtcattagtgtatattgattt

SEQ ID NO: 17475 - DNA, 33 bp, Homo sapiens
tgctgggggaagaccattaacagaaggctgtga

SEQ ID NO: 17476 - DNA, 33 bp, Homo sapiens
tttttttaaccactgatatgtttttgaggcatt

SEQ ID NO: 17477 - DNA, 33 bp, Homo sapiens
agtctgttattgtatatgaaacacttcccaggg

SEQ ID NO: 17478 - DNA, 33 bp, Homo sapiens
tgactgaaaatcatcattatgagcattggctgt

SEQ ID NO: 17479 - DNA, 33 bp, Homo sapiens
gtaactaccttaaaactgacaactgtgcaaaac

SEQ ID NO: 17480 - DNA, 33 bp, Homo sapiens
ttggagaagaataaagtcgatacattcacatat

SEQ ID NO: 17481 - DNA, 33 bp, Homo sapiens
gaaagaattcaaggaagtccataaagtaaaagc

SEQ ID NO: 17482 - DNA, 33 bp, Homo sapiens
gcagagaaagcataactgcccttgacaaaacgg

SEQ ID NO: 17483 - DNA, 33 bp, Homo sapiens
agtattactgaaatgccgaactcacaaatgtgc

SEQ ID NO: 17484 - DNA, 33 bp, Homo sapiens
aggcgaaaagttaaacgatcagccagtgaaact

SEQ ID NO: 17485 - DNA, 33 bp, Homo sapiens
tctttttatctggagagtagccctttgttgtgg

SEQ ID NO: 17486 - DNA, 33 bp, Homo sapiens
ccatgcataagccatgtagtttataatatttgg

SEQ ID NO: 17487 - DNA, 33 bp, Homo sapiens
acaaatgattatttgagggcttaagcaagtgta

SEQ ID NO: 17488 - DNA, 33 bp, Homo sapiens
tgtcacagttctgccattgaagagccaaagaac

SEQ ID NO: 17489 - DNA, 33 bp, Homo sapiens
ctttctcatatggttgtacaggcgattttgcgc

SEQ ID NO: 17490 - DNA, 33 bp, Homo sapiens
agtctctagcgtctacgagggtgagcatgagcc

SEQ ID NO: 17491 - DNA, 33 bp, Homo sapiens
cttgtcagtgttctgctgagctacttttatctg

SEQ ID NO: 17492 - DNA, 51 bp, Homo sapiens
gtgaggacacaacccagaagaataagatcagaggactgacgtgactcaagt

SEQ ID NO: 17493 - DNA, 33 bp, Homo sapiens
gttctcctggctgaacgcttggtcaacaatgct

SEQ ID NO: 17494 - DNA, 33 bp, Homo sapiens
agcatgtttcatgtgcgcctctaagctctgcca

SEQ ID NO: 17495 - DNA, 33 bp, Homo sapiens
taccctgcatttccaagattcccttgcagctag

SEQ ID NO: 17496 - DNA, 33 bp, Homo sapiens
tccagtcacaaccagctgagcatgacttaggtc

SEQ ID NO: 17497 - DNA, 33 bp, Homo sapiens
agatagatgcctccaagtatgatcacgcaagcc

SEQ ID NO: 17498 - DNA, 33 bp, Homo sapiens
ctgccccagggggacagtatggagacaacgttg

SEQ ID NO: 17499 - DNA, 33 bp, Homo sapiens
ggctgagggcagcgacgacctacaaagcaatag

SEQ ID NO: 17500 - DNA, 33 bp, Homo sapiens
tggacatcgagaaaacggaaccctcatctggcc

SEQ ID NO: 17501 - DNA, 33 bp, Homo sapiens
aggttaggacttaagaggcatctcaagggacag

SEQ ID NO: 17502 - DNA, 33 bp, Homo sapiens
ggcatgccagactcaagcgtgtccttgaacata

SEQ ID NO: 17503 - DNA, 33 bp, Homo sapiens
atacgttaaaggcactcaagagagatgaagtgc

SEQ ID NO: 17504 - DNA, 33 bp, Homo sapiens
atccgctagtgagcgatgggtaggtctggagat

SEQ ID NO: 17505 - DNA, 33 bp, Homo sapiens
ttcattcagggtcacagtgctagccatgtcatc

SEQ ID NO: 17506 - DNA, 33 bp, Homo sapiens
cctgcttacataattccaaagaggtataactgc

SEQ ID NO: 17507 - DNA, 33 bp, Homo sapiens
gttctttgaagctttctattggttacaattcca

SEQ ID NO: 17508 - DNA, 33 bp, Homo sapiens
gaatcaataagttcaacggcttgaaacaaagtc

SEQ ID NO: 17509 - DNA, 33 bp, Homo sapiens
gcttcaccaatgctagcaggtccttgaaactag

SEQ ID NO: 17510 - DNA, 33 bp, Homo sapiens
agaaggcgaagaacactgaacatcttcttggag

SEQ ID NO: 17511 - DNA, 33 bp, Homo sapiens
gtgtccagaatcccaatccagagacagaggact

SEQ ID NO: 17512 - DNA, 33 bp, Homo sapiens
tagctttatctgggtctcttttcaaatgttacc

SEQ ID NO: 17513 - DNA, 33 bp, Homo sapiens
ctaaagtggaagtataggcagagctgtgtgtct

SEQ ID NO: 17514 - DNA, 33 bp, Homo sapiens
tcgaaattgtagttgatatacatctagaggtct

SEQ ID NO: 17515 - DNA, 33 bp, Homo sapiens
acacaggatgggacaatgtgaccacagtggatg

SEQ ID NO: 17516 - DNA, 33 bp, Homo sapiens
tattgctcaactaagctacttcggtaatcatgc

SEQ ID NO: 17517 - DNA, 33 bp, Homo sapiens
accaaagactgaaagatgcaatagtcctctggg

SEQ ID NO: 17518 - DNA, 33 bp, Homo sapiens
tgctaccttttacatatgacagcttctctaccc

SEQ ID NO: 17519 - DNA, 33 bp, Homo sapiens
acaggagcaaatgttctgaaaagaggacacaat

SEQ ID NO: 17520 - DNA, 33 bp, Homo sapiens
atgttgtttttcttgatgtgcaatgtgaggcag

SEQ ID NO: 17521 - DNA, 33 bp, Homo sapiens
caccgtgggaaggaccggcaagtgagaccatgc

SEQ ID NO: 17522 - DNA, 33 bp, Homo sapiens
gaatagaaactctctctccgtgtctccaggttt

SEQ ID NO: 17523 - DNA, 33 bp, Homo sapiens
gataatcacataccaatatacaaatgttgcata

SEQ ID NO: 17524 - DNA, 33 bp, Homo sapiens
cggacatcaggaaggcgcagtgaacatgaaaca

SEQ ID NO: 17525 - DNA, 33 bp, Homo sapiens
gccgtgtgtatttcaagtctactttccgtttat

SEQ ID NO: 17526 - DNA, 33 bp, Homo sapiens
tgctggtttatgtcattaataaaatgctgcaat

SEQ ID NO: 17527 - DNA, 33 bp, Homo sapiens
tgtgggcaaagggcaatgtctctcctgtgcaca

SEQ ID NO: 17528 - DNA, 33 bp, Homo sapiens
tagcagctgatgcaaagtggtagcactatacat

SEQ ID NO: 17529 - DNA, 33 bp, Homo sapiens
agagcccccaccccaatggacgatggaggctcg

SEQ ID NO: 17530 - DNA, 33 bp, Homo sapiens
ccagcctttatgaagcccttactgtgtaccaga

SEQ ID NO: 17531 - DNA, 33 bp, Homo sapiens
ctctatgaagcaaatatagttgttgccagatgt

SEQ ID NO: 17532 - DNA, 33 bp, Homo sapiens
aattcacacgagattacgatcatgcagagatac

SEQ ID NO: 17533 - DNA, 33 bp, Homo sapiens
ccacattaagaagtgaggaccatctatcagctc

SEQ ID NO: 17534 - DNA, 33 bp, Homo sapiens
agcaggtgcttcgagacagtgtatccacagctg

SEQ ID NO: 17535 - DNA, 33 bp, Homo sapiens
gatgccacacccatgatgagtcgaagcaaaggg

SEQ ID NO: 17536 - DNA, 51 bp, Homo sapiens
cttagtagagaaagatttctttaaatggatacaaaaagcacaaaacataaa

SEQ ID NO: 17537 - DNA, 51 bp, Homo sapiens
atcagcctaagaaagaaaagtatccgaacttcttcctatgtatgaagttcc

SEQ ID NO: 17538 - DNA, 33 bp, Homo sapiens
ggagcctgccagaaggtagtgagcttgtgctga

SEQ ID NO: 17539 - DNA, 51 bp, Homo sapiens
attggcagtgacttgttacaacagcgcagacaactcacagagatggcaaag

SEQ ID NO: 17540 - DNA, 51 bp, Homo sapiens
ctcatgagctccatgaaattgtttataaaagtctatgtcaggtcgggcatg

SEQ ID NO: 17541 - DNA, 33 bp, Homo sapiens
gctcacaagttcgagagcacactggacaacatg

SEQ ID NO: 17542 - DNA, 33 bp, Homo sapiens
gttgactccataactacattccatagtcataaa

SEQ ID NO: 17543 - DNA, 33 bp, Homo sapiens
agatattgtcggattcgatttttttaaaggcaa

SEQ ID NO: 17544 - DNA, 33 bp, Homo sapiens
accactgttctggacatcacgttattgctcaag

SEQ ID NO: 17545 - DNA, 33 bp, Homo sapiens
tctgacagtcaagcagtagtaactgtgctggga

SEQ ID NO: 17546 - DNA, 33 bp, Homo sapiens
atgccactccacttacgcattcaacaataaact

SEQ ID NO: 17547 - DNA, 33 bp, Homo sapiens
gatggccttgcctttataatgctcagggtttgg

SEQ ID NO: 17548 - DNA, 33 bp, Homo sapiens
agcctgaacaaaaatcgagcctaagcaaaaaga

SEQ ID NO: 17549 - DNA, 33 bp, Homo sapiens
atttatttcgtgaacattggggttgcttttttc

SEQ ID NO: 17550 - DNA, 33 bp, Homo sapiens
ggccctaatcaaggaatattcgtttttctcaga

SEQ ID NO: 17551 - DNA, 33 bp, Homo sapiens
atacaatgcatagtaagcctttctcccatataa

SEQ ID NO: 17552 - DNA, 51 bp, Homo sapiens
ggagagaagacgtttcaagtcccagtatagaaaacgccagtcctactgctc

SEQ ID NO: 17553 - DNA, 33 bp, Homo sapiens
atgtctttggtaccaatgtattcatatttctgt

SEQ ID NO: 17554 - DNA, 51 bp, Homo sapiens
aactttctcaactggataacgaatatctacaaaagaacttatagctaacac

SEQ ID NO: 17555 - DNA, 33 bp, Homo sapiens
atgtcctagctaaaattatagtttcctccacgt

SEQ ID NO: 17556 - DNA, 33 bp, Homo sapiens
ttatctaagaaagcactgactacaatgtattta

SEQ ID NO: 17557 - DNA, 33 bp, Homo sapiens
cctaagggactttaactagaattcttctttttt

SEQ ID NO: 17558 - DNA, 33 bp, Homo sapiens
tcacagtgtggattaaggaggaagtgcccacgt

SEQ ID NO: 17559 - DNA, 33 bp, Homo sapiens
tgaaagacttttgaaggcccaacaaaattgttg

SEQ ID NO: 17560 - DNA, 33 bp, Homo sapiens
gcaatatttttacaaagccagaatgcgaccttc

SEQ ID NO: 17561 - DNA, 51 bp, Homo sapiens
ctaaaaccatcagtaagacggatcatgctaagatgaaggcttttgctcaga

SEQ ID NO: 17562 - DNA, 51 bp, Homo sapiens
ttggtatttctcgttatcaagcatatgtggtatagtagcagaagtcaaaaa

SEQ ID NO: 17563 - DNA, 51 bp, Homo sapiens
cgatcaagtaatttttgagtgaaaatatcaagtagataaaaatcccaagaa

SEQ ID NO: 17564 - DNA, 33 bp, Homo sapiens
tgcatacagatgcatattaagtgttaaacaata

SEQ ID NO: 17565 - DNA, 33 bp, Homo sapiens
ttaaacccagtaaggatcttgaacagtagacat

SEQ ID NO: 17566 - DNA, 33 bp, Homo sapiens
ggatctgggctcttgagcaaatgttagaagttt

SEQ ID NO: 17567 - DNA, 33 bp, Homo sapiens
atgtgtgtaaagatgctatttagtgagtttgct

SEQ ID NO: 17568 - DNA, 33 bp, Homo sapiens
cttaatgtttaatatatgtataatgcactatgt

SEQ ID NO: 17569 - DNA, 33 bp, Homo sapiens
aacgatttcagctaccgggaaagattaccctgc

SEQ ID NO: 17570 - DNA, 33 bp, Homo sapiens
aataagctcgtggataggaaacacgttatgcct

SEQ ID NO: 17571 - DNA, 33 bp, Homo sapiens
tgtgcaaatctgtcgataacttctcttctactc

SEQ ID NO: 17572 - DNA, 33 bp, Homo sapiens
tatttataaaatcttcgatggcctctgtgcaaa

SEQ ID NO: 17573 - DNA, 33 bp, Homo sapiens
cttgaaattgactcaggcaaatggtagactgta

SEQ ID NO: 17574 - DNA, 33 bp, Homo sapiens
tgggatcacaatggaaggaagtaacagtagaaa

SEQ ID NO: 17575 - DNA, 33 bp, Homo sapiens
caagaaggagattaaagtatatgcagcccaagg

SEQ ID NO: 17576 - DNA, 33 bp, Homo sapiens
tctaacattcctggtagcacggtcacagcaaac

SEQ ID NO: 17577 - DNA, 33 bp, Homo sapiens
gtttcactctgttcctgactcttccttcagcgc

SEQ ID NO: 17578 - DNA, 33 bp, Homo sapiens
ttcttagtgtagttaagccagtattccaatcca

SEQ ID NO: 17579 - DNA, 33 bp, Homo sapiens
agtggccataaaactcgacattttacacattat

SEQ ID NO: 17580 - DNA, 33 bp, Homo sapiens
aagtcttcgagggtaccaaacaaggaactatgg

SEQ ID NO: 17581 - DNA, 33 bp, Homo sapiens
actactagggcagatctcaactgattagagatg

SEQ ID NO: 17582 - DNA, 33 bp, Homo sapiens
aatgccccagctcttcgcaatttcctaacatac

SEQ ID NO: 17583 - DNA, 33 bp, Homo sapiens
cactgctgcacatctaggatatattctctaaca

SEQ ID NO: 17584 - DNA, 33 bp, Homo sapiens
tagtctcaacatagacgacttagaggtcattga

SEQ ID NO: 17585 - DNA, 33 bp, Homo sapiens
ctgatcatctttcaacggatgctcccacagcct

SEQ ID NO: 17586 - DNA, 33 bp, Homo sapiens
gactgtcaaaagccacgatggacagcattcata

SEQ ID NO: 17587 - DNA, 33 bp, Homo sapiens
gtgactgtaaatgcgcgcaactcagaaggggag

SEQ ID NO: 17588 - DNA, 33 bp, Homo sapiens
aaaaaatctacctatcgcaggcaatctctaggg

SEQ ID NO: 17589 - DNA, 33 bp, Homo sapiens
cttaggccaatgcctagcacttactaaatagcc

SEQ ID NO: 17590 - DNA, 33 bp, Homo sapiens
catgcttgtggaatacggtaaaccaggcatcat

SEQ ID NO: 17591 - DNA, 33 bp, Homo sapiens
atccttaacagccttcgatgttgtctgtgttct

SEQ ID NO: 17592 - DNA, 33 bp, Homo sapiens
aaaagtacataataaaggtataagactgagatg

SEQ ID NO: 17593 - DNA, 33 bp, Homo sapiens
gaaggatggaagataacaaatgcatgtggacac

SEQ ID NO: 17594 - DNA, 33 bp, Homo sapiens
gcccaagtcccaactcggaggtcctaagtagac

SEQ ID NO: 17595 - DNA, 33 bp, Homo sapiens
gagagaggtgaagaaaggtttgaagctagtaga

SEQ ID NO: 17596 - DNA, 33 bp, Homo sapiens
caggcaagaatcaggatagggtaatttctgggg

SEQ ID NO: 17597 - DNA, 33 bp, Homo sapiens
ctgtggtttctcccaatggcagcaacttcaggg

SEQ ID NO: 17598 - DNA, 33 bp, Homo sapiens
tgttcttgatgggttctatttttatttgcccct

SEQ ID NO: 17599 - DNA, 33 bp, Homo sapiens
ctggcctcttcatgccgacgaggttctcatgta

SEQ ID NO: 17600 - DNA, 33 bp, Homo sapiens
ggaataaatatctgtcgctcacaacccctgagt

SEQ ID NO: 17601 - DNA, 33 bp, Homo sapiens
tacttccagaaagcacgggatactgtcatcttt

SEQ ID NO: 17602 - DNA, 33 bp, Homo sapiens
accatctatgtaacctcaaatctgtcatctgta

SEQ ID NO: 17603 - DNA, 33 bp, Homo sapiens
agaaaatgccagaatagaacacgaatgcctatt

SEQ ID NO: 17604 - DNA, 33 bp, Homo sapiens
cagctgcctggaggattaggagagacttcccca

SEQ ID NO: 17605 - DNA, 33 bp, Homo sapiens
gcccttaaaatcaccattgccaggtaagtgtcc

SEQ ID NO: 17606 - DNA, 33 bp, Homo sapiens
ccatctgtagcctaaagacaatgttgccaaggg

SEQ ID NO: 17607 - DNA, 33 bp, Homo sapiens
gttgaccaccccgatatagaattttgtgatttc

SEQ ID NO: 17608 - DNA, 33 bp, Homo sapiens
tgtggctaagaggttccaataaatgttctcagg

SEQ ID NO: 17609 - DNA, 33 bp, Homo sapiens
gaatcctagcttcctagatagttggtaaaatgt

SEQ ID NO: 17610 - DNA, 33 bp, Homo sapiens
gcattctatatcgtaagctctgcaaacctccac

SEQ ID NO: 17611 - DNA, 33 bp, Homo sapiens
atcttgaagaagaaaatgtctttcaaaatatta

SEQ ID NO: 17612 - DNA, 33 bp, Homo sapiens
aattttctaatgattaggataggaaaaatagca

SEQ ID NO: 17613 - DNA, 33 bp, Homo sapiens
ccttcacaaaacttactgcaatcacaattgttg

SEQ ID NO: 17614 - DNA, 33 bp, Homo sapiens
catggaaatgtcctaatagtccttgtctcagag

SEQ ID NO: 17615 - DNA, 33 bp, Homo sapiens
actgcagcttccattagattgtaaatactcttt

SEQ ID NO: 17616 - DNA, 33 bp, Homo sapiens
gaaacttctgtgacacggctccaaaaggtgcct

SEQ ID NO: 17617 - DNA, 33 bp, Homo sapiens
actgttactgttcacatagcaagttagtttagt

SEQ ID NO: 17618 - DNA, 33 bp, Homo sapiens
gtacaccatagtgggatagggtgccaggagacc

SEQ ID NO: 17619 - DNA, 33 bp, Homo sapiens
ttgtatttcctagctcgatccactgaaagagct

SEQ ID NO: 17620 - DNA, 33 bp, Homo sapiens
tggcaaaattcttccagctcctctttgtttcaa

SEQ ID NO: 17621 - DNA, 33 bp, Homo sapiens
gaagattataatgaagtagaaaaagtcctactg

SEQ ID NO: 17622 - DNA, 33 bp, Homo sapiens
caactgggataaatacgacagaagtgagcgcag

SEQ ID NO: 17623 - DNA, 33 bp, Homo sapiens
atcctctaggcttcgggattttgtaaagctctc

SEQ ID NO: 17624 - DNA, 33 bp, Homo sapiens
tggcccatcacactaagaaccagaagatctgca

SEQ ID NO: 17625 - DNA, 33 bp, Homo sapiens
actaaggggctggaaggcatcaagaaaggctgt

SEQ ID NO: 17626 - DNA, 33 bp, Homo sapiens
gtcagacaactggagaggaaacttaatgcaaca

SEQ ID NO: 17627 - DNA, 33 bp, Homo sapiens
gagtctcaagactccagtgcaaatgatgaaggc

SEQ ID NO: 17628 - DNA, 33 bp, Homo sapiens
aactggaattccatacgctgcgagtgggaacat

SEQ ID NO: 17629 - DNA, 33 bp, Homo sapiens
atatggaaaatgaagatcacaaaaataaacctt

SEQ ID NO: 17630 - DNA, 33 bp, Homo sapiens
aagaacgtgttcgcccggaggttaggcgatttg

SEQ ID NO: 17631 - DNA, 33 bp, Homo sapiens
gtcatctacagtgaaatgtcaaaggagaattaa

SEQ ID NO: 17632 - DNA, 33 bp, Homo sapiens
cccactgattacaaacgatggaacttaaacaag

SEQ ID NO: 17633 - DNA, 33 bp, Homo sapiens
ctctgcctacagataatgcttttacatctctag

SEQ ID NO: 17634 - DNA, 33 bp, Homo sapiens
tttcactgtgcattcagcaaacaaaattgtcct

SEQ ID NO: 17635 - DNA, 33 bp, Homo sapiens
atttcattaatttgcctaaagtcacaggtgata

SEQ ID NO: 17636 - DNA, 33 bp, Homo sapiens
cttttccaaatgtaaatgtcagctataacaact

SEQ ID NO: 17637 - DNA, 33 bp, Homo sapiens
cagtgacctgctgaaagtcactctgtctctact

SEQ ID NO: 17638 - DNA, 33 bp, Homo sapiens
agcaaatcagcagttatattgactattacatca

SEQ ID NO: 17639 - DNA, 33 bp, Homo sapiens
accagagacttaggtctgaagcaaagagctgtg

SEQ ID NO: 17640 - DNA, 33 bp, Homo sapiens
caaattcatattcttaccaattcctttttggta

SEQ ID NO: 17641 - DNA, 33 bp, Homo sapiens
attgagcaactactacgagctgaaccctgatga

SEQ ID NO: 17642 - DNA, 33 bp, Homo sapiens
agtggccagcagagcacggattttttctagaag

SEQ ID NO: 17643 - DNA, 33 bp, Homo sapiens
aagtcatctacttaaccctcagttctagaattg

SEQ ID NO: 17644 - DNA, 33 bp, Homo sapiens
cctctcagcgctttccgcatctcttcaggggct

SEQ ID NO: 17645 - DNA, 33 bp, Homo sapiens
caccaggataagtagggcacttttctgagcatc

SEQ ID NO: 17646 - DNA, 33 bp, Homo sapiens
tgggtgggctctaatcgaacatgactggtgtcc

SEQ ID NO: 17647 - DNA, 33 bp, Homo sapiens
gtgcatcagctcaaggtaactggtgtggctctg

SEQ ID NO: 17648 - DNA, 33 bp, Homo sapiens
tggaactccacagccagaagattagacgttgtt

SEQ ID NO: 17649 - DNA, 33 bp, Homo sapiens
tctttctggtagaggatcctatttgggaaacaa

SEQ ID NO: 17650 - DNA, 33 bp, Homo sapiens
tccctacattaaggaagtacgacaaacacgagg

SEQ ID NO: 17651 - DNA, 33 bp, Homo sapiens
gaatgataggtagttatacagagagaatcccta

SEQ ID NO: 17652 - DNA, 33 bp, Homo sapiens
atatcaaaatctgcatgagcagcccaggtgaga

SEQ ID NO: 17653 - DNA, 33 bp, Homo sapiens
cgcttctgaagatttatgagagagcggtcacat

SEQ ID NO: 17654 - DNA, 51 bp, Homo sapiens
atctggctacccacacctggatttatgttcccatggcccacaactgaaaag

SEQ ID NO: 17655 - DNA, 33 bp, Homo sapiens
tgtcgcctttgtttcagcgccttcagtctcccc

SEQ ID NO: 17656 - DNA, 33 bp, Homo sapiens
accacacttagtcacagaaatctttaaaagaat

SEQ ID NO: 17657 - DNA, 33 bp, Homo sapiens
tagacaccaccagtcctgagctgggcaaccctg

SEQ ID NO: 17658 - DNA, 33 bp, Homo sapiens
gaggattttagaagaatgatggtgtttacagtc

SEQ ID NO: 17659 - DNA, 33 bp, Homo sapiens
tgttctacatccacctgaagtgtgcaggccttt

SEQ ID NO: 17660 - DNA, 33 bp, Homo sapiens
gcatggactttaccaagctgatctcaggtcaaa

SEQ ID NO: 17661 - DNA, 33 bp, Homo sapiens
ggctcagggacaatgatgattcagctaacctag

SEQ ID NO: 17662 - DNA, 33 bp, Homo sapiens
gatttacacaccaatcgcaagaaatgactggca

SEQ ID NO: 17663 - DNA, 33 bp, Homo sapiens
tctttttactacttactccaaccctctcagagc

SEQ ID NO: 17664 - DNA, 51 bp, Homo sapiens
attccaggccaatattcttttactctcaattccttctattaatataccacc

SEQ ID NO: 17665 - DNA, 33 bp, Homo sapiens
tagggaaggaagctactctcctagtataccaga

SEQ ID NO: 17666 - DNA, 33 bp, Homo sapiens
tacctgtgttacagactatgggctcttagattc

SEQ ID NO: 17667 - DNA, 51 bp, Homo sapiens
tccacaatcaattctcattgtatgatacctaatgtttgaaggtgctatgct

SEQ ID NO: 17668 - DNA, 51 bp, Homo sapiens
tataatcgctgtcttgcatttattctcagtgaacttacccctctctcttcc

SEQ ID NO: 17669 - DNA, 33 bp, Homo sapiens
tttaacatacttgtcatgagagggtaatacttt

SEQ ID NO: 17670 - DNA, 33 bp, Homo sapiens
acatacggcatttaaggaaattttgtggttagt

SEQ ID NO: 17671 - DNA, 33 bp, Homo sapiens
tccttgtagagaccactgcctgtataatgaatc

SEQ ID NO: 17672 - DNA, 33 bp, Homo sapiens
gcaactaatagtgccattaagtaaaaactacaa

SEQ ID NO: 17673 - DNA, 33 bp, Homo sapiens
actgaatagtatttgctgaagatcgttttaaaa

SEQ ID NO: 17674 - DNA, 33 bp, Homo sapiens
ttcattcattcaaaaagcatgtactgtccatga

SEQ ID NO: 17675 - DNA, 33 bp, Homo sapiens
tgatgcctattgattatgaatatggttgtcctt

SEQ ID NO: 17676 - DNA, 33 bp, Homo sapiens
ctgtttctacgccacagtaataaacacatcgga

SEQ ID NO: 17677 - DNA, 33 bp, Homo sapiens
catgtcagggtgctaagtccttatccctagaga

SEQ ID NO: 17678 - DNA, 33 bp, Homo sapiens
tggagttgatttcaactggactaagccaatttc

SEQ ID NO: 17679 - DNA, 33 bp, Homo sapiens
ttaagctgctacatgacatgcaaaatcattaag

SEQ ID NO: 17680 - DNA, 33 bp, Homo sapiens
gagatagcaatataaagtcagcagcttgcagac

SEQ ID NO: 17681 - DNA, 33 bp, Homo sapiens
aataaacctgcttcaaccttcatcaatcattgt

SEQ ID NO: 17682 - DNA, 33 bp, Homo sapiens
tccctgtcgttacagaccttacagaatcatcag

SEQ ID NO: 17683 - DNA, 33 bp, Homo sapiens
ctcctccaccccattgtatataagcctggaggt

SEQ ID NO: 17684 - DNA, 33 bp, Homo sapiens
tggggaatctacctactcatctacatttcctag

SEQ ID NO: 17685 - DNA, 33 bp, Homo sapiens
tctggacatatactgagggcttaaccttgaata

SEQ ID NO: 17686 - DNA, 33 bp, Homo sapiens
cagagttagagataaacgtcacataatgcttag

SEQ ID NO: 17687 - DNA, 33 bp, Homo sapiens
ttcttttaacaaaggatggccttatttcttatc

SEQ ID NO: 17688 - DNA, 33 bp, Homo sapiens
aactactatttactgacctagagagaaaaggac

SEQ ID NO: 17689 - DNA, 33 bp, Homo sapiens
ctgtgaccctttgcaatgaaccttccaccctgc

SEQ ID NO: 17690 - DNA, 33 bp, Homo sapiens
tgattaaattatgctcccaagatcagttcctag

SEQ ID NO: 17691 - DNA, 33 bp, Homo sapiens
actgatcagcctgaagtatcttatagtgccaaa

SEQ ID NO: 17692 - DNA, 33 bp, Homo sapiens
taaaatcacatagaaattgccacacaaatgtta

SEQ ID NO: 17693 - DNA, 33 bp, Homo sapiens
ttggcatgcctctctcgatcaatatatctttac

SEQ ID NO: 17694 - DNA, 33 bp, Homo sapiens
agacagatccgcaccttaattactatgcctaaa

SEQ ID NO: 17695 - DNA, 33 bp, Homo sapiens
tagctatttcctcagttacaaagaatagtgtgt

SEQ ID NO: 17696 - DNA, 33 bp, Homo sapiens
tgttcatcagatctgcgctattagagatgagtc

SEQ ID NO: 17697 - DNA, 33 bp, Homo sapiens
cagatttgatatagccgaagaaagatttagtaa

SEQ ID NO: 17698 - DNA, 33 bp, Homo sapiens
aagtcaccccttcctatgatgcaactgctgtaa

SEQ ID NO: 17699 - DNA, 51 bp, Homo sapiens
atttgaaaatatacagccagaggaagtataagaaaaaagaataaaaaaaga

SEQ ID NO: 17700 - DNA, 33 bp, Homo sapiens
aaaacaaaaccaagaaccagatcagttcacaaa

SEQ ID NO: 17701 - DNA, 51 bp, Homo sapiens
ctttcttctttggggatgaagagtatggactttgttatcaggcagacgtgg

SEQ ID NO: 17702 - DNA, 51 bp, Homo sapiens
tatcaagaataactaaagcctttcattgttacactatgcaatccctagcca

SEQ ID NO: 17703 - DNA, 51 bp, Homo sapiens
attttaatgctgacacacagagtaataatcccatggcccagcactacgtca

SEQ ID NO: 17704 - DNA, 51 bp, Homo sapiens
atctctcttattctatttgtaaaaatgagattagattcaatagttttcata

SEQ ID NO: 17705 - DNA, 51 bp, Homo sapiens
gttggcacttacaatttagctgttcgaaataatctattattagcactaatt

SEQ ID NO: 17706 - DNA, 51 bp, Homo sapiens
aacaaaaactttgggccatggtggattcaatctaaatatatcctttttgcc

SEQ ID NO: 17707 - DNA, 33 bp, Homo sapiens
cttccaacattgtgcagtaagtcatttggaatc

SEQ ID NO: 17708 - DNA, 51 bp, Homo sapiens
tttgtaaaactgtccctttcctcacggtattgtggtatgacatttctcacc

SEQ ID NO: 17709 - DNA, 33 bp, Homo sapiens
tgacctagatggtccataaattaagatcactca

SEQ ID NO: 17710 - DNA, 33 bp, Homo sapiens
aaaaggaattataaaggcttcaagcatttttgg

SEQ ID NO: 17711 - DNA, 33 bp, Homo sapiens
gctgggcactgggctgtcaattctgtggatcag

SEQ ID NO: 17712 - DNA, 33 bp, Homo sapiens
tctattctctgacttatagctttttttgtatga

SEQ ID NO: 17713 - DNA, 33 bp, Homo sapiens
agttctgctgcatgagtctagagcaccaggtag

SEQ ID NO: 17714 - DNA, 33 bp, Homo sapiens
tttctcattaatttactggtcattcaggagcat

SEQ ID NO: 17715 - DNA, 33 bp, Homo sapiens
gtatttgataactgagtagtcattagcaatctg

SEQ ID NO: 17716 - DNA, 33 bp, Homo sapiens
aggagcagtcacagtagagcagtgggtttgaat

SEQ ID NO: 17717 - DNA, 33 bp, Homo sapiens
ggctcaaacatagacacaaactgtcgagtcctg

SEQ ID NO: 17718 - DNA, 33 bp, Homo sapiens
acatggcaaggaacattagtggttatgactgat

SEQ ID NO: 17719 - DNA, 33 bp, Homo sapiens
tttagtcatttcacactccttttgtagccttct

SEQ ID NO: 17720 - DNA, 33 bp, Homo sapiens
atccctaagtaaggaccagtgcttgggaattaa

SEQ ID NO: 17721 - DNA, 33 bp, Homo sapiens
gcactggaaaagatgatgacaattgtctaattc

SEQ ID NO: 17722 - DNA, 33 bp, Homo sapiens
gttattctcatacatatggagttcacaaaattt

SEQ ID NO: 17723 - DNA, 33 bp, Homo sapiens
agcccaaaccctaagattatggagaaccaaaga

SEQ ID NO: 17724 - DNA, 33 bp, Homo sapiens
gctttcaaagaggctatcttagggtttatacta

SEQ ID NO: 17725 - DNA, 33 bp, Homo sapiens
tctcctttaacaatcctattaatgtgtaggacg

SEQ ID NO: 17726 - DNA, 33 bp, Homo sapiens
actgactgtctactcataggactaagtgacctt

SEQ ID NO: 17727 - DNA, 51 bp, Homo sapiens
gtgggcctatcttttactaagaggagaagaatgtgcagtcccacccacagc

SEQ ID NO: 17728 - DNA, 51 bp, Homo sapiens
tttaatgttgactttggagttggcatactggaaaagaattagaggtaagat

SEQ ID NO: 17729 - DNA, 33 bp, Homo sapiens
cctaggcacactgccatgttcttcgtctatgtt

SEQ ID NO: 17730 - DNA, 33 bp, Homo sapiens
acaacaacaacaactatgggataaggatataaa

SEQ ID NO: 17731 - DNA, 33 bp, Homo sapiens
gactgactgtgttccatagcttaataatgctct

SEQ ID NO: 17732 - DNA, 33 bp, Homo sapiens
ttagaaaagaacaatacctaacaataccctaac

SEQ ID NO: 17733 - DNA, 33 bp, Homo sapiens
ctacttcacaccttgggaacatcgtgaacatca

SEQ ID NO: 17734 - DNA, 33 bp, Homo sapiens
caaaggtggtcacagatctatactgcaagtacc

SEQ ID NO: 17735 - DNA, 33 bp, Homo sapiens
attttcattcaacctagggaaggatcttaagaa

SEQ ID NO: 17736 - DNA, 33 bp, Homo sapiens
cagtaatagctccttagacactcagtatctttc

SEQ ID NO: 17737 - DNA, 33 bp, Homo sapiens
gggaaaccatgggtaaccctttcattgtggtgt

SEQ ID NO: 17738 - DNA, 51 bp, Homo sapiens
atacaggagaaagctgaggttcacacaagtagatttcttctccgacatcct

SEQ ID NO: 17739 - DNA, 33 bp, Homo sapiens
aaccagggaggactcctctcgcaccaggatctc

SEQ ID NO: 17740 - DNA, 33 bp, Homo sapiens
caggagaaactgcagagccctcttcatcccaaa

SEQ ID NO: 17741 - DNA, 33 bp, Homo sapiens
gctcaagagagatcaacgtacttactctcatga

SEQ ID NO: 17742 - DNA, 33 bp, Homo sapiens
gctgctcctcattctcgcaaactctgtggatag

SEQ ID NO: 17743 - DNA, 33 bp, Homo sapiens
tgtcaatatgatgtgggagtcgaaaaggtgaaa

SEQ ID NO: 17744 - DNA, 33 bp, Homo sapiens
gattctctgccttagatgagtgttcaggagagc

SEQ ID NO: 17745 - DNA, 33 bp, Homo sapiens
cagaaattgtcattcctcttgtcactcagaaga

SEQ ID NO: 17746 - DNA, 33 bp, Homo sapiens
acgtttgagagatttagggaggaaaaagcaaca

SEQ ID NO: 17747 - DNA, 33 bp, Homo sapiens
actataacctgtttgagcatcacatctcaggta

SEQ ID NO: 17748 - DNA, 33 bp, Homo sapiens
aggcaggtcctgctaatcaagtgatcccatgaa

SEQ ID NO: 17749 - DNA, 51 bp, Homo sapiens
tgttttatctagtttggctaaatacgacttatggttcaaagagaaaatgca

SEQ ID NO: 17750 - DNA, 33 bp, Homo sapiens
ggccacatgacacttcgctgagtatctacagca

SEQ ID NO: 17751 - DNA, 51 bp, Homo sapiens
ggagaaatagtgtacgtgttggagatactcagacagggtactaggaaaaat

SEQ ID NO: 17752 - DNA, 33 bp, Homo sapiens
tcacactcatacaataggcagcaatgccacatc

SEQ ID NO: 17753 - DNA, 33 bp, Homo sapiens
tattgatatttatttatacagcggctattcatt

SEQ ID NO: 17754 - DNA, 33 bp, Homo sapiens
agggtcagatgttaaatggagacagctggagcc

SEQ ID NO: 17755 - DNA, 33 bp, Homo sapiens
aaggacagggtcaccataatttctttcataaga

SEQ ID NO: 17756 - DNA, 33 bp, Homo sapiens
ttctaaacatgacttatagagttttcttctggg

SEQ ID NO: 17757 - DNA, 33 bp, Homo sapiens
cggatgcagcaagaaaggaagtcaggatgggag

SEQ ID NO: 17758 - DNA, 33 bp, Homo sapiens
tctgtttcctttattatcatgtaagctttatga

SEQ ID NO: 17759 - DNA, 33 bp, Homo sapiens
actattattatctcccgagtttactatatcata

SEQ ID NO: 17760 - DNA, 33 bp, Homo sapiens
gtagcagtggcatgtgcaaaattcttgttttaa

SEQ ID NO: 17761 - DNA, 51 bp, Homo sapiens
agcatctattatgaacgttcaaggactataaaagtaaggtaaaagcttttc

SEQ ID NO: 17762 - DNA, 51 bp, Homo sapiens
tgtcctgtgcctcaggatctcttactcatagttgtattgttttttcatttt

SEQ ID NO: 17763 - DNA, 51 bp, Homo sapiens
ctgctttttctgcagtaatcccatagctttctattcacatttcttttatga

SEQ ID NO: 17764 - DNA, 51 bp, Homo sapiens
aagtgacctttcatccgagtcttgagggaagagtgagaaaaggagcaattt

SEQ ID NO: 17765 - DNA, 33 bp, Homo sapiens
tggactatgcattggagctaggtggtctttatc

SEQ ID NO: 17766 - DNA, 33 bp, Homo sapiens
ctgcatttccaactgaggtaccaggccatctta

SEQ ID NO: 17767 - DNA, 33 bp, Homo sapiens
aagtgattcattccaagcatctgatgggttccc

SEQ ID NO: 17768 - DNA, 51 bp, Homo sapiens
gcagccaagattcaatgcttggaaatgaagtttaagttggaggacaaacaa

SEQ ID NO: 17769 - DNA, 33 bp, Homo sapiens
attcttgttctcaaaagcttacattctgatcca

SEQ ID NO: 17770 - DNA, 33 bp, Homo sapiens
agatgattctttgttatgaagcttacactcatt

SEQ ID NO: 17771 - DNA, 51 bp, Homo sapiens
acaacactgtcagttgctgtcctgaggaaggtggccaggagctctagaagg

SEQ ID NO: 17772 - DNA, 33 bp, Homo sapiens
tatacacatatgtgacgcttcccactctctggc

SEQ ID NO: 17773 - DNA, 33 bp, Homo sapiens
gaaactatgacagagggaaagtaagtgttttaa

SEQ ID NO: 17774 - DNA, 33 bp, Homo sapiens
ttatcttagtttaccagtgagaggcatctgttc

SEQ ID NO: 17775 - DNA, 33 bp, Homo sapiens
caatgtatgaaaatgctatttccctgaaactat

SEQ ID NO: 17776 - DNA, 33 bp, Homo sapiens
agaatgtcaaattccatctacctccatgttcat

SEQ ID NO: 17777 - DNA, 33 bp, Homo sapiens
ccaattgttggccttcgacaccaggggcaggga

SEQ ID NO: 17778 - DNA, 33 bp, Homo sapiens
gcagaaaaggaatcggtagtcaaggaggctgga

SEQ ID NO: 17779 - DNA, 33 bp, Homo sapiens
agaaacacaagcaggacaggatgaaatcagccg

SEQ ID NO: 17780 - DNA, 33 bp, Homo sapiens
attagaggagcccaaattaaggcaatagcaaga

SEQ ID NO: 17781 - DNA, 33 bp, Homo sapiens
gaatgtgacatggttctccgccctcaaagaatt

SEQ ID NO: 17782 - DNA, 33 bp, Homo sapiens
gactcaaaggtaactcgcgagaatactagtttc

SEQ ID NO: 17783 - DNA, 33 bp, Homo sapiens
tgaacctggtagcataggcatctcatgatgaca

SEQ ID NO: 17784 - DNA, 33 bp, Homo sapiens
gctttaagagacactatcaaatcgtttgtgaga

SEQ ID NO: 17785 - DNA, 33 bp, Homo sapiens
gattgcaaagtcctactaaccagaaacgtgcaa

SEQ ID NO: 17786 - DNA, 33 bp, Homo sapiens
aaaaaaaaaaaaaatcgatgattgccaggagta

SEQ ID NO: 17787 - DNA, 33 bp, Homo sapiens
tgcaaaagttgagctatgattgttatgaacctc

SEQ ID NO: 17788 - DNA, 33 bp, Homo sapiens
caacaagcatttgtaaggagaaccagttagcaa

SEQ ID NO: 17789 - DNA, 33 bp, Homo sapiens
tcagagtcttagagatggtatcccaggtgactt

SEQ ID NO: 17790 - DNA, 33 bp, Homo sapiens
ttaatcctcacccttcgcagtccagaggctgcc

SEQ ID NO: 17791 - DNA, 33 bp, Homo sapiens
ttaaattgttcattgatgtcccaaacctgaagc

SEQ ID NO: 17792 - DNA, 33 bp, Homo sapiens
accttaactccactgaggatcatgaacaatgct

SEQ ID NO: 17793 - DNA, 33 bp, Homo sapiens
tttgaccaatacgtactcttaatcggccatctg

SEQ ID NO: 17794 - DNA, 33 bp, Homo sapiens
tactcattttagctcacctatggtttctaaaac

SEQ ID NO: 17795 - DNA, 33 bp, Homo sapiens
ctcacaatttttctactatccatatgttaatga

SEQ ID NO: 17796 - DNA, 33 bp, Homo sapiens
ctttgcgtgctggaacgaccacgaaactgagca

SEQ ID NO: 17797 - DNA, 33 bp, Homo sapiens
ctcaggtggtcctcacgagaatctgacaggcag

SEQ ID NO: 17798 - DNA, 33 bp, Homo sapiens
ggccaaaatgccatccgatagcctcatttatct

SEQ ID NO: 17799 - DNA, 33 bp, Homo sapiens
ctgaatcgcatctgaattacatgcccaggattg

SEQ ID NO: 17800 - DNA, 33 bp, Homo sapiens
ttttagtgatgtgtcagcgcacaatgaggaaaa

SEQ ID NO: 17801 - DNA, 33 bp, Homo sapiens
tgatggaacatcgcaagtccagctcggaggaat

SEQ ID NO: 17802 - DNA, 33 bp, Homo sapiens
agtcttttggaaagattaaggaaatgatcagaa

SEQ ID NO: 17803 - DNA, 33 bp, Homo sapiens
gagactctgtgagcaagtgacttcctaatactt

SEQ ID NO: 17804 - DNA, 33 bp, Homo sapiens
gatggacattcaattccataagcccagcgtgtg

SEQ ID NO: 17805 - DNA, 33 bp, Homo sapiens
tctacgaaacgcttcgtatatgttacctcattt

SEQ ID NO: 17806 - DNA, 33 bp, Homo sapiens
ctgcaaatggtgaagagagaagaggctagccta

SEQ ID NO: 17807 - DNA, 51 bp, Homo sapiens
ggcataaccttgacattgctctcaatcctgaatttcttctttttgagcatg

SEQ ID NO: 17808 - DNA, 33 bp, Homo sapiens
gttcttgcctcacagagaggaatagtatccagt

SEQ ID NO: 17809 - DNA, 33 bp, Homo sapiens
tcctggcccagcggctgagatacctgacctgtt

SEQ ID NO: 17810 - DNA, 33 bp, Homo sapiens
caaattaacccaagtcgatacctgtgcagttcc

SEQ ID NO: 17811 - DNA, 33 bp, Homo sapiens
acactaccatctctcatgtgtttttgagccaaa

SEQ ID NO: 17812 - DNA, 33 bp, Homo sapiens
acctgagatgtttgaggaagttactcaattttc

SEQ ID NO: 17813 - DNA, 51 bp, Homo sapiens
gagaacaacttgacacatctatttctagccagagcagcagtgactggcagg

SEQ ID NO: 17814 - DNA, 33 bp, Homo sapiens
tgaaatgtgattttcataaaactagtattttca

SEQ ID NO: 17815 - DNA, 51 bp, Homo sapiens
tttgggttgagttgcctatctgtctgaaagcattaggaacttcattgcttg

SEQ ID NO: 17816 - DNA, 33 bp, Homo sapiens
aggatgttatgttggcgctccttctatcctagt

SEQ ID NO: 17817 - DNA, 33 bp, Homo sapiens
attcacgtagtgcttagaatgctgcttctacca

SEQ ID NO: 17818 - DNA, 33 bp, Homo sapiens
cccacctcttaacacctacacattagagattaa

SEQ ID NO: 17819 - DNA, 33 bp, Homo sapiens
tgtaccccttctgttatgaccaatagcctaatc

SEQ ID NO: 17820 - DNA, 33 bp, Homo sapiens
gtctcaaaagctgtcattccttcaggtacctga

SEQ ID NO: 17821 - DNA, 33 bp, Homo sapiens
tttgataagaatatcatggaatctgtaaattgc

SEQ ID NO: 17822 - DNA, 33 bp, Homo sapiens
acatccatgcacatgatcacttttctaataatt

SEQ ID NO: 17823 - DNA, 33 bp, Homo sapiens
tgggaggagagcgctatggatacatactttgtc

SEQ ID NO: 17824 - DNA, 33 bp, Homo sapiens
atcttcttcacagagcggaacatattcacacca

SEQ ID NO: 17825 - DNA, 33 bp, Homo sapiens
catccaccattacatcgaaaactttgggaaacc

SEQ ID NO: 17826 - DNA, 33 bp, Homo sapiens
gaagacttgagacaaagttaatgagtgttaaag

SEQ ID NO: 17827 - DNA, 33 bp, Homo sapiens
gtggccactatgcttcccttgttttacgtttat

SEQ ID NO: 17828 - DNA, 33 bp, Homo sapiens
ctatttaatcaactaagctcagttcccaatatg

SEQ ID NO: 17829 - DNA, 33 bp, Homo sapiens
agaccacccttcagaagtggacaatttgatcgg

SEQ ID NO: 17830 - DNA, 33 bp, Homo sapiens
gtgtgtagtatttcaatagcttttgaggtgtaa

SEQ ID NO: 17831 - DNA, 33 bp, Homo sapiens
tccccgttcatccatctaagaccacagtggtaa

SEQ ID NO: 17832 - DNA, 33 bp, Homo sapiens
atttgataataggtgaggctagtttgcagattg

SEQ ID NO: 17833 - DNA, 33 bp, Homo sapiens
cgctagactattctacgctctatagaaacaaat

SEQ ID NO: 17834 - DNA, 33 bp, Homo sapiens
tggtgagttttagcaatatttggatataagaga

SEQ ID NO: 17835 - DNA, 33 bp, Homo sapiens
taacaggacactctccggatttggacccagaac

SEQ ID NO: 17836 - DNA, 33 bp, Homo sapiens
taatcttagaccaaaaggaacctctggggtgat

SEQ ID NO: 17837 - DNA, 33 bp, Homo sapiens
aataacaaaatggaaagtaaaatcagcacctac

SEQ ID NO: 17838 - DNA, 33 bp, Homo sapiens
ggaattgctgggccatgagataactatatgttt

SEQ ID NO: 17839 - DNA, 33 bp, Homo sapiens
ctgctaatgaggtttagcaatattctcataagc

SEQ ID NO: 17840 - DNA, 33 bp, Homo sapiens
ccttccgaatagacgcgatctcttgaggggaga

SEQ ID NO: 17841 - DNA, 33 bp, Homo sapiens
acatggtttaggaaatcaaaatctgtttctaat

SEQ ID NO: 17842 - DNA, 33 bp, Homo sapiens
catggaatcacattacggaaaatcatcagaggc

SEQ ID NO: 17843 - DNA, 33 bp, Homo sapiens
gataacaggaatttgatggttagtgatggtaac

SEQ ID NO: 17844 - DNA, 33 bp, Homo sapiens
gacactttctttagcctgagcacatttttaact

SEQ ID NO: 17845 - DNA, 51 bp, Homo sapiens
tccttagctcctcataactaaagcacagtcagcctcgaccagagaagaggt

SEQ ID NO: 17846 - DNA, 33 bp, Homo sapiens
gttgaatctgttcatcgatttgggaaatattgc

SEQ ID NO: 17847 - DNA, 51 bp, Homo sapiens
aaggattgatgcattcatttttttcgcttatttggtgctttcaaaaccaat

SEQ ID NO: 17848 - DNA, 33 bp, Homo sapiens
aggcaatctaatgtagtatctctgtaccgtaaa

SEQ ID NO: 17849 - DNA, 33 bp, Homo sapiens
tctaatattgaaagtatgaactgtctggatcta

SEQ ID NO: 17850 - DNA, 33 bp, Homo sapiens
caaggactgttttttcgactttcattaaaatcc

SEQ ID NO: 17851 - DNA, 33 bp, Homo sapiens
attgtcacaatgtgtagaatcaagtgggacaag

SEQ ID NO: 17852 - DNA, 33 bp, Homo sapiens
attgtggtagcctttatatgactatacacttgt

SEQ ID NO: 17853 - DNA, 33 bp, Homo sapiens
ctgtagtgatttagcatgggtgtttgtctttca

SEQ ID NO: 17854 - DNA, 33 bp, Homo sapiens
agagccatttgcaaaggaaatagatacaaatat

SEQ ID NO: 17855 - DNA, 33 bp, Homo sapiens
atggagcacaaaggaattctcataaccagttag

SEQ ID NO: 17856 - DNA, 33 bp, Homo sapiens
attgactttcccataagtgtgtggttttgagtg

SEQ ID NO: 17857 - DNA, 33 bp, Homo sapiens
catatgggcatgatgctgagttttgatgatcca

SEQ ID NO: 17858 - DNA, 33 bp, Homo sapiens
aatgcataatgaaaaattgagtaatacattagt

SEQ ID NO: 17859 - DNA, 33 bp, Homo sapiens
tggcagtactggctaccgatcttgggtaatcca

SEQ ID NO: 17860 - DNA, 33 bp, Homo sapiens
tcactcaggaggaatatagatgagcggtttatt

SEQ ID NO: 17861 - DNA, 33 bp, Homo sapiens
cttactttcagcaatggacagagcatccagaca

SEQ ID NO: 17862 - DNA, 51 bp, Homo sapiens
acaaatggctagcacatagtacgtggatatagccttacttccaaagtgaca

SEQ ID NO: 17863 - DNA, 33 bp, Homo sapiens
acaacatttttaagcatgggccttagtgataaa

SEQ ID NO: 17864 - DNA, 51 bp, Homo sapiens
aaaagagttaatagagatggaaagatcaatagaagatgctaacaagaaggt

SEQ ID NO: 17865 - DNA, 51 bp, Homo sapiens
gacaaacaatcaattatagccataaccttagtgtaaagaattataatataa

SEQ ID NO: 17866 - DNA, 51 bp, Homo sapiens
tattcagtctgaaaaaatgatacactaccctattagccactcaactttggc

SEQ ID NO: 17867 - DNA, 51 bp, Homo sapiens
aatttaactgggcacatttatcctgtatatttcgtggcaaagttaactaaa

SEQ ID NO: 17868 - DNA, 33 bp, Homo sapiens
gttgttatttttagcagagatgtagactacatt

SEQ ID NO: 17869 - DNA, 33 bp, Homo sapiens
ggaagaactcacttccgatttgacacagttttg

SEQ ID NO: 17870 - DNA, 33 bp, Homo sapiens
actctattaacacacattgggctgttgatgatc

SEQ ID NO: 17871 - DNA, 33 bp, Homo sapiens
ttatgtgaatttattatggcaatcctagaaaac

SEQ ID NO: 17872 - DNA, 33 bp, Homo sapiens
tgttttgtgaggtcttcaaagcgaaatatttgg

SEQ ID NO: 17873 - DNA, 33 bp, Homo sapiens
tattttttcatgctgatcctgtgtaagtctttg

SEQ ID NO: 17874 - DNA, 33 bp, Homo sapiens
ctctgcatatagcatacggagcacagtgcagct

SEQ ID NO: 17875 - DNA, 33 bp, Homo sapiens
gcagacaaaaatgccagagaattcaagcaagaa

SEQ ID NO: 17876 - DNA, 33 bp, Homo sapiens
gtgagaacggtcactacaaaatttcccacaaac

SEQ ID NO: 17877 - DNA, 33 bp, Homo sapiens
agaaaaaactctgaaattgctgtaaaaagccct

SEQ ID NO: 17878 - DNA, 33 bp, Homo sapiens
aggctcagtgtcattcgaggcaattatttcaaa

SEQ ID NO: 17879 - DNA, 33 bp, Homo sapiens
actaagttctattgcctctgggactaagttcaa

SEQ ID NO: 17880 - DNA, 33 bp, Homo sapiens
cctcatcttgaaccacgctttcccttaatgtgc

SEQ ID NO: 17881 - DNA, 33 bp, Homo sapiens
caccttgaattgtaatgatcctaacgtgtcatg

SEQ ID NO: 17882 - DNA, 51 bp, Homo sapiens
gcctctgtggacttgagagatgaccgaatagcaaagaaagtattcataagg

SEQ ID NO: 17883 - DNA, 33 bp, Homo sapiens
tatataaaatgagatcgaaccacttatacagat

SEQ ID NO: 17884 - DNA, 33 bp, Homo sapiens
gatgtaacttgaccacgctaaagtagatcagag

SEQ ID NO: 17885 - DNA, 33 bp, Homo sapiens
ggtgagtggatgaggcgaacatcttcccaggtc

SEQ ID NO: 17886 - DNA, 33 bp, Homo sapiens
agactatattatctaacctcgccaaacctcaat

SEQ ID NO: 17887 - DNA, 33 bp, Homo sapiens
cagacagtacaaataataaacgaacacaacttc

SEQ ID NO: 17888 - DNA, 33 bp, Homo sapiens
tgtgcatgattgaggattatctctgtgttaatt

SEQ ID NO: 17889 - DNA, 33 bp, Homo sapiens
gaatgagtggattcacgaaagtctatataaacc

SEQ ID NO: 17890 - DNA, 33 bp, Homo sapiens
agtcattgcaaaatcagtactcctaccctgaat

SEQ ID NO: 17891 - DNA, 33 bp, Homo sapiens
tctatttcttgttgccgccaataccatgatcga

SEQ ID NO: 17892 - DNA, 33 bp, Homo sapiens
ctcattgtggtttggagtaccctaatgactaat

SEQ ID NO: 17893 - DNA, 33 bp, Homo sapiens
ccccttggcagtattatggtggctctgtcccag

SEQ ID NO: 17894 - DNA, 33 bp, Homo sapiens
ccaagtcattaaagcagagccggatagttgaaa

SEQ ID NO: 17895 - DNA, 33 bp, Homo sapiens
attgtctattgtcttcgatgttcccatgcctag

SEQ ID NO: 17896 - DNA, 33 bp, Homo sapiens
taactgaacaatacaagcccagatggattgggt

SEQ ID NO: 17897 - DNA, 33 bp, Homo sapiens
cacaacagtactaaaatggtaggtagatattat

SEQ ID NO: 17898 - DNA, 33 bp, Homo sapiens
gtcagtctttccattatgtagctaaagcaacta

SEQ ID NO: 17899 - DNA, 33 bp, Homo sapiens
ttctgtctttggatgcccctaactgctcagaag

SEQ ID NO: 17900 - DNA, 33 bp, Homo sapiens
ggtttcatttagagcattaataaatacctggca

SEQ ID NO: 17901 - DNA, 33 bp, Homo sapiens
tgtgcgtcagttctagtaatgccaaaaagagga

SEQ ID NO: 17902 - DNA, 33 bp, Homo sapiens
taccaaaacctgcatctgaaataacttctaaga

SEQ ID NO: 17903 - DNA, 51 bp, Homo sapiens
agaatgatgttcaccaatagctagggatgattaatattgagtaaagatttg

SEQ ID NO: 17904 - DNA, 51 bp, Homo sapiens
ttgttttaaatgttatcttagtgtctcattggtctgaggtttttcctcttg

SEQ ID NO: 17905 - DNA, 51 bp, Homo sapiens
actttatccttccagccgcaactcagatgacccaaagtcagacatcacatc

SEQ ID NO: 17906 - DNA, 33 bp, Homo sapiens
agtaatctgtttaaaggcaaattggatccttta

SEQ ID NO: 17907 - DNA, 33 bp, Homo sapiens
cccattatcgataagcgcctggtttgatttcat

SEQ ID NO: 17908 - DNA, 33 bp, Homo sapiens
gtaaacaatgataaacgcaagaaacgatctcat

SEQ ID NO: 17909 - DNA, 33 bp, Homo sapiens
aaagcactgttacatagagaaatccctccaaaa

SEQ ID NO: 17910 - DNA, 33 bp, Homo sapiens
cacatttattctaaacgacacatgaaccgagaa

SEQ ID NO: 17911 - DNA, 33 bp, Homo sapiens
aatttcagaaaagcatgagtgctagacctcctt

SEQ ID NO: 17912 - DNA, 33 bp, Homo sapiens
tatattattgaatgactaatcactttcataaac

SEQ ID NO: 17913 - DNA, 33 bp, Homo sapiens
gctgcatttcatgtcattcgttctttcactcat

SEQ ID NO: 17914 - DNA, 33 bp, Homo sapiens
ttgtctttccatgatatcaataacttttaacat

SEQ ID NO: 17915 - DNA, 33 bp, Homo sapiens
ttgtgtagatatttaatggctcaattttgaatc

SEQ ID NO: 17916 - DNA, 33 bp, Homo sapiens
atgtgttgatttctcatgtcaatactttactac

SEQ ID NO: 17917 - DNA, 33 bp, Homo sapiens
gaataagtgagtcgtatccatgttattctgaaa

SEQ ID NO: 17918 - DNA, 33 bp, Homo sapiens
aagtagcatggaaaaagttgtttatgtgaaaat

SEQ ID NO: 17919 - DNA, 51 bp, Homo sapiens
ttcattggtgagggtatttaaagactgagtagcttaatatttaaccacaag

SEQ ID NO: 17920 - DNA, 51 bp, Homo sapiens
atttattgaatactgtatattatgttaaaattgtgatgattttgtaccagg

SEQ ID NO: 17921 - DNA, 33 bp, Homo sapiens
aggtctttagacgtaggaatcagaatgatataa

SEQ ID NO: 17922 - DNA, 33 bp, Homo sapiens
ttctaggtgaagtggcgagacagaatggggctg

SEQ ID NO: 17923 - DNA, 51 bp, Homo sapiens
aagccccactgaagtaattggtagagaatgagtaacatgataaacacctgg

SEQ ID NO: 17924 - DNA, 33 bp, Homo sapiens
tggttccagactttggtaacaactgaaatatcc

SEQ ID NO: 17925 - DNA, 33 bp, Homo sapiens
gtaacttagactaaaagtgttgtccacaagatt

SEQ ID NO: 17926 - DNA, 33 bp, Homo sapiens
tggacttccatgtgagtatttatctccctacgt

SEQ ID NO: 17927 - DNA, 51 bp, Homo sapiens
cccatatctaatcttgttttatccatattgtattctattattgcttaactg

SEQ ID NO: 17928 - DNA, 33 bp, Homo sapiens
tggaatttcaacccatgaatttaactcaattat

SEQ ID NO: 17929 - DNA, 33 bp, Homo sapiens
cattatattcaagctcgcctgccattagccaaa

SEQ ID NO: 17930 - DNA, 33 bp, Homo sapiens
atcatacctatttcaagactgtgtaaaacaagt

SEQ ID NO: 17931 - DNA, 33 bp, Homo sapiens
ccaggtgaatgtcaaaccacctacatgtagaac

SEQ ID NO: 17932 - DNA, 33 bp, Homo sapiens
attattgaatgccatgtatatagtaataggagg

SEQ ID NO: 17933 - DNA, 33 bp, Homo sapiens
tttgttttgtgtttaagtatagtcaccatgctg

SEQ ID NO: 17934 - DNA, 33 bp, Homo sapiens
cttctactctacagccggatttatttcagaaga

SEQ ID NO: 17935 - DNA, 33 bp, Homo sapiens
ttgaactaatttgcactcttagcaacagtgtaa

SEQ ID NO: 17936 - DNA, 51 bp, Homo sapiens
tgcaaacaatttgtttttggcattgcatgtaaagactatcatcatttactt

SEQ ID NO: 17937 - DNA, 51 bp, Homo sapiens
caatttgatgttctgtgtagaagacgattggtgaaggcttctattcagcca

SEQ ID NO: 17938 - DNA, 51 bp, Homo sapiens
ccactgagcacatagcattatgacataactattcctgagacatggggagat

SEQ ID NO: 17939 - DNA, 33 bp, Homo sapiens
actttatagaacataagtattgcatataacaag

SEQ ID NO: 17940 - DNA, 33 bp, Homo sapiens
tgtgtattctgaaacatcaattatctggagaga

SEQ ID NO: 17941 - DNA, 33 bp, Homo sapiens
tccttacattcttgaagtatatccatgtaacca

SEQ ID NO: 17942 - DNA, 33 bp, Homo sapiens
gagaaattggaaaaaacctgtgtcatatgctta

SEQ ID NO: 17943 - DNA, 33 bp, Homo sapiens
tgctgatgagattcaagctatgagaaggcattt

SEQ ID NO: 17944 - DNA, 33 bp, Homo sapiens
tgatccatcatgagagtcagtaatgtgttttcc

SEQ ID NO: 17945 - DNA, 33 bp, Homo sapiens
agacttaacacttttctcgtgggcaaagagagt

SEQ ID NO: 17946 - DNA, 33 bp, Homo sapiens
agttgctctgcattaggcaatgtgtggtaactt

SEQ ID NO: 17947 - DNA, 33 bp, Homo sapiens
aaactatattgtttggtagggtaacagcgaatg

SEQ ID NO: 17948 - DNA, 33 bp, Homo sapiens
aattctctcaaactttgaaacagcttgcctttt

SEQ ID NO: 17949 - DNA, 51 bp, Homo sapiens
ttactctcaggagtgttcatgccaatacagagtggttttttgacacagttt

SEQ ID NO: 17950 - DNA, 51 bp, Homo sapiens
gtggaaaggaatagtgatcaatacctacatgaactaacttataacacagtg

SEQ ID NO: 17951 - DNA, 33 bp, Homo sapiens
ccaggattcaaatgtagcaatgcaaagttattt

SEQ ID NO: 17952 - DNA, 33 bp, Homo sapiens
cctgttggcttcctaattcatggacaaaatcaa

SEQ ID NO: 17953 - DNA, 33 bp, Homo sapiens
tttgctcattgtcttctaaacataaaattgctc

SEQ ID NO: 17954 - DNA, 33 bp, Homo sapiens
atgacaaaacttaatatgtcctactgtaattga

SEQ ID NO: 17955 - DNA, 33 bp, Homo sapiens
acaaaatctgctgacatgagtacatagcactag

SEQ ID NO: 17956 - DNA, 33 bp, Homo sapiens
acatagcactagaaaagaagctttctgacaccc

SEQ ID NO: 17957 - DNA, 51 bp, Homo sapiens
ctttgatgaaagtggccaaattttatcataacagaatgaaaaatagtcatt

SEQ ID NO: 17958 - DNA, 33 bp, Homo sapiens
tccatataacatgctcggagactctacatataa

SEQ ID NO: 17959 - DNA, 33 bp, Homo sapiens
cctatattatgaagtggaaaaccagtcttttga

SEQ ID NO: 17960 - DNA, 33 bp, Homo sapiens
aatagctattctgatcgatgttaaatggtaact

SEQ ID NO: 17961 - DNA, 33 bp, Homo sapiens
gattcaatttcccaaggaacaataacagactat

SEQ ID NO: 17962 - DNA, 33 bp, Homo sapiens
tagggaaccgaaatcatctgctactgtgatgtt

SEQ ID NO: 17963 - DNA, 33 bp, Homo sapiens
tattgatttccacccagtaagtatgactcaaga

SEQ ID NO: 17964 - DNA, 33 bp, Homo sapiens
cttacgcaggcatcgggccaacccacctgaaga

SEQ ID NO: 17965 - DNA, 51 bp, Homo sapiens
taaaagaatctattaatgggccctataaaattagctatgtacattattttc

SEQ ID NO: 17966 - DNA, 51 bp, Homo sapiens
tttctttgcatttagttaataatctgaacattcattgatacataagagtat

SEQ ID NO: 17967 - DNA, 51 bp, Homo sapiens
tcactttatcatgaagctattgggaggttatataagataaaagctgtatga

SEQ ID NO: 17968 - DNA, 33 bp, Homo sapiens
accctaattagttaaaggagccatcaaaatact

SEQ ID NO: 17969 - DNA, 33 bp, Homo sapiens
tttcgtctctgacaactctaatgacttcatcta

SEQ ID NO: 17970 - DNA, 33 bp, Homo sapiens
gcaagaaaggatgatctagaaacttactgtaaa

SEQ ID NO: 17971 - DNA, 33 bp, Homo sapiens
acaaacaagaaaagaattgtgaacctcttgtac

SEQ ID NO: 17972 - DNA, 33 bp, Homo sapiens
ttatcaaaggtgccgataatatacaatggggag

SEQ ID NO: 17973 - DNA, 33 bp, Homo sapiens
ataacattaagagaacgaagtcctgtactccag

SEQ ID NO: 17974 - DNA, 33 bp, Homo sapiens
aacaaaagcatgaaaagtgaatatgttgaaatg

SEQ ID NO: 17975 - DNA, 33 bp, Homo sapiens
ataaagcaagcttccattatccatacagagctt

SEQ ID NO: 17976 - DNA, 33 bp, Homo sapiens
tacatgaaactctcaagcagactgacacacatt

SEQ ID NO: 17977 - DNA, 33 bp, Homo sapiens
taccaaatggatggaataatgaaataactgatt

SEQ ID NO: 17978 - DNA, 33 bp, Homo sapiens
taggtattgtcttttaggtcaaccatttacttt

SEQ ID NO: 17979 - DNA, 33 bp, Homo sapiens
aaaccctttgaccatggagacttgaacaatcac

SEQ ID NO: 17980 - DNA, 33 bp, Homo sapiens
atgtttaacatttcaagggtgcataatccaact

SEQ ID NO: 17981 - DNA, 33 bp, Homo sapiens
tgtttgttttgcaatattacctcaatttaaatt

SEQ ID NO: 17982 - DNA, 33 bp, Homo sapiens
cagtggtgtataattatgagaaaattctatttt

SEQ ID NO: 17983 - DNA, 33 bp, Homo sapiens
cctgccataaacttcgtcacacaatggagtcta

SEQ ID NO: 17984 - DNA, 33 bp, Homo sapiens
tttagccaggctttccgctctcacctccaaata

SEQ ID NO: 17985 - DNA, 33 bp, Homo sapiens
agaataaggactgagatgatctggcaatgaaga

SEQ ID NO: 17986 - DNA, 33 bp, Homo sapiens
ttgactcagtttctcatctctaagttgagttga

SEQ ID NO: 17987 - DNA, 33 bp, Homo sapiens
cgtcacttcctagtccggataaccagatccagt

SEQ ID NO: 17988 - DNA, 33 bp, Homo sapiens
aggcacgacctggaaatctcaattaaaatcaca

SEQ ID NO: 17989 - DNA, 51 bp, Homo sapiens
cttactctgtctaaaaggaagtttatatttatgaggacaaaggagatggat

SEQ ID NO: 17990 - DNA, 51 bp, Homo sapiens
aaataaataaatctaacttaagatgtaattttgagggtcttgctttgggtt

SEQ ID NO: 17991 - DNA, 33 bp, Homo sapiens
aaatgaatcaataatctgagctaggaagtttag

SEQ ID NO: 17992 - DNA, 33 bp, Homo sapiens
gctaggaagaggtgcttacactcagctcactgg

SEQ ID NO: 17993 - DNA, 33 bp, Homo sapiens
tgaacaacacagaatacatactcataccttttt

SEQ ID NO: 17994 - DNA, 33 bp, Homo sapiens
ttctcagaatccttccggcatccagtataagtg

SEQ ID NO: 17995 - DNA, 33 bp, Homo sapiens
tgtttaaagtgatggagaatagacagatggaaa

SEQ ID NO: 17996 - DNA, 33 bp, Homo sapiens
attgttccttggagacgagtgacattgataggg

SEQ ID NO: 17997 - DNA, 33 bp, Homo sapiens
ctgcatgttcagacaaggagtggttgaggaaga

SEQ ID NO: 17998 - DNA, 33 bp, Homo sapiens
ctggtatctggatgaggatggcaaccgctcttc

SEQ ID NO: 17999 - DNA, 33 bp, Homo sapiens
ccagaagacacgtgacgggggttctcagtataa

SEQ ID NO: 18000 - DNA, 33 bp, Homo sapiens
aggtgccaagccataagcttcagtgtaattcac

SEQ ID NO: 18001 - DNA, 33 bp, Homo sapiens
cctcaagggctggcaatgtagagggctctgaac

SEQ ID NO: 18002 - DNA, 33 bp, Homo sapiens
caatccaacacagtagttttcactatcaccatt

SEQ ID NO: 18003 - DNA, 33 bp, Homo sapiens
cacctgactgtgctaacactagagcctatttct

SEQ ID NO: 18004 - DNA, 33 bp, Homo sapiens
gtgactatcctactaagtatcttactcaacgaa

SEQ ID NO: 18005 - DNA, 51 bp, Homo sapiens
cttaaacttatttatgaaatcgtcctaattgatgtaaagagccatttattg

SEQ ID NO: 18006 - DNA, 33 bp, Homo sapiens
gtccttctgaatatcggatagagaaggaaacca

SEQ ID NO: 18007 - DNA, 33 bp, Homo sapiens
gcaatagctagataaccagcatacatacccaca

SEQ ID NO: 18008 - DNA, 33 bp, Homo sapiens
gaataaaaatgcaagagagatctgtcttagcct

SEQ ID NO: 18009 - DNA, 33 bp, Homo sapiens
atgatgtagtatagaagtgggaaaataggctct

SEQ ID NO: 18010 - DNA, 33 bp, Homo sapiens
tttccctggttgatgaggtgttaggtacgttag

SEQ ID NO: 18011 - DNA, 33 bp, Homo sapiens
cactctccacataaaattattcaaataggctgg

SEQ ID NO: 18012 - DNA, 51 bp, Homo sapiens
agttgttgaaggaatggtgatatactggctgacacaagtctttacttactg

SEQ ID NO: 18013 - DNA, 51 bp, Homo sapiens
aatttgatccttttaagctgtgttatgtaggccggtactgcattcagtcta

SEQ ID NO: 18014 - DNA, 51 bp, Homo sapiens
gagtccccaagctggaaattgttaattattgaccaaattagaaataaatat

SEQ ID NO: 18015 - DNA, 51 bp, Homo sapiens
cttaattcaattttcttcagtcctataatagtcagcacatgcagttatttt

SEQ ID NO: 18016 - DNA, 33 bp, Homo sapiens
aactcatgtatttgtatgggtggtgtattagtc

SEQ ID NO: 18017 - DNA, 33 bp, Homo sapiens
cttgatctctactttatcgatgagaaaataagg

SEQ ID NO: 18018 - DNA, 51 bp, Homo sapiens
agtaatactaccttagatgtgaaaatactaatattagcaccagacttcagg

SEQ ID NO: 18019 - DNA, 33 bp, Homo sapiens
ggtgctgccaaaattctagttattggaccaaaa

SEQ ID NO: 18020 - DNA, 33 bp, Homo sapiens
gaataaggagaatgtatgcacaaagaacaagat

SEQ ID NO: 18021 - DNA, 33 bp, Homo sapiens
aactggctcataaatctatagtcatgagaaatt

SEQ ID NO: 18022 - DNA, 33 bp, Homo sapiens
ttgggacctcaagaagcagatattgaatgggat

SEQ ID NO: 18023 - DNA, 33 bp, Homo sapiens
gtatgatggacccagagcttaaattttgttagt

SEQ ID NO: 18024 - DNA, 33 bp, Homo sapiens
ctaagacatcagctaaggaaagtatatgacacg

SEQ ID NO: 18025 - DNA, 33 bp, Homo sapiens
aaattatttctccaaacaaagacagggtgtatc

SEQ ID NO: 18026 - DNA, 33 bp, Homo sapiens
ctattataattgaatatggtcacgtgccacata

SEQ ID NO: 18027 - DNA, 33 bp, Homo sapiens
ggtcagtaatgtgttatgctttgacattatcat

SEQ ID NO: 18028 - DNA, 33 bp, Homo sapiens
ttgacctcagtgactagaacaggagaagacgtc

SEQ ID NO: 18029 - DNA, 33 bp, Homo sapiens
atgtgactcaatggtctcaagatactgccagtc

SEQ ID NO: 18030 - DNA, 33 bp, Homo sapiens
gaccagtggtttcagcgataagctgatgtagcc

SEQ ID NO: 18031 - DNA, 33 bp, Homo sapiens
cctaatcttttgctaagtggacttttccatata

SEQ ID NO: 18032 - DNA, 51 bp, Homo sapiens
gttgcactattcatattttataagagcgaatcatactcagttttgtttcct

SEQ ID NO: 18033 - DNA, 33 bp, Homo sapiens
ctttccattttggatacatctcttcacacctac

SEQ ID NO: 18034 - DNA, 33 bp, Homo sapiens
ccaatagaagtaatactacaggttcagaatcca

SEQ ID NO: 18035 - DNA, 33 bp, Homo sapiens
gcttgagtctttgatataggggtgacagagata

SEQ ID NO: 18036 - DNA, 33 bp, Homo sapiens
gagaggcaaaaagagaggaattcaaccttgaac

SEQ ID NO: 18037 - DNA, 33 bp, Homo sapiens
tgcattattgtctccagatattccaaaccctcc

SEQ ID NO: 18038 - DNA, 33 bp, Homo sapiens
attcccttagggagaataaccaaagatgctgct

SEQ ID NO: 18039 - DNA, 33 bp, Homo sapiens
atttgttcttgaattcgaggccaaccagggtcc

SEQ ID NO: 18040 - DNA, 33 bp, Homo sapiens
taggtccacacttgacggtacactctcatgagg

SEQ ID NO: 18041 - DNA, 33 bp, Homo sapiens
attctgacgagtaatccacacagttggggaggg

SEQ ID NO: 18042 - DNA, 33 bp, Homo sapiens
tgcagaggacacagaagtgtttaggacatggac

SEQ ID NO: 18043 - DNA, 33 bp, Homo sapiens
gtcttagcaacagaaagctcttagatagtaggc

SEQ ID NO: 18044 - DNA, 33 bp, Homo sapiens
gttcctggtcccactgtaggttctggccatgcc

SEQ ID NO: 18045 - DNA, 33 bp, Homo sapiens
cccccttttcgtgggatgagagcagagggagat

SEQ ID NO: 18046 - DNA, 33 bp, Homo sapiens
ttacagttaaaaaacgtcagcctggactaagag

SEQ ID NO: 18047 - DNA, 33 bp, Homo sapiens
tctgtcaagaaacaaccacgacgtcacatttat

SEQ ID NO: 18048 - DNA, 33 bp, Homo sapiens
cctgtcaaaaaaaagaggcactcaattctgttt

SEQ ID NO: 18049 - DNA, 51 bp, Homo sapiens
ttttctctccctggcagtgtgtacagaagcgaagactacaggctgaaattc

SEQ ID NO: 18050 - DNA, 51 bp, Homo sapiens
ttagtctttctagggatgactactagaactccaaatagtatggccttattt

SEQ ID NO: 18051 - DNA, 51 bp, Homo sapiens
ctcttaagggtagagatttcaaagatgtaactttcaccaacaacagatggg

SEQ ID NO: 18052 - DNA, 51 bp, Homo sapiens
ccagagttccagtctggtaaatcattagcttttaggtggtcttcaagtcca

SEQ ID NO: 18053 - DNA, 33 bp, Homo sapiens
ttctgactttgaggtatgctactaggctgatta

SEQ ID NO: 18054 - DNA, 33 bp, Homo sapiens
agtcctacactaaatctagtctcatacccttgc

SEQ ID NO: 18055 - DNA, 33 bp, Homo sapiens
agaaatagccttctaagacagcactaataaaaa

SEQ ID NO: 18056 - DNA, 33 bp, Homo sapiens
tatcaggaataaggacggagtttcaaagaacat

SEQ ID NO: 18057 - DNA, 33 bp, Homo sapiens
cactcacaactcattatcacagccttgatccca

SEQ ID NO: 18058 - DNA, 33 bp, Homo sapiens
ctcttgataattccacgctcctaaggcatcagg

SEQ ID NO: 18059 - DNA, 33 bp, Homo sapiens
ttaatagtgcaatctcgacaagtgcgtatgagt

SEQ ID NO: 18060 - DNA, 33 bp, Homo sapiens
cccctcatttagtagatgcttgctaaatattat

SEQ ID NO: 18061 - DNA, 33 bp, Homo sapiens
tctccactggaaaaaggataaatgtcttctaag

SEQ ID NO: 18062 - DNA, 33 bp, Homo sapiens
aggggataagggtacagcatttcagagaggagg

SEQ ID NO: 18063 - DNA, 33 bp, Homo sapiens
tttgagagttgtcaaagtatatgttacttaagg

SEQ ID NO: 18064 - DNA, 33 bp, Homo sapiens
aaactggcacataaacgctagatcttcaactga

SEQ ID NO: 18065 - DNA, 33 bp, Homo sapiens
tacaattcaaggtaaatgtgtaaatggaaattt

SEQ ID NO: 18066 - DNA, 33 bp, Homo sapiens
catactcaatagttaatagactgcattttgcat

SEQ ID NO: 18067 - DNA, 33 bp, Homo sapiens
aagtagttttagcagagcaaagaagtcaagttc

SEQ ID NO: 18068 - DNA, 33 bp, Homo sapiens
taatgaatagaactaagtaatcatctccttaca

SEQ ID NO: 18069 - DNA, 33 bp, Homo sapiens
agtgcaagtttattgagtacctacaatgtcaca

SEQ ID NO: 18070 - DNA, 33 bp, Homo sapiens
tgttgagagcttcctatgtgtcaagtcttgtga

SEQ ID NO: 18071 - DNA, 33 bp, Homo sapiens
tgtaaattactaacactgtcaactgagagtaga

SEQ ID NO: 18072 - DNA, 33 bp, Homo sapiens
aatgtctattgtgacctcattattcatttctgt

SEQ ID NO: 18073 - DNA, 33 bp, Homo sapiens
ccgaagtcctgctttccattctaggttcctgcc

SEQ ID NO: 18074 - DNA, 33 bp, Homo sapiens
agcatactgcttagtatgctgagaagaaagcgc

SEQ ID NO: 18075 - DNA, 33 bp, Homo sapiens
ctcttcctagcctccatgtaacattataaatat

SEQ ID NO: 18076 - DNA, 33 bp, Homo sapiens
actccatcttccagtatgctttaactccatctt

SEQ ID NO: 18077 - DNA, 51 bp, Homo sapiens
cacaacaatttctttatctagaaaattgtaattgcttttgacctaccttga

SEQ ID NO: 18078 - DNA, 33 bp, Homo sapiens
gcaaggtttttcaccagccaacaaacatgcgaa

SEQ ID NO: 18079 - DNA, 33 bp, Homo sapiens
gtggatgaacaaatactaagaggaaacttcaag

SEQ ID NO: 18080 - DNA, 33 bp, Homo sapiens
ctatacacacagtgtacgtagtaacatgactga

SEQ ID NO: 18081 - DNA, 33 bp, Homo sapiens
cccatataataaacactggaatcttcataaatg

SEQ ID NO: 18082 - DNA, 33 bp, Homo sapiens
aacatgaactgtaccatcccacttacgttgcat

SEQ ID NO: 18083 - DNA, 51 bp, Homo sapiens
atattcatagtgtatcatatgctaatgaaatgcaaataacatcaattctgg

SEQ ID NO: 18084 - DNA, 33 bp, Homo sapiens
aagccctcaactgtgagaagggaccctgaaagt

SEQ ID NO: 18085 - DNA, 51 bp, Homo sapiens
ccatttgtatttatactatatttgcgctttgatactttctcttctttagtt

SEQ ID NO: 18086 - DNA, 51 bp, Homo sapiens
tgcggggaggtgtgccttatcatcagactcagtagctttccctgagtactt

SEQ ID NO: 18087 - DNA, 33 bp, Homo sapiens
tgggtcctaacaaaccgatgtgagctcatgaaa

SEQ ID NO: 18088 - DNA, 33 bp, Homo sapiens
agtagaggaagtagtggagtaaaatgcttttta

SEQ ID NO: 18089 - DNA, 33 bp, Homo sapiens
taccaacaacattgtagctgagctgtttcactc

SEQ ID NO: 18090 - DNA, 33 bp, Homo sapiens
attctggatcagaaggtaaacttacgtgttatt

SEQ ID NO: 18091 - DNA, 33 bp, Homo sapiens
aacctgttaggtcctctagtgcaggatgtactt

SEQ ID NO: 18092 - DNA, 33 bp, Homo sapiens
tatgaattttactttcgcgatcacacagctaaa

SEQ ID NO: 18093 - DNA, 33 bp, Homo sapiens
tcagcataatgttttcgctctcagatcttgaag

SEQ ID NO: 18094 - DNA, 33 bp, Homo sapiens
ggtgtttgttatgctgtacaatttgtcaaatac

SEQ ID NO: 18095 - DNA, 33 bp, Homo sapiens
tttagagtccacttacgcttgacttatatgtga

SEQ ID NO: 18096 - DNA, 33 bp, Homo sapiens
ttttataaatgatgaagccaattcaggtatatt

SEQ ID NO: 18097 - DNA, 33 bp, Homo sapiens
aagttaaaaacctagatcaattataggctgctg

SEQ ID NO: 18098 - DNA, 33 bp, Homo sapiens
ctcccagttttgctgagtaagtgtgaagtgtca

SEQ ID NO: 18099 - DNA, 33 bp, Homo sapiens
aaaacaaacacaaaaatattactcatacttgac

SEQ ID NO: 18100 - DNA, 33 bp, Homo sapiens
tgatgggagaggcatctctgaaggtttctgaca

SEQ ID NO: 18101 - DNA, 33 bp, Homo sapiens
taaaccatcttccaaattgaatgtaccattttg

SEQ ID NO: 18102 - DNA, 51 bp, Homo sapiens
tgaccaaagatttaaatcacaatacgacattccctttggatacattgaaag

SEQ ID NO: 18103 - DNA, 33 bp, Homo sapiens
ttccttgaatcagacagatctgtgtcaataccc

SEQ ID NO: 18104 - DNA, 33 bp, Homo sapiens
gatttctctgtctcattaatatataaaacctga

SEQ ID NO: 18105 - DNA, 33 bp, Homo sapiens
gcccacaggaaaaggataaactgacccaatgga

SEQ ID NO: 18106 - DNA, 33 bp, Homo sapiens
tgagtgcacttaccattaaagtgttagattaag

SEQ ID NO: 18107 - DNA, 33 bp, Homo sapiens
attgtctactttaacttactactgcaaagacta

SEQ ID NO: 18108 - DNA, 33 bp, Homo sapiens
gtggctttatgctgcctcctatgtaatttagtt

SEQ ID NO: 18109 - DNA, 33 bp, Homo sapiens
aggaatgctctttgcagtgaaagtcagctggac

SEQ ID NO: 18110 - DNA, 33 bp, Homo sapiens
aacacgggcagaataacagggtgtaatgtcagt

SEQ ID NO: 18111 - DNA, 33 bp, Homo sapiens
gagataagttgaggtgtcacataggaagaatat

SEQ ID NO: 18112 - DNA, 33 bp, Homo sapiens
ttcacaacctgttatttaaaggtccaccgtatt

SEQ ID NO: 18113 - DNA, 33 bp, Homo sapiens
atacatatacacgatagaaatatacacatacat

SEQ ID NO: 18114 - DNA, 33 bp, Homo sapiens
attctgtctttcttgcgcagttcaaataagggc

SEQ ID NO: 18115 - DNA, 33 bp, Homo sapiens
ggcaacattgacgaatgacagttacatttattt

SEQ ID NO: 18116 - DNA, 33 bp, Homo sapiens
attttataaggaattggaagtcattgaaaatat

SEQ ID NO: 18117 - DNA, 33 bp, Homo sapiens
taatatgccaagttaatcaaaaccattttaatg

SEQ ID NO: 18118 - DNA, 33 bp, Homo sapiens
gtgcattttcctagagtctcaggatgagaagaa

SEQ ID NO: 18119 - DNA, 51 bp, Homo sapiens
ttgcagaaccattagaccaaaagccgaagtaagtgtgtgaactcacaatag

SEQ ID NO: 18120 - DNA, 51 bp, Homo sapiens
caattatcccaaagcttcatggtgtcaacttgcaaacgtttgctacttgtc

SEQ ID NO: 18121 - DNA, 33 bp, Homo sapiens
agatacaactcctgtggacaactctcatggatc

SEQ ID NO: 18122 - DNA, 33 bp, Homo sapiens
atctctagagatataatcacatttactcaagaa

SEQ ID NO: 18123 - DNA, 33 bp, Homo sapiens
gaggagatgtaaattcgcaggcacttccagcta

SEQ ID NO: 18124 - DNA, 33 bp, Homo sapiens
tgttctggagaggaaatgaaggtcatagccgaa

SEQ ID NO: 18125 - DNA, 33 bp, Homo sapiens
ttacttgtaaacctccgaaattgaggcaagtta

SEQ ID NO: 18126 - DNA, 33 bp, Homo sapiens
ggtaccatatttgtcatgtggattgaaatctta

SEQ ID NO: 18127 - DNA, 33 bp, Homo sapiens
ccaaaaccttaatatatctctcacggtcggact

SEQ ID NO: 18128 - DNA, 33 bp, Homo sapiens
aaaataaagtaaggagtatcaaggccaaaatct

SEQ ID NO: 18129 - DNA, 33 bp, Homo sapiens
aatcaggattacctcaggagatagaagttaaga

SEQ ID NO: 18130 - DNA, 33 bp, Homo sapiens
ccatttgttaactccattgaattgtctgtgcaa

SEQ ID NO: 18131 - DNA, 33 bp, Homo sapiens
gtgcagtgcaaggctatactcaggagcagagtg

SEQ ID NO: 18132 - DNA, 33 bp, Homo sapiens
tatgagcctgtaagaatcacagaattactgggc

SEQ ID NO: 18133 - DNA, 33 bp, Homo sapiens
gatgagaaacacttactcttcctgttatggtga

SEQ ID NO: 18134 - DNA, 33 bp, Homo sapiens
gcagtgcagtcataatgaaggtcttactcaatt

SEQ ID NO: 18135 - DNA, 51 bp, Homo sapiens
tctttagggtagtaataaagactaagtaagtagtgtctgaatctatggcag

SEQ ID NO: 18136 - DNA, 33 bp, Homo sapiens
agacaggaaagaaatagctgcccatgaaaagga

SEQ ID NO: 18137 - DNA, 51 bp, Homo sapiens
aaatgagatattttgtatttagtaagaaggcctcagctacatataagtgta

SEQ ID NO: 18138 - DNA, 51 bp, Homo sapiens
agtcaatattagtttgcaatgataatgatgataattttcatgaacaagtta

SEQ ID NO: 18139 - DNA, 51 bp, Homo sapiens
ggggggataattttacacataactcgtagggttttcatgataatttaaaag

SEQ ID NO: 18140 - DNA, 51 bp, Homo sapiens
tatggaagctcttttttttgcacccgccagacacttcttccctgaacaaat

SEQ ID NO: 18141 - DNA, 51 bp, Homo sapiens
atgctcaccattttcatagcagaaagctagttatactaaattgttctaatt

SEQ ID NO: 18142 - DNA, 33 bp, Homo sapiens
aaccaatacatggcacgagaagagacaaaaatt

SEQ ID NO: 18143 - DNA, 33 bp, Homo sapiens
tcactttctctctctgtcacatctctgaagcag

SEQ ID NO: 18144 - DNA, 51 bp, Homo sapiens
atagtccagatcctaactaggagtagaaatgtgaattgtgctgcctgatct

SEQ ID NO: 18145 - DNA, 33 bp, Homo sapiens
tgtgttacttgcaaaatatccttggcttaagaa

SEQ ID NO: 18146 - DNA, 33 bp, Homo sapiens
atgttgttttatgcaatgaattttgaacagaaa

SEQ ID NO: 18147 - DNA, 33 bp, Homo sapiens
agaaatctcaaagtcacatgaatggcaatattt

SEQ ID NO: 18148 - DNA, 33 bp, Homo sapiens
aacaaatgtttgtgaagaagcggctttgaaaat

SEQ ID NO: 18149 - DNA, 33 bp, Homo sapiens
gcccactaacatctggtcaattttccaatgcaa

SEQ ID NO: 18150 - DNA, 33 bp, Homo sapiens
ttaaaaccattgctagtcacagcttggatgtat

SEQ ID NO: 18151 - DNA, 33 bp, Homo sapiens
aaggcagtaaaacatcgcaatttaacttttata

SEQ ID NO: 18152 - DNA, 33 bp, Homo sapiens
atcactagaaattggaggttcattgaaaatgca

SEQ ID NO: 18153 - DNA, 33 bp, Homo sapiens
gaaggagaacttagtctgagtaaaggtcacaag

SEQ ID NO: 18154 - DNA, 33 bp, Homo sapiens
aaaccatttcaatcaagtaattcagaataaagc

SEQ ID NO: 18155 - DNA, 33 bp, Homo sapiens
atgataatagtacttcgctacattcttgatcct

SEQ ID NO: 18156 - DNA, 33 bp, Homo sapiens
cctggctgtatatgaaggaggatcaaacacaaa

SEQ ID NO: 18157 - DNA, 33 bp, Homo sapiens
taatggagaaaaattctactgagctaaatatat

SEQ ID NO: 18158 - DNA, 33 bp, Homo sapiens
agacctgtcaatgtgttaaaatattatctagaa

SEQ ID NO: 18159 - DNA, 33 bp, Homo sapiens
ggatctggcattgcacgacaggtgaaaataagg

SEQ ID NO: 18160 - DNA, 33 bp, Homo sapiens
tgtaaatcacctctccgctactccttaggctcc

SEQ ID NO: 18161 - DNA, 33 bp, Homo sapiens
gtttacactgtagtcattgaaatcaatctacgc

SEQ ID NO: 18162 - DNA, 51 bp, Homo sapiens
taatgtccctttacaatgtatagcagggatactgattagagagccatcatt

SEQ ID NO: 18163 - DNA, 51 bp, Homo sapiens
taacagaaaaaagaaaaagaagaacgacagataagatatttgtggtatctg

SEQ ID NO: 18164 - DNA, 51 bp, Homo sapiens
atataatgatcgtatgtaaataagcgcagcataacttactgaaaagagaaa

SEQ ID NO: 18165 - DNA, 33 bp, Homo sapiens
ccacagtgtcctggactcatttagatcaattgt

SEQ ID NO: 18166 - DNA, 33 bp, Homo sapiens
agtcatgagagaagactgaatgctaaaggaacc

SEQ ID NO: 18167 - DNA, 33 bp, Homo sapiens
gactgagaaaggagaatgggggaagtatgaagg

SEQ ID NO: 18168 - DNA, 33 bp, Homo sapiens
ttattacatcaagaacgagataggtgccacaac

SEQ ID NO: 18169 - DNA, 33 bp, Homo sapiens
taaaaaatatgttatctctagcttcagcgtcct

SEQ ID NO: 18170 - DNA, 51 bp, Homo sapiens
tgaaatcctaatccttcctaggagctaattattaacttgaatttgatgttt

SEQ ID NO: 18171 - DNA, 33 bp, Homo sapiens
caccatataacaagcataacctactgagatgga

SEQ ID NO: 18172 - DNA, 33 bp, Homo sapiens
gggatcaggtagaagacgttacagcggacaacc

SEQ ID NO: 18173 - DNA, 51 bp, Homo sapiens
ggatatttgagctcatggtacattataaaggagtatgtcaacatagagcac

SEQ ID NO: 18174 - DNA, 33 bp, Homo sapiens
gctttccattacttcatgtctgagtccagtttc

SEQ ID NO: 18175 - DNA, 33 bp, Homo sapiens
aacactgtgactatcatacgatgtgaatgactc

SEQ ID NO: 18176 - DNA, 51 bp, Homo sapiens
aattctatgaattctgggccagtctgtccacccagaatgtagtattctaaa

SEQ ID NO: 18177 - DNA, 33 bp, Homo sapiens
ttcagcctggcttaggtagatagtaaatatttt

SEQ ID NO: 18178 - DNA, 33 bp, Homo sapiens
gagtgaagaggaaccagaagttctaagcactaa

SEQ ID NO: 18179 - DNA, 33 bp, Homo sapiens
gccaatgtgatttatggagatttctgaaaaaaa

SEQ ID NO: 18180 - DNA, 33 bp, Homo sapiens
gttagaaagcccagactcttgaaaaactaccaa

SEQ ID NO: 18181 - DNA, 33 bp, Homo sapiens
ttctaaatcaatgacatctgttcacatgttaag

SEQ ID NO: 18182 - DNA, 33 bp, Homo sapiens
taaactgttttttccatgaatgagagaaaggaa

SEQ ID NO: 18183 - DNA, 33 bp, Homo sapiens
atgagataccactttatgaccactgcgatgact

SEQ ID NO: 18184 - DNA, 33 bp, Homo sapiens
tctactagccagtaaatgtctgaatgtgtggct

SEQ ID NO: 18185 - DNA, 33 bp, Homo sapiens
gctatcattcacttcatggaggacaacaaatgc

SEQ ID NO: 18186 - DNA, 33 bp, Homo sapiens
aaatttatccttctacgctcatcttactgtgac

SEQ ID NO: 18187 - DNA, 33 bp, Homo sapiens
cttcttatcagtgtgatgatctttgataacagt

SEQ ID NO: 18188 - DNA, 33 bp, Homo sapiens
ctttatctgacctaaataaacttcatcatcctt

SEQ ID NO: 18189 - DNA, 33 bp, Homo sapiens
ggacagggccctaaactatgcatcgtggctgtt

SEQ ID NO: 18190 - DNA, 33 bp, Homo sapiens
agataattttgccacattgtatcttgtcttttt

SEQ ID NO: 18191 - DNA, 33 bp, Homo sapiens
acacagggaagtataagatatccacgcaaaatc

SEQ ID NO: 18192 - DNA, 33 bp, Homo sapiens
ctttactttagacagagattaacatcagaaggc

SEQ ID NO: 18193 - DNA, 51 bp, Homo sapiens
gaaagacaaggctcaggttgccaagtgccacccttccattgaaaaatggag

SEQ ID NO: 18194 - DNA, 33 bp, Homo sapiens
ttgaagtgtgagataagtataaagacagggcca

SEQ ID NO: 18195 - DNA, 51 bp, Homo sapiens
gatttctctatccaaatagccagcagatactactcacctgattgacagact

SEQ ID NO: 18196 - DNA, 51 bp, Homo sapiens
gaccagagtgcggaaacctcattcatatatcattaacacacctggcatacg

SEQ ID NO: 18197 - DNA, 33 bp, Homo sapiens
gttctgtgaagttttcgatgttctactttcttg

SEQ ID NO: 18198 - DNA, 33 bp, Homo sapiens
ccccaatggctatatacatgagaaaaccaatat

SEQ ID NO: 18199 - DNA, 33 bp, Homo sapiens
acttattgctttactggacatcataaagattgc

SEQ ID NO: 18200 - DNA, 33 bp, Homo sapiens
ttgtgacagtaaatgatggaacactttatcaat

SEQ ID NO: 18201 - DNA, 33 bp, Homo sapiens
tctaggaagtattgaatctgtctaagaaaccct

SEQ ID NO: 18202 - DNA, 33 bp, Homo sapiens
aaatgaaacaacaatctccacgaagcagtctta

SEQ ID NO: 18203 - DNA, 33 bp, Homo sapiens
ttgatgaatttctcacgagatactcatgcaata

SEQ ID NO: 18204 - DNA, 33 bp, Homo sapiens
ctgatattagtccatatgcaatttcttacaaaa

SEQ ID NO: 18205 - DNA, 33 bp, Homo sapiens
agctctcaggatttgctagtaagtagtttgtag

SEQ ID NO: 18206 - DNA, 33 bp, Homo sapiens
agtgcctgtcattagatggggtggtttaaacaa

SEQ ID NO: 18207 - DNA, 33 bp, Homo sapiens
ggcagagaattacctcgaattaagttcaaattt

SEQ ID NO: 18208 - DNA, 51 bp, Homo sapiens
cttgagacagcaatgaagggatgaaggaatgaatgagtttatatttcaatt

SEQ ID NO: 18209 - DNA, 33 bp, Homo sapiens
agagatttccgtcatcgagtaaatttagagaag

SEQ ID NO: 18210 - DNA, 33 bp, Homo sapiens
aatgtgtctaggaaactctctagtgcttagtcc

SEQ ID NO: 18211 - DNA, 33 bp, Homo sapiens
gcacagtcctaggccatgctcaaattttattat

SEQ ID NO: 18212 - DNA, 33 bp, Homo sapiens
gattcttcctgatatacctgagaagaaaccagc

SEQ ID NO: 18213 - DNA, 33 bp, Homo sapiens
tgaattggtaattggcggatcaagtaaaatgtt

SEQ ID NO: 18214 - DNA, 51 bp, Homo sapiens
cctggcaatcagtaattacctatgtgttttctgcattttctttaccaataa

SEQ ID NO: 18215 - DNA, 33 bp, Homo sapiens
agagtgtgctcaagtgtaatcgacaaccagtaa

SEQ ID NO: 18216 - DNA, 51 bp, Homo sapiens
aacaatcctcttccagatatttgacgtggcttcctccttcaccttctttgg

SEQ ID NO: 18217 - DNA, 33 bp, Homo sapiens
tttgcaatgtagtgactaggtccttctttcacc

SEQ ID NO: 18218 - DNA, 33 bp, Homo sapiens
attttccagttttgatcaaatgaaaccacaggg

SEQ ID NO: 18219 - DNA, 51 bp, Homo sapiens
attttggatcttccagtaatgtccacgtaatcaacatgagaccaggtgaaa

SEQ ID NO: 18220 - DNA, 51 bp, Homo sapiens
accatctctggctggccctggaatggcattacagttttctgacacaatgca

SEQ ID NO: 18221 - DNA, 33 bp, Homo sapiens
aattaggacaagagaattgaagtcatagaaggg

SEQ ID NO: 18222 - DNA, 33 bp, Homo sapiens
agaaaaatgtcacagaccacatacatattatat

SEQ ID NO: 18223 - DNA, 33 bp, Homo sapiens
agtgatggaatgggactgaaacccaagtctgcc

SEQ ID NO: 18224 - DNA, 33 bp, Homo sapiens
tacctggcacaggacatgtactcagtaagtgag

SEQ ID NO: 18225 - DNA, 33 bp, Homo sapiens
cagccaatcagggtacgggaacacccaaatatg

SEQ ID NO: 18226 - DNA, 51 bp, Homo sapiens
tggtagttctgtatcccaagccaaattcaaaatccgaaattatctgttaca

SEQ ID NO: 18227 - DNA, 33 bp, Homo sapiens
aagtaggttctcaccagatttatcccaagaaca

SEQ ID NO: 18228 - DNA, 51 bp, Homo sapiens
cacagagcagtcacagaccaaatgatggataattaagcattcttggtacca

SEQ ID NO: 18229 - DNA, 33 bp, Homo sapiens
caggctggggtttagatcttattggagaaggta

SEQ ID NO: 18230 - DNA, 33 bp, Homo sapiens
acactacgtacagaaatgaaccaccaccacctt

SEQ ID NO: 18231 - DNA, 33 bp, Homo sapiens
gtaatctgtaggtaaaccatacttgtcacactg

SEQ ID NO: 18232 - DNA, 33 bp, Homo sapiens
ttttttaaaaaccgtcgaagctatacagtagtt

SEQ ID NO: 18233 - DNA, 33 bp, Homo sapiens
agaccagataagaagatagatttgagtaggagg

SEQ ID NO: 18234 - DNA, 33 bp, Homo sapiens
tggattagtgcaagctgaagtgtcatcatatat

SEQ ID NO: 18235 - DNA, 33 bp, Homo sapiens
aggtaacaagatcagcgaatgctaacagcagct

SEQ ID NO: 18236 - DNA, 33 bp, Homo sapiens
attgaggtcttatagatatgaaatagctgcaga

SEQ ID NO: 18237 - DNA, 33 bp, Homo sapiens
tacagtacctaaaatagtaagcactcaaaaaag

SEQ ID NO: 18238 - DNA, 33 bp, Homo sapiens
tctgtgagatgtccaatgaacgtgtcaggctaa

SEQ ID NO: 18239 - DNA, 33 bp, Homo sapiens
ttgccattccacaaatgactatgaaagtgcatg

SEQ ID NO: 18240 - DNA, 33 bp, Homo sapiens
aattattccaatatcatgtatcaccctgcatgc

SEQ ID NO: 18241 - DNA, 33 bp, Homo sapiens
aagtttaagaaaatgagaaatcagccttagaaa

SEQ ID NO: 18242 - DNA, 33 bp, Homo sapiens
ctttcctatctctacatctgctctttcctcagc

SEQ ID NO: 18243 - DNA, 33 bp, Homo sapiens
cagacctccctaatgcgatttattgtaccaata

SEQ ID NO: 18244 - DNA, 33 bp, Homo sapiens
aaaggcataacaaggagtcctcatacttcaaac

SEQ ID NO: 18245 - DNA, 33 bp, Homo sapiens
gctggtattgtgctgatctacgaggtttccaaa

SEQ ID NO: 18246 - DNA, 33 bp, Homo sapiens
acatgaatagtatgaattgaaaacaatccttgt

SEQ ID NO: 18247 - DNA, 51 bp, Homo sapiens
ctgctcacccactcatgagaacacagctaaaagaatgtatttaacagtgtt

SEQ ID NO: 18248 - DNA, 33 bp, Homo sapiens
gtagaaagttaatgagtcaagagcccttataat

SEQ ID NO: 18249 - DNA, 33 bp, Homo sapiens
gccctctgtattctgatggtgaagtttgtggtt

SEQ ID NO: 18250 - DNA, 33 bp, Homo sapiens
gagcagaactattaaataacaaggtctatatgg

SEQ ID NO: 18251 - DNA, 33 bp, Homo sapiens
ggaaagtaggtcacgatataaagggtcaaataa

SEQ ID NO: 18252 - DNA, 33 bp, Homo sapiens
gggagattggtcaagcgaagtggttcacacctg

SEQ ID NO: 18253 - DNA, 33 bp, Homo sapiens
tgagtctatcctgagctatctgtaactagcaat

SEQ ID NO: 18254 - DNA, 33 bp, Homo sapiens
tgaccaaatgagaagggatgggcttaacacatg

SEQ ID NO: 18255 - DNA, 33 bp, Homo sapiens
cttacagctcccattctcctaatttaagaaaat

SEQ ID NO: 18256 - DNA, 33 bp, Homo sapiens
ttctggcagattttgctgacaaggctcaattta

SEQ ID NO: 18257 - DNA, 33 bp, Homo sapiens
cagttgatttaaataaggttggagaggccacac

SEQ ID NO: 18258 - DNA, 33 bp, Homo sapiens
tttcatgttcttgatactacagtgaccttttag

SEQ ID NO: 18259 - DNA, 33 bp, Homo sapiens
cccaggacacaaaaactgagtttgctttcttca

SEQ ID NO: 18260 - DNA, 33 bp, Homo sapiens
agcaagtgcaaagccagtgagaactgagtgtaa

SEQ ID NO: 18261 - DNA, 33 bp, Homo sapiens
cctctgtgttccaaagccctttcaatataattc

SEQ ID NO: 18262 - DNA, 33 bp, Homo sapiens
cttcctcttactttccggaatgccctactctgt

SEQ ID NO: 18263 - DNA, 33 bp, Homo sapiens
cagagtcaggagattggataataacactcttct

SEQ ID NO: 18264 - DNA, 33 bp, Homo sapiens
gggcgctgtgtcttaagtcccaccggcttctcc

SEQ ID NO: 18265 - DNA, 33 bp, Homo sapiens
atattagtggtaaaaggaaacatagactcaatc

SEQ ID NO: 18266 - DNA, 33 bp, Homo sapiens
gcaagttatagatacgtacatgttgacaagaac

SEQ ID NO: 18267 - DNA, 33 bp, Homo sapiens
gcagccccttgggtgatggtctacaaagaacgc

SEQ ID NO: 18268 - DNA, 33 bp, Homo sapiens
agtgtaatcacagggttcctataagagaagact

SEQ ID NO: 18269 - DNA, 33 bp, Homo sapiens
atcttacctaagagaggagcatataatccattc

SEQ ID NO: 18270 - DNA, 51 bp, Homo sapiens
ttttcccttcaactattttagcacatggagttcacaactcattccagctac

SEQ ID NO: 18271 - DNA, 33 bp, Homo sapiens
aaggggctattttctcgagtggccacaggattg

SEQ ID NO: 18272 - DNA, 33 bp, Homo sapiens
ttcaaaaacagtctgccactttacacaaacgtt

SEQ ID NO: 18273 - DNA, 33 bp, Homo sapiens
ataattttatgggacctccatcatttatgcagt

SEQ ID NO: 18274 - DNA, 33 bp, Homo sapiens
tccaggggagtactgtgaataacagagatgtta

SEQ ID NO: 18275 - DNA, 51 bp, Homo sapiens
gaattaatatattatcaatcataactgtatctatatatatttaaaaaaaga

SEQ ID NO: 18276 - DNA, 33 bp, Homo sapiens
cactttttgatgcaaatttctctttaaaagaca

SEQ ID NO: 18277 - DNA, 33 bp, Homo sapiens
gagtaatgctaatccaggactgctggtttttca

SEQ ID NO: 18278 - DNA, 33 bp, Homo sapiens
tctggagatgaagtctcaaactgctcagttaaa

SEQ ID NO: 18279 - DNA, 33 bp, Homo sapiens
acttatggtggttacttaactttgcatcagttc

SEQ ID NO: 18280 - DNA, 33 bp, Homo sapiens
gttcctactttaccgatagcccaggggcctctt

SEQ ID NO: 18281 - DNA, 33 bp, Homo sapiens
attaaaaggtcataaattattgtgaagaacagc

SEQ ID NO: 18282 - DNA, 33 bp, Homo sapiens
gattttcagattcagatggaattgcaaggggat

SEQ ID NO: 18283 - DNA, 33 bp, Homo sapiens
ttgaggaaagagaatctccataactggcatatt

SEQ ID NO: 18284 - DNA, 51 bp, Homo sapiens
atcaatgttctctgtttgtaatacagatatggtgagattatttctacagag

SEQ ID NO: 18285 - DNA, 51 bp, Homo sapiens
taatattaggtaatgtaaatgatgataaatgagagatagcttatacccagt

SEQ ID NO: 18286 - DNA, 51 bp, Homo sapiens
atcatgttaatggtaaaatttttaatgtcaagagcagtataaaacaggtca

SEQ ID NO: 18287 - DNA, 51 bp, Homo sapiens
aggctacctaataaaaggatgaaacggatgcaaattccgagaagtgtgcag

SEQ ID NO: 18288 - DNA, 33 bp, Homo sapiens
ggggttcccaaagaacggcatcaacatcacctg

SEQ ID NO: 18289 - DNA, 51 bp, Homo sapiens
gaagagcccttgggccttaagggaatattgtttgtaggctggcagtactcc

SEQ ID NO: 18290 - DNA, 33 bp, Homo sapiens
atgattcgagacccaatagaaatgtcacatagg

SEQ ID NO: 18291 - DNA, 51 bp, Homo sapiens
ggattaccccaaatgaacaaatacagtcttttaaaagtgatcactttgcac

SEQ ID NO: 18292 - DNA, 33 bp, Homo sapiens
atgcaggagattacaataatagctacagtacct

SEQ ID NO: 18293 - DNA, 33 bp, Homo sapiens
aacttctagaccataatactgtgagatagtaaa

SEQ ID NO: 18294 - DNA, 33 bp, Homo sapiens
attcacatttctacattaaggccagcaatgaat

SEQ ID NO: 18295 - DNA, 33 bp, Homo sapiens
aaattaacttacattcgaatctgaaagtcaatg

SEQ ID NO: 18296 - DNA, 33 bp, Homo sapiens
catacagttgttgagataatcttacacacttag

SEQ ID NO: 18297 - DNA, 33 bp, Homo sapiens
attgagattccagaaatatagctaacccaaatt

SEQ ID NO: 18298 - DNA, 33 bp, Homo sapiens
tgctgaaagcaatttatggactcaaagctattt

SEQ ID NO: 18299 - DNA, 33 bp, Homo sapiens
ataccccacttgtggcgccgattttctgtatta

SEQ ID NO: 18300 - DNA, 33 bp, Homo sapiens
tgataggtaaacaagatcattggtgtgttagga

SEQ ID NO: 18301 - DNA, 33 bp, Homo sapiens
actccaagactatgtatgcaaatattcctacaa

SEQ ID NO: 18302 - DNA, 33 bp, Homo sapiens
tttcttgagaggacaagtgctgtatccttacac

SEQ ID NO: 18303 - DNA, 33 bp, Homo sapiens
tgagcacttgtagctatctttgaaaatagcatg

SEQ ID NO: 18304 - DNA, 33 bp, Homo sapiens
aggagtagcaaaatccgattgaaaaaattctat

SEQ ID NO: 18305 - DNA, 33 bp, Homo sapiens
cagcatgcctttgtcatgtatctggccatgtgc

SEQ ID NO: 18306 - DNA, 33 bp, Homo sapiens
catgtttaccaatgaggaattcatcataatttt

SEQ ID NO: 18307 - DNA, 51 bp, Homo sapiens
atctttagtggccaagggcacttctgacccatttaaacactccagctaaga

SEQ ID NO: 18308 - DNA, 51 bp, Homo sapiens
ttttcagcatacttacacccgatactaatttccttaacttggacctccgtc

SEQ ID NO: 18309 - DNA, 33 bp, Homo sapiens
ggttaccaactatatcgatcactggtttgcaac

SEQ ID NO: 18310 - DNA, 33 bp, Homo sapiens
actaacattgaatactgacactgaatgtaaatg

SEQ ID NO: 18311 - DNA, 33 bp, Homo sapiens
ttaatgacaaaaatcagaattacatttgtatca

SEQ ID NO: 18312 - DNA, 33 bp, Homo sapiens
taagcaactagtctgagagaaacattttattgg

SEQ ID NO: 18313 - DNA, 33 bp, Homo sapiens
tatccttttctctaacgcttgcaaaatctttca

SEQ ID NO: 18314 - DNA, 33 bp, Homo sapiens
agcatatttgacaccaccgtagatcactcctta

SEQ ID NO: 18315 - DNA, 33 bp, Homo sapiens
tccagctgcgtgtgaatatgtgtaccgtgtggt

SEQ ID NO: 18316 - DNA, 51 bp, Homo sapiens
ctaactttaagtgtgtgatccccaattatcattgttgtcttttcaaaagtt

SEQ ID NO: 18317 - DNA, 33 bp, Homo sapiens
ggtgctaaaatggttctcttgtcagaggagtta

SEQ ID NO: 18318 - DNA, 51 bp, Homo sapiens
ctgtaatcccttaagaagcatgttcgagaaataatttaggttcccacatag

SEQ ID NO: 18319 - DNA, 33 bp, Homo sapiens
gtgcctcagcgccaaataggatccaggcctccg

SEQ ID NO: 18320 - DNA, 33 bp, Homo sapiens
tggaaaaaaacataagcatgcatacatgggtgc

SEQ ID NO: 18321 - DNA, 33 bp, Homo sapiens
cactgaggcttggcactatttgagagatgccaa

SEQ ID NO: 18322 - DNA, 33 bp, Homo sapiens
gtatcaaacgataatgcagtaagaactgatccc

SEQ ID NO: 18323 - DNA, 33 bp, Homo sapiens
aaatcacttagccatagcatcttccaattgaga

SEQ ID NO: 18324 - DNA, 33 bp, Homo sapiens
acgtgggagcagtgaagggaaccaattttcaaa

SEQ ID NO: 18325 - DNA, 33 bp, Homo sapiens
atctaatgctgaggccgacaaggaagacaacaa

SEQ ID NO: 18326 - DNA, 33 bp, Homo sapiens
caatatatagtttgtatatttcaacgctttccc

SEQ ID NO: 18327 - DNA, 33 bp, Homo sapiens
accttccccgtgtggatacgagagaacacgagc

SEQ ID NO: 18328 - DNA, 33 bp, Homo sapiens
ctgcattccttttacattatagaaggtgcttac

SEQ ID NO: 18329 - DNA, 33 bp, Homo sapiens
taataaatcctattccgcacggttgttatgaac

SEQ ID NO: 18330 - DNA, 33 bp, Homo sapiens
aagtcagcctcagatatgacccaagggatacgt

SEQ ID NO: 18331 - DNA, 33 bp, Homo sapiens
agagagctcagactcattcttgttttagtgact

SEQ ID NO: 18332 - DNA, 33 bp, Homo sapiens
atttgaccttgagaaattaaatcttcatgccat

SEQ ID NO: 18333 - DNA, 33 bp, Homo sapiens
acaaatgatattaacatagagagcgagggtgaa

SEQ ID NO: 18334 - DNA, 33 bp, Homo sapiens
taagacaatcagtcaatcaaatgctattgagta

SEQ ID NO: 18335 - DNA, 51 bp, Homo sapiens
ctcagaagccattttttaattttggtatcgttcggcatgtggagagttgag

SEQ ID NO: 18336 - DNA, 33 bp, Homo sapiens
ttagtacagacgcaaccaatcatcttttttttt

SEQ ID NO: 18337 - DNA, 33 bp, Homo sapiens
cttccggaaatgccactgggacttgttttatcc

SEQ ID NO: 18338 - DNA, 33 bp, Homo sapiens
gaggactaagagggacgccaggataaaacaagt

SEQ ID NO: 18339 - DNA, 33 bp, Homo sapiens
tgctgtggccgggaactgtgactctttgccaac

SEQ ID NO: 18340 - DNA, 33 bp, Homo sapiens
tggctggagaaacaaatacaaggtagagaggaa

SEQ ID NO: 18341 - DNA, 33 bp, Homo sapiens
cagtgtgagaatgaggtcattatttttgtgtta

SEQ ID NO: 18342 - DNA, 33 bp, Homo sapiens
aagtgcaacatgagaaggtgaaaaaatgcatta

SEQ ID NO: 18343 - DNA, 33 bp, Homo sapiens
tcagcctggaaacagagcgacatattgatacat

SEQ ID NO: 18344 - DNA, 33 bp, Homo sapiens
gaaaaaaatggtaaaatttggagagactctcag

SEQ ID NO: 18345 - DNA, 33 bp, Homo sapiens
aagactatggtagagcgcatttcctgaactcaa

SEQ ID NO: 18346 - DNA, 33 bp, Homo sapiens
ggtatgtggtaatggccgaaaaaataaacacaa

SEQ ID NO: 18347 - DNA, 33 bp, Homo sapiens
taccaagtcactattatagagccaatccagatg

SEQ ID NO: 18348 - DNA, 33 bp, Homo sapiens
aaagggaagagaaaaatgtaagtcaggtcatta

SEQ ID NO: 18349 - DNA, 33 bp, Homo sapiens
agttattcaaattccttaatctggattagtaca

SEQ ID NO: 18350 - DNA, 33 bp, Homo sapiens
ctggaaactgcagaaggattgtgatctatttga

SEQ ID NO: 18351 - DNA, 33 bp, Homo sapiens
aaccactaagtatgaagtagatgtcttgttctc

SEQ ID NO: 18352 - DNA, 33 bp, Homo sapiens
cattcttgtcttggtcgcagaaggaacggcaca

SEQ ID NO: 18353 - DNA, 33 bp, Homo sapiens
tcctttcacagtaatatagattcgtttcaatga

SEQ ID NO: 18354 - DNA, 51 bp, Homo sapiens
gcatgacttactttatttggaacaaggagacactgcttaactcccgatttg

SEQ ID NO: 18355 - DNA, 33 bp, Homo sapiens
actatgcccatgtacacgaactatgtagatgaa

SEQ ID NO: 18356 - DNA, 33 bp, Homo sapiens
tcctctatatcaaacattggacttccaggaaat

SEQ ID NO: 18357 - DNA, 33 bp, Homo sapiens
ttttgtctgacagatatctctagagtgccacat

SEQ ID NO: 18358 - DNA, 51 bp, Homo sapiens
aaagccaaacctcttatttctcatagcttgctgtggtcagcagataggcat

SEQ ID NO: 18359 - DNA, 33 bp, Homo sapiens
tattgaaatgtgtcactgcctgtgagaacaaca

SEQ ID NO: 18360 - DNA, 33 bp, Homo sapiens
ctccctgtcccctttctatattggtcactggac

SEQ ID NO: 18361 - DNA, 33 bp, Homo sapiens
ttagttatcagacttatgtttcagagtgtggga

SEQ ID NO: 18362 - DNA, 33 bp, Homo sapiens
aagcattagtgattcttactgatagacatcatg

SEQ ID NO: 18363 - DNA, 33 bp, Homo sapiens
gctgcaacatgcatgaccattcaaaacatgcca

SEQ ID NO: 18364 - DNA, 33 bp, Homo sapiens
cttcactcctgcctgagattttaaatattcccc

SEQ ID NO: 18365 - DNA, 33 bp, Homo sapiens
ctcaaaatagcctatggatgttccctgattaac

SEQ ID NO: 18366 - DNA, 51 bp, Homo sapiens
gtgttttcactctcttgcattttcttcaatgaaaagctaagtacaggagtg

SEQ ID NO: 18367 - DNA, 33 bp, Homo sapiens
tcacctatgtggaaaagcatataacgaaataat

SEQ ID NO: 18368 - DNA, 33 bp, Homo sapiens
cgaagtgctggaatgatgaatgataataatttg

SEQ ID NO: 18369 - DNA, 33 bp, Homo sapiens
gttttcatttaaaacctatttggacaatgtaaa

SEQ ID NO: 18370 - DNA, 33 bp, Homo sapiens
gaaatagcaaagggaatctttcaggctgaaatg

SEQ ID NO: 18371 - DNA, 33 bp, Homo sapiens
gtacaaacacaggtaaccaatccttgctgttag

SEQ ID NO: 18372 - DNA, 33 bp, Homo sapiens
tcaaagatcttgccaacaatctctctctttgaa

SEQ ID NO: 18373 - DNA, 33 bp, Homo sapiens
tctggatctctaggaagtctcacattggcttaa

SEQ ID NO: 18374 - DNA, 33 bp, Homo sapiens
cttgtttccaaaataaggaataatgtccaaaac

SEQ ID NO: 18375 - DNA, 33 bp, Homo sapiens
tgggcatgaataaaactggctgtgagatacgac

SEQ ID NO: 18376 - DNA, 33 bp, Homo sapiens
ccatgctatggacatagtaggcacttaatgatc

SEQ ID NO: 18377 - DNA, 33 bp, Homo sapiens
ttctaagttctcaaaactcctctgcatacacct

SEQ ID NO: 18378 - DNA, 33 bp, Homo sapiens
tcctaacatcagtggactattcaatccgataag

SEQ ID NO: 18379 - DNA, 33 bp, Homo sapiens
taagtcagaggcttccgctgatttcactgggag

SEQ ID NO: 18380 - DNA, 33 bp, Homo sapiens
agaaagaatatttaaccacaactgcagcccagg

SEQ ID NO: 18381 - DNA, 33 bp, Homo sapiens
gatccaagatttgtccgattatgaagttcccaa

SEQ ID NO: 18382 - DNA, 33 bp, Homo sapiens
gaagtatattattcaagattgatttttccttcc

SEQ ID NO: 18383 - DNA, 33 bp, Homo sapiens
ttaacatttcttcacattagtccagcatattct

SEQ ID NO: 18384 - DNA, 33 bp, Homo sapiens
tggcagctctcttcagtatatgcggcgctgtgg

SEQ ID NO: 18385 - DNA, 33 bp, Homo sapiens
agagtgaaaaagtgcatggaaagagccagcata

SEQ ID NO: 18386 - DNA, 33 bp, Homo sapiens
atatcaggggagatcatgaataggagggatttg

SEQ ID NO: 18387 - DNA, 33 bp, Homo sapiens
gagggatcaaaaactatgtaacaggtagagcgt

SEQ ID NO: 18388 - DNA, 33 bp, Homo sapiens
tctctcaatgacatacgctggtatttgaacagt

SEQ ID NO: 18389 - DNA, 33 bp, Homo sapiens
gtctcaagagttgcgatggttttataaatggga

SEQ ID NO: 18390 - DNA, 33 bp, Homo sapiens
gtaaaatcatctccaactcaacattaatgcgtt

SEQ ID NO: 18391 - DNA, 33 bp, Homo sapiens
gatgtaaaaacaacaggattcaaatgaaatcat

SEQ ID NO: 18392 - DNA, 33 bp, Homo sapiens
tcatgaactctgaaaagtaaaggctaagatgac

SEQ ID NO: 18393 - DNA, 33 bp, Homo sapiens
cagaggagcaagaagacattggctgtagagagt

SEQ ID NO: 18394 - DNA, 33 bp, Homo sapiens
gtgcaggtcacagttgtaccacccagcacaaat

SEQ ID NO: 18395 - DNA, 33 bp, Homo sapiens
tcccttttacctttcatagtcctgagacattcc

SEQ ID NO: 18396 - DNA, 33 bp, Homo sapiens
ctgaccactgtccacagatatcaggatcagagt

SEQ ID NO: 18397 - DNA, 33 bp, Homo sapiens
ctataaacattcatactgaggcttttgtacttg

SEQ ID NO: 18398 - DNA, 33 bp, Homo sapiens
ggaatatcttataggcgagagggagaaccagaa

SEQ ID NO: 18399 - DNA, 33 bp, Homo sapiens
tgtgtagaaactaagagagaaaagtttatctac

SEQ ID NO: 18400 - DNA, 33 bp, Homo sapiens
gaagctgcctacaggataaggtattttcttgtt

SEQ ID NO: 18401 - DNA, 33 bp, Homo sapiens
actggctagagaactcggaaagaggaaatcctg

SEQ ID NO: 18402 - DNA, 33 bp, Homo sapiens
tatggggccagaaaaacctgaagtcaagagatg

SEQ ID NO: 18403 - DNA, 33 bp, Homo sapiens
ctccagcaacgtctaatcaaatccagtctttga

SEQ ID NO: 18404 - DNA, 33 bp, Homo sapiens
atgaagatctggaataggtgagttgaacctggc

SEQ ID NO: 18405 - DNA, 33 bp, Homo sapiens
ggacagtcatacccccgccacagtgagcgagtg

SEQ ID NO: 18406 - DNA, 51 bp, Homo sapiens
actaataggtgacttacgctataaatgtgcaagagatgttccagataacat

SEQ ID NO: 18407 - DNA, 33 bp, Homo sapiens
ggtccctaagccgccatggccatttcaaagctg

SEQ ID NO: 18408 - DNA, 33 bp, Homo sapiens
gaaccaaccagaagaatgaaactacgaacacgt

SEQ ID NO: 18409 - DNA, 51 bp, Homo sapiens
aagaaggggtggaggtatctgtaaagctattctttctccctttgtaatgaa

SEQ ID NO: 18410 - DNA, 33 bp, Homo sapiens
tgtgtctactaaaccatgctgcagcctctctat

SEQ ID NO: 18411 - DNA, 33 bp, Homo sapiens
ttaaaaaaagattgaggcctgtactgagaggat

SEQ ID NO: 18412 - DNA, 33 bp, Homo sapiens
gtgccaacatttttatgaccatagggaagaggc

SEQ ID NO: 18413 - DNA, 33 bp, Homo sapiens
taatcaaatcattatctaacgtgtagaatctaa

SEQ ID NO: 18414 - DNA, 33 bp, Homo sapiens
ttgaaacaaattgcaagagtcatcatgtgtgac

SEQ ID NO: 18415 - DNA, 33 bp, Homo sapiens
tggctgcaagtttggatggaaacagactcctgg

SEQ ID NO: 18416 - DNA, 33 bp, Homo sapiens
atctttttctgagcagtagaccttaataggagg

SEQ ID NO: 18417 - DNA, 33 bp, Homo sapiens
attcaacctgcctaaagtggaagctgtatgatt

SEQ ID NO: 18418 - DNA, 33 bp, Homo sapiens
caacggattgaaacttgaaccaggctttgaaaa

SEQ ID NO: 18419 - DNA, 33 bp, Homo sapiens
ccttttcaggcctatacaaccttctcaaagcct

SEQ ID NO: 18420 - DNA, 33 bp, Homo sapiens
cctctttccggattcatcttgctctaaaatatt

SEQ ID NO: 18421 - DNA, 33 bp, Homo sapiens
ggtctctgttagcaccgctttattgcatcccac

SEQ ID NO: 18422 - DNA, 33 bp, Homo sapiens
aaggcctgagttaacatggagtaggagctcaga

SEQ ID NO: 18423 - DNA, 33 bp, Homo sapiens
gtgctaatttgaaaaacctcagtgcaccgtggg

SEQ ID NO: 18424 - DNA, 33 bp, Homo sapiens
tgtttgaagctatacatggacggcagaacaaga

SEQ ID NO: 18425 - DNA, 33 bp, Homo sapiens
gagaggctcaaggggcgagacgctgcgtttcag

SEQ ID NO: 18426 - DNA, 33 bp, Homo sapiens
agaatgtcgtaaattagctctaagtagttaatt

SEQ ID NO: 18427 - DNA, 33 bp, Homo sapiens
aggaatgtttactgaattctgcacgtgttaaca

SEQ ID NO: 18428 - DNA, 33 bp, Homo sapiens
aggaaaccagatgaaaggatattccataaagca

SEQ ID NO: 18429 - DNA, 33 bp, Homo sapiens
cccttcgttcaaactctcacctgttttaggcac

SEQ ID NO: 18430 - DNA, 33 bp, Homo sapiens
ccacgcccgagaaaaaccaatttaatgcttctg

SEQ ID NO: 18431 - DNA, 33 bp, Homo sapiens
gtagtttgccgaccccgatctagattctagagg

SEQ ID NO: 18432 - DNA, 33 bp, Homo sapiens
tttagatagtagctccgcattcaggtctcacat

SEQ ID NO: 18433 - DNA, 33 bp, Homo sapiens
gtttatccatgcttgatgagattcttgaagatg

SEQ ID NO: 18434 - DNA, 33 bp, Homo sapiens
atttttggagaatgaatgctaaacagaagaatg

SEQ ID NO: 18435 - DNA, 33 bp, Homo sapiens
ctgtgaaactccttgctgacatctgattgagtg

SEQ ID NO: 18436 - DNA, 33 bp, Homo sapiens
caccctgagctcaagatgaccattttccccact

SEQ ID NO: 18437 - DNA, 33 bp, Homo sapiens
aggagctgagttcacagggacaccatttccttg

SEQ ID NO: 18438 - DNA, 33 bp, Homo sapiens
actgtttagtggaagctgacttgctcagagcct

SEQ ID NO: 18439 - DNA, 33 bp, Homo sapiens
atgaagtagaagggaatgtctgaacacttggca

SEQ ID NO: 18440 - DNA, 33 bp, Homo sapiens
tgagagtcggcatgacggccatgaagagcccga

SEQ ID NO: 18441 - DNA, 33 bp, Homo sapiens
tttttaagtagaaaaatgcgagaatgtggagtg

SEQ ID NO: 18442 - DNA, 33 bp, Homo sapiens
cagcctctttccttaatgccttcagtggagagg

SEQ ID NO: 18443 - DNA, 33 bp, Homo sapiens
ccgaaaagactctagcgcggccatgtagtggaa

SEQ ID NO: 18444 - DNA, 33 bp, Homo sapiens
tattgcaaagttctgagaaatgattttgaaaaa

SEQ ID NO: 18445 - DNA, 33 bp, Homo sapiens
cctctaagataacaaagtagtgcccaattatat

SEQ ID NO: 18446 - DNA, 33 bp, Homo sapiens
acccctcttatgaaagtaattaaccgagactca

SEQ ID NO: 18447 - DNA, 33 bp, Homo sapiens
aagtggttcatcagtatcttacacttattttta

SEQ ID NO: 18448 - DNA, 51 bp, Homo sapiens
ctcaagaagtttaaaaagcataggattcaaggggagacgcttacaaaaagt

SEQ ID NO: 18449 - DNA, 33 bp, Homo sapiens
cagagaaaagctgggatgcacggaaaacattaa

SEQ ID NO: 18450 - DNA, 33 bp, Homo sapiens
tttgtattaaaattactgacaaagatgtgatgt

SEQ ID NO: 18451 - DNA, 33 bp, Homo sapiens
ctggctgtatgaaatcgatggaataacgtgctt

SEQ ID NO: 18452 - DNA, 51 bp, Homo sapiens
aaaagatagaacagaattccgaggctctgaacattcaggagggtaaaacgg

SEQ ID NO: 18453 - DNA, 33 bp, Homo sapiens
cttagtacttggattatagcttcagcagatcaa

SEQ ID NO: 18454 - DNA, 51 bp, Homo sapiens
aaaaaaaaaaagtaatctcattgtagaggaaagcagctgttcacaagagca

SEQ ID NO: 18455 - DNA, 33 bp, Homo sapiens
tttaatgagaaaacgataggctttgtctttcaa

SEQ ID NO: 18456 - DNA, 51 bp, Homo sapiens
cagaatttccaaacagagggaaaaattaggtggacttgaaatagtaactca

SEQ ID NO: 18457 - DNA, 33 bp, Homo sapiens
ttacagaatggccccagtcattaatgcctccta

SEQ ID NO: 18458 - DNA, 33 bp, Homo sapiens
gaagataaatccaatggatatggagcagtggaa

SEQ ID NO: 18459 - DNA, 33 bp, Homo sapiens
acccacaattaaggtacaatctggtcacataac

SEQ ID NO: 18460 - DNA, 33 bp, Homo sapiens
ttgcctagcaatcatatctgttccttaaaagga

SEQ ID NO: 18461 - DNA, 33 bp, Homo sapiens
cgcaggaagccaacggtacttaccaatcagtgt

SEQ ID NO: 18462 - DNA, 33 bp, Homo sapiens
ctgtctgaaattttggtattagtcagaagcaga

SEQ ID NO: 18463 - DNA, 33 bp, Homo sapiens
ctaaacagtggtaaaatgagattatgtacaggt

SEQ ID NO: 18464 - DNA, 33 bp, Homo sapiens
tagaagaaaatggcaattaagagtgcaaagcac

SEQ ID NO: 18465 - DNA, 33 bp, Homo sapiens
taatgtagtcattaagtccttcccctacaatcc

SEQ ID NO: 18466 - DNA, 33 bp, Homo sapiens
ttcgaaaagataaagatgatacaacatgagaaa

SEQ ID NO: 18467 - DNA, 33 bp, Homo sapiens
atgatggaggagatgctcatatcaatgactgag

SEQ ID NO: 18468 - DNA, 33 bp, Homo sapiens
tggttggcaatcaatcgaactcattataccacg

SEQ ID NO: 18469 - DNA, 33 bp, Homo sapiens
ctgaaatcttttctcatccaggtttgctaatcc

SEQ ID NO: 18470 - DNA, 33 bp, Homo sapiens
aataaataattttccatcgatattggacatgag

SEQ ID NO: 18471 - DNA, 33 bp, Homo sapiens
atgatagagccattcatggtgtctcaatagctc

SEQ ID NO: 18472 - DNA, 33 bp, Homo sapiens
ttcttatctgtttaactctgccataattaagtg

SEQ ID NO: 18473 - DNA, 33 bp, Homo sapiens
acaaaactaaacatactattgccatacagtcca

SEQ ID NO: 18474 - DNA, 33 bp, Homo sapiens
tgtaatctgaatgaactgagcaaactctaaaca

SEQ ID NO: 18475 - DNA, 51 bp, Homo sapiens
cacgttctcgttgtagccacattacgcctttgcattactcttttgccactg

SEQ ID NO: 18476 - DNA, 33 bp, Homo sapiens
ttttaaagatccattctattttacctgacccac

SEQ ID NO: 18477 - DNA, 33 bp, Homo sapiens
ctactgtcaatagtaatggcaaaggcctattat

SEQ ID NO: 18478 - DNA, 33 bp, Homo sapiens
cagttctttccaaaaggcaaggtgaatcctctg

SEQ ID NO: 18479 - DNA, 33 bp, Homo sapiens
ctgggtgtgggagtgagggcatccctgttttat

SEQ ID NO: 18480 - DNA, 33 bp, Homo sapiens
tgttctatatgatttatggacataacagcccac

SEQ ID NO: 18481 - DNA, 33 bp, Homo sapiens
aaagttacctttggaattggaacaaagctccaa

SEQ ID NO: 18482 - DNA, 33 bp, Homo sapiens
tgagccttaaattccattagggaagagagccaa

SEQ ID NO: 18483 - DNA, 33 bp, Homo sapiens
tttctgtagcacttaattcatggtaagcaaaaa

SEQ ID NO: 18484 - DNA, 33 bp, Homo sapiens
accaaagatgctcaattaaagcagcacagctga

SEQ ID NO: 18485 - DNA, 33 bp, Homo sapiens
tatgacgtatgcagcaggttaatcacggccagg

SEQ ID NO: 18486 - DNA, 33 bp, Homo sapiens
tccaaatcttactaaagctcagaaagcagtgga

SEQ ID NO: 18487 - DNA, 33 bp, Homo sapiens
gtcttggggtatgaccgcaatctgtccaaaaaa

SEQ ID NO: 18488 - DNA, 33 bp, Homo sapiens
tggatacttaacatcttaactgaggcagttaat

SEQ ID NO: 18489 - DNA, 33 bp, Homo sapiens
taccatttattagaccgaccactctcaaattgc

SEQ ID NO: 18490 - DNA, 33 bp, Homo sapiens
atttctttttgtgcactggatgtcctataatgt

SEQ ID NO: 18491 - DNA, 51 bp, Homo sapiens
ctagaagataaagataacatggtaattattgacagaggataaccgttatct

SEQ ID NO: 18492 - DNA, 51 bp, Homo sapiens
tagaggattttcagattgcaagggttaacaaataacagttaaaatggaatg

SEQ ID NO: 18493 - DNA, 51 bp, Homo sapiens
ataaattacagttatttgatggatggagatcttgtgctaagacttgggctc

SEQ ID NO: 18494 - DNA, 33 bp, Homo sapiens
gcgagtactgaaccaggcgtattcacctttgaa

SEQ ID NO: 18495 - DNA, 33 bp, Homo sapiens
ctctgcaaacttaccaggaggcttatggtggat

SEQ ID NO: 18496 - DNA, 33 bp, Homo sapiens
cttatctgaccacaaatttatgattcagaaaga

SEQ ID NO: 18497 - DNA, 33 bp, Homo sapiens
tgcatgaataggttatgaaaagtaccatcaagt

SEQ ID NO: 18498 - DNA, 33 bp, Homo sapiens
tgcaccaggataatcatatggaagaagccttac

SEQ ID NO: 18499 - DNA, 33 bp, Homo sapiens
gagtcatgaatgttggtatagcaggaaaaacct

SEQ ID NO: 18500 - DNA, 51 bp, Homo sapiens
gtgacgtgacatcacttgaaaacactaaagcctcatcatttaccaggttgg

SEQ ID NO: 18501 - DNA, 33 bp, Homo sapiens
gagtgagtcactgtcatggttattggtccaatc

SEQ ID NO: 18502 - DNA, 33 bp, Homo sapiens
atgacaatgatttcaatatacagttaagaaaaa

SEQ ID NO: 18503 - DNA, 33 bp, Homo sapiens
ggtggccgttgctgtataattgctcgtatattg

SEQ ID NO: 18504 - DNA, 33 bp, Homo sapiens
ctctgctgtgaaatcagtaaagaatagtgataa

SEQ ID NO: 18505 - DNA, 33 bp, Homo sapiens
gaacttaaaagtttacgaaaggccatattaatg

SEQ ID NO: 18506 - DNA, 33 bp, Homo sapiens
aaaaatttctgactgatgtgttattagctcatt

SEQ ID NO: 18507 - DNA, 33 bp, Homo sapiens
gtctcatggctgacactgatcaaaacaaaggaa

SEQ ID NO: 18508 - DNA, 51 bp, Homo sapiens
ataattctacaggtggtgagagtgatgaaatagaatacaattttgttatga

SEQ ID NO: 18509 - DNA, 33 bp, Homo sapiens
gccatacaattgatactgaaattaaccagacaa

SEQ ID NO: 18510 - DNA, 33 bp, Homo sapiens
aatggatagattgaatgagcgtctgaaattcta

SEQ ID NO: 18511 - DNA, 33 bp, Homo sapiens
acatgaaatacacaccgaggaacactacaaagc

SEQ ID NO: 18512 - DNA, 33 bp, Homo sapiens
gttatggtagccctagtaaacaaatatgcttac

SEQ ID NO: 18513 - DNA, 33 bp, Homo sapiens
tgctaggaagcaggcattcatttcaggacttca

SEQ ID NO: 18514 - DNA, 33 bp, Homo sapiens
tggttagcctctgatacaaattgtctcttagca

SEQ ID NO: 18515 - DNA, 33 bp, Homo sapiens
agtaaaatataggaacggaaagcacattagtgt

SEQ ID NO: 18516 - DNA, 33 bp, Homo sapiens
ggtactgactttgaacgatagacaatactttca

SEQ ID NO: 18517 - DNA, 33 bp, Homo sapiens
tgtcagaaacagtgattagaaatttttattcag

SEQ ID NO: 18518 - DNA, 33 bp, Homo sapiens
taatggttgccagtaattctcttctccctccat

SEQ ID NO: 18519 - DNA, 33 bp, Homo sapiens
ttcaaatcaccatacaccaggaatcaatacaaa

SEQ ID NO: 18520 - DNA, 33 bp, Homo sapiens
catgatgactgacctatcgtatttccaaagaca

SEQ ID NO: 18521 - DNA, 33 bp, Homo sapiens
tgaaacagcttccaagtagtgagctaaacaagt

SEQ ID NO: 18522 - DNA, 33 bp, Homo sapiens
gataggctataattacgaagattgatcatatcg

SEQ ID NO: 18523 - DNA, 51 bp, Homo sapiens
taaacacgtgccatggtgatttgctgtatagatcaacctgtcacttaggta

SEQ ID NO: 18524 - DNA, 51 bp, Homo sapiens
aaaaaataataaggaacatagttgaggattgaactttgaggaactccaaca

SEQ ID NO: 18525 - DNA, 51 bp, Homo sapiens
aatatcattttattctgctatatgatgtataaaatttcattctgggcttaa

SEQ ID NO: 18526 - DNA, 33 bp, Homo sapiens
tctttatggggtcaccggagtaccatatttcca

SEQ ID NO: 18527 - DNA, 33 bp, Homo sapiens
cacaatcctgacttctcacatggattaatttaa

SEQ ID NO: 18528 - DNA, 33 bp, Homo sapiens
aaattttccaagtgatgagaaataataccacac

SEQ ID NO: 18529 - DNA, 51 bp, Homo sapiens
ggagattggcattgaacccaagacatccttaatttctcaatatctctataa

SEQ ID NO: 18530 - DNA, 51 bp, Homo sapiens
taccatgactgcatttgtcaaggaataaatgggttaatgttaggaagccag

SEQ ID NO: 18531 - DNA, 51 bp, Homo sapiens
tttcaatattagcctccattttgccgaaaccttctcaaaggggcaggtgaa

SEQ ID NO: 18532 - DNA, 33 bp, Homo sapiens
catagtgattacactatgtttttctaaccactt

SEQ ID NO: 18533 - DNA, 33 bp, Homo sapiens
gctatggcagtcatcagatcattcctctattgt

SEQ ID NO: 18534 - DNA, 33 bp, Homo sapiens
gtgtctcctcatgctagcctatgtccttttatc

SEQ ID NO: 18535 - DNA, 33 bp, Homo sapiens
gtacaccatatcaccagtgaagtgttcttgtca

SEQ ID NO: 18536 - DNA, 33 bp, Homo sapiens
gaaaatcatacatatatgccaaccttccttgtt

SEQ ID NO: 18537 - DNA, 33 bp, Homo sapiens
gtacatgcaaatacagtctaagcccatctccct

SEQ ID NO: 18538 - DNA, 33 bp, Homo sapiens
atatgaaattaatacattgctttatgtgtttga

SEQ ID NO: 18539 - DNA, 51 bp, Homo sapiens
tttttaggtaaaactctttcaataagcacagtcattataccgttaaaaaaa

SEQ ID NO: 18540 - DNA, 33 bp, Homo sapiens
gcggtcagagcaccaatcttacgagccttgtga

SEQ ID NO: 18541 - DNA, 33 bp, Homo sapiens
ttctcagtgcctaatgtagtggcagatgcatct

SEQ ID NO: 18542 - DNA, 51 bp, Homo sapiens
agaggtgctcaacatgtagtataactgtctttctgttccacattaatctcc

SEQ ID NO: 18543 - DNA, 33 bp, Homo sapiens
atgatagacatcctaggataaaatgaacatagg

SEQ ID NO: 18544 - DNA, 51 bp, Homo sapiens
catgagaatcacatttccctttgtggatctctgagaattggagaataagat

SEQ ID NO: 18545 - DNA, 33 bp, Homo sapiens
atcaacacaatgcacagggcagaacattagaaa

SEQ ID NO: 18546 - DNA, 51 bp, Homo sapiens
agagcagaagagggtcagcatggacgaacatcggagcaggaagaccaggaa

SEQ ID NO: 18547 - DNA, 33 bp, Homo sapiens
tttatgaatcttcaaagatagaacagacatgaa

SEQ ID NO: 18548 - DNA, 33 bp, Homo sapiens
gacaaatgacatatcatccaatcttcaatgagc

SEQ ID NO: 18549 - DNA, 33 bp, Homo sapiens
agaggttaagtgattcgaagtatttcacacagc

SEQ ID NO: 18550 - DNA, 33 bp, Homo sapiens
acagagcacagaactcgcgctaagaaatgtctg

SEQ ID NO: 18551 - DNA, 33 bp, Homo sapiens
ttctgtgtcttccacttagaataaaggctgctg

SEQ ID NO: 18552 - DNA, 33 bp, Homo sapiens
aagtcaaacaagtgtctattcgggttccagagt

SEQ ID NO: 18553 - DNA, 33 bp, Homo sapiens
gcctgattgtagaacctgaactcttcttgtcat

SEQ ID NO: 18554 - DNA, 33 bp, Homo sapiens
cataaagcaccaaagacgacttttcaaagttgt

SEQ ID NO: 18555 - DNA, 33 bp, Homo sapiens
ctcatccctgaaaaaatcattgttcacacacac

SEQ ID NO: 18556 - DNA, 33 bp, Homo sapiens
ttgtgcagttgactcattgaaaggcaaaggaag

SEQ ID NO: 18557 - DNA, 33 bp, Homo sapiens
aagcagatgggaaacgcaatcttagaagaaaca

SEQ ID NO: 18558 - DNA, 33 bp, Homo sapiens
tgtagatgtaggtagttaagatcaggtcatgct

SEQ ID NO: 18559 - DNA, 33 bp, Homo sapiens
gtccttgaaacaggcagaacatcttacatgcct

SEQ ID NO: 18560 - DNA, 33 bp, Homo sapiens
gcaactggatagacacgggactttaaacgcaca

SEQ ID NO: 18561 - DNA, 33 bp, Homo sapiens
gatatacttaactctatggcagataactatttg

SEQ ID NO: 18562 - DNA, 33 bp, Homo sapiens
atggccttgctcttactcactactctttatcta

SEQ ID NO: 18563 - DNA, 33 bp, Homo sapiens
tctagacaatcttgaccaaaaatcttcattctc

SEQ ID NO: 18564 - DNA, 33 bp, Homo sapiens
tgtgttaaacttgcgtcaacttcaaatattaat

SEQ ID NO: 18565 - DNA, 33 bp, Homo sapiens
aattacagcaacattgtcttccagtgtgcatct

SEQ ID NO: 18566 - DNA, 33 bp, Homo sapiens
taatggaatcatataatctgtgaccttttgtga

SEQ ID NO: 18567 - DNA, 33 bp, Homo sapiens
ggtagccacaatagcagatatagaacatttcca

SEQ ID NO: 18568 - DNA, 33 bp, Homo sapiens
ccttctttccacgtctttcagtttctgtgtcaa

SEQ ID NO: 18569 - DNA, 33 bp, Homo sapiens
gctcatggtttgtttataccactccccactccc

SEQ ID NO: 18570 - DNA, 33 bp, Homo sapiens
agtaggcaacagaaactctgaaatggtgggaca

SEQ ID NO: 18571 - DNA, 33 bp, Homo sapiens
gtttctattaaggatcgaggtacagagggtaga

SEQ ID NO: 18572 - DNA, 33 bp, Homo sapiens
ggcaggagagttaggcgaatacagcatctttga

SEQ ID NO: 18573 - DNA, 33 bp, Homo sapiens
ggtttacaaatggctatccataaaaaatacaac

SEQ ID NO: 18574 - DNA, 33 bp, Homo sapiens
ttaagcccatctaaaaggctaatgcaaattccc

SEQ ID NO: 18575 - DNA, 51 bp, Homo sapiens
ggtagtgggaaaagacatagttcccgaattcttctggagtctatagtgtaa

SEQ ID NO: 18576 - DNA, 33 bp, Homo sapiens
caaaatcttcacaatatggtcaacttcctttcc

SEQ ID NO: 18577 - DNA, 33 bp, Homo sapiens
actgtctagcacagaagcaaacaatgaaatgtt

SEQ ID NO: 18578 - DNA, 51 bp, Homo sapiens
ttgaataatggtctataacctctaattgccagacatttgccataccagttt

SEQ ID NO: 18579 - DNA, 51 bp, Homo sapiens
atataacctaggaatgaccctaaaatgaagagaaaataatcttactttttg

SEQ ID NO: 18580 - DNA, 33 bp, Homo sapiens
agagtgctcatatcacggaggcacgtaagtcat

SEQ ID NO: 18581 - DNA, 33 bp, Homo sapiens
ctacccctatcaataggaatcaggtatgctggc

SEQ ID NO: 18582 - DNA, 33 bp, Homo sapiens
atgctggcgggacgtagagtaatttaaccagag

SEQ ID NO: 18583 - DNA, 33 bp, Homo sapiens
tcttacactaaagcaagtgtttgctgatttggg

SEQ ID NO: 18584 - DNA, 33 bp, Homo sapiens
tatataaaatgagaaagatgagttcatatatcc

SEQ ID NO: 18585 - DNA, 33 bp, Homo sapiens
ctgagacacaattcccgcttgacagcaaacaaa

SEQ ID NO: 18586 - DNA, 33 bp, Homo sapiens
caagaaaagaaggtgagaagcatcactcagtta

SEQ ID NO: 18587 - DNA, 33 bp, Homo sapiens
gctggtacttcacaatgataccctgttgtaaca

SEQ ID NO: 18588 - DNA, 33 bp, Homo sapiens
taccacatcaggtgaatcatccaaacaagagaa

SEQ ID NO: 18589 - DNA, 51 bp, Homo sapiens
ttggcaggtcggtctaagggtcctcgatagtagatgctagtggtggctatt

SEQ ID NO: 18590 - DNA, 51 bp, Homo sapiens
tttaaactttagtatacaagaaatatcactaggttgtgttaagatgtaagt

SEQ ID NO: 18591 - DNA, 51 bp, Homo sapiens
ctattgtaagtctactctttctatataattcctggaaattatacaatgtct

SEQ ID NO: 18592 - DNA, 33 bp, Homo sapiens
gcccactgaaacagactaaaaacaacaggaaat

SEQ ID NO: 18593 - DNA, 33 bp, Homo sapiens
tcctggagtctcaagggaatgaaggctgctgac

SEQ ID NO: 18594 - DNA, 33 bp, Homo sapiens
cttttcaggctcttcctaaaccataaacaacat

SEQ ID NO: 18595 - DNA, 33 bp, Homo sapiens
cttttttgaataaatgtactgaactgaaaaaga

SEQ ID NO: 18596 - DNA, 51 bp, Homo sapiens
gctattaaggaactagagttgataagtaaatgtgtataggttccttttgca

SEQ ID NO: 18597 - DNA, 33 bp, Homo sapiens
tgatgaatacatacaagctaatttgctaaaact

SEQ ID NO: 18598 - DNA, 33 bp, Homo sapiens
ctcgtgtaattttcaccagaatctccctcattt

SEQ ID NO: 18599 - DNA, 33 bp, Homo sapiens
gtttcctaagacaaaggccatgaaactagaaac

SEQ ID NO: 18600 - DNA, 33 bp, Homo sapiens
aggagagaatcttgaattgacagactatttatt

SEQ ID NO: 18601 - DNA, 33 bp, Homo sapiens
agggtatgtgatctgctgaacaatcagtaattt

SEQ ID NO: 18602 - DNA, 33 bp, Homo sapiens
aatttttacaaagtgatcaaacccatgtaacaa

SEQ ID NO: 18603 - DNA, 33 bp, Homo sapiens
ctccaacttaaaaacccgatctttgtcttactc

SEQ ID NO: 18604 - DNA, 33 bp, Homo sapiens
gtgtagttctgctagatatgagttgacagacct

SEQ ID NO: 18605 - DNA, 33 bp, Homo sapiens
ctggcaacagctctcagcatttaaggactcaat

SEQ ID NO: 18606 - DNA, 51 bp, Homo sapiens
caacaaaaatcttaatgggtaattctaatgtacaactaagttttaatatca

SEQ ID NO: 18607 - DNA, 51 bp, Homo sapiens
atatttcagcacaacacaaccggacggctaactaagattatgttttgacct

SEQ ID NO: 18608 - DNA, 51 bp, Homo sapiens
ttcctagatcaagccatactcacaacgactaagacactgtgacagagacta

SEQ ID NO: 18609 - DNA, 33 bp, Homo sapiens
gatgataccatttagagtatcccatgagaagtg

SEQ ID NO: 18610 - DNA, 51 bp, Homo sapiens
aaccagctgaggctagcccaaattgttgacccataaaatcataaacaaata

SEQ ID NO: 18611 - DNA, 51 bp, Homo sapiens
gcaatgtggtcatatgttcctaagatgcacaattattgaaaactttaatta

SEQ ID NO: 18612 - DNA, 51 bp, Homo sapiens
cctccacacacaaacaggaagtacatctgcctgcttaccgtacacagacag

SEQ ID NO: 18613 - DNA, 33 bp, Homo sapiens
catatacctatttatacgctaaatctgactcac

SEQ ID NO: 18614 - DNA, 33 bp, Homo sapiens
cacacttgtatctgccgcaaaagcctcacattg

SEQ ID NO: 18615 - DNA, 33 bp, Homo sapiens
cacagtgcccttttgagcttgaaaagaagagga

SEQ ID NO: 18616 - DNA, 33 bp, Homo sapiens
tccctgattccctgacgcatattttaccatgct

SEQ ID NO: 18617 - DNA, 33 bp, Homo sapiens
agaggaaactcattgattatacaggagaccaca

SEQ ID NO: 18618 - DNA, 33 bp, Homo sapiens
tatattacagcatctatgagtcgataaatttat

SEQ ID NO: 18619 - DNA, 33 bp, Homo sapiens
tggcatccttcaatcattgaggactatttagaa

SEQ ID NO: 18620 - DNA, 33 bp, Homo sapiens
tttgcctatgtatgtatccttccagaaaatgta

SEQ ID NO: 18621 - DNA, 33 bp, Homo sapiens
gattgcaaaatacaattatcgcttgccaatagg

SEQ ID NO: 18622 - DNA, 33 bp, Homo sapiens
atctggaaattgaggatgtcttatggtggagaa

SEQ ID NO: 18623 - DNA, 33 bp, Homo sapiens
ataacccaataaaaaatctgctaacaaaagtgc

SEQ ID NO: 18624 - DNA, 33 bp, Homo sapiens
aaagcttgatcattaataaaacggcctaatttc

SEQ ID NO: 18625 - DNA, 33 bp, Homo sapiens
cacagggcttcaaaaatgtctatgctatccttc

SEQ ID NO: 18626 - DNA, 33 bp, Homo sapiens
ctccaccagggctttacctccttgacggaaacg

SEQ ID NO: 18627 - DNA, 33 bp, Homo sapiens
gacattaatcacacagtatgcatagaggaataa

SEQ ID NO: 18628 - DNA, 33 bp, Homo sapiens
ccttttataacatcaagtatggtccagaattca

SEQ ID NO: 18629 - DNA, 33 bp, Homo sapiens
tctggttagccctgactgatacagcagttacag

SEQ ID NO: 18630 - DNA, 33 bp, Homo sapiens
ctgacacctcaatcattactggatctgctgggt

SEQ ID NO: 18631 - DNA, 33 bp, Homo sapiens
actactgcattatccccagaaattctctatatc

SEQ ID NO: 18632 - DNA, 33 bp, Homo sapiens
ttaattaacatgtgtctagtattttttgagaaa

SEQ ID NO: 18633 - DNA, 33 bp, Homo sapiens
attaagcaatctctgggatgtttcttctttttt

SEQ ID NO: 18634 - DNA, 51 bp, Homo sapiens
tcaactgaacagatatttattgagaccctagtgtgtacaaagtatgctgcc

SEQ ID NO: 18635 - DNA, 33 bp, Homo sapiens
acaaaatcgatttgcataaattactagcattcc

SEQ ID NO: 18636 - DNA, 33 bp, Homo sapiens
gtctcctggataataagagatagtgattggctc

SEQ ID NO: 18637 - DNA, 51 bp, Homo sapiens
tcaggaaaacatgagctcaccaaacgtactaaatgaggtaccattgaccaa

SEQ ID NO: 18638 - DNA, 51 bp, Homo sapiens
tacaaggaatataggtagctgatgatcttcacctttaggatccaccacaac

SEQ ID NO: 18639 - DNA, 33 bp, Homo sapiens
tagctactcctttggctgcatctgttcagaagt

SEQ ID NO: 18640 - DNA, 33 bp, Homo sapiens
agttaaagtaagaaaatgcaccaccaattataa

SEQ ID NO: 18641 - DNA, 33 bp, Homo sapiens
tagaaatcacctaagatggcagagattgagctg

SEQ ID NO: 18642 - DNA, 51 bp, Homo sapiens
gtgaatatacaaagtgatagaattagaccaactgtaagaatgaacagatct

SEQ ID NO: 18643 - DNA, 51 bp, Homo sapiens
cttttttttacactatgaagcaacagtgttctctaaatagcagggtgcttt

SEQ ID NO: 18644 - DNA, 33 bp, Homo sapiens
gattgaaaagagatagcaagaatgtgtggcaag

SEQ ID NO: 18645 - DNA, 33 bp, Homo sapiens
ggaagctcaattttaatctcatcatagaactct

SEQ ID NO: 18646 - DNA, 33 bp, Homo sapiens
gcatttcttttcacccggacacttgctttcaaa

SEQ ID NO: 18647 - DNA, 33 bp, Homo sapiens
aaaatgttagtgattatgccaatgttaacatcc

SEQ ID NO: 18648 - DNA, 33 bp, Homo sapiens
gccagatgattctgtctaagcgtaggctaatgt

SEQ ID NO: 18649 - DNA, 33 bp, Homo sapiens
ctatagaatagtgcaagtgagcaggacttttct

SEQ ID NO: 18650 - DNA, 51 bp, Homo sapiens
ttttccaacacagcactttatgaagtagaactggagcattaagataaaata

SEQ ID NO: 18651 - DNA, 51 bp, Homo sapiens
tgtctggtatcctagagcagatccaggttgccatttgaaatcattgatgta

SEQ ID NO: 18652 - DNA, 33 bp, Homo sapiens
ttgttgttgtttttgagagacagcttgtaggga

SEQ ID NO: 18653 - DNA, 51 bp, Homo sapiens
atggtatgtttacattccaaggcatgaacttgttaaaattacaattaatct

SEQ ID NO: 18654 - DNA, 33 bp, Homo sapiens
tattttaagtccaagtgaacctcctggaaaaga

SEQ ID NO: 18655 - DNA, 33 bp, Homo sapiens
ttgggttgtggacttatctgggggcagttactt

SEQ ID NO: 18656 - DNA, 33 bp, Homo sapiens
agcaattgcactcacagtaacatcaaaaattta

SEQ ID NO: 18657 - DNA, 33 bp, Homo sapiens
tcaacaaatacgccaggaaagctactatctcat

SEQ ID NO: 18658 - DNA, 33 bp, Homo sapiens
tttagtacaaggttgatgggaatgtgagttagc

SEQ ID NO: 18659 - DNA, 33 bp, Homo sapiens
ctcattttatctttgcggaaactccttgcagta

SEQ ID NO: 18660 - DNA, 33 bp, Homo sapiens
tagttatacagtttggcattctaatcccaagtt

SEQ ID NO: 18661 - DNA, 33 bp, Homo sapiens
agcaaacaacaatatagagcctagcaacattat

SEQ ID NO: 18662 - DNA, 33 bp, Homo sapiens
aggaaatgtaaaaggagacagtgcaatacagtc

SEQ ID NO: 18663 - DNA, 33 bp, Homo sapiens
cctcacaatgaatcaaggaaatggaaattaaaa

SEQ ID NO: 18664 - DNA, 51 bp, Homo sapiens
atttcatttcattctccagtttacatgtttagaaataagagtcctgaagac

SEQ ID NO: 18665 - DNA, 51 bp, Homo sapiens
ttgtcattcacatacacttgcaatgtcaaataaatgtatgttgaagagaag

SEQ ID NO: 18666 - DNA, 33 bp, Homo sapiens
agtaactagtatactatagtgctcacagaccac

SEQ ID NO: 18667 - DNA, 33 bp, Homo sapiens
aatttgataccaaatatgcctctagtagtcccg

SEQ ID NO: 18668 - DNA, 33 bp, Homo sapiens
tgataatagctagtacgaaggatgcacaaagtg

SEQ ID NO: 18669 - DNA, 33 bp, Homo sapiens
taatatgaacaacaaatgggctaagttgaaagg

SEQ ID NO: 18670 - DNA, 51 bp, Homo sapiens
acctctaaagaatgtataagagaggtaattaaatagtaatggtagggaaaa

SEQ ID NO: 18671 - DNA, 33 bp, Homo sapiens
gtagaaacttgtagaatgtgggatttgctgaga

SEQ ID NO: 18672 - DNA, 51 bp, Homo sapiens
caatcaagaccctggacacaaatgatggtctttgcatatcattttagcctt

SEQ ID NO: 18673 - DNA, 51 bp, Homo sapiens
caggtacctttcattcatcttcatcgatatccctagtatctaccctcttgt

SEQ ID NO: 18674 - DNA, 33 bp, Homo sapiens
ttctttcagaagatgcgagagtttattcatact

SEQ ID NO: 18675 - DNA, 33 bp, Homo sapiens
agaggtatgagagcaggatagttcattcctgat

SEQ ID NO: 18676 - DNA, 33 bp, Homo sapiens
tttcagtcagagagaataggacaccgaaagtaa

SEQ ID NO: 18677 - DNA, 33 bp, Homo sapiens
gaggctaaaaagtaaagtatggtgggatagaca

SEQ ID NO: 18678 - DNA, 33 bp, Homo sapiens
ctataaaaatctagacgaaaacatggaagaaat

SEQ ID NO: 18679 - DNA, 33 bp, Homo sapiens
tcatttctgtatctgggagaaaatagatgcatt

SEQ ID NO: 18680 - DNA, 33 bp, Homo sapiens
tatttggatagtaaaattaatgcataacaaata

SEQ ID NO: 18681 - DNA, 33 bp, Homo sapiens
actcttacttgcttaagtagaacttttgctgga

SEQ ID NO: 18682 - DNA, 33 bp, Homo sapiens
atacctacaactagaattgctgagtaagagtag

SEQ ID NO: 18683 - DNA, 33 bp, Homo sapiens
ctttagtaactaagcaggcataagtcagagtta

SEQ ID NO: 18684 - DNA, 33 bp, Homo sapiens
acctgcataagttaacggtaaaatcaactcttt

SEQ ID NO: 18685 - DNA, 33 bp, Homo sapiens
ggctcagctacaaagatcagtaagtcttgcttt

SEQ ID NO: 18686 - DNA, 33 bp, Homo sapiens
ttagattgattctagatactcacagatgtaata

SEQ ID NO: 18687 - DNA, 33 bp, Homo sapiens
tgctgggtttcagcaagaacttacttgtcagtt

SEQ ID NO: 18688 - DNA, 33 bp, Homo sapiens
tactaaggtctagttgtactgttccagtaggat

SEQ ID NO: 18689 - DNA, 33 bp, Homo sapiens
catctcattcatgacagaagagccctcgtgact

SEQ ID NO: 18690 - DNA, 33 bp, Homo sapiens
cctagatattcagtgatattggaagagttagat

SEQ ID NO: 18691 - DNA, 33 bp, Homo sapiens
atacattcttataagattcatctccaatgtgca

SEQ ID NO: 18692 - DNA, 33 bp, Homo sapiens
agaaataccataaatatgaagacgtggcaaaaa

SEQ ID NO: 18693 - DNA, 33 bp, Homo sapiens
agggtttcctaacatatccaatcagcttgcaat

SEQ ID NO: 18694 - DNA, 33 bp, Homo sapiens
gaagggacgaggaagaccaatgacacttctctg

SEQ ID NO: 18695 - DNA, 33 bp, Homo sapiens
tcctatagccagtaaatagtagtatgtggtggt

SEQ ID NO: 18696 - DNA, 51 bp, Homo sapiens
gaggttatttggcatattccactcatctaaaagcatttttccttcatacaa

SEQ ID NO: 18697 - DNA, 51 bp, Homo sapiens
atctgatttagctaagatgctttactgacaggatatcctgtatctagttaa

SEQ ID NO: 18698 - DNA, 33 bp, Homo sapiens
cattaaatattaatcgtatgaatgagtgtgttg

SEQ ID NO: 18699 - DNA, 33 bp, Homo sapiens
ggtattctgtggcatattaacacgtgtcacaca

SEQ ID NO: 18700 - DNA, 51 bp, Homo sapiens
tggataagagactggacccattcgaggcaatcagagagcatctcctggaga

SEQ ID NO: 18701 - DNA, 51 bp, Homo sapiens
ccttgatgatgtgagtgaccttcaggagacctggtgcactcacttggcaca

SEQ ID NO: 18702 - DNA, 51 bp, Homo sapiens
gtaacaagaaccagctgctaggaaataggtcccagttatgtatgaaactcc

SEQ ID NO: 18703 - DNA, 51 bp, Homo sapiens
ggttcttgttaccagggatgtaaatgatgaaaataaaatttttgccttttg

SEQ ID NO: 18704 - DNA, 33 bp, Homo sapiens
aggaggcattattgattagcggtgtaggtattc

SEQ ID NO: 18705 - DNA, 33 bp, Homo sapiens
gggagggagttacgtatgggaacaatgacagga

SEQ ID NO: 18706 - DNA, 51 bp, Homo sapiens
atggacaaaagaggactgaattacacaagccggaagaaaagagaatgttga

SEQ ID NO: 18707 - DNA, 33 bp, Homo sapiens
aagatgttcaacctaggaaattggctaaataaa

SEQ ID NO: 18708 - DNA, 33 bp, Homo sapiens
gcccacacatcaggaagagtcccacagcatgag

SEQ ID NO: 18709 - DNA, 33 bp, Homo sapiens
acaataataacagcaatgatggcttctgcttat

SEQ ID NO: 18710 - DNA, 33 bp, Homo sapiens
acactctcctgtgaaagttctacctaatgggta

SEQ ID NO: 18711 - DNA, 33 bp, Homo sapiens
ggtgtaccttcaggcacaggtaggcttcaacaa

SEQ ID NO: 18712 - DNA, 33 bp, Homo sapiens
tgattgttatggcccagcattaatcataggtgc

SEQ ID NO: 18713 - DNA, 33 bp, Homo sapiens
aaggagttctcaaacataatcttcttcgacaga

SEQ ID NO: 18714 - DNA, 33 bp, Homo sapiens
gacttctgaaggaagatgataagccaacccatt

SEQ ID NO: 18715 - DNA, 33 bp, Homo sapiens
gttatgaacacaggaagtcatttaaaactgaga

SEQ ID NO: 18716 - DNA, 33 bp, Homo sapiens
aaaacatgattctaagtaggagaccataggctt

SEQ ID NO: 18717 - DNA, 33 bp, Homo sapiens
tgcagacacctcaacattgcatttctgttcatc

SEQ ID NO: 18718 - DNA, 33 bp, Homo sapiens
acctgagataggccaatggtaatcgagaaaggg

SEQ ID NO: 18719 - DNA, 33 bp, Homo sapiens
atgtctggaagttagatcaggactataccaaat

SEQ ID NO: 18720 - DNA, 33 bp, Homo sapiens
atcttagcaatgatgagctacttcaaggtcacc

SEQ ID NO: 18721 - DNA, 33 bp, Homo sapiens
cttttttccttatgcctgcttatctactcagtt

SEQ ID NO: 18722 - DNA, 33 bp, Homo sapiens
tagaattgtttggtacgcagacattggtaacat

SEQ ID NO: 18723 - DNA, 33 bp, Homo sapiens
tttttctggctgtacctctaatactttgtctgg

SEQ ID NO: 18724 - DNA, 51 bp, Homo sapiens
accttttttcatgtcagcaaacacagattttcatcatttttaatgttgaaa

SEQ ID NO: 18725 - DNA, 33 bp, Homo sapiens
gcattctttcagaggcgataggagaaattctat

SEQ ID NO: 18726 - DNA, 33 bp, Homo sapiens
cagtgaagattagagcgagttttcctgggctag

SEQ ID NO: 18727 - DNA, 33 bp, Homo sapiens
ttatgccattaaaaaagttgttacagtgggagc

SEQ ID NO: 18728 - DNA, 33 bp, Homo sapiens
taaaaaaatgaagatatgtgatagcaaagaaca

SEQ ID NO: 18729 - DNA, 33 bp, Homo sapiens
ttaacttctgagtagagggattaagtgacttct

SEQ ID NO: 18730 - DNA, 33 bp, Homo sapiens
tgaagcaggggcaggcgataccaagaacaagga

SEQ ID NO: 18731 - DNA, 33 bp, Homo sapiens
agcaccagattcaccagaggaaatagatctaat

SEQ ID NO: 18732 - DNA, 33 bp, Homo sapiens
aaggatcatgtgaagacaagaatcggtacaggg

SEQ ID NO: 18733 - DNA, 33 bp, Homo sapiens
agcagagaaatgccacgattagatcagagttag

SEQ ID NO: 18734 - DNA, 33 bp, Homo sapiens
ttgttactaatgataagtggtttctaagcacca

SEQ ID NO: 18735 - DNA, 33 bp, Homo sapiens
gagcccatagcggagagtcagagtgaaaacagg

SEQ ID NO: 18736 - DNA, 33 bp, Homo sapiens
ttcctgttttgtgacatgtatttctgtaggctg

SEQ ID NO: 18737 - DNA, 33 bp, Homo sapiens
cagggagagaaactgggaatgtgtttttccttg

SEQ ID NO: 18738 - DNA, 33 bp, Homo sapiens
tacacaagaaatgagccaagagttcctggagaa

SEQ ID NO: 18739 - DNA, 33 bp, Homo sapiens
tccctaatgttacaaaggtgaagacaggttaaa

SEQ ID NO: 18740 - DNA, 33 bp, Homo sapiens
agtgttaccttaataatgcaaatagcatcatcg

SEQ ID NO: 18741 - DNA, 33 bp, Homo sapiens
ataacaacttaatttagatcacgtagaaaaact

SEQ ID NO: 18742 - DNA, 33 bp, Homo sapiens
aaccgaaattggaagcgaaagcagtcaggaact

SEQ ID NO: 18743 - DNA, 33 bp, Homo sapiens
gaaaatctgagttaaatgaactttgtgggggtt

SEQ ID NO: 18744 - DNA, 33 bp, Homo sapiens
ttggtgctgtcatgaatggtcccagggtaattt

SEQ ID NO: 18745 - DNA, 33 bp, Homo sapiens
tgctatttattatttcgaaccatcttatttcag

SEQ ID NO: 18746 - DNA, 33 bp, Homo sapiens
attttttcctgtgaatgatagagtggaggtgtc

SEQ ID NO: 18747 - DNA, 33 bp, Homo sapiens
tccccctttggaattatggcaaaaaggtgaact

SEQ ID NO: 18748 - DNA, 33 bp, Homo sapiens
accattatgttagggatgcttactcatcaattc

SEQ ID NO: 18749 - DNA, 33 bp, Homo sapiens
aggccacaagttgttggatttggtgtaaaccag

SEQ ID NO: 18750 - DNA, 33 bp, Homo sapiens
aggaaagagttggtgggactagcttatcatgga

SEQ ID NO: 18751 - DNA, 33 bp, Homo sapiens
ttgtctttacttgtatgaggcatcccaccagtg

SEQ ID NO: 18752 - DNA, 33 bp, Homo sapiens
catgctaactagaaaggagggaggtagacactg

SEQ ID NO: 18753 - DNA, 33 bp, Homo sapiens
acacagcaggaagtaggacatcaaataaacaac

SEQ ID NO: 18754 - DNA, 33 bp, Homo sapiens
accctatgtatactcagcgcttgtcctattgct

SEQ ID NO: 18755 - DNA, 33 bp, Homo sapiens
gtagctggaggactcatgatttctgtctcatgg

SEQ ID NO: 18756 - DNA, 33 bp, Homo sapiens
aggaagcgtcaggccagagtttcggggctgccg

SEQ ID NO: 18757 - DNA, 33 bp, Homo sapiens
tatctaaaagctaccatctgtaggtaataagaa

SEQ ID NO: 18758 - DNA, 33 bp, Homo sapiens
cagttgcaaagtccttgaaaacaaagggagtac

SEQ ID NO: 18759 - DNA, 33 bp, Homo sapiens
tttgtcatatggaaaagtgattggtttcaaagt

SEQ ID NO: 18760 - DNA, 33 bp, Homo sapiens
ttggagaatttggaaatccagaaaaacatgatt

SEQ ID NO: 18761 - DNA, 33 bp, Homo sapiens
attttgtatgcttttatgaactgctgaagttaa

SEQ ID NO: 18762 - DNA, 33 bp, Homo sapiens
tgctagaagtacctgggaaatccctctgagccc

SEQ ID NO: 18763 - DNA, 33 bp, Homo sapiens
gcagtcaggtagatacgcttcagccactgtctt

SEQ ID NO: 18764 - DNA, 33 bp, Homo sapiens
ggcaacacaagaataatgcacataataaataca

SEQ ID NO: 18765 - DNA, 33 bp, Homo sapiens
ttgatagaaaaagttcgcaggccctggcttaag

SEQ ID NO: 18766 - DNA, 33 bp, Homo sapiens
aagtgggtaaagagtggacagaggagttgaggt

SEQ ID NO: 18767 - DNA, 33 bp, Homo sapiens
tgggccctacctctcaggtgtctggttcggcag

SEQ ID NO: 18768 - DNA, 33 bp, Homo sapiens
aggtcacacagacagcgaaagtatctccagtgg

SEQ ID NO: 18769 - DNA, 33 bp, Homo sapiens
tctctactagatgagcgaaatacttttccctgg

SEQ ID NO: 18770 - DNA, 33 bp, Homo sapiens
cctgaggagaaagaaatcaggaatcgggtagat

SEQ ID NO: 18771 - DNA, 33 bp, Homo sapiens
tattgtcatatttcacgaatgagcaaactgaag

SEQ ID NO: 18772 - DNA, 33 bp, Homo sapiens
ttaaagtctctgcttatggatactgagaaaaaa

SEQ ID NO: 18773 - DNA, 33 bp, Homo sapiens
attaacaaggcagtgaggttaaagctacctatt

SEQ ID NO: 18774 - DNA, 33 bp, Homo sapiens
taacctgctttcctcacatttgtattcctttcc

SEQ ID NO: 18775 - DNA, 33 bp, Homo sapiens
gatctacactggaaaagttgtagccaaatatag

SEQ ID NO: 18776 - DNA, 33 bp, Homo sapiens
acatgaaaagttgcaatgtcaagcaaaactgta

SEQ ID NO: 18777 - DNA, 33 bp, Homo sapiens
aagtaagaaaagctatgaatcagtttctcctta

SEQ ID NO: 18778 - DNA, 33 bp, Homo sapiens
ttacccacttttgaaatgtagctgccttgatct

SEQ ID NO: 18779 - DNA, 33 bp, Homo sapiens
tcctctctcctcaggatgtgtttactctgtggc

SEQ ID NO: 18780 - DNA, 33 bp, Homo sapiens
gagtgtttacatggccgcaggtaattcattcag

SEQ ID NO: 18781 - DNA, 33 bp, Homo sapiens
ggcttgaacatagggccaaggtaaatagaagat

SEQ ID NO: 18782 - DNA, 51 bp, Homo sapiens
atgtagctgaacttgatgttctaaatgtgacttttcaaaataaaataattt

SEQ ID NO: 18783 - DNA, 33 bp, Homo sapiens
gatcacctctttggcctcgagaaaagatgttcc

SEQ ID NO: 18784 - DNA, 33 bp, Homo sapiens
tcccattcactttggataaatttcagagatttc

SEQ ID NO: 18785 - DNA, 33 bp, Homo sapiens
gttatcatgttagagataataacctgagttact

SEQ ID NO: 18786 - DNA, 33 bp, Homo sapiens
cgtgcagggctgatcatcactttaaactggagt

SEQ ID NO: 18787 - DNA, 33 bp, Homo sapiens
aggaggaggaagagatgagtatgaagagcacag

SEQ ID NO: 18788 - DNA, 33 bp, Homo sapiens
catacctctgttatgagattatgttctctctgc

SEQ ID NO: 18789 - DNA, 33 bp, Homo sapiens
ttcagtcatgagttgatggacatttaggttttt

SEQ ID NO: 18790 - DNA, 33 bp, Homo sapiens
atcagaccttactccatccagaatggccattat

SEQ ID NO: 18791 - DNA, 51 bp, Homo sapiens
agcgtttgctgacaaagtctctaattatctcaggaccagtcagggtaattt

SEQ ID NO: 18792 - DNA, 33 bp, Homo sapiens
gtgctctgaaattttatgagtgttcatattagc

SEQ ID NO: 18793 - DNA, 51 bp, Homo sapiens
ctctcatgttaatgagaaaggatcgtatcattgtagctattatttataatg

SEQ ID NO: 18794 - DNA, 33 bp, Homo sapiens
gattcacactgaattatagcattggatgtgtag

SEQ ID NO: 18795 - DNA, 33 bp, Homo sapiens
cctactccttgtcatgtatggatctgttgttat

SEQ ID NO: 18796 - DNA, 33 bp, Homo sapiens
ttttcacaatattttggaattgcaagtgattga

SEQ ID NO: 18797 - DNA, 33 bp, Homo sapiens
gaggccagaggaggatgaataccatgaaacaga

SEQ ID NO: 18798 - DNA, 51 bp, Homo sapiens
aatttaaaaaccagaaatcaggctatggttccagctacacatttattggta

SEQ ID NO: 18799 - DNA, 33 bp, Homo sapiens
aaagtgtagggagtgagcaaatctttaaaacag

SEQ ID NO: 18800 - DNA, 33 bp, Homo sapiens
atattgtataatgcaatgtgtaaattttgtaaa

SEQ ID NO: 18801 - DNA, 33 bp, Homo sapiens
gcaacagcattactaaggttgtttgtggtggct

SEQ ID NO: 18802 - DNA, 33 bp, Homo sapiens
aaatgaggaccctgaggaattgagtgtttaccc

SEQ ID NO: 18803 - DNA, 51 bp, Homo sapiens
tattaaagatattccagtggaaaaattggcgaagctccaacctgtggtgac

SEQ ID NO: 18804 - DNA, 33 bp, Homo sapiens
ctatccgagttttcacggagtccaggagaaagt

SEQ ID NO: 18805 - DNA, 33 bp, Homo sapiens
ataattttcagagcccgatgcaagattaaaaag

SEQ ID NO: 18806 - DNA, 33 bp, Homo sapiens
tccaacttgtctaaaattgcaagaataagcttt

SEQ ID NO: 18807 - DNA, 33 bp, Homo sapiens
acacggtatggtggaagtagttctaaaataacc

SEQ ID NO: 18808 - DNA, 33 bp, Homo sapiens
aaaactaacagcttgagtacagtttgtcacact

SEQ ID NO: 18809 - DNA, 33 bp, Homo sapiens
aatgctttcctctctagaccacgcggctcactt

SEQ ID NO: 18810 - DNA, 33 bp, Homo sapiens
gccaaccactattcaggcagtttacccacaatg

SEQ ID NO: 18811 - DNA, 33 bp, Homo sapiens
actttctaagacatacgagaggagttgaaatta

SEQ ID NO: 18812 - DNA, 33 bp, Homo sapiens
gcagcttgctataaaagtatgcaaaagattaag

SEQ ID NO: 18813 - DNA, 33 bp, Homo sapiens
cactctacatactctatggaatggccactcttc

SEQ ID NO: 18814 - DNA, 33 bp, Homo sapiens
aaaatatgtaaaacaatgtgaaatgcctatgga

SEQ ID NO: 18815 - DNA, 33 bp, Homo sapiens
cctctctttcttcttagagccttcctggatctt

SEQ ID NO: 18816 - DNA, 33 bp, Homo sapiens
tgtctgcaaaactttatcttgtgttccacttca

SEQ ID NO: 18817 - DNA, 33 bp, Homo sapiens
cacttaaaaattttcctaagtagcactgtttct

SEQ ID NO: 18818 - DNA, 33 bp, Homo sapiens
attctcatctggtctatattgacttctaaaagg

SEQ ID NO: 18819 - DNA, 33 bp, Homo sapiens
taatacaagcagcagccagaatttcaagtgcat

SEQ ID NO: 18820 - DNA, 33 bp, Homo sapiens
gtttccgtttggatcttaatgtgaacacagctg

SEQ ID NO: 18821 - DNA, 33 bp, Homo sapiens
ctttccaacaaacccatgaaggaggtactatta

SEQ ID NO: 18822 - DNA, 33 bp, Homo sapiens
gcgacatctgagaagatatctgaggaatgagaa

SEQ ID NO: 18823 - DNA, 33 bp, Homo sapiens
actttgtcatttcacattatacacaaacattaa

SEQ ID NO: 18824 - DNA, 33 bp, Homo sapiens
aagacaataggcaaaccactgtgtggaagcagg

SEQ ID NO: 18825 - DNA, 33 bp, Homo sapiens
aattagggatctaggctacctctatcttatagt

SEQ ID NO: 18826 - DNA, 33 bp, Homo sapiens
ggtataacacagcagagcccaattctaaaacct

SEQ ID NO: 18827 - DNA, 33 bp, Homo sapiens
tgtttggataacctcagtcaataaatatcgtca

SEQ ID NO: 18828 - DNA, 33 bp, Homo sapiens
caagagtgatgaacaggaaagtgctaaagccag

SEQ ID NO: 18829 - DNA, 33 bp, Homo sapiens
ttcctccacatatatctgaacctcattttattt

SEQ ID NO: 18830 - DNA, 33 bp, Homo sapiens
caagccttgtgaaaacccactgttcctacccat

SEQ ID NO: 18831 - DNA, 33 bp, Homo sapiens
acactgatgtagcaattaagcaaaacagtaaag

SEQ ID NO: 18832 - DNA, 33 bp, Homo sapiens
cagccaaacctaaatgtaaaccatgctgccaac

SEQ ID NO: 18833 - DNA, 33 bp, Homo sapiens
tctgtaagctttgttcgcacaatgtcctttctg

SEQ ID NO: 18834 - DNA, 33 bp, Homo sapiens
aaaaactaaaaaacacggtcagacaataggcaa

SEQ ID NO: 18835 - DNA, 33 bp, Homo sapiens
ttttttcctattttgtgaaacctcagagacatc

SEQ ID NO: 18836 - DNA, 33 bp, Homo sapiens
agcaggttcagttcacgatgattttcaaattca

SEQ ID NO: 18837 - DNA, 33 bp, Homo sapiens
ggtgtaagtgcaaagctaagatttgaattctaa

SEQ ID NO: 18838 - DNA, 33 bp, Homo sapiens
ctttgtgtttacatacgatcctataggtgcccc

SEQ ID NO: 18839 - DNA, 33 bp, Homo sapiens
ccccaacaacctggcaggagagtccctattctc

SEQ ID NO: 18840 - DNA, 33 bp, Homo sapiens
ggtctggaatatacaagctctcccagctctcat

SEQ ID NO: 18841 - DNA, 51 bp, Homo sapiens
catagcacgtccataacacaaatagccctcaggaggaatcgtgacatccag

SEQ ID NO: 18842 - DNA, 33 bp, Homo sapiens
ggtacattttaggatggcacagaaatgctgact

SEQ ID NO: 18843 - DNA, 33 bp, Homo sapiens
agcacagaatgaatccgatgtctgaaaatgtgc

SEQ ID NO: 18844 - DNA, 33 bp, Homo sapiens
aaatacagcaccacaacgttgtttaagccctcg

SEQ ID NO: 18845 - DNA, 33 bp, Homo sapiens
actgttcatcagcttcgagtaacaaacatacca

SEQ ID NO: 18846 - DNA, 33 bp, Homo sapiens
ctgcgaattcctgtcataaatggagttttcctc

SEQ ID NO: 18847 - DNA, 33 bp, Homo sapiens
aatgctggtttctttatgccctaatagctgctg

SEQ ID NO: 18848 - DNA, 33 bp, Homo sapiens
aaatcttactcttccctatgacttggctgagtg

SEQ ID NO: 18849 - DNA, 33 bp, Homo sapiens
atgataatgctaatacgagaatctccttgaaga

SEQ ID NO: 18850 - DNA, 33 bp, Homo sapiens
gacagctggaacattcgcagtgctgtttcctta

SEQ ID NO: 18851 - DNA, 33 bp, Homo sapiens
tcattttcatgtcggctatagtttccatgccta

SEQ ID NO: 18852 - DNA, 33 bp, Homo sapiens
tcaaacactacaacattagatcccagcttcccc

SEQ ID NO: 18853 - DNA, 33 bp, Homo sapiens
aagcaagtgagggtcagacttaggttgtgtgag

SEQ ID NO: 18854 - DNA, 33 bp, Homo sapiens
gcttaacttttaaggaggtaccaaaatgttttc

SEQ ID NO: 18855 - DNA, 51 bp, Homo sapiens
aaaggtttatttataaattaggcacggtatagatgaacaataataactaat

SEQ ID NO: 18856 - DNA, 33 bp, Homo sapiens
ttgtaaagaggagacactattttcatcattgaa

SEQ ID NO: 18857 - DNA, 33 bp, Homo sapiens
actgaaagtagcaaactggatgcccgcagggga

SEQ ID NO: 18858 - DNA, 33 bp, Homo sapiens
ataggtgttatgtacagataaaacgggacaacg

SEQ ID NO: 18859 - DNA, 33 bp, Homo sapiens
ggcaactcctccaaccgcaggtttccacattat

SEQ ID NO: 18860 - DNA, 33 bp, Homo sapiens
ggaaccatatctaagacgtgctgcagaagctgt

SEQ ID NO: 18861 - DNA, 51 bp, Homo sapiens
cttaggcggttagggtgtgatcttatgaaaagaattggcaggccttctgag

SEQ ID NO: 18862 - DNA, 33 bp, Homo sapiens
ccttgggtttaaattatgcaagtcctgactagc

SEQ ID NO: 18863 - DNA, 51 bp, Homo sapiens
tatagattcattaaagggtcttaaactaggagctaggctgtgctgcaggct

SEQ ID NO: 18864 - DNA, 33 bp, Homo sapiens
tctgagaggttaaagattagccagctcaaagat

SEQ ID NO: 18865 - DNA, 33 bp, Homo sapiens
gcccatatttctggtggataatttctagagatc

SEQ ID NO: 18866 - DNA, 33 bp, Homo sapiens
tatgatttctggcccctcgatggtcatagtcta

SEQ ID NO: 18867 - DNA, 33 bp, Homo sapiens
ccttatcatctcagtctgaaactccttaagctg

SEQ ID NO: 18868 - DNA, 33 bp, Homo sapiens
tttttgtactccctccgaagtatgcaacatact

SEQ ID NO: 18869 - DNA, 33 bp, Homo sapiens
tttggagaaatgtccagtcaatcctttgcccat

SEQ ID NO: 18870 - DNA, 33 bp, Homo sapiens
gcacattatgaggaaggctggtgctttgggttg

SEQ ID NO: 18871 - DNA, 33 bp, Homo sapiens
atgcttacacttattcgaatgtacatttaatta

SEQ ID NO: 18872 - DNA, 33 bp, Homo sapiens
ttgtctaagtttagcctgaggcccccctaacag

SEQ ID NO: 18873 - DNA, 33 bp, Homo sapiens
atcatttttttgtatatgttggaagcgctcgtg

SEQ ID NO: 18874 - DNA, 33 bp, Homo sapiens
aattactgtatgttaaggtaggagcttacgcct

SEQ ID NO: 18875 - DNA, 51 bp, Homo sapiens
aaaaaaataggttaatgggactcagtaattagtgaaacatacagaataata

SEQ ID NO: 18876 - DNA, 33 bp, Homo sapiens
agttggaagttgaccctacatgagctatggcac

SEQ ID NO: 18877 - DNA, 33 bp, Homo sapiens
ggcaccttccgcatgatgtttttatttgatgtt

SEQ ID NO: 18878 - DNA, 33 bp, Homo sapiens
gaacttaacaagcttctccaacaaaggaaaatg

SEQ ID NO: 18879 - DNA, 33 bp, Homo sapiens
ctagggtggtctgagatggctttaactataagg

SEQ ID NO: 18880 - DNA, 33 bp, Homo sapiens
ctcctcctgccagaaaggtttttaaggacctca

SEQ ID NO: 18881 - DNA, 33 bp, Homo sapiens
aatgttcaatgacagatagagtgtccgtttcag

SEQ ID NO: 18882 - DNA, 33 bp, Homo sapiens
tgtgctggagaactcatggaatctgcacttgga

SEQ ID NO: 18883 - DNA, 33 bp, Homo sapiens
gcttttggcagtgtcatagagtttaaaggacaa

SEQ ID NO: 18884 - DNA, 33 bp, Homo sapiens
ggtcatggcctcacaagctcttactgtcttggt

SEQ ID NO: 18885 - DNA, 33 bp, Homo sapiens
atcaacaaagctctcaggataaggatggtgttg

SEQ ID NO: 18886 - DNA, 33 bp, Homo sapiens
cttatgtttttcacaggccttttacaaatataa

SEQ ID NO: 18887 - DNA, 33 bp, Homo sapiens
atctatgtgtataaactatggccacattttctg

SEQ ID NO: 18888 - DNA, 33 bp, Homo sapiens
aaactactttcaccatgatacttctgatttctc

SEQ ID NO: 18889 - DNA, 33 bp, Homo sapiens
atgctatccaaaggactcttcaaatgaaataga

SEQ ID NO: 18890 - DNA, 33 bp, Homo sapiens
ctgagaaattcacatacaaattggtcctggact

SEQ ID NO: 18891 - DNA, 33 bp, Homo sapiens
tgggctctgggagaaagtggctccatcagcaga

SEQ ID NO: 18892 - DNA, 33 bp, Homo sapiens
gaagaaactgaaccacgcctacatctttgtcta

SEQ ID NO: 18893 - DNA, 33 bp, Homo sapiens
ttggaagtggtgtccttaatggagaggcggatc

SEQ ID NO: 18894 - DNA, 33 bp, Homo sapiens
atcaaaaactccagaataaattctcatgcagtt

SEQ ID NO: 18895 - DNA, 33 bp, Homo sapiens
ggaaacagtaaaattagatgggcatacatattt

SEQ ID NO: 18896 - DNA, 33 bp, Homo sapiens
aagttacataaataaagtcagaggctttgtaaa

SEQ ID NO: 18897 - DNA, 33 bp, Homo sapiens
ggtactggtcggaagggaaatttattgtattag

SEQ ID NO: 18898 - DNA, 33 bp, Homo sapiens
gtgttcctctatagcatgtcttgacgcctcttg

SEQ ID NO: 18899 - DNA, 33 bp, Homo sapiens
gagtcataacagaccagagcagagagtcttcct

SEQ ID NO: 18900 - DNA, 33 bp, Homo sapiens
cacagctagtaggaaatatggaaataagctctc

SEQ ID NO: 18901 - DNA, 51 bp, Homo sapiens
atgaaccagcaaaagagactgtgaaggaacagctagagaaataggaagaaa

SEQ ID NO: 18902 - DNA, 33 bp, Homo sapiens
ttcaatccaaatcccaggtaactgtaaaataca

SEQ ID NO: 18903 - DNA, 51 bp, Homo sapiens
cgtgctgcagcagtgccagaataactatctcattcaaggcatcacgacgtt

SEQ ID NO: 18904 - DNA, 33 bp, Homo sapiens
atttattgaaaccacagtgcaaacaattaaaaa

SEQ ID NO: 18905 - DNA, 33 bp, Homo sapiens
aatgtggctttcacattagtttttaaaatttga

SEQ ID NO: 18906 - DNA, 33 bp, Homo sapiens
acgaccctggaggctagagaacagaataaatag

SEQ ID NO: 18907 - DNA, 33 bp, Homo sapiens
atctagcagccatttatctgttccaaacttact

SEQ ID NO: 18908 - DNA, 33 bp, Homo sapiens
gtaaatctgtggctcagagagacttcggtattc

SEQ ID NO: 18909 - DNA, 33 bp, Homo sapiens
tagctccaatcaagtagcgaatgtctactgggt

SEQ ID NO: 18910 - DNA, 33 bp, Homo sapiens
acacgaacttgccccagtccttatctagtgctg

SEQ ID NO: 18911 - DNA, 33 bp, Homo sapiens
gccactgctgtcaaggtaaggatgaagcaacag

SEQ ID NO: 18912 - DNA, 33 bp, Homo sapiens
gatgtaaggaaggggcgaatcatatagtgagtc

SEQ ID NO: 18913 - DNA, 33 bp, Homo sapiens
agccaactgctggaaagaattatcagggaaact

SEQ ID NO: 18914 - DNA, 33 bp, Homo sapiens
taatttctaaaagggctctgttgcacacttaag

SEQ ID NO: 18915 - DNA, 33 bp, Homo sapiens
agagaactggaatggacctgaattttgttgaga

SEQ ID NO: 18916 - DNA, 33 bp, Homo sapiens
tatgttaagaaagaaacctccattttagctgtt

SEQ ID NO: 18917 - DNA, 33 bp, Homo sapiens
gttaatgtctgcgagagtattatcagttcagat

SEQ ID NO: 18918 - DNA, 33 bp, Homo sapiens
tttctacagttgaccatcagatgaaatattaat

SEQ ID NO: 18919 - DNA, 33 bp, Homo sapiens
tgtcatccctgagtaatatgtgacttcacaatg

SEQ ID NO: 18920 - DNA, 33 bp, Homo sapiens
accacatgacacctgatggatagctttgccttg

SEQ ID NO: 18921 - DNA, 33 bp, Homo sapiens
atggttcactttttcaggcagtaggaattggaa

SEQ ID NO: 18922 - DNA, 33 bp, Homo sapiens
cccataagataccacacctcttcaactatcact

SEQ ID NO: 18923 - DNA, 33 bp, Homo sapiens
gctaaagtgtaagttatagttgcaggtgggatg

SEQ ID NO: 18924 - DNA, 33 bp, Homo sapiens
tgcccagccaggataatgaacttaaaaagaaaa

SEQ ID NO: 18925 - DNA, 33 bp, Homo sapiens
gctttatatcacagtagaaaaagctaaaaaatc

SEQ ID NO: 18926 - DNA, 33 bp, Homo sapiens
aaaaagttaatctagctaatgctccaagttaca

SEQ ID NO: 18927 - DNA, 33 bp, Homo sapiens
aaacaaatcaatgcccgaaccaatctgaattgg

SEQ ID NO: 18928 - DNA, 33 bp, Homo sapiens
accttacctaagcagattctcttttggaagctc

SEQ ID NO: 18929 - DNA, 33 bp, Homo sapiens
ggctcatatacatttatgagaggcgtgtgtgtg

SEQ ID NO: 18930 - DNA, 33 bp, Homo sapiens
catccagcttccttcagtctatactaacctgtt

SEQ ID NO: 18931 - DNA, 33 bp, Homo sapiens
agctgcttaggatggcgaaacagaaacaagcac

SEQ ID NO: 18932 - DNA, 33 bp, Homo sapiens
agtaacaacaaggatagagagtctgaacttccc

SEQ ID NO: 18933 - DNA, 33 bp, Homo sapiens
tcaataggaagccgaagctgtagcagttgcctt

SEQ ID NO: 18934 - DNA, 33 bp, Homo sapiens
cgttctgtgggttgcatctgtaataagtcagac

SEQ ID NO: 18935 - DNA, 51 bp, Homo sapiens
cactaccccatcaaagcaacagtaatggagaatcagaaattttgccactga

SEQ ID NO: 18936 - DNA, 33 bp, Homo sapiens
ctgccctggaaattactggggacttctggaagt

SEQ ID NO: 18937 - DNA, 33 bp, Homo sapiens
tcacatgatcttttaattcactccccggcttct

SEQ ID NO: 18938 - DNA, 33 bp, Homo sapiens
ggggcagaacactggggagccaggtatagagag

SEQ ID NO: 18939 - DNA, 33 bp, Homo sapiens
gcggcaatgtttcagccgagtctggcaagacgg

SEQ ID NO: 18940 - DNA, 51 bp, Homo sapiens
ctggactcaattctgattgacagaatgaaatggcaaaggtaagaggtagac

SEQ ID NO: 18941 - DNA, 33 bp, Homo sapiens
aagtgcaaatcattcagccgagattcagggcct

SEQ ID NO: 18942 - DNA, 33 bp, Homo sapiens
ttgttttcctgtgttcgcctgctgtctgcttgt

SEQ ID NO: 18943 - DNA, 33 bp, Homo sapiens
gaccggacagcgactctaccctgctacgcactc

SEQ ID NO: 18944 - DNA, 33 bp, Homo sapiens
aaaatgacttgtgaaaggaagtcaagccagtag

SEQ ID NO: 18945 - DNA, 33 bp, Homo sapiens
tacacacgaatgtgtagggaacacttttaattt

SEQ ID NO: 18946 - DNA, 33 bp, Homo sapiens
ttcggggcattggaaaggagaatcagggtactt

SEQ ID NO: 18947 - DNA, 33 bp, Homo sapiens
ttgctcaggatcttagtatcattacaagtcttc

SEQ ID NO: 18948 - DNA, 33 bp, Homo sapiens
taagtgtaggtaattacgaggcacagagcctgc

SEQ ID NO: 18949 - DNA, 33 bp, Homo sapiens
ctcctgcagctacagctatttccttcgtctgtt

SEQ ID NO: 18950 - DNA, 51 bp, Homo sapiens
ctgcagaaagctcaaggggcaaacctaatgttagacagagaggggctcctt

SEQ ID NO: 18951 - DNA, 33 bp, Homo sapiens
agggtggagatgcaacgacattgactagtgatt

SEQ ID NO: 18952 - DNA, 33 bp, Homo sapiens
cttcctgaaacgtgtagtaaaatgatcagaaaa

SEQ ID NO: 18953 - DNA, 33 bp, Homo sapiens
aatgaagagccacaaccaactgggcagagaaag

SEQ ID NO: 18954 - DNA, 33 bp, Homo sapiens
aaaaaaattcaatccccagagcgattagatttg

SEQ ID NO: 18955 - DNA, 33 bp, Homo sapiens
agaataccctgcaaaatggtgatacagagcaga

SEQ ID NO: 18956 - DNA, 33 bp, Homo sapiens
gtctctcttactcccagtgctcttctagtacct

SEQ ID NO: 18957 - DNA, 33 bp, Homo sapiens
cacttactgtaaggaacggaaacaaaattgaag

SEQ ID NO: 18958 - DNA, 33 bp, Homo sapiens
tcctacctattgcacagaacaacggtaaaagga

SEQ ID NO: 18959 - DNA, 33 bp, Homo sapiens
ctagttcacattgacctaaatgccactggagta

SEQ ID NO: 18960 - DNA, 51 bp, Homo sapiens
aatctctgtcttatgttcactataagtgttttaagtcaacataatgctagc

SEQ ID NO: 18961 - DNA, 51 bp, Homo sapiens
ataaaccctagagattaggcaagtggaaagaattatgaaataaaacaaagc

SEQ ID NO: 18962 - DNA, 51 bp, Homo sapiens
aaaatacaatctatagaacactatactaaaagagatatgtaataactcaca

SEQ ID NO: 18963 - DNA, 51 bp, Homo sapiens
attttcctttgcttttggcagttacgatctatcagtgttatttgtaaaatg

SEQ ID NO: 18964 - DNA, 51 bp, Homo sapiens
gaaaaatacaacaaatttggccaaagcaccctgatcactgtggaggaaaca

SEQ ID NO: 18965 - DNA, 33 bp, Homo sapiens
attgtagtccctgccatccttactccaacacat

SEQ ID NO: 18966 - DNA, 33 bp, Homo sapiens
aagcacatagcccaaagtcaacagctattaaaa

SEQ ID NO: 18967 - DNA, 33 bp, Homo sapiens
aacagctactaagtgatgatgccaaggatttaa

SEQ ID NO: 18968 - DNA, 51 bp, Homo sapiens
tgtagcccttcaaataattttatgatgttttgccctatctgtagaatttgt

SEQ ID NO: 18969 - DNA, 51 bp, Homo sapiens
agtaaattgaattgaatacttgttatcaagattaagtagtatgatgatgtg

SEQ ID NO: 18970 - DNA, 33 bp, Homo sapiens
ttcaaggaactcagtcgataattacaagctaat

SEQ ID NO: 18971 - DNA, 33 bp, Homo sapiens
ctttcagagaaaacccggatacagggcatgaga

SEQ ID NO: 18972 - DNA, 33 bp, Homo sapiens
aataatgagttgcctattaagaaccaggggaat

SEQ ID NO: 18973 - DNA, 33 bp, Homo sapiens
atatcacatggttctatgatgacacacagattt

SEQ ID NO: 18974 - DNA, 33 bp, Homo sapiens
tacttccattgaaggagagctaagtggaaacta

SEQ ID NO: 18975 - DNA, 33 bp, Homo sapiens
tggttattagtgttcagtgaaagacacaagcaa

SEQ ID NO: 18976 - DNA, 33 bp, Homo sapiens
gaagggaacttagagagcatctacaatccacag

SEQ ID NO: 18977 - DNA, 33 bp, Homo sapiens
cctcataatttagaaagcaatcttactctgagt

SEQ ID NO: 18978 - DNA, 33 bp, Homo sapiens
cttcagagccatcatatcaatttagttccagca

SEQ ID NO: 18979 - DNA, 33 bp, Homo sapiens
gatttttatagcagacgcttagcccaagtaaga

SEQ ID NO: 18980 - DNA, 33 bp, Homo sapiens
ttaacgctgtcaccgaggtagaatagatattca

SEQ ID NO: 18981 - DNA, 33 bp, Homo sapiens
ttaaaaatagtatcccgcccaaagtactgataa

SEQ ID NO: 18982 - DNA, 33 bp, Homo sapiens
gcgaagattacatgaggaagtctccaaaagcaa

SEQ ID NO: 18983 - DNA, 33 bp, Homo sapiens
gtcttgtctgtggcaagtgttgtgagactgttc

SEQ ID NO: 18984 - DNA, 33 bp, Homo sapiens
atgctggtctcatttatgggctgcctaagaaat

SEQ ID NO: 18985 - DNA, 33 bp, Homo sapiens
tcacagagaaggaaagtacactcaatctgtcat

SEQ ID NO: 18986 - DNA, 33 bp, Homo sapiens
gaggacttcccagccatgaaaaactaagtcaat

SEQ ID NO: 18987 - DNA, 51 bp, Homo sapiens
cttaatatctttctaaaagcaataagctcatttgcaacagaacttggagaa

SEQ ID NO: 18988 - DNA, 33 bp, Homo sapiens
gaaaaatgccagaaagtcaataatacatgcatg

SEQ ID NO: 18989 - DNA, 51 bp, Homo sapiens
ttttcagctgctgatttcaaattcatgtaataacacgagttacaggtaaat

SEQ ID NO: 18990 - DNA, 33 bp, Homo sapiens
agaagcagtgaggatagagaagctgcaaattga

SEQ ID NO: 18991 - DNA, 33 bp, Homo sapiens
caaattgaattaatgatagaaagtgtagcaaag

SEQ ID NO: 18992 - DNA, 33 bp, Homo sapiens
taaagatactttctaggattacacctgtgcttc

SEQ ID NO: 18993 - DNA, 51 bp, Homo sapiens
aatcaattaggataaactactacactaaagaggctgatattttctcagcag

SEQ ID NO: 18994 - DNA, 33 bp, Homo sapiens
tttgaatttaaccaatgagaagcactggtaggg

SEQ ID NO: 18995 - DNA, 33 bp, Homo sapiens
aaataagcactattgatacagagcaggttcttg

SEQ ID NO: 18996 - DNA, 33 bp, Homo sapiens
aggttcttatactaattaaatgctgaacatata

SEQ ID NO: 18997 - DNA, 33 bp, Homo sapiens
tcttaactctgaagactagctttgaattctgtc

SEQ ID NO: 18998 - DNA, 33 bp, Homo sapiens
tatattaagcaaatcgtagtacttcaaaacaaa

SEQ ID NO: 18999 - DNA, 33 bp, Homo sapiens
catccaaaaacctagaggagctggattaattac

SEQ ID NO: 19000 - DNA, 33 bp, Homo sapiens
aagaactaaatgtacagtgaaatttgggactaa

SEQ ID NO: 19001 - DNA, 33 bp, Homo sapiens
tatgtgagatctgtgagctatgtaatgcctttc

SEQ ID NO: 19002 - DNA, 33 bp, Homo sapiens
tacttcaaaattgctaggagaagattttaggtg

SEQ ID NO: 19003 - DNA, 33 bp, Homo sapiens
gctatgtagagaactaggaaaatgaatcaagta

SEQ ID NO: 19004 - DNA, 33 bp, Homo sapiens
aatctaatcaaagtcatactggatcggaaaagg

SEQ ID NO: 19005 - DNA, 33 bp, Homo sapiens
aaactgtccgctgaaccagggcggcttacatta

SEQ ID NO: 19006 - DNA, 33 bp, Homo sapiens
ttctttcattttcacatatttcactgcagaaac

SEQ ID NO: 19007 - DNA, 33 bp, Homo sapiens
gaaagacaatgaagcatgtaggtactcaggatc

SEQ ID NO: 19008 - DNA, 33 bp, Homo sapiens
agaagagggaagaggtgacaatggccgtggact

SEQ ID NO: 19009 - DNA, 33 bp, Homo sapiens
acaactagcaaaatgacaggagttaagtcctta

SEQ ID NO: 19010 - DNA, 33 bp, Homo sapiens
tccgagccctacttacgattttgtcgtttactt

SEQ ID NO: 19011 - DNA, 33 bp, Homo sapiens
tttgctgcggacttaagccttacaaggtaattg

SEQ ID NO: 19012 - DNA, 51 bp, Homo sapiens
agatcaagaagtacagtctatactatgaaattaaagttactagcacagtat

SEQ ID NO: 19013 - DNA, 51 bp, Homo sapiens
aagagacttgggtacattgaccacatccatatatatatagtcacataatca

SEQ ID NO: 19014 - DNA, 51 bp, Homo sapiens
taattgcagcagttcaggctagagatggtgatattggtggaggtacaacgt

SEQ ID NO: 19015 - DNA, 51 bp, Homo sapiens
ccagtcagtgcaggtcattaaactcgagcaaaagttcactgaagcaaagac

SEQ ID NO: 19016 - DNA, 33 bp, Homo sapiens
gccagtgggtatcctatgagtaaatatccccag

SEQ ID NO: 19017 - DNA, 33 bp, Homo sapiens
tctgttataaaaaccaccagagtaatcaatatt

SEQ ID NO: 19018 - DNA, 33 bp, Homo sapiens
tgattctgttcctgaattggcattgatacagta

SEQ ID NO: 19019 - DNA, 33 bp, Homo sapiens
gggccatgtctatcaataccaacaggttgtgct

SEQ ID NO: 19020 - DNA, 33 bp, Homo sapiens
acactcacacagatcctcaatcaattggcaaac

SEQ ID NO: 19021 - DNA, 51 bp, Homo sapiens
aaataaaaggcataataaaaatccagtgcaaagcacaaaagccaagaacag

SEQ ID NO: 19022 - DNA, 33 bp, Homo sapiens
aagactaggctgccaatagctaggaaagaagtg

SEQ ID NO: 19023 - DNA, 51 bp, Homo sapiens
ccagaagtaagccatatagccacccgcaggtttgaggaattctagaaaata

SEQ ID NO: 19024 - DNA, 33 bp, Homo sapiens
gttctgcaaatttcacgcttgccagcaattgag

SEQ ID NO: 19025 - DNA, 33 bp, Homo sapiens
tgtgtatctgtaatcctttgtatcacattgagc

SEQ ID NO: 19026 - DNA, 33 bp, Homo sapiens
atgatgttgcataacagatgatttccaaaattt

SEQ ID NO: 19027 - DNA, 33 bp, Homo sapiens
ttaaccctaaatcagcgattacaatgtgaatat

SEQ ID NO: 19028 - DNA, 33 bp, Homo sapiens
agcattctaggcctgatggttataaaggtgtgt

SEQ ID NO: 19029 - DNA, 33 bp, Homo sapiens
tccagtggaaatccgatctgggcaatttatgac

SEQ ID NO: 19030 - DNA, 33 bp, Homo sapiens
taagtgcctctatttctaatcaaattcttcccc

SEQ ID NO: 19031 - DNA, 33 bp, Homo sapiens
tgggacatttcctaacgccttaaacagctactc

SEQ ID NO: 19032 - DNA, 33 bp, Homo sapiens
gtgtgttataatctccgctgtatttctgtctgc

SEQ ID NO: 19033 - DNA, 33 bp, Homo sapiens
acaatgctatgaaccataaagctgaagttcaac

SEQ ID NO: 19034 - DNA, 33 bp, Homo sapiens
gcttaattgtaccccagagatgcccacaaaatg

SEQ ID NO: 19035 - DNA, 33 bp, Homo sapiens
tctgttgctacacagagctacctgagaatgggt

SEQ ID NO: 19036 - DNA, 33 bp, Homo sapiens
ttgggaaccactcttatgaagcacagtgattat

SEQ ID NO: 19037 - DNA, 33 bp, Homo sapiens
cctatctccattaaacgaaacctaaccaaacac

SEQ ID NO: 19038 - DNA, 33 bp, Homo sapiens
aacataaccattcaacgctaacttcttggtcct

SEQ ID NO: 19039 - DNA, 51 bp, Homo sapiens
ggagttcttctgaagatccatattatgaagaggtaaaaagtgaaattgtag

SEQ ID NO: 19040 - DNA, 33 bp, Homo sapiens
aaggaagccaggtagatgcctcaagtttccatg

SEQ ID NO: 19041 - DNA, 51 bp, Homo sapiens
ttctgtaaattacacatttcaaggagcttttatgcaagaatgcatcaagac

SEQ ID NO: 19042 - DNA, 33 bp, Homo sapiens
ccaagtttcctttcactggcatcgaccctggaa

SEQ ID NO: 19043 - DNA, 33 bp, Homo sapiens
ccgccgtcactgttcatattctggaagtgttcg

SEQ ID NO: 19044 - DNA, 51 bp, Homo sapiens
ataaaccatccacgccgagaaacccgctgaccgtacttatctgcatattaa

SEQ ID NO: 19045 - DNA, 33 bp, Homo sapiens
acatgatgaaacaaaatagcaagcgactcttga

SEQ ID NO: 19046 - DNA, 33 bp, Homo sapiens
aaacctagagctcagagctgaaaggccaggggt

SEQ ID NO: 19047 - DNA, 33 bp, Homo sapiens
ctttcagattagcaccgactttacttctgtatc

SEQ ID NO: 19048 - DNA, 33 bp, Homo sapiens
taaattagaatcgccaggtaaatctgttgatca

SEQ ID NO: 19049 - DNA, 33 bp, Homo sapiens
gtggaaaaaaatggaggcagatatgggtggtag

SEQ ID NO: 19050 - DNA, 51 bp, Homo sapiens
aactggctgatctcttgtcctcaaggtttcaaaagctaaaagaggtccatt

SEQ ID NO: 19051 - DNA, 33 bp, Homo sapiens
gggccatctgcctacatcagtgaggaaggatga

SEQ ID NO: 19052 - DNA, 33 bp, Homo sapiens
ctactggaattctagctcttggtcattcttctc

SEQ ID NO: 19053 - DNA, 33 bp, Homo sapiens
ttcttttgcactaggctagcacattttaagcct

SEQ ID NO: 19054 - DNA, 33 bp, Homo sapiens
ccatcgaagagaggtagagacttccctgtttgg

SEQ ID NO: 19055 - DNA, 33 bp, Homo sapiens
caaggaaaagaatttctctactggctcctgccc

SEQ ID NO: 19056 - DNA, 33 bp, Homo sapiens
ttctcagatgcaatccgccaaaaatacccagga

SEQ ID NO: 19057 - DNA, 33 bp, Homo sapiens
taccacaaaaattccatgatgaacccagtacca

SEQ ID NO: 19058 - DNA, 33 bp, Homo sapiens
acctagcgcgtcagtatgacagttttcccaaac

SEQ ID NO: 19059 - DNA, 33 bp, Homo sapiens
acttctgccctgcaaatgacaatgttaagagaa

SEQ ID NO: 19060 - DNA, 33 bp, Homo sapiens
tatgctaggcctgaccgattaaagctgagagca

SEQ ID NO: 19061 - DNA, 33 bp, Homo sapiens
attcagaggtgatagatgtttctaatcttagaa

SEQ ID NO: 19062 - DNA, 33 bp, Homo sapiens
tgatgtaacagaagtcgaaaaactttaatatca

SEQ ID NO: 19063 - DNA, 33 bp, Homo sapiens
ctctatgaattaaatcgacacaacagatttctt

SEQ ID NO: 19064 - DNA, 33 bp, Homo sapiens
agaggtagacaaaaacgagttcttgacacttca

SEQ ID NO: 19065 - DNA, 33 bp, Homo sapiens
atgcttttctggtgtatggacagagcctttctt

SEQ ID NO: 19066 - DNA, 33 bp, Homo sapiens
ctagggtgatggtcaagacacagacagtttgaa

SEQ ID NO: 19067 - DNA, 33 bp, Homo sapiens
taatttaatcagaatgtcatgtttcctggctgg

SEQ ID NO: 19068 - DNA, 33 bp, Homo sapiens
ataatccaactgatactcattaaagctagaaat

SEQ ID NO: 19069 - DNA, 33 bp, Homo sapiens
ccaatcccgtgctagataaaccctcctgcttgt

SEQ ID NO: 19070 - DNA, 33 bp, Homo sapiens
ccattgcctttgcacagtagttttaagttcttc

SEQ ID NO: 19071 - DNA, 33 bp, Homo sapiens
acctaaatgtccatcagtaagggaccagggaaa

SEQ ID NO: 19072 - DNA, 33 bp, Homo sapiens
ctccttgctaggaaaagtcccaaggaggcaact

SEQ ID NO: 19073 - DNA, 33 bp, Homo sapiens
gctgccaaagtacgaggccttgtcctgcgccag

SEQ ID NO: 19074 - DNA, 33 bp, Homo sapiens
tggactttattatagagcccttctgtatctata

SEQ ID NO: 19075 - DNA, 33 bp, Homo sapiens
ctccacctcattccccgctttttacacagaaga

SEQ ID NO: 19076 - DNA, 33 bp, Homo sapiens
tacaggaggattctgcccttacctgtcacatat

SEQ ID NO: 19077 - DNA, 51 bp, Homo sapiens
tggcaagacttgaaacattggaaagcatttactccagaaagactctcagaa

SEQ ID NO: 19078 - DNA, 51 bp, Homo sapiens
actaatgccctggccagttacagccgatatgaacacacaggtccaagtaat

SEQ ID NO: 19079 - DNA, 33 bp, Homo sapiens
gtgatcccagcagctatggatgttaatgacaat

SEQ ID NO: 19080 - DNA, 33 bp, Homo sapiens
ttccatgggtaaatcacggcaaagacaggccct

SEQ ID NO: 19081 - DNA, 33 bp, Homo sapiens
ttcctttctcatataagtctgtaaatgcaggca

SEQ ID NO: 19082 - DNA, 33 bp, Homo sapiens
tgccccagaaactttatcaaaggcttcaattca

SEQ ID NO: 19083 - DNA, 33 bp, Homo sapiens
tgctacaagtagaaaattccccatctgacctca

SEQ ID NO: 19084 - DNA, 33 bp, Homo sapiens
ataaagtaacttgccatcgctttattgaataaa

SEQ ID NO: 19085 - DNA, 33 bp, Homo sapiens
cattcatagaaaatcatgtagcgttaatcatat

SEQ ID NO: 19086 - DNA, 33 bp, Homo sapiens
tataaaggaaggcagcggagtatattgggaaga

SEQ ID NO: 19087 - DNA, 33 bp, Homo sapiens
tctatggattgctcagtcaaaattcttggttct

SEQ ID NO: 19088 - DNA, 51 bp, Homo sapiens
ggcagcccctgggtgagcaatttcttgcaggcatccagcccataaagtgtt

SEQ ID NO: 19089 - DNA, 33 bp, Homo sapiens
tactcttcctaacttctctgttttcatcctccc

SEQ ID NO: 19090 - DNA, 33 bp, Homo sapiens
gtggatggatggatgcgaatgtaacttagaaag

SEQ ID NO: 19091 - DNA, 33 bp, Homo sapiens
caaagtctccctaatatagacgcacccaatgca

SEQ ID NO: 19092 - DNA, 33 bp, Homo sapiens
agaacacctagaattttaaaaaagcaatagata

SEQ ID NO: 19093 - DNA, 33 bp, Homo sapiens
ccccagggtgcacaccgctacgtctgccataag

SEQ ID NO: 19094 - DNA, 33 bp, Homo sapiens
cccactctctgctgtatcagaaccaacccagga

SEQ ID NO: 19095 - DNA, 51 bp, Homo sapiens
ccaagaataggacttagtatttacattacagtccagggggctgacctctgc

SEQ ID NO: 19096 - DNA, 51 bp, Homo sapiens
ggtcaccacagtatgccatgacttatgatgctacaaaatcacattgctccc

SEQ ID NO: 19097 - DNA, 33 bp, Homo sapiens
ccttaaggtgcaataacaacttaacttttgtga

SEQ ID NO: 19098 - DNA, 33 bp, Homo sapiens
aaatctattgtctacctatctggtttcttttat

SEQ ID NO: 19099 - DNA, 51 bp, Homo sapiens
accttcatgatccagcagtaaaggtgagcagctgagggggatctccccaga

SEQ ID NO: 19100 - DNA, 33 bp, Homo sapiens
tggggcaaggagtgcagatagttgggagatggg

SEQ ID NO: 19101 - DNA, 33 bp, Homo sapiens
catcagcaatgtataatgaaggttccgtcctag

SEQ ID NO: 19102 - DNA, 33 bp, Homo sapiens
tttttggtaatcacactgtgggatggggagaga

SEQ ID NO: 19103 - DNA, 33 bp, Homo sapiens
cgaagaggatcgtgtagctttttactaggaccc

SEQ ID NO: 19104 - DNA, 33 bp, Homo sapiens
aagaaagtcatgcacattgaaaaacatgtgaaa

SEQ ID NO: 19105 - DNA, 33 bp, Homo sapiens
cccatatcaatctgccgctggccacaggtcact

SEQ ID NO: 19106 - DNA, 33 bp, Homo sapiens
catgaggaagacagaacggccagctagggaggg

SEQ ID NO: 19107 - DNA, 33 bp, Homo sapiens
tgctcttcctggcttggagaactactgctggcc

SEQ ID NO: 19108 - DNA, 33 bp, Homo sapiens
agcggtcatgtaccgcgagagttgggaagaaca

SEQ ID NO: 19109 - DNA, 33 bp, Homo sapiens
tctctcattgttgcaatcttctttacaaatgca

SEQ ID NO: 19110 - DNA, 33 bp, Homo sapiens
caaaactagagcctaatcatggatgccgaggat

SEQ ID NO: 19111 - DNA, 33 bp, Homo sapiens
aacagaatgcaacaaatcatgttcaaccaaaca

SEQ ID NO: 19112 - DNA, 33 bp, Homo sapiens
aacataatggcatctcgagtcatattcttttgg

SEQ ID NO: 19113 - DNA, 33 bp, Homo sapiens
gattcaggcaagaggatatgtggagaacacata

SEQ ID NO: 19114 - DNA, 33 bp, Homo sapiens
agactcccggaagatatggcccagaccacttgc

SEQ ID NO: 19115 - DNA, 33 bp, Homo sapiens
agtgtgaacttacaccgctgatatgtctagaaa

SEQ ID NO: 19116 - DNA, 33 bp, Homo sapiens
atcatcatggttagaaggaaaagcaatacacca

SEQ ID NO: 19117 - DNA, 33 bp, Homo sapiens
cttccaactgcaaggctgagactcataattcct

SEQ ID NO: 19118 - DNA, 33 bp, Homo sapiens
acctggacaatgaccatcgtttagtaaactgat

SEQ ID NO: 19119 - DNA, 33 bp, Homo sapiens
tcttgcctacagaaagccaggagatgcggcttt

SEQ ID NO: 19120 - DNA, 33 bp, Homo sapiens
agtctcttatgaaaactggtaggagacagcgta

SEQ ID NO: 19121 - DNA, 33 bp, Homo sapiens
taggcagtaggcaaatgataattgaggaaacca

SEQ ID NO: 19122 - DNA, 33 bp, Homo sapiens
taggtagcatggcaagtctgctttaaaacaaca

SEQ ID NO: 19123 - DNA, 33 bp, Homo sapiens
actaggctgtgttatatgacactcgagtctttt

SEQ ID NO: 19124 - DNA, 33 bp, Homo sapiens
gcatcttattctatcatactcacctattttgga

SEQ ID NO: 19125 - DNA, 33 bp, Homo sapiens
agatttgtgtctggaatccagatgagcctaaag

SEQ ID NO: 19126 - DNA, 33 bp, Homo sapiens
agggaaacttggaaaatgaggctaaccattctc

SEQ ID NO: 19127 - DNA, 33 bp, Homo sapiens
ctaataaagttgctaatggagcttaggactaag

SEQ ID NO: 19128 - DNA, 33 bp, Homo sapiens
ccatctcttcaaattcgctgtctaacctcattt

SEQ ID NO: 19129 - DNA, 33 bp, Homo sapiens
atttaaggtcctctcttacactgggattttggg

SEQ ID NO: 19130 - DNA, 33 bp, Homo sapiens
aatgtttctattccactgtcagtattaacattg

SEQ ID NO: 19131 - DNA, 33 bp, Homo sapiens
agataactaattcttatgaggctattactaatg

SEQ ID NO: 19132 - DNA, 33 bp, Homo sapiens
tatggctactgaaggatggatttggttttgcca

SEQ ID NO: 19133 - DNA, 33 bp, Homo sapiens
attggaatattcctaatgtcagagagcttcata

SEQ ID NO: 19134 - DNA, 33 bp, Homo sapiens
ttctcttatattttcatggacccaaaccatgtc

SEQ ID NO: 19135 - DNA, 33 bp, Homo sapiens
taagaacaagatgctatgtaaaaggaacaatca

SEQ ID NO: 19136 - DNA, 33 bp, Homo sapiens
ttgtccagggcaaaaagccttgaacttggagct

SEQ ID NO: 19137 - DNA, 33 bp, Homo sapiens
gatccagcagaagacatggcatgcgagatcttg

SEQ ID NO: 19138 - DNA, 33 bp, Homo sapiens
ccaggtaactcagttctcccatgaaagagcccc

SEQ ID NO: 19139 - DNA, 33 bp, Homo sapiens
cagggaacagtattcctaatgtgcactgagaag

SEQ ID NO: 19140 - DNA, 33 bp, Homo sapiens
ggtaggatatccaccctaaaatgccacagtggt

SEQ ID NO: 19141 - DNA, 33 bp, Homo sapiens
tcctgtgcttgcctccgctctatcgggcgctgt

SEQ ID NO: 19142 - DNA, 51 bp, Homo sapiens
ttgatgttccaaagccaagataacacctctatcatttgataaagatcaagt

SEQ ID NO: 19143 - DNA, 33 bp, Homo sapiens
tcaaggaatcaaagcatggtgttacaaaatcaa

SEQ ID NO: 19144 - DNA, 33 bp, Homo sapiens
tcatagcaaaaggccaggttttaaagcatagtg

SEQ ID NO: 19145 - DNA, 33 bp, Homo sapiens
agcccctacatcacccgcagtttcagaagcaaa

SEQ ID NO: 19146 - DNA, 33 bp, Homo sapiens
agaatcatagcaacaagaagtagagaggtggtt

SEQ ID NO: 19147 - DNA, 33 bp, Homo sapiens
gtagttctcagtgtatgagtcttctaactcctt

SEQ ID NO: 19148 - DNA, 33 bp, Homo sapiens
tggcatttatgtcaaagttatacactacactca

SEQ ID NO: 19149 - DNA, 33 bp, Homo sapiens
gcaaagcttatggaaacgaggcctgttgtttct

SEQ ID NO: 19150 - DNA, 33 bp, Homo sapiens
aagtccgagatcaagatgccaggcagttcagtt

SEQ ID NO: 19151 - DNA, 33 bp, Homo sapiens
tcagccttctctctcataacagcctgggatggg

SEQ ID NO: 19152 - DNA, 33 bp, Homo sapiens
ggagggagctgggagattagaggtgcccaagtg

SEQ ID NO: 19153 - DNA, 33 bp, Homo sapiens
cttggaaacagtatccgattctaattcacgaag

SEQ ID NO: 19154 - DNA, 33 bp, Homo sapiens
ttatttgtgtaacgacgggctctatttcttgag

SEQ ID NO: 19155 - DNA, 33 bp, Homo sapiens
atttttccttggctatgactgtttcagtacata

SEQ ID NO: 19156 - DNA, 33 bp, Homo sapiens
agacccacggagctcatggtcgtcaggggtcct

SEQ ID NO: 19157 - DNA, 33 bp, Homo sapiens
gtgagcaggtaggcactagtaagcctgaattca

SEQ ID NO: 19158 - DNA, 33 bp, Homo sapiens
ggtgcacagatgtcaaggattgaagtttcagaa

SEQ ID NO: 19159 - DNA, 33 bp, Homo sapiens
agtcaggttgtcccaacgtctgctcgagtctgg

SEQ ID NO: 19160 - DNA, 33 bp, Homo sapiens
ccatgttttctttaaatgccgctatcccatctt

SEQ ID NO: 19161 - DNA, 33 bp, Homo sapiens
gaagataaataaactagagctacatgaagcaac

SEQ ID NO: 19162 - DNA, 33 bp, Homo sapiens
aggttggagacatctggaaaaggtagcaaatga

SEQ ID NO: 19163 - DNA, 33 bp, Homo sapiens
tgactttctgaatggagccaatgtacatcctac

SEQ ID NO: 19164 - DNA, 33 bp, Homo sapiens
tgtgctcctaaccatcgcattaggccacctctc

SEQ ID NO: 19165 - DNA, 33 bp, Homo sapiens
gcgttataaacactgctcagtaactgatactca

SEQ ID NO: 19166 - DNA, 33 bp, Homo sapiens
tccactcctgcttcaccgccttttctgtccagc

SEQ ID NO: 19167 - DNA, 33 bp, Homo sapiens
tgtacccccacagagatcaacttcaaggactcc

SEQ ID NO: 19168 - DNA, 33 bp, Homo sapiens
aggctacaggtagtaatccttctagaagagcct

SEQ ID NO: 19169 - DNA, 33 bp, Homo sapiens
agtttcagtcaataacggcaacttaatattagg

SEQ ID NO: 19170 - DNA, 33 bp, Homo sapiens
cttgttcacacaggtcccaggaatatgctgggt

SEQ ID NO: 19171 - DNA, 33 bp, Homo sapiens
aaggtcacgttcatgccgatgatggaagacctc

SEQ ID NO: 19172 - DNA, 33 bp, Homo sapiens
tgagcccgtctctgaatacaaaccagacctcct

SEQ ID NO: 19173 - DNA, 33 bp, Homo sapiens
accttcgtgtcttaactacatgaatcctggctt

SEQ ID NO: 19174 - DNA, 33 bp, Homo sapiens
atataatttttcttccgcaaagaacagaaacac

SEQ ID NO: 19175 - DNA, 33 bp, Homo sapiens
ctctccctggaggtcaggtaggactgaaggttc

SEQ ID NO: 19176 - DNA, 33 bp, Homo sapiens
cgagccaccgtatccagcctacaaatattttaa

SEQ ID NO: 19177 - DNA, 33 bp, Homo sapiens
gatggcttctaagacatccaaataccaaatgct

SEQ ID NO: 19178 - DNA, 33 bp, Homo sapiens
aagtctcaaagcaaattagttacttcctagata

SEQ ID NO: 19179 - DNA, 33 bp, Homo sapiens
caataacacaaaggaagcatcttgcagactctg

SEQ ID NO: 19180 - DNA, 33 bp, Homo sapiens
ctgcctttcccagcaccaggaaacatccacagc

SEQ ID NO: 19181 - DNA, 33 bp, Homo sapiens
ggcacaaaatcaatactccaatccaactgcatt

SEQ ID NO: 19182 - DNA, 33 bp, Homo sapiens
cagagctggccagacatatctgttggaggaaga

SEQ ID NO: 19183 - DNA, 33 bp, Homo sapiens
tccagaaaatgacatcgcctgaggtataaccag

SEQ ID NO: 19184 - DNA, 33 bp, Homo sapiens
tgtacttatttgttgataaacattgatactata

SEQ ID NO: 19185 - DNA, 33 bp, Homo sapiens
agtaattgtggactccggctctgacaatttgta

SEQ ID NO: 19186 - DNA, 33 bp, Homo sapiens
gaacctgtaaaaatcatgggaatacaagtgctg

SEQ ID NO: 19187 - DNA, 33 bp, Homo sapiens
agtgtagagtttcagagaccaggccattcactt

SEQ ID NO: 19188 - DNA, 33 bp, Homo sapiens
ctgaccttgactgcagtagggttttatgagtgg

SEQ ID NO: 19189 - DNA, 33 bp, Homo sapiens
ctcttcaccaatgatatgatcttatgcctagaa

SEQ ID NO: 19190 - DNA, 33 bp, Homo sapiens
cctagatttcaaaggatatgtggaaatgcctga

SEQ ID NO: 19191 - DNA, 33 bp, Homo sapiens
ggcttgtgcatgggaatggcacttcgtctccag

SEQ ID NO: 19192 - DNA, 33 bp, Homo sapiens
agcctttcagtgaaaatgaatgttttgggcaga

SEQ ID NO: 19193 - DNA, 33 bp, Homo sapiens
acacaaaaatgggaaatatgtggagactgcctc

SEQ ID NO: 19194 - DNA, 33 bp, Homo sapiens
agtcatctcccttgaagtgctgtatccagggtg

SEQ ID NO: 19195 - DNA, 33 bp, Homo sapiens
cactctgaaaacactatgtactgcacaatccaa

SEQ ID NO: 19196 - DNA, 33 bp, Homo sapiens
tcactactaagcgacccatactgacatgattgt

SEQ ID NO: 19197 - DNA, 33 bp, Homo sapiens
tgggtgtgcatagggagagaagggccaacctag

SEQ ID NO: 19198 - DNA, 33 bp, Homo sapiens
aaagcattagctttgcggagaaaaaatctggca

SEQ ID NO: 19199 - DNA, 33 bp, Homo sapiens
cctcccctatctgctggacgtactgctccccac

SEQ ID NO: 19200 - DNA, 33 bp, Homo sapiens
gtttatggagcataaatgtgtcgaatgttacct

SEQ ID NO: 19201 - DNA, 33 bp, Homo sapiens
gtccgcgttttcacaagatcattttcaatctgc

SEQ ID NO: 19202 - DNA, 33 bp, Homo sapiens
attaagtgaaagaagcgcaaatctgtctaacac

SEQ ID NO: 19203 - DNA, 33 bp, Homo sapiens
caagaatttggtctcatgatagctctgacccac

SEQ ID NO: 19204 - DNA, 33 bp, Homo sapiens
tggaaagtccaaataaggtccagaaaaatagtt

SEQ ID NO: 19205 - DNA, 33 bp, Homo sapiens
catcaaccagcggcaattgtgaatgtaaacaaa

SEQ ID NO: 19206 - DNA, 33 bp, Homo sapiens
gtatgaagcacatatatgagacagcaaaggttc

SEQ ID NO: 19207 - DNA, 33 bp, Homo sapiens
tgagcaggagatgtacggagaccacgtagcaag

SEQ ID NO: 19208 - DNA, 33 bp, Homo sapiens
atggggatgacagacctggaactgataacagga

SEQ ID NO: 19209 - DNA, 51 bp, Homo sapiens
tacccaccaaattatctttaaaaacgctaatccttgaatgctcagggaggc

SEQ ID NO: 19210 - DNA, 33 bp, Homo sapiens
ttctgagttaggtagaccttcaatatggccaga

SEQ ID NO: 19211 - DNA, 33 bp, Homo sapiens
catgaagaagagtatatctgtaacaaaaacact

SEQ ID NO: 19212 - DNA, 33 bp, Homo sapiens
cttttaatggtttgaagttagagaacatacttc

SEQ ID NO: 19213 - DNA, 33 bp, Homo sapiens
gtaacattgtgaggtagatcaactttgtcttca

SEQ ID NO: 19214 - DNA, 33 bp, Homo sapiens
gaaaactggatcatgcgagcctcagacatagca

SEQ ID NO: 19215 - DNA, 33 bp, Homo sapiens
atggtatttgagtctggactgaaagaatcaaca

SEQ ID NO: 19216 - DNA, 51 bp, Homo sapiens
gagtgtcgcagaggagtttaatttgtaaaagtgcagtatgcaaatttgagg

SEQ ID NO: 19217 - DNA, 33 bp, Homo sapiens
gctgtcaaatgacaaatgattactggcttttct

SEQ ID NO: 19218 - DNA, 33 bp, Homo sapiens
ttgaatttctttaggctcttcccgtatttcata

SEQ ID NO: 19219 - DNA, 33 bp, Homo sapiens
aaagcatcattaaaaaggtatgcagacattgta

SEQ ID NO: 19220 - DNA, 33 bp, Homo sapiens
acttaacaaacattgatctcctatgatgtacca

SEQ ID NO: 19221 - DNA, 33 bp, Homo sapiens
actaaattggtggtaattgtattttgacataac

SEQ ID NO: 19222 - DNA, 33 bp, Homo sapiens
tcaatcacacatcttagcgaagccaaagtctgt

SEQ ID NO: 19223 - DNA, 33 bp, Homo sapiens
caaatggtgtcacagagtaagtgcaaagtaatg

SEQ ID NO: 19224 - DNA, 33 bp, Homo sapiens
acaacacagtcctgtcgctgaatgcctggtttg

SEQ ID NO: 19225 - DNA, 33 bp, Homo sapiens
gtgtatataatttttagctcctcagctatgatc

SEQ ID NO: 19226 - DNA, 33 bp, Homo sapiens
ctgaagtctgagtggatacttgtagtcaagcca

SEQ ID NO: 19227 - DNA, 33 bp, Homo sapiens
ccagtgtcttgaactatgcatctcttccaacct

SEQ ID NO: 19228 - DNA, 33 bp, Homo sapiens
gtggcagacagaaaaatttaaaactaatgaatg

SEQ ID NO: 19229 - DNA, 33 bp, Homo sapiens
gcacggctctgaaggcgagagtgtgaaaccagg

SEQ ID NO: 19230 - DNA, 33 bp, Homo sapiens
ctgcaggggtctcatctgaacacttactccaag

SEQ ID NO: 19231 - DNA, 33 bp, Homo sapiens
acatttaaaagaatgatgggatgcctttgttta

SEQ ID NO: 19232 - DNA, 33 bp, Homo sapiens
actcatgctttcatccgagtgttcagtatcata

SEQ ID NO: 19233 - DNA, 33 bp, Homo sapiens
ctggttgatactccctgaatcacaggtcgcctt

SEQ ID NO: 19234 - DNA, 33 bp, Homo sapiens
gccatcctctattttgtacgctcagtcacccca

SEQ ID NO: 19235 - DNA, 33 bp, Homo sapiens
agcctctttcctcaaatagcaagagtctagact

SEQ ID NO: 19236 - DNA, 33 bp, Homo sapiens
actcctgccacctttggagaaaattatcctgaa

SEQ ID NO: 19237 - DNA, 33 bp, Homo sapiens
ctcagggttcattagccaatcaaaaatgcacag

SEQ ID NO: 19238 - DNA, 33 bp, Homo sapiens
cattaaaagttgctaacatcacagagaacacca

SEQ ID NO: 19239 - DNA, 33 bp, Homo sapiens
cactgtcgaggtcatacgaagtgaggaaagtct

SEQ ID NO: 19240 - DNA, 33 bp, Homo sapiens
tgacagccttgtccactcgctcttgtctccacc

SEQ ID NO: 19241 - DNA, 33 bp, Homo sapiens
agtagtagtaaaagcagagcacctgtgtattat

SEQ ID NO: 19242 - DNA, 33 bp, Homo sapiens
tcagacagatgctggtgaacaggaaatgaacta

SEQ ID NO: 19243 - DNA, 33 bp, Homo sapiens
ctagaagatgtttcaatgatcggataactagca

SEQ ID NO: 19244 - DNA, 33 bp, Homo sapiens
ctgctccatttagttatagctggctttagcaag

SEQ ID NO: 19245 - DNA, 33 bp, Homo sapiens
gatggattggggtgactatttttagaaaggacc

SEQ ID NO: 19246 - DNA, 33 bp, Homo sapiens
cacacagctaataaaagtcactgccaaaatcca

SEQ ID NO: 19247 - DNA, 33 bp, Homo sapiens
cttatgtgaatgctcatcaaaggataaacaatt

SEQ ID NO: 19248 - DNA, 33 bp, Homo sapiens
ttaaatagtgaattgctagaggaatactataaa

SEQ ID NO: 19249 - DNA, 51 bp, Homo sapiens
tggagctgacgcttcctcaatcatagggtgaaccgtcccagggtagctggg

SEQ ID NO: 19250 - DNA, 33 bp, Homo sapiens
ctttaagtatgcaaagtcgctgcatcaagtcaa

SEQ ID NO: 19251 - DNA, 33 bp, Homo sapiens
tggctgagatgccgactgcagcgatgagctcgc

SEQ ID NO: 19252 - DNA, 33 bp, Homo sapiens
atttgcatttcaggaatgtgcaggccggggaga

SEQ ID NO: 19253 - DNA, 33 bp, Homo sapiens
tttctgggacagccattaaggacagtagtgaag

SEQ ID NO: 19254 - DNA, 33 bp, Homo sapiens
gccaccgtgcagggccgaaagtcttttattaat

SEQ ID NO: 19255 - DNA, 33 bp, Homo sapiens
ggaaatgaagaacctcggaaatgtgagtggcca

SEQ ID NO: 19256 - DNA, 33 bp, Homo sapiens
aggtaaccaggagacatcactgtaaattgaaat

SEQ ID NO: 19257 - DNA, 33 bp, Homo sapiens
tgtatgccactgagctgaatgttggggacaaat

SEQ ID NO: 19258 - DNA, 51 bp, Homo sapiens
agcctgggaagcctgaccacaaaccggcatctccaaggcatgaataattag

SEQ ID NO: 19259 - DNA, 33 bp, Homo sapiens
agcatatttgtatcatgacaaaagatttgcagc

SEQ ID NO: 19260 - DNA, 33 bp, Homo sapiens
ttctggggcactccgataaggtgcatgggaagg

SEQ ID NO: 19261 - DNA, 33 bp, Homo sapiens
ttaacttgttagggcctattgtctacgtctgtc

SEQ ID NO: 19262 - DNA, 33 bp, Homo sapiens
aaagtggttgctactagggaataacagcagctg

SEQ ID NO: 19263 - DNA, 33 bp, Homo sapiens
gatggatgaataggaatgcaaaaaggtggcttt

SEQ ID NO: 19264 - DNA, 33 bp, Homo sapiens
atgagtgttctggaaagatcatccaagcatgag

SEQ ID NO: 19265 - DNA, 33 bp, Homo sapiens
ggctctctcataaacatgtgcatgcagaaagac

SEQ ID NO: 19266 - DNA, 33 bp, Homo sapiens
catgggatctgaaatcgcttttccaaatgcagc

SEQ ID NO: 19267 - DNA, 33 bp, Homo sapiens
tggctccggtatgaattaactaatgtgcacata

SEQ ID NO: 19268 - DNA, 33 bp, Homo sapiens
gactgtgccttttgcagattttcttctcaaacc

SEQ ID NO: 19269 - DNA, 33 bp, Homo sapiens
catgagtttgcatcaactacccgtctctgaaaa

SEQ ID NO: 19270 - DNA, 33 bp, Homo sapiens
tgaactgagaaaaagagagtgctaacttctagg

SEQ ID NO: 19271 - DNA, 33 bp, Homo sapiens
gcctttgtttcagtccgaaccagagcagaagta

SEQ ID NO: 19272 - DNA, 33 bp, Homo sapiens
cataggcatgtttggctctacattttcactact

SEQ ID NO: 19273 - DNA, 33 bp, Homo sapiens
tattttaaagaaaagatagccagacaaggctgg

SEQ ID NO: 19274 - DNA, 33 bp, Homo sapiens
aattcctgcacacagaggaaaggatcagtgaaa

SEQ ID NO: 19275 - DNA, 51 bp, Homo sapiens
aactgcaggaagcacaatttagtcagaattagcaataaaaaaaataacact

SEQ ID NO: 19276 - DNA, 33 bp, Homo sapiens
atgagcctaggccagatatgatggctcatgcct

SEQ ID NO: 19277 - DNA, 33 bp, Homo sapiens
tcattgcttggtggtatagcgaatggtgtgggg

SEQ ID NO: 19278 - DNA, 33 bp, Homo sapiens
atttgcaatcataaagtatttggacatcagcta

SEQ ID NO: 19279 - DNA, 33 bp, Homo sapiens
ttgtctatgtttcacattggaacagcaccatat

SEQ ID NO: 19280 - DNA, 33 bp, Homo sapiens
ttgattaaatggagtaggagccttctatctaat

SEQ ID NO: 19281 - DNA, 33 bp, Homo sapiens
ctaggtatatatcccctcaaattgaaagcaagg

SEQ ID NO: 19282 - DNA, 33 bp, Homo sapiens
gaactcaaataatctctgacctgctaacagatg

SEQ ID NO: 19283 - DNA, 33 bp, Homo sapiens
gttttgtttagtgctatatcctcagtacatgga

SEQ ID NO: 19284 - DNA, 33 bp, Homo sapiens
aatttgcgtactcagagatgatggaacaacttt

SEQ ID NO: 19285 - DNA, 33 bp, Homo sapiens
tcatcacagttggaaatgtttaagccaaatcat

SEQ ID NO: 19286 - DNA, 33 bp, Homo sapiens
gttaaaaagccaactatgggtactatgctcagg

SEQ ID NO: 19287 - DNA, 51 bp, Homo sapiens
atcactacaatcttacattgtcaattaaacatcaccaaacctataatgcac

SEQ ID NO: 19288 - DNA, 33 bp, Homo sapiens
taagaaaatgagattttaaaaacgtgagcagtt

SEQ ID NO: 19289 - DNA, 33 bp, Homo sapiens
ttgcagctgtgggaacgattgggccgagcagag

SEQ ID NO: 19290 - DNA, 51 bp, Homo sapiens
gcattagaaattaagcctcaaaggactatacatataataagtgatcacaga

SEQ ID NO: 19291 - DNA, 33 bp, Homo sapiens
ttcatattttctgccatcattcattggttttaa

SEQ ID NO: 19292 - DNA, 33 bp, Homo sapiens
atagctcaagtatcaagagttcttaaagctaac

SEQ ID NO: 19293 - DNA, 51 bp, Homo sapiens
ccaatataaatttggtctcatcttcgcattaatacatttggggttcaggtt

SEQ ID NO: 19294 - DNA, 33 bp, Homo sapiens
tgactagaagtccacaggagtatgcaagggaat

SEQ ID NO: 19295 - DNA, 33 bp, Homo sapiens
atgcactcttccttcatgccattttcctcacga

SEQ ID NO: 19296 - DNA, 33 bp, Homo sapiens
tgcagttccttaaaagtatcatgctcttcttgc

SEQ ID NO: 19297 - DNA, 33 bp, Homo sapiens
gttagaatcatcataagtctgtttcctctaagt

SEQ ID NO: 19298 - DNA, 33 bp, Homo sapiens
gatattgtatttagccgaaaatgcttgttctaa

SEQ ID NO: 19299 - DNA, 51 bp, Homo sapiens
actaaacctctgtgcctcaaacttatgtgtgaaataacagcactcacttat

SEQ ID NO: 19300 - DNA, 51 bp, Homo sapiens
gaaccctgtagacttacagactcagtaaacataatacttctttaaaaaaaa

SEQ ID NO: 19301 - DNA, 51 bp, Homo sapiens
ctactaaagtgcactgtttattcactgagaaggcttttaaaggaaagctac

SEQ ID NO: 19302 - DNA, 51 bp, Homo sapiens
atactaaacttcttattaaagttaccataatttagagagtgtacatgcata

SEQ ID NO: 19303 - DNA, 33 bp, Homo sapiens
gttatgtggtgtatctgaagacccgtgttatat

SEQ ID NO: 19304 - DNA, 33 bp, Homo sapiens
ctgcagtataaaatcatggaatctgctgctgtt

SEQ ID NO: 19305 - DNA, 33 bp, Homo sapiens
tgcttagagtctactttaagatcacagtgacag

SEQ ID NO: 19306 - DNA, 33 bp, Homo sapiens
ctctgaatgatacacagctgagaaaagttctgt

SEQ ID NO: 19307 - DNA, 33 bp, Homo sapiens
ctccatttccacattatctttgtcactctaagt

SEQ ID NO: 19308 - DNA, 33 bp, Homo sapiens
cagtatctacagttcctatactccaataaaccc

SEQ ID NO: 19309 - DNA, 33 bp, Homo sapiens
gaagctagataatagacccatggtgattcataa

SEQ ID NO: 19310 - DNA, 33 bp, Homo sapiens
agaaagacaccagggatgtacgggcagaggaaa

SEQ ID NO: 19311 - DNA, 33 bp, Homo sapiens
atgttaagcttccaagtaaacaaaaatcttgta

SEQ ID NO: 19312 - DNA, 33 bp, Homo sapiens
gcagtgggagaaaacagagaggaattggtaact

SEQ ID NO: 19313 - DNA, 33 bp, Homo sapiens
tcaggatctaactcaagtctggcttctatgact

SEQ ID NO: 19314 - DNA, 33 bp, Homo sapiens
aagcacagagactgcagggtacaaaggagcaag

SEQ ID NO: 19315 - DNA, 33 bp, Homo sapiens
ctcctaccacttcagggatgttacttgtagttg

SEQ ID NO: 19316 - DNA, 33 bp, Homo sapiens
caaaaatagattgaaatgtagaggcttttaaat

SEQ ID NO: 19317 - DNA, 33 bp, Homo sapiens
gatgactaagtggctagaatgtcactcagagtc

SEQ ID NO: 19318 - DNA, 33 bp, Homo sapiens
atcctgttggaaaacagtccttccttcagtttg

SEQ ID NO: 19319 - DNA, 33 bp, Homo sapiens
atcactgagtcagaaattggtgcttgaagactc

SEQ ID NO: 19320 - DNA, 33 bp, Homo sapiens
aggaagtgtagtagagtcaaagtcgaagttggt

SEQ ID NO: 19321 - DNA, 33 bp, Homo sapiens
tggggttgtgctagcatcgggcagtgagcagag

SEQ ID NO: 19322 - DNA, 33 bp, Homo sapiens
acccatagatgtagaagtgttgaacgtacaaca

SEQ ID NO: 19323 - DNA, 33 bp, Homo sapiens
caattctgcttttccttagatgcaaacatttta

SEQ ID NO: 19324 - DNA, 33 bp, Homo sapiens
aactgatatgctaagactatgagtactaatgtt

SEQ ID NO: 19325 - DNA, 33 bp, Homo sapiens
aatcacagaaatgctcgccttatatataaaact

SEQ ID NO: 19326 - DNA, 51 bp, Homo sapiens
gatagtagaagtcccatggagaagagtatcaaatgatgagactgaaaggtt

SEQ ID NO: 19327 - DNA, 33 bp, Homo sapiens
gcctcatttataaaacgctggtacggccaaact

SEQ ID NO: 19328 - DNA, 33 bp, Homo sapiens
tccactttcctaattcgagcacttctaggtacg

SEQ ID NO: 19329 - DNA, 51 bp, Homo sapiens
tcagaacccatactctgcgggccttgaaatggaaaatctctcctctagaca

SEQ ID NO: 19330 - DNA, 33 bp, Homo sapiens
aaaaggactatacgcctaaagagctgcaagaac

SEQ ID NO: 19331 - DNA, 33 bp, Homo sapiens
ccaagtgacttctacatcagggaattgtattga

SEQ ID NO: 19332 - DNA, 33 bp, Homo sapiens
gtggagaggttgcttatctgcaagtgcgtccaa

SEQ ID NO: 19333 - DNA, 51 bp, Homo sapiens
atgcatattgctggaggaagtaataccaatgatgcaaatttgcctggaaac

SEQ ID NO: 19334 - DNA, 33 bp, Homo sapiens
tctggccttttcactagaatacaacaaagatta

SEQ ID NO: 19335 - DNA, 33 bp, Homo sapiens
tctaaatgcttgatacgggagcagaaattattt

SEQ ID NO: 19336 - DNA, 33 bp, Homo sapiens
gtttgaataaacatagccccaatttcaaacctt

SEQ ID NO: 19337 - DNA, 33 bp, Homo sapiens
gctgcctctcctcttcgcgttttccccacagcg

SEQ ID NO: 19338 - DNA, 33 bp, Homo sapiens
agttgctgagggctacgaggcagatactacagg

SEQ ID NO: 19339 - DNA, 33 bp, Homo sapiens
tacaggacttgggacagactggatatggaagga

SEQ ID NO: 19340 - DNA, 33 bp, Homo sapiens
ccctcgacactggagcgaaatgtcaattgagaa

SEQ ID NO: 19341 - DNA, 33 bp, Homo sapiens
atggagtgggtatgaagagataaagaactgaag

SEQ ID NO: 19342 - DNA, 33 bp, Homo sapiens
tagaagaccacagtcagatattggtgagtgcca

SEQ ID NO: 19343 - DNA, 33 bp, Homo sapiens
cacatcctggatgttggataatgtgataaggag

SEQ ID NO: 19344 - DNA, 33 bp, Homo sapiens
gtctctgaaaatgccatgctcacagttccctaa

SEQ ID NO: 19345 - DNA, 33 bp, Homo sapiens
tgcccattattttggggacaaattggaaaatac

SEQ ID NO: 19346 - DNA, 33 bp, Homo sapiens
aaaatacaagtgttgctaagtgcaaaaaacaga

SEQ ID NO: 19347 - DNA, 33 bp, Homo sapiens
acctgagcttcaaaccggcaagttttttattaa

SEQ ID NO: 19348 - DNA, 33 bp, Homo sapiens
tgtagaacaatactgctgatttatcacaccaga

SEQ ID NO: 19349 - DNA, 51 bp, Homo sapiens
gtatcagaattttagaacaaaaacttcaaaagtgaaatggagaagcaagaa

SEQ ID NO: 19350 - DNA, 51 bp, Homo sapiens
tgccagggccccccatggtcatgcagtatgagactttcccttagatccctc

SEQ ID NO: 19351 - DNA, 33 bp, Homo sapiens
tactgctgggttttaagtcttgcctctgccctt

SEQ ID NO: 19352 - DNA, 51 bp, Homo sapiens
gaaccatgccaccggggatatcttatgtgctgaacatggggggaaactctt

SEQ ID NO: 19353 - DNA, 33 bp, Homo sapiens
aaaaccaatggagttatgctatacttatttcta

SEQ ID NO: 19354 - DNA, 51 bp, Homo sapiens
tgctgttgtacagcttgtaagagcagggctaacaagagggccagtcttatt

SEQ ID NO: 19355 - DNA, 33 bp, Homo sapiens
actggtaactggtaaatgggaacttgagggaac

SEQ ID NO: 19356 - DNA, 33 bp, Homo sapiens
atatggtaagtgctatgagtcccccaaggcact

SEQ ID NO: 19357 - DNA, 33 bp, Homo sapiens
ggatgactgacaatacggacactccactttatt

SEQ ID NO: 19358 - DNA, 33 bp, Homo sapiens
gcctcctagaagaaactgaaactctagggcact

SEQ ID NO: 19359 - DNA, 33 bp, Homo sapiens
ttttcacaattcttgagcgagacaagaactatg

SEQ ID NO: 19360 - DNA, 33 bp, Homo sapiens
tgaccttgaccaatcagagaaagcagccctcaa

SEQ ID NO: 19361 - DNA, 33 bp, Homo sapiens
ctggatacccgttaactagccagggtctggctc

SEQ ID NO: 19362 - DNA, 33 bp, Homo sapiens
cccaaccctacagcaagtgtggtggttccgaag

SEQ ID NO: 19363 - DNA, 33 bp, Homo sapiens
aaatgatagataatgagcaagctacaactaagt

SEQ ID NO: 19364 - DNA, 33 bp, Homo sapiens
atgaccttcttactaattgaaattctgactacc

SEQ ID NO: 19365 - DNA, 33 bp, Homo sapiens
acgcaaaaacagctaatggccaggtgctgcatt

SEQ ID NO: 19366 - DNA, 33 bp, Homo sapiens
ctatgaagaccgtctatacacactgaaggaact

SEQ ID NO: 19367 - DNA, 51 bp, Homo sapiens
tagataaattattggcaagactaaccagaaataatatgcaaattaacaaaa

SEQ ID NO: 19368 - DNA, 33 bp, Homo sapiens
tgaaaattgccgtgacgctttcttgcttcatgt

SEQ ID NO: 19369 - DNA, 33 bp, Homo sapiens
tcaccttcctctcatcggaaaagagataacaag

SEQ ID NO: 19370 - DNA, 33 bp, Homo sapiens
ctaggcactttcaacattattcatttaaacctg

SEQ ID NO: 19371 - DNA, 33 bp, Homo sapiens
tccttagagtgaagcagctttttctctgaatgt

SEQ ID NO: 19372 - DNA, 33 bp, Homo sapiens
catgtatttctcccaataagctcaaagaacttc

SEQ ID NO: 19373 - DNA, 33 bp, Homo sapiens
ctttcctcatgcagccgatcatccaagttcttt

SEQ ID NO: 19374 - DNA, 33 bp, Homo sapiens
ctattgccaccgatacgaactggcttcagtgta

SEQ ID NO: 19375 - DNA, 33 bp, Homo sapiens
gcagatgagtagtcgatagcaattatattagaa

SEQ ID NO: 19376 - DNA, 33 bp, Homo sapiens
gggataatcttgcttatatacgtttcctaggca

SEQ ID NO: 19377 - DNA, 33 bp, Homo sapiens
aagcatccgtagctcacgggtacctgtagaaca

SEQ ID NO: 19378 - DNA, 33 bp, Homo sapiens
ctcattggtctgggtatgatcagtgaatataga

SEQ ID NO: 19379 - DNA, 51 bp, Homo sapiens
cagcaaaaaagagcagctgcacttcgatttctgatgtcttttctccaggct

SEQ ID NO: 19380 - DNA, 33 bp, Homo sapiens
attgacgcgctgagaggcaacataacatcagtt

SEQ ID NO: 19381 - DNA, 33 bp, Homo sapiens
gcctggtcaaagcagagggttttattgagatgt

SEQ ID NO: 19382 - DNA, 33 bp, Homo sapiens
tacaaaggtattgatatagaaacaagcaaataa

SEQ ID NO: 19383 - DNA, 33 bp, Homo sapiens
ttccaaacctctctcagtctatccttggtattt

SEQ ID NO: 19384 - DNA, 33 bp, Homo sapiens
cctttgagtccctagacgcattgggtaaataag

SEQ ID NO: 19385 - DNA, 33 bp, Homo sapiens
agaaactttctctaattatctcaaatggaaggt

SEQ ID NO: 19386 - DNA, 33 bp, Homo sapiens
tcttaccatctttttctagccacatagaaggtt

SEQ ID NO: 19387 - DNA, 51 bp, Homo sapiens
caatttctatgagtgatgagaaagcgaatacctttatttcacatagcattt

SEQ ID NO: 19388 - DNA, 33 bp, Homo sapiens
tgagggaatgatatgcgcagaattcagaataga

SEQ ID NO: 19389 - DNA, 33 bp, Homo sapiens
tacagagaagtctatgtattgctgacagacata

SEQ ID NO: 19390 - DNA, 33 bp, Homo sapiens
tccatttgttcatctctgacacggacgaagcca

SEQ ID NO: 19391 - DNA, 51 bp, Homo sapiens
cagtgaggtaatgttagcagaaggatgttgcataaagtcaaggacacattt

SEQ ID NO: 19392 - DNA, 33 bp, Homo sapiens
caagaatgtctcagtctcggtaatttcccggcc

SEQ ID NO: 19393 - DNA, 33 bp, Homo sapiens
catactagtttcttcctctcctttcatgactca

SEQ ID NO: 19394 - DNA, 51 bp, Homo sapiens
attcactaccacaataattcaagcctggaactaatagccatttttaaactc

SEQ ID NO: 19395 - DNA, 33 bp, Homo sapiens
gaaacctgcagtgaaagcgtaaggtgatggagc

SEQ ID NO: 19396 - DNA, 33 bp, Homo sapiens
gtgcatcatgaaagaagctcgtcgaagaaagga

SEQ ID NO: 19397 - DNA, 33 bp, Homo sapiens
cagtgctaagaggaatgaacactcattgtgcag

SEQ ID NO: 19398 - DNA, 33 bp, Homo sapiens
ggtcttgctctgaatatgatcctgcaaggaggc

SEQ ID NO: 19399 - DNA, 33 bp, Homo sapiens
ctcggaactgccagggtacaaacaattgaagcc

SEQ ID NO: 19400 - DNA, 33 bp, Homo sapiens
ccattataaaactgaagaatcataagttgaatc

SEQ ID NO: 19401 - DNA, 33 bp, Homo sapiens
aacctcagctttgacagtgcattttaagaaaaa

SEQ ID NO: 19402 - DNA, 33 bp, Homo sapiens
cagaagcttttaaataccttacatgagctgaaa

SEQ ID NO: 19403 - DNA, 33 bp, Homo sapiens
aaatcctcagcttttataacatttggaaataac

SEQ ID NO: 19404 - DNA, 33 bp, Homo sapiens
agttttctaagagatatggaatttaagttacaa

SEQ ID NO: 19405 - DNA, 33 bp, Homo sapiens
agggtatatgggcacattgctgtaactgctgtg

SEQ ID NO: 19406 - DNA, 33 bp, Homo sapiens
gaaaagagaaatgtaggcataaggccacataat

SEQ ID NO: 19407 - DNA, 33 bp, Homo sapiens
taaaagtggatctatctcagaaaaaatctaggc

SEQ ID NO: 19408 - DNA, 33 bp, Homo sapiens
tttcaacaaatattgggagctatcatatgccag

SEQ ID NO: 19409 - DNA, 33 bp, Homo sapiens
atttttttaagagaaccaaatgcagcaaatgcc

SEQ ID NO: 19410 - DNA, 33 bp, Homo sapiens
caaaaaacaaggtatctctagatggcagtttag

SEQ ID NO: 19411 - DNA, 33 bp, Homo sapiens
tctcactcccaagtaatcactattctcatttcc

SEQ ID NO: 19412 - DNA, 33 bp, Homo sapiens
ttttacagctacagatcaacttgtatgatttgg

SEQ ID NO: 19413 - DNA, 33 bp, Homo sapiens
gtgtcaccccaccagatgttgatgagatttgat

SEQ ID NO: 19414 - DNA, 33 bp, Homo sapiens
tgtatgtcctgaaaatgaaaggagaatatgtcc

SEQ ID NO: 19415 - DNA, 51 bp, Homo sapiens
agcatgatctctgggagcagaagacgaagatgctaaatgctggccctccat

SEQ ID NO: 19416 - DNA, 33 bp, Homo sapiens
ggcaaaaaattgaatggagattgacagaatcag

SEQ ID NO: 19417 - DNA, 51 bp, Homo sapiens
ggatacaaattcactatggtattacggagatcaatttattagctaccacgc

SEQ ID NO: 19418 - DNA, 33 bp, Homo sapiens
taagagaggagaacccgggaatgaaggtcttgt

SEQ ID NO: 19419 - DNA, 51 bp, Homo sapiens
ggcaactgaatagaataaaccactgtagtaccagaccaaagccaaacaaaa

SEQ ID NO: 19420 - DNA, 33 bp, Homo sapiens
cagtattcacttttaactgttgtggctctgagt

SEQ ID NO: 19421 - DNA, 51 bp, Homo sapiens
atgctttatttcactgaacttaaactacatattctgaaaatcacaatgcat

SEQ ID NO: 19422 - DNA, 51 bp, Homo sapiens
ttcagatctttgcccatagtgatctgactccaaaagagaaactaggggtta

SEQ ID NO: 19423 - DNA, 33 bp, Homo sapiens
gatcagatctcataactggtacatcacaaagtg

SEQ ID NO: 19424 - DNA, 33 bp, Homo sapiens
ctgcctaatatgtgaatatcctgcttatccctg

SEQ ID NO: 19425 - DNA, 33 bp, Homo sapiens
tgcattagtaaatcaatcagacaaatcatttac

SEQ ID NO: 19426 - DNA, 33 bp, Homo sapiens
atcatacactgtcttatgagatttcttctttgg

SEQ ID NO: 19427 - DNA, 33 bp, Homo sapiens
tccctctaatgtcaaggcctattcacctgaacc

SEQ ID NO: 19428 - DNA, 33 bp, Homo sapiens
tgtccaggaggattgacaacaatatggtatcca

SEQ ID NO: 19429 - DNA, 51 bp, Homo sapiens
tctcatatcctcctgaagcctgaaatcttttggttagcatccatgcctctc

SEQ ID NO: 19430 - DNA, 33 bp, Homo sapiens
ttttgctggatactcttaattttcctctccaga

SEQ ID NO: 19431 - DNA, 33 bp, Homo sapiens
ctttacaacaatagtatgaaaatgatgcttttt

SEQ ID NO: 19432 - DNA, 33 bp, Homo sapiens
tgatattggggcaaaagcagggaaatgcaccat

SEQ ID NO: 19433 - DNA, 33 bp, Homo sapiens
aaagtggggattgtgggaagcccaacttgtagc

SEQ ID NO: 19434 - DNA, 33 bp, Homo sapiens
ctaaatatcacacttaccttgagaaaagttctt

SEQ ID NO: 19435 - DNA, 33 bp, Homo sapiens
tccctactgacagccattctggtattcagactg

SEQ ID NO: 19436 - DNA, 33 bp, Homo sapiens
tttaggtgcaactagcggaaaaaaatacgcatt

SEQ ID NO: 19437 - DNA, 33 bp, Homo sapiens
tcaggaatcatttcaatgcctcttgtttcctaa

SEQ ID NO: 19438 - DNA, 33 bp, Homo sapiens
aacagctgaacaatgctagggagagtcaggtga

SEQ ID NO: 19439 - DNA, 33 bp, Homo sapiens
accccattgacagataggtttgtataatgccac

SEQ ID NO: 19440 - DNA, 51 bp, Homo sapiens
tcccctgaaatcctgttaaacctggtaaatggagagtaaggaggaattgga

SEQ ID NO: 19441 - DNA, 33 bp, Homo sapiens
acaataaagctccttatagtggtggagaagagc

SEQ ID NO: 19442 - DNA, 33 bp, Homo sapiens
tctttctctactgacagatcggctactctcaaa

SEQ ID NO: 19443 - DNA, 33 bp, Homo sapiens
ctgaagctaacaactatcaccttttctccactt

SEQ ID NO: 19444 - DNA, 33 bp, Homo sapiens
gtaaccatgatgaagagctaaatgccttaccag

SEQ ID NO: 19445 - DNA, 33 bp, Homo sapiens
gaaaaaaatcccagagtattcttggtcatagtt

SEQ ID NO: 19446 - DNA, 33 bp, Homo sapiens
ggcaggagaagagacctgagtaggcaattggta

SEQ ID NO: 19447 - DNA, 33 bp, Homo sapiens
attttgacccagactatctgagctttcatgttg

SEQ ID NO: 19448 - DNA, 33 bp, Homo sapiens
aacaagattgcagagggcattttagactatttg

SEQ ID NO: 19449 - DNA, 33 bp, Homo sapiens
aattagacaaccccaatccgacagagcatttca

SEQ ID NO: 19450 - DNA, 33 bp, Homo sapiens
caggagcacataacaggagcttaatatgaatct

SEQ ID NO: 19451 - DNA, 33 bp, Homo sapiens
ctgcatggttaatccagtcaaagcccaacctgc

SEQ ID NO: 19452 - DNA, 51 bp, Homo sapiens
tattttgccaaggttaaagacattatcgtgacacagcctcaggaggtcctg

SEQ ID NO: 19453 - DNA, 33 bp, Homo sapiens
ttagaataagtaccaattggagcatctagcatc

SEQ ID NO: 19454 - DNA, 33 bp, Homo sapiens
tttattgaatgagaactataaatgaataagtga

SEQ ID NO: 19455 - DNA, 33 bp, Homo sapiens
ggaaaaggcagggttatagctgatgagtttgat

SEQ ID NO: 19456 - DNA, 33 bp, Homo sapiens
actgacattttagacagaagagcagaaattcgg

SEQ ID NO: 19457 - DNA, 33 bp, Homo sapiens
catctagttcttcacatgccaaatgagcagctg

SEQ ID NO: 19458 - DNA, 33 bp, Homo sapiens
aagctgaagaaggatatgaacactatacaatgt

SEQ ID NO: 19459 - DNA, 33 bp, Homo sapiens
gaactgatgagaatgagtaggctttcccaaaat

SEQ ID NO: 19460 - DNA, 33 bp, Homo sapiens
atcaattgccttaaaataatgaatgcctactaa

SEQ ID NO: 19461 - DNA, 33 bp, Homo sapiens
agaatagaaaatggcatgtataactccaagttt

SEQ ID NO: 19462 - DNA, 51 bp, Homo sapiens
tttgtggccttatgaatgtctttcagtctgaccagagctgcaactccttct

SEQ ID NO: 19463 - DNA, 51 bp, Homo sapiens
cacttacatgatatggaatcctcaatgaaagttcagcagagagaatttttg

SEQ ID NO: 19464 - DNA, 33 bp, Homo sapiens
gaaagatgacaggcacgatgtagggaagccaga

SEQ ID NO: 19465 - DNA, 33 bp, Homo sapiens
agcacagtcataggaagtaaaaccatatcaagg

SEQ ID NO: 19466 - DNA, 33 bp, Homo sapiens
gtctggatctactccctaagaccgaccaggcag

SEQ ID NO: 19467 - DNA, 33 bp, Homo sapiens
ctgaaaaaaattgaccggatttcataaaattga

SEQ ID NO: 19468 - DNA, 33 bp, Homo sapiens
cagacttgtgtaggcctgataacccctttgttt

SEQ ID NO: 19469 - DNA, 33 bp, Homo sapiens
accaaagactaaaacctgctacaatgtggaaaa

SEQ ID NO: 19470 - DNA, 33 bp, Homo sapiens
cactctatcatgcttcgccaatcttgtccttta

SEQ ID NO: 19471 - DNA, 33 bp, Homo sapiens
gcagaacacaaaaatggacagaaacgtacaggt

SEQ ID NO: 19472 - DNA, 33 bp, Homo sapiens
aaaaaacgtttcaacagcttctatcatcagctc

SEQ ID NO: 19473 - DNA, 33 bp, Homo sapiens
ctcacataaaactaaggcaggctttgaggaagg

SEQ ID NO: 19474 - DNA, 33 bp, Homo sapiens
caggtttatcttcatatgctggcaaggagattc

SEQ ID NO: 19475 - DNA, 33 bp, Homo sapiens
ctgcttgtttctaatatgcccatcaaccaaagc

SEQ ID NO: 19476 - DNA, 33 bp, Homo sapiens
gaatgtgtatagcttatcctcaaatctcaaaac

SEQ ID NO: 19477 - DNA, 33 bp, Homo sapiens
tttcacatgacaagagtaactcagccttaacac

SEQ ID NO: 19478 - DNA, 33 bp, Homo sapiens
cgcctcacctgttgccgctagcatttgcacact

SEQ ID NO: 19479 - DNA, 33 bp, Homo sapiens
aaaggaaatctgaacatgaatttgagataccta

SEQ ID NO: 19480 - DNA, 33 bp, Homo sapiens
cttgcttggacagtcataagcactgagttattc

SEQ ID NO: 19481 - DNA, 33 bp, Homo sapiens
agaatcctgttacctatgtttaaaatgatggat

SEQ ID NO: 19482 - DNA, 33 bp, Homo sapiens
ggcggaagaatcaagagggtcaatggggctatg

SEQ ID NO: 19483 - DNA, 33 bp, Homo sapiens
cacaatccaggccagaggtgataatggcctaaa

SEQ ID NO: 19484 - DNA, 33 bp, Homo sapiens
ccttttttcattttccggatatttccaaatatt

SEQ ID NO: 19485 - DNA, 33 bp, Homo sapiens
tgtataaaattacacattgagaaaagaggacat

SEQ ID NO: 19486 - DNA, 33 bp, Homo sapiens
aagctataatgaacaatgctagagaaccagagg

SEQ ID NO: 19487 - DNA, 51 bp, Homo sapiens
caatggcttctcctttatgaatctttctttaatttctcccccagctgctca

SEQ ID NO: 19488 - DNA, 33 bp, Homo sapiens
taacggatgggaaaaattggtttgtagatggag

SEQ ID NO: 19489 - DNA, 33 bp, Homo sapiens
tgcaaatgggcacgtagccttcaacaagtgtcc

SEQ ID NO: 19490 - DNA, 33 bp, Homo sapiens
caatcacatcatacctgacattcaggccgcaca

SEQ ID NO: 19491 - DNA, 33 bp, Homo sapiens
gtgggctatggtacaatatcagttcatatttcg

SEQ ID NO: 19492 - DNA, 33 bp, Homo sapiens
tgtcaatgttatttaatccgaataagaacatta

SEQ ID NO: 19493 - DNA, 33 bp, Homo sapiens
aaagtacctgacatcatacattgtctcacctgt

SEQ ID NO: 19494 - DNA, 33 bp, Homo sapiens
ggttggcgggtccatagaagtgtctgctgcctt

SEQ ID NO: 19495 - DNA, 33 bp, Homo sapiens
tacgggagaattggaatgaactctctttgctct

SEQ ID NO: 19496 - DNA, 33 bp, Homo sapiens
ggtgcaaagacacagagatatagacatggtgaa

SEQ ID NO: 19497 - DNA, 33 bp, Homo sapiens
ggatgaaacttgaagatgttaaatgaaataagc

SEQ ID NO: 19498 - DNA, 33 bp, Homo sapiens
gacttaagggaactcgtcattggatgtagtgac

SEQ ID NO: 19499 - DNA, 33 bp, Homo sapiens
ttatgcagcacctacagtaagtaacagacctta

SEQ ID NO: 19500 - DNA, 33 bp, Homo sapiens
tcagaaggagtagatggaaccaccatgaacttt

SEQ ID NO: 19501 - DNA, 33 bp, Homo sapiens
cctttgcaaatcacaagtgaatctcctaaatcc

SEQ ID NO: 19502 - DNA, 33 bp, Homo sapiens
gaggctagcttcaagatagctgctgcagtataa

SEQ ID NO: 19503 - DNA, 33 bp, Homo sapiens
ttatacacagacgcaagcctaccatcctgtagc

SEQ ID NO: 19504 - DNA, 33 bp, Homo sapiens
agctgctttccagtccgcagaggatgctcccta

SEQ ID NO: 19505 - DNA, 33 bp, Homo sapiens
atgatccatggtgggatacatcctcaacaacac

SEQ ID NO: 19506 - DNA, 33 bp, Homo sapiens
agttcttgaccactgcggacaaggcagatgcag

SEQ ID NO: 19507 - DNA, 33 bp, Homo sapiens
catgaagtactatttgtaggagaataaatatcc

SEQ ID NO: 19508 - DNA, 33 bp, Homo sapiens
gccgcttcctctccaacattcacataggcgaaa

SEQ ID NO: 19509 - DNA, 33 bp, Homo sapiens
acacctcatggttctctaaatggtgaccatctc

SEQ ID NO: 19510 - DNA, 33 bp, Homo sapiens
ttatggtatagacacatggtagaatactataca

SEQ ID NO: 19511 - DNA, 33 bp, Homo sapiens
ttagccgtgctgtggatgagacgtgaaaaaggt

SEQ ID NO: 19512 - DNA, 33 bp, Homo sapiens
attggcagagaatatatggagatccgggagaaa

SEQ ID NO: 19513 - DNA, 33 bp, Homo sapiens
gaatcagacagcaaaataatgtgtggacaagat

SEQ ID NO: 19514 - DNA, 33 bp, Homo sapiens
tgtccaaaaggactcatggagaaagcgcctcct

SEQ ID NO: 19515 - DNA, 33 bp, Homo sapiens
ctgagcagctctgacagggattcactggtgtcc

SEQ ID NO: 19516 - DNA, 33 bp, Homo sapiens
gactgcacaaggtaatgagccctaaagaaaccc

SEQ ID NO: 19517 - DNA, 33 bp, Homo sapiens
tttcaatttactgatatgaacatttgttgaagg

SEQ ID NO: 19518 - DNA, 33 bp, Homo sapiens
gcacagcatttgttcctctttgtcatctgtctt

SEQ ID NO: 19519 - DNA, 33 bp, Homo sapiens
tttctatttcacactttaagaaacaaaggctca

SEQ ID NO: 19520 - DNA, 33 bp, Homo sapiens
gactcctgaagaccaatagaaaacaaacgaaca

SEQ ID NO: 19521 - DNA, 33 bp, Homo sapiens
attttgagcagccagagaggtgaagtatacaat

SEQ ID NO: 19522 - DNA, 33 bp, Homo sapiens
gtctgctataagtctagtaatagtcacgccttt

SEQ ID NO: 19523 - DNA, 33 bp, Homo sapiens
tttagcttaattcaactaagtgtcttaaaatgg

SEQ ID NO: 19524 - DNA, 51 bp, Homo sapiens
tgagtccaagcagtacccttcctcagtaattctcaaataggcctctgaagt

SEQ ID NO: 19525 - DNA, 33 bp, Homo sapiens
gaaaggtaaacagccctgatgtccagccatagg

SEQ ID NO: 19526 - DNA, 33 bp, Homo sapiens
acacagcacattgctggacatcaataaatattt

SEQ ID NO: 19527 - DNA, 33 bp, Homo sapiens
taagatgtaaatagaagcatcgtgtgagacttc

SEQ ID NO: 19528 - DNA, 33 bp, Homo sapiens
tggaacacggaactcttagagtctgttagatga

SEQ ID NO: 19529 - DNA, 33 bp, Homo sapiens
cagggtgtgtggttcattccattcagtgtgttc

SEQ ID NO: 19530 - DNA, 33 bp, Homo sapiens
gtagcagtggtgaaaatgcttgcatgggtgcgc

SEQ ID NO: 19531 - DNA, 33 bp, Homo sapiens
gccaataacagtagctcaaagaatgcttactgt

SEQ ID NO: 19532 - DNA, 33 bp, Homo sapiens
gttcccagttgtgtcagattctcaccacctacc

SEQ ID NO: 19533 - DNA, 33 bp, Homo sapiens
ttgctgagaaacaaagtcattttctgtctcttt

SEQ ID NO: 19534 - DNA, 33 bp, Homo sapiens
taatcttgccacatgatatttaccaaaacagaa

SEQ ID NO: 19535 - DNA, 33 bp, Homo sapiens
ctaacaggccgcacacgggtatcagtccacggc

SEQ ID NO: 19536 - DNA, 33 bp, Homo sapiens
tgaggagcgctggtcttacctatgatcccaaag

SEQ ID NO: 19537 - DNA, 33 bp, Homo sapiens
tcccaggatgttccgagggctaagaccagagcg

SEQ ID NO: 19538 - DNA, 33 bp, Homo sapiens
ggtcccggaggctcccgctgtccacatctgcat

SEQ ID NO: 19539 - DNA, 33 bp, Homo sapiens
acatttttctcactaatgctcagcagagaaaaa

SEQ ID NO: 19540 - DNA, 33 bp, Homo sapiens
tcatttgcagttgagagaaatgtaaacaaatgt

SEQ ID NO: 19541 - DNA, 33 bp, Homo sapiens
gtatccctacccatcatatttaaggcctcgaat

SEQ ID NO: 19542 - DNA, 33 bp, Homo sapiens
tccacaaatacatggacactctgaacgtcctct

SEQ ID NO: 19543 - DNA, 33 bp, Homo sapiens
ggttaattaatgaagctgccgtaacttttttgt

SEQ ID NO: 19544 - DNA, 51 bp, Homo sapiens
aaagaatgagagtgtggccctagaatatttgtcatgcagtgtgctcagagc

SEQ ID NO: 19545 - DNA, 51 bp, Homo sapiens
catgttggtatggcactctctatgttacagcacagagacctctactttgcc

SEQ ID NO: 19546 - DNA, 33 bp, Homo sapiens
gatgctctttagctgatggaggtaaggtctccc

SEQ ID NO: 19547 - DNA, 33 bp, Homo sapiens
gcttttccaatttacagtgatcaggaacccacg

SEQ ID NO: 19548 - DNA, 33 bp, Homo sapiens
gatggagtgtggaaaattctgaatgacagccaa

SEQ ID NO: 19549 - DNA, 33 bp, Homo sapiens
gaatctcagaattttggaagtgcttcaggccgg

SEQ ID NO: 19550 - DNA, 33 bp, Homo sapiens
tagagaattgggagaatgaactgtttgggagcc

SEQ ID NO: 19551 - DNA, 51 bp, Homo sapiens
cctattcctaagcccccttccaccaggacatcttttgatcctaagcaagat

SEQ ID NO: 19552 - DNA, 33 bp, Homo sapiens
ttccagtcacacagcatagacctgacaccaaag

SEQ ID NO: 19553 - DNA, 33 bp, Homo sapiens
acttcatttcacaaggtattggccagaactatt

SEQ ID NO: 19554 - DNA, 33 bp, Homo sapiens
ctttgggttagtcatctaaatacctctgggtcc

SEQ ID NO: 19555 - DNA, 33 bp, Homo sapiens
cacattgcagacataagacaggaagggctgttc

SEQ ID NO: 19556 - DNA, 33 bp, Homo sapiens
gctgttctagaaagctgaagatccaattctaag

SEQ ID NO: 19557 - DNA, 33 bp, Homo sapiens
gtatgtgtgaaaataagtagcaggcttggggga

SEQ ID NO: 19558 - DNA, 51 bp, Homo sapiens
taaaggcagaggccagcaccacttagagaagagactgcaaaagggattcat

SEQ ID NO: 19559 - DNA, 51 bp, Homo sapiens
aaacaatgaataactttgtgcacttgacccatctgtagaaaaccatctgtg

SEQ ID NO: 19560 - DNA, 33 bp, Homo sapiens
tactgtatcttatcaagtgtaagacacgtttca

SEQ ID NO: 19561 - DNA, 33 bp, Homo sapiens
gaatgagcacagtgaatatccaattagtgagtt

SEQ ID NO: 19562 - DNA, 33 bp, Homo sapiens
aagatgcacggcagcacagcattatatagtatt

SEQ ID NO: 19563 - DNA, 33 bp, Homo sapiens
agcatagccaccttcttaagactgtagcaccag

SEQ ID NO: 19564 - DNA, 33 bp, Homo sapiens
atcaattccacattacggccagttaaagaacaa

SEQ ID NO: 19565 - DNA, 33 bp, Homo sapiens
tgggcagatcactcaggagttcgaaagtagcct

SEQ ID NO: 19566 - DNA, 33 bp, Homo sapiens
tcatttacacaactgagtactccacagctcata

SEQ ID NO: 19567 - DNA, 33 bp, Homo sapiens
tgatccacatttggtcgcagatgtagatccccc

SEQ ID NO: 19568 - DNA, 33 bp, Homo sapiens
gctcaggagttaaagatcaggttggacaacaca

SEQ ID NO: 19569 - DNA, 33 bp, Homo sapiens
aaagtgtgtcaccttatagaaagagcaaggtct

SEQ ID NO: 19570 - DNA, 33 bp, Homo sapiens
accaacctatgaagactgtctccacagctcaag

SEQ ID NO: 19571 - DNA, 33 bp, Homo sapiens
aaaatgctaatccaaataagggcaggttggaga

SEQ ID NO: 19572 - DNA, 33 bp, Homo sapiens
aatgtgacctccagcagtctttctccagcccag

SEQ ID NO: 19573 - DNA, 33 bp, Homo sapiens
ctaaataagaaaagtctaagttgagtctataaa

SEQ ID NO: 19574 - DNA, 33 bp, Homo sapiens
agaaatatctgtgtaatacaactgctaaattat

SEQ ID NO: 19575 - DNA, 33 bp, Homo sapiens
atccattcttaaggcatgaacacaaatagtgag

SEQ ID NO: 19576 - DNA, 33 bp, Homo sapiens
ttcaatcctggctctatcacttgcttctctaag

SEQ ID NO: 19577 - DNA, 33 bp, Homo sapiens
gggaatcatgatcttaccttgcagcgttgtgat

SEQ ID NO: 19578 - DNA, 33 bp, Homo sapiens
acatttacacaaagaagtgggtattgtgaaaga

SEQ ID NO: 19579 - DNA, 33 bp, Homo sapiens
gtaattctgccataacgaaactcacctgattgg

SEQ ID NO: 19580 - DNA, 51 bp, Homo sapiens
ccattgtacaacagtattctaggccgccaacaaaagtgtgacagacacact

SEQ ID NO: 19581 - DNA, 51 bp, Homo sapiens
catcctagggagaatttcaatcatatgtaagtgcagacagaattaggtact

SEQ ID NO: 19582 - DNA, 33 bp, Homo sapiens
ggattcactctgaagagcatggattaagtttga

SEQ ID NO: 19583 - DNA, 33 bp, Homo sapiens
gcctctaaggcaaagaggatgtttcctatctcc

SEQ ID NO: 19584 - DNA, 33 bp, Homo sapiens
taattagcgatcttactgcattttgcaaatagg

SEQ ID NO: 19585 - DNA, 33 bp, Homo sapiens
tgttgtagcccttgtagcatctgctgtagtgat

SEQ ID NO: 19586 - DNA, 33 bp, Homo sapiens
acagtgcctggactaggagcagctaacatccca

SEQ ID NO: 19587 - DNA, 33 bp, Homo sapiens
tacattcacctttgcatatatcttctgctggtc

SEQ ID NO: 19588 - DNA, 33 bp, Homo sapiens
tatgttgatccaaagattcaggaattaaaaagt

SEQ ID NO: 19589 - DNA, 33 bp, Homo sapiens
cacccagcatgttgtatgtccacgtgtttttgt

SEQ ID NO: 19590 - DNA, 33 bp, Homo sapiens
cttgtgtagaaaaagcgaacagactgctcacaa

SEQ ID NO: 19591 - DNA, 33 bp, Homo sapiens
cctgaacccctttcactgtctatttggatagaa

SEQ ID NO: 19592 - DNA, 33 bp, Homo sapiens
gttaattttattcagcgacagttttcataggta

SEQ ID NO: 19593 - DNA, 33 bp, Homo sapiens
cagtacaaaaaggagatagaaccccagtcaagc

SEQ ID NO: 19594 - DNA, 33 bp, Homo sapiens
tttctgccctaagagagcacagaatagctgtaa

SEQ ID NO: 19595 - DNA, 33 bp, Homo sapiens
ataactggtatttctctaggaactctctgtaac

SEQ ID NO: 19596 - DNA, 33 bp, Homo sapiens
aaaactgaggaaggaagaggagccacacatgtc

SEQ ID NO: 19597 - DNA, 33 bp, Homo sapiens
gactcacacagaaatcgcttggagaggaagaac

SEQ ID NO: 19598 - DNA, 33 bp, Homo sapiens
agaatgtttgacatgatacaaagctgcccgaag

SEQ ID NO: 19599 - DNA, 33 bp, Homo sapiens
atgcaggctacttccattcaagctctagaagga

SEQ ID NO: 19600 - DNA, 33 bp, Homo sapiens
gtgagagttagaaatggacaatggagttctgtg

SEQ ID NO: 19601 - DNA, 33 bp, Homo sapiens
tgagagactgtttgtgtaagaaggagcgagagg

SEQ ID NO: 19602 - DNA, 33 bp, Homo sapiens
ccctgttcactcttcctcaaagaacccttcccc

SEQ ID NO: 19603 - DNA, 33 bp, Homo sapiens
tgggtgctgtgggtaaggtctgaggggacagtg

SEQ ID NO: 19604 - DNA, 33 bp, Homo sapiens
ccaatcgagagaaaaattcatgcctgcccatgt

SEQ ID NO: 19605 - DNA, 33 bp, Homo sapiens
ggacccactgactttccagtgtagatgtggatg

SEQ ID NO: 19606 - DNA, 33 bp, Homo sapiens
gtcacgtatcattgtggaatactccattaagcc

SEQ ID NO: 19607 - DNA, 33 bp, Homo sapiens
gtggtaggagactgacgaagaaattgattagtc

SEQ ID NO: 19608 - DNA, 33 bp, Homo sapiens
gccaagtgcaatcttagaggaatgacccatgta

SEQ ID NO: 19609 - DNA, 51 bp, Homo sapiens
gaacaaagaggaaagatggccaagatgaccacttgaattcctatgaaatga

SEQ ID NO: 19610 - DNA, 33 bp, Homo sapiens
gcctcatttcctatacgaaacagtcactaaaca

SEQ ID NO: 19611 - DNA, 33 bp, Homo sapiens
tgtgtagtacagtgttgaaaagtttgttctcaa

SEQ ID NO: 19612 - DNA, 33 bp, Homo sapiens
atgtgattcatgtatatcaaagaggatcaggaa

SEQ ID NO: 19613 - DNA, 33 bp, Homo sapiens
ctcactgtgtctggcattcaccccaattattac

SEQ ID NO: 19614 - DNA, 33 bp, Homo sapiens
gctcagaaaattaaagtagaaaattcagagctg

SEQ ID NO: 19615 - DNA, 33 bp, Homo sapiens
aagtattttatacttatggcatatcgtcactgg

SEQ ID NO: 19616 - DNA, 33 bp, Homo sapiens
aaacattgacgctttcgatatcatgttaatttc

SEQ ID NO: 19617 - DNA, 33 bp, Homo sapiens
tacacgcgacactctcgcccttgcattcacacg

SEQ ID NO: 19618 - DNA, 33 bp, Homo sapiens
tgtgaggctgtacatatgtgagctcctccgtgt

SEQ ID NO: 19619 - DNA, 33 bp, Homo sapiens
aggctcagagagggaaggtaacctgcctagagt

SEQ ID NO: 19620 - DNA, 33 bp, Homo sapiens
tctacaggcatctcaccatttacgtgtccactg

SEQ ID NO: 19621 - DNA, 33 bp, Homo sapiens
ttggggcctacgcctacattcgagggcctgaac

SEQ ID NO: 19622 - DNA, 33 bp, Homo sapiens
agacggcctcggctgcgatggcgcctggaaagt

SEQ ID NO: 19623 - DNA, 33 bp, Homo sapiens
aaggtggattaccacagtgctccccaagcacac

SEQ ID NO: 19624 - DNA, 33 bp, Homo sapiens
agaccagcccctatcatgctccctggcacacag

SEQ ID NO: 19625 - DNA, 51 bp, Homo sapiens
gctgactgaaacttagcccttcatgtacttaaacttgtttccttttaaact

SEQ ID NO: 19626 - DNA, 33 bp, Homo sapiens
acccaacttggacctgtagagtcaaggtcaaag

SEQ ID NO: 19627 - DNA, 33 bp, Homo sapiens
gaatgagacctgaagctgctggacatcagggca

SEQ ID NO: 19628 - DNA, 33 bp, Homo sapiens
ctaggctctggcaaaggatcagaacataacact

SEQ ID NO: 19629 - DNA, 33 bp, Homo sapiens
aggccagatctaaaaatgtactgtcaagaaaca

SEQ ID NO: 19630 - DNA, 33 bp, Homo sapiens
atctggtatataggagtctacaatggctatcac

SEQ ID NO: 19631 - DNA, 33 bp, Homo sapiens
gtcctctccctggtactatctgttagtccactc

SEQ ID NO: 19632 - DNA, 33 bp, Homo sapiens
gagctaattaaaccaatgtggacccaagtgcct

SEQ ID NO: 19633 - DNA, 33 bp, Homo sapiens
ggactgctttccacacccttgtaatttcatccc

SEQ ID NO: 19634 - DNA, 33 bp, Homo sapiens
ttatactcactactcatattcattttacaccaa

SEQ ID NO: 19635 - DNA, 33 bp, Homo sapiens
ctttgaaatgcaaacctcatcatgacatgcctt

SEQ ID NO: 19636 - DNA, 33 bp, Homo sapiens
ttctacttgttgataaggcatggaactgaatgg

SEQ ID NO: 19637 - DNA, 33 bp, Homo sapiens
ccatacacagcaagcatggggatgtggaggaag

SEQ ID NO: 19638 - DNA, 33 bp, Homo sapiens
cttagaatgtgtaaactgcagctgctcaggaaa

SEQ ID NO: 19639 - DNA, 33 bp, Homo sapiens
tggttatctttgggaagcagaactatgcttgat

SEQ ID NO: 19640 - DNA, 33 bp, Homo sapiens
ggttctcaatttttcttaaatggatgtgtatac

SEQ ID NO: 19641 - DNA, 33 bp, Homo sapiens
cctgagagttgagtgagaatgaataaaaattag

SEQ ID NO: 19642 - DNA, 51 bp, Homo sapiens
gataggtctagcagtagagatcaacgaaggtgatgcacccaggagacatct

SEQ ID NO: 19643 - DNA, 33 bp, Homo sapiens
agaaagggatgtatgcgaaccagtttagaggca

SEQ ID NO: 19644 - DNA, 33 bp, Homo sapiens
ttggaactggcaattcgacagcttttatttgct

SEQ ID NO: 19645 - DNA, 33 bp, Homo sapiens
gttaggtgaaaaacaagaggtgcataccataat

SEQ ID NO: 19646 - DNA, 33 bp, Homo sapiens
aaaaacaactcagggatgtatgttaggatgttg

SEQ ID NO: 19647 - DNA, 33 bp, Homo sapiens
gaccaagacaaaaacatgactactccataatta

SEQ ID NO: 19648 - DNA, 33 bp, Homo sapiens
cctgctacctccttactgctccagaggaccttt

SEQ ID NO: 19649 - DNA, 33 bp, Homo sapiens
aactcacctacatcacgcaaccagtaagtttca

SEQ ID NO: 19650 - DNA, 33 bp, Homo sapiens
tgcttccttcacctagtaacatacctgtgtcct

SEQ ID NO: 19651 - DNA, 33 bp, Homo sapiens
tgaggtctcataaaaagagtgtgtatcataagg

SEQ ID NO: 19652 - DNA, 33 bp, Homo sapiens
accagagtcatctttcgaaaatacagatcagaa

SEQ ID NO: 19653 - DNA, 33 bp, Homo sapiens
atggtaagaacaaaaccgtatgtgagagacagc

SEQ ID NO: 19654 - DNA, 33 bp, Homo sapiens
gatacctggacatggatgggctaaaaggaatca

SEQ ID NO: 19655 - DNA, 33 bp, Homo sapiens
cttattccttaatctgtaccaagtaacacggtg

SEQ ID NO: 19656 - DNA, 51 bp, Homo sapiens
aacaactgaccaaggactctggctgtctttgaaatatattatcatgtttga

SEQ ID NO: 19657 - DNA, 51 bp, Homo sapiens
cttgaatttattctcttatagttccgaaggccagaaatctgaaatcagttt

SEQ ID NO: 19658 - DNA, 33 bp, Homo sapiens
tttgttcttatgactctatgattctgtgtcaag

SEQ ID NO: 19659 - DNA, 33 bp, Homo sapiens
acagagccaactatactatcccaatttgcataa

SEQ ID NO: 19660 - DNA, 51 bp, Homo sapiens
attcaaggtgagagaggcctttggagcatactaatgaaactttgattttta

SEQ ID NO: 19661 - DNA, 33 bp, Homo sapiens
aacaataccgtgaatggaaaaacctcttccaaa

SEQ ID NO: 19662 - DNA, 33 bp, Homo sapiens
ggtagaaacagaccactaatgattccacaatta

SEQ ID NO: 19663 - DNA, 33 bp, Homo sapiens
tccttactgctaaatctaaaacacgtttttcct

SEQ ID NO: 19664 - DNA, 33 bp, Homo sapiens
actttgccaatcatcattctccatctcatcagc

SEQ ID NO: 19665 - DNA, 33 bp, Homo sapiens
aactcctgaacacagagcttagaacacagcagg

SEQ ID NO: 19666 - DNA, 51 bp, Homo sapiens
aaatgatgagcatgagccagatttaggaggaatgctgactctttttttaaa

SEQ ID NO: 19667 - DNA, 51 bp, Homo sapiens
agcagttctcacttattactaggaccaaggaacagtaagtcttttcctttc

SEQ ID NO: 19668 - DNA, 33 bp, Homo sapiens
acaatactgcgttgtatacttaaaaattaacca

SEQ ID NO: 19669 - DNA, 33 bp, Homo sapiens
agtattgttaatcatatgctctatactgtacgg

SEQ ID NO: 19670 - DNA, 33 bp, Homo sapiens
aatgctttctgataacggcgttcagtgaaaaga

SEQ ID NO: 19671 - DNA, 33 bp, Homo sapiens
atggtagaacttcttctgaaattggagtcaatc

SEQ ID NO: 19672 - DNA, 33 bp, Homo sapiens
tggggtttcccttgactgtatgatgactgacac

SEQ ID NO: 19673 - DNA, 33 bp, Homo sapiens
attggcaacatttgactggtatcagatggttat

SEQ ID NO: 19674 - DNA, 33 bp, Homo sapiens
aaaggttgttcctaaagtaagggcagagtcaca

SEQ ID NO: 19675 - DNA, 33 bp, Homo sapiens
caaggtaagcaagccaggttgatagctctaagg

SEQ ID NO: 19676 - DNA, 33 bp, Homo sapiens
tcagtgtttatttccagtctaacggagagctca

SEQ ID NO: 19677 - DNA, 33 bp, Homo sapiens
agaataacatgaacccgagcagaatcatgtttt

SEQ ID NO: 19678 - DNA, 33 bp, Homo sapiens
gtgagaaattgagaacgaaagagaggcactgtt

SEQ ID NO: 19679 - DNA, 33 bp, Homo sapiens
catgtatgtgattctcggaaaccagcaaaggag

SEQ ID NO: 19680 - DNA, 33 bp, Homo sapiens
atgttccagtgtaaaagttgtcaaagtggaatt

SEQ ID NO: 19681 - DNA, 33 bp, Homo sapiens
atcccactaagtggcctctgtttattacccagt

SEQ ID NO: 19682 - DNA, 33 bp, Homo sapiens
gattgcactttgagaatcctgctttataacttg

SEQ ID NO: 19683 - DNA, 33 bp, Homo sapiens
tgttgtcagtccacaagtagaagtgagagtgtt

SEQ ID NO: 19684 - DNA, 33 bp, Homo sapiens
ctaatgcaagctcgaagccatttagagaactac

SEQ ID NO: 19685 - DNA, 33 bp, Homo sapiens
gtccctgaatcatcacgctgagtggtctttttc

SEQ ID NO: 19686 - DNA, 51 bp, Homo sapiens
tgtttcttttttgcaggagactgcatagacacaactcactactgtatgttt

SEQ ID NO: 19687 - DNA, 33 bp, Homo sapiens
tgattcatggacaacattaacatttttttcctg

SEQ ID NO: 19688 - DNA, 51 bp, Homo sapiens
ggaggaactttctaaaaactggtatgaaatgagtaaaaaagcatagaacca

SEQ ID NO: 19689 - DNA, 33 bp, Homo sapiens
cactcactttgaacctgaaaaacctgacctggt

SEQ ID NO: 19690 - DNA, 33 bp, Homo sapiens
acatgaagttctggaatgggcagtttacgtact

SEQ ID NO: 19691 - DNA, 33 bp, Homo sapiens
aatttagtgctttaaagaagtcaggctcttacc

SEQ ID NO: 19692 - DNA, 33 bp, Homo sapiens
ctatgaacttgttttctcctcattgaaagataa

SEQ ID NO: 19693 - DNA, 33 bp, Homo sapiens
tttttgacaggctctcgctcaattgttcaggct

SEQ ID NO: 19694 - DNA, 33 bp, Homo sapiens
tgatgagtcactttcattccataacacaatctt

SEQ ID NO: 19695 - DNA, 33 bp, Homo sapiens
acaccaacattagatcgataactcctccgaatg

SEQ ID NO: 19696 - DNA, 51 bp, Homo sapiens
tatatggacaatttaaagttcattataactttgcaggataaactgatgaaa

SEQ ID NO: 19697 - DNA, 51 bp, Homo sapiens
aaatagtttggagactatttgatgatgattggccctacagagtagtcagcc

SEQ ID NO: 19698 - DNA, 33 bp, Homo sapiens
gctaaatgtggtttaagtggtcttagggtttaa

SEQ ID NO: 19699 - DNA, 33 bp, Homo sapiens
tagatgacagatgctactaaggacgtcatcatt

SEQ ID NO: 19700 - DNA, 33 bp, Homo sapiens
gcagccaagctactaatgataaagccctctgat

SEQ ID NO: 19701 - DNA, 51 bp, Homo sapiens
attctgagactcatttcaagggtattaagttaatgaaaagtattgtgtttg

SEQ ID NO: 19702 - DNA, 33 bp, Homo sapiens
tcacagcatatgatgagtaagattctcaacatg

SEQ ID NO: 19703 - DNA, 33 bp, Homo sapiens
tcaagatttgaccttaggtttgcttctcttcat

SEQ ID NO: 19704 - DNA, 51 bp, Homo sapiens
caaggcatgtgataggagttctcaataaataataacccatgtccttcatgg

SEQ ID NO: 19705 - DNA, 33 bp, Homo sapiens
attttaaaagcaggacgaggagcaggaaagcta

SEQ ID NO: 19706 - DNA, 33 bp, Homo sapiens
tcagaaagttccagaactacaattggtcagaag

SEQ ID NO: 19707 - DNA, 33 bp, Homo sapiens
ctacaaataatcatcatgtgaaacaaagaacaa

SEQ ID NO: 19708 - DNA, 33 bp, Homo sapiens
acctaacacaaatggagggaaaaaggagacaaa

SEQ ID NO: 19709 - DNA, 33 bp, Homo sapiens
aaaacagacatgaagagtctacaattgattggg

SEQ ID NO: 19710 - DNA, 33 bp, Homo sapiens
atattcagacactgcggaactatgtagggtgaa

SEQ ID NO: 19711 - DNA, 33 bp, Homo sapiens
ctgttcaaccttaacataaaggagaataaatca

SEQ ID NO: 19712 - DNA, 33 bp, Homo sapiens
cgcagcatggacttaatagctttaacctactct

SEQ ID NO: 19713 - DNA, 33 bp, Homo sapiens
caggttcttgattgcatgagtcagtggggaata

SEQ ID NO: 19714 - DNA, 33 bp, Homo sapiens
cgcagggacctggcacgagagtcagagcctagt

SEQ ID NO: 19715 - DNA, 33 bp, Homo sapiens
gataatgggatctgtcgcatacactctagaggg

SEQ ID NO: 19716 - DNA, 33 bp, Homo sapiens
taccgaaaatatacaagcaactacaaatcaata

SEQ ID NO: 19717 - DNA, 33 bp, Homo sapiens
ggtcgtggtcatctacgatggctggatatgact

SEQ ID NO: 19718 - DNA, 33 bp, Homo sapiens
tcctcttctctataccgatgagctccaggagga

SEQ ID NO: 19719 - DNA, 33 bp, Homo sapiens
gataaccagagcataagaggtttctgtaggaag

SEQ ID NO: 19720 - DNA, 51 bp, Homo sapiens
gaaatactgctctaaacctcaatcttcctgttatagaaagtgggaatcata

SEQ ID NO: 19721 - DNA, 33 bp, Homo sapiens
cttacactacatttactagacaccgataatttt

SEQ ID NO: 19722 - DNA, 33 bp, Homo sapiens
gtctgagaaaaaccaataagttcttttgtggaa

SEQ ID NO: 19723 - DNA, 33 bp, Homo sapiens
agatcagatgaataatgaatgtgaagcccaaca

SEQ ID NO: 19724 - DNA, 33 bp, Homo sapiens
ttccatttctcaagcatgtggtttctgtagacc

SEQ ID NO: 19725 - DNA, 51 bp, Homo sapiens
aaacagccacctccccaacagatgcttccatcccagcttctccggaatgga

SEQ ID NO: 19726 - DNA, 33 bp, Homo sapiens
gtttcaattcaagtcctaagggaagaaaaagca

SEQ ID NO: 19727 - DNA, 33 bp, Homo sapiens
tttattttctcaatgaggcagacattcactcca

SEQ ID NO: 19728 - DNA, 33 bp, Homo sapiens
gggaacaaggatccaattgctgcccctgctaga

SEQ ID NO: 19729 - DNA, 33 bp, Homo sapiens
gaccgcagaaactgttgaaaagagatgagccag

SEQ ID NO: 19730 - DNA, 33 bp, Homo sapiens
gtgatatgatgtttcagaaatgaaggcagcaga

SEQ ID NO: 19731 - DNA, 33 bp, Homo sapiens
tacagcctgggctatcgaggtgtttgctaggcc

SEQ ID NO: 19732 - DNA, 33 bp, Homo sapiens
attcgtaatggtgccagtcttgccaaattgccc

SEQ ID NO: 19733 - DNA, 33 bp, Homo sapiens
atcaggtagatctgactaacgtgggcaactgag

SEQ ID NO: 19734 - DNA, 33 bp, Homo sapiens
tgccgtttttgtagacgctgttattctttttcc

SEQ ID NO: 19735 - DNA, 51 bp, Homo sapiens
gctgatagatcagaatccttttcaatgtagaagctgaggaaccactcccaa

SEQ ID NO: 19736 - DNA, 51 bp, Homo sapiens
ggtaggaaaaagaatttcagtgttatggtgataagagcttggggtaatttt

SEQ ID NO: 19737 - DNA, 33 bp, Homo sapiens
cttcagccaccatacacgtagcaaactggaatc

SEQ ID NO: 19738 - DNA, 33 bp, Homo sapiens
atataaagtagttaaatacataagtgggtgagt

SEQ ID NO: 19739 - DNA, 33 bp, Homo sapiens
ctttagggtttcaagagggcatttttaaggtcc

SEQ ID NO: 19740 - DNA, 33 bp, Homo sapiens
gagtctaataacatagtcattccagagacattg

SEQ ID NO: 19741 - DNA, 33 bp, Homo sapiens
caggtatggaatcttaggtttgtactaatcgaa

SEQ ID NO: 19742 - DNA, 33 bp, Homo sapiens
tgaaaaccatcttagatatgcctgcagactccc

SEQ ID NO: 19743 - DNA, 33 bp, Homo sapiens
gacaggatgtgatttatgtgtttgaaaggaaac

SEQ ID NO: 19744 - DNA, 33 bp, Homo sapiens
ttcttggtctcttacagtctttcctgtgaagag

SEQ ID NO: 19745 - DNA, 33 bp, Homo sapiens
actggtgttggattcagaattcaagtcagcctg

SEQ ID NO: 19746 - DNA, 33 bp, Homo sapiens
taaatattgggtggaagtgctcatcgttagcag

SEQ ID NO: 19747 - DNA, 33 bp, Homo sapiens
gcccttcacggctagctgagctctaaagttcac

SEQ ID NO: 19748 - DNA, 51 bp, Homo sapiens
caatttttttcagcgtgttcttatatgcccattactgagctggtccctggg

SEQ ID NO: 19749 - DNA, 33 bp, Homo sapiens
taaacttttattgacctctctatctcgtatctg

SEQ ID NO: 19750 - DNA, 33 bp, Homo sapiens
tctgggccaaagagatcaggtcatatgttccaa

SEQ ID NO: 19751 - DNA, 33 bp, Homo sapiens
atctgcgctataggaatgcacctctttggttac

SEQ ID NO: 19752 - DNA, 33 bp, Homo sapiens
taaaacaaaaaaaccatatgattctgtattctc

SEQ ID NO: 19753 - DNA, 33 bp, Homo sapiens
gatatgtagatttgccgagggagaggttaaaat

SEQ ID NO: 19754 - DNA, 33 bp, Homo sapiens
ggcacaaagcaggaagtactggttgttggagtg

SEQ ID NO: 19755 - DNA, 33 bp, Homo sapiens
gctacaaaaagacaaacggaggtatagtgattg

SEQ ID NO: 19756 - DNA, 33 bp, Homo sapiens
tcaccagttacttctaggtacatttgcttttat

SEQ ID NO: 19757 - DNA, 33 bp, Homo sapiens
tacatgtaagaaacacgaagagcagcatgtggc

SEQ ID NO: 19758 - DNA, 33 bp, Homo sapiens
ttgtcattcaatctcatatacccaattttccta

SEQ ID NO: 19759 - DNA, 33 bp, Homo sapiens
gataaccactccaacactgatccttcaaggtca

SEQ ID NO: 19760 - DNA, 33 bp, Homo sapiens
gatgcagactgggacttaagacgctggctcccc

SEQ ID NO: 19761 - DNA, 33 bp, Homo sapiens
ttaaactgtttctgtcgatttctttctttcttt

SEQ ID NO: 19762 - DNA, 33 bp, Homo sapiens
cttgttaagtgattgctcccttccccaaataaa

SEQ ID NO: 19763 - DNA, 33 bp, Homo sapiens
tgtgtttccaaccagatggctatgaagtgaacc

SEQ ID NO: 19764 - DNA, 33 bp, Homo sapiens
tgtagagactacacaatgatggcgagtaagaca

SEQ ID NO: 19765 - DNA, 51 bp, Homo sapiens
tcctgaaaattatactttttaataagacctctgagaacaaatgctggttta

SEQ ID NO: 19766 - DNA, 33 bp, Homo sapiens
tttgttcgggacaccaggaacctgcaactgagt

SEQ ID NO: 19767 - DNA, 33 bp, Homo sapiens
gttcaaatctaaccactggataggcaaacttgg

SEQ ID NO: 19768 - DNA, 33 bp, Homo sapiens
gacaatttctaaagatcacacttgtcaatggcc

SEQ ID NO: 19769 - DNA, 33 bp, Homo sapiens
ctatagaatgcctaaagaggaaattatttgtcc

SEQ ID NO: 19770 - DNA, 33 bp, Homo sapiens
catcttaacgatttgatcctcatgttttcttct

SEQ ID NO: 19771 - DNA, 33 bp, Homo sapiens
ataagaaagattgagagatggaaaaataaaaag

SEQ ID NO: 19772 - DNA, 33 bp, Homo sapiens
aactactacatagaacggaaatagttacacaag

SEQ ID NO: 19773 - DNA, 33 bp, Homo sapiens
atgagttactctcgattaaaaagatactgcaac

SEQ ID NO: 19774 - DNA, 51 bp, Homo sapiens
aaaaggcaagataccaaaatatctggaaaacataggggaaagagaaagacc

SEQ ID NO: 19775 - DNA, 33 bp, Homo sapiens
gaaggatctggtttgtgaaaagcattagcatag

SEQ ID NO: 19776 - DNA, 33 bp, Homo sapiens
ggactttgcttttgaatatacctttctctcatt

SEQ ID NO: 19777 - DNA, 33 bp, Homo sapiens
caggcctgaagtatcatggagagaaggcgaaag

SEQ ID NO: 19778 - DNA, 33 bp, Homo sapiens
actccttccctgttacgagttctgcttcctgtg

SEQ ID NO: 19779 - DNA, 33 bp, Homo sapiens
ccagctggagagcaccggagtgtatttgcaagt

SEQ ID NO: 19780 - DNA, 33 bp, Homo sapiens
atatttaatttaaaaagcctgtctatcagctag

SEQ ID NO: 19781 - DNA, 33 bp, Homo sapiens
tttcagctgactggatgaaataaggaaatacaa

SEQ ID NO: 19782 - DNA, 33 bp, Homo sapiens
gaggctcagtgcatcatctgcctgcagaaaata

SEQ ID NO: 19783 - DNA, 33 bp, Homo sapiens
agagggaagagtacaagttaaaatgtcagagat

SEQ ID NO: 19784 - DNA, 33 bp, Homo sapiens
atgacaacaccttcacgccttgatacaccagga

SEQ ID NO: 19785 - DNA, 33 bp, Homo sapiens
aggaagtttatcatcagagcagaattttctgat

SEQ ID NO: 19786 - DNA, 33 bp, Homo sapiens
ggcccagttagaaatggagctggcattgagaat

SEQ ID NO: 19787 - DNA, 33 bp, Homo sapiens
aaaattaaaacaacccggcattgtgacccacat

SEQ ID NO: 19788 - DNA, 33 bp, Homo sapiens
ctgtctgatagatcaattaccaaatgaacctct

SEQ ID NO: 19789 - DNA, 51 bp, Homo sapiens
aattattttccactaacggtgaaacgctaaatggacgacttcttatttatt

SEQ ID NO: 19790 - DNA, 51 bp, Homo sapiens
cttactagaaatggaaacaaacaaaggcttactctacaaaaaggaggaaaa

SEQ ID NO: 19791 - DNA, 33 bp, Homo sapiens
gcattccaaatgtctcgcctcaagcaagcactt

SEQ ID NO: 19792 - DNA, 33 bp, Homo sapiens
taccacatcttctggtgaacaactcagcctatc

SEQ ID NO: 19793 - DNA, 33 bp, Homo sapiens
gctcctctacttgggcgaaaaggaagctttctc

SEQ ID NO: 19794 - DNA, 33 bp, Homo sapiens
cagactaatacagtaaggaagtacaattgctgg

SEQ ID NO: 19795 - DNA, 33 bp, Homo sapiens
atgttcatccactatcgccagcaattgtacttc

SEQ ID NO: 19796 - DNA, 33 bp, Homo sapiens
tatcattctattgatggaaaatggaccacactt

SEQ ID NO: 19797 - DNA, 33 bp, Homo sapiens
aatttcataacaatcagatcatgtgcttatttt

SEQ ID NO: 19798 - DNA, 33 bp, Homo sapiens
atggaagctaagaaacgagtaagtaagcaagaa

SEQ ID NO: 19799 - DNA, 33 bp, Homo sapiens
ctgccgtgtttcaccatgctaaatccgagaaat

SEQ ID NO: 19800 - DNA, 33 bp, Homo sapiens
aagtaacacatggaaaggttttaattctcacga

SEQ ID NO: 19801 - DNA, 33 bp, Homo sapiens
aaaaggtctgaacttactaaactataatttgtc

SEQ ID NO: 19802 - DNA, 33 bp, Homo sapiens
acacacaatatggtaatcgtggctgagaactgg

SEQ ID NO: 19803 - DNA, 51 bp, Homo sapiens
aacagcatatatatgcaagattagatctcccctgtaaaggaggtagctggg

SEQ ID NO: 19804 - DNA, 51 bp, Homo sapiens
gtgcccctttctgggggagagataagtggaagtaggatcactcagttttca

SEQ ID NO: 19805 - DNA, 33 bp, Homo sapiens
agagctggatctgggatgtaagagagagaaagc

SEQ ID NO: 19806 - DNA, 33 bp, Homo sapiens
tagccggaatgttttatggagcatcaaaggaca

SEQ ID NO: 19807 - DNA, 33 bp, Homo sapiens
ttatccctggaagttgtaaatgcagttgtagta

SEQ ID NO: 19808 - DNA, 33 bp, Homo sapiens
gggagcaaatcctaaatctcagaccactcactc

SEQ ID NO: 19809 - DNA, 33 bp, Homo sapiens
ctgaattgagataacattgaagattttattgct

SEQ ID NO: 19810 - DNA, 33 bp, Homo sapiens
gggattagatgagacagtatctgtgaaagctct

SEQ ID NO: 19811 - DNA, 33 bp, Homo sapiens
cttttaattgggatcatgccaggggattagacc

SEQ ID NO: 19812 - DNA, 33 bp, Homo sapiens
gattttggttaccaacggtcaactgtgttccaa

SEQ ID NO: 19813 - DNA, 33 bp, Homo sapiens
caaatattccttagtcgcataccactaccatgg

SEQ ID NO: 19814 - DNA, 33 bp, Homo sapiens
gcacaggtcactctaatgaatgacagctgtaat

SEQ ID NO: 19815 - DNA, 33 bp, Homo sapiens
ttcaaagtcttgtcagtctcagaattctagtcc

SEQ ID NO: 19816 - DNA, 33 bp, Homo sapiens
gtaaactggaaaactctatgcaaatgtcaggtt

SEQ ID NO: 19817 - DNA, 33 bp, Homo sapiens
tatcacaggaatacaagtgttcacaggtactct

SEQ ID NO: 19818 - DNA, 33 bp, Homo sapiens
agcctgcttttctcactgtattgttactcgttg

SEQ ID NO: 19819 - DNA, 33 bp, Homo sapiens
cacctgccaagacaaagagacacgaatgagtac

SEQ ID NO: 19820 - DNA, 33 bp, Homo sapiens
acttgctccaacaggtgaacgtgattgaaaatt

SEQ ID NO: 19821 - DNA, 33 bp, Homo sapiens
atgctagctagtgttaggaagcgagcataaaca

SEQ ID NO: 19822 - DNA, 33 bp, Homo sapiens
attcaggtgctccccagatgcagagccaccaac

SEQ ID NO: 19823 - DNA, 33 bp, Homo sapiens
ataggtccgtgcagaagcttgtacgtgaataat

SEQ ID NO: 19824 - DNA, 33 bp, Homo sapiens
gtcacgtggccagagataagaaagcatcaaacc

SEQ ID NO: 19825 - DNA, 33 bp, Homo sapiens
tacacccaccacagaactctctattccctcctc

SEQ ID NO: 19826 - DNA, 33 bp, Homo sapiens
tacagattcaagagcagagtgaaccccaaatag

SEQ ID NO: 19827 - DNA, 33 bp, Homo sapiens
caccccaggactcacatcatggcaaaaatccaa

SEQ ID NO: 19828 - DNA, 33 bp, Homo sapiens
taagcgtctccatggcgcgttctggacacacag

SEQ ID NO: 19829 - DNA, 33 bp, Homo sapiens
tcaaagagatccagtatggctaccgccgggtga

SEQ ID NO: 19830 - DNA, 33 bp, Homo sapiens
gggcaaccatgatgtttgtgttgcaatttgtac

SEQ ID NO: 19831 - DNA, 33 bp, Homo sapiens
tggacatggctcacaagcagttgttgattgact

SEQ ID NO: 19832 - DNA, 33 bp, Homo sapiens
gccaatgaaaaaagaatgcctggttgcgacgta

SEQ ID NO: 19833 - DNA, 33 bp, Homo sapiens
tagacctggaaatgacgctgtgaatagacagga

SEQ ID NO: 19834 - DNA, 33 bp, Homo sapiens
agggattctttctgaggccaaaaaccctttccc

SEQ ID NO: 19835 - DNA, 33 bp, Homo sapiens
ataggaagttgtacacgggtatctacagtatga

SEQ ID NO: 19836 - DNA, 33 bp, Homo sapiens
ctgctctgggctccacgcagattgtccgaacgc

SEQ ID NO: 19837 - DNA, 33 bp, Homo sapiens
tggcccggggtccagagagaaacagggagaccc

SEQ ID NO: 19838 - DNA, 33 bp, Homo sapiens
tctggcatcccagggacatcctcaaggcctctg

SEQ ID NO: 19839 - DNA, 33 bp, Homo sapiens
gtccctttcctacgtggagctacctgggtcaca

SEQ ID NO: 19840 - DNA, 33 bp, Homo sapiens
catggaagttctgcactgcttttcacacacctt

SEQ ID NO: 19841 - DNA, 33 bp, Homo sapiens
tgtcttgtgctagtagtcactcagtgtgtatgt

SEQ ID NO: 19842 - DNA, 33 bp, Homo sapiens
ttggtgaaagaagaaagtcaagcagaagattta

SEQ ID NO: 19843 - DNA, 33 bp, Homo sapiens
caataattaaacaagcggacaaaaatgacaagt

SEQ ID NO: 19844 - DNA, 33 bp, Homo sapiens
ttgacagattcaaatatgtacaaaaggctgggg

SEQ ID NO: 19845 - DNA, 33 bp, Homo sapiens
tgttttattcaatgtatcagagccttgccacag

SEQ ID NO: 19846 - DNA, 33 bp, Homo sapiens
tttaggcaaagtacacgcattatcagatttggg

SEQ ID NO: 19847 - DNA, 33 bp, Homo sapiens
gccccagataatacaacaaaatggccaacgttt

SEQ ID NO: 19848 - DNA, 33 bp, Homo sapiens
ggtgaagtctccataatgcagttcttaaaaaaa

SEQ ID NO: 19849 - DNA, 33 bp, Homo sapiens
agaactgcaagtctccgcgtcgggtggcacaga

SEQ ID NO: 19850 - DNA, 33 bp, Homo sapiens
tgaagattggctcccagtgataggaaactgctg

SEQ ID NO: 19851 - DNA, 33 bp, Homo sapiens
tcatgtaaatattcagtaatgtgcttcctgtga

SEQ ID NO: 19852 - DNA, 33 bp, Homo sapiens
agagtcaaattaccgagcacttgtgcgggaaaa

SEQ ID NO: 19853 - DNA, 33 bp, Homo sapiens
ctcaggtgggctttgcgagggggtagatactga

SEQ ID NO: 19854 - DNA, 33 bp, Homo sapiens
gtaaactccagcaaaatgctaaactcactcatc

SEQ ID NO: 19855 - DNA, 33 bp, Homo sapiens
tcttctttaatcctccggcaagactaggtctcc

SEQ ID NO: 19856 - DNA, 33 bp, Homo sapiens
agcttctctcctggagtcaagtgcttcagtgta

SEQ ID NO: 19857 - DNA, 33 bp, Homo sapiens
gaaacagggaaaggactcaaaaatgcaaaatgc

SEQ ID NO: 19858 - DNA, 33 bp, Homo sapiens
cccacaggagaccggatgcgagcaagcgcacag

SEQ ID NO: 19859 - DNA, 33 bp, Homo sapiens
gtatcaaaacacataccaaggatgaataagatg

SEQ ID NO: 19860 - DNA, 33 bp, Homo sapiens
caaggccgagcacctagagaaggtcaagttgca

SEQ ID NO: 19861 - DNA, 33 bp, Homo sapiens
attgtctgagcgcatatcttgtgaattgtcata

SEQ ID NO: 19862 - DNA, 51 bp, Homo sapiens
ggtgcatcacactaagcacattatagacattagcttgctaagcccacaaca

SEQ ID NO: 19863 - DNA, 33 bp, Homo sapiens
agtcagagcgacagcagaggaaacgggttcaag

SEQ ID NO: 19864 - DNA, 33 bp, Homo sapiens
gctctcagtataggtatgtgctagagacttgta

SEQ ID NO: 19865 - DNA, 33 bp, Homo sapiens
taaactcaagagtgcataagaggtacctgagga

SEQ ID NO: 19866 - DNA, 33 bp, Homo sapiens
gagagaaagggtcacatgctataggactccatg

SEQ ID NO: 19867 - DNA, 33 bp, Homo sapiens
gaattccagggatttgtagattactccagagta

SEQ ID NO: 19868 - DNA, 33 bp, Homo sapiens
cctctaatattggccagtctttcacctaccttt

SEQ ID NO: 19869 - DNA, 33 bp, Homo sapiens
atcacagggttattgatggatttactagataca

SEQ ID NO: 19870 - DNA, 33 bp, Homo sapiens
taaagatccagaactcgccctgatgaaaatttc

SEQ ID NO: 19871 - DNA, 33 bp, Homo sapiens
cttattagagtgtctatgaagtgtcctctgttc

SEQ ID NO: 19872 - DNA, 33 bp, Homo sapiens
tctctggtgagattcatgtttctaactcgtata

SEQ ID NO: 19873 - DNA, 33 bp, Homo sapiens
tgattttgcatcatgatcctagtcacagtatcc

SEQ ID NO: 19874 - DNA, 33 bp, Homo sapiens
gggctggaaaaaagcatgtcccaggaagaagcc

SEQ ID NO: 19875 - DNA, 33 bp, Homo sapiens
aacccagctgagaaaaggatgatatcttcctgt

SEQ ID NO: 19876 - DNA, 33 bp, Homo sapiens
gagagtcttccagctatgtactcaagatcttag

SEQ ID NO: 19877 - DNA, 33 bp, Homo sapiens
ttgtaaatgggacctggacagattgctaagtct

SEQ ID NO: 19878 - DNA, 33 bp, Homo sapiens
attttatgacatattagaaacattggatacatt

SEQ ID NO: 19879 - DNA, 33 bp, Homo sapiens
agtagggcacccataagtaattcctaagttact

SEQ ID NO: 19880 - DNA, 33 bp, Homo sapiens
attgatgaaatttccttaactgtgtgccatttt

SEQ ID NO: 19881 - DNA, 33 bp, Homo sapiens
tagatgtggtgagctacctttattcacctcagt

SEQ ID NO: 19882 - DNA, 33 bp, Homo sapiens
gtgaacgatagtagtcgattcctgattcattct

SEQ ID NO: 19883 - DNA, 33 bp, Homo sapiens
atgtagcctattttagtagtccaggaaagcagg

SEQ ID NO: 19884 - DNA, 33 bp, Homo sapiens
ggcctgctgtctaccatgtattgtgttcaacag

SEQ ID NO: 19885 - DNA, 33 bp, Homo sapiens
aacaatcggatgtccagaatgcaaactatacat

SEQ ID NO: 19886 - DNA, 33 bp, Homo sapiens
gtcaagccagtcaagatggaaatttgtccattg

SEQ ID NO: 19887 - DNA, 33 bp, Homo sapiens
gtatgaagcatttaacgatgaagtcttctgttg

SEQ ID NO: 19888 - DNA, 33 bp, Homo sapiens
cagttctgccatccacgagacaggaaagttata

SEQ ID NO: 19889 - DNA, 33 bp, Homo sapiens
tctcgttgggaactcatactttaccctaaggac

SEQ ID NO: 19890 - DNA, 33 bp, Homo sapiens
ttttctcaaaggtagaggtgatcactagtttga

SEQ ID NO: 19891 - DNA, 33 bp, Homo sapiens
gaagccccagaatttcgatgttctcaggaatca

SEQ ID NO: 19892 - DNA, 33 bp, Homo sapiens
ataagggaaggtaccattgggcagtttcagacc

SEQ ID NO: 19893 - DNA, 51 bp, Homo sapiens
aacctagtctttgctgaggacaagatatgttgacaaacccaggcacaagga

SEQ ID NO: 19894 - DNA, 33 bp, Homo sapiens
cttgcaataacggctctgacattcccttaaact

SEQ ID NO: 19895 - DNA, 33 bp, Homo sapiens
cccaaggaaacaccctgagaaagacagagagta

SEQ ID NO: 19896 - DNA, 33 bp, Homo sapiens
taattgaattctctgcgaaaccctgtccgccgt

SEQ ID NO: 19897 - DNA, 33 bp, Homo sapiens
tagccatctagctatcgatccatacagccatcc

SEQ ID NO: 19898 - DNA, 33 bp, Homo sapiens
ccacacatccctgaatgacttgttaaaacctag

SEQ ID NO: 19899 - DNA, 33 bp, Homo sapiens
gccagtggaaatgggatagtaagcactgagtaa

SEQ ID NO: 19900 - DNA, 33 bp, Homo sapiens
catatttaaggacaaggacaaagaactcttagt

SEQ ID NO: 19901 - DNA, 33 bp, Homo sapiens
atatttcttaaacttatggtcatcaaagacctc

SEQ ID NO: 19902 - DNA, 33 bp, Homo sapiens
aaaaccattggattctgaaggtagaggtcaccc

SEQ ID NO: 19903 - DNA, 51 bp, Homo sapiens
cagatattgagaaagaatacctttttatagaagacacgtttaggggaaaat

SEQ ID NO: 19904 - DNA, 33 bp, Homo sapiens
gatgaaatgtgaaatctaaccgttcagactaaa

SEQ ID NO: 19905 - DNA, 33 bp, Homo sapiens
tagaatccagctttcctgacttgaagtacaaat

SEQ ID NO: 19906 - DNA, 33 bp, Homo sapiens
gtcataagacttttcatgagaaatggctgagat

SEQ ID NO: 19907 - DNA, 33 bp, Homo sapiens
tgattcaatctgtgcattcagaatccactgaat

SEQ ID NO: 19908 - DNA, 33 bp, Homo sapiens
ctgtaaaatgggaaaagtgtagccgtacttgct

SEQ ID NO: 19909 - DNA, 33 bp, Homo sapiens
cttgtacatatccaccggaactcttgggtgatt

SEQ ID NO: 19910 - DNA, 33 bp, Homo sapiens
ggttcagactgtaagagacatcctgcccatctg

SEQ ID NO: 19911 - DNA, 33 bp, Homo sapiens
ctgatgctaatctctcgcaaaaacaccatccgt

SEQ ID NO: 19912 - DNA, 33 bp, Homo sapiens
tcactaatcaagttgatgaggtcagcaacagtc

SEQ ID NO: 19913 - DNA, 33 bp, Homo sapiens
cagaggctttctgaaattctgcaggcaagaaaa

SEQ ID NO: 19914 - DNA, 33 bp, Homo sapiens
gatacttgtgaagaaagctgtcagcatgtggaa

SEQ ID NO: 19915 - DNA, 33 bp, Homo sapiens
atgttcgtagcacaaatgcatcaatggcaaccg

SEQ ID NO: 19916 - DNA, 33 bp, Homo sapiens
tgcttgagtgcactgatagccaaattacccaaa

SEQ ID NO: 19917 - DNA, 33 bp, Homo sapiens
aggagagaagcttggatatgtgtgcagggtgat

SEQ ID NO: 19918 - DNA, 33 bp, Homo sapiens
cacgaaacaacgtgtataagacaagcaatctgg

SEQ ID NO: 19919 - DNA, 33 bp, Homo sapiens
ggattacttacagtaagtgaaaaccaagacttg

SEQ ID NO: 19920 - DNA, 33 bp, Homo sapiens
aatttgttaattaagagtagatggtgagctgtc

SEQ ID NO: 19921 - DNA, 33 bp, Homo sapiens
atgggcaaaggccagaggcaggaaccaaaggag

SEQ ID NO: 19922 - DNA, 33 bp, Homo sapiens
agaggagccaatgccagaaagaagcaacatcca

SEQ ID NO: 19923 - DNA, 33 bp, Homo sapiens
ctgtggaaacaggaagtctgagacctagagaag

SEQ ID NO: 19924 - DNA, 33 bp, Homo sapiens
gctttttggcagcatcgaacccatagcaaagcc

SEQ ID NO: 19925 - DNA, 33 bp, Homo sapiens
tagtttctgtgtctccgcccttcaacaattttc

SEQ ID NO: 19926 - DNA, 33 bp, Homo sapiens
atctctaaattcatcaggttgcatacattaaat

SEQ ID NO: 19927 - DNA, 33 bp, Homo sapiens
ttaaggaagacccccctaaattgtataagcctc

SEQ ID NO: 19928 - DNA, 33 bp, Homo sapiens
gagcacctgagttcaatctactgttctgcattt

SEQ ID NO: 19929 - DNA, 33 bp, Homo sapiens
aaaacattaaattaaggaattcatcaccacatt

SEQ ID NO: 19930 - DNA, 33 bp, Homo sapiens
tatcagtgaagaaacagtgagatattaaacagt

SEQ ID NO: 19931 - DNA, 33 bp, Homo sapiens
atgtagcaaacctgtctaagtctgcgtgtccga

SEQ ID NO: 19932 - DNA, 33 bp, Homo sapiens
gaatgtgatatagatatgtagtagccacatttt

SEQ ID NO: 19933 - DNA, 33 bp, Homo sapiens
aaaaatattcgcttgatgcacagtgggattata

SEQ ID NO: 19934 - DNA, 33 bp, Homo sapiens
ttgagcaatggccctctttaattttatcagata

SEQ ID NO: 19935 - DNA, 33 bp, Homo sapiens
gtatgttattttacacgcaaaagacagagtgtt

SEQ ID NO: 19936 - DNA, 33 bp, Homo sapiens
agacatagaagcaaagtaatagcacagggagtc

SEQ ID NO: 19937 - DNA, 33 bp, Homo sapiens
aagtgctctttcccgataacttgaacacttaaa

SEQ ID NO: 19938 - DNA, 33 bp, Homo sapiens
cagattgcttggtatatatcgtactgagtggga

SEQ ID NO: 19939 - DNA, 33 bp, Homo sapiens
gaaccagaaacgtagatggttttgcaaatgaac

SEQ ID NO: 19940 - DNA, 33 bp, Homo sapiens
ttctctcagaagtggatgccaagaaggaatttg

SEQ ID NO: 19941 - DNA, 33 bp, Homo sapiens
ccagaagaagaattgagaatagagacatacaaa

SEQ ID NO: 19942 - DNA, 33 bp, Homo sapiens
ttttcaattgagaaagtaatcttcagtgcaaag

SEQ ID NO: 19943 - DNA, 33 bp, Homo sapiens
atcttgtcttctcttatgcactaattgtgtctt

SEQ ID NO: 19944 - DNA, 33 bp, Homo sapiens
tccccagagcccaatatagtgaatgcatgcagt

SEQ ID NO: 19945 - DNA, 33 bp, Homo sapiens
cccaagttctcacatcgctcaaacaatggaggt

SEQ ID NO: 19946 - DNA, 51 bp, Homo sapiens
tatatatgtatatatttatttgcatgttgtggttcaccccttctagactgt

SEQ ID NO: 19947 - DNA, 33 bp, Homo sapiens
ctccacctctccaccagtaccaatcttcccaag

SEQ ID NO: 19948 - DNA, 33 bp, Homo sapiens
ctgtacattaataccctaagaggcaatgtaagg

SEQ ID NO: 19949 - DNA, 33 bp, Homo sapiens
agtcctgcgctacagacacggtttaaacttatt

SEQ ID NO: 19950 - DNA, 33 bp, Homo sapiens
aatgtgcctgtatccacaagaaatgaaacctgc

SEQ ID NO: 19951 - DNA, 33 bp, Homo sapiens
gacagaaaagtcctacgaggaggctgtcagcac

SEQ ID NO: 19952 - DNA, 33 bp, Homo sapiens
ttgaaagacccacagaggagtttgcataagagc

SEQ ID NO: 19953 - DNA, 33 bp, Homo sapiens
acgtgaaggatttgcataggccattcacagatg

SEQ ID NO: 19954 - DNA, 33 bp, Homo sapiens
acatgtgagtgcttcatgttatcgtagtgtcat

SEQ ID NO: 19955 - DNA, 33 bp, Homo sapiens
agggtgactgaccccacaaaccatgaacaaagg

SEQ ID NO: 19956 - DNA, 33 bp, Homo sapiens
cacaagggattgatcagagaggttgcctcaggc

SEQ ID NO: 19957 - DNA, 33 bp, Homo sapiens
tcttagggacataatagagtcacaaacttacag

SEQ ID NO: 19958 - DNA, 33 bp, Homo sapiens
ctaaaaagaaacaggcggacaaaggatcactga

SEQ ID NO: 19959 - DNA, 33 bp, Homo sapiens
tgcaaagtgaacatactcatttaagagagaagt

SEQ ID NO: 19960 - DNA, 33 bp, Homo sapiens
gagatctctcacgaaagaaacaagatcaaggat

SEQ ID NO: 19961 - DNA, 33 bp, Homo sapiens
tcgtccatcctagtactatgcgtcattttcttt

SEQ ID NO: 19962 - DNA, 33 bp, Homo sapiens
cttgatggacgcgagtgaaagagatgtagtcct

SEQ ID NO: 19963 - DNA, 33 bp, Homo sapiens
ctctgttggctgagtatagtagctcatgcttgt

SEQ ID NO: 19964 - DNA, 33 bp, Homo sapiens
catgtaattttggagctataaaggcctaattag

SEQ ID NO: 19965 - DNA, 33 bp, Homo sapiens
gaggctaagtctttgggagaggaggagaattaa

SEQ ID NO: 19966 - DNA, 33 bp, Homo sapiens
gtggtgatgataagtatgataaacccatgcctg

SEQ ID NO: 19967 - DNA, 33 bp, Homo sapiens
ccctcagtggagggcacctgttgctcacttgtc

SEQ ID NO: 19968 - DNA, 33 bp, Homo sapiens
tattctcattcgctcagtctgccagccctggct

SEQ ID NO: 19969 - DNA, 51 bp, Homo sapiens
gcttcagtgggcactgtagtttgaatacctggatgccaaaaacagaaaaca

SEQ ID NO: 19970 - DNA, 33 bp, Homo sapiens
acgggctcccaggctatgtgtctcaagtccgcc

SEQ ID NO: 19971 - DNA, 33 bp, Homo sapiens
gacgaggacccagtcataaatttctctcatatc

SEQ ID NO: 19972 - DNA, 33 bp, Homo sapiens
ttttcattagagaaaagagtgaacatgttaagt

SEQ ID NO: 19973 - DNA, 33 bp, Homo sapiens
aagtctcctggagtcagtcttctcttcattata

SEQ ID NO: 19974 - DNA, 33 bp, Homo sapiens
actaggaccctctgaggagctggaagaaatcac

SEQ ID NO: 19975 - DNA, 51 bp, Homo sapiens
ttagatatgagtatcctcaggagtcgaaacatctcttgccttaagttctgt

SEQ ID NO: 19976 - DNA, 33 bp, Homo sapiens
cagagtggatccgaacgctttacagaaattgga

SEQ ID NO: 19977 - DNA, 33 bp, Homo sapiens
ggtagtaagtacttaggagatactcaaagaggt

SEQ ID NO: 19978 - DNA, 33 bp, Homo sapiens
gggaaaccatgacaatgaaggaagaacttgcac

SEQ ID NO: 19979 - DNA, 33 bp, Homo sapiens
gtcagatcagctgagtgaaacctggcagttcca

SEQ ID NO: 19980 - DNA, 51 bp, Homo sapiens
aagtgaaaggctctgacacactctatggtggaaaacacattcatcattgca

SEQ ID NO: 19981 - DNA, 33 bp, Homo sapiens
actctgcatgtttccaggaaaggcttctctcct

SEQ ID NO: 19982 - DNA, 33 bp, Homo sapiens
attttcagggtaatcataaataggggtggttaa

SEQ ID NO: 19983 - DNA, 33 bp, Homo sapiens
ggagtcctctaccacatgtgaatcttgaatatt

SEQ ID NO: 19984 - DNA, 33 bp, Homo sapiens
ctttcatgctaacatggaaagaaaggtacctgc

SEQ ID NO: 19985 - DNA, 33 bp, Homo sapiens
actgccagcatctctagccatctgattaggttt

SEQ ID NO: 19986 - DNA, 33 bp, Homo sapiens
ggagtgcttctcaatcgagggcaactgtcccac

SEQ ID NO: 19987 - DNA, 33 bp, Homo sapiens
cagaattggtggttaagtacatggaaaacaaga

SEQ ID NO: 19988 - DNA, 33 bp, Homo sapiens
acgccaaatgaggtacggggaagggactttaca

SEQ ID NO: 19989 - DNA, 33 bp, Homo sapiens
ccctcagctcttctacgagtggacgtggaatga

SEQ ID NO: 19990 - DNA, 33 bp, Homo sapiens
accacgcagacctcactggttctcccgctgtgc

SEQ ID NO: 19991 - DNA, 33 bp, Homo sapiens
acctatattagaatgctgaaaaataacaaaaac

SEQ ID NO: 19992 - DNA, 33 bp, Homo sapiens
agctagtattttttgctagtagatatgtacatt

SEQ ID NO: 19993 - DNA, 33 bp, Homo sapiens
atagctctcacttttaggacatctcatctgatc

SEQ ID NO: 19994 - DNA, 33 bp, Homo sapiens
tctgagaaggtatccatgagctccatctgactg

SEQ ID NO: 19995 - DNA, 33 bp, Homo sapiens
aactgttttttgaagcgaagaatgcagaactag

SEQ ID NO: 19996 - DNA, 33 bp, Homo sapiens
atgagtgcttcactgctcttttacttgcatctt

SEQ ID NO: 19997 - DNA, 33 bp, Homo sapiens
tggaatccagggtgacgaaggcatgacaagggt

SEQ ID NO: 19998 - DNA, 33 bp, Homo sapiens
tcatcaccacaggcgagataactgaagctcaaa

SEQ ID NO: 19999 - DNA, 33 bp, Homo sapiens
ggttggaccaaagaaagaccatctgcaagcctg

SEQ ID NO: 20000 - DNA, 33 bp, Homo sapiens
tcccagctgcaaaatatacccaacctggtgata

SEQ ID NO: 20001 - DNA, 33 bp, Homo sapiens
tcactgccatgtactatgctaagcgctttacat

SEQ ID NO: 20002 - DNA, 33 bp, Homo sapiens
cagaatggtgttcccagggtgctgttgtttaag

SEQ ID NO: 20003 - DNA, 33 bp, Homo sapiens
aaggtcaattaggcacgccattagagactattc

SEQ ID NO: 20004 - DNA, 33 bp, Homo sapiens
aacaaaggaccgatatgaagaatatattaagaa

SEQ ID NO: 20005 - DNA, 33 bp, Homo sapiens
ccgaatggctgggtgagagtctgacctagaaga

SEQ ID NO: 20006 - DNA, 33 bp, Homo sapiens
catcccaaaagttccatgtgggttcagacagga

SEQ ID NO: 20007 - DNA, 33 bp, Homo sapiens
caggtatttggtctaatctcaccaaaaggacag

SEQ ID NO: 20008 - DNA, 33 bp, Homo sapiens
gaaattgaagaaatactcaaattcttgctgaag

SEQ ID NO: 20009 - DNA, 33 bp, Homo sapiens
cactctgtacctcacatgaatgaactggaaaat

SEQ ID NO: 20010 - DNA, 33 bp, Homo sapiens
aggctggatgatgtcctgctgatctattgctgt

SEQ ID NO: 20011 - DNA, 33 bp, Homo sapiens
taaaatagcccttgcatgatgacagttttatat

SEQ ID NO: 20012 - DNA, 33 bp, Homo sapiens
gcttgaatacaagtacgcctggttccaggaact

SEQ ID NO: 20013 - DNA, 33 bp, Homo sapiens
ctcttatcatcttcccgcaaaactgaaaaatct

SEQ ID NO: 20014 - DNA, 33 bp, Homo sapiens
tcctccacctcaataagacgtttgcagtttaca

SEQ ID NO: 20015 - DNA, 33 bp, Homo sapiens
gtttggaaggttctccgctctatctgaaagccc

SEQ ID NO: 20016 - DNA, 33 bp, Homo sapiens
atgtatgtttacacgctctggttgcctgctcat

SEQ ID NO: 20017 - DNA, 33 bp, Homo sapiens
cactggtgggaagcatgagaagatgtgaagagc

SEQ ID NO: 20018 - DNA, 33 bp, Homo sapiens
aagatttttaagcagcggagtaacatggttcag

SEQ ID NO: 20019 - DNA, 33 bp, Homo sapiens
taaacctgcctcaaacggagatttctctttggt

SEQ ID NO: 20020 - DNA, 33 bp, Homo sapiens
ctgggggaagaatagatacatgcaatagggtct

SEQ ID NO: 20021 - DNA, 33 bp, Homo sapiens
aaataaacataatcaataaaggaagcggctttg

SEQ ID NO: 20022 - DNA, 33 bp, Homo sapiens
taagtcataaaggatgtatagcacacaaaagac

SEQ ID NO: 20023 - DNA, 33 bp, Homo sapiens
tttccagaggtttggatgattatgcggggagca

SEQ ID NO: 20024 - DNA, 33 bp, Homo sapiens
ggctctagggaggaatgaagagtggtcaagtgc

SEQ ID NO: 20025 - DNA, 33 bp, Homo sapiens
tcagtcagtgttgctataaatctaggcacctgt

SEQ ID NO: 20026 - DNA, 33 bp, Homo sapiens
atctgaaatgtgtgaacaaatagtaaatattta

SEQ ID NO: 20027 - DNA, 33 bp, Homo sapiens
aggcactagctcatcataaatattagctattac

SEQ ID NO: 20028 - DNA, 33 bp, Homo sapiens
ctctgcaatgattagattcccaagaaaaggtca

SEQ ID NO: 20029 - DNA, 33 bp, Homo sapiens
tgacgctattgtgttatctgccaggttcctctt

SEQ ID NO: 20030 - DNA, 33 bp, Homo sapiens
agtgtctggtaatgaggcataagttaaatgcca

SEQ ID NO: 20031 - DNA, 33 bp, Homo sapiens
tattatctgagaataaggatgccttacaacagt

SEQ ID NO: 20032 - DNA, 33 bp, Homo sapiens
ggagagaagattgtactaatagttcgtctctgg

SEQ ID NO: 20033 - DNA, 33 bp, Homo sapiens
cttctttgcacttatctatttctagggacagat

SEQ ID NO: 20034 - DNA, 51 bp, Homo sapiens
gccttgcccctctacttgacagccagtgaagagcacagacttgggagccac

SEQ ID NO: 20035 - DNA, 33 bp, Homo sapiens
tgagttatgagtccactaccacctccaaaactt

SEQ ID NO: 20036 - DNA, 33 bp, Homo sapiens
atagtggtgacaaagatgtttgattcacaaaga

SEQ ID NO: 20037 - DNA, 33 bp, Homo sapiens
ggaaagatagcgaaaaggttgttactatcacac

SEQ ID NO: 20038 - DNA, 33 bp, Homo sapiens
acgccatgagaatttatgcttggcttagtgttc

SEQ ID NO: 20039 - DNA, 33 bp, Homo sapiens
gccaaggcagagacaattggcgagctcgctcag

SEQ ID NO: 20040 - DNA, 33 bp, Homo sapiens
gcagccctacaagagggaaagagtcagtcctgg

SEQ ID NO: 20041 - DNA, 33 bp, Homo sapiens
ttcatatttaaagcccggattcaaagaaccaaa

SEQ ID NO: 20042 - DNA, 33 bp, Homo sapiens
gaacccaccaatttcggacacaacttcactcct

SEQ ID NO: 20043 - DNA, 33 bp, Homo sapiens
cattgctaagcccccataggaccgtggaagggg

SEQ ID NO: 20044 - DNA, 33 bp, Homo sapiens
cctgatgtctttgaaaggtgttctgggcaagct

SEQ ID NO: 20045 - DNA, 33 bp, Homo sapiens
tcacaaaaccagaatctcattgaacttccgcaa

SEQ ID NO: 20046 - DNA, 33 bp, Homo sapiens
gcttctgtctccctaattcagtgcaggccacaa

SEQ ID NO: 20047 - DNA, 33 bp, Homo sapiens
agatcagtgcctgacatattgtggacattccat

SEQ ID NO: 20048 - DNA, 33 bp, Homo sapiens
ggaggacctcatgatcgctaactggaggagatg

SEQ ID NO: 20049 - DNA, 33 bp, Homo sapiens
gaaggaagaccagtaatgctggagggcagtgag

SEQ ID NO: 20050 - DNA, 33 bp, Homo sapiens
gcagaccttttttgtcgctcacatatacattaa

SEQ ID NO: 20051 - DNA, 33 bp, Homo sapiens
tgtggaagacagggacgggtcagcttggccaag

SEQ ID NO: 20052 - DNA, 33 bp, Homo sapiens
tcctgagttctttccagaggacgcgcatcccaa

SEQ ID NO: 20053 - DNA, 51 bp, Homo sapiens
aatcagccataggttcccaaggaatgaaattgataggaaaagctatctaga

SEQ ID NO: 20054 - DNA, 33 bp, Homo sapiens
agtgctcacgaaaagatgaacacacataagcac

SEQ ID NO: 20055 - DNA, 33 bp, Homo sapiens
acactttcctgaaacatctgcttggcttgttcc

SEQ ID NO: 20056 - DNA, 33 bp, Homo sapiens
ccctggatctggaaagtagacagcccaggtgct

SEQ ID NO: 20057 - DNA, 33 bp, Homo sapiens
gatggagggcagtggagtagcggagagtagtgg

SEQ ID NO: 20058 - DNA, 33 bp, Homo sapiens
ccatcccatctaccaagcccctcaagtcccagg

SEQ ID NO: 20059 - DNA, 33 bp, Homo sapiens
tttctccttgacagcatgaaaatgttctaaaac

SEQ ID NO: 20060 - DNA, 33 bp, Homo sapiens
atagctgggtactcactagggcccatctttttt

SEQ ID NO: 20061 - DNA, 33 bp, Homo sapiens
agagttagtgacatgctcatagaaaaccaagca

SEQ ID NO: 20062 - DNA, 33 bp, Homo sapiens
aaaatccaggcttctcgatatgatctagcccct

SEQ ID NO: 20063 - DNA, 33 bp, Homo sapiens
atggtgacaacagtaataataatatggtgataa

SEQ ID NO: 20064 - DNA, 33 bp, Homo sapiens
gttcatccacttggtatcttttttctagtgtaa

SEQ ID NO: 20065 - DNA, 33 bp, Homo sapiens
aggtataaaatttgccgcaggagactgatctta

SEQ ID NO: 20066 - DNA, 33 bp, Homo sapiens
tgaattttcccacagatgttgcagattttatta

SEQ ID NO: 20067 - DNA, 33 bp, Homo sapiens
tgagactgcgtcgttggatttagcttaagttgt

SEQ ID NO: 20068 - DNA, 33 bp, Homo sapiens
cagcacttctcagtacgaattacagaggctgaa

SEQ ID NO: 20069 - DNA, 33 bp, Homo sapiens
ctacgcacccaacaaatgtttatttccttcact

SEQ ID NO: 20070 - DNA, 33 bp, Homo sapiens
cttgcagacagttacagaggtcacatatatagc

SEQ ID NO: 20071 - DNA, 33 bp, Homo sapiens
aagcagaaccaacgaagagagagaaactgaatt

SEQ ID NO: 20072 - DNA, 33 bp, Homo sapiens
cctggttttgattatatgccctgccccttggct

SEQ ID NO: 20073 - DNA, 33 bp, Homo sapiens
ctgattgaccagagtctgaatccaaagtctccc

SEQ ID NO: 20074 - DNA, 33 bp, Homo sapiens
gaactctgaaccacacggatgcaagaccatttc

SEQ ID NO: 20075 - DNA, 33 bp, Homo sapiens
tttaaagtatactgcatagattattttcaaata

SEQ ID NO: 20076 - DNA, 33 bp, Homo sapiens
gcaaatgattttaaaagtgcgtaatgcaaagga

SEQ ID NO: 20077 - DNA, 51 bp, Homo sapiens
atatccggtgtgttacaacacatgcgattagcaaagatattcaaactcatg

SEQ ID NO: 20078 - DNA, 33 bp, Homo sapiens
tgctgaaaaaaagtaactcgtgtgcatgaattc

SEQ ID NO: 20079 - DNA, 33 bp, Homo sapiens
cacattttggtcctcaggaaggaagaaagatgg

SEQ ID NO: 20080 - DNA, 33 bp, Homo sapiens
cccgggtgccactgacggggccggtgaaggaaa

SEQ ID NO: 20081 - DNA, 33 bp, Homo sapiens
gttctcgtcgcccagctaggtgccattggggta

SEQ ID NO: 20082 - DNA, 33 bp, Homo sapiens
atgggctaactacttatggtgcactcaggctaa

SEQ ID NO: 20083 - DNA, 33 bp, Homo sapiens
aaggtcctattatgcagggttggtttccagtaa

SEQ ID NO: 20084 - DNA, 33 bp, Homo sapiens
aggaaaacaaaccacattgatacaaagaccaag

SEQ ID NO: 20085 - DNA, 33 bp, Homo sapiens
ttattctgtgaactcagcttatctggttctttc

SEQ ID NO: 20086 - DNA, 33 bp, Homo sapiens
gcccaactactcaacccaccacctagcacaacc

SEQ ID NO: 20087 - DNA, 33 bp, Homo sapiens
ctgcagactggtaacgtacacttggcagggtgc

SEQ ID NO: 20088 - DNA, 33 bp, Homo sapiens
ttaacctgcatatatacctatcactgtaatact

SEQ ID NO: 20089 - DNA, 33 bp, Homo sapiens
tgcttatgttgtaccaggttatatgatgttgcc

SEQ ID NO: 20090 - DNA, 33 bp, Homo sapiens
gatggcagcaggaatagagaggtaggcaaggta

SEQ ID NO: 20091 - DNA, 33 bp, Homo sapiens
cccagccgatctggcagacttctcatccttcaa

SEQ ID NO: 20092 - DNA, 33 bp, Homo sapiens
acagctttatcaggtataatatccttggttggc

SEQ ID NO: 20093 - DNA, 33 bp, Homo sapiens
aaagagagaaaggcacgagtcaggatttgggtt

SEQ ID NO: 20094 - DNA, 33 bp, Homo sapiens
ggccacacacagtggacgaagggtagtttctga

SEQ ID NO: 20095 - DNA, 33 bp, Homo sapiens
gatcagtgaagcctcagctaccccacgggttct

SEQ ID NO: 20096 - DNA, 33 bp, Homo sapiens
ctatggcgaccaatagtaataggaccacaccta

SEQ ID NO: 20097 - DNA, 33 bp, Homo sapiens
cggcccctggccagcagacgaatcagaaggaaa

SEQ ID NO: 20098 - DNA, 33 bp, Homo sapiens
tggttcatcctattaatgggagcagtacaaaac

SEQ ID NO: 20099 - DNA, 33 bp, Homo sapiens
ttattccagttgctcctctcattgtgaatatgg

SEQ ID NO: 20100 - DNA, 33 bp, Homo sapiens
accaagacacagaggatagaagtaacttgttca

SEQ ID NO: 20101 - DNA, 33 bp, Homo sapiens
ttcaaggggacataaccgtaggtggccgtgcca

SEQ ID NO: 20102 - DNA, 33 bp, Homo sapiens
cacccatgaacccatcgctcaactcaagaacta

SEQ ID NO: 20103 - DNA, 51 bp, Homo sapiens
atgaattttatttaatccttgaggacatggttcttttctcacacacataaa

SEQ ID NO: 20104 - DNA, 33 bp, Homo sapiens
gagtctgctaccttcctaccctgagtctgtatg

SEQ ID NO: 20105 - DNA, 33 bp, Homo sapiens
ctatacaggaccattctcgtgaaaagttgaaag

SEQ ID NO: 20106 - DNA, 33 bp, Homo sapiens
taccttttagactttgtaggaaataacagtaca

SEQ ID NO: 20107 - DNA, 33 bp, Homo sapiens
gcatcttcctcgcagacaagtcactcccattat

SEQ ID NO: 20108 - DNA, 33 bp, Homo sapiens
ttggaacttgctaccttacctcacagtccctca

SEQ ID NO: 20109 - DNA, 33 bp, Homo sapiens
caggactttgtttgggtagcgtgttaagttagc

SEQ ID NO: 20110 - DNA, 33 bp, Homo sapiens
tcacattacaaaatccggaaccatttaacctag

SEQ ID NO: 20111 - DNA, 33 bp, Homo sapiens
tgagctggcaaatcaagtctcatatgcatgagt

SEQ ID NO: 20112 - DNA, 33 bp, Homo sapiens
tggctatcataacatagaagtcctagagctctg

SEQ ID NO: 20113 - DNA, 33 bp, Homo sapiens
tcaaccaggagtaaagtcttcttagcaactaag

SEQ ID NO: 20114 - DNA, 33 bp, Homo sapiens
gagagaaaactggagagattagaataacgggtt

SEQ ID NO: 20115 - DNA, 33 bp, Homo sapiens
ttggaaatgctggaaatcacaatggcagaacca

SEQ ID NO: 20116 - DNA, 33 bp, Homo sapiens
ggggagatgggtttgagtacataggcaacagca

SEQ ID NO: 20117 - DNA, 33 bp, Homo sapiens
atatgtatagtagcactggacaaatagtaaata

SEQ ID NO: 20118 - DNA, 33 bp, Homo sapiens
ggattacaggaaaatataggacctatgccctgt

SEQ ID NO: 20119 - DNA, 33 bp, Homo sapiens
agaatatcacacatcagaaggttgtcagcctag

SEQ ID NO: 20120 - DNA, 33 bp, Homo sapiens
ttttcccatgagagccgaacactgcatccaaaa

SEQ ID NO: 20121 - DNA, 33 bp, Homo sapiens
ctcctaaggaaaccaagctcacaatagtaatac

SEQ ID NO: 20122 - DNA, 33 bp, Homo sapiens
tgtgattcacatgacagtatgatgtaagctttt

SEQ ID NO: 20123 - DNA, 33 bp, Homo sapiens
caactcatccagtaacgcagatttttatctgga

SEQ ID NO: 20124 - DNA, 33 bp, Homo sapiens
ctgtctttggccaccatggattgcctgagcaaa

SEQ ID NO: 20125 - DNA, 33 bp, Homo sapiens
ttgcctgcattccttatcttcctgtttcaaggc

SEQ ID NO: 20126 - DNA, 33 bp, Homo sapiens
ctactgtgtcatcaaatcttagcaattagcctc

SEQ ID NO: 20127 - DNA, 33 bp, Homo sapiens
tatgactacttctcacgctgagctcacatactc

SEQ ID NO: 20128 - DNA, 33 bp, Homo sapiens
acatttccatcttccagtgcttctattgatggc

SEQ ID NO: 20129 - DNA, 33 bp, Homo sapiens
agagattcggatgtaaggaattagagagcccct

SEQ ID NO: 20130 - DNA, 33 bp, Homo sapiens
tccaaacatttaggaagggagttaaatgcagtc

SEQ ID NO: 20131 - DNA, 33 bp, Homo sapiens
gatgtgtaagttacaagacaaaaatgcatcttt

SEQ ID NO: 20132 - DNA, 33 bp, Homo sapiens
ttactaaaattcacaatgtcagctaaaacatga

SEQ ID NO: 20133 - DNA, 33 bp, Homo sapiens
acaaaacagataaaaatcctagaaatgagacat

SEQ ID NO: 20134 - DNA, 33 bp, Homo sapiens
caatgtattgatcagcgcaatgaaacataattt

SEQ ID NO: 20135 - DNA, 33 bp, Homo sapiens
gtggttagtccgtccagtctcggcactccactt

SEQ ID NO: 20136 - DNA, 33 bp, Homo sapiens
gttgtcctatagttaataatgatcctcagacaa

SEQ ID NO: 20137 - DNA, 51 bp, Homo sapiens
ttcagagactaagtgtctccagtacgacaaggtgcatttggttcctttgaa

SEQ ID NO: 20138 - DNA, 33 bp, Homo sapiens
tcttcttctgagagacggcatatgacccactga

SEQ ID NO: 20139 - DNA, 33 bp, Homo sapiens
agcactgaaacactcatccatggttggaagccc

SEQ ID NO: 20140 - DNA, 33 bp, Homo sapiens
tacaggcatatttcacggaatacatagtagaaa

SEQ ID NO: 20141 - DNA, 33 bp, Homo sapiens
tccataaagaaatccatagtggctgggtacagc

SEQ ID NO: 20142 - DNA, 33 bp, Homo sapiens
cacagtgaagatgtgaggtgttggtaagtaccc

SEQ ID NO: 20143 - DNA, 33 bp, Homo sapiens
ggatggctgccaagtcgcaagcattttacaaca

SEQ ID NO: 20144 - DNA, 33 bp, Homo sapiens
ttagatttactgataagaacaagcctaaatact

SEQ ID NO: 20145 - DNA, 33 bp, Homo sapiens
ccccatgcttggaggagctcattgacattgtcg

SEQ ID NO: 20146 - DNA, 33 bp, Homo sapiens
gtccctgaggctggaatgggcttaatgtcgtgg

SEQ ID NO: 20147 - DNA, 33 bp, Homo sapiens
caatgttaactcacaggacagactataagacac

SEQ ID NO: 20148 - DNA, 33 bp, Homo sapiens
gcattcgtctttgctcgaacaatgccccatcaa

SEQ ID NO: 20149 - DNA, 33 bp, Homo sapiens
tgtttttaaatcagattacaccctgaggttctg

SEQ ID NO: 20150 - DNA, 51 bp, Homo sapiens
atggataactgagaggcatacgcaaggtgcggcaatcagtttctagtacag

SEQ ID NO: 20151 - DNA, 33 bp, Homo sapiens
cctgggtctatgtgcatgccgctatgctcgggt

SEQ ID NO: 20152 - DNA, 33 bp, Homo sapiens
ccatcttctctgtcaaggttgactaagttaaca

SEQ ID NO: 20153 - DNA, 33 bp, Homo sapiens
ggcaaatgaaaaagaggaaaatcatcagggata

SEQ ID NO: 20154 - DNA, 33 bp, Homo sapiens
ctaacaaggaataatacctggcctttgtttata

SEQ ID NO: 20155 - DNA, 33 bp, Homo sapiens
agtcaaaccctttttcgctattaacatgatatt

SEQ ID NO: 20156 - DNA, 33 bp, Homo sapiens
cttttgcaaaaaatcttaagcaagaggcagaaa

SEQ ID NO: 20157 - DNA, 33 bp, Homo sapiens
gaggcactgctgtgtacgtggtattgttattac

SEQ ID NO: 20158 - DNA, 33 bp, Homo sapiens
ggtgcactgtgaaagctgaggaaatcaggagat

SEQ ID NO: 20159 - DNA, 33 bp, Homo sapiens
acactgacagtgagtccatatctcagctgatat

SEQ ID NO: 20160 - DNA, 33 bp, Homo sapiens
tctctccttgagaggctatgcggcaacgtgctc

SEQ ID NO: 20161 - DNA, 33 bp, Homo sapiens
gttagttgcaattgtgtcaagagaagggcatgg

SEQ ID NO: 20162 - DNA, 33 bp, Homo sapiens
ctttttagctgttaagtagggatgccaatcact

SEQ ID NO: 20163 - DNA, 33 bp, Homo sapiens
tagagcaaattgaacagagagaatagtgcaaaa

SEQ ID NO: 20164 - DNA, 33 bp, Homo sapiens
tcatcgggtcttcccagtaacctctaaggtagt

SEQ ID NO: 20165 - DNA, 33 bp, Homo sapiens
tgaactggtcaggtactgattcatctatgatat

SEQ ID NO: 20166 - DNA, 51 bp, Homo sapiens
ccactgtctttcaccagagatgaaattaacaatgtactcaatgtcatctag

SEQ ID NO: 20167 - DNA, 33 bp, Homo sapiens
gggaactagataacctgagaacctgctggccac

SEQ ID NO: 20168 - DNA, 33 bp, Homo sapiens
cctgttcactccagtatctattctgttctcagg

SEQ ID NO: 20169 - DNA, 33 bp, Homo sapiens
gtcttgtggtctgcaatgcctaaggtccatgca

SEQ ID NO: 20170 - DNA, 33 bp, Homo sapiens
tacacttatattccacgaagagaacaactttta

SEQ ID NO: 20171 - DNA, 51 bp, Homo sapiens
tcagagccttcacatttatccgttatactacttcccaactcaatgtgctat

SEQ ID NO: 20172 - DNA, 33 bp, Homo sapiens
ttctccccagcccttctcatcgcagggaataat

SEQ ID NO: 20173 - DNA, 33 bp, Homo sapiens
tcttgttcattataggtcaaaatggttaaaacc

SEQ ID NO: 20174 - DNA, 51 bp, Homo sapiens
ttggccagctctcttgagtgcctttgaagatttccggcttctctcatccgg

SEQ ID NO: 20175 - DNA, 33 bp, Homo sapiens
aatggttctactcttctactggagaaaacagaa

SEQ ID NO: 20176 - DNA, 33 bp, Homo sapiens
gcactacctggcatacgataggtacataataaa

SEQ ID NO: 20177 - DNA, 33 bp, Homo sapiens
ctttcctgctggaaactgacttgatacacagac

SEQ ID NO: 20178 - DNA, 51 bp, Homo sapiens
tcttccacactgaaggtacagatcctgcacttgccaggccaggacactgaa

SEQ ID NO: 20179 - DNA, 33 bp, Homo sapiens
ggaggtcatattttgcgatctgagctgaagagg

SEQ ID NO: 20180 - DNA, 33 bp, Homo sapiens
tcaggtaagacctgcggaagaactgaaggaagc

SEQ ID NO: 20181 - DNA, 33 bp, Homo sapiens
cttcagcttatgagacgaaaatgctgccagctg

SEQ ID NO: 20182 - DNA, 33 bp, Homo sapiens
aagaatattcaaaagcgcaattcaaccagacga

SEQ ID NO: 20183 - DNA, 33 bp, Homo sapiens
accttatcattattcagaaggtagagttctgga

SEQ ID NO: 20184 - DNA, 33 bp, Homo sapiens
ggtagcatagtagatatcattatggttattgtt

SEQ ID NO: 20185 - DNA, 33 bp, Homo sapiens
gttgtttttaaggagccatttacaggcagaagg

SEQ ID NO: 20186 - DNA, 33 bp, Homo sapiens
tcttgatatgacattattaatgctgccaagaaa

SEQ ID NO: 20187 - DNA, 33 bp, Homo sapiens
ttggattatgttttcattcaaagaccagcatat

SEQ ID NO: 20188 - DNA, 33 bp, Homo sapiens
gtgcagtgaccgcggagtaagctatcaccccat

SEQ ID NO: 20189 - DNA, 33 bp, Homo sapiens
gtcactacctgatgaacgagtgagatttacttt

SEQ ID NO: 20190 - DNA, 33 bp, Homo sapiens
acagctgcaggtcagagaatgcggggagaggac

SEQ ID NO: 20191 - DNA, 33 bp, Homo sapiens
ttctcaagatttaggattcacctgacactaaac

SEQ ID NO: 20192 - DNA, 33 bp, Homo sapiens
ctgccacagctctgccgcgggagaaaggccctg

SEQ ID NO: 20193 - DNA, 33 bp, Homo sapiens
ttgtcatcactttaccgggctgtcaggagcatc

SEQ ID NO: 20194 - DNA, 33 bp, Homo sapiens
tgtgtctgctatagagtcaaatgacccaataag

SEQ ID NO: 20195 - DNA, 33 bp, Homo sapiens
ctgtaattggtaagaatttctgggtgggcaccc

SEQ ID NO: 20196 - DNA, 33 bp, Homo sapiens
agtgaaagaaaacaacgatggcttagacaagag

SEQ ID NO: 20197 - DNA, 33 bp, Homo sapiens
ctaggactggttaacagtggtaaagaaaatgca

SEQ ID NO: 20198 - DNA, 33 bp, Homo sapiens
gggttgtaggtacttatggcattgagagctctg

SEQ ID NO: 20199 - DNA, 33 bp, Homo sapiens
tcgctacggatccaggtcattcctgggtgagcc

SEQ ID NO: 20200 - DNA, 33 bp, Homo sapiens
agattagcccctgaaatgttgtattattcaaag

SEQ ID NO: 20201 - DNA, 33 bp, Homo sapiens
aagatgaaccaagaaagtaatctacctgctttt

SEQ ID NO: 20202 - DNA, 33 bp, Homo sapiens
ttaatttggcagaagcgagaagatcatttcagc

SEQ ID NO: 20203 - DNA, 33 bp, Homo sapiens
ggggataactcgagactatgggagatgagaata

SEQ ID NO: 20204 - DNA, 33 bp, Homo sapiens
ggaaatacatttcataggatgatagctcccaaa

SEQ ID NO: 20205 - DNA, 33 bp, Homo sapiens
ggcactcaatgactcatggaataataaagtatc

SEQ ID NO: 20206 - DNA, 33 bp, Homo sapiens
ctaaccataatccttggataaagaagaactgca

SEQ ID NO: 20207 - DNA, 51 bp, Homo sapiens
agtgggtgcttatagcaatactccagtgcaattcaaccatcatatgataag

SEQ ID NO: 20208 - DNA, 33 bp, Homo sapiens
ttaactcaggttttaatgttgaaagatagaatg

SEQ ID NO: 20209 - DNA, 33 bp, Homo sapiens
tagggtgaaattgtgatataatgattagggatg

SEQ ID NO: 20210 - DNA, 33 bp, Homo sapiens
atgggggtttctattagagggcttctactcttg

SEQ ID NO: 20211 - DNA, 33 bp, Homo sapiens
ctcacacacaaatacctataccctgtttccacc

SEQ ID NO: 20212 - DNA, 51 bp, Homo sapiens
tgatgtgatcatatggtagattacattgatagattttaaaccagccctgca

SEQ ID NO: 20213 - DNA, 33 bp, Homo sapiens
actggcatgaaacaaatttgtgattagaattct

SEQ ID NO: 20214 - DNA, 33 bp, Homo sapiens
caacgttattagcagcggaaaaaaacatgtgtc

SEQ ID NO: 20215 - DNA, 33 bp, Homo sapiens
ctcttcatttccagatgaattttagaagcagct

SEQ ID NO: 20216 - DNA, 33 bp, Homo sapiens
tgtatttagatattcatgttttctgacagaaac

SEQ ID NO: 20217 - DNA, 33 bp, Homo sapiens
tccttaagccctcatagagactccacaccctgg

SEQ ID NO: 20218 - DNA, 33 bp, Homo sapiens
tagattgagattatgcgacaccaatgtgtaaaa

SEQ ID NO: 20219 - DNA, 33 bp, Homo sapiens
attaaccactgatagacacttaggttgattctg

SEQ ID NO: 20220 - DNA, 33 bp, Homo sapiens
gggatgcgcataatgatatagtgatgaattcaa

SEQ ID NO: 20221 - DNA, 33 bp, Homo sapiens
tataatcaggctataagtagatatattccagaa

SEQ ID NO: 20222 - DNA, 33 bp, Homo sapiens
aagttcattccccacagtcacagcttctccagc

SEQ ID NO: 20223 - DNA, 33 bp, Homo sapiens
gtagaccgagggaacataatagagaaaccagaa

SEQ ID NO: 20224 - DNA, 33 bp, Homo sapiens
ggttctcaagcttagcgacacaatcatatcatc

SEQ ID NO: 20225 - DNA, 33 bp, Homo sapiens
tattccggcttgtactgaattactagaacaact

SEQ ID NO: 20226 - DNA, 33 bp, Homo sapiens
attcattgcaatcacagtcaaaatgtcgtcagg

SEQ ID NO: 20227 - DNA, 33 bp, Homo sapiens
tgtgccaaacctttacgcactttatattgcttt

SEQ ID NO: 20228 - DNA, 33 bp, Homo sapiens
aaaccagtcagatagatatggatgattagtgtc

SEQ ID NO: 20229 - DNA, 33 bp, Homo sapiens
tggaatctggaatggatatgatgtgacccaatg

SEQ ID NO: 20230 - DNA, 33 bp, Homo sapiens
cagacctttcatattcgccttcagccttcatca

SEQ ID NO: 20231 - DNA, 33 bp, Homo sapiens
tccaactattcaaacacaactgagatgcttgta

SEQ ID NO: 20232 - DNA, 33 bp, Homo sapiens
taaatcagaaatctgcgaatagaagatgtgttt

SEQ ID NO: 20233 - DNA, 33 bp, Homo sapiens
ataatgttttgtacaccagctgagttctaaagc

SEQ ID NO: 20234 - DNA, 33 bp, Homo sapiens
tctcgagagcatgaaagggggagagactgtctc

SEQ ID NO: 20235 - DNA, 33 bp, Homo sapiens
ggcttggtttggaaaagaatccatcacgagatg

SEQ ID NO: 20236 - DNA, 33 bp, Homo sapiens
ttctcactttcttgtctcgggagaatgaaattt

SEQ ID NO: 20237 - DNA, 33 bp, Homo sapiens
gatatatagtggtcattacaacactgtactcat

SEQ ID NO: 20238 - DNA, 33 bp, Homo sapiens
ttacagagctttttgataaattgcaatcctatg

SEQ ID NO: 20239 - DNA, 33 bp, Homo sapiens
ggtgctaaccaaaacctccttttctctcttact

SEQ ID NO: 20240 - DNA, 33 bp, Homo sapiens
ttcctcaaggagtttatggtcaggtaactgcat

SEQ ID NO: 20241 - DNA, 33 bp, Homo sapiens
cttgaggccaagctaagcattgctactggcctt

SEQ ID NO: 20242 - DNA, 33 bp, Homo sapiens
aatgccctcaaagtacggacagcaccatcttgc

SEQ ID NO: 20243 - DNA, 33 bp, Homo sapiens
tccactaggtgtaagacacttttataagccaca

SEQ ID NO: 20244 - DNA, 33 bp, Homo sapiens
atctggaggttaggtcgatgcagctaggtctgc

SEQ ID NO: 20245 - DNA, 33 bp, Homo sapiens
attggagttggaagtctgaagatgggagagaag

SEQ ID NO: 20246 - DNA, 33 bp, Homo sapiens
agtccctgttccctgatgattttatgggctgta

SEQ ID NO: 20247 - DNA, 51 bp, Homo sapiens
aaaatattttgcattgtaaaagatcgaaaacataaaggcttacttgacaaa

SEQ ID NO: 20248 - DNA, 33 bp, Homo sapiens
tggtttccttggccacgagtgtgaatacgagac

SEQ ID NO: 20249 - DNA, 33 bp, Homo sapiens
tgaataatatgggaaattgacctagtttgaaaa

SEQ ID NO: 20250 - DNA, 33 bp, Homo sapiens
gtggtcacatcacatcgaatgtgcctcctcatg

SEQ ID NO: 20251 - DNA, 33 bp, Homo sapiens
tctactgtgatttaatgatggactttaacatac

SEQ ID NO: 20252 - DNA, 33 bp, Homo sapiens
acaaaaagccaggaacgagggcaagtccatgga

SEQ ID NO: 20253 - DNA, 33 bp, Homo sapiens
gttttctgtttaaagcggaatgtttcgagagcc

SEQ ID NO: 20254 - DNA, 33 bp, Homo sapiens
gttgagaaggaggcaacataatcagtcatcagg

SEQ ID NO: 20255 - DNA, 33 bp, Homo sapiens
tacatcgttgcagatacctatagggggtgtgtc

SEQ ID NO: 20256 - DNA, 33 bp, Homo sapiens
cctgaatgtgcttgacgatgctcagagagtttt

SEQ ID NO: 20257 - DNA, 33 bp, Homo sapiens
tagctccccgcacatcgattcccttctgatgct

SEQ ID NO: 20258 - DNA, 33 bp, Homo sapiens
atcctatgcacaactcgcatggaattccccaag

SEQ ID NO: 20259 - DNA, 51 bp, Homo sapiens
actgattgaggctccactgtgtgaataactgtactttaacacacaatagag

SEQ ID NO: 20260 - DNA, 33 bp, Homo sapiens
gaaagagcaaggaaactagcgtaactggactgg

SEQ ID NO: 20261 - DNA, 33 bp, Homo sapiens
aaataacacactgtactgatgagttacaaatgt

SEQ ID NO: 20262 - DNA, 33 bp, Homo sapiens
tgcctctccatccttgcagcactactcaaccac

SEQ ID NO: 20263 - DNA, 51 bp, Homo sapiens
tctcagcagttttcctgagagtaccgccaaagtctcatcatatttgagagg

SEQ ID NO: 20264 - DNA, 51 bp, Homo sapiens
tgatagtccctgtttctttagtacgttccctgtctcactggtttggaggca

SEQ ID NO: 20265 - DNA, 33 bp, Homo sapiens
cctgatgtctcctttatgtgttcctcatccatt

SEQ ID NO: 20266 - DNA, 33 bp, Homo sapiens
aatttagtgtcttagcgatcggtacatgatggt

SEQ ID NO: 20267 - DNA, 33 bp, Homo sapiens
agtttgttagcagaacgagaagaaagttaaagt

SEQ ID NO: 20268 - DNA, 33 bp, Homo sapiens
ttatagacagctgtaagacaaaagtcagaataa

SEQ ID NO: 20269 - DNA, 33 bp, Homo sapiens
ctctagaaaatagtcatcctgatatacgatctg

SEQ ID NO: 20270 - DNA, 33 bp, Homo sapiens
cattctcctcttccacggacagaattcgttctt

SEQ ID NO: 20271 - DNA, 33 bp, Homo sapiens
catggcctcttggagatcaggaacgtttttgtt

SEQ ID NO: 20272 - DNA, 51 bp, Homo sapiens
ccagaaatatttctgagaatttcactaggacagacaaattaggactgtaaa

SEQ ID NO: 20273 - DNA, 33 bp, Homo sapiens
agggagcagagctagggccagtgtacccagaat

SEQ ID NO: 20274 - DNA, 33 bp, Homo sapiens
ctcaaagcaggaccaataaatatgacatgcctc

SEQ ID NO: 20275 - DNA, 33 bp, Homo sapiens
atggactctctctaaggaactcgctactctcca

SEQ ID NO: 20276 - DNA, 33 bp, Homo sapiens
tgccagctttacaagcgacagaatcaccaaaac

SEQ ID NO: 20277 - DNA, 33 bp, Homo sapiens
cagaactgtgagacgatacattcctgttgctct

SEQ ID NO: 20278 - DNA, 33 bp, Homo sapiens
taggaggacacagctctacaatctgggatagga

SEQ ID NO: 20279 - DNA, 33 bp, Homo sapiens
attgtggttgcaattcgcatttccctggtgacc

SEQ ID NO: 20280 - DNA, 33 bp, Homo sapiens
aataccagctgttaaatgtaatgagaaaatgta

SEQ ID NO: 20281 - DNA, 33 bp, Homo sapiens
ctggttgattttagaactatagcaccctatctt

SEQ ID NO: 20282 - DNA, 33 bp, Homo sapiens
ttgccttcatcattcattctgagccagtgactg

SEQ ID NO: 20283 - DNA, 33 bp, Homo sapiens
cccaggacagagctgacgccatccagagaccct

SEQ ID NO: 20284 - DNA, 33 bp, Homo sapiens
gacaagcaatgcagacgcaggcagaaggagaca

SEQ ID NO: 20285 - DNA, 33 bp, Homo sapiens
gtgttggcataaagcagacactcaacaggttat

SEQ ID NO: 20286 - DNA, 33 bp, Homo sapiens
atattgctgcttcctatcctctgtgtctttcct

SEQ ID NO: 20287 - DNA, 33 bp, Homo sapiens
ctaattacatgacatacaataataatgctcaga

SEQ ID NO: 20288 - DNA, 33 bp, Homo sapiens
cattgggtcgtaaccatagtcagaggttttgtt

SEQ ID NO: 20289 - DNA, 33 bp, Homo sapiens
tccagtcctaagaacatggcacctctcagcctt

SEQ ID NO: 20290 - DNA, 33 bp, Homo sapiens
ctagaacctagaaaaagagctcaccacagcaac

SEQ ID NO: 20291 - DNA, 33 bp, Homo sapiens
taaagcacacagactcgaagtaacttgcccagg

SEQ ID NO: 20292 - DNA, 33 bp, Homo sapiens
gactgaggttctaaagtcggaaattcacatcag

SEQ ID NO: 20293 - DNA, 33 bp, Homo sapiens
taatccctgaaatctatgaatgtgttacgttac

SEQ ID NO: 20294 - DNA, 33 bp, Homo sapiens
atgaagagcttccccagtgaacacatggcgtgc

SEQ ID NO: 20295 - DNA, 33 bp, Homo sapiens
aagttgatagaaattcgatttggggaagctagg

SEQ ID NO: 20296 - DNA, 33 bp, Homo sapiens
gtaatggttgaatgtatctgtgaacaaatttta

SEQ ID NO: 20297 - DNA, 33 bp, Homo sapiens
cactgttaaaggttctgaccatcctggcatcca

SEQ ID NO: 20298 - DNA, 33 bp, Homo sapiens
gcatttcctttaaaaatcggagcactgactttg

SEQ ID NO: 20299 - DNA, 33 bp, Homo sapiens
taacttcccaaatcaatgactcccagtttaaca

SEQ ID NO: 20300 - DNA, 33 bp, Homo sapiens
gaagatgaagcaaggaggagtattaggaggtgg

SEQ ID NO: 20301 - DNA, 33 bp, Homo sapiens
ctattcaacattcactgaacacaaatctagcta

SEQ ID NO: 20302 - DNA, 33 bp, Homo sapiens
cctcttataactgagccaataaggacaaaagct

SEQ ID NO: 20303 - DNA, 33 bp, Homo sapiens
tcagataaagagagaaggagaaatgtttaatcc

SEQ ID NO: 20304 - DNA, 33 bp, Homo sapiens
tcactggaggtcaaaacggttcacaagaggcag

SEQ ID NO: 20305 - DNA, 33 bp, Homo sapiens
ttctagattgtctacattggcctccaaaacatt

SEQ ID NO: 20306 - DNA, 33 bp, Homo sapiens
tcagcccctagattcagctcctatccgtgtaat

SEQ ID NO: 20307 - DNA, 33 bp, Homo sapiens
ctcagcaggattagtagcttttagatgcatgtg

SEQ ID NO: 20308 - DNA, 33 bp, Homo sapiens
agggaaaaaaaactccggcagacaaaactgtaa

SEQ ID NO: 20309 - DNA, 33 bp, Homo sapiens
atgaggggcagggatccatttgtttcatttctc

SEQ ID NO: 20310 - DNA, 33 bp, Homo sapiens
tttgtttgcatcattatgtaaggattctatgac

SEQ ID NO: 20311 - DNA, 33 bp, Homo sapiens
acattcattcattcaatggctatcttttgagac

SEQ ID NO: 20312 - DNA, 33 bp, Homo sapiens
gatacaattcgttttctcagattttacctatta

SEQ ID NO: 20313 - DNA, 33 bp, Homo sapiens
cacaccacaactctcatcattgcacccatggct

SEQ ID NO: 20314 - DNA, 33 bp, Homo sapiens
aatcaaccacttcacacgatacgatagagacac

SEQ ID NO: 20315 - DNA, 33 bp, Homo sapiens
ttaaagataatggaaggcaaagagaaatgtttg

SEQ ID NO: 20316 - DNA, 33 bp, Homo sapiens
aacatatttggaagacgagaaaatgaacccaga

SEQ ID NO: 20317 - DNA, 33 bp, Homo sapiens
ttcagactactactgagacaatcattttttgat

SEQ ID NO: 20318 - DNA, 33 bp, Homo sapiens
ttgaagctgaatgtgatatttgaactcaaatcc

SEQ ID NO: 20319 - DNA, 33 bp, Homo sapiens
gagtgtcatctttatcgaagtcaaaagtccagg

SEQ ID NO: 20320 - DNA, 33 bp, Homo sapiens
gccagagcaaatgaaatgacaaatgaaaaaccg

SEQ ID NO: 20321 - DNA, 33 bp, Homo sapiens
aggattcaaggaagaactcagagtggctagaat

SEQ ID NO: 20322 - DNA, 33 bp, Homo sapiens
actgtagtataacgtgtaactcatttgctccgt

SEQ ID NO: 20323 - DNA, 33 bp, Homo sapiens
gcaggattcaacatgatgggaagtttgaatatt

SEQ ID NO: 20324 - DNA, 33 bp, Homo sapiens
cattcccatgctagaaggaaaaaatccaactcc

SEQ ID NO: 20325 - DNA, 33 bp, Homo sapiens
ttggtggaataaaagcgcatgatcttgggacgc

SEQ ID NO: 20326 - DNA, 33 bp, Homo sapiens
acagagttctccacacggtgaatagctccgaga

SEQ ID NO: 20327 - DNA, 33 bp, Homo sapiens
taattatgaacaaaacgcagtagaataaacaca

SEQ ID NO: 20328 - DNA, 33 bp, Homo sapiens
catgcatcccatcttcgaccaggcgccggcagg

SEQ ID NO: 20329 - DNA, 33 bp, Homo sapiens
ccacccgtctcaaacattccaaaacacgtgtcc

SEQ ID NO: 20330 - DNA, 33 bp, Homo sapiens
gcctggtacccagcaggcaatcggcaaatgcct

SEQ ID NO: 20331 - DNA, 33 bp, Homo sapiens
aagagtccacaaactatagcctacaggtcaaat

SEQ ID NO: 20332 - DNA, 33 bp, Homo sapiens
atgtactggctttaactgaggggatttcctgct

SEQ ID NO: 20333 - DNA, 33 bp, Homo sapiens
aaagaaaactctgaagcatacagaaagagccga

SEQ ID NO: 20334 - DNA, 33 bp, Homo sapiens
aaaaacagctcaaataggtcaaaggaggcccac

SEQ ID NO: 20335 - DNA, 33 bp, Homo sapiens
gatctcaaacaacctagtacctcagatgaacta

SEQ ID NO: 20336 - DNA, 33 bp, Homo sapiens
taacatttggggaaaatgattggctaatcaaaa

SEQ ID NO: 20337 - DNA, 33 bp, Homo sapiens
gactattttcctgaaataaaacaggcacacaac

SEQ ID NO: 20338 - DNA, 33 bp, Homo sapiens
tgaggccaaaaaataagataggaagtgcttgga

SEQ ID NO: 20339 - DNA, 33 bp, Homo sapiens
aatacagtcactacaactggtttacaaaactca

SEQ ID NO: 20340 - DNA, 33 bp, Homo sapiens
atatgcataaggattcgatgctttgtctgtttt

SEQ ID NO: 20341 - DNA, 33 bp, Homo sapiens
gtcaagtcagtgtggattcaactctatttttat

SEQ ID NO: 20342 - DNA, 33 bp, Homo sapiens
gcttgtgacagtaaacgcagaacttgaggccag

SEQ ID NO: 20343 - DNA, 33 bp, Homo sapiens
tgttctgtgcaaaagctcaacatgaacctatat

SEQ ID NO: 20344 - DNA, 33 bp, Homo sapiens
tagcatggtataaaaacttctctccaactatga

SEQ ID NO: 20345 - DNA, 33 bp, Homo sapiens
aatatcatgactatcattgaagcttggagtagc

SEQ ID NO: 20346 - DNA, 51 bp, Homo sapiens
ttcgtggggagaaagacatgtaatatggaaaacagaagggcacacaggagg

SEQ ID NO: 20347 - DNA, 33 bp, Homo sapiens
taatcataaagcagcatatttccaagctctgaa

SEQ ID NO: 20348 - DNA, 33 bp, Homo sapiens
ttctcttgcctacttcgagtcccagagaatggg

SEQ ID NO: 20349 - DNA, 33 bp, Homo sapiens
tcttgaacactcaccagcgactgcaaatatgtc

SEQ ID NO: 20350 - DNA, 33 bp, Homo sapiens
tgccaaaaacatcaaacaatagtagacttagga

SEQ ID NO: 20351 - DNA, 33 bp, Homo sapiens
aaatagatgttccagttaaagaagctgttttat

SEQ ID NO: 20352 - DNA, 33 bp, Homo sapiens
aagtagaatgctaagacgttcgtaagtttttaa

SEQ ID NO: 20353 - DNA, 33 bp, Homo sapiens
tacaatggtctgaagatgacaaaaaaatgcttg

SEQ ID NO: 20354 - DNA, 33 bp, Homo sapiens
agtttggggtgcagtatctgttttggatgcttg

SEQ ID NO: 20355 - DNA, 33 bp, Homo sapiens
ttattagagttgtcgatgaaaaaaatctaactt

SEQ ID NO: 20356 - DNA, 33 bp, Homo sapiens
ttcattctcaagatcagcttttccttgtccctt

SEQ ID NO: 20357 - DNA, 33 bp, Homo sapiens
gtacgtgagttctagcgagatgccagagaatcc

SEQ ID NO: 20358 - DNA, 33 bp, Homo sapiens
agcagctaaatatgaagagagagcagaagacac

SEQ ID NO: 20359 - DNA, 33 bp, Homo sapiens
tttaacctccttgctagtaatcaatgtgattca

SEQ ID NO: 20360 - DNA, 33 bp, Homo sapiens
atgaatagaaaaatcagactgctagaacctcca

SEQ ID NO: 20361 - DNA, 33 bp, Homo sapiens
aaacagtctaggtacattgaagaaaacacatct

SEQ ID NO: 20362 - DNA, 33 bp, Homo sapiens
ccaggaccaatggacagaatctgcaaggaggca

SEQ ID NO: 20363 - DNA, 33 bp, Homo sapiens
gcaaggatgtttcctggataatgtgcactgagc

SEQ ID NO: 20364 - DNA, 33 bp, Homo sapiens
tcctgttttcaagatggagtggactctctttta

SEQ ID NO: 20365 - DNA, 51 bp, Homo sapiens
aaggtctatgttctgaaaggaataataggatactttgttaagtgaatggtg

SEQ ID NO: 20366 - DNA, 33 bp, Homo sapiens
tcactatcttttggaatttactgtgacagagga

SEQ ID NO: 20367 - DNA, 33 bp, Homo sapiens
atctaagcatgaaggagaccctagaatttgcac

SEQ ID NO: 20368 - DNA, 33 bp, Homo sapiens
aacaaccagaagatcatgagctaaaccaataaa

SEQ ID NO: 20369 - DNA, 33 bp, Homo sapiens
aaaatcagaacatatacctctaagggaaaaagg

SEQ ID NO: 20370 - DNA, 33 bp, Homo sapiens
cctagagaaacctgcacacttgtgtctccacct

SEQ ID NO: 20371 - DNA, 33 bp, Homo sapiens
tatctcttgaccatgctattgattagttatgtg

SEQ ID NO: 20372 - DNA, 33 bp, Homo sapiens
ttgttgctgtatcccattccaactcatttgatc

SEQ ID NO: 20373 - DNA, 33 bp, Homo sapiens
gtcattatggatcttatataaacaagaaataaa

SEQ ID NO: 20374 - DNA, 33 bp, Homo sapiens
ttaggtgttatgatgctaatttgcccacacatt

SEQ ID NO: 20375 - DNA, 33 bp, Homo sapiens
gaaaagggggctgggatacgttggtgatttttt

SEQ ID NO: 20376 - DNA, 33 bp, Homo sapiens
atggagtcttccatccgctggtaaaatctggaa

SEQ ID NO: 20377 - DNA, 33 bp, Homo sapiens
attttcaagaatcctcgtacaaattgtccaggg

SEQ ID NO: 20378 - DNA, 33 bp, Homo sapiens
taatttcttcatcctacaactctagctcctagc

SEQ ID NO: 20379 - DNA, 51 bp, Homo sapiens
tgtacattttaatccttattgccaaggtctcctaaaactgtgtatgaaaca

SEQ ID NO: 20380 - DNA, 33 bp, Homo sapiens
caggtcagccagttgggaacagagttgacggag

SEQ ID NO: 20381 - DNA, 33 bp, Homo sapiens
agaacgagagctcatatggcatccacgcgtgtc

SEQ ID NO: 20382 - DNA, 51 bp, Homo sapiens
aaatatcttccccacgatttctacttagcttcaaactctcagtgggtctat

SEQ ID NO: 20383 - DNA, 33 bp, Homo sapiens
tcagtgtggcccagatcaacctgtcccttcttt

SEQ ID NO: 20384 - DNA, 33 bp, Homo sapiens
atagtgatcaccataagtcaaggaaaatccaga

SEQ ID NO: 20385 - DNA, 33 bp, Homo sapiens
gacttcctctgccaccggaataaaggaatagag

SEQ ID NO: 20386 - DNA, 33 bp, Homo sapiens
cctcctcaattccatacgcagagattcggagtg

SEQ ID NO: 20387 - DNA, 33 bp, Homo sapiens
gaagagaggaagggaatgttggaaccaatgctg

SEQ ID NO: 20388 - DNA, 33 bp, Homo sapiens
cactgcctggtcagtataagaagcacttctctg

SEQ ID NO: 20389 - DNA, 33 bp, Homo sapiens
gaagataaaagagttatcagaactgagcagaga

SEQ ID NO: 20390 - DNA, 33 bp, Homo sapiens
agagtctgtgctttgcgctttctggctttgtga

SEQ ID NO: 20391 - DNA, 33 bp, Homo sapiens
ttccaagcctaagacatgtgctgtttctatgct

SEQ ID NO: 20392 - DNA, 33 bp, Homo sapiens
tgggggttcgttacatgaagttgtggggtctgt

SEQ ID NO: 20393 - DNA, 33 bp, Homo sapiens
tcagcatcttttgttatacccgaagtgcattcc

SEQ ID NO: 20394 - DNA, 33 bp, Homo sapiens
actgtcctcattttcaggctgaagaaccaagct

SEQ ID NO: 20395 - DNA, 33 bp, Homo sapiens
tgagaatattttcaccccggaaattggcacatg

SEQ ID NO: 20396 - DNA, 33 bp, Homo sapiens
ttgttataggttgaatcatgtcccgaagaatat

SEQ ID NO: 20397 - DNA, 33 bp, Homo sapiens
gatgctgttcctctcacgtgggaaaaatttggt

SEQ ID NO: 20398 - DNA, 51 bp, Homo sapiens
gtagtgtatattataatacatagtcgccaatatgccaattggctcgcagac

SEQ ID NO: 20399 - DNA, 51 bp, Homo sapiens
ctgcccagttcatccagtccatacctatgtttcctttagggctcatcctgc

SEQ ID NO: 20400 - DNA, 33 bp, Homo sapiens
atagaatgcaaactttgaaaaagacataccttt

SEQ ID NO: 20401 - DNA, 33 bp, Homo sapiens
gggagaaggtaagtcatggaggattcgagccag

SEQ ID NO: 20402 - DNA, 33 bp, Homo sapiens
atcaacattttatagacaggaaccagtggcttc

SEQ ID NO: 20403 - DNA, 33 bp, Homo sapiens
gaatagattttcagaagagagaaacgcagatga

SEQ ID NO: 20404 - DNA, 33 bp, Homo sapiens
acaatgccactgaacagctttcattgtctatgt

SEQ ID NO: 20405 - DNA, 33 bp, Homo sapiens
ccccaaaggatttgaatcttcccaggcatgggg

SEQ ID NO: 20406 - DNA, 33 bp, Homo sapiens
gggaccaaagactatggaaagtgaacctggctg

SEQ ID NO: 20407 - DNA, 33 bp, Homo sapiens
atttgggggtgatgacggaacattttaattcac

SEQ ID NO: 20408 - DNA, 33 bp, Homo sapiens
tggtctctcatgtgtcgacatttaccaagcctt

SEQ ID NO: 20409 - DNA, 33 bp, Homo sapiens
tcccctctacacctgagagtctggaaaattctg

SEQ ID NO: 20410 - DNA, 33 bp, Homo sapiens
catcctgtaggccaaatgtagtgggttcaaatc

SEQ ID NO: 20411 - DNA, 33 bp, Homo sapiens
agaatagcattgatgttaatgaagaactaggaa

SEQ ID NO: 20412 - DNA, 33 bp, Homo sapiens
gtgtttttgctgaaagtcttgttagtttccttc

SEQ ID NO: 20413 - DNA, 33 bp, Homo sapiens
gcaaattcaagagaaatgtaatgatgggctaca

SEQ ID NO: 20414 - DNA, 33 bp, Homo sapiens
gtacatgatttattgaggatgtgcgttcagtag

SEQ ID NO: 20415 - DNA, 33 bp, Homo sapiens
tctttgggttctaacatctttggtacatgtgaa

SEQ ID NO: 20416 - DNA, 33 bp, Homo sapiens
tataattaaaccccacgatacgtaagagataaa

SEQ ID NO: 20417 - DNA, 33 bp, Homo sapiens
ggacttaattatcaaaggaagcgaggtgagcat

SEQ ID NO: 20418 - DNA, 33 bp, Homo sapiens
acagaggatgaccatatgaagaggcagcaaggg

SEQ ID NO: 20419 - DNA, 33 bp, Homo sapiens
tagttagtccaattgttaagtggcaaaaattag

SEQ ID NO: 20420 - DNA, 33 bp, Homo sapiens
atagtcagtacctcaaggtcacagagccagccg

SEQ ID NO: 20421 - DNA, 33 bp, Homo sapiens
accataaggaaacggagtacaaagaggcaaatt

SEQ ID NO: 20422 - DNA, 33 bp, Homo sapiens
atttggctaatgagaagacagatacttaaagag

SEQ ID NO: 20423 - DNA, 51 bp, Homo sapiens
tagctttgtagttctgcacccaaaatcattctcctcaggcgataaaatact

SEQ ID NO: 20424 - DNA, 51 bp, Homo sapiens
ggcctttaccacaaaatttgcattcccgacaatcactttaggcatgtctct

SEQ ID NO: 20425 - DNA, 33 bp, Homo sapiens
tctccctttcttcaaatactgcaaatccactaa

SEQ ID NO: 20426 - DNA, 33 bp, Homo sapiens
gatggccccatgtgatcaagaaccatgcaacag

SEQ ID NO: 20427 - DNA, 33 bp, Homo sapiens
gctgcccagagtaagagtaggtgtagcactgtg

SEQ ID NO: 20428 - DNA, 33 bp, Homo sapiens
tgtggctcattttacctagaacacagaagagag

SEQ ID NO: 20429 - DNA, 33 bp, Homo sapiens
catacaagagctggacgagatgactcacaccta

SEQ ID NO: 20430 - DNA, 33 bp, Homo sapiens
cagagctgtcaagggctagaagaatataattaa

SEQ ID NO: 20431 - DNA, 33 bp, Homo sapiens
ctggctgagaagcagagaaatgaaaaaacattt

SEQ ID NO: 20432 - DNA, 33 bp, Homo sapiens
ctgcggctgcccctaagaggacagattgttgct

SEQ ID NO: 20433 - DNA, 33 bp, Homo sapiens
ataacaccttcaattagacagaaaccaggacaa

SEQ ID NO: 20434 - DNA, 33 bp, Homo sapiens
gtatacatagaattcatccattgtatgcagcat

SEQ ID NO: 20435 - DNA, 33 bp, Homo sapiens
cagtccaggctacaaagagtagaagaattgccc

SEQ ID NO: 20436 - DNA, 33 bp, Homo sapiens
cgttcctagccttgactctgtaacagatttctt

SEQ ID NO: 20437 - DNA, 33 bp, Homo sapiens
ataatacgacaacttaggagaaactatttactt

SEQ ID NO: 20438 - DNA, 33 bp, Homo sapiens
tgtatgcataagtagatgtgtctatctctgtat

SEQ ID NO: 20439 - DNA, 33 bp, Homo sapiens
atttgatgagctctctgaaggcaagaagcccaa

SEQ ID NO: 20440 - DNA, 33 bp, Homo sapiens
tagggattttcttgaacctaccattaaagctac

SEQ ID NO: 20441 - DNA, 33 bp, Homo sapiens
aattaaagaaagtcaaggcgagaccagcatata

SEQ ID NO: 20442 - DNA, 33 bp, Homo sapiens
gatagtcactatactagccacaacagcaatgcc

SEQ ID NO: 20443 - DNA, 33 bp, Homo sapiens
tgaaatattttgtgtccgaaaccatgctaggca

SEQ ID NO: 20444 - DNA, 33 bp, Homo sapiens
gtctgcacaccctggaggtttctgaggctcctc

SEQ ID NO: 20445 - DNA, 33 bp, Homo sapiens
gcttttcagagtgttcgaggatcagggagcatg

SEQ ID NO: 20446 - DNA, 33 bp, Homo sapiens
ctgttgtaattgtcacgcatcttgacaaggtgg

SEQ ID NO: 20447 - DNA, 33 bp, Homo sapiens
tgaccaatatatggcagatgagagttctttggg

SEQ ID NO: 20448 - DNA, 33 bp, Homo sapiens
taaatagggaactggatagatgctcaggaagag

SEQ ID NO: 20449 - DNA, 51 bp, Homo sapiens
ccagggtctttgcacaggattttccgcacacagtacaagtctgggtctcgg

SEQ ID NO: 20450 - DNA, 33 bp, Homo sapiens
ccccacgagccaaaaggagtggatctagagtga

SEQ ID NO: 20451 - DNA, 33 bp, Homo sapiens
ctcattgaacaagcaattccatttagttccgtg

SEQ ID NO: 20452 - DNA, 33 bp, Homo sapiens
acttctgcattctggctgacagggatgtcaacg

SEQ ID NO: 20453 - DNA, 33 bp, Homo sapiens
cactttggttcctagatgcattcctactagttt

SEQ ID NO: 20454 - DNA, 33 bp, Homo sapiens
gtgaatgtgcatcccctcaaagacaggcagtaa

SEQ ID NO: 20455 - DNA, 33 bp, Homo sapiens
tctcagcaaagcgagagagggtcctgcttgcag

SEQ ID NO: 20456 - DNA, 33 bp, Homo sapiens
ctctcatctcggggaatcttttagagttgttgt

SEQ ID NO: 20457 - DNA, 33 bp, Homo sapiens
tcttattccaaggaaacgagtggaagatgaaaa

SEQ ID NO: 20458 - DNA, 33 bp, Homo sapiens
tacttctgagtgtttatagtttcagtgattctg

SEQ ID NO: 20459 - DNA, 33 bp, Homo sapiens
acgtcaatgcatagaatggcctccacagcaaag

SEQ ID NO: 20460 - DNA, 33 bp, Homo sapiens
tagatacagtaaaaaatctagtggctcatgcct

SEQ ID NO: 20461 - DNA, 33 bp, Homo sapiens
tgataagggtgtcagataatgggtctccctccc

SEQ ID NO: 20462 - DNA, 51 bp, Homo sapiens
acaaaacctcaagaattattaagaaggttctgctgtagtgtccctggtctt

SEQ ID NO: 20463 - DNA, 33 bp, Homo sapiens
caacagggagtcatgcgaggttgtagagaagtg

SEQ ID NO: 20464 - DNA, 33 bp, Homo sapiens
aggagcactggatgaggagttgtttgaggtaag

SEQ ID NO: 20465 - DNA, 33 bp, Homo sapiens
acaaacttgcgttgaatcaaagtgacccttaag

SEQ ID NO: 20466 - DNA, 33 bp, Homo sapiens
tttggttttacccttgcatgtttttctggcaac

SEQ ID NO: 20467 - DNA, 33 bp, Homo sapiens
aatgtgcaagaaaggatccaacaaggcagcttt

SEQ ID NO: 20468 - DNA, 33 bp, Homo sapiens
actcgagggctctacagccatttgccgggcggg

SEQ ID NO: 20469 - DNA, 33 bp, Homo sapiens
agccttgcaaaggagatgatagtgagactgaag

SEQ ID NO: 20470 - DNA, 33 bp, Homo sapiens
gaagtgtccccactgtgaaactagaaaaatcta

SEQ ID NO: 20471 - DNA, 51 bp, Homo sapiens
tacagccaccaagaaaaataagccatgttatgtaaaaagagaagttgtaga

SEQ ID NO: 20472 - DNA, 51 bp, Homo sapiens
attctgccggggtttcttgagtcactgagcatatggggcttcaggttggac

SEQ ID NO: 20473 - DNA, 51 bp, Homo sapiens
ccataaacccacacttccttctacatgtgagcttttattaattccagaatt

SEQ ID NO: 20474 - DNA, 33 bp, Homo sapiens
gtggagttctgtggaggacaggcctagtttgag

SEQ ID NO: 20475 - DNA, 51 bp, Homo sapiens
aatgcatctgggaaggctagcattgtgtctgacatgtaacagcccctgcaa

SEQ ID NO: 20476 - DNA, 33 bp, Homo sapiens
tggcacaacattgtgagtacttaaagccactgg

SEQ ID NO: 20477 - DNA, 33 bp, Homo sapiens
taactttataagctacggatgttaaatggtgag

SEQ ID NO: 20478 - DNA, 33 bp, Homo sapiens
tggagtgagattgtgagacttggagcttgtgca

SEQ ID NO: 20479 - DNA, 33 bp, Homo sapiens
ctgccatgatcataaacgaccagttcccaggat

SEQ ID NO: 20480 - DNA, 33 bp, Homo sapiens
agtggttattttatgataatagtgacaagcctt

SEQ ID NO: 20481 - DNA, 33 bp, Homo sapiens
tgtgcagaactgtgtgtattttttctagggaga

SEQ ID NO: 20482 - DNA, 51 bp, Homo sapiens
ggaggttcccatatattctccagcctctcctgtagttatgctggggccaca

SEQ ID NO: 20483 - DNA, 33 bp, Homo sapiens
aaagtgaaaagtgcactgtatttcaagtctgaa

SEQ ID NO: 20484 - DNA, 51 bp, Homo sapiens
ttgggagtggatgtgagcatagaaggaaactcaggaatggggttaggttca

SEQ ID NO: 20485 - DNA, 33 bp, Homo sapiens
actcgggcttagaccctagttctgcgacttagc

SEQ ID NO: 20486 - DNA, 51 bp, Homo sapiens
tgtccttttacattcttgctaatactggttaattaagcagaaagcaatggt

SEQ ID NO: 20487 - DNA, 33 bp, Homo sapiens
gcctaaggtatctacattctggtccttcacaga

SEQ ID NO: 20488 - DNA, 33 bp, Homo sapiens
gctctgacactgagaatgggcacttccctgctc

SEQ ID NO: 20489 - DNA, 33 bp, Homo sapiens
agaggagacagcagaacaagccgcaggacagag

SEQ ID NO: 20490 - DNA, 33 bp, Homo sapiens
cacctcaagcacgtaatggaaatggaatcacac

SEQ ID NO: 20491 - DNA, 33 bp, Homo sapiens
gcagcagaagagccaatgtgcatggggattcca

SEQ ID NO: 20492 - DNA, 33 bp, Homo sapiens
ccaaatttagagcaaggccctttgatagtgtat

SEQ ID NO: 20493 - DNA, 33 bp, Homo sapiens
tgtgctgccgtgacaggctccattcttcaggga

SEQ ID NO: 20494 - DNA, 33 bp, Homo sapiens
ccaccaggatggctaacacataaacgactgaaa

SEQ ID NO: 20495 - DNA, 33 bp, Homo sapiens
attaattaccaggtcagatcacttggagagaga

SEQ ID NO: 20496 - DNA, 33 bp, Homo sapiens
gctgcctaaattcacaggaaagagccctgacaa

SEQ ID NO: 20497 - DNA, 33 bp, Homo sapiens
gcagcaagatgactgatggagcccagacaaaat

SEQ ID NO: 20498 - DNA, 33 bp, Homo sapiens
taccataaaacccgtggaataacagcagaggca

SEQ ID NO: 20499 - DNA, 33 bp, Homo sapiens
ttgtctttatttgtaggaagtccagtattgcat

SEQ ID NO: 20500 - DNA, 51 bp, Homo sapiens
taatagagccatcgatgaaaaaaatgataaactcattgtgagatgtaatca

SEQ ID NO: 20501 - DNA, 33 bp, Homo sapiens
cggcaggctgcttaggcatctcgggacttaagg

SEQ ID NO: 20502 - DNA, 33 bp, Homo sapiens
ctgagacaatgtcctctctgttgctacctctat

SEQ ID NO: 20503 - DNA, 33 bp, Homo sapiens
cattgcccctagagtccaacagaatctgttcat

SEQ ID NO: 20504 - DNA, 33 bp, Homo sapiens
atgaggggaatgagacgagccagacttggacct

SEQ ID NO: 20505 - DNA, 33 bp, Homo sapiens
taagctcttgaaaggagaagaaaaggaatttgt

SEQ ID NO: 20506 - DNA, 33 bp, Homo sapiens
cacttccacatttccattctaacggcccctgcg

SEQ ID NO: 20507 - DNA, 33 bp, Homo sapiens
tgaaccagtgagttgggaaacactctatgaaag

SEQ ID NO: 20508 - DNA, 33 bp, Homo sapiens
gataaatacttcaaaatggtgttccaggacaag

SEQ ID NO: 20509 - DNA, 33 bp, Homo sapiens
ccaaagaaatcaaaacgaaggaggaagtcaaga

SEQ ID NO: 20510 - DNA, 33 bp, Homo sapiens
aaagactcaagagtggcaacgttaagaaaaagc

SEQ ID NO: 20511 - DNA, 33 bp, Homo sapiens
gggtatgggagacagagatccaatcacttccct

SEQ ID NO: 20512 - DNA, 33 bp, Homo sapiens
caacccaccacacttatgtttctcttcttctag

SEQ ID NO: 20513 - DNA, 33 bp, Homo sapiens
cctcaaatgtaaactacggatggcatccctcct

SEQ ID NO: 20514 - DNA, 33 bp, Homo sapiens
tggttccaaagaagaatcgtggttgtgagttgc

SEQ ID NO: 20515 - DNA, 33 bp, Homo sapiens
agacgcgcttggaataggtcattccctcaggcc

SEQ ID NO: 20516 - DNA, 33 bp, Homo sapiens
tggcttgtcatgggaacatcacatgtaaccacc

SEQ ID NO: 20517 - DNA, 33 bp, Homo sapiens
aagccagaagagcacagtgagttgggagcttct

SEQ ID NO: 20518 - DNA, 51 bp, Homo sapiens
aaacaaggttgtttttgtctttatcttttgttagagttatagatttatgat

SEQ ID NO: 20519 - DNA, 33 bp, Homo sapiens
actgagttccagtgaagttcaccgcaacaggca

SEQ ID NO: 20520 - DNA, 51 bp, Homo sapiens
ctctatttgctattgataaaagcaatgtaactgaaattactctgtacctca

SEQ ID NO: 20521 - DNA, 51 bp, Homo sapiens
ctttttcttcgcacaaaagccctggtagttagctcaccaacccctaggcct

SEQ ID NO: 20522 - DNA, 51 bp, Homo sapiens
gcgaagaaaaaggtgttcctacaaggcagctcacagcttggactttagccc

SEQ ID NO: 20523 - DNA, 33 bp, Homo sapiens
taaatgtctgggttgatggtgcaacagttgact

SEQ ID NO: 20524 - DNA, 33 bp, Homo sapiens
ctgtctagccatggaagtagttcgcactgaaac

SEQ ID NO: 20525 - DNA, 51 bp, Homo sapiens
tgtaaatggaaaaatgagaacaacgtccctattacaaagaaagcccagggt

SEQ ID NO: 20526 - DNA, 33 bp, Homo sapiens
gcgtatccgagaaccataagcgtctcccctacc

SEQ ID NO: 20527 - DNA, 33 bp, Homo sapiens
gacctactatctatctgacagcacaatagggta

SEQ ID NO: 20528 - DNA, 33 bp, Homo sapiens
aggtcagatgtgacgagagcaggcccatcaagg

SEQ ID NO: 20529 - DNA, 33 bp, Homo sapiens
tcttacataacaaccagagttaccaaaatcgag

SEQ ID NO: 20530 - DNA, 33 bp, Homo sapiens
tgaaaagcagtagaaggaacagtcagagatgcc

SEQ ID NO: 20531 - DNA, 33 bp, Homo sapiens
ctgattcttaaatgtatgcggaaatgcaaaaac

SEQ ID NO: 20532 - DNA, 33 bp, Homo sapiens
tagttctactcaattaggatgagcaaaaggctg

SEQ ID NO: 20533 - DNA, 33 bp, Homo sapiens
ggattaaatgagatgatccatacaaaggcagtc

SEQ ID NO: 20534 - DNA, 33 bp, Homo sapiens
cctcattttgcaaaaagctatgtaagggaagtt

SEQ ID NO: 20535 - DNA, 33 bp, Homo sapiens
tgtgtgttatcttctacgccagtttttctgatt

SEQ ID NO: 20536 - DNA, 33 bp, Homo sapiens
tacgggaaagagaccttagatcaattggatgcc

SEQ ID NO: 20537 - DNA, 33 bp, Homo sapiens
aggatcctgagaacacgaggcaaatctcaaagc

SEQ ID NO: 20538 - DNA, 33 bp, Homo sapiens
tgggaatttatttgctgaagtcagtcattgaaa

SEQ ID NO: 20539 - DNA, 33 bp, Homo sapiens
cctctggctaagtgaagtgttacaggtggactt

SEQ ID NO: 20540 - DNA, 33 bp, Homo sapiens
ctgattgttgctttcaggtaaacagatgtcctt

SEQ ID NO: 20541 - DNA, 33 bp, Homo sapiens
caaggatagcttcagcggactcctggaaacaag

SEQ ID NO: 20542 - DNA, 33 bp, Homo sapiens
gtccctgattcaaaaactgttaagcaccactca

SEQ ID NO: 20543 - DNA, 33 bp, Homo sapiens
gttatctctggaatgcgagtttaagcatgaaag

SEQ ID NO: 20544 - DNA, 33 bp, Homo sapiens
cctcactttaccttcctcaatgacatcaggtct

SEQ ID NO: 20545 - DNA, 33 bp, Homo sapiens
attgacaaatgataccggaaaaaatgactaaaa

SEQ ID NO: 20546 - DNA, 33 bp, Homo sapiens
atttgaggttggagaggcacgtctgagccagat

SEQ ID NO: 20547 - DNA, 33 bp, Homo sapiens
tttaataggttggttcgcttcagaactaacttg

SEQ ID NO: 20548 - DNA, 33 bp, Homo sapiens
tttatattatgtgctaggtattgtcttaaataa

SEQ ID NO: 20549 - DNA, 33 bp, Homo sapiens
aaatgcacacttaaaagtatttccagccatatt

SEQ ID NO: 20550 - DNA, 33 bp, Homo sapiens
taagctaacagacatatcattaaggagctaata

SEQ ID NO: 20551 - DNA, 33 bp, Homo sapiens
gaaaagaaaaaaattctatccctgagtctgtca

SEQ ID NO: 20552 - DNA, 33 bp, Homo sapiens
ctcgtcttgcagggacggaactcatcttcctcc

SEQ ID NO: 20553 - DNA, 33 bp, Homo sapiens
tattttattgtagtacgactttgctcgaagctg

SEQ ID NO: 20554 - DNA, 33 bp, Homo sapiens
aacagatgtgtttccattgacggcaatcaggtt

SEQ ID NO: 20555 - DNA, 33 bp, Homo sapiens
atggggtaaatgaacaggaagaggatgtagaag

SEQ ID NO: 20556 - DNA, 51 bp, Homo sapiens
tgcattgggtgtgctttcgaaattataaagcagatcacgtagcgtccctgt

SEQ ID NO: 20557 - DNA, 33 bp, Homo sapiens
aagtcaatgagaataatggaggctgccccattc

SEQ ID NO: 20558 - DNA, 33 bp, Homo sapiens
gaggaagtattctagcgcaacaaaaaatgaatt

SEQ ID NO: 20559 - DNA, 33 bp, Homo sapiens
ggtcagtgatggtgcatagagagctcatgactt

SEQ ID NO: 20560 - DNA, 33 bp, Homo sapiens
gagatttagacaactggcagagaatctgggact

SEQ ID NO: 20561 - DNA, 33 bp, Homo sapiens
ctctccctggctgggcgaacgtgtggaagttga

SEQ ID NO: 20562 - DNA, 33 bp, Homo sapiens
ggagaattacctcaactgtctcttgaccatgtc

SEQ ID NO: 20563 - DNA, 33 bp, Homo sapiens
ataagcatggtgggttgaacatggaggcccatt

SEQ ID NO: 20564 - DNA, 33 bp, Homo sapiens
acaatcacagggcgtggaaacctaaagtcaagg

SEQ ID NO: 20565 - DNA, 33 bp, Homo sapiens
catgggagagcaccacggattctgcaaagtggt

SEQ ID NO: 20566 - DNA, 33 bp, Homo sapiens
gccaagcctctccaaagtctccggagctcttcc

SEQ ID NO: 20567 - DNA, 51 bp, Homo sapiens
aatgaaaatcccagaggtatgcaggtttcaggcacagtttgatccagtagt

SEQ ID NO: 20568 - DNA, 33 bp, Homo sapiens
ctgcacactcatatgcgcacacacatattggac

SEQ ID NO: 20569 - DNA, 33 bp, Homo sapiens
tccagccctgctgacagattggtctttggtgaa

SEQ ID NO: 20570 - DNA, 33 bp, Homo sapiens
gaaattgcctgagtaagtgctgacttgctgaac

SEQ ID NO: 20571 - DNA, 33 bp, Homo sapiens
ggagtggaaagtgtaagagagggatgtctggtc

SEQ ID NO: 20572 - DNA, 33 bp, Homo sapiens
gcccagaggacacatatcattttcttctgttcc

SEQ ID NO: 20573 - DNA, 33 bp, Homo sapiens
ggctagatagtgaccagcagcgtgaatgaagcc

SEQ ID NO: 20574 - DNA, 33 bp, Homo sapiens
catgaccttacaaaaaggattagagtaggtgag

SEQ ID NO: 20575 - DNA, 51 bp, Homo sapiens
tggtggaatgaattcggtggcctaagtgtaccttcctcaaatgccacggct

SEQ ID NO: 20576 - DNA, 33 bp, Homo sapiens
gcgtaatcctattcccggacagaattacaagtg

SEQ ID NO: 20577 - DNA, 33 bp, Homo sapiens
atagaaccagcttctaggttcaggaaggaaacc

SEQ ID NO: 20578 - DNA, 33 bp, Homo sapiens
gcagaggaagcttctatgcgctagagaggatca

SEQ ID NO: 20579 - DNA, 33 bp, Homo sapiens
caactcggggaaaccatcaaggagtggggatat

SEQ ID NO: 20580 - DNA, 33 bp, Homo sapiens
gcagtattgatgaagagagtatgggatctgtga

SEQ ID NO: 20581 - DNA, 33 bp, Homo sapiens
gagggaatggtaaagatgccagagctcctcagc

SEQ ID NO: 20582 - DNA, 33 bp, Homo sapiens
tggtgcagctgcgctatggcgaagacggcctgg

SEQ ID NO: 20583 - DNA, 33 bp, Homo sapiens
gaaggatgctgaaaggtaagctctagtgcaaga

SEQ ID NO: 20584 - DNA, 33 bp, Homo sapiens
ccaaaaatagaaaaattaagtgtggtgctacat

SEQ ID NO: 20585 - DNA, 33 bp, Homo sapiens
gccctccacatagtcatgtcagggagctttagg

SEQ ID NO: 20586 - DNA, 33 bp, Homo sapiens
aatactgttaagaacagaacagagagaccactg

SEQ ID NO: 20587 - DNA, 33 bp, Homo sapiens
cactcctgtcgaagcctacgtgtatcatcacca

SEQ ID NO: 20588 - DNA, 33 bp, Homo sapiens
gtccctgcgcttaaccgctaatctctgctgctc

SEQ ID NO: 20589 - DNA, 51 bp, Homo sapiens
tcttgtcttactgcattggatagaatgtcaaagtaatggtatatataataa

SEQ ID NO: 20590 - DNA, 33 bp, Homo sapiens
actgttggctcacagacagagtggagttctgag

SEQ ID NO: 20591 - DNA, 33 bp, Homo sapiens
ttaactctgtacgagagcaagagcttactatga

SEQ ID NO: 20592 - DNA, 33 bp, Homo sapiens
gtagcctcagggaacctagattaaaggggagag

SEQ ID NO: 20593 - DNA, 33 bp, Homo sapiens
gatacccaccgagctatatctcccaatgtcagt

SEQ ID NO: 20594 - DNA, 33 bp, Homo sapiens
aaccatcgcagtatgaggctcatcattccaaac

SEQ ID NO: 20595 - DNA, 33 bp, Homo sapiens
tcattttacttgcacagagaggaccttagtctt

SEQ ID NO: 20596 - DNA, 51 bp, Homo sapiens
gagaactgtgtgcctggctgcgcatgagattgtgggattatcaagaaaagt

SEQ ID NO: 20597 - DNA, 33 bp, Homo sapiens
ctgactctgcaccatacatgtcaaacaccaggt

SEQ ID NO: 20598 - DNA, 33 bp, Homo sapiens
tacctcaataaatgccgagatatcttcttaaag

SEQ ID NO: 20599 - DNA, 33 bp, Homo sapiens
ggcatgtagatggacagtataggcagtgcagtg

SEQ ID NO: 20600 - DNA, 33 bp, Homo sapiens
atttgaacatctacggtcaaacctcaatccttc

SEQ ID NO: 20601 - DNA, 33 bp, Homo sapiens
tccatatagtcatccagctctttctgatatgaa

SEQ ID NO: 20602 - DNA, 51 bp, Homo sapiens
gactttgtgttctgtggattccctatattgctaacctctcccttaccacct

SEQ ID NO: 20603 - DNA, 51 bp, Homo sapiens
ctgaatccgtatcttctctatcctcgctaccactggttttgccttcttttg

SEQ ID NO: 20604 - DNA, 51 bp, Homo sapiens
aaagtaagtaacagcatgagaatgatgtgccattaaatactactattggac

SEQ ID NO: 20605 - DNA, 33 bp, Homo sapiens
atgctgtttggataaatcatcatccaagtttga

SEQ ID NO: 20606 - DNA, 33 bp, Homo sapiens
aaatggctggctattcgctatattttgcagaac

SEQ ID NO: 20607 - DNA, 33 bp, Homo sapiens
agatgtatgccacatcgaagtgtcttgcttaca

SEQ ID NO: 20608 - DNA, 33 bp, Homo sapiens
cttatcgtcagacaccgcattatggaaatctac

SEQ ID NO: 20609 - DNA, 33 bp, Homo sapiens
cttgacacatacggggtagagctatttcatcac

SEQ ID NO: 20610 - DNA, 33 bp, Homo sapiens
aggaggcgcattttcatattctacttcatggtt

SEQ ID NO: 20611 - DNA, 51 bp, Homo sapiens
catgagattacaatatttcttgtaagagttcttaatgttatgttcaaagga

SEQ ID NO: 20612 - DNA, 33 bp, Homo sapiens
aatgagcttaaaacaatgtcaagtctctaataa

SEQ ID NO: 20613 - DNA, 51 bp, Homo sapiens
cagtatacaacaagcagaagtttgctcttgaaaaactgtagtgtagttagt

SEQ ID NO: 20614 - DNA, 33 bp, Homo sapiens
tcctttaactcacacagcaaagcggtaagtgat

SEQ ID NO: 20615 - DNA, 33 bp, Homo sapiens
ctttgaattgttggaaggattttgtttctggct

SEQ ID NO: 20616 - DNA, 33 bp, Homo sapiens
atggaaagccttaaattacttctcaaataaaaa

SEQ ID NO: 20617 - DNA, 33 bp, Homo sapiens
ttgaaacctgtggcaggatgtgttaggaccgtt

SEQ ID NO: 20618 - DNA, 33 bp, Homo sapiens
gggcattttgctgcgcgctgagtgaatagttct

SEQ ID NO: 20619 - DNA, 33 bp, Homo sapiens
ctagagatgaggacaatttacatgctccctctc

SEQ ID NO: 20620 - DNA, 33 bp, Homo sapiens
atcattttttactaccgatttggcatgatttat

SEQ ID NO: 20621 - DNA, 33 bp, Homo sapiens
aactgccctaacgggctgccagaatccccagac

SEQ ID NO: 20622 - DNA, 33 bp, Homo sapiens
gactgtgcttagaagggccttaataaataacat

SEQ ID NO: 20623 - DNA, 33 bp, Homo sapiens
tttgcatctaagcctatgttgatgggatcaatg

SEQ ID NO: 20624 - DNA, 33 bp, Homo sapiens
ttttagaaacgcttccgctctgttaagatttaa

SEQ ID NO: 20625 - DNA, 33 bp, Homo sapiens
aggttcggataaagattacaggaagatgagcag

SEQ ID NO: 20626 - DNA, 33 bp, Homo sapiens
cactcattgcccctgcggaatccacacaccccc

SEQ ID NO: 20627 - DNA, 33 bp, Homo sapiens
tgccccagctagggatgactttcaggtgtgacc

SEQ ID NO: 20628 - DNA, 33 bp, Homo sapiens
caaagcactgtgcatggattaactcctttattc

SEQ ID NO: 20629 - DNA, 33 bp, Homo sapiens
tagagaaattgaggccggattgcattcttcaaa

SEQ ID NO: 20630 - DNA, 33 bp, Homo sapiens
ttttcactgaaaataagggttactaagagttac

SEQ ID NO: 20631 - DNA, 33 bp, Homo sapiens
catgaaataaggtggatctgtgtagccaacagg

SEQ ID NO: 20632 - DNA, 33 bp, Homo sapiens
taaggaggacttagcatgaggctgctttctctg

SEQ ID NO: 20633 - DNA, 33 bp, Homo sapiens
agaaatgtgttcaatatacaacattaggagaat

SEQ ID NO: 20634 - DNA, 33 bp, Homo sapiens
caaatgactatttctatgtgtagaccccagggc

SEQ ID NO: 20635 - DNA, 33 bp, Homo sapiens
gataatatccaacctatcggcaactttcgactt

SEQ ID NO: 20636 - DNA, 33 bp, Homo sapiens
acacttttccagtggatgtgaaatgttatgata

SEQ ID NO: 20637 - DNA, 33 bp, Homo sapiens
ctgtttgcaagggctacagactagaaacaatct

SEQ ID NO: 20638 - DNA, 33 bp, Homo sapiens
aggttatatttgggaaggtatggattacagaga

SEQ ID NO: 20639 - DNA, 33 bp, Homo sapiens
gggagacatagccgaaggttttagtcactgtgc

SEQ ID NO: 20640 - DNA, 33 bp, Homo sapiens
tctggcagagtccaaattcaaacgcctggagca

SEQ ID NO: 20641 - DNA, 33 bp, Homo sapiens
aactatagtccgatacggtataagtgtgtcaaa

SEQ ID NO: 20642 - DNA, 33 bp, Homo sapiens
attctccttggcaagctaggctcatccacttac

SEQ ID NO: 20643 - DNA, 33 bp, Homo sapiens
ttgtcatacatcatggtcatagcttttgcagtt

SEQ ID NO: 20644 - DNA, 33 bp, Homo sapiens
ttgtgaaggaaatctaggggacttggtaacgga

SEQ ID NO: 20645 - DNA, 51 bp, Homo sapiens
ttacacttgctgttgataaactcgataactgctccttgtttaggtctcacc

SEQ ID NO: 20646 - DNA, 33 bp, Homo sapiens
atttctgatttttacattattgcaaacctagat

SEQ ID NO: 20647 - DNA, 51 bp, Homo sapiens
ttgcggaggagccgtcattacaacagtcgtgttctgagactaggagcaacg

SEQ ID NO: 20648 - DNA, 51 bp, Homo sapiens
tactcaggctaaaagtcagtaaaaatacataactcactttgtgccattacc

SEQ ID NO: 20649 - DNA, 51 bp, Homo sapiens
aataataaaaagagtaagaatgacagctaactatcagtcaggagaggttag

SEQ ID NO: 20650 - DNA, 33 bp, Homo sapiens
tccatcaaggaacctctagtgttgcaggcaaga

SEQ ID NO: 20651 - DNA, 33 bp, Homo sapiens
cttctacgaatgtctagaggaacaaagggaaac

SEQ ID NO: 20652 - DNA, 33 bp, Homo sapiens
acttcatacctgtcaggatggctagaattaaaa

SEQ ID NO: 20653 - DNA, 33 bp, Homo sapiens
gaaagcacagataccagtaatgttcaacaattc

SEQ ID NO: 20654 - DNA, 33 bp, Homo sapiens
taaacggactgtgagctgatgagtagcatttac

SEQ ID NO: 20655 - DNA, 33 bp, Homo sapiens
cacagtgcaagacatcgagacctcgagtttagc

SEQ ID NO: 20656 - DNA, 33 bp, Homo sapiens
cacacaggaaattttggaagggacacatggcag

SEQ ID NO: 20657 - DNA, 33 bp, Homo sapiens
tggctaagcctctgccgactacactggcttcta

SEQ ID NO: 20658 - DNA, 33 bp, Homo sapiens
caagtgcatatatgaataggcggctctccgagg

SEQ ID NO: 20659 - DNA, 33 bp, Homo sapiens
caggtacccagcaaactggatgctcagccaagg

SEQ ID NO: 20660 - DNA, 33 bp, Homo sapiens
gaaaagtgaatactgctcggagctccggagaca

SEQ ID NO: 20661 - DNA, 33 bp, Homo sapiens
atgaggaaggctgcaggcagagcaaattgagga

SEQ ID NO: 20662 - DNA, 33 bp, Homo sapiens
attgatgttttacgtgcacataacctgaatctt

SEQ ID NO: 20663 - DNA, 33 bp, Homo sapiens
tcccgactctgtttcatcagtcgctcccccagg

SEQ ID NO: 20664 - DNA, 33 bp, Homo sapiens
aattgctttattgaagtatagttgtctaaggtt

SEQ ID NO: 20665 - DNA, 33 bp, Homo sapiens
ttattgccttttctcatgttattttgaaattta

SEQ ID NO: 20666 - DNA, 33 bp, Homo sapiens
tcctgatggtcctcgccacttctgagtcactcc

SEQ ID NO: 20667 - DNA, 33 bp, Homo sapiens
gctctattcagaaagggactgtgacatggccct

SEQ ID NO: 20668 - DNA, 33 bp, Homo sapiens
gaaaggaaaagaatcagtaagttgcaaaagtca

SEQ ID NO: 20669 - DNA, 33 bp, Homo sapiens
caagggcctggtatgatgttgtggcaatctcat

SEQ ID NO: 20670 - DNA, 33 bp, Homo sapiens
tctcccaacactgaaatgtgccttgcctggctt

SEQ ID NO: 20671 - DNA, 33 bp, Homo sapiens
aatgagatggtatttgtaaagtggttagtacac

SEQ ID NO: 20672 - DNA, 33 bp, Homo sapiens
gaaatatttccatccccaatagctaaacttaaa

SEQ ID NO: 20673 - DNA, 33 bp, Homo sapiens
ctgtgttaggtcacgggagaagtgagggtgaca

SEQ ID NO: 20674 - DNA, 33 bp, Homo sapiens
acttgttatcagcacaggaaaataacaagaagt

SEQ ID NO: 20675 - DNA, 33 bp, Homo sapiens
ggtgaggttatggagatcgctcttgtcagaatt

SEQ ID NO: 20676 - DNA, 51 bp, Homo sapiens
ttctctgagagtttcccaaattatttgtcattggcagagcgcctccatgga

SEQ ID NO: 20677 - DNA, 33 bp, Homo sapiens
gaaagccaatcactgagacaccaagtattgcca

SEQ ID NO: 20678 - DNA, 33 bp, Homo sapiens
gaagcaatgcgccccctaaccagtgtgatggag

SEQ ID NO: 20679 - DNA, 51 bp, Homo sapiens
taaatttcacctcagctaagatagctcctccacctcctagaaggataatat

SEQ ID NO: 20680 - DNA, 33 bp, Homo sapiens
ttgctttctcactccttaaatactgcttcatct

SEQ ID NO: 20681 - DNA, 33 bp, Homo sapiens
catctgggaatcagcattagctggccgagttta

SEQ ID NO: 20682 - DNA, 33 bp, Homo sapiens
catcagtcttctaagctaggagaacctttttaa

SEQ ID NO: 20683 - DNA, 33 bp, Homo sapiens
tgcaaatctctgtgaatgttaccagctttaagt

SEQ ID NO: 20684 - DNA, 33 bp, Homo sapiens
cacctttcccaacctagccatagctcgaaagtc

SEQ ID NO: 20685 - DNA, 33 bp, Homo sapiens
ggaattgagaatgaccgcagacttgactagctg

SEQ ID NO: 20686 - DNA, 33 bp, Homo sapiens
tctatgttcaaaccagcatcagagagaatagaa

SEQ ID NO: 20687 - DNA, 33 bp, Homo sapiens
aaacactgtggttaaataaagattttgagtcct

SEQ ID NO: 20688 - DNA, 33 bp, Homo sapiens
gacctctgccttcaatgaacttaacaaccagta

SEQ ID NO: 20689 - DNA, 33 bp, Homo sapiens
tggcttcattgctagataactgagtgcttgctt

SEQ ID NO: 20690 - DNA, 33 bp, Homo sapiens
cctaacctcttttgtatctctcttgaagctatc

SEQ ID NO: 20691 - DNA, 33 bp, Homo sapiens
atagatgcagaatggattaggtgtgcgataaat

SEQ ID NO: 20692 - DNA, 33 bp, Homo sapiens
gttgcatgtcaagatagtactgttaggaagtac

SEQ ID NO: 20693 - DNA, 33 bp, Homo sapiens
tgaaactctgcagtcattatctatgctgaaaga

SEQ ID NO: 20694 - DNA, 33 bp, Homo sapiens
gactgaggcacagacagggaacacaatcgcctc

SEQ ID NO: 20695 - DNA, 33 bp, Homo sapiens
aatctaagtagaggccccgatacctccacagct

SEQ ID NO: 20696 - DNA, 33 bp, Homo sapiens
cactatctgttgaaggtcacacttgtgcccaca

SEQ ID NO: 20697 - DNA, 33 bp, Homo sapiens
ttccataaggaactgctaaactttcttccaaag

SEQ ID NO: 20698 - DNA, 33 bp, Homo sapiens
ctacattttatgggacgattggtacctggagtg

SEQ ID NO: 20699 - DNA, 33 bp, Homo sapiens
gccctttgggcatctcgctaatctgaatcctct

SEQ ID NO: 20700 - DNA, 33 bp, Homo sapiens
ggccagctgtcagcactgagatgggggtagtga

SEQ ID NO: 20701 - DNA, 33 bp, Homo sapiens
tcacagtgtaaggtaggcattgacaatcttcct

SEQ ID NO: 20702 - DNA, 33 bp, Homo sapiens
atttattcaatggacagagaacaagtatttaag

SEQ ID NO: 20703 - DNA, 33 bp, Homo sapiens
ttgcactaatggcttcgacataattgctagtag

SEQ ID NO: 20704 - DNA, 33 bp, Homo sapiens
acttgcttaggcccgattaacatttgcactcac

SEQ ID NO: 20705 - DNA, 33 bp, Homo sapiens
tggagacatgtagaaatgaaagttgagggcagg

SEQ ID NO: 20706 - DNA, 33 bp, Homo sapiens
cccctgaattgctgcatctctctttagccctca

SEQ ID NO: 20707 - DNA, 33 bp, Homo sapiens
tctaagatcaaccagatagtaagagatagagtt

SEQ ID NO: 20708 - DNA, 33 bp, Homo sapiens
aaattaatttcaagctgagagtgcacaggtttg

SEQ ID NO: 20709 - DNA, 33 bp, Homo sapiens
tggccctgtacttcaatatgaccacactttaga

SEQ ID NO: 20710 - DNA, 33 bp, Homo sapiens
acagaacttcaccaaatggacttctcaaagatc

SEQ ID NO: 20711 - DNA, 33 bp, Homo sapiens
tatggattctctcaaagaccaagaaaagaaatg

SEQ ID NO: 20712 - DNA, 33 bp, Homo sapiens
aagtgaatttgacacagtcccttccctcaaaga

SEQ ID NO: 20713 - DNA, 33 bp, Homo sapiens
gcttattgccttttccggaagtagggagcagca

SEQ ID NO: 20714 - DNA, 33 bp, Homo sapiens
agggtattttaaagcacatcctaagcaacatat

SEQ ID NO: 20715 - DNA, 33 bp, Homo sapiens
gcttccaacttccctatgacaacacccttgaat

SEQ ID NO: 20716 - DNA, 33 bp, Homo sapiens
tcagtgggaaatgtaactatgggggagctcagg

SEQ ID NO: 20717 - DNA, 33 bp, Homo sapiens
gtcccactgtacccaatttctccctctctgaac

SEQ ID NO: 20718 - DNA, 33 bp, Homo sapiens
gttggtggtcttgttatcagaagaaagttacta

SEQ ID NO: 20719 - DNA, 33 bp, Homo sapiens
ttagtatctctgacaggactgtgtttagtgtga

SEQ ID NO: 20720 - DNA, 33 bp, Homo sapiens
atctgaacaccttgcagtcgttgcggacaaaca

SEQ ID NO: 20721 - DNA, 33 bp, Homo sapiens
tgggagatggcaggaacaaaagcctaaagtaat

SEQ ID NO: 20722 - DNA, 33 bp, Homo sapiens
ttgagactctgtacaagttcctaccttccccat

SEQ ID NO: 20723 - DNA, 33 bp, Homo sapiens
ataatcactgttgtaataagaagagcaagatat

SEQ ID NO: 20724 - DNA, 33 bp, Homo sapiens
cagagctgagagagaaccccttgagttgtgttg

SEQ ID NO: 20725 - DNA, 33 bp, Homo sapiens
acagacattattagcaggagttttaaacaagtc

SEQ ID NO: 20726 - DNA, 51 bp, Homo sapiens
gcaggagaggccagcagcaaggataggaaaaaggagtattagaaagagcat

SEQ ID NO: 20727 - DNA, 51 bp, Homo sapiens
tggcagtcaccctcagagcccagaatagcagaatataacagaaaacaggaa

SEQ ID NO: 20728 - DNA, 33 bp, Homo sapiens
ggtcacgtgggaagacggtcaaccagctgcagt

SEQ ID NO: 20729 - DNA, 33 bp, Homo sapiens
atagcatctgcttttagaaggagctgacatttt

SEQ ID NO: 20730 - DNA, 33 bp, Homo sapiens
ttccgtatatcttgtagagggcctgtgttgttc

SEQ ID NO: 20731 - DNA, 33 bp, Homo sapiens
ctaggacaaagcaggtcaaatatctggggacga

SEQ ID NO: 20732 - DNA, 33 bp, Homo sapiens
aatgcttccaagtgaaggctaatcagagcacgg

SEQ ID NO: 20733 - DNA, 33 bp, Homo sapiens
aggttgcctttgcatggagaacagggtacaaga

SEQ ID NO: 20734 - DNA, 51 bp, Homo sapiens
gtctggcatggttcaatggttgcactaccttcaacaacctgtctagaaggg

SEQ ID NO: 20735 - DNA, 33 bp, Homo sapiens
ctcttggtccagaactgaggcctacatgcatcc

SEQ ID NO: 20736 - DNA, 33 bp, Homo sapiens
tggggcacagtgggggcagaatgcacagacact

SEQ ID NO: 20737 - DNA, 33 bp, Homo sapiens
gcacagtgaagtaaaatgagggtaaaggtgctg

SEQ ID NO: 20738 - DNA, 51 bp, Homo sapiens
ccattattccctcatcagtgcccacgacgatgtacccccttttatcattcc

SEQ ID NO: 20739 - DNA, 33 bp, Homo sapiens
gaaggccttggttttcgagagcccaaccctaag

SEQ ID NO: 20740 - DNA, 33 bp, Homo sapiens
ctacgattcataatgatatccgtgtgcacacca

SEQ ID NO: 20741 - DNA, 33 bp, Homo sapiens
ctggactccagtccccgagtgtaaccagaggca

SEQ ID NO: 20742 - DNA, 33 bp, Homo sapiens
tgccatcccgtcactacaagatgcctagcctta

SEQ ID NO: 20743 - DNA, 33 bp, Homo sapiens
aattttacacagcttcgagtggttcatgaactc

SEQ ID NO: 20744 - DNA, 33 bp, Homo sapiens
cactatgggaatttgatgggtgcattaaagtag

SEQ ID NO: 20745 - DNA, 33 bp, Homo sapiens
ggacaaagatgagatatgagtgtttattcaacc

SEQ ID NO: 20746 - DNA, 33 bp, Homo sapiens
gatgaattaaggtatcgaaggatggagacaaga

SEQ ID NO: 20747 - DNA, 33 bp, Homo sapiens
aaagaccagggatacatctcttgtccaatagct

SEQ ID NO: 20748 - DNA, 33 bp, Homo sapiens
acattaagttccaggagacctcaagagtatgag

SEQ ID NO: 20749 - DNA, 33 bp, Homo sapiens
tttgctattaaacttcgcttctgcagcagaatg

SEQ ID NO: 20750 - DNA, 33 bp, Homo sapiens
gtagtgagacctccaagataaaatgctactagg

SEQ ID NO: 20751 - DNA, 33 bp, Homo sapiens
ctggtgaggtgtacaatgagccctcctcagatg

SEQ ID NO: 20752 - DNA, 33 bp, Homo sapiens
ggaaacagttcagactcaaataaacaaatcatt

SEQ ID NO: 20753 - DNA, 33 bp, Homo sapiens
cggctgcccacccttcgacactattacccatcg

SEQ ID NO: 20754 - DNA, 33 bp, Homo sapiens
tacctcaagtactcactatgaccccatcaacag

SEQ ID NO: 20755 - DNA, 33 bp, Homo sapiens
acacatacctagaacagagcctaaaaaagcatc

SEQ ID NO: 20756 - DNA, 33 bp, Homo sapiens
caggacgacatggacagtagcgtcttctccagg

SEQ ID NO: 20757 - DNA, 33 bp, Homo sapiens
tgggagacgtcgttaagtgatgttgccagggta

SEQ ID NO: 20758 - DNA, 51 bp, Homo sapiens
cactgattgatacatctttcagtaagtgaattcggcacatccacagtgtcc

SEQ ID NO: 20759 - DNA, 33 bp, Homo sapiens
ccacctcctggacagataaggatgaagttcact

SEQ ID NO: 20760 - DNA, 51 bp, Homo sapiens
atcagaactttctggcaaagtcggagaggaggctttggtaaaacaagattg

SEQ ID NO: 20761 - DNA, 33 bp, Homo sapiens
tcttccaagtgaggaccatgcggcttgcctttg

SEQ ID NO: 20762 - DNA, 33 bp, Homo sapiens
ctgcaggcatagaaagtaactggactgcacctg

SEQ ID NO: 20763 - DNA, 33 bp, Homo sapiens
ccccatctagtcccaatgcaacaacctatgcaa

SEQ ID NO: 20764 - DNA, 33 bp, Homo sapiens
ccaaaatgtgtgatcatcaagaatggagtcttt

SEQ ID NO: 20765 - DNA, 33 bp, Homo sapiens
tatggattaccaaaagtcctgcgctaggtccct

SEQ ID NO: 20766 - DNA, 33 bp, Homo sapiens
gcttctaagtacagcaggcctaaggcagtgtgt

SEQ ID NO: 20767 - DNA, 33 bp, Homo sapiens
tgttgcaggagagtaaggaaagcactttgttat

SEQ ID NO: 20768 - DNA, 33 bp, Homo sapiens
gaggcggtgaggaagagcatcagaagagatggc

SEQ ID NO: 20769 - DNA, 33 bp, Homo sapiens
agtgctagggaatcacggtgaaagccagtccct

SEQ ID NO: 20770 - DNA, 33 bp, Homo sapiens
gagctcagtctggagaggaagacaagtaaagaa

SEQ ID NO: 20771 - DNA, 33 bp, Homo sapiens
aaatgacccttcagtatgtcattttctcactga

SEQ ID NO: 20772 - DNA, 33 bp, Homo sapiens
tcaataaatctgcctataatgttcaaaaattac

SEQ ID NO: 20773 - DNA, 33 bp, Homo sapiens
tttctctctgccatgcgaggccacttcaagaag

SEQ ID NO: 20774 - DNA, 33 bp, Homo sapiens
agagtgatatttattggaaacttactacctgaa

SEQ ID NO: 20775 - DNA, 33 bp, Homo sapiens
actgcaagctggcactcaagaggattagactta

SEQ ID NO: 20776 - DNA, 33 bp, Homo sapiens
ttttcaaagttggacataaaatacaggagtaat

SEQ ID NO: 20777 - DNA, 33 bp, Homo sapiens
tggattcttcttctacgatatcctttggctctt

SEQ ID NO: 20778 - DNA, 33 bp, Homo sapiens
gggtgacgctgaagaggaagagttgagtctgtc

SEQ ID NO: 20779 - DNA, 33 bp, Homo sapiens
aaatcagagtgcaaaagccataacggtacagct

SEQ ID NO: 20780 - DNA, 33 bp, Homo sapiens
gggacaaaaatgtgcctcttgaaactgagttta

SEQ ID NO: 20781 - DNA, 33 bp, Homo sapiens
actactatccaattccggaacctgtgcctgtgt

SEQ ID NO: 20782 - DNA, 33 bp, Homo sapiens
atcagtatgttcacaagataaattgagtaaacc

SEQ ID NO: 20783 - DNA, 33 bp, Homo sapiens
aagtggtcagattgaataacatgattgattaca

SEQ ID NO: 20784 - DNA, 33 bp, Homo sapiens
cccaagaatggaaataggagtcaaaacagcctc

SEQ ID NO: 20785 - DNA, 33 bp, Homo sapiens
tgagattgctgctcaggacttaggagagccatc

SEQ ID NO: 20786 - DNA, 33 bp, Homo sapiens
tctcttctgaaatcaatagtccccctagtagct

SEQ ID NO: 20787 - DNA, 33 bp, Homo sapiens
ctatcaatgagggttataaaaacaacaacgaag

SEQ ID NO: 20788 - DNA, 33 bp, Homo sapiens
gcaaacacataagaactacatagtaaaagagtg

SEQ ID NO: 20789 - DNA, 33 bp, Homo sapiens
tctgcttcccaacttctcacttccaggcaggcc

SEQ ID NO: 20790 - DNA, 33 bp, Homo sapiens
atggaaacaggaagtcgccttaggcttgaagca

SEQ ID NO: 20791 - DNA, 33 bp, Homo sapiens
tcagtttcttgatctgtaaaagggaatgataac

SEQ ID NO: 20792 - DNA, 33 bp, Homo sapiens
ggaggatatctgaaatgagaagtgaaggatgtg

SEQ ID NO: 20793 - DNA, 33 bp, Homo sapiens
tgaattctggaaaggagatgcaggtttaagtat

SEQ ID NO: 20794 - DNA, 51 bp, Homo sapiens
gccttctgagtcttctggggaggtcgaatcttctctgacccagcaggagac

SEQ ID NO: 20795 - DNA, 33 bp, Homo sapiens
aggagaggacccagaatctttttatgctccttg

SEQ ID NO: 20796 - DNA, 33 bp, Homo sapiens
ctttctcgaaagagtcgatcgatgtagcaaact

SEQ ID NO: 20797 - DNA, 33 bp, Homo sapiens
aagttaccctcggcccggacgttgccttccttt

SEQ ID NO: 20798 - DNA, 33 bp, Homo sapiens
attttcctttcagggctatatagactgttcgtc

SEQ ID NO: 20799 - DNA, 33 bp, Homo sapiens
agagagaccttcacaagtaataagacccaagaa

SEQ ID NO: 20800 - DNA, 33 bp, Homo sapiens
aataagcaagagccctgacttgtccatgaaatt

SEQ ID NO: 20801 - DNA, 33 bp, Homo sapiens
ctgttggctgtggatcgatctgggccctctcac

SEQ ID NO: 20802 - DNA, 33 bp, Homo sapiens
ttattaagtctctcaattaaaatgccagacatg

SEQ ID NO: 20803 - DNA, 33 bp, Homo sapiens
aggagatgtaaagaattaggaagttaagcttta

SEQ ID NO: 20804 - DNA, 33 bp, Homo sapiens
tgtctttgctattttggatagtgctacaatgaa

SEQ ID NO: 20805 - DNA, 33 bp, Homo sapiens
gagaggcatcagactatgctgcaggtttggccc

SEQ ID NO: 20806 - DNA, 33 bp, Homo sapiens
aactcccactaccttagacaaagccattagaga

SEQ ID NO: 20807 - DNA, 33 bp, Homo sapiens
tgtctgacattgatgcgaaaagtaaagtaaaag

SEQ ID NO: 20808 - DNA, 33 bp, Homo sapiens
ctcaaaatgacataccgatgaccaataggtata

SEQ ID NO: 20809 - DNA, 33 bp, Homo sapiens
aagagttgtcatcatctactggttcagctgtgg

SEQ ID NO: 20810 - DNA, 33 bp, Homo sapiens
aatgggcaagagaatatccagactagctaggac

SEQ ID NO: 20811 - DNA, 33 bp, Homo sapiens
ttttgaagactaaccatggtttctttgaagtga

SEQ ID NO: 20812 - DNA, 33 bp, Homo sapiens
ggtggagaaagaaaactgtagagcaagccaact

SEQ ID NO: 20813 - DNA, 33 bp, Homo sapiens
gaaactgaggccaagtcaataggttcacagggc

SEQ ID NO: 20814 - DNA, 33 bp, Homo sapiens
gtaaatctctcagacagtagagagacgaaggat

SEQ ID NO: 20815 - DNA, 33 bp, Homo sapiens
tcatgtcaccaaattaggaagaggcactaggaa

SEQ ID NO: 20816 - DNA, 33 bp, Homo sapiens
tatgcttgagtaactatattccggggtctatat

SEQ ID NO: 20817 - DNA, 33 bp, Homo sapiens
catggcttctcaatcaggcaagtacatgtttta

SEQ ID NO: 20818 - DNA, 33 bp, Homo sapiens
agtaatcgatgggctagatgaggtagaagttgt

SEQ ID NO: 20819 - DNA, 33 bp, Homo sapiens
ttaggaaagtcgctgcgaactggtactataaat

SEQ ID NO: 20820 - DNA, 33 bp, Homo sapiens
aaccaaatttgcgttatcataaaacccatgagc

SEQ ID NO: 20821 - DNA, 33 bp, Homo sapiens
ggacacgattataccacaagatgaactgcatga

SEQ ID NO: 20822 - DNA, 33 bp, Homo sapiens
tttctagtttgggggataaattgtcacttgaat

SEQ ID NO: 20823 - DNA, 33 bp, Homo sapiens
tatttaaaacctgaaatggaagactgtacaaat

SEQ ID NO: 20824 - DNA, 33 bp, Homo sapiens
tgtccaaaagactcaggagtgatatatttagat

SEQ ID NO: 20825 - DNA, 33 bp, Homo sapiens
atcatgagttttaaccgcttcacacctgcagtt

SEQ ID NO: 20826 - DNA, 33 bp, Homo sapiens
aatatagccatgtatgcaaattttaatctagaa

SEQ ID NO: 20827 - DNA, 33 bp, Homo sapiens
ggtagaaaaagataccgaaatgtcatggtgata

SEQ ID NO: 20828 - DNA, 51 bp, Homo sapiens
agaaataatgtgggctgctttcacattcctcttaagtaaaaatcccctgcc

SEQ ID NO: 20829 - DNA, 33 bp, Homo sapiens
agaatggataagaatatatatggatgctagtga

SEQ ID NO: 20830 - DNA, 33 bp, Homo sapiens
ccggtatatacaccaggccaagacaatataagg

SEQ ID NO: 20831 - DNA, 33 bp, Homo sapiens
aaataatttcacctcagcagatttgtcctttca

SEQ ID NO: 20832 - DNA, 33 bp, Homo sapiens
taaaaccatgtatgcagatcactaaacgtagag

SEQ ID NO: 20833 - DNA, 33 bp, Homo sapiens
agaaagctaaatcagcggccacaagaatagtat

SEQ ID NO: 20834 - DNA, 33 bp, Homo sapiens
tgttgtcatttgctgaggatggtgctcctgcaa

SEQ ID NO: 20835 - DNA, 33 bp, Homo sapiens
attttgtcattgtcccgccttgggtcttttcca

SEQ ID NO: 20836 - DNA, 33 bp, Homo sapiens
tatcatttcctaggtcgaattctctaaggaaga

SEQ ID NO: 20837 - DNA, 33 bp, Homo sapiens
cttgtggaagaggaggtcagaataaaaggagaa

SEQ ID NO: 20838 - DNA, 51 bp, Homo sapiens
tctataaagcagatattttccatcattgagattctttcaaattctgaaaaa

SEQ ID NO: 20839 - DNA, 33 bp, Homo sapiens
ttatactgccactttctctagtctctgtagctc

SEQ ID NO: 20840 - DNA, 33 bp, Homo sapiens
atgaataatataatgagccctcacacctccatc

SEQ ID NO: 20841 - DNA, 33 bp, Homo sapiens
ttgtgacacggagtaccctgatgacctcagagc

SEQ ID NO: 20842 - DNA, 33 bp, Homo sapiens
acacttaactcacttccatcttctaaatacgtg

SEQ ID NO: 20843 - DNA, 33 bp, Homo sapiens
tgatgcctgccactcagtagatgctagttcttc

SEQ ID NO: 20844 - DNA, 33 bp, Homo sapiens
ccgtggaaatttcttatgggctggtgctgttcc

SEQ ID NO: 20845 - DNA, 33 bp, Homo sapiens
acccaggctactcatagactcatgagaaataat

SEQ ID NO: 20846 - DNA, 51 bp, Homo sapiens
ctcagggcatgtcttctacaatattttatgtcatctagaccatttcaaatc

SEQ ID NO: 20847 - DNA, 33 bp, Homo sapiens
aagactctcttcaaaagaacaaaaaaagcagct

SEQ ID NO: 20848 - DNA, 33 bp, Homo sapiens
tacacagggtgagaaatccatgatccctggcct

SEQ ID NO: 20849 - DNA, 33 bp, Homo sapiens
ggtagtggaatcaagaggttgctgtttttgcta

SEQ ID NO: 20850 - DNA, 33 bp, Homo sapiens
catgaggaggctgtaatcactgaaataggccag

SEQ ID NO: 20851 - DNA, 51 bp, Homo sapiens
tacaggcacaaaattattactcgacgcagaatgagttggtgctttccagag

SEQ ID NO: 20852 - DNA, 33 bp, Homo sapiens
tagggaagtgcttacatatcaatctgtacatgt

SEQ ID NO: 20853 - DNA, 33 bp, Homo sapiens
tgggcttttccactactgctcaaaatagtaata

SEQ ID NO: 20854 - DNA, 33 bp, Homo sapiens
actcttaccacaaagctcaagtcagcttggcct

SEQ ID NO: 20855 - DNA, 33 bp, Homo sapiens
tgcccagcaggatacctcattcttcacgatgtg

SEQ ID NO: 20856 - DNA, 33 bp, Homo sapiens
tcccaggtgctcccaggacatttaatttgtagt

SEQ ID NO: 20857 - DNA, 33 bp, Homo sapiens
ctttactctgtggatctaatctttcactttttt

SEQ ID NO: 20858 - DNA, 33 bp, Homo sapiens
tcatacctcttactactggcttcagtatcaaaa

SEQ ID NO: 20859 - DNA, 51 bp, Homo sapiens
actgagcccagctctaattctaaaacctttaatatgactttcaagatttta

SEQ ID NO: 20860 - DNA, 33 bp, Homo sapiens
tgctagaaaactgctagacaaacatcatcagta

SEQ ID NO: 20861 - DNA, 33 bp, Homo sapiens
tgtctgcaatagagacgcagagacgatgaattc

SEQ ID NO: 20862 - DNA, 33 bp, Homo sapiens
caaggctggtctttcctctaccttgagttccca

SEQ ID NO: 20863 - DNA, 33 bp, Homo sapiens
tgcaattgctgaaccatgtggtaactctatgtt

SEQ ID NO: 20864 - DNA, 33 bp, Homo sapiens
cccccattgaccagaggaaaaaatagctgctgg

SEQ ID NO: 20865 - DNA, 33 bp, Homo sapiens
atgggggaggataatatgaatgaaggtctaggg

SEQ ID NO: 20866 - DNA, 33 bp, Homo sapiens
atcaaaaatcatctcagtagggtcagagggggc

SEQ ID NO: 20867 - DNA, 33 bp, Homo sapiens
tgctcattgaacagaaggatctcaaggctgggt

SEQ ID NO: 20868 - DNA, 33 bp, Homo sapiens
tacagcaataatgctctcgagtctcatttccca

SEQ ID NO: 20869 - DNA, 33 bp, Homo sapiens
caataaactggaaggaggaaaaactatcactgc

SEQ ID NO: 20870 - DNA, 33 bp, Homo sapiens
agaaaaagcccaaacatgtgaacataagaggtc

SEQ ID NO: 20871 - DNA, 33 bp, Homo sapiens
ttcctggggaaaaaaagcatcttgtaatgtatg

SEQ ID NO: 20872 - DNA, 33 bp, Homo sapiens
tccagcttgtggacaagagacctaatggttccc

SEQ ID NO: 20873 - DNA, 33 bp, Homo sapiens
ctattcctagactctatcctagttctcataact

SEQ ID NO: 20874 - DNA, 33 bp, Homo sapiens
ggagaaattactctcatcctatctttttcaatt

SEQ ID NO: 20875 - DNA, 33 bp, Homo sapiens
cacattaaggcttccatagtctcagagtttcta

SEQ ID NO: 20876 - DNA, 33 bp, Homo sapiens
caggccaattgtcttatactgactgataaaagc

SEQ ID NO: 20877 - DNA, 33 bp, Homo sapiens
ctggtagtttgcagaagagatgagagtcaggaa

SEQ ID NO: 20878 - DNA, 33 bp, Homo sapiens
ttcaagatgcactgacgcattgcattatccccc

SEQ ID NO: 20879 - DNA, 33 bp, Homo sapiens
tccttaggggtagccattgaagcaaatgatgat

SEQ ID NO: 20880 - DNA, 33 bp, Homo sapiens
ctgacatcagagaaggtcaggctttactccttt

SEQ ID NO: 20881 - DNA, 33 bp, Homo sapiens
atgggcatctttataatgagtatgagttgaaat

SEQ ID NO: 20882 - DNA, 33 bp, Homo sapiens
aaatttcgacttcctgtaggatttcaatctatt

SEQ ID NO: 20883 - DNA, 33 bp, Homo sapiens
tgtagctgttgttcacgaagagatagcccctct

SEQ ID NO: 20884 - DNA, 33 bp, Homo sapiens
caagctatgcagctcttaagtgcaagggctagg

SEQ ID NO: 20885 - DNA, 33 bp, Homo sapiens
acagtccgggctttaataggggagcctggaaca

SEQ ID NO: 20886 - DNA, 33 bp, Homo sapiens
tagcccctggcaatcatcactctactttgttta

SEQ ID NO: 20887 - DNA, 51 bp, Homo sapiens
ctagcctgtgtggccatatgcagtagcactgaatagatttaaagtaatttg

SEQ ID NO: 20888 - DNA, 33 bp, Homo sapiens
tgatgagttaaaggagtaagtctcaaaataata

SEQ ID NO: 20889 - DNA, 33 bp, Homo sapiens
tttagcagacgaaaaccactttggtagtgccag

SEQ ID NO: 20890 - DNA, 33 bp, Homo sapiens
aggggctggtttgatatcttgtggtcttcctgc

SEQ ID NO: 20891 - DNA, 33 bp, Homo sapiens
tctcagttatgctaggcagaaaggagctcttgt

SEQ ID NO: 20892 - DNA, 33 bp, Homo sapiens
gtcaggttctggtcacgctgtcattctggctgc

SEQ ID NO: 20893 - DNA, 33 bp, Homo sapiens
ttacagaaagagaaggtcattgcttgcaaacaa

SEQ ID NO: 20894 - DNA, 33 bp, Homo sapiens
tagttacacagatacatgcacctttttatttat

SEQ ID NO: 20895 - DNA, 33 bp, Homo sapiens
tgaacatggcagctaagcattggcacaagtctt

SEQ ID NO: 20896 - DNA, 33 bp, Homo sapiens
cttcagtcactgggaatcagcgcctctgcctac

SEQ ID NO: 20897 - DNA, 33 bp, Homo sapiens
agtaacagccatgaaagcaacaaaccgcatcac

SEQ ID NO: 20898 - DNA, 33 bp, Homo sapiens
cagatagtttaggctagcaatgtgattgatggt

SEQ ID NO: 20899 - DNA, 33 bp, Homo sapiens
atttttacttttcacagtctctctaacatgacc

SEQ ID NO: 20900 - DNA, 33 bp, Homo sapiens
taactgttaaatttgggcaccatcgttgtttca

SEQ ID NO: 20901 - DNA, 33 bp, Homo sapiens
tgactgatttggatgatgacattcccactgagc

SEQ ID NO: 20902 - DNA, 33 bp, Homo sapiens
tgtcattctggttttatacgccagtggatggat

SEQ ID NO: 20903 - DNA, 51 bp, Homo sapiens
ataaagagatccggtttcttaagcagagtctcccagatcatacgcccacct

SEQ ID NO: 20904 - DNA, 33 bp, Homo sapiens
aaagcatactgacaaatctttgagactgtaaat

SEQ ID NO: 20905 - DNA, 51 bp, Homo sapiens
cgcccctgtacagtagattcttttagcaccacctcagaacacactgaacag

SEQ ID NO: 20906 - DNA, 33 bp, Homo sapiens
gtattggcaagagaactgagtttcaggccggtg

SEQ ID NO: 20907 - DNA, 33 bp, Homo sapiens
aatctcatctgccacaggagactaaatctagcc

SEQ ID NO: 20908 - DNA, 33 bp, Homo sapiens
ttaatgtggattgttatagtcaggcaattatcc

SEQ ID NO: 20909 - DNA, 51 bp, Homo sapiens
tacttatgcatggtctaatgaattctctttcttcttgtttgtgcaatggct

SEQ ID NO: 20910 - DNA, 33 bp, Homo sapiens
tctatagcaccttcacggatatcagccaggccc

SEQ ID NO: 20911 - DNA, 33 bp, Homo sapiens
gtagtagcccagaagatgagaaaaaaggagttc

SEQ ID NO: 20912 - DNA, 33 bp, Homo sapiens
ggaaagcaagaggtaactacaggtcaaatcaaa

SEQ ID NO: 20913 - DNA, 33 bp, Homo sapiens
ttactttgctttctcatccatccgattcaaaat

SEQ ID NO: 20914 - DNA, 33 bp, Homo sapiens
ggatgagtggggaatagagtgagtgcttgatat

SEQ ID NO: 20915 - DNA, 33 bp, Homo sapiens
atgatggtatttaaggtcactactgatgttctt

SEQ ID NO: 20916 - DNA, 33 bp, Homo sapiens
ttctcattcaggtctctcaacaatagtgcaaag

SEQ ID NO: 20917 - DNA, 33 bp, Homo sapiens
cacttctctgcaaataggtaaaagggaatggca

SEQ ID NO: 20918 - DNA, 33 bp, Homo sapiens
ggtggtcttgcattgagtaagagggtaagtgga

SEQ ID NO: 20919 - DNA, 33 bp, Homo sapiens
tgcctgggaagaagcaggagtaagttcatgaaa

SEQ ID NO: 20920 - DNA, 33 bp, Homo sapiens
gctttacaaaatatgctgcaccgggagagtgga

SEQ ID NO: 20921 - DNA, 33 bp, Homo sapiens
gcagcaaccttccaagtcttcgagtgctattgc

SEQ ID NO: 20922 - DNA, 33 bp, Homo sapiens
cctgtcctctctttaactgctccaaatatgctt

SEQ ID NO: 20923 - DNA, 33 bp, Homo sapiens
tttgggcatacaggccggatatacacacacagg

SEQ ID NO: 20924 - DNA, 33 bp, Homo sapiens
tctctctcttctaacagtgatggtactggtata

SEQ ID NO: 20925 - DNA, 33 bp, Homo sapiens
aatgtggtagaagtaaggttataagagttctag

SEQ ID NO: 20926 - DNA, 33 bp, Homo sapiens
cctcttagctatgtgctctttgaaaattaaact

SEQ ID NO: 20927 - DNA, 33 bp, Homo sapiens
tatgtggagtttcaagcaatggtagaacattta

SEQ ID NO: 20928 - DNA, 33 bp, Homo sapiens
aaagcatctgctcatcgaaagacactgaaaaaa

SEQ ID NO: 20929 - DNA, 33 bp, Homo sapiens
gacaggataacaataccatatctggactgtctg

SEQ ID NO: 20930 - DNA, 33 bp, Homo sapiens
ataactttggttccaatattttgattttctaat

SEQ ID NO: 20931 - DNA, 33 bp, Homo sapiens
attgccttggtagaaaggagtatggtgggcacc

SEQ ID NO: 20932 - DNA, 33 bp, Homo sapiens
gttgtcacagccagaatattttacaacagtgtg

SEQ ID NO: 20933 - DNA, 33 bp, Homo sapiens
cagcccaactaaaccatcaactccaagactcac

SEQ ID NO: 20934 - DNA, 33 bp, Homo sapiens
gggctcatgaactgaatagagggaatccagaaa

SEQ ID NO: 20935 - DNA, 33 bp, Homo sapiens
ttatagctatcataaaggtgaagaaaaacatcc

SEQ ID NO: 20936 - DNA, 33 bp, Homo sapiens
gataacaatccaacaccgtgcttatggagcatg

SEQ ID NO: 20937 - DNA, 33 bp, Homo sapiens
ataatgacggagcacctacaagaaacatccaag

SEQ ID NO: 20938 - DNA, 33 bp, Homo sapiens
tggtatgatctgaatttaagagtcctttctggc

SEQ ID NO: 20939 - DNA, 33 bp, Homo sapiens
gaggtccacgcttagcggaatttgtagaatgga

SEQ ID NO: 20940 - DNA, 33 bp, Homo sapiens
acaaagactcatattatcagcctcttaaataca

SEQ ID NO: 20941 - DNA, 33 bp, Homo sapiens
gatctacttggctccacattccacactgtcttc

SEQ ID NO: 20942 - DNA, 33 bp, Homo sapiens
aaaaaaagaaaggcaattcagaggaaggggata

SEQ ID NO: 20943 - DNA, 33 bp, Homo sapiens
tgtggtataagagaagtagctaaacagagaaat

SEQ ID NO: 20944 - DNA, 33 bp, Homo sapiens
taagagacttgcaatggatgtaataactggatg

SEQ ID NO: 20945 - DNA, 33 bp, Homo sapiens
agttgtttggggaaaattatgtccactagacct

SEQ ID NO: 20946 - DNA, 33 bp, Homo sapiens
acgttcttcttctagatggtctcatggttggcc

SEQ ID NO: 20947 - DNA, 33 bp, Homo sapiens
gcataacctggtgggagatggtggtaccgccgc

SEQ ID NO: 20948 - DNA, 33 bp, Homo sapiens
tgttcctgctttgggatgctcttgctatgacat

SEQ ID NO: 20949 - DNA, 33 bp, Homo sapiens
tgttgcttagtacttatgactgagacttacacc

SEQ ID NO: 20950 - DNA, 33 bp, Homo sapiens
atttctttactattcatctatgcattgtgtatt

SEQ ID NO: 20951 - DNA, 33 bp, Homo sapiens
ccccaggcttgccccatgtttccacttttccct

SEQ ID NO: 20952 - DNA, 51 bp, Homo sapiens
gagaatgttaagtcttgcagtattgtttaaccctgaaggagtttgtgttag

SEQ ID NO: 20953 - DNA, 33 bp, Homo sapiens
aggttcacctgattcctcgacccatctggcttg

SEQ ID NO: 20954 - DNA, 33 bp, Homo sapiens
ttcctaacttgtatacgccaaccggaacattct

SEQ ID NO: 20955 - DNA, 33 bp, Homo sapiens
aatccaatgggcaggatgagaaaaacacatgga

SEQ ID NO: 20956 - DNA, 33 bp, Homo sapiens
cgaaaggattttggtcgagggagtacaagaccc

SEQ ID NO: 20957 - DNA, 33 bp, Homo sapiens
taaaggtacgtccatcggaacaaatggagaaac

SEQ ID NO: 20958 - DNA, 33 bp, Homo sapiens
gctttgtggcgtgtaataaagactgccgagcag

SEQ ID NO: 20959 - DNA, 33 bp, Homo sapiens
aggcatggcacagaacgagggacgaaacaattg

SEQ ID NO: 20960 - DNA, 33 bp, Homo sapiens
ttcacttgtcttcttcgctgtggtacctccagc

SEQ ID NO: 20961 - DNA, 33 bp, Homo sapiens
ttcgcaaatctctgccgcacaaaatcatgagca

SEQ ID NO: 20962 - DNA, 33 bp, Homo sapiens
agcccgtgttcttctctccttgccagctgtctg

SEQ ID NO: 20963 - DNA, 33 bp, Homo sapiens
gtggatgggcaagtgatagatgtgtggaaactc

SEQ ID NO: 20964 - DNA, 33 bp, Homo sapiens
tgcctagctcaaggccgataaccatgttgaacc

SEQ ID NO: 20965 - DNA, 51 bp, Homo sapiens
ttcttattgggtgctggtatattctgtcatttagagaggtctgagagaaga

SEQ ID NO: 20966 - DNA, 33 bp, Homo sapiens
acgcagctgcacctggtacagcagacacagctg

SEQ ID NO: 20967 - DNA, 33 bp, Homo sapiens
tgtctcaggtctacacgagacagggagtgggag

SEQ ID NO: 20968 - DNA, 33 bp, Homo sapiens
gtgaagagggaatcaagtgtgcaagggttttac

SEQ ID NO: 20969 - DNA, 33 bp, Homo sapiens
ttggaagctgcagtccgctccgtctccttccag

SEQ ID NO: 20970 - DNA, 33 bp, Homo sapiens
gccagctaatttataatgtcatatgggctagac

SEQ ID NO: 20971 - DNA, 33 bp, Homo sapiens
gctgctgcagtctgaatggtgacggtggcccct

SEQ ID NO: 20972 - DNA, 33 bp, Homo sapiens
tctgtgaagatgtggttaagtcacaagtgatac

SEQ ID NO: 20973 - DNA, 51 bp, Homo sapiens
ttatctttaaacaccttttgaaatattactcttcctggtgtctgaattaga

SEQ ID NO: 20974 - DNA, 51 bp, Homo sapiens
gcaagctttttctgtaaaggaccacggagtaaacattttcaactttgtggg

SEQ ID NO: 20975 - DNA, 33 bp, Homo sapiens
catgtgcttttaaacaggtctttcaaagatcac

SEQ ID NO: 20976 - DNA, 33 bp, Homo sapiens
gcagatataatgactctaatacctgtagccatc

SEQ ID NO: 20977 - DNA, 33 bp, Homo sapiens
gatcctgcccactctataaatgaggacaccagg

SEQ ID NO: 20978 - DNA, 33 bp, Homo sapiens
gttcttcaatttgagatgaggccagactggatt

SEQ ID NO: 20979 - DNA, 33 bp, Homo sapiens
ggtcagtggtcattgggattcaagctaagtctt

SEQ ID NO: 20980 - DNA, 51 bp, Homo sapiens
acgttcagcactttgcaaactagaatatgccccagaggctccgggtgcaac

SEQ ID NO: 20981 - DNA, 33 bp, Homo sapiens
cgccccatccatgagcgagccaagggtagtatc

SEQ ID NO: 20982 - DNA, 33 bp, Homo sapiens
cactgtgcaaggtagagagtaactttttaaata

SEQ ID NO: 20983 - DNA, 33 bp, Homo sapiens
aacagagagcgccccatctgtgtatccacaggg

SEQ ID NO: 20984 - DNA, 33 bp, Homo sapiens
tgccacgcaaaacccctagcactttgtaggcat

SEQ ID NO: 20985 - DNA, 33 bp, Homo sapiens
ccagacaactgaagacggcctatagcccagagc

SEQ ID NO: 20986 - DNA, 33 bp, Homo sapiens
cttcctcccaaaggaatcctccatctctagttg

SEQ ID NO: 20987 - DNA, 33 bp, Homo sapiens
tactctgtacccagaactctcacctttcctggg

SEQ ID NO: 20988 - DNA, 33 bp, Homo sapiens
gccagaaaagagaaaccaggctacacgcaggac

SEQ ID NO: 20989 - DNA, 33 bp, Homo sapiens
tagagtccaggtccacgggaagtagttaaggtt

SEQ ID NO: 20990 - DNA, 33 bp, Homo sapiens
cttgccttgggacaccgatactcagctgacagc

SEQ ID NO: 20991 - DNA, 33 bp, Homo sapiens
tttgtggaaagcaacagtacatatcagtcaatg

SEQ ID NO: 20992 - DNA, 33 bp, Homo sapiens
ggttaagaagcaggaatgtttgtcttgaggcca

SEQ ID NO: 20993 - DNA, 33 bp, Homo sapiens
agagaaaaaagctcagtattagcagagaagacg

SEQ ID NO: 20994 - DNA, 33 bp, Homo sapiens
gcccgccaagatctactgaatcggacaccctgg

SEQ ID NO: 20995 - DNA, 33 bp, Homo sapiens
tgtcacgaggaaggtatgaggaaggctgtcccc

SEQ ID NO: 20996 - DNA, 33 bp, Homo sapiens
gcaacttgcagttccggagagcgctggctgctt

SEQ ID NO: 20997 - DNA, 33 bp, Homo sapiens
ccacatggggcctcgcgctcgcgttacccttcc

SEQ ID NO: 20998 - DNA, 33 bp, Homo sapiens
gcaaaaatcaaatccagtcaaactaaatcacca

SEQ ID NO: 20999 - DNA, 33 bp, Homo sapiens
cctaactgtaacatcaggggaaagtgataggaa

SEQ ID NO: 21000 - DNA, 33 bp, Homo sapiens
tgtccctgaacaccaactaccgagacagctgat

SEQ ID NO: 21001 - DNA, 33 bp, Homo sapiens
agaacctttcacacgcgatctcagaatttacaa

SEQ ID NO: 21002 - DNA, 33 bp, Homo sapiens
tttggtctctttgggaggaagttatacaaaaag

SEQ ID NO: 21003 - DNA, 51 bp, Homo sapiens
tggatcgtttcagtagcttatctgaggagcctctgcctagctgaaggtcac

SEQ ID NO: 21004 - DNA, 33 bp, Homo sapiens
tgttgtaggcaatgtgtaattcctgaaaggctg

SEQ ID NO: 21005 - DNA, 33 bp, Homo sapiens
acagttttgaacacagcattaactaggtcttga

SEQ ID NO: 21006 - DNA, 51 bp, Homo sapiens
aaaatgttttaaaattccagattaattgcacatttacttctttttttttct

SEQ ID NO: 21007 - DNA, 33 bp, Homo sapiens
aagccacagtacaaacgagtgagttgggttttt

SEQ ID NO: 21008 - DNA, 33 bp, Homo sapiens
agtgcccggcacattatacatgcttaatagaca

SEQ ID NO: 21009 - DNA, 33 bp, Homo sapiens
gtcccatttatcactctcagtcctgaatttggt

SEQ ID NO: 21010 - DNA, 51 bp, Homo sapiens
gtaggagagccatcccgggcagccactagtatgtgcaaacgcttgcaaaca

SEQ ID NO: 21011 - DNA, 33 bp, Homo sapiens
caaaatgaaatgttccgcaaacaatattcagaa

SEQ ID NO: 21012 - DNA, 51 bp, Homo sapiens
ttgggataagatgagcctcctgggatgcaaacactcctgaattagagtcat

SEQ ID NO: 21013 - DNA, 51 bp, Homo sapiens
ataggctggtgttaactggcccaaggactgacattaaaagcttggttagaa

SEQ ID NO: 21014 - DNA, 33 bp, Homo sapiens
ctccctcctactcccatactgtgatcaactgta

SEQ ID NO: 21015 - DNA, 33 bp, Homo sapiens
agaatagacttcaacagggagcctgtggtatga

SEQ ID NO: 21016 - DNA, 33 bp, Homo sapiens
tggcaataaattttactatttctctggctctca

SEQ ID NO: 21017 - DNA, 33 bp, Homo sapiens
ttcacttgtgccttattaattgcatttgttcac

SEQ ID NO: 21018 - DNA, 33 bp, Homo sapiens
agaaacaatggaagtctaaacctgtaaaataat

SEQ ID NO: 21019 - DNA, 51 bp, Homo sapiens
aaaattaacacaggacaaatctatacgactttgagtttggtgataagatat

SEQ ID NO: 21020 - DNA, 33 bp, Homo sapiens
ttcaccttaatcctactgggggcttagctgtat

SEQ ID NO: 21021 - DNA, 33 bp, Homo sapiens
tatgaattttggttcaccttccatagctgtact

SEQ ID NO: 21022 - DNA, 33 bp, Homo sapiens
agccacaggtaaccactgatctcagaacaaaga

SEQ ID NO: 21023 - DNA, 33 bp, Homo sapiens
ctgtttcctttcacaatcacctcttgcacactg

SEQ ID NO: 21024 - DNA, 33 bp, Homo sapiens
tctcagaagcccttgagactactgtgcctgaat

SEQ ID NO: 21025 - DNA, 51 bp, Homo sapiens
taatatatagatgtgttttataatatgttttcagaaaggcagttttttttt

SEQ ID NO: 21026 - DNA, 33 bp, Homo sapiens
aacaagtacaatacactggaatgggacgcaaag

SEQ ID NO: 21027 - DNA, 33 bp, Homo sapiens
tggaagtaggagtagggagaggagagtgtcccc

SEQ ID NO: 21028 - DNA, 33 bp, Homo sapiens
aggctgaaaactgcatgagctcagctgtcccat

SEQ ID NO: 21029 - DNA, 51 bp, Homo sapiens
tttgttgtttgtttgtgatacggtagattagttttttattgctgctgtaac

SEQ ID NO: 21030 - DNA, 33 bp, Homo sapiens
atgcagcggtaaaaaattaataaggatgatctc

SEQ ID NO: 21031 - DNA, 33 bp, Homo sapiens
gcctcgccagctttaataaccgtttggatatga

SEQ ID NO: 21032 - DNA, 33 bp, Homo sapiens
tggctgttacagtgaatattaaagacttaaaat

SEQ ID NO: 21033 - DNA, 51 bp, Homo sapiens
ctctttttgaaaagtctagggtatatacagtagcattgctttgaagaggaa

SEQ ID NO: 21034 - DNA, 33 bp, Homo sapiens
atgcaggaagcaataagatgtggcactattgtc

SEQ ID NO: 21035 - DNA, 33 bp, Homo sapiens
aatgttaattgctctctaatgtcatcagatctt

SEQ ID NO: 21036 - DNA, 33 bp, Homo sapiens
aagataaaaagctggatggaaagttgaacttac

SEQ ID NO: 21037 - DNA, 33 bp, Homo sapiens
gggacctccttgggcagaaatcatccgtagctc

SEQ ID NO: 21038 - DNA, 33 bp, Homo sapiens
taccataaagacccacgcatgcaaacgttcatt

SEQ ID NO: 21039 - DNA, 33 bp, Homo sapiens
gtgcacctggctacacgagagtactaaggatcc

SEQ ID NO: 21040 - DNA, 33 bp, Homo sapiens
gatgagatactgtctcgcagatgtcagaatgtc

SEQ ID NO: 21041 - DNA, 33 bp, Homo sapiens
tattatagcggaccttcaaaaatacgttatttg

SEQ ID NO: 21042 - DNA, 33 bp, Homo sapiens
gttagttaataacaaagctgtggtcatttctcc

SEQ ID NO: 21043 - DNA, 33 bp, Homo sapiens
tgctttatgccttctcgatcataaaaggaagat

SEQ ID NO: 21044 - DNA, 33 bp, Homo sapiens
atttcaaacctacccctgatgcctcaaacctac

SEQ ID NO: 21045 - DNA, 33 bp, Homo sapiens
tgtctggatttgtccacagcacccagaacaatg

SEQ ID NO: 21046 - DNA, 33 bp, Homo sapiens
gtggggcctaatgggaggtttagatcatgagga

SEQ ID NO: 21047 - DNA, 33 bp, Homo sapiens
taactctgcttataaagggggtgtattctccct

SEQ ID NO: 21048 - DNA, 33 bp, Homo sapiens
gagcaaaaataactgagacttgcaaaggaatgc

SEQ ID NO: 21049 - DNA, 33 bp, Homo sapiens
acgttttagctcctcacattaattctgaagcat

SEQ ID NO: 21050 - DNA, 33 bp, Homo sapiens
tatcaatatctcacaatcttacaaagttgaaat

SEQ ID NO: 21051 - DNA, 51 bp, Homo sapiens
tgaaggatccctgggagtgattgtgtacctgagctgtggcttttgtctaag

SEQ ID NO: 21052 - DNA, 33 bp, Homo sapiens
agatacttcagagaacgatgaaaatgcacatcc

SEQ ID NO: 21053 - DNA, 33 bp, Homo sapiens
tttctaacacagaggagccaacaaatgtgatgt

SEQ ID NO: 21054 - DNA, 51 bp, Homo sapiens
ttttcttcatccaaggaaaacaaacgctttgctatcatttctctatccttc

SEQ ID NO: 21055 - DNA, 33 bp, Homo sapiens
ttgttatcactctgactggtgtcttgttttctg

SEQ ID NO: 21056 - DNA, 33 bp, Homo sapiens
atacaagtagcaagaactgaaatatagctggct

SEQ ID NO: 21057 - DNA, 33 bp, Homo sapiens
ttcttccttttcttaccagggcataatcgtgtc

SEQ ID NO: 21058 - DNA, 33 bp, Homo sapiens
ccctccctgcatggaattgactaaatagcagca

SEQ ID NO: 21059 - DNA, 33 bp, Homo sapiens
cctttcccacggctcatctctctcttggagttc

SEQ ID NO: 21060 - DNA, 33 bp, Homo sapiens
taattgaaagtgtatatgtagaggactgatagc

SEQ ID NO: 21061 - DNA, 33 bp, Homo sapiens
ttaattttttgatataggtgtttacagctataa

SEQ ID NO: 21062 - DNA, 33 bp, Homo sapiens
gctactgcaaagatactggctttaactctgaat

SEQ ID NO: 21063 - DNA, 33 bp, Homo sapiens
gtcaagcatggttgaattcactggcataaaacc

SEQ ID NO: 21064 - DNA, 33 bp, Homo sapiens
ccgaattgtcaccagctgatctgatgtccctcc

SEQ ID NO: 21065 - DNA, 33 bp, Homo sapiens
gaggtaggagttacctgaatttggagaaagcag

SEQ ID NO: 21066 - DNA, 33 bp, Homo sapiens
actcaggtaatataaatgagggccggaaatgag

SEQ ID NO: 21067 - DNA, 33 bp, Homo sapiens
ctagggttgatggagagaatcgtgttgtacgag

SEQ ID NO: 21068 - DNA, 33 bp, Homo sapiens
tatacacgtacgcatatataaatgtgaaataaa

SEQ ID NO: 21069 - DNA, 33 bp, Homo sapiens
atagtgaccatcaatatcttggagggtagagga

SEQ ID NO: 21070 - DNA, 33 bp, Homo sapiens
taggaaacttgcaaaagagagttagttcactta

SEQ ID NO: 21071 - DNA, 33 bp, Homo sapiens
tgttctatttttcaactggcacatatcagtatt

SEQ ID NO: 21072 - DNA, 33 bp, Homo sapiens
caaaatctcaatagcatcaaggttaagaaaccc

SEQ ID NO: 21073 - DNA, 33 bp, Homo sapiens
ggcagtctggtccctggaataagacctgctgtt

SEQ ID NO: 21074 - DNA, 33 bp, Homo sapiens
taagctactcttggacgcaggctctgctcactt

SEQ ID NO: 21075 - DNA, 33 bp, Homo sapiens
ctggtttgcctctacagcactggcaatgccttc

SEQ ID NO: 21076 - DNA, 33 bp, Homo sapiens
taatcataactgacaatctattaagggtacttg

SEQ ID NO: 21077 - DNA, 33 bp, Homo sapiens
atgtgagttgtagagccagcatcaaatcatggt

SEQ ID NO: 21078 - DNA, 33 bp, Homo sapiens
ggatgtagcctattgctgaaaacaatgataaaa

SEQ ID NO: 21079 - DNA, 51 bp, Homo sapiens
gtcccagttcatctctttgaggaaataaagggctctaggggtgaaggaagg

SEQ ID NO: 21080 - DNA, 33 bp, Homo sapiens
tctaatctctgtatcttaattcctgcatctgat

SEQ ID NO: 21081 - DNA, 33 bp, Homo sapiens
acgtggtatcagtctatggagaggctaagctca

SEQ ID NO: 21082 - DNA, 33 bp, Homo sapiens
aaggataaggttaaatgacaccctacaaaccat

SEQ ID NO: 21083 - DNA, 33 bp, Homo sapiens
catttgatttttcctatgaagtctttgaaatca

SEQ ID NO: 21084 - DNA, 33 bp, Homo sapiens
ttattctatctcaaagcctcaagacttggacta

SEQ ID NO: 21085 - DNA, 51 bp, Homo sapiens
tttcccagtttggtgatacaacaacgcttggagaattcaaagcctcttatt

SEQ ID NO: 21086 - DNA, 33 bp, Homo sapiens
gttttgaaaaataggcgaaaaagtgtaggagaa

SEQ ID NO: 21087 - DNA, 33 bp, Homo sapiens
tggttacgagttcacaccattttcagtgttaag

SEQ ID NO: 21088 - DNA, 33 bp, Homo sapiens
tatcccatcaagagaatgagctactcacttgac

SEQ ID NO: 21089 - DNA, 33 bp, Homo sapiens
ggaaagggcacagatatggcaactcatccccca

SEQ ID NO: 21090 - DNA, 33 bp, Homo sapiens
gtgtgctcacaatgcagcttttacactcagaga

SEQ ID NO: 21091 - DNA, 51 bp, Homo sapiens
gaaatggtgactagccccagcataatgtttcttcaattttttaaaaaccac

SEQ ID NO: 21092 - DNA, 33 bp, Homo sapiens
tgttgcttcaaataacgagatttcattcttttt

SEQ ID NO: 21093 - DNA, 33 bp, Homo sapiens
ccatcgctttccttaatatagatatcatgaaaa

SEQ ID NO: 21094 - DNA, 33 bp, Homo sapiens
gcttttagtgtatttatcaagatgttccaccat

SEQ ID NO: 21095 - DNA, 33 bp, Homo sapiens
tgctgtgtgtttactctagaacgccctgctcac

SEQ ID NO: 21096 - DNA, 33 bp, Homo sapiens
ggaaatcattgcataggcctctccctgacaata

SEQ ID NO: 21097 - DNA, 33 bp, Homo sapiens
tacattacatatcctggagcgcacgtgtaaaag

SEQ ID NO: 21098 - DNA, 51 bp, Homo sapiens
acaaataaaaaagaactagtcagcctatatgtaacacatattcaacaaatc

SEQ ID NO: 21099 - DNA, 33 bp, Homo sapiens
aggcagaggcttcagcgtaagatcccacagctt

SEQ ID NO: 21100 - DNA, 33 bp, Homo sapiens
atgttggtaattcttgtactagttcaatctttt

SEQ ID NO: 21101 - DNA, 33 bp, Homo sapiens
ataatgttaacttaaagtatgtcacaaagatct

SEQ ID NO: 21102 - DNA, 33 bp, Homo sapiens
ctgttcttgcaactaatgagcatggattggagc

SEQ ID NO: 21103 - DNA, 33 bp, Homo sapiens
gtgatctgactctacagcctcagcacctaattt

SEQ ID NO: 21104 - DNA, 33 bp, Homo sapiens
gatgcacttggcaccggatagtttttctcgggc

SEQ ID NO: 21105 - DNA, 51 bp, Homo sapiens
catcgaagtctcaaatgtagtgtcccagatgagaaatgtcattcaggaatt

SEQ ID NO: 21106 - DNA, 33 bp, Homo sapiens
ataatagacaagaataggcaggaaaagtctcaa

SEQ ID NO: 21107 - DNA, 33 bp, Homo sapiens
taaaccaaggtttccctggattgtctaacttag

SEQ ID NO: 21108 - DNA, 33 bp, Homo sapiens
gatgtctgtggccgcagtatcagaacgttataa

SEQ ID NO: 21109 - DNA, 33 bp, Homo sapiens
gagcaaaatgtcaagagatctagaggtggtgta

SEQ ID NO: 21110 - DNA, 33 bp, Homo sapiens
ggtttggacaaagaactgttctcgtcattgttt

SEQ ID NO: 21111 - DNA, 33 bp, Homo sapiens
ctgtatacgatatatattactcaggtgataggt

SEQ ID NO: 21112 - DNA, 33 bp, Homo sapiens
aaaaatctggaaaatagtaatgactcaataaat

SEQ ID NO: 21113 - DNA, 33 bp, Homo sapiens
gccccggataaccccagagaatatagccagaga

SEQ ID NO: 21114 - DNA, 33 bp, Homo sapiens
caatgtctccttcccatggatttttcacctcaa

SEQ ID NO: 21115 - DNA, 33 bp, Homo sapiens
aacacatggaaaaggattagtgtagacagatca

SEQ ID NO: 21116 - DNA, 33 bp, Homo sapiens
agttatgtagcatgaatgtggaataacccatca

SEQ ID NO: 21117 - DNA, 33 bp, Homo sapiens
gtactaggaagaaccctcacttttgatctcaat

SEQ ID NO: 21118 - DNA, 33 bp, Homo sapiens
atctacttacatcttacagcatttgaggtcaat

SEQ ID NO: 21119 - DNA, 51 bp, Homo sapiens
ggtgtagattgttccacttcttgaattgtaaagcccaacctctagaaaggg

SEQ ID NO: 21120 - DNA, 33 bp, Homo sapiens
tttgggagtcagaatatggatcgaggtgagtca

SEQ ID NO: 21121 - DNA, 33 bp, Homo sapiens
ggaaggcaagtcaggattcatatcggtacagat

SEQ ID NO: 21122 - DNA, 33 bp, Homo sapiens
agagaaaagcgtgcaagtaagtgctccgtgagg

SEQ ID NO: 21123 - DNA, 33 bp, Homo sapiens
tgactgtcactgataataagaccgataagcaga

SEQ ID NO: 21124 - DNA, 33 bp, Homo sapiens
ctaattttgagttcattaaatggtgctttttgt

SEQ ID NO: 21125 - DNA, 33 bp, Homo sapiens
gaaggttttatttcaatttcgaaggtgtcatca

SEQ ID NO: 21126 - DNA, 33 bp, Homo sapiens
ttctgcacagggttcatagtatttcataggaca

SEQ ID NO: 21127 - DNA, 33 bp, Homo sapiens
atcttttcttaccaaacgtctcacaaaaccagt

SEQ ID NO: 21128 - DNA, 51 bp, Homo sapiens
cctgccgttgatggtctgttgaaccgctccccgtctcactattccatgagt

SEQ ID NO: 21129 - DNA, 33 bp, Homo sapiens
tttactttccatctcattcctcaaaatatcctc

SEQ ID NO: 21130 - DNA, 33 bp, Homo sapiens
taatgccatgaagggagaaaacaggattctcag

SEQ ID NO: 21131 - DNA, 51 bp, Homo sapiens
agaactgatgcttcaagaagatgaagaaagtttgagcaacagtgtgcagtg

SEQ ID NO: 21132 - DNA, 51 bp, Homo sapiens
ccttgctcgtagtagctgcctttcatagactacattccctgtgtcattcac

SEQ ID NO: 21133 - DNA, 33 bp, Homo sapiens
atggtattaactttgatgtaatttgcattttgg

SEQ ID NO: 21134 - DNA, 33 bp, Homo sapiens
tataataagcaaaacattgtgacaactaaggtg

SEQ ID NO: 21135 - DNA, 33 bp, Homo sapiens
acactctcactccaccggcaatgagttaggtat

SEQ ID NO: 21136 - DNA, 33 bp, Homo sapiens
gcagaaaatgatccaatggcttcccgctgctca

SEQ ID NO: 21137 - DNA, 33 bp, Homo sapiens
tcaggtggcaggtgtatctctattcggtgagaa

SEQ ID NO: 21138 - DNA, 33 bp, Homo sapiens
atggctaaagtaaggatatgcaataaaaattta

SEQ ID NO: 21139 - DNA, 33 bp, Homo sapiens
cctattggatagttccgacatctgggccaggcc

SEQ ID NO: 21140 - DNA, 33 bp, Homo sapiens
ctagtcaagagtagaattgatgtaaggctaaag

SEQ ID NO: 21141 - DNA, 33 bp, Homo sapiens
cttcttcctccctaacggaaccttgactttgtg

SEQ ID NO: 21142 - DNA, 33 bp, Homo sapiens
ttccaaggcaattgactactttagttatccctc

SEQ ID NO: 21143 - DNA, 33 bp, Homo sapiens
atgccttggttcgggctcttcctgagactctca

SEQ ID NO: 21144 - DNA, 51 bp, Homo sapiens
ggttttgattacctatgactgacactggcccaaatgacttggtatggacag

SEQ ID NO: 21145 - DNA, 33 bp, Homo sapiens
ggcaattcagaactaatgttgtaagatctctag

SEQ ID NO: 21146 - DNA, 33 bp, Homo sapiens
cattttaagcacattatacctgagtgattgttg

SEQ ID NO: 21147 - DNA, 33 bp, Homo sapiens
gcagtacatatcaaagtcctcttgactcagata

SEQ ID NO: 21148 - DNA, 33 bp, Homo sapiens
tacaaatgttacagtttaaagtatatgcacctt

SEQ ID NO: 21149 - DNA, 51 bp, Homo sapiens
caatttaaaaacagttaaatgcatagaacaaagcagtagcacaaataaaac

SEQ ID NO: 21150 - DNA, 51 bp, Homo sapiens
ttggttaaaaatgacaaaaagacttcaaatggacttgtcaggagtgtgcta

SEQ ID NO: 21151 - DNA, 33 bp, Homo sapiens
caggttcctcacagcctgctttttctgtagccc

SEQ ID NO: 21152 - DNA, 33 bp, Homo sapiens
agccagattctgcttatgttttggttgccccat

SEQ ID NO: 21153 - DNA, 33 bp, Homo sapiens
accctgaactacattatgctgaacaagtaacca

SEQ ID NO: 21154 - DNA, 33 bp, Homo sapiens
agaatcatcctcttcatgttgttttaggatgta

SEQ ID NO: 21155 - DNA, 33 bp, Homo sapiens
ggagctctgtttcaaatacgttaatttctgttg

SEQ ID NO: 21156 - DNA, 33 bp, Homo sapiens
tgaagaggagcagagatgacttggccacccact

SEQ ID NO: 21157 - DNA, 33 bp, Homo sapiens
tctacctatcagaaaacgattacagaattcatg

SEQ ID NO: 21158 - DNA, 33 bp, Homo sapiens
ctgaaggcaattgcaggagccgtccaccgcatg

SEQ ID NO: 21159 - DNA, 33 bp, Homo sapiens
tcacttgataggcccatattcatggcaggtcag

SEQ ID NO: 21160 - DNA, 33 bp, Homo sapiens
tagtgaggtcattaatgaacagctgggtgaatg

SEQ ID NO: 21161 - DNA, 33 bp, Homo sapiens
ctcaccccacatgctatggagaacattttcagg

SEQ ID NO: 21162 - DNA, 33 bp, Homo sapiens
gctgttatttggacgataggtttcccatccatt

SEQ ID NO: 21163 - DNA, 33 bp, Homo sapiens
gaattatttcaccacatcctttctggaaattgt

SEQ ID NO: 21164 - DNA, 51 bp, Homo sapiens
atcaaacatacagaacaggttgtgatgagttttatgtctgcttgcttgtgg

SEQ ID NO: 21165 - DNA, 33 bp, Homo sapiens
ccagcaattttggaagccgaaccaggaggatca

SEQ ID NO: 21166 - DNA, 33 bp, Homo sapiens
tctgtaacgatacttattaaaatgcaagtgata

SEQ ID NO: 21167 - DNA, 33 bp, Homo sapiens
tttgcaactactctcattaagttaccaagattt

SEQ ID NO: 21168 - DNA, 33 bp, Homo sapiens
tgaaacaacctaaacattaatgccgagtaatga

SEQ ID NO: 21169 - DNA, 33 bp, Homo sapiens
cctcattattgaacactgtcttacctaattttc

SEQ ID NO: 21170 - DNA, 33 bp, Homo sapiens
gaggggcccaacattagtaatgattccatacca

SEQ ID NO: 21171 - DNA, 33 bp, Homo sapiens
ctttaaggtattggacgaatagtcaaatgttct

SEQ ID NO: 21172 - DNA, 33 bp, Homo sapiens
cacatcatgatggctataaaatattgttgtaga

SEQ ID NO: 21173 - DNA, 33 bp, Homo sapiens
actattaacataatcatcttactgtgctatcca

SEQ ID NO: 21174 - DNA, 33 bp, Homo sapiens
gctcagtacatcataactatttggcaaatgtta

SEQ ID NO: 21175 - DNA, 33 bp, Homo sapiens
tgcaaacaaataaaagtcatcattaccattgct

SEQ ID NO: 21176 - DNA, 33 bp, Homo sapiens
tactccagcaattcccggcagtcttttttaaac

SEQ ID NO: 21177 - DNA, 33 bp, Homo sapiens
ttctcttgaactccatgagctgtagtaatcaac

SEQ ID NO: 21178 - DNA, 33 bp, Homo sapiens
tggctcccagcaaagatgactccaggctttctt

SEQ ID NO: 21179 - DNA, 33 bp, Homo sapiens
tgttgggctctgggaaggtgcatgtaggaagcc

SEQ ID NO: 21180 - DNA, 33 bp, Homo sapiens
tcatttctcaaccatctattttcctgcttccaa

SEQ ID NO: 21181 - DNA, 33 bp, Homo sapiens
ttgctacagagaagaacttcctgtgctaagcat

SEQ ID NO: 21182 - DNA, 33 bp, Homo sapiens
gaagtaaaaatgagaagtgaggggtgtgatatt

SEQ ID NO: 21183 - DNA, 33 bp, Homo sapiens
gtgtagtactgcagtctgaactgtaagcatgaa

SEQ ID NO: 21184 - DNA, 33 bp, Homo sapiens
gcttttgtctcattaattatacctggacacact

SEQ ID NO: 21185 - DNA, 33 bp, Homo sapiens
gtctccaacttcctaaccaccagttactaataa

SEQ ID NO: 21186 - DNA, 33 bp, Homo sapiens
atgccataacatttactccacaactactgctct

SEQ ID NO: 21187 - DNA, 33 bp, Homo sapiens
catttaatgtgttgaatgaaacagaccaccaac

SEQ ID NO: 21188 - DNA, 33 bp, Homo sapiens
agcccttctctggctcgctgtttggcctgctgt

SEQ ID NO: 21189 - DNA, 33 bp, Homo sapiens
acttgtatacacccaatcatcgaaccaataatt

SEQ ID NO: 21190 - DNA, 33 bp, Homo sapiens
taaaccaggctggaaagagtgctcctagagtat

SEQ ID NO: 21191 - DNA, 33 bp, Homo sapiens
tacatgggacttgaaatggatgtacatgggtgt

SEQ ID NO: 21192 - DNA, 33 bp, Homo sapiens
caaatgtaaccagctatgtgcgggtgtctggat

SEQ ID NO: 21193 - DNA, 51 bp, Homo sapiens
tttcctccatggagctacaacttacgatatcttccttcccccattctctga

SEQ ID NO: 21194 - DNA, 33 bp, Homo sapiens
tccttttgcctttatttaagtgagatttggctt

SEQ ID NO: 21195 - DNA, 33 bp, Homo sapiens
ctttcacagttgtatatgcagctagcaagaaaa

SEQ ID NO: 21196 - DNA, 33 bp, Homo sapiens
tggtatttattggagctgaatttcacctgtatt

SEQ ID NO: 21197 - DNA, 33 bp, Homo sapiens
gccttttcaggctgccgaaaattcatgttggcg

SEQ ID NO: 21198 - DNA, 33 bp, Homo sapiens
agtttagagtatcttatcaggcaagtggctaga

SEQ ID NO: 21199 - DNA, 33 bp, Homo sapiens
gccttcgtgcacaacttactaggccctgaggat

SEQ ID NO: 21200 - DNA, 33 bp, Homo sapiens
ctccccatcctcaaacgcaggtaaaatgtttcg

SEQ ID NO: 21201 - DNA, 33 bp, Homo sapiens
acaacagaagtttctaggaactttgcacacaca

SEQ ID NO: 21202 - DNA, 33 bp, Homo sapiens
ggctgcagttattacagtctctctattttcttg

SEQ ID NO: 21203 - DNA, 33 bp, Homo sapiens
tgccagcatccaatccgagaaccaatgaatcac

SEQ ID NO: 21204 - DNA, 33 bp, Homo sapiens
ctcaatgtagtacaaacaaagatggtgatttct

SEQ ID NO: 21205 - DNA, 33 bp, Homo sapiens
ggaccttgagtgataatagtgtgtcaatgtttc

SEQ ID NO: 21206 - DNA, 33 bp, Homo sapiens
atttgatggtttttgttaactgagcaagtattt

SEQ ID NO: 21207 - DNA, 33 bp, Homo sapiens
tcgtcaagtacctgtcgaaacgcaaccctctct

SEQ ID NO: 21208 - DNA, 33 bp, Homo sapiens
aatatgaagagcgtactgtaatgtggcttaaac

SEQ ID NO: 21209 - DNA, 51 bp, Homo sapiens
tctcccattgttagcaattaggcaaggacattagtgacagaggggcatcca

SEQ ID NO: 21210 - DNA, 33 bp, Homo sapiens
aagagacaatgtcatggaaaaggggagaacaga

SEQ ID NO: 21211 - DNA, 33 bp, Homo sapiens
gtcagtgttatcattatatttcttggtcatcca

SEQ ID NO: 21212 - DNA, 33 bp, Homo sapiens
actgtgggcaattttaggcacccaaccatggta

SEQ ID NO: 21213 - DNA, 33 bp, Homo sapiens
agaatgaaacaacatatctacgtagctagcaag

SEQ ID NO: 21214 - DNA, 33 bp, Homo sapiens
aacacaagtttttagagcacactgcatcagtga

SEQ ID NO: 21215 - DNA, 33 bp, Homo sapiens
cctttggtaacatcaaccctttggaaaagttgg

SEQ ID NO: 21216 - DNA, 33 bp, Homo sapiens
taggctatatcttgcatgttattgactcctatt

SEQ ID NO: 21217 - DNA, 33 bp, Homo sapiens
aacattttaagaggacgctgaacattttcctag

SEQ ID NO: 21218 - DNA, 33 bp, Homo sapiens
ggatgtggaaggatacgaaaacagagataaagg

SEQ ID NO: 21219 - DNA, 33 bp, Homo sapiens
tactggatcacgtctaggaaaatttaaatatgc

SEQ ID NO: 21220 - DNA, 33 bp, Homo sapiens
tttcagttaaataatcggacaatgtatatgatt

SEQ ID NO: 21221 - DNA, 33 bp, Homo sapiens
attgatcttctctttatgccagatttaacagcg

SEQ ID NO: 21222 - DNA, 51 bp, Homo sapiens
ccttcctttatagaatgaatttgaatgagtagttaacaaatacgtaaatgc

SEQ ID NO: 21223 - DNA, 51 bp, Homo sapiens
gaaatttttcctggagtttataggctgattatattagtctgttctcacact

SEQ ID NO: 21224 - DNA, 33 bp, Homo sapiens
gaacctagtggcaccatcaggattgtcagagcc

SEQ ID NO: 21225 - DNA, 51 bp, Homo sapiens
tctgggaaactgaaaaataataatacgccatgaatacctctatttttatgt

SEQ ID NO: 21226 - DNA, 33 bp, Homo sapiens
ctctttgcctttcaccgctctggaaaacatcct

SEQ ID NO: 21227 - DNA, 33 bp, Homo sapiens
cccttaagtaactcgcgcacgcgggacctgttc

SEQ ID NO: 21228 - DNA, 33 bp, Homo sapiens
gcccactgggaattaacagaagtacccattcca

SEQ ID NO: 21229 - DNA, 33 bp, Homo sapiens
aactgccgatggttgctatatggctatttccaa

SEQ ID NO: 21230 - DNA, 33 bp, Homo sapiens
ctgagtcagattaaaagtggactggcttccata

SEQ ID NO: 21231 - DNA, 33 bp, Homo sapiens
tttcacagttattatctcatctgaaccatatta

SEQ ID NO: 21232 - DNA, 33 bp, Homo sapiens
taccaactgtcaataatgtcacataaattacat

SEQ ID NO: 21233 - DNA, 33 bp, Homo sapiens
ttgcctcttacctcaggaaaggacaccatatgg

SEQ ID NO: 21234 - DNA, 33 bp, Homo sapiens
ctttcaagggtaaccagcttctcaacatgaaaa

SEQ ID NO: 21235 - DNA, 33 bp, Homo sapiens
ggtaataacatctaagcaatggctttctcctaa

SEQ ID NO: 21236 - DNA, 33 bp, Homo sapiens
acatatcaaactcaaacctcaaagctcatatat

SEQ ID NO: 21237 - DNA, 33 bp, Homo sapiens
tatttttaactgttcctgaatatgtataggata

SEQ ID NO: 21238 - DNA, 33 bp, Homo sapiens
taatacatacactaaagcagttaggcgagggca

SEQ ID NO: 21239 - DNA, 33 bp, Homo sapiens
atgtaaactatgcttaggagaaatcagaaagtc

SEQ ID NO: 21240 - DNA, 33 bp, Homo sapiens
tgcatatacaaatacagtgcacccatgaaatga

SEQ ID NO: 21241 - DNA, 33 bp, Homo sapiens
ttcataatcatttccagcatttccaaagaactg

SEQ ID NO: 21242 - DNA, 33 bp, Homo sapiens
cacacattttcatagctcactttgtctaccaga

SEQ ID NO: 21243 - DNA, 51 bp, Homo sapiens
tgtgaaaaacacataggcaagataagtagcccaatctagggaatttgacag

SEQ ID NO: 21244 - DNA, 33 bp, Homo sapiens
gagaggtataatcaagcagcgtgaagctgagtc

SEQ ID NO: 21245 - DNA, 33 bp, Homo sapiens
tccgaaatccttagtgtagcatttagaagtcct

SEQ ID NO: 21246 - DNA, 33 bp, Homo sapiens
gttttcctcttctttagctattctcaccgtctc

SEQ ID NO: 21247 - DNA, 33 bp, Homo sapiens
ttttagctgttgatcctgatgaacctgtccatg

SEQ ID NO: 21248 - DNA, 33 bp, Homo sapiens
agctaatttgaaatgagtattgctactgataat

SEQ ID NO: 21249 - DNA, 33 bp, Homo sapiens
aagccaaataaaggcaccttcccatactcagat

SEQ ID NO: 21250 - DNA, 33 bp, Homo sapiens
agcaactgctggcaatgagaaatggatggaaat

SEQ ID NO: 21251 - DNA, 33 bp, Homo sapiens
gaacaattaaactcactgcaataggaaaaattc

SEQ ID NO: 21252 - DNA, 33 bp, Homo sapiens
agtcaggcatatcaattaaagtcctacatcaaa

SEQ ID NO: 21253 - DNA, 33 bp, Homo sapiens
actctctcaccttctagagcacaactggatttt

SEQ ID NO: 21254 - DNA, 33 bp, Homo sapiens
cacaaaaccccaaatgtatgcttgtaaactgaa

SEQ ID NO: 21255 - DNA, 33 bp, Homo sapiens
tatttgcatttctaaagctttgatatacttcct

SEQ ID NO: 21256 - DNA, 33 bp, Homo sapiens
ccctggaaagaaagaaggagccagaattcttgt

SEQ ID NO: 21257 - DNA, 33 bp, Homo sapiens
taaactgtctagctagtccttttggtatatgag

SEQ ID NO: 21258 - DNA, 51 bp, Homo sapiens
aaatacttttctaataattttgtgaggtaattgatctattgccttattatt

SEQ ID NO: 21259 - DNA, 33 bp, Homo sapiens
aagtactggtttgagaggactgaattggtgccc

SEQ ID NO: 21260 - DNA, 51 bp, Homo sapiens
gtacacagatactgaaaatgcacacgctgcactcggcatcttcagcgcctc

SEQ ID NO: 21261 - DNA, 51 bp, Homo sapiens
atgaaagaatttaaggcaaattcaatgctgataatgaacattaatgtacat

SEQ ID NO: 21262 - DNA, 33 bp, Homo sapiens
gcttgacagaagtggatataaggaaagttgagg

SEQ ID NO: 21263 - DNA, 33 bp, Homo sapiens
ttctccaggcttctcctggaatattcatggcaa

SEQ ID NO: 21264 - DNA, 33 bp, Homo sapiens
gctccagggtaaaacagagcatggatcttcaaa

SEQ ID NO: 21265 - DNA, 33 bp, Homo sapiens
aacaggcttaacttaatgtggcaaatgattgag

SEQ ID NO: 21266 - DNA, 33 bp, Homo sapiens
atgagagcctaatgcagaaggtgtctgtaagga

SEQ ID NO: 21267 - DNA, 33 bp, Homo sapiens
ccgcatttagagtccatccaaatcactataaag

SEQ ID NO: 21268 - DNA, 33 bp, Homo sapiens
aattccaatagattcagcctcgaagggtcttct

SEQ ID NO: 21269 - DNA, 33 bp, Homo sapiens
ttgtaatcttcataaaggaacctgtaaaatttt

SEQ ID NO: 21270 - DNA, 33 bp, Homo sapiens
tgttgtagctattgcagatgagatcttttcatt

SEQ ID NO: 21271 - DNA, 33 bp, Homo sapiens
tgaagttactcacaaagagacttggagcccgct

SEQ ID NO: 21272 - DNA, 51 bp, Homo sapiens
caaatattatagccacacagaatgatctttaaaatatggggctgagcaggg

SEQ ID NO: 21273 - DNA, 33 bp, Homo sapiens
aacaacaatttatgcactctgctgtccataaat

SEQ ID NO: 21274 - DNA, 33 bp, Homo sapiens
taatgagaggtagttctaaaatacaggcaatcc

SEQ ID NO: 21275 - DNA, 33 bp, Homo sapiens
tcttacaagatagaaagacctaaatgtgtacat

SEQ ID NO: 21276 - DNA, 33 bp, Homo sapiens
aaaataggccattatagggaaataccagtaata

SEQ ID NO: 21277 - DNA, 51 bp, Homo sapiens
gaatcaaattaaaatgttggaaatatagtcatcattaacatttttaaatgc

SEQ ID NO: 21278 - DNA, 51 bp, Homo sapiens
aacataattcagcataaccatgttaggtttctttcctatgttttcttgtct

SEQ ID NO: 21279 - DNA, 33 bp, Homo sapiens
acatataaatgcttccggattttaaagtggctt

SEQ ID NO: 21280 - DNA, 33 bp, Homo sapiens
gcagtacatacagcaagtcgccaaatgaaaata

SEQ ID NO: 21281 - DNA, 33 bp, Homo sapiens
ttatatggttgaattggatgagagtttatatgg

SEQ ID NO: 21282 - DNA, 33 bp, Homo sapiens
ctggagtatttcttgggatttccttcaaccact

SEQ ID NO: 21283 - DNA, 33 bp, Homo sapiens
agattgtggttgtagataaggaagaattcacag

SEQ ID NO: 21284 - DNA, 33 bp, Homo sapiens
gccagtctacactgccgaagtgtttcacttagc

SEQ ID NO: 21285 - DNA, 33 bp, Homo sapiens
ttcattaaaccccagaggacctctatctccaat

SEQ ID NO: 21286 - DNA, 33 bp, Homo sapiens
taagtcacttaatgtctcaaagctcatattttt

SEQ ID NO: 21287 - DNA, 51 bp, Homo sapiens
tctctggcctaagttctaagagaaacatgattgtgctataagctagggact

SEQ ID NO: 21288 - DNA, 33 bp, Homo sapiens
agctaaaatgtgtttgtacgtatgactgtggat

SEQ ID NO: 21289 - DNA, 33 bp, Homo sapiens
ataaggctaagagagagagactgaaaggttaga

SEQ ID NO: 21290 - DNA, 33 bp, Homo sapiens
tcatttgataaaagggtcatgctactttaaaca

SEQ ID NO: 21291 - DNA, 33 bp, Homo sapiens
gttttgcctcccttcagatctatccttcgtgtt

SEQ ID NO: 21292 - DNA, 33 bp, Homo sapiens
tatatctgattgcagcggcaaagggctatcccc

SEQ ID NO: 21293 - DNA, 33 bp, Homo sapiens
cgtcgtgtgatttttcgcatgcttcctggtaga

SEQ ID NO: 21294 - DNA, 33 bp, Homo sapiens
gaagccaataatacatgaaggcccatgaaaaag

SEQ ID NO: 21295 - DNA, 33 bp, Homo sapiens
ttttctcctcagctcattcacgggcaaatacaa

SEQ ID NO: 21296 - DNA, 33 bp, Homo sapiens
agtcaggcaagaatgaggtaactcccatgctga

SEQ ID NO: 21297 - DNA, 33 bp, Homo sapiens
tcaacaggatgatctatgctcttttgattagag

SEQ ID NO: 21298 - DNA, 33 bp, Homo sapiens
atactttggttatgtatagaaaatggaatgtgt

SEQ ID NO: 21299 - DNA, 33 bp, Homo sapiens
gattgatttctcaccataatggaaagagcaact

SEQ ID NO: 21300 - DNA, 33 bp, Homo sapiens
caggccagacttgtgagaggaaagtatttatgc

SEQ ID NO: 21301 - DNA, 33 bp, Homo sapiens
cttactttcctctaaggcaatctgtgaaccaca

SEQ ID NO: 21302 - DNA, 33 bp, Homo sapiens
cacctgtaatccgtaagtgaatccaacctggaa

SEQ ID NO: 21303 - DNA, 33 bp, Homo sapiens
agctgttgtgtagtctgaatgatttgttccatt

SEQ ID NO: 21304 - DNA, 33 bp, Homo sapiens
acaggatctcctaagggagctttcaaattgcaa

SEQ ID NO: 21305 - DNA, 33 bp, Homo sapiens
cccgtcagatggagaatgtgaccatgctttcct

SEQ ID NO: 21306 - DNA, 33 bp, Homo sapiens
tttgagtacacataattagttctcgaggaaagg

SEQ ID NO: 21307 - DNA, 33 bp, Homo sapiens
tcttgaaagctgattttaaaacacacacccact

SEQ ID NO: 21308 - DNA, 33 bp, Homo sapiens
actctattcaagagcaggacgttgttgtgcacc

SEQ ID NO: 21309 - DNA, 33 bp, Homo sapiens
gttttctcatttggagccctgagataaaatgta

SEQ ID NO: 21310 - DNA, 33 bp, Homo sapiens
actcatgcagtcaaactcccttctgggttccag

SEQ ID NO: 21311 - DNA, 33 bp, Homo sapiens
ggtatggttgctgatataaactcaaaatacaaa

SEQ ID NO: 21312 - DNA, 51 bp, Homo sapiens
aaaaaatttctcagtgttgttttcttacccactgttgtgatgatgattcat

SEQ ID NO: 21313 - DNA, 33 bp, Homo sapiens
tggctataaaagtcaagatcaacaatgcactat

SEQ ID NO: 21314 - DNA, 33 bp, Homo sapiens
ctttaatattcactgagggcaatagtaatttct

SEQ ID NO: 21315 - DNA, 33 bp, Homo sapiens
atatctgttgttgccctgctagactttatacaa

SEQ ID NO: 21316 - DNA, 33 bp, Homo sapiens
ttttgtttaaacataagggcaaagaggaacttg

SEQ ID NO: 21317 - DNA, 51 bp, Homo sapiens
atcatcccccaatcctcacaaaaaattaagtctaactataaaacatagacc

SEQ ID NO: 21318 - DNA, 33 bp, Homo sapiens
ctataaataataaaaagttgatggcactgttta

SEQ ID NO: 21319 - DNA, 51 bp, Homo sapiens
aaaagggggctacatttgaggcatgtacaatactctgatcaagatttcctg

SEQ ID NO: 21320 - DNA, 33 bp, Homo sapiens
actgtttctctccccagatgcattattattagt

SEQ ID NO: 21321 - DNA, 51 bp, Homo sapiens
tttatgaagaaatggactttagccatgaccttaggctacgtgtctttagtc

SEQ ID NO: 21322 - DNA, 33 bp, Homo sapiens
tttcatgaagatcatatacttgccaagtggcag

SEQ ID NO: 21323 - DNA, 33 bp, Homo sapiens
ttggtattttgattcttactaggctcccctgca

SEQ ID NO: 21324 - DNA, 51 bp, Homo sapiens
ttttggagctgggatcctgggtccacaggaaaaataatgagaacattaaga

SEQ ID NO: 21325 - DNA, 33 bp, Homo sapiens
catacattagttccaattcccagttctaccact

SEQ ID NO: 21326 - DNA, 33 bp, Homo sapiens
cttttttcacaatttctcagatactgactcatt

SEQ ID NO: 21327 - DNA, 33 bp, Homo sapiens
tgcaacctcttggaacgatgacggatccaggca

SEQ ID NO: 21328 - DNA, 33 bp, Homo sapiens
ttctaaagggatctacgggtgaagctatctaaa

SEQ ID NO: 21329 - DNA, 33 bp, Homo sapiens
acctatttataggatacctgtccatggattatc

SEQ ID NO: 21330 - DNA, 33 bp, Homo sapiens
ttgtatgcttacttacgatggctttgcatagca

SEQ ID NO: 21331 - DNA, 33 bp, Homo sapiens
tttagataagtatgggtaaaaacgtatcaacac

SEQ ID NO: 21332 - DNA, 33 bp, Homo sapiens
attaatgttttaatcatgaagtggaacagaaac

SEQ ID NO: 21333 - DNA, 33 bp, Homo sapiens
cagtctgaaaactaaagtgatgccagtgaagca

SEQ ID NO: 21334 - DNA, 33 bp, Homo sapiens
ttgaacatattctgacccatgaatctgggacag

SEQ ID NO: 21335 - DNA, 33 bp, Homo sapiens
tgcagagactgaaaaattgttggccaagtaatt

SEQ ID NO: 21336 - DNA, 33 bp, Homo sapiens
gacaaagagaggacaatgcagtgaagaaataaa

SEQ ID NO: 21337 - DNA, 33 bp, Homo sapiens
gcaacttcaagagacagtgtattatcagctatg

SEQ ID NO: 21338 - DNA, 33 bp, Homo sapiens
ccaaagcaagggatcatgaagcaggcctcccac

SEQ ID NO: 21339 - DNA, 33 bp, Homo sapiens
gagttccattttgtgctaggacagttctgccaa

SEQ ID NO: 21340 - DNA, 33 bp, Homo sapiens
atgttttgcaaggatctatattatctttaaagc

SEQ ID NO: 21341 - DNA, 33 bp, Homo sapiens
ctatcgtttactgacattacaaatcctgaataa

SEQ ID NO: 21342 - DNA, 51 bp, Homo sapiens
cttaattatatctaggtctaatacaggcatggctagagtttaagtgggcaa

SEQ ID NO: 21343 - DNA, 33 bp, Homo sapiens
tccacagttacatctctagtttatcatgtgttc

SEQ ID NO: 21344 - DNA, 33 bp, Homo sapiens
ctataattttgtaggatgcatagttggccaata

SEQ ID NO: 21345 - DNA, 33 bp, Homo sapiens
tcactgttggtgggaacgtaggttgattccatg

SEQ ID NO: 21346 - DNA, 33 bp, Homo sapiens
tgtgtgtgtgttttcctctggcctgctccctcc

SEQ ID NO: 21347 - DNA, 33 bp, Homo sapiens
tgatagttgcctaatatcttcctgtaaaaactc

SEQ ID NO: 21348 - DNA, 33 bp, Homo sapiens
cttaccctttgagcaagtacagtattcatactt

SEQ ID NO: 21349 - DNA, 33 bp, Homo sapiens
tgtctctgtctctcaattagataattcctactg

SEQ ID NO: 21350 - DNA, 33 bp, Homo sapiens
taatacaactcacagacgctttactccaaatga

SEQ ID NO: 21351 - DNA, 33 bp, Homo sapiens
gactcctaacataacacccatctgcagccatag

SEQ ID NO: 21352 - DNA, 51 bp, Homo sapiens
actgaggttggtcagagagattatatcgtccttgatttaaaataataacca

SEQ ID NO: 21353 - DNA, 33 bp, Homo sapiens
tccatttccatacctctcaggatacaaccagac

SEQ ID NO: 21354 - DNA, 33 bp, Homo sapiens
ttaggcaaagactttatggtaaagattttctaa

SEQ ID NO: 21355 - DNA, 33 bp, Homo sapiens
atttttagatattaacgcttgatcatcggtatg

SEQ ID NO: 21356 - DNA, 33 bp, Homo sapiens
gacactattcccctgcgcatggtcatatcttgt

SEQ ID NO: 21357 - DNA, 33 bp, Homo sapiens
tttttcacagcttacattgaaactttggcttca

SEQ ID NO: 21358 - DNA, 51 bp, Homo sapiens
gcctttaggaggtccatccttccaatgcctgagcaataatttcagaagata

SEQ ID NO: 21359 - DNA, 33 bp, Homo sapiens
aaatttatgaaagaaatccatttgggggtgtga

SEQ ID NO: 21360 - DNA, 33 bp, Homo sapiens
tggtccttaaaaatgaggaagtttgaatgagat

SEQ ID NO: 21361 - DNA, 51 bp, Homo sapiens
tattgtttcagagtgctatcaagaatgtatatgaattaggagtaattgtta

SEQ ID NO: 21362 - DNA, 33 bp, Homo sapiens
aatatgagatgaattagagtgcaccttgccggg

SEQ ID NO: 21363 - DNA, 33 bp, Homo sapiens
aaaatgtgaaattagatgcctggaatataccag

SEQ ID NO: 21364 - DNA, 33 bp, Homo sapiens
gtcattagtgtcttcataaaaactgagattaaa

SEQ ID NO: 21365 - DNA, 33 bp, Homo sapiens
cctgggtgatgctttggaaaaaatctgtttacc

SEQ ID NO: 21366 - DNA, 33 bp, Homo sapiens
ttaaatgaaatgataagtgagatgatacaggta

SEQ ID NO: 21367 - DNA, 51 bp, Homo sapiens
gcacaagtgaaactgccattgcaaagtttactactgagacagtgaaagtga

SEQ ID NO: 21368 - DNA, 33 bp, Homo sapiens
agatagttttttgagatcatgaaagaccaaaaa

SEQ ID NO: 21369 - DNA, 33 bp, Homo sapiens
acgtaaaatgctatgcgactaagccaaagtctt

SEQ ID NO: 21370 - DNA, 33 bp, Homo sapiens
atatagtaggagttaagaaatgatgatgtacta

SEQ ID NO: 21371 - DNA, 33 bp, Homo sapiens
tcaaaacctgagtatacgtactgtaggagctaa

SEQ ID NO: 21372 - DNA, 51 bp, Homo sapiens
gaataattgggcaaagtttcatttacaacctgatggatgatctgtaaaaga

SEQ ID NO: 21373 - DNA, 33 bp, Homo sapiens
ttttctttacatttatgagtggtatcaagatag

SEQ ID NO: 21374 - DNA, 51 bp, Homo sapiens
caagcttctcttttcccttaccttataaacatgactccttcttttctcttc

SEQ ID NO: 21375 - DNA, 33 bp, Homo sapiens
tcattatgttaggtgagataagatagagaacaa

SEQ ID NO: 21376 - DNA, 51 bp, Homo sapiens
ctctggaaagcaaattcactacaaaggattgaagcaaaaaggaagagttac

SEQ ID NO: 21377 - DNA, 33 bp, Homo sapiens
actctttcctagtgtgtacattaatcaaagttt

SEQ ID NO: 21378 - DNA, 33 bp, Homo sapiens
aaatgattgactcccccggattgattaacccag

SEQ ID NO: 21379 - DNA, 33 bp, Homo sapiens
tgcagaggtctgattatggtatggtgtcagttc

SEQ ID NO: 21380 - DNA, 33 bp, Homo sapiens
cccagtggccatgaacgaccacaaggctgtcat

SEQ ID NO: 21381 - DNA, 33 bp, Homo sapiens
ggtcatgacagctttctgaaaatacaccaatgc

SEQ ID NO: 21382 - DNA, 33 bp, Homo sapiens
cagaagactgcaaaaccatgtagtaataatgca

SEQ ID NO: 21383 - DNA, 51 bp, Homo sapiens
tttaaactgttagtcaggcctaaaacgttgaaaatgttcattctgaaatta

SEQ ID NO: 21384 - DNA, 33 bp, Homo sapiens
acatgatgctactggaggaataatcagaagtca

SEQ ID NO: 21385 - DNA, 51 bp, Homo sapiens
tagaaatttctgcataatctgccacgtaattaaaagtaggtataaatatga

SEQ ID NO: 21386 - DNA, 51 bp, Homo sapiens
tgaaaatatttggatataattgaaagtaaaaaggaaatcccatgaccactg

SEQ ID NO: 21387 - DNA, 33 bp, Homo sapiens
acatagagacaatctagaagaactaatgtttct

SEQ ID NO: 21388 - DNA, 33 bp, Homo sapiens
tagctgctagagtgaacgaaaaaccttgtggca

SEQ ID NO: 21389 - DNA, 51 bp, Homo sapiens
ttttttttacttcctctgaatttgctgatttcattcatttctcaaactccc

SEQ ID NO: 21390 - DNA, 33 bp, Homo sapiens
tctatcagtaacttaacaaagaggtgcaggaag

SEQ ID NO: 21391 - DNA, 33 bp, Homo sapiens
aaaatacacaaacacacatttatttagctcata

SEQ ID NO: 21392 - DNA, 33 bp, Homo sapiens
ggaggaggcagattgagggtgacgggtacctgc

SEQ ID NO: 21393 - DNA, 33 bp, Homo sapiens
atactgcacatttacctcaaccttggtgttatt

SEQ ID NO: 21394 - DNA, 33 bp, Homo sapiens
tcctgggagataataggataaactcatggagga

SEQ ID NO: 21395 - DNA, 33 bp, Homo sapiens
tatttgaaccactctggaacaagaagaaaattg

SEQ ID NO: 21396 - DNA, 33 bp, Homo sapiens
gtcagcaacaagctaatcaatgggactgaacaa

SEQ ID NO: 21397 - DNA, 33 bp, Homo sapiens
agtctgcaggacaggagaacaatctaccaagat

SEQ ID NO: 21398 - DNA, 33 bp, Homo sapiens
gttagattggcaggaatggccctgagtatttat

SEQ ID NO: 21399 - DNA, 33 bp, Homo sapiens
gccagctccttgacgggattctttcatgaacag

SEQ ID NO: 21400 - DNA, 33 bp, Homo sapiens
tgaataacatggtaaagtcttggttcgataagt

SEQ ID NO: 21401 - DNA, 33 bp, Homo sapiens
aaacatctactccagctacttaggtgtactgaa

SEQ ID NO: 21402 - DNA, 33 bp, Homo sapiens
aaatgtgaacaatggagtattagtgccaggtca

SEQ ID NO: 21403 - DNA, 33 bp, Homo sapiens
actcagacatactcatgacacaatgaaatgaag

SEQ ID NO: 21404 - DNA, 33 bp, Homo sapiens
agtctgttttcaaatatgttagaggcaatcagg

SEQ ID NO: 21405 - DNA, 33 bp, Homo sapiens
ccccacagctccttgatgaattcttatatggac

SEQ ID NO: 21406 - DNA, 51 bp, Homo sapiens
tgcatcttctagaagactgtgaagagattgcactgggccaaccatacttgt

SEQ ID NO: 21407 - DNA, 33 bp, Homo sapiens
ggagcaatctatactctcatcaccaggtttttt

SEQ ID NO: 21408 - DNA, 33 bp, Homo sapiens
taacataaagttttcagggttcatttatgttgt

SEQ ID NO: 21409 - DNA, 33 bp, Homo sapiens
gagctaggcactggaccaaggtctgtctatctc

SEQ ID NO: 21410 - DNA, 33 bp, Homo sapiens
caaacaggatggacaacaagaacctcaaatatc

SEQ ID NO: 21411 - DNA, 33 bp, Homo sapiens
ttctgtacccagtacatccaacaagcaggactc

SEQ ID NO: 21412 - DNA, 51 bp, Homo sapiens
ccaggcaaaacttgtatagggctgatcctggaagcgtgcctgtagataagg

SEQ ID NO: 21413 - DNA, 33 bp, Homo sapiens
tacactgttgtaagaacttcccatagaacgcag

SEQ ID NO: 21414 - DNA, 33 bp, Homo sapiens
gacaaaaggcagccacgaatgaaagttgaagtc

SEQ ID NO: 21415 - DNA, 33 bp, Homo sapiens
agaatgcctcggcacatccgctcactatggtca

SEQ ID NO: 21416 - DNA, 33 bp, Homo sapiens
ctctggctagccgtcatatttggaaagcattca

SEQ ID NO: 21417 - DNA, 33 bp, Homo sapiens
aagatctttattttgttaagcctctgtagtagg

SEQ ID NO: 21418 - DNA, 33 bp, Homo sapiens
ctgaagttttttccagcactggcttatcatgag

SEQ ID NO: 21419 - DNA, 33 bp, Homo sapiens
tgtgaagagtagaaagcattttgttgggcagag

SEQ ID NO: 21420 - DNA, 33 bp, Homo sapiens
atttgacagatgaggagactaaagtgaaggtga

SEQ ID NO: 21421 - DNA, 33 bp, Homo sapiens
ttgaccctgcagttgccccctagcaaactgaaa

SEQ ID NO: 21422 - DNA, 33 bp, Homo sapiens
ctaataatacggcacatgatctatgtcggcttt

SEQ ID NO: 21423 - DNA, 33 bp, Homo sapiens
ccacctggcccccacagccaatgtgtttcaggg

SEQ ID NO: 21424 - DNA, 33 bp, Homo sapiens
cctaaagacaagaccatgcctcttgaggaccaa

SEQ ID NO: 21425 - DNA, 51 bp, Homo sapiens
accctcattataccttgcctggctatactttattctcttcttgtcttctga

SEQ ID NO: 21426 - DNA, 33 bp, Homo sapiens
gcctacctgagatcacgaacatatattctccag

SEQ ID NO: 21427 - DNA, 33 bp, Homo sapiens
aagacaccagtgaaggtcatgttcgccataaga

SEQ ID NO: 21428 - DNA, 33 bp, Homo sapiens
gggtggggatgttacatactgttaggagttgat

SEQ ID NO: 21429 - DNA, 51 bp, Homo sapiens
tgataaaaacaaagaactggatcaacactggaaaggagaacgctcagagga

SEQ ID NO: 21430 - DNA, 33 bp, Homo sapiens
tattaatactcaccaatattttcttccaatgta

SEQ ID NO: 21431 - DNA, 33 bp, Homo sapiens
tgtgcacacatcttcctctgctttcccagctca

SEQ ID NO: 21432 - DNA, 33 bp, Homo sapiens
tgcctttcctgacatatgtatgacttgaagaaa

SEQ ID NO: 21433 - DNA, 33 bp, Homo sapiens
aaagagagagcaactatgtagagaaggtcatgg

SEQ ID NO: 21434 - DNA, 33 bp, Homo sapiens
ggccacccggcgcaactgactttctgctctctg

SEQ ID NO: 21435 - DNA, 33 bp, Homo sapiens
ctcgtgcccctagaactgttaaggcatgagaga

SEQ ID NO: 21436 - DNA, 33 bp, Homo sapiens
gggcgcagtcaggtgagaaaggacgtgcctaaa

SEQ ID NO: 21437 - DNA, 33 bp, Homo sapiens
gttaactaaatatacagctccttaatgaagaca

SEQ ID NO: 21438 - DNA, 33 bp, Homo sapiens
tattactgtatatagagtcaatgcacaggttat

SEQ ID NO: 21439 - DNA, 51 bp, Homo sapiens
gatggtttggactaatctgactctctcgtgcatgttgttttcatcctctac

SEQ ID NO: 21440 - DNA, 33 bp, Homo sapiens
ttcctgcattccacaagtgttccctctgggttc

SEQ ID NO: 21441 - DNA, 33 bp, Homo sapiens
gaagattatgttaatacaaggtcaggtatgtgc

SEQ ID NO: 21442 - DNA, 33 bp, Homo sapiens
aaacaatgccttttcatgttgatgatcacttta

SEQ ID NO: 21443 - DNA, 33 bp, Homo sapiens
tgctttagctctttgcgcatatttaagactttt

SEQ ID NO: 21444 - DNA, 33 bp, Homo sapiens
tattcatgagagtatataaatttatgtgattac

SEQ ID NO: 21445 - DNA, 33 bp, Homo sapiens
gctttattacatgacccgagtgtagaaggcagt

SEQ ID NO: 21446 - DNA, 33 bp, Homo sapiens
ccgtattcccattcaatcacaggaagccccata

SEQ ID NO: 21447 - DNA, 33 bp, Homo sapiens
ctgaggactttgagaatactcgacaagccttca

SEQ ID NO: 21448 - DNA, 33 bp, Homo sapiens
gtagaaagcatttcccggaccttcaacataagc

SEQ ID NO: 21449 - DNA, 33 bp, Homo sapiens
ctccagccagattaaattgctaaagcacagtcc

SEQ ID NO: 21450 - DNA, 33 bp, Homo sapiens
ccatcaacatcagacagaaagaccagatgacat

SEQ ID NO: 21451 - DNA, 33 bp, Homo sapiens
agcaatttcaaacttagggaaaaggctatgaaa

SEQ ID NO: 21452 - DNA, 33 bp, Homo sapiens
aaaaaatatttgctcagtacctgtagtcagcat

SEQ ID NO: 21453 - DNA, 51 bp, Homo sapiens
cacatggaagtgaaaggataataaattcaagtggatgacagccatacatta

SEQ ID NO: 21454 - DNA, 33 bp, Homo sapiens
attgtctggtgttttatgtgtagcaggcttcca

SEQ ID NO: 21455 - DNA, 33 bp, Homo sapiens
agcagaagtcttcagacaccaagcccaccctga

SEQ ID NO: 21456 - DNA, 33 bp, Homo sapiens
ttctctttctcaagggtactatgctgcacacct

SEQ ID NO: 21457 - DNA, 51 bp, Homo sapiens
agaagaaccacctgccaaatctcacggtaagtcactgcttaatgcagggct

SEQ ID NO: 21458 - DNA, 51 bp, Homo sapiens
aaatcctaacatcttcggtagcatagaagaccgttcctgagcctggcccca

SEQ ID NO: 21459 - DNA, 51 bp, Homo sapiens
caggaggcagaaactgttaccagcattagcggatgtgaaaaatggggcagt

SEQ ID NO: 21460 - DNA, 33 bp, Homo sapiens
catcatcagatgctcagcagctttccacaatgt

SEQ ID NO: 21461 - DNA, 33 bp, Homo sapiens
tgcaccttctcaactaggtctgtttattttcag

SEQ ID NO: 21462 - DNA, 33 bp, Homo sapiens
catctcattaacgacagatccaagatgtgccag

SEQ ID NO: 21463 - DNA, 33 bp, Homo sapiens
agttcttctaatccaatggttcatttgtcgtat

SEQ ID NO: 21464 - DNA, 33 bp, Homo sapiens
accaagatcagagaagtatcgagtccatgtgca

SEQ ID NO: 21465 - DNA, 33 bp, Homo sapiens
ggataacctaattgcctgatttaatcattatac

SEQ ID NO: 21466 - DNA, 33 bp, Homo sapiens
gtgttcttgcccaaaattcacaacctccatgta

SEQ ID NO: 21467 - DNA, 33 bp, Homo sapiens
cccaggaaaggctgaagagaagcatggaggttg

SEQ ID NO: 21468 - DNA, 51 bp, Homo sapiens
gcaagaccaaacatcaaatttatgatgaagtgtggagagaagaattgtgaa

SEQ ID NO: 21469 - DNA, 33 bp, Homo sapiens
ggctttaaattttccattcccaaaaatgtataa

SEQ ID NO: 21470 - DNA, 51 bp, Homo sapiens
aaacaaacttatccctgaactaaaacctgggcatggactcactgaccctga

SEQ ID NO: 21471 - DNA, 51 bp, Homo sapiens
cagtttcaggctaggttcttgccctgtatgtgtgacttcaggttgggcttt

SEQ ID NO: 21472 - DNA, 33 bp, Homo sapiens
agagtgcaggttagaatgcattggtatggtcct

SEQ ID NO: 21473 - DNA, 33 bp, Homo sapiens
gactcttatgaataaatctacgatgaatagaca

SEQ ID NO: 21474 - DNA, 33 bp, Homo sapiens
aattcatctaactagcgaaaactcagtcataca

SEQ ID NO: 21475 - DNA, 33 bp, Homo sapiens
cataccctctgtctcctcattagggatactctc

SEQ ID NO: 21476 - DNA, 33 bp, Homo sapiens
tccttcttagatgcgggacaagaaaacacaact

SEQ ID NO: 21477 - DNA, 33 bp, Homo sapiens
ttgggcatcctcttaatgagttagcaattaaat

SEQ ID NO: 21478 - DNA, 33 bp, Homo sapiens
tgcctttcaagcttccggattagttattaaaaa

SEQ ID NO: 21479 - DNA, 33 bp, Homo sapiens
gtcttgcgcttctggatgaatgcagctcatgat

SEQ ID NO: 21480 - DNA, 33 bp, Homo sapiens
tataaaatatgatcactaccatgtggataataa

SEQ ID NO: 21481 - DNA, 33 bp, Homo sapiens
ggtcaccccaacctagtatgtaaatggactttc

SEQ ID NO: 21482 - DNA, 33 bp, Homo sapiens
gctgtcctaccaggaggcctgcttctacacaaa

SEQ ID NO: 21483 - DNA, 33 bp, Homo sapiens
cttatgtgtctctggccatactctttgttctga

SEQ ID NO: 21484 - DNA, 51 bp, Homo sapiens
aaacttgcgtggaggtcatcgaatagggtacctgaccacagcgtggtaaac

SEQ ID NO: 21485 - DNA, 33 bp, Homo sapiens
cagccatttgcagtgggatttcctacctgagcc

SEQ ID NO: 21486 - DNA, 33 bp, Homo sapiens
tttgttttgcactgcatagttgtttgggagaca

SEQ ID NO: 21487 - DNA, 33 bp, Homo sapiens
ctggaaagacagagtcgctaacaactgaaaaat

SEQ ID NO: 21488 - DNA, 33 bp, Homo sapiens
tgagcttattcagtgacgtggtacatattatgt

SEQ ID NO: 21489 - DNA, 33 bp, Homo sapiens
taacaagtgaaaaaaagttgcctgaggatgtgt

SEQ ID NO: 21490 - DNA, 33 bp, Homo sapiens
aatccccgtatgccaaggttgctaagatctgtg

SEQ ID NO: 21491 - DNA, 33 bp, Homo sapiens
tttgtctttacagtgatgatggaagaatgtaca

SEQ ID NO: 21492 - DNA, 33 bp, Homo sapiens
tgttccctcagtgaacccccaaaattcaaaata

SEQ ID NO: 21493 - DNA, 33 bp, Homo sapiens
tgttaactgcttttcctcccaaatatgtatcac

SEQ ID NO: 21494 - DNA, 33 bp, Homo sapiens
ttttaaacaaaaatgatgactggtgacagaaaa

SEQ ID NO: 21495 - DNA, 51 bp, Homo sapiens
gtgtttagttaccaggcaagcaggacgccacaatggtgactcagtgtgtga

SEQ ID NO: 21496 - DNA, 33 bp, Homo sapiens
ttggtataataaggacgctccaaattcataaaa

SEQ ID NO: 21497 - DNA, 33 bp, Homo sapiens
tctggagagttaaagatggtgatcaataatttc

SEQ ID NO: 21498 - DNA, 33 bp, Homo sapiens
gagttgcaggcatccaggctgtaagtagtagca

SEQ ID NO: 21499 - DNA, 33 bp, Homo sapiens
tcagagttctctcaaatacatgtcagccaacaa

SEQ ID NO: 21500 - DNA, 33 bp, Homo sapiens
tatgcaataaacactttaactataggccagttc

SEQ ID NO: 21501 - DNA, 33 bp, Homo sapiens
tcatgagaaagtgaactagaaggagtgattacg

SEQ ID NO: 21502 - DNA, 33 bp, Homo sapiens
aaccacggcacatagcgaagtctaccattttct

SEQ ID NO: 21503 - DNA, 33 bp, Homo sapiens
tgaagactgagcaatatggcggtcacttgtgcc

SEQ ID NO: 21504 - DNA, 33 bp, Homo sapiens
tgctgttttggcattagggaacaaaaatcttct

SEQ ID NO: 21505 - DNA, 33 bp, Homo sapiens
cacattttacgctgaccaacccaatctaagatg

SEQ ID NO: 21506 - DNA, 33 bp, Homo sapiens
gtcatttcagtggcaaggagaagaacagacatc

SEQ ID NO: 21507 - DNA, 51 bp, Homo sapiens
cagcccaaggaactaaggcatacagtcattaccatggcccaaactgctttt

SEQ ID NO: 21508 - DNA, 33 bp, Homo sapiens
gcttgggtgatgggaaggtgatgcaaatgagaa

SEQ ID NO: 21509 - DNA, 33 bp, Homo sapiens
cactgcagctgcttccggaaaagatgggatatt

SEQ ID NO: 21510 - DNA, 33 bp, Homo sapiens
tcaatctactttgcaagatttggaggctatttc

SEQ ID NO: 21511 - DNA, 33 bp, Homo sapiens
gatatttggttttctcgcagacattaaacccaa

SEQ ID NO: 21512 - DNA, 33 bp, Homo sapiens
tctaaatagcctgttagagaatttcagcgaagc

SEQ ID NO: 21513 - DNA, 33 bp, Homo sapiens
tttttatttgtgtgactgatataacaaagggta

SEQ ID NO: 21514 - DNA, 33 bp, Homo sapiens
cagacatacacggtaatgggaatgtcacagcta

SEQ ID NO: 21515 - DNA, 51 bp, Homo sapiens
gagaatagtgttaactagtatcttgtagaaaataatggcattgtatctatt

SEQ ID NO: 21516 - DNA, 33 bp, Homo sapiens
ttatgtaaatataaaccaaattgtcatggctta

SEQ ID NO: 21517 - DNA, 33 bp, Homo sapiens
aaccttggtgggcaaacctccttgcctgggaaa

SEQ ID NO: 21518 - DNA, 33 bp, Homo sapiens
tcactgtacctactcatagagatgcttggagaa

SEQ ID NO: 21519 - DNA, 51 bp, Homo sapiens
ttaaaaagcataacaccacgtgcatgataagctctcaataaatacaggctg

SEQ ID NO: 21520 - DNA, 33 bp, Homo sapiens
ggccagacatcaaacctctacttcggcctattg

SEQ ID NO: 21521 - DNA, 33 bp, Homo sapiens
ttcagtatcattgatgtaactaccttatgactc

SEQ ID NO: 21522 - DNA, 33 bp, Homo sapiens
tgcatcgatgtactaagcacttcaataatcatc

SEQ ID NO: 21523 - DNA, 33 bp, Homo sapiens
cctgacaacttgttctgactgtagaaactaggg

SEQ ID NO: 21524 - DNA, 33 bp, Homo sapiens
actattttctgttccttagctttcagactcaga

SEQ ID NO: 21525 - DNA, 33 bp, Homo sapiens
aaccatcacaatagaggagtcttaaattccgtc

SEQ ID NO: 21526 - DNA, 33 bp, Homo sapiens
gacttcatgtggacaatggctaacagtgccatt

SEQ ID NO: 21527 - DNA, 33 bp, Homo sapiens
aaaaaaaagtccaccattgaatacatcagaaca

SEQ ID NO: 21528 - DNA, 33 bp, Homo sapiens
attttcttatactgcatcaaagctagcacattt

SEQ ID NO: 21529 - DNA, 33 bp, Homo sapiens
gttttccctttgtgtgcaataatgtaagtaagt

SEQ ID NO: 21530 - DNA, 33 bp, Homo sapiens
actcaggtaaaactactgctagcctggtaaagt

SEQ ID NO: 21531 - DNA, 33 bp, Homo sapiens
taattaatatgtgaaaggaacaacattaggttt

SEQ ID NO: 21532 - DNA, 33 bp, Homo sapiens
tgttctggccagtgggtatatcaggtaaaaagc

SEQ ID NO: 21533 - DNA, 33 bp, Homo sapiens
gagactgaagcagaaagataatttgagcccagg

SEQ ID NO: 21534 - DNA, 33 bp, Homo sapiens
ggtatgttgccaaaaatctcagtttaaaagagt

SEQ ID NO: 21535 - DNA, 33 bp, Homo sapiens
caagcccaactgctaaggacgagggaaagcctc

SEQ ID NO: 21536 - DNA, 33 bp, Homo sapiens
gtgctctttaacccaccaactgcaacacaaatc

SEQ ID NO: 21537 - DNA, 51 bp, Homo sapiens
tgttttgcagccatgaaaaatgacatctctgaaagatatttaacaacatga

SEQ ID NO: 21538 - DNA, 33 bp, Homo sapiens
ttctgcctgaaaattctagtatttcctctgtac

SEQ ID NO: 21539 - DNA, 33 bp, Homo sapiens
atagcatagagcctaatacatcaccagatggca

SEQ ID NO: 21540 - DNA, 33 bp, Homo sapiens
agaaaagagagggtcattcttcctttttataga

SEQ ID NO: 21541 - DNA, 51 bp, Homo sapiens
ctttcaaaagcatcatggaattagggaatactaaactggaaagggttgttt

SEQ ID NO: 21542 - DNA, 33 bp, Homo sapiens
gagaggaaattaccaagctgcataatggagaca

SEQ ID NO: 21543 - DNA, 33 bp, Homo sapiens
gcatagcatgaggtcagacagcaatatgcagag

SEQ ID NO: 21544 - DNA, 33 bp, Homo sapiens
tctttgctgcagtcaagctctacttgttacatt

SEQ ID NO: 21545 - DNA, 33 bp, Homo sapiens
cagggccctgttcaacgatcacttcctccctca

SEQ ID NO: 21546 - DNA, 33 bp, Homo sapiens
agcacattcttggaaatgcactttgtttgtcct

SEQ ID NO: 21547 - DNA, 33 bp, Homo sapiens
cattcactggtaaatatgcacattgtgaccttt

SEQ ID NO: 21548 - DNA, 33 bp, Homo sapiens
tggcttgctttgaacacccccacgtggccccac

SEQ ID NO: 21549 - DNA, 51 bp, Homo sapiens
gtttcatatttgcattgctcatgaatgtaaacaaaatgtcgatatgtgtga

SEQ ID NO: 21550 - DNA, 33 bp, Homo sapiens
agactcttcttggaccgagacctcatgacactt

SEQ ID NO: 21551 - DNA, 33 bp, Homo sapiens
aggtacgtaatggaaagtaaactagagctggct

SEQ ID NO: 21552 - DNA, 33 bp, Homo sapiens
gggacttatgtatgcctcactgactgaagtaaa

SEQ ID NO: 21553 - DNA, 33 bp, Homo sapiens
ctagttttcagtctcatgatttccgctctctgt

SEQ ID NO: 21554 - DNA, 33 bp, Homo sapiens
gaggaagatcccaaactggatggaggcaaagtg

SEQ ID NO: 21555 - DNA, 33 bp, Homo sapiens
ctttaagtgattctgatgagaaactggttagga

SEQ ID NO: 21556 - DNA, 33 bp, Homo sapiens
tgtaaaaagccagatattaagtagttgaggctt

SEQ ID NO: 21557 - DNA, 51 bp, Homo sapiens
attgtctggctttagtagatgctcagctcttgatgatcacacaatagagag

SEQ ID NO: 21558 - DNA, 51 bp, Homo sapiens
atagggctgataagaaagtcatccttaatgttctattgcaccatatgcatc

SEQ ID NO: 21559 - DNA, 33 bp, Homo sapiens
tcagctctccttttaactacaggtgactgtagc

SEQ ID NO: 21560 - DNA, 33 bp, Homo sapiens
aggcttttgagaggtcgaagaggctccttgtca

SEQ ID NO: 21561 - DNA, 33 bp, Homo sapiens
tacagttcggacattcgagcatcgcgatttctc

SEQ ID NO: 21562 - DNA, 33 bp, Homo sapiens
caagaggaaagtctaagggcatcacagaatctc

SEQ ID NO: 21563 - DNA, 33 bp, Homo sapiens
cccagatgtgattaactcaagttccaaagtaag

SEQ ID NO: 21564 - DNA, 33 bp, Homo sapiens
cacatattacaaaccagtgaggaaggaagtatt

SEQ ID NO: 21565 - DNA, 33 bp, Homo sapiens
aaggtggtggttctgacgtaatggtaagtgtga

SEQ ID NO: 21566 - DNA, 33 bp, Homo sapiens
cttctcatgagaaaaagtaaggtgataagtgct

SEQ ID NO: 21567 - DNA, 33 bp, Homo sapiens
gcattacagaaagaatgaactccaagtcgttta

SEQ ID NO: 21568 - DNA, 33 bp, Homo sapiens
gcatggagacaagtgccaatcactttacatgag

SEQ ID NO: 21569 - DNA, 33 bp, Homo sapiens
acgtactgaatccccgtacaagaaatgcagagt

SEQ ID NO: 21570 - DNA, 33 bp, Homo sapiens
tgtctggtgtgaaccatgggggtttagaggaat

SEQ ID NO: 21571 - DNA, 33 bp, Homo sapiens
ggcttgatgactgtgagagtgaaggagagacaa

SEQ ID NO: 21572 - DNA, 33 bp, Homo sapiens
gacctgaatacagcccggattgctagcagaaac

SEQ ID NO: 21573 - DNA, 33 bp, Homo sapiens
taggtccgatgtgttatagcatttagtgtaaga

SEQ ID NO: 21574 - DNA, 51 bp, Homo sapiens
aggagtgattatgcattggtttatgtcaagtaaaaataaagaataagatga

SEQ ID NO: 21575 - DNA, 33 bp, Homo sapiens
aactttgtctgctgaatctaaagaataaggaga

SEQ ID NO: 21576 - DNA, 33 bp, Homo sapiens
caccactttcttccagcccccaaagtcaagtag

SEQ ID NO: 21577 - DNA, 51 bp, Homo sapiens
gtactgggctgccctttggtcagaagaaatgaaataaaggaagttctccag

SEQ ID NO: 21578 - DNA, 33 bp, Homo sapiens
tgacatagctaatgcagcgtttttcaggcagcc

SEQ ID NO: 21579 - DNA, 33 bp, Homo sapiens
caaagggaatgactgctctgagcttacaaattc

SEQ ID NO: 21580 - DNA, 33 bp, Homo sapiens
taggtttactcataactgtcagaaattggaaaa

SEQ ID NO: 21581 - DNA, 33 bp, Homo sapiens
gaaaaatcagaatacagaagcctcgctaagttc

SEQ ID NO: 21582 - DNA, 33 bp, Homo sapiens
gattatatatagcagagtagtgcagtggcttaa

SEQ ID NO: 21583 - DNA, 33 bp, Homo sapiens
ggagagcctgttgatatcatcatttggtaggca

SEQ ID NO: 21584 - DNA, 51 bp, Homo sapiens
ttaggaaaactagttagcataatgaggaataggaaaggatactggaatgca

SEQ ID NO: 21585 - DNA, 33 bp, Homo sapiens
aagaagctggaaaatatggaaaactgaggaaat

SEQ ID NO: 21586 - DNA, 33 bp, Homo sapiens
atgaaagcagcgtcattacatcttctaagaatc

SEQ ID NO: 21587 - DNA, 33 bp, Homo sapiens
ttatgaggctttaggggaatgtcaaccctcaaa

SEQ ID NO: 21588 - DNA, 33 bp, Homo sapiens
cttgtgcagaatgggagatgtgaatcactgtgt

SEQ ID NO: 21589 - DNA, 33 bp, Homo sapiens
aagaggggtgttaccatggcattacttatgctt

SEQ ID NO: 21590 - DNA, 33 bp, Homo sapiens
gacagtcaaagcctcattctactcctcactgca

SEQ ID NO: 21591 - DNA, 33 bp, Homo sapiens
agttctatagatgtacgcactgaagagatcagt

SEQ ID NO: 21592 - DNA, 33 bp, Homo sapiens
tataccaaaatgctcactatcattccttttgct

SEQ ID NO: 21593 - DNA, 33 bp, Homo sapiens
acccaggtctctcaaatttcacagctccatgca

SEQ ID NO: 21594 - DNA, 33 bp, Homo sapiens
aaagaatatagaagaagacatcagtagagaaga

SEQ ID NO: 21595 - DNA, 33 bp, Homo sapiens
tggtaccagcacgtaagggagtcaagcgcagca

SEQ ID NO: 21596 - DNA, 33 bp, Homo sapiens
ggagatgactgtgatggaatagtgactaagttc

SEQ ID NO: 21597 - DNA, 33 bp, Homo sapiens
tttaagaaaggtgccagatttgcagaacaggga

SEQ ID NO: 21598 - DNA, 33 bp, Homo sapiens
ggtgaggtgtgtttccgaatctgaaatctcagc

SEQ ID NO: 21599 - DNA, 33 bp, Homo sapiens
acacataaaaacacatgaggacaagtaaaactg

SEQ ID NO: 21600 - DNA, 33 bp, Homo sapiens
ttggaccttgaattgctcttaaatcacacatgc

SEQ ID NO: 21601 - DNA, 33 bp, Homo sapiens
gcctagataagaaaaggagtggcagccactgtg

SEQ ID NO: 21602 - DNA, 33 bp, Homo sapiens
tctctctctaatactatagcagaagcaggttac

SEQ ID NO: 21603 - DNA, 33 bp, Homo sapiens
gccaccgctgtagtaggattcggatcatcacct

SEQ ID NO: 21604 - DNA, 33 bp, Homo sapiens
ttccgagtttggtgtctaattctctcaaatcaa

SEQ ID NO: 21605 - DNA, 33 bp, Homo sapiens
caaaccagattcttagtcacagggcaccagtgg

SEQ ID NO: 21606 - DNA, 33 bp, Homo sapiens
ttttaagttgggagatcataagtcatcttgttt

SEQ ID NO: 21607 - DNA, 33 bp, Homo sapiens
ttttggtaaaaagcaaggcaactagttacataa

SEQ ID NO: 21608 - DNA, 33 bp, Homo sapiens
tgctaatttttatttatgtgtcacctgatgaaa

SEQ ID NO: 21609 - DNA, 33 bp, Homo sapiens
tcctcatgaatgtccagtgatattacatctgat

SEQ ID NO: 21610 - DNA, 33 bp, Homo sapiens
tgatgtttgggtagactgagtaaaagctgagaa

SEQ ID NO: 21611 - DNA, 33 bp, Homo sapiens
aactttgttctgtacatggactaaatattgtct

SEQ ID NO: 21612 - DNA, 33 bp, Homo sapiens
gtgacaagtgacaggaggacacagttaaccgtc

SEQ ID NO: 21613 - DNA, 33 bp, Homo sapiens
atttttctttatcttgcagaaaagcaccaagtg

SEQ ID NO: 21614 - DNA, 33 bp, Homo sapiens
actagagcacacccaattagaatgcagatctgg

SEQ ID NO: 21615 - DNA, 33 bp, Homo sapiens
aggccactgcgatcaatgccccaataacatatt

SEQ ID NO: 21616 - DNA, 33 bp, Homo sapiens
gtccagagaagtaagtgaatgttctgaagacat

SEQ ID NO: 21617 - DNA, 51 bp, Homo sapiens
aggctggggcactaggaaataaccattgggtctctgagttcctctcaaagc

SEQ ID NO: 21618 - DNA, 33 bp, Homo sapiens
aacattgattctgaaaggtaagcctgctccctt

SEQ ID NO: 21619 - DNA, 33 bp, Homo sapiens
tttggctttctggaaagttcattgacgtgcaac

SEQ ID NO: 21620 - DNA, 33 bp, Homo sapiens
tatatgggtcagtgggtaactacctgttaaaca

SEQ ID NO: 21621 - DNA, 33 bp, Homo sapiens
tcacaatttttaagtccacacctggaatttgga

SEQ ID NO: 21622 - DNA, 33 bp, Homo sapiens
attacaacacatagacgaactaagtatgttgta

SEQ ID NO: 21623 - DNA, 33 bp, Homo sapiens
gtcagtaactatgttagattctgagatactaaa

SEQ ID NO: 21624 - DNA, 33 bp, Homo sapiens
tatgaatcacatggtagatttccgttacatcag

SEQ ID NO: 21625 - DNA, 33 bp, Homo sapiens
aatattaatttctaactatgtaagcgcatataa

SEQ ID NO: 21626 - DNA, 33 bp, Homo sapiens
tatttaattggtgttatgctcttgcaaaaattt

SEQ ID NO: 21627 - DNA, 33 bp, Homo sapiens
cactttatctcaaccagattttgctaggctttt

SEQ ID NO: 21628 - DNA, 33 bp, Homo sapiens
aattgtcaattatttgtacggtgatgaatgaag

SEQ ID NO: 21629 - DNA, 33 bp, Homo sapiens
acacctgcttttacactaaaattagccttgcaa

SEQ ID NO: 21630 - DNA, 33 bp, Homo sapiens
ccagcagatcataaagtattgagaacagggaac

SEQ ID NO: 21631 - DNA, 51 bp, Homo sapiens
tcagtcctatttattttatacactagtaccagatagcacttcctaaaatac

SEQ ID NO: 21632 - DNA, 51 bp, Homo sapiens
ctgattactttgctaatttatttgatgtatcctgcttcttcttcaagctca

SEQ ID NO: 21633 - DNA, 33 bp, Homo sapiens
caaaaattacaacgaagtgatcttgccctgaag

SEQ ID NO: 21634 - DNA, 33 bp, Homo sapiens
ggtacctttggatgtatgtaagagtgagcattt

SEQ ID NO: 21635 - DNA, 33 bp, Homo sapiens
tctatgactctcccattactataattgctatta

SEQ ID NO: 21636 - DNA, 33 bp, Homo sapiens
aatgaagaaaagtacagggaaggttgacattat

SEQ ID NO: 21637 - DNA, 33 bp, Homo sapiens
tcctctaaggtgcaccggaaaggaagtgttcac

SEQ ID NO: 21638 - DNA, 33 bp, Homo sapiens
cataaactgacggcaattggagtttaaatagtc

SEQ ID NO: 21639 - DNA, 51 bp, Homo sapiens
caaaggcgacatatttcaattgtaatgtttcagaaataaatgattaacaac

SEQ ID NO: 21640 - DNA, 33 bp, Homo sapiens
ccagcaataatacatatcaatgtctgaagagca

SEQ ID NO: 21641 - DNA, 33 bp, Homo sapiens
tgccggtaatatcaaggcattggagcaggagct

SEQ ID NO: 21642 - DNA, 33 bp, Homo sapiens
tggtcctgttaaaccatgtcagtttgaagtgtc

SEQ ID NO: 21643 - DNA, 33 bp, Homo sapiens
gatgaattttgtttgctattgttcattaggaat

SEQ ID NO: 21644 - DNA, 33 bp, Homo sapiens
ataccttagtttctcatcaaatcatatatattt

SEQ ID NO: 21645 - DNA, 33 bp, Homo sapiens
aacttaacagagttatgacaactttgcattttg

SEQ ID NO: 21646 - DNA, 33 bp, Homo sapiens
ttactaataagttcaaggtggttgctatttctt

SEQ ID NO: 21647 - DNA, 33 bp, Homo sapiens
caagtttatatatcaaggtaaccatcacatcca

SEQ ID NO: 21648 - DNA, 33 bp, Homo sapiens
tggaatctttgaaaagtatcgagagcccaaaag

SEQ ID NO: 21649 - DNA, 51 bp, Homo sapiens
ctctgctttgcagttttcacttcctgttggagtcttttggtgaacagaagt

SEQ ID NO: 21650 - DNA, 33 bp, Homo sapiens
gttgcctgcagaattagcttgaatatgtagatt

SEQ ID NO: 21651 - DNA, 33 bp, Homo sapiens
cagagttttagaaatagtatacagcagcattaa

SEQ ID NO: 21652 - DNA, 33 bp, Homo sapiens
ttaatcctgatttccctgacatttagttcaata

SEQ ID NO: 21653 - DNA, 33 bp, Homo sapiens
aagacgaaatttctgatgagaagacaactaaaa

SEQ ID NO: 21654 - DNA, 33 bp, Homo sapiens
catttctatatactgataacgtccatgctgaga

SEQ ID NO: 21655 - DNA, 33 bp, Homo sapiens
ttcctctaaccgtacagtccagagcctgatcct

SEQ ID NO: 21656 - DNA, 51 bp, Homo sapiens
aagaaggagcagcagacatgccaaatatgtaggcaaatatttttaaatata

SEQ ID NO: 21657 - DNA, 51 bp, Homo sapiens
tgctctagagattacattgtgccttttcaacatattagtctgcttaaagtt

SEQ ID NO: 21658 - DNA, 33 bp, Homo sapiens
gaacaagcctagagtatgaaaatgacaataaat

SEQ ID NO: 21659 - DNA, 33 bp, Homo sapiens
aaacaatgtattcttctaaagcgtgtatccatt

SEQ ID NO: 21660 - DNA, 33 bp, Homo sapiens
tttgaaccttttggtcgagtttcatattccagc

SEQ ID NO: 21661 - DNA, 33 bp, Homo sapiens
gagtagaggagagaagtaggcgtacctataaaa

SEQ ID NO: 21662 - DNA, 33 bp, Homo sapiens
ttttaatatgaggacatggaagaaagaaaacag

SEQ ID NO: 21663 - DNA, 33 bp, Homo sapiens
tggtctccgtattttatggcaaatttcttgtat

SEQ ID NO: 21664 - DNA, 33 bp, Homo sapiens
tgctggagaaagcgtctactcacagattgttct

SEQ ID NO: 21665 - DNA, 33 bp, Homo sapiens
ctaaccattcacagaatcatgttgtaggtccta

SEQ ID NO: 21666 - DNA, 33 bp, Homo sapiens
catattttgtgacatatagtgtgagtgctgaga

SEQ ID NO: 21667 - DNA, 33 bp, Homo sapiens
atgttctgtttaatgatagtgatgcagtagggt

SEQ ID NO: 21668 - DNA, 33 bp, Homo sapiens
taggatggtgaaactatgcctgggactttttat

SEQ ID NO: 21669 - DNA, 33 bp, Homo sapiens
actaaaactattagcagagggtttggcatgaac

SEQ ID NO: 21670 - DNA, 33 bp, Homo sapiens
caaaggtaatgagctataataacatttgaaaac

SEQ ID NO: 21671 - DNA, 33 bp, Homo sapiens
acactaacaactttaggatctgctgatgaagca

SEQ ID NO: 21672 - DNA, 33 bp, Homo sapiens
tcctcttttataagcatatcattttggtagtta

SEQ ID NO: 21673 - DNA, 33 bp, Homo sapiens
tattgacttgtagcaatggagcaatgtacttca

SEQ ID NO: 21674 - DNA, 51 bp, Homo sapiens
tgatttcaaataaaagtacagataagatcatcttttagagatatgttgtca

SEQ ID NO: 21675 - DNA, 33 bp, Homo sapiens
gtgaaatacacaaaagtccttcaacatttggca

SEQ ID NO: 21676 - DNA, 33 bp, Homo sapiens
ccactgttcttgagtatattcaatgccatcaac

SEQ ID NO: 21677 - DNA, 33 bp, Homo sapiens
gtctcatactgtcgcctagtttgcagtgcaatg

SEQ ID NO: 21678 - DNA, 33 bp, Homo sapiens
atatagagaccataaagttattggaggagagat

SEQ ID NO: 21679 - DNA, 33 bp, Homo sapiens
ctctacagtttctgatgaaaagttcattgtcat

SEQ ID NO: 21680 - DNA, 33 bp, Homo sapiens
atcaactttgactgtaccttagaaattatacag

SEQ ID NO: 21681 - DNA, 33 bp, Homo sapiens
gacatgtaatggtgccgatttttgatccacttg

SEQ ID NO: 21682 - DNA, 33 bp, Homo sapiens
tttgatgtgacaattcgaacctttgtgccattg

SEQ ID NO: 21683 - DNA, 33 bp, Homo sapiens
tctggctattctgtactattcaaataacaactt

SEQ ID NO: 21684 - DNA, 33 bp, Homo sapiens
aacagaaaacatttccgaagacttataatatca

SEQ ID NO: 21685 - DNA, 33 bp, Homo sapiens
tagattattggcttgattaccttacttctaatg

SEQ ID NO: 21686 - DNA, 33 bp, Homo sapiens
ctcttttagaaataccgacacagagtgagagat

SEQ ID NO: 21687 - DNA, 33 bp, Homo sapiens
tatgcatcagatacaacctaaatatttcagttt

SEQ ID NO: 21688 - DNA, 33 bp, Homo sapiens
agagaggaaagcggaagaataagtcttgtggac

SEQ ID NO: 21689 - DNA, 33 bp, Homo sapiens
gtaacctgttcctatggagcaaagagatggtgc

SEQ ID NO: 21690 - DNA, 33 bp, Homo sapiens
tagtacacttcctgcatgttgatatctccagaa

SEQ ID NO: 21691 - DNA, 33 bp, Homo sapiens
agaggcacatcaattcgaatttatgtcatattt

SEQ ID NO: 21692 - DNA, 33 bp, Homo sapiens
gtgattatctccacaatgaatctcagtatatat

SEQ ID NO: 21693 - DNA, 33 bp, Homo sapiens
tgaatgagaagtaacagattatccaacattatt

SEQ ID NO: 21694 - DNA, 33 bp, Homo sapiens
gggcacagatgtcttacaaaatctaacaagaat

SEQ ID NO: 21695 - DNA, 33 bp, Homo sapiens
cctcatgcaatgcagaccctttacaagaaataa

SEQ ID NO: 21696 - DNA, 51 bp, Homo sapiens
gttaaattacctaaactttcttatatcctcttcaatattttgatgtgctat

SEQ ID NO: 21697 - DNA, 51 bp, Homo sapiens
ggaactggtaaaatttataaacaaccacatgtcagcataaacttgataaag

SEQ ID NO: 21698 - DNA, 33 bp, Homo sapiens
gaaaagcaaatgcctggaaagttcctgccatta

SEQ ID NO: 21699 - DNA, 33 bp, Homo sapiens
tctactgtcagtaggatgtcttgctttatgaca

SEQ ID NO: 21700 - DNA, 51 bp, Homo sapiens
gaggacaaagagaccacagatgaaagattactgtagatgagtcttagctgt

SEQ ID NO: 21701 - DNA, 33 bp, Homo sapiens
aatcttttgaagtctcgatgttctcaactgtaa

SEQ ID NO: 21702 - DNA, 33 bp, Homo sapiens
tcatctttggatgctccaactgtcaacagctca

SEQ ID NO: 21703 - DNA, 33 bp, Homo sapiens
ttgtcagtaattccaggaaataaaatgccctat

SEQ ID NO: 21704 - DNA, 33 bp, Homo sapiens
tgtgattatacattgctccataccaatatattt

SEQ ID NO: 21705 - DNA, 33 bp, Homo sapiens
gtcaaagattgctgaatccaaagagtattatgt

SEQ ID NO: 21706 - DNA, 33 bp, Homo sapiens
atttcacagtgcctgatgatgttcaaaatgtgt

SEQ ID NO: 21707 - DNA, 33 bp, Homo sapiens
gaacctcttagttttatgtggccttgaacgacc

SEQ ID NO: 21708 - DNA, 33 bp, Homo sapiens
attatctcctgaaggatgatttagcaaattgat

SEQ ID NO: 21709 - DNA, 33 bp, Homo sapiens
agagcaactgaacaccggcatcctttctccaaa

SEQ ID NO: 21710 - DNA, 33 bp, Homo sapiens
cagattccctggagaatggtcttctgatctctt

SEQ ID NO: 21711 - DNA, 33 bp, Homo sapiens
gagattattcgaaataggttacttgaaatttta

SEQ ID NO: 21712 - DNA, 33 bp, Homo sapiens
tatttaaggcctgaacgcactttatctttataa

SEQ ID NO: 21713 - DNA, 33 bp, Homo sapiens
tttttgaacttagtcacagaaggcctttctaaa

SEQ ID NO: 21714 - DNA, 33 bp, Homo sapiens
ggttttcatgttgttatctacaccttaaaggca

SEQ ID NO: 21715 - DNA, 33 bp, Homo sapiens
ggagctaactgcctaacctctgtcctgttccct

SEQ ID NO: 21716 - DNA, 33 bp, Homo sapiens
aaaatggaaaaatacctgctgcattagtggaat

SEQ ID NO: 21717 - DNA, 33 bp, Homo sapiens
tctccactcactgctctataaggacctgaccca

SEQ ID NO: 21718 - DNA, 33 bp, Homo sapiens
gaaagcactcccagaagagcatcccccagaggg

SEQ ID NO: 21719 - DNA, 33 bp, Homo sapiens
agagttcctgcatgactgagttcctcctttctg

SEQ ID NO: 21720 - DNA, 33 bp, Homo sapiens
cctccattgtcacaagtccctttctatatgtat

SEQ ID NO: 21721 - DNA, 33 bp, Homo sapiens
tccatttgtttatttgtagtagttgtcatctga

SEQ ID NO: 21722 - DNA, 33 bp, Homo sapiens
ttgatgctcaacacaatttcattggagacaatg

SEQ ID NO: 21723 - DNA, 33 bp, Homo sapiens
agggatgtggagtaactagagctcacactttac

SEQ ID NO: 21724 - DNA, 33 bp, Homo sapiens
aaatcatctggataaagctaacattcaggaatt

SEQ ID NO: 21725 - DNA, 33 bp, Homo sapiens
aaagaagcagtgagaatagcataaagaattagg

SEQ ID NO: 21726 - DNA, 33 bp, Homo sapiens
atttacccagtaccaaggtaatttccacatttt

SEQ ID NO: 21727 - DNA, 33 bp, Homo sapiens
aacccgagactgcaaggcttcaaatttgtcttc

SEQ ID NO: 21728 - DNA, 51 bp, Homo sapiens
actttatatatatttttgtcagctatgaaaacattaaacgctctctactaa

SEQ ID NO: 21729 - DNA, 33 bp, Homo sapiens
agtagttgcactgctataatcatatcttctttt

SEQ ID NO: 21730 - DNA, 33 bp, Homo sapiens
tgagaaatcaaagacagtggtgatacttcagag

SEQ ID NO: 21731 - DNA, 33 bp, Homo sapiens
atgatattgtggaaaatgtcaaagaggcctgaa

SEQ ID NO: 21732 - DNA, 33 bp, Homo sapiens
ggtacccaagttgcaagatgagatccccttcct

SEQ ID NO: 21733 - DNA, 33 bp, Homo sapiens
aactcttttaattgcctgaaagagcatctcgaa

SEQ ID NO: 21734 - DNA, 33 bp, Homo sapiens
aaagtggaacttgagacaagaaagtaatattag

SEQ ID NO: 21735 - DNA, 33 bp, Homo sapiens
tcatgggaattgtcctgaaatccgagttcccag

SEQ ID NO: 21736 - DNA, 33 bp, Homo sapiens
gtgtcatacctgatgatgtaccacagagcttct

SEQ ID NO: 21737 - DNA, 33 bp, Homo sapiens
gaccagaatctgtctatgaggcagctctgctgt

SEQ ID NO: 21738 - DNA, 33 bp, Homo sapiens
attacagactcatcaatgacaccgtatttccca

SEQ ID NO: 21739 - DNA, 33 bp, Homo sapiens
acctagtcatcactgatagttcccttgggatat

SEQ ID NO: 21740 - DNA, 33 bp, Homo sapiens
attacacatatggctcgctctaaatgcctgttc

SEQ ID NO: 21741 - DNA, 33 bp, Homo sapiens
tgaagagaacaaagtatgaaaacagtgaaaatt

SEQ ID NO: 21742 - DNA, 33 bp, Homo sapiens
gacagagatgccttaacctactgacttttcccc

SEQ ID NO: 21743 - DNA, 33 bp, Homo sapiens
aatttggaattgttcatagacacaaaagctcaa

SEQ ID NO: 21744 - DNA, 33 bp, Homo sapiens
acctcatgtgcctctggactgaacattgtatct

SEQ ID NO: 21745 - DNA, 33 bp, Homo sapiens
ccagaagacacagatggcactaactcatatggg

SEQ ID NO: 21746 - DNA, 51 bp, Homo sapiens
gtacctctaattctgctcttctcaaccctttaggccataggatggatctaa

SEQ ID NO: 21747 - DNA, 33 bp, Homo sapiens
ttcttcatgagctaaagattgtaatcactgttg

SEQ ID NO: 21748 - DNA, 33 bp, Homo sapiens
cttcagaaacaggaaatgatgtgaaataaatta

SEQ ID NO: 21749 - DNA, 33 bp, Homo sapiens
tttcagcttatatgtagctagcattattcaagg

SEQ ID NO: 21750 - DNA, 33 bp, Homo sapiens
gctagttccaacaaccgaggtgaccacattcca

SEQ ID NO: 21751 - DNA, 33 bp, Homo sapiens
tcatttgcctcctctggattgattgcaacaaag

SEQ ID NO: 21752 - DNA, 33 bp, Homo sapiens
aagaggatcaactatagataagagagaagctat

SEQ ID NO: 21753 - DNA, 33 bp, Homo sapiens
ggttaattttggtcaaggaatgtgtatggggaa

SEQ ID NO: 21754 - DNA, 33 bp, Homo sapiens
atctttcttatgttgatgtcacttgttacttgc

SEQ ID NO: 21755 - DNA, 51 bp, Homo sapiens
gtgcttgccctctcttcagaagtaatgcttagaatacactgtaaacttttc

SEQ ID NO: 21756 - DNA, 33 bp, Homo sapiens
agaaatagtgtaaccattcatggctctccgggt

SEQ ID NO: 21757 - DNA, 33 bp, Homo sapiens
aagaccttcaccaacagattttgtaatcctatg

SEQ ID NO: 21758 - DNA, 33 bp, Homo sapiens
gttaaatgttttagccgaagatagaggcatatc

SEQ ID NO: 21759 - DNA, 33 bp, Homo sapiens
ctattgctaagctgaatttattttaccattatg

SEQ ID NO: 21760 - DNA, 33 bp, Homo sapiens
agggccgaaagagtagccgagggctggtggtct

SEQ ID NO: 21761 - DNA, 33 bp, Homo sapiens
taaatgggaagtaagatgactgaatcagcccct

SEQ ID NO: 21762 - DNA, 33 bp, Homo sapiens
ctcattcagagagtaggattgtttgtaaactct

SEQ ID NO: 21763 - DNA, 33 bp, Homo sapiens
tccactccatagctaatgcacactccagcgtaa

SEQ ID NO: 21764 - DNA, 33 bp, Homo sapiens
cccctctagactacgccagcatgatcctttccc

SEQ ID NO: 21765 - DNA, 33 bp, Homo sapiens
ttttgccgttgcacctgaaactgcagaagttat

SEQ ID NO: 21766 - DNA, 33 bp, Homo sapiens
aaaaaagaaatcaaacgggaattagaacgtgtt

SEQ ID NO: 21767 - DNA, 33 bp, Homo sapiens
cagttcacaacatatcggacatcaggcaacaaa

SEQ ID NO: 21768 - DNA, 33 bp, Homo sapiens
gagagtaaaggtaagatgctcctgaagtgtctg

SEQ ID NO: 21769 - DNA, 33 bp, Homo sapiens
tgacctctgaaaatgatgaaataacaacttttt

SEQ ID NO: 21770 - DNA, 33 bp, Homo sapiens
aatgtttagtcaataagaaaagtccagggttgt

SEQ ID NO: 21771 - DNA, 33 bp, Homo sapiens
ggctgccaaacatgcagatagaagcaaaccttg

SEQ ID NO: 21772 - DNA, 33 bp, Homo sapiens
tgtgaatgagtggtaacctccaatactgttgca

SEQ ID NO: 21773 - DNA, 33 bp, Homo sapiens
aaaggaagcacaaatagctctcaaactaagaaa

SEQ ID NO: 21774 - DNA, 33 bp, Homo sapiens
attccctcaacaattagagcaccttctgggtcc

SEQ ID NO: 21775 - DNA, 33 bp, Homo sapiens
gatgtaatcagccaaatagccaatgaggcagca

SEQ ID NO: 21776 - DNA, 33 bp, Homo sapiens
aatttcaactctgaaagttacataatcacaaag

SEQ ID NO: 21777 - DNA, 33 bp, Homo sapiens
ctcgtatcctgactactagaagaacgaagcagg

SEQ ID NO: 21778 - DNA, 33 bp, Homo sapiens
ggaattaaaatacacacacagatgtgcttggta

SEQ ID NO: 21779 - DNA, 33 bp, Homo sapiens
ttatgggtaagcagtataaatagacgtagaatg

SEQ ID NO: 21780 - DNA, 51 bp, Homo sapiens
attaagaactacaagggaaggaaaatgctgacccatagactaaagcagagg

SEQ ID NO: 21781 - DNA, 33 bp, Homo sapiens
cgtttcattgcagaaataaaacgaatacaagca

SEQ ID NO: 21782 - DNA, 33 bp, Homo sapiens
agatgtgcgattataatgaataacacagagcaa

SEQ ID NO: 21783 - DNA, 33 bp, Homo sapiens
ctttcatggtcagaactgtgatacttctactgg

SEQ ID NO: 21784 - DNA, 33 bp, Homo sapiens
attgggtttgtagacctggagtcatcagactgc

SEQ ID NO: 21785 - DNA, 33 bp, Homo sapiens
ttgtcatgatgatgccgagttgaaggaccattc

SEQ ID NO: 21786 - DNA, 33 bp, Homo sapiens
tggctccagggaacccgaagtaacatcacagcc

SEQ ID NO: 21787 - DNA, 33 bp, Homo sapiens
agctactcagctctgggaaagttcagtataatg

SEQ ID NO: 21788 - DNA, 33 bp, Homo sapiens
ccctaactcctccatcgactacctgaatacgtg

SEQ ID NO: 21789 - DNA, 33 bp, Homo sapiens
tgttaatgagtgttcagtcagcattagtgaatt

SEQ ID NO: 21790 - DNA, 33 bp, Homo sapiens
actgcatgaggtaatacatgtttgtcgttttat

SEQ ID NO: 21791 - DNA, 33 bp, Homo sapiens
tcacatttgctaagtcgcttttgctgtgtaatg

SEQ ID NO: 21792 - DNA, 51 bp, Homo sapiens
aataattaaggtaaacacacatgtattaatgctcatattagctgctctcca

SEQ ID NO: 21793 - DNA, 51 bp, Homo sapiens
aagtccctcttcttagataaattcatagttagtgcagagaaattttctaat

SEQ ID NO: 21794 - DNA, 33 bp, Homo sapiens
tcaaaaggacacagtgcagtcattaaaaaccag

SEQ ID NO: 21795 - DNA, 51 bp, Homo sapiens
taactaaacagaatgtatatgtgcctcaatcaattaaatagggaactttat

SEQ ID NO: 21796 - DNA, 51 bp, Homo sapiens
ctgtggtttttaaatgtttgtaatagctgcaatgcactttgacgttcagtg

SEQ ID NO: 21797 - DNA, 33 bp, Homo sapiens
gagataaactttcagatgctgaagccccagaga

SEQ ID NO: 21798 - DNA, 33 bp, Homo sapiens
aacctgcatgggttccggaaggtggcacagtct

SEQ ID NO: 21799 - DNA, 51 bp, Homo sapiens
atgggttttattaagaaaggcagaagctaattatttaaaacctgtaataaa

SEQ ID NO: 21800 - DNA, 33 bp, Homo sapiens
ccagtttctcagtcacgaatctagcccagagct

SEQ ID NO: 21801 - DNA, 33 bp, Homo sapiens
agaggtagtatcacgatgggcaaagaccgattc

SEQ ID NO: 21802 - DNA, 33 bp, Homo sapiens
gtacctgtccatgaaatgtctctgtagtagctg

SEQ ID NO: 21803 - DNA, 33 bp, Homo sapiens
tgtcacatggtatctcgatgtttactttttttc

SEQ ID NO: 21804 - DNA, 33 bp, Homo sapiens
tctgaaagcaaagaactgtcaatctgaaatttt

SEQ ID NO: 21805 - DNA, 33 bp, Homo sapiens
agtggagagaataccatagtcctccgccagtcc

SEQ ID NO: 21806 - DNA, 33 bp, Homo sapiens
cttgttttccttgctcgagatatgccctgggtt

SEQ ID NO: 21807 - DNA, 33 bp, Homo sapiens
atttctgttctttctatattacccggtctcaga

SEQ ID NO: 21808 - DNA, 33 bp, Homo sapiens
ctcctgccgcttcaaaggataaagtctggcagg

SEQ ID NO: 21809 - DNA, 33 bp, Homo sapiens
tataggcattcctctcgaagtctcattactctg

SEQ ID NO: 21810 - DNA, 33 bp, Homo sapiens
accagtgaaaagaggcgcactttctagtcatca

SEQ ID NO: 21811 - DNA, 33 bp, Homo sapiens
aactggggatttgaaatgtagaagacgcagcgc

SEQ ID NO: 21812 - DNA, 33 bp, Homo sapiens
ttcatcacctacaggatctggcaacctatggat

SEQ ID NO: 21813 - DNA, 33 bp, Homo sapiens
gaccgacacacctgcagaaacgtaattcctttg

SEQ ID NO: 21814 - DNA, 33 bp, Homo sapiens
gttttagaatgcgacagtgggtttaatcctgtc

SEQ ID NO: 21815 - DNA, 33 bp, Homo sapiens
ctgccctgagcatctatattacagtacttgctg

SEQ ID NO: 21816 - DNA, 33 bp, Homo sapiens
gaaaaatggcatgaaaggagaaggagaaaatgt

SEQ ID NO: 21817 - DNA, 33 bp, Homo sapiens
cgccctgatctttggcgacttgtgtctttgcac

SEQ ID NO: 21818 - DNA, 33 bp, Homo sapiens
ttccctttgtggctactatacatcaaaaacagg

SEQ ID NO: 21819 - DNA, 33 bp, Homo sapiens
ggtgccagcacagaaggcttagtacctgcatgg

SEQ ID NO: 21820 - DNA, 33 bp, Homo sapiens
agacagactttttctagatgtccaaagagctga

SEQ ID NO: 21821 - DNA, 33 bp, Homo sapiens
cctctgccactgaaaacgtgtggtttgatggag

SEQ ID NO: 21822 - DNA, 33 bp, Homo sapiens
ctgctcaacaaccttcgagtccagaatgcccca

SEQ ID NO: 21823 - DNA, 33 bp, Homo sapiens
aggagggcaaaaatcatctggtgaccattggac

SEQ ID NO: 21824 - DNA, 33 bp, Homo sapiens
atgcctgagagcttgcgccggggtggaggtagc

SEQ ID NO: 21825 - DNA, 33 bp, Homo sapiens
tatcttagatattccagtcaaatccaatctccc

SEQ ID NO: 21826 - DNA, 33 bp, Homo sapiens
agctttgcagatgtaggcggttgaggtcacact

SEQ ID NO: 21827 - DNA, 33 bp, Homo sapiens
ccagcaccagggccacgctgttcctcgggcctc

SEQ ID NO: 21828 - DNA, 33 bp, Homo sapiens
tgccagcaagccctcctcggatgtttgttgaat

SEQ ID NO: 21829 - DNA, 33 bp, Homo sapiens
acaggggtctcaggaatgttcatgggatacaat

SEQ ID NO: 21830 - DNA, 33 bp, Homo sapiens
tacagataggaagaaatctggcttgtgaggacg

SEQ ID NO: 21831 - DNA, 33 bp, Homo sapiens
gccttctggctgtaactgggtttttcttctctg

SEQ ID NO: 21832 - DNA, 33 bp, Homo sapiens
agaccttgttacatcagcttacatcatcttaca

SEQ ID NO: 21833 - DNA, 33 bp, Homo sapiens
agacaatctttccagatgtgctttacaacagtg

SEQ ID NO: 21834 - DNA, 33 bp, Homo sapiens
gtgacaaccacagatatcccaacactggcaagt

SEQ ID NO: 21835 - DNA, 33 bp, Homo sapiens
aattgagaatgagctccccatcgctggaggtat

SEQ ID NO: 21836 - DNA, 33 bp, Homo sapiens
acctcatctcgcactcgcaggctgttattaggg

SEQ ID NO: 21837 - DNA, 33 bp, Homo sapiens
cgcggaatctgggctgtacgtgtgttctgtttg

SEQ ID NO: 21838 - DNA, 33 bp, Homo sapiens
tctccggccccctccactctatctcaagccttg

SEQ ID NO: 21839 - DNA, 33 bp, Homo sapiens
ggatgttaaataaagatgaggagcccacttgac

SEQ ID NO: 21840 - DNA, 33 bp, Homo sapiens
gcacacctacgccatatggtatgcttgagagcc

SEQ ID NO: 21841 - DNA, 33 bp, Homo sapiens
gcaattaggagctgtggactttaaacacaatga

SEQ ID NO: 21842 - DNA, 33 bp, Homo sapiens
agcgcatcggcacaccggatgagggtctctctc

SEQ ID NO: 21843 - DNA, 33 bp, Homo sapiens
aggtaatataagagcttaccagatagagtagac

SEQ ID NO: 21844 - DNA, 33 bp, Homo sapiens
gtttaaggtcatcctctctcaaaaccagtattc

SEQ ID NO: 21845 - DNA, 33 bp, Homo sapiens
tgaaaagcccgctgtcgctgcacgtcccacact

SEQ ID NO: 21846 - DNA, 33 bp, Homo sapiens
gaacacttagaacaccgcattttatagatgaga

SEQ ID NO: 21847 - DNA, 33 bp, Homo sapiens
agctgtaccagggttatggatagttgtaggaag

SEQ ID NO: 21848 - DNA, 33 bp, Homo sapiens
gaatgacacaaagtaagtgtgagctatgatgat

SEQ ID NO: 21849 - DNA, 33 bp, Homo sapiens
aaggcgtttaggaagcgatgagtttgagtgttt

SEQ ID NO: 21850 - DNA, 33 bp, Homo sapiens
agaatagatgttttacgagaccacaggctgaga

SEQ ID NO: 21851 - DNA, 33 bp, Homo sapiens
ttcatacatcttgttagagtttgctcatgttat

SEQ ID NO: 21852 - DNA, 33 bp, Homo sapiens
ggcagtttctggattggaatatcagtcatgcat

SEQ ID NO: 21853 - DNA, 33 bp, Homo sapiens
gcttgcgacacttcacgggctatcgcatcgagc

SEQ ID NO: 21854 - DNA, 33 bp, Homo sapiens
gtccctggagtaagcagacttccttatacctat

SEQ ID NO: 21855 - DNA, 33 bp, Homo sapiens
aacagaggcgtgcagcgaagtaaacacgggaag

SEQ ID NO: 21856 - DNA, 33 bp, Homo sapiens
ctattctgatctattctatttgggctagcttag

SEQ ID NO: 21857 - DNA, 33 bp, Homo sapiens
tcttctctagtccatgtatatgtatacgtacat

SEQ ID NO: 21858 - DNA, 33 bp, Homo sapiens
tctttaactgaagagctgatctttattctggga

SEQ ID NO: 21859 - DNA, 33 bp, Homo sapiens
cccagtgatgactgccggaaacattttgttctg

SEQ ID NO: 21860 - DNA, 33 bp, Homo sapiens
tggcttctaggtggcagggctaaataaatacat

SEQ ID NO: 21861 - DNA, 33 bp, Homo sapiens
ctattgctgtctgcaacctacttcaaaatgcaa

SEQ ID NO: 21862 - DNA, 33 bp, Homo sapiens
ccacagtctaccttgatatttgagttttctgag

SEQ ID NO: 21863 - DNA, 33 bp, Homo sapiens
tcacacttccatgacttacacagagaagagtga

SEQ ID NO: 21864 - DNA, 33 bp, Homo sapiens
tctgctactttctggataaataaggaaacctct

SEQ ID NO: 21865 - DNA, 33 bp, Homo sapiens
gaaatgttcaatgtgccagcttctataaaactc

SEQ ID NO: 21866 - DNA, 33 bp, Homo sapiens
acacaagtaaatgcacgctcaaatataggagct

SEQ ID NO: 21867 - DNA, 33 bp, Homo sapiens
aagggcacagataaggtactaggcatagaatct

SEQ ID NO: 21868 - DNA, 33 bp, Homo sapiens
ggggccagcacgtctggagccttttatgggcac

SEQ ID NO: 21869 - DNA, 33 bp, Homo sapiens
caacgggccagaccacgggaaggacggtgtttg

SEQ ID NO: 21870 - DNA, 33 bp, Homo sapiens
ggcctggctgaccagagatttggaaacccgacg

SEQ ID NO: 21871 - DNA, 33 bp, Homo sapiens
ctggtcctgcgtgagagtatctacaaaccttcc

SEQ ID NO: 21872 - DNA, 33 bp, Homo sapiens
agggtgcaactgccaagaactggtcctgcgtga

SEQ ID NO: 21873 - DNA, 33 bp, Homo sapiens
cccatttcatctggtatctaacaggtcttgtgc

SEQ ID NO: 21874 - DNA, 33 bp, Homo sapiens
atgtgagccacagcgataggaactattaccaat

SEQ ID NO: 21875 - DNA, 33 bp, Homo sapiens
tttttgctcaggttactcaatatgaagacaacc

SEQ ID NO: 21876 - DNA, 51 bp, Homo sapiens
atacggctacctacctagtacacattatctacaatataacattttcttttt

SEQ ID NO: 21877 - DNA, 33 bp, Homo sapiens
acttttaccccagttcgagatgacagactgaac

SEQ ID NO: 21878 - DNA, 33 bp, Homo sapiens
aagaattagtgcaggatcaattacaaaagggac

SEQ ID NO: 21879 - DNA, 33 bp, Homo sapiens
gccacatcgttttgtcgacttttttgttttgtt

SEQ ID NO: 21880 - DNA, 33 bp, Homo sapiens
ccatgctctgcttctcgacctgtgttttcacct

SEQ ID NO: 21881 - DNA, 33 bp, Homo sapiens
gactactcagatgatggaaaactattgtatata

SEQ ID NO: 21882 - DNA, 51 bp, Homo sapiens
ttttttatcaaaagcaaccaactcagatttgctaatccaacagttactaag

SEQ ID NO: 21883 - DNA, 33 bp, Homo sapiens
ggtggtgccctcaggattcctcgtgtgtcaatg

SEQ ID NO: 21884 - DNA, 51 bp, Homo sapiens
aaacaagaaagaagcacatccctcagagtttttgtactgccattcctcctg

SEQ ID NO: 21885 - DNA, 33 bp, Homo sapiens
aaaggaaatggcatcagtatgtcaaggagatat

SEQ ID NO: 21886 - DNA, 33 bp, Homo sapiens
ctgtgcccagcctacacgtctcatttctgtaat

SEQ ID NO: 21887 - DNA, 33 bp, Homo sapiens
ttggtgagtatgtgaagaaatcaggacccttat

SEQ ID NO: 21888 - DNA, 33 bp, Homo sapiens
ccccgcacggtactgatcaccctaaaatatatc

SEQ ID NO: 21889 - DNA, 33 bp, Homo sapiens
atttaatttaatgttcgcttttgacttcaacag

SEQ ID NO: 21890 - DNA, 33 bp, Homo sapiens
atgttctgcaacacctgagcatagctcaacgct

SEQ ID NO: 21891 - DNA, 33 bp, Homo sapiens
cctttgagtctgtgctgacctaagcctggttga

SEQ ID NO: 21892 - DNA, 33 bp, Homo sapiens
ggcaagtaggaagtaggatggcccagaccactt

SEQ ID NO: 21893 - DNA, 33 bp, Homo sapiens
catatgtataccatgatgacttgtgtgggtgca

SEQ ID NO: 21894 - DNA, 33 bp, Homo sapiens
gaggtgagtagtaggctgacaatcaaaacttca

SEQ ID NO: 21895 - DNA, 33 bp, Homo sapiens
cctctttgccaaatccgagggcatgaaggtcta

SEQ ID NO: 21896 - DNA, 33 bp, Homo sapiens
cgactttgaaccaagggccgaacttctctgagc

SEQ ID NO: 21897 - DNA, 33 bp, Homo sapiens
gggagacacagagagtgaagaatccagctggac

SEQ ID NO: 21898 - DNA, 33 bp, Homo sapiens
gctcaactgagacctggaaggattgagcccagc

SEQ ID NO: 21899 - DNA, 33 bp, Homo sapiens
cacaatctatgcacgtgacaaaattacacttgt

SEQ ID NO: 21900 - DNA, 33 bp, Homo sapiens
tgtaagataaagcagagactatgaggaactaga

SEQ ID NO: 21901 - DNA, 33 bp, Homo sapiens
gaaccatcacaaccgacctggctatttacgatg

SEQ ID NO: 21902 - DNA, 33 bp, Homo sapiens
ctgtgaaataaggcaagtgagggactctccagg

SEQ ID NO: 21903 - DNA, 33 bp, Homo sapiens
cagtccaggcaagacatattcatcctgtaccct

SEQ ID NO: 21904 - DNA, 33 bp, Homo sapiens
tctcaagatgcattgatgagatgagacaccatg

SEQ ID NO: 21905 - DNA, 51 bp, Homo sapiens
gcagtcagttgaactcaactgtttagcaagaaggaatttttcatctcagtc

SEQ ID NO: 21906 - DNA, 33 bp, Homo sapiens
gtaattggggccttgagcctgatccagctttga

SEQ ID NO: 21907 - DNA, 33 bp, Homo sapiens
ttgaaagtctacactctatgcttcaggtggtcc

SEQ ID NO: 21908 - DNA, 33 bp, Homo sapiens
catgtaaaaatgatacgctttggctttggctta

SEQ ID NO: 21909 - DNA, 33 bp, Homo sapiens
agtaactgaggaagaattggtatctctgtaaaa

SEQ ID NO: 21910 - DNA, 33 bp, Homo sapiens
tggctattcttcacctgacttttaaaatagtat

SEQ ID NO: 21911 - DNA, 33 bp, Homo sapiens
aagatctgaaaagcttgaagagccacactctca

SEQ ID NO: 21912 - DNA, 33 bp, Homo sapiens
atcactttcaggtacaggtatcaaatgtagatt

SEQ ID NO: 21913 - DNA, 33 bp, Homo sapiens
actgacaactaataactgagtgtgcccagaatc

SEQ ID NO: 21914 - DNA, 33 bp, Homo sapiens
cctggccaggcaaccaggtgatatgactctctg

SEQ ID NO: 21915 - DNA, 51 bp, Homo sapiens
acccaacagacagcatacatggtcaccactatccaggactctccataataa

SEQ ID NO: 21916 - DNA, 33 bp, Homo sapiens
gtccacagaacttttgtaggaatggatatgaat

SEQ ID NO: 21917 - DNA, 33 bp, Homo sapiens
aggcattatcctcaaagcctaaagctgctctca

SEQ ID NO: 21918 - DNA, 33 bp, Homo sapiens
atccccaggatcagaatatcttccactccttcc

SEQ ID NO: 21919 - DNA, 33 bp, Homo sapiens
cctgacatccagctcattcatgcacatcccttg

SEQ ID NO: 21920 - DNA, 33 bp, Homo sapiens
ctccttcaactctaggcactcagaagcctttta

SEQ ID NO: 21921 - DNA, 33 bp, Homo sapiens
ccaatccagctttccctccagcatcatctatct

SEQ ID NO: 21922 - DNA, 33 bp, Homo sapiens
ggtggaactggaacgattaaaacactaccatat

SEQ ID NO: 21923 - DNA, 51 bp, Homo sapiens
gtagagtacgcccagaatctatcaagttaaggattaaacttaaatctactc

SEQ ID NO: 21924 - DNA, 33 bp, Homo sapiens
gtggaaaagacaaagcgatttttcttacaagaa

SEQ ID NO: 21925 - DNA, 33 bp, Homo sapiens
ttaatcagggccaggattactcacgcaggaaat

SEQ ID NO: 21926 - DNA, 33 bp, Homo sapiens
taaaatctcaaatcgcgatgtccctagcaatct

SEQ ID NO: 21927 - DNA, 33 bp, Homo sapiens
cattttcacagcagcagaaggtcatcaggagat

SEQ ID NO: 21928 - DNA, 33 bp, Homo sapiens
gtgaggtacaatcccagtgccatctatctgctc

SEQ ID NO: 21929 - DNA, 33 bp, Homo sapiens
atgtggtacacgaatatgacagaatattattca

SEQ ID NO: 21930 - DNA, 33 bp, Homo sapiens
tggatctcactctatcgctgttatatgttacgt

SEQ ID NO: 21931 - DNA, 33 bp, Homo sapiens
tgtcaccatattgttagctggtttttatgtaga

SEQ ID NO: 21932 - DNA, 33 bp, Homo sapiens
agatcaagtgtaaagataagtaaatggtagttg

SEQ ID NO: 21933 - DNA, 33 bp, Homo sapiens
ggcagaagattgcacagcctccctggaccctta

SEQ ID NO: 21934 - DNA, 33 bp, Homo sapiens
agcagaatctttttgcgccatgcatgacattcc

SEQ ID NO: 21935 - DNA, 33 bp, Homo sapiens
gggacctcccataaacggaatcacagagtcacc

SEQ ID NO: 21936 - DNA, 33 bp, Homo sapiens
ctagacaactgagaaagcattcccattttgcaa

SEQ ID NO: 21937 - DNA, 33 bp, Homo sapiens
gtgttttgtagttttcgatgtacaaacttgctc

SEQ ID NO: 21938 - DNA, 33 bp, Homo sapiens
gaggctttgttttatagatgggaaccacagaaa

SEQ ID NO: 21939 - DNA, 33 bp, Homo sapiens
gcccttaggcaaatcatcaatgacccatgttca

SEQ ID NO: 21940 - DNA, 33 bp, Homo sapiens
cagctatcaccctgagtcaccgaacttccttcc

SEQ ID NO: 21941 - DNA, 33 bp, Homo sapiens
ttttgtgtgttcaggatgcagactggagtgggt

SEQ ID NO: 21942 - DNA, 51 bp, Homo sapiens
ggtattgttttgtcctagcattactgagaccatcctcatttctatccaggc

SEQ ID NO: 21943 - DNA, 33 bp, Homo sapiens
cctgtattatcaaccatgcaagatcacatcttg

SEQ ID NO: 21944 - DNA, 33 bp, Homo sapiens
ccagaagagatatacagtgatgctgataatttc

SEQ ID NO: 21945 - DNA, 33 bp, Homo sapiens
ttggcttggggtgaaaggtggacatgggagttc

SEQ ID NO: 21946 - DNA, 33 bp, Homo sapiens
atgaacacctatacacgaaattctccaaaattc

SEQ ID NO: 21947 - DNA, 33 bp, Homo sapiens
gtgtgttctgacagtatcccatatggaactggg

SEQ ID NO: 21948 - DNA, 33 bp, Homo sapiens
tccaggcatggcatccgctgctgtagagaagtt

SEQ ID NO: 21949 - DNA, 33 bp, Homo sapiens
tttgttgtcattgccagggaaaccttttattat

SEQ ID NO: 21950 - DNA, 33 bp, Homo sapiens
aattaataactttacattagcctctaagcgtcg

SEQ ID NO: 21951 - DNA, 33 bp, Homo sapiens
aaattctaatgcattcgcataacctttttcaag

SEQ ID NO: 21952 - DNA, 33 bp, Homo sapiens
cctagaggacctgggatcaagctgctagaccac

SEQ ID NO: 21953 - DNA, 33 bp, Homo sapiens
ggttgtttctaggaacgctaccatcaaagatat

SEQ ID NO: 21954 - DNA, 33 bp, Homo sapiens
aggaggcacaaaataagtgttttctagtgtgtc

SEQ ID NO: 21955 - DNA, 33 bp, Homo sapiens
ggtgatttggaactgagattggcttttatttta

SEQ ID NO: 21956 - DNA, 33 bp, Homo sapiens
tcggtaattaaacacggaacagctgtcactctg

SEQ ID NO: 21957 - DNA, 33 bp, Homo sapiens
ccacagaacagtatgcgcacttgctaaaaatct

SEQ ID NO: 21958 - DNA, 33 bp, Homo sapiens
acattgccaagtgtaatgacgtttactttctgt

SEQ ID NO: 21959 - DNA, 33 bp, Homo sapiens
gatttccctataaacagataatgcaccatgaac

SEQ ID NO: 21960 - DNA, 33 bp, Homo sapiens
catcttctagcacggagtaattaaattcaagtt

SEQ ID NO: 21961 - DNA, 33 bp, Homo sapiens
acttaatccatcaatactaactgagcatcctta

SEQ ID NO: 21962 - DNA, 33 bp, Homo sapiens
acgctgaagccactgagattcctgaccagtttc

SEQ ID NO: 21963 - DNA, 33 bp, Homo sapiens
atgtgggacagtacacgcagagtgttgccaatc

SEQ ID NO: 21964 - DNA, 33 bp, Homo sapiens
acagagtatgatacacggtactctctaagcttc

SEQ ID NO: 21965 - DNA, 33 bp, Homo sapiens
tgtcataatatccccattgcctatctccatata

SEQ ID NO: 21966 - DNA, 33 bp, Homo sapiens
gtattcggccttctatcaggtggctagctggtt

SEQ ID NO: 21967 - DNA, 33 bp, Homo sapiens
ctgtcatcctcacaaagaaatgcaggtgacctt

SEQ ID NO: 21968 - DNA, 33 bp, Homo sapiens
ctctaccatttttaactgcgtaactttgaggcg

SEQ ID NO: 21969 - DNA, 33 bp, Homo sapiens
cagctttgttctttaatgagagtatttagtcat

SEQ ID NO: 21970 - DNA, 33 bp, Homo sapiens
tggtgaaccaagaaagtcgtaaatacatggata

SEQ ID NO: 21971 - DNA, 51 bp, Homo sapiens
aaaagagattatgcagaatgcaattcaaaaagacaaatgagcagatgtaca

SEQ ID NO: 21972 - DNA, 51 bp, Homo sapiens
tctgaagagaaaaattactggactgcaaggtataaaaagagattatgcaga

SEQ ID NO: 21973 - DNA, 33 bp, Homo sapiens
ctccttgttccttagctaccagaactgatggag

SEQ ID NO: 21974 - DNA, 33 bp, Homo sapiens
agcacagacattaagacaaccaggtagcaacag

SEQ ID NO: 21975 - DNA, 51 bp, Homo sapiens
tagaaacagctgcctttaatgacaggaagatgtaagacaagtgtttattaa

SEQ ID NO: 21976 - DNA, 51 bp, Homo sapiens
tgcatctctctgatccagctgggaaggtgttgggaaaaagctgagggttag

SEQ ID NO: 21977 - DNA, 33 bp, Homo sapiens
gtgattttccaacctagatgataactttattcc

SEQ ID NO: 21978 - DNA, 33 bp, Homo sapiens
gatacatataacaaaatgatcaactagtagagc

SEQ ID NO: 21979 - DNA, 33 bp, Homo sapiens
agagcaatggaattaatgtggatgacatcataa

SEQ ID NO: 21980 - DNA, 33 bp, Homo sapiens
agtggttcagatttacgagggtaactcaggtga

SEQ ID NO: 21981 - DNA, 33 bp, Homo sapiens
cctggattaaatgtcagctgtagctagtgagga

SEQ ID NO: 21982 - DNA, 33 bp, Homo sapiens
gttgactggctagtgatccttcatgccccagga

SEQ ID NO: 21983 - DNA, 33 bp, Homo sapiens
agaaaagaaaagcaggcattggcgagccagcag

SEQ ID NO: 21984 - DNA, 33 bp, Homo sapiens
gaaagaaatgactctagacaatgacctgagtca

SEQ ID NO: 21985 - DNA, 33 bp, Homo sapiens
cctcctcgaggtgggcgaagatcacagccggca

SEQ ID NO: 21986 - DNA, 33 bp, Homo sapiens
tatctatttgattaggtcatgaatttaggcgag

SEQ ID NO: 21987 - DNA, 33 bp, Homo sapiens
ccgtccaggaatggacgatttcgcttccctgca

SEQ ID NO: 21988 - DNA, 33 bp, Homo sapiens
aacggaacttaaaagagtcatgtgacccaggaa

SEQ ID NO: 21989 - DNA, 33 bp, Homo sapiens
atccaattctcaatcatctgggccctgagtgga

SEQ ID NO: 21990 - DNA, 33 bp, Homo sapiens
cctgtcgggatgactatcaaatcctggaaaatt

SEQ ID NO: 21991 - DNA, 33 bp, Homo sapiens
aatgcacagataaagatgatggagtgaggatga

SEQ ID NO: 21992 - DNA, 33 bp, Homo sapiens
ggctggtgggaacaaagatatctatcagggcat

SEQ ID NO: 21993 - DNA, 33 bp, Homo sapiens
catgttgatgccatcgtcaagtcctgatcaggt

SEQ ID NO: 21994 - DNA, 33 bp, Homo sapiens
ggcctttgttggcccatggtcagtgcctagcga

SEQ ID NO: 21995 - DNA, 33 bp, Homo sapiens
attaaaatctttctccgactacagaccaccatt

SEQ ID NO: 21996 - DNA, 33 bp, Homo sapiens
cttgggtttttcaatggagattgctaacatgaa

SEQ ID NO: 21997 - DNA, 33 bp, Homo sapiens
tccacatggccctagatacatttctttcctttt

SEQ ID NO: 21998 - DNA, 33 bp, Homo sapiens
aaaatgaaaacacaaattctcaccattgccaac

SEQ ID NO: 21999 - DNA, 33 bp, Homo sapiens
acaagcacctcctaaatctcatctttgtctcta

SEQ ID NO: 22000 - DNA, 33 bp, Homo sapiens
ttttacctcttcagtagacataataccatgaaa

SEQ ID NO: 22001 - DNA, 33 bp, Homo sapiens
aaaccatatcaatggatgaaacaactgagtcac

SEQ ID NO: 22002 - DNA, 33 bp, Homo sapiens
tctggaaaatatgaaaccttgctcaaccctacc

SEQ ID NO: 22003 - DNA, 33 bp, Homo sapiens
atgatgtcagagactcgagaatgcgcggctggt

SEQ ID NO: 22004 - DNA, 33 bp, Homo sapiens
ccccttccttaccctctcactaagaacagtggc

SEQ ID NO: 22005 - DNA, 33 bp, Homo sapiens
aaatatcttccgctactcgggagaccccgcggg

SEQ ID NO: 22006 - DNA, 33 bp, Homo sapiens
tgggacaactgccaacggagtgtcgtaggcgcg

SEQ ID NO: 22007 - DNA, 33 bp, Homo sapiens
acttactattacctgggcattttttccagcctc

SEQ ID NO: 22008 - DNA, 33 bp, Homo sapiens
gagcagatctgtctggcaggcatattctcaatc

SEQ ID NO: 22009 - DNA, 33 bp, Homo sapiens
ctgctattaccgcatcgctatgtcagttgaggc

SEQ ID NO: 22010 - DNA, 33 bp, Homo sapiens
cacaaaccttgcccattagtcggaatcaatttc

SEQ ID NO: 22011 - DNA, 33 bp, Homo sapiens
cttgcgcgtctctctcgctgcttattcttcata

SEQ ID NO: 22012 - DNA, 33 bp, Homo sapiens
caaaactcttgattgataccttgtttcccgtct

SEQ ID NO: 22013 - DNA, 33 bp, Homo sapiens
gcaataagacaaaaaaggctgacagcatgccat

SEQ ID NO: 22014 - DNA, 33 bp, Homo sapiens
tatttcctaatctcaagctctttcctcagctcc

SEQ ID NO: 22015 - DNA, 33 bp, Homo sapiens
tctactgaccaagggctgccaaactattgccag

SEQ ID NO: 22016 - DNA, 33 bp, Homo sapiens
gtgggtgagtcacgcatccttcccacgacttgg

SEQ ID NO: 22017 - DNA, 51 bp, Homo sapiens
agatgaaggaacccattcaacttgagattactgaaaaaagacatgggactt

SEQ ID NO: 22018 - DNA, 33 bp, Homo sapiens
tagttttaacagcatggacctggtctctacaac

SEQ ID NO: 22019 - DNA, 33 bp, Homo sapiens
gcgaactcactcatgattacgagaacagcatgg

SEQ ID NO: 22020 - DNA, 51 bp, Homo sapiens
cgtgtcagggtccgcaatcaggtggtgaacatcccgtccttcattgtccgc

SEQ ID NO: 22021 - DNA, 33 bp, Homo sapiens
gatcgtgagtcataaagggcctgcaaatttcat

SEQ ID NO: 22022 - DNA, 33 bp, Homo sapiens
gcaatggtcaaaaagagtccaactgtgcaggct

SEQ ID NO: 22023 - DNA, 33 bp, Homo sapiens
tcaacgcgattcgtaatgcttcctaattcgtag

SEQ ID NO: 22024 - DNA, 33 bp, Homo sapiens
atcccaaactcatccggagcacaattttacccc

SEQ ID NO: 22025 - DNA, 51 bp, Homo sapiens
tggaaaagactttctttcctaatgaggagagctctgccaacagagtctctc

SEQ ID NO: 22026 - DNA, 33 bp, Homo sapiens
gagacatggaggagcatgtgggtagctagcatt

SEQ ID NO: 22027 - DNA, 33 bp, Homo sapiens
ctattcagacaatttagagcatcacggaaccta

SEQ ID NO: 22028 - DNA, 33 bp, Homo sapiens
ggaaaggatacaatacgcctgacccagctgctc

SEQ ID NO: 22029 - DNA, 33 bp, Homo sapiens
atcaggattctagatcgaacctggattatgact

SEQ ID NO: 22030 - DNA, 33 bp, Homo sapiens
acagacatataagtactagttgccaccagaatc

SEQ ID NO: 22031 - DNA, 33 bp, Homo sapiens
catctcaggtccataagaaacacgggagagtcc

SEQ ID NO: 22032 - DNA, 33 bp, Homo sapiens
gtaggtttttctctcatgtttggagacgaggga

SEQ ID NO: 22033 - DNA, 33 bp, Homo sapiens
gttaggtgctgactcatgagagtgaaaaccaaa

SEQ ID NO: 22034 - DNA, 33 bp, Homo sapiens
atattgtgtccaactatggaagagttcccctac

SEQ ID NO: 22035 - DNA, 33 bp, Homo sapiens
tttcctgtctgaaaacgcttgctctacaaaaac

SEQ ID NO: 22036 - DNA, 33 bp, Homo sapiens
attagagtttacataatagccgagctgagaaaa

SEQ ID NO: 22037 - DNA, 33 bp, Homo sapiens
agggaagaggatagaagtgtgcataatcatgtg

SEQ ID NO: 22038 - DNA, 33 bp, Homo sapiens
caaagggccaaattacgagacaaatgaggttcc

SEQ ID NO: 22039 - DNA, 33 bp, Homo sapiens
ccagtggcttagtaaatggagtcacattaaatg

SEQ ID NO: 22040 - DNA, 33 bp, Homo sapiens
ttagacgcccccaatatacagactattttcttt

SEQ ID NO: 22041 - DNA, 33 bp, Homo sapiens
aagcaagattgtgatatgtttgacttacatgaa

SEQ ID NO: 22042 - DNA, 33 bp, Homo sapiens
caggagtgggctgatacaactttgccgtggcag

SEQ ID NO: 22043 - DNA, 33 bp, Homo sapiens
gttgacaatctatatcgatttgacagctttcta

SEQ ID NO: 22044 - DNA, 33 bp, Homo sapiens
agatctgtgaaaagtccatttctgctgtttaaa

SEQ ID NO: 22045 - DNA, 33 bp, Homo sapiens
tggaaagtgacgatcagagaggtaaagacacct

SEQ ID NO: 22046 - DNA, 33 bp, Homo sapiens
catatttaaatcgcccgatagaatggaatcaag

SEQ ID NO: 22047 - DNA, 33 bp, Homo sapiens
tcatgtttagatatgataatgaacatatttaaa

SEQ ID NO: 22048 - DNA, 33 bp, Homo sapiens
tgtgccttaaatgagaggaaatcgatctgatgt

SEQ ID NO: 22049 - DNA, 33 bp, Homo sapiens
tgtatttcagttcttatagtgtgtgctgatttt

SEQ ID NO: 22050 - DNA, 33 bp, Homo sapiens
cacatggtgtgttttgcacatttttctgggagt

SEQ ID NO: 22051 - DNA, 33 bp, Homo sapiens
ctcagctcaatgcaaaccttggcctcctgggtt

SEQ ID NO: 22052 - DNA, 33 bp, Homo sapiens
tctgaatttcaatggctaagaatagtccaacag

SEQ ID NO: 22053 - DNA, 33 bp, Homo sapiens
acactgaaaacacatatcaggccaatgctgtgt

SEQ ID NO: 22054 - DNA, 33 bp, Homo sapiens
ctgtcttaaggcctgcgatctcaactcaggagg

SEQ ID NO: 22055 - DNA, 33 bp, Homo sapiens
gttatttaatcaaatattagtatggaatgaggc

SEQ ID NO: 22056 - DNA, 33 bp, Homo sapiens
aaaaagttgacaggtattacagaacgatatgat

SEQ ID NO: 22057 - DNA, 33 bp, Homo sapiens
tgtcggattttaggaggctcactacagagggca

SEQ ID NO: 22058 - DNA, 33 bp, Homo sapiens
accattagtccaaagatgctaaacccaaggact

SEQ ID NO: 22059 - DNA, 33 bp, Homo sapiens
tgacacagcagggtcatgttctctcctgaggcc

SEQ ID NO: 22060 - DNA, 33 bp, Homo sapiens
gtttgtaggatgtaaagtaagagagtgagagag

SEQ ID NO: 22061 - DNA, 33 bp, Homo sapiens
tctacaataaaaccatgaatctcaaatcattgg

SEQ ID NO: 22062 - DNA, 33 bp, Homo sapiens
ttgagtcatagctaaagtgtggtttcagataaa

SEQ ID NO: 22063 - DNA, 33 bp, Homo sapiens
tggcccattcttaaggtcagcaattaagctcca

SEQ ID NO: 22064 - DNA, 33 bp, Homo sapiens
tcatgaaggtgatgaaggctacaaatatgtttt

SEQ ID NO: 22065 - DNA, 33 bp, Homo sapiens
ccttgagtaggtatcctctcacctatggaggcc

SEQ ID NO: 22066 - DNA, 51 bp, Homo sapiens
gtcttctcccagagaaagaaaaagatcaccgttattcctaggggaacctct

SEQ ID NO: 22067 - DNA, 51 bp, Homo sapiens
cactcagatgtgtcttatcagaatatggaatcaccagctactttaatggat

SEQ ID NO: 22068 - DNA, 33 bp, Homo sapiens
ttgttttccactgggagcagtctatgtaagtac

SEQ ID NO: 22069 - DNA, 33 bp, Homo sapiens
ctccatggtgaccctttaaatgtcagtagcagg

SEQ ID NO: 22070 - DNA, 33 bp, Homo sapiens
cttgtggtccttgaatgatcactgtacgtggct

SEQ ID NO: 22071 - DNA, 33 bp, Homo sapiens
tgcagcagaaatagaatgtgtacaggaacctat

SEQ ID NO: 22072 - DNA, 33 bp, Homo sapiens
caatacaaaagctgctgacacaagtaaacagtg

SEQ ID NO: 22073 - DNA, 33 bp, Homo sapiens
ccagccatgcaggggatgataaaagctcagcag

SEQ ID NO: 22074 - DNA, 33 bp, Homo sapiens
tgtcgtcttaagccacgaaattcatggtaaatt

SEQ ID NO: 22075 - DNA, 33 bp, Homo sapiens
gctggaggcttgtacattggggtcatgaaagac

SEQ ID NO: 22076 - DNA, 33 bp, Homo sapiens
agttggcccaattttatgcatggattatgagga

SEQ ID NO: 22077 - DNA, 33 bp, Homo sapiens
agccaacagtacttgctgatgtcttgaatgtgg

SEQ ID NO: 22078 - DNA, 33 bp, Homo sapiens
gacctaatttcattgatgacagaagtatccact

SEQ ID NO: 22079 - DNA, 33 bp, Homo sapiens
tgtttcttcatttgtctatgcattaaccattga

SEQ ID NO: 22080 - DNA, 33 bp, Homo sapiens
tatgtttgcagattcataaagtgcaaggtgcag

SEQ ID NO: 22081 - DNA, 33 bp, Homo sapiens
aaaaatatcttcatgatgttggaataggcaaat

SEQ ID NO: 22082 - DNA, 33 bp, Homo sapiens
aaaaagaacaaaaaaagttgctattctggccct

SEQ ID NO: 22083 - DNA, 33 bp, Homo sapiens
tagaaagcccagaaaatctagctaacccgaatc

SEQ ID NO: 22084 - DNA, 33 bp, Homo sapiens
acaaaagacatctccattgattgcacagcacag

SEQ ID NO: 22085 - DNA, 33 bp, Homo sapiens
tataaactgtcagtaatgtgaagaaatggaaaa

SEQ ID NO: 22086 - DNA, 33 bp, Homo sapiens
tggccttgtgttgtcggataggatcagaacctg

SEQ ID NO: 22087 - DNA, 33 bp, Homo sapiens
gcagagcttgaggaagtataattattgttgttt

SEQ ID NO: 22088 - DNA, 33 bp, Homo sapiens
tgcaggctttgaagacgggcaaagggccatgag

SEQ ID NO: 22089 - DNA, 33 bp, Homo sapiens
agggctcctgttttacgagaaaaatgcttcttt

SEQ ID NO: 22090 - DNA, 33 bp, Homo sapiens
gatgcagggggcggcagggttcgtgacagaata

SEQ ID NO: 22091 - DNA, 33 bp, Homo sapiens
ggtcaccagtaatatcgagacttctatagcttc

SEQ ID NO: 22092 - DNA, 33 bp, Homo sapiens
gttttgcaaaagcttcggaaagaaattatggct

SEQ ID NO: 22093 - DNA, 33 bp, Homo sapiens
tggacacaatttaagggagaaaatagtgaagca

SEQ ID NO: 22094 - DNA, 33 bp, Homo sapiens
catgagctcatactgatcaaacaaaccacccaa

SEQ ID NO: 22095 - DNA, 33 bp, Homo sapiens
gcacccattctacagatgaaaccgtgaagggac

SEQ ID NO: 22096 - DNA, 33 bp, Homo sapiens
agtgagtagctacaacgctatgctgagtcccat

SEQ ID NO: 22097 - DNA, 33 bp, Homo sapiens
ttcatctttaaaacccgatgactgcaattccaa

SEQ ID NO: 22098 - DNA, 33 bp, Homo sapiens
tgactccatcgtgaaataagcaagacccattcc

SEQ ID NO: 22099 - DNA, 33 bp, Homo sapiens
gaaggaacttcacccatctgcaggaggtaactg

SEQ ID NO: 22100 - DNA, 33 bp, Homo sapiens
caccacctttgaaacatgcttcttaaactcacc

SEQ ID NO: 22101 - DNA, 33 bp, Homo sapiens
caacatatagcagagataagtcattcttgtacc

SEQ ID NO: 22102 - DNA, 33 bp, Homo sapiens
ctactcaaacagcaaatcctatagttgggttgc

SEQ ID NO: 22103 - DNA, 51 bp, Homo sapiens
ggcagacacagttctggcaactgaggatacagataatcctcccccaccccc

SEQ ID NO: 22104 - DNA, 33 bp, Homo sapiens
gaaaaagaaatttgcatggaaatgtgatgactt

SEQ ID NO: 22105 - DNA, 51 bp, Homo sapiens
acatggagagattgctgaatatcgacccatccttacattcctgggataaat

SEQ ID NO: 22106 - DNA, 51 bp, Homo sapiens
gaatcactctaagatggtcatgaaattttcacttggaaaggcatgtggaat

SEQ ID NO: 22107 - DNA, 33 bp, Homo sapiens
gggtggaaaatgttcagtcatctgaaggaccta

SEQ ID NO: 22108 - DNA, 33 bp, Homo sapiens
tgctggcacatgagtctctgcttgagggtttat

SEQ ID NO: 22109 - DNA, 33 bp, Homo sapiens
aggggactcaggtggggcattaagagcatctgc

SEQ ID NO: 22110 - DNA, 33 bp, Homo sapiens
tggctggctgaataaatgctcggatgctcttca

SEQ ID NO: 22111 - DNA, 33 bp, Homo sapiens
agttactaaattgtgatatggaagacagcaaaa

SEQ ID NO: 22112 - DNA, 33 bp, Homo sapiens
cccctattaaatcccagtcagggttgtgagaag

SEQ ID NO: 22113 - DNA, 33 bp, Homo sapiens
atcaaggtctggttaattgcagagcctgctccc

SEQ ID NO: 22114 - DNA, 33 bp, Homo sapiens
gtcaggaccccccttatatgctgttagagaacc

SEQ ID NO: 22115 - DNA, 33 bp, Homo sapiens
cagactgggtaatatagggagactctacttcta

SEQ ID NO: 22116 - DNA, 33 bp, Homo sapiens
agagggctcgctgtaatgtttacactgcttagc

SEQ ID NO: 22117 - DNA, 33 bp, Homo sapiens
aatgaatgaataaacagtgcaaatgcataaata

SEQ ID NO: 22118 - DNA, 51 bp, Homo sapiens
tgccaatattttatacgtatactaagtaacagccccagtgctggagagtgg

SEQ ID NO: 22119 - DNA, 33 bp, Homo sapiens
tcctgttaaaccatcctagacatatgcagtcat

SEQ ID NO: 22120 - DNA, 33 bp, Homo sapiens
caaatcatgtattgaatggataaagcactctca

SEQ ID NO: 22121 - DNA, 33 bp, Homo sapiens
tgggtcaaaagcctcatataataatgatagcta

SEQ ID NO: 22122 - DNA, 33 bp, Homo sapiens
cacatttaagcacttagtaaacatctctggcct

SEQ ID NO: 22123 - DNA, 51 bp, Homo sapiens
ataggcatgactgattaaatcataggccttaggtgataaactcaatcttca

SEQ ID NO: 22124 - DNA, 33 bp, Homo sapiens
aggatgatatacagatgaaatgccaggtgattt

SEQ ID NO: 22125 - DNA, 33 bp, Homo sapiens
ttcatctccaaagatattacacttgtacagggt

SEQ ID NO: 22126 - DNA, 51 bp, Homo sapiens
agaaactattcttatggtaaacacatataagaggggtgttgactttctgct

SEQ ID NO: 22127 - DNA, 33 bp, Homo sapiens
tctcactgtgttttcagatcctcagtgttttca

SEQ ID NO: 22128 - DNA, 33 bp, Homo sapiens
atttaaccagaatatcgatcatcaagccagaac

SEQ ID NO: 22129 - DNA, 33 bp, Homo sapiens
ctgtcacaggagggaattggtaaacactgtagg

SEQ ID NO: 22130 - DNA, 33 bp, Homo sapiens
ttaaacaacaataacggcaacaattataacaac

SEQ ID NO: 22131 - DNA, 33 bp, Homo sapiens
ggctaggccatccatagctgcctcaatagagcc

SEQ ID NO: 22132 - DNA, 33 bp, Homo sapiens
ctggggttatgacctggactgtactacacagga

SEQ ID NO: 22133 - DNA, 33 bp, Homo sapiens
gggttttagagtccagtccccattggctcacta

SEQ ID NO: 22134 - DNA, 33 bp, Homo sapiens
gtgaagttgagaagagtcacaaatctgtaaaag

SEQ ID NO: 22135 - DNA, 33 bp, Homo sapiens
aacagtctgatttcacgctgtttcataggctct

SEQ ID NO: 22136 - DNA, 33 bp, Homo sapiens
agttttgcaaaaggtataatgcagagcgttgtc

SEQ ID NO: 22137 - DNA, 33 bp, Homo sapiens
tgtcatatgccttcccgcaagctaacctacctg

SEQ ID NO: 22138 - DNA, 33 bp, Homo sapiens
gcagcattagatgacatatacattccgtcacat

SEQ ID NO: 22139 - DNA, 33 bp, Homo sapiens
atcactgccaaaaaaagacaaggaatgctgggc

SEQ ID NO: 22140 - DNA, 33 bp, Homo sapiens
tattttgatgtattcatgacggttaaaataatt

SEQ ID NO: 22141 - DNA, 51 bp, Homo sapiens
atcatttttccataacagaccttgggattcttagagagtgagtaggtgctg

SEQ ID NO: 22142 - DNA, 33 bp, Homo sapiens
tagaactggtactcaagatgtccacagttaacc

SEQ ID NO: 22143 - DNA, 33 bp, Homo sapiens
aaatttcaactgatggcaactataagacaaatg

SEQ ID NO: 22144 - DNA, 33 bp, Homo sapiens
agaggcgctgggctcggagcctgtttccaagaa

SEQ ID NO: 22145 - DNA, 33 bp, Homo sapiens
aggggcggggcgaggacccaagctaagagaaca

SEQ ID NO: 22146 - DNA, 33 bp, Homo sapiens
aagaaatccatcactggaaaatatctgaaaaat

SEQ ID NO: 22147 - DNA, 33 bp, Homo sapiens
catgtagtaaaagatacaaagcacaacatttat

SEQ ID NO: 22148 - DNA, 33 bp, Homo sapiens
cattatgggatttagcgccctaataagaagaga

SEQ ID NO: 22149 - DNA, 33 bp, Homo sapiens
acactctgcacaacaaccacccaggtatctact

SEQ ID NO: 22150 - DNA, 33 bp, Homo sapiens
gtgatgcctgggggtaggtcattcgcatatatg

SEQ ID NO: 22151 - DNA, 33 bp, Homo sapiens
cagccattccaaataagagaaaatggcccaaag

SEQ ID NO: 22152 - DNA, 33 bp, Homo sapiens
gctttctttatcttgctatcgatgctccctaat

SEQ ID NO: 22153 - DNA, 33 bp, Homo sapiens
atatatgttacagttatgttcactgtgaatatg

SEQ ID NO: 22154 - DNA, 33 bp, Homo sapiens
aatggctttcttccccgactccaacacaatgag

SEQ ID NO: 22155 - DNA, 33 bp, Homo sapiens
ctccattagatttccagggatggctttttgggg

SEQ ID NO: 22156 - DNA, 33 bp, Homo sapiens
tcccttccctgcattatgtgacaagctccttct

SEQ ID NO: 22157 - DNA, 33 bp, Homo sapiens
tccacttttgaaccggtatccaaaaatccactt

SEQ ID NO: 22158 - DNA, 33 bp, Homo sapiens
ggttcgtattctcatctgaggtagcagaagcac

SEQ ID NO: 22159 - DNA, 33 bp, Homo sapiens
tgtagataaaggttgatggatttcattcttttt

SEQ ID NO: 22160 - DNA, 33 bp, Homo sapiens
gtcctctgtgtacccatccagtgtactctctct

SEQ ID NO: 22161 - DNA, 51 bp, Homo sapiens
caaatttcccattgtctagcctaagtaaagaatggagcatttggattaaag

SEQ ID NO: 22162 - DNA, 33 bp, Homo sapiens
ggctgttggcttcaacgaacttgtggtcaagga

SEQ ID NO: 22163 - DNA, 33 bp, Homo sapiens
gcagatttgcattttataacttgtcatgtcaaa

SEQ ID NO: 22164 - DNA, 33 bp, Homo sapiens
tttttaaaagaatttgcattgtggctgcagggt

SEQ ID NO: 22165 - DNA, 33 bp, Homo sapiens
tgcccttgatgtaccagagcagtgtttaccagg

SEQ ID NO: 22166 - DNA, 33 bp, Homo sapiens
gatagtaggtggctaatagaattgacaggatgg

SEQ ID NO: 22167 - DNA, 33 bp, Homo sapiens
tgtatccataagaccatagagggggaaaagaca

SEQ ID NO: 22168 - DNA, 51 bp, Homo sapiens
gttgtttataaggaagttgcaaatatacaagaaagcctatatactataaaa

SEQ ID NO: 22169 - DNA, 33 bp, Homo sapiens
gaactttattttctcatgtatagattgatagga

SEQ ID NO: 22170 - DNA, 33 bp, Homo sapiens
acaacactctcatccatgcaactatcaaatgcc

SEQ ID NO: 22171 - DNA, 33 bp, Homo sapiens
tgcttattccaaacaaggttgtagtatgaatta

SEQ ID NO: 22172 - DNA, 33 bp, Homo sapiens
attgctctaactaacccctgtccaacagaaaca

SEQ ID NO: 22173 - DNA, 33 bp, Homo sapiens
attggatggagggtaacgttttaaagtcagcac

SEQ ID NO: 22174 - DNA, 33 bp, Homo sapiens
ctgttttccaatggacggaaactttttgtaaac

SEQ ID NO: 22175 - DNA, 33 bp, Homo sapiens
ttcatataggctacaagaaaatgtttaatatat

SEQ ID NO: 22176 - DNA, 33 bp, Homo sapiens
ggagaacacacttaactcttgaattagtaaatc

SEQ ID NO: 22177 - DNA, 33 bp, Homo sapiens
aacagagttctcaacatggcaaaatttttttat

SEQ ID NO: 22178 - DNA, 33 bp, Homo sapiens
tttattcttgtctcaatagtggcatggatggtc

SEQ ID NO: 22179 - DNA, 51 bp, Homo sapiens
gttgtaaacagatgtgctgccattcggactgttgttttatttatagagcac

SEQ ID NO: 22180 - DNA, 33 bp, Homo sapiens
gttttcttctctgtgaggttatcaatcagcaga

SEQ ID NO: 22181 - DNA, 33 bp, Homo sapiens
agtcacaagcactctttaaaggataacacaaac

SEQ ID NO: 22182 - DNA, 33 bp, Homo sapiens
gtagaggaattgtggccgattgaataggaagtt

SEQ ID NO: 22183 - DNA, 33 bp, Homo sapiens
tttaagttcttgaaaggcaatgctctgatggac

SEQ ID NO: 22184 - DNA, 33 bp, Homo sapiens
atagtatgccactaccgcccaactcacattaaa

SEQ ID NO: 22185 - DNA, 51 bp, Homo sapiens
gtggaatttcccagccctaggcatatcaaaagatcctttgagctttgaagg

SEQ ID NO: 22186 - DNA, 33 bp, Homo sapiens
atgtaaagaaaggaccgattttacttgcctcag

SEQ ID NO: 22187 - DNA, 33 bp, Homo sapiens
aataaatattgtagcatgaacttgaggaaacat

SEQ ID NO: 22188 - DNA, 33 bp, Homo sapiens
aaaggaaacaggaacatgaatcttgatggagga

SEQ ID NO: 22189 - DNA, 33 bp, Homo sapiens
tggagcccactactcagggaaacaaggagctcc

SEQ ID NO: 22190 - DNA, 33 bp, Homo sapiens
aagaataacatttgaattgagagagtctgaaat

SEQ ID NO: 22191 - DNA, 33 bp, Homo sapiens
ggcctacagcaaatgaggaaatgccacaagttc

SEQ ID NO: 22192 - DNA, 33 bp, Homo sapiens
tggtggaacttttgaggccttaccatttggaga

SEQ ID NO: 22193 - DNA, 33 bp, Homo sapiens
attggaatgttcctaatgtaaagaaataataaa

SEQ ID NO: 22194 - DNA, 33 bp, Homo sapiens
gggtataaggtagagattctaaacacatggaaa

SEQ ID NO: 22195 - DNA, 33 bp, Homo sapiens
gggcagtagtacaaaacgtttcttatccagcct

SEQ ID NO: 22196 - DNA, 33 bp, Homo sapiens
cgagaaagaccatcaggaattctctgaaacaaa

SEQ ID NO: 22197 - DNA, 33 bp, Homo sapiens
acaactgctgtactaagctactccatttttagg

SEQ ID NO: 22198 - DNA, 33 bp, Homo sapiens
catttctttgctttccgagtctggatttagagg

SEQ ID NO: 22199 - DNA, 33 bp, Homo sapiens
gcttatcaacctattacctctgtattaagccct

SEQ ID NO: 22200 - DNA, 33 bp, Homo sapiens
tgtggttaacaagttagagaaaacacattgcca

SEQ ID NO: 22201 - DNA, 51 bp, Homo sapiens
tttacccttctaaaaggcatatttgtatctctaaaggaatcttcacgtctt

SEQ ID NO: 22202 - DNA, 33 bp, Homo sapiens
attatcttttctaccagagatatatcatttgct

SEQ ID NO: 22203 - DNA, 33 bp, Homo sapiens
tagaggaatcaacaaatcactgaatcaggaaaa

SEQ ID NO: 22204 - DNA, 33 bp, Homo sapiens
tcacagagaaagagactgaacattaaacaccat

SEQ ID NO: 22205 - DNA, 33 bp, Homo sapiens
acaatgctatcttctatcccacgtgctcttctt

SEQ ID NO: 22206 - DNA, 33 bp, Homo sapiens
gcttccaacctcctcatgaagtctgtaaagcac

SEQ ID NO: 22207 - DNA, 33 bp, Homo sapiens
attctatgaagcaaaagctaaaagggaaatcag

SEQ ID NO: 22208 - DNA, 33 bp, Homo sapiens
cctggtggtaatgaaatacactgtttatctgaa

SEQ ID NO: 22209 - DNA, 33 bp, Homo sapiens
atatatctaggcctcagtctcctcttctgtaac

SEQ ID NO: 22210 - DNA, 33 bp, Homo sapiens
agaaaaacaaataggatagaacaagaaacatca

SEQ ID NO: 22211 - DNA, 33 bp, Homo sapiens
acatgagtgatgaaatgaaatatgcaacaaacc

SEQ ID NO: 22212 - DNA, 51 bp, Homo sapiens
acacttctctactgccgaattttcctgaatgtgacttagccaccagggagt

SEQ ID NO: 22213 - DNA, 33 bp, Homo sapiens
cagttagcctttgatgtattataattgtcacaa

SEQ ID NO: 22214 - DNA, 33 bp, Homo sapiens
agtgatgtccgttagagattttctgcactgtcc

SEQ ID NO: 22215 - DNA, 33 bp, Homo sapiens
taaatgaaatcaattatgtaaaaagcattgtaa

SEQ ID NO: 22216 - DNA, 33 bp, Homo sapiens
aatatggaagcagaaatgttaaacgatttggcc

SEQ ID NO: 22217 - DNA, 33 bp, Homo sapiens
tctcattaaatacacactgcagtccgacagctc

SEQ ID NO: 22218 - DNA, 33 bp, Homo sapiens
aggcacacctctaggcgcttggtggctgcccag

SEQ ID NO: 22219 - DNA, 33 bp, Homo sapiens
tggggctggctacaaggaagaccaagtgattag

SEQ ID NO: 22220 - DNA, 33 bp, Homo sapiens
taggttgtgcttttcatgtcaatttatttggca

SEQ ID NO: 22221 - DNA, 33 bp, Homo sapiens
gcctggaagtgacacattgctgcttcagctcat

SEQ ID NO: 22222 - DNA, 33 bp, Homo sapiens
atattgccctgttttggatctccgtattttgtc

SEQ ID NO: 22223 - DNA, 33 bp, Homo sapiens
tagtttgctgagtttcgattatcctggggcata

SEQ ID NO: 22224 - DNA, 33 bp, Homo sapiens
gctgcaacagctcccagtcttccccagtgagac

SEQ ID NO: 22225 - DNA, 33 bp, Homo sapiens
cacgctttgcatcatagcacctggaaggaaatt

SEQ ID NO: 22226 - DNA, 33 bp, Homo sapiens
ttgtttcacagttggggcatctagcaacagttg

SEQ ID NO: 22227 - DNA, 33 bp, Homo sapiens
tcctgtgccaaaaaaatatctcatttctcaatc

SEQ ID NO: 22228 - DNA, 51 bp, Homo sapiens
aggtcaaacttcctctctatattgctaaaccctatggtagatgcttggtaa

SEQ ID NO: 22229 - DNA, 33 bp, Homo sapiens
tgctgaggttcgaacagtgctggttagagaact

SEQ ID NO: 22230 - DNA, 33 bp, Homo sapiens
tgataagaaactaagatactatgttactataag

SEQ ID NO: 22231 - DNA, 33 bp, Homo sapiens
acaatttcttggaagctcagatgtaggagaggt

SEQ ID NO: 22232 - DNA, 33 bp, Homo sapiens
tttaggtgtggattaaggagaaaatgtcttctg

SEQ ID NO: 22233 - DNA, 33 bp, Homo sapiens
caacgcagctgtggaacgaaaagaacaaaaagt

SEQ ID NO: 22234 - DNA, 33 bp, Homo sapiens
aggggcacttccatgagagattatttggaacag

SEQ ID NO: 22235 - DNA, 33 bp, Homo sapiens
tgagtagcgttttatatgtacaaattccacctc

SEQ ID NO: 22236 - DNA, 33 bp, Homo sapiens
tttcacaatcacaagctcaagtagtagacttaa

SEQ ID NO: 22237 - DNA, 33 bp, Homo sapiens
caggaaaccagatctctcaacttggagttttga

SEQ ID NO: 22238 - DNA, 33 bp, Homo sapiens
cagaacgttgtttctatgagtagagctcagaca

SEQ ID NO: 22239 - DNA, 33 bp, Homo sapiens
tatgtggcagattcaatttactagatataggca

SEQ ID NO: 22240 - DNA, 33 bp, Homo sapiens
gccatttaaaattgcgtcaagcatagtactgaa

SEQ ID NO: 22241 - DNA, 33 bp, Homo sapiens
agtagaagtgggacaagaagaaacatgactgag

SEQ ID NO: 22242 - DNA, 33 bp, Homo sapiens
gaaaagcagcaccgaacaccctgcttatttcaa

SEQ ID NO: 22243 - DNA, 33 bp, Homo sapiens
ttcccactggttaaaacattgtgagctaaaaat

SEQ ID NO: 22244 - DNA, 33 bp, Homo sapiens
ctaggaaataatatgcggaaattaaggagtgca

SEQ ID NO: 22245 - DNA, 33 bp, Homo sapiens
cttcacttgaatatccgactccacatatccaaa

SEQ ID NO: 22246 - DNA, 33 bp, Homo sapiens
ggttcagaaatttgacgccagacctattaaatt

SEQ ID NO: 22247 - DNA, 33 bp, Homo sapiens
tcctacttatccttcagatcaacacactctaat

SEQ ID NO: 22248 - DNA, 33 bp, Homo sapiens
aagtttttctcccacagtaatgcaaggatgaac

SEQ ID NO: 22249 - DNA, 33 bp, Homo sapiens
tgaatctgtgacacaatataaatcactgtgtaa

SEQ ID NO: 22250 - DNA, 33 bp, Homo sapiens
ataagcataatacttatcacaattcctggcagt

SEQ ID NO: 22251 - DNA, 33 bp, Homo sapiens
agttaaagttttttcaggatctcataatcctaa

SEQ ID NO: 22252 - DNA, 33 bp, Homo sapiens
tataatggatcaagaaggacactacatcactgc

SEQ ID NO: 22253 - DNA, 33 bp, Homo sapiens
gctgagatgattgtttcaaaatggttccaagtt

SEQ ID NO: 22254 - DNA, 33 bp, Homo sapiens
aggctgcacccaggaaggaatgtgatcttggaa

SEQ ID NO: 22255 - DNA, 51 bp, Homo sapiens
aaaaatcctctttgcaactccattgcattgtacataaacaagtcaagaaag

SEQ ID NO: 22256 - DNA, 33 bp, Homo sapiens
ggtcaatgaggctgaacaagccatgaataattt

SEQ ID NO: 22257 - DNA, 33 bp, Homo sapiens
agtggtaactggcttagagcttaacctcactgc

SEQ ID NO: 22258 - DNA, 33 bp, Homo sapiens
ttagttctataaacccggggactgagttttcaa

SEQ ID NO: 22259 - DNA, 33 bp, Homo sapiens
ctgcagtctgccttacgggtagtgtgctctatc

SEQ ID NO: 22260 - DNA, 33 bp, Homo sapiens
tcatgatacgtgctaatgaagggaaatgtaggt

SEQ ID NO: 22261 - DNA, 33 bp, Homo sapiens
ccaatgacggacaggagggggcgaacaaatacc

SEQ ID NO: 22262 - DNA, 33 bp, Homo sapiens
tttatatattccacactgtagattataaattga

SEQ ID NO: 22263 - DNA, 51 bp, Homo sapiens
cagatcatagtagtggtagtccttatgcattatggtaaatgctttccacgt

SEQ ID NO: 22264 - DNA, 51 bp, Homo sapiens
ttccttcttctcctacatatatccagtatcctcatggtttctttctaatca

SEQ ID NO: 22265 - DNA, 51 bp, Homo sapiens
tggacaatgaacaatgcagtaataatgtgggcgttcatagccacatgtaat

SEQ ID NO: 22266 - DNA, 51 bp, Homo sapiens
aaaatgctttggaataaagatttggtcagattcaaggtttaaactccacac

SEQ ID NO: 22267 - DNA, 33 bp, Homo sapiens
ccagccatcccagaggcaagagccaacctgtta

SEQ ID NO: 22268 - DNA, 33 bp, Homo sapiens
acactcagagcaaaatgaaacataaaccataat

SEQ ID NO: 22269 - DNA, 33 bp, Homo sapiens
aactcagattgcaccataagagtctgctatcca

SEQ ID NO: 22270 - DNA, 33 bp, Homo sapiens
ggagtatatgttggaatcagtggcaattgctta

SEQ ID NO: 22271 - DNA, 33 bp, Homo sapiens
tctaattttatccaaagagccattagaagttct

SEQ ID NO: 22272 - DNA, 33 bp, Homo sapiens
ttaatcacttgggtactggagaaatcattttga

SEQ ID NO: 22273 - DNA, 51 bp, Homo sapiens
acagcactgttagcaatgttatccatgtgcttaaaattaaacacaacccct

SEQ ID NO: 22274 - DNA, 33 bp, Homo sapiens
attcagccagactcgagaagacaatgacctgcc

SEQ ID NO: 22275 - DNA, 33 bp, Homo sapiens
ttgaagaatgagaaaattttgtggttgtttttg

SEQ ID NO: 22276 - DNA, 33 bp, Homo sapiens
catcatgataaacatctctctcgaaaataagca

SEQ ID NO: 22277 - DNA, 33 bp, Homo sapiens
gaaagtgtctctttcctcttctcctcttcttta

SEQ ID NO: 22278 - DNA, 33 bp, Homo sapiens
gcttactttatctcactacaattttgttcatgg

SEQ ID NO: 22279 - DNA, 33 bp, Homo sapiens
aatgtgttgaaaaaccgggtgcattaggtgcct

SEQ ID NO: 22280 - DNA, 33 bp, Homo sapiens
aaatcactgtcccttctctttacccacaaacgt

SEQ ID NO: 22281 - DNA, 33 bp, Homo sapiens
tcagagcttggctgaagtctgaaccccagctgc

SEQ ID NO: 22282 - DNA, 33 bp, Homo sapiens
aggataaatttgtggagaagtgacaggacaaat

SEQ ID NO: 22283 - DNA, 33 bp, Homo sapiens
gcatcaggaaacagaggagcataagacggtaga

SEQ ID NO: 22284 - DNA, 51 bp, Homo sapiens
tctacactgcctgcaagaatgttcgtccctagcagctgagggtgacactga

SEQ ID NO: 22285 - DNA, 33 bp, Homo sapiens
ttaaaacaacagcaaatatttatttagctcatg

SEQ ID NO: 22286 - DNA, 51 bp, Homo sapiens
atgaacatgtttttcaaatacaaattgacaatccagagcctatacctcagc

SEQ ID NO: 22287 - DNA, 51 bp, Homo sapiens
tctaagggccgctgtcatcatacccggacatggttgcctttactgcactag

SEQ ID NO: 22288 - DNA, 51 bp, Homo sapiens
ccccgaagtcacaaggtgtttttgcgtagcttgtcccatttgccggaaaac

SEQ ID NO: 22289 - DNA, 51 bp, Homo sapiens
agctctgcaatttgtgtttcaatgagaactctagggcaggagcctccaacc

SEQ ID NO: 22290 - DNA, 33 bp, Homo sapiens
tttggaggtatgtggatgactttttaatccttc

SEQ ID NO: 22291 - DNA, 33 bp, Homo sapiens
gaacttgatacgcagctcccccaaactttggag

SEQ ID NO: 22292 - DNA, 33 bp, Homo sapiens
attaagtgaaataagctagcaacagaaagacaa

SEQ ID NO: 22293 - DNA, 33 bp, Homo sapiens
ttatggtggactgtgcgaaaatggccacaatac

SEQ ID NO: 22294 - DNA, 33 bp, Homo sapiens
agacaaataacactgatgactgaattcctcaga

SEQ ID NO: 22295 - DNA, 33 bp, Homo sapiens
ctgcattaattccatatctgccccctgaacagc

SEQ ID NO: 22296 - DNA, 33 bp, Homo sapiens
cttcgctaatgcacaatgaaccctcacttccaa

SEQ ID NO: 22297 - DNA, 33 bp, Homo sapiens
tgtgacattttcaatcgcttctaacagcactgg

SEQ ID NO: 22298 - DNA, 33 bp, Homo sapiens
acaaatcaaattgccaggctggtgtttcagaac

SEQ ID NO: 22299 - DNA, 33 bp, Homo sapiens
gaatcaaaacctctgagcctggacatcattttt

SEQ ID NO: 22300 - DNA, 33 bp, Homo sapiens
tgtacacatttggtcaggtatatgcctaggaaa

SEQ ID NO: 22301 - DNA, 33 bp, Homo sapiens
gtttaatgtgtacttatagcttttctcattgct

SEQ ID NO: 22302 - DNA, 33 bp, Homo sapiens
cggaagtacaacaaccggatcagaagtgtaaaa

SEQ ID NO: 22303 - DNA, 33 bp, Homo sapiens
tacccaccacatttagtatctgttacagccaac

SEQ ID NO: 22304 - DNA, 33 bp, Homo sapiens
ctctttgccgaagtgatatactgcatatgaaac

SEQ ID NO: 22305 - DNA, 33 bp, Homo sapiens
tctctgccttcttcactatttaggaagtattct

SEQ ID NO: 22306 - DNA, 33 bp, Homo sapiens
gctagaagttggtagcgccagggtttgaagcag

SEQ ID NO: 22307 - DNA, 33 bp, Homo sapiens
tcagcgtgtgtaaaaatggttgtggtggcttta

SEQ ID NO: 22308 - DNA, 33 bp, Homo sapiens
aacaccacctctccgagtatagtcatcagtgag

SEQ ID NO: 22309 - DNA, 33 bp, Homo sapiens
tgaaaatgaccttaaattacagactgatcctga

SEQ ID NO: 22310 - DNA, 33 bp, Homo sapiens
ccattttgcggtggactattgatctgaagaatg

SEQ ID NO: 22311 - DNA, 33 bp, Homo sapiens
aattgatgcactacaatgctttttactgcttca

SEQ ID NO: 22312 - DNA, 33 bp, Homo sapiens
tctataatagaaaaagtctggatgcacatagga

SEQ ID NO: 22313 - DNA, 33 bp, Homo sapiens
ttctcatttctcaagctctcattcagagcctta

SEQ ID NO: 22314 - DNA, 33 bp, Homo sapiens
cagagggagacggcacgaggttgagcatctaag

SEQ ID NO: 22315 - DNA, 33 bp, Homo sapiens
aaaaaagcaaagaagatgtatgcgggtttctgc

SEQ ID NO: 22316 - DNA, 33 bp, Homo sapiens
aagggaacattcaagctgcgatgttcagaaagt

SEQ ID NO: 22317 - DNA, 33 bp, Homo sapiens
tgcatggtggtgacaattattgacatggcaaag

SEQ ID NO: 22318 - DNA, 33 bp, Homo sapiens
tggatctgactcataatggtcaacctcagaatg

SEQ ID NO: 22319 - DNA, 33 bp, Homo sapiens
acagaggcttaggacagcagaaagacttaccca

SEQ ID NO: 22320 - DNA, 33 bp, Homo sapiens
taacaacgaagaagaatagttgattgtgctttt

SEQ ID NO: 22321 - DNA, 51 bp, Homo sapiens
tataagcaataactataaattattggtgagtaaagagaaatcatcttagag

SEQ ID NO: 22322 - DNA, 33 bp, Homo sapiens
aggacctacacttgtagcaatgactctgtaata

SEQ ID NO: 22323 - DNA, 33 bp, Homo sapiens
cccaccataggtgctcgcttaagctgagccctt

SEQ ID NO: 22324 - DNA, 33 bp, Homo sapiens
attcagaatgaggctatggaaagtgaagatgtc

SEQ ID NO: 22325 - DNA, 33 bp, Homo sapiens
aaaccagatgagaaaatgcacaagacgctgtac

SEQ ID NO: 22326 - DNA, 33 bp, Homo sapiens
gtagatagcaaatcactataaccacggtcatgg

SEQ ID NO: 22327 - DNA, 33 bp, Homo sapiens
agtccagtaccagccagtgacaagataaacatg

SEQ ID NO: 22328 - DNA, 33 bp, Homo sapiens
gctgagcaaagtagtgtaatatgacaatgtttt

SEQ ID NO: 22329 - DNA, 33 bp, Homo sapiens
gaattgctagcaaccgtcaggaagtaggaagag

SEQ ID NO: 22330 - DNA, 33 bp, Homo sapiens
tgcatagcaggcaaatgaataaacaaaatgaga

SEQ ID NO: 22331 - DNA, 33 bp, Homo sapiens
caagtgaaataggaaagtgtacaccacgctgga

SEQ ID NO: 22332 - DNA, 33 bp, Homo sapiens
ccttctgtggcctctcgagaacagaagagatca

SEQ ID NO: 22333 - DNA, 33 bp, Homo sapiens
tgctggtggcaggagcgacatctatcttgttcc

SEQ ID NO: 22334 - DNA, 33 bp, Homo sapiens
ctaattataatggaggtacagcatatcccagta

SEQ ID NO: 22335 - DNA, 33 bp, Homo sapiens
tggtagaaagcagggagagagggagacagggta

SEQ ID NO: 22336 - DNA, 33 bp, Homo sapiens
aaaacttcgtggataattatgaaagtcaaagat

SEQ ID NO: 22337 - DNA, 33 bp, Homo sapiens
ccactcatcttgctcagcggatgtcgctataaa

SEQ ID NO: 22338 - DNA, 33 bp, Homo sapiens
tgtgatgaaatcttccggcaaggcctcttgagg

SEQ ID NO: 22339 - DNA, 33 bp, Homo sapiens
ccgttaacgaagaccatcatcactgtcttcaga

SEQ ID NO: 22340 - DNA, 33 bp, Homo sapiens
atagaaccagcattcagaatagtgattgttcct

SEQ ID NO: 22341 - DNA, 33 bp, Homo sapiens
gcttcttgttcaaaaatgagaaatgtgtaaaac

SEQ ID NO: 22342 - DNA, 33 bp, Homo sapiens
accaaagacaacttaattggggaagctgcagca

SEQ ID NO: 22343 - DNA, 33 bp, Homo sapiens
ccgaactgagtagttagagagaccacatggcca

SEQ ID NO: 22344 - DNA, 33 bp, Homo sapiens
gcctatgatttgaaggtaagttgctccctataa

SEQ ID NO: 22345 - DNA, 33 bp, Homo sapiens
ggctgcatgaatcacagtgatgtcttctccaga

SEQ ID NO: 22346 - DNA, 33 bp, Homo sapiens
gtggctgtgcttgtccggaacagtaggcatggg

SEQ ID NO: 22347 - DNA, 33 bp, Homo sapiens
acacctgaggactccatgtatttatgatttagg

SEQ ID NO: 22348 - DNA, 33 bp, Homo sapiens
aaacacattctgtctagggtggggtcatcagga

SEQ ID NO: 22349 - DNA, 33 bp, Homo sapiens
gttatagatgccacccgggattatcctatcctc

SEQ ID NO: 22350 - DNA, 33 bp, Homo sapiens
taaatagatagcgatcgatgtgtggttctttcc

SEQ ID NO: 22351 - DNA, 33 bp, Homo sapiens
gtcagttctgggtggaggccgtggtccagagtg

SEQ ID NO: 22352 - DNA, 33 bp, Homo sapiens
ttctgcatctgttgaatgtaagggggaggtagc

SEQ ID NO: 22353 - DNA, 33 bp, Homo sapiens
tcacattcccctgttatgagctgagccctggag

SEQ ID NO: 22354 - DNA, 51 bp, Homo sapiens
tccttaagtagtgaaatcacatctggtacagaagctgcaattggagtcaac

SEQ ID NO: 22355 - DNA, 33 bp, Homo sapiens
aagaagatccttctcatatgttgtgtcattcat

SEQ ID NO: 22356 - DNA, 33 bp, Homo sapiens
ctgattttcttccatagcgctgttccttacctc

SEQ ID NO: 22357 - DNA, 33 bp, Homo sapiens
caatcctcagtgttgatagaagtgctagaaggc

SEQ ID NO: 22358 - DNA, 33 bp, Homo sapiens
aagaggaataccagatgactaggaaatgctaac

SEQ ID NO: 22359 - DNA, 51 bp, Homo sapiens
ggtccctgctgtgtctcggcactgatggcaatgtgtacaaagcaacaagtg

SEQ ID NO: 22360 - DNA, 33 bp, Homo sapiens
atctgtaaaatgggcatgataaaaagatcccta

SEQ ID NO: 22361 - DNA, 33 bp, Homo sapiens
ctttagcttctctggggaaccaaacatttcctg

SEQ ID NO: 22362 - DNA, 33 bp, Homo sapiens
aatgatggggaattgctagtggacgatgacaga

SEQ ID NO: 22363 - DNA, 33 bp, Homo sapiens
ggggtcccttttctccgctccaaagataccaca

SEQ ID NO: 22364 - DNA, 33 bp, Homo sapiens
tccctccaaggcatccgccacaattgcaaccgt

SEQ ID NO: 22365 - DNA, 33 bp, Homo sapiens
cttgattttgagtgcttacacctcgatcttgaa

SEQ ID NO: 22366 - DNA, 33 bp, Homo sapiens
cgctcaaacacacgcacaagctttggtctcaat

SEQ ID NO: 22367 - DNA, 33 bp, Homo sapiens
gagatagatccacgtatgcatggtcaattgaat

SEQ ID NO: 22368 - DNA, 33 bp, Homo sapiens
cactgtgggccaaacatggaccgagggctttcc

SEQ ID NO: 22369 - DNA, 33 bp, Homo sapiens
aggtcacgttggttggtaaaggtgtctgagcct

SEQ ID NO: 22370 - DNA, 33 bp, Homo sapiens
tcgagggtgagatgaagtaaaagactggaatgt

SEQ ID NO: 22371 - DNA, 33 bp, Homo sapiens
tggaccgtgggcttcaggtgtgttattaacccc

SEQ ID NO: 22372 - DNA, 33 bp, Homo sapiens
ttcaattcgctctgcatgtactgagcacctgct

SEQ ID NO: 22373 - DNA, 33 bp, Homo sapiens
gagtgacagaacaagatcctagctcaaaaaata

SEQ ID NO: 22374 - DNA, 33 bp, Homo sapiens
ttcctgcatgactgatgataggatacactgggg

SEQ ID NO: 22375 - DNA, 33 bp, Homo sapiens
tggtaggacttaggaatatttgatggtcaaggc

SEQ ID NO: 22376 - DNA, 33 bp, Homo sapiens
agagaaatgggccaaatgactcaggtaagttgc

SEQ ID NO: 22377 - DNA, 33 bp, Homo sapiens
ctgaaagtatgtttcagagtcagttaacatgat

SEQ ID NO: 22378 - DNA, 33 bp, Homo sapiens
tattttgtaagataaatgtctttcaccaggaga

SEQ ID NO: 22379 - DNA, 33 bp, Homo sapiens
gacattggagccttgctccgccaccgagctgcg

SEQ ID NO: 22380 - DNA, 33 bp, Homo sapiens
actgtaccaggaattatactttgctcatgatac

SEQ ID NO: 22381 - DNA, 33 bp, Homo sapiens
ataaataaataaaatttaaatacgccacttata

SEQ ID NO: 22382 - DNA, 33 bp, Homo sapiens
gagaagcaattagaactgtaacaatggaagtaa

SEQ ID NO: 22383 - DNA, 33 bp, Homo sapiens
cggagtcacctggggataatggtcagaggtcag

SEQ ID NO: 22384 - DNA, 33 bp, Homo sapiens
ggtatgaaggaagttagggaaactagctggtaa

SEQ ID NO: 22385 - DNA, 33 bp, Homo sapiens
acaggaattaatttgagaggactaccaatggtc

SEQ ID NO: 22386 - DNA, 51 bp, Homo sapiens
acctaaacacgtggctctgactctctgagactactctgtttctcagcatct

SEQ ID NO: 22387 - DNA, 33 bp, Homo sapiens
tgggcttgtgacttactatggcggccacagcca

SEQ ID NO: 22388 - DNA, 51 bp, Homo sapiens
ttgatggagcaaacatgatgttcttgttccaatccatcatgattcttacaa

SEQ ID NO: 22389 - DNA, 51 bp, Homo sapiens
gctatttgctgggctccccaggcaacaagaaggcataataattgtcaatat

SEQ ID NO: 22390 - DNA, 51 bp, Homo sapiens
actatgtcagtgaataaaagttcctgaatgccaagcaatggcttacacctg

SEQ ID NO: 22391 - DNA, 33 bp, Homo sapiens
ccttgttcctggcacagtgcttaatgtcctaaa

SEQ ID NO: 22392 - DNA, 33 bp, Homo sapiens
ttctccatctgtgaaattgactggagatcagca

SEQ ID NO: 22393 - DNA, 33 bp, Homo sapiens
gatgattcccggatgattaaagcacattacatt

SEQ ID NO: 22394 - DNA, 33 bp, Homo sapiens
gcaaaactctttccccggaagtgacagctatat

SEQ ID NO: 22395 - DNA, 33 bp, Homo sapiens
atgctgttagccacattataactggtggtagaa

SEQ ID NO: 22396 - DNA, 33 bp, Homo sapiens
gaagcctgtggtttaactcctatattctagcta

SEQ ID NO: 22397 - DNA, 33 bp, Homo sapiens
tatgtattaaagataattcctagtcagtacata

SEQ ID NO: 22398 - DNA, 33 bp, Homo sapiens
ttaagtctgttcatcttaacagggttccccaga

SEQ ID NO: 22399 - DNA, 33 bp, Homo sapiens
tgaggactttctcatcgcacatcaacaaagaaa

SEQ ID NO: 22400 - DNA, 33 bp, Homo sapiens
gcttcttcaagaaagagactacatggattccct

SEQ ID NO: 22401 - DNA, 33 bp, Homo sapiens
tttgccattataatgaccacctcctgtgagcac

SEQ ID NO: 22402 - DNA, 33 bp, Homo sapiens
ttttctgccctgccaagtaaaacatttgccagc

SEQ ID NO: 22403 - DNA, 33 bp, Homo sapiens
gaggcaatagagactatgtgaaaaagagaaacc

SEQ ID NO: 22404 - DNA, 33 bp, Homo sapiens
ataactctgtttcccctcggttggtcttttgtg

SEQ ID NO: 22405 - DNA, 33 bp, Homo sapiens
aaatattcccttcacctagcaaaatgaatataa

SEQ ID NO: 22406 - DNA, 33 bp, Homo sapiens
ccaggctctgactttatggtgtgtagaccttaa

SEQ ID NO: 22407 - DNA, 33 bp, Homo sapiens
catcgcatcagtaccagtgggaatagagcagcc

SEQ ID NO: 22408 - DNA, 33 bp, Homo sapiens
agattgacactggtccgacactatttaccgaac

SEQ ID NO: 22409 - DNA, 33 bp, Homo sapiens
tatttaccgaactacggacttcatggatgtcgc

SEQ ID NO: 22410 - DNA, 33 bp, Homo sapiens
tcagttggctctaagatggtgtaggatggctgc

SEQ ID NO: 22411 - DNA, 33 bp, Homo sapiens
taaaatgctggaagaaggtattaaaaaagtatt

SEQ ID NO: 22412 - DNA, 33 bp, Homo sapiens
ttccaaattagctcaagatctcagggtaggaca

SEQ ID NO: 22413 - DNA, 33 bp, Homo sapiens
actccagactaagctccatcaatttctctaagc

SEQ ID NO: 22414 - DNA, 33 bp, Homo sapiens
ttaaatgacttatccagtactataatcaaaacc

SEQ ID NO: 22415 - DNA, 33 bp, Homo sapiens
gttcatccttgacacatgtatctgcttttgact

SEQ ID NO: 22416 - DNA, 33 bp, Homo sapiens
tatgtggaccattcagtatgaccttttgttaag

SEQ ID NO: 22417 - DNA, 51 bp, Homo sapiens
aactgcattggttcttgggatttgattaaagtggctatttctagagttggg

SEQ ID NO: 22418 - DNA, 33 bp, Homo sapiens
aatggaaacagctaaatgggcatgaccctgtct

SEQ ID NO: 22419 - DNA, 33 bp, Homo sapiens
cattaaactcagaagcgatgtcgcttggattcc

SEQ ID NO: 22420 - DNA, 33 bp, Homo sapiens
atcatcagagcggagagatgaggaagttcatct

SEQ ID NO: 22421 - DNA, 33 bp, Homo sapiens
aggagatgaagcaagagattagcaactgtagaa

SEQ ID NO: 22422 - DNA, 33 bp, Homo sapiens
gcctggtgttgacttcgaacctcctggttgaag

SEQ ID NO: 22423 - DNA, 33 bp, Homo sapiens
ggaggcaagtgtcacagatttcctgagaaggtg

SEQ ID NO: 22424 - DNA, 33 bp, Homo sapiens
tcttgccagtgtgaatgagaattaaaatgatat

SEQ ID NO: 22425 - DNA, 33 bp, Homo sapiens
ccctgggattcttagatcctacttaaacctgtt

SEQ ID NO: 22426 - DNA, 33 bp, Homo sapiens
cattttacgtgcattctctcattcaaccctcac

SEQ ID NO: 22427 - DNA, 33 bp, Homo sapiens
aataaagtgtcacagattcactcccagagagtc

SEQ ID NO: 22428 - DNA, 33 bp, Homo sapiens
ggcttatgccctttaagaaaatccctttgctgt

SEQ ID NO: 22429 - DNA, 33 bp, Homo sapiens
tagcagatggtggaactgacatttgattccaga

SEQ ID NO: 22430 - DNA, 33 bp, Homo sapiens
ggtgccaaaaggatgagaaaagccttgtgagtg

SEQ ID NO: 22431 - DNA, 51 bp, Homo sapiens
ataggttggcagttgttgaagatgatggagtgagttggtgtggagggaaga

SEQ ID NO: 22432 - DNA, 33 bp, Homo sapiens
tgatgaaaaaactcaagtgattgacagatttaa

SEQ ID NO: 22433 - DNA, 33 bp, Homo sapiens
ggcacataggtcagcatattaggcttaacaaca

SEQ ID NO: 22434 - DNA, 33 bp, Homo sapiens
ccttagaatagaatcttaatgccttgctatgcc

SEQ ID NO: 22435 - DNA, 33 bp, Homo sapiens
gccttgctgcacagaatttccaaatgtggctct

SEQ ID NO: 22436 - DNA, 33 bp, Homo sapiens
tccttgcaatgctaaggctctaccaatctacta

SEQ ID NO: 22437 - DNA, 33 bp, Homo sapiens
taccacaatcaggcccgagcaagtgtgagtcag

SEQ ID NO: 22438 - DNA, 33 bp, Homo sapiens
ctgtctgggtaaagaataaatgggtggtggaat

SEQ ID NO: 22439 - DNA, 33 bp, Homo sapiens
tgtgatgtgagttgtacaatttaaaaataaaat

SEQ ID NO: 22440 - DNA, 33 bp, Homo sapiens
aaagtgcatggctacagtgaggggtgagatttt

SEQ ID NO: 22441 - DNA, 33 bp, Homo sapiens
tgcctccctggtgacttacttcttcactgtttt

SEQ ID NO: 22442 - DNA, 33 bp, Homo sapiens
gcctccttttaatgtctagaccagcatttctca

SEQ ID NO: 22443 - DNA, 33 bp, Homo sapiens
atttgagtcattccaatttcaccaaagcattaa

SEQ ID NO: 22444 - DNA, 33 bp, Homo sapiens
atataatatgcttgcattattcctgtattttcc

SEQ ID NO: 22445 - DNA, 33 bp, Homo sapiens
ctagcatcattaacatcacttgcaggcatgtta

SEQ ID NO: 22446 - DNA, 33 bp, Homo sapiens
aaccttttggtatgtctcatcttactcaccttt

SEQ ID NO: 22447 - DNA, 33 bp, Homo sapiens
tacaggaaagtcagtatagaattggagattagt

SEQ ID NO: 22448 - DNA, 33 bp, Homo sapiens
tgctttgcccaaaggatctgtgagcatgaataa

SEQ ID NO: 22449 - DNA, 33 bp, Homo sapiens
aacaattggagtgtaaggagatcctgattcaac

SEQ ID NO: 22450 - DNA, 33 bp, Homo sapiens
cactttaggcagccggtaatcctcctaatctca

SEQ ID NO: 22451 - DNA, 33 bp, Homo sapiens
cacacaaatacaccaggaatgtttacctatgta

SEQ ID NO: 22452 - DNA, 33 bp, Homo sapiens
gtaactttccagcctgtatctggttatgattgc

SEQ ID NO: 22453 - DNA, 33 bp, Homo sapiens
ttttcctcgcagatcatgaattcccaaaggaac

SEQ ID NO: 22454 - DNA, 33 bp, Homo sapiens
tctgaaggattgagtaggaggtgctccaaaggg

SEQ ID NO: 22455 - DNA, 33 bp, Homo sapiens
gtgttaaagtaccaaaggctccaatttactaag

SEQ ID NO: 22456 - DNA, 33 bp, Homo sapiens
aatttgcgttttcaaagcaagagttgtagtgga

SEQ ID NO: 22457 - DNA, 33 bp, Homo sapiens
tgattaaactttctacgatttatgcgcaacact

SEQ ID NO: 22458 - DNA, 33 bp, Homo sapiens
agtatgtacttaagctgaagtctcatcattgat

SEQ ID NO: 22459 - DNA, 33 bp, Homo sapiens
aacatttgaattaacagtccttgctgtgtgtgt

SEQ ID NO: 22460 - DNA, 33 bp, Homo sapiens
ggtgactcatagacccgatatggtgagaagaat

SEQ ID NO: 22461 - DNA, 33 bp, Homo sapiens
cctgaaattgtctatcggaagctattaatagct

SEQ ID NO: 22462 - DNA, 33 bp, Homo sapiens
tctccattcaaatccattccttcacttattcta

SEQ ID NO: 22463 - DNA, 33 bp, Homo sapiens
acagtgctgggcactggacatggttatcttgac

SEQ ID NO: 22464 - DNA, 33 bp, Homo sapiens
cctgttgtacccacactcataagaggataagat

SEQ ID NO: 22465 - DNA, 33 bp, Homo sapiens
aaaaaataaatggctatatgactgagcaaactc

SEQ ID NO: 22466 - DNA, 33 bp, Homo sapiens
gtcactgtcctttttatagggtgctggttgaga

SEQ ID NO: 22467 - DNA, 33 bp, Homo sapiens
attctgccttgagacagcttcgagggacaaaca

SEQ ID NO: 22468 - DNA, 51 bp, Homo sapiens
ctcctctccttctttgcttccatccgtcaacccatttgctgaagaagaaaa

SEQ ID NO: 22469 - DNA, 33 bp, Homo sapiens
ctgtatgaggttggaaggccttattaacatcgt

SEQ ID NO: 22470 - DNA, 33 bp, Homo sapiens
aaatccagttaccccagacccatttgttgaaga

SEQ ID NO: 22471 - DNA, 33 bp, Homo sapiens
ccatcttaatagtgccggataattgacaaattt

SEQ ID NO: 22472 - DNA, 33 bp, Homo sapiens
agcagttctttctgccgggaacgcccttcccca

SEQ ID NO: 22473 - DNA, 33 bp, Homo sapiens
ctagaagactataccctgcgcttaacagtagtt

SEQ ID NO: 22474 - DNA, 33 bp, Homo sapiens
taccaataatgatcaatgttctaagttccacat

SEQ ID NO: 22475 - DNA, 33 bp, Homo sapiens
cactgtacctaaagaagaagataaaagagtaga

SEQ ID NO: 22476 - DNA, 51 bp, Homo sapiens
ccttcggcggtaggaactatggcactctcagagtttatcacctatgtaacc

SEQ ID NO: 22477 - DNA, 33 bp, Homo sapiens
tcagatcagaaaataataacagcttggctgggc

SEQ ID NO: 22478 - DNA, 33 bp, Homo sapiens
cctggactctggactagtaacatacagaattta

SEQ ID NO: 22479 - DNA, 33 bp, Homo sapiens
gagagcaaatgtacaggacctgcaagcccccta

SEQ ID NO: 22480 - DNA, 33 bp, Homo sapiens
caacatacatccatgagcaattttagatggcag

SEQ ID NO: 22481 - DNA, 33 bp, Homo sapiens
ctcactcagacctaacgaagcataacttacagg

SEQ ID NO: 22482 - DNA, 51 bp, Homo sapiens
cagtatctttctgaaggaactaatataacctaggccatgccccttacagct

SEQ ID NO: 22483 - DNA, 33 bp, Homo sapiens
gactcatatatccaacgagtccctggatgttta

SEQ ID NO: 22484 - DNA, 51 bp, Homo sapiens
gtcatctctatccccatctcttggcttcaacctgtcctggcccatggggct

SEQ ID NO: 22485 - DNA, 33 bp, Homo sapiens
tgacagacgtttcccatagtgcgggcacaaagt

SEQ ID NO: 22486 - DNA, 33 bp, Homo sapiens
gggaatgaagccttgagcttgggcaatctgact

SEQ ID NO: 22487 - DNA, 51 bp, Homo sapiens
aaaaaaaaaaaaaaaaaaagcctccgaaagaatgcccaagaaattggtaac

SEQ ID NO: 22488 - DNA, 33 bp, Homo sapiens
tgttcatttttcctcatgttcagcaatatttaa

SEQ ID NO: 22489 - DNA, 33 bp, Homo sapiens
atcttctcttatgtaattgctaacatcaaagtt

SEQ ID NO: 22490 - DNA, 33 bp, Homo sapiens
atgtccacctcgaacagtcatagggactcagct

SEQ ID NO: 22491 - DNA, 33 bp, Homo sapiens
tcagttatggtttcaagttatgttgctgtacat

SEQ ID NO: 22492 - DNA, 33 bp, Homo sapiens
tcttctgttaaaaatcgctttgaccatccatag

SEQ ID NO: 22493 - DNA, 33 bp, Homo sapiens
ggagagtctcagtagatattggcatcttagggt

SEQ ID NO: 22494 - DNA, 33 bp, Homo sapiens
tcccggtagagtcacaggatgcacttaattctt

SEQ ID NO: 22495 - DNA, 33 bp, Homo sapiens
cttatgctgggtcatataaacagtcagaactag

SEQ ID NO: 22496 - DNA, 33 bp, Homo sapiens
gatgattgctggtttctcttacacatagcagag

SEQ ID NO: 22497 - DNA, 33 bp, Homo sapiens
acgtgtgtaaccatggtagacgacaaaagtatg

SEQ ID NO: 22498 - DNA, 33 bp, Homo sapiens
ccaggcaactctttacgctgctgcgattctctt

SEQ ID NO: 22499 - DNA, 33 bp, Homo sapiens
ataaccgttttaagtggatatcagtactttaat

SEQ ID NO: 22500 - DNA, 33 bp, Homo sapiens
actgagattgaaggaagagatttgggggatgag

SEQ ID NO: 22501 - DNA, 33 bp, Homo sapiens
cagaggcaggtcttctgactaagaaatggatat

SEQ ID NO: 22502 - DNA, 33 bp, Homo sapiens
catgctgagcgcactgcaggacagaatccagtg

SEQ ID NO: 22503 - DNA, 33 bp, Homo sapiens
agaaacaggcagcaccgaggaatgagctcacct

SEQ ID NO: 22504 - DNA, 33 bp, Homo sapiens
ctcctaccttccataatgggtttgctcatccat

SEQ ID NO: 22505 - DNA, 33 bp, Homo sapiens
aatggggaggcaactatgaaatcaacagtggga

SEQ ID NO: 22506 - DNA, 33 bp, Homo sapiens
gttgaatcctctcaacgacactatggagcgggt

SEQ ID NO: 22507 - DNA, 33 bp, Homo sapiens
ggtatgtaggaagcactcaataaatgcacctct

SEQ ID NO: 22508 - DNA, 33 bp, Homo sapiens
ggtgtggctactccacgccttgcttctcctcct

SEQ ID NO: 22509 - DNA, 33 bp, Homo sapiens
agtgatttactatgcagcaatggattattgaaa

SEQ ID NO: 22510 - DNA, 33 bp, Homo sapiens
tttaacatttacttctgaatactgtcttttcct

SEQ ID NO: 22511 - DNA, 33 bp, Homo sapiens
cagcaactcccccggcgctagacgagctctatc

SEQ ID NO: 22512 - DNA, 33 bp, Homo sapiens
cgtgcagttagcaccatctcctaccatcactgc

SEQ ID NO: 22513 - DNA, 33 bp, Homo sapiens
ttgaagttgtttgtgagcagaaatttaactccc

SEQ ID NO: 22514 - DNA, 33 bp, Homo sapiens
ggcatgaaaatattcgtcaattataggagagtt

SEQ ID NO: 22515 - DNA, 33 bp, Homo sapiens
ctgcattttgtgttcatcgcctggccctggtgg

SEQ ID NO: 22516 - DNA, 33 bp, Homo sapiens
tttaatgaatggcagctccggctcctcccgctt

SEQ ID NO: 22517 - DNA, 33 bp, Homo sapiens
tgagccaacattcaagtctcaaattattttaca

SEQ ID NO: 22518 - DNA, 33 bp, Homo sapiens
gatgaaaaccagtgccgaatggaaatgcaaatc

SEQ ID NO: 22519 - DNA, 51 bp, Homo sapiens
gcctgaccccagagctttacggtgagtcacagcctgtccctgtccctggat

SEQ ID NO: 22520 - DNA, 33 bp, Homo sapiens
tataggcacacaaatatgtagaactggggaatc

SEQ ID NO: 22521 - DNA, 33 bp, Homo sapiens
aacctacctgtggcatgaccagactcggaaagt

SEQ ID NO: 22522 - DNA, 33 bp, Homo sapiens
cctggaatgtggtaagtactgtgtaagagttag

SEQ ID NO: 22523 - DNA, 33 bp, Homo sapiens
acttaatttaccaacatatccggagtgtatttt

SEQ ID NO: 22524 - DNA, 33 bp, Homo sapiens
ttaatctcgcaagcacggggagtttctgccatc

SEQ ID NO: 22525 - DNA, 33 bp, Homo sapiens
tctagcagattctttcgcacctagtcccggtgg

SEQ ID NO: 22526 - DNA, 33 bp, Homo sapiens
ttataagatatgattcgatgcgacgtcattgcc

SEQ ID NO: 22527 - DNA, 33 bp, Homo sapiens
gagtgcatagtgcagatagtgaaacgccgtcag

SEQ ID NO: 22528 - DNA, 33 bp, Homo sapiens
tggggcacgggagaggtagaagaaatccagtcc

SEQ ID NO: 22529 - DNA, 33 bp, Homo sapiens
gcacagccttatcacatagtattacctggcccc

SEQ ID NO: 22530 - DNA, 33 bp, Homo sapiens
tccaactgaggtttgcggagtttaagctcagca

SEQ ID NO: 22531 - DNA, 33 bp, Homo sapiens
aaaatagggtagcaggtccaaatcaaaatgaga

SEQ ID NO: 22532 - DNA, 33 bp, Homo sapiens
atgactttttcttttggagcacgtattgtacta

SEQ ID NO: 22533 - DNA, 33 bp, Homo sapiens
ctgtttccagaggagagagcttaaaaaccacag

SEQ ID NO: 22534 - DNA, 33 bp, Homo sapiens
agtaagcctggtagcacctagcatgaaacaaaa

SEQ ID NO: 22535 - DNA, 33 bp, Homo sapiens
actcaaggtgactctactacatatattcctgtt

SEQ ID NO: 22536 - DNA, 33 bp, Homo sapiens
gacccagaatcactaatgtaaggatacctggtc

SEQ ID NO: 22537 - DNA, 33 bp, Homo sapiens
ccggttgagctggaaatccatgtttgccctgca

SEQ ID NO: 22538 - DNA, 33 bp, Homo sapiens
tcagttccttccttgaggggctgatacttgaat

SEQ ID NO: 22539 - DNA, 33 bp, Homo sapiens
aattctcatccataaagaatgcatacacaatgg

SEQ ID NO: 22540 - DNA, 33 bp, Homo sapiens
aaatggactttaattataggcgtgccagcactg

SEQ ID NO: 22541 - DNA, 33 bp, Homo sapiens
ctggactgttctttccgcagatatcctgaaggc

SEQ ID NO: 22542 - DNA, 51 bp, Homo sapiens
tttctgatggcatagcttttggatcgatcattctctttttttgctctgtct

SEQ ID NO: 22543 - DNA, 33 bp, Homo sapiens
tcaagcactgagccacgggcttgccatacagcc

SEQ ID NO: 22544 - DNA, 33 bp, Homo sapiens
agtcatagtgtgaacatgggccaacaccacttc

SEQ ID NO: 22545 - DNA, 33 bp, Homo sapiens
cagctctacaaaagaatgagttaatgtctttgc

SEQ ID NO: 22546 - DNA, 33 bp, Homo sapiens
aaggtgccacctctaattggctgcagaaaagtg

SEQ ID NO: 22547 - DNA, 33 bp, Homo sapiens
aacacgcaatgaacacgctagagccctttgtaa

SEQ ID NO: 22548 - DNA, 33 bp, Homo sapiens
tattcagaaccttgaaggcaccgtgcagaccaa

SEQ ID NO: 22549 - DNA, 33 bp, Homo sapiens
cctgggcagcatagtggcacctgtatctaataa

SEQ ID NO: 22550 - DNA, 33 bp, Homo sapiens
atctgctggtacaaaatctgaattataggaaga

SEQ ID NO: 22551 - DNA, 33 bp, Homo sapiens
ttctaaactgcttctatgtattattaaaccaaa

SEQ ID NO: 22552 - DNA, 33 bp, Homo sapiens
aatacacatccctggatatagttgccaaaaacc

SEQ ID NO: 22553 - DNA, 33 bp, Homo sapiens
actcttcttaggaaacggcctgattaaccagaa

SEQ ID NO: 22554 - DNA, 33 bp, Homo sapiens
tctttggtgcccctaatagcaaagcccagcagg

SEQ ID NO: 22555 - DNA, 33 bp, Homo sapiens
ggttcattattcaggattattggaagacccaat

SEQ ID NO: 22556 - DNA, 33 bp, Homo sapiens
agacatgactagaaaagaaagatacatatgtcc

SEQ ID NO: 22557 - DNA, 33 bp, Homo sapiens
tagcctttagctgggctcctttgtgccaaacaa

SEQ ID NO: 22558 - DNA, 33 bp, Homo sapiens
gtttgtaaggctgagcgactggttgttaaagag

SEQ ID NO: 22559 - DNA, 33 bp, Homo sapiens
ttaactgtcagctacatgaaaggagacattcca

SEQ ID NO: 22560 - DNA, 51 bp, Homo sapiens
ttccaagatgggtaggattagaaaatgagccaactggacggggaagtttga

SEQ ID NO: 22561 - DNA, 33 bp, Homo sapiens
cactcccaggtatcaatcaatcccctgagcatt

SEQ ID NO: 22562 - DNA, 51 bp, Homo sapiens
cacaagagacagcacagtgagtacagtgagagtaagaactcggacgtgacc

SEQ ID NO: 22563 - DNA, 33 bp, Homo sapiens
tacttgctattcactatgctgaaaacttttatt

SEQ ID NO: 22564 - DNA, 33 bp, Homo sapiens
ttagaaaatcaagtcacctttgtattactgttc

SEQ ID NO: 22565 - DNA, 33 bp, Homo sapiens
ttccaaataaagcaaagtacaggttctctttgt

SEQ ID NO: 22566 - DNA, 33 bp, Homo sapiens
aaattctgtagatggatattgttatgtttgtac

SEQ ID NO: 22567 - DNA, 33 bp, Homo sapiens
ttctctgcaacaaggatagtaagatgtagatga

SEQ ID NO: 22568 - DNA, 33 bp, Homo sapiens
tggaagtaaagatgaatgacatgcaaagaaata

SEQ ID NO: 22569 - DNA, 33 bp, Homo sapiens
ggtaaacgactagatattagatatttttggcct

SEQ ID NO: 22570 - DNA, 33 bp, Homo sapiens
tgaatggcacttctaacaattggctacacaacc

SEQ ID NO: 22571 - DNA, 33 bp, Homo sapiens
aaaacatgtactccgatgtcagatggcctggat

SEQ ID NO: 22572 - DNA, 33 bp, Homo sapiens
ttacagtttgcaaggctatctgagaggtcttcg

SEQ ID NO: 22573 - DNA, 51 bp, Homo sapiens
actgactcaggatacactggatagatacttttctgtgtatgtgatttaaag

SEQ ID NO: 22574 - DNA, 51 bp, Homo sapiens
caaaattgtgggtaatttgagagtcgagacaagtatttattcacaccaatg

SEQ ID NO: 22575 - DNA, 33 bp, Homo sapiens
cctgcattcagtttcatcttttatctgtgttgt

SEQ ID NO: 22576 - DNA, 33 bp, Homo sapiens
acccatgatctacctgcaatggctgtcttcttg

SEQ ID NO: 22577 - DNA, 33 bp, Homo sapiens
aaacacaccagagagcgaagatgaacaccatct

SEQ ID NO: 22578 - DNA, 33 bp, Homo sapiens
aataattccaaaatcttaacagtttacagcaac

SEQ ID NO: 22579 - DNA, 33 bp, Homo sapiens
gcaaaacgagagaacagagtttctgaagttggg

SEQ ID NO: 22580 - DNA, 33 bp, Homo sapiens
gtgattcatcagtccattacatcatttcttgta

SEQ ID NO: 22581 - DNA, 33 bp, Homo sapiens
gaacgcgaaaatcaaggactaaattgctgacta

SEQ ID NO: 22582 - DNA, 33 bp, Homo sapiens
atggcttagttcaagatgagcataatttttaac

SEQ ID NO: 22583 - DNA, 33 bp, Homo sapiens
ctgagtggtccctataggtgattgctctatgcc

SEQ ID NO: 22584 - DNA, 33 bp, Homo sapiens
tgcttccatttttgtatccattggccacttcac

SEQ ID NO: 22585 - DNA, 33 bp, Homo sapiens
cgtttgtctgatgtaaggttcctattttttcca

SEQ ID NO: 22586 - DNA, 33 bp, Homo sapiens
gagctgggtcctgagagaaaggatgcaaatcag

SEQ ID NO: 22587 - DNA, 33 bp, Homo sapiens
ataggatgtcttcctatgattctatatccaatg

SEQ ID NO: 22588 - DNA, 33 bp, Homo sapiens
tttgctgtggacaggatctttatgcgtcgaagg

SEQ ID NO: 22589 - DNA, 33 bp, Homo sapiens
aggttgagggggtttcgcatttaccaaagcttt

SEQ ID NO: 22590 - DNA, 33 bp, Homo sapiens
ttttcttggactgttataacgccatgactcaga

SEQ ID NO: 22591 - DNA, 33 bp, Homo sapiens
aacttcaggactcttataggatcattggaaaag

SEQ ID NO: 22592 - DNA, 33 bp, Homo sapiens
agtggcagaacacccagtgaaaaatgacctcag

SEQ ID NO: 22593 - DNA, 33 bp, Homo sapiens
cctcctcaaaggtcaactcctggtcattccttc

SEQ ID NO: 22594 - DNA, 33 bp, Homo sapiens
cttgatgctttttgaggaactggtccattttat

SEQ ID NO: 22595 - DNA, 33 bp, Homo sapiens
aatttaatgcttgttgtaactctagaaatctct

SEQ ID NO: 22596 - DNA, 33 bp, Homo sapiens
gaatttgcatttttccgataactcttgaagcca

SEQ ID NO: 22597 - DNA, 33 bp, Homo sapiens
tgtttgaccacttatcggaactttctatataat

SEQ ID NO: 22598 - DNA, 33 bp, Homo sapiens
actgacctagcagaggtatttgaggattaaatg

SEQ ID NO: 22599 - DNA, 33 bp, Homo sapiens
atgtggcagattgctttaactgactttatcaag

SEQ ID NO: 22600 - DNA, 33 bp, Homo sapiens
tatgagattcaagccagagaaattatctcagtg

SEQ ID NO: 22601 - DNA, 33 bp, Homo sapiens
tcagcggtaattccacgatgtcactctttcagc

SEQ ID NO: 22602 - DNA, 33 bp, Homo sapiens
gtggcttttgtagagatggagtccctgaccatg

SEQ ID NO: 22603 - DNA, 33 bp, Homo sapiens
cctcaggtctttgatataatgtcatttaatcag

SEQ ID NO: 22604 - DNA, 51 bp, Homo sapiens
tgacaacagctgagtcaccccgtgcggatataacaagttcgtaagatgtga

SEQ ID NO: 22605 - DNA, 33 bp, Homo sapiens
aaggaccttgccaagctgatcgcagtgtttgga

SEQ ID NO: 22606 - DNA, 33 bp, Homo sapiens
gggatttatgaaatgatgcctttgaagtggaag

SEQ ID NO: 22607 - DNA, 33 bp, Homo sapiens
attggagataaagtccgaggaggtgaactaacc

SEQ ID NO: 22608 - DNA, 51 bp, Homo sapiens
ctctctaaattttggtagtctgatagaagagagcacttgggaatgaattta

SEQ ID NO: 22609 - DNA, 51 bp, Homo sapiens
gttgctctgcaggttattaatgtcctagaataacctaataaggagaacagt

SEQ ID NO: 22610 - DNA, 51 bp, Homo sapiens
caaattataatcattatcaaataccggcttaatccttctaacatttgtaaa

SEQ ID NO: 22611 - DNA, 51 bp, Homo sapiens
ggacagcctgttgatcaatagaatggaattgagagtccagaaataaagtcc

SEQ ID NO: 22612 - DNA, 33 bp, Homo sapiens
catagcacagaaacaatcgaaatactgagcaaa

SEQ ID NO: 22613 - DNA, 33 bp, Homo sapiens
atgatatagcctttgagctgctagatccagctg

SEQ ID NO: 22614 - DNA, 33 bp, Homo sapiens
aacaatgaataacacagtgaaccaaaccacagg

SEQ ID NO: 22615 - DNA, 33 bp, Homo sapiens
tggcatctgaacggaggagaaagaggaggctgg

SEQ ID NO: 22616 - DNA, 33 bp, Homo sapiens
gctgaaggtaaagaaggacctcttagtagctca

SEQ ID NO: 22617 - DNA, 51 bp, Homo sapiens
atcacattgatttaagggaaaaaaaccatattgagtggtgtaaccaagaag

SEQ ID NO: 22618 - DNA, 33 bp, Homo sapiens
atcttggttctaggttgaaaaacaaaacaacct

SEQ ID NO: 22619 - DNA, 33 bp, Homo sapiens
cttaacattcctcctagtacgaaaggacaagag

SEQ ID NO: 22620 - DNA, 33 bp, Homo sapiens
actgtggtcatctgaactactgtgacaaacaac

SEQ ID NO: 22621 - DNA, 33 bp, Homo sapiens
gggcacctcccagaactctcaggaaacgcctcc

SEQ ID NO: 22622 - DNA, 33 bp, Homo sapiens
tggcacaggcctgcaatagacataggaaacgct

SEQ ID NO: 22623 - DNA, 33 bp, Homo sapiens
taatttcagctttggaccctaagtggctgaagt

SEQ ID NO: 22624 - DNA, 33 bp, Homo sapiens
catgtgtggttggcgcgatctctgggctttgct

SEQ ID NO: 22625 - DNA, 33 bp, Homo sapiens
tcaaattgtaaaaaaaggtagccattacagtct

SEQ ID NO: 22626 - DNA, 33 bp, Homo sapiens
cttggtgtattcttcagattggcagctggtcta

SEQ ID NO: 22627 - DNA, 33 bp, Homo sapiens
taaattaaatattgcagctgaaatccctgctaa

SEQ ID NO: 22628 - DNA, 33 bp, Homo sapiens
ttctgggctctaaagatacagaggggaataaaa

SEQ ID NO: 22629 - DNA, 33 bp, Homo sapiens
tcactaagcttcttaatgcctgatctcttcatc

SEQ ID NO: 22630 - DNA, 33 bp, Homo sapiens
aggtgctgcttcctacggggctcaaagcacctt

SEQ ID NO: 22631 - DNA, 33 bp, Homo sapiens
tactgggcaagttagacggacacggtggccctc

SEQ ID NO: 22632 - DNA, 33 bp, Homo sapiens
agagcttctgatccagtaggtttggatggtacc

SEQ ID NO: 22633 - DNA, 33 bp, Homo sapiens
gggtactgaagatatgtaagggtcccaggagct

SEQ ID NO: 22634 - DNA, 33 bp, Homo sapiens
ctctttgagcactacctgaagggcacatccttt

SEQ ID NO: 22635 - DNA, 33 bp, Homo sapiens
tttaatccagtccaaatgttgtggtgtctgccc

SEQ ID NO: 22636 - DNA, 33 bp, Homo sapiens
cagtaaaaactggcaatgctgttcagatatttt

SEQ ID NO: 22637 - DNA, 33 bp, Homo sapiens
agacactcttcaaaaatctgtgtttagtcagac

SEQ ID NO: 22638 - DNA, 33 bp, Homo sapiens
gcaaccaaaaacctaatgcagctaaacataaag

SEQ ID NO: 22639 - DNA, 33 bp, Homo sapiens
gaccttggatctccacggggtaagacttcaggt

SEQ ID NO: 22640 - DNA, 33 bp, Homo sapiens
aggatctgaggattcatgacaaaagggccatct

SEQ ID NO: 22641 - DNA, 33 bp, Homo sapiens
ctatggttatgtaacatctgtgtccgagggatt

SEQ ID NO: 22642 - DNA, 51 bp, Homo sapiens
tttagcccttctcatacaaagggtcgctataaaatgagtcaccctcccttc

SEQ ID NO: 22643 - DNA, 33 bp, Homo sapiens
ctagaatgtaaactactctggcatatgtactac

SEQ ID NO: 22644 - DNA, 51 bp, Homo sapiens
tgaaaattaaaatggaaagaggtatgtaaaatctcccactgtatcgtatca

SEQ ID NO: 22645 - DNA, 33 bp, Homo sapiens
tgggcagccttgtgtatcactcactaaattagt

SEQ ID NO: 22646 - DNA, 33 bp, Homo sapiens
ccctagttctccattgcaatcattcccagtaag

SEQ ID NO: 22647 - DNA, 33 bp, Homo sapiens
cccaaatcctgtagagccccttgtcagtggcag

SEQ ID NO: 22648 - DNA, 33 bp, Homo sapiens
aaagtgtctgacagcaggtcaatgcttgttgtt

SEQ ID NO: 22649 - DNA, 33 bp, Homo sapiens
taagctctaggctctataaaagtgctgtcagca

SEQ ID NO: 22650 - DNA, 33 bp, Homo sapiens
tgatcttaattgccaagtgtaattaaatgatta

SEQ ID NO: 22651 - DNA, 33 bp, Homo sapiens
gttggtgaaaattgcctctcttttggtgctctc

SEQ ID NO: 22652 - DNA, 33 bp, Homo sapiens
tgctaatggagagagcgcgtctcagaggctgca

SEQ ID NO: 22653 - DNA, 33 bp, Homo sapiens
gaagaaaggaaaagaatcatccagataaatctc

SEQ ID NO: 22654 - DNA, 33 bp, Homo sapiens
gtacaatgaagtcatgtatacctatcatctaga

SEQ ID NO: 22655 - DNA, 33 bp, Homo sapiens
ggttgttgtgacttcccatcaagaggtcctgac

SEQ ID NO: 22656 - DNA, 33 bp, Homo sapiens
tggcatctagtacagagcaatgatggtctatct

SEQ ID NO: 22657 - DNA, 33 bp, Homo sapiens
tgcagctggttcctgagaggccaggcagcactt

SEQ ID NO: 22658 - DNA, 33 bp, Homo sapiens
cagcctgtgactatactgagtgctgtacagcag

SEQ ID NO: 22659 - DNA, 33 bp, Homo sapiens
catggcgtgtgttctatattcacaagaaggaaa

SEQ ID NO: 22660 - DNA, 33 bp, Homo sapiens
actgagtctgggccacgcactggtgagctgttc

SEQ ID NO: 22661 - DNA, 33 bp, Homo sapiens
accagatgttggctgaggcattgatttatgggc

SEQ ID NO: 22662 - DNA, 33 bp, Homo sapiens
cttacagtatacctgggcatttcctgtgtctcc

SEQ ID NO: 22663 - DNA, 51 bp, Homo sapiens
agagttcctcttgctccatattttttccagtatgtagtggtgtccatgttc

SEQ ID NO: 22664 - DNA, 33 bp, Homo sapiens
gagtcattttaaattgtattagtgagggcaact

SEQ ID NO: 22665 - DNA, 33 bp, Homo sapiens
ggaagtttaaaggctatgtgttcccaagaggac

SEQ ID NO: 22666 - DNA, 33 bp, Homo sapiens
caatggtgagaacggatgggattcttttcagaa

SEQ ID NO: 22667 - DNA, 33 bp, Homo sapiens
agtttcttggagactatcccagacagttgcaac

SEQ ID NO: 22668 - DNA, 33 bp, Homo sapiens
atcagttgtttgagtagcatcttcaaggctttc

SEQ ID NO: 22669 - DNA, 33 bp, Homo sapiens
acagtcactactccacgctgtcttatgcccagg

SEQ ID NO: 22670 - DNA, 33 bp, Homo sapiens
gtgagaggacacttgatgatggagaggtcggag

SEQ ID NO: 22671 - DNA, 33 bp, Homo sapiens
gggtgtcattggtagaggaatcagaggaatgga

SEQ ID NO: 22672 - DNA, 33 bp, Homo sapiens
aagacctaacagaaacgcatgcccaggtgcagc

SEQ ID NO: 22673 - DNA, 33 bp, Homo sapiens
gcgaaacagaaactgctaggaattatccactct

SEQ ID NO: 22674 - DNA, 33 bp, Homo sapiens
cagaagggcggtaacagtggcagcaaccacgca

SEQ ID NO: 22675 - DNA, 33 bp, Homo sapiens
taatgcttccagttacgcttaaaaatattttct

SEQ ID NO: 22676 - DNA, 33 bp, Homo sapiens
gcgacttagttaacaatcctccaattccattat

SEQ ID NO: 22677 - DNA, 33 bp, Homo sapiens
catgtcagaaagaaaaggcagtgtcagcacatg

SEQ ID NO: 22678 - DNA, 33 bp, Homo sapiens
accctggtttgcagatgaaactgagtgatcaca

SEQ ID NO: 22679 - DNA, 33 bp, Homo sapiens
taggcatcctgggtcagtccgtctggcagccct

SEQ ID NO: 22680 - DNA, 33 bp, Homo sapiens
ggaactggtccaacaatcagaaaatttgacgtt

SEQ ID NO: 22681 - DNA, 33 bp, Homo sapiens
ttgccgtgctgaatacgagaggcaactgtaacg

SEQ ID NO: 22682 - DNA, 33 bp, Homo sapiens
tgtctgtgcattcctatggtaaggcacatgatc

SEQ ID NO: 22683 - DNA, 33 bp, Homo sapiens
agctgtcatctcctgtgacaccaattgccttct

SEQ ID NO: 22684 - DNA, 33 bp, Homo sapiens
tggattctccagggacgaggacgtggtcacact

SEQ ID NO: 22685 - DNA, 33 bp, Homo sapiens
gcgccgtgtagggctcgatgtggcttcaagtaa

SEQ ID NO: 22686 - DNA, 33 bp, Homo sapiens
tgcccccacccttgacggctgcaggagagccct

SEQ ID NO: 22687 - DNA, 33 bp, Homo sapiens
tacgcctgtatgcggatatgtatgtgagcacgt

SEQ ID NO: 22688 - DNA, 33 bp, Homo sapiens
ggctatgagtgcctcctcttagtgagtgcaggg

SEQ ID NO: 22689 - DNA, 33 bp, Homo sapiens
gattaactcactagaagctcaataacccaagag

SEQ ID NO: 22690 - DNA, 33 bp, Homo sapiens
tatcttttcattaccatcctcagtatttctagt

SEQ ID NO: 22691 - DNA, 33 bp, Homo sapiens
tgtcttctgcagttcagtcagggacacatcgag

SEQ ID NO: 22692 - DNA, 33 bp, Homo sapiens
taggagccctctataaccctgctcctgaaaaat

SEQ ID NO: 22693 - DNA, 33 bp, Homo sapiens
cacgcatgtggtccgagaggtggcagctggccg

SEQ ID NO: 22694 - DNA, 33 bp, Homo sapiens
acatttaaatgcaaagtcaaataaaatgcagcc

SEQ ID NO: 22695 - DNA, 33 bp, Homo sapiens
ttaaggagatgctaacgattaaggagaagctaa

SEQ ID NO: 22696 - DNA, 51 bp, Homo sapiens
taaatagttaattcttaaaagttgagcaaacatcgatcccttttgcctttc

SEQ ID NO: 22697 - DNA, 33 bp, Homo sapiens
agcaagcatcagtaaaggagagtgagcctctcc

SEQ ID NO: 22698 - DNA, 33 bp, Homo sapiens
ctatcaggagtatgttgaaaagaaggagtaggg

SEQ ID NO: 22699 - DNA, 33 bp, Homo sapiens
taagggagtagagaacgatgcaacaaaatggtt

SEQ ID NO: 22700 - DNA, 33 bp, Homo sapiens
accccactcttgctacggctaccactccaaatc

SEQ ID NO: 22701 - DNA, 33 bp, Homo sapiens
acaaatcataaaattcgaagcatagatagaagg

SEQ ID NO: 22702 - DNA, 33 bp, Homo sapiens
tgccatcaggttgaaggatacaattagatagta

SEQ ID NO: 22703 - DNA, 33 bp, Homo sapiens
actttctagtagcaaattatttctggacaacct

SEQ ID NO: 22704 - DNA, 33 bp, Homo sapiens
aataatttgcaatcaatgcttcttatctaaaag

SEQ ID NO: 22705 - DNA, 33 bp, Homo sapiens
gctcatttttatggaatggaacaaatgtgtttg

SEQ ID NO: 22706 - DNA, 51 bp, Homo sapiens
tctcaatatggttgtactgtataaacatggaatcaaatgaaagaagccaga

SEQ ID NO: 22707 - DNA, 51 bp, Homo sapiens
aagacataagcagatcaagacagacgattaggatatacgcagcaagactac

SEQ ID NO: 22708 - DNA, 51 bp, Homo sapiens
aacaaaaacaaaaatcccgaagaaataaaactagtgtcttaattatatgct

SEQ ID NO: 22709 - DNA, 33 bp, Homo sapiens
aacaataggatagaggcatcaatacgcttattg

SEQ ID NO: 22710 - DNA, 33 bp, Homo sapiens
tttttcactgttttgagaaattcttccatatta

SEQ ID NO: 22711 - DNA, 33 bp, Homo sapiens
atagctgcatacttcacaacacaaagatattat

SEQ ID NO: 22712 - DNA, 33 bp, Homo sapiens
ttgatggcgaatgttacaagcagttttactagt

SEQ ID NO: 22713 - DNA, 33 bp, Homo sapiens
acaacatagagtaatgtagcagtttagaagtta

SEQ ID NO: 22714 - DNA, 33 bp, Homo sapiens
caattttgtgcttagagtagacctatgcattta

SEQ ID NO: 22715 - DNA, 33 bp, Homo sapiens
gagaaatgatatatgatggcgaacagtagttta

SEQ ID NO: 22716 - DNA, 51 bp, Homo sapiens
gatagctttctcagtcatgactatcggtaatttacaccccccttaagttct

SEQ ID NO: 22717 - DNA, 51 bp, Homo sapiens
tcaatggcacagaatctaacatccctgagctaaggttcagcaggagctcat

SEQ ID NO: 22718 - DNA, 51 bp, Homo sapiens
tttgaggctagtaacacaatttagaccagaataggttttcatatatcaaaa

SEQ ID NO: 22719 - DNA, 33 bp, Homo sapiens
ctttttcacttgacaagcagatgtgaagttaac

SEQ ID NO: 22720 - DNA, 33 bp, Homo sapiens
tacaaatactttttaatgccacctggccaattc

SEQ ID NO: 22721 - DNA, 33 bp, Homo sapiens
agtttagcttcaagaatggcagaactacacaca

SEQ ID NO: 22722 - DNA, 33 bp, Homo sapiens
ttgttcgagggtattaggaaatgcatctaaaaa

SEQ ID NO: 22723 - DNA, 51 bp, Homo sapiens
gaccgtaattgaaactataaagtcagacactcttggattgacccttcatca

SEQ ID NO: 22724 - DNA, 33 bp, Homo sapiens
ggttccttaaagaaagtctattcagttgacaat

SEQ ID NO: 22725 - DNA, 33 bp, Homo sapiens
cattggtgctagccaatcatcccactctatcac

SEQ ID NO: 22726 - DNA, 33 bp, Homo sapiens
tgaggtcatctctacatctttaataccctaagc

SEQ ID NO: 22727 - DNA, 33 bp, Homo sapiens
gggaagcaaactctcagtgaaaatgtaccaggg

SEQ ID NO: 22728 - DNA, 33 bp, Homo sapiens
aaaaatacaaaagccagtctgtcaaaacgtatt

SEQ ID NO: 22729 - DNA, 33 bp, Homo sapiens
aaatatgatgatcaaacgtgcatttatgccttg

SEQ ID NO: 22730 - DNA, 33 bp, Homo sapiens
agtgccttataggtaacgtggcttaattcacag

SEQ ID NO: 22731 - DNA, 33 bp, Homo sapiens
tagtcactacgttccagatctaatccatgtgat

SEQ ID NO: 22732 - DNA, 33 bp, Homo sapiens
tgttcacaggtagcaaggtactcttagcaggcc

SEQ ID NO: 22733 - DNA, 33 bp, Homo sapiens
acatcaagattgctctgacctgaggacaggatt

SEQ ID NO: 22734 - DNA, 33 bp, Homo sapiens
agacatgtctggaactgagaagaaaatgagatt

SEQ ID NO: 22735 - DNA, 51 bp, Homo sapiens
ctttttcatttagttctacaatctagcttaatttcatcaccatatatatat

SEQ ID NO: 22736 - DNA, 51 bp, Homo sapiens
aaagagtttttcaatttctttaaaagttatgcctaccttatgacccagcaa

SEQ ID NO: 22737 - DNA, 33 bp, Homo sapiens
tgaaatatgtgaggtcgataaacacatataaag

SEQ ID NO: 22738 - DNA, 33 bp, Homo sapiens
catgcgcaggttgagcgcaattttatacttatt

SEQ ID NO: 22739 - DNA, 33 bp, Homo sapiens
aaaatctgtagcaggatcaagataaagctaatt

SEQ ID NO: 22740 - DNA, 33 bp, Homo sapiens
tcgtttccctcctttatctgctctttgctctga

SEQ ID NO: 22741 - DNA, 33 bp, Homo sapiens
agtctacatttcaacctggtgttaactctggtc

SEQ ID NO: 22742 - DNA, 33 bp, Homo sapiens
ggctgtagttttctggtcaagtatctccaatct

SEQ ID NO: 22743 - DNA, 33 bp, Homo sapiens
agcatttttgagtgcagaggtaggcaggaaaga

SEQ ID NO: 22744 - DNA, 33 bp, Homo sapiens
atgtcagcagattacagaattatggctcccagt

SEQ ID NO: 22745 - DNA, 33 bp, Homo sapiens
aacaaatcattcttgagccttagatagtgggga

SEQ ID NO: 22746 - DNA, 33 bp, Homo sapiens
ttttttattctgttgatctaatgcttcgtattt

SEQ ID NO: 22747 - DNA, 51 bp, Homo sapiens
tagccatatttactcaacaagatacttatttactcaacaaggtattccaag

SEQ ID NO: 22748 - DNA, 33 bp, Homo sapiens
tattctgtgaagacactcagtagaatggttaga

SEQ ID NO: 22749 - DNA, 33 bp, Homo sapiens
ctcaataaacaggatggaccaactttattaagg

SEQ ID NO: 22750 - DNA, 51 bp, Homo sapiens
agaatgtccttcattgctttaattcgattcatcatacaaccccaggttgta

SEQ ID NO: 22751 - DNA, 51 bp, Homo sapiens
accagtttgcttgttttatccacgagtactttcagacaccattatgtgtaa

SEQ ID NO: 22752 - DNA, 33 bp, Homo sapiens
ctgtaaactgttcttgtaaatatatctgatatg

SEQ ID NO: 22753 - DNA, 33 bp, Homo sapiens
caatgtaggctgcaaagcattaaagggtcaagc

SEQ ID NO: 22754 - DNA, 33 bp, Homo sapiens
tccccactgcggtctaggggagctatgagaaga

SEQ ID NO: 22755 - DNA, 33 bp, Homo sapiens
ttaaaaatttgatgaacctaggaagctgtttcc

SEQ ID NO: 22756 - DNA, 33 bp, Homo sapiens
ataacacactagaaaagcattaggagatatacc

SEQ ID NO: 22757 - DNA, 33 bp, Homo sapiens
gagacacacttccaacgctatttgtagaattat

SEQ ID NO: 22758 - DNA, 33 bp, Homo sapiens
agttgcaggaggttaatgagataacaatacatg

SEQ ID NO: 22759 - DNA, 33 bp, Homo sapiens
agtattgtgaggttatcaaaggaataacaacca

SEQ ID NO: 22760 - DNA, 33 bp, Homo sapiens
aggctgtaactgtaaatgaattaaggcagaaac

SEQ ID NO: 22761 - DNA, 51 bp, Homo sapiens
gtgaatttcttacttatatatgaggccaattttatcgagcatttttcatgg

SEQ ID NO: 22762 - DNA, 51 bp, Homo sapiens
taaagttaattttattattacaccctatgagtaccaccaattaaatattgc

SEQ ID NO: 22763 - DNA, 33 bp, Homo sapiens
acttctttacctataatatgaagaacacagtta

SEQ ID NO: 22764 - DNA, 33 bp, Homo sapiens
gcatggtgtctgcaaccggaaggatttcattgc

SEQ ID NO: 22765 - DNA, 33 bp, Homo sapiens
aaaaaaatgaagtgacgactgctttcaaaagat

SEQ ID NO: 22766 - DNA, 33 bp, Homo sapiens
gaaggtggaagaaaaatgtccttactagtatgc

SEQ ID NO: 22767 - DNA, 33 bp, Homo sapiens
aaagggctactatgcctagattgattatctcct

SEQ ID NO: 22768 - DNA, 33 bp, Homo sapiens
agagtaaatgaggcaattgtttgtcaaaatagt

SEQ ID NO: 22769 - DNA, 51 bp, Homo sapiens
atgaaaaagaaaagtattacataacgataaaggtttcaactcaacaagaag

SEQ ID NO: 22770 - DNA, 33 bp, Homo sapiens
tcagtgactgagagtatatcaagtttttttctg

SEQ ID NO: 22771 - DNA, 33 bp, Homo sapiens
agcaaggtactatcccggaaagctgagagcagc

SEQ ID NO: 22772 - DNA, 33 bp, Homo sapiens
tttgactacattacactgctatcaaatttcatg

SEQ ID NO: 22773 - DNA, 33 bp, Homo sapiens
tttaactgctgaagaataagatcaccacaatca

SEQ ID NO: 22774 - DNA, 33 bp, Homo sapiens
cttaggatttgtctgctatagtgatattctaag

SEQ ID NO: 22775 - DNA, 33 bp, Homo sapiens
gaagagtcaggggttatataagtaccagataca

SEQ ID NO: 22776 - DNA, 51 bp, Homo sapiens
acctagggagatcaggcatttccagttgactcacagtgggctatcttttaa

SEQ ID NO: 22777 - DNA, 33 bp, Homo sapiens
agaaatctgttaaccataaaaaaatcaggataa

SEQ ID NO: 22778 - DNA, 33 bp, Homo sapiens
atatgtctgcaatatagtaaggactgatataaa

SEQ ID NO: 22779 - DNA, 33 bp, Homo sapiens
atgtgcatattggcagtcattgattacagtggt

SEQ ID NO: 22780 - DNA, 33 bp, Homo sapiens
caaaatacaatcgaaagctttatcagtaaaaca

SEQ ID NO: 22781 - DNA, 51 bp, Homo sapiens
atgtgtaataaaactatcacaaatatgacagcaaaagaatcaaatttcaaa

SEQ ID NO: 22782 - DNA, 33 bp, Homo sapiens
ttgtaaatgaatgttatgttttatgcatcaaac

SEQ ID NO: 22783 - DNA, 33 bp, Homo sapiens
gcatagtaacataacattactgatcggagttct

SEQ ID NO: 22784 - DNA, 51 bp, Homo sapiens
gcttttgacttaattcttccatgtagcatctataatattatatcaagtatc

SEQ ID NO: 22785 - DNA, 33 bp, Homo sapiens
cttagttactagatgatcttaggtaactcttaa

SEQ ID NO: 22786 - DNA, 33 bp, Homo sapiens
agaggagattcaccgggcccttgaagaatgtca

SEQ ID NO: 22787 - DNA, 33 bp, Homo sapiens
ctagctatgttttcccgcttcctttgatctatt

SEQ ID NO: 22788 - DNA, 33 bp, Homo sapiens
ccctggggaggatagacattagctcagatggaa

SEQ ID NO: 22789 - DNA, 33 bp, Homo sapiens
atctgtacaattggagcaaactaccaatacatg

SEQ ID NO: 22790 - DNA, 33 bp, Homo sapiens
aatttttcattaggcagaagaatatggttcact

SEQ ID NO: 22791 - DNA, 33 bp, Homo sapiens
ttgacttggttggcaatgttatgaagctacatt

SEQ ID NO: 22792 - DNA, 33 bp, Homo sapiens
tactgattcttcataaggcatttcatccatccc

SEQ ID NO: 22793 - DNA, 33 bp, Homo sapiens
actgagttgccataatgagaacataatatttga

SEQ ID NO: 22794 - DNA, 51 bp, Homo sapiens
ttaagaacaagcctgactggataaatagctaactcatttagaaaaagactg

SEQ ID NO: 22795 - DNA, 33 bp, Homo sapiens
tataaacaagctcatacatttgtggaggaatcc

SEQ ID NO: 22796 - DNA, 33 bp, Homo sapiens
atctaactcagaggatgagctcttaatgctata

SEQ ID NO: 22797 - DNA, 51 bp, Homo sapiens
gttaaagacactggttgttaccatcgattaaaaatattattttattaagat

SEQ ID NO: 22798 - DNA, 51 bp, Homo sapiens
gccttttgcctgtatcacactgtcttgactaatgtacctttatgtaattta

SEQ ID NO: 22799 - DNA, 51 bp, Homo sapiens
agcagacatcctctgatactgcaaataactcataaaatgcacctaatcatc

SEQ ID NO: 22800 - DNA, 51 bp, Homo sapiens
cttagttaaatagattagtttagaagataagtttatgtgtcttaaaagcac

SEQ ID NO: 22801 - DNA, 51 bp, Homo sapiens
ttcctagcctgaaatcttgaatcaattgttaaatctcgtatatttttgcat

SEQ ID NO: 22802 - DNA, 51 bp, Homo sapiens
tataaagagattacctgaactgaagcagattgtgttatgtaggtatgaaga

SEQ ID NO: 22803 - DNA, 33 bp, Homo sapiens
aaagaagcaactacaagaatggcatgaaagccc

SEQ ID NO: 22804 - DNA, 33 bp, Homo sapiens
tcagctgtaggcacaagatgatgtctccagaaa

SEQ ID NO: 22805 - DNA, 51 bp, Homo sapiens
gttgagcctaattgaagtttccctatatacagtaagttcagagaaacactc

SEQ ID NO: 22806 - DNA, 33 bp, Homo sapiens
caaaactcaatgccaagtggttgaacgcttagc

SEQ ID NO: 22807 - DNA, 33 bp, Homo sapiens
aggaggaacaggcagataaaaatatgtatagag

SEQ ID NO: 22808 - DNA, 33 bp, Homo sapiens
atagagaaagtagggcgcattgacaaattttgt

SEQ ID NO: 22809 - DNA, 33 bp, Homo sapiens
gttttgttacaaaagatagtaatgctgtaatgg

SEQ ID NO: 22810 - DNA, 51 bp, Homo sapiens
gtttcacaaagggatacagattccatggtgataaagaaacactgggttgag

SEQ ID NO: 22811 - DNA, 33 bp, Homo sapiens
acccagttgacagagatacttgagtctggagct

SEQ ID NO: 22812 - DNA, 33 bp, Homo sapiens
aaccttcattaatcagtaaccctacttcagtaa

SEQ ID NO: 22813 - DNA, 33 bp, Homo sapiens
gaatctggaaaccctatgcctacagttgctaca

SEQ ID NO: 22814 - DNA, 33 bp, Homo sapiens
tagaagcagtgatagactctataaaatgtagaa

SEQ ID NO: 22815 - DNA, 33 bp, Homo sapiens
atatgtatgtaaaggagaatcttcagcattctt

SEQ ID NO: 22816 - DNA, 33 bp, Homo sapiens
gaagagctgttgtataggcaagtagaatgtgtt

SEQ ID NO: 22817 - DNA, 51 bp, Homo sapiens
gagataagaatattgacaataggtgtaaaagagtaattttagtgatggccc

SEQ ID NO: 22818 - DNA, 33 bp, Homo sapiens
atctgacatctactttgaaaggttcactctggc

SEQ ID NO: 22819 - DNA, 33 bp, Homo sapiens
taaatactattccaaagacaatgcccgcaattg

SEQ ID NO: 22820 - DNA, 33 bp, Homo sapiens
tagctttttcatactcgaacatagtaaaatagc

SEQ ID NO: 22821 - DNA, 33 bp, Homo sapiens
ttgaactttctggatctattctctaactctttt

SEQ ID NO: 22822 - DNA, 33 bp, Homo sapiens
caactttatttgtcaagccaaaatgccctacaa

SEQ ID NO: 22823 - DNA, 33 bp, Homo sapiens
cacaaaagactcagaattgaaaactggaattga

SEQ ID NO: 22824 - DNA, 33 bp, Homo sapiens
gctggccttggagttatatggcttgcccacgag

SEQ ID NO: 22825 - DNA, 33 bp, Homo sapiens
tgtttcacttgtttcattcgtttcactatttag

SEQ ID NO: 22826 - DNA, 33 bp, Homo sapiens
attgaccacaccctcatcccaagtcaaatcact

SEQ ID NO: 22827 - DNA, 33 bp, Homo sapiens
ttaatgtgatgtaaaagacctattatcataggc

SEQ ID NO: 22828 - DNA, 33 bp, Homo sapiens
aagagggccatctaccgctcctgcagtctcatg

SEQ ID NO: 22829 - DNA, 33 bp, Homo sapiens
tttctgcagggaggcagtcataaaacaggatga

SEQ ID NO: 22830 - DNA, 51 bp, Homo sapiens
tttattcacttattatagataataatttcctagtctacatttcattacagc

SEQ ID NO: 22831 - DNA, 33 bp, Homo sapiens
ttttttcttccagttatggcaattccttctgcc

SEQ ID NO: 22832 - DNA, 33 bp, Homo sapiens
attgtatctcctatttgaaacttctcttccata

SEQ ID NO: 22833 - DNA, 33 bp, Homo sapiens
attgtgatgtggtgtatgtcttcttacttctct

SEQ ID NO: 22834 - DNA, 33 bp, Homo sapiens
agtctagccaagttaacacattacaaagtcatc

SEQ ID NO: 22835 - DNA, 33 bp, Homo sapiens
ggatgcttggggagtataaaaatgagcaaagaa

SEQ ID NO: 22836 - DNA, 33 bp, Homo sapiens
gttggatgatttatcacccacttgtcaagaaca

SEQ ID NO: 22837 - DNA, 33 bp, Homo sapiens
taagaagttttaggacggatggtaaaaatgaga

SEQ ID NO: 22838 - DNA, 33 bp, Homo sapiens
catgacaacatggaaagagaacaacctgctcct

SEQ ID NO: 22839 - DNA, 33 bp, Homo sapiens
cagcatttctaatttcgccctagtccagtgatc

SEQ ID NO: 22840 - DNA, 33 bp, Homo sapiens
gtacatggagaaattatggaccgcattttaaag

SEQ ID NO: 22841 - DNA, 33 bp, Homo sapiens
ctgggttctgctctcacatagctcggaggagga

SEQ ID NO: 22842 - DNA, 33 bp, Homo sapiens
aagcatgaataaaagcgatgtctaacaaatgtc

SEQ ID NO: 22843 - DNA, 33 bp, Homo sapiens
cattgtagaaacaagcgctctcttctgactcgt

SEQ ID NO: 22844 - DNA, 33 bp, Homo sapiens
gatgcacttccaacaggaaaagaatattgcatt

SEQ ID NO: 22845 - DNA, 33 bp, Homo sapiens
tctttcttttgttccttagagctaccctgtgag

SEQ ID NO: 22846 - DNA, 33 bp, Homo sapiens
agtggatgtacctggagactgaactagcacaaa

SEQ ID NO: 22847 - DNA, 33 bp, Homo sapiens
tacttagcctgaatacgcatgtaaatatggaca

SEQ ID NO: 22848 - DNA, 33 bp, Homo sapiens
gactatgtactgaagccaggcagggatgtaaag

SEQ ID NO: 22849 - DNA, 33 bp, Homo sapiens
agtgtcaaatgcactggagatgtcctgtagaat

SEQ ID NO: 22850 - DNA, 33 bp, Homo sapiens
tgtgtagagtcacagataattcaattttttcaa

SEQ ID NO: 22851 - DNA, 33 bp, Homo sapiens
cccatgggcttcagtactaaaacctatgtttca

SEQ ID NO: 22852 - DNA, 33 bp, Homo sapiens
tgccgagctcgcttgaccagcacatactgagcc

SEQ ID NO: 22853 - DNA, 33 bp, Homo sapiens
gcagagttcatgttatgagagaaagctcaaagc

SEQ ID NO: 22854 - DNA, 33 bp, Homo sapiens
aaagatcttcagtccatgtgtagatttaataaa

SEQ ID NO: 22855 - DNA, 33 bp, Homo sapiens
aggacaggaaagttcactcctatattttgaagg

SEQ ID NO: 22856 - DNA, 33 bp, Homo sapiens
ttagtattttcatcagtagaagttattggaaat

SEQ ID NO: 22857 - DNA, 33 bp, Homo sapiens
atcattctgcaggaaatttatttggaggacata

SEQ ID NO: 22858 - DNA, 33 bp, Homo sapiens
tggttcagggtcagccgaagagcattctttccc

SEQ ID NO: 22859 - DNA, 33 bp, Homo sapiens
tacatactattataaatgtggttctgaggccac

SEQ ID NO: 22860 - DNA, 33 bp, Homo sapiens
tgtcaaaaaccagtgatctctagatatcaattg

SEQ ID NO: 22861 - DNA, 33 bp, Homo sapiens
tctcatacttaactgcgcttcaagtccgcacaa

SEQ ID NO: 22862 - DNA, 33 bp, Homo sapiens
aactcttagtaggatatctatcaggcattggaa

SEQ ID NO: 22863 - DNA, 33 bp, Homo sapiens
attaaaaatgggttaatgctcatggcttcttta

SEQ ID NO: 22864 - DNA, 33 bp, Homo sapiens
ttcacctagagacagatggtgctagaccactgg

SEQ ID NO: 22865 - DNA, 33 bp, Homo sapiens
gacagtgtgattatcagctacctttcctgatga

SEQ ID NO: 22866 - DNA, 33 bp, Homo sapiens
ttatttaaccatactagaaaatcaaacctagga

SEQ ID NO: 22867 - DNA, 51 bp, Homo sapiens
gtctcaagtggaacagctagcacagtagaaagaacttttctcaacacattt

SEQ ID NO: 22868 - DNA, 51 bp, Homo sapiens
cacctccacttattcattttactgggacaaatttatgattgataattctct

SEQ ID NO: 22869 - DNA, 33 bp, Homo sapiens
ccacgaaaggattacattagctctgcagcaatg

SEQ ID NO: 22870 - DNA, 51 bp, Homo sapiens
caatttctggtaactataataaaggtacatcagttaattcttctcacttct

SEQ ID NO: 22871 - DNA, 33 bp, Homo sapiens
tggagttttgagactatactagcatactcttaa

SEQ ID NO: 22872 - DNA, 33 bp, Homo sapiens
tcctatttacactccagtctgtgaaggatcctt

SEQ ID NO: 22873 - DNA, 33 bp, Homo sapiens
tctcactttcttagcctatgggccctctactca

SEQ ID NO: 22874 - DNA, 51 bp, Homo sapiens
aaggaatgaattttttgtgtgataaggtcaaacagcacgtggaattagcca

SEQ ID NO: 22875 - DNA, 33 bp, Homo sapiens
tggctggaactgtaaatctgatgtaacgtctgt

SEQ ID NO: 22876 - DNA, 33 bp, Homo sapiens
tgtggaaaatgaatgcgacttaagatgccattt

SEQ ID NO: 22877 - DNA, 33 bp, Homo sapiens
gatttcaggtgacggattccgaaagtaaaaaga

SEQ ID NO: 22878 - DNA, 33 bp, Homo sapiens
tttgttaagtggaagcgactcatcataaaggtc

SEQ ID NO: 22879 - DNA, 51 bp, Homo sapiens
ttattcaagactgttgtaatatagatatccaattagactattttcttaatt

SEQ ID NO: 22880 - DNA, 51 bp, Homo sapiens
tcaatgaggaaaaaaaaaccattcgtcattatatcagattgttaataacat

SEQ ID NO: 22881 - DNA, 33 bp, Homo sapiens
atgtgtaatgaggactgaagcattgatgaagaa

SEQ ID NO: 22882 - DNA, 33 bp, Homo sapiens
gataacacacagttcatctccagggtcactgcc

SEQ ID NO: 22883 - DNA, 33 bp, Homo sapiens
ctttgtgatctctaacggaatacatgattgcac

SEQ ID NO: 22884 - DNA, 33 bp, Homo sapiens
acgttgcacggcgacctcttgatccattctgtg

SEQ ID NO: 22885 - DNA, 51 bp, Homo sapiens
gagactttaaccaacttgatggcaatcctaacaaaagatgtctaccaatta

SEQ ID NO: 22886 - DNA, 33 bp, Homo sapiens
ttttccgaaagactgattacctccaatgacact

SEQ ID NO: 22887 - DNA, 33 bp, Homo sapiens
ccctgtcttcttggagtcgtacaggaagataca

SEQ ID NO: 22888 - DNA, 33 bp, Homo sapiens
ccagacactattctgataactttgtttgaattt

SEQ ID NO: 22889 - DNA, 33 bp, Homo sapiens
tacaactcttaggaacgctcttttgaatgtatg

SEQ ID NO: 22890 - DNA, 33 bp, Homo sapiens
aatataagcacctctcgatgttagctgttttgt

SEQ ID NO: 22891 - DNA, 33 bp, Homo sapiens
catttgtgcaatgtcctatttgttacaggttgg

SEQ ID NO: 22892 - DNA, 33 bp, Homo sapiens
cagtataagttcttggtcatctctactactgcc

SEQ ID NO: 22893 - DNA, 33 bp, Homo sapiens
agggcgggcttcgaactgagagcttgaattcca

SEQ ID NO: 22894 - DNA, 33 bp, Homo sapiens
tcctatgctcattgtaccaatcactgataaatg

SEQ ID NO: 22895 - DNA, 33 bp, Homo sapiens
aaaacagattggagtaggcatcacagacaaacc

SEQ ID NO: 22896 - DNA, 33 bp, Homo sapiens
gcaaaatgaatcagacgcaggttcctactccaa

SEQ ID NO: 22897 - DNA, 33 bp, Homo sapiens
acagatggtttgtggataaatgatcactaggaa

SEQ ID NO: 22898 - DNA, 33 bp, Homo sapiens
ccctaaaatatgcctctctaaaatacataaaac

SEQ ID NO: 22899 - DNA, 33 bp, Homo sapiens
gtgtgcttcatcgctatggaagcttagaaaatt

SEQ ID NO: 22900 - DNA, 33 bp, Homo sapiens
tggggaccgagactcattctgtgggatatgatg

SEQ ID NO: 22901 - DNA, 33 bp, Homo sapiens
ccgtgcatacagcagatacttggtttccttttg

SEQ ID NO: 22902 - DNA, 51 bp, Homo sapiens
cagaaatgaatttaagtaattacgctgaaaatttccttaaacatgatttaa

SEQ ID NO: 22903 - DNA, 33 bp, Homo sapiens
aataatacagtaatcagattcttccaggaagta

SEQ ID NO: 22904 - DNA, 33 bp, Homo sapiens
caagattggaatgtgaggtttaaataggacatt

SEQ ID NO: 22905 - DNA, 33 bp, Homo sapiens
cctctcgcctcctccctactgctatagcctctc

SEQ ID NO: 22906 - DNA, 33 bp, Homo sapiens
taatcggaatttaaactgacacattcttgtcca

SEQ ID NO: 22907 - DNA, 33 bp, Homo sapiens
acatcataaaacactaggatttttctgcttcag

SEQ ID NO: 22908 - DNA, 33 bp, Homo sapiens
tgagctgctgtgggtcgaaccatctctcaggtg

SEQ ID NO: 22909 - DNA, 33 bp, Homo sapiens
ctcagtttacagttggttaaatatggcatttgt

SEQ ID NO: 22910 - DNA, 33 bp, Homo sapiens
atatattttttactcatcgagggtctccctgca

SEQ ID NO: 22911 - DNA, 33 bp, Homo sapiens
agcagttgcactaagatgtcagaagaacctgct

SEQ ID NO: 22912 - DNA, 33 bp, Homo sapiens
ttaaaaatatttctggtagcactgagtccacag

SEQ ID NO: 22913 - DNA, 33 bp, Homo sapiens
ctctttagtctcttcctgctccagtaggattgt

SEQ ID NO: 22914 - DNA, 33 bp, Homo sapiens
tttggggcatgtctagtcagttgcaatgtagtc

SEQ ID NO: 22915 - DNA, 33 bp, Homo sapiens
tttcccatctagaatcgaagtagaaaaccactc

SEQ ID NO: 22916 - DNA, 33 bp, Homo sapiens
tcatcaaggcttttgatacttattgccaaattt

SEQ ID NO: 22917 - DNA, 33 bp, Homo sapiens
aaaacaaacctaatactgcaccatttccgtcca

SEQ ID NO: 22918 - DNA, 33 bp, Homo sapiens
tgcagccgtggctacagtagcaagttctcaggg

SEQ ID NO: 22919 - DNA, 33 bp, Homo sapiens
tgtggctttttatatatgctgctcgcctgagat

SEQ ID NO: 22920 - DNA, 33 bp, Homo sapiens
agaacatctgctcaattaccgtgaggaaggaag

SEQ ID NO: 22921 - DNA, 33 bp, Homo sapiens
tggtacaaacgaagaatgtgtttgggagactcc

SEQ ID NO: 22922 - DNA, 33 bp, Homo sapiens
gaaatttctgttgcactacttagagtccagagt

SEQ ID NO: 22923 - DNA, 33 bp, Homo sapiens
atctcatgttaaccaatggtgcctagtggaacc

SEQ ID NO: 22924 - DNA, 33 bp, Homo sapiens
gggcataaagcacataggatgaaaattctcctt

SEQ ID NO: 22925 - DNA, 33 bp, Homo sapiens
taatgagatacaatgatgccagtggtggaagag

SEQ ID NO: 22926 - DNA, 33 bp, Homo sapiens
actatcataatgaaatgaaactcacaacaaagg

SEQ ID NO: 22927 - DNA, 33 bp, Homo sapiens
aggctaaactccctcatgtgccaaacagatatt

SEQ ID NO: 22928 - DNA, 33 bp, Homo sapiens
atcttcagaagctacattggtgcctgaacagat

SEQ ID NO: 22929 - DNA, 51 bp, Homo sapiens
gagcacattgtcactttttccagcatcttgggtatattacatatcttatta

SEQ ID NO: 22930 - DNA, 33 bp, Homo sapiens
atgtgcataacattccgctttatcaatatcccc

SEQ ID NO: 22931 - DNA, 33 bp, Homo sapiens
ttgagaatcacagagaggtctggaaggataaca

SEQ ID NO: 22932 - DNA, 33 bp, Homo sapiens
ggggttatcagcatcatactagtgcccacctgg

SEQ ID NO: 22933 - DNA, 33 bp, Homo sapiens
aaattgcacagaaaactcttttccctccagcta

SEQ ID NO: 22934 - DNA, 33 bp, Homo sapiens
ccagaactgtaagcactgggcacgggtcactgc

SEQ ID NO: 22935 - DNA, 33 bp, Homo sapiens
cagcttggaagaatcagagggggatggttaaca

SEQ ID NO: 22936 - DNA, 33 bp, Homo sapiens
aggcttggatttgcattaaattgatacagaaaa

SEQ ID NO: 22937 - DNA, 33 bp, Homo sapiens
tttacaggttgatgtacgattggccctgtgcag

SEQ ID NO: 22938 - DNA, 33 bp, Homo sapiens
gagcacacactggggagctatagacttctcaaa

SEQ ID NO: 22939 - DNA, 33 bp, Homo sapiens
cccactgcctggtcaattgggttgcagctcatc

SEQ ID NO: 22940 - DNA, 33 bp, Homo sapiens
accgatgcaagttccctgctactgctttttatt

SEQ ID NO: 22941 - DNA, 33 bp, Homo sapiens
ctcaagttcaaagccagatggaaaatggcaagt

SEQ ID NO: 22942 - DNA, 33 bp, Homo sapiens
tacaatatagatcatggaaaaagcttgtgaccc

SEQ ID NO: 22943 - DNA, 33 bp, Homo sapiens
gctgcttcaattgcacgaagaagaaattatagt

SEQ ID NO: 22944 - DNA, 33 bp, Homo sapiens
cctcagagaatggcgatattttatcactctgca

SEQ ID NO: 22945 - DNA, 33 bp, Homo sapiens
ttaaaaattactttcctatctgatctggctgtt

SEQ ID NO: 22946 - DNA, 33 bp, Homo sapiens
gatatatgaagagggaccaaaaggaactcacac

SEQ ID NO: 22947 - DNA, 33 bp, Homo sapiens
ctcctccaactcctcatgtggggctgaacatgg

SEQ ID NO: 22948 - DNA, 33 bp, Homo sapiens
tccaggttgatagctctatacctattaagacag

SEQ ID NO: 22949 - DNA, 33 bp, Homo sapiens
gctgcatggagtttaatatccttttaaatgcac

SEQ ID NO: 22950 - DNA, 33 bp, Homo sapiens
agaaacgtgatctcaagcaatctttgcaaatgg

SEQ ID NO: 22951 - DNA, 33 bp, Homo sapiens
agtgacattccaaaaagcagttgcatgctgaac

SEQ ID NO: 22952 - DNA, 51 bp, Homo sapiens
ggattcttaaaaaatcattatcctgtataaaatgtagacctatgcttggca

SEQ ID NO: 22953 - DNA, 33 bp, Homo sapiens
tcacagtgtatgaaacgaatgttagttactcca

SEQ ID NO: 22954 - DNA, 33 bp, Homo sapiens
gagccaggattttgtatgtggatgagattcttc

SEQ ID NO: 22955 - DNA, 33 bp, Homo sapiens
tttttataagaacaccgatcattggatttaggc

SEQ ID NO: 22956 - DNA, 33 bp, Homo sapiens
ctttcaaagttcttgatgagggtgatgaagcca

SEQ ID NO: 22957 - DNA, 33 bp, Homo sapiens
aatatagggtgaaggatgggtacctagtcaagg

SEQ ID NO: 22958 - DNA, 33 bp, Homo sapiens
aacttcaatgctaacatgggcggaaaaatcact

SEQ ID NO: 22959 - DNA, 33 bp, Homo sapiens
gtgaagtccaggagagtcccatgaatatccgtg

SEQ ID NO: 22960 - DNA, 33 bp, Homo sapiens
tggtcattgtccctaatctgtgagaggaagtga

SEQ ID NO: 22961 - DNA, 33 bp, Homo sapiens
gggctaattatgcccacatcatgatgggatgaa

SEQ ID NO: 22962 - DNA, 33 bp, Homo sapiens
ctgctaagagcctcactgcagaatttcacgttt

SEQ ID NO: 22963 - DNA, 33 bp, Homo sapiens
gcttgatatctctcccgacattaaaatagcacc

SEQ ID NO: 22964 - DNA, 33 bp, Homo sapiens
gacatttgccttcttcgacattatttttaatgc

SEQ ID NO: 22965 - DNA, 33 bp, Homo sapiens
tattcataagacataagatcgatggcacaaagt

SEQ ID NO: 22966 - DNA, 33 bp, Homo sapiens
acctgaaacagaaagatgggctcttagatcatc

SEQ ID NO: 22967 - DNA, 33 bp, Homo sapiens
ctggaaattgccctacgagatcatctgggcatc

SEQ ID NO: 22968 - DNA, 33 bp, Homo sapiens
tttgaaatacatctatgactcagtatattagct

SEQ ID NO: 22969 - DNA, 33 bp, Homo sapiens
atgggcagtcatattatccaaatcaaatttctc

SEQ ID NO: 22970 - DNA, 33 bp, Homo sapiens
attttttgtgttaggatcattacaaatcttctt

SEQ ID NO: 22971 - DNA, 33 bp, Homo sapiens
aattcagtcacatcaggcagtccttttcactat

SEQ ID NO: 22972 - DNA, 51 bp, Homo sapiens
tccattcagaaagaaagctcctgccgtgtgttcactctatttaaatgatga

SEQ ID NO: 22973 - DNA, 51 bp, Homo sapiens
acacagcccagtcaatgcttcattacagtgttgtgtgactctaatcagagg

SEQ ID NO: 22974 - DNA, 51 bp, Homo sapiens
accatacaactgatatgcaacaggatgaaagacaattgcaagtgactactg

SEQ ID NO: 22975 - DNA, 51 bp, Homo sapiens
tctattgtaccctcccatgaagccagtatagtgtataatcaattaaaaaat

SEQ ID NO: 22976 - DNA, 33 bp, Homo sapiens
ctgcacgtaggctcaagtatggctggcagcttg

SEQ ID NO: 22977 - DNA, 51 bp, Homo sapiens
aggcttcagttcggtgtaattactatggtttctaaaggagtttctgtgtaa

SEQ ID NO: 22978 - DNA, 51 bp, Homo sapiens
tcacatttacatactgtatgtcgaatctgaaaggaagctatgttcgaatag

SEQ ID NO: 22979 - DNA, 33 bp, Homo sapiens
aaaattggatcagtcaggaatcatttgcacaca

SEQ ID NO: 22980 - DNA, 33 bp, Homo sapiens
cctcagattctgcagctaacaagaggttgagct

SEQ ID NO: 22981 - DNA, 33 bp, Homo sapiens
ctgtatccattatgattacctacacatattaca

SEQ ID NO: 22982 - DNA, 33 bp, Homo sapiens
actttttgtttctgtatcagcaattttttagca

SEQ ID NO: 22983 - DNA, 33 bp, Homo sapiens
ttctgggacaccccagtaggattgtggtgaagg

SEQ ID NO: 22984 - DNA, 33 bp, Homo sapiens
gtggaaactcgtagccgctcagtttcctcatct

SEQ ID NO: 22985 - DNA, 33 bp, Homo sapiens
tcactgttactaaatatccattacttggacttg

SEQ ID NO: 22986 - DNA, 33 bp, Homo sapiens
atggctcccacagccagagaaaggagatacaaa

SEQ ID NO: 22987 - DNA, 33 bp, Homo sapiens
aaatcacaactgctgatgatcacgagataatcc

SEQ ID NO: 22988 - DNA, 33 bp, Homo sapiens
cttcttttgtcttctaggatctatgaaagataa

SEQ ID NO: 22989 - DNA, 33 bp, Homo sapiens
gtgtctacacatccaagaatcagttttcgtaac

SEQ ID NO: 22990 - DNA, 33 bp, Homo sapiens
gcagatttctggccacgctctttgatcacaaat

SEQ ID NO: 22991 - DNA, 33 bp, Homo sapiens
tgccttcttccctttctctcactgggttatatc

SEQ ID NO: 22992 - DNA, 33 bp, Homo sapiens
atagattcctagcagagaacataattgtgagag

SEQ ID NO: 22993 - DNA, 33 bp, Homo sapiens
gagcccattcacacaagggtctcattttattag

SEQ ID NO: 22994 - DNA, 33 bp, Homo sapiens
gtttagagaggaaaatgggcagcatcattttgt

SEQ ID NO: 22995 - DNA, 33 bp, Homo sapiens
tcctggtttcatgaaggcaaatactcctctttc

SEQ ID NO: 22996 - DNA, 33 bp, Homo sapiens
tttcgaatctcaacactctgagctctgtgcttt

SEQ ID NO: 22997 - DNA, 33 bp, Homo sapiens
atgggtcaccaaagacgcacaaaggtaagatgt

SEQ ID NO: 22998 - DNA, 33 bp, Homo sapiens
aaataacacaagagccggaacagaatgaatgtg

SEQ ID NO: 22999 - DNA, 33 bp, Homo sapiens
aatagttttaaaatcatggtcaaattctaagtc

SEQ ID NO: 23000 - DNA, 33 bp, Homo sapiens
attcagccgctcctaagtaggtggccagattgt

SEQ ID NO: 23001 - DNA, 33 bp, Homo sapiens
gttttgtgactttagagaccataggattaactg

SEQ ID NO: 23002 - DNA, 33 bp, Homo sapiens
aaggataaattcacaagcatgagcatccgtctc

SEQ ID NO: 23003 - DNA, 33 bp, Homo sapiens
aagcaacatgaactgcgccatcactgacttcta

SEQ ID NO: 23004 - DNA, 33 bp, Homo sapiens
gatggaagcgggaaccgaaagcctggctgagag

SEQ ID NO: 23005 - DNA, 33 bp, Homo sapiens
cgagtagccacaggacggaactgagaagcgagt

SEQ ID NO: 23006 - DNA, 33 bp, Homo sapiens
tagttacctagggcaatgctgatgcagataagt

SEQ ID NO: 23007 - DNA, 33 bp, Homo sapiens
gcccctcagagtgcacgggggatgatcttggag

SEQ ID NO: 23008 - DNA, 33 bp, Homo sapiens
atgaacaatccacaactacaggcaacaaggtgg

SEQ ID NO: 23009 - DNA, 33 bp, Homo sapiens
accccctggctcactatgacaccaccgctgatg

SEQ ID NO: 23010 - DNA, 33 bp, Homo sapiens
agtgtgtggacagaacggacaatcttttctgcc

SEQ ID NO: 23011 - DNA, 51 bp, Homo sapiens
tctctacacactgcggtggaagacatggcccttcctgccaacgtgcacctc

SEQ ID NO: 23012 - DNA, 33 bp, Homo sapiens
gcattcatggactgtatcttagctctgttgaaa

SEQ ID NO: 23013 - DNA, 33 bp, Homo sapiens
tcttccaatctcatgcgaatttttttcctcctt

SEQ ID NO: 23014 - DNA, 33 bp, Homo sapiens
gaagatagctcaccccgagaatatgagtttctg

SEQ ID NO: 23015 - DNA, 33 bp, Homo sapiens
agaagagaggaatttcgacagccccgtacacaa

SEQ ID NO: 23016 - DNA, 51 bp, Homo sapiens
agacctgtgggggtgcaaatgcgaatgtgtgaggggtgctccgggacagct

SEQ ID NO: 23017 - DNA, 33 bp, Homo sapiens
ggcagattcaaaccacggacttcatggatatcg

SEQ ID NO: 23018 - DNA, 33 bp, Homo sapiens
gtgttaagcacttataccactatgtagctacta

SEQ ID NO: 23019 - DNA, 33 bp, Homo sapiens
atgaggagcaggagatgagcttacagttttctg

SEQ ID NO: 23020 - DNA, 33 bp, Homo sapiens
ttaagtaatcgacttatatagaaggtgtgcacc

SEQ ID NO: 23021 - DNA, 51 bp, Homo sapiens
aggtcatcctcaagagattacttccgcctcaattcacacaggacaggtgat

SEQ ID NO: 23022 - DNA, 51 bp, Homo sapiens
gattgtacatttggttgtttctgctgacttacccatggtggccggcttcct

SEQ ID NO: 23023 - DNA, 33 bp, Homo sapiens
tgttttcacttattcagtaattattcagtgtcc

SEQ ID NO: 23024 - DNA, 33 bp, Homo sapiens
gacaaggagcttgggagtagaagaagcaaaatt

SEQ ID NO: 23025 - DNA, 33 bp, Homo sapiens
gcccccacaatgccactgggtactacaccgttt

SEQ ID NO: 23026 - DNA, 33 bp, Homo sapiens
tttctacaactgcaaatactattcagcaattta

SEQ ID NO: 23027 - DNA, 33 bp, Homo sapiens
aggccctatgctcctcgcaccaatctagtaaga

SEQ ID NO: 23028 - DNA, 33 bp, Homo sapiens
atattcataagaaacactagaagacaaaaatgt

SEQ ID NO: 23029 - DNA, 33 bp, Homo sapiens
taataacatttttcaattcacgaagattatgcc

SEQ ID NO: 23030 - DNA, 33 bp, Homo sapiens
catcctctttaaagtcgagtccatctaatataa

SEQ ID NO: 23031 - DNA, 33 bp, Homo sapiens
aagcccagcagcttgagacataaagcgaggtgt

SEQ ID NO: 23032 - DNA, 33 bp, Homo sapiens
ttctgaatgataggactctgcacagcatgcagt

SEQ ID NO: 23033 - DNA, 33 bp, Homo sapiens
cctaaggaaagagtcatgtatacacttacacag

SEQ ID NO: 23034 - DNA, 33 bp, Homo sapiens
gggctcagcttgtctataataaacacaagataa

SEQ ID NO: 23035 - DNA, 33 bp, Homo sapiens
gctgccaattgaagtgcagattcaaggcaactt

SEQ ID NO: 23036 - DNA, 33 bp, Homo sapiens
ctttgtgcgctgtggatgttttccctatagtta

SEQ ID NO: 23037 - DNA, 33 bp, Homo sapiens
atttagaataaaggaatggctagacacagtggc

SEQ ID NO: 23038 - DNA, 33 bp, Homo sapiens
gaaatgcaagagacaccgaatagtcaaagcaat

SEQ ID NO: 23039 - DNA, 33 bp, Homo sapiens
aagggtgcaccaacagtagagctcagatacaaa

SEQ ID NO: 23040 - DNA, 33 bp, Homo sapiens
ggttctggttaataaagttcactgttgtgtgaa

SEQ ID NO: 23041 - DNA, 33 bp, Homo sapiens
ccctggtgggaatcccgacttctccttatgcaa

SEQ ID NO: 23042 - DNA, 33 bp, Homo sapiens
gcccttgtgccattaggaaagcggaggctgggt

SEQ ID NO: 23043 - DNA, 33 bp, Homo sapiens
aatagtcacagatgtaggagttggaccaaatta

SEQ ID NO: 23044 - DNA, 33 bp, Homo sapiens
tgagaatactcaagaagtggttatcttgggtag

SEQ ID NO: 23045 - DNA, 33 bp, Homo sapiens
ataaaatgtacaaaagtatatccagtgaaaaat

SEQ ID NO: 23046 - DNA, 33 bp, Homo sapiens
aatcaagttccatcaagaatttttagctggaaa

SEQ ID NO: 23047 - DNA, 33 bp, Homo sapiens
atctaccgcgaccagctgaagtagggtgcaaag

SEQ ID NO: 23048 - DNA, 33 bp, Homo sapiens
ttctgaggaccatacagatcggttttccaccta

SEQ ID NO: 23049 - DNA, 33 bp, Homo sapiens
gatgtttgcatataggtacatttagctggatta

SEQ ID NO: 23050 - DNA, 33 bp, Homo sapiens
agtatttagtcagcaatgtaccattatagaaaa

SEQ ID NO: 23051 - DNA, 51 bp, Homo sapiens
gtgtctggtacatgtgtatgtgtaatagggaaacgcattctagattcaaag

SEQ ID NO: 23052 - DNA, 33 bp, Homo sapiens
gaattcggcctctcaatcagtcttgtagtagtg

SEQ ID NO: 23053 - DNA, 33 bp, Homo sapiens
gagcatcaaagagcccggacaagtgagaatcaa

SEQ ID NO: 23054 - DNA, 33 bp, Homo sapiens
tcatctgtcttgtcccgcaaaggccaagacaaa

SEQ ID NO: 23055 - DNA, 33 bp, Homo sapiens
cactgtcgcttctccatggcattagattttcag

SEQ ID NO: 23056 - DNA, 33 bp, Homo sapiens
taaatgaacatccatctcgaggcgggcagagga

SEQ ID NO: 23057 - DNA, 33 bp, Homo sapiens
aggcagaaccagcagataggaaggtgacacagt

SEQ ID NO: 23058 - DNA, 33 bp, Homo sapiens
cccatgctgggacaaggaatgaagttttgatat

SEQ ID NO: 23059 - DNA, 33 bp, Homo sapiens
ttggcattatctgttatctatcgacaattaata

SEQ ID NO: 23060 - DNA, 33 bp, Homo sapiens
actggtaatattgccccatgaactttaaagggt

SEQ ID NO: 23061 - DNA, 33 bp, Homo sapiens
actgaaggagacaacatgtagcctttgctgggg

SEQ ID NO: 23062 - DNA, 33 bp, Homo sapiens
tattttaacaaattccgtgattgtcagttacct

SEQ ID NO: 23063 - DNA, 33 bp, Homo sapiens
acgacaataaccaagcgaaggggaaatatacag

SEQ ID NO: 23064 - DNA, 33 bp, Homo sapiens
gtcagtcctcagctcatgtctacttggttcttt

SEQ ID NO: 23065 - DNA, 33 bp, Homo sapiens
aagagagatcccttcactctggaaagctgacag

SEQ ID NO: 23066 - DNA, 33 bp, Homo sapiens
tgcccacctgtctaggtcatgcatcggcttgta

SEQ ID NO: 23067 - DNA, 33 bp, Homo sapiens
gggcaaaataacattgtaaggtagattgtcacc

SEQ ID NO: 23068 - DNA, 33 bp, Homo sapiens
tccgaggacctaatccgcaagtgtagtttcagt

SEQ ID NO: 23069 - DNA, 33 bp, Homo sapiens
gtggtctgtccctaaatcttgtgctggagaccc

SEQ ID NO: 23070 - DNA, 33 bp, Homo sapiens
aaactcactctactaagtgaaaaacaacaaaaa

SEQ ID NO: 23071 - DNA, 33 bp, Homo sapiens
tgagccctgtgtcctataaagaccctgagagcc

SEQ ID NO: 23072 - DNA, 33 bp, Homo sapiens
gtgtgtgagacactcagtaacggcaagaggatg

SEQ ID NO: 23073 - DNA, 33 bp, Homo sapiens
cacccgctcctcaaaaggaataaccagactcag

SEQ ID NO: 23074 - DNA, 33 bp, Homo sapiens
ctcctattaagaccaatggaccaataactagaa

SEQ ID NO: 23075 - DNA, 33 bp, Homo sapiens
cagagcccgacaaaggcatgacaaaaatatcct

SEQ ID NO: 23076 - DNA, 33 bp, Homo sapiens
aatcaaattgctaaagcacagtgatgaagagac

SEQ ID NO: 23077 - DNA, 33 bp, Homo sapiens
gtttctctgtctccaatgtcacttccggcaggt

SEQ ID NO: 23078 - DNA, 33 bp, Homo sapiens
catcatgatgggtgcgtcattctgtaatccaga

SEQ ID NO: 23079 - DNA, 33 bp, Homo sapiens
tacctatggacttatatcaccatttacaatgca

SEQ ID NO: 23080 - DNA, 33 bp, Homo sapiens
gtatctgcttcagtgatgtaactgtgcacctgc

SEQ ID NO: 23081 - DNA, 33 bp, Homo sapiens
tgtcacttggaactccgggaaaccagtctctgg

SEQ ID NO: 23082 - DNA, 33 bp, Homo sapiens
cacctcgaatgcaaaagttaaaggagcatccaa

SEQ ID NO: 23083 - DNA, 33 bp, Homo sapiens
cagactgacttccagagaagagagcctgaactg

SEQ ID NO: 23084 - DNA, 33 bp, Homo sapiens
taccacatgcctgggaggattctaaatgcttac

SEQ ID NO: 23085 - DNA, 33 bp, Homo sapiens
agccttagaaggatgacctggagaactggaggc

SEQ ID NO: 23086 - DNA, 33 bp, Homo sapiens
agacgatgacgtgcactgaggagaagttgttga

SEQ ID NO: 23087 - DNA, 33 bp, Homo sapiens
aagtcacagtggtccaggccaaaggggatgcag

SEQ ID NO: 23088 - DNA, 33 bp, Homo sapiens
ccattcagtagaagggtaaagaggcccacatgt

SEQ ID NO: 23089 - DNA, 33 bp, Homo sapiens
gtgctgaggacagtaggaaagaacgtaggaagt

SEQ ID NO: 23090 - DNA, 33 bp, Homo sapiens
tttgtgaactcactccggctaacagttgacatg

SEQ ID NO: 23091 - DNA, 33 bp, Homo sapiens
tctgtttcaggtactatgctagtctcttcccac

SEQ ID NO: 23092 - DNA, 33 bp, Homo sapiens
ctgcggtttcaaaagatagcaagtagggtttct

SEQ ID NO: 23093 - DNA, 33 bp, Homo sapiens
gcaggcgggtcccccagaggataagattatgta

SEQ ID NO: 23094 - DNA, 33 bp, Homo sapiens
gtcctaggcccagaaattccttcatcaagccag

SEQ ID NO: 23095 - DNA, 33 bp, Homo sapiens
gcaagattttgtcacccagctgagcatttactg

SEQ ID NO: 23096 - DNA, 33 bp, Homo sapiens
caccacaggtaccaaccaggtgaatggagcaaa

SEQ ID NO: 23097 - DNA, 33 bp, Homo sapiens
gtaatgttcggaactcgaaatagtgacaaggat

SEQ ID NO: 23098 - DNA, 33 bp, Homo sapiens
ggtatacctgctatgggaaagagccagaggata

SEQ ID NO: 23099 - DNA, 33 bp, Homo sapiens
tcttttctgggcttcatcatctgtatctgtcaa

SEQ ID NO: 23100 - DNA, 33 bp, Homo sapiens
aaccgcaatcacaatatcttaagcccatatcaa

SEQ ID NO: 23101 - DNA, 33 bp, Homo sapiens
aagaaaaagtcacaatgatggtgataatgaaga

SEQ ID NO: 23102 - DNA, 51 bp, Homo sapiens
atattgaataatgccatcactattataggatcaccaccatcatcttcatta

SEQ ID NO: 23103 - DNA, 33 bp, Homo sapiens
cagaaacaagactggagtacaaaaatagagact

SEQ ID NO: 23104 - DNA, 33 bp, Homo sapiens
aggtggttggccccaagttagctttccactctg

SEQ ID NO: 23105 - DNA, 33 bp, Homo sapiens
ggtgggcaaggaaccataccatgctgggaacag

SEQ ID NO: 23106 - DNA, 33 bp, Homo sapiens
ggggcctgggcagtgaggaggagccagccaggt

SEQ ID NO: 23107 - DNA, 33 bp, Homo sapiens
aataattaaacatcccgaatgtcagttgtgcgg

SEQ ID NO: 23108 - DNA, 33 bp, Homo sapiens
cacatcagctaacacaggctatttctagagtga

SEQ ID NO: 23109 - DNA, 33 bp, Homo sapiens
gtgtactttgaaaccagtcagtgtaattaacca

SEQ ID NO: 23110 - DNA, 33 bp, Homo sapiens
aggaggctagtccaaagtgagaggtcctgttag

SEQ ID NO: 23111 - DNA, 33 bp, Homo sapiens
ggggccaataatatgatctagcacagggatatt

SEQ ID NO: 23112 - DNA, 33 bp, Homo sapiens
aaggaaaccaattcgctcctagacccttcagaa

SEQ ID NO: 23113 - DNA, 33 bp, Homo sapiens
taaacagcaaaaactagctgaatcaccagagga

SEQ ID NO: 23114 - DNA, 51 bp, Homo sapiens
attataatagctcattgctccttacgtgtcagaagcacctctgggctgtgg

SEQ ID NO: 23115 - DNA, 33 bp, Homo sapiens
aatgatattgccacatgagccctactgaaacaa

SEQ ID NO: 23116 - DNA, 33 bp, Homo sapiens
ccaagaaccgaggacagataagtacaagggaac

SEQ ID NO: 23117 - DNA, 33 bp, Homo sapiens
ccaagctcttccctccgctgctattgaccatgt

SEQ ID NO: 23118 - DNA, 33 bp, Homo sapiens
ggaacgaggaccagaatacctgaatgggtagtt

SEQ ID NO: 23119 - DNA, 33 bp, Homo sapiens
gagagtggacagaatatgggcgagatgcttacg

SEQ ID NO: 23120 - DNA, 33 bp, Homo sapiens
aactggctcctgaattgaatctctgtatttgtg

SEQ ID NO: 23121 - DNA, 33 bp, Homo sapiens
aatactgaattcaggatggtggttactctgtgg

SEQ ID NO: 23122 - DNA, 33 bp, Homo sapiens
cacacagtcactgaacgctataggttggtggtc

SEQ ID NO: 23123 - DNA, 33 bp, Homo sapiens
ggggcggctgtgtgaatggccgtcctgtttgag

SEQ ID NO: 23124 - DNA, 33 bp, Homo sapiens
tgaatctgacatagtcccacctgcagagaactc

SEQ ID NO: 23125 - DNA, 33 bp, Homo sapiens
gctgaactgggaagtatgtctaatgaagtctaa

SEQ ID NO: 23126 - DNA, 33 bp, Homo sapiens
acacaaacctggatgcgatagcgtactacacac

SEQ ID NO: 23127 - DNA, 33 bp, Homo sapiens
aagaataccactgctcgaagaggttacctgcct

SEQ ID NO: 23128 - DNA, 33 bp, Homo sapiens
cgcgaggcagaagttataatgtccgccaagcgg

SEQ ID NO: 23129 - DNA, 33 bp, Homo sapiens
ttcctgtgcgtcattaggctgtggttctcatag

SEQ ID NO: 23130 - DNA, 33 bp, Homo sapiens
gatcttcttggcttgctacttatgttatggaac

SEQ ID NO: 23131 - DNA, 33 bp, Homo sapiens
cttcacagggcgagtagcaacacgctctgcagc

SEQ ID NO: 23132 - DNA, 33 bp, Homo sapiens
caagttgcttcaactatcgaagccttagcttcc

SEQ ID NO: 23133 - DNA, 33 bp, Homo sapiens
tgtccaggctagcagattcctgtcacctacgag

SEQ ID NO: 23134 - DNA, 33 bp, Homo sapiens
cagaggtagaaacgaagctaacataaattcagt

SEQ ID NO: 23135 - DNA, 33 bp, Homo sapiens
ggaattgaggagtaaatagaagacatagatgga

SEQ ID NO: 23136 - DNA, 33 bp, Homo sapiens
aactgtgtgaccttcatcaagtgatttaacttc

SEQ ID NO: 23137 - DNA, 33 bp, Homo sapiens
acatcactgtgaattagcatcttagtccaggaa

SEQ ID NO: 23138 - DNA, 33 bp, Homo sapiens
tcccctgatgcaatgagagggtgagcaatttca

SEQ ID NO: 23139 - DNA, 33 bp, Homo sapiens
taagtgtggcataaggtaatggaaaacgctata

SEQ ID NO: 23140 - DNA, 33 bp, Homo sapiens
aataactgacatagcagtagaatgggcctgaga

SEQ ID NO: 23141 - DNA, 33 bp, Homo sapiens
ccctcaaccagtgaaggatgagaagttggtggc

SEQ ID NO: 23142 - DNA, 33 bp, Homo sapiens
catggggctgtcagaatatttaatatggggccc

SEQ ID NO: 23143 - DNA, 33 bp, Homo sapiens
agatgattctcactgaggccgcgtgatgatggg

SEQ ID NO: 23144 - DNA, 33 bp, Homo sapiens
tgtcccaaccaacagatggtatttagcacctct

SEQ ID NO: 23145 - DNA, 33 bp, Homo sapiens
tcaatgcctcacctcatccctttctcatctgag

SEQ ID NO: 23146 - DNA, 33 bp, Homo sapiens
gtggcttgtttctttctctgtctatcctagaaa

SEQ ID NO: 23147 - DNA, 33 bp, Homo sapiens
ttctctgatctggtccgctcattaaggctatag

SEQ ID NO: 23148 - DNA, 33 bp, Homo sapiens
aaggtgggaaaaatgatgaggcatgtacaaggc

SEQ ID NO: 23149 - DNA, 33 bp, Homo sapiens
actaaaccttgttccacatctgatcagtcttca

SEQ ID NO: 23150 - DNA, 33 bp, Homo sapiens
ccacactgctactcaacatgtgggcgacagatc

SEQ ID NO: 23151 - DNA, 33 bp, Homo sapiens
gatgtcttgaaagaatgagtgtgaaaatgagat

SEQ ID NO: 23152 - DNA, 33 bp, Homo sapiens
taatgcccagtaaaaagcaggaaagatgtcttg

SEQ ID NO: 23153 - DNA, 33 bp, Homo sapiens
ccgttttctgcccaaccggagaataaaggaagc

SEQ ID NO: 23154 - DNA, 33 bp, Homo sapiens
cacaaagttgttagaggaatcagaagaaatttt

SEQ ID NO: 23155 - DNA, 33 bp, Homo sapiens
ggatgtgaatctagactatcctgaccccgtcat

SEQ ID NO: 23156 - DNA, 33 bp, Homo sapiens
atggctcaacagacatgaccaggaaaacagaga

SEQ ID NO: 23157 - DNA, 33 bp, Homo sapiens
atgtggttcaaggagacccttctgggtaaaaga

SEQ ID NO: 23158 - DNA, 33 bp, Homo sapiens
aatatttattgaatgagggaaatagtctttcta

SEQ ID NO: 23159 - DNA, 33 bp, Homo sapiens
acctcaaacacctacccagggctagcagtttat

SEQ ID NO: 23160 - DNA, 33 bp, Homo sapiens
gccagctagtggcctagaatcccttctaaccag

SEQ ID NO: 23161 - DNA, 33 bp, Homo sapiens
atgccatcttgaaccagtaatttcatttctctg

SEQ ID NO: 23162 - DNA, 51 bp, Homo sapiens
caaggtcaaaggggatataagcacatgctctttctttataaacacaggtca

SEQ ID NO: 23163 - DNA, 33 bp, Homo sapiens
ttggaattgtatctcctatggccctggattctt

SEQ ID NO: 23164 - DNA, 33 bp, Homo sapiens
ctaagagacacttggagatgtttgtcggtttca

SEQ ID NO: 23165 - DNA, 33 bp, Homo sapiens
ttggatgtgcaccttatggctgtttatagcaat

SEQ ID NO: 23166 - DNA, 33 bp, Homo sapiens
aaggaacttgtcctactaggcattctgtaatca

SEQ ID NO: 23167 - DNA, 33 bp, Homo sapiens
gtgaaagtcttttacagggcagtgaacagtaaa

SEQ ID NO: 23168 - DNA, 33 bp, Homo sapiens
atgtgtagtaataagacaaaatatgggctttga

SEQ ID NO: 23169 - DNA, 33 bp, Homo sapiens
ttttacagaatatggggcactagttagactggt

SEQ ID NO: 23170 - DNA, 33 bp, Homo sapiens
gtgccttcaacccggcggatcaaagatgaatgt

SEQ ID NO: 23171 - DNA, 33 bp, Homo sapiens
ttttttaattctctccgcaattagagccaggcc

SEQ ID NO: 23172 - DNA, 33 bp, Homo sapiens
agagaccggggcttaagtccaggtatgttttct

SEQ ID NO: 23173 - DNA, 33 bp, Homo sapiens
aacgagttagctgttatctcctctcagatgtca

SEQ ID NO: 23174 - DNA, 33 bp, Homo sapiens
atccgatgttgtcaccgctagacatgggtagtt

SEQ ID NO: 23175 - DNA, 33 bp, Homo sapiens
gagtactagagtttgctcccttgttaggaactc

SEQ ID NO: 23176 - DNA, 33 bp, Homo sapiens
agcttttcagaagtcattacaggagctagctta

SEQ ID NO: 23177 - DNA, 33 bp, Homo sapiens
cagccactggtgtgcatcaaaaaggaaagttta

SEQ ID NO: 23178 - DNA, 33 bp, Homo sapiens
aaaacacggaaataacgattctaggtaaatttt

SEQ ID NO: 23179 - DNA, 33 bp, Homo sapiens
taagtgaaacaacagatggaaaggtagctgaca

SEQ ID NO: 23180 - DNA, 33 bp, Homo sapiens
cctgctcacttcagaattgctagagaagaagtt

SEQ ID NO: 23181 - DNA, 33 bp, Homo sapiens
tcatgatcacctctgagtacagcaaagacaggg

SEQ ID NO: 23182 - DNA, 33 bp, Homo sapiens
aagtctatccatccagcaagaagaggaaagaag

SEQ ID NO: 23183 - DNA, 33 bp, Homo sapiens
aagtgggcattatccaggcaaaagaatgtggga

SEQ ID NO: 23184 - DNA, 33 bp, Homo sapiens
cgtgttaggcagtggagatacaaatataaagta

SEQ ID NO: 23185 - DNA, 33 bp, Homo sapiens
aggaagagctcgttgggaaatcaaaggtgacaa

SEQ ID NO: 23186 - DNA, 33 bp, Homo sapiens
cagggtagttacagaataaggcttagcagtcag

SEQ ID NO: 23187 - DNA, 33 bp, Homo sapiens
acccttctagattgacggaactagtgagcagca

SEQ ID NO: 23188 - DNA, 33 bp, Homo sapiens
gacaggagcaccttgctgactctaaagtctcag

SEQ ID NO: 23189 - DNA, 33 bp, Homo sapiens
gtgtgtgcacccagaatgaatcctggagaacca

SEQ ID NO: 23190 - DNA, 33 bp, Homo sapiens
ttgtatacagtcaatcgcttgctactgcacaca

SEQ ID NO: 23191 - DNA, 33 bp, Homo sapiens
tgagtcatgtatacacgctcatggtaaatgact

SEQ ID NO: 23192 - DNA, 33 bp, Homo sapiens
taaaatgacctgtctatcaaaaacagccttcag

SEQ ID NO: 23193 - DNA, 33 bp, Homo sapiens
caagcagacattttgggaagattattcgtggaa

SEQ ID NO: 23194 - DNA, 33 bp, Homo sapiens
agaaatttgaggatccgaggaaaactactgggg

SEQ ID NO: 23195 - DNA, 33 bp, Homo sapiens
gatggtaagactctgcgctgtaaggactaaatt

SEQ ID NO: 23196 - DNA, 33 bp, Homo sapiens
ctaggagcagagcgccgccgatgacaggcccat

SEQ ID NO: 23197 - DNA, 33 bp, Homo sapiens
gcacccaaagcgccagtaagttagctccatgat

SEQ ID NO: 23198 - DNA, 33 bp, Homo sapiens
ggggtggtttcagagagagtaaggatacaggag

SEQ ID NO: 23199 - DNA, 33 bp, Homo sapiens
acagagcggggtcttagggaatactgcaccaac

SEQ ID NO: 23200 - DNA, 33 bp, Homo sapiens
aaattatatcatacaacctacaatttccatttc

SEQ ID NO: 23201 - DNA, 33 bp, Homo sapiens
ggaagtctatagcggatgatttttgtatatttc

SEQ ID NO: 23202 - DNA, 33 bp, Homo sapiens
agtctgtattttcctatctcttttgtgcatggg

SEQ ID NO: 23203 - DNA, 51 bp, Homo sapiens
ccttctctttggccaggctttaagagcaagatgggtccactcattactgat

SEQ ID NO: 23204 - DNA, 51 bp, Homo sapiens
catgagaccttatgcccaaactgaccgccattccaggcccatcactcactg

SEQ ID NO: 23205 - DNA, 33 bp, Homo sapiens
tattccagatctccaatgttacaggcgagaacc

SEQ ID NO: 23206 - DNA, 33 bp, Homo sapiens
accaggccttcatcacgccaggagagagtgcct

SEQ ID NO: 23207 - DNA, 33 bp, Homo sapiens
ctgggacattcctgccgggagagagtcaggccc

SEQ ID NO: 23208 - DNA, 33 bp, Homo sapiens
acccgtatcccactcattatcaagaagcaactc

SEQ ID NO: 23209 - DNA, 33 bp, Homo sapiens
acaggctgaaatgttatctggaggcctcaggca

SEQ ID NO: 23210 - DNA, 33 bp, Homo sapiens
tggaaagtgtttcaaatggtcagtaactggcta

SEQ ID NO: 23211 - DNA, 33 bp, Homo sapiens
ttacttgccagacaaatggactttgggcacatg

SEQ ID NO: 23212 - DNA, 33 bp, Homo sapiens
agacatgagtcatcgagaggctatctaaaccga

SEQ ID NO: 23213 - DNA, 33 bp, Homo sapiens
tgcaaatcaatcttcctgaggcaatttcctgtt

SEQ ID NO: 23214 - DNA, 33 bp, Homo sapiens
attagggcaaaaacattagggttgaagtgaagt

SEQ ID NO: 23215 - DNA, 33 bp, Homo sapiens
tgacccaatcacagcctaccagatcaacgagag

SEQ ID NO: 23216 - DNA, 33 bp, Homo sapiens
gctgccttccaaataatcataactttggtggga

SEQ ID NO: 23217 - DNA, 33 bp, Homo sapiens
ctaaaggcataaaaaaccgttgaattatagcag

SEQ ID NO: 23218 - DNA, 33 bp, Homo sapiens
actgaaatgaatgtaagtgtggatatgacaact

SEQ ID NO: 23219 - DNA, 33 bp, Homo sapiens
tgttgagtatcatgaagtcttcctatttggagc

SEQ ID NO: 23220 - DNA, 33 bp, Homo sapiens
tgatcttcaacctgcagagcaataacatcttat

SEQ ID NO: 23221 - DNA, 33 bp, Homo sapiens
ggaactgaacacagctgaagtagagagccagaa

SEQ ID NO: 23222 - DNA, 33 bp, Homo sapiens
atgaggaagtttcacattgctattaaaatattg

SEQ ID NO: 23223 - DNA, 33 bp, Homo sapiens
agtcagaaaacttatctacatccaggcagcctg

SEQ ID NO: 23224 - DNA, 33 bp, Homo sapiens
cgaggatgaaaacacagacggttctgaagatcc

SEQ ID NO: 23225 - DNA, 33 bp, Homo sapiens
gcaaaaaatggaatgagatgaagaaaaaggcta

SEQ ID NO: 23226 - DNA, 33 bp, Homo sapiens
gccgagcttaggtccagtgaagaggatcagagg

SEQ ID NO: 23227 - DNA, 33 bp, Homo sapiens
cttaatttttaattcctcatgcctgctgacagg

SEQ ID NO: 23228 - DNA, 33 bp, Homo sapiens
catctgaagctccaaacaattttcagcctttgt

SEQ ID NO: 23229 - DNA, 33 bp, Homo sapiens
ctacactgaacaaatatgtcgactgatgagtaa

SEQ ID NO: 23230 - DNA, 33 bp, Homo sapiens
tttttgtccacttgaagcttgtctagtgctttt

SEQ ID NO: 23231 - DNA, 33 bp, Homo sapiens
agttggcccctgttcctacacagtccaaatcca

SEQ ID NO: 23232 - DNA, 33 bp, Homo sapiens
ctgccacttcccgacatgtgatttgttgccacc

SEQ ID NO: 23233 - DNA, 51 bp, Homo sapiens
tgctctagagtctggtggcctccaacaccactatctgggtagcctcaggcg

SEQ ID NO: 23234 - DNA, 33 bp, Homo sapiens
gagggtgcctgttgtatacttagcatggcacca

SEQ ID NO: 23235 - DNA, 51 bp, Homo sapiens
agagatcatttatcttattaaaacagtaggcaagagtcatcaaagtggaaa

SEQ ID NO: 23236 - DNA, 51 bp, Homo sapiens
ctttgttgttggagacaatacattatagcgaacagagacttctttttctag

SEQ ID NO: 23237 - DNA, 33 bp, Homo sapiens
atgaaggcgcgctttcgagtaagcgagtgagga

SEQ ID NO: 23238 - DNA, 33 bp, Homo sapiens
ggtgaatggatacacggacagcagtaattgaca

SEQ ID NO: 23239 - DNA, 51 bp, Homo sapiens
ttaaaaacagaccgtgatgcttttatatacagacccacactgtccatgact

SEQ ID NO: 23240 - DNA, 33 bp, Homo sapiens
accaacttagtgccacggaagctcaactgtctc

SEQ ID NO: 23241 - DNA, 33 bp, Homo sapiens
gagatgggaagcctgatgcgcccccgttgcacc

SEQ ID NO: 23242 - DNA, 33 bp, Homo sapiens
tggggccccgagctgatgtaggtaggcttggga

SEQ ID NO: 23243 - DNA, 33 bp, Homo sapiens
gaaggaactggagacagtcacatggaagaagcc

SEQ ID NO: 23244 - DNA, 33 bp, Homo sapiens
ctgagcaagaaacttcgcagtctgagttcagta

SEQ ID NO: 23245 - DNA, 33 bp, Homo sapiens
tggtcatcaccaataatgtgccgttgcaaactg

SEQ ID NO: 23246 - DNA, 33 bp, Homo sapiens
agcaccccatcaacgagcgaagggaagccccag

SEQ ID NO: 23247 - DNA, 33 bp, Homo sapiens
acacgatagaatatgatatggcatgaaaagaag

SEQ ID NO: 23248 - DNA, 33 bp, Homo sapiens
agactctgaggccagacgctagagtgtggctcc

SEQ ID NO: 23249 - DNA, 33 bp, Homo sapiens
tcagacaatcctctactcttggaaatttgagtt

SEQ ID NO: 23250 - DNA, 51 bp, Homo sapiens
ggggcagaatgttgaccacagattggaagttaggtgaaagctgatttccgc

SEQ ID NO: 23251 - DNA, 33 bp, Homo sapiens
gactccgggttttttgtagctcagtgagcagca

SEQ ID NO: 23252 - DNA, 33 bp, Homo sapiens
ggagaccaatgtttctgaagccagcagcagaag

SEQ ID NO: 23253 - DNA, 33 bp, Homo sapiens
ttaaataacattgatcgaaatttttattgcagc

SEQ ID NO: 23254 - DNA, 33 bp, Homo sapiens
aatgcctttccctctatggaccgagcagaaaga

SEQ ID NO: 23255 - DNA, 33 bp, Homo sapiens
ttgtcctctaactccatccaatcaatcatgagg

SEQ ID NO: 23256 - DNA, 33 bp, Homo sapiens
gactgcatcatttaaggattaaactggccccta

SEQ ID NO: 23257 - DNA, 33 bp, Homo sapiens
ccaaaaaacacccagagaactagataggaaaaa

SEQ ID NO: 23258 - DNA, 33 bp, Homo sapiens
tggctctgcccttcccggatgttctgtgatggg

SEQ ID NO: 23259 - DNA, 33 bp, Homo sapiens
gtcccgtttcaggcaatgcagtcacttgcactg

SEQ ID NO: 23260 - DNA, 33 bp, Homo sapiens
acctaaaatattcaccgacaaatagactgtact

SEQ ID NO: 23261 - DNA, 33 bp, Homo sapiens
cagctgggacagctgctctcggctccatgtggt

SEQ ID NO: 23262 - DNA, 33 bp, Homo sapiens
gttctctctttcccagccggcctctcaggatcc

SEQ ID NO: 23263 - DNA, 33 bp, Homo sapiens
gaggcaaaagttggagtaaatagttctagaaaa

SEQ ID NO: 23264 - DNA, 33 bp, Homo sapiens
tgtaacttcaggcacaggtatcctttacttcat

SEQ ID NO: 23265 - DNA, 33 bp, Homo sapiens
cccccatgtgagttatcacacttgatgaatgaa

SEQ ID NO: 23266 - DNA, 33 bp, Homo sapiens
tcccatcccaatgtaatgactgatggttgagca

SEQ ID NO: 23267 - DNA, 33 bp, Homo sapiens
gctgaggtgagcaagggcagtggacgtcactgc

SEQ ID NO: 23268 - DNA, 33 bp, Homo sapiens
ggctttcttagcatgatgccagtggcaaaaaca

SEQ ID NO: 23269 - DNA, 51 bp, Homo sapiens
ttgtgacctctcaccctgagctgcagaccttctgtttcgtgatccgcgtgc

SEQ ID NO: 23270 - DNA, 33 bp, Homo sapiens
cttctgtataacattatagtgaaagctctagct

SEQ ID NO: 23271 - DNA, 33 bp, Homo sapiens
tgaggatttatgccgatctccagacgtacagga

SEQ ID NO: 23272 - DNA, 33 bp, Homo sapiens
gtatgtgtatacagtatgtgttgcagcgtgtat

SEQ ID NO: 23273 - DNA, 33 bp, Homo sapiens
ggaaatcaacaagacatggcagataactggatg

SEQ ID NO: 23274 - DNA, 33 bp, Homo sapiens
tctgtagaaaacctgctgagggaagagctcaca

SEQ ID NO: 23275 - DNA, 33 bp, Homo sapiens
gtgattttagggtaaatgctcctctcttgtgct

SEQ ID NO: 23276 - DNA, 33 bp, Homo sapiens
atctgaaaccacattcgctttcctctcaccagg

SEQ ID NO: 23277 - DNA, 33 bp, Homo sapiens
aggtggtgatagagaccgagtcagctgggtaaa

SEQ ID NO: 23278 - DNA, 33 bp, Homo sapiens
acagtgtgaatatgccgggaaaagggagggttc

SEQ ID NO: 23279 - DNA, 33 bp, Homo sapiens
gaatacatgaacagaagtggattttgattgatg

SEQ ID NO: 23280 - DNA, 33 bp, Homo sapiens
tccgctgcagggtccagcgccgcccaggtctct

SEQ ID NO: 23281 - DNA, 33 bp, Homo sapiens
gtccagcttcatagaggcactatgtcctcaagt

SEQ ID NO: 23282 - DNA, 51 bp, Homo sapiens
tacatatgcacgcacatacatgcacgtccacaatccatgttcctatgcacc

SEQ ID NO: 23283 - DNA, 33 bp, Homo sapiens
ctgcctctaaacccgacgtcttcaagcctgact

SEQ ID NO: 23284 - DNA, 33 bp, Homo sapiens
cctgcaggcggccttcgcaatatctgacgttag

SEQ ID NO: 23285 - DNA, 33 bp, Homo sapiens
tctggaaaaaatactatgttgttcaattgttct

SEQ ID NO: 23286 - DNA, 33 bp, Homo sapiens
gagctgagcttcctcatctagaattgctgaaca

SEQ ID NO: 23287 - DNA, 33 bp, Homo sapiens
gattatgtgtgaagaacattcaaggtaatctac

SEQ ID NO: 23288 - DNA, 33 bp, Homo sapiens
tcaacaccatgcctacggattgcctcagccaaa

SEQ ID NO: 23289 - DNA, 51 bp, Homo sapiens
cataatggatgactattcagcaggataatgaatggagcattgataattttt

SEQ ID NO: 23290 - DNA, 33 bp, Homo sapiens
ggcttctataaggatctcacgagccactctgta

SEQ ID NO: 23291 - DNA, 33 bp, Homo sapiens
atactggcctcaaaacgattcgggaagtatctt

SEQ ID NO: 23292 - DNA, 33 bp, Homo sapiens
agccagcttgtgggcagccctggattaagaggt

SEQ ID NO: 23293 - DNA, 33 bp, Homo sapiens
gaagaagaggacaaaggcagtttcttatcatct

SEQ ID NO: 23294 - DNA, 33 bp, Homo sapiens
tgacctcgcgtttatatccagggattcttggtt

SEQ ID NO: 23295 - DNA, 33 bp, Homo sapiens
tcccattaagacaaattacttcgactcatgaag

SEQ ID NO: 23296 - DNA, 33 bp, Homo sapiens
tcttaaaatgcaaggatgctcatagtgtttgcc

SEQ ID NO: 23297 - DNA, 33 bp, Homo sapiens
agtggaagtttgaggggactctcacaaaatgat

SEQ ID NO: 23298 - DNA, 33 bp, Homo sapiens
gctacttatgctcaagtccttttctcagggtgc

SEQ ID NO: 23299 - DNA, 33 bp, Homo sapiens
tggcagtgccgggccatggtaggtacgtgaaga

SEQ ID NO: 23300 - DNA, 33 bp, Homo sapiens
gatcagataaattggtcaacttgatagcaagtc

SEQ ID NO: 23301 - DNA, 33 bp, Homo sapiens
actcattaaatcttcataaaagcccagtgctga

SEQ ID NO: 23302 - DNA, 33 bp, Homo sapiens
ttcaagcgtcttctccgccttgaccctgccacc

SEQ ID NO: 23303 - DNA, 33 bp, Homo sapiens
tgtttccataagatgcgaggaacaggtcacgta

SEQ ID NO: 23304 - DNA, 33 bp, Homo sapiens
acctggtattctatcacatttctgcttaacaag

SEQ ID NO: 23305 - DNA, 33 bp, Homo sapiens
ttaacgtccacaaatcacagtcgctaggattta

SEQ ID NO: 23306 - DNA, 33 bp, Homo sapiens
gagctcactcacccatcagacgctggcaactgg

SEQ ID NO: 23307 - DNA, 33 bp, Homo sapiens
cggaggcttgtcaggtaaattaggagatgatta

SEQ ID NO: 23308 - DNA, 33 bp, Homo sapiens
tcaccaggtcttatcaatcgtcaacctggtcca

SEQ ID NO: 23309 - DNA, 51 bp, Homo sapiens
atgcaaaggctgataaaatatttccaagacatgctctaaatagcaggcaca

SEQ ID NO: 23310 - DNA, 33 bp, Homo sapiens
tccccagtacttgtcacgggcttcaacgttatg

SEQ ID NO: 23311 - DNA, 33 bp, Homo sapiens
tcagcaaagcaacagacgacgaggttctcagag

SEQ ID NO: 23312 - DNA, 33 bp, Homo sapiens
agagaggaggaatcaacaatgtggacctgccta

SEQ ID NO: 23313 - DNA, 33 bp, Homo sapiens
aagcttattcaggttaccattgctatgtcttac

SEQ ID NO: 23314 - DNA, 33 bp, Homo sapiens
tttgacttattcaaaaaagcatccccgtccagg

SEQ ID NO: 23315 - DNA, 33 bp, Homo sapiens
aactatctaaagcagcactttactgacatgaaa

SEQ ID NO: 23316 - DNA, 33 bp, Homo sapiens
gatttaattacagtcccgattttcagcaccatc

SEQ ID NO: 23317 - DNA, 33 bp, Homo sapiens
cacccttgaagcaggcgctgaggcatctctgtc

SEQ ID NO: 23318 - DNA, 33 bp, Homo sapiens
ccaccaggtagaacagaatgatccactgtctcc

SEQ ID NO: 23319 - DNA, 33 bp, Homo sapiens
cttgatctcaagtcaccggacagaggatactca

SEQ ID NO: 23320 - DNA, 33 bp, Homo sapiens
cccgcccacatctaaccggaccagaggcagtcg

SEQ ID NO: 23321 - DNA, 33 bp, Homo sapiens
ggccccagttacaaaccaacttttctctaggag

SEQ ID NO: 23322 - DNA, 33 bp, Homo sapiens
ttagtggtaatgtcaacggtaacggtggtgatg

SEQ ID NO: 23323 - DNA, 33 bp, Homo sapiens
aaatgccttttaccaacgtccagctctagaagc

SEQ ID NO: 23324 - DNA, 33 bp, Homo sapiens
gccgtaggctccagacactactttgttccaatc

SEQ ID NO: 23325 - DNA, 33 bp, Homo sapiens
cattgcatttcatggacacgtctcctttgtcta

SEQ ID NO: 23326 - DNA, 33 bp, Homo sapiens
gctcagagcatcccagactgaagagcctcactc

SEQ ID NO: 23327 - DNA, 33 bp, Homo sapiens
acagccttcccagaaacaggaccattcacatct

SEQ ID NO: 23328 - DNA, 33 bp, Homo sapiens
atgtcaccttgaaccaccttggcacagccggtt

SEQ ID NO: 23329 - DNA, 33 bp, Homo sapiens
agcagagttgtccaccaagtgttggccacagtg

SEQ ID NO: 23330 - DNA, 33 bp, Homo sapiens
atggtcaccgtcttctaaagggctgtaggatcg

SEQ ID NO: 23331 - DNA, 33 bp, Homo sapiens
gccagagctgtgtcacaatcaactctaggtata

SEQ ID NO: 23332 - DNA, 33 bp, Homo sapiens
agtccacaaacattgcgctccgggtgaatcctg

SEQ ID NO: 23333 - DNA, 33 bp, Homo sapiens
tctcagtgctgtaactgactgtcaatgagagtg

SEQ ID NO: 23334 - DNA, 33 bp, Homo sapiens
gttttgattatcaagaactaatgtatgaacata

SEQ ID NO: 23335 - DNA, 33 bp, Homo sapiens
tgtcatagaactctcaaccctgacttaacccaa

SEQ ID NO: 23336 - DNA, 33 bp, Homo sapiens
gtgaggggattgcagaacagcgaagggcatccc

SEQ ID NO: 23337 - DNA, 33 bp, Homo sapiens
tcgtttttcggagacaacggcagactgaaaacc

SEQ ID NO: 23338 - DNA, 51 bp, Homo sapiens
gacgtgcacctggaaactgagatccaagtcatctggctgtaggtttcccta

SEQ ID NO: 23339 - DNA, 33 bp, Homo sapiens
gagtgagggttccataccatgttctgccatatt

SEQ ID NO: 23340 - DNA, 33 bp, Homo sapiens
gagtttgtagattgaacgttccagaagatggca

SEQ ID NO: 23341 - DNA, 33 bp, Homo sapiens
acccaagccaaaagccagagctcacagcaggca

SEQ ID NO: 23342 - DNA, 33 bp, Homo sapiens
taactccaccccaacacaatcagtaccataaag

SEQ ID NO: 23343 - DNA, 33 bp, Homo sapiens
aaggcgatggctctgcaaagatctgagaagacc

SEQ ID NO: 23344 - DNA, 33 bp, Homo sapiens
gacattgggctcagatcaaatgaattcagcctc

SEQ ID NO: 23345 - DNA, 33 bp, Homo sapiens
actggctgagcggagacggtgtatcccttaata

SEQ ID NO: 23346 - DNA, 51 bp, Homo sapiens
ctgtaaatagcttgtcacataggacaggatccgaaaaggagagttttgtgt

SEQ ID NO: 23347 - DNA, 51 bp, Homo sapiens
cttttccagctttctaaaagcactaatactgtaaaacttaggttatttttt

SEQ ID NO: 23348 - DNA, 33 bp, Homo sapiens
tactccagtctacacactgcttgatgttgttgt

SEQ ID NO: 23349 - DNA, 33 bp, Homo sapiens
agaccctatctcaaaacaagcatgagcaaaact

SEQ ID NO: 23350 - DNA, 33 bp, Homo sapiens
tggaagagatactgcacggtctgctgaacgaat

SEQ ID NO: 23351 - DNA, 33 bp, Homo sapiens
ctattccagcctttccaaaaatatatttcctgt

SEQ ID NO: 23352 - DNA, 33 bp, Homo sapiens
ccaacctaatacctagcagcacaaatctgatct

SEQ ID NO: 23353 - DNA, 33 bp, Homo sapiens
tgaaggaatgaatgaactgcaagtttaaatgtt

SEQ ID NO: 23354 - DNA, 33 bp, Homo sapiens
atgctgcacagcaaccactgcttggcgctgaga

SEQ ID NO: 23355 - DNA, 33 bp, Homo sapiens
ttagacctaattgtcaacataatgccatattaa

SEQ ID NO: 23356 - DNA, 33 bp, Homo sapiens
tgttcaaggcagcaaacccctggaccttgatgg

SEQ ID NO: 23357 - DNA, 33 bp, Homo sapiens
gcccagaaaaggtgcacataatttgcttccaat

SEQ ID NO: 23358 - DNA, 33 bp, Homo sapiens
gtcgttggacggtaagaacagtgcttgggtcgt

SEQ ID NO: 23359 - DNA, 33 bp, Homo sapiens
ggtccgagtcctaaaaatgccattccttgctgc

SEQ ID NO: 23360 - DNA, 51 bp, Homo sapiens
ctctgcctggttcctggagctgtcccgataaggttgccaagtggagcaaat

SEQ ID NO: 23361 - DNA, 33 bp, Homo sapiens
caatctttcccaggacaaatttcagtgtgtcac

SEQ ID NO: 23362 - DNA, 33 bp, Homo sapiens
ggatagctaaggtcaacaattcaaaactaacag

SEQ ID NO: 23363 - DNA, 33 bp, Homo sapiens
tgcacagatgaactgaggaatcaataaataagt

SEQ ID NO: 23364 - DNA, 33 bp, Homo sapiens
tgtgcactcaagttacaggttcttcaggctctg

SEQ ID NO: 23365 - DNA, 33 bp, Homo sapiens
gatgctggccccagaacagcaggaggaacaagg

SEQ ID NO: 23366 - DNA, 51 bp, Homo sapiens
gggattgtttttggcgctgggagaacagcctcctttctgctgaagttgcca

SEQ ID NO: 23367 - DNA, 33 bp, Homo sapiens
gacagcaaattttctaaaggctaggagtgttta

SEQ ID NO: 23368 - DNA, 33 bp, Homo sapiens
tttaggatgattgacaatggcagtacctggact

SEQ ID NO: 23369 - DNA, 51 bp, Homo sapiens
cctcctctagaacggctggcccaacacttttccagggctcagccatttctc

SEQ ID NO: 23370 - DNA, 33 bp, Homo sapiens
ctagtgtagtgatgtcgatgctgttaaatatgt

SEQ ID NO: 23371 - DNA, 33 bp, Homo sapiens
aaaaacttgaagaaaacgaggaagcaaaccatg

SEQ ID NO: 23372 - DNA, 33 bp, Homo sapiens
gagtgacagaaaatccaggaagtcccagaagga

SEQ ID NO: 23373 - DNA, 33 bp, Homo sapiens
cacctaaaatagcaaaaaacaaggggcatagtg

SEQ ID NO: 23374 - DNA, 33 bp, Homo sapiens
gcacactacttcaaaacgctgaaattaggtatt

SEQ ID NO: 23375 - DNA, 33 bp, Homo sapiens
gaaagtagggataacccactagtcgggaggtag

SEQ ID NO: 23376 - DNA, 33 bp, Homo sapiens
tgtgaaggcaggcacagaaatagttaagccaca

SEQ ID NO: 23377 - DNA, 33 bp, Homo sapiens
ggaaaaatgagatgtgaatgaaagaaagaaacg

SEQ ID NO: 23378 - DNA, 33 bp, Homo sapiens
ggatgtgacagaagccactgagcaatctcctcc

SEQ ID NO: 23379 - DNA, 33 bp, Homo sapiens
tattgtaaaaccaagcagaggacacagaatggc

SEQ ID NO: 23380 - DNA, 33 bp, Homo sapiens
taactcacctgagataataaacaggcaagcgct

SEQ ID NO: 23381 - DNA, 33 bp, Homo sapiens
attagcatcttaagccagcatcgttcatttgtc

SEQ ID NO: 23382 - DNA, 33 bp, Homo sapiens
gacacaggattacaaacgaaagcccacactgtg

SEQ ID NO: 23383 - DNA, 51 bp, Homo sapiens
cctcggtacaacctgaaaaagagacaaaaattggccatttctggtattttt

SEQ ID NO: 23384 - DNA, 33 bp, Homo sapiens
atctttaattgttggacggaaaagaaaggaacc

SEQ ID NO: 23385 - DNA, 33 bp, Homo sapiens
gaaaatcatcccaacaatgggtagttcctctct

SEQ ID NO: 23386 - DNA, 33 bp, Homo sapiens
gggacccctccccatacagaagtttctagaatg

SEQ ID NO: 23387 - DNA, 51 bp, Homo sapiens
caggtacattggaaagaacatgaaacttgaaataaaactcagttctgtgac

SEQ ID NO: 23388 - DNA, 33 bp, Homo sapiens
gatggttgtttggaaggcatattcatttcctag

SEQ ID NO: 23389 - DNA, 33 bp, Homo sapiens
gtatatgttttattcacgttctcggtggcgtat

SEQ ID NO: 23390 - DNA, 33 bp, Homo sapiens
gcacccccccttctaactgtgacaatccaaagt

SEQ ID NO: 23391 - DNA, 33 bp, Homo sapiens
ttggcctctggaatttcaaacctttcattggta

SEQ ID NO: 23392 - DNA, 33 bp, Homo sapiens
acagtgtttgaaggtgaagtacaatagaaggtg

SEQ ID NO: 23393 - DNA, 51 bp, Homo sapiens
ctttctccagcaaggaagaaagttacgcaaaagcacataatgaaaaacata

SEQ ID NO: 23394 - DNA, 33 bp, Homo sapiens
ctgagcttatgagtcccgataaaagtctacgga

SEQ ID NO: 23395 - DNA, 33 bp, Homo sapiens
aaggcaggaacaaagaaaacaaccttgcttcta

SEQ ID NO: 23396 - DNA, 33 bp, Homo sapiens
aactaactccaggagacagtttagaggctgtca

SEQ ID NO: 23397 - DNA, 33 bp, Homo sapiens
caaatacattgtagaccgagcagctgaaattgg

SEQ ID NO: 23398 - DNA, 33 bp, Homo sapiens
gggtctggcaatgcaacggattgaaaataaaaa

SEQ ID NO: 23399 - DNA, 33 bp, Homo sapiens
agcagggagaacagtgaatcagagctctgaaga

SEQ ID NO: 23400 - DNA, 33 bp, Homo sapiens
ttttctgagcttccaaatgatttgaggaatagg

SEQ ID NO: 23401 - DNA, 33 bp, Homo sapiens
aatctcatcccaaaacagcgtccaatctgccaa

SEQ ID NO: 23402 - DNA, 33 bp, Homo sapiens
gtttaaaatgcctcatgaaaagtgcatgagcat

SEQ ID NO: 23403 - DNA, 33 bp, Homo sapiens
catatcttgtaagaacaggtataaacgtctaca

SEQ ID NO: 23404 - DNA, 33 bp, Homo sapiens
gtgaagcctcatgaaccactttgtggaagcctt

SEQ ID NO: 23405 - DNA, 33 bp, Homo sapiens
cttcctttctattgtgaaaataccacccaatga

SEQ ID NO: 23406 - DNA, 33 bp, Homo sapiens
gatgggggacactgaccggtgttgagtagagga

SEQ ID NO: 23407 - DNA, 51 bp, Homo sapiens
ccctatgctggcaggatcaagccaaagctaagctctttaactttcaacact

SEQ ID NO: 23408 - DNA, 51 bp, Homo sapiens
gggtaaggcagcagtaataggtctgaaaagattaacagaggctgactctaa

SEQ ID NO: 23409 - DNA, 33 bp, Homo sapiens
tcatggccacctgctacggctcagggaaagcct

SEQ ID NO: 23410 - DNA, 33 bp, Homo sapiens
gcactcaatgaatgaaataacaaacattagtgg

SEQ ID NO: 23411 - DNA, 33 bp, Homo sapiens
acatccccccaactcaggctgtagttctgcagg

SEQ ID NO: 23412 - DNA, 33 bp, Homo sapiens
caggtgagaagctaacacatggaagagtcttta

SEQ ID NO: 23413 - DNA, 33 bp, Homo sapiens
tcaataaaccatcttaaatactgtgtgcaatac

SEQ ID NO: 23414 - DNA, 33 bp, Homo sapiens
tgctagttttccatcaatagacatcgttttaat

SEQ ID NO: 23415 - DNA, 33 bp, Homo sapiens
gtcctgaccaagtagacgtctgtgaaatgtaga

SEQ ID NO: 23416 - DNA, 33 bp, Homo sapiens
caatacctagaatagcacagggcacataggaag

SEQ ID NO: 23417 - DNA, 33 bp, Homo sapiens
tccctgatgaatattccaatactcttttcttag

SEQ ID NO: 23418 - DNA, 33 bp, Homo sapiens
aatctgaaaattctcaactgaagacaaagtaaa

SEQ ID NO: 23419 - DNA, 33 bp, Homo sapiens
gtgtctgtcaccttgacgttagttgtcacctta

SEQ ID NO: 23420 - DNA, 33 bp, Homo sapiens
agccctttcttgatcactctgtcaaaagaaccc

SEQ ID NO: 23421 - DNA, 33 bp, Homo sapiens
ttctgttttcttttccagacatcttgtgatagg

SEQ ID NO: 23422 - DNA, 33 bp, Homo sapiens
gaatttaggccagagacgccagattttcaagtt

SEQ ID NO: 23423 - DNA, 33 bp, Homo sapiens
ttgactttacaaatacactagaaaatctcagaa

SEQ ID NO: 23424 - DNA, 33 bp, Homo sapiens
tcactccaattgccccagatgaatattggtgct

SEQ ID NO: 23425 - DNA, 33 bp, Homo sapiens
tcacaaagctggacacaatacctcgtaagcctt

SEQ ID NO: 23426 - DNA, 33 bp, Homo sapiens
attgtatcattttctacgtatgccatgacagga

SEQ ID NO: 23427 - DNA, 33 bp, Homo sapiens
ttttagatggcatttcgctttgcccaaggaggt

SEQ ID NO: 23428 - DNA, 33 bp, Homo sapiens
atcccagtatccaagaagtactctgtgttgtac

SEQ ID NO: 23429 - DNA, 33 bp, Homo sapiens
tctacataggccaacccgccgtgtacatgtttc

SEQ ID NO: 23430 - DNA, 33 bp, Homo sapiens
gttcaatctggttacaactagcctatatgcatt

SEQ ID NO: 23431 - DNA, 33 bp, Homo sapiens
ctcttcttttgccaccaatccagttaaaaattg

SEQ ID NO: 23432 - DNA, 33 bp, Homo sapiens
gagagaactaaggacaaatgtaaggttgcttct

SEQ ID NO: 23433 - DNA, 33 bp, Homo sapiens
ctgtccaacggaagcaatagagcttttctcatg

SEQ ID NO: 23434 - DNA, 33 bp, Homo sapiens
agaagaggggctaagacggtacatgatgttatg

SEQ ID NO: 23435 - DNA, 33 bp, Homo sapiens
aggctaaaggcaatgaatagctctgccagaaaa

SEQ ID NO: 23436 - DNA, 33 bp, Homo sapiens
agtttatttgccaagcggataaatgtctaaatt

SEQ ID NO: 23437 - DNA, 33 bp, Homo sapiens
cacagaacacgatgtaagtcttcattggtgggg

SEQ ID NO: 23438 - DNA, 33 bp, Homo sapiens
cacaataaaccccaaacttgcaaggttctgggg

SEQ ID NO: 23439 - DNA, 33 bp, Homo sapiens
aaagcataggctggaaagagtcgaggtgcacag

SEQ ID NO: 23440 - DNA, 33 bp, Homo sapiens
acggccgacaacatcaaggtctggacggccgca

SEQ ID NO: 23441 - DNA, 33 bp, Homo sapiens
gcattgttataaaatcaaaacactgcaaaccac

SEQ ID NO: 23442 - DNA, 33 bp, Homo sapiens
aaaactcttgccttcaacccagaaaggcgaagc

SEQ ID NO: 23443 - DNA, 33 bp, Homo sapiens
gtgtgtggttgagatcactgactctgatatcag

SEQ ID NO: 23444 - DNA, 33 bp, Homo sapiens
gacagaccgtggacaaattaagtagcttggggc

SEQ ID NO: 23445 - DNA, 33 bp, Homo sapiens
catttggcaatggcaggagacactttggttgcc

SEQ ID NO: 23446 - DNA, 33 bp, Homo sapiens
ttgctgtacctgacatgaggctagaggtactga

SEQ ID NO: 23447 - DNA, 33 bp, Homo sapiens
caagggagggaaccagaaaaagcattatcatga

SEQ ID NO: 23448 - DNA, 33 bp, Homo sapiens
aaacattgggctggaaagaagtgaacccccagt

SEQ ID NO: 23449 - DNA, 33 bp, Homo sapiens
gctaaattccgactgcaaagcctttattagtgg

SEQ ID NO: 23450 - DNA, 33 bp, Homo sapiens
gactatgcaatgactacggtgtttgataaaata

SEQ ID NO: 23451 - DNA, 33 bp, Homo sapiens
agggtgtttagtagcaaccctggcctctaccca

SEQ ID NO: 23452 - DNA, 33 bp, Homo sapiens
cagtggtatgaacacaagccctggacatcctac

SEQ ID NO: 23453 - DNA, 33 bp, Homo sapiens
acagtccaaagtcaaacagaaccaatgttgtaa

SEQ ID NO: 23454 - DNA, 33 bp, Homo sapiens
cttgcttaaggccaacagataatggattggaat

SEQ ID NO: 23455 - DNA, 33 bp, Homo sapiens
aggggaggccagagaacgcttccttcgtctgtt

SEQ ID NO: 23456 - DNA, 33 bp, Homo sapiens
acatatacacccgcgaagagctggcgcagagga

SEQ ID NO: 23457 - DNA, 33 bp, Homo sapiens
tttccatccagggaaacgaacaagctgagtcac

SEQ ID NO: 23458 - DNA, 33 bp, Homo sapiens
acatggagctggaatccacatctaggtatttgg

SEQ ID NO: 23459 - DNA, 33 bp, Homo sapiens
tttccctctctgtaaacgggcagctcatacgag

SEQ ID NO: 23460 - DNA, 33 bp, Homo sapiens
tttctgcctgtggtcactactcctaagagcctg

SEQ ID NO: 23461 - DNA, 33 bp, Homo sapiens
aaggaaggctcgcggactagggcacagtcttgt

SEQ ID NO: 23462 - DNA, 33 bp, Homo sapiens
ggctggtctttaatcccgaactgaatcattgga

SEQ ID NO: 23463 - DNA, 33 bp, Homo sapiens
cccactgtggaaacaaggatggtcatataggga

SEQ ID NO: 23464 - DNA, 33 bp, Homo sapiens
cttggaaagataaacccaggctattttagagag

SEQ ID NO: 23465 - DNA, 33 bp, Homo sapiens
caaaccatgtaattccaaaagaaaggtctgaga

SEQ ID NO: 23466 - DNA, 33 bp, Homo sapiens
ttgggacattcgtgagcaaccaaatgccaggct

SEQ ID NO: 23467 - DNA, 33 bp, Homo sapiens
agttaacataggacccagaaattctactcctag

SEQ ID NO: 23468 - DNA, 33 bp, Homo sapiens
acccctgctgcactcacgccttgcgtccagcca

SEQ ID NO: 23469 - DNA, 33 bp, Homo sapiens
ctttgtcttttcttgccgactgactgggcgagt

SEQ ID NO: 23470 - DNA, 33 bp, Homo sapiens
taggtgctgagcaacccgaagagaagatgacag

SEQ ID NO: 23471 - DNA, 33 bp, Homo sapiens
atcaggcagaaacccacctgctcctgctcagtc

SEQ ID NO: 23472 - DNA, 33 bp, Homo sapiens
ctctcgggaatgtaaacgagtgaaggtcttgat

SEQ ID NO: 23473 - DNA, 33 bp, Homo sapiens
tgctcctgtcttccaaataacagttaaaagaaa

SEQ ID NO: 23474 - DNA, 33 bp, Homo sapiens
catcagttgggattcagtcttacatgttgtaaa

SEQ ID NO: 23475 - DNA, 33 bp, Homo sapiens
gataacttccaagagacgtgttgcttcctgtcc

SEQ ID NO: 23476 - DNA, 33 bp, Homo sapiens
attcaaataggggataaacgtaacaataagcag

SEQ ID NO: 23477 - DNA, 33 bp, Homo sapiens
tcaccattgccatgagcatccctttagcaagcg

SEQ ID NO: 23478 - DNA, 33 bp, Homo sapiens
cagccgcttcttacaaatcccaagaggccaaag

SEQ ID NO: 23479 - DNA, 33 bp, Homo sapiens
gggagtaagaggtggaagaaggtgagattctag

SEQ ID NO: 23480 - DNA, 33 bp, Homo sapiens
tgcaaaacccagaaataaccagcctggcattgt

SEQ ID NO: 23481 - DNA, 33 bp, Homo sapiens
ttacataccacagactaaacatcattcaatctc

SEQ ID NO: 23482 - DNA, 33 bp, Homo sapiens
gaatgggagtgagcagaacccagtctgatttta

SEQ ID NO: 23483 - DNA, 33 bp, Homo sapiens
agggaaagaaccccaactgctcaatgagtgtct

SEQ ID NO: 23484 - DNA, 33 bp, Homo sapiens
gttcaaaacagcctaaaagaccatactgaacac

SEQ ID NO: 23485 - DNA, 33 bp, Homo sapiens
aattaataaggagaacaagaacagccaacatta

SEQ ID NO: 23486 - DNA, 33 bp, Homo sapiens
taggtagtagtaggtacagtcagacaagaacag

SEQ ID NO: 23487 - DNA, 33 bp, Homo sapiens
aagctgttgagaggaaacctgcttatctctgat

SEQ ID NO: 23488 - DNA, 33 bp, Homo sapiens
agattgtcctgacaacagtatttcccttggttg

SEQ ID NO: 23489 - DNA, 33 bp, Homo sapiens
ggctgccatccagctgcaaatgcactagcactg

SEQ ID NO: 23490 - DNA, 33 bp, Homo sapiens
gccagtcagccaggagaaatacggacgccccca

SEQ ID NO: 23491 - DNA, 33 bp, Homo sapiens
ggtgacagtcccaaccagcctagaaagatgaat

SEQ ID NO: 23492 - DNA, 33 bp, Homo sapiens
atgcttcaagacataaactggatcatgttctcc

SEQ ID NO: 23493 - DNA, 33 bp, Homo sapiens
atgttctacaggttgacgattgggaggtatagc

SEQ ID NO: 23494 - DNA, 33 bp, Homo sapiens
gatctctacaatgggaactgtgacctcattcaa

SEQ ID NO: 23495 - DNA, 33 bp, Homo sapiens
gttgagtaagctctagcagttgccagcagtttt

SEQ ID NO: 23496 - DNA, 33 bp, Homo sapiens
acaccgtacatttaacacagggctttcgtatcc

SEQ ID NO: 23497 - DNA, 33 bp, Homo sapiens
gccaaatgactcagaaaggtcaactgcctgcct

SEQ ID NO: 23498 - DNA, 33 bp, Homo sapiens
cacattatccagatgacggctttggaaggcaga

SEQ ID NO: 23499 - DNA, 33 bp, Homo sapiens
cttaaagcctttcaaacgcctcaatggctgctc

SEQ ID NO: 23500 - DNA, 33 bp, Homo sapiens
gggtgttggccacagaaggatatataggccatg

SEQ ID NO: 23501 - DNA, 33 bp, Homo sapiens
accacaagaaccatccactccttgcatttggca

SEQ ID NO: 23502 - DNA, 33 bp, Homo sapiens
gtgctggcaacacagaaagagagtgagctatgt

SEQ ID NO: 23503 - DNA, 33 bp, Homo sapiens
gcttggttagcgtgcaagttaaatggaatgcgc

SEQ ID NO: 23504 - DNA, 33 bp, Homo sapiens
tcaaacatgggactcaccaaatataagcatgcc

SEQ ID NO: 23505 - DNA, 33 bp, Homo sapiens
gctggcaagtaatacactctccatgagcaccag

SEQ ID NO: 23506 - DNA, 33 bp, Homo sapiens
tgtgggtgtgagagtccacagggaactttagtt

SEQ ID NO: 23507 - DNA, 33 bp, Homo sapiens
caaaaaacacctggagcatttgtagcacagtgc

SEQ ID NO: 23508 - DNA, 33 bp, Homo sapiens
tattacaaatcctaaacgcgaggcactgtgttg

SEQ ID NO: 23509 - DNA, 33 bp, Homo sapiens
ggctgttgtttgtttaagttgctgtattccatc

SEQ ID NO: 23510 - DNA, 33 bp, Homo sapiens
tgctgttatactcttacccgttcatttgtggct

SEQ ID NO: 23511 - DNA, 33 bp, Homo sapiens
ccataggatcttcaaccaccctccattcttcca

SEQ ID NO: 23512 - DNA, 33 bp, Homo sapiens
caaatggtgtatcaacagttctgcacgtgtgac

SEQ ID NO: 23513 - DNA, 33 bp, Homo sapiens
gatcttttgtaacagacctctcttctcttgcct

SEQ ID NO: 23514 - DNA, 33 bp, Homo sapiens
caataagaagaatcagactcatggcggctgaag

SEQ ID NO: 23515 - DNA, 33 bp, Homo sapiens
tggtgaattattaccaaatattgattgaagcag

SEQ ID NO: 23516 - DNA, 33 bp, Homo sapiens
aggatgctggaatcccagaattgccttcccagt

SEQ ID NO: 23517 - DNA, 33 bp, Homo sapiens
atgtctgtttgccttccctaccacataagagct

SEQ ID NO: 23518 - DNA, 33 bp, Homo sapiens
ctagaccagggatgttcaaatgaaagaggttca

SEQ ID NO: 23519 - DNA, 33 bp, Homo sapiens
gctctgcattggctaacagatatgtatggggtc

SEQ ID NO: 23520 - DNA, 33 bp, Homo sapiens
atcacacacccagagacgacagagctggcccaa

SEQ ID NO: 23521 - DNA, 33 bp, Homo sapiens
attccattctgctttcaatattcagagtctaca

SEQ ID NO: 23522 - DNA, 33 bp, Homo sapiens
ctcatcgggtgagtcaaaatcagttcccagctc

SEQ ID NO: 23523 - DNA, 33 bp, Homo sapiens
ccaactgaaatcactacggatagctgtccttaa

SEQ ID NO: 23524 - DNA, 33 bp, Homo sapiens
ctggtgttggttccacaagaggctcagggacac

SEQ ID NO: 23525 - DNA, 33 bp, Homo sapiens
atagcagcttttttcacgctgccaaaagaagaa

SEQ ID NO: 23526 - DNA, 33 bp, Homo sapiens
cagcgaccacagaacacgaaaccaagcatgagg

SEQ ID NO: 23527 - DNA, 33 bp, Homo sapiens
caagatttgaactcagacatcccaacacgcaga

SEQ ID NO: 23528 - DNA, 33 bp, Homo sapiens
cagttttatgtaccacgcagaaagacaccgcca

SEQ ID NO: 23529 - DNA, 33 bp, Homo sapiens
cttgggcctcaactcaatcacatgtgtgaagtc

SEQ ID NO: 23530 - DNA, 33 bp, Homo sapiens
caagggctcttccgcaggggtatggtcacaggg

SEQ ID NO: 23531 - DNA, 33 bp, Homo sapiens
agggctcaatcgcataataagttctccatccat

SEQ ID NO: 23532 - DNA, 33 bp, Homo sapiens
ccttatcacaatctacactgaaataatacatca

SEQ ID NO: 23533 - DNA, 33 bp, Homo sapiens
tttgtgagctctggaactcgaagtcgacttgcc

SEQ ID NO: 23534 - DNA, 33 bp, Homo sapiens
tcaacatagcacatcaatacaacaatggctcat

SEQ ID NO: 23535 - DNA, 33 bp, Homo sapiens
ctaagcttgtggccatcataagggcaggaacct

SEQ ID NO: 23536 - DNA, 33 bp, Homo sapiens
tagaggaaggtctaccaaaatgaggcagaaatc

SEQ ID NO: 23537 - DNA, 33 bp, Homo sapiens
ccctgggctatgacaaagagttgtgactccctc

SEQ ID NO: 23538 - DNA, 33 bp, Homo sapiens
ggcttccctgaggagacggcacttcaattgaag

SEQ ID NO: 23539 - DNA, 33 bp, Homo sapiens
aaggatgtattaacaaagtgttcactgctgtgg

SEQ ID NO: 23540 - DNA, 33 bp, Homo sapiens
cttgagaagaaaaacaaaacaaggcgagtcaca

SEQ ID NO: 23541 - DNA, 33 bp, Homo sapiens
aatgcccagcagtacacacagtctctgttcagt

SEQ ID NO: 23542 - DNA, 33 bp, Homo sapiens
agaagctaagaaaaggacataaattagcaagtg

SEQ ID NO: 23543 - DNA, 33 bp, Homo sapiens
acctcttagtaacagcaccacaaggtcacattt

SEQ ID NO: 23544 - DNA, 33 bp, Homo sapiens
ggatgttgcttgttgaaaaatgttgttacaaac

SEQ ID NO: 23545 - DNA, 33 bp, Homo sapiens
taggtcaggttctgtcaagtgaccagcagaagc

SEQ ID NO: 23546 - DNA, 33 bp, Homo sapiens
gtattagcaacatcacagacattttcttattta

SEQ ID NO: 23547 - DNA, 33 bp, Homo sapiens
tgggctctgaaaggaacgcaggaatggtgaaga

SEQ ID NO: 23548 - DNA, 33 bp, Homo sapiens
aacaaacaaaaactgagctctctttagattcag

SEQ ID NO: 23549 - DNA, 33 bp, Homo sapiens
tcggttctgttctaaacgctagggatgcaaaag

SEQ ID NO: 23550 - DNA, 33 bp, Homo sapiens
ttccagtctgacatctaagagcaagcattgtga

SEQ ID NO: 23551 - DNA, 33 bp, Homo sapiens
cctgcccattttcaaggctctggccaagtctag

SEQ ID NO: 23552 - DNA, 33 bp, Homo sapiens
ggcttgcctgctaaccaaaacttaccacttccg

SEQ ID NO: 23553 - DNA, 33 bp, Homo sapiens
aacctcctcattctacacactatctccatgagt

SEQ ID NO: 23554 - DNA, 33 bp, Homo sapiens
caaagtttaaattctgcagcatttaggattttg

SEQ ID NO: 23555 - DNA, 33 bp, Homo sapiens
ctcacagttagcaacactggtataagaccccag

SEQ ID NO: 23556 - DNA, 33 bp, Homo sapiens
ttcataacataacaccaattcagaaagacctac

SEQ ID NO: 23557 - DNA, 33 bp, Homo sapiens
agtctgtagagtcaaaattcatgagttattatt

SEQ ID NO: 23558 - DNA, 33 bp, Homo sapiens
ggaatgcaatacacaaattaagtcacactgcag

SEQ ID NO: 23559 - DNA, 33 bp, Homo sapiens
ccagactcctggatgacgagcaaggtcttctcc

SEQ ID NO: 23560 - DNA, 33 bp, Homo sapiens
actcttggttttctacactacctttgacaacca

SEQ ID NO: 23561 - DNA, 33 bp, Homo sapiens
aactgtctcaggctaacggaaagaaaaatcagg

SEQ ID NO: 23562 - DNA, 33 bp, Homo sapiens
atgaccataaaaccaacacatttaggagatttg

SEQ ID NO: 23563 - DNA, 33 bp, Homo sapiens
agtggttgaaggggacacattagaagctacttc

SEQ ID NO: 23564 - DNA, 33 bp, Homo sapiens
caggccccaggaacacaaaacctgacaaacagg

SEQ ID NO: 23565 - DNA, 33 bp, Homo sapiens
tccagtgcccaccaaacgcggacacgtgagaga

SEQ ID NO: 23566 - DNA, 33 bp, Homo sapiens
tgagaattcagtgaaaacagagatgtggactgt

SEQ ID NO: 23567 - DNA, 33 bp, Homo sapiens
gaggagcagtgggaacaaagaagaggtttccag

SEQ ID NO: 23568 - DNA, 33 bp, Homo sapiens
ggtacagaacaagtgacgtcatttaatcctgct

SEQ ID NO: 23569 - DNA, 33 bp, Homo sapiens
gactgcaatgtgatggaattgtgtatgtattta

SEQ ID NO: 23570 - DNA, 33 bp, Homo sapiens
ccatgacctcaagtcaaacaaggccacaaggct

SEQ ID NO: 23571 - DNA, 33 bp, Homo sapiens
gaaatgcgactataacgagaactcagctggctt

SEQ ID NO: 23572 - DNA, 33 bp, Homo sapiens
aattgaatggtgtaagcctccttctaactcaaa

SEQ ID NO: 23573 - DNA, 33 bp, Homo sapiens
aagatgtcacattactgagcctttaaaacctga

SEQ ID NO: 23574 - DNA, 33 bp, Homo sapiens
caatgagtgaccttgcgcgaaggagaaagaccc

SEQ ID NO: 23575 - DNA, 33 bp, Homo sapiens
tattcctctcaacaaccgtctcaggaagaggca

SEQ ID NO: 23576 - DNA, 33 bp, Homo sapiens
aaggcaggctgctagccgaattccctcttcttc

SEQ ID NO: 23577 - DNA, 33 bp, Homo sapiens
agtgctctgttgacaaagagtgtgaggctgctg

SEQ ID NO: 23578 - DNA, 33 bp, Homo sapiens
aaacacggatcaatccccaatacagaaggtcca

SEQ ID NO: 23579 - DNA, 33 bp, Homo sapiens
actagtcacttccaaacgtgggtttcctctttg

SEQ ID NO: 23580 - DNA, 33 bp, Homo sapiens
caatacaccaagtacccgcgtacctaccgccta

SEQ ID NO: 23581 - DNA, 33 bp, Homo sapiens
cttttaaaaatcatgacagtccagggatctaga

SEQ ID NO: 23582 - DNA, 33 bp, Homo sapiens
actagaagaacatccgacaaaattttggatgca

SEQ ID NO: 23583 - DNA, 51 bp, Homo sapiens
catgcagcacgggaccatcagttccacttcagccatctttgatatgatgag

SEQ ID NO: 23584 - DNA, 51 bp, Homo sapiens
atgagtgaagttagagacatgagaacttattatgtacttgaaactgcaagt

SEQ ID NO: 23585 - DNA, 33 bp, Homo sapiens
ttgacttgaataatagacccaaggcaagaggag

SEQ ID NO: 23586 - DNA, 33 bp, Homo sapiens
cagcttaaaagacaaaggtgcaaagaagcctct

SEQ ID NO: 23587 - DNA, 33 bp, Homo sapiens
gaggaggcaggtcctaaagttcacacagtgtta

SEQ ID NO: 23588 - DNA, 33 bp, Homo sapiens
tcccatcccatatacaaaagcagaaatgggatg

SEQ ID NO: 23589 - DNA, 33 bp, Homo sapiens
tttattagatttccacaactgactcatctttct

SEQ ID NO: 23590 - DNA, 33 bp, Homo sapiens
atgccatggtgagtcacgagttaactgtttctt

SEQ ID NO: 23591 - DNA, 33 bp, Homo sapiens
cctcactctctgggaagcgtcatccttagacag

SEQ ID NO: 23592 - DNA, 33 bp, Homo sapiens
tcacatagctaggccaagatttttttccattct

SEQ ID NO: 23593 - DNA, 33 bp, Homo sapiens
ggactcagggtaaagacaagctgccctgaaata

SEQ ID NO: 23594 - DNA, 33 bp, Homo sapiens
ttttcacaccatccaccaggaatgttgtgcaaa

SEQ ID NO: 23595 - DNA, 33 bp, Homo sapiens
cagggcacaggatgccgcagggctgaactccag

SEQ ID NO: 23596 - DNA, 33 bp, Homo sapiens
aagaactgtctggtggcacagcctgggagctct

SEQ ID NO: 23597 - DNA, 33 bp, Homo sapiens
ggttcaggagccttcaactataaagtgtcagaa

SEQ ID NO: 23598 - DNA, 33 bp, Homo sapiens
gaggcaagactgaggccactgcagaagtgggca

SEQ ID NO: 23599 - DNA, 33 bp, Homo sapiens
ccacctttccttcagaacacttggcgccagttg

SEQ ID NO: 23600 - DNA, 33 bp, Homo sapiens
ctcatctgggttaacaatagcctgcaaacatac

SEQ ID NO: 23601 - DNA, 33 bp, Homo sapiens
ctaattcacacaataactcagagtgaatgcacc

SEQ ID NO: 23602 - DNA, 33 bp, Homo sapiens
caaagcagataaacacagccaaagacaaaatag

SEQ ID NO: 23603 - DNA, 33 bp, Homo sapiens
gaattattgtaaccagcctactcaatttatata

SEQ ID NO: 23604 - DNA, 33 bp, Homo sapiens
ttttattcagtgtagacgaaaagagactaaaat

SEQ ID NO: 23605 - DNA, 33 bp, Homo sapiens
tatcttgttgcacaagcatttattggctacctt

SEQ ID NO: 23606 - DNA, 33 bp, Homo sapiens
aattaaacaatcagcactcattaactatacttt

SEQ ID NO: 23607 - DNA, 33 bp, Homo sapiens
gccagtgaaaagtgaaacctctgaaggcagact

SEQ ID NO: 23608 - DNA, 33 bp, Homo sapiens
ggaaggctgagaataaacagtagcatgtgggta

SEQ ID NO: 23609 - DNA, 33 bp, Homo sapiens
agtagatgcttttgaccgccactcaaggtcaaa

SEQ ID NO: 23610 - DNA, 33 bp, Homo sapiens
catcttggctgcggacccttcattggaaatgga

SEQ ID NO: 23611 - DNA, 33 bp, Homo sapiens
taggaagatgaaatgactcagggcagcatctca

SEQ ID NO: 23612 - DNA, 33 bp, Homo sapiens
gtgtacaaattgaaaaagactggaaatgggcac

SEQ ID NO: 23613 - DNA, 33 bp, Homo sapiens
ggaaaagtaggacttacagggtggcagtgctcc

SEQ ID NO: 23614 - DNA, 33 bp, Homo sapiens
ctccactcaacagatacaggaaagaagcccaga

SEQ ID NO: 23615 - DNA, 33 bp, Homo sapiens
tggaagacaggacaaaactggaaaagctggatg

SEQ ID NO: 23616 - DNA, 33 bp, Homo sapiens
gctctgtgtaatcaaaatggggctgagaagagg

SEQ ID NO: 23617 - DNA, 33 bp, Homo sapiens
ccagaccaacctgggacgtgcctacctggcttt

SEQ ID NO: 23618 - DNA, 33 bp, Homo sapiens
agcagttgaagatcaccagcagctgccttgaga

SEQ ID NO: 23619 - DNA, 33 bp, Homo sapiens
tgatcctcacgctcctaaaattcaaacagattc

SEQ ID NO: 23620 - DNA, 33 bp, Homo sapiens
taaataagaaagcaccccaaatgagcaactgaa

SEQ ID NO: 23621 - DNA, 33 bp, Homo sapiens
tcaggagaggcgccctgaattccatgccgggtc

SEQ ID NO: 23622 - DNA, 33 bp, Homo sapiens
gaagaagtgattaaccagagagaaatgtgtagg

SEQ ID NO: 23623 - DNA, 33 bp, Homo sapiens
aaggagatcctatgaaacttgggatttgtgaaa

SEQ ID NO: 23624 - DNA, 33 bp, Homo sapiens
ggaataatgtcttcaaatccttcccattcaaag

SEQ ID NO: 23625 - DNA, 33 bp, Homo sapiens
atccgtccagatgcacgccttgtagtattagtt

SEQ ID NO: 23626 - DNA, 33 bp, Homo sapiens
aaggaaatagaaaatcactattccagcctggac

SEQ ID NO: 23627 - DNA, 33 bp, Homo sapiens
ttcaggggctgaacaacagccttgctccttttg

SEQ ID NO: 23628 - DNA, 33 bp, Homo sapiens
ccaatgattccatttacgaccgtgggcaaaacc

SEQ ID NO: 23629 - DNA, 33 bp, Homo sapiens
tgttgggcacttaaacaaccctcctagcaccct

SEQ ID NO: 23630 - DNA, 33 bp, Homo sapiens
cccccatttttcactccgactaggtgttcttgc

SEQ ID NO: 23631 - DNA, 33 bp, Homo sapiens
tcgctgaatagtaagaaaggtctgagcatggtg

SEQ ID NO: 23632 - DNA, 33 bp, Homo sapiens
ttcatcagggaaaaaacaggtcaagtacacaaa

SEQ ID NO: 23633 - DNA, 33 bp, Homo sapiens
aacaagggtcccattgccaatcagtccaacaca

SEQ ID NO: 23634 - DNA, 33 bp, Homo sapiens
tcacctttctggaacccgaagaagaaggggatg

SEQ ID NO: 23635 - DNA, 33 bp, Homo sapiens
atctctcagagtgtagcatttaattcactgccc

SEQ ID NO: 23636 - DNA, 33 bp, Homo sapiens
cattcttttttgagccacattcctttaagcttt

SEQ ID NO: 23637 - DNA, 33 bp, Homo sapiens
caaacaccagcctttacgtatggtagtctcaga

SEQ ID NO: 23638 - DNA, 33 bp, Homo sapiens
catcctcacatcaccaatgagcttcagggaaag

SEQ ID NO: 23639 - DNA, 33 bp, Homo sapiens
ccccaactccactctcaattcaggcagggcttc

SEQ ID NO: 23640 - DNA, 33 bp, Homo sapiens
tacctaatctacccaaagtcatcgaactaataa

SEQ ID NO: 23641 - DNA, 33 bp, Homo sapiens
aattggagccaaataaactttcagttagcttgg

SEQ ID NO: 23642 - DNA, 33 bp, Homo sapiens
cctccaggcacagtaaaagagagaacctccagg

SEQ ID NO: 23643 - DNA, 33 bp, Homo sapiens
agcttaggctcttaaccacttctacccatagcc

SEQ ID NO: 23644 - DNA, 33 bp, Homo sapiens
tcaacagttatgaaacagcagaaccaagatgac

SEQ ID NO: 23645 - DNA, 33 bp, Homo sapiens
gaaggcactagtatatcaacttcctattgccac

SEQ ID NO: 23646 - DNA, 33 bp, Homo sapiens
ctgtcaagccaactaacgttcctattgacttaa

SEQ ID NO: 23647 - DNA, 33 bp, Homo sapiens
gtagggctgccaagagaagcaaaagatggccct

SEQ ID NO: 23648 - DNA, 33 bp, Homo sapiens
atgtttgtatctgttaaccaatctctctttagc

SEQ ID NO: 23649 - DNA, 33 bp, Homo sapiens
caataggcctcttaacaagacaaatgaatgggg

SEQ ID NO: 23650 - DNA, 33 bp, Homo sapiens
ttattgctttattacagtgactagaccttccag

SEQ ID NO: 23651 - DNA, 51 bp, Homo sapiens
tcagtaaatgaaccaagccatgttacgtgaatttattgttaatatctgaat

SEQ ID NO: 23652 - DNA, 33 bp, Homo sapiens
ggccctcttctgtgccaatttcacacacattaa

SEQ ID NO: 23653 - DNA, 33 bp, Homo sapiens
atacacccctccacaacacagtcataccgacac

SEQ ID NO: 23654 - DNA, 33 bp, Homo sapiens
gaggcagtaactacgaagggatccatttttctc

SEQ ID NO: 23655 - DNA, 51 bp, Homo sapiens
tacaactgtacactcaagaaatatacatccatcatctatgacactgaattc

SEQ ID NO: 23656 - DNA, 33 bp, Homo sapiens
cagctagaaagtttacagagctagaattcagac

SEQ ID NO: 23657 - DNA, 51 bp, Homo sapiens
gatgtcttccaaaacgcacttgtaccgatagattaagatctacatcagaaa

SEQ ID NO: 23658 - DNA, 33 bp, Homo sapiens
taaatgaaagcaaaacaatgcaaatatgatcat

SEQ ID NO: 23659 - DNA, 33 bp, Homo sapiens
gcaagaatgactgacacgtgaatccaacttcca

SEQ ID NO: 23660 - DNA, 33 bp, Homo sapiens
gccctaccagaaacagaaggatgaattgggggg

SEQ ID NO: 23661 - DNA, 33 bp, Homo sapiens
aataccttcagtgccacgaggtaaatccaaaga

SEQ ID NO: 23662 - DNA, 33 bp, Homo sapiens
ataaaatagaaaagcaactcataggaaaacttc

SEQ ID NO: 23663 - DNA, 33 bp, Homo sapiens
ttctaagtaccctgaaagtaagtacctgagaga

SEQ ID NO: 23664 - DNA, 33 bp, Homo sapiens
agcatctattatgatgacacttaaatgggtgct

SEQ ID NO: 23665 - DNA, 33 bp, Homo sapiens
aaatggcctgagctaactggactgtgggagctc

SEQ ID NO: 23666 - DNA, 33 bp, Homo sapiens
tttttacgtttatccacgtgaccattttttcat

SEQ ID NO: 23667 - DNA, 33 bp, Homo sapiens
tccaccaaaatcataaactcacttccaatgaag

SEQ ID NO: 23668 - DNA, 33 bp, Homo sapiens
atagaatacaacaaagaaagactgggccttgca

SEQ ID NO: 23669 - DNA, 33 bp, Homo sapiens
tgaagagagagaggaaaatttgaaccaccactg

SEQ ID NO: 23670 - DNA, 33 bp, Homo sapiens
tttgtgttctatttcaacctaacatgaagggag

SEQ ID NO: 23671 - DNA, 33 bp, Homo sapiens
ccatccccatccagaactggcacgtgctccagc

SEQ ID NO: 23672 - DNA, 33 bp, Homo sapiens
tggatgggatggctgacggctcttagaaatgcc

SEQ ID NO: 23673 - DNA, 33 bp, Homo sapiens
ggagcgtttctgggaccgagtagaggagacact

SEQ ID NO: 23674 - DNA, 33 bp, Homo sapiens
tttaattgtgctagaaagtcactgggatttgac

SEQ ID NO: 23675 - DNA, 51 bp, Homo sapiens
agcatagattcaatgtagtctcaataaaaaactcagtgggttctggcaagc

SEQ ID NO: 23676 - DNA, 33 bp, Homo sapiens
tgggatcctgggaaacaccattatcagacagtg

SEQ ID NO: 23677 - DNA, 33 bp, Homo sapiens
gcctgcatcaaaatcccattcccaggatagaaa

SEQ ID NO: 23678 - DNA, 33 bp, Homo sapiens
tttcctgaacaggtcaacgcccatttgtccata

SEQ ID NO: 23679 - DNA, 33 bp, Homo sapiens
tgggtgtcgggcaaagaaagctgctatttgtga

SEQ ID NO: 23680 - DNA, 33 bp, Homo sapiens
agagcacgaggtcattaaaagagattaggcctg

SEQ ID NO: 23681 - DNA, 33 bp, Homo sapiens
atgtgaagctaaacacaagttcagttagagaat

SEQ ID NO: 23682 - DNA, 33 bp, Homo sapiens
ggaagttctcatggacaatactgtgaaatatgt

SEQ ID NO: 23683 - DNA, 33 bp, Homo sapiens
atgcttgagtgctgtaaagagaaaagagaagta

SEQ ID NO: 23684 - DNA, 33 bp, Homo sapiens
cccatctgctaaaagaaaagaacaatttctgac

SEQ ID NO: 23685 - DNA, 51 bp, Homo sapiens
aagtgatctcccttatgtatatgaccgcacatgtcactccattgttaataa

SEQ ID NO: 23686 - DNA, 33 bp, Homo sapiens
ccccctctatcaagataaagataagtcaagatc

SEQ ID NO: 23687 - DNA, 33 bp, Homo sapiens
tccagtgatcctaacactcaagatcacagcctg

SEQ ID NO: 23688 - DNA, 33 bp, Homo sapiens
taatgaggataaattgcagaaatgaggataatg

SEQ ID NO: 23689 - DNA, 33 bp, Homo sapiens
aggaggggaccaatacgccagcctttaaaaagt

SEQ ID NO: 23690 - DNA, 33 bp, Homo sapiens
gctgggtgggctgatacgcagacagaaatagtc

SEQ ID NO: 23691 - DNA, 33 bp, Homo sapiens
gaatctctcctcaggaacctcataccctgcata

SEQ ID NO: 23692 - DNA, 33 bp, Homo sapiens
aactcataaccttaacactttgattccttctca

SEQ ID NO: 23693 - DNA, 33 bp, Homo sapiens
acctgaaggacgtaacaataacaataaacatag

SEQ ID NO: 23694 - DNA, 33 bp, Homo sapiens
gcccagcatctgaacacacttcttctacgggga

SEQ ID NO: 23695 - DNA, 51 bp, Homo sapiens
ctcaggggtccccagccagttctaacgtatctgaaagcctgtgacccaggt

SEQ ID NO: 23696 - DNA, 33 bp, Homo sapiens
gaagaagtcaggaggccccgcttcgcgctaacg

SEQ ID NO: 23697 - DNA, 33 bp, Homo sapiens
atagacagtctcaaacacgggaatggattgtgc

SEQ ID NO: 23698 - DNA, 33 bp, Homo sapiens
actagggaatcttcagccaagtcgtctctctat

SEQ ID NO: 23699 - DNA, 33 bp, Homo sapiens
tcttatagagtgttacagggattaaatgccatg

SEQ ID NO: 23700 - DNA, 33 bp, Homo sapiens
gcctttgagccaaagacactagagaatagcaat

SEQ ID NO: 23701 - DNA, 33 bp, Homo sapiens
cctgttggaccctatgccacgggagccaggacc

SEQ ID NO: 23702 - DNA, 33 bp, Homo sapiens
atatggttgtacttgtcaagagccttagaaatg

SEQ ID NO: 23703 - DNA, 33 bp, Homo sapiens
gcagagccagagttcaaaccggtatctgttgga

SEQ ID NO: 23704 - DNA, 33 bp, Homo sapiens
gggatcaggaaggtgggactctgtttttatgag

SEQ ID NO: 23705 - DNA, 33 bp, Homo sapiens
catttactgagtgccaacaacgtgcaaggaagt

SEQ ID NO: 23706 - DNA, 33 bp, Homo sapiens
accggttcctggaaaaacgtcactttcttcaac

SEQ ID NO: 23707 - DNA, 33 bp, Homo sapiens
cctgacttactcaccactgcatccctagcacct

SEQ ID NO: 23708 - DNA, 33 bp, Homo sapiens
actgcaggtaatttacaaatggaatttctctat

SEQ ID NO: 23709 - DNA, 51 bp, Homo sapiens
atgagctatactgggggaacatgccaactcaggctgatcctacagtactaa

SEQ ID NO: 23710 - DNA, 33 bp, Homo sapiens
atatggtagacaacacaatcatctttttacaga

SEQ ID NO: 23711 - DNA, 33 bp, Homo sapiens
aattttgaaccagaggaaagtgaaagttagcta

SEQ ID NO: 23712 - DNA, 33 bp, Homo sapiens
ccatatcagtgtgtcacgttttttgtttttttt

SEQ ID NO: 23713 - DNA, 33 bp, Homo sapiens
aaatgtcttcctatacctaccactacttgaggc

SEQ ID NO: 23714 - DNA, 33 bp, Homo sapiens
aacaaacatttgctgaatacctatcatataata

SEQ ID NO: 23715 - DNA, 33 bp, Homo sapiens
taagctgaaactacctaaatgttctgagtctga

SEQ ID NO: 23716 - DNA, 33 bp, Homo sapiens
ccaaaaggacatagaaacaatgaaaccccagta

SEQ ID NO: 23717 - DNA, 33 bp, Homo sapiens
ttgttcttgctctaaacctttttaataaacatt

SEQ ID NO: 23718 - DNA, 33 bp, Homo sapiens
ttgtgtgatgtgagtgcatagtttgaatgggct

SEQ ID NO: 23719 - DNA, 33 bp, Homo sapiens
caaggctgaggccacagacttgcattccaggca

SEQ ID NO: 23720 - DNA, 33 bp, Homo sapiens
cttcatgagtcgatacaaagggtgagaatggaa

SEQ ID NO: 23721 - DNA, 33 bp, Homo sapiens
atagccagtaaagaaccgcactgaggagccagc

SEQ ID NO: 23722 - DNA, 33 bp, Homo sapiens
gtgtcagccactgttccaggtagtagaggatat

SEQ ID NO: 23723 - DNA, 33 bp, Homo sapiens
agaaaagattatgaaaaccttctgtaccagata

SEQ ID NO: 23724 - DNA, 33 bp, Homo sapiens
ttgttcattatacctacgctttttatatgcctg

SEQ ID NO: 23725 - DNA, 33 bp, Homo sapiens
aagcttctaaagtaaacgttgcatagtaaatat

SEQ ID NO: 23726 - DNA, 33 bp, Homo sapiens
ggggctagaatgatgacagctggtagaaggtgg

SEQ ID NO: 23727 - DNA, 33 bp, Homo sapiens
ggggctttaagcagaaaagtggcatatctagta

SEQ ID NO: 23728 - DNA, 33 bp, Homo sapiens
gggaaacagattcagacagagggaggaacaggc

SEQ ID NO: 23729 - DNA, 33 bp, Homo sapiens
tcattcccaggcgcacaacccttgtatagtgtg

SEQ ID NO: 23730 - DNA, 33 bp, Homo sapiens
acatatcttgaaaactgactgtatgccaagtgt

SEQ ID NO: 23731 - DNA, 33 bp, Homo sapiens
taccttacgtaagatcacctagctgagaattgg

SEQ ID NO: 23732 - DNA, 51 bp, Homo sapiens
aaattttgagttttagagagagttaagagttaatgaagtcaaacagaggga

SEQ ID NO: 23733 - DNA, 33 bp, Homo sapiens
taataatcgtgaataacgtggaattgctgtgat

SEQ ID NO: 23734 - DNA, 33 bp, Homo sapiens
ctacttgacttcaaaacatactataaattatag

SEQ ID NO: 23735 - DNA, 51 bp, Homo sapiens
gtgttctgattaaatcataaagggaataaaaatggcataatgggaacatcg

SEQ ID NO: 23736 - DNA, 51 bp, Homo sapiens
cactattttagcttctgttttctgccagtgagtaaattaaggaatgaactc

SEQ ID NO: 23737 - DNA, 51 bp, Homo sapiens
acatgtcttttgctctgggaccaggagttgtgcagcccatccttttctcaa

SEQ ID NO: 23738 - DNA, 33 bp, Homo sapiens
agataaagctgtaatgcagaaaatggtttggcc

SEQ ID NO: 23739 - DNA, 51 bp, Homo sapiens
cttatgcacttaagtagatccatcaatgaactagcctgaaggactttccta

SEQ ID NO: 23740 - DNA, 33 bp, Homo sapiens
ttgtcacagggccatgaacgcgtctgctttctc

SEQ ID NO: 23741 - DNA, 33 bp, Homo sapiens
atttggtatagcgcaaaccacgggtatagtggt

SEQ ID NO: 23742 - DNA, 33 bp, Homo sapiens
cctaacgcttgctagccccttctcaaatcttgc

SEQ ID NO: 23743 - DNA, 51 bp, Homo sapiens
gggtgagtttgtggttctcactggactagcatctatacagacaaactttgc

SEQ ID NO: 23744 - DNA, 33 bp, Homo sapiens
tgttctgcaaactacacgggctgatgattgcct

SEQ ID NO: 23745 - DNA, 33 bp, Homo sapiens
ttaagaggatgaaaccaatatcctgactaaggg

SEQ ID NO: 23746 - DNA, 51 bp, Homo sapiens
ttgctttggacccagctgcataatccaagatcctctcctttaattccattt

SEQ ID NO: 23747 - DNA, 33 bp, Homo sapiens
gctgtaaatcaaggcaactgtgacatcatggtg

SEQ ID NO: 23748 - DNA, 33 bp, Homo sapiens
gtgtcatcccagcatactaaagaaactctgaat

SEQ ID NO: 23749 - DNA, 33 bp, Homo sapiens
aaatgtgaactacccagcaccatgaactgaact

SEQ ID NO: 23750 - DNA, 33 bp, Homo sapiens
cttaatttccaaataaatctatctgtaacacct

SEQ ID NO: 23751 - DNA, 33 bp, Homo sapiens
taccctttcctcttgtaaaccatgagtaacaaa

SEQ ID NO: 23752 - DNA, 33 bp, Homo sapiens
aaatctgaaataaatacggcaaattactaacat

SEQ ID NO: 23753 - DNA, 33 bp, Homo sapiens
gatattttaggtagtaagggggagaaagtatta

SEQ ID NO: 23754 - DNA, 33 bp, Homo sapiens
gagctacagccactaacgctggtccctcagtca

SEQ ID NO: 23755 - DNA, 51 bp, Homo sapiens
tagaaattaaataatagagacagaaccaagtttaagaatcttgtattaaat

SEQ ID NO: 23756 - DNA, 51 bp, Homo sapiens
ctgttgaactcttttcttctctgtgattccaagtgttttgattatatacat

SEQ ID NO: 23757 - DNA, 51 bp, Homo sapiens
tattataatttcctttaatcagcaacaatgactaaaacatgtgatctaaaa

SEQ ID NO: 23758 - DNA, 33 bp, Homo sapiens
aagttagtaaaagctcaagaaaatgttaccttt

SEQ ID NO: 23759 - DNA, 33 bp, Homo sapiens
actagtttggaaaaaaatacgaatctttatatt

SEQ ID NO: 23760 - DNA, 33 bp, Homo sapiens
tctgtatctccagcaacctgaatgtaacaggtc

SEQ ID NO: 23761 - DNA, 33 bp, Homo sapiens
tttagaattgctactgcatggtgataataagaa

SEQ ID NO: 23762 - DNA, 33 bp, Homo sapiens
ggagctggatctggaaaaatgaatgagatttaa

SEQ ID NO: 23763 - DNA, 33 bp, Homo sapiens
acagttttgattgccacggagaagggggatgct

SEQ ID NO: 23764 - DNA, 33 bp, Homo sapiens
atgttttgtttctccaactactttctctgaagg

SEQ ID NO: 23765 - DNA, 33 bp, Homo sapiens
gaaaattacagaggcaatagaagaaaacggaat

SEQ ID NO: 23766 - DNA, 33 bp, Homo sapiens
gatctgttttactttaccctgcccagacttagc

SEQ ID NO: 23767 - DNA, 33 bp, Homo sapiens
tttgagagaagactgaactactaactgagaagt

SEQ ID NO: 23768 - DNA, 33 bp, Homo sapiens
cttgaccatcacagaacctaagtaaatggatag

SEQ ID NO: 23769 - DNA, 33 bp, Homo sapiens
gggggctaaaccgacaagtgtgaggattgtaaa

SEQ ID NO: 23770 - DNA, 33 bp, Homo sapiens
ataggctcattgggcactcatgtagtatccctc

SEQ ID NO: 23771 - DNA, 33 bp, Homo sapiens
ccctactgcacttcccactggtcttattcttct

SEQ ID NO: 23772 - DNA, 33 bp, Homo sapiens
tctctcacttacacacaggtctgtttctacctg

SEQ ID NO: 23773 - DNA, 33 bp, Homo sapiens
cctttttggaagtggacgagaatggtgatttca

SEQ ID NO: 23774 - DNA, 33 bp, Homo sapiens
aaccagggagccttccacattctcgagtcaagt

SEQ ID NO: 23775 - DNA, 33 bp, Homo sapiens
gatactcagcatcttcgtcgtctcctatcactc

SEQ ID NO: 23776 - DNA, 33 bp, Homo sapiens
aacctgcagttccaaacaacaataaattccaag

SEQ ID NO: 23777 - DNA, 51 bp, Homo sapiens
ttctaggggtacagttaaggtctcacggatgttcaactaactaaatgagaa

SEQ ID NO: 23778 - DNA, 33 bp, Homo sapiens
acaaaatggagtaagaccgtgagtattcttaga

SEQ ID NO: 23779 - DNA, 33 bp, Homo sapiens
aatggatccctctcaccgtaaggagatacaaac

SEQ ID NO: 23780 - DNA, 33 bp, Homo sapiens
caagcccacaagggaactgaagtaccagctgcc

SEQ ID NO: 23781 - DNA, 33 bp, Homo sapiens
cacaggctcagatagacagaagtattagaatat

SEQ ID NO: 23782 - DNA, 33 bp, Homo sapiens
ttacacttccttatggacagtttctattaatta

SEQ ID NO: 23783 - DNA, 33 bp, Homo sapiens
gaatgccctctcctggaaagctaggaatgttga

SEQ ID NO: 23784 - DNA, 33 bp, Homo sapiens
tgaccatcttgcagacaaagaatctgtggtctc

SEQ ID NO: 23785 - DNA, 33 bp, Homo sapiens
gaagtatgaaggaagaatcaagatacagttaga

SEQ ID NO: 23786 - DNA, 33 bp, Homo sapiens
gatgatctaaaaccagcacagcaaatacacatg

SEQ ID NO: 23787 - DNA, 33 bp, Homo sapiens
gtgggtttggtggaaaacgagcaaagcaccttg

SEQ ID NO: 23788 - DNA, 33 bp, Homo sapiens
ctattgggaggattaaatcagataacgtatgta

SEQ ID NO: 23789 - DNA, 33 bp, Homo sapiens
aaaattggtaagccaccatcccagaaagagctc

SEQ ID NO: 23790 - DNA, 33 bp, Homo sapiens
aagctgactgataaaaccgggcctaagactaat

SEQ ID NO: 23791 - DNA, 33 bp, Homo sapiens
gatgatgttatgaacaataatgcttaccattta

SEQ ID NO: 23792 - DNA, 33 bp, Homo sapiens
ctgttagtggaggaaaattaaccagatgaccta

SEQ ID NO: 23793 - DNA, 33 bp, Homo sapiens
cgcatatttccctgaaacagatacatagataac

SEQ ID NO: 23794 - DNA, 33 bp, Homo sapiens
actaggaatatttctcactctagttcaaaaaac

SEQ ID NO: 23795 - DNA, 33 bp, Homo sapiens
atttcttagtaataccaactattgctaagtgac

SEQ ID NO: 23796 - DNA, 33 bp, Homo sapiens
gttaaataaatgccagccaaaagtaactcacct

SEQ ID NO: 23797 - DNA, 33 bp, Homo sapiens
ccctggggagtggacaagtatttctagttaaaa

SEQ ID NO: 23798 - DNA, 33 bp, Homo sapiens
ttctgaagttactgaaatagttgagccccagta

SEQ ID NO: 23799 - DNA, 51 bp, Homo sapiens
tgacaagttaatgtttaattttttacgatagagcaaaggtactttaaattc

SEQ ID NO: 23800 - DNA, 33 bp, Homo sapiens
ttacatatagattggaactgaaatcaagatgga

SEQ ID NO: 23801 - DNA, 33 bp, Homo sapiens
caaatcactcataagcagatgaggtttccgtga

SEQ ID NO: 23802 - DNA, 33 bp, Homo sapiens
ttcttgttatagagaaaactgttcaagctaccc

SEQ ID NO: 23803 - DNA, 33 bp, Homo sapiens
gtatgttggacaagaacgacttgtgatcatctt

SEQ ID NO: 23804 - DNA, 33 bp, Homo sapiens
tctaacttcttaaggtaaatgcatggctcatgt

SEQ ID NO: 23805 - DNA, 33 bp, Homo sapiens
ttccttctttaagaaaatgttgtgcccctagtt

SEQ ID NO: 23806 - DNA, 33 bp, Homo sapiens
tctcagtatcagaatacaagccaagtctggcct

SEQ ID NO: 23807 - DNA, 33 bp, Homo sapiens
gtcacctacagcttcacagaaaaattttttaca

SEQ ID NO: 23808 - DNA, 33 bp, Homo sapiens
cagagaactgtttcctcaaacgatccacttgcc

SEQ ID NO: 23809 - DNA, 33 bp, Homo sapiens
attatgatgtcagccacatttggtagtgtaatt

SEQ ID NO: 23810 - DNA, 33 bp, Homo sapiens
aagaattattgcatcaagagttaagcacctttt

SEQ ID NO: 23811 - DNA, 33 bp, Homo sapiens
tttaacagatcattccaaactgggtaggttttt

SEQ ID NO: 23812 - DNA, 33 bp, Homo sapiens
tgtttaagccacccaacccgactaagcattcct

SEQ ID NO: 23813 - DNA, 33 bp, Homo sapiens
ttataaacagctaatcagaacctctatttgtca

SEQ ID NO: 23814 - DNA, 33 bp, Homo sapiens
actgcacctggcctacaataattttgaagacaa

SEQ ID NO: 23815 - DNA, 33 bp, Homo sapiens
gttcctgttgataaaaggcttagatcagtgctc

SEQ ID NO: 23816 - DNA, 33 bp, Homo sapiens
tttaaggtcatttagcagataatgccctcctat

SEQ ID NO: 23817 - DNA, 33 bp, Homo sapiens
ggttactgtgtcgaaagggaagcggtgacgttc

SEQ ID NO: 23818 - DNA, 33 bp, Homo sapiens
atgtcaaattggtggacagatagacacatagat

SEQ ID NO: 23819 - DNA, 33 bp, Homo sapiens
tggagatgaactcagaactcaaggctcagctca

SEQ ID NO: 23820 - DNA, 33 bp, Homo sapiens
ttagcttgatgcacaaagtcctccatgcttggc

SEQ ID NO: 23821 - DNA, 33 bp, Homo sapiens
aaatagaactactaccactattacttctaccac

SEQ ID NO: 23822 - DNA, 33 bp, Homo sapiens
tgtatattgtgacaatcaattatattttgaaat

SEQ ID NO: 23823 - DNA, 33 bp, Homo sapiens
actgtatggttatcacggcctgaagaaatatta

SEQ ID NO: 23824 - DNA, 33 bp, Homo sapiens
tgccacttgcaactgactattgcagagaatttt

SEQ ID NO: 23825 - DNA, 33 bp, Homo sapiens
gcagtgtaaaataagcacaaggcccaggacttt

SEQ ID NO: 23826 - DNA, 33 bp, Homo sapiens
agggcattgaataccacgataaaggctttatac

SEQ ID NO: 23827 - DNA, 33 bp, Homo sapiens
tgattgccttttatgaccttgattcctagaagc

SEQ ID NO: 23828 - DNA, 33 bp, Homo sapiens
gatctcaaattacttgacaaagatggactttta

SEQ ID NO: 23829 - DNA, 33 bp, Homo sapiens
tcacagacaattctccacttcacgtctgccctt

SEQ ID NO: 23830 - DNA, 33 bp, Homo sapiens
tgtttctatttctgtaaaattggtgataatatc

SEQ ID NO: 23831 - DNA, 33 bp, Homo sapiens
ataatatgtacaatgaactccatgaaacgagtt

SEQ ID NO: 23832 - DNA, 33 bp, Homo sapiens
agatgatgaatgcaacggataaaatgtgtgggt

SEQ ID NO: 23833 - DNA, 51 bp, Homo sapiens
taatagaatgtgatgcaagtaaaaaaatgtattttcaacatttcaaatatt

SEQ ID NO: 23834 - DNA, 51 bp, Homo sapiens
tctctctatacagtctgctgcccgaagttagaatttagagacagcatctag

SEQ ID NO: 23835 - DNA, 51 bp, Homo sapiens
gtcattcacacattctaacagcagaagttactaaaacactttaaccagagg

SEQ ID NO: 23836 - DNA, 33 bp, Homo sapiens
atcttagagcttaaaactgaaattccaaaataa

SEQ ID NO: 23837 - DNA, 33 bp, Homo sapiens
aacagcaagatacctacacaaaaaagcttacac

SEQ ID NO: 23838 - DNA, 33 bp, Homo sapiens
ttgccacaatgtgaaccgtccctttcccaggtg

SEQ ID NO: 23839 - DNA, 33 bp, Homo sapiens
tttcaaaagtcctaaaacagagaagaaggttga

SEQ ID NO: 23840 - DNA, 33 bp, Homo sapiens
gttctacagtatggcacggagatgggtaaaaaa

SEQ ID NO: 23841 - DNA, 33 bp, Homo sapiens
gcccatgctcttcaagacttagatacttattct

SEQ ID NO: 23842 - DNA, 33 bp, Homo sapiens
gatcatcatggtaaaagtatcttatcagtcaat

SEQ ID NO: 23843 - DNA, 33 bp, Homo sapiens
actgtactgttcactaacatattcctaagtcct

SEQ ID NO: 23844 - DNA, 33 bp, Homo sapiens
gtgatcgatatggtaccattcctcagggttatc

SEQ ID NO: 23845 - DNA, 33 bp, Homo sapiens
gaaatggcagagactaacagaagtgatttacca

SEQ ID NO: 23846 - DNA, 33 bp, Homo sapiens
cagcaaccacagggaccgaaccctgcgaagcta

SEQ ID NO: 23847 - DNA, 33 bp, Homo sapiens
tttggtatttgtaacagcaggtctaaaacaagt

SEQ ID NO: 23848 - DNA, 33 bp, Homo sapiens
caactgcaaaagctagacacaagattttaagat

SEQ ID NO: 23849 - DNA, 51 bp, Homo sapiens
acgtataattttgagtatattcttcactaacatttaacaaaatatatttta

SEQ ID NO: 23850 - DNA, 33 bp, Homo sapiens
gggtgcaagtctcaagccttacatgtggtgttg

SEQ ID NO: 23851 - DNA, 33 bp, Homo sapiens
tcctcagactcctgtacggtgcaattgaccact

SEQ ID NO: 23852 - DNA, 33 bp, Homo sapiens
ttgaggtcctctgatacagtgtaccatcccctg

SEQ ID NO: 23853 - DNA, 33 bp, Homo sapiens
gaactaatgtcatagaagaattttctgtagtcc

SEQ ID NO: 23854 - DNA, 33 bp, Homo sapiens
aataagagaagaagaaatcttggaatgacaggg

SEQ ID NO: 23855 - DNA, 33 bp, Homo sapiens
tatcaactcaaccataataggatggggactggg

SEQ ID NO: 23856 - DNA, 33 bp, Homo sapiens
gtcctcctatcatctccccatcctctactattc

SEQ ID NO: 23857 - DNA, 33 bp, Homo sapiens
atcagctttctctaaactgacctcttacaaact

SEQ ID NO: 23858 - DNA, 33 bp, Homo sapiens
ctactaaagttcttaccggtgggagagagtagt

SEQ ID NO: 23859 - DNA, 51 bp, Homo sapiens
ctactcatgtttttgatacgaataaaccagcgacatgctttctaaaatctt

SEQ ID NO: 23860 - DNA, 33 bp, Homo sapiens
ctcttcaaataaggacactgagaggttggccgt

SEQ ID NO: 23861 - DNA, 33 bp, Homo sapiens
tccatacaaactacttaaaggtagaaatattat

SEQ ID NO: 23862 - DNA, 51 bp, Homo sapiens
tctgactccaaagtttgtacttttaactattgtgctataattattaatgaa

SEQ ID NO: 23863 - DNA, 33 bp, Homo sapiens
accctgccaggtcactcagggatttcataacag

SEQ ID NO: 23864 - DNA, 33 bp, Homo sapiens
atttccctcatgcgaaaggaggtggataattag

SEQ ID NO: 23865 - DNA, 51 bp, Homo sapiens
ctttaggcccctgttatacacagagaagacaagatatttgttgtttactca

SEQ ID NO: 23866 - DNA, 51 bp, Homo sapiens
tagaagaaattaattgagtaaaaaacaatctgctgttcatttgcctaaaat

SEQ ID NO: 23867 - DNA, 51 bp, Homo sapiens
ttttctaaaagattaatgtggctgaagtatttgtttcatgttaaggaaaag

SEQ ID NO: 23868 - DNA, 51 bp, Homo sapiens
tactggcaggtcttagaatactaaacgtgattttcgaaaaagttactttta

SEQ ID NO: 23869 - DNA, 33 bp, Homo sapiens
agattatgcagcaaaacaagaagaagactaagt

SEQ ID NO: 23870 - DNA, 33 bp, Homo sapiens
aaataccacatttagaaaaactgcgccatgcaa

SEQ ID NO: 23871 - DNA, 51 bp, Homo sapiens
atctataacacaacaatacatttctaactcttttcttggatatatgagtga

SEQ ID NO: 23872 - DNA, 51 bp, Homo sapiens
caggtatgggatggaagaaggagcacgagtaaggtcaagcactaaaacatg

SEQ ID NO: 23873 - DNA, 33 bp, Homo sapiens
tgttatatgttgaagaaaacaaaaataataata

SEQ ID NO: 23874 - DNA, 33 bp, Homo sapiens
ctctttggagcaatgaaagttttggaaatacat

SEQ ID NO: 23875 - DNA, 51 bp, Homo sapiens
aaatgcaagcagtttagaatagaagactaatcagaagatagagaagctttt

SEQ ID NO: 23876 - DNA, 51 bp, Homo sapiens
cgacctgtaatccaatgctatcttgcatggacaataaaaaacacgccagca

SEQ ID NO: 23877 - DNA, 33 bp, Homo sapiens
cttaggtgagtcataaagatgaaataggcccag

SEQ ID NO: 23878 - DNA, 33 bp, Homo sapiens
ggagaccaacatagaaagagggtgattcctgga

SEQ ID NO: 23879 - DNA, 33 bp, Homo sapiens
ttggaagaagtaacaacgtaagtaccaactacc

SEQ ID NO: 23880 - DNA, 33 bp, Homo sapiens
agagaaacagtaactcaattcctttaagtgcaa

SEQ ID NO: 23881 - DNA, 33 bp, Homo sapiens
agctgcaagttttacacagagtatttccttcag

SEQ ID NO: 23882 - DNA, 33 bp, Homo sapiens
ggcttttacctgctcaaaagagaactctgcatt

SEQ ID NO: 23883 - DNA, 33 bp, Homo sapiens
caagtgggagctaaacaaagggaatatgtagac

SEQ ID NO: 23884 - DNA, 33 bp, Homo sapiens
gagtgtctatggtagacagaaaggaagttgtac

SEQ ID NO: 23885 - DNA, 51 bp, Homo sapiens
tgatagagagaacactggactgaaactcttaagtatacttctgctaattca

SEQ ID NO: 23886 - DNA, 51 bp, Homo sapiens
ctttaagatttttaatgggatcagaagaaaattcggtacttaatcacttcc

SEQ ID NO: 23887 - DNA, 33 bp, Homo sapiens
gctgaaatccaatatcaaaaccttaaactctct

SEQ ID NO: 23888 - DNA, 33 bp, Homo sapiens
tgccacacagtaacaaataacttacatatcttt

SEQ ID NO: 23889 - DNA, 33 bp, Homo sapiens
acacacaggtctgtgacagcttgtttctgctta

SEQ ID NO: 23890 - DNA, 33 bp, Homo sapiens
catattcgtggcaggtaaaaagattgctgtatc

SEQ ID NO: 23891 - DNA, 33 bp, Homo sapiens
tagacacaaatcttgacgaacacttcagccctg

SEQ ID NO: 23892 - DNA, 33 bp, Homo sapiens
tgaccatgtatactcacattactgtttcagtct

SEQ ID NO: 23893 - DNA, 33 bp, Homo sapiens
ataatttttagatcacaagctatatcaaatgtg

SEQ ID NO: 23894 - DNA, 33 bp, Homo sapiens
agcaagctggactttaacatttcaaagaaggca

SEQ ID NO: 23895 - DNA, 33 bp, Homo sapiens
ttctttgctcatttacacctaaaatcatgaatc

SEQ ID NO: 23896 - DNA, 33 bp, Homo sapiens
ctctttgacccaggaagtatgtgaatttcagga

SEQ ID NO: 23897 - DNA, 33 bp, Homo sapiens
cctttgcactttgttccatgtaacatattttcc

SEQ ID NO: 23898 - DNA, 33 bp, Homo sapiens
cttttgtatccattaaactgtcatgaatataaa

SEQ ID NO: 23899 - DNA, 51 bp, Homo sapiens
atccctagaagattccattcaaataacagggtccattcaaacaatcaacat

SEQ ID NO: 23900 - DNA, 33 bp, Homo sapiens
tagtatccacagtacccgccactcttgaattaa

SEQ ID NO: 23901 - DNA, 51 bp, Homo sapiens
ttagtacctgcaacattataggataaaggtcatactagcaggtgatgaata

SEQ ID NO: 23902 - DNA, 51 bp, Homo sapiens
gttagatgcccatctctggactcatcaattgtggccaaaacaacggggccc

SEQ ID NO: 23903 - DNA, 33 bp, Homo sapiens
gtgggtgtgcacttgccagtttgctccaggtcc

SEQ ID NO: 23904 - DNA, 33 bp, Homo sapiens
aactgtgagtcaattgaacttatttcctttata

SEQ ID NO: 23905 - DNA, 33 bp, Homo sapiens
aactattgggtaaaaaatttgcctatattaggc

SEQ ID NO: 23906 - DNA, 33 bp, Homo sapiens
gactatgggacaagcacatggtcgcaggacttt

SEQ ID NO: 23907 - DNA, 33 bp, Homo sapiens
gtgcttaaccctactccaccctgtctgctacca

SEQ ID NO: 23908 - DNA, 33 bp, Homo sapiens
cctctcctgaccttaaaagcactgatcagtagt

SEQ ID NO: 23909 - DNA, 33 bp, Homo sapiens
cattcatgttgctttaaaggaattgcaagtagc

SEQ ID NO: 23910 - DNA, 33 bp, Homo sapiens
cacactaacagatacccggagttaagacttcac

SEQ ID NO: 23911 - DNA, 33 bp, Homo sapiens
atttcagctttgtcttaaaagaaggagtaggat

SEQ ID NO: 23912 - DNA, 33 bp, Homo sapiens
ctcaacttagatgggaaaaaagcctctttatgg

SEQ ID NO: 23913 - DNA, 33 bp, Homo sapiens
ccaggtgtgcatttaaggttgcaactcaaagag

SEQ ID NO: 23914 - DNA, 33 bp, Homo sapiens
cccaccctttagaataagtatgagccacagtca

SEQ ID NO: 23915 - DNA, 33 bp, Homo sapiens
tataggttatccagaaactacgatttgaaagat

SEQ ID NO: 23916 - DNA, 33 bp, Homo sapiens
tcttagctttcacgtaagtcatttctgtccaat

SEQ ID NO: 23917 - DNA, 33 bp, Homo sapiens
cccatcgtcacgaccacgctgttcttcactcca

SEQ ID NO: 23918 - DNA, 33 bp, Homo sapiens
aatctgctttgtggctcaaatttttgcttcaag

SEQ ID NO: 23919 - DNA, 33 bp, Homo sapiens
tcatcttctcccacaaatctgtctttagcggaa

SEQ ID NO: 23920 - DNA, 33 bp, Homo sapiens
tcaagggctcatcaaacgctcagatgtgtccct

SEQ ID NO: 23921 - DNA, 33 bp, Homo sapiens
aggttccttgtaaaaacttgccatcggccaggt

SEQ ID NO: 23922 - DNA, 33 bp, Homo sapiens
gcatccccgtgatgaacaaatcatgcgcattct

SEQ ID NO: 23923 - DNA, 33 bp, Homo sapiens
cagacccagtgctagacgtagatcccaatcaca

SEQ ID NO: 23924 - DNA, 33 bp, Homo sapiens
atttcatcatctggcacattagttgctggcaag

SEQ ID NO: 23925 - DNA, 33 bp, Homo sapiens
actcaaaatttagtacaatgcttctacttggaa

SEQ ID NO: 23926 - DNA, 33 bp, Homo sapiens
aaaaggaattggcgaaaatttagcataaaagat

SEQ ID NO: 23927 - DNA, 33 bp, Homo sapiens
gtcaattgttactaaacggaaaaaaatgcagag

SEQ ID NO: 23928 - DNA, 33 bp, Homo sapiens
taactgcatgaacccaaataaaaaaaactgtag

SEQ ID NO: 23929 - DNA, 33 bp, Homo sapiens
gcagaggccaataacccgagtaaagagacgaag

SEQ ID NO: 23930 - DNA, 33 bp, Homo sapiens
atggtgaatttctaaccggaatactatgcgatc

SEQ ID NO: 23931 - DNA, 33 bp, Homo sapiens
tggtactactgacatacgacagaagtgatattg

SEQ ID NO: 23932 - DNA, 33 bp, Homo sapiens
ggagaaaaagcttctgacaatattcaacaccct

SEQ ID NO: 23933 - DNA, 33 bp, Homo sapiens
acattatgaagacagcaaagagttaaaggtggt

SEQ ID NO: 23934 - DNA, 33 bp, Homo sapiens
catgggttcaccaggccagacttactcctcagt

SEQ ID NO: 23935 - DNA, 51 bp, Homo sapiens
agacatttcacattgaaatacttgaaccaaattagcacgagggaactggtg

SEQ ID NO: 23936 - DNA, 33 bp, Homo sapiens
gaccgtgtctctttaaatattaggaatcacctt

SEQ ID NO: 23937 - DNA, 33 bp, Homo sapiens
cacctaattattttcacgcaggagtaacacatt

SEQ ID NO: 23938 - DNA, 33 bp, Homo sapiens
tggctttatggtagccactgttacgccataaac

SEQ ID NO: 23939 - DNA, 33 bp, Homo sapiens
gaagatttttatgagactatggggaacactttc

SEQ ID NO: 23940 - DNA, 33 bp, Homo sapiens
gtcagaaaaggatccacggagatataattgcag

SEQ ID NO: 23941 - DNA, 33 bp, Homo sapiens
tagttcccatcactcacaggacaattatttgct

SEQ ID NO: 23942 - DNA, 33 bp, Homo sapiens
gaagctgataatagaaagatgtctcggaaggag

SEQ ID NO: 23943 - DNA, 33 bp, Homo sapiens
aacaaatatctgctagaaatgaagaagataaaa

SEQ ID NO: 23944 - DNA, 33 bp, Homo sapiens
ttgcttttttagacaacttatctggacctgttt

SEQ ID NO: 23945 - DNA, 33 bp, Homo sapiens
ctaggttgcatttcctcaaatcagagtatacac

SEQ ID NO: 23946 - DNA, 51 bp, Homo sapiens
ttattgctaatagaatatcgctattattcaatgtggcaaaaaatctatttt

SEQ ID NO: 23947 - DNA, 33 bp, Homo sapiens
ctttcatcttcctaccgaattcatcaaggcaga

SEQ ID NO: 23948 - DNA, 33 bp, Homo sapiens
acactctggtctaatcacatcactaagttttgt

SEQ ID NO: 23949 - DNA, 33 bp, Homo sapiens
tgtgacaggtctcatacgttgtattttgattac

SEQ ID NO: 23950 - DNA, 33 bp, Homo sapiens
cagacactctcaatcaatgatgtggtccacaaa

SEQ ID NO: 23951 - DNA, 33 bp, Homo sapiens
tttatgtattacagaaaaagctgtgcacagatt

SEQ ID NO: 23952 - DNA, 33 bp, Homo sapiens
atctttacatgactacaaataaagcaatttatt

SEQ ID NO: 23953 - DNA, 33 bp, Homo sapiens
aagtaagaaccagggacgttgagcttttgcaat

SEQ ID NO: 23954 - DNA, 33 bp, Homo sapiens
cttcttgcaataatccggcactaatagattcat

SEQ ID NO: 23955 - DNA, 33 bp, Homo sapiens
ggctaaaactgacataccaatttatggttacca

SEQ ID NO: 23956 - DNA, 33 bp, Homo sapiens
ctcaggtcagctgctaaatggagttttcttccc

SEQ ID NO: 23957 - DNA, 33 bp, Homo sapiens
taatttgacagaatcaatagggagaggagtcac

SEQ ID NO: 23958 - DNA, 33 bp, Homo sapiens
tgggctttgggtacaactaggcagctgtgctca

SEQ ID NO: 23959 - DNA, 33 bp, Homo sapiens
tgttaagatcctaacacgaaaggcaatggtatt

SEQ ID NO: 23960 - DNA, 33 bp, Homo sapiens
atctcccacatctaagcctgcactcaccagcaa

SEQ ID NO: 23961 - DNA, 33 bp, Homo sapiens
gaggctgtaggaaacacgaaacacaacacagca

SEQ ID NO: 23962 - DNA, 33 bp, Homo sapiens
aatttttcttcactggaagatgggcatcaggct

SEQ ID NO: 23963 - DNA, 33 bp, Homo sapiens
aatgaattttccaacaacataaatgagcttgga

SEQ ID NO: 23964 - DNA, 33 bp, Homo sapiens
catttattgagtagggaagcagccgaaaatgga

SEQ ID NO: 23965 - DNA, 33 bp, Homo sapiens
gtagccatgtctgaaacgacatcttatgtttga

SEQ ID NO: 23966 - DNA, 33 bp, Homo sapiens
aaagcaggctaatggaatacataaaagacttgg

SEQ ID NO: 23967 - DNA, 33 bp, Homo sapiens
attcctgtttagattacaaaaagcctcctaaag

SEQ ID NO: 23968 - DNA, 33 bp, Homo sapiens
aattagctattcaatacggctgatagaaatctg

SEQ ID NO: 23969 - DNA, 33 bp, Homo sapiens
gaagatagctaacccaggattgaaaccagaatt

SEQ ID NO: 23970 - DNA, 33 bp, Homo sapiens
tgcttgtgagcattgcacttgggcaggctgaaa

SEQ ID NO: 23971 - DNA, 33 bp, Homo sapiens
tctgtgtacaaaatagaacccacaaaaatattg

SEQ ID NO: 23972 - DNA, 33 bp, Homo sapiens
ttgggccacacacaacagatttgccataaatag

SEQ ID NO: 23973 - DNA, 33 bp, Homo sapiens
tgtgtgctaattgatacgtagggaagcagtttc

SEQ ID NO: 23974 - DNA, 33 bp, Homo sapiens
attcgtgcgtataaaccaggtgctattcatcag

SEQ ID NO: 23975 - DNA, 33 bp, Homo sapiens
gaacttcaaaattccaaggtgcaaatatattgt

SEQ ID NO: 23976 - DNA, 33 bp, Homo sapiens
caaacttctaatggtcaaagcatcaattttgtc

SEQ ID NO: 23977 - DNA, 33 bp, Homo sapiens
actctatctctctgacacagaagttacgaatgc

SEQ ID NO: 23978 - DNA, 33 bp, Homo sapiens
agagatctcagctagactattgcaacatcttcc

SEQ ID NO: 23979 - DNA, 51 bp, Homo sapiens
ccagttggatatcttttaacattaccaccaccaacatgaacaattaagcct

SEQ ID NO: 23980 - DNA, 33 bp, Homo sapiens
tgaaccttcttgttggaatatgattttatttct

SEQ ID NO: 23981 - DNA, 33 bp, Homo sapiens
ggctcccaccatccaccatcaacttatttactt

SEQ ID NO: 23982 - DNA, 51 bp, Homo sapiens
caatctcatcagatctttataaacaactctgtaggatgaatattttatttc

SEQ ID NO: 23983 - DNA, 33 bp, Homo sapiens
gtctaccctctgataaactccacattgaccacc

SEQ ID NO: 23984 - DNA, 33 bp, Homo sapiens
tcttaaatacaaccaaacctctttaagttggca

SEQ ID NO: 23985 - DNA, 51 bp, Homo sapiens
ttactcggtattcctttgagagagaatagagatgagaaagtctaataaaac

SEQ ID NO: 23986 - DNA, 33 bp, Homo sapiens
tgctttgaaattaatacaagaggcaggatctca

SEQ ID NO: 23987 - DNA, 33 bp, Homo sapiens
gtttttctttagcttccacagttctagcagaat

SEQ ID NO: 23988 - DNA, 33 bp, Homo sapiens
cagaattaaagcacacactcaataggatagcaa

SEQ ID NO: 23989 - DNA, 33 bp, Homo sapiens
tcaagactttcacggcaatgaaatgaaaaaata

SEQ ID NO: 23990 - DNA, 33 bp, Homo sapiens
gtgggagatacagaacagtaaacaggcaattat

SEQ ID NO: 23991 - DNA, 33 bp, Homo sapiens
acaagaaatggcatcacaactaaagtcctgcaa

SEQ ID NO: 23992 - DNA, 33 bp, Homo sapiens
ttactaaacttctggactatggggactagtatt

SEQ ID NO: 23993 - DNA, 33 bp, Homo sapiens
aagatgtgagcaaaaaacttccctctcaaaagt

SEQ ID NO: 23994 - DNA, 33 bp, Homo sapiens
gaatgagtgaaagtcaatatgaaaacctctcag

SEQ ID NO: 23995 - DNA, 33 bp, Homo sapiens
aactaggttttgaataaatttctgtgcagatgt

SEQ ID NO: 23996 - DNA, 33 bp, Homo sapiens
aaactgcttgggaaaaaggatgaaagaaaacaa

SEQ ID NO: 23997 - DNA, 33 bp, Homo sapiens
tagaaaaaatggcatccgaacaaaagttgcttc

SEQ ID NO: 23998 - DNA, 33 bp, Homo sapiens
tcccatcatagcaaaagtgttaaattgtcatca

SEQ ID NO: 23999 - DNA, 33 bp, Homo sapiens
ttttaaatagcaatcaactacttaaagatacac

SEQ ID NO: 24000 - DNA, 33 bp, Homo sapiens
tctgaatatcagggaaagtgactcttactggtg

SEQ ID NO: 24001 - DNA, 33 bp, Homo sapiens
tgcttgagtagccctaagagtagaatatttcac

SEQ ID NO: 24002 - DNA, 33 bp, Homo sapiens
gtccagcgtccaactaaaatgtatgaagtatgt

SEQ ID NO: 24003 - DNA, 33 bp, Homo sapiens
acttgagcctccccacactatacatctcgtgtt

SEQ ID NO: 24004 - DNA, 33 bp, Homo sapiens
cctcatgtcctaaatccattcaatgtcaaatcc

SEQ ID NO: 24005 - DNA, 33 bp, Homo sapiens
aactgttagatcacagcaagaacagtaagctct

SEQ ID NO: 24006 - DNA, 51 bp, Homo sapiens
ttactgtaaagattatatgaagggacgttatataaaatttagcacagactc

SEQ ID NO: 24007 - DNA, 51 bp, Homo sapiens
aaaatggaagcaactgtgtgttcaacagagaatttgttaactaagttatga

SEQ ID NO: 24008 - DNA, 51 bp, Homo sapiens
attttacttatgaggaattagaagacgatccagagaagaacatttgagctg

SEQ ID NO: 24009 - DNA, 33 bp, Homo sapiens
tcatcagaatggcccacgagtgctcttattgag

SEQ ID NO: 24010 - DNA, 33 bp, Homo sapiens
agggatctgcacgtgaactaagcctggacaatc

SEQ ID NO: 24011 - DNA, 33 bp, Homo sapiens
tggatggcaggactaactaatgcaaagctggct

SEQ ID NO: 24012 - DNA, 33 bp, Homo sapiens
acacacagatacttgactaaaaataaatattta

SEQ ID NO: 24013 - DNA, 33 bp, Homo sapiens
gggttccacaacagaaagacaagtagaaaaggc

SEQ ID NO: 24014 - DNA, 33 bp, Homo sapiens
aactggtgttgaaagtaacatagactaaaaatg

SEQ ID NO: 24015 - DNA, 33 bp, Homo sapiens
agaaagcaaagtgaccaaaatgcagtgggttca

SEQ ID NO: 24016 - DNA, 33 bp, Homo sapiens
ggtttctcttgtgataataaggcagatgctgac

SEQ ID NO: 24017 - DNA, 33 bp, Homo sapiens
ttcttttctatgcataagtcacctaaaacaaaa

SEQ ID NO: 24018 - DNA, 33 bp, Homo sapiens
aatcttacttactcttcaaagcttagttcaaat

SEQ ID NO: 24019 - DNA, 33 bp, Homo sapiens
catggtcttgacaccacgttacatgaaatatga

SEQ ID NO: 24020 - DNA, 51 bp, Homo sapiens
ttcaacacacctattcagtgcttcagtcaaatggaataattctacagtacc

SEQ ID NO: 24021 - DNA, 51 bp, Homo sapiens
cagaaccatctattttgtccttcaaagtactctaatttctttttcctttaa

SEQ ID NO: 24022 - DNA, 51 bp, Homo sapiens
ttctattattaagaacatggaagaaatctattattaagtacaatcaagaag

SEQ ID NO: 24023 - DNA, 33 bp, Homo sapiens
ctgccttgctataggaatcaccttggagcctca

SEQ ID NO: 24024 - DNA, 51 bp, Homo sapiens
aagtgtaggtcactctgacagtatacgttaggacctgaactactgggggtt

SEQ ID NO: 24025 - DNA, 33 bp, Homo sapiens
gtccaagaggcccagaagtctgaatatccactg

SEQ ID NO: 24026 - DNA, 33 bp, Homo sapiens
actcgtggagaggttacagaagcatctttatga

SEQ ID NO: 24027 - DNA, 33 bp, Homo sapiens
gaagcaatgtcttgagcagtcactagatggtgg

SEQ ID NO: 24028 - DNA, 33 bp, Homo sapiens
catagcctgtttaacccaatcccggattttcat

SEQ ID NO: 24029 - DNA, 33 bp, Homo sapiens
acctcctggccttgaaaatgtcttgctttcatg

SEQ ID NO: 24030 - DNA, 33 bp, Homo sapiens
atgtatcgtttcatccccaatgatttcagtact

SEQ ID NO: 24031 - DNA, 33 bp, Homo sapiens
acacagataaatatgtcaaggttaacaaatgct

SEQ ID NO: 24032 - DNA, 33 bp, Homo sapiens
ttttatccagtaattcaattttttcacctttga

SEQ ID NO: 24033 - DNA, 33 bp, Homo sapiens
ctctggtttaataaagccaagaaaggttgtctt

SEQ ID NO: 24034 - DNA, 33 bp, Homo sapiens
actgatttctcttaaacgactgatccagagctt

SEQ ID NO: 24035 - DNA, 33 bp, Homo sapiens
gaaaatactcagccacaggcttccaaaatagga

SEQ ID NO: 24036 - DNA, 33 bp, Homo sapiens
ttatcatgcttactaactgccagacattaaaca

SEQ ID NO: 24037 - DNA, 33 bp, Homo sapiens
taggttacattttccacgtccaatctctacttt

SEQ ID NO: 24038 - DNA, 33 bp, Homo sapiens
ttaacctgcatttgcccacaagcacaccagtgt

SEQ ID NO: 24039 - DNA, 33 bp, Homo sapiens
attttaccactctctccgaatacattttttatt

SEQ ID NO: 24040 - DNA, 33 bp, Homo sapiens
taagagtacttcaatgcagagacagggaaggca

SEQ ID NO: 24041 - DNA, 33 bp, Homo sapiens
tgagagtgtaggaaacaaagtaggctctgagag

SEQ ID NO: 24042 - DNA, 33 bp, Homo sapiens
tctgaatcccacatcaccctagcaaagtttttc

SEQ ID NO: 24043 - DNA, 33 bp, Homo sapiens
ggtatttctccatttccaggatatgagcacatt

SEQ ID NO: 24044 - DNA, 33 bp, Homo sapiens
tcaaatacagctttcaaagtgccttaagattaa

SEQ ID NO: 24045 - DNA, 33 bp, Homo sapiens
ttatgtttcttgaggcaaattttagttttcctc

SEQ ID NO: 24046 - DNA, 33 bp, Homo sapiens
actgatggcaccaataccctcaacttgtaggct

SEQ ID NO: 24047 - DNA, 33 bp, Homo sapiens
ttattagtagacttcaaactacttaggcaccag

SEQ ID NO: 24048 - DNA, 33 bp, Homo sapiens
actatgtgaacagccacgtgctaggtattaggg

SEQ ID NO: 24049 - DNA, 33 bp, Homo sapiens
acttgtggcattatccacaaccgtcatgtttct

SEQ ID NO: 24050 - DNA, 33 bp, Homo sapiens
gatcccacttaaacctcaactgagattcttgag

SEQ ID NO: 24051 - DNA, 33 bp, Homo sapiens
agaaaacaaaaccagcactgattagagactcaa

SEQ ID NO: 24052 - DNA, 33 bp, Homo sapiens
gccattctctacgaaacattgctattacatatg

SEQ ID NO: 24053 - DNA, 33 bp, Homo sapiens
tctggtctctgacaggaacaaatgctaggcagg

SEQ ID NO: 24054 - DNA, 33 bp, Homo sapiens
gctctaaaacatcacaaaatttagaaaactaaa

SEQ ID NO: 24055 - DNA, 33 bp, Homo sapiens
taagggtaaacatcgcaagagagaaaaccagac

SEQ ID NO: 24056 - DNA, 51 bp, Homo sapiens
ccaggcttaagtgacaccacgctgacgagatattaataatgatcttaaaat

SEQ ID NO: 24057 - DNA, 51 bp, Homo sapiens
tccagaagaaacaaacatttattgacaacttttggtgtgtgacctgtttaa

SEQ ID NO: 24058 - DNA, 33 bp, Homo sapiens
gtctcatcacccaaataactgtttagatttctg

SEQ ID NO: 24059 - DNA, 33 bp, Homo sapiens
ggatgggctcctcaccaaccattcagatctctg

SEQ ID NO: 24060 - DNA, 33 bp, Homo sapiens
attattccattgtatgaatgaactatgtaagcc

SEQ ID NO: 24061 - DNA, 33 bp, Homo sapiens
attaataggctgtaccccaccaataacaagctc

SEQ ID NO: 24062 - DNA, 33 bp, Homo sapiens
ctgatttacttatgcgcagcctccctggagaca

SEQ ID NO: 24063 - DNA, 33 bp, Homo sapiens
aatctcagtaaaccaccgtgacggcatctaccc

SEQ ID NO: 24064 - DNA, 33 bp, Homo sapiens
tgcagactagctcgtgcaaaggaggagagcgtt

SEQ ID NO: 24065 - DNA, 33 bp, Homo sapiens
ctctccctttgcagagaatatacgtcctctcct

SEQ ID NO: 24066 - DNA, 33 bp, Homo sapiens
tcggacccaagtcaggacatctctgttttgaag

SEQ ID NO: 24067 - DNA, 33 bp, Homo sapiens
cttagcgaggacctaagcatccaatgctgccaa

SEQ ID NO: 24068 - DNA, 51 bp, Homo sapiens
agacaggaatcttttagtaaaatagaagtgttttttgttgtttttgcattg

SEQ ID NO: 24069 - DNA, 33 bp, Homo sapiens
ttacattatttaagtacgagccaaagcagatac

SEQ ID NO: 24070 - DNA, 33 bp, Homo sapiens
ctgtcaagtacaaaacaaaactgcagaataaaa

SEQ ID NO: 24071 - DNA, 33 bp, Homo sapiens
acctgtgaatcacagacattacgtagaacaagc

SEQ ID NO: 24072 - DNA, 33 bp, Homo sapiens
cctaacagcattttcaggtagcatttcaaattt

SEQ ID NO: 24073 - DNA, 51 bp, Homo sapiens
atctccttttgtgattacagtaataacatcaggatagagttgaaaaaacta

SEQ ID NO: 24074 - DNA, 33 bp, Homo sapiens
actgtgaccttcagtacgaggaaatagctatca

SEQ ID NO: 24075 - DNA, 51 bp, Homo sapiens
ttttatgagatttaatgtaactatgcattacttcagacaagatacacatat

SEQ ID NO: 24076 - DNA, 33 bp, Homo sapiens
ttatttaagctgaatagaacttttgagatgata

SEQ ID NO: 24077 - DNA, 33 bp, Homo sapiens
ggacagattttggcaaataagtagagggaatat

SEQ ID NO: 24078 - DNA, 33 bp, Homo sapiens
cagactcaaagcaacacacacattgccaggccc

SEQ ID NO: 24079 - DNA, 33 bp, Homo sapiens
cacatttagcaaacaggaatggaggaaccacta

SEQ ID NO: 24080 - DNA, 33 bp, Homo sapiens
agtgcctatcccataacaggtgacaataaatat

SEQ ID NO: 24081 - DNA, 51 bp, Homo sapiens
taccataatcaacaacttcaacataaagatcactctaccattgacctttat

SEQ ID NO: 24082 - DNA, 51 bp, Homo sapiens
tgtcttcatattaactgtaaaattaaagtaataatggtagtttaaatttaa

SEQ ID NO: 24083 - DNA, 51 bp, Homo sapiens
tctccttgctttctcagatctcttaggcctctaaaaaatatggtgttgtgg

SEQ ID NO: 24084 - DNA, 33 bp, Homo sapiens
catttaatctgcatgacaaccatatgtattcct

SEQ ID NO: 24085 - DNA, 33 bp, Homo sapiens
tattgacttgctgctacggtttctgaacatttt

SEQ ID NO: 24086 - DNA, 33 bp, Homo sapiens
aagagtgactaaacggcaatgaatcacacatcc

SEQ ID NO: 24087 - DNA, 33 bp, Homo sapiens
actgagatgtggaagaccaaaggagaataagtt

SEQ ID NO: 24088 - DNA, 33 bp, Homo sapiens
tgaatccttgaccaacaagagacaggaactgat

SEQ ID NO: 24089 - DNA, 33 bp, Homo sapiens
atttagtcacacttcactacctccaaatatgaa

SEQ ID NO: 24090 - DNA, 33 bp, Homo sapiens
atatataggctgtttcactttaaaggagtaaaa

SEQ ID NO: 24091 - DNA, 33 bp, Homo sapiens
ggtaacatgataaagaataccaggaggggaagt

SEQ ID NO: 24092 - DNA, 33 bp, Homo sapiens
tctgtctaccagcagactccttttttccctcct

SEQ ID NO: 24093 - DNA, 51 bp, Homo sapiens
ttattccaggaatgtgaggatcattaactgtccagaaatctattaaagtaa

SEQ ID NO: 24094 - DNA, 33 bp, Homo sapiens
atgagtctatatgatgaagaaaaccatgttgtc

SEQ ID NO: 24095 - DNA, 33 bp, Homo sapiens
accttttcctttgtgacagtgagattaagaact

SEQ ID NO: 24096 - DNA, 33 bp, Homo sapiens
ttgtatgaggagttgacatagctcctgaaagag

SEQ ID NO: 24097 - DNA, 33 bp, Homo sapiens
gtgctgaataatgaagcagtgtctaaaggcttg

SEQ ID NO: 24098 - DNA, 33 bp, Homo sapiens
aaagggcataataacagaacgtacgaacattta

SEQ ID NO: 24099 - DNA, 33 bp, Homo sapiens
agagtttccatcattaccaatactgagtatata

SEQ ID NO: 24100 - DNA, 33 bp, Homo sapiens
cattttacatgactgccattttatgtgaacaca

SEQ ID NO: 24101 - DNA, 51 bp, Homo sapiens
cacatctgttgatataggaaatcaaccttgtaatcgtcaacctcaaagact

SEQ ID NO: 24102 - DNA, 33 bp, Homo sapiens
atacccaatatatggacgggaaaagtgtagttt

SEQ ID NO: 24103 - DNA, 33 bp, Homo sapiens
tgacttcgtaattgtacatattcatgggataca

SEQ ID NO: 24104 - DNA, 33 bp, Homo sapiens
tagttccagcttataaatgagaatatgcagtat

SEQ ID NO: 24105 - DNA, 33 bp, Homo sapiens
attagttatgcaatgtcaaatgtgtactctttc

SEQ ID NO: 24106 - DNA, 33 bp, Homo sapiens
gataaactcagtgtaactaaactgacttcccaa

SEQ ID NO: 24107 - DNA, 33 bp, Homo sapiens
tagaaggattaagcagacacaggttagaaggca

SEQ ID NO: 24108 - DNA, 33 bp, Homo sapiens
gcttcaaaataagccacagagagactgaatcgc

SEQ ID NO: 24109 - DNA, 33 bp, Homo sapiens
ggagttggccaaaagaatagtggagagagagac

SEQ ID NO: 24110 - DNA, 33 bp, Homo sapiens
gttttagagtcaatatcaggagtgagaaagagg

SEQ ID NO: 24111 - DNA, 33 bp, Homo sapiens
gaggttgaatatttaccgaggccactcctgctt

SEQ ID NO: 24112 - DNA, 33 bp, Homo sapiens
tgccgttgagcacagacgaagtaatcggaacac

SEQ ID NO: 24113 - DNA, 33 bp, Homo sapiens
cttcattaattttctaaatcaacctcatgttcc

SEQ ID NO: 24114 - DNA, 33 bp, Homo sapiens
agataggaagcagagagaaccatttagtaggtg

SEQ ID NO: 24115 - DNA, 33 bp, Homo sapiens
agatgggagagaattcaccaaaaggacatatct

SEQ ID NO: 24116 - DNA, 33 bp, Homo sapiens
gaactattttcaagcagtctgtgtccaggtatg

SEQ ID NO: 24117 - DNA, 33 bp, Homo sapiens
cacactcaagtttgtcaataagcctcttacaga

SEQ ID NO: 24118 - DNA, 51 bp, Homo sapiens
agaaaagatgtatttatctgagaaacatgttgctttctgtttgtttttctg

SEQ ID NO: 24119 - DNA, 51 bp, Homo sapiens
gccagtttaaatggtgatgtacatacagaatagagggggaaattgctggat

SEQ ID NO: 24120 - DNA, 33 bp, Homo sapiens
cttcataaatatttcaacttttcctcactccct

SEQ ID NO: 24121 - DNA, 33 bp, Homo sapiens
actgtatttctatagcaaaggtcaagacccttt

SEQ ID NO: 24122 - DNA, 33 bp, Homo sapiens
tagtcttagcaccaacactttctaataaatgtg

SEQ ID NO: 24123 - DNA, 33 bp, Homo sapiens
atgtctgctgtattcacccggtcatgctaaaaa

SEQ ID NO: 24124 - DNA, 33 bp, Homo sapiens
catagtgattgacaaaagagttgtacagacaat

SEQ ID NO: 24125 - DNA, 33 bp, Homo sapiens
ataaattacataagccactagcctaactatgaa

SEQ ID NO: 24126 - DNA, 33 bp, Homo sapiens
cacctagaacttctgacccatttgatgaatgtg

SEQ ID NO: 24127 - DNA, 33 bp, Homo sapiens
ggcaagtcagtagatacagcaaactttatttct

SEQ ID NO: 24128 - DNA, 33 bp, Homo sapiens
gaattcagagctcccaggtccgctccccatgga

SEQ ID NO: 24129 - DNA, 33 bp, Homo sapiens
taacttttctgctttacaatcgtttctcacacc

SEQ ID NO: 24130 - DNA, 33 bp, Homo sapiens
attgatagttcctacccaggttgacagcttgat

SEQ ID NO: 24131 - DNA, 33 bp, Homo sapiens
ctcataatgccattaaccaataacttctagtat

SEQ ID NO: 24132 - DNA, 33 bp, Homo sapiens
agtaaagacaaatccacagtaagcagtcaatcc

SEQ ID NO: 24133 - DNA, 33 bp, Homo sapiens
gatttgtctttacttcaagtcaagtgattttgc

SEQ ID NO: 24134 - DNA, 33 bp, Homo sapiens
attgcctcagagatgacagaaaaattataatca

SEQ ID NO: 24135 - DNA, 33 bp, Homo sapiens
ccaaaccttgtatccaatggaagtatactttag

SEQ ID NO: 24136 - DNA, 33 bp, Homo sapiens
tgctatttactgtggagctgatgtctcaaactt

SEQ ID NO: 24137 - DNA, 33 bp, Homo sapiens
tctactctaacaacagccaaataatatacaaag

SEQ ID NO: 24138 - DNA, 33 bp, Homo sapiens
tatattcttcaacgagactacataactttgtaa

SEQ ID NO: 24139 - DNA, 33 bp, Homo sapiens
ctccatgattggcctacacctacctctctaaac

SEQ ID NO: 24140 - DNA, 33 bp, Homo sapiens
aatggatgcagcattacagaaggcaggatggtg

SEQ ID NO: 24141 - DNA, 51 bp, Homo sapiens
gaaagaacacaatgaaagtgctgtaaagaatagatttaatcaagttaaatc

SEQ ID NO: 24142 - DNA, 33 bp, Homo sapiens
tgtgcatccaaatcacccgatgaacttgatcat

SEQ ID NO: 24143 - DNA, 33 bp, Homo sapiens
ttgagcactgactacacccaaggagatgctaag

SEQ ID NO: 24144 - DNA, 51 bp, Homo sapiens
aaactcttgataaaattagaaaatgccactaaataataagctatgaaatgc

SEQ ID NO: 24145 - DNA, 33 bp, Homo sapiens
ccattttctcaaagacaacttctatattctcat

SEQ ID NO: 24146 - DNA, 33 bp, Homo sapiens
taaattgaaggtgaatcagatgatccgtgggaa

SEQ ID NO: 24147 - DNA, 33 bp, Homo sapiens
accttcatgagtagagaaaggacttctgaaagt

SEQ ID NO: 24148 - DNA, 33 bp, Homo sapiens
atattgcctcttagcaacaaagggatccaaatt

SEQ ID NO: 24149 - DNA, 33 bp, Homo sapiens
agagccagactgatcaactatttttaaggtttc

SEQ ID NO: 24150 - DNA, 33 bp, Homo sapiens
gctaagcactaaatcaatcatcgagaattattc

SEQ ID NO: 24151 - DNA, 33 bp, Homo sapiens
ggcattttagaatcagaagaatatcagagttga

SEQ ID NO: 24152 - DNA, 33 bp, Homo sapiens
tgttccttctgtcagcactcttgtccagagaag

SEQ ID NO: 24153 - DNA, 33 bp, Homo sapiens
catgtttttatgggctaaattgtgtcttgcccc

SEQ ID NO: 24154 - DNA, 33 bp, Homo sapiens
aattgaatcaaactcaaattggtagttgaatcc

SEQ ID NO: 24155 - DNA, 33 bp, Homo sapiens
aatgccttgaatacccacctgtcaaatgaagaa

SEQ ID NO: 24156 - DNA, 33 bp, Homo sapiens
gatttttatgtttctgcagagaagtacttttct

SEQ ID NO: 24157 - DNA, 33 bp, Homo sapiens
gtcttggtgtgagtgaaagggaaccaataatct

SEQ ID NO: 24158 - DNA, 33 bp, Homo sapiens
tcctctgccccaagtaagatagaaggataccca

SEQ ID NO: 24159 - DNA, 51 bp, Homo sapiens
ataaattttagaattgttgtcttacacatacacaatattgtgcttttgatt

SEQ ID NO: 24160 - DNA, 51 bp, Homo sapiens
agacataatgaggctagggtaatcacgacaacacaatattggcacaaggat

SEQ ID NO: 24161 - DNA, 51 bp, Homo sapiens
aagaccagtctttgtttgaaaggcgaaattctaaaaactgttagaagaaat

SEQ ID NO: 24162 - DNA, 33 bp, Homo sapiens
cttctgttgggtcttacatggggctttgagcag

SEQ ID NO: 24163 - DNA, 33 bp, Homo sapiens
acataaatgacctcatcatctcttgggtgcaag

SEQ ID NO: 24164 - DNA, 33 bp, Homo sapiens
accctcccattcataacctacatacgtgcctat

SEQ ID NO: 24165 - DNA, 33 bp, Homo sapiens
tagctagtcagtttaactccttaatacatatgg

SEQ ID NO: 24166 - DNA, 51 bp, Homo sapiens
aagctttctagtactcttaaaataactaaatggagtattatatatcaattc

SEQ ID NO: 24167 - DNA, 33 bp, Homo sapiens
aacagtgtagaaagcaatacaagagatatgctt

SEQ ID NO: 24168 - DNA, 33 bp, Homo sapiens
catgcttcatcattcacattaattatgctgatg

SEQ ID NO: 24169 - DNA, 51 bp, Homo sapiens
tatcttttttctctttagcctgtcacactggagatccaaccacatgctgca

SEQ ID NO: 24170 - DNA, 33 bp, Homo sapiens
tgttgggatgactatacacttggtaattctggg

SEQ ID NO: 24171 - DNA, 33 bp, Homo sapiens
tgcttagaggacaatcactgttatgcccacggg

SEQ ID NO: 24172 - DNA, 33 bp, Homo sapiens
acaatcaagggagccacgtaaattaaagttaaa

SEQ ID NO: 24173 - DNA, 33 bp, Homo sapiens
ggaaatgttgcaggacaagcaggttcacatgct

SEQ ID NO: 24174 - DNA, 33 bp, Homo sapiens
gatatgtaagtaaaagcctttgtgacactttag

SEQ ID NO: 24175 - DNA, 33 bp, Homo sapiens
taccatccagatggaacgagcaatgagaagggg

SEQ ID NO: 24176 - DNA, 33 bp, Homo sapiens
ggaacaatcttgcaaaagctgtaaagtaggaat

SEQ ID NO: 24177 - DNA, 33 bp, Homo sapiens
gctcttacaaaatccaaattcattagcacagtt

SEQ ID NO: 24178 - DNA, 33 bp, Homo sapiens
tatttatttttccttccccatctggttcacatg

SEQ ID NO: 24179 - DNA, 33 bp, Homo sapiens
cttatcctgcccaagacgtgaactagccaacac

SEQ ID NO: 24180 - DNA, 33 bp, Homo sapiens
gactgactgatagacaagtgacagatacataga

SEQ ID NO: 24181 - DNA, 33 bp, Homo sapiens
gttgttcatcacactacagcatcaattttattc

SEQ ID NO: 24182 - DNA, 33 bp, Homo sapiens
tggcatcttcattcttaaacccctaaatgccac

SEQ ID NO: 24183 - DNA, 33 bp, Homo sapiens
gtttcaaccagcagtcaaatagatagattggga

SEQ ID NO: 24184 - DNA, 33 bp, Homo sapiens
ctctttttctctctaccattctcaacctgtatt

SEQ ID NO: 24185 - DNA, 33 bp, Homo sapiens
taggccatttttattccatgccagattacatag

SEQ ID NO: 24186 - DNA, 33 bp, Homo sapiens
ggctcagtgaggttaacacagattcagagctgt

SEQ ID NO: 24187 - DNA, 51 bp, Homo sapiens
attcttttaacctacattcagccacaccgggaatgatgcttcttgacctga

SEQ ID NO: 24188 - DNA, 33 bp, Homo sapiens
aaccctaagttagatggatatgtctggtttgtc

SEQ ID NO: 24189 - DNA, 33 bp, Homo sapiens
aaggatagagactgaacggaaggtactggaagg

SEQ ID NO: 24190 - DNA, 33 bp, Homo sapiens
cacattgcccagagacaactacagccatcagtt

SEQ ID NO: 24191 - DNA, 33 bp, Homo sapiens
atataatgatctgtgccgcaatatactataatt

SEQ ID NO: 24192 - DNA, 33 bp, Homo sapiens
ggctcagtatccctagaattctgccttaaattc

SEQ ID NO: 24193 - DNA, 33 bp, Homo sapiens
caattcaggccaagaccaccctttccatcagaa

SEQ ID NO: 24194 - DNA, 33 bp, Homo sapiens
acatatacagcaacccacctcaaaggtttccct

SEQ ID NO: 24195 - DNA, 33 bp, Homo sapiens
caaagagagcccgtcacgtcaaagaaaccaact

SEQ ID NO: 24196 - DNA, 33 bp, Homo sapiens
gcaagttcaacctacacagtgcagctccagttc

SEQ ID NO: 24197 - DNA, 33 bp, Homo sapiens
atttacaataccatcaaaaagattaggatagaa

SEQ ID NO: 24198 - DNA, 33 bp, Homo sapiens
aatacaaaagcatgcaaagacaggaaagtacaa

SEQ ID NO: 24199 - DNA, 51 bp, Homo sapiens
tccacaaaccacagagataagtgaaccattgatgagaaccaaaatggtgtc

SEQ ID NO: 24200 - DNA, 33 bp, Homo sapiens
ttatctcctcaaaacaacaagaattctgcacct

SEQ ID NO: 24201 - DNA, 33 bp, Homo sapiens
gtgcatttctccaaatcatctctattaagtctc

SEQ ID NO: 24202 - DNA, 33 bp, Homo sapiens
aaggagccagggatcaacctctgtatctgaaga

SEQ ID NO: 24203 - DNA, 33 bp, Homo sapiens
gccggatcttctcctacgtacctgcttcatttt

SEQ ID NO: 24204 - DNA, 33 bp, Homo sapiens
aaactcagtacaaacacgcaagcggccctttag

SEQ ID NO: 24205 - DNA, 33 bp, Homo sapiens
tttaatgacaacttaacgagaggagttaataag

SEQ ID NO: 24206 - DNA, 33 bp, Homo sapiens
tgttacaacacataagactataatgcgattcag

SEQ ID NO: 24207 - DNA, 33 bp, Homo sapiens
gagctggagccaagaaagtgaaaaggaagtgag

SEQ ID NO: 24208 - DNA, 33 bp, Homo sapiens
tttgtctgacctgtaaactgggaagctgaaatt

SEQ ID NO: 24209 - DNA, 33 bp, Homo sapiens
ttgggagagcaaattcaaaaggtcgtaggaaca

SEQ ID NO: 24210 - DNA, 33 bp, Homo sapiens
tcaaagatccttgacaagcttggtatggacagt

SEQ ID NO: 24211 - DNA, 33 bp, Homo sapiens
tctaacagcagttaaaggtgcttctttagaagg

SEQ ID NO: 24212 - DNA, 33 bp, Homo sapiens
aggatgaggttgttaactgggcctgtgcaggct

SEQ ID NO: 24213 - DNA, 33 bp, Homo sapiens
ctccacatccttgtaccgagcactacttacatt

SEQ ID NO: 24214 - DNA, 33 bp, Homo sapiens
gggttataaaggcttacgaagtccaacttttgg

SEQ ID NO: 24215 - DNA, 33 bp, Homo sapiens
acacctgatggcttaaggacacctaggtggcct

SEQ ID NO: 24216 - DNA, 33 bp, Homo sapiens
attctccaaaacataactactatagcctactgt

SEQ ID NO: 24217 - DNA, 33 bp, Homo sapiens
gatatacctgaaacaccgtcaaatcatttattc

SEQ ID NO: 24218 - DNA, 33 bp, Homo sapiens
agaattctttagagtacgctggcaagtgcaatt

SEQ ID NO: 24219 - DNA, 51 bp, Homo sapiens
aagtagaaattcctctataaaaagacacaagagttagtcaaggaaatctat

SEQ ID NO: 24220 - DNA, 33 bp, Homo sapiens
cttcaagggcagaaacaatgaaaaagaaagagg

SEQ ID NO: 24221 - DNA, 33 bp, Homo sapiens
gctggaactgagttcagagtaactgtgagttat

SEQ ID NO: 24222 - DNA, 33 bp, Homo sapiens
ctcccaagcagactgaaccattcacatttcaac

SEQ ID NO: 24223 - DNA, 33 bp, Homo sapiens
atgggcaccctctttcacattttttttcttggc

SEQ ID NO: 24224 - DNA, 51 bp, Homo sapiens
ttcaatctgtttaataaagacgtgccaatagagtgccaaaaagcatttaaa

SEQ ID NO: 24225 - DNA, 33 bp, Homo sapiens
aattatactcttctaccgaaaaatgcaaaacca

SEQ ID NO: 24226 - DNA, 33 bp, Homo sapiens
aggaatgggctgatcccgatccagaaaactaag

SEQ ID NO: 24227 - DNA, 33 bp, Homo sapiens
agagatggacttggagacgtggttgtcattcac

SEQ ID NO: 24228 - DNA, 33 bp, Homo sapiens
ctcagcagggcttaggaatcagaaacatcagat

SEQ ID NO: 24229 - DNA, 33 bp, Homo sapiens
ggcttgtaactgcagacctacttatgtattgag

SEQ ID NO: 24230 - DNA, 33 bp, Homo sapiens
cccattgactttctgcgctcctggatgagattt

SEQ ID NO: 24231 - DNA, 33 bp, Homo sapiens
cttgaacttggcccaccccaaatcagttcctat

SEQ ID NO: 24232 - DNA, 33 bp, Homo sapiens
aacagataagtgtctaagggaaaattcttattc

SEQ ID NO: 24233 - DNA, 33 bp, Homo sapiens
aacacattccccaatacccctactcttgatggc

SEQ ID NO: 24234 - DNA, 33 bp, Homo sapiens
tttgctttaagctggaagggggattttgtatgt

SEQ ID NO: 24235 - DNA, 33 bp, Homo sapiens
tgtgcttgctggcacagtctttatcgccactat

SEQ ID NO: 24236 - DNA, 33 bp, Homo sapiens
ccagaagactttgtcacggtttgtgtcaggatc

SEQ ID NO: 24237 - DNA, 33 bp, Homo sapiens
gggcccacacctacaccgagttgaccaatgtct

SEQ ID NO: 24238 - DNA, 33 bp, Homo sapiens
cactgacatcaccacaagttgttgctctcagtt

SEQ ID NO: 24239 - DNA, 33 bp, Homo sapiens
acttgcaactgtcataccacacgtgcaaaattt

SEQ ID NO: 24240 - DNA, 33 bp, Homo sapiens
taaaatgccatgtttaacaggtactactagaac

SEQ ID NO: 24241 - DNA, 33 bp, Homo sapiens
tttactgtccaacaaaagtatcagatcacattc

SEQ ID NO: 24242 - DNA, 33 bp, Homo sapiens
tttgggaaggtttatacagcactgttgaaggag

SEQ ID NO: 24243 - DNA, 33 bp, Homo sapiens
tgggaactatttgaaaatgcagcatgaaggaag

SEQ ID NO: 24244 - DNA, 33 bp, Homo sapiens
gatgagagaacagcaacggacaaagagaccaaa

SEQ ID NO: 24245 - DNA, 33 bp, Homo sapiens
atggtgaaatacttcaaaagccttaggaagaat

SEQ ID NO: 24246 - DNA, 33 bp, Homo sapiens
tttctgttgtcatacactctgatattacttcaa

SEQ ID NO: 24247 - DNA, 33 bp, Homo sapiens
gtatcatctggtcacactggtctgctagtagtt

SEQ ID NO: 24248 - DNA, 33 bp, Homo sapiens
cgtcaatatttgcacacccttaacgaggccgtg

SEQ ID NO: 24249 - DNA, 33 bp, Homo sapiens
ggagctttaagcaaagcattggcatgatcgggt

SEQ ID NO: 24250 - DNA, 33 bp, Homo sapiens
tattattttgatgaaccatttgagagtaagatg

SEQ ID NO: 24251 - DNA, 33 bp, Homo sapiens
ttacatcaaccttcataagtagtattggtttgt

SEQ ID NO: 24252 - DNA, 33 bp, Homo sapiens
gccacagaattaggaccatgggagtagcttgaa

SEQ ID NO: 24253 - DNA, 33 bp, Homo sapiens
caattcttagaccttcaagaggacttcccagtg

SEQ ID NO: 24254 - DNA, 33 bp, Homo sapiens
ctctccgcattccccccagtttctcccctccct

SEQ ID NO: 24255 - DNA, 33 bp, Homo sapiens
caaaacacatgatttcacagaccatacagcttt

SEQ ID NO: 24256 - DNA, 51 bp, Homo sapiens
tacgtctattttataaaggcctggcaaatgaaagaactcaatgggttttga

SEQ ID NO: 24257 - DNA, 33 bp, Homo sapiens
ggatggaaaattggacagtcaaagagtaacagt

SEQ ID NO: 24258 - DNA, 33 bp, Homo sapiens
gccccaatctttccaaagaagcaggtgtttctg

SEQ ID NO: 24259 - DNA, 33 bp, Homo sapiens
ctttagcaacattttcaactcagtgggcactgc

SEQ ID NO: 24260 - DNA, 33 bp, Homo sapiens
ttcacttgtcaaatgcccataactgagagtatt

SEQ ID NO: 24261 - DNA, 51 bp, Homo sapiens
ctccaaatgaatgattcatgttcagaactttcacaggtgagggctggaaac

SEQ ID NO: 24262 - DNA, 33 bp, Homo sapiens
taggaagaagggggatcaattttgaggagactg

SEQ ID NO: 24263 - DNA, 33 bp, Homo sapiens
aagaatttgtgattaaataaacatggataaagc

SEQ ID NO: 24264 - DNA, 33 bp, Homo sapiens
cattaccattgtgtgacgatcacctacagtatt

SEQ ID NO: 24265 - DNA, 33 bp, Homo sapiens
gtaaatctagaagcaacaggtagatggttccag

SEQ ID NO: 24266 - DNA, 33 bp, Homo sapiens
gccaaaagaaaatgtcaatctaaaatcatgctc

SEQ ID NO: 24267 - DNA, 33 bp, Homo sapiens
gctcaggcagaaatacagtaagttcaactgaat

SEQ ID NO: 24268 - DNA, 33 bp, Homo sapiens
gcccacagcaggcaaaagcggacctcagcagcc

SEQ ID NO: 24269 - DNA, 33 bp, Homo sapiens
gctaaatcaggccgtaaactgccatcagctggg

SEQ ID NO: 24270 - DNA, 33 bp, Homo sapiens
aagaaggattagccccagaaagtccctgaagta

SEQ ID NO: 24271 - DNA, 33 bp, Homo sapiens
tccctcccctcttcagcccatttcaatttagac

SEQ ID NO: 24272 - DNA, 33 bp, Homo sapiens
ctttgctttcaaaaagccttcaggaaataaaga

SEQ ID NO: 24273 - DNA, 33 bp, Homo sapiens
ggcttagctctgaacaaattacttcctgctcaa

SEQ ID NO: 24274 - DNA, 33 bp, Homo sapiens
ctcattttgatcctcacgcacatgcttgttgtc

SEQ ID NO: 24275 - DNA, 33 bp, Homo sapiens
ctgctcagtgtcaaatgaacaggaaagtcagct

SEQ ID NO: 24276 - DNA, 33 bp, Homo sapiens
atgcttctttaacttacagtctatctccatcaa

SEQ ID NO: 24277 - DNA, 33 bp, Homo sapiens
cttccttttggaaacccacaatgccaggcaccc

SEQ ID NO: 24278 - DNA, 33 bp, Homo sapiens
tggcctactctggttacggggacactgacgccc

SEQ ID NO: 24279 - DNA, 33 bp, Homo sapiens
agaggtagcagtgaacaggaattgtggcactgc

SEQ ID NO: 24280 - DNA, 33 bp, Homo sapiens
caggatgccctcttccactcagacagggacagt

SEQ ID NO: 24281 - DNA, 33 bp, Homo sapiens
aagacatggacttctaataattaggactgctgg

SEQ ID NO: 24282 - DNA, 33 bp, Homo sapiens
aataatcaacaagctaccacggaaagatctata

SEQ ID NO: 24283 - DNA, 33 bp, Homo sapiens
aaaaaacagaaagggaaaggcatcacttaaaac

SEQ ID NO: 24284 - DNA, 33 bp, Homo sapiens
ggaaatatgtgtgggcaaaactaatgcctaccc

SEQ ID NO: 24285 - DNA, 51 bp, Homo sapiens
tttcaggtactggaaaggctgacaacaggatgactgcttgagcccaggagt

SEQ ID NO: 24286 - DNA, 51 bp, Homo sapiens
gactggtgaagctctaagggtcatactatactccttccacccacctctccc

SEQ ID NO: 24287 - DNA, 33 bp, Homo sapiens
ggatcagggaataagaacttctcttctgcaagc

SEQ ID NO: 24288 - DNA, 33 bp, Homo sapiens
tcactagcagacttgcaatataacaaatgcaaa

SEQ ID NO: 24289 - DNA, 33 bp, Homo sapiens
ggccttcaacagactgaatggtccccacccaca

SEQ ID NO: 24290 - DNA, 33 bp, Homo sapiens
gcacaaggttgcaaaccagaaaaatgtatctgt

SEQ ID NO: 24291 - DNA, 33 bp, Homo sapiens
cttccctaagaaacaacggaagagaaggagctt

SEQ ID NO: 24292 - DNA, 33 bp, Homo sapiens
tgtaggatacaaaactcagagatggaggctgtg

SEQ ID NO: 24293 - DNA, 33 bp, Homo sapiens
gatactagaaggtacacgctgacttctgaaggg

SEQ ID NO: 24294 - DNA, 33 bp, Homo sapiens
gatgaagaagccattaagtatatatttgagaca

SEQ ID NO: 24295 - DNA, 33 bp, Homo sapiens
tgccacttaagtgttacgtctagggaaatacta

SEQ ID NO: 24296 - DNA, 33 bp, Homo sapiens
atagctgaactaaacgaaaatgaaaatataatg

SEQ ID NO: 24297 - DNA, 33 bp, Homo sapiens
tcagctctctactagacgtctccactggcacct

SEQ ID NO: 24298 - DNA, 33 bp, Homo sapiens
aaacatgaagaaattacagaaaggcaagtttta

SEQ ID NO: 24299 - DNA, 33 bp, Homo sapiens
cttatgccttgttaaaaccagtcatatatacat

SEQ ID NO: 24300 - DNA, 51 bp, Homo sapiens
ggccccaggcaggtaaatcctactacggaatggagagctcagactctagaa

SEQ ID NO: 24301 - DNA, 51 bp, Homo sapiens
agacttgagtcttaataaattctcaaacaattacatacttaactcaggagt

SEQ ID NO: 24302 - DNA, 51 bp, Homo sapiens
tccctcaggaaacattacatataacaaaagtgtcacttggagagtagtgag

SEQ ID NO: 24303 - DNA, 51 bp, Homo sapiens
tacatccctgcagcactcaggaaaaagatgaaatggacaacagggactctt

SEQ ID NO: 24304 - DNA, 51 bp, Homo sapiens
cccataaagcactgacaagaccacaaactccctgtcacatagttaaaaatg

SEQ ID NO: 24305 - DNA, 33 bp, Homo sapiens
ataccagtctcaaatacagcaaagagacagact

SEQ ID NO: 24306 - DNA, 33 bp, Homo sapiens
accaaaaacatctaccaatgtgtctaggaggaa

SEQ ID NO: 24307 - DNA, 33 bp, Homo sapiens
taaaagaaaaatcttacgtcaattgtgaggtaa

SEQ ID NO: 24308 - DNA, 33 bp, Homo sapiens
ggagttcctgacactacggaaaactaatgagaa

SEQ ID NO: 24309 - DNA, 33 bp, Homo sapiens
ttgaagtaatgagaagcaagagagaacacccat

SEQ ID NO: 24310 - DNA, 33 bp, Homo sapiens
tctcatcctgaaattcccctcatacattttcta

SEQ ID NO: 24311 - DNA, 33 bp, Homo sapiens
cattatagaccacttacagaccaattatatcta

SEQ ID NO: 24312 - DNA, 33 bp, Homo sapiens
gttaggtcaatggggacaagatattggaaaaga

SEQ ID NO: 24313 - DNA, 33 bp, Homo sapiens
tacagggtctaaataagtaggttacgtgccaat

SEQ ID NO: 24314 - DNA, 33 bp, Homo sapiens
taaataaaataaagagaaatgttcaggacacct

SEQ ID NO: 24315 - DNA, 33 bp, Homo sapiens
agagtcaaagctagcacgtcctctttagccatc

SEQ ID NO: 24316 - DNA, 33 bp, Homo sapiens
ataatgcactcacaggcactttgcaaactctag

SEQ ID NO: 24317 - DNA, 33 bp, Homo sapiens
ctacatgaggactctaaaatagttaaagtcata

SEQ ID NO: 24318 - DNA, 33 bp, Homo sapiens
atctacagaacttcaccgcgtgtcttcatgctt

SEQ ID NO: 24319 - DNA, 33 bp, Homo sapiens
tgttctccaggaacacagcccctccaaagcact

SEQ ID NO: 24320 - DNA, 33 bp, Homo sapiens
gtcagtccagaattaacggtgtgctcggggatg

SEQ ID NO: 24321 - DNA, 33 bp, Homo sapiens
gcttcacggaggaagaagtcatagctgcaggaa

SEQ ID NO: 24322 - DNA, 33 bp, Homo sapiens
gcagtcaggagtaacacggactgtgccagagag

SEQ ID NO: 24323 - DNA, 33 bp, Homo sapiens
gaaggactagaccccaagatacctgaattccct

SEQ ID NO: 24324 - DNA, 33 bp, Homo sapiens
tatttgttgagcatccaactttatcataattac

SEQ ID NO: 24325 - DNA, 33 bp, Homo sapiens
ttgaataatcagagaaaattcaacacaggagat

SEQ ID NO: 24326 - DNA, 33 bp, Homo sapiens
aagcgagccatgtaacaatctgggtaagaggtt

SEQ ID NO: 24327 - DNA, 33 bp, Homo sapiens
tgcatactgggggctcaacaggaaagccactag

SEQ ID NO: 24328 - DNA, 51 bp, Homo sapiens
tcgcaaagcgggaaaaatgaaacagcctccgacagctctttcctctttcct

SEQ ID NO: 24329 - DNA, 33 bp, Homo sapiens
gtgggtaatcttgggagggagtctgcaaatcaa

SEQ ID NO: 24330 - DNA, 33 bp, Homo sapiens
ggccataattgctccaagtgaaatccccaatac

SEQ ID NO: 24331 - DNA, 33 bp, Homo sapiens
gaggtgtatcgggcctcaaagtatttttacctg

SEQ ID NO: 24332 - DNA, 33 bp, Homo sapiens
aaccactgtgacatccagagtgcaggaaggagt

SEQ ID NO: 24333 - DNA, 33 bp, Homo sapiens
taaattccagaatatccatgaggagtcttggaa

SEQ ID NO: 24334 - DNA, 33 bp, Homo sapiens
ctggcacagagtatccaagctagaaaagttaaa

SEQ ID NO: 24335 - DNA, 33 bp, Homo sapiens
gtagaatatgtggtcacggctatagatgtgact

SEQ ID NO: 24336 - DNA, 33 bp, Homo sapiens
gctttgttaacttagcctcttcctctatggaga

SEQ ID NO: 24337 - DNA, 33 bp, Homo sapiens
gcctgagctctgaaacgctaaataaaccacatc

SEQ ID NO: 24338 - DNA, 33 bp, Homo sapiens
gtgaggctgcattttaacacagtatcaatctcc

SEQ ID NO: 24339 - DNA, 33 bp, Homo sapiens
ttccttggtgtcctacaaacttggcatattcag

SEQ ID NO: 24340 - DNA, 51 bp, Homo sapiens
ttattttccagcaggacaagatcaccctgtttagctggtgtatcagtcagg

SEQ ID NO: 24341 - DNA, 33 bp, Homo sapiens
atcagccagtgaaatacggaatttgaccccaaa

SEQ ID NO: 24342 - DNA, 51 bp, Homo sapiens
gtttaggtaccttgtcaagtaccttctcaataacacatgccagggtccaga

SEQ ID NO: 24343 - DNA, 51 bp, Homo sapiens
atgggagggaagaattggggctaagaccataactggcatatttgctatctg

SEQ ID NO: 24344 - DNA, 33 bp, Homo sapiens
ggagagccagtggtgaccagaaggtttgggtca

SEQ ID NO: 24345 - DNA, 33 bp, Homo sapiens
aaagtcactctcaagaagtcactactcactaat

SEQ ID NO: 24346 - DNA, 33 bp, Homo sapiens
gatagacatctgacacacggtctcaatccagaa

SEQ ID NO: 24347 - DNA, 33 bp, Homo sapiens
tttattccattgaaaacagtgctggttactgtg

SEQ ID NO: 24348 - DNA, 33 bp, Homo sapiens
ccaagtttgtaatatacaaggtgtgtttagaaa

SEQ ID NO: 24349 - DNA, 51 bp, Homo sapiens
atgttactaattcactgggtaagtcaacggatatcccaagatgtaatgccc

SEQ ID NO: 24350 - DNA, 33 bp, Homo sapiens
ggagtattgcctgatacgtagcgaaaacactgc

SEQ ID NO: 24351 - DNA, 51 bp, Homo sapiens
tttgactttttttcttcagggacaccagtagtataaataaatatttactgt

SEQ ID NO: 24352 - DNA, 33 bp, Homo sapiens
ctagatttgagtgccacctcccaacctggaata

SEQ ID NO: 24353 - DNA, 33 bp, Homo sapiens
aaagtgatacctggctcaatagaataacgaatt

SEQ ID NO: 24354 - DNA, 33 bp, Homo sapiens
atttcacatatgcacaccttgaggacaagaatt

SEQ ID NO: 24355 - DNA, 33 bp, Homo sapiens
taaaagctgagctgaacgttgccctggaagtca

SEQ ID NO: 24356 - DNA, 33 bp, Homo sapiens
tgtgcatggaacattgaaagcgtttggaacgga

SEQ ID NO: 24357 - DNA, 33 bp, Homo sapiens
tatggagaagcatccaactatgtctcaatggtt

SEQ ID NO: 24358 - DNA, 51 bp, Homo sapiens
agtcggcaaacattccttttgttaggaatgcaccctcacttccaaatcaga

SEQ ID NO: 24359 - DNA, 51 bp, Homo sapiens
aaaaaacacaaaagcatgctcaggaaataaatttattacacaaagtccttt

SEQ ID NO: 24360 - DNA, 33 bp, Homo sapiens
tgcaacaccgtttaccaactctgacaagccact

SEQ ID NO: 24361 - DNA, 33 bp, Homo sapiens
atccaaaggtcgttaaaatggaaataagtgtcc

SEQ ID NO: 24362 - DNA, 33 bp, Homo sapiens
accagtatgcaacaacgctttgccatgattctt

SEQ ID NO: 24363 - DNA, 33 bp, Homo sapiens
tttagaatacatagatcatctaaaaagcacaga

SEQ ID NO: 24364 - DNA, 33 bp, Homo sapiens
ccacacccactggagaaataaggccttcaaggg

SEQ ID NO: 24365 - DNA, 33 bp, Homo sapiens
tacaccacttttgtgaaatgaaaattcctgaag

SEQ ID NO: 24366 - DNA, 33 bp, Homo sapiens
tttggaggaatcaatgaagacggaattctttta

SEQ ID NO: 24367 - DNA, 33 bp, Homo sapiens
atgaattaaggtgagacgttgggaatgaagagg

SEQ ID NO: 24368 - DNA, 33 bp, Homo sapiens
gcaattgctccatttacggtaacctagtgttct

SEQ ID NO: 24369 - DNA, 33 bp, Homo sapiens
cccactataatcagcaaggccattgatacccta

SEQ ID NO: 24370 - DNA, 33 bp, Homo sapiens
catgatgtgagaatcaaggccttagagaatggt

SEQ ID NO: 24371 - DNA, 33 bp, Homo sapiens
aaggctttcagatacaacccttctttcaatcct

SEQ ID NO: 24372 - DNA, 33 bp, Homo sapiens
ctcagcctcagcatggaagagtatatggagtta

SEQ ID NO: 24373 - DNA, 33 bp, Homo sapiens
gctactgtttatcactaagcactaaacagaata

SEQ ID NO: 24374 - DNA, 33 bp, Homo sapiens
cttgagggtacacttacggtgactagagttaag

SEQ ID NO: 24375 - DNA, 33 bp, Homo sapiens
aaatcccaaatgcttacgtttggtcatccactg

SEQ ID NO: 24376 - DNA, 33 bp, Homo sapiens
tcatatgcaaaatgaacgggactgggccaggtg

SEQ ID NO: 24377 - DNA, 33 bp, Homo sapiens
ccattctcttctggtacctttacatgatctacc

SEQ ID NO: 24378 - DNA, 33 bp, Homo sapiens
catttgtacgtaggcaatcagatctttgtttct

SEQ ID NO: 24379 - DNA, 51 bp, Homo sapiens
tttactttttttttgaggtcattaaaaaaaaggagaagaagaatatataac

SEQ ID NO: 24380 - DNA, 33 bp, Homo sapiens
attgagcacattaagcgctctaagacccaagat

SEQ ID NO: 24381 - DNA, 33 bp, Homo sapiens
tgattgtgtacaacctaaactataagctccttg

SEQ ID NO: 24382 - DNA, 51 bp, Homo sapiens
aaggacaaagcaaaaatattctagcacaagagagcagacagaagcatggac

SEQ ID NO: 24383 - DNA, 33 bp, Homo sapiens
actgccaggaaatgtcaatgtccaagcgggcct

SEQ ID NO: 24384 - DNA, 51 bp, Homo sapiens
ctcagggatatctgtaaatacatgaaggctcttttttctggttgttagtgg

SEQ ID NO: 24385 - DNA, 33 bp, Homo sapiens
aaaactttttaatccaatgcttaatgtgtgcta

SEQ ID NO: 24386 - DNA, 51 bp, Homo sapiens
tcctggtccctgctttgctgatggccttgaagcagcctcccaagcagatga

SEQ ID NO: 24387 - DNA, 33 bp, Homo sapiens
tactactggattggtcaactataaggatgtcat

SEQ ID NO: 24388 - DNA, 51 bp, Homo sapiens
agaggcttcttcctctcccttcctccgtaatcattacaaacagtggatatg

SEQ ID NO: 24389 - DNA, 51 bp, Homo sapiens
ggtgaaaaactcctgggcttttcagcatagaattccaccatcacatgtgag

SEQ ID NO: 24390 - DNA, 33 bp, Homo sapiens
aactaaaataattacaaaaaagtgcaattatct

SEQ ID NO: 24391 - DNA, 33 bp, Homo sapiens
tgtgtgggctacttcaataagcaagtctaaact

SEQ ID NO: 24392 - DNA, 33 bp, Homo sapiens
ccaaaataacattcagactatctttaaaatatt

SEQ ID NO: 24393 - DNA, 33 bp, Homo sapiens
ttgaaccttcttcaaaacagtgtttcatcatat

SEQ ID NO: 24394 - DNA, 33 bp, Homo sapiens
ttaaggttttaagcacaggaatgatgtgaccag

SEQ ID NO: 24395 - DNA, 33 bp, Homo sapiens
cgaattagattgacaacggacagaagacttgaa

SEQ ID NO: 24396 - DNA, 33 bp, Homo sapiens
gagactagacttggaaataataatgtacaatgt

SEQ ID NO: 24397 - DNA, 33 bp, Homo sapiens
aaggaactcaacaacaaaaacaattccaagtaa

SEQ ID NO: 24398 - DNA, 33 bp, Homo sapiens
tggcactctgcgtgtcacccatatgcagggaca

SEQ ID NO: 24399 - DNA, 33 bp, Homo sapiens
gttaataaggggatcaacaagatggtaaaactg

SEQ ID NO: 24400 - DNA, 33 bp, Homo sapiens
aggagctgaatcagccaaaactctccctcccca

SEQ ID NO: 24401 - DNA, 33 bp, Homo sapiens
ggaattggacagtaaccggagaagcagctggat

SEQ ID NO: 24402 - DNA, 33 bp, Homo sapiens
cttcccactgtagcaaagtgagcttttttttct

SEQ ID NO: 24403 - DNA, 33 bp, Homo sapiens
gcgtacccacaatagcaaggaactcttttgttt

SEQ ID NO: 24404 - DNA, 51 bp, Homo sapiens
ccctccactaagccggtttagcaaacagccctttcctcccagggtcttcca

SEQ ID NO: 24405 - DNA, 33 bp, Homo sapiens
aaatcatatttggtagacaggatttatatgatc

SEQ ID NO: 24406 - DNA, 33 bp, Homo sapiens
ggttcaggttcagggaaaaagatgtgtgctgac

SEQ ID NO: 24407 - DNA, 33 bp, Homo sapiens
aacagatagtaaagtacgatattatgcaggaat

SEQ ID NO: 24408 - DNA, 33 bp, Homo sapiens
aaaattcatgcctccaaattcggcaaactcttg

SEQ ID NO: 24409 - DNA, 33 bp, Homo sapiens
taaaaactattccagacactgtggaagtaaaga

SEQ ID NO: 24410 - DNA, 33 bp, Homo sapiens
agtgctagaaaatgaaacataaagcatgaaggg

SEQ ID NO: 24411 - DNA, 33 bp, Homo sapiens
tccaaatcagtgcaaagatctgatgcggtgggg

SEQ ID NO: 24412 - DNA, 33 bp, Homo sapiens
aaaactgcatacagtacaacttgcacattgagt

SEQ ID NO: 24413 - DNA, 33 bp, Homo sapiens
ttccgaagccagaggaaaaatggtgctaatgtc

SEQ ID NO: 24414 - DNA, 33 bp, Homo sapiens
cccacatcatattccaactgcttcctgtttctc

SEQ ID NO: 24415 - DNA, 33 bp, Homo sapiens
aatacaaatacagtgaagttctgttgcaaaata

SEQ ID NO: 24416 - DNA, 33 bp, Homo sapiens
ggggagaaatcatcagactctccttgattgcac

SEQ ID NO: 24417 - DNA, 33 bp, Homo sapiens
ctctgattgatatacacggacaaatgtgcgtct

SEQ ID NO: 24418 - DNA, 33 bp, Homo sapiens
agagtctaatttgagaaaggacatgatttcctt

SEQ ID NO: 24419 - DNA, 33 bp, Homo sapiens
ctgacccttggttccacaacaccctgaaaaatt

SEQ ID NO: 24420 - DNA, 33 bp, Homo sapiens
tcttttgttaaggcctcaaaaatatttaaggtg

SEQ ID NO: 24421 - DNA, 33 bp, Homo sapiens
ttcactaactccaagaacttgtctccctacttc

SEQ ID NO: 24422 - DNA, 51 bp, Homo sapiens
ttaacatttaagtatctacaatactcaaaatactgatatttagatatatta

SEQ ID NO: 24423 - DNA, 33 bp, Homo sapiens
ggaatgttgcttataaactctgtgtatttggtc

SEQ ID NO: 24424 - DNA, 33 bp, Homo sapiens
tgtgcactggatacaacgacggtttctcatttt

SEQ ID NO: 24425 - DNA, 33 bp, Homo sapiens
gccattcattgctaaaatgttcacctctggtga

SEQ ID NO: 24426 - DNA, 33 bp, Homo sapiens
aggcaaaatcttgactaaagtgttgaggagaat

SEQ ID NO: 24427 - DNA, 33 bp, Homo sapiens
aagaggagtaaagatacggagtggagccaggcg

SEQ ID NO: 24428 - DNA, 33 bp, Homo sapiens
taatgactgaaagtaaagaaaggtgactaagtt

SEQ ID NO: 24429 - DNA, 33 bp, Homo sapiens
ttaatgaatctggataaaggatttaaaagcatt

SEQ ID NO: 24430 - DNA, 33 bp, Homo sapiens
ctccaaattttgggaacagctaattgtctgtga

SEQ ID NO: 24431 - DNA, 33 bp, Homo sapiens
aagtaccaaaagattaccaggtcagaccagggc

SEQ ID NO: 24432 - DNA, 33 bp, Homo sapiens
taatgttcagggtctgaaaggcctattagtttg

SEQ ID NO: 24433 - DNA, 33 bp, Homo sapiens
caggcacatattgaaactctacaagtgccagga

SEQ ID NO: 24434 - DNA, 33 bp, Homo sapiens
ttcataccattctccccgactttactgcatcat

SEQ ID NO: 24435 - DNA, 33 bp, Homo sapiens
cgagtgaatttctttaggcagaaaagacaaaag

SEQ ID NO: 24436 - DNA, 33 bp, Homo sapiens
tgttttgtcaaagcaaagagtctgaaggttaac

SEQ ID NO: 24437 - DNA, 33 bp, Homo sapiens
ttctctttactcataaactccatatgtggcttg

SEQ ID NO: 24438 - DNA, 33 bp, Homo sapiens
gctttatatggctttacatgggatgatgcataa

SEQ ID NO: 24439 - DNA, 33 bp, Homo sapiens
agttcctgttgtgctaactccataccagccttt

SEQ ID NO: 24440 - DNA, 33 bp, Homo sapiens
gccttatggaatgagaactgtcaggaccaaagt

SEQ ID NO: 24441 - DNA, 33 bp, Homo sapiens
tagatcatatctgacactacgtctcagctgtca

SEQ ID NO: 24442 - DNA, 33 bp, Homo sapiens
tagtgtcaggtacacacagaagagcttgagaac

SEQ ID NO: 24443 - DNA, 51 bp, Homo sapiens
tgattgctatagcacagcacttttcaatcatgaggaaactgagtcttagaa

SEQ ID NO: 24444 - DNA, 33 bp, Homo sapiens
tttaaggtctgaactgaagaagagaagagagga

SEQ ID NO: 24445 - DNA, 33 bp, Homo sapiens
ctccgagaccttttagaccaccctgaagaacac

SEQ ID NO: 24446 - DNA, 33 bp, Homo sapiens
gattcaagaaactgacaaagaggcccagaggct

SEQ ID NO: 24447 - DNA, 51 bp, Homo sapiens
atctataaaatggtagtaataatgacaccttaatcccatggtgttggtgag

SEQ ID NO: 24448 - DNA, 51 bp, Homo sapiens
taaactatattaggaataattcagacgatcttaataggtgtgatctctaga

SEQ ID NO: 24449 - DNA, 33 bp, Homo sapiens
ggtaattcctccagagccaaatgcatgtctgat

SEQ ID NO: 24450 - DNA, 33 bp, Homo sapiens
tgctgggattctgaggaagatatctaggcactg

SEQ ID NO: 24451 - DNA, 33 bp, Homo sapiens
agtctttttaagtcaccgccaaatccattttgc

SEQ ID NO: 24452 - DNA, 33 bp, Homo sapiens
gtaaatcacatgcactaaaatccatgactcaga

SEQ ID NO: 24453 - DNA, 33 bp, Homo sapiens
ctggaaaagcctgaagcctggctacaacttgcc

SEQ ID NO: 24454 - DNA, 33 bp, Homo sapiens
atgagaaaatccttcaagagtaggcttccacta

SEQ ID NO: 24455 - DNA, 33 bp, Homo sapiens
gagtctgttaaagtagaagacagggtgagaagg

SEQ ID NO: 24456 - DNA, 33 bp, Homo sapiens
gggtgggccacgaaacaaagagggggctagcta

SEQ ID NO: 24457 - DNA, 33 bp, Homo sapiens
tatagaaaggttatgaaatttgttcctagatcc

SEQ ID NO: 24458 - DNA, 33 bp, Homo sapiens
gctatgtggcacatgcaacagggtgggaaagga

SEQ ID NO: 24459 - DNA, 51 bp, Homo sapiens
ctctgacaaggaaagaaatgatgagaatgagatagttctatttattaaatg

SEQ ID NO: 24460 - DNA, 33 bp, Homo sapiens
cctatttcccatacatgaaccactcttcttgtt

SEQ ID NO: 24461 - DNA, 33 bp, Homo sapiens
attgaaggacaggactaacatatacaatgcagc

SEQ ID NO: 24462 - DNA, 33 bp, Homo sapiens
taagggagttctgagacagaaagatcaatataa

SEQ ID NO: 24463 - DNA, 33 bp, Homo sapiens
catcgctcacaaagaacgctctctaccctcttg

SEQ ID NO: 24464 - DNA, 33 bp, Homo sapiens
attaggagcaattagtaaacagaatcaaaggtg

SEQ ID NO: 24465 - DNA, 33 bp, Homo sapiens
gccactttacgccttaccagtttggcaaaattc

SEQ ID NO: 24466 - DNA, 33 bp, Homo sapiens
agcaccgactgagttacatgaaacagaacaagg

SEQ ID NO: 24467 - DNA, 33 bp, Homo sapiens
cacagtgcagagatgaacaaacatatagactgc

SEQ ID NO: 24468 - DNA, 33 bp, Homo sapiens
agctttgacttgtaaaacagcagctaaattgtc

SEQ ID NO: 24469 - DNA, 51 bp, Homo sapiens
tctagctatccttgttagggttccacgattcctagaaatgtggacctcatg

SEQ ID NO: 24470 - DNA, 33 bp, Homo sapiens
tgaaggtaagtggaacaaaagagaaagaaggtt

SEQ ID NO: 24471 - DNA, 33 bp, Homo sapiens
atgccaaatgtaaaaacgaacatgaggaacatg

SEQ ID NO: 24472 - DNA, 33 bp, Homo sapiens
cctgccgtaattcccaatcgacagagatatgtc

SEQ ID NO: 24473 - DNA, 33 bp, Homo sapiens
aggcagagagtcagaacagaagggtttaaggga

SEQ ID NO: 24474 - DNA, 33 bp, Homo sapiens
cgggcgaggtgcctcccgctagaactcagggga

SEQ ID NO: 24475 - DNA, 33 bp, Homo sapiens
ggcagtctggcttcagaatcctaactcttaact

SEQ ID NO: 24476 - DNA, 33 bp, Homo sapiens
acctctgttggagagagaaattctttcaagtgg

SEQ ID NO: 24477 - DNA, 33 bp, Homo sapiens
gaaaacaagtttaccaagagacagagaaactcc

SEQ ID NO: 24478 - DNA, 33 bp, Homo sapiens
attttgaataatttgccataccaaccatacttg

SEQ ID NO: 24479 - DNA, 33 bp, Homo sapiens
tttaggatacttaacacgctcccagtgtctcac

SEQ ID NO: 24480 - DNA, 33 bp, Homo sapiens
gtataaaataaagataacggcacctacctccca

SEQ ID NO: 24481 - DNA, 33 bp, Homo sapiens
aggccattgcctaacccgagagaacaggttata

SEQ ID NO: 24482 - DNA, 33 bp, Homo sapiens
tctgctaagaggattcaaaccagtatctgtcca

SEQ ID NO: 24483 - DNA, 33 bp, Homo sapiens
aatcattcttttggaaatgaatatagtatgagg

SEQ ID NO: 24484 - DNA, 33 bp, Homo sapiens
agaaatgcttggggtcgctttgcttgcagaggt

SEQ ID NO: 24485 - DNA, 33 bp, Homo sapiens
atgtggaggtaggcccaggacacagtagagcac

SEQ ID NO: 24486 - DNA, 33 bp, Homo sapiens
tcacacagttaataagcaaacccaggaatgtct

SEQ ID NO: 24487 - DNA, 33 bp, Homo sapiens
actaagttctcatcaacggagtgtaagtagatg

SEQ ID NO: 24488 - DNA, 33 bp, Homo sapiens
ttcaggtcaacttaaaaccctaatgaaataata

SEQ ID NO: 24489 - DNA, 33 bp, Homo sapiens
aattttggagttttcactaagcatagatcctag

SEQ ID NO: 24490 - DNA, 33 bp, Homo sapiens
atgggcctaatgagaactgattgattcgctcga

SEQ ID NO: 24491 - DNA, 33 bp, Homo sapiens
gtctggcatgtttgtcaagcagttatcaacctg

SEQ ID NO: 24492 - DNA, 33 bp, Homo sapiens
ggtcttagataattcaacttagcaattcaacca

SEQ ID NO: 24493 - DNA, 33 bp, Homo sapiens
cttcattccttttatcacttcaagcattagcta

SEQ ID NO: 24494 - DNA, 33 bp, Homo sapiens
gatatgttgagttttcaaagaaatgagggtggt

SEQ ID NO: 24495 - DNA, 33 bp, Homo sapiens
ctaccatttttagggccctccatgatccaacgc

SEQ ID NO: 24496 - DNA, 33 bp, Homo sapiens
caggtttagacttatcaaacatcttgccagacc

SEQ ID NO: 24497 - DNA, 51 bp, Homo sapiens
ggtcttggaaaatcattacagtaaaatgcagattctaataagccttgtttc

SEQ ID NO: 24498 - DNA, 33 bp, Homo sapiens
gccttcttatagcagacggagctgaaaggaacc

SEQ ID NO: 24499 - DNA, 33 bp, Homo sapiens
tattatgaaaaaagccactctgaacattcatgt

SEQ ID NO: 24500 - DNA, 33 bp, Homo sapiens
gaatgaaccttcacaacgcaggacaaagcagga

SEQ ID NO: 24501 - DNA, 33 bp, Homo sapiens
gacaccagaaactggaagcaatatgggttccca

SEQ ID NO: 24502 - DNA, 33 bp, Homo sapiens
ccgataggcatctaccactgatggggactcaga

SEQ ID NO: 24503 - DNA, 33 bp, Homo sapiens
ggataaaaatgtgctaagcaaaatatgttggcc

SEQ ID NO: 24504 - DNA, 51 bp, Homo sapiens
gccaaatcaatctgtaaattgtctacgggtgagttgaaattgtaatctgag

SEQ ID NO: 24505 - DNA, 51 bp, Homo sapiens
tatacttttacattttcattagtacaactcaattcccttgctctctggccc

SEQ ID NO: 24506 - DNA, 33 bp, Homo sapiens
agatggctctggattgaaagtaactatatataa

SEQ ID NO: 24507 - DNA, 33 bp, Homo sapiens
agttctaatgacattaactacacagaaccatgc

SEQ ID NO: 24508 - DNA, 33 bp, Homo sapiens
ttaatcttcaccattaaccctatgtaacatttt

SEQ ID NO: 24509 - DNA, 33 bp, Homo sapiens
ttaagtcttccaagaacggttttagttggaaaa

SEQ ID NO: 24510 - DNA, 33 bp, Homo sapiens
gctcacaaatgaagtcaacaggaagagatgctt

SEQ ID NO: 24511 - DNA, 33 bp, Homo sapiens
caattttaccactcaaaccaggagctactactg

SEQ ID NO: 24512 - DNA, 33 bp, Homo sapiens
aataccgctccaaagagatcccactatttcttt

SEQ ID NO: 24513 - DNA, 33 bp, Homo sapiens
aaattacaaatacaaaagagaccatacttatta

SEQ ID NO: 24514 - DNA, 33 bp, Homo sapiens
acacctgaagtcataacacactcaatgaaggaa

SEQ ID NO: 24515 - DNA, 33 bp, Homo sapiens
cagaacgtgtcctcccacaacatgatggctaaa

SEQ ID NO: 24516 - DNA, 33 bp, Homo sapiens
attggcaagacaaacaccattaggtttcgaaca

SEQ ID NO: 24517 - DNA, 33 bp, Homo sapiens
gtaatggggctggttcccgtaagaattatcatt

SEQ ID NO: 24518 - DNA, 33 bp, Homo sapiens
ctggtaagtgtttggcaaaagaaggcataatga

SEQ ID NO: 24519 - DNA, 33 bp, Homo sapiens
agacacacattatcacacccaagtaatttgtgc

SEQ ID NO: 24520 - DNA, 51 bp, Homo sapiens
attaggtgttagctaaagaatcttcacttggcataaatgtgtcccatgaat

SEQ ID NO: 24521 - DNA, 51 bp, Homo sapiens
tttggcagaactttgagatagaaccactgaagtcaccctgactatctgtgt

SEQ ID NO: 24522 - DNA, 33 bp, Homo sapiens
tcagcctcactagtaaatgcaaatgaaggcacc

SEQ ID NO: 24523 - DNA, 51 bp, Homo sapiens
aaaatctctcatcaaacagagccggccatattaaaacaagaaagacagaga

SEQ ID NO: 24524 - DNA, 51 bp, Homo sapiens
ataaaattttagtttgaagtactgacgaatatacaatttagtgacacattt

SEQ ID NO: 24525 - DNA, 33 bp, Homo sapiens
tttccgggctagtttacagggaagatatgtatc

SEQ ID NO: 24526 - DNA, 51 bp, Homo sapiens
aagtgggaaaatgtattaggcactcaatagatcctcacgtgatataatctt

SEQ ID NO: 24527 - DNA, 33 bp, Homo sapiens
tttctggctaaaattacgttacttcctttggtc

SEQ ID NO: 24528 - DNA, 51 bp, Homo sapiens
gccttctatgtttctggccaactcaacgatacaaaaacattcaccagatca

SEQ ID NO: 24529 - DNA, 33 bp, Homo sapiens
ttgaacagtgatgaaaagatactctatctagct

SEQ ID NO: 24530 - DNA, 33 bp, Homo sapiens
ctgacttctagacactgaaaaaatctctttcat

SEQ ID NO: 24531 - DNA, 33 bp, Homo sapiens
ctggtattacaagcacagtctgatagtgaatcc

SEQ ID NO: 24532 - DNA, 33 bp, Homo sapiens
ataagaaaagtttcacagagtggctggaatttc

SEQ ID NO: 24533 - DNA, 33 bp, Homo sapiens
tgagaacaccaaataccagtgaagatgtagagt

SEQ ID NO: 24534 - DNA, 33 bp, Homo sapiens
aatttagtacagtctacgatctggtttttaggt

SEQ ID NO: 24535 - DNA, 33 bp, Homo sapiens
ggggaggtagttaaacaagtacataatacatac

SEQ ID NO: 24536 - DNA, 33 bp, Homo sapiens
cagacccaatgttctccgactttgaccactgca

SEQ ID NO: 24537 - DNA, 33 bp, Homo sapiens
cctacctgtcaacgtgaaatagagaaaagtcag

SEQ ID NO: 24538 - DNA, 33 bp, Homo sapiens
tggcttccctaggaacagcagagataggctagc

SEQ ID NO: 24539 - DNA, 33 bp, Homo sapiens
atctaagatgtccagaaagtggtgatttggggg

SEQ ID NO: 24540 - DNA, 33 bp, Homo sapiens
tgtacaatttcatatacgccctgatactaagcc

SEQ ID NO: 24541 - DNA, 33 bp, Homo sapiens
ttcctgttgggaaagactcagtggaagaaataa

SEQ ID NO: 24542 - DNA, 33 bp, Homo sapiens
tcttcttttcagaaagaccttatttaatgatca

SEQ ID NO: 24543 - DNA, 33 bp, Homo sapiens
ggaaacgcttagctacaagagtgactaggaatg

SEQ ID NO: 24544 - DNA, 33 bp, Homo sapiens
ttgcattttgtgaataaataagaagcagctagg

SEQ ID NO: 24545 - DNA, 33 bp, Homo sapiens
tgcatggctttctaaactttaagatgtgattca

SEQ ID NO: 24546 - DNA, 33 bp, Homo sapiens
acattgttggcttaccagggtttacagtttctt

SEQ ID NO: 24547 - DNA, 33 bp, Homo sapiens
taccagcaatcctgaccgtattatacctgatct

SEQ ID NO: 24548 - DNA, 33 bp, Homo sapiens
cacattcagtgagtcacagaagccctttacctg

SEQ ID NO: 24549 - DNA, 51 bp, Homo sapiens
cacacaggatagcaaaagttagctcattacagatttcacatccatgagtct

SEQ ID NO: 24550 - DNA, 51 bp, Homo sapiens
ctttgcagaggtgattaaggatcataagattgggagattaccctgggtgat

SEQ ID NO: 24551 - DNA, 51 bp, Homo sapiens
atccctgcaccccacatggtctccactgacaaagcacagtagtggaagtcc

SEQ ID NO: 24552 - DNA, 33 bp, Homo sapiens
tacagaaaagtacctaagatgaactactgaaaa

SEQ ID NO: 24553 - DNA, 51 bp, Homo sapiens
tttcaagttcatttttcataatgaccagtacttttaatacctgaactggtg

SEQ ID NO: 24554 - DNA, 33 bp, Homo sapiens
tgggcctgaaatacaacgagaaaatgctcttga

SEQ ID NO: 24555 - DNA, 33 bp, Homo sapiens
acatttttagttatcacacactagagcacatga

SEQ ID NO: 24556 - DNA, 33 bp, Homo sapiens
gttaatatatcaaaaacggaactaataagctcc

SEQ ID NO: 24557 - DNA, 51 bp, Homo sapiens
acctctatcttgaggaatcttaggaactacatacagtgctagaaacaggct

SEQ ID NO: 24558 - DNA, 33 bp, Homo sapiens
ggcagcattgcagcccagatatagacaggagtg

SEQ ID NO: 24559 - DNA, 33 bp, Homo sapiens
tcttggttcctcttatgacaactggtgtctggt

SEQ ID NO: 24560 - DNA, 33 bp, Homo sapiens
ctgaaaacgcattaaccctttctctagaagtgg

SEQ ID NO: 24561 - DNA, 33 bp, Homo sapiens
gattttttccagtatacgaaagccatttattgt

SEQ ID NO: 24562 - DNA, 33 bp, Homo sapiens
gtttaccccaatctaacagagtttagaggagac

SEQ ID NO: 24563 - DNA, 33 bp, Homo sapiens
ttctttgtcctttgataacttctatagaatgcc

SEQ ID NO: 24564 - DNA, 51 bp, Homo sapiens
gagtccaaatcatgctttgtgaccactctttttccgtaaactgtctcattc

SEQ ID NO: 24565 - DNA, 33 bp, Homo sapiens
ctttctcagcattgaagatttcttctctttgtt

SEQ ID NO: 24566 - DNA, 33 bp, Homo sapiens
tcatgtgtaaacctcaaagtgtaaagtaatggc

SEQ ID NO: 24567 - DNA, 33 bp, Homo sapiens
ctttaaattgcataaacccaatattgtatatta

SEQ ID NO: 24568 - DNA, 33 bp, Homo sapiens
agaaatgggtgagtacaaggctataaagaaaaa

SEQ ID NO: 24569 - DNA, 33 bp, Homo sapiens
atgtttaaagtagaaacaacaatggtcaaacaa

SEQ ID NO: 24570 - DNA, 33 bp, Homo sapiens
cataagttcacacaagaatctccatgtgatgat

SEQ ID NO: 24571 - DNA, 33 bp, Homo sapiens
atgttcacaagtaaagccatctaggcctcacag

SEQ ID NO: 24572 - DNA, 33 bp, Homo sapiens
gaaatacaaagggtcactctcactgtaatatgt

SEQ ID NO: 24573 - DNA, 33 bp, Homo sapiens
aaataggcaaaagaaactaggaacagtccccaa

SEQ ID NO: 24574 - DNA, 51 bp, Homo sapiens
tccattgataacacttattccaaaagctattacaattaggtgggccagtat

SEQ ID NO: 24575 - DNA, 33 bp, Homo sapiens
gatgtttttcttctaaagtacaaagcaataaac

SEQ ID NO: 24576 - DNA, 33 bp, Homo sapiens
agtatacactggagaccgaaaccatgatgaagt

SEQ ID NO: 24577 - DNA, 33 bp, Homo sapiens
tgccacttactcattcacctttgttgcccccct

SEQ ID NO: 24578 - DNA, 33 bp, Homo sapiens
atttaatattctgcaaatctgtgcttaagatat

SEQ ID NO: 24579 - DNA, 33 bp, Homo sapiens
caatattctgtctaaaatctgtaatctgaataa

SEQ ID NO: 24580 - DNA, 33 bp, Homo sapiens
accactgcttagcataataattggcatttgtta

SEQ ID NO: 24581 - DNA, 33 bp, Homo sapiens
gtaggatttgttaagcaaaatgatagctttcag

SEQ ID NO: 24582 - DNA, 33 bp, Homo sapiens
acaaagtcctctctagcaagcctgtcctctgag

SEQ ID NO: 24583 - DNA, 33 bp, Homo sapiens
tatcagccctaccgtagtacagataacttcatt

SEQ ID NO: 24584 - DNA, 33 bp, Homo sapiens
aacataggacactgtcaagaatcggttgtttat

SEQ ID NO: 24585 - DNA, 33 bp, Homo sapiens
cagttagccacaaaaactgcttaattctacatt

SEQ ID NO: 24586 - DNA, 33 bp, Homo sapiens
cactttcaggtacagcaatcaaaagcagatttg

SEQ ID NO: 24587 - DNA, 33 bp, Homo sapiens
ttacttagagcaacaccgggtattttctcttta

SEQ ID NO: 24588 - DNA, 33 bp, Homo sapiens
gagaactaaactagaaaaatatgaagcagacta

SEQ ID NO: 24589 - DNA, 33 bp, Homo sapiens
tgtcaaaaattgatccacactagtggaaataag

SEQ ID NO: 24590 - DNA, 51 bp, Homo sapiens
gtattggtgttattaaaaatggctacagaaagtggatggtagaatagatga

SEQ ID NO: 24591 - DNA, 51 bp, Homo sapiens
agaccatgatgtaaaatgatatgaacgaaggagaaagaacaaattttgata

SEQ ID NO: 24592 - DNA, 33 bp, Homo sapiens
tctgttaaaagtaagaaagttaacgcttatggc

SEQ ID NO: 24593 - DNA, 33 bp, Homo sapiens
acacttgttacaactaacgaacctacattgatg

SEQ ID NO: 24594 - DNA, 33 bp, Homo sapiens
tactactttgaagaaagtttagaggttgtgtct

SEQ ID NO: 24595 - DNA, 33 bp, Homo sapiens
tgtaggtgataattaaaaaggtacttggtgaaa

SEQ ID NO: 24596 - DNA, 33 bp, Homo sapiens
tattccacgtcatgcaagttattcataatcatc

SEQ ID NO: 24597 - DNA, 33 bp, Homo sapiens
ccaaaatatttgagccaaaggaagaagaagcaa

SEQ ID NO: 24598 - DNA, 33 bp, Homo sapiens
tttaacagcatcttgaaaggattaattcccata

SEQ ID NO: 24599 - DNA, 33 bp, Homo sapiens
gaccatcaacttacaaaagcctgtgagtggtga

SEQ ID NO: 24600 - DNA, 51 bp, Homo sapiens
acatagaatcaacctaggtgcttataaatggtagattaatttaaaaaatgg

SEQ ID NO: 24601 - DNA, 51 bp, Homo sapiens
ttccctttctacattctaggaaccaataatcagcacactcggcacaattat

SEQ ID NO: 24602 - DNA, 51 bp, Homo sapiens
ccatgaaatgagttctattttgatacagtttgttagaacctggggaaaatt

SEQ ID NO: 24603 - DNA, 51 bp, Homo sapiens
tctgcctttttacgtatgttgtaggaaacctgcaatattcagataatatga

SEQ ID NO: 24604 - DNA, 33 bp, Homo sapiens
taagtcatttctttgacgctgctttgagcatag

SEQ ID NO: 24605 - DNA, 51 bp, Homo sapiens
gatattctcagataaataatctcaagagaagtagatcataacattacctga

SEQ ID NO: 24606 - DNA, 33 bp, Homo sapiens
aaattaacccagtctgcattccaggccctaact

SEQ ID NO: 24607 - DNA, 33 bp, Homo sapiens
taatgcttatataccaacagtagaatatttagc

SEQ ID NO: 24608 - DNA, 33 bp, Homo sapiens
tcttgagacaatctaggcaactttggaattctc

SEQ ID NO: 24609 - DNA, 33 bp, Homo sapiens
aatgtccagaataggcacatttatagagacagc

SEQ ID NO: 24610 - DNA, 33 bp, Homo sapiens
aatcacagctaaccaggagtagaatctcacatc

SEQ ID NO: 24611 - DNA, 33 bp, Homo sapiens
aaactatctttccaaactcaggccaaaccaaag

SEQ ID NO: 24612 - DNA, 33 bp, Homo sapiens
tcaagcgttccttaaccattaagacacctgaac

SEQ ID NO: 24613 - DNA, 33 bp, Homo sapiens
aatgttcaaaacttaactcatgccatccctctt

SEQ ID NO: 24614 - DNA, 33 bp, Homo sapiens
ggtcagttcaataacaggagacaaagattttgg

SEQ ID NO: 24615 - DNA, 33 bp, Homo sapiens
gagtggagcaagcaaaaagttgtgtaatgggaa

SEQ ID NO: 24616 - DNA, 33 bp, Homo sapiens
tccagtgagaggcaaaagatattggaaatggaa

SEQ ID NO: 24617 - DNA, 33 bp, Homo sapiens
cacctctaaactttcaaccagttcaatatctaa

SEQ ID NO: 24618 - DNA, 33 bp, Homo sapiens
aatctgtgaaaccacccatgcgtactcagggac

SEQ ID NO: 24619 - DNA, 33 bp, Homo sapiens
attcgttgaatgaatacgaatgttttggtgact

SEQ ID NO: 24620 - DNA, 33 bp, Homo sapiens
atattctgtggtatcacggctaaattcaagata

SEQ ID NO: 24621 - DNA, 33 bp, Homo sapiens
tgaagacattgagggtaaaggggttaagcgact

SEQ ID NO: 24622 - DNA, 33 bp, Homo sapiens
gttctgacgggggtgaagcctgttgtgtttgag

SEQ ID NO: 24623 - DNA, 51 bp, Homo sapiens
aaatctcattcttgatttaattttccacttgtgcaaatcatattttccaac

SEQ ID NO: 24624 - DNA, 33 bp, Homo sapiens
aaagcctgggaaagtgaaatgtccctgaggaaa

SEQ ID NO: 24625 - DNA, 33 bp, Homo sapiens
acatggaaaatgcaaccgaacacattagaaggt

SEQ ID NO: 24626 - DNA, 33 bp, Homo sapiens
taagtcagaatcagacacattttattccgctta

SEQ ID NO: 24627 - DNA, 33 bp, Homo sapiens
gattcgccaggaacaacgtaataaagaatcacc

SEQ ID NO: 24628 - DNA, 51 bp, Homo sapiens
agaatagaactcgatttattgataagggaatcaaggaatttttaactttct

SEQ ID NO: 24629 - DNA, 33 bp, Homo sapiens
ctgtctttctccacctaacattagcatcacttg

SEQ ID NO: 24630 - DNA, 33 bp, Homo sapiens
agagtaactgtttccacgcaaatgccctttcca

SEQ ID NO: 24631 - DNA, 33 bp, Homo sapiens
gtacaagaaaaactgacgataaaaatgcacagg

SEQ ID NO: 24632 - DNA, 51 bp, Homo sapiens
tcaaaacagaagttctcctttagcacctgaattgttttaccagaagtttta

SEQ ID NO: 24633 - DNA, 33 bp, Homo sapiens
tcttgcaaattttccactaataattactttcta

SEQ ID NO: 24634 - DNA, 33 bp, Homo sapiens
atggctacagagtcaaacaactttttactggga

SEQ ID NO: 24635 - DNA, 33 bp, Homo sapiens
aaacgactactagatcaaaccaaaagtgtctta

SEQ ID NO: 24636 - DNA, 33 bp, Homo sapiens
attattaagcattttggaagtgtgaacaaactg

SEQ ID NO: 24637 - DNA, 33 bp, Homo sapiens
agatagtcactgagaacttattatgtagtgtga

SEQ ID NO: 24638 - DNA, 33 bp, Homo sapiens
cagctctagaacaccaataaatcacagcttctc

SEQ ID NO: 24639 - DNA, 33 bp, Homo sapiens
acattgctattatgaacaacgttttgtaaaaat

SEQ ID NO: 24640 - DNA, 51 bp, Homo sapiens
ctggtagtttttgtgagtatttctacattcagatcaaaagatttgcgtaca

SEQ ID NO: 24641 - DNA, 33 bp, Homo sapiens
tgcatgtgatgataaacacatcgtctaaactta

SEQ ID NO: 24642 - DNA, 33 bp, Homo sapiens
cccaaaaggtctttgtaaaatatgcatagtatc

SEQ ID NO: 24643 - DNA, 33 bp, Homo sapiens
tactacaagtccaaaccaaaacaggatagtact

SEQ ID NO: 24644 - DNA, 33 bp, Homo sapiens
ttgaatagctgttatgcagcctaacttccagaa

SEQ ID NO: 24645 - DNA, 33 bp, Homo sapiens
tagaatcttatttgcccactgtttaaaaccgaa

SEQ ID NO: 24646 - DNA, 33 bp, Homo sapiens
tcattgttggaagccactcattggtatatatgt

SEQ ID NO: 24647 - DNA, 33 bp, Homo sapiens
aacttgatagcagccaatcggcctgggctcagg

SEQ ID NO: 24648 - DNA, 33 bp, Homo sapiens
gtatggcaaaccttcaagagtgagacacagcga

SEQ ID NO: 24649 - DNA, 33 bp, Homo sapiens
attctgccatcaagtcacttaaagtcaagcctg

SEQ ID NO: 24650 - DNA, 33 bp, Homo sapiens
agatatatatggcaagcaagtaaaaattatctg

SEQ ID NO: 24651 - DNA, 51 bp, Homo sapiens
cttggaatgtctgcagtactgcacaaaagacatccttacattttttaatag

SEQ ID NO: 24652 - DNA, 33 bp, Homo sapiens
gatgtagtttggttgacgaagtaaaacatggtt

SEQ ID NO: 24653 - DNA, 51 bp, Homo sapiens
ctacactggatctccaagtttaaacaattatctggttccgattcattcagt

SEQ ID NO: 24654 - DNA, 33 bp, Homo sapiens
gcttgaaaaaaacataacattctggatataaag

SEQ ID NO: 24655 - DNA, 33 bp, Homo sapiens
gtccatttgctttatcaacatcacggcttcaga

SEQ ID NO: 24656 - DNA, 33 bp, Homo sapiens
tcagttagctttcctggatagccaggcaccaca

SEQ ID NO: 24657 - DNA, 33 bp, Homo sapiens
ataaaatgttctccaaattactctagaagctga

SEQ ID NO: 24658 - DNA, 33 bp, Homo sapiens
ctttgtctatcctagccaaaatagtcttctgcc

SEQ ID NO: 24659 - DNA, 33 bp, Homo sapiens
atcttccaagctgggccctacatccctatacta

SEQ ID NO: 24660 - DNA, 33 bp, Homo sapiens
tttcttatactgagataaaactgaagctcaaaa

SEQ ID NO: 24661 - DNA, 33 bp, Homo sapiens
ctattgaaagtgactaagtctattggtaggtct

SEQ ID NO: 24662 - DNA, 51 bp, Homo sapiens
tgttttgatcaaagtcacagattacacttcaatatagctgccagtaaactg

SEQ ID NO: 24663 - DNA, 33 bp, Homo sapiens
tactatagacacatgaaaaaacagcaaactgca

SEQ ID NO: 24664 - DNA, 51 bp, Homo sapiens
atgctaaacagaagactggtatctaagagtttgtaaggtgtcagattttcc

SEQ ID NO: 24665 - DNA, 33 bp, Homo sapiens
cctgtataacaagcctaaacatttatccctgaa

SEQ ID NO: 24666 - DNA, 33 bp, Homo sapiens
tagaaggttgtatcaactctgctttctctgtac

SEQ ID NO: 24667 - DNA, 51 bp, Homo sapiens
gaattgtgggttttccttccactgcacatgaaacataagcaatcatttatt

SEQ ID NO: 24668 - DNA, 33 bp, Homo sapiens
tattcttgaaacaacagtcagatctccaacttc

SEQ ID NO: 24669 - DNA, 33 bp, Homo sapiens
aataggcaagggaaaacggtatgctggaatttc

SEQ ID NO: 24670 - DNA, 33 bp, Homo sapiens
aaaggcatttcattccacctaactcctgatgac

SEQ ID NO: 24671 - DNA, 33 bp, Homo sapiens
ctttatgaaaataaacacaaacattctgaggat

SEQ ID NO: 24672 - DNA, 33 bp, Homo sapiens
acctcttttactgtgaaactctacatctgattc

SEQ ID NO: 24673 - DNA, 51 bp, Homo sapiens
cagatattgtctatttgaaaatttcactattttgtcatcatgtttgaatga

SEQ ID NO: 24674 - DNA, 33 bp, Homo sapiens
ttcctggtaagagaccagagacccaatttcagg

SEQ ID NO: 24675 - DNA, 33 bp, Homo sapiens
gcctcacaaggacaaacgtaaactcttgaacac

SEQ ID NO: 24676 - DNA, 33 bp, Homo sapiens
tgtaatctggtcttgaagctccaggaatctgtc

SEQ ID NO: 24677 - DNA, 33 bp, Homo sapiens
ctcaatcgtaaaagtccgacacggctggtcaca

SEQ ID NO: 24678 - DNA, 33 bp, Homo sapiens
taggaaccaggccacacgacaggagtgagtgca

SEQ ID NO: 24679 - DNA, 33 bp, Homo sapiens
ggctcctccgaactgacatttggagatgttttt

SEQ ID NO: 24680 - DNA, 33 bp, Homo sapiens
gagattccagttgaaccgtcaggctctgagaag

SEQ ID NO: 24681 - DNA, 33 bp, Homo sapiens
ctttgaatctttcttacacacaggactttgagg

SEQ ID NO: 24682 - DNA, 33 bp, Homo sapiens
gactatacaggtataaaaagctagctctgttta

SEQ ID NO: 24683 - DNA, 51 bp, Homo sapiens
tttattcactcagggactaattaccaactttttatatgaagcagcattacg

SEQ ID NO: 24684 - DNA, 33 bp, Homo sapiens
tgggctgctcaggccaaaggatttccaagtttt

SEQ ID NO: 24685 - DNA, 33 bp, Homo sapiens
tcaaggtgattaggcacgatttctggccctgag

SEQ ID NO: 24686 - DNA, 51 bp, Homo sapiens
atggaaagagaatacggacaaggagaccctttaggaagttgatgagaagcg

SEQ ID NO: 24687 - DNA, 33 bp, Homo sapiens
aaagtaggtgactttcaatcccacaagtacatg

SEQ ID NO: 24688 - DNA, 33 bp, Homo sapiens
gaagaagtgtctcctccagtcacattcagccag

SEQ ID NO: 24689 - DNA, 51 bp, Homo sapiens
ggagaaagaatgctaagctaattgaagacaataagaggttcacttggttga

SEQ ID NO: 24690 - DNA, 51 bp, Homo sapiens
accaatgatatattttagaaactaaatccggctacagtagatttaggttgt

SEQ ID NO: 24691 - DNA, 33 bp, Homo sapiens
tattctggatagctggacatagctcccctctga

SEQ ID NO: 24692 - DNA, 33 bp, Homo sapiens
gacgctggtgtcagaaagtgtgcaaggcttccg

SEQ ID NO: 24693 - DNA, 33 bp, Homo sapiens
gtgattaagcaacatccgagagcaaagagaggg

SEQ ID NO: 24694 - DNA, 33 bp, Homo sapiens
gaaaatctgctcaggacgtctcttagccaggct

SEQ ID NO: 24695 - DNA, 33 bp, Homo sapiens
tcttcctacccatttgcaatcaatctcaccctc

SEQ ID NO: 24696 - DNA, 33 bp, Homo sapiens
ggcctaaatagaacgaaaaaggctgactctccc

SEQ ID NO: 24697 - DNA, 33 bp, Homo sapiens
actttccactcgaggcacaggaatatcattgtc

SEQ ID NO: 24698 - DNA, 33 bp, Homo sapiens
catagagatgggaagtaaaatggcggttgccgg

SEQ ID NO: 24699 - DNA, 33 bp, Homo sapiens
agctctgtctgggatccgagaaggaattagaaa

SEQ ID NO: 24700 - DNA, 33 bp, Homo sapiens
ggaactggccagtcagataagaaatacagtcta

SEQ ID NO: 24701 - DNA, 33 bp, Homo sapiens
gcaagaaacctctgaccctgaaagattaaaact

SEQ ID NO: 24702 - DNA, 33 bp, Homo sapiens
ataagctacgtttagactcattatgcatagatc

SEQ ID NO: 24703 - DNA, 33 bp, Homo sapiens
aagtctaagcaaaggggcacaacactcttggca

SEQ ID NO: 24704 - DNA, 33 bp, Homo sapiens
actgtaaaacgtgccacatgatagtttgaaaac

SEQ ID NO: 24705 - DNA, 33 bp, Homo sapiens
cattcagtccatagcactgcatttgtcaattat

SEQ ID NO: 24706 - DNA, 33 bp, Homo sapiens
tcattcaggcttctaacggcaaatgagatcaga

SEQ ID NO: 24707 - DNA, 33 bp, Homo sapiens
gatcattggaatgaagcaaaaagtgcttaatac

SEQ ID NO: 24708 - DNA, 33 bp, Homo sapiens
gcttctgaagccatccgaatccactggccagtt

SEQ ID NO: 24709 - DNA, 33 bp, Homo sapiens
gaaataagtatagatacagcaagtgccattata

SEQ ID NO: 24710 - DNA, 33 bp, Homo sapiens
ccattttcgtagtgaactgggaagcaaggtcac

SEQ ID NO: 24711 - DNA, 33 bp, Homo sapiens
catcagggctgggctaaatctgacacttggtga

SEQ ID NO: 24712 - DNA, 33 bp, Homo sapiens
cggagtgactgggaaacgatggtatcgctgaca

SEQ ID NO: 24713 - DNA, 33 bp, Homo sapiens
gcttttctcatctgcacagtctgtcctcctgtc

SEQ ID NO: 24714 - DNA, 33 bp, Homo sapiens
ggggcattcatgcctgaacttaaacaatactat

SEQ ID NO: 24715 - DNA, 33 bp, Homo sapiens
cctggatcctgataagcagttctgggtggagga

SEQ ID NO: 24716 - DNA, 33 bp, Homo sapiens
gaggattgccaacaaaatttcagtataacttct

SEQ ID NO: 24717 - DNA, 33 bp, Homo sapiens
cgaagagccatcaccccgagggaacctgttttg

SEQ ID NO: 24718 - DNA, 33 bp, Homo sapiens
gaatttctctttcttcccatatctcctgttata

SEQ ID NO: 24719 - DNA, 33 bp, Homo sapiens
gggcctgatagatacacaaattttgctccagcc

SEQ ID NO: 24720 - DNA, 51 bp, Homo sapiens
caggccatccactacctctttatcccgacctgaggaacgtgcacttagcgc

SEQ ID NO: 24721 - DNA, 33 bp, Homo sapiens
gaatgatcactaaaaaacttagcaagaggaagg

SEQ ID NO: 24722 - DNA, 33 bp, Homo sapiens
gcagacccagcttagacgattgctgcagcttgg

SEQ ID NO: 24723 - DNA, 51 bp, Homo sapiens
gggcagggacagggagagtctataccagatgtgcatgcacatttcatatag

SEQ ID NO: 24724 - DNA, 33 bp, Homo sapiens
cacagttatttccaaactgtcaagaagatggta

SEQ ID NO: 24725 - DNA, 33 bp, Homo sapiens
ctcatggtcatctcaaaccagttcaatggaatc

SEQ ID NO: 24726 - DNA, 33 bp, Homo sapiens
agcactcttggagctcaatctctagggtatgtg

SEQ ID NO: 24727 - DNA, 33 bp, Homo sapiens
tgattatggctggtgcagagtagaccacaggag

SEQ ID NO: 24728 - DNA, 33 bp, Homo sapiens
ctcctagctatgatgaagtgcagtaaaagtcca

SEQ ID NO: 24729 - DNA, 33 bp, Homo sapiens
acatatgtggatggaacatttcagaacaacttg

SEQ ID NO: 24730 - DNA, 33 bp, Homo sapiens
accatcctgaagtaccaattctccttatcagaa

SEQ ID NO: 24731 - DNA, 33 bp, Homo sapiens
cctcaaccttactccaaagatttctcccttgac

SEQ ID NO: 24732 - DNA, 33 bp, Homo sapiens
aaaatgccagagcatcaaaagacaaagtggctc

SEQ ID NO: 24733 - DNA, 33 bp, Homo sapiens
aacatggctgtgtatacgaaatggtttggattt

SEQ ID NO: 24734 - DNA, 33 bp, Homo sapiens
agtgcatgctttatcacggccttatcatctggc

SEQ ID NO: 24735 - DNA, 51 bp, Homo sapiens
gggctggtagctgaagcagaaatcaattatgcctgtgttgtttgtctccca

SEQ ID NO: 24736 - DNA, 33 bp, Homo sapiens
caggaatggaatttcacctacgtacagtggaag

SEQ ID NO: 24737 - DNA, 33 bp, Homo sapiens
aggtactgaaccaaacagttctttacaaatgtt

SEQ ID NO: 24738 - DNA, 51 bp, Homo sapiens
ccttcttgctggacttttccacctacgtttcacccacgtctcaaactcggt

SEQ ID NO: 24739 - DNA, 33 bp, Homo sapiens
accttcagattcaacaaacataagaacatcata

SEQ ID NO: 24740 - DNA, 33 bp, Homo sapiens
gccacacaactggtaacaaagtggcgggattta

SEQ ID NO: 24741 - DNA, 33 bp, Homo sapiens
tcatccagatgattagaattctcaaaaggaagt

SEQ ID NO: 24742 - DNA, 33 bp, Homo sapiens
tttgggccacaatctgcatttggtgggagtggt

SEQ ID NO: 24743 - DNA, 33 bp, Homo sapiens
tctatatcatgctaaactcctgcactgaggttc

SEQ ID NO: 24744 - DNA, 33 bp, Homo sapiens
gaggtaggtgttatcacgaccattttacagatg

SEQ ID NO: 24745 - DNA, 33 bp, Homo sapiens
tcctcagatgtccatcactatccctgttgctct

SEQ ID NO: 24746 - DNA, 33 bp, Homo sapiens
tctgtgtaaacatcagcatcgtataaggaagaa

SEQ ID NO: 24747 - DNA, 33 bp, Homo sapiens
gtgagatgacccggaaacatcttagagttagac

SEQ ID NO: 24748 - DNA, 51 bp, Homo sapiens
tttgctgccacctgacttgaagctccgaccaccccagtgctacttctgctc

SEQ ID NO: 24749 - DNA, 33 bp, Homo sapiens
gtatctgttcaggcccagaatcgtcacggctca

SEQ ID NO: 24750 - DNA, 33 bp, Homo sapiens
ctgaatttactgagtacagctgggaagccttga

SEQ ID NO: 24751 - DNA, 33 bp, Homo sapiens
gaactcacgaagaacactgtggctgataacaga

SEQ ID NO: 24752 - DNA, 33 bp, Homo sapiens
tgccctctgccgtccaaaactgatattgcactg

SEQ ID NO: 24753 - DNA, 33 bp, Homo sapiens
ttgaatcctttcatgaagtaggcattattattc

SEQ ID NO: 24754 - DNA, 33 bp, Homo sapiens
aagccatggattggaaataaatcaagagcaaaa

SEQ ID NO: 24755 - DNA, 33 bp, Homo sapiens
tctgccaacttaaagcaagattgtctggtctag

SEQ ID NO: 24756 - DNA, 33 bp, Homo sapiens
tgcctcagagattgccgacctgtggattaagaa

SEQ ID NO: 24757 - DNA, 33 bp, Homo sapiens
tatatacaacagaaaaactcaagcagttttata

SEQ ID NO: 24758 - DNA, 33 bp, Homo sapiens
cttgagataattggaaaacatggtatttctatt

SEQ ID NO: 24759 - DNA, 33 bp, Homo sapiens
gtaacaacatagtcaaattcagttgttaccaaa

SEQ ID NO: 24760 - DNA, 33 bp, Homo sapiens
tggggaaacaggttgaataacacagtagggagt

SEQ ID NO: 24761 - DNA, 33 bp, Homo sapiens
aataatgcttagcacacagaaggagctccataa

SEQ ID NO: 24762 - DNA, 33 bp, Homo sapiens
gcgtcatgtgtatctacgtccaaattatattta

SEQ ID NO: 24763 - DNA, 33 bp, Homo sapiens
tgccttgaggaagatacgattggaaaatcaaga

SEQ ID NO: 24764 - DNA, 33 bp, Homo sapiens
acacatatatctctggccaccttcagagcaacc

SEQ ID NO: 24765 - DNA, 33 bp, Homo sapiens
aaacagagatggaagacgagacaaaaatgccat

SEQ ID NO: 24766 - DNA, 51 bp, Homo sapiens
caactagctaaatacataaagcaaaatcattaggaatttgataagcctaat

SEQ ID NO: 24767 - DNA, 33 bp, Homo sapiens
gtagaatagattagaacaagaatatgctggagg

SEQ ID NO: 24768 - DNA, 33 bp, Homo sapiens
aagattgacgctatcaagcaagatcaagagtgt

SEQ ID NO: 24769 - DNA, 51 bp, Homo sapiens
ctaacctattcactcctaccataaaggattcaagaaaactggtgtgagttt

SEQ ID NO: 24770 - DNA, 33 bp, Homo sapiens
gcacctctgaccttacaaagctatccatgaatc

SEQ ID NO: 24771 - DNA, 33 bp, Homo sapiens
aggtcttcgtcagttacacagtagttactgggt

SEQ ID NO: 24772 - DNA, 33 bp, Homo sapiens
gaagacttctaaaaacaattcaagtactgacag

SEQ ID NO: 24773 - DNA, 33 bp, Homo sapiens
gattaggaggtagacaatcaggctcctatgtgt

SEQ ID NO: 24774 - DNA, 33 bp, Homo sapiens
ttgtgagcattccaggaacctctgaaaacaagc

SEQ ID NO: 24775 - DNA, 33 bp, Homo sapiens
gagatttaacacacataaaagagaaagccaggt

SEQ ID NO: 24776 - DNA, 33 bp, Homo sapiens
agatcccaatgttatacggactctttctcttcc

SEQ ID NO: 24777 - DNA, 33 bp, Homo sapiens
aactcctccaaaagaacggatgtctagatgaag

SEQ ID NO: 24778 - DNA, 33 bp, Homo sapiens
ctaaatggaattcctgaacaaagtagggcaggt

SEQ ID NO: 24779 - DNA, 33 bp, Homo sapiens
ctgcactgtgaagagcaagtggtttgggaagca

SEQ ID NO: 24780 - DNA, 33 bp, Homo sapiens
aaaaaatctcttcccactcattaagtaactgca

SEQ ID NO: 24781 - DNA, 33 bp, Homo sapiens
catacctaatgactaacacagtgactggtgcaa

SEQ ID NO: 24782 - DNA, 33 bp, Homo sapiens
gtgggtctctgagtcacggcttaagtattttgg

SEQ ID NO: 24783 - DNA, 33 bp, Homo sapiens
ctgcggaggcaagcgcagaagaagtcattagtc

SEQ ID NO: 24784 - DNA, 33 bp, Homo sapiens
ctggattttcatcagaatctaactgacctcaag

SEQ ID NO: 24785 - DNA, 33 bp, Homo sapiens
taatctcacagaaatacgaaagacccgcagaga

SEQ ID NO: 24786 - DNA, 33 bp, Homo sapiens
gatgaagtctcggagaaggtagtgattctctgc

SEQ ID NO: 24787 - DNA, 33 bp, Homo sapiens
agtgagtggcaagctcaaatttaaactctagca

SEQ ID NO: 24788 - DNA, 33 bp, Homo sapiens
gaggaaccagaaggggcaatacagtcagatacc

SEQ ID NO: 24789 - DNA, 33 bp, Homo sapiens
cttatggttccatataccttgctgtattttcat

SEQ ID NO: 24790 - DNA, 51 bp, Homo sapiens
aggtgggctttataggcaaaaaaagcctgaagaaaggaaaaacacggaacc

SEQ ID NO: 24791 - DNA, 51 bp, Homo sapiens
cccaagtgagcgattcacactaaacactatgttgacatattctatgggatg

SEQ ID NO: 24792 - DNA, 33 bp, Homo sapiens
ctctgggagctcctaacctaatgggggtgactc

SEQ ID NO: 24793 - DNA, 33 bp, Homo sapiens
gtgatgtggtatgagactcaggctgtacggcct

SEQ ID NO: 24794 - DNA, 33 bp, Homo sapiens
acactgcccttaggaccaggcaagacaggtgcc

SEQ ID NO: 24795 - DNA, 51 bp, Homo sapiens
ttaaaagaaatgcctggtcaaataccgtagggaattactgaggaagaactt

SEQ ID NO: 24796 - DNA, 33 bp, Homo sapiens
aaatgaacagctgcaaccttatatgtgagatgg

SEQ ID NO: 24797 - DNA, 51 bp, Homo sapiens
aggaggcaggacacagaatttccaacgctcaggatccagctcatccaaatc

SEQ ID NO: 24798 - DNA, 33 bp, Homo sapiens
aagagagctacaaataaagaggtgagatccacc

SEQ ID NO: 24799 - DNA, 33 bp, Homo sapiens
gcagtgagcaaaaagacatgcaattcctaccgt

SEQ ID NO: 24800 - DNA, 33 bp, Homo sapiens
acctggcagcctttaactgaaaacattgcttga

SEQ ID NO: 24801 - DNA, 33 bp, Homo sapiens
gtgtcttcttgtcttacgggcttttgtcttgac

SEQ ID NO: 24802 - DNA, 33 bp, Homo sapiens
ccctttgtcttcagcacagattccttccacatt

SEQ ID NO: 24803 - DNA, 51 bp, Homo sapiens
tgacataagtcagtagataaatatcactgcctatgtgtttcattgaaatgc

SEQ ID NO: 24804 - DNA, 33 bp, Homo sapiens
gtactgaggctatgtccaagcacagagacagct

SEQ ID NO: 24805 - DNA, 33 bp, Homo sapiens
ccgctctacgacctaactcagctttgtggccag

SEQ ID NO: 24806 - DNA, 33 bp, Homo sapiens
gtggtagagagtgataagtgcctcgttgcatgg

SEQ ID NO: 24807 - DNA, 33 bp, Homo sapiens
gagaccagtccctgcccgcaaagaaattgagtc

SEQ ID NO: 24808 - DNA, 33 bp, Homo sapiens
aggggccactgggagaccagcagaagacgccct

SEQ ID NO: 24809 - DNA, 33 bp, Homo sapiens
tgaaattcaaatttaagctggtgtactgctttt

SEQ ID NO: 24810 - DNA, 33 bp, Homo sapiens
attatgttgagctctaaaacaaaacactcagaa

SEQ ID NO: 24811 - DNA, 33 bp, Homo sapiens
cagtagtgtttccttacctgcagtttttgcttt

SEQ ID NO: 24812 - DNA, 33 bp, Homo sapiens
gcaccaacattggacactgaaggtctttttaat

SEQ ID NO: 24813 - DNA, 33 bp, Homo sapiens
caactaacttgagaaaactgctgatatgaaata

SEQ ID NO: 24814 - DNA, 33 bp, Homo sapiens
gtatatgtttccttcaacggttatttgagatgc

SEQ ID NO: 24815 - DNA, 33 bp, Homo sapiens
ctggaagttttattcacgtgctcttagctacta

SEQ ID NO: 24816 - DNA, 33 bp, Homo sapiens
aggcacttcattgtccacctgatttgccctctc

SEQ ID NO: 24817 - DNA, 33 bp, Homo sapiens
ttttatataagggttgaaactcttgcccatcca

SEQ ID NO: 24818 - DNA, 33 bp, Homo sapiens
tctctgagacaaaagcaaaatcttaatgttcag

SEQ ID NO: 24819 - DNA, 33 bp, Homo sapiens
tgccctggagtaattacgaagcataggcattct

SEQ ID NO: 24820 - DNA, 33 bp, Homo sapiens
acatgcacacttgggaccactgtgtctagtctc

SEQ ID NO: 24821 - DNA, 33 bp, Homo sapiens
gagacagctctgggtacggatttgagccctgcc

SEQ ID NO: 24822 - DNA, 33 bp, Homo sapiens
ttggctccttcttctacgagtggtgaggaaatc

SEQ ID NO: 24823 - DNA, 33 bp, Homo sapiens
tttacaaagggagatacgtacagcagtaactat

SEQ ID NO: 24824 - DNA, 33 bp, Homo sapiens
cagctgtgtttagctacggctttggcttgaagc

SEQ ID NO: 24825 - DNA, 33 bp, Homo sapiens
tgcacagggggatctaacctctatttctactgc

SEQ ID NO: 24826 - DNA, 51 bp, Homo sapiens
tactacttgcatcagaatcacctatcacgctttttaaaaagcaggttctca

SEQ ID NO: 24827 - DNA, 33 bp, Homo sapiens
ttttgtactatatacacctagtttgaacttaaa

SEQ ID NO: 24828 - DNA, 51 bp, Homo sapiens
ttcctcttacctcatttttggacaacggtcatctcagaactgaacttgaag

SEQ ID NO: 24829 - DNA, 33 bp, Homo sapiens
cacacagcaatttaaccggtctgaagcatgagg

SEQ ID NO: 24830 - DNA, 33 bp, Homo sapiens
aacacctctgtcctcaggcagtttatattcatt

SEQ ID NO: 24831 - DNA, 33 bp, Homo sapiens
tttttctctaagcaaaatgtgggctaaggtaaa

SEQ ID NO: 24832 - DNA, 33 bp, Homo sapiens
accttttcatccccccaatggataaacttatta

SEQ ID NO: 24833 - DNA, 33 bp, Homo sapiens
aatcagtcaataattaaccatagctccattaac

SEQ ID NO: 24834 - DNA, 33 bp, Homo sapiens
tgcatttctttctcaacacatttgtgtgcctgt

SEQ ID NO: 24835 - DNA, 33 bp, Homo sapiens
tattttataagcatcccatgttttggctgcagg

SEQ ID NO: 24836 - DNA, 33 bp, Homo sapiens
agtgaaccttttagccaaagatgaggaagaaat

SEQ ID NO: 24837 - DNA, 33 bp, Homo sapiens
aggtatacggcctgaccgaactggttagccata

SEQ ID NO: 24838 - DNA, 33 bp, Homo sapiens
cccacacgacctggaactgagagcagaaagcta

SEQ ID NO: 24839 - DNA, 33 bp, Homo sapiens
caatgatggataagatcacagccgtgctaagaa

SEQ ID NO: 24840 - DNA, 51 bp, Homo sapiens
taggtgaggtcactgagcagaccccacatactcacagttcatgcaacccaa

SEQ ID NO: 24841 - DNA, 33 bp, Homo sapiens
catttttttcattgaaagtgtgccttcttttga

SEQ ID NO: 24842 - DNA, 51 bp, Homo sapiens
ttcagtgaactgggtgtaaacaatacagattttcaaattaacaaggaaaaa

SEQ ID NO: 24843 - DNA, 33 bp, Homo sapiens
ctatacaattcccccaaattatgctaaggagca

SEQ ID NO: 24844 - DNA, 33 bp, Homo sapiens
tggaaatataaaatgcacttgattctgctgtgt

SEQ ID NO: 24845 - DNA, 33 bp, Homo sapiens
gttatttgtgtactgcactggcaagcaaatgcg

SEQ ID NO: 24846 - DNA, 33 bp, Homo sapiens
attgcttcaacatagcaaagactgagtctgtgt

SEQ ID NO: 24847 - DNA, 33 bp, Homo sapiens
ttaatcagaccattacaaaattgaataaatggc

SEQ ID NO: 24848 - DNA, 33 bp, Homo sapiens
taaggctccaatctgccatgttctagacataca

SEQ ID NO: 24849 - DNA, 33 bp, Homo sapiens
acaatttgagcaggtacatttgagactatatag

SEQ ID NO: 24850 - DNA, 33 bp, Homo sapiens
tggaaggggaaaatcaaggtcagaaatgaaaag

SEQ ID NO: 24851 - DNA, 33 bp, Homo sapiens
taataagcaaccagtcaaaaagaaaatgcatct

SEQ ID NO: 24852 - DNA, 33 bp, Homo sapiens
ggatttctctccctaaatcgtggtctagaaata

SEQ ID NO: 24853 - DNA, 33 bp, Homo sapiens
atcttcctcatgctgacgtctttgctacatgaa

SEQ ID NO: 24854 - DNA, 33 bp, Homo sapiens
ctagctttcaacctgtaaactttctacatgcct

SEQ ID NO: 24855 - DNA, 33 bp, Homo sapiens
acatgaactgagtttgcaataagattgtactgc

SEQ ID NO: 24856 - DNA, 33 bp, Homo sapiens
agtttgattacctgtgaataggaaggctttaag

SEQ ID NO: 24857 - DNA, 33 bp, Homo sapiens
gacagctaaaataaaacaggtggcagaatatat

SEQ ID NO: 24858 - DNA, 33 bp, Homo sapiens
cctttccttctatccccattgcaccatgctgtc

SEQ ID NO: 24859 - DNA, 33 bp, Homo sapiens
tctagctgaacaaagagaggtttatgcaataat

SEQ ID NO: 24860 - DNA, 51 bp, Homo sapiens
gctggaatagagacttgaactgacaaataagcataacaataggtgaaactt

SEQ ID NO: 24861 - DNA, 51 bp, Homo sapiens
aataggtgaaacttggaaggccagacaagccagcataatttggcacaaggg

SEQ ID NO: 24862 - DNA, 33 bp, Homo sapiens
tgttgttctccataaaacctaaaattcctcaga

SEQ ID NO: 24863 - DNA, 33 bp, Homo sapiens
gatgggctggtgaagacgttgctttccgttgag

SEQ ID NO: 24864 - DNA, 33 bp, Homo sapiens
gaagcagcagggccaaatcaccactttcctgca

SEQ ID NO: 24865 - DNA, 33 bp, Homo sapiens
ccacagatggacttaaatgacttccaaacattg

SEQ ID NO: 24866 - DNA, 33 bp, Homo sapiens
ctgtaaagtggtgaaagagtaaaacctgccttt

SEQ ID NO: 24867 - DNA, 33 bp, Homo sapiens
ctcaacttttggtcacactgagcaatcctctag

SEQ ID NO: 24868 - DNA, 33 bp, Homo sapiens
actctagccctgagaacgtaaacgctttctcag

SEQ ID NO: 24869 - DNA, 33 bp, Homo sapiens
cctctgtaaagacaacaaacttaataaagagat

SEQ ID NO: 24870 - DNA, 33 bp, Homo sapiens
gggaacataaaaggaaatcccaagtgaaatgag

SEQ ID NO: 24871 - DNA, 33 bp, Homo sapiens
tcttcaaaactcttgccatttgcagggtcttct

SEQ ID NO: 24872 - DNA, 51 bp, Homo sapiens
tcctccttcctccttttctttggaaaataatctgtgtcctaacttaagtat

SEQ ID NO: 24873 - DNA, 51 bp, Homo sapiens
taaactcttttttcggtcagtttccaattttcatttattataatgctctag

SEQ ID NO: 24874 - DNA, 33 bp, Homo sapiens
tatatggaaaatgaaccgggactgcagaagtga

SEQ ID NO: 24875 - DNA, 33 bp, Homo sapiens
agtattcatttagctcacttccacaattgaaac

SEQ ID NO: 24876 - DNA, 33 bp, Homo sapiens
accacatatgtagttcaatcatcagaggtaaag

SEQ ID NO: 24877 - DNA, 33 bp, Homo sapiens
ggtatgcatagtattacgtcagaacgaccttcc

SEQ ID NO: 24878 - DNA, 33 bp, Homo sapiens
actttcacaggtaactcaggagagagctcttcc

SEQ ID NO: 24879 - DNA, 33 bp, Homo sapiens
cacaatttaactcagccaagattaggtaattaa

SEQ ID NO: 24880 - DNA, 33 bp, Homo sapiens
ggagaatgattcattaccaaatttcaacacgtg

SEQ ID NO: 24881 - DNA, 33 bp, Homo sapiens
gtaagattcagtataccagtacatacttagcca

SEQ ID NO: 24882 - DNA, 33 bp, Homo sapiens
cctacaatctattaggcccaagttacttacaaa

SEQ ID NO: 24883 - DNA, 33 bp, Homo sapiens
aggcacactttacctacgctagttagtttaatc

SEQ ID NO: 24884 - DNA, 33 bp, Homo sapiens
cctaaagcccctgctcccaatggcagcttgaga

SEQ ID NO: 24885 - DNA, 33 bp, Homo sapiens
aggatgaatttacagacactacaggtgaagtct

SEQ ID NO: 24886 - DNA, 33 bp, Homo sapiens
atggggtagctgaatacgctagaaatggaagaa

SEQ ID NO: 24887 - DNA, 33 bp, Homo sapiens
caggacagtatttggacgttaggcttatcagac

SEQ ID NO: 24888 - DNA, 33 bp, Homo sapiens
cttggtattgtttgtcacttgattatggccttc

SEQ ID NO: 24889 - DNA, 33 bp, Homo sapiens
tgtgattggggtatacaagggatgtgagatagg

SEQ ID NO: 24890 - DNA, 33 bp, Homo sapiens
gattcataattttccccacgtagagtgtgattt

SEQ ID NO: 24891 - DNA, 33 bp, Homo sapiens
tttacttaggaagacaaaagacaggctaagatt

SEQ ID NO: 24892 - DNA, 33 bp, Homo sapiens
ttaccttgttctggccacagctcatttatttca

SEQ ID NO: 24893 - DNA, 33 bp, Homo sapiens
tttgatggatcttttaggctcgctataattctc

SEQ ID NO: 24894 - DNA, 51 bp, Homo sapiens
gtcatcaaactgaaactaagttgttctctaacattccaaggaatcagaaga

SEQ ID NO: 24895 - DNA, 33 bp, Homo sapiens
gagagggtaaggcatcaaagtgagaaagcaaaa

SEQ ID NO: 24896 - DNA, 33 bp, Homo sapiens
atttgggtatggtcacaagttatgttaggggtc

SEQ ID NO: 24897 - DNA, 33 bp, Homo sapiens
ggcagacaggtgtgaaagacatcataggtatct

SEQ ID NO: 24898 - DNA, 33 bp, Homo sapiens
atctctgagggaattaaaggctagtctacacaa

SEQ ID NO: 24899 - DNA, 33 bp, Homo sapiens
cagttcctggctcataaggagagagattaaata

SEQ ID NO: 24900 - DNA, 33 bp, Homo sapiens
ctaataatacagtcacacttcaatgattcctgt

SEQ ID NO: 24901 - DNA, 33 bp, Homo sapiens
tcctctggataccaaacaggttgcggcatggga

SEQ ID NO: 24902 - DNA, 33 bp, Homo sapiens
tagagatggatagagtaaagaattttaaaaggt

SEQ ID NO: 24903 - DNA, 33 bp, Homo sapiens
tagaatccagatgcttaaaccattcaaagatta

SEQ ID NO: 24904 - DNA, 33 bp, Homo sapiens
tttgtcagttgtcccaagactttatttgtaggc

SEQ ID NO: 24905 - DNA, 33 bp, Homo sapiens
ctcatttgtgtccctgaaagagataaggagaga

SEQ ID NO: 24906 - DNA, 33 bp, Homo sapiens
ctcatcctctcttcacaccttacttctagcagc

SEQ ID NO: 24907 - DNA, 33 bp, Homo sapiens
attcaactctgtgttacggttatgtgtctgtgc

SEQ ID NO: 24908 - DNA, 33 bp, Homo sapiens
aatctttgaagtcggaagataaaaatcaccatt

SEQ ID NO: 24909 - DNA, 33 bp, Homo sapiens
gctgactttacagagacatttattggaggtagg

SEQ ID NO: 24910 - DNA, 51 bp, Homo sapiens
ttgaatcttaatgtaaagcacatgacggaaatagatttcacttattttact

SEQ ID NO: 24911 - DNA, 51 bp, Homo sapiens
tcatgattaaggaaattgccatatacgttgatggaatgataattaaacatt

SEQ ID NO: 24912 - DNA, 33 bp, Homo sapiens
tggcaggaaacacatacacaatttcatgacagc

SEQ ID NO: 24913 - DNA, 33 bp, Homo sapiens
gctggcaaagttaacactggtgtacttttcatt

SEQ ID NO: 24914 - DNA, 33 bp, Homo sapiens
atttattgcttcctaccatgttatacattggcc

SEQ ID NO: 24915 - DNA, 33 bp, Homo sapiens
gtaaatggcgctataaataaatgtgacagcctc

SEQ ID NO: 24916 - DNA, 33 bp, Homo sapiens
ataaacagccagaactcagcaatattctaatat

SEQ ID NO: 24917 - DNA, 33 bp, Homo sapiens
tgtttgtcaagtcacaatatgagcaaatctatc

SEQ ID NO: 24918 - DNA, 33 bp, Homo sapiens
tcacagcctctgaaaaaacttccttaaccaccc

SEQ ID NO: 24919 - DNA, 33 bp, Homo sapiens
tgcacagaatgtgaaaccacttagtacagagac

SEQ ID NO: 24920 - DNA, 33 bp, Homo sapiens
aattagaggcagcttaacccaacaggtactgtg

SEQ ID NO: 24921 - DNA, 33 bp, Homo sapiens
cttcgctttgtctcaacctatctgtagtttcaa

SEQ ID NO: 24922 - DNA, 33 bp, Homo sapiens
caattagatctgcagaatatctgatcctgggaa

SEQ ID NO: 24923 - DNA, 33 bp, Homo sapiens
acactgaaggtagaaacaggaattctgtgtagg

SEQ ID NO: 24924 - DNA, 51 bp, Homo sapiens
tcacgatcttgcttccagcatgctcagactatcataataacttcttaacca

SEQ ID NO: 24925 - DNA, 33 bp, Homo sapiens
tgttttctcttactgaacaaagcacactgttga

SEQ ID NO: 24926 - DNA, 33 bp, Homo sapiens
agacctagaccacctacgagtataaaaagcaac

SEQ ID NO: 24927 - DNA, 33 bp, Homo sapiens
agctgtctaccatagcagagaaggtgctatttg

SEQ ID NO: 24928 - DNA, 33 bp, Homo sapiens
gttgggtaacaagtgcacagatatttggtcaaa

SEQ ID NO: 24929 - DNA, 33 bp, Homo sapiens
atgctagggacaaagacgaggaatgagtggccc

SEQ ID NO: 24930 - DNA, 51 bp, Homo sapiens
gaggcaggaattactccaacttcccaaaaccttcagaaaacagccctggtc

SEQ ID NO: 24931 - DNA, 33 bp, Homo sapiens
ttcacagactaagttacgccgttactccaggat

SEQ ID NO: 24932 - DNA, 33 bp, Homo sapiens
ataatctctggctaacaatgcctgtttctaatc

SEQ ID NO: 24933 - DNA, 51 bp, Homo sapiens
aaggctttgaacagtttaaatccagacattccttcttggtgtttaagctcc

SEQ ID NO: 24934 - DNA, 33 bp, Homo sapiens
gtcacatgctaaatgcaaattaagaaaagagag

SEQ ID NO: 24935 - DNA, 33 bp, Homo sapiens
ctcttcacttacagtcactcctatgatgttatt

SEQ ID NO: 24936 - DNA, 33 bp, Homo sapiens
ctgtgagtgaggtctcaaagaactatgatgtgg

SEQ ID NO: 24937 - DNA, 33 bp, Homo sapiens
cttttgctgagaaggcaaaggaaattctcgccc

SEQ ID NO: 24938 - DNA, 51 bp, Homo sapiens
acccgaatgaaagtagttctcagaaagccagaagtagttctcagagactcg

SEQ ID NO: 24939 - DNA, 51 bp, Homo sapiens
gaaaggctacagattttcttcagcagtcattattacatataataaacattt

SEQ ID NO: 24940 - DNA, 33 bp, Homo sapiens
cctctgtcttctgtccaaaactcctatactcag

SEQ ID NO: 24941 - DNA, 33 bp, Homo sapiens
tgagtggagcagtctaagcagcaaggcgtggtg

SEQ ID NO: 24942 - DNA, 33 bp, Homo sapiens
actgctttcctagcaccccataagattcagaaa

SEQ ID NO: 24943 - DNA, 33 bp, Homo sapiens
aggaggcccctgtaacgacttgccttcttcctg

SEQ ID NO: 24944 - DNA, 33 bp, Homo sapiens
ataatgagtagttcaacgaggccagcggacagc

SEQ ID NO: 24945 - DNA, 33 bp, Homo sapiens
tcctatgaccggaaaaacagactagtagaggcc

SEQ ID NO: 24946 - DNA, 33 bp, Homo sapiens
gcctaagtgacatcaaatggatcaagacaaaac

SEQ ID NO: 24947 - DNA, 33 bp, Homo sapiens
agatccaagtggagacaaacttttcctttctct

SEQ ID NO: 24948 - DNA, 33 bp, Homo sapiens
gcgaagggtaggtggcaaagaagagaaaagacc

SEQ ID NO: 24949 - DNA, 33 bp, Homo sapiens
agtttaagcagggttcaatgaagagcccaccca

SEQ ID NO: 24950 - DNA, 33 bp, Homo sapiens
ggaggagtccagaggaaagtaacagtggatgga

SEQ ID NO: 24951 - DNA, 33 bp, Homo sapiens
gtctggagaatagaccaaaggcaataagggtag

SEQ ID NO: 24952 - DNA, 33 bp, Homo sapiens
actgaagttcctgaaaccttccttggaaaaatc

SEQ ID NO: 24953 - DNA, 33 bp, Homo sapiens
taccctttgccaacataatcctcattaaattca

SEQ ID NO: 24954 - DNA, 33 bp, Homo sapiens
gacatcagtatttgcaaagccaagttattaaag

SEQ ID NO: 24955 - DNA, 33 bp, Homo sapiens
cgtagatgacttcaacagaccgagagaaagaag

SEQ ID NO: 24956 - DNA, 33 bp, Homo sapiens
ttttgtctcagccaacaggattactgggctccc

SEQ ID NO: 24957 - DNA, 33 bp, Homo sapiens
aataaagctggtgttaagggtatactatattta

SEQ ID NO: 24958 - DNA, 33 bp, Homo sapiens
tgcagtagcccttcaacgaccttctttccccaa

SEQ ID NO: 24959 - DNA, 33 bp, Homo sapiens
ttcactaaggggcagacgccaagcgcacggctc

SEQ ID NO: 24960 - DNA, 33 bp, Homo sapiens
tgatggttagggtgaaatgttaagactgagaaa

SEQ ID NO: 24961 - DNA, 33 bp, Homo sapiens
gactggggccacatacaaacaggacttcagaac

SEQ ID NO: 24962 - DNA, 33 bp, Homo sapiens
gtgtttaacacccccaaaaagcttgtctaagta

SEQ ID NO: 24963 - DNA, 33 bp, Homo sapiens
tatttttaagatcatcaaacaggtattctggag

SEQ ID NO: 24964 - DNA, 33 bp, Homo sapiens
tccattaattatatcacctggagaacctactga

SEQ ID NO: 24965 - DNA, 33 bp, Homo sapiens
gtcatcatgtatcttacacatattgtggtatac

SEQ ID NO: 24966 - DNA, 33 bp, Homo sapiens
tttagttaaaatggaactgagaagcaaagcaga

SEQ ID NO: 24967 - DNA, 33 bp, Homo sapiens
tgcttcgtgattatggcagagtgtccttgactt

SEQ ID NO: 24968 - DNA, 33 bp, Homo sapiens
tgtttaatacagagaaatcaactgagccagatg

SEQ ID NO: 24969 - DNA, 33 bp, Homo sapiens
tttctcagtctccttcactggatgatccttatc

SEQ ID NO: 24970 - DNA, 33 bp, Homo sapiens
catgaaaactttctgacgagaccagagagcaga

SEQ ID NO: 24971 - DNA, 33 bp, Homo sapiens
agaggtggaagtcgtaactttggggtcaggccc

SEQ ID NO: 24972 - DNA, 51 bp, Homo sapiens
gcctgcaaaggatggcctgtcagctcagcagtctgtgtgctttctagagta

SEQ ID NO: 24973 - DNA, 51 bp, Homo sapiens
agcatcttgtatgcagtgagtgttacgaattttctttttgttaaaatgaat

SEQ ID NO: 24974 - DNA, 51 bp, Homo sapiens
aagaagcaacagacgaagcatctaaccttgtgaataaaatgattgatttag

SEQ ID NO: 24975 - DNA, 33 bp, Homo sapiens
agcatatacaagtatcaatagcccaatcaatca

SEQ ID NO: 24976 - DNA, 33 bp, Homo sapiens
gaaggtcctgttttcccaaggcatttttaataa

SEQ ID NO: 24977 - DNA, 33 bp, Homo sapiens
atgaagaagggtcctcaacaaaggagcacagct

SEQ ID NO: 24978 - DNA, 33 bp, Homo sapiens
cccagctttgggacgaacaccaccttgccaccc

SEQ ID NO: 24979 - DNA, 33 bp, Homo sapiens
agcttccatgtccataaaaaggaggggagaagg

SEQ ID NO: 24980 - DNA, 33 bp, Homo sapiens
gtaggagggcctagacaagaaagtaggagaaac

SEQ ID NO: 24981 - DNA, 33 bp, Homo sapiens
gtagatactctggtcacattggattgggccctt

SEQ ID NO: 24982 - DNA, 33 bp, Homo sapiens
aatatttgtatgtttacatcttgtaactttgct

SEQ ID NO: 24983 - DNA, 33 bp, Homo sapiens
taaaatctaaggcccacgtaaccagtcgtttca

SEQ ID NO: 24984 - DNA, 33 bp, Homo sapiens
tgctgaagatgaccaccgcaggagggaaaggaa

SEQ ID NO: 24985 - DNA, 33 bp, Homo sapiens
atgtaataattctggagaagccagggtacataa

SEQ ID NO: 24986 - DNA, 33 bp, Homo sapiens
gcaaggaggtcggcgacatcacgcatccacagt

SEQ ID NO: 24987 - DNA, 33 bp, Homo sapiens
ctcctgattgtcctctaaatgtgctagctagct

SEQ ID NO: 24988 - DNA, 33 bp, Homo sapiens
gggctgggtgacgcacaaatcttgagtcaacag

SEQ ID NO: 24989 - DNA, 33 bp, Homo sapiens
tttctgctgcagagaacaacaacacacagtgca

SEQ ID NO: 24990 - DNA, 33 bp, Homo sapiens
gagatttcagtgtaccagggatttcagggccca

SEQ ID NO: 24991 - DNA, 33 bp, Homo sapiens
aaggtttctgtattccaagcatatttaagtgac

SEQ ID NO: 24992 - DNA, 33 bp, Homo sapiens
taagacatctaaaatcaagttgacattattctt

SEQ ID NO: 24993 - DNA, 33 bp, Homo sapiens
gaaatagctcttgtccagagagtgtttgcttat

SEQ ID NO: 24994 - DNA, 33 bp, Homo sapiens
tcaggtcttgtgtaaactgatagagcaagaatt

SEQ ID NO: 24995 - DNA, 33 bp, Homo sapiens
aagatttgtaagtttacagcacattaaaggatg

SEQ ID NO: 24996 - DNA, 33 bp, Homo sapiens
aataccattgaataccccacaaggacatctagg

SEQ ID NO: 24997 - DNA, 33 bp, Homo sapiens
tgataacggttagaacagtactttcacgaatga

SEQ ID NO: 24998 - DNA, 33 bp, Homo sapiens
gattggataaacaataagcagtacatatacaac

SEQ ID NO: 24999 - DNA, 33 bp, Homo sapiens
agaggctaaaatgataagctatagcacagtact

SEQ ID NO: 25000 - DNA, 33 bp, Homo sapiens
tgtaggcatacataaaactgacatgtaaactcc

SEQ ID NO: 25001 - DNA, 33 bp, Homo sapiens
tgactctcaaaggcacaccctagtgtaatctct

SEQ ID NO: 25002 - DNA, 33 bp, Homo sapiens
ggtaatcagctgctaacgaaaacaaccagtctg

SEQ ID NO: 25003 - DNA, 33 bp, Homo sapiens
ttgaggacttcaacacaggcattatggccgttg

SEQ ID NO: 25004 - DNA, 33 bp, Homo sapiens
gtaggcttccgttcccacacacggatctctcca

SEQ ID NO: 25005 - DNA, 33 bp, Homo sapiens
agtgtcagcaagaagtaaacgtttgtggttgga

SEQ ID NO: 25006 - DNA, 33 bp, Homo sapiens
tcatccacagtacccacgcttgcaatgtccaca

SEQ ID NO: 25007 - DNA, 33 bp, Homo sapiens
ccagctgactttatgcacttgaccatttaagcc

SEQ ID NO: 25008 - DNA, 33 bp, Homo sapiens
acacatcaactcactacacaaaatgttttcaca

SEQ ID NO: 25009 - DNA, 33 bp, Homo sapiens
attgtagccactgatacaaccaagctcctgttt

SEQ ID NO: 25010 - DNA, 33 bp, Homo sapiens
gcattctggggatccaatcaagtgaaagaggat

SEQ ID NO: 25011 - DNA, 33 bp, Homo sapiens
ggccctattcatttcaatccaagaaggaccact

SEQ ID NO: 25012 - DNA, 33 bp, Homo sapiens
agatgggtgttaatgccccctttcttccctgtc

SEQ ID NO: 25013 - DNA, 33 bp, Homo sapiens
ctcaaagaactcacagacaagtattgaagtcag

SEQ ID NO: 25014 - DNA, 33 bp, Homo sapiens
tgcttcgggccttaaaaccagactgctgacctc

SEQ ID NO: 25015 - DNA, 51 bp, Homo sapiens
tctagatgtgcagttgtaccataaaagactgagagtctttatcactaataa

SEQ ID NO: 25016 - DNA, 33 bp, Homo sapiens
gacagggctggttttgcaaatctgaagatcaca

SEQ ID NO: 25017 - DNA, 51 bp, Homo sapiens
aaatagcccaggtcagcatggcttgaactatttttaactccaggtactagg

SEQ ID NO: 25018 - DNA, 51 bp, Homo sapiens
gtgagagttttaatcctgttgtggtaaactcgcctttctttgcttgctata

SEQ ID NO: 25019 - DNA, 51 bp, Homo sapiens
tcatatcttgctaacactcagtgaactgccctcagctgatcctctgccctg

SEQ ID NO: 25020 - DNA, 51 bp, Homo sapiens
ttgaaggaggaaatgaatttagaaacgactgtgttgactcttgaggaaagc

SEQ ID NO: 25021 - DNA, 33 bp, Homo sapiens
gcaaggcttgtgtctgaaaaatactctcaaata

SEQ ID NO: 25022 - DNA, 33 bp, Homo sapiens
tatgggcttcacatgacaggcatattgaacaat

SEQ ID NO: 25023 - DNA, 33 bp, Homo sapiens
agggacatagaatttacacttgacacagtggag

SEQ ID NO: 25024 - DNA, 33 bp, Homo sapiens
tgagttgaatatactgaatgagatggtggatat

SEQ ID NO: 25025 - DNA, 33 bp, Homo sapiens
ttggaccttcagctaacggcatatacaaaaatt

SEQ ID NO: 25026 - DNA, 33 bp, Homo sapiens
aagcagagggtatggaggagaaacacagtggac

SEQ ID NO: 25027 - DNA, 33 bp, Homo sapiens
ggagtctggagagttacattttttgatgtattg

SEQ ID NO: 25028 - DNA, 33 bp, Homo sapiens
ggctcagatggagtgccacctaagtccctggcc

SEQ ID NO: 25029 - DNA, 33 bp, Homo sapiens
aatcagcagcattagacagcagttataatctat

SEQ ID NO: 25030 - DNA, 33 bp, Homo sapiens
aggcataaatgagaacaaaaacattaacattgt

SEQ ID NO: 25031 - DNA, 33 bp, Homo sapiens
attaaatcattgaccactggcaaccaacttaac

SEQ ID NO: 25032 - DNA, 33 bp, Homo sapiens
ctatggctcacatgataaaatgtaagtaaaaaa

SEQ ID NO: 25033 - DNA, 33 bp, Homo sapiens
atactccagacctagaaatgaagaagccagcaa

SEQ ID NO: 25034 - DNA, 33 bp, Homo sapiens
tcttggcttctcttaactggaacacagtggcca

SEQ ID NO: 25035 - DNA, 33 bp, Homo sapiens
agccttgataaaataaccagtctctccaaatgc

SEQ ID NO: 25036 - DNA, 33 bp, Homo sapiens
gaataataggccccccaaagagatccatgtctt

SEQ ID NO: 25037 - DNA, 33 bp, Homo sapiens
ccagggaaggcatcccagaaatggtacacctat

SEQ ID NO: 25038 - DNA, 33 bp, Homo sapiens
gctatcggaatatgaaagtaagggatgctgggc

SEQ ID NO: 25039 - DNA, 33 bp, Homo sapiens
ttttcagtgtgttgccaatgaaggggatgaatg

SEQ ID NO: 25040 - DNA, 33 bp, Homo sapiens
tctcacaacttgagaccgaaaattaagctggga

SEQ ID NO: 25041 - DNA, 33 bp, Homo sapiens
gatgctgatatgacagaaggccctgaaagcaat

SEQ ID NO: 25042 - DNA, 33 bp, Homo sapiens
ggcttcacaactaatcaagttcctgggctggaa

SEQ ID NO: 25043 - DNA, 51 bp, Homo sapiens
gttctgtacaattccgtgtactactgaaatgcaaattattatcagtattag

SEQ ID NO: 25044 - DNA, 33 bp, Homo sapiens
tggcaggttctacgtacggctgtgtgcattttg

SEQ ID NO: 25045 - DNA, 33 bp, Homo sapiens
tattttttcagctttacggatgtgtaattgaca

SEQ ID NO: 25046 - DNA, 51 bp, Homo sapiens
tatatgcaagagaattcaaacttacagaaaattaatgttattcaaggtcac

SEQ ID NO: 25047 - DNA, 33 bp, Homo sapiens
aatgggagaataagataaatctaccctaaggca

SEQ ID NO: 25048 - DNA, 33 bp, Homo sapiens
agatcggtaagaacaacgtgagatccagcagat

SEQ ID NO: 25049 - DNA, 33 bp, Homo sapiens
gaccacgaggatgaggaatggctttgtagacag

SEQ ID NO: 25050 - DNA, 33 bp, Homo sapiens
ttttcattatgaatcagcacggtcatttagtca

SEQ ID NO: 25051 - DNA, 33 bp, Homo sapiens
gtgggaaaacagcaggcattgcaatttcaaaag

SEQ ID NO: 25052 - DNA, 33 bp, Homo sapiens
ttttcttagtttaaaagcagtgtatattgtcgt

SEQ ID NO: 25053 - DNA, 33 bp, Homo sapiens
atgaggtgactgcttacacaaggagatgttaca

SEQ ID NO: 25054 - DNA, 33 bp, Homo sapiens
gaggtccagaagagaaagagtgagccaggagtg

SEQ ID NO: 25055 - DNA, 33 bp, Homo sapiens
ccatgaccggttctaaagctcctgtcagtggat

SEQ ID NO: 25056 - DNA, 33 bp, Homo sapiens
cactttgttgtgtgtcaactgtatgtcaataca

SEQ ID NO: 25057 - DNA, 33 bp, Homo sapiens
gaaacattaccatattcaagacagtgaacaagt

SEQ ID NO: 25058 - DNA, 33 bp, Homo sapiens
ggcctctgagatccacaataccaaattagcaca

SEQ ID NO: 25059 - DNA, 33 bp, Homo sapiens
acccggctagactcagacatgatattacgcagt

SEQ ID NO: 25060 - DNA, 33 bp, Homo sapiens
cagggaagatcacacaaaggagatgtcagaagt

SEQ ID NO: 25061 - DNA, 33 bp, Homo sapiens
ctttaacaaatcaccacagtctggattgcttaa

SEQ ID NO: 25062 - DNA, 33 bp, Homo sapiens
ggtttttcaaatgcacaaaggtcattttagaaa

SEQ ID NO: 25063 - DNA, 33 bp, Homo sapiens
tctagtccaaagtctaaatcagccaactgaaat

SEQ ID NO: 25064 - DNA, 33 bp, Homo sapiens
tgtaacagagacagcacaaaacattttagaaca

SEQ ID NO: 25065 - DNA, 33 bp, Homo sapiens
ccacttatatgaggtacgtagtcaaattcacag

SEQ ID NO: 25066 - DNA, 51 bp, Homo sapiens
tatgcatgtaaaagcccttaatacaatgccagccaatgcttgccattatga

SEQ ID NO: 25067 - DNA, 33 bp, Homo sapiens
gctcagcaagcaaatacatgagacagttttggg

SEQ ID NO: 25068 - DNA, 33 bp, Homo sapiens
cttcacaattgacctcacagggttgtggtagag

SEQ ID NO: 25069 - DNA, 33 bp, Homo sapiens
tagcatttaaccagtaactagtaactctgtgcg

SEQ ID NO: 25070 - DNA, 33 bp, Homo sapiens
atgagtgttcattgaactgatatctcaaagaag

SEQ ID NO: 25071 - DNA, 33 bp, Homo sapiens
actatgtgatagttaaaaacaagctttggtaga

SEQ ID NO: 25072 - DNA, 33 bp, Homo sapiens
aaacactctttacaccaagttctattagcttgg

SEQ ID NO: 25073 - DNA, 33 bp, Homo sapiens
tcacatttaatgtgcccggagataaaacacagg

SEQ ID NO: 25074 - DNA, 33 bp, Homo sapiens
gtaaaactacagattcaagatgctctagtgaaa

SEQ ID NO: 25075 - DNA, 51 bp, Homo sapiens
ctcaactgaggagacagttggataaacatacctttttgaatgtccgtgacc

SEQ ID NO: 25076 - DNA, 33 bp, Homo sapiens
ctaatgcctaaaccaacgatattttgatgttaa

SEQ ID NO: 25077 - DNA, 33 bp, Homo sapiens
gtttgccacaactgaggatctataaaaaacagc

SEQ ID NO: 25078 - DNA, 33 bp, Homo sapiens
ccttaccattcatttaacaaagcaatagggatg

SEQ ID NO: 25079 - DNA, 33 bp, Homo sapiens
ggatgacccaaatcgccgatactggagccctca

SEQ ID NO: 25080 - DNA, 33 bp, Homo sapiens
gatctgggggcatctacctccacagtcaatcca

SEQ ID NO: 25081 - DNA, 33 bp, Homo sapiens
aagactagatgaggaaacgaatttgatgaagaa

SEQ ID NO: 25082 - DNA, 51 bp, Homo sapiens
acatacttccttaatttacatcttacatctcacaaatttttccagatttcc

SEQ ID NO: 25083 - DNA, 33 bp, Homo sapiens
ctcaccaccaagtttcccagatgctgcatttga

SEQ ID NO: 25084 - DNA, 33 bp, Homo sapiens
tctagtcacttcaaaacgttagcatctatcttc

SEQ ID NO: 25085 - DNA, 33 bp, Homo sapiens
caaaaaaaagtgacagaaaagtgacctcatccc

SEQ ID NO: 25086 - DNA, 51 bp, Homo sapiens
atcctgagaatgaaatgacccaatacggaaagacttttgatacatacagtt

SEQ ID NO: 25087 - DNA, 33 bp, Homo sapiens
gcactacagtctaagcaatctgaaacttagctt

SEQ ID NO: 25088 - DNA, 33 bp, Homo sapiens
taaaaggaaaaaagcaaggttatgcggttggaa

SEQ ID NO: 25089 - DNA, 33 bp, Homo sapiens
agacatctgtccggtgcaactgatcaatgtgag

SEQ ID NO: 25090 - DNA, 33 bp, Homo sapiens
tacctgttcatatcataagtaattctaaagctc

SEQ ID NO: 25091 - DNA, 33 bp, Homo sapiens
ctctgacagaaggacaagattcattataccatg

SEQ ID NO: 25092 - DNA, 51 bp, Homo sapiens
tatgtagtttcacaataatttaatcaagttgtctttcaagcaaaaaaaaaa

SEQ ID NO: 25093 - DNA, 33 bp, Homo sapiens
ttggtcaccaaagtcacggaagttgtagaagaa

SEQ ID NO: 25094 - DNA, 33 bp, Homo sapiens
aatgtaagtagattgaatacaacatcagagaac

SEQ ID NO: 25095 - DNA, 33 bp, Homo sapiens
gaggatctggtagaaacatggtagctgacttcc

SEQ ID NO: 25096 - DNA, 33 bp, Homo sapiens
acttgagctcgggtgacgaaggctacagtgagc

SEQ ID NO: 25097 - DNA, 33 bp, Homo sapiens
ggcttgcagattttggaaagaagagtgagtgca

SEQ ID NO: 25098 - DNA, 33 bp, Homo sapiens
acaccttctccaatgaaatctgcaccccagtct

SEQ ID NO: 25099 - DNA, 33 bp, Homo sapiens
tatacttacagaaataccattgtgtttaatcaa

SEQ ID NO: 25100 - DNA, 33 bp, Homo sapiens
tgctctctctagaaccacacagataaatccaat

SEQ ID NO: 25101 - DNA, 33 bp, Homo sapiens
gatgtaggaaaggaaaaagagaagagactgact

SEQ ID NO: 25102 - DNA, 33 bp, Homo sapiens
ctgagtgacagtcgaagaggaagagcatatttc

SEQ ID NO: 25103 - DNA, 33 bp, Homo sapiens
tgacagtctgaagtaaccacaggacttttagta

SEQ ID NO: 25104 - DNA, 33 bp, Homo sapiens
ggaggcgctacagagacggctcaattatggcgg

SEQ ID NO: 25105 - DNA, 33 bp, Homo sapiens
ctttcacggttattcacggccattcacagagtg

SEQ ID NO: 25106 - DNA, 33 bp, Homo sapiens
actgaaaatcactgacaaaaggcagattaacaa

SEQ ID NO: 25107 - DNA, 33 bp, Homo sapiens
atcttgagttaggcaacgagtttttagatgtaa

SEQ ID NO: 25108 - DNA, 33 bp, Homo sapiens
tactcatcttcctttacggtattcatgcattca

SEQ ID NO: 25109 - DNA, 33 bp, Homo sapiens
tgccacattagatagaacagtttgcagcagact

SEQ ID NO: 25110 - DNA, 33 bp, Homo sapiens
gacctattgtaagggaaaaaaagctgagcaaat

SEQ ID NO: 25111 - DNA, 33 bp, Homo sapiens
tctgtttgaaacctaaacctcaacgtgatggtg

SEQ ID NO: 25112 - DNA, 33 bp, Homo sapiens
ggttgtaagagagaagaccgtattccttagctt

SEQ ID NO: 25113 - DNA, 33 bp, Homo sapiens
tttcctgtgagccaaccgactctgatgttatta

SEQ ID NO: 25114 - DNA, 33 bp, Homo sapiens
gcagccaaattgattaccaagtgttaaataaca

SEQ ID NO: 25115 - DNA, 33 bp, Homo sapiens
gctgtggaagttcagaacaggaaggtgagatct

SEQ ID NO: 25116 - DNA, 51 bp, Homo sapiens
cctaaatatgctctgcaaggaatttgcccaacaaaggcacttctctagtta

SEQ ID NO: 25117 - DNA, 33 bp, Homo sapiens
gaatgtcatgcgaaaaatcacaggagcagagtg

SEQ ID NO: 25118 - DNA, 33 bp, Homo sapiens
ctgctttattggttcacgaattgggcagttcca

SEQ ID NO: 25119 - DNA, 33 bp, Homo sapiens
gatattaatgagcaatcaaaatgtgaaagtggc

SEQ ID NO: 25120 - DNA, 51 bp, Homo sapiens
ctagtcctctcgaaagttaaacatactataaagcaatagtagccaaaatgt

SEQ ID NO: 25121 - DNA, 33 bp, Homo sapiens
cgtcttggccttgtacagcgttcagaaggcgac

SEQ ID NO: 25122 - DNA, 33 bp, Homo sapiens
gtctatcttttcccatcaggtctgttcgaaaac

SEQ ID NO: 25123 - DNA, 33 bp, Homo sapiens
gcacacattgcaccaaatgaagctaacttatgc

SEQ ID NO: 25124 - DNA, 33 bp, Homo sapiens
tagaactgggtgtcagaaactaagtgaggagag

SEQ ID NO: 25125 - DNA, 33 bp, Homo sapiens
cagcgaaaaatacaaaagtgattgaatacctat

SEQ ID NO: 25126 - DNA, 51 bp, Homo sapiens
atatctgaagtcccattttgattgccagctccacaaacatatattagggca

SEQ ID NO: 25127 - DNA, 33 bp, Homo sapiens
tgaatatcaaagtaataatgctaaatgaacaag

SEQ ID NO: 25128 - DNA, 33 bp, Homo sapiens
caggtagataagagtcacagcaaacaaactttg

SEQ ID NO: 25129 - DNA, 33 bp, Homo sapiens
tccctgcagctaccaacgaatgactgtgtaggt

SEQ ID NO: 25130 - DNA, 33 bp, Homo sapiens
ggatgtggtaaggccacgattttggatgctgga

SEQ ID NO: 25131 - DNA, 33 bp, Homo sapiens
gcatgaccaaaccataactcttgatttccctac

SEQ ID NO: 25132 - DNA, 33 bp, Homo sapiens
tcttatcacgagtcctacgggaaaccagctgcc

SEQ ID NO: 25133 - DNA, 33 bp, Homo sapiens
atattgtttgatttagaccaattctcaaaactc

SEQ ID NO: 25134 - DNA, 33 bp, Homo sapiens
ttgccataaccttagcacattgtaagtactagg

SEQ ID NO: 25135 - DNA, 33 bp, Homo sapiens
gtacataaagtaatcaaactcagacaggaagta

SEQ ID NO: 25136 - DNA, 33 bp, Homo sapiens
gttttcacacagtggaaggggcgaggaagctct

SEQ ID NO: 25137 - DNA, 33 bp, Homo sapiens
cccagaagaagaaataactatctgaacttcatc

SEQ ID NO: 25138 - DNA, 51 bp, Homo sapiens
ggggaaatctgcgtcacatgggcgacagaaggtccctcgaatccctcaatc

SEQ ID NO: 25139 - DNA, 33 bp, Homo sapiens
tattaagtgttaggaactgtactaagtgcttta

SEQ ID NO: 25140 - DNA, 33 bp, Homo sapiens
gcctaatcagaatccccccaaaaatatagtact

SEQ ID NO: 25141 - DNA, 33 bp, Homo sapiens
ccagaagaaacgcttacacaagatgtgggaaaa

SEQ ID NO: 25142 - DNA, 33 bp, Homo sapiens
gggttgtcattttttgcagaagtcatatgatag

SEQ ID NO: 25143 - DNA, 33 bp, Homo sapiens
gcctatggcattcacaagaaacatggcaattcc

SEQ ID NO: 25144 - DNA, 33 bp, Homo sapiens
tctgactcctcagagcacccgagtaagcaagtc

SEQ ID NO: 25145 - DNA, 33 bp, Homo sapiens
tgaagccaggaatagcacaggtgattgcctcct

SEQ ID NO: 25146 - DNA, 33 bp, Homo sapiens
tgaatgataaaatgaggattgcaatttctgaag

SEQ ID NO: 25147 - DNA, 33 bp, Homo sapiens
gttgttgcaaaagtgacgcttccctgttgttaa

SEQ ID NO: 25148 - DNA, 33 bp, Homo sapiens
ttactctccaaggaaaaaagatgtgttctcaaa

SEQ ID NO: 25149 - DNA, 33 bp, Homo sapiens
taagcagagcataatcaaaacagtgtgagttct

SEQ ID NO: 25150 - DNA, 33 bp, Homo sapiens
ggtcacccctctaacacgctgtcttcacttaga

SEQ ID NO: 25151 - DNA, 33 bp, Homo sapiens
ccctgtcattaagccacgctgaacagctgacct

SEQ ID NO: 25152 - DNA, 33 bp, Homo sapiens
agactgcccatcagtgaaaagcaacagagttga

SEQ ID NO: 25153 - DNA, 33 bp, Homo sapiens
tgtattacctgtcccaatggatttgattagcta

SEQ ID NO: 25154 - DNA, 33 bp, Homo sapiens
acacaaaaacagttacagaagaatgcagtgacc

SEQ ID NO: 25155 - DNA, 33 bp, Homo sapiens
gaaacacccccactcacactgccaaaatcaaac

SEQ ID NO: 25156 - DNA, 33 bp, Homo sapiens
gctcgtccgctccgccacgaatccgtttcccca

SEQ ID NO: 25157 - DNA, 33 bp, Homo sapiens
catccttacctcggcaactacagactcagcttg

SEQ ID NO: 25158 - DNA, 33 bp, Homo sapiens
aggacgatgtagacacagtgaaggaaacacact

SEQ ID NO: 25159 - DNA, 33 bp, Homo sapiens
tacgcagatgtgcttcaataatctcgggccttc

SEQ ID NO: 25160 - DNA, 33 bp, Homo sapiens
ccacctatctcctccaagtgacaattttcaata

SEQ ID NO: 25161 - DNA, 33 bp, Homo sapiens
tgctcctgtctcctcaaaagtattccactttgg

SEQ ID NO: 25162 - DNA, 33 bp, Homo sapiens
aggctcactccttgtccacctttttcgcctttg

SEQ ID NO: 25163 - DNA, 33 bp, Homo sapiens
tcattgcttacggactcacttacccgagcatcc

SEQ ID NO: 25164 - DNA, 33 bp, Homo sapiens
ccactgtaaatgcatgaaactcttgagacttca

SEQ ID NO: 25165 - DNA, 33 bp, Homo sapiens
actaatttccattcccaacaacagtgtataagt

SEQ ID NO: 25166 - DNA, 33 bp, Homo sapiens
ctcgcattgtacttgacgggtaactgatcaagg

SEQ ID NO: 25167 - DNA, 33 bp, Homo sapiens
taccccaaggcttctacgttccggcgcaggcgg

SEQ ID NO: 25168 - DNA, 33 bp, Homo sapiens
acattcagagatgtgcaaagtatttcaccacaa

SEQ ID NO: 25169 - DNA, 33 bp, Homo sapiens
tctttggagagggcaaggtagcacaaccctttt

SEQ ID NO: 25170 - DNA, 33 bp, Homo sapiens
tgataaatcccataataaaaacgtgcagagggc

SEQ ID NO: 25171 - DNA, 33 bp, Homo sapiens
gaatcacatacagccaagtttgaaatgatcaca

SEQ ID NO: 25172 - DNA, 51 bp, Homo sapiens
actttgggtcctggattaagtcacactttccattgtcttttctgcattgta

SEQ ID NO: 25173 - DNA, 33 bp, Homo sapiens
gtatatgcattatcaaataagagactaagtgag

SEQ ID NO: 25174 - DNA, 33 bp, Homo sapiens
catgaggccaacgtcacattagcttattaaatt

SEQ ID NO: 25175 - DNA, 33 bp, Homo sapiens
ctgcttcaaaaaacaaacaggtctgccaggtgg

SEQ ID NO: 25176 - DNA, 33 bp, Homo sapiens
atggcggacacccttccccccatcaagcttgag

SEQ ID NO: 25177 - DNA, 33 bp, Homo sapiens
gcaggtggtggtgcacagtgattttctaagcca

SEQ ID NO: 25178 - DNA, 33 bp, Homo sapiens
cgtatcagttgtaaacaccctgacgaggtagcg

SEQ ID NO: 25179 - DNA, 33 bp, Homo sapiens
acactgcactgaaactaaaaaacacgatggttg

SEQ ID NO: 25180 - DNA, 33 bp, Homo sapiens
gatctccctctgaacacggagctgcaaggagcc

SEQ ID NO: 25181 - DNA, 33 bp, Homo sapiens
cttcaaaccataacaacagtgatgtccaaacag

SEQ ID NO: 25182 - DNA, 33 bp, Homo sapiens
taacaagcaaggctcacgggaagagacaactag

SEQ ID NO: 25183 - DNA, 33 bp, Homo sapiens
caatcatgcacaaagacactgaatcaataatca

SEQ ID NO: 25184 - DNA, 33 bp, Homo sapiens
agcataactcttatagaaaagccagataaataa

SEQ ID NO: 25185 - DNA, 33 bp, Homo sapiens
ctcctcccggtggtgacattgtttacagagaag

SEQ ID NO: 25186 - DNA, 33 bp, Homo sapiens
tgaggatactgattagcagttcagacattcagg

SEQ ID NO: 25187 - DNA, 33 bp, Homo sapiens
aggcggtgattacggacgaactcggatgatctc

SEQ ID NO: 25188 - DNA, 33 bp, Homo sapiens
atgcacattgtcaggaacacctaagcctccaat

SEQ ID NO: 25189 - DNA, 33 bp, Homo sapiens
ctgccaattcaatgtacaaaacagtgacaccct

SEQ ID NO: 25190 - DNA, 33 bp, Homo sapiens
aggagattaatcctcacagtgctagacgtgccc

SEQ ID NO: 25191 - DNA, 33 bp, Homo sapiens
cttcttgtggctgaacaaagacgtgttggaacc

SEQ ID NO: 25192 - DNA, 33 bp, Homo sapiens
tttgtgttgcagtggcaaggggatatagacctg

SEQ ID NO: 25193 - DNA, 33 bp, Homo sapiens
ttcactttcaacagacaaatatcttctatgcca

SEQ ID NO: 25194 - DNA, 33 bp, Homo sapiens
aatgttcagaattgtcaacctcaggcaacttgc

SEQ ID NO: 25195 - DNA, 33 bp, Homo sapiens
taaataggtatttctcccgagctctctatgtca

SEQ ID NO: 25196 - DNA, 33 bp, Homo sapiens
tcattaatcaaacacaaggtattgcattagcgt

SEQ ID NO: 25197 - DNA, 33 bp, Homo sapiens
ggtgaaaactgacctgaatccgctgatctttgt

SEQ ID NO: 25198 - DNA, 33 bp, Homo sapiens
ttacattcactatgaaagcaaattcactgaacc

SEQ ID NO: 25199 - DNA, 33 bp, Homo sapiens
cattctgcaaactgcgcatcatggcctcagtct

SEQ ID NO: 25200 - DNA, 51 bp, Homo sapiens
ccaaaatctttaaagactttcaataacttacaacctgtgttcatatattct

SEQ ID NO: 25201 - DNA, 33 bp, Homo sapiens
tatatgggagtggaaaattcaaaaattcaacag

SEQ ID NO: 25202 - DNA, 51 bp, Homo sapiens
tccatattgacttgaaagtagctaactacagccaggcagagggactatcta

SEQ ID NO: 25203 - DNA, 33 bp, Homo sapiens
tcgaacagatacagaactaaaaagagcaatcac

SEQ ID NO: 25204 - DNA, 33 bp, Homo sapiens
ggaagagatttctgagaatggcacctaagacag

SEQ ID NO: 25205 - DNA, 33 bp, Homo sapiens
tgagtttgggcccaggcatgacattccattctc

SEQ ID NO: 25206 - DNA, 33 bp, Homo sapiens
aagtgaatgacatttaagtaggattttcctgct

SEQ ID NO: 25207 - DNA, 33 bp, Homo sapiens
agcagacttttaggaccctgttgcatggtctcc

SEQ ID NO: 25208 - DNA, 33 bp, Homo sapiens
tgtcagagtttattctcacgtgtgcagcatcct

SEQ ID NO: 25209 - DNA, 33 bp, Homo sapiens
aaccctcctcttactgaaactcaagctgatttc

SEQ ID NO: 25210 - DNA, 33 bp, Homo sapiens
ggcttgataaaccgacaaaaataatgaaaggca

SEQ ID NO: 25211 - DNA, 51 bp, Homo sapiens
catgattcctcaaagtagtgtacctgaaacctaggaagtaaacatcaagat

SEQ ID NO: 25212 - DNA, 51 bp, Homo sapiens
ttgattgcatattgatcaataggttaaatgtgattacaatgaaaatcattg

SEQ ID NO: 25213 - DNA, 33 bp, Homo sapiens
acatcagttctgtcaacgtccatttgttcacat

SEQ ID NO: 25214 - DNA, 33 bp, Homo sapiens
tttaaactttgttggcacttttactgtagatgc

SEQ ID NO: 25215 - DNA, 33 bp, Homo sapiens
gtagctagactagcaactaggaggaacttacag

SEQ ID NO: 25216 - DNA, 33 bp, Homo sapiens
ttactaatatcaggaacgaaaagagtgacatct

SEQ ID NO: 25217 - DNA, 33 bp, Homo sapiens
tgagtgttcgtgttcccccgtgttggtgccttg

SEQ ID NO: 25218 - DNA, 33 bp, Homo sapiens
ggcgtggctgggaacaaattatgagttgagagt

SEQ ID NO: 25219 - DNA, 33 bp, Homo sapiens
ctggacatattacgaccgaatccagtgcctttc

SEQ ID NO: 25220 - DNA, 33 bp, Homo sapiens
aactctgctaacaatacatgaagcatggtgaag

SEQ ID NO: 25221 - DNA, 33 bp, Homo sapiens
agtggcctcattttgcccgtgttgtgtctgtgg

SEQ ID NO: 25222 - DNA, 33 bp, Homo sapiens
gctcgtttctctgctcacctaggatttcatgca

SEQ ID NO: 25223 - DNA, 33 bp, Homo sapiens
aggccctggtgttcccagcgcttttgcctcctg

SEQ ID NO: 25224 - DNA, 33 bp, Homo sapiens
agagtctggccaggaaaccgggtgccggtggtg

SEQ ID NO: 25225 - DNA, 33 bp, Homo sapiens
tggctcccttcttaacacaatcttttccaaggc

SEQ ID NO: 25226 - DNA, 33 bp, Homo sapiens
tttctttcctactccaaattgccaactttccct

SEQ ID NO: 25227 - DNA, 33 bp, Homo sapiens
agaacggccgctacgcaagcaatggtgaccttt

SEQ ID NO: 25228 - DNA, 33 bp, Homo sapiens
tagaggctggtggttacgaactgagggatgtaa

SEQ ID NO: 25229 - DNA, 33 bp, Homo sapiens
aaataaagagttagtgaatctttcaaattgttg

SEQ ID NO: 25230 - DNA, 33 bp, Homo sapiens
ataaacaggaaattacactattgattgcattgc

SEQ ID NO: 25231 - DNA, 51 bp, Homo sapiens
aggctgtgtggactgaatgcttagacgaatcattatttatttttagacctg

SEQ ID NO: 25232 - DNA, 33 bp, Homo sapiens
ttcatgctatttggtaaatgaaatgccccactc

SEQ ID NO: 25233 - DNA, 33 bp, Homo sapiens
catttattaagcaccaactatgttcttagaaaa

SEQ ID NO: 25234 - DNA, 33 bp, Homo sapiens
tactcaagtttcttccactgtttggatcccttc

SEQ ID NO: 25235 - DNA, 33 bp, Homo sapiens
ataggtgcccttgttaaatgtttcatgattcta

SEQ ID NO: 25236 - DNA, 33 bp, Homo sapiens
cctcactgcttatataaccccacattctcacct

SEQ ID NO: 25237 - DNA, 33 bp, Homo sapiens
agcttagagggattaaatgatttggccaagaac

SEQ ID NO: 25238 - DNA, 33 bp, Homo sapiens
catgtggcaactgtaaatattccaattagataa

SEQ ID NO: 25239 - DNA, 33 bp, Homo sapiens
acacagaaagatctgacgatactgaggcgcatc

SEQ ID NO: 25240 - DNA, 33 bp, Homo sapiens
acctgtgcacagtggaagaacacacaggagcaa

SEQ ID NO: 25241 - DNA, 33 bp, Homo sapiens
tctgggaaggactaaaccgtgagaactccacat

SEQ ID NO: 25242 - DNA, 33 bp, Homo sapiens
gcatctttgaaaattaccctagtggctgttctc

SEQ ID NO: 25243 - DNA, 33 bp, Homo sapiens
gtgagttgtttgaagaaaaaggaagataaacgg

SEQ ID NO: 25244 - DNA, 33 bp, Homo sapiens
cttgagaatagcagagaatggaattccacccag

SEQ ID NO: 25245 - DNA, 33 bp, Homo sapiens
agacaactttgggtaacgattcttgcagcagag

SEQ ID NO: 25246 - DNA, 33 bp, Homo sapiens
cccttcattaatggggccatacatttacggctg

SEQ ID NO: 25247 - DNA, 33 bp, Homo sapiens
agcaatgctctgctaaataataaatatcggaaa

SEQ ID NO: 25248 - DNA, 33 bp, Homo sapiens
accactcaagtgcctacgggattgtattttata

SEQ ID NO: 25249 - DNA, 33 bp, Homo sapiens
attttactcaatccccactgacacccacgtaga

SEQ ID NO: 25250 - DNA, 33 bp, Homo sapiens
tctgtgtgtgccgagaagtactggagatttcat

SEQ ID NO: 25251 - DNA, 33 bp, Homo sapiens
acaatggcgaacacaccagtataaggactaatc

SEQ ID NO: 25252 - DNA, 33 bp, Homo sapiens
actgtctaatgcaagacgaaggggtccagaaag

SEQ ID NO: 25253 - DNA, 33 bp, Homo sapiens
aggctgcagaaagacactatctgtgcaagcggg

SEQ ID NO: 25254 - DNA, 33 bp, Homo sapiens
aggttccaggcaagcacggccccaggtattgca

SEQ ID NO: 25255 - DNA, 33 bp, Homo sapiens
gtaaaggagcagtaacaagggaatatctaccaa

SEQ ID NO: 25256 - DNA, 33 bp, Homo sapiens
aaatgtcaagagcctaccttcaaacagagtcaa

SEQ ID NO: 25257 - DNA, 33 bp, Homo sapiens
acttaacacattttgcagatctttccatttgaa

SEQ ID NO: 25258 - DNA, 33 bp, Homo sapiens
atctctctacagtggactattttctcttccagc

SEQ ID NO: 25259 - DNA, 33 bp, Homo sapiens
ctgcagcataccaggtcaatgatcttgcaaata

SEQ ID NO: 25260 - DNA, 33 bp, Homo sapiens
atgccgaattctcgatcagtggccaccccaggg

SEQ ID NO: 25261 - DNA, 33 bp, Homo sapiens
tatctccagctcctacagcagtacccagcacac

SEQ ID NO: 25262 - DNA, 51 bp, Homo sapiens
tgatgtatacacgtatacaaaaaataaatatcaaaacttcacattgttcac

SEQ ID NO: 25263 - DNA, 33 bp, Homo sapiens
caggccttgctttcttcaaacctatcagctgct

SEQ ID NO: 25264 - DNA, 33 bp, Homo sapiens
ctccagctatttctacactattgtaacatatat

SEQ ID NO: 25265 - DNA, 51 bp, Homo sapiens
ccttgatttgcttgcttaatatgaagtacttaaaatttaattttcttctct

SEQ ID NO: 25266 - DNA, 51 bp, Homo sapiens
gcattcccttactctcttctcacctacaagaatttataacctcttctgaga

SEQ ID NO: 25267 - DNA, 51 bp, Homo sapiens
tttttgccaaaggaaatctcaagacgggtacagagttaaaaatgaagtaca

SEQ ID NO: 25268 - DNA, 51 bp, Homo sapiens
tacctcttaatactcattttgtagacagaaataagcttttttttttctttt

SEQ ID NO: 25269 - DNA, 33 bp, Homo sapiens
ctactttttagccacaccaaatacaaaaactca

SEQ ID NO: 25270 - DNA, 33 bp, Homo sapiens
aaatagccaaaccatgacataagggaagagcta

SEQ ID NO: 25271 - DNA, 33 bp, Homo sapiens
tgatttataaactagaggccaatccatggctga

SEQ ID NO: 25272 - DNA, 33 bp, Homo sapiens
gctacctcccatcaccaaaatttcagatgtcag

SEQ ID NO: 25273 - DNA, 33 bp, Homo sapiens
gcacgtgcaaagctgcagagaaaaatttgggtg

SEQ ID NO: 25274 - DNA, 33 bp, Homo sapiens
cccagtttggacaacaatcgtgtactcatgtga

SEQ ID NO: 25275 - DNA, 33 bp, Homo sapiens
ccatcttcataccaaaccaacttttacaaaggc

SEQ ID NO: 25276 - DNA, 33 bp, Homo sapiens
atgtcccatgtagttacagtattgcacacaaca

SEQ ID NO: 25277 - DNA, 33 bp, Homo sapiens
ttaaattagctctttacctcacaacaaataaat

SEQ ID NO: 25278 - DNA, 33 bp, Homo sapiens
aagattcgctggtctaagacagaggcagagtta

SEQ ID NO: 25279 - DNA, 33 bp, Homo sapiens
gcaaactccatgaacgccattgactttagagtt

SEQ ID NO: 25280 - DNA, 33 bp, Homo sapiens
catggaagggaaggtaaaatatcatgaggattt

SEQ ID NO: 25281 - DNA, 33 bp, Homo sapiens
aaggttgttgagcaaacttctgattatcatttg

SEQ ID NO: 25282 - DNA, 33 bp, Homo sapiens
ttggctaaaaacttaccgagctagagttagcct

SEQ ID NO: 25283 - DNA, 33 bp, Homo sapiens
cattttattgatcaccaagggaatggtctcaat

SEQ ID NO: 25284 - DNA, 33 bp, Homo sapiens
tgcaaagggacacatcgctttatcaacaccatt

SEQ ID NO: 25285 - DNA, 33 bp, Homo sapiens
tgagttgggacaagaactcagtggcctgctggg

SEQ ID NO: 25286 - DNA, 33 bp, Homo sapiens
ggacagcggggatccaatcagcacagttcacag

SEQ ID NO: 25287 - DNA, 33 bp, Homo sapiens
cctcctcttctatcaccattgtgttgcctcctc

SEQ ID NO: 25288 - DNA, 33 bp, Homo sapiens
tgaatttataactcaccctgtccctttaaataa

SEQ ID NO: 25289 - DNA, 33 bp, Homo sapiens
atcttcatgaaaagaccggaaagatatacatcc

SEQ ID NO: 25290 - DNA, 33 bp, Homo sapiens
gatcaattgtttataaaattcacctagattata

SEQ ID NO: 25291 - DNA, 51 bp, Homo sapiens
ccaaaattcataaattcttcagtaccaatattcaatgtttgaaacaaacag

SEQ ID NO: 25292 - DNA, 33 bp, Homo sapiens
tgcgagtgtagatgaaataaaaatagcaaaatg

SEQ ID NO: 25293 - DNA, 33 bp, Homo sapiens
ttcaggtccgtgtgtcccatttcactgcactgt

SEQ ID NO: 25294 - DNA, 33 bp, Homo sapiens
cttgactgcaaagccaatgatgtatctatctcg

SEQ ID NO: 25295 - DNA, 33 bp, Homo sapiens
aaagaactaaataaacagaaagacgtcctatgt

SEQ ID NO: 25296 - DNA, 51 bp, Homo sapiens
gcattttttttttcagtgtaaatccaccctttattgcctccaaaaagatat

SEQ ID NO: 25297 - DNA, 33 bp, Homo sapiens
ctgttgtttgttcttaccactagtttcctgttt

SEQ ID NO: 25298 - DNA, 33 bp, Homo sapiens
cttttctactgcaaggcatcataagctaccaat

SEQ ID NO: 25299 - DNA, 33 bp, Homo sapiens
taaggttctcactccgccctccgtgtccttgat

SEQ ID NO: 25300 - DNA, 33 bp, Homo sapiens
gttggcaggatctgcacgtttgccacctgaggc

SEQ ID NO: 25301 - DNA, 33 bp, Homo sapiens
gaagtgagaacctctcaaaatcgatcacctatg

SEQ ID NO: 25302 - DNA, 33 bp, Homo sapiens
tccagaggctctggtcacttgaaaagatgagct

SEQ ID NO: 25303 - DNA, 33 bp, Homo sapiens
tgctactgacaggcaccgagaggctgaatggag

SEQ ID NO: 25304 - DNA, 33 bp, Homo sapiens
gagcatgctccttcccaaagctgattcgtggcc

SEQ ID NO: 25305 - DNA, 33 bp, Homo sapiens
atcagatgtgccgtctcagaacccgggcacggt

SEQ ID NO: 25306 - DNA, 33 bp, Homo sapiens
gtggaggagtttgggacgcacttcagaagaata

SEQ ID NO: 25307 - DNA, 51 bp, Homo sapiens
ttcgtgatcttgaccacacaataaacgctggtatctctcaaactgacatct

SEQ ID NO: 25308 - DNA, 51 bp, Homo sapiens
tcagttgcagtccctgggtattgaaaagcatgaacagaaatgaagacaaaa

SEQ ID NO: 25309 - DNA, 33 bp, Homo sapiens
ctgttctgcgaaaaagacctcatatcttctcag

SEQ ID NO: 25310 - DNA, 33 bp, Homo sapiens
gagggcaggtatcacactgtacactttccacaa

SEQ ID NO: 25311 - DNA, 33 bp, Homo sapiens
gctggtgggaatgtaaagcgtgcggctgctggg

SEQ ID NO: 25312 - DNA, 33 bp, Homo sapiens
caccagataccacctacgttctgtaacttctca

SEQ ID NO: 25313 - DNA, 33 bp, Homo sapiens
ttgactaatacagacaaataagtgctattgttt

SEQ ID NO: 25314 - DNA, 33 bp, Homo sapiens
gaagtggcctgagaaaacaataaagagagggcg

SEQ ID NO: 25315 - DNA, 33 bp, Homo sapiens
tgagcctcaggcttaccgctaaaatgttaagtg

SEQ ID NO: 25316 - DNA, 33 bp, Homo sapiens
tagaagggcggacttggatctgagagagaataa

SEQ ID NO: 25317 - DNA, 33 bp, Homo sapiens
acctattaagacatgaccttacactctgacaac

SEQ ID NO: 25318 - DNA, 33 bp, Homo sapiens
gtgtgcatgctgttgaagtaagtagtaagagtt

SEQ ID NO: 25319 - DNA, 33 bp, Homo sapiens
gaagttgtcatcaaaaccagaagaaagtcatgg

SEQ ID NO: 25320 - DNA, 33 bp, Homo sapiens
ccctgtgaccagtgccacgggagtcctgagggt

SEQ ID NO: 25321 - DNA, 33 bp, Homo sapiens
ggtgagtgagagtaaaactagggaggaagagtt

SEQ ID NO: 25322 - DNA, 33 bp, Homo sapiens
attgattttctgagacaactgtgctcatctcat

SEQ ID NO: 25323 - DNA, 33 bp, Homo sapiens
caaatacctatttacaactcatgctctattaag

SEQ ID NO: 25324 - DNA, 33 bp, Homo sapiens
ccaatgtaaggttgaaatcaacaccctccatat

SEQ ID NO: 25325 - DNA, 33 bp, Homo sapiens
atttgcaggcaaatagaaagacaaggagattat

SEQ ID NO: 25326 - DNA, 33 bp, Homo sapiens
aaagtgtaaactgcaacatatgctggaagttgt

SEQ ID NO: 25327 - DNA, 33 bp, Homo sapiens
tgaatgacctgctctacaaatggcctgcaagag

SEQ ID NO: 25328 - DNA, 33 bp, Homo sapiens
actcagttcgaccacccgctttatcctttggat

SEQ ID NO: 25329 - DNA, 51 bp, Homo sapiens
agcagccttctaaaagctgtaaaaggcaagaaaatgaattctccccagagc

SEQ ID NO: 25330 - DNA, 33 bp, Homo sapiens
acaattgtcaaggaaagttgttaactctgtggc

SEQ ID NO: 25331 - DNA, 33 bp, Homo sapiens
acttctgctttttccacacaacatgcacagata

SEQ ID NO: 25332 - DNA, 33 bp, Homo sapiens
tgaccatctactcaagactaaccacttttcata

SEQ ID NO: 25333 - DNA, 33 bp, Homo sapiens
aaacatgactaagagaaaagagagcaagtgagg

SEQ ID NO: 25334 - DNA, 51 bp, Homo sapiens
agaaattgatgatgccctgactctgaagctactatgggaaaagtatttgaa

SEQ ID NO: 25335 - DNA, 33 bp, Homo sapiens
cttgacaacatgcaataacacatgataacatta

SEQ ID NO: 25336 - DNA, 33 bp, Homo sapiens
gccagcttgtagtgaacgctgcctggtctgggc

SEQ ID NO: 25337 - DNA, 33 bp, Homo sapiens
aaatggatgagaacaacatataataactgtatt

SEQ ID NO: 25338 - DNA, 33 bp, Homo sapiens
ctgtagtgatgtgttcaataaaaagtggccagc

SEQ ID NO: 25339 - DNA, 33 bp, Homo sapiens
cctggggcaatgtggaaccatagagggctatgg

SEQ ID NO: 25340 - DNA, 33 bp, Homo sapiens
attgaaggtcattccccaggtcattgaacctgg

SEQ ID NO: 25341 - DNA, 33 bp, Homo sapiens
gcccctctcctttagcaccctatctgcaggcac

SEQ ID NO: 25342 - DNA, 33 bp, Homo sapiens
tctttaaccaagaggcagaatattcatgatcat

SEQ ID NO: 25343 - DNA, 33 bp, Homo sapiens
tgagccttcatcagacaacagatctactggcac

SEQ ID NO: 25344 - DNA, 33 bp, Homo sapiens
atcctaacgagaataacgcaaggcttagcctgt

SEQ ID NO: 25345 - DNA, 33 bp, Homo sapiens
aagaatctctgctttaacggaagacctgtttcg

SEQ ID NO: 25346 - DNA, 33 bp, Homo sapiens
catacacggtagaagagaatattttcaaaacat

SEQ ID NO: 25347 - DNA, 33 bp, Homo sapiens
aggaaaagggctcaaacctcctgtttacctgtt

SEQ ID NO: 25348 - DNA, 33 bp, Homo sapiens
gttatctactttcttcaatatggattagccact

SEQ ID NO: 25349 - DNA, 33 bp, Homo sapiens
ggacttattctggcacacaatagttaaacacag

SEQ ID NO: 25350 - DNA, 33 bp, Homo sapiens
tgccttctaatgtgctcacatctcatactctgt

SEQ ID NO: 25351 - DNA, 33 bp, Homo sapiens
tgatcaccctgatgaacggtgatatatcaaggg

SEQ ID NO: 25352 - DNA, 33 bp, Homo sapiens
cactgggtggagaatacggttgtctagacgttt

SEQ ID NO: 25353 - DNA, 33 bp, Homo sapiens
tggaggtccagagagaatacagtttacttccta

SEQ ID NO: 25354 - DNA, 33 bp, Homo sapiens
ctactttgtaactaagaacactcttaatggtag

SEQ ID NO: 25355 - DNA, 51 bp, Homo sapiens
agaggatagtctcaacatccttcaacgtgacatttctttaaagatattaac

SEQ ID NO: 25356 - DNA, 33 bp, Homo sapiens
gtttagaatagatgggcactttggctctatgtt

SEQ ID NO: 25357 - DNA, 51 bp, Homo sapiens
cttcatgatccaaaggcttgtgaaagagagagagaattatctcctctcttc

SEQ ID NO: 25358 - DNA, 33 bp, Homo sapiens
tcttgggaatagaggtaaaatgacggattgtaa

SEQ ID NO: 25359 - DNA, 33 bp, Homo sapiens
aagaaaaaaaaatgcaatacggcttggaacatg

SEQ ID NO: 25360 - DNA, 33 bp, Homo sapiens
ctttgccaggctctcactcttctctctccggct

SEQ ID NO: 25361 - DNA, 51 bp, Homo sapiens
ccaccctcacactgccccctactagcgttactgtgtccacatttttaccaa

SEQ ID NO: 25362 - DNA, 33 bp, Homo sapiens
ggctgattaatgttaccggagaagctgtaacta

SEQ ID NO: 25363 - DNA, 51 bp, Homo sapiens
gacttaggaaagccaatccagtgcacagcagaataaaagtaaaaaatatat

SEQ ID NO: 25364 - DNA, 51 bp, Homo sapiens
ctgtgccaaaacattactgaaaacactactggacccttgtttgcattcatt

SEQ ID NO: 25365 - DNA, 33 bp, Homo sapiens
ccgaaaatgtcagaaaatgaggagagaagaaaa

SEQ ID NO: 25366 - DNA, 33 bp, Homo sapiens
gaaatggagcagcatacgtggcataatcaatct

SEQ ID NO: 25367 - DNA, 51 bp, Homo sapiens
ggcaaaacatattatacttaaggcactgcccctattttcctgataattgcg

SEQ ID NO: 25368 - DNA, 33 bp, Homo sapiens
gagaaggtcagtaacactcaacggtcaagacca

SEQ ID NO: 25369 - DNA, 33 bp, Homo sapiens
aagttactctgtaggccccctaatcaacttggc

SEQ ID NO: 25370 - DNA, 33 bp, Homo sapiens
atctcagagaagctcacagtacaaatcatgtac

SEQ ID NO: 25371 - DNA, 33 bp, Homo sapiens
tcttatagccacaatgaattatttgtttttatt

SEQ ID NO: 25372 - DNA, 33 bp, Homo sapiens
ctacacgctgtcaacacgacttacctctcacga

SEQ ID NO: 25373 - DNA, 33 bp, Homo sapiens
ctctcagggtactaaacggcagccttagctccc

SEQ ID NO: 25374 - DNA, 33 bp, Homo sapiens
agctctgagcacagaggactattaggttgatgc

SEQ ID NO: 25375 - DNA, 51 bp, Homo sapiens
cggggctcaggatccagtggctctcctacctccttttccttcacgtgggtt

SEQ ID NO: 25376 - DNA, 33 bp, Homo sapiens
tttcattatcttttccagaatgtcctttcacta

SEQ ID NO: 25377 - DNA, 33 bp, Homo sapiens
agaaggaaaagattgccactcaccacttgttac

SEQ ID NO: 25378 - DNA, 51 bp, Homo sapiens
taaaaattttcaataatcaataataactgctggagaggggacaacaggtag

SEQ ID NO: 25379 - DNA, 33 bp, Homo sapiens
ggctgcactcattgcaaggctgactagctccag

SEQ ID NO: 25380 - DNA, 33 bp, Homo sapiens
tttgataagctctgccaaatggaaatagccacc

SEQ ID NO: 25381 - DNA, 33 bp, Homo sapiens
accatagttctgaatacgcttagatctttattt

SEQ ID NO: 25382 - DNA, 33 bp, Homo sapiens
gataaatttagacaaaatcagagctatgaggac

SEQ ID NO: 25383 - DNA, 33 bp, Homo sapiens
taacaaggaggtttaaatggtgaagtatgaagt

SEQ ID NO: 25384 - DNA, 33 bp, Homo sapiens
cccaactataattatgaatgtctctgtttttcc

SEQ ID NO: 25385 - DNA, 33 bp, Homo sapiens
ccacctcagtactgacaattcctggctttccct

SEQ ID NO: 25386 - DNA, 33 bp, Homo sapiens
tcttcatactctatgcaccattcattaatgggt

SEQ ID NO: 25387 - DNA, 33 bp, Homo sapiens
gatattagggatactaagcaattgtcacctact

SEQ ID NO: 25388 - DNA, 33 bp, Homo sapiens
attgttgaataagtgaaatgtttgttgaacaaa

SEQ ID NO: 25389 - DNA, 51 bp, Homo sapiens
ctcttctattttctgaacctagtagaacatgatggagctgaagagattccc

SEQ ID NO: 25390 - DNA, 33 bp, Homo sapiens
aataaaagacactgaagaaagataggcctttta

SEQ ID NO: 25391 - DNA, 33 bp, Homo sapiens
tttaatacacggcttcactataagatattatgt

SEQ ID NO: 25392 - DNA, 33 bp, Homo sapiens
tattcttgacataagccctcctgaggcaggaag

SEQ ID NO: 25393 - DNA, 51 bp, Homo sapiens
gggagttgcccctctcctttaatgacatgtaactgaattttgaacatcagg

SEQ ID NO: 25394 - DNA, 33 bp, Homo sapiens
cccaaagggaaactccaaaaatgtagaaaagaa

SEQ ID NO: 25395 - DNA, 51 bp, Homo sapiens
tctctaagtcctcacttaagttacactggtgttgtgccactcttttctgaa

SEQ ID NO: 25396 - DNA, 51 bp, Homo sapiens
tgcacattagaaaaagagtttatacagccctcacatgagcacgcctggctt

SEQ ID NO: 25397 - DNA, 51 bp, Homo sapiens
agttttagagaggacacgttgaaaccatagcagcagacctccattttccca

SEQ ID NO: 25398 - DNA, 33 bp, Homo sapiens
accagaaaaagaccacaacttagaaataaagct

SEQ ID NO: 25399 - DNA, 33 bp, Homo sapiens
atgcaatgagatgagaacctgtgaagctgcgac

SEQ ID NO: 25400 - DNA, 33 bp, Homo sapiens
cgaaccaactcaagtacgagccagaggttgtgt

SEQ ID NO: 25401 - DNA, 51 bp, Homo sapiens
tatagtctaagttactagaaccagacagccaggtgttaagttgaagaattt

SEQ ID NO: 25402 - DNA, 33 bp, Homo sapiens
gcaacagtgaatttgacgttcttttattatagg

SEQ ID NO: 25403 - DNA, 33 bp, Homo sapiens
ctctggacccatcttacatttcgtatccttata

SEQ ID NO: 25404 - DNA, 33 bp, Homo sapiens
tcccagagcctgaaaccgtgacaaagaggacat

SEQ ID NO: 25405 - DNA, 33 bp, Homo sapiens
acagaaaaaaatcagcaaaactcaaagaggcag

SEQ ID NO: 25406 - DNA, 33 bp, Homo sapiens
gatgaaggtgctattaagagatgggaatgggtg

SEQ ID NO: 25407 - DNA, 33 bp, Homo sapiens
ttgactcctggcttcacaaactctcacaacggc

SEQ ID NO: 25408 - DNA, 33 bp, Homo sapiens
agcacatggtgaaacaaaagagtgttgcaacgc

SEQ ID NO: 25409 - DNA, 33 bp, Homo sapiens
gcttcaatggcctacaaaatagcttatctttag

SEQ ID NO: 25410 - DNA, 33 bp, Homo sapiens
gtgcaaggcccgggaacgttctggaatcaatca

SEQ ID NO: 25411 - DNA, 33 bp, Homo sapiens
aatgggtagaggtcccactcagttcaggctctg

SEQ ID NO: 25412 - DNA, 33 bp, Homo sapiens
tagattcctaggccaggagttttcgttgcactt

SEQ ID NO: 25413 - DNA, 33 bp, Homo sapiens
tagctgacaaaagatacgatttttccactccag

SEQ ID NO: 25414 - DNA, 33 bp, Homo sapiens
taactgctttattcacaaatctctatttatcca

SEQ ID NO: 25415 - DNA, 33 bp, Homo sapiens
aagggaaggactgtgcaagcaactccctagccc

SEQ ID NO: 25416 - DNA, 33 bp, Homo sapiens
cccaaagctacttttcccttgtatcctcggact

SEQ ID NO: 25417 - DNA, 33 bp, Homo sapiens
ttctgggtatgcaagactaagttcctgaacata

SEQ ID NO: 25418 - DNA, 33 bp, Homo sapiens
gagtggaacggagtaaataaagtattctggctg

SEQ ID NO: 25419 - DNA, 33 bp, Homo sapiens
tggcctccggatatcacgctctcctagtttttc

SEQ ID NO: 25420 - DNA, 33 bp, Homo sapiens
acagctggcctgcactaaaaaaaatgtctagtc

SEQ ID NO: 25421 - DNA, 51 bp, Homo sapiens
cattatatgaagtagattgggatcaaacttaccaatattagctgtggccgg

SEQ ID NO: 25422 - DNA, 33 bp, Homo sapiens
ctcagtacacaaaaaaaaatattgccacccagg

SEQ ID NO: 25423 - DNA, 33 bp, Homo sapiens
gaaatgctgctgcctacattactgttttgtgag

SEQ ID NO: 25424 - DNA, 33 bp, Homo sapiens
tgaccctagtttccagcctctttccactaattt

SEQ ID NO: 25425 - DNA, 51 bp, Homo sapiens
gtagttcaggacaggaaagggaatacgtttgtgcctgttgagggtcatcag

SEQ ID NO: 25426 - DNA, 33 bp, Homo sapiens
gttactggggctttcacgaaagagcaatggaca

SEQ ID NO: 25427 - DNA, 33 bp, Homo sapiens
cttaagtcccttccaacgctactggttactcgg

SEQ ID NO: 25428 - DNA, 33 bp, Homo sapiens
cctctaggctcattcacgttacctcagatgaca

SEQ ID NO: 25429 - DNA, 33 bp, Homo sapiens
cttgagaatggaatgacctttgtactggtaaca

SEQ ID NO: 25430 - DNA, 33 bp, Homo sapiens
gccaccagcaactgaacggtttccgcacagcac

SEQ ID NO: 25431 - DNA, 33 bp, Homo sapiens
ctagttaaaaccgactcaggcatgtccttcagg

SEQ ID NO: 25432 - DNA, 33 bp, Homo sapiens
tggagtgtaatggcaaagtgtaagctcactgca

SEQ ID NO: 25433 - DNA, 33 bp, Homo sapiens
gtaagcagaagtaatacgagcatttttagagac

SEQ ID NO: 25434 - DNA, 33 bp, Homo sapiens
gtctgcggataggagaaatttaatctagtgcat

SEQ ID NO: 25435 - DNA, 33 bp, Homo sapiens
cgtctgctcatctgtcagaagtgttacaattcc

SEQ ID NO: 25436 - DNA, 33 bp, Homo sapiens
gaaaacaccaagagaaagaagtcatacccatcc

SEQ ID NO: 25437 - DNA, 33 bp, Homo sapiens
ctattgaatgattccactgatagaaaatgtcta

SEQ ID NO: 25438 - DNA, 33 bp, Homo sapiens
cagaaatgtgaattaaacagaatttttttaggg

SEQ ID NO: 25439 - DNA, 33 bp, Homo sapiens
ggatacttgaacttcactgaaagcctcttggtg

SEQ ID NO: 25440 - DNA, 33 bp, Homo sapiens
caactgttcagagctacgaacaaataggagaat

SEQ ID NO: 25441 - DNA, 33 bp, Homo sapiens
gaggacgcttgaacacacaggcctgaaactcat

SEQ ID NO: 25442 - DNA, 33 bp, Homo sapiens
ttcaatgtgcatttcacattaataacgaacaat

SEQ ID NO: 25443 - DNA, 33 bp, Homo sapiens
gatatacttatatgaaaaaatgacttgcttttt

SEQ ID NO: 25444 - DNA, 51 bp, Homo sapiens
cacacacacacagtgtaccaggatgcagcatgtttttagactcggccgttt

SEQ ID NO: 25445 - DNA, 33 bp, Homo sapiens
catgatcttcttgccacgtcaggtgacctgctc

SEQ ID NO: 25446 - DNA, 33 bp, Homo sapiens
tagatgatcgttattcactgtcaagttataata

SEQ ID NO: 25447 - DNA, 33 bp, Homo sapiens
gttgattaggaaacaaatacttctacagtaata

SEQ ID NO: 25448 - DNA, 33 bp, Homo sapiens
tggattcaatgccaaagatccgacaatgagcaa

SEQ ID NO: 25449 - DNA, 33 bp, Homo sapiens
aaagccctgtgagggaagaaattgccctgtatc

SEQ ID NO: 25450 - DNA, 33 bp, Homo sapiens
ccaagcacttctgttcacgtcatctcctttgac

SEQ ID NO: 25451 - DNA, 33 bp, Homo sapiens
acattattagacctcaagtgttgtgggaaatac

SEQ ID NO: 25452 - DNA, 33 bp, Homo sapiens
tctcagccctgattagacacaaagtaggatgcc

SEQ ID NO: 25453 - DNA, 51 bp, Homo sapiens
gacagcctcagctccttctgttcaaccagaagttctgactcccagtgtcct

SEQ ID NO: 25454 - DNA, 33 bp, Homo sapiens
tcgctgctatcccagaggttgcttgagaacaag

SEQ ID NO: 25455 - DNA, 33 bp, Homo sapiens
tcgagaagggccagtacattttccagttaccta

SEQ ID NO: 25456 - DNA, 33 bp, Homo sapiens
tcgatggctccaagaaactggtgacttaggctt

SEQ ID NO: 25457 - DNA, 33 bp, Homo sapiens
catctcggagccaagacagactcaaacaagagc

SEQ ID NO: 25458 - DNA, 33 bp, Homo sapiens
ggattcatggcaataacgaagataaatatcaag

SEQ ID NO: 25459 - DNA, 33 bp, Homo sapiens
ttcaattatccaaacacctgtcatgaagaaagg

SEQ ID NO: 25460 - DNA, 33 bp, Homo sapiens
cagtggaactccagtaacaatgagtgcatggtg

SEQ ID NO: 25461 - DNA, 33 bp, Homo sapiens
tcttaactccttcgtccgaaagcagtggaactc

SEQ ID NO: 25462 - DNA, 33 bp, Homo sapiens
acacagaattagaagacactactatgtgcaact

SEQ ID NO: 25463 - DNA, 33 bp, Homo sapiens
ctaaagagtatgaaacaggatccaattgtaatt

SEQ ID NO: 25464 - DNA, 51 bp, Homo sapiens
cttggtgaaaggaatgtagtgaatcaataatcattaacgagctgtctggtc

SEQ ID NO: 25465 - DNA, 51 bp, Homo sapiens
ggtccttcctttctttgtgagaacacgtcttgggtagcctctggatgaagg

SEQ ID NO: 25466 - DNA, 51 bp, Homo sapiens
ctgcatattttcccttgtattagtcacctttatccacaataattctgcaca

SEQ ID NO: 25467 - DNA, 51 bp, Homo sapiens
agaggatgttattgactaaaatcaggtggtggaagtgagacagtagcattg

SEQ ID NO: 25468 - DNA, 33 bp, Homo sapiens
cacacattgaagcccgccatgatgccaatcagc

SEQ ID NO: 25469 - DNA, 33 bp, Homo sapiens
gtggcctgtgagaaagaaaacctggactgaagt

SEQ ID NO: 25470 - DNA, 33 bp, Homo sapiens
cagctggctgatctgaagaactaagaggctgta

SEQ ID NO: 25471 - DNA, 33 bp, Homo sapiens
tcctgttagactcatacccatgaccagagtcag

SEQ ID NO: 25472 - DNA, 33 bp, Homo sapiens
tgattgttcattaatgccaacaagtatttattg

SEQ ID NO: 25473 - DNA, 33 bp, Homo sapiens
gaggaaaagacctttaaggtgaccaactgtcct

SEQ ID NO: 25474 - DNA, 33 bp, Homo sapiens
ggtgataaaatgggaaacttcaactgtacttgt

SEQ ID NO: 25475 - DNA, 51 bp, Homo sapiens
atttctctgtctcagatctaggaagcaaaccctgcctctgctgtctctgtc

SEQ ID NO: 25476 - DNA, 51 bp, Homo sapiens
gatctttagttcctgccaacctgtcacaactcaaggattaaactaaacatt

SEQ ID NO: 25477 - DNA, 33 bp, Homo sapiens
aatcatttgaccactgaatagctccagctttga

SEQ ID NO: 25478 - DNA, 33 bp, Homo sapiens
atttatgtcctgttgactagttttgttgactga

SEQ ID NO: 25479 - DNA, 51 bp, Homo sapiens
ccagagatggcaccaactatgaagaatatctttgaggaccacatgaagagc

SEQ ID NO: 25480 - DNA, 33 bp, Homo sapiens
agctgggatatctgaacgcgcccactgagttgc

SEQ ID NO: 25481 - DNA, 33 bp, Homo sapiens
ttgtttaaccaacaccccttaatggctacaggt

SEQ ID NO: 25482 - DNA, 33 bp, Homo sapiens
cagactccataagaaacgaccctacgagacaaa

SEQ ID NO: 25483 - DNA, 51 bp, Homo sapiens
gaacataaaatcctaagctgaggagaactgtaagagattgcctggtctggc

SEQ ID NO: 25484 - DNA, 51 bp, Homo sapiens
ttcttccctgctcagtagatgggaaataccctcattgtatagaatttctgt

SEQ ID NO: 25485 - DNA, 51 bp, Homo sapiens
ttcactccttaagacctctttaagaacaagaactatgtggagagatcctct

SEQ ID NO: 25486 - DNA, 33 bp, Homo sapiens
ctcaggccagaccccacatttgatgtgatatgc

SEQ ID NO: 25487 - DNA, 51 bp, Homo sapiens
aagtgccctctactgagggatgcaacgattcctatttctgtcactcctctc

SEQ ID NO: 25488 - DNA, 51 bp, Homo sapiens
tcacctgaaggtttgttaaagcacacattgctgggcctcattcacagtttc

SEQ ID NO: 25489 - DNA, 33 bp, Homo sapiens
agtttccagcagaatagagagaatggaggggag

SEQ ID NO: 25490 - DNA, 33 bp, Homo sapiens
caatgttgcagcagtacgaggaccaagagaatt

SEQ ID NO: 25491 - DNA, 33 bp, Homo sapiens
gagtgtctaggccaaacgttcatcttctttatt

SEQ ID NO: 25492 - DNA, 33 bp, Homo sapiens
cattaaatgtgaaccacgagactaacagcacaa

SEQ ID NO: 25493 - DNA, 33 bp, Homo sapiens
gaaaaaactttatagcacagcaatggtctaatc

SEQ ID NO: 25494 - DNA, 51 bp, Homo sapiens
aggttgatttatatttggtagtttaacttttcattataaactcaatattct

SEQ ID NO: 25495 - DNA, 51 bp, Homo sapiens
gtgctgtcataagaaagtgtgtagacctgaacaggagcatgtctgatgtct

SEQ ID NO: 25496 - DNA, 33 bp, Homo sapiens
taaaaagtaccaagcagaaattctggaactgaa

SEQ ID NO: 25497 - DNA, 33 bp, Homo sapiens
agattagttacatgaaaaagcttgttgaaatag

SEQ ID NO: 25498 - DNA, 51 bp, Homo sapiens
ctggtacatcatgtgatatgagaaccatggtaggcaatcaataatgcagag

SEQ ID NO: 25499 - DNA, 33 bp, Homo sapiens
cgatccttcccttctaagcagtaacctcatcgg

SEQ ID NO: 25500 - DNA, 33 bp, Homo sapiens
ggaaaactcccttgtacacttgtgaaataataa

SEQ ID NO: 25501 - DNA, 33 bp, Homo sapiens
tagtttttcgaccttacgtaaatcacttaaatt

SEQ ID NO: 25502 - DNA, 33 bp, Homo sapiens
tgataaaagctctagactccaacagagaactaa

SEQ ID NO: 25503 - DNA, 33 bp, Homo sapiens
tgcttgtatcaaaacacatcaggtatccgataa

SEQ ID NO: 25504 - DNA, 33 bp, Homo sapiens
aactaataatcttcacaggaagcccaagctctt

SEQ ID NO: 25505 - DNA, 33 bp, Homo sapiens
gcatattacttcagaactgtgcttaacctttct

SEQ ID NO: 25506 - DNA, 33 bp, Homo sapiens
acccacccagaataagaaaagagctgcaaatat

SEQ ID NO: 25507 - DNA, 33 bp, Homo sapiens
aaaggttcttgggatcaaggtgtgtaatatgtg

SEQ ID NO: 25508 - DNA, 33 bp, Homo sapiens
tttgtttgttgagacactcattttctctcactg

SEQ ID NO: 25509 - DNA, 33 bp, Homo sapiens
tcctagctctctcaggaacgcattgcaaagcaa

SEQ ID NO: 25510 - DNA, 33 bp, Homo sapiens
catttagtaaataaagcaagtcatagcctagtt

SEQ ID NO: 25511 - DNA, 33 bp, Homo sapiens
caggagtataaatcacactaacaacaatgtggc

SEQ ID NO: 25512 - DNA, 33 bp, Homo sapiens
ctttcaccctgtcaccaatgttagctctaaacc

SEQ ID NO: 25513 - DNA, 33 bp, Homo sapiens
attttccaacatcctcgcgaatcccatctgcaa

SEQ ID NO: 25514 - DNA, 33 bp, Homo sapiens
aaggttccctgtagaagtgtccctcagcagttg

SEQ ID NO: 25515 - DNA, 33 bp, Homo sapiens
atttgcgcgctatgcacgtgaaaaaggtctaat

SEQ ID NO: 25516 - DNA, 33 bp, Homo sapiens
tgcttaaatttggtcaactgtgaaatgaaggtt

SEQ ID NO: 25517 - DNA, 51 bp, Homo sapiens
tgagggaactctattagaagagaaaagtctgcctttgacaatgcttattaa

SEQ ID NO: 25518 - DNA, 33 bp, Homo sapiens
aaggcaaagctatggaaacacaaaaagatcagt

SEQ ID NO: 25519 - DNA, 33 bp, Homo sapiens
tttctggtctttcatacgactttagacctcaaa

SEQ ID NO: 25520 - DNA, 33 bp, Homo sapiens
atattcagcagtaagaagctgggacattttctt

SEQ ID NO: 25521 - DNA, 51 bp, Homo sapiens
tcttcatttctgacacacagctagaagacacttaccagctttcttgcagtg

SEQ ID NO: 25522 - DNA, 33 bp, Homo sapiens
gcttcatgtctgtctaagtacaggtcttattat

SEQ ID NO: 25523 - DNA, 33 bp, Homo sapiens
gcaaggagactttggaaatttgtcaagagctag

SEQ ID NO: 25524 - DNA, 33 bp, Homo sapiens
ttataaagggaaggcaaatatgtataagtcatt

SEQ ID NO: 25525 - DNA, 33 bp, Homo sapiens
tcttatttttctcatcccgtcttctcacaatgg

SEQ ID NO: 25526 - DNA, 33 bp, Homo sapiens
tgtttgacttctgggaaagctggatccgttttc

SEQ ID NO: 25527 - DNA, 51 bp, Homo sapiens
tactttttcatttcattgtaaccctcaaatattatctttctcctccttggt

SEQ ID NO: 25528 - DNA, 33 bp, Homo sapiens
ctgtagcacctctataaactaacaatgaactat

SEQ ID NO: 25529 - DNA, 33 bp, Homo sapiens
gaatccctctctacaaatgaatccccacgaagc

SEQ ID NO: 25530 - DNA, 33 bp, Homo sapiens
gaggctgacacaactccactagtattttgcttc

SEQ ID NO: 25531 - DNA, 33 bp, Homo sapiens
gagaactaaggtaaaacgacaagacacaatgag

SEQ ID NO: 25532 - DNA, 33 bp, Homo sapiens
tctatacgccattaccactaaagtttacatatt

SEQ ID NO: 25533 - DNA, 33 bp, Homo sapiens
gatatcattccttccaactctctgaacatcagc

SEQ ID NO: 25534 - DNA, 33 bp, Homo sapiens
tccatccttcctcccgcattccttctcccaaag

SEQ ID NO: 25535 - DNA, 33 bp, Homo sapiens
aacaaggagtatacagacggatgctgatgtgtt

SEQ ID NO: 25536 - DNA, 33 bp, Homo sapiens
ggtattggcagtactacattttaagacattttc

SEQ ID NO: 25537 - DNA, 33 bp, Homo sapiens
gagtggctctcctacaatcgtgtggcttggggt

SEQ ID NO: 25538 - DNA, 33 bp, Homo sapiens
agcttgtgccttcttacggataacccactcagg

SEQ ID NO: 25539 - DNA, 33 bp, Homo sapiens
aactaatcacatgggacgcccacttcagttagc

SEQ ID NO: 25540 - DNA, 51 bp, Homo sapiens
taaagagaaatgaagaaccacagtagggagtacttttctgcattgggtagg

SEQ ID NO: 25541 - DNA, 33 bp, Homo sapiens
gaagccttttagaacactgacaagtaaataatc

SEQ ID NO: 25542 - DNA, 33 bp, Homo sapiens
ttaatgggattctgcaccacaaatctagtccct

SEQ ID NO: 25543 - DNA, 51 bp, Homo sapiens
agcgaacttgtggacgggtttgctacagcggtgttacacttagatgaggaa

SEQ ID NO: 25544 - DNA, 33 bp, Homo sapiens
tggaagatttgcatccacttccacaagctgcta

SEQ ID NO: 25545 - DNA, 33 bp, Homo sapiens
gcgaaaagaaccctgcaaagctatcacagagat

SEQ ID NO: 25546 - DNA, 33 bp, Homo sapiens
aatgtaaccactatcccgagaccagcaccatag

SEQ ID NO: 25547 - DNA, 33 bp, Homo sapiens
attagttggcataaaacagctttcaggctttta

SEQ ID NO: 25548 - DNA, 33 bp, Homo sapiens
gaacatttctggggacaaggacttcttatacaa

SEQ ID NO: 25549 - DNA, 33 bp, Homo sapiens
cagcactaattgacaacaaataagtgataaata

SEQ ID NO: 25550 - DNA, 33 bp, Homo sapiens
gattgtaaacaactgcaaacacaggcactagac

SEQ ID NO: 25551 - DNA, 33 bp, Homo sapiens
cttttctcgactgtaaaatttctaggttgatga

SEQ ID NO: 25552 - DNA, 33 bp, Homo sapiens
tgctttaaaacagcaccgtcggccgggcatggt

SEQ ID NO: 25553 - DNA, 33 bp, Homo sapiens
ccgtcaggttctacctgaaatctatgtggagcg

SEQ ID NO: 25554 - DNA, 33 bp, Homo sapiens
aggtaagtcatgtaaagttctttgcacagtccc

SEQ ID NO: 25555 - DNA, 33 bp, Homo sapiens
tcatgaaattctccagcaactttttctgctctg

SEQ ID NO: 25556 - DNA, 33 bp, Homo sapiens
attcatttccagagatcactaaaaatcagagat

SEQ ID NO: 25557 - DNA, 33 bp, Homo sapiens
gcaaagcagagcatcaacctttccagcaaatcc

SEQ ID NO: 25558 - DNA, 33 bp, Homo sapiens
tgattcactgaactagacagagtggctcagatc

SEQ ID NO: 25559 - DNA, 33 bp, Homo sapiens
atattctgaggtaggcgcattccagcatgatga

SEQ ID NO: 25560 - DNA, 33 bp, Homo sapiens
atatatactgagcaaaataaatatctagggtac

SEQ ID NO: 25561 - DNA, 33 bp, Homo sapiens
tgtcaagtaaaagtcaatagcctagagatgtgt

SEQ ID NO: 25562 - DNA, 33 bp, Homo sapiens
gatatgctaactatccggatctaatcactaccc

SEQ ID NO: 25563 - DNA, 33 bp, Homo sapiens
tagaactcaaaactgacgaaacacaaagcaaag

SEQ ID NO: 25564 - DNA, 33 bp, Homo sapiens
atacagctatctgataacagaacttgaactgga

SEQ ID NO: 25565 - DNA, 33 bp, Homo sapiens
tggaagtccgtacttgccattttctcttaagtt

SEQ ID NO: 25566 - DNA, 33 bp, Homo sapiens
acaataattactctaccacaagcgttattattt

SEQ ID NO: 25567 - DNA, 33 bp, Homo sapiens
cactctgaaatcactaagtcatactcccttgca

SEQ ID NO: 25568 - DNA, 33 bp, Homo sapiens
gtccagcacttgagacactacagagggctgcag

SEQ ID NO: 25569 - DNA, 33 bp, Homo sapiens
catccagaatggagcacggcatttgtcctgtcc

SEQ ID NO: 25570 - DNA, 33 bp, Homo sapiens
gagagagagagagtataaggtattggttcaagc

SEQ ID NO: 25571 - DNA, 33 bp, Homo sapiens
acagaccaccttttccaagagcctggctataaa

SEQ ID NO: 25572 - DNA, 51 bp, Homo sapiens
cgaaaatgtccctgatagtcggagaactcatgccagttgcctctcaagcca

SEQ ID NO: 25573 - DNA, 51 bp, Homo sapiens
gtattcgaatgtctgaggccttcaacatggagagtgttaataaaagtaagt

SEQ ID NO: 25574 - DNA, 33 bp, Homo sapiens
tcctaaaactgtataccattggttaatttttct

SEQ ID NO: 25575 - DNA, 33 bp, Homo sapiens
aactgaagatccagaacaggaagttagagaatc

SEQ ID NO: 25576 - DNA, 33 bp, Homo sapiens
agtaaatgatggctataatacaatgtcatggtt

SEQ ID NO: 25577 - DNA, 33 bp, Homo sapiens
gctacctagggaagaggataggatgacatcttt

SEQ ID NO: 25578 - DNA, 33 bp, Homo sapiens
ggcaaaaatcaggtggccaaaaatgtctttatc

SEQ ID NO: 25579 - DNA, 33 bp, Homo sapiens
ttcagacacctgccggacatcggggcagggtga

SEQ ID NO: 25580 - DNA, 33 bp, Homo sapiens
gggagtgaaagaggaaggagcaaagtggtcatg

SEQ ID NO: 25581 - DNA, 33 bp, Homo sapiens
attcaaccaaacaaccaaggaggagactaatga

SEQ ID NO: 25582 - DNA, 33 bp, Homo sapiens
atggcattatggaaaacgtggctcttgaaatat

SEQ ID NO: 25583 - DNA, 33 bp, Homo sapiens
tagatgccctcagtaaatgtattcagaataaat

SEQ ID NO: 25584 - DNA, 51 bp, Homo sapiens
actcaaattacacttacaattttcaaatatagtatctggcattcaatcaag

SEQ ID NO: 25585 - DNA, 33 bp, Homo sapiens
aaatggccagcaaatgaacaaagagatcttcaa

SEQ ID NO: 25586 - DNA, 33 bp, Homo sapiens
cgaagcagagttcttacaggtcagattgaagac

SEQ ID NO: 25587 - DNA, 33 bp, Homo sapiens
taagaagcatttgtgaccaggctacattttctt

SEQ ID NO: 25588 - DNA, 51 bp, Homo sapiens
attcatgccattaactattcattaccgagccttttttgtttgtcttgtttt

SEQ ID NO: 25589 - DNA, 33 bp, Homo sapiens
tcagtttccgaagatacgcagctttggcgaaac

SEQ ID NO: 25590 - DNA, 33 bp, Homo sapiens
ttattttcaacagccaacttcaattacaaatgt

SEQ ID NO: 25591 - DNA, 33 bp, Homo sapiens
ctctagattagctctcacaatatggtaaactcc

SEQ ID NO: 25592 - DNA, 33 bp, Homo sapiens
ctggagaaaatgtacaaaatgcacaaatactat

SEQ ID NO: 25593 - DNA, 33 bp, Homo sapiens
aactgacaatgtagaaatgatgacagagataga

SEQ ID NO: 25594 - DNA, 33 bp, Homo sapiens
atctttcaagggtcaaccaaaatgctattcctt

SEQ ID NO: 25595 - DNA, 33 bp, Homo sapiens
caggtctctggtataacggcgtgagtaagataa

SEQ ID NO: 25596 - DNA, 51 bp, Homo sapiens
agtagattgtttcagtgaactgaccaaaaatttcctgttacataggtcaat

SEQ ID NO: 25597 - DNA, 33 bp, Homo sapiens
tttaattggtcacgcaaaagaaaggcttacatt

SEQ ID NO: 25598 - DNA, 33 bp, Homo sapiens
gtctgcttttgtgtcacgccagctgcctggtgc

SEQ ID NO: 25599 - DNA, 33 bp, Homo sapiens
gcactccatatacttgcagagctatctgaattt

SEQ ID NO: 25600 - DNA, 33 bp, Homo sapiens
ctcgcatgaggccatgccatgatgatcacaggg

SEQ ID NO: 25601 - DNA, 33 bp, Homo sapiens
tccagatatgatttcagttgggccagttagatg

SEQ ID NO: 25602 - DNA, 33 bp, Homo sapiens
atccagctttttggaacgtctgttaaatagtct

SEQ ID NO: 25603 - DNA, 33 bp, Homo sapiens
ccttcattcatgtcagcaaatccctaactgtgt

SEQ ID NO: 25604 - DNA, 33 bp, Homo sapiens
agaatctgtgaaaagaagtggcaactgtgctgg

SEQ ID NO: 25605 - DNA, 33 bp, Homo sapiens
tataccaccccactcaagtgcaataatatttaa

SEQ ID NO: 25606 - DNA, 33 bp, Homo sapiens
cagcttgttaattagcagcccctctacaaatag

SEQ ID NO: 25607 - DNA, 33 bp, Homo sapiens
gcttagtgagtcagatcacaccttaatgctctt

SEQ ID NO: 25608 - DNA, 33 bp, Homo sapiens
accagctattgtgaaaattgattataaattcac

SEQ ID NO: 25609 - DNA, 33 bp, Homo sapiens
cagccatgtgtggaaacgtcaccctggagttct

SEQ ID NO: 25610 - DNA, 33 bp, Homo sapiens
gatcctgggagcatacaggactcctccaaacct

SEQ ID NO: 25611 - DNA, 33 bp, Homo sapiens
ggccttcatagaaaaggaattacctaaaaagaa

SEQ ID NO: 25612 - DNA, 33 bp, Homo sapiens
ctgaatgacagactgaaacacttgctcaaaggg

SEQ ID NO: 25613 - DNA, 33 bp, Homo sapiens
gttggagtaaagtgaacgaaataatcagaatgt

SEQ ID NO: 25614 - DNA, 33 bp, Homo sapiens
tcatcctagattaaagactgtattaccatgaaa

SEQ ID NO: 25615 - DNA, 33 bp, Homo sapiens
agcagagggtgcctaactgaggtcattctcagc

SEQ ID NO: 25616 - DNA, 33 bp, Homo sapiens
tctttgtatccaataaatcagtaacaactctac

SEQ ID NO: 25617 - DNA, 33 bp, Homo sapiens
ctgtgtcagaaaccatcaagaatgcacagctga

SEQ ID NO: 25618 - DNA, 33 bp, Homo sapiens
ggaactatttgatgcactgagtaaacaagagta

SEQ ID NO: 25619 - DNA, 33 bp, Homo sapiens
aaggacacagtgttcaccccctttcgcccttcc

SEQ ID NO: 25620 - DNA, 33 bp, Homo sapiens
tgtagtgtcagtatcaagttacacagagcaaaa

SEQ ID NO: 25621 - DNA, 51 bp, Homo sapiens
tcaaagatttattctctcaattaccaatcaaaataactaataaaaggagaa

SEQ ID NO: 25622 - DNA, 33 bp, Homo sapiens
agagaacattactccactcacataataaagcta

SEQ ID NO: 25623 - DNA, 33 bp, Homo sapiens
gccaattatctgactacaggttggatgatatta

SEQ ID NO: 25624 - DNA, 33 bp, Homo sapiens
tagcatacaatctagacaacacagttcttgggt

SEQ ID NO: 25625 - DNA, 33 bp, Homo sapiens
tctcctaacaggcaagaaaaataaaagcagaat

SEQ ID NO: 25626 - DNA, 33 bp, Homo sapiens
accaaatagattcaggcattcaaagtcctgatg

SEQ ID NO: 25627 - DNA, 33 bp, Homo sapiens
gttcaaacctattccacaagcctagtactctgc

SEQ ID NO: 25628 - DNA, 33 bp, Homo sapiens
tagatctatacaattaacacactttgccagagc

SEQ ID NO: 25629 - DNA, 33 bp, Homo sapiens
aattcaaagacacatagaggtacacaggtgggg

SEQ ID NO: 25630 - DNA, 33 bp, Homo sapiens
tgagtgtatggagggaacacttctcgtatacct

SEQ ID NO: 25631 - DNA, 33 bp, Homo sapiens
ttttatatcacctgtaaggtcattacactttag

SEQ ID NO: 25632 - DNA, 51 bp, Homo sapiens
tctaactctcagcacatattcatagaaaaccaaagttgcaatactgtaaaa

SEQ ID NO: 25633 - DNA, 51 bp, Homo sapiens
aattagttttgttttaaagagaagacgaggtacccttgacaacatgatcct

SEQ ID NO: 25634 - DNA, 51 bp, Homo sapiens
tggtgctggggaggctgtaagccaacgaatctgggcaggtataacaggaac

SEQ ID NO: 25635 - DNA, 33 bp, Homo sapiens
gatgtttggcttaagacagctagattctcacaa

SEQ ID NO: 25636 - DNA, 33 bp, Homo sapiens
atgttcagaagagtcaataaatattcttttcta

SEQ ID NO: 25637 - DNA, 33 bp, Homo sapiens
ggtaaattaagaaataccatagctgcagatgtt

SEQ ID NO: 25638 - DNA, 33 bp, Homo sapiens
taataaaacataagcgaaacagtgaaaaacttg

SEQ ID NO: 25639 - DNA, 33 bp, Homo sapiens
acatgagtcaggaacaacttaagagttttggaa

SEQ ID NO: 25640 - DNA, 51 bp, Homo sapiens
tcttattttctttcttttgctaataaatcactgcattcagcctttaagtta

SEQ ID NO: 25641 - DNA, 33 bp, Homo sapiens
cagagagtaggagttaggatgaggaaaaatggc

SEQ ID NO: 25642 - DNA, 33 bp, Homo sapiens
tagaggtatgctgtaccgacaaaataatggtta

SEQ ID NO: 25643 - DNA, 33 bp, Homo sapiens
cacttgaagtattaaaatccaaactgtcatatt

SEQ ID NO: 25644 - DNA, 33 bp, Homo sapiens
ggtgtgtgcatactcaagaagaaagggaatgga

SEQ ID NO: 25645 - DNA, 51 bp, Homo sapiens
tgattgttatcttcaaggtaaccaacgaactgagagtgggagtgggaacag

SEQ ID NO: 25646 - DNA, 33 bp, Homo sapiens
ttagtgaaagagtcaacagtttaatagttagag

SEQ ID NO: 25647 - DNA, 33 bp, Homo sapiens
tgaagttagtggcctacgaatgatatatcttga

SEQ ID NO: 25648 - DNA, 33 bp, Homo sapiens
agatcaaatgaagttgaaaccctttaacaactc

SEQ ID NO: 25649 - DNA, 33 bp, Homo sapiens
caactacatagttatccctgagcctgcagtgct

SEQ ID NO: 25650 - DNA, 33 bp, Homo sapiens
caaataattaaaccaaaccctgttgataactgc

SEQ ID NO: 25651 - DNA, 33 bp, Homo sapiens
tttctctgtctgatcacgtgagtgctgtttggg

SEQ ID NO: 25652 - DNA, 33 bp, Homo sapiens
gatcctgctgtcttgacaagctattatggcaga

SEQ ID NO: 25653 - DNA, 33 bp, Homo sapiens
tcttcataaaagttcacgtgcattcccaattct

SEQ ID NO: 25654 - DNA, 33 bp, Homo sapiens
caaggaagtctccagacgcacgcttctacatgg

SEQ ID NO: 25655 - DNA, 33 bp, Homo sapiens
atgagaagtctatacaacaaaatctactaaata

SEQ ID NO: 25656 - DNA, 33 bp, Homo sapiens
aagaggaaagcagaacaatgtgtaaaatagact

SEQ ID NO: 25657 - DNA, 33 bp, Homo sapiens
taattatggaggaattcaagcacgaagttaatg

SEQ ID NO: 25658 - DNA, 33 bp, Homo sapiens
tattagtatttggagaaaattagagatgcatag

SEQ ID NO: 25659 - DNA, 51 bp, Homo sapiens
accagtctcattttcagcagaaatcgaagtgaggaattcttattttcttta

SEQ ID NO: 25660 - DNA, 51 bp, Homo sapiens
aactcttctcccttcagtatcccaacctggctaactaggatcttactactt

SEQ ID NO: 25661 - DNA, 33 bp, Homo sapiens
tcaaattacacagaaacaggcacattaaaatat

SEQ ID NO: 25662 - DNA, 33 bp, Homo sapiens
aaattacatgcacccaaaggtccaatttggcag

SEQ ID NO: 25663 - DNA, 33 bp, Homo sapiens
tatattctataaaacaaccaatttgaccattta

SEQ ID NO: 25664 - DNA, 33 bp, Homo sapiens
tgcccagtgccacttgaaaaaaaatggtttagt

SEQ ID NO: 25665 - DNA, 33 bp, Homo sapiens
gagagataaaaccaggcagtaggccaacagttc

SEQ ID NO: 25666 - DNA, 33 bp, Homo sapiens
gatcaaacaagatttcaccaaaataactggtta

SEQ ID NO: 25667 - DNA, 33 bp, Homo sapiens
ttgaacaatttttagactaagcaaggaaaggga

SEQ ID NO: 25668 - DNA, 33 bp, Homo sapiens
gaatgtctcagaggcaaattacaagatttataa

SEQ ID NO: 25669 - DNA, 33 bp, Homo sapiens
tgaggccagaggattcacttcttccaagatggc

SEQ ID NO: 25670 - DNA, 33 bp, Homo sapiens
tcaacttccaaaaaaactgaagtcagctgatca

SEQ ID NO: 25671 - DNA, 33 bp, Homo sapiens
gaactgtaagtgtcgccaatagagatttaagat

SEQ ID NO: 25672 - DNA, 33 bp, Homo sapiens
aggaagtagttgtcataaagctcagtcaagaga

SEQ ID NO: 25673 - DNA, 33 bp, Homo sapiens
tactggccttctaagaagagtttaaaagtgttc

SEQ ID NO: 25674 - DNA, 33 bp, Homo sapiens
tgtggtggtaataagacctcacaggtatcacca

SEQ ID NO: 25675 - DNA, 51 bp, Homo sapiens
tttcatcaggttccaaaaatatcagcatcttgacattcttgtaaaatcttt

SEQ ID NO: 25676 - DNA, 33 bp, Homo sapiens
atagcaatttttaggcagcactgttagggcttc

SEQ ID NO: 25677 - DNA, 33 bp, Homo sapiens
ggagaggagagctttacgtgtaaccctgatcag

SEQ ID NO: 25678 - DNA, 33 bp, Homo sapiens
gaatgtggaacttgaactagacttctggaaaag

SEQ ID NO: 25679 - DNA, 33 bp, Homo sapiens
aggtgggactggacaccgaagaaagtgaccaca

SEQ ID NO: 25680 - DNA, 51 bp, Homo sapiens
ggaaaactgtatttgggttcttctcactataaaagggtatttttagcttca

SEQ ID NO: 25681 - DNA, 33 bp, Homo sapiens
tagcatcgattttaccaatacctcatagagtaa

SEQ ID NO: 25682 - DNA, 33 bp, Homo sapiens
gatattacagatcatgaacaaaactatttcaaa

SEQ ID NO: 25683 - DNA, 33 bp, Homo sapiens
aagacttgcaaggtgaactacatatttccctac

SEQ ID NO: 25684 - DNA, 33 bp, Homo sapiens
tgattggaatgcttgaagttgaaacagttaagg

SEQ ID NO: 25685 - DNA, 33 bp, Homo sapiens
tatttttcagtgtaaaacttgataggctgagaa

SEQ ID NO: 25686 - DNA, 33 bp, Homo sapiens
ttgattttctttgtagcatttttttgctagttg

SEQ ID NO: 25687 - DNA, 51 bp, Homo sapiens
tttaatagtgaaaagttaccatagaaaagtgacaggagtatgtagttcttc

SEQ ID NO: 25688 - DNA, 51 bp, Homo sapiens
aacattaagaaaagatcataaatggaaacatcatatgctgatgtggaagat

SEQ ID NO: 25689 - DNA, 33 bp, Homo sapiens
tattgaatagttggaacgcaaaggaaagatggg

SEQ ID NO: 25690 - DNA, 33 bp, Homo sapiens
gcatgattctttgcaaatgaacttttaaattgt

SEQ ID NO: 25691 - DNA, 33 bp, Homo sapiens
cagtaaattcccagaacatctgatgcactccta

SEQ ID NO: 25692 - DNA, 33 bp, Homo sapiens
caagaccagcccaatacacagctagagtgcaaa

SEQ ID NO: 25693 - DNA, 33 bp, Homo sapiens
cttataatggattaaaaagccaaggttcaaaaa

SEQ ID NO: 25694 - DNA, 33 bp, Homo sapiens
cagtggtcactaaatacgttgtgtttgtctgtg

SEQ ID NO: 25695 - DNA, 33 bp, Homo sapiens
tcatgactttaaattgaacagagtgaacatttc

SEQ ID NO: 25696 - DNA, 33 bp, Homo sapiens
ttcaggatgcttggtcaccagccactggacttt

SEQ ID NO: 25697 - DNA, 33 bp, Homo sapiens
agaaaacagaatataactggaaacagacttctt

SEQ ID NO: 25698 - DNA, 33 bp, Homo sapiens
ctctgcttcttagtcaataagtttgtgatcttc

SEQ ID NO: 25699 - DNA, 33 bp, Homo sapiens
tacctattgggtactaggtatgctatctgggtg

SEQ ID NO: 25700 - DNA, 33 bp, Homo sapiens
gactttagtttgcaagcctggatttagagagca

SEQ ID NO: 25701 - DNA, 33 bp, Homo sapiens
tactatgttccaaacaatattctaagtatttta

SEQ ID NO: 25702 - DNA, 33 bp, Homo sapiens
ttgatataaacagtctcacaattcagctgatta

SEQ ID NO: 25703 - DNA, 33 bp, Homo sapiens
aagtaactaaaagtgaagacattccgatgttgt

SEQ ID NO: 25704 - DNA, 33 bp, Homo sapiens
tcagggagaataataactagatgcaacaactca

SEQ ID NO: 25705 - DNA, 33 bp, Homo sapiens
attacagccactgagaaatacataggaaactca

SEQ ID NO: 25706 - DNA, 33 bp, Homo sapiens
gactgttaaaaatcaacaaaatcagcatggcat

SEQ ID NO: 25707 - DNA, 33 bp, Homo sapiens
ctctccagaactcacaagctaatggagaagatg

SEQ ID NO: 25708 - DNA, 33 bp, Homo sapiens
gtgatgccaagagagacgaggctgttcatggat

SEQ ID NO: 25709 - DNA, 33 bp, Homo sapiens
gatggccttgagatccaggacaattgttggaaa

SEQ ID NO: 25710 - DNA, 33 bp, Homo sapiens
atacatggccaggcagaaagtttccttcttcat

SEQ ID NO: 25711 - DNA, 33 bp, Homo sapiens
agacccatgtataatgcaccagagaattgtccc

SEQ ID NO: 25712 - DNA, 33 bp, Homo sapiens
ttttatccactagcgcacgtatgttacattttg

SEQ ID NO: 25713 - DNA, 33 bp, Homo sapiens
tgtcgtcctggtataacacttgataatgattcc

SEQ ID NO: 25714 - DNA, 33 bp, Homo sapiens
attttgccctgtcttcaaataaagaggttgatt

SEQ ID NO: 25715 - DNA, 33 bp, Homo sapiens
gatattacatagataactgaaagtatgaactct

SEQ ID NO: 25716 - DNA, 33 bp, Homo sapiens
ccaacttccaaccttaaccattatcccctacta

SEQ ID NO: 25717 - DNA, 51 bp, Homo sapiens
tttttgtatttttcagtagttttatcagtagcagtcttttgtaatttttga

SEQ ID NO: 25718 - DNA, 33 bp, Homo sapiens
tcccaaccaaatctaccaacctatctgcttctc

SEQ ID NO: 25719 - DNA, 33 bp, Homo sapiens
actcagtacagttagccacttgtgagacttttg

SEQ ID NO: 25720 - DNA, 33 bp, Homo sapiens
gataccatgtacaataacatcaaaaatgaagaa

SEQ ID NO: 25721 - DNA, 33 bp, Homo sapiens
aatatcatagacataacgtggagccaaagaaac

SEQ ID NO: 25722 - DNA, 33 bp, Homo sapiens
cacaagaactccttaacccccagcacacatcct

SEQ ID NO: 25723 - DNA, 33 bp, Homo sapiens
tggctacagctacgtaccttcagacttttcaat

SEQ ID NO: 25724 - DNA, 33 bp, Homo sapiens
aacaactttttagcgaaatgaatctgtgctctt

SEQ ID NO: 25725 - DNA, 33 bp, Homo sapiens
atataaacgtcacacacaggatggctaggctga

SEQ ID NO: 25726 - DNA, 33 bp, Homo sapiens
ttcattcatctttaaacccattaagtaagtgtt

SEQ ID NO: 25727 - DNA, 33 bp, Homo sapiens
tgctcatgattttataagccagaaattcagaca

SEQ ID NO: 25728 - DNA, 33 bp, Homo sapiens
tagcttataaattagtaaatcaggtgtcatcac

SEQ ID NO: 25729 - DNA, 33 bp, Homo sapiens
tggtatctacagtagaacccttcttttgccctt

SEQ ID NO: 25730 - DNA, 33 bp, Homo sapiens
gtgtgttctggaaaaacgcctattgatactaga

SEQ ID NO: 25731 - DNA, 33 bp, Homo sapiens
gcaaaatgccagggacagtaatggttccacatc

SEQ ID NO: 25732 - DNA, 33 bp, Homo sapiens
actttctccacagcaaagtcctctaagagatac

SEQ ID NO: 25733 - DNA, 33 bp, Homo sapiens
gctttagttgacctcccagtttgtctcactgtt

SEQ ID NO: 25734 - DNA, 33 bp, Homo sapiens
tcaggtatcaaagggcagcattgtgctcaggga

SEQ ID NO: 25735 - DNA, 33 bp, Homo sapiens
acccacttctcttccacgtcttgatccatatac

SEQ ID NO: 25736 - DNA, 33 bp, Homo sapiens
attaactgggagacaccggcaagggcaataggg

SEQ ID NO: 25737 - DNA, 33 bp, Homo sapiens
agagtatgctgcacaacggtttgcatttcagat

SEQ ID NO: 25738 - DNA, 33 bp, Homo sapiens
gcattttgcaaagctacattttccctctggacc

SEQ ID NO: 25739 - DNA, 33 bp, Homo sapiens
aaactatagcaaaacaacctagagatcttcgtc

SEQ ID NO: 25740 - DNA, 33 bp, Homo sapiens
cagatggcagaggccaagaagtctccgaacaaa

SEQ ID NO: 25741 - DNA, 51 bp, Homo sapiens
gtttactacattcaaggataaaagacgcatttgtgataattaatattgaaa

SEQ ID NO: 25742 - DNA, 33 bp, Homo sapiens
acaattctgttcatccagaccacatctttcctg

SEQ ID NO: 25743 - DNA, 33 bp, Homo sapiens
catcagccttaataacaatgtggtagaagcagg

SEQ ID NO: 25744 - DNA, 33 bp, Homo sapiens
ataatgtctgtatgtacgtataatcacacatag

SEQ ID NO: 25745 - DNA, 33 bp, Homo sapiens
tatttgatgattcagagaggacaagtgactttt

SEQ ID NO: 25746 - DNA, 51 bp, Homo sapiens
gagcagcaatttcaaagaacatagcaaaggctttcagcaatatgtaacggt

SEQ ID NO: 25747 - DNA, 33 bp, Homo sapiens
ctaccttgcttgctcagatttcttcaaagcctt

SEQ ID NO: 25748 - DNA, 33 bp, Homo sapiens
atatcccatggcatcactattcctcttcttcag

SEQ ID NO: 25749 - DNA, 33 bp, Homo sapiens
agtgagccttgccaccaagcattgaatatcttt

SEQ ID NO: 25750 - DNA, 51 bp, Homo sapiens
tcctattaagctgtgtggttgcagacagtttgttctcaatatatatgtatg

SEQ ID NO: 25751 - DNA, 33 bp, Homo sapiens
taggtatgcaatgttaaaaggataaatgactta

SEQ ID NO: 25752 - DNA, 33 bp, Homo sapiens
gtgttctcttttcacaggcccacttctcttcca

SEQ ID NO: 25753 - DNA, 33 bp, Homo sapiens
atctccacatttgccactgaggattgaggactt

SEQ ID NO: 25754 - DNA, 33 bp, Homo sapiens
acctcacctcattctacgctagtctaattaatt

SEQ ID NO: 25755 - DNA, 51 bp, Homo sapiens
tcagacagaaaaataaactattatgaaggcacatcttttaacatttacttc

SEQ ID NO: 25756 - DNA, 51 bp, Homo sapiens
aggtagataaaggtattcagtgactcaaggaaattaattatagaggaaaaa

SEQ ID NO: 25757 - DNA, 51 bp, Homo sapiens
tttggtgaatagcctcaaatgataacaaggcttaacagagagcagaacact

SEQ ID NO: 25758 - DNA, 33 bp, Homo sapiens
atttggataaattgagaaaaactaatagccttt

SEQ ID NO: 25759 - DNA, 33 bp, Homo sapiens
tatttttttccttgcactacccccaagagcagt

SEQ ID NO: 25760 - DNA, 33 bp, Homo sapiens
tctttaatgttttcccactgtgcttgggatgaa

SEQ ID NO: 25761 - DNA, 33 bp, Homo sapiens
tatcatttccgaggtcgactataattctgtttc

SEQ ID NO: 25762 - DNA, 33 bp, Homo sapiens
tgttcattcaaagcaaacaaaaattcagtaata

SEQ ID NO: 25763 - DNA, 33 bp, Homo sapiens
gattatggcccaaaagcaggtaagctgaagttg

SEQ ID NO: 25764 - DNA, 33 bp, Homo sapiens
aacaaccaagccagagcaacgggtgatttgacc

SEQ ID NO: 25765 - DNA, 33 bp, Homo sapiens
taccctttttagagtcacattctggctccctta

SEQ ID NO: 25766 - DNA, 33 bp, Homo sapiens
gtagatgtattgtagacaggttgttttgtacca

SEQ ID NO: 25767 - DNA, 33 bp, Homo sapiens
aatgctgggaaaactccatcacttcacaatggc

SEQ ID NO: 25768 - DNA, 33 bp, Homo sapiens
gcgagtgttagaatcacggggcagatttttttt

SEQ ID NO: 25769 - DNA, 33 bp, Homo sapiens
tttaataagatgggccggaactctacccagttt

SEQ ID NO: 25770 - DNA, 33 bp, Homo sapiens
agttttcctctctggagacttgggtgggatgag

SEQ ID NO: 25771 - DNA, 33 bp, Homo sapiens
gttaatatctttcttcacctgttaacactgttc

SEQ ID NO: 25772 - DNA, 51 bp, Homo sapiens
ttcaatcatgtcctatcaatttggtaaaaagatctgtccagctccttttac

SEQ ID NO: 25773 - DNA, 33 bp, Homo sapiens
tgaaacagggactcaccgagatcatgaactaag

SEQ ID NO: 25774 - DNA, 33 bp, Homo sapiens
actttgtctctgttgactatggtcatttcattc

SEQ ID NO: 25775 - DNA, 33 bp, Homo sapiens
tcccaagaaacaaacgaaagtccaagaccttac

SEQ ID NO: 25776 - DNA, 33 bp, Homo sapiens
atctccctcttatctccgaccgttcctttccac

SEQ ID NO: 25777 - DNA, 33 bp, Homo sapiens
cctctaccaccacagcaatgacagtcaggtaac

SEQ ID NO: 25778 - DNA, 33 bp, Homo sapiens
ctagcatactcctggaaagcaaggtgacccggc

SEQ ID NO: 25779 - DNA, 33 bp, Homo sapiens
cctgcctcgacttggcagatgatgtaaggaaag

SEQ ID NO: 25780 - DNA, 33 bp, Homo sapiens
ggatgaatccagagaaatatgctcagtgaaaaa

SEQ ID NO: 25781 - DNA, 33 bp, Homo sapiens
tgagatgtcagcaggcaagagaaggaaaggcag

SEQ ID NO: 25782 - DNA, 33 bp, Homo sapiens
aattgttcttttgttcaacgtgcattgtgcaac

SEQ ID NO: 25783 - DNA, 33 bp, Homo sapiens
tccaggggcttacctcacactttggaccttgtt

SEQ ID NO: 25784 - DNA, 33 bp, Homo sapiens
cagctgagggaactgccgagcatgaaaggctca

SEQ ID NO: 25785 - DNA, 33 bp, Homo sapiens
ggacagtgaaggctaaaaccaaccgagactttt

SEQ ID NO: 25786 - DNA, 33 bp, Homo sapiens
tcatgtggaactaaaagagacctctcggtactt

SEQ ID NO: 25787 - DNA, 33 bp, Homo sapiens
tcttgattgctctacaaattctgctgcaagatc

SEQ ID NO: 25788 - DNA, 33 bp, Homo sapiens
agttcaatgtatcactaagatgtcaatttgtcc

SEQ ID NO: 25789 - DNA, 33 bp, Homo sapiens
gatatacacatagttcaatttcccttcatatag

SEQ ID NO: 25790 - DNA, 33 bp, Homo sapiens
gtcaaataatttccaacgagatagatgcttaga

SEQ ID NO: 25791 - DNA, 33 bp, Homo sapiens
caaactctccagggaacaaccctcaaagaggtc

SEQ ID NO: 25792 - DNA, 51 bp, Homo sapiens
gactagtaattaggaactattatcacgttttttcccagaattttggagatt

SEQ ID NO: 25793 - DNA, 51 bp, Homo sapiens
ttttcaatatgtctacagtacacaagaattgattttgaaaattaataatgt

SEQ ID NO: 25794 - DNA, 33 bp, Homo sapiens
cccaagaatacgatacacaactctacataaatt

SEQ ID NO: 25795 - DNA, 33 bp, Homo sapiens
tctaaatatattgctaaggggaaaactgtatag

SEQ ID NO: 25796 - DNA, 51 bp, Homo sapiens
gttttgctgttataaacagagcaaactgtaagtcagaagatattttttacc

SEQ ID NO: 25797 - DNA, 33 bp, Homo sapiens
aatgagattgggagtacgcttgattggtgggaa

SEQ ID NO: 25798 - DNA, 33 bp, Homo sapiens
caatttgtgtttcaagacctataaatactgctg

SEQ ID NO: 25799 - DNA, 33 bp, Homo sapiens
gatgagtaccaaccaacaagtgatatcagcaat

SEQ ID NO: 25800 - DNA, 33 bp, Homo sapiens
tctcaagacagaaatcagatttagacttaacct

SEQ ID NO: 25801 - DNA, 33 bp, Homo sapiens
agtttccacgtctagaaaggtaaattataaaca

SEQ ID NO: 25802 - DNA, 33 bp, Homo sapiens
gatgtctttaatttctaacctggttgccctggc

SEQ ID NO: 25803 - DNA, 51 bp, Homo sapiens
ccgttccccaagggctacttcccaacgtcgtttattaactagtcaatacca

SEQ ID NO: 25804 - DNA, 33 bp, Homo sapiens
tttaaatatataaaaaacatgcttagctagctg

SEQ ID NO: 25805 - DNA, 33 bp, Homo sapiens
aaaaacaaccattacgccattgctatgcaaggt

SEQ ID NO: 25806 - DNA, 33 bp, Homo sapiens
gttctgtggctaggaactccagagatagatggt

SEQ ID NO: 25807 - DNA, 33 bp, Homo sapiens
aactttctgatcctgcaaagctaaagaaccagg

SEQ ID NO: 25808 - DNA, 33 bp, Homo sapiens
ttcatgcatattttcacgtctgtacttcatcgg

SEQ ID NO: 25809 - DNA, 33 bp, Homo sapiens
gcaaaagataaaaaaccgtaccaggcaggagaa

SEQ ID NO: 25810 - DNA, 33 bp, Homo sapiens
tcaagctcaggctttgaactcagtaggaaccaa

SEQ ID NO: 25811 - DNA, 33 bp, Homo sapiens
gctgttgtctggaacaaggattggaaaagagca

SEQ ID NO: 25812 - DNA, 33 bp, Homo sapiens
aagaaggaatcgaagacgagttagggtggatgg

SEQ ID NO: 25813 - DNA, 33 bp, Homo sapiens
tatccctgaggaaagacacagttaagcaggagg

SEQ ID NO: 25814 - DNA, 33 bp, Homo sapiens
gcctctccttaaaacagaatagtggttctggag

SEQ ID NO: 25815 - DNA, 33 bp, Homo sapiens
taagacctgggacttgaaactaatcccatctca

SEQ ID NO: 25816 - DNA, 33 bp, Homo sapiens
gtgccactctttcgcactgagtaaaagtatgtg

SEQ ID NO: 25817 - DNA, 33 bp, Homo sapiens
ctcttatacaccttaaactcatccaccttggga

SEQ ID NO: 25818 - DNA, 33 bp, Homo sapiens
gataagcacagtttaacggtgtaagttgcctca

SEQ ID NO: 25819 - DNA, 33 bp, Homo sapiens
gagaatgtgaaatgcaaggatgtgagactggcc

SEQ ID NO: 25820 - DNA, 33 bp, Homo sapiens
aatcctcaatgaaagaaactcaacaagaataca

SEQ ID NO: 25821 - DNA, 33 bp, Homo sapiens
tggaaggaatgaagaaaggtttcaagagccagc

SEQ ID NO: 25822 - DNA, 33 bp, Homo sapiens
tttttgataggaaagccataggttgtcagtggc

SEQ ID NO: 25823 - DNA, 33 bp, Homo sapiens
tgcagtcgttttagaaagtaatcttggaagtga

SEQ ID NO: 25824 - DNA, 33 bp, Homo sapiens
tatgcaagtttaggaactgtttttctgcctgtt

SEQ ID NO: 25825 - DNA, 33 bp, Homo sapiens
ggtttccattcttccccaagtttggtaaagtcg

SEQ ID NO: 25826 - DNA, 33 bp, Homo sapiens
tatcttaaattcagtcagagcggaaaaaacaga

SEQ ID NO: 25827 - DNA, 33 bp, Homo sapiens
attttggttgtgtcaccaagttggttagggcat

SEQ ID NO: 25828 - DNA, 33 bp, Homo sapiens
ggcatatattttccaactgagctccaggtccaa

SEQ ID NO: 25829 - DNA, 33 bp, Homo sapiens
tgtctaatgaatcacaaagtttaaatacttctt

SEQ ID NO: 25830 - DNA, 33 bp, Homo sapiens
tatcttcattctctacaatttctatccatcctt

SEQ ID NO: 25831 - DNA, 33 bp, Homo sapiens
tcagtttagataatagaccccatgcagagagct

SEQ ID NO: 25832 - DNA, 33 bp, Homo sapiens
ggcatagtgtgagaacaatgtcttaccaaatag

SEQ ID NO: 25833 - DNA, 33 bp, Homo sapiens
ttcgtaggtaaggaaacaatttagcagctaaga

SEQ ID NO: 25834 - DNA, 51 bp, Homo sapiens
ttcatttacaatgtagtactttatacgctaggatacattgctgctttataa

SEQ ID NO: 25835 - DNA, 33 bp, Homo sapiens
cctttgcaattgcctacgattgaatgtgaaaaa

SEQ ID NO: 25836 - DNA, 51 bp, Homo sapiens
taggcagacaaaaactcaagccacaatattcacattatttgtcatatggag

SEQ ID NO: 25837 - DNA, 33 bp, Homo sapiens
aattaactcatcctcacgaaaagtcactcttta

SEQ ID NO: 25838 - DNA, 33 bp, Homo sapiens
acacaacattgcagaaatcagtagttgttacaa

SEQ ID NO: 25839 - DNA, 33 bp, Homo sapiens
agcattgcaaaaccaccgtagtcgatctgggaa

SEQ ID NO: 25840 - DNA, 33 bp, Homo sapiens
aaaatctgttaaatccagagttatttcatccat

SEQ ID NO: 25841 - DNA, 33 bp, Homo sapiens
atggatagcaacttaactgaggagtgtcaggct

SEQ ID NO: 25842 - DNA, 33 bp, Homo sapiens
ggcctaggagttaagacggcctctagaaaaaca

SEQ ID NO: 25843 - DNA, 33 bp, Homo sapiens
ttccggccaagtagcaaatctagttttccaccc

SEQ ID NO: 25844 - DNA, 33 bp, Homo sapiens
tcgtttcaagaataacagcaggtctactcttaa

SEQ ID NO: 25845 - DNA, 51 bp, Homo sapiens
gcatcagaaaataaagttttaaatccattgtattcatctattaaaatatat

SEQ ID NO: 25846 - DNA, 33 bp, Homo sapiens
gttcacagaactgagaagagaaccaggcatgga

SEQ ID NO: 25847 - DNA, 33 bp, Homo sapiens
cttattttttgcaatcacctgcatgttaggaaa

SEQ ID NO: 25848 - DNA, 33 bp, Homo sapiens
aggtttccatctctgccagggtcaggtcatcac

SEQ ID NO: 25849 - DNA, 33 bp, Homo sapiens
acccagttgtagcccagccttgtttctgacact

SEQ ID NO: 25850 - DNA, 33 bp, Homo sapiens
tccttttgtgtgcttcaatctattaaatgaaga

SEQ ID NO: 25851 - DNA, 33 bp, Homo sapiens
aagggcaacctcacataatacaggagaacgcat

SEQ ID NO: 25852 - DNA, 33 bp, Homo sapiens
aatttgtggtatatgacgaaagcagtgtttaga

SEQ ID NO: 25853 - DNA, 33 bp, Homo sapiens
atgtttcattgaagccaagaataatgataatag

SEQ ID NO: 25854 - DNA, 33 bp, Homo sapiens
ctgtgtcccactctgaaaaaatgcacttgaggt

SEQ ID NO: 25855 - DNA, 33 bp, Homo sapiens
aaggcacaggatgtaaaaaatgagctgccacct

SEQ ID NO: 25856 - DNA, 33 bp, Homo sapiens
taattgttttggagacggcataggggagtttgg

SEQ ID NO: 25857 - DNA, 33 bp, Homo sapiens
tctaattaactagaaaactctctaagactctga

SEQ ID NO: 25858 - DNA, 33 bp, Homo sapiens
ggattttgcatctgttaaaatttcatctgcatg

SEQ ID NO: 25859 - DNA, 33 bp, Homo sapiens
tgcactgctttctaaactgaaaagaggctttga

SEQ ID NO: 25860 - DNA, 33 bp, Homo sapiens
aaggattggtaacataactgtactctggcaata

SEQ ID NO: 25861 - DNA, 33 bp, Homo sapiens
ttctaggtagatttcactctaactcccagagaa

SEQ ID NO: 25862 - DNA, 33 bp, Homo sapiens
gtcatatttaaaagccacctctctacttcaagt

SEQ ID NO: 25863 - DNA, 33 bp, Homo sapiens
ttatttgctatagttcacccagtgtatttgtac

SEQ ID NO: 25864 - DNA, 33 bp, Homo sapiens
taataatttttgctgcaaagtggtataccagca

SEQ ID NO: 25865 - DNA, 33 bp, Homo sapiens
aagtcaaaatctacccaacattatttagttcag

SEQ ID NO: 25866 - DNA, 33 bp, Homo sapiens
cttttgctgtttataacaagtccctttcatcct

SEQ ID NO: 25867 - DNA, 51 bp, Homo sapiens
catggaagcagaatgtcctgacttcacctatgacttgactctgagagtcgt

SEQ ID NO: 25868 - DNA, 51 bp, Homo sapiens
atagctgctggctgattgtgttgtacatgaaatctttaagttagttaatag

SEQ ID NO: 25869 - DNA, 33 bp, Homo sapiens
ttaatggaaccaattacctctatcaggccctgt

SEQ ID NO: 25870 - DNA, 33 bp, Homo sapiens
gcaagtgtgcaatatgacagggcactatggaga

SEQ ID NO: 25871 - DNA, 33 bp, Homo sapiens
aagagatctaagaaggccccagaattagatcta

SEQ ID NO: 25872 - DNA, 51 bp, Homo sapiens
cttcccctgctgcattttaatgttaagatatttgcaaaaaagttggcggtt

SEQ ID NO: 25873 - DNA, 33 bp, Homo sapiens
attcataaagactcagaaatctagctatggcaa

SEQ ID NO: 25874 - DNA, 33 bp, Homo sapiens
gtaatcatattagtaacagcagtggaattgaac

SEQ ID NO: 25875 - DNA, 33 bp, Homo sapiens
catttttctttgccaaataaggtaacaaattca

SEQ ID NO: 25876 - DNA, 51 bp, Homo sapiens
aggctcaggtctatttcactggaaaacctctactcatgtctttaaacacac

SEQ ID NO: 25877 - DNA, 33 bp, Homo sapiens
aaaaataaccattttcactcttgctttatttga

SEQ ID NO: 25878 - DNA, 51 bp, Homo sapiens
aggcccttgctcagccacttggctccgctgtatttcctcacaaatgcaccc

SEQ ID NO: 25879 - DNA, 33 bp, Homo sapiens
aaaggatctgctaaaaatccgcagccaggcatg

SEQ ID NO: 25880 - DNA, 33 bp, Homo sapiens
gtctagtctgctttcaataagctcagaacattt

SEQ ID NO: 25881 - DNA, 33 bp, Homo sapiens
aggatatacacagaaacgtacaccaaaagtatg

SEQ ID NO: 25882 - DNA, 33 bp, Homo sapiens
ataaaatttcagatgaagactaatatcctgtgg

SEQ ID NO: 25883 - DNA, 33 bp, Homo sapiens
agagggactttaccaaatggggcctctaacccc

SEQ ID NO: 25884 - DNA, 33 bp, Homo sapiens
accatgacagttacaaccatatgttgatatgaa

SEQ ID NO: 25885 - DNA, 33 bp, Homo sapiens
gtgtcttgtgacttggcatgatatgcagggaat

SEQ ID NO: 25886 - DNA, 33 bp, Homo sapiens
agagtgaaagctgcaacgttgaaaaaaacatcc

SEQ ID NO: 25887 - DNA, 33 bp, Homo sapiens
tgtgtcaatattaacccaagtgatcaataactt

SEQ ID NO: 25888 - DNA, 33 bp, Homo sapiens
cttcatattgataatgcattgctttcttcagga

SEQ ID NO: 25889 - DNA, 33 bp, Homo sapiens
gactgtttcttatctcggactaatccctttttt

SEQ ID NO: 25890 - DNA, 33 bp, Homo sapiens
ccccaactgtctcatagggcactggcagcttca

SEQ ID NO: 25891 - DNA, 33 bp, Homo sapiens
caccatccaactttcacgatgggaacattttca

SEQ ID NO: 25892 - DNA, 33 bp, Homo sapiens
tgaaatgacgcatcataaaatacacaggaaatt

SEQ ID NO: 25893 - DNA, 33 bp, Homo sapiens
ctcatgtgtaaatgaccgggttgtcgcagtggt

SEQ ID NO: 25894 - DNA, 33 bp, Homo sapiens
gtctacagtttctccaagtttctttggttggca

SEQ ID NO: 25895 - DNA, 33 bp, Homo sapiens
gatgactccaaagcaactccttgcaaaacaaat

SEQ ID NO: 25896 - DNA, 33 bp, Homo sapiens
catttcttgaatgcaaagttccatatgtgacct

SEQ ID NO: 25897 - DNA, 33 bp, Homo sapiens
gaagcaaacagagtcaataaatataagatcaat

SEQ ID NO: 25898 - DNA, 33 bp, Homo sapiens
gtgcttaggtctctgaacaatttctagtgagtc

SEQ ID NO: 25899 - DNA, 51 bp, Homo sapiens
actgatacatttcaagagataagggccacaaggagattttcactcaagttg

SEQ ID NO: 25900 - DNA, 33 bp, Homo sapiens
ttcacactaacatccaccccaagtctgaattaa

SEQ ID NO: 25901 - DNA, 33 bp, Homo sapiens
actagaaaactatccacgttgctatctataatg

SEQ ID NO: 25902 - DNA, 33 bp, Homo sapiens
cctcagtggaaagatgaatgtgaaaaaatgttg

SEQ ID NO: 25903 - DNA, 33 bp, Homo sapiens
gacattcagaagggaacgaacattcttgaccca

SEQ ID NO: 25904 - DNA, 33 bp, Homo sapiens
ggggccgaggaaagtagagaggaagagaagctc

SEQ ID NO: 25905 - DNA, 33 bp, Homo sapiens
ttcagaagagggaaaaaggccgtggaggtatat

SEQ ID NO: 25906 - DNA, 33 bp, Homo sapiens
tagctcttgttcagcaaaggggaatatgagaag

SEQ ID NO: 25907 - DNA, 33 bp, Homo sapiens
gcaggtgactgagttcaattaaagcccctctaa

SEQ ID NO: 25908 - DNA, 33 bp, Homo sapiens
actgttccattactacacaaacacatattagag

SEQ ID NO: 25909 - DNA, 33 bp, Homo sapiens
tttgctcctcaggcagaaacaagaaagatgtgt

SEQ ID NO: 25910 - DNA, 33 bp, Homo sapiens
gtggatactgacacgccgagctgaaaagtgatt

SEQ ID NO: 25911 - DNA, 33 bp, Homo sapiens
attccccccgagtaagcatagccaatagcttga

SEQ ID NO: 25912 - DNA, 51 bp, Homo sapiens
gacccttgctgtcagccaatcatccaagcctgtgcaaattcctggcccttt

SEQ ID NO: 25913 - DNA, 51 bp, Homo sapiens
catacagctctttgatggccatgtccagtttgccttctttgtcttccctgt

SEQ ID NO: 25914 - DNA, 33 bp, Homo sapiens
gtttgccatttataaaacacaccattgaatcta

SEQ ID NO: 25915 - DNA, 33 bp, Homo sapiens
gaaaaggctgccgcatcatctcagcgaggagtg

SEQ ID NO: 25916 - DNA, 33 bp, Homo sapiens
agcaatggttaacaaaaggaggaagttggtgtt

SEQ ID NO: 25917 - DNA, 33 bp, Homo sapiens
ttaagcccccgtaacaccatttgcccactaaat

SEQ ID NO: 25918 - DNA, 33 bp, Homo sapiens
taagcctgctgtgctcagaaactgaatagtagc

SEQ ID NO: 25919 - DNA, 33 bp, Homo sapiens
cacactcaacaaataccggttgagccccggccc

SEQ ID NO: 25920 - DNA, 33 bp, Homo sapiens
tggtttctttcatccaacctgaggcctttgcga

SEQ ID NO: 25921 - DNA, 33 bp, Homo sapiens
gttctaacactggccaacctttaccagccttca

SEQ ID NO: 25922 - DNA, 33 bp, Homo sapiens
atcacacttttgtgaaaaatgctagagagccac

SEQ ID NO: 25923 - DNA, 33 bp, Homo sapiens
cagttttgaaaaagaaagacacaatggaggact

SEQ ID NO: 25924 - DNA, 33 bp, Homo sapiens
catgcacctgaataaccaatgggtctataaata

SEQ ID NO: 25925 - DNA, 51 bp, Homo sapiens
tactttttttttttttcaatcagccacaagctttcatatcactttctgttg

SEQ ID NO: 25926 - DNA, 33 bp, Homo sapiens
ccacgtgcctcaattacgaatctccacgtgcct

SEQ ID NO: 25927 - DNA, 33 bp, Homo sapiens
caagaggaaattactcactgatagttttcaggc

SEQ ID NO: 25928 - DNA, 33 bp, Homo sapiens
gacacaagtgataacacgttggagtgtaaagtg

SEQ ID NO: 25929 - DNA, 33 bp, Homo sapiens
agttgcctaccccctcactatcaaatcttgact

SEQ ID NO: 25930 - DNA, 33 bp, Homo sapiens
tggcaagttctttcatcacaacacaagttacat

SEQ ID NO: 25931 - DNA, 33 bp, Homo sapiens
tgctgctagtccagaaaggaatatctaatcctt

SEQ ID NO: 25932 - DNA, 33 bp, Homo sapiens
gttcagctagaaatacaagaggctgcaaaaaat

SEQ ID NO: 25933 - DNA, 33 bp, Homo sapiens
aaactactgtcagggacactccacgttagcacc

SEQ ID NO: 25934 - DNA, 33 bp, Homo sapiens
tttaaaatttttcttagagacagcatttcacta

SEQ ID NO: 25935 - DNA, 33 bp, Homo sapiens
tttcctgcctggcaaacttcattcttccttcga

SEQ ID NO: 25936 - DNA, 33 bp, Homo sapiens
atagagaaaacgttagacagttatgaagagcaa

SEQ ID NO: 25937 - DNA, 33 bp, Homo sapiens
ttttgtctttgccgatcatacattttcaaacag

SEQ ID NO: 25938 - DNA, 33 bp, Homo sapiens
tggagagggatccaccaggaaaaggagaagcaa

SEQ ID NO: 25939 - DNA, 33 bp, Homo sapiens
aatggttagctttatacgtcaacctagctaggt

SEQ ID NO: 25940 - DNA, 33 bp, Homo sapiens
aagttgaaatctcagacaacaatctcaaatcct

SEQ ID NO: 25941 - DNA, 33 bp, Homo sapiens
atgagtaagtgcagtacaatggtaaatgtcttt

SEQ ID NO: 25942 - DNA, 51 bp, Homo sapiens
gcagatcaccattcgtctgctattacgcgatatgttgtttcttctcctgca

SEQ ID NO: 25943 - DNA, 51 bp, Homo sapiens
agattctgaaagcagcatttcctaactaagaaggcccaagaaggtgacaga

SEQ ID NO: 25944 - DNA, 33 bp, Homo sapiens
tgtcacccatgtttccccctcaatctctctacc

SEQ ID NO: 25945 - DNA, 33 bp, Homo sapiens
attacatatcagtttaaaaataggtgacagcca

SEQ ID NO: 25946 - DNA, 33 bp, Homo sapiens
aatcacaaatactaaacctgaggctctgttctc

SEQ ID NO: 25947 - DNA, 33 bp, Homo sapiens
acagcaggtcagagaacggattaagagtctggg

SEQ ID NO: 25948 - DNA, 33 bp, Homo sapiens
atgacagccgccaaaaagtttaaatgttgcttt

SEQ ID NO: 25949 - DNA, 33 bp, Homo sapiens
gccctagcgatgtccacgggctacctctcctga

SEQ ID NO: 25950 - DNA, 33 bp, Homo sapiens
agaacacaggctaaccaaaactacgcttaggct

SEQ ID NO: 25951 - DNA, 33 bp, Homo sapiens
aaatgtgcaggatgccaataagagctgggaggg

SEQ ID NO: 25952 - DNA, 33 bp, Homo sapiens
aagctagaaaaaaacacaatgttgggaagattg

SEQ ID NO: 25953 - DNA, 33 bp, Homo sapiens
acctgcaggctaagccaaatgaatattcagtga

SEQ ID NO: 25954 - DNA, 33 bp, Homo sapiens
gaaattgctaatagaaaaaatctcggagcatca

SEQ ID NO: 25955 - DNA, 33 bp, Homo sapiens
ggcattaccccccgaccgaggcctcgtatgata

SEQ ID NO: 25956 - DNA, 33 bp, Homo sapiens
gtgatcgtgatgttaactgtggtggcccgtgtt

SEQ ID NO: 25957 - DNA, 33 bp, Homo sapiens
aagtggccgggaacccaaaacctgtaaatagtt

SEQ ID NO: 25958 - DNA, 51 bp, Homo sapiens
agtggtgttgtgcattctgtaggaaatacttgtctttactgacagatttca

SEQ ID NO: 25959 - DNA, 51 bp, Homo sapiens
gaggatacccaaagcacaaggtcccaaactattagatgataattagaatga

SEQ ID NO: 25960 - DNA, 33 bp, Homo sapiens
gggacacttaccactaccttgacatcatatttg

SEQ ID NO: 25961 - DNA, 33 bp, Homo sapiens
ttttccagaatgcactcaggcatacatattact

SEQ ID NO: 25962 - DNA, 33 bp, Homo sapiens
gcttgggccacctccacgagtcgtttgtgacga

SEQ ID NO: 25963 - DNA, 33 bp, Homo sapiens
tgtgttgctctggtaacattccatttgagatct

SEQ ID NO: 25964 - DNA, 33 bp, Homo sapiens
gaccctgaaataacagacactttcaattgctgg

SEQ ID NO: 25965 - DNA, 33 bp, Homo sapiens
agtaatgctaagagaaaattaacacactaagtg

SEQ ID NO: 25966 - DNA, 33 bp, Homo sapiens
tcctctcttgtcattccatgttcttgaagggat

SEQ ID NO: 25967 - DNA, 33 bp, Homo sapiens
tacctacaactaagaacccagaccaatatagtc

SEQ ID NO: 25968 - DNA, 33 bp, Homo sapiens
tgtgtgcaggacttaaagccatgaggctgtgcc

SEQ ID NO: 25969 - DNA, 33 bp, Homo sapiens
gtgtgcttcatagaaaataatactggataacag

SEQ ID NO: 25970 - DNA, 33 bp, Homo sapiens
attagaaggttctgtcaatcaacattttagaaa

SEQ ID NO: 25971 - DNA, 33 bp, Homo sapiens
gtttttcatttgtttcaagaagtgccgagaaag

SEQ ID NO: 25972 - DNA, 33 bp, Homo sapiens
agcagtaccgcatagacgcccggcagtttgcac

SEQ ID NO: 25973 - DNA, 33 bp, Homo sapiens
ttttcctgtagattaactgaggcatgaggtgga

SEQ ID NO: 25974 - DNA, 33 bp, Homo sapiens
tcagctgtaaaaacgaaggactttctgacaccc

SEQ ID NO: 25975 - DNA, 33 bp, Homo sapiens
gttctgtcaaagaaaaaaggttagtgtgccatt

SEQ ID NO: 25976 - DNA, 51 bp, Homo sapiens
aagctgtgatttggtctcatgtgccaattaaggaagggtggtgcacaataa

SEQ ID NO: 25977 - DNA, 33 bp, Homo sapiens
taaaagtgcagagtgaaatgtatagcaaaattt

SEQ ID NO: 25978 - DNA, 33 bp, Homo sapiens
aaggacctcctaagacaatagatacaaaagagg

SEQ ID NO: 25979 - DNA, 33 bp, Homo sapiens
acaagaatttagccaacggccaagttagcagac

SEQ ID NO: 25980 - DNA, 33 bp, Homo sapiens
agctgcccttaatagcaatatttcaaatagtca

SEQ ID NO: 25981 - DNA, 33 bp, Homo sapiens
ttttctctctctcaacaaagcctagcacatttt

SEQ ID NO: 25982 - DNA, 33 bp, Homo sapiens
gcatcaattgcaatgaccatatggtttttagcc

SEQ ID NO: 25983 - DNA, 33 bp, Homo sapiens
ataatcactgcagctaataatgtgctcagtctc

SEQ ID NO: 25984 - DNA, 33 bp, Homo sapiens
ccatttgacttccttacgtttgttaaagacacc

SEQ ID NO: 25985 - DNA, 33 bp, Homo sapiens
accttggggtttgaacggctcattgaaggtaat

SEQ ID NO: 25986 - DNA, 51 bp, Homo sapiens
actgaataacattacaaaactaagaaaagagtgccattttttgaatgttgc

SEQ ID NO: 25987 - DNA, 51 bp, Homo sapiens
gtcctgcgaaatcacagtacttgccacttagcatctatctacaccaggaaa

SEQ ID NO: 25988 - DNA, 33 bp, Homo sapiens
caacactgaatttaacagatctcagaattagca

SEQ ID NO: 25989 - DNA, 33 bp, Homo sapiens
cacctgctacatcatcgaagtatagtgcatccc

SEQ ID NO: 25990 - DNA, 33 bp, Homo sapiens
atcaagtaaccaatcaaaaatcacgtctctatt

SEQ ID NO: 25991 - DNA, 33 bp, Homo sapiens
gctccttcattctgtacgatgtagagcaagtta

SEQ ID NO: 25992 - DNA, 33 bp, Homo sapiens
tttcttataagaaacaaacacgcaattacaaca

SEQ ID NO: 25993 - DNA, 33 bp, Homo sapiens
tctccaggcagataagaaaaaaacatacacaat

SEQ ID NO: 25994 - DNA, 33 bp, Homo sapiens
acctgaaaaatctctcaaggctggaacaatttg

SEQ ID NO: 25995 - DNA, 33 bp, Homo sapiens
aaaagaacccagaaaaaatggaatctagggcag

SEQ ID NO: 25996 - DNA, 51 bp, Homo sapiens
cctcttccccacactttactaacaaccatattaatagggatgaagtataag

SEQ ID NO: 25997 - DNA, 51 bp, Homo sapiens
atgccctaaaatagttggtaagaaacgactttccctgttactgggaaagct

SEQ ID NO: 25998 - DNA, 33 bp, Homo sapiens
cagcccaagataccaaaactccgaaggcagccc

SEQ ID NO: 25999 - DNA, 33 bp, Homo sapiens
gtagaactgggtgagaaggcgacataacaggcc

SEQ ID NO: 26000 - DNA, 33 bp, Homo sapiens
tggtcggtcctctttacaggatttttgtgagct

SEQ ID NO: 26001 - DNA, 33 bp, Homo sapiens
tccatttagtgcatcacatctaagcaattgccc

SEQ ID NO: 26002 - DNA, 33 bp, Homo sapiens
tccttcaactctagcccaaaatgctggctggaa

SEQ ID NO: 26003 - DNA, 33 bp, Homo sapiens
tctgtcactaaaaccaccactgtattctatccc

SEQ ID NO: 26004 - DNA, 33 bp, Homo sapiens
acaatcttggagcccaactaccacaccaacttt

SEQ ID NO: 26005 - DNA, 33 bp, Homo sapiens
ctgcagatgttcaggacatgtaaggttgagaca

SEQ ID NO: 26006 - DNA, 33 bp, Homo sapiens
ggcatgtgtgtaaagcagaggggaggggagctg

SEQ ID NO: 26007 - DNA, 33 bp, Homo sapiens
ttgttcttttactacaaccggagtggtaaatac

SEQ ID NO: 26008 - DNA, 33 bp, Homo sapiens
cattctagatgatacaactcttatttcagttca

SEQ ID NO: 26009 - DNA, 51 bp, Homo sapiens
cttatgggtcagatctggaaagttacaaaaaggtgcaaaccatcagggttt

SEQ ID NO: 26010 - DNA, 33 bp, Homo sapiens
actctgtttgtcttccagaaggatgcggcgcgt

SEQ ID NO: 26011 - DNA, 51 bp, Homo sapiens
aatttctgaaaacagaatctctcaactaggaccttccccatgtgtgtgcca

SEQ ID NO: 26012 - DNA, 33 bp, Homo sapiens
tagttgctattgtaaacggaaaaatcaggaaat

SEQ ID NO: 26013 - DNA, 33 bp, Homo sapiens
tgcatactgctttatacgagaactagttacaat

SEQ ID NO: 26014 - DNA, 33 bp, Homo sapiens
gaagattggaatatcacgtacaaagaagtctag

SEQ ID NO: 26015 - DNA, 33 bp, Homo sapiens
ggaagctgcaaatggacatcaagtacactacag

SEQ ID NO: 26016 - DNA, 33 bp, Homo sapiens
ttcaagcgtgtctcccaggagcaatgtgaggag

SEQ ID NO: 26017 - DNA, 33 bp, Homo sapiens
atatggagcttgtcagccaacaaggaaatagac

SEQ ID NO: 26018 - DNA, 33 bp, Homo sapiens
aagcagtcacttctccccttgagaccttggcca

SEQ ID NO: 26019 - DNA, 33 bp, Homo sapiens
gtgcttagataaatgcaagaaagtactactttg

SEQ ID NO: 26020 - DNA, 33 bp, Homo sapiens
actaagatgttgccacagaaagtcagaatacag

SEQ ID NO: 26021 - DNA, 33 bp, Homo sapiens
gaagtagggtctatggaacgccctgaccagatc

SEQ ID NO: 26022 - DNA, 33 bp, Homo sapiens
tgaccgaggaaaggaaacatctcacaagctgtt

SEQ ID NO: 26023 - DNA, 33 bp, Homo sapiens
ttaagagaacattttaactggttagaactccaa

SEQ ID NO: 26024 - DNA, 33 bp, Homo sapiens
gggctttgagaaaagcagaaaactggtctggga

SEQ ID NO: 26025 - DNA, 33 bp, Homo sapiens
cagacagcaagggacaataaaggttagtcattc

SEQ ID NO: 26026 - DNA, 33 bp, Homo sapiens
aaacttgagctatgaaaggccagcatcagaatc

SEQ ID NO: 26027 - DNA, 33 bp, Homo sapiens
aagtgtatttttcagacagctgatgtttttaca

SEQ ID NO: 26028 - DNA, 33 bp, Homo sapiens
agaggagaaacataaactgtcctaggagtgggg

SEQ ID NO: 26029 - DNA, 33 bp, Homo sapiens
acaccgcattgtcaaaagggctgactccctggt

SEQ ID NO: 26030 - DNA, 33 bp, Homo sapiens
tgtgcataatgcagaaagaactggaacccaaag

SEQ ID NO: 26031 - DNA, 33 bp, Homo sapiens
tatgcaggtcctgagacgtggagccaactaaca

SEQ ID NO: 26032 - DNA, 33 bp, Homo sapiens
taagagctacccacaaccctaaccaactgactg

SEQ ID NO: 26033 - DNA, 33 bp, Homo sapiens
gaccaggtttcccagaatattgtcatgagcaaa

SEQ ID NO: 26034 - DNA, 33 bp, Homo sapiens
tcgtgggactcagagacgctttttcgtgtcttt

SEQ ID NO: 26035 - DNA, 33 bp, Homo sapiens
caggacagcacgtaaaagaacaaggcttgttcc

SEQ ID NO: 26036 - DNA, 33 bp, Homo sapiens
attataacaatggctacaggttctttttttcca

SEQ ID NO: 26037 - DNA, 33 bp, Homo sapiens
atcagtttacttaatcacagataacagagtctt

SEQ ID NO: 26038 - DNA, 33 bp, Homo sapiens
acagagattagtaacaaggttggtgccagtcct

SEQ ID NO: 26039 - DNA, 33 bp, Homo sapiens
aattttaaaacctatgacaaagttgaaagtatt

SEQ ID NO: 26040 - DNA, 33 bp, Homo sapiens
gagatgagctctttgaataggtagccaagttac

SEQ ID NO: 26041 - DNA, 33 bp, Homo sapiens
tgcaaatagttgcccaatggacaccagtgcttg

SEQ ID NO: 26042 - DNA, 51 bp, Homo sapiens
tgccctctcaatatcctgcaacctaggctctcagtttcagtgttagtacta

SEQ ID NO: 26043 - DNA, 33 bp, Homo sapiens
ctactggcatctagcacggagggtccagggatg

SEQ ID NO: 26044 - DNA, 33 bp, Homo sapiens
cagtagggttgtttacacgagtatcaccacaat

SEQ ID NO: 26045 - DNA, 33 bp, Homo sapiens
gacatcagtccggctacacttaacctccaagtc

SEQ ID NO: 26046 - DNA, 33 bp, Homo sapiens
accttttctccacccaccacatagtagtaatac

SEQ ID NO: 26047 - DNA, 33 bp, Homo sapiens
tagatttttaacagtacgtgctcatgtgaactc

SEQ ID NO: 26048 - DNA, 33 bp, Homo sapiens
atgtctaatctgtgagaaagtaaacaggttacc

SEQ ID NO: 26049 - DNA, 33 bp, Homo sapiens
atttccagagtcgttacagtggagatatggaag

SEQ ID NO: 26050 - DNA, 33 bp, Homo sapiens
ttactcacagcattcaaaagggaaaaaagaata

SEQ ID NO: 26051 - DNA, 33 bp, Homo sapiens
ttccatgagatattacactgttctgtttattga

SEQ ID NO: 26052 - DNA, 33 bp, Homo sapiens
tctgccagccgtgaatcagcgttcctgttgctc

SEQ ID NO: 26053 - DNA, 33 bp, Homo sapiens
tgtattttcatggcaaaaagtcaggaaacttac

SEQ ID NO: 26054 - DNA, 33 bp, Homo sapiens
gaagcaaactcatctaaaccagcgtttcttagt

SEQ ID NO: 26055 - DNA, 33 bp, Homo sapiens
gtgctgccttaaacaacttgctcattctcaagg

SEQ ID NO: 26056 - DNA, 33 bp, Homo sapiens
taaccattagatagaaatgcactggtgggggtt

SEQ ID NO: 26057 - DNA, 33 bp, Homo sapiens
gtgatcttcatcaaaacacagtgtccattgatc

SEQ ID NO: 26058 - DNA, 33 bp, Homo sapiens
tttaatgttgcctaagaaaaaggatttggtcca

SEQ ID NO: 26059 - DNA, 51 bp, Homo sapiens
tccatatacggacagaggatttttccttgcactttatcttatgataagact

SEQ ID NO: 26060 - DNA, 33 bp, Homo sapiens
tttggatacctctcagaatttcccatcaggacc

SEQ ID NO: 26061 - DNA, 33 bp, Homo sapiens
gccctccagagttcaacaatctctagaaaggat

SEQ ID NO: 26062 - DNA, 33 bp, Homo sapiens
ctccacgtcactttcaactgatgactttgtttc

SEQ ID NO: 26063 - DNA, 33 bp, Homo sapiens
aaacatagctgtaggcaccttattacaatttct

SEQ ID NO: 26064 - DNA, 33 bp, Homo sapiens
atgattaaacacttcccattaggctctgtctct

SEQ ID NO: 26065 - DNA, 33 bp, Homo sapiens
tcccactgcttctctaaatatatgccaaaccag

SEQ ID NO: 26066 - DNA, 33 bp, Homo sapiens
ggatcacttgaggacaatataggaaaaccctgt

SEQ ID NO: 26067 - DNA, 33 bp, Homo sapiens
aggttgccgggagctacaatcatactactgcac

SEQ ID NO: 26068 - DNA, 33 bp, Homo sapiens
attaatcttctgatgacagcacaattgtcatgg

SEQ ID NO: 26069 - DNA, 33 bp, Homo sapiens
gtagagatcatcagggccaatgaattacatact

SEQ ID NO: 26070 - DNA, 33 bp, Homo sapiens
aacgggacaagtggcactgaactggcagccatc

SEQ ID NO: 26071 - DNA, 33 bp, Homo sapiens
tttacaccatattgaacactgaagtggtgtcat

SEQ ID NO: 26072 - DNA, 33 bp, Homo sapiens
gatgaggtgtacccgacgtgcatttttaaagat

SEQ ID NO: 26073 - DNA, 33 bp, Homo sapiens
attgccatggtaagaactggtaacttctgtgag

SEQ ID NO: 26074 - DNA, 51 bp, Homo sapiens
atcaactaaaggacacacatgcataaactcaatgtgcaatgatggagtaac

SEQ ID NO: 26075 - DNA, 33 bp, Homo sapiens
gcaaagttgacaagacaaacagtggagaggtgg

SEQ ID NO: 26076 - DNA, 33 bp, Homo sapiens
tgcaggaactgggagacggctaagagagtggga

SEQ ID NO: 26077 - DNA, 33 bp, Homo sapiens
aaaacatcagacgatgaaacttgatcgaaatct

SEQ ID NO: 26078 - DNA, 33 bp, Homo sapiens
aactcatgatagatgacgcttagaagaactgaa

SEQ ID NO: 26079 - DNA, 33 bp, Homo sapiens
ataacaaaacagggtaaggaggatagaaaatac

SEQ ID NO: 26080 - DNA, 51 bp, Homo sapiens
tgtatatggattcctacagtaatgtaaaaaagtaatgtaattcctaaaaat

SEQ ID NO: 26081 - DNA, 51 bp, Homo sapiens
tatgtggttataaaatcaaatgggaaaaaacgactgcaatggtggaaaagg

SEQ ID NO: 26082 - DNA, 33 bp, Homo sapiens
gtcatcaggggcatgaataatatcttaccatag

SEQ ID NO: 26083 - DNA, 51 bp, Homo sapiens
aggagagtggctactttactggtcaaccacaatcagcaaatcattggcctc

SEQ ID NO: 26084 - DNA, 33 bp, Homo sapiens
taaaaaggaggaaagactctaaaattgatgaga

SEQ ID NO: 26085 - DNA, 33 bp, Homo sapiens
catatgtgagccaaagacctagaatacgtcatt

SEQ ID NO: 26086 - DNA, 33 bp, Homo sapiens
acaaaaatcaactccacatggattagcaactta

SEQ ID NO: 26087 - DNA, 33 bp, Homo sapiens
aacagtatatcatgaccagtgtagatttatgtg

SEQ ID NO: 26088 - DNA, 51 bp, Homo sapiens
taggatagcggttgcctctgtcagcaagaagatttgtcagaattttgatgt

SEQ ID NO: 26089 - DNA, 33 bp, Homo sapiens
aatattacattcaatcaacactgacatattaaa

SEQ ID NO: 26090 - DNA, 33 bp, Homo sapiens
gttttcctggctgacactgatgctagtagatgt

SEQ ID NO: 26091 - DNA, 33 bp, Homo sapiens
attctcactactctgcaatgaatgcctcagaat

SEQ ID NO: 26092 - DNA, 33 bp, Homo sapiens
taacttagtttcacaaagacagagaccttgtct

SEQ ID NO: 26093 - DNA, 33 bp, Homo sapiens
tctctttgttgttaagaagagcatggtctcctc

SEQ ID NO: 26094 - DNA, 33 bp, Homo sapiens
tccaccctatccctaacttacatgctctaagat

SEQ ID NO: 26095 - DNA, 33 bp, Homo sapiens
ctgtaggagtttcttacctcattgttgctcaag

SEQ ID NO: 26096 - DNA, 33 bp, Homo sapiens
tgaagtctgggtcaacaatctaccagagtttct

SEQ ID NO: 26097 - DNA, 33 bp, Homo sapiens
acgggcttggtaactgaatgttgttgtttgctt

SEQ ID NO: 26098 - DNA, 33 bp, Homo sapiens
ggaggacatctgagtgaaaagtctggatcataa

SEQ ID NO: 26099 - DNA, 33 bp, Homo sapiens
aagtggggcaagactccgaaagtaggctactat

SEQ ID NO: 26100 - DNA, 33 bp, Homo sapiens
gagggaattctctgtcactcaagaatcaatgct

SEQ ID NO: 26101 - DNA, 33 bp, Homo sapiens
ataaataaagaaacaaggagcattcatgtgcag

SEQ ID NO: 26102 - DNA, 33 bp, Homo sapiens
tgatacagcagctgtgaagaatagtttggtggt

SEQ ID NO: 26103 - DNA, 33 bp, Homo sapiens
atgcaagagtgaagaacgcttgggagcctctgc

SEQ ID NO: 26104 - DNA, 33 bp, Homo sapiens
gtcagaaatgtacaaaagcataatgtctcatta

SEQ ID NO: 26105 - DNA, 33 bp, Homo sapiens
gtgaaaaatatgaatgacatacgtgaacaaatg

SEQ ID NO: 26106 - DNA, 33 bp, Homo sapiens
ggtgtctgttccatgcaatgctggggttaccat

SEQ ID NO: 26107 - DNA, 33 bp, Homo sapiens
tataaaggaccaccccactaaacacacacatac

SEQ ID NO: 26108 - DNA, 33 bp, Homo sapiens
tgttaaaaaaaaatgcaagttgccatctcccac

SEQ ID NO: 26109 - DNA, 33 bp, Homo sapiens
agggttggagagttcaagaaacagtctgaagtc

SEQ ID NO: 26110 - DNA, 33 bp, Homo sapiens
caatacctattttccaagcagtgaagaaaagca

SEQ ID NO: 26111 - DNA, 33 bp, Homo sapiens
cacctgctctgtaaccacccttcctgccgaact

SEQ ID NO: 26112 - DNA, 33 bp, Homo sapiens
aggttatgaagaagacaaaaaaggatgagagct

SEQ ID NO: 26113 - DNA, 33 bp, Homo sapiens
gcaagaagccagggacaaatggattgcaatgtt

SEQ ID NO: 26114 - DNA, 33 bp, Homo sapiens
tgaccctggatttgacaaaagctcgctcccact

SEQ ID NO: 26115 - DNA, 33 bp, Homo sapiens
caggtagtacaccacacagaaccagactctcag

SEQ ID NO: 26116 - DNA, 33 bp, Homo sapiens
attgttctgctggactaagaggactaaacttat

SEQ ID NO: 26117 - DNA, 33 bp, Homo sapiens
ggaaaaataacccaaagaaagagatggtggaag

SEQ ID NO: 26118 - DNA, 33 bp, Homo sapiens
tgaaccaacaactgccccctgggaagaaccctt

SEQ ID NO: 26119 - DNA, 33 bp, Homo sapiens
caggtggaattctggaacctcaaaagtataaca

SEQ ID NO: 26120 - DNA, 33 bp, Homo sapiens
tgctgggttagaagtaactttttcaggctcact

SEQ ID NO: 26121 - DNA, 33 bp, Homo sapiens
gattgaataattcaaacagatgacgcccttgta

SEQ ID NO: 26122 - DNA, 33 bp, Homo sapiens
agccttacacaaagtaaatcatctaacatgttt

SEQ ID NO: 26123 - DNA, 33 bp, Homo sapiens
caacttgcatgacaaacagtcccaaagcctaag

SEQ ID NO: 26124 - DNA, 33 bp, Homo sapiens
gaatccataaaactgacagccaactcgtgggga

SEQ ID NO: 26125 - DNA, 33 bp, Homo sapiens
cagtggcgactcttgcactgactgagtcgccaa

SEQ ID NO: 26126 - DNA, 33 bp, Homo sapiens
cagccttccaaatcagacactcatgttgccaat

SEQ ID NO: 26127 - DNA, 33 bp, Homo sapiens
gaggtttatttgggcaagaataataaaaagcac

SEQ ID NO: 26128 - DNA, 33 bp, Homo sapiens
aaagactgcaccgttcaccatgagattaatgaa

SEQ ID NO: 26129 - DNA, 33 bp, Homo sapiens
tgttacaaaggtgcacaaaaagagcatagaggg

SEQ ID NO: 26130 - DNA, 33 bp, Homo sapiens
tgagtggacaataaccagacagtccaacgaccc

SEQ ID NO: 26131 - DNA, 33 bp, Homo sapiens
ttgtgtttggcttccacagtagaatgttttcga

SEQ ID NO: 26132 - DNA, 33 bp, Homo sapiens
tatagttccactcaaaatggcatgactaatttc

SEQ ID NO: 26133 - DNA, 33 bp, Homo sapiens
tccccagggagtagacactaatggatacctaat

SEQ ID NO: 26134 - DNA, 33 bp, Homo sapiens
atcaagccactccctaaacaaagcatcagatct

SEQ ID NO: 26135 - DNA, 33 bp, Homo sapiens
acctaatccttgagacccgagctgttcagctta

SEQ ID NO: 26136 - DNA, 33 bp, Homo sapiens
tatatgtgattttcaacttcctaggcaccactt

SEQ ID NO: 26137 - DNA, 33 bp, Homo sapiens
ttgcatttccaggttacgccaggcaacagactc

SEQ ID NO: 26138 - DNA, 33 bp, Homo sapiens
tcaggtaccaactccacgtttaaccagctctgg

SEQ ID NO: 26139 - DNA, 33 bp, Homo sapiens
aaaaagactggttgaccaactgatgacctgaaa

SEQ ID NO: 26140 - DNA, 33 bp, Homo sapiens
cctcctgatctgtcaaagtgtctgtacacatgc

SEQ ID NO: 26141 - DNA, 33 bp, Homo sapiens
ccagtcatgcattccacaccctggttataatat

SEQ ID NO: 26142 - DNA, 33 bp, Homo sapiens
cccggactgggaaataacaggaaaaggataggg

SEQ ID NO: 26143 - DNA, 33 bp, Homo sapiens
aaatatggagcaaagacacactacagtgaagca

SEQ ID NO: 26144 - DNA, 33 bp, Homo sapiens
gactctggggcttataagataacatcaattttg

SEQ ID NO: 26145 - DNA, 33 bp, Homo sapiens
ggtaaaagtgaagaaagcatgggactggggtgg

SEQ ID NO: 26146 - DNA, 33 bp, Homo sapiens
cagtcctgattactgaaggacgttgtttgcaac

SEQ ID NO: 26147 - DNA, 33 bp, Homo sapiens
cactgttgaaagagagacctagaagcagaagac

SEQ ID NO: 26148 - DNA, 33 bp, Homo sapiens
gtaacaattagtgctacagtagaaaagacaggt

SEQ ID NO: 26149 - DNA, 33 bp, Homo sapiens
cagatcacgtagaggacgaaccttctatttttt

SEQ ID NO: 26150 - DNA, 33 bp, Homo sapiens
atcatcaacatagaaaattaacaagatattcag

SEQ ID NO: 26151 - DNA, 33 bp, Homo sapiens
catttgttttcacccaagttatgctttataaac

SEQ ID NO: 26152 - DNA, 33 bp, Homo sapiens
aatttaggctctgtccacacagattaggagtcc

SEQ ID NO: 26153 - DNA, 33 bp, Homo sapiens
gaaccatctaaccctacgtagcttgtatatttc

SEQ ID NO: 26154 - DNA, 33 bp, Homo sapiens
atgaagacaaattttacggcacatgagagttca

SEQ ID NO: 26155 - DNA, 33 bp, Homo sapiens
tatataaatgtaaccaccatcctgtagaagaac

SEQ ID NO: 26156 - DNA, 33 bp, Homo sapiens
cagagagaagttgacacccagtctccctaaggg

SEQ ID NO: 26157 - DNA, 33 bp, Homo sapiens
tccacagaaagggaagacatcaaaattgcatgg

SEQ ID NO: 26158 - DNA, 33 bp, Homo sapiens
taattgtcccagaagaacaaaaactggatgtgt

SEQ ID NO: 26159 - DNA, 33 bp, Homo sapiens
acaagacatttcacagaagtttgattactttgt

SEQ ID NO: 26160 - DNA, 33 bp, Homo sapiens
aagaatgatttaatgacgcttaattgaaaatgt

SEQ ID NO: 26161 - DNA, 33 bp, Homo sapiens
ttctaatgttaaagtacatttcaccatgattct

SEQ ID NO: 26162 - DNA, 33 bp, Homo sapiens
caaggatccatctttaaggtgttcagtagggat

SEQ ID NO: 26163 - DNA, 33 bp, Homo sapiens
gagatttttcaacatccgataacctgcatacag

SEQ ID NO: 26164 - DNA, 33 bp, Homo sapiens
tgttttatttttgtcacaactcagtcacataac

SEQ ID NO: 26165 - DNA, 33 bp, Homo sapiens
gaagatggcaaaataacgagagaaagataaact

SEQ ID NO: 26166 - DNA, 51 bp, Homo sapiens
gctgtcttaaatatactcaagtgttcaaagaatattgttttagaggtttca

SEQ ID NO: 26167 - DNA, 33 bp, Homo sapiens
gccatctgtaaactcacgcttcggaaggatcac

SEQ ID NO: 26168 - DNA, 33 bp, Homo sapiens
gaaattttatagacaaggagaaggtgttagcta

SEQ ID NO: 26169 - DNA, 33 bp, Homo sapiens
gttctgatcagaaatacagtttttccaaggctg

SEQ ID NO: 26170 - DNA, 51 bp, Homo sapiens
tatttcatgccaatagagacttaaaaagagcaacagtagctataattacat

SEQ ID NO: 26171 - DNA, 33 bp, Homo sapiens
tattgaaatgtcaagccgaatacatttgaagtt

SEQ ID NO: 26172 - DNA, 33 bp, Homo sapiens
ctcctctcctaacagaatagcacacactgatat

SEQ ID NO: 26173 - DNA, 33 bp, Homo sapiens
gaactggccttgcgcacggctctggaagcagga

SEQ ID NO: 26174 - DNA, 33 bp, Homo sapiens
gccgtactctgagaacaatgctgtaaagcttct

SEQ ID NO: 26175 - DNA, 33 bp, Homo sapiens
tcagaggattgtttaacgtacacgtgtgtactc

SEQ ID NO: 26176 - DNA, 33 bp, Homo sapiens
atatgatggtaaatgaaataatccgggcataga

SEQ ID NO: 26177 - DNA, 33 bp, Homo sapiens
aataagcagtagagtagctcataaacagattaa

SEQ ID NO: 26178 - DNA, 51 bp, Homo sapiens
atttgcttccagaattctgctgttcaaataagtgtcatgttgtcctttaaa

SEQ ID NO: 26179 - DNA, 51 bp, Homo sapiens
tccttgaagagattatgtccctgaaaagttttaacagtattttatttagtt

SEQ ID NO: 26180 - DNA, 33 bp, Homo sapiens
ttaaagcacacaaagtaaagggctgaatctgga

SEQ ID NO: 26181 - DNA, 33 bp, Homo sapiens
aatagcgaagtgggtacaagcatgtttcattta

SEQ ID NO: 26182 - DNA, 33 bp, Homo sapiens
ccttgagtcctatacaagtggctccacaattac

SEQ ID NO: 26183 - DNA, 33 bp, Homo sapiens
tctgggtgcttgttccacttccttgtgcattcc

SEQ ID NO: 26184 - DNA, 33 bp, Homo sapiens
aaatatactaactggacgaatcagcctattgat

SEQ ID NO: 26185 - DNA, 33 bp, Homo sapiens
tgagacatctaaaaagaactccatccagcgttc

SEQ ID NO: 26186 - DNA, 33 bp, Homo sapiens
ctcatttcatggatcaatacaagataatccaga

SEQ ID NO: 26187 - DNA, 33 bp, Homo sapiens
cacccttcaaagtcacacaaccaattctgaatt

SEQ ID NO: 26188 - DNA, 33 bp, Homo sapiens
ctgccatcaggagcacactgtgtaaccgacaag

SEQ ID NO: 26189 - DNA, 33 bp, Homo sapiens
ccttagaaattttccacgtaaagaccagcattt

SEQ ID NO: 26190 - DNA, 33 bp, Homo sapiens
ggattgtgactcagtacgatggagagatgagat

SEQ ID NO: 26191 - DNA, 33 bp, Homo sapiens
ggcttgcctggcaccactggagcaggtcttggc

SEQ ID NO: 26192 - DNA, 33 bp, Homo sapiens
tgcacacacaaaagaacgccctgacaagtgcac

SEQ ID NO: 26193 - DNA, 33 bp, Homo sapiens
atcctgtctcactcaccgctaaccctgggcctg

SEQ ID NO: 26194 - DNA, 33 bp, Homo sapiens
tactcacttcgagggacgtgcataaggaaagcc

SEQ ID NO: 26195 - DNA, 33 bp, Homo sapiens
acagaatcaggaataaccaaaatacatgattcc

SEQ ID NO: 26196 - DNA, 33 bp, Homo sapiens
agttaggtgctaattcactccggccagggcttc

SEQ ID NO: 26197 - DNA, 33 bp, Homo sapiens
aaagaccagaaggaacactaggtccaattgttt

SEQ ID NO: 26198 - DNA, 33 bp, Homo sapiens
agacagacagctcaacaagggctactataagca

SEQ ID NO: 26199 - DNA, 33 bp, Homo sapiens
cttcctaggactaagaatcgggtggagatgggt

SEQ ID NO: 26200 - DNA, 33 bp, Homo sapiens
ggcagaagggtcaacacgtaacaacagtcaaaa

SEQ ID NO: 26201 - DNA, 51 bp, Homo sapiens
ggttgatcaggcttatgacgttcacagacccggggcagtgagtgtatgtgc

SEQ ID NO: 26202 - DNA, 33 bp, Homo sapiens
gcagctgcaaggtgaccatatgagtgcgggagg

SEQ ID NO: 26203 - DNA, 33 bp, Homo sapiens
tgttgcaggttagggaatcaaggctgagtgtct

SEQ ID NO: 26204 - DNA, 33 bp, Homo sapiens
caattctgaggaagaaaaaaatgctagcatgga

SEQ ID NO: 26205 - DNA, 33 bp, Homo sapiens
gctccaggaattcacaactttctcctgcatcat

SEQ ID NO: 26206 - DNA, 33 bp, Homo sapiens
tgaggtacaaatccaacagagctttaatcccaa

SEQ ID NO: 26207 - DNA, 33 bp, Homo sapiens
ggtgtcaccattgctccatgattaatccagcaa

SEQ ID NO: 26208 - DNA, 33 bp, Homo sapiens
ataccgcatccagagaagtcgcagagccacagc

SEQ ID NO: 26209 - DNA, 33 bp, Homo sapiens
cttcgtttctgtggcacgcgacagtttccacct

SEQ ID NO: 26210 - DNA, 33 bp, Homo sapiens
cgaggtaagcctcaataagcaggagacatttca

SEQ ID NO: 26211 - DNA, 33 bp, Homo sapiens
catagcccttgtcaccacctcataaatcatttg

SEQ ID NO: 26212 - DNA, 33 bp, Homo sapiens
attcagattctatctcaagaggaacacggtctg

SEQ ID NO: 26213 - DNA, 33 bp, Homo sapiens
tgctttttaatatttcacatcaggagacatact

SEQ ID NO: 26214 - DNA, 33 bp, Homo sapiens
tctccaaaagacataacgtaaagccctattcag

SEQ ID NO: 26215 - DNA, 33 bp, Homo sapiens
gctaagcattctcagaagacaaataaaaaccat

SEQ ID NO: 26216 - DNA, 33 bp, Homo sapiens
actggaagttagatgtaaagagttgattgtaca

SEQ ID NO: 26217 - DNA, 33 bp, Homo sapiens
cagcctggggaagtacaaggctcaatttagatc

SEQ ID NO: 26218 - DNA, 33 bp, Homo sapiens
gcaggctgtcgcgggacgagttgatgttacagc

SEQ ID NO: 26219 - DNA, 33 bp, Homo sapiens
gccaggatggttctgcaactttatgaaggaaga

SEQ ID NO: 26220 - DNA, 33 bp, Homo sapiens
tgctttagcaacactaactcctagacttctcag

SEQ ID NO: 26221 - DNA, 33 bp, Homo sapiens
tattcacaaatcatcaagtattgtcccaaattt

SEQ ID NO: 26222 - DNA, 33 bp, Homo sapiens
gaacaataaatcacaaataaaattggacaatac

SEQ ID NO: 26223 - DNA, 51 bp, Homo sapiens
tgtttcgagcttctgtgctttcaagactacagtaatttatcttgtgcacag

SEQ ID NO: 26224 - DNA, 51 bp, Homo sapiens
tattttattttcctaattggcataccttttattttgttttcttgtataatt

SEQ ID NO: 26225 - DNA, 33 bp, Homo sapiens
aggggagatgagaacaacggggcagaaagaagg

SEQ ID NO: 26226 - DNA, 33 bp, Homo sapiens
tttcgaacctctgggaatacatctctatggctt

SEQ ID NO: 26227 - DNA, 33 bp, Homo sapiens
aaatcagagataaagacgcaagaaagagaattc

SEQ ID NO: 26228 - DNA, 33 bp, Homo sapiens
gagagtgcccacctccaaggtaagagggttatt

SEQ ID NO: 26229 - DNA, 33 bp, Homo sapiens
ttgtgtagggaagagaagagaaccacattgcat

SEQ ID NO: 26230 - DNA, 33 bp, Homo sapiens
gtgaacagctctataactgctcatctttattga

SEQ ID NO: 26231 - DNA, 33 bp, Homo sapiens
ccctttggccgtcagacatacagcaagtgctca

SEQ ID NO: 26232 - DNA, 33 bp, Homo sapiens
agcataccactacttaagctgtccatatactgt

SEQ ID NO: 26233 - DNA, 33 bp, Homo sapiens
tcaaggctttgctgtacgtttgaaccactgaac

SEQ ID NO: 26234 - DNA, 33 bp, Homo sapiens
ttcatccctactcaagaccagttaaatcagaac

SEQ ID NO: 26235 - DNA, 33 bp, Homo sapiens
cttctctctcccgcatcatcgatttcgccctct

SEQ ID NO: 26236 - DNA, 33 bp, Homo sapiens
tgttgcctagttttaaatcttcttgcaacatca

SEQ ID NO: 26237 - DNA, 33 bp, Homo sapiens
tcacaaattcaccttcacttaaattggtcaaag

SEQ ID NO: 26238 - DNA, 33 bp, Homo sapiens
aaacatgaaactttacaattggaaaaatacaca

SEQ ID NO: 26239 - DNA, 33 bp, Homo sapiens
tagactaaggggacgccgagtattaaacaggtt

SEQ ID NO: 26240 - DNA, 33 bp, Homo sapiens
ggcaaactgtgaaatacgaagcagcagtcatct

SEQ ID NO: 26241 - DNA, 51 bp, Homo sapiens
ggggtcttatgacctatagcaaacaagacaggtcagataatttccttatgg

SEQ ID NO: 26242 - DNA, 33 bp, Homo sapiens
gcttttaagcatttagacaccatcatataaatc

SEQ ID NO: 26243 - DNA, 33 bp, Homo sapiens
catggaggagaaaacacggaatagatcacacag

SEQ ID NO: 26244 - DNA, 33 bp, Homo sapiens
catgagccagctaaagaacataggatcaagtgt

SEQ ID NO: 26245 - DNA, 33 bp, Homo sapiens
tccttctactccaagccgagacactagaatgta

SEQ ID NO: 26246 - DNA, 33 bp, Homo sapiens
aattggagactacttagaggcaataatctcacc

SEQ ID NO: 26247 - DNA, 33 bp, Homo sapiens
atctgcaacatctgtagcaaaggccctaatatc

SEQ ID NO: 26248 - DNA, 33 bp, Homo sapiens
ttctaattttcatttacagtcacaagttgctta

SEQ ID NO: 26249 - DNA, 33 bp, Homo sapiens
tcaggggaaatccagccgaaattttggtccatt

SEQ ID NO: 26250 - DNA, 33 bp, Homo sapiens
ccaaaacagtgacttcacccgtaagaacatttt

SEQ ID NO: 26251 - DNA, 33 bp, Homo sapiens
aggaatagaataatcacggctgaaaatgtaatc

SEQ ID NO: 26252 - DNA, 33 bp, Homo sapiens
ttctggagtattgtgtaaagatgagtaagagtg

SEQ ID NO: 26253 - DNA, 33 bp, Homo sapiens
tggagaagtgacccaaagaacaagggcgaggga

SEQ ID NO: 26254 - DNA, 33 bp, Homo sapiens
tggagacctctctgaaactgctctgtaagatga

SEQ ID NO: 26255 - DNA, 33 bp, Homo sapiens
ttgaggctcatcctaacggtagtacttgatttt

SEQ ID NO: 26256 - DNA, 33 bp, Homo sapiens
ttgtgttagaatgacaataggcttcaaatgatc

SEQ ID NO: 26257 - DNA, 51 bp, Homo sapiens
ctcaccagtacattcccattcataagtcctcttaccttttccaccatgacc

SEQ ID NO: 26258 - DNA, 51 bp, Homo sapiens
gctttgttcattctataattcctaactctaatatcatcgtctccaggattc

SEQ ID NO: 26259 - DNA, 33 bp, Homo sapiens
cctgaccatcacagacgcaggtgccaagaacaa

SEQ ID NO: 26260 - DNA, 33 bp, Homo sapiens
tcatattttgcaactaactgatcatctaacagt

SEQ ID NO: 26261 - DNA, 33 bp, Homo sapiens
ccctttcctccttaaacgttggtgaactgagag

SEQ ID NO: 26262 - DNA, 33 bp, Homo sapiens
gtgactgaattaaacaaatcccaaagcctgccc

SEQ ID NO: 26263 - DNA, 33 bp, Homo sapiens
catggtgaaactaaaacactcttctctactaaa

SEQ ID NO: 26264 - DNA, 33 bp, Homo sapiens
acagcattgtcctatcagaactattgtttacag

SEQ ID NO: 26265 - DNA, 33 bp, Homo sapiens
ctagcactgtaagataataagagtgtgttgttc

SEQ ID NO: 26266 - DNA, 33 bp, Homo sapiens
ctttaagaatgtttaacggacaaccacttggaa

SEQ ID NO: 26267 - DNA, 33 bp, Homo sapiens
ttttaccatttagggacagtagtagtcaggaga

SEQ ID NO: 26268 - DNA, 33 bp, Homo sapiens
tgatatcacaatctacacatggattgcaaccca

SEQ ID NO: 26269 - DNA, 33 bp, Homo sapiens
cggaagtatgtatgaacaggtgatatttccact

SEQ ID NO: 26270 - DNA, 33 bp, Homo sapiens
attttttgtgagatgcacacttttactaccctc

SEQ ID NO: 26271 - DNA, 33 bp, Homo sapiens
atattttctttccaacaggcacctattatcaga

SEQ ID NO: 26272 - DNA, 33 bp, Homo sapiens
tttttgttgttgttaaagaatcttgctctgtcg

SEQ ID NO: 26273 - DNA, 33 bp, Homo sapiens
attgacaggacatcacaacattatgaaaatcca

SEQ ID NO: 26274 - DNA, 33 bp, Homo sapiens
tgcaattccatagcttcaaatgtctccttacag

SEQ ID NO: 26275 - DNA, 33 bp, Homo sapiens
taagcttttaagtacaatacactcttctaaaat

SEQ ID NO: 26276 - DNA, 33 bp, Homo sapiens
catcttgtgactgctacagctgaaatgactgtt

SEQ ID NO: 26277 - DNA, 33 bp, Homo sapiens
tggtgacaaagaaagaacctgcttcagaaagaa

SEQ ID NO: 26278 - DNA, 33 bp, Homo sapiens
ggcaatacctagtgctcacaaagatatcaaatg

SEQ ID NO: 26279 - DNA, 33 bp, Homo sapiens
aagcgttcggcaatagcagacgtgaaaataaaa

SEQ ID NO: 26280 - DNA, 33 bp, Homo sapiens
tctaaactaactgaaacgaaaagcagcagaagt

SEQ ID NO: 26281 - DNA, 33 bp, Homo sapiens
gttaacagagaatgcccaaaactggaaaaacaa

SEQ ID NO: 26282 - DNA, 33 bp, Homo sapiens
gagcgtaggaggcagccattttaacaatgaaaa

SEQ ID NO: 26283 - DNA, 33 bp, Homo sapiens
catgatcactgaagaccgcaacaataaagagaa

SEQ ID NO: 26284 - DNA, 33 bp, Homo sapiens
gcatctacattgatgactatctcttactaatct

SEQ ID NO: 26285 - DNA, 33 bp, Homo sapiens
acaaagggctcattcaacgtgatccaaaacttc

SEQ ID NO: 26286 - DNA, 33 bp, Homo sapiens
aagacaatattcaagggcaatctaatacagaga

SEQ ID NO: 26287 - DNA, 51 bp, Homo sapiens
tttcttcttcaggttaatctgcatgaaaatccaaactattaattagaaggc

SEQ ID NO: 26288 - DNA, 51 bp, Homo sapiens
aatctctgatacattaatccagtgcaaaaccagtgattttcttaaactcac

SEQ ID NO: 26289 - DNA, 33 bp, Homo sapiens
tactacagagattcaccgaggtagacactgctg

SEQ ID NO: 26290 - DNA, 33 bp, Homo sapiens
agagtctgaataaaaccatgatagaaataagga

SEQ ID NO: 26291 - DNA, 33 bp, Homo sapiens
tctctgaagcacaaagaaagattacaagttcca

SEQ ID NO: 26292 - DNA, 51 bp, Homo sapiens
ttttcatctgccttttatctgaggcaatgccaatggttttacagtacgcag

SEQ ID NO: 26293 - DNA, 33 bp, Homo sapiens
ggttaggatttgggcaaagagaatacaacagga

SEQ ID NO: 26294 - DNA, 33 bp, Homo sapiens
gcagaagctcttctgcaaataaaccatgaagtt

SEQ ID NO: 26295 - DNA, 33 bp, Homo sapiens
acttcaagtataggtacgttgttaatgcagaaa

SEQ ID NO: 26296 - DNA, 33 bp, Homo sapiens
tcgtttgcttactctccgacacttgttccaaac

SEQ ID NO: 26297 - DNA, 33 bp, Homo sapiens
ttggttggttatttaacgtgaaagagatgtgta

SEQ ID NO: 26298 - DNA, 33 bp, Homo sapiens
caaaggctttttagtacgtggagaagaatcaaa

SEQ ID NO: 26299 - DNA, 33 bp, Homo sapiens
attatcatatattctcaaactgtacttgtattt

SEQ ID NO: 26300 - DNA, 33 bp, Homo sapiens
aaaggtaggccttctaagctattctggagtaag

SEQ ID NO: 26301 - DNA, 33 bp, Homo sapiens
gaaatcataggtgtagaagaaagtcagcaaagg

SEQ ID NO: 26302 - DNA, 33 bp, Homo sapiens
ttcatctcattactgcaagtttgtacgctttga

SEQ ID NO: 26303 - DNA, 51 bp, Homo sapiens
taaatacatagatgtgtaacacgaccgtatactcctgtacagagctgaata

SEQ ID NO: 26304 - DNA, 51 bp, Homo sapiens
gcttggttcaaatctgctccatccacaggttcctgtcctcaggattcttca

SEQ ID NO: 26305 - DNA, 33 bp, Homo sapiens
tgttaagtatttcaccaacaggtacaggttata

SEQ ID NO: 26306 - DNA, 33 bp, Homo sapiens
tctttatatctgcacactgtatatctgcttatg

SEQ ID NO: 26307 - DNA, 51 bp, Homo sapiens
tctctcttcctgattccatcatagaaaaaactgaaagaagccacagaacac

SEQ ID NO: 26308 - DNA, 33 bp, Homo sapiens
ggaacagaatgcaccacaggaacagtaagttca

SEQ ID NO: 26309 - DNA, 33 bp, Homo sapiens
agggaagacaggaaaaacatcatatgagcccag

SEQ ID NO: 26310 - DNA, 33 bp, Homo sapiens
gttaattgaagctcgaaatgctaactaagaaac

SEQ ID NO: 26311 - DNA, 33 bp, Homo sapiens
ctagacatggaaagaaactaatactccacagtc

SEQ ID NO: 26312 - DNA, 33 bp, Homo sapiens
aggtacatcatctgctcaatgcaccacaggtac

SEQ ID NO: 26313 - DNA, 33 bp, Homo sapiens
ttatggttctttttgacgggagcctccaattgc

SEQ ID NO: 26314 - DNA, 33 bp, Homo sapiens
taatattggtgatatacagttaatgggatttca

SEQ ID NO: 26315 - DNA, 33 bp, Homo sapiens
atttggggtattttaactgctgtatagagatag

SEQ ID NO: 26316 - DNA, 33 bp, Homo sapiens
atgctgagcagaaactaacctattaagactttc

SEQ ID NO: 26317 - DNA, 33 bp, Homo sapiens
aaaagtgaaggaatgccacttctgaggaggtga

SEQ ID NO: 26318 - DNA, 33 bp, Homo sapiens
aagtgcttacatgctaaaattaggaccaggttc

SEQ ID NO: 26319 - DNA, 33 bp, Homo sapiens
aatagataactctcaaaaatttgtgattgaggt

SEQ ID NO: 26320 - DNA, 33 bp, Homo sapiens
actttggtaagctctagattatgaacaaaacac

SEQ ID NO: 26321 - DNA, 33 bp, Homo sapiens
tgaaaaacttgtgagaagaatgttaaactgcac

SEQ ID NO: 26322 - DNA, 33 bp, Homo sapiens
attatctgcctactcactattgatgcaaaaaaa

SEQ ID NO: 26323 - DNA, 51 bp, Homo sapiens
acctttagttcacaggattcttacacaggactctttttagctccctataga

SEQ ID NO: 26324 - DNA, 33 bp, Homo sapiens
gtgtacaaatccggagcaaaagccatcaaattc

SEQ ID NO: 26325 - DNA, 33 bp, Homo sapiens
aatgggacaacttaagccaggtgcaagttaaac

SEQ ID NO: 26326 - DNA, 33 bp, Homo sapiens
ctgcagatgaaactacaaatccattgtcttttg

SEQ ID NO: 26327 - DNA, 33 bp, Homo sapiens
catctcaataattacccagtcacaggtgtttaa

SEQ ID NO: 26328 - DNA, 33 bp, Homo sapiens
tcctgtgggtgctttacgcattaatccacagaa

SEQ ID NO: 26329 - DNA, 51 bp, Homo sapiens
cttttctcttctcctgtatcttatgaaatccaagaagggtacactccctca

SEQ ID NO: 26330 - DNA, 33 bp, Homo sapiens
ttatcacagttacctcaagaagctcaggatttc

SEQ ID NO: 26331 - DNA, 33 bp, Homo sapiens
gtttcaaagcgaggtcccaaataaagtctgcat

SEQ ID NO: 26332 - DNA, 33 bp, Homo sapiens
acaagataaggaaaaaaatgaagtggtctatga

SEQ ID NO: 26333 - DNA, 33 bp, Homo sapiens
tataagcaggttttcacctttgagaatatcttg

SEQ ID NO: 26334 - DNA, 33 bp, Homo sapiens
atttctgattgggccccgaagttagaaaactat

SEQ ID NO: 26335 - DNA, 33 bp, Homo sapiens
aaatacatccaatttaggatcatttatcactaa

SEQ ID NO: 26336 - DNA, 51 bp, Homo sapiens
catttccattcaaagaaccccctcaagctctcttctagtactgatctggtg

SEQ ID NO: 26337 - DNA, 33 bp, Homo sapiens
aaataattttgagcataaactctacaccctatt

SEQ ID NO: 26338 - DNA, 33 bp, Homo sapiens
aacagtcaatctcaagaaatcgccaaaatactt

SEQ ID NO: 26339 - DNA, 33 bp, Homo sapiens
gttttacttctttacaactgcacaaccttaagc

SEQ ID NO: 26340 - DNA, 33 bp, Homo sapiens
tctttaatcttaaaaacagccttagtagccagt

SEQ ID NO: 26341 - DNA, 51 bp, Homo sapiens
gaaagaagattaaaaatgtcaaaaaaggtgctagactgtgaagatgatatc

SEQ ID NO: 26342 - DNA, 51 bp, Homo sapiens
atttgccaattgagaaagaattttaaaacattgtactcagtaacaatatga

SEQ ID NO: 26343 - DNA, 33 bp, Homo sapiens
gtttcaaacttgaacaatcttgatccagtgtct

SEQ ID NO: 26344 - DNA, 33 bp, Homo sapiens
aaaaatagatcatctgaaactgaccctttatga

SEQ ID NO: 26345 - DNA, 51 bp, Homo sapiens
tcatctcgcttatctttcatctggccgaatgattgactgagagtcccatcc

SEQ ID NO: 26346 - DNA, 33 bp, Homo sapiens
tctcttattccatcatcaggtccactgcaggca

SEQ ID NO: 26347 - DNA, 33 bp, Homo sapiens
ctacaagattttctccactttatcattcagccc

SEQ ID NO: 26348 - DNA, 33 bp, Homo sapiens
tttatcagtgcgtccacagaacaatgccagaaa

SEQ ID NO: 26349 - DNA, 33 bp, Homo sapiens
cacttgttagtaaagaagtgcaataactttggg

SEQ ID NO: 26350 - DNA, 33 bp, Homo sapiens
tactatttattgatacacctgctctgtgccaga

SEQ ID NO: 26351 - DNA, 33 bp, Homo sapiens
tcaaatcatttgaagaatagttgtttagtgagt

SEQ ID NO: 26352 - DNA, 51 bp, Homo sapiens
agatttctagaagtcaaaagtataactccacacaaaaagatgttaattagt

SEQ ID NO: 26353 - DNA, 51 bp, Homo sapiens
acttgtggtcatgtgacaaggtccaactaatagaatgtgagaagagatgta

SEQ ID NO: 26354 - DNA, 33 bp, Homo sapiens
gtcaaagattgggaaaatacattctgcttacca

SEQ ID NO: 26355 - DNA, 33 bp, Homo sapiens
tgcattatggctttaaaaggaagtaaaagaatc

SEQ ID NO: 26356 - DNA, 33 bp, Homo sapiens
tttgtgttcagtctcaatcaaggattataactt

SEQ ID NO: 26357 - DNA, 33 bp, Homo sapiens
aggaagatatcaaattaaagttaggagaagaaa

SEQ ID NO: 26358 - DNA, 51 bp, Homo sapiens
ccagacccaaatatgtatcattaaagaagtaaacctaattcaaacctgatt

SEQ ID NO: 26359 - DNA, 51 bp, Homo sapiens
atatgtcttcagatcatcaatttccactactcagtcattatcaagatcaag

SEQ ID NO: 26360 - DNA, 51 bp, Homo sapiens
tgtcttttttctttttcactcacaagattttaaccacagttaagcatgacc

SEQ ID NO: 26361 - DNA, 51 bp, Homo sapiens
aataataaagaaactgatgtcaagcaatttatctgattcagattacagtct

SEQ ID NO: 26362 - DNA, 51 bp, Homo sapiens
catactcactttgttcttccattcaccttgataatttgacaccatactaac

SEQ ID NO: 26363 - DNA, 33 bp, Homo sapiens
gtatatggctcccgtgaatgtaatatcagatct

SEQ ID NO: 26364 - DNA, 33 bp, Homo sapiens
aattcctttccatgcagctggacccagttcttt

SEQ ID NO: 26365 - DNA, 33 bp, Homo sapiens
tatcttttctttccacacaagattttaggcaac

SEQ ID NO: 26366 - DNA, 33 bp, Homo sapiens
ttttagaaccaggaaaaagtttaggctcagtga

SEQ ID NO: 26367 - DNA, 33 bp, Homo sapiens
gcaaaatcggatagacagtcaagttatcaaaca

SEQ ID NO: 26368 - DNA, 33 bp, Homo sapiens
atttttctgattatacaaagcaatatgggttca

SEQ ID NO: 26369 - DNA, 33 bp, Homo sapiens
gggtggtgaaagtatgaatgttcactataatgt

SEQ ID NO: 26370 - DNA, 33 bp, Homo sapiens
tccatgaaatctttaacctggcggatcccttat

SEQ ID NO: 26371 - DNA, 33 bp, Homo sapiens
ccttctgtcaacctgacatcctttacatctttt

SEQ ID NO: 26372 - DNA, 33 bp, Homo sapiens
gcaatttatggagcaaatgacacgctgtaactt

SEQ ID NO: 26373 - DNA, 33 bp, Homo sapiens
gtctttatacttgagaaaaagatataggtggac

SEQ ID NO: 26374 - DNA, 33 bp, Homo sapiens
aattagcaaaattccacacacgtaactcattta

SEQ ID NO: 26375 - DNA, 33 bp, Homo sapiens
atgatgtaaaactagaaacagtgaacaagaaac

SEQ ID NO: 26376 - DNA, 33 bp, Homo sapiens
ctccaaatcaccacaggaatgaccaaaggggtg

SEQ ID NO: 26377 - DNA, 33 bp, Homo sapiens
tggtgtaaagtcatgcaaaattttacttagctt

SEQ ID NO: 26378 - DNA, 51 bp, Homo sapiens
attctaaattactggggatcattcaataaggaaatggtaagctctgatggc

SEQ ID NO: 26379 - DNA, 51 bp, Homo sapiens
accgcaggttatttgctctacagaaagaacacatgaaagcagacaaaacac

SEQ ID NO: 26380 - DNA, 33 bp, Homo sapiens
aggagaccagcaaagaatattgaaagaaagaaa

SEQ ID NO: 26381 - DNA, 33 bp, Homo sapiens
cctccaactcttccccacaagcaaaaatcttag

SEQ ID NO: 26382 - DNA, 33 bp, Homo sapiens
ttccctttttgtgggcagacccatattttctag

SEQ ID NO: 26383 - DNA, 33 bp, Homo sapiens
tttgctccagtctataagagagtaatcagaatg

SEQ ID NO: 26384 - DNA, 51 bp, Homo sapiens
ttacaaactgtgacaagtaaactgaaagtaaaagaaactgacagaaatata

SEQ ID NO: 26385 - DNA, 51 bp, Homo sapiens
tctcaaaatccatgcaatgttcagaagtatttctattttttggaaaataaa

SEQ ID NO: 26386 - DNA, 51 bp, Homo sapiens
atatgaagaaaaaggtaaagaagcagaaattaaaaggataacttgaagaag

SEQ ID NO: 26387 - DNA, 33 bp, Homo sapiens
agatttgcaacaaaaacgggatggtccagctct

SEQ ID NO: 26388 - DNA, 33 bp, Homo sapiens
acctaatgctttcaagaaaataatcctatgatg

SEQ ID NO: 26389 - DNA, 51 bp, Homo sapiens
tatcccctatgctacctggctcaaacgctgtaaaaacccaaaatgattagc

SEQ ID NO: 26390 - DNA, 33 bp, Homo sapiens
tatggaatgaactagactatcaataagctgaaa

SEQ ID NO: 26391 - DNA, 51 bp, Homo sapiens
aaaattaagactcttattaggaaagaccatcatctaaattgtgaacaattt

SEQ ID NO: 26392 - DNA, 33 bp, Homo sapiens
tgtgaggattttaaggcagccctaatgtgggtt

SEQ ID NO: 26393 - DNA, 33 bp, Homo sapiens
gttcttaatgaaataacgctggctagagccctt

SEQ ID NO: 26394 - DNA, 33 bp, Homo sapiens
attaaaagatacagaaaactgggagctagaagt

SEQ ID NO: 26395 - DNA, 33 bp, Homo sapiens
tgcctgtcttgcttaaagaatcataagactatg

SEQ ID NO: 26396 - DNA, 33 bp, Homo sapiens
caacatttgtagaccacgtaatatgtgcagagc

SEQ ID NO: 26397 - DNA, 33 bp, Homo sapiens
ggattgcttgggtctaaggggtcaagactgcgg

SEQ ID NO: 26398 - DNA, 51 bp, Homo sapiens
agtcaaaacagaatgttaggagcacagcttttgagtcgagaaatttgattt

SEQ ID NO: 26399 - DNA, 51 bp, Homo sapiens
aggttaggtgacatacaagaacatgcggttccacagcagtcctgtcattct

SEQ ID NO: 26400 - DNA, 33 bp, Homo sapiens
cagataaatacacctaaaactggtaatcggcag

SEQ ID NO: 26401 - DNA, 33 bp, Homo sapiens
ccttttaatttatgtgcatcggtagtcttgact

SEQ ID NO: 26402 - DNA, 33 bp, Homo sapiens
aagatactttgtccaaacctattatgagcccag

SEQ ID NO: 26403 - DNA, 33 bp, Homo sapiens
gtcctctcttcctggacgggtaatcacgtttct

SEQ ID NO: 26404 - DNA, 33 bp, Homo sapiens
tttagtatgaagaataaattgtagggaaggctg

SEQ ID NO: 26405 - DNA, 33 bp, Homo sapiens
gcttgaaggaagaaaacgtatactctgggcaca

SEQ ID NO: 26406 - DNA, 33 bp, Homo sapiens
actgaagttgagaaaaattaggtgctaaagcag

SEQ ID NO: 26407 - DNA, 33 bp, Homo sapiens
ggatgcatagtttgcacatacgttcttcctttc

SEQ ID NO: 26408 - DNA, 51 bp, Homo sapiens
gtagtggtgtcatttgattcctttcgcttcctcctttgtgtgacttcttta

SEQ ID NO: 26409 - DNA, 33 bp, Homo sapiens
gtctgttttgttaccgaccagcttgctgagctg

SEQ ID NO: 26410 - DNA, 33 bp, Homo sapiens
aacttgagagagaaacccaagagaactgagaaa

SEQ ID NO: 26411 - DNA, 33 bp, Homo sapiens
aggttttcctttcaaactgctatggagtgtgat

SEQ ID NO: 26412 - DNA, 33 bp, Homo sapiens
gctataaacatacaacaaaatagtctgcctttt

SEQ ID NO: 26413 - DNA, 33 bp, Homo sapiens
gataaaaatggaaacacctctagactaatcagg

SEQ ID NO: 26414 - DNA, 33 bp, Homo sapiens
aatgcttagaagtcaaccagtggctttgtgaaa

SEQ ID NO: 26415 - DNA, 33 bp, Homo sapiens
ctctaaattactcaaggccatacaaatgttatt

SEQ ID NO: 26416 - DNA, 33 bp, Homo sapiens
agccaccgaaaccggacgatgcctccttcttaa

SEQ ID NO: 26417 - DNA, 33 bp, Homo sapiens
atgaaccaaatagcagcagagaaagtcctcatg

SEQ ID NO: 26418 - DNA, 33 bp, Homo sapiens
tggccacttttctgtacagcaaccgaggtgata

SEQ ID NO: 26419 - DNA, 33 bp, Homo sapiens
acctgaggagtagagaatatatgatttccagaa

SEQ ID NO: 26420 - DNA, 33 bp, Homo sapiens
ggagctcatttccccaacctgaaatttgaggaa

SEQ ID NO: 26421 - DNA, 33 bp, Homo sapiens
tatctaatggacagccagaaaacccagagagac

SEQ ID NO: 26422 - DNA, 33 bp, Homo sapiens
ttcttcatcagttcaacgtgggtggtaatcata

SEQ ID NO: 26423 - DNA, 33 bp, Homo sapiens
acatctccaatacacacaatcattttcgttttc

SEQ ID NO: 26424 - DNA, 33 bp, Homo sapiens
agtcactctggacataatacaccttcactgtta

SEQ ID NO: 26425 - DNA, 33 bp, Homo sapiens
atgtaaattaaaatccacattatgtataagcat

SEQ ID NO: 26426 - DNA, 33 bp, Homo sapiens
tctgagtggaaaaaaaacaagtagactacatat

SEQ ID NO: 26427 - DNA, 33 bp, Homo sapiens
aagaaaaagagtagaacacaaatatgcaaagtc

SEQ ID NO: 26428 - DNA, 33 bp, Homo sapiens
acacttaagacttccacgtggctttcatttttc

SEQ ID NO: 26429 - DNA, 33 bp, Homo sapiens
attcttatttgtatcccgagctatgcttcaaac

SEQ ID NO: 26430 - DNA, 33 bp, Homo sapiens
tctaagcttgctcctagggtgctcatcttgatg

SEQ ID NO: 26431 - DNA, 33 bp, Homo sapiens
cttggctgtttagatcaatctccatggttaacg

SEQ ID NO: 26432 - DNA, 33 bp, Homo sapiens
ataatttaaagcttcaaagtctggcatctgcat

SEQ ID NO: 26433 - DNA, 51 bp, Homo sapiens
acgtataaaaccgtggatactgttaccatgtgtgtaaaagaaaaattgtaa

SEQ ID NO: 26434 - DNA, 33 bp, Homo sapiens
ggcaagtcatgtaggaagataagtggtaagtct

SEQ ID NO: 26435 - DNA, 33 bp, Homo sapiens
gaggatattttggtaaaggaacgaggtggcgga

SEQ ID NO: 26436 - DNA, 33 bp, Homo sapiens
cccaacatcctacataccaggtgagacttttct

SEQ ID NO: 26437 - DNA, 33 bp, Homo sapiens
tggccaattcagttcacaagtgctaaacctgtt

SEQ ID NO: 26438 - DNA, 33 bp, Homo sapiens
ggtctcagatggatccccgctttcctggagaag

SEQ ID NO: 26439 - DNA, 33 bp, Homo sapiens
acatcatttttgacctgaaaaaatagcaaatgt

SEQ ID NO: 26440 - DNA, 51 bp, Homo sapiens
ggaataaacatgatacagtattagacgaagtttataaatcaaataatttag

SEQ ID NO: 26441 - DNA, 51 bp, Homo sapiens
tattggtgggttagttgtctgtaatgatttagttttaattttttagtgtat

SEQ ID NO: 26442 - DNA, 33 bp, Homo sapiens
aggaatttccagaggaagagcaatgggggaaga

SEQ ID NO: 26443 - DNA, 33 bp, Homo sapiens
ctgttagccatgtgagaatacggtagttcttcc

SEQ ID NO: 26444 - DNA, 33 bp, Homo sapiens
catgtgcaaaccaggaaaagatgaataatccaa

SEQ ID NO: 26445 - DNA, 33 bp, Homo sapiens
ctctcactgatgtcacaggttacctatgcaatc

SEQ ID NO: 26446 - DNA, 33 bp, Homo sapiens
actcagatctttcccactacaggtcccgtcagg

SEQ ID NO: 26447 - DNA, 51 bp, Homo sapiens
ccaatgtgtgtttcccttatgcttccgaaattgctgagttagagcctacag

SEQ ID NO: 26448 - DNA, 33 bp, Homo sapiens
aagagagatcttgaggcatacaggcaattcctg

SEQ ID NO: 26449 - DNA, 33 bp, Homo sapiens
ctaatagctgggattacaaggcataaaccacca

SEQ ID NO: 26450 - DNA, 33 bp, Homo sapiens
tttggaagctttcaacgctaacttttcaaactt

SEQ ID NO: 26451 - DNA, 51 bp, Homo sapiens
gaatttcataaataccaacatgatacacaatagttccttagcatttgtcat

SEQ ID NO: 26452 - DNA, 33 bp, Homo sapiens
aaattaaatacaactacgtctactgccactaaa

SEQ ID NO: 26453 - DNA, 33 bp, Homo sapiens
agaatcagaacacttaagccggaaaggacctca

SEQ ID NO: 26454 - DNA, 33 bp, Homo sapiens
gaatggcaaagtgataacaagtgcaggcaacaa

SEQ ID NO: 26455 - DNA, 33 bp, Homo sapiens
atacttctatacttgtaaatcattggctaatgc

SEQ ID NO: 26456 - DNA, 33 bp, Homo sapiens
atttctagagtctttgaatcttagttgaactgg

SEQ ID NO: 26457 - DNA, 33 bp, Homo sapiens
gtccagtggtaaaagacgaaacacgctatccct

SEQ ID NO: 26458 - DNA, 33 bp, Homo sapiens
gaagtacaaattcttacacaggctgagtatcgc

SEQ ID NO: 26459 - DNA, 33 bp, Homo sapiens
taattctggaaggcagcaaagaaaccgtctgga

SEQ ID NO: 26460 - DNA, 33 bp, Homo sapiens
ggcttcagagctagacgatctgagttcaaatcc

SEQ ID NO: 26461 - DNA, 33 bp, Homo sapiens
gaggaacaaatgaagccagggcaatgttagaac

SEQ ID NO: 26462 - DNA, 51 bp, Homo sapiens
atttaggtattcttgctcaaatctacaaaaggagaatcaaattggcaagtg

SEQ ID NO: 26463 - DNA, 51 bp, Homo sapiens
gggagattttatttcactagctttaagactaagtataccttttagtagatc

SEQ ID NO: 26464 - DNA, 33 bp, Homo sapiens
gtgtatatctttccacaaacatatctacagttt

SEQ ID NO: 26465 - DNA, 33 bp, Homo sapiens
tttaatttgtatagtaagtatgaatttgctcag

SEQ ID NO: 26466 - DNA, 33 bp, Homo sapiens
acaggtactttaaataagtctcattcaagtggt

SEQ ID NO: 26467 - DNA, 33 bp, Homo sapiens
tgcacttttctatctccattcccacgagacaat

SEQ ID NO: 26468 - DNA, 33 bp, Homo sapiens
acaaaatgaatgatgaagttaaacacccaagct

SEQ ID NO: 26469 - DNA, 33 bp, Homo sapiens
aaatgtcatcaatcagaattttcagtaaataat

SEQ ID NO: 26470 - DNA, 33 bp, Homo sapiens
actcatctaataattcagaacaccatgtgttgg

SEQ ID NO: 26471 - DNA, 33 bp, Homo sapiens
atggatctaagaagaaaggtcgatttttcagct

SEQ ID NO: 26472 - DNA, 33 bp, Homo sapiens
catgctttcactctagaaactttgatccagtgt

SEQ ID NO: 26473 - DNA, 33 bp, Homo sapiens
gctctagactactctaccattccttgtggattt

SEQ ID NO: 26474 - DNA, 33 bp, Homo sapiens
ggaatgtagcagtaataagataactaagaatga

SEQ ID NO: 26475 - DNA, 51 bp, Homo sapiens
gttgattgacaggaagagagtatgagaacacattttgtggtaataaaaatg

SEQ ID NO: 26476 - DNA, 51 bp, Homo sapiens
atcattgtctgggttttacagatagaaaaatttaggtacatagaattatct

SEQ ID NO: 26477 - DNA, 51 bp, Homo sapiens
tagccacagctaaactactgtgccaatgtattaaccagtatctaattacat

SEQ ID NO: 26478 - DNA, 33 bp, Homo sapiens
tatgactgcacagatcaaaagtgtcgaactcac

SEQ ID NO: 26479 - DNA, 33 bp, Homo sapiens
atctagacagagaataagctcattttcagagtc

SEQ ID NO: 26480 - DNA, 33 bp, Homo sapiens
aagatgagcatcttaaaaagagcaagaacttct

SEQ ID NO: 26481 - DNA, 33 bp, Homo sapiens
tcagttcatggactaacgtttttatggatgata

SEQ ID NO: 26482 - DNA, 33 bp, Homo sapiens
gccctgacataagtaaatagagattgttaggta

SEQ ID NO: 26483 - DNA, 33 bp, Homo sapiens
tatggccaccatactgaaaaattctggtttcgt

SEQ ID NO: 26484 - DNA, 51 bp, Homo sapiens
ttgaaatccttttgcatctctctgaactattgcacaaaaatttaaatcttg

SEQ ID NO: 26485 - DNA, 51 bp, Homo sapiens
aagcatgagtgtaaatacagacccaaaagagtatagctcgatttcttcaag

SEQ ID NO: 26486 - DNA, 33 bp, Homo sapiens
ttggattgagttgcatcaaacaaaattgaagtg

SEQ ID NO: 26487 - DNA, 33 bp, Homo sapiens
tatggtcaatgacaaaactcacgagaagacaaa

SEQ ID NO: 26488 - DNA, 33 bp, Homo sapiens
cactctgtaatacaaacgtcctggaagcagaga

SEQ ID NO: 26489 - DNA, 33 bp, Homo sapiens
tcttcaccttgattcaaaaaaacacagctgttt

SEQ ID NO: 26490 - DNA, 33 bp, Homo sapiens
actgatacagaatcataaaaggcctcaggcaca

SEQ ID NO: 26491 - DNA, 33 bp, Homo sapiens
aacttctggaatgccaagaattgaaaagagcag

SEQ ID NO: 26492 - DNA, 33 bp, Homo sapiens
aatattatgctggctaacttctgtttcttctct

SEQ ID NO: 26493 - DNA, 33 bp, Homo sapiens
aatattagaatgttagaccaacagcaataaaat

SEQ ID NO: 26494 - DNA, 33 bp, Homo sapiens
aagctgaataaagacacgaaaagaaacagtgat

SEQ ID NO: 26495 - DNA, 33 bp, Homo sapiens
ttatgcattccctgaggaacatcaatagatcgc

SEQ ID NO: 26496 - DNA, 33 bp, Homo sapiens
acaaactgtagaaatcaatgacatgaaatggac

SEQ ID NO: 26497 - DNA, 33 bp, Homo sapiens
ggtgagattactaccacctttgaagttagatgt

SEQ ID NO: 26498 - DNA, 33 bp, Homo sapiens
agatacaggagcaacaatcttctatacatggtt

SEQ ID NO: 26499 - DNA, 33 bp, Homo sapiens
agatcattgttgagtacgctgtcttgtatctca

SEQ ID NO: 26500 - DNA, 33 bp, Homo sapiens
ttgtatacctataaaaatgtacattggcacaaa

SEQ ID NO: 26501 - DNA, 51 bp, Homo sapiens
aaccatgatctagtatatagcttatctaggaatactgtttacattatcata

SEQ ID NO: 26502 - DNA, 33 bp, Homo sapiens
cctgggatctaaactccaaaacatatcctgaac

SEQ ID NO: 26503 - DNA, 33 bp, Homo sapiens
aaattatacacgtaacacacagtaagcattaaa

SEQ ID NO: 26504 - DNA, 33 bp, Homo sapiens
aaacaggcctaggaacacagaccaaagggcaaa

SEQ ID NO: 26505 - DNA, 33 bp, Homo sapiens
atcttgaatttttttccactagttggtgaaaaa

SEQ ID NO: 26506 - DNA, 33 bp, Homo sapiens
tcaacaaaggtcaatacgaaggacgtcccaaat

SEQ ID NO: 26507 - DNA, 33 bp, Homo sapiens
cattctccctgttggaaggtggcaatagttgct

SEQ ID NO: 26508 - DNA, 33 bp, Homo sapiens
gcagtcaaatgagtcaacctcatactaactgct

SEQ ID NO: 26509 - DNA, 33 bp, Homo sapiens
gtgttgaagtaaaactcacattttgtgactctg

SEQ ID NO: 26510 - DNA, 33 bp, Homo sapiens
ataagtgtttatcatccgagaactgattaaata

SEQ ID NO: 26511 - DNA, 33 bp, Homo sapiens
ataacactgccatgtaaaaaggtaaactgctga

SEQ ID NO: 26512 - DNA, 33 bp, Homo sapiens
ggacacttggtaatacaccttggaacttcagtg

SEQ ID NO: 26513 - DNA, 51 bp, Homo sapiens
aaaggacaatcgaagcaactcttgaaacattctaaggttaaaaatattcag

SEQ ID NO: 26514 - DNA, 33 bp, Homo sapiens
gggctaaatggcctacacaaagccacaccgctg

SEQ ID NO: 26515 - DNA, 33 bp, Homo sapiens
tagtttccaacttccaatgcagcagttatttaa

SEQ ID NO: 26516 - DNA, 33 bp, Homo sapiens
cagccttccctcctccaggaagattctaggtct

SEQ ID NO: 26517 - DNA, 33 bp, Homo sapiens
agctattgactttagccgaatatgaattatgcc

SEQ ID NO: 26518 - DNA, 33 bp, Homo sapiens
agtgtctaggtaaagcaccattttttggagtgg

SEQ ID NO: 26519 - DNA, 33 bp, Homo sapiens
ctagctcaggccagaaccttatcactatcatca

SEQ ID NO: 26520 - DNA, 33 bp, Homo sapiens
ctgactatggaaagccaaagggcattaaagctt

SEQ ID NO: 26521 - DNA, 33 bp, Homo sapiens
aggtactatgttctacagattttacatgtatta

SEQ ID NO: 26522 - DNA, 33 bp, Homo sapiens
tgattggtggaagtgacgtcatgtatggtaaac

SEQ ID NO: 26523 - DNA, 33 bp, Homo sapiens
cttctaaaatctccacagacttaactagggccc

SEQ ID NO: 26524 - DNA, 51 bp, Homo sapiens
caattatctctaagggaaagaatccaatcataagaaagtattaatagcacc

SEQ ID NO: 26525 - DNA, 33 bp, Homo sapiens
gcctccacttcttcacgctgaccttgcttttat

SEQ ID NO: 26526 - DNA, 51 bp, Homo sapiens
gcccagttcttacctgttagcccaaactataagcacatggaaattactatt

SEQ ID NO: 26527 - DNA, 33 bp, Homo sapiens
aggttcttcagaggacactatcgccatttgggg

SEQ ID NO: 26528 - DNA, 33 bp, Homo sapiens
ttttgaggactccataagtaacaaataggttgg

SEQ ID NO: 26529 - DNA, 33 bp, Homo sapiens
aaaattgatactttacagcttgacacatggttt

SEQ ID NO: 26530 - DNA, 33 bp, Homo sapiens
ttaatgtggaaaggcacccgtattaattttcta

SEQ ID NO: 26531 - DNA, 33 bp, Homo sapiens
gccacatcagatgtcccaaaaaggccctgggct

SEQ ID NO: 26532 - DNA, 33 bp, Homo sapiens
tggtgggttgtcttccgcagctttaggtttatt

SEQ ID NO: 26533 - DNA, 33 bp, Homo sapiens
actaggaaaaataagaatagcaccagagggaac

SEQ ID NO: 26534 - DNA, 33 bp, Homo sapiens
ctgatgtgtgttcacaaaagtacaagagcctat

SEQ ID NO: 26535 - DNA, 33 bp, Homo sapiens
atctgagaggattagaaggaacagtgcccagtg

SEQ ID NO: 26536 - DNA, 33 bp, Homo sapiens
ggctaagtatactggaatcatttgtaagttgct

SEQ ID NO: 26537 - DNA, 33 bp, Homo sapiens
aatctgatagctgtagcattttcctaaactgtt

SEQ ID NO: 26538 - DNA, 33 bp, Homo sapiens
tatcggtttatttgtcaatatctctaccagtat

SEQ ID NO: 26539 - DNA, 33 bp, Homo sapiens
aaaacctaattggaaccggctcgagaaagaaca

SEQ ID NO: 26540 - DNA, 33 bp, Homo sapiens
tagcaaggtaaaggtacgttgtatgttaagtta

SEQ ID NO: 26541 - DNA, 33 bp, Homo sapiens
acatcccttaaagatacagcaataaggaagcca

SEQ ID NO: 26542 - DNA, 33 bp, Homo sapiens
acattcttgggacttaacccagacctactgaat

SEQ ID NO: 26543 - DNA, 33 bp, Homo sapiens
gacaatcatgactctcaattttccttccttccc

SEQ ID NO: 26544 - DNA, 33 bp, Homo sapiens
cactgatctcttggaactaagttaaaaggctaa

SEQ ID NO: 26545 - DNA, 33 bp, Homo sapiens
ttgttttatgcaattacaaggtttgcttcatga

SEQ ID NO: 26546 - DNA, 33 bp, Homo sapiens
atcaggaatcacaggaaaaataaggctttgatt

SEQ ID NO: 26547 - DNA, 33 bp, Homo sapiens
ttactaaatattcctaaaactctagatggtatt

SEQ ID NO: 26548 - DNA, 33 bp, Homo sapiens
tttggggttttgacacaacaattgaccagcatt

SEQ ID NO: 26549 - DNA, 51 bp, Homo sapiens
ataaatgacaaataagctaatatagccaggcattttattagttgcaatttt

SEQ ID NO: 26550 - DNA, 51 bp, Homo sapiens
ctaacagctgtcctctgtattaaggccatctttagcttgtcttgcaaatac

SEQ ID NO: 26551 - DNA, 51 bp, Homo sapiens
ttattgagtagctagactcagagtcaaggccatttggaaacagttgcttgt

SEQ ID NO: 26552 - DNA, 33 bp, Homo sapiens
acagaagatgagtgacaatttgccatattatct

SEQ ID NO: 26553 - DNA, 33 bp, Homo sapiens
ttgctctaccttttccaacataatgaatctgtg

SEQ ID NO: 26554 - DNA, 33 bp, Homo sapiens
acattcaggatctagcccaggcaggtcgggaag

SEQ ID NO: 26555 - DNA, 33 bp, Homo sapiens
tgacagatgatgcccacgtgggactcttctcta

SEQ ID NO: 26556 - DNA, 51 bp, Homo sapiens
ctttcctacctcgggtctctcctaactctaggttcacaccatatcccatca

SEQ ID NO: 26557 - DNA, 51 bp, Homo sapiens
caaacattatggtaaaagagagtcactaatattttccatgccaaatgtctt

SEQ ID NO: 26558 - DNA, 51 bp, Homo sapiens
acctaatagaagatgaagatccttacaggaaacggttctcacaatacataa

SEQ ID NO: 26559 - DNA, 33 bp, Homo sapiens
ttgacaggctaagaagacagttatggtataggc

SEQ ID NO: 26560 - DNA, 33 bp, Homo sapiens
aacagaacagggtaccagcgaagtccaaggaag

SEQ ID NO: 26561 - DNA, 33 bp, Homo sapiens
ggcccctgatgagggaacccttttggcagactc

SEQ ID NO: 26562 - DNA, 51 bp, Homo sapiens
tttatttcagtatttatcacttgaaataggaaaaaatagcaataattggaa

SEQ ID NO: 26563 - DNA, 33 bp, Homo sapiens
tcatggtctgcagtaactgttttaaactgtttc

SEQ ID NO: 26564 - DNA, 33 bp, Homo sapiens
taaaactggcttgacaaataaactcctttgcat

SEQ ID NO: 26565 - DNA, 33 bp, Homo sapiens
gccattagccagcattcaatcaaaagaccatgt

SEQ ID NO: 26566 - DNA, 51 bp, Homo sapiens
cttggttagaattgagtacttgagaaactatatgaataattgcttgttgaa

SEQ ID NO: 26567 - DNA, 33 bp, Homo sapiens
ccagggaagagggaatgatagggatacagaaga

SEQ ID NO: 26568 - DNA, 33 bp, Homo sapiens
tctggaaagtatcccactgcattaagaaaatct

SEQ ID NO: 26569 - DNA, 33 bp, Homo sapiens
tgaaggtgccagttgagcacaggatgaccaccg

SEQ ID NO: 26570 - DNA, 33 bp, Homo sapiens
tttattatagttgccacgtattcttgctgcatg

SEQ ID NO: 26571 - DNA, 33 bp, Homo sapiens
gggccaacgaggaaacaaaatgggcagcccaga

SEQ ID NO: 26572 - DNA, 33 bp, Homo sapiens
ctctgtttcatcaccagtaataagagtaataat

SEQ ID NO: 26573 - DNA, 33 bp, Homo sapiens
aaaacaggagaaggacacaatttgaagaaatca

SEQ ID NO: 26574 - DNA, 33 bp, Homo sapiens
cgataatgttagtcagaaccttatgaactctct

SEQ ID NO: 26575 - DNA, 33 bp, Homo sapiens
aaagagcttatttatacggaatgctaatttctt

SEQ ID NO: 26576 - DNA, 33 bp, Homo sapiens
atttttctcaggaaaccgatgaggtctttggat

SEQ ID NO: 26577 - DNA, 33 bp, Homo sapiens
acagaaagccaacacgaagacaataattatcac

SEQ ID NO: 26578 - DNA, 33 bp, Homo sapiens
atggacatcctcaaaaagctcattgtcttatgg

SEQ ID NO: 26579 - DNA, 33 bp, Homo sapiens
actctgatttaaaaccaacacagcatatcagca

SEQ ID NO: 26580 - DNA, 33 bp, Homo sapiens
tgagttcatcttgaccagggggtctgacctttt

SEQ ID NO: 26581 - DNA, 51 bp, Homo sapiens
acatggcatcaaattctgagtaacaacctaagagacaagtgggcaggcagg

SEQ ID NO: 26582 - DNA, 51 bp, Homo sapiens
tattgaaacagtatagatcttctcgccactgcagtaccctaataccattta

SEQ ID NO: 26583 - DNA, 33 bp, Homo sapiens
tgggttcagacaacaaagctatagaatgtgctt

SEQ ID NO: 26584 - DNA, 33 bp, Homo sapiens
cagctaccgttgaaaccctttcagaggcagtgc

SEQ ID NO: 26585 - DNA, 33 bp, Homo sapiens
accagcattagggctacacaatgtcctaaatag

SEQ ID NO: 26586 - DNA, 33 bp, Homo sapiens
tttgtagatgggacctcaaaagtctgtattttc

SEQ ID NO: 26587 - DNA, 33 bp, Homo sapiens
tttaccttcacgggtcaagggcaaatggaaggt

SEQ ID NO: 26588 - DNA, 51 bp, Homo sapiens
ttatagaagggaaacttgctagatacaaaagttgcttgtttataattattc

SEQ ID NO: 26589 - DNA, 33 bp, Homo sapiens
cccagtggacatttaccccatcttcaggtgttt

SEQ ID NO: 26590 - DNA, 33 bp, Homo sapiens
gaccatgactgttatacgcctttaatcctccca

SEQ ID NO: 26591 - DNA, 33 bp, Homo sapiens
tctatcccacttcacactgctttataagcaaaa

SEQ ID NO: 26592 - DNA, 33 bp, Homo sapiens
ggataaatttctcccactgaatgcagaatagta

SEQ ID NO: 26593 - DNA, 33 bp, Homo sapiens
ctctgttgctgagatacacagtattaaccatta

SEQ ID NO: 26594 - DNA, 33 bp, Homo sapiens
tttattgagctactacaaagttaaacaatatgc

SEQ ID NO: 26595 - DNA, 33 bp, Homo sapiens
catgtggatacatagaagtttaaatttatataa

SEQ ID NO: 26596 - DNA, 33 bp, Homo sapiens
atgtgcattaggttgccgaaaagattaaatgag

SEQ ID NO: 26597 - DNA, 33 bp, Homo sapiens
tacattccccatattccagtagattgttttatc

SEQ ID NO: 26598 - DNA, 33 bp, Homo sapiens
cggtagggccactttgcaggacagcttggcagt

SEQ ID NO: 26599 - DNA, 33 bp, Homo sapiens
cacatgactgtaaacacataaggaagtggaatc

SEQ ID NO: 26600 - DNA, 33 bp, Homo sapiens
gggtgcctgggaaagaataaaagtgctgaggaa

SEQ ID NO: 26601 - DNA, 51 bp, Homo sapiens
tcataaacatgcctgtttatttgtccatataactgctttttatatcattat

SEQ ID NO: 26602 - DNA, 51 bp, Homo sapiens
gtcatatagctcttttgcctgactaaaataataaattggtatagttagcag

SEQ ID NO: 26603 - DNA, 51 bp, Homo sapiens
gttttctgaaaactctaaaaatcagactacattctttatatgccattgtga

SEQ ID NO: 26604 - DNA, 33 bp, Homo sapiens
cattttccatattaagaacctaagacctacaga

SEQ ID NO: 26605 - DNA, 51 bp, Homo sapiens
tctagaaaaggcaagcttattgataaagagagcaaatcagtagttgcctag

SEQ ID NO: 26606 - DNA, 33 bp, Homo sapiens
acacctcttgactccaaagggaagccacaagtt

SEQ ID NO: 26607 - DNA, 33 bp, Homo sapiens
tcttcccgtttgtacacacccagcctttaaatt

SEQ ID NO: 26608 - DNA, 33 bp, Homo sapiens
gaatatgctgagtttcactgggagccaggaagt

SEQ ID NO: 26609 - DNA, 51 bp, Homo sapiens
caagaaaagctgctatattttctccgaggtacaatgcctatgtcatatgat

SEQ ID NO: 26610 - DNA, 33 bp, Homo sapiens
aaacttgtacactgaagtctataaaactttggt

SEQ ID NO: 26611 - DNA, 33 bp, Homo sapiens
acgtaatttgcacatcgcagggctgataaggag

SEQ ID NO: 26612 - DNA, 33 bp, Homo sapiens
tgacagaatatttccaactttcactccacagtt

SEQ ID NO: 26613 - DNA, 33 bp, Homo sapiens
gatccccccacttcaaccttgcaaagaactgga

SEQ ID NO: 26614 - DNA, 33 bp, Homo sapiens
aaaagaatatgaatgcagactggtcttagctac

SEQ ID NO: 26615 - DNA, 33 bp, Homo sapiens
gcaaataatgaaaagaagtcaagttaagtgatt

SEQ ID NO: 26616 - DNA, 33 bp, Homo sapiens
ggattcctgaaattcaatcatgggtatctgagt

SEQ ID NO: 26617 - DNA, 33 bp, Homo sapiens
gtttaatagaccttaacaacaacagcgaaacat

SEQ ID NO: 26618 - DNA, 33 bp, Homo sapiens
tgattagtgattttcaccattttttcatatgct

SEQ ID NO: 26619 - DNA, 51 bp, Homo sapiens
tgtcatccagttgccggaattcatactaggcattttcgcaagtataatctt

SEQ ID NO: 26620 - DNA, 33 bp, Homo sapiens
aactccacacacatgacaatgacaatgtggtaa

SEQ ID NO: 26621 - DNA, 33 bp, Homo sapiens
gatttttgctttacaaaagttcatacacatttt

SEQ ID NO: 26622 - DNA, 33 bp, Homo sapiens
aactgagagttctggacaaaattaatgacctgt

SEQ ID NO: 26623 - DNA, 33 bp, Homo sapiens
attcctcaaattctggccaaaatagaatttttc

SEQ ID NO: 26624 - DNA, 33 bp, Homo sapiens
tctcttagctactacactgattgtcctatgact

SEQ ID NO: 26625 - DNA, 33 bp, Homo sapiens
tctggaacttcaactacacatatgtcagacctt

SEQ ID NO: 26626 - DNA, 33 bp, Homo sapiens
acttatagttggaatagtatactcagcaaaagc

SEQ ID NO: 26627 - DNA, 33 bp, Homo sapiens
aaaagttcagagcaagactagaaataagagtta

SEQ ID NO: 26628 - DNA, 33 bp, Homo sapiens
cagcacatctgctttaaactgactgactgacct

SEQ ID NO: 26629 - DNA, 33 bp, Homo sapiens
aactagtccaaagaaacttctggtgactgttaa

SEQ ID NO: 26630 - DNA, 33 bp, Homo sapiens
aaaccattcattccacggccttttcactgtcca

SEQ ID NO: 26631 - DNA, 33 bp, Homo sapiens
ttagacctgtttaaaactctaaagcacatgtta

SEQ ID NO: 26632 - DNA, 33 bp, Homo sapiens
atgagaagaatttcacgggccacctatcctatt

SEQ ID NO: 26633 - DNA, 51 bp, Homo sapiens
cattcatattctttttccattttaaaacccagcttaatactttggaatgta

SEQ ID NO: 26634 - DNA, 51 bp, Homo sapiens
caggactgactgggcttggatccagaacatgtatggtacgtgtatgttttt

SEQ ID NO: 26635 - DNA, 33 bp, Homo sapiens
aaaccttttggaaacaaggctcaatgtctcaga

SEQ ID NO: 26636 - DNA, 33 bp, Homo sapiens
actcagtaaatagtcccgaacggaagagaaaat

SEQ ID NO: 26637 - DNA, 33 bp, Homo sapiens
ttaaactgccatagtacgcactgttatgactga

SEQ ID NO: 26638 - DNA, 33 bp, Homo sapiens
agtcagtctggaaaggaaaaccaacccattttg

SEQ ID NO: 26639 - DNA, 33 bp, Homo sapiens
tgtcctctttgcctataaagtgcctacttactc

SEQ ID NO: 26640 - DNA, 33 bp, Homo sapiens
aaaaccaacccgaacaatacaatgatttcatcc

SEQ ID NO: 26641 - DNA, 33 bp, Homo sapiens
tcttgcaatccaagcgaagagagaagactggct

SEQ ID NO: 26642 - DNA, 33 bp, Homo sapiens
aaattccttcccccaacacagcctgcaattttt

SEQ ID NO: 26643 - DNA, 33 bp, Homo sapiens
ggatcgggtgctcatgaacaagtgactggctta

SEQ ID NO: 26644 - DNA, 33 bp, Homo sapiens
tcaaattagagcctgaaaagtctaagcaagaac

SEQ ID NO: 26645 - DNA, 33 bp, Homo sapiens
ctgcaatgaagaagcgcagattttgacaatagt

SEQ ID NO: 26646 - DNA, 33 bp, Homo sapiens
aatatgcattggtttacggacaattgtatagtt

SEQ ID NO: 26647 - DNA, 33 bp, Homo sapiens
ttttagaaactatgaccaggtaagaggtcggat

SEQ ID NO: 26648 - DNA, 33 bp, Homo sapiens
actagtgtaacactaaaatgctatgattaacca

SEQ ID NO: 26649 - DNA, 33 bp, Homo sapiens
atgcctcaggttcccacgctaaatcaaaattct

SEQ ID NO: 26650 - DNA, 33 bp, Homo sapiens
taacaacaggatctgccctaattctaataggtc

SEQ ID NO: 26651 - DNA, 33 bp, Homo sapiens
cagagaacaagcaaaactccacctaagcttaaa

SEQ ID NO: 26652 - DNA, 33 bp, Homo sapiens
tgggcttcaggtgaaacgatgccatccacacat

SEQ ID NO: 26653 - DNA, 33 bp, Homo sapiens
taattgctgtatactacgactgcttttctccat

SEQ ID NO: 26654 - DNA, 33 bp, Homo sapiens
ggacagagaagcgctaagtctttacgtatcttc

SEQ ID NO: 26655 - DNA, 33 bp, Homo sapiens
gttcaaggcagaaaaaccagttcttctaaggac

SEQ ID NO: 26656 - DNA, 33 bp, Homo sapiens
agccttagttccatcacctgtaatatgagggta

SEQ ID NO: 26657 - DNA, 33 bp, Homo sapiens
aagaaaggacatcttaaaaatgaattcctgaat

SEQ ID NO: 26658 - DNA, 33 bp, Homo sapiens
tcagacactgtagaataagacagcaggcagagt

SEQ ID NO: 26659 - DNA, 33 bp, Homo sapiens
tgtgtagatttgtagacaaaagatgatgtctga

SEQ ID NO: 26660 - DNA, 33 bp, Homo sapiens
tctggaaaacactagacaagctcaagtgtgaca

SEQ ID NO: 26661 - DNA, 33 bp, Homo sapiens
aaatctgtacccccacccaaattagcatttgtt

SEQ ID NO: 26662 - DNA, 33 bp, Homo sapiens
acttttgaggtatccaatcaggtattttgcaga

SEQ ID NO: 26663 - DNA, 33 bp, Homo sapiens
attgacagcatcaaaacggagggaacctggatc

SEQ ID NO: 26664 - DNA, 33 bp, Homo sapiens
tggtagatttcaactaacaatgtcctggtaaac

SEQ ID NO: 26665 - DNA, 51 bp, Homo sapiens
tgctaagagagtatagagggtgtgcaataaactaaatctgcaggtattaag

SEQ ID NO: 26666 - DNA, 51 bp, Homo sapiens
tgagatgatttggagatatatagaccatcaataatttttacagactctaga

SEQ ID NO: 26667 - DNA, 51 bp, Homo sapiens
aactacaaatataataacatgttaacacaatcttcaggatagttactgggt

SEQ ID NO: 26668 - DNA, 51 bp, Homo sapiens
attctttagccttttcttaaagtaacctgctaagtatttacaggttaattt

SEQ ID NO: 26669 - DNA, 51 bp, Homo sapiens
ttccttgaccctaataatgtatcaccctgaattgctatttttatttatgct

SEQ ID NO: 26670 - DNA, 33 bp, Homo sapiens
tacaaaagcttagatacgaggagacttcaaaaa

SEQ ID NO: 26671 - DNA, 33 bp, Homo sapiens
attttctttcctcagacgttccttatacttatg

SEQ ID NO: 26672 - DNA, 33 bp, Homo sapiens
actagctccaatctgcacattgtgagaaatttt

SEQ ID NO: 26673 - DNA, 33 bp, Homo sapiens
tgttcttatagttttacgcaatttttcaacaag

SEQ ID NO: 26674 - DNA, 33 bp, Homo sapiens
gctttgtatgggacacagatgatgctgagcgct

SEQ ID NO: 26675 - DNA, 51 bp, Homo sapiens
cagcagttctgtgatacataattcagtctctatgtcccatcaattcctata

SEQ ID NO: 26676 - DNA, 33 bp, Homo sapiens
tttcagttcagactacacagtatttaataaata

SEQ ID NO: 26677 - DNA, 33 bp, Homo sapiens
tctgtcagtactgtaaaattgtcaggaaaaata

SEQ ID NO: 26678 - DNA, 33 bp, Homo sapiens
aatctgtagggtaccaacaagcataaaaacaca

SEQ ID NO: 26679 - DNA, 33 bp, Homo sapiens
tgtgcaaatgtaagccaagtttttcataaccag

SEQ ID NO: 26680 - DNA, 33 bp, Homo sapiens
aacaattgtggctcaccaccggatgctggctaa

SEQ ID NO: 26681 - DNA, 33 bp, Homo sapiens
caaacttctgactccaaaactagtgatacagac

SEQ ID NO: 26682 - DNA, 33 bp, Homo sapiens
cagctctccagggacagaatcttaagtactgac

SEQ ID NO: 26683 - DNA, 33 bp, Homo sapiens
ctttagccaataggtaaatctcttgtaggcagt

SEQ ID NO: 26684 - DNA, 33 bp, Homo sapiens
atgttctagacaagtgaagccaggttaaatcac

SEQ ID NO: 26685 - DNA, 33 bp, Homo sapiens
gtatctcagctatccaaaaccttaaacccacag

SEQ ID NO: 26686 - DNA, 33 bp, Homo sapiens
taaacaagcctggatgaacttcagccttacctt

SEQ ID NO: 26687 - DNA, 51 bp, Homo sapiens
gaacagtaacattttgaaagcagtccttcctttctgagaagttggtctcaa

SEQ ID NO: 26688 - DNA, 33 bp, Homo sapiens
tgttgaatacctcctacgtttcagacaaatatt

SEQ ID NO: 26689 - DNA, 51 bp, Homo sapiens
ccacactgatgagtagggaatgcaaacatgctgaaggcaggatggttcaaa

SEQ ID NO: 26690 - DNA, 33 bp, Homo sapiens
tactttttcatagtaacctaacaattagtcaaa

SEQ ID NO: 26691 - DNA, 33 bp, Homo sapiens
atgaacaaggtccatccataaaatgtctcaaat

SEQ ID NO: 26692 - DNA, 33 bp, Homo sapiens
aattacattgcacacaggggagaaaaatggata

SEQ ID NO: 26693 - DNA, 33 bp, Homo sapiens
agtggcagcagtgaaaagctaattcaaacaggt

SEQ ID NO: 26694 - DNA, 33 bp, Homo sapiens
gttcagggactcccagaaataaccaggaccatt

SEQ ID NO: 26695 - DNA, 33 bp, Homo sapiens
ggtccaaatatattcccccaatttctcggttcc

SEQ ID NO: 26696 - DNA, 33 bp, Homo sapiens
cctgttttggataaagaattaagttcagagaag

SEQ ID NO: 26697 - DNA, 51 bp, Homo sapiens
aaaatgaagtatctcctatcttctccgaattctctcaagcagcactcaaag

SEQ ID NO: 26698 - DNA, 51 bp, Homo sapiens
cactttagtctttgtttagtacagacgaaatccaagtgataataggtgggt

SEQ ID NO: 26699 - DNA, 33 bp, Homo sapiens
taggtttgtcttacttaaaaatgcacactctta

SEQ ID NO: 26700 - DNA, 33 bp, Homo sapiens
ggctacaagaattatacatgatgtcgcagatgt

SEQ ID NO: 26701 - DNA, 33 bp, Homo sapiens
tttcagtggctagatacgccttgactgtgagct

SEQ ID NO: 26702 - DNA, 33 bp, Homo sapiens
gactggattgtatttgaaaagcctacctctagg

SEQ ID NO: 26703 - DNA, 33 bp, Homo sapiens
gtgttcttgtatcaggcaaagcctcctccccac

SEQ ID NO: 26704 - DNA, 33 bp, Homo sapiens
aatgagttatatacacacaatcttggctagtct

SEQ ID NO: 26705 - DNA, 33 bp, Homo sapiens
agaaattctaaatgtgaacctaaatctctgctt

SEQ ID NO: 26706 - DNA, 51 bp, Homo sapiens
ttcctctacagcaatctcattcctaaatatgacttctggtttcaacaacag

SEQ ID NO: 26707 - DNA, 51 bp, Homo sapiens
acttatgcatattgcttagtgccaacgggactcttagaaatgtatttgaga

SEQ ID NO: 26708 - DNA, 51 bp, Homo sapiens
aaactttaaactatattttgacaaactatttacctggcagaattgagttta

SEQ ID NO: 26709 - DNA, 33 bp, Homo sapiens
tgtagcgtgatggtgccaagataaaatagtagc

SEQ ID NO: 26710 - DNA, 33 bp, Homo sapiens
ctcctcagcaccaggtaaagattaggaattgca

SEQ ID NO: 26711 - DNA, 33 bp, Homo sapiens
gtcttccaagtagtaaccccctgcctcttgatc

SEQ ID NO: 26712 - DNA, 33 bp, Homo sapiens
cgaaattattaaaagactactgactagatcaat

SEQ ID NO: 26713 - DNA, 33 bp, Homo sapiens
cccaacagcagtgcaaactcccatgtatggagt

SEQ ID NO: 26714 - DNA, 33 bp, Homo sapiens
gtcctaatttttgcaaagacagggatattttga

SEQ ID NO: 26715 - DNA, 33 bp, Homo sapiens
aggtcacagagcttagcatgtagtgtggtaatc

SEQ ID NO: 26716 - DNA, 33 bp, Homo sapiens
tcatggttcttgtatcaaagtacaattgaacat

SEQ ID NO: 26717 - DNA, 51 bp, Homo sapiens
cataactgctggtcatggaagattaagtttgtttatcccagttctcccatt

SEQ ID NO: 26718 - DNA, 33 bp, Homo sapiens
ctgcacagtttcacctaacccatgcttgaacac

SEQ ID NO: 26719 - DNA, 33 bp, Homo sapiens
aggcatctttatatccaccgccatagtccaccc

SEQ ID NO: 26720 - DNA, 33 bp, Homo sapiens
acttaaatatgttggactcacctatgagcaatc

SEQ ID NO: 26721 - DNA, 33 bp, Homo sapiens
ttatgttcagaaacaacgtcctctgctatatca

SEQ ID NO: 26722 - DNA, 33 bp, Homo sapiens
cttctggcctgtactaagtgttaggaaatgtta

SEQ ID NO: 26723 - DNA, 33 bp, Homo sapiens
aaatgattaactgcacactaagagaatacattt

SEQ ID NO: 26724 - DNA, 33 bp, Homo sapiens
tttggaagctctagagaaggatctgtttccttg

SEQ ID NO: 26725 - DNA, 33 bp, Homo sapiens
tacttgtttggtgaaacaggtccatctctcaca

SEQ ID NO: 26726 - DNA, 33 bp, Homo sapiens
ctagcatgtagcagaaccaagattagaacatag

SEQ ID NO: 26727 - DNA, 33 bp, Homo sapiens
tcctgcagaacctctaagtagaatttgaagagg

SEQ ID NO: 26728 - DNA, 33 bp, Homo sapiens
agccactatgcccaacaaagacagtataatatt

SEQ ID NO: 26729 - DNA, 33 bp, Homo sapiens
aggaatgttctttacaagcgactttttgcacaa

SEQ ID NO: 26730 - DNA, 33 bp, Homo sapiens
gatgctgtttctgaaactactgatatgatcata

SEQ ID NO: 26731 - DNA, 33 bp, Homo sapiens
tttagaccatcaacgacagatgtgtagtcgggt

SEQ ID NO: 26732 - DNA, 33 bp, Homo sapiens
gtccaatcaaaaacaccgcctatcatgttagct

SEQ ID NO: 26733 - DNA, 33 bp, Homo sapiens
accctgccttaaccaagcagtgaaggttaacat

SEQ ID NO: 26734 - DNA, 33 bp, Homo sapiens
tcacattcaaaccacaatggaactcaacctagt

SEQ ID NO: 26735 - DNA, 33 bp, Homo sapiens
agaaaaagaggccatactaaaaaatctagactt

SEQ ID NO: 26736 - DNA, 33 bp, Homo sapiens
aagctcatagcagtaaagaaagcaaaaagaagt

SEQ ID NO: 26737 - DNA, 33 bp, Homo sapiens
tataaagtctgttacaagtttatcaaaaaatga

SEQ ID NO: 26738 - DNA, 33 bp, Homo sapiens
gggaagactttcaagacaacagtcaacagaaaa

SEQ ID NO: 26739 - DNA, 33 bp, Homo sapiens
ttaatgctgtgagttaagtatacaagatgagta

SEQ ID NO: 26740 - DNA, 33 bp, Homo sapiens
atcatacaagatacaccaagcatgtcaggcaga

SEQ ID NO: 26741 - DNA, 33 bp, Homo sapiens
agatgggttctgtatgaaaaacggtcctggatg

SEQ ID NO: 26742 - DNA, 51 bp, Homo sapiens
atatagagttcagatgagataagagacagcattttatagccctgtgaatgt

SEQ ID NO: 26743 - DNA, 33 bp, Homo sapiens
ggatttgtttgccaaaagtgatatcctaaatac

SEQ ID NO: 26744 - DNA, 33 bp, Homo sapiens
tacactacttcacgaaaaaattgcctcattcag

SEQ ID NO: 26745 - DNA, 33 bp, Homo sapiens
gtgtggaagattgatcacagagtagtccacacg

SEQ ID NO: 26746 - DNA, 33 bp, Homo sapiens
tgctttggataaccgacaagaagttaaaagaaa

SEQ ID NO: 26747 - DNA, 33 bp, Homo sapiens
tcaggtcttactattaccatcttcaagaaaagt

SEQ ID NO: 26748 - DNA, 33 bp, Homo sapiens
ccagtaaaagtttcaggagtaggccacaaagct

SEQ ID NO: 26749 - DNA, 33 bp, Homo sapiens
catgccatcagtgggaagtggtaaattctgtcc

SEQ ID NO: 26750 - DNA, 33 bp, Homo sapiens
tgtgttgctactaatcacttcatagctccttac

SEQ ID NO: 26751 - DNA, 33 bp, Homo sapiens
ctttgtcagcatttccaagacttttatcattaa

SEQ ID NO: 26752 - DNA, 51 bp, Homo sapiens
tttagatatgactttacccataggaccatttctttccaaggaaacgttaag

SEQ ID NO: 26753 - DNA, 33 bp, Homo sapiens
aaagtgccaactcagaaatggagtgactgtttg

SEQ ID NO: 26754 - DNA, 33 bp, Homo sapiens
caatggaggctttcacacattagaaaaagaagt

SEQ ID NO: 26755 - DNA, 33 bp, Homo sapiens
tagcttccagccatggaaaagacttgtgcagaa

SEQ ID NO: 26756 - DNA, 33 bp, Homo sapiens
acaaggatctcagaaaactaaaataagatgaga

SEQ ID NO: 26757 - DNA, 33 bp, Homo sapiens
gcctctaggacatataaaatgcaatatttgact

SEQ ID NO: 26758 - DNA, 33 bp, Homo sapiens
accagttggatcatgacaaaaaagatacaacat

SEQ ID NO: 26759 - DNA, 33 bp, Homo sapiens
agtgactgaatgaacactactctatcaattaaa

SEQ ID NO: 26760 - DNA, 33 bp, Homo sapiens
tgggtcacctttctcaaccagttactaaggaag

SEQ ID NO: 26761 - DNA, 33 bp, Homo sapiens
tggaacacttgtgaaactggcagtccagagaaa

SEQ ID NO: 26762 - DNA, 33 bp, Homo sapiens
gaatacttgcaatgtacctttgaagagtacttg

SEQ ID NO: 26763 - DNA, 33 bp, Homo sapiens
ggaagaaactaccaaacgtatcacgcccaaagc

SEQ ID NO: 26764 - DNA, 33 bp, Homo sapiens
gagccatttttagtctaaagcaagaatgtcagt

SEQ ID NO: 26765 - DNA, 33 bp, Homo sapiens
tccttgggttcaaagcccagcaagatactctgg

SEQ ID NO: 26766 - DNA, 33 bp, Homo sapiens
cagtactaatttcagaagtgctgccttgctatt

SEQ ID NO: 26767 - DNA, 33 bp, Homo sapiens
gagtgtctgtgaaatgaaagagacgattcattc

SEQ ID NO: 26768 - DNA, 33 bp, Homo sapiens
cacaccaagcaagtgacgaagtttattgcaatg

SEQ ID NO: 26769 - DNA, 33 bp, Homo sapiens
cttccattggttcctgaagccatgtcctccaca

SEQ ID NO: 26770 - DNA, 33 bp, Homo sapiens
cttgctcctgctgaatgacagggtatttatcta

SEQ ID NO: 26771 - DNA, 51 bp, Homo sapiens
aggaacagcagggaatggtaagtgaataggaagttcaggctaagtatcaga

SEQ ID NO: 26772 - DNA, 33 bp, Homo sapiens
ggggtgaagaaatgctcactcgccaaaaaaggc

SEQ ID NO: 26773 - DNA, 51 bp, Homo sapiens
cattcacagtcacatctgacataatcaaggaatatttctactcatcttccc

SEQ ID NO: 26774 - DNA, 33 bp, Homo sapiens
gcgctctcagcaggacagaaatgacgaataact

SEQ ID NO: 26775 - DNA, 33 bp, Homo sapiens
ctaataagtgttggtacggatgtagagaaattg

SEQ ID NO: 26776 - DNA, 33 bp, Homo sapiens
ctattggctggtaatcaatatgtacctcatgca

SEQ ID NO: 26777 - DNA, 33 bp, Homo sapiens
gtagtttatgctaacaatgtcatctgtgaatgc

SEQ ID NO: 26778 - DNA, 33 bp, Homo sapiens
acctggccattttttcacagcatgggactcctc

SEQ ID NO: 26779 - DNA, 33 bp, Homo sapiens
aactgttaaagggacaatgacgatgataatgtt

SEQ ID NO: 26780 - DNA, 33 bp, Homo sapiens
ctaagaatagtcaagacgtatatgaagtatgtg

SEQ ID NO: 26781 - DNA, 33 bp, Homo sapiens
aaagccatatttggagaagagtgaagttcctag

SEQ ID NO: 26782 - DNA, 33 bp, Homo sapiens
tcaggtttttcatttggaaagatctcagggctt

SEQ ID NO: 26783 - DNA, 33 bp, Homo sapiens
ttagcagaggaggtgcaactcataatagttttt

SEQ ID NO: 26784 - DNA, 33 bp, Homo sapiens
gtgtgaaagtgccttacggacaccctagtggtc

SEQ ID NO: 26785 - DNA, 33 bp, Homo sapiens
tttaattcatatagaaacttgagtcacacaact

SEQ ID NO: 26786 - DNA, 33 bp, Homo sapiens
atttcggaatctgaaaaaaggcttttctacact

SEQ ID NO: 26787 - DNA, 33 bp, Homo sapiens
gtgcaggtggttcatagagtctatactgaagag

SEQ ID NO: 26788 - DNA, 51 bp, Homo sapiens
atttcaaatggcccttggataagtaaaggacgaaacgagagagttaaagca

SEQ ID NO: 26789 - DNA, 51 bp, Homo sapiens
aagggtaaaacattttcagtacacactaagaactacatatttttaagttta

SEQ ID NO: 26790 - DNA, 51 bp, Homo sapiens
tgattaagcttttgcatggtgtagaaaaatggggcacaggtacctggcttg

SEQ ID NO: 26791 - DNA, 33 bp, Homo sapiens
gtaataatggctggacaggaaaaacacagattc

SEQ ID NO: 26792 - DNA, 33 bp, Homo sapiens
tcctgggagcaaaccaccttcaaccacacttct

SEQ ID NO: 26793 - DNA, 33 bp, Homo sapiens
ctcagtttgagccgtaacaaacacggaccagaa

SEQ ID NO: 26794 - DNA, 33 bp, Homo sapiens
gctagtaagagctctacgaaaggcttccccaga

SEQ ID NO: 26795 - DNA, 33 bp, Homo sapiens
gaaaggcaaaggaggaatattagtaatggaggg

SEQ ID NO: 26796 - DNA, 33 bp, Homo sapiens
aatgaatatatagagcaagcaaagaaaggcctt

SEQ ID NO: 26797 - DNA, 51 bp, Homo sapiens
tatttttcctgatcctcttttctacaaagtgtttaaatagagtaaaaaatg

SEQ ID NO: 26798 - DNA, 33 bp, Homo sapiens
cattcagagtcagttaataaaagtagggccagg

SEQ ID NO: 26799 - DNA, 33 bp, Homo sapiens
cactgtaatggagagacctgaagtgagtttact

SEQ ID NO: 26800 - DNA, 51 bp, Homo sapiens
acaatgcaatggtatcaagcatcaacgtgaagggtcaagaggaacctaagt

SEQ ID NO: 26801 - DNA, 51 bp, Homo sapiens
ataaaggaaaccaaataggagtaaaataattagccgaagatcacaaaagta

SEQ ID NO: 26802 - DNA, 33 bp, Homo sapiens
gatttatgctcctgaaccatttctcttgatgaa

SEQ ID NO: 26803 - DNA, 33 bp, Homo sapiens
tattcacctcccagaactgtcattaaaagaaat

SEQ ID NO: 26804 - DNA, 33 bp, Homo sapiens
aaatagtgtgaagaaacgcaggttgaaaaataa

SEQ ID NO: 26805 - DNA, 33 bp, Homo sapiens
ctatactcttcaaaacagcatttggagtaagaa

SEQ ID NO: 26806 - DNA, 33 bp, Homo sapiens
aatctgagtccattaacgatattcaattgtaaa

SEQ ID NO: 26807 - DNA, 33 bp, Homo sapiens
catgttcacatctctgaagttctctcttgtgca

SEQ ID NO: 26808 - DNA, 33 bp, Homo sapiens
aggaataaaagagacaacttaatgattatttaa

SEQ ID NO: 26809 - DNA, 33 bp, Homo sapiens
tgagggctcaaaggcaacttgacattaagaaac

SEQ ID NO: 26810 - DNA, 33 bp, Homo sapiens
gacctaaattcctaagcatggcttcaaaggaac

SEQ ID NO: 26811 - DNA, 33 bp, Homo sapiens
aaggctaacttatttgcattattggctaagggg

SEQ ID NO: 26812 - DNA, 33 bp, Homo sapiens
aggtagcaataaattacgaacaacgtgagtgca

SEQ ID NO: 26813 - DNA, 33 bp, Homo sapiens
tgttaattggttggcactaagtgtggtttgagg

SEQ ID NO: 26814 - DNA, 33 bp, Homo sapiens
cagaatagtgcttgtcgcattatgttctgtatt

SEQ ID NO: 26815 - DNA, 33 bp, Homo sapiens
agagatcttgaagtgaatatcaatacatttctg

SEQ ID NO: 26816 - DNA, 33 bp, Homo sapiens
gaggcaataagttggacgactggaccatgctaa

SEQ ID NO: 26817 - DNA, 33 bp, Homo sapiens
agaggaaagtacataaacttgaaaattgagtga

SEQ ID NO: 26818 - DNA, 33 bp, Homo sapiens
acaatgttttaccttcaagcaaaagtgtcgaaa

SEQ ID NO: 26819 - DNA, 33 bp, Homo sapiens
cattgtgtggattgtcagaaaactagaaagatg

SEQ ID NO: 26820 - DNA, 33 bp, Homo sapiens
aatacatttacttgccaatgtggtgcggtaaga

SEQ ID NO: 26821 - DNA, 33 bp, Homo sapiens
ttgggctttcatccagaagatagcatttattag

SEQ ID NO: 26822 - DNA, 33 bp, Homo sapiens
aaggagatggtaagataataggacttccacatc

SEQ ID NO: 26823 - DNA, 33 bp, Homo sapiens
tttgaaaacatttaaaactagcatggtgaaact

SEQ ID NO: 26824 - DNA, 33 bp, Homo sapiens
ggtcttactgtgagaaatgagaaaccattggag

SEQ ID NO: 26825 - DNA, 33 bp, Homo sapiens
gactacaagcctttaaccccagagcagaccagc

SEQ ID NO: 26826 - DNA, 33 bp, Homo sapiens
aaaatcctaacacttaacaaagagagcagaact

SEQ ID NO: 26827 - DNA, 33 bp, Homo sapiens
attgaaagctctaaaaggtggcaatcattgttt

SEQ ID NO: 26828 - DNA, 33 bp, Homo sapiens
gccaccaagcaaggaaaaagaactggaagagct

SEQ ID NO: 26829 - DNA, 33 bp, Homo sapiens
ggttaagactacagaaacttctaaacaaagtct

SEQ ID NO: 26830 - DNA, 33 bp, Homo sapiens
tttcaaaggaatggccccccagtgagcagcaag

SEQ ID NO: 26831 - DNA, 33 bp, Homo sapiens
agagttgggcgttggaacagaccctccaggtga

SEQ ID NO: 26832 - DNA, 33 bp, Homo sapiens
tcatcaaaacttttcacggtgcccacattgcta

SEQ ID NO: 26833 - DNA, 33 bp, Homo sapiens
cacatatatattgaaccattttgggatgagacg

SEQ ID NO: 26834 - DNA, 33 bp, Homo sapiens
cagtatgtagatgagactccacagattgctaga

SEQ ID NO: 26835 - DNA, 33 bp, Homo sapiens
gtaaagcataaacattaaacaattggggagtaa

SEQ ID NO: 26836 - DNA, 33 bp, Homo sapiens
gtgtttatcctctataaatgtaggtgtagctta

SEQ ID NO: 26837 - DNA, 33 bp, Homo sapiens
gaggcataattaatgaaatagtgccaagattat

SEQ ID NO: 26838 - DNA, 51 bp, Homo sapiens
cattcacagctccctcagggcgccaaaaactttattgccagtagtagttct

SEQ ID NO: 26839 - DNA, 33 bp, Homo sapiens
tggccttcatcacttacgtctgtgtcaacttgt

SEQ ID NO: 26840 - DNA, 33 bp, Homo sapiens
tttttgtctcacaggcaatgtacagaagcaacc

SEQ ID NO: 26841 - DNA, 33 bp, Homo sapiens
tcttcttgaccatccaatgacgtgttttaagac

SEQ ID NO: 26842 - DNA, 51 bp, Homo sapiens
tttgaatttgatcatgaaagttgtaaatttgaagaaggtgaaatttgcatt

SEQ ID NO: 26843 - DNA, 51 bp, Homo sapiens
ttattgcatattttggcactatgcaatagagtatgttgtcaagtaatgatt

SEQ ID NO: 26844 - DNA, 33 bp, Homo sapiens
ctgtgtactagtttgaggtttatggaagaaaaa

SEQ ID NO: 26845 - DNA, 33 bp, Homo sapiens
ctgcagacttcctacactggaaacatcgcattt

SEQ ID NO: 26846 - DNA, 33 bp, Homo sapiens
tgctacaaatggttcacggactctaacgaatgt

SEQ ID NO: 26847 - DNA, 33 bp, Homo sapiens
gggtttcaattaaatacgccattctttggttcc

SEQ ID NO: 26848 - DNA, 33 bp, Homo sapiens
cactttcagagaaaccaaaagtcacagcactac

SEQ ID NO: 26849 - DNA, 51 bp, Homo sapiens
ttggatgatgggaacagcctcctgagaagtacctgaaagtgacatcctcac

SEQ ID NO: 26850 - DNA, 33 bp, Homo sapiens
ttctattctttgctcaaccccgttctccttttt

SEQ ID NO: 26851 - DNA, 33 bp, Homo sapiens
aaagggaatcaccaccaactctagaagtataat

SEQ ID NO: 26852 - DNA, 33 bp, Homo sapiens
gcatgctcttgccatacaaaaatctacctgagg

SEQ ID NO: 26853 - DNA, 51 bp, Homo sapiens
atgcccagcctatagttattctttacactgaacatatttgtgtatgttttt

SEQ ID NO: 26854 - DNA, 33 bp, Homo sapiens
atgtgtacagatagcaaaagtgcaagaagagga

SEQ ID NO: 26855 - DNA, 33 bp, Homo sapiens
aattaactatgctaagcactacaatttccatta

SEQ ID NO: 26856 - DNA, 33 bp, Homo sapiens
gctttttctgatttccacagtagaatgttttat

SEQ ID NO: 26857 - DNA, 33 bp, Homo sapiens
cagttccattccattgcaccctatgcctctcca

SEQ ID NO: 26858 - DNA, 33 bp, Homo sapiens
tgaatgcttgagaaccacaagacctctgtgtgg

SEQ ID NO: 26859 - DNA, 33 bp, Homo sapiens
tgcaagcatgaaccaaattacaaaccttgttaa

SEQ ID NO: 26860 - DNA, 33 bp, Homo sapiens
gttttgagctgactgaaggaaatgcagattccc

SEQ ID NO: 26861 - DNA, 33 bp, Homo sapiens
gaaaaattatcagggcaagaataatataatctg

SEQ ID NO: 26862 - DNA, 33 bp, Homo sapiens
agtaccaaatagacaaatcaggctgtttaccag

SEQ ID NO: 26863 - DNA, 33 bp, Homo sapiens
tcagttactagctgtgcaggttcttcgttgctt

SEQ ID NO: 26864 - DNA, 33 bp, Homo sapiens
ctgaatattttttccagtctgatgatttgattt

SEQ ID NO: 26865 - DNA, 51 bp, Homo sapiens
cctagtttggagaattctgcagacaatcatattcctttcactatccacacc

SEQ ID NO: 26866 - DNA, 33 bp, Homo sapiens
tctcagtaacggagaacggcttctctgggaacc

SEQ ID NO: 26867 - DNA, 33 bp, Homo sapiens
gaagcacctggtcagcaagatgacatgggaggg

SEQ ID NO: 26868 - DNA, 33 bp, Homo sapiens
gggatcttctcactcaagtaggtctctctggga

SEQ ID NO: 26869 - DNA, 33 bp, Homo sapiens
aagacagaagtcaggaatccaaatgcttttatt

SEQ ID NO: 26870 - DNA, 33 bp, Homo sapiens
agggcttaggtctacacatattgccaataggga

SEQ ID NO: 26871 - DNA, 33 bp, Homo sapiens
cagcccggtacctggcaaggaagtacaaccgca

SEQ ID NO: 26872 - DNA, 33 bp, Homo sapiens
aaaattccaggacttacacattcaaaggagtgg

SEQ ID NO: 26873 - DNA, 33 bp, Homo sapiens
cagactggcattttccagaacagtctgtaagtc

SEQ ID NO: 26874 - DNA, 33 bp, Homo sapiens
aaaaatcttcccctgagaattcataacacaaac

SEQ ID NO: 26875 - DNA, 33 bp, Homo sapiens
tagttgaaaccgtcacaaaggcattgtatagaa

SEQ ID NO: 26876 - DNA, 33 bp, Homo sapiens
cttttcttgtatagacaaagcgatattcttgct

SEQ ID NO: 26877 - DNA, 33 bp, Homo sapiens
agtgactgggaacccgcagtagattagccacaa

SEQ ID NO: 26878 - DNA, 33 bp, Homo sapiens
gcagtgaacaaaaactcaaatctctgtattatg

SEQ ID NO: 26879 - DNA, 33 bp, Homo sapiens
atcccattcaaacataactacttcaaactgtat

SEQ ID NO: 26880 - DNA, 33 bp, Homo sapiens
taatgtgatagaccataaagaattcaggatcag

SEQ ID NO: 26881 - DNA, 33 bp, Homo sapiens
acacactttctcctaaacgctcagatttatatc

SEQ ID NO: 26882 - DNA, 33 bp, Homo sapiens
aaagcactcaagaaacgaataaggggccaggcg

SEQ ID NO: 26883 - DNA, 33 bp, Homo sapiens
tggagtctttgtaggacgaagacatgaggattc

SEQ ID NO: 26884 - DNA, 33 bp, Homo sapiens
atttattttttgctgactaggagtgagactggg

SEQ ID NO: 26885 - DNA, 33 bp, Homo sapiens
tgctgcagaggtaaccacagaaatgttctgaag

SEQ ID NO: 26886 - DNA, 33 bp, Homo sapiens
aattttgaacaagtcacgtattgctgatggata

SEQ ID NO: 26887 - DNA, 33 bp, Homo sapiens
cttactgccctgctaaaggtgccaatgtatgca

SEQ ID NO: 26888 - DNA, 51 bp, Homo sapiens
tgaatagtggctgggttttgagcccaagttaagacctggaagagaaaagat

SEQ ID NO: 26889 - DNA, 33 bp, Homo sapiens
taccttttatagacaaagaaactgaagaacaca

SEQ ID NO: 26890 - DNA, 33 bp, Homo sapiens
cctcatataggcctagaacaaaattggcatttg

SEQ ID NO: 26891 - DNA, 33 bp, Homo sapiens
tccccaccttagagaactgagcctgtcgagtta

SEQ ID NO: 26892 - DNA, 33 bp, Homo sapiens
gtcatcaaaccttttgcactgcaatgctgattt

SEQ ID NO: 26893 - DNA, 33 bp, Homo sapiens
tttgctttttccattaccttcataaagtaacga

SEQ ID NO: 26894 - DNA, 33 bp, Homo sapiens
actgtggtatatgccgcagtgaaggtacgatga

SEQ ID NO: 26895 - DNA, 33 bp, Homo sapiens
taattctgaaattgaaaaagaaaatcatttact

SEQ ID NO: 26896 - DNA, 33 bp, Homo sapiens
gaagctctaaaggaagcctatggttcactccac

SEQ ID NO: 26897 - DNA, 33 bp, Homo sapiens
gcaactctccaaggcaaccaaattacagccaag

SEQ ID NO: 26898 - DNA, 33 bp, Homo sapiens
tttttccgattgtttcaagttccatactggaga

SEQ ID NO: 26899 - DNA, 33 bp, Homo sapiens
caaaaatggaaggcacaaatttaagcagccttt

SEQ ID NO: 26900 - DNA, 33 bp, Homo sapiens
aaatatagaacccccacgtgatccagcaattcc

SEQ ID NO: 26901 - DNA, 33 bp, Homo sapiens
aggagagaaggaggagaaaaccacaggatatga

SEQ ID NO: 26902 - DNA, 33 bp, Homo sapiens
gtgagtacataccagaaagctgctgaaaatcca

SEQ ID NO: 26903 - DNA, 33 bp, Homo sapiens
ggaggacaaaatactaagcaaattaattcagga

SEQ ID NO: 26904 - DNA, 33 bp, Homo sapiens
ctaggactttcaaagacgacaaaagcactaata

SEQ ID NO: 26905 - DNA, 33 bp, Homo sapiens
gacacctcggtgaagacggtgacagtatttgtg

SEQ ID NO: 26906 - DNA, 33 bp, Homo sapiens
cttcacagctctgttagaagcagatccttacaa

SEQ ID NO: 26907 - DNA, 33 bp, Homo sapiens
gtaggtaccatctctgaaaaaaagctgggtctc

SEQ ID NO: 26908 - DNA, 33 bp, Homo sapiens
tactctgctttacggcacattagtcctagctag

SEQ ID NO: 26909 - DNA, 33 bp, Homo sapiens
cccattttggccaatgcataaaactgctgatac

SEQ ID NO: 26910 - DNA, 33 bp, Homo sapiens
gataatgctgagagaaagtaccagttgcccctt

SEQ ID NO: 26911 - DNA, 33 bp, Homo sapiens
aaacatatgagtgtcacaggaatacatcttatt

SEQ ID NO: 26912 - DNA, 33 bp, Homo sapiens
gcaatgtgacactgccaatcttccaatcaggag

SEQ ID NO: 26913 - DNA, 33 bp, Homo sapiens
tagcttgtttgccccaaatggagaggtccgaga

SEQ ID NO: 26914 - DNA, 33 bp, Homo sapiens
tcaggactttaggtaaaaggcaaatattcagta

SEQ ID NO: 26915 - DNA, 33 bp, Homo sapiens
caaggtcaatgtatcaacaggtctggtttctcc

SEQ ID NO: 26916 - DNA, 33 bp, Homo sapiens
aacagttacttctctgcaccatggatgacctgc

SEQ ID NO: 26917 - DNA, 33 bp, Homo sapiens
aacattgcttcaaaggaacctagaaatgctagc

SEQ ID NO: 26918 - DNA, 33 bp, Homo sapiens
gtttgcttttctggaaataaataagttgattgt

SEQ ID NO: 26919 - DNA, 33 bp, Homo sapiens
acatccattaagcaacagttaattctgacttaa

SEQ ID NO: 26920 - DNA, 33 bp, Homo sapiens
agcatcataggtttaacagccatactctagaag

SEQ ID NO: 26921 - DNA, 33 bp, Homo sapiens
gctgctgagtttactccatagctttcaaacctt

SEQ ID NO: 26922 - DNA, 33 bp, Homo sapiens
aatgttacacactgataaaaagtattccagaaa

SEQ ID NO: 26923 - DNA, 33 bp, Homo sapiens
catttcacaccccccaagatgaccataacaaaa

SEQ ID NO: 26924 - DNA, 33 bp, Homo sapiens
taaacggatcaaccaaatgcagtatagaatgct

SEQ ID NO: 26925 - DNA, 33 bp, Homo sapiens
agcaggatggtcaaaactaagtgagagaaaggc

SEQ ID NO: 26926 - DNA, 33 bp, Homo sapiens
catttccctaatgtcaatagttgcagacacttt

SEQ ID NO: 26927 - DNA, 33 bp, Homo sapiens
agcaagtttcttgcaccattttcactgatcttt

SEQ ID NO: 26928 - DNA, 33 bp, Homo sapiens
tcaaggcagcggctaacaggacaaaatgacatg

SEQ ID NO: 26929 - DNA, 33 bp, Homo sapiens
tgtgcgtcctcttcagaccttttacacggggga

SEQ ID NO: 26930 - DNA, 33 bp, Homo sapiens
aagagagggccatgcacgttgtaaagccctaca

SEQ ID NO: 26931 - DNA, 33 bp, Homo sapiens
tttaattctgccttcaaaatgcctagttaaccc

SEQ ID NO: 26932 - DNA, 33 bp, Homo sapiens
cttagaagaatggttacacaactcacaaattga

SEQ ID NO: 26933 - DNA, 33 bp, Homo sapiens
ctcacatctctttgtaccacctctccgtacatt

SEQ ID NO: 26934 - DNA, 33 bp, Homo sapiens
aaaagactggcaaaccaaataaaacctgaagtc

SEQ ID NO: 26935 - DNA, 33 bp, Homo sapiens
atacagggtgtcctcaaagtctgggaaagaaag

SEQ ID NO: 26936 - DNA, 33 bp, Homo sapiens
atcctctgatggaaaactggttagtgcattttt

SEQ ID NO: 26937 - DNA, 33 bp, Homo sapiens
taaactatggagtcacagcatcattggtattca

SEQ ID NO: 26938 - DNA, 51 bp, Homo sapiens
aagcttaacattcaacattgtgcttaaacaaaacttaccactactcaattt

SEQ ID NO: 26939 - DNA, 51 bp, Homo sapiens
ctaaacaataaggaaacaagaagcagtaaattactttttccccccaaataa

SEQ ID NO: 26940 - DNA, 33 bp, Homo sapiens
gaaaaacaaaattcacaattctgtacatcaatc

SEQ ID NO: 26941 - DNA, 33 bp, Homo sapiens
gtaataaagttaaatacctcatctagaagcagg

SEQ ID NO: 26942 - DNA, 33 bp, Homo sapiens
taagaaggaagtcaataatggagtcagttttaa

SEQ ID NO: 26943 - DNA, 33 bp, Homo sapiens
gaaagttcattgtttgcataatgatatggtttg

SEQ ID NO: 26944 - DNA, 33 bp, Homo sapiens
aaaccttccttccactcactgggttccctgctg

SEQ ID NO: 26945 - DNA, 33 bp, Homo sapiens
gttaagggattggcggaaaaagagtgggatgta

SEQ ID NO: 26946 - DNA, 33 bp, Homo sapiens
tagattcaaaaaagcacgtgttagagaagtcaa

SEQ ID NO: 26947 - DNA, 33 bp, Homo sapiens
tgcaagacatgctaaaagaagtgcttcaggagg

SEQ ID NO: 26948 - DNA, 33 bp, Homo sapiens
ccaagtctacagcaaacgaggtgcaactgtaat

SEQ ID NO: 26949 - DNA, 33 bp, Homo sapiens
gataagtttcagttaagccagtcttatagagtc

SEQ ID NO: 26950 - DNA, 33 bp, Homo sapiens
gtgcattggatgaaatcacttgaatactgtcaa

SEQ ID NO: 26951 - DNA, 51 bp, Homo sapiens
tatcaagcatattgaagataatgaacggacctatcggatcatatcttagtt

SEQ ID NO: 26952 - DNA, 33 bp, Homo sapiens
tcatagtctaaaatgccgaagagacataccaaa

SEQ ID NO: 26953 - DNA, 33 bp, Homo sapiens
actggatcataggggcaaatttatccctcgctg

SEQ ID NO: 26954 - DNA, 33 bp, Homo sapiens
gaaccacggagaactggaatgagagtgatggat

SEQ ID NO: 26955 - DNA, 33 bp, Homo sapiens
agtgtattattcaccactgcatctcaggcaatg

SEQ ID NO: 26956 - DNA, 33 bp, Homo sapiens
tattgttttcctaatacgtggcttggaagggag

SEQ ID NO: 26957 - DNA, 33 bp, Homo sapiens
aagaagctacttatcacgaaaaaaggcaaggat

SEQ ID NO: 26958 - DNA, 33 bp, Homo sapiens
tgtactgtctattggaaaattcacttaaccaga

SEQ ID NO: 26959 - DNA, 33 bp, Homo sapiens
ttttcaccactgagtacgcagatcttccccttg

SEQ ID NO: 26960 - DNA, 33 bp, Homo sapiens
taacaaatagcctaataatgtaagtgaatgatt

SEQ ID NO: 26961 - DNA, 33 bp, Homo sapiens
aaaaagtagaatatcaatcaccattttgcaacc

SEQ ID NO: 26962 - DNA, 33 bp, Homo sapiens
tccagagttaaaggccggcccggctaatctcta

SEQ ID NO: 26963 - DNA, 33 bp, Homo sapiens
gaagaaaaccacagcactgcggagagaaagctc

SEQ ID NO: 26964 - DNA, 33 bp, Homo sapiens
tttattatctcagtgacgaccatctgtgttggt

SEQ ID NO: 26965 - DNA, 33 bp, Homo sapiens
ggcctcaactaaagtcaccaactatcttatccc

SEQ ID NO: 26966 - DNA, 33 bp, Homo sapiens
ttgtggtacagttaaacttaggaccacactggc

SEQ ID NO: 26967 - DNA, 33 bp, Homo sapiens
aagggaaaaatgcctcaagggaacacgtgcata

SEQ ID NO: 26968 - DNA, 33 bp, Homo sapiens
attccagtcacttaaaactgagcgcttttcctt

SEQ ID NO: 26969 - DNA, 33 bp, Homo sapiens
tctaaataaaattgacagatggactaggtccat

SEQ ID NO: 26970 - DNA, 33 bp, Homo sapiens
agcagagggagaggtaacagacctgtcaggaaa

SEQ ID NO: 26971 - DNA, 33 bp, Homo sapiens
tgctgttctctttcagaatgccatgctgtgcag

SEQ ID NO: 26972 - DNA, 33 bp, Homo sapiens
atggtctgtcctaaagcagtgaatttcctaagg

SEQ ID NO: 26973 - DNA, 33 bp, Homo sapiens
atgttctaccatacagacaactcaaatgtcaga

SEQ ID NO: 26974 - DNA, 33 bp, Homo sapiens
agtgttctggtctggacgaaatgagagaactcc

SEQ ID NO: 26975 - DNA, 51 bp, Homo sapiens
ctgcacttcttaaatagaacagaagcatccctgaaaaaaatatagatctgg

SEQ ID NO: 26976 - DNA, 33 bp, Homo sapiens
tacttgtgctgttcacagaggtggtcatctcac

SEQ ID NO: 26977 - DNA, 33 bp, Homo sapiens
ctgggttgatggaggacgagaaggatcagggag

SEQ ID NO: 26978 - DNA, 33 bp, Homo sapiens
aactctgggacggttacggaagattgaggttgt

SEQ ID NO: 26979 - DNA, 33 bp, Homo sapiens
gttgctgcattttggacgtcttaaatattcctt

SEQ ID NO: 26980 - DNA, 33 bp, Homo sapiens
tccccgataagatggaaaaccagacagctccaa

SEQ ID NO: 26981 - DNA, 33 bp, Homo sapiens
ttgtaacaaccatctcacaatactgctgagagg

SEQ ID NO: 26982 - DNA, 33 bp, Homo sapiens
ttagctagaaaaattacgtttctccttgccgct

SEQ ID NO: 26983 - DNA, 33 bp, Homo sapiens
acagtgaatgtgatttaaaaaggttttgtcata

SEQ ID NO: 26984 - DNA, 33 bp, Homo sapiens
aagctggttattgccaagcctattaacacttaa

SEQ ID NO: 26985 - DNA, 33 bp, Homo sapiens
gtgaatcgtttggtcaactgttgaggacaggct

SEQ ID NO: 26986 - DNA, 33 bp, Homo sapiens
agtcctagacgtgggactagaaattagatgaca

SEQ ID NO: 26987 - DNA, 33 bp, Homo sapiens
cctgcctccaccactcaccggttatgtaaccat

SEQ ID NO: 26988 - DNA, 33 bp, Homo sapiens
ctaccccaaattattgaaagtctctctagcagc

SEQ ID NO: 26989 - DNA, 33 bp, Homo sapiens
gaccggtagaactaagaaaacgtgtcgtaatct

SEQ ID NO: 26990 - DNA, 33 bp, Homo sapiens
gaatgttttatggacacgtcgagttaggaaaaa

SEQ ID NO: 26991 - DNA, 33 bp, Homo sapiens
gcatttgctgcacttacgttctagttcattaaa

SEQ ID NO: 26992 - DNA, 33 bp, Homo sapiens
agcaaggtagacagtacgggatcagaacctgat

SEQ ID NO: 26993 - DNA, 33 bp, Homo sapiens
tcttgttccctctttcaattccaccttcatctg

SEQ ID NO: 26994 - DNA, 33 bp, Homo sapiens
tcatacctagaatatacgtcgatttcagtcaag

SEQ ID NO: 26995 - DNA, 33 bp, Homo sapiens
aattaagaccatcaaaataagctccagaaagag

SEQ ID NO: 26996 - DNA, 33 bp, Homo sapiens
gtagagaggagaaaaactggacattttacagaa

SEQ ID NO: 26997 - DNA, 51 bp, Homo sapiens
actgccttagaaggtgcctgcttcacggttggttgcctttcattggcacag

SEQ ID NO: 26998 - DNA, 33 bp, Homo sapiens
gctgaaaaccactgacactatttttgtcaagac

SEQ ID NO: 26999 - DNA, 33 bp, Homo sapiens
taggagctgtgtgttacgaaacagtgaggaaga

SEQ ID NO: 27000 - DNA, 33 bp, Homo sapiens
atggtatgtctcctgccgagcacgttcccttca

SEQ ID NO: 27001 - DNA, 33 bp, Homo sapiens
atcttgcaaaacagctaacaattttatgccgcc

SEQ ID NO: 27002 - DNA, 33 bp, Homo sapiens
tgcatacatgtttcacagggttgcaagcataac

SEQ ID NO: 27003 - DNA, 33 bp, Homo sapiens
ccgttcactatgacaacattacctagcggtctt

SEQ ID NO: 27004 - DNA, 33 bp, Homo sapiens
caaatctattgaacccaggaaattggttcagta

SEQ ID NO: 27005 - DNA, 33 bp, Homo sapiens
aaagagactgcaaatacatatgactttggaggg

SEQ ID NO: 27006 - DNA, 33 bp, Homo sapiens
ttacactctactgttacggggttcaggtcagaa

SEQ ID NO: 27007 - DNA, 33 bp, Homo sapiens
tgcttcctccacgtccactcggagtgttcttct

SEQ ID NO: 27008 - DNA, 33 bp, Homo sapiens
ttgggtcttctaagcccccatccatgtcacctg

SEQ ID NO: 27009 - DNA, 33 bp, Homo sapiens
ggtaaactaacacttacgcattgtatggaactg

SEQ ID NO: 27010 - DNA, 33 bp, Homo sapiens
tgcagcgtggaatttgaaattgtggtaacagct

SEQ ID NO: 27011 - DNA, 33 bp, Homo sapiens
acagagctctctgcttcaactcaacgtcacggc

SEQ ID NO: 27012 - DNA, 33 bp, Homo sapiens
gcagaacacactcaataacagttaatcaagtca

SEQ ID NO: 27013 - DNA, 33 bp, Homo sapiens
tggctgctgagggcacaagcccccacaaaggaa

SEQ ID NO: 27014 - DNA, 33 bp, Homo sapiens
ctatgacctgaattgaaccagaaaatgcagagt

SEQ ID NO: 27015 - DNA, 33 bp, Homo sapiens
gtaattctttgaaatccaacagcccatttagtc

SEQ ID NO: 27016 - DNA, 33 bp, Homo sapiens
gaccaaaacattaataaggggaagcaataaatg

SEQ ID NO: 27017 - DNA, 33 bp, Homo sapiens
ttgggctctggccacacggtgatttcctatcaa

SEQ ID NO: 27018 - DNA, 51 bp, Homo sapiens
acttagtctgaagtcttattttaaaacaattaatcagtcttatacctaagc

SEQ ID NO: 27019 - DNA, 33 bp, Homo sapiens
gcgtcactcaaacctgacagccttccaaatcac

SEQ ID NO: 27020 - DNA, 33 bp, Homo sapiens
gggcgtgacacacacacaggcatgatctgcact

SEQ ID NO: 27021 - DNA, 51 bp, Homo sapiens
gtcttcaagcattgcctcagggacacgccaagggaacggaaaccagtccca

SEQ ID NO: 27022 - DNA, 33 bp, Homo sapiens
atagtaactggaagagaaatttggtacccagag

SEQ ID NO: 27023 - DNA, 33 bp, Homo sapiens
ggcttctatgattgaactgaggtgagccagagt

SEQ ID NO: 27024 - DNA, 33 bp, Homo sapiens
ttcatgctgggctctgcaacgaagctggcaaac

SEQ ID NO: 27025 - DNA, 33 bp, Homo sapiens
catgctaaaagccgaacgtacaggcctggcctg

SEQ ID NO: 27026 - DNA, 33 bp, Homo sapiens
ggatttaagatggctccacattctctgacactc

SEQ ID NO: 27027 - DNA, 33 bp, Homo sapiens
gtcagaaggctacttcacagagggtccattgta

SEQ ID NO: 27028 - DNA, 33 bp, Homo sapiens
aagatggggccaactacggtgaaagtgaatagg

SEQ ID NO: 27029 - DNA, 33 bp, Homo sapiens
gcagggcctgattagaagtggctgagtgaacca

SEQ ID NO: 27030 - DNA, 33 bp, Homo sapiens
gacagagcaggaacaccaggtgatgccaatgct

SEQ ID NO: 27031 - DNA, 33 bp, Homo sapiens
cagacgtttcttctctcacagttctgaaggtga

SEQ ID NO: 27032 - DNA, 33 bp, Homo sapiens
cctggaattcttcccccagatcctcacaggctg

SEQ ID NO: 27033 - DNA, 33 bp, Homo sapiens
actgaggacacagagacctagcctcaagtggtt

SEQ ID NO: 27034 - DNA, 33 bp, Homo sapiens
taattgccggactttgaaattcgttatgcattt

SEQ ID NO: 27035 - DNA, 33 bp, Homo sapiens
gacacgcttgtgtagcagacacacctgagccca

SEQ ID NO: 27036 - DNA, 51 bp, Homo sapiens
gctgtacaaatgctttctcgaggatgactcgcagggggtaccctgccagga

SEQ ID NO: 27037 - DNA, 33 bp, Homo sapiens
taagtatatgttgaacacgggaatggccaaatg

SEQ ID NO: 27038 - DNA, 33 bp, Homo sapiens
cacagtaagggattgacattggtattactgtgg

SEQ ID NO: 27039 - DNA, 33 bp, Homo sapiens
cccacccactagggacacctttaactgatcacc

SEQ ID NO: 27040 - DNA, 33 bp, Homo sapiens
cctggtccatgtcagaccttttcaggccgggga

SEQ ID NO: 27041 - DNA, 33 bp, Homo sapiens
atgggggctctgcctcaaatgcctggtcagtct

SEQ ID NO: 27042 - DNA, 33 bp, Homo sapiens
cccttctggtaatggaccttcctaggcagggac

SEQ ID NO: 27043 - DNA, 33 bp, Homo sapiens
ctccttgttgctgacccacagcaaagcttgtct

SEQ ID NO: 27044 - DNA, 33 bp, Homo sapiens
gtttggtgcaccgataggaccagtcttgtgaat

SEQ ID NO: 27045 - DNA, 33 bp, Homo sapiens
ctggacactggaggacaaacaaatggtaccatt

SEQ ID NO: 27046 - DNA, 33 bp, Homo sapiens
gctcctaccgccgcacagactttgtggacagga

SEQ ID NO: 27047 - DNA, 33 bp, Homo sapiens
tatgttgagctattcaaatcaaggggactcaat

SEQ ID NO: 27048 - DNA, 33 bp, Homo sapiens
gcccacaatttaggtacgtctctggtagaagga

SEQ ID NO: 27049 - DNA, 33 bp, Homo sapiens
ggggttccctaagtgccaaagtcccggccccac

SEQ ID NO: 27050 - DNA, 33 bp, Homo sapiens
gctcctgtactgaaaacgctcagggctacgcgg

SEQ ID NO: 27051 - DNA, 33 bp, Homo sapiens
gctgatctggaactcactgaagagtaaaaacat

SEQ ID NO: 27052 - DNA, 33 bp, Homo sapiens
gcggcaaatatgtagcaactttcagctaatcaa

SEQ ID NO: 27053 - DNA, 33 bp, Homo sapiens
ttgtcttttgctgttaccatctttacagtacat

SEQ ID NO: 27054 - DNA, 33 bp, Homo sapiens
tcttccaagggctcaaagtgtaagcaggctgga

SEQ ID NO: 27055 - DNA, 33 bp, Homo sapiens
tgtttaaacatggcgaacacggataactaaatg

SEQ ID NO: 27056 - DNA, 33 bp, Homo sapiens
aaacacaattaaccgacgttgcagatatttcat

SEQ ID NO: 27057 - DNA, 33 bp, Homo sapiens
tcaagtgtggcacccaagtattgtgattctaat

SEQ ID NO: 27058 - DNA, 33 bp, Homo sapiens
ctgccctttctgcctacacctgggatctgtcaa

SEQ ID NO: 27059 - DNA, 33 bp, Homo sapiens
taaatggggaaataacggcttttcaaggttatt

SEQ ID NO: 27060 - DNA, 33 bp, Homo sapiens
attataaatgaatccacgtactcatagcacagc

SEQ ID NO: 27061 - DNA, 33 bp, Homo sapiens
tccagcttcataatacacattaataataatgaa

SEQ ID NO: 27062 - DNA, 33 bp, Homo sapiens
agagctctcagggaaccggtgaccactttggtc

SEQ ID NO: 27063 - DNA, 33 bp, Homo sapiens
tggatatgatgtaaaaagtgataagtgtggtaa

SEQ ID NO: 27064 - DNA, 33 bp, Homo sapiens
tatttatccaagaatacggaacactcagattct

SEQ ID NO: 27065 - DNA, 33 bp, Homo sapiens
catgctgttctctacaccatggtaagaggacgg

SEQ ID NO: 27066 - DNA, 33 bp, Homo sapiens
gtgactagtctcgtatcactgtcagcgtcctct

SEQ ID NO: 27067 - DNA, 33 bp, Homo sapiens
cactaactctctaagggaatatcttttgtcatc

SEQ ID NO: 27068 - DNA, 33 bp, Homo sapiens
gtgctttgcttaattcacaggacagatatggat

SEQ ID NO: 27069 - DNA, 33 bp, Homo sapiens
tggtagcaaggaacaacgtactggaaattgaaa

SEQ ID NO: 27070 - DNA, 33 bp, Homo sapiens
taactgcaattcagtacccttcgtattatctga

SEQ ID NO: 27071 - DNA, 33 bp, Homo sapiens
ttttttttctctgcaccgtaaaatatgtgaagt

SEQ ID NO: 27072 - DNA, 51 bp, Homo sapiens
tccaagacagggagataaaagttgaaaacaatcggtgcaacagagtaaaac

SEQ ID NO: 27073 - DNA, 33 bp, Homo sapiens
acgcccacatagagtacgagataaagggctaag

SEQ ID NO: 27074 - DNA, 33 bp, Homo sapiens
cccaactaccagggtaaaaatgaagcatgttaa

SEQ ID NO: 27075 - DNA, 33 bp, Homo sapiens
cttggtatgaaaatgaagtctccatactaaaca

SEQ ID NO: 27076 - DNA, 33 bp, Homo sapiens
tttcagtatttgtgaacaccaaaagcatgttca

SEQ ID NO: 27077 - DNA, 51 bp, Homo sapiens
tttacgtggataaccctgaccaacactggagtcttacttttcttatttgta

SEQ ID NO: 27078 - DNA, 33 bp, Homo sapiens
ttaattcatgtcgccaacgtcctaaatgaaagt

SEQ ID NO: 27079 - DNA, 33 bp, Homo sapiens
gtattctaaaaggaaccggtgatatggattcca

SEQ ID NO: 27080 - DNA, 33 bp, Homo sapiens
ggaaaacacggattcacgcacactgagttcttc

SEQ ID NO: 27081 - DNA, 33 bp, Homo sapiens
ctccctgggaagtttcaacagaatgtacaccaa

SEQ ID NO: 27082 - DNA, 33 bp, Homo sapiens
cagcagtggagagacaatcttaccacatatata

SEQ ID NO: 27083 - DNA, 33 bp, Homo sapiens
gtgcagagtattcctcagacagatacttactta

SEQ ID NO: 27084 - DNA, 33 bp, Homo sapiens
ttccagcacaaattgaccacattaggctattat

SEQ ID NO: 27085 - DNA, 33 bp, Homo sapiens
tcttagaagattgatacgctcatctatgtaaag

SEQ ID NO: 27086 - DNA, 33 bp, Homo sapiens
ttgtgaaatcaacttactaagcattagttgaat

SEQ ID NO: 27087 - DNA, 33 bp, Homo sapiens
tgaaatgttgaagagacgtatctgcactctcat

SEQ ID NO: 27088 - DNA, 33 bp, Homo sapiens
gatatcttctcacaccactaagaatgactacta

SEQ ID NO: 27089 - DNA, 51 bp, Homo sapiens
catccattcaataaattgttacagaacacctaatatgggccagacgtgtca

SEQ ID NO: 27090 - DNA, 33 bp, Homo sapiens
gaggtccaacctgttacaagaattagaattttc

SEQ ID NO: 27091 - DNA, 33 bp, Homo sapiens
tgcaatgttcacttggacaccctggcggtcaat

SEQ ID NO: 27092 - DNA, 33 bp, Homo sapiens
aaggctggtgggtacaagtttgatgaccatcag

SEQ ID NO: 27093 - DNA, 33 bp, Homo sapiens
gttacattcatacaataatgcacaggcaatgaa

SEQ ID NO: 27094 - DNA, 33 bp, Homo sapiens
cctgcattaagtgactcagaatctagagttcct

SEQ ID NO: 27095 - DNA, 33 bp, Homo sapiens
caaggtagaatgctaaataaatgatcagtctgt

SEQ ID NO: 27096 - DNA, 33 bp, Homo sapiens
tggctttcttcgaggccgagtctctaggctagt

SEQ ID NO: 27097 - DNA, 33 bp, Homo sapiens
attgattgaagtataacattgagttcctgctga

SEQ ID NO: 27098 - DNA, 33 bp, Homo sapiens
atggcatttatccttaccaatttcccaatgcct

SEQ ID NO: 27099 - DNA, 51 bp, Homo sapiens
atgtttgacataggggatagaaagaactggtttgtctagtggtaaagagga

SEQ ID NO: 27100 - DNA, 33 bp, Homo sapiens
aaggacagcatttaggcaatctgcagttatata

SEQ ID NO: 27101 - DNA, 33 bp, Homo sapiens
ctgtagatacttgtaacgcagtggtgtttgtgt

SEQ ID NO: 27102 - DNA, 51 bp, Homo sapiens
tttatgctgagaggaagagctgtcaagttaattaatctatctcttatctat

SEQ ID NO: 27103 - DNA, 33 bp, Homo sapiens
gcaaaggtatcttcccaagtgtttcaaccaagg

SEQ ID NO: 27104 - DNA, 33 bp, Homo sapiens
aaccaccttgacaccaaaacaattcattcattc

SEQ ID NO: 27105 - DNA, 33 bp, Homo sapiens
tgtcaatagccaaatacagcaagcggaagaaag

SEQ ID NO: 27106 - DNA, 33 bp, Homo sapiens
aaagacccaaacactgcaccttgctcataagaa

SEQ ID NO: 27107 - DNA, 33 bp, Homo sapiens
aaagactcaagttcaactggacaagaggaatca

SEQ ID NO: 27108 - DNA, 33 bp, Homo sapiens
atgaagaattgagacactaatgttaaataaaat

SEQ ID NO: 27109 - DNA, 33 bp, Homo sapiens
ttgccctgtctttcacccgcatttccataaacc

SEQ ID NO: 27110 - DNA, 33 bp, Homo sapiens
gggtctgctcttgcacagcaggagaagacttct

SEQ ID NO: 27111 - DNA, 33 bp, Homo sapiens
agtgatgatggtggaactgaaatatttggatta

SEQ ID NO: 27112 - DNA, 51 bp, Homo sapiens
ccatggtcaatggtagtccatcacactagataatatagtgtcagtgccaaa

SEQ ID NO: 27113 - DNA, 33 bp, Homo sapiens
atccaattacactccacaggcaattgaaatctt

SEQ ID NO: 27114 - DNA, 33 bp, Homo sapiens
gtacaaggactacctacattaaatgcatattgg

SEQ ID NO: 27115 - DNA, 33 bp, Homo sapiens
tggaccactctataccaagtcaccttttgctaa

SEQ ID NO: 27116 - DNA, 33 bp, Homo sapiens
ttgtgcctcttatcaccaacctggagggactca

SEQ ID NO: 27117 - DNA, 33 bp, Homo sapiens
tggttttactgttgaaaattgctggaaacagtg

SEQ ID NO: 27118 - DNA, 33 bp, Homo sapiens
aatgtctctgaaactcaaatcttctcatctgca

SEQ ID NO: 27119 - DNA, 33 bp, Homo sapiens
tcttgtcaataatggccctgattatttgactat

SEQ ID NO: 27120 - DNA, 33 bp, Homo sapiens
aatctgcagaaaaaaactagcaaattcaagagc

SEQ ID NO: 27121 - DNA, 51 bp, Homo sapiens
gtgtttcttgttactatgattgttaggacagaaaatgcttttagagatggg

SEQ ID NO: 27122 - DNA, 33 bp, Homo sapiens
actgatggatacccaacatttacaatttcttac

SEQ ID NO: 27123 - DNA, 33 bp, Homo sapiens
caaagtcccagtctcacatcgaagtaagcccct

SEQ ID NO: 27124 - DNA, 33 bp, Homo sapiens
tgaagatagactctgacatggggagttgcatga

SEQ ID NO: 27125 - DNA, 33 bp, Homo sapiens
caggatggattagagacggggaaatgaaggcat

SEQ ID NO: 27126 - DNA, 33 bp, Homo sapiens
actagcaccactacagccctcatgacctcagag

SEQ ID NO: 27127 - DNA, 33 bp, Homo sapiens
agcacttgccagatgacgaaagatgtctgatat

SEQ ID NO: 27128 - DNA, 33 bp, Homo sapiens
tcacctagctcctgttcaacacgtttgtgtacc

SEQ ID NO: 27129 - DNA, 33 bp, Homo sapiens
ccacctaattcaccctaaaggactatgaaattc

SEQ ID NO: 27130 - DNA, 51 bp, Homo sapiens
aacatcctctctttctccaactcagaacagacgtaatggctgcttattggt

SEQ ID NO: 27131 - DNA, 33 bp, Homo sapiens
tgcaatgtgtcagttacagttttaggcactatt

SEQ ID NO: 27132 - DNA, 33 bp, Homo sapiens
aagaatagagcgataaaattggacactggtatg

SEQ ID NO: 27133 - DNA, 33 bp, Homo sapiens
tggattaacacaattcactttgaagaggctcat

SEQ ID NO: 27134 - DNA, 33 bp, Homo sapiens
gtccttagaatccttaagttatgtatggctaag

SEQ ID NO: 27135 - DNA, 33 bp, Homo sapiens
tgaaaagtggtaacataaagataaccttgaagt

SEQ ID NO: 27136 - DNA, 33 bp, Homo sapiens
cagttcatgcctatacaagttctaactactgta

SEQ ID NO: 27137 - DNA, 33 bp, Homo sapiens
tctattaataatgataactgactgtgtataaaa

SEQ ID NO: 27138 - DNA, 33 bp, Homo sapiens
tctcttcaaacgctgacataaccaagtccagtc

SEQ ID NO: 27139 - DNA, 33 bp, Homo sapiens
tgctgtacctgcttgtcacaacttgagttctaa

SEQ ID NO: 27140 - DNA, 33 bp, Homo sapiens
gctccactgtaatcaacgtgtcaatggaccacc

SEQ ID NO: 27141 - DNA, 33 bp, Homo sapiens
tgtggtaccaaaccagaaagctctgtactagct

SEQ ID NO: 27142 - DNA, 33 bp, Homo sapiens
tgatctgcagccataactctctaaaagttaggg

SEQ ID NO: 27143 - DNA, 33 bp, Homo sapiens
atgatgattgccagtcagaatgaaggacaaaac

SEQ ID NO: 27144 - DNA, 51 bp, Homo sapiens
tgggaaaaacaattatggctaagaaaaattaagtccactggtagaaagata

SEQ ID NO: 27145 - DNA, 33 bp, Homo sapiens
gcttagaaacttagaaacaaacatacccataga

SEQ ID NO: 27146 - DNA, 51 bp, Homo sapiens
gaggaggaagatgcagaataggcacaaaaggagtagaaaaaactagaagag

SEQ ID NO: 27147 - DNA, 33 bp, Homo sapiens
aatttatgttggcccacgtatcaagtagacatt

SEQ ID NO: 27148 - DNA, 33 bp, Homo sapiens
gttgccctgttctacccggcaaggacccaggca

SEQ ID NO: 27149 - DNA, 33 bp, Homo sapiens
atccccaacattgccaagaagacaggaatcaca

SEQ ID NO: 27150 - DNA, 33 bp, Homo sapiens
ccaaagaaggcttagccagggttcagtaaggga

SEQ ID NO: 27151 - DNA, 33 bp, Homo sapiens
tcgcttgaggaagcagcaatgggaataatttaa

SEQ ID NO: 27152 - DNA, 33 bp, Homo sapiens
tttctcagctataaggacaatctgtaacttgaa

SEQ ID NO: 27153 - DNA, 51 bp, Homo sapiens
ccctcccagaacctcactttgacaacgtggctcactaattgctactgggta

SEQ ID NO: 27154 - DNA, 33 bp, Homo sapiens
aaaagtgcctgtgatcagaggattctctaaagc

SEQ ID NO: 27155 - DNA, 33 bp, Homo sapiens
atgaccatctttcaaacgcttcagggcaatgca

SEQ ID NO: 27156 - DNA, 33 bp, Homo sapiens
agatatctcctccataataactaggacacagaa

SEQ ID NO: 27157 - DNA, 33 bp, Homo sapiens
aactcatttcatcaccaattcaaaagtccaatg

SEQ ID NO: 27158 - DNA, 33 bp, Homo sapiens
aagaaagggggtataacgagtcgtgtctaatct

SEQ ID NO: 27159 - DNA, 51 bp, Homo sapiens
atattgtccttccctgtgagttagaaattatctccattttacaaatagaaa

SEQ ID NO: 27160 - DNA, 33 bp, Homo sapiens
agggagggaattacccaaggacgtgactaccag

SEQ ID NO: 27161 - DNA, 51 bp, Homo sapiens
ccacaataaaataaccaactcaacaatggaagttacagttttgaagaatga

SEQ ID NO: 27162 - DNA, 51 bp, Homo sapiens
aagagacaaagatgcatagtataaacgagaaataaatcacacacattctgg

SEQ ID NO: 27163 - DNA, 51 bp, Homo sapiens
cattaagttgaaataaaatccagaaataagtaagctattgtttagaaacta

SEQ ID NO: 27164 - DNA, 51 bp, Homo sapiens
tatgttagagacccctttcaggagacggaagcaggtataggaaaacaaaat

SEQ ID NO: 27165 - DNA, 33 bp, Homo sapiens
cccagtaacctgctccagaacaacctgatacaa

SEQ ID NO: 27166 - DNA, 33 bp, Homo sapiens
gttgttttctgtgcaaatgtggaatgtagacct

SEQ ID NO: 27167 - DNA, 33 bp, Homo sapiens
aaaacagaaagagccacgttctatcatattctc

SEQ ID NO: 27168 - DNA, 33 bp, Homo sapiens
gggtaccttgttgacacggctcttctacctggc

SEQ ID NO: 27169 - DNA, 33 bp, Homo sapiens
ggaactcacattttcacaccaagtcagatattt

SEQ ID NO: 27170 - DNA, 33 bp, Homo sapiens
tagaagcacaggggaaagtgttaataaattcat

SEQ ID NO: 27171 - DNA, 33 bp, Homo sapiens
caggccctggctcatacgaaatgccttagcctg

SEQ ID NO: 27172 - DNA, 33 bp, Homo sapiens
gacttaggaatatcgacagaggtgcccctggga

SEQ ID NO: 27173 - DNA, 33 bp, Homo sapiens
agtgagaacagattaacacagtatgtgccgggc

SEQ ID NO: 27174 - DNA, 33 bp, Homo sapiens
gaaatttaaagaggcaaagtgattttcccaaga

SEQ ID NO: 27175 - DNA, 33 bp, Homo sapiens
ccagatttttcccaataagacatccacaagtca

SEQ ID NO: 27176 - DNA, 33 bp, Homo sapiens
tctctagatagtaggagtatgtttccagaaagc

SEQ ID NO: 27177 - DNA, 33 bp, Homo sapiens
aggaatcaaccacttcaaaggaagcagagagaa

SEQ ID NO: 27178 - DNA, 33 bp, Homo sapiens
gagtttccaatttacgaacgtgctatatctctc

SEQ ID NO: 27179 - DNA, 33 bp, Homo sapiens
tgtctagagtttaccaagagcactttttagtac

SEQ ID NO: 27180 - DNA, 33 bp, Homo sapiens
tgtttgagtaataaaaactagtacttactgggc

SEQ ID NO: 27181 - DNA, 33 bp, Homo sapiens
ggcagatgggagaaaacgctaacgataagaagt

SEQ ID NO: 27182 - DNA, 33 bp, Homo sapiens
ggccaaaggcgctgaaaaacactgaggcagatt

SEQ ID NO: 27183 - DNA, 33 bp, Homo sapiens
tttcttagctagaatactagagatgctttgtaa

SEQ ID NO: 27184 - DNA, 33 bp, Homo sapiens
gagatataattcatacccacctgaagtgtacat

SEQ ID NO: 27185 - DNA, 51 bp, Homo sapiens
tcccctcttgacccttacactggcactaaggaatacaaaagctgaggaagg

SEQ ID NO: 27186 - DNA, 33 bp, Homo sapiens
ttccccctttgagcctcagctacctcacctatc

SEQ ID NO: 27187 - DNA, 33 bp, Homo sapiens
taaatgctcataaaaagatctggcaggccctct

SEQ ID NO: 27188 - DNA, 33 bp, Homo sapiens
cccagggacacaaaaccagtaggtaacagattc

SEQ ID NO: 27189 - DNA, 33 bp, Homo sapiens
tgcttgtgagtatagaactaatttgtgagtact

SEQ ID NO: 27190 - DNA, 33 bp, Homo sapiens
ataacccaagaggactcacaaggatggtgttta

SEQ ID NO: 27191 - DNA, 33 bp, Homo sapiens
ccagtctcctctttccacaggatcagctttcac

SEQ ID NO: 27192 - DNA, 33 bp, Homo sapiens
gtctgtaaaactgccactagagatgtaaggaat

SEQ ID NO: 27193 - DNA, 33 bp, Homo sapiens
tcttaggacaccaaaactgagttattagaccag

SEQ ID NO: 27194 - DNA, 33 bp, Homo sapiens
gttggcaacaaatacacgctggagttggcaagt

SEQ ID NO: 27195 - DNA, 33 bp, Homo sapiens
aagagacgagcaaagaaaaataaactgattcca

SEQ ID NO: 27196 - DNA, 33 bp, Homo sapiens
ttctccaagtgtttaacagaacttggcactggt

SEQ ID NO: 27197 - DNA, 33 bp, Homo sapiens
cctacctctctgaccactctttcctggcccttt

SEQ ID NO: 27198 - DNA, 33 bp, Homo sapiens
gtgtgaggagtcagacagaaagaatgatctact

SEQ ID NO: 27199 - DNA, 33 bp, Homo sapiens
aggcgctgttgatggcaatggcattgatcagca

SEQ ID NO: 27200 - DNA, 33 bp, Homo sapiens
ctctgacctctgcttacaattacacagaaagaa

SEQ ID NO: 27201 - DNA, 33 bp, Homo sapiens
tgtcttatttcctccaaagtccttaagacagtg

SEQ ID NO: 27202 - DNA, 33 bp, Homo sapiens
catatgccttgtacgcccatacaccctacacac

SEQ ID NO: 27203 - DNA, 33 bp, Homo sapiens
gggactctgctggtcacgtaatacacacaaaag

SEQ ID NO: 27204 - DNA, 33 bp, Homo sapiens
tgaataaaagtataacaatgaccgcacatagag

SEQ ID NO: 27205 - DNA, 33 bp, Homo sapiens
aatatttctttatacaaaactttgcattgccaa

SEQ ID NO: 27206 - DNA, 33 bp, Homo sapiens
agattccacaagtgcaagagaagagaagttctg

SEQ ID NO: 27207 - DNA, 33 bp, Homo sapiens
cttcctctgaaacgtgcaaatccaaccaaacac

SEQ ID NO: 27208 - DNA, 51 bp, Homo sapiens
gccaatggcacattgggagctgatacctcacccttgctctgcttttgaagc

SEQ ID NO: 27209 - DNA, 33 bp, Homo sapiens
gaaacagaatgagtcacatcaaggttttaatcc

SEQ ID NO: 27210 - DNA, 33 bp, Homo sapiens
gtgctgcctctctacacagcgagaatgtggact

SEQ ID NO: 27211 - DNA, 33 bp, Homo sapiens
tttggcaacttgagtcaaagtctcctctctaaa

SEQ ID NO: 27212 - DNA, 33 bp, Homo sapiens
caaaggggaacagagggaaagatatgcattgga

SEQ ID NO: 27213 - DNA, 51 bp, Homo sapiens
tagataaaaatatacttcacttccagattacactcagagacaaccaaaggc

SEQ ID NO: 27214 - DNA, 51 bp, Homo sapiens
gttgctctttatgagacgaaataaaattggatgtcacttataaatggattt

SEQ ID NO: 27215 - DNA, 51 bp, Homo sapiens
ttaggagttattcaacaagccattacgcttacaaaaatttatgagtcaaag

SEQ ID NO: 27216 - DNA, 33 bp, Homo sapiens
atattatttcctgctacagttaacaaaatggga

SEQ ID NO: 27217 - DNA, 33 bp, Homo sapiens
tttaaattacagaacgaacgggttttagtgttt

SEQ ID NO: 27218 - DNA, 51 bp, Homo sapiens
tacataagtttgcaatattaacataaccaagaatctgtaactatttcacct

SEQ ID NO: 27219 - DNA, 33 bp, Homo sapiens
gtcactggcttagacaccgtggcagggccgggg

SEQ ID NO: 27220 - DNA, 33 bp, Homo sapiens
atagatcagatagtaacagcacctacctcatgg

SEQ ID NO: 27221 - DNA, 33 bp, Homo sapiens
caactattctgctgaggacaagtttctcaaggc

SEQ ID NO: 27222 - DNA, 33 bp, Homo sapiens
gtgttcggtgcatcgacgtgaattggggaggag

SEQ ID NO: 27223 - DNA, 33 bp, Homo sapiens
ctctcacaggggcaacaaatgcatctgaaagga

SEQ ID NO: 27224 - DNA, 33 bp, Homo sapiens
ccctgaagacacagaacgtgaggtgtgctgcca

SEQ ID NO: 27225 - DNA, 33 bp, Homo sapiens
cccacaccaagaatccacacagatatttatggg

SEQ ID NO: 27226 - DNA, 33 bp, Homo sapiens
aggatgttctgcttcaataaagtggctcacctg

SEQ ID NO: 27227 - DNA, 33 bp, Homo sapiens
caagttctccaatcaaacccctcactactggga

SEQ ID NO: 27228 - DNA, 33 bp, Homo sapiens
aactacgaaatccaaacgcagggagagtggcct

SEQ ID NO: 27229 - DNA, 33 bp, Homo sapiens
caagggcagggcagaaatggacccgagtgcctg

SEQ ID NO: 27230 - DNA, 33 bp, Homo sapiens
gccagactgtctaacactaggcgacggaaactc

SEQ ID NO: 27231 - DNA, 33 bp, Homo sapiens
gcagaaatgtgagctgaatcagtctcctgtatg

SEQ ID NO: 27232 - DNA, 51 bp, Homo sapiens
caaagctaaagtaagagaaatgcaaaagccactgttagaaatagagatgaa

SEQ ID NO: 27233 - DNA, 33 bp, Homo sapiens
aacgctagaaatactgaataacataaattaaat

SEQ ID NO: 27234 - DNA, 33 bp, Homo sapiens
ggttcaagttatccacagactatacctcctttt

SEQ ID NO: 27235 - DNA, 33 bp, Homo sapiens
gccagcctgtgtcgacaaaactcgtagcagaaa

SEQ ID NO: 27236 - DNA, 33 bp, Homo sapiens
ttttgccattttttgaacgctaatgatgtatta

SEQ ID NO: 27237 - DNA, 33 bp, Homo sapiens
atgccagacacttaacaaacatcaccatattta

SEQ ID NO: 27238 - DNA, 33 bp, Homo sapiens
ggtattttgagtcaaggcggtttttgagccaaa

SEQ ID NO: 27239 - DNA, 33 bp, Homo sapiens
ttacaaaacatgaccaatctcattccttcatgt

SEQ ID NO: 27240 - DNA, 33 bp, Homo sapiens
taggtaaacagacccacgagtgttttgttaaag

SEQ ID NO: 27241 - DNA, 33 bp, Homo sapiens
acaaattctgtcaatacgtcctaccggtgacac

SEQ ID NO: 27242 - DNA, 33 bp, Homo sapiens
attttagtgctagtagcagacagtttgatggtt

SEQ ID NO: 27243 - DNA, 33 bp, Homo sapiens
tcaatccatcctgcacagtcgggcaacgtgccc

SEQ ID NO: 27244 - DNA, 33 bp, Homo sapiens
cacagaactgggtgaactaacaatgtccatgct

SEQ ID NO: 27245 - DNA, 33 bp, Homo sapiens
cccagcttgaagcagtcacccacacaagctgat

SEQ ID NO: 27246 - DNA, 33 bp, Homo sapiens
accacctcaggtcttccctttatccattgttct

SEQ ID NO: 27247 - DNA, 33 bp, Homo sapiens
tgatcttgaaaatgtgaacttcattagagggtg

SEQ ID NO: 27248 - DNA, 33 bp, Homo sapiens
gtcagccataaaaaaacagacccagtcatttgc

SEQ ID NO: 27249 - DNA, 33 bp, Homo sapiens
ctttctttgggttataccaagcagatggattac

SEQ ID NO: 27250 - DNA, 33 bp, Homo sapiens
ccactgtgctccatcacggaaggacacttgagt

SEQ ID NO: 27251 - DNA, 33 bp, Homo sapiens
actctggcggtccttaaaaatagaataacttct

SEQ ID NO: 27252 - DNA, 33 bp, Homo sapiens
aagacgctttgcaacacgcccagatactagagc

SEQ ID NO: 27253 - DNA, 33 bp, Homo sapiens
agctcaataaagatccactattgaaaagctact

SEQ ID NO: 27254 - DNA, 33 bp, Homo sapiens
tgcaggacagcaaaaaatctgacaccatctgaa

SEQ ID NO: 27255 - DNA, 33 bp, Homo sapiens
tatgccaactagaaaaaaacaatgcagggggga

SEQ ID NO: 27256 - DNA, 33 bp, Homo sapiens
gggtatcacgagtcacaaaatcactcagccaat

SEQ ID NO: 27257 - DNA, 33 bp, Homo sapiens
ggattcctaatttgtacctctgaacagctgaat

SEQ ID NO: 27258 - DNA, 33 bp, Homo sapiens
tttgttttaagcccccaaagaaactcactgaca

SEQ ID NO: 27259 - DNA, 33 bp, Homo sapiens
aatagtaagtgccatcagagtaggtatatcagt

SEQ ID NO: 27260 - DNA, 51 bp, Homo sapiens
catttgatttgactatatgactagacatttacattttttttttttttttga

SEQ ID NO: 27261 - DNA, 33 bp, Homo sapiens
ccaaaatcactgatggcagttaagcctggaaat

SEQ ID NO: 27262 - DNA, 33 bp, Homo sapiens
agctctcagaaatttaagccatcccagctgagg

SEQ ID NO: 27263 - DNA, 33 bp, Homo sapiens
ccatcctctcccagccacttttcagcttttcta

SEQ ID NO: 27264 - DNA, 33 bp, Homo sapiens
gcctagaggtgatcgacgtagagaaaagggagt

SEQ ID NO: 27265 - DNA, 33 bp, Homo sapiens
ccttaccacggttcacactggcacactaagtct

SEQ ID NO: 27266 - DNA, 33 bp, Homo sapiens
ttctgagtccaaataaagtgtggagagaacgta

SEQ ID NO: 27267 - DNA, 33 bp, Homo sapiens
ctcctcaatattctacccagggtgtggcacaca

SEQ ID NO: 27268 - DNA, 33 bp, Homo sapiens
tagaaataaattaccacgtcatgtcctgtggca

SEQ ID NO: 27269 - DNA, 33 bp, Homo sapiens
tggatattttcccatcaatatagctggagcaca

SEQ ID NO: 27270 - DNA, 33 bp, Homo sapiens
cctggtatttttcacactggggctgaggacaag

SEQ ID NO: 27271 - DNA, 33 bp, Homo sapiens
aaaggctccctctgtacggcaagtaacgtggca

SEQ ID NO: 27272 - DNA, 51 bp, Homo sapiens
catagaaatcactacatagtctaaaaacaactcttttcatatctaattgct

SEQ ID NO: 27273 - DNA, 33 bp, Homo sapiens
tctgacctctgcttgaacccaccactctttgct

SEQ ID NO: 27274 - DNA, 51 bp, Homo sapiens
gctcagttgtgctacatgttagaaaagggcagtgatactcttacttttcag

SEQ ID NO: 27275 - DNA, 33 bp, Homo sapiens
gaattggagctattcaaataatccactacagtc

SEQ ID NO: 27276 - DNA, 33 bp, Homo sapiens
catgacactcttgagacgatagcagggttggaa

SEQ ID NO: 27277 - DNA, 33 bp, Homo sapiens
gccctctgacaaagacacaggtgctaaccatca

SEQ ID NO: 27278 - DNA, 33 bp, Homo sapiens
cttaataaatcccttgcatgcagatcctcatct

SEQ ID NO: 27279 - DNA, 33 bp, Homo sapiens
tactttcaaaagtcaacgctcgtagtgaccaca

SEQ ID NO: 27280 - DNA, 33 bp, Homo sapiens
tttattaattttaccaaaagcctacagacatat

SEQ ID NO: 27281 - DNA, 33 bp, Homo sapiens
ccaggtgcttgtacagacacatggtgaaaagct

SEQ ID NO: 27282 - DNA, 33 bp, Homo sapiens
tctcaggaaagctgccaaacttatctgagagct

SEQ ID NO: 27283 - DNA, 33 bp, Homo sapiens
agagcattttggcaagcccatgattatttctaa

SEQ ID NO: 27284 - DNA, 33 bp, Homo sapiens
aaaatatctgcagccagtcaaaatactctcgtg

SEQ ID NO: 27285 - DNA, 33 bp, Homo sapiens
ccacttaggtggaaaacactgacaaccaagtgg

SEQ ID NO: 27286 - DNA, 33 bp, Homo sapiens
tctttgggaaaaagaactgagtgggctagatag

SEQ ID NO: 27287 - DNA, 33 bp, Homo sapiens
ccaaaataaatgcatccatctccttcacatctg

SEQ ID NO: 27288 - DNA, 33 bp, Homo sapiens
tgtagccaagagtgaacatgatgtagccttctt

SEQ ID NO: 27289 - DNA, 33 bp, Homo sapiens
tccatttttaggccgaagagtcttgtaaatgta

SEQ ID NO: 27290 - DNA, 33 bp, Homo sapiens
agtctcacgctacaatgaactcgttatactttc

SEQ ID NO: 27291 - DNA, 51 bp, Homo sapiens
agagtatatatctgctgtgtgaagtaaaagaaccctgatagtgttatagta

SEQ ID NO: 27292 - DNA, 33 bp, Homo sapiens
ttcaggaataaactgacctgccctagttcacag

SEQ ID NO: 27293 - DNA, 33 bp, Homo sapiens
gattatggatgaaggggacaaatttatagtttc

SEQ ID NO: 27294 - DNA, 33 bp, Homo sapiens
acaacaatctctcttgcatcgacatccgtgtta

SEQ ID NO: 27295 - DNA, 33 bp, Homo sapiens
aattgaaaaaactctacgaaggccagaggaaga

SEQ ID NO: 27296 - DNA, 51 bp, Homo sapiens
aactactttagaaatcttctacaaactcaattaccttatcttaccttttgc

SEQ ID NO: 27297 - DNA, 33 bp, Homo sapiens
tgtgattcatttatgaaaggaaatgtgcatcat

SEQ ID NO: 27298 - DNA, 33 bp, Homo sapiens
aaatgcctgacatttaaaggtagaatgaggaag

SEQ ID NO: 27299 - DNA, 33 bp, Homo sapiens
tctcttgaactggaatgaatatgaagtagcctg

SEQ ID NO: 27300 - DNA, 33 bp, Homo sapiens
tggttccataactcaacgtacttgttccaattc

SEQ ID NO: 27301 - DNA, 33 bp, Homo sapiens
taagtatttccacttgaatgtccttgaccagaa

SEQ ID NO: 27302 - DNA, 33 bp, Homo sapiens
agaaaataagattagaagcaagaagatcaacta

SEQ ID NO: 27303 - DNA, 33 bp, Homo sapiens
cacttctgaaaagaagacatacgcgtggtcaac

SEQ ID NO: 27304 - DNA, 33 bp, Homo sapiens
gttggcacagccttatgaggaagataatccaat

SEQ ID NO: 27305 - DNA, 33 bp, Homo sapiens
ttttttccactccaaactgagcgatctgtgctc

SEQ ID NO: 27306 - DNA, 33 bp, Homo sapiens
acttttggtagacctgcactcaactatttgtag

SEQ ID NO: 27307 - DNA, 51 bp, Homo sapiens
taaagtcgtagctttgtgcaccacaactaactgtttcaaaaatttcctaat

SEQ ID NO: 27308 - DNA, 33 bp, Homo sapiens
tagctactctgagctcgaagactgtgagatgtc

SEQ ID NO: 27309 - DNA, 33 bp, Homo sapiens
atacaaatgtgaagtacaatcattccctgacat

SEQ ID NO: 27310 - DNA, 33 bp, Homo sapiens
ataaacctggatgtcaatcttacagctataaca

SEQ ID NO: 27311 - DNA, 33 bp, Homo sapiens
agactgtaactcaaagaagcttgtggacagagt

SEQ ID NO: 27312 - DNA, 33 bp, Homo sapiens
gctgacccacaagaacacagggaatgaaaggca

SEQ ID NO: 27313 - DNA, 51 bp, Homo sapiens
agaaaatccctctggcaaccaataccgaccattacaatgaacagataatta

SEQ ID NO: 27314 - DNA, 33 bp, Homo sapiens
tattgaagcttacaccgcattttgtgatccagt

SEQ ID NO: 27315 - DNA, 33 bp, Homo sapiens
gttattccaaagtgaacgtcttaaaacaacaga

SEQ ID NO: 27316 - DNA, 33 bp, Homo sapiens
agcctgacagtatcaacgttactctctaaatgc

SEQ ID NO: 27317 - DNA, 33 bp, Homo sapiens
aatttcaaaatgaagacagcctttgcacttacc

SEQ ID NO: 27318 - DNA, 33 bp, Homo sapiens
aatattagatatgctacgtgttttgcctttgct

SEQ ID NO: 27319 - DNA, 33 bp, Homo sapiens
ctcagctaaatgaccccgaaactgtagaatttt

SEQ ID NO: 27320 - DNA, 33 bp, Homo sapiens
tatgtcagctcagttaactctctaatgcagcct

SEQ ID NO: 27321 - DNA, 33 bp, Homo sapiens
tcttttgtgcaaaaataatgtcctaatgtattg

SEQ ID NO: 27322 - DNA, 33 bp, Homo sapiens
atatttttccttctgaactccagatactatttc

SEQ ID NO: 27323 - DNA, 33 bp, Homo sapiens
ttcctctcagcttaaacaaaagtgtctgctact

SEQ ID NO: 27324 - DNA, 33 bp, Homo sapiens
tatggtatagccttacaaacactgttgtcactt

SEQ ID NO: 27325 - DNA, 51 bp, Homo sapiens
tgctctggctgactcatttcatggaacttcctgttaaatttttgcctagtc

SEQ ID NO: 27326 - DNA, 51 bp, Homo sapiens
ataaagaggctcaaaagtaatagaaaaggatcttaagtcagcccctgttta

SEQ ID NO: 27327 - DNA, 51 bp, Homo sapiens
ccagttgccaaactctggggataagaatggacaaaatacagtctctgcccc

SEQ ID NO: 27328 - DNA, 33 bp, Homo sapiens
gtcagagagtggagaacgattttttctactggt

SEQ ID NO: 27329 - DNA, 33 bp, Homo sapiens
atacgatggctgtctcaaaggaaagcatttgta

SEQ ID NO: 27330 - DNA, 33 bp, Homo sapiens
atgataatatttagacactgtgactcttcagaa

SEQ ID NO: 27331 - DNA, 33 bp, Homo sapiens
gagcaaacaatcatggaatctagtcactgtgca

SEQ ID NO: 27332 - DNA, 33 bp, Homo sapiens
ctactttttgctttggcaacactatctaagcat

SEQ ID NO: 27333 - DNA, 33 bp, Homo sapiens
ctatagaagtgactataagttccatcaaatagg

SEQ ID NO: 27334 - DNA, 33 bp, Homo sapiens
agctgcatcacatctaaaacttttctccaagta

SEQ ID NO: 27335 - DNA, 33 bp, Homo sapiens
aacaagtagaggtagacggcaattccaatgaaa

SEQ ID NO: 27336 - DNA, 33 bp, Homo sapiens
cagaatttgaatccacaaaatttacttgggaac

SEQ ID NO: 27337 - DNA, 33 bp, Homo sapiens
gaagttggtctttccaagatcattacctgctga

SEQ ID NO: 27338 - DNA, 33 bp, Homo sapiens
atcttggatgtcggaaacttcaattatctgcag

SEQ ID NO: 27339 - DNA, 33 bp, Homo sapiens
cctattaagacaatgaacagatttgcaagaatg

SEQ ID NO: 27340 - DNA, 33 bp, Homo sapiens
tgaggcaagactatttcaaagatatcagcgata

SEQ ID NO: 27341 - DNA, 33 bp, Homo sapiens
ttggagtctaatgctaaccatgtttcctcatac

SEQ ID NO: 27342 - DNA, 33 bp, Homo sapiens
cactctagttcctgaagcaattggtctgcagtg

SEQ ID NO: 27343 - DNA, 51 bp, Homo sapiens
caccaatctagggcagctgttccacacagagatgcacattcgaatcagctg

SEQ ID NO: 27344 - DNA, 51 bp, Homo sapiens
taagaacaaacacccaagatttttcaacagctgtaatgctttgtgttaaca

SEQ ID NO: 27345 - DNA, 33 bp, Homo sapiens
aaaggagacgacaatacaatcagatgtattgtg

SEQ ID NO: 27346 - DNA, 33 bp, Homo sapiens
tttgccaggaaggaaacaaaaacagcgaagggc

SEQ ID NO: 27347 - DNA, 33 bp, Homo sapiens
gccacccctttctaacccaacaactccttgacc

SEQ ID NO: 27348 - DNA, 33 bp, Homo sapiens
ggagagaattgcaccaaataaatgcaaaaatat

SEQ ID NO: 27349 - DNA, 51 bp, Homo sapiens
aaggataaagaaaactactgtatacaaattagggccacgatgtgagctgta

SEQ ID NO: 27350 - DNA, 33 bp, Homo sapiens
gacagtgttttggcaagaaaaaaatttagtttc

SEQ ID NO: 27351 - DNA, 33 bp, Homo sapiens
catagcgccttgtacaaaggatgtcgataaatg

SEQ ID NO: 27352 - DNA, 33 bp, Homo sapiens
ttctggaacatcaaaaaagcaatggcctaatta

SEQ ID NO: 27353 - DNA, 33 bp, Homo sapiens
cctactgggcaaccagactgaatccactgtttc

SEQ ID NO: 27354 - DNA, 33 bp, Homo sapiens
tttatatttcatttaccaccagttctagttcat

SEQ ID NO: 27355 - DNA, 33 bp, Homo sapiens
gattccctggccaaagacagtaccaggttccaa

SEQ ID NO: 27356 - DNA, 33 bp, Homo sapiens
actggactgtttgcccagcatttatgccctctc

SEQ ID NO: 27357 - DNA, 33 bp, Homo sapiens
ttccagggccctagaacccatttgtcactgaga

SEQ ID NO: 27358 - DNA, 33 bp, Homo sapiens
gcctcgctcttcagatcaacctttcttcttttc

SEQ ID NO: 27359 - DNA, 33 bp, Homo sapiens
acttggcattcagttgcaatcacctctattttt

SEQ ID NO: 27360 - DNA, 33 bp, Homo sapiens
tgtacataaaagttcacggaagcattgttcaca

SEQ ID NO: 27361 - DNA, 33 bp, Homo sapiens
ggagacgtgtctagataactgccaacaatgaca

SEQ ID NO: 27362 - DNA, 33 bp, Homo sapiens
tctttggccatgaaaacaatatgacaacatagc

SEQ ID NO: 27363 - DNA, 33 bp, Homo sapiens
tggaacatcaaggaaaaatcacactgtcaatta

SEQ ID NO: 27364 - DNA, 33 bp, Homo sapiens
tgccttcagaggccaaacagataaccttagtga

SEQ ID NO: 27365 - DNA, 33 bp, Homo sapiens
gcctgatggctaagcacagaggatgtttttacc

SEQ ID NO: 27366 - DNA, 33 bp, Homo sapiens
gttttgcctggacagcagaaaacagttatgaaa

SEQ ID NO: 27367 - DNA, 33 bp, Homo sapiens
atgggcacaaatagagcagaagcccactatgat

SEQ ID NO: 27368 - DNA, 33 bp, Homo sapiens
cttggaagagtataaactgaactatgtcacact

SEQ ID NO: 27369 - DNA, 33 bp, Homo sapiens
gtgttgaagacactacagagtttattcttctct

SEQ ID NO: 27370 - DNA, 33 bp, Homo sapiens
ggtacacttggaaacacaacaccatagaatgtt

SEQ ID NO: 27371 - DNA, 51 bp, Homo sapiens
ccatattttcttccatttttttaatcagagaggagtatttgtctgtagtcc

SEQ ID NO: 27372 - DNA, 33 bp, Homo sapiens
agtgctgtaagagtcaaatgtaacctctggagg

SEQ ID NO: 27373 - DNA, 51 bp, Homo sapiens
gtcctgagctatggtatatcccatcaaaaggtagtcattgccactcaccta

SEQ ID NO: 27374 - DNA, 33 bp, Homo sapiens
ttgagtcttgaacaaaagtcaaccaaatgggga

SEQ ID NO: 27375 - DNA, 33 bp, Homo sapiens
ccaagactacagtgaaatcggccacctctcctc

SEQ ID NO: 27376 - DNA, 33 bp, Homo sapiens
atcaatctaacttcaccgagcaaagcttcatgc

SEQ ID NO: 27377 - DNA, 33 bp, Homo sapiens
gactggcaatgttcccaatgttaacaatgtaaa

SEQ ID NO: 27378 - DNA, 51 bp, Homo sapiens
gaaatagggacctgcatttcaaaggacatccttacccaaacagggagcccc

SEQ ID NO: 27379 - DNA, 51 bp, Homo sapiens
gaaattgtgagtttgttttggtagacgtaaagtgtaagaggtaaaaatgtg

SEQ ID NO: 27380 - DNA, 51 bp, Homo sapiens
ggtatgtatttaaaacatatgtttagaatcctgacttgaagcaacctaact

SEQ ID NO: 27381 - DNA, 51 bp, Homo sapiens
caggtggaattagataatagacccaagttaggttgcttcaagtcaggattc

SEQ ID NO: 27382 - DNA, 33 bp, Homo sapiens
aactaagtaacaaaaaacggcaattcaatttgt

SEQ ID NO: 27383 - DNA, 33 bp, Homo sapiens
atagtaagactgtgttaaaaaaggatgaggatg

SEQ ID NO: 27384 - DNA, 33 bp, Homo sapiens
agggatttgagtgggacgaagggaaggttaagc

SEQ ID NO: 27385 - DNA, 33 bp, Homo sapiens
aggacagtacacagaaagactggcactgagatc

SEQ ID NO: 27386 - DNA, 33 bp, Homo sapiens
ggacactgaaaatcaagatgccttcattggtaa

SEQ ID NO: 27387 - DNA, 33 bp, Homo sapiens
ccacagtcttgctttcaatgaacttataatgtt

SEQ ID NO: 27388 - DNA, 33 bp, Homo sapiens
atttgtcaaggctgcactaaaaacattttggtc

SEQ ID NO: 27389 - DNA, 33 bp, Homo sapiens
ctgaattcgaaatatacggtacttggttcgggt

SEQ ID NO: 27390 - DNA, 33 bp, Homo sapiens
caagcatcaaagcacaactccagtctccagttc

SEQ ID NO: 27391 - DNA, 33 bp, Homo sapiens
ctgttgaatctgatagcataaaatggagcttgt

SEQ ID NO: 27392 - DNA, 33 bp, Homo sapiens
tcttatatggttacatgaaacattgggagtctg

SEQ ID NO: 27393 - DNA, 33 bp, Homo sapiens
agatagctgagatagaataacaatggacaacag

SEQ ID NO: 27394 - DNA, 33 bp, Homo sapiens
tcagctctaggcccaaggaaactcgattctaat

SEQ ID NO: 27395 - DNA, 33 bp, Homo sapiens
actcatctttgaggaaagttacaaaagataatg

SEQ ID NO: 27396 - DNA, 33 bp, Homo sapiens
agtacactgaatcagacactaaaaatgacactg

SEQ ID NO: 27397 - DNA, 51 bp, Homo sapiens
ttattgtccccaaagcttgtctgaggaaatcgacatcaggaaattatgttg

SEQ ID NO: 27398 - DNA, 33 bp, Homo sapiens
agtatatttgaatagaaagtttcagtacagcgt

SEQ ID NO: 27399 - DNA, 33 bp, Homo sapiens
attaatagcaagattacaagtattaggttctat

SEQ ID NO: 27400 - DNA, 33 bp, Homo sapiens
tcattttgtacatataagcaggagaagaattgc

SEQ ID NO: 27401 - DNA, 33 bp, Homo sapiens
gccagaggagatccaacttctcagaagggtgag

SEQ ID NO: 27402 - DNA, 33 bp, Homo sapiens
ttcagtggctcacctcaaaacttctaaatgaga

SEQ ID NO: 27403 - DNA, 33 bp, Homo sapiens
catgtctaactccaaaaccattaatgtattaga

SEQ ID NO: 27404 - DNA, 51 bp, Homo sapiens
gatgaaaatctgccttctgtctttacagagttcttgagtcagaaaaattaa

SEQ ID NO: 27405 - DNA, 33 bp, Homo sapiens
cataacacttgtgagactcacctattttgttat

SEQ ID NO: 27406 - DNA, 33 bp, Homo sapiens
tggaagaatgatgatgccacttgctgagatggg

SEQ ID NO: 27407 - DNA, 33 bp, Homo sapiens
gcactgtgtaaatgtccgaagggccagaaagat

SEQ ID NO: 27408 - DNA, 33 bp, Homo sapiens
actcaacccaagcaaagttgtcctagtgtgccc

SEQ ID NO: 27409 - DNA, 33 bp, Homo sapiens
tgctatgcctaggagaagtaaagcctaaaggaa

SEQ ID NO: 27410 - DNA, 33 bp, Homo sapiens
catgtgcagcacaacaaatcaagccaggcagat

SEQ ID NO: 27411 - DNA, 33 bp, Homo sapiens
ttcaattattgtctcacgtgtacctgtaggacc

SEQ ID NO: 27412 - DNA, 33 bp, Homo sapiens
ttcttcagagaaggagacatccatgagccatta

SEQ ID NO: 27413 - DNA, 51 bp, Homo sapiens
atggtttcccaaaaacatgactgacaatgggagcctcagaagtctctacgt

SEQ ID NO: 27414 - DNA, 33 bp, Homo sapiens
gactatcgaggtggagcctaaatgtaatctaaa

SEQ ID NO: 27415 - DNA, 33 bp, Homo sapiens
caggcaggaagtgctaagggagaacacaccctg

SEQ ID NO: 27416 - DNA, 33 bp, Homo sapiens
atgtagttggcagtcaccccatagaagtgatgt

SEQ ID NO: 27417 - DNA, 33 bp, Homo sapiens
cgatcgggtacttatgcaaattctcaggatatc

SEQ ID NO: 27418 - DNA, 33 bp, Homo sapiens
ttgcatttcactgaagcaagttgccagaactct

SEQ ID NO: 27419 - DNA, 33 bp, Homo sapiens
gccttgactaaactccaggaaatgagacacagc

SEQ ID NO: 27420 - DNA, 51 bp, Homo sapiens
ctcacagggcaaataagatgtactactagagagccaggcaagataaaaata

SEQ ID NO: 27421 - DNA, 33 bp, Homo sapiens
agagatgatcaaatcacggaagtaagtgagaaa

SEQ ID NO: 27422 - DNA, 33 bp, Homo sapiens
aaccctgcaaaaggtcacagctatttttccaca

SEQ ID NO: 27423 - DNA, 33 bp, Homo sapiens
tttcgattctgggtacaactaacttaggcaaca

SEQ ID NO: 27424 - DNA, 33 bp, Homo sapiens
gtgggtgagggaacaccaataaacagcattata

SEQ ID NO: 27425 - DNA, 33 bp, Homo sapiens
gactatgaatactagagaggaaacaggagtttc

SEQ ID NO: 27426 - DNA, 33 bp, Homo sapiens
agccagtgtccccttcaccaggttagacgaggt

SEQ ID NO: 27427 - DNA, 33 bp, Homo sapiens
cactggggctaaaagaactggagaagcagagga

SEQ ID NO: 27428 - DNA, 33 bp, Homo sapiens
ctgtaaaaagccaataaagccggatgcagtggc

SEQ ID NO: 27429 - DNA, 33 bp, Homo sapiens
ccttttgatgattcacactcttacactatatag

SEQ ID NO: 27430 - DNA, 33 bp, Homo sapiens
tcaagttcaagaaggaaagctcgacattgaaca

SEQ ID NO: 27431 - DNA, 33 bp, Homo sapiens
aaaagtacaaactgtacgacaccattgctatga

SEQ ID NO: 27432 - DNA, 33 bp, Homo sapiens
agatactgtagcaacccccctgagatttaactg

SEQ ID NO: 27433 - DNA, 33 bp, Homo sapiens
gaaaaggaagcttccacgagtaggcacttgacc

SEQ ID NO: 27434 - DNA, 33 bp, Homo sapiens
caactctacccaatcacatcaggtctcctagat

SEQ ID NO: 27435 - DNA, 51 bp, Homo sapiens
gtatttcttaacagagcataaaaaaatggtgttctccatgtgccatatttt

SEQ ID NO: 27436 - DNA, 33 bp, Homo sapiens
ctttttttctcttacacatttagtgtctggtat

SEQ ID NO: 27437 - DNA, 33 bp, Homo sapiens
gatataagtaggctcaaaggtgtaggccatgac

SEQ ID NO: 27438 - DNA, 33 bp, Homo sapiens
aaagggatagggttaactcgtatgtttcaacat

SEQ ID NO: 27439 - DNA, 33 bp, Homo sapiens
ctatagcttaaaaacacgaggatagggttatac

SEQ ID NO: 27440 - DNA, 33 bp, Homo sapiens
agtattactagagctaaagagagagaccgtaat

SEQ ID NO: 27441 - DNA, 33 bp, Homo sapiens
gatcatttgtgtcttacattaactttgtcagaa

SEQ ID NO: 27442 - DNA, 33 bp, Homo sapiens
caacactgctaagagcaaggagctggaaaaagg

SEQ ID NO: 27443 - DNA, 33 bp, Homo sapiens
taagtcaccaaagaacactaacctcatctgaaa

SEQ ID NO: 27444 - DNA, 33 bp, Homo sapiens
ggcagagtatataccactgagatacaatagatg

SEQ ID NO: 27445 - DNA, 33 bp, Homo sapiens
tcaagacacatagagacgaaaaatatgcaactg

SEQ ID NO: 27446 - DNA, 33 bp, Homo sapiens
tgtttcaattttggtacgcctagtgatttggga

SEQ ID NO: 27447 - DNA, 33 bp, Homo sapiens
ttcactagttggttcagtagttatagtatgatt

SEQ ID NO: 27448 - DNA, 33 bp, Homo sapiens
ctactgcacgttggtaacatactctcccaaaga

SEQ ID NO: 27449 - DNA, 33 bp, Homo sapiens
tgggactgaggcaagtaaccaagaatgcactat

SEQ ID NO: 27450 - DNA, 33 bp, Homo sapiens
gagggtgatgcaacaaacatgaaggtgagggtg

SEQ ID NO: 27451 - DNA, 33 bp, Homo sapiens
ctctatatttattgaacgggcaggaaaacaatt

SEQ ID NO: 27452 - DNA, 33 bp, Homo sapiens
tacatgggatggtaagcccagcaggtgcactat

SEQ ID NO: 27453 - DNA, 33 bp, Homo sapiens
attggtgtgctctccaaagaatttgtagctatt

SEQ ID NO: 27454 - DNA, 51 bp, Homo sapiens
aaagaactgtatttttcaatccaaaatgttcgaaatattgaaacatataat

SEQ ID NO: 27455 - DNA, 51 bp, Homo sapiens
aatacactagctttttcaaagtctacgcaaatgtgaatcagaaaagaaaca

SEQ ID NO: 27456 - DNA, 33 bp, Homo sapiens
ctcacgttggtatccaagtttgaaggaacacta

SEQ ID NO: 27457 - DNA, 33 bp, Homo sapiens
attggagaaggtgtgacctgagagagctgaaaa

SEQ ID NO: 27458 - DNA, 33 bp, Homo sapiens
tatattagtcctagccaatgctgagaaagtttg

SEQ ID NO: 27459 - DNA, 33 bp, Homo sapiens
tcatgggaatgtacagaaaaaacctaatatgtg

SEQ ID NO: 27460 - DNA, 33 bp, Homo sapiens
actttggattccctaactacctcaagaatgata

SEQ ID NO: 27461 - DNA, 33 bp, Homo sapiens
tgagaatgctttactgaagaatttcccaaagta

SEQ ID NO: 27462 - DNA, 33 bp, Homo sapiens
ataaccttcttttctaccacctttcagtaatac

SEQ ID NO: 27463 - DNA, 33 bp, Homo sapiens
aggagactgaaaaccacgagtgtccaaagcctc

SEQ ID NO: 27464 - DNA, 33 bp, Homo sapiens
ttgaggatgggactaaaggctaaacttcatatt

SEQ ID NO: 27465 - DNA, 33 bp, Homo sapiens
agtagcatgaaattagccatgttcatattaagg

SEQ ID NO: 27466 - DNA, 33 bp, Homo sapiens
ttcattctatccttcaatcaccttctatgttca

SEQ ID NO: 27467 - DNA, 33 bp, Homo sapiens
aacagaatcctgaagacctatttgtactccatg

SEQ ID NO: 27468 - DNA, 33 bp, Homo sapiens
cagcagagagacaagtcaaaaagcaactgtagt

SEQ ID NO: 27469 - DNA, 33 bp, Homo sapiens
tctggctacactgaaaagcatcaaataacaagg

SEQ ID NO: 27470 - DNA, 33 bp, Homo sapiens
tatgaatgacaggttgcatttttgttttgaaaa

SEQ ID NO: 27471 - DNA, 33 bp, Homo sapiens
gcttctgacacacacaaagcatgaaaaaaaatt

SEQ ID NO: 27472 - DNA, 33 bp, Homo sapiens
cctaccttttttcgtaacctatagttctctacc

SEQ ID NO: 27473 - DNA, 33 bp, Homo sapiens
agtgcaccgttgctcacagcacaatccctcagg

SEQ ID NO: 27474 - DNA, 51 bp, Homo sapiens
tcacaagactctaaaaagataggaactaagaaaactacaggacaatgaaga

SEQ ID NO: 27475 - DNA, 33 bp, Homo sapiens
agacaaaaaaataaacaggcatataacgagtgt

SEQ ID NO: 27476 - DNA, 33 bp, Homo sapiens
gtgtcagtgcaggttcaacaatggtaactaatg

SEQ ID NO: 27477 - DNA, 51 bp, Homo sapiens
aaaaagaaatagagcatcttctttacggtgaatttctatgttaagaaaagg

SEQ ID NO: 27478 - DNA, 33 bp, Homo sapiens
aaagattcagctccacaaatgcactgtggatta

SEQ ID NO: 27479 - DNA, 33 bp, Homo sapiens
gagattccaaaactcagtctctaaccactttat

SEQ ID NO: 27480 - DNA, 33 bp, Homo sapiens
tctaaaagttggagcaaaactcctaaattaaac

SEQ ID NO: 27481 - DNA, 51 bp, Homo sapiens
atcagactcaccaaagcttgatctaggctatcagacttttcaaggaaccac

SEQ ID NO: 27482 - DNA, 51 bp, Homo sapiens
accatcacaacgtctatcataatacaatgaatgaaccgcgtactatttaaa

SEQ ID NO: 27483 - DNA, 33 bp, Homo sapiens
gattcagcactgctacaactggtgagtttttcc

SEQ ID NO: 27484 - DNA, 33 bp, Homo sapiens
cccacgcagcataggcaaaaacagtcattcagt

SEQ ID NO: 27485 - DNA, 33 bp, Homo sapiens
gttgggttgtcattaaagcgtacaattttaatt

SEQ ID NO: 27486 - DNA, 33 bp, Homo sapiens
caggaatgaaaactaaaaaaagaagcatacaaa

SEQ ID NO: 27487 - DNA, 33 bp, Homo sapiens
tgaagagttgcataaactgacttaaacacacat

SEQ ID NO: 27488 - DNA, 33 bp, Homo sapiens
ctcctggccaaaaggaatattaacagacatttt

SEQ ID NO: 27489 - DNA, 33 bp, Homo sapiens
cctcccagggaaaatacgtaggaagcccactgc

SEQ ID NO: 27490 - DNA, 33 bp, Homo sapiens
ctctgtaagagtgaaagtaagagtggttctcac

SEQ ID NO: 27491 - DNA, 33 bp, Homo sapiens
ttcctccattaggcacaaggttgatttgtctag

SEQ ID NO: 27492 - DNA, 33 bp, Homo sapiens
attttccaaaccagaaacgtcttgggaatcaca

SEQ ID NO: 27493 - DNA, 33 bp, Homo sapiens
tctgagtgaacaccaccaagctaccctcagctc

SEQ ID NO: 27494 - DNA, 33 bp, Homo sapiens
gggcttctatcagggaaaaacccagggacaata

SEQ ID NO: 27495 - DNA, 51 bp, Homo sapiens
atctttcaaattctttcttctcatcaaatggactgggttttgtctggcctt

SEQ ID NO: 27496 - DNA, 33 bp, Homo sapiens
gctgggtagaaggaagcccaatcacctatgaca

SEQ ID NO: 27497 - DNA, 33 bp, Homo sapiens
tcagggtcacaaaccactaaatggcagcatggg

SEQ ID NO: 27498 - DNA, 33 bp, Homo sapiens
ttagaaaacattagacaaagcctgctggattca

SEQ ID NO: 27499 - DNA, 33 bp, Homo sapiens
atcacctacccagaaaactatctaaataccatc

SEQ ID NO: 27500 - DNA, 33 bp, Homo sapiens
ccttaaaaagtggccaaatgacatgaacagaca

SEQ ID NO: 27501 - DNA, 33 bp, Homo sapiens
tgaggccccaccaccacgtcagtttccagtggc

SEQ ID NO: 27502 - DNA, 33 bp, Homo sapiens
tctggatcagaagacaaaaccaaattagaaatt

SEQ ID NO: 27503 - DNA, 33 bp, Homo sapiens
cgcttctttgggtcaacaatcaaacaatactgc

SEQ ID NO: 27504 - DNA, 33 bp, Homo sapiens
ctgagtctccttcaaaagcttgtctcctaccac

SEQ ID NO: 27505 - DNA, 33 bp, Homo sapiens
aatcttattggagttaccttatgcacatgagtt

SEQ ID NO: 27506 - DNA, 33 bp, Homo sapiens
cttacaccgagcaatacaaacagtaggttacac

SEQ ID NO: 27507 - DNA, 51 bp, Homo sapiens
tgtacatctgaacgagttttcacatatgcatatacccctgtaaccaccacc

SEQ ID NO: 27508 - DNA, 33 bp, Homo sapiens
tgtgaacctaccatccaacttcaaaacagtacc

SEQ ID NO: 27509 - DNA, 33 bp, Homo sapiens
tgacctaccatttttgaaaatcttctcaaattc

SEQ ID NO: 27510 - DNA, 51 bp, Homo sapiens
aaaagatagatgccaattatagaacaaaatttaagaaaactgttctaaatg

SEQ ID NO: 27511 - DNA, 33 bp, Homo sapiens
tgtactcctggtaaaaaccctctgatctaattc

SEQ ID NO: 27512 - DNA, 33 bp, Homo sapiens
tccgtttccagcagcacggttctatccagcctg

SEQ ID NO: 27513 - DNA, 33 bp, Homo sapiens
tagggagaggaagtgacgtgtttaaaagcatga

SEQ ID NO: 27514 - DNA, 33 bp, Homo sapiens
aggtcttactctgtgggaatttagaaaatcaga

SEQ ID NO: 27515 - DNA, 51 bp, Homo sapiens
gcactgaaaattgaaacatgaattaactgatgataatattgcaatcatttg

SEQ ID NO: 27516 - DNA, 33 bp, Homo sapiens
cagacagtgtgccccaagattaggcaacaggga

SEQ ID NO: 27517 - DNA, 33 bp, Homo sapiens
cagaatgttccctagcacttcttcccagtcagt

SEQ ID NO: 27518 - DNA, 33 bp, Homo sapiens
tagagatctggacagacgtaaccttcatgttca

SEQ ID NO: 27519 - DNA, 33 bp, Homo sapiens
taccttgagaaatgccaatcggcctgtatattc

SEQ ID NO: 27520 - DNA, 33 bp, Homo sapiens
gtaccacatcctactacgatgacgtgggcctgc

SEQ ID NO: 27521 - DNA, 33 bp, Homo sapiens
gatatgggcttgaataagaaaatacctaatgat

SEQ ID NO: 27522 - DNA, 33 bp, Homo sapiens
ccttatttttgaatggcactgaatccctatata

SEQ ID NO: 27523 - DNA, 33 bp, Homo sapiens
taggctgaagattataaatgtcagctcgcaatg

SEQ ID NO: 27524 - DNA, 33 bp, Homo sapiens
tccacttggttataggcagccttgataacatct

SEQ ID NO: 27525 - DNA, 51 bp, Homo sapiens
gtgctgggtggggaaatcatgagaccctttttctgggacaggagtgtcaca

SEQ ID NO: 27526 - DNA, 33 bp, Homo sapiens
cagacacttataaataatataggcactgttaga

SEQ ID NO: 27527 - DNA, 33 bp, Homo sapiens
agagcagagagtggaaatgttccaggtataaag

SEQ ID NO: 27528 - DNA, 33 bp, Homo sapiens
gagggagaggtttttcccagcataaccctcagc

SEQ ID NO: 27529 - DNA, 33 bp, Homo sapiens
ggtcctgtattcatgccaaagtcacaggggagc

SEQ ID NO: 27530 - DNA, 33 bp, Homo sapiens
gatggacaacatatcaagccataattcaaagta

SEQ ID NO: 27531 - DNA, 33 bp, Homo sapiens
tggagctaaaattcacaatgtgagcctccgcat

SEQ ID NO: 27532 - DNA, 33 bp, Homo sapiens
caggcatacacgtcccactctctcaagaatgcc

SEQ ID NO: 27533 - DNA, 33 bp, Homo sapiens
ggggcttgacctgtgaagagaagttgaggctca

SEQ ID NO: 27534 - DNA, 33 bp, Homo sapiens
ctgggcccaggaaagcagaagacacctttacct

SEQ ID NO: 27535 - DNA, 33 bp, Homo sapiens
acaacaaggacaggccaatgtgcagaagggcag

SEQ ID NO: 27536 - DNA, 33 bp, Homo sapiens
tgctagggacttggaaacataggaccctgtggg

SEQ ID NO: 27537 - DNA, 33 bp, Homo sapiens
cggaatggaaacgagcagaagaataagggaatg

SEQ ID NO: 27538 - DNA, 33 bp, Homo sapiens
ttggtcagagcacttaacattaggtctgcttcc

SEQ ID NO: 27539 - DNA, 33 bp, Homo sapiens
acagactcacagtttcaagccctgagcttatct

SEQ ID NO: 27540 - DNA, 51 bp, Homo sapiens
ggtctctcctgctttgattttagtaaaagtggactctgccattctctgcct

SEQ ID NO: 27541 - DNA, 33 bp, Homo sapiens
ggatgtgagtccttgcacagtggtgaaatgtag

SEQ ID NO: 27542 - DNA, 33 bp, Homo sapiens
cttaagccaatcatgaagctcaccaggcaaggt

SEQ ID NO: 27543 - DNA, 33 bp, Homo sapiens
ctctcccatcaacgagacagtaataaattaaga

SEQ ID NO: 27544 - DNA, 33 bp, Homo sapiens
tgtcctaagtcatttacactcaagtctctcatc

SEQ ID NO: 27545 - DNA, 51 bp, Homo sapiens
ccacacctagacagacagagaaagagaaaatgtgacagtctaagaacttaa

SEQ ID NO: 27546 - DNA, 33 bp, Homo sapiens
ttttatagtaccatcaatagtaggcggaaatga

SEQ ID NO: 27547 - DNA, 33 bp, Homo sapiens
ggaaacatggtgcgccagacgttactgcaggca

SEQ ID NO: 27548 - DNA, 33 bp, Homo sapiens
aagaccaccatccagcccaccaatcacaacttg

SEQ ID NO: 27549 - DNA, 33 bp, Homo sapiens
aaaaggacatacatgaagaattgccaaaacgga

SEQ ID NO: 27550 - DNA, 33 bp, Homo sapiens
cacaaaactccgtcaaccttattatttgctact

SEQ ID NO: 27551 - DNA, 33 bp, Homo sapiens
acagcaaattggaaaaagctgaaatgcttctct

SEQ ID NO: 27552 - DNA, 33 bp, Homo sapiens
gacaaaagcaaagcaaagctagtgaattcaata

SEQ ID NO: 27553 - DNA, 33 bp, Homo sapiens
aaaatgaagcaagataaaggcagctgaatactg

SEQ ID NO: 27554 - DNA, 33 bp, Homo sapiens
atttcaggcctgtcacaaatcctgatttaccat

SEQ ID NO: 27555 - DNA, 33 bp, Homo sapiens
aaaaccagactctaagccccttcgacagcccag

SEQ ID NO: 27556 - DNA, 33 bp, Homo sapiens
tggtttcgattaataccacactggtggcttcag

SEQ ID NO: 27557 - DNA, 33 bp, Homo sapiens
gctcccctccacataaccttcatatgccaagcc

SEQ ID NO: 27558 - DNA, 33 bp, Homo sapiens
tgggataatgatacccaagtactctcttgcttt

SEQ ID NO: 27559 - DNA, 33 bp, Homo sapiens
gccatttgaaaattacaagagaagaaagaaaga

SEQ ID NO: 27560 - DNA, 33 bp, Homo sapiens
tactggtcaacaaatacctccacagtgactagt

SEQ ID NO: 27561 - DNA, 33 bp, Homo sapiens
aacagataaagcagtaaggacttggcctggact

SEQ ID NO: 27562 - DNA, 33 bp, Homo sapiens
agtatcttctctgctaggtattgccaaatccaa

SEQ ID NO: 27563 - DNA, 33 bp, Homo sapiens
tgtttataataggtaaatgttgattgagcagag

SEQ ID NO: 27564 - DNA, 33 bp, Homo sapiens
ggtttgtgtgtacttagctaatttttaaagaag

SEQ ID NO: 27565 - DNA, 51 bp, Homo sapiens
gctagacatgaaattcttcataaacctgacctggacggtgtgaggaggagc

SEQ ID NO: 27566 - DNA, 33 bp, Homo sapiens
cccttcacctctaccaaagatggagtgcccact

SEQ ID NO: 27567 - DNA, 33 bp, Homo sapiens
cacaccctgcaactacggaatgctttcctgaac

SEQ ID NO: 27568 - DNA, 33 bp, Homo sapiens
tcatgctaagttgtaactggttggtttcctgaa

SEQ ID NO: 27569 - DNA, 33 bp, Homo sapiens
ctggttttacctgatgaaggctgtcggggtgct

SEQ ID NO: 27570 - DNA, 33 bp, Homo sapiens
aaatgttctccttgtcaccagctttcaggaagt

SEQ ID NO: 27571 - DNA, 33 bp, Homo sapiens
gatttgttcactcaccaatttaaacatgtttct

SEQ ID NO: 27572 - DNA, 33 bp, Homo sapiens
aatatccttctttatgaacgtagtgactacttt

SEQ ID NO: 27573 - DNA, 33 bp, Homo sapiens
agaagattccatgtccagataataggactcagg

SEQ ID NO: 27574 - DNA, 33 bp, Homo sapiens
gtatcaactctataaagtcgggagcaaagtcct

SEQ ID NO: 27575 - DNA, 33 bp, Homo sapiens
ggggtccaggagagctaagagaatgggtttcaa

SEQ ID NO: 27576 - DNA, 33 bp, Homo sapiens
atttagaggaattccaatactcacatcaatggg

SEQ ID NO: 27577 - DNA, 33 bp, Homo sapiens
atccgttcagggaggccgattcacaggagtcca

SEQ ID NO: 27578 - DNA, 33 bp, Homo sapiens
gaaggcttttgctttcactgtgaacgaggaggg

SEQ ID NO: 27579 - DNA, 51 bp, Homo sapiens
tctatgagaaagaaatattaagtaacactgcatgtctgacattgacatgag

SEQ ID NO: 27580 - DNA, 51 bp, Homo sapiens
aaacttggtttaaaaacctgaagctaagcaacctctccaaataaacatgaa

SEQ ID NO: 27581 - DNA, 33 bp, Homo sapiens
tcagcatacagtgttcaatataagcaagttcaa

SEQ ID NO: 27582 - DNA, 51 bp, Homo sapiens
caagcagattccctaagatgataaacagagcactttatgagaggtatgaac

SEQ ID NO: 27583 - DNA, 33 bp, Homo sapiens
ctatttcagaaagatcaatgaaccgagaaagag

SEQ ID NO: 27584 - DNA, 33 bp, Homo sapiens
gccttatagctggtcaagttccatggcaggtgt

SEQ ID NO: 27585 - DNA, 33 bp, Homo sapiens
ccagggagatgatacacgaaataagattatatt

SEQ ID NO: 27586 - DNA, 33 bp, Homo sapiens
tatatcattcatatcccagagtgtgtcctgaaa

SEQ ID NO: 27587 - DNA, 33 bp, Homo sapiens
cagggtttcatgattaccaagtggcagagcctg

SEQ ID NO: 27588 - DNA, 33 bp, Homo sapiens
atcatgaatgtcatcaataactactaactgcca

SEQ ID NO: 27589 - DNA, 33 bp, Homo sapiens
accgcacccagcaaaaataacgatggttagatg

SEQ ID NO: 27590 - DNA, 33 bp, Homo sapiens
agggatctgaaacaaactgattggaagagagga

SEQ ID NO: 27591 - DNA, 33 bp, Homo sapiens
agaaagtcttgctaaactgggaaggaaccttgc

SEQ ID NO: 27592 - DNA, 33 bp, Homo sapiens
tggtcaccatcacttaagataacgtacatataa

SEQ ID NO: 27593 - DNA, 33 bp, Homo sapiens
gctcccttgtcaaaggaaaaaaggtgcatttat

SEQ ID NO: 27594 - DNA, 33 bp, Homo sapiens
tatatttcaaagataactggaggaaggattcaa

SEQ ID NO: 27595 - DNA, 51 bp, Homo sapiens
gttgtagcactcatcagcaactgaaatgatatgacttcggtgtttattgtc

SEQ ID NO: 27596 - DNA, 33 bp, Homo sapiens
tcggtgtttattgtccatctcctctgccattcc

SEQ ID NO: 27597 - DNA, 33 bp, Homo sapiens
aaggactcaagggcagccagtatatttgggagg

SEQ ID NO: 27598 - DNA, 33 bp, Homo sapiens
ggactacttgctcacaatgcttctgtttctggg

SEQ ID NO: 27599 - DNA, 33 bp, Homo sapiens
ctctaactctaaataaatgacataactgaacat

SEQ ID NO: 27600 - DNA, 33 bp, Homo sapiens
atcaagaactacgtggagacaaaagtgctataa

SEQ ID NO: 27601 - DNA, 33 bp, Homo sapiens
taatctgccttctctacgttctgcacattaaag

SEQ ID NO: 27602 - DNA, 33 bp, Homo sapiens
atgcaatgggcaatgaatatctacgtacctgtt

SEQ ID NO: 27603 - DNA, 33 bp, Homo sapiens
agtcatgcaagcaagagggtcaacgtcagatac

SEQ ID NO: 27604 - DNA, 33 bp, Homo sapiens
acacatcaatgaaataataaactcctggatgag

SEQ ID NO: 27605 - DNA, 33 bp, Homo sapiens
aggaacactggcctcaataagtctcttgcgagg

SEQ ID NO: 27606 - DNA, 33 bp, Homo sapiens
gatcctagaatattcagagccttcagtaacctt

SEQ ID NO: 27607 - DNA, 33 bp, Homo sapiens
tcagcttctggttgaacgagggcatgataagtt

SEQ ID NO: 27608 - DNA, 33 bp, Homo sapiens
gaggtgggtgtgctaaaatggagatacaagcca

SEQ ID NO: 27609 - DNA, 33 bp, Homo sapiens
gactgccacaacgaacacatttgtaggctttcc

SEQ ID NO: 27610 - DNA, 33 bp, Homo sapiens
caacaatgacacaataaatgtcttagcctctag

SEQ ID NO: 27611 - DNA, 33 bp, Homo sapiens
taatttgaggaactaacggtactagcatttaac

SEQ ID NO: 27612 - DNA, 33 bp, Homo sapiens
ttgctcttgtttgatacagccaagaggaggaaa

SEQ ID NO: 27613 - DNA, 33 bp, Homo sapiens
aaaacaagagcctctaagtactgaagtgatagg

SEQ ID NO: 27614 - DNA, 33 bp, Homo sapiens
aagagaaagaatatgaagttcagcatatctcct

SEQ ID NO: 27615 - DNA, 33 bp, Homo sapiens
ttgcttgaagcactaacattcttataaatgttt

SEQ ID NO: 27616 - DNA, 33 bp, Homo sapiens
ttccttgacatgtgcaaaccgcaaaggaagtga

SEQ ID NO: 27617 - DNA, 51 bp, Homo sapiens
gtcaccaacagaatcattattagaaatagactgtctgaattatgaacatgg

SEQ ID NO: 27618 - DNA, 33 bp, Homo sapiens
gtctgcactgagcctcaagcaatttgtcaaaat

SEQ ID NO: 27619 - DNA, 33 bp, Homo sapiens
acactatgccaggaataagcatctacagtgtat

SEQ ID NO: 27620 - DNA, 33 bp, Homo sapiens
tcttggctcttatgcaacctctagtaaaataac

SEQ ID NO: 27621 - DNA, 33 bp, Homo sapiens
ttcagagaatagatcacgagacttctcggcctc

SEQ ID NO: 27622 - DNA, 33 bp, Homo sapiens
taatggaatactttcacggcaatatatagcttt

SEQ ID NO: 27623 - DNA, 33 bp, Homo sapiens
cttcctcatttttgcaatgaaaccagggtgcaa

SEQ ID NO: 27624 - DNA, 51 bp, Homo sapiens
tacagcctgtgctaagtttcaaagaagaggcagataactttgaagatttta

SEQ ID NO: 27625 - DNA, 33 bp, Homo sapiens
atcagtaagttgtaaacgttagaccactatttt

SEQ ID NO: 27626 - DNA, 33 bp, Homo sapiens
gagtgaacaataattaactcgacattttaaaac

SEQ ID NO: 27627 - DNA, 33 bp, Homo sapiens
ttttcatggtaaaagcaagagagaacactgtag

SEQ ID NO: 27628 - DNA, 33 bp, Homo sapiens
ctgcccttcctcatacagcattctacatagcac

SEQ ID NO: 27629 - DNA, 33 bp, Homo sapiens
aatgtggttatcaccacgtaatgaagacctgcc

SEQ ID NO: 27630 - DNA, 51 bp, Homo sapiens
tttgggagaattaaaagtgtgtgtacgtattaaaagcagcataatgatatt

SEQ ID NO: 27631 - DNA, 33 bp, Homo sapiens
aaggaaccagcatctacaataagaggtagaaca

SEQ ID NO: 27632 - DNA, 51 bp, Homo sapiens
ggaggcccagaggaaattaagtgtcagaagagatttcctagaggggatgat

SEQ ID NO: 27633 - DNA, 33 bp, Homo sapiens
gaaataatactgaaaaagtttacgccctttgat

SEQ ID NO: 27634 - DNA, 33 bp, Homo sapiens
aagtgcatggaagaaccgcatttttggtttgtt

SEQ ID NO: 27635 - DNA, 33 bp, Homo sapiens
aaaatttcattcagtaccaatgcctaaactgga

SEQ ID NO: 27636 - DNA, 33 bp, Homo sapiens
tcgagtgaaccctacaaacgtctaaaacctgtc

SEQ ID NO: 27637 - DNA, 33 bp, Homo sapiens
cattgaatacctgccaaataagacatgtaacca

SEQ ID NO: 27638 - DNA, 33 bp, Homo sapiens
ctactagactcagaaagttgacggggccctttg

SEQ ID NO: 27639 - DNA, 33 bp, Homo sapiens
tcagcccctccaaaccaagcgcggagcgcgctg

SEQ ID NO: 27640 - DNA, 33 bp, Homo sapiens
ccttacagggaaaagacaacgatggctccaatg

SEQ ID NO: 27641 - DNA, 33 bp, Homo sapiens
ctatactatattagaaagtgtgtcaaatgcaag

SEQ ID NO: 27642 - DNA, 33 bp, Homo sapiens
ctgatgctcggttccacagagaacataaactct

SEQ ID NO: 27643 - DNA, 33 bp, Homo sapiens
ctgataagtttatcaaccttgtgctgctgatga

SEQ ID NO: 27644 - DNA, 51 bp, Homo sapiens
tcaggaacttgctgagatattaaccggaaaatcatttgggtttcacttcat

SEQ ID NO: 27645 - DNA, 51 bp, Homo sapiens
ctaggaataccacctggctatgctacagaagacaagaagcttagattttgc

SEQ ID NO: 27646 - DNA, 51 bp, Homo sapiens
ttcctagttgagtaactattgctcagttattctcattcatgtgtagacatg

SEQ ID NO: 27647 - DNA, 51 bp, Homo sapiens
caggtaaagtatggacctgtgactacagaacatttttcgtgaggggaagga

SEQ ID NO: 27648 - DNA, 33 bp, Homo sapiens
agaattggaactggcaacttaagccttggtctt

SEQ ID NO: 27649 - DNA, 33 bp, Homo sapiens
tattgcaaaatatataccagagtttagacttta

SEQ ID NO: 27650 - DNA, 51 bp, Homo sapiens
gggccatcagaattggaaggccaaactaattcctctatgcactgtatttaa

SEQ ID NO: 27651 - DNA, 51 bp, Homo sapiens
ctttcacaaacattgtctcattttgaacttcctcatagtcttgtgaagtag

SEQ ID NO: 27652 - DNA, 33 bp, Homo sapiens
caaaccggttcctttcccatcttcgaaaataac

SEQ ID NO: 27653 - DNA, 33 bp, Homo sapiens
ttgggaagcactggaccggggtaggaatgtgac

SEQ ID NO: 27654 - DNA, 33 bp, Homo sapiens
aatattctgcaggccactccttcaaagggtacc

SEQ ID NO: 27655 - DNA, 51 bp, Homo sapiens
aaaatgccaaggatctggtactcaactgaagaaagggtcatctggaaagct

SEQ ID NO: 27656 - DNA, 33 bp, Homo sapiens
gccatgtgaactcttaacatcttatcctattgt

SEQ ID NO: 27657 - DNA, 33 bp, Homo sapiens
tagcctttttcaaagacgaccagcaaggctctc

SEQ ID NO: 27658 - DNA, 51 bp, Homo sapiens
tggggaaagggaagtgaggaagaaacaggtggaaaagcaaatacaaagtga

SEQ ID NO: 27659 - DNA, 33 bp, Homo sapiens
gtctatcaacaacacaatcacttgtcaaatctt

SEQ ID NO: 27660 - DNA, 33 bp, Homo sapiens
gagtgagcttaaaaaaattattattgctcatgg

SEQ ID NO: 27661 - DNA, 33 bp, Homo sapiens
tgtgaaattgtgataactgtggtgtgatttttt

SEQ ID NO: 27662 - DNA, 33 bp, Homo sapiens
caatgtaagaaaaaaacgcttgtatacttggat

SEQ ID NO: 27663 - DNA, 33 bp, Homo sapiens
atgaatgcacatgactcaactcactacattctg

SEQ ID NO: 27664 - DNA, 33 bp, Homo sapiens
tagattctataattgacatctctcccagaggag

SEQ ID NO: 27665 - DNA, 33 bp, Homo sapiens
atgacttctaatctaactgtctgaggtcaaggt

SEQ ID NO: 27666 - DNA, 33 bp, Homo sapiens
ttttcaggtaccaccaggatattgcaattatag

SEQ ID NO: 27667 - DNA, 33 bp, Homo sapiens
ccagttgagatgtactcagaagggcacactatc

SEQ ID NO: 27668 - DNA, 33 bp, Homo sapiens
gacaacatgcgtaaaaatgctttaaaagtgaca

SEQ ID NO: 27669 - DNA, 33 bp, Homo sapiens
agacaagcctgctgaaaacgcacttggatggca

SEQ ID NO: 27670 - DNA, 33 bp, Homo sapiens
gaacatacttgaactacaagacagcaagtagta

SEQ ID NO: 27671 - DNA, 33 bp, Homo sapiens
cctcttcccaccgtcacgcgtcctgggtcctgg

SEQ ID NO: 27672 - DNA, 33 bp, Homo sapiens
ctgcaagggcttcttcctcaaatatgttatgat

SEQ ID NO: 27673 - DNA, 33 bp, Homo sapiens
ctctttcccgaaagcactcctcagtaatccaat

SEQ ID NO: 27674 - DNA, 33 bp, Homo sapiens
ttttgagaagcatggacgaaagcgtagaatgtg

SEQ ID NO: 27675 - DNA, 33 bp, Homo sapiens
agacaagatcaatgaaactccagtggattctaa

SEQ ID NO: 27676 - DNA, 33 bp, Homo sapiens
gagcagatggaaattcgatctagagctcagggt

SEQ ID NO: 27677 - DNA, 33 bp, Homo sapiens
gaagcccggaagcttgaacgctggcacctacac

SEQ ID NO: 27678 - DNA, 33 bp, Homo sapiens
cagcacaccaaacccaaattcgtctgcaccata

SEQ ID NO: 27679 - DNA, 33 bp, Homo sapiens
gctcaggagctattagaattttttttgtatcga

SEQ ID NO: 27680 - DNA, 33 bp, Homo sapiens
actacagtgatcaaaacagtctactggcataag

SEQ ID NO: 27681 - DNA, 33 bp, Homo sapiens
agaaaagtcaagttgaaaaacctgctgggcctg

SEQ ID NO: 27682 - DNA, 33 bp, Homo sapiens
tgctttctgagtaggagacaatggagtggattg

SEQ ID NO: 27683 - DNA, 33 bp, Homo sapiens
gttctagaccctgggaataaaaggtagacatgc

SEQ ID NO: 27684 - DNA, 33 bp, Homo sapiens
ggggaagaagcttttacaggatgaacatggaag

SEQ ID NO: 27685 - DNA, 33 bp, Homo sapiens
agactgtgggttagaccaagcataaagcattcc

SEQ ID NO: 27686 - DNA, 33 bp, Homo sapiens
ggaatacccacttcacaatattccttgaactgt

SEQ ID NO: 27687 - DNA, 33 bp, Homo sapiens
aatccatcattctgtacgttcagcctatctcct

SEQ ID NO: 27688 - DNA, 51 bp, Homo sapiens
attgcccagtagactagatttggaaccactagaaatttagtcctgtaagac

SEQ ID NO: 27689 - DNA, 51 bp, Homo sapiens
ctgacaccctattttgccttctttagagcttcatatttatacctaaaacct

SEQ ID NO: 27690 - DNA, 33 bp, Homo sapiens
atgccccaaagtggcaatcttcacagctcctct

SEQ ID NO: 27691 - DNA, 33 bp, Homo sapiens
acattggataactctccacattcaggctaggca

SEQ ID NO: 27692 - DNA, 51 bp, Homo sapiens
tatctatgactaataagcaattatacggagactttcccactgacaaccata

SEQ ID NO: 27693 - DNA, 33 bp, Homo sapiens
acagcccagactctgccatcaaagacaactgtg

SEQ ID NO: 27694 - DNA, 33 bp, Homo sapiens
tcccctcaaaggactacgaaaatctagtaccta

SEQ ID NO: 27695 - DNA, 33 bp, Homo sapiens
agacgccttgatgaggcacatttagagtgagat

SEQ ID NO: 27696 - DNA, 33 bp, Homo sapiens
aggctgtggtcactaaactgtaatgcatcttta

SEQ ID NO: 27697 - DNA, 33 bp, Homo sapiens
tttaaaaagaaaccaactactaacagatgctac

SEQ ID NO: 27698 - DNA, 33 bp, Homo sapiens
tacagaagatctaggagagagtgtctctggaaa

SEQ ID NO: 27699 - DNA, 33 bp, Homo sapiens
atgtgaaaaagcagtacgataccatcccctgaa

SEQ ID NO: 27700 - DNA, 33 bp, Homo sapiens
gcaaagagatgccaaaagaagcatttgacaaag

SEQ ID NO: 27701 - DNA, 33 bp, Homo sapiens
gaataattttctttgcggagccactgagattca

SEQ ID NO: 27702 - DNA, 33 bp, Homo sapiens
ctctgcaaagtttagccacggatccctgttaaa

SEQ ID NO: 27703 - DNA, 33 bp, Homo sapiens
gctgtttgtttctaaaatatcaacacctggcac

SEQ ID NO: 27704 - DNA, 33 bp, Homo sapiens
aatatgatatatcaccaattaaaattctccaat

SEQ ID NO: 27705 - DNA, 33 bp, Homo sapiens
atagcagatgaggtaacttaaagaacaaagtcc

SEQ ID NO: 27706 - DNA, 33 bp, Homo sapiens
aaagttaattcgtatgaaaacagaagcatgctc

SEQ ID NO: 27707 - DNA, 33 bp, Homo sapiens
gattatgacggcaaataataatgataaataata

SEQ ID NO: 27708 - DNA, 33 bp, Homo sapiens
ccgtattaagaaatcaatattgcatggactttt

SEQ ID NO: 27709 - DNA, 33 bp, Homo sapiens
ggagagaaggaggaaaccaaagaaagtggcata

SEQ ID NO: 27710 - DNA, 33 bp, Homo sapiens
ttctgaaaatggaccaactcccgtctctgagcc

SEQ ID NO: 27711 - DNA, 51 bp, Homo sapiens
gattaaagcctcttgtatgtgatgaactattctttttatataatgttgaat

SEQ ID NO: 27712 - DNA, 51 bp, Homo sapiens
tcagaggaatagaatagaatccagaaatagatccatacatggtcaactgat

SEQ ID NO: 27713 - DNA, 33 bp, Homo sapiens
ggtaatttggagaatacatgagagcattgcacc

SEQ ID NO: 27714 - DNA, 33 bp, Homo sapiens
catctcagtaaacgacagctctaccttttctga

SEQ ID NO: 27715 - DNA, 33 bp, Homo sapiens
ttccgagcagggcgtacataagtggacattcca

SEQ ID NO: 27716 - DNA, 33 bp, Homo sapiens
taaaatggctgaaattaaaaagactcactatac

SEQ ID NO: 27717 - DNA, 33 bp, Homo sapiens
ttaactatagatacaaatgacagcacagttgag

SEQ ID NO: 27718 - DNA, 33 bp, Homo sapiens
cagttagtcaatggtcaagtccagatttgagca

SEQ ID NO: 27719 - DNA, 33 bp, Homo sapiens
cagacactggaactcacacaaatacacaaattc

SEQ ID NO: 27720 - DNA, 33 bp, Homo sapiens
caaagagaattccaaaataaactgcataataaa

SEQ ID NO: 27721 - DNA, 33 bp, Homo sapiens
cacaattaagcattgaggaagaggttgtttatc

SEQ ID NO: 27722 - DNA, 33 bp, Homo sapiens
gaatcgagttatttggaattctatcctagttct

SEQ ID NO: 27723 - DNA, 33 bp, Homo sapiens
attatgtcctgagtgaaagcagaaaaacgactc

SEQ ID NO: 27724 - DNA, 33 bp, Homo sapiens
caacagaatcaggaaaccatccaataagacagt

SEQ ID NO: 27725 - DNA, 33 bp, Homo sapiens
ccctgtgtctctgctcactccactcaagacaga

SEQ ID NO: 27726 - DNA, 33 bp, Homo sapiens
actgcagacttaactacattgacatttgaatca

SEQ ID NO: 27727 - DNA, 33 bp, Homo sapiens
tctgacttggaaacaaagaaaaaacatgaaacg

SEQ ID NO: 27728 - DNA, 33 bp, Homo sapiens
ccctctgcaagaataaaatcaaataactgttag

SEQ ID NO: 27729 - DNA, 33 bp, Homo sapiens
gcacacagcccgattcaaattatattacaaagc

SEQ ID NO: 27730 - DNA, 33 bp, Homo sapiens
tcttcatctgtcaaaccaaaattttattagaaa

SEQ ID NO: 27731 - DNA, 33 bp, Homo sapiens
taaagatttagtccataacagtaaacaactatt

SEQ ID NO: 27732 - DNA, 33 bp, Homo sapiens
acttcatagttaacaactgctttcaaggaatgc

SEQ ID NO: 27733 - DNA, 33 bp, Homo sapiens
tgcgatggtatgtaaacgaatgttgcatgacca

SEQ ID NO: 27734 - DNA, 33 bp, Homo sapiens
agaaaaagtttgtcaacccctgctgctcaagtg

SEQ ID NO: 27735 - DNA, 33 bp, Homo sapiens
atggatactacgaagacagatactgagggccat

SEQ ID NO: 27736 - DNA, 33 bp, Homo sapiens
agcttttaacatctgccgagtcttaactataca

SEQ ID NO: 27737 - DNA, 33 bp, Homo sapiens
ctggccactgctccagaaagaatcagagcctct

SEQ ID NO: 27738 - DNA, 33 bp, Homo sapiens
actgcgtatgtttggacgtgccagagagacaga

SEQ ID NO: 27739 - DNA, 33 bp, Homo sapiens
tggggaggtgctgcaacggtaacgtaagaggtt

SEQ ID NO: 27740 - DNA, 33 bp, Homo sapiens
tgctgtcttgacttgactaacagctactagata

SEQ ID NO: 27741 - DNA, 33 bp, Homo sapiens
acttttgctcatactacctattcaatcactggt

SEQ ID NO: 27742 - DNA, 33 bp, Homo sapiens
ctttaagaagtagcaaaatatcttgaagtatat

SEQ ID NO: 27743 - DNA, 33 bp, Homo sapiens
atactctgcaccttgaagacacaacacactgta

SEQ ID NO: 27744 - DNA, 33 bp, Homo sapiens
gtgctgtgaaacatcccatcatgcataggacag

SEQ ID NO: 27745 - DNA, 33 bp, Homo sapiens
gatggatgaggatgcacacctttgtaaggcagg

SEQ ID NO: 27746 - DNA, 33 bp, Homo sapiens
ctatagacttaaacctcaggattctctttagtg

SEQ ID NO: 27747 - DNA, 33 bp, Homo sapiens
aaatgtaggatttgagaaaacaagctgtttgcc

SEQ ID NO: 27748 - DNA, 51 bp, Homo sapiens
tgttaataatataaataggttaataagtgtcaattatgttaatattaaata

SEQ ID NO: 27749 - DNA, 33 bp, Homo sapiens
tttttaagtgtgtggcccaatcagttttcagta

SEQ ID NO: 27750 - DNA, 33 bp, Homo sapiens
aatccttcctgattccaaaactactgctttttt

SEQ ID NO: 27751 - DNA, 51 bp, Homo sapiens
aaaacaaaaagaaagaaagaaaaaaagctttatcgcaattataaaagagct

SEQ ID NO: 27752 - DNA, 33 bp, Homo sapiens
ttgcctccagggagtacgatgctttgtgcactt

SEQ ID NO: 27753 - DNA, 33 bp, Homo sapiens
tgtgtgtttactcagcacctactgagtgtcata

SEQ ID NO: 27754 - DNA, 33 bp, Homo sapiens
aactttttggtgtataactcacttttctgtagg

SEQ ID NO: 27755 - DNA, 33 bp, Homo sapiens
gatactcctttcctagcaccgttccttggctcc

SEQ ID NO: 27756 - DNA, 33 bp, Homo sapiens
tcctcacaaaccactgcagtaagattaatccca

SEQ ID NO: 27757 - DNA, 51 bp, Homo sapiens
ttggtaaaggtgtaaataggtgtgcaatgaaagttgattacctaataattg

SEQ ID NO: 27758 - DNA, 33 bp, Homo sapiens
ctgtattttcctggaaaggcacttgctaggggc

SEQ ID NO: 27759 - DNA, 51 bp, Homo sapiens
atagctttaatttatctgtctcctaaatgtaactgagaaatacaaatattg

SEQ ID NO: 27760 - DNA, 33 bp, Homo sapiens
ctgggccaaagaccaacgtttaaagttacactc

SEQ ID NO: 27761 - DNA, 33 bp, Homo sapiens
agaaggctatgcataaatgaggataggataaat

SEQ ID NO: 27762 - DNA, 33 bp, Homo sapiens
tgactttagattaggaagtggtttcttggatat

SEQ ID NO: 27763 - DNA, 33 bp, Homo sapiens
ttctgcaggaagagagaagaggggtttggccct

SEQ ID NO: 27764 - DNA, 33 bp, Homo sapiens
gcaaatacctctatggacactaagtggctgcgc

SEQ ID NO: 27765 - DNA, 33 bp, Homo sapiens
tgacaatccaagataacagccaataatgagtat

SEQ ID NO: 27766 - DNA, 33 bp, Homo sapiens
catgatctttctaaaacgcaaatttgaaacaat

SEQ ID NO: 27767 - DNA, 33 bp, Homo sapiens
ttaagtagtagtgataccatttcatccgattcc

SEQ ID NO: 27768 - DNA, 33 bp, Homo sapiens
accctcatgagaacagaattaagtatgattaag

SEQ ID NO: 27769 - DNA, 33 bp, Homo sapiens
agtaatggacttgctcactacaataattaaaac

SEQ ID NO: 27770 - DNA, 33 bp, Homo sapiens
cgcttaaaagtctcaaacgtgcgacttaattaa

SEQ ID NO: 27771 - DNA, 33 bp, Homo sapiens
aaaagcatcaagctgaaactttattgttgttgg

SEQ ID NO: 27772 - DNA, 33 bp, Homo sapiens
acgcaagaccatttccacttacataatacaagt

SEQ ID NO: 27773 - DNA, 33 bp, Homo sapiens
ataactggtataactccatgctttgggaatatt

SEQ ID NO: 27774 - DNA, 33 bp, Homo sapiens
aaaatgatagtctttacgcttttagtacagagc

SEQ ID NO: 27775 - DNA, 33 bp, Homo sapiens
gggcaagtggtgcctaagtccagcttacatttc

SEQ ID NO: 27776 - DNA, 33 bp, Homo sapiens
tgccgctgtcttgaggacattttctttgggctg

SEQ ID NO: 27777 - DNA, 33 bp, Homo sapiens
gcctttgatacattgggcacattcacatgggca

SEQ ID NO: 27778 - DNA, 51 bp, Homo sapiens
ggttctaaacgacaaggtagagagacgtgaatggaacccaaaaaagagaaa

SEQ ID NO: 27779 - DNA, 33 bp, Homo sapiens
ctaggtgaacgttttacagtttgggtagagaga

SEQ ID NO: 27780 - DNA, 33 bp, Homo sapiens
cccatagagatacacaagcataaattctgtact

SEQ ID NO: 27781 - DNA, 33 bp, Homo sapiens
tttaatttgggggggaacattttggaagagata

SEQ ID NO: 27782 - DNA, 33 bp, Homo sapiens
ttgacttccttcaataagttccttctaaaatgg

SEQ ID NO: 27783 - DNA, 33 bp, Homo sapiens
tgtacatttcattcgaaccttctgataaaaacc

SEQ ID NO: 27784 - DNA, 33 bp, Homo sapiens
gatgctttggcttacaaatccatttactgttaa

SEQ ID NO: 27785 - DNA, 33 bp, Homo sapiens
aaaatacaggggaaaagttaatcatatcctctc

SEQ ID NO: 27786 - DNA, 33 bp, Homo sapiens
ttccatatgagcttgagaaaaatgtgtaacctg

SEQ ID NO: 27787 - DNA, 33 bp, Homo sapiens
gttttaaataaaagccaaatctcaaaaggaagg

SEQ ID NO: 27788 - DNA, 33 bp, Homo sapiens
gctactaggggaataactcattctggcagaccc

SEQ ID NO: 27789 - DNA, 51 bp, Homo sapiens
atgtgttcatactctatgtgatttaaagatggtgaattctgtgatgatcaa

SEQ ID NO: 27790 - DNA, 33 bp, Homo sapiens
ctaattacagcaatagaaagtgcgtgcataaac

SEQ ID NO: 27791 - DNA, 33 bp, Homo sapiens
atattgcttcacttgacggtgtctcaattcttt

SEQ ID NO: 27792 - DNA, 33 bp, Homo sapiens
gaagataggttggttgaaattttcaggtctgag

SEQ ID NO: 27793 - DNA, 33 bp, Homo sapiens
ttgaatctatcactaactccttctctaggcgta

SEQ ID NO: 27794 - DNA, 33 bp, Homo sapiens
ttgaatttatgataacaagtgatactgacctaa

SEQ ID NO: 27795 - DNA, 33 bp, Homo sapiens
agactcggtgtggtccagcggctgccacctctc

SEQ ID NO: 27796 - DNA, 33 bp, Homo sapiens
tttaactaaaaggctacctattcaggatgaact

SEQ ID NO: 27797 - DNA, 33 bp, Homo sapiens
tgtgaatactgggatgaaaccactcagatggaa

SEQ ID NO: 27798 - DNA, 33 bp, Homo sapiens
catcatgtctgacaccagaagtagtacataaaa

SEQ ID NO: 27799 - DNA, 33 bp, Homo sapiens
gtgtagtgctataaacaagctccataagtgcag

SEQ ID NO: 27800 - DNA, 33 bp, Homo sapiens
aaaatgagatatcaagccaaactatgcattttt

SEQ ID NO: 27801 - DNA, 33 bp, Homo sapiens
ccaaatattttccttaagctttgaacatgagct

SEQ ID NO: 27802 - DNA, 33 bp, Homo sapiens
ttgacctgtttgatctcagagcctaatttcata

SEQ ID NO: 27803 - DNA, 33 bp, Homo sapiens
gttacatgattaatacagtacaatctttgaggc

SEQ ID NO: 27804 - DNA, 33 bp, Homo sapiens
tttgtaatttgaaaaaatatgtggcattttaat

SEQ ID NO: 27805 - DNA, 33 bp, Homo sapiens
aagccttggactcagacacaatagagtttaaag

SEQ ID NO: 27806 - DNA, 33 bp, Homo sapiens
tgagccatcggataaaatgcatgaatttcagga

SEQ ID NO: 27807 - DNA, 33 bp, Homo sapiens
ttgtttttgcttagcagtctttaaccactaatg

SEQ ID NO: 27808 - DNA, 33 bp, Homo sapiens
gttcagctgtttttatcacaggttgaaagtcag

SEQ ID NO: 27809 - DNA, 33 bp, Homo sapiens
tgtatgttgcagataaacacatgtaagctttaa

SEQ ID NO: 27810 - DNA, 33 bp, Homo sapiens
tcctgtcttggccctaaaaaattacaaatcaaa

SEQ ID NO: 27811 - DNA, 33 bp, Homo sapiens
cctaagtctccttttacgctatcttctaccaaa

SEQ ID NO: 27812 - DNA, 33 bp, Homo sapiens
tctaggtttattttcccccttgcctcaaagctt

SEQ ID NO: 27813 - DNA, 33 bp, Homo sapiens
aaggaacaaatcaataaggtggtagtggaagaa

SEQ ID NO: 27814 - DNA, 33 bp, Homo sapiens
aaaagcatggcttataactcactagacgaggca

SEQ ID NO: 27815 - DNA, 33 bp, Homo sapiens
atgacccatcataacactgacttttttccttta

SEQ ID NO: 27816 - DNA, 33 bp, Homo sapiens
atttttcttagtacgacgctctttacattgcaa

SEQ ID NO: 27817 - DNA, 33 bp, Homo sapiens
gaaccaggaaagttaccgattcctgagaattca

SEQ ID NO: 27818 - DNA, 33 bp, Homo sapiens
agcaaactaacagacacatcagcctcaagatac

SEQ ID NO: 27819 - DNA, 33 bp, Homo sapiens
ctgcataacgtcacacacttggactgctgctgg

SEQ ID NO: 27820 - DNA, 51 bp, Homo sapiens
tcctttctgaaataattttaggatacgaaaatctgtaaatgaaaaactaca

SEQ ID NO: 27821 - DNA, 33 bp, Homo sapiens
cagacagctgcaagtgcagaggatttaacgaag

SEQ ID NO: 27822 - DNA, 33 bp, Homo sapiens
tatatacctcttgaaaaaggcaaaggttgaagt

SEQ ID NO: 27823 - DNA, 51 bp, Homo sapiens
gctcatcctaaatttccataccacactctcttcactatttatatcttatct

SEQ ID NO: 27824 - DNA, 51 bp, Homo sapiens
tcaccagtctatgaccctcagtacaataatctgtagtctcagttctagggt

SEQ ID NO: 27825 - DNA, 33 bp, Homo sapiens
accaggtatttctctcacttcctgagctgcaat

SEQ ID NO: 27826 - DNA, 51 bp, Homo sapiens
aaattgactgttgattttatatatgccttcaagcttgatccactcatgatt

SEQ ID NO: 27827 - DNA, 33 bp, Homo sapiens
actgaaacaagtaaataatatgcatacagttgt

SEQ ID NO: 27828 - DNA, 33 bp, Homo sapiens
ataaaaggactaaaaaatctattcatctttatc

SEQ ID NO: 27829 - DNA, 33 bp, Homo sapiens
ttctgatgctaagctcaatgcaatttacctagg

SEQ ID NO: 27830 - DNA, 33 bp, Homo sapiens
gaaaggacctttaggacgtgatgaaaattaaat

SEQ ID NO: 27831 - DNA, 33 bp, Homo sapiens
cgtcatctgaaactacacaggacaaatgaagct

SEQ ID NO: 27832 - DNA, 33 bp, Homo sapiens
gtttttacagctaagaagtttactaatttgggg

SEQ ID NO: 27833 - DNA, 33 bp, Homo sapiens
tgtatgagattctagaagtaacgtctatggatt

SEQ ID NO: 27834 - DNA, 33 bp, Homo sapiens
gatactaagaagatgacgagtgttctcagggca

SEQ ID NO: 27835 - DNA, 33 bp, Homo sapiens
aagaaaggaaatgcaagcaattaaaggaatact

SEQ ID NO: 27836 - DNA, 33 bp, Homo sapiens
gcgtttgcttgaaaatcaattctttgtctaagt

SEQ ID NO: 27837 - DNA, 33 bp, Homo sapiens
ccaaagttacatggacaccatatttagacaaaa

SEQ ID NO: 27838 - DNA, 33 bp, Homo sapiens
tccagatattaaaacaatcatcctgcagaagaa

SEQ ID NO: 27839 - DNA, 33 bp, Homo sapiens
ttctcttcgctcatagaataatgaattactctt

SEQ ID NO: 27840 - DNA, 33 bp, Homo sapiens
aagtgcattacagctacgaaactctaatcacat

SEQ ID NO: 27841 - DNA, 33 bp, Homo sapiens
aaggtcaaatgtgtaaaaagctgttaagattat

SEQ ID NO: 27842 - DNA, 33 bp, Homo sapiens
gtgcatctgagattgcagataagaattcaaatc

SEQ ID NO: 27843 - DNA, 33 bp, Homo sapiens
gacatgagtacctggaaaagaaaagacagacag

SEQ ID NO: 27844 - DNA, 33 bp, Homo sapiens
atactggagtagggtacgcacttaatccaatat

SEQ ID NO: 27845 - DNA, 33 bp, Homo sapiens
gctgccttttgggtgaagtagaatgaaaattat

SEQ ID NO: 27846 - DNA, 33 bp, Homo sapiens
tgtatcccagacgatacagttgaaatggctaga

SEQ ID NO: 27847 - DNA, 33 bp, Homo sapiens
tagacacacctagtaactgcttggggaaaaggg

SEQ ID NO: 27848 - DNA, 33 bp, Homo sapiens
aaaaaccttcaaacaaagcatatcaaaaaagac

SEQ ID NO: 27849 - DNA, 33 bp, Homo sapiens
atacccattttaataaacataagccaaacactg

SEQ ID NO: 27850 - DNA, 33 bp, Homo sapiens
cctacaatgaaaaaccaaatatcccttagcaga

SEQ ID NO: 27851 - DNA, 33 bp, Homo sapiens
gagaagggtagtgaggcaaagcttttaagggtc

SEQ ID NO: 27852 - DNA, 33 bp, Homo sapiens
ggattgtgcttttgaacaattttgtgtttgcct

SEQ ID NO: 27853 - DNA, 51 bp, Homo sapiens
atctactgaggctaaaataagctcaatataaagatgggaataaactataga

SEQ ID NO: 27854 - DNA, 33 bp, Homo sapiens
caagcaaacagatcaccatggtagaaatcagaa

SEQ ID NO: 27855 - DNA, 33 bp, Homo sapiens
tgtagggaaactctgcacttaacctatctctgt

SEQ ID NO: 27856 - DNA, 51 bp, Homo sapiens
ttttttaaagctatctccaccaatcatgttatacctgggcatatacttagg

SEQ ID NO: 27857 - DNA, 51 bp, Homo sapiens
cccagaccaaagaataagctaaatacgctgagactcagaggtcagaacagg

SEQ ID NO: 27858 - DNA, 51 bp, Homo sapiens
gttttctctaaacataatgtattcaccatcccactagtcaaaaaaagcatt

SEQ ID NO: 27859 - DNA, 33 bp, Homo sapiens
attttgaagacccttacgtgtatgtatgtgtat

SEQ ID NO: 27860 - DNA, 33 bp, Homo sapiens
ccaaagaagatatagagaaagcaataaacatac

SEQ ID NO: 27861 - DNA, 33 bp, Homo sapiens
gataaaaacaccaagcacagataatcttttgtg

SEQ ID NO: 27862 - DNA, 51 bp, Homo sapiens
tgcttgaaatattcattttctgcgaacgtatgggccattgaggattacagt

SEQ ID NO: 27863 - DNA, 33 bp, Homo sapiens
aggtgttcttaaaatcaagtgataaatcaatta

SEQ ID NO: 27864 - DNA, 33 bp, Homo sapiens
gtattttgcattggtaaaatagcagtgcacact

SEQ ID NO: 27865 - DNA, 33 bp, Homo sapiens
gttaggttatccaggaaggatcatggtgaagag

SEQ ID NO: 27866 - DNA, 33 bp, Homo sapiens
ttgcaactttatgtaaacctaaaattatttgta

SEQ ID NO: 27867 - DNA, 33 bp, Homo sapiens
gtctgacgataagcagaagaaagtcatttttat

SEQ ID NO: 27868 - DNA, 33 bp, Homo sapiens
ttgacactgctattaaaaattgcctaagagtat

SEQ ID NO: 27869 - DNA, 33 bp, Homo sapiens
gacagatcctgtaacaaccctgtctatttaggt

SEQ ID NO: 27870 - DNA, 33 bp, Homo sapiens
accttaatccactttacaagaccaagcacatgg

SEQ ID NO: 27871 - DNA, 33 bp, Homo sapiens
atgttgtaagtctaaaagcaaatggctgtcaaa

SEQ ID NO: 27872 - DNA, 33 bp, Homo sapiens
ctaaggaactagatcactgagttaaaaagtcgt

SEQ ID NO: 27873 - DNA, 33 bp, Homo sapiens
tttccttataaattgcccatccttagatattcc

SEQ ID NO: 27874 - DNA, 33 bp, Homo sapiens
ttcagtgataacaaaaacaatttacgtttgaat

SEQ ID NO: 27875 - DNA, 51 bp, Homo sapiens
ttccaataacaactgacataaatcaagtattaccattgacttatattgtta

SEQ ID NO: 27876 - DNA, 33 bp, Homo sapiens
cagtacaacataaaacagtagctcttcttatta

SEQ ID NO: 27877 - DNA, 33 bp, Homo sapiens
tgttctctctgcattacgaagggatacattcca

SEQ ID NO: 27878 - DNA, 33 bp, Homo sapiens
gtcaagcaaacagttaacaaactcctgtataaa

SEQ ID NO: 27879 - DNA, 33 bp, Homo sapiens
ctttctgctgaccaaccattttataaatgtata

SEQ ID NO: 27880 - DNA, 33 bp, Homo sapiens
aagaaaaatatcttgacctattacctacatatg

SEQ ID NO: 27881 - DNA, 33 bp, Homo sapiens
aaactctgaatatttacggttatacagaaaatt

SEQ ID NO: 27882 - DNA, 33 bp, Homo sapiens
agctgattttgattgcaaattagggattaaaat

SEQ ID NO: 27883 - DNA, 33 bp, Homo sapiens
tttagagtttatacacgatccacctcctaaaaa

SEQ ID NO: 27884 - DNA, 33 bp, Homo sapiens
ttgaacaattcatttaagtctaccattcaggat

SEQ ID NO: 27885 - DNA, 33 bp, Homo sapiens
aaatcttgccctttccacaaagtcacataagac

SEQ ID NO: 27886 - DNA, 33 bp, Homo sapiens
tttctgcctctagtgaaagctgtttgaaaatca

SEQ ID NO: 27887 - DNA, 33 bp, Homo sapiens
ggtgcctggcgtacacaagtttttataaccagc

SEQ ID NO: 27888 - DNA, 51 bp, Homo sapiens
ggttctagaaactaaatatagaatcacaatagaatgtagcatataacactt

SEQ ID NO: 27889 - DNA, 33 bp, Homo sapiens
tatgaagcagctttaaaagactgacacattctg

SEQ ID NO: 27890 - DNA, 33 bp, Homo sapiens
agagaacaaaagtacacaggtagtttatcttga

SEQ ID NO: 27891 - DNA, 33 bp, Homo sapiens
cagaagctgaggtcaacgacaagtatatccagg

SEQ ID NO: 27892 - DNA, 33 bp, Homo sapiens
acatgaatggcttcagacaaagagagagagctt

SEQ ID NO: 27893 - DNA, 33 bp, Homo sapiens
tccttcctctgccatacgaccttgaagtgcact

SEQ ID NO: 27894 - DNA, 33 bp, Homo sapiens
aacctgctgccttgaaaagaagaatatagtcct

SEQ ID NO: 27895 - DNA, 33 bp, Homo sapiens
gatgtatccactacaactacagctctacataat

SEQ ID NO: 27896 - DNA, 33 bp, Homo sapiens
ttgttgttaatcgaagcataaatgatctgtaac

SEQ ID NO: 27897 - DNA, 33 bp, Homo sapiens
aatattgagcatactgaataagcttacaattat

SEQ ID NO: 27898 - DNA, 33 bp, Homo sapiens
gccgcctatcattgagacaaagatttccttgga

SEQ ID NO: 27899 - DNA, 33 bp, Homo sapiens
gtacctaattttttcaagggcttatatggagag

SEQ ID NO: 27900 - DNA, 33 bp, Homo sapiens
aatggtgaattcagaaacctatcacagaagctc

SEQ ID NO: 27901 - DNA, 51 bp, Homo sapiens
actggatcttgtccaaaacaataaaagtagtaacctctatgagtctgcaag

SEQ ID NO: 27902 - DNA, 33 bp, Homo sapiens
tctattgtgatgtaacagcaaaagtaggaccac

SEQ ID NO: 27903 - DNA, 33 bp, Homo sapiens
tcaggatatttacaatcaatccaaagaggtaac

SEQ ID NO: 27904 - DNA, 33 bp, Homo sapiens
aatgtaaaggtatgtgcacaagtagagggtgtg

SEQ ID NO: 27905 - DNA, 33 bp, Homo sapiens
cttgttttccaatccactgataatctgaacatg

SEQ ID NO: 27906 - DNA, 33 bp, Homo sapiens
tgaacaatctaggctacactcacagcaggacat

SEQ ID NO: 27907 - DNA, 33 bp, Homo sapiens
gatatcactaccttccacacaacaggtgactgg

SEQ ID NO: 27908 - DNA, 33 bp, Homo sapiens
aatgcttctttgggtaaaatcattctcactact

SEQ ID NO: 27909 - DNA, 33 bp, Homo sapiens
tctgcagcacaaagaacaagtatagaagaatat

SEQ ID NO: 27910 - DNA, 33 bp, Homo sapiens
ttgaaaagatgagaaacaccattacgcagacaa

SEQ ID NO: 27911 - DNA, 33 bp, Homo sapiens
tttaaaactcagagtaaaagtcaagatccacac

SEQ ID NO: 27912 - DNA, 33 bp, Homo sapiens
ttctatatgatttttacggaacactgtatatac

SEQ ID NO: 27913 - DNA, 51 bp, Homo sapiens
aatagtaccttatctattctgagtaagtccatacacttgagaagattttac

SEQ ID NO: 27914 - DNA, 33 bp, Homo sapiens
cttagtgacaaaaccaatctttcataatatgac

SEQ ID NO: 27915 - DNA, 33 bp, Homo sapiens
ggtgtctgaagaattaagcagtgatagattcga

SEQ ID NO: 27916 - DNA, 33 bp, Homo sapiens
tataagagacttgaaacgataatcctacaggaa

SEQ ID NO: 27917 - DNA, 33 bp, Homo sapiens
cgtttcattaatagtaacatactctgcacatac

SEQ ID NO: 27918 - DNA, 33 bp, Homo sapiens
gctaagttgaacctgtcaaattgagttctcctc

SEQ ID NO: 27919 - DNA, 33 bp, Homo sapiens
aattactagacctgaaaattttacaatacacct

SEQ ID NO: 27920 - DNA, 33 bp, Homo sapiens
tacatgatttttatccgattactcatcttgtga

SEQ ID NO: 27921 - DNA, 33 bp, Homo sapiens
tgagcttaaacatttacgggagattatgaacct

SEQ ID NO: 27922 - DNA, 33 bp, Homo sapiens
tacacagtgtaagtgacataaaaacagaaacac

SEQ ID NO: 27923 - DNA, 33 bp, Homo sapiens
ttataggttgttgatcaaaaaggacaacggagg

SEQ ID NO: 27924 - DNA, 33 bp, Homo sapiens
gaggctagaggttcaaaatcgaggtgtcagtat

SEQ ID NO: 27925 - DNA, 33 bp, Homo sapiens
catgtctaaccgtgataagttaaaatagaacta

SEQ ID NO: 27926 - DNA, 33 bp, Homo sapiens
atagtgaatatcattacgctccacctagatttc

SEQ ID NO: 27927 - DNA, 33 bp, Homo sapiens
tcacttctcaaaaacaaacattcacatggccaa

SEQ ID NO: 27928 - DNA, 33 bp, Homo sapiens
aagcatacatgagtatcaatagccaaatcgatc

SEQ ID NO: 27929 - DNA, 33 bp, Homo sapiens
ctttcatgcaattttccatgataccttctcagt

SEQ ID NO: 27930 - DNA, 33 bp, Homo sapiens
cttttgatgggaagccaacttttgatttgtcag

SEQ ID NO: 27931 - DNA, 33 bp, Homo sapiens
aaaaacagtatttcgaacaattaatgctgtagt

SEQ ID NO: 27932 - DNA, 33 bp, Homo sapiens
agtctggaacttagtccatatgtagaaatcttg

SEQ ID NO: 27933 - DNA, 51 bp, Homo sapiens
ataattctaagaatcattgtaatctaaacttttaaaccaggttttaattgc

SEQ ID NO: 27934 - DNA, 33 bp, Homo sapiens
aacatttgcaatggaactgtgagttgaaattgg

SEQ ID NO: 27935 - DNA, 33 bp, Homo sapiens
ctaagattcaaaattaagcatcctgattccaga

SEQ ID NO: 27936 - DNA, 33 bp, Homo sapiens
tgtcagcaacaaagaaagaagtgttaatgatag

SEQ ID NO: 27937 - DNA, 33 bp, Homo sapiens
tgacaatcctggttgactacttcttttcaagct

SEQ ID NO: 27938 - DNA, 33 bp, Homo sapiens
agatggtggtttcttaaggaaaagatatatggt

SEQ ID NO: 27939 - DNA, 33 bp, Homo sapiens
aggaatgaggaacacactcaaaatatcaagaaa

SEQ ID NO: 27940 - DNA, 33 bp, Homo sapiens
tcaaatagaggggtccaaaagactgcgggctcc

SEQ ID NO: 27941 - DNA, 33 bp, Homo sapiens
tttttctgtataaacactgatgaatcccaggta

SEQ ID NO: 27942 - DNA, 33 bp, Homo sapiens
tgtgtgaaacataccactgacaaaaatggttga

SEQ ID NO: 27943 - DNA, 33 bp, Homo sapiens
aaatgctcctttactcccaacagtgtaaaccat

SEQ ID NO: 27944 - DNA, 33 bp, Homo sapiens
tcatgtctgcaatgccaatatccccctactcca

SEQ ID NO: 27945 - DNA, 33 bp, Homo sapiens
caaaaagataatgcacaatgagattgcctacca

SEQ ID NO: 27946 - DNA, 33 bp, Homo sapiens
acaattctgcttgttacgggattgagctaggtt

SEQ ID NO: 27947 - DNA, 33 bp, Homo sapiens
ttagaacactctgctacgctattggaatgtttt

SEQ ID NO: 27948 - DNA, 33 bp, Homo sapiens
ggggaggaacatcagaataacagtggacttctc

SEQ ID NO: 27949 - DNA, 33 bp, Homo sapiens
aggaagaagttgcatacgttataggcccaacta

SEQ ID NO: 27950 - DNA, 33 bp, Homo sapiens
actgtgactacgataagcttccgataaccaacg

SEQ ID NO: 27951 - DNA, 33 bp, Homo sapiens
gcagaagtaataccacagaggcgctatatgctg

SEQ ID NO: 27952 - DNA, 33 bp, Homo sapiens
gcagtttttcccaaccaagcgtctacctttgat

SEQ ID NO: 27953 - DNA, 33 bp, Homo sapiens
atcagtactaacacaactatttttacataaacc

SEQ ID NO: 27954 - DNA, 33 bp, Homo sapiens
aagcccactacaaggaactgagcaacatggtca

SEQ ID NO: 27955 - DNA, 33 bp, Homo sapiens
attattgcctggcatcaaaaatatgggggaagg

SEQ ID NO: 27956 - DNA, 51 bp, Homo sapiens
actatttttgagcatctctttgctacgtaaaattgtatttgctttacagat

SEQ ID NO: 27957 - DNA, 33 bp, Homo sapiens
tcagtcccctcatcccaaagatagagtatccag

SEQ ID NO: 27958 - DNA, 33 bp, Homo sapiens
gataagtcatctagcaagtaaggctatcaatta

SEQ ID NO: 27959 - DNA, 33 bp, Homo sapiens
atacattcaaaccataaccagctttaaactcaa

SEQ ID NO: 27960 - DNA, 33 bp, Homo sapiens
gttggctactgtactcactgttcataaactgtt

SEQ ID NO: 27961 - DNA, 33 bp, Homo sapiens
cttacaaaccttatgagagtctaaaacgagaat

SEQ ID NO: 27962 - DNA, 33 bp, Homo sapiens
gctgcttccacttggccatcttggtctcctctc

SEQ ID NO: 27963 - DNA, 33 bp, Homo sapiens
aggctggagtacaagcaatatgcatcctggcag

SEQ ID NO: 27964 - DNA, 33 bp, Homo sapiens
ttgttgacagctgttacaatacacaaagtacca

SEQ ID NO: 27965 - DNA, 33 bp, Homo sapiens
tttgaacatggctgtgaattaaatgataatatt

SEQ ID NO: 27966 - DNA, 33 bp, Homo sapiens
atcctctaacattacaaggcaatatttcacttt

SEQ ID NO: 27967 - DNA, 33 bp, Homo sapiens
aatattcattaaagtaagagagctacagggtcc

SEQ ID NO: 27968 - DNA, 51 bp, Homo sapiens
tacttagaagcaatgtaatgatgccagacagttaataactagaaaatatca

SEQ ID NO: 27969 - DNA, 33 bp, Homo sapiens
ttgttcatagttatcactcattgtcaacataat

SEQ ID NO: 27970 - DNA, 33 bp, Homo sapiens
ttccaaaatgtaaagacggaacaaccataaaca

SEQ ID NO: 27971 - DNA, 33 bp, Homo sapiens
gacttatagaattggccatcatggaattttgcc

SEQ ID NO: 27972 - DNA, 33 bp, Homo sapiens
atgtgggtttatctgaacatcttcctgttgggc

SEQ ID NO: 27973 - DNA, 33 bp, Homo sapiens
atcagtcaagtcaaagcattcttagtgatagcc

SEQ ID NO: 27974 - DNA, 33 bp, Homo sapiens
aaaacggaaaattgtgaatgtgtaatgtaccac

SEQ ID NO: 27975 - DNA, 33 bp, Homo sapiens
gctaagttttatccatgaaaagagacctgttag

SEQ ID NO: 27976 - DNA, 33 bp, Homo sapiens
ttcataatcttataaaattccaggaagctgaat

SEQ ID NO: 27977 - DNA, 33 bp, Homo sapiens
tccttttagttacatgcagtcatttttgtccac

SEQ ID NO: 27978 - DNA, 51 bp, Homo sapiens
aaataatgataaaaagtatagtataataagtacataaaccagtaacattca

SEQ ID NO: 27979 - DNA, 33 bp, Homo sapiens
atagacctatgataagaacatttccacggtatt

SEQ ID NO: 27980 - DNA, 33 bp, Homo sapiens
acccttgtttcaaggcaactcagaagagggaat

SEQ ID NO: 27981 - DNA, 33 bp, Homo sapiens
atgataagtagaaaaaaagaagccagcgaaaaa

SEQ ID NO: 27982 - DNA, 33 bp, Homo sapiens
accagtgctttggtaccgctaaggctgtgattg

SEQ ID NO: 27983 - DNA, 33 bp, Homo sapiens
tatattttattccctcaactgccaggttcatta

SEQ ID NO: 27984 - DNA, 51 bp, Homo sapiens
catgaactctcttttatttaggaaggattgcagaacaaaaatgaaactcag

SEQ ID NO: 27985 - DNA, 33 bp, Homo sapiens
gaaattgccattgaaacgagttaaggcctaccc

SEQ ID NO: 27986 - DNA, 33 bp, Homo sapiens
agttttgagaacagatcatcaacagtgtcaaat

SEQ ID NO: 27987 - DNA, 51 bp, Homo sapiens
cttttcttcatctcatggaggatgactattttaaggagagtgaacattaca

SEQ ID NO: 27988 - DNA, 33 bp, Homo sapiens
attttcaatttaaaacaggttcattggaacata

SEQ ID NO: 27989 - DNA, 33 bp, Homo sapiens
tgtagaggtaagataaattagaatatgggctct

SEQ ID NO: 27990 - DNA, 33 bp, Homo sapiens
taaacaaagggtaataaattggaagagcagtag

SEQ ID NO: 27991 - DNA, 33 bp, Homo sapiens
tgctttgctttcagtaacattagctgaagtaat

SEQ ID NO: 27992 - DNA, 33 bp, Homo sapiens
cattaatttagtagcgaaactcttcatatccat

SEQ ID NO: 27993 - DNA, 51 bp, Homo sapiens
ctgaagaaacagttgtgaattaaaacgagcaaatatagtaaatattattta

SEQ ID NO: 27994 - DNA, 33 bp, Homo sapiens
cagcctggattgagtaaccatttcatgctggag

SEQ ID NO: 27995 - DNA, 33 bp, Homo sapiens
tgatcattccatgtaacgtgactactcaacagg

SEQ ID NO: 27996 - DNA, 51 bp, Homo sapiens
ctaaacttatctttgactgattacaagtgtctttttcaaacttgagctgtg

SEQ ID NO: 27997 - DNA, 33 bp, Homo sapiens
gaatggttctagacaacaacttttcatggaggg

SEQ ID NO: 27998 - DNA, 33 bp, Homo sapiens
ttgccagggttaacacagcagacagcaggcatt

SEQ ID NO: 27999 - DNA, 33 bp, Homo sapiens
ggatgaagcacttgaacaggaatccacattaca

SEQ ID NO: 28000 - DNA, 33 bp, Homo sapiens
cagtcactgtggcaaccaaaatgatcccacaga

SEQ ID NO: 28001 - DNA, 33 bp, Homo sapiens
acaatcatccttgtcacacaatagaaggtagaa

SEQ ID NO: 28002 - DNA, 33 bp, Homo sapiens
gctgtacagaaagcacagctgggaagttctcag

SEQ ID NO: 28003 - DNA, 33 bp, Homo sapiens
gctgcagggagctggcgaataggtagaacttgg

SEQ ID NO: 28004 - DNA, 33 bp, Homo sapiens
aaatggcatcacacataacgatcagagactgaa

SEQ ID NO: 28005 - DNA, 33 bp, Homo sapiens
ggacccacttgaaacacgagagttgatacgaag

SEQ ID NO: 28006 - DNA, 33 bp, Homo sapiens
tatcatacaaatgtaaaacaataagagggaaaa

SEQ ID NO: 28007 - DNA, 33 bp, Homo sapiens
gttgctagactttaaaaacgcacaattatctgt

SEQ ID NO: 28008 - DNA, 33 bp, Homo sapiens
gcaaggaacatttccaagatcaacttgtgcagg

SEQ ID NO: 28009 - DNA, 33 bp, Homo sapiens
atagccaaatacaaacagtagaactcatttaga

SEQ ID NO: 28010 - DNA, 33 bp, Homo sapiens
agtgtgctatagagtccaaagtgctaaccaaaa

SEQ ID NO: 28011 - DNA, 33 bp, Homo sapiens
gttttacctttcacagacattacttcccaataa

SEQ ID NO: 28012 - DNA, 33 bp, Homo sapiens
tatgccaagatgacaaatgagaagtgcaagtgt

SEQ ID NO: 28013 - DNA, 33 bp, Homo sapiens
gggagtgtctgttttacgtggttaaggactgaa

SEQ ID NO: 28014 - DNA, 33 bp, Homo sapiens
ggtgatggtataagtaagacaatgatacttgtg

SEQ ID NO: 28015 - DNA, 51 bp, Homo sapiens
tagagaatgcaacatgtcagagatacattttcaaacaagtttaaccaccta

SEQ ID NO: 28016 - DNA, 33 bp, Homo sapiens
ggctactttctatgccccagttagaactttctc

SEQ ID NO: 28017 - DNA, 33 bp, Homo sapiens
acaataaacatacaaaccaggtaacacacatag

SEQ ID NO: 28018 - DNA, 33 bp, Homo sapiens
cctctagtcctaagccacagggaatctactttc

SEQ ID NO: 28019 - DNA, 51 bp, Homo sapiens
gcagaaaacgtatatgaatccaccacgattagttctctttaaactcagatc

SEQ ID NO: 28020 - DNA, 51 bp, Homo sapiens
ttggcaagctacttacctctgcatcactctgatagagaaatgagtatcttt

SEQ ID NO: 28021 - DNA, 51 bp, Homo sapiens
gcaccctccaaaatgtcaaagaccaataagaactattttgtttgccaacaa

SEQ ID NO: 28022 - DNA, 51 bp, Homo sapiens
tggtgttttcaataagagttttacacgagctaattgatggaaacaattaat

SEQ ID NO: 28023 - DNA, 33 bp, Homo sapiens
ctatttgaagagtgagaaaaatgggatttcttg

SEQ ID NO: 28024 - DNA, 33 bp, Homo sapiens
caagcccttataccaaatgcttactattcaagg

SEQ ID NO: 28025 - DNA, 33 bp, Homo sapiens
aactccttcactcgaacctccaagtcagtgtct

SEQ ID NO: 28026 - DNA, 33 bp, Homo sapiens
aggtgttcaaatgcggaattctgttgatactac

SEQ ID NO: 28027 - DNA, 33 bp, Homo sapiens
gtatgtaaactcagtacgtaaaaaactcagtaa

SEQ ID NO: 28028 - DNA, 33 bp, Homo sapiens
acctactcctaagaaagggactgaatccagggg

SEQ ID NO: 28029 - DNA, 33 bp, Homo sapiens
caaaacacacaaacaaagcgaggaaagcaaggg

SEQ ID NO: 28030 - DNA, 33 bp, Homo sapiens
ttctagactcaagatgcaataacacaggggcag

SEQ ID NO: 28031 - DNA, 33 bp, Homo sapiens
tatagcactcgactcactaataagccaataaat

SEQ ID NO: 28032 - DNA, 33 bp, Homo sapiens
atgaaaaatggcaacaactccaagaatataaca

SEQ ID NO: 28033 - DNA, 33 bp, Homo sapiens
ctgcagagccctaaaacggtgtcacagccctgg

SEQ ID NO: 28034 - DNA, 33 bp, Homo sapiens
aggagaattggaaaacgggtagagtaaaaggtt

SEQ ID NO: 28035 - DNA, 33 bp, Homo sapiens
agaggaagggacttacagaattgggacccagac

SEQ ID NO: 28036 - DNA, 51 bp, Homo sapiens
agaatgttttccaagagttctttcccgatggtttgtattttctccctttgc

SEQ ID NO: 28037 - DNA, 33 bp, Homo sapiens
gcagatgtaataataaaacagcattggaaattc

SEQ ID NO: 28038 - DNA, 51 bp, Homo sapiens
tgaatcctgtgtaaaactgactcaacgttcccaactggattatggactgat

SEQ ID NO: 28039 - DNA, 33 bp, Homo sapiens
atgttctccactgaaacaatctcttccaaacag

SEQ ID NO: 28040 - DNA, 33 bp, Homo sapiens
gatggtcctaataaccactcttatttcttttat

SEQ ID NO: 28041 - DNA, 33 bp, Homo sapiens
aggcctcacaagaacacccgccactgtcagagc

SEQ ID NO: 28042 - DNA, 33 bp, Homo sapiens
aagagagaatgatgtacacaagagccacagtct

SEQ ID NO: 28043 - DNA, 33 bp, Homo sapiens
ggtgggaggataagaccgcctttcctacgcaaa

SEQ ID NO: 28044 - DNA, 33 bp, Homo sapiens
gaaataactccgatgaagaaacagaagatttca

SEQ ID NO: 28045 - DNA, 51 bp, Homo sapiens
taacaagcttaatttttgaattggcaatatagtcacatattatgaaattca

SEQ ID NO: 28046 - DNA, 33 bp, Homo sapiens
gatgctgtttgatcgaatatccacatggttaat

SEQ ID NO: 28047 - DNA, 51 bp, Homo sapiens
catatgttatgggccaaaaagttaacatttgagtgtccacagttgtatttt

SEQ ID NO: 28048 - DNA, 33 bp, Homo sapiens
agacaaagtcaaactaaagggaattctgtaaaa

SEQ ID NO: 28049 - DNA, 33 bp, Homo sapiens
actagagtctctccaacgtgaatcaaattgaag

SEQ ID NO: 28050 - DNA, 33 bp, Homo sapiens
taggccatactgttccaacaatttaccaccagg

SEQ ID NO: 28051 - DNA, 33 bp, Homo sapiens
acgctctctttcaggcactggtttgtcactatc

SEQ ID NO: 28052 - DNA, 33 bp, Homo sapiens
aaatagagatgtatgaccccagacctacgatct

SEQ ID NO: 28053 - DNA, 33 bp, Homo sapiens
aaccagtcatgtccaaacttctgctctaaagat

SEQ ID NO: 28054 - DNA, 33 bp, Homo sapiens
agctccaaagttaaacaatgtaggaagagctgg

SEQ ID NO: 28055 - DNA, 33 bp, Homo sapiens
tggctctgaatcagaacgtaaagaacaaaattt

SEQ ID NO: 28056 - DNA, 33 bp, Homo sapiens
taaattgcatgatcaaaagacacgactgtgaaa

SEQ ID NO: 28057 - DNA, 33 bp, Homo sapiens
actcacacctcacagcaattttagagtctccct

SEQ ID NO: 28058 - DNA, 33 bp, Homo sapiens
aagttagtaatcttaaactttgtgctaacctcc

SEQ ID NO: 28059 - DNA, 33 bp, Homo sapiens
ttgctgagtttatctacagtgtctctaggaccc

SEQ ID NO: 28060 - DNA, 33 bp, Homo sapiens
aaatttctgcaagttcaaagtcaaatttctgca

SEQ ID NO: 28061 - DNA, 33 bp, Homo sapiens
agctgtaaactgcaaactgctgtataaaagtaa

SEQ ID NO: 28062 - DNA, 33 bp, Homo sapiens
aaaatcctccagagaagagaccagtaaattcaa

SEQ ID NO: 28063 - DNA, 33 bp, Homo sapiens
caccttactccattacaactgcatcttaattag

SEQ ID NO: 28064 - DNA, 33 bp, Homo sapiens
tgttttctaggagagcaattagctaagtttagg

SEQ ID NO: 28065 - DNA, 33 bp, Homo sapiens
gaacctatctagtcaacggtttaattttacaaa

SEQ ID NO: 28066 - DNA, 33 bp, Homo sapiens
agagaaacacaagtcactactagtcagtccgct

SEQ ID NO: 28067 - DNA, 33 bp, Homo sapiens
tgatccagacaagaaacatattatcagattatt

SEQ ID NO: 28068 - DNA, 33 bp, Homo sapiens
aggcaagcaaattttacgactcttgaattaatt

SEQ ID NO: 28069 - DNA, 33 bp, Homo sapiens
atgacacgtagcaataagcacagtaaccaagct

SEQ ID NO: 28070 - DNA, 33 bp, Homo sapiens
ggcatgagagtgattacgtagggcctattataa

SEQ ID NO: 28071 - DNA, 33 bp, Homo sapiens
gagcgaaagaagccaccataatacagcaatgat

SEQ ID NO: 28072 - DNA, 33 bp, Homo sapiens
gctcacccttccagtcaccattagtgctatttt

SEQ ID NO: 28073 - DNA, 33 bp, Homo sapiens
tgcatggccctacctagctcaatttaaatgtca

SEQ ID NO: 28074 - DNA, 51 bp, Homo sapiens
taataatgccaccatttttatttctcacactcctcaacccccacctctgat

SEQ ID NO: 28075 - DNA, 33 bp, Homo sapiens
cctcttataccaaataaccaagttgtaaataca

SEQ ID NO: 28076 - DNA, 51 bp, Homo sapiens
acccaaagctgagaaaaaaggctataagtatcccaacgctgaatccagtca

SEQ ID NO: 28077 - DNA, 33 bp, Homo sapiens
agaaggtgaaaataaaatggtctcttcatgatt

SEQ ID NO: 28078 - DNA, 51 bp, Homo sapiens
ccatgcatatattgctggtttgaagaactttttagacaaaataaaacattc

SEQ ID NO: 28079 - DNA, 33 bp, Homo sapiens
gcacaagctggtataaaaaattacatatagttg

SEQ ID NO: 28080 - DNA, 51 bp, Homo sapiens
gggattggtttaagtaatgaagtccacaatcaattttacaagttaaggaca

SEQ ID NO: 28081 - DNA, 33 bp, Homo sapiens
tttctgaagatattgcaacaattaatttttagg

SEQ ID NO: 28082 - DNA, 33 bp, Homo sapiens
taatagatgtaagtcaagaactatggaattgtc

SEQ ID NO: 28083 - DNA, 33 bp, Homo sapiens
tgaagtcaagctgcgtaaatctcaggagaagta

SEQ ID NO: 28084 - DNA, 33 bp, Homo sapiens
atgaggctctgaattaagaaccagatgtggcaa

SEQ ID NO: 28085 - DNA, 33 bp, Homo sapiens
gtaaatcagttttaaccttgctagcctaatgtt

SEQ ID NO: 28086 - DNA, 33 bp, Homo sapiens
aattatgttttctctccaactttctcaggcacc

SEQ ID NO: 28087 - DNA, 33 bp, Homo sapiens
ttttctctgaaactaactgacaatgaggcaaat

SEQ ID NO: 28088 - DNA, 33 bp, Homo sapiens
attatcccttgcaaatcaatcagccatgtgact

SEQ ID NO: 28089 - DNA, 33 bp, Homo sapiens
aaagatgggtatttaaccttctgcacgcagata

SEQ ID NO: 28090 - DNA, 33 bp, Homo sapiens
tgtcagaagagattaactcaaacaggaggcagc

SEQ ID NO: 28091 - DNA, 33 bp, Homo sapiens
tcccacctctcaataccatcacttcactaagtt

SEQ ID NO: 28092 - DNA, 33 bp, Homo sapiens
tttttcatatcacgtaaaagttaagaaaaattc

SEQ ID NO: 28093 - DNA, 33 bp, Homo sapiens
ttagtgtgaacttttccacagtattttgcatga

SEQ ID NO: 28094 - DNA, 33 bp, Homo sapiens
aaatgtttgcaatggaaaataagaaaggaaaga

SEQ ID NO: 28095 - DNA, 33 bp, Homo sapiens
tagaacaactaactaacgcacaagtcctcattc

SEQ ID NO: 28096 - DNA, 33 bp, Homo sapiens
gaggaacacctgcaaaaaataacagcttagtcc

SEQ ID NO: 28097 - DNA, 33 bp, Homo sapiens
caaccagcactttgaaccaacataccatatggc

SEQ ID NO: 28098 - DNA, 33 bp, Homo sapiens
accaattccgaacacaataatgctaagatctga

SEQ ID NO: 28099 - DNA, 33 bp, Homo sapiens
tcaaatttgagaaatgaaagaacaacgaactct

SEQ ID NO: 28100 - DNA, 33 bp, Homo sapiens
agtcataatatttccactgaaactttcctgaat

SEQ ID NO: 28101 - DNA, 33 bp, Homo sapiens
cagttctggatgtcagcagtcggaaatggtttt

SEQ ID NO: 28102 - DNA, 33 bp, Homo sapiens
tttctgttaaagttcaccgtggcaatgtaaatt

SEQ ID NO: 28103 - DNA, 33 bp, Homo sapiens
tattgatcccatttcaaagacaaggagagaggt

SEQ ID NO: 28104 - DNA, 33 bp, Homo sapiens
agaagtggttaacagcaagacacaattaatgcc

SEQ ID NO: 28105 - DNA, 33 bp, Homo sapiens
aaccaaagaaatcagcagaagaccataaaaaca

SEQ ID NO: 28106 - DNA, 33 bp, Homo sapiens
ttggcacttagtcattgaagcctacccttgtca

SEQ ID NO: 28107 - DNA, 33 bp, Homo sapiens
gtggcccaaagactgacaaggagcaagagatgt

SEQ ID NO: 28108 - DNA, 33 bp, Homo sapiens
atgtgggccaagtccaaaggaaaccaccaagca

SEQ ID NO: 28109 - DNA, 51 bp, Homo sapiens
taacattatcctcaatagagcctaaagtatagaatacactcattttctcac

SEQ ID NO: 28110 - DNA, 33 bp, Homo sapiens
ttaaaatctagcaccactaaggaagagaagaaa

SEQ ID NO: 28111 - DNA, 33 bp, Homo sapiens
atgctgatagaattcaagagaaaagaaatttga

SEQ ID NO: 28112 - DNA, 33 bp, Homo sapiens
tgctccaatatagagaatatcttggataatgga

SEQ ID NO: 28113 - DNA, 33 bp, Homo sapiens
aaattggatttgaaaaacttggtaatgcctcat

SEQ ID NO: 28114 - DNA, 33 bp, Homo sapiens
ttacactggacaagcaaaaactggcacataaga

SEQ ID NO: 28115 - DNA, 33 bp, Homo sapiens
tccactatgttcttggaataatattaaagaaaa

SEQ ID NO: 28116 - DNA, 33 bp, Homo sapiens
acttatcttcctggtacgtctgtccaccaaaag

SEQ ID NO: 28117 - DNA, 33 bp, Homo sapiens
tgcatgctgttttatcaccagatagggaccatg

SEQ ID NO: 28118 - DNA, 33 bp, Homo sapiens
ggatccaaatataaggcagtagtagtgactcag

SEQ ID NO: 28119 - DNA, 33 bp, Homo sapiens
ttcatactttcatagaatagaacaggacagaat

SEQ ID NO: 28120 - DNA, 33 bp, Homo sapiens
tgggtgtcttttcacccggctttctggaattcc

SEQ ID NO: 28121 - DNA, 33 bp, Homo sapiens
ggagggtggaaaaaaggcaagacagggtgggcc

SEQ ID NO: 28122 - DNA, 33 bp, Homo sapiens
taggcagcaaggccaaaagtgcatgcgttagtc

SEQ ID NO: 28123 - DNA, 33 bp, Homo sapiens
cctgccaacttgattccccacactcactttcac

SEQ ID NO: 28124 - DNA, 33 bp, Homo sapiens
aagaaggtactagctacgtctaagggagagagg

SEQ ID NO: 28125 - DNA, 33 bp, Homo sapiens
tcaattaataagagaaattagagaggccaagag

SEQ ID NO: 28126 - DNA, 33 bp, Homo sapiens
cttggggcctaatgaaatggaacccagtctgtc

SEQ ID NO: 28127 - DNA, 33 bp, Homo sapiens
gtctcctgtctaaaataagcaaacctgttgaag

SEQ ID NO: 28128 - DNA, 33 bp, Homo sapiens
gtccctgccaaagcaccgaatccaaaatcataa

SEQ ID NO: 28129 - DNA, 33 bp, Homo sapiens
gagggaagggggctgagctaatcctttcatcag

SEQ ID NO: 28130 - DNA, 51 bp, Homo sapiens
gacccatgtaccagttttaaaggcaccatctatactttatctacatgaagg

SEQ ID NO: 28131 - DNA, 33 bp, Homo sapiens
tgatagatagacagaccgaaaggaatagaaaat

SEQ ID NO: 28132 - DNA, 51 bp, Homo sapiens
aggtaattgttcaatatatatccatcaggtcaaatttgctgattatattaa

SEQ ID NO: 28133 - DNA, 33 bp, Homo sapiens
actttctgggctaacaaggtcctcacacagggc

SEQ ID NO: 28134 - DNA, 33 bp, Homo sapiens
tgtattttggctcctcaatttctgtgactttgg

SEQ ID NO: 28135 - DNA, 33 bp, Homo sapiens
aagatgagactatgcaaaggattacatggatca

SEQ ID NO: 28136 - DNA, 33 bp, Homo sapiens
ttattctgcataacacaatgtgcatttcttatt

SEQ ID NO: 28137 - DNA, 33 bp, Homo sapiens
ttaacacctttttttcaccaacaatattctcta

SEQ ID NO: 28138 - DNA, 33 bp, Homo sapiens
tatcacaaggcaaccaatgatatatctaatttg

SEQ ID NO: 28139 - DNA, 51 bp, Homo sapiens
ccatatacctgaaagatctgatgaaacccagcgtgtttttaaaagttcgaa

SEQ ID NO: 28140 - DNA, 33 bp, Homo sapiens
ttcacctctaagccacaggtatcatctcttcca

SEQ ID NO: 28141 - DNA, 33 bp, Homo sapiens
aagagagaatcagtaaaggatttataggcaaag

SEQ ID NO: 28142 - DNA, 33 bp, Homo sapiens
aggcatttttgcacagactgaccataagtatac

SEQ ID NO: 28143 - DNA, 33 bp, Homo sapiens
atcttgaagctgattccacctcaaagctgtatg

SEQ ID NO: 28144 - DNA, 51 bp, Homo sapiens
acgctgtggatgcaagagtcaatcaaatgagtgtggtctctatccttgtgg

SEQ ID NO: 28145 - DNA, 33 bp, Homo sapiens
ggggtttacctattctcaccattggatggtgct

SEQ ID NO: 28146 - DNA, 33 bp, Homo sapiens
aactgtgtaggaatcaataaatggagagtgaaa

SEQ ID NO: 28147 - DNA, 33 bp, Homo sapiens
caacagggcgtgttgacattatataaataaatt

SEQ ID NO: 28148 - DNA, 33 bp, Homo sapiens
tagttgcttctttagtaaatgtcaagtggcatg

SEQ ID NO: 28149 - DNA, 33 bp, Homo sapiens
ggtgtagacaacccaaattcctagctggctact

SEQ ID NO: 28150 - DNA, 33 bp, Homo sapiens
cgtactctccggacaacgaaccacaaccaacgc

SEQ ID NO: 28151 - DNA, 33 bp, Homo sapiens
cttcatttttctgtgacgctagatactacctat

SEQ ID NO: 28152 - DNA, 33 bp, Homo sapiens
tcacctgttcatccccacatatcacatcatctg

SEQ ID NO: 28153 - DNA, 33 bp, Homo sapiens
caaagtgacttacgaacgagattgttcattgtg

SEQ ID NO: 28154 - DNA, 33 bp, Homo sapiens
atatttgcttatattaacattgatatacactag

SEQ ID NO: 28155 - DNA, 33 bp, Homo sapiens
ctctcaaccgtaaaaccacacagggcagttgtg

SEQ ID NO: 28156 - DNA, 33 bp, Homo sapiens
ctggaagatctcaaacaagtccgctactcccag

SEQ ID NO: 28157 - DNA, 33 bp, Homo sapiens
tttgcaccactgatacagtaagctctttggggg

SEQ ID NO: 28158 - DNA, 33 bp, Homo sapiens
acctcccactgagctacggaatcggctttcctg

SEQ ID NO: 28159 - DNA, 51 bp, Homo sapiens
cattgtcatcattgatccatccgtccatctccaaaaagttactcagggcct

SEQ ID NO: 28160 - DNA, 33 bp, Homo sapiens
tcatctggacgctgaacggaaagaccatcaaga

SEQ ID NO: 28161 - DNA, 33 bp, Homo sapiens
ttcttctcttcccaaacgtaaccaatctaaact

SEQ ID NO: 28162 - DNA, 33 bp, Homo sapiens
tgaggtaagtgatcaccagtggggcaggggtaa

SEQ ID NO: 28163 - DNA, 33 bp, Homo sapiens
ttttctttgtagaggaacatcctgtggaactga

SEQ ID NO: 28164 - DNA, 33 bp, Homo sapiens
ataaaatgcacagagacaagacgaaggttttga

SEQ ID NO: 28165 - DNA, 33 bp, Homo sapiens
gaagatacagaatggactcaaggtgcaaatgga

SEQ ID NO: 28166 - DNA, 33 bp, Homo sapiens
attcagagaaggaaaccactatacactgagtaa

SEQ ID NO: 28167 - DNA, 33 bp, Homo sapiens
ggtagtaaataaaacactggacacaacatatgc

SEQ ID NO: 28168 - DNA, 33 bp, Homo sapiens
ttcatcttttctccacagagctctcatttaacc

SEQ ID NO: 28169 - DNA, 33 bp, Homo sapiens
catgaccttgactttggataatgcctttatgta

SEQ ID NO: 28170 - DNA, 33 bp, Homo sapiens
gagaagtcatgtgacacgttttctgatttttgt

SEQ ID NO: 28171 - DNA, 33 bp, Homo sapiens
agggtggtttattacacggcaatatctagctaa

SEQ ID NO: 28172 - DNA, 33 bp, Homo sapiens
agaaagcttatgttccaatccatcatttaccct

SEQ ID NO: 28173 - DNA, 33 bp, Homo sapiens
gtctacaaaagatgtaagttaggaccaagacag

SEQ ID NO: 28174 - DNA, 33 bp, Homo sapiens
gggcatcattctgtaactccctctcatttgcac

SEQ ID NO: 28175 - DNA, 33 bp, Homo sapiens
gcctgggggagttatgcattggagaacttgcca

SEQ ID NO: 28176 - DNA, 33 bp, Homo sapiens
gtgacctaacctgaccaagtatttaatagcctt

SEQ ID NO: 28177 - DNA, 33 bp, Homo sapiens
agtggattgacatgacaagattatgtgatcctg

SEQ ID NO: 28178 - DNA, 33 bp, Homo sapiens
acaccaattcatataacggagtgctagacagct

SEQ ID NO: 28179 - DNA, 33 bp, Homo sapiens
catgaaacagggaatccatgtcagcaatatatg

SEQ ID NO: 28180 - DNA, 33 bp, Homo sapiens
tgcaaccgagagccaaccatgtgcccggtactt

SEQ ID NO: 28181 - DNA, 33 bp, Homo sapiens
gccaaaaggatttctgaatgccctggtgtttgc

SEQ ID NO: 28182 - DNA, 33 bp, Homo sapiens
atatcagcaacacaaacgatttactttatgagg

SEQ ID NO: 28183 - DNA, 33 bp, Homo sapiens
gctgcccctcaaccacccctgagagaagacaac

SEQ ID NO: 28184 - DNA, 33 bp, Homo sapiens
aagctttcttactacaatgtaaatgactggcct

SEQ ID NO: 28185 - DNA, 33 bp, Homo sapiens
gactgatgtctccttcgctctacaggcatctga

SEQ ID NO: 28186 - DNA, 51 bp, Homo sapiens
ctgccttgcaggactattctattgtcaattcagttaggctgctgaattcac

SEQ ID NO: 28187 - DNA, 33 bp, Homo sapiens
acaaccagtcatcttccctccttttgtccacca

SEQ ID NO: 28188 - DNA, 33 bp, Homo sapiens
gtgctattgaacctccactcatgtacacttact

SEQ ID NO: 28189 - DNA, 33 bp, Homo sapiens
gaaccatcacttctgccaggtacagcaggattg

SEQ ID NO: 28190 - DNA, 51 bp, Homo sapiens
cactatcaagcagggtttattccaacaatgaaaaagtggcttaatatcagg

SEQ ID NO: 28191 - DNA, 51 bp, Homo sapiens
aaaaatcttctgggtggaataagaaaatttaagatggatgaatgtgatatt

SEQ ID NO: 28192 - DNA, 33 bp, Homo sapiens
gagacaccgtgtcagacggaagacagctctgcc

SEQ ID NO: 28193 - DNA, 33 bp, Homo sapiens
gcattaaaccaccccccacactgagtggcttgg

SEQ ID NO: 28194 - DNA, 33 bp, Homo sapiens
accagaacaatgtatacgcgttaaatttaatct

SEQ ID NO: 28195 - DNA, 33 bp, Homo sapiens
ctctcgacctcattaaaaagcatttcattagaa

SEQ ID NO: 28196 - DNA, 33 bp, Homo sapiens
catgcagtcctggtgtaacaatcaattgaggca

SEQ ID NO: 28197 - DNA, 33 bp, Homo sapiens
ggctactccatggtgccactgggatacacagcc

SEQ ID NO: 28198 - DNA, 33 bp, Homo sapiens
tcctcattggttcaggccagattttattaccca

SEQ ID NO: 28199 - DNA, 33 bp, Homo sapiens
gcatttaggaattgcaagtgaagtgctgtaaac

SEQ ID NO: 28200 - DNA, 33 bp, Homo sapiens
aattgtttcttttggacgtctgagaatgaaaac

SEQ ID NO: 28201 - DNA, 33 bp, Homo sapiens
gaggagcacaattcaacgattacaccctctgtg

SEQ ID NO: 28202 - DNA, 33 bp, Homo sapiens
acatgtaccttttctgcaccaatcagctgctga

SEQ ID NO: 28203 - DNA, 51 bp, Homo sapiens
acctccatgagaggacacttgaagcatcacactaggaactctcatgggccc

SEQ ID NO: 28204 - DNA, 33 bp, Homo sapiens
tgctgcaggaaagaaacacaagctgctctctca

SEQ ID NO: 28205 - DNA, 33 bp, Homo sapiens
ggagagttcgacctgcaaagagatggcagggtc

SEQ ID NO: 28206 - DNA, 33 bp, Homo sapiens
tgacttgagaatcagacgcagtttgactcatgg

SEQ ID NO: 28207 - DNA, 33 bp, Homo sapiens
gggagaggcgaaccacaaggaaggaccagggct

SEQ ID NO: 28208 - DNA, 33 bp, Homo sapiens
tccagtccttgtctgacggtgtccaacagccca

SEQ ID NO: 28209 - DNA, 33 bp, Homo sapiens
gaagaaggtggttgtaagacatcgctagcaaca

SEQ ID NO: 28210 - DNA, 33 bp, Homo sapiens
tgctagaggagaaaacaagggaggactgtgatc

SEQ ID NO: 28211 - DNA, 33 bp, Homo sapiens
gcagtttattttagaaaacttccagcaagcgac

SEQ ID NO: 28212 - DNA, 33 bp, Homo sapiens
gtagttaaacattagcagagctggtaattgaac

SEQ ID NO: 28213 - DNA, 33 bp, Homo sapiens
ctgtcctaaagtaaagaaagtggagagcagttg

SEQ ID NO: 28214 - DNA, 33 bp, Homo sapiens
agatgcagagttgtacagggtggtgataaagac

SEQ ID NO: 28215 - DNA, 33 bp, Homo sapiens
gttaccacagggccgacatggaagatggagaaa

SEQ ID NO: 28216 - DNA, 33 bp, Homo sapiens
actccctccaatggcccccacagggcatccatg

SEQ ID NO: 28217 - DNA, 33 bp, Homo sapiens
cccccaacatgaaagcaacgccagcaattggag

SEQ ID NO: 28218 - DNA, 33 bp, Homo sapiens
ccggtataattccagactagagcctgccaatac

SEQ ID NO: 28219 - DNA, 33 bp, Homo sapiens
tgcagctgtaacacaaggtatttgctcattctc

SEQ ID NO: 28220 - DNA, 33 bp, Homo sapiens
ctgtcccagcaaccaaaggatgtaagcccgtag

SEQ ID NO: 28221 - DNA, 51 bp, Homo sapiens
aactaaaaataaaacacataacacacgactaggttacagttacacctacag

SEQ ID NO: 28222 - DNA, 33 bp, Homo sapiens
ttggcagtttcatactaaactaaacataccctt

SEQ ID NO: 28223 - DNA, 33 bp, Homo sapiens
acctagaaatttaatacagtgctctggagtctg

SEQ ID NO: 28224 - DNA, 33 bp, Homo sapiens
aaagagccatggataactgatgggccacccagg

SEQ ID NO: 28225 - DNA, 33 bp, Homo sapiens
taatgccaatttgcaacctgagagggggatctt

SEQ ID NO: 28226 - DNA, 33 bp, Homo sapiens
tagccagcttctgtgacctcatcatggttaatt

SEQ ID NO: 28227 - DNA, 33 bp, Homo sapiens
ttggagaatcttagtacgagaaacatgttcctt

SEQ ID NO: 28228 - DNA, 33 bp, Homo sapiens
tttgttgaagtaagcacaaaatatcacatgagg

SEQ ID NO: 28229 - DNA, 33 bp, Homo sapiens
ggctctgtgggcgctacgacacaggaatggcac

SEQ ID NO: 28230 - DNA, 33 bp, Homo sapiens
gctgggaatcatatcaatgagcattttacaagg

SEQ ID NO: 28231 - DNA, 33 bp, Homo sapiens
ggaggagagaatattcaaaatgatggtttccag

SEQ ID NO: 28232 - DNA, 51 bp, Homo sapiens
ctattatttatgtttcttattgctcactctcctgtggattcaaagaagcac

SEQ ID NO: 28233 - DNA, 33 bp, Homo sapiens
tctgatttgcagtacaagattagtgcccctttt

SEQ ID NO: 28234 - DNA, 33 bp, Homo sapiens
gaccagtaagaagctacgacaaggtgatgatgg

SEQ ID NO: 28235 - DNA, 33 bp, Homo sapiens
aaacgtagattcatggaatttatatctgactga

SEQ ID NO: 28236 - DNA, 33 bp, Homo sapiens
tgtaggacatctaaaaataacactgatattgac

SEQ ID NO: 28237 - DNA, 33 bp, Homo sapiens
tgtacctcatcagcctaaatactgctttaccct

SEQ ID NO: 28238 - DNA, 51 bp, Homo sapiens
aataacctgtatttttctctcataactctggagtccaaaaacctcatgtca

SEQ ID NO: 28239 - DNA, 33 bp, Homo sapiens
tttgtggcaaaaatacacatggcaataccatat

SEQ ID NO: 28240 - DNA, 33 bp, Homo sapiens
ctgtcatttatcagcagtccatctttgtaagcc

SEQ ID NO: 28241 - DNA, 33 bp, Homo sapiens
atgatgagtgatctagaaaagctggcaattaag

SEQ ID NO: 28242 - DNA, 33 bp, Homo sapiens
ttcctgcacaagcgtaggtcaagcctctgttca

SEQ ID NO: 28243 - DNA, 33 bp, Homo sapiens
ttcagtacttaatctaggttgaattgatattga

SEQ ID NO: 28244 - DNA, 33 bp, Homo sapiens
tggtgttttgaaaatacgcctgtaaattatttg

SEQ ID NO: 28245 - DNA, 33 bp, Homo sapiens
ggtgccccctatgacacacttttgctcctcttg

SEQ ID NO: 28246 - DNA, 33 bp, Homo sapiens
ttcagtcaccttctccactatgtctgggacaat

SEQ ID NO: 28247 - DNA, 33 bp, Homo sapiens
atgtaggttctgtatcaatgtattcttatatgg

SEQ ID NO: 28248 - DNA, 33 bp, Homo sapiens
tacagaaactctcccaaaagtataactaaaaca

SEQ ID NO: 28249 - DNA, 33 bp, Homo sapiens
aatctgatcacatatcaagggaattttggctaa

SEQ ID NO: 28250 - DNA, 33 bp, Homo sapiens
ctcttaaatgagccaaacatacatcactaagta

SEQ ID NO: 28251 - DNA, 33 bp, Homo sapiens
gatggtttctctgacactgctgaatgcaatccc

SEQ ID NO: 28252 - DNA, 33 bp, Homo sapiens
tgttctacctccccatcatcactgtggtgtacg

SEQ ID NO: 28253 - DNA, 33 bp, Homo sapiens
tgtctcaaatgaaaaggcctaaccagaactgga

SEQ ID NO: 28254 - DNA, 51 bp, Homo sapiens
ctgtttctgaacaaggctggcttacacaaagaaagagcagtagtgtgggca

SEQ ID NO: 28255 - DNA, 33 bp, Homo sapiens
cctacgaccactaaaaaaatctcatgcgcaatt

SEQ ID NO: 28256 - DNA, 33 bp, Homo sapiens
ccccaacctgaagagaaacctagatgctgaaac

SEQ ID NO: 28257 - DNA, 33 bp, Homo sapiens
accttaccctaagaaacgctggtgccaagagtc

SEQ ID NO: 28258 - DNA, 33 bp, Homo sapiens
gggaaacacaatttcacaagccaaaatcagtag

SEQ ID NO: 28259 - DNA, 33 bp, Homo sapiens
agaatctcctggaggtaaaatacagattgctgg

SEQ ID NO: 28260 - DNA, 51 bp, Homo sapiens
cctgctggatgcctcctgataaataaccgggatgcaccaccttgccctttg

SEQ ID NO: 28261 - DNA, 51 bp, Homo sapiens
gtctttataggcatggttcccttaactgagctctctagggcaggggtcaaa

SEQ ID NO: 28262 - DNA, 51 bp, Homo sapiens
cccaaatgacttttgcatttgggccgcaaagtaacaacaacaacaaaaaaa

SEQ ID NO: 28263 - DNA, 33 bp, Homo sapiens
agtcccaaagtttatacctctctgtgttagaat

SEQ ID NO: 28264 - DNA, 33 bp, Homo sapiens
ctcacttccaacctcagagagaagatatgcagc

SEQ ID NO: 28265 - DNA, 33 bp, Homo sapiens
tccattccaaagccgaacaaaatcaattacgat

SEQ ID NO: 28266 - DNA, 33 bp, Homo sapiens
gttgtgagtttggggacgttagtctttggcatt

SEQ ID NO: 28267 - DNA, 33 bp, Homo sapiens
agcaggtactgtggaaatgaggaagaaagtccc

SEQ ID NO: 28268 - DNA, 33 bp, Homo sapiens
gtgagccttcaacaacgaactctctcccaacac

SEQ ID NO: 28269 - DNA, 33 bp, Homo sapiens
acaagtgaaaacagcaaagaggaataagccact

SEQ ID NO: 28270 - DNA, 33 bp, Homo sapiens
tacatcttagtccaaacggaatgctgatgccaa

SEQ ID NO: 28271 - DNA, 33 bp, Homo sapiens
aagacagacaagagaacggaataaatggaggaa

SEQ ID NO: 28272 - DNA, 33 bp, Homo sapiens
aaggaaggcatcctacaaagacagtttaaaatt

SEQ ID NO: 28273 - DNA, 33 bp, Homo sapiens
gcacaccaattctaacactaactgcagaattcc

SEQ ID NO: 28274 - DNA, 33 bp, Homo sapiens
tccagagggcctcagaactcaatcccctttaca

SEQ ID NO: 28275 - DNA, 33 bp, Homo sapiens
accatagatagcaaaacgataggcgctcagtaa

SEQ ID NO: 28276 - DNA, 33 bp, Homo sapiens
acttttttttttcagcaactgctatctcttgtg

SEQ ID NO: 28277 - DNA, 33 bp, Homo sapiens
tattgcctgaagggaacaaggaaaataaacatg

SEQ ID NO: 28278 - DNA, 33 bp, Homo sapiens
agtagggaacaagaaaggagactactgcagtta

SEQ ID NO: 28279 - DNA, 33 bp, Homo sapiens
ctaaatcagaaaatgcaaatagcaacttagcta

SEQ ID NO: 28280 - DNA, 33 bp, Homo sapiens
ttccctgcccttaaccacagttgtacccagggc

SEQ ID NO: 28281 - DNA, 33 bp, Homo sapiens
tgagatccctacatgaaaagtggaccagcaagg

SEQ ID NO: 28282 - DNA, 33 bp, Homo sapiens
aagctcccagttaagacctatgctgctagtcct

SEQ ID NO: 28283 - DNA, 33 bp, Homo sapiens
ggaattgaggtacacaacagctaagaaacttgt

SEQ ID NO: 28284 - DNA, 51 bp, Homo sapiens
atcttggctgaaatcaccttcccaaatggcctgtctcctccagccttcctc

SEQ ID NO: 28285 - DNA, 33 bp, Homo sapiens
tgtgccatatattccaataggtgatgcatgaaa

SEQ ID NO: 28286 - DNA, 33 bp, Homo sapiens
ctaaagcaatcactggaatagtatcaattagga

SEQ ID NO: 28287 - DNA, 33 bp, Homo sapiens
ccacgtactgatcactcaacttcaacattatca

SEQ ID NO: 28288 - DNA, 51 bp, Homo sapiens
gctgcctgctggtggaaatctgtacctgcattatactggagaagcccttcc

SEQ ID NO: 28289 - DNA, 51 bp, Homo sapiens
gacacggatagtgccaggaaaatcactctggaactctaggaagggcttctc

SEQ ID NO: 28290 - DNA, 33 bp, Homo sapiens
ggagaccatagtttggaactctgaacgtgaact

SEQ ID NO: 28291 - DNA, 33 bp, Homo sapiens
agataacatgggccaaattgaaacagtttcctt

SEQ ID NO: 28292 - DNA, 51 bp, Homo sapiens
ataattaaggaacactatgttaggcaatgataacacaccgcctctgggtcc

SEQ ID NO: 28293 - DNA, 51 bp, Homo sapiens
tgccagatggtagggatacagtaaacagggccattgatagttacaatggac

SEQ ID NO: 28294 - DNA, 51 bp, Homo sapiens
attaagcctcaatgggctacttttacaatcccatggaaggattaatttaat

SEQ ID NO: 28295 - DNA, 33 bp, Homo sapiens
ggtaagttcatttggcagactgtaatataaaat

SEQ ID NO: 28296 - DNA, 33 bp, Homo sapiens
ttgtggactgatgccaataagttttaccttcag

SEQ ID NO: 28297 - DNA, 33 bp, Homo sapiens
ctgctgagagatccagacatataagaatgaaga

SEQ ID NO: 28298 - DNA, 33 bp, Homo sapiens
aatacttacctccccaatactcaagtcctacca

SEQ ID NO: 28299 - DNA, 33 bp, Homo sapiens
aggattagggctgaaaataccaaacctttttta

SEQ ID NO: 28300 - DNA, 33 bp, Homo sapiens
ttgacattttcagcaactggagtatttgttagc

SEQ ID NO: 28301 - DNA, 33 bp, Homo sapiens
taataggtcaaagaaactattgccatgttgtgt

SEQ ID NO: 28302 - DNA, 33 bp, Homo sapiens
gcttatcactccttcacagagactcagtagtat

SEQ ID NO: 28303 - DNA, 33 bp, Homo sapiens
tcaaattaagtagctacgggcagggtgcaatga

SEQ ID NO: 28304 - DNA, 33 bp, Homo sapiens
tcctggcatcagatcaagatcccactgctgtga

SEQ ID NO: 28305 - DNA, 51 bp, Homo sapiens
gtagatcaataccactctagtattacggcaagagatgcaatcttggtatta

SEQ ID NO: 28306 - DNA, 33 bp, Homo sapiens
cactaccctctccttaccatctattcaacacca

SEQ ID NO: 28307 - DNA, 33 bp, Homo sapiens
aattgcctcacttctacggcaagacgccagcag

SEQ ID NO: 28308 - DNA, 33 bp, Homo sapiens
actagtctcatccacactagcctttagttttaa

SEQ ID NO: 28309 - DNA, 33 bp, Homo sapiens
cttggactgacaaaatcacagtgataggccatg

SEQ ID NO: 28310 - DNA, 33 bp, Homo sapiens
gtaactttgcacttgtcaatccaccagtcttcc

SEQ ID NO: 28311 - DNA, 33 bp, Homo sapiens
gctccaagtacggctccattggcttattggact

SEQ ID NO: 28312 - DNA, 33 bp, Homo sapiens
aggtgttttagaggtacaatcagtgcagcttga

SEQ ID NO: 28313 - DNA, 33 bp, Homo sapiens
aaagattctgcaatgcacaggagagtcttccag

SEQ ID NO: 28314 - DNA, 33 bp, Homo sapiens
taaagtatttaagatacgtgctttagatatcat

SEQ ID NO: 28315 - DNA, 33 bp, Homo sapiens
aagctcagggggttgcacacatttatttatttt

SEQ ID NO: 28316 - DNA, 33 bp, Homo sapiens
ctgagttgaagagctacagatgggagttagggt

SEQ ID NO: 28317 - DNA, 33 bp, Homo sapiens
tgacagccagaaaggaaacataaatggaactca

SEQ ID NO: 28318 - DNA, 51 bp, Homo sapiens
gttttattaaaattactaaagataaatctgcttctagtgaacatttcttca

SEQ ID NO: 28319 - DNA, 33 bp, Homo sapiens
gactgtctgtcttggccacttatttctcttcaa

SEQ ID NO: 28320 - DNA, 33 bp, Homo sapiens
tatccttaaagagtgaagttgccttattctaca

SEQ ID NO: 28321 - DNA, 33 bp, Homo sapiens
ctctgggagacatgagaaacatagaccaaacag

SEQ ID NO: 28322 - DNA, 33 bp, Homo sapiens
ccagcatcgggaactcacacagcttggtaaatt

SEQ ID NO: 28323 - DNA, 33 bp, Homo sapiens
agtcactcccatgtaaacacaactctcaaaacc

SEQ ID NO: 28324 - DNA, 33 bp, Homo sapiens
ttttgatgtgcaacccaattattaatgactata

SEQ ID NO: 28325 - DNA, 51 bp, Homo sapiens
aatcagcgcaaacgtaaatatcccaaattaaacctacttgtcattgtgatc

SEQ ID NO: 28326 - DNA, 33 bp, Homo sapiens
gtttcccttattgcaacgcttaatggtagtgtt

SEQ ID NO: 28327 - DNA, 33 bp, Homo sapiens
ctttaattgctctcaccatctgcagcatagaga

SEQ ID NO: 28328 - DNA, 33 bp, Homo sapiens
tattgctcaacgtttagactactattttgatac

SEQ ID NO: 28329 - DNA, 51 bp, Homo sapiens
aaccatgtataccttatgtgaaactcagtgtgtcatctgggtgcagaagaa

SEQ ID NO: 28330 - DNA, 33 bp, Homo sapiens
actcttttgtgtaaagacaaggaaaaatatatt

SEQ ID NO: 28331 - DNA, 33 bp, Homo sapiens
tttgttgaatctgtacacttgagaataatcttt

SEQ ID NO: 28332 - DNA, 33 bp, Homo sapiens
cttagaatactcatggcatcataatggctactg

SEQ ID NO: 28333 - DNA, 33 bp, Homo sapiens
accaaaaaggagcaaacgtacaagactaacaac

SEQ ID NO: 28334 - DNA, 33 bp, Homo sapiens
aaggggaagaacccagacgaaccatttccagct

SEQ ID NO: 28335 - DNA, 33 bp, Homo sapiens
tctgtacttccattaacatatctgatcctcaat

SEQ ID NO: 28336 - DNA, 33 bp, Homo sapiens
accaagccatttataaagaaatcacctccatga

SEQ ID NO: 28337 - DNA, 33 bp, Homo sapiens
tattacttaataaatacggtgctcaattccaag

SEQ ID NO: 28338 - DNA, 33 bp, Homo sapiens
aatggaacatatcacaagaaatgaaacagacaa

SEQ ID NO: 28339 - DNA, 33 bp, Homo sapiens
agattgtttgtggttagctgccggctcctgttc

SEQ ID NO: 28340 - DNA, 33 bp, Homo sapiens
tctctagcacttggagacggtgaagaaatttgc

SEQ ID NO: 28341 - DNA, 33 bp, Homo sapiens
cctattgctttggtgaaaaccatgcatactcct

SEQ ID NO: 28342 - DNA, 33 bp, Homo sapiens
acacaggaagtcacaaagggtgtctagacagat

SEQ ID NO: 28343 - DNA, 33 bp, Homo sapiens
tgcggaacttctgatagaatgctgagggcgact

SEQ ID NO: 28344 - DNA, 51 bp, Homo sapiens
tttgcccatacaactacttaaagaacagtggagtcacatcatacatgtatg

SEQ ID NO: 28345 - DNA, 33 bp, Homo sapiens
agtttcaaactaaataccaggtgtgtttataca

SEQ ID NO: 28346 - DNA, 51 bp, Homo sapiens
ttaattatttctggggatcattactcaaacttaaagttccaactcacattc

SEQ ID NO: 28347 - DNA, 33 bp, Homo sapiens
tattgtacataaaacacaaaatgtaattccagt

SEQ ID NO: 28348 - DNA, 33 bp, Homo sapiens
aatgagcagactcaaaaaacaaatgaaagaaga

SEQ ID NO: 28349 - DNA, 33 bp, Homo sapiens
taaagaaatgccagtgaacagtaaggattctcc

SEQ ID NO: 28350 - DNA, 33 bp, Homo sapiens
cctgactgaagaatggcccaactgtaggcaaat

SEQ ID NO: 28351 - DNA, 51 bp, Homo sapiens
tttatatgtaggtagaaccttattggaggtaatggtgaaagccagtgagcc

SEQ ID NO: 28352 - DNA, 33 bp, Homo sapiens
atggttcattcaaatcacacaggtacatttcta

SEQ ID NO: 28353 - DNA, 33 bp, Homo sapiens
gagaaactgccacaggccagaggagactaagga

SEQ ID NO: 28354 - DNA, 33 bp, Homo sapiens
tacagctctctcttaacgatgaagaagaggggt

SEQ ID NO: 28355 - DNA, 33 bp, Homo sapiens
acttaattccatcggaccaaagtgaactaacca

SEQ ID NO: 28356 - DNA, 33 bp, Homo sapiens
ttaggttataaataaacggcaggtgttttctga

SEQ ID NO: 28357 - DNA, 33 bp, Homo sapiens
ataggtgattgaggtacaggtggtctaggatca

SEQ ID NO: 28358 - DNA, 33 bp, Homo sapiens
acactgaactgttctacctcggattaaaacata

SEQ ID NO: 28359 - DNA, 33 bp, Homo sapiens
gcagagcaagagttaactgtatggactgaacta

SEQ ID NO: 28360 - DNA, 33 bp, Homo sapiens
ttgtgagctctggatacactaagtcccatgcca

SEQ ID NO: 28361 - DNA, 33 bp, Homo sapiens
ctcccagaaattataacggaaggaagaaggtat

SEQ ID NO: 28362 - DNA, 33 bp, Homo sapiens
actgttagaccttaagaaatgggtagaactgaa

SEQ ID NO: 28363 - DNA, 33 bp, Homo sapiens
ggagatgccagagactcactttaccaacattcc

SEQ ID NO: 28364 - DNA, 33 bp, Homo sapiens
ttagctttatttccgacgtaatttctgccggaa

SEQ ID NO: 28365 - DNA, 51 bp, Homo sapiens
taaatgagtctcaagagcaattcaaagattataaatggttacataactatg

SEQ ID NO: 28366 - DNA, 51 bp, Homo sapiens
aatatagctctctaggaagaaaggtcaatcttatcatgtgaaaaaccatta

SEQ ID NO: 28367 - DNA, 33 bp, Homo sapiens
agttcatactgatataagcaagtctatcttttc

SEQ ID NO: 28368 - DNA, 33 bp, Homo sapiens
gttcttcgaaatttcaaatatgaatcctccaat

SEQ ID NO: 28369 - DNA, 33 bp, Homo sapiens
cagaaggactattctccaaaagccctccttgga

SEQ ID NO: 28370 - DNA, 33 bp, Homo sapiens
aggacctgtagagaccacacaaattctacacta

SEQ ID NO: 28371 - DNA, 33 bp, Homo sapiens
catagaactgaaacacagtgcagaacagaagtt

SEQ ID NO: 28372 - DNA, 51 bp, Homo sapiens
gttgcttgagatgacaagacacctaaaggagtgaagattatatgaattagg

SEQ ID NO: 28373 - DNA, 51 bp, Homo sapiens
agccttgtatcaattaaattctgtccaaagagagaaccctgaggttatctg

SEQ ID NO: 28374 - DNA, 33 bp, Homo sapiens
gctctaggttggcttgaaactaacagaaaccca

SEQ ID NO: 28375 - DNA, 33 bp, Homo sapiens
gatcattccagctccacgacttgaacagtgcga

SEQ ID NO: 28376 - DNA, 33 bp, Homo sapiens
agtccatgctaatatgaaaggcctgtgttcact

SEQ ID NO: 28377 - DNA, 33 bp, Homo sapiens
atatatcagtcttagacgaatgcttagattcag

SEQ ID NO: 28378 - DNA, 33 bp, Homo sapiens
tctgtcttgtttcctcacagaattagatctctt

SEQ ID NO: 28379 - DNA, 51 bp, Homo sapiens
aatatctttgaacaaagaatttacaacaaagaatgatttagagtttaatgt

SEQ ID NO: 28380 - DNA, 33 bp, Homo sapiens
tttttccatctaattacgacctccttcgccact

SEQ ID NO: 28381 - DNA, 33 bp, Homo sapiens
aagcacaacggctatacagagagggctgaactg

SEQ ID NO: 28382 - DNA, 33 bp, Homo sapiens
atttataaactgataacgtccaaacatagtctt

SEQ ID NO: 28383 - DNA, 33 bp, Homo sapiens
ctaactgaacacacgcaatttttcctgcagctt

SEQ ID NO: 28384 - DNA, 33 bp, Homo sapiens
gtcaagaactattcaaagacgtatgatatggtt

SEQ ID NO: 28385 - DNA, 33 bp, Homo sapiens
gcttaaagagaccccaagtaacctcattctgtc

SEQ ID NO: 28386 - DNA, 33 bp, Homo sapiens
aaaagaatggaatgaaaaaactgtgtgctatgt

SEQ ID NO: 28387 - DNA, 33 bp, Homo sapiens
tcctagtatttgcttacccaacaaagtgactgt

SEQ ID NO: 28388 - DNA, 33 bp, Homo sapiens
gctgtgcacaaggagaaagaattctcatcttca

SEQ ID NO: 28389 - DNA, 33 bp, Homo sapiens
atattgagacattcaagccaggaagaaaatagg

SEQ ID NO: 28390 - DNA, 33 bp, Homo sapiens
agatggataattaacccggtaccaaaagtgtgt

SEQ ID NO: 28391 - DNA, 33 bp, Homo sapiens
cagctctaggaggaaaaatattcatggcacctc

SEQ ID NO: 28392 - DNA, 33 bp, Homo sapiens
tacacaaacaattggaaatgatgtgcctaaatt

SEQ ID NO: 28393 - DNA, 33 bp, Homo sapiens
ttctttcagttcatacaacaaaataactctaca

SEQ ID NO: 28394 - DNA, 33 bp, Homo sapiens
gggaagtgttggtggacagagaatgccctaggc

SEQ ID NO: 28395 - DNA, 33 bp, Homo sapiens
cttctacctttgtttaccatcaacagctatatc

SEQ ID NO: 28396 - DNA, 33 bp, Homo sapiens
agtgcatgacagattacgaaagtgcagaatcaa

SEQ ID NO: 28397 - DNA, 33 bp, Homo sapiens
taaaataaaaataaaaagactcaagtgtacatg

SEQ ID NO: 28398 - DNA, 33 bp, Homo sapiens
gagtaatacaaattaacacagtgccaatagaag

SEQ ID NO: 28399 - DNA, 33 bp, Homo sapiens
tgcctgcaaatcagtcaatatagatgaggtaag

SEQ ID NO: 28400 - DNA, 33 bp, Homo sapiens
tagcatttggacttaacagacacaagtacatat

SEQ ID NO: 28401 - DNA, 33 bp, Homo sapiens
catgctcaaggacagcaaaaatgagggataaga

SEQ ID NO: 28402 - DNA, 51 bp, Homo sapiens
aagtaagaaactcagaaatgacttacgtttgagaaagacaggaaaaagtgc

SEQ ID NO: 28403 - DNA, 33 bp, Homo sapiens
ctcaagcaataccacaatgaattaacaaatgaa

SEQ ID NO: 28404 - DNA, 33 bp, Homo sapiens
tatttccttagggtgaatatgttgaagaggcag

SEQ ID NO: 28405 - DNA, 33 bp, Homo sapiens
gttctattttaaagaccaaacacctgtgttggt

SEQ ID NO: 28406 - DNA, 33 bp, Homo sapiens
aaactcatttgtaccactgaaggaattgttaac

SEQ ID NO: 28407 - DNA, 33 bp, Homo sapiens
tctataggccaagcaacagttccaaagaacact

SEQ ID NO: 28408 - DNA, 33 bp, Homo sapiens
cagtttacaagagaaaatgggaccacctccacc

SEQ ID NO: 28409 - DNA, 33 bp, Homo sapiens
gattctctctttaaccaagaaatgctctgtttg

SEQ ID NO: 28410 - DNA, 33 bp, Homo sapiens
ggattaagtgaaagagactcagttagaaaaata

SEQ ID NO: 28411 - DNA, 33 bp, Homo sapiens
ctctgaaagtttgctgaaaaatcacagacaaga

SEQ ID NO: 28412 - DNA, 33 bp, Homo sapiens
aagctgagatctaaacccaattttgtctgactc

SEQ ID NO: 28413 - DNA, 33 bp, Homo sapiens
caaaaatcatagtgcagattatcacagtttgtc

SEQ ID NO: 28414 - DNA, 33 bp, Homo sapiens
actgcaacttactctcaagcagagcagaaaaga

SEQ ID NO: 28415 - DNA, 33 bp, Homo sapiens
caatcctttctttgaacagtaggtaaaatgatc

SEQ ID NO: 28416 - DNA, 51 bp, Homo sapiens
atctaagcataacctatgtaagctgcagagtataacgggcactagagtcaa

SEQ ID NO: 28417 - DNA, 51 bp, Homo sapiens
aaggcaacaggaatcgaagaacaacccaaggaaataaattgcctctgtcag

SEQ ID NO: 28418 - DNA, 33 bp, Homo sapiens
gactctcaaaaacaacacagttaaggcaggtgt

SEQ ID NO: 28419 - DNA, 33 bp, Homo sapiens
caaagagctaagatagcatttgcacatcaatag

SEQ ID NO: 28420 - DNA, 33 bp, Homo sapiens
gaaggatttgttccaaaggatctatactctggt

SEQ ID NO: 28421 - DNA, 33 bp, Homo sapiens
ggcataaaatgcattccaggaactgtaactcat

SEQ ID NO: 28422 - DNA, 33 bp, Homo sapiens
cacacagtgcacataaagcaatcctatgttttg

SEQ ID NO: 28423 - DNA, 33 bp, Homo sapiens
ccacaactgctttgaaagacataggattaattt

SEQ ID NO: 28424 - DNA, 33 bp, Homo sapiens
gagggatttaatacgacgaagaaagaaataggc

SEQ ID NO: 28425 - DNA, 33 bp, Homo sapiens
tgataatgaggtacccaggccctgatcagacat

SEQ ID NO: 28426 - DNA, 33 bp, Homo sapiens
agtcatgcacacttaacactatttcaaaatata

SEQ ID NO: 28427 - DNA, 33 bp, Homo sapiens
agggttcttataaagagaaactcagcacaaatc

SEQ ID NO: 28428 - DNA, 33 bp, Homo sapiens
gaacaatttgcacaaaggccttgaaacaaaaaa

SEQ ID NO: 28429 - DNA, 33 bp, Homo sapiens
cctctctgtggctcaactgggaacactaataag

SEQ ID NO: 28430 - DNA, 33 bp, Homo sapiens
agaataattgcttaacagatgtgggggttccat

SEQ ID NO: 28431 - DNA, 33 bp, Homo sapiens
tatattggtattcagacgacttagacaagaata

SEQ ID NO: 28432 - DNA, 33 bp, Homo sapiens
cccatcatgattaaaaagtgaagcatcttggaa

SEQ ID NO: 28433 - DNA, 33 bp, Homo sapiens
ggcagtgttctgatgtcaactcattagagcagt

SEQ ID NO: 28434 - DNA, 33 bp, Homo sapiens
attttaaatctttttcacacaatttgagaaaga

SEQ ID NO: 28435 - DNA, 33 bp, Homo sapiens
aactattctaatgccaagtaaatctctcctgct

SEQ ID NO: 28436 - DNA, 33 bp, Homo sapiens
gctaattccagctcaaatcctgctgctctttta

SEQ ID NO: 28437 - DNA, 33 bp, Homo sapiens
acacccgatccgactaagcgctgcaggagtcca

SEQ ID NO: 28438 - DNA, 33 bp, Homo sapiens
accttgattgtctttacgctacattgacaacat

SEQ ID NO: 28439 - DNA, 33 bp, Homo sapiens
agtcaatttttatggacatcaggcaaacagtat

SEQ ID NO: 28440 - DNA, 33 bp, Homo sapiens
ataactgaggaagaaacctaaaatgtggtgcct

SEQ ID NO: 28441 - DNA, 33 bp, Homo sapiens
acatgggtttaaaatcacagttcatataaggtt

SEQ ID NO: 28442 - DNA, 33 bp, Homo sapiens
tgagttagtgctatcacaatccacaatatattg

SEQ ID NO: 28443 - DNA, 33 bp, Homo sapiens
gagcttttaagcaaaacggacccttcgacctaa

SEQ ID NO: 28444 - DNA, 33 bp, Homo sapiens
atctccttcaataaaccgggggaattgatatag

SEQ ID NO: 28445 - DNA, 33 bp, Homo sapiens
ctattatgcaactatcaaaaagattgaggcaga

SEQ ID NO: 28446 - DNA, 33 bp, Homo sapiens
tgccactgtgctgcaacctggaggacaaaaccc

SEQ ID NO: 28447 - DNA, 33 bp, Homo sapiens
taagttggcaaaaccaagaagttaaggccaggt

SEQ ID NO: 28448 - DNA, 51 bp, Homo sapiens
gcatgactcaagaaaagttaagaaccactgatctaaagaataagactatat

SEQ ID NO: 28449 - DNA, 33 bp, Homo sapiens
tttatgttcgtattcaagaaaggctgactctgg

SEQ ID NO: 28450 - DNA, 33 bp, Homo sapiens
tttattgcttttgccaagataaaagtgaaattt

SEQ ID NO: 28451 - DNA, 33 bp, Homo sapiens
gaaatttttcaacatcaaactaaggctatcttg

SEQ ID NO: 28452 - DNA, 33 bp, Homo sapiens
cttgggttttcctccactgaagatacatatcta

SEQ ID NO: 28453 - DNA, 33 bp, Homo sapiens
cacaatgattcaaataagccaatttacagaata

SEQ ID NO: 28454 - DNA, 51 bp, Homo sapiens
cagtgggtctttttcttaggccacagtcgttaggaatacagttaaggccca

SEQ ID NO: 28455 - DNA, 51 bp, Homo sapiens
ttatccttggctacaaagatcaataataaggatgacgccaatttgaggttg

SEQ ID NO: 28456 - DNA, 33 bp, Homo sapiens
gcctggtatttgagtacgctgttatctgagaac

SEQ ID NO: 28457 - DNA, 51 bp, Homo sapiens
cagatgtgagagagtgacagaaaaacgccaggacccaagagactgtagaat

SEQ ID NO: 28458 - DNA, 33 bp, Homo sapiens
tagaaactggagataaatagttaatcaaccttg

SEQ ID NO: 28459 - DNA, 33 bp, Homo sapiens
ctcctacaagcagctacgaaacaggggtaacta

SEQ ID NO: 28460 - DNA, 33 bp, Homo sapiens
agatggaaacagtcctcaatacccaatatgatt

SEQ ID NO: 28461 - DNA, 33 bp, Homo sapiens
taacgtgagtgaaaaacttctgttagcagatat

SEQ ID NO: 28462 - DNA, 33 bp, Homo sapiens
tgaaggcacaagaaccagagtgatggagagagg

SEQ ID NO: 28463 - DNA, 51 bp, Homo sapiens
ataaaagcaatgggagttgatgtaaaagaagctagtacataaggcaatgta

SEQ ID NO: 28464 - DNA, 33 bp, Homo sapiens
gtgtaacatatgattgcagtgaagagtgagtct

SEQ ID NO: 28465 - DNA, 51 bp, Homo sapiens
ctagctacctagcagacctttctaaccagtagtatagagatcagtatgcat

SEQ ID NO: 28466 - DNA, 33 bp, Homo sapiens
tgagaacacaaaggtgaaaaagtaaatcatagc

SEQ ID NO: 28467 - DNA, 33 bp, Homo sapiens
atgtaatctgcaagtaaaaacaatgtgacctcc

SEQ ID NO: 28468 - DNA, 33 bp, Homo sapiens
cagaaataagactgaccgcccacagctatctga

SEQ ID NO: 28469 - DNA, 33 bp, Homo sapiens
acattagcagacacaaaatcaacttataaatgt

SEQ ID NO: 28470 - DNA, 33 bp, Homo sapiens
ggaaataaggcaatacaagccagggacaatatt

SEQ ID NO: 28471 - DNA, 33 bp, Homo sapiens
ctaggactttacaagacgcactacttggaaatc

SEQ ID NO: 28472 - DNA, 33 bp, Homo sapiens
cattattcgtttatccaactcaaaagtttcaat

SEQ ID NO: 28473 - DNA, 33 bp, Homo sapiens
cagcctgatggcaataggaaagaaaaccccatt

SEQ ID NO: 28474 - DNA, 33 bp, Homo sapiens
ttgcctagatggtgtcagaaagagccatgtagg

SEQ ID NO: 28475 - DNA, 33 bp, Homo sapiens
tcatcgagttgctacacattacacattcttctc

SEQ ID NO: 28476 - DNA, 33 bp, Homo sapiens
cagtcactgataaatacggaaatgctcctacaa

SEQ ID NO: 28477 - DNA, 33 bp, Homo sapiens
cagaactactagcttacgagggtaattttagat

SEQ ID NO: 28478 - DNA, 33 bp, Homo sapiens
ttgctgtttccgggaactatacagcaaatatcg

SEQ ID NO: 28479 - DNA, 33 bp, Homo sapiens
cattcaacataaacgcacatgcaagtatatgtt

SEQ ID NO: 28480 - DNA, 33 bp, Homo sapiens
catgcattaaaatttggatcctacaaggcagaa

SEQ ID NO: 28481 - DNA, 33 bp, Homo sapiens
aacttaagaaaacagacctatgaggcaggcact

SEQ ID NO: 28482 - DNA, 33 bp, Homo sapiens
ttttgttcagggtaggaaagatcgtgaggatgg

SEQ ID NO: 28483 - DNA, 33 bp, Homo sapiens
gaagagcctagaaaacagaaagaaagccattat

SEQ ID NO: 28484 - DNA, 33 bp, Homo sapiens
aaaaatctccagtgaaatcattccttctcatta

SEQ ID NO: 28485 - DNA, 33 bp, Homo sapiens
gtaatcagaaaggtccaagtgaaagtcacatta

SEQ ID NO: 28486 - DNA, 33 bp, Homo sapiens
aggctaaagggtgaaaacacttcagattgagtg

SEQ ID NO: 28487 - DNA, 33 bp, Homo sapiens
tgccatgtgtagtgaaatgttatatcgatttag

SEQ ID NO: 28488 - DNA, 33 bp, Homo sapiens
ttgattctagccattgcagtgtgtgtaaagtga

SEQ ID NO: 28489 - DNA, 33 bp, Homo sapiens
taatctctggaggtagaaaccattgcttcttcg

SEQ ID NO: 28490 - DNA, 33 bp, Homo sapiens
agagccccacataaaagggataaacctcaggaa

SEQ ID NO: 28491 - DNA, 33 bp, Homo sapiens
caataatattctggaaacagcactgaagagcaa

SEQ ID NO: 28492 - DNA, 33 bp, Homo sapiens
tataaactgctccaagaaataaagtaataatgt

SEQ ID NO: 28493 - DNA, 33 bp, Homo sapiens
atacactacggaatacgatgcggccataaagaa

SEQ ID NO: 28494 - DNA, 33 bp, Homo sapiens
tagaactttggaataaagacttgaaataggatt

SEQ ID NO: 28495 - DNA, 33 bp, Homo sapiens
ttcactctaccagaaacgcttcacatatacatc

SEQ ID NO: 28496 - DNA, 33 bp, Homo sapiens
atagaggaagaccttacgatgtggctgtctatg

SEQ ID NO: 28497 - DNA, 33 bp, Homo sapiens
cctcaaaatactgcaaaggttttctaatatatc

SEQ ID NO: 28498 - DNA, 33 bp, Homo sapiens
tagatgctagggatacagaaaaaacaggatgaa

SEQ ID NO: 28499 - DNA, 33 bp, Homo sapiens
aaacagcatgatagccaacttgggacttacatc

SEQ ID NO: 28500 - DNA, 33 bp, Homo sapiens
cctccgttgctaatggaatgacagctaatggga

SEQ ID NO: 28501 - DNA, 33 bp, Homo sapiens
aggggaactggaagtcacagtttaggcctgaaa

SEQ ID NO: 28502 - DNA, 33 bp, Homo sapiens
caggctggagtgcaataacacagtctcggctca

SEQ ID NO: 28503 - DNA, 33 bp, Homo sapiens
aatcatttggcaagataaaacatttctctgaga

SEQ ID NO: 28504 - DNA, 33 bp, Homo sapiens
agattaaactcacaaagcaataattacatatta

SEQ ID NO: 28505 - DNA, 33 bp, Homo sapiens
cttatatgcttgcaataaaaaaagtgcagaatt

SEQ ID NO: 28506 - DNA, 33 bp, Homo sapiens
tacgagttgtcaaaaacactcagaatggaagta

SEQ ID NO: 28507 - DNA, 33 bp, Homo sapiens
gaggccacgtttttaacccagctctgaaagact

SEQ ID NO: 28508 - DNA, 33 bp, Homo sapiens
tcttccccaagatgacacgtgagatgacacgtg

SEQ ID NO: 28509 - DNA, 33 bp, Homo sapiens
agtcacttcaccagtacgtaaacatgagttata

SEQ ID NO: 28510 - DNA, 33 bp, Homo sapiens
caatccaggtctacaacgtgccagttacaatga

SEQ ID NO: 28511 - DNA, 33 bp, Homo sapiens
gaatgcatattccagaaacttatttttgccaaa

SEQ ID NO: 28512 - DNA, 33 bp, Homo sapiens
gcaaatgctaaaattaagatggtaatgagtggc

SEQ ID NO: 28513 - DNA, 33 bp, Homo sapiens
cagtagaattctattacagagatgtaggtacta

SEQ ID NO: 28514 - DNA, 33 bp, Homo sapiens
agagtttgtcacaaagaaaatgttcaatgttgg

SEQ ID NO: 28515 - DNA, 33 bp, Homo sapiens
ctctccagcttccccccacaaagttccagacct

SEQ ID NO: 28516 - DNA, 33 bp, Homo sapiens
gctttacctctgccacaagtctgggagccataa

SEQ ID NO: 28517 - DNA, 33 bp, Homo sapiens
aaattccccaaacctcacaggataggctcaata

SEQ ID NO: 28518 - DNA, 33 bp, Homo sapiens
tatcaagctgcaaaaccatctacgctcctatgt

SEQ ID NO: 28519 - DNA, 33 bp, Homo sapiens
tcctctcactcttagactcaggaaattattgtc

SEQ ID NO: 28520 - DNA, 33 bp, Homo sapiens
taaaaattgttgacaaagttaaaggtcagcttg

SEQ ID NO: 28521 - DNA, 33 bp, Homo sapiens
ttcagttatcttctaccgcctgtattttctact

SEQ ID NO: 28522 - DNA, 33 bp, Homo sapiens
gagctatgaaaaatgtcacacagtacttggtga

SEQ ID NO: 28523 - DNA, 33 bp, Homo sapiens
agaaaaagaatttagaaaactgctacaagaaaa

SEQ ID NO: 28524 - DNA, 33 bp, Homo sapiens
acattcaacacacagaaagtaagagatcgcaga

SEQ ID NO: 28525 - DNA, 33 bp, Homo sapiens
ggactatgggagaaaccagtactgcaatatgtt

SEQ ID NO: 28526 - DNA, 33 bp, Homo sapiens
agagaaatgcaaactacgtttagagaatgctat

SEQ ID NO: 28527 - DNA, 33 bp, Homo sapiens
tattagccaatgataccctagtggcgtctgcta

SEQ ID NO: 28528 - DNA, 33 bp, Homo sapiens
tgttcaaatagagtgaagttgagtaagttaata

SEQ ID NO: 28529 - DNA, 33 bp, Homo sapiens
tgccattaatatcctacgctataacaccactca

SEQ ID NO: 28530 - DNA, 33 bp, Homo sapiens
tatccttttctttctcaactatgcacaaaagaa

SEQ ID NO: 28531 - DNA, 51 bp, Homo sapiens
gttgacaaagtaatgaatataaagaacagacatatgaaaaagtaacaaatt

SEQ ID NO: 28532 - DNA, 33 bp, Homo sapiens
aaatcctgatgttttcaagcaagaacaagtagc

SEQ ID NO: 28533 - DNA, 51 bp, Homo sapiens
gtaaataaaaatcaaatggcataaacgaagaagtgtgattacatcaaatac

SEQ ID NO: 28534 - DNA, 33 bp, Homo sapiens
tgtttagttgctataaagtttgcaaagctacat

SEQ ID NO: 28535 - DNA, 33 bp, Homo sapiens
aatgagaggataaagacactgtggataaaaaac

SEQ ID NO: 28536 - DNA, 33 bp, Homo sapiens
tcatatttgccaagagaacagtaaaatgataaa

SEQ ID NO: 28537 - DNA, 33 bp, Homo sapiens
tactctgtccaattcaatatgtatgtgttcaac

SEQ ID NO: 28538 - DNA, 33 bp, Homo sapiens
accactgcactcaaacacaggttaacacagtga

SEQ ID NO: 28539 - DNA, 33 bp, Homo sapiens
ttttacagtcctctgaataactatttatagtca

SEQ ID NO: 28540 - DNA, 33 bp, Homo sapiens
ctgggctcatgattcaaaactactctggatttt

SEQ ID NO: 28541 - DNA, 33 bp, Homo sapiens
aagtctcattaaatccaaatctctgggggtgag

SEQ ID NO: 28542 - DNA, 33 bp, Homo sapiens
attgtaagatagaagaaaacactgaacacctga

SEQ ID NO: 28543 - DNA, 33 bp, Homo sapiens
agcccacattcgatacaatgatgtgtgtgaatg

SEQ ID NO: 28544 - DNA, 33 bp, Homo sapiens
caagctacacgtgtgaaaagcagaattgctcct

SEQ ID NO: 28545 - DNA, 33 bp, Homo sapiens
attaaggtctcaagaacgaaataggctggtaca

SEQ ID NO: 28546 - DNA, 33 bp, Homo sapiens
agctgtgtctaaactccgaaagggagagagcat

SEQ ID NO: 28547 - DNA, 33 bp, Homo sapiens
agggatatcgctcatgcaaattatcctgcttct

SEQ ID NO: 28548 - DNA, 33 bp, Homo sapiens
acacaaaggaagcgtacgtaggttatttctgca

SEQ ID NO: 28549 - DNA, 33 bp, Homo sapiens
caaaataaacatttccaaacattctagatcaat

SEQ ID NO: 28550 - DNA, 33 bp, Homo sapiens
gtaggtaaggaggaaagaactgagaaactgagc

SEQ ID NO: 28551 - DNA, 33 bp, Homo sapiens
tagcgatggtaggctacgagcagaaagggagca

SEQ ID NO: 28552 - DNA, 33 bp, Homo sapiens
actgtaaagcctgaacaaaaaaaatgtcagatt

SEQ ID NO: 28553 - DNA, 33 bp, Homo sapiens
agcacccacattttacactgtcaggaaagctca

SEQ ID NO: 28554 - DNA, 33 bp, Homo sapiens
gccatacagaatgacactgaggaatattaaaaa

SEQ ID NO: 28555 - DNA, 33 bp, Homo sapiens
gtgcttacatcacgaccccagaagctatgggta

SEQ ID NO: 28556 - DNA, 33 bp, Homo sapiens
ctcctctatgaagacaacatttaaaaatcaaac

SEQ ID NO: 28557 - DNA, 33 bp, Homo sapiens
tggagagctgcttgaaatatgtgtaaagacccg

SEQ ID NO: 28558 - DNA, 33 bp, Homo sapiens
cttagttcagcctttgcaagaatatgtctcacg

SEQ ID NO: 28559 - DNA, 33 bp, Homo sapiens
agcctgaggactctgaaaaatctaaactttatt

SEQ ID NO: 28560 - DNA, 33 bp, Homo sapiens
caccatacaattcctcccatcgtcatcacataa

SEQ ID NO: 28561 - DNA, 33 bp, Homo sapiens
aggtcaagaaaagcaaagactaaggaattatta

SEQ ID NO: 28562 - DNA, 33 bp, Homo sapiens
agagtaaagaaggttaaatgtgaaagtgagaga

SEQ ID NO: 28563 - DNA, 51 bp, Homo sapiens
tgtccatggaggcctagaacacaaccgatgggaacctcttcacgcttcctg

SEQ ID NO: 28564 - DNA, 33 bp, Homo sapiens
tcattctttgctaccacgagaaggtcccaggta

SEQ ID NO: 28565 - DNA, 33 bp, Homo sapiens
caaactgtaactataggaggtccatcacccaat

SEQ ID NO: 28566 - DNA, 33 bp, Homo sapiens
caggatgactaaaggcaacttcccaccatgctt

SEQ ID NO: 28567 - DNA, 33 bp, Homo sapiens
aaaagaccatgagttcactgaataccaagagct

SEQ ID NO: 28568 - DNA, 33 bp, Homo sapiens
cttactggaaaaatcaatatcagaatcttgcca

SEQ ID NO: 28569 - DNA, 33 bp, Homo sapiens
ggctgctttggaaaaccgagagaacctcagctg

SEQ ID NO: 28570 - DNA, 33 bp, Homo sapiens
tcattcttttctttgacagtcgattgcttcttc

SEQ ID NO: 28571 - DNA, 33 bp, Homo sapiens
ggtgtgcttgactaagaccctgccaatggcgtg

SEQ ID NO: 28572 - DNA, 33 bp, Homo sapiens
gtgctatgagatcagacggaaaacagatgaaca

SEQ ID NO: 28573 - DNA, 33 bp, Homo sapiens
atttaatttcaaccacacattttactaatgaaa

SEQ ID NO: 28574 - DNA, 33 bp, Homo sapiens
catccttctggcaaatcagttgagactattaaa

SEQ ID NO: 28575 - DNA, 33 bp, Homo sapiens
ttagagttaagcagaacgtgattttgaatctag

SEQ ID NO: 28576 - DNA, 33 bp, Homo sapiens
aatgcatcttccctgaacaaaagagagaggagc

SEQ ID NO: 28577 - DNA, 33 bp, Homo sapiens
gatttatagaattaacaacattgagagacacaa

SEQ ID NO: 28578 - DNA, 33 bp, Homo sapiens
tagatcctgtctgaacaaatgcaatgtttcttt

SEQ ID NO: 28579 - DNA, 33 bp, Homo sapiens
ttcccatacatatgcaaacacagaagatttcaa

SEQ ID NO: 28580 - DNA, 33 bp, Homo sapiens
agctggatggtatttacaattcacgtttcttaa

SEQ ID NO: 28581 - DNA, 33 bp, Homo sapiens
aatggcacttaagctaactcaattttcaagttt

SEQ ID NO: 28582 - DNA, 33 bp, Homo sapiens
agcacaccgcatatcaatctttgcagttatttg

SEQ ID NO: 28583 - DNA, 33 bp, Homo sapiens
agcagtattaggcttacgtcaagattgagagga

SEQ ID NO: 28584 - DNA, 33 bp, Homo sapiens
tgcccttcatctccaccgaactactttctggat

SEQ ID NO: 28585 - DNA, 33 bp, Homo sapiens
gatatgcatacggtgacacccactactgcagtg

SEQ ID NO: 28586 - DNA, 33 bp, Homo sapiens
cttcactttgaacttacgaaaggcacctttcta

SEQ ID NO: 28587 - DNA, 33 bp, Homo sapiens
gagagttaaaaggcaaaatacagagcaggagtc

SEQ ID NO: 28588 - DNA, 33 bp, Homo sapiens
cccagcaacctaaacacaaatctgaaggaatgg

SEQ ID NO: 28589 - DNA, 33 bp, Homo sapiens
aagtatgtgcattggaaaccaagaatgtacaaa

SEQ ID NO: 28590 - DNA, 33 bp, Homo sapiens
aaagaaacttcagacaaatctcaggaagctgag

SEQ ID NO: 28591 - DNA, 33 bp, Homo sapiens
ctgtgtggggtctcaacactaacccagaaatac

SEQ ID NO: 28592 - DNA, 33 bp, Homo sapiens
ttgatctaagataagcaaaaaagggttgtgact

SEQ ID NO: 28593 - DNA, 33 bp, Homo sapiens
aaagttgttttcgctcacattcctttcattact

SEQ ID NO: 28594 - DNA, 33 bp, Homo sapiens
tgactagcccagaaaaaagttagaaaatgagta

SEQ ID NO: 28595 - DNA, 33 bp, Homo sapiens
tgaatcctgaacccgggataccattgtgaaaag

SEQ ID NO: 28596 - DNA, 33 bp, Homo sapiens
tatagaggttaattcaacagacaacttatcgtg

SEQ ID NO: 28597 - DNA, 33 bp, Homo sapiens
ccattatggggcagcactgaggattttgagatt

SEQ ID NO: 28598 - DNA, 33 bp, Homo sapiens
aggattttgagattaagtcagacgtgtgcttct

SEQ ID NO: 28599 - DNA, 33 bp, Homo sapiens
cttcagtattgctgatcaagtcacagaaacaat

SEQ ID NO: 28600 - DNA, 33 bp, Homo sapiens
tacagagaatcaacaacgtggagacctacgacc

SEQ ID NO: 28601 - DNA, 33 bp, Homo sapiens
gtacttgatttgattcccctctgtggtttcctt

SEQ ID NO: 28602 - DNA, 33 bp, Homo sapiens
aaaaggagggggttgacctggaaatctgtaatt

SEQ ID NO: 28603 - DNA, 33 bp, Homo sapiens
acctggctctgtcagtaactagctagggaagct

SEQ ID NO: 28604 - DNA, 33 bp, Homo sapiens
ttccttctcttgagaactggaggattcgaggac

SEQ ID NO: 28605 - DNA, 33 bp, Homo sapiens
tctggcctatgaaaaacaatacatggcctgagg

SEQ ID NO: 28606 - DNA, 33 bp, Homo sapiens
tgaaaagaaagtgttccatgccttcctgttaga

SEQ ID NO: 28607 - DNA, 33 bp, Homo sapiens
tataatacctaagtaacacctagattgttcaaa

SEQ ID NO: 28608 - DNA, 33 bp, Homo sapiens
ggtagtcataggagaagagatgatatagatgat

SEQ ID NO: 28609 - DNA, 33 bp, Homo sapiens
ggaggagtgagaaccacgggcccgactcgaaag

SEQ ID NO: 28610 - DNA, 33 bp, Homo sapiens
caggccccaggaacaacggtctccaggctggct

SEQ ID NO: 28611 - DNA, 33 bp, Homo sapiens
tgttgctggtgagggacggttgccaagtaagac

SEQ ID NO: 28612 - DNA, 33 bp, Homo sapiens
cttgctaccatagctcacagaagttatggagaa

SEQ ID NO: 28613 - DNA, 33 bp, Homo sapiens
gagggtcagcaggaaaagtcattgaggaccctg

SEQ ID NO: 28614 - DNA, 33 bp, Homo sapiens
gggccaccaggtcaaaagatgcaaaccccgcac

SEQ ID NO: 28615 - DNA, 51 bp, Homo sapiens
gagtctcacagacacaaccgagtagcggagccaagatttgacccaagtctg

SEQ ID NO: 28616 - DNA, 33 bp, Homo sapiens
attaatattccatctcaacttttcctgtgtaac

SEQ ID NO: 28617 - DNA, 33 bp, Homo sapiens
gagttattctgcaaaagtaccctcaagatacgt

SEQ ID NO: 28618 - DNA, 33 bp, Homo sapiens
gctaaagagagactcaacatgcggttcacggaa

SEQ ID NO: 28619 - DNA, 33 bp, Homo sapiens
ttacggaaatgacctacaaaagtctggtgacca

SEQ ID NO: 28620 - DNA, 33 bp, Homo sapiens
ttgtggttaggtctccaaatgaacctccttacc

SEQ ID NO: 28621 - DNA, 33 bp, Homo sapiens
ggtgctttaaatgataggacaaggatgctttct

SEQ ID NO: 28622 - DNA, 33 bp, Homo sapiens
tctgcctttctccctaccctcatccttctgcac

SEQ ID NO: 28623 - DNA, 33 bp, Homo sapiens
ttctcatggtgcttaccgactgtccagtgggac

SEQ ID NO: 28624 - DNA, 33 bp, Homo sapiens
acagtaagccatcagcagctgagtagtaataca

SEQ ID NO: 28625 - DNA, 33 bp, Homo sapiens
gctgcaagtcctttgagctagtaattctgcttc

SEQ ID NO: 28626 - DNA, 33 bp, Homo sapiens
aaacacatggacacaaaaacatcactaaaagct

SEQ ID NO: 28627 - DNA, 33 bp, Homo sapiens
cccacagcctggggtaaggtaagccctgaaacc

SEQ ID NO: 28628 - DNA, 33 bp, Homo sapiens
ttccgcaaactctggcaaacagtctaaaatgac

SEQ ID NO: 28629 - DNA, 33 bp, Homo sapiens
tacatctggtaagtgacggattaaggtctcaaa

SEQ ID NO: 28630 - DNA, 33 bp, Homo sapiens
gcataagcaggatggcaactgaagggcagaatt

SEQ ID NO: 28631 - DNA, 33 bp, Homo sapiens
cttagcctgatttactcagatggatgttggaga

SEQ ID NO: 28632 - DNA, 33 bp, Homo sapiens
tgggtgctttgtgagaatacagtctctgcagat

SEQ ID NO: 28633 - DNA, 33 bp, Homo sapiens
gtaaagttagaatgaaccatgtgtgacaaaagg

SEQ ID NO: 28634 - DNA, 33 bp, Homo sapiens
acatcattaaggaaaaataaaatgcagtttatc

SEQ ID NO: 28635 - DNA, 51 bp, Homo sapiens
tccatgttgttctccccactgacatgtttcctcactttcttctgtctggaa

SEQ ID NO: 28636 - DNA, 33 bp, Homo sapiens
cagactttctccataaagtagcaatacggctgt

SEQ ID NO: 28637 - DNA, 33 bp, Homo sapiens
ggttgacatctagaagacccctccatctaaaac

SEQ ID NO: 28638 - DNA, 33 bp, Homo sapiens
aatctcatcttcactccatggtcctccaggaat

SEQ ID NO: 28639 - DNA, 33 bp, Homo sapiens
aatctagtaccctaaagacttcattctgcctca

SEQ ID NO: 28640 - DNA, 33 bp, Homo sapiens
cagtggagtgtgtaaacgctcttcagactgtgg

SEQ ID NO: 28641 - DNA, 33 bp, Homo sapiens
tcagatgtttagacccaacctcagcaacagtga

SEQ ID NO: 28642 - DNA, 33 bp, Homo sapiens
gcaggaagttcagaaaacatcaataggtttagg

SEQ ID NO: 28643 - DNA, 33 bp, Homo sapiens
ccactgagtaggaaacaaggatttttccaaagc

SEQ ID NO: 28644 - DNA, 33 bp, Homo sapiens
ttggagtgactacctgccaatataaggagtaga

SEQ ID NO: 28645 - DNA, 33 bp, Homo sapiens
gacctgcaagagcaaaaaactaggcaatctgga

SEQ ID NO: 28646 - DNA, 33 bp, Homo sapiens
gccatttctcatttccaatatgccagagctggg

SEQ ID NO: 28647 - DNA, 33 bp, Homo sapiens
atgccctctagtcggccacttgctggctgtctg

SEQ ID NO: 28648 - DNA, 33 bp, Homo sapiens
agacgttaatcattgacaccaccagcagcaaat

SEQ ID NO: 28649 - DNA, 33 bp, Homo sapiens
cttgaaaaacaataaacgaagcctttggtgctg

SEQ ID NO: 28650 - DNA, 33 bp, Homo sapiens
aaggcagagaaaataacgtgagcaaagacagtg

SEQ ID NO: 28651 - DNA, 33 bp, Homo sapiens
gagcataaggacgaccactggattgaattcgga

SEQ ID NO: 28652 - DNA, 33 bp, Homo sapiens
tccatgtaaatgatgcccctctaccctcaagaa

SEQ ID NO: 28653 - DNA, 33 bp, Homo sapiens
ctgacatttatgaccacatttttgcttttgact

SEQ ID NO: 28654 - DNA, 33 bp, Homo sapiens
agctaaacaaacaaacaagagatccacaggttc

SEQ ID NO: 28655 - DNA, 33 bp, Homo sapiens
caggaaaacaaacctacagtaaatgtgttagca

SEQ ID NO: 28656 - DNA, 33 bp, Homo sapiens
atatattttcaaagtacataaaggagaggactt

SEQ ID NO: 28657 - DNA, 33 bp, Homo sapiens
taagatgtttggagtcaccaagaaacaaagaaa

SEQ ID NO: 28658 - DNA, 33 bp, Homo sapiens
agtaaaaattcaacatgaaagttttggtaacat

SEQ ID NO: 28659 - DNA, 33 bp, Homo sapiens
gtaacttaacaattgagaacataacctgtatgt

SEQ ID NO: 28660 - DNA, 33 bp, Homo sapiens
acttttagccaaggcacattctctgggctctca

SEQ ID NO: 28661 - DNA, 33 bp, Homo sapiens
aggatgattgaattgacgtgaatctggagaaag

SEQ ID NO: 28662 - DNA, 33 bp, Homo sapiens
tacttaaccagttagaagaggtagtgtgaatat

SEQ ID NO: 28663 - DNA, 33 bp, Homo sapiens
atcagagctttgaacagatgatccattggtccc

SEQ ID NO: 28664 - DNA, 33 bp, Homo sapiens
taaatgatgctccttacattgtaaaaagattac

SEQ ID NO: 28665 - DNA, 51 bp, Homo sapiens
ttattcacatattcattcagttgaccaacagttactgaatgcttacgatgt

SEQ ID NO: 28666 - DNA, 33 bp, Homo sapiens
cttctaaatgcctttgcactatcttttgagttg

SEQ ID NO: 28667 - DNA, 33 bp, Homo sapiens
caggaaattccatatactaaataacttgcattt

SEQ ID NO: 28668 - DNA, 33 bp, Homo sapiens
ctacaatgccaccttaaagaaagattccattat

SEQ ID NO: 28669 - DNA, 33 bp, Homo sapiens
tttgagaatctttcagaacagaggtatagcaaa

SEQ ID NO: 28670 - DNA, 33 bp, Homo sapiens
agttgaccatgttgaaatatccaggagccaaat

SEQ ID NO: 28671 - DNA, 33 bp, Homo sapiens
gtaaattcagttatcacgtggcaacttaaaata

SEQ ID NO: 28672 - DNA, 33 bp, Homo sapiens
agtggtttattacttaccgataggcagcaaagg

SEQ ID NO: 28673 - DNA, 33 bp, Homo sapiens
ccttttctgatatttaccacggctttcttttgg

SEQ ID NO: 28674 - DNA, 33 bp, Homo sapiens
attttgatttctcaccaaatacaacctcttgtc

SEQ ID NO: 28675 - DNA, 33 bp, Homo sapiens
ccttgccaaaaagccacattaatcttagacctt

SEQ ID NO: 28676 - DNA, 33 bp, Homo sapiens
atctctgtatagatgacgtagttttctgaatgc

SEQ ID NO: 28677 - DNA, 33 bp, Homo sapiens
tgtatgtggcatgaaagagaggtccaactttat

SEQ ID NO: 28678 - DNA, 33 bp, Homo sapiens
aggcccatgaagccacactaaaaatagtaacaa

SEQ ID NO: 28679 - DNA, 33 bp, Homo sapiens
tgatctttattgcaaaaggcactcactctatca

SEQ ID NO: 28680 - DNA, 33 bp, Homo sapiens
tgtttctcatctcttgaaattctgggtctttca

SEQ ID NO: 28681 - DNA, 33 bp, Homo sapiens
gcttggtgtaccctcaaacagctcctgagcatc

SEQ ID NO: 28682 - DNA, 33 bp, Homo sapiens
ctgcgtatctttttagaatggaacagaattctt

SEQ ID NO: 28683 - DNA, 33 bp, Homo sapiens
ttttctatgaagctaacattttccagtttatat

SEQ ID NO: 28684 - DNA, 51 bp, Homo sapiens
atgccaagtcaattctttctaggtcaggtccaaacaatactatggagtgcc

SEQ ID NO: 28685 - DNA, 51 bp, Homo sapiens
atgtgtttacatacatttagttgaaatctagcaacatatctaagaactagt

SEQ ID NO: 28686 - DNA, 51 bp, Homo sapiens
gagcatatatcagcaaataaacaaacagtatgtcaggtgataataagtgct

SEQ ID NO: 28687 - DNA, 33 bp, Homo sapiens
gaaaactagattaaaaatgccatgaggatttag

SEQ ID NO: 28688 - DNA, 33 bp, Homo sapiens
aatacattactcacaaattacagaaagcatcta

SEQ ID NO: 28689 - DNA, 33 bp, Homo sapiens
cgtgaacgattcaataaaattttgaggatgtag

SEQ ID NO: 28690 - DNA, 33 bp, Homo sapiens
ttcccagttctatgcacactataattatgtata

SEQ ID NO: 28691 - DNA, 33 bp, Homo sapiens
tcccgtgtgatatagtaaacgttgaataacacc

SEQ ID NO: 28692 - DNA, 33 bp, Homo sapiens
tccagctgaggatacccgagaatcttcacgaac

SEQ ID NO: 28693 - DNA, 33 bp, Homo sapiens
tgcatcaaagaagctcaacactgaagagtatac

SEQ ID NO: 28694 - DNA, 33 bp, Homo sapiens
caatgtatccaaaatacgggtctatctgtgctt

SEQ ID NO: 28695 - DNA, 33 bp, Homo sapiens
atgataagaataaggaggaaacacacatacctt

SEQ ID NO: 28696 - DNA, 33 bp, Homo sapiens
caggagaaatgttggcaattcaaggctcttctg

SEQ ID NO: 28697 - DNA, 33 bp, Homo sapiens
gccagaataaagtcagcttgtgaggtaaaaaga

SEQ ID NO: 28698 - DNA, 33 bp, Homo sapiens
tatttccacagttagcgctgctctgatttggga

SEQ ID NO: 28699 - DNA, 33 bp, Homo sapiens
tgcttttctcctaaatgagcattcaccatgatg

SEQ ID NO: 28700 - DNA, 33 bp, Homo sapiens
ttccacatttttaacagtaagcccattttatgc

SEQ ID NO: 28701 - DNA, 33 bp, Homo sapiens
attactgacaaatcgacacgtgctgctataaga

SEQ ID NO: 28702 - DNA, 33 bp, Homo sapiens
gcattgtcttagaaacaggaaatcgctggtgca

SEQ ID NO: 28703 - DNA, 33 bp, Homo sapiens
tcctgatggcaggtcaagttcttactcctccag

SEQ ID NO: 28704 - DNA, 33 bp, Homo sapiens
ccaggggtgaccaccacggattccttcctcaga

SEQ ID NO: 28705 - DNA, 33 bp, Homo sapiens
ttctcccaagagactaagttctgtagaggcaga

SEQ ID NO: 28706 - DNA, 33 bp, Homo sapiens
ttgctctgcataaagacagtagctatatacagt

SEQ ID NO: 28707 - DNA, 51 bp, Homo sapiens
cacaacgtaacaggatgtgaattaccctctaagtaccattctatatggcat

SEQ ID NO: 28708 - DNA, 33 bp, Homo sapiens
tgtgtgtaattttacacgagtggattgctatca

SEQ ID NO: 28709 - DNA, 33 bp, Homo sapiens
tccccatgtacggagacgaaagatagtaagaaa

SEQ ID NO: 28710 - DNA, 33 bp, Homo sapiens
ctatgatgcgtctgctaagaagtgaacatgtgc

SEQ ID NO: 28711 - DNA, 33 bp, Homo sapiens
ggtcaaatgaggattcaaatttgtcaactttta

SEQ ID NO: 28712 - DNA, 33 bp, Homo sapiens
tcaaggagaacgttgacgggatgagtagaggaa

SEQ ID NO: 28713 - DNA, 33 bp, Homo sapiens
tttttctacctgctcaagtagtacaatccctgc

SEQ ID NO: 28714 - DNA, 33 bp, Homo sapiens
tcccatcctcatccctaaatagaagtggtagcc

SEQ ID NO: 28715 - DNA, 33 bp, Homo sapiens
ttactgtgcaccagaacgtactccttctgtcta

SEQ ID NO: 28716 - DNA, 33 bp, Homo sapiens
tcctatttactcaatgcaaatttttcaagataa

SEQ ID NO: 28717 - DNA, 33 bp, Homo sapiens
ctgctcttcaggatgacgcctggtgtgacttga

SEQ ID NO: 28718 - DNA, 33 bp, Homo sapiens
gagtccatgtgtgtgaagtagtcaagatcgtag

SEQ ID NO: 28719 - DNA, 33 bp, Homo sapiens
atcatagcccactgtacggagacacacattgtg

SEQ ID NO: 28720 - DNA, 33 bp, Homo sapiens
ggagcagcaaatggaacgtagttcgaagggacg

SEQ ID NO: 28721 - DNA, 33 bp, Homo sapiens
gacaccagcacttgaacgctctgcggagatttt

SEQ ID NO: 28722 - DNA, 33 bp, Homo sapiens
tctcgccctgtcttcacgacatcttctcagacc

SEQ ID NO: 28723 - DNA, 33 bp, Homo sapiens
gtcacagcagccatacagaatgaagatgcccct

SEQ ID NO: 28724 - DNA, 33 bp, Homo sapiens
tctcacggccccttccaaaagctaggtggcagc

SEQ ID NO: 28725 - DNA, 33 bp, Homo sapiens
gtttctcatccaagagcaggcgagcatgcaagg

SEQ ID NO: 28726 - DNA, 33 bp, Homo sapiens
aattgcaccgtaacaactaaaatatccttaatc

SEQ ID NO: 28727 - DNA, 33 bp, Homo sapiens
atgtgctggtgggcagaaaggactgaacccagt

SEQ ID NO: 28728 - DNA, 33 bp, Homo sapiens
agccctcattgtgggccctcacgtcactccagg

SEQ ID NO: 28729 - DNA, 33 bp, Homo sapiens
tggtggaaatggtcaaattctgtcatcagaaaa

SEQ ID NO: 28730 - DNA, 33 bp, Homo sapiens
gaaaaatgcagacaaaccctattaaccgctcct

SEQ ID NO: 28731 - DNA, 33 bp, Homo sapiens
tgttctatggactgatgaccaatgagagttgtt

SEQ ID NO: 28732 - DNA, 33 bp, Homo sapiens
ttctgcagtgagggacaagcattagcaaaggcc

SEQ ID NO: 28733 - DNA, 33 bp, Homo sapiens
tgcccctgataccagaacatgtgagaaatattg

SEQ ID NO: 28734 - DNA, 33 bp, Homo sapiens
taggctgacaccttcaacacggactggtgccag

SEQ ID NO: 28735 - DNA, 33 bp, Homo sapiens
cataaaaatgggcctaataatgtctatcttgca

SEQ ID NO: 28736 - DNA, 33 bp, Homo sapiens
cttggtagcacaagggccaatctgctccaacac

SEQ ID NO: 28737 - DNA, 33 bp, Homo sapiens
tgcgattgtttttgataaaggcagcaaggacat

SEQ ID NO: 28738 - DNA, 33 bp, Homo sapiens
atggcctctgacttgacaccttctctttgttca

SEQ ID NO: 28739 - DNA, 33 bp, Homo sapiens
ctgctcgtgtgcaggcgctattgtcccatcaga

SEQ ID NO: 28740 - DNA, 33 bp, Homo sapiens
ttaatagaggtcttaccaggatacagtaaatga

SEQ ID NO: 28741 - DNA, 33 bp, Homo sapiens
gcaattgtaaatacgacggtaaagccagccctc

SEQ ID NO: 28742 - DNA, 33 bp, Homo sapiens
tggttcagaatgtggactaagacatggagtgcc

SEQ ID NO: 28743 - DNA, 33 bp, Homo sapiens
ggtcaaaggcgctacaagaaatattaaaataat

SEQ ID NO: 28744 - DNA, 33 bp, Homo sapiens
acttggtttgcagaaacgaatcatgattttgcc

SEQ ID NO: 28745 - DNA, 33 bp, Homo sapiens
ctggttccaccattgcactcaacagaaggaaac

SEQ ID NO: 28746 - DNA, 33 bp, Homo sapiens
tgtaacaagatgaagaaaagttcatgctcttgg

SEQ ID NO: 28747 - DNA, 33 bp, Homo sapiens
attttatataagtggactcatctggtgcatatt

SEQ ID NO: 28748 - DNA, 33 bp, Homo sapiens
gaaatgtgaaaggaacaaaaaggtggccatgtg

SEQ ID NO: 28749 - DNA, 33 bp, Homo sapiens
cctctaatgcatccccactctgaaggggagact

SEQ ID NO: 28750 - DNA, 33 bp, Homo sapiens
gcttgacacactgtataataaatccccgttttt

SEQ ID NO: 28751 - DNA, 33 bp, Homo sapiens
aatcctgtttctactgaaaggcttgacacactg

SEQ ID NO: 28752 - DNA, 33 bp, Homo sapiens
ttcttcctgatgcaataaaagttgtttgaaatt

SEQ ID NO: 28753 - DNA, 33 bp, Homo sapiens
tggcactggccctggaatatcttcagaggtacc

SEQ ID NO: 28754 - DNA, 33 bp, Homo sapiens
tcactttcaatttccacgaggagggtgcattag

SEQ ID NO: 28755 - DNA, 33 bp, Homo sapiens
ggtctgtgccatctgcaaagtgctttgacattt

SEQ ID NO: 28756 - DNA, 33 bp, Homo sapiens
ggatacgtctcacagagtatatattgcatgtca

SEQ ID NO: 28757 - DNA, 33 bp, Homo sapiens
gcctgactgctgaggacggccgagattttcagg

SEQ ID NO: 28758 - DNA, 33 bp, Homo sapiens
aaccgtcagtgaaatacctaagtcgaaggaact

SEQ ID NO: 28759 - DNA, 33 bp, Homo sapiens
gaactccctgcggtccaatgatgcacccagaca

SEQ ID NO: 28760 - DNA, 33 bp, Homo sapiens
cagaaaaggtttgcccaaaagaggtgtggccca

SEQ ID NO: 28761 - DNA, 33 bp, Homo sapiens
ttactgttgaggccaaagaattttaactcctaa

SEQ ID NO: 28762 - DNA, 33 bp, Homo sapiens
acgagagtccagttagaaggtatgtgttaccca

SEQ ID NO: 28763 - DNA, 33 bp, Homo sapiens
ctgggatttcgagtgcaagttggtttcaggtcc

SEQ ID NO: 28764 - DNA, 33 bp, Homo sapiens
tgggaggttgttttgcgatgagcatggctgtca

SEQ ID NO: 28765 - DNA, 33 bp, Homo sapiens
tgggtggctaagcctagcaacagacttcctcca

SEQ ID NO: 28766 - DNA, 33 bp, Homo sapiens
tgggttttaagagttacagagacattttgctaa

SEQ ID NO: 28767 - DNA, 33 bp, Homo sapiens
cagggggctcaaccacaccatccaaaagcacat

SEQ ID NO: 28768 - DNA, 33 bp, Homo sapiens
gggaaaggcccagacactgaggctcagctgagc

SEQ ID NO: 28769 - DNA, 33 bp, Homo sapiens
gtgatttataaagtaaaccttctgctgcctctg

SEQ ID NO: 28770 - DNA, 33 bp, Homo sapiens
cactcagcacactcaaccctgggcaatctctct

SEQ ID NO: 28771 - DNA, 33 bp, Homo sapiens
tggatgactgaatggcagacagcaacttctacc

SEQ ID NO: 28772 - DNA, 33 bp, Homo sapiens
tggtttccctggcaaccagctctcatcctactc

SEQ ID NO: 28773 - DNA, 33 bp, Homo sapiens
cgcattctgtctgtgacaccgttactcccatgg

SEQ ID NO: 28774 - DNA, 33 bp, Homo sapiens
caatcccttgaacagtaacgaagcacctaccat

SEQ ID NO: 28775 - DNA, 33 bp, Homo sapiens
acattctcagaaatacaacttacctaaacagac

SEQ ID NO: 28776 - DNA, 33 bp, Homo sapiens
taccacccactgctccacaaccttccaaaaccc

SEQ ID NO: 28777 - DNA, 33 bp, Homo sapiens
ctggtgggaatgacagaaaatcaggaggccagg

SEQ ID NO: 28778 - DNA, 33 bp, Homo sapiens
aggtcacactggatgacgtaaactaaaaattaa

SEQ ID NO: 28779 - DNA, 33 bp, Homo sapiens
agccccccaagtcctccagttgcctgtgaagga

SEQ ID NO: 28780 - DNA, 33 bp, Homo sapiens
tcggctaaaccaacctaagcaagcgtgggaagg

SEQ ID NO: 28781 - DNA, 33 bp, Homo sapiens
tcaggagattctaggcaccaaaagtggatgtgt

SEQ ID NO: 28782 - DNA, 33 bp, Homo sapiens
aggccctctccaatcagctcacttgaccttgtg

SEQ ID NO: 28783 - DNA, 33 bp, Homo sapiens
cagaccagacccccacagcaccacaggatgccc

SEQ ID NO: 28784 - DNA, 33 bp, Homo sapiens
aaaccaccaagtatggaagagatcagttatgac

SEQ ID NO: 28785 - DNA, 33 bp, Homo sapiens
aggcagcatgttcttaacaacagtccttgccct

SEQ ID NO: 28786 - DNA, 33 bp, Homo sapiens
tttgctgtgtggaagccctttagtttagatccc

SEQ ID NO: 28787 - DNA, 33 bp, Homo sapiens
actagaaagcatttgagatcatccgtcttccac

SEQ ID NO: 28788 - DNA, 33 bp, Homo sapiens
atagacagtccagatcaccctaatcggtggggt

SEQ ID NO: 28789 - DNA, 33 bp, Homo sapiens
cttctgtagtttgctcacaggtaacatcttgag

SEQ ID NO: 28790 - DNA, 33 bp, Homo sapiens
catcacaccctgatgacgctctatgctggatca

SEQ ID NO: 28791 - DNA, 33 bp, Homo sapiens
tgttcagatggcttgacgaaaatttcaggagca

SEQ ID NO: 28792 - DNA, 33 bp, Homo sapiens
aggtgctaacacaatacatgactaatgatgagg

SEQ ID NO: 28793 - DNA, 33 bp, Homo sapiens
ggaacttatccaaactaacctgatcagaattac

SEQ ID NO: 28794 - DNA, 33 bp, Homo sapiens
tttcactgactatgtacatgccaggcctagtct

SEQ ID NO: 28795 - DNA, 33 bp, Homo sapiens
tacctggactattgcactagccttctaataata

SEQ ID NO: 28796 - DNA, 33 bp, Homo sapiens
tctagcagaagagtgacggaaaggagtctaata

SEQ ID NO: 28797 - DNA, 33 bp, Homo sapiens
ttagttcaccaggaggaaataatagtttgaaaa

SEQ ID NO: 28798 - DNA, 33 bp, Homo sapiens
gttggtctctgttgaacatggcttctcaccaag

SEQ ID NO: 28799 - DNA, 33 bp, Homo sapiens
caaaacattttaataacaggagggatgtcacgg

SEQ ID NO: 28800 - DNA, 33 bp, Homo sapiens
ataataataatgctaacaatgatgataatagcc

SEQ ID NO: 28801 - DNA, 33 bp, Homo sapiens
taaacagaggttctgacgagttaaataacttgt

SEQ ID NO: 28802 - DNA, 33 bp, Homo sapiens
gattatcacactcatgaatctgtttgttggcaa

SEQ ID NO: 28803 - DNA, 33 bp, Homo sapiens
caacaaaagaggctcaatctcaggccagctgca

SEQ ID NO: 28804 - DNA, 33 bp, Homo sapiens
taaatagagtaactgacgctttttccaacattt

SEQ ID NO: 28805 - DNA, 51 bp, Homo sapiens
accagtgtttggagaacctgatccacgatgatagtttataacagaatagta

SEQ ID NO: 28806 - DNA, 33 bp, Homo sapiens
ctgtcagtgatccttaacaggtaagacaaattc

SEQ ID NO: 28807 - DNA, 33 bp, Homo sapiens
tttatctgggaacaaacggtggtcctgaggtca

SEQ ID NO: 28808 - DNA, 33 bp, Homo sapiens
gttttagctgatttataagaccccattccctca

SEQ ID NO: 28809 - DNA, 33 bp, Homo sapiens
aaatggtagaattatcaaaatgtggtgcctact

SEQ ID NO: 28810 - DNA, 33 bp, Homo sapiens
tatatcagttggattgaacttgcattcagtgat

SEQ ID NO: 28811 - DNA, 33 bp, Homo sapiens
tataaattgggagaaagtaagagtgacatctat

SEQ ID NO: 28812 - DNA, 33 bp, Homo sapiens
gaacaagatatctgcaagttttctgttcctgag

SEQ ID NO: 28813 - DNA, 33 bp, Homo sapiens
cttagagatcttcaagcaacatttagagggaaa

SEQ ID NO: 28814 - DNA, 33 bp, Homo sapiens
tggatgtgaacagtctcaagtcagttagggccg

SEQ ID NO: 28815 - DNA, 33 bp, Homo sapiens
cattcatccataaaaaactcatacacaaatatt

SEQ ID NO: 28816 - DNA, 33 bp, Homo sapiens
tgtcagccactatcacaggaacttgaagcataa

SEQ ID NO: 28817 - DNA, 33 bp, Homo sapiens
tgaacaagaagtcactaaagagtagtcaggaaa

SEQ ID NO: 28818 - DNA, 33 bp, Homo sapiens
ttccttaacaatcatcactttaccaaaggctat

SEQ ID NO: 28819 - DNA, 33 bp, Homo sapiens
cattgaagctggaggtaaaaatagctttttgtt

SEQ ID NO: 28820 - DNA, 33 bp, Homo sapiens
gcatgttcctctgtccactgggtttcctgccaa

SEQ ID NO: 28821 - DNA, 33 bp, Homo sapiens
aaggaactaatttcagaaactaccagtctctga

SEQ ID NO: 28822 - DNA, 33 bp, Homo sapiens
taccgctcttccaaagaaaatctctgtccacaa

SEQ ID NO: 28823 - DNA, 33 bp, Homo sapiens
cgtagggttcgcattacaaatgtctatggatct

SEQ ID NO: 28824 - DNA, 33 bp, Homo sapiens
ttttgctaattacagagggtggttaataacaac

SEQ ID NO: 28825 - DNA, 33 bp, Homo sapiens
catttaatttcaaaacaggtgattcattaagat

SEQ ID NO: 28826 - DNA, 51 bp, Homo sapiens
tatgcaatgcagaattcctggaactcaaagaaatggtagctaggaataatc

SEQ ID NO: 28827 - DNA, 33 bp, Homo sapiens
tttgtagcagagatgtaaagatttagagatatt

SEQ ID NO: 28828 - DNA, 33 bp, Homo sapiens
aatagtctaagatcaacggtttgagccagactg

SEQ ID NO: 28829 - DNA, 33 bp, Homo sapiens
aattcaaatgtggatacacctaaacctaaacct

SEQ ID NO: 28830 - DNA, 33 bp, Homo sapiens
ctagtacgtgttgaaactggaattcaaatgtgg

SEQ ID NO: 28831 - DNA, 33 bp, Homo sapiens
gaattaacagagacaacgggtgactaacatgtc

SEQ ID NO: 28832 - DNA, 33 bp, Homo sapiens
ctaccagacttccatcaaaacaccttagaattt

SEQ ID NO: 28833 - DNA, 33 bp, Homo sapiens
ttacattacataaaaccgtctgctagcagaccc

SEQ ID NO: 28834 - DNA, 33 bp, Homo sapiens
ttttcaaagagtaaggaaacatggttaggccta

SEQ ID NO: 28835 - DNA, 33 bp, Homo sapiens
gacaaacaatatggcaagatttctccgactcaa

SEQ ID NO: 28836 - DNA, 33 bp, Homo sapiens
ccttttgtcatcttgacctggcttagctctcca

SEQ ID NO: 28837 - DNA, 33 bp, Homo sapiens
ggaggcctcaatgaaaaccactgccctatggga

SEQ ID NO: 28838 - DNA, 33 bp, Homo sapiens
agactgcattatttctcacctgatcttcagcct

SEQ ID NO: 28839 - DNA, 33 bp, Homo sapiens
agattataggctttcaccactaggaattgtcgg

SEQ ID NO: 28840 - DNA, 51 bp, Homo sapiens
gatgggatggaacatatttaatgaaacagaatagttgttgtctttattggt

SEQ ID NO: 28841 - DNA, 33 bp, Homo sapiens
tttatttgctataaaaatgacaagaattatgat

SEQ ID NO: 28842 - DNA, 51 bp, Homo sapiens
agggatgggagtagaggtggcaatacagaagtagcccaagggagatctctg

SEQ ID NO: 28843 - DNA, 33 bp, Homo sapiens
tggatataaaaagctccaggaataaatgctcgg

SEQ ID NO: 28844 - DNA, 33 bp, Homo sapiens
acattcttttaaacaccgccttagaggttgccc

SEQ ID NO: 28845 - DNA, 33 bp, Homo sapiens
cttagaagaagagcaaagccctctaatttaaat

SEQ ID NO: 28846 - DNA, 33 bp, Homo sapiens
ttggctagactcaacacggaaacatttttaaaa

SEQ ID NO: 28847 - DNA, 51 bp, Homo sapiens
aaacaccatcatgtcaggggttaacacttcaacacagaaatgtcaggggac

SEQ ID NO: 28848 - DNA, 33 bp, Homo sapiens
gtgcatcttatccctgcatctgtttcaacatca

SEQ ID NO: 28849 - DNA, 33 bp, Homo sapiens
tttagagcttcagccaatatcttgctcctgagt

SEQ ID NO: 28850 - DNA, 33 bp, Homo sapiens
aagtaaggaaaccgtaaggctggaggctgccat

SEQ ID NO: 28851 - DNA, 33 bp, Homo sapiens
ccacagaagtatctcaaccattactgttaatgc

SEQ ID NO: 28852 - DNA, 33 bp, Homo sapiens
ttatcatagggttagaactgatgatcacagggg

SEQ ID NO: 28853 - DNA, 33 bp, Homo sapiens
tccaaaatggctaggaaacagtagtgataggtt

SEQ ID NO: 28854 - DNA, 33 bp, Homo sapiens
tcctctgtggacccagaaaggaaagaaaaacca

SEQ ID NO: 28855 - DNA, 33 bp, Homo sapiens
ctaggccagaggacacagggcaaccacacagga

SEQ ID NO: 28856 - DNA, 33 bp, Homo sapiens
catctaaggaggacagacactctgcaagctact

SEQ ID NO: 28857 - DNA, 33 bp, Homo sapiens
caaatgactcaatagacgctgtgaaacaagcta

SEQ ID NO: 28858 - DNA, 33 bp, Homo sapiens
aatagaaaatgctaacacaaataatccttcagc

SEQ ID NO: 28859 - DNA, 33 bp, Homo sapiens
gaatacttggagaaatcacaagggaaaagaaaa

SEQ ID NO: 28860 - DNA, 33 bp, Homo sapiens
actgtaaactggtgaccagaaggatagatcaca

SEQ ID NO: 28861 - DNA, 33 bp, Homo sapiens
tgtgtgtacaaaaaaaattcggttcgcagatta

SEQ ID NO: 28862 - DNA, 33 bp, Homo sapiens
gccagaactcgggggagcgtgcaaatatggggt

SEQ ID NO: 28863 - DNA, 33 bp, Homo sapiens
tgttagtttttcttgaatagcaccatctttaat

SEQ ID NO: 28864 - DNA, 33 bp, Homo sapiens
aatcaggtgtgtaaaagagcacaacgtgtttag

SEQ ID NO: 28865 - DNA, 33 bp, Homo sapiens
cagacacatttcaagacaagacacacatgtggc

SEQ ID NO: 28866 - DNA, 33 bp, Homo sapiens
tcttaattaaacactccatttgaagtgcagaga

SEQ ID NO: 28867 - DNA, 33 bp, Homo sapiens
actgatgatttatgccagagaaagactgtgaat

SEQ ID NO: 28868 - DNA, 33 bp, Homo sapiens
cactgacggcaaaatgaaagttaatttaagagt

SEQ ID NO: 28869 - DNA, 33 bp, Homo sapiens
tagatacatggagagaacggtacccagaaaaga

SEQ ID NO: 28870 - DNA, 33 bp, Homo sapiens
taaagcattcacttacaagtacagtcatgcacc

SEQ ID NO: 28871 - DNA, 33 bp, Homo sapiens
aggataaacatggggaaaaaatagttccacatt

SEQ ID NO: 28872 - DNA, 33 bp, Homo sapiens
ccaccagaagctgaacagatacctgaaccatgc

SEQ ID NO: 28873 - DNA, 33 bp, Homo sapiens
attattctaggttgtaagacctacttcaggaag

SEQ ID NO: 28874 - DNA, 33 bp, Homo sapiens
ttactgagataaatcaactttgaccttcattaa

SEQ ID NO: 28875 - DNA, 33 bp, Homo sapiens
tctagtctctgagacaaggcaaaaagtagaggc

SEQ ID NO: 28876 - DNA, 33 bp, Homo sapiens
ccgtgtcattcatcccacttcatctcaggacat

SEQ ID NO: 28877 - DNA, 33 bp, Homo sapiens
aagttcgtttgagaaaacatccaagtcatagaa

SEQ ID NO: 28878 - DNA, 33 bp, Homo sapiens
tgagcaccagtttgcacatgttccaagtgtgag

SEQ ID NO: 28879 - DNA, 33 bp, Homo sapiens
acgcatagactttagcaaaggagagctgaagga

SEQ ID NO: 28880 - DNA, 33 bp, Homo sapiens
gtttgcagtttaataacacagtacaatttaata

SEQ ID NO: 28881 - DNA, 33 bp, Homo sapiens
agagatattgatattacgattgtcactgagatc

SEQ ID NO: 28882 - DNA, 51 bp, Homo sapiens
accaggcatggtagcctttagacagaacatcttattttcactctcttgaac

SEQ ID NO: 28883 - DNA, 33 bp, Homo sapiens
atataatgcagaggaaaaggactgagtcaatgt

SEQ ID NO: 28884 - DNA, 33 bp, Homo sapiens
agaactgaagagttacaatgaacctaggaaagt

SEQ ID NO: 28885 - DNA, 33 bp, Homo sapiens
cagataagtaccagaaagtagcataatacacta

SEQ ID NO: 28886 - DNA, 33 bp, Homo sapiens
caaactcaagtctgacactagatttctttctct

SEQ ID NO: 28887 - DNA, 33 bp, Homo sapiens
ggacagtggatgttatcagaatgaagtgagatg

SEQ ID NO: 28888 - DNA, 33 bp, Homo sapiens
ggagcttatccagctacacagttgtcagttttg

SEQ ID NO: 28889 - DNA, 33 bp, Homo sapiens
acatctttaaaatgtgaagtagtgatcaagagt

SEQ ID NO: 28890 - DNA, 33 bp, Homo sapiens
gaaaaaaatcgttaataatacatctggatacac

SEQ ID NO: 28891 - DNA, 33 bp, Homo sapiens
gtgcttgggttcactacagcctaaatgtgaagt

SEQ ID NO: 28892 - DNA, 33 bp, Homo sapiens
cacctgagtttcaagaaattaatggaaaaaccc

SEQ ID NO: 28893 - DNA, 51 bp, Homo sapiens
ctttcccttgtatatagtactactaataacaagtcctaactaatcagaagt

SEQ ID NO: 28894 - DNA, 33 bp, Homo sapiens
aaatgtatgttgcttacggtacatcaattctac

SEQ ID NO: 28895 - DNA, 33 bp, Homo sapiens
gttgtgcctatattaacggatgccttttctttt

SEQ ID NO: 28896 - DNA, 33 bp, Homo sapiens
attagggggtgatggtaacaatgaaaggaagga

SEQ ID NO: 28897 - DNA, 33 bp, Homo sapiens
ttggctctgccctcaacgatcaactgtgaaata

SEQ ID NO: 28898 - DNA, 33 bp, Homo sapiens
ttatattaaactgccaacttaggtaggacacca

SEQ ID NO: 28899 - DNA, 33 bp, Homo sapiens
gagtccaggctggtcaaatagcttcccagctgg

SEQ ID NO: 28900 - DNA, 33 bp, Homo sapiens
gacagttctaggaagaaaaaccatgcctcaggg

SEQ ID NO: 28901 - DNA, 33 bp, Homo sapiens
agggttgtttgttaaccgtatcagaacctaatc

SEQ ID NO: 28902 - DNA, 33 bp, Homo sapiens
catgactggcagagccaaacgagggaggacgac

SEQ ID NO: 28903 - DNA, 33 bp, Homo sapiens
ctaataccaccttctacgactgagctgtagtga

SEQ ID NO: 28904 - DNA, 33 bp, Homo sapiens
ctaggaagattaaggccgatgaataaaagaaag

SEQ ID NO: 28905 - DNA, 33 bp, Homo sapiens
tttgttatctggagaactatttgagacggttta

SEQ ID NO: 28906 - DNA, 51 bp, Homo sapiens
accccatttcctgatctaccaagcactctagtggatgagacaaagatggtt

SEQ ID NO: 28907 - DNA, 33 bp, Homo sapiens
ttgctgcaaggcataactgaggtaacatatgga

SEQ ID NO: 28908 - DNA, 33 bp, Homo sapiens
tcagctgtttatggcaacttgagtcacagacac

SEQ ID NO: 28909 - DNA, 33 bp, Homo sapiens
gtcagaattttttccccgagcatctgaacatcc

SEQ ID NO: 28910 - DNA, 33 bp, Homo sapiens
ttaaggttcatcctgaaaaagagacttataaat

SEQ ID NO: 28911 - DNA, 33 bp, Homo sapiens
catttttaaattacccaagttgatctgtgtctg

SEQ ID NO: 28912 - DNA, 33 bp, Homo sapiens
ttttaactttaaacaccgagcaatgtaaattca

SEQ ID NO: 28913 - DNA, 33 bp, Homo sapiens
gtatacagaaggagcaggagttccacttagggc

SEQ ID NO: 28914 - DNA, 33 bp, Homo sapiens
gcttcaggacgttggaaaagcatgaaaaagaat

SEQ ID NO: 28915 - DNA, 33 bp, Homo sapiens
gcttcaaacctgcatcggagggcagtatccgag

SEQ ID NO: 28916 - DNA, 33 bp, Homo sapiens
tcccctgagatctgaccggcctatggcttgttt

SEQ ID NO: 28917 - DNA, 33 bp, Homo sapiens
taggacaagttgatcaccttattcccaggactc

SEQ ID NO: 28918 - DNA, 33 bp, Homo sapiens
gctgtttggacttccactaaattggggcaattt

SEQ ID NO: 28919 - DNA, 33 bp, Homo sapiens
ttttccagcaaactaactgaacccaaaaggagg

SEQ ID NO: 28920 - DNA, 33 bp, Homo sapiens
ccaataataccaactccgagattagaagttaaa

SEQ ID NO: 28921 - DNA, 33 bp, Homo sapiens
gcctcacattgaaagacctacctgaacaaaact

SEQ ID NO: 28922 - DNA, 33 bp, Homo sapiens
gatcaaaaagctgttaaaattacttcagcctag

SEQ ID NO: 28923 - DNA, 33 bp, Homo sapiens
cctgggctgagtcacacgtctagtggttggctc

SEQ ID NO: 28924 - DNA, 33 bp, Homo sapiens
tcagcctgttaggacactatgtttttcaagatt

SEQ ID NO: 28925 - DNA, 33 bp, Homo sapiens
aattaggttatgcaaaatcaagcaatcaaccac

SEQ ID NO: 28926 - DNA, 51 bp, Homo sapiens
aaactgtgaaatatctatcatcctagaagaactggcatcacattctgacat

SEQ ID NO: 28927 - DNA, 33 bp, Homo sapiens
cacgtctttgagacacaccctaacacttactct

SEQ ID NO: 28928 - DNA, 33 bp, Homo sapiens
catttgttactgctatgactgcaatgaagtcgg

SEQ ID NO: 28929 - DNA, 33 bp, Homo sapiens
cagcaatgctgaataaactaagccggttgcaag

SEQ ID NO: 28930 - DNA, 33 bp, Homo sapiens
actgcttatcatcttaaatagcagaggagctga

SEQ ID NO: 28931 - DNA, 33 bp, Homo sapiens
attttgagggaggatacgtggtcctagtgtgtg

SEQ ID NO: 28932 - DNA, 33 bp, Homo sapiens
atgttagtgactggaacagatgagcatctcctt

SEQ ID NO: 28933 - DNA, 33 bp, Homo sapiens
ggaaaggcagtggtgacagattttcagatttgt

SEQ ID NO: 28934 - DNA, 33 bp, Homo sapiens
tactatgtgtaacctcaagttcggaaggtctga

SEQ ID NO: 28935 - DNA, 51 bp, Homo sapiens
tagatttcaaactcagttctattcactactaaagtccatactttcacattc

SEQ ID NO: 28936 - DNA, 33 bp, Homo sapiens
tttgagccatttaacccctctgtgactcaggtt

SEQ ID NO: 28937 - DNA, 33 bp, Homo sapiens
tccatttcacttctaactctctttggtttccaa

SEQ ID NO: 28938 - DNA, 51 bp, Homo sapiens
tagcccaggaaggatgaaagctatacgtggaggatctattctgaagccaga

SEQ ID NO: 28939 - DNA, 33 bp, Homo sapiens
cttgcattctgtcttcaaccctttttatttaca

SEQ ID NO: 28940 - DNA, 33 bp, Homo sapiens
ggtggtacatttcttccatttgcctctcccaat

SEQ ID NO: 28941 - DNA, 51 bp, Homo sapiens
ttctagaatgaccatactgaaatggaaaattcagagatttgagattatact

SEQ ID NO: 28942 - DNA, 33 bp, Homo sapiens
ctttcttttgttcagacttgccttcccaggaaa

SEQ ID NO: 28943 - DNA, 33 bp, Homo sapiens
aactaaatgtctatcaaagttagctaggcccaa

SEQ ID NO: 28944 - DNA, 33 bp, Homo sapiens
ttcccactctcttgaacgcaatatggttttaga

SEQ ID NO: 28945 - DNA, 33 bp, Homo sapiens
ctgaaattcatttatcggactgagaagcttctt

SEQ ID NO: 28946 - DNA, 51 bp, Homo sapiens
cccctttctccatttacatcattttcttcctagtaactagaaaactcctga

SEQ ID NO: 28947 - DNA, 33 bp, Homo sapiens
agattctgaaataccacgtgacaaatagtagag

SEQ ID NO: 28948 - DNA, 33 bp, Homo sapiens
ttaccaatgaatactaccttctaccaattaaaa

SEQ ID NO: 28949 - DNA, 33 bp, Homo sapiens
tagttacagagactaaagtaagcatgtacacat

SEQ ID NO: 28950 - DNA, 33 bp, Homo sapiens
atggctaaataaaagcagcagacatgtgaatga

SEQ ID NO: 28951 - DNA, 33 bp, Homo sapiens
agcttagttgcttttgcattaatgtaaccagtg

SEQ ID NO: 28952 - DNA, 33 bp, Homo sapiens
aatcaataggccatacacattcttgcatatatg

SEQ ID NO: 28953 - DNA, 33 bp, Homo sapiens
tcagcttaggtctcttcaaacgtgtgcaatcat

SEQ ID NO: 28954 - DNA, 33 bp, Homo sapiens
ggatgttccatactaactcctgggagaaacaat

SEQ ID NO: 28955 - DNA, 33 bp, Homo sapiens
gaagcacctttggaagcagatgatgagaaagaa

SEQ ID NO: 28956 - DNA, 33 bp, Homo sapiens
ctagatactgtagaaagaaagcaaaatcattga

SEQ ID NO: 28957 - DNA, 33 bp, Homo sapiens
cattttcactaaacaacttgctgcttgtgaatt

SEQ ID NO: 28958 - DNA, 33 bp, Homo sapiens
atctagtacacaaaaaacctcactttatactag

SEQ ID NO: 28959 - DNA, 33 bp, Homo sapiens
gagttaaatacatccagcctgatcatcaggtgc

SEQ ID NO: 28960 - DNA, 33 bp, Homo sapiens
ttattggccaacttgagggctgcagtattatac

SEQ ID NO: 28961 - DNA, 33 bp, Homo sapiens
tgttcaataagacatacggacaaaggggaggca

SEQ ID NO: 28962 - DNA, 33 bp, Homo sapiens
taacatttatcaccaactctgtataattacact

SEQ ID NO: 28963 - DNA, 33 bp, Homo sapiens
ctagaacagatgttaccaaaaatggaaacgtgg

SEQ ID NO: 28964 - DNA, 33 bp, Homo sapiens
ggaaggagagaggtagaatgaacagcctgtaaa

SEQ ID NO: 28965 - DNA, 33 bp, Homo sapiens
acttaaaacctaatgacggttgatatatgcagc

SEQ ID NO: 28966 - DNA, 33 bp, Homo sapiens
taatcttcaggatgaccggtagaaagcagcgag

SEQ ID NO: 28967 - DNA, 33 bp, Homo sapiens
atgatgaattggaaaacatggaaagatgcagat

SEQ ID NO: 28968 - DNA, 33 bp, Homo sapiens
caaatgaccaataggaagatgggttagtgacat

SEQ ID NO: 28969 - DNA, 33 bp, Homo sapiens
ggggagaggttgctaaaatattataggatttct

SEQ ID NO: 28970 - DNA, 33 bp, Homo sapiens
tttcagcttctagacactggctgtattccttgg

SEQ ID NO: 28971 - DNA, 33 bp, Homo sapiens
gcagacttcagtgccagacattaagtgctaaga

SEQ ID NO: 28972 - DNA, 33 bp, Homo sapiens
tgagaccttttatgtacgaaaacattgcttaac

SEQ ID NO: 28973 - DNA, 33 bp, Homo sapiens
ttcagcttacaaacaaactgctttcagctctag

SEQ ID NO: 28974 - DNA, 33 bp, Homo sapiens
atggggaagaatgtaaagagacaggcgtagtaa

SEQ ID NO: 28975 - DNA, 33 bp, Homo sapiens
tgtcttgctcgggagaggtcattattttgctct

SEQ ID NO: 28976 - DNA, 33 bp, Homo sapiens
atgaagatcccagcacaatcaaactgggcaatt

SEQ ID NO: 28977 - DNA, 33 bp, Homo sapiens
ctgtattctattctcccgatgtgaatttagttc

SEQ ID NO: 28978 - DNA, 33 bp, Homo sapiens
taaattcatctgcctacgaggagctgaccattg

SEQ ID NO: 28979 - DNA, 33 bp, Homo sapiens
gggccagctagtacccaagatctgtttccattc

SEQ ID NO: 28980 - DNA, 33 bp, Homo sapiens
ctgttgattctactaacagtgtctcccactatt

SEQ ID NO: 28981 - DNA, 33 bp, Homo sapiens
gtaaccaaccaagtggaatgaacatagacaatt

SEQ ID NO: 28982 - DNA, 33 bp, Homo sapiens
agtgtatggccaaatgcatgtatattcaagagc

SEQ ID NO: 28983 - DNA, 33 bp, Homo sapiens
aatagccatgttgttacggagctaaagacaggg

SEQ ID NO: 28984 - DNA, 51 bp, Homo sapiens
gatgcttctctatgaggatttaaaaagtgaaatcttgatcataagatttgc

SEQ ID NO: 28985 - DNA, 33 bp, Homo sapiens
aacagagccttcaacaatagtagttggaaactt

SEQ ID NO: 28986 - DNA, 33 bp, Homo sapiens
ctagccaagcatactgcaaaatgaatataatgc

SEQ ID NO: 28987 - DNA, 33 bp, Homo sapiens
aattacctcaacttcaactattcaaaggaaaac

SEQ ID NO: 28988 - DNA, 33 bp, Homo sapiens
ttatgccatagttccaacatctttaaaattggc

SEQ ID NO: 28989 - DNA, 33 bp, Homo sapiens
tatcaagtctcaatcacataattgacatggaaa

SEQ ID NO: 28990 - DNA, 33 bp, Homo sapiens
ttaatcttataagaaacttgtgttcaaaagtgt

SEQ ID NO: 28991 - DNA, 33 bp, Homo sapiens
atgttaagcagaattacggttgacgctcaaata

SEQ ID NO: 28992 - DNA, 33 bp, Homo sapiens
tctggtagatgtccaaatggaagctggatattc

SEQ ID NO: 28993 - DNA, 33 bp, Homo sapiens
acacatcttgccacgaaaaccagttgctatttc

SEQ ID NO: 28994 - DNA, 33 bp, Homo sapiens
ggtcaaaattcccagaacaaggcactgacatat

SEQ ID NO: 28995 - DNA, 33 bp, Homo sapiens
gtgttcttcaagggaaagttctaaacacaccat

SEQ ID NO: 28996 - DNA, 51 bp, Homo sapiens
gttaaccgtggaagagtgaagaagaagagaagatgcccaagccaggtgagc

SEQ ID NO: 28997 - DNA, 33 bp, Homo sapiens
acaccttaaaaacttaataactcctgcttgaga

SEQ ID NO: 28998 - DNA, 33 bp, Homo sapiens
tgtgcttcttgaaagacggagctctagacgtgt

SEQ ID NO: 28999 - DNA, 33 bp, Homo sapiens
tgtaccactaacaaaccccacttccctctcaat

SEQ ID NO: 29000 - DNA, 33 bp, Homo sapiens
attgtaagtcatctaaacattttatggtagaaa

SEQ ID NO: 29001 - DNA, 51 bp, Homo sapiens
attactttcttgctacaacttcaacgaataaaagaacaccctgtgtcacta

SEQ ID NO: 29002 - DNA, 51 bp, Homo sapiens
aatcagattgattaattacaagaaacgacttattgacagagttttttaaag

SEQ ID NO: 29003 - DNA, 51 bp, Homo sapiens
tcacccaacgctaagtatcttctgacgcaattatatgagtgttagaaaatt

SEQ ID NO: 29004 - DNA, 33 bp, Homo sapiens
tcaaatgatagcggaacgatcttcccatactta

SEQ ID NO: 29005 - DNA, 51 bp, Homo sapiens
ggtgagcctccaaccactgaaattaccatcttgctgtagttatgataaata

SEQ ID NO: 29006 - DNA, 33 bp, Homo sapiens
taattgcagcaggaaaatgtaatggcccacaag

SEQ ID NO: 29007 - DNA, 51 bp, Homo sapiens
acctccctgcacactcattcattacctgccattcaatagtccttggccctg

SEQ ID NO: 29008 - DNA, 33 bp, Homo sapiens
gaaaactgtactaggcaaggcccatagaataaa

SEQ ID NO: 29009 - DNA, 33 bp, Homo sapiens
ttcaatgcataactcccgataatccatccagtt

SEQ ID NO: 29010 - DNA, 51 bp, Homo sapiens
ttctgatcctgttaatcttttagaccgtaatgcatagtttgcttaagttca

SEQ ID NO: 29011 - DNA, 33 bp, Homo sapiens
tggcaggttcagagacacccttcatgagccagg

SEQ ID NO: 29012 - DNA, 51 bp, Homo sapiens
gacagagaatgagtttcaaatatttaaaaaaatctcagcaaaagaaccaaa

SEQ ID NO: 29013 - DNA, 51 bp, Homo sapiens
taagggaaaacaaaacaattaaataataagcacaagggacagagaatgagt

SEQ ID NO: 29014 - DNA, 33 bp, Homo sapiens
tagtatagtaaggagcaatgtaaggcatgaacc

SEQ ID NO: 29015 - DNA, 51 bp, Homo sapiens
ggggattacttgtacctggttcaccggcccacattagagtaattcaccaat

SEQ ID NO: 29016 - DNA, 33 bp, Homo sapiens
ctagagaactgcaccccattccttgctgattac

SEQ ID NO: 29017 - DNA, 33 bp, Homo sapiens
gcccacataaaatgacaaacttaatctgtaaat

SEQ ID NO: 29018 - DNA, 33 bp, Homo sapiens
aaacgacaactctgacactgtttaatattcgag

SEQ ID NO: 29019 - DNA, 33 bp, Homo sapiens
catacagtaactgatcaaaaaatggtaactatc

SEQ ID NO: 29020 - DNA, 33 bp, Homo sapiens
cacctcgatggaattaaacatacatgtggactt

SEQ ID NO: 29021 - DNA, 33 bp, Homo sapiens
accaaattactggctccgaatgcaaaatgtctg

SEQ ID NO: 29022 - DNA, 33 bp, Homo sapiens
aatgttctgattaaaacggggctgaggaaacag

SEQ ID NO: 29023 - DNA, 33 bp, Homo sapiens
cttcagtacaggccaacgatggcgatccacagt

SEQ ID NO: 29024 - DNA, 33 bp, Homo sapiens
gaatccttcatttgagccgagccttaaggatga

SEQ ID NO: 29025 - DNA, 33 bp, Homo sapiens
gagaaagtacagacacagacggcttgagtcact

SEQ ID NO: 29026 - DNA, 33 bp, Homo sapiens
ggaacccacagaggccagctgagatttcaattt

SEQ ID NO: 29027 - DNA, 33 bp, Homo sapiens
aacgagctatatgccccgccgtgagttaagtgc

SEQ ID NO: 29028 - DNA, 33 bp, Homo sapiens
tggtgatcctgaaagcacccgttcattcaaagt

SEQ ID NO: 29029 - DNA, 33 bp, Homo sapiens
ccagcctggagcagtgcaagaggaaatggactg

SEQ ID NO: 29030 - DNA, 33 bp, Homo sapiens
agattcctgcctgaaaaagggtgacatctgtcc

SEQ ID NO: 29031 - DNA, 33 bp, Homo sapiens
gcaaaaacgccagggcaatgaaaataaattaac

SEQ ID NO: 29032 - DNA, 33 bp, Homo sapiens
tagtgaattcactaaaatgggtagcgacaaacc

SEQ ID NO: 29033 - DNA, 33 bp, Homo sapiens
caccaaaaagaatgagaaagccgccataaacaa

SEQ ID NO: 29034 - DNA, 33 bp, Homo sapiens
catcaggaataggagaaggccagtttaagagca

SEQ ID NO: 29035 - DNA, 51 bp, Homo sapiens
aatggaagaaaatatttgtaaactacggatcttactaagggctaatataca

SEQ ID NO: 29036 - DNA, 33 bp, Homo sapiens
agtcatgttcagagtcaaaaaatttgaaagaat

SEQ ID NO: 29037 - DNA, 33 bp, Homo sapiens
ggcactgaccttatatcagctgtcagcagactc

SEQ ID NO: 29038 - DNA, 33 bp, Homo sapiens
gtggtacagaaatggaaaatgggtttgagagaa

SEQ ID NO: 29039 - DNA, 33 bp, Homo sapiens
tacccacaggaatgacaatatttggttataggc

SEQ ID NO: 29040 - DNA, 33 bp, Homo sapiens
aggcgggtgacttagacgtgagtacaagccacc

SEQ ID NO: 29041 - DNA, 33 bp, Homo sapiens
agagtccaaagctccaggttagaggctggaagt

SEQ ID NO: 29042 - DNA, 33 bp, Homo sapiens
cagaaagcctgactatgaggccatcactcttac

SEQ ID NO: 29043 - DNA, 33 bp, Homo sapiens
gcaggggagtgtaacacggtcagagtccaaaac

SEQ ID NO: 29044 - DNA, 33 bp, Homo sapiens
gacattggagatggaacgaggaagggatcctgg

SEQ ID NO: 29045 - DNA, 33 bp, Homo sapiens
gtttctggtaactgtgcagaatggagtttcaag

SEQ ID NO: 29046 - DNA, 33 bp, Homo sapiens
atgttccatgttctccactaatttcacttcaga

SEQ ID NO: 29047 - DNA, 33 bp, Homo sapiens
ggttttctatcacgtcccttactcaggtttcac

SEQ ID NO: 29048 - DNA, 33 bp, Homo sapiens
ataagcattctttatgcattcgccattatactg

SEQ ID NO: 29049 - DNA, 33 bp, Homo sapiens
gggctactaatatggacgtgagatgaggacctg

SEQ ID NO: 29050 - DNA, 33 bp, Homo sapiens
tgaaataaggagtacaatcatctctgcctgaaa

SEQ ID NO: 29051 - DNA, 33 bp, Homo sapiens
tgatacactagttatacccacaacaaccaaatg

SEQ ID NO: 29052 - DNA, 33 bp, Homo sapiens
aacttggcaaagagaaatatgcagaagtcaatt

SEQ ID NO: 29053 - DNA, 33 bp, Homo sapiens
ttactgaagtcaccaaattatttttctcaacag

SEQ ID NO: 29054 - DNA, 33 bp, Homo sapiens
atcaaatttaatcccaacaattacatttaaaaa

SEQ ID NO: 29055 - DNA, 33 bp, Homo sapiens
gtctattttcctctccaagtggaacactgcaaa

SEQ ID NO: 29056 - DNA, 33 bp, Homo sapiens
ctagctgctttgccaacgttctgagcatcagga

SEQ ID NO: 29057 - DNA, 33 bp, Homo sapiens
aaggtctgattccttaacatccaggccaaaaaa

SEQ ID NO: 29058 - DNA, 33 bp, Homo sapiens
accattaattgatagacgtaggtatggcctgta

SEQ ID NO: 29059 - DNA, 33 bp, Homo sapiens
gctgttagactgatacaaacaggtttcattcca

SEQ ID NO: 29060 - DNA, 33 bp, Homo sapiens
gtataatcacctctacggctctgtcttccacct

SEQ ID NO: 29061 - DNA, 33 bp, Homo sapiens
acacagaaaagtgctaaacagtaattactctct

SEQ ID NO: 29062 - DNA, 33 bp, Homo sapiens
tccttagaacaatgaaaataaacaccaccacat

SEQ ID NO: 29063 - DNA, 33 bp, Homo sapiens
ctctgttacttttggcccaacaaccctaaatgc

SEQ ID NO: 29064 - DNA, 33 bp, Homo sapiens
gagttttgcatttaaaacaatgagctgtcaaag

SEQ ID NO: 29065 - DNA, 33 bp, Homo sapiens
agttttataattcgacaaaccaaataatttttt

SEQ ID NO: 29066 - DNA, 33 bp, Homo sapiens
caaactcaggttagaactatgtattcctgctac

SEQ ID NO: 29067 - DNA, 33 bp, Homo sapiens
tgtggggaaagaatcccgaatgatgtctagtac

SEQ ID NO: 29068 - DNA, 33 bp, Homo sapiens
tattatccttcttcaaacaaattgtgaatcaaa

SEQ ID NO: 29069 - DNA, 33 bp, Homo sapiens
acaggatagaaaataaatgattcaggtcataag

SEQ ID NO: 29070 - DNA, 33 bp, Homo sapiens
ttggtaataaattgcccgccacaaattgcacaa

SEQ ID NO: 29071 - DNA, 33 bp, Homo sapiens
atatagttagatgcaacgaatcagatctaattt

SEQ ID NO: 29072 - DNA, 33 bp, Homo sapiens
gtctgatgactagagaagactggatggaaggtg

SEQ ID NO: 29073 - DNA, 33 bp, Homo sapiens
tttctgtcatgagcaaatgtctgagtcagcttg

SEQ ID NO: 29074 - DNA, 33 bp, Homo sapiens
atatatagtaaaactgcagcctacttttaatca

SEQ ID NO: 29075 - DNA, 51 bp, Homo sapiens
gtcacctctgtgttcttgattgacccatgtcagataaaaagattgttaaaa

SEQ ID NO: 29076 - DNA, 33 bp, Homo sapiens
ctctggcactcttatcactagaaattgtcaggc

SEQ ID NO: 29077 - DNA, 33 bp, Homo sapiens
actcataaaaggtcatcaagcttcaccttgaac

SEQ ID NO: 29078 - DNA, 33 bp, Homo sapiens
gtcaatattccttacaatggcactaaaagccca

SEQ ID NO: 29079 - DNA, 33 bp, Homo sapiens
gatgctggtcaatcaagaaaaacagaggcagac

SEQ ID NO: 29080 - DNA, 33 bp, Homo sapiens
catttaataaacttcaataaatatgttggctac

SEQ ID NO: 29081 - DNA, 33 bp, Homo sapiens
tcaatcaattttgtgccctgaaaccacagtagt

SEQ ID NO: 29082 - DNA, 33 bp, Homo sapiens
aagatgatcaaaatacacttagtcatggaaagg

SEQ ID NO: 29083 - DNA, 33 bp, Homo sapiens
ctgacgcttagcaactcacatgaataaaatgtt

SEQ ID NO: 29084 - DNA, 33 bp, Homo sapiens
ctccacttacccactgcatgatattgttggtgt

SEQ ID NO: 29085 - DNA, 33 bp, Homo sapiens
ctgtgccttacgatgaagataagtatttgagat

SEQ ID NO: 29086 - DNA, 33 bp, Homo sapiens
aaaatgttgacaatggaaacaaagaaaaggaca

SEQ ID NO: 29087 - DNA, 33 bp, Homo sapiens
tgcagtgtgcttgaacactagaaggttgggacc

SEQ ID NO: 29088 - DNA, 33 bp, Homo sapiens
ggcgtatttggaatccacacacatggctattct

SEQ ID NO: 29089 - DNA, 33 bp, Homo sapiens
agacagagatagctccgaagtggtagatcattc

SEQ ID NO: 29090 - DNA, 51 bp, Homo sapiens
tggatctcttgaatgtaggatgtaacaataaatgtcagcaggttttaaaaa

SEQ ID NO: 29091 - DNA, 33 bp, Homo sapiens
taaacacctaagtataaacagaatgcatatctt

SEQ ID NO: 29092 - DNA, 33 bp, Homo sapiens
tttgttcctaaatccaaaacaagcatggccatt

SEQ ID NO: 29093 - DNA, 33 bp, Homo sapiens
cagtctcctttatcaacaccctcacaaacacac

SEQ ID NO: 29094 - DNA, 33 bp, Homo sapiens
tgcatcaggttaaaagcctcaccttcctactta

SEQ ID NO: 29095 - DNA, 33 bp, Homo sapiens
gaaaggtcatgtagtacgaaatatgaaaagcaa

SEQ ID NO: 29096 - DNA, 33 bp, Homo sapiens
ttaagtaggtcaatggacacagaaaacttgcca

SEQ ID NO: 29097 - DNA, 33 bp, Homo sapiens
tgtcaagatggacaagaacaccatgttagccat

SEQ ID NO: 29098 - DNA, 33 bp, Homo sapiens
tttatctgaggcgataaaatccaaacgtgcaac

SEQ ID NO: 29099 - DNA, 33 bp, Homo sapiens
gaatcaggcaatgcaccaattcaaggatataca

SEQ ID NO: 29100 - DNA, 33 bp, Homo sapiens
aaatctgagtcacccaatgcacattatcacagc

SEQ ID NO: 29101 - DNA, 33 bp, Homo sapiens
aaacacagaatactccagaaggtttgtcaaagt

SEQ ID NO: 29102 - DNA, 33 bp, Homo sapiens
ttagtttccattatgacgaaaagttgcaaggtt

SEQ ID NO: 29103 - DNA, 33 bp, Homo sapiens
actggccccattcttgaaagattcagattatta

SEQ ID NO: 29104 - DNA, 33 bp, Homo sapiens
taaagctctgttatggcagggccttatttattc

SEQ ID NO: 29105 - DNA, 33 bp, Homo sapiens
caggtaacagagcaaacataaaaaaggtaggca

SEQ ID NO: 29106 - DNA, 33 bp, Homo sapiens
gtgttcataacatttcaaagagctaatactagc

SEQ ID NO: 29107 - DNA, 33 bp, Homo sapiens
agtgttgcctaggagacaatttggtgaagaata

SEQ ID NO: 29108 - DNA, 33 bp, Homo sapiens
ccagctcactagaacaacgtgtacaaggattgg

SEQ ID NO: 29109 - DNA, 33 bp, Homo sapiens
ggagacacatagactcaactattttggatcaac

SEQ ID NO: 29110 - DNA, 33 bp, Homo sapiens
tgaaattatgactcaacggagaatatgactgat

SEQ ID NO: 29111 - DNA, 33 bp, Homo sapiens
ttttcctataccttaaccaacatttgaaattac

SEQ ID NO: 29112 - DNA, 33 bp, Homo sapiens
ggatccaggaagctacagagagaagcagccagc

SEQ ID NO: 29113 - DNA, 51 bp, Homo sapiens
atgaaagcacaaattagaataagaacctacattgtcagaattattatttcc

SEQ ID NO: 29114 - DNA, 33 bp, Homo sapiens
gcaagtaatccaaatacgcaatggccaaatctg

SEQ ID NO: 29115 - DNA, 51 bp, Homo sapiens
cacaagtaattgagactagaaaaaaataatagcccaactaacttaaattct

SEQ ID NO: 29116 - DNA, 33 bp, Homo sapiens
acctcccctgcccagggaagtggtactgaaaaa

SEQ ID NO: 29117 - DNA, 33 bp, Homo sapiens
cccccaggcacaactgaaaacctcttttctcaa

SEQ ID NO: 29118 - DNA, 33 bp, Homo sapiens
cttcaacaaagcatacaaaaacgtaaagtgggg

SEQ ID NO: 29119 - DNA, 33 bp, Homo sapiens
ccttgtctcagatttacccaagttacctctacc

SEQ ID NO: 29120 - DNA, 33 bp, Homo sapiens
taacactcagttactacggattatattcataaa

SEQ ID NO: 29121 - DNA, 33 bp, Homo sapiens
gaggatgtagcaggagaaaagtaaagaaagcct

SEQ ID NO: 29122 - DNA, 33 bp, Homo sapiens
tggaacatctggtttggaaggaagccttatagg

SEQ ID NO: 29123 - DNA, 51 bp, Homo sapiens
aaaggcaccctgctagccaaatgccaatatcatgaatttgcttagagtgag

SEQ ID NO: 29124 - DNA, 33 bp, Homo sapiens
tgataaagagcatctacggaaaactcagctaac

SEQ ID NO: 29125 - DNA, 51 bp, Homo sapiens
tttgaggcggaagtgaaagctgtaaaggttagagcacaaagggctgagagg

SEQ ID NO: 29126 - DNA, 33 bp, Homo sapiens
aatgaatcaagtcagacgcatttttttctactc

SEQ ID NO: 29127 - DNA, 33 bp, Homo sapiens
ccattctaccagatacacagacatcaccacagt

SEQ ID NO: 29128 - DNA, 33 bp, Homo sapiens
aggaaaaaagcaatgaagaattggtctggttga

SEQ ID NO: 29129 - DNA, 33 bp, Homo sapiens
actgtatttaaggcaacgtgaggaatagaaaac

SEQ ID NO: 29130 - DNA, 33 bp, Homo sapiens
ttaccagtctctgtgacgtacggtcaaaaatta

SEQ ID NO: 29131 - DNA, 33 bp, Homo sapiens
atacttgcaagaagccaggcgataccatagaca

SEQ ID NO: 29132 - DNA, 33 bp, Homo sapiens
taagtatttgttgtcactaattcataccaactc

SEQ ID NO: 29133 - DNA, 33 bp, Homo sapiens
agtcttcttcaccttcactgtcctatttttgaa

SEQ ID NO: 29134 - DNA, 51 bp, Homo sapiens
ctagacactatgtaatttgaccctgaaatacttaaacaaaaattatagttt

SEQ ID NO: 29135 - DNA, 33 bp, Homo sapiens
atcgacatttgttgaactgaattcaatgcccag

SEQ ID NO: 29136 - DNA, 33 bp, Homo sapiens
taagactttagctttgcatgacagaaaggttag

SEQ ID NO: 29137 - DNA, 33 bp, Homo sapiens
aagccctctcacaaccaaagtacaactgttgat

SEQ ID NO: 29138 - DNA, 33 bp, Homo sapiens
gggaaacttgagctgacacaaaatgcaaaaagg

SEQ ID NO: 29139 - DNA, 33 bp, Homo sapiens
ttgtaaagcaaagtgaaaaacaacagctgctcg

SEQ ID NO: 29140 - DNA, 33 bp, Homo sapiens
atgcatatgtcatggaagatgaatgtttcccaa

SEQ ID NO: 29141 - DNA, 33 bp, Homo sapiens
ccaagatagcacaagacaaatgacttttaaaaa

SEQ ID NO: 29142 - DNA, 33 bp, Homo sapiens
tgatacacaaaaggcaatgaactggaatgaaaa

SEQ ID NO: 29143 - DNA, 33 bp, Homo sapiens
tctgtagcaaggaacaactctagctcttagatt

SEQ ID NO: 29144 - DNA, 33 bp, Homo sapiens
aatgctaagaaaggcaaagctagatatttaata

SEQ ID NO: 29145 - DNA, 33 bp, Homo sapiens
tgcccattaattgaggcatttcttcacagcgtc

SEQ ID NO: 29146 - DNA, 33 bp, Homo sapiens
ggggtggtgacctctacaaactcttgctaccaa

SEQ ID NO: 29147 - DNA, 33 bp, Homo sapiens
aagtgggtgatggaagaccttagctgctatgtt

SEQ ID NO: 29148 - DNA, 33 bp, Homo sapiens
tgagataagtctttaaactactatgaaatgcat

SEQ ID NO: 29149 - DNA, 33 bp, Homo sapiens
cccatagtaatagatgaaaaaggatggacttta

SEQ ID NO: 29150 - DNA, 33 bp, Homo sapiens
caatgtgatttttaaacttaagagtcagttgaa

SEQ ID NO: 29151 - DNA, 33 bp, Homo sapiens
aaacctaatctgtcatcaagacctgctacttat

SEQ ID NO: 29152 - DNA, 33 bp, Homo sapiens
ttggtggccttaaaaaagtggttagatttagca

SEQ ID NO: 29153 - DNA, 33 bp, Homo sapiens
agatagattcatgacactgagtttgacaataat

SEQ ID NO: 29154 - DNA, 51 bp, Homo sapiens
aaaacttcaaaactctgataaacaagaactaaataacatgttcatggatag

SEQ ID NO: 29155 - DNA, 33 bp, Homo sapiens
ttgttcaaaaacatcaactattgtgattctggt

SEQ ID NO: 29156 - DNA, 33 bp, Homo sapiens
tttaaaaaaaactgaaagataacattcaatcca

SEQ ID NO: 29157 - DNA, 33 bp, Homo sapiens
acctttcatcagccccccttctatctctgaaaa

SEQ ID NO: 29158 - DNA, 51 bp, Homo sapiens
gtataagttttaaatgagtactataagtgcttggaaatgaaaatctgctgt

SEQ ID NO: 29159 - DNA, 51 bp, Homo sapiens
aaactaagtttgtatctctgcttaaataaccaagatgtgttgcatttgaaa

SEQ ID NO: 29160 - DNA, 33 bp, Homo sapiens
tctaatcgcttcttaaactaaccaatccaatcc

SEQ ID NO: 29161 - DNA, 33 bp, Homo sapiens
tcattgcttggcacacagtataagcattcaata

SEQ ID NO: 29162 - DNA, 51 bp, Homo sapiens
cagactgcttccactcccttctcccaaggactgagctctgtcatcaactct

SEQ ID NO: 29163 - DNA, 33 bp, Homo sapiens
aagaagccagttcacacgaggccctaaggcttt

SEQ ID NO: 29164 - DNA, 51 bp, Homo sapiens
caaccacaaatattaaatacgtaccgcctagagttgaatgaataagggcag

SEQ ID NO: 29165 - DNA, 33 bp, Homo sapiens
ttgctgagtgcataccacagtgttcctgaatta

SEQ ID NO: 29166 - DNA, 33 bp, Homo sapiens
agtcatcctttgtgcgacatcatttacaaagtt

SEQ ID NO: 29167 - DNA, 33 bp, Homo sapiens
ttcgaagtctgaaaaactagattgcattaggat

SEQ ID NO: 29168 - DNA, 33 bp, Homo sapiens
ctgggtttgccaagaacgtaaggtcctaactgc

SEQ ID NO: 29169 - DNA, 33 bp, Homo sapiens
attagaagtttaagatcacttgaccccaaacct

SEQ ID NO: 29170 - DNA, 33 bp, Homo sapiens
atattaaacagcaatcacattattttattcaat

SEQ ID NO: 29171 - DNA, 33 bp, Homo sapiens
tgggtgccaatatctcaacttcttaaagggatc

SEQ ID NO: 29172 - DNA, 33 bp, Homo sapiens
cattaatatgcttcaaacttaatttcaatacat

SEQ ID NO: 29173 - DNA, 33 bp, Homo sapiens
ccatgtccccatgaagaccgagatctcttgtcc

SEQ ID NO: 29174 - DNA, 33 bp, Homo sapiens
tccccaactccttccacagatgagtgatgcctg

SEQ ID NO: 29175 - DNA, 33 bp, Homo sapiens
ttctgttctctctttcgcttgggaaaatagaga

SEQ ID NO: 29176 - DNA, 33 bp, Homo sapiens
tttgaataacagtcataaaatggtcatgggtca

SEQ ID NO: 29177 - DNA, 33 bp, Homo sapiens
tacacttctttgtgcacggctcacaattcttct

SEQ ID NO: 29178 - DNA, 33 bp, Homo sapiens
gcactaaatgtcactgaaggccctgaaaaaaaa

SEQ ID NO: 29179 - DNA, 33 bp, Homo sapiens
cacggcacataaagagaacagagtagacctggg

SEQ ID NO: 29180 - DNA, 33 bp, Homo sapiens
gagcaggactttcataagaagctttatctcttc

SEQ ID NO: 29181 - DNA, 33 bp, Homo sapiens
tatgcaggcaaataaacgaacaaaatactcttc

SEQ ID NO: 29182 - DNA, 33 bp, Homo sapiens
atagtatgtgcaatgaagggtacagagaagcta

SEQ ID NO: 29183 - DNA, 33 bp, Homo sapiens
taggcttgaaaacattaaaacagatggtgatac

SEQ ID NO: 29184 - DNA, 33 bp, Homo sapiens
taatttctttacaaaaactgatagttactgata

SEQ ID NO: 29185 - DNA, 33 bp, Homo sapiens
ttccttatcctaaacaacatcttcttttctatt

SEQ ID NO: 29186 - DNA, 33 bp, Homo sapiens
tgaagaagccccttgaagctttgccctactgaa

SEQ ID NO: 29187 - DNA, 51 bp, Homo sapiens
cactttagaaaatagcaccatttaacaatttcacaaaaggcagcaggtgct

SEQ ID NO: 29188 - DNA, 51 bp, Homo sapiens
agtagattgaaaataaatctttctacggatgaatctaaagcgtttctagat

SEQ ID NO: 29189 - DNA, 51 bp, Homo sapiens
gacactagtcttggcccactctatacaagtaagatcttgctaggcttgtat

SEQ ID NO: 29190 - DNA, 33 bp, Homo sapiens
tttacatccaaaaataccatgtagcttgctcaa

SEQ ID NO: 29191 - DNA, 51 bp, Homo sapiens
ctaaagtgttgttatatatacagaaaactgaaatgaacaagagttcagtga

SEQ ID NO: 29192 - DNA, 51 bp, Homo sapiens
ctccacagtaagtgagtttattttccacggtggctgagtttggtgctattg

SEQ ID NO: 29193 - DNA, 33 bp, Homo sapiens
ccctaaacatttctataaacacaaatcacataa

SEQ ID NO: 29194 - DNA, 33 bp, Homo sapiens
aaatcgtcatggatataaaattgaattgcatta

SEQ ID NO: 29195 - DNA, 33 bp, Homo sapiens
atctacatggttataaatgatctgctcctactt

SEQ ID NO: 29196 - DNA, 33 bp, Homo sapiens
tcataatatattcaaccctctatccagattaac

SEQ ID NO: 29197 - DNA, 33 bp, Homo sapiens
atggattaacataaaacctgacactgaaggcct

SEQ ID NO: 29198 - DNA, 33 bp, Homo sapiens
ttgcacttctgttttaagtatggttgtatattt

SEQ ID NO: 29199 - DNA, 33 bp, Homo sapiens
cagctcagaggagagtaaatgacaaagtatttt

SEQ ID NO: 29200 - DNA, 51 bp, Homo sapiens
atattcgtgatatttcccagaaagcagcatagtgggtaaaatcttccattt

SEQ ID NO: 29201 - DNA, 33 bp, Homo sapiens
tcccaattttctcactaaactttcaaatacagc

SEQ ID NO: 29202 - DNA, 33 bp, Homo sapiens
ttccttcttattctgacaaccattttgaataca

SEQ ID NO: 29203 - DNA, 33 bp, Homo sapiens
ggctaatcctccctcaaataaaatggaatttct

SEQ ID NO: 29204 - DNA, 33 bp, Homo sapiens
atatctggacaagagaagccaggcagatggaac

SEQ ID NO: 29205 - DNA, 33 bp, Homo sapiens
gtaatttgcattttaaaggttcaggcaatggag

SEQ ID NO: 29206 - DNA, 33 bp, Homo sapiens
cttctacagtcagagacacagtgtaaagaaaac

SEQ ID NO: 29207 - DNA, 33 bp, Homo sapiens
ttgtggaagtattggaatatagatgtatatatt

SEQ ID NO: 29208 - DNA, 33 bp, Homo sapiens
atttcagactggtgtacgaaagtaatgataagg

SEQ ID NO: 29209 - DNA, 33 bp, Homo sapiens
gttttagttaaaagaaaatggtcactgtgtttg

SEQ ID NO: 29210 - DNA, 33 bp, Homo sapiens
agaacatatgcaattaacaaacttaaacattag

SEQ ID NO: 29211 - DNA, 33 bp, Homo sapiens
tacacagatgatggaaagaaccacaccaactta

SEQ ID NO: 29212 - DNA, 33 bp, Homo sapiens
aatttaaggcagacctcaaagttttgttgtctt

SEQ ID NO: 29213 - DNA, 33 bp, Homo sapiens
aagtaggagagaaaacagtaggtaagaaagcaa

SEQ ID NO: 29214 - DNA, 33 bp, Homo sapiens
cttgtttacaggcatacgttgagtgttgaacat

SEQ ID NO: 29215 - DNA, 33 bp, Homo sapiens
aacccagagagtctgccaaccggctcctagaac

SEQ ID NO: 29216 - DNA, 33 bp, Homo sapiens
cttgtcatgcacaacactcttgtcatgcacaac

SEQ ID NO: 29217 - DNA, 33 bp, Homo sapiens
tgcatctttttagagcccatgacagagcagagc

SEQ ID NO: 29218 - DNA, 33 bp, Homo sapiens
cttctttggttctgcaaaatatctgtgggattt

SEQ ID NO: 29219 - DNA, 33 bp, Homo sapiens
tctctgtttgtaaaataagtaagtgctcattgt

SEQ ID NO: 29220 - DNA, 33 bp, Homo sapiens
aagttgaagacacagacggaataaaatagtggt

SEQ ID NO: 29221 - DNA, 33 bp, Homo sapiens
cagtatcctacagctgcaacatagtctcaggag

SEQ ID NO: 29222 - DNA, 51 bp, Homo sapiens
atacgctttaaataacatgctgactctaaccaattgaatgtgactacctgg

SEQ ID NO: 29223 - DNA, 33 bp, Homo sapiens
tcttcctaaatcacaactacgattatctctctc

SEQ ID NO: 29224 - DNA, 33 bp, Homo sapiens
tgccttctagacttaaagttagctccttctgcc

SEQ ID NO: 29225 - DNA, 33 bp, Homo sapiens
atttttctccttcacaatattttactctaagat

SEQ ID NO: 29226 - DNA, 33 bp, Homo sapiens
atgagaaaaatgttcacgagtacagattttgtt

SEQ ID NO: 29227 - DNA, 33 bp, Homo sapiens
ggaatttccaggataacatcagttacatgaaag

SEQ ID NO: 29228 - DNA, 51 bp, Homo sapiens
aaggtatattactagtaagtgaacaatggagttaaaattatgtcctcaatt

SEQ ID NO: 29229 - DNA, 33 bp, Homo sapiens
attgacatcatattacaagcccacctttgaagg

SEQ ID NO: 29230 - DNA, 33 bp, Homo sapiens
ccctgcctacactaaccgtgagctatttcaaat

SEQ ID NO: 29231 - DNA, 51 bp, Homo sapiens
caaaaaattgatggaaatataggaaaacaactaaggtctacttggtgtatg

SEQ ID NO: 29232 - DNA, 51 bp, Homo sapiens
gaaagtaaatgtttcaaagagaaagcaatagtattaagtgttgcagagaga

SEQ ID NO: 29233 - DNA, 51 bp, Homo sapiens
cccattcatttatttggtatgcatagagttagtttaccttccaggatttgc

SEQ ID NO: 29234 - DNA, 51 bp, Homo sapiens
taccctctccacaattggaaccccaaatcggcaaacatagcaaaggaccat

SEQ ID NO: 29235 - DNA, 33 bp, Homo sapiens
actagagagatgtaacaaggcagattgtgatgg

SEQ ID NO: 29236 - DNA, 33 bp, Homo sapiens
gaatgacttagagagaagtaaatccaatcatat

SEQ ID NO: 29237 - DNA, 33 bp, Homo sapiens
taactgcagcaacaggaagtacttttagcagct

SEQ ID NO: 29238 - DNA, 33 bp, Homo sapiens
tgtattactctggctccgagattctacattcta

SEQ ID NO: 29239 - DNA, 33 bp, Homo sapiens
gagcagagtcaccaacagcagcaaagaaggata

SEQ ID NO: 29240 - DNA, 33 bp, Homo sapiens
gtaagaaactactaaactgttccaaagtggctg

SEQ ID NO: 29241 - DNA, 33 bp, Homo sapiens
tttagaaacatagagcaacatcattaaatcttt

SEQ ID NO: 29242 - DNA, 33 bp, Homo sapiens
gttaagataatccaaagatttgctgtttttcct

SEQ ID NO: 29243 - DNA, 33 bp, Homo sapiens
tagtcacacttaaaacaaaaacaactattgaat

SEQ ID NO: 29244 - DNA, 33 bp, Homo sapiens
tgctaaccaagtaaaaagtcctgaaagaagcag

SEQ ID NO: 29245 - DNA, 33 bp, Homo sapiens
aaaaggtcgtctataaagcatttcatatggact

SEQ ID NO: 29246 - DNA, 33 bp, Homo sapiens
atgacccaaaatagcaaacgcaacattcagaga

SEQ ID NO: 29247 - DNA, 33 bp, Homo sapiens
ggcagtactctcagcacgaacacgttagagggt

SEQ ID NO: 29248 - DNA, 33 bp, Homo sapiens
aaaattaattgcaagacaaacaaaaatttacaa

SEQ ID NO: 29249 - DNA, 33 bp, Homo sapiens
atatatatccacttggccatatcattgaggaat

SEQ ID NO: 29250 - DNA, 33 bp, Homo sapiens
cacctgatcaaaccaaactgtgggctctacata

SEQ ID NO: 29251 - DNA, 33 bp, Homo sapiens
tgttctcaatggttcaaagttctcaatgacttg

SEQ ID NO: 29252 - DNA, 33 bp, Homo sapiens
tgaacaagttggtcataaagttttgtcaaacac

SEQ ID NO: 29253 - DNA, 33 bp, Homo sapiens
attgaaagaaaactgacagtactgctctcacct

SEQ ID NO: 29254 - DNA, 33 bp, Homo sapiens
aattttggagttagaaagaactgagttgacaac

SEQ ID NO: 29255 - DNA, 33 bp, Homo sapiens
gaatggtagaggaaagaccatcattatcataaa

SEQ ID NO: 29256 - DNA, 33 bp, Homo sapiens
tagtgttggtgaaaaaacctgcttttcagcatg

SEQ ID NO: 29257 - DNA, 33 bp, Homo sapiens
taagttttttcatcctcagacttctaaggttag

SEQ ID NO: 29258 - DNA, 33 bp, Homo sapiens
aaagctggttcgcaaccacaagccaacacagcc

SEQ ID NO: 29259 - DNA, 33 bp, Homo sapiens
ggaagcagagggtagaacagttattctgatgag

SEQ ID NO: 29260 - DNA, 33 bp, Homo sapiens
cagtgaaacagtctaccataatctacttgaccc

SEQ ID NO: 29261 - DNA, 33 bp, Homo sapiens
ttttccagaggattcaaggaacagagtaactca

SEQ ID NO: 29262 - DNA, 33 bp, Homo sapiens
gaattgaatattgaggaagaaacaacttatata

SEQ ID NO: 29263 - DNA, 33 bp, Homo sapiens
gttgtgcaatcactgccagtagttccaaaacat

SEQ ID NO: 29264 - DNA, 51 bp, Homo sapiens
tccttgtcccttatcaccgggtatgaaatacttaataattgacactttgca

SEQ ID NO: 29265 - DNA, 33 bp, Homo sapiens
gaaatgaagacatagaaaaaaaccacatcatta

SEQ ID NO: 29266 - DNA, 33 bp, Homo sapiens
ctgactcaagtgccaaagactaattttatgggg

SEQ ID NO: 29267 - DNA, 33 bp, Homo sapiens
aagcactaaacagataagctcaaaggtatttta

SEQ ID NO: 29268 - DNA, 33 bp, Homo sapiens
ggattgattgttactaacctcactgtattatac

SEQ ID NO: 29269 - DNA, 33 bp, Homo sapiens
taaaatgtctgataaacccaattgcagaaatta

SEQ ID NO: 29270 - DNA, 33 bp, Homo sapiens
atgtgtatctccctgaagatttagcataggaag

SEQ ID NO: 29271 - DNA, 33 bp, Homo sapiens
catggctcttcaggacaggctaattgatcagga

SEQ ID NO: 29272 - DNA, 33 bp, Homo sapiens
attaatgctcatgctgcagaaaagatgcaaagg

SEQ ID NO: 29273 - DNA, 33 bp, Homo sapiens
ttataaaacatcaacactctgtttaccattgca

SEQ ID NO: 29274 - DNA, 33 bp, Homo sapiens
agttttggacaatttccaatacactgcataatt

SEQ ID NO: 29275 - DNA, 33 bp, Homo sapiens
acatccagtcaccaaaaactgtatatttgacta

SEQ ID NO: 29276 - DNA, 33 bp, Homo sapiens
aagacttgaataaagtcaagggcaatttagagg

SEQ ID NO: 29277 - DNA, 51 bp, Homo sapiens
catgattatgctagaaaacctgatacagttgttaaatggttgtactgagaa

SEQ ID NO: 29278 - DNA, 33 bp, Homo sapiens
ttgcaatcaccaactaaatccaaattgggcagt

SEQ ID NO: 29279 - DNA, 33 bp, Homo sapiens
catgaattcatttccactataccaaagttgtct

SEQ ID NO: 29280 - DNA, 33 bp, Homo sapiens
aaaaatctaaagatccaaccaggtccatgaggt

SEQ ID NO: 29281 - DNA, 33 bp, Homo sapiens
tatcctccagctggtgcatattgtcaaaacagg

SEQ ID NO: 29282 - DNA, 33 bp, Homo sapiens
atggaattcaagctagacattaagcatacactg

SEQ ID NO: 29283 - DNA, 33 bp, Homo sapiens
gataaagtagtggagtaaaagtgatacagaaca

SEQ ID NO: 29284 - DNA, 33 bp, Homo sapiens
atagttaaggtaaaaacgtcacataatgcttta

SEQ ID NO: 29285 - DNA, 33 bp, Homo sapiens
gtgtgcagttgtcccacggcttttggtcaagta

SEQ ID NO: 29286 - DNA, 33 bp, Homo sapiens
tgtcattatgacaggaaatatacgtatgaaata

SEQ ID NO: 29287 - DNA, 33 bp, Homo sapiens
tttatggatgacttaaatgtcctcagaaataca

SEQ ID NO: 29288 - DNA, 33 bp, Homo sapiens
ttgacattttaatcagactgactgcaagcgaac

SEQ ID NO: 29289 - DNA, 33 bp, Homo sapiens
ggtattataaatattgcaacagtgacttatatg

SEQ ID NO: 29290 - DNA, 33 bp, Homo sapiens
aatgaattagtcttaaatcagaagcttttattt

SEQ ID NO: 29291 - DNA, 33 bp, Homo sapiens
ccacattgttgcgcacacagtttcctctgctgc

SEQ ID NO: 29292 - DNA, 33 bp, Homo sapiens
agggcagaattagagactacctggtctaacatc

SEQ ID NO: 29293 - DNA, 33 bp, Homo sapiens
cacccacaaaccataacaaatgatggctatgtt

SEQ ID NO: 29294 - DNA, 33 bp, Homo sapiens
aagaaggctggaaaaacatgacccctcaaaaaa

SEQ ID NO: 29295 - DNA, 33 bp, Homo sapiens
actgtgcctgactcaacttcagcctcataatac

SEQ ID NO: 29296 - DNA, 33 bp, Homo sapiens
catatgtatatactgaggacaaagaggaagaga

SEQ ID NO: 29297 - DNA, 51 bp, Homo sapiens
agcatacacggtcttttaagcaagcacccgttttcacttctttgccttcta

SEQ ID NO: 29298 - DNA, 33 bp, Homo sapiens
gtttagtttagtggcaagtgattaataaggcca

SEQ ID NO: 29299 - DNA, 33 bp, Homo sapiens
atggaacacacggagacgatggaactgcagggc

SEQ ID NO: 29300 - DNA, 33 bp, Homo sapiens
actataaatgaataggaccaacataaaacgata

SEQ ID NO: 29301 - DNA, 33 bp, Homo sapiens
tggagaaatatgaaccagaaactagtataatac

SEQ ID NO: 29302 - DNA, 33 bp, Homo sapiens
aacatgggtttcaaacacacaggtccatttata

SEQ ID NO: 29303 - DNA, 33 bp, Homo sapiens
tattttcatcagtctacaccgtgaggagtggtg

SEQ ID NO: 29304 - DNA, 51 bp, Homo sapiens
aaaactttttctgtaaagggtcagacagtaaacaatttcagctttataggc

SEQ ID NO: 29305 - DNA, 51 bp, Homo sapiens
ctaatcacttagagtccataaataccgcataggatattaaggtttgcttct

SEQ ID NO: 29306 - DNA, 33 bp, Homo sapiens
aaaaactggggatggaagtaccagcagatttat

SEQ ID NO: 29307 - DNA, 33 bp, Homo sapiens
ccaataggctatagaacgatgccaacacataat

SEQ ID NO: 29308 - DNA, 33 bp, Homo sapiens
tcacattgctgtacaaaaagtctctataatttt

SEQ ID NO: 29309 - DNA, 33 bp, Homo sapiens
gactaatgtctctctaaattgcataaaactaag

SEQ ID NO: 29310 - DNA, 33 bp, Homo sapiens
ctaccaatccagaagcagctaggtcacatttct

SEQ ID NO: 29311 - DNA, 33 bp, Homo sapiens
cccactgaatggcaaggctaaaagaagtgctgt

SEQ ID NO: 29312 - DNA, 33 bp, Homo sapiens
ttgatactaaatctccaccatcttgccatacaa

SEQ ID NO: 29313 - DNA, 51 bp, Homo sapiens
aaatctctattgaagtacttttcaacatagacattaaaattgctgcagtaa

SEQ ID NO: 29314 - DNA, 51 bp, Homo sapiens
gttttccatattaatatgatgattacactagtttgcattcatttttaaaag

SEQ ID NO: 29315 - DNA, 33 bp, Homo sapiens
aaatgatgaactaggaatagtgcacaggtgata

SEQ ID NO: 29316 - DNA, 33 bp, Homo sapiens
gaggataaagccaccacgaaatataaaaacata

SEQ ID NO: 29317 - DNA, 33 bp, Homo sapiens
aaaagtaacctcagacaacataacaacaaacca

SEQ ID NO: 29318 - DNA, 51 bp, Homo sapiens
atttaatttggataagtatttaggaatattatcctgagttgatgtatttta

SEQ ID NO: 29319 - DNA, 33 bp, Homo sapiens
gcagtttatcaattcaaaacaagtcaggatatt

SEQ ID NO: 29320 - DNA, 51 bp, Homo sapiens
ccctagcaatttgtctcaaatttcacgcataggatcaaaagaaaatgtttt

SEQ ID NO: 29321 - DNA, 51 bp, Homo sapiens
aacatatgattctcttcaaaaacaaatagcagtcaataaagtaggaatttc

SEQ ID NO: 29322 - DNA, 33 bp, Homo sapiens
taaacattacacttcaatctttgttcatgtgca

SEQ ID NO: 29323 - DNA, 33 bp, Homo sapiens
attcatcatcttattcacacagttattatgtat

SEQ ID NO: 29324 - DNA, 33 bp, Homo sapiens
agaaaaggctgatttcaatgacaggaactctat

SEQ ID NO: 29325 - DNA, 33 bp, Homo sapiens
ccagggtatcttcaaaatatttcccgcttataa

SEQ ID NO: 29326 - DNA, 51 bp, Homo sapiens
gatcaagtggcaataaattagtaaaagtcatgcaaacaaaagcaaatgatt

SEQ ID NO: 29327 - DNA, 33 bp, Homo sapiens
gacctcagcgagattacagactggtggagaaat

SEQ ID NO: 29328 - DNA, 33 bp, Homo sapiens
ataattatatccaaaaatgtctgccgtgtggta

SEQ ID NO: 29329 - DNA, 33 bp, Homo sapiens
gtcttttcctgggtataaggtgtactcctgggt

SEQ ID NO: 29330 - DNA, 51 bp, Homo sapiens
aaaatatctagagacattggaggacaactatctataaaattaaggcataga

SEQ ID NO: 29331 - DNA, 33 bp, Homo sapiens
tataaaatgcaagacaaagttcagatgttttta

SEQ ID NO: 29332 - DNA, 33 bp, Homo sapiens
agctacagaacacggtaaccatacacacttggc

SEQ ID NO: 29333 - DNA, 51 bp, Homo sapiens
tgaatgctgcagtgagtaatttctacgcatattgttctgaaccatagtttg

SEQ ID NO: 29334 - DNA, 51 bp, Homo sapiens
tgtttctcaaaacaaaatcaaaattcaactatcatatgatcaagcaatacc

SEQ ID NO: 29335 - DNA, 33 bp, Homo sapiens
gaggaaactcatgctaaatgaaaaaccaacaag

SEQ ID NO: 29336 - DNA, 33 bp, Homo sapiens
gatagatcaaaaactcagaagagacaaagctcg

SEQ ID NO: 29337 - DNA, 33 bp, Homo sapiens
gcataaaattctgtcaatctgttaaacttgtaa

SEQ ID NO: 29338 - DNA, 33 bp, Homo sapiens
tgcagttccttccatcaagagacggagtcaatt

SEQ ID NO: 29339 - DNA, 33 bp, Homo sapiens
cctgaagtcaaccacaatgaatggtgagtctgg

SEQ ID NO: 29340 - DNA, 33 bp, Homo sapiens
agaagacatgaagaggaaattcatgaagtagaa

SEQ ID NO: 29341 - DNA, 33 bp, Homo sapiens
aaccaagatattgacactgatattgtcaggtta

SEQ ID NO: 29342 - DNA, 33 bp, Homo sapiens
taattctccatcttaacatttctcatgccacat

SEQ ID NO: 29343 - DNA, 33 bp, Homo sapiens
ggatgctggccaggccaaaataatagatgccca

SEQ ID NO: 29344 - DNA, 33 bp, Homo sapiens
gtgttctctgctttgacgtttggccaaaatcct

SEQ ID NO: 29345 - DNA, 33 bp, Homo sapiens
ccaatcagccatagccagaaggtgcgtaggact

SEQ ID NO: 29346 - DNA, 33 bp, Homo sapiens
ctctgcaatatggttcactgtaagaatgggaaa

SEQ ID NO: 29347 - DNA, 33 bp, Homo sapiens
gaggggattataggaaagaacagcattgatacc

SEQ ID NO: 29348 - DNA, 33 bp, Homo sapiens
ctcccagaaagaggcccgccttagtatccctgc

SEQ ID NO: 29349 - DNA, 33 bp, Homo sapiens
atgccttgctgtaggacctgtggattagcagta

SEQ ID NO: 29350 - DNA, 33 bp, Homo sapiens
caagaatagctgaggcaatcttcaagaacaaag

SEQ ID NO: 29351 - DNA, 33 bp, Homo sapiens
tctagtcctctcaggcaacgggcactttttcct

SEQ ID NO: 29352 - DNA, 33 bp, Homo sapiens
ttggcagctgtggaaaacctggtaagaactgta

SEQ ID NO: 29353 - DNA, 33 bp, Homo sapiens
cgtattccttgcttaactgtgaactccagaaag

SEQ ID NO: 29354 - DNA, 33 bp, Homo sapiens
acctttctacaagcacacatttaagcttataca

SEQ ID NO: 29355 - DNA, 33 bp, Homo sapiens
ggggcacgctcaagaaaagcacctccattaatt

SEQ ID NO: 29356 - DNA, 33 bp, Homo sapiens
acatataccagtggaacggaacagataacctag

SEQ ID NO: 29357 - DNA, 33 bp, Homo sapiens
gtagcagcaaagcgaacgtagaaaagcagggac

SEQ ID NO: 29358 - DNA, 33 bp, Homo sapiens
tttgttctgtggataaaaaagtggtagagcctg

SEQ ID NO: 29359 - DNA, 33 bp, Homo sapiens
ctacaccatgcccaaacttgtgacctatgaaac

SEQ ID NO: 29360 - DNA, 33 bp, Homo sapiens
attaaatattgctttcaaatggaaacgtaattt

SEQ ID NO: 29361 - DNA, 33 bp, Homo sapiens
cagtgtctaatttctgaaattgcaaaccataac

SEQ ID NO: 29362 - DNA, 33 bp, Homo sapiens
atgctgccctgttagacgtgtaaagcagcccta

SEQ ID NO: 29363 - DNA, 33 bp, Homo sapiens
ttgatagtagagtcaaagtaaattagtaataca

SEQ ID NO: 29364 - DNA, 33 bp, Homo sapiens
tattaccagttgtaaacagagcagggagaagtt

SEQ ID NO: 29365 - DNA, 33 bp, Homo sapiens
gaccctgagaatgaaacgaggggaagggaataa

SEQ ID NO: 29366 - DNA, 33 bp, Homo sapiens
acaaaggtacaatgccaaatggctttcatctgt

SEQ ID NO: 29367 - DNA, 33 bp, Homo sapiens
ttcctctgtccaaagcaacatacaagtaacagg

SEQ ID NO: 29368 - DNA, 51 bp, Homo sapiens
tacttgaacccaacttatgcttaaagattgaaacatttaccaaatatcttc

SEQ ID NO: 29369 - DNA, 51 bp, Homo sapiens
ggtcattttattgttttgttttgaactcaagtggcagacatagacactggc

SEQ ID NO: 29370 - DNA, 33 bp, Homo sapiens
agaatacacttactgaaaataaaacatgaagag

SEQ ID NO: 29371 - DNA, 51 bp, Homo sapiens
ggtactttttctccctcaaataaataagctaaataatgaagctcattcata

SEQ ID NO: 29372 - DNA, 33 bp, Homo sapiens
caaatgttgctcaattaaagaatgaataattac

SEQ ID NO: 29373 - DNA, 33 bp, Homo sapiens
gagaagcatgatggcaaatgaaatcttatattg

SEQ ID NO: 29374 - DNA, 33 bp, Homo sapiens
gacattacccgtgctaagagaatataggatcag

SEQ ID NO: 29375 - DNA, 33 bp, Homo sapiens
tgtcaacaggataagcacatttggaccatgata

SEQ ID NO: 29376 - DNA, 33 bp, Homo sapiens
gaatgaaacctcagaaatggcctgtatttattt

SEQ ID NO: 29377 - DNA, 33 bp, Homo sapiens
gtaataagctccttaaatgattcctgatcccag

SEQ ID NO: 29378 - DNA, 33 bp, Homo sapiens
tatgatttccatgttacgttggctttggcacag

SEQ ID NO: 29379 - DNA, 33 bp, Homo sapiens
ctctctgattcagtaacgctaatccttggactc

SEQ ID NO: 29380 - DNA, 33 bp, Homo sapiens
agagactagaaagcaaatccaattcaaatcact

SEQ ID NO: 29381 - DNA, 33 bp, Homo sapiens
actacatctttcccagaccacacagctggatga

SEQ ID NO: 29382 - DNA, 33 bp, Homo sapiens
cacaactcaagcatcaaaagctccatgtccaca

SEQ ID NO: 29383 - DNA, 33 bp, Homo sapiens
agatggtaacttccacacagaaggctatgttgg

SEQ ID NO: 29384 - DNA, 33 bp, Homo sapiens
gtcacgatgcttaatgccacttgcattgttagc

SEQ ID NO: 29385 - DNA, 51 bp, Homo sapiens
ctgctgtacagcaagattcatgcaaaagtctacattttctgctttcaagta

SEQ ID NO: 29386 - DNA, 33 bp, Homo sapiens
gttgaggtaaaatcaccggaatctagtgtcata

SEQ ID NO: 29387 - DNA, 33 bp, Homo sapiens
aagtaacacattctgccctgtgctggcaattct

SEQ ID NO: 29388 - DNA, 51 bp, Homo sapiens
ggggtgagggtaataagctccttaaatgattcctgatcccagctgcactga

SEQ ID NO: 29389 - DNA, 33 bp, Homo sapiens
gactggctgacaattacatccatgcagtgttag

SEQ ID NO: 29390 - DNA, 33 bp, Homo sapiens
agggccaagacaccaaagcaggtatatgcctaa

SEQ ID NO: 29391 - DNA, 33 bp, Homo sapiens
tgtactaaaaagctaaacagcacttctgtggac

SEQ ID NO: 29392 - DNA, 33 bp, Homo sapiens
acctgagatagcaaagaaagtctatagtacatt

SEQ ID NO: 29393 - DNA, 33 bp, Homo sapiens
tataaagtagccaaagacaaagtagaatttacc

SEQ ID NO: 29394 - DNA, 33 bp, Homo sapiens
cttccaagcactgacaaaaatgttgtactctta

SEQ ID NO: 29395 - DNA, 33 bp, Homo sapiens
tttgtgagctcacttacgatgtattatgcttag

SEQ ID NO: 29396 - DNA, 33 bp, Homo sapiens
ggggttacagtagggcaagaaaagtatgaggag

SEQ ID NO: 29397 - DNA, 33 bp, Homo sapiens
ggggtaagtgaccgatcagtaagagattgtgct

SEQ ID NO: 29398 - DNA, 33 bp, Homo sapiens
tgaccagttgacctcaagaacaggggcccactc

SEQ ID NO: 29399 - DNA, 33 bp, Homo sapiens
ccacatctgtgaatgacgtagtgcaaatatctc

SEQ ID NO: 29400 - DNA, 51 bp, Homo sapiens
acaagattacctgagaatgtcattaacaattttatcgtttcaattcagaaa

SEQ ID NO: 29401 - DNA, 33 bp, Homo sapiens
tccactcggaaacagcaaggtagtacacaaaga

SEQ ID NO: 29402 - DNA, 33 bp, Homo sapiens
gatataggctgcttcactcatctccaaccgttt

SEQ ID NO: 29403 - DNA, 51 bp, Homo sapiens
accaactcttacctaccctctgtcaataacttactaattagaatccctgtc

SEQ ID NO: 29404 - DNA, 51 bp, Homo sapiens
gtggttgggatacaaatcttgaataaccatctattgtggccaccatagtct

SEQ ID NO: 29405 - DNA, 33 bp, Homo sapiens
aattagagtggaaaggccatgggtcagagtgtt

SEQ ID NO: 29406 - DNA, 33 bp, Homo sapiens
tcagacctacaaagacactatacttatagaacc

SEQ ID NO: 29407 - DNA, 33 bp, Homo sapiens
cgatggaacactagaacttagcctcttacagac

SEQ ID NO: 29408 - DNA, 33 bp, Homo sapiens
ttgtgccactgtactgaataagctgtagaagac

SEQ ID NO: 29409 - DNA, 33 bp, Homo sapiens
aggttaagtatttgtcaagcactgttatctacg

SEQ ID NO: 29410 - DNA, 33 bp, Homo sapiens
tccttgccaattagccaagtatctgtctttcct

SEQ ID NO: 29411 - DNA, 33 bp, Homo sapiens
tttatcctaactcttacagcaactagctttgag

SEQ ID NO: 29412 - DNA, 33 bp, Homo sapiens
tggttctgggaactcaaattatgaccttattgc

SEQ ID NO: 29413 - DNA, 33 bp, Homo sapiens
ttcattcaatttatgcaacacctttcatcttca

SEQ ID NO: 29414 - DNA, 33 bp, Homo sapiens
ctccatgagaattggaagtggtaaaaaagaact

SEQ ID NO: 29415 - DNA, 33 bp, Homo sapiens
tctgaacttgtttctacacacaggtaaaaaata

SEQ ID NO: 29416 - DNA, 33 bp, Homo sapiens
ttacagagtgggctaactggtactggattgtcc

SEQ ID NO: 29417 - DNA, 33 bp, Homo sapiens
acccagactgtatggcgcatctagcctcatcgt

SEQ ID NO: 29418 - DNA, 51 bp, Homo sapiens
agttacctggaaacacaaacgaaaacgaatgagaggaagatgaagaatagg

SEQ ID NO: 29419 - DNA, 33 bp, Homo sapiens
cctagatccagtagaaagcacttttgcgcacac

SEQ ID NO: 29420 - DNA, 33 bp, Homo sapiens
tctgttctatagcatacctggatttcagtaaag

SEQ ID NO: 29421 - DNA, 33 bp, Homo sapiens
catgtctcaagaaataagctgcaaatatatact

SEQ ID NO: 29422 - DNA, 33 bp, Homo sapiens
tgtgagcattaagggccaaaggcaaatgaagtg

SEQ ID NO: 29423 - DNA, 33 bp, Homo sapiens
ttagagccagacaaagaatatgcactcaacctt

SEQ ID NO: 29424 - DNA, 33 bp, Homo sapiens
aggtattgaatcaacccatgttcccatcaactg

SEQ ID NO: 29425 - DNA, 33 bp, Homo sapiens
gcttatactagtccaaataagcattaggtcata

SEQ ID NO: 29426 - DNA, 33 bp, Homo sapiens
ttaccttttcctgcacgctattcccccacatga

SEQ ID NO: 29427 - DNA, 33 bp, Homo sapiens
ttttgccctccctaccactcactctacttcata

SEQ ID NO: 29428 - DNA, 33 bp, Homo sapiens
gatttctggatcatacaatagttaatttcagtt

SEQ ID NO: 29429 - DNA, 33 bp, Homo sapiens
tgaaaccaattaggaaaatgtaggtgaagaagc

SEQ ID NO: 29430 - DNA, 33 bp, Homo sapiens
tgttcttcttactgtacatgaaatggctttgca

SEQ ID NO: 29431 - DNA, 51 bp, Homo sapiens
aaaatgaaaccagtctcatccatatcattgtcactgatacaagtgcatttt

SEQ ID NO: 29432 - DNA, 51 bp, Homo sapiens
ttagacacattcatcctgcaaacacggagtattctgttcattattctagtg

SEQ ID NO: 29433 - DNA, 51 bp, Homo sapiens
ttccaataatcttggcgaattgttacactgtaaactcagaaaattaacatt

SEQ ID NO: 29434 - DNA, 51 bp, Homo sapiens
cttcaaaattgtgtttctagcaactcactttaacttatgaacccttcattg

SEQ ID NO: 29435 - DNA, 51 bp, Homo sapiens
cttgcaactaatgtaaactacctcaaaataagagtcaactaagagtaccca

SEQ ID NO: 29436 - DNA, 33 bp, Homo sapiens
ctgaattatacactgtaaaagggtgaattttat

SEQ ID NO: 29437 - DNA, 33 bp, Homo sapiens
tatccaattaaactccacaaggttcatattaga

SEQ ID NO: 29438 - DNA, 33 bp, Homo sapiens
gtcagcaagaagaaccaaaaaataattccttcc

SEQ ID NO: 29439 - DNA, 33 bp, Homo sapiens
gctgcaaaaacctcaactggattacgttcaact

SEQ ID NO: 29440 - DNA, 33 bp, Homo sapiens
ccctcactatggtctgaaagtttatatttcccc

SEQ ID NO: 29441 - DNA, 33 bp, Homo sapiens
atgtagttcaatctaaaacatatgtcttcttca

SEQ ID NO: 29442 - DNA, 33 bp, Homo sapiens
gtcaccctggtaatgggaacagaaacattcagg

SEQ ID NO: 29443 - DNA, 33 bp, Homo sapiens
ttatctttcatcttccacttctttcattttctc

SEQ ID NO: 29444 - DNA, 33 bp, Homo sapiens
aggcctgttatttccacctctcaattacttctc

SEQ ID NO: 29445 - DNA, 33 bp, Homo sapiens
ggaggggaatgacacacagtgagcctgtcaaag

SEQ ID NO: 29446 - DNA, 33 bp, Homo sapiens
tccttccatagctttacacagttaacagattaa

SEQ ID NO: 29447 - DNA, 33 bp, Homo sapiens
tatttactcaactaacaactgctaaaatcaatg

SEQ ID NO: 29448 - DNA, 51 bp, Homo sapiens
ttctttcatcattgcttatgcatcactcatctaaaagggctgatctgatct

SEQ ID NO: 29449 - DNA, 33 bp, Homo sapiens
aagtcggctccacagggcattaattccactata

SEQ ID NO: 29450 - DNA, 33 bp, Homo sapiens
catacaaccagttgacgaaacttttggacatgg

SEQ ID NO: 29451 - DNA, 33 bp, Homo sapiens
tcttgcctggaaagaacgtatgaggccttctca

SEQ ID NO: 29452 - DNA, 33 bp, Homo sapiens
atgctccaaaagctaactctttcattgataagt

SEQ ID NO: 29453 - DNA, 33 bp, Homo sapiens
ctgaggggttacaggacggagtgaccaaagtgg

SEQ ID NO: 29454 - DNA, 33 bp, Homo sapiens
cccagtatgtggcatcaagtaagttctcaataa

SEQ ID NO: 29455 - DNA, 33 bp, Homo sapiens
ctgaagtgagcaataacggctgatccctgtccc

SEQ ID NO: 29456 - DNA, 33 bp, Homo sapiens
ttaaataacctgctcaatatcacaaagccgagt

SEQ ID NO: 29457 - DNA, 33 bp, Homo sapiens
atcaacaggaaatctacacaaactctgtaatgc

SEQ ID NO: 29458 - DNA, 33 bp, Homo sapiens
ggatcatctagaaataccttatgggctacatct

SEQ ID NO: 29459 - DNA, 33 bp, Homo sapiens
caaagttatctatgcactccaatcaacagtgag

SEQ ID NO: 29460 - DNA, 51 bp, Homo sapiens
ataaaaaatcaaaagtcaatagtcaactgatactcagtcttgatttagctc

SEQ ID NO: 29461 - DNA, 33 bp, Homo sapiens
agggtatcaagttatacgttgcagcacaccact

SEQ ID NO: 29462 - DNA, 33 bp, Homo sapiens
ttttcaacaaatattcaacaagaactcagtcag

SEQ ID NO: 29463 - DNA, 33 bp, Homo sapiens
agataaggcagcataaagctagacgttaatttt

SEQ ID NO: 29464 - DNA, 33 bp, Homo sapiens
gggaagctaagcctgacattaaaaggactcggt

SEQ ID NO: 29465 - DNA, 33 bp, Homo sapiens
ataatcactgaaccataacggcaggttcacatc

SEQ ID NO: 29466 - DNA, 33 bp, Homo sapiens
ttctccgtattttaccgcacttcttgtcccagc

SEQ ID NO: 29467 - DNA, 33 bp, Homo sapiens
gtagccttcctggagacgatctcaccaacactt

SEQ ID NO: 29468 - DNA, 33 bp, Homo sapiens
tatttgaaattcgcacactattctagtctaacc

SEQ ID NO: 29469 - DNA, 33 bp, Homo sapiens
gcagattttttaaaaccaagaacattctatcct

SEQ ID NO: 29470 - DNA, 33 bp, Homo sapiens
acacgagctggcttaacgggcagcctaacctgc

SEQ ID NO: 29471 - DNA, 33 bp, Homo sapiens
tgagtgttcatagatacgcagagaggaagtcac

SEQ ID NO: 29472 - DNA, 33 bp, Homo sapiens
actcatatataatgacacagacaagaccgagac

SEQ ID NO: 29473 - DNA, 33 bp, Homo sapiens
caaaagcacagtgtcacgaaatagcctgaagtg

SEQ ID NO: 29474 - DNA, 33 bp, Homo sapiens
aagcctcggacacaaaagagtttgtattcacac

SEQ ID NO: 29475 - DNA, 33 bp, Homo sapiens
aaggaccttgtttttacgtgtctggactagcat

SEQ ID NO: 29476 - DNA, 33 bp, Homo sapiens
attccccttctggttgaagatttagtgatcagt

SEQ ID NO: 29477 - DNA, 33 bp, Homo sapiens
acttctgagctggccacggaggaaaaagatgtg

SEQ ID NO: 29478 - DNA, 33 bp, Homo sapiens
gctgctgcgtggggtacggcattttctttctgc

SEQ ID NO: 29479 - DNA, 33 bp, Homo sapiens
gacagacaaccatgcaagtgatccctaaattat

SEQ ID NO: 29480 - DNA, 33 bp, Homo sapiens
cccagtagttggggaacgagtacctggacctac

SEQ ID NO: 29481 - DNA, 51 bp, Homo sapiens
ggagattctagatttatttggtctaactgggaaataccctccttttgtaaa

SEQ ID NO: 29482 - DNA, 51 bp, Homo sapiens
cactgggagtgcttatagatgataaatgggaatctactcctatatgtcacc

SEQ ID NO: 29483 - DNA, 51 bp, Homo sapiens
gtgcctcatgatgattgtatgactcacattgggatttgggctctgggctaa

SEQ ID NO: 29484 - DNA, 51 bp, Homo sapiens
acacacaaatttttttaatccagaaactacataatgatcactttatatttt

SEQ ID NO: 29485 - DNA, 33 bp, Homo sapiens
cacaccttttctttcccacctcctcagaagatg

SEQ ID NO: 29486 - DNA, 33 bp, Homo sapiens
tacaatggaaaatgtccaggttgaagcaagttc

SEQ ID NO: 29487 - DNA, 33 bp, Homo sapiens
acacacttcactgcacaaagtaggaatctcaga

SEQ ID NO: 29488 - DNA, 33 bp, Homo sapiens
tggtaagaactgaaacgctctatacttacgcag

SEQ ID NO: 29489 - DNA, 33 bp, Homo sapiens
cacctttcccagcatgacaaacttacttgaaca

SEQ ID NO: 29490 - DNA, 33 bp, Homo sapiens
gaattcttgtaaaggcaaattatcttctccaag

SEQ ID NO: 29491 - DNA, 33 bp, Homo sapiens
cagtcatactggctgaaaaaacgagaacattgt

SEQ ID NO: 29492 - DNA, 33 bp, Homo sapiens
tccctgggctccaaaacctgtgccagctggaaa

SEQ ID NO: 29493 - DNA, 51 bp, Homo sapiens
tcaaaagatgggaaattgtaaccaaatgttgaaatatgataattaactcct

SEQ ID NO: 29494 - DNA, 33 bp, Homo sapiens
gaaatgtgtggaatcacagaatcattttcccag

SEQ ID NO: 29495 - DNA, 51 bp, Homo sapiens
tctagccctcaggaagctgatttgtaaaaataccaagggttggcctgacag

SEQ ID NO: 29496 - DNA, 33 bp, Homo sapiens
cacatccttcaaatgcaagaactacaccataat

SEQ ID NO: 29497 - DNA, 33 bp, Homo sapiens
gggaaggagatcaaaacctaaagttgttacatt

SEQ ID NO: 29498 - DNA, 33 bp, Homo sapiens
aattgacaaacaaaaacttggatatcgctacag

SEQ ID NO: 29499 - DNA, 51 bp, Homo sapiens
cacaagaggtatgcctaaaagtgcacgatttccatcagagaaatggacaga

SEQ ID NO: 29500 - DNA, 33 bp, Homo sapiens
agtgccataagttataaggaggacagcagcttc

SEQ ID NO: 29501 - DNA, 33 bp, Homo sapiens
actttctcaaggtcaaattaattccaaagacat

SEQ ID NO: 29502 - DNA, 33 bp, Homo sapiens
atctgtggcaagaaaccgtgttcaattactaaa

SEQ ID NO: 29503 - DNA, 33 bp, Homo sapiens
tggtctttgaactacaaaatcagaccacataga

SEQ ID NO: 29504 - DNA, 33 bp, Homo sapiens
cttaaaggtagtccaaccattagagggaattag

SEQ ID NO: 29505 - DNA, 33 bp, Homo sapiens
ttcagaactatgtgtgaaccagattgagtgtga

SEQ ID NO: 29506 - DNA, 33 bp, Homo sapiens
ttaatggcacgacccaagaactatcaatgagtt

SEQ ID NO: 29507 - DNA, 33 bp, Homo sapiens
gaaattcaactcttcaataaaagggaaaaacta

SEQ ID NO: 29508 - DNA, 33 bp, Homo sapiens
gcatggagggatttaacagcaagaagatacaat

SEQ ID NO: 29509 - DNA, 33 bp, Homo sapiens
tttctgggcactactacgtgaatatctgcccag

SEQ ID NO: 29510 - DNA, 33 bp, Homo sapiens
ttttcatctttctcacactgtatacctgagttt

SEQ ID NO: 29511 - DNA, 33 bp, Homo sapiens
agccaccacgccccaacagagcttcagttttac

SEQ ID NO: 29512 - DNA, 51 bp, Homo sapiens
tgctgtcttcttccacaggtatggcaacaatttctttcacaagctactcaa

SEQ ID NO: 29513 - DNA, 51 bp, Homo sapiens
ttacatatgaagccagtactcaaaaaaaaaaatcaaagtccataatctttc

SEQ ID NO: 29514 - DNA, 33 bp, Homo sapiens
atttgaaggagagggtaaaatcacttgaaagtg

SEQ ID NO: 29515 - DNA, 51 bp, Homo sapiens
aaccttcatagttttttgctgtttgatttatatgaaagtggttttcctgta

SEQ ID NO: 29516 - DNA, 33 bp, Homo sapiens
atactttcatagaataaggaaacatgaaatggg

SEQ ID NO: 29517 - DNA, 33 bp, Homo sapiens
ccactctcccaaggataagcacccagatagcct

SEQ ID NO: 29518 - DNA, 33 bp, Homo sapiens
ttggtttggtcccaatcaagaacattaaaaaaa

SEQ ID NO: 29519 - DNA, 33 bp, Homo sapiens
ttttgaaagcatatacagattgagcatcccaaa

SEQ ID NO: 29520 - DNA, 33 bp, Homo sapiens
aagtagacatatatggaaaagtcctactgcctt

SEQ ID NO: 29521 - DNA, 33 bp, Homo sapiens
gaaagagggaccctacacgagaaagaaatagaa

SEQ ID NO: 29522 - DNA, 33 bp, Homo sapiens
ctggcatttcttttcacgtagcattatattaaa

SEQ ID NO: 29523 - DNA, 33 bp, Homo sapiens
tggatcttgttgttaccatggatgacatttgtc

SEQ ID NO: 29524 - DNA, 33 bp, Homo sapiens
aatctccactaaatacgaatgactgcttatagt

SEQ ID NO: 29525 - DNA, 33 bp, Homo sapiens
ctttgtaggacaattacattaatcccaaagtta

SEQ ID NO: 29526 - DNA, 33 bp, Homo sapiens
cttcctacttatgtcacgtaactttgggattaa

SEQ ID NO: 29527 - DNA, 33 bp, Homo sapiens
gtctccattagatcatcaggtgacagtaatagt

SEQ ID NO: 29528 - DNA, 33 bp, Homo sapiens
ttcagcctggagtgaaatgacagattgagaccc

SEQ ID NO: 29529 - DNA, 33 bp, Homo sapiens
aatacagagaacagtcaactatcatcatcattt

SEQ ID NO: 29530 - DNA, 33 bp, Homo sapiens
gtagcaatcagaggtgaagactgagagcaagcg

SEQ ID NO: 29531 - DNA, 33 bp, Homo sapiens
agtttcaagagtggacaaaaatataaaatttgc

SEQ ID NO: 29532 - DNA, 33 bp, Homo sapiens
tcaaaaaatgttaatacgtgctatgagaaaaca

SEQ ID NO: 29533 - DNA, 33 bp, Homo sapiens
ctccaggacctcaaataagagaatccctacatg

SEQ ID NO: 29534 - DNA, 33 bp, Homo sapiens
tttataacactctgaaatctcataagctattct

SEQ ID NO: 29535 - DNA, 33 bp, Homo sapiens
cataatagcactgaaacttaagaatgtgtccat

SEQ ID NO: 29536 - DNA, 33 bp, Homo sapiens
aagaaactgtggaaaaaattagatttatctgca

SEQ ID NO: 29537 - DNA, 33 bp, Homo sapiens
tgtgctataaggagaacttaagaaactgtggaa

SEQ ID NO: 29538 - DNA, 33 bp, Homo sapiens
catggaaaatacctcaatccaactgaccaaccg

SEQ ID NO: 29539 - DNA, 33 bp, Homo sapiens
ctcaagaatgtactggaaaaagtcattggtaat

SEQ ID NO: 29540 - DNA, 33 bp, Homo sapiens
ccttgtctccggagaaataaggaagaaggtttg

SEQ ID NO: 29541 - DNA, 33 bp, Homo sapiens
tgaactgaagataaaaccccaagtcttcaggat

SEQ ID NO: 29542 - DNA, 33 bp, Homo sapiens
gctgataggtagtacaagcaggaaacccacaga

SEQ ID NO: 29543 - DNA, 51 bp, Homo sapiens
attaaatgtttttgtttgatatcgtaaactgatttatcctttttctttaga

SEQ ID NO: 29544 - DNA, 33 bp, Homo sapiens
gaggaagagacacgaaagtagttccagaagtgg

SEQ ID NO: 29545 - DNA, 33 bp, Homo sapiens
aaatgactagaaatgcacttgagttggactaaa

SEQ ID NO: 29546 - DNA, 51 bp, Homo sapiens
ctgtgctgctttctccacctgctacagacacttattcctcaaatctcacgt

SEQ ID NO: 29547 - DNA, 51 bp, Homo sapiens
aaagtgatattgaagagatacacaacgattttaatatatgtaggaagtata

SEQ ID NO: 29548 - DNA, 51 bp, Homo sapiens
tttaaataggaataattggaaatgcaaagagttaagtgatctggttaaagt

SEQ ID NO: 29549 - DNA, 51 bp, Homo sapiens
tgtatctgctaactttactacagtactaccattttcgatattacttataaa

SEQ ID NO: 29550 - DNA, 51 bp, Homo sapiens
gagtgaataaattttctaaatgctgaatagctccccttgaagttctgctgc

SEQ ID NO: 29551 - DNA, 33 bp, Homo sapiens
ttttctttgaagtgtactaagttctgtgagttt

SEQ ID NO: 29552 - DNA, 33 bp, Homo sapiens
gtagctccttttcctaaatacctgtgagcaaca

SEQ ID NO: 29553 - DNA, 33 bp, Homo sapiens
ccaccttgttgagatacgtgactgttgtggagg

SEQ ID NO: 29554 - DNA, 33 bp, Homo sapiens
tgatcagcttgaaaaacgtagagggcaactcaa

SEQ ID NO: 29555 - DNA, 33 bp, Homo sapiens
atggtgtcaaaggggagcctcatgttcagcatt

SEQ ID NO: 29556 - DNA, 33 bp, Homo sapiens
ttaattaattaagtgtaaagtaactgctcaggt

SEQ ID NO: 29557 - DNA, 33 bp, Homo sapiens
gctgtcacaatttgtacgtttgttgggcaaaat

SEQ ID NO: 29558 - DNA, 33 bp, Homo sapiens
atattctcttacatcacaaagtaagtatcaaaa

SEQ ID NO: 29559 - DNA, 33 bp, Homo sapiens
ccatttcagttatcgacgatccagcccagtggc

SEQ ID NO: 29560 - DNA, 33 bp, Homo sapiens
agattgacatcttcacagaaactgcagacgtgg

SEQ ID NO: 29561 - DNA, 51 bp, Homo sapiens
acagctacaattttccaaatatacaacacttgtttcacatgtatctagaac

SEQ ID NO: 29562 - DNA, 51 bp, Homo sapiens
ggcattaaaagtagtcacttggttcaaacaagcattaaaaacacatgtttc

SEQ ID NO: 29563 - DNA, 33 bp, Homo sapiens
cacaaaagcctgtaccaaaaacagagatgactt

SEQ ID NO: 29564 - DNA, 33 bp, Homo sapiens
tgtaagagctggaaaactagtcctaagaggctg

SEQ ID NO: 29565 - DNA, 33 bp, Homo sapiens
ataaatggccaaggtaacacttatgacaaatct

SEQ ID NO: 29566 - DNA, 33 bp, Homo sapiens
gaaagacactataggaaccgttttgattctcta

SEQ ID NO: 29567 - DNA, 33 bp, Homo sapiens
aatactggataattaccggccaaccaattggat

SEQ ID NO: 29568 - DNA, 33 bp, Homo sapiens
tacctccttttgtagcactgtaataaatcctta

SEQ ID NO: 29569 - DNA, 51 bp, Homo sapiens
tcaaataactttccaagactccacactatccaacttagtgaaccttcatca

SEQ ID NO: 29570 - DNA, 33 bp, Homo sapiens
agaattgcttgtgatacattttgtctcattcaa

SEQ ID NO: 29571 - DNA, 33 bp, Homo sapiens
tttccttagtcttcaaatggcatcttttctgtc

SEQ ID NO: 29572 - DNA, 33 bp, Homo sapiens
ctgtgcattgtcaaaccccttaccaggacgtcc

SEQ ID NO: 29573 - DNA, 51 bp, Homo sapiens
ttgtttaatttaaaatataatatcacctactttgcacattatgctctaaaa

SEQ ID NO: 29574 - DNA, 33 bp, Homo sapiens
aggagaatagggcagagaagtatgtgaaactac

SEQ ID NO: 29575 - DNA, 51 bp, Homo sapiens
gtaaagattaaacaatcttcttaataaactttgcattaggaacaattaaat

SEQ ID NO: 29576 - DNA, 33 bp, Homo sapiens
tagattgatgttgctaccatataatttccaatt

SEQ ID NO: 29577 - DNA, 51 bp, Homo sapiens
ctcaatgacattcaggtttgccatactggagcaagtagtgttaggccatca

SEQ ID NO: 29578 - DNA, 33 bp, Homo sapiens
ccatcaagacagacaaatcaacaatactaagga

SEQ ID NO: 29579 - DNA, 33 bp, Homo sapiens
tttcaaagaagagataccagagaatacagcttt

SEQ ID NO: 29580 - DNA, 33 bp, Homo sapiens
tcatttctaaccattgccaatacaaacacaata

SEQ ID NO: 29581 - DNA, 33 bp, Homo sapiens
ccacaatatgaaatggccaaacaataaacaaca

SEQ ID NO: 29582 - DNA, 33 bp, Homo sapiens
tattttttaatcaatacggaaattcagcctgga

SEQ ID NO: 29583 - DNA, 33 bp, Homo sapiens
agaactgtatatgagccattttcctgaatataa

SEQ ID NO: 29584 - DNA, 33 bp, Homo sapiens
tgctttcagcaacaaacaaccaccaagcaataa

SEQ ID NO: 29585 - DNA, 33 bp, Homo sapiens
gtgtgcttgcaactgaagtgagaccacaaagta

SEQ ID NO: 29586 - DNA, 33 bp, Homo sapiens
taaataaataagacacagtaaaggatcatgttt

SEQ ID NO: 29587 - DNA, 33 bp, Homo sapiens
agcaggtgctcactctaaaaaatacaatttaaa

SEQ ID NO: 29588 - DNA, 33 bp, Homo sapiens
ttggaatacctccttcaatcagcacagagcttt

SEQ ID NO: 29589 - DNA, 33 bp, Homo sapiens
catccagaacttcccacatacaggcacaaacaa

SEQ ID NO: 29590 - DNA, 33 bp, Homo sapiens
ataaaacttggttctacgaaacaatcacatcct

SEQ ID NO: 29591 - DNA, 33 bp, Homo sapiens
ctatctaccatatcacagagtctctctacttta

SEQ ID NO: 29592 - DNA, 33 bp, Homo sapiens
aataaaaaagaaatggaacagaaaaagctggta

SEQ ID NO: 29593 - DNA, 33 bp, Homo sapiens
gagagaagagggcttacagaagcagcaggcact

SEQ ID NO: 29594 - DNA, 33 bp, Homo sapiens
gaaacgtaataagtacaagagtgtagaggcaat

SEQ ID NO: 29595 - DNA, 33 bp, Homo sapiens
tacagtacaggttcacaggcttattcttcacaa

SEQ ID NO: 29596 - DNA, 33 bp, Homo sapiens
aatgctcaaatgtgtcaaagtgccaattgatct

SEQ ID NO: 29597 - DNA, 33 bp, Homo sapiens
ttgtgcttttcccagacagatgaaaagtgacaa

SEQ ID NO: 29598 - DNA, 33 bp, Homo sapiens
ttcatagtggacgctgaagcctttagagtggag

SEQ ID NO: 29599 - DNA, 33 bp, Homo sapiens
tgcagatagttgtcaacatttggtgtttttgca

SEQ ID NO: 29600 - DNA, 33 bp, Homo sapiens
tgagcgctgtctctacaccatagccattgcatt

SEQ ID NO: 29601 - DNA, 33 bp, Homo sapiens
atgtactttttagatgccaatttctgttgtgtt

SEQ ID NO: 29602 - DNA, 33 bp, Homo sapiens
actcacttattgaaccaacaaatatttatcatg

SEQ ID NO: 29603 - DNA, 33 bp, Homo sapiens
taaatgtggaggaaatcagaagaagtgagtgct

SEQ ID NO: 29604 - DNA, 33 bp, Homo sapiens
gggtcaggctgaaaaactatttgataaagtcat

SEQ ID NO: 29605 - DNA, 33 bp, Homo sapiens
attggagtagtataacaccacctcttaaagctg

SEQ ID NO: 29606 - DNA, 33 bp, Homo sapiens
tggatatttgaaaaaactctgtctattctggac

SEQ ID NO: 29607 - DNA, 33 bp, Homo sapiens
acattaaaatcaggcactaaactgtcttcttga

SEQ ID NO: 29608 - DNA, 33 bp, Homo sapiens
cgcaggtttgcttacactcttgggagatagaga

SEQ ID NO: 29609 - DNA, 33 bp, Homo sapiens
atctgcctagtggacacctcatataaatggaca

SEQ ID NO: 29610 - DNA, 33 bp, Homo sapiens
cattttctatcacaaaattctgtaaaatctacc

SEQ ID NO: 29611 - DNA, 33 bp, Homo sapiens
cctctcttatttcctccaatggtagtttgtagt

SEQ ID NO: 29612 - DNA, 51 bp, Homo sapiens
catgcccttcacttacttattttaccgctggttccaacagtcagccctatt

SEQ ID NO: 29613 - DNA, 33 bp, Homo sapiens
cacaaaccaaccctcaatcttgaatcttcttta

SEQ ID NO: 29614 - DNA, 33 bp, Homo sapiens
agatatactgagaaaactccctgacagaactga

SEQ ID NO: 29615 - DNA, 33 bp, Homo sapiens
gtatctacatataagaactaccctatgccaggc

SEQ ID NO: 29616 - DNA, 33 bp, Homo sapiens
tcttgaaaatggtctaaggatatacagcaaatg

SEQ ID NO: 29617 - DNA, 33 bp, Homo sapiens
ctctctaatctgtgaaggttattttgattacta

SEQ ID NO: 29618 - DNA, 33 bp, Homo sapiens
ttctcttctctgaagccgaacacatcacaaata

SEQ ID NO: 29619 - DNA, 33 bp, Homo sapiens
cactttcctccttcctaaattccttctgatata

SEQ ID NO: 29620 - DNA, 51 bp, Homo sapiens
agtagaatgttgaatcatgaaagaagtaacaacaaattgcatgcacttcac

SEQ ID NO: 29621 - DNA, 51 bp, Homo sapiens
agggcagacccataccagagtttaacgtggcaacaaagtgtggttagacag

SEQ ID NO: 29622 - DNA, 51 bp, Homo sapiens
tcagatttctgacacaatggtaacacctatcccttctgcctgtgactgcca

SEQ ID NO: 29623 - DNA, 33 bp, Homo sapiens
gggctgagaggagatacattcaagggccacttt

SEQ ID NO: 29624 - DNA, 51 bp, Homo sapiens
ttttcactgaattgctataaccaaacctatagttcctgttgtcctgctgtc

SEQ ID NO: 29625 - DNA, 33 bp, Homo sapiens
ccgtatgtgggtttacagccccaacagggagta

SEQ ID NO: 29626 - DNA, 33 bp, Homo sapiens
caaagttacactctataaaacacgacctgtttg

SEQ ID NO: 29627 - DNA, 33 bp, Homo sapiens
tgatctctgcttccaacctaggaccagagaaat

SEQ ID NO: 29628 - DNA, 33 bp, Homo sapiens
atctgtgtgagctggcaagtctatcttggtctc

SEQ ID NO: 29629 - DNA, 33 bp, Homo sapiens
ttatagcaatgagaacgaacacagaactagcat

SEQ ID NO: 29630 - DNA, 33 bp, Homo sapiens
tgacctgagatggtcaaaaccaggcgacacatg

SEQ ID NO: 29631 - DNA, 33 bp, Homo sapiens
agacacatttatgaaaacaaactaatatcacat

SEQ ID NO: 29632 - DNA, 51 bp, Homo sapiens
tagctcccaactggtatgatctgaaaaatcagcggttactagggtaggaga

SEQ ID NO: 29633 - DNA, 33 bp, Homo sapiens
gaaagagaaaatagaactggaagctgcaggcta

SEQ ID NO: 29634 - DNA, 33 bp, Homo sapiens
ctcttcagagtattgacacaacacaaggcacca

SEQ ID NO: 29635 - DNA, 33 bp, Homo sapiens
ctttaagatacatgcaccatatgacattttagt

SEQ ID NO: 29636 - DNA, 33 bp, Homo sapiens
aaaggaattactagtgccaaacgctttttgcta

SEQ ID NO: 29637 - DNA, 33 bp, Homo sapiens
aataaaatcagccacaatgaaaagtaaaaatat

SEQ ID NO: 29638 - DNA, 33 bp, Homo sapiens
tacttcaacacatttcaagttaaaagatatttc

SEQ ID NO: 29639 - DNA, 33 bp, Homo sapiens
tatagagactccttcacgtagcaaaactttttt

SEQ ID NO: 29640 - DNA, 33 bp, Homo sapiens
catttctgaaggcaaaaagtaaaacaagatctc

SEQ ID NO: 29641 - DNA, 33 bp, Homo sapiens
tattattttgtttaacactctcattaatgctgt

SEQ ID NO: 29642 - DNA, 33 bp, Homo sapiens
acctcccctaccaaatgaatcagttaagtcaat

SEQ ID NO: 29643 - DNA, 33 bp, Homo sapiens
gatgatgtttaagttgcaaccacatacctgtac

SEQ ID NO: 29644 - DNA, 51 bp, Homo sapiens
tccggtttcacagttgtcaaaagtacctgaaattgacaaacattgtaaact

SEQ ID NO: 29645 - DNA, 33 bp, Homo sapiens
catgagacagttgaaacgtctgaggagtccttg

SEQ ID NO: 29646 - DNA, 33 bp, Homo sapiens
atacctgtctgcagtaactaggctccatgatgg

SEQ ID NO: 29647 - DNA, 33 bp, Homo sapiens
agcaggcttcagagtcacttgaaggatatgtta

SEQ ID NO: 29648 - DNA, 33 bp, Homo sapiens
tttagagaattcttccaaatctgatccaatacc

SEQ ID NO: 29649 - DNA, 33 bp, Homo sapiens
gctgcacagtgttccacggtaccacattgtctt

SEQ ID NO: 29650 - DNA, 33 bp, Homo sapiens
ttgggaaccttcctccaaagcctcagtaaattt

SEQ ID NO: 29651 - DNA, 33 bp, Homo sapiens
agaatataatatgttcaagaaggaatacgaaga

SEQ ID NO: 29652 - DNA, 33 bp, Homo sapiens
attgattaagttggaaaagcagaagaaaacgtt

SEQ ID NO: 29653 - DNA, 51 bp, Homo sapiens
atttattattgtctggcatagaatcaagtttaggtaagagggtagccttca

SEQ ID NO: 29654 - DNA, 33 bp, Homo sapiens
tgcccactgtgaaaccacaaataaaagtgagag

SEQ ID NO: 29655 - DNA, 51 bp, Homo sapiens
atgaatcaaggttatatttctcttgaaagacgaaaacattacctataccaa

SEQ ID NO: 29656 - DNA, 33 bp, Homo sapiens
cacacaaaaggcatcaaagttcagaaatgttcg

SEQ ID NO: 29657 - DNA, 33 bp, Homo sapiens
ctttcctagttggggacgcctaaacttcatcga

SEQ ID NO: 29658 - DNA, 33 bp, Homo sapiens
acttgagagtaccatgaaggttacaattaacat

SEQ ID NO: 29659 - DNA, 33 bp, Homo sapiens
tttctcactgaaatcacattttaaatggagaaa

SEQ ID NO: 29660 - DNA, 33 bp, Homo sapiens
tctgatgataccaataaacaaagagacacacac

SEQ ID NO: 29661 - DNA, 33 bp, Homo sapiens
tccaattgttacaaaaagttcggagtctaaaca

SEQ ID NO: 29662 - DNA, 33 bp, Homo sapiens
gatctccttcactccaaaatgtctcatggattt

SEQ ID NO: 29663 - DNA, 33 bp, Homo sapiens
caaagtgtatactcaaggactaattaggatgct

SEQ ID NO: 29664 - DNA, 33 bp, Homo sapiens
atagattagatagagcaatattatagagatgat

SEQ ID NO: 29665 - DNA, 33 bp, Homo sapiens
ttacataaggttagaaattcaaatacaatcaac

SEQ ID NO: 29666 - DNA, 33 bp, Homo sapiens
aatgtataatgatgcaaaccagatcagagagag

SEQ ID NO: 29667 - DNA, 33 bp, Homo sapiens
tattttatcttttagggatctgctaatcacttt

SEQ ID NO: 29668 - DNA, 33 bp, Homo sapiens
ttacttctcaaactatgactacgacctgccagg

SEQ ID NO: 29669 - DNA, 33 bp, Homo sapiens
tcctggctcctgtagcccggtggagtgtgcagc

SEQ ID NO: 29670 - DNA, 33 bp, Homo sapiens
actggctctcaaacaaaggttactctagacctg

SEQ ID NO: 29671 - DNA, 33 bp, Homo sapiens
tactgggattcacaacagttaaataatttttgc

SEQ ID NO: 29672 - DNA, 33 bp, Homo sapiens
atgactaccatctaaaaaatagttctcggttag

SEQ ID NO: 29673 - DNA, 33 bp, Homo sapiens
agtaacaattttaggccaagtatactacactca

SEQ ID NO: 29674 - DNA, 51 bp, Homo sapiens
gaagttttttcacgaaattatagaacaaagtttacacacaatggatctcta

SEQ ID NO: 29675 - DNA, 51 bp, Homo sapiens
aactgaaaattttataatggaaataagaagtataactctccaaatataagc

SEQ ID NO: 29676 - DNA, 33 bp, Homo sapiens
gatgtctgtgcttccaatgagcttcctggagga

SEQ ID NO: 29677 - DNA, 33 bp, Homo sapiens
ccaaaagaagattggcaaaggagaggagaaaga

SEQ ID NO: 29678 - DNA, 33 bp, Homo sapiens
ctggcaccttgaggagaagccaatctgacagga

SEQ ID NO: 29679 - DNA, 33 bp, Homo sapiens
gctggatatagaggtacaacctagctttgaggt

SEQ ID NO: 29680 - DNA, 33 bp, Homo sapiens
tataataatcacagccactgaaattttgtcgct

SEQ ID NO: 29681 - DNA, 33 bp, Homo sapiens
gcctcacagtcttttccaaagctctaaacagct

SEQ ID NO: 29682 - DNA, 33 bp, Homo sapiens
acacagctaattcccaacatcacctaagaattc

SEQ ID NO: 29683 - DNA, 33 bp, Homo sapiens
accttgatgggcaaaacccaaattatggtttat

SEQ ID NO: 29684 - DNA, 33 bp, Homo sapiens
catttggatgtctcaacgactgactctttatgc

SEQ ID NO: 29685 - DNA, 33 bp, Homo sapiens
tacacaactttatacacggaatcaagttgcata

SEQ ID NO: 29686 - DNA, 33 bp, Homo sapiens
tcggatctccccattaacaagacatttataaga

SEQ ID NO: 29687 - DNA, 33 bp, Homo sapiens
cataccaaatcaacccacagtttcacaggaata

SEQ ID NO: 29688 - DNA, 33 bp, Homo sapiens
gctatgataattcaaactgaatgtgagttcact

SEQ ID NO: 29689 - DNA, 51 bp, Homo sapiens
aaaggaactaattcataaggtgtgagaaattcaaagaaatgtcacttgtgt

SEQ ID NO: 29690 - DNA, 51 bp, Homo sapiens
catccatcttgatcccataaggtaactcatttcttacagaatttagggcta

SEQ ID NO: 29691 - DNA, 33 bp, Homo sapiens
gtaatacacacatttcgaaacacatggcataat

SEQ ID NO: 29692 - DNA, 33 bp, Homo sapiens
cctggcctctgctcataaataaaggcactgctg

SEQ ID NO: 29693 - DNA, 33 bp, Homo sapiens
taataagacaatgaagcctgtaagacagttgta

SEQ ID NO: 29694 - DNA, 33 bp, Homo sapiens
ttagcacaagtctcacacatcttcagttttata

SEQ ID NO: 29695 - DNA, 33 bp, Homo sapiens
tttgctccaggttaggcagaagcccatgcaaga

SEQ ID NO: 29696 - DNA, 51 bp, Homo sapiens
gctaaagaaatatatgcgatgagtcaataaatacatatttattttcaagag

SEQ ID NO: 29697 - DNA, 33 bp, Homo sapiens
acagcttaatgataaacgactaatgtatgctgc

SEQ ID NO: 29698 - DNA, 33 bp, Homo sapiens
cactccctagacttacactatcttaaggcattt

SEQ ID NO: 29699 - DNA, 33 bp, Homo sapiens
gtttccactgaacttacgctctgttgtgtctct

SEQ ID NO: 29700 - DNA, 33 bp, Homo sapiens
taattctatcaaaatacaggttatggccaatct

SEQ ID NO: 29701 - DNA, 33 bp, Homo sapiens
tagatgctatgatcacagtcaacaaacatttag

SEQ ID NO: 29702 - DNA, 33 bp, Homo sapiens
tttcttggtctcaagacagaaaattgaaattat

SEQ ID NO: 29703 - DNA, 33 bp, Homo sapiens
ttcaggagtaaacctccatttgactgatggtag

SEQ ID NO: 29704 - DNA, 33 bp, Homo sapiens
gtattttgtttctggaccatacacattctgtga

SEQ ID NO: 29705 - DNA, 33 bp, Homo sapiens
tgggaagttggaaaggccagaattggagctaac

SEQ ID NO: 29706 - DNA, 51 bp, Homo sapiens
ctaacaaatgtctttgtgataacaacgaagttaaatgaactgaatttgcta

SEQ ID NO: 29707 - DNA, 33 bp, Homo sapiens
agttgctttttgtatacagtctaaggaaaaggg

SEQ ID NO: 29708 - DNA, 33 bp, Homo sapiens
gtattttgatcgcttacagaagctaagacggta

SEQ ID NO: 29709 - DNA, 33 bp, Homo sapiens
aattcactttgaggagcatttcaaagctgatcc

SEQ ID NO: 29710 - DNA, 33 bp, Homo sapiens
ttagggtcctttccaactctgagactctcatct

SEQ ID NO: 29711 - DNA, 33 bp, Homo sapiens
tcctgaaaggcagagaaataaaatgtcactcac

SEQ ID NO: 29712 - DNA, 33 bp, Homo sapiens
aacagctttacgtgcaccagtcctttaattgtt

SEQ ID NO: 29713 - DNA, 33 bp, Homo sapiens
tcctcacagcagaaacacagggcagagaaattt

SEQ ID NO: 29714 - DNA, 33 bp, Homo sapiens
gggtgacaaaaagggaaaatactctggacatag

SEQ ID NO: 29715 - DNA, 51 bp, Homo sapiens
taccttcagttgtaagtagatttaacggtgtcttacattgtttctcagctg

SEQ ID NO: 29716 - DNA, 33 bp, Homo sapiens
ttcgtgagttagggacaaagattggtctcttaa

SEQ ID NO: 29717 - DNA, 33 bp, Homo sapiens
gattactgccctcaaacgcttctttggacagcc

SEQ ID NO: 29718 - DNA, 33 bp, Homo sapiens
ttaagcaaaagaggccagactctatgattttat

SEQ ID NO: 29719 - DNA, 33 bp, Homo sapiens
gcctccactagcacaaccttaattcaaagcttt

SEQ ID NO: 29720 - DNA, 33 bp, Homo sapiens
ccatggaagaattgtaagaagagacaggtcgct

SEQ ID NO: 29721 - DNA, 33 bp, Homo sapiens
aggacaggggtttacacaactgtatacttgcaa

SEQ ID NO: 29722 - DNA, 33 bp, Homo sapiens
ctgccatggagagtaaatgtagttcaaaagcaa

SEQ ID NO: 29723 - DNA, 33 bp, Homo sapiens
gcgctaatggctggtaaatttctgaggtattgt

SEQ ID NO: 29724 - DNA, 51 bp, Homo sapiens
ctttgttacctaagaatgccttccaaattgtatcaggatttcagagaaagt

SEQ ID NO: 29725 - DNA, 51 bp, Homo sapiens
tctaagtcaatagacaagtgacattaaacatatagaacatctttgagaata

SEQ ID NO: 29726 - DNA, 33 bp, Homo sapiens
aagacaaaatataaacaatgtgagtatgcctca

SEQ ID NO: 29727 - DNA, 33 bp, Homo sapiens
ctttctcaagaggcagaatgtaaactgaagtca

SEQ ID NO: 29728 - DNA, 33 bp, Homo sapiens
tattactcacaatccaataaagatgggaacatg

SEQ ID NO: 29729 - DNA, 33 bp, Homo sapiens
tgaaaacagatgtaaacaactatatttcaacta

SEQ ID NO: 29730 - DNA, 33 bp, Homo sapiens
acaccagaagagaaataaactctaacaggccaa

SEQ ID NO: 29731 - DNA, 51 bp, Homo sapiens
ggagatccttctcttctccttaaaccgaaatcatgattcctgtgctgtggg

SEQ ID NO: 29732 - DNA, 33 bp, Homo sapiens
aacctctcataaaccacattgttagttcagatg

SEQ ID NO: 29733 - DNA, 33 bp, Homo sapiens
ccacttctccttttaacgtgccacagatgcatg

SEQ ID NO: 29734 - DNA, 33 bp, Homo sapiens
tttttgaatctagcaaataattgtctcagaaat

SEQ ID NO: 29735 - DNA, 51 bp, Homo sapiens
aacatgggctcctccacctcaacctaactataactgaattatttgcatctc

SEQ ID NO: 29736 - DNA, 33 bp, Homo sapiens
tgtcatcagactttcaaaagagcaaattcatta

SEQ ID NO: 29737 - DNA, 33 bp, Homo sapiens
attatgggtgagccaacaaagggaaacatcaga

SEQ ID NO: 29738 - DNA, 33 bp, Homo sapiens
catataatcctgcaacaactctgatagggagac

SEQ ID NO: 29739 - DNA, 33 bp, Homo sapiens
atttaggtaccgtatgaatctctgaattaaaat

SEQ ID NO: 29740 - DNA, 33 bp, Homo sapiens
gacttactataacatacctacagtagtccagac

SEQ ID NO: 29741 - DNA, 33 bp, Homo sapiens
ttttacttaaggcatcaaattcagatagtcaca

SEQ ID NO: 29742 - DNA, 33 bp, Homo sapiens
ctctctcgcatatagcagacaaggattctccac

SEQ ID NO: 29743 - DNA, 33 bp, Homo sapiens
atatcccctgttaaaaaagcgagaatatcaaag

SEQ ID NO: 29744 - DNA, 33 bp, Homo sapiens
tagagattttcgctgcaaacacatatatagcga

SEQ ID NO: 29745 - DNA, 51 bp, Homo sapiens
acacatgtcaaactggtcactagacaaggaattaaggattcaacgatgaac

SEQ ID NO: 29746 - DNA, 33 bp, Homo sapiens
atatattttgagttcacattcatcaattcagca

SEQ ID NO: 29747 - DNA, 51 bp, Homo sapiens
tccctcaagcttcctgttcacttaaaagattattccttgaaaaataaattg

SEQ ID NO: 29748 - DNA, 51 bp, Homo sapiens
taacacccagcatcaacttgtcaaccaactgagtgagccatcttggacggg

SEQ ID NO: 29749 - DNA, 33 bp, Homo sapiens
agttatctaagttatacacgttttgcatcacca

SEQ ID NO: 29750 - DNA, 33 bp, Homo sapiens
gtacttgtctggctcaataaggcagagatataa

SEQ ID NO: 29751 - DNA, 33 bp, Homo sapiens
tggtatcttactgccacgaagagtttgttctgt

SEQ ID NO: 29752 - DNA, 33 bp, Homo sapiens
tgcatatgattccagcagattagtagatccttt

SEQ ID NO: 29753 - DNA, 33 bp, Homo sapiens
ggtccatgccttttgaactatcagtagaaatat

SEQ ID NO: 29754 - DNA, 33 bp, Homo sapiens
aatatagagcgcccaaagactttgatttccaaa

SEQ ID NO: 29755 - DNA, 33 bp, Homo sapiens
ttaggaatgaagaggtaaagtcccatagcccat

SEQ ID NO: 29756 - DNA, 33 bp, Homo sapiens
attaggtactccgagcaagtttaagggaaccat

SEQ ID NO: 29757 - DNA, 33 bp, Homo sapiens
tacatttatttccagaagagaattaagttttgt

SEQ ID NO: 29758 - DNA, 33 bp, Homo sapiens
actaactatagttggcaaagacctaataaaaat

SEQ ID NO: 29759 - DNA, 33 bp, Homo sapiens
gtcaatcatctatcacactcccttaagctagaa

SEQ ID NO: 29760 - DNA, 33 bp, Homo sapiens
tgctttctagaccaataaactttctcatactga

SEQ ID NO: 29761 - DNA, 33 bp, Homo sapiens
agtaagcaactcattcaagatacttcagccatc

SEQ ID NO: 29762 - DNA, 33 bp, Homo sapiens
aatgcttctaaaccaacaaattacagaaaacat

SEQ ID NO: 29763 - DNA, 33 bp, Homo sapiens
gtagatgtgtttgtaacatatgttgaatgtgta

SEQ ID NO: 29764 - DNA, 33 bp, Homo sapiens
tttttcataaatgtaactaacctgccttttaaa

SEQ ID NO: 29765 - DNA, 33 bp, Homo sapiens
ggtgaaggtgaattaccgctatcatctactatc

SEQ ID NO: 29766 - DNA, 33 bp, Homo sapiens
tgaatgagagggaaaacagaagtgagccagttc

SEQ ID NO: 29767 - DNA, 33 bp, Homo sapiens
ttagatcattggtgggaagtttgtgaaacgaaa

SEQ ID NO: 29768 - DNA, 33 bp, Homo sapiens
cccccttagtatagtacgcaaagtcagcctgtc

SEQ ID NO: 29769 - DNA, 33 bp, Homo sapiens
taaccattgccttttgcattttctaggtccaga

SEQ ID NO: 29770 - DNA, 33 bp, Homo sapiens
tacatcacctcgtcaaaatcactttagaactaa

SEQ ID NO: 29771 - DNA, 33 bp, Homo sapiens
agtcaacattaaacaactaataagtcaacaatt

SEQ ID NO: 29772 - DNA, 33 bp, Homo sapiens
gaaagaagctaattgcagaacagtttacagagt

SEQ ID NO: 29773 - DNA, 33 bp, Homo sapiens
tggtataaaaatgaaacgaaaatgaacaaaata

SEQ ID NO: 29774 - DNA, 33 bp, Homo sapiens
ctcataatgttctaaaattggcctttaaaagct

SEQ ID NO: 29775 - DNA, 33 bp, Homo sapiens
ttcttcttgcttgatgaaattgatgtttgtctt

SEQ ID NO: 29776 - DNA, 33 bp, Homo sapiens
gggccatgacacaataataagatgcgtaaacat

SEQ ID NO: 29777 - DNA, 33 bp, Homo sapiens
ttattgagctgtctcaactgtggctatgtttgc

SEQ ID NO: 29778 - DNA, 33 bp, Homo sapiens
gctctaagcctggctacgtgcaagttgaggttc

SEQ ID NO: 29779 - DNA, 51 bp, Homo sapiens
taattatttaaaatatcaaaacatccaatcttttatatcatctgagtacat

SEQ ID NO: 29780 - DNA, 51 bp, Homo sapiens
tgaattcttatctttagagtgcttacgaagttttataaattctaacctctt

SEQ ID NO: 29781 - DNA, 33 bp, Homo sapiens
caaaatcatagggacacaaacgcaaaaatagac

SEQ ID NO: 29782 - DNA, 33 bp, Homo sapiens
tctactatttggtgaaacttgaattccagtttt

SEQ ID NO: 29783 - DNA, 33 bp, Homo sapiens
gcccaaaaatttcacaatctgataaacaacttc

SEQ ID NO: 29784 - DNA, 33 bp, Homo sapiens
ggatgcagaaaaaccaataattaaaggcaaatg

SEQ ID NO: 29785 - DNA, 33 bp, Homo sapiens
gctcagccgcaatacaatagaccaccagataga

SEQ ID NO: 29786 - DNA, 33 bp, Homo sapiens
tagagtttcatttttccaggatggagatctcca

SEQ ID NO: 29787 - DNA, 33 bp, Homo sapiens
tactcattgcatttcacggaaaacattacaact

SEQ ID NO: 29788 - DNA, 33 bp, Homo sapiens
ggtctgactccttccaacattggtaagggtgtg

SEQ ID NO: 29789 - DNA, 33 bp, Homo sapiens
atcatgtgcagacagaaaaactattgtactgtg

SEQ ID NO: 29790 - DNA, 33 bp, Homo sapiens
aaacaaattagctttaagggccacaataatgaa

SEQ ID NO: 29791 - DNA, 33 bp, Homo sapiens
atgccaatcacctgagaagtgcactgcttttgt

SEQ ID NO: 29792 - DNA, 33 bp, Homo sapiens
tgactttaagattatccatgtgatttgctttgc

SEQ ID NO: 29793 - DNA, 33 bp, Homo sapiens
acatggaaatgccttaccatattagcagattag

SEQ ID NO: 29794 - DNA, 33 bp, Homo sapiens
gttttggctcttccacactaagtcccagaccag

SEQ ID NO: 29795 - DNA, 33 bp, Homo sapiens
cgctgtgaaagagagacgaatagctcgtaaaat

SEQ ID NO: 29796 - DNA, 33 bp, Homo sapiens
atgtttttgtatcaataaaagcctaacagatca

SEQ ID NO: 29797 - DNA, 33 bp, Homo sapiens
ccagttccatgacttaccacctgcagtctaaga

SEQ ID NO: 29798 - DNA, 33 bp, Homo sapiens
gttactacagtctgcaacagcgtgtttcttaaa

SEQ ID NO: 29799 - DNA, 33 bp, Homo sapiens
caatgggataactgccaaacaatcacttgacat

SEQ ID NO: 29800 - DNA, 33 bp, Homo sapiens
taatagagttgcacctcaacaactggacggtta

SEQ ID NO: 29801 - DNA, 33 bp, Homo sapiens
cattacttttgaaccaatgatagaagataatgt

SEQ ID NO: 29802 - DNA, 33 bp, Homo sapiens
tataaatatttgtgtacaattggcacagagctt

SEQ ID NO: 29803 - DNA, 51 bp, Homo sapiens
gatttctctttctctctctcattctcacaaatgtgcacatacccacatacc

SEQ ID NO: 29804 - DNA, 33 bp, Homo sapiens
atcaaggatagaatgaaaatgtctgataggtgt

SEQ ID NO: 29805 - DNA, 33 bp, Homo sapiens
tccactgtaaaggcacagatacacaaatgtcct

SEQ ID NO: 29806 - DNA, 51 bp, Homo sapiens
gtgttagtttctgttctttataggacgatacattatttccttgaagcaaac

SEQ ID NO: 29807 - DNA, 33 bp, Homo sapiens
ttcttcgttgattgaacagaattatcttttaca

SEQ ID NO: 29808 - DNA, 33 bp, Homo sapiens
accactgagaacttgacgattacaactgccaat

SEQ ID NO: 29809 - DNA, 33 bp, Homo sapiens
catattgtatgtgaaacttttgaaacagtaggt

SEQ ID NO: 29810 - DNA, 33 bp, Homo sapiens
ccatcctatcttactacactggaaagcacttaa

SEQ ID NO: 29811 - DNA, 33 bp, Homo sapiens
taagtgctctacccataactttgtggaaaatca

SEQ ID NO: 29812 - DNA, 33 bp, Homo sapiens
gttatattcaaagagaaatttttggtcatcctc

SEQ ID NO: 29813 - DNA, 33 bp, Homo sapiens
acttttaacatggtaactgaggaaaaaatgagt

SEQ ID NO: 29814 - DNA, 33 bp, Homo sapiens
ggcttgcttacaataaaggcagatatctcagag

SEQ ID NO: 29815 - DNA, 33 bp, Homo sapiens
tataatataaacagcaaaaggatcacatacatg

SEQ ID NO: 29816 - DNA, 33 bp, Homo sapiens
atccaagacaacagcaggagccttaggtgactg

SEQ ID NO: 29817 - DNA, 33 bp, Homo sapiens
ttgaaactgaagagacacattccacagaactgt

SEQ ID NO: 29818 - DNA, 33 bp, Homo sapiens
attctcatggaattctcaaagagcaagcacaat

SEQ ID NO: 29819 - DNA, 33 bp, Homo sapiens
ttagcagactggacacaccgaggaaagaatctc

SEQ ID NO: 29820 - DNA, 51 bp, Homo sapiens
aggcaatcacatattgtatgtgaaacttttgaaacagtaggttttgtccag

SEQ ID NO: 29821 - DNA, 51 bp, Homo sapiens
aggtttggacccacccacaatgatacagaatacatatcaacaaacactata

SEQ ID NO: 29822 - DNA, 33 bp, Homo sapiens
tctcttagaggatgacagtcagaaacggaggaa

SEQ ID NO: 29823 - DNA, 33 bp, Homo sapiens
ggagatcaatatagtgcattttacatgaaggga

SEQ ID NO: 29824 - DNA, 33 bp, Homo sapiens
tttggtgggatttggaacttttccttcctaaca

SEQ ID NO: 29825 - DNA, 33 bp, Homo sapiens
cttctattaaactgccaattatctattcaattt

SEQ ID NO: 29826 - DNA, 51 bp, Homo sapiens
atcattgggacaagtggaaaatccactggaatacacatatatatagtaaac

SEQ ID NO: 29827 - DNA, 33 bp, Homo sapiens
tcctgatggtgatacaacagcattgcgaagtct

SEQ ID NO: 29828 - DNA, 33 bp, Homo sapiens
gcattatcccatgacccccaaacagaacacaca

SEQ ID NO: 29829 - DNA, 33 bp, Homo sapiens
tttgtcattaaattgaagttattgtcgatggag

SEQ ID NO: 29830 - DNA, 33 bp, Homo sapiens
gactgtgaacctactcactacttgaaacaatgg

SEQ ID NO: 29831 - DNA, 33 bp, Homo sapiens
aggcgattaagtcaaaatgaagcctttagagta

SEQ ID NO: 29832 - DNA, 33 bp, Homo sapiens
aaatgaaatattgtgaataaaatgctgagcaag

SEQ ID NO: 29833 - DNA, 33 bp, Homo sapiens
aaagactgctgcagagaaacaccggcaagattt

SEQ ID NO: 29834 - DNA, 33 bp, Homo sapiens
gtcaatgtaactgctgaagatcctaacacagga

SEQ ID NO: 29835 - DNA, 33 bp, Homo sapiens
aggtacagtatacatacagaaaagtgcatagat

SEQ ID NO: 29836 - DNA, 33 bp, Homo sapiens
aacaaacttgatccaagtgtaagatttgtacag

SEQ ID NO: 29837 - DNA, 33 bp, Homo sapiens
tccctggtggcaaaacaattggggaccactgac

SEQ ID NO: 29838 - DNA, 33 bp, Homo sapiens
agctctcctcttgagcacctgttttcttgtaga

SEQ ID NO: 29839 - DNA, 33 bp, Homo sapiens
agaagaagacgatgaaccagctgtttccataat

SEQ ID NO: 29840 - DNA, 33 bp, Homo sapiens
ttctttgtagagctcaagtcaaatgctacttct

SEQ ID NO: 29841 - DNA, 51 bp, Homo sapiens
tatttttttatgaagggacttgaaagtttattccagagcagtatttaggcc

SEQ ID NO: 29842 - DNA, 51 bp, Homo sapiens
ttatgtttgaatacttaagcataaacgttaactggatattttcccttttgc

SEQ ID NO: 29843 - DNA, 33 bp, Homo sapiens
cctttgttgcatccccaattttcaaaattatgc

SEQ ID NO: 29844 - DNA, 33 bp, Homo sapiens
ttcttctggcttagtaccttatcaaatagacat

SEQ ID NO: 29845 - DNA, 51 bp, Homo sapiens
taagcagatatgcttgcaaaaacaaaatcattctttacagtacatggaaaa

SEQ ID NO: 29846 - DNA, 33 bp, Homo sapiens
cagcaataagaaactcagaaaggctcagggccc

SEQ ID NO: 29847 - DNA, 33 bp, Homo sapiens
tgagtgatagggtcagaagaacacttactttca

SEQ ID NO: 29848 - DNA, 33 bp, Homo sapiens
cctggccaaatcttgacgttaatatatctgttt

SEQ ID NO: 29849 - DNA, 51 bp, Homo sapiens
taagtagaagagctaggatcaaatacgtctgttcaatcacaaatcccatgt

SEQ ID NO: 29850 - DNA, 33 bp, Homo sapiens
attctgaatttgtgaacgattacacccaggtta

SEQ ID NO: 29851 - DNA, 51 bp, Homo sapiens
cagctaaaacctgaacaacgacaaactgaaaggactctgaccctccggcaa

SEQ ID NO: 29852 - DNA, 33 bp, Homo sapiens
ctttttttgtatacacagatgttgagtctgcaa

SEQ ID NO: 29853 - DNA, 33 bp, Homo sapiens
tcctttccaatctggacggcttttacttatttt

SEQ ID NO: 29854 - DNA, 33 bp, Homo sapiens
ggcaatgtagagatgtcacaaactggaagtcca

SEQ ID NO: 29855 - DNA, 51 bp, Homo sapiens
ggcacagtaagataagtgagggtgacgtaatggaaggaactggagtctgac

SEQ ID NO: 29856 - DNA, 33 bp, Homo sapiens
ccaagacaaggacccacaggctaaaaagatttt

SEQ ID NO: 29857 - DNA, 33 bp, Homo sapiens
atcagagcacatagggaaagcttattgcttagt

SEQ ID NO: 29858 - DNA, 33 bp, Homo sapiens
gcacgtggtgagattcccttgactgtcattcaa

SEQ ID NO: 29859 - DNA, 33 bp, Homo sapiens
cagggacatattgaataaagactggataagaaa

SEQ ID NO: 29860 - DNA, 33 bp, Homo sapiens
taaaagtcttgagacgaattctgattgaatagg

SEQ ID NO: 29861 - DNA, 33 bp, Homo sapiens
ctggcttggagagagaagcaaggactcttttta

SEQ ID NO: 29862 - DNA, 33 bp, Homo sapiens
tgtttataagactcaccgtaaaatctccagact

SEQ ID NO: 29863 - DNA, 33 bp, Homo sapiens
atcctcagttgcaaaaatcttgtgtttcaggca

SEQ ID NO: 29864 - DNA, 33 bp, Homo sapiens
acagtcatttccccaaacattaggctttctgag

SEQ ID NO: 29865 - DNA, 51 bp, Homo sapiens
tttgtgagacaattagcaaaatttgaaagagatctgtagatgaaagttagt

SEQ ID NO: 29866 - DNA, 51 bp, Homo sapiens
gcacttggatggtcgaatttttagccctatgtcacaactgactagacatta

SEQ ID NO: 29867 - DNA, 33 bp, Homo sapiens
tggggcaaataaggaactacattaaacctaagt

SEQ ID NO: 29868 - DNA, 33 bp, Homo sapiens
aacttgaatatcatccaaacttgcttttctcct

SEQ ID NO: 29869 - DNA, 33 bp, Homo sapiens
taaactgtgtactaccaccattttaattaataa

SEQ ID NO: 29870 - DNA, 33 bp, Homo sapiens
caatgatagtgttttcaaagtcatgtgggccac

SEQ ID NO: 29871 - DNA, 33 bp, Homo sapiens
tggtgtaaaattgaaacctgtaatacgtgttat

SEQ ID NO: 29872 - DNA, 33 bp, Homo sapiens
cctctttcctactgccaaggtgatctttctcct

SEQ ID NO: 29873 - DNA, 33 bp, Homo sapiens
ttactttcatctcctcacaacatattttcccac

SEQ ID NO: 29874 - DNA, 33 bp, Homo sapiens
gactgagcccattcagaccaaacagagtcagca

SEQ ID NO: 29875 - DNA, 51 bp, Homo sapiens
ctgaaaatgtacagtggttgcattacagccagaggtgtgctgaaggtagct

SEQ ID NO: 29876 - DNA, 51 bp, Homo sapiens
ggatggggctgtcatcagtagattgctgaaaaatattccacaaccagttct

SEQ ID NO: 29877 - DNA, 51 bp, Homo sapiens
atgacatttatcaatgtgttttcacaaggtggtatatcgaataaggcagtt

SEQ ID NO: 29878 - DNA, 33 bp, Homo sapiens
caataattgtaacaaaatatggagttatagtac

SEQ ID NO: 29879 - DNA, 51 bp, Homo sapiens
atatgctgtaatgccgtattaccacaattaagtatactgctgtacaactaa

SEQ ID NO: 29880 - DNA, 33 bp, Homo sapiens
ggaagaatgatcaaaacacagactgcctcttca

SEQ ID NO: 29881 - DNA, 33 bp, Homo sapiens
gaagaggaggtccaggaaagtgtgatatttgag

SEQ ID NO: 29882 - DNA, 51 bp, Homo sapiens
gctttttgaaccagtcttagtatttatctggttccctcattatgagttgat

SEQ ID NO: 29883 - DNA, 33 bp, Homo sapiens
tgatttaggcaggaaactggcaaaagataaatc

SEQ ID NO: 29884 - DNA, 51 bp, Homo sapiens
cttgaagaacccgcatggatcataccctgatgatttaaaccaaacaaaaga

SEQ ID NO: 29885 - DNA, 33 bp, Homo sapiens
gttatgatggaagaaacgcactgcgggttgctg

SEQ ID NO: 29886 - DNA, 33 bp, Homo sapiens
ttggattcaagtacagcattgcattttatgata

SEQ ID NO: 29887 - DNA, 33 bp, Homo sapiens
tcatatacttcatataaaatttcacttgtgcta

SEQ ID NO: 29888 - DNA, 33 bp, Homo sapiens
aagaagtgttttggcactgattggagaggcaca

SEQ ID NO: 29889 - DNA, 33 bp, Homo sapiens
tgtgtgtagtaagatcactcggtctccttctta

SEQ ID NO: 29890 - DNA, 33 bp, Homo sapiens
aaatagtaacaaagaacgagtagtttcttaagt

SEQ ID NO: 29891 - DNA, 33 bp, Homo sapiens
ccaagtctgagacaaaatcggaaaattatctta

SEQ ID NO: 29892 - DNA, 51 bp, Homo sapiens
tcttgggtgaagagggataagactcagacacattctacagtttctcggaga

SEQ ID NO: 29893 - DNA, 51 bp, Homo sapiens
tccacagcagtcaacttaatggtcagataattaaagtttatgtatgtgcaa

SEQ ID NO: 29894 - DNA, 33 bp, Homo sapiens
aaacttctaggaattacggtagcagtgatattt

SEQ ID NO: 29895 - DNA, 33 bp, Homo sapiens
ctcttagcccctcttcaaaaatagtcttatcat

SEQ ID NO: 29896 - DNA, 33 bp, Homo sapiens
aaagacaactacagaccggtattcttcatagac

SEQ ID NO: 29897 - DNA, 33 bp, Homo sapiens
gactagccatttgccaataatcataaactctgg

SEQ ID NO: 29898 - DNA, 33 bp, Homo sapiens
gatacagagctttccaactttatgttattatga

SEQ ID NO: 29899 - DNA, 51 bp, Homo sapiens
tagtatctgcagtttcaggcatagaataagaggcttgaattcccctgcaga

SEQ ID NO: 29900 - DNA, 51 bp, Homo sapiens
acaaattatgtccacaaatgtttgacacttctgcaattgagaggcaggttt

SEQ ID NO: 29901 - DNA, 33 bp, Homo sapiens
acataggctgggatcagactcatgcatctgaga

SEQ ID NO: 29902 - DNA, 51 bp, Homo sapiens
gcagagaaatatttaaatatacctgaatccaaattacattttccttctact

SEQ ID NO: 29903 - DNA, 33 bp, Homo sapiens
gataccatgcctgaaaaagaatctgaaacatta

SEQ ID NO: 29904 - DNA, 33 bp, Homo sapiens
aaggtttgggtctaacacctgtgaaagaaacgg

SEQ ID NO: 29905 - DNA, 33 bp, Homo sapiens
tgttgatacacttttaggtagtaccaggttttg

SEQ ID NO: 29906 - DNA, 33 bp, Homo sapiens
ctactcaagacagtacgcataagtgccaattaa

SEQ ID NO: 29907 - DNA, 33 bp, Homo sapiens
aggcctgataagggaacctggaaacagcatcaa

SEQ ID NO: 29908 - DNA, 33 bp, Homo sapiens
ttaacagtaatggaacaaatgtgaagcttctgc

SEQ ID NO: 29909 - DNA, 33 bp, Homo sapiens
tctgatgatataccaaagattaagtgagtgaag

SEQ ID NO: 29910 - DNA, 33 bp, Homo sapiens
aatgatgcatgtaatgaattagagttgaagata

SEQ ID NO: 29911 - DNA, 33 bp, Homo sapiens
tatgtggaatgtggaagttatgtttttacatgt

SEQ ID NO: 29912 - DNA, 33 bp, Homo sapiens
gatttgaaatgacaaaaaagatatccagcaaag

SEQ ID NO: 29913 - DNA, 33 bp, Homo sapiens
aggaagagagcaaagacagtaaaagcatggcct

SEQ ID NO: 29914 - DNA, 33 bp, Homo sapiens
tttcccttctcctttaagcaatcatacaaataa

SEQ ID NO: 29915 - DNA, 33 bp, Homo sapiens
cctatttgtctgtgaaataagttggtgtaaata

SEQ ID NO: 29916 - DNA, 33 bp, Homo sapiens
agttagtctgcctagacggggaagaacatttgg

SEQ ID NO: 29917 - DNA, 33 bp, Homo sapiens
caaagatcttacaaagccttactgctgttcttc

SEQ ID NO: 29918 - DNA, 33 bp, Homo sapiens
gcctacatgaaaaagaacactaggatttcagtc

SEQ ID NO: 29919 - DNA, 33 bp, Homo sapiens
tctgtttttacacctacgccgggtcaataggat

SEQ ID NO: 29920 - DNA, 33 bp, Homo sapiens
gccttagatgatcaagaatagaagtatgagagg

SEQ ID NO: 29921 - DNA, 33 bp, Homo sapiens
agttgagttaatttcacccaaattgcataactg

SEQ ID NO: 29922 - DNA, 51 bp, Homo sapiens
ggggctgataaaaacttaactttcaactagtatccagtatgtgcaacatag

SEQ ID NO: 29923 - DNA, 33 bp, Homo sapiens
gtgagacagaaactagaccctcaaacagtcttc

SEQ ID NO: 29924 - DNA, 51 bp, Homo sapiens
cataacggctgtctcattttatactcctactaacagtgcacaaagcttcca

SEQ ID NO: 29925 - DNA, 51 bp, Homo sapiens
agtaaaacttcttatagtgttataactaaagtaagcatgaatatatacaat

SEQ ID NO: 29926 - DNA, 33 bp, Homo sapiens
gtctttgtgagagataacacctctacctgtgct

SEQ ID NO: 29927 - DNA, 33 bp, Homo sapiens
tttatggatagagaaccaaaacctgcaacttac

SEQ ID NO: 29928 - DNA, 33 bp, Homo sapiens
atggtgtttacaagacagcaaaaatgttacacg

SEQ ID NO: 29929 - DNA, 51 bp, Homo sapiens
atattaattcctatggctaattcaactattcaacaagcatcccacatcatt

SEQ ID NO: 29930 - DNA, 33 bp, Homo sapiens
gtggcagtagggcttaggcttgaattacttctt

SEQ ID NO: 29931 - DNA, 33 bp, Homo sapiens
atgggactgactgaaacgtaggatgaatttact

SEQ ID NO: 29932 - DNA, 33 bp, Homo sapiens
gaaatgcatctagacaaaaaccttaacactttt

SEQ ID NO: 29933 - DNA, 33 bp, Homo sapiens
gtccccgggcttgtgaaatgtcttttatctaca

SEQ ID NO: 29934 - DNA, 51 bp, Homo sapiens
ataaccaaacttaactctagccctaacatagacaaaataagccagtttcaa

SEQ ID NO: 29935 - DNA, 33 bp, Homo sapiens
taagtctaacagtcaaacaatattttgtatcag

SEQ ID NO: 29936 - DNA, 33 bp, Homo sapiens
agtctatatttggacaccttttttgtgtgtgtg

SEQ ID NO: 29937 - DNA, 33 bp, Homo sapiens
aaagtagtcactttcacctatggacatttgtag

SEQ ID NO: 29938 - DNA, 33 bp, Homo sapiens
tcagttaatctttgcacatggtgataagtagga

SEQ ID NO: 29939 - DNA, 33 bp, Homo sapiens
ttctcttctgccaaataataaatataatcatag

SEQ ID NO: 29940 - DNA, 33 bp, Homo sapiens
gaagaagcaaaataacagtatgtgaacaagagt

SEQ ID NO: 29941 - DNA, 33 bp, Homo sapiens
acataagaatgttcaccaacaagcctaaaaaat

SEQ ID NO: 29942 - DNA, 33 bp, Homo sapiens
actttgacaggaaaacaaaatttaactagcaaa

SEQ ID NO: 29943 - DNA, 51 bp, Homo sapiens
aactgtttgaatattaaaatcttacccaaagctaaggataaaatgtccatt

SEQ ID NO: 29944 - DNA, 33 bp, Homo sapiens
atctccagcttttgcaacagtaatcttgacctc

SEQ ID NO: 29945 - DNA, 33 bp, Homo sapiens
tgctcactggagtcacaattattggaaattcat

SEQ ID NO: 29946 - DNA, 33 bp, Homo sapiens
taaattgcttaatataggccctgtgcaacaaaa

SEQ ID NO: 29947 - DNA, 33 bp, Homo sapiens
tttgaaggtgcatttaaactatcaacagacttt

SEQ ID NO: 29948 - DNA, 33 bp, Homo sapiens
caacaacagcaagaaccaaactgaaaaataagt

SEQ ID NO: 29949 - DNA, 33 bp, Homo sapiens
tcataacacatagtagccaggatctatttaact

SEQ ID NO: 29950 - DNA, 33 bp, Homo sapiens
ttctcatctgtggcacaagaacaaaataatcat

SEQ ID NO: 29951 - DNA, 33 bp, Homo sapiens
tttctgacactgacctcaatcttcttttccttt

SEQ ID NO: 29952 - DNA, 33 bp, Homo sapiens
gtgtgtgaaactaccaggagagaagttcagttt

SEQ ID NO: 29953 - DNA, 33 bp, Homo sapiens
ataaaagagtagataacagtgccactttccctt

SEQ ID NO: 29954 - DNA, 33 bp, Homo sapiens
actggtggcaccaaaacgatgatttttctgaaa

SEQ ID NO: 29955 - DNA, 51 bp, Homo sapiens
ttctgtatccacatggtgttgctagaagtattatatcttttggtaagagag

SEQ ID NO: 29956 - DNA, 51 bp, Homo sapiens
atgtctttactctctatatggaaaacgaattagaaagttcacacaggtcca

SEQ ID NO: 29957 - DNA, 51 bp, Homo sapiens
atataatttttgctctgtcttattacactcaaacatttcaatccagtgtaa

SEQ ID NO: 29958 - DNA, 51 bp, Homo sapiens
ggatttttttaagtgatagtcttaaagttgatcaaactactataaaaatta

SEQ ID NO: 29959 - DNA, 51 bp, Homo sapiens
taagactatcacttaaaaaaatccacaatccttttattcagtttttgttgt

SEQ ID NO: 29960 - DNA, 33 bp, Homo sapiens
caccaaatgatgataacaaaactgttcatgata

SEQ ID NO: 29961 - DNA, 33 bp, Homo sapiens
gtgtatttctgccaccggatggaccatttgtca

SEQ ID NO: 29962 - DNA, 33 bp, Homo sapiens
tggggagccaaagagcaatggacctatggacct

SEQ ID NO: 29963 - DNA, 33 bp, Homo sapiens
ttaaattcacagcacaatgccaattacattgta

SEQ ID NO: 29964 - DNA, 33 bp, Homo sapiens
cctagcttccgataaactatgttactaaatgaa

SEQ ID NO: 29965 - DNA, 33 bp, Homo sapiens
ttaaatcatgtatgacaggaaaagcagacattt

SEQ ID NO: 29966 - DNA, 33 bp, Homo sapiens
gtcaaataaaggaaccactttcgctgccacatc

SEQ ID NO: 29967 - DNA, 33 bp, Homo sapiens
aatgagtgagtattatcaggtaaaggtctagca

SEQ ID NO: 29968 - DNA, 51 bp, Homo sapiens
gtgtcaggattaagttgaattatagaacagtcaggtgatatgtgctagagg

SEQ ID NO: 29969 - DNA, 33 bp, Homo sapiens
tgagaaagagtgtggcaaggtctggaatttagt

SEQ ID NO: 29970 - DNA, 33 bp, Homo sapiens
agaagaaagctgaaaaagacacattctaagaag

SEQ ID NO: 29971 - DNA, 33 bp, Homo sapiens
agttggggaatagtaacgcaagttgaataaaac

SEQ ID NO: 29972 - DNA, 33 bp, Homo sapiens
ggttgaaagtcagtttgaaaagttaggcaatag

SEQ ID NO: 29973 - DNA, 33 bp, Homo sapiens
atctcaactggagttacaatgatggtgttgttt

SEQ ID NO: 29974 - DNA, 33 bp, Homo sapiens
gctacaatgtttataacgatggtgaagaaagta

SEQ ID NO: 29975 - DNA, 33 bp, Homo sapiens
gccaaatatcagaacactggattatacttagag

SEQ ID NO: 29976 - DNA, 33 bp, Homo sapiens
taacgaggtcccgtaaagagagtgttccattca

SEQ ID NO: 29977 - DNA, 33 bp, Homo sapiens
gttcctgggcccctcacgcagtcagtaagtaga

SEQ ID NO: 29978 - DNA, 33 bp, Homo sapiens
tgggattctgtgcttgcaaaaatttggggactt

SEQ ID NO: 29979 - DNA, 33 bp, Homo sapiens
ggactgtgtgaaccaaccaggggccagttttcc

SEQ ID NO: 29980 - DNA, 33 bp, Homo sapiens
tttgtaaattgctacaggagtaacagtggctaa

SEQ ID NO: 29981 - DNA, 33 bp, Homo sapiens
cagtagatattcaacaaaaggcaactattattg

SEQ ID NO: 29982 - DNA, 33 bp, Homo sapiens
acactttgctagatacgaattcctgcttttgag

SEQ ID NO: 29983 - DNA, 33 bp, Homo sapiens
atacaatgatatgcacagaatgggaccagcaca

SEQ ID NO: 29984 - DNA, 33 bp, Homo sapiens
catgacataaatcagaacctccgggagcaaggg

SEQ ID NO: 29985 - DNA, 33 bp, Homo sapiens
ttatgctttcaagttacgtgaactagtaagatc

SEQ ID NO: 29986 - DNA, 33 bp, Homo sapiens
aggtgatttttaccaaattctgagctttgcaat

SEQ ID NO: 29987 - DNA, 33 bp, Homo sapiens
actaaggtcattgataacgtctctgaacaatca

SEQ ID NO: 29988 - DNA, 33 bp, Homo sapiens
tatagataattttatacggttgcagaaatggat

SEQ ID NO: 29989 - DNA, 33 bp, Homo sapiens
cagttataactgatgaacctagcaatgatgtac

SEQ ID NO: 29990 - DNA, 33 bp, Homo sapiens
cctatctcaaggtctcaagttggcccctggtga

SEQ ID NO: 29991 - DNA, 33 bp, Homo sapiens
attatacaccattcaaagatgttgtgagtgtta

SEQ ID NO: 29992 - DNA, 33 bp, Homo sapiens
tccatggctgcataacactatttttgtatcatt

SEQ ID NO: 29993 - DNA, 51 bp, Homo sapiens
gaaaaaacttatagtcctgtcagtacagtagcaccactgttatgttgagtg

SEQ ID NO: 29994 - DNA, 33 bp, Homo sapiens
accagcctgtttttcacatttgtgtaactccct

SEQ ID NO: 29995 - DNA, 33 bp, Homo sapiens
tgtaggttggactgcaaagataagtataaaacc

SEQ ID NO: 29996 - DNA, 33 bp, Homo sapiens
attgcaaatagagctacgttgattggcctggcc

SEQ ID NO: 29997 - DNA, 33 bp, Homo sapiens
tattttatatgagaaaagatgttctatggtaaa

SEQ ID NO: 29998 - DNA, 33 bp, Homo sapiens
gccttacactacatagaatttgattatttgaaa

SEQ ID NO: 29999 - DNA, 33 bp, Homo sapiens
agggcaagagctaagaagcaaggccacatcaga

SEQ ID NO: 30000 - DNA, 33 bp, Homo sapiens
gcctgagatcaagcaacgctaggacaaccacaa

SEQ ID NO: 30001 - DNA, 33 bp, Homo sapiens
gcaacaagaattttaacactctcaaccctctga

SEQ ID NO: 30002 - DNA, 33 bp, Homo sapiens
ttaaaaatcaaaagaaatggttgagagcttatt

SEQ ID NO: 30003 - DNA, 51 bp, Homo sapiens
taaggccagcaaacatgtatcaagcacatattatgattcagccactattat

SEQ ID NO: 30004 - DNA, 33 bp, Homo sapiens
caaattcattttgtcaatattgggtgacatatt

SEQ ID NO: 30005 - DNA, 33 bp, Homo sapiens
ctgtctgctttaataaatactcgaatctatttg

SEQ ID NO: 30006 - DNA, 33 bp, Homo sapiens
ataaaaattttaaacaagctgccgtgatgtaag

SEQ ID NO: 30007 - DNA, 33 bp, Homo sapiens
cagtgagaagggtttaacaattagagacagata

SEQ ID NO: 30008 - DNA, 33 bp, Homo sapiens
agaagtacagaagagggatgcaaagcccagcca

SEQ ID NO: 30009 - DNA, 33 bp, Homo sapiens
cagtaccccaaatacactggcattcacattaag

SEQ ID NO: 30010 - DNA, 33 bp, Homo sapiens
ctcattcctaaactagacattgacaaggggaaa

SEQ ID NO: 30011 - DNA, 33 bp, Homo sapiens
cttggtcatttgagaaacatcaaggaaagtaaa

SEQ ID NO: 30012 - DNA, 33 bp, Homo sapiens
tctaccctaattacagaccaatttcatcttaac

SEQ ID NO: 30013 - DNA, 33 bp, Homo sapiens
accgtgccctcccttgcagctctctgttggcta

SEQ ID NO: 30014 - DNA, 33 bp, Homo sapiens
cctttggtccttcccaatcttttcaacattaga

SEQ ID NO: 30015 - DNA, 33 bp, Homo sapiens
aaattattaccactaagatttgctgtctttttc

SEQ ID NO: 30016 - DNA, 33 bp, Homo sapiens
atatcactttgccaaccataatttttacaattc

SEQ ID NO: 30017 - DNA, 33 bp, Homo sapiens
ttgatgctcagtcctacgaatgacactaaatat

SEQ ID NO: 30018 - DNA, 33 bp, Homo sapiens
tggagaagtaaaagcaagatggaatggaagaga

SEQ ID NO: 30019 - DNA, 33 bp, Homo sapiens
aagttaaaagccgaaactgttttcataacttct

SEQ ID NO: 30020 - DNA, 33 bp, Homo sapiens
cgatggtaagcacaccaatgggaagataaaaag

SEQ ID NO: 30021 - DNA, 51 bp, Homo sapiens
caccggatggcataaaagtcactaaaaacagattctcctttttatttctgg

SEQ ID NO: 30022 - DNA, 33 bp, Homo sapiens
tttataaggagtaaaaaatgaggagatgaattg

SEQ ID NO: 30023 - DNA, 33 bp, Homo sapiens
actatcatagtctaaaatgccttcttctactgc

SEQ ID NO: 30024 - DNA, 33 bp, Homo sapiens
aatacaagataatccaatcaattccaaatattc

SEQ ID NO: 30025 - DNA, 33 bp, Homo sapiens
atgtcctggaaaatcaatcttgacttctttgtt

SEQ ID NO: 30026 - DNA, 33 bp, Homo sapiens
ttcagccttttcacacaccttgctataaattgc

SEQ ID NO: 30027 - DNA, 33 bp, Homo sapiens
ccgggcaaccagggtgcatatgcggcagggcag

SEQ ID NO: 30028 - DNA, 33 bp, Homo sapiens
tattttacttaaattacgattgcgtttgtttac

SEQ ID NO: 30029 - DNA, 33 bp, Homo sapiens
gcactgagacttaaaaattagtatggatacaat

SEQ ID NO: 30030 - DNA, 33 bp, Homo sapiens
taatggttgtaatgggcatactgactatgtgtc

SEQ ID NO: 30031 - DNA, 33 bp, Homo sapiens
tatacccaataggccaaaaaagtactggtcatc

SEQ ID NO: 30032 - DNA, 33 bp, Homo sapiens
ttgtgatattcttggcagagcctgcttcacacc

SEQ ID NO: 30033 - DNA, 33 bp, Homo sapiens
cccactctggtgtttacggccttgtgttgcatg

SEQ ID NO: 30034 - DNA, 33 bp, Homo sapiens
atgatataactgctgcaaccggcgctgccacaa

SEQ ID NO: 30035 - DNA, 33 bp, Homo sapiens
tctccagaaatcctcacgcttaactccctcatg

SEQ ID NO: 30036 - DNA, 33 bp, Homo sapiens
cagcagaagaattcatcagaagacaaagtcctc

SEQ ID NO: 30037 - DNA, 33 bp, Homo sapiens
gaaacaaatgtccaaaaataagagaatcattta

SEQ ID NO: 30038 - DNA, 33 bp, Homo sapiens
caccctcctggctgaacactcctaatagtagtg

SEQ ID NO: 30039 - DNA, 33 bp, Homo sapiens
tcttgttgttgccccaccttagaggacactcag

SEQ ID NO: 30040 - DNA, 33 bp, Homo sapiens
tattacttcattgaatgactctttgccattttt

SEQ ID NO: 30041 - DNA, 33 bp, Homo sapiens
ggaaatgggagagtaccggaggaaaatgagaaa

SEQ ID NO: 30042 - DNA, 33 bp, Homo sapiens
tgtctgaaacatcacaatatttaggacatttta

SEQ ID NO: 30043 - DNA, 33 bp, Homo sapiens
aggcctgtagcataaaaggagcatatcaccact

SEQ ID NO: 30044 - DNA, 33 bp, Homo sapiens
ttcctaccgcgctgaacatggcaggaatgaaaa

SEQ ID NO: 30045 - DNA, 33 bp, Homo sapiens
agacatctccctatacaacaattgtcctggatg

SEQ ID NO: 30046 - DNA, 33 bp, Homo sapiens
ggctaagcattttaaccagagcatccccagact

SEQ ID NO: 30047 - DNA, 33 bp, Homo sapiens
gatgaaatgtctttcaataacaaggcttcaggc

SEQ ID NO: 30048 - DNA, 33 bp, Homo sapiens
gaacaacttgaaggaaatggagcatagcctggc

SEQ ID NO: 30049 - DNA, 33 bp, Homo sapiens
gcactgagtctggtcaaaatggtaacacgtggg

SEQ ID NO: 30050 - DNA, 33 bp, Homo sapiens
gctgaagcactgatgaaagggatggagacagtg

SEQ ID NO: 30051 - DNA, 33 bp, Homo sapiens
atgtgttgagactataactggggtctgcatctt

SEQ ID NO: 30052 - DNA, 33 bp, Homo sapiens
cttacccagtggacaaagatgatggagagactt

SEQ ID NO: 30053 - DNA, 33 bp, Homo sapiens
ctgacccaagtaattacaaagttagcacttgga

SEQ ID NO: 30054 - DNA, 33 bp, Homo sapiens
attaatggggattggacacaggagcaacataga

SEQ ID NO: 30055 - DNA, 33 bp, Homo sapiens
ctgaagctggatgcaacagcaaggctgaaatta

SEQ ID NO: 30056 - DNA, 33 bp, Homo sapiens
aatcttctgaaacttacacatgattcaaagaca

SEQ ID NO: 30057 - DNA, 33 bp, Homo sapiens
gaggatatacaattccaaggcagttcttcttac

SEQ ID NO: 30058 - DNA, 33 bp, Homo sapiens
ctatttgtgccatacaaagaaaagtgcctgtat

SEQ ID NO: 30059 - DNA, 33 bp, Homo sapiens
aatcaaggtgttacaacaggaaatggcaaaggt

SEQ ID NO: 30060 - DNA, 33 bp, Homo sapiens
tacaacaggttgaaaggagaatttaaagtacca

SEQ ID NO: 30061 - DNA, 33 bp, Homo sapiens
acttactatctgacacacttttctttcggaaag

SEQ ID NO: 30062 - DNA, 33 bp, Homo sapiens
tctcctttagcagttaacactcttgctcttgta

SEQ ID NO: 30063 - DNA, 33 bp, Homo sapiens
gaggttaaacaaaatagtatcaaggccaaagac

SEQ ID NO: 30064 - DNA, 33 bp, Homo sapiens
tggataaggtccaaacccttgagtctgacaatc

SEQ ID NO: 30065 - DNA, 33 bp, Homo sapiens
attagaatccttaaagcagaatagccttgtgag

SEQ ID NO: 30066 - DNA, 51 bp, Homo sapiens
ggatgaacaactctgcccaaagaaaaaaccatgccgtcatcttgaatcttt

SEQ ID NO: 30067 - DNA, 51 bp, Homo sapiens
aactatctctcaaatactctactggattgctttacatatagttaatcacca

SEQ ID NO: 30068 - DNA, 51 bp, Homo sapiens
gagcccctgaatgggaatagaagtcacaacatatccagttcgatctgggcc

SEQ ID NO: 30069 - DNA, 33 bp, Homo sapiens
attctcagctagcacaacttccattctcgggtg

SEQ ID NO: 30070 - DNA, 51 bp, Homo sapiens
atctttcttatctttgcacaatcaaaacttataaaagcctcagggaactga

SEQ ID NO: 30071 - DNA, 33 bp, Homo sapiens
taaacagaagccataactaactcctatgcttac

SEQ ID NO: 30072 - DNA, 33 bp, Homo sapiens
agaatcctaaggcatcaaaacaatagaacactt

SEQ ID NO: 30073 - DNA, 33 bp, Homo sapiens
ttatgtgcatgaaataccttacatttttaaggc

SEQ ID NO: 30074 - DNA, 33 bp, Homo sapiens
aaaatttccttctatcaacattaactcgccttt

SEQ ID NO: 30075 - DNA, 33 bp, Homo sapiens
gactccttcttagtgaggccttctttaactacc

SEQ ID NO: 30076 - DNA, 33 bp, Homo sapiens
caagcacactgcctacagattagctagccctgt

SEQ ID NO: 30077 - DNA, 33 bp, Homo sapiens
cagaaacatccatatgcatgcaggactatgtct

SEQ ID NO: 30078 - DNA, 33 bp, Homo sapiens
agtccactttgcagatcaaccagtacaggctta

SEQ ID NO: 30079 - DNA, 33 bp, Homo sapiens
aaactggcacagggtacatccgaagcttgctgg

SEQ ID NO: 30080 - DNA, 33 bp, Homo sapiens
ccttctgtcaaccaaacgctcatagaatgctca

SEQ ID NO: 30081 - DNA, 51 bp, Homo sapiens
gtgtaaagagatctgaaacggacaacgaactggaagaaatgtaaaacctaa

SEQ ID NO: 30082 - DNA, 33 bp, Homo sapiens
cagtaaatttcctgcaagcgaactcttcctttg

SEQ ID NO: 30083 - DNA, 51 bp, Homo sapiens
gaatcttacagaaattgtggagctgagtaataccctcattacttttcatct

SEQ ID NO: 30084 - DNA, 33 bp, Homo sapiens
cactctcactctgcccagacagtttaagaaagt

SEQ ID NO: 30085 - DNA, 51 bp, Homo sapiens
agatggagaaactaaagctaagggaaattaaaagatccagctaaggtcatg

SEQ ID NO: 30086 - DNA, 33 bp, Homo sapiens
atattagctctaagaaatgatacattgcattgt

SEQ ID NO: 30087 - DNA, 33 bp, Homo sapiens
ctacttgctgcagatacggaaagtaactgcaca

SEQ ID NO: 30088 - DNA, 33 bp, Homo sapiens
aaattcagtagtgtatcaggccgtagttttttt

SEQ ID NO: 30089 - DNA, 33 bp, Homo sapiens
tctctagcaggtaaataaaaaatgctatgactt

SEQ ID NO: 30090 - DNA, 33 bp, Homo sapiens
ttcatttcatagagaaagaaagcaagacaaaga

SEQ ID NO: 30091 - DNA, 33 bp, Homo sapiens
ttttttcctggatgtacgctgaggaatagaagt

SEQ ID NO: 30092 - DNA, 33 bp, Homo sapiens
gaattccacaagtcaccgtccttagtatctcaa

SEQ ID NO: 30093 - DNA, 33 bp, Homo sapiens
ggtctcctatagcattcaagttcacaaggtgct

SEQ ID NO: 30094 - DNA, 33 bp, Homo sapiens
aatatttgctgaggtgaatggaaatctatcctg

SEQ ID NO: 30095 - DNA, 33 bp, Homo sapiens
tggccaagacaagaaaggttatcaagctgtatc

SEQ ID NO: 30096 - DNA, 33 bp, Homo sapiens
agaagtgccagatttcccccagagcgtcttgtt

SEQ ID NO: 30097 - DNA, 33 bp, Homo sapiens
tgatgtgtatggaagggagtttgtgttctatgt

SEQ ID NO: 30098 - DNA, 33 bp, Homo sapiens
tcatacacaatcctctcacacagaacacatggt

SEQ ID NO: 30099 - DNA, 33 bp, Homo sapiens
tatgttgtcttctccaccccaaaataagacagg

SEQ ID NO: 30100 - DNA, 33 bp, Homo sapiens
gaaatgcaagaatacaccgggagttctgcttct

SEQ ID NO: 30101 - DNA, 33 bp, Homo sapiens
ccaagaggacaatctgcatcaagtcttcaccaa

SEQ ID NO: 30102 - DNA, 33 bp, Homo sapiens
cccatactcacctaccactttgccatcacattt

SEQ ID NO: 30103 - DNA, 33 bp, Homo sapiens
ttattaatttccttgcacctcatagtgtatata

SEQ ID NO: 30104 - DNA, 33 bp, Homo sapiens
agtctattcaggctacaataacaaactaccaca

SEQ ID NO: 30105 - DNA, 33 bp, Homo sapiens
atgaagatataacatacgagctgtgaatggaaa

SEQ ID NO: 30106 - DNA, 33 bp, Homo sapiens
ctcccaatacatagtaataaacattcaggtaat

SEQ ID NO: 30107 - DNA, 33 bp, Homo sapiens
ctaaagtccagatttcaaacacacactcaacta

SEQ ID NO: 30108 - DNA, 33 bp, Homo sapiens
ccacttctactagactaaaatttccatgaagcc

SEQ ID NO: 30109 - DNA, 33 bp, Homo sapiens
tctcagtaatccaactaaactgtacttcactgt

SEQ ID NO: 30110 - DNA, 33 bp, Homo sapiens
tcaaaatgaaacacaacgccaagcccaatgtgg

SEQ ID NO: 30111 - DNA, 33 bp, Homo sapiens
tggcataaaagttgccagacactattataggaa

SEQ ID NO: 30112 - DNA, 33 bp, Homo sapiens
ctgttgttgaactgcaactgggcactctacatt

SEQ ID NO: 30113 - DNA, 33 bp, Homo sapiens
caaaaagttacttagccagttaaatgaatctta

SEQ ID NO: 30114 - DNA, 33 bp, Homo sapiens
ttgtttacaggacttgcaacgtttacatttaat

SEQ ID NO: 30115 - DNA, 33 bp, Homo sapiens
agattaaggacactgacagttgtataattaaaa

SEQ ID NO: 30116 - DNA, 33 bp, Homo sapiens
gatggcacattcaaaaaagatgttaaatcaagg

SEQ ID NO: 30117 - DNA, 33 bp, Homo sapiens
attgtttgattttgaacggtctataaacactgg

SEQ ID NO: 30118 - DNA, 51 bp, Homo sapiens
tttatcttatgactgcacattatcacggaatacaacaaagtcattaatttt

SEQ ID NO: 30119 - DNA, 51 bp, Homo sapiens
tttggaattcgagaaaggtcttcataaatggaaaattgtcaacagtgctaa

SEQ ID NO: 30120 - DNA, 33 bp, Homo sapiens
ctcctcattgtccacaactcctgctagtatcga

SEQ ID NO: 30121 - DNA, 33 bp, Homo sapiens
aaagctggtaattaaacgcttctgatgactgaa

SEQ ID NO: 30122 - DNA, 33 bp, Homo sapiens
gtacagactcagaaaacgctgtgcatgcagccc

SEQ ID NO: 30123 - DNA, 33 bp, Homo sapiens
ctctttctggaagtggaatttaagcaacacatc

SEQ ID NO: 30124 - DNA, 33 bp, Homo sapiens
ggcagaacttggagtacgagccaatgtggacac

SEQ ID NO: 30125 - DNA, 33 bp, Homo sapiens
gaagcactcaaggttacaagaacacaacaccct

SEQ ID NO: 30126 - DNA, 33 bp, Homo sapiens
ccaagaagccatctacaaaccactttatctatg

SEQ ID NO: 30127 - DNA, 33 bp, Homo sapiens
ccatagatcacctgaacgaagttaaaatatgta

SEQ ID NO: 30128 - DNA, 33 bp, Homo sapiens
atatttaatgcatcctaaacagcatgggtggag

SEQ ID NO: 30129 - DNA, 33 bp, Homo sapiens
ggaatgtgcaagaaaactggactccatgctctg

SEQ ID NO: 30130 - DNA, 51 bp, Homo sapiens
tattctactgtggctgaactgatatacagtttgtaagaaaaaggtctcttt

SEQ ID NO: 30131 - DNA, 33 bp, Homo sapiens
ttgaatctcagaagcccaaattcctggactagt

SEQ ID NO: 30132 - DNA, 33 bp, Homo sapiens
ccatgatgtaaaaatacacagtgtttattgatt

SEQ ID NO: 30133 - DNA, 33 bp, Homo sapiens
ttcatcttctgccaacacttgaaaaaagggctg

SEQ ID NO: 30134 - DNA, 33 bp, Homo sapiens
actgaacaactccataaatttcattactgtctt

SEQ ID NO: 30135 - DNA, 33 bp, Homo sapiens
gcatttaacaagagctaaacagttctcacacat

SEQ ID NO: 30136 - DNA, 33 bp, Homo sapiens
taaaataagagaaaagccataaaggcagatcat

SEQ ID NO: 30137 - DNA, 33 bp, Homo sapiens
gacagatagtgcagggaaatagtgtaaacaagg

SEQ ID NO: 30138 - DNA, 33 bp, Homo sapiens
cctgcactatctgtcacggagtaacaaggagaa

SEQ ID NO: 30139 - DNA, 33 bp, Homo sapiens
tttctctgctgacaaaagacaaacctcttattt

SEQ ID NO: 30140 - DNA, 33 bp, Homo sapiens
ggaaccatcaaggtgacatgaatggcgaatggt

SEQ ID NO: 30141 - DNA, 33 bp, Homo sapiens
tgcaagtcggaaaatacatcaaccctgtgacct

SEQ ID NO: 30142 - DNA, 33 bp, Homo sapiens
ctgaagattacagaaagaagaagtgaaatacat

SEQ ID NO: 30143 - DNA, 51 bp, Homo sapiens
ttttgaatgttttgttcagtgttttatccccagatcctaaaaagttcctat

SEQ ID NO: 30144 - DNA, 33 bp, Homo sapiens
tgaggaagagatggaaactgtatttcattggac

SEQ ID NO: 30145 - DNA, 33 bp, Homo sapiens
agaaggcaacttaaaacactcagtccccagaac

SEQ ID NO: 30146 - DNA, 33 bp, Homo sapiens
tgtaaattaggcttaactgatgttggctgtgtt

SEQ ID NO: 30147 - DNA, 33 bp, Homo sapiens
catgaatgccagatgacagtaaactctagagag

SEQ ID NO: 30148 - DNA, 33 bp, Homo sapiens
ttgaaaattagaccacaggtagaatgagtatag

SEQ ID NO: 30149 - DNA, 33 bp, Homo sapiens
acaaatactcatttgcccttgatttgcacatcc

SEQ ID NO: 30150 - DNA, 33 bp, Homo sapiens
ctacatggaaaattgaagtagcaaggtaggtca

SEQ ID NO: 30151 - DNA, 33 bp, Homo sapiens
aatgtttgtcaatatcaaccaagaacaaaagtt

SEQ ID NO: 30152 - DNA, 33 bp, Homo sapiens
caatcaactctgaagcacatcttttctcatccc

SEQ ID NO: 30153 - DNA, 33 bp, Homo sapiens
gaaatgagctatcaccaaaagatgtggaggaac

SEQ ID NO: 30154 - DNA, 33 bp, Homo sapiens
tcaaaacccatagaacactatgacaccaagagt

SEQ ID NO: 30155 - DNA, 33 bp, Homo sapiens
aacttagtgggagaataaattggcatggcattt

SEQ ID NO: 30156 - DNA, 33 bp, Homo sapiens
ccctaggagatcctgacaataggttcctaagat

SEQ ID NO: 30157 - DNA, 33 bp, Homo sapiens
atgttcatatctttccaccagctagtatcagca

SEQ ID NO: 30158 - DNA, 33 bp, Homo sapiens
gaattaactgtccaaactgatacacttttttta

SEQ ID NO: 30159 - DNA, 51 bp, Homo sapiens
gtattgctattgcacttctcttacaacaactaaagtgatctcatttttaat

SEQ ID NO: 30160 - DNA, 33 bp, Homo sapiens
aatcttaacaggactaccagctgaagagacaag

SEQ ID NO: 30161 - DNA, 33 bp, Homo sapiens
ggagcgtttttaacccactgcatatacacacaa

SEQ ID NO: 30162 - DNA, 33 bp, Homo sapiens
gaaagagagaagtggcacattatgaactaagca

SEQ ID NO: 30163 - DNA, 33 bp, Homo sapiens
gaagagagttgcagtcaaatacttagccctgct

SEQ ID NO: 30164 - DNA, 33 bp, Homo sapiens
ccaattattctcactcgaaggttacatcatatt

SEQ ID NO: 30165 - DNA, 51 bp, Homo sapiens
gaaattaatctagaaatgtgttaaaccgcttatagggctagagtgtgtctt

SEQ ID NO: 30166 - DNA, 51 bp, Homo sapiens
ataagctgcatagagctctccatcaaaataacaaaaaaggtttcagtgctg

SEQ ID NO: 30167 - DNA, 51 bp, Homo sapiens
aaaatatatatgaatgacagtctaaccaatatgaggttaaaaggagaaagc

SEQ ID NO: 30168 - DNA, 33 bp, Homo sapiens
ccagatgggtctgttacgatttcagccaccttg

SEQ ID NO: 30169 - DNA, 33 bp, Homo sapiens
gcagctcattgcagtaagacagatttaaacaac

SEQ ID NO: 30170 - DNA, 33 bp, Homo sapiens
taacatagacataaacacagggcaagaacgtgt

SEQ ID NO: 30171 - DNA, 33 bp, Homo sapiens
ttaatccttactatccacataagaacttggaaa

SEQ ID NO: 30172 - DNA, 33 bp, Homo sapiens
ttttttcttgtcataaatcctaaatgcagccag

SEQ ID NO: 30173 - DNA, 33 bp, Homo sapiens
acttgctatgtcttgacaggaataggagaagcc

SEQ ID NO: 30174 - DNA, 33 bp, Homo sapiens
cccaaacaaggaaataggtaacacaagtgtggc

SEQ ID NO: 30175 - DNA, 33 bp, Homo sapiens
gtattattctttcgaacttaagattttgataat

SEQ ID NO: 30176 - DNA, 33 bp, Homo sapiens
acttcttaaaaccaaagagtgcaaaattatgtg

SEQ ID NO: 30177 - DNA, 33 bp, Homo sapiens
tatcatgtttataggacccaaaatcatgtgagt

SEQ ID NO: 30178 - DNA, 51 bp, Homo sapiens
ttggaaggaagtaggactcaagagtaaagtattaaggtggggtttcaagga

SEQ ID NO: 30179 - DNA, 33 bp, Homo sapiens
cttagtacattgaagaacaagaaggcttctgta

SEQ ID NO: 30180 - DNA, 33 bp, Homo sapiens
ccgctgtcagaaacacccaatttatacacacac

SEQ ID NO: 30181 - DNA, 33 bp, Homo sapiens
gtatcaatataaaagtaaaatggcaacacacta

SEQ ID NO: 30182 - DNA, 33 bp, Homo sapiens
cctatctttgtataaccgtccatctttttttaa

SEQ ID NO: 30183 - DNA, 33 bp, Homo sapiens
tttctgctccatgaataataataagtcttccac

SEQ ID NO: 30184 - DNA, 33 bp, Homo sapiens
tctacctgggaaccaacggcacaccctatcaag

SEQ ID NO: 30185 - DNA, 33 bp, Homo sapiens
ttatcaagagagatcaaattccatcctattcac

SEQ ID NO: 30186 - DNA, 33 bp, Homo sapiens
aaatcagttattagtcacagttcaagatacaga

SEQ ID NO: 30187 - DNA, 33 bp, Homo sapiens
atctgtgtgatttgaacgctacacacctttggc

SEQ ID NO: 30188 - DNA, 33 bp, Homo sapiens
tattctgtagggaaaaaagagctaacacacatg

SEQ ID NO: 30189 - DNA, 51 bp, Homo sapiens
aagaagttttggagactgcatatcacaccctattttaaaggttcacattta

SEQ ID NO: 30190 - DNA, 33 bp, Homo sapiens
atcaccaagacgatggaactaagccattcatga

SEQ ID NO: 30191 - DNA, 33 bp, Homo sapiens
atggccgcactccgccacagctgctccatgcac

SEQ ID NO: 30192 - DNA, 33 bp, Homo sapiens
taggaatgcgagttagaatagtagtacttctca

SEQ ID NO: 30193 - DNA, 33 bp, Homo sapiens
aacatttcactttttcacctaaatgtgtacttt

SEQ ID NO: 30194 - DNA, 33 bp, Homo sapiens
tacttatccacagttaaacaagaggaggggata

SEQ ID NO: 30195 - DNA, 33 bp, Homo sapiens
taagcatccaggaaaaattgtcattctgtgtcc

SEQ ID NO: 30196 - DNA, 33 bp, Homo sapiens
ccttgattttaaaaaccgttcctggctgagggc

SEQ ID NO: 30197 - DNA, 33 bp, Homo sapiens
gcaaaataagatgccacgaggctgtcagtctgc

SEQ ID NO: 30198 - DNA, 33 bp, Homo sapiens
tctggtctgaatccaacgtcacctaagatttag

SEQ ID NO: 30199 - DNA, 33 bp, Homo sapiens
ccattctcccgccagaaaaatatatgtgtatgt

SEQ ID NO: 30200 - DNA, 33 bp, Homo sapiens
gcacaaacctcaagggaccacacatttggtaga

SEQ ID NO: 30201 - DNA, 33 bp, Homo sapiens
tataatatttatagaaactagaattctgccttg

SEQ ID NO: 30202 - DNA, 33 bp, Homo sapiens
gaagaccctattagagaagctcagaaagggcct

SEQ ID NO: 30203 - DNA, 33 bp, Homo sapiens
atgattaagctgaattaaaatcacaagataata

SEQ ID NO: 30204 - DNA, 33 bp, Homo sapiens
gataactgagcagcaaccgcagcttctcctgga

SEQ ID NO: 30205 - DNA, 33 bp, Homo sapiens
ttgatgctggtaaaacgacatgatctctaaaca

SEQ ID NO: 30206 - DNA, 33 bp, Homo sapiens
atagttttgagcatcaaggaatacattttcaga

SEQ ID NO: 30207 - DNA, 33 bp, Homo sapiens
gggaattggcagccacaaacatattggtggtag

SEQ ID NO: 30208 - DNA, 33 bp, Homo sapiens
acagctatttggaaaacttaatgcaaattcatg

SEQ ID NO: 30209 - DNA, 33 bp, Homo sapiens
tgattcatttctctcacaacaaggatacccatt

SEQ ID NO: 30210 - DNA, 51 bp, Homo sapiens
ggataaagcttgttccaaccagtaaatcaagattcttcaccaagaaccttc

SEQ ID NO: 30211 - DNA, 51 bp, Homo sapiens
acaagaaacaaaacagatttccaaggatttttgattacagcccaaaaggtt

SEQ ID NO: 30212 - DNA, 51 bp, Homo sapiens
ttatgaaaaacaatatgcactaccaatggtaataagtataatagtcacaag

SEQ ID NO: 30213 - DNA, 51 bp, Homo sapiens
atagagcaaaaagtctttgtacctccattgtattattggctaaaagcagaa

SEQ ID NO: 30214 - DNA, 33 bp, Homo sapiens
cattacttttctacaactcttaattacctttga

SEQ ID NO: 30215 - DNA, 33 bp, Homo sapiens
ttttatccatcatttacgtagaaaaatcagaac

SEQ ID NO: 30216 - DNA, 51 bp, Homo sapiens
ggcatttaggaaagagttttgcatacattaagtgtgaaataaatactggat

SEQ ID NO: 30217 - DNA, 33 bp, Homo sapiens
ctggctttaggataccaacaatttatactttgc

SEQ ID NO: 30218 - DNA, 33 bp, Homo sapiens
taggaacatagttagaatcagtcaataagtcaa

SEQ ID NO: 30219 - DNA, 33 bp, Homo sapiens
atctagaggtctattacaaaaacagtcaggaaa

SEQ ID NO: 30220 - DNA, 33 bp, Homo sapiens
gaacaaaatcatgccactattaatgacctgtgt

SEQ ID NO: 30221 - DNA, 33 bp, Homo sapiens
tcaatttatactctcaacaggaatatattatct

SEQ ID NO: 30222 - DNA, 33 bp, Homo sapiens
agttgttgctaagttccctcatagctttaatat

SEQ ID NO: 30223 - DNA, 33 bp, Homo sapiens
atgtgagacaaatccacagtcgattgcttcctt

SEQ ID NO: 30224 - DNA, 33 bp, Homo sapiens
ccaaagcacacaattacatatcgatgattatgg

SEQ ID NO: 30225 - DNA, 33 bp, Homo sapiens
ctgaggtgttgggggcacaatctctgctccatt

SEQ ID NO: 30226 - DNA, 33 bp, Homo sapiens
ctcactgtgtgcaagacgtaagtgatttgcttg

SEQ ID NO: 30227 - DNA, 33 bp, Homo sapiens
agctgaagttgcagcccacaggtggaatttgtt

SEQ ID NO: 30228 - DNA, 33 bp, Homo sapiens
aaaaaggtatggaaaagttgaggatcttgatag

SEQ ID NO: 30229 - DNA, 33 bp, Homo sapiens
aacagcaaggtagaaagtaaaaagccagtcttc

SEQ ID NO: 30230 - DNA, 33 bp, Homo sapiens
gtgtaatttacaagaacacttaaagaactctca

SEQ ID NO: 30231 - DNA, 33 bp, Homo sapiens
gttgtttgaaattggacgtaaaaatagttgtct

SEQ ID NO: 30232 - DNA, 33 bp, Homo sapiens
agtcgttcaacaaatacctatttagtcccaaag

SEQ ID NO: 30233 - DNA, 33 bp, Homo sapiens
tgttgagcagtgggaccggactttgcttataag

SEQ ID NO: 30234 - DNA, 33 bp, Homo sapiens
acccagaaatgctttacgatggaggacattaca

SEQ ID NO: 30235 - DNA, 33 bp, Homo sapiens
tgaccattaatgttgacggtcccctgtggcaga

SEQ ID NO: 30236 - DNA, 33 bp, Homo sapiens
atcacagcaaacgcttcaagagttctcaacaat

SEQ ID NO: 30237 - DNA, 33 bp, Homo sapiens
ggaccaatttagctgacctcttccttgactgag

SEQ ID NO: 30238 - DNA, 51 bp, Homo sapiens
gtgtagcacatacgtagtataagaactctgttgatataatgccgcagtcat

SEQ ID NO: 30239 - DNA, 33 bp, Homo sapiens
cacgtataatgagatgccactgcaagagatcat

SEQ ID NO: 30240 - DNA, 33 bp, Homo sapiens
gtcctggcgctgttgaactttatgagatgacta

SEQ ID NO: 30241 - DNA, 33 bp, Homo sapiens
aagatcatgtctgcaaacaagaactatttgact

SEQ ID NO: 30242 - DNA, 33 bp, Homo sapiens
ataagtctgtgcaaccagaaccatttttccata

SEQ ID NO: 30243 - DNA, 33 bp, Homo sapiens
tgagaaaggaaggttacagacttacacatatgc

SEQ ID NO: 30244 - DNA, 33 bp, Homo sapiens
gttgcttgatggagtgcaccaagtaaaaaagat

SEQ ID NO: 30245 - DNA, 51 bp, Homo sapiens
cagagctgagagtggtagatggaaccattcttccaaagcatcatttcccca

SEQ ID NO: 30246 - DNA, 51 bp, Homo sapiens
tggagatcgtggtggatattttccgaaagctgggactgaggcagtgccttg

SEQ ID NO: 30247 - DNA, 33 bp, Homo sapiens
ctggtggcatgcataaacccaaaggtaggggtc

SEQ ID NO: 30248 - DNA, 33 bp, Homo sapiens
aaggttaaggttggaggagacgaaaatcaagag

SEQ ID NO: 30249 - DNA, 33 bp, Homo sapiens
attattcagcactggaaaaagatagccttcttt

SEQ ID NO: 30250 - DNA, 33 bp, Homo sapiens
aatgtaagcagagagacggatattcttgtttta

SEQ ID NO: 30251 - DNA, 33 bp, Homo sapiens
cattaatacccaggaaatgactcaaaccacagt

SEQ ID NO: 30252 - DNA, 33 bp, Homo sapiens
tactttctagatacaacggtagatggtagtaca

SEQ ID NO: 30253 - DNA, 33 bp, Homo sapiens
agatgactaaggcacactatcatttccaatttt

SEQ ID NO: 30254 - DNA, 33 bp, Homo sapiens
tgcttgttaatgacataaagattggtgaggatt

SEQ ID NO: 30255 - DNA, 33 bp, Homo sapiens
tgaccacttgctgttacacctgctttgtggcaa

SEQ ID NO: 30256 - DNA, 33 bp, Homo sapiens
aatcagctttgaactggatctaagtcatccttc

SEQ ID NO: 30257 - DNA, 51 bp, Homo sapiens
gtaagttgttgtgaataatatcttgaagaaacctacctgggttgtagagtt

SEQ ID NO: 30258 - DNA, 51 bp, Homo sapiens
acagacaaaggcatatgccacaagaaaggaacagagtttcactgggtttac

SEQ ID NO: 30259 - DNA, 51 bp, Homo sapiens
aaaatttttggttgagatcttaaaaaatttctaaataataatccctagtaa

SEQ ID NO: 30260 - DNA, 33 bp, Homo sapiens
gactagctgtaaaggacatatattttgccctgt

SEQ ID NO: 30261 - DNA, 33 bp, Homo sapiens
atagttctggccacgaaaataggatgctgatac

SEQ ID NO: 30262 - DNA, 33 bp, Homo sapiens
gagctcacatggtaaaggatgtctgccaccttc

SEQ ID NO: 30263 - DNA, 33 bp, Homo sapiens
ttcagtatgttctgaacacacaatggctaatat

SEQ ID NO: 30264 - DNA, 33 bp, Homo sapiens
actggagttcccactcaaatgccactaaccctc

SEQ ID NO: 30265 - DNA, 33 bp, Homo sapiens
ggcattatatcagcaacgtgtgtttctgctaca

SEQ ID NO: 30266 - DNA, 33 bp, Homo sapiens
gcgttaatctattaataaggcatccatccccat

SEQ ID NO: 30267 - DNA, 33 bp, Homo sapiens
tgcaatcaactacgtccactggcttcggaattg

SEQ ID NO: 30268 - DNA, 33 bp, Homo sapiens
atttgaagaatgccaaatcaaatttctgagctc

SEQ ID NO: 30269 - DNA, 33 bp, Homo sapiens
ataatcaagatttgcaaaagtaggcaaatggat

SEQ ID NO: 30270 - DNA, 33 bp, Homo sapiens
aggcaactgctatcgacattccttgtcacagtt

SEQ ID NO: 30271 - DNA, 33 bp, Homo sapiens
agcccttttatttccaccaggtgtatctttcta

SEQ ID NO: 30272 - DNA, 33 bp, Homo sapiens
gcctatggtatttccaactcttcctaatctttg

SEQ ID NO: 30273 - DNA, 33 bp, Homo sapiens
gaccacaagcagacaacagttttgccacatcag

SEQ ID NO: 30274 - DNA, 33 bp, Homo sapiens
gaaagtataaaccatcacatacaagagaatccg

SEQ ID NO: 30275 - DNA, 33 bp, Homo sapiens
gcagttagctaagaccacttttaatgatagggc

SEQ ID NO: 30276 - DNA, 33 bp, Homo sapiens
atacacctatagcactgaataaaaatactgctg

SEQ ID NO: 30277 - DNA, 51 bp, Homo sapiens
caattctaaaattttagaacaataactgggtctttaaatatagatttggga

SEQ ID NO: 30278 - DNA, 33 bp, Homo sapiens
atgtttcaaattatccgagttaacgtgactggc

SEQ ID NO: 30279 - DNA, 33 bp, Homo sapiens
tattattctctaaaacgctaatatggtctggct

SEQ ID NO: 30280 - DNA, 51 bp, Homo sapiens
ctatcaggacacaatgaaatatttacattctgggataacaatgtactaatg

SEQ ID NO: 30281 - DNA, 33 bp, Homo sapiens
actcttactcatcaccacaaatcacttattaat

SEQ ID NO: 30282 - DNA, 33 bp, Homo sapiens
tttattctgttgtctaacttctcaatgtttaat

SEQ ID NO: 30283 - DNA, 33 bp, Homo sapiens
acagcctaatgatgcacaaaaatagtgatatgt

SEQ ID NO: 30284 - DNA, 33 bp, Homo sapiens
tattgattgccttaagaactgcaattaactaag

SEQ ID NO: 30285 - DNA, 33 bp, Homo sapiens
atattagtgcaggctacgcgtgacattacccca

SEQ ID NO: 30286 - DNA, 33 bp, Homo sapiens
tggagtctgtccagtaactaatctccttgcaga

SEQ ID NO: 30287 - DNA, 33 bp, Homo sapiens
tcaaaatgtgcataaaatacaggcataagttgt

SEQ ID NO: 30288 - DNA, 33 bp, Homo sapiens
gaaatgttactttcaacaacttacaggaccttg

SEQ ID NO: 30289 - DNA, 33 bp, Homo sapiens
actagttggctccaaactgagaaaactgtgcac

SEQ ID NO: 30290 - DNA, 33 bp, Homo sapiens
aaacctgcttcttacaaactcaactgaaatcat

SEQ ID NO: 30291 - DNA, 33 bp, Homo sapiens
atgcagaaaactaagacacccatgaaggagaag

SEQ ID NO: 30292 - DNA, 33 bp, Homo sapiens
ggtatccctaaatgaaagaactggatgcaaatt

SEQ ID NO: 30293 - DNA, 33 bp, Homo sapiens
gactcaaaccccatcaatctcatgacaaagccc

SEQ ID NO: 30294 - DNA, 33 bp, Homo sapiens
aggatgtttcaggtgaagttctggagataatct

SEQ ID NO: 30295 - DNA, 33 bp, Homo sapiens
tgttaaccaaacctacaatatcatcactctaat

SEQ ID NO: 30296 - DNA, 33 bp, Homo sapiens
gatcattaggtcatcaacaaaaataaatcaatt

SEQ ID NO: 30297 - DNA, 33 bp, Homo sapiens
ttggctacatctactccaactttgaggaaacac

SEQ ID NO: 30298 - DNA, 33 bp, Homo sapiens
aatccaagcctttagaccagaagtaagaataag

SEQ ID NO: 30299 - DNA, 33 bp, Homo sapiens
ttgtgcagaggaaactaagcaatggagttcatg

SEQ ID NO: 30300 - DNA, 33 bp, Homo sapiens
tttctttgcagtagccgctatggttttgaagca

SEQ ID NO: 30301 - DNA, 33 bp, Homo sapiens
attcacaactaaagccaccattgaatcccatcc

SEQ ID NO: 30302 - DNA, 33 bp, Homo sapiens
cacacattagttctccccagtgccatcactttg

SEQ ID NO: 30303 - DNA, 33 bp, Homo sapiens
cccacgtgtccaaatgaatattctgtctgacac

SEQ ID NO: 30304 - DNA, 33 bp, Homo sapiens
tcttgtctgattatacacctatgtgagaattca

SEQ ID NO: 30305 - DNA, 33 bp, Homo sapiens
tggatccttttttccacgtgtatgcagcaagat

SEQ ID NO: 30306 - DNA, 51 bp, Homo sapiens
ctgccactcagttctctgtggagatgatagcaattcatgggactcagagtg

SEQ ID NO: 30307 - DNA, 51 bp, Homo sapiens
ctcccatagcagtgagacattacgaaaaaacggtttctatggtgttcgtct

SEQ ID NO: 30308 - DNA, 33 bp, Homo sapiens
aagaatagagagtcagaaaattgaaaataaata

SEQ ID NO: 30309 - DNA, 33 bp, Homo sapiens
ttgagttataagggaaaaatgatgatctcagtg

SEQ ID NO: 30310 - DNA, 33 bp, Homo sapiens
aactcctactgaccacacttttccagctgagtc

SEQ ID NO: 30311 - DNA, 33 bp, Homo sapiens
tgaaatttagattgggcaattttgtctggtgaa

SEQ ID NO: 30312 - DNA, 33 bp, Homo sapiens
aaattgcttgattatacgacatttatggttcaa

SEQ ID NO: 30313 - DNA, 33 bp, Homo sapiens
gtctccataggcactgaaaacttaccatgtttc

SEQ ID NO: 30314 - DNA, 33 bp, Homo sapiens
ttgcttatcaggaagacacatttagaaagacaa

SEQ ID NO: 30315 - DNA, 33 bp, Homo sapiens
taagaaaccagttcaacagctgatgcctttgac

SEQ ID NO: 30316 - DNA, 33 bp, Homo sapiens
gtttttgcagtaaatacggaagtggatatcaag

SEQ ID NO: 30317 - DNA, 33 bp, Homo sapiens
tattctgtgctcctaaccttttatttgattggg

SEQ ID NO: 30318 - DNA, 33 bp, Homo sapiens
atgctaattccccccaggaaagatggctttaca

SEQ ID NO: 30319 - DNA, 33 bp, Homo sapiens
ttgaatctttgagttacctggatgcatttctta

SEQ ID NO: 30320 - DNA, 33 bp, Homo sapiens
gcctctggcagagccacacttagctgaatttga

SEQ ID NO: 30321 - DNA, 33 bp, Homo sapiens
agagcatattcactagcacattatcaggtctac

SEQ ID NO: 30322 - DNA, 33 bp, Homo sapiens
tatattatacatatacagaacatctacatattt

SEQ ID NO: 30323 - DNA, 33 bp, Homo sapiens
gcgtacactctcatccaataggagaatgcatat

SEQ ID NO: 30324 - DNA, 33 bp, Homo sapiens
catgttttttggtcccccatgttccccttcttt

SEQ ID NO: 30325 - DNA, 33 bp, Homo sapiens
catacatttcagtcccaactcacttgcttcatc

SEQ ID NO: 30326 - DNA, 51 bp, Homo sapiens
tcatgaaagcttattaagctgattacgcaataggcttaacatgcactatcc

SEQ ID NO: 30327 - DNA, 33 bp, Homo sapiens
gcagtgatgcattgcaactttcattataacaaa

SEQ ID NO: 30328 - DNA, 33 bp, Homo sapiens
gtgacgatttcacacaagcattggaaaagaaaa

SEQ ID NO: 30329 - DNA, 33 bp, Homo sapiens
gttcatagtatctccaatctgcatgcttcggat

SEQ ID NO: 30330 - DNA, 33 bp, Homo sapiens
tggaggagattggaagccttcagcaatggcctc

SEQ ID NO: 30331 - DNA, 33 bp, Homo sapiens
gatagctacactgtccccaaaatatcacacgca

SEQ ID NO: 30332 - DNA, 33 bp, Homo sapiens
ccaactttctgtcaccaaaaccagaagccaccc

SEQ ID NO: 30333 - DNA, 33 bp, Homo sapiens
tgttcataaggtaagcagcacatggttctttcg

SEQ ID NO: 30334 - DNA, 33 bp, Homo sapiens
tcggtatttagggtgacctttactgttgctgtg

SEQ ID NO: 30335 - DNA, 33 bp, Homo sapiens
gaacttcctgaatcaaagtgtggactgtccaca

SEQ ID NO: 30336 - DNA, 33 bp, Homo sapiens
tttcagacaagctctcaataaccctggagtaga

SEQ ID NO: 30337 - DNA, 33 bp, Homo sapiens
gccgtcccaaaactcagatttctggagtccctt

SEQ ID NO: 30338 - DNA, 33 bp, Homo sapiens
tgtccagccgcatacagcaattctattcacatt

SEQ ID NO: 30339 - DNA, 33 bp, Homo sapiens
tgctttgatgggctagaagagaaatggtttgct

SEQ ID NO: 30340 - DNA, 33 bp, Homo sapiens
ttagggttagtcaataacgccgagcctcggagg

SEQ ID NO: 30341 - DNA, 33 bp, Homo sapiens
tacatgtaaaattctacagtacaggtagaggca

SEQ ID NO: 30342 - DNA, 33 bp, Homo sapiens
cagtgcatttttccacagattacagacaaaaag

SEQ ID NO: 30343 - DNA, 33 bp, Homo sapiens
tttacctacacactcaccctttctattactctt

SEQ ID NO: 30344 - DNA, 33 bp, Homo sapiens
aatagagtgtgtcaaaaacgtgcaattgatgaa

SEQ ID NO: 30345 - DNA, 33 bp, Homo sapiens
atttgaccctgtgatgcatttatcaaaatatgg

SEQ ID NO: 30346 - DNA, 33 bp, Homo sapiens
accgctgtggtctgcaactctgacaagccccta

SEQ ID NO: 30347 - DNA, 33 bp, Homo sapiens
aatatatgcaaataaacgaaactgcggtgaaat

SEQ ID NO: 30348 - DNA, 33 bp, Homo sapiens
gaccactttaaattcacgctgtctgatgggagg

SEQ ID NO: 30349 - DNA, 33 bp, Homo sapiens
ggcatttagagaaatacggccaatgtgcaaaac

SEQ ID NO: 30350 - DNA, 33 bp, Homo sapiens
gagtcttttttcggtcactcctgcccttgttac

SEQ ID NO: 30351 - DNA, 33 bp, Homo sapiens
cagttttccctggacaatatggtgccaatcaca

SEQ ID NO: 30352 - DNA, 33 bp, Homo sapiens
tacagcatcctacacacgacaatataagtaaca

SEQ ID NO: 30353 - DNA, 33 bp, Homo sapiens
tgggctatgcctagaacctgtagttgatgataa

SEQ ID NO: 30354 - DNA, 33 bp, Homo sapiens
ttctctactgccatgacggatctaacagcactc

SEQ ID NO: 30355 - DNA, 33 bp, Homo sapiens
cgaatgaatgaatgaaagctcgggtacaacagg

SEQ ID NO: 30356 - DNA, 33 bp, Homo sapiens
agcggagagcttattccctttcttgtcgcctat

SEQ ID NO: 30357 - DNA, 33 bp, Homo sapiens
atattcatctactccacctgtattttcacaaga

SEQ ID NO: 30358 - DNA, 51 bp, Homo sapiens
agctatctagaaccattctataaatcagccttttatttgccagccatacat

SEQ ID NO: 30359 - DNA, 33 bp, Homo sapiens
tttgaaacgtaacttgaaagggctttgaaatgc

SEQ ID NO: 30360 - DNA, 33 bp, Homo sapiens
gtcttaagaaattactaaaagatacgactcaat

SEQ ID NO: 30361 - DNA, 33 bp, Homo sapiens
aaataatatgttggaaatgataccagtgcaagg

SEQ ID NO: 30362 - DNA, 33 bp, Homo sapiens
tcctaggaagcaaactcaccgtgttgggctctc

SEQ ID NO: 30363 - DNA, 33 bp, Homo sapiens
ttaatttcccaggacacggaataactcttaaaa

SEQ ID NO: 30364 - DNA, 33 bp, Homo sapiens
tctaacaagatcctaaatgatgacgttaatgtt

SEQ ID NO: 30365 - DNA, 33 bp, Homo sapiens
tagaaaatgctttcccaaatggtttttcagaga

SEQ ID NO: 30366 - DNA, 33 bp, Homo sapiens
tcatgaaaagaagagacgcagggctcagagctc

SEQ ID NO: 30367 - DNA, 33 bp, Homo sapiens
tagactctccataccaaaaaaggccacaagaaa

SEQ ID NO: 30368 - DNA, 33 bp, Homo sapiens
aatgttacgcttttgaactgtcattggcaatgc

SEQ ID NO: 30369 - DNA, 33 bp, Homo sapiens
gtcttcctcatccggacctaggaaaggttaact

SEQ ID NO: 30370 - DNA, 33 bp, Homo sapiens
ggatcaatagagtagaagtttggatggtaggga

SEQ ID NO: 30371 - DNA, 33 bp, Homo sapiens
caattgagattgcaaaagttagatatgtgcaaa

SEQ ID NO: 30372 - DNA, 33 bp, Homo sapiens
cttgttggttgaagtcaaaccatggaatagagg

SEQ ID NO: 30373 - DNA, 33 bp, Homo sapiens
agaaagataacaaggacatgtaagtaaatggtc

SEQ ID NO: 30374 - DNA, 33 bp, Homo sapiens
tgcgaagagaagtaaacataaagccttcacaag

SEQ ID NO: 30375 - DNA, 33 bp, Homo sapiens
catacaggaatacaacagctatacaagaaagaa

SEQ ID NO: 30376 - DNA, 33 bp, Homo sapiens
tttatttgtcatcagacgctatccaggatatag

SEQ ID NO: 30377 - DNA, 33 bp, Homo sapiens
gggaagagagagccaacgcaaggacacattact

SEQ ID NO: 30378 - DNA, 33 bp, Homo sapiens
gcaaaaacagtggcaacagtacgattgacgtga

SEQ ID NO: 30379 - DNA, 33 bp, Homo sapiens
atcttgactacattcacaattctctttttccct

SEQ ID NO: 30380 - DNA, 51 bp, Homo sapiens
gagaagaaaagctgatgacgcatgaaagaggagagaattacgggggttcaa

SEQ ID NO: 30381 - DNA, 33 bp, Homo sapiens
tgccttatgtgagacaccgttctctccccattt

SEQ ID NO: 30382 - DNA, 33 bp, Homo sapiens
ttcttgaaagtcagaaaaatctaaagcaaaata

SEQ ID NO: 30383 - DNA, 33 bp, Homo sapiens
attcaactctcttggcaaaaaaacgacgccttt

SEQ ID NO: 30384 - DNA, 33 bp, Homo sapiens
tggaagccacaaaaaacagttgggcaaggcttg

SEQ ID NO: 30385 - DNA, 33 bp, Homo sapiens
ataaacaatggaaaaaagcccaactgttgtttt

SEQ ID NO: 30386 - DNA, 33 bp, Homo sapiens
agcatctggaatcacaatggcaatcttcccaaa

SEQ ID NO: 30387 - DNA, 33 bp, Homo sapiens
ggcagtatcatgacacaaaacaaagaacaatgg

SEQ ID NO: 30388 - DNA, 33 bp, Homo sapiens
acacacagtgcagagcaatgagtatagtagtat

SEQ ID NO: 30389 - DNA, 33 bp, Homo sapiens
cattcaaatcctctacacagtaagtgctcactt

SEQ ID NO: 30390 - DNA, 33 bp, Homo sapiens
cttactgtggtaaaaccaggccaaagtgtacag

SEQ ID NO: 30391 - DNA, 33 bp, Homo sapiens
tgacactttcatttaaaggcttctatttcaagt

SEQ ID NO: 30392 - DNA, 33 bp, Homo sapiens
ggatacattaattcaaagtatagtagcacttga

SEQ ID NO: 30393 - DNA, 33 bp, Homo sapiens
ggttgttgaatagtaacgaagaaatgcttctgc

SEQ ID NO: 30394 - DNA, 33 bp, Homo sapiens
taacacaattaggatgcaagttatctttatgga

SEQ ID NO: 30395 - DNA, 33 bp, Homo sapiens
acataggtaacaaaaacgtatgcataatggtgc

SEQ ID NO: 30396 - DNA, 33 bp, Homo sapiens
catcctactcttcacaacttctgaaaatgtttt

SEQ ID NO: 30397 - DNA, 33 bp, Homo sapiens
atccatacgtgtcataacttccctgcaagacaa

SEQ ID NO: 30398 - DNA, 33 bp, Homo sapiens
tgacttgcttctaatcaatagaatttggtgaat

SEQ ID NO: 30399 - DNA, 51 bp, Homo sapiens
tgaaatcagttttgctttagagacaacataagtaggtcacctgttttacca

SEQ ID NO: 30400 - DNA, 51 bp, Homo sapiens
tctgagggtgaagaaagtaaagacactgattaactttaggacttacgtttt

SEQ ID NO: 30401 - DNA, 33 bp, Homo sapiens
tgtattggatggtagacgagagagaaagaacag

SEQ ID NO: 30402 - DNA, 33 bp, Homo sapiens
aggtgtgaaattcacaacagatttccaagactt

SEQ ID NO: 30403 - DNA, 33 bp, Homo sapiens
atttgaacacagggcaatcattagaaaaaattt

SEQ ID NO: 30404 - DNA, 33 bp, Homo sapiens
ctcctaccttgaagcaatcttatttcagctcag

SEQ ID NO: 30405 - DNA, 33 bp, Homo sapiens
actctcaccagcaacacggtagagttttagcgc

SEQ ID NO: 30406 - DNA, 33 bp, Homo sapiens
tctatccatttcagcaccaattggttcctagat

SEQ ID NO: 30407 - DNA, 51 bp, Homo sapiens
atccgtcaacctctggggagaaaacaggcatttaaatctcgatagtaaatg

SEQ ID NO: 30408 - DNA, 33 bp, Homo sapiens
ctctgacggattacacactacatcttgagaaaa

SEQ ID NO: 30409 - DNA, 33 bp, Homo sapiens
agagctgcaagctttggaaataagaggttgctt

SEQ ID NO: 30410 - DNA, 33 bp, Homo sapiens
gtgtccgtggtcacaacgaaacagagaccactg

SEQ ID NO: 30411 - DNA, 33 bp, Homo sapiens
tgatgtggtcctaacaagaaatgggagaacttt

SEQ ID NO: 30412 - DNA, 33 bp, Homo sapiens
atcttgaatgtgcaggacaactgccagagacac

SEQ ID NO: 30413 - DNA, 33 bp, Homo sapiens
ccatgaggctgcactacggcttttctagaatcc

SEQ ID NO: 30414 - DNA, 33 bp, Homo sapiens
tgaaagcctgttccacaaagtctgagaccaaaa

SEQ ID NO: 30415 - DNA, 33 bp, Homo sapiens
gaacacactcagctccacctctcctcagaaggc

SEQ ID NO: 30416 - DNA, 33 bp, Homo sapiens
gttctgagtctttcaacgacactcccattacac

SEQ ID NO: 30417 - DNA, 33 bp, Homo sapiens
actgagtgattatatgaagaggcaaatgccact

SEQ ID NO: 30418 - DNA, 33 bp, Homo sapiens
ggcccagagggaacacgggcatggagaatagca

SEQ ID NO: 30419 - DNA, 33 bp, Homo sapiens
ttagggcaagaatgtgaagaatgaaagcaccgt

SEQ ID NO: 30420 - DNA, 33 bp, Homo sapiens
gaaaataagtgaaaggacactaccaattcctcc

SEQ ID NO: 30421 - DNA, 33 bp, Homo sapiens
ataaaaggataacagacgaggcaacaaattgcc

SEQ ID NO: 30422 - DNA, 33 bp, Homo sapiens
aagtcacctgtgcacccggagaagggctaattt

SEQ ID NO: 30423 - DNA, 33 bp, Homo sapiens
tatggagtcacgcctgcaggatggtgatcccat

SEQ ID NO: 30424 - DNA, 33 bp, Homo sapiens
cttatctccatgagtaaaacaaagtaatggggc

SEQ ID NO: 30425 - DNA, 33 bp, Homo sapiens
ttaagcacctattatgcaggcagagcttcagac

SEQ ID NO: 30426 - DNA, 33 bp, Homo sapiens
aagtttaatatgggcccacagtagacttgtaaa

SEQ ID NO: 30427 - DNA, 33 bp, Homo sapiens
acaaaccagtgagtgagaaccatcctggatgcc

SEQ ID NO: 30428 - DNA, 33 bp, Homo sapiens
atggagactcatgaagaactagctacattaact

SEQ ID NO: 30429 - DNA, 33 bp, Homo sapiens
gagacaggatctttagcaatgtagttaagttaa

SEQ ID NO: 30430 - DNA, 33 bp, Homo sapiens
atattcaacactgacaaagtaaaatagctgaga

SEQ ID NO: 30431 - DNA, 33 bp, Homo sapiens
cagtgctggaagcgtcaccagctcagtgatcat

SEQ ID NO: 30432 - DNA, 33 bp, Homo sapiens
taacccttggaagctacggatctatctaatagg

SEQ ID NO: 30433 - DNA, 33 bp, Homo sapiens
gctccctgctgtatcacctggtagctacacaac

SEQ ID NO: 30434 - DNA, 33 bp, Homo sapiens
gttcagtaagtacagcacagagattagtatgac

SEQ ID NO: 30435 - DNA, 33 bp, Homo sapiens
taaagccatcttcagcaagggctgaactgaacc

SEQ ID NO: 30436 - DNA, 33 bp, Homo sapiens
tgctgaagcacctcacgcaggatttccggcctc

SEQ ID NO: 30437 - DNA, 33 bp, Homo sapiens
cagcatctgtaactgacagcgggggattgtgac

SEQ ID NO: 30438 - DNA, 33 bp, Homo sapiens
ttctgctccaagaaacccaccttgctcggtcca

SEQ ID NO: 30439 - DNA, 33 bp, Homo sapiens
tagtacctatttcttcaacttatcttcaagcta

SEQ ID NO: 30440 - DNA, 33 bp, Homo sapiens
tgaaaattcctcaaaacgttaagtgtagagttt

SEQ ID NO: 30441 - DNA, 33 bp, Homo sapiens
acaggtacaggatctcagaatcttaagttttgg

SEQ ID NO: 30442 - DNA, 33 bp, Homo sapiens
atctcagcaggagagagagcagggccgtcttaa

SEQ ID NO: 30443 - DNA, 33 bp, Homo sapiens
ctcttaagcagacgccacagtggaccttgaaaa

SEQ ID NO: 30444 - DNA, 33 bp, Homo sapiens
gcccttaagcgagaaacgaaaggtgcagtgccc

SEQ ID NO: 30445 - DNA, 33 bp, Homo sapiens
aagaaaaatcacagaaactatttgaatgccaga

SEQ ID NO: 30446 - DNA, 33 bp, Homo sapiens
tgcagagtaatgtaaacagtatttgtgtgcctg

SEQ ID NO: 30447 - DNA, 33 bp, Homo sapiens
ggaaacacttatttgcacttgtagggaaggaca

SEQ ID NO: 30448 - DNA, 33 bp, Homo sapiens
ccgcccttcaatacacagggaaatgtacatcct

SEQ ID NO: 30449 - DNA, 51 bp, Homo sapiens
gacttctccaaaattaacttaaatcaacattcagctagtcagtatacaata

SEQ ID NO: 30450 - DNA, 33 bp, Homo sapiens
caggttggatacttgaagacctgaaagaaataa

SEQ ID NO: 30451 - DNA, 33 bp, Homo sapiens
gcctcaagtcctgggaagcacttactattatta

SEQ ID NO: 30452 - DNA, 33 bp, Homo sapiens
tgttgattctgaatatcacccttgtagacgctt

SEQ ID NO: 30453 - DNA, 33 bp, Homo sapiens
agagagaaatgacatcacttttaatttccatca

SEQ ID NO: 30454 - DNA, 33 bp, Homo sapiens
tggctcggcagaggtcccttctcaccttctgga

SEQ ID NO: 30455 - DNA, 33 bp, Homo sapiens
gaaccattggtgatggaccatataacttcctag

SEQ ID NO: 30456 - DNA, 33 bp, Homo sapiens
gagttgggttaggagaacaggcaaaatctatgg

SEQ ID NO: 30457 - DNA, 33 bp, Homo sapiens
taggcccaattgccaaaaaattgtttcaacatc

SEQ ID NO: 30458 - DNA, 51 bp, Homo sapiens
gaaaaataaaatcctcattggacaacaattagtatcagcaagttttgagtt

SEQ ID NO: 30459 - DNA, 33 bp, Homo sapiens
aatgttcatcccaaacaccatttaccagccctg

SEQ ID NO: 30460 - DNA, 33 bp, Homo sapiens
ctcctgctggggtgaaaaaagggtcatagttct

SEQ ID NO: 30461 - DNA, 51 bp, Homo sapiens
tgaatgcttgttattatcccagagaactgagaaaatgtttactggtcttta

SEQ ID NO: 30462 - DNA, 33 bp, Homo sapiens
tccattacacccatgaagtacaaccaccaccta

SEQ ID NO: 30463 - DNA, 33 bp, Homo sapiens
ctgcctgtacatgtccacacggttgcaatcaag

SEQ ID NO: 30464 - DNA, 33 bp, Homo sapiens
aaaacgcttccataacacgggctggatggaatg

SEQ ID NO: 30465 - DNA, 51 bp, Homo sapiens
tttaatttgaagttgtgaggattggaatagaatatgggcatctgtgccaat

SEQ ID NO: 30466 - DNA, 33 bp, Homo sapiens
cctcccttctggtgtcactggcaattcttggca

SEQ ID NO: 30467 - DNA, 33 bp, Homo sapiens
acgtgtttctttccaaatgtggctgaagctata

SEQ ID NO: 30468 - DNA, 33 bp, Homo sapiens
aaaggagcaaaattaaacacctagagtacttaa

SEQ ID NO: 30469 - DNA, 33 bp, Homo sapiens
gcatgtaaaggccttaacagaaagctgcccttg

SEQ ID NO: 30470 - DNA, 33 bp, Homo sapiens
tatgtgaggggattcaaatgaaaatgcctgccc

SEQ ID NO: 30471 - DNA, 51 bp, Homo sapiens
attttcataagaaaagcactgtttcgaattttaatctacaaacaactcatt

SEQ ID NO: 30472 - DNA, 51 bp, Homo sapiens
aatgattcttatatgaagtttctggcaagctgctatgtgatactatgtact

SEQ ID NO: 30473 - DNA, 33 bp, Homo sapiens
tgtgtctgtgtgcttacatacctacagttgcat

SEQ ID NO: 30474 - DNA, 33 bp, Homo sapiens
ggtgtgtcttgaggcacagttaggtggaagaaa

SEQ ID NO: 30475 - DNA, 33 bp, Homo sapiens
tgtaatctcaagggtcaaagtggatgagaaaat

SEQ ID NO: 30476 - DNA, 33 bp, Homo sapiens
ttgttttctgaatgataaagatgcagagatgca

SEQ ID NO: 30477 - DNA, 33 bp, Homo sapiens
ctccatatttcagaaaagtcaaagtctagatgg

SEQ ID NO: 30478 - DNA, 33 bp, Homo sapiens
acacagagattccaaaataaatttcatttgctc

SEQ ID NO: 30479 - DNA, 33 bp, Homo sapiens
tgaaacaaacagaggaagaatgtggaatccctt

SEQ ID NO: 30480 - DNA, 33 bp, Homo sapiens
tggaaattttgcttaaactgtggttagagatta

SEQ ID NO: 30481 - DNA, 33 bp, Homo sapiens
ggaaactgtgccggacaatttgctctacccgtt

SEQ ID NO: 30482 - DNA, 33 bp, Homo sapiens
aatgtttgaattggaaactacaaattaatactg

SEQ ID NO: 30483 - DNA, 33 bp, Homo sapiens
ttcctaaatgcccctaaatgacagctgagctcc

SEQ ID NO: 30484 - DNA, 33 bp, Homo sapiens
ttacaaatactgcagagacacaaggattagttg

SEQ ID NO: 30485 - DNA, 33 bp, Homo sapiens
ccatctccacattcaaataattcctcatgttct

SEQ ID NO: 30486 - DNA, 33 bp, Homo sapiens
ttgtgttaacgaatgaatatgaaatctatagat

SEQ ID NO: 30487 - DNA, 33 bp, Homo sapiens
accagtggactgatacaactgatatgtttattg

SEQ ID NO: 30488 - DNA, 33 bp, Homo sapiens
cacagatacactgcgaatagtgagaagccagag

SEQ ID NO: 30489 - DNA, 33 bp, Homo sapiens
acatgaacttgaaggacgaggaagttgactatg

SEQ ID NO: 30490 - DNA, 33 bp, Homo sapiens
atgcactgaccctgaaatgtttcagaaaggctg

SEQ ID NO: 30491 - DNA, 33 bp, Homo sapiens
actctcgttgtctcccactaggacgattgcaat

SEQ ID NO: 30492 - DNA, 33 bp, Homo sapiens
agccacacctcatgacaagatcatttcttatat

SEQ ID NO: 30493 - DNA, 51 bp, Homo sapiens
aaaaggaatagtcatttctaaagtacggtgccattagtgttaatttgatcg

SEQ ID NO: 30494 - DNA, 33 bp, Homo sapiens
tcctttttgccaaagacatgcaggatgttccaa

SEQ ID NO: 30495 - DNA, 33 bp, Homo sapiens
aacctttacatcttcacaaaaatgaggcagtaa

SEQ ID NO: 30496 - DNA, 33 bp, Homo sapiens
agtatgtcctctcgtacagtcattttaaaatac

SEQ ID NO: 30497 - DNA, 33 bp, Homo sapiens
gcactacaatcaatgacggaagatgcatttgga

SEQ ID NO: 30498 - DNA, 33 bp, Homo sapiens
taaattgctcaatgtcaaaagcttgggaaaccc

SEQ ID NO: 30499 - DNA, 33 bp, Homo sapiens
tagatgttctgcaaccactgagtgctctgtaaa

SEQ ID NO: 30500 - DNA, 33 bp, Homo sapiens
gagagtggtctctaaacaacaactatgtaagga

SEQ ID NO: 30501 - DNA, 33 bp, Homo sapiens
gtgtatgattctttacacagagcaaaagcatag

SEQ ID NO: 30502 - DNA, 33 bp, Homo sapiens
tccacattcaaggcagacctcacacttgctgta

SEQ ID NO: 30503 - DNA, 33 bp, Homo sapiens
aaattccatggtgttcagaaaatattagggtac

SEQ ID NO: 30504 - DNA, 33 bp, Homo sapiens
tcctctgtctacattaactccttctttcctcct

SEQ ID NO: 30505 - DNA, 33 bp, Homo sapiens
cttgatctaatgtctacgcagaaaggttctagt

SEQ ID NO: 30506 - DNA, 33 bp, Homo sapiens
ttcaatttgaactaacaatccctccccagacat

SEQ ID NO: 30507 - DNA, 51 bp, Homo sapiens
tcccatcatgtcagaagtcacccaaagtacggaatctatacttttagagat

SEQ ID NO: 30508 - DNA, 51 bp, Homo sapiens
ccgtacattgggtgacttctgacatcatgggaatttgcaacactaaacaaa

SEQ ID NO: 30509 - DNA, 51 bp, Homo sapiens
ttgctcagttgacatcagttttatgcacaaggagagtctggtttacttagc

SEQ ID NO: 30510 - DNA, 33 bp, Homo sapiens
tctggctttctctgcaagtaaaatgggggctct

SEQ ID NO: 30511 - DNA, 33 bp, Homo sapiens
cattcttgagacttgcagaggagagaagcgccc

SEQ ID NO: 30512 - DNA, 51 bp, Homo sapiens
atatggctgatataggaagcctgagaagtaaacagatttaccagcagtaga

SEQ ID NO: 30513 - DNA, 51 bp, Homo sapiens
ttagctatgactgtattgttaccatcaaacattatgaacagggaaacagca

SEQ ID NO: 30514 - DNA, 33 bp, Homo sapiens
gcaagtttcaggagcactgctatggaaaagtac

SEQ ID NO: 30515 - DNA, 51 bp, Homo sapiens
acccagcaatcccactcctatgtctatatctaagagaaagaaaatatctgt

SEQ ID NO: 30516 - DNA, 51 bp, Homo sapiens
gatgagctcaggaataaaacagataactaaggataagtcattttcatccag

SEQ ID NO: 30517 - DNA, 33 bp, Homo sapiens
tgtaggggaggaacaaataaagtgagagaaagt

SEQ ID NO: 30518 - DNA, 33 bp, Homo sapiens
aggaagctgacgctccaacactccagatggaac

SEQ ID NO: 30519 - DNA, 33 bp, Homo sapiens
cgtggactggtaatgacgaccagtgatattgag

SEQ ID NO: 30520 - DNA, 33 bp, Homo sapiens
ggagaagtaatgtggcgcggaggaacttgagtc

SEQ ID NO: 30521 - DNA, 33 bp, Homo sapiens
catgcgggaatgacacagtcacactgcagaaga

SEQ ID NO: 30522 - DNA, 33 bp, Homo sapiens
tcctgccctctccccacggtgctctgctgtagt

SEQ ID NO: 30523 - DNA, 33 bp, Homo sapiens
ttgtccacaacttgaacgctgacttagcacaat

SEQ ID NO: 30524 - DNA, 33 bp, Homo sapiens
gtgatcattacaacaaataacgcagaggagagg

SEQ ID NO: 30525 - DNA, 33 bp, Homo sapiens
gataaatcaagcccacaaggatcgcagagagag

SEQ ID NO: 30526 - DNA, 33 bp, Homo sapiens
gaataaaaggaatagaagatgcaggcaaaagag

SEQ ID NO: 30527 - DNA, 33 bp, Homo sapiens
gaccttcttttccacaccactctgtaatgccgc

SEQ ID NO: 30528 - DNA, 33 bp, Homo sapiens
agggccattgtattaacctggtgatcaagcaaa

SEQ ID NO: 30529 - DNA, 33 bp, Homo sapiens
aaactttggaaagtgacaccaagcaatcagaca

SEQ ID NO: 30530 - DNA, 33 bp, Homo sapiens
ggttgttaaggtgtcacctcttgaattagaatg

SEQ ID NO: 30531 - DNA, 33 bp, Homo sapiens
ctttaattcataacgaccacagacatccagttc

SEQ ID NO: 30532 - DNA, 33 bp, Homo sapiens
attttctcatattccacgttgggtaattcatct

SEQ ID NO: 30533 - DNA, 33 bp, Homo sapiens
gaagtacttgccttcaggaaagatccactatgt

SEQ ID NO: 30534 - DNA, 33 bp, Homo sapiens
tcccttagaccttctcgcatggattgtggttcc

SEQ ID NO: 30535 - DNA, 33 bp, Homo sapiens
tgacttctcagtcaagcctctacatttgtttta

SEQ ID NO: 30536 - DNA, 33 bp, Homo sapiens
gggccttccagaaagaaagacaaggctcaagag

SEQ ID NO: 30537 - DNA, 33 bp, Homo sapiens
gaagtgaacagaccaaatagacatagttcaaaa

SEQ ID NO: 30538 - DNA, 33 bp, Homo sapiens
tattttgctgagggggaaaaaagatgtattttg

SEQ ID NO: 30539 - DNA, 33 bp, Homo sapiens
gctgaaggtttggatccgaggatttcattttat

SEQ ID NO: 30540 - DNA, 33 bp, Homo sapiens
ccattaattcaacaacacttttccaagctgttt

SEQ ID NO: 30541 - DNA, 33 bp, Homo sapiens
cactgcaaactaggaacactgaataggagactc

SEQ ID NO: 30542 - DNA, 51 bp, Homo sapiens
ttcacatgttagtataacactgtgacgtattggcattttaattgagaggtt

SEQ ID NO: 30543 - DNA, 33 bp, Homo sapiens
tcttttactcatcaaaactttctcctttgctac

SEQ ID NO: 30544 - DNA, 33 bp, Homo sapiens
gtctggagaagttgaaagaaatgaatctccagc

SEQ ID NO: 30545 - DNA, 33 bp, Homo sapiens
tttcacttagcaactcactcttccatcatgacg

SEQ ID NO: 30546 - DNA, 33 bp, Homo sapiens
aatgctttcaggttcaagaacaacggaaaagta

SEQ ID NO: 30547 - DNA, 33 bp, Homo sapiens
catgttgacaagctgaacttcatggtttctgaa

SEQ ID NO: 30548 - DNA, 33 bp, Homo sapiens
ttctcatttgtaagcccgataatcattatacca

SEQ ID NO: 30549 - DNA, 33 bp, Homo sapiens
aaggtggatgaatgcacatttcgctactaagca

SEQ ID NO: 30550 - DNA, 51 bp, Homo sapiens
tataaatcactttatttaattctcaaacaatgctatggggtagcagctact

SEQ ID NO: 30551 - DNA, 51 bp, Homo sapiens
cttttgaagaaacacattctactcaataccttcccccatggattggcacaa

SEQ ID NO: 30552 - DNA, 33 bp, Homo sapiens
aagtgcccagagaagacgtactcaacagggaga

SEQ ID NO: 30553 - DNA, 33 bp, Homo sapiens
gtgacatcaactcgtacatatagtttcactgtc

SEQ ID NO: 30554 - DNA, 33 bp, Homo sapiens
gaggtgagtgggaaggcagcctaaagaggtgac

SEQ ID NO: 30555 - DNA, 33 bp, Homo sapiens
cgtgaaactttcctgccaaggtgtgtctgattt

SEQ ID NO: 30556 - DNA, 33 bp, Homo sapiens
atgaatgttcttcagtcaaatagaataggagtt

SEQ ID NO: 30557 - DNA, 33 bp, Homo sapiens
gcttgaaatgaactgacgcagataaaattcatg

SEQ ID NO: 30558 - DNA, 33 bp, Homo sapiens
tgcttttcttaattcaccaatgagcagtccgaa

SEQ ID NO: 30559 - DNA, 51 bp, Homo sapiens
cacccagaataaaatctggcatttcgcccattattcccattccaccactct

SEQ ID NO: 30560 - DNA, 33 bp, Homo sapiens
acttggcaagcacttcccacttaagctaatgca

SEQ ID NO: 30561 - DNA, 33 bp, Homo sapiens
caaataggctatgatacgtcatgctttaattgt

SEQ ID NO: 30562 - DNA, 33 bp, Homo sapiens
tgttaccttcaatctcactcaagatctgacttt

SEQ ID NO: 30563 - DNA, 33 bp, Homo sapiens
ttaaatcagaggtggaagagtttgtataaaaaa

SEQ ID NO: 30564 - DNA, 51 bp, Homo sapiens
ttctaaatgtttatggttgaattcccggaaatatgtagaaattacaagtat

SEQ ID NO: 30565 - DNA, 51 bp, Homo sapiens
atgctgcattctcttttatcattcacctaaagacccactcattttattaaa

SEQ ID NO: 30566 - DNA, 33 bp, Homo sapiens
tttctatcttgccatccaatctttgtccacatg

SEQ ID NO: 30567 - DNA, 33 bp, Homo sapiens
taggtagaacaaatcaactaagtatgtttaaag

SEQ ID NO: 30568 - DNA, 51 bp, Homo sapiens
ggagtggggagaatgagagggtcaaagatcttggaatgttatatgaaagga

SEQ ID NO: 30569 - DNA, 33 bp, Homo sapiens
tcatcaacttctaacaaaacctggcttaaaagg

SEQ ID NO: 30570 - DNA, 33 bp, Homo sapiens
tataagacatcgaaggaaagtgctgacagggta

SEQ ID NO: 30571 - DNA, 51 bp, Homo sapiens
ccacacaaagaaacttgagtttgtcattattgtggtgactggtcacttagg

SEQ ID NO: 30572 - DNA, 51 bp, Homo sapiens
gatttaaataaaagacagtgactgagtaactaaaataaatggaaccaggtt

SEQ ID NO: 30573 - DNA, 33 bp, Homo sapiens
ggagttacaaatgctgaaactcttctttaccct

SEQ ID NO: 30574 - DNA, 33 bp, Homo sapiens
tatgttctcatttttccagtaactttttatgct

SEQ ID NO: 30575 - DNA, 33 bp, Homo sapiens
tgatctcatacgtgaaatcttaaaaaaccagtc

SEQ ID NO: 30576 - DNA, 33 bp, Homo sapiens
aacaattactgcttgacacgacaaagtaatgtg

SEQ ID NO: 30577 - DNA, 33 bp, Homo sapiens
aattgcatgccattccaagtagtgtaatgaaat

SEQ ID NO: 30578 - DNA, 33 bp, Homo sapiens
gatctaacgtcaattcaaagttctctattgaag

SEQ ID NO: 30579 - DNA, 33 bp, Homo sapiens
tgaaagagactggtaacatgaaattgcagaaga

SEQ ID NO: 30580 - DNA, 33 bp, Homo sapiens
tgaggtactatgctcaatatactaagatcagtc

SEQ ID NO: 30581 - DNA, 33 bp, Homo sapiens
attgtctttaattttaccatgctcctcaaaagc

SEQ ID NO: 30582 - DNA, 33 bp, Homo sapiens
aaacttccacactgtcaactttcagctttcatt

SEQ ID NO: 30583 - DNA, 33 bp, Homo sapiens
gaatttccaatatgtccctgttgtttcactttt

SEQ ID NO: 30584 - DNA, 33 bp, Homo sapiens
tggcctggtcttcaaagcagctaagttctcatc

SEQ ID NO: 30585 - DNA, 51 bp, Homo sapiens
tggcaaatgaataatcagctatccaaattggctcaaggacgatcaagggga

SEQ ID NO: 30586 - DNA, 33 bp, Homo sapiens
ttttcatgacactgaactgttgatgtgtctggg

SEQ ID NO: 30587 - DNA, 33 bp, Homo sapiens
tcttctccttgaggtccgaaactatctcaaaca

SEQ ID NO: 30588 - DNA, 33 bp, Homo sapiens
tctctcacctttataaatcgtctcattttccac

SEQ ID NO: 30589 - DNA, 33 bp, Homo sapiens
ttccaagtctgtactcaatcgccctgccctcat

SEQ ID NO: 30590 - DNA, 33 bp, Homo sapiens
atgtcttcctggcataacttctgaatttaactt

SEQ ID NO: 30591 - DNA, 33 bp, Homo sapiens
ggggctcagttacttaggagttgcatagatcca

SEQ ID NO: 30592 - DNA, 33 bp, Homo sapiens
ttcaggattctttccacgtcctttggtgtagat

SEQ ID NO: 30593 - DNA, 33 bp, Homo sapiens
agaaggatctgcaaaccagacaggacagcggtg

SEQ ID NO: 30594 - DNA, 33 bp, Homo sapiens
atgggtccaaaaccaaatcacaccatcagagtg

SEQ ID NO: 30595 - DNA, 33 bp, Homo sapiens
ttcatgattgagccaacgggtgtcaagtaggag

SEQ ID NO: 30596 - DNA, 33 bp, Homo sapiens
ttaaggtgaatgggcactgattttatgaacagc

SEQ ID NO: 30597 - DNA, 51 bp, Homo sapiens
ctaggaaggaacatttaagacgacaaaaaatctgacgtaaaggttactcca

SEQ ID NO: 30598 - DNA, 33 bp, Homo sapiens
gcacatagtaggtgaggaataacaaaggcttgg

SEQ ID NO: 30599 - DNA, 33 bp, Homo sapiens
ctaagactcaaacgacaaactttctagtgaatt

SEQ ID NO: 30600 - DNA, 33 bp, Homo sapiens
tgcttgctcttttgacaccagtggaagtttaaa

SEQ ID NO: 30601 - DNA, 33 bp, Homo sapiens
gtttactggtctgtaacagatcctgcattagct

SEQ ID NO: 30602 - DNA, 33 bp, Homo sapiens
actcctacctgtggcaatcatgaatctgttttc

SEQ ID NO: 30603 - DNA, 33 bp, Homo sapiens
gtagctgaaagagaccagggtaaccatcagggc

SEQ ID NO: 30604 - DNA, 33 bp, Homo sapiens
tgccttttgccagaaaacttcagactcgcagac

SEQ ID NO: 30605 - DNA, 33 bp, Homo sapiens
tttgatatctccttgacgtagctgaatgtcaaa

SEQ ID NO: 30606 - DNA, 33 bp, Homo sapiens
ttgactcattgactaaggcaagctttttttttt

SEQ ID NO: 30607 - DNA, 33 bp, Homo sapiens
gttcccctgctactaccgctgtccaagtcacat

SEQ ID NO: 30608 - DNA, 33 bp, Homo sapiens
ttttcaggaactttggaaaaactacaggctaca

SEQ ID NO: 30609 - DNA, 33 bp, Homo sapiens
aaccaatgtaatgatacggtatgggatgatatc

SEQ ID NO: 30610 - DNA, 33 bp, Homo sapiens
atgaatttaacctggaacaatgcagaatcaatt

SEQ ID NO: 30611 - DNA, 51 bp, Homo sapiens
agatctgccaaagttttcacatctacgtcatgactgttctagaacaagtag

SEQ ID NO: 30612 - DNA, 33 bp, Homo sapiens
ctcttaagtttggacaagtatttgagtataagc

SEQ ID NO: 30613 - DNA, 33 bp, Homo sapiens
gaaaatgacatcagtaccttgctagcattcttg

SEQ ID NO: 30614 - DNA, 33 bp, Homo sapiens
tccaaagacgaactgacggtgtgtgtgaacaca

SEQ ID NO: 30615 - DNA, 33 bp, Homo sapiens
aggtttttcatgaacgaaaaaaaggcatgtatt

SEQ ID NO: 30616 - DNA, 33 bp, Homo sapiens
tggtatgcacgtggacacacaatagtatcataa

SEQ ID NO: 30617 - DNA, 51 bp, Homo sapiens
gtctattaatcaaccttaaatgtcaacaatttaaattcctcaattaaaaga

SEQ ID NO: 30618 - DNA, 33 bp, Homo sapiens
aataaatgcgcaagtacgaggttaaatgcttga

SEQ ID NO: 30619 - DNA, 33 bp, Homo sapiens
agatgccttgatataaaagtaatctgaggctga

SEQ ID NO: 30620 - DNA, 33 bp, Homo sapiens
ttttccatttttttcaaagaacacatcaatttc

SEQ ID NO: 30621 - DNA, 33 bp, Homo sapiens
aacttgtatcttccaactgtatgtttgtaccct

SEQ ID NO: 30622 - DNA, 33 bp, Homo sapiens
agttctgaataccaggaaggacaccattaagat

SEQ ID NO: 30623 - DNA, 33 bp, Homo sapiens
ggcccatcaataacacaaatagcaccatgtgag

SEQ ID NO: 30624 - DNA, 33 bp, Homo sapiens
gatttttgcatactcaatgaaacatacatattt

SEQ ID NO: 30625 - DNA, 33 bp, Homo sapiens
atgctgtgactactcacacttatttactgttta

SEQ ID NO: 30626 - DNA, 33 bp, Homo sapiens
agtctaaatgcgcagaagcatcaagtgtagaca

SEQ ID NO: 30627 - DNA, 33 bp, Homo sapiens
gctggagtcacttagacagaaaaggaaagcaat

SEQ ID NO: 30628 - DNA, 33 bp, Homo sapiens
tattaattttttcaggccattgtttcattgatc

SEQ ID NO: 30629 - DNA, 33 bp, Homo sapiens
aacatggtcgccaaaaatcagagccttatgttt

SEQ ID NO: 30630 - DNA, 33 bp, Homo sapiens
aaataaaagtggaaaaaatcatgtcggagtgta

SEQ ID NO: 30631 - DNA, 33 bp, Homo sapiens
aagagtcaaagtaatcccatttccattggccag

SEQ ID NO: 30632 - DNA, 33 bp, Homo sapiens
taattcaatcatcttccaccatgtctgtcccac

SEQ ID NO: 30633 - DNA, 33 bp, Homo sapiens
ttctggcctgtagagaatatgatcaatacagtt

SEQ ID NO: 30634 - DNA, 33 bp, Homo sapiens
ggggaacccggttaccacagaaagcagttgaga

SEQ ID NO: 30635 - DNA, 33 bp, Homo sapiens
tggaagcagcttgggaaccacgtaacaggcaga

SEQ ID NO: 30636 - DNA, 33 bp, Homo sapiens
gtgtgggatctttaataactgcgacacctctgt

SEQ ID NO: 30637 - DNA, 33 bp, Homo sapiens
tgaagtgttatatcacagattgagaccagtaaa

SEQ ID NO: 30638 - DNA, 33 bp, Homo sapiens
cctgggaaagtattgacggctttcatgaggaag

SEQ ID NO: 30639 - DNA, 33 bp, Homo sapiens
atccagtacatgatccaccgtgacaatgagtag

SEQ ID NO: 30640 - DNA, 33 bp, Homo sapiens
tagggttcgtagaataagagtgttttagagtga

SEQ ID NO: 30641 - DNA, 33 bp, Homo sapiens
cacacataaattccacagtagtattccatgatg

SEQ ID NO: 30642 - DNA, 33 bp, Homo sapiens
gactgcctgtatcccccgaagtgattaaactat

SEQ ID NO: 30643 - DNA, 33 bp, Homo sapiens
tatgacttctttttcaactatctgttaggtatt

SEQ ID NO: 30644 - DNA, 33 bp, Homo sapiens
atctattcattcatcaatctaacctccctactt

SEQ ID NO: 30645 - DNA, 33 bp, Homo sapiens
caaagaaatcacataaaagcacattatctcata

SEQ ID NO: 30646 - DNA, 33 bp, Homo sapiens
ctcccactcagggcaaccctagcagacttgagg

SEQ ID NO: 30647 - DNA, 33 bp, Homo sapiens
aatctgatgagcttcaagcaaatataaagcagg

SEQ ID NO: 30648 - DNA, 33 bp, Homo sapiens
agaaggtagagtaagaataaatatacatagcac

SEQ ID NO: 30649 - DNA, 33 bp, Homo sapiens
caccttacctttaccacacaaaggagattaaca

SEQ ID NO: 30650 - DNA, 33 bp, Homo sapiens
cactgccgcaagagcaataagcaaagttcacat

SEQ ID NO: 30651 - DNA, 33 bp, Homo sapiens
tgtgattagaagataactgagaacatggataaa

SEQ ID NO: 30652 - DNA, 33 bp, Homo sapiens
gctgcattctttgctacggtacataggtgccta

SEQ ID NO: 30653 - DNA, 33 bp, Homo sapiens
gtactttcactcgtcacctcctttggctgggtg

SEQ ID NO: 30654 - DNA, 33 bp, Homo sapiens
ctgtttctataggtggcacccgatttatctctc

SEQ ID NO: 30655 - DNA, 33 bp, Homo sapiens
aatacacagaaatacactgagtacaacattacc

SEQ ID NO: 30656 - DNA, 33 bp, Homo sapiens
caggtggtaaacaagcaaaatgtactacagtgt

SEQ ID NO: 30657 - DNA, 33 bp, Homo sapiens
gcttatgtttcctgtaggcttttggtaaataac

SEQ ID NO: 30658 - DNA, 33 bp, Homo sapiens
agtataagtaggtgccaaaaggtaggtaattgg

SEQ ID NO: 30659 - DNA, 33 bp, Homo sapiens
tctattaatgccaggaaaatcacacttcaaaat

SEQ ID NO: 30660 - DNA, 33 bp, Homo sapiens
ttatcatctccataaagattatcttccagacca

SEQ ID NO: 30661 - DNA, 33 bp, Homo sapiens
tgcttgccttttccccacaacgaggagtttctc

SEQ ID NO: 30662 - DNA, 33 bp, Homo sapiens
atgagtaagtctacagaaataatgtcataatga

SEQ ID NO: 30663 - DNA, 33 bp, Homo sapiens
ccactcaagaatgctgaacaatcgttaacacta

SEQ ID NO: 30664 - DNA, 33 bp, Homo sapiens
gtgtgtcacaagacacccttttctttcctttgt

SEQ ID NO: 30665 - DNA, 33 bp, Homo sapiens
agggagtttagttttacacactgttttgttccc

SEQ ID NO: 30666 - DNA, 33 bp, Homo sapiens
tttagtttgacaaagaagtggaatcaaaaataa

SEQ ID NO: 30667 - DNA, 33 bp, Homo sapiens
cattaaacactaacttcaagaggattatacatt

SEQ ID NO: 30668 - DNA, 33 bp, Homo sapiens
atggaaaatccgatacgctgttgatccgacaag

SEQ ID NO: 30669 - DNA, 33 bp, Homo sapiens
actgtctctgtagaacaaactgggaagaactgg

SEQ ID NO: 30670 - DNA, 33 bp, Homo sapiens
tgagtgcattgctctacctaaagtactttccca

SEQ ID NO: 30671 - DNA, 33 bp, Homo sapiens
tactatgcccattcaccgaaacagctggaaaaa

SEQ ID NO: 30672 - DNA, 33 bp, Homo sapiens
atgcccacaggaaaacaacatgacattctgaag

SEQ ID NO: 30673 - DNA, 51 bp, Homo sapiens
tttcttcatctgtaatataggaataagactaaatgtgtgaattcttgtgaa

SEQ ID NO: 30674 - DNA, 33 bp, Homo sapiens
tatttttaaatcactgaacaactcataatttta

SEQ ID NO: 30675 - DNA, 33 bp, Homo sapiens
agaattacatggcaaaacaattgtaaaactgtt

SEQ ID NO: 30676 - DNA, 33 bp, Homo sapiens
atttatatgccatgcccactacttctggacaac

SEQ ID NO: 30677 - DNA, 33 bp, Homo sapiens
atggtgacaaaaatcaacccgctaaagggctag

SEQ ID NO: 30678 - DNA, 33 bp, Homo sapiens
aacttgtcaacacctcgatcttgaacttttggc

SEQ ID NO: 30679 - DNA, 33 bp, Homo sapiens
atagactgcttgggaaaagatacacataatggg

SEQ ID NO: 30680 - DNA, 33 bp, Homo sapiens
gatagcccttacaagcagatactggagaatgaa

SEQ ID NO: 30681 - DNA, 33 bp, Homo sapiens
gaggtccaagaacaaaatataattgaccctttg

SEQ ID NO: 30682 - DNA, 33 bp, Homo sapiens
accctggactacattcccctataaggctcacca

SEQ ID NO: 30683 - DNA, 33 bp, Homo sapiens
gtctccatctgtgctaacgggtcattctgttcc

SEQ ID NO: 30684 - DNA, 51 bp, Homo sapiens
accaaaaaaaaaaatagaacaacaaataatttatgaacaaacaacatactc

SEQ ID NO: 30685 - DNA, 33 bp, Homo sapiens
tgcccactgatgacacagtcttgccagtcacca

SEQ ID NO: 30686 - DNA, 33 bp, Homo sapiens
atagaattggattcaaacttaattcacatgatc

SEQ ID NO: 30687 - DNA, 33 bp, Homo sapiens
gcagctccactcctataagtctgcaggatacag

SEQ ID NO: 30688 - DNA, 33 bp, Homo sapiens
tggacctactacagaaaagattgctgagtaagg

SEQ ID NO: 30689 - DNA, 33 bp, Homo sapiens
tgatttttctgagtgtcaatttttttaagtaat

SEQ ID NO: 30690 - DNA, 33 bp, Homo sapiens
ccttctgccatttgaaaatatagcaagaaagta

SEQ ID NO: 30691 - DNA, 51 bp, Homo sapiens
tcctggaatattggttcattgtagacgggcttacctagagggaagtatata

SEQ ID NO: 30692 - DNA, 33 bp, Homo sapiens
ggctattcatgaggaccattgttgtggaagata

SEQ ID NO: 30693 - DNA, 33 bp, Homo sapiens
gtgtcaaaagccatcacgtactttgaatatctt

SEQ ID NO: 30694 - DNA, 33 bp, Homo sapiens
acccctattggcttcaacttggaacttttcttc

SEQ ID NO: 30695 - DNA, 33 bp, Homo sapiens
ttcatgcaaaacataaagcaatgcagcatcttc

SEQ ID NO: 30696 - DNA, 51 bp, Homo sapiens
agctcccagtccataactctaaatagcacatgggcacctattactccatat

SEQ ID NO: 30697 - DNA, 33 bp, Homo sapiens
agactcattccaagaccgtcctgaaaatactga

SEQ ID NO: 30698 - DNA, 33 bp, Homo sapiens
aatctggcctggaccaagaaatctcacaaccct

SEQ ID NO: 30699 - DNA, 33 bp, Homo sapiens
caagataaataccaaaatatactgcaacatcca

SEQ ID NO: 30700 - DNA, 33 bp, Homo sapiens
cttggctccagggtaacgtgttggccttccaac

SEQ ID NO: 30701 - DNA, 33 bp, Homo sapiens
gcctggaaagtacacacggtccttctgtaacac

SEQ ID NO: 30702 - DNA, 51 bp, Homo sapiens
aatcatggacattccaaattgagacccacaagggtttatgactacattgtc

SEQ ID NO: 30703 - DNA, 33 bp, Homo sapiens
cttgctctggcaatccaacataaggcattgagt

SEQ ID NO: 30704 - DNA, 33 bp, Homo sapiens
gcaatcctgagtatccactgtctttctcagcca

SEQ ID NO: 30705 - DNA, 33 bp, Homo sapiens
cccaccagaatccaaaatttcaataaaggtctc

SEQ ID NO: 30706 - DNA, 33 bp, Homo sapiens
tgcatcgcccagggtcaccaagtgcaaggccag

SEQ ID NO: 30707 - DNA, 33 bp, Homo sapiens
gtcatttttccatggacgtctcaatgaaaaaaa

SEQ ID NO: 30708 - DNA, 33 bp, Homo sapiens
aattatgtaaaattctaaaaaacagctataaat

SEQ ID NO: 30709 - DNA, 33 bp, Homo sapiens
tagtacattgtaccaaccaggttattttaagga

SEQ ID NO: 30710 - DNA, 33 bp, Homo sapiens
aaaaaaataaaaatcacaagtcaagtggtactt

SEQ ID NO: 30711 - DNA, 33 bp, Homo sapiens
aatgttaaaagtactacgatctgataattgcct

SEQ ID NO: 30712 - DNA, 33 bp, Homo sapiens
atggtttcaaatatgacgcttccaactcaacag

SEQ ID NO: 30713 - DNA, 33 bp, Homo sapiens
ttttgtagggttttcacggaaagtctgaggcat

SEQ ID NO: 30714 - DNA, 33 bp, Homo sapiens
ttcatcagaacccttacgctaacctgaccacac

SEQ ID NO: 30715 - DNA, 33 bp, Homo sapiens
atatgagttcaaaggcaaaagggattatttgcg

SEQ ID NO: 30716 - DNA, 33 bp, Homo sapiens
tgggcttggatttggcagaaatctgagagtttc

SEQ ID NO: 30717 - DNA, 33 bp, Homo sapiens
ggaaagttcaacgatacgtatacaaccaacagg

SEQ ID NO: 30718 - DNA, 33 bp, Homo sapiens
tgccactcctatgaaactgtagatcacttctac

SEQ ID NO: 30719 - DNA, 33 bp, Homo sapiens
tttccctgtgattatcaaaggaagtgaattctc

SEQ ID NO: 30720 - DNA, 51 bp, Homo sapiens
cattctcttccctcctttgatgtagaaattatggagtttttaaaattggca

SEQ ID NO: 30721 - DNA, 33 bp, Homo sapiens
caggaatcctctattccacgcatttgaaagcta

SEQ ID NO: 30722 - DNA, 33 bp, Homo sapiens
ataataccaaaaatgcagaaaagcaagaaagat

SEQ ID NO: 30723 - DNA, 33 bp, Homo sapiens
ataaatgacaccaaacaattgggggcaaggagc

SEQ ID NO: 30724 - DNA, 33 bp, Homo sapiens
cataggaggctcttaaaagatattcaatgggtg

SEQ ID NO: 30725 - DNA, 33 bp, Homo sapiens
tggatgccgaagctggaagggaagaaccaagca

SEQ ID NO: 30726 - DNA, 33 bp, Homo sapiens
gtctactttgaataaactggtcactgagacctc

SEQ ID NO: 30727 - DNA, 33 bp, Homo sapiens
gtaggaagtgcgaggacatatagcagaagagtg

SEQ ID NO: 30728 - DNA, 33 bp, Homo sapiens
cactgttgtcactttacggagatggaagtatag

SEQ ID NO: 30729 - DNA, 33 bp, Homo sapiens
cctagcacccgacaaaaactcaaaatgtgatag

SEQ ID NO: 30730 - DNA, 33 bp, Homo sapiens
tattttaaaacatatacagtagtcctctcttat

SEQ ID NO: 30731 - DNA, 33 bp, Homo sapiens
tgagttatttgcaacactagtactacgcaagtg

SEQ ID NO: 30732 - DNA, 33 bp, Homo sapiens
ataatgctttaagaacagtcctgctcgtgcatg

SEQ ID NO: 30733 - DNA, 33 bp, Homo sapiens
gctgtttgtgtgcataactttcaaaaacaatgt

SEQ ID NO: 30734 - DNA, 33 bp, Homo sapiens
gtcaaaatataattcacggcaaagcaataaaat

SEQ ID NO: 30735 - DNA, 33 bp, Homo sapiens
tattaggaggcattacaaaaataagaaagtggt

SEQ ID NO: 30736 - DNA, 33 bp, Homo sapiens
ccctccttgtatcagtcaaaatcctatccactc

SEQ ID NO: 30737 - DNA, 51 bp, Homo sapiens
acaattgtttgatgcttaatcttgacattaaaacctaaaacactactttca

SEQ ID NO: 30738 - DNA, 33 bp, Homo sapiens
caatactgttccatgactatttcagcagaactg

SEQ ID NO: 30739 - DNA, 33 bp, Homo sapiens
atcatagaagatgttaacgcaccattctcatat

SEQ ID NO: 30740 - DNA, 33 bp, Homo sapiens
cttcttaagcagaaaaagctcttaggagagaaa

SEQ ID NO: 30741 - DNA, 33 bp, Homo sapiens
taacttggcaaaagaaaatgttagggtccttca

SEQ ID NO: 30742 - DNA, 33 bp, Homo sapiens
ttggggcaatgctccacagagtcaagggcatgt

SEQ ID NO: 30743 - DNA, 33 bp, Homo sapiens
tcaagctagcacatcaatactaaaaagaaaagc

SEQ ID NO: 30744 - DNA, 33 bp, Homo sapiens
tatgtattgccggcaaataaagtatgtccagac

SEQ ID NO: 30745 - DNA, 33 bp, Homo sapiens
ataacctaatacttcccgatcaataacacgtcc

SEQ ID NO: 30746 - DNA, 51 bp, Homo sapiens
cttgccaaaacctgcagtgctcaaacgagtatccccttaacatttcataac

SEQ ID NO: 30747 - DNA, 33 bp, Homo sapiens
gaataggcaggacaaacagaatttccttcttca

SEQ ID NO: 30748 - DNA, 33 bp, Homo sapiens
catgctgccttacagaaccactccactattcag

SEQ ID NO: 30749 - DNA, 33 bp, Homo sapiens
tactgaattcctactacgtgaagtgcactgtcc

SEQ ID NO: 30750 - DNA, 33 bp, Homo sapiens
gaagtcttataacacaagtgcagcttcataaag

SEQ ID NO: 30751 - DNA, 33 bp, Homo sapiens
catgtgatccttccaacagtgtaacaaggaagg

SEQ ID NO: 30752 - DNA, 33 bp, Homo sapiens
gattcacaggtatctcactaaattgaaacagga

SEQ ID NO: 30753 - DNA, 33 bp, Homo sapiens
gtatattgtggtcagaatatagaagtaccacat

SEQ ID NO: 30754 - DNA, 33 bp, Homo sapiens
gaagttttgagcggggcatgctgtgatttgatc

SEQ ID NO: 30755 - DNA, 33 bp, Homo sapiens
aagtgtttgctgagttaaaaataaaagcgcttt

SEQ ID NO: 30756 - DNA, 33 bp, Homo sapiens
gctgaatgttctctccaacacgattacccccag

SEQ ID NO: 30757 - DNA, 33 bp, Homo sapiens
cttgcccgtaagtgagccaatcctgcagatttg

SEQ ID NO: 30758 - DNA, 33 bp, Homo sapiens
actcagtattccagataaaggtagccatagtgg

SEQ ID NO: 30759 - DNA, 33 bp, Homo sapiens
agcgtggctcttctcacgcattttagtcttcac

SEQ ID NO: 30760 - DNA, 51 bp, Homo sapiens
taagccacagcaggggctctgtgaaccgagaaggaaaatatattgcatctg

SEQ ID NO: 30761 - DNA, 51 bp, Homo sapiens
gggaaaacatttagtcccattgtaaagattggaaagaaaaggaaaagagat

SEQ ID NO: 30762 - DNA, 33 bp, Homo sapiens
agatgtttaactacataaggtttcaaggaaata

SEQ ID NO: 30763 - DNA, 33 bp, Homo sapiens
aggcaataaaggctccaatacttctcccttccc

SEQ ID NO: 30764 - DNA, 33 bp, Homo sapiens
atatatcttcttgcacaggtacacataactctt

SEQ ID NO: 30765 - DNA, 33 bp, Homo sapiens
ctccacaaatgttggccgcatgaagtgtaagag

SEQ ID NO: 30766 - DNA, 51 bp, Homo sapiens
gttttgctccctgttagatagtaaaacatataagggaacaaatctttattt

SEQ ID NO: 30767 - DNA, 51 bp, Homo sapiens
aagttaaatttacctaatgtttattatataccagatgtgatgctaagacat

SEQ ID NO: 30768 - DNA, 51 bp, Homo sapiens
atttgcctttttattctacttggaaactctgctgataaagctgtttaaggg

SEQ ID NO: 30769 - DNA, 33 bp, Homo sapiens
gtggaaagctaacacaaactgatgatactgttt

SEQ ID NO: 30770 - DNA, 33 bp, Homo sapiens
cattgggactgactagacagttggtgcaaccca

SEQ ID NO: 30771 - DNA, 33 bp, Homo sapiens
tctttgaggacactcaagattaatcacattcct

SEQ ID NO: 30772 - DNA, 33 bp, Homo sapiens
gtacacccaggggaggcatgctctaagttccaa

SEQ ID NO: 30773 - DNA, 51 bp, Homo sapiens
acttggcccaggtttgaataaagccaccttgaccagtaaaaattattgcta

SEQ ID NO: 30774 - DNA, 33 bp, Homo sapiens
tcttttgccatcttacaatagtactaataactt

SEQ ID NO: 30775 - DNA, 33 bp, Homo sapiens
gaattttggaaatcagaacacaaaatagaggat

SEQ ID NO: 30776 - DNA, 33 bp, Homo sapiens
tgacaaatgggaaatccagaaattggaagttag

SEQ ID NO: 30777 - DNA, 51 bp, Homo sapiens
cacttacatactattacaataatgaagctgaagtattttttaggaaaacaa

SEQ ID NO: 30778 - DNA, 33 bp, Homo sapiens
atcatagtcatttcaccctccagcacacactta

SEQ ID NO: 30779 - DNA, 33 bp, Homo sapiens
tatttataacttcccccgctactcctatagata

SEQ ID NO: 30780 - DNA, 33 bp, Homo sapiens
taaataataatctcaacgtgaatgatacctgga

SEQ ID NO: 30781 - DNA, 33 bp, Homo sapiens
tgatgtggcccattccaagaaagcttattatat

SEQ ID NO: 30782 - DNA, 33 bp, Homo sapiens
tggattctttcagtctaacctacccttgttaat

SEQ ID NO: 30783 - DNA, 33 bp, Homo sapiens
ttgcatatacaaattacgtgtaagaggagaaat

SEQ ID NO: 30784 - DNA, 33 bp, Homo sapiens
gctcagggtgatgtgacagcacagcaggaaggt

SEQ ID NO: 30785 - DNA, 33 bp, Homo sapiens
ggttttcgtatggtaccaatgatcaaaatacct

SEQ ID NO: 30786 - DNA, 33 bp, Homo sapiens
aatgctcacattctggccatgtcatatggaaaa

SEQ ID NO: 30787 - DNA, 51 bp, Homo sapiens
cttattataaaatgttcactggagaaaatacagaaagttatgaagaaataa

SEQ ID NO: 30788 - DNA, 33 bp, Homo sapiens
ttcctctgaaatcccaaattcaaccatcctata

SEQ ID NO: 30789 - DNA, 33 bp, Homo sapiens
gtaggagatttaatgtcaaaacagcaaacgcat

SEQ ID NO: 30790 - DNA, 33 bp, Homo sapiens
tgaggggatggcagtcacattatgctcttgtaa

SEQ ID NO: 30791 - DNA, 33 bp, Homo sapiens
attactgatcatttcacatagtgggaaactttg

SEQ ID NO: 30792 - DNA, 33 bp, Homo sapiens
agttgttagactaaaggatagcagattgcttgg

SEQ ID NO: 30793 - DNA, 33 bp, Homo sapiens
gtacttttaaagtcaacaggagattattcgaat

SEQ ID NO: 30794 - DNA, 33 bp, Homo sapiens
aaagtactactcaaggaaagtttgagcattttt

SEQ ID NO: 30795 - DNA, 33 bp, Homo sapiens
atatcacaaaattcaaggagtgaatgtagaaag

SEQ ID NO: 30796 - DNA, 33 bp, Homo sapiens
taatagaaaaagaacaacattcaaagcttttca

SEQ ID NO: 30797 - DNA, 33 bp, Homo sapiens
acacattaatcattgaatatcaaacttaaatgt

SEQ ID NO: 30798 - DNA, 51 bp, Homo sapiens
gccacatctgtaactctcaaattctcaaaactaacatgtctcttttaacca

SEQ ID NO: 30799 - DNA, 51 bp, Homo sapiens
agagaagggggaaaatattaatttacattcgaaaaaaataaagatgaacta

SEQ ID NO: 30800 - DNA, 33 bp, Homo sapiens
agacttgtaattacccaatgtgcttacatgaaa

SEQ ID NO: 30801 - DNA, 51 bp, Homo sapiens
cttgaaagattagataagttctacacgaaatgcaagggtccagcacttagt

SEQ ID NO: 30802 - DNA, 33 bp, Homo sapiens
gaatgctgtgattattaaaagaggcaatacctg

SEQ ID NO: 30803 - DNA, 33 bp, Homo sapiens
ccggaagcactatttagatacactatgccacca

SEQ ID NO: 30804 - DNA, 33 bp, Homo sapiens
tcgagggcatcaggcccattttgtccttttatt

SEQ ID NO: 30805 - DNA, 51 bp, Homo sapiens
aattctaaggctcaaaataactggtaaaactgaggttaaaattttcaaaac

SEQ ID NO: 30806 - DNA, 33 bp, Homo sapiens
tcatttagctttagagaaaatgaactttaaggc

SEQ ID NO: 30807 - DNA, 33 bp, Homo sapiens
atcaaagaaagtctcacgacaaagtggtatttc

SEQ ID NO: 30808 - DNA, 33 bp, Homo sapiens
aaatctgtgtgtccaaactgaattcatttaacc

SEQ ID NO: 30809 - DNA, 33 bp, Homo sapiens
tctccttcaggaaaaactgtttgcctaaaagta

SEQ ID NO: 30810 - DNA, 33 bp, Homo sapiens
tactaggtgatatacacatattccaaagactga

SEQ ID NO: 30811 - DNA, 33 bp, Homo sapiens
gccatgtgggtaagaacagaaattgagaaaata

SEQ ID NO: 30812 - DNA, 33 bp, Homo sapiens
ttctatgtgtccttgactaatagactttctcat

SEQ ID NO: 30813 - DNA, 33 bp, Homo sapiens
tagctatgtatttatgaagagaaaagcatggtg

SEQ ID NO: 30814 - DNA, 33 bp, Homo sapiens
cacttataccatgctacgaccaggaagttttaa

SEQ ID NO: 30815 - DNA, 33 bp, Homo sapiens
tctttaaattgtaataggcaggctgggcataat

SEQ ID NO: 30816 - DNA, 33 bp, Homo sapiens
agaggaccaccagtaaataattttggttctggt

SEQ ID NO: 30817 - DNA, 33 bp, Homo sapiens
tcaccactcgttccacagagaatttaaggaaaa

SEQ ID NO: 30818 - DNA, 33 bp, Homo sapiens
tttcaccatgaaaaaaattagtgacatattcag

SEQ ID NO: 30819 - DNA, 33 bp, Homo sapiens
tgatgctaacagcgtaagtttcttagaaaaccc

SEQ ID NO: 30820 - DNA, 33 bp, Homo sapiens
gagagaaagccctgaacgtatggtacaataagc

SEQ ID NO: 30821 - DNA, 33 bp, Homo sapiens
aaaaagctaaccaagacggtgttctgcttgatg

SEQ ID NO: 30822 - DNA, 33 bp, Homo sapiens
acatcttgtattctcaatcgaacttctgctaaa

SEQ ID NO: 30823 - DNA, 33 bp, Homo sapiens
ccaaaaccacttcgaaattagacacacttaaaa

SEQ ID NO: 30824 - DNA, 33 bp, Homo sapiens
tttatgccatctgccaaagagtattacacacca

SEQ ID NO: 30825 - DNA, 33 bp, Homo sapiens
ctaagggacacagctgaatgacataatgtggac

SEQ ID NO: 30826 - DNA, 33 bp, Homo sapiens
gtagaattgacaggaactgactaagggacacag

SEQ ID NO: 30827 - DNA, 51 bp, Homo sapiens
gcctgtagcagccctaaattaggtaaagacccagcttttgtttgcttttta

SEQ ID NO: 30828 - DNA, 33 bp, Homo sapiens
ttcaggtttattgatactaagttgcacagagtg

SEQ ID NO: 30829 - DNA, 51 bp, Homo sapiens
agctatcattataaccacatacagaatctacactagaaaccatttccttcc

SEQ ID NO: 30830 - DNA, 33 bp, Homo sapiens
cccaccatctggagaaactatgcaattcccctt

SEQ ID NO: 30831 - DNA, 33 bp, Homo sapiens
agccatagtgaccagaaagttgaactctctatg

SEQ ID NO: 30832 - DNA, 33 bp, Homo sapiens
attgtaggaacaaatacctatgtgagttgaaga

SEQ ID NO: 30833 - DNA, 33 bp, Homo sapiens
accttcctgatccccaatagacatcaaaatcat

SEQ ID NO: 30834 - DNA, 33 bp, Homo sapiens
gcatactgtaaacaccaataagaattgcatttt

SEQ ID NO: 30835 - DNA, 51 bp, Homo sapiens
ttctttctttctttatggacagaacagtataaacataggcaggcttatttt

SEQ ID NO: 30836 - DNA, 33 bp, Homo sapiens
cctgtctttgagctagcctagaaaacagacgga

SEQ ID NO: 30837 - DNA, 33 bp, Homo sapiens
caaggtacatgggaacactaaagtgccgcgtgg

SEQ ID NO: 30838 - DNA, 33 bp, Homo sapiens
tactcagaaaggattccacccacgcggcacttt

SEQ ID NO: 30839 - DNA, 51 bp, Homo sapiens
gagggaaagccatttgtaaacagtacgttgcttttcaaatataaaatgtta

SEQ ID NO: 30840 - DNA, 33 bp, Homo sapiens
cccgtgtgtttggggaatacaagtgactactgc

SEQ ID NO: 30841 - DNA, 33 bp, Homo sapiens
ctcaggcctctctcccaggctttggatttattc

SEQ ID NO: 30842 - DNA, 33 bp, Homo sapiens
gggagagaggcctgagaccttgcaaagccagta

SEQ ID NO: 30843 - DNA, 33 bp, Homo sapiens
ttcttcaactggacaaagatgtattgagtacct

SEQ ID NO: 30844 - DNA, 33 bp, Homo sapiens
tcctttggagtagaaaattactaaatgaaactg

SEQ ID NO: 30845 - DNA, 33 bp, Homo sapiens
tgattcattcctttgcactcatcatactgttat

SEQ ID NO: 30846 - DNA, 33 bp, Homo sapiens
gttttgtagtagtttcaactttaaaaagtacac

SEQ ID NO: 30847 - DNA, 33 bp, Homo sapiens
atctgacaaaatagaccgaaaaccaatacaact

SEQ ID NO: 30848 - DNA, 33 bp, Homo sapiens
ggcatggagtcctgggaagagactggcagcgat

SEQ ID NO: 30849 - DNA, 33 bp, Homo sapiens
cttttgtgccactaaaaataatctcatagaaag

SEQ ID NO: 30850 - DNA, 33 bp, Homo sapiens
tatacagtcaaattggcagaatagcctctcttc

SEQ ID NO: 30851 - DNA, 33 bp, Homo sapiens
ccatgagttgcccccaaaccaattcttctgaag

SEQ ID NO: 30852 - DNA, 33 bp, Homo sapiens
tattcattcattgatacatttggttacttcaga

SEQ ID NO: 30853 - DNA, 33 bp, Homo sapiens
ataattcattttccaaaagcaccagaactacag

SEQ ID NO: 30854 - DNA, 33 bp, Homo sapiens
ccactgatggaaacaccagatgatgtgactact

SEQ ID NO: 30855 - DNA, 33 bp, Homo sapiens
aattatatgtgtgagacgatctgccatgaacta

SEQ ID NO: 30856 - DNA, 51 bp, Homo sapiens
aggtccttcccagtatggtccttcaagaattatttctttttttgttttttc

SEQ ID NO: 30857 - DNA, 33 bp, Homo sapiens
tagcatgatggtaacaaaggtcataaccaccct

SEQ ID NO: 30858 - DNA, 33 bp, Homo sapiens
gtgtggctaaagatcaacaggcccaagtggtag

SEQ ID NO: 30859 - DNA, 33 bp, Homo sapiens
tggatggattttggtgacaatcttgaattagaa

SEQ ID NO: 30860 - DNA, 33 bp, Homo sapiens
actgatgtaaagaaagccatgacttctagattg

SEQ ID NO: 30861 - DNA, 33 bp, Homo sapiens
tgaaaacagcaatatcacagctaacactttagg

SEQ ID NO: 30862 - DNA, 51 bp, Homo sapiens
aaagccaggactcgcagggctgctccacccacaataatgaaccactatcta

SEQ ID NO: 30863 - DNA, 33 bp, Homo sapiens
ttgaatatacacattagctattcaagttaaaag

SEQ ID NO: 30864 - DNA, 33 bp, Homo sapiens
attggcaaatactacaaccaaaatagccctcct

SEQ ID NO: 30865 - DNA, 33 bp, Homo sapiens
ctcagctatcaacatcactgaaccacaagttgg

SEQ ID NO: 30866 - DNA, 33 bp, Homo sapiens
ggtttccagaatacaacggctacagactggagg

SEQ ID NO: 30867 - DNA, 33 bp, Homo sapiens
atgtggtaagaatttccaggcgttaaaattgat

SEQ ID NO: 30868 - DNA, 51 bp, Homo sapiens
aaaagaattcctcatgatattgtcactctaatttttctaggtcactagagc

SEQ ID NO: 30869 - DNA, 33 bp, Homo sapiens
gaaagtgcagcagtacagatagccattaatgtt

SEQ ID NO: 30870 - DNA, 33 bp, Homo sapiens
ggggtgcaaggacagagcatagagaaggaactc

SEQ ID NO: 30871 - DNA, 33 bp, Homo sapiens
aagtggaagctctcaaacacaggaaagaatgtg

SEQ ID NO: 30872 - DNA, 33 bp, Homo sapiens
tttgcggacactcttaacaatgtttctagatca

SEQ ID NO: 30873 - DNA, 33 bp, Homo sapiens
agtgataatagaagtccctgaaaagtcaaatgg

SEQ ID NO: 30874 - DNA, 33 bp, Homo sapiens
ttactgattactgtaacaaattcatgacagccc

SEQ ID NO: 30875 - DNA, 33 bp, Homo sapiens
taaaatatgcaaatggaacagaaatagattccc

SEQ ID NO: 30876 - DNA, 33 bp, Homo sapiens
tatagatcgcaaaactgaatcttagaaaagtca

SEQ ID NO: 30877 - DNA, 33 bp, Homo sapiens
caaaaatggataaaaaccaatgagctaaaaatt

SEQ ID NO: 30878 - DNA, 33 bp, Homo sapiens
tatcttatcatctcagacacttcagatcatctc

SEQ ID NO: 30879 - DNA, 33 bp, Homo sapiens
acagtcaagcctacttaaagagattgtcataaa

SEQ ID NO: 30880 - DNA, 33 bp, Homo sapiens
ctaggaatgaaacttacgtaggtccatgttcgg

SEQ ID NO: 30881 - DNA, 33 bp, Homo sapiens
cccacctttattcataacagacaacactatcca

SEQ ID NO: 30882 - DNA, 33 bp, Homo sapiens
ctctagataaatgagacacttccaataaaacag

SEQ ID NO: 30883 - DNA, 33 bp, Homo sapiens
agtttgaactgaagataaagagtgaacacattt

SEQ ID NO: 30884 - DNA, 51 bp, Homo sapiens
actataagaattgtatctctctggccctattcaaatttctcttctaaatta

SEQ ID NO: 30885 - DNA, 51 bp, Homo sapiens
tcattaaatttggtgaagccaagtcggactataagaattgtatctctctgg

SEQ ID NO: 30886 - DNA, 33 bp, Homo sapiens
ggctatgctacaagaaatccatgttaacttcac

SEQ ID NO: 30887 - DNA, 33 bp, Homo sapiens
atattcaataacttgcgccataggtgacaggat

SEQ ID NO: 30888 - DNA, 33 bp, Homo sapiens
atggtgatagtaaccacgattctttaattcaag

SEQ ID NO: 30889 - DNA, 33 bp, Homo sapiens
gcgcaaacagaggaaacggcaaggaataagact

SEQ ID NO: 30890 - DNA, 33 bp, Homo sapiens
atttagtcaattggcaagtagaaaattaaaaag

SEQ ID NO: 30891 - DNA, 33 bp, Homo sapiens
ttcaccagagattccactgactttgtagttcct

SEQ ID NO: 30892 - DNA, 33 bp, Homo sapiens
aaccttcccttctccaagtgagacactgttagt

SEQ ID NO: 30893 - DNA, 33 bp, Homo sapiens
tagtggtcttttaacaagtgttctctgaagtaa

SEQ ID NO: 30894 - DNA, 33 bp, Homo sapiens
ggtttacttcctgataataattttgataagctt

SEQ ID NO: 30895 - DNA, 33 bp, Homo sapiens
tgacttcatattgacaaactgacttgggatatc

SEQ ID NO: 30896 - DNA, 33 bp, Homo sapiens
ctagtacaacacgttacctacaaccaaattcat

SEQ ID NO: 30897 - DNA, 33 bp, Homo sapiens
acccaggtgtcatgtaaccgccaataatttgga

SEQ ID NO: 30898 - DNA, 33 bp, Homo sapiens
cctcccctaatcactacgttcacatcatgctcc

SEQ ID NO: 30899 - DNA, 33 bp, Homo sapiens
attttcccttattccaccagtgccactgggaga

SEQ ID NO: 30900 - DNA, 33 bp, Homo sapiens
aaaaggagtgattgtaagaagtcatataaatgg

SEQ ID NO: 30901 - DNA, 33 bp, Homo sapiens
gaagaaacaaaactataactcttcatagctgct

SEQ ID NO: 30902 - DNA, 33 bp, Homo sapiens
ggctagggcctgttgaagactattgacatgaag

SEQ ID NO: 30903 - DNA, 33 bp, Homo sapiens
atttcaaatgagctaccattttattgaatatct

SEQ ID NO: 30904 - DNA, 33 bp, Homo sapiens
actagttttcctaagaatccagctcaacttacc

SEQ ID NO: 30905 - DNA, 33 bp, Homo sapiens
gtgaacccaaaatagcagccaatgaaagcaaac

SEQ ID NO: 30906 - DNA, 33 bp, Homo sapiens
gctgagctcctgagagaaagaaatgaatgggag

SEQ ID NO: 30907 - DNA, 51 bp, Homo sapiens
gcatctatagaatttaaaataccaaagttagtatgtcatctgtagagacag

SEQ ID NO: 30908 - DNA, 33 bp, Homo sapiens
ccataactccaagatacgtggacatcactacag

SEQ ID NO: 30909 - DNA, 33 bp, Homo sapiens
ttcagtaattacgtcaatcttgaactgtattgt

SEQ ID NO: 30910 - DNA, 33 bp, Homo sapiens
ccttttgtttgctggacgtcaatgcccagaaca

SEQ ID NO: 30911 - DNA, 33 bp, Homo sapiens
taaagagaggatcaaacagtttatcttcacatg

SEQ ID NO: 30912 - DNA, 33 bp, Homo sapiens
tctgtgtataaggcaacgtcacctgggaggcca

SEQ ID NO: 30913 - DNA, 51 bp, Homo sapiens
aagacttgtgactttgccgacagacaattttaaatagctgttttgaggaaa

SEQ ID NO: 30914 - DNA, 33 bp, Homo sapiens
atgagaagaaatctacaatgtgctaggaacttt

SEQ ID NO: 30915 - DNA, 33 bp, Homo sapiens
aaagttaaagcctctacgtttgtctagtagact

SEQ ID NO: 30916 - DNA, 33 bp, Homo sapiens
gatgagtaggttcgtggagaaggataataatag

SEQ ID NO: 30917 - DNA, 51 bp, Homo sapiens
aattgaattgcgcttactttacttacggcatccattttgaggaacgcctta

SEQ ID NO: 30918 - DNA, 33 bp, Homo sapiens
gaaaggatgcagaggacaggacgagacttgtaa

SEQ ID NO: 30919 - DNA, 33 bp, Homo sapiens
ttagtaatcagtgtcaatatcatttcatcaatt

SEQ ID NO: 30920 - DNA, 51 bp, Homo sapiens
tagcgtagttcttctctatactcaaaatacttgtagctgagttcatggtgt

SEQ ID NO: 30921 - DNA, 33 bp, Homo sapiens
agatacatttttcacacaggagagacctaaata

SEQ ID NO: 30922 - DNA, 51 bp, Homo sapiens
aatttgttcttctaatttctgaatcaaagaatttaaaaacatacattggaa

SEQ ID NO: 30923 - DNA, 33 bp, Homo sapiens
cattccattgttcccagtatttcttacattaat

SEQ ID NO: 30924 - DNA, 33 bp, Homo sapiens
aactaattttgaggaaatgctacaccaggaatg

SEQ ID NO: 30925 - DNA, 33 bp, Homo sapiens
agggggacaaagtctacatcaggtggcaaaacg

SEQ ID NO: 30926 - DNA, 33 bp, Homo sapiens
tccttgatccaatcaaacttcagtgagctcatg

SEQ ID NO: 30927 - DNA, 33 bp, Homo sapiens
gaggtaacaaggatgcacaagtagattacctga

SEQ ID NO: 30928 - DNA, 33 bp, Homo sapiens
gaaaaagagaataaaaagccatgtggttcattg

SEQ ID NO: 30929 - DNA, 33 bp, Homo sapiens
cttccaagatgagttacatattaggcaaagtga

SEQ ID NO: 30930 - DNA, 33 bp, Homo sapiens
atgcagcatttacactaagatctgaaactgagt

SEQ ID NO: 30931 - DNA, 33 bp, Homo sapiens
ggctcagtgcaatttccaatacgttataatatg

SEQ ID NO: 30932 - DNA, 33 bp, Homo sapiens
cttgtcagactaggaccgagccattctagcagc

SEQ ID NO: 30933 - DNA, 33 bp, Homo sapiens
tgtaagtggaatgctacgtgtattatcatgtct

SEQ ID NO: 30934 - DNA, 33 bp, Homo sapiens
cagtagtgagtttgcacagctcccaaatttcca

SEQ ID NO: 30935 - DNA, 33 bp, Homo sapiens
aaatgaaacagtgtacaggaagcctgctaataa

SEQ ID NO: 30936 - DNA, 33 bp, Homo sapiens
tggtgtatatgtgacaaggccctaatttcttaa

SEQ ID NO: 30937 - DNA, 33 bp, Homo sapiens
catgtctccataggtcaccctccagcttggcca

SEQ ID NO: 30938 - DNA, 33 bp, Homo sapiens
acagctcagcaattacactctacataatctttt

SEQ ID NO: 30939 - DNA, 33 bp, Homo sapiens
cctaaagacctccttaacttagtgggcaagcct

SEQ ID NO: 30940 - DNA, 33 bp, Homo sapiens
tgaaattgaggaagtacggaggtggcctcacct

SEQ ID NO: 30941 - DNA, 33 bp, Homo sapiens
gatctgttgatgaatccgaaattggaagctctg

SEQ ID NO: 30942 - DNA, 33 bp, Homo sapiens
agtggaaaagtaagacactatcgtacagggagg

SEQ ID NO: 30943 - DNA, 33 bp, Homo sapiens
gccattaagctttgtaggactgcacatgacatt

SEQ ID NO: 30944 - DNA, 51 bp, Homo sapiens
ccatcttggacttctgcctctcagacgttaaggtgataaacttgtatggtt

SEQ ID NO: 30945 - DNA, 33 bp, Homo sapiens
gatagagtgtcaagaaaaaacctggaaggtacc

SEQ ID NO: 30946 - DNA, 33 bp, Homo sapiens
ggttgcccttcagcagacaattaagaaagacat

SEQ ID NO: 30947 - DNA, 33 bp, Homo sapiens
cccgtctgtataaatacgtgttcagagacttca

SEQ ID NO: 30948 - DNA, 33 bp, Homo sapiens
attactgaagaccaaaaggcatcatagcatgat

SEQ ID NO: 30949 - DNA, 33 bp, Homo sapiens
tttagcataaccccacagtagaatcaataacgg

SEQ ID NO: 30950 - DNA, 33 bp, Homo sapiens
cctttaagaagagagcacttaaaagagtaaggt

SEQ ID NO: 30951 - DNA, 33 bp, Homo sapiens
atgcttgctcactgagaaactgagagaccagct

SEQ ID NO: 30952 - DNA, 33 bp, Homo sapiens
cagacactgtctaactcactttggagcctgagg

SEQ ID NO: 30953 - DNA, 33 bp, Homo sapiens
agctcctgtcactccacgtggctttgtctctgg

SEQ ID NO: 30954 - DNA, 33 bp, Homo sapiens
ctgcggaaataagcacaaatgggctctgttgga

SEQ ID NO: 30955 - DNA, 33 bp, Homo sapiens
tctgtagtctagtgtaataactggctcatagta

SEQ ID NO: 30956 - DNA, 33 bp, Homo sapiens
tcattttaccacttcaatcactaaagccagtaa

SEQ ID NO: 30957 - DNA, 33 bp, Homo sapiens
tcttcaaaatctttacacgattgatcttccatg

SEQ ID NO: 30958 - DNA, 33 bp, Homo sapiens
ttttagagatttttaaatgttgttggacttaag

SEQ ID NO: 30959 - DNA, 51 bp, Homo sapiens
ttaatccaggtataagaggttttagacgtttcttactatggacttgcatag

SEQ ID NO: 30960 - DNA, 33 bp, Homo sapiens
cttcaaagaacctatccaacctgttcaactatt

SEQ ID NO: 30961 - DNA, 51 bp, Homo sapiens
aatcacaagtgtagtgatttaaacacggtatcagtggctttacgcatccat

SEQ ID NO: 30962 - DNA, 33 bp, Homo sapiens
atccgcagcgtcagagaaagctgtattgtctga

SEQ ID NO: 30963 - DNA, 33 bp, Homo sapiens
tatcaaaaggaaagaaaagatgaggaatagcat

SEQ ID NO: 30964 - DNA, 33 bp, Homo sapiens
tcctgccatgagaaatgaaagtcagacaaagac

SEQ ID NO: 30965 - DNA, 33 bp, Homo sapiens
tcagtccagtggacaacaaatgggagctgaatt

SEQ ID NO: 30966 - DNA, 33 bp, Homo sapiens
gaactttactgagtaacagaacagcttgcggga

SEQ ID NO: 30967 - DNA, 33 bp, Homo sapiens
aagagatatagtcgctaaacactaggtcatata

SEQ ID NO: 30968 - DNA, 33 bp, Homo sapiens
tttctttcaattctgacctctcccttcagttac

SEQ ID NO: 30969 - DNA, 33 bp, Homo sapiens
aaaccagccctaaataacacattgagaagacca

SEQ ID NO: 30970 - DNA, 33 bp, Homo sapiens
gggaatgagactgctacatcatgttaagtgttt

SEQ ID NO: 30971 - DNA, 33 bp, Homo sapiens
tccatccctgccattacggtcaccttgttcatg

SEQ ID NO: 30972 - DNA, 33 bp, Homo sapiens
aaattgccgagtaacacgatttcagtaacatgt

SEQ ID NO: 30973 - DNA, 33 bp, Homo sapiens
agtgcctacttcacagaaataacaagggaacat

SEQ ID NO: 30974 - DNA, 33 bp, Homo sapiens
aaataataaaatgaaccaagtgcctcctaaact

SEQ ID NO: 30975 - DNA, 33 bp, Homo sapiens
cttcttcttacaaagccacaagtcccactctca

SEQ ID NO: 30976 - DNA, 33 bp, Homo sapiens
ggggtcctctaggctcacccattctttcactcc

SEQ ID NO: 30977 - DNA, 33 bp, Homo sapiens
caagtatttggatgaaacctgttagatggtggg

SEQ ID NO: 30978 - DNA, 33 bp, Homo sapiens
tgagcctcaatcccacaaggaccctctaagaaa

SEQ ID NO: 30979 - DNA, 33 bp, Homo sapiens
gtgctctatgaacatagcaggttactgtcatta

SEQ ID NO: 30980 - DNA, 33 bp, Homo sapiens
gccagaagttctaaaacctccaaggtatgtagc

SEQ ID NO: 30981 - DNA, 33 bp, Homo sapiens
tattccaagctaatgacggaagcaagattcata

SEQ ID NO: 30982 - DNA, 33 bp, Homo sapiens
gaattttcaaagcccaaattttcaatgacaagc

SEQ ID NO: 30983 - DNA, 33 bp, Homo sapiens
gtgaactgccatatcccagaaagtgaaacttat

SEQ ID NO: 30984 - DNA, 33 bp, Homo sapiens
atagactggggtggaaatctttggacaaatcca

SEQ ID NO: 30985 - DNA, 33 bp, Homo sapiens
tcctgatctgacagcacactaaaaagcattagg

SEQ ID NO: 30986 - DNA, 33 bp, Homo sapiens
actgacctggagcctccagagcaagggtcagga

SEQ ID NO: 30987 - DNA, 33 bp, Homo sapiens
tattgaactcctactacgtttgaggcactggag

SEQ ID NO: 30988 - DNA, 33 bp, Homo sapiens
tatgctcctagttatcacaggaaaaggatacag

SEQ ID NO: 30989 - DNA, 33 bp, Homo sapiens
gaaatgtgtggtggggacatattagtggtgaca

SEQ ID NO: 30990 - DNA, 33 bp, Homo sapiens
actggtaatagttcccagagaatggctggctcc

SEQ ID NO: 30991 - DNA, 33 bp, Homo sapiens
tagcaaaagtcattgcaagttctgaaggaaaca

SEQ ID NO: 30992 - DNA, 33 bp, Homo sapiens
aaagggattgcagtagcagtaggtggcatggtc

SEQ ID NO: 30993 - DNA, 33 bp, Homo sapiens
aaaacagataaggaaaagctcatccacagagct

SEQ ID NO: 30994 - DNA, 33 bp, Homo sapiens
tttccatttcacccggaagctaactgctagaga

SEQ ID NO: 30995 - DNA, 33 bp, Homo sapiens
ttgtaggtcatctacacgatactattcatcttt

SEQ ID NO: 30996 - DNA, 33 bp, Homo sapiens
gattaaaacccaacaaactcgagtgctggggtc

SEQ ID NO: 30997 - DNA, 51 bp, Homo sapiens
ggcaccatcgtgggtgggagggtatcttgcatttgtcttggtattgccctc

SEQ ID NO: 30998 - DNA, 33 bp, Homo sapiens
ttcccaggcaggtcaacgggaaaaggttgcagg

SEQ ID NO: 30999 - DNA, 33 bp, Homo sapiens
tacatgaaaacaaatgacaacagcttgtgggtg

SEQ ID NO: 31000 - DNA, 33 bp, Homo sapiens
agggtaagacagaagactataatgcacttagtc

SEQ ID NO: 31001 - DNA, 51 bp, Homo sapiens
caagatagccagaaattatatttccggatggagtatacaatctgcctttgg

SEQ ID NO: 31002 - DNA, 33 bp, Homo sapiens
agaagacctaaggccgaaagtcgctgtgcagca

SEQ ID NO: 31003 - DNA, 33 bp, Homo sapiens
caagaatagcaagtgcaaaaaagcagtagctct

SEQ ID NO: 31004 - DNA, 33 bp, Homo sapiens
gttttagcatttccaacgggcatcaacaaatct

SEQ ID NO: 31005 - DNA, 33 bp, Homo sapiens
acgaggcattttctcacagtccctgacagcaca

SEQ ID NO: 31006 - DNA, 33 bp, Homo sapiens
tgttgcaaaggtagaactagaatcttacttctg

SEQ ID NO: 31007 - DNA, 33 bp, Homo sapiens
tcaatgcactgaaaataatctaactgggaagtt

SEQ ID NO: 31008 - DNA, 33 bp, Homo sapiens
taacttacactcatgaaatcagctcaggattca

SEQ ID NO: 31009 - DNA, 33 bp, Homo sapiens
cagtggtgagagaaaacagaattacattttatg

SEQ ID NO: 31010 - DNA, 33 bp, Homo sapiens
ctaaccaagtgaaaaaaccaatatacacaaata

SEQ ID NO: 31011 - DNA, 33 bp, Homo sapiens
gtggacaacaagaaagaccatctactaggccaa

SEQ ID NO: 31012 - DNA, 33 bp, Homo sapiens
gcacttggacaggaaccacgatcatacctattg

SEQ ID NO: 31013 - DNA, 33 bp, Homo sapiens
atatttgacaccttggaaacttgcattaatact

SEQ ID NO: 31014 - DNA, 33 bp, Homo sapiens
gagaccttcacaacaacccctatcatcacagcc

SEQ ID NO: 31015 - DNA, 33 bp, Homo sapiens
caaattcattcatcaaaaacgggttctctgcta

SEQ ID NO: 31016 - DNA, 33 bp, Homo sapiens
atcatggagacattccaatttacattatacaca

SEQ ID NO: 31017 - DNA, 33 bp, Homo sapiens
aaaagaaatgtgacgcactctcaccaagatgct

SEQ ID NO: 31018 - DNA, 33 bp, Homo sapiens
agtatccatcactcaaataacatacattgtacc

SEQ ID NO: 31019 - DNA, 33 bp, Homo sapiens
atatgtttctctttcaaggtggttagtctagca

SEQ ID NO: 31020 - DNA, 33 bp, Homo sapiens
aattttttaaatgggcaaaaggcttgaaatgtc

SEQ ID NO: 31021 - DNA, 33 bp, Homo sapiens
tagaatgtttaatttcacttctctcacttgaat

SEQ ID NO: 31022 - DNA, 33 bp, Homo sapiens
taggttgtccatattgaagctggattatgggat

SEQ ID NO: 31023 - DNA, 51 bp, Homo sapiens
tctatgtattttcctgcaaataaaaccattagtaaaaagattttaagttgt

SEQ ID NO: 31024 - DNA, 33 bp, Homo sapiens
tagcccttactctagaacaactttagtcacatt

SEQ ID NO: 31025 - DNA, 51 bp, Homo sapiens
cttaaagagtgttctcagtggtccacgtgctacaactgagaggcaatgagg

SEQ ID NO: 31026 - DNA, 33 bp, Homo sapiens
aattagaaagacaaaaactatctgaacatagga

SEQ ID NO: 31027 - DNA, 33 bp, Homo sapiens
agcattcctagagtccaattcttccattttccc

SEQ ID NO: 31028 - DNA, 33 bp, Homo sapiens
taaaaaaagcagcaccccaattcctaaatgact

SEQ ID NO: 31029 - DNA, 51 bp, Homo sapiens
tgctatacagacttatgtttccaaccgtagccacacaacacagtgttacag

SEQ ID NO: 31030 - DNA, 33 bp, Homo sapiens
acagcagactcatcgtaacagctgcccagaaga

SEQ ID NO: 31031 - DNA, 51 bp, Homo sapiens
tctaacctcaaatggctgagctgaactcctgtgatgtcaacctagttttct

SEQ ID NO: 31032 - DNA, 33 bp, Homo sapiens
aagaacgtctgagacacgggaagtttgtccctg

SEQ ID NO: 31033 - DNA, 33 bp, Homo sapiens
agatagaaatgcactaaatctgaagttcgcacc

SEQ ID NO: 31034 - DNA, 33 bp, Homo sapiens
tgtttattcccagtgactagtaaattgcatttt

SEQ ID NO: 31035 - DNA, 51 bp, Homo sapiens
gttgttgctgctattgttattatgacgtacttggccctcttccagacccac

SEQ ID NO: 31036 - DNA, 33 bp, Homo sapiens
tgtcctctgaggcaccaaagtttttattttgat

SEQ ID NO: 31037 - DNA, 33 bp, Homo sapiens
gtgtggcttgaggatcacttggtgaaatagaaa

SEQ ID NO: 31038 - DNA, 33 bp, Homo sapiens
tctccaagctttgataactgtggcttaatattc

SEQ ID NO: 31039 - DNA, 33 bp, Homo sapiens
gacagttaataaatgcagcaggatcccactcat

SEQ ID NO: 31040 - DNA, 33 bp, Homo sapiens
gctatgcaagccaacaatgtccttaatatttaa

SEQ ID NO: 31041 - DNA, 33 bp, Homo sapiens
tctcctgcttaaaataactaaaattggagaaag

SEQ ID NO: 31042 - DNA, 51 bp, Homo sapiens
ttcaagtgaatactggatgccaaaacaacacacacaccttagagtgagttt

SEQ ID NO: 31043 - DNA, 51 bp, Homo sapiens
caataaatggcaccatataaaacagaaactgttggagagcattttatctgt

SEQ ID NO: 31044 - DNA, 51 bp, Homo sapiens
tatttgtacaaaagtttctaagtacacaagaggaacttgcaggtcattttt

SEQ ID NO: 31045 - DNA, 33 bp, Homo sapiens
actctgagccattaaccatggactgtaactcaa

SEQ ID NO: 31046 - DNA, 33 bp, Homo sapiens
aagtatttttaaattaagcaacaggatgtgttt

SEQ ID NO: 31047 - DNA, 33 bp, Homo sapiens
aattacttacattttcaagactaattagtgccc

SEQ ID NO: 31048 - DNA, 33 bp, Homo sapiens
ttaaactcaaccttagaatgtcagaataggtat

SEQ ID NO: 31049 - DNA, 33 bp, Homo sapiens
actacagacactaagaataagatatgctaacag

SEQ ID NO: 31050 - DNA, 33 bp, Homo sapiens
tttaaggatgcagctaagtgaataattacattt

SEQ ID NO: 31051 - DNA, 33 bp, Homo sapiens
agactgttttccaatacggctttactactttat

SEQ ID NO: 31052 - DNA, 33 bp, Homo sapiens
taaaatgaaaaaataaagtgtcatgatatacat

SEQ ID NO: 31053 - DNA, 33 bp, Homo sapiens
gatgttaccaaagcaaccatacatgaagataca

SEQ ID NO: 31054 - DNA, 33 bp, Homo sapiens
aagaagaccactggtgcaatttcataagcaata

SEQ ID NO: 31055 - DNA, 33 bp, Homo sapiens
aatgaaaaaaagacaacaaatgaactgagcaca

SEQ ID NO: 31056 - DNA, 33 bp, Homo sapiens
acagactccttaaagcaaaatgatcatatctgt

SEQ ID NO: 31057 - DNA, 33 bp, Homo sapiens
cttcacttagatttgaagtaacaaagagatatt

SEQ ID NO: 31058 - DNA, 33 bp, Homo sapiens
tctagaaaatgtttgacaatatgcctgttttct

SEQ ID NO: 31059 - DNA, 33 bp, Homo sapiens
ttaatatgaaaagttacagtgaattctcctaat

SEQ ID NO: 31060 - DNA, 51 bp, Homo sapiens
aggatggtttatttccaaaatactaaagtgtgttcaaatatggaaacccgc

SEQ ID NO: 31061 - DNA, 33 bp, Homo sapiens
gaaggtatagtggtgtaaaaagatatcccatac

SEQ ID NO: 31062 - DNA, 33 bp, Homo sapiens
tcaggttcaaacttcacgttctactctgactga

SEQ ID NO: 31063 - DNA, 33 bp, Homo sapiens
ctgctgatatctctggcataaatacttctacaa

SEQ ID NO: 31064 - DNA, 33 bp, Homo sapiens
aaatagatccataagcaactcaagcctctttgt

SEQ ID NO: 31065 - DNA, 33 bp, Homo sapiens
ggggggtggtaatgtacggactaggtgaagtcc

SEQ ID NO: 31066 - DNA, 33 bp, Homo sapiens
agagacagcagaaaagaaataggtactcctgtt

SEQ ID NO: 31067 - DNA, 33 bp, Homo sapiens
cctcaggaagcttccaatcatagtagaagacaa

SEQ ID NO: 31068 - DNA, 33 bp, Homo sapiens
tgtacctcatattgaagtattcactcccagaaa

SEQ ID NO: 31069 - DNA, 33 bp, Homo sapiens
cactagtgttggactaaacagcaggaaaaatat

SEQ ID NO: 31070 - DNA, 33 bp, Homo sapiens
aagtgatttctttggactatgcctgtacattaa

SEQ ID NO: 31071 - DNA, 33 bp, Homo sapiens
tttagtagataacatacacctctgaagtcacta

SEQ ID NO: 31072 - DNA, 33 bp, Homo sapiens
aggaaccacagctcacgattaaacaattgctga

SEQ ID NO: 31073 - DNA, 51 bp, Homo sapiens
tttcatcactccatggtattaaaaaatatctcctagtttgtgatgtgtaca

SEQ ID NO: 31074 - DNA, 33 bp, Homo sapiens
acagcagtccaatttaccattttgctaccttgg

SEQ ID NO: 31075 - DNA, 33 bp, Homo sapiens
tttatttctacgttcaacctaaaagctcactgc

SEQ ID NO: 31076 - DNA, 33 bp, Homo sapiens
atagtattcactacaaattgacttaagaaccct

SEQ ID NO: 31077 - DNA, 33 bp, Homo sapiens
acagcaaacagctaaaagaagatttcagccatt

SEQ ID NO: 31078 - DNA, 33 bp, Homo sapiens
tgaaatttagccgaaaaagtatatcaaaagcaa

SEQ ID NO: 31079 - DNA, 33 bp, Homo sapiens
ccttaatcaaaaacaacgaggtttgagctagta

SEQ ID NO: 31080 - DNA, 51 bp, Homo sapiens
tagaattgatgggcaataaacggtaaatgttttggactccctgataaaata

SEQ ID NO: 31081 - DNA, 33 bp, Homo sapiens
ttagagaaaaaaaaaagatgcctacagaatgta

SEQ ID NO: 31082 - DNA, 33 bp, Homo sapiens
caactatttaactgtacctttgtcgtacaaaaa

SEQ ID NO: 31083 - DNA, 33 bp, Homo sapiens
aattgtagctctcacaataaagctgggtgaaaa

SEQ ID NO: 31084 - DNA, 51 bp, Homo sapiens
taggtattaaaaaaaatctctttacactcatcatgctaggccagagtaggg

SEQ ID NO: 31085 - DNA, 33 bp, Homo sapiens
aggtacggaatcaatccatatgctgtatatttt

SEQ ID NO: 31086 - DNA, 33 bp, Homo sapiens
ggaactgaggaacaaaatattgaaacctggact

SEQ ID NO: 31087 - DNA, 33 bp, Homo sapiens
caatcaagccaagaaccaaatcaagaacacaat

SEQ ID NO: 31088 - DNA, 33 bp, Homo sapiens
gatggcacgttaaagaaagaaagatggcttggt

SEQ ID NO: 31089 - DNA, 33 bp, Homo sapiens
atataacagtagtctaccttctgccactagctg

SEQ ID NO: 31090 - DNA, 33 bp, Homo sapiens
aggaggacagagaagcgatcataacataacatt

SEQ ID NO: 31091 - DNA, 33 bp, Homo sapiens
gagtaagtcattaaaacgctctaaccctgtatt

SEQ ID NO: 31092 - DNA, 33 bp, Homo sapiens
actcccccatcaaaagacgcatagtggctgaat

SEQ ID NO: 31093 - DNA, 33 bp, Homo sapiens
tcaagaagagagaacgaattctaggtgagcaat

SEQ ID NO: 31094 - DNA, 33 bp, Homo sapiens
gctacaatgggtatagccaacctcttgaataaa

SEQ ID NO: 31095 - DNA, 33 bp, Homo sapiens
ttcatattccaaaaaacttcactgtgtctctga

SEQ ID NO: 31096 - DNA, 51 bp, Homo sapiens
aaatgtgtgtgctatctttacctcaaattaattcaaaagggaaattaatga

SEQ ID NO: 31097 - DNA, 51 bp, Homo sapiens
atacatccaacttgaggtataggtaagttgcccaagaagaaatgtctagta

SEQ ID NO: 31098 - DNA, 51 bp, Homo sapiens
ctgtaaggtagaaattggaggtcaagaaaaatttaaacagaggaacagagg

SEQ ID NO: 31099 - DNA, 33 bp, Homo sapiens
cattggcacttagaaaaactttaattcaagttc

SEQ ID NO: 31100 - DNA, 33 bp, Homo sapiens
aattaactcagaagcaactacctacaagcaagt

SEQ ID NO: 31101 - DNA, 33 bp, Homo sapiens
attgtcatgtgcaacacacgattttgtcaacaa

SEQ ID NO: 31102 - DNA, 51 bp, Homo sapiens
ctttgagcacttcaaatgacacttcgatatttgtaccttacacaaaggata

SEQ ID NO: 31103 - DNA, 33 bp, Homo sapiens
cacagagtttctacaaagatgctgcctagtgaa

SEQ ID NO: 31104 - DNA, 33 bp, Homo sapiens
aatatgtgaactaataagcataagcagaatggg

SEQ ID NO: 31105 - DNA, 33 bp, Homo sapiens
acttagaaggtagtgacccaatctctcagtgat

SEQ ID NO: 31106 - DNA, 33 bp, Homo sapiens
attccacactaggaaagtcataggtgctcaaac

SEQ ID NO: 31107 - DNA, 51 bp, Homo sapiens
ggcttagaaattagagtagatataacagagttgattaacaatggaaaaagg

SEQ ID NO: 31108 - DNA, 51 bp, Homo sapiens
ctttgatacttattctttgtgaaataatacctctaatcttagaatatttaa

SEQ ID NO: 31109 - DNA, 33 bp, Homo sapiens
atatgcatatttcataaagctagacaaagatga

SEQ ID NO: 31110 - DNA, 51 bp, Homo sapiens
ggaaattgtctccttatagattctactaaacattttcagtaaaaataaagc

SEQ ID NO: 31111 - DNA, 33 bp, Homo sapiens
cacaaattagcttgaacggtagaaagatttata

SEQ ID NO: 31112 - DNA, 33 bp, Homo sapiens
tgactgccaggtttagaacagatattaagaacc

SEQ ID NO: 31113 - DNA, 33 bp, Homo sapiens
aaactaggcactctcactctgaagcgacattag

SEQ ID NO: 31114 - DNA, 33 bp, Homo sapiens
aaatttgtgtggctacagaggcagtattattct

SEQ ID NO: 31115 - DNA, 33 bp, Homo sapiens
tctttcagctcttctccgactgactttcctgaa

SEQ ID NO: 31116 - DNA, 33 bp, Homo sapiens
gactatagcattaagacaggaaccaggaagagg

SEQ ID NO: 31117 - DNA, 51 bp, Homo sapiens
tagatagatagataatagatagagactaaagcctttcaatactgactttca

SEQ ID NO: 31118 - DNA, 33 bp, Homo sapiens
aagaaagaaaaggagaatagacaggattagaag

SEQ ID NO: 31119 - DNA, 33 bp, Homo sapiens
tgcactctacaaaaagcatcattctcataatag

SEQ ID NO: 31120 - DNA, 51 bp, Homo sapiens
catcatttttcatttcctctactgacggacagttaatttgcatgtatcaac

SEQ ID NO: 31121 - DNA, 51 bp, Homo sapiens
cttttaccattattttacagagtagccttgtgtttactttgagtaacttgt

SEQ ID NO: 31122 - DNA, 51 bp, Homo sapiens
taagatcataaaagctagagaaagacacgcttattaaggaaacaaataatt

SEQ ID NO: 31123 - DNA, 33 bp, Homo sapiens
ctgtcagattcattgaacaagcttaaattcagg

SEQ ID NO: 31124 - DNA, 51 bp, Homo sapiens
tgcagagggacaggtcagattgtgtcaaggttctatgcaaactgcccaaga

SEQ ID NO: 31125 - DNA, 33 bp, Homo sapiens
aattgttagttttttccagatgttttcttcaag

SEQ ID NO: 31126 - DNA, 33 bp, Homo sapiens
cagtatgttgagatgactaagatttgctttagc

SEQ ID NO: 31127 - DNA, 33 bp, Homo sapiens
aaagccatcctggaaactgtcaggtaataggag

SEQ ID NO: 31128 - DNA, 33 bp, Homo sapiens
ctggaggttaggcggccatgttcaaggttctag

SEQ ID NO: 31129 - DNA, 33 bp, Homo sapiens
ttacttgaattctgaaatggctgaatatttgaa

SEQ ID NO: 31130 - DNA, 33 bp, Homo sapiens
gtgtacttattatcaacctgggaatgtcgtcac

SEQ ID NO: 31131 - DNA, 33 bp, Homo sapiens
gttcagcaatccactccattattttaggcctct

SEQ ID NO: 31132 - DNA, 33 bp, Homo sapiens
cacacacattggtagaatccttttaaggaattc

SEQ ID NO: 31133 - DNA, 33 bp, Homo sapiens
tctttaacaattgccaaagacttccccaacttc

SEQ ID NO: 31134 - DNA, 33 bp, Homo sapiens
ttcaacatataaaccaaagactcattaattcct

SEQ ID NO: 31135 - DNA, 33 bp, Homo sapiens
agagataaaggaaatcaagagagaatgtgaatt

SEQ ID NO: 31136 - DNA, 33 bp, Homo sapiens
tctgaagccatccctaataaatttggcatattt

SEQ ID NO: 31137 - DNA, 51 bp, Homo sapiens
taaaacaacactaaaataagcaaaaaaagttcagtgggggaaaaagtcaag

SEQ ID NO: 31138 - DNA, 33 bp, Homo sapiens
tgtgaaacagcctccactgaggttattgacaag

SEQ ID NO: 31139 - DNA, 33 bp, Homo sapiens
gaaaataacataggaaatacacagaacaacaaa

SEQ ID NO: 31140 - DNA, 33 bp, Homo sapiens
ggaagcgacacttcaaacaaaagctgcaaagaa

SEQ ID NO: 31141 - DNA, 51 bp, Homo sapiens
ctaccaacaaagattctgacatacacggattttctggtccaaagaatcctt

SEQ ID NO: 31142 - DNA, 33 bp, Homo sapiens
aaatgtaaacagtccaaattaagatatgctgta

SEQ ID NO: 31143 - DNA, 33 bp, Homo sapiens
ttaattagtgactgaagagtgttgaataaatat

SEQ ID NO: 31144 - DNA, 33 bp, Homo sapiens
atacctgtctctattacctaaaaactatccatc

SEQ ID NO: 31145 - DNA, 33 bp, Homo sapiens
tttaatctgaagcccaatactcggccttgcatg

SEQ ID NO: 31146 - DNA, 51 bp, Homo sapiens
aaggaaaagatattaactacattataagctgctcagaaatgaattagcttg

SEQ ID NO: 31147 - DNA, 33 bp, Homo sapiens
caggatacaaaattaacggacatatatcactaa

SEQ ID NO: 31148 - DNA, 33 bp, Homo sapiens
ttcaaataaaacaaacaccgttgctgaatcact

SEQ ID NO: 31149 - DNA, 51 bp, Homo sapiens
cactttaaaaaagattttagatttaacattgcttttggaatcatttctgtt

SEQ ID NO: 31150 - DNA, 33 bp, Homo sapiens
ggaagtgggaaaagaacgtgtataggagtttag

SEQ ID NO: 31151 - DNA, 33 bp, Homo sapiens
ggtacagttcagtaacaggtgctttaacaagct

SEQ ID NO: 31152 - DNA, 33 bp, Homo sapiens
acattctcatataatcaactactagaacataag

SEQ ID NO: 31153 - DNA, 33 bp, Homo sapiens
gttttcctgaaataaaaagctgattatatctct

SEQ ID NO: 31154 - DNA, 51 bp, Homo sapiens
aatccagtgctaggaagtttatttacgttgtcccacagagatcattttctc

SEQ ID NO: 31155 - DNA, 33 bp, Homo sapiens
cacgtaacaatatgaggcagattctaatatcat

SEQ ID NO: 31156 - DNA, 33 bp, Homo sapiens
aagactcccaggattaaagttggacttgagtag

SEQ ID NO: 31157 - DNA, 51 bp, Homo sapiens
ctagagtgattctatgattttcaagccttaagtaaattcagtagccttttt

SEQ ID NO: 31158 - DNA, 33 bp, Homo sapiens
gaatcctcctattttcccactgttcccagaatt

SEQ ID NO: 31159 - DNA, 33 bp, Homo sapiens
gtgtcattccaacccacagtccacattgtgtct

SEQ ID NO: 31160 - DNA, 51 bp, Homo sapiens
agaattatatagcagaaagttataccgatcttttgataaaacaatgtaata

SEQ ID NO: 31161 - DNA, 33 bp, Homo sapiens
ggaatcctttgacctacggaactatctgctttg

SEQ ID NO: 31162 - DNA, 33 bp, Homo sapiens
agctaatggataccaaatgtttctaatttcacc

SEQ ID NO: 31163 - DNA, 33 bp, Homo sapiens
cagggtcatcattaccaaacattgagtaattaa

SEQ ID NO: 31164 - DNA, 33 bp, Homo sapiens
aaaaaaattgcacaataaattcagttagatttc

SEQ ID NO: 31165 - DNA, 33 bp, Homo sapiens
aaatagacaaatcaaggaactagtgtctgaccc

SEQ ID NO: 31166 - DNA, 33 bp, Homo sapiens
gatccacatttagataagattttggaagtgtct

SEQ ID NO: 31167 - DNA, 33 bp, Homo sapiens
tgcctagcctgtcgtacctaccatcaacaaaat

SEQ ID NO: 31168 - DNA, 33 bp, Homo sapiens
gccgccgctgccgtcaagtgcgtaatgacgtat

SEQ ID NO: 31169 - DNA, 51 bp, Homo sapiens
tggaaacccagcatgtctatttagacagaaactgtgacatacattacttgc

SEQ ID NO: 31170 - DNA, 33 bp, Homo sapiens
agagacgagataagcacataaataagaccccaa

SEQ ID NO: 31171 - DNA, 33 bp, Homo sapiens
tgaagaagtaagatcacagaggaaaattatgca

SEQ ID NO: 31172 - DNA, 33 bp, Homo sapiens
gcatagccaaattttcgacatacgtttattgag

SEQ ID NO: 31173 - DNA, 51 bp, Homo sapiens
ggtactgtgccactcatacacatcaaatcttcctcacgtccttcccaatat

SEQ ID NO: 31174 - DNA, 33 bp, Homo sapiens
aaatcagatacatgcacaaaacagtgtctactc

SEQ ID NO: 31175 - DNA, 51 bp, Homo sapiens
aagaactaatgaactaaaaactggacgaaaatactatccagaatgtggcaa

SEQ ID NO: 31176 - DNA, 33 bp, Homo sapiens
tgcactgactggctaactctctctcactcttag

SEQ ID NO: 31177 - DNA, 33 bp, Homo sapiens
ttcccacagttctttaacaatatgtcagtgtcg

SEQ ID NO: 31178 - DNA, 33 bp, Homo sapiens
cctatttgattgttagaatttatctgtaaaagg

SEQ ID NO: 31179 - DNA, 33 bp, Homo sapiens
gcccagactttaccaccatgcaatacatccatg

SEQ ID NO: 31180 - DNA, 33 bp, Homo sapiens
caagggaaatcagcaaaattgtatagtctctca

SEQ ID NO: 31181 - DNA, 33 bp, Homo sapiens
tctagatgtccagaaacgaccttgaaatatgaa

SEQ ID NO: 31182 - DNA, 33 bp, Homo sapiens
acttatttactcatcaacttaaatgttcatctc

SEQ ID NO: 31183 - DNA, 33 bp, Homo sapiens
atcttttgtaccgtcaactcctaccattgtaca

SEQ ID NO: 31184 - DNA, 33 bp, Homo sapiens
ttagttgatagggaaacagtcaccaatgttgtg

SEQ ID NO: 31185 - DNA, 33 bp, Homo sapiens
gaaggtggaacagtcactcctgacacttttctg

SEQ ID NO: 31186 - DNA, 33 bp, Homo sapiens
tacatatcaagaatccaaccaattaccaccacc

SEQ ID NO: 31187 - DNA, 33 bp, Homo sapiens
tggagccttctgattcgctccagtaggaagtgg

SEQ ID NO: 31188 - DNA, 33 bp, Homo sapiens
tcacaggagaatatccacaactatgttccttcc

SEQ ID NO: 31189 - DNA, 51 bp, Homo sapiens
gtctatttggagacttgtcaaaggacagaccctaattataaaatggaaagg

SEQ ID NO: 31190 - DNA, 33 bp, Homo sapiens
gtaagagctttttgtcaactgtgactccagaaa

SEQ ID NO: 31191 - DNA, 33 bp, Homo sapiens
tttctgactcatatgcaagacttacccgagatg

SEQ ID NO: 31192 - DNA, 33 bp, Homo sapiens
ccgcgcttggaagaagactgagtagttttttac

SEQ ID NO: 31193 - DNA, 33 bp, Homo sapiens
ttcattttgtagagaaagaatcagaagcaagct

SEQ ID NO: 31194 - DNA, 33 bp, Homo sapiens
ccttctctttgaactacatggctttgaagaatt

SEQ ID NO: 31195 - DNA, 51 bp, Homo sapiens
caacaattcatgttggattacctatacaggctgacattttcaatctcaact

SEQ ID NO: 31196 - DNA, 33 bp, Homo sapiens
tcttgcttaatgcacccgaccagtgacttattt

SEQ ID NO: 31197 - DNA, 33 bp, Homo sapiens
agacatctctggagcccgaacaatccatttact

SEQ ID NO: 31198 - DNA, 51 bp, Homo sapiens
ccaaaacaagcttacatctggtgtacgaaagttttaatattaaattataat

SEQ ID NO: 31199 - DNA, 51 bp, Homo sapiens
aacccaagaaatgtaatgcaaacaacttgggcctgtgtcacttagtcttct

SEQ ID NO: 31200 - DNA, 51 bp, Homo sapiens
tctgttttaatattgttccatttcccttctctttgccctgaaggcaggctt

SEQ ID NO: 31201 - DNA, 51 bp, Homo sapiens
ttacaatctataaacctataaagcaatgaaagaaaaataaacttctttatt

SEQ ID NO: 31202 - DNA, 33 bp, Homo sapiens
ggagcaaagcacaacacaggcttgtaatagcta

SEQ ID NO: 31203 - DNA, 33 bp, Homo sapiens
gaaaattggagaaagaacaaattagagtatatt

SEQ ID NO: 31204 - DNA, 33 bp, Homo sapiens
cattgttcttctcttacctccttgagttcaatt

SEQ ID NO: 31205 - DNA, 33 bp, Homo sapiens
gtaacttttgagggaacaggaattggcattttc

SEQ ID NO: 31206 - DNA, 33 bp, Homo sapiens
ataaaatatcttacaccgaaattgaggaaataa

SEQ ID NO: 31207 - DNA, 33 bp, Homo sapiens
cacccacaaggtaaccaaatcacggagccaggt

SEQ ID NO: 31208 - DNA, 33 bp, Homo sapiens
catttaaattgagcaaatgctagcctttcacat

SEQ ID NO: 31209 - DNA, 33 bp, Homo sapiens
ttccctttaatgcttacaaagggtaacgtggta

SEQ ID NO: 31210 - DNA, 33 bp, Homo sapiens
catcatataccactggaaaaattgtcaaatagt

SEQ ID NO: 31211 - DNA, 33 bp, Homo sapiens
tgagtccatgaagtaacactcatccactatcgg

SEQ ID NO: 31212 - DNA, 33 bp, Homo sapiens
tctagatgtctgtaaacgccatcaatacagtca

SEQ ID NO: 31213 - DNA, 51 bp, Homo sapiens
gccataaaatgagagagtgagaaaacaatatttgttacatttgatattgca

SEQ ID NO: 31214 - DNA, 33 bp, Homo sapiens
ggtttagaagatgataaagcacagactagagtc

SEQ ID NO: 31215 - DNA, 33 bp, Homo sapiens
catataccaatggtgacgtgatgtaatgcgaga

SEQ ID NO: 31216 - DNA, 33 bp, Homo sapiens
ccttgtgtcactgttccccttagaatttcaagc

SEQ ID NO: 31217 - DNA, 33 bp, Homo sapiens
aaacatctctctacgtgaaggtaatattctgca

SEQ ID NO: 31218 - DNA, 33 bp, Homo sapiens
ctcatatatcagaatcaccatggtttttaattg

SEQ ID NO: 31219 - DNA, 33 bp, Homo sapiens
aggctaaaatcctgaccatgacaaaaataaatt

SEQ ID NO: 31220 - DNA, 51 bp, Homo sapiens
caagaaaataaatctaacccagataaataatgcttttaactatatctgatt

SEQ ID NO: 31221 - DNA, 33 bp, Homo sapiens
accacatccaaaccaacagccagttatcatacc

SEQ ID NO: 31222 - DNA, 33 bp, Homo sapiens
tgatccgcccttaagcgcacaccaccttaatat

SEQ ID NO: 31223 - DNA, 33 bp, Homo sapiens
ttctttctttccaatacagctgcagcagcaccg

SEQ ID NO: 31224 - DNA, 33 bp, Homo sapiens
atttatgtaactcttaagcccaagaatgctatt

SEQ ID NO: 31225 - DNA, 33 bp, Homo sapiens
ccgatggtgacagctacaacctaacatgaaaat

SEQ ID NO: 31226 - DNA, 33 bp, Homo sapiens
ttttgaagttgcgataaactgtattatgatatg

SEQ ID NO: 31227 - DNA, 33 bp, Homo sapiens
atatttccttccttgaacctaattgcatatgcc

SEQ ID NO: 31228 - DNA, 33 bp, Homo sapiens
atgcttccgagtattgcactaggtgtgcctggc

SEQ ID NO: 31229 - DNA, 33 bp, Homo sapiens
gtgcaactcaaaggaacattcagaaacatattg

SEQ ID NO: 31230 - DNA, 51 bp, Homo sapiens
aatataggaaattgactaatagcacaaacatcaaatcagagtctcaaattg

SEQ ID NO: 31231 - DNA, 33 bp, Homo sapiens
aattactgtatatggaaattttgcaagtttttc

SEQ ID NO: 31232 - DNA, 33 bp, Homo sapiens
tgatagagaatggaaccgtgactaaagtaagat

SEQ ID NO: 31233 - DNA, 51 bp, Homo sapiens
atgatcttggattatgttcccttgaagtaaatcccactacaaagctgaatc

SEQ ID NO: 31234 - DNA, 33 bp, Homo sapiens
gattgcgttttagacacgtggcttgtggggatg

SEQ ID NO: 31235 - DNA, 51 bp, Homo sapiens
actatttttgcaatttactctcctcgattgttatttaggcttacagaatgc

SEQ ID NO: 31236 - DNA, 33 bp, Homo sapiens
gttttccagactctagaacagtaatgcttaaat

SEQ ID NO: 31237 - DNA, 33 bp, Homo sapiens
taaacctactgaaaaaattgtcaaactctaggt

SEQ ID NO: 31238 - DNA, 33 bp, Homo sapiens
gtagcattggcataagcagctgaaaatgcattg

SEQ ID NO: 31239 - DNA, 33 bp, Homo sapiens
caggattcctttacccagcacactctaaactct

SEQ ID NO: 31240 - DNA, 33 bp, Homo sapiens
gcacagaaagaagaaaaagcagtcataaaggaa

SEQ ID NO: 31241 - DNA, 33 bp, Homo sapiens
ctgcattatacgcatccaatggctcgagggata

SEQ ID NO: 31242 - DNA, 33 bp, Homo sapiens
catagtagaaaaaggacgttttaggacaggaga

SEQ ID NO: 31243 - DNA, 33 bp, Homo sapiens
cacgtttgtatggtccagaaaactgagagcagc

SEQ ID NO: 31244 - DNA, 33 bp, Homo sapiens
tccttgacatctttaaatagtaagccagcaggt

SEQ ID NO: 31245 - DNA, 33 bp, Homo sapiens
agagagataacaccatcacttaaattcacacca

SEQ ID NO: 31246 - DNA, 33 bp, Homo sapiens
tccttgagtcacttgaagaagctctacttttaa

SEQ ID NO: 31247 - DNA, 33 bp, Homo sapiens
gttccaagaattatgtcaagtactgaaataaaa

SEQ ID NO: 31248 - DNA, 33 bp, Homo sapiens
gtcaatagagtggccacagtaattcttccaaaa

SEQ ID NO: 31249 - DNA, 33 bp, Homo sapiens
cactaatgttatggtaactttgtaggctcctga

SEQ ID NO: 31250 - DNA, 33 bp, Homo sapiens
tggtatcaaagttttaccttccattgaaatcca

SEQ ID NO: 31251 - DNA, 51 bp, Homo sapiens
atctgctaggttgtggcttatttcaccactgtactgaatctcactacttta

SEQ ID NO: 31252 - DNA, 51 bp, Homo sapiens
tcagagtttaggagcaggagatatacgatgtgctatttttagggtcataga

SEQ ID NO: 31253 - DNA, 33 bp, Homo sapiens
gtgatcattaatgccaaaaacaaacatactgtc

SEQ ID NO: 31254 - DNA, 33 bp, Homo sapiens
cttcttcatgtaatccagaagttagagaaagag

SEQ ID NO: 31255 - DNA, 33 bp, Homo sapiens
ttttgagattggctgcactaggttaatcttggg

SEQ ID NO: 31256 - DNA, 33 bp, Homo sapiens
aggaagctgggaaacactaggcagaaaaatgaa

SEQ ID NO: 31257 - DNA, 51 bp, Homo sapiens
taaagccagaaaatagagataagacagaggaaatataagaattatgtaacc

SEQ ID NO: 31258 - DNA, 33 bp, Homo sapiens
gaagctgtttgtatcaagacggcaaatccctca

SEQ ID NO: 31259 - DNA, 33 bp, Homo sapiens
gcatgaaaggtactgaaaaaagtgctgatattg

SEQ ID NO: 31260 - DNA, 33 bp, Homo sapiens
tttgaacatgaacataaagtaatggaagctgcc

SEQ ID NO: 31261 - DNA, 33 bp, Homo sapiens
cagcagatttctaaaacgcactcgtcttgcctt

SEQ ID NO: 31262 - DNA, 33 bp, Homo sapiens
aagaaaccacagactacgatttgcagaaaaaat

SEQ ID NO: 31263 - DNA, 33 bp, Homo sapiens
tagaattaacaggtaacgttaaaataatctgat

SEQ ID NO: 31264 - DNA, 33 bp, Homo sapiens
ctttttcatctgaatcccgtcaacatcaactcc

SEQ ID NO: 31265 - DNA, 33 bp, Homo sapiens
taatggggggattatacggaattttagaagtta

SEQ ID NO: 31266 - DNA, 33 bp, Homo sapiens
gagccaggaacaagtaggaaggatgaaaaagtt

SEQ ID NO: 31267 - DNA, 33 bp, Homo sapiens
cccatgctgtgtaaggcatcctctgttaaagct

SEQ ID NO: 31268 - DNA, 33 bp, Homo sapiens
aactaagtgtcaaacacctgaggctccatagat

SEQ ID NO: 31269 - DNA, 33 bp, Homo sapiens
atgtagatatagaaaaaaggctaagaacataga

SEQ ID NO: 31270 - DNA, 33 bp, Homo sapiens
caattatatgctgacaatggcaaaatggatgcc

SEQ ID NO: 31271 - DNA, 51 bp, Homo sapiens
taccagactggcacaggagaagaaaggtagtgaatactaatttgaataccg

SEQ ID NO: 31272 - DNA, 51 bp, Homo sapiens
gtacacagacatggtggagcagtcaaaatacatacatttaagttctccctc

SEQ ID NO: 31273 - DNA, 33 bp, Homo sapiens
cttctcaaataatgtaagagatgtcagaattat

SEQ ID NO: 31274 - DNA, 51 bp, Homo sapiens
gagaagaaaaatgagtatgaagtcaataggtgagaaagaaggctgcagcac

SEQ ID NO: 31275 - DNA, 33 bp, Homo sapiens
attttgtttaacctaacgttctccaggctcatt

SEQ ID NO: 31276 - DNA, 33 bp, Homo sapiens
aactaccactcactgcaataaatagatttccaa

SEQ ID NO: 31277 - DNA, 33 bp, Homo sapiens
cacatatgcagtaaaagttaggctgtgtggtga

SEQ ID NO: 31278 - DNA, 33 bp, Homo sapiens
ccaatgaaacaggatacaaaggccagaaataag

SEQ ID NO: 31279 - DNA, 33 bp, Homo sapiens
aggcccacatgaacaaaaatgttatagcaatat

SEQ ID NO: 31280 - DNA, 33 bp, Homo sapiens
cagagctgaacattgaagttgattaccaataca

SEQ ID NO: 31281 - DNA, 33 bp, Homo sapiens
gtgagccaacattcaaaaaggtcatgctagttc

SEQ ID NO: 31282 - DNA, 51 bp, Homo sapiens
tgatgatttcactcttctaaccctgcaaaggacttgcgcatactatcccaa

SEQ ID NO: 31283 - DNA, 33 bp, Homo sapiens
agtttagaagttgccaatctgttctaaaaaata

SEQ ID NO: 31284 - DNA, 33 bp, Homo sapiens
cttgcttctccaaggccgcattgacattgcaag

SEQ ID NO: 31285 - DNA, 33 bp, Homo sapiens
gatgtgcagaactttacaatgtattgaaatcct

SEQ ID NO: 31286 - DNA, 51 bp, Homo sapiens
aactgaggcagaagaaaattacatcagatggaaacttggatctagacagat

SEQ ID NO: 31287 - DNA, 51 bp, Homo sapiens
tctctgcctgtcctctttgtctgcactgatttcttgggtctcagtgacaac

SEQ ID NO: 31288 - DNA, 33 bp, Homo sapiens
tcagggaccaaggcagaatctctttttgtcttt

SEQ ID NO: 31289 - DNA, 33 bp, Homo sapiens
aagactacattcctccactcctcttgcaaaggg

SEQ ID NO: 31290 - DNA, 33 bp, Homo sapiens
aaggagaaaagtggcaccacatatctcttcata

SEQ ID NO: 31291 - DNA, 33 bp, Homo sapiens
gccaaatgatgagtaacataggtcaggagacaa

SEQ ID NO: 31292 - DNA, 33 bp, Homo sapiens
atcttaaaatgaacaaatcacctggataaacat

SEQ ID NO: 31293 - DNA, 51 bp, Homo sapiens
ttcccaactactcttcacaggcaccaaagattctaaatcaagccaatctcc

SEQ ID NO: 31294 - DNA, 51 bp, Homo sapiens
atggaatactatttagtcataaaaaactatgaaatcatatcatttgtagca

SEQ ID NO: 31295 - DNA, 33 bp, Homo sapiens
ctgctgtctatttctaagtaatcctctgcttag

SEQ ID NO: 31296 - DNA, 33 bp, Homo sapiens
ttaaccatcagctctgaaattatagagtaagga

SEQ ID NO: 31297 - DNA, 51 bp, Homo sapiens
ctacttaatacctgatcacttcaaaatagcgagttgtagaaaactgtttgt

SEQ ID NO: 31298 - DNA, 33 bp, Homo sapiens
atgtactccataaataaatacctacagtgtacc

SEQ ID NO: 31299 - DNA, 33 bp, Homo sapiens
aggtatctccgaaacactgtggatctagagatg

SEQ ID NO: 31300 - DNA, 33 bp, Homo sapiens
caaattttctgggttacatggttagtgtatgtt

SEQ ID NO: 31301 - DNA, 33 bp, Homo sapiens
tgtagccaggccaagacgaagctcagtaagtca

SEQ ID NO: 31302 - DNA, 33 bp, Homo sapiens
tccttatgagccttgcagacaaagaggtatcct

SEQ ID NO: 31303 - DNA, 51 bp, Homo sapiens
ttttaaaatgtcatctttatataacaagggaaatttgacaccactaagttt

SEQ ID NO: 31304 - DNA, 33 bp, Homo sapiens
agttctaaaaatcataaggcagaaattgaaaaa

SEQ ID NO: 31305 - DNA, 33 bp, Homo sapiens
gatagtttggacttggaaaaggtacactaaaga

SEQ ID NO: 31306 - DNA, 33 bp, Homo sapiens
tgataaaaggcagtgcgaaagataaaaagggaa

SEQ ID NO: 31307 - DNA, 33 bp, Homo sapiens
tatttcacactaactagaattgctaacattaaa

SEQ ID NO: 31308 - DNA, 33 bp, Homo sapiens
tctcaattgttattagccctgcccttgccccag

SEQ ID NO: 31309 - DNA, 33 bp, Homo sapiens
agacctattctgcatgaacccttatgatcttaa

SEQ ID NO: 31310 - DNA, 33 bp, Homo sapiens
acttacagccttccataaattctataaaccctg

SEQ ID NO: 31311 - DNA, 33 bp, Homo sapiens
tgtggttataccactggaaacatcttgtagttt

SEQ ID NO: 31312 - DNA, 51 bp, Homo sapiens
ttcttctaaaacacagcaccagtacagaactgtttcttcaagtttaggact

SEQ ID NO: 31313 - DNA, 33 bp, Homo sapiens
agaaaagggcctaggacgaagatacaaggcttt

SEQ ID NO: 31314 - DNA, 33 bp, Homo sapiens
tttttcttatcctacacgtctaatccatcacca

SEQ ID NO: 31315 - DNA, 33 bp, Homo sapiens
tatatgccatatatcacattcctttcgcaactt

SEQ ID NO: 31316 - DNA, 33 bp, Homo sapiens
tccccataaggtctcactaaagctgaacctcct

SEQ ID NO: 31317 - DNA, 51 bp, Homo sapiens
aaaggcactaagaagaaaggacggaatatattacacctctgtcagacttga

SEQ ID NO: 31318 - DNA, 33 bp, Homo sapiens
tctgctgaagtgtgaaatgtgaaggcactgccc

SEQ ID NO: 31319 - DNA, 33 bp, Homo sapiens
attgattcaagaaatacgtagaaggtaaaatag

SEQ ID NO: 31320 - DNA, 51 bp, Homo sapiens
tattgggatctatacagtgtctacacatttgatgataatgcctttttctct

SEQ ID NO: 31321 - DNA, 33 bp, Homo sapiens
attggatctgccgggtcaaatggcccaagtggc

SEQ ID NO: 31322 - DNA, 51 bp, Homo sapiens
tataaatacccagtttctcaaatacacttggaatcagctttctatattact

SEQ ID NO: 31323 - DNA, 33 bp, Homo sapiens
caaaatataagtggacacttctcctgaggcttt

SEQ ID NO: 31324 - DNA, 33 bp, Homo sapiens
aggtctcttttggggacgtgtgttttgaggcaa

SEQ ID NO: 31325 - DNA, 33 bp, Homo sapiens
agaaacttcttcacaactagtcatcaaaacctg

SEQ ID NO: 31326 - DNA, 33 bp, Homo sapiens
ggtacacaggataacacagatttccaaaaagct

SEQ ID NO: 31327 - DNA, 33 bp, Homo sapiens
ggggagagtaagctgacgggatacctctcattt

SEQ ID NO: 31328 - DNA, 33 bp, Homo sapiens
gaagcatgcatgtacaatactaaaaactttttc

SEQ ID NO: 31329 - DNA, 51 bp, Homo sapiens
tgtattgatacataatcaatgtccaataaattacacatatttaaactacag

SEQ ID NO: 31330 - DNA, 51 bp, Homo sapiens
tgttataactcataaaccagccctgaattaaataatgttataatcctactg

SEQ ID NO: 31331 - DNA, 33 bp, Homo sapiens
taactggcttcagaaacagcatagtgttgggca

SEQ ID NO: 31332 - DNA, 33 bp, Homo sapiens
tggcatctgcaggtaactggagcttttggtact

SEQ ID NO: 31333 - DNA, 33 bp, Homo sapiens
gtggcagtaagctggacgggagaaccacaacca

SEQ ID NO: 31334 - DNA, 33 bp, Homo sapiens
tagatagcatgctccactaggacagggcccagg

SEQ ID NO: 31335 - DNA, 33 bp, Homo sapiens
ttttggcttcggtgaacaaaaatcgcatatatc

SEQ ID NO: 31336 - DNA, 51 bp, Homo sapiens
gacacaaaatcctctgtgcctaagccactatgaaatagttgcacataattt

SEQ ID NO: 31337 - DNA, 33 bp, Homo sapiens
aactagcattcagcccagcaatcacattactgg

SEQ ID NO: 31338 - DNA, 33 bp, Homo sapiens
gctgaaaacagcacacccctatcttcccaaatt

SEQ ID NO: 31339 - DNA, 33 bp, Homo sapiens
agtagatgccaatatcccatataccacataaat

SEQ ID NO: 31340 - DNA, 33 bp, Homo sapiens
gtatttcgtaccacaagggctgttattcaccat

SEQ ID NO: 31341 - DNA, 33 bp, Homo sapiens
acacacacactaaggaagcctagataaaatatg

SEQ ID NO: 31342 - DNA, 33 bp, Homo sapiens
agtctactctggtctccatgagagtgaagtccc

SEQ ID NO: 31343 - DNA, 33 bp, Homo sapiens
tgtttattaaatgctagctatgtcacaggccat

SEQ ID NO: 31344 - DNA, 33 bp, Homo sapiens
tacttctgttcaacctaagccagaatatatagc

SEQ ID NO: 31345 - DNA, 33 bp, Homo sapiens
ccttctatgttacacacgaatgagaatataaag

SEQ ID NO: 31346 - DNA, 51 bp, Homo sapiens
gtataatattctgtcttattctactcactctctcagattataatcaaaata

SEQ ID NO: 31347 - DNA, 33 bp, Homo sapiens
ttacagaatcaatgcaatccttctcagaatacc

SEQ ID NO: 31348 - DNA, 33 bp, Homo sapiens
atcacatgtacatggacaggaaaactttttgtt

SEQ ID NO: 31349 - DNA, 33 bp, Homo sapiens
atttggtcagggaggaatactgttcaggaatac

SEQ ID NO: 31350 - DNA, 33 bp, Homo sapiens
catgccaactaaattgcagtgtatgggagtgag

SEQ ID NO: 31351 - DNA, 33 bp, Homo sapiens
gtaagcataggcagaaaccatagatttaggcat

SEQ ID NO: 31352 - DNA, 33 bp, Homo sapiens
gtttgggaaacagacacaagaaacacataaacc

SEQ ID NO: 31353 - DNA, 33 bp, Homo sapiens
tgatctctgatttccactgatctgttaggtgaa

SEQ ID NO: 31354 - DNA, 33 bp, Homo sapiens
gacaacagcatctcacagcatctctaaaagaga

SEQ ID NO: 31355 - DNA, 33 bp, Homo sapiens
ttggacagtcatataaactgattcaaactagag

SEQ ID NO: 31356 - DNA, 33 bp, Homo sapiens
ggcaaaacagaaataaactgatagctgcctttt

SEQ ID NO: 31357 - DNA, 33 bp, Homo sapiens
tctacagaattctccacgcaataaccacaaaat

SEQ ID NO: 31358 - DNA, 33 bp, Homo sapiens
agtcccagatttagtgaagatgacagccctctt

SEQ ID NO: 31359 - DNA, 51 bp, Homo sapiens
tttgtatacatttgtatctccagcacccaacagaatattcgcatatagcag

SEQ ID NO: 31360 - DNA, 51 bp, Homo sapiens
tttttttttttttttttggtcaacaaaatctgtcttgtgtcttaacatttc

SEQ ID NO: 31361 - DNA, 33 bp, Homo sapiens
agtggaaccccagcaacatggagatttgaggtc

SEQ ID NO: 31362 - DNA, 33 bp, Homo sapiens
tgtgggagctataaagcctaaaattcatagcct

SEQ ID NO: 31363 - DNA, 33 bp, Homo sapiens
ccatgtctttacaaaagccttctcaccttgaaa

SEQ ID NO: 31364 - DNA, 33 bp, Homo sapiens
ccccatggagaagtagaattaggcattttcaaa

SEQ ID NO: 31365 - DNA, 51 bp, Homo sapiens
cttcaggcctagctaactagactacgatgttcaatactggagaaggaagat

SEQ ID NO: 31366 - DNA, 33 bp, Homo sapiens
tggatatcatgtaagtaacaggaatagtcatat

SEQ ID NO: 31367 - DNA, 33 bp, Homo sapiens
atgcaacttttgtggactatctgtagaaatttc

SEQ ID NO: 31368 - DNA, 33 bp, Homo sapiens
aaattgtgaaagaaaaatccttgaaactctgac

SEQ ID NO: 31369 - DNA, 33 bp, Homo sapiens
gctgcaagtctatggaagtatttcaaagagaat

SEQ ID NO: 31370 - DNA, 33 bp, Homo sapiens
tgtggaacaatatcacacatattggatgacttc

SEQ ID NO: 31371 - DNA, 33 bp, Homo sapiens
aaaaggcaacagcatagacagaatcaaaatatc

SEQ ID NO: 31372 - DNA, 33 bp, Homo sapiens
tcagccttatgagttacaaagccattggataat

SEQ ID NO: 31373 - DNA, 33 bp, Homo sapiens
ttttaaaaactacagacgtcagcatgtttaaac

SEQ ID NO: 31374 - DNA, 33 bp, Homo sapiens
agactcaaactattgaggcatacttggatggat

SEQ ID NO: 31375 - DNA, 33 bp, Homo sapiens
atcatgttttctgatacctatgtattgaattaa

SEQ ID NO: 31376 - DNA, 33 bp, Homo sapiens
agcagtgaaggatgcaaaggattaaaataggta

SEQ ID NO: 31377 - DNA, 33 bp, Homo sapiens
tgcacacagagaaagacaggctgttttcctctt

SEQ ID NO: 31378 - DNA, 33 bp, Homo sapiens
gtcaaagttttacttacgttcatcacttcttca

SEQ ID NO: 31379 - DNA, 33 bp, Homo sapiens
ttggggatataaagagaacgctcatggttttgt

SEQ ID NO: 31380 - DNA, 33 bp, Homo sapiens
atgtcagctagtcaccgcctatgggaccttgtg

SEQ ID NO: 31381 - DNA, 33 bp, Homo sapiens
cataattctttctccaaatctgagggtaaacaa

SEQ ID NO: 31382 - DNA, 33 bp, Homo sapiens
agtcagaaagccaaagaacactatggagaaata

SEQ ID NO: 31383 - DNA, 33 bp, Homo sapiens
catgaaccccatatgtaaatgcggcagcaagca

SEQ ID NO: 31384 - DNA, 33 bp, Homo sapiens
gtttaatctttatgtgcaaggatagggactgtc

SEQ ID NO: 31385 - DNA, 33 bp, Homo sapiens
attgatccatctggaaactttaaacaatgcatc

SEQ ID NO: 31386 - DNA, 33 bp, Homo sapiens
acatgcatgattctagcaactggtgacagaatg

SEQ ID NO: 31387 - DNA, 33 bp, Homo sapiens
tggttaaaatagataccaacagattgatagaaa

SEQ ID NO: 31388 - DNA, 33 bp, Homo sapiens
tcacacaaatccaatgacacacaaaagtagttt

SEQ ID NO: 31389 - DNA, 33 bp, Homo sapiens
aaatcacgcttcaccaaaggtattttttgtttg

SEQ ID NO: 31390 - DNA, 33 bp, Homo sapiens
gtatgccaccgaattacattcagtaacaaagcc

SEQ ID NO: 31391 - DNA, 33 bp, Homo sapiens
agctttaccctcaaggacataaattgctatcac

SEQ ID NO: 31392 - DNA, 33 bp, Homo sapiens
tgggagggttaactaccacctgaaatgctaaga

SEQ ID NO: 31393 - DNA, 33 bp, Homo sapiens
gtatcaaggtttataccatcacaactaacttag

SEQ ID NO: 31394 - DNA, 33 bp, Homo sapiens
acatacgctagtttgccattcaaatgcttttca

SEQ ID NO: 31395 - DNA, 33 bp, Homo sapiens
caattctaacgcctaccgaagctgtgacttgca

SEQ ID NO: 31396 - DNA, 33 bp, Homo sapiens
tctcatttctggctaccggttgagagagaaatg

SEQ ID NO: 31397 - DNA, 33 bp, Homo sapiens
atctgattacagctccactcattgtgattatta

SEQ ID NO: 31398 - DNA, 51 bp, Homo sapiens
ggcaatatcatcatgcttaaccgaccagatgaaagtgttctcgatccccat

SEQ ID NO: 31399 - DNA, 51 bp, Homo sapiens
agaagcttctgtttctgctatggccactgcaagtagggaaaatcactgaca

SEQ ID NO: 31400 - DNA, 33 bp, Homo sapiens
gaagcttaggggcaccaataaaaactatagctg

SEQ ID NO: 31401 - DNA, 33 bp, Homo sapiens
catttcttgcccatcacaaccttttgcagggca

SEQ ID NO: 31402 - DNA, 33 bp, Homo sapiens
tttcctcatccggaataaatagtgacaatatag

SEQ ID NO: 31403 - DNA, 33 bp, Homo sapiens
tcttgtggagggagtccagggagcgaaagagtg

SEQ ID NO: 31404 - DNA, 33 bp, Homo sapiens
tcctccctggaataaaatgaacacttggttatt

SEQ ID NO: 31405 - DNA, 51 bp, Homo sapiens
aacttccagtaagtagagcctagcacagaagttacagattagagctgcatt

SEQ ID NO: 31406 - DNA, 51 bp, Homo sapiens
gatgcactgtgtccaaagacatgccaagcttcagaggcaaacacctgtcca

SEQ ID NO: 31407 - DNA, 33 bp, Homo sapiens
ccttccctcctttttcgctgagcatttaattca

SEQ ID NO: 31408 - DNA, 33 bp, Homo sapiens
ctctgtcctggaataaccctgcaattaggaagt

SEQ ID NO: 31409 - DNA, 33 bp, Homo sapiens
acaccacataactaaacgaattgttgtctacct

SEQ ID NO: 31410 - DNA, 33 bp, Homo sapiens
agtagaccgtttaatacctcaggtggactatta

SEQ ID NO: 31411 - DNA, 33 bp, Homo sapiens
agtttattctgccttaaatacttgtcctcaaga

SEQ ID NO: 31412 - DNA, 51 bp, Homo sapiens
ttctagatgcagtgaataatcagaaaaatcccctttctcacatagctcaca

SEQ ID NO: 31413 - DNA, 33 bp, Homo sapiens
atagaatgaagcaaaagtggtggggtgcagatt

SEQ ID NO: 31414 - DNA, 33 bp, Homo sapiens
aacgggatcacatcaacttaaaaagaaacaatc

SEQ ID NO: 31415 - DNA, 33 bp, Homo sapiens
attcccaaatgaagtacgaatgttggcagggga

SEQ ID NO: 31416 - DNA, 33 bp, Homo sapiens
tgttttatagatgccaaaaatcagggaaccata

SEQ ID NO: 31417 - DNA, 33 bp, Homo sapiens
aatccagagaatagaaagaaatatcaggtgtca

SEQ ID NO: 31418 - DNA, 33 bp, Homo sapiens
gaaaactaacacagagacctttccaaatcgcac

SEQ ID NO: 31419 - DNA, 33 bp, Homo sapiens
cttccactgttcataacaatcacccagggacct

SEQ ID NO: 31420 - DNA, 33 bp, Homo sapiens
tacagataatttcttacaacaacgtatggcatt

SEQ ID NO: 31421 - DNA, 33 bp, Homo sapiens
gcctgcatagtataagaaggaaaattgaaatga

SEQ ID NO: 31422 - DNA, 33 bp, Homo sapiens
cttgactaatagccaaagattggtcaataactc

SEQ ID NO: 31423 - DNA, 33 bp, Homo sapiens
accttagaatgcctcacacaagaacaacagcca

SEQ ID NO: 31424 - DNA, 33 bp, Homo sapiens
tctgctctcttgaacaactgcttatctgtcttg

SEQ ID NO: 31425 - DNA, 33 bp, Homo sapiens
cacagaggatttctcaataggttcttacagtat

SEQ ID NO: 31426 - DNA, 33 bp, Homo sapiens
aggtgaaatcgtgagacggttgagatagcccag

SEQ ID NO: 31427 - DNA, 33 bp, Homo sapiens
gtgaatgaggccattcagaaaagaccacaaagt

SEQ ID NO: 31428 - DNA, 33 bp, Homo sapiens
ctaggcacaaaaaaaaatttcagatgtgaaggt

SEQ ID NO: 31429 - DNA, 33 bp, Homo sapiens
aagtactcatttagaacgctatccatctgcctt

SEQ ID NO: 31430 - DNA, 33 bp, Homo sapiens
caaaatgctaagacgaatccctggtatattaac

SEQ ID NO: 31431 - DNA, 33 bp, Homo sapiens
ttataaagagacctgaaaaattcagagccacag

SEQ ID NO: 31432 - DNA, 33 bp, Homo sapiens
acatgaagaaaaactccacgtgttgtaaatcta

SEQ ID NO: 31433 - DNA, 33 bp, Homo sapiens
ccgcactgcatttccccaaaacacccctcaaca

SEQ ID NO: 31434 - DNA, 33 bp, Homo sapiens
tacatatacaccatggaagactatacagccata

SEQ ID NO: 31435 - DNA, 51 bp, Homo sapiens
tcacttacctactatcaagatttaacaaatgtcaaaatgttgccatatttg

SEQ ID NO: 31436 - DNA, 51 bp, Homo sapiens
tccgttataatataatgatcagataactaagtataatattatatggctaag

SEQ ID NO: 31437 - DNA, 33 bp, Homo sapiens
cctttacaacattgaactagaagtgagtccctg

SEQ ID NO: 31438 - DNA, 33 bp, Homo sapiens
tgctaagctagttacccctccactatttgcttc

SEQ ID NO: 31439 - DNA, 33 bp, Homo sapiens
aacaattggcattgtcgcatcttttccatttct

SEQ ID NO: 31440 - DNA, 51 bp, Homo sapiens
taaagatgagaactctttactggaacaaattagcacataaactagaagatg

SEQ ID NO: 31441 - DNA, 51 bp, Homo sapiens
ttatgtcacaattcagtttgcaaaaccttcaatcatctaactgtctcatgg

SEQ ID NO: 31442 - DNA, 33 bp, Homo sapiens
ttagaaatgacctaaacgtcgaatcataagggg

SEQ ID NO: 31443 - DNA, 33 bp, Homo sapiens
caactgaactctttgaactctcagtggtaaaat

SEQ ID NO: 31444 - DNA, 33 bp, Homo sapiens
ttcttcatcagtaaaacagaagtgttgatacca

SEQ ID NO: 31445 - DNA, 33 bp, Homo sapiens
ctaggagactatttgggatcagactttacctgg

SEQ ID NO: 31446 - DNA, 33 bp, Homo sapiens
gtggtggggtagtgaaactctggagtcaatatc

SEQ ID NO: 31447 - DNA, 33 bp, Homo sapiens
gtcttctgtcattgcacacccgagtggcttcat

SEQ ID NO: 31448 - DNA, 33 bp, Homo sapiens
tgcaatttgaaagctacgtgtatcaattgactt

SEQ ID NO: 31449 - DNA, 51 bp, Homo sapiens
gaaagttactgaatacttattctgagcttgtacatatcatatgctctagca

SEQ ID NO: 31450 - DNA, 51 bp, Homo sapiens
taaacccgaggactactttgcacaccgaaatttgcaggaaaatgagaccct

SEQ ID NO: 31451 - DNA, 33 bp, Homo sapiens
tgtagagtcctcttaccgagtgaacactgagtg

SEQ ID NO: 31452 - DNA, 33 bp, Homo sapiens
acaaatgtactgaacacgctaaggtgaaatgat

SEQ ID NO: 31453 - DNA, 33 bp, Homo sapiens
cagaactagattttccactgtcattcattatgg

SEQ ID NO: 31454 - DNA, 33 bp, Homo sapiens
gatatttcaaactcccaaagtccaaagcaggct

SEQ ID NO: 31455 - DNA, 33 bp, Homo sapiens
ttgacctcttacccaactcctagaacaaagtca

SEQ ID NO: 31456 - DNA, 33 bp, Homo sapiens
gttgctctttttgtgaacttctacacaacacag

SEQ ID NO: 31457 - DNA, 33 bp, Homo sapiens
ctcataattgtagccacgttaaaaactaaaata

SEQ ID NO: 31458 - DNA, 33 bp, Homo sapiens
gaagaaagaagtcaagaagtctgtgagttaaac

SEQ ID NO: 31459 - DNA, 51 bp, Homo sapiens
cacatttctgcttaactttctgcagcagagacaagagatttgatgtctgga

SEQ ID NO: 31460 - DNA, 33 bp, Homo sapiens
atactagaggtacaaacggtgttatgatgtctt

SEQ ID NO: 31461 - DNA, 33 bp, Homo sapiens
aatggaatatgacttagcaatgtaaagaaataa

SEQ ID NO: 31462 - DNA, 51 bp, Homo sapiens
caatattgaacagtcagagaaaagaagagtaaccagcaaaggaggtctatc

SEQ ID NO: 31463 - DNA, 51 bp, Homo sapiens
gaaagaaagaaaagaagacagagaacttaagatgttagagaaagaagcagc

SEQ ID NO: 31464 - DNA, 33 bp, Homo sapiens
ccaacttcatctagccacatgaacactgcatca

SEQ ID NO: 31465 - DNA, 33 bp, Homo sapiens
tgtttttattgctgaaggaagctagaaaagaga

SEQ ID NO: 31466 - DNA, 33 bp, Homo sapiens
atcactcattaacctcactagagcaacacaacc

SEQ ID NO: 31467 - DNA, 33 bp, Homo sapiens
ctgatatattgctttaagggagttgcttaaaat

SEQ ID NO: 31468 - DNA, 33 bp, Homo sapiens
atagaggcatagataacctgagtcaggaataaa

SEQ ID NO: 31469 - DNA, 33 bp, Homo sapiens
gcaagtaaataaaaccagagatgatggtgcaat

SEQ ID NO: 31470 - DNA, 33 bp, Homo sapiens
ttgtacttctcttcaacaggcctggatttcctg

SEQ ID NO: 31471 - DNA, 33 bp, Homo sapiens
ttgatgaagaaggacaatgaggtgagaagtgac

SEQ ID NO: 31472 - DNA, 33 bp, Homo sapiens
caggcactgcaggaaccaggcaaacttgtgcaa

SEQ ID NO: 31473 - DNA, 51 bp, Homo sapiens
tgttcctctagctggaattctctaactataccacttgaagcatggttggtt

SEQ ID NO: 31474 - DNA, 33 bp, Homo sapiens
aacttctaaatttcaaacaacttcattttagtg

SEQ ID NO: 31475 - DNA, 33 bp, Homo sapiens
ttaggggaaagccagagaaggggcattcctgat

SEQ ID NO: 31476 - DNA, 33 bp, Homo sapiens
ccaaactctaaatcaacgaagtggcagtctttg

SEQ ID NO: 31477 - DNA, 33 bp, Homo sapiens
gctcatgtaccataacaatttctccctcttcct

SEQ ID NO: 31478 - DNA, 33 bp, Homo sapiens
gtaagcactattgttgcatcaatcattaggaga

SEQ ID NO: 31479 - DNA, 33 bp, Homo sapiens
acttcttacaagaaacggcctcaagaaaacagt

SEQ ID NO: 31480 - DNA, 33 bp, Homo sapiens
gatcttacatcttgcaaccttattaaatcactt

SEQ ID NO: 31481 - DNA, 33 bp, Homo sapiens
gagaagagagaaaagactaaagaggacattgtc

SEQ ID NO: 31482 - DNA, 33 bp, Homo sapiens
ccaaatagcacaaaacaaataggtcatggtgaa

SEQ ID NO: 31483 - DNA, 33 bp, Homo sapiens
tcacagcctatgtttcaagccctatacattctg

SEQ ID NO: 31484 - DNA, 33 bp, Homo sapiens
tattcatagtgagaaaataagacttcccaaaga

SEQ ID NO: 31485 - DNA, 33 bp, Homo sapiens
gccaagagcactttaaacccaacatgctcacac

SEQ ID NO: 31486 - DNA, 33 bp, Homo sapiens
tccaacttggcactaccgtaaataatattgcaa

SEQ ID NO: 31487 - DNA, 33 bp, Homo sapiens
gcttggttgtagatgacaggagccttgaatggc

SEQ ID NO: 31488 - DNA, 33 bp, Homo sapiens
ctcccacccggggccaatcatcttgaagaagtc

SEQ ID NO: 31489 - DNA, 33 bp, Homo sapiens
agacggtaagactggacgactgtggcctgagga

SEQ ID NO: 31490 - DNA, 33 bp, Homo sapiens
cctgagatgacggttacaccctgagaagacggt

SEQ ID NO: 31491 - DNA, 33 bp, Homo sapiens
agaggccttatccttcaccacataacctggctc

SEQ ID NO: 31492 - DNA, 33 bp, Homo sapiens
gggagttatggtgccgaaagtgtctttttggaa

SEQ ID NO: 31493 - DNA, 33 bp, Homo sapiens
gctatgtaatgcgagcagagtaggagcatcacc

SEQ ID NO: 31494 - DNA, 33 bp, Homo sapiens
ctttcagacctgagaacccaacacaacgagtct

SEQ ID NO: 31495 - DNA, 33 bp, Homo sapiens
tttgctgctatggtaaataataagtgacctgga

SEQ ID NO: 31496 - DNA, 33 bp, Homo sapiens
atctaccagttctgacgatcattgtgtgtgtgt

SEQ ID NO: 31497 - DNA, 33 bp, Homo sapiens
taggcaaagaactctaccaaaggaacatctgtc

SEQ ID NO: 31498 - DNA, 33 bp, Homo sapiens
tcccaggtcctagaacagtgtctcgtccataac

SEQ ID NO: 31499 - DNA, 51 bp, Homo sapiens
ccattatgctgtagctccatttgagcagggaccttgtctgttcactactgt

SEQ ID NO: 31500 - DNA, 33 bp, Homo sapiens
tttatcttcagagaaacagtgatctggagaaaa

SEQ ID NO: 31501 - DNA, 33 bp, Homo sapiens
ttgcaaatacaaacaacgcagtaacaaacattg

SEQ ID NO: 31502 - DNA, 33 bp, Homo sapiens
gactgggacaagcgaacgctcgtaactagtttg

SEQ ID NO: 31503 - DNA, 33 bp, Homo sapiens
tattatgacacaaaacaacgacactcattagta

SEQ ID NO: 31504 - DNA, 33 bp, Homo sapiens
tgacaaaaattgaatacggactgtggattaggt

SEQ ID NO: 31505 - DNA, 33 bp, Homo sapiens
atgcaggtgaccttgaactctgattgttacgac

SEQ ID NO: 31506 - DNA, 33 bp, Homo sapiens
aattgtttcttgcccacgagaattctggaagtg

SEQ ID NO: 31507 - DNA, 33 bp, Homo sapiens
cctctcagttgggtccacaacatagagagagca

SEQ ID NO: 31508 - DNA, 33 bp, Homo sapiens
ctcattcctttctcacaacaatcttataggtag

SEQ ID NO: 31509 - DNA, 33 bp, Homo sapiens
agcaggcgacaccgagaacactgtggtgggtgc

SEQ ID NO: 31510 - DNA, 51 bp, Homo sapiens
gaaagtaattactctgcaatatacgcggaatgtcttaaatgcttaaagcaa

SEQ ID NO: 31511 - DNA, 33 bp, Homo sapiens
gaggttgataacacgacgtgagtaatggctcta

SEQ ID NO: 31512 - DNA, 51 bp, Homo sapiens
aaaagtaagatattgtctagcaatgaacacctgggttggttcccagctctg

SEQ ID NO: 31513 - DNA, 33 bp, Homo sapiens
tgcttaggcagagatacgattagatgagggcgt

SEQ ID NO: 31514 - DNA, 33 bp, Homo sapiens
tatgtatacgaaaaaaagtccagccctcgtgga

SEQ ID NO: 31515 - DNA, 33 bp, Homo sapiens
cacaaaaacaacataacaaggagcagagaaaaa

SEQ ID NO: 31516 - DNA, 33 bp, Homo sapiens
tgcgtattcttcagcactgactttttaaaatca

SEQ ID NO: 31517 - DNA, 33 bp, Homo sapiens
aattaagagaagtaaccgtacccatcgtggtaa

SEQ ID NO: 31518 - DNA, 33 bp, Homo sapiens
atgaacagacagacacaaaccagtatggaaaca

SEQ ID NO: 31519 - DNA, 33 bp, Homo sapiens
acatcattcaactctaccagaaaggcatgtcat

SEQ ID NO: 31520 - DNA, 33 bp, Homo sapiens
aatcatttcagtgagcaaagcactttttttctt

SEQ ID NO: 31521 - DNA, 33 bp, Homo sapiens
taaatcccatcattgaagcatccaattatgcta

SEQ ID NO: 31522 - DNA, 33 bp, Homo sapiens
tctaaatcattgaaaacagaagaagttcacagg

SEQ ID NO: 31523 - DNA, 33 bp, Homo sapiens
cttagtatttctatcacgcagatcctaccatac

SEQ ID NO: 31524 - DNA, 51 bp, Homo sapiens
atcaagtccagcaaagctgctagacactttctggaaggaaatatggccagg

SEQ ID NO: 31525 - DNA, 51 bp, Homo sapiens
agcagagaaaaggggtaaagaaacactgggcacgatttagggtgggcactt

SEQ ID NO: 31526 - DNA, 33 bp, Homo sapiens
gtcagtaaagatgttacgattttgtgaaagata

SEQ ID NO: 31527 - DNA, 33 bp, Homo sapiens
aagcaggatggggaacagcttgaccttcatcca

SEQ ID NO: 31528 - DNA, 33 bp, Homo sapiens
tgcgacatatagttgaaaagattgtaaatggtt

SEQ ID NO: 31529 - DNA, 33 bp, Homo sapiens
gtaggtctgctgtaaccatccccctgtgtctga

SEQ ID NO: 31530 - DNA, 33 bp, Homo sapiens
agacagcagcgctccccacactctgttctctgc

SEQ ID NO: 31531 - DNA, 33 bp, Homo sapiens
acactcgtcaatagccactaagaagcagccaga

SEQ ID NO: 31532 - DNA, 33 bp, Homo sapiens
tggctttaaggaaggaagggtggaagcgagtct

SEQ ID NO: 31533 - DNA, 33 bp, Homo sapiens
aggcagacagctaaagcccaaacaccaatgaca

SEQ ID NO: 31534 - DNA, 33 bp, Homo sapiens
ctagtttcttctttgcagacagggacccactga

SEQ ID NO: 31535 - DNA, 33 bp, Homo sapiens
ccatatggtaaatgtacgtttaatgtcaaaaga

SEQ ID NO: 31536 - DNA, 33 bp, Homo sapiens
tttgatatgaggataacgctgggctcataaaat

SEQ ID NO: 31537 - DNA, 33 bp, Homo sapiens
tcgcctagtggttatgaacttggcctcttgaat

SEQ ID NO: 31538 - DNA, 51 bp, Homo sapiens
ccgagctcacttctgtcagaggaatcaggtttcacaagcccttttttatgt

SEQ ID NO: 31539 - DNA, 33 bp, Homo sapiens
aggagaaggttaagtacgttgcccaaaataact

SEQ ID NO: 31540 - DNA, 33 bp, Homo sapiens
gcttaaaatctgggccacactcttggctctggg

SEQ ID NO: 31541 - DNA, 33 bp, Homo sapiens
agccacagcatataaaccgttcatgttgcctgg

SEQ ID NO: 31542 - DNA, 51 bp, Homo sapiens
ggggtaagggttttggtgagagctccatggacctatgacacaaattgctct

SEQ ID NO: 31543 - DNA, 33 bp, Homo sapiens
gatatatctgctcaaaaactttcttatttttta

SEQ ID NO: 31544 - DNA, 33 bp, Homo sapiens
aagtccgggaacctcaagtgctcagtgttaacc

SEQ ID NO: 31545 - DNA, 33 bp, Homo sapiens
agatgcaatccacagggatgctgatccgagccc

SEQ ID NO: 31546 - DNA, 33 bp, Homo sapiens
attcacacgaaagcacaaagatggtagatggca

SEQ ID NO: 31547 - DNA, 33 bp, Homo sapiens
aagatggaaatgacaacagtccctacctgatag

SEQ ID NO: 31548 - DNA, 33 bp, Homo sapiens
cttacaggtgataagacggctgccaagatttac

SEQ ID NO: 31549 - DNA, 33 bp, Homo sapiens
tctgagaaaagaaggacgttccatctgttactg

SEQ ID NO: 31550 - DNA, 33 bp, Homo sapiens
gttcttcccttactaccgctctgaggaggagag

SEQ ID NO: 31551 - DNA, 51 bp, Homo sapiens
agaacagagaggatggcaaaaaggacccatgtattcaggcggaaaggccta

SEQ ID NO: 31552 - DNA, 33 bp, Homo sapiens
ctttggttgattaaaaatttgatgcatgatata

SEQ ID NO: 31553 - DNA, 33 bp, Homo sapiens
attaacttcttcctcacctatgaccaccagaac

SEQ ID NO: 31554 - DNA, 33 bp, Homo sapiens
tgagagcaataggagccgcctgttccattagag

SEQ ID NO: 31555 - DNA, 33 bp, Homo sapiens
ctcaggagcacagtgaagattaaataatgtcta

SEQ ID NO: 31556 - DNA, 33 bp, Homo sapiens
tgcccagagtctataccacattccttcctgccc

SEQ ID NO: 31557 - DNA, 33 bp, Homo sapiens
ccacattcattcaacaagaaagtcgaatgttga

SEQ ID NO: 31558 - DNA, 33 bp, Homo sapiens
cagcagtcagtgtagaaaccaggaataaaaatc

SEQ ID NO: 31559 - DNA, 33 bp, Homo sapiens
tcctcctcctatcttgaagaaacctggtgttag

SEQ ID NO: 31560 - DNA, 33 bp, Homo sapiens
aaaatactacactcacacattttaagttggata

SEQ ID NO: 31561 - DNA, 33 bp, Homo sapiens
gccctctgtaccacaacggttgaaagtgtataa

SEQ ID NO: 31562 - DNA, 33 bp, Homo sapiens
tgtggataccatcgtccctcattcttgcttgat

SEQ ID NO: 31563 - DNA, 33 bp, Homo sapiens
gttgaatgttattcagccaccatttttttcctt

SEQ ID NO: 31564 - DNA, 33 bp, Homo sapiens
tgcaattctctagagacgtacgatgttgagcat

SEQ ID NO: 31565 - DNA, 33 bp, Homo sapiens
ggcccctgagcaaatgcagaaggttcagaagtt

SEQ ID NO: 31566 - DNA, 33 bp, Homo sapiens
gtctatcacagatacaatcgggcagtaacagca

SEQ ID NO: 31567 - DNA, 33 bp, Homo sapiens
tgcatttggttaaaagactgctttggcattttt

SEQ ID NO: 31568 - DNA, 33 bp, Homo sapiens
aaggacataaggatagctgtcagtggtcctgaa

SEQ ID NO: 31569 - DNA, 33 bp, Homo sapiens
gaattggaagaatcacaggactctgattttaaa

SEQ ID NO: 31570 - DNA, 33 bp, Homo sapiens
ggtgctatgtatgcaaagtctgaagtgtgttta

SEQ ID NO: 31571 - DNA, 51 bp, Homo sapiens
cttttaggtaactctcccaactcaaaatcgatagttctctgaagaattgaa

SEQ ID NO: 31572 - DNA, 33 bp, Homo sapiens
agtgaagaggtaagaaagtaacttaaatcagct

SEQ ID NO: 31573 - DNA, 33 bp, Homo sapiens
gcaccagagtggcaagactaggccctcatgaga

SEQ ID NO: 31574 - DNA, 33 bp, Homo sapiens
tctctacaaacaaaagactgctcttcaattccc

SEQ ID NO: 31575 - DNA, 33 bp, Homo sapiens
gggaccacaggaggaactccatatctaacctga

SEQ ID NO: 31576 - DNA, 33 bp, Homo sapiens
aggggacgatgttgaactgacaggcagcggagg

SEQ ID NO: 31577 - DNA, 33 bp, Homo sapiens
tctttttttcccacaccgagagtcctgattctg

SEQ ID NO: 31578 - DNA, 33 bp, Homo sapiens
gcaaaggagatgctcaaagtcgagaatgcttag

SEQ ID NO: 31579 - DNA, 33 bp, Homo sapiens
ccagcttaattgtgaacagcctcacgtgccata

SEQ ID NO: 31580 - DNA, 33 bp, Homo sapiens
gggcttgttgacaagcagccatttgcgagacag

SEQ ID NO: 31581 - DNA, 33 bp, Homo sapiens
tggggggactgcacccagaagctttctaaggag

SEQ ID NO: 31582 - DNA, 33 bp, Homo sapiens
aatcctttctccaaaaaggctagtaacattcac

SEQ ID NO: 31583 - DNA, 33 bp, Homo sapiens
atctcagcttactacaaaaaaggaacctggtca

SEQ ID NO: 31584 - DNA, 33 bp, Homo sapiens
agcagcacctttctacacttatgccaacaggaa

SEQ ID NO: 31585 - DNA, 33 bp, Homo sapiens
gaccatgtagggctaaatcggccacaattccaa

SEQ ID NO: 31586 - DNA, 51 bp, Homo sapiens
atatggcattttgttataatatcctgaacagactaagacagatatcgttta

SEQ ID NO: 31587 - DNA, 33 bp, Homo sapiens
ccccagattgttttcacagggcccaaacactct

SEQ ID NO: 31588 - DNA, 33 bp, Homo sapiens
acctttactctaaatcagaatcataactcaatg

SEQ ID NO: 31589 - DNA, 33 bp, Homo sapiens
catcactgtatttccaatgaaattaggttccag

SEQ ID NO: 31590 - DNA, 33 bp, Homo sapiens
ttttatctttcttcaacgataaggttcttgcct

SEQ ID NO: 31591 - DNA, 33 bp, Homo sapiens
gtttgggataaatggcagaaaacaacgcgtcat

SEQ ID NO: 31592 - DNA, 33 bp, Homo sapiens
cctgttgctgtcccagacaaactgcctcattta

SEQ ID NO: 31593 - DNA, 33 bp, Homo sapiens
tcaagcatgcaaatccgaccatcacacatggcc

SEQ ID NO: 31594 - DNA, 33 bp, Homo sapiens
aacccttttctcaaacacttccgtagtctcctg

SEQ ID NO: 31595 - DNA, 33 bp, Homo sapiens
caggtcctgttgggtaaaacatttggctttcag

SEQ ID NO: 31596 - DNA, 33 bp, Homo sapiens
agaagtcaatgagcaaacaatgcaacatcctta

SEQ ID NO: 31597 - DNA, 33 bp, Homo sapiens
tgttacttatcgaacaaatttcaagtgtcatgt

SEQ ID NO: 31598 - DNA, 33 bp, Homo sapiens
aggctgtagtaaagtacgattgtatcactgtac

SEQ ID NO: 31599 - DNA, 33 bp, Homo sapiens
cagtgattaaagagtacgtttgtattagagata

SEQ ID NO: 31600 - DNA, 33 bp, Homo sapiens
tgctgtgcaaagtcacaatctaatcttccaact

SEQ ID NO: 31601 - DNA, 33 bp, Homo sapiens
atggatgttcagtacccggagaaaagaagccat

SEQ ID NO: 31602 - DNA, 33 bp, Homo sapiens
agcaccccattagttgaaaaactgtactctcca

SEQ ID NO: 31603 - DNA, 33 bp, Homo sapiens
ctagttatcccaggaaggcctaatgtcaaatag

SEQ ID NO: 31604 - DNA, 33 bp, Homo sapiens
caggatgttcacaacaacattacttgcaatggt

SEQ ID NO: 31605 - DNA, 33 bp, Homo sapiens
gaggaccgaagtggaacgcttgtagaggactag

SEQ ID NO: 31606 - DNA, 33 bp, Homo sapiens
tcacaaatggtactccacaagaaaaagagactg

SEQ ID NO: 31607 - DNA, 33 bp, Homo sapiens
ctactctcagaaaggacggcccaaattcctctc

SEQ ID NO: 31608 - DNA, 33 bp, Homo sapiens
gtttagaacattgtaccgaaaagtcttgagcca

SEQ ID NO: 31609 - DNA, 33 bp, Homo sapiens
tgaccacttctctttcactgctcttctgtctct

SEQ ID NO: 31610 - DNA, 33 bp, Homo sapiens
gcatttctggatcacccgaaattatctcttgca

SEQ ID NO: 31611 - DNA, 33 bp, Homo sapiens
tcctctgcatgacaaaatgggtccaccatcact

SEQ ID NO: 31612 - DNA, 33 bp, Homo sapiens
ctcatgtggctattgaagaagggcatagcggct

SEQ ID NO: 31613 - DNA, 33 bp, Homo sapiens
gaacaactctaaggtacaatcaaatgattttct

SEQ ID NO: 31614 - DNA, 51 bp, Homo sapiens
aaaacacaacttgaaaatcataaacaagaaagcaaaaaagagatgatttga

SEQ ID NO: 31615 - DNA, 51 bp, Homo sapiens
atgtggccagtttatgtgcagaatacgaagggttaggtaatatttattttg

SEQ ID NO: 31616 - DNA, 51 bp, Homo sapiens
acagcttctgatcattcttcaactacatcatccaggtcctggtgtcatatt

SEQ ID NO: 31617 - DNA, 33 bp, Homo sapiens
ttctagttgagtggagaaaaggaacttgagttt

SEQ ID NO: 31618 - DNA, 33 bp, Homo sapiens
agttgagtgtttcagaagcataggtacttgatg

SEQ ID NO: 31619 - DNA, 33 bp, Homo sapiens
aaaggaagaactgtctcacaggtattgttaaca

SEQ ID NO: 31620 - DNA, 33 bp, Homo sapiens
attccagaatcaaagggcctgtggatatggtaa

SEQ ID NO: 31621 - DNA, 33 bp, Homo sapiens
tctcctgcatcatggacagaaccagtaaataga

SEQ ID NO: 31622 - DNA, 33 bp, Homo sapiens
gtatgtgtaccagagacatttgctattcactaa

SEQ ID NO: 31623 - DNA, 33 bp, Homo sapiens
ttgctggatgaattaaacctctgtcaataatct

SEQ ID NO: 31624 - DNA, 33 bp, Homo sapiens
atatatcgtcaacataaaagttcccaatattga

SEQ ID NO: 31625 - DNA, 33 bp, Homo sapiens
tttcaatagttgacaaacacagcagaaccacca

SEQ ID NO: 31626 - DNA, 33 bp, Homo sapiens
ctcttttagttgcatacaagtgaatcataatcc

SEQ ID NO: 31627 - DNA, 33 bp, Homo sapiens
gtcttctaatttggaagatgcattctatggtta

SEQ ID NO: 31628 - DNA, 33 bp, Homo sapiens
tccacagtactacccacagagtggtcaataact

SEQ ID NO: 31629 - DNA, 33 bp, Homo sapiens
ttcaaaacggactgtaagcattactaacattta

SEQ ID NO: 31630 - DNA, 51 bp, Homo sapiens
gttcaggattgagagacaatatatcagagatttgatttactcataaaaggg

SEQ ID NO: 31631 - DNA, 33 bp, Homo sapiens
aagttacaaattaaaaagagacattgcaagtga

SEQ ID NO: 31632 - DNA, 33 bp, Homo sapiens
ccgtcaatatcagcaccatacgaaggccccaag

SEQ ID NO: 31633 - DNA, 33 bp, Homo sapiens
ctaacaatacccagaactcacaattcttcccct

SEQ ID NO: 31634 - DNA, 33 bp, Homo sapiens
aagacaatataattacacaagttagaaataggt

SEQ ID NO: 31635 - DNA, 33 bp, Homo sapiens
actatgccatcaacaaatcacagcaacaatttc

SEQ ID NO: 31636 - DNA, 33 bp, Homo sapiens
aattggcttaggtccactacagtctaatccttg

SEQ ID NO: 31637 - DNA, 33 bp, Homo sapiens
agctggattctctcagaaggacaaaatcaactg

SEQ ID NO: 31638 - DNA, 33 bp, Homo sapiens
tcttgcatggaatgaaataggttgggtcaattt

SEQ ID NO: 31639 - DNA, 33 bp, Homo sapiens
gtaatgaacagaaactaacgctcaaagaggttg

SEQ ID NO: 31640 - DNA, 51 bp, Homo sapiens
ctacaaagactgtgctgacaactaaatggtgtgacctaaaagcaaaacatg

SEQ ID NO: 31641 - DNA, 51 bp, Homo sapiens
tgacaaagccaggcagttttagttaaagttcttatccactatccccatcat

SEQ ID NO: 31642 - DNA, 33 bp, Homo sapiens
cttactgccaggagaaatgttgggcagacttat

SEQ ID NO: 31643 - DNA, 33 bp, Homo sapiens
taggcactcaattctaaatggtgcagttctgta

SEQ ID NO: 31644 - DNA, 33 bp, Homo sapiens
gacagggtagagaaagcacagagatccctgaag

SEQ ID NO: 31645 - DNA, 33 bp, Homo sapiens
ttctttcatttggaagcatacgctgtcaaggtt

SEQ ID NO: 31646 - DNA, 33 bp, Homo sapiens
gagttctgtaatctgaaactggttcatcctttt

SEQ ID NO: 31647 - DNA, 51 bp, Homo sapiens
acctcaaatctaatatgttccatacaactattttgatctttcaccacaata

SEQ ID NO: 31648 - DNA, 33 bp, Homo sapiens
tgtgtgagaacatggcacactttgatgctaaaa

SEQ ID NO: 31649 - DNA, 33 bp, Homo sapiens
aagagcaataactaagaccaatgcttgggaatt

SEQ ID NO: 31650 - DNA, 33 bp, Homo sapiens
aaggcaatgttgagggaagaggttggtggggtc

SEQ ID NO: 31651 - DNA, 51 bp, Homo sapiens
gcctatacacattctgcatggtacactcatatttcaatttggaagtgtggt

SEQ ID NO: 31652 - DNA, 51 bp, Homo sapiens
ttgtgacactggcccaaatgtctaacgtgatcccatgatctgcattcaata

SEQ ID NO: 31653 - DNA, 33 bp, Homo sapiens
agataatctgtactcaaagatcagtaataccat

SEQ ID NO: 31654 - DNA, 33 bp, Homo sapiens
ttaattagactgtaacaaaggtgaataaaaata

SEQ ID NO: 31655 - DNA, 33 bp, Homo sapiens
attcattgccagtaacacccacagaactttgaa

SEQ ID NO: 31656 - DNA, 33 bp, Homo sapiens
ataacatgttcagtgcagaaacatacaattctt

SEQ ID NO: 31657 - DNA, 33 bp, Homo sapiens
gcaattgtttttgacactggacatgatataata

SEQ ID NO: 31658 - DNA, 33 bp, Homo sapiens
tatgtgaatgctttagaaatgggaaacgttatc

SEQ ID NO: 31659 - DNA, 33 bp, Homo sapiens
aaaatgtgtgcattaaagcccttgagagtacaa

SEQ ID NO: 31660 - DNA, 51 bp, Homo sapiens
catagatagaatacactctgaaactgaatacaaacctgttatatttatttt

SEQ ID NO: 31661 - DNA, 33 bp, Homo sapiens
atgttctttcatggtacctcccccagaacgcaa

SEQ ID NO: 31662 - DNA, 51 bp, Homo sapiens
tgaagaattggtaaactggaagatgacactatagggaatttcctaattctg

SEQ ID NO: 31663 - DNA, 33 bp, Homo sapiens
ccatagcaatgtcagacggactgagttcaataa

SEQ ID NO: 31664 - DNA, 33 bp, Homo sapiens
tctttcctagcttttacagaccatgctatgcaa

SEQ ID NO: 31665 - DNA, 33 bp, Homo sapiens
agcttgcatagctgtcaccacatgacattgact

SEQ ID NO: 31666 - DNA, 33 bp, Homo sapiens
ctgtctgtttaaaaaacgcctgaagtttctttg

SEQ ID NO: 31667 - DNA, 33 bp, Homo sapiens
gggactcctagattaaaaggcctgtttgaccta

SEQ ID NO: 31668 - DNA, 33 bp, Homo sapiens
gattgttcactatgggcatacaaaatgctactg

SEQ ID NO: 31669 - DNA, 33 bp, Homo sapiens
ctgctgtttaacttcacaaaaattttcattaaa

SEQ ID NO: 31670 - DNA, 33 bp, Homo sapiens
tgtatcgataccagtcaacctatctagaaccta

SEQ ID NO: 31671 - DNA, 33 bp, Homo sapiens
gtcagtgaccaacaagccctgaggatgcagcac

SEQ ID NO: 31672 - DNA, 33 bp, Homo sapiens
agtgcctggcacatcacagttaattggtggtgg

SEQ ID NO: 31673 - DNA, 33 bp, Homo sapiens
gctccactgagtaccaactaacaattttctacc

SEQ ID NO: 31674 - DNA, 33 bp, Homo sapiens
acattctatatgtaaaccgcttgctaaaactct

SEQ ID NO: 31675 - DNA, 33 bp, Homo sapiens
tgcgcaagttacaaaacggtgtcccctctctag

SEQ ID NO: 31676 - DNA, 33 bp, Homo sapiens
ataaacttttcaccaaagacaatattcaaacag

SEQ ID NO: 31677 - DNA, 33 bp, Homo sapiens
agttaaataagttgtcaaggcaagtaaaagaac

SEQ ID NO: 31678 - DNA, 33 bp, Homo sapiens
gaagtccaacagactgaacgaatgcttggttgt

SEQ ID NO: 31679 - DNA, 33 bp, Homo sapiens
cttcaaaggaagagacacttttataaagactca

SEQ ID NO: 31680 - DNA, 33 bp, Homo sapiens
gccagctccataagataagtggagaaactgagg

SEQ ID NO: 31681 - DNA, 33 bp, Homo sapiens
attgtaatagtgaaacaggaaacaaacagttgt

SEQ ID NO: 31682 - DNA, 33 bp, Homo sapiens
taaacaaagacgcacacggttacacttcagaag

SEQ ID NO: 31683 - DNA, 33 bp, Homo sapiens
aggtggatggccattcgaagctaagtaaacagc

SEQ ID NO: 31684 - DNA, 33 bp, Homo sapiens
atcagcaacacaacagcctaccccgtcattata

SEQ ID NO: 31685 - DNA, 33 bp, Homo sapiens
tttgaatcctaacatcaccatgtactgtgtctc

SEQ ID NO: 31686 - DNA, 33 bp, Homo sapiens
aggggtcagctgctgacggggagtaccatgcta

SEQ ID NO: 31687 - DNA, 33 bp, Homo sapiens
gggcagaggtcaggaaactagtggcccacacaa

SEQ ID NO: 31688 - DNA, 33 bp, Homo sapiens
tcctgcactcctggaccaacctccggctgcaga

SEQ ID NO: 31689 - DNA, 33 bp, Homo sapiens
ggagggcattctcaacacacttgcaccaggttc

SEQ ID NO: 31690 - DNA, 33 bp, Homo sapiens
atggatgcatggatgaatatttggatgtatgga

SEQ ID NO: 31691 - DNA, 33 bp, Homo sapiens
tgttcaccaagcaataacctggcactaatttag

SEQ ID NO: 31692 - DNA, 33 bp, Homo sapiens
tacaaaaaggtatgcaatcagaaataaaaatag

SEQ ID NO: 31693 - DNA, 33 bp, Homo sapiens
gaggcgggatagcccgacgaataaaagcatgga

SEQ ID NO: 31694 - DNA, 33 bp, Homo sapiens
tgaaattgctctgacacatccagtccaagcata

SEQ ID NO: 31695 - DNA, 33 bp, Homo sapiens
caagttgtatttccccgctatggtgaacatctg

SEQ ID NO: 31696 - DNA, 33 bp, Homo sapiens
tgcgtcccatgggtaaagactatcatcattatt

SEQ ID NO: 31697 - DNA, 33 bp, Homo sapiens
gctggaagaggttcctaaggaaaggctcaggtg

SEQ ID NO: 31698 - DNA, 33 bp, Homo sapiens
agaggaagactcagaactgctctcaagaaatca

SEQ ID NO: 31699 - DNA, 33 bp, Homo sapiens
tggcatccgtaacctcaatgtagacttcagtta

SEQ ID NO: 31700 - DNA, 33 bp, Homo sapiens
gttctgaagcccaataaagtggaggatagtctt

SEQ ID NO: 31701 - DNA, 33 bp, Homo sapiens
tgaaagcacagggaggaaagatgcagagtaaca

SEQ ID NO: 31702 - DNA, 33 bp, Homo sapiens
ctttcttcataaccacaaactgtatttccagca

SEQ ID NO: 31703 - DNA, 33 bp, Homo sapiens
attcaaaagtgattggcatttgcaagacagaga

SEQ ID NO: 31704 - DNA, 33 bp, Homo sapiens
actgctctgaactaccaggggatttctgtgggt

SEQ ID NO: 31705 - DNA, 51 bp, Homo sapiens
gttagtgacctagagggaatgaaatcagaagagaagcagatcaggtggaaa

SEQ ID NO: 31706 - DNA, 33 bp, Homo sapiens
ttgatcccacactcccaagagaattagtcacta

SEQ ID NO: 31707 - DNA, 33 bp, Homo sapiens
ctggaaggaaagatgcaagcagcatagttttgc

SEQ ID NO: 31708 - DNA, 33 bp, Homo sapiens
tgtttcctgcaaggtcaatttcccaggtgaaag

SEQ ID NO: 31709 - DNA, 33 bp, Homo sapiens
gagcccaaacttactgcatgaacaactcccaaa

SEQ ID NO: 31710 - DNA, 33 bp, Homo sapiens
gagatggtttcttcacccctctaagccttagct

SEQ ID NO: 31711 - DNA, 33 bp, Homo sapiens
atggaatacagtctgaactagcctttcatgaat

SEQ ID NO: 31712 - DNA, 33 bp, Homo sapiens
aatttggaatcagccccaggactcctcctatcc

SEQ ID NO: 31713 - DNA, 33 bp, Homo sapiens
atgctcttacttgatacccataaaggcagcttt

SEQ ID NO: 31714 - DNA, 33 bp, Homo sapiens
taatgcttaagtgagaacaacaatttcactttt

SEQ ID NO: 31715 - DNA, 33 bp, Homo sapiens
ggtcaatttgactagacataggattgattggat

SEQ ID NO: 31716 - DNA, 33 bp, Homo sapiens
gcctttttaaacactgcattgatgatttgtcta

SEQ ID NO: 31717 - DNA, 51 bp, Homo sapiens
acagtagctgcccttgaggatagtaacaagctcagctgtaggttctagcag

SEQ ID NO: 31718 - DNA, 33 bp, Homo sapiens
ggagcacatctgattcaacatccctcctagcac

SEQ ID NO: 31719 - DNA, 33 bp, Homo sapiens
tctgtgacttgagacaaaggtattcaaaataat

SEQ ID NO: 31720 - DNA, 33 bp, Homo sapiens
gctctggagggaatacagattgtctggtaaggt

SEQ ID NO: 31721 - DNA, 33 bp, Homo sapiens
taaaccctggagataccgcagaaaacaaaacca

SEQ ID NO: 31722 - DNA, 33 bp, Homo sapiens
ttggttcctgctcccgaaacttctgtcgccatc

SEQ ID NO: 31723 - DNA, 33 bp, Homo sapiens
gtaagacttggcttccccaactagatactaaga

SEQ ID NO: 31724 - DNA, 33 bp, Homo sapiens
agataagagaatgcaaagtgttaaagaaatctc

SEQ ID NO: 31725 - DNA, 33 bp, Homo sapiens
gggcagtgaactcagacgtactttatgtgtgtt

SEQ ID NO: 31726 - DNA, 33 bp, Homo sapiens
tctgagaatccattcactcatttgcaaaattaa

SEQ ID NO: 31727 - DNA, 33 bp, Homo sapiens
attgcttgctatgtggaaaagaatgctcctagg

SEQ ID NO: 31728 - DNA, 33 bp, Homo sapiens
gattgcctcggtccaactctcatttattaatta

SEQ ID NO: 31729 - DNA, 51 bp, Homo sapiens
aatttacatttgatagttacatcatcataaaacactcagaataccatgcaa

SEQ ID NO: 31730 - DNA, 33 bp, Homo sapiens
gtcagaagcaaactaaagctgctggagagaaga

SEQ ID NO: 31731 - DNA, 33 bp, Homo sapiens
tgaaccgttgttcaagcacaattaaggcaaaaa

SEQ ID NO: 31732 - DNA, 33 bp, Homo sapiens
gagccaaacaagacagcatggcctaaaaatgac

SEQ ID NO: 31733 - DNA, 33 bp, Homo sapiens
acaaaagaagctgacacagttaactgaaaaaag

SEQ ID NO: 31734 - DNA, 51 bp, Homo sapiens
gctatctctggctgagagaaccacaaacttcaagatgtatgagggctacct

SEQ ID NO: 31735 - DNA, 51 bp, Homo sapiens
atgaaaagagagccaaacaagacagcatggcctaaaaatgacatgccctga

SEQ ID NO: 31736 - DNA, 33 bp, Homo sapiens
tgcctttttcattacccagacaatagtgcaaca

SEQ ID NO: 31737 - DNA, 33 bp, Homo sapiens
ctcatattgcctcttacggtctcgttctttcaa

SEQ ID NO: 31738 - DNA, 33 bp, Homo sapiens
aaaacaccgtctagtccataggctggcaaagta

SEQ ID NO: 31739 - DNA, 33 bp, Homo sapiens
tggtggtggtgttatccacagccttatccccac

SEQ ID NO: 31740 - DNA, 33 bp, Homo sapiens
tattattattgactccacaatgaaaacaatctt

SEQ ID NO: 31741 - DNA, 33 bp, Homo sapiens
gcattgatgctacaaacagctaaatcccacagg

SEQ ID NO: 31742 - DNA, 33 bp, Homo sapiens
gcttgcattctgtgcacctgcaagcttaccacc

SEQ ID NO: 31743 - DNA, 33 bp, Homo sapiens
ctggtcaatttcactacaaaaactactctaaaa

SEQ ID NO: 31744 - DNA, 33 bp, Homo sapiens
gaatggcttcgtgaaactgactgttacagctat

SEQ ID NO: 31745 - DNA, 33 bp, Homo sapiens
ggattagttgttcacacgttcctgactggtaga

SEQ ID NO: 31746 - DNA, 33 bp, Homo sapiens
aacctgaacatgggctcaacatttttcttgaca

SEQ ID NO: 31747 - DNA, 33 bp, Homo sapiens
gtcaataatgtcacaaaaaggtaaggcctggtg

SEQ ID NO: 31748 - DNA, 33 bp, Homo sapiens
tctaatagcttattgactaggaatggacttgac

SEQ ID NO: 31749 - DNA, 33 bp, Homo sapiens
agaaaaaacaactgacaaatagacccacacatt

SEQ ID NO: 31750 - DNA, 33 bp, Homo sapiens
ataataatttagacaacgtagtactggcatata

SEQ ID NO: 31751 - DNA, 51 bp, Homo sapiens
ttttacataaagctggcttcacagacagtatctcatttgcttctcagaaca

SEQ ID NO: 31752 - DNA, 51 bp, Homo sapiens
ttacttcaccttatcaaaatgaaagactattaagcatgccctgccctacct

SEQ ID NO: 31753 - DNA, 33 bp, Homo sapiens
cccagtttcttccccaatgatataacacagagg

SEQ ID NO: 31754 - DNA, 33 bp, Homo sapiens
gtgggttgacttcagaccctgccctgctttagg

SEQ ID NO: 31755 - DNA, 33 bp, Homo sapiens
tgaagtgaggattccaaattagagcagtggtta

SEQ ID NO: 31756 - DNA, 33 bp, Homo sapiens
aagaaaggccattgaaacttaaactatattaag

SEQ ID NO: 31757 - DNA, 33 bp, Homo sapiens
ctaagctaaggaaataaactgaaatcaaacata

SEQ ID NO: 31758 - DNA, 33 bp, Homo sapiens
ctctccttttatgcccagctttcagagttcatt

SEQ ID NO: 31759 - DNA, 33 bp, Homo sapiens
acattatcaagagctacataaaagttggtgtca

SEQ ID NO: 31760 - DNA, 33 bp, Homo sapiens
acaataaagtgtgtaaaagctcaggttcaagca

SEQ ID NO: 31761 - DNA, 33 bp, Homo sapiens
aacctgggcttctgacagagacagattttatga

SEQ ID NO: 31762 - DNA, 33 bp, Homo sapiens
caaaatccgcttcacaaagaacacaacttacaa

SEQ ID NO: 31763 - DNA, 33 bp, Homo sapiens
agtttcaaaaacatcacagtgtcaacttagatg

SEQ ID NO: 31764 - DNA, 33 bp, Homo sapiens
ttacataatggtaaacagttcaatttaataaga

SEQ ID NO: 31765 - DNA, 33 bp, Homo sapiens
taaaaagctgtctacacagttatggagaaggga

SEQ ID NO: 31766 - DNA, 33 bp, Homo sapiens
actgtggctgaaatccagcttcaggaccaaccg

SEQ ID NO: 31767 - DNA, 33 bp, Homo sapiens
tcaatcaatacgaaccaccaaaccagatcactg

SEQ ID NO: 31768 - DNA, 33 bp, Homo sapiens
ctcaaagttttccccagtcaaaagcatttgaaa

SEQ ID NO: 31769 - DNA, 33 bp, Homo sapiens
gttcatttttcatgcaatattagccaatgtcac

SEQ ID NO: 31770 - DNA, 33 bp, Homo sapiens
gatggccactagaaaccgaaaaggacaagaaaa

SEQ ID NO: 31771 - DNA, 33 bp, Homo sapiens
actatgaagtctcttgaagccattttaatgcaa

SEQ ID NO: 31772 - DNA, 33 bp, Homo sapiens
atattctcttcttaccacgaaaggaaaaagact

SEQ ID NO: 31773 - DNA, 33 bp, Homo sapiens
ggtgactcctttagtgaaagaacacattctttc

SEQ ID NO: 31774 - DNA, 33 bp, Homo sapiens
ttttctttgtagaaaacctaatggtcactggaa

SEQ ID NO: 31775 - DNA, 33 bp, Homo sapiens
cggtcacactataatccccacgagacagcagga

SEQ ID NO: 31776 - DNA, 33 bp, Homo sapiens
aaatctaaggtgttatcaagctataagatataa

SEQ ID NO: 31777 - DNA, 33 bp, Homo sapiens
ccttcttttatatcaagtgaccaggatgatacc

SEQ ID NO: 31778 - DNA, 33 bp, Homo sapiens
aatgaatggtagccacaatatttgtcctttatt

SEQ ID NO: 31779 - DNA, 33 bp, Homo sapiens
gcaaggaaggcaaatgcacaattagtatcaggg

SEQ ID NO: 31780 - DNA, 33 bp, Homo sapiens
gtctgcagtctagctaaggagaatgatgactaa

SEQ ID NO: 31781 - DNA, 33 bp, Homo sapiens
aggctcatgcctggtgacaataaaggcgaatag

SEQ ID NO: 31782 - DNA, 33 bp, Homo sapiens
ctgattccctgaaatgaagttgttggtgatggg

SEQ ID NO: 31783 - DNA, 33 bp, Homo sapiens
ctgagtggctgccacaaggctatgttcagcgct

SEQ ID NO: 31784 - DNA, 33 bp, Homo sapiens
gataggaaagtaatggccaacaactcagtaatt

SEQ ID NO: 31785 - DNA, 33 bp, Homo sapiens
gataaatgattcaccccgacaaaaagtacactc

SEQ ID NO: 31786 - DNA, 33 bp, Homo sapiens
atccagcttcttcacaagtagtaaaaaggaggt

SEQ ID NO: 31787 - DNA, 33 bp, Homo sapiens
gaaaactttgagagacaatgaatactaactatg

SEQ ID NO: 31788 - DNA, 51 bp, Homo sapiens
cctgttaaaatctgatttctatacaatatttgatgttaatatctggctcat

SEQ ID NO: 31789 - DNA, 33 bp, Homo sapiens
ggctgactgagactgacgtttggtgtctgaagt

SEQ ID NO: 31790 - DNA, 33 bp, Homo sapiens
agataataagcagtcaataaatgacagaaatta

SEQ ID NO: 31791 - DNA, 33 bp, Homo sapiens
gtttattatagaaagacaggctgtgtcatggca

SEQ ID NO: 31792 - DNA, 33 bp, Homo sapiens
cagagaggagaccgtgaagtaggtagctgtttt

SEQ ID NO: 31793 - DNA, 33 bp, Homo sapiens
tcaggtccaattgcaaatccaagttagctaaat

SEQ ID NO: 31794 - DNA, 33 bp, Homo sapiens
acagtcgggtagaacaccaagcatgctcttaga

SEQ ID NO: 31795 - DNA, 33 bp, Homo sapiens
cacaattcaaaacacaatgatgctcttccaaca

SEQ ID NO: 31796 - DNA, 51 bp, Homo sapiens
tagcccctatagtccgctgggagcactgaactcctgacctcaggtgatcca

SEQ ID NO: 31797 - DNA, 33 bp, Homo sapiens
actaaacagtgatacccgagaaatagaaacaaa

SEQ ID NO: 31798 - DNA, 33 bp, Homo sapiens
ccagatcagtactcgcactcccactgtgtcact

SEQ ID NO: 31799 - DNA, 33 bp, Homo sapiens
ctctgtttctgaaacagtagcctcaaggatgcc

SEQ ID NO: 31800 - DNA, 33 bp, Homo sapiens
aaaaatgagtactttaaattcctctagctgttt

SEQ ID NO: 31801 - DNA, 33 bp, Homo sapiens
tctgtggaagagtagacgtgtcatgcccagtgc

SEQ ID NO: 31802 - DNA, 33 bp, Homo sapiens
ggataatgcctttgggaatgtggggtatcagtt

SEQ ID NO: 31803 - DNA, 33 bp, Homo sapiens
tctagtctgactcccaaatttcacaaaagtgga

SEQ ID NO: 31804 - DNA, 33 bp, Homo sapiens
tcacctgtggccggaacctcaaaggagagtgat

SEQ ID NO: 31805 - DNA, 51 bp, Homo sapiens
cctgttagcggagtccctttaaggaagttagaccagtgacctttgctgtgc

SEQ ID NO: 31806 - DNA, 33 bp, Homo sapiens
gtggttatgggtcctgaatttaatgaggtctag

SEQ ID NO: 31807 - DNA, 33 bp, Homo sapiens
tcattagatgtgaagacgtagtgtgctatgcca

SEQ ID NO: 31808 - DNA, 33 bp, Homo sapiens
ccctgatttctttaaccgtcaaatgtggttaaa

SEQ ID NO: 31809 - DNA, 33 bp, Homo sapiens
gggagatacaacctaaaagacaaaataacattt

SEQ ID NO: 31810 - DNA, 33 bp, Homo sapiens
atgtaagccacaaaaaagaaaccatttaattca

SEQ ID NO: 31811 - DNA, 33 bp, Homo sapiens
gatatcaagttttataacacaagcaagactgaa

SEQ ID NO: 31812 - DNA, 33 bp, Homo sapiens
tcaagtgtgactgttacggctgtgctagatgtc

SEQ ID NO: 31813 - DNA, 33 bp, Homo sapiens
cagtgtggaggacataagaaaaggcatgagact

SEQ ID NO: 31814 - DNA, 33 bp, Homo sapiens
gtctttgttttactgaagttcttaggggtctca

SEQ ID NO: 31815 - DNA, 33 bp, Homo sapiens
caggcaaagacaatataagaaaatgttgtgtgt

SEQ ID NO: 31816 - DNA, 33 bp, Homo sapiens
ctactttgtcagcctgaattatggaacaaagac

SEQ ID NO: 31817 - DNA, 51 bp, Homo sapiens
tcttaaggttatcatgacctaggaaattaggaacagggaatgaacaatgtt

SEQ ID NO: 31818 - DNA, 33 bp, Homo sapiens
ctggccactcctcagacgtagaaaggggtacaa

SEQ ID NO: 31819 - DNA, 33 bp, Homo sapiens
aaggaaacgttattcacctcctgcaatatctta

SEQ ID NO: 31820 - DNA, 33 bp, Homo sapiens
aacttggtgattagcacgagtgtaggctacggt

SEQ ID NO: 31821 - DNA, 33 bp, Homo sapiens
tatgttctccaacacaaagtatcattagaagat

SEQ ID NO: 31822 - DNA, 33 bp, Homo sapiens
gtgtaatttgaagcaaactttcaaattgcattg

SEQ ID NO: 31823 - DNA, 33 bp, Homo sapiens
taagcatcagctcttacggtattaaaaatggaa

SEQ ID NO: 31824 - DNA, 51 bp, Homo sapiens
tcctcttttatctaccacatgaaaagactatctgattataatttgatgcct

SEQ ID NO: 31825 - DNA, 33 bp, Homo sapiens
gtcaatagaggtcaataaaggtcgtaatcgttt

SEQ ID NO: 31826 - DNA, 33 bp, Homo sapiens
aaagaataaatctaaccggtcttccacgaaaga

SEQ ID NO: 31827 - DNA, 33 bp, Homo sapiens
tacttccatgtgtttacacaagcaacaacagcc

SEQ ID NO: 31828 - DNA, 33 bp, Homo sapiens
ctaagagaaaatgacaaacttttacatgacagt

SEQ ID NO: 31829 - DNA, 51 bp, Homo sapiens
tctgaactagaaagatggccaggcacaagccaatactgaattaatttccct

SEQ ID NO: 31830 - DNA, 51 bp, Homo sapiens
aatgaatgtgtgaatagaaatagaaaatcgaaaagcaattctatatactca

SEQ ID NO: 31831 - DNA, 33 bp, Homo sapiens
ttctatgggctaaaaggacttcctagaatgaca

SEQ ID NO: 31832 - DNA, 33 bp, Homo sapiens
ccattgatctttagcacctttgtctaaaattaa

SEQ ID NO: 31833 - DNA, 33 bp, Homo sapiens
gatcagtcaagacttaagtgtatgcttactgat

SEQ ID NO: 31834 - DNA, 33 bp, Homo sapiens
atattgagctctaaaaatgtgggagcaaagcta

SEQ ID NO: 31835 - DNA, 33 bp, Homo sapiens
aaataacagtataagcaattcccaggcttaatc

SEQ ID NO: 31836 - DNA, 33 bp, Homo sapiens
gtgttccccatgactgcaaccctgctttccaaa

SEQ ID NO: 31837 - DNA, 33 bp, Homo sapiens
ataaaataaatgtcaagcaaagtggtgtaaggg

SEQ ID NO: 31838 - DNA, 33 bp, Homo sapiens
agacctcaatttaggaaaacatccggcgtgctt

SEQ ID NO: 31839 - DNA, 33 bp, Homo sapiens
aatttggaaaaactacaatctactcacttttcc

SEQ ID NO: 31840 - DNA, 33 bp, Homo sapiens
gtggaagttgacacccaggatattctcctttct

SEQ ID NO: 31841 - DNA, 33 bp, Homo sapiens
ttgttgtttccacagactaaaaatagaaaccga

SEQ ID NO: 31842 - DNA, 51 bp, Homo sapiens
tatgtggcagatagattttgtcccgaccaacattctctcctctccttatct

SEQ ID NO: 31843 - DNA, 33 bp, Homo sapiens
agaggttcagggtggaataataaatgtggaaga

SEQ ID NO: 31844 - DNA, 51 bp, Homo sapiens
taacaacgtcacctgggtatctctacgcacagcgaagtttcggaggcactc

SEQ ID NO: 31845 - DNA, 33 bp, Homo sapiens
tgttttgtctagaaggccacagaatgctgagat

SEQ ID NO: 31846 - DNA, 33 bp, Homo sapiens
ttgggaagagccaggacggaataacatagttgg

SEQ ID NO: 31847 - DNA, 33 bp, Homo sapiens
ctattttatggtcgcaaaatataccaggacaca

SEQ ID NO: 31848 - DNA, 33 bp, Homo sapiens
gtgttccacattcatacgtggtgttcagaaaac

SEQ ID NO: 31849 - DNA, 33 bp, Homo sapiens
cactcctatgcaaaaggcactgtgaaaacactg

SEQ ID NO: 31850 - DNA, 33 bp, Homo sapiens
catgtaggaacaggaaacctttctagagtatgg

SEQ ID NO: 31851 - DNA, 33 bp, Homo sapiens
atttttcttaaatgtcaataagttggtgttaat

SEQ ID NO: 31852 - DNA, 33 bp, Homo sapiens
aagatggctttcataccgcccaaagttttaatg

SEQ ID NO: 31853 - DNA, 51 bp, Homo sapiens
tcagaaaagattaaagccttgggaaatgacttgcatgtggacataaaaggg

SEQ ID NO: 31854 - DNA, 33 bp, Homo sapiens
gaattgttagaagaacagaatggcaaaataatt

SEQ ID NO: 31855 - DNA, 33 bp, Homo sapiens
aaaacgaccagagctaaaaagtgacagcagaat

SEQ ID NO: 31856 - DNA, 33 bp, Homo sapiens
atatcacacagctttaacacttaattatatcct

SEQ ID NO: 31857 - DNA, 33 bp, Homo sapiens
gaacataaactcggagaaaaaaatgggaggaaa

SEQ ID NO: 31858 - DNA, 51 bp, Homo sapiens
aattgcagggatgtgctgaacagccacagaaataactaaagtaaaagtggc

SEQ ID NO: 31859 - DNA, 33 bp, Homo sapiens
tagctggttataaataatacttctgcctctgta

SEQ ID NO: 31860 - DNA, 33 bp, Homo sapiens
agatgagctttaatcgaaggaccaaatctgtgt

SEQ ID NO: 31861 - DNA, 33 bp, Homo sapiens
aacaggtcaaaagtcaccaagcgaatgaacaaa

SEQ ID NO: 31862 - DNA, 33 bp, Homo sapiens
ccagggtaaatggataaattgtcatagatgacc

SEQ ID NO: 31863 - DNA, 51 bp, Homo sapiens
gttatatatagtgaggacactgttacaataaggtgagtgcattgttacagt

SEQ ID NO: 31864 - DNA, 33 bp, Homo sapiens
tgaaattagagagttaagggcttgagttaaggg

SEQ ID NO: 31865 - DNA, 33 bp, Homo sapiens
tgactggaaatggtagcagtgtcaagatgacta

SEQ ID NO: 31866 - DNA, 33 bp, Homo sapiens
gtaagtcacttgtgtcaacattaaattgtcacc

SEQ ID NO: 31867 - DNA, 33 bp, Homo sapiens
acttatctcatggataaaacagaggatagacta

SEQ ID NO: 31868 - DNA, 33 bp, Homo sapiens
agtgtgtctttggaccccttccaggctgtttcc

SEQ ID NO: 31869 - DNA, 33 bp, Homo sapiens
gggattaaatcaatcacactggatattgctaat

SEQ ID NO: 31870 - DNA, 33 bp, Homo sapiens
attttcttggagtctcaaagatgtagattatgt

SEQ ID NO: 31871 - DNA, 33 bp, Homo sapiens
cttattagctacgcaaccttgggcaagttttca

SEQ ID NO: 31872 - DNA, 33 bp, Homo sapiens
atgtgattcttcacaacgcgcagaactctctga

SEQ ID NO: 31873 - DNA, 33 bp, Homo sapiens
ctaggaatctttgtaacggattgggatacttgg

SEQ ID NO: 31874 - DNA, 33 bp, Homo sapiens
agagcagcccaggtcacgagtttgtgagggcac

SEQ ID NO: 31875 - DNA, 33 bp, Homo sapiens
gggctacaattcatcaagatgcactggaacgtg

SEQ ID NO: 31876 - DNA, 33 bp, Homo sapiens
caagtaataataaggtaacaacattctctacca

SEQ ID NO: 31877 - DNA, 33 bp, Homo sapiens
tgaaggagcccccaacaaaagactggcagtttc

SEQ ID NO: 31878 - DNA, 33 bp, Homo sapiens
cagaaattcaggaagggcctctataagatatga

SEQ ID NO: 31879 - DNA, 33 bp, Homo sapiens
gcaagctcagaggacacaggcttacaccagcac

SEQ ID NO: 31880 - DNA, 51 bp, Homo sapiens
tatgaacatcttccctttctttataacatctacctcagtttctttattaaa

SEQ ID NO: 31881 - DNA, 33 bp, Homo sapiens
ctgggacaaatgatgccgaggaaagagaaaacc

SEQ ID NO: 31882 - DNA, 33 bp, Homo sapiens
ctgcagatcaaaaaaccggctctgcagatctgc

SEQ ID NO: 31883 - DNA, 33 bp, Homo sapiens
aaaatccaagagtcaccgatgtccatgatttct

SEQ ID NO: 31884 - DNA, 33 bp, Homo sapiens
gggagctgaattctccagcgacagttgttgggg

SEQ ID NO: 31885 - DNA, 33 bp, Homo sapiens
ccttcctctcaaataacgtggagaggctctctc

SEQ ID NO: 31886 - DNA, 33 bp, Homo sapiens
actcccaatcccgaaacagacttcataactgca

SEQ ID NO: 31887 - DNA, 33 bp, Homo sapiens
cagctgaagtacgtggaaatcccagggctcgac

SEQ ID NO: 31888 - DNA, 33 bp, Homo sapiens
caccacgaatgaaagactactttaaccgcattt

SEQ ID NO: 31889 - DNA, 33 bp, Homo sapiens
gagaagggtgtagaaactaaataattcaccttt

SEQ ID NO: 31890 - DNA, 33 bp, Homo sapiens
ggagtccacgtgggcaagaagctaagcagcagt

SEQ ID NO: 31891 - DNA, 51 bp, Homo sapiens
ttcttgctctgcaacttagaagatacgtatgttggtcaagtaactaaacct

SEQ ID NO: 31892 - DNA, 33 bp, Homo sapiens
gcacaaaattcaatgacgggcacaagcagaaag

SEQ ID NO: 31893 - DNA, 33 bp, Homo sapiens
gtctctaactcctaacacagtgctgggtacatc

SEQ ID NO: 31894 - DNA, 33 bp, Homo sapiens
ttgtcagcctcaggccaagatcaaaataagagt

SEQ ID NO: 31895 - DNA, 33 bp, Homo sapiens
tgatttccttctttgtcaagtggagacaccaat

SEQ ID NO: 31896 - DNA, 33 bp, Homo sapiens
aataatccaagccgcaagagtttctattaaaag

SEQ ID NO: 31897 - DNA, 33 bp, Homo sapiens
caaagaaaagaggaaaacatatccgagagtgga

SEQ ID NO: 31898 - DNA, 33 bp, Homo sapiens
gagtgctaagcagacaataaaacaaggaagtca

SEQ ID NO: 31899 - DNA, 33 bp, Homo sapiens
tttctattctgtaccgccctgagatcagctttt

SEQ ID NO: 31900 - DNA, 33 bp, Homo sapiens
caaggtcatttctcaaagtctagagcatacctc

SEQ ID NO: 31901 - DNA, 33 bp, Homo sapiens
attgtttaagtcagaacctcagaaccgagttat

SEQ ID NO: 31902 - DNA, 33 bp, Homo sapiens
cagttaatagagaaggaaaaagggcagaaggaa

SEQ ID NO: 31903 - DNA, 33 bp, Homo sapiens
tgagctcttcctatgggccagagagcacaagct

SEQ ID NO: 31904 - DNA, 33 bp, Homo sapiens
gcaccctgtgtgtgtaaagcaatccaggcgcca

SEQ ID NO: 31905 - DNA, 33 bp, Homo sapiens
gattcctgcaggtctgacaatctcactccttcc

SEQ ID NO: 31906 - DNA, 33 bp, Homo sapiens
gcatggataattacacaattcagagcctgctgg

SEQ ID NO: 31907 - DNA, 33 bp, Homo sapiens
aaatccttaagttgatcacatctgcaaaatctc

SEQ ID NO: 31908 - DNA, 33 bp, Homo sapiens
ataagtgaaagaaccccgcacatactaggtact

SEQ ID NO: 31909 - DNA, 33 bp, Homo sapiens
caagtcctctgctgggccaagaatgcagctgct

SEQ ID NO: 31910 - DNA, 33 bp, Homo sapiens
agcttaagcagagggaacttccatagggcagca

SEQ ID NO: 31911 - DNA, 33 bp, Homo sapiens
gtctatgctgaagtgacaaggataggaaaactg

SEQ ID NO: 31912 - DNA, 33 bp, Homo sapiens
aaaaacataatcctccaaaatgaagtcattcct

SEQ ID NO: 31913 - DNA, 33 bp, Homo sapiens
aggaaaagatttggacacagcatacctaatcaa

SEQ ID NO: 31914 - DNA, 33 bp, Homo sapiens
tcccacgccaagcaggacaagactgatgctggg

SEQ ID NO: 31915 - DNA, 33 bp, Homo sapiens
aaataattattagcaaagtagttgaacagggac

SEQ ID NO: 31916 - DNA, 33 bp, Homo sapiens
gctctcagaaggaaagacaagcaaagagaaggc

SEQ ID NO: 31917 - DNA, 33 bp, Homo sapiens
ggtgagcagatgtccacaggaagggaaggagca

SEQ ID NO: 31918 - DNA, 33 bp, Homo sapiens
gacagggcctacacgacgcccttttcatcatgg

SEQ ID NO: 31919 - DNA, 33 bp, Homo sapiens
cagttcctgtatattacgtccacctttcccaaa

SEQ ID NO: 31920 - DNA, 33 bp, Homo sapiens
aagtcaatcaagggcaccagtgacaatattaac

SEQ ID NO: 31921 - DNA, 33 bp, Homo sapiens
cctgtttgtatgctcagatcattggtaagggga

SEQ ID NO: 31922 - DNA, 33 bp, Homo sapiens
cgagtgagacacttaacctgtaacaagagctct

SEQ ID NO: 31923 - DNA, 33 bp, Homo sapiens
gtgagttgcaagacgccgaagaatctcatgtgg

SEQ ID NO: 31924 - DNA, 33 bp, Homo sapiens
atgagagcttattacaccttgtgctacagatga

SEQ ID NO: 31925 - DNA, 33 bp, Homo sapiens
gttgcctttttccacacagttagcaattcttta

SEQ ID NO: 31926 - DNA, 33 bp, Homo sapiens
gccccagaactccatcaatacgctgtccccagg

SEQ ID NO: 31927 - DNA, 33 bp, Homo sapiens
atgcatggggtgatgacagtttgcggttgctgg

SEQ ID NO: 31928 - DNA, 33 bp, Homo sapiens
tcatttgttaattatcacagtaaacattaattc

SEQ ID NO: 31929 - DNA, 33 bp, Homo sapiens
attatccccattctacagatgaggaacctgagg

SEQ ID NO: 31930 - DNA, 33 bp, Homo sapiens
ttttgtttattgctgaaatgaacgaatccttca

SEQ ID NO: 31931 - DNA, 33 bp, Homo sapiens
ggggcaattagatgacaatcaccagatagttga

SEQ ID NO: 31932 - DNA, 33 bp, Homo sapiens
attatttctagtttacaggggactcgatgggag

SEQ ID NO: 31933 - DNA, 33 bp, Homo sapiens
aaaaaatattgtctcacgatgccccccagtaag

SEQ ID NO: 31934 - DNA, 33 bp, Homo sapiens
tctgttcccgggggcacgggcaaactgtatagt

SEQ ID NO: 31935 - DNA, 33 bp, Homo sapiens
cagaactgggtatggacggtctcagaatgctga

SEQ ID NO: 31936 - DNA, 33 bp, Homo sapiens
tttatgagatatgagcaaatgtaaccaaggctt

SEQ ID NO: 31937 - DNA, 33 bp, Homo sapiens
gaagtcatagccagaaaagagctacaaattagt

SEQ ID NO: 31938 - DNA, 33 bp, Homo sapiens
attcagggtcatgatgcagtcacggaaggacgg

SEQ ID NO: 31939 - DNA, 33 bp, Homo sapiens
tgaggaagcacagttaagttaaccaatgcggac

SEQ ID NO: 31940 - DNA, 33 bp, Homo sapiens
actgcaggtctgatacagattgacaggtgccac

SEQ ID NO: 31941 - DNA, 33 bp, Homo sapiens
ccccaattaccaggaaacaatatcatctttttg

SEQ ID NO: 31942 - DNA, 33 bp, Homo sapiens
acacaactgctgggaacgggaaagtttcaacct

SEQ ID NO: 31943 - DNA, 33 bp, Homo sapiens
gacttcccaattcttcccacttagccagctgcc

SEQ ID NO: 31944 - DNA, 33 bp, Homo sapiens
ctttctaatttttgctaacctgatgagtgtaca

SEQ ID NO: 31945 - DNA, 33 bp, Homo sapiens
ctccatgcagggagtgacaaggaatttgggacc

SEQ ID NO: 31946 - DNA, 33 bp, Homo sapiens
agggttctctcacaaacgaaaatgcctcaaata

SEQ ID NO: 31947 - DNA, 51 bp, Homo sapiens
tacttgtctttcttagctattaactctcaattactagacatttagggagtc

SEQ ID NO: 31948 - DNA, 33 bp, Homo sapiens
tctgataccttcagaaagtcaatcagtaccaaa

SEQ ID NO: 31949 - DNA, 33 bp, Homo sapiens
ttatttatatcttgcaacaggaagcccgagagg

SEQ ID NO: 31950 - DNA, 33 bp, Homo sapiens
ttctctgagtgctccaagctacctttatcaggc

SEQ ID NO: 31951 - DNA, 51 bp, Homo sapiens
tgacacactttggacccattgttggagatgaggtcaggaaacttatttctg

SEQ ID NO: 31952 - DNA, 33 bp, Homo sapiens
tggttccttgatatggcaaaccttgctcctatg

SEQ ID NO: 31953 - DNA, 33 bp, Homo sapiens
gattagcaagactgagaacaaatcttattatag

SEQ ID NO: 31954 - DNA, 33 bp, Homo sapiens
tattaagtgaaatacaacatggaaacagtggag

SEQ ID NO: 31955 - DNA, 33 bp, Homo sapiens
ttggaggtggaaatacaaggcatctaaatatga

SEQ ID NO: 31956 - DNA, 33 bp, Homo sapiens
ttgtggttgaaccttgaagaaatgtgttagaaa

SEQ ID NO: 31957 - DNA, 33 bp, Homo sapiens
aatccagagtgtcccaagaacccaaatgcccag

SEQ ID NO: 31958 - DNA, 33 bp, Homo sapiens
tgtcacaggtatgaacagaatatggatgggaag

SEQ ID NO: 31959 - DNA, 51 bp, Homo sapiens
ctattgtagcttttttcagaaataacgactcatttttagaaaagaaaaaaa

SEQ ID NO: 31960 - DNA, 33 bp, Homo sapiens
agaaatggagttggcacgggcactaggaactgc

SEQ ID NO: 31961 - DNA, 33 bp, Homo sapiens
aaccacataaatcacagaaacatcagggtgtac

SEQ ID NO: 31962 - DNA, 33 bp, Homo sapiens
gcctgaaaaccacatgaaaccttctcggtaaat

SEQ ID NO: 31963 - DNA, 33 bp, Homo sapiens
tacggaaagatgctcaatagtgtttgaatacag

SEQ ID NO: 31964 - DNA, 33 bp, Homo sapiens
ggtgagtggtgctgacaaaatcacttcactggg

SEQ ID NO: 31965 - DNA, 33 bp, Homo sapiens
tgggaatgaagcaaacaagaaggcaaacaaata

SEQ ID NO: 31966 - DNA, 33 bp, Homo sapiens
tgctgggaggagaaacaagataaagcatgggga

SEQ ID NO: 31967 - DNA, 33 bp, Homo sapiens
tcaccgtaggctctgcaagattttgacgatctc

SEQ ID NO: 31968 - DNA, 51 bp, Homo sapiens
atagaaagcatgacccaattcaagacgtgtccttctactagatctcaacct

SEQ ID NO: 31969 - DNA, 51 bp, Homo sapiens
gcagtggtgtctttgatcacaggagaacctaggatttggaagggcttgaga

SEQ ID NO: 31970 - DNA, 33 bp, Homo sapiens
ctattcagatcacccaatacgtattatacaatc

SEQ ID NO: 31971 - DNA, 33 bp, Homo sapiens
ttccaacaaagctcagccacttcttccacttat

SEQ ID NO: 31972 - DNA, 33 bp, Homo sapiens
ttaagatcactgataaacctaccaccacttgaa

SEQ ID NO: 31973 - DNA, 33 bp, Homo sapiens
aacttgaatttccccaactataaatgaagataa

SEQ ID NO: 31974 - DNA, 33 bp, Homo sapiens
catctggatttttgcacaacccaggcggggctg

SEQ ID NO: 31975 - DNA, 33 bp, Homo sapiens
cacaagggctgaccccaagttgttttcattctg

SEQ ID NO: 31976 - DNA, 33 bp, Homo sapiens
ggaggcttgctcctcaacccgtcgtgggtcact

SEQ ID NO: 31977 - DNA, 33 bp, Homo sapiens
gggctctggggctcaccgcaaatggggttccca

SEQ ID NO: 31978 - DNA, 51 bp, Homo sapiens
agtgccaccgtgagtggttatggaaagagttgcgatgagaagggagctgcc

SEQ ID NO: 31979 - DNA, 33 bp, Homo sapiens
ccattgtctgaaggaacagaaattactgatgaa

SEQ ID NO: 31980 - DNA, 51 bp, Homo sapiens
aggggagggtattaatgtaagagaacggtaggctaaaatcacataaataga

SEQ ID NO: 31981 - DNA, 33 bp, Homo sapiens
aggcaccttgatcttacatttaccagacttcag

SEQ ID NO: 31982 - DNA, 33 bp, Homo sapiens
cttcagcatgcgttgcaaagtgcttgtgccctg

SEQ ID NO: 31983 - DNA, 33 bp, Homo sapiens
agtcctggtaaacacaagcacatgtcagtcagg

SEQ ID NO: 31984 - DNA, 33 bp, Homo sapiens
gctgttcctttgtctagaattctttcatctctc

SEQ ID NO: 31985 - DNA, 33 bp, Homo sapiens
cgcacctataacctcaacactttgcactttgac

SEQ ID NO: 31986 - DNA, 33 bp, Homo sapiens
tctcaaggacaaatgcaatgccccgcagcctgt

SEQ ID NO: 31987 - DNA, 33 bp, Homo sapiens
gtgacgttgccttcaacaaataattagggggtg

SEQ ID NO: 31988 - DNA, 33 bp, Homo sapiens
gaacaaatgcttttacacaaacaccttgattga

SEQ ID NO: 31989 - DNA, 51 bp, Homo sapiens
cctgctgtgagcccagatccagggaaccattccatccgcaacacactcagt

SEQ ID NO: 31990 - DNA, 33 bp, Homo sapiens
agagtgacatggtatccgagtgtttttcggatt

SEQ ID NO: 31991 - DNA, 33 bp, Homo sapiens
gacttactctggtagaactgggatgttttgcat

SEQ ID NO: 31992 - DNA, 33 bp, Homo sapiens
tgattgatgcggtgtacgccattgcccacgccc

SEQ ID NO: 31993 - DNA, 33 bp, Homo sapiens
agtgggagtaggggaaaacaggcaaagttcctg

SEQ ID NO: 31994 - DNA, 33 bp, Homo sapiens
tcacatcgtggccaaagaatgacactgtgggaa

SEQ ID NO: 31995 - DNA, 33 bp, Homo sapiens
attttaacatcaggaaagttcacataaaaagtc

SEQ ID NO: 31996 - DNA, 33 bp, Homo sapiens
agtggaatgtttgagacgcacaaataccttaaa

SEQ ID NO: 31997 - DNA, 33 bp, Homo sapiens
taacaaggaagttcataaaaagtctagatgcaa

SEQ ID NO: 31998 - DNA, 33 bp, Homo sapiens
cagctggtaacagagccacaaagtgccaaatgg

SEQ ID NO: 31999 - DNA, 33 bp, Homo sapiens
aagttgtttctacggccaagctgggaccctaac

SEQ ID NO: 32000 - DNA, 33 bp, Homo sapiens
ttaaatgcgaacaaacacacttggaggaattcc

SEQ ID NO: 32001 - DNA, 33 bp, Homo sapiens
tggctgaagaaaacgcaaccttgagacttccaa

SEQ ID NO: 32002 - DNA, 33 bp, Homo sapiens
catttaatggggacttaaaaacagaagctatgt

SEQ ID NO: 32003 - DNA, 33 bp, Homo sapiens
gacctggaaagggaacagaattatctacagaat

SEQ ID NO: 32004 - DNA, 33 bp, Homo sapiens
gtacagacagattatacgagacaggttgttgga

SEQ ID NO: 32005 - DNA, 33 bp, Homo sapiens
gattctaagtaactgcaaccctgccgtagacgc

SEQ ID NO: 32006 - DNA, 33 bp, Homo sapiens
gaagcttgtccagttccagggaagcagggtact

SEQ ID NO: 32007 - DNA, 33 bp, Homo sapiens
acctaggaatgagacccggctaaagactgtgct

SEQ ID NO: 32008 - DNA, 33 bp, Homo sapiens
gttttattcactttcaacaaggagggagagttt

SEQ ID NO: 32009 - DNA, 33 bp, Homo sapiens
aaggccattgcatcatcagggcgtgttccatga

SEQ ID NO: 32010 - DNA, 33 bp, Homo sapiens
tgtgtccctgcattaacacctgtggatctggtg

SEQ ID NO: 32011 - DNA, 33 bp, Homo sapiens
aaatcatgtgaaaattaaaacctctggctgtct

SEQ ID NO: 32012 - DNA, 33 bp, Homo sapiens
atttcaaaggccagggcgatccaagctgatatt

SEQ ID NO: 32013 - DNA, 33 bp, Homo sapiens
tgctcattctcgtgtaaggctgcaggtttccag

SEQ ID NO: 32014 - DNA, 33 bp, Homo sapiens
tcatctagcctgaggaacccttgatacatgatg

SEQ ID NO: 32015 - DNA, 33 bp, Homo sapiens
gagactgccggtgctacaactgtgttcccacgt

SEQ ID NO: 32016 - DNA, 33 bp, Homo sapiens
tcctggcacatacaaaaatgtttgttccgttgt

SEQ ID NO: 32017 - DNA, 33 bp, Homo sapiens
ctcatcaaatattctccctgccccgttctctct

SEQ ID NO: 32018 - DNA, 33 bp, Homo sapiens
tgagtttattctaaccaaaaagaagttcattga

SEQ ID NO: 32019 - DNA, 33 bp, Homo sapiens
agaaaggagggctgaacaggattacgggagatt

SEQ ID NO: 32020 - DNA, 33 bp, Homo sapiens
tttgttctttatcaccaaaaccattttctagta

SEQ ID NO: 32021 - DNA, 51 bp, Homo sapiens
aagttttataatgacttatttggagcagtgattgatgaaaaattattgtaa

SEQ ID NO: 32022 - DNA, 33 bp, Homo sapiens
cagctgaatcgaacacagccaaccctttgaact

SEQ ID NO: 32023 - DNA, 33 bp, Homo sapiens
tgccttgctgtacctgaattgtagtgacccact

SEQ ID NO: 32024 - DNA, 51 bp, Homo sapiens
caagataaggcgccactacataaaaggattcagaaagtccaagggctctag

SEQ ID NO: 32025 - DNA, 33 bp, Homo sapiens
taaaactgtactgtgtaacaaaactcctgttct

SEQ ID NO: 32026 - DNA, 33 bp, Homo sapiens
gggacaatcttggagaaacgtcaactgaagtgc

SEQ ID NO: 32027 - DNA, 33 bp, Homo sapiens
gtctcaactggtttaaactggacaggacctgcc

SEQ ID NO: 32028 - DNA, 51 bp, Homo sapiens
aactatcatagaagcttcaaatgacaatagtttaccttctccttttaaatt

SEQ ID NO: 32029 - DNA, 33 bp, Homo sapiens
cacccttaacaaacccacaagtgcaaaccataa

SEQ ID NO: 32030 - DNA, 33 bp, Homo sapiens
tctttctaaggcagaaaagtagacacaggttct

SEQ ID NO: 32031 - DNA, 33 bp, Homo sapiens
gtcgggtttctgcatagctctttgcccaaccaa

SEQ ID NO: 32032 - DNA, 33 bp, Homo sapiens
tgtgatttgagacaaagaattccaaatgtatat

SEQ ID NO: 32033 - DNA, 33 bp, Homo sapiens
ttcttactgttggtcaacaaagagctttttcta

SEQ ID NO: 32034 - DNA, 33 bp, Homo sapiens
aaaggtgagaagtccacgcttcactctgtagcc

SEQ ID NO: 32035 - DNA, 33 bp, Homo sapiens
ttctccttcctgagcaggacttgagcaagcata

SEQ ID NO: 32036 - DNA, 33 bp, Homo sapiens
gacagagagggaatggaaagaccagtcttgcac

SEQ ID NO: 32037 - DNA, 51 bp, Homo sapiens
tttaaaattttgaatatctacaccacggtggtttgtaagttagcttcccta

SEQ ID NO: 32038 - DNA, 33 bp, Homo sapiens
ctgcaacaaagctgaactaaagatgaagtgcaa

SEQ ID NO: 32039 - DNA, 33 bp, Homo sapiens
gtgttatattggccaccacccagagatacccag

SEQ ID NO: 32040 - DNA, 33 bp, Homo sapiens
atatcgtgatgtgttacgtcctgttgactttta

SEQ ID NO: 32041 - DNA, 33 bp, Homo sapiens
aagactagattcaagacgagattgcttcatgtg

SEQ ID NO: 32042 - DNA, 33 bp, Homo sapiens
gtgagttcttgctgctcactgttgtttgtttgt

SEQ ID NO: 32043 - DNA, 33 bp, Homo sapiens
atgaagatttttgtcaagggctgccattacatg

SEQ ID NO: 32044 - DNA, 33 bp, Homo sapiens
gggaacaacaattcaaatggctgcagatttctc

SEQ ID NO: 32045 - DNA, 33 bp, Homo sapiens
ttcctctgttctcacaacacaaaagccaacaca

SEQ ID NO: 32046 - DNA, 33 bp, Homo sapiens
tgttccatgatctttcccttgcaaataagcctc

SEQ ID NO: 32047 - DNA, 33 bp, Homo sapiens
tatcttacacatccatgagctacaactgttaac

SEQ ID NO: 32048 - DNA, 33 bp, Homo sapiens
acatgcaatccttaaactccatccaggtagagg

SEQ ID NO: 32049 - DNA, 33 bp, Homo sapiens
agcctttgatatttccagagtcaatacctgctt

SEQ ID NO: 32050 - DNA, 33 bp, Homo sapiens
agggcagccaacaacacgattaaagggctggaa

SEQ ID NO: 32051 - DNA, 33 bp, Homo sapiens
tacctatttaatgactaaacccaaaactaccat

SEQ ID NO: 32052 - DNA, 33 bp, Homo sapiens
aggcaagcgaccagtacgaaagacgtttgccaa

SEQ ID NO: 32053 - DNA, 33 bp, Homo sapiens
cttgttgtgagagaaaacgtgacctgttctcag

SEQ ID NO: 32054 - DNA, 33 bp, Homo sapiens
gtagtctatccctttcactacaaaaatatccaa

SEQ ID NO: 32055 - DNA, 33 bp, Homo sapiens
agctagatgacaaagagccacattcagacttga

SEQ ID NO: 32056 - DNA, 33 bp, Homo sapiens
tatttttatacaacaaattcccactcctaacat

SEQ ID NO: 32057 - DNA, 33 bp, Homo sapiens
acacacacacatttcaatctccaggagaaactt

SEQ ID NO: 32058 - DNA, 33 bp, Homo sapiens
gactaaattaatatcaaactgaggtgagccagt

SEQ ID NO: 32059 - DNA, 33 bp, Homo sapiens
aaaccatcatcctagaatatcagaccaaaagtg

SEQ ID NO: 32060 - DNA, 33 bp, Homo sapiens
tggatgacaaatctcacaaggactctaagggat

SEQ ID NO: 32061 - DNA, 33 bp, Homo sapiens
caggcacaatcatagcacctaccaattcttcag

SEQ ID NO: 32062 - DNA, 33 bp, Homo sapiens
gatgactgcttgtgtacgcttttggatgttgct

SEQ ID NO: 32063 - DNA, 33 bp, Homo sapiens
atgcagacaagattacagagaaaagaatgcaaa

SEQ ID NO: 32064 - DNA, 33 bp, Homo sapiens
agctaaagctatgccccaaatgctgtcaggcta

SEQ ID NO: 32065 - DNA, 33 bp, Homo sapiens
tggaatatggcattccccaaaaaaattaaacgt

SEQ ID NO: 32066 - DNA, 33 bp, Homo sapiens
agagcaaaggtaaacacggtgaaaggtcctgca

SEQ ID NO: 32067 - DNA, 33 bp, Homo sapiens
gggcatagaaataagaccaagtggccaaaggtg

SEQ ID NO: 32068 - DNA, 33 bp, Homo sapiens
gcctgcaacagggataaagaatgaacagccaga

SEQ ID NO: 32069 - DNA, 33 bp, Homo sapiens
atgtgtacattccagacatccaggaaagatggc

SEQ ID NO: 32070 - DNA, 33 bp, Homo sapiens
ctctgttggtattcacaaccatttcttgcatga

SEQ ID NO: 32071 - DNA, 33 bp, Homo sapiens
ggatgggagcctcagacgacactggggtctggg

SEQ ID NO: 32072 - DNA, 33 bp, Homo sapiens
atatggtagctagaaacagagggctctttcctc

SEQ ID NO: 32073 - DNA, 33 bp, Homo sapiens
tgacttcttcagcaaagaaattataaggaaaaa

SEQ ID NO: 32074 - DNA, 33 bp, Homo sapiens
aatgaaaatcaagaaacctagcaatggctggtg

SEQ ID NO: 32075 - DNA, 33 bp, Homo sapiens
ggccggggaagtcagacgtgtattataacaaga

SEQ ID NO: 32076 - DNA, 33 bp, Homo sapiens
tttgactcttcagggacctagcactcttcccac

SEQ ID NO: 32077 - DNA, 33 bp, Homo sapiens
gttgatgcaatactgacgtttagatttcagtca

SEQ ID NO: 32078 - DNA, 33 bp, Homo sapiens
gttgaagcaataaatcaaaaacccactgataat

SEQ ID NO: 32079 - DNA, 33 bp, Homo sapiens
cactggcactgtgagcgccttcaaaaattccta

SEQ ID NO: 32080 - DNA, 33 bp, Homo sapiens
caaagcataatttgtacgacggatctgtgtgtt

SEQ ID NO: 32081 - DNA, 33 bp, Homo sapiens
ccctgtgaaaaagccacattagacactgtgggt

SEQ ID NO: 32082 - DNA, 33 bp, Homo sapiens
tcctctgtcatcagcgcatggaagtcttgtttg

SEQ ID NO: 32083 - DNA, 33 bp, Homo sapiens
cttgcaaatttttccaggctagtcaatcattat

SEQ ID NO: 32084 - DNA, 33 bp, Homo sapiens
ctggcattgtaatcaccggctctgttatggatt

SEQ ID NO: 32085 - DNA, 33 bp, Homo sapiens
atagcttggactgcatcaagtgcctctggggtt

SEQ ID NO: 32086 - DNA, 33 bp, Homo sapiens
cctcactttgtgctccaaacaacagtactccag

SEQ ID NO: 32087 - DNA, 33 bp, Homo sapiens
aagcatgggttctggacaccgggagtaaaagca

SEQ ID NO: 32088 - DNA, 33 bp, Homo sapiens
ccctttctattgagaaccagtttcttgctttgt

SEQ ID NO: 32089 - DNA, 33 bp, Homo sapiens
tccctagttggcattcagaacatttttccccat

SEQ ID NO: 32090 - DNA, 33 bp, Homo sapiens
gtgagctacacagacaaaagtttctccagtatg

SEQ ID NO: 32091 - DNA, 51 bp, Homo sapiens
gattatttgaggctgagataataaactgtctaagaagcaaccatttttctc

SEQ ID NO: 32092 - DNA, 33 bp, Homo sapiens
aaattgcaaatgtaaacgctttagaagacaaca

SEQ ID NO: 32093 - DNA, 51 bp, Homo sapiens
aggagaagtctctacaaactaaagagctctgtaaacatctactcaggtccc

SEQ ID NO: 32094 - DNA, 33 bp, Homo sapiens
tgatagctgtttttcaaagtaaatataaactgt

SEQ ID NO: 32095 - DNA, 33 bp, Homo sapiens
cagggctataggagccaagttcagtgggagctc

SEQ ID NO: 32096 - DNA, 51 bp, Homo sapiens
atgtcaaagcatgtgaaattataacactgggcccttgccaaaaaatacaat

SEQ ID NO: 32097 - DNA, 33 bp, Homo sapiens
cctggtgacagcccccacatacctgtgctcagt

SEQ ID NO: 32098 - DNA, 51 bp, Homo sapiens
tggccatcttaattagcttcctaaacgattattacatcaaagtatgtcact

SEQ ID NO: 32099 - DNA, 33 bp, Homo sapiens
gtttagctttccagtcacattactctttcccag

SEQ ID NO: 32100 - DNA, 33 bp, Homo sapiens
ataaactcacaaacgaactcaggatggactgtt

SEQ ID NO: 32101 - DNA, 33 bp, Homo sapiens
tccaggaaagacgatcgcctcaccaacacaagc

SEQ ID NO: 32102 - DNA, 33 bp, Homo sapiens
tggtaacattgtctgccaggtgttcaattgttg

SEQ ID NO: 32103 - DNA, 33 bp, Homo sapiens
gtcataggtgctattacgtcaaagggtatagtg

SEQ ID NO: 32104 - DNA, 51 bp, Homo sapiens
tgtagaattttatgtcttttatagaactcattggtggtgtagtgggcactg

SEQ ID NO: 32105 - DNA, 33 bp, Homo sapiens
actacttgtctacatactaagaggagagctgca

SEQ ID NO: 32106 - DNA, 51 bp, Homo sapiens
tgctcagaatgcaagaaagctttgcaccagaaccgttaaacattcatgaac

SEQ ID NO: 32107 - DNA, 33 bp, Homo sapiens
aagatggtgacgtgaaccaaatgcagaaagaca

SEQ ID NO: 32108 - DNA, 33 bp, Homo sapiens
ctctagtcaaacagccagaacactctctccctg

SEQ ID NO: 32109 - DNA, 33 bp, Homo sapiens
atgtagatgttactaccccacaagcagagggag

SEQ ID NO: 32110 - DNA, 33 bp, Homo sapiens
ctttcgtggtttgccaacttgagagtatgtcac

SEQ ID NO: 32111 - DNA, 33 bp, Homo sapiens
tcactctggggccccacgaatttgcgttgttct

SEQ ID NO: 32112 - DNA, 33 bp, Homo sapiens
actaaccttgcctttacgaggtaggaggtggga

SEQ ID NO: 32113 - DNA, 33 bp, Homo sapiens
tctgtcctgaggaaatgaagagtccagttcctg

SEQ ID NO: 32114 - DNA, 33 bp, Homo sapiens
cccttgacaccatcaacgtactttcttcatcct

SEQ ID NO: 32115 - DNA, 33 bp, Homo sapiens
tgacattagctgaccactctgtagtccttgaaa

SEQ ID NO: 32116 - DNA, 51 bp, Homo sapiens
aaagaatctagggtcagtaaagaaacctaattgttataaatccatctttat

SEQ ID NO: 32117 - DNA, 33 bp, Homo sapiens
cttctctgactttgacacctacactctattttt

SEQ ID NO: 32118 - DNA, 33 bp, Homo sapiens
atatacaaagcattcaataaatacagaaattat

SEQ ID NO: 32119 - DNA, 33 bp, Homo sapiens
atcactgcaacaggaaagtaattttcaccccac

SEQ ID NO: 32120 - DNA, 33 bp, Homo sapiens
tatggtgcaaaaccaacaatcatagcagcctca

SEQ ID NO: 32121 - DNA, 33 bp, Homo sapiens
aatccaaaggtacaaaataagagtgtggctaag

SEQ ID NO: 32122 - DNA, 33 bp, Homo sapiens
caaattttaagttttacagtcactatattgtct

SEQ ID NO: 32123 - DNA, 33 bp, Homo sapiens
agtgctttctctgacaaattgcatggtggatag

SEQ ID NO: 32124 - DNA, 51 bp, Homo sapiens
cttttggaaggaaaaaaaggccataataaatatccatttccaggattgtat

SEQ ID NO: 32125 - DNA, 33 bp, Homo sapiens
tctcaaggcccttccaatctatttctggcctat

SEQ ID NO: 32126 - DNA, 33 bp, Homo sapiens
cattgtaatccttatccacctacccttgacttt

SEQ ID NO: 32127 - DNA, 33 bp, Homo sapiens
tggcagagaaagggagaccatctttcgtgtctt

SEQ ID NO: 32128 - DNA, 33 bp, Homo sapiens
agtcaggatgtgaaacaccattaagtataacag

SEQ ID NO: 32129 - DNA, 51 bp, Homo sapiens
tccaacatcactcctttgtgcgaccagcccatgggaagctaagatgagtcc

SEQ ID NO: 32130 - DNA, 33 bp, Homo sapiens
atcccaaatccaacacagcatctatttgagaga

SEQ ID NO: 32131 - DNA, 33 bp, Homo sapiens
aacttctgaggtcagccaccatatcttcctcta

SEQ ID NO: 32132 - DNA, 33 bp, Homo sapiens
aatatcttaattaaacacacatctgagaacctt

SEQ ID NO: 32133 - DNA, 33 bp, Homo sapiens
agtgacaggttctgaaataaacaggccttcggt

SEQ ID NO: 32134 - DNA, 33 bp, Homo sapiens
caccaaaagccaagccaattctggcaccatgct

SEQ ID NO: 32135 - DNA, 33 bp, Homo sapiens
ttctggcattgcacaaataataaaaaagtaatc

SEQ ID NO: 32136 - DNA, 33 bp, Homo sapiens
aagtacttccatccaaaaggtgattgactgtac

SEQ ID NO: 32137 - DNA, 51 bp, Homo sapiens
agttctgaaacccaaaatgtcggcaatataagcgcacatcagttaacatac

SEQ ID NO: 32138 - DNA, 33 bp, Homo sapiens
aaaagaaatgtcagcaaaattttcagatagtat

SEQ ID NO: 32139 - DNA, 33 bp, Homo sapiens
tgctagatgatagcaactgattttggagcaaca

SEQ ID NO: 32140 - DNA, 33 bp, Homo sapiens
aaagagctacagttataagatagaagaggttag

SEQ ID NO: 32141 - DNA, 33 bp, Homo sapiens
tttacaatagtgttaagcaattcataagggtgg

SEQ ID NO: 32142 - DNA, 33 bp, Homo sapiens
gtgtgttggtatgatgacagtgttttcctaaag

SEQ ID NO: 32143 - DNA, 33 bp, Homo sapiens
attcctgttgagtcaaaccaccatagaatatcc

SEQ ID NO: 32144 - DNA, 51 bp, Homo sapiens
gcacaaagtaagaaaacaaggaagactcggagctgatctcatacctcgctg

SEQ ID NO: 32145 - DNA, 33 bp, Homo sapiens
agagctgttaatgttccctgaagactttcctgc

SEQ ID NO: 32146 - DNA, 33 bp, Homo sapiens
attacccttaaaagtacacctcccagtgaatcc

SEQ ID NO: 32147 - DNA, 33 bp, Homo sapiens
acgaacgaaaaagcagcagaagctgaattgcag

SEQ ID NO: 32148 - DNA, 33 bp, Homo sapiens
actctggaaaggaacacaagtggatataaaaag

SEQ ID NO: 32149 - DNA, 33 bp, Homo sapiens
tttggggtcataaaacacaatctttggaaatat

SEQ ID NO: 32150 - DNA, 33 bp, Homo sapiens
acctgtaacaatagccaagaagtaagtaaaaac

SEQ ID NO: 32151 - DNA, 33 bp, Homo sapiens
ctaaatgtttcaggaaagaccttgcaaggacac

SEQ ID NO: 32152 - DNA, 33 bp, Homo sapiens
tcaagcaggagaaagaagaatgagccaaaagca

SEQ ID NO: 32153 - DNA, 33 bp, Homo sapiens
gtagaaagttcctctgaagttgatcacaaatta

SEQ ID NO: 32154 - DNA, 33 bp, Homo sapiens
caactagagtattgtaaattggaggaaagctgt

SEQ ID NO: 32155 - DNA, 33 bp, Homo sapiens
aggcagatggcggatactaggaataaggtctag

SEQ ID NO: 32156 - DNA, 51 bp, Homo sapiens
cccgactaattaaagggctaaaatacatgtatagatagttataattctaga

SEQ ID NO: 32157 - DNA, 33 bp, Homo sapiens
tgcacaaatatatatcccatcccacatgctctt

SEQ ID NO: 32158 - DNA, 51 bp, Homo sapiens
acagatgagtacagtttcaatcacacggtggtcgactgcggctgctgtgcc

SEQ ID NO: 32159 - DNA, 51 bp, Homo sapiens
gactccattcattacttgattcttaaaaggccccacttcaacaaggggtcc

SEQ ID NO: 32160 - DNA, 33 bp, Homo sapiens
attgcctttgaataaacgggactactactacta

SEQ ID NO: 32161 - DNA, 33 bp, Homo sapiens
acccaacctctctattaaaagtcattagcaagt

SEQ ID NO: 32162 - DNA, 33 bp, Homo sapiens
gctatatgccctcacaaattcttctactaaact

SEQ ID NO: 32163 - DNA, 33 bp, Homo sapiens
agtacacaaggtcagcagacgaaaaattcctag

SEQ ID NO: 32164 - DNA, 33 bp, Homo sapiens
ggcagtcaagttcaaaaccaaacgttgaatgct

SEQ ID NO: 32165 - DNA, 51 bp, Homo sapiens
gtaaaaaggcagcaatgtttccataagatctgcttcatactgctggttttc

SEQ ID NO: 32166 - DNA, 33 bp, Homo sapiens
cctcaaatgacggtgaagattccacattgatat

SEQ ID NO: 32167 - DNA, 33 bp, Homo sapiens
tctcttgtttgctgaaaataagacacaaaagtt

SEQ ID NO: 32168 - DNA, 33 bp, Homo sapiens
agcacttgaaaagcaaacacaggtaatagtttt

SEQ ID NO: 32169 - DNA, 33 bp, Homo sapiens
tatatagaggaggaacacaatacctgctttgtg

SEQ ID NO: 32170 - DNA, 33 bp, Homo sapiens
gagttcaggtttattccaagtgaagcgggaagc

SEQ ID NO: 32171 - DNA, 33 bp, Homo sapiens
tttttttctgaaatgaagttgatgtatcctaag

SEQ ID NO: 32172 - DNA, 33 bp, Homo sapiens
ttaagtctctggaaaaaaggtaacgaacgtcaa

SEQ ID NO: 32173 - DNA, 33 bp, Homo sapiens
acacataagcaaatagcagggaacgtgaaaggg

SEQ ID NO: 32174 - DNA, 33 bp, Homo sapiens
ctataaaaagcaacccaaggagaactttcatgt

SEQ ID NO: 32175 - DNA, 33 bp, Homo sapiens
agctatggttgttgaaatgtggtccctggagca

SEQ ID NO: 32176 - DNA, 33 bp, Homo sapiens
ccagacagtttcaagaatcccttccgagtatga

SEQ ID NO: 32177 - DNA, 33 bp, Homo sapiens
ggaaagcttgcaagaaattagtagaacacttga

SEQ ID NO: 32178 - DNA, 33 bp, Homo sapiens
agatatatgataggtacgtaggtagataggtag

SEQ ID NO: 32179 - DNA, 33 bp, Homo sapiens
aagcaattttttaatacgtgaatctgagaagag

SEQ ID NO: 32180 - DNA, 33 bp, Homo sapiens
actattagtgatacacagaacaagagcatggat

SEQ ID NO: 32181 - DNA, 33 bp, Homo sapiens
tatgatgtcccatgccagcagagagtgagaaag

SEQ ID NO: 32182 - DNA, 33 bp, Homo sapiens
tattgtttggtcattaataaaatagtgataata

SEQ ID NO: 32183 - DNA, 33 bp, Homo sapiens
ggcagcgaataaaagcaaatcatttaaaatcat

SEQ ID NO: 32184 - DNA, 33 bp, Homo sapiens
agttatgtaaacaggaagtgcagcatagtgtct

SEQ ID NO: 32185 - DNA, 33 bp, Homo sapiens
ctgcctgatgtgctgaactctgtacaactttgc

SEQ ID NO: 32186 - DNA, 33 bp, Homo sapiens
agaatcaaagtcaagacgcctcctgaatatact

SEQ ID NO: 32187 - DNA, 33 bp, Homo sapiens
tctacttctctcacccccttcaaagccaggctt

SEQ ID NO: 32188 - DNA, 33 bp, Homo sapiens
acccatttctaaaacaagtcttgataggaatga

SEQ ID NO: 32189 - DNA, 33 bp, Homo sapiens
cctgcgagctctgttacgaaggaaatcgaaagc

SEQ ID NO: 32190 - DNA, 51 bp, Homo sapiens
atgtcagattagagaaaccaaacaacgtgacggtacatgtgatgaaaagct

SEQ ID NO: 32191 - DNA, 33 bp, Homo sapiens
tttatcgggtggtttacaggctctttatcatgg

SEQ ID NO: 32192 - DNA, 33 bp, Homo sapiens
acgaaaactagctagacatggtagtgcgtgctt

SEQ ID NO: 32193 - DNA, 51 bp, Homo sapiens
gcctaagagatttattagctaaatacatgagtagtccttgtttggattcta

SEQ ID NO: 32194 - DNA, 33 bp, Homo sapiens
atgcaaggatagggtaataattcatctctagtc

SEQ ID NO: 32195 - DNA, 33 bp, Homo sapiens
atggctactaggcccacgtctaacaattcctca

SEQ ID NO: 32196 - DNA, 33 bp, Homo sapiens
cagttggctgaaattacaagaaagaatttggac

SEQ ID NO: 32197 - DNA, 33 bp, Homo sapiens
tgtttcaacgtgtctacgactacctgtctttta

SEQ ID NO: 32198 - DNA, 33 bp, Homo sapiens
ctttgccctgttttcacctttcttgttacacaa

SEQ ID NO: 32199 - DNA, 33 bp, Homo sapiens
ctatacgaagctaactcacctgtctcaggaata

SEQ ID NO: 32200 - DNA, 33 bp, Homo sapiens
cttaattgtcctacaaggtctcggataccagtt

SEQ ID NO: 32201 - DNA, 33 bp, Homo sapiens
gtttaataactttagacaggtttgaagaggtgg

SEQ ID NO: 32202 - DNA, 51 bp, Homo sapiens
aggtgttgggaattcccgagaaagcagatcggcattattgtttattgcttg

SEQ ID NO: 32203 - DNA, 33 bp, Homo sapiens
tctacattcagatatgcagccatagaatcagag

SEQ ID NO: 32204 - DNA, 33 bp, Homo sapiens
tggttattttatgttgaactctttaggaactgc

SEQ ID NO: 32205 - DNA, 33 bp, Homo sapiens
tctctgcgggcacagacctaaagggggatgcag

SEQ ID NO: 32206 - DNA, 33 bp, Homo sapiens
aggccagcagaaggaaaacaatcttccctaaaa

SEQ ID NO: 32207 - DNA, 33 bp, Homo sapiens
ctctgtggtgaggatacggttattcattgtact

SEQ ID NO: 32208 - DNA, 33 bp, Homo sapiens
tgtctgttgctccagaacgaatacaagttctta

SEQ ID NO: 32209 - DNA, 33 bp, Homo sapiens
gaggtggtattcttacaatgaatgcagttgatt

SEQ ID NO: 32210 - DNA, 33 bp, Homo sapiens
ggggctggtctcataacggaaagggataattat

SEQ ID NO: 32211 - DNA, 33 bp, Homo sapiens
tgcaaagatcaattgaagccaccaggagttcgc

SEQ ID NO: 32212 - DNA, 33 bp, Homo sapiens
aaatctttgagaagaactcatgacggaaccaca

SEQ ID NO: 32213 - DNA, 33 bp, Homo sapiens
cttcagatcaccatcaaagaattgctaaaatga

SEQ ID NO: 32214 - DNA, 33 bp, Homo sapiens
ctttgtacagagttgaaacaggatgacatgaca

SEQ ID NO: 32215 - DNA, 33 bp, Homo sapiens
catgctatccaataaaaatgatgtctttcaaac

SEQ ID NO: 32216 - DNA, 33 bp, Homo sapiens
tctccttaatgtatcccgaggtaagtttcctac

SEQ ID NO: 32217 - DNA, 33 bp, Homo sapiens
gactggcagaagaaagccttgtccatacgcagg

SEQ ID NO: 32218 - DNA, 33 bp, Homo sapiens
acatagcaatggttgcaaggagttaatgaggta

SEQ ID NO: 32219 - DNA, 33 bp, Homo sapiens
gccagagggttagaagaagaattatgtgtcttc

SEQ ID NO: 32220 - DNA, 33 bp, Homo sapiens
tctaaacaagtgaaaaacaatagctgaaaaatt

SEQ ID NO: 32221 - DNA, 33 bp, Homo sapiens
ctttgttattttgaaaatgaaagtctgagcaga

SEQ ID NO: 32222 - DNA, 51 bp, Homo sapiens
tcaactttccacctctgttaactacactgcagaaacttttgacactgaact

SEQ ID NO: 32223 - DNA, 51 bp, Homo sapiens
gcgattctttcactggaagggatgactcagagaggaagagttggcattaat

SEQ ID NO: 32224 - DNA, 33 bp, Homo sapiens
actgtgagcagtgaaacctgtatctgtgcaacg

SEQ ID NO: 32225 - DNA, 33 bp, Homo sapiens
tgccagccacttcttacagacagcctactcacc

SEQ ID NO: 32226 - DNA, 33 bp, Homo sapiens
cagtgctttgcccgtacagacaattcaacaaat

SEQ ID NO: 32227 - DNA, 33 bp, Homo sapiens
tttattaatttaatcagcagtttgcgtcattgc

SEQ ID NO: 32228 - DNA, 33 bp, Homo sapiens
ctcaaggctttcatcaaaatgttcagttcttgc

SEQ ID NO: 32229 - DNA, 33 bp, Homo sapiens
tttccaaaatcgtgcaaggtttctattctgtag

SEQ ID NO: 32230 - DNA, 51 bp, Homo sapiens
tctcagtttggggaaacatcagaataatcataaatggagataatttatgtg

SEQ ID NO: 32231 - DNA, 51 bp, Homo sapiens
ttatgttgtccactggaatggaacaaaattaagaaggcctatgaatttatg

SEQ ID NO: 32232 - DNA, 51 bp, Homo sapiens
tcagccaaagtgtgtgccactgtctcacataaaacgaagatgtttcctgaa

SEQ ID NO: 32233 - DNA, 33 bp, Homo sapiens
gaagcaaagccccacaactatgtgatcttgaga

SEQ ID NO: 32234 - DNA, 33 bp, Homo sapiens
cgttggtctacagaaaaaggaatgactgcattg

SEQ ID NO: 32235 - DNA, 33 bp, Homo sapiens
gtgcaatactttgagacgatgatcttcaatcct

SEQ ID NO: 32236 - DNA, 51 bp, Homo sapiens
  45: IBRDC2 , rs490618,  IBR domain containing 2 ,p22.3
aatatcttgattacagggggtaaggatgtctcatatcagtatcangctaga

SEQ ID NO: 32237 - DNA, 33 bp, Homo sapiens
ctgtgtaaatctttgaataagagggcagcagca

SEQ ID NO: 32238 - DNA, 33 bp, Homo sapiens
gggagggcagaggtaccagtagatagaggaagg

SEQ ID NO: 32239 - DNA, 33 bp, Homo sapiens
caactcagtactctggccacttcatgtgttcat

SEQ ID NO: 32240 - DNA, 51 bp, Homo sapiens
catctaggctaaataaattacgtaaagaattatgtgattacttattgtgtt

SEQ ID NO: 32241 - DNA, 33 bp, Homo sapiens
acatttttacatatacaaaagctgaaaaagtgc

SEQ ID NO: 32242 - DNA, 33 bp, Homo sapiens
gaagcacccgtctgctaacaccattagagcctt

SEQ ID NO: 32243 - DNA, 33 bp, Homo sapiens
aggagaccaggttagagaatgacccgggaagga

SEQ ID NO: 32244 - DNA, 33 bp, Homo sapiens
gaggtgtctttaaacacaagcacacataaaaca

SEQ ID NO: 32245 - DNA, 33 bp, Homo sapiens
caccttcataatctccacattgccacttccagc

SEQ ID NO: 32246 - DNA, 33 bp, Homo sapiens
ccttagctgctatttacaagtccatttcatcag

SEQ ID NO: 32247 - DNA, 33 bp, Homo sapiens
aaagaaaacccagtgcagaaatggacaataaga

SEQ ID NO: 32248 - DNA, 33 bp, Homo sapiens
atagtagccataaaaccgttctgtgttcttatc

SEQ ID NO: 32249 - DNA, 51 bp, Homo sapiens
tcttacctgctcaggttgtggaatcaagttctaggattgagattctggcat

SEQ ID NO: 32250 - DNA, 51 bp, Homo sapiens
tcaaattgaggccatacaaattaatcaagtgtttctactgaagctacccaa

SEQ ID NO: 32251 - DNA, 33 bp, Homo sapiens
acctgagccttctgcacggtgacactgattttt

SEQ ID NO: 32252 - DNA, 51 bp, Homo sapiens
aattaagaagccaaacagtttaccaaaaagcttggccaataacttttctca

SEQ ID NO: 32253 - DNA, 33 bp, Homo sapiens
ttgctaaccagtcgccagaattatcccctatag

SEQ ID NO: 32254 - DNA, 33 bp, Homo sapiens
ccatgtggcaccttccagcagtactttcaaggg

SEQ ID NO: 32255 - DNA, 33 bp, Homo sapiens
tcaggaccttttacacaatactttatccactca

SEQ ID NO: 32256 - DNA, 33 bp, Homo sapiens
aacctttgcatattccgctttaatgaactctga

SEQ ID NO: 32257 - DNA, 33 bp, Homo sapiens
caatcaaattttagcaacatccacgaacttaat

SEQ ID NO: 32258 - DNA, 33 bp, Homo sapiens
aaatcagcttgtctgacggggctacacagagaa

SEQ ID NO: 32259 - DNA, 33 bp, Homo sapiens
catctatttatcctaaacgaagaccttttaaaa

SEQ ID NO: 32260 - DNA, 33 bp, Homo sapiens
ttgctagattgggagaacatttctactgataag

SEQ ID NO: 32261 - DNA, 51 bp, Homo sapiens
cgccttctcccttctaatctcagtcactagttgttaccattaattaaccct

SEQ ID NO: 32262 - DNA, 33 bp, Homo sapiens
ggatgaagcatttaatcagtcagggaatagtaa

SEQ ID NO: 32263 - DNA, 33 bp, Homo sapiens
attgaaaagctaagtcaaggcactggtgtagaa

SEQ ID NO: 32264 - DNA, 33 bp, Homo sapiens
tttattttattttttaacatggcagctttcaga

SEQ ID NO: 32265 - DNA, 33 bp, Homo sapiens
tgaacattgcacaaagaaaaagccaatgcatca

SEQ ID NO: 32266 - DNA, 33 bp, Homo sapiens
ttcagtttttcctccacgctttactcatgactg

SEQ ID NO: 32267 - DNA, 33 bp, Homo sapiens
taccttatatacaggaaggatgttacacaattt

SEQ ID NO: 32268 - DNA, 33 bp, Homo sapiens
actttattagagaacacgggtgtccaaaatata

SEQ ID NO: 32269 - DNA, 33 bp, Homo sapiens
ctatattctttatcagacaccattatcctctgt

SEQ ID NO: 32270 - DNA, 33 bp, Homo sapiens
attattagtaaaagatgaatgtgttccaacggc

SEQ ID NO: 32271 - DNA, 33 bp, Homo sapiens
ttctgtgaaccactgacgatttctcactgccta

SEQ ID NO: 32272 - DNA, 51 bp, Homo sapiens
acatgatcttgcagcaaatcttgaaaaactctatggaattaacagaacatc

SEQ ID NO: 32273 - DNA, 33 bp, Homo sapiens
aggggtcagagagagcaccttgaatcactgcca

SEQ ID NO: 32274 - DNA, 51 bp, Homo sapiens
caaaagcttcacgaagttatagtcacgagcagggacagaaatgaggaggaa

SEQ ID NO: 32275 - DNA, 33 bp, Homo sapiens
cggaaaataacacaaaatcacgatctatgaaag

SEQ ID NO: 32276 - DNA, 33 bp, Homo sapiens
gtttttcttggctttgaatacacctgtgcagat

SEQ ID NO: 32277 - DNA, 33 bp, Homo sapiens
cagtatatttgtggaacgcccagctttccttct

SEQ ID NO: 32278 - DNA, 33 bp, Homo sapiens
taacaactacttgagaatatgtgtgtcagaaag

SEQ ID NO: 32279 - DNA, 33 bp, Homo sapiens
tcttactccagctttacgataactctaagggac

SEQ ID NO: 32280 - DNA, 33 bp, Homo sapiens
gaatagtagaaaacagcaagagggtctcgatag

SEQ ID NO: 32281 - DNA, 33 bp, Homo sapiens
tgttatcctagctccacgtttttttcttttttg

SEQ ID NO: 32282 - DNA, 33 bp, Homo sapiens
tagtcaagaaactcaaatccaacacgggtatct

SEQ ID NO: 32283 - DNA, 33 bp, Homo sapiens
cagtaagttagatggcgcagagataggattgaa

SEQ ID NO: 32284 - DNA, 33 bp, Homo sapiens
tacgatgttgccctaaccctcagggagtgtaca

SEQ ID NO: 32285 - DNA, 33 bp, Homo sapiens
ccagagccagtactctcaaccattaagcggaag

SEQ ID NO: 32286 - DNA, 33 bp, Homo sapiens
aaataatactctggaaagaagtctctgatcacc

SEQ ID NO: 32287 - DNA, 33 bp, Homo sapiens
atgttccagctgtaagaagaaagcatatccttc

SEQ ID NO: 32288 - DNA, 33 bp, Homo sapiens
tcgattaccagttgcacgtagaattacttttgt

SEQ ID NO: 32289 - DNA, 33 bp, Homo sapiens
cttatcactgagcaacaatttgaggagagtcgg

SEQ ID NO: 32290 - DNA, 33 bp, Homo sapiens
cttagtggcactgaacaaacatatttcagtgtc

SEQ ID NO: 32291 - DNA, 51 bp, Homo sapiens
ttagttgtattacggtaatcgggcacatgtcttctaaccttgatgatctca

SEQ ID NO: 32292 - DNA, 33 bp, Homo sapiens
gtgaggacttactgtacactctcatgacttcac

SEQ ID NO: 32293 - DNA, 33 bp, Homo sapiens
tgggagagtgtgataaaagcgggtgaggaaagt

SEQ ID NO: 32294 - DNA, 33 bp, Homo sapiens
actggaagattccacaaacgttggaaggctagg

SEQ ID NO: 32295 - DNA, 51 bp, Homo sapiens
aatgtgagagactgaatagagagtgatctgaacaactaagccagggaatgt

SEQ ID NO: 32296 - DNA, 33 bp, Homo sapiens
agcttcacaaacacaactacctgttactaaaat

SEQ ID NO: 32297 - DNA, 33 bp, Homo sapiens
taatcatagcaagctaaaggcctgaatgatagt

SEQ ID NO: 32298 - DNA, 33 bp, Homo sapiens
aatcaaacacatgtaaaaaattcattggttggg

SEQ ID NO: 32299 - DNA, 33 bp, Homo sapiens
tgcccaggctggaaaaatgtactgttttaaacc

SEQ ID NO: 32300 - DNA, 33 bp, Homo sapiens
agaaaccactgaggaacgttgaaatgaaaactg

SEQ ID NO: 32301 - DNA, 33 bp, Homo sapiens
cctatgcccaggtacacattcaaaacagatgag

SEQ ID NO: 32302 - DNA, 33 bp, Homo sapiens
agccacaggaaggttaaagcagaaaaaggactg

SEQ ID NO: 32303 - DNA, 33 bp, Homo sapiens
acaagtttttggttcaaagttctataggtcaga

SEQ ID NO: 32304 - DNA, 33 bp, Homo sapiens
ggggcaaccttcaaccaatttaagcaaaagagg

SEQ ID NO: 32305 - DNA, 33 bp, Homo sapiens
cttctgagaatataatcaatgcctttcaaggtc

SEQ ID NO: 32306 - DNA, 33 bp, Homo sapiens
aagagaaagaacttcaaataaacagtaaaagag

SEQ ID NO: 32307 - DNA, 51 bp, Homo sapiens
agacaagtgtgtctaataaagaggaatagctacagtggctcagttggtaca

SEQ ID NO: 32308 - DNA, 33 bp, Homo sapiens
agctatattaccttcaaagactgtagtttattg

SEQ ID NO: 32309 - DNA, 33 bp, Homo sapiens
gagtatggaatctctacctccagccttgaggtc

SEQ ID NO: 32310 - DNA, 33 bp, Homo sapiens
ttgacgaaaagtttcagccctacctctcaaagt

SEQ ID NO: 32311 - DNA, 33 bp, Homo sapiens
tggttgataaaactgaagtctggaaaatttaag

SEQ ID NO: 32312 - DNA, 33 bp, Homo sapiens
cctgatattgagaataaacactttgagattaga

SEQ ID NO: 32313 - DNA, 33 bp, Homo sapiens
gtgtgtatctgtctcccacatttgtaaggtctc

SEQ ID NO: 32314 - DNA, 33 bp, Homo sapiens
gaatcaccttttcggcgacggacttagggaagc

SEQ ID NO: 32315 - DNA, 33 bp, Homo sapiens
tagtattgggcagatacgataaaacaacttgga

SEQ ID NO: 32316 - DNA, 51 bp, Homo sapiens
tgtaatgaatcaataataaatagcactgaattaagatgtgaccattttatt

SEQ ID NO: 32317 - DNA, 33 bp, Homo sapiens
ggattgggattgttgcaaaatttgagaaactag

SEQ ID NO: 32318 - DNA, 33 bp, Homo sapiens
aaaaaaatttgtaatacgtcctcagtctgctgt

SEQ ID NO: 32319 - DNA, 33 bp, Homo sapiens
ccaggaggaagggaaccgtaaatcgcacccttt

SEQ ID NO: 32320 - DNA, 33 bp, Homo sapiens
tcttgttgcatgtttaacgtttgtctgggatcc

SEQ ID NO: 32321 - DNA, 33 bp, Homo sapiens
gttcactaacacaacccagaaattggcacctga

SEQ ID NO: 32322 - DNA, 33 bp, Homo sapiens
ttgcttcgtaaaagccactcactaatacaacat

SEQ ID NO: 32323 - DNA, 33 bp, Homo sapiens
cagtggtcttcagaaaccgcttagcagagtggc

SEQ ID NO: 32324 - DNA, 33 bp, Homo sapiens
ggaaacatcaagaaatcagttgagtttgacctt

SEQ ID NO: 32325 - DNA, 33 bp, Homo sapiens
aatatatcacacacatcaaaatttcaggtgcag

SEQ ID NO: 32326 - DNA, 33 bp, Homo sapiens
tggcagagatctgagaaagggtgaggaaaaagt

SEQ ID NO: 32327 - DNA, 33 bp, Homo sapiens
agattaggcctaagagcagggtataacaccact

SEQ ID NO: 32328 - DNA, 33 bp, Homo sapiens
gaaccacactatctgaatcaagtgtgagcagtt

SEQ ID NO: 32329 - DNA, 33 bp, Homo sapiens
gggaacaagtagcacaatgagtgtccacaggct

SEQ ID NO: 32330 - DNA, 33 bp, Homo sapiens
atatctatgtgggtcaaggaatgaattgcagtg

SEQ ID NO: 32331 - DNA, 33 bp, Homo sapiens
gagaattaagtggtgaactaaaggataaagtgt

SEQ ID NO: 32332 - DNA, 33 bp, Homo sapiens
ttgctgtgaacctgaaagtgctctataaaaaga

SEQ ID NO: 32333 - DNA, 33 bp, Homo sapiens
ccaataggttctaatacgcaaagaatgccaaga

SEQ ID NO: 32334 - DNA, 33 bp, Homo sapiens
ccattcctccttgacactggatatgcattcttt

SEQ ID NO: 32335 - DNA, 33 bp, Homo sapiens
tacatgtagtagttccactttatcatggttttg

SEQ ID NO: 32336 - DNA, 33 bp, Homo sapiens
tttctatgcccctttacctctaatgtccctatt

SEQ ID NO: 32337 - DNA, 51 bp, Homo sapiens
attaatttttaggcagtcccacataaggtgttaaaggccaaatgcaaggaa

SEQ ID NO: 32338 - DNA, 33 bp, Homo sapiens
ccaggtgtcctgtccagtctcaggttggtcaca

SEQ ID NO: 32339 - DNA, 33 bp, Homo sapiens
agccaccatgccggccaaaaaagcatgtaaact

SEQ ID NO: 32340 - DNA, 33 bp, Homo sapiens
gttgcaggtttccccaaatagagaacatcaata

SEQ ID NO: 32341 - DNA, 33 bp, Homo sapiens
gtctcatagttttctgcatctaaggtaagcgca

SEQ ID NO: 32342 - DNA, 33 bp, Homo sapiens
ggacatatgatgaaaacagggaccacagctgcc

SEQ ID NO: 32343 - DNA, 33 bp, Homo sapiens
ggtgtccttagatcaccggagttaatagtagca

SEQ ID NO: 32344 - DNA, 33 bp, Homo sapiens
agaaatgaaatggaagaatgatctctttggtaa

SEQ ID NO: 32345 - DNA, 33 bp, Homo sapiens
gttggataaagagaagaattttacaggttggaa

SEQ ID NO: 32346 - DNA, 33 bp, Homo sapiens
cgagggactcagaagacctggaatcagaccccc

SEQ ID NO: 32347 - DNA, 33 bp, Homo sapiens
agtggaccatgttctcaaagtgttgtggttgtc

SEQ ID NO: 32348 - DNA, 33 bp, Homo sapiens
aaaatgaactaactcccaataatttacagtagg

SEQ ID NO: 32349 - DNA, 33 bp, Homo sapiens
gctaaaggctcttatgacaacttcttaaaataa

SEQ ID NO: 32350 - DNA, 33 bp, Homo sapiens
caaggcaggcctgttacaggaaagtcaggaccc

SEQ ID NO: 32351 - DNA, 33 bp, Homo sapiens
gcaggcctggtctctacaagctccatgtcccga

SEQ ID NO: 32352 - DNA, 33 bp, Homo sapiens
gaccctgcctcttggcaaatttcagaatctggt

SEQ ID NO: 32353 - DNA, 33 bp, Homo sapiens
gggctgatccatgatgcagactggctaacttca

SEQ ID NO: 32354 - DNA, 33 bp, Homo sapiens
acgagagatgtaagaactgaaggtaccattcct

SEQ ID NO: 32355 - DNA, 33 bp, Homo sapiens
gctgggctctggcttgaatctccagaatatctc

SEQ ID NO: 32356 - DNA, 33 bp, Homo sapiens
ttcaggggtggagtaaaaggagtctctcagttc

SEQ ID NO: 32357 - DNA, 33 bp, Homo sapiens
ctgtgatgtaatatcaatgaaccactcatttcc

SEQ ID NO: 32358 - DNA, 33 bp, Homo sapiens
caggctggatgaataaaaatcctttggcttgga

SEQ ID NO: 32359 - DNA, 33 bp, Homo sapiens
gtcatgatcccatcctcaatgcctagacctcag

SEQ ID NO: 32360 - DNA, 33 bp, Homo sapiens
ggatccattaaccataatagtaaagaaagtcca

SEQ ID NO: 32361 - DNA, 33 bp, Homo sapiens
atggtcttcagatcacacttttagtagcaagaa

SEQ ID NO: 32362 - DNA, 33 bp, Homo sapiens
ccaattttgtgctcaacctctcagtaccagggt

SEQ ID NO: 32363 - DNA, 33 bp, Homo sapiens
tgtacctccctattacaagttccttgacctgcc

SEQ ID NO: 32364 - DNA, 33 bp, Homo sapiens
tgggccgccgctcatcaaaatgtgagtaattgt

SEQ ID NO: 32365 - DNA, 33 bp, Homo sapiens
tatggtggttgactaaaatcagaatgaccgggg

SEQ ID NO: 32366 - DNA, 33 bp, Homo sapiens
atgggaaggtttgtgacaaggagctttaaggat

SEQ ID NO: 32367 - DNA, 33 bp, Homo sapiens
agtttttttcaattcaatctacgaagccagcta

SEQ ID NO: 32368 - DNA, 33 bp, Homo sapiens
agccctccccagatcacagccgtctttactatt

SEQ ID NO: 32369 - DNA, 33 bp, Homo sapiens
ccaggaggaaccgtcaacaggacacacactcat

SEQ ID NO: 32370 - DNA, 33 bp, Homo sapiens
gctgtgaatctgtcaaccactgggaactggcag

SEQ ID NO: 32371 - DNA, 33 bp, Homo sapiens
atttcatctttaacaaacttatacacacaaaat

SEQ ID NO: 32372 - DNA, 33 bp, Homo sapiens
cttcctggcaaacaaccacatagaagcctttta

SEQ ID NO: 32373 - DNA, 33 bp, Homo sapiens
aggtgatcaacttcaacatcaacagtggtacat

SEQ ID NO: 32374 - DNA, 33 bp, Homo sapiens
gacagttaattaattccagggcatatcactgct

SEQ ID NO: 32375 - DNA, 33 bp, Homo sapiens
tacatatactctctgaggacagctcaggtcaat

SEQ ID NO: 32376 - DNA, 33 bp, Homo sapiens
gaaaagtttcatgcaacgtgcagcaaagatgct

SEQ ID NO: 32377 - DNA, 33 bp, Homo sapiens
gaataatgtttccagaagaaagagcaagagcag

SEQ ID NO: 32378 - DNA, 33 bp, Homo sapiens
acttggcagggtttaacaaccacatccaaacca

SEQ ID NO: 32379 - DNA, 33 bp, Homo sapiens
gtgcaactattatccacccagcacaaagcccat

SEQ ID NO: 32380 - DNA, 33 bp, Homo sapiens
gtgccatagtgtatcacgtttcctggcccagtc

SEQ ID NO: 32381 - DNA, 33 bp, Homo sapiens
atagagtttctatatgccagataatatcttcaa

SEQ ID NO: 32382 - DNA, 33 bp, Homo sapiens
agctggtcacatctcacactttcttgccaaaac

SEQ ID NO: 32383 - DNA, 33 bp, Homo sapiens
gggggcacagatgccacgtgaagatcattgtgc

SEQ ID NO: 32384 - DNA, 33 bp, Homo sapiens
ccgtatggcctctctaagtgtcttttatcttaa

SEQ ID NO: 32385 - DNA, 33 bp, Homo sapiens
tgagaagaaaatgccccgctacgtcccccttct

SEQ ID NO: 32386 - DNA, 33 bp, Homo sapiens
agagagacccctagaacgtttccctcaaggacc

SEQ ID NO: 32387 - DNA, 33 bp, Homo sapiens
ccaaccattagtgttaaaatttcctgactgatc

SEQ ID NO: 32388 - DNA, 33 bp, Homo sapiens
aggggaaagtgaggcaggaacacacggcacaca

SEQ ID NO: 32389 - DNA, 33 bp, Homo sapiens
atctgatatataatcaccatctgtatttaagtt

SEQ ID NO: 32390 - DNA, 33 bp, Homo sapiens
ctgcagtgctttcttagggaaatgacagggcaa

SEQ ID NO: 32391 - DNA, 33 bp, Homo sapiens
ctccagaacctatgagaaagctcttatcactca

SEQ ID NO: 32392 - DNA, 33 bp, Homo sapiens
tcactcatcttagtccacacaagcaaagcaggt

SEQ ID NO: 32393 - DNA, 33 bp, Homo sapiens
ttgtggcaatttcttacatagcaatggatagct

SEQ ID NO: 32394 - DNA, 33 bp, Homo sapiens
ctgttacgcactagaaatccccgacccttgctc

SEQ ID NO: 32395 - DNA, 33 bp, Homo sapiens
cagtcagcgctacaccaagttgaggcagccatt

SEQ ID NO: 32396 - DNA, 33 bp, Homo sapiens
ctaaattaactacctacggccaagtcctgtctc

SEQ ID NO: 32397 - DNA, 33 bp, Homo sapiens
tccttgaatttgcccacatttggcatctcttgc

SEQ ID NO: 32398 - DNA, 33 bp, Homo sapiens
cagagtggaagtgggaagaaggtcttcagattt

SEQ ID NO: 32399 - DNA, 33 bp, Homo sapiens
tcagagagagatcaagataaaacgaaaaactca

SEQ ID NO: 32400 - DNA, 51 bp, Homo sapiens
cttaggtctgatcaatctgctccacacaatttctcagtgatcctctgcatc

SEQ ID NO: 32401 - DNA, 51 bp, Homo sapiens
ctttgacttctctgtgggatactgccagattaactcaacactcccagtaca

SEQ ID NO: 32402 - DNA, 33 bp, Homo sapiens
gaaaggaataatcaaggatttggtcagtttctt

SEQ ID NO: 32403 - DNA, 33 bp, Homo sapiens
gtgttttccacaaaaacgtcatcctggactcta

SEQ ID NO: 32404 - DNA, 51 bp, Homo sapiens
ttctgaacacaataaactattttgaagatcttgggtggaatttttggtgtt

SEQ ID NO: 32405 - DNA, 33 bp, Homo sapiens
gcttctctctcttaaacgtcccagcagaattct

SEQ ID NO: 32406 - DNA, 33 bp, Homo sapiens
taacagttctcaacacaatcttgatcaatattc

SEQ ID NO: 32407 - DNA, 33 bp, Homo sapiens
tcataggaactgaatcctgagttctaactaact

SEQ ID NO: 32408 - DNA, 33 bp, Homo sapiens
tcagttgaatgcctgactagcataagagggaac

SEQ ID NO: 32409 - DNA, 33 bp, Homo sapiens
acatggaatttcacataatctggcagttttggg

SEQ ID NO: 32410 - DNA, 33 bp, Homo sapiens
tgaggattctaagctacggtggacacaacttcc

SEQ ID NO: 32411 - DNA, 33 bp, Homo sapiens
ctctggagatgagagacaataatatcagattcc

SEQ ID NO: 32412 - DNA, 33 bp, Homo sapiens
ccttctgtgggggtcacgctgggtgaagaatac

SEQ ID NO: 32413 - DNA, 33 bp, Homo sapiens
acagtcaaacattaaaatctctcatcttggctg

SEQ ID NO: 32414 - DNA, 33 bp, Homo sapiens
aggcagcatactctccaagtgtagctttctctt

SEQ ID NO: 32415 - DNA, 33 bp, Homo sapiens
gaaataaactgcataaagcaaaaaagtaaaaat

SEQ ID NO: 32416 - DNA, 33 bp, Homo sapiens
ttgtgaaagtctctacgcaaaatctggggactt

SEQ ID NO: 32417 - DNA, 33 bp, Homo sapiens
acagataagaatgttgaaaaataaaaatatgtg

SEQ ID NO: 32418 - DNA, 51 bp, Homo sapiens
tagtgaacttccatgcaggccatgacaggctcatttcaaaagaagcagaaa

SEQ ID NO: 32419 - DNA, 33 bp, Homo sapiens
ttctcaagagatttccagatcttctcatggtaa

SEQ ID NO: 32420 - DNA, 33 bp, Homo sapiens
ttctgaggtactcccacaattactgcttctctt

SEQ ID NO: 32421 - DNA, 33 bp, Homo sapiens
aatctgtacaacatataactgcacctaacactg

SEQ ID NO: 32422 - DNA, 33 bp, Homo sapiens
ctagttaatggggatacgcaatttgactgtaga

SEQ ID NO: 32423 - DNA, 33 bp, Homo sapiens
aaggacacagtgcaaacaccaccaaagcattta

SEQ ID NO: 32424 - DNA, 51 bp, Homo sapiens
aaattgtttagatacacaatttgaagaaactctgtggtctaactcaaatta

SEQ ID NO: 32425 - DNA, 33 bp, Homo sapiens
cccagctgtgtggacccaagatttctcgctctc

SEQ ID NO: 32426 - DNA, 33 bp, Homo sapiens
tatgtttgaatttgatcaggaggagcagttcta

SEQ ID NO: 32427 - DNA, 33 bp, Homo sapiens
ccagttcttgcactacaactgattactaagtta

SEQ ID NO: 32428 - DNA, 33 bp, Homo sapiens
attcaaatacggtctccaactggtggtggacag

SEQ ID NO: 32429 - DNA, 33 bp, Homo sapiens
atgtgattaggtcagcagataaggggagtattg

SEQ ID NO: 32430 - DNA, 33 bp, Homo sapiens
tggggaggcgtttctcactgtatgaattattag

SEQ ID NO: 32431 - DNA, 33 bp, Homo sapiens
gcagagggtatcatccaggagaaagagtatagg

SEQ ID NO: 32432 - DNA, 51 bp, Homo sapiens
acagaaaataagtgattaaagccaagatagtggtctaaggtcaagccaaaa

SEQ ID NO: 32433 - DNA, 33 bp, Homo sapiens
taaggaggaagcaaagaattgggaataacagtc

SEQ ID NO: 32434 - DNA, 33 bp, Homo sapiens
gactaaacaagatgatgacccaacatgagccag

SEQ ID NO: 32435 - DNA, 33 bp, Homo sapiens
aacatattacattcccaatgccgaactaagcaa

SEQ ID NO: 32436 - DNA, 33 bp, Homo sapiens
ggccactccagatgtacagactcagagaaagcc

SEQ ID NO: 32437 - DNA, 33 bp, Homo sapiens
aacaccagtctgcctcactcttttctggaacac

SEQ ID NO: 32438 - DNA, 33 bp, Homo sapiens
tccttgtacctcaagcagcatgaaaaccatttg

SEQ ID NO: 32439 - DNA, 33 bp, Homo sapiens
atatgaatcgggtcaactgttaaccaactggac

SEQ ID NO: 32440 - DNA, 33 bp, Homo sapiens
aggtccggaaatctcaagcaggatagtagggtg

SEQ ID NO: 32441 - DNA, 33 bp, Homo sapiens
cttcaggctccaggagaaactgcggacacatca

SEQ ID NO: 32442 - DNA, 33 bp, Homo sapiens
aggaatccttgcatgacggccttctacaaggaa

SEQ ID NO: 32443 - DNA, 33 bp, Homo sapiens
atcagtgtgtcttaaaacatctgcagagttaga

SEQ ID NO: 32444 - DNA, 33 bp, Homo sapiens
tggtaaaaagacatacagggtacaacaaatata

SEQ ID NO: 32445 - DNA, 33 bp, Homo sapiens
aaggtgcgaagacagcaagtgggctacagtgga

SEQ ID NO: 32446 - DNA, 33 bp, Homo sapiens
tagtgtgctgttagtgaagattggtctcagatg

SEQ ID NO: 32447 - DNA, 33 bp, Homo sapiens
tctattcttgcatagactccagggatgctgtaa

SEQ ID NO: 32448 - DNA, 33 bp, Homo sapiens
ctaaaagctttccttaaaaatctcctgaatgct

SEQ ID NO: 32449 - DNA, 33 bp, Homo sapiens
tgcaagaaactcttaacggtggttatgcctaag

SEQ ID NO: 32450 - DNA, 33 bp, Homo sapiens
gaggtgtcatgggaaacacaatttatagccagt

SEQ ID NO: 32451 - DNA, 33 bp, Homo sapiens
agtggtagagatgggactcaacatgacatctca

SEQ ID NO: 32452 - DNA, 33 bp, Homo sapiens
gagtcaggatacgaacacaagcagttatttggg

SEQ ID NO: 32453 - DNA, 33 bp, Homo sapiens
ggccaagacttgtacacggcagaactcccactg

SEQ ID NO: 32454 - DNA, 33 bp, Homo sapiens
aagaaacagaatctagccacctggctccttgcc

SEQ ID NO: 32455 - DNA, 33 bp, Homo sapiens
gtatgatgacatgaataaggaagaccagagtga

SEQ ID NO: 32456 - DNA, 33 bp, Homo sapiens
cctctgggcgcctccaatctacacacaaagccg

SEQ ID NO: 32457 - DNA, 33 bp, Homo sapiens
cactcatggcaggcaacgtttcctgtaggcttc

SEQ ID NO: 32458 - DNA, 33 bp, Homo sapiens
tttatctccagatctcaaaatacagaaccgtaa

SEQ ID NO: 32459 - DNA, 33 bp, Homo sapiens
agttgtacaaaacagaccagacataaagagcat

SEQ ID NO: 32460 - DNA, 33 bp, Homo sapiens
agcactggatgggaaactgtgggcctccctagg

SEQ ID NO: 32461 - DNA, 51 bp, Homo sapiens
agggtcactgaacaaatattagactcaatcaaagttgtgcatttgactaca

SEQ ID NO: 32462 - DNA, 51 bp, Homo sapiens
gatttatccccttggaagtataggaccagcttttcccagagtcatctctgt

SEQ ID NO: 32463 - DNA, 51 bp, Homo sapiens
acccaagaaacagtaaatgtatcaaattatatgcatgccaattacagtgga

SEQ ID NO: 32464 - DNA, 33 bp, Homo sapiens
cctatcttagagaacaatggaaatatgtgtaag

SEQ ID NO: 32465 - DNA, 33 bp, Homo sapiens
caattacacaaccagaactcattaattggttca

SEQ ID NO: 32466 - DNA, 33 bp, Homo sapiens
atccccagtgcctacaatagtgcctagcacata

SEQ ID NO: 32467 - DNA, 33 bp, Homo sapiens
cgacccaactggtctcaagtttcctatctcttc

SEQ ID NO: 32468 - DNA, 33 bp, Homo sapiens
tatgcttgtcaaccatcacttcacctatccatc

SEQ ID NO: 32469 - DNA, 51 bp, Homo sapiens
cacgttgtttttggaagtgaaacagaagagggtgaaaacaatgactatgaa

SEQ ID NO: 32470 - DNA, 51 bp, Homo sapiens
cataatcagatttttatgttagaccattctggcagcaatgtgagagatgaa

SEQ ID NO: 32471 - DNA, 33 bp, Homo sapiens
agaaaagcaaagaagaggagttaatgcagcttg

SEQ ID NO: 32472 - DNA, 51 bp, Homo sapiens
caggcattcagtcttgccatcctaaataactacttttgacgaaatttattt

SEQ ID NO: 32473 - DNA, 33 bp, Homo sapiens
tcaaactctcaagaaaagactctgattggtcca

SEQ ID NO: 32474 - DNA, 33 bp, Homo sapiens
atagtattgaaccatacgaaactgttgatatcc

SEQ ID NO: 32475 - DNA, 33 bp, Homo sapiens
agcgctcctgaattccaaactcacgtatccaac

SEQ ID NO: 32476 - DNA, 51 bp, Homo sapiens
gtattagacctgatagctccaagaactgatgatccaacaacccacatagat

SEQ ID NO: 32477 - DNA, 51 bp, Homo sapiens
gctctctttagctgtcatagctaagccaacaatgatctttggaaactatag

SEQ ID NO: 32478 - DNA, 33 bp, Homo sapiens
agaaaccttatgtacacagctggaatgggggac

SEQ ID NO: 32479 - DNA, 33 bp, Homo sapiens
agcaaagcagtatgataacactaaaggatataa

SEQ ID NO: 32480 - DNA, 33 bp, Homo sapiens
tccttcagtgttaaagccaaatctatgttgttc

SEQ ID NO: 32481 - DNA, 33 bp, Homo sapiens
gaatttgacaatattcactaaatcttgatctag

SEQ ID NO: 32482 - DNA, 33 bp, Homo sapiens
agagcaagaatttgaacacaaagtgatctgact

SEQ ID NO: 32483 - DNA, 33 bp, Homo sapiens
ccctaacgcagtccgacgtagcaaccttcagct

SEQ ID NO: 32484 - DNA, 33 bp, Homo sapiens
ggcatgagagttttcaaagtcagcattctagct

SEQ ID NO: 32485 - DNA, 33 bp, Homo sapiens
cactttcttgcacaaactttatgttccagagaa

SEQ ID NO: 32486 - DNA, 33 bp, Homo sapiens
gtatctaagcacagaccgtaggccagcaagagt

SEQ ID NO: 32487 - DNA, 33 bp, Homo sapiens
aggcatcactgaattaactatgttcttggcagc

SEQ ID NO: 32488 - DNA, 33 bp, Homo sapiens
gttggaaccatcgtataaggcttgccacttatc

SEQ ID NO: 32489 - DNA, 33 bp, Homo sapiens
ttcatttactagttccgcatgcagtattgggct

SEQ ID NO: 32490 - DNA, 33 bp, Homo sapiens
gtgagttatcacattaacacatctttattggtg

SEQ ID NO: 32491 - DNA, 33 bp, Homo sapiens
gtacaaatgaaatccaaggctgttctatgatag

SEQ ID NO: 32492 - DNA, 33 bp, Homo sapiens
catagaacctagcagaacagaaaggagaaggaa

SEQ ID NO: 32493 - DNA, 33 bp, Homo sapiens
atccccttgcagtagacggttgacattttaaag

SEQ ID NO: 32494 - DNA, 33 bp, Homo sapiens
tccttggtcagagcccagatcaaaatgaacctg

SEQ ID NO: 32495 - DNA, 33 bp, Homo sapiens
cccctttaggtacagacgtgctcttatccctgg

SEQ ID NO: 32496 - DNA, 33 bp, Homo sapiens
gttacccacagaggcaacccttcacacagggca

SEQ ID NO: 32497 - DNA, 33 bp, Homo sapiens
gcttacccttgtggccagcaatgagccccatct

SEQ ID NO: 32498 - DNA, 33 bp, Homo sapiens
atcccactgtccagtaactgtgattatcagtgc

SEQ ID NO: 32499 - DNA, 33 bp, Homo sapiens
aagccctggacacctcacgtttatatcaacaga

SEQ ID NO: 32500 - DNA, 33 bp, Homo sapiens
gagatggcataatctgcataagacagaggtacc

SEQ ID NO: 32501 - DNA, 33 bp, Homo sapiens
atttttaagcaaggtaagtgaagtctctgtgcc

SEQ ID NO: 32502 - DNA, 33 bp, Homo sapiens
ctgtcaagctgtctacacaagctatgggctact

SEQ ID NO: 32503 - DNA, 33 bp, Homo sapiens
cctgagacagaaatgtgaagcaaagggtgccag

SEQ ID NO: 32504 - DNA, 33 bp, Homo sapiens
ggtgtctgggttgtcaaatgtcaaagggggagg

SEQ ID NO: 32505 - DNA, 33 bp, Homo sapiens
aaaatacggacttgaagggcccagttcaattca

SEQ ID NO: 32506 - DNA, 33 bp, Homo sapiens
gagcactttacatctcactaatatctattacat

SEQ ID NO: 32507 - DNA, 33 bp, Homo sapiens
gacacaccggtgagcacaaaagaaagtataccc

SEQ ID NO: 32508 - DNA, 33 bp, Homo sapiens
gggcaccttgcaaaccaagctggtcatccagtt

SEQ ID NO: 32509 - DNA, 51 bp, Homo sapiens
attgctttacaaacttacaggaataatacatagtgtttgtaaaacatttag

SEQ ID NO: 32510 - DNA, 51 bp, Homo sapiens
tgccagaagatactgtatttataaaacacatgatctatataatgcatatgc

SEQ ID NO: 32511 - DNA, 33 bp, Homo sapiens
aaagaccaagtggaaaaagatgcttcagctgtt

SEQ ID NO: 32512 - DNA, 33 bp, Homo sapiens
ctggccaaatatcaataagcatcattcttatca

SEQ ID NO: 32513 - DNA, 33 bp, Homo sapiens
acagctgaatcacaccaaagtacaggcactggg

SEQ ID NO: 32514 - DNA, 33 bp, Homo sapiens
aggattttcattctgccgaggatctgttcatgg

SEQ ID NO: 32515 - DNA, 33 bp, Homo sapiens
gcccagtgctactaagactctgctaggatatct

SEQ ID NO: 32516 - DNA, 33 bp, Homo sapiens
ctgtgactttgttggcaccccattgtgtgatgg

SEQ ID NO: 32517 - DNA, 33 bp, Homo sapiens
tagtcctaatgataaaacatgtgtgaaaaacag

SEQ ID NO: 32518 - DNA, 33 bp, Homo sapiens
cttacaactcactaaactggggcagggatggct

SEQ ID NO: 32519 - DNA, 33 bp, Homo sapiens
taaaattggctgtattaaaatatgacgtagggt

SEQ ID NO: 32520 - DNA, 51 bp, Homo sapiens
taaatacctcagaactcacatgcaagtattgacatagaggacatctttggc

SEQ ID NO: 32521 - DNA, 33 bp, Homo sapiens
ttaagagtaaggctccaacttctgtttccaaga

SEQ ID NO: 32522 - DNA, 33 bp, Homo sapiens
gcccaagcccacaggaacaacttactcgtcatc

SEQ ID NO: 32523 - DNA, 33 bp, Homo sapiens
ttccaggttctcatcacgttgggtcagccagta

SEQ ID NO: 32524 - DNA, 33 bp, Homo sapiens
gttttgtgaggagtaaatggatgaatacatgta

SEQ ID NO: 32525 - DNA, 33 bp, Homo sapiens
aattgcctgttgtcttcaaatttctgcagtgct

SEQ ID NO: 32526 - DNA, 33 bp, Homo sapiens
gggtaaaatgagaaaaatgaatgaacaggctac

SEQ ID NO: 32527 - DNA, 33 bp, Homo sapiens
ctgattttggaatggcaaatgaaatctgcctct

SEQ ID NO: 32528 - DNA, 33 bp, Homo sapiens
acaaacatggatataaactagtgagatctgtgt

SEQ ID NO: 32529 - DNA, 33 bp, Homo sapiens
taactggtttttatcaatctagggtaacttgcc

SEQ ID NO: 32530 - DNA, 33 bp, Homo sapiens
gccctgctctgaatcacagcccactgacgcagg

SEQ ID NO: 32531 - DNA, 33 bp, Homo sapiens
ttgatctagtgaacacacgacaaggaagtgttg

SEQ ID NO: 32532 - DNA, 33 bp, Homo sapiens
tcttttatgcttttaaagattgttgaggatccc

SEQ ID NO: 32533 - DNA, 33 bp, Homo sapiens
aaatgaagtcccattccccagctaccttccaat

SEQ ID NO: 32534 - DNA, 33 bp, Homo sapiens
cagacttgttgagctgaaatattctgatcattt

SEQ ID NO: 32535 - DNA, 33 bp, Homo sapiens
ggaagtgaggctatgccaagtaaaagtagctat

SEQ ID NO: 32536 - DNA, 33 bp, Homo sapiens
gaacgtgcagataacacgataataatcaaagga

SEQ ID NO: 32537 - DNA, 51 bp, Homo sapiens
agacaattctagttcagttccatgagtatttctgcaacagatctagcattt

SEQ ID NO: 32538 - DNA, 33 bp, Homo sapiens
tgttcttcatgagtaactggtggctaacatggc

SEQ ID NO: 32539 - DNA, 33 bp, Homo sapiens
ctctatttttccagaaacctactctgtcacaat

SEQ ID NO: 32540 - DNA, 51 bp, Homo sapiens
gcattttcattgctatatgatactccaaatggaatcctatgcagacatcat

SEQ ID NO: 32541 - DNA, 33 bp, Homo sapiens
gatggtattgggaaccaactataggctaggagg

SEQ ID NO: 32542 - DNA, 51 bp, Homo sapiens
ctagataagccacctgtcttctgtacgtaagccactatgtaaacctaccac

SEQ ID NO: 32543 - DNA, 51 bp, Homo sapiens
ctattcctcattaagtctttaccaactcagtcaatgtcatcactgaccatg

SEQ ID NO: 32544 - DNA, 33 bp, Homo sapiens
ctcaatttcataccaccgcaaaactatggtaaa

SEQ ID NO: 32545 - DNA, 33 bp, Homo sapiens
gtctaacctacacttacaacattgcagattaat

SEQ ID NO: 32546 - DNA, 33 bp, Homo sapiens
acattgaaagccaaagaataaaatgttggtagc

SEQ ID NO: 32547 - DNA, 33 bp, Homo sapiens
tccatgctcatgcctacaaaaagtcaatattgc

SEQ ID NO: 32548 - DNA, 33 bp, Homo sapiens
tgcttattcataaagacgtaggtaagtaggtag

SEQ ID NO: 32549 - DNA, 51 bp, Homo sapiens
ggcactaagaacacattatacaaataaagtaaagttaccatgtaataatat

SEQ ID NO: 32550 - DNA, 33 bp, Homo sapiens
aagatctatttaggaaaaacctgacaatatata

SEQ ID NO: 32551 - DNA, 33 bp, Homo sapiens
tgaatcttcctcagtacccccatcgtctttgtc

SEQ ID NO: 32552 - DNA, 33 bp, Homo sapiens
ttcactgacagaagtacgaaagaaagagacatc

SEQ ID NO: 32553 - DNA, 33 bp, Homo sapiens
tacacaacaactcagaagtttgcatttgcgatg

SEQ ID NO: 32554 - DNA, 33 bp, Homo sapiens
taagccttgagagtaacgtgactatgtggcctg

SEQ ID NO: 32555 - DNA, 33 bp, Homo sapiens
aaatggggtaagtctacgcaaactaacttagaa

SEQ ID NO: 32556 - DNA, 33 bp, Homo sapiens
cctcagcctactaaaccgcttccagtccgaagg

SEQ ID NO: 32557 - DNA, 33 bp, Homo sapiens
atgcctttgaattggaaagttttgcctacttaa

SEQ ID NO: 32558 - DNA, 51 bp, Homo sapiens
gaatatcttcttaaaatatccataggatttattgtggataactctaaacat

SEQ ID NO: 32559 - DNA, 33 bp, Homo sapiens
taaaatactcagatagacgagtgcccacaattc

SEQ ID NO: 32560 - DNA, 51 bp, Homo sapiens
agagacatgtttactcttgagaaacactagagagagttgactggtagtagg

SEQ ID NO: 32561 - DNA, 33 bp, Homo sapiens
aattctgcacaatttacgaacatagtataacaa

SEQ ID NO: 32562 - DNA, 33 bp, Homo sapiens
actctgaattacccatcatgctttaactgttta

SEQ ID NO: 32563 - DNA, 33 bp, Homo sapiens
tattcattgcctttcacaaagtttttcttctgt

SEQ ID NO: 32564 - DNA, 33 bp, Homo sapiens
gagttttcagttgaaagtgcatcctatctataa

SEQ ID NO: 32565 - DNA, 51 bp, Homo sapiens
aaaccaatatgagagtttagaagatcaatatttttcatttttttcttattc

SEQ ID NO: 32566 - DNA, 33 bp, Homo sapiens
atttctttatcttgtgcaggaagattccatagt

SEQ ID NO: 32567 - DNA, 33 bp, Homo sapiens
cccagctgatgatggaagtgaagtgaaatgaat

SEQ ID NO: 32568 - DNA, 33 bp, Homo sapiens
gattagttcatggagacagaggccttgtgaatg

SEQ ID NO: 32569 - DNA, 51 bp, Homo sapiens
gtagggaagatagcttggcttgaacaaactttctagtactccaccaagacc

SEQ ID NO: 32570 - DNA, 33 bp, Homo sapiens
gagaaattgagaaaggcatcctaacagtattac

SEQ ID NO: 32571 - DNA, 33 bp, Homo sapiens
ttagagatctgttgaacgtcatagctgatctgt

SEQ ID NO: 32572 - DNA, 33 bp, Homo sapiens
cacactcaccatcttcacttcctccattattgc

SEQ ID NO: 32573 - DNA, 33 bp, Homo sapiens
agattgccattttcaccgtcccatcctatttaa

SEQ ID NO: 32574 - DNA, 33 bp, Homo sapiens
caataatcaagctgtgcatatcttttaaagtac

SEQ ID NO: 32575 - DNA, 33 bp, Homo sapiens
aagcctgaaattcaccaagtgcagttttaatta

SEQ ID NO: 32576 - DNA, 51 bp, Homo sapiens
acaaaggactattaaatttgtctacagcgtactacttggaacactgacccc

SEQ ID NO: 32577 - DNA, 33 bp, Homo sapiens
aacagagtaaaaagacaatctaaagaatgggaa

SEQ ID NO: 32578 - DNA, 33 bp, Homo sapiens
atgtatgtgtgactcacggcaaatctttgagct

SEQ ID NO: 32579 - DNA, 33 bp, Homo sapiens
tctaaatgagcaaaaaaccttgatcacctaggt

SEQ ID NO: 32580 - DNA, 33 bp, Homo sapiens
ctcccaacttggtggacattaactgatcctgta

SEQ ID NO: 32581 - DNA, 33 bp, Homo sapiens
cagaaagtcaaggaaaaaggccacttctttagg

SEQ ID NO: 32582 - DNA, 51 bp, Homo sapiens
atatgtagagggcaaaaaagggcacaaagaaaagagtagtcaatgcttcct

SEQ ID NO: 32583 - DNA, 33 bp, Homo sapiens
tgtatgatattggacaagtctccattatctcag

SEQ ID NO: 32584 - DNA, 51 bp, Homo sapiens
tattgaacagcatcaagtgattctacattgagaagtaaatgcatgataatg

SEQ ID NO: 32585 - DNA, 51 bp, Homo sapiens
ttggaaaataaaatattggcccataaagtgcaaaggcaaaaaagttactta

SEQ ID NO: 32586 - DNA, 51 bp, Homo sapiens
agtgcagggttagtggaatatacaggaaattagaagcaataaaaagcacag

SEQ ID NO: 32587 - DNA, 51 bp, Homo sapiens
tacaggaaattagaagcaataaaaaacacagtatatatgtgatgctagaaa

SEQ ID NO: 32588 - DNA, 33 bp, Homo sapiens
acatatgaaagtgtctacctaagataggctttt

SEQ ID NO: 32589 - DNA, 51 bp, Homo sapiens
agcaccttacgtattattcttgaccaattttcctcaactgcagtcattttc

SEQ ID NO: 32590 - DNA, 33 bp, Homo sapiens
ataaaagtctgtgagcactagaaaaaggaactt

SEQ ID NO: 32591 - DNA, 51 bp, Homo sapiens
ttgtgacttatcagtgcctagtacaataaaaagtatatctgtaatttatat

SEQ ID NO: 32592 - DNA, 33 bp, Homo sapiens
ttatgtcctgcatcctaacactataaagcaaga

SEQ ID NO: 32593 - DNA, 51 bp, Homo sapiens
aaaatagtaacataaaagaaactctcactcaagaccatttactaggattgt

SEQ ID NO: 32594 - DNA, 51 bp, Homo sapiens
ttctctaacaaaaaccaacagttaaataatagcagaaataaaaatttttaa

SEQ ID NO: 32595 - DNA, 33 bp, Homo sapiens
attgagttttctgttacgagagcatttgctttt

SEQ ID NO: 32596 - DNA, 33 bp, Homo sapiens
actccatcattactatgaaacctcaggcaaatt

SEQ ID NO: 32597 - DNA, 33 bp, Homo sapiens
aagggagatcatatcaagggagatttgtttatt

SEQ ID NO: 32598 - DNA, 33 bp, Homo sapiens
ggtcataacaaatctcaaaaaactcagaattta

SEQ ID NO: 32599 - DNA, 33 bp, Homo sapiens
gccccaaggaagaagacggcctggtgaaataca

SEQ ID NO: 32600 - DNA, 33 bp, Homo sapiens
ttttgtatatgttccaataagtcaacaaaaata

SEQ ID NO: 32601 - DNA, 51 bp, Homo sapiens
gttaaagagtctgggatttcaagaactgtatttaagtgtattgccacacca

SEQ ID NO: 32602 - DNA, 33 bp, Homo sapiens
agtatcatgtggaagacgttaaaaatgcaaatt

SEQ ID NO: 32603 - DNA, 51 bp, Homo sapiens
gaaatttaaagaaaaggatttctaaatactctaaaagcaactgagacagct

SEQ ID NO: 32604 - DNA, 33 bp, Homo sapiens
tgtaatgaataagatacctacatcataaagggg

SEQ ID NO: 32605 - DNA, 33 bp, Homo sapiens
acagtatgaatgcaataaccgaagagcaaagaa

SEQ ID NO: 32606 - DNA, 33 bp, Homo sapiens
tctagtttgggtacaaaatttacttcactcact

SEQ ID NO: 32607 - DNA, 33 bp, Homo sapiens
tgtgtcttctaaaaagccttctaagatttgtgt

SEQ ID NO: 32608 - DNA, 33 bp, Homo sapiens
atcctctgcctttaagcctgctcttctctgcac

SEQ ID NO: 32609 - DNA, 51 bp, Homo sapiens
gctttatcttaacatgtgtggggcaagattaaaggactcctaagcagatat

SEQ ID NO: 32610 - DNA, 33 bp, Homo sapiens
tcagagccaaagtggacggacaaaggcataaag

SEQ ID NO: 32611 - DNA, 51 bp, Homo sapiens
catatgtggaaatagcactagcttacgagtttatagaagtttatattttta

SEQ ID NO: 32612 - DNA, 33 bp, Homo sapiens
atttaaacatactttaagatcacttgcactagc

SEQ ID NO: 32613 - DNA, 33 bp, Homo sapiens
tgaaatccagtagtcactatttttcaattattt

SEQ ID NO: 32614 - DNA, 33 bp, Homo sapiens
cagttttcatagctccaactttggatttcctat

SEQ ID NO: 32615 - DNA, 51 bp, Homo sapiens
tgcctagctgctaggtacctcaagactaagatctctccttagtagttatag

SEQ ID NO: 32616 - DNA, 33 bp, Homo sapiens
gacaaaatgacagagaactagtgatgatttcat

SEQ ID NO: 32617 - DNA, 33 bp, Homo sapiens
tataaatttgagatacacttttcagaaaaacat

SEQ ID NO: 32618 - DNA, 33 bp, Homo sapiens
ttcaaggattggaaaacaacagagctgcagtga

SEQ ID NO: 32619 - DNA, 33 bp, Homo sapiens
gccagagtccttcttaccacttttatcaccctc

SEQ ID NO: 32620 - DNA, 33 bp, Homo sapiens
atctggggagtaataacaaggctcagccactct

SEQ ID NO: 32621 - DNA, 33 bp, Homo sapiens
aagaagaaatccaagacgtagtagtgttggatt

SEQ ID NO: 32622 - DNA, 33 bp, Homo sapiens
tagaatgctttgtagacctttgggtatataccc

SEQ ID NO: 32623 - DNA, 33 bp, Homo sapiens
ctaagaagtcaatattaaaaaggcaacccaatt

SEQ ID NO: 32624 - DNA, 33 bp, Homo sapiens
atttataggatacagaacaatatttcaatacat

SEQ ID NO: 32625 - DNA, 33 bp, Homo sapiens
aatgactttaggagaaatatactggccaggagt

SEQ ID NO: 32626 - DNA, 51 bp, Homo sapiens
ttatacaattttatagatgagaacacggaagtacagaaaatcaaatagctt

SEQ ID NO: 32627 - DNA, 33 bp, Homo sapiens
cttccctaaacaacatcaagtcgatgagaaact

SEQ ID NO: 32628 - DNA, 33 bp, Homo sapiens
atgtcaccattgtagaacacagaaaaaagacac

SEQ ID NO: 32629 - DNA, 51 bp, Homo sapiens
tattctgacatactggctcttaaacaactcagctagtggcttaagttctct

SEQ ID NO: 32630 - DNA, 33 bp, Homo sapiens
acaggacacagctccactgatgcttcctagggt

SEQ ID NO: 32631 - DNA, 33 bp, Homo sapiens
tttcggatgcctgctaaatgttagaggtttaaa

SEQ ID NO: 32632 - DNA, 33 bp, Homo sapiens
tgcaatcaagctaaaacttcaaaatttgtagac

SEQ ID NO: 32633 - DNA, 33 bp, Homo sapiens
cacccactcttcagtgcagcaaagttgtggatg

SEQ ID NO: 32634 - DNA, 51 bp, Homo sapiens
agttacataaaacatcaacaattagaatatttgaaactttataataacagt

SEQ ID NO: 32635 - DNA, 51 bp, Homo sapiens
acataaatcatctgaggagtaatgaaacaactgcagcccagcagaaacttg

SEQ ID NO: 32636 - DNA, 33 bp, Homo sapiens
attcttcatggcagaactgttaaccaagacatg

SEQ ID NO: 32637 - DNA, 33 bp, Homo sapiens
gtctttttcaatgcacagaagtcctcaattttt

SEQ ID NO: 32638 - DNA, 33 bp, Homo sapiens
acagtttatttgcttgaacttttaacgtcacta

SEQ ID NO: 32639 - DNA, 33 bp, Homo sapiens
tactttttggttccaaaacttccaggagtttgt

SEQ ID NO: 32640 - DNA, 33 bp, Homo sapiens
atcatcagaggtatccactgctttgtaaactta

SEQ ID NO: 32641 - DNA, 33 bp, Homo sapiens
ccatttgccataataccatccctgtatgttgaa

SEQ ID NO: 32642 - DNA, 33 bp, Homo sapiens
aaggcttatgtagaatcagttgttgtcagtcca

SEQ ID NO: 32643 - DNA, 33 bp, Homo sapiens
ctcaaagctgcagaagactaaattgttctccat

SEQ ID NO: 32644 - DNA, 33 bp, Homo sapiens
aaacaggtcattactcaacattggaaagctact

SEQ ID NO: 32645 - DNA, 33 bp, Homo sapiens
aaattgcaagtatctacaccatacgtttccaag

SEQ ID NO: 32646 - DNA, 33 bp, Homo sapiens
gtgtctaatcactcataactgctttctaatgtg

SEQ ID NO: 32647 - DNA, 51 bp, Homo sapiens
ggaccaggatgtgattgccaattctctcccctgaaaccctcttctcatggt

SEQ ID NO: 32648 - DNA, 33 bp, Homo sapiens
cttgaaatatgctttccaaattgtctgctttct

SEQ ID NO: 32649 - DNA, 51 bp, Homo sapiens
ctgacaattcagtattagtagatgccaggcctgctacccttattcttgctg

SEQ ID NO: 32650 - DNA, 33 bp, Homo sapiens
ctaacaacactgaaaaaattgtcaggtaaaaca

SEQ ID NO: 32651 - DNA, 51 bp, Homo sapiens
atttccaactggaaacaaattcttacgctactaggtctctagagattatct

SEQ ID NO: 32652 - DNA, 33 bp, Homo sapiens
ataatattataaacgacgatacctgagaactag

SEQ ID NO: 32653 - DNA, 33 bp, Homo sapiens
gcatgggctctgacaaacattttaacagtatca

SEQ ID NO: 32654 - DNA, 33 bp, Homo sapiens
ttccaggggcttcaaaactcaatcagtataaac

SEQ ID NO: 32655 - DNA, 33 bp, Homo sapiens
tggctcctgataaccccgcttctgtattcacga

SEQ ID NO: 32656 - DNA, 33 bp, Homo sapiens
ccactgtcttgattcacgctaatgcaccagtag

SEQ ID NO: 32657 - DNA, 33 bp, Homo sapiens
aagcctgagggaaaaaataggatggtccttcct

SEQ ID NO: 32658 - DNA, 33 bp, Homo sapiens
ttccatgtcatctaaccaaataaaccatcacaa

SEQ ID NO: 32659 - DNA, 51 bp, Homo sapiens
caataattggaaaaatttagttgtacctgtctcttaagcttgaggttgata

SEQ ID NO: 32660 - DNA, 33 bp, Homo sapiens
accatctttagctgcactaaggaaaagtcctgc

SEQ ID NO: 32661 - DNA, 51 bp, Homo sapiens
catgccacttagatcttctttgagagaccctgctgcagcgagcatagttaa

SEQ ID NO: 32662 - DNA, 33 bp, Homo sapiens
gtagtgaaggagaaacaaaaggaacataaatca

SEQ ID NO: 32663 - DNA, 33 bp, Homo sapiens
aggcaatgacacagacaagtgagaatctgatta

SEQ ID NO: 32664 - DNA, 33 bp, Homo sapiens
aatgaaaggtgaggaaacaatgttagaaccagc

SEQ ID NO: 32665 - DNA, 33 bp, Homo sapiens
ttgtatcccagcctaacaaagggcctgacatat

SEQ ID NO: 32666 - DNA, 33 bp, Homo sapiens
gttttggggatgggtaaagactaattccttata

SEQ ID NO: 32667 - DNA, 33 bp, Homo sapiens
gactgagcatctcctgaaagttaactagtttgc

SEQ ID NO: 32668 - DNA, 33 bp, Homo sapiens
tggccacaactttaaacaacagcccacttatag

SEQ ID NO: 32669 - DNA, 33 bp, Homo sapiens
ctggaagatgcctacacgtaaggagtgtgaaga

SEQ ID NO: 32670 - DNA, 33 bp, Homo sapiens
gtcccacagacattaaagagcatggtgtgttta

SEQ ID NO: 32671 - DNA, 33 bp, Homo sapiens
aagttactctcaaatacgaatccctgaagccaa

SEQ ID NO: 32672 - DNA, 33 bp, Homo sapiens
ttttttggaggaaaaaattctctgactacacag

SEQ ID NO: 32673 - DNA, 33 bp, Homo sapiens
aaaagcaggtctaaaaaggctacatattatatg

SEQ ID NO: 32674 - DNA, 33 bp, Homo sapiens
gtctgacacttctccacgtttccaagagtaatc

SEQ ID NO: 32675 - DNA, 33 bp, Homo sapiens
acatcctgtgtcctaaaaccagactggacgtat

SEQ ID NO: 32676 - DNA, 33 bp, Homo sapiens
atggcctctatatgaccaaaaccaaagcacact

SEQ ID NO: 32677 - DNA, 33 bp, Homo sapiens
ttcctcctcaagcctacagaagtacagcatttc

SEQ ID NO: 32678 - DNA, 33 bp, Homo sapiens
tacataaactatccaaatgttccttttaagtta

SEQ ID NO: 32679 - DNA, 33 bp, Homo sapiens
tcccaagtatagccacacaagaggttcggactt

SEQ ID NO: 32680 - DNA, 33 bp, Homo sapiens
ggaaccagagggcataaagatgattagaacata

SEQ ID NO: 32681 - DNA, 51 bp, Homo sapiens
tttgtgttcatatgaagtcttcacaaggttaacttagacttcacaaagtta

SEQ ID NO: 32682 - DNA, 51 bp, Homo sapiens
taacgcagcactcccattgttttgacgccactgtataataggtacgttatt

SEQ ID NO: 32683 - DNA, 51 bp, Homo sapiens
ttttattaattgtataattgtgaaacagtcatcatgctaagtaagctgata

SEQ ID NO: 32684 - DNA, 33 bp, Homo sapiens
attttttaaatcaggtaaaatcaagtatgaata

SEQ ID NO: 32685 - DNA, 33 bp, Homo sapiens
ggcatacctaagaacaatgggcatatatctgtc

SEQ ID NO: 32686 - DNA, 33 bp, Homo sapiens
attgttatagctatcaaccattagagtttattt

SEQ ID NO: 32687 - DNA, 33 bp, Homo sapiens
gtgcagggagaaggataagctgaatgaggaata

SEQ ID NO: 32688 - DNA, 33 bp, Homo sapiens
attcccttagtgttaccggccctaagaaatctt

SEQ ID NO: 32689 - DNA, 33 bp, Homo sapiens
aactgccctgtgaaggacagatattagcattgt

SEQ ID NO: 32690 - DNA, 33 bp, Homo sapiens
cagggacccgaggcacagagcaagtaagtggat

SEQ ID NO: 32691 - DNA, 33 bp, Homo sapiens
ttcatgtgttataatgaatgttaccgatggatt

SEQ ID NO: 32692 - DNA, 33 bp, Homo sapiens
actcttgcctgaagcccattatttctggataca

SEQ ID NO: 32693 - DNA, 33 bp, Homo sapiens
taccttttcactgtaacagaaggaacctgatac

SEQ ID NO: 32694 - DNA, 33 bp, Homo sapiens
gacaatgtgttctagcaagtttagattgcaaag

SEQ ID NO: 32695 - DNA, 33 bp, Homo sapiens
gcttcctggatgccaaatcactttttaaaaaca

SEQ ID NO: 32696 - DNA, 33 bp, Homo sapiens
caggcacacacaatgaccacaggcagttaattt

SEQ ID NO: 32697 - DNA, 51 bp, Homo sapiens
aaaaaattaagtaatttgtagttgcgatactgggacaggtggtttacctgg

SEQ ID NO: 32698 - DNA, 33 bp, Homo sapiens
tagagtcttgagtaaacacaatgccagaatagg

SEQ ID NO: 32699 - DNA, 33 bp, Homo sapiens
tgcttgacattgagaaattcccttccttctctt

SEQ ID NO: 32700 - DNA, 33 bp, Homo sapiens
ttccaagcaatagccaatactatcagaaaatcc

SEQ ID NO: 32701 - DNA, 33 bp, Homo sapiens
aggaggatagggcacacgtaagagacttgaggt

SEQ ID NO: 32702 - DNA, 33 bp, Homo sapiens
tttttggttagacttccctacattgaaggggat

SEQ ID NO: 32703 - DNA, 33 bp, Homo sapiens
cacacatatcaagtagcattccaagtttacatg

SEQ ID NO: 32704 - DNA, 33 bp, Homo sapiens
aaacaatattttcaaacgtcctcaataaaatag

SEQ ID NO: 32705 - DNA, 33 bp, Homo sapiens
gtgctcaggaagaaaccgtagaaaccaataata

SEQ ID NO: 32706 - DNA, 51 bp, Homo sapiens
tgagcctacttttagatattttatcacaagagagtaaacaacttgattatt

SEQ ID NO: 32707 - DNA, 33 bp, Homo sapiens
tattcttgggtcatagaaaataatgtagaccga

SEQ ID NO: 32708 - DNA, 33 bp, Homo sapiens
aaattttatctttaccaatacatctcaaatacc

SEQ ID NO: 32709 - DNA, 33 bp, Homo sapiens
aaataattaggaaagacaacaggtgcaacagac

SEQ ID NO: 32710 - DNA, 33 bp, Homo sapiens
agttgacaacatgaaccggagacaagaaataaa

SEQ ID NO: 32711 - DNA, 33 bp, Homo sapiens
ctctgtctcaaaaaaggagaagagaaaagatac

SEQ ID NO: 32712 - DNA, 33 bp, Homo sapiens
tactatctcttttaaacttgaggagaataaagt

SEQ ID NO: 32713 - DNA, 51 bp, Homo sapiens
aaatgaaaatggaagcacaatgtaacaaaatctctgcaatgcagcaaaggc

SEQ ID NO: 32714 - DNA, 33 bp, Homo sapiens
ctttgtattttccacaccccttaacacacagtg

SEQ ID NO: 32715 - DNA, 33 bp, Homo sapiens
acaccattttatataacagatgagcatccatgg

SEQ ID NO: 32716 - DNA, 51 bp, Homo sapiens
ttcccatgtgcctcttttccttctcacagatttatcttttgcttcactcag

SEQ ID NO: 32717 - DNA, 33 bp, Homo sapiens
ggaagagctatggtgacgtttcaaattgaacag

SEQ ID NO: 32718 - DNA, 33 bp, Homo sapiens
tctagaattcttttcaacttgcaatactaaaac

SEQ ID NO: 32719 - DNA, 51 bp, Homo sapiens
tcactgacttgcctcatccaataaaatgttttgtttctgagacaattgggt

SEQ ID NO: 32720 - DNA, 33 bp, Homo sapiens
aaagctttgagaatcacgcacaaaaaattcagg

SEQ ID NO: 32721 - DNA, 33 bp, Homo sapiens
ccgtggatatcctgaagtgtctggggttttttt

SEQ ID NO: 32722 - DNA, 33 bp, Homo sapiens
cttatctaaagtttcacaacaagtagagtccaa

SEQ ID NO: 32723 - DNA, 33 bp, Homo sapiens
agtggctgacaacaaaagtatgaggttgaggga

SEQ ID NO: 32724 - DNA, 33 bp, Homo sapiens
tctagatgagactgacaaaggagaaagcattga

SEQ ID NO: 32725 - DNA, 33 bp, Homo sapiens
ggcaggtctcacttccacattagctattgactt

SEQ ID NO: 32726 - DNA, 33 bp, Homo sapiens
agaatagccaagtagacagaaaagagtgagaac

SEQ ID NO: 32727 - DNA, 33 bp, Homo sapiens
ttaagatttttgtgaaagttaggaagcgttccc

SEQ ID NO: 32728 - DNA, 33 bp, Homo sapiens
attcaggggagggagaacatcaaccagaatagc

SEQ ID NO: 32729 - DNA, 33 bp, Homo sapiens
gacataagattgtagcaataagtaggggtcaga

SEQ ID NO: 32730 - DNA, 33 bp, Homo sapiens
ttcagtatttaaacatgacaagacatgtaacat

SEQ ID NO: 32731 - DNA, 33 bp, Homo sapiens
catgtgaattatgaagaaaagttatgcaaatgt

SEQ ID NO: 32732 - DNA, 51 bp, Homo sapiens
ttttacatggagttgaagggattctcaaaaaaataagtccagctatagaaa

SEQ ID NO: 32733 - DNA, 33 bp, Homo sapiens
ggctaaagatacgaataacttccaaaaggaaat

SEQ ID NO: 32734 - DNA, 33 bp, Homo sapiens
acaattatcctaattactaacaggccgttctgt

SEQ ID NO: 32735 - DNA, 33 bp, Homo sapiens
tttttgtactaaatgcacagtgtgaagtcttta

SEQ ID NO: 32736 - DNA, 33 bp, Homo sapiens
tagagaaaattaggtacgattcaagttcttggt

SEQ ID NO: 32737 - DNA, 33 bp, Homo sapiens
taattagcagaaaaaacagcaaaggttaagaat

SEQ ID NO: 32738 - DNA, 33 bp, Homo sapiens
cttataactgttaaaactgttgctctgccttat

SEQ ID NO: 32739 - DNA, 33 bp, Homo sapiens
tcaggacataggagcaaggaaagattttatgat

SEQ ID NO: 32740 - DNA, 33 bp, Homo sapiens
ttgattgggaaagtgaaaaatgtacatgaaatc

SEQ ID NO: 32741 - DNA, 33 bp, Homo sapiens
attgagttaagaaaagaataattggtgaagaat

SEQ ID NO: 32742 - DNA, 51 bp, Homo sapiens
ggggataccacagaaataagataaactgtggtatgagataggtggggaata

SEQ ID NO: 32743 - DNA, 33 bp, Homo sapiens
agagaaatgaagaaagcctggtttaggatacca

SEQ ID NO: 32744 - DNA, 33 bp, Homo sapiens
taactcaaaattgaacaaaaacctaaatgtaag

SEQ ID NO: 32745 - DNA, 33 bp, Homo sapiens
cttctatgagttgttacaaatttggcccttaca

SEQ ID NO: 32746 - DNA, 33 bp, Homo sapiens
tgctattgtgttaggaatacctttagcactatg

SEQ ID NO: 32747 - DNA, 33 bp, Homo sapiens
acctagattttctatacaatgggcaggagttgt

SEQ ID NO: 32748 - DNA, 33 bp, Homo sapiens
ttattcaattcacctaaatctgcagagggtcca

SEQ ID NO: 32749 - DNA, 33 bp, Homo sapiens
tgaagaaatgagctcgaactatttggtacagtg

SEQ ID NO: 32750 - DNA, 33 bp, Homo sapiens
cacaaaacactactgaaaataattgaataacag

SEQ ID NO: 32751 - DNA, 33 bp, Homo sapiens
tgttgtttggtacaccacagtgttaagtgggct

SEQ ID NO: 32752 - DNA, 33 bp, Homo sapiens
ttttgtatgttttagagatcacataggtatata

SEQ ID NO: 32753 - DNA, 33 bp, Homo sapiens
gaaaaggagggtccaactgatgaaataggtctt

SEQ ID NO: 32754 - DNA, 33 bp, Homo sapiens
tagttaccgggaatcacctaaccatgaccaaaa

SEQ ID NO: 32755 - DNA, 33 bp, Homo sapiens
acattaaataaaaataacatggcacaaaataca

SEQ ID NO: 32756 - DNA, 33 bp, Homo sapiens
ttttaggtgtcattgacgttagagttctgtttt

SEQ ID NO: 32757 - DNA, 33 bp, Homo sapiens
ttccaggtcattcagaatagcagtcagatatac

SEQ ID NO: 32758 - DNA, 33 bp, Homo sapiens
ggtaactttctacaacaggcatttagaaaccat

SEQ ID NO: 32759 - DNA, 33 bp, Homo sapiens
acttcaaactagatgtaaagacgaataggacat

SEQ ID NO: 32760 - DNA, 51 bp, Homo sapiens
tggtttaaactgctgtttggctcaaaatagacatgtatcctggagttgtta

SEQ ID NO: 32761 - DNA, 33 bp, Homo sapiens
caatagtgagatcctacgtcttgaagaaggaaa

SEQ ID NO: 32762 - DNA, 33 bp, Homo sapiens
ctattggaggccagaacacatagtaaatatata

SEQ ID NO: 32763 - DNA, 33 bp, Homo sapiens
tttggcaaaatggggcaactccttgcagcagtg

SEQ ID NO: 32764 - DNA, 33 bp, Homo sapiens
gcttctttggattttacggtggctttctgattt

SEQ ID NO: 32765 - DNA, 33 bp, Homo sapiens
ctaataaactgtctccaaagctgaattgatatg

SEQ ID NO: 32766 - DNA, 33 bp, Homo sapiens
cactgaagaagtttcaaaaggctaaattcttct

SEQ ID NO: 32767 - DNA, 33 bp, Homo sapiens
ttctgagattgtagtgaaaggtaaatctgaaat

SEQ ID NO: 32768 - DNA, 33 bp, Homo sapiens
ccacataacttcaatacctggaatttcacaaat

SEQ ID NO: 32769 - DNA, 51 bp, Homo sapiens
gggacccgttgctaaaggggtgtgaaatttctctgtgcggtaataaaatgt

SEQ ID NO: 32770 - DNA, 33 bp, Homo sapiens
ccagtccaaaagaaaactatggggcacttctct

SEQ ID NO: 32771 - DNA, 33 bp, Homo sapiens
ttggtaaactcatgccaaatattcccctgcgtc

SEQ ID NO: 32772 - DNA, 33 bp, Homo sapiens
atcttggaggtcaacacaattcaagggttggat

SEQ ID NO: 32773 - DNA, 33 bp, Homo sapiens
tttagttgatgttttaaattgactgaattgaag

SEQ ID NO: 32774 - DNA, 33 bp, Homo sapiens
ctattagttatggatacgaactttaaacaaaca

SEQ ID NO: 32775 - DNA, 33 bp, Homo sapiens
agcctttaagcctgaaatgtctacacctctcca

SEQ ID NO: 32776 - DNA, 33 bp, Homo sapiens
tctaactatactgaaagttgctgacactgcaag

SEQ ID NO: 32777 - DNA, 33 bp, Homo sapiens
agggtcaaaatggccagaatgcaactgtgatgt

SEQ ID NO: 32778 - DNA, 33 bp, Homo sapiens
ctgatccataacagccaagaaaattctatcatc

SEQ ID NO: 32779 - DNA, 33 bp, Homo sapiens
aattgttttcagaatcagagatgagaaagtgac

SEQ ID NO: 32780 - DNA, 33 bp, Homo sapiens
agcaccattctcccgagtattcagtacttaact

SEQ ID NO: 32781 - DNA, 33 bp, Homo sapiens
ctgggggaaaagtgacgaccagaaagtgaagac

SEQ ID NO: 32782 - DNA, 33 bp, Homo sapiens
gatgaaatttctagacacactctggatgaaaag

SEQ ID NO: 32783 - DNA, 51 bp, Homo sapiens
gagtttaattgactggttacctctacgcagtgctagataagcatggttcat

SEQ ID NO: 32784 - DNA, 51 bp, Homo sapiens
atggatttctatggatacagaaatacgaatttttagacacaccattggaat

SEQ ID NO: 32785 - DNA, 33 bp, Homo sapiens
ccccagattagagagacggaaagtggttgttag

SEQ ID NO: 32786 - DNA, 33 bp, Homo sapiens
ggtgaggcatggtaaagaaatgtctgaccataa

SEQ ID NO: 32787 - DNA, 33 bp, Homo sapiens
ggttagctgcattgtaacctgtgaagcttgaaa

SEQ ID NO: 32788 - DNA, 33 bp, Homo sapiens
aaagaagcatcctgaaaactgactcaaatagta

SEQ ID NO: 32789 - DNA, 33 bp, Homo sapiens
aataaggaggttgtcactgaaaagagtgaattc

SEQ ID NO: 32790 - DNA, 33 bp, Homo sapiens
ctgcctcatactctacagacaaagaacttgagc

SEQ ID NO: 32791 - DNA, 33 bp, Homo sapiens
ttagaatgctgcctaagtatgggttcttccttt

SEQ ID NO: 32792 - DNA, 33 bp, Homo sapiens
tttaacaagcgttgcactgaaaacaactttatg

SEQ ID NO: 32793 - DNA, 33 bp, Homo sapiens
tgctgcaaaacaaataacctcaaaatcagaagc

SEQ ID NO: 32794 - DNA, 33 bp, Homo sapiens
tgtcccttgacgaagccacttggctacttgtgt

SEQ ID NO: 32795 - DNA, 33 bp, Homo sapiens
aatcaacctagattcccatcaactggataaaga

SEQ ID NO: 32796 - DNA, 33 bp, Homo sapiens
cagagatgtgctttgcaaatggtgctattttat

SEQ ID NO: 32797 - DNA, 33 bp, Homo sapiens
aaatgctcaaattacaaaagctcaatccaagga

SEQ ID NO: 32798 - DNA, 33 bp, Homo sapiens
ctggcagatgattttccaaagtgtcttttccat

SEQ ID NO: 32799 - DNA, 33 bp, Homo sapiens
aaacctaagtgcagtgaaataacccaaatgata

SEQ ID NO: 32800 - DNA, 33 bp, Homo sapiens
gtgaattgagtaggccagatgagttggcagacc

SEQ ID NO: 32801 - DNA, 33 bp, Homo sapiens
aaattgaaaatatgacacttaaaacaagctcaa

SEQ ID NO: 32802 - DNA, 33 bp, Homo sapiens
cttacaatggcatggaaaactcagataactggt

SEQ ID NO: 32803 - DNA, 33 bp, Homo sapiens
caaggagggttttaaacgtccagctgtcattat

SEQ ID NO: 32804 - DNA, 33 bp, Homo sapiens
atttggtatatcttaacgcttggtactaatgat

SEQ ID NO: 32805 - DNA, 33 bp, Homo sapiens
ttgtagccagctagtccgaagtgggggtggtcc

SEQ ID NO: 32806 - DNA, 33 bp, Homo sapiens
tgccatgaaatttgacaagggattcatgtatac

SEQ ID NO: 32807 - DNA, 33 bp, Homo sapiens
tacctgcttattcacaacctgcttgaggcttat

SEQ ID NO: 32808 - DNA, 33 bp, Homo sapiens
gagcaagttaaagaatcagaggaaaacctggag

SEQ ID NO: 32809 - DNA, 33 bp, Homo sapiens
agtcaggagtcatacacagcacagaacattgtt

SEQ ID NO: 32810 - DNA, 33 bp, Homo sapiens
tttaattctttttataacacttagcacattaat

SEQ ID NO: 32811 - DNA, 33 bp, Homo sapiens
acccactcaccattatcacctggcatgaaaaca

SEQ ID NO: 32812 - DNA, 33 bp, Homo sapiens
acctcttctgaccactaaactaaaccacgtaca

SEQ ID NO: 32813 - DNA, 33 bp, Homo sapiens
agaattctatattatgcatagcaaatgagccaa

SEQ ID NO: 32814 - DNA, 33 bp, Homo sapiens
cagagcatctcattacactgtgaatatacacgt

SEQ ID NO: 32815 - DNA, 33 bp, Homo sapiens
atgagcaaactgaatcactggtagtctaaataa

SEQ ID NO: 32816 - DNA, 33 bp, Homo sapiens
gggacaaaaatccagacgtgaagtggaggagag

SEQ ID NO: 32817 - DNA, 33 bp, Homo sapiens
ccttgtattgttaattaaaggcgaaatttgggc

SEQ ID NO: 32818 - DNA, 33 bp, Homo sapiens
atgagcttctactaccaagatgctttggaaaac

SEQ ID NO: 32819 - DNA, 33 bp, Homo sapiens
tgagaagtaggagcatcaggatatctggtacct

SEQ ID NO: 32820 - DNA, 33 bp, Homo sapiens
gttgtataccaatgcaataagtatgtacaaagc

SEQ ID NO: 32821 - DNA, 51 bp, Homo sapiens
caaaggcatagaggaaccttaaatgaaaattgctaagtaaaagaggtcagt

SEQ ID NO: 32822 - DNA, 33 bp, Homo sapiens
aggactaaacaaatgacagaggactttgcagca

SEQ ID NO: 32823 - DNA, 33 bp, Homo sapiens
attgatgctagtattacagttaccagtggcgta

SEQ ID NO: 32824 - DNA, 33 bp, Homo sapiens
gtggatataacggaaacggagtaggatttaagg

SEQ ID NO: 32825 - DNA, 33 bp, Homo sapiens
gattgcagcttgtctagctctgaatggaaaaca

SEQ ID NO: 32826 - DNA, 33 bp, Homo sapiens
atgtgttgtacagataaatatcagggtgaggtc

SEQ ID NO: 32827 - DNA, 51 bp, Homo sapiens
ctgaaatcatcttgatggtgactaaagtgccctgttgagtatgttgcaggc

SEQ ID NO: 32828 - DNA, 33 bp, Homo sapiens
caattccagtcatcataaaacagaaatatccta

SEQ ID NO: 32829 - DNA, 33 bp, Homo sapiens
tgaaattgaattgacacaaaccaccagtggctc

SEQ ID NO: 32830 - DNA, 33 bp, Homo sapiens
tggcttaaaggaccccaaatatagcttaggcca

SEQ ID NO: 32831 - DNA, 33 bp, Homo sapiens
agtaactcaatagttaccagtcgctttggggaa

SEQ ID NO: 32832 - DNA, 33 bp, Homo sapiens
tcctttccaactagaaactccttcagagtcaag

SEQ ID NO: 32833 - DNA, 33 bp, Homo sapiens
tagttaaattgcagcacatacttcaaatcacac

SEQ ID NO: 32834 - DNA, 33 bp, Homo sapiens
accattcattttttccaattctcagacatagat

SEQ ID NO: 32835 - DNA, 33 bp, Homo sapiens
gcaatggagtcctaaacgtgaaccataaaggaa

SEQ ID NO: 32836 - DNA, 33 bp, Homo sapiens
acagtatgaatcaacccgcttctggatttcccc

SEQ ID NO: 32837 - DNA, 33 bp, Homo sapiens
acaatgttgatagactaaaagtataagggaatc

SEQ ID NO: 32838 - DNA, 33 bp, Homo sapiens
aacctattgtttagggaataacaacagtaagag

SEQ ID NO: 32839 - DNA, 33 bp, Homo sapiens
cgtatgtgaatggacaactgacccaagcttgca

SEQ ID NO: 32840 - DNA, 51 bp, Homo sapiens
taataggaatgagtcagagtggagccgataatcggaatgagtcagggtgga

SEQ ID NO: 32841 - DNA, 51 bp, Homo sapiens
gagtgtgcaaaatgattttgataaaagtatgttgatctggggacctgtaag

SEQ ID NO: 32842 - DNA, 51 bp, Homo sapiens
tataaatgacatgataaaaatcctacgaacaactccatactaatacatttg

SEQ ID NO: 32843 - DNA, 33 bp, Homo sapiens
aaggcatagtccctgacatgtaggcgcccataa

SEQ ID NO: 32844 - DNA, 51 bp, Homo sapiens
gaagtcaagctgaaaatggagagcaactatactaaagcccaatccgaggtg

SEQ ID NO: 32845 - DNA, 33 bp, Homo sapiens
gggacaagaaccataacccaggcaagatatcac

SEQ ID NO: 32846 - DNA, 51 bp, Homo sapiens
gaaaagtgttagcttccaagcgtgacgaacccttcagatagactcatcagt

SEQ ID NO: 32847 - DNA, 33 bp, Homo sapiens
ttgctaccagaccacaaatggcactaacagaaa

SEQ ID NO: 32848 - DNA, 33 bp, Homo sapiens
taatgtggaacttttacacctatgtccaaatac

SEQ ID NO: 32849 - DNA, 33 bp, Homo sapiens
tcattcattaccaaaccacactcctctgtttaa

SEQ ID NO: 32850 - DNA, 33 bp, Homo sapiens
agaaaaactagaacaccaaataatggcagccag

SEQ ID NO: 32851 - DNA, 33 bp, Homo sapiens
tagctagaaggatcaaagacaagggtgacaccg

SEQ ID NO: 32852 - DNA, 33 bp, Homo sapiens
tttagggcccaggtgaaatgagttaggcatcca

SEQ ID NO: 32853 - DNA, 33 bp, Homo sapiens
tcaaaaatgtgaacaacgttggggtagtggtgt

SEQ ID NO: 32854 - DNA, 33 bp, Homo sapiens
ttaacatcacgtaagactaatacctggtggtct

SEQ ID NO: 32855 - DNA, 33 bp, Homo sapiens
aaataaactacggaaaatccatagtagcaattg

SEQ ID NO: 32856 - DNA, 33 bp, Homo sapiens
aatacctggtttgagaaatcatagtttgtgcag

SEQ ID NO: 32857 - DNA, 33 bp, Homo sapiens
tgagtgtcaacttctacaaccttggatgacata

SEQ ID NO: 32858 - DNA, 51 bp, Homo sapiens
cctggcacagaggctggaaatgagtaggtactgctaaaacaatgtggaatg

SEQ ID NO: 32859 - DNA, 33 bp, Homo sapiens
actctgtgtccagtccaagcttcagagaaggaa

SEQ ID NO: 32860 - DNA, 33 bp, Homo sapiens
aaaattttatctatcacaggctcgtaagattca

SEQ ID NO: 32861 - DNA, 33 bp, Homo sapiens
ctggaactacaccaccagcttatctagatctcc

SEQ ID NO: 32862 - DNA, 51 bp, Homo sapiens
caatatagataaagctagttcaaaaacataattaattctactaagatttgg

SEQ ID NO: 32863 - DNA, 33 bp, Homo sapiens
ataggaagcacaggtgcaaatggaaaactgcaa

SEQ ID NO: 32864 - DNA, 33 bp, Homo sapiens
tttggactagcctgagaccagtagcagagactt

SEQ ID NO: 32865 - DNA, 33 bp, Homo sapiens
tgagaataacccaagacgtgtttcgtgctggga

SEQ ID NO: 32866 - DNA, 33 bp, Homo sapiens
gttgtttggtaataggaactcagaaccaaagtc

SEQ ID NO: 32867 - DNA, 33 bp, Homo sapiens
agacataaaaatgccaaacttaaaattgaggta

SEQ ID NO: 32868 - DNA, 33 bp, Homo sapiens
gagtgtttgcacagtacagtaacatttggttgt

SEQ ID NO: 32869 - DNA, 33 bp, Homo sapiens
acagctgaatgaactacgatttacgagaacgag

SEQ ID NO: 32870 - DNA, 33 bp, Homo sapiens
gatagtgagcacaagcaagcacaaacctgaaat

SEQ ID NO: 32871 - DNA, 33 bp, Homo sapiens
gtggaaacaggagaagcagaattcagtttggca

SEQ ID NO: 32872 - DNA, 33 bp, Homo sapiens
caagcaacaacatacaatatataagcgatgaat

SEQ ID NO: 32873 - DNA, 33 bp, Homo sapiens
ggtctgactctcataaagcttacattagaatgt

SEQ ID NO: 32874 - DNA, 33 bp, Homo sapiens
ttgagaatctactataagctttggcaatgttga

SEQ ID NO: 32875 - DNA, 33 bp, Homo sapiens
attctgctaaggcatcactttcttccagatgtt

SEQ ID NO: 32876 - DNA, 33 bp, Homo sapiens
taaacctgagggacaccgagaaaaacagctgct

SEQ ID NO: 32877 - DNA, 33 bp, Homo sapiens
gttaccatgcatagaaataagggcaaggtgcag

SEQ ID NO: 32878 - DNA, 33 bp, Homo sapiens
tgagcaagtaacagatcagtttcaggaagaggc

SEQ ID NO: 32879 - DNA, 33 bp, Homo sapiens
catatgatgccacttcactgcattctatcagtc

SEQ ID NO: 32880 - DNA, 33 bp, Homo sapiens
agtattagaggaagaacagagttagaagaattc

SEQ ID NO: 32881 - DNA, 33 bp, Homo sapiens
catcaaatgaatcaccacatatcttgaaaaatt

SEQ ID NO: 32882 - DNA, 33 bp, Homo sapiens
ctttgttctctgatgcaaaaaatcttcagaaac

SEQ ID NO: 32883 - DNA, 33 bp, Homo sapiens
tgctaagagttaggatcaagaatggcatcctac

SEQ ID NO: 32884 - DNA, 33 bp, Homo sapiens
tctgtgttgcagactaaaagcaaaatgcagtaa

SEQ ID NO: 32885 - DNA, 33 bp, Homo sapiens
agtggatcttctaacaacttaactgaccacagt

SEQ ID NO: 32886 - DNA, 33 bp, Homo sapiens
aaaactctttgtgaacgaaaaggagacaggtgt

SEQ ID NO: 32887 - DNA, 33 bp, Homo sapiens
ttccacattctgaagcagcagcccaaactgtat

SEQ ID NO: 32888 - DNA, 33 bp, Homo sapiens
agaagcctgaactatccaagatttgaaagatga

SEQ ID NO: 32889 - DNA, 33 bp, Homo sapiens
aagtcctgggaaaaataatttcaactcagcttt

SEQ ID NO: 32890 - DNA, 33 bp, Homo sapiens
tttctaaaatccctgacaaattcctagcaacta

SEQ ID NO: 32891 - DNA, 33 bp, Homo sapiens
agagcagggattacccagaaaccagcaccggga

SEQ ID NO: 32892 - DNA, 33 bp, Homo sapiens
aaattatgaggttaaaaaattgcctgttgtttg

SEQ ID NO: 32893 - DNA, 33 bp, Homo sapiens
tgtatgtattcgaactgagaactcaaaatttta

SEQ ID NO: 32894 - DNA, 33 bp, Homo sapiens
tgactgagctccagtaagtggcaactgactttt

SEQ ID NO: 32895 - DNA, 33 bp, Homo sapiens
tagatacaagggacgacgagtctttgaactaag

SEQ ID NO: 32896 - DNA, 33 bp, Homo sapiens
ctaatagtatattcacagaattgtaaaccttac

SEQ ID NO: 32897 - DNA, 33 bp, Homo sapiens
cgggctgtaatttctacgatttgtatgagtata

SEQ ID NO: 32898 - DNA, 33 bp, Homo sapiens
gtgttgtgcacctgcactatctaatccttcaat

SEQ ID NO: 32899 - DNA, 33 bp, Homo sapiens
gctttagcattatagtaaccttctttcacctaa

SEQ ID NO: 32900 - DNA, 33 bp, Homo sapiens
taacagcgatttttaaaacagcgataaagtctg

SEQ ID NO: 32901 - DNA, 33 bp, Homo sapiens
aagaagttcatgagccaaagaatgtggtagcct

SEQ ID NO: 32902 - DNA, 33 bp, Homo sapiens
ccaaattgtgttaggaaggcctgctatctacag

SEQ ID NO: 32903 - DNA, 33 bp, Homo sapiens
gttggtttaaatgggccacttccagaatttctg

SEQ ID NO: 32904 - DNA, 33 bp, Homo sapiens
agaaaatacagttccaaaagcgctgacttcact

SEQ ID NO: 32905 - DNA, 33 bp, Homo sapiens
tacttttcatttcacacgataggcttcaggcta

SEQ ID NO: 32906 - DNA, 51 bp, Homo sapiens
aaaacataaagaagtgggaatcatgaaaatgaataaacatgatttccacag

SEQ ID NO: 32907 - DNA, 51 bp, Homo sapiens
ttatgcagaaaaagagaatatataacgaaggtataacaagcatgaaacttc

SEQ ID NO: 32908 - DNA, 51 bp, Homo sapiens
acaattgctaccaaagttcacaggacagttagtgtaaggaaatccagaact

SEQ ID NO: 32909 - DNA, 33 bp, Homo sapiens
tttagatatgttgagtctctgctgctacttgaa

SEQ ID NO: 32910 - DNA, 33 bp, Homo sapiens
cacacactgatctacactgaaaaaaatacaaac

SEQ ID NO: 32911 - DNA, 33 bp, Homo sapiens
cttcaagggttgaaaaatttctgctaaagaata

SEQ ID NO: 32912 - DNA, 33 bp, Homo sapiens
gaaaacttaagcttcaagatacttataactgta

SEQ ID NO: 32913 - DNA, 51 bp, Homo sapiens
aggaatataaatttttgatagtctacgctcagtagttaggtactctgaaaa

SEQ ID NO: 32914 - DNA, 33 bp, Homo sapiens
aaattgacagctgcgacgagtgctatgaagaaa

SEQ ID NO: 32915 - DNA, 33 bp, Homo sapiens
cacatcatcttatgtcaaaagtcatgttaacaa

SEQ ID NO: 32916 - DNA, 33 bp, Homo sapiens
gtaacaagtattgttaaggatgtagagggacag

SEQ ID NO: 32917 - DNA, 33 bp, Homo sapiens
gagagtgctacatcaacctaaaatggcttcctt

SEQ ID NO: 32918 - DNA, 33 bp, Homo sapiens
ctttgactgcctttgcggaagagtaacccacaa

SEQ ID NO: 32919 - DNA, 33 bp, Homo sapiens
tctaaatgctgtatagccattcatttagcagac

SEQ ID NO: 32920 - DNA, 33 bp, Homo sapiens
actctcaggacattaaatccttctcaacctgtg

SEQ ID NO: 32921 - DNA, 33 bp, Homo sapiens
ggtgtttaaaaatgtagagaaaccacttgcata

SEQ ID NO: 32922 - DNA, 33 bp, Homo sapiens
agggaaggagtaccaaaagactgaaccatttac

SEQ ID NO: 32923 - DNA, 33 bp, Homo sapiens
catagtacttgacaaacaagagtttcataaatg

SEQ ID NO: 32924 - DNA, 33 bp, Homo sapiens
atatttttttgcccccagatgttctaaagtgtt

SEQ ID NO: 32925 - DNA, 33 bp, Homo sapiens
ttatttcttggataacaaactggagaacagaat

SEQ ID NO: 32926 - DNA, 33 bp, Homo sapiens
tgctctattgtaacaaccttgtaactggctttc

SEQ ID NO: 32927 - DNA, 33 bp, Homo sapiens
ggctatttttcactcactctatcaaggaacgtg

SEQ ID NO: 32928 - DNA, 33 bp, Homo sapiens
tcatcaagcgattcatcaaatctgtgatagaac

SEQ ID NO: 32929 - DNA, 33 bp, Homo sapiens
ctgttgtaagtaagcacccactttgctaaagtg

SEQ ID NO: 32930 - DNA, 33 bp, Homo sapiens
aaggaaatctgtattccattcggagtgtgtgat

SEQ ID NO: 32931 - DNA, 33 bp, Homo sapiens
ctcttcacgaaggaaaggagggctgttgtcttg

SEQ ID NO: 32932 - DNA, 33 bp, Homo sapiens
atacactatatataaacggggagccaaatggca

SEQ ID NO: 32933 - DNA, 33 bp, Homo sapiens
tacttattgaataaacaaatagcagtcttacag

SEQ ID NO: 32934 - DNA, 33 bp, Homo sapiens
tgtatcaggatgtatcacttgtagtgtaacagg

SEQ ID NO: 32935 - DNA, 33 bp, Homo sapiens
ggaagcagtatagtcactaagagaaagagatcc

SEQ ID NO: 32936 - DNA, 33 bp, Homo sapiens
aatcaatattggaggccacttgcagatactatt

SEQ ID NO: 32937 - DNA, 51 bp, Homo sapiens
gcacctgatacaggtctgtcttcccggagcaatgcttcagttctccacatt

SEQ ID NO: 32938 - DNA, 33 bp, Homo sapiens
tattctcatgagcaaactctgaaagtacttcca

SEQ ID NO: 32939 - DNA, 33 bp, Homo sapiens
tttaaatggaatgttcaagaagtcaggtattaa

SEQ ID NO: 32940 - DNA, 33 bp, Homo sapiens
caaaagattttaggtaagaacaggcagtcattg

SEQ ID NO: 32941 - DNA, 33 bp, Homo sapiens
aataagagaacaggcaacaactattctttgaat

SEQ ID NO: 32942 - DNA, 33 bp, Homo sapiens
aggcacctgataactaaagacagctcctatatc

SEQ ID NO: 32943 - DNA, 33 bp, Homo sapiens
taacctgaggttgggacaaaatggattaaacat

SEQ ID NO: 32944 - DNA, 33 bp, Homo sapiens
gatcaggccagtgcataagtcaccttgagggtc

SEQ ID NO: 32945 - DNA, 33 bp, Homo sapiens
tgtgtatcaagccatacctggggagaagagtgg

SEQ ID NO: 32946 - DNA, 33 bp, Homo sapiens
tctcaccagcagtggactaatgataagcagatt

SEQ ID NO: 32947 - DNA, 33 bp, Homo sapiens
gtctgtggaactctggacatcagctttattaac

SEQ ID NO: 32948 - DNA, 33 bp, Homo sapiens
caattccatgctaagaaataaactatggatatg

SEQ ID NO: 32949 - DNA, 33 bp, Homo sapiens
aagtgtctgtaatagtcaaggagtctcctcatg

SEQ ID NO: 32950 - DNA, 33 bp, Homo sapiens
tgtcccaagagaaattcaaagactgccatggca

SEQ ID NO: 32951 - DNA, 33 bp, Homo sapiens
ttctgcacctgtcaaaaaaccaatatccctaac

SEQ ID NO: 32952 - DNA, 33 bp, Homo sapiens
cctctttctctgtagacgcttagggttcagcct

SEQ ID NO: 32953 - DNA, 51 bp, Homo sapiens
agtaaataacagctgtcacatatttccattttgtactggagacgacagtga

SEQ ID NO: 32954 - DNA, 33 bp, Homo sapiens
taatactaataatggaaaggcacgatgagcaaa

SEQ ID NO: 32955 - DNA, 33 bp, Homo sapiens
aaaaagactgtcaactaaaagagtgctataaag

SEQ ID NO: 32956 - DNA, 51 bp, Homo sapiens
ttaaaattttttaaaagaaaatttaggttcacacaaaatctcacaaatatt

SEQ ID NO: 32957 - DNA, 33 bp, Homo sapiens
ttaaagagcaggactaagcacttcaattataac

SEQ ID NO: 32958 - DNA, 33 bp, Homo sapiens
tataataaagctaaagcacaaagagtgtcacct

SEQ ID NO: 32959 - DNA, 33 bp, Homo sapiens
ttttcttcctttaaacaacaaactagggccagg

SEQ ID NO: 32960 - DNA, 33 bp, Homo sapiens
ttccattttcacttacaacttgcaaaagattga

SEQ ID NO: 32961 - DNA, 51 bp, Homo sapiens
attcaaacacacatatatatatatgcaaactatgatagaaccccagctagt

SEQ ID NO: 32962 - DNA, 33 bp, Homo sapiens
accgtagactgaaggaagaaggccgattttcct

SEQ ID NO: 32963 - DNA, 33 bp, Homo sapiens
gtatatattgaatgtacagttatgcaacttaag

SEQ ID NO: 32964 - DNA, 33 bp, Homo sapiens
taaaccttgcataaataaaacattttcttgtct

SEQ ID NO: 32965 - DNA, 33 bp, Homo sapiens
ttaaagcaggaatagaacaaatacatgaggctg

SEQ ID NO: 32966 - DNA, 33 bp, Homo sapiens
aaaatcaaatattaccactaagtcatgtatata

SEQ ID NO: 32967 - DNA, 33 bp, Homo sapiens
cttttttccctaaagaagacagccctttcagaa

SEQ ID NO: 32968 - DNA, 33 bp, Homo sapiens
caaattttttctaagcaaatatgcaaaacagca

SEQ ID NO: 32969 - DNA, 51 bp, Homo sapiens
aaattcctatgaaatacaaatgaaacctaaatctcataatttgaatggatt

SEQ ID NO: 32970 - DNA, 51 bp, Homo sapiens
tagagccctgaatgacttttctgagaatttaatctagttgcatagctattt

SEQ ID NO: 32971 - DNA, 33 bp, Homo sapiens
ccatagctgaaaatacaatagctgaaagcatgg

SEQ ID NO: 32972 - DNA, 51 bp, Homo sapiens
aggatagataatttgtttcaaagtacatgtaacatttatcaatttagactg

SEQ ID NO: 32973 - DNA, 33 bp, Homo sapiens
gagaattctactaaaacctgggcatcaatgtat

SEQ ID NO: 32974 - DNA, 51 bp, Homo sapiens
aaaatcacacattttagcaattttagctgtttagcaataatttccaacatc

SEQ ID NO: 32975 - DNA, 51 bp, Homo sapiens
gcattggaataaattatagtggaccatcaacttatgatacctattgattga

SEQ ID NO: 32976 - DNA, 51 bp, Homo sapiens
ttagttgtgtctcttgtcaaatccaattatctgcttacaagagaaacacct

SEQ ID NO: 32977 - DNA, 33 bp, Homo sapiens
attgtagggatgtacccgagttattcatgtatt

SEQ ID NO: 32978 - DNA, 33 bp, Homo sapiens
agtaatttttgtccagaccaatgttctagagag

SEQ ID NO: 32979 - DNA, 33 bp, Homo sapiens
caacccttattcttaaagcttgcaagaggttta

SEQ ID NO: 32980 - DNA, 33 bp, Homo sapiens
ttttaagcaatccttaccatccaacatccagta

SEQ ID NO: 32981 - DNA, 33 bp, Homo sapiens
ctcttaagctaagtaaccagggctacaattagt

SEQ ID NO: 32982 - DNA, 33 bp, Homo sapiens
gtttggagagttctcaaataaatgaaaacagat

SEQ ID NO: 32983 - DNA, 33 bp, Homo sapiens
catgtatagcagctgactaacaatgtttaatat

SEQ ID NO: 32984 - DNA, 33 bp, Homo sapiens
agtaaggtgtcttcaacatatgcagttttgaca

SEQ ID NO: 32985 - DNA, 33 bp, Homo sapiens
ttttgatgtgcaaagaaattggctaaatacttt

SEQ ID NO: 32986 - DNA, 33 bp, Homo sapiens
aaaaaactattattcaaaatacgcaaacaactg

SEQ ID NO: 32987 - DNA, 33 bp, Homo sapiens
tctgctttgactgcctaacaatatctttctgac

SEQ ID NO: 32988 - DNA, 33 bp, Homo sapiens
tagtaacattctaaacagtattatcaggttata

SEQ ID NO: 32989 - DNA, 33 bp, Homo sapiens
gaaaaactgccttaaagatgtcaactaataata

SEQ ID NO: 32990 - DNA, 33 bp, Homo sapiens
aactgctgtgatccaacaagtctaagtaatata

SEQ ID NO: 32991 - DNA, 33 bp, Homo sapiens
attagtgggtatgtggaagaattgagttatctg

SEQ ID NO: 32992 - DNA, 33 bp, Homo sapiens
aggacatcggcacaggaaaatgtttcatggcga

SEQ ID NO: 32993 - DNA, 33 bp, Homo sapiens
tccttgagaaacaacaaggaaaatgagcaataa

SEQ ID NO: 32994 - DNA, 33 bp, Homo sapiens
tgaaggagctgtagaaaagaacagatgggagtc

SEQ ID NO: 32995 - DNA, 33 bp, Homo sapiens
ccttagtggtcttgcacaaaatctggaacagtt

SEQ ID NO: 32996 - DNA, 33 bp, Homo sapiens
ttatcacttccaaataacctctagaaaggacat

SEQ ID NO: 32997 - DNA, 33 bp, Homo sapiens
gttattcagccagtcccgaaaagggtaatatcc

SEQ ID NO: 32998 - DNA, 33 bp, Homo sapiens
ccttaccaaaagctaaatgcattgtcagtagta

SEQ ID NO: 32999 - DNA, 33 bp, Homo sapiens
taaatgtttaccataaataaggccacaaataaa

SEQ ID NO: 33000 - DNA, 33 bp, Homo sapiens
tctgccatgtagcaaaagatcagcttacagggc

SEQ ID NO: 33001 - DNA, 33 bp, Homo sapiens
ccctctagaaccaaaccatcaatgcaccaaggc

SEQ ID NO: 33002 - DNA, 51 bp, Homo sapiens
ttttaggacacaaaggtaaagtaggcaaagatctttcaagaacttgtaatt

SEQ ID NO: 33003 - DNA, 33 bp, Homo sapiens
taatacatttttgatacatggcagctgctaaat

SEQ ID NO: 33004 - DNA, 33 bp, Homo sapiens
aaacagtgtgtaggcccctataagtatcatggg

SEQ ID NO: 33005 - DNA, 33 bp, Homo sapiens
ttggcacccactttggacacctttatagtattt

SEQ ID NO: 33006 - DNA, 33 bp, Homo sapiens
gaataggtgaccattacagtttatctctaacta

SEQ ID NO: 33007 - DNA, 33 bp, Homo sapiens
agcggacacctgaagacgaaaaggctgcaggag

SEQ ID NO: 33008 - DNA, 33 bp, Homo sapiens
aaaatcatctgagcagacaaatataactctttt

SEQ ID NO: 33009 - DNA, 33 bp, Homo sapiens
tcttcacaaaaaccacagccaaaaatgtgcctt

SEQ ID NO: 33010 - DNA, 51 bp, Homo sapiens
agttggggagctcttcaaaatataaggctgatcatgaaaaatataatgctc

SEQ ID NO: 33011 - DNA, 33 bp, Homo sapiens
gagaattgtgaaaaagactgccctggctgttgt

SEQ ID NO: 33012 - DNA, 33 bp, Homo sapiens
tcagaggcccatgttaagaaattgtatagaaac

SEQ ID NO: 33013 - DNA, 33 bp, Homo sapiens
acttaaatagctaaaacgacacacaagaaacct

SEQ ID NO: 33014 - DNA, 33 bp, Homo sapiens
aaaggggaatttgcccaacaggagataagtacc

SEQ ID NO: 33015 - DNA, 33 bp, Homo sapiens
aagctgcatactctccaaaatgatttagtatta

SEQ ID NO: 33016 - DNA, 33 bp, Homo sapiens
ttcatcattacccaaactttctgtctgcccttg

SEQ ID NO: 33017 - DNA, 51 bp, Homo sapiens
aatgctaacagtgaaagtcttaggccataaaggtcaaagaagtaaaggtga

SEQ ID NO: 33018 - DNA, 33 bp, Homo sapiens
ttcttaccataataggcagcttattgtcccaca

SEQ ID NO: 33019 - DNA, 33 bp, Homo sapiens
ctcaaaagcagcttaactacgatgtaatggaag

SEQ ID NO: 33020 - DNA, 33 bp, Homo sapiens
catacctggtaaggggcaaagctctctatggaa

SEQ ID NO: 33021 - DNA, 33 bp, Homo sapiens
ctgggcatctcaattaagataaaagcttccctt

SEQ ID NO: 33022 - DNA, 33 bp, Homo sapiens
ttacttaagtgagtgcacaagaaggggctccgt

SEQ ID NO: 33023 - DNA, 33 bp, Homo sapiens
atctgttaccagtatacaaggaagcccatgaac

SEQ ID NO: 33024 - DNA, 33 bp, Homo sapiens
ctgttcagagtctcgcacttagttgatttagct

SEQ ID NO: 33025 - DNA, 33 bp, Homo sapiens
tggttatcaaccccccacagaacacaaagcccc

SEQ ID NO: 33026 - DNA, 33 bp, Homo sapiens
aaaggaatatttgccccatctcttctctcatgt

SEQ ID NO: 33027 - DNA, 33 bp, Homo sapiens
ccttgaggtagaatgaagactcagtgtgttggt

SEQ ID NO: 33028 - DNA, 33 bp, Homo sapiens
tcccattgcttttagacgaagcccagacttgtt

SEQ ID NO: 33029 - DNA, 33 bp, Homo sapiens
cactcgctgattctgaagcttagtacttaggcc

SEQ ID NO: 33030 - DNA, 33 bp, Homo sapiens
aagtttcttgttcatgaagtgatggcaggagga

SEQ ID NO: 33031 - DNA, 33 bp, Homo sapiens
gtgaggaaaaagggtcaatttgcagagatttct

SEQ ID NO: 33032 - DNA, 51 bp, Homo sapiens
tgtcacaaagccagcaccagcaagaacgacaccgagctcccacgctttgtt

SEQ ID NO: 33033 - DNA, 33 bp, Homo sapiens
cagacctcacagaggaagtgtcattttagaagt

SEQ ID NO: 33034 - DNA, 33 bp, Homo sapiens
tgcctattgatgctaaatcctgaagttgatgag

SEQ ID NO: 33035 - DNA, 33 bp, Homo sapiens
ccccacaattacaaaacaaggtctgagtgccac

SEQ ID NO: 33036 - DNA, 33 bp, Homo sapiens
agttcaagatgcggaactgcaaaaattggacaa

SEQ ID NO: 33037 - DNA, 33 bp, Homo sapiens
gtatttttggcgcaacccggaactcctgagtgt

SEQ ID NO: 33038 - DNA, 33 bp, Homo sapiens
actgaagatggaaagaacctggtacccaaatca

SEQ ID NO: 33039 - DNA, 33 bp, Homo sapiens
aatctcacaacagaaagaattcatgagcagcct

SEQ ID NO: 33040 - DNA, 33 bp, Homo sapiens
cttaacttgctaattacaaagacggagattaaa

SEQ ID NO: 33041 - DNA, 33 bp, Homo sapiens
ccttatatgtccaataataaatggcacaatgtg

SEQ ID NO: 33042 - DNA, 33 bp, Homo sapiens
tggggactttctttgcacttgttgagagaaaac

SEQ ID NO: 33043 - DNA, 33 bp, Homo sapiens
attctacagcttcttacatctgcaatagctgtc

SEQ ID NO: 33044 - DNA, 33 bp, Homo sapiens
agtttccgtaaatgtaacgagagggcgtctggc

SEQ ID NO: 33045 - DNA, 33 bp, Homo sapiens
tgtccaatatttatcacgtcttggtgtttcact

SEQ ID NO: 33046 - DNA, 33 bp, Homo sapiens
caaaacaaaactatctcaaacagggtctacttc

SEQ ID NO: 33047 - DNA, 33 bp, Homo sapiens
tgcccaagagtccttacctggaacctctggtct

SEQ ID NO: 33048 - DNA, 33 bp, Homo sapiens
tcctggcctctgtatacggcctttgttagcact

SEQ ID NO: 33049 - DNA, 33 bp, Homo sapiens
catctttcactccacaagtatttgttgaacgtc

SEQ ID NO: 33050 - DNA, 33 bp, Homo sapiens
gaatctggaccagagagatatagaagatgggcc

SEQ ID NO: 33051 - DNA, 33 bp, Homo sapiens
cttgatagctgcagtccagtagcaatagaaaca

SEQ ID NO: 33052 - DNA, 33 bp, Homo sapiens
gctacactgttgagaaaatgcaaattatccact

SEQ ID NO: 33053 - DNA, 33 bp, Homo sapiens
atacctcagtcattaacctagagaactgtttaa

SEQ ID NO: 33054 - DNA, 33 bp, Homo sapiens
ctctgcagaaccctgacgaattcactgagcaaa

SEQ ID NO: 33055 - DNA, 51 bp, Homo sapiens
aactcttcacaaaagggaacatgtacagagtggaactttgccttctattct

SEQ ID NO: 33056 - DNA, 51 bp, Homo sapiens
tgggtaggtacataatactttcaggcccaacaatactggcagtccatttgg

SEQ ID NO: 33057 - DNA, 33 bp, Homo sapiens
tgtctttatcctattccctttcatcttttttag

SEQ ID NO: 33058 - DNA, 33 bp, Homo sapiens
gttttacttgtagttcacttttggctccatcta

SEQ ID NO: 33059 - DNA, 33 bp, Homo sapiens
agtgctgaaaccaggacggatatggaaaaacta

SEQ ID NO: 33060 - DNA, 33 bp, Homo sapiens
catccaggacacagaacacacggttgaatatct

SEQ ID NO: 33061 - DNA, 51 bp, Homo sapiens
aaagatgtctgatagaaattgtgtgcatctctggcttatctgtccatggag

SEQ ID NO: 33062 - DNA, 51 bp, Homo sapiens
cattatgcttttgcttttatggtgccgactcttaagcatgtgcatgaaaaa

SEQ ID NO: 33063 - DNA, 51 bp, Homo sapiens
atttgatatgacacccctgatgaacggtctcaaaatctatgtgactcttcc

SEQ ID NO: 33064 - DNA, 33 bp, Homo sapiens
caaaagaagattataggactgttctttcctttt

SEQ ID NO: 33065 - DNA, 51 bp, Homo sapiens
ctatgtacatgaaatagtgtatgtgcaacctaaaaatctgaataagctgta

SEQ ID NO: 33066 - DNA, 51 bp, Homo sapiens
gctgatatctcaacaggtactttcacatttaggctaactgaaatgtgaggt

SEQ ID NO: 33067 - DNA, 33 bp, Homo sapiens
ttcctgtatgcagaaaaagggcaatgtttaaaa

SEQ ID NO: 33068 - DNA, 33 bp, Homo sapiens
ctgggctgtctacccaacaactcttacagatta

SEQ ID NO: 33069 - DNA, 33 bp, Homo sapiens
ccacagtgattcagaacacccacaatcaccaag

SEQ ID NO: 33070 - DNA, 33 bp, Homo sapiens
catgaactcattatgaacttcatggcttaaaat

SEQ ID NO: 33071 - DNA, 33 bp, Homo sapiens
aatatctacagttacccgaaaaggctattgaat

SEQ ID NO: 33072 - DNA, 51 bp, Homo sapiens
tacatgacattaggtgttgtttttaagcttgtaaatgatgcaaacatttac

SEQ ID NO: 33073 - DNA, 33 bp, Homo sapiens
gcaaggtttgaaagaacggcttcaagaggaaag

SEQ ID NO: 33074 - DNA, 33 bp, Homo sapiens
tatcattttttcatccaaacaatgtagtggaaa

SEQ ID NO: 33075 - DNA, 33 bp, Homo sapiens
ttgatttggttgcaaacagccatagtaaataca

SEQ ID NO: 33076 - DNA, 33 bp, Homo sapiens
gttttgaagagcaaaaatgtctttgaatttggc

SEQ ID NO: 33077 - DNA, 33 bp, Homo sapiens
accaaactacatggaaacaagttgcaggttacc

SEQ ID NO: 33078 - DNA, 33 bp, Homo sapiens
gtaagcatgaacaaaacccttaaagaagatctg

SEQ ID NO: 33079 - DNA, 33 bp, Homo sapiens
tcttacctctacaagacgaatgttcctaaaaca

SEQ ID NO: 33080 - DNA, 33 bp, Homo sapiens
attcaactttccaaaacgttctaaatgtcatga

SEQ ID NO: 33081 - DNA, 33 bp, Homo sapiens
gaaagggtgtttgtaaatatggaggatgtatgg

SEQ ID NO: 33082 - DNA, 33 bp, Homo sapiens
aatgcaattactatcacgccagtctagttttca

SEQ ID NO: 33083 - DNA, 33 bp, Homo sapiens
gtacatcattgtcagaatacctagaaaatattc

SEQ ID NO: 33084 - DNA, 33 bp, Homo sapiens
acccatccattttatacataagcagcctgaagt

SEQ ID NO: 33085 - DNA, 33 bp, Homo sapiens
tctgatgtctggtctacgctacagaatgtttgt

SEQ ID NO: 33086 - DNA, 33 bp, Homo sapiens
gagagttgagtcaaccaggcatcatagaagagg

SEQ ID NO: 33087 - DNA, 33 bp, Homo sapiens
gaaagctgttgagaaacgatacacagggatgtt

SEQ ID NO: 33088 - DNA, 33 bp, Homo sapiens
tggccagaatgagtgaaggagagaatagttttg

SEQ ID NO: 33089 - DNA, 33 bp, Homo sapiens
aattcaatagaaactcaaagatccagactcata

SEQ ID NO: 33090 - DNA, 33 bp, Homo sapiens
ccaagagaagaggagcaaaactaaatacttgat

SEQ ID NO: 33091 - DNA, 33 bp, Homo sapiens
ttacctattggattgacgttgtatctgtaattt

SEQ ID NO: 33092 - DNA, 33 bp, Homo sapiens
ctgtcatcattattccaccagacctagaagctg

SEQ ID NO: 33093 - DNA, 33 bp, Homo sapiens
agaatggataggacgccgatgagtttgaggcag

SEQ ID NO: 33094 - DNA, 51 bp, Homo sapiens
ttgttctattcccttactttctccaaaatatacagtctctgtctctcttct

SEQ ID NO: 33095 - DNA, 51 bp, Homo sapiens
taatagtttctactctcagaacatcaaactgtattaatataatgtgtacct

SEQ ID NO: 33096 - DNA, 51 bp, Homo sapiens
cattttggattcattattcagttgaaatggcaattaattgaaactctctta

SEQ ID NO: 33097 - DNA, 51 bp, Homo sapiens
aaagcgaattattgttcttctcttaccttccgctgctttatcatggttacc

SEQ ID NO: 33098 - DNA, 33 bp, Homo sapiens
gatgttgtggatacaaaaaaacataaggtctca

SEQ ID NO: 33099 - DNA, 33 bp, Homo sapiens
gaatagcatgatgaacgataccttgaattatag

SEQ ID NO: 33100 - DNA, 33 bp, Homo sapiens
gaaagaaattaaggtacagtagaaatcagagat

SEQ ID NO: 33101 - DNA, 33 bp, Homo sapiens
gatgtagtacacactgaactggacattttaaaa

SEQ ID NO: 33102 - DNA, 33 bp, Homo sapiens
attttgtgagagatgacgactgaagggaagaca

SEQ ID NO: 33103 - DNA, 33 bp, Homo sapiens
gtgtgcttgatatgaacaataaagaagataaaa

SEQ ID NO: 33104 - DNA, 33 bp, Homo sapiens
aggagaaaagggatgacgtaaaaattgttgctg

SEQ ID NO: 33105 - DNA, 33 bp, Homo sapiens
tcaggaaaagtgaaaaccactaagtctaaaaga

SEQ ID NO: 33106 - DNA, 33 bp, Homo sapiens
catgtaactaactcaaattcacattaataaaca

SEQ ID NO: 33107 - DNA, 33 bp, Homo sapiens
ccatgaaatcctataacgtggctttggaaataa

SEQ ID NO: 33108 - DNA, 33 bp, Homo sapiens
tattaaagtgccatcacgtagaagagttgttct

SEQ ID NO: 33109 - DNA, 33 bp, Homo sapiens
attgaaaacaaaacaccgtgcagcccatgctgc

SEQ ID NO: 33110 - DNA, 33 bp, Homo sapiens
gtaatctagagccataaaagctgataatgtgaa

SEQ ID NO: 33111 - DNA, 51 bp, Homo sapiens
acaacacaaagtatagaaacttaacagaggctggacttgccatggcataat

SEQ ID NO: 33112 - DNA, 51 bp, Homo sapiens
agcatttcctggcatacaacgaataactaaataaaaagcttcttagaaata

SEQ ID NO: 33113 - DNA, 33 bp, Homo sapiens
caatatgctaaagttacagttaacagagtctgc

SEQ ID NO: 33114 - DNA, 51 bp, Homo sapiens
attatgcaggatttatcccagacatgcaaggagattcaacatacaaaaatc

SEQ ID NO: 33115 - DNA, 33 bp, Homo sapiens
tcactacaataactccagcatattccccatggt

SEQ ID NO: 33116 - DNA, 33 bp, Homo sapiens
tagtcatgatccgttaagtcatgtcattttggg

SEQ ID NO: 33117 - DNA, 33 bp, Homo sapiens
ttaaacacatagaaaacgtactgacaaattccc

SEQ ID NO: 33118 - DNA, 33 bp, Homo sapiens
atacaagaactcaacaacatcaatgaacagcat

SEQ ID NO: 33119 - DNA, 33 bp, Homo sapiens
ttaagagtagaagtcaatactcaatggtgacca

SEQ ID NO: 33120 - DNA, 33 bp, Homo sapiens
ataacttacagtggaacgttctggataaacaac

SEQ ID NO: 33121 - DNA, 33 bp, Homo sapiens
acattatcttgaaatgcagcaatgaatttttct

SEQ ID NO: 33122 - DNA, 33 bp, Homo sapiens
agaatagacccacaacggatgctttagggacaa

SEQ ID NO: 33123 - DNA, 33 bp, Homo sapiens
agagagagagagggaaaggagactctgtttgtt

SEQ ID NO: 33124 - DNA, 33 bp, Homo sapiens
atatcactctactacacgatgctgacagtcagg

SEQ ID NO: 33125 - DNA, 51 bp, Homo sapiens
agaaagttatttcttcaatattctccctttgtaaattatccctattcctat

SEQ ID NO: 33126 - DNA, 33 bp, Homo sapiens
aacagggacagaagagccaatgaatcatattgt

SEQ ID NO: 33127 - DNA, 51 bp, Homo sapiens
tttctcagtagctaagtctcttttacgaggtccaaaataaaatacatttat

SEQ ID NO: 33128 - DNA, 33 bp, Homo sapiens
ctggggttggccataaaagctgacgtcagagca

SEQ ID NO: 33129 - DNA, 33 bp, Homo sapiens
taaagacttgaaattcacacattcaggcattat

SEQ ID NO: 33130 - DNA, 33 bp, Homo sapiens
tgtccagtcaatggaaaagttgtccagtcaact

SEQ ID NO: 33131 - DNA, 33 bp, Homo sapiens
atccctaaagacaaaaatgtgtaaatgctaatc

SEQ ID NO: 33132 - DNA, 33 bp, Homo sapiens
ctagggttaaaaagtaagtggcttccacaccta

SEQ ID NO: 33133 - DNA, 33 bp, Homo sapiens
tataagagccttaccacgaagagctggaagaag

SEQ ID NO: 33134 - DNA, 51 bp, Homo sapiens
ccggcatcatgtaatttttcatcccaccattgaaagccattgtttccgtat

SEQ ID NO: 33135 - DNA, 33 bp, Homo sapiens
cttccagactccacaaaacaatgaagcatatgg

SEQ ID NO: 33136 - DNA, 51 bp, Homo sapiens
cctcaggagtttttagtttgataagcattggagggcaagtgacacaggtga

SEQ ID NO: 33137 - DNA, 33 bp, Homo sapiens
gaaaggctgaaccctacagagtgcatggcatgg

SEQ ID NO: 33138 - DNA, 51 bp, Homo sapiens
gcagtttttaaccttgttgtattgcccttctctattgtcaaattgtcctgt

SEQ ID NO: 33139 - DNA, 51 bp, Homo sapiens
ttccatgtggtttcatgcaccattacagtaatttctgctatttccttctta

SEQ ID NO: 33140 - DNA, 33 bp, Homo sapiens
gaaaccttatcatatcgcacagctttctccttc

SEQ ID NO: 33141 - DNA, 33 bp, Homo sapiens
gtcttaaactcaaacacgcagagagagccctga

SEQ ID NO: 33142 - DNA, 33 bp, Homo sapiens
tagtacctaactgaaacggtcttgagatcattc

SEQ ID NO: 33143 - DNA, 33 bp, Homo sapiens
aattatagcatttttaagtttttatgcatcatt

SEQ ID NO: 33144 - DNA, 33 bp, Homo sapiens
cattctgacttgtagactcaaatattcaactac

SEQ ID NO: 33145 - DNA, 33 bp, Homo sapiens
aacataatcagggaaccatgtttttattaactc

SEQ ID NO: 33146 - DNA, 51 bp, Homo sapiens
tacatggagaaagatcaaagtagctaaaagtcttagaatgtgtgatttaat

SEQ ID NO: 33147 - DNA, 33 bp, Homo sapiens
agctgaggtatgctggaaaaaggcttcaaggca

SEQ ID NO: 33148 - DNA, 33 bp, Homo sapiens
atttaaaagcagtctgcaattaaccattgaata

SEQ ID NO: 33149 - DNA, 33 bp, Homo sapiens
tatattgtgatttagacagaaggatgattttgg

SEQ ID NO: 33150 - DNA, 33 bp, Homo sapiens
aaattgtggtaagaagaatccagtagcatgaac

SEQ ID NO: 33151 - DNA, 33 bp, Homo sapiens
tcaatattcctatctgccaactggaagcagtta

SEQ ID NO: 33152 - DNA, 33 bp, Homo sapiens
tcctgaataggcaccaaataaaatcagaagaca

SEQ ID NO: 33153 - DNA, 33 bp, Homo sapiens
aaaaccagcagttacaaggtaagagttgttcta

SEQ ID NO: 33154 - DNA, 33 bp, Homo sapiens
aaagaaaaacacagtcaaaaattggtatactat

SEQ ID NO: 33155 - DNA, 33 bp, Homo sapiens
ccagcagatgctatgacgaaagctgagagcaga

SEQ ID NO: 33156 - DNA, 33 bp, Homo sapiens
tagttcaagagagtcaataagtaccaaacctct

SEQ ID NO: 33157 - DNA, 33 bp, Homo sapiens
actctgctgttgaccacaccttcagcagacgtg

SEQ ID NO: 33158 - DNA, 51 bp, Homo sapiens
cataaagttcaagagttatacttcaccaattctttttgtcttcagcagaga

SEQ ID NO: 33159 - DNA, 33 bp, Homo sapiens
ttgtattttcagaatcaagggtcaaattttgtg

SEQ ID NO: 33160 - DNA, 33 bp, Homo sapiens
tcctagcagtaccatacaaaattctgctcttaa

SEQ ID NO: 33161 - DNA, 51 bp, Homo sapiens
acatataaataatgaacgccgattacgtgctagcaacaccaacttcatagg

SEQ ID NO: 33162 - DNA, 33 bp, Homo sapiens
acttacatcatcatcaaccggatgatcgcaaag

SEQ ID NO: 33163 - DNA, 51 bp, Homo sapiens
gttgttaaataattcatcacatgtaaagtaacataaccatgaccaacaata

SEQ ID NO: 33164 - DNA, 33 bp, Homo sapiens
tgtaaaatgctttgaaaatgcagactgatgcat

SEQ ID NO: 33165 - DNA, 33 bp, Homo sapiens
atttttcttacaaaaccgtaggccaagaacaca

SEQ ID NO: 33166 - DNA, 33 bp, Homo sapiens
gggcatatcttatgggcaggtgcttttgcttct

SEQ ID NO: 33167 - DNA, 33 bp, Homo sapiens
ggattgtaaagataagaagagaaatggaaatga

SEQ ID NO: 33168 - DNA, 33 bp, Homo sapiens
ataattccataagtaacgggtgaagtcctatga

SEQ ID NO: 33169 - DNA, 51 bp, Homo sapiens
gtatttgaaatttatgaaataagcacgtggcattcttggatagaaatattt

SEQ ID NO: 33170 - DNA, 33 bp, Homo sapiens
gcacataattgtgttcaaaatgttcaattgtgc

SEQ ID NO: 33171 - DNA, 33 bp, Homo sapiens
gattgctgctacttacgatttccagttctgtta

SEQ ID NO: 33172 - DNA, 33 bp, Homo sapiens
gtagaaaaaatacacaaaaggatataggcttac

SEQ ID NO: 33173 - DNA, 33 bp, Homo sapiens
cttctacgacattgcacctaatatctgaggaca

SEQ ID NO: 33174 - DNA, 33 bp, Homo sapiens
caagacttttaacctaacatcaaagaattagct

SEQ ID NO: 33175 - DNA, 33 bp, Homo sapiens
gtgagagttgagaataaatgtaaagaagcctgg

SEQ ID NO: 33176 - DNA, 33 bp, Homo sapiens
ggaactttcctcccaaatggactgtgctgtcct

SEQ ID NO: 33177 - DNA, 33 bp, Homo sapiens
catggaccctaccaaaatttcaaatctactgct

SEQ ID NO: 33178 - DNA, 51 bp, Homo sapiens
tatactgttgctccagtatttaaaagcatagtcattttttgttgttttatt

SEQ ID NO: 33179 - DNA, 33 bp, Homo sapiens
taagccagaggtagaacggtttcttcttgtagc

SEQ ID NO: 33180 - DNA, 51 bp, Homo sapiens
cctatccaccaaatgatactaacaacaatttgtcacttagccattgcaaat

SEQ ID NO: 33181 - DNA, 33 bp, Homo sapiens
agggggttggagtagaataggagggaatgatat

SEQ ID NO: 33182 - DNA, 33 bp, Homo sapiens
gggtttaaagccaataaaggcaaaggcaagagt

SEQ ID NO: 33183 - DNA, 33 bp, Homo sapiens
gggacacatacattgaaattgacataagtagta

SEQ ID NO: 33184 - DNA, 33 bp, Homo sapiens
attgcttcttgctagacgaggcaacagtttctg

SEQ ID NO: 33185 - DNA, 51 bp, Homo sapiens
taggtatgtataatatatttgcaagaatcacctatactacttaactggtgc

SEQ ID NO: 33186 - DNA, 33 bp, Homo sapiens
tacccaatatttgttccatgctataccctgata

SEQ ID NO: 33187 - DNA, 33 bp, Homo sapiens
tcctttctagataggaaaaatcttagagcttcc

SEQ ID NO: 33188 - DNA, 33 bp, Homo sapiens
aaacaaatgcttgtgcaaaagtccagaatgtta

SEQ ID NO: 33189 - DNA, 33 bp, Homo sapiens
gagcagctggtgtatgcactagagaataaaagg

SEQ ID NO: 33190 - DNA, 33 bp, Homo sapiens
actagtccatgctaaggataagatgcctgggaa

SEQ ID NO: 33191 - DNA, 51 bp, Homo sapiens
cttttgtgtgttcatgtacattagaccaaacatacaaatagattatgttga

SEQ ID NO: 33192 - DNA, 51 bp, Homo sapiens
ctctggatggaatgaatcatgtcaccgagtttgccctgatctgttgccctg

SEQ ID NO: 33193 - DNA, 33 bp, Homo sapiens
ctcacatcattgttataaagattgggtgcacgt

SEQ ID NO: 33194 - DNA, 33 bp, Homo sapiens
gtaccatggattgcctcaccttatattttgaag

SEQ ID NO: 33195 - DNA, 33 bp, Homo sapiens
tctaatttaatgtttagcaagtgctgtgaaata

SEQ ID NO: 33196 - DNA, 33 bp, Homo sapiens
caatgataacagactacgtaaccttgagctggc

SEQ ID NO: 33197 - DNA, 33 bp, Homo sapiens
ctccctgacttccaaaaggaaacttgtagccct

SEQ ID NO: 33198 - DNA, 33 bp, Homo sapiens
gtgcagaatctaataccgacttgctcccagtta

SEQ ID NO: 33199 - DNA, 33 bp, Homo sapiens
attcataacctcaacccatctcaacatatcatg

SEQ ID NO: 33200 - DNA, 33 bp, Homo sapiens
cagaaacagagaaccactcacgactttccaata

SEQ ID NO: 33201 - DNA, 33 bp, Homo sapiens
atctgctcagtacatacaggttaagtgctttgt

SEQ ID NO: 33202 - DNA, 33 bp, Homo sapiens
tcctttcgtgctgtgaagggaagaatggaggtg

SEQ ID NO: 33203 - DNA, 51 bp, Homo sapiens
taaaactgaaattcatcagttaaaacgaaaatactccggcttcaaagaacc

SEQ ID NO: 33204 - DNA, 33 bp, Homo sapiens
taaacacctgcaaccacagaactgagcagacct

SEQ ID NO: 33205 - DNA, 33 bp, Homo sapiens
gtaactttggtattaacgaggaccaagttgagg

SEQ ID NO: 33206 - DNA, 33 bp, Homo sapiens
gaacatgatagaacaaaacctgcaaatgtgtct

SEQ ID NO: 33207 - DNA, 33 bp, Homo sapiens
gagttcaaggttacaggaaactgtgattatgcc

SEQ ID NO: 33208 - DNA, 33 bp, Homo sapiens
ctgtagtttggagacacgattatctatcggtga

SEQ ID NO: 33209 - DNA, 33 bp, Homo sapiens
ggaggtgcaggatttccaattatctgaattctg

SEQ ID NO: 33210 - DNA, 33 bp, Homo sapiens
tcaggtgggtttttcaataggagaccaggaagc

SEQ ID NO: 33211 - DNA, 51 bp, Homo sapiens
ggcctacctaatctcactaaaattcaagaatattcaaaatttattttaatt

SEQ ID NO: 33212 - DNA, 33 bp, Homo sapiens
tttaaaatgcaacaaacgtgatttaatcaaact

SEQ ID NO: 33213 - DNA, 51 bp, Homo sapiens
aaggtttgttttctgtcttgttatagaccctttcatcagaatacagaagtt

SEQ ID NO: 33214 - DNA, 33 bp, Homo sapiens
aacttcatgtgttatacctgcaggatgtacata

SEQ ID NO: 33215 - DNA, 33 bp, Homo sapiens
tggacaaagtgtatgaaaaagtttacggctata

SEQ ID NO: 33216 - DNA, 33 bp, Homo sapiens
tctccctgcttaaagcactttactgatttgccc

SEQ ID NO: 33217 - DNA, 33 bp, Homo sapiens
acaaaaacataaacccagatagactacagatct

SEQ ID NO: 33218 - DNA, 33 bp, Homo sapiens
tctatacctttcagaaaagactacaacaaattg

SEQ ID NO: 33219 - DNA, 33 bp, Homo sapiens
tcctgagatgtggcaaatgtcaaagctctgtct

SEQ ID NO: 33220 - DNA, 51 bp, Homo sapiens
tacatataaatattgaataataaataatagctgctgtttgatcaaaatgat

SEQ ID NO: 33221 - DNA, 51 bp, Homo sapiens
ttaaggaataaaaagaattggcaaagcttggtgatacatgggtacttttat

SEQ ID NO: 33222 - DNA, 51 bp, Homo sapiens
ttctttttattccttaaagaatatccgacaatttgctggtttgtataagtt

SEQ ID NO: 33223 - DNA, 33 bp, Homo sapiens
ataagctctagaaaagcagtgtttatcggtatg

SEQ ID NO: 33224 - DNA, 33 bp, Homo sapiens
aacgaaaacaaatttacgatgaaagaatctgtg

SEQ ID NO: 33225 - DNA, 33 bp, Homo sapiens
cattactcacaagtacaattttagaatctatag

SEQ ID NO: 33226 - DNA, 33 bp, Homo sapiens
ttctcacagttaccgacgaacagctctttttca

SEQ ID NO: 33227 - DNA, 33 bp, Homo sapiens
atgtcagtcaaaattgccaaaattatacaagct

SEQ ID NO: 33228 - DNA, 33 bp, Homo sapiens
ctgtctagctctctcccaattcaactgcagttt

SEQ ID NO: 33229 - DNA, 33 bp, Homo sapiens
ggttgcctcttttggcccaaatatactctcagg

SEQ ID NO: 33230 - DNA, 33 bp, Homo sapiens
acggcacctggcggagacagattatactatcaa

SEQ ID NO: 33231 - DNA, 33 bp, Homo sapiens
tggttcaatttaacaacgtttcaaatttacaac

SEQ ID NO: 33232 - DNA, 33 bp, Homo sapiens
ctttttttctgaatacacaggctaattggaaag

SEQ ID NO: 33233 - DNA, 33 bp, Homo sapiens
taaacaaagcaacccacagaggaaacaatctca

SEQ ID NO: 33234 - DNA, 33 bp, Homo sapiens
ggagtcaagtcctagaccttcctgtaactgatt

SEQ ID NO: 33235 - DNA, 33 bp, Homo sapiens
tctggcctcattcctcaagacattttccctttc

SEQ ID NO: 33236 - DNA, 33 bp, Homo sapiens
tttcagaagagtcagaagattggattttgaata

SEQ ID NO: 33237 - DNA, 33 bp, Homo sapiens
gcactggctttgacccacagactggagtttgct

SEQ ID NO: 33238 - DNA, 33 bp, Homo sapiens
taagacttcaagcatcacctttagaagcactct

SEQ ID NO: 33239 - DNA, 33 bp, Homo sapiens
ttacagagtaacctgccagcaatcctatcagca

SEQ ID NO: 33240 - DNA, 51 bp, Homo sapiens
acagtagagacatgtaggaataaatcaactaaaggatatgcaagacttcta

SEQ ID NO: 33241 - DNA, 33 bp, Homo sapiens
cttttttgctaaccaacgaagttactctaaata

SEQ ID NO: 33242 - DNA, 51 bp, Homo sapiens
ttccctgtagcttgtacttttccaaagacatacttttcaatgaaaaactct

SEQ ID NO: 33243 - DNA, 51 bp, Homo sapiens
atagaatatttcagtatagtgactccgaatatctaatacataaagacttga

SEQ ID NO: 33244 - DNA, 33 bp, Homo sapiens
tgttttcattgaaaaggcatcctctaagtgctg

SEQ ID NO: 33245 - DNA, 33 bp, Homo sapiens
tgtttcttgatcccctaaatggcagttacatga

SEQ ID NO: 33246 - DNA, 33 bp, Homo sapiens
gttgagtttgtctcaaaacgtgggatagaggct

SEQ ID NO: 33247 - DNA, 33 bp, Homo sapiens
gttgttaatggaatgcaatttgtcataactaca

SEQ ID NO: 33248 - DNA, 33 bp, Homo sapiens
attaaagtccaataacactattctaggctttac

SEQ ID NO: 33249 - DNA, 33 bp, Homo sapiens
agaaattatttgctccaaagttgtaaaagtaca

SEQ ID NO: 33250 - DNA, 33 bp, Homo sapiens
aactcccaaatcctaacggcttaacacaataaa

SEQ ID NO: 33251 - DNA, 33 bp, Homo sapiens
attgtttacatagacacagaagaagtagatgat

SEQ ID NO: 33252 - DNA, 51 bp, Homo sapiens
tgctaagttgggggagtcattttagatgtcttgcttaattaggacttagga

SEQ ID NO: 33253 - DNA, 33 bp, Homo sapiens
gcttgataggaattgaaattgaggtctgcagct

SEQ ID NO: 33254 - DNA, 33 bp, Homo sapiens
ctgtttataatctcccaccagactcatagaagt

SEQ ID NO: 33255 - DNA, 33 bp, Homo sapiens
gttatatattcaaacacgactttatcattcatg

SEQ ID NO: 33256 - DNA, 33 bp, Homo sapiens
gaaggtgaagtataaaatgcaagctacaacaaa

SEQ ID NO: 33257 - DNA, 33 bp, Homo sapiens
aactatttttaacttacgcaggtccaattaaga

SEQ ID NO: 33258 - DNA, 33 bp, Homo sapiens
tgaaccaaaccaacccaaagttcaacaacttta

SEQ ID NO: 33259 - DNA, 51 bp, Homo sapiens
gattcccgtaggttttgtgtagtgacggcatttatgcttaaaatgtaagtg

SEQ ID NO: 33260 - DNA, 33 bp, Homo sapiens
ggacaaagataataaaaaggagtgactgtcagt

SEQ ID NO: 33261 - DNA, 33 bp, Homo sapiens
gcattttctgagaactaacttaattatgggtca

SEQ ID NO: 33262 - DNA, 33 bp, Homo sapiens
tttttatggttggaaaaactgcggcttgtttca

SEQ ID NO: 33263 - DNA, 33 bp, Homo sapiens
gcttaggaaaaaactaaaagtcatacaagatat

SEQ ID NO: 33264 - DNA, 33 bp, Homo sapiens
gggatgggttgaataaaggttgttgtgaaaggg

SEQ ID NO: 33265 - DNA, 33 bp, Homo sapiens
tttggtgcattccagacctgtctttcattcatg

SEQ ID NO: 33266 - DNA, 33 bp, Homo sapiens
tacaaacatcctttgaagcatggtttataatta

SEQ ID NO: 33267 - DNA, 33 bp, Homo sapiens
gttatgccacctactcagaattccacaacactg

SEQ ID NO: 33268 - DNA, 33 bp, Homo sapiens
ctctcttcctgtgtccaactcctccagcaaagg

SEQ ID NO: 33269 - DNA, 33 bp, Homo sapiens
aaaagtagttgtagtcaatctctcagggtattg

SEQ ID NO: 33270 - DNA, 33 bp, Homo sapiens
taaaaagagaatgaaacgcagtcatttgcaatg

SEQ ID NO: 33271 - DNA, 33 bp, Homo sapiens
aaccaaattatgcatcccccaattcaggaagct

SEQ ID NO: 33272 - DNA, 33 bp, Homo sapiens
atatactaaccccaaaccaccaaccaaattatt

SEQ ID NO: 33273 - DNA, 33 bp, Homo sapiens
aaagccattgagaaacccttcacagcataggca

SEQ ID NO: 33274 - DNA, 33 bp, Homo sapiens
gaagcagtcagtcctacagagagtgagctgagg

SEQ ID NO: 33275 - DNA, 33 bp, Homo sapiens
ttaacagcaggtaaccaccaatgctcctgcctt

SEQ ID NO: 33276 - DNA, 33 bp, Homo sapiens
tgtaatccaacagaaacctctttagtgtgaccc

SEQ ID NO: 33277 - DNA, 33 bp, Homo sapiens
agacataatggaggtacggcattaggtaaatac

SEQ ID NO: 33278 - DNA, 51 bp, Homo sapiens
gtactcttgtaaatacttaacactcaatgcagaaagaattgttacaaagga

SEQ ID NO: 33279 - DNA, 33 bp, Homo sapiens
ttatttgaaccagttgcaaacaagggatctaga

SEQ ID NO: 33280 - DNA, 33 bp, Homo sapiens
cagcatcttgtttaggccagcaggttgtacttt

SEQ ID NO: 33281 - DNA, 33 bp, Homo sapiens
ttgctttggctactgaaaagtgcaagtatgggt

SEQ ID NO: 33282 - DNA, 33 bp, Homo sapiens
tgcagaataacaaaaacgtacgcaaataaatat

SEQ ID NO: 33283 - DNA, 51 bp, Homo sapiens
acatggtcagattgccttaaccacaaagcctcatatgtagcttattcgatc

SEQ ID NO: 33284 - DNA, 33 bp, Homo sapiens
gaaactttaacctttcaaaaaagcaatgatgaa

SEQ ID NO: 33285 - DNA, 33 bp, Homo sapiens
acctcccaggcagaacccaggtcatccacacat

SEQ ID NO: 33286 - DNA, 33 bp, Homo sapiens
tctgtgtattgacaaccattttgagtaactatg

SEQ ID NO: 33287 - DNA, 33 bp, Homo sapiens
ctctccacttttcaaagaattagagtgatcatt

SEQ ID NO: 33288 - DNA, 33 bp, Homo sapiens
cagaaaaatcataataacaatcaattctgggcc

SEQ ID NO: 33289 - DNA, 51 bp, Homo sapiens
ggcccagagttaccaaggttatagaagtagtctgaaggttatactagtgtt

SEQ ID NO: 33290 - DNA, 33 bp, Homo sapiens
taaaatgtattaaagaaacagcccttttaacat

SEQ ID NO: 33291 - DNA, 33 bp, Homo sapiens
attattcaggatgtagcatatgcattagactgg

SEQ ID NO: 33292 - DNA, 33 bp, Homo sapiens
agggtccactcacccccaaacctagttgcaaaa

SEQ ID NO: 33293 - DNA, 33 bp, Homo sapiens
tttgtcgatgctatgactaaaagtaagactatg

SEQ ID NO: 33294 - DNA, 33 bp, Homo sapiens
ttattaagcacttgccacacagtagaagtcgtt

SEQ ID NO: 33295 - DNA, 33 bp, Homo sapiens
acaaaaccacatggatcaaaacagatagtttcc

SEQ ID NO: 33296 - DNA, 33 bp, Homo sapiens
tggaataatggaaaaacgtacaggactcatgaa

SEQ ID NO: 33297 - DNA, 33 bp, Homo sapiens
taatcagctatagaaacgtaacaggtgctctca

SEQ ID NO: 33298 - DNA, 33 bp, Homo sapiens
agaattggatgaaacaagctgaccaaacacgta

SEQ ID NO: 33299 - DNA, 33 bp, Homo sapiens
tatttcaattcccagacgattttccagctaaaa

SEQ ID NO: 33300 - DNA, 33 bp, Homo sapiens
atgtcaaagggaaagtaaaatctgtagaggagt

SEQ ID NO: 33301 - DNA, 33 bp, Homo sapiens
tggaagcttgggagggccaatttagttaaacaa

SEQ ID NO: 33302 - DNA, 33 bp, Homo sapiens
atagtaagcttgacacagtatcagtatctaaga

SEQ ID NO: 33303 - DNA, 33 bp, Homo sapiens
atcactcgaaataagaaagttcacattatttgt

SEQ ID NO: 33304 - DNA, 33 bp, Homo sapiens
ttttgacttctacttacctcaacacaattctac

SEQ ID NO: 33305 - DNA, 33 bp, Homo sapiens
gtatagtgaaaagaacaccgaatttgaaaccag

SEQ ID NO: 33306 - DNA, 33 bp, Homo sapiens
aacaggtggataaatacaggtcagtgagaaaaa

SEQ ID NO: 33307 - DNA, 33 bp, Homo sapiens
caaagtgtcctttcgccctgtcagaccctagag

SEQ ID NO: 33308 - DNA, 33 bp, Homo sapiens
gaaccttaatggccaacgtaatgatagtaagag

SEQ ID NO: 33309 - DNA, 33 bp, Homo sapiens
gcaagtatttgctgaacgagtaaatggataatt

SEQ ID NO: 33310 - DNA, 33 bp, Homo sapiens
ggcagcccgaacttgacgtgaataatgaaggaa

SEQ ID NO: 33311 - DNA, 33 bp, Homo sapiens
ttttaaatttccccccaacatacataccagcca

SEQ ID NO: 33312 - DNA, 33 bp, Homo sapiens
catctccagaactgaaagtaatgaaagaatcca

SEQ ID NO: 33313 - DNA, 33 bp, Homo sapiens
taaatatctattctccactataactaagctact

SEQ ID NO: 33314 - DNA, 51 bp, Homo sapiens
ttattgctccctgcgagctccctacaaactccccggtgcttgtccagtttc

SEQ ID NO: 33315 - DNA, 51 bp, Homo sapiens
atgttttttcagatgatcaaacaccaacctagatgcagcaaaccaaatcat

SEQ ID NO: 33316 - DNA, 33 bp, Homo sapiens
acaatcctgagttcaacggtttcctgagatgtt

SEQ ID NO: 33317 - DNA, 33 bp, Homo sapiens
gctaaattgtacagataaggataatacttgaaa

SEQ ID NO: 33318 - DNA, 33 bp, Homo sapiens
aatgaaatgattcacacggagctggtagcatag

SEQ ID NO: 33319 - DNA, 33 bp, Homo sapiens
tagaattccctaaaaccggaacgataattttgg

SEQ ID NO: 33320 - DNA, 33 bp, Homo sapiens
cacctacatagaataccaggttaaagaaatctg

SEQ ID NO: 33321 - DNA, 33 bp, Homo sapiens
ttatcaactgcactaacgatatttcaagttctc

SEQ ID NO: 33322 - DNA, 33 bp, Homo sapiens
gctttccctttctaatgatctatgcagtataat

SEQ ID NO: 33323 - DNA, 33 bp, Homo sapiens
taaggtatctatggaccgaaagagagaaatgca

SEQ ID NO: 33324 - DNA, 33 bp, Homo sapiens
gtattttgctctgctccatattcaaacctgaat

SEQ ID NO: 33325 - DNA, 33 bp, Homo sapiens
tttctaaaaggctcaaccttaaacacaaaacag

SEQ ID NO: 33326 - DNA, 51 bp, Homo sapiens
tgactttgaagattaacaaagctaaatacgtaaatgatatcaacatgagaa

SEQ ID NO: 33327 - DNA, 51 bp, Homo sapiens
aagtgtgatgatttgtcttttgtaaacctatgaactagaatgactcacata

SEQ ID NO: 33328 - DNA, 51 bp, Homo sapiens
taaacaaatatatataagaagccaacgaaaaacctgtcttaatacttcaaa

SEQ ID NO: 33329 - DNA, 33 bp, Homo sapiens
gtccgataaagctaaaccctttggccaggaaag

SEQ ID NO: 33330 - DNA, 33 bp, Homo sapiens
agagactgcttccagacacctaacctgtgaagc

SEQ ID NO: 33331 - DNA, 51 bp, Homo sapiens
aatacaagcagttattttaatgtcacgatccactgattctcttttattaga

SEQ ID NO: 33332 - DNA, 33 bp, Homo sapiens
gtgtctctcgctgatacatagtcaaacaaatga

SEQ ID NO: 33333 - DNA, 33 bp, Homo sapiens
tcacaattatatggtgaagtctctgtaagaaag

SEQ ID NO: 33334 - DNA, 33 bp, Homo sapiens
aggaaaatgttccaggcagaagaagtagttcat

SEQ ID NO: 33335 - DNA, 51 bp, Homo sapiens
gacatgtgtactgcagggcttccaacttaatattcaggtttctcagcagtc

SEQ ID NO: 33336 - DNA, 33 bp, Homo sapiens
actgactcaccttcatcaggttctgctcctgtg

SEQ ID NO: 33337 - DNA, 33 bp, Homo sapiens
catcccagttctccaacatttgggcattctgta

SEQ ID NO: 33338 - DNA, 51 bp, Homo sapiens
cttcttggagtttctgagacatataaagaaaggtaggtgggagagaaagtg

SEQ ID NO: 33339 - DNA, 33 bp, Homo sapiens
acgtggaagctgggagcccaatcaggcgccatt

SEQ ID NO: 33340 - DNA, 51 bp, Homo sapiens
ttatcattttagactaggaaagatacaacacagaagactctaatactcaga

SEQ ID NO: 33341 - DNA, 33 bp, Homo sapiens
tgacataaaatcactaagtttctggcaaaaaag

SEQ ID NO: 33342 - DNA, 33 bp, Homo sapiens
tgttttcctcctcagaataatccatgcagtacc

SEQ ID NO: 33343 - DNA, 33 bp, Homo sapiens
aggaggcacttccatgaattcaaacaagagctg

SEQ ID NO: 33344 - DNA, 51 bp, Homo sapiens
taattagcattgcttactgtgcattaaaaaacaaggctcagaagaaatgat

SEQ ID NO: 33345 - DNA, 51 bp, Homo sapiens
attgaaaaacaaggctcagaagaaacgatatacctctcataacctttgtgt

SEQ ID NO: 33346 - DNA, 33 bp, Homo sapiens
caaaaatacaggttgaatatctgttggccaaaa

SEQ ID NO: 33347 - DNA, 33 bp, Homo sapiens
cttagttcatattcagacctcaaaacatacttg

SEQ ID NO: 33348 - DNA, 51 bp, Homo sapiens
cattaactgtgacttaactctgagtgtgaacgaaaagtacaagtatttgac

SEQ ID NO: 33349 - DNA, 33 bp, Homo sapiens
taatgaaaattttgggaacagatgatcataatt

SEQ ID NO: 33350 - DNA, 33 bp, Homo sapiens
ttaaaattctttgaaccgtactcaaaattatga

SEQ ID NO: 33351 - DNA, 33 bp, Homo sapiens
ttactccgtgagtgtgaaagtaagatttgatct

SEQ ID NO: 33352 - DNA, 33 bp, Homo sapiens
ttaggttgtacagaagccaagatgtcaggcggg

SEQ ID NO: 33353 - DNA, 33 bp, Homo sapiens
tacgtttaaaaatgcccaataagagtgtttcca

SEQ ID NO: 33354 - DNA, 33 bp, Homo sapiens
acaaccgccctatttgaaaacagcttcaaaaga

SEQ ID NO: 33355 - DNA, 51 bp, Homo sapiens
atcgtggattgtttccatattccaccaggatacttacattggttctcaaca

SEQ ID NO: 33356 - DNA, 33 bp, Homo sapiens
atctaaactaatccacactttgaaggatctaga

SEQ ID NO: 33357 - DNA, 33 bp, Homo sapiens
cagtgcttgtctactcaatgatttgatttcgga

SEQ ID NO: 33358 - DNA, 33 bp, Homo sapiens
taaaggatggtcaggaactcaaccaaaaccaaa

SEQ ID NO: 33359 - DNA, 51 bp, Homo sapiens
tgtgagaatcaaatgagttagttaacataaagcatttaccaccaaatctgg

SEQ ID NO: 33360 - DNA, 51 bp, Homo sapiens
cactaaatgggcattttcatgccaaataaaaatgtaatataatcacacaat

SEQ ID NO: 33361 - DNA, 51 bp, Homo sapiens
agctggagagctgacttagctgccaagatgtcaatgaagccgaaaactcct

SEQ ID NO: 33362 - DNA, 51 bp, Homo sapiens
taatatttgtgtgtactcaaagacacagttcttactcaacatcccaagtaa

SEQ ID NO: 33363 - DNA, 33 bp, Homo sapiens
atttagaagtgactgcaaagtgtcatttcaacc

SEQ ID NO: 33364 - DNA, 33 bp, Homo sapiens
ttgtgtaaagctctaacctacagtggcacaact

SEQ ID NO: 33365 - DNA, 51 bp, Homo sapiens
caagctaaacctctactaattacaacgcctccaaacttatttcatttggca

SEQ ID NO: 33366 - DNA, 33 bp, Homo sapiens
atacccactctcaacaccccagttggtctcttc

SEQ ID NO: 33367 - DNA, 33 bp, Homo sapiens
ttactctccagtgatcaagattagcaatgtgga

SEQ ID NO: 33368 - DNA, 33 bp, Homo sapiens
ttacagaccagggtcaagggtcaaagattttgc

SEQ ID NO: 33369 - DNA, 33 bp, Homo sapiens
aaggaatgtcctagagaaaatcatacacacatg

SEQ ID NO: 33370 - DNA, 51 bp, Homo sapiens
ccttctagaacattcctatctaccaaacgtaatgtagccccagtttaattc

SEQ ID NO: 33371 - DNA, 33 bp, Homo sapiens
gagctgagacccaaaagaggagtcaggcttagt

SEQ ID NO: 33372 - DNA, 33 bp, Homo sapiens
cctctctccattaataactggcttgactacaaa

SEQ ID NO: 33373 - DNA, 33 bp, Homo sapiens
gaggcaattattgtaacgtttctccaaaactat

SEQ ID NO: 33374 - DNA, 33 bp, Homo sapiens
gataacaaaaataatgcaagtacacaagggata

SEQ ID NO: 33375 - DNA, 33 bp, Homo sapiens
catctttcagctgaaggatttacgtgctcctaa

SEQ ID NO: 33376 - DNA, 33 bp, Homo sapiens
ggtgaagcctagaagaatcactgaattgctact

SEQ ID NO: 33377 - DNA, 33 bp, Homo sapiens
gacttaactccttcacacttcaaccttcttatc

SEQ ID NO: 33378 - DNA, 33 bp, Homo sapiens
caagctctccaagtaactgtgatgtgcagatat

SEQ ID NO: 33379 - DNA, 33 bp, Homo sapiens
ggaaactctaggttgccatattttcttttccag

SEQ ID NO: 33380 - DNA, 33 bp, Homo sapiens
tttctattgtaaactaagggagagtcggagcta

SEQ ID NO: 33381 - DNA, 33 bp, Homo sapiens
tgagatttcatttgtaaagccggatggctaagt

SEQ ID NO: 33382 - DNA, 33 bp, Homo sapiens
ggtcctgaggcataaacgggattagtgctctta

SEQ ID NO: 33383 - DNA, 33 bp, Homo sapiens
gtacagatggagaaacggaaataaaatcaatgc

SEQ ID NO: 33384 - DNA, 33 bp, Homo sapiens
gaggagaaaatacagcggaataagactccaggt

SEQ ID NO: 33385 - DNA, 33 bp, Homo sapiens
tcagacacatagccataaactcagaagtagtgt

SEQ ID NO: 33386 - DNA, 33 bp, Homo sapiens
agtttgtatcaggtgccccattgttatccctgt

SEQ ID NO: 33387 - DNA, 33 bp, Homo sapiens
tgctgtaagatcagaacggaaaaagacgagccc

SEQ ID NO: 33388 - DNA, 33 bp, Homo sapiens
aagagaatgataattacaggtgtcacagggctc

SEQ ID NO: 33389 - DNA, 33 bp, Homo sapiens
gtcgtcaggtcttggacagattatttaagttct

SEQ ID NO: 33390 - DNA, 33 bp, Homo sapiens
agagttgttaaacaaacgattgcttcctacata

SEQ ID NO: 33391 - DNA, 33 bp, Homo sapiens
tctctgcgaagacagaatatccctcggctgtgt

SEQ ID NO: 33392 - DNA, 33 bp, Homo sapiens
agggaagttgttgaggaaagacaaagaaacgtg

SEQ ID NO: 33393 - DNA, 33 bp, Homo sapiens
tcctatttgacgtggtaaaagaagttacgctag

SEQ ID NO: 33394 - DNA, 33 bp, Homo sapiens
aaagtgcctgctttaactggatcagctctgttt

SEQ ID NO: 33395 - DNA, 33 bp, Homo sapiens
agttgtgaaaggttcaagtgggtgctgaccctt

SEQ ID NO: 33396 - DNA, 51 bp, Homo sapiens
tgtatttgaagtagcagagagtggtatgtgaatcatttttgattactcagt

SEQ ID NO: 33397 - DNA, 33 bp, Homo sapiens
ttccagctgaccgtgacggacactgccgggcag

SEQ ID NO: 33398 - DNA, 33 bp, Homo sapiens
ccaccagcctggttccaagctaggattaaagag

SEQ ID NO: 33399 - DNA, 33 bp, Homo sapiens
acccaaagaatacaaactgttctactataaaga

SEQ ID NO: 33400 - DNA, 33 bp, Homo sapiens
cattgtcctcttcagagtctcctcaggtacttg

SEQ ID NO: 33401 - DNA, 33 bp, Homo sapiens
tacccatcaaaatggcaatccttaaaatttcaa

SEQ ID NO: 33402 - DNA, 33 bp, Homo sapiens
gttttagcattcagaaaaaaatagccagtaagt

SEQ ID NO: 33403 - DNA, 33 bp, Homo sapiens
acacaagatcacatcacctcactgttctaagta

SEQ ID NO: 33404 - DNA, 33 bp, Homo sapiens
aagcctgagctctttaaagtgaaatatccatca

SEQ ID NO: 33405 - DNA, 33 bp, Homo sapiens
attagctgagaggacacggggaagccactgctg

SEQ ID NO: 33406 - DNA, 33 bp, Homo sapiens
ttctgtacaaagccctcagatcatgtccacctt

SEQ ID NO: 33407 - DNA, 33 bp, Homo sapiens
tcttgtatcttagaaagaatcagtcaacaatgg

SEQ ID NO: 33408 - DNA, 33 bp, Homo sapiens
actgaaatgtaatataaccaaaatgaaacacaa

SEQ ID NO: 33409 - DNA, 33 bp, Homo sapiens
ggtccagttgctcccacatcttagagcctgtca

SEQ ID NO: 33410 - DNA, 33 bp, Homo sapiens
taaacgttagcgaactcacagtaagaaaagaga

SEQ ID NO: 33411 - DNA, 51 bp, Homo sapiens
attagctaattcccatagtcacataggaaagtaggaacacggggatataca

SEQ ID NO: 33412 - DNA, 33 bp, Homo sapiens
aagttacactgtagaactgttcgccagtcttct

SEQ ID NO: 33413 - DNA, 33 bp, Homo sapiens
agcatggaacggagcacggactctgacccatat

SEQ ID NO: 33414 - DNA, 33 bp, Homo sapiens
tggaggtacagaaaggcatgctggaagagtgtt

SEQ ID NO: 33415 - DNA, 51 bp, Homo sapiens
gacaaaaatttgtagggaagcaaataccttcaaggttgagtctttctggtc

SEQ ID NO: 33416 - DNA, 33 bp, Homo sapiens
gggaacgttaatgttacgacaaatctcatggga

SEQ ID NO: 33417 - DNA, 33 bp, Homo sapiens
acctgtggaaaaatgaacacgcactgaacccca

SEQ ID NO: 33418 - DNA, 33 bp, Homo sapiens
gattataatctctctcccctttgtggacttccc

SEQ ID NO: 33419 - DNA, 33 bp, Homo sapiens
atctctgccagcccaacatgtggccagaggatc

SEQ ID NO: 33420 - DNA, 33 bp, Homo sapiens
agataataagtaaacacgatttcaagtgaacag

SEQ ID NO: 33421 - DNA, 33 bp, Homo sapiens
acttggaaaaatacaaagtagagagaccaggtg

SEQ ID NO: 33422 - DNA, 33 bp, Homo sapiens
aattaagttattcacaaacacatgggtgctcag

SEQ ID NO: 33423 - DNA, 33 bp, Homo sapiens
tttttctcatccaagaagatatgtggagtaagc

SEQ ID NO: 33424 - DNA, 33 bp, Homo sapiens
ttccttttgcctccaccagcttcaacactaaga

SEQ ID NO: 33425 - DNA, 33 bp, Homo sapiens
ctttaagaatagtgagaagaactgaattggcaa

SEQ ID NO: 33426 - DNA, 33 bp, Homo sapiens
ggagctgaaaaagcagcccatgaatacggaatc

SEQ ID NO: 33427 - DNA, 33 bp, Homo sapiens
gagggaggtggaagaaaagagccatttgttgag

SEQ ID NO: 33428 - DNA, 33 bp, Homo sapiens
acatcaagaccctgaccgataaaatgcccctta

SEQ ID NO: 33429 - DNA, 33 bp, Homo sapiens
gaagactcagccaaaaaactatcagaactgatt

SEQ ID NO: 33430 - DNA, 51 bp, Homo sapiens
ctttttcagaattcttgaaggaaaacgatacgcaacataattaaattttga

SEQ ID NO: 33431 - DNA, 33 bp, Homo sapiens
actttaagatgatatgaaaatgatacacattca

SEQ ID NO: 33432 - DNA, 33 bp, Homo sapiens
tggtattttcaatgtacgatggatttatctaaa

SEQ ID NO: 33433 - DNA, 51 bp, Homo sapiens
atccctttttacagtcaacttcacaagaatagacaaattcaaaagtatgat

SEQ ID NO: 33434 - DNA, 51 bp, Homo sapiens
atgttaggatggccagatataaccacgtgagaacatagcctggtaagtggt

SEQ ID NO: 33435 - DNA, 33 bp, Homo sapiens
ttgcgtttggtgattacaacagagaattccttg

SEQ ID NO: 33436 - DNA, 33 bp, Homo sapiens
ttcctcatggtcttaagatgtcatttcatctgt

SEQ ID NO: 33437 - DNA, 33 bp, Homo sapiens
tgttcataataggtccacagtaagtaatatttg

SEQ ID NO: 33438 - DNA, 51 bp, Homo sapiens
ttgtggaaaaagatagatcaggtcccacttgaagacaaagttgctctcaac

SEQ ID NO: 33439 - DNA, 33 bp, Homo sapiens
ttcctaatctgtgaaacgagatactagtattac

SEQ ID NO: 33440 - DNA, 33 bp, Homo sapiens
aactcctttagtaccactgaaacttaaggcaaa

SEQ ID NO: 33441 - DNA, 33 bp, Homo sapiens
taaaatgccttctctaccttgtctgctgttgga

SEQ ID NO: 33442 - DNA, 33 bp, Homo sapiens
ctctggtcactaagcacatccaggtgaatgaaa

SEQ ID NO: 33443 - DNA, 33 bp, Homo sapiens
cttaacttcacaagccaaacagtatagagtaat

SEQ ID NO: 33444 - DNA, 33 bp, Homo sapiens
tacaaattgcataaccacctgaaatatcctaag

SEQ ID NO: 33445 - DNA, 33 bp, Homo sapiens
actgaattgctaaggaaaatagcaggcgtcacc

SEQ ID NO: 33446 - DNA, 33 bp, Homo sapiens
aagtctacagtcagaacgtttccatggtgagac

SEQ ID NO: 33447 - DNA, 33 bp, Homo sapiens
acatgggttttccttaaagaagcagcaggtgga

SEQ ID NO: 33448 - DNA, 33 bp, Homo sapiens
aaacaatatgtcaaaggagaggaaataggtatt

SEQ ID NO: 33449 - DNA, 33 bp, Homo sapiens
gagaatagaaagaatcactactacatttgtgct

SEQ ID NO: 33450 - DNA, 33 bp, Homo sapiens
catttgcttgataaacgaacaaatgtttgcatg

SEQ ID NO: 33451 - DNA, 51 bp, Homo sapiens
tttgaactagtccaatctctataacactttcttcatatcatttgacttcat

SEQ ID NO: 33452 - DNA, 51 bp, Homo sapiens
ttcatatcatttgacttcatgatcaaattagagaggtgactgggagaacga

SEQ ID NO: 33453 - DNA, 33 bp, Homo sapiens
atgaactgataataaacggcaagaatactaaat

SEQ ID NO: 33454 - DNA, 33 bp, Homo sapiens
tgctagccagaaggaacagctgtcacaaaaacc

SEQ ID NO: 33455 - DNA, 33 bp, Homo sapiens
cttcccagactaattaagtgagaatctggggga

SEQ ID NO: 33456 - DNA, 33 bp, Homo sapiens
aggagagagaggttgccatcagtgaaccaagat

SEQ ID NO: 33457 - DNA, 33 bp, Homo sapiens
ctcctggcccgctgcgcattcggagtaaagcat

SEQ ID NO: 33458 - DNA, 33 bp, Homo sapiens
acagtacgaggtagggaccaggcattcacatga

SEQ ID NO: 33459 - DNA, 33 bp, Homo sapiens
attagcaatgtacaaactcaaggcactgatctt

SEQ ID NO: 33460 - DNA, 33 bp, Homo sapiens
agtttttcatgacttaccacagggtgacattcc

SEQ ID NO: 33461 - DNA, 51 bp, Homo sapiens
agaactcacttgtgaatcttagtaaataaaggtcaatttaagttagagaaa

SEQ ID NO: 33462 - DNA, 33 bp, Homo sapiens
gaagtgtatctgagcacggaaaccggttgaaac

SEQ ID NO: 33463 - DNA, 33 bp, Homo sapiens
tgcctactacctgtcaccagctcactttatact

SEQ ID NO: 33464 - DNA, 51 bp, Homo sapiens
aagtgtgtacactaaaaagtggatcataactggatgtcgtgagtatgtcat

SEQ ID NO: 33465 - DNA, 33 bp, Homo sapiens
gctgctggagatcgaacgaaatgtttggcaaga

SEQ ID NO: 33466 - DNA, 33 bp, Homo sapiens
tttgcattccacaagcacatatcggtaaggtct

SEQ ID NO: 33467 - DNA, 33 bp, Homo sapiens
tgatggctttaccaaccggagcagaataagaag

SEQ ID NO: 33468 - DNA, 33 bp, Homo sapiens
aacaaatggtgtcttaacaactggatgtttgca

SEQ ID NO: 33469 - DNA, 33 bp, Homo sapiens
gtgaatccgctgctccaagtcaccttttcaacc

SEQ ID NO: 33470 - DNA, 33 bp, Homo sapiens
cacacacacaaaagcacggtaaacagtaaataa

SEQ ID NO: 33471 - DNA, 51 bp, Homo sapiens
cttgaaaatgtggaatatcttgaaaccaggagaagtagaggagtatacaag

SEQ ID NO: 33472 - DNA, 51 bp, Homo sapiens
aatattttaagttaaaacgttcggaagctatgtcagagtcagccaaaatta

SEQ ID NO: 33473 - DNA, 33 bp, Homo sapiens
aataaagaaagctaaacatgaaaaatgctgtgc

SEQ ID NO: 33474 - DNA, 33 bp, Homo sapiens
tgcctagctgtaaccacctcgttttggggaatg

SEQ ID NO: 33475 - DNA, 33 bp, Homo sapiens
tcgttctctgtgccccaacagtgctatatgtag

SEQ ID NO: 33476 - DNA, 33 bp, Homo sapiens
ccccagtatctttgcccaagacttgagtaataa

SEQ ID NO: 33477 - DNA, 33 bp, Homo sapiens
tgctagtactttatgaaatagcctgtgtccctg

SEQ ID NO: 33478 - DNA, 33 bp, Homo sapiens
ccactgctcagctggaaaggacaaactctaggc

SEQ ID NO: 33479 - DNA, 33 bp, Homo sapiens
tgtgggtcccagggtcacaaataaatcctctgc

SEQ ID NO: 33480 - DNA, 33 bp, Homo sapiens
ccttattcatgtccacacttttctgccaatagt

SEQ ID NO: 33481 - DNA, 33 bp, Homo sapiens
cacgtccacagccagaaaaatcagcaaagatcc

SEQ ID NO: 33482 - DNA, 33 bp, Homo sapiens
ttgagccaaaaaaccacagacttcagaaacctc

SEQ ID NO: 33483 - DNA, 33 bp, Homo sapiens
acattttcctgagcccaatagacaagcagattt

SEQ ID NO: 33484 - DNA, 51 bp, Homo sapiens
caatcagcccagagcctggctcccaataacacccacaatacctgttgcatt

SEQ ID NO: 33485 - DNA, 51 bp, Homo sapiens
cagtcagagaaagggggaccaaagccactccgtgtactctcacattcgtca

SEQ ID NO: 33486 - DNA, 33 bp, Homo sapiens
actgcgctgaccaccaacttcacaaagatggtc

SEQ ID NO: 33487 - DNA, 33 bp, Homo sapiens
agggggttccgaagccaatgttcccaaacctga

SEQ ID NO: 33488 - DNA, 33 bp, Homo sapiens
gtttgctccccacctccaggcttctccatccta

SEQ ID NO: 33489 - DNA, 33 bp, Homo sapiens
gtcttaccggttattaccacaatgttaccacct

SEQ ID NO: 33490 - DNA, 33 bp, Homo sapiens
aacaacttagcaaacaacatgcatttatgagag

SEQ ID NO: 33491 - DNA, 33 bp, Homo sapiens
acactctgcttggatcaaaagtcttagcatttt

SEQ ID NO: 33492 - DNA, 33 bp, Homo sapiens
gcagtcactggaatgaacatgcccacagctcag

SEQ ID NO: 33493 - DNA, 33 bp, Homo sapiens
aacaagtgatttgcacgatcagtcaaggtgtgg

SEQ ID NO: 33494 - DNA, 33 bp, Homo sapiens
gatgcgggaacttcagaaaaaaagacactcggc

SEQ ID NO: 33495 - DNA, 33 bp, Homo sapiens
aggaacagagaggcaggaaacaatggtctctaa

SEQ ID NO: 33496 - DNA, 33 bp, Homo sapiens
agactttgcagagatacgcggatgggtcagata

SEQ ID NO: 33497 - DNA, 33 bp, Homo sapiens
ccaaagtgtaactaggcaatcaaatgggaatct

SEQ ID NO: 33498 - DNA, 33 bp, Homo sapiens
gttactactttgaagcaagaggatgtcaagtcc

(The sequence listing continues in the following parts.)

We claim:

1. A method for determining whether an individual has or is susceptible to development or occurrence of a cardiovascular disease or event, wherein the individual is in need of such determination, the method comprising the step of:
(a) detecting a polymorphic variant of a CVDA polymorphism in the individual or detecting a polymorphic variant in strong linkage disequilibrium with a CVDA polymorphism; or
(b) detecting a haplotype comprising a polymorphic variant of the CVDA polymorphism in the individual; or
(c) detecting an allele of a gene comprising the polymorphic variant of the CVDA polymorphism in the individual.

2. The method of claim 1, wherein the polymorphic variant is associated with an increased risk that the individual has or is susceptible to development or occurrence of a cardiovascular disease or event.

3. The method of claim 1, wherein the polymorphic variant is found within a gene selected from the group consisting of: one or more of the genes listed in Table 1 and/or Table 2.

4. The method of claim 1, wherein the detecting step comprises determining which of at least two polymorphic variants exists at a polymorphic site.

5. The method of claim 1, further comprising the step of determining an absolute risk or relative risk ratio based at least in part on the identity of the polymorphic variant.

6. The method of claim 5, wherein the determination of the absolute risk or relative risk ratio is based at least in part on at least one classical risk factor.

7. The method of claim 1, further comprising detecting polymorphic variants of one or more additional CVDA polymorphisms.

8. The method of claim 7, wherein the polymorphic variants constitute a haplotype.

9. The method of claim 8, wherein the haplotype is associated with an increased risk that the individual has or is susceptible to development or occurrence of a cardiovascular disease or event.

10. The method of claim 8, further comprising the step of determining an absolute risk or relative risk ratio based at least in part on the haplotype.

11. The method of claim 10, wherein the determination of the absolute risk or relative risk ratio is based at least in part on at least one classical risk factor.

12. The method of claim 1, wherein the cardiovascular disease or event is a myocardial infarction.

13. The method of claim 1, further comprising the step of determining, based on the identity of the polymorphic variant, that the individual is at increased risk of occurrence of a cardiovascular disease or event.

14. The method of claim 13, further comprising the step of selecting a therapeutic regimen for the individual, wherein the therapeutic regimen is selected based on the increased risk.

15. An isolated polynucleotide or polypeptide encoded by a CVDA gene, wherein said CVDA gene comprises a polymorphic variant of a CVDA polymorphism.

16. A kit comprising a plurality of probes or primers selected to detect one or more polymorphic variants of a CVDA polymorphism or a polymorphism in strong linkage disequilibrium with a CVDA polymorphism, wherein at least 10% of the probes or primers are selected to detect a polymorphism associated with cardiovascular disease.

17. The kit of claim 16, comprising a plurality of allele-specific oligonucleotides.

18. The kit of claim 16, comprising a plurality of oligonucleotides that terminate adjacent to a CVDA polymorphic site.

19. The kit of claim 16, comprising probes or primers selected to detect polymorphic variants at a plurality of different polymorphic sites.

20. The kit of claim 16, comprising a plurality of probes or primers for detecting each of a plurality of polymorphic variants.

21. The kit of claim 16, comprising probes or primers selected to detect one or more haplotypes associated with cardiovascular disease, wherein at least one of said haplotypes comprises a CVDA polymorphic variant.

22. A computer-readable medium on which is stored (i) an identifier for each of a plurality of polymorphisms listed in Tables 1 and 2 or an identifier for each of a plurality of haplotypes listed in Table 1 and (ii) an indicator of the frequency with which at least one polymorphic variant of the polymorphism exists in a plurality of individuals that have experienced a major coronary event or have been diagnosed with cardiovascular disease.

23. A computer-readable medium according to claim 27, further comprising an indicator of the absolute or relative risk for the occurrence of a cardiovascular disease or event in an individual having a disease-associated polymorphic variant of each of the polymorphisms.
